United States Patent Application Publication US 2005/0244851 A1 - sequence listing, part 126

SEQ ID NO: 4916979 - DNA, 25 bp, Homo sapien
aatcgaattctttgggctgatacac

SEQ ID NO: 4916980 - DNA, 25 bp, Homo sapien
aagacaatcgaattctttgggctga

SEQ ID NO: 4916981 - DNA, 25 bp, Homo sapien
ctaagacaatcgaattctttgggct

SEQ ID NO: 4916982 - DNA, 25 bp, Homo sapien
ggcagcaaccagtgtccagatatga

SEQ ID NO: 4916983 - DNA, 25 bp, Homo sapien
catggaaaatgtcaagcaggagggc

SEQ ID NO: 4916984 - DNA, 25 bp, Homo sapien
cccagagttggtgaagataagatac

SEQ ID NO: 4916985 - DNA, 25 bp, Homo sapien
taggagttgtatcctgctggcaatg

SEQ ID NO: 4916986 - DNA, 25 bp, Homo sapien
agactttgggtctgtggtgctctgt

SEQ ID NO: 4916987 - DNA, 25 bp, Homo sapien
tcagctgacagtaatattagcggaa

SEQ ID NO: 4916988 - DNA, 25 bp, Homo sapien
tctgtggtccgggataaagttgcgt

SEQ ID NO: 4916989 - DNA, 25 bp, Homo sapien
ctttgtatgggtgacgagagacttt

SEQ ID NO: 4916990 - DNA, 25 bp, Homo sapien
tcaaacttccctagtgcaaattctg

SEQ ID NO: 4916991 - DNA, 25 bp, Homo sapien
tactaggacgtcaatgggttcctta

SEQ ID NO: 4916992 - DNA, 25 bp, Homo sapien
gtcgagctcagcctactaggacgtc

SEQ ID NO: 4916993 - DNA, 25 bp, Homo sapien
ctcaaaatggatcaacttctttcaa

SEQ ID NO: 4916994 - DNA, 25 bp, Homo sapien
cttgacgtgtatactctgtggaaga

SEQ ID NO: 4916995 - DNA, 25 bp, Homo sapien
aatgctttttaagttcttgacgtgt

SEQ ID NO: 4916996 - DNA, 25 bp, Homo sapien
ttttaagttcttgacgtgtatactc

SEQ ID NO: 4916997 - DNA, 25 bp, Homo sapien
agttcttgacgtgtatactctgtgg

SEQ ID NO: 4916998 - DNA, 25 bp, Homo sapien
tgaacaatatctgattgaacagcat

SEQ ID NO: 4916999 - DNA, 25 bp, Homo sapien
tttattctagcagataatccacatt

SEQ ID NO: 4917000 - DNA, 25 bp, Homo sapien
gaacagcattctagtaatgtagaaa

SEQ ID NO: 4917001 - DNA, 25 bp, Homo sapien
gaaagacaataatttcatatctggc

SEQ ID NO: 4917002 - DNA, 25 bp, Homo sapien
gatggctggaaacaaaatcgtcctc

SEQ ID NO: 4917003 - DNA, 25 bp, Homo sapien
aatctaagatggctggaaacaaaat

SEQ ID NO: 4917004 - DNA, 25 bp, Homo sapien
taagatggctggaaacaaaatcgtc

SEQ ID NO: 4917005 - DNA, 25 bp, Homo sapien
tggctggaaacaaaatcgtcctcat

SEQ ID NO: 4917006 - DNA, 25 bp, Homo sapien
ccacagttctgctcactggcatgta

SEQ ID NO: 4917007 - DNA, 25 bp, Homo sapien
acagttctgctcactggcatgtaca

SEQ ID NO: 4917008 - DNA, 25 bp, Homo sapien
tccacagttctgctcactggcatgt

SEQ ID NO: 4917009 - DNA, 25 bp, Homo sapien
gttctgctcactggcatgtacacca

SEQ ID NO: 4917010 - DNA, 25 bp, Homo sapien
tgctgctgcttgaatctcattccaa

SEQ ID NO: 4917011 - DNA, 25 bp, Homo sapien
tattattaccactctctgaatatca

SEQ ID NO: 4917012 - DNA, 25 bp, Homo sapien
gttgatatgcttaacataccttgat

SEQ ID NO: 4917013 - DNA, 25 bp, Homo sapien
cactctctgaatatcactgttgttg

SEQ ID NO: 4917014 - DNA, 25 bp, Homo sapien
caccagtggaagaaactccagtgtg

SEQ ID NO: 4917015 - DNA, 25 bp, Homo sapien
gatcctttccaaccataagcgtgca

SEQ ID NO: 4917016 - DNA, 25 bp, Homo sapien
ttatttcagcatactcggtcatcag

SEQ ID NO: 4917017 - DNA, 25 bp, Homo sapien
agctttgtcaagaaggatcctttcc

SEQ ID NO: 4917018 - DNA, 25 bp, Homo sapien
gtgtctgcaagatgattcgaagaat

SEQ ID NO: 4917019 - DNA, 25 bp, Homo sapien
taattaaagctgaagagcgatgctc

SEQ ID NO: 4917020 - DNA, 25 bp, Homo sapien
caagatgattcgaagaatgagaaga

SEQ ID NO: 4917021 - DNA, 25 bp, Homo sapien
ctgaagagcgatgctcattagtgtc

SEQ ID NO: 4917022 - DNA, 25 bp, Homo sapien
cttcgttcatcattaagttttgaaa

SEQ ID NO: 4917023 - DNA, 25 bp, Homo sapien
cgtaattcttcgttcatcattaagt

SEQ ID NO: 4917024 - DNA, 25 bp, Homo sapien
aaaatatttttggatttgtcgatca

SEQ ID NO: 4917025 - DNA, 25 bp, Homo sapien
ggaaaacgtaattcttcgttcatca

SEQ ID NO: 4917026 - DNA, 25 bp, Homo sapien
cttgaaggaactgtagggtagcttc

SEQ ID NO: 4917027 - DNA, 25 bp, Homo sapien
ctggccttgagcaacaggtgtgtat

SEQ ID NO: 4917028 - DNA, 25 bp, Homo sapien
gtgactttaggctcttctatcaagg

SEQ ID NO: 4917029 - DNA, 25 bp, Homo sapien
gccttttggcaatctgtttagtgac

SEQ ID NO: 4917030 - DNA, 25 bp, Homo sapien
ctggaatccccttttctgtcccctg

SEQ ID NO: 4917031 - DNA, 25 bp, Homo sapien
agctgtgcaattcttacttctctct

SEQ ID NO: 4917032 - DNA, 25 bp, Homo sapien
tgctggaatccccttttctgtcccc

SEQ ID NO: 4917033 - DNA, 25 bp, Homo sapien
gtgcaattcttacttctctctcagg

SEQ ID NO: 4917034 - DNA, 25 bp, Homo sapien
caatgccaagaaacaatgcggcagt

SEQ ID NO: 4917035 - DNA, 25 bp, Homo sapien
gaaacaatgcggcagtttctaaatt

SEQ ID NO: 4917036 - DNA, 25 bp, Homo sapien
aagcaatgccaagaaacaatgcggc

SEQ ID NO: 4917037 - DNA, 25 bp, Homo sapien
tgccaagaaacaatgcggcagtttc

SEQ ID NO: 4917038 - DNA, 25 bp, Homo sapien
tgggcgtgttatcgcaggaagtcct

SEQ ID NO: 4917039 - DNA, 25 bp, Homo sapien
cggcgacacaacaggagctgcgtgt

SEQ ID NO: 4917040 - DNA, 25 bp, Homo sapien
tgtgtcgctggcgttcgctctcgca

SEQ ID NO: 4917041 - DNA, 25 bp, Homo sapien
tcagaactgcagatcaggaacagaa

SEQ ID NO: 4917042 - DNA, 25 bp, Homo sapien
ttcccaagaggtacaatgccaagtg

SEQ ID NO: 4917043 - DNA, 25 bp, Homo sapien
agattcccaagaggtacaatgccaa

SEQ ID NO: 4917044 - DNA, 25 bp, Homo sapien
gattcccaagaggtacaatgccaag

SEQ ID NO: 4917045 - DNA, 25 bp, Homo sapien
cccaagaggtacaatgccaagtgtc

SEQ ID NO: 4917046 - DNA, 25 bp, Homo sapien
gctttttcgttagtacctgtctgag

SEQ ID NO: 4917047 - DNA, 25 bp, Homo sapien
ggcaaacatcgctgtccctccaaat

SEQ ID NO: 4917048 - DNA, 25 bp, Homo sapien
gtgggagctgtttgaagtgcaaagc

SEQ ID NO: 4917049 - DNA, 25 bp, Homo sapien
taactccaggattataggaccccag

SEQ ID NO: 4917050 - DNA, 25 bp, Homo sapien
cagacttcctctgcgatgcggttga

SEQ ID NO: 4917051 - DNA, 25 bp, Homo sapien
cagcggtgggacatccaagcggaca

SEQ ID NO: 4917052 - DNA, 25 bp, Homo sapien
cggtgattaaatgcctgacagcggt

SEQ ID NO: 4917053 - DNA, 25 bp, Homo sapien
caagcggacagacgctttgccttct

SEQ ID NO: 4917054 - DNA, 25 bp, Homo sapien
cagcttggccgagcggtctgtgccc

SEQ ID NO: 4917055 - DNA, 25 bp, Homo sapien
cgcctcagagcggctcaggacagct

SEQ ID NO: 4917056 - DNA, 25 bp, Homo sapien
ctcaggacagcttggccgagcggtc

SEQ ID NO: 4917057 - DNA, 25 bp, Homo sapien
gcctcagagcggctcaggacagctt

SEQ ID NO: 4917058 - DNA, 25 bp, Homo sapien
ggcgggtgtcgcatcccttggtgca

SEQ ID NO: 4917059 - DNA, 25 bp, Homo sapien
aggcgggtgtcgcatcccttggtgc

SEQ ID NO: 4917060 - DNA, 25 bp, Homo sapien
gcgggtgtcgcatcccttggtgcac

SEQ ID NO: 4917061 - DNA, 25 bp, Homo sapien
taatccaagatcaactctgcaaaca

SEQ ID NO: 4917062 - DNA, 25 bp, Homo sapien
gccaccatctttcgggctgccgagg

SEQ ID NO: 4917063 - DNA, 25 bp, Homo sapien
caacagaagacggttcatggctttg

SEQ ID NO: 4917064 - DNA, 25 bp, Homo sapien
agatcaactctgcaaacaacagaag

SEQ ID NO: 4917065 - DNA, 25 bp, Homo sapien
ggtggcgctttcctccgcgaaggct

SEQ ID NO: 4917066 - DNA, 25 bp, Homo sapien
aactgacgtaatgcgcggagactga

SEQ ID NO: 4917067 - DNA, 25 bp, Homo sapien
cgaaggctcctttgatattaatagt

SEQ ID NO: 4917068 - DNA, 25 bp, Homo sapien
gtgttggtgtcttgaaactgacgta

SEQ ID NO: 4917069 - DNA, 25 bp, Homo sapien
gcaaaatgtgcagccgccgatctac

SEQ ID NO: 4917070 - DNA, 25 bp, Homo sapien
ttttccccggtatgttgccgaagca

SEQ ID NO: 4917071 - DNA, 25 bp, Homo sapien
tccacaggtcatcaatcacaaattt

SEQ ID NO: 4917072 - DNA, 25 bp, Homo sapien
gatctaccaatagggccatttccgt

SEQ ID NO: 4917073 - DNA, 25 bp, Homo sapien
ctgagtcatacccacgaagctgccc

SEQ ID NO: 4917074 - DNA, 25 bp, Homo sapien
tctgagtcatacccacgaagctgcc

SEQ ID NO: 4917075 - DNA, 25 bp, Homo sapien
cggaatgtttctgcctgtgtgctct

SEQ ID NO: 4917076 - DNA, 25 bp, Homo sapien
aggatgaaggtaccgcttcctattt

SEQ ID NO: 4917077 - DNA, 25 bp, Homo sapien
tgctttttcggaatgtttctgcctg

SEQ ID NO: 4917078 - DNA, 25 bp, Homo sapien
tgaaggtaccgcttcctatttgtat

SEQ ID NO: 4917079 - DNA, 25 bp, Homo sapien
cagggcgttgcttctaaggctttga

SEQ ID NO: 4917080 - DNA, 25 bp, Homo sapien
gggcgttgcttctaaggctttgaag

SEQ ID NO: 4917081 - DNA, 25 bp, Homo sapien
ggcgttgcttctaaggctttgaagc

SEQ ID NO: 4917082 - DNA, 25 bp, Homo sapien
agggcgttgcttctaaggctttgaa

SEQ ID NO: 4917083 - DNA, 25 bp, Homo sapien
gattcatgaaaagcttaaaccgata

SEQ ID NO: 4917084 - DNA, 25 bp, Homo sapien
ccacaactgattcatgaaaagctta

SEQ ID NO: 4917085 - DNA, 25 bp, Homo sapien
ttttgagcttccaagaattacttca

SEQ ID NO: 4917086 - DNA, 25 bp, Homo sapien
ccgatagtaagtcatttgatcaagt

SEQ ID NO: 4917087 - DNA, 25 bp, Homo sapien
caggaactgagatcccatgatcctg

SEQ ID NO: 4917088 - DNA, 25 bp, Homo sapien
tcctgagtgagtccgtggttagatg

SEQ ID NO: 4917089 - DNA, 25 bp, Homo sapien
cacggatactggtttccttgcaggg

SEQ ID NO: 4917090 - DNA, 25 bp, Homo sapien
ctgagatcccatgatcctgagtgag

SEQ ID NO: 4917091 - DNA, 25 bp, Homo sapien
cacactcttgaattctgcgtcatag

SEQ ID NO: 4917092 - DNA, 25 bp, Homo sapien
ctgacaaagaagtcgcaatggtttg

SEQ ID NO: 4917093 - DNA, 25 bp, Homo sapien
agtgtggattgcaccgctcaatcaa

SEQ ID NO: 4917094 - DNA, 25 bp, Homo sapien
gcaggagataaccacgctaacgggt

SEQ ID NO: 4917095 - DNA, 25 bp, Homo sapien
taggatcggcgattcccatatgatg

SEQ ID NO: 4917096 - DNA, 25 bp, Homo sapien
ctcaaagctgatgtaggatcggcga

SEQ ID NO: 4917097 - DNA, 25 bp, Homo sapien
tatgatgcccttggatgctacgctg

SEQ ID NO: 4917098 - DNA, 25 bp, Homo sapien
gctacgctggtgcttagccctggct

SEQ ID NO: 4917099 - DNA, 25 bp, Homo sapien
aggccacagagttctttacaagcta

SEQ ID NO: 4917100 - DNA, 25 bp, Homo sapien
gccacagagttctttacaagctaaa

SEQ ID NO: 4917101 - DNA, 25 bp, Homo sapien
aaggtaatgttattcaggccacaga

SEQ ID NO: 4917102 - DNA, 25 bp, Homo sapien
taatgttattcaggccacagagttc

SEQ ID NO: 4917103 - DNA, 25 bp, Homo sapien
gtttctgatgttcaacttggaaagg

SEQ ID NO: 4917104 - DNA, 25 bp, Homo sapien
ggcaccactgaaggcgccgcgtctg

SEQ ID NO: 4917105 - DNA, 25 bp, Homo sapien
tctgggaagtctgctcttttcacag

SEQ ID NO: 4917106 - DNA, 25 bp, Homo sapien
ggttttgcctgctggcttacatgaa

SEQ ID NO: 4917107 - DNA, 25 bp, Homo sapien
tcagcagttcacaccaagcataagg

SEQ ID NO: 4917108 - DNA, 25 bp, Homo sapien
gatttcttctggttccgctgtcacg

SEQ ID NO: 4917109 - DNA, 25 bp, Homo sapien
gaacaagtggtgacagctaccgtct

SEQ ID NO: 4917110 - DNA, 25 bp, Homo sapien
gctaccgtctgggagaaaactcaat

SEQ ID NO: 4917111 - DNA, 25 bp, Homo sapien
tttcttgatgggccaaaggaagccc

SEQ ID NO: 4917112 - DNA, 25 bp, Homo sapien
ttcttgatgggccaaaggaagccca

SEQ ID NO: 4917113 - DNA, 25 bp, Homo sapien
aagagctttcttgatgggccaaagg

SEQ ID NO: 4917114 - DNA, 25 bp, Homo sapien
tctgaaagagctttcttgatgggcc

SEQ ID NO: 4917115 - DNA, 25 bp, Homo sapien
gagagggcatgaaggggagagatga

SEQ ID NO: 4917116 - DNA, 25 bp, Homo sapien
aagagagagggcatgaaggggagag

SEQ ID NO: 4917117 - DNA, 25 bp, Homo sapien
gagagagggcatgaaggggagagat

SEQ ID NO: 4917118 - DNA, 25 bp, Homo sapien
ctgtaagagagagggcatgaagggg

SEQ ID NO: 4917119 - DNA, 25 bp, Homo sapien
tgactcagctgaaaacagggagctc

SEQ ID NO: 4917120 - DNA, 25 bp, Homo sapien
gactcagctgaaaacagggagctcg

SEQ ID NO: 4917121 - DNA, 25 bp, Homo sapien
tcaaagaagcgctcggctggagtac

SEQ ID NO: 4917122 - DNA, 25 bp, Homo sapien
tttggatccctgaactgtccctggc

SEQ ID NO: 4917123 - DNA, 25 bp, Homo sapien
cctcttttgaagcaccatggtagcc

SEQ ID NO: 4917124 - DNA, 25 bp, Homo sapien
ccaggatgcttttcagcggctgcca

SEQ ID NO: 4917125 - DNA, 25 bp, Homo sapien
tgtctccaagaagctacaaaaagca

SEQ ID NO: 4917126 - DNA, 25 bp, Homo sapien
gttttgaatgcgacaccaggctctt

SEQ ID NO: 4917127 - DNA, 25 bp, Homo sapien
tccatgtaggatcaattgcttcttc

SEQ ID NO: 4917128 - DNA, 25 bp, Homo sapien
ggtatagctgcgaagacaaatttgt

SEQ ID NO: 4917129 - DNA, 25 bp, Homo sapien
ggatggaggttctaagagtattaca

SEQ ID NO: 4917130 - DNA, 25 bp, Homo sapien
tcagcagatactgctaatacagtca

SEQ ID NO: 4917131 - DNA, 25 bp, Homo sapien
caatattgatcttgctccaagatgc

SEQ ID NO: 4917132 - DNA, 25 bp, Homo sapien
gctaatacagtcagtagggatggag

SEQ ID NO: 4917133 - DNA, 25 bp, Homo sapien
ttggtgaaagagaaaagctgccttc

SEQ ID NO: 4917134 - DNA, 25 bp, Homo sapien
caatgattctgctttgtcagtttca

SEQ ID NO: 4917135 - DNA, 25 bp, Homo sapien
tgattctgctttgtcagtttcactt

SEQ ID NO: 4917136 - DNA, 25 bp, Homo sapien
tttcactttggtgaaagagaaaagc

SEQ ID NO: 4917137 - DNA, 25 bp, Homo sapien
cccctagagttgtgctttcggatct

SEQ ID NO: 4917138 - DNA, 25 bp, Homo sapien
tcggatcttggcaacatccatcctg

SEQ ID NO: 4917139 - DNA, 25 bp, Homo sapien
cagtaactggttgtaagggctcctt

SEQ ID NO: 4917140 - DNA, 25 bp, Homo sapien
ttccagtaactggttgtaagggctc

SEQ ID NO: 4917141 - DNA, 25 bp, Homo sapien
ccatggcaaagccacatgcaagtct

SEQ ID NO: 4917142 - DNA, 25 bp, Homo sapien
aataagattccggttcaataagcaa

SEQ ID NO: 4917143 - DNA, 25 bp, Homo sapien
cacatgcaagtcttgttgggggcag

SEQ ID NO: 4917144 - DNA, 25 bp, Homo sapien
ataaatgagtgttcaccatggcaaa

SEQ ID NO: 4917145 - DNA, 25 bp, Homo sapien
taaggacttggcatggtcagatttt

SEQ ID NO: 4917146 - DNA, 25 bp, Homo sapien
ctccggtggttggaatttatcctca

SEQ ID NO: 4917147 - DNA, 25 bp, Homo sapien
ggattttaagtaaggacttggcatg

SEQ ID NO: 4917148 - DNA, 25 bp, Homo sapien
gctgtggaccttctgaaggatttta

SEQ ID NO: 4917149 - DNA, 25 bp, Homo sapien
tatctcgacttcaagtgtcttcttg

SEQ ID NO: 4917150 - DNA, 25 bp, Homo sapien
aaaactgaatcgcaaagcatttgcc

SEQ ID NO: 4917151 - DNA, 25 bp, Homo sapien
ttctggagtatctcgacttcaagtg

SEQ ID NO: 4917152 - DNA, 25 bp, Homo sapien
cagattcgtagaagagggttccttt

SEQ ID NO: 4917153 - DNA, 25 bp, Homo sapien
actctggatggtttctctctttgca

SEQ ID NO: 4917154 - DNA, 25 bp, Homo sapien
gtactctggatggtttctctctttg

SEQ ID NO: 4917155 - DNA, 25 bp, Homo sapien
ttctctctttgcagagacattccct

SEQ ID NO: 4917156 - DNA, 25 bp, Homo sapien
ccctgtactctggatggtttctctc

SEQ ID NO: 4917157 - DNA, 25 bp, Homo sapien
tagcagaggttgtatatttgagcct

SEQ ID NO: 4917158 - DNA, 25 bp, Homo sapien
agcagaggttgtatatttgagcctc

SEQ ID NO: 4917159 - DNA, 25 bp, Homo sapien
gcagaggttgtatatttgagcctct

SEQ ID NO: 4917160 - DNA, 25 bp, Homo sapien
atagcagaggttgtatatttgagcc

SEQ ID NO: 4917161 - DNA, 25 bp, Homo sapien
tttccagaaatgattacttctatgc

SEQ ID NO: 4917162 - DNA, 25 bp, Homo sapien
ttctatgcagattcttgctgctctc

SEQ ID NO: 4917163 - DNA, 25 bp, Homo sapien
gcagatgccactaagtaatctggat

SEQ ID NO: 4917164 - DNA, 25 bp, Homo sapien
tgccactaagtaatctggatttcca

SEQ ID NO: 4917165 - DNA, 25 bp, Homo sapien
taatgtgggttctgagacctggaca

SEQ ID NO: 4917166 - DNA, 25 bp, Homo sapien
tagccacactggtactagaagagat

SEQ ID NO: 4917167 - DNA, 25 bp, Homo sapien
gcccagtcgtttcagtgccagaact

SEQ ID NO: 4917168 - DNA, 25 bp, Homo sapien
gacctggacagggactaaactcaaa

SEQ ID NO: 4917169 - DNA, 25 bp, Homo sapien
caaacttgatatatgggtctcagaa

SEQ ID NO: 4917170 - DNA, 25 bp, Homo sapien
ttccagacttcactacttttgccat

SEQ ID NO: 4917171 - DNA, 25 bp, Homo sapien
gtctcagaatcacttaaaggaaagt

SEQ ID NO: 4917172 - DNA, 25 bp, Homo sapien
acttttgccatagctctatatctca

SEQ ID NO: 4917173 - DNA, 25 bp, Homo sapien
taaactcttctatcttaatctttct

SEQ ID NO: 4917174 - DNA, 25 bp, Homo sapien
tgaaaagccttcacttttctcctgc

SEQ ID NO: 4917175 - DNA, 25 bp, Homo sapien
tcttaatctttctagttctcttcat

SEQ ID NO: 4917176 - DNA, 25 bp, Homo sapien
ttttctcctgcatgaacatatattt

SEQ ID NO: 4917177 - DNA, 25 bp, Homo sapien
gatgatagcctttatgcatatctga

SEQ ID NO: 4917178 - DNA, 25 bp, Homo sapien
tcaaaaagtattcagagcaaggctt

SEQ ID NO: 4917179 - DNA, 25 bp, Homo sapien
caaaaagtattcagagcaaggcttc

SEQ ID NO: 4917180 - DNA, 25 bp, Homo sapien
agatgatagcctttatgcatatctg

SEQ ID NO: 4917181 - DNA, 25 bp, Homo sapien
ttgtagtagctatgatgaaaacctt

SEQ ID NO: 4917182 - DNA, 25 bp, Homo sapien
tgaagaaaggtgcaacagttggaga

SEQ ID NO: 4917183 - DNA, 25 bp, Homo sapien
gcccagagctactggacctcctgtt

SEQ ID NO: 4917184 - DNA, 25 bp, Homo sapien
gtagaagcccgtatctttgaagaaa

SEQ ID NO: 4917185 - DNA, 25 bp, Homo sapien
aggccagagactccatggatctggt

SEQ ID NO: 4917186 - DNA, 25 bp, Homo sapien
gccagagactccatggatctggttg

SEQ ID NO: 4917187 - DNA, 25 bp, Homo sapien
ttagccacgtagaggccagagactc

SEQ ID NO: 4917188 - DNA, 25 bp, Homo sapien
ggccagagactccatggatctggtt

SEQ ID NO: 4917189 - DNA, 25 bp, Homo sapien
tgtccatattgggttaaaagttgtc

SEQ ID NO: 4917190 - DNA, 25 bp, Homo sapien
catatcttgtccatattgggttaaa

SEQ ID NO: 4917191 - DNA, 25 bp, Homo sapien
cagcctgaatttgccaagccttctg

SEQ ID NO: 4917192 - DNA, 25 bp, Homo sapien
gtccgacaaactattacatgttctg

SEQ ID NO: 4917193 - DNA, 25 bp, Homo sapien
acctgggtagattcataaatgattg

SEQ ID NO: 4917194 - DNA, 25 bp, Homo sapien
caaaataggtaatagttcacctggg

SEQ ID NO: 4917195 - DNA, 25 bp, Homo sapien
taaggtggtctacagtgcagtgcca

SEQ ID NO: 4917196 - DNA, 25 bp, Homo sapien
gtgctgcttaacaacagtcaatacc

SEQ ID NO: 4917197 - DNA, 25 bp, Homo sapien
ttttcttgggatagctctgagtcat

SEQ ID NO: 4917198 - DNA, 25 bp, Homo sapien
tttcttgggatagctctgagtcatt

SEQ ID NO: 4917199 - DNA, 25 bp, Homo sapien
ctttttcttgggatagctctgagtc

SEQ ID NO: 4917200 - DNA, 25 bp, Homo sapien
tgtccagcgttgcatctccacagct

SEQ ID NO: 4917201 - DNA, 25 bp, Homo sapien
tcttcccaagggtcttgaccaactg

SEQ ID NO: 4917202 - DNA, 25 bp, Homo sapien
aactggctttccgttgtcttccaca

SEQ ID NO: 4917203 - DNA, 25 bp, Homo sapien
cacacccatttcatgtccagcgttg

SEQ ID NO: 4917204 - DNA, 25 bp, Homo sapien
tctttgacattgatggctggttcaa

SEQ ID NO: 4917205 - DNA, 25 bp, Homo sapien
aatgactcaggatactgtctttgac

SEQ ID NO: 4917206 - DNA, 25 bp, Homo sapien
gctggttcaaagcacacacccacat

SEQ ID NO: 4917207 - DNA, 25 bp, Homo sapien
tttttaacccttgcatttgatctgg

SEQ ID NO: 4917208 - DNA, 25 bp, Homo sapien
aattcaactaccctacagcgaaaag

SEQ ID NO: 4917209 - DNA, 25 bp, Homo sapien
tgagaattcaactaccctacagcga

SEQ ID NO: 4917210 - DNA, 25 bp, Homo sapien
tatgaattgagaattcaactaccct

SEQ ID NO: 4917211 - DNA, 25 bp, Homo sapien
ttactgtattatgaattgagaattc

SEQ ID NO: 4917212 - DNA, 25 bp, Homo sapien
ttcagcaacaccttcggcagggaga

SEQ ID NO: 4917213 - DNA, 25 bp, Homo sapien
tagggaggagccgtcttcgctttgc

SEQ ID NO: 4917214 - DNA, 25 bp, Homo sapien
acaccttcggcagggagatcaactt

SEQ ID NO: 4917215 - DNA, 25 bp, Homo sapien
gagccgtcttcgctttgcacatttt

SEQ ID NO: 4917216 - DNA, 25 bp, Homo sapien
caaggggcaattccattaaccatct

SEQ ID NO: 4917217 - DNA, 25 bp, Homo sapien
actattgacgtcaggaggggagaca

SEQ ID NO: 4917218 - DNA, 25 bp, Homo sapien
cctgactgatcattttactattgac

SEQ ID NO: 4917219 - DNA, 25 bp, Homo sapien
attcaaggggcaattccattaacca

SEQ ID NO: 4917220 - DNA, 25 bp, Homo sapien
ctgtccgattttgattgtagaaaca

SEQ ID NO: 4917221 - DNA, 25 bp, Homo sapien
gaaacagaaggattagaatgaggga

SEQ ID NO: 4917222 - DNA, 25 bp, Homo sapien
ccgattttgattgtagaaacagaag

SEQ ID NO: 4917223 - DNA, 25 bp, Homo sapien
cagaaggattagaatgagggaatgc

SEQ ID NO: 4917224 - DNA, 25 bp, Homo sapien
tcctttctccaatctggcaaatcca

SEQ ID NO: 4917225 - DNA, 25 bp, Homo sapien
tctcctttctccaatctggcaaatc

SEQ ID NO: 4917226 - DNA, 25 bp, Homo sapien
ccactggagaaaactgggaactggc

SEQ ID NO: 4917227 - DNA, 25 bp, Homo sapien
aaaactgggaactggcttgtggcca

SEQ ID NO: 4917228 - DNA, 25 bp, Homo sapien
gaaatgatttttgcgctatgcctga

SEQ ID NO: 4917229 - DNA, 25 bp, Homo sapien
cgctctaacctctggtagggttggg

SEQ ID NO: 4917230 - DNA, 25 bp, Homo sapien
ttgcgctatgcctgatttctgtatc

SEQ ID NO: 4917231 - DNA, 25 bp, Homo sapien
tctgtatctctttcaattcgctcta

SEQ ID NO: 4917232 - DNA, 25 bp, Homo sapien
tttggatatcccataggagctccca

SEQ ID NO: 4917233 - DNA, 25 bp, Homo sapien
atttggatatcccataggagctccc

SEQ ID NO: 4917234 - DNA, 25 bp, Homo sapien
catttggatatcccataggagctcc

SEQ ID NO: 4917235 - DNA, 25 bp, Homo sapien
ccatgtatggggatggtttactgca

SEQ ID NO: 4917236 - DNA, 25 bp, Homo sapien
tttactgcatctccggtggtcatca

SEQ ID NO: 4917237 - DNA, 25 bp, Homo sapien
ggatggtttactgcatctccggtgg

SEQ ID NO: 4917238 - DNA, 25 bp, Homo sapien
catctccggtggtcatcagattgtc

SEQ ID NO: 4917239 - DNA, 25 bp, Homo sapien
tcaactacctgaactctcaaagcac

SEQ ID NO: 4917240 - DNA, 25 bp, Homo sapien
caactacctgaactctcaaagcact

SEQ ID NO: 4917241 - DNA, 25 bp, Homo sapien
ctccagctgcttgacgtcgagccat

SEQ ID NO: 4917242 - DNA, 25 bp, Homo sapien
ccctggatcctgttcacgggccggt

SEQ ID NO: 4917243 - DNA, 25 bp, Homo sapien
tgcccctggatcctgttcacgggcc

SEQ ID NO: 4917244 - DNA, 25 bp, Homo sapien
tggatcctgttcacgggccggttct

SEQ ID NO: 4917245 - DNA, 25 bp, Homo sapien
cctggataagaaggcctggagttgc

SEQ ID NO: 4917246 - DNA, 25 bp, Homo sapien
ctcttctttgggtgacttggaaagc

SEQ ID NO: 4917247 - DNA, 25 bp, Homo sapien
gagtcctggataagaaggcctggag

SEQ ID NO: 4917248 - DNA, 25 bp, Homo sapien
gctcttctttgggtgacttggaaag

SEQ ID NO: 4917249 - DNA, 25 bp, Homo sapien
ttaatctttgcccattgctgtgaat

SEQ ID NO: 4917250 - DNA, 25 bp, Homo sapien
tgcccattgctgtgaatccttgacg

SEQ ID NO: 4917251 - DNA, 25 bp, Homo sapien
gctgtgaatccttgacgtgacccta

SEQ ID NO: 4917252 - DNA, 25 bp, Homo sapien
cttgacgtgaccctaactctttctc

SEQ ID NO: 4917253 - DNA, 25 bp, Homo sapien
cattgtgtttatccgactttctgaa

SEQ ID NO: 4917254 - DNA, 25 bp, Homo sapien
aatacattgtgtttatccgactttc

SEQ ID NO: 4917255 - DNA, 25 bp, Homo sapien
ttgtgtttatccgactttctgaaga

SEQ ID NO: 4917256 - DNA, 25 bp, Homo sapien
tctaatacattgtgtttatccgact

SEQ ID NO: 4917257 - DNA, 25 bp, Homo sapien
gcagagttagtgtgagactgaaata

SEQ ID NO: 4917258 - DNA, 25 bp, Homo sapien
ggatgacgggtgctcaagactgact

SEQ ID NO: 4917259 - DNA, 25 bp, Homo sapien
tttgggtcagctgtatgatggatga

SEQ ID NO: 4917260 - DNA, 25 bp, Homo sapien
aatgataacgagtctccattttggg

SEQ ID NO: 4917261 - DNA, 25 bp, Homo sapien
tcattcagcattcaatgataacgag

SEQ ID NO: 4917262 - DNA, 25 bp, Homo sapien
tgttctgtaagcttgggttgatgcc

SEQ ID NO: 4917263 - DNA, 25 bp, Homo sapien
ggttgatgccgttagcctcagggta

SEQ ID NO: 4917264 - DNA, 25 bp, Homo sapien
gaatgcataatgacaacagtttgct

SEQ ID NO: 4917265 - DNA, 25 bp, Homo sapien
aaagtggctttctaaacattgggca

SEQ ID NO: 4917266 - DNA, 25 bp, Homo sapien
tattagcctactgatgctctcgctg

SEQ ID NO: 4917267 - DNA, 25 bp, Homo sapien
gcctactgatgctctcgctggccat

SEQ ID NO: 4917268 - DNA, 25 bp, Homo sapien
tgttattagcctactgatgctctcg

SEQ ID NO: 4917269 - DNA, 25 bp, Homo sapien
tccttgttattagcctactgatgct

SEQ ID NO: 4917270 - DNA, 25 bp, Homo sapien
tcctggagtattacactcaggggtg

SEQ ID NO: 4917271 - DNA, 25 bp, Homo sapien
ttgtttttgctctggcatgtttggg

SEQ ID NO: 4917272 - DNA, 25 bp, Homo sapien
tgcatgtcttatgctcttgcatttc

SEQ ID NO: 4917273 - DNA, 25 bp, Homo sapien
gatcaaagcggattattttgcatgt

SEQ ID NO: 4917274 - DNA, 25 bp, Homo sapien
tgaagcacagcatgtagttgtcaca

SEQ ID NO: 4917275 - DNA, 25 bp, Homo sapien
taaaaattgtgttctatcatttggc

SEQ ID NO: 4917276 - DNA, 25 bp, Homo sapien
tctatcatttggcttgaagcacagc

SEQ ID NO: 4917277 - DNA, 25 bp, Homo sapien
gccacaggctgatcaataatatgct

SEQ ID NO: 4917278 - DNA, 25 bp, Homo sapien
ggctttgtgtctgacttgatgtaga

SEQ ID NO: 4917279 - DNA, 25 bp, Homo sapien
gggctttgtgtctgacttgatgtag

SEQ ID NO: 4917280 - DNA, 25 bp, Homo sapien
catccagacaaactcaaaactgcat

SEQ ID NO: 4917281 - DNA, 25 bp, Homo sapien
cacttcatccagacaaactcaaaac

SEQ ID NO: 4917282 - DNA, 25 bp, Homo sapien
tttgggaataattggtattcacaga

SEQ ID NO: 4917283 - DNA, 25 bp, Homo sapien
ttgggaataattggtattcacagaa

SEQ ID NO: 4917284 - DNA, 25 bp, Homo sapien
catttgggaataattggtattcaca

SEQ ID NO: 4917285 - DNA, 25 bp, Homo sapien
atttgggaataattggtattcacag

SEQ ID NO: 4917286 - DNA, 25 bp, Homo sapien
gactacttattcttcttacatcctc

SEQ ID NO: 4917287 - DNA, 25 bp, Homo sapien
tcttacatcctcacagtgacatgtc

SEQ ID NO: 4917288 - DNA, 25 bp, Homo sapien
cctggagtatgatcaaattgcctag

SEQ ID NO: 4917289 - DNA, 25 bp, Homo sapien
ttgctggtggcaagaatcctggagt

SEQ ID NO: 4917290 - DNA, 25 bp, Homo sapien
ttctctagtgaccccaaaggcatcc

SEQ ID NO: 4917291 - DNA, 25 bp, Homo sapien
ctctagtgaccccaaaggcatcctg

SEQ ID NO: 4917292 - DNA, 25 bp, Homo sapien
gaaagctcattgataggtttccctg

SEQ ID NO: 4917293 - DNA, 25 bp, Homo sapien
cattgataggtttccctgtccttct

SEQ ID NO: 4917294 - DNA, 25 bp, Homo sapien
tcctgctcaatgttccctgtactgc

SEQ ID NO: 4917295 - DNA, 25 bp, Homo sapien
gacaaccatactgtgtgagcaccag

SEQ ID NO: 4917296 - DNA, 25 bp, Homo sapien
ggtgtgaacagacgaccaggatctg

SEQ ID NO: 4917297 - DNA, 25 bp, Homo sapien
cctgtactgcttttaaggtgtgaac

SEQ ID NO: 4917298 - DNA, 25 bp, Homo sapien
ccagagccatctttaactcaggtgt

SEQ ID NO: 4917299 - DNA, 25 bp, Homo sapien
aactcaggtgtccccatttcattgg

SEQ ID NO: 4917300 - DNA, 25 bp, Homo sapien
ctcccagagccatctttaactcagg

SEQ ID NO: 4917301 - DNA, 25 bp, Homo sapien
gagccatctttaactcaggtgtccc

SEQ ID NO: 4917302 - DNA, 25 bp, Homo sapien
tcagctcactagattttacactcgt

SEQ ID NO: 4917303 - DNA, 25 bp, Homo sapien
gattttacactcgttagccagtggc

SEQ ID NO: 4917304 - DNA, 25 bp, Homo sapien
acagcagaatttctcatgggcttgg

SEQ ID NO: 4917305 - DNA, 25 bp, Homo sapien
ggcttggctcccatccagcatggaa

SEQ ID NO: 4917306 - DNA, 25 bp, Homo sapien
agtcctgctgttaaatctctgccac

SEQ ID NO: 4917307 - DNA, 25 bp, Homo sapien
ctacttagtcctgctgttaaatctc

SEQ ID NO: 4917308 - DNA, 25 bp, Homo sapien
ttagtcctgctgttaaatctctgcc

SEQ ID NO: 4917309 - DNA, 25 bp, Homo sapien
acttagtcctgctgttaaatctctg

SEQ ID NO: 4917310 - DNA, 25 bp, Homo sapien
gaagcaacataaagacatccgcctt

SEQ ID NO: 4917311 - DNA, 25 bp, Homo sapien
gaactaacttctgtggtgggaccac

SEQ ID NO: 4917312 - DNA, 25 bp, Homo sapien
gagtcttggcagagctattgcgtca

SEQ ID NO: 4917313 - DNA, 25 bp, Homo sapien
gagctattgcgtcaaccaagaagca

SEQ ID NO: 4917314 - DNA, 25 bp, Homo sapien
caaagagattaatggcaagggaaga

SEQ ID NO: 4917315 - DNA, 25 bp, Homo sapien
gatggttgggtctgcctcctttagg

SEQ ID NO: 4917316 - DNA, 25 bp, Homo sapien
tgaggctttgtttctggaccaagat

SEQ ID NO: 4917317 - DNA, 25 bp, Homo sapien
gaagatcttcatgaacatacacaaa

SEQ ID NO: 4917318 - DNA, 25 bp, Homo sapien
ccatgggggcatctactttctcaag

SEQ ID NO: 4917319 - DNA, 25 bp, Homo sapien
tggcattatcactgagcaggaatgg

SEQ ID NO: 4917320 - DNA, 25 bp, Homo sapien
tactgcaattgtctgcatgaaggca

SEQ ID NO: 4917321 - DNA, 25 bp, Homo sapien
gaaggcatgcacagatactggccct

SEQ ID NO: 4917322 - DNA, 25 bp, Homo sapien
tggtcatactgcaattgtctgcatg

SEQ ID NO: 4917323 - DNA, 25 bp, Homo sapien
tctgcatgaaggcatgcacagatac

SEQ ID NO: 4917324 - DNA, 25 bp, Homo sapien
tcattgggtgtatcctacaaatggc

SEQ ID NO: 4917325 - DNA, 25 bp, Homo sapien
tgggtgtatcctacaaatggcagta

SEQ ID NO: 4917326 - DNA, 25 bp, Homo sapien
ccatttcattgggtgtatcctacaa

SEQ ID NO: 4917327 - DNA, 25 bp, Homo sapien
ggtgtatcctacaaatggcagtatg

SEQ ID NO: 4917328 - DNA, 25 bp, Homo sapien
tgtcatatgggccagagtcctggcg

SEQ ID NO: 4917329 - DNA, 25 bp, Homo sapien
ccgacttatattatgatagaaggca

SEQ ID NO: 4917330 - DNA, 25 bp, Homo sapien
ttcatagtctttgggtaaatccgac

SEQ ID NO: 4917331 - DNA, 25 bp, Homo sapien
tcctggcgggtcacagaatttactc

SEQ ID NO: 4917332 - DNA, 25 bp, Homo sapien
gaaggatagtggtatgagaactgca

SEQ ID NO: 4917333 - DNA, 25 bp, Homo sapien
gatgctttgaaggatagtggtatga

SEQ ID NO: 4917334 - DNA, 25 bp, Homo sapien
catatgtataagttcagctatggat

SEQ ID NO: 4917335 - DNA, 25 bp, Homo sapien
ctggcccaatttctggtcgtctgtg

SEQ ID NO: 4917336 - DNA, 25 bp, Homo sapien
aactgaggcattctcaggaagaggt

SEQ ID NO: 4917337 - DNA, 25 bp, Homo sapien
cagggaggagtagatgattgtaagg

SEQ ID NO: 4917338 - DNA, 25 bp, Homo sapien
gaggagtagatgattgtaaggaaca

SEQ ID NO: 4917339 - DNA, 25 bp, Homo sapien
gggaggagtagatgattgtaaggaa

SEQ ID NO: 4917340 - DNA, 25 bp, Homo sapien
agcatgctggataactggggcaaga

SEQ ID NO: 4917341 - DNA, 25 bp, Homo sapien
aggcaggaaagcgtgtagacagcat

SEQ ID NO: 4917342 - DNA, 25 bp, Homo sapien
ggcattgcctcatagcatcttccag

SEQ ID NO: 4917343 - DNA, 25 bp, Homo sapien
actgctgctgtagggcattgcctca

SEQ ID NO: 4917344 - DNA, 25 bp, Homo sapien
gaatcaaagtcagagactcccatgt

SEQ ID NO: 4917345 - DNA, 25 bp, Homo sapien
gtgaatccaacatattactacttat

SEQ ID NO: 4917346 - DNA, 25 bp, Homo sapien
ggaatccatgcttgtatcccaagtc

SEQ ID NO: 4917347 - DNA, 25 bp, Homo sapien
ccaagtcaacaaaaagtgaatccaa

SEQ ID NO: 4917348 - DNA, 25 bp, Homo sapien
gggtggatagctttagccctccttc

SEQ ID NO: 4917349 - DNA, 25 bp, Homo sapien
tgtgactttgaattacctagcctct

SEQ ID NO: 4917350 - DNA, 25 bp, Homo sapien
gagagtgtaagctctgaagccacag

SEQ ID NO: 4917351 - DNA, 25 bp, Homo sapien
aaatacactgtgtaccaggctgtgc

SEQ ID NO: 4917352 - DNA, 25 bp, Homo sapien
gaagttattgcgtggctcctgccta

SEQ ID NO: 4917353 - DNA, 25 bp, Homo sapien
tctgggatgtgaacaccgagggccc

SEQ ID NO: 4917354 - DNA, 25 bp, Homo sapien
ctggcagcggtaggaatgccttgtt

SEQ ID NO: 4917355 - DNA, 25 bp, Homo sapien
atgccaagagcgctgcctccggaca

SEQ ID NO: 4917356 - DNA, 25 bp, Homo sapien
gctcatgatcgtgtaatgcgcagca

SEQ ID NO: 4917357 - DNA, 25 bp, Homo sapien
gcagctttccccagactgctgagta

SEQ ID NO: 4917358 - DNA, 25 bp, Homo sapien
gagtctgtggaaagtagctactgca

SEQ ID NO: 4917359 - DNA, 25 bp, Homo sapien
gaagtggttgtcaaccttttcagaa

SEQ ID NO: 4917360 - DNA, 25 bp, Homo sapien
tgaggagaggcgagtgctgccatcc

SEQ ID NO: 4917361 - DNA, 25 bp, Homo sapien
atctgctatggtgaggagaggcgag

SEQ ID NO: 4917362 - DNA, 25 bp, Homo sapien
agaggcgagtgctgccatccagcgt

SEQ ID NO: 4917363 - DNA, 25 bp, Homo sapien
tatggtgaggagaggcgagtgctgc

SEQ ID NO: 4917364 - DNA, 25 bp, Homo sapien
cctgtcctggaccctttgatggtcc

SEQ ID NO: 4917365 - DNA, 25 bp, Homo sapien
tgttttacttgctcaccaaggaatc

SEQ ID NO: 4917366 - DNA, 25 bp, Homo sapien
tgtcctggaccctttgatggtcccc

SEQ ID NO: 4917367 - DNA, 25 bp, Homo sapien
ctgttttacttgctcaccaaggaat

SEQ ID NO: 4917368 - DNA, 25 bp, Homo sapien
cttgaccaagtggaacagggagtca

SEQ ID NO: 4917369 - DNA, 25 bp, Homo sapien
tgaccaagtggaacagggagtcatt

SEQ ID NO: 4917370 - DNA, 25 bp, Homo sapien
agtggaacagggagtcattaagagt

SEQ ID NO: 4917371 - DNA, 25 bp, Homo sapien
ccaagtggaacagggagtcattaag

SEQ ID NO: 4917372 - DNA, 25 bp, Homo sapien
gaagcccagtagactgatcctccag

SEQ ID NO: 4917373 - DNA, 25 bp, Homo sapien
ccagtgaatccttcttttggcagcc

SEQ ID NO: 4917374 - DNA, 25 bp, Homo sapien
tttccttcatgattggtggcctcgt

SEQ ID NO: 4917375 - DNA, 25 bp, Homo sapien
tccagcttaagaatcaggttcatca

SEQ ID NO: 4917376 - DNA, 25 bp, Homo sapien
ctgatatcttccttctcctgttttc

SEQ ID NO: 4917377 - DNA, 25 bp, Homo sapien
tcttccttctcctgttttcagtgtt

SEQ ID NO: 4917378 - DNA, 25 bp, Homo sapien
gatatcttccttctcctgttttcag

SEQ ID NO: 4917379 - DNA, 25 bp, Homo sapien
tatcttccttctcctgttttcagtg

SEQ ID NO: 4917380 - DNA, 25 bp, Homo sapien
gcacctggtgtcttccaaatctcat

SEQ ID NO: 4917381 - DNA, 25 bp, Homo sapien
tgtggtggcaggaaggacgagtgcc

SEQ ID NO: 4917382 - DNA, 25 bp, Homo sapien
ggaaggacgagtgccgagtgaaagg

SEQ ID NO: 4917383 - DNA, 25 bp, Homo sapien
gagggtaaccatccctgtgactcaa

SEQ ID NO: 4917384 - DNA, 25 bp, Homo sapien
aacacatcataagctgattcagacc

SEQ ID NO: 4917385 - DNA, 25 bp, Homo sapien
ggaaacacatcataagctgattcag

SEQ ID NO: 4917386 - DNA, 25 bp, Homo sapien
agggaaacacatcataagctgattc

SEQ ID NO: 4917387 - DNA, 25 bp, Homo sapien
cacatcataagctgattcagaccta

SEQ ID NO: 4917388 - DNA, 25 bp, Homo sapien
tcttctaactcccatttcttcaatc

SEQ ID NO: 4917389 - DNA, 25 bp, Homo sapien
tttccattcttctaactcccatttc

SEQ ID NO: 4917390 - DNA, 25 bp, Homo sapien
ttctaactcccatttcttcaatcgc

SEQ ID NO: 4917391 - DNA, 25 bp, Homo sapien
cattcttctaactcccatttcttca

SEQ ID NO: 4917392 - DNA, 25 bp, Homo sapien
agcctcttcttatagcttggttgtg

SEQ ID NO: 4917393 - DNA, 25 bp, Homo sapien
acagaaggttggtgggctgggttgg

SEQ ID NO: 4917394 - DNA, 25 bp, Homo sapien
ctggagcctcttcttatagcttggt

SEQ ID NO: 4917395 - DNA, 25 bp, Homo sapien
tcttcttatagcttggttgtgtgct

SEQ ID NO: 4917396 - DNA, 25 bp, Homo sapien
tactgtggcaaagtgaaattagtgt

SEQ ID NO: 4917397 - DNA, 25 bp, Homo sapien
tagtgtaaagtaacaaggaaccaga

SEQ ID NO: 4917398 - DNA, 25 bp, Homo sapien
taaataacttatgaagcctttagca

SEQ ID NO: 4917399 - DNA, 25 bp, Homo sapien
ggaaccagattaatgtgaccccagg

SEQ ID NO: 4917400 - DNA, 25 bp, Homo sapien
ctggtgtgacaggccatggctagtt

SEQ ID NO: 4917401 - DNA, 25 bp, Homo sapien
tgtgacaggccatggctagttggag

SEQ ID NO: 4917402 - DNA, 25 bp, Homo sapien
agggaccgctgagatggagtgtgga

SEQ ID NO: 4917403 - DNA, 25 bp, Homo sapien
tccactggagggaccgctgagatgg

SEQ ID NO: 4917404 - DNA, 25 bp, Homo sapien
aggccctttctgatatggagagcag

SEQ ID NO: 4917405 - DNA, 25 bp, Homo sapien
gagcagtgaagtccatgctaaatcc

SEQ ID NO: 4917406 - DNA, 25 bp, Homo sapien
aggcacctcttgagtgcaggtcctg

SEQ ID NO: 4917407 - DNA, 25 bp, Homo sapien
tgaagtccatgctaaatccaggcac

SEQ ID NO: 4917408 - DNA, 25 bp, Homo sapien
ttctttggatctccttacctggtgc

SEQ ID NO: 4917409 - DNA, 25 bp, Homo sapien
cgaaagtagaagagagttgcttggt

SEQ ID NO: 4917410 - DNA, 25 bp, Homo sapien
tgccaaccgtacacaacgaaagtag

SEQ ID NO: 4917411 - DNA, 25 bp, Homo sapien
gatctccttacctggtgccaaccgt

SEQ ID NO: 4917412 - DNA, 25 bp, Homo sapien
aaaggcgccattctttcctactgga

SEQ ID NO: 4917413 - DNA, 25 bp, Homo sapien
gcagaaaaacacaacgcttaagcgt

SEQ ID NO: 4917414 - DNA, 25 bp, Homo sapien
ggaggagctttcttcatttacatag

SEQ ID NO: 4917415 - DNA, 25 bp, Homo sapien
tctcagatgaatgtgtatggcttca

SEQ ID NO: 4917416 - DNA, 25 bp, Homo sapien
agagcactgtgccaatgattgtcct

SEQ ID NO: 4917417 - DNA, 25 bp, Homo sapien
gagccaagagcactgtgccaatgat

SEQ ID NO: 4917418 - DNA, 25 bp, Homo sapien
cactgtgccaatgattgtcctccac

SEQ ID NO: 4917419 - DNA, 25 bp, Homo sapien
caagagcactgtgccaatgattgtc

SEQ ID NO: 4917420 - DNA, 25 bp, Homo sapien
gacgagctctttggcttaaataagt

SEQ ID NO: 4917421 - DNA, 25 bp, Homo sapien
aattgcaaacagtgttgacgagctc

SEQ ID NO: 4917422 - DNA, 25 bp, Homo sapien
cagtgttgacgagctctttggctta

SEQ ID NO: 4917423 - DNA, 25 bp, Homo sapien
tgcaaacagtgttgacgagctcttt

SEQ ID NO: 4917424 - DNA, 25 bp, Homo sapien
tgagaagaaagcagtatccaagttt

SEQ ID NO: 4917425 - DNA, 25 bp, Homo sapien
tgggaagggtttgtgagaagaaagc

SEQ ID NO: 4917426 - DNA, 25 bp, Homo sapien
gggaagggtttgtgagaagaaagca

SEQ ID NO: 4917427 - DNA, 25 bp, Homo sapien
gaagaaagcagtatccaagttttca

SEQ ID NO: 4917428 - DNA, 25 bp, Homo sapien
gtttgcgcgtttctccagatgccca

SEQ ID NO: 4917429 - DNA, 25 bp, Homo sapien
gctacctttgctgaactgaacggag

SEQ ID NO: 4917430 - DNA, 25 bp, Homo sapien
tgaagactgattggccaagagctgg

SEQ ID NO: 4917431 - DNA, 25 bp, Homo sapien
ggtccaagcttgtgttgcaggcagc

SEQ ID NO: 4917432 - DNA, 25 bp, Homo sapien
ggtgctttgtgagggcttccttaac

SEQ ID NO: 4917433 - DNA, 25 bp, Homo sapien
ccccagggaatccagggcagtttca

SEQ ID NO: 4917434 - DNA, 25 bp, Homo sapien
cagggaatccagggcagtttcataa

SEQ ID NO: 4917435 - DNA, 25 bp, Homo sapien
aggtgctttgtgagggcttccttaa

SEQ ID NO: 4917436 - DNA, 25 bp, Homo sapien
caaggacttgtaagaagcccaggat

SEQ ID NO: 4917437 - DNA, 25 bp, Homo sapien
gaaacaatcgccacaacacaaggac

SEQ ID NO: 4917438 - DNA, 25 bp, Homo sapien
cacagcacgttgatgagaaacaatc

SEQ ID NO: 4917439 - DNA, 25 bp, Homo sapien
caagccccgtagatgttctgcaatg

SEQ ID NO: 4917440 - DNA, 25 bp, Homo sapien
tgccatgaaggtccattcccttttt

SEQ ID NO: 4917441 - DNA, 25 bp, Homo sapien
ctgttgccatgaaggtccattccct

SEQ ID NO: 4917442 - DNA, 25 bp, Homo sapien
gttgccatgaaggtccattcccttt

SEQ ID NO: 4917443 - DNA, 25 bp, Homo sapien
tgttgccatgaaggtccattccctt

SEQ ID NO: 4917444 - DNA, 25 bp, Homo sapien
taatgcttgtgtgctgagtcccaga

SEQ ID NO: 4917445 - DNA, 25 bp, Homo sapien
cggcgctgtgaactgcagtgaactt

SEQ ID NO: 4917446 - DNA, 25 bp, Homo sapien
gcagtgataatgcttgtgtgctgag

SEQ ID NO: 4917447 - DNA, 25 bp, Homo sapien
ctgggccttggcgttcaacggcgct

SEQ ID NO: 4917448 - DNA, 25 bp, Homo sapien
agagtgcccggcgataatctgctgc

SEQ ID NO: 4917449 - DNA, 25 bp, Homo sapien
ctgctgccaggttagagtgcccggc

SEQ ID NO: 4917450 - DNA, 25 bp, Homo sapien
cattgtgttgatgggaaagccatcc

SEQ ID NO: 4917451 - DNA, 25 bp, Homo sapien
aatctgctgcatgtcatctgcattg

SEQ ID NO: 4917452 - DNA, 25 bp, Homo sapien
gaaagttctcgatattgggcagaag

SEQ ID NO: 4917453 - DNA, 25 bp, Homo sapien
aaatgatccacggtagggctgggac

SEQ ID NO: 4917454 - DNA, 25 bp, Homo sapien
ccatgcaagagttctgcaggagcca

SEQ ID NO: 4917455 - DNA, 25 bp, Homo sapien
ccagtgggtagcaaaataaagttca

SEQ ID NO: 4917456 - DNA, 25 bp, Homo sapien
cagagggaaggacggtaaccaccag

SEQ ID NO: 4917457 - DNA, 25 bp, Homo sapien
gcctccaaatgagaccgtccaaaca

SEQ ID NO: 4917458 - DNA, 25 bp, Homo sapien
gacacaacgcgaagactcagaaatg

SEQ ID NO: 4917459 - DNA, 25 bp, Homo sapien
tcttggcaggaacttcacacagagg

SEQ ID NO: 4917460 - DNA, 25 bp, Homo sapien
taaccgatcaagaccagcatatggc

SEQ ID NO: 4917461 - DNA, 25 bp, Homo sapien
tgccagcatgtctgatatgatagac

SEQ ID NO: 4917462 - DNA, 25 bp, Homo sapien
tctgatatgatagactgaaagtacc

SEQ ID NO: 4917463 - DNA, 25 bp, Homo sapien
tatgagtagggctggtgtatgtaac

SEQ ID NO: 4917464 - DNA, 25 bp, Homo sapien
tgggagctactgcatcaccagacac

SEQ ID NO: 4917465 - DNA, 25 bp, Homo sapien
gagctactgcatcaccagacaccat

SEQ ID NO: 4917466 - DNA, 25 bp, Homo sapien
ggagctactgcatcaccagacacca

SEQ ID NO: 4917467 - DNA, 25 bp, Homo sapien
tgggtgtttgcttccgcaggacaca

SEQ ID NO: 4917468 - DNA, 25 bp, Homo sapien
gggagaagtccactcatcgaatctg

SEQ ID NO: 4917469 - DNA, 25 bp, Homo sapien
tccactcatcgaatctgatagacat

SEQ ID NO: 4917470 - DNA, 25 bp, Homo sapien
ggattttgagccatgcagttgaagc

SEQ ID NO: 4917471 - DNA, 25 bp, Homo sapien
gaagcaatcaaggtgccctttgatg

SEQ ID NO: 4917472 - DNA, 25 bp, Homo sapien
ggaagggcatttctgatcctgttga

SEQ ID NO: 4917473 - DNA, 25 bp, Homo sapien
tgggcttctatatggatctctgata

SEQ ID NO: 4917474 - DNA, 25 bp, Homo sapien
gaggagttcacctacgatgtctgtg

SEQ ID NO: 4917475 - DNA, 25 bp, Homo sapien
tccttgccaccaggtagttgctgaa

SEQ ID NO: 4917476 - DNA, 25 bp, Homo sapien
cctaattaagagagcttggtgtgat

SEQ ID NO: 4917477 - DNA, 25 bp, Homo sapien
tcactttcaaaccatgctggcatcg

SEQ ID NO: 4917478 - DNA, 25 bp, Homo sapien
gaatggattcctgctcccaatgtgt

SEQ ID NO: 4917479 - DNA, 25 bp, Homo sapien
aaaagctcgtaaattgagcaccagg

SEQ ID NO: 4917480 - DNA, 25 bp, Homo sapien
cattgccgattttggctataacagt

SEQ ID NO: 4917481 - DNA, 25 bp, Homo sapien
ggatttctttagtgtcattgccgat

SEQ ID NO: 4917482 - DNA, 25 bp, Homo sapien
cacaccagggcaactcttggaagaa

SEQ ID NO: 4917483 - DNA, 25 bp, Homo sapien
gctcttcaagaatacaacaactaag

SEQ ID NO: 4917484 - DNA, 25 bp, Homo sapien
tcagcgaatcataggaatccagagt

SEQ ID NO: 4917485 - DNA, 25 bp, Homo sapien
gactcatccagggtatcaaattgaa

SEQ ID NO: 4917486 - DNA, 25 bp, Homo sapien
gaatagtaacaataggccaggagtg

SEQ ID NO: 4917487 - DNA, 25 bp, Homo sapien
gcaagttacgttccttcactagaaa

SEQ ID NO: 4917488 - DNA, 25 bp, Homo sapien
catttgttggcgcttcataggagca

SEQ ID NO: 4917489 - DNA, 25 bp, Homo sapien
ttattacatcaaagtgagctctttt

SEQ ID NO: 4917490 - DNA, 25 bp, Homo sapien
gttggcgcttcataggagcagtcat

SEQ ID NO: 4917491 - DNA, 25 bp, Homo sapien
aacactgcatttgttggcgcttcat

SEQ ID NO: 4917492 - DNA, 25 bp, Homo sapien
gcattaacacagtagtaggcagctg

SEQ ID NO: 4917493 - DNA, 25 bp, Homo sapien
ctgcaaagttgccaatcagtgcctg

SEQ ID NO: 4917494 - DNA, 25 bp, Homo sapien
caatcagtgcctgtttcttcattga

SEQ ID NO: 4917495 - DNA, 25 bp, Homo sapien
ggcagctggcacttcgagtcaagga

SEQ ID NO: 4917496 - DNA, 25 bp, Homo sapien
ttttcttagcttggaatgctgtatt

SEQ ID NO: 4917497 - DNA, 25 bp, Homo sapien
agcttggaatgctgtatttcctatc

SEQ ID NO: 4917498 - DNA, 25 bp, Homo sapien
ttcttagcttggaatgctgtatttc

SEQ ID NO: 4917499 - DNA, 25 bp, Homo sapien
cttagcttggaatgctgtatttcct

SEQ ID NO: 4917500 - DNA, 25 bp, Homo sapien
ttgtcgtttatcatgggctgccatg

SEQ ID NO: 4917501 - DNA, 25 bp, Homo sapien
tcagatttgtcgtttatcatgggct

SEQ ID NO: 4917502 - DNA, 25 bp, Homo sapien
atttgtcgtttatcatgggctgcca

SEQ ID NO: 4917503 - DNA, 25 bp, Homo sapien
agatttgtcgtttatcatgggctgc

SEQ ID NO: 4917504 - DNA, 25 bp, Homo sapien
tcatatcaccttgcgggtaagggca

SEQ ID NO: 4917505 - DNA, 25 bp, Homo sapien
cgggtaagggcatgcacagcttttt

SEQ ID NO: 4917506 - DNA, 25 bp, Homo sapien
tcaccttgcgggtaagggcatgcac

SEQ ID NO: 4917507 - DNA, 25 bp, Homo sapien
taagggcatgcacagctttttctct

SEQ ID NO: 4917508 - DNA, 25 bp, Homo sapien
tgaaatacttccgttactgaactcc

SEQ ID NO: 4917509 - DNA, 25 bp, Homo sapien
cgttactgaactccttaaattcttg

SEQ ID NO: 4917510 - DNA, 25 bp, Homo sapien
tactgaactccttaaattcttgcat

SEQ ID NO: 4917511 - DNA, 25 bp, Homo sapien
tcttgaaatacttccgttactgaac

SEQ ID NO: 4917512 - DNA, 25 bp, Homo sapien
ttttgtgacggcatttgaactgtgc

SEQ ID NO: 4917513 - DNA, 25 bp, Homo sapien
tatcttaaggagtttttcatctggt

SEQ ID NO: 4917514 - DNA, 25 bp, Homo sapien
gatatagacctaggaagtgttttgt

SEQ ID NO: 4917515 - DNA, 25 bp, Homo sapien
tcatcttttatcctcttgaaaggtg

SEQ ID NO: 4917516 - DNA, 25 bp, Homo sapien
aaaaatgtcacaaatgtaaggcaat

SEQ ID NO: 4917517 - DNA, 25 bp, Homo sapien
ctgaagtaagcgtagaatttggttg

SEQ ID NO: 4917518 - DNA, 25 bp, Homo sapien
ttgggaacctttcatgacacagtag

SEQ ID NO: 4917519 - DNA, 25 bp, Homo sapien
tattactgtaggagactgatccttc

SEQ ID NO: 4917520 - DNA, 25 bp, Homo sapien
gttgggctgcaacactgctctgagc

SEQ ID NO: 4917521 - DNA, 25 bp, Homo sapien
gggctgcaacactgctctgagccat

SEQ ID NO: 4917522 - DNA, 25 bp, Homo sapien
ctggttgggctgcaacactgctctg

SEQ ID NO: 4917523 - DNA, 25 bp, Homo sapien
ggttgggctgcaacactgctctgag

SEQ ID NO: 4917524 - DNA, 25 bp, Homo sapien
agataataagcactacagcatcagg

SEQ ID NO: 4917525 - DNA, 25 bp, Homo sapien
cagcatcaggaatgtttgatacagc

SEQ ID NO: 4917526 - DNA, 25 bp, Homo sapien
taggatccatctctgaccgagtatg

SEQ ID NO: 4917527 - DNA, 25 bp, Homo sapien
tgtttgatacagcagttagtgtttc

SEQ ID NO: 4917528 - DNA, 25 bp, Homo sapien
aagacacctaagaatgttaccgtct

SEQ ID NO: 4917529 - DNA, 25 bp, Homo sapien
tgttaccgtctttttggaagtgaca

SEQ ID NO: 4917530 - DNA, 25 bp, Homo sapien
tgtaacttaaagacacctaagaatg

SEQ ID NO: 4917531 - DNA, 25 bp, Homo sapien
agacacctaagaatgttaccgtctt

SEQ ID NO: 4917532 - DNA, 25 bp, Homo sapien
cattccatcggaaagaggtcgaaaa

SEQ ID NO: 4917533 - DNA, 25 bp, Homo sapien
tcgaaaatgtacagtaggcatgcac

SEQ ID NO: 4917534 - DNA, 25 bp, Homo sapien
tatgcataatgcgagttagtacagc

SEQ ID NO: 4917535 - DNA, 25 bp, Homo sapien
taatgtcggacaaatcacttatcag

SEQ ID NO: 4917536 - DNA, 25 bp, Homo sapien
cgccccagtaccctcaatgccagtt

SEQ ID NO: 4917537 - DNA, 25 bp, Homo sapien
ggccaccggaccaggaagcatcagt

SEQ ID NO: 4917538 - DNA, 25 bp, Homo sapien
agcatcagtaaacgcctcacgcacg

SEQ ID NO: 4917539 - DNA, 25 bp, Homo sapien
atgccagtttcacccggaaatgaag

SEQ ID NO: 4917540 - DNA, 25 bp, Homo sapien
caggatctggtacggctcgcggact

SEQ ID NO: 4917541 - DNA, 25 bp, Homo sapien
tccgaagttgttgcggaagaagcca

SEQ ID NO: 4917542 - DNA, 25 bp, Homo sapien
tacggctcgcggactccgaagttgt

SEQ ID NO: 4917543 - DNA, 25 bp, Homo sapien
cgcagcgccgcctgacagaaggtgc

SEQ ID NO: 4917544 - DNA, 25 bp, Homo sapien
ttaactgtcaactccacgtgggcgg

SEQ ID NO: 4917545 - DNA, 25 bp, Homo sapien
cattcgccaggctaacgacacgtga

SEQ ID NO: 4917546 - DNA, 25 bp, Homo sapien
aagtactgactttttgccctggaca

SEQ ID NO: 4917547 - DNA, 25 bp, Homo sapien
tatgcactttactggccatgaggga

SEQ ID NO: 4917548 - DNA, 25 bp, Homo sapien
cataaggtgtaaaaaacaatagtcg

SEQ ID NO: 4917549 - DNA, 25 bp, Homo sapien
ttgccccatataagtcctttcccaa

SEQ ID NO: 4917550 - DNA, 25 bp, Homo sapien
caaccatggaaagcagacattctga

SEQ ID NO: 4917551 - DNA, 25 bp, Homo sapien
cttgaaatgaggacaatttcgaact

SEQ ID NO: 4917552 - DNA, 25 bp, Homo sapien
gacaatttcgaacttggcatttttg

SEQ ID NO: 4917553 - DNA, 25 bp, Homo sapien
gaccctcaagtctcaagaaacaaac

SEQ ID NO: 4917554 - DNA, 25 bp, Homo sapien
gaaccctacaacaaatcatcacatc

SEQ ID NO: 4917555 - DNA, 25 bp, Homo sapien
gacaattgcttttactgactgcaaa

SEQ ID NO: 4917556 - DNA, 25 bp, Homo sapien
gactgcaaattaacttagaagcctg

SEQ ID NO: 4917557 - DNA, 25 bp, Homo sapien
tgtccaaaaccatagtgttctgaat

SEQ ID NO: 4917558 - DNA, 25 bp, Homo sapien
aacaactaagaggattgggaccact

SEQ ID NO: 4917559 - DNA, 25 bp, Homo sapien
ttctcatgcactgagacaagctgac

SEQ ID NO: 4917560 - DNA, 25 bp, Homo sapien
cagatgattgtgtgtccggtgcctt

SEQ ID NO: 4917561 - DNA, 25 bp, Homo sapien
ccttctgcattctgcttctcagaaa

SEQ ID NO: 4917562 - DNA, 25 bp, Homo sapien
tcattctccttctgcattctgcttc

SEQ ID NO: 4917563 - DNA, 25 bp, Homo sapien
ttctgcattctgcttctcagaaagt

SEQ ID NO: 4917564 - DNA, 25 bp, Homo sapien
ctgcattctgcttctcagaaagtac

SEQ ID NO: 4917565 - DNA, 25 bp, Homo sapien
tcactgctctagtgtggctccagaa

SEQ ID NO: 4917566 - DNA, 25 bp, Homo sapien
tagtagctaccctctaaagcagagg

SEQ ID NO: 4917567 - DNA, 25 bp, Homo sapien
gaccagagaggcgacaattttacct

SEQ ID NO: 4917568 - DNA, 25 bp, Homo sapien
gagtgaagtgacacgaactgggctc

SEQ ID NO: 4917569 - DNA, 25 bp, Homo sapien
catcctactaggtatgaaatggcat

SEQ ID NO: 4917570 - DNA, 25 bp, Homo sapien
tatatgatccttcatgactggtttc

SEQ ID NO: 4917571 - DNA, 25 bp, Homo sapien
tttggagtatcatcaataatgctgc

SEQ ID NO: 4917572 - DNA, 25 bp, Homo sapien
tatgtctacaggtaaaattgctgga

SEQ ID NO: 4917573 - DNA, 25 bp, Homo sapien
gacagtgagcattagtaagctagca

SEQ ID NO: 4917574 - DNA, 25 bp, Homo sapien
gcatctttctgactgcatgaggtgg

SEQ ID NO: 4917575 - DNA, 25 bp, Homo sapien
tggtggacagtgagcattagtaagc

SEQ ID NO: 4917576 - DNA, 25 bp, Homo sapien
agagaacagatggcatctttctgac

SEQ ID NO: 4917577 - DNA, 25 bp, Homo sapien
ctaagtaagtcccagtatgaatgct

SEQ ID NO: 4917578 - DNA, 25 bp, Homo sapien
ccagagctgtcgaaatcagggctgc

SEQ ID NO: 4917579 - DNA, 25 bp, Homo sapien
gggctgctgcctacctgactagcta

SEQ ID NO: 4917580 - DNA, 25 bp, Homo sapien
caaaatgtacggtttcagggaatga

SEQ ID NO: 4917581 - DNA, 25 bp, Homo sapien
actataaggagctttggatcctgcc

SEQ ID NO: 4917582 - DNA, 25 bp, Homo sapien
aaatatattcaaaggacattgtggg

SEQ ID NO: 4917583 - DNA, 25 bp, Homo sapien
caaaagctcacaggtcataaattca

SEQ ID NO: 4917584 - DNA, 25 bp, Homo sapien
gggatgagaattcacagaaggcttt

SEQ ID NO: 4917585 - DNA, 25 bp, Homo sapien
gagctagccaatcagagcatcaatc

SEQ ID NO: 4917586 - DNA, 25 bp, Homo sapien
ttggtcatgtggtccagagctagcc

SEQ ID NO: 4917587 - DNA, 25 bp, Homo sapien
ccataattggtgcagaatgtgtaca

SEQ ID NO: 4917588 - DNA, 25 bp, Homo sapien
gagcatcaatcacatactgttgtcc

SEQ ID NO: 4917589 - DNA, 25 bp, Homo sapien
aatagtgttacagtctcccttgagg

SEQ ID NO: 4917590 - DNA, 25 bp, Homo sapien
agaaataagagggatgagcagcagc

SEQ ID NO: 4917591 - DNA, 25 bp, Homo sapien
tttacctggagaccaaagtcagatg

SEQ ID NO: 4917592 - DNA, 25 bp, Homo sapien
tgcaaagtgcaagatcaagatgccc

SEQ ID NO: 4917593 - DNA, 25 bp, Homo sapien
cattaagcaactattacataccagg

SEQ ID NO: 4917594 - DNA, 25 bp, Homo sapien
ggacctcagagtgacagatgtaaca

SEQ ID NO: 4917595 - DNA, 25 bp, Homo sapien
ggcactgtgtaaagtataggatact

SEQ ID NO: 4917596 - DNA, 25 bp, Homo sapien
aaggcatctagttctgccgccaaga

SEQ ID NO: 4917597 - DNA, 25 bp, Homo sapien
tacagttatgggatacaatgcgatg

SEQ ID NO: 4917598 - DNA, 25 bp, Homo sapien
ttatagaggaggctagcgctccctc

SEQ ID NO: 4917599 - DNA, 25 bp, Homo sapien
acatgcccatgaaacgtttttgacc

SEQ ID NO: 4917600 - DNA, 25 bp, Homo sapien
taatgtagcgtaagaaaaccctgga

SEQ ID NO: 4917601 - DNA, 25 bp, Homo sapien
caggtcttggctattcagatttagc

SEQ ID NO: 4917602 - DNA, 25 bp, Homo sapien
gtcttggctattcagatttagctgc

SEQ ID NO: 4917603 - DNA, 25 bp, Homo sapien
gcaggtcttggctattcagatttag

SEQ ID NO: 4917604 - DNA, 25 bp, Homo sapien
ctgcaggtcttggctattcagattt

SEQ ID NO: 4917605 - DNA, 25 bp, Homo sapien
tggacagatttgcacacaagcattg

SEQ ID NO: 4917606 - DNA, 25 bp, Homo sapien
agggcaatattgctccacaggatca

SEQ ID NO: 4917607 - DNA, 25 bp, Homo sapien
gcattgcacctggacaaacaggact

SEQ ID NO: 4917608 - DNA, 25 bp, Homo sapien
tgacagacccttatggcagagtggc

SEQ ID NO: 4917609 - DNA, 25 bp, Homo sapien
ccaagtggagatcagtacatatgtc

SEQ ID NO: 4917610 - DNA, 25 bp, Homo sapien
tgggtgatctcttagccaagtggag

SEQ ID NO: 4917611 - DNA, 25 bp, Homo sapien
gagatagtcataaacacatgggtga

SEQ ID NO: 4917612 - DNA, 25 bp, Homo sapien
tgtacaagtcaacaagctgtctgca

SEQ ID NO: 4917613 - DNA, 25 bp, Homo sapien
gtttcaaggcttctataagcagatc

SEQ ID NO: 4917614 - DNA, 25 bp, Homo sapien
tttcaaggcttctataagcagatct

SEQ ID NO: 4917615 - DNA, 25 bp, Homo sapien
gcatccagccttacaatgttttgct

SEQ ID NO: 4917616 - DNA, 25 bp, Homo sapien
aaatagagctggacagtattcctga

SEQ ID NO: 4917617 - DNA, 25 bp, Homo sapien
tgggagtccaacaaggtcaagacaa

SEQ ID NO: 4917618 - DNA, 25 bp, Homo sapien
gctgggagtccaacaaggtcaagac

SEQ ID NO: 4917619 - DNA, 25 bp, Homo sapien
ctggacagtattcctgagttgaggg

SEQ ID NO: 4917620 - DNA, 25 bp, Homo sapien
gaaggttcaatcttgggtttcaaga

SEQ ID NO: 4917621 - DNA, 25 bp, Homo sapien
cactggaaggttcaatcttgggttt

SEQ ID NO: 4917622 - DNA, 25 bp, Homo sapien
tcttgggtttcaagaaggactcttg

SEQ ID NO: 4917623 - DNA, 25 bp, Homo sapien
ttcaatcttgggtttcaagaaggac

SEQ ID NO: 4917624 - DNA, 25 bp, Homo sapien
ttttctcctaggttctgttcagctg

SEQ ID NO: 4917625 - DNA, 25 bp, Homo sapien
gtcccctgttcccaagttcttgaga

SEQ ID NO: 4917626 - DNA, 25 bp, Homo sapien
ctcacatttttctcctaggttctgt

SEQ ID NO: 4917627 - DNA, 25 bp, Homo sapien
ttgactctcaaagaacagctccatt

SEQ ID NO: 4917628 - DNA, 25 bp, Homo sapien
tatgatgtgcctgtaaaccaaggag

SEQ ID NO: 4917629 - DNA, 25 bp, Homo sapien
gaaagttctagcttaagtgttgaaa

SEQ ID NO: 4917630 - DNA, 25 bp, Homo sapien
cagatagcatcagaaatcatgtgac

SEQ ID NO: 4917631 - DNA, 25 bp, Homo sapien
catgtgactgttatgattatcagaa

SEQ ID NO: 4917632 - DNA, 25 bp, Homo sapien
gaaaacctgtctgagaaaatgcctg

SEQ ID NO: 4917633 - DNA, 25 bp, Homo sapien
cataatgagcagaggtgtacgcgaa

SEQ ID NO: 4917634 - DNA, 25 bp, Homo sapien
gactgatgggaaattatgcacctgg

SEQ ID NO: 4917635 - DNA, 25 bp, Homo sapien
agaaattgccctgcctactacaagg

SEQ ID NO: 4917636 - DNA, 25 bp, Homo sapien
catggtcttcaggtattgccgctgt

SEQ ID NO: 4917637 - DNA, 25 bp, Homo sapien
ggtattgccgctgttgtctcagagg

SEQ ID NO: 4917638 - DNA, 25 bp, Homo sapien
tcagcagatgcttcatggtcttcag

SEQ ID NO: 4917639 - DNA, 25 bp, Homo sapien
catcagggggcgatcaagatcagga

SEQ ID NO: 4917640 - DNA, 25 bp, Homo sapien
taaatgctaagtgattgctcagcag

SEQ ID NO: 4917641 - DNA, 25 bp, Homo sapien
gcagtccacagaccacatagtgtgt

SEQ ID NO: 4917642 - DNA, 25 bp, Homo sapien
gggccagtaaccaaaacctccatga

SEQ ID NO: 4917643 - DNA, 25 bp, Homo sapien
tgtagatagcatccttatagcgcaa

SEQ ID NO: 4917644 - DNA, 25 bp, Homo sapien
cgcttgctcagttgtggactccaca

SEQ ID NO: 4917645 - DNA, 25 bp, Homo sapien
cgcaggcgcacaggtaccattttga

SEQ ID NO: 4917646 - DNA, 25 bp, Homo sapien
aggaaatagtcattgcgcctgcgcc

SEQ ID NO: 4917647 - DNA, 25 bp, Homo sapien
aaacatcctgccgatttgaaccgag

SEQ ID NO: 4917648 - DNA, 25 bp, Homo sapien
aaggttcttagcttggcatgatccc

SEQ ID NO: 4917649 - DNA, 25 bp, Homo sapien
tgttgcagcaaatgaaaggactttt

SEQ ID NO: 4917650 - DNA, 25 bp, Homo sapien
gctggctcatatggtggctctatat

SEQ ID NO: 4917651 - DNA, 25 bp, Homo sapien
ttcaactgggatgagattatacctc

SEQ ID NO: 4917652 - DNA, 25 bp, Homo sapien
caaagctccgctctacctgggagtc

SEQ ID NO: 4917653 - DNA, 25 bp, Homo sapien
gtccccgaagaagtcgcacgcggga

SEQ ID NO: 4917654 - DNA, 25 bp, Homo sapien
gtcagccgtcgtctgaggtcctcca

SEQ ID NO: 4917655 - DNA, 25 bp, Homo sapien
ctggtcactgctctaccgctgctgc

SEQ ID NO: 4917656 - DNA, 25 bp, Homo sapien
gggtggcctcaacgcccgtccagct

SEQ ID NO: 4917657 - DNA, 25 bp, Homo sapien
acgcgcctcgagatcgcgcgctgca

SEQ ID NO: 4917658 - DNA, 25 bp, Homo sapien
ccgcctcctgcacgcgcctcgagat

SEQ ID NO: 4917659 - DNA, 25 bp, Homo sapien
ccagggtggcctcaacgcccgtcca

SEQ ID NO: 4917660 - DNA, 25 bp, Homo sapien
gcactttcatgtttaggtccagtaa

SEQ ID NO: 4917661 - DNA, 25 bp, Homo sapien
cagtaaagttctagccagctggtgg

SEQ ID NO: 4917662 - DNA, 25 bp, Homo sapien
gcatttctttattccggattcgcag

SEQ ID NO: 4917663 - DNA, 25 bp, Homo sapien
ttgggagtctgatgtaatttccagt

SEQ ID NO: 4917664 - DNA, 25 bp, Homo sapien
tgggtctataaattgcccctcaaaa

SEQ ID NO: 4917665 - DNA, 25 bp, Homo sapien
ttacttctatgtcccagtaaaaata

SEQ ID NO: 4917666 - DNA, 25 bp, Homo sapien
gttagttttaggatccagagcttcg

SEQ ID NO: 4917667 - DNA, 25 bp, Homo sapien
cagaattgtttcagggttgtatgcg

SEQ ID NO: 4917668 - DNA, 25 bp, Homo sapien
cctaaagggcatggttagaatccaa

SEQ ID NO: 4917669 - DNA, 25 bp, Homo sapien
acaattctccacaagaagcagggca

SEQ ID NO: 4917670 - DNA, 25 bp, Homo sapien
ccaggaagatggaatacccttagtc

SEQ ID NO: 4917671 - DNA, 25 bp, Homo sapien
caaggttgaataccgaaagttggca

SEQ ID NO: 4917672 - DNA, 25 bp, Homo sapien
tgtgcttttagtggttccgtttcag

SEQ ID NO: 4917673 - DNA, 25 bp, Homo sapien
ttgtgcttttagtggttccgtttca

SEQ ID NO: 4917674 - DNA, 25 bp, Homo sapien
cgggtacagttagatagtccaattc

SEQ ID NO: 4917675 - DNA, 25 bp, Homo sapien
aaagacagcacttttcgggtacagt

SEQ ID NO: 4917676 - DNA, 25 bp, Homo sapien
cactagatacaagtcatgaaactcc

SEQ ID NO: 4917677 - DNA, 25 bp, Homo sapien
aggcctggagtcttatacagcttga

SEQ ID NO: 4917678 - DNA, 25 bp, Homo sapien
cattaactgatctcctattgagagg

SEQ ID NO: 4917679 - DNA, 25 bp, Homo sapien
ggattcttctccaacaagccttcct

SEQ ID NO: 4917680 - DNA, 25 bp, Homo sapien
caagccttccttcagtatgcattaa

SEQ ID NO: 4917681 - DNA, 25 bp, Homo sapien
tcagtatgcattaactgatctccta

SEQ ID NO: 4917682 - DNA, 25 bp, Homo sapien
ggaagacagcatgagggtgatattt

SEQ ID NO: 4917683 - DNA, 25 bp, Homo sapien
tgggaagacagcatgagggtgatat

SEQ ID NO: 4917684 - DNA, 25 bp, Homo sapien
ctgggaagacagcatgagggtgata

SEQ ID NO: 4917685 - DNA, 25 bp, Homo sapien
aagacagcatgagggtgatatttcc

SEQ ID NO: 4917686 - DNA, 25 bp, Homo sapien
tccctccaggaagtaacatctctta

SEQ ID NO: 4917687 - DNA, 25 bp, Homo sapien
attcccaacactgcattccctccag

SEQ ID NO: 4917688 - DNA, 25 bp, Homo sapien
tcttcagattcccaacactgcattc

SEQ ID NO: 4917689 - DNA, 25 bp, Homo sapien
tcagattcccaacactgcattccct

SEQ ID NO: 4917690 - DNA, 25 bp, Homo sapien
tacatgaagaatccacttgcgttgg

SEQ ID NO: 4917691 - DNA, 25 bp, Homo sapien
catggcctttggcataggttctgcc

SEQ ID NO: 4917692 - DNA, 25 bp, Homo sapien
ctctcccgggacaagtgagtacatg

SEQ ID NO: 4917693 - DNA, 25 bp, Homo sapien
acttgcgttggcctcacacttctgc

SEQ ID NO: 4917694 - DNA, 25 bp, Homo sapien
tggcatggtcccagcaatcaagctc

SEQ ID NO: 4917695 - DNA, 25 bp, Homo sapien
gaaggagcagggatcaaggaatcac

SEQ ID NO: 4917696 - DNA, 25 bp, Homo sapien
cagactgctttcatgggtagcgaca

SEQ ID NO: 4917697 - DNA, 25 bp, Homo sapien
tcaagctcctgggtaaaaaggtcca

SEQ ID NO: 4917698 - DNA, 25 bp, Homo sapien
gatttaaatgtttgccctcgcccag

SEQ ID NO: 4917699 - DNA, 25 bp, Homo sapien
ctggaagcgtcagggcccacagtga

SEQ ID NO: 4917700 - DNA, 25 bp, Homo sapien
aactcggtcataggaatttgcgccc

SEQ ID NO: 4917701 - DNA, 25 bp, Homo sapien
gagggtggactgactaaaaatcttc

SEQ ID NO: 4917702 - DNA, 25 bp, Homo sapien
tgacacattgtggacaagagaattt

SEQ ID NO: 4917703 - DNA, 25 bp, Homo sapien
ctgacacattgtggacaagagaatt

SEQ ID NO: 4917704 - DNA, 25 bp, Homo sapien
gacacattgtggacaagagaattta

SEQ ID NO: 4917705 - DNA, 25 bp, Homo sapien
atcccaaagcttgacaccaccaagt

SEQ ID NO: 4917706 - DNA, 25 bp, Homo sapien
tttaagctgtaaggtgctaatatac

SEQ ID NO: 4917707 - DNA, 25 bp, Homo sapien
tctttggcccctttagactcccata

SEQ ID NO: 4917708 - DNA, 25 bp, Homo sapien
gactcccataagaaggatttccatc

SEQ ID NO: 4917709 - DNA, 25 bp, Homo sapien
aaagacttcatttgttacacccttg

SEQ ID NO: 4917710 - DNA, 25 bp, Homo sapien
tttgttacacccttgttactctcag

SEQ ID NO: 4917711 - DNA, 25 bp, Homo sapien
tgataggctcattctttgtaaagac

SEQ ID NO: 4917712 - DNA, 25 bp, Homo sapien
ttcctcaaagatgataggctcattc

SEQ ID NO: 4917713 - DNA, 25 bp, Homo sapien
ctagtgtcaattccacaagtgcagg

SEQ ID NO: 4917714 - DNA, 25 bp, Homo sapien
tgtggctccacgtcaatttgacttt

SEQ ID NO: 4917715 - DNA, 25 bp, Homo sapien
gctccacgtcaatttgactttggtg

SEQ ID NO: 4917716 - DNA, 25 bp, Homo sapien
ctgaactagtgtcaattccacaagt

SEQ ID NO: 4917717 - DNA, 25 bp, Homo sapien
gaaattgttgtattcgcttctttcc

SEQ ID NO: 4917718 - DNA, 25 bp, Homo sapien
tagtcactctcatataatgcctcat

SEQ ID NO: 4917719 - DNA, 25 bp, Homo sapien
tcttcacaggtattctgaaattgtt

SEQ ID NO: 4917720 - DNA, 25 bp, Homo sapien
gcttctttccttacttattctccac

SEQ ID NO: 4917721 - DNA, 25 bp, Homo sapien
caggtgcaactccactgctgttcag

SEQ ID NO: 4917722 - DNA, 25 bp, Homo sapien
cacaggtgcaactccactgctgttc

SEQ ID NO: 4917723 - DNA, 25 bp, Homo sapien
tacacaggtgcaactccactgctgt

SEQ ID NO: 4917724 - DNA, 25 bp, Homo sapien
ctatacacaggtgcaactccactgc

SEQ ID NO: 4917725 - DNA, 25 bp, Homo sapien
ttcttttccattccgacgaatacca

SEQ ID NO: 4917726 - DNA, 25 bp, Homo sapien
catcttcttttccattccgacgaat

SEQ ID NO: 4917727 - DNA, 25 bp, Homo sapien
tcttcttttccattccgacgaatac

SEQ ID NO: 4917728 - DNA, 25 bp, Homo sapien
tccatcttcttttccattccgacga

SEQ ID NO: 4917729 - DNA, 25 bp, Homo sapien
gattcactaaaggaacactttgttc

SEQ ID NO: 4917730 - DNA, 25 bp, Homo sapien
taaagtgcagctccatgctacgaac

SEQ ID NO: 4917731 - DNA, 25 bp, Homo sapien
gggattgcaatcaacaagattcact

SEQ ID NO: 4917732 - DNA, 25 bp, Homo sapien
tgccttgccttcataactcctaaag

SEQ ID NO: 4917733 - DNA, 25 bp, Homo sapien
ggtttccaagtgactactcaaagag

SEQ ID NO: 4917734 - DNA, 25 bp, Homo sapien
tctgaaaatgtctaagatctgccct

SEQ ID NO: 4917735 - DNA, 25 bp, Homo sapien
ctgatatacccatgaacgactgagg

SEQ ID NO: 4917736 - DNA, 25 bp, Homo sapien
gaactgtaatctgcagggaatttcc

SEQ ID NO: 4917737 - DNA, 25 bp, Homo sapien
tctgccagcatttgaccatctcctt

SEQ ID NO: 4917738 - DNA, 25 bp, Homo sapien
gatttctgccagcatttgaccatct

SEQ ID NO: 4917739 - DNA, 25 bp, Homo sapien
tgccagcatttgaccatctccttga

SEQ ID NO: 4917740 - DNA, 25 bp, Homo sapien
aggggatgaagggatttctgccagc

SEQ ID NO: 4917741 - DNA, 25 bp, Homo sapien
gtgctgttgtcaagaaaacacgtct

SEQ ID NO: 4917742 - DNA, 25 bp, Homo sapien
caatggtttcaaacatgtggggaaa

SEQ ID NO: 4917743 - DNA, 25 bp, Homo sapien
gtctatcccctgctttataactgca

SEQ ID NO: 4917744 - DNA, 25 bp, Homo sapien
caatttctagggcacatctcaatgg

SEQ ID NO: 4917745 - DNA, 25 bp, Homo sapien
cctggatcctgtgtggaaagtccac

SEQ ID NO: 4917746 - DNA, 25 bp, Homo sapien
tattttcccacacataggtccttgt

SEQ ID NO: 4917747 - DNA, 25 bp, Homo sapien
tcctctgggtcccctgatcactgag

SEQ ID NO: 4917748 - DNA, 25 bp, Homo sapien
tgatcactgagataatgctcttcgg

SEQ ID NO: 4917749 - DNA, 25 bp, Homo sapien
cttcggctgtccgatggtgagtcat

SEQ ID NO: 4917750 - DNA, 25 bp, Homo sapien
aagtgatagaaagatgatggtctcc

SEQ ID NO: 4917751 - DNA, 25 bp, Homo sapien
tgtgttccaccaacacatgagaggc

SEQ ID NO: 4917752 - DNA, 25 bp, Homo sapien
gttgacagtttgacatcccatgggt

SEQ ID NO: 4917753 - DNA, 25 bp, Homo sapien
atcgccaagaaaaaaccttcctgtg

SEQ ID NO: 4917754 - DNA, 25 bp, Homo sapien
tatgtccctttaatgtagagactga

SEQ ID NO: 4917755 - DNA, 25 bp, Homo sapien
ggtgtcattagggataggcttttaa

SEQ ID NO: 4917756 - DNA, 25 bp, Homo sapien
tagatgggtctataaaacatctggg

SEQ ID NO: 4917757 - DNA, 25 bp, Homo sapien
tgacaaaacagctcacatagatggg

SEQ ID NO: 4917758 - DNA, 25 bp, Homo sapien
tctcggcaggtatttgggttattaa

SEQ ID NO: 4917759 - DNA, 25 bp, Homo sapien
cagctctcggcaggtatttgggtta

SEQ ID NO: 4917760 - DNA, 25 bp, Homo sapien
caggtatttgggttattaatgtgca

SEQ ID NO: 4917761 - DNA, 25 bp, Homo sapien
aagtagcagctctcggcaggtattt

SEQ ID NO: 4917762 - DNA, 25 bp, Homo sapien
ttcactgtcggaacttgagaggcag

SEQ ID NO: 4917763 - DNA, 25 bp, Homo sapien
tgcaactggcaaatctagtttacag

SEQ ID NO: 4917764 - DNA, 25 bp, Homo sapien
gatgtgcacgtttttcactgtcgga

SEQ ID NO: 4917765 - DNA, 25 bp, Homo sapien
gatgagggagatgtgcacgtttttc

SEQ ID NO: 4917766 - DNA, 25 bp, Homo sapien
cacacggggtacttggaaaaacatg

SEQ ID NO: 4917767 - DNA, 25 bp, Homo sapien
tgcacacggggtacttggaaaaaca

SEQ ID NO: 4917768 - DNA, 25 bp, Homo sapien
tacgtgcacacggggtacttggaaa

SEQ ID NO: 4917769 - DNA, 25 bp, Homo sapien
ctacgtgcacacggggtacttggaa

SEQ ID NO: 4917770 - DNA, 25 bp, Homo sapien
acagtcagccaaatacaagctctgc

SEQ ID NO: 4917771 - DNA, 25 bp, Homo sapien
atcccatcaccatctgtgaaatcat

SEQ ID NO: 4917772 - DNA, 25 bp, Homo sapien
cccatcaccatctgtgaaatcatag

SEQ ID NO: 4917773 - DNA, 25 bp, Homo sapien
tacagtcagccaaatacaagctctg

SEQ ID NO: 4917774 - DNA, 25 bp, Homo sapien
gggagctacacgctttcctgataat

SEQ ID NO: 4917775 - DNA, 25 bp, Homo sapien
catccgtggataggagggagctaca

SEQ ID NO: 4917776 - DNA, 25 bp, Homo sapien
ccagaaatggctagttcaagtagca

SEQ ID NO: 4917777 - DNA, 25 bp, Homo sapien
gtttatcccagacacgcatccgtgg

SEQ ID NO: 4917778 - DNA, 25 bp, Homo sapien
tccagtagccatactggcttcttgt

SEQ ID NO: 4917779 - DNA, 25 bp, Homo sapien
tgcaagtgcctccagtagccatact

SEQ ID NO: 4917780 - DNA, 25 bp, Homo sapien
tgctctaagagcacccatgcatgcc

SEQ ID NO: 4917781 - DNA, 25 bp, Homo sapien
aagtgcctccagtagccatactggc

SEQ ID NO: 4917782 - DNA, 25 bp, Homo sapien
caggtccattttatgcagcaactga

SEQ ID NO: 4917783 - DNA, 25 bp, Homo sapien
ttacttaatcgttctcatctcagag

SEQ ID NO: 4917784 - DNA, 25 bp, Homo sapien
tccaatgcccattgcaaggcacagg

SEQ ID NO: 4917785 - DNA, 25 bp, Homo sapien
atgcagcaactgattgccattattt

SEQ ID NO: 4917786 - DNA, 25 bp, Homo sapien
tccctagagctagaactgcaagttc

SEQ ID NO: 4917787 - DNA, 25 bp, Homo sapien
gaaggtataccatctgaactgaaaa

SEQ ID NO: 4917788 - DNA, 25 bp, Homo sapien
tacaagtacagcctatctggagcct

SEQ ID NO: 4917789 - DNA, 25 bp, Homo sapien
ggttcgtgagatgctggtagctccc

SEQ ID NO: 4917790 - DNA, 25 bp, Homo sapien
ggcaataataacacagggagcatat

SEQ ID NO: 4917791 - DNA, 25 bp, Homo sapien
taataacacagggagcatattattt

SEQ ID NO: 4917792 - DNA, 25 bp, Homo sapien
caataataacacagggagcatatta

SEQ ID NO: 4917793 - DNA, 25 bp, Homo sapien
ataacacagggagcatattattttt

SEQ ID NO: 4917794 - DNA, 25 bp, Homo sapien
tcccatgaaagactgaaccgttgct

SEQ ID NO: 4917795 - DNA, 25 bp, Homo sapien
ttggaagcacaaccacaaggcgtta

SEQ ID NO: 4917796 - DNA, 25 bp, Homo sapien
cagtgagcagatgacaggagcttcc

SEQ ID NO: 4917797 - DNA, 25 bp, Homo sapien
caaaatgcatcaagggacagcagct

SEQ ID NO: 4917798 - DNA, 25 bp, Homo sapien
tttattaagtctcatagatgcaaat

SEQ ID NO: 4917799 - DNA, 25 bp, Homo sapien
tattggggctagctgcttgaagtgt

SEQ ID NO: 4917800 - DNA, 25 bp, Homo sapien
gggagaaatattggggctagctgct

SEQ ID NO: 4917801 - DNA, 25 bp, Homo sapien
gaaatattggggctagctgcttgaa

SEQ ID NO: 4917802 - DNA, 25 bp, Homo sapien
catgttgccaatgtgtgcatgcaac

SEQ ID NO: 4917803 - DNA, 25 bp, Homo sapien
tgtgttccccatatttaaactcgta

SEQ ID NO: 4917804 - DNA, 25 bp, Homo sapien
gttgccaatgtgtgcatgcaaccat

SEQ ID NO: 4917805 - DNA, 25 bp, Homo sapien
ccatatttaaactcgtatttcagaa

SEQ ID NO: 4917806 - DNA, 25 bp, Homo sapien
gggagccttttccttgcaagtgaag

SEQ ID NO: 4917807 - DNA, 25 bp, Homo sapien
aactttgctcacacagtttggagcc

SEQ ID NO: 4917808 - DNA, 25 bp, Homo sapien
cctgggtctactgttagcagaataa

SEQ ID NO: 4917809 - DNA, 25 bp, Homo sapien
cacacagtttggagcctctaagagg

SEQ ID NO: 4917810 - DNA, 25 bp, Homo sapien
tggtaggtctgctaaaattacagcc

SEQ ID NO: 4917811 - DNA, 25 bp, Homo sapien
ttttgaccttcggagcacacgtggg

SEQ ID NO: 4917812 - DNA, 25 bp, Homo sapien
cacacgtgggtgagctgcaaatagc

SEQ ID NO: 4917813 - DNA, 25 bp, Homo sapien
taagaggtagaggagctcaagagct

SEQ ID NO: 4917814 - DNA, 25 bp, Homo sapien
gcagcactgcaattatttatacact

SEQ ID NO: 4917815 - DNA, 25 bp, Homo sapien
cccagttttggaagcaaagcagcac

SEQ ID NO: 4917816 - DNA, 25 bp, Homo sapien
ccagttttggaagcaaagcagcact

SEQ ID NO: 4917817 - DNA, 25 bp, Homo sapien
caaagcagcactgcaattatttata

SEQ ID NO: 4917818 - DNA, 25 bp, Homo sapien
atgagctgcggctgttgttgtcgtt

SEQ ID NO: 4917819 - DNA, 25 bp, Homo sapien
gatgagctgcggctgttgttgtcgt

SEQ ID NO: 4917820 - DNA, 25 bp, Homo sapien
ccaggatgagctgcggctgttgttg

SEQ ID NO: 4917821 - DNA, 25 bp, Homo sapien
acggccaggatgagctgcggctgtt

SEQ ID NO: 4917822 - DNA, 25 bp, Homo sapien
acaagatacgttctttcaagaaact

SEQ ID NO: 4917823 - DNA, 25 bp, Homo sapien
tcacaagatacgttctttcaagaaa

SEQ ID NO: 4917824 - DNA, 25 bp, Homo sapien
cacaagatacgttctttcaagaaac

SEQ ID NO: 4917825 - DNA, 25 bp, Homo sapien
ctttctagtgtgaaagcatacatct

SEQ ID NO: 4917826 - DNA, 25 bp, Homo sapien
ggcatttgttctatctggcattcag

SEQ ID NO: 4917827 - DNA, 25 bp, Homo sapien
tatttcagtaatgtggagatgctct

SEQ ID NO: 4917828 - DNA, 25 bp, Homo sapien
gttctgttgtaattagccatctgcc

SEQ ID NO: 4917829 - DNA, 25 bp, Homo sapien
tgcctgacttaccacaaggctttgt

SEQ ID NO: 4917830 - DNA, 25 bp, Homo sapien
tagcccagataccagcagaatgcag

SEQ ID NO: 4917831 - DNA, 25 bp, Homo sapien
gctatctgagaatggtcagcttcca

SEQ ID NO: 4917832 - DNA, 25 bp, Homo sapien
caggctaaccagataaagtgagaca

SEQ ID NO: 4917833 - DNA, 25 bp, Homo sapien
gactgtcacataaggaattccaggc

SEQ ID NO: 4917834 - DNA, 25 bp, Homo sapien
tctaagggaaagatacatagccctc

SEQ ID NO: 4917835 - DNA, 25 bp, Homo sapien
gaaataccctatgctgtcttacaaa

SEQ ID NO: 4917836 - DNA, 25 bp, Homo sapien
ttatggcctgcctctcctatgagta

SEQ ID NO: 4917837 - DNA, 25 bp, Homo sapien
tatcatgaagcaacaagcctactct

SEQ ID NO: 4917838 - DNA, 25 bp, Homo sapien
aagctgctagcaaattcactggtga

SEQ ID NO: 4917839 - DNA, 25 bp, Homo sapien
ggtctttccttagtgtgtgcaccca

SEQ ID NO: 4917840 - DNA, 25 bp, Homo sapien
ttgtctgactttccctgcatgcgca

SEQ ID NO: 4917841 - DNA, 25 bp, Homo sapien
ggatggaagtccataatcaagctgc

SEQ ID NO: 4917842 - DNA, 25 bp, Homo sapien
tacagctctactgttgaacccctct

SEQ ID NO: 4917843 - DNA, 25 bp, Homo sapien
taatgcatttaacaatgtaccacat

SEQ ID NO: 4917844 - DNA, 25 bp, Homo sapien
cagcttctatgagtacagctctact

SEQ ID NO: 4917845 - DNA, 25 bp, Homo sapien
tcatgttgcataatatcttccaatc

SEQ ID NO: 4917846 - DNA, 25 bp, Homo sapien
cagatactttttgacgaggtctcca

SEQ ID NO: 4917847 - DNA, 25 bp, Homo sapien
cagtaaacttgagatgtccatcacc

SEQ ID NO: 4917848 - DNA, 25 bp, Homo sapien
tcttggctgaagtaactaaggttca

SEQ ID NO: 4917849 - DNA, 25 bp, Homo sapien
agtgggaatcccaagctcagtgttt

SEQ ID NO: 4917850 - DNA, 25 bp, Homo sapien
tgctatgaagtgttcatttgcagct

SEQ ID NO: 4917851 - DNA, 25 bp, Homo sapien
atgaagtgttcatttgcagctcctt

SEQ ID NO: 4917852 - DNA, 25 bp, Homo sapien
tatgaagtgttcatttgcagctcct

SEQ ID NO: 4917853 - DNA, 25 bp, Homo sapien
ctatgaagtgttcatttgcagctcc

SEQ ID NO: 4917854 - DNA, 25 bp, Homo sapien
gatctttattcaccggtttctgttg

SEQ ID NO: 4917855 - DNA, 25 bp, Homo sapien
ctttattcaccggtttctgttggag

SEQ ID NO: 4917856 - DNA, 25 bp, Homo sapien
gggacactgatctttattcaccggt

SEQ ID NO: 4917857 - DNA, 25 bp, Homo sapien
actgatctttattcaccggtttctg

SEQ ID NO: 4917858 - DNA, 25 bp, Homo sapien
ttccacttggcataggcgtactcat

SEQ ID NO: 4917859 - DNA, 25 bp, Homo sapien
tggcataggcgtactcattcgcccc

SEQ ID NO: 4917860 - DNA, 25 bp, Homo sapien
agcagaacagagtttccacttggca

SEQ ID NO: 4917861 - DNA, 25 bp, Homo sapien
ctgaagcagaacagagtttccactt

SEQ ID NO: 4917862 - DNA, 25 bp, Homo sapien
gcagcattgtccataagcaggaaaa

SEQ ID NO: 4917863 - DNA, 25 bp, Homo sapien
cagcattgtccataagcaggaaaaa

SEQ ID NO: 4917864 - DNA, 25 bp, Homo sapien
cattgtccataagcaggaaaaaact

SEQ ID NO: 4917865 - DNA, 25 bp, Homo sapien
gcattgtccataagcaggaaaaaac

SEQ ID NO: 4917866 - DNA, 25 bp, Homo sapien
cagagaccagaaacacagatcagtg

SEQ ID NO: 4917867 - DNA, 25 bp, Homo sapien
agtcttgcaagaaataggctgtcca

SEQ ID NO: 4917868 - DNA, 25 bp, Homo sapien
gaaacaccttagaaacagaccctgc

SEQ ID NO: 4917869 - DNA, 25 bp, Homo sapien
caaaacatgaaaaacggtggactgc

SEQ ID NO: 4917870 - DNA, 25 bp, Homo sapien
aagacttgacttaaggcctgtggag

SEQ ID NO: 4917871 - DNA, 25 bp, Homo sapien
taaaggcatgaactagggcagcagc

SEQ ID NO: 4917872 - DNA, 25 bp, Homo sapien
caaggctgtggcatgttgagatctg

SEQ ID NO: 4917873 - DNA, 25 bp, Homo sapien
taaagtctcgatagtgttagcgaag

SEQ ID NO: 4917874 - DNA, 25 bp, Homo sapien
tagatgttgcgatctggcccacaga

SEQ ID NO: 4917875 - DNA, 25 bp, Homo sapien
taaccatcatgggtgaaaatgccac

SEQ ID NO: 4917876 - DNA, 25 bp, Homo sapien
cagtgcgggtcagattcaaagagtc

SEQ ID NO: 4917877 - DNA, 25 bp, Homo sapien
caatgtaagccatgagagtcctgcc

SEQ ID NO: 4917878 - DNA, 25 bp, Homo sapien
tgagcaggaaactggtcaggtcaat

SEQ ID NO: 4917879 - DNA, 25 bp, Homo sapien
taagaggtgggcagcatctgtgaca

SEQ ID NO: 4917880 - DNA, 25 bp, Homo sapien
tagagggaggcttcgatgacaacca

SEQ ID NO: 4917881 - DNA, 25 bp, Homo sapien
gccatccaaatgtcagccgcttaga

SEQ ID NO: 4917882 - DNA, 25 bp, Homo sapien
atctggtaatcaggatacagcaggc

SEQ ID NO: 4917883 - DNA, 25 bp, Homo sapien
tcacatgccaggtacactagcacgc

SEQ ID NO: 4917884 - DNA, 25 bp, Homo sapien
acgatgatcatcacagtcgcctgga

SEQ ID NO: 4917885 - DNA, 25 bp, Homo sapien
actgcgcagctggaaacgatgatca

SEQ ID NO: 4917886 - DNA, 25 bp, Homo sapien
cactaattagcacactgatactctg

SEQ ID NO: 4917887 - DNA, 25 bp, Homo sapien
aatagatctccaagggcatgcacaa

SEQ ID NO: 4917888 - DNA, 25 bp, Homo sapien
tggccaaggcatctctggtgcaaaa

SEQ ID NO: 4917889 - DNA, 25 bp, Homo sapien
tgtacttccttgtgattgtggccaa

SEQ ID NO: 4917890 - DNA, 25 bp, Homo sapien
attgggtcggctattttatactctg

SEQ ID NO: 4917891 - DNA, 25 bp, Homo sapien
tccatgagtaagatggagaagtcct

SEQ ID NO: 4917892 - DNA, 25 bp, Homo sapien
agattgggtcggctattttatactc

SEQ ID NO: 4917893 - DNA, 25 bp, Homo sapien
cttccatgagtaagatggagaagtc

SEQ ID NO: 4917894 - DNA, 25 bp, Homo sapien
gttcccaggaggccgtactgatgtt

SEQ ID NO: 4917895 - DNA, 25 bp, Homo sapien
caggaggccgtactgatgttgacct

SEQ ID NO: 4917896 - DNA, 25 bp, Homo sapien
aggaggccgtactgatgttgacctt

SEQ ID NO: 4917897 - DNA, 25 bp, Homo sapien
tgttcccaggaggccgtactgatgt

SEQ ID NO: 4917898 - DNA, 25 bp, Homo sapien
aaatgtaccacgactccattccaga

SEQ ID NO: 4917899 - DNA, 25 bp, Homo sapien
tctatggatgaagctccaaaatcta

SEQ ID NO: 4917900 - DNA, 25 bp, Homo sapien
ggatgcacattagtattaccagagg

SEQ ID NO: 4917901 - DNA, 25 bp, Homo sapien
gctccaaaatctagagtctttcaga

SEQ ID NO: 4917902 - DNA, 25 bp, Homo sapien
ttcacaccactgtaattcaggctct

SEQ ID NO: 4917903 - DNA, 25 bp, Homo sapien
ctgtgcacagacagcaccccgtcga

SEQ ID NO: 4917904 - DNA, 25 bp, Homo sapien
ctgtagcaacatgagctgagagaat

SEQ ID NO: 4917905 - DNA, 25 bp, Homo sapien
caccccgtcgactgctaaaataagc

SEQ ID NO: 4917906 - DNA, 25 bp, Homo sapien
tagtataaacctagtattataagaa

SEQ ID NO: 4917907 - DNA, 25 bp, Homo sapien
cccagctctaggacatatcagagac

SEQ ID NO: 4917908 - DNA, 25 bp, Homo sapien
gaattttctcacatggctacagaat

SEQ ID NO: 4917909 - DNA, 25 bp, Homo sapien
cagctctaggacatatcagagacaa

SEQ ID NO: 4917910 - DNA, 25 bp, Homo sapien
gtcctggtcaactggagattccatc

SEQ ID NO: 4917911 - DNA, 25 bp, Homo sapien
tgcatcgtaaagcttttgctaaggg

SEQ ID NO: 4917912 - DNA, 25 bp, Homo sapien
tcacagaaaaggcagtcggggtcct

SEQ ID NO: 4917913 - DNA, 25 bp, Homo sapien
aatttctctccgaaccacttggctg

SEQ ID NO: 4917914 - DNA, 25 bp, Homo sapien
gaaggtggcctgtcaaatttgggaa

SEQ ID NO: 4917915 - DNA, 25 bp, Homo sapien
taatgtggcgttagcatacagagtc

SEQ ID NO: 4917916 - DNA, 25 bp, Homo sapien
tattgccgatagttacaaacagctg

SEQ ID NO: 4917917 - DNA, 25 bp, Homo sapien
caaacagctgttacttcggctccac

SEQ ID NO: 4917918 - DNA, 25 bp, Homo sapien
ccattttgagaacccgatgtggcag

SEQ ID NO: 4917919 - DNA, 25 bp, Homo sapien
gacttgggagacctatgactttgcc

SEQ ID NO: 4917920 - DNA, 25 bp, Homo sapien
taagtaactagctcgaggtcacaga

SEQ ID NO: 4917921 - DNA, 25 bp, Homo sapien
gagaaagaaatgcacccggtcagag

SEQ ID NO: 4917922 - DNA, 25 bp, Homo sapien
tcatggcctacagggcttttgccca

SEQ ID NO: 4917923 - DNA, 25 bp, Homo sapien
tcagttgagagctttgtacttacca

SEQ ID NO: 4917924 - DNA, 25 bp, Homo sapien
gatatagctgcctcgctgtagccct

SEQ ID NO: 4917925 - DNA, 25 bp, Homo sapien
gaattgcagcatgcaagctttctgt

SEQ ID NO: 4917926 - DNA, 25 bp, Homo sapien
cactgtcctgtacccactgtccgtc

SEQ ID NO: 4917927 - DNA, 25 bp, Homo sapien
tgtacccactgtccgtcactcccca

SEQ ID NO: 4917928 - DNA, 25 bp, Homo sapien
gtcctgtacccactgtccgtcactc

SEQ ID NO: 4917929 - DNA, 25 bp, Homo sapien
ctgtcctgtacccactgtccgtcac

SEQ ID NO: 4917930 - DNA, 25 bp, Homo sapien
gagcaaggatggctgttgatgcaaa

SEQ ID NO: 4917931 - DNA, 25 bp, Homo sapien
ttcctaccactacccagattagcag

SEQ ID NO: 4917932 - DNA, 25 bp, Homo sapien
ctaccactacccagattagcagaca

SEQ ID NO: 4917933 - DNA, 25 bp, Homo sapien
aaggatggctgttgatgcaaaggca

SEQ ID NO: 4917934 - DNA, 25 bp, Homo sapien
tactgctattaggtaccggtggtgg

SEQ ID NO: 4917935 - DNA, 25 bp, Homo sapien
agaaagttgacagggaagtccctca

SEQ ID NO: 4917936 - DNA, 25 bp, Homo sapien
tcatttgcaagaattgagctttatt

SEQ ID NO: 4917937 - DNA, 25 bp, Homo sapien
cattttcacaggctatccataagaa

SEQ ID NO: 4917938 - DNA, 25 bp, Homo sapien
tcctggctgttagcttggagcctca

SEQ ID NO: 4917939 - DNA, 25 bp, Homo sapien
catctgtaggcttaacaaaggctag

SEQ ID NO: 4917940 - DNA, 25 bp, Homo sapien
cttaagtgtccccatagcatggtgg

SEQ ID NO: 4917941 - DNA, 25 bp, Homo sapien
taccctgagatgtagagtggtgtct

SEQ ID NO: 4917942 - DNA, 25 bp, Homo sapien
gccagaagtcaaagccaatacaacc

SEQ ID NO: 4917943 - DNA, 25 bp, Homo sapien
ctgttgccagaagtcaaagccaata

SEQ ID NO: 4917944 - DNA, 25 bp, Homo sapien
tgccagaagtcaaagccaatacaac

SEQ ID NO: 4917945 - DNA, 25 bp, Homo sapien
gttgccagaagtcaaagccaataca

SEQ ID NO: 4917946 - DNA, 25 bp, Homo sapien
gaatgcgttaatgtagttagactcc

SEQ ID NO: 4917947 - DNA, 25 bp, Homo sapien
atgtagttagactccatttccagga

SEQ ID NO: 4917948 - DNA, 25 bp, Homo sapien
tctgaatgcgttaatgtagttagac

SEQ ID NO: 4917949 - DNA, 25 bp, Homo sapien
ttccctctgtctgaatgcgttaatg

SEQ ID NO: 4917950 - DNA, 25 bp, Homo sapien
tttattattccttccctggcaacaa

SEQ ID NO: 4917951 - DNA, 25 bp, Homo sapien
cagcttgtgaagtgactgaggacat

SEQ ID NO: 4917952 - DNA, 25 bp, Homo sapien
cttgtgaagtgactgaggacatcac

SEQ ID NO: 4917953 - DNA, 25 bp, Homo sapien
tattccttccctggcaacaattatt

SEQ ID NO: 4917954 - DNA, 25 bp, Homo sapien
gaagcactcccggaaccaaaggcca

SEQ ID NO: 4917955 - DNA, 25 bp, Homo sapien
ccagaagcactcccggaaccaaagg

SEQ ID NO: 4917956 - DNA, 25 bp, Homo sapien
cagaagcactcccggaaccaaaggc

SEQ ID NO: 4917957 - DNA, 25 bp, Homo sapien
agcactcccggaaccaaaggccagg

SEQ ID NO: 4917958 - DNA, 25 bp, Homo sapien
tccacagctgttccacaagcacttt

SEQ ID NO: 4917959 - DNA, 25 bp, Homo sapien
attcctgtcaacctgactttccaca

SEQ ID NO: 4917960 - DNA, 25 bp, Homo sapien
atggattcaggccattcctgtcaac

SEQ ID NO: 4917961 - DNA, 25 bp, Homo sapien
gctgttccacaagcactttgagtgc

SEQ ID NO: 4917962 - DNA, 25 bp, Homo sapien
tgtcttgataggtagggattatccg

SEQ ID NO: 4917963 - DNA, 25 bp, Homo sapien
tgcatacaacattgaaatgagagag

SEQ ID NO: 4917964 - DNA, 25 bp, Homo sapien
tatccgttgacgaagactcagtggg

SEQ ID NO: 4917965 - DNA, 25 bp, Homo sapien
gagagagaactgtcatatgtcttga

SEQ ID NO: 4917966 - DNA, 25 bp, Homo sapien
tcaaagggagataaagggattttca

SEQ ID NO: 4917967 - DNA, 25 bp, Homo sapien
ctttgaaagccctttgactgagagc

SEQ ID NO: 4917968 - DNA, 25 bp, Homo sapien
ctgagagctaaatctctccagacag

SEQ ID NO: 4917969 - DNA, 25 bp, Homo sapien
tattcctttgggtagcagcctagca

SEQ ID NO: 4917970 - DNA, 25 bp, Homo sapien
tgactctttgaagaccactctcatc

SEQ ID NO: 4917971 - DNA, 25 bp, Homo sapien
actctttgaagaccactctcatcac

SEQ ID NO: 4917972 - DNA, 25 bp, Homo sapien
ctttgaagaccactctcatcacagc

SEQ ID NO: 4917973 - DNA, 25 bp, Homo sapien
tctttgaagaccactctcatcacag

SEQ ID NO: 4917974 - DNA, 25 bp, Homo sapien
cccaagatagtcaattgaggctgat

SEQ ID NO: 4917975 - DNA, 25 bp, Homo sapien
caattgaggctgattagtaaaagca

SEQ ID NO: 4917976 - DNA, 25 bp, Homo sapien
aaaatgccccaagatagtcaattga

SEQ ID NO: 4917977 - DNA, 25 bp, Homo sapien
ctctgtaaaaatgccccaagatagt

SEQ ID NO: 4917978 - DNA, 25 bp, Homo sapien
gctggcgaattatcagagtgtcaca

SEQ ID NO: 4917979 - DNA, 25 bp, Homo sapien
gcctgagctggcgaattatcagagt

SEQ ID NO: 4917980 - DNA, 25 bp, Homo sapien
tcttgcagcccacttgtcctcagaa

SEQ ID NO: 4917981 - DNA, 25 bp, Homo sapien
ttatcagagtgtcacatttgatacc

SEQ ID NO: 4917982 - DNA, 25 bp, Homo sapien
agctgctgctaaacattgccctgca

SEQ ID NO: 4917983 - DNA, 25 bp, Homo sapien
aatcaaggatgattaaggctaattc

SEQ ID NO: 4917984 - DNA, 25 bp, Homo sapien
ggatgattaaggctaattcaaggac

SEQ ID NO: 4917985 - DNA, 25 bp, Homo sapien
aaggatgattaaggctaattcaagg

SEQ ID NO: 4917986 - DNA, 25 bp, Homo sapien
tcaaggatgattaaggctaattcaa

SEQ ID NO: 4917987 - DNA, 25 bp, Homo sapien
catgtcagctccttgtacctttcct

SEQ ID NO: 4917988 - DNA, 25 bp, Homo sapien
ttaaaaatcaggttcatgtcagctc

SEQ ID NO: 4917989 - DNA, 25 bp, Homo sapien
aaaaatcaggttcatgtcagctcct

SEQ ID NO: 4917990 - DNA, 25 bp, Homo sapien
agctccttgtacctttccttccaga

SEQ ID NO: 4917991 - DNA, 25 bp, Homo sapien
tactcatgagtatgcacatcgattt

SEQ ID NO: 4917992 - DNA, 25 bp, Homo sapien
ttactcatgagtatgcacatcgatt

SEQ ID NO: 4917993 - DNA, 25 bp, Homo sapien
actcatgagtatgcacatcgatttc

SEQ ID NO: 4917994 - DNA, 25 bp, Homo sapien
tcatgagtatgcacatcgatttctt

SEQ ID NO: 4917995 - DNA, 25 bp, Homo sapien
tgtggtgccagctgtattatttacc

SEQ ID NO: 4917996 - DNA, 25 bp, Homo sapien
agcccttggattatctgccaggagc

SEQ ID NO: 4917997 - DNA, 25 bp, Homo sapien
caggagctctccctccaggtttagg

SEQ ID NO: 4917998 - DNA, 25 bp, Homo sapien
ggtttaggggcagcacctttcctgc

SEQ ID NO: 4917999 - DNA, 25 bp, Homo sapien
tccagatgataggaaggaaaacagc

SEQ ID NO: 4918000 - DNA, 25 bp, Homo sapien
tgttgctcaacccagaagatagaag

SEQ ID NO: 4918001 - DNA, 25 bp, Homo sapien
tagtgatgatccagacaaaagagag

SEQ ID NO: 4918002 - DNA, 25 bp, Homo sapien
cagtagctatttgggcttctgcaca

SEQ ID NO: 4918003 - DNA, 25 bp, Homo sapien
gctgattgccaacccattgcttgga

SEQ ID NO: 4918004 - DNA, 25 bp, Homo sapien
ccttgctcagcttgaatcgggctga

SEQ ID NO: 4918005 - DNA, 25 bp, Homo sapien
ttcggccatcgtaatataagcagtt

SEQ ID NO: 4918006 - DNA, 25 bp, Homo sapien
gctgctggctaagtatttcgattgc

SEQ ID NO: 4918007 - DNA, 25 bp, Homo sapien
gaattcagccttataccgtttcagc

SEQ ID NO: 4918008 - DNA, 25 bp, Homo sapien
gtaccagctggcgttgttctaccat

SEQ ID NO: 4918009 - DNA, 25 bp, Homo sapien
gggagcgtgtgaacgaattcagcct

SEQ ID NO: 4918010 - DNA, 25 bp, Homo sapien
gccttataccgtttcagcccttgct

SEQ ID NO: 4918011 - DNA, 25 bp, Homo sapien
tcatgccacacttaattgggaataa

SEQ ID NO: 4918012 - DNA, 25 bp, Homo sapien
catgccacacttaattgggaataaa

SEQ ID NO: 4918013 - DNA, 25 bp, Homo sapien
ttaggtttgcaacaagcactgaaac

SEQ ID NO: 4918014 - DNA, 25 bp, Homo sapien
gaatctcaatccagtgaggaaaggc

SEQ ID NO: 4918015 - DNA, 25 bp, Homo sapien
catttgatatgaagatttaggtttg

SEQ ID NO: 4918016 - DNA, 25 bp, Homo sapien
ctcctgtgaatctcaatccagtgag

SEQ ID NO: 4918017 - DNA, 25 bp, Homo sapien
cccaggtttcctggactcagtgtca

SEQ ID NO: 4918018 - DNA, 25 bp, Homo sapien
acccaggtttcctggactcagtgtc

SEQ ID NO: 4918019 - DNA, 25 bp, Homo sapien
ggtttctctggtgatagcctttttg

SEQ ID NO: 4918020 - DNA, 25 bp, Homo sapien
cttttgggtgatctcctttctattc

SEQ ID NO: 4918021 - DNA, 25 bp, Homo sapien
gtgtgcttttgggtgatctcctttc

SEQ ID NO: 4918022 - DNA, 25 bp, Homo sapien
ccggggcctggaagcatggagcatt

SEQ ID NO: 4918023 - DNA, 25 bp, Homo sapien
tgcttttgggtgatctcctttctat

SEQ ID NO: 4918024 - DNA, 25 bp, Homo sapien
tactcagatctaccagattctacat

SEQ ID NO: 4918025 - DNA, 25 bp, Homo sapien
tcaagttgccccattcccatgcaga

SEQ ID NO: 4918026 - DNA, 25 bp, Homo sapien
tttctttctagccagtactcagatc

SEQ ID NO: 4918027 - DNA, 25 bp, Homo sapien
cagtactcagatctaccagattcta

SEQ ID NO: 4918028 - DNA, 25 bp, Homo sapien
ggacttgtagctttctacattggct

SEQ ID NO: 4918029 - DNA, 25 bp, Homo sapien
caaaattattggacttgtagctttc

SEQ ID NO: 4918030 - DNA, 25 bp, Homo sapien
tagaacttgtctccagaccatatgc

SEQ ID NO: 4918031 - DNA, 25 bp, Homo sapien
caattcttgccttgacttgatttag

SEQ ID NO: 4918032 - DNA, 25 bp, Homo sapien
cactgattttccagactaggctgca

SEQ ID NO: 4918033 - DNA, 25 bp, Homo sapien
ttctttctttgttgaggccaacact

SEQ ID NO: 4918034 - DNA, 25 bp, Homo sapien
taatggcaacaccaatgatatgtgg

SEQ ID NO: 4918035 - DNA, 25 bp, Homo sapien
cagagttggtaggagactttgtctt

SEQ ID NO: 4918036 - DNA, 25 bp, Homo sapien
cattcataatggcaacaccaatgat

SEQ ID NO: 4918037 - DNA, 25 bp, Homo sapien
ccaaagaaagcatcagtcaggccat

SEQ ID NO: 4918038 - DNA, 25 bp, Homo sapien
caacagtagtcagggtgtactggat

SEQ ID NO: 4918039 - DNA, 25 bp, Homo sapien
ggccatcaacagtagtcagggtgta

SEQ ID NO: 4918040 - DNA, 25 bp, Homo sapien
aagaaagcatcagtcaggccatcaa

SEQ ID NO: 4918041 - DNA, 25 bp, Homo sapien
taacaatagctttcacagccagaaa

SEQ ID NO: 4918042 - DNA, 25 bp, Homo sapien
ccctgctttcaatagtgctttgtaa

SEQ ID NO: 4918043 - DNA, 25 bp, Homo sapien
taatttaacaatagctttcacagcc

SEQ ID NO: 4918044 - DNA, 25 bp, Homo sapien
gctttgtaatttaacaatagctttc

SEQ ID NO: 4918045 - DNA, 25 bp, Homo sapien
tccatatcaagtactatcttcaccc

SEQ ID NO: 4918046 - DNA, 25 bp, Homo sapien
atcttcccctccagtgctaaactgt

SEQ ID NO: 4918047 - DNA, 25 bp, Homo sapien
ttgttctttctcacaacctaattcc

SEQ ID NO: 4918048 - DNA, 25 bp, Homo sapien
atatcaagtactatcttcaccctga

SEQ ID NO: 4918049 - DNA, 25 bp, Homo sapien
agatgctccaaagataaaggccatg

SEQ ID NO: 4918050 - DNA, 25 bp, Homo sapien
tccgagccaggcgtgggatacaatc

SEQ ID NO: 4918051 - DNA, 25 bp, Homo sapien
gctaagaccactggaaaagtgcagt

SEQ ID NO: 4918052 - DNA, 25 bp, Homo sapien
cgagccaggcgtgggatacaatctc

SEQ ID NO: 4918053 - DNA, 25 bp, Homo sapien
ttgctaagaccactggaaaagtgca

SEQ ID NO: 4918054 - DNA, 25 bp, Homo sapien
gttgcagatttagggacatagtcat

SEQ ID NO: 4918055 - DNA, 25 bp, Homo sapien
cctagtgatgtgttcttatctaaac

SEQ ID NO: 4918056 - DNA, 25 bp, Homo sapien
ggtttcagtgggtgcagcctttatc

SEQ ID NO: 4918057 - DNA, 25 bp, Homo sapien
ctgtggttgaaaatggctcgtcaca

SEQ ID NO: 4918058 - DNA, 25 bp, Homo sapien
ccataagttgactttcaaggctgct

SEQ ID NO: 4918059 - DNA, 25 bp, Homo sapien
gactttcaaggctgctaggcactgc

SEQ ID NO: 4918060 - DNA, 25 bp, Homo sapien
aaggctgctaggcactgcacatctg

SEQ ID NO: 4918061 - DNA, 25 bp, Homo sapien
attccagaaccccataagttgactt

SEQ ID NO: 4918062 - DNA, 25 bp, Homo sapien
tggttttgagatgctaactaggcca

SEQ ID NO: 4918063 - DNA, 25 bp, Homo sapien
tgctaactaggccagatccttccat

SEQ ID NO: 4918064 - DNA, 25 bp, Homo sapien
tgtggttttgagatgctaactaggc

SEQ ID NO: 4918065 - DNA, 25 bp, Homo sapien
gtggttttgagatgctaactaggcc

SEQ ID NO: 4918066 - DNA, 25 bp, Homo sapien
catttcctctgatcttcggatctgg

SEQ ID NO: 4918067 - DNA, 25 bp, Homo sapien
ggatgagcaaggatcacagctgaac

SEQ ID NO: 4918068 - DNA, 25 bp, Homo sapien
gagcaaggatcacagctgaacagta

SEQ ID NO: 4918069 - DNA, 25 bp, Homo sapien
gatctggggatgagcaaggatcaca

SEQ ID NO: 4918070 - DNA, 25 bp, Homo sapien
ctgggacttgtatgcacagagttgt

SEQ ID NO: 4918071 - DNA, 25 bp, Homo sapien
tcaaaatacattgccgaaatcagtg

SEQ ID NO: 4918072 - DNA, 25 bp, Homo sapien
ctgctctgggacttgtatgcacaga

SEQ ID NO: 4918073 - DNA, 25 bp, Homo sapien
atacattgccgaaatcagtgttgag

SEQ ID NO: 4918074 - DNA, 25 bp, Homo sapien
tcagaaaacgtcatagacaccgccc

SEQ ID NO: 4918075 - DNA, 25 bp, Homo sapien
ggtgtaactggcaacctgcgattcg

SEQ ID NO: 4918076 - DNA, 25 bp, Homo sapien
gacggacgggttaagtagccaatca

SEQ ID NO: 4918077 - DNA, 25 bp, Homo sapien
tctctgtgacatgatacggactccc

SEQ ID NO: 4918078 - DNA, 25 bp, Homo sapien
gatttcaaaacagcggccgcgactt

SEQ ID NO: 4918079 - DNA, 25 bp, Homo sapien
tctgcccggaattgggaggctgtgg

SEQ ID NO: 4918080 - DNA, 25 bp, Homo sapien
gcggctgcagcttcaggccggaagg

SEQ ID NO: 4918081 - DNA, 25 bp, Homo sapien
ggcctcagcgttggaaccagcttga

SEQ ID NO: 4918082 - DNA, 25 bp, Homo sapien
tgtctcctgcccgatgcggcacagc

SEQ ID NO: 4918083 - DNA, 25 bp, Homo sapien
ctccatggtgcggtacacgatgtcc

SEQ ID NO: 4918084 - DNA, 25 bp, Homo sapien
ccgtgttgacttcccgggcggcctg

SEQ ID NO: 4918085 - DNA, 25 bp, Homo sapien
cggcacagcgacgccgtgttgactt

SEQ ID NO: 4918086 - DNA, 25 bp, Homo sapien
gtttctcaagtcctgaggctacgtg

SEQ ID NO: 4918087 - DNA, 25 bp, Homo sapien
tctctgtgattaccttcatctgccc

SEQ ID NO: 4918088 - DNA, 25 bp, Homo sapien
ctggtaccttaccaatgagggtatc

SEQ ID NO: 4918089 - DNA, 25 bp, Homo sapien
tgagggtatccagtatctctgtgat

SEQ ID NO: 4918090 - DNA, 25 bp, Homo sapien
gagctggcagacaagaatgtgtcca

SEQ ID NO: 4918091 - DNA, 25 bp, Homo sapien
gctggcagacaagaatgtgtccaac

SEQ ID NO: 4918092 - DNA, 25 bp, Homo sapien
cggagctggcagacaagaatgtgtc

SEQ ID NO: 4918093 - DNA, 25 bp, Homo sapien
ccggagctggcagacaagaatgtgt

SEQ ID NO: 4918094 - DNA, 25 bp, Homo sapien
tgttgaagcttaagaagaaacgtat

SEQ ID NO: 4918095 - DNA, 25 bp, Homo sapien
aaatgttgaagcttaagaagaaacg

SEQ ID NO: 4918096 - DNA, 25 bp, Homo sapien
ccgaaatgttgaagcttaagaagaa

SEQ ID NO: 4918097 - DNA, 25 bp, Homo sapien
gtggccgaaatgttgaagcttaaga

SEQ ID NO: 4918098 - DNA, 25 bp, Homo sapien
tgttaaccggtcttgatatgttcca

SEQ ID NO: 4918099 - DNA, 25 bp, Homo sapien
tgtggtaagtgacaccatttggcag

SEQ ID NO: 4918100 - DNA, 25 bp, Homo sapien
ggaatgggatccatcccaccacagt

SEQ ID NO: 4918101 - DNA, 25 bp, Homo sapien
gaaagttggcgaagattatcctgta

SEQ ID NO: 4918102 - DNA, 25 bp, Homo sapien
tatattcatcctccctctatcacaa

SEQ ID NO: 4918103 - DNA, 25 bp, Homo sapien
tgtcttgacactagttcacacctta

SEQ ID NO: 4918104 - DNA, 25 bp, Homo sapien
ttaacaactgtcttgacactagttc

SEQ ID NO: 4918105 - DNA, 25 bp, Homo sapien
tagttcacaccttatattcatcctc

SEQ ID NO: 4918106 - DNA, 25 bp, Homo sapien
gcattctatgcattaccctttcagg

SEQ ID NO: 4918107 - DNA, 25 bp, Homo sapien
ggtgatggcctgaaataagagcttt

SEQ ID NO: 4918108 - DNA, 25 bp, Homo sapien
caactaaacaatacttccagcagga

SEQ ID NO: 4918109 - DNA, 25 bp, Homo sapien
aataatttcaattcaggtgatggcc

SEQ ID NO: 4918110 - DNA, 25 bp, Homo sapien
gcccgatcatcattctttgagccat

SEQ ID NO: 4918111 - DNA, 25 bp, Homo sapien
gcaaaacgaggtgggccagcccgat

SEQ ID NO: 4918112 - DNA, 25 bp, Homo sapien
tctcgcctctcttcactagcaaaac

SEQ ID NO: 4918113 - DNA, 25 bp, Homo sapien
cgaggtgggccagcccgatcatcat

SEQ ID NO: 4918114 - DNA, 25 bp, Homo sapien
gagcatggtatcagtcttgtcttag

SEQ ID NO: 4918115 - DNA, 25 bp, Homo sapien
cactgtctttttgtactggctataa

SEQ ID NO: 4918116 - DNA, 25 bp, Homo sapien
taacaagctcatacatagtaactcc

SEQ ID NO: 4918117 - DNA, 25 bp, Homo sapien
tattcactgtgctatctctggtagg

SEQ ID NO: 4918118 - DNA, 25 bp, Homo sapien
ggtacagaacaaactatgtttacat

SEQ ID NO: 4918119 - DNA, 25 bp, Homo sapien
aagtcaaagacatgttatttctaag

SEQ ID NO: 4918120 - DNA, 25 bp, Homo sapien
tattataaaatcctctatggtacag

SEQ ID NO: 4918121 - DNA, 25 bp, Homo sapien
cattagttacacatgtggtactctg

SEQ ID NO: 4918122 - DNA, 25 bp, Homo sapien
gtcagagagcaggcacacaaatatt

SEQ ID NO: 4918123 - DNA, 25 bp, Homo sapien
gagagcaggcacacaaatatttaaa

SEQ ID NO: 4918124 - DNA, 25 bp, Homo sapien
ctgtcagagagcaggcacacaaata

SEQ ID NO: 4918125 - DNA, 25 bp, Homo sapien
taaatattttcatgtttgaagaaaa

SEQ ID NO: 4918126 - DNA, 25 bp, Homo sapien
agaaattctggtactgaggacaatg

SEQ ID NO: 4918127 - DNA, 25 bp, Homo sapien
gaaattctggtactgaggacaatgc

SEQ ID NO: 4918128 - DNA, 25 bp, Homo sapien
aagaaattctggtactgaggacaat

SEQ ID NO: 4918129 - DNA, 25 bp, Homo sapien
gaaatgggtacatgaaacaggtgct

SEQ ID NO: 4918130 - DNA, 25 bp, Homo sapien
ctgctttgtttccactggagtctta

SEQ ID NO: 4918131 - DNA, 25 bp, Homo sapien
catgtgaaatgagtatatagccgac

SEQ ID NO: 4918132 - DNA, 25 bp, Homo sapien
ggagtcttatgttctccaagaagaa

SEQ ID NO: 4918133 - DNA, 25 bp, Homo sapien
gctcactttaacacagtcttcggga

SEQ ID NO: 4918134 - DNA, 25 bp, Homo sapien
gactatacagtacacagggctcgac

SEQ ID NO: 4918135 - DNA, 25 bp, Homo sapien
gcagctggctatcacaatggtctca

SEQ ID NO: 4918136 - DNA, 25 bp, Homo sapien
cttctgccagcaatcaagagtagca

SEQ ID NO: 4918137 - DNA, 25 bp, Homo sapien
gcctatagcatgaattgcaatctcc

SEQ ID NO: 4918138 - DNA, 25 bp, Homo sapien
cagtctttcaaaagtgcggcagaaa

SEQ ID NO: 4918139 - DNA, 25 bp, Homo sapien
taaaagtacaatgcctcatgcaatc

SEQ ID NO: 4918140 - DNA, 25 bp, Homo sapien
taattgaaactacctcataagagct

SEQ ID NO: 4918141 - DNA, 25 bp, Homo sapien
cataatttgtttcagctgttgattc

SEQ ID NO: 4918142 - DNA, 25 bp, Homo sapien
gatccataatttgtttcagctgttg

SEQ ID NO: 4918143 - DNA, 25 bp, Homo sapien
tttatatcccagatgagatttcgta

SEQ ID NO: 4918144 - DNA, 25 bp, Homo sapien
tgagatttcgtaattgatccataat

SEQ ID NO: 4918145 - DNA, 25 bp, Homo sapien
aaagcagataaataatcttcttcac

SEQ ID NO: 4918146 - DNA, 25 bp, Homo sapien
taatcttcttcacagggaaaaaata

SEQ ID NO: 4918147 - DNA, 25 bp, Homo sapien
aagcagataaataatcttcttcaca

SEQ ID NO: 4918148 - DNA, 25 bp, Homo sapien
aaacaattattcaattcatgaagat

SEQ ID NO: 4918149 - DNA, 25 bp, Homo sapien
tattcaattcatgaagattaaccaa

SEQ ID NO: 4918150 - DNA, 25 bp, Homo sapien
ttcaattcatgaagattaaccaaaa

SEQ ID NO: 4918151 - DNA, 25 bp, Homo sapien
caattattcaattcatgaagattaa

SEQ ID NO: 4918152 - DNA, 25 bp, Homo sapien
catacataacttgaagtttgtatgc

SEQ ID NO: 4918153 - DNA, 25 bp, Homo sapien
tgaagtttgtatgcctttaattcac

SEQ ID NO: 4918154 - DNA, 25 bp, Homo sapien
taacttgaagtttgtatgcctttaa

SEQ ID NO: 4918155 - DNA, 25 bp, Homo sapien
aagtttgtatgcctttaattcacat

SEQ ID NO: 4918156 - DNA, 25 bp, Homo sapien
taactctcaaaccactctttactga

SEQ ID NO: 4918157 - DNA, 25 bp, Homo sapien
tgtaactctcaaaccactctttact

SEQ ID NO: 4918158 - DNA, 25 bp, Homo sapien
ctcaaaccactctttactgaggcaa

SEQ ID NO: 4918159 - DNA, 25 bp, Homo sapien
actctcaaaccactctttactgagg

SEQ ID NO: 4918160 - DNA, 25 bp, Homo sapien
tggtaagaactagccgcatgtagta

SEQ ID NO: 4918161 - DNA, 25 bp, Homo sapien
taggccaatggctacaacattggaa

SEQ ID NO: 4918162 - DNA, 25 bp, Homo sapien
caacattggaaggattggtaagaac

SEQ ID NO: 4918163 - DNA, 25 bp, Homo sapien
tgtagtaatatccatcaagatgagc

SEQ ID NO: 4918164 - DNA, 25 bp, Homo sapien
tgttagcgccattctcagatatgct

SEQ ID NO: 4918165 - DNA, 25 bp, Homo sapien
gcgccattctcagatatgctctttt

SEQ ID NO: 4918166 - DNA, 25 bp, Homo sapien
gagatgatgttagcgccattctcag

SEQ ID NO: 4918167 - DNA, 25 bp, Homo sapien
agagagatgatgttagcgccattct

SEQ ID NO: 4918168 - DNA, 25 bp, Homo sapien
aaagccttgagtttgcctggtggct

SEQ ID NO: 4918169 - DNA, 25 bp, Homo sapien
tggtggcttctgagcaagtatgtac

SEQ ID NO: 4918170 - DNA, 25 bp, Homo sapien
gtagtgaaaggctaaagcattgctt

SEQ ID NO: 4918171 - DNA, 25 bp, Homo sapien
ttggatccattgatggtgaaaagcc

SEQ ID NO: 4918172 - DNA, 25 bp, Homo sapien
atctggctggctggcagtttttctt

SEQ ID NO: 4918173 - DNA, 25 bp, Homo sapien
catctggctggctggcagtttttct

SEQ ID NO: 4918174 - DNA, 25 bp, Homo sapien
ggctggctggcagtttttcttcaag

SEQ ID NO: 4918175 - DNA, 25 bp, Homo sapien
ctggctggctggcagtttttcttca

SEQ ID NO: 4918176 - DNA, 25 bp, Homo sapien
agagcagccacgtcatcttccccat

SEQ ID NO: 4918177 - DNA, 25 bp, Homo sapien
ccctgtggagagcagccacgtcatc

SEQ ID NO: 4918178 - DNA, 25 bp, Homo sapien
ggaaagtcagaaaagtctctccctg

SEQ ID NO: 4918179 - DNA, 25 bp, Homo sapien
cagaaaagtctctccctgtggagag

SEQ ID NO: 4918180 - DNA, 25 bp, Homo sapien
aacaccctgtggatagtcatgggct

SEQ ID NO: 4918181 - DNA, 25 bp, Homo sapien
catttctctgccacgctgtctagct

SEQ ID NO: 4918182 - DNA, 25 bp, Homo sapien
ttctctgccacgctgtctagctgcc

SEQ ID NO: 4918183 - DNA, 25 bp, Homo sapien
atttctctgccacgctgtctagctg

SEQ ID NO: 4918184 - DNA, 25 bp, Homo sapien
gccttctctgagtgtgattgacata

SEQ ID NO: 4918185 - DNA, 25 bp, Homo sapien
tgaagaggaagtgactccgtgatct

SEQ ID NO: 4918186 - DNA, 25 bp, Homo sapien
tccgtgatctggagagactcctctt

SEQ ID NO: 4918187 - DNA, 25 bp, Homo sapien
cctctttgggtcctgagattgccac

SEQ ID NO: 4918188 - DNA, 25 bp, Homo sapien
ttggcctcttgtgggcgatagcctt

SEQ ID NO: 4918189 - DNA, 25 bp, Homo sapien
agttggcctcttgtgggcgatagcc

SEQ ID NO: 4918190 - DNA, 25 bp, Homo sapien
cctcttgtgggcgatagcctttcag

SEQ ID NO: 4918191 - DNA, 25 bp, Homo sapien
ggcctcttgtgggcgatagcctttc

SEQ ID NO: 4918192 - DNA, 25 bp, Homo sapien
tgtaggctccacgaaattccgtggc

SEQ ID NO: 4918193 - DNA, 25 bp, Homo sapien
tattctgtaggctccacgaaattcc

SEQ ID NO: 4918194 - DNA, 25 bp, Homo sapien
ctctattctgtaggctccacgaaat

SEQ ID NO: 4918195 - DNA, 25 bp, Homo sapien
tggcactagtacaagtgaatattgg

SEQ ID NO: 4918196 - DNA, 25 bp, Homo sapien
tctggaaactctactgcatttaaca

SEQ ID NO: 4918197 - DNA, 25 bp, Homo sapien
gagaaccaccccagcagggtatcag

SEQ ID NO: 4918198 - DNA, 25 bp, Homo sapien
cagttcttgggcccttaccaagacg

SEQ ID NO: 4918199 - DNA, 25 bp, Homo sapien
ccagcagggtatcaggtacagttct

SEQ ID NO: 4918200 - DNA, 25 bp, Homo sapien
tgatttgcagaggatagacacaaat

SEQ ID NO: 4918201 - DNA, 25 bp, Homo sapien
ttgcagaggatagacacaaatgaac

SEQ ID NO: 4918202 - DNA, 25 bp, Homo sapien
gaggatagacacaaatgaacttttc

SEQ ID NO: 4918203 - DNA, 25 bp, Homo sapien
cagaggatagacacaaatgaacttt

SEQ ID NO: 4918204 - DNA, 25 bp, Homo sapien
tttataacagcattgcccattgtca

SEQ ID NO: 4918205 - DNA, 25 bp, Homo sapien
aaggccagttttataacagcattgc

SEQ ID NO: 4918206 - DNA, 25 bp, Homo sapien
aggccagttttataacagcattgcc

SEQ ID NO: 4918207 - DNA, 25 bp, Homo sapien
tataacagcattgcccattgtcagt

SEQ ID NO: 4918208 - DNA, 25 bp, Homo sapien
agtaaggtagttgtgcccatcttct

SEQ ID NO: 4918209 - DNA, 25 bp, Homo sapien
gtaaggtagttgtgcccatcttctt

SEQ ID NO: 4918210 - DNA, 25 bp, Homo sapien
gccagtaaggtagttgtgcccatct

SEQ ID NO: 4918211 - DNA, 25 bp, Homo sapien
atgccagtaaggtagttgtgcccat

SEQ ID NO: 4918212 - DNA, 25 bp, Homo sapien
cttctctctctccatctagcttagg

SEQ ID NO: 4918213 - DNA, 25 bp, Homo sapien
tctctctctccatctagcttaggca

SEQ ID NO: 4918214 - DNA, 25 bp, Homo sapien
ttctctctctccatctagcttaggc

SEQ ID NO: 4918215 - DNA, 25 bp, Homo sapien
ctctctctccatctagcttaggcat

SEQ ID NO: 4918216 - DNA, 25 bp, Homo sapien
tacagtcacttggataagacatggc

SEQ ID NO: 4918217 - DNA, 25 bp, Homo sapien
tgtggtcatggcaaaagctgagttc

SEQ ID NO: 4918218 - DNA, 25 bp, Homo sapien
cagtttatcttatccaccagtgtgc

SEQ ID NO: 4918219 - DNA, 25 bp, Homo sapien
taagacatggcaattgggtcaagtg

SEQ ID NO: 4918220 - DNA, 25 bp, Homo sapien
tccacactttataccaccaccagca

SEQ ID NO: 4918221 - DNA, 25 bp, Homo sapien
tgctgtagctggcactccacacttt

SEQ ID NO: 4918222 - DNA, 25 bp, Homo sapien
agctggcactccacactttatacca

SEQ ID NO: 4918223 - DNA, 25 bp, Homo sapien
tgtagctggcactccacactttata

SEQ ID NO: 4918224 - DNA, 25 bp, Homo sapien
gcagatatagtgaagatagaaatcc

SEQ ID NO: 4918225 - DNA, 25 bp, Homo sapien
gaagatagaaatccttgcacagctg

SEQ ID NO: 4918226 - DNA, 25 bp, Homo sapien
aggctgccagtgagcagatatagtg

SEQ ID NO: 4918227 - DNA, 25 bp, Homo sapien
agatagaaatccttgcacagctgaa

SEQ ID NO: 4918228 - DNA, 25 bp, Homo sapien
catagtgaagctgcaaggtgtaagc

SEQ ID NO: 4918229 - DNA, 25 bp, Homo sapien
taagcagggttgtgattcatcccct

SEQ ID NO: 4918230 - DNA, 25 bp, Homo sapien
tgtttgttgcaactgacatagtgaa

SEQ ID NO: 4918231 - DNA, 25 bp, Homo sapien
ggcttgagtaactgactgccttaac

SEQ ID NO: 4918232 - DNA, 25 bp, Homo sapien
tttgcataattaacttgcctgttgg

SEQ ID NO: 4918233 - DNA, 25 bp, Homo sapien
tggtttctgcgaccaggctctttca

SEQ ID NO: 4918234 - DNA, 25 bp, Homo sapien
tgcgaccaggctctttcaactgcac

SEQ ID NO: 4918235 - DNA, 25 bp, Homo sapien
aattaacttgcctgttggtggaggg

SEQ ID NO: 4918236 - DNA, 25 bp, Homo sapien
gctcggatggaaggctctcagtaac

SEQ ID NO: 4918237 - DNA, 25 bp, Homo sapien
tacttgtctgcacacgaaccctcat

SEQ ID NO: 4918238 - DNA, 25 bp, Homo sapien
ggaaggctctcagtaacctcactct

SEQ ID NO: 4918239 - DNA, 25 bp, Homo sapien
ttgctgctcggatggaaggctctca

SEQ ID NO: 4918240 - DNA, 25 bp, Homo sapien
atccggaacgtttggtatatgactg

SEQ ID NO: 4918241 - DNA, 25 bp, Homo sapien
aacgtttggtatatgactgttcagc

SEQ ID NO: 4918242 - DNA, 25 bp, Homo sapien
tccggaacgtttggtatatgactgt

SEQ ID NO: 4918243 - DNA, 25 bp, Homo sapien
tttggtatatgactgttcagcaatg

SEQ ID NO: 4918244 - DNA, 25 bp, Homo sapien
tatgacttggtggcacaaacgccat

SEQ ID NO: 4918245 - DNA, 25 bp, Homo sapien
ctatgacttggtggcacaaacgcca

SEQ ID NO: 4918246 - DNA, 25 bp, Homo sapien
gtagttccgtttggaattcaggcaa

SEQ ID NO: 4918247 - DNA, 25 bp, Homo sapien
agaaatgagcaagggaagccaacga

SEQ ID NO: 4918248 - DNA, 25 bp, Homo sapien
aagtcacaaaggcatgtagttccgt

SEQ ID NO: 4918249 - DNA, 25 bp, Homo sapien
gaagccaacgagctgtgagtgacag

SEQ ID NO: 4918250 - DNA, 25 bp, Homo sapien
cagcctccaggaatagcaggtattg

SEQ ID NO: 4918251 - DNA, 25 bp, Homo sapien
cacgggttgacaaaagagttgcgta

SEQ ID NO: 4918252 - DNA, 25 bp, Homo sapien
taactctccctggaatggctcaaag

SEQ ID NO: 4918253 - DNA, 25 bp, Homo sapien
gactttcttttggaccagagctgga

SEQ ID NO: 4918254 - DNA, 25 bp, Homo sapien
tgcaattgcaaactgtaattggatt

SEQ ID NO: 4918255 - DNA, 25 bp, Homo sapien
gaagtaatttgatctgaataaggca

SEQ ID NO: 4918256 - DNA, 25 bp, Homo sapien
tatgttttaccaaaatgcaattgca

SEQ ID NO: 4918257 - DNA, 25 bp, Homo sapien
caactccaaggagagctcattatgt

SEQ ID NO: 4918258 - DNA, 25 bp, Homo sapien
tctctttgacaccagagctgtggat

SEQ ID NO: 4918259 - DNA, 25 bp, Homo sapien
tccaagcatagggagaaggactcca

SEQ ID NO: 4918260 - DNA, 25 bp, Homo sapien
aaatggctaggagtggctcgttgct

SEQ ID NO: 4918261 - DNA, 25 bp, Homo sapien
ggactccacatatggccgtctgtca

SEQ ID NO: 4918262 - DNA, 25 bp, Homo sapien
taggttgtacctctcctgttccaac

SEQ ID NO: 4918263 - DNA, 25 bp, Homo sapien
ggtcaactacaatcttcctaaggct

SEQ ID NO: 4918264 - DNA, 25 bp, Homo sapien
caaccattgattctgaagttggctg

SEQ ID NO: 4918265 - DNA, 25 bp, Homo sapien
caaattgggcttcctggtcaactac

SEQ ID NO: 4918266 - DNA, 25 bp, Homo sapien
tcaccttggtgactgggagtcctgt

SEQ ID NO: 4918267 - DNA, 25 bp, Homo sapien
tttccttgactgatacaatagactc

SEQ ID NO: 4918268 - DNA, 25 bp, Homo sapien
tgatacaatagactctgcagatgca

SEQ ID NO: 4918269 - DNA, 25 bp, Homo sapien
tgactgatacaatagactctgcaga

SEQ ID NO: 4918270 - DNA, 25 bp, Homo sapien
tgccatacctaagctgcacccaaca

SEQ ID NO: 4918271 - DNA, 25 bp, Homo sapien
gctgcacccaacagctctgggcact

SEQ ID NO: 4918272 - DNA, 25 bp, Homo sapien
gccatacctaagctgcacccaacag

SEQ ID NO: 4918273 - DNA, 25 bp, Homo sapien
aaacactggcccctaggatcagaca

SEQ ID NO: 4918274 - DNA, 25 bp, Homo sapien
tttttccaggcaatgccatccatcg

SEQ ID NO: 4918275 - DNA, 25 bp, Homo sapien
cagacactcaggcaatttttccagg

SEQ ID NO: 4918276 - DNA, 25 bp, Homo sapien
tctcctggacttcttcggatcaaag

SEQ ID NO: 4918277 - DNA, 25 bp, Homo sapien
aaaccagtgtagaatctgcagtccc

SEQ ID NO: 4918278 - DNA, 25 bp, Homo sapien
tgccaggaatcttgtagcctattag

SEQ ID NO: 4918279 - DNA, 25 bp, Homo sapien
gctaaagtagcaggactccaaacca

SEQ ID NO: 4918280 - DNA, 25 bp, Homo sapien
ggtagccagtttgagaagggtgcat

SEQ ID NO: 4918281 - DNA, 25 bp, Homo sapien
tctatcacctcattttgagttgggc

SEQ ID NO: 4918282 - DNA, 25 bp, Homo sapien
tctttgtgtctatcacctcattttg

SEQ ID NO: 4918283 - DNA, 25 bp, Homo sapien
tttgtgtctatcacctcattttgag

SEQ ID NO: 4918284 - DNA, 25 bp, Homo sapien
tgtgtctatcacctcattttgagtt

SEQ ID NO: 4918285 - DNA, 25 bp, Homo sapien
taatgtccaactcctctggcaaacg

SEQ ID NO: 4918286 - DNA, 25 bp, Homo sapien
gcaaaaccctgatgagtccttagtt

SEQ ID NO: 4918287 - DNA, 25 bp, Homo sapien
ttttctgtaatgtccaactcctctg

SEQ ID NO: 4918288 - DNA, 25 bp, Homo sapien
aaggtacttctgcattggcacacag

SEQ ID NO: 4918289 - DNA, 25 bp, Homo sapien
tttctattaaccagaatacttctgc

SEQ ID NO: 4918290 - DNA, 25 bp, Homo sapien
tcctgatccaaagtcaagacagggc

SEQ ID NO: 4918291 - DNA, 25 bp, Homo sapien
tccctttaggatggcctgcccgtca

SEQ ID NO: 4918292 - DNA, 25 bp, Homo sapien
cagggctggtaaatgctgatacact

SEQ ID NO: 4918293 - DNA, 25 bp, Homo sapien
tgagaagcggcttgatgatacatca

SEQ ID NO: 4918294 - DNA, 25 bp, Homo sapien
ctcatgtgagaagcggcttgatgat

SEQ ID NO: 4918295 - DNA, 25 bp, Homo sapien
ggaggtgctcatgtgagaagcggct

SEQ ID NO: 4918296 - DNA, 25 bp, Homo sapien
gtgctcatgtgagaagcggcttgat

SEQ ID NO: 4918297 - DNA, 25 bp, Homo sapien
gcccttgagcacgtcatttagacag

SEQ ID NO: 4918298 - DNA, 25 bp, Homo sapien
gaagtccagcgacatgttgccatta

SEQ ID NO: 4918299 - DNA, 25 bp, Homo sapien
cagactttgtgtagggcaggaccgc

SEQ ID NO: 4918300 - DNA, 25 bp, Homo sapien
tgggaaagtcccagagtgacttcct

SEQ ID NO: 4918301 - DNA, 25 bp, Homo sapien
tctagggatgccctgcagttgccca

SEQ ID NO: 4918302 - DNA, 25 bp, Homo sapien
ttggtgggattctccaaggactcat

SEQ ID NO: 4918303 - DNA, 25 bp, Homo sapien
tagaccagctaaaaagggcaaatgc

SEQ ID NO: 4918304 - DNA, 25 bp, Homo sapien
tgcttgatagttactctgctctagg

SEQ ID NO: 4918305 - DNA, 25 bp, Homo sapien
taagtgtactggtaacctagaggac

SEQ ID NO: 4918306 - DNA, 25 bp, Homo sapien
tagttgcaactatgccctgatttgg

SEQ ID NO: 4918307 - DNA, 25 bp, Homo sapien
gcctagaaactccagtgacaccatt

SEQ ID NO: 4918308 - DNA, 25 bp, Homo sapien
gcttcaggtgctccttggtaaccca

SEQ ID NO: 4918309 - DNA, 25 bp, Homo sapien
aggaaagatcatccgtcagaagaca

SEQ ID NO: 4918310 - DNA, 25 bp, Homo sapien
caaggaaagatcatccgtcagaaga

SEQ ID NO: 4918311 - DNA, 25 bp, Homo sapien
gctgaagaaggtctcaggttcagga

SEQ ID NO: 4918312 - DNA, 25 bp, Homo sapien
gaaggtctcaggttcaggacccaat

SEQ ID NO: 4918313 - DNA, 25 bp, Homo sapien
aattatttgcgaagtgcctgtcagc

SEQ ID NO: 4918314 - DNA, 25 bp, Homo sapien
ggctgcatctgacatcaatcttggc

SEQ ID NO: 4918315 - DNA, 25 bp, Homo sapien
tctcacctgagaacctaatgctttc

SEQ ID NO: 4918316 - DNA, 25 bp, Homo sapien
tggcaagctcagtgctcaggaaaga

SEQ ID NO: 4918317 - DNA, 25 bp, Homo sapien
attaacagcatcccaaggcaaaaga

SEQ ID NO: 4918318 - DNA, 25 bp, Homo sapien
tctttccacacagacacagtaacag

SEQ ID NO: 4918319 - DNA, 25 bp, Homo sapien
gcacagggttgggggcaaggttata

SEQ ID NO: 4918320 - DNA, 25 bp, Homo sapien
taacagcatcccaaggcaaaagaat

SEQ ID NO: 4918321 - DNA, 25 bp, Homo sapien
tggatgtaggtccagcactcgcagc

SEQ ID NO: 4918322 - DNA, 25 bp, Homo sapien
catgaatgctgggacaaagtggcag

SEQ ID NO: 4918323 - DNA, 25 bp, Homo sapien
tgactgcagaaagacgccagttctc

SEQ ID NO: 4918324 - DNA, 25 bp, Homo sapien
ggtgaacagtggtgatatgcccagt

SEQ ID NO: 4918325 - DNA, 25 bp, Homo sapien
gaggactcagccacttatggatttc

SEQ ID NO: 4918326 - DNA, 25 bp, Homo sapien
tagcatagctaggtgggcctacctg

SEQ ID NO: 4918327 - DNA, 25 bp, Homo sapien
ttgttgaagctagcaaaatggctca

SEQ ID NO: 4918328 - DNA, 25 bp, Homo sapien
tcataccacaaaagatagcatagct

SEQ ID NO: 4918329 - DNA, 25 bp, Homo sapien
caagtggccatcttaggtcagtgga

SEQ ID NO: 4918330 - DNA, 25 bp, Homo sapien
ggagtagagcccacatatccagatg

SEQ ID NO: 4918331 - DNA, 25 bp, Homo sapien
caataagcactttagagtccctccc

SEQ ID NO: 4918332 - DNA, 25 bp, Homo sapien
gaagtgactcaacaggctacctagc

SEQ ID NO: 4918333 - DNA, 25 bp, Homo sapien
tccaaaaacttagatgagcagaatg

SEQ ID NO: 4918334 - DNA, 25 bp, Homo sapien
cagattgtgccaactatccaaaaac

SEQ ID NO: 4918335 - DNA, 25 bp, Homo sapien
gccagattgtgccaactatccaaaa

SEQ ID NO: 4918336 - DNA, 25 bp, Homo sapien
aaaacttagatgagcagaatgacaa

SEQ ID NO: 4918337 - DNA, 25 bp, Homo sapien
ctggtcagccagtcccagagcctag

SEQ ID NO: 4918338 - DNA, 25 bp, Homo sapien
cctgaagctgcagccaacctggtca

SEQ ID NO: 4918339 - DNA, 25 bp, Homo sapien
agtcccagagcctagcactgcacat

SEQ ID NO: 4918340 - DNA, 25 bp, Homo sapien
aagctgcagccaacctggtcagcca

SEQ ID NO: 4918341 - DNA, 25 bp, Homo sapien
cacctccaaatagcgagtgccttcc

SEQ ID NO: 4918342 - DNA, 25 bp, Homo sapien
caaatagcgagtgccttcctgcttg

SEQ ID NO: 4918343 - DNA, 25 bp, Homo sapien
cctccaaatagcgagtgccttcctg

SEQ ID NO: 4918344 - DNA, 25 bp, Homo sapien
tccaaatagcgagtgccttcctgct

SEQ ID NO: 4918345 - DNA, 25 bp, Homo sapien
ctcatcagcgtgcagggagaaaatg

SEQ ID NO: 4918346 - DNA, 25 bp, Homo sapien
cctcatcagcgtgcagggagaaaat

SEQ ID NO: 4918347 - DNA, 25 bp, Homo sapien
caatccagtgcttaaattttctttc

SEQ ID NO: 4918348 - DNA, 25 bp, Homo sapien
ctgcttctcaaaggaactgtgggaa

SEQ ID NO: 4918349 - DNA, 25 bp, Homo sapien
aaggcatcctttgggccatctggtc

SEQ ID NO: 4918350 - DNA, 25 bp, Homo sapien
gagtgccagggagctagctggctct

SEQ ID NO: 4918351 - DNA, 25 bp, Homo sapien
actgttaatgaaccaaactgcctga

SEQ ID NO: 4918352 - DNA, 25 bp, Homo sapien
tgagtcactgttaatgaaccaaact

SEQ ID NO: 4918353 - DNA, 25 bp, Homo sapien
tccaatggttgacttttggcacttg

SEQ ID NO: 4918354 - DNA, 25 bp, Homo sapien
ttggcacttggcagaaaaatccttt

SEQ ID NO: 4918355 - DNA, 25 bp, Homo sapien
tgtctcagagatatgagcaccacaa

SEQ ID NO: 4918356 - DNA, 25 bp, Homo sapien
tctcagagatatgagcaccacaacc

SEQ ID NO: 4918357 - DNA, 25 bp, Homo sapien
gtctcagagatatgagcaccacaac

SEQ ID NO: 4918358 - DNA, 25 bp, Homo sapien
gctggttcagtgaggacgcttgcca

SEQ ID NO: 4918359 - DNA, 25 bp, Homo sapien
taactctttggtagggggctataga

SEQ ID NO: 4918360 - DNA, 25 bp, Homo sapien
tctctgtaactctttggtagggggc

SEQ ID NO: 4918361 - DNA, 25 bp, Homo sapien
gaagcagggcctattctttcccacc

SEQ ID NO: 4918362 - DNA, 25 bp, Homo sapien
tccctgtcatgatttgtagccacag

SEQ ID NO: 4918363 - DNA, 25 bp, Homo sapien
tagccacaggtgactggcatttgca

SEQ ID NO: 4918364 - DNA, 25 bp, Homo sapien
tgtcagtaagccacagtctccacgg

SEQ ID NO: 4918365 - DNA, 25 bp, Homo sapien
gatctaacatccaattccagcagtg

SEQ ID NO: 4918366 - DNA, 25 bp, Homo sapien
agaactacgttagttctgctccttc

SEQ ID NO: 4918367 - DNA, 25 bp, Homo sapien
catatctgaagtgcccgcgagagga

SEQ ID NO: 4918368 - DNA, 25 bp, Homo sapien
tcttcctcaccctgcgttgctgaca

SEQ ID NO: 4918369 - DNA, 25 bp, Homo sapien
accctgcgttgctgacatatctgaa

SEQ ID NO: 4918370 - DNA, 25 bp, Homo sapien
gcagccagtagctcattacagcacg

SEQ ID NO: 4918371 - DNA, 25 bp, Homo sapien
gaatggctaatcatgcactactggg

SEQ ID NO: 4918372 - DNA, 25 bp, Homo sapien
cacagaatcatcgtcaagaatggct

SEQ ID NO: 4918373 - DNA, 25 bp, Homo sapien
tataaacaacctgttcagtcggctg

SEQ ID NO: 4918374 - DNA, 25 bp, Homo sapien
tgcatgcaaattaatagcagttagt

SEQ ID NO: 4918375 - DNA, 25 bp, Homo sapien
tagtaattcccagtatgatagagca

SEQ ID NO: 4918376 - DNA, 25 bp, Homo sapien
tcccatagcttaaacttcccttcat

SEQ ID NO: 4918377 - DNA, 25 bp, Homo sapien
tgatagagcatactcttcccatagc

SEQ ID NO: 4918378 - DNA, 25 bp, Homo sapien
aacttgattgtctgagtaaacaatg

SEQ ID NO: 4918379 - DNA, 25 bp, Homo sapien
cttgattgtctgagtaaacaatgtt

SEQ ID NO: 4918380 - DNA, 25 bp, Homo sapien
acttgattgtctgagtaaacaatgt

SEQ ID NO: 4918381 - DNA, 25 bp, Homo sapien
tgattgtctgagtaaacaatgttac

SEQ ID NO: 4918382 - DNA, 25 bp, Homo sapien
attgggatgcatatctttagatgtc

SEQ ID NO: 4918383 - DNA, 25 bp, Homo sapien
tgaaaatcaccccaatcctattggg

SEQ ID NO: 4918384 - DNA, 25 bp, Homo sapien
cctttaaagtgagactgggcgcggt

SEQ ID NO: 4918385 - DNA, 25 bp, Homo sapien
caccccaatcctattgggatgcata

SEQ ID NO: 4918386 - DNA, 25 bp, Homo sapien
gagactatctggctaacactattgt

SEQ ID NO: 4918387 - DNA, 25 bp, Homo sapien
taaatgatcatcttaggcggctgat

SEQ ID NO: 4918388 - DNA, 25 bp, Homo sapien
cagccttcatatcaactcacagaga

SEQ ID NO: 4918389 - DNA, 25 bp, Homo sapien
tcaaagccgctaatggacagttagg

SEQ ID NO: 4918390 - DNA, 25 bp, Homo sapien
tacttggcaacggataatttttgct

SEQ ID NO: 4918391 - DNA, 25 bp, Homo sapien
tggcaacggataatttttgcttact

SEQ ID NO: 4918392 - DNA, 25 bp, Homo sapien
cttggggcctgatctatgttttttc

SEQ ID NO: 4918393 - DNA, 25 bp, Homo sapien
aagatggtacttggcaacggataat

SEQ ID NO: 4918394 - DNA, 25 bp, Homo sapien
gaaaacagtaacgtctcagaggcca

SEQ ID NO: 4918395 - DNA, 25 bp, Homo sapien
cacctgtgccacctaggaggaaaag

SEQ ID NO: 4918396 - DNA, 25 bp, Homo sapien
tgggtctcaccatgaagaagtggag

SEQ ID NO: 4918397 - DNA, 25 bp, Homo sapien
caggtgctctacagcgtgggtctca

SEQ ID NO: 4918398 - DNA, 25 bp, Homo sapien
tctgaactagaccataacttgccct

SEQ ID NO: 4918399 - DNA, 25 bp, Homo sapien
gcaatgcatgaaccatagtttacca

SEQ ID NO: 4918400 - DNA, 25 bp, Homo sapien
ctaatccaaaacaagagtaatgcaa

SEQ ID NO: 4918401 - DNA, 25 bp, Homo sapien
ctgcacttgatttctactagatggc

SEQ ID NO: 4918402 - DNA, 25 bp, Homo sapien
tcatctgcattacaattggccttag

SEQ ID NO: 4918403 - DNA, 25 bp, Homo sapien
ttttgcagaccagccggcttagttg

SEQ ID NO: 4918404 - DNA, 25 bp, Homo sapien
tttttagggacaaacagtgacttga

SEQ ID NO: 4918405 - DNA, 25 bp, Homo sapien
tacgttgccgcaaaccaatcatctg

SEQ ID NO: 4918406 - DNA, 25 bp, Homo sapien
tttcagggtagctcatcacttcgac

SEQ ID NO: 4918407 - DNA, 25 bp, Homo sapien
cagcagctgtagcttaggaggagca

SEQ ID NO: 4918408 - DNA, 25 bp, Homo sapien
gaaaattcccaatagattgatcagc

SEQ ID NO: 4918409 - DNA, 25 bp, Homo sapien
tagtatttcccaccagaataacgtc

SEQ ID NO: 4918410 - DNA, 25 bp, Homo sapien
aagctgcttgcatagttccctacca

SEQ ID NO: 4918411 - DNA, 25 bp, Homo sapien
tctccaggtgcacttcgttacaagg

SEQ ID NO: 4918412 - DNA, 25 bp, Homo sapien
tacaaggattgcttcgctagtggac

SEQ ID NO: 4918413 - DNA, 25 bp, Homo sapien
taatgctgttagacggctgcctggt

SEQ ID NO: 4918414 - DNA, 25 bp, Homo sapien
ggcttttgctggcaagaatcctcat

SEQ ID NO: 4918415 - DNA, 25 bp, Homo sapien
cagattcaagctggcttttgctggc

SEQ ID NO: 4918416 - DNA, 25 bp, Homo sapien
gattcaagctggcttttgctggcaa

SEQ ID NO: 4918417 - DNA, 25 bp, Homo sapien
tcaagctggcttttgctggcaagaa

SEQ ID NO: 4918418 - DNA, 25 bp, Homo sapien
agtgaaaactgtaggattaatggcc

SEQ ID NO: 4918419 - DNA, 25 bp, Homo sapien
tggccttgggcctaattccctgata

SEQ ID NO: 4918420 - DNA, 25 bp, Homo sapien
tttaaaaggccagctaaccagctgg

SEQ ID NO: 4918421 - DNA, 25 bp, Homo sapien
taatctggatgatggctcggtaatg

SEQ ID NO: 4918422 - DNA, 25 bp, Homo sapien
tgttttcggcagtctcaagctctca

SEQ ID NO: 4918423 - DNA, 25 bp, Homo sapien
tagtctattgtgcatctggctgagg

SEQ ID NO: 4918424 - DNA, 25 bp, Homo sapien
gtggcacccagcagcaaagctattt

SEQ ID NO: 4918425 - DNA, 25 bp, Homo sapien
tctgtaagctgtggttggatcccac

SEQ ID NO: 4918426 - DNA, 25 bp, Homo sapien
aaagcctgcccaccaaagttcaagt

SEQ ID NO: 4918427 - DNA, 25 bp, Homo sapien
tcagattggaagtccagtcccagct

SEQ ID NO: 4918428 - DNA, 25 bp, Homo sapien
taggatatgctgactcttctgggtc

SEQ ID NO: 4918429 - DNA, 25 bp, Homo sapien
tgacacagctttggtatagaagaac

SEQ ID NO: 4918430 - DNA, 25 bp, Homo sapien
gggtcatttgaatttgctcagtcat

SEQ ID NO: 4918431 - DNA, 25 bp, Homo sapien
ggattaaatagaggggcagttgtat

SEQ ID NO: 4918432 - DNA, 25 bp, Homo sapien
gattaaatagaggggcagttgtatc

SEQ ID NO: 4918433 - DNA, 25 bp, Homo sapien
tggattaaatagaggggcagttgta

SEQ ID NO: 4918434 - DNA, 25 bp, Homo sapien
ttaaatagaggggcagttgtatcat

SEQ ID NO: 4918435 - DNA, 25 bp, Homo sapien
caattaagacgagcaatgtgatgtg

SEQ ID NO: 4918436 - DNA, 25 bp, Homo sapien
ctgtgagcaggcgtctggacttgtt

SEQ ID NO: 4918437 - DNA, 25 bp, Homo sapien
agagggcatcttcacgtggagcaag

SEQ ID NO: 4918438 - DNA, 25 bp, Homo sapien
aggagcccactagggacccctgtga

SEQ ID NO: 4918439 - DNA, 25 bp, Homo sapien
gaatagggattttggctgacctcca

SEQ ID NO: 4918440 - DNA, 25 bp, Homo sapien
tctgatagcagttgggaaaagtcct

SEQ ID NO: 4918441 - DNA, 25 bp, Homo sapien
tccaaagtgaagctaagataatgcc

SEQ ID NO: 4918442 - DNA, 25 bp, Homo sapien
tccttaaatgagaggcccacgaagg

SEQ ID NO: 4918443 - DNA, 25 bp, Homo sapien
gagacagagctgtatacaataggta

SEQ ID NO: 4918444 - DNA, 25 bp, Homo sapien
agatggtaactcctctggactgggt

SEQ ID NO: 4918445 - DNA, 25 bp, Homo sapien
taataaacagtttggacatcaggaa

SEQ ID NO: 4918446 - DNA, 25 bp, Homo sapien
tatataccaccatggtatagaactt

SEQ ID NO: 4918447 - DNA, 25 bp, Homo sapien
cagatctgtcacaacatgagggagg

SEQ ID NO: 4918448 - DNA, 25 bp, Homo sapien
gagaaaggtttccatctcaaccaca

SEQ ID NO: 4918449 - DNA, 25 bp, Homo sapien
gcaggattttcacggatttttcagt

SEQ ID NO: 4918450 - DNA, 25 bp, Homo sapien
tacattgaaacagctccataaagat

SEQ ID NO: 4918451 - DNA, 25 bp, Homo sapien
taaacaaatacgtctgcaggctggc

SEQ ID NO: 4918452 - DNA, 25 bp, Homo sapien
tgaattccacctaaagactatctgg

SEQ ID NO: 4918453 - DNA, 25 bp, Homo sapien
ggtagagcagacactagaatcagtt

SEQ ID NO: 4918454 - DNA, 25 bp, Homo sapien
tctgggagagtctgtcatgcactaa

SEQ ID NO: 4918455 - DNA, 25 bp, Homo sapien
gataagaagtacttttacatagttg

SEQ ID NO: 4918456 - DNA, 25 bp, Homo sapien
agaagtacttttacatagttgaatg

SEQ ID NO: 4918457 - DNA, 25 bp, Homo sapien
tttacatagttgaatgtgacctctg

SEQ ID NO: 4918458 - DNA, 25 bp, Homo sapien
tacttttacatagttgaatgtgacc

SEQ ID NO: 4918459 - DNA, 25 bp, Homo sapien
tgagtgttccaaatttattcagaga

SEQ ID NO: 4918460 - DNA, 25 bp, Homo sapien
gcagcacaggcttggtgagtgttcc

SEQ ID NO: 4918461 - DNA, 25 bp, Homo sapien
caaagggcaaatgtgtgcatagcaa

SEQ ID NO: 4918462 - DNA, 25 bp, Homo sapien
cagagatccctcagatttggtttgg

SEQ ID NO: 4918463 - DNA, 25 bp, Homo sapien
tctccaagtaattggccagtgcctg

SEQ ID NO: 4918464 - DNA, 25 bp, Homo sapien
gaatgcaggtagaatgccagttctc

SEQ ID NO: 4918465 - DNA, 25 bp, Homo sapien
ccagtgcctgcgcagatagaatgca

SEQ ID NO: 4918466 - DNA, 25 bp, Homo sapien
tgtgagccacgaagtgcctgcactg

SEQ ID NO: 4918467 - DNA, 25 bp, Homo sapien
catgggaagaggttcctgctgcacc

SEQ ID NO: 4918468 - DNA, 25 bp, Homo sapien
gcaggcctctcttgacattggggtt

SEQ ID NO: 4918469 - DNA, 25 bp, Homo sapien
tcgcattggagtagacttccctggg

SEQ ID NO: 4918470 - DNA, 25 bp, Homo sapien
gcggttgcgtccattgcctctacta

SEQ ID NO: 4918471 - DNA, 25 bp, Homo sapien
agggaccacctcagtgtttggcatt

SEQ ID NO: 4918472 - DNA, 25 bp, Homo sapien
tgctgtcacatgaccgtgtaggtga

SEQ ID NO: 4918473 - DNA, 25 bp, Homo sapien
tttggcatagttgctgtcacatgac

SEQ ID NO: 4918474 - DNA, 25 bp, Homo sapien
acatgaccgtgtaggtgagaaagca

SEQ ID NO: 4918475 - DNA, 25 bp, Homo sapien
tttccacataagcaagtgcatttgt

SEQ ID NO: 4918476 - DNA, 25 bp, Homo sapien
ccagcactggatctgtgggtcttac

SEQ ID NO: 4918477 - DNA, 25 bp, Homo sapien
caagcaagatgaggaagcatgtgcc

SEQ ID NO: 4918478 - DNA, 25 bp, Homo sapien
cttcaaggaagtcaggttgtgggca

SEQ ID NO: 4918479 - DNA, 25 bp, Homo sapien
gagaggcacaagtggttcctgagca

SEQ ID NO: 4918480 - DNA, 25 bp, Homo sapien
ctgtagagcctgttgacacttgaag

SEQ ID NO: 4918481 - DNA, 25 bp, Homo sapien
ggccaccttaattttgcagtttgca

SEQ ID NO: 4918482 - DNA, 25 bp, Homo sapien
tgcagtttgcatgtaagggtcctct

SEQ ID NO: 4918483 - DNA, 25 bp, Homo sapien
taagggtcctctgtagtgatttcca

SEQ ID NO: 4918484 - DNA, 25 bp, Homo sapien
catttgcacatggttggtacgaaga

SEQ ID NO: 4918485 - DNA, 25 bp, Homo sapien
ggtacgaagattagaaagagtgcaa

SEQ ID NO: 4918486 - DNA, 25 bp, Homo sapien
tacctggctgcataggctcttgtgt

SEQ ID NO: 4918487 - DNA, 25 bp, Homo sapien
gcagtggtgattattagttctgtca

SEQ ID NO: 4918488 - DNA, 25 bp, Homo sapien
cctggtaagccaatggctgcttcat

SEQ ID NO: 4918489 - DNA, 25 bp, Homo sapien
ctctgtccctggtaagccaatggct

SEQ ID NO: 4918490 - DNA, 25 bp, Homo sapien
tgtccctggtaagccaatggctgct

SEQ ID NO: 4918491 - DNA, 25 bp, Homo sapien
tccctggtaagccaatggctgcttc

SEQ ID NO: 4918492 - DNA, 25 bp, Homo sapien
gcacatcttgatggctctcccattt

SEQ ID NO: 4918493 - DNA, 25 bp, Homo sapien
catgtgcacatcttgatggctctcc

SEQ ID NO: 4918494 - DNA, 25 bp, Homo sapien
gtgcacatcttgatggctctcccat

SEQ ID NO: 4918495 - DNA, 25 bp, Homo sapien
tgtgcacatcttgatggctctccca

SEQ ID NO: 4918496 - DNA, 25 bp, Homo sapien
tccatttctaagtgactaaagggat

SEQ ID NO: 4918497 - DNA, 25 bp, Homo sapien
ttgcaccagtggtcggctgcttccc

SEQ ID NO: 4918498 - DNA, 25 bp, Homo sapien
tctcgcgctctctgtaggactctgc

SEQ ID NO: 4918499 - DNA, 25 bp, Homo sapien
gactctgcctgcgatgactgtcctc

SEQ ID NO: 4918500 - DNA, 25 bp, Homo sapien
cttccttgcaccagtggtcggctgc

SEQ ID NO: 4918501 - DNA, 25 bp, Homo sapien
tttatgcattttgatgtaacctgaa

SEQ ID NO: 4918502 - DNA, 25 bp, Homo sapien
gatgtaacctgaaatatttgtaacc

SEQ ID NO: 4918503 - DNA, 25 bp, Homo sapien
tcatgttcattttgcggggaagaag

SEQ ID NO: 4918504 - DNA, 25 bp, Homo sapien
aaccgagtcatggtcttcatgttca

SEQ ID NO: 4918505 - DNA, 25 bp, Homo sapien
ggttctgctcactgtttagtgctga

SEQ ID NO: 4918506 - DNA, 25 bp, Homo sapien
cttgtggttctgctcactgtttagt

SEQ ID NO: 4918507 - DNA, 25 bp, Homo sapien
cactgtttagtgctgagttgctaat

SEQ ID NO: 4918508 - DNA, 25 bp, Homo sapien
ctctgagtcgtattctctctctctg

SEQ ID NO: 4918509 - DNA, 25 bp, Homo sapien
agaaaacatagagtttggagcaagg

SEQ ID NO: 4918510 - DNA, 25 bp, Homo sapien
taatttctacgtacagctctgcatc

SEQ ID NO: 4918511 - DNA, 25 bp, Homo sapien
gcaaggacagaaagattaatttcta

SEQ ID NO: 4918512 - DNA, 25 bp, Homo sapien
catagagtttggagcaaggacagaa

SEQ ID NO: 4918513 - DNA, 25 bp, Homo sapien
tagtttcttcatctacctctttagt

SEQ ID NO: 4918514 - DNA, 25 bp, Homo sapien
tacctctttagtgttaatctttgtg

SEQ ID NO: 4918515 - DNA, 25 bp, Homo sapien
tcttcatctacctctttagtgttaa

SEQ ID NO: 4918516 - DNA, 25 bp, Homo sapien
tcatctacctctttagtgttaatct

SEQ ID NO: 4918517 - DNA, 25 bp, Homo sapien
tctagacttacagtcctctgaaggc

SEQ ID NO: 4918518 - DNA, 25 bp, Homo sapien
gcattatcgttaatgagcggctctg

SEQ ID NO: 4918519 - DNA, 25 bp, Homo sapien
gccacaatgtgagggtgaacaaata

SEQ ID NO: 4918520 - DNA, 25 bp, Homo sapien
gaacttcacatgcagtgtggagcca

SEQ ID NO: 4918521 - DNA, 25 bp, Homo sapien
ttcaggattcgggttctcatttctt

SEQ ID NO: 4918522 - DNA, 25 bp, Homo sapien
atgatttatggcagtgattgtcaga

SEQ ID NO: 4918523 - DNA, 25 bp, Homo sapien
cagaaacttttgaagcccatccaat

SEQ ID NO: 4918524 - DNA, 25 bp, Homo sapien
tccaatttcaggattcgggttctca

SEQ ID NO: 4918525 - DNA, 25 bp, Homo sapien
cagcccttacattgtggacagagga

SEQ ID NO: 4918526 - DNA, 25 bp, Homo sapien
tagatgactggctcagtaggtgccg

SEQ ID NO: 4918527 - DNA, 25 bp, Homo sapien
tcattatggtgaccgctgggtaact

SEQ ID NO: 4918528 - DNA, 25 bp, Homo sapien
tgggtaactggtcgccaacctctgt

SEQ ID NO: 4918529 - DNA, 25 bp, Homo sapien
tagtagctaatgctgttccctcccc

SEQ ID NO: 4918530 - DNA, 25 bp, Homo sapien
acatggcccaggcagtccggtgaat

SEQ ID NO: 4918531 - DNA, 25 bp, Homo sapien
gaatcagtgactgatggttgtttgt

SEQ ID NO: 4918532 - DNA, 25 bp, Homo sapien
ccaaaaaaccatcaagtggcttgat

SEQ ID NO: 4918533 - DNA, 25 bp, Homo sapien
gaccatcttatggaccatctttgct

SEQ ID NO: 4918534 - DNA, 25 bp, Homo sapien
cttggacaatctgatgcctgagaag

SEQ ID NO: 4918535 - DNA, 25 bp, Homo sapien
caaatggaccatcttatggaccatc

SEQ ID NO: 4918536 - DNA, 25 bp, Homo sapien
agaagactctgttttgtgtttccaa

SEQ ID NO: 4918537 - DNA, 25 bp, Homo sapien
ctagaggccagatgcgtccttgccc

SEQ ID NO: 4918538 - DNA, 25 bp, Homo sapien
gcatcaattttctagaggtatctgg

SEQ ID NO: 4918539 - DNA, 25 bp, Homo sapien
cagcatctggtgaatggaacatgtt

SEQ ID NO: 4918540 - DNA, 25 bp, Homo sapien
ggaacatgttggaatttctatcaag

SEQ ID NO: 4918541 - DNA, 25 bp, Homo sapien
tcctgattcttggttatctataaaa

SEQ ID NO: 4918542 - DNA, 25 bp, Homo sapien
aaacttaaattgttggccaggcgca

SEQ ID NO: 4918543 - DNA, 25 bp, Homo sapien
atatacctggggataaaaatttcag

SEQ ID NO: 4918544 - DNA, 25 bp, Homo sapien
cacctgggagaaaattttattcctg

SEQ ID NO: 4918545 - DNA, 25 bp, Homo sapien
ttctcccagtgatgagtgtaaccct

SEQ ID NO: 4918546 - DNA, 25 bp, Homo sapien
tgctcctaatacctataggggttgg

SEQ ID NO: 4918547 - DNA, 25 bp, Homo sapien
ctctgttctcccagtgatgagtgta

SEQ ID NO: 4918548 - DNA, 25 bp, Homo sapien
tgttctcccagtgatgagtgtaacc

SEQ ID NO: 4918549 - DNA, 25 bp, Homo sapien
agcaaaccacattgagtaggacagc

SEQ ID NO: 4918550 - DNA, 25 bp, Homo sapien
tagcaaaccacattgagtaggacag

SEQ ID NO: 4918551 - DNA, 25 bp, Homo sapien
ctagcaaaccacattgagtaggaca

SEQ ID NO: 4918552 - DNA, 25 bp, Homo sapien
ggagagtgacttggagcctccaaat

SEQ ID NO: 4918553 - DNA, 25 bp, Homo sapien
taccgcacaccgactctggagagtg

SEQ ID NO: 4918554 - DNA, 25 bp, Homo sapien
tggcagattccaagagggtggtttt

SEQ ID NO: 4918555 - DNA, 25 bp, Homo sapien
tttggaattgcaggcctaccgcaca

SEQ ID NO: 4918556 - DNA, 25 bp, Homo sapien
gaagggcctcctgttcaaggctaaa

SEQ ID NO: 4918557 - DNA, 25 bp, Homo sapien
cctggaaggtggttaagagacacac

SEQ ID NO: 4918558 - DNA, 25 bp, Homo sapien
ggtttctactctatcatggacccag

SEQ ID NO: 4918559 - DNA, 25 bp, Homo sapien
cagtgctgtgaccttactaaatgtg

SEQ ID NO: 4918560 - DNA, 25 bp, Homo sapien
tcttaggacaaagcaaatttgggac

SEQ ID NO: 4918561 - DNA, 25 bp, Homo sapien
ccagtttctaagatttctgccctag

SEQ ID NO: 4918562 - DNA, 25 bp, Homo sapien
cgtgcccctagaccctggagattct

SEQ ID NO: 4918563 - DNA, 25 bp, Homo sapien
ggatttggtgtgctgcgtgccccta

SEQ ID NO: 4918564 - DNA, 25 bp, Homo sapien
aatttctgtgcacacgtacatcccc

SEQ ID NO: 4918565 - DNA, 25 bp, Homo sapien
cacgccttgacataatgcatacaga

SEQ ID NO: 4918566 - DNA, 25 bp, Homo sapien
taaggtactcgagggcagacattgg

SEQ ID NO: 4918567 - DNA, 25 bp, Homo sapien
gcattttcagatacatgtgaccctg

SEQ ID NO: 4918568 - DNA, 25 bp, Homo sapien
gctccacgtggccaatattgttatt

SEQ ID NO: 4918569 - DNA, 25 bp, Homo sapien
tcatggaaagctccacgtggccaat

SEQ ID NO: 4918570 - DNA, 25 bp, Homo sapien
cctcccagtagtggaggtgtaagga

SEQ ID NO: 4918571 - DNA, 25 bp, Homo sapien
tattctgtagatggtatttcttgga

SEQ ID NO: 4918572 - DNA, 25 bp, Homo sapien
tgtgcgttgcctgaagctttccagc

SEQ ID NO: 4918573 - DNA, 25 bp, Homo sapien
gcaggccttagctgatgctcatgga

SEQ ID NO: 4918574 - DNA, 25 bp, Homo sapien
gagacattgataccccaagacccta

SEQ ID NO: 4918575 - DNA, 25 bp, Homo sapien
caggactttgttggcacagtggaca

SEQ ID NO: 4918576 - DNA, 25 bp, Homo sapien
gctacttagtgggaagactgccttt

SEQ ID NO: 4918577 - DNA, 25 bp, Homo sapien
gaacccctcaatatgttaggcactg

SEQ ID NO: 4918578 - DNA, 25 bp, Homo sapien
gactggagtgcttaacaatcctagc

SEQ ID NO: 4918579 - DNA, 25 bp, Homo sapien
tcctagctacttagtgggaagactg

SEQ ID NO: 4918580 - DNA, 25 bp, Homo sapien
ttgaatcaatgggttatgaaatggt

SEQ ID NO: 4918581 - DNA, 25 bp, Homo sapien
tatgaaatggttttaggaatgtaac

SEQ ID NO: 4918582 - DNA, 25 bp, Homo sapien
gtaaaaagcttgtggtgttgaatca

SEQ ID NO: 4918583 - DNA, 25 bp, Homo sapien
ggaatgtaacgagccatcccgtgat

SEQ ID NO: 4918584 - DNA, 25 bp, Homo sapien
actgaccctaattattcttcccagg

SEQ ID NO: 4918585 - DNA, 25 bp, Homo sapien
ttttcctgctggcaaaaccccaggc

SEQ ID NO: 4918586 - DNA, 25 bp, Homo sapien
tgaatatttcgcatctctgggctgt

SEQ ID NO: 4918587 - DNA, 25 bp, Homo sapien
tactgccactactgttccttgtgaa

SEQ ID NO: 4918588 - DNA, 25 bp, Homo sapien
tagtttgtcatgcttaaacagaccc

SEQ ID NO: 4918589 - DNA, 25 bp, Homo sapien
gaatgttgtgaagtaggtggtccca

SEQ ID NO: 4918590 - DNA, 25 bp, Homo sapien
aatatcgcagcagtgtttgtaagag

SEQ ID NO: 4918591 - DNA, 25 bp, Homo sapien
cacagcatctgcatgcatgtggcag

SEQ ID NO: 4918592 - DNA, 25 bp, Homo sapien
tctgaagacacgaaaagatttaccg

SEQ ID NO: 4918593 - DNA, 25 bp, Homo sapien
cctacgaggcaactaaggtggtggc

SEQ ID NO: 4918594 - DNA, 25 bp, Homo sapien
gagctccctcggatgcattcctggc

SEQ ID NO: 4918595 - DNA, 25 bp, Homo sapien
tgaacttcacgggagcacaatagct

SEQ ID NO: 4918596 - DNA, 25 bp, Homo sapien
ttcataagatacttgcattgcttct

SEQ ID NO: 4918597 - DNA, 25 bp, Homo sapien
gaggaattcataagatacttgcatt

SEQ ID NO: 4918598 - DNA, 25 bp, Homo sapien
tgtgagcacttgtggcagggattgg

SEQ ID NO: 4918599 - DNA, 25 bp, Homo sapien
acttgtggcagggattgggtttcct

SEQ ID NO: 4918600 - DNA, 25 bp, Homo sapien
tatgccaggtgcttagactagaagg

SEQ ID NO: 4918601 - DNA, 25 bp, Homo sapien
tctgtactcttgctcctaaaatggt

SEQ ID NO: 4918602 - DNA, 25 bp, Homo sapien
taaagtgcccaattaaaagctctgt

SEQ ID NO: 4918603 - DNA, 25 bp, Homo sapien
gatcactttgcgtgcttactggaaa

SEQ ID NO: 4918604 - DNA, 25 bp, Homo sapien
gtagagctctgatccttggttaaag

SEQ ID NO: 4918605 - DNA, 25 bp, Homo sapien
gagagcactctgtggattctaaaac

SEQ ID NO: 4918606 - DNA, 25 bp, Homo sapien
gcttcccaattacatgcatgaatca

SEQ ID NO: 4918607 - DNA, 25 bp, Homo sapien
tgtataacacaatccccataaaatg

SEQ ID NO: 4918608 - DNA, 25 bp, Homo sapien
caaacagtattaactttatgtgctc

SEQ ID NO: 4918609 - DNA, 25 bp, Homo sapien
tcaaacagtattaactttatgtgct

SEQ ID NO: 4918610 - DNA, 25 bp, Homo sapien
aaacagtattaactttatgtgctcc

SEQ ID NO: 4918611 - DNA, 25 bp, Homo sapien
aacagtattaactttatgtgctcct

SEQ ID NO: 4918612 - DNA, 25 bp, Homo sapien
acagaatctcactgtctcacccagg

SEQ ID NO: 4918613 - DNA, 25 bp, Homo sapien
cccactgcaacctctgtctcccagg

SEQ ID NO: 4918614 - DNA, 25 bp, Homo sapien
ctagagtgcagtggccctatcttgg

SEQ ID NO: 4918615 - DNA, 25 bp, Homo sapien
cacccgccaccatgcgcagttaatt

SEQ ID NO: 4918616 - DNA, 25 bp, Homo sapien
tacagacctagggtgacagacaaaa

SEQ ID NO: 4918617 - DNA, 25 bp, Homo sapien
cactttatactcgacttgggctcag

SEQ ID NO: 4918618 - DNA, 25 bp, Homo sapien
tgtagcctcctctttagtctagaaa

SEQ ID NO: 4918619 - DNA, 25 bp, Homo sapien
tcccaaatagaaggtaagatatggt

SEQ ID NO: 4918620 - DNA, 25 bp, Homo sapien
tagtcccggtattctcttgccctgt

SEQ ID NO: 4918621 - DNA, 25 bp, Homo sapien
tctcttgccctgtataattttaggg

SEQ ID NO: 4918622 - DNA, 25 bp, Homo sapien
ttgatttccaacacgtgcggaggga

SEQ ID NO: 4918623 - DNA, 25 bp, Homo sapien
caggcattcaggcttggatcgtcct

SEQ ID NO: 4918624 - DNA, 25 bp, Homo sapien
tctcagtttgctcctattcaggaca

SEQ ID NO: 4918625 - DNA, 25 bp, Homo sapien
tcaggacatggtgtaagaactgtca

SEQ ID NO: 4918626 - DNA, 25 bp, Homo sapien
gcagcagcacgataaaaataccata

SEQ ID NO: 4918627 - DNA, 25 bp, Homo sapien
gatactcacttttggaactcccagg

SEQ ID NO: 4918628 - DNA, 25 bp, Homo sapien
ccaccaagcccggccgaccttgtct

SEQ ID NO: 4918629 - DNA, 25 bp, Homo sapien
caccaagcccggccgaccttgtctt

SEQ ID NO: 4918630 - DNA, 25 bp, Homo sapien
caagcccggccgaccttgtctttca

SEQ ID NO: 4918631 - DNA, 25 bp, Homo sapien
tgtgtgacctttcccctactgatag

SEQ ID NO: 4918632 - DNA, 25 bp, Homo sapien
atcagagtgactgctgccccaggta

SEQ ID NO: 4918633 - DNA, 25 bp, Homo sapien
tgaaagtgaaccctggagatgtcgc

SEQ ID NO: 4918634 - DNA, 25 bp, Homo sapien
tactgatagcatcctgcagggtgtc

SEQ ID NO: 4918635 - DNA, 25 bp, Homo sapien
ctttgaatgggtgtgagatgcctcc

SEQ ID NO: 4918636 - DNA, 25 bp, Homo sapien
tcagctgagtacaagaggaactggc

SEQ ID NO: 4918637 - DNA, 25 bp, Homo sapien
gatgcctccttaccctctgtagtga

SEQ ID NO: 4918638 - DNA, 25 bp, Homo sapien
cagtgcatttccacgttacgccagt

SEQ ID NO: 4918639 - DNA, 25 bp, Homo sapien
gaaaattacagtccgctgctcgccc

SEQ ID NO: 4918640 - DNA, 25 bp, Homo sapien
aagttaaagaaatcgcccacatgcg

SEQ ID NO: 4918641 - DNA, 25 bp, Homo sapien
cccgccctgggtgcgagatattcag

SEQ ID NO: 4918642 - DNA, 25 bp, Homo sapien
gaggaatccgagaggcaaggcaatc

SEQ ID NO: 4918643 - DNA, 25 bp, Homo sapien
gcagctttcggatcggcggtcgctt

SEQ ID NO: 4918644 - DNA, 25 bp, Homo sapien
catctttctctaggcgttccggcag

SEQ ID NO: 4918645 - DNA, 25 bp, Homo sapien
ggatagccgtcttacactcttagca

SEQ ID NO: 4918646 - DNA, 25 bp, Homo sapien
gaaaattgaaatactgggtctcgga

SEQ ID NO: 4918647 - DNA, 25 bp, Homo sapien
gctgagataatctgcaccctgatca

SEQ ID NO: 4918648 - DNA, 25 bp, Homo sapien
gcaccctgatcagaagagaaggcct

SEQ ID NO: 4918649 - DNA, 25 bp, Homo sapien
gggtcacatgtggtttcaatcactg

SEQ ID NO: 4918650 - DNA, 25 bp, Homo sapien
tgttgttcttagcaacttgggctgg

SEQ ID NO: 4918651 - DNA, 25 bp, Homo sapien
attgtagaccattgataaacatatg

SEQ ID NO: 4918652 - DNA, 25 bp, Homo sapien
ttctgttggtttataacagtcaatg

SEQ ID NO: 4918653 - DNA, 25 bp, Homo sapien
gaattgtagaccattgataaacata

SEQ ID NO: 4918654 - DNA, 25 bp, Homo sapien
gttggtttataacagtcaatgacca

SEQ ID NO: 4918655 - DNA, 25 bp, Homo sapien
cttcagcaatagctgaagtctcctt

SEQ ID NO: 4918656 - DNA, 25 bp, Homo sapien
ttcagcaatagctgaagtctccttt

SEQ ID NO: 4918657 - DNA, 25 bp, Homo sapien
cacatggagtacagacaatgctaac

SEQ ID NO: 4918658 - DNA, 25 bp, Homo sapien
tgataaagagtacgtccagcaacca

SEQ ID NO: 4918659 - DNA, 25 bp, Homo sapien
ttttggctataagtggaagtcctcc

SEQ ID NO: 4918660 - DNA, 25 bp, Homo sapien
tatttatgagatactgccatgtgcc

SEQ ID NO: 4918661 - DNA, 25 bp, Homo sapien
gaaattattgacactccccaagaat

SEQ ID NO: 4918662 - DNA, 25 bp, Homo sapien
aaattattgacactccccaagaatt

SEQ ID NO: 4918663 - DNA, 25 bp, Homo sapien
cacgtccgataattgtagagaaatt

SEQ ID NO: 4918664 - DNA, 25 bp, Homo sapien
tttcacgtccgataattgtagagaa

SEQ ID NO: 4918665 - DNA, 25 bp, Homo sapien
gaatgctgcctcgtggccttttgct

SEQ ID NO: 4918666 - DNA, 25 bp, Homo sapien
tagtccttcacacgatttaaattgt

SEQ ID NO: 4918667 - DNA, 25 bp, Homo sapien
tcttcagtggccacgctaagctgtg

SEQ ID NO: 4918668 - DNA, 25 bp, Homo sapien
gctggtctggactctgaatgctgcc

SEQ ID NO: 4918669 - DNA, 25 bp, Homo sapien
gagcatgatctctatcaggctggaa

SEQ ID NO: 4918670 - DNA, 25 bp, Homo sapien
gactagacttaggaggaggcaatca

SEQ ID NO: 4918671 - DNA, 25 bp, Homo sapien
tacttgactccttatgtgcatggca

SEQ ID NO: 4918672 - DNA, 25 bp, Homo sapien
tctgtgcatcctagaaaaactccca

SEQ ID NO: 4918673 - DNA, 25 bp, Homo sapien
tccatgatctaccaaggtgaagact

SEQ ID NO: 4918674 - DNA, 25 bp, Homo sapien
aagactgccaatcccaggttggaga

SEQ ID NO: 4918675 - DNA, 25 bp, Homo sapien
caggttggagaagacccgtcagagt

SEQ ID NO: 4918676 - DNA, 25 bp, Homo sapien
tgatgaactactgcaaattggtgtt

SEQ ID NO: 4918677 - DNA, 25 bp, Homo sapien
atttgcttaaactcatgctcgtagg

SEQ ID NO: 4918678 - DNA, 25 bp, Homo sapien
gtaggcaattttagggctctctggg

SEQ ID NO: 4918679 - DNA, 25 bp, Homo sapien
ttcttccaccaatagaaagatgttg

SEQ ID NO: 4918680 - DNA, 25 bp, Homo sapien
ctcatgctcgtaggcaattttaggg

SEQ ID NO: 4918681 - DNA, 25 bp, Homo sapien
agccaggaatctctccagagtcact

SEQ ID NO: 4918682 - DNA, 25 bp, Homo sapien
ggaatctctccagagtcacttcgca

SEQ ID NO: 4918683 - DNA, 25 bp, Homo sapien
tctctccagagtcacttcgcagttg

SEQ ID NO: 4918684 - DNA, 25 bp, Homo sapien
aatctctccagagtcacttcgcagt

SEQ ID NO: 4918685 - DNA, 25 bp, Homo sapien
gaggtgtgcacccgcagatttcact

SEQ ID NO: 4918686 - DNA, 25 bp, Homo sapien
tgtgaggtgtgcacccgcagatttc

SEQ ID NO: 4918687 - DNA, 25 bp, Homo sapien
ggtgtgcacccgcagatttcacttc

SEQ ID NO: 4918688 - DNA, 25 bp, Homo sapien
gtgtgcacccgcagatttcacttct

SEQ ID NO: 4918689 - DNA, 25 bp, Homo sapien
tcctatcaactttctttgcgggtag

SEQ ID NO: 4918690 - DNA, 25 bp, Homo sapien
gggaagagagatcctatcaactttc

SEQ ID NO: 4918691 - DNA, 25 bp, Homo sapien
gagagatcctatcaactttctttgc

SEQ ID NO: 4918692 - DNA, 25 bp, Homo sapien
tcaactttctttgcgggtagtggcg

SEQ ID NO: 4918693 - DNA, 25 bp, Homo sapien
ctataattaggaggccaaactccag

SEQ ID NO: 4918694 - DNA, 25 bp, Homo sapien
gatctggcccttcggcaggtcagca

SEQ ID NO: 4918695 - DNA, 25 bp, Homo sapien
gtcaccaccaagatctggcccttcg

SEQ ID NO: 4918696 - DNA, 25 bp, Homo sapien
cagagaagttgcagtcaccaccaag

SEQ ID NO: 4918697 - DNA, 25 bp, Homo sapien
ctcagagaagttgcagtcaccacca

SEQ ID NO: 4918698 - DNA, 25 bp, Homo sapien
cctgttcctcacagaaagactaacc

SEQ ID NO: 4918699 - DNA, 25 bp, Homo sapien
gatatccttggatcgtggacagatt

SEQ ID NO: 4918700 - DNA, 25 bp, Homo sapien
tctccataaacacggttagccttcc

SEQ ID NO: 4918701 - DNA, 25 bp, Homo sapien
ccataaacacggttagccttccaag

SEQ ID NO: 4918702 - DNA, 25 bp, Homo sapien
tccataaacacggttagccttccaa

SEQ ID NO: 4918703 - DNA, 25 bp, Homo sapien
ttctccataaacacggttagccttc

SEQ ID NO: 4918704 - DNA, 25 bp, Homo sapien
catggaactgtctgttaagggctgc

SEQ ID NO: 4918705 - DNA, 25 bp, Homo sapien
aactgtctgttaagggctgcgctaa

SEQ ID NO: 4918706 - DNA, 25 bp, Homo sapien
ttctcatggaactgtctgttaaggg

SEQ ID NO: 4918707 - DNA, 25 bp, Homo sapien
tggaactgtctgttaagggctgcgc

SEQ ID NO: 4918708 - DNA, 25 bp, Homo sapien
cagtgggcaactccccctcccgatc

SEQ ID NO: 4918709 - DNA, 25 bp, Homo sapien
taatcatactctcagtgggcaactc

SEQ ID NO: 4918710 - DNA, 25 bp, Homo sapien
ccttaatcatactctcagtgggcaa

SEQ ID NO: 4918711 - DNA, 25 bp, Homo sapien
cttaatcatactctcagtgggcaac

SEQ ID NO: 4918712 - DNA, 25 bp, Homo sapien
tctgtgttccagaccaaagggcaag

SEQ ID NO: 4918713 - DNA, 25 bp, Homo sapien
cattttggggaactcgacttgagct

SEQ ID NO: 4918714 - DNA, 25 bp, Homo sapien
agaacccacaatataataaccttgg

SEQ ID NO: 4918715 - DNA, 25 bp, Homo sapien
ggaactcgacttgagctcttttttc

SEQ ID NO: 4918716 - DNA, 25 bp, Homo sapien
ctgtctgggccagctccattggagg

SEQ ID NO: 4918717 - DNA, 25 bp, Homo sapien
gcagcaagggcctgctttcctcttc

SEQ ID NO: 4918718 - DNA, 25 bp, Homo sapien
agctccattggagggccactgtgga

SEQ ID NO: 4918719 - DNA, 25 bp, Homo sapien
gccactgtggacagcagcaagggcc

SEQ ID NO: 4918720 - DNA, 25 bp, Homo sapien
gaaggcccttgataaagttttgctg

SEQ ID NO: 4918721 - DNA, 25 bp, Homo sapien
ggagacttagttgaactcctgaacg

SEQ ID NO: 4918722 - DNA, 25 bp, Homo sapien
tcctgaacgctaagctccagaaagg

SEQ ID NO: 4918723 - DNA, 25 bp, Homo sapien
gaatcaacttccctaaatcgcttaa

SEQ ID NO: 4918724 - DNA, 25 bp, Homo sapien
tagtgccgtgctgcgagtttctgtt

SEQ ID NO: 4918725 - DNA, 25 bp, Homo sapien
ccgtgctgcgagtttctgttgtttc

SEQ ID NO: 4918726 - DNA, 25 bp, Homo sapien
tggtctccttaatagtgccgtgctg

SEQ ID NO: 4918727 - DNA, 25 bp, Homo sapien
cttaatagtgccgtgctgcgagttt

SEQ ID NO: 4918728 - DNA, 25 bp, Homo sapien
cagggatctggtaattcaatgacat

SEQ ID NO: 4918729 - DNA, 25 bp, Homo sapien
tgaagagaaatcaagacaatctgac

SEQ ID NO: 4918730 - DNA, 25 bp, Homo sapien
gttgaagagaaatcaagacaatctg

SEQ ID NO: 4918731 - DNA, 25 bp, Homo sapien
ctgttgaagagaaatcaagacaatc

SEQ ID NO: 4918732 - DNA, 25 bp, Homo sapien
tgttgaagagaaatcaagacaatct

SEQ ID NO: 4918733 - DNA, 25 bp, Homo sapien
acttgtacttgcagattccgtatgg

SEQ ID NO: 4918734 - DNA, 25 bp, Homo sapien
tgtcccctgaattgaatgacccagg

SEQ ID NO: 4918735 - DNA, 25 bp, Homo sapien
tgctgtaacttgtacttgcagattc

SEQ ID NO: 4918736 - DNA, 25 bp, Homo sapien
gtacttgcagattccgtatggtcat

SEQ ID NO: 4918737 - DNA, 25 bp, Homo sapien
ctaaaatgagaatccacagtccctg

SEQ ID NO: 4918738 - DNA, 25 bp, Homo sapien
cacagtccctgagtttgggcctggg

SEQ ID NO: 4918739 - DNA, 25 bp, Homo sapien
ccctgagtttgggcctgggtgtgca

SEQ ID NO: 4918740 - DNA, 25 bp, Homo sapien
tgagaatccacagtccctgagtttg

SEQ ID NO: 4918741 - DNA, 25 bp, Homo sapien
taagtatcaaagtgtactaatttgc

SEQ ID NO: 4918742 - DNA, 25 bp, Homo sapien
cctgtgtggctgatagctgtcattt

SEQ ID NO: 4918743 - DNA, 25 bp, Homo sapien
gctgtcatttccgtataagtatcaa

SEQ ID NO: 4918744 - DNA, 25 bp, Homo sapien
ctaatttgctatttctagtctgctg

SEQ ID NO: 4918745 - DNA, 25 bp, Homo sapien
gctttgtgtttgaggttagcagtga

SEQ ID NO: 4918746 - DNA, 25 bp, Homo sapien
gtttgaggttagcagtgaagaattc

SEQ ID NO: 4918747 - DNA, 25 bp, Homo sapien
aggtagaagttttctgactggggct

SEQ ID NO: 4918748 - DNA, 25 bp, Homo sapien
gggcttggttaggacagaaatttca

SEQ ID NO: 4918749 - DNA, 25 bp, Homo sapien
agtggttttcccagccagctttaga

SEQ ID NO: 4918750 - DNA, 25 bp, Homo sapien
tcatgttctgttttcccctggcatt

SEQ ID NO: 4918751 - DNA, 25 bp, Homo sapien
catttcactcttgtgcagatggcag

SEQ ID NO: 4918752 - DNA, 25 bp, Homo sapien
gatggcagcaatattacttttccct

SEQ ID NO: 4918753 - DNA, 25 bp, Homo sapien
tattgtatgatgtcgtacagtcttg

SEQ ID NO: 4918754 - DNA, 25 bp, Homo sapien
cgtacagtcttggatatgcagccct

SEQ ID NO: 4918755 - DNA, 25 bp, Homo sapien
gcagccctatggttcttcacctttt

SEQ ID NO: 4918756 - DNA, 25 bp, Homo sapien
tgtcttatattgtatgatgtcgtac

SEQ ID NO: 4918757 - DNA, 25 bp, Homo sapien
tggcaaaatggcgaaaacaaggcac

SEQ ID NO: 4918758 - DNA, 25 bp, Homo sapien
tggcgaaaacaaggcacttgcactt

SEQ ID NO: 4918759 - DNA, 25 bp, Homo sapien
ccttggcaaaatggcgaaaacaagg

SEQ ID NO: 4918760 - DNA, 25 bp, Homo sapien
aaatggcgaaaacaaggcacttgca

SEQ ID NO: 4918761 - DNA, 25 bp, Homo sapien
tttattgtcgtgaaagctatgactc

SEQ ID NO: 4918762 - DNA, 25 bp, Homo sapien
ttattgtcgtgaaagctatgactca

SEQ ID NO: 4918763 - DNA, 25 bp, Homo sapien
tattgtcgtgaaagctatgactcag

SEQ ID NO: 4918764 - DNA, 25 bp, Homo sapien
ttttattgtcgtgaaagctatgact

SEQ ID NO: 4918765 - DNA, 25 bp, Homo sapien
tctgtgcagatgttcaaaacaggat

SEQ ID NO: 4918766 - DNA, 25 bp, Homo sapien
tgattcttgtccaattcagtgtgaa

SEQ ID NO: 4918767 - DNA, 25 bp, Homo sapien
gaagttatgaagccatcccagccag

SEQ ID NO: 4918768 - DNA, 25 bp, Homo sapien
tacagaagcatattgttatattgtt

SEQ ID NO: 4918769 - DNA, 25 bp, Homo sapien
gagtaagagggactatttcagattc

SEQ ID NO: 4918770 - DNA, 25 bp, Homo sapien
tggaaagagtaagagggactatttc

SEQ ID NO: 4918771 - DNA, 25 bp, Homo sapien
aagagggactatttcagattctttg

SEQ ID NO: 4918772 - DNA, 25 bp, Homo sapien
ggacagggatatatcaggcaggcag

SEQ ID NO: 4918773 - DNA, 25 bp, Homo sapien
ttccagtcagtcttgatgttccatt

SEQ ID NO: 4918774 - DNA, 25 bp, Homo sapien
tttccagtcagtcttgatgttccat

SEQ ID NO: 4918775 - DNA, 25 bp, Homo sapien
tgcccggccaattcactgcttcttt

SEQ ID NO: 4918776 - DNA, 25 bp, Homo sapien
aaaacaatgatgctgtatgtatata

SEQ ID NO: 4918777 - DNA, 25 bp, Homo sapien
ttctttaagattctcctgtagccca

SEQ ID NO: 4918778 - DNA, 25 bp, Homo sapien
agtgcccggccaattcactgcttct

SEQ ID NO: 4918779 - DNA, 25 bp, Homo sapien
attcatgatggtccacactttgcca

SEQ ID NO: 4918780 - DNA, 25 bp, Homo sapien
aattcatgatggtccacactttgcc

SEQ ID NO: 4918781 - DNA, 25 bp, Homo sapien
tcatgatggtccacactttgccaat

SEQ ID NO: 4918782 - DNA, 25 bp, Homo sapien
ttcatgatggtccacactttgccaa

SEQ ID NO: 4918783 - DNA, 25 bp, Homo sapien
ccagctccactagacactgtgacct

SEQ ID NO: 4918784 - DNA, 25 bp, Homo sapien
ggccccagctccactagacactgtg

SEQ ID NO: 4918785 - DNA, 25 bp, Homo sapien
gccccagctccactagacactgtga

SEQ ID NO: 4918786 - DNA, 25 bp, Homo sapien
gctccactagacactgtgacctttg

SEQ ID NO: 4918787 - DNA, 25 bp, Homo sapien
cagggtgatggcataaaaaaagctt

SEQ ID NO: 4918788 - DNA, 25 bp, Homo sapien
agggtgatggcataaaaaaagcttt

SEQ ID NO: 4918789 - DNA, 25 bp, Homo sapien
gggtgatggcataaaaaaagcttta

SEQ ID NO: 4918790 - DNA, 25 bp, Homo sapien
tttgaagtaattagaaccttggagc

SEQ ID NO: 4918791 - DNA, 25 bp, Homo sapien
ggaagagtgtgtaaggcaatcaaaa

SEQ ID NO: 4918792 - DNA, 25 bp, Homo sapien
taaaagattggttcaacttccatca

SEQ ID NO: 4918793 - DNA, 25 bp, Homo sapien
gatttctagtctccaaaggttgcaa

SEQ ID NO: 4918794 - DNA, 25 bp, Homo sapien
tctgctgctgccaaggaacctatat

SEQ ID NO: 4918795 - DNA, 25 bp, Homo sapien
gatctagcaggtgtctctctttgaa

SEQ ID NO: 4918796 - DNA, 25 bp, Homo sapien
gaacctatatgctgaggctgcttca

SEQ ID NO: 4918797 - DNA, 25 bp, Homo sapien
gaatgtgggtttgctgaatgccacc

SEQ ID NO: 4918798 - DNA, 25 bp, Homo sapien
caacaggcgaatgaaagaagttgag

SEQ ID NO: 4918799 - DNA, 25 bp, Homo sapien
caggcctggatggggactctctttc

SEQ ID NO: 4918800 - DNA, 25 bp, Homo sapien
tccctttatctcaacaggcgaatga

SEQ ID NO: 4918801 - DNA, 25 bp, Homo sapien
tttatctcaacaggcgaatgaaaga

SEQ ID NO: 4918802 - DNA, 25 bp, Homo sapien
ttaaacccatgccagtcttttcagc

SEQ ID NO: 4918803 - DNA, 25 bp, Homo sapien
aacccatgccagtcttttcagcctg

SEQ ID NO: 4918804 - DNA, 25 bp, Homo sapien
gacgccgcatgcctaaattgatcat

SEQ ID NO: 4918805 - DNA, 25 bp, Homo sapien
tccatttgctgatgacgccgcatgc

SEQ ID NO: 4918806 - DNA, 25 bp, Homo sapien
tcagggcacgtgaagcactcccaac

SEQ ID NO: 4918807 - DNA, 25 bp, Homo sapien
ctattggtgattgaggagcttcagg

SEQ ID NO: 4918808 - DNA, 25 bp, Homo sapien
gagcttcagggcacgtgaagcactc

SEQ ID NO: 4918809 - DNA, 25 bp, Homo sapien
gcttcagggcacgtgaagcactccc

SEQ ID NO: 4918810 - DNA, 25 bp, Homo sapien
gacgtgtagagacccacgtctttca

SEQ ID NO: 4918811 - DNA, 25 bp, Homo sapien
aattctcccttaggcatcttcaaag

SEQ ID NO: 4918812 - DNA, 25 bp, Homo sapien
gagtttctgaccctatcttgattgg

SEQ ID NO: 4918813 - DNA, 25 bp, Homo sapien
agtaaaaccactggacgtgtagaga

SEQ ID NO: 4918814 - DNA, 25 bp, Homo sapien
tagaaccaggacatggattatggcc

SEQ ID NO: 4918815 - DNA, 25 bp, Homo sapien
taattaactgttgctcatggcacca

SEQ ID NO: 4918816 - DNA, 25 bp, Homo sapien
gctaaattacgttactggactgaac

SEQ ID NO: 4918817 - DNA, 25 bp, Homo sapien
cccttttgagcatggaaatatagcc

SEQ ID NO: 4918818 - DNA, 25 bp, Homo sapien
aaactgagcttgatatgaccatgaa

SEQ ID NO: 4918819 - DNA, 25 bp, Homo sapien
tgaaataatagaagctgactaatgg

SEQ ID NO: 4918820 - DNA, 25 bp, Homo sapien
taaaaagaggttcttatgcttttca

SEQ ID NO: 4918821 - DNA, 25 bp, Homo sapien
taatggacaaaacagtgggatcaaa

SEQ ID NO: 4918822 - DNA, 25 bp, Homo sapien
gatttcaagtgatgcatccgcctca

SEQ ID NO: 4918823 - DNA, 25 bp, Homo sapien
tcctgatttcaagtgatgcatccgc

SEQ ID NO: 4918824 - DNA, 25 bp, Homo sapien
cctggcctgagctgtacatttttaa

SEQ ID NO: 4918825 - DNA, 25 bp, Homo sapien
acctggcctgagctgtacattttta

SEQ ID NO: 4918826 - DNA, 25 bp, Homo sapien
tctgattcatgctataacagagaga

SEQ ID NO: 4918827 - DNA, 25 bp, Homo sapien
ggtacctaggttaggcaaattgatg

SEQ ID NO: 4918828 - DNA, 25 bp, Homo sapien
aggtacctaggttaggcaaattgat

SEQ ID NO: 4918829 - DNA, 25 bp, Homo sapien
gaggtacctaggttaggcaaattga

SEQ ID NO: 4918830 - DNA, 25 bp, Homo sapien
tatgtaaagttctcagcacaacacc

SEQ ID NO: 4918831 - DNA, 25 bp, Homo sapien
cagcctgtatcaggttcccagcaag

SEQ ID NO: 4918832 - DNA, 25 bp, Homo sapien
gaagcagtgcctaatgcatagggta

SEQ ID NO: 4918833 - DNA, 25 bp, Homo sapien
gacttcagagccaaacagcctgtat

SEQ ID NO: 4918834 - DNA, 25 bp, Homo sapien
ttagcagtgatccagggatcagaaa

SEQ ID NO: 4918835 - DNA, 25 bp, Homo sapien
tagcagtgatccagggatcagaaaa

SEQ ID NO: 4918836 - DNA, 25 bp, Homo sapien
agcagtgatccagggatcagaaaac

SEQ ID NO: 4918837 - DNA, 25 bp, Homo sapien
gcagtgatccagggatcagaaaacc

SEQ ID NO: 4918838 - DNA, 25 bp, Homo sapien
taattaccctgacttcatagagctg

SEQ ID NO: 4918839 - DNA, 25 bp, Homo sapien
tctttctgagcctcacctttgtact

SEQ ID NO: 4918840 - DNA, 25 bp, Homo sapien
tagtgtattgtggagactagccaaa

SEQ ID NO: 4918841 - DNA, 25 bp, Homo sapien
taaaatctttctactatgtcatagg

SEQ ID NO: 4918842 - DNA, 25 bp, Homo sapien
gagcctgtcctgcatggatattcac

SEQ ID NO: 4918843 - DNA, 25 bp, Homo sapien
tggaggaactccaaaacgaccactg

SEQ ID NO: 4918844 - DNA, 25 bp, Homo sapien
aaatcccacagcagatatgtgacag

SEQ ID NO: 4918845 - DNA, 25 bp, Homo sapien
cagctgttgctttgtacgtggccaa

SEQ ID NO: 4918846 - DNA, 25 bp, Homo sapien
ctttggggttgccaatagagtcact

SEQ ID NO: 4918847 - DNA, 25 bp, Homo sapien
ttcttgataaactttagcactttgg

SEQ ID NO: 4918848 - DNA, 25 bp, Homo sapien
tagcactttggggttgccaatagag

SEQ ID NO: 4918849 - DNA, 25 bp, Homo sapien
caatagagtcactgcaggtaggtac

SEQ ID NO: 4918850 - DNA, 25 bp, Homo sapien
cgaaaggtcccaatatagcatgctt

SEQ ID NO: 4918851 - DNA, 25 bp, Homo sapien
ctataccgaaaggtcccaatatagc

SEQ ID NO: 4918852 - DNA, 25 bp, Homo sapien
aaaggtcccaatatagcatgctttc

SEQ ID NO: 4918853 - DNA, 25 bp, Homo sapien
accgaaaggtcccaatatagcatgc

SEQ ID NO: 4918854 - DNA, 25 bp, Homo sapien
caaatcacctcctcaagaaccttta

SEQ ID NO: 4918855 - DNA, 25 bp, Homo sapien
aattaaaatagtttagcagatacag

SEQ ID NO: 4918856 - DNA, 25 bp, Homo sapien
agaaaatgccaagcctatatttgtt

SEQ ID NO: 4918857 - DNA, 25 bp, Homo sapien
tttacatttgagcaagattaaagac

SEQ ID NO: 4918858 - DNA, 25 bp, Homo sapien
ctccactgtccctaatgggaggctt

SEQ ID NO: 4918859 - DNA, 25 bp, Homo sapien
ccacagtggtggacgcttcttcagc

SEQ ID NO: 4918860 - DNA, 25 bp, Homo sapien
tcccttctccggcatttcaagagta

SEQ ID NO: 4918861 - DNA, 25 bp, Homo sapien
cccttcctaggtgggtagttcagct

SEQ ID NO: 4918862 - DNA, 25 bp, Homo sapien
tgccattacgcaaaaataagctgac

SEQ ID NO: 4918863 - DNA, 25 bp, Homo sapien
gaaactttccttcgaacagcatgtg

SEQ ID NO: 4918864 - DNA, 25 bp, Homo sapien
tctgttgccttcaagtctcagggaa

SEQ ID NO: 4918865 - DNA, 25 bp, Homo sapien
caaaccttgtctggtagtcgtctac

SEQ ID NO: 4918866 - DNA, 25 bp, Homo sapien
tgcttgggctaccacaacagagtac

SEQ ID NO: 4918867 - DNA, 25 bp, Homo sapien
taactggacacgtctttgggtgaac

SEQ ID NO: 4918868 - DNA, 25 bp, Homo sapien
gggactactctgactataactggac

SEQ ID NO: 4918869 - DNA, 25 bp, Homo sapien
gcatctctggtgacacatactcagg

SEQ ID NO: 4918870 - DNA, 25 bp, Homo sapien
tagactacactgtatccaatatgta

SEQ ID NO: 4918871 - DNA, 25 bp, Homo sapien
tacatggatgacttatatagaggtg

SEQ ID NO: 4918872 - DNA, 25 bp, Homo sapien
cacccaagtagactacactgtatcc

SEQ ID NO: 4918873 - DNA, 25 bp, Homo sapien
aggtgaattctgagactttaatgca

SEQ ID NO: 4918874 - DNA, 25 bp, Homo sapien
ttcttgaggggtggcaactgtttgt

SEQ ID NO: 4918875 - DNA, 25 bp, Homo sapien
cataagctgacccttgttcttgagg

SEQ ID NO: 4918876 - DNA, 25 bp, Homo sapien
ttgatgaatactgtcataagctgac

SEQ ID NO: 4918877 - DNA, 25 bp, Homo sapien
gttctttgatggtttctttagacac

SEQ ID NO: 4918878 - DNA, 25 bp, Homo sapien
taaacccaaggagtgtagctccaaa

SEQ ID NO: 4918879 - DNA, 25 bp, Homo sapien
taagctgagtcccaaagggtagagg

SEQ ID NO: 4918880 - DNA, 25 bp, Homo sapien
gcaagacaatttgaatggcagctct

SEQ ID NO: 4918881 - DNA, 25 bp, Homo sapien
tactgccataggaagactcaaaacc

SEQ ID NO: 4918882 - DNA, 25 bp, Homo sapien
ctacgacagagagaagggtcttttt

SEQ ID NO: 4918883 - DNA, 25 bp, Homo sapien
tataccacagcccaggattttatat

SEQ ID NO: 4918884 - DNA, 25 bp, Homo sapien
accacagcccaggattttatattca

SEQ ID NO: 4918885 - DNA, 25 bp, Homo sapien
tgaatgtgaactgttataccacagc

SEQ ID NO: 4918886 - DNA, 25 bp, Homo sapien
gattttatattcaggtctagcttta

SEQ ID NO: 4918887 - DNA, 25 bp, Homo sapien
catggataccatgtgtactgcctac

SEQ ID NO: 4918888 - DNA, 25 bp, Homo sapien
acccatggataccatgtgtactgcc

SEQ ID NO: 4918889 - DNA, 25 bp, Homo sapien
ttacccatggataccatgtgtactg

SEQ ID NO: 4918890 - DNA, 25 bp, Homo sapien
ccatggataccatgtgtactgccta

SEQ ID NO: 4918891 - DNA, 25 bp, Homo sapien
gggctcctgaatgctagatcaatgt

SEQ ID NO: 4918892 - DNA, 25 bp, Homo sapien
gattttggtgagtagcagtctctgc

SEQ ID NO: 4918893 - DNA, 25 bp, Homo sapien
aaagaatggattttggtgagtagca

SEQ ID NO: 4918894 - DNA, 25 bp, Homo sapien
cagtctctgccacaacaaatatttt

SEQ ID NO: 4918895 - DNA, 25 bp, Homo sapien
caacagatattagacatcctatgtc

SEQ ID NO: 4918896 - DNA, 25 bp, Homo sapien
tcagccaccacgttcggtgtagatt

SEQ ID NO: 4918897 - DNA, 25 bp, Homo sapien
tgatgacaaatgcatgcagcacttg

SEQ ID NO: 4918898 - DNA, 25 bp, Homo sapien
aacagtcctaatcaaaggctgcagg

SEQ ID NO: 4918899 - DNA, 25 bp, Homo sapien
tcacttatatccttgaatacagtcc

SEQ ID NO: 4918900 - DNA, 25 bp, Homo sapien
tacagtccacatgcactcgtttgcc

SEQ ID NO: 4918901 - DNA, 25 bp, Homo sapien
tcgtttgccctccaggtaatccttg

SEQ ID NO: 4918902 - DNA, 25 bp, Homo sapien
caggtaatccttgtaagacccacaa

SEQ ID NO: 4918903 - DNA, 25 bp, Homo sapien
caaatctctgacgtagtagtgcatc

SEQ ID NO: 4918904 - DNA, 25 bp, Homo sapien
tttgaacaaatctctgacgtagtag

SEQ ID NO: 4918905 - DNA, 25 bp, Homo sapien
tctgacgtagtagtgcatctgtggg

SEQ ID NO: 4918906 - DNA, 25 bp, Homo sapien
tctgtgggggatcactcatgtgcat

SEQ ID NO: 4918907 - DNA, 25 bp, Homo sapien
gagttaatattcagtagatccaagt

SEQ ID NO: 4918908 - DNA, 25 bp, Homo sapien
ggacagcttgggctgataaaagaat

SEQ ID NO: 4918909 - DNA, 25 bp, Homo sapien
gtcattggtatcttgttttccaggg

SEQ ID NO: 4918910 - DNA, 25 bp, Homo sapien
cctgaaaaccgcatagacaaatgtc

SEQ ID NO: 4918911 - DNA, 25 bp, Homo sapien
cactggggctaggacgtttctggac

SEQ ID NO: 4918912 - DNA, 25 bp, Homo sapien
ttcctcctttagtggtggctgtgcc

SEQ ID NO: 4918913 - DNA, 25 bp, Homo sapien
caggaagttcctcctttagtggtgg

SEQ ID NO: 4918914 - DNA, 25 bp, Homo sapien
cttcactggggctaggacgtttctg

SEQ ID NO: 4918915 - DNA, 25 bp, Homo sapien
ccattccactacaggacccagtgtg

SEQ ID NO: 4918916 - DNA, 25 bp, Homo sapien
gccacagtaattagaatggcaatca

SEQ ID NO: 4918917 - DNA, 25 bp, Homo sapien
cattccactacaggacccagtgtgt

SEQ ID NO: 4918918 - DNA, 25 bp, Homo sapien
ccttatctacgattggtgggtttca

SEQ ID NO: 4918919 - DNA, 25 bp, Homo sapien
gagttatgtagaaagatcccttatc

SEQ ID NO: 4918920 - DNA, 25 bp, Homo sapien
ttctttatcggactgtaatttggcc

SEQ ID NO: 4918921 - DNA, 25 bp, Homo sapien
taagtcagtacttccatcgtcatct

SEQ ID NO: 4918922 - DNA, 25 bp, Homo sapien
gaagtttgctgtccctcgcttgctt

SEQ ID NO: 4918923 - DNA, 25 bp, Homo sapien
tccacatccatgtttggattgaagt

SEQ ID NO: 4918924 - DNA, 25 bp, Homo sapien
tcctctgcacaagggcatggatttc

SEQ ID NO: 4918925 - DNA, 25 bp, Homo sapien
gggcatggatttccacatccatgtt

SEQ ID NO: 4918926 - DNA, 25 bp, Homo sapien
gtactcctcctcctccacattcttc

SEQ ID NO: 4918927 - DNA, 25 bp, Homo sapien
actcctcctcctccacattcttcat

SEQ ID NO: 4918928 - DNA, 25 bp, Homo sapien
ctttcctggtactcctcctcctcca

SEQ ID NO: 4918929 - DNA, 25 bp, Homo sapien
tggtactcctcctcctccacattct

SEQ ID NO: 4918930 - DNA, 25 bp, Homo sapien
tcggtcctagactcccaggaaatta

SEQ ID NO: 4918931 - DNA, 25 bp, Homo sapien
gaattggcttctggctttgattggc

SEQ ID NO: 4918932 - DNA, 25 bp, Homo sapien
aaaaattggcttattctagtggcag

SEQ ID NO: 4918933 - DNA, 25 bp, Homo sapien
tacagtcaaaagcagatcacttctg

SEQ ID NO: 4918934 - DNA, 25 bp, Homo sapien
tttatcacaccttgtgcactgaggg

SEQ ID NO: 4918935 - DNA, 25 bp, Homo sapien
aggagacagcaaaccaatttcctca

SEQ ID NO: 4918936 - DNA, 25 bp, Homo sapien
cactgaggggttacccctccatact

SEQ ID NO: 4918937 - DNA, 25 bp, Homo sapien
ttcaaagttctgtattcagcaactg

SEQ ID NO: 4918938 - DNA, 25 bp, Homo sapien
tatagagaagaaacaaggcaccaaa

SEQ ID NO: 4918939 - DNA, 25 bp, Homo sapien
tttatagagaagaaacaaggcacca

SEQ ID NO: 4918940 - DNA, 25 bp, Homo sapien
ttttatagagaagaaacaaggcacc

SEQ ID NO: 4918941 - DNA, 25 bp, Homo sapien
cattttatagagaagaaacaaggca

SEQ ID NO: 4918942 - DNA, 25 bp, Homo sapien
agttgactggctatgcccagagccc

SEQ ID NO: 4918943 - DNA, 25 bp, Homo sapien
tctgcaggttgattcacagaatggc

SEQ ID NO: 4918944 - DNA, 25 bp, Homo sapien
ggtggcttcagcaaaacaatgggcc

SEQ ID NO: 4918945 - DNA, 25 bp, Homo sapien
cattttttagacacactctgcaggt

SEQ ID NO: 4918946 - DNA, 25 bp, Homo sapien
tcatttgctggctctacggttagca

SEQ ID NO: 4918947 - DNA, 25 bp, Homo sapien
tcctttgagaaaccgtgaggtactg

SEQ ID NO: 4918948 - DNA, 25 bp, Homo sapien
tagcataggtctttgcatgtacccc

SEQ ID NO: 4918949 - DNA, 25 bp, Homo sapien
tagtgcattaaaaacgagacaagtc

SEQ ID NO: 4918950 - DNA, 25 bp, Homo sapien
ttattacttagactccagggagccc

SEQ ID NO: 4918951 - DNA, 25 bp, Homo sapien
gggagcccatcctattcaagccttg

SEQ ID NO: 4918952 - DNA, 25 bp, Homo sapien
ccatgtaaggtcagctcgtagagta

SEQ ID NO: 4918953 - DNA, 25 bp, Homo sapien
caaaaagtgatctcctgagcagggt

SEQ ID NO: 4918954 - DNA, 25 bp, Homo sapien
tattgctccaccctgtataagtact

SEQ ID NO: 4918955 - DNA, 25 bp, Homo sapien
ggacttgggctcatcatatttgctc

SEQ ID NO: 4918956 - DNA, 25 bp, Homo sapien
gtgctctatcactgaagaccttccg

SEQ ID NO: 4918957 - DNA, 25 bp, Homo sapien
tccgcagcccatggaagagctatta

SEQ ID NO: 4918958 - DNA, 25 bp, Homo sapien
ccagcatatgggagacatgtctaca

SEQ ID NO: 4918959 - DNA, 25 bp, Homo sapien
caaaaatgcttcatgtctgcccctg

SEQ ID NO: 4918960 - DNA, 25 bp, Homo sapien
aaatatctgccttttgtagcgcccc

SEQ ID NO: 4918961 - DNA, 25 bp, Homo sapien
taatggttcctctagccagcatatg

SEQ ID NO: 4918962 - DNA, 25 bp, Homo sapien
aaactcatgaaaagacatagccttg

SEQ ID NO: 4918963 - DNA, 25 bp, Homo sapien
gagaagacttacctcatctttcagg

SEQ ID NO: 4918964 - DNA, 25 bp, Homo sapien
tgaaaagacatagccttgatgaaat

SEQ ID NO: 4918965 - DNA, 25 bp, Homo sapien
ctttcaggcagaaccaatcattctc

SEQ ID NO: 4918966 - DNA, 25 bp, Homo sapien
cgcaatgatacttcagcaactcaag

SEQ ID NO: 4918967 - DNA, 25 bp, Homo sapien
ctccgcaatgatacttcagcaactc

SEQ ID NO: 4918968 - DNA, 25 bp, Homo sapien
actcaagtaggccatctgaactgaa

SEQ ID NO: 4918969 - DNA, 25 bp, Homo sapien
gatacttcagcaactcaagtaggcc

SEQ ID NO: 4918970 - DNA, 25 bp, Homo sapien
taaccagatggactttcccaaagct

SEQ ID NO: 4918971 - DNA, 25 bp, Homo sapien
tagtatgtttgtttaccagggccag

SEQ ID NO: 4918972 - DNA, 25 bp, Homo sapien
tatatcagcaactatgagggttggg

SEQ ID NO: 4918973 - DNA, 25 bp, Homo sapien
tacttgggaattgcataaccagatg

SEQ ID NO: 4918974 - DNA, 25 bp, Homo sapien
ccaataggcgtatgaagtgatgctc

SEQ ID NO: 4918975 - DNA, 25 bp, Homo sapien
caaatagagagttctccaaaaaggg

SEQ ID NO: 4918976 - DNA, 25 bp, Homo sapien
tggatcccctgtatactgttagtgg

SEQ ID NO: 4918977 - DNA, 25 bp, Homo sapien
aaacgtctataactcaacacaaggg

SEQ ID NO: 4918978 - DNA, 25 bp, Homo sapien
aaggtgcgagaagaagtcagaaatc

SEQ ID NO: 4918979 - DNA, 25 bp, Homo sapien
ttacaacaggtgctccagctgaagg

SEQ ID NO: 4918980 - DNA, 25 bp, Homo sapien
gttactcacacaaggtaccctattg

SEQ ID NO: 4918981 - DNA, 25 bp, Homo sapien
tccggcagcacatcttacaacaggt

SEQ ID NO: 4918982 - DNA, 25 bp, Homo sapien
gattaaggcatagctcccaacagct

SEQ ID NO: 4918983 - DNA, 25 bp, Homo sapien
catagcccagggtgtctgcacactg

SEQ ID NO: 4918984 - DNA, 25 bp, Homo sapien
gctagaacccttgcattaggccagt

SEQ ID NO: 4918985 - DNA, 25 bp, Homo sapien
tatataccactgttagagcatccag

SEQ ID NO: 4918986 - DNA, 25 bp, Homo sapien
tgtctacgatggcagcccccctttt

SEQ ID NO: 4918987 - DNA, 25 bp, Homo sapien
gaagcagggaatgttcacgctggga

SEQ ID NO: 4918988 - DNA, 25 bp, Homo sapien
cgctgggacggtgctcctgttgtct

SEQ ID NO: 4918989 - DNA, 25 bp, Homo sapien
tgtctgtctacgatggcagcccccc

SEQ ID NO: 4918990 - DNA, 25 bp, Homo sapien
tatcaggcaattcagttggtgcttc

SEQ ID NO: 4918991 - DNA, 25 bp, Homo sapien
tactgttataacaagtttgatggta

SEQ ID NO: 4918992 - DNA, 25 bp, Homo sapien
cagaggaccgcagagcaaggtggcc

SEQ ID NO: 4918993 - DNA, 25 bp, Homo sapien
gatggtatcaggcaattcagttggt

SEQ ID NO: 4918994 - DNA, 25 bp, Homo sapien
tactttcagagacccatcatttccc

SEQ ID NO: 4918995 - DNA, 25 bp, Homo sapien
ccagtagtatagctggttcagtcca

SEQ ID NO: 4918996 - DNA, 25 bp, Homo sapien
gcaaagaacctatgtttgtccctct

SEQ ID NO: 4918997 - DNA, 25 bp, Homo sapien
taaatgcccctcttatgggcttgca

SEQ ID NO: 4918998 - DNA, 25 bp, Homo sapien
gagactaacgccaagcatgaaatgg

SEQ ID NO: 4918999 - DNA, 25 bp, Homo sapien
tgctgctttgtggtggaaggtaaaa

SEQ ID NO: 4919000 - DNA, 25 bp, Homo sapien
gggtttcacaccacagtcatataga

SEQ ID NO: 4919001 - DNA, 25 bp, Homo sapien
catgaaatggcgagtatagcccagc

SEQ ID NO: 4919002 - DNA, 25 bp, Homo sapien
catcatggtatgagctcgacttcct

SEQ ID NO: 4919003 - DNA, 25 bp, Homo sapien
cagagcatccccttaagcgtcgtaa

SEQ ID NO: 4919004 - DNA, 25 bp, Homo sapien
atctttgagagccagccagtgccct

SEQ ID NO: 4919005 - DNA, 25 bp, Homo sapien
gtgatttgcacccaagcagactcca

SEQ ID NO: 4919006 - DNA, 25 bp, Homo sapien
aggtttgaaatctggtggtcctaga

SEQ ID NO: 4919007 - DNA, 25 bp, Homo sapien
ggcatcgcctcttctggctgcgaag

SEQ ID NO: 4919008 - DNA, 25 bp, Homo sapien
tcctagatttgacccacggcatcgc

SEQ ID NO: 4919009 - DNA, 25 bp, Homo sapien
tgtcaggatccttaaccagtttgct

SEQ ID NO: 4919010 - DNA, 25 bp, Homo sapien
actgctttgggacaatgcccttaag

SEQ ID NO: 4919011 - DNA, 25 bp, Homo sapien
tgggtcccctgtgagactgctttgg

SEQ ID NO: 4919012 - DNA, 25 bp, Homo sapien
ccaagctgtcagtatactctttcaa

SEQ ID NO: 4919013 - DNA, 25 bp, Homo sapien
tagccctccccgtagaatttcagga

SEQ ID NO: 4919014 - DNA, 25 bp, Homo sapien
gtaatactggtcaggctaatcaagc

SEQ ID NO: 4919015 - DNA, 25 bp, Homo sapien
tccccaagtttgctcacatggaaaa

SEQ ID NO: 4919016 - DNA, 25 bp, Homo sapien
gaaaacaagcttggatgcactgaat

SEQ ID NO: 4919017 - DNA, 25 bp, Homo sapien
tatacttgggttccattgtgctggt

SEQ ID NO: 4919018 - DNA, 25 bp, Homo sapien
tcattacctactaattgttcaatta

SEQ ID NO: 4919019 - DNA, 25 bp, Homo sapien
ctaagaaggaatttgggctccttct

SEQ ID NO: 4919020 - DNA, 25 bp, Homo sapien
tgctgagctattactagatggccag

SEQ ID NO: 4919021 - DNA, 25 bp, Homo sapien
agatggccagctctatctactagaa

SEQ ID NO: 4919022 - DNA, 25 bp, Homo sapien
tgagctcccactaagttcaagtaaa

SEQ ID NO: 4919023 - DNA, 25 bp, Homo sapien
ctttgcaaaatgagctcccactaag

SEQ ID NO: 4919024 - DNA, 25 bp, Homo sapien
aaaatgagctcccactaagttcaag

SEQ ID NO: 4919025 - DNA, 25 bp, Homo sapien
gctcccactaagttcaagtaaaaga

SEQ ID NO: 4919026 - DNA, 25 bp, Homo sapien
gatagttatcagatttcttcacttt

SEQ ID NO: 4919027 - DNA, 25 bp, Homo sapien
tgatagttatcagatttcttcactt

SEQ ID NO: 4919028 - DNA, 25 bp, Homo sapien
gaatgtctccctccacttttgcatt

SEQ ID NO: 4919029 - DNA, 25 bp, Homo sapien
tgtctccctccacttttgcatttca

SEQ ID NO: 4919030 - DNA, 25 bp, Homo sapien
aatgtctccctccacttttgcattt

SEQ ID NO: 4919031 - DNA, 25 bp, Homo sapien
gtctccctccacttttgcatttcag

SEQ ID NO: 4919032 - DNA, 25 bp, Homo sapien
tctctagtaactcaaggtagaaaga

SEQ ID NO: 4919033 - DNA, 25 bp, Homo sapien
ttagcatcgaatactcccaagatat

SEQ ID NO: 4919034 - DNA, 25 bp, Homo sapien
tattgagggtttatatgccaggcaa

SEQ ID NO: 4919035 - DNA, 25 bp, Homo sapien
agatgtgattctcgcccttccttaa

SEQ ID NO: 4919036 - DNA, 25 bp, Homo sapien
tcgtctgcttttctaagaatccatc

SEQ ID NO: 4919037 - DNA, 25 bp, Homo sapien
acaatcacacttggcttctaaattg

SEQ ID NO: 4919038 - DNA, 25 bp, Homo sapien
ttggcacaaaagatcccatggcccc

SEQ ID NO: 4919039 - DNA, 25 bp, Homo sapien
taaaagtcgtctgcttttctaagaa

SEQ ID NO: 4919040 - DNA, 25 bp, Homo sapien
ctgaatatgctgttgagtaaaggga

SEQ ID NO: 4919041 - DNA, 25 bp, Homo sapien
gctaacgttgttctcttcagggctg

SEQ ID NO: 4919042 - DNA, 25 bp, Homo sapien
ttctgggctgttctactcctctatc

SEQ ID NO: 4919043 - DNA, 25 bp, Homo sapien
agatgtagcaccttgaaattgggca

SEQ ID NO: 4919044 - DNA, 25 bp, Homo sapien
gtttcctgttgagtgcctgagcaca

SEQ ID NO: 4919045 - DNA, 25 bp, Homo sapien
tgctgtactaagacagagcagacac

SEQ ID NO: 4919046 - DNA, 25 bp, Homo sapien
aaagtacagtgtgatcctctccctc

SEQ ID NO: 4919047 - DNA, 25 bp, Homo sapien
ggaagaacaggccttgataaccaga

SEQ ID NO: 4919048 - DNA, 25 bp, Homo sapien
cctgtgggtctgagtgaattacgcc

SEQ ID NO: 4919049 - DNA, 25 bp, Homo sapien
tggaaaggagctatcaaatgggaac

SEQ ID NO: 4919050 - DNA, 25 bp, Homo sapien
tgaccaggatattgtacagtgtttc

SEQ ID NO: 4919051 - DNA, 25 bp, Homo sapien
tggtcctgaatgatcctccctagag

SEQ ID NO: 4919052 - DNA, 25 bp, Homo sapien
tgtggaggattctatttgatccatc

SEQ ID NO: 4919053 - DNA, 25 bp, Homo sapien
tgtggtgtcaggttcgcttgcttgc

SEQ ID NO: 4919054 - DNA, 25 bp, Homo sapien
ttttgtggaggattctatttgatcc

SEQ ID NO: 4919055 - DNA, 25 bp, Homo sapien
ttctcatccttactttcagctgtgg

SEQ ID NO: 4919056 - DNA, 25 bp, Homo sapien
ctctggtggttctggtccaactgtc

SEQ ID NO: 4919057 - DNA, 25 bp, Homo sapien
tccaactgtcgtgggcgagtggaaa

SEQ ID NO: 4919058 - DNA, 25 bp, Homo sapien
tctcatttacaagattcttgaaagc

SEQ ID NO: 4919059 - DNA, 25 bp, Homo sapien
tcttgaaagcgaatgactcagtcat

SEQ ID NO: 4919060 - DNA, 25 bp, Homo sapien
ctagaggcatttctgagccaatggc

SEQ ID NO: 4919061 - DNA, 25 bp, Homo sapien
cagggtagttgaaagacactggcgt

SEQ ID NO: 4919062 - DNA, 25 bp, Homo sapien
ggtttacagaggcagttggcaaaaa

SEQ ID NO: 4919063 - DNA, 25 bp, Homo sapien
gcattgggttatttactagaggcat

SEQ ID NO: 4919064 - DNA, 25 bp, Homo sapien
tttaaaaggtgagagatgacaaggg

SEQ ID NO: 4919065 - DNA, 25 bp, Homo sapien
gcatgggtagttttaaaaggtgaga

SEQ ID NO: 4919066 - DNA, 25 bp, Homo sapien
gtagttttaaaaggtgagagatgac

SEQ ID NO: 4919067 - DNA, 25 bp, Homo sapien
ctgaatggcatgggtagttttaaaa

SEQ ID NO: 4919068 - DNA, 25 bp, Homo sapien
agagctatggtagccactctgcagc

SEQ ID NO: 4919069 - DNA, 25 bp, Homo sapien
gaaaatcctgcagcatagagctatg

SEQ ID NO: 4919070 - DNA, 25 bp, Homo sapien
cacaacaaggtagtaaaggctaagg

SEQ ID NO: 4919071 - DNA, 25 bp, Homo sapien
tgtcctcttccatggataagatagg

SEQ ID NO: 4919072 - DNA, 25 bp, Homo sapien
ttaatctgttgatcccatctgcttc

SEQ ID NO: 4919073 - DNA, 25 bp, Homo sapien
taatctgttgatcccatctgcttct

SEQ ID NO: 4919074 - DNA, 25 bp, Homo sapien
aatctgttgatcccatctgcttctc

SEQ ID NO: 4919075 - DNA, 25 bp, Homo sapien
cccggtgaatagagaggcctgctga

SEQ ID NO: 4919076 - DNA, 25 bp, Homo sapien
gctggcagagaactactcgagctaa

SEQ ID NO: 4919077 - DNA, 25 bp, Homo sapien
gagacagtgggcattgctcaagagc

SEQ ID NO: 4919078 - DNA, 25 bp, Homo sapien
gaaacggttcatgataggctctctg

SEQ ID NO: 4919079 - DNA, 25 bp, Homo sapien
ccgtgaaaagggatccctgagcact

SEQ ID NO: 4919080 - DNA, 25 bp, Homo sapien
aagggatccctgagcactgttcaac

SEQ ID NO: 4919081 - DNA, 25 bp, Homo sapien
caactcttcgtgaatgtttgttaag

SEQ ID NO: 4919082 - DNA, 25 bp, Homo sapien
cactgttcaactcttcgtgaatgtt

SEQ ID NO: 4919083 - DNA, 25 bp, Homo sapien
tagtgcaaaagtggtttgtaggtgt

SEQ ID NO: 4919084 - DNA, 25 bp, Homo sapien
cactcaactgtggtttcaggatata

SEQ ID NO: 4919085 - DNA, 25 bp, Homo sapien
tcaggatataggtgatagtgaatat

SEQ ID NO: 4919086 - DNA, 25 bp, Homo sapien
ctgtgggctgaagaaagtagtgcaa

SEQ ID NO: 4919087 - DNA, 25 bp, Homo sapien
cttattccaactagtgccagataca

SEQ ID NO: 4919088 - DNA, 25 bp, Homo sapien
ttattccaactagtgccagatacag

SEQ ID NO: 4919089 - DNA, 25 bp, Homo sapien
ttccaactagtgccagatacagaag

SEQ ID NO: 4919090 - DNA, 25 bp, Homo sapien
tattccaactagtgccagatacaga

SEQ ID NO: 4919091 - DNA, 25 bp, Homo sapien
gctcttgcttacgaaaacccaatct

SEQ ID NO: 4919092 - DNA, 25 bp, Homo sapien
tacgaaaacccaatctcagattcca

SEQ ID NO: 4919093 - DNA, 25 bp, Homo sapien
tgcttacgaaaacccaatctcagat

SEQ ID NO: 4919094 - DNA, 25 bp, Homo sapien
cctgtgctcttgcttacgaaaaccc

SEQ ID NO: 4919095 - DNA, 25 bp, Homo sapien
tgatccagtggttgaaggttcctga

SEQ ID NO: 4919096 - DNA, 25 bp, Homo sapien
gacagcttcatgatggcagacagta

SEQ ID NO: 4919097 - DNA, 25 bp, Homo sapien
gttcctgatcagctgtggacttctc

SEQ ID NO: 4919098 - DNA, 25 bp, Homo sapien
cagacagtatgtgccagtgatccag

SEQ ID NO: 4919099 - DNA, 25 bp, Homo sapien
gaataagagtcagccaaaaaaggaa

SEQ ID NO: 4919100 - DNA, 25 bp, Homo sapien
agaataagagtcagccaaaaaagga

SEQ ID NO: 4919101 - DNA, 25 bp, Homo sapien
gagaataagagtcagccaaaaaagg

SEQ ID NO: 4919102 - DNA, 25 bp, Homo sapien
catgtgcatatctgcgagtataaca

SEQ ID NO: 4919103 - DNA, 25 bp, Homo sapien
taacactatcaacaatgacattgtc

SEQ ID NO: 4919104 - DNA, 25 bp, Homo sapien
tgcgagtataacactatcaacaatg

SEQ ID NO: 4919105 - DNA, 25 bp, Homo sapien
cagccatacatgtgcatatctgcga

SEQ ID NO: 4919106 - DNA, 25 bp, Homo sapien
ctctggggacctgtgtcatggcaac

SEQ ID NO: 4919107 - DNA, 25 bp, Homo sapien
tgatcataatactctggggacctgt

SEQ ID NO: 4919108 - DNA, 25 bp, Homo sapien
gggacctgtgtcatggcaactgaga

SEQ ID NO: 4919109 - DNA, 25 bp, Homo sapien
ctgatcataatactctggggacctg

SEQ ID NO: 4919110 - DNA, 25 bp, Homo sapien
cccatattgcagatctgtggaggct

SEQ ID NO: 4919111 - DNA, 25 bp, Homo sapien
gctgggctcagttcccaatgagtct

SEQ ID NO: 4919112 - DNA, 25 bp, Homo sapien
tactgtaaagcaaactgatgtggcc

SEQ ID NO: 4919113 - DNA, 25 bp, Homo sapien
gaggctgacatcatcaccttgaata

SEQ ID NO: 4919114 - DNA, 25 bp, Homo sapien
gcatgtggtttgaacgtctggctgt

SEQ ID NO: 4919115 - DNA, 25 bp, Homo sapien
tgcatgtggtttgaacgtctggctg

SEQ ID NO: 4919116 - DNA, 25 bp, Homo sapien
tgctgaacagtcatgtaggtccagc

SEQ ID NO: 4919117 - DNA, 25 bp, Homo sapien
ctgcatgtggtttgaacgtctggct

SEQ ID NO: 4919118 - DNA, 25 bp, Homo sapien
ttgatagaatcagcagcaggtggaa

SEQ ID NO: 4919119 - DNA, 25 bp, Homo sapien
ctaaagtagttgagttgccaggcca

SEQ ID NO: 4919120 - DNA, 25 bp, Homo sapien
gggtcattgatagaatcagcagcag

SEQ ID NO: 4919121 - DNA, 25 bp, Homo sapien
gagccagattataatggattgagac

SEQ ID NO: 4919122 - DNA, 25 bp, Homo sapien
gcctcagtcgagtcattaccctttt

SEQ ID NO: 4919123 - DNA, 25 bp, Homo sapien
tggaagagaaggtgaaactggtaac

SEQ ID NO: 4919124 - DNA, 25 bp, Homo sapien
tgtgtttggagaatatgcctgtgca

SEQ ID NO: 4919125 - DNA, 25 bp, Homo sapien
catgattattaacaaggctcccaca

SEQ ID NO: 4919126 - DNA, 25 bp, Homo sapien
cgtggtgacatattacaagggtagg

SEQ ID NO: 4919127 - DNA, 25 bp, Homo sapien
aacctttgctggtgtagctgtgttc

SEQ ID NO: 4919128 - DNA, 25 bp, Homo sapien
tcacagtggatgacgtggtgacata

SEQ ID NO: 4919129 - DNA, 25 bp, Homo sapien
aatgaagaaacaagcgctggtgctg

SEQ ID NO: 4919130 - DNA, 25 bp, Homo sapien
tcagttgctttggagagacgtgaag

SEQ ID NO: 4919131 - DNA, 25 bp, Homo sapien
ccagtaggcgctttaattcagttgc

SEQ ID NO: 4919132 - DNA, 25 bp, Homo sapien
taggaggtgtggagacgagtgtccc

SEQ ID NO: 4919133 - DNA, 25 bp, Homo sapien
agtgtccctgatgcgaaacgatatc

SEQ ID NO: 4919134 - DNA, 25 bp, Homo sapien
gcatacctggatgctgctgcagaac

SEQ ID NO: 4919135 - DNA, 25 bp, Homo sapien
cttgggtgatacatgcatacctgga

SEQ ID NO: 4919136 - DNA, 25 bp, Homo sapien
ctgctgcagaacctgcagaaccaag

SEQ ID NO: 4919137 - DNA, 25 bp, Homo sapien
gaacctgcagaaccaagaaccttca

SEQ ID NO: 4919138 - DNA, 25 bp, Homo sapien
gccagctcttgaaggaacaaccagg

SEQ ID NO: 4919139 - DNA, 25 bp, Homo sapien
gcacctagggcagcctttatccctg

SEQ ID NO: 4919140 - DNA, 25 bp, Homo sapien
gctcttgaaggaacaaccagggcag

SEQ ID NO: 4919141 - DNA, 25 bp, Homo sapien
ggcagcctttatccctgtgccagct

SEQ ID NO: 4919142 - DNA, 25 bp, Homo sapien
tgctgcgaggtgatgagcaaattca

SEQ ID NO: 4919143 - DNA, 25 bp, Homo sapien
tcccggtaggttgctgcgaggtgat

SEQ ID NO: 4919144 - DNA, 25 bp, Homo sapien
ctggttgtcccggtaggttgctgcg

SEQ ID NO: 4919145 - DNA, 25 bp, Homo sapien
atggaagaggaaggccttatgatct

SEQ ID NO: 4919146 - DNA, 25 bp, Homo sapien
tcttgtacccttgatactccattcc

SEQ ID NO: 4919147 - DNA, 25 bp, Homo sapien
ccccgcttgcattagattggctctt

SEQ ID NO: 4919148 - DNA, 25 bp, Homo sapien
cattccaagcacctcggctgcttct

SEQ ID NO: 4919149 - DNA, 25 bp, Homo sapien
gttacagaataatccacaccactcc

SEQ ID NO: 4919150 - DNA, 25 bp, Homo sapien
taggcttgtggctaattacttccaa

SEQ ID NO: 4919151 - DNA, 25 bp, Homo sapien
caagctagaactcccagtttcaact

SEQ ID NO: 4919152 - DNA, 25 bp, Homo sapien
cttctggtgcctcctttaccaggct

SEQ ID NO: 4919153 - DNA, 25 bp, Homo sapien
tgcagtcaatgcaccactgtaacct

SEQ ID NO: 4919154 - DNA, 25 bp, Homo sapien
tgaactccagcaactctagtcgtac

SEQ ID NO: 4919155 - DNA, 25 bp, Homo sapien
gttctcccaagtattactttgcttc

SEQ ID NO: 4919156 - DNA, 25 bp, Homo sapien
taacgcactgctttcagttgaatag

SEQ ID NO: 4919157 - DNA, 25 bp, Homo sapien
gaacccgtgttctgttgtaacgcac

SEQ ID NO: 4919158 - DNA, 25 bp, Homo sapien
catatattaagttaatctgagagat

SEQ ID NO: 4919159 - DNA, 25 bp, Homo sapien
tccaaaaatcaggatgagcttgaat

SEQ ID NO: 4919160 - DNA, 25 bp, Homo sapien
ttgttgttccatgaagaacctgacc

SEQ ID NO: 4919161 - DNA, 25 bp, Homo sapien
taaactacattgagcaactacacaa

SEQ ID NO: 4919162 - DNA, 25 bp, Homo sapien
catgtcaggcatgggctgtgactga

SEQ ID NO: 4919163 - DNA, 25 bp, Homo sapien
ctgcatgttacccatctgtttacga

SEQ ID NO: 4919164 - DNA, 25 bp, Homo sapien
ccatctgtttacgaagccccttgca

SEQ ID NO: 4919165 - DNA, 25 bp, Homo sapien
gaagccccttgcacatgtcaggcat

SEQ ID NO: 4919166 - DNA, 25 bp, Homo sapien
tctctttgttcacacttccaagtgt

SEQ ID NO: 4919167 - DNA, 25 bp, Homo sapien
tctttgttcacacttccaagtgtca

SEQ ID NO: 4919168 - DNA, 25 bp, Homo sapien
ctctttgttcacacttccaagtgtc

SEQ ID NO: 4919169 - DNA, 25 bp, Homo sapien
ctttgttcacacttccaagtgtcat

SEQ ID NO: 4919170 - DNA, 25 bp, Homo sapien
ttggcagtagaaagtagaacttgcc

SEQ ID NO: 4919171 - DNA, 25 bp, Homo sapien
ccatgtgttcttgcataagccttac

SEQ ID NO: 4919172 - DNA, 25 bp, Homo sapien
tgctgcttaatggagcccatgtgtt

SEQ ID NO: 4919173 - DNA, 25 bp, Homo sapien
agaaagtagaacttgccccatgctg

SEQ ID NO: 4919174 - DNA, 25 bp, Homo sapien
ggctctactagttcaagagtactca

SEQ ID NO: 4919175 - DNA, 25 bp, Homo sapien
gaaatttagaaacatagtagtggct

SEQ ID NO: 4919176 - DNA, 25 bp, Homo sapien
agtcactctgacactgcctctaact

SEQ ID NO: 4919177 - DNA, 25 bp, Homo sapien
tggacccaacccataagatctcctg

SEQ ID NO: 4919178 - DNA, 25 bp, Homo sapien
ttctccccactggtgcaaagcaggg

SEQ ID NO: 4919179 - DNA, 25 bp, Homo sapien
tgatggttgctaaagtgccatgttc

SEQ ID NO: 4919180 - DNA, 25 bp, Homo sapien
tcaagtagccactctgatggttgct

SEQ ID NO: 4919181 - DNA, 25 bp, Homo sapien
catctttatctagactcaagtagcc

SEQ ID NO: 4919182 - DNA, 25 bp, Homo sapien
tctgaagggtctgacactgtgtcta

SEQ ID NO: 4919183 - DNA, 25 bp, Homo sapien
gcgctatgggaattttatcacaatg

SEQ ID NO: 4919184 - DNA, 25 bp, Homo sapien
agcgctatgggaattttatcacaat

SEQ ID NO: 4919185 - DNA, 25 bp, Homo sapien
ccagcgctatgggaattttatcaca

SEQ ID NO: 4919186 - DNA, 25 bp, Homo sapien
cagcgctatgggaattttatcacaa

SEQ ID NO: 4919187 - DNA, 25 bp, Homo sapien
ccaattctgtctatttcgcatatca

SEQ ID NO: 4919188 - DNA, 25 bp, Homo sapien
tatcaataggccacatatatcatgg

SEQ ID NO: 4919189 - DNA, 25 bp, Homo sapien
tgtctatttcgcatatcaataggcc

SEQ ID NO: 4919190 - DNA, 25 bp, Homo sapien
ttcgcatatcaataggccacatata

SEQ ID NO: 4919191 - DNA, 25 bp, Homo sapien
tggtcatccaagacggtggagtttc

SEQ ID NO: 4919192 - DNA, 25 bp, Homo sapien
caactatggtcatccaagacggtgg

SEQ ID NO: 4919193 - DNA, 25 bp, Homo sapien
catccaagacggtggagtttctgat

SEQ ID NO: 4919194 - DNA, 25 bp, Homo sapien
cagaatatcaactatggtcatccaa

SEQ ID NO: 4919195 - DNA, 25 bp, Homo sapien
tacatcagtcaaggttcaatcggaa

SEQ ID NO: 4919196 - DNA, 25 bp, Homo sapien
tttggtgataggtgctacatcagtc

SEQ ID NO: 4919197 - DNA, 25 bp, Homo sapien
taggtgctacatcagtcaaggttca

SEQ ID NO: 4919198 - DNA, 25 bp, Homo sapien
tcaaggttcaatcggaacagaagcc

SEQ ID NO: 4919199 - DNA, 25 bp, Homo sapien
ttgtgtctggttaactttgcccaca

SEQ ID NO: 4919200 - DNA, 25 bp, Homo sapien
tgtgtctggttaactttgcccacaa

SEQ ID NO: 4919201 - DNA, 25 bp, Homo sapien
ttttgtgtctggttaactttgccca

SEQ ID NO: 4919202 - DNA, 25 bp, Homo sapien
tttgtgtctggttaactttgcccac

SEQ ID NO: 4919203 - DNA, 25 bp, Homo sapien
ctatttctatgcacccgtcttccag

SEQ ID NO: 4919204 - DNA, 25 bp, Homo sapien
tccagcaacaagcttgaagcttgtt

SEQ ID NO: 4919205 - DNA, 25 bp, Homo sapien
gttgatagccttttcactatttcta

SEQ ID NO: 4919206 - DNA, 25 bp, Homo sapien
aagcttgaagcttgtttctggtaca

SEQ ID NO: 4919207 - DNA, 25 bp, Homo sapien
ctgacaatgtgaaagtggcatcttt

SEQ ID NO: 4919208 - DNA, 25 bp, Homo sapien
tctttgttatttctatgggcaattt

SEQ ID NO: 4919209 - DNA, 25 bp, Homo sapien
tttctatgggcaattttttctgatc

SEQ ID NO: 4919210 - DNA, 25 bp, Homo sapien
caatgtgaaagtggcatctttgtta

SEQ ID NO: 4919211 - DNA, 25 bp, Homo sapien
gctttagaactaatgtccaaatctt

SEQ ID NO: 4919212 - DNA, 25 bp, Homo sapien
ggacattcagacattgacttctgat

SEQ ID NO: 4919213 - DNA, 25 bp, Homo sapien
catctagtaaaaacttctctaagtc

SEQ ID NO: 4919214 - DNA, 25 bp, Homo sapien
tgaaaatgatcaggacattcagaca

SEQ ID NO: 4919215 - DNA, 25 bp, Homo sapien
accttgatttagacctgtgggtgct

SEQ ID NO: 4919216 - DNA, 25 bp, Homo sapien
ccaccttgatttagacctgtgggtg

SEQ ID NO: 4919217 - DNA, 25 bp, Homo sapien
acccccaccttgatttagacctgtg

SEQ ID NO: 4919218 - DNA, 25 bp, Homo sapien
ccccaccttgatttagacctgtggg

SEQ ID NO: 4919219 - DNA, 25 bp, Homo sapien
tgacatatagttgctccatgaagtc

SEQ ID NO: 4919220 - DNA, 25 bp, Homo sapien
tggttcagttccagataagctctgg

SEQ ID NO: 4919221 - DNA, 25 bp, Homo sapien
ggaggaatgagtccagagcagagtg

SEQ ID NO: 4919222 - DNA, 25 bp, Homo sapien
ccagagggtccacatgacatatagt

SEQ ID NO: 4919223 - DNA, 25 bp, Homo sapien
cattgttctgtaacttgtttatata

SEQ ID NO: 4919224 - DNA, 25 bp, Homo sapien
ctgtaacttgtttatataaagcttt

SEQ ID NO: 4919225 - DNA, 25 bp, Homo sapien
gttctgtaacttgtttatataaagc

SEQ ID NO: 4919226 - DNA, 25 bp, Homo sapien
tcattgttctgtaacttgtttatat

SEQ ID NO: 4919227 - DNA, 25 bp, Homo sapien
gacatagggaatgaaaataatctcc

SEQ ID NO: 4919228 - DNA, 25 bp, Homo sapien
tatggccaatgagtttagggtcttc

SEQ ID NO: 4919229 - DNA, 25 bp, Homo sapien
gaccctgaacaagtggaagaattaa

SEQ ID NO: 4919230 - DNA, 25 bp, Homo sapien
caataaccatggcaaattatggcca

SEQ ID NO: 4919231 - DNA, 25 bp, Homo sapien
attctttctgggctaatgtggacat

SEQ ID NO: 4919232 - DNA, 25 bp, Homo sapien
ctacattctttctgggctaatgtgg

SEQ ID NO: 4919233 - DNA, 25 bp, Homo sapien
tacattctttctgggctaatgtgga

SEQ ID NO: 4919234 - DNA, 25 bp, Homo sapien
gtttcgactacattctttctgggct

SEQ ID NO: 4919235 - DNA, 25 bp, Homo sapien
ctgagtgtgaccaactccatcttct

SEQ ID NO: 4919236 - DNA, 25 bp, Homo sapien
tttttccaagtcatggcagggatcc

SEQ ID NO: 4919237 - DNA, 25 bp, Homo sapien
cagggatcccagcagataaggtgga

SEQ ID NO: 4919238 - DNA, 25 bp, Homo sapien
ctcctctgagtgtgaccaactccat

SEQ ID NO: 4919239 - DNA, 25 bp, Homo sapien
tttccatgacacttgtttgtcggta

SEQ ID NO: 4919240 - DNA, 25 bp, Homo sapien
tgtcggtatcgatcctggccgtccg

SEQ ID NO: 4919241 - DNA, 25 bp, Homo sapien
tccacactgccttcaacaatgctct

SEQ ID NO: 4919242 - DNA, 25 bp, Homo sapien
gatcctggccgtccgaggcctttga

SEQ ID NO: 4919243 - DNA, 25 bp, Homo sapien
catcactgaaagtccccgaagcatt

SEQ ID NO: 4919244 - DNA, 25 bp, Homo sapien
tttagtgtattcgaagcctcagcag

SEQ ID NO: 4919245 - DNA, 25 bp, Homo sapien
tgcaattgcgccaacactcagtaca

SEQ ID NO: 4919246 - DNA, 25 bp, Homo sapien
taccttttctgaacagtggtgcaga

SEQ ID NO: 4919247 - DNA, 25 bp, Homo sapien
tctttcagccccaagaaatagctag

SEQ ID NO: 4919248 - DNA, 25 bp, Homo sapien
tttctacctgaatgaaaggatggct

SEQ ID NO: 4919249 - DNA, 25 bp, Homo sapien
ggaaagaggaccgtccagatgccct

SEQ ID NO: 4919250 - DNA, 25 bp, Homo sapien
ccccagaggcgccacttaaagtgaa

SEQ ID NO: 4919251 - DNA, 25 bp, Homo sapien
taagtacctggcaatgggtagagct

SEQ ID NO: 4919252 - DNA, 25 bp, Homo sapien
ggtagagctattaacctggtccagg

SEQ ID NO: 4919253 - DNA, 25 bp, Homo sapien
tattaacctggtccaggtgaacggc

SEQ ID NO: 4919254 - DNA, 25 bp, Homo sapien
taaactcttttggagcatctaagta

SEQ ID NO: 4919255 - DNA, 25 bp, Homo sapien
tttgctcaaaacctcctaatgggag

SEQ ID NO: 4919256 - DNA, 25 bp, Homo sapien
cctaatgggagaacaagggctggca

SEQ ID NO: 4919257 - DNA, 25 bp, Homo sapien
tggcagagtgatcacagaagaagtc

SEQ ID NO: 4919258 - DNA, 25 bp, Homo sapien
gcagagtgatcacagaagaagtcat

SEQ ID NO: 4919259 - DNA, 25 bp, Homo sapien
taagtggctacagctgttcacattc

SEQ ID NO: 4919260 - DNA, 25 bp, Homo sapien
cacattctgagtacttccaaggaag

SEQ ID NO: 4919261 - DNA, 25 bp, Homo sapien
tgaaaataccaggtctagggcccac

SEQ ID NO: 4919262 - DNA, 25 bp, Homo sapien
ggctatggcagctctattgatcaag

SEQ ID NO: 4919263 - DNA, 25 bp, Homo sapien
tagccatgcgtaatatagtcaagtg

SEQ ID NO: 4919264 - DNA, 25 bp, Homo sapien
tttactatgtagcttaactgcaggc

SEQ ID NO: 4919265 - DNA, 25 bp, Homo sapien
cgtctttagttgtggactggttcaa

SEQ ID NO: 4919266 - DNA, 25 bp, Homo sapien
tcttgcataagccagaattggcctg

SEQ ID NO: 4919267 - DNA, 25 bp, Homo sapien
aagctgaatgacaccccgtcttctg

SEQ ID NO: 4919268 - DNA, 25 bp, Homo sapien
tagttcacttaagaaaccagcatgc

SEQ ID NO: 4919269 - DNA, 25 bp, Homo sapien
tctgtggatccactttgaactcgtg

SEQ ID NO: 4919270 - DNA, 25 bp, Homo sapien
cattctggcccttgagggacaaagc

SEQ ID NO: 4919271 - DNA, 25 bp, Homo sapien
tgaaagaccgtgttggaggcctacc

SEQ ID NO: 4919272 - DNA, 25 bp, Homo sapien
tctcacacggagactggaattgcca

SEQ ID NO: 4919273 - DNA, 25 bp, Homo sapien
tactcactcgcctgacctgacattg

SEQ ID NO: 4919274 - DNA, 25 bp, Homo sapien
ctaccaggaatcttgttgagacggg

SEQ ID NO: 4919275 - DNA, 25 bp, Homo sapien
tctgtctgcccatcgcaagcttcct

SEQ ID NO: 4919276 - DNA, 25 bp, Homo sapien
taaggtcgagttctttatctggaga

SEQ ID NO: 4919277 - DNA, 25 bp, Homo sapien
tatctggagaagtaatatttgttgc

SEQ ID NO: 4919278 - DNA, 25 bp, Homo sapien
tataaacttataggcaacacttctg

SEQ ID NO: 4919279 - DNA, 25 bp, Homo sapien
ccaattcggaatgcactgacgtgat

SEQ ID NO: 4919280 - DNA, 25 bp, Homo sapien
tcagtgttgcatccaattcggaatg

SEQ ID NO: 4919281 - DNA, 25 bp, Homo sapien
aatgcactgacgtgatgttaccaga

SEQ ID NO: 4919282 - DNA, 25 bp, Homo sapien
gacgtgatgttaccagatttagcat

SEQ ID NO: 4919283 - DNA, 25 bp, Homo sapien
gcaatgtggtcttgtgtgggtcatt

SEQ ID NO: 4919284 - DNA, 25 bp, Homo sapien
tatctataagtctatgaggctgggc

SEQ ID NO: 4919285 - DNA, 25 bp, Homo sapien
tcatttaacatctctggtattttct

SEQ ID NO: 4919286 - DNA, 25 bp, Homo sapien
gctaaataatctgccagactgttcc

SEQ ID NO: 4919287 - DNA, 25 bp, Homo sapien
catcccactggttattctctaggag

SEQ ID NO: 4919288 - DNA, 25 bp, Homo sapien
atcatcccactggttattctctagg

SEQ ID NO: 4919289 - DNA, 25 bp, Homo sapien
tcccactggttattctctaggagca

SEQ ID NO: 4919290 - DNA, 25 bp, Homo sapien
cccactggttattctctaggagcat

SEQ ID NO: 4919291 - DNA, 25 bp, Homo sapien
tgtgctgtgtcattacgtggcagag

SEQ ID NO: 4919292 - DNA, 25 bp, Homo sapien
gctgtgtcattacgtggcagagaag

SEQ ID NO: 4919293 - DNA, 25 bp, Homo sapien
gtgtcattacgtggcagagaagcag

SEQ ID NO: 4919294 - DNA, 25 bp, Homo sapien
tgtgtcattacgtggcagagaagca

SEQ ID NO: 4919295 - DNA, 25 bp, Homo sapien
cattccacacctatatgcagagtct

SEQ ID NO: 4919296 - DNA, 25 bp, Homo sapien
tgcagagtcttggtttgccactgaa

SEQ ID NO: 4919297 - DNA, 25 bp, Homo sapien
cacattcagccaattggtcatgcca

SEQ ID NO: 4919298 - DNA, 25 bp, Homo sapien
tctctattgtcagtatgagctgctg

SEQ ID NO: 4919299 - DNA, 25 bp, Homo sapien
gtctcccagaaatgccaaataaaca

SEQ ID NO: 4919300 - DNA, 25 bp, Homo sapien
tgctgtggttcctcagaaaagggtc

SEQ ID NO: 4919301 - DNA, 25 bp, Homo sapien
gttcctcagaaaagggtctcccaga

SEQ ID NO: 4919302 - DNA, 25 bp, Homo sapien
cagaaatgccaaataaacagcttta

SEQ ID NO: 4919303 - DNA, 25 bp, Homo sapien
gaagcaaggatgcaaagccattcat

SEQ ID NO: 4919304 - DNA, 25 bp, Homo sapien
ccaggaggataaattggtttcttcg

SEQ ID NO: 4919305 - DNA, 25 bp, Homo sapien
gaaatagtaccaggaggataaattg

SEQ ID NO: 4919306 - DNA, 25 bp, Homo sapien
tggtttcttcgaagcaaggatgcaa

SEQ ID NO: 4919307 - DNA, 25 bp, Homo sapien
cagacttcagcggtaggacggctat

SEQ ID NO: 4919308 - DNA, 25 bp, Homo sapien
gcggtaggacggctatcaatatcca

SEQ ID NO: 4919309 - DNA, 25 bp, Homo sapien
acttcagcggtaggacggctatcaa

SEQ ID NO: 4919310 - DNA, 25 bp, Homo sapien
gacggctatcaatatccagacccag

SEQ ID NO: 4919311 - DNA, 25 bp, Homo sapien
gcaggctcaactgtctggacttaag

SEQ ID NO: 4919312 - DNA, 25 bp, Homo sapien
ggttacccatgggaatcacagtgtc

SEQ ID NO: 4919313 - DNA, 25 bp, Homo sapien
tgtggaggagtcatgatggttaccc

SEQ ID NO: 4919314 - DNA, 25 bp, Homo sapien
gctttgctctgccttgtggtttgat

SEQ ID NO: 4919315 - DNA, 25 bp, Homo sapien
ggtttgatcacagaccacatgtgtg

SEQ ID NO: 4919316 - DNA, 25 bp, Homo sapien
aacagtaacatgagcacattctccc

SEQ ID NO: 4919317 - DNA, 25 bp, Homo sapien
gagtgaagcatctcaaacagtaaca

SEQ ID NO: 4919318 - DNA, 25 bp, Homo sapien
cattctcccagggtaaggtggacat

SEQ ID NO: 4919319 - DNA, 25 bp, Homo sapien
aatgagatagagtgaagcatctcaa

SEQ ID NO: 4919320 - DNA, 25 bp, Homo sapien
ggccccatgcgtcccactttgccat

SEQ ID NO: 4919321 - DNA, 25 bp, Homo sapien
cccatgcgtcccactttgccatgct

SEQ ID NO: 4919322 - DNA, 25 bp, Homo sapien
atgcgtcccactttgccatgctttc

SEQ ID NO: 4919323 - DNA, 25 bp, Homo sapien
ctttcggccccatgcgtcccacttt

SEQ ID NO: 4919324 - DNA, 25 bp, Homo sapien
gccaatattgccctgatctcccata

SEQ ID NO: 4919325 - DNA, 25 bp, Homo sapien
aatattgccctgatctcccatatca

SEQ ID NO: 4919326 - DNA, 25 bp, Homo sapien
tcttgccaatattgccctgatctcc

SEQ ID NO: 4919327 - DNA, 25 bp, Homo sapien
cttcttcccaatgggcccagtcttg

SEQ ID NO: 4919328 - DNA, 25 bp, Homo sapien
agagaattagttatacggcccaagg

SEQ ID NO: 4919329 - DNA, 25 bp, Homo sapien
aggttctgccaagcctcaccgttca

SEQ ID NO: 4919330 - DNA, 25 bp, Homo sapien
aatggagttggtattaaggttctgc

SEQ ID NO: 4919331 - DNA, 25 bp, Homo sapien
cctcacaggaatgtggtgtggtcag

SEQ ID NO: 4919332 - DNA, 25 bp, Homo sapien
gcctttttctccaggtattccaagc

SEQ ID NO: 4919333 - DNA, 25 bp, Homo sapien
ctccaggtattccaagcaaaccttt

SEQ ID NO: 4919334 - DNA, 25 bp, Homo sapien
ctttttctccaggtattccaagcaa

SEQ ID NO: 4919335 - DNA, 25 bp, Homo sapien
tttctccaggtattccaagcaaacc

SEQ ID NO: 4919336 - DNA, 25 bp, Homo sapien
cagaagaattaggctgcttcctgat

SEQ ID NO: 4919337 - DNA, 25 bp, Homo sapien
gggatgaaacgtgtcatcatccctg

SEQ ID NO: 4919338 - DNA, 25 bp, Homo sapien
agcatggcagggatgaaacgtgtca

SEQ ID NO: 4919339 - DNA, 25 bp, Homo sapien
ctgggctttcttctcatagtaagca

SEQ ID NO: 4919340 - DNA, 25 bp, Homo sapien
cagttgtccaacaaatttccggtat

SEQ ID NO: 4919341 - DNA, 25 bp, Homo sapien
tgagccgagcaatactaatatccag

SEQ ID NO: 4919342 - DNA, 25 bp, Homo sapien
aaatttccggtatcttccacaatca

SEQ ID NO: 4919343 - DNA, 25 bp, Homo sapien
ttcatagatgtcttgagccgagcaa

SEQ ID NO: 4919344 - DNA, 25 bp, Homo sapien
tcctgcagtgggttagggattccct

SEQ ID NO: 4919345 - DNA, 25 bp, Homo sapien
caatgaacacccgaaagaagccact

SEQ ID NO: 4919346 - DNA, 25 bp, Homo sapien
tcttggcaacatagtcagcgatgag

SEQ ID NO: 4919347 - DNA, 25 bp, Homo sapien
catccttgggcatggctagcattcc

SEQ ID NO: 4919348 - DNA, 25 bp, Homo sapien
cagaaagcccttgtacatgtctggc

SEQ ID NO: 4919349 - DNA, 25 bp, Homo sapien
gaacttccaagtatagccatggcca

SEQ ID NO: 4919350 - DNA, 25 bp, Homo sapien
tatgtctgtgccaacaaggagaact

SEQ ID NO: 4919351 - DNA, 25 bp, Homo sapien
tcaagacccatgtaacctggcgagt

SEQ ID NO: 4919352 - DNA, 25 bp, Homo sapien
tgtgctcagtgcactagggtcccca

SEQ ID NO: 4919353 - DNA, 25 bp, Homo sapien
cctgtaggatctgagtttatggccc

SEQ ID NO: 4919354 - DNA, 25 bp, Homo sapien
tttaggtaagtcatctgcctggccc

SEQ ID NO: 4919355 - DNA, 25 bp, Homo sapien
tatctcataaccagttagtcacggg

SEQ ID NO: 4919356 - DNA, 25 bp, Homo sapien
ctatcactaaatagtttattgagag

SEQ ID NO: 4919357 - DNA, 25 bp, Homo sapien
tcatggtggataggctttctgatgc

SEQ ID NO: 4919358 - DNA, 25 bp, Homo sapien
tgtattgaggatattcacttcaatg

SEQ ID NO: 4919359 - DNA, 25 bp, Homo sapien
ggctttctgatgctggattcggttt

SEQ ID NO: 4919360 - DNA, 25 bp, Homo sapien
tatgtacaatatctgtggccagtgg

SEQ ID NO: 4919361 - DNA, 25 bp, Homo sapien
tatgaaggccttacaaccccaagga

SEQ ID NO: 4919362 - DNA, 25 bp, Homo sapien
catgactatgtattagggaaacagc

SEQ ID NO: 4919363 - DNA, 25 bp, Homo sapien
aatcccacgtgaaaggacatgtcag

SEQ ID NO: 4919364 - DNA, 25 bp, Homo sapien
taggcatcatgcatttgagctccga

SEQ ID NO: 4919365 - DNA, 25 bp, Homo sapien
tctaattgttcaccgtgtaggcatc

SEQ ID NO: 4919366 - DNA, 25 bp, Homo sapien
gggttgaaccctgtctaccatgcac

SEQ ID NO: 4919367 - DNA, 25 bp, Homo sapien
tgacttcattctcccactggcactg

SEQ ID NO: 4919368 - DNA, 25 bp, Homo sapien
tatgagtacccttcctaagcctagc

SEQ ID NO: 4919369 - DNA, 25 bp, Homo sapien
caggaaatagccatgtgaagttgtc

SEQ ID NO: 4919370 - DNA, 25 bp, Homo sapien
tcatctactagggaacggtcaacca

SEQ ID NO: 4919371 - DNA, 25 bp, Homo sapien
gtttacatccctgaaaatggactga

SEQ ID NO: 4919372 - DNA, 25 bp, Homo sapien
tttcaaccagatccccatggaacac

SEQ ID NO: 4919373 - DNA, 25 bp, Homo sapien
ttttaggagctttatcatgtttgac

SEQ ID NO: 4919374 - DNA, 25 bp, Homo sapien
tcatgtttgactttaagtgttttca

SEQ ID NO: 4919375 - DNA, 25 bp, Homo sapien
cccatggaacactctatctctatta

SEQ ID NO: 4919376 - DNA, 25 bp, Homo sapien
gacagctccgataagaagctgaagg

SEQ ID NO: 4919377 - DNA, 25 bp, Homo sapien
cagctccgataagaagctgaaggct

SEQ ID NO: 4919378 - DNA, 25 bp, Homo sapien
caccagtgacagctccgataagaag

SEQ ID NO: 4919379 - DNA, 25 bp, Homo sapien
agtgacagctccgataagaagctga

SEQ ID NO: 4919380 - DNA, 25 bp, Homo sapien
ttaaaatggactgagcatgcagtag

SEQ ID NO: 4919381 - DNA, 25 bp, Homo sapien
agcatgcagtagaggaggtgctgac

SEQ ID NO: 4919382 - DNA, 25 bp, Homo sapien
aatggactgagcatgcagtagagga

SEQ ID NO: 4919383 - DNA, 25 bp, Homo sapien
gagcatgcagtagaggaggtgctga

SEQ ID NO: 4919384 - DNA, 25 bp, Homo sapien
taaagggtaatggatagatccgcca

SEQ ID NO: 4919385 - DNA, 25 bp, Homo sapien
aaagggtaatggatagatccgccat

SEQ ID NO: 4919386 - DNA, 25 bp, Homo sapien
cacttcccgaaatctttgtgcattt

SEQ ID NO: 4919387 - DNA, 25 bp, Homo sapien
gtgcattttttaggacgcacagttg

SEQ ID NO: 4919388 - DNA, 25 bp, Homo sapien
accacttcccgaaatctttgtgcat

SEQ ID NO: 4919389 - DNA, 25 bp, Homo sapien
cagttgctcactgcttacaccaagg

SEQ ID NO: 4919390 - DNA, 25 bp, Homo sapien
ggccgtttgccatgtaggaaaacaa

SEQ ID NO: 4919391 - DNA, 25 bp, Homo sapien
gcttcatgctgagaaaacgtcctct

SEQ ID NO: 4919392 - DNA, 25 bp, Homo sapien
caacccggtgccattacagaggaga

SEQ ID NO: 4919393 - DNA, 25 bp, Homo sapien
tcttggtggaactacagggctggaa

SEQ ID NO: 4919394 - DNA, 25 bp, Homo sapien
ggaagccgagacaggcagatcatga

SEQ ID NO: 4919395 - DNA, 25 bp, Homo sapien
aaatacaaaaaattagccaggcatg

SEQ ID NO: 4919396 - DNA, 25 bp, Homo sapien
ggtcaagagatcgagaccatcctgg

SEQ ID NO: 4919397 - DNA, 25 bp, Homo sapien
ctaacacagtgaaactccgtctcta

SEQ ID NO: 4919398 - DNA, 25 bp, Homo sapien
tggtggtggtgaggaaacttgatgt

SEQ ID NO: 4919399 - DNA, 25 bp, Homo sapien
ggtggtggtgaggaaacttgatgtt

SEQ ID NO: 4919400 - DNA, 25 bp, Homo sapien
cttgatgttccaggatagcacagag

SEQ ID NO: 4919401 - DNA, 25 bp, Homo sapien
gaaacttgatgttccaggatagcac

SEQ ID NO: 4919402 - DNA, 25 bp, Homo sapien
caatgccatgagaaagcgtttaaca

SEQ ID NO: 4919403 - DNA, 25 bp, Homo sapien
aaagcgtttaacatggactatagtc

SEQ ID NO: 4919404 - DNA, 25 bp, Homo sapien
catggactatagtcagcaggacagc

SEQ ID NO: 4919405 - DNA, 25 bp, Homo sapien
catacaatgccatgagaaagcgttt

SEQ ID NO: 4919406 - DNA, 25 bp, Homo sapien
catctcttgccaattcatacttgga

SEQ ID NO: 4919407 - DNA, 25 bp, Homo sapien
catgtactgtatgtgtagccatctc

SEQ ID NO: 4919408 - DNA, 25 bp, Homo sapien
agtggcatttgacatggacccaaga

SEQ ID NO: 4919409 - DNA, 25 bp, Homo sapien
caattcatacttggaatgcagtggc

SEQ ID NO: 4919410 - DNA, 25 bp, Homo sapien
agttccactgctagaagccattttt

SEQ ID NO: 4919411 - DNA, 25 bp, Homo sapien
tcacgtgtatgaggaagttccactg

SEQ ID NO: 4919412 - DNA, 25 bp, Homo sapien
ggaagttccactgctagaagccatt

SEQ ID NO: 4919413 - DNA, 25 bp, Homo sapien
tatgaggaagttccactgctagaag

SEQ ID NO: 4919414 - DNA, 25 bp, Homo sapien
cacctcctgcagttctctaatcaga

SEQ ID NO: 4919415 - DNA, 25 bp, Homo sapien
tgaacccaattttcacctcctgcag

SEQ ID NO: 4919416 - DNA, 25 bp, Homo sapien
aattttcacctcctgcagttctcta

SEQ ID NO: 4919417 - DNA, 25 bp, Homo sapien
cctgcagttctctaatcagaaacag

SEQ ID NO: 4919418 - DNA, 25 bp, Homo sapien
gaaactcggcaagctgtgtgaacac

SEQ ID NO: 4919419 - DNA, 25 bp, Homo sapien
gacccagccctgtttatgatgtagt

SEQ ID NO: 4919420 - DNA, 25 bp, Homo sapien
gacacccaagcgcaaagtaacatga

SEQ ID NO: 4919421 - DNA, 25 bp, Homo sapien
tgaaagaccttgataacagagaccc

SEQ ID NO: 4919422 - DNA, 25 bp, Homo sapien
tcctgctccgctggccagcgccagc

SEQ ID NO: 4919423 - DNA, 25 bp, Homo sapien
cgctccgcgggcgtctccatgcgca

SEQ ID NO: 4919424 - DNA, 25 bp, Homo sapien
ccgcgggcgtctccatgcgcacccc

SEQ ID NO: 4919425 - DNA, 25 bp, Homo sapien
ctccgcgggcgtctccatgcgcacc

SEQ ID NO: 4919426 - DNA, 25 bp, Homo sapien
tgggcccaggtgagcgccgctccgc

SEQ ID NO: 4919427 - DNA, 25 bp, Homo sapien
gtgggcccaggtgagcgccgctccg

SEQ ID NO: 4919428 - DNA, 25 bp, Homo sapien
gggcccaggtgagcgccgctccgcc

SEQ ID NO: 4919429 - DNA, 25 bp, Homo sapien
cgctgccgctgctgcgtctccgcgc

SEQ ID NO: 4919430 - DNA, 25 bp, Homo sapien
gctgccgctgctgcgtctccgcgcg

SEQ ID NO: 4919431 - DNA, 25 bp, Homo sapien
ccaggcagacgaaggcgcccgagta

SEQ ID NO: 4919432 - DNA, 25 bp, Homo sapien
gggactgacgctccgccggccgaca

SEQ ID NO: 4919433 - DNA, 25 bp, Homo sapien
cgcccgagtaggtccgcaggatgtc

SEQ ID NO: 4919434 - DNA, 25 bp, Homo sapien
gggcggcgggactgacgctccgccg

SEQ ID NO: 4919435 - DNA, 25 bp, Homo sapien
ttttgaccagggtaaatcttgtgcc

SEQ ID NO: 4919436 - DNA, 25 bp, Homo sapien
atctgtcctctaaccatgctgactt

SEQ ID NO: 4919437 - DNA, 25 bp, Homo sapien
cccaaatttgcccacatgacctatt

SEQ ID NO: 4919438 - DNA, 25 bp, Homo sapien
tcttgccagttgaattcatgacacc

SEQ ID NO: 4919439 - DNA, 25 bp, Homo sapien
tagatatccaaattactccacaagt

SEQ ID NO: 4919440 - DNA, 25 bp, Homo sapien
gatatccaaattactccacaagtca

SEQ ID NO: 4919441 - DNA, 25 bp, Homo sapien
tctagatatccaaattactccacaa

SEQ ID NO: 4919442 - DNA, 25 bp, Homo sapien
agatatccaaattactccacaagtc

SEQ ID NO: 4919443 - DNA, 25 bp, Homo sapien
caaatggtaaacaggttacacttgg

SEQ ID NO: 4919444 - DNA, 25 bp, Homo sapien
ctgggaatcaaatggtaaacaggtt

SEQ ID NO: 4919445 - DNA, 25 bp, Homo sapien
cttggtttctgtcaccacagaactc

SEQ ID NO: 4919446 - DNA, 25 bp, Homo sapien
tggtttctgtcaccacagaactcac

SEQ ID NO: 4919447 - DNA, 25 bp, Homo sapien
aaagaaaaacgctgtcacggacaca

SEQ ID NO: 4919448 - DNA, 25 bp, Homo sapien
gacccatccttgtagtagaggtaga

SEQ ID NO: 4919449 - DNA, 25 bp, Homo sapien
ggaagttccagttagcatcaatttg

SEQ ID NO: 4919450 - DNA, 25 bp, Homo sapien
gaggcaaccaaaatccagacaagac

SEQ ID NO: 4919451 - DNA, 25 bp, Homo sapien
catgtgaagcataacactattacag

SEQ ID NO: 4919452 - DNA, 25 bp, Homo sapien
tatgttgctgacattcatgtgaagc

SEQ ID NO: 4919453 - DNA, 25 bp, Homo sapien
tataagaactcgtttattaggcttc

SEQ ID NO: 4919454 - DNA, 25 bp, Homo sapien
gctcccacatatcaggtaccttatg

SEQ ID NO: 4919455 - DNA, 25 bp, Homo sapien
aggagaggtgctctgtgttttagag

SEQ ID NO: 4919456 - DNA, 25 bp, Homo sapien
gaggtgctctgtgttttagagtttc

SEQ ID NO: 4919457 - DNA, 25 bp, Homo sapien
ctcgcttcatttcatcttctattgc

SEQ ID NO: 4919458 - DNA, 25 bp, Homo sapien
ggtgctctgtgttttagagtttcca

SEQ ID NO: 4919459 - DNA, 25 bp, Homo sapien
tactggttatcactcaggagtggct

SEQ ID NO: 4919460 - DNA, 25 bp, Homo sapien
cccggttatggttgtattgcaatgc

SEQ ID NO: 4919461 - DNA, 25 bp, Homo sapien
aatgcaaatcatgcagggatgtggc

SEQ ID NO: 4919462 - DNA, 25 bp, Homo sapien
tgaggctgctacgtttatgttatac

SEQ ID NO: 4919463 - DNA, 25 bp, Homo sapien
ccatcttcgtaaagccagacccaaa

SEQ ID NO: 4919464 - DNA, 25 bp, Homo sapien
ggtcgccatcttcgtaaagccagac

SEQ ID NO: 4919465 - DNA, 25 bp, Homo sapien
cgccatcttcgtaaagccagaccca

SEQ ID NO: 4919466 - DNA, 25 bp, Homo sapien
gtcgccatcttcgtaaagccagacc

SEQ ID NO: 4919467 - DNA, 25 bp, Homo sapien
aaatggtatccaaattgatcagaca

SEQ ID NO: 4919468 - DNA, 25 bp, Homo sapien
gtgaaactaacatacgactgccagt

SEQ ID NO: 4919469 - DNA, 25 bp, Homo sapien
catacgactgccagtttctaaggag

SEQ ID NO: 4919470 - DNA, 25 bp, Homo sapien
catataaagtagacaagtgaaacta

SEQ ID NO: 4919471 - DNA, 25 bp, Homo sapien
catcagtagctagataccagttcca

SEQ ID NO: 4919472 - DNA, 25 bp, Homo sapien
cagagactgtatggaccgtgaagca

SEQ ID NO: 4919473 - DNA, 25 bp, Homo sapien
caaaagccctcgtgtggtgggaact

SEQ ID NO: 4919474 - DNA, 25 bp, Homo sapien
cataagcctgctatacctgggaaac

SEQ ID NO: 4919475 - DNA, 25 bp, Homo sapien
gaaaaggctgactcaatgtaaggta

SEQ ID NO: 4919476 - DNA, 25 bp, Homo sapien
tcatgacagtgatccagagttccag

SEQ ID NO: 4919477 - DNA, 25 bp, Homo sapien
taaggtaatacagcagaccaaagcc

SEQ ID NO: 4919478 - DNA, 25 bp, Homo sapien
tagtccatgctcaagatcgaatggc

SEQ ID NO: 4919479 - DNA, 25 bp, Homo sapien
gaggcccactgaggagtagctccca

SEQ ID NO: 4919480 - DNA, 25 bp, Homo sapien
tgtactgggactggcataattctcc

SEQ ID NO: 4919481 - DNA, 25 bp, Homo sapien
aaaggcctgaatcatcatattggcc

SEQ ID NO: 4919482 - DNA, 25 bp, Homo sapien
attggccacatctgacgttgacaga

SEQ ID NO: 4919483 - DNA, 25 bp, Homo sapien
taatctgaagaccacctggatataa

SEQ ID NO: 4919484 - DNA, 25 bp, Homo sapien
catcagaaacagtttactacatgga

SEQ ID NO: 4919485 - DNA, 25 bp, Homo sapien
gcactaaacgtattgttccctctgt

SEQ ID NO: 4919486 - DNA, 25 bp, Homo sapien
tacatggatcaaacagcactaaacg

SEQ ID NO: 4919487 - DNA, 25 bp, Homo sapien
cagaaacagtttactacatggatca

SEQ ID NO: 4919488 - DNA, 25 bp, Homo sapien
agaaaacggaagcaggcccaggtgc

SEQ ID NO: 4919489 - DNA, 25 bp, Homo sapien
tcatggaaaagaaaacggaagcagg

SEQ ID NO: 4919490 - DNA, 25 bp, Homo sapien
caggtgcagggcagaaaagggagcc

SEQ ID NO: 4919491 - DNA, 25 bp, Homo sapien
cagggcagaaaagggagccagcaga

SEQ ID NO: 4919492 - DNA, 25 bp, Homo sapien
gatttacatgttctcagatgactgg

SEQ ID NO: 4919493 - DNA, 25 bp, Homo sapien
cagaaggccagttagctgtgctcaa

SEQ ID NO: 4919494 - DNA, 25 bp, Homo sapien
tatcaggtgcaacaacctattgtgt

SEQ ID NO: 4919495 - DNA, 25 bp, Homo sapien
gaaatgtagactaaacagaaggcca

SEQ ID NO: 4919496 - DNA, 25 bp, Homo sapien
actggatttgcaggtgtttggcttc

SEQ ID NO: 4919497 - DNA, 25 bp, Homo sapien
gatgatgtgaaactagctcccctga

SEQ ID NO: 4919498 - DNA, 25 bp, Homo sapien
tctgaatttactggatttgcaggtg

SEQ ID NO: 4919499 - DNA, 25 bp, Homo sapien
ctcccctgagtgtagtttgtctgaa

SEQ ID NO: 4919500 - DNA, 25 bp, Homo sapien
gaatataaatcaggatgtatgcagc

SEQ ID NO: 4919501 - DNA, 25 bp, Homo sapien
aagaaatggcctagaattgtcttgg

SEQ ID NO: 4919502 - DNA, 25 bp, Homo sapien
taactctcatcgaatataaatcagg

SEQ ID NO: 4919503 - DNA, 25 bp, Homo sapien
aaagaaatggcctagaattgtcttg

SEQ ID NO: 4919504 - DNA, 25 bp, Homo sapien
ttctccttatctccaagggtcagtg

SEQ ID NO: 4919505 - DNA, 25 bp, Homo sapien
attctccttatctccaagggtcagt

SEQ ID NO: 4919506 - DNA, 25 bp, Homo sapien
tcacctagagagataataattccac

SEQ ID NO: 4919507 - DNA, 25 bp, Homo sapien
ttttccaaatcacctagagagataa

SEQ ID NO: 4919508 - DNA, 25 bp, Homo sapien
taattccacacgcattctcaatggt

SEQ ID NO: 4919509 - DNA, 25 bp, Homo sapien
gcattctcaatggtgccacaggaca

SEQ ID NO: 4919510 - DNA, 25 bp, Homo sapien
tgttcccaatagactgcttgctagc

SEQ ID NO: 4919511 - DNA, 25 bp, Homo sapien
tagactgcttgctagcaaggtaaca

SEQ ID NO: 4919512 - DNA, 25 bp, Homo sapien
aaatgttcccaatagactgcttgct

SEQ ID NO: 4919513 - DNA, 25 bp, Homo sapien
ccaatagactgcttgctagcaaggt

SEQ ID NO: 4919514 - DNA, 25 bp, Homo sapien
cccagtggcctgatggccatgacct

SEQ ID NO: 4919515 - DNA, 25 bp, Homo sapien
cagtggcctgatggccatgaccttt

SEQ ID NO: 4919516 - DNA, 25 bp, Homo sapien
tgcccagtggcctgatggccatgac

SEQ ID NO: 4919517 - DNA, 25 bp, Homo sapien
gccagttggatccttcctcagttcc

SEQ ID NO: 4919518 - DNA, 25 bp, Homo sapien
accgggcatccgctttcaagaaatg

SEQ ID NO: 4919519 - DNA, 25 bp, Homo sapien
tctcaccgggcatccgctttcaaga

SEQ ID NO: 4919520 - DNA, 25 bp, Homo sapien
tccgctttcaagaaatgattgctgg

SEQ ID NO: 4919521 - DNA, 25 bp, Homo sapien
atcaaatccttctctcaccgggcat

SEQ ID NO: 4919522 - DNA, 25 bp, Homo sapien
tctaagtgggttcagttcaaccacc

SEQ ID NO: 4919523 - DNA, 25 bp, Homo sapien
tttctaagtgggttcagttcaacca

SEQ ID NO: 4919524 - DNA, 25 bp, Homo sapien
ttctaagtgggttcagttcaaccac

SEQ ID NO: 4919525 - DNA, 25 bp, Homo sapien
cctcctggaagttgcttcgccttct

SEQ ID NO: 4919526 - DNA, 25 bp, Homo sapien
cccttacgggatgcctgcagtttgg

SEQ ID NO: 4919527 - DNA, 25 bp, Homo sapien
tgaccgttccaaccagggctgcaag

SEQ ID NO: 4919528 - DNA, 25 bp, Homo sapien
ttcgccttctcccaggacgaagaca

SEQ ID NO: 4919529 - DNA, 25 bp, Homo sapien
gctgctctccttagggcgcggcgcc

SEQ ID NO: 4919530 - DNA, 25 bp, Homo sapien
tgcctgtgtgtggcgactggctttt

SEQ ID NO: 4919531 - DNA, 25 bp, Homo sapien
gcctgtgtgtggcgactggcttttc

SEQ ID NO: 4919532 - DNA, 25 bp, Homo sapien
ctgggtggagttccgaggccaggac

SEQ ID NO: 4919533 - DNA, 25 bp, Homo sapien
tcgctgtagattggcactgctcgcc

SEQ ID NO: 4919534 - DNA, 25 bp, Homo sapien
ccagcacaggttttatagcgcgctc

SEQ ID NO: 4919535 - DNA, 25 bp, Homo sapien
ttaccaaacgagactttcttcgctg

SEQ ID NO: 4919536 - DNA, 25 bp, Homo sapien
ccgatcacgcccagcacaggtttta

SEQ ID NO: 4919537 - DNA, 25 bp, Homo sapien
tttcggagacaaaagctcgtgctct

SEQ ID NO: 4919538 - DNA, 25 bp, Homo sapien
aaaggcactgctttcggagacaaaa

SEQ ID NO: 4919539 - DNA, 25 bp, Homo sapien
cactgctttcggagacaaaagctcg

SEQ ID NO: 4919540 - DNA, 25 bp, Homo sapien
aaaagctcgtgctctgcacactctg

SEQ ID NO: 4919541 - DNA, 25 bp, Homo sapien
tcggcggcgtcgcagggcaccggcc

SEQ ID NO: 4919542 - DNA, 25 bp, Homo sapien
agcagccgtccagcaccgcgcgcac

SEQ ID NO: 4919543 - DNA, 25 bp, Homo sapien
gagcagccgtccagcaccgcgcgca

SEQ ID NO: 4919544 - DNA, 25 bp, Homo sapien
gcgtcgcagggcaccggcccgggca

SEQ ID NO: 4919545 - DNA, 25 bp, Homo sapien
ggtccgcgctgcgatcacagtagag

SEQ ID NO: 4919546 - DNA, 25 bp, Homo sapien
gaggccactgctctcgtcgcatggc

SEQ ID NO: 4919547 - DNA, 25 bp, Homo sapien
tgcgatcacagtagaggccactgct

SEQ ID NO: 4919548 - DNA, 25 bp, Homo sapien
tgctctcgtcgcatggctccagatc

SEQ ID NO: 4919549 - DNA, 25 bp, Homo sapien
gatgaccccatcgaacacacagtta

SEQ ID NO: 4919550 - DNA, 25 bp, Homo sapien
tctccactgcggtagatgaccccat

SEQ ID NO: 4919551 - DNA, 25 bp, Homo sapien
cactggaatttgcagcttggctgaa

SEQ ID NO: 4919552 - DNA, 25 bp, Homo sapien
gcagttaggctcaggcagtagcaca

SEQ ID NO: 4919553 - DNA, 25 bp, Homo sapien
tgctctggctcttgttcacagggcc

SEQ ID NO: 4919554 - DNA, 25 bp, Homo sapien
agagacttctactcctagggtggct

SEQ ID NO: 4919555 - DNA, 25 bp, Homo sapien
gcaccatgcagagccgagtctgttt

SEQ ID NO: 4919556 - DNA, 25 bp, Homo sapien
tcctattggtgacccgggtggagaa

SEQ ID NO: 4919557 - DNA, 25 bp, Homo sapien
caggatgggaggtttcctccaggct

SEQ ID NO: 4919558 - DNA, 25 bp, Homo sapien
cttcaggatgggaggtttcctccag

SEQ ID NO: 4919559 - DNA, 25 bp, Homo sapien
tcaggatgggaggtttcctccaggc

SEQ ID NO: 4919560 - DNA, 25 bp, Homo sapien
ggatgggaggtttcctccaggctcc

SEQ ID NO: 4919561 - DNA, 25 bp, Homo sapien
cattcatagaaagaacaattgccca

SEQ ID NO: 4919562 - DNA, 25 bp, Homo sapien
gaggcccaatgttgataattcagca

SEQ ID NO: 4919563 - DNA, 25 bp, Homo sapien
ctcaaagacctaaagggatcagaaa

SEQ ID NO: 4919564 - DNA, 25 bp, Homo sapien
tctattacgtgatgaacccaggaaa

SEQ ID NO: 4919565 - DNA, 25 bp, Homo sapien
ggtgcaggtcccaatgaccatcact

SEQ ID NO: 4919566 - DNA, 25 bp, Homo sapien
cactgaaactctgcctggatggttt

SEQ ID NO: 4919567 - DNA, 25 bp, Homo sapien
acagaacctgggcttgtaggtgtgc

SEQ ID NO: 4919568 - DNA, 25 bp, Homo sapien
ttcttggtgcggagacacttttttc

SEQ ID NO: 4919569 - DNA, 25 bp, Homo sapien
gtggcgcagcagctacaggtgctct

SEQ ID NO: 4919570 - DNA, 25 bp, Homo sapien
tctgagggctatgagggaccagtca

SEQ ID NO: 4919571 - DNA, 25 bp, Homo sapien
catcagttagatgagagaatccctg

SEQ ID NO: 4919572 - DNA, 25 bp, Homo sapien
gagaaagtttatgacaccagtccac

SEQ ID NO: 4919573 - DNA, 25 bp, Homo sapien
caacaatgttcaacttttatgcacc

SEQ ID NO: 4919574 - DNA, 25 bp, Homo sapien
acaatgttcaacttttatgcaccaa

SEQ ID NO: 4919575 - DNA, 25 bp, Homo sapien
aatgttcaacttttatgcaccaaag

SEQ ID NO: 4919576 - DNA, 25 bp, Homo sapien
taaacaacaatgttcaacttttatg

SEQ ID NO: 4919577 - DNA, 25 bp, Homo sapien
tctggaatttgggaggcaccaacca

SEQ ID NO: 4919578 - DNA, 25 bp, Homo sapien
gggccagaaatgcttcagactcagc

SEQ ID NO: 4919579 - DNA, 25 bp, Homo sapien
ctggaatttgggaggcaccaaccat

SEQ ID NO: 4919580 - DNA, 25 bp, Homo sapien
ggaggggccagaaatgcttcagact

SEQ ID NO: 4919581 - DNA, 25 bp, Homo sapien
tgatgaaggcagttgtgatggttta

SEQ ID NO: 4919582 - DNA, 25 bp, Homo sapien
gcttgatgaaggcagttgtgatggt

SEQ ID NO: 4919583 - DNA, 25 bp, Homo sapien
ttaaggacgatcccaaagatgattt

SEQ ID NO: 4919584 - DNA, 25 bp, Homo sapien
aaggacgatcccaaagatgattttc

SEQ ID NO: 4919585 - DNA, 25 bp, Homo sapien
ttacatggtagaaggatggagatga

SEQ ID NO: 4919586 - DNA, 25 bp, Homo sapien
ggtccagagcaactgtcttgtacat

SEQ ID NO: 4919587 - DNA, 25 bp, Homo sapien
gggtgctaatcagtaccagtcagga

SEQ ID NO: 4919588 - DNA, 25 bp, Homo sapien
catataattgggtctcgtccactgg

SEQ ID NO: 4919589 - DNA, 25 bp, Homo sapien
gaaactctgataataagggcataca

SEQ ID NO: 4919590 - DNA, 25 bp, Homo sapien
cactggctgagggaatgttctacac

SEQ ID NO: 4919591 - DNA, 25 bp, Homo sapien
acagcctgtgctggcacaaccggat

SEQ ID NO: 4919592 - DNA, 25 bp, Homo sapien
cacaaccggatcaagcacaaaggca

SEQ ID NO: 4919593 - DNA, 25 bp, Homo sapien
ctgccgccagtgtgacaagtctttt

SEQ ID NO: 4919594 - DNA, 25 bp, Homo sapien
cctgccgccagtgtgacaagtcttt

SEQ ID NO: 4919595 - DNA, 25 bp, Homo sapien
ttgaagaactaagcgccaggacacc

SEQ ID NO: 4919596 - DNA, 25 bp, Homo sapien
tttgaagaactaagcgccaggacac

SEQ ID NO: 4919597 - DNA, 25 bp, Homo sapien
ggtttgaagaactaagcgccaggac

SEQ ID NO: 4919598 - DNA, 25 bp, Homo sapien
cgggtttgaagaactaagcgccagg

SEQ ID NO: 4919599 - DNA, 25 bp, Homo sapien
gcaaatcaagaaacagctgtatcat

SEQ ID NO: 4919600 - DNA, 25 bp, Homo sapien
catggaataagtggcccatggccat

SEQ ID NO: 4919601 - DNA, 25 bp, Homo sapien
tcctttccaattccgcagcagctat

SEQ ID NO: 4919602 - DNA, 25 bp, Homo sapien
tatcatagacttggactgatcatgg

SEQ ID NO: 4919603 - DNA, 25 bp, Homo sapien
tctaaactaggcacagtttgatgaa

SEQ ID NO: 4919604 - DNA, 25 bp, Homo sapien
tgctgttccaatttcagacgttttg

SEQ ID NO: 4919605 - DNA, 25 bp, Homo sapien
ttggtgggttgctgttccaatttca

SEQ ID NO: 4919606 - DNA, 25 bp, Homo sapien
taggcacagtttgatgaaagatttg

SEQ ID NO: 4919607 - DNA, 25 bp, Homo sapien
cgtatgttcttgtacattctacaca

SEQ ID NO: 4919608 - DNA, 25 bp, Homo sapien
tatttggcagttgaggcatgtttaa

SEQ ID NO: 4919609 - DNA, 25 bp, Homo sapien
gagaacacttctactgccccaaata

SEQ ID NO: 4919610 - DNA, 25 bp, Homo sapien
taaatagtctatttagaggagatac

SEQ ID NO: 4919611 - DNA, 25 bp, Homo sapien
agatattaagcccttgggaagtggc

SEQ ID NO: 4919612 - DNA, 25 bp, Homo sapien
gttcctaggagccttgtggaatgga

SEQ ID NO: 4919613 - DNA, 25 bp, Homo sapien
tttcaataagaagttcaggctgatc

SEQ ID NO: 4919614 - DNA, 25 bp, Homo sapien
tatgtaagggttggcagaaccacat

SEQ ID NO: 4919615 - DNA, 25 bp, Homo sapien
ctctcccaggctgatgaaattcacc

SEQ ID NO: 4919616 - DNA, 25 bp, Homo sapien
tcccaggctgatgaaattcaccagc

SEQ ID NO: 4919617 - DNA, 25 bp, Homo sapien
gagtgctctgtacgttctcctgccc

SEQ ID NO: 4919618 - DNA, 25 bp, Homo sapien
agactgaagagtgctctgtacgttc

SEQ ID NO: 4919619 - DNA, 25 bp, Homo sapien
tcgaagacccaatctagagcctggc

SEQ ID NO: 4919620 - DNA, 25 bp, Homo sapien
tcacaggtctgctttacactgcggg

SEQ ID NO: 4919621 - DNA, 25 bp, Homo sapien
catgcaggtagggacttggtgtatt

SEQ ID NO: 4919622 - DNA, 25 bp, Homo sapien
tccgctattgtgtttcggatggaac

SEQ ID NO: 4919623 - DNA, 25 bp, Homo sapien
tctggctaatgatttaccaaaaggg

SEQ ID NO: 4919624 - DNA, 25 bp, Homo sapien
gaatcaggatgcaaaggtaattcta

SEQ ID NO: 4919625 - DNA, 25 bp, Homo sapien
tatgccaaacaactaatatctctct

SEQ ID NO: 4919626 - DNA, 25 bp, Homo sapien
gggtagcagttatgccaaacaacta

SEQ ID NO: 4919627 - DNA, 25 bp, Homo sapien
tagcatgtcatgagcaagcagagaa

SEQ ID NO: 4919628 - DNA, 25 bp, Homo sapien
tctatgaatggttactgaggcctgg

SEQ ID NO: 4919629 - DNA, 25 bp, Homo sapien
tacaacgtctgtggaatgccattgc

SEQ ID NO: 4919630 - DNA, 25 bp, Homo sapien
tgccattgctgactaggcagcctgc

SEQ ID NO: 4919631 - DNA, 25 bp, Homo sapien
tatacagcttgaatcagcaatgcgt

SEQ ID NO: 4919632 - DNA, 25 bp, Homo sapien
aataatgagtcgcatttatacagct

SEQ ID NO: 4919633 - DNA, 25 bp, Homo sapien
caatgcgtgcattaggtttcttcag

SEQ ID NO: 4919634 - DNA, 25 bp, Homo sapien
gttgagaaagagcaattgtcattag

SEQ ID NO: 4919635 - DNA, 25 bp, Homo sapien
tgagtatgcatccagcggcaagcgc

SEQ ID NO: 4919636 - DNA, 25 bp, Homo sapien
ccatcaccatgagcacaagaaaaag

SEQ ID NO: 4919637 - DNA, 25 bp, Homo sapien
ccagtggcaggtctattcgttctcc

SEQ ID NO: 4919638 - DNA, 25 bp, Homo sapien
gaaaggattcgcctctcctacagaa

SEQ ID NO: 4919639 - DNA, 25 bp, Homo sapien
catgttaggctttgttagaggtttt

SEQ ID NO: 4919640 - DNA, 25 bp, Homo sapien
tgtcatgttaggctttgttagaggt

SEQ ID NO: 4919641 - DNA, 25 bp, Homo sapien
tttgtcatgttaggctttgttagag

SEQ ID NO: 4919642 - DNA, 25 bp, Homo sapien
tttttgtcatgttaggctttgttag

SEQ ID NO: 4919643 - DNA, 25 bp, Homo sapien
gctagatcccttatccacttacaag

SEQ ID NO: 4919644 - DNA, 25 bp, Homo sapien
ggtgttaatgagtaccgccattgga

SEQ ID NO: 4919645 - DNA, 25 bp, Homo sapien
ggaatttcaggctatatctatggac

SEQ ID NO: 4919646 - DNA, 25 bp, Homo sapien
taaagaggtaataacagctagatcc

SEQ ID NO: 4919647 - DNA, 25 bp, Homo sapien
cttttttcgcttgctggagtggaga

SEQ ID NO: 4919648 - DNA, 25 bp, Homo sapien
gaatgtagtaggcaaaatattatgg

SEQ ID NO: 4919649 - DNA, 25 bp, Homo sapien
gaatagtgcttggaatgtagtaggc

SEQ ID NO: 4919650 - DNA, 25 bp, Homo sapien
tcacatgtagaagtttcattaaaga

SEQ ID NO: 4919651 - DNA, 25 bp, Homo sapien
tctcagatttgatactgtgttttct

SEQ ID NO: 4919652 - DNA, 25 bp, Homo sapien
ggtaatcccggaactctagatatgg

SEQ ID NO: 4919653 - DNA, 25 bp, Homo sapien
ctatttggactaatcagtatataca

SEQ ID NO: 4919654 - DNA, 25 bp, Homo sapien
agattactctcaaccattcctcatg

SEQ ID NO: 4919655 - DNA, 25 bp, Homo sapien
tgttttaagaagcttgccaggtgat

SEQ ID NO: 4919656 - DNA, 25 bp, Homo sapien
cagaaattgtgggtaggctcctaca

SEQ ID NO: 4919657 - DNA, 25 bp, Homo sapien
tgatacagaccgaagcttgagaacc

SEQ ID NO: 4919658 - DNA, 25 bp, Homo sapien
gcagttcttaaagtgtgattcccag

SEQ ID NO: 4919659 - DNA, 25 bp, Homo sapien
cttctctgtcagatttgttacccat

SEQ ID NO: 4919660 - DNA, 25 bp, Homo sapien
gagtgatggtatcaacttctctgtc

SEQ ID NO: 4919661 - DNA, 25 bp, Homo sapien
ggtatcaacttctctgtcagatttg

SEQ ID NO: 4919662 - DNA, 25 bp, Homo sapien
ctttattacataggctaaaatgtta

SEQ ID NO: 4919663 - DNA, 25 bp, Homo sapien
ttctaggagctagtcgaaggagcga

SEQ ID NO: 4919664 - DNA, 25 bp, Homo sapien
tggtagcttcgagcccttgcggaga

SEQ ID NO: 4919665 - DNA, 25 bp, Homo sapien
tgacagaagcttgtcgacggcggct

SEQ ID NO: 4919666 - DNA, 25 bp, Homo sapien
ttacagacaagatgtcggcggatgg

SEQ ID NO: 4919667 - DNA, 25 bp, Homo sapien
actcatcaccaggacagttggaggg

SEQ ID NO: 4919668 - DNA, 25 bp, Homo sapien
taattttaacttagctaatgaactc

SEQ ID NO: 4919669 - DNA, 25 bp, Homo sapien
tagctaatgaactcatcaccaggac

SEQ ID NO: 4919670 - DNA, 25 bp, Homo sapien
tggctaatccataattaaagaaggt

SEQ ID NO: 4919671 - DNA, 25 bp, Homo sapien
caacacaacttatggttaggccagg

SEQ ID NO: 4919672 - DNA, 25 bp, Homo sapien
tcaaaagaaacgagttgtgcacagg

SEQ ID NO: 4919673 - DNA, 25 bp, Homo sapien
cacggctctctgcatgatggtgcca

SEQ ID NO: 4919674 - DNA, 25 bp, Homo sapien
ggtactcagaacaaaacaaggacga

SEQ ID NO: 4919675 - DNA, 25 bp, Homo sapien
ttctcagcggggaaagtcgggataa

SEQ ID NO: 4919676 - DNA, 25 bp, Homo sapien
cagcctctggccggccacgttattt

SEQ ID NO: 4919677 - DNA, 25 bp, Homo sapien
tctggccggccacgttattttctca

SEQ ID NO: 4919678 - DNA, 25 bp, Homo sapien
ccggccacgttattttctcagcggg

SEQ ID NO: 4919679 - DNA, 25 bp, Homo sapien
tggatgcgacgctgcagatcgccaa

SEQ ID NO: 4919680 - DNA, 25 bp, Homo sapien
gggactcctagacccggcgctgcga

SEQ ID NO: 4919681 - DNA, 25 bp, Homo sapien
tcgccaagctgaatgcggccgagct

SEQ ID NO: 4919682 - DNA, 25 bp, Homo sapien
ctgcgatgaagaggacccgcgacga

SEQ ID NO: 4919683 - DNA, 25 bp, Homo sapien
gacacccgatcgctatagcgcacta

SEQ ID NO: 4919684 - DNA, 25 bp, Homo sapien
gaacttaatgcggacacccgatcgc

SEQ ID NO: 4919685 - DNA, 25 bp, Homo sapien
tgcggacacccgatcgctatagcgc

SEQ ID NO: 4919686 - DNA, 25 bp, Homo sapien
acaggcacgcaccacagcgcccagg

SEQ ID NO: 4919687 - DNA, 25 bp, Homo sapien
ctaatcttaaccttggttcccgcat

SEQ ID NO: 4919688 - DNA, 25 bp, Homo sapien
caggaagtcttactaatcttaacct

SEQ ID NO: 4919689 - DNA, 25 bp, Homo sapien
gatcagatgagccaattaatcgatc

SEQ ID NO: 4919690 - DNA, 25 bp, Homo sapien
agatgagccaattaatcgatctggg

SEQ ID NO: 4919691 - DNA, 25 bp, Homo sapien
cgggggggcccccagatcagatgag

SEQ ID NO: 4919692 - DNA, 25 bp, Homo sapien
ccccagatcagatgagccaattaat

SEQ ID NO: 4919693 - DNA, 25 bp, Homo sapien
ttttagggccgtgcggctaccactg

SEQ ID NO: 4919694 - DNA, 25 bp, Homo sapien
tgctcggatcagtctgccctcacag

SEQ ID NO: 4919695 - DNA, 25 bp, Homo sapien
gcagctccgctgctctgactggatt

SEQ ID NO: 4919696 - DNA, 25 bp, Homo sapien
tggctccgctgtccgccgagggttt

SEQ ID NO: 4919697 - DNA, 25 bp, Homo sapien
gtgaccaagacctcagccatgcgct

SEQ ID NO: 4919698 - DNA, 25 bp, Homo sapien
cgtagctgttccccggtgaccaaga

SEQ ID NO: 4919699 - DNA, 25 bp, Homo sapien
ctgcgccccgccactcccgctggtg

SEQ ID NO: 4919700 - DNA, 25 bp, Homo sapien
tgttccccggtgaccaagacctcag

SEQ ID NO: 4919701 - DNA, 25 bp, Homo sapien
gccccacgcgagtcgcaagccacga

SEQ ID NO: 4919702 - DNA, 25 bp, Homo sapien
cgaggaccatccacgcgcccgcagc

SEQ ID NO: 4919703 - DNA, 25 bp, Homo sapien
ccacgcgcccgcagccgttccggcg

SEQ ID NO: 4919704 - DNA, 25 bp, Homo sapien
ccacgagccagggagcgcgtgcgcg

SEQ ID NO: 4919705 - DNA, 25 bp, Homo sapien
tctcttcgcggatgaggcgcaggct

SEQ ID NO: 4919706 - DNA, 25 bp, Homo sapien
cccaaatgattgaggacgatgtgcc

SEQ ID NO: 4919707 - DNA, 25 bp, Homo sapien
agatgtaaaacaccgaggctcaggg

SEQ ID NO: 4919708 - DNA, 25 bp, Homo sapien
ttgttcccaagttccgtgagacgcc

SEQ ID NO: 4919709 - DNA, 25 bp, Homo sapien
ctcaaacgctgcagagctgggtttt

SEQ ID NO: 4919710 - DNA, 25 bp, Homo sapien
tttataaccacacgaagggcagctg

SEQ ID NO: 4919711 - DNA, 25 bp, Homo sapien
gaccataagtactattcccaaacag

SEQ ID NO: 4919712 - DNA, 25 bp, Homo sapien
gggcccgcgtacaagttgtggctca

SEQ ID NO: 4919713 - DNA, 25 bp, Homo sapien
tgtgctagttacagtgccaaaacag

SEQ ID NO: 4919714 - DNA, 25 bp, Homo sapien
agtgacaagaatgactgaacttcca

SEQ ID NO: 4919715 - DNA, 25 bp, Homo sapien
gcatacgaccgctttaattcctaaa

SEQ ID NO: 4919716 - DNA, 25 bp, Homo sapien
taactaggaaaccaggcatacgacc

SEQ ID NO: 4919717 - DNA, 25 bp, Homo sapien
aaggatgcttaggactagagaggtt

SEQ ID NO: 4919718 - DNA, 25 bp, Homo sapien
caaatcttatgtgggaagatattat

SEQ ID NO: 4919719 - DNA, 25 bp, Homo sapien
tcccattctgtagggaaggatgctt

SEQ ID NO: 4919720 - DNA, 25 bp, Homo sapien
gatgcttaggactagagaggttaag

SEQ ID NO: 4919721 - DNA, 25 bp, Homo sapien
caaaaagtgattctctgcagccagc

SEQ ID NO: 4919722 - DNA, 25 bp, Homo sapien
aagttgatcctgaaggtaccacctt

SEQ ID NO: 4919723 - DNA, 25 bp, Homo sapien
taccaccttgcaagcatcctatctg

SEQ ID NO: 4919724 - DNA, 25 bp, Homo sapien
catcttcacgatgtcccccgtgtat

SEQ ID NO: 4919725 - DNA, 25 bp, Homo sapien
cagctgccacgggcttccccaagct

SEQ ID NO: 4919726 - DNA, 25 bp, Homo sapien
gctgccacgggcttccccaagctag

SEQ ID NO: 4919727 - DNA, 25 bp, Homo sapien
ctgcagctgccacgggcttccccaa

SEQ ID NO: 4919728 - DNA, 25 bp, Homo sapien
tgccacgggcttccccaagctagag

SEQ ID NO: 4919729 - DNA, 25 bp, Homo sapien
tgaagagagcttccgggtaaatatc

SEQ ID NO: 4919730 - DNA, 25 bp, Homo sapien
atgaagagagcttccgggtaaatat

SEQ ID NO: 4919731 - DNA, 25 bp, Homo sapien
gcttccgggtaaatatcagaaccca

SEQ ID NO: 4919732 - DNA, 25 bp, Homo sapien
gagagcttccgggtaaatatcagaa

SEQ ID NO: 4919733 - DNA, 25 bp, Homo sapien
cactgttgagtcaacttttggcttc

SEQ ID NO: 4919734 - DNA, 25 bp, Homo sapien
gccactgttgagtcaacttttggct

SEQ ID NO: 4919735 - DNA, 25 bp, Homo sapien
tcaaaatgtataatccaatcttttc

SEQ ID NO: 4919736 - DNA, 25 bp, Homo sapien
caaaatgtataatccaatcttttct

SEQ ID NO: 4919737 - DNA, 25 bp, Homo sapien
tactcaagggtaagctaaggtggaa

SEQ ID NO: 4919738 - DNA, 25 bp, Homo sapien
ccagctactcaagggtaagctaagg

SEQ ID NO: 4919739 - DNA, 25 bp, Homo sapien
gttcacaccaaagacataatcccag

SEQ ID NO: 4919740 - DNA, 25 bp, Homo sapien
gcagtggttcacaccaaagacataa

SEQ ID NO: 4919741 - DNA, 25 bp, Homo sapien
accttggaaagtgtgcagacatgcc

SEQ ID NO: 4919742 - DNA, 25 bp, Homo sapien
caccttggaaagtgtgcagacatgc

SEQ ID NO: 4919743 - DNA, 25 bp, Homo sapien
cttggaaagtgtgcagacatgccag

SEQ ID NO: 4919744 - DNA, 25 bp, Homo sapien
ctcaccttggaaagtgtgcagacat

SEQ ID NO: 4919745 - DNA, 25 bp, Homo sapien
ggctaacagtatgacctgtgtccat

SEQ ID NO: 4919746 - DNA, 25 bp, Homo sapien
cagaccaaaggctaacagtatgacc

SEQ ID NO: 4919747 - DNA, 25 bp, Homo sapien
gtgttccttgtgattctacagacca

SEQ ID NO: 4919748 - DNA, 25 bp, Homo sapien
gattctacagaccaaaggctaacag

SEQ ID NO: 4919749 - DNA, 25 bp, Homo sapien
ggagaccaagactgtcagttctcat

SEQ ID NO: 4919750 - DNA, 25 bp, Homo sapien
tgacgaaataggagaccaagactgt

SEQ ID NO: 4919751 - DNA, 25 bp, Homo sapien
ggagtcagtctggattccccataag

SEQ ID NO: 4919752 - DNA, 25 bp, Homo sapien
agtactctcatagttgacatgacga

SEQ ID NO: 4919753 - DNA, 25 bp, Homo sapien
tcttcgcctgcttatacaagggcta

SEQ ID NO: 4919754 - DNA, 25 bp, Homo sapien
gctacaacatcatagacccctggat

SEQ ID NO: 4919755 - DNA, 25 bp, Homo sapien
tttcatccctgccaagagagtcaca

SEQ ID NO: 4919756 - DNA, 25 bp, Homo sapien
gtcatgggccagatcttacgttttg

SEQ ID NO: 4919757 - DNA, 25 bp, Homo sapien
cctacacatgtcagcaactcagaag

SEQ ID NO: 4919758 - DNA, 25 bp, Homo sapien
tcatcatgaggctagctaggtgtcc

SEQ ID NO: 4919759 - DNA, 25 bp, Homo sapien
tttgatctccggactccttcggcct

SEQ ID NO: 4919760 - DNA, 25 bp, Homo sapien
gggatactgatgaatgccagatgga

SEQ ID NO: 4919761 - DNA, 25 bp, Homo sapien
ctggagcttagggctaattcttgaa

SEQ ID NO: 4919762 - DNA, 25 bp, Homo sapien
ggagcttagggctaattcttgaaca

SEQ ID NO: 4919763 - DNA, 25 bp, Homo sapien
tggagcttagggctaattcttgaac

SEQ ID NO: 4919764 - DNA, 25 bp, Homo sapien
gagctctgtactctgcacccagtgg

SEQ ID NO: 4919765 - DNA, 25 bp, Homo sapien
caatacaccctcgagctgaatgcta

SEQ ID NO: 4919766 - DNA, 25 bp, Homo sapien
ggtgccttcagagaccacgtaaacg

SEQ ID NO: 4919767 - DNA, 25 bp, Homo sapien
aatgctagcttgtggctccatggca

SEQ ID NO: 4919768 - DNA, 25 bp, Homo sapien
taatgccccggtctgctaatttctg

SEQ ID NO: 4919769 - DNA, 25 bp, Homo sapien
aacagtttgggtaggtcttgagatg

SEQ ID NO: 4919770 - DNA, 25 bp, Homo sapien
tcaatcagttcttttgcgacaaaac

SEQ ID NO: 4919771 - DNA, 25 bp, Homo sapien
taattgccgtctctctgtcagaagc

SEQ ID NO: 4919772 - DNA, 25 bp, Homo sapien
ggtagaagagtttgacatccttgaa

SEQ ID NO: 4919773 - DNA, 25 bp, Homo sapien
tctgtcctctcataaaggccttcac

SEQ ID NO: 4919774 - DNA, 25 bp, Homo sapien
tatccaatgggaaggtgccgtcatc

SEQ ID NO: 4919775 - DNA, 25 bp, Homo sapien
gccgtcatcctttctaaagcggtag

SEQ ID NO: 4919776 - DNA, 25 bp, Homo sapien
aggggggatttcatgcggaacatac

SEQ ID NO: 4919777 - DNA, 25 bp, Homo sapien
caggggggatttcatgcggaacata

SEQ ID NO: 4919778 - DNA, 25 bp, Homo sapien
tacaggggggatttcatgcggaaca

SEQ ID NO: 4919779 - DNA, 25 bp, Homo sapien
gattacaggggggatttcatgcgga

SEQ ID NO: 4919780 - DNA, 25 bp, Homo sapien
gccttggtttgcgtggacaaagcct

SEQ ID NO: 4919781 - DNA, 25 bp, Homo sapien
gaacgtttagcacagcctaacgctg

SEQ ID NO: 4919782 - DNA, 25 bp, Homo sapien
gatggaatcaactgaccctctgtgg

SEQ ID NO: 4919783 - DNA, 25 bp, Homo sapien
caatttctataggttcactgcaagg

SEQ ID NO: 4919784 - DNA, 25 bp, Homo sapien
tccaggaattcagatgccatgaagg

SEQ ID NO: 4919785 - DNA, 25 bp, Homo sapien
gaaggtgcgctcatacttgacccct

SEQ ID NO: 4919786 - DNA, 25 bp, Homo sapien
gaattcagatgccatgaaggtgcgc

SEQ ID NO: 4919787 - DNA, 25 bp, Homo sapien
catgaaggtgcgctcatacttgacc

SEQ ID NO: 4919788 - DNA, 25 bp, Homo sapien
catgctccataagccggtggcaaag

SEQ ID NO: 4919789 - DNA, 25 bp, Homo sapien
tgcctctttcctcgtggtggcctca

SEQ ID NO: 4919790 - DNA, 25 bp, Homo sapien
gatgccatgctccataagccggtgg

SEQ ID NO: 4919791 - DNA, 25 bp, Homo sapien
tccataagccggtggcaaagctgct

SEQ ID NO: 4919792 - DNA, 25 bp, Homo sapien
taacaaccaaccttctgggaggcat

SEQ ID NO: 4919793 - DNA, 25 bp, Homo sapien
gaagcgctataagaacctgcctgcc

SEQ ID NO: 4919794 - DNA, 25 bp, Homo sapien
tgtggcagcttacatcatggttcag

SEQ ID NO: 4919795 - DNA, 25 bp, Homo sapien
caagcagcaacttttggaagcgcta

SEQ ID NO: 4919796 - DNA, 25 bp, Homo sapien
acacccagctaatgttttgtatttt

SEQ ID NO: 4919797 - DNA, 25 bp, Homo sapien
ctgggattacataaaatcttaaaat

SEQ ID NO: 4919798 - DNA, 25 bp, Homo sapien
gtgctgggattacataaaatcttaa

SEQ ID NO: 4919799 - DNA, 25 bp, Homo sapien
agtgctgggattacataaaatctta

SEQ ID NO: 4919800 - DNA, 25 bp, Homo sapien
accaacagacagctgtgagtccaac

SEQ ID NO: 4919801 - DNA, 25 bp, Homo sapien
accagagctagacatgttaggccac

SEQ ID NO: 4919802 - DNA, 25 bp, Homo sapien
ggccaccaacagacagctgtgagtc

SEQ ID NO: 4919803 - DNA, 25 bp, Homo sapien
gctagacatgttaggccaccaacag

SEQ ID NO: 4919804 - DNA, 25 bp, Homo sapien
gatttttcagccaaccttcagatgg

SEQ ID NO: 4919805 - DNA, 25 bp, Homo sapien
gtgcccggccgatttttcagccaac

SEQ ID NO: 4919806 - DNA, 25 bp, Homo sapien
ctgtgcccggccgatttttcagcca

SEQ ID NO: 4919807 - DNA, 25 bp, Homo sapien
cggccgatttttcagccaaccttca

SEQ ID NO: 4919808 - DNA, 25 bp, Homo sapien
gattatctggtttccatctccctcc

SEQ ID NO: 4919809 - DNA, 25 bp, Homo sapien
tctccctccatttaaggctgctaaa

SEQ ID NO: 4919810 - DNA, 25 bp, Homo sapien
acagcagcggtagcctggtaggcca

SEQ ID NO: 4919811 - DNA, 25 bp, Homo sapien
acaggaaattatccacgcagacaca

SEQ ID NO: 4919812 - DNA, 25 bp, Homo sapien
tgcaatactccatactgaatataaa

SEQ ID NO: 4919813 - DNA, 25 bp, Homo sapien
taacatgcaatactccatactgaat

SEQ ID NO: 4919814 - DNA, 25 bp, Homo sapien
tttcctacacattaacatgcaatac

SEQ ID NO: 4919815 - DNA, 25 bp, Homo sapien
catgcaatactccatactgaatata

SEQ ID NO: 4919816 - DNA, 25 bp, Homo sapien
ataccaaagcctgctaaaagagaca

SEQ ID NO: 4919817 - DNA, 25 bp, Homo sapien
caataccaaagcctgctaaaagaga

SEQ ID NO: 4919818 - DNA, 25 bp, Homo sapien
taccaaagcctgctaaaagagacat

SEQ ID NO: 4919819 - DNA, 25 bp, Homo sapien
aataccaaagcctgctaaaagagac

SEQ ID NO: 4919820 - DNA, 25 bp, Homo sapien
ttctgtctgtagagtcatcagggac

SEQ ID NO: 4919821 - DNA, 25 bp, Homo sapien
tagtgcaggttgtacatcaggcccc

SEQ ID NO: 4919822 - DNA, 25 bp, Homo sapien
gactattagtctggacgtacatcca

SEQ ID NO: 4919823 - DNA, 25 bp, Homo sapien
tggtcaccatcatgcggaagtctca

SEQ ID NO: 4919824 - DNA, 25 bp, Homo sapien
gatttccgattgtcatggctctgct

SEQ ID NO: 4919825 - DNA, 25 bp, Homo sapien
gaactggtagagaagattgctgtcc

SEQ ID NO: 4919826 - DNA, 25 bp, Homo sapien
gactgtcatgagtttcctgggagga

SEQ ID NO: 4919827 - DNA, 25 bp, Homo sapien
gctgtccacaaatgggtgcttgttg

SEQ ID NO: 4919828 - DNA, 25 bp, Homo sapien
gagctccaataaatgccgggatggc

SEQ ID NO: 4919829 - DNA, 25 bp, Homo sapien
agctccaataaatgccgggatggca

SEQ ID NO: 4919830 - DNA, 25 bp, Homo sapien
tgagctccaataaatgccgggatgg

SEQ ID NO: 4919831 - DNA, 25 bp, Homo sapien
cctcactgcagacacgatcttgatc

SEQ ID NO: 4919832 - DNA, 25 bp, Homo sapien
tcactgcagacacgatcttgatctc

SEQ ID NO: 4919833 - DNA, 25 bp, Homo sapien
cactgcagacacgatcttgatctcc

SEQ ID NO: 4919834 - DNA, 25 bp, Homo sapien
ctgcagacacgatcttgatctcctt

SEQ ID NO: 4919835 - DNA, 25 bp, Homo sapien
aacacgtgtggaccccaagagcatg

SEQ ID NO: 4919836 - DNA, 25 bp, Homo sapien
ccagctccgagagtgctaatggtga

SEQ ID NO: 4919837 - DNA, 25 bp, Homo sapien
gacacccagggtcaattccagggat

SEQ ID NO: 4919838 - DNA, 25 bp, Homo sapien
caacatgtggatctaaaggcccagc

SEQ ID NO: 4919839 - DNA, 25 bp, Homo sapien
cagtgccttaaacaaatgggtttga

SEQ ID NO: 4919840 - DNA, 25 bp, Homo sapien
tgtatccccaagatctgatgatgag

SEQ ID NO: 4919841 - DNA, 25 bp, Homo sapien
gagttgggggttatgacctgtcatc

SEQ ID NO: 4919842 - DNA, 25 bp, Homo sapien
gtttgagagtgttctctggcggtta

SEQ ID NO: 4919843 - DNA, 25 bp, Homo sapien
tccgatcccctttgctagtgacagt

SEQ ID NO: 4919844 - DNA, 25 bp, Homo sapien
aggtggcatcctccgatcccctttg

SEQ ID NO: 4919845 - DNA, 25 bp, Homo sapien
ctggtgaggtggcatcctccgatcc

SEQ ID NO: 4919846 - DNA, 25 bp, Homo sapien
agtgacagtcagaggccaggtacca

SEQ ID NO: 4919847 - DNA, 25 bp, Homo sapien
aaagatccctgcctcacagtttata

SEQ ID NO: 4919848 - DNA, 25 bp, Homo sapien
tggcagacaaacacaatgtcaagac

SEQ ID NO: 4919849 - DNA, 25 bp, Homo sapien
tatctcgtaggtgaccatcagtgag

SEQ ID NO: 4919850 - DNA, 25 bp, Homo sapien
aagtcctctatccatgcattcagca

SEQ ID NO: 4919851 - DNA, 25 bp, Homo sapien
tgaatgtcttccttgcatacggagc

SEQ ID NO: 4919852 - DNA, 25 bp, Homo sapien
tccttgcatacggagccccgggagt

SEQ ID NO: 4919853 - DNA, 25 bp, Homo sapien
tgtcttccttgcatacggagccccg

SEQ ID NO: 4919854 - DNA, 25 bp, Homo sapien
cgtgaatgtcttccttgcatacgga

SEQ ID NO: 4919855 - DNA, 25 bp, Homo sapien
cagaaaaatgggcagcacgggagaa

SEQ ID NO: 4919856 - DNA, 25 bp, Homo sapien
tgaagtcctaatgcaccttagtgcc

SEQ ID NO: 4919857 - DNA, 25 bp, Homo sapien
tataagctacccattgacacatgga

SEQ ID NO: 4919858 - DNA, 25 bp, Homo sapien
gccttgaggtcaagaaagcctagta

SEQ ID NO: 4919859 - DNA, 25 bp, Homo sapien
caccaagggctccaccatgcccctt

SEQ ID NO: 4919860 - DNA, 25 bp, Homo sapien
agccctccaccaagggctccaccat

SEQ ID NO: 4919861 - DNA, 25 bp, Homo sapien
tccaccaagggagccctccaccaag

SEQ ID NO: 4919862 - DNA, 25 bp, Homo sapien
agggctccaccatgcccctttctcc

SEQ ID NO: 4919863 - DNA, 25 bp, Homo sapien
cacaaaaccccagccaaccgcgtca

SEQ ID NO: 4919864 - DNA, 25 bp, Homo sapien
tggcatggcttacttcctcgcacca

SEQ ID NO: 4919865 - DNA, 25 bp, Homo sapien
tggcttacttcctcgcaccacaaaa

SEQ ID NO: 4919866 - DNA, 25 bp, Homo sapien
gatgtggcatggcttacttcctcgc

SEQ ID NO: 4919867 - DNA, 25 bp, Homo sapien
tctaaatgtttattagaggagaggg

SEQ ID NO: 4919868 - DNA, 25 bp, Homo sapien
taaatgtttattagaggagagggaa

SEQ ID NO: 4919869 - DNA, 25 bp, Homo sapien
ttctaaatgtttattagaggagagg

SEQ ID NO: 4919870 - DNA, 25 bp, Homo sapien
ctaaatgtttattagaggagaggga

SEQ ID NO: 4919871 - DNA, 25 bp, Homo sapien
gcaaaccaatgccagagagctcatg

SEQ ID NO: 4919872 - DNA, 25 bp, Homo sapien
cttgagccattttctgttgcccact

SEQ ID NO: 4919873 - DNA, 25 bp, Homo sapien
gagccattttctgttgcccacttat

SEQ ID NO: 4919874 - DNA, 25 bp, Homo sapien
ttttttccagcatgcaaaccaatgc

SEQ ID NO: 4919875 - DNA, 25 bp, Homo sapien
taagctgtaactagaatgccaacaa

SEQ ID NO: 4919876 - DNA, 25 bp, Homo sapien
ccataagctgtaactagaatgccaa

SEQ ID NO: 4919877 - DNA, 25 bp, Homo sapien
ggagaaccataagctgtaactagaa

SEQ ID NO: 4919878 - DNA, 25 bp, Homo sapien
gaaccataagctgtaactagaatgc

SEQ ID NO: 4919879 - DNA, 25 bp, Homo sapien
ggcagctcatgacagctctagaaac

SEQ ID NO: 4919880 - DNA, 25 bp, Homo sapien
cagctcatgacagctctagaaacaa

SEQ ID NO: 4919881 - DNA, 25 bp, Homo sapien
catcggcagctcatgacagctctag

SEQ ID NO: 4919882 - DNA, 25 bp, Homo sapien
tcggcagctcatgacagctctagaa

SEQ ID NO: 4919883 - DNA, 25 bp, Homo sapien
gacactacttaggagttttggatac

SEQ ID NO: 4919884 - DNA, 25 bp, Homo sapien
gctgtagtaaataagttatgtgttt

SEQ ID NO: 4919885 - DNA, 25 bp, Homo sapien
gttttggatactgctgtagtaaata

SEQ ID NO: 4919886 - DNA, 25 bp, Homo sapien
aggacactacttaggagttttggat

SEQ ID NO: 4919887 - DNA, 25 bp, Homo sapien
ccaacacaaggtatgagagagaatt

SEQ ID NO: 4919888 - DNA, 25 bp, Homo sapien
tgcatgggtccatacccagaaaagc

SEQ ID NO: 4919889 - DNA, 25 bp, Homo sapien
gatacaaattgttgaaaggcagaca

SEQ ID NO: 4919890 - DNA, 25 bp, Homo sapien
aaggcagacaaaccattgcatgggt

SEQ ID NO: 4919891 - DNA, 25 bp, Homo sapien
ctgggccatatctggcaggggcata

SEQ ID NO: 4919892 - DNA, 25 bp, Homo sapien
agcgtcttatcttcagccagagttc

SEQ ID NO: 4919893 - DNA, 25 bp, Homo sapien
tctggcaggggcatatagcgtctta

SEQ ID NO: 4919894 - DNA, 25 bp, Homo sapien
agagttcaaataacaaataaccatg

SEQ ID NO: 4919895 - DNA, 25 bp, Homo sapien
tctcccacaaagaggtagtaccttc

SEQ ID NO: 4919896 - DNA, 25 bp, Homo sapien
cacaagtaatatgaagcctaggtaa

SEQ ID NO: 4919897 - DNA, 25 bp, Homo sapien
tggaaaagggatcaatcatgagctc

SEQ ID NO: 4919898 - DNA, 25 bp, Homo sapien
taggtaagtaatgtctccaagcaag

SEQ ID NO: 4919899 - DNA, 25 bp, Homo sapien
tctacatgcaggacattgagcccgt

SEQ ID NO: 4919900 - DNA, 25 bp, Homo sapien
gaatcagattgctcacggtccggta

SEQ ID NO: 4919901 - DNA, 25 bp, Homo sapien
tccgtgggcccgtcagaatcagatt

SEQ ID NO: 4919902 - DNA, 25 bp, Homo sapien
tgacttccatgacaatcgtccgtgg

SEQ ID NO: 4919903 - DNA, 25 bp, Homo sapien
tatgtgcggagaagactcgtatgtc

SEQ ID NO: 4919904 - DNA, 25 bp, Homo sapien
gcatgtcgctgtttgggctagagaa

SEQ ID NO: 4919905 - DNA, 25 bp, Homo sapien
taaggcagttctatcatgtaggaaa

SEQ ID NO: 4919906 - DNA, 25 bp, Homo sapien
tcctaatgccacaattgaaacctgt

SEQ ID NO: 4919907 - DNA, 25 bp, Homo sapien
gctgagccccaaaatgcactatttt

SEQ ID NO: 4919908 - DNA, 25 bp, Homo sapien
tatacaagtgagctgaaaagttaca

SEQ ID NO: 4919909 - DNA, 25 bp, Homo sapien
tgaggaatttcctctgcacgctgag

SEQ ID NO: 4919910 - DNA, 25 bp, Homo sapien
aattcaggctaaggaggcaatttag

SEQ ID NO: 4919911 - DNA, 25 bp, Homo sapien
aagtcttagcatacagcctggctca

SEQ ID NO: 4919912 - DNA, 25 bp, Homo sapien
cctgcagccgtgtgaatttagagac

SEQ ID NO: 4919913 - DNA, 25 bp, Homo sapien
tttcacctagtagttcctgcagccg

SEQ ID NO: 4919914 - DNA, 25 bp, Homo sapien
ggccttgggcatatgactaaccact

SEQ ID NO: 4919915 - DNA, 25 bp, Homo sapien
cagccaagaggagatcgtgtgcaat

SEQ ID NO: 4919916 - DNA, 25 bp, Homo sapien
aattttccaggcaacagtaagacag

SEQ ID NO: 4919917 - DNA, 25 bp, Homo sapien
gacatagcccctgttctgcagatgc

SEQ ID NO: 4919918 - DNA, 25 bp, Homo sapien
gaagttctattatgccagggtccaa

SEQ ID NO: 4919919 - DNA, 25 bp, Homo sapien
tctattttttaatagagacatggtt

SEQ ID NO: 4919920 - DNA, 25 bp, Homo sapien
tgcagcctccaccttgtaagttcaa

SEQ ID NO: 4919921 - DNA, 25 bp, Homo sapien
atggtttcaccatgttgaccaggct

SEQ ID NO: 4919922 - DNA, 25 bp, Homo sapien
ggtcttgacctcctggactcaagtg

SEQ ID NO: 4919923 - DNA, 25 bp, Homo sapien
gaagctccttccatcaaaaggtggg

SEQ ID NO: 4919924 - DNA, 25 bp, Homo sapien
cccagcattaaggtagatggcacca

SEQ ID NO: 4919925 - DNA, 25 bp, Homo sapien
tgaggccagtcaaggtcaatcagcc

SEQ ID NO: 4919926 - DNA, 25 bp, Homo sapien
caaagctgtgctctatgtggccctg

SEQ ID NO: 4919927 - DNA, 25 bp, Homo sapien
tctaatctatgcaaaaatgggtatc

SEQ ID NO: 4919928 - DNA, 25 bp, Homo sapien
gaatcaacccaaaaggcaacagcat

SEQ ID NO: 4919929 - DNA, 25 bp, Homo sapien
tctgccttaagtgagtaaaaccatg

SEQ ID NO: 4919930 - DNA, 25 bp, Homo sapien
tcaatagatttcagccaaccagcaa

SEQ ID NO: 4919931 - DNA, 25 bp, Homo sapien
catcaatactgacctaggtagggag

SEQ ID NO: 4919932 - DNA, 25 bp, Homo sapien
gagaatcagatatgagacccacgtg

SEQ ID NO: 4919933 - DNA, 25 bp, Homo sapien
cacttttggctacataggagaatca

SEQ ID NO: 4919934 - DNA, 25 bp, Homo sapien
ttctcccagagtagtaaacaatcac

SEQ ID NO: 4919935 - DNA, 25 bp, Homo sapien
tataaactcaatgttcatcgttgtg

SEQ ID NO: 4919936 - DNA, 25 bp, Homo sapien
aaaggattatctgggtccaagggca

SEQ ID NO: 4919937 - DNA, 25 bp, Homo sapien
ttaagccacctgttttaacacgatg

SEQ ID NO: 4919938 - DNA, 25 bp, Homo sapien
tggaggtttctagcattaagccacc

SEQ ID NO: 4919939 - DNA, 25 bp, Homo sapien
taaaagtttcaagacatcctgggta

SEQ ID NO: 4919940 - DNA, 25 bp, Homo sapien
aagggatctgtcttacttactgctg

SEQ ID NO: 4919941 - DNA, 25 bp, Homo sapien
caaacgtcaagtgttggagaagata

SEQ ID NO: 4919942 - DNA, 25 bp, Homo sapien
taggatggcaaactacttcttaggg

SEQ ID NO: 4919943 - DNA, 25 bp, Homo sapien
gaaactgatgcctggagagactgag

SEQ ID NO: 4919944 - DNA, 25 bp, Homo sapien
caaatagagtaggtactgttatccc

SEQ ID NO: 4919945 - DNA, 25 bp, Homo sapien
gactgagtaactggatgtgctcctg

SEQ ID NO: 4919946 - DNA, 25 bp, Homo sapien
tcttgtgcattagtgtgggcctgcc

SEQ ID NO: 4919947 - DNA, 25 bp, Homo sapien
agtcaccctgttcataaggcggcag

SEQ ID NO: 4919948 - DNA, 25 bp, Homo sapien
gaaacagtcaccctgttcataaggc

SEQ ID NO: 4919949 - DNA, 25 bp, Homo sapien
cagtcaccctgttcataaggcggca

SEQ ID NO: 4919950 - DNA, 25 bp, Homo sapien
aacagtcaccctgttcataaggcgg

SEQ ID NO: 4919951 - DNA, 25 bp, Homo sapien
tttccatgtcacaccatccatgggt

SEQ ID NO: 4919952 - DNA, 25 bp, Homo sapien
gactctctgctcaataattaactag

SEQ ID NO: 4919953 - DNA, 25 bp, Homo sapien
tgacatttggtgagtcccatcttct

SEQ ID NO: 4919954 - DNA, 25 bp, Homo sapien
tgctgctacataccagacctgggag

SEQ ID NO: 4919955 - DNA, 25 bp, Homo sapien
gatgagaagttgactggggcagatg

SEQ ID NO: 4919956 - DNA, 25 bp, Homo sapien
gagattaatatctgtggatgagaag

SEQ ID NO: 4919957 - DNA, 25 bp, Homo sapien
agattaatatctgtggatgagaagt

SEQ ID NO: 4919958 - DNA, 25 bp, Homo sapien
gagaagttgactggggcagatgctc

SEQ ID NO: 4919959 - DNA, 25 bp, Homo sapien
tctgcaaccagaaggagtgaggtag

SEQ ID NO: 4919960 - DNA, 25 bp, Homo sapien
tttcctgagtaaacaacatggcaac

SEQ ID NO: 4919961 - DNA, 25 bp, Homo sapien
acttactgggcagctgtcggcacaa

SEQ ID NO: 4919962 - DNA, 25 bp, Homo sapien
tatcataggtcatggcaagttctct

SEQ ID NO: 4919963 - DNA, 25 bp, Homo sapien
gatgaaagactttcaaaatatgtct

SEQ ID NO: 4919964 - DNA, 25 bp, Homo sapien
tgatgaaagactttcaaaatatgtc

SEQ ID NO: 4919965 - DNA, 25 bp, Homo sapien
tgaaatctggtgatgaaagactttc

SEQ ID NO: 4919966 - DNA, 25 bp, Homo sapien
ctttgaaatctggtgatgaaagact

SEQ ID NO: 4919967 - DNA, 25 bp, Homo sapien
tttaaaaatagatatctatcaacac

SEQ ID NO: 4919968 - DNA, 25 bp, Homo sapien
ttgcaccaccatctttccatgttta

SEQ ID NO: 4919969 - DNA, 25 bp, Homo sapien
tggccattgcaccaccatctttcca

SEQ ID NO: 4919970 - DNA, 25 bp, Homo sapien
ccatctttccatgtttaaaaataga

SEQ ID NO: 4919971 - DNA, 25 bp, Homo sapien
ttatttttgacccatagtccccatc

SEQ ID NO: 4919972 - DNA, 25 bp, Homo sapien
tttttgacccatagtccccatcctg

SEQ ID NO: 4919973 - DNA, 25 bp, Homo sapien
cctctagaagagtcaacacctttac

SEQ ID NO: 4919974 - DNA, 25 bp, Homo sapien
ggccctctagaagagtcaacacctt

SEQ ID NO: 4919975 - DNA, 25 bp, Homo sapien
tctccgcgcctaggcaagatcgaag

SEQ ID NO: 4919976 - DNA, 25 bp, Homo sapien
aagatcgaagctccgccgctagttg

SEQ ID NO: 4919977 - DNA, 25 bp, Homo sapien
tgctctcttccctcggagtatcctt

SEQ ID NO: 4919978 - DNA, 25 bp, Homo sapien
cgctagttggtccttggcggcgcac

SEQ ID NO: 4919979 - DNA, 25 bp, Homo sapien
ccgcccaggcgctgtgtaataggag

SEQ ID NO: 4919980 - DNA, 25 bp, Homo sapien
ccagctgccccggatgcctatccgc

SEQ ID NO: 4919981 - DNA, 25 bp, Homo sapien
aggctctgccctaggaccgaggcca

SEQ ID NO: 4919982 - DNA, 25 bp, Homo sapien
ctgtaatggccccatgcgccgaagc

SEQ ID NO: 4919983 - DNA, 25 bp, Homo sapien
gcagagcaaccctgagccacagagg

SEQ ID NO: 4919984 - DNA, 25 bp, Homo sapien
agaggacccaagaacccagcaccaa

SEQ ID NO: 4919985 - DNA, 25 bp, Homo sapien
cttcatttggacacggaactttccg

SEQ ID NO: 4919986 - DNA, 25 bp, Homo sapien
aatcctggcccatgtgagagctgca

SEQ ID NO: 4919987 - DNA, 25 bp, Homo sapien
gagagctgcacacaagcttcatttg

SEQ ID NO: 4919988 - DNA, 25 bp, Homo sapien
tgctgccaacagaggactctccaaa

SEQ ID NO: 4919989 - DNA, 25 bp, Homo sapien
tccgctttttacatggggtgtagca

SEQ ID NO: 4919990 - DNA, 25 bp, Homo sapien
gctttttacatggggtgtagcagcc

SEQ ID NO: 4919991 - DNA, 25 bp, Homo sapien
cgctttttacatggggtgtagcagc

SEQ ID NO: 4919992 - DNA, 25 bp, Homo sapien
ttccgctttttacatggggtgtagc

SEQ ID NO: 4919993 - DNA, 25 bp, Homo sapien
gaccttggacaatggtgcagaaata

SEQ ID NO: 4919994 - DNA, 25 bp, Homo sapien
accttggacaatggtgcagaaataa

SEQ ID NO: 4919995 - DNA, 25 bp, Homo sapien
ctcttggagccttccatgaaatctg

SEQ ID NO: 4919996 - DNA, 25 bp, Homo sapien
tatcttaaccttgtgggtggagcca

SEQ ID NO: 4919997 - DNA, 25 bp, Homo sapien
gtatactgtcatgagatattacatt

SEQ ID NO: 4919998 - DNA, 25 bp, Homo sapien
tcacaagaagtttgtaaccaccaaa

SEQ ID NO: 4919999 - DNA, 25 bp, Homo sapien
ctgcagattcagctggttagttttt

SEQ ID NO: 4920000 - DNA, 25 bp, Homo sapien
ctgtgtaattctggtctggcataag

SEQ ID NO: 4920001 - DNA, 25 bp, Homo sapien
tgctttagttgcagtgttctgcaga

SEQ ID NO: 4920002 - DNA, 25 bp, Homo sapien
taatttgaactgtgtaattctggtc

SEQ ID NO: 4920003 - DNA, 25 bp, Homo sapien
tgtccacaactttgactctgggctt

SEQ ID NO: 4920004 - DNA, 25 bp, Homo sapien
agatggtctactcccatttcctctg

SEQ ID NO: 4920005 - DNA, 25 bp, Homo sapien
tcctctgtccacaactttgactctg

SEQ ID NO: 4920006 - DNA, 25 bp, Homo sapien
cttctggtgaagatggtctactccc

SEQ ID NO: 4920007 - DNA, 25 bp, Homo sapien
tggagacaagatactcaatagaaaa

SEQ ID NO: 4920008 - DNA, 25 bp, Homo sapien
tcattaataacgaaccaatcctgat

SEQ ID NO: 4920009 - DNA, 25 bp, Homo sapien
tcagccctgcaggtatggagacaag

SEQ ID NO: 4920010 - DNA, 25 bp, Homo sapien
tctgaagccaaaacatcgcttaatt

SEQ ID NO: 4920011 - DNA, 25 bp, Homo sapien
aatactccatgaaccatcgaccagg

SEQ ID NO: 4920012 - DNA, 25 bp, Homo sapien
gcccacatcgaatgctgtaaccagg

SEQ ID NO: 4920013 - DNA, 25 bp, Homo sapien
gaaccagtctgaagttgaatcttcc

SEQ ID NO: 4920014 - DNA, 25 bp, Homo sapien
ttttccaagaaatgccgaaccagtc

SEQ ID NO: 4920015 - DNA, 25 bp, Homo sapien
gctactgctaataatagaaattata

SEQ ID NO: 4920016 - DNA, 25 bp, Homo sapien
ctactgctaataatagaaattatac

SEQ ID NO: 4920017 - DNA, 25 bp, Homo sapien
tgctactgctaataatagaaattat

SEQ ID NO: 4920018 - DNA, 25 bp, Homo sapien
tcctttatatgggaggtttcggaca

SEQ ID NO: 4920019 - DNA, 25 bp, Homo sapien
tcggacagcttcaatcacttcatct

SEQ ID NO: 4920020 - DNA, 25 bp, Homo sapien
gggtcaccactatactgtgcaagac

SEQ ID NO: 4920021 - DNA, 25 bp, Homo sapien
aaatgcattcaagtgccattctatt

SEQ ID NO: 4920022 - DNA, 25 bp, Homo sapien
cacgaagatttctagatggtggaat

SEQ ID NO: 4920023 - DNA, 25 bp, Homo sapien
aatgccaattttggatactccagtc

SEQ ID NO: 4920024 - DNA, 25 bp, Homo sapien
tcaaaaatgtagttcaaagcaagac

SEQ ID NO: 4920025 - DNA, 25 bp, Homo sapien
gttctacaccagactcacgaagatt

SEQ ID NO: 4920026 - DNA, 25 bp, Homo sapien
tgttcttccactctagagcagagag

SEQ ID NO: 4920027 - DNA, 25 bp, Homo sapien
tggttcagaggcgatctcctgcagc

SEQ ID NO: 4920028 - DNA, 25 bp, Homo sapien
gatcgaattcggcaacattgtacac

SEQ ID NO: 4920029 - DNA, 25 bp, Homo sapien
cacaactgtgtgcatcagatcgaat

SEQ ID NO: 4920030 - DNA, 25 bp, Homo sapien
ggcagtgacttcagaagtaatcaac

SEQ ID NO: 4920031 - DNA, 25 bp, Homo sapien
gagtccagttaaccataaagcttct

SEQ ID NO: 4920032 - DNA, 25 bp, Homo sapien
atcaactccgtaggcggcccagtga

SEQ ID NO: 4920033 - DNA, 25 bp, Homo sapien
tccacccctggtaggataatacaca

SEQ ID NO: 4920034 - DNA, 25 bp, Homo sapien
agacatcaagtttttcaacactgtg

SEQ ID NO: 4920035 - DNA, 25 bp, Homo sapien
gcaaagactgctatctgatattcag

SEQ ID NO: 4920036 - DNA, 25 bp, Homo sapien
tgtgggcatagattgcaaagactgc

SEQ ID NO: 4920037 - DNA, 25 bp, Homo sapien
ccccgtaggccttcactagcagtgt

SEQ ID NO: 4920038 - DNA, 25 bp, Homo sapien
gcatgctgttctcagtcacgtcgta

SEQ ID NO: 4920039 - DNA, 25 bp, Homo sapien
agaaggtcagaagccatcggtaaag

SEQ ID NO: 4920040 - DNA, 25 bp, Homo sapien
gaggagcataaaggatcaggtaacc

SEQ ID NO: 4920041 - DNA, 25 bp, Homo sapien
tgcatcccatttgactcgcatgctg

SEQ ID NO: 4920042 - DNA, 25 bp, Homo sapien
tctttttcatccccagccaggccct

SEQ ID NO: 4920043 - DNA, 25 bp, Homo sapien
ctctttttcatccccagccaggccc

SEQ ID NO: 4920044 - DNA, 25 bp, Homo sapien
ggtcattacacttccaagtgccaga

SEQ ID NO: 4920045 - DNA, 25 bp, Homo sapien
ttgaaagtcatctgaaggtcaaagg

SEQ ID NO: 4920046 - DNA, 25 bp, Homo sapien
ttaactccacctgcctggtcattac

SEQ ID NO: 4920047 - DNA, 25 bp, Homo sapien
taattcagtgtatatggagaaaaca

SEQ ID NO: 4920048 - DNA, 25 bp, Homo sapien
ccactcaattcaatatctgtgtggg

SEQ ID NO: 4920049 - DNA, 25 bp, Homo sapien
ctgtattgggcaacaacccactcaa

SEQ ID NO: 4920050 - DNA, 25 bp, Homo sapien
cttgtcccgtaacaggatcactggc

SEQ ID NO: 4920051 - DNA, 25 bp, Homo sapien
ttctccaaacatggcataaactgtg

SEQ ID NO: 4920052 - DNA, 25 bp, Homo sapien
caataaagatcttgtaggagttagt

SEQ ID NO: 4920053 - DNA, 25 bp, Homo sapien
cgaagcatgatgtttcctaacctca

SEQ ID NO: 4920054 - DNA, 25 bp, Homo sapien
cattaattcaatacatactgattct

SEQ ID NO: 4920055 - DNA, 25 bp, Homo sapien
cagccatagccacgaagcatgatgt

SEQ ID NO: 4920056 - DNA, 25 bp, Homo sapien
ctgtcttgaagttgggtcccaggtt

SEQ ID NO: 4920057 - DNA, 25 bp, Homo sapien
ttaatcgagcactgttagagccaac

SEQ ID NO: 4920058 - DNA, 25 bp, Homo sapien
tacaattcgataaccattgatctgt

SEQ ID NO: 4920059 - DNA, 25 bp, Homo sapien
gagccaacattggagattctcaggt

SEQ ID NO: 4920060 - DNA, 25 bp, Homo sapien
tctgactgtccttcatcatagatgg

SEQ ID NO: 4920061 - DNA, 25 bp, Homo sapien
tggtaaaaactccagtcagaggctc

SEQ ID NO: 4920062 - DNA, 25 bp, Homo sapien
aaatagcaatagtatactctgtgag

SEQ ID NO: 4920063 - DNA, 25 bp, Homo sapien
aggtagtaataggatcgacttcaac

SEQ ID NO: 4920064 - DNA, 25 bp, Homo sapien
aattaccgtctcatctcctcagtag

SEQ ID NO: 4920065 - DNA, 25 bp, Homo sapien
gataaaaagtggctacagggtacat

SEQ ID NO: 4920066 - DNA, 25 bp, Homo sapien
tccaagtgcaatccatgataagttc

SEQ ID NO: 4920067 - DNA, 25 bp, Homo sapien
tattatatgaagatttcaggctcgg

SEQ ID NO: 4920068 - DNA, 25 bp, Homo sapien
aattgctccctggtattaatcctgg

SEQ ID NO: 4920069 - DNA, 25 bp, Homo sapien
taacttgtacatatggtggtcatca

SEQ ID NO: 4920070 - DNA, 25 bp, Homo sapien
gaaatagaatttatcaggccttcca

SEQ ID NO: 4920071 - DNA, 25 bp, Homo sapien
gtttcagagcttacacacttctggg

SEQ ID NO: 4920072 - DNA, 25 bp, Homo sapien
atggaaataacagatcttaaaactt

SEQ ID NO: 4920073 - DNA, 25 bp, Homo sapien
ccatggaaataacagatcttaaaac

SEQ ID NO: 4920074 - DNA, 25 bp, Homo sapien
accatggaaataacagatcttaaaa

SEQ ID NO: 4920075 - DNA, 25 bp, Homo sapien
catggaaataacagatcttaaaact

SEQ ID NO: 4920076 - DNA, 25 bp, Homo sapien
agtcttccccccatagactggaatc

SEQ ID NO: 4920077 - DNA, 25 bp, Homo sapien
tttctaagtattgctgggctggaac

SEQ ID NO: 4920078 - DNA, 25 bp, Homo sapien
caatttctaagtattgctgggctgg

SEQ ID NO: 4920079 - DNA, 25 bp, Homo sapien
tcaatttgtgtagcccttcatcagc

SEQ ID NO: 4920080 - DNA, 25 bp, Homo sapien
tgaaacttcatactccgtaccgggc

SEQ ID NO: 4920081 - DNA, 25 bp, Homo sapien
tacggccaatagtgaaacttcatac

SEQ ID NO: 4920082 - DNA, 25 bp, Homo sapien
ggctccaggccttcaataacatgtg

SEQ ID NO: 4920083 - DNA, 25 bp, Homo sapien
tctcgcttccatcatcaagtacggc

SEQ ID NO: 4920084 - DNA, 25 bp, Homo sapien
gtggtaggcactatggttgtagctg

SEQ ID NO: 4920085 - DNA, 25 bp, Homo sapien
actatggttgtagctggttctgtcc

SEQ ID NO: 4920086 - DNA, 25 bp, Homo sapien
gtaggcactatggttgtagctggtt

SEQ ID NO: 4920087 - DNA, 25 bp, Homo sapien
ggcactatggttgtagctggttctg

SEQ ID NO: 4920088 - DNA, 25 bp, Homo sapien
taggtcaccctaaactgctgcacat

SEQ ID NO: 4920089 - DNA, 25 bp, Homo sapien
gcaggctagaagtagtttcatcacc

SEQ ID NO: 4920090 - DNA, 25 bp, Homo sapien
tgtcccattttacccgcaggctaga

SEQ ID NO: 4920091 - DNA, 25 bp, Homo sapien
ccccttgagctgtcatgtaggtcac

SEQ ID NO: 4920092 - DNA, 25 bp, Homo sapien
gccagtagtggagtcagattaacag

SEQ ID NO: 4920093 - DNA, 25 bp, Homo sapien
taaaggtcactaagaagccagtagt

SEQ ID NO: 4920094 - DNA, 25 bp, Homo sapien
agtttgcattgatctccgaagacag

SEQ ID NO: 4920095 - DNA, 25 bp, Homo sapien
ccaactttggtgctcgaacaggtgc

SEQ ID NO: 4920096 - DNA, 25 bp, Homo sapien
caggagcggagacgctgacgccttc

SEQ ID NO: 4920097 - DNA, 25 bp, Homo sapien
aaggaggttgttctggcttccaggc

SEQ ID NO: 4920098 - DNA, 25 bp, Homo sapien
ggagtcactgtgactttgtattcag

SEQ ID NO: 4920099 - DNA, 25 bp, Homo sapien
tgacgccttcgccatccgtgtagat

SEQ ID NO: 4920100 - DNA, 25 bp, Homo sapien
acggcataagcacgggaggagggag

SEQ ID NO: 4920101 - DNA, 25 bp, Homo sapien
ggcacacggcataagcacgggagga

SEQ ID NO: 4920102 - DNA, 25 bp, Homo sapien
tttagcaaaatgtgcaggcttggtg

SEQ ID NO: 4920103 - DNA, 25 bp, Homo sapien
ttagcaaaatgtgcaggcttggtgg

SEQ ID NO: 4920104 - DNA, 25 bp, Homo sapien
atggggggtcccacgtaatgcgcaa

SEQ ID NO: 4920105 - DNA, 25 bp, Homo sapien
attcctcggacacccgcaagttctg

SEQ ID NO: 4920106 - DNA, 25 bp, Homo sapien
cactgacaggtttgtagacaattct

SEQ ID NO: 4920107 - DNA, 25 bp, Homo sapien
gcaaccggttataccattcctcgga

SEQ ID NO: 4920108 - DNA, 25 bp, Homo sapien
cacattgtagtccattccgctgagg

SEQ ID NO: 4920109 - DNA, 25 bp, Homo sapien
taaggatggtgttaatgtcagctcc

SEQ ID NO: 4920110 - DNA, 25 bp, Homo sapien
tgtcagctcccacaaacgtttccag

SEQ ID NO: 4920111 - DNA, 25 bp, Homo sapien
ccatgcctgtcagggcgtcgctgaa

SEQ ID NO: 4920112 - DNA, 25 bp, Homo sapien
taatttatttgccattgtgggagat

SEQ ID NO: 4920113 - DNA, 25 bp, Homo sapien
tgcttgggagaaatagagagaataa

SEQ ID NO: 4920114 - DNA, 25 bp, Homo sapien
taaacaatctctcttcccctaacaa

SEQ ID NO: 4920115 - DNA, 25 bp, Homo sapien
gcacccggccctgatttatataact

SEQ ID NO: 4920116 - DNA, 25 bp, Homo sapien
tggcttggagattggtaacacccaa

SEQ ID NO: 4920117 - DNA, 25 bp, Homo sapien
gctgtggcatggcgatgtacctgcc

SEQ ID NO: 4920118 - DNA, 25 bp, Homo sapien
tctataacaaccctataggctgtgg

SEQ ID NO: 4920119 - DNA, 25 bp, Homo sapien
tggagattggtaacacccaagaaca

SEQ ID NO: 4920120 - DNA, 25 bp, Homo sapien
tccacccacagtggattcttgcttt

SEQ ID NO: 4920121 - DNA, 25 bp, Homo sapien
cattatgctcacactaggtccttca

SEQ ID NO: 4920122 - DNA, 25 bp, Homo sapien
aatctcctggagctttgtataaaca

SEQ ID NO: 4920123 - DNA, 25 bp, Homo sapien
gaagcaatgcctggttgtccctcca

SEQ ID NO: 4920124 - DNA, 25 bp, Homo sapien
tcttttgctggtggaatggttggag

SEQ ID NO: 4920125 - DNA, 25 bp, Homo sapien
ttcttttgctggtggaatggttgga

SEQ ID NO: 4920126 - DNA, 25 bp, Homo sapien
attaatatcctggtttgaaatgaac

SEQ ID NO: 4920127 - DNA, 25 bp, Homo sapien
caaatcctaaacctagaatcagata

SEQ ID NO: 4920128 - DNA, 25 bp, Homo sapien
ttattaatatcctggtttgaaatga

SEQ ID NO: 4920129 - DNA, 25 bp, Homo sapien
ccaacacaaatcctaaacctagaat

SEQ ID NO: 4920130 - DNA, 25 bp, Homo sapien
aggtcagccttggccgccttacata

SEQ ID NO: 4920131 - DNA, 25 bp, Homo sapien
caggtcagccttggccgccttacat

SEQ ID NO: 4920132 - DNA, 25 bp, Homo sapien
aacagtgctgtatagaaagctgatg

SEQ ID NO: 4920133 - DNA, 25 bp, Homo sapien
tccaacagtgctgtatagaaagctg

SEQ ID NO: 4920134 - DNA, 25 bp, Homo sapien
gaaagctgatgatcttattgaaatt

SEQ ID NO: 4920135 - DNA, 25 bp, Homo sapien
tagaaagctgatgatcttattgaaa

SEQ ID NO: 4920136 - DNA, 25 bp, Homo sapien
tccactgggtcagagagcaacagca

SEQ ID NO: 4920137 - DNA, 25 bp, Homo sapien
cacacatatgtagacttccactggg

SEQ ID NO: 4920138 - DNA, 25 bp, Homo sapien
tgggtaaacggcatgtcactgagag

SEQ ID NO: 4920139 - DNA, 25 bp, Homo sapien
cactgagaggtggtgtacaaatgat

SEQ ID NO: 4920140 - DNA, 25 bp, Homo sapien
ttaattgcatcaagaagagtctctt

SEQ ID NO: 4920141 - DNA, 25 bp, Homo sapien
tgtttaattgcatcaagaagagtct

SEQ ID NO: 4920142 - DNA, 25 bp, Homo sapien
gcatttagtttaaattctgttctgg

SEQ ID NO: 4920143 - DNA, 25 bp, Homo sapien
gtttaattgcatcaagaagagtctc

SEQ ID NO: 4920144 - DNA, 25 bp, Homo sapien
tttgagccttagctgggcttctttt

SEQ ID NO: 4920145 - DNA, 25 bp, Homo sapien
ttagctgggcttcttttggtcatac

SEQ ID NO: 4920146 - DNA, 25 bp, Homo sapien
ccttagctgggcttcttttggtcat

SEQ ID NO: 4920147 - DNA, 25 bp, Homo sapien
agccttagctgggcttcttttggtc

SEQ ID NO: 4920148 - DNA, 25 bp, Homo sapien
tcatttcagtagttacaaataatga

SEQ ID NO: 4920149 - DNA, 25 bp, Homo sapien
atttcagtagttacaaataatgaat

SEQ ID NO: 4920150 - DNA, 25 bp, Homo sapien
taaaaggtcatttcagtagttacaa

SEQ ID NO: 4920151 - DNA, 25 bp, Homo sapien
aaggtcatttcagtagttacaaata

SEQ ID NO: 4920152 - DNA, 25 bp, Homo sapien
tgatcttccatcagttataaccacg

SEQ ID NO: 4920153 - DNA, 25 bp, Homo sapien
ggtatctcgaacatacttaattgct

SEQ ID NO: 4920154 - DNA, 25 bp, Homo sapien
tgggatgccccttcttgtacctgac

SEQ ID NO: 4920155 - DNA, 25 bp, Homo sapien
actctgcagtgaacaaggtatctcg

SEQ ID NO: 4920156 - DNA, 25 bp, Homo sapien
atgattaagaggctgaggagtttct

SEQ ID NO: 4920157 - DNA, 25 bp, Homo sapien
gtatgattaagaggctgaggagttt

SEQ ID NO: 4920158 - DNA, 25 bp, Homo sapien
catttgggtatgattaagaggctga

SEQ ID NO: 4920159 - DNA, 25 bp, Homo sapien
atggacatttgggtatgattaagag

SEQ ID NO: 4920160 - DNA, 25 bp, Homo sapien
gctgatgctgtttcgcagacaaaag

SEQ ID NO: 4920161 - DNA, 25 bp, Homo sapien
tcttaaaggcgtcaaagtcatccac

SEQ ID NO: 4920162 - DNA, 25 bp, Homo sapien
acatggcgtgcgctgggcttactgc

SEQ ID NO: 4920163 - DNA, 25 bp, Homo sapien
tcatccacaaagaagacatggcgtg

SEQ ID NO: 4920164 - DNA, 25 bp, Homo sapien
aagatcaatgccatccttgtgtacc

SEQ ID NO: 4920165 - DNA, 25 bp, Homo sapien
gatcaatgccatccttgtgtaccac

SEQ ID NO: 4920166 - DNA, 25 bp, Homo sapien
caatgccatccttgtgtaccactgg

SEQ ID NO: 4920167 - DNA, 25 bp, Homo sapien
ctgcaagatcaatgccatccttgtg

SEQ ID NO: 4920168 - DNA, 25 bp, Homo sapien
gaaggtaccaggctccatagaaacc

SEQ ID NO: 4920169 - DNA, 25 bp, Homo sapien
catagaaaccccttccactgatgaa

SEQ ID NO: 4920170 - DNA, 25 bp, Homo sapien
gggcatctttatggagttggtaaca

SEQ ID NO: 4920171 - DNA, 25 bp, Homo sapien
aacatggaaacacattgaaggtacc

SEQ ID NO: 4920172 - DNA, 25 bp, Homo sapien
aatggctcctgtggagtgtcaggaa

SEQ ID NO: 4920173 - DNA, 25 bp, Homo sapien
aactgattgtgtagtcggagggcaa

SEQ ID NO: 4920174 - DNA, 25 bp, Homo sapien
ggaagaatccggaatagaaaactga

SEQ ID NO: 4920175 - DNA, 25 bp, Homo sapien
gggcaatccttctgggtgcaagtac

SEQ ID NO: 4920176 - DNA, 25 bp, Homo sapien
cccatcactctcctgggagaaactg

SEQ ID NO: 4920177 - DNA, 25 bp, Homo sapien
tcactctcctgggagaaactgtcca

SEQ ID NO: 4920178 - DNA, 25 bp, Homo sapien
ctctcctgggagaaactgtccaaag

SEQ ID NO: 4920179 - DNA, 25 bp, Homo sapien
cccagactctcattcccatcactct

SEQ ID NO: 4920180 - DNA, 25 bp, Homo sapien
ggtcatagttgaaatatgttagagt

SEQ ID NO: 4920181 - DNA, 25 bp, Homo sapien
ctctggtcatagttgaaatatgtta

SEQ ID NO: 4920182 - DNA, 25 bp, Homo sapien
ctggtcatagttgaaatatgttaga

SEQ ID NO: 4920183 - DNA, 25 bp, Homo sapien
cactctggtcatagttgaaatatgt

SEQ ID NO: 4920184 - DNA, 25 bp, Homo sapien
ttaacctcacgagtactacagtact

SEQ ID NO: 4920185 - DNA, 25 bp, Homo sapien
tggcattaacctcacgagtactaca

SEQ ID NO: 4920186 - DNA, 25 bp, Homo sapien
cattaacctcacgagtactacagta

SEQ ID NO: 4920187 - DNA, 25 bp, Homo sapien
aacctcacgagtactacagtacttg

SEQ ID NO: 4920188 - DNA, 25 bp, Homo sapien
gatgcgttcattgccttctcaccca

SEQ ID NO: 4920189 - DNA, 25 bp, Homo sapien
tagcacttctacaccatctgacgtg

SEQ ID NO: 4920190 - DNA, 25 bp, Homo sapien
aagtctcactgacaacaatgtgtag

SEQ ID NO: 4920191 - DNA, 25 bp, Homo sapien
tctgacgtgatattagctgatgcgt

SEQ ID NO: 4920192 - DNA, 25 bp, Homo sapien
caatatcaaacatctgtaactggaa

SEQ ID NO: 4920193 - DNA, 25 bp, Homo sapien
catttgtctgtattggcccatgatg

SEQ ID NO: 4920194 - DNA, 25 bp, Homo sapien
acaatatcaaacatctgtaactgga

SEQ ID NO: 4920195 - DNA, 25 bp, Homo sapien
tggcccatgatgtggagcaaacaat

SEQ ID NO: 4920196 - DNA, 25 bp, Homo sapien
cagagccacttcattggtttcagaa

SEQ ID NO: 4920197 - DNA, 25 bp, Homo sapien
cccagagccacttcattggtttcag

SEQ ID NO: 4920198 - DNA, 25 bp, Homo sapien
agccacttcattggtttcagaacag

SEQ ID NO: 4920199 - DNA, 25 bp, Homo sapien
gagccacttcattggtttcagaaca

SEQ ID NO: 4920200 - DNA, 25 bp, Homo sapien
tttggtcctcggagtcctggaccac

SEQ ID NO: 4920201 - DNA, 25 bp, Homo sapien
accttgctggccctttggtcctcgg

SEQ ID NO: 4920202 - DNA, 25 bp, Homo sapien
tgctggccctttggtcctcggagtc

SEQ ID NO: 4920203 - DNA, 25 bp, Homo sapien
ctttggacccggttcaccttgctgg

SEQ ID NO: 4920204 - DNA, 25 bp, Homo sapien
attccttgaatggacagaccacttg

SEQ ID NO: 4920205 - DNA, 25 bp, Homo sapien
gggcattccttgaatggacagacca

SEQ ID NO: 4920206 - DNA, 25 bp, Homo sapien
agaccaatttcaccccgagggccat

SEQ ID NO: 4920207 - DNA, 25 bp, Homo sapien
ggcagaccaatttcaccccgagggc

SEQ ID NO: 4920208 - DNA, 25 bp, Homo sapien
tgtggacctggaaggccagtatctc

SEQ ID NO: 4920209 - DNA, 25 bp, Homo sapien
gacctggaaggccagtatctccttt

SEQ ID NO: 4920210 - DNA, 25 bp, Homo sapien
ggaaggccagtatctcctttctctc

SEQ ID NO: 4920211 - DNA, 25 bp, Homo sapien
ctgtggacctggaaggccagtatct

SEQ ID NO: 4920212 - DNA, 25 bp, Homo sapien
gtgaaccaacgcctcctgggatacc

SEQ ID NO: 4920213 - DNA, 25 bp, Homo sapien
tggtgaaccaacgcctcctgggata

SEQ ID NO: 4920214 - DNA, 25 bp, Homo sapien
ctggtgaaccaacgcctcctgggat

SEQ ID NO: 4920215 - DNA, 25 bp, Homo sapien
cgtcctggtgaaccaacgcctcctg

SEQ ID NO: 4920216 - DNA, 25 bp, Homo sapien
gatcagttgactgaacagatcagag

SEQ ID NO: 4920217 - DNA, 25 bp, Homo sapien
cagagccacctaaatagccgttttt

SEQ ID NO: 4920218 - DNA, 25 bp, Homo sapien
cctctgccattgaagttctctcttc

SEQ ID NO: 4920219 - DNA, 25 bp, Homo sapien
cagggaacagccatgttcttatccc

SEQ ID NO: 4920220 - DNA, 25 bp, Homo sapien
tccgaagtaggtgggatgacagcca

SEQ ID NO: 4920221 - DNA, 25 bp, Homo sapien
cacacccgacagaaaatccatcttt

SEQ ID NO: 4920222 - DNA, 25 bp, Homo sapien
cctccgaagtaggtgggatgacagc

SEQ ID NO: 4920223 - DNA, 25 bp, Homo sapien
accacacccgacagaaaatccatct

SEQ ID NO: 4920224 - DNA, 25 bp, Homo sapien
cctggaggtcccgaggatccatcct

SEQ ID NO: 4920225 - DNA, 25 bp, Homo sapien
gaggtcccgaggatccatcctttcc

SEQ ID NO: 4920226 - DNA, 25 bp, Homo sapien
ccgaggatccatcctttcccggaag

SEQ ID NO: 4920227 - DNA, 25 bp, Homo sapien
gaggatccatcctttcccggaaggc

SEQ ID NO: 4920228 - DNA, 25 bp, Homo sapien
aggtggtcccagggcgccttgcggt

SEQ ID NO: 4920229 - DNA, 25 bp, Homo sapien
agggcgccttgcggtcccatgcttc

SEQ ID NO: 4920230 - DNA, 25 bp, Homo sapien
gccttgcggtcccatgcttcctgtg

SEQ ID NO: 4920231 - DNA, 25 bp, Homo sapien
tcccagggcgccttgcggtcccatg

SEQ ID NO: 4920232 - DNA, 25 bp, Homo sapien
ccatagagtccagtgctgaataaac

SEQ ID NO: 4920233 - DNA, 25 bp, Homo sapien
tgaatttccatagagtccagtgctg

SEQ ID NO: 4920234 - DNA, 25 bp, Homo sapien
cataaataaacgtgatgactgggcc

SEQ ID NO: 4920235 - DNA, 25 bp, Homo sapien
cattctgagcagctaccgctgcata

SEQ ID NO: 4920236 - DNA, 25 bp, Homo sapien
aatacaaagtctgggcttccgagga

SEQ ID NO: 4920237 - DNA, 25 bp, Homo sapien
gggattcccttatcagtctaacacg

SEQ ID NO: 4920238 - DNA, 25 bp, Homo sapien
tgtaggacattggacctgcaagctg

SEQ ID NO: 4920239 - DNA, 25 bp, Homo sapien
tgcaagctgggttaactctctgagt

SEQ ID NO: 4920240 - DNA, 25 bp, Homo sapien
cgctctcctcgttccccctttgctc

SEQ ID NO: 4920241 - DNA, 25 bp, Homo sapien
ccgctctcctcgttccccctttgct

SEQ ID NO: 4920242 - DNA, 25 bp, Homo sapien
tcgcatacttgacgcgccactgatc

SEQ ID NO: 4920243 - DNA, 25 bp, Homo sapien
tgagctgttcgcatacttgacgcgc

SEQ ID NO: 4920244 - DNA, 25 bp, Homo sapien
tctggatgagctgttcgcatacttg

SEQ ID NO: 4920245 - DNA, 25 bp, Homo sapien
tgttcgcatacttgacgcgccactg

SEQ ID NO: 4920246 - DNA, 25 bp, Homo sapien
tgggtaatgtcagccctggaagtgg

SEQ ID NO: 4920247 - DNA, 25 bp, Homo sapien
cctttacttgggtctcagctgcaga

SEQ ID NO: 4920248 - DNA, 25 bp, Homo sapien
gaggagttttcccaacataagtgaa

SEQ ID NO: 4920249 - DNA, 25 bp, Homo sapien
ctcaatgttattagtaggcacgtcc

SEQ ID NO: 4920250 - DNA, 25 bp, Homo sapien
gtcactgtaagtagggatccgctcc

SEQ ID NO: 4920251 - DNA, 25 bp, Homo sapien
cccttggacagtccggatggatgag

SEQ ID NO: 4920252 - DNA, 25 bp, Homo sapien
gctgggaatctggttgaggatggca

SEQ ID NO: 4920253 - DNA, 25 bp, Homo sapien
tggggtccctggcacgcctgcattt

SEQ ID NO: 4920254 - DNA, 25 bp, Homo sapien
catttccggggaagcctggtgtgcc

SEQ ID NO: 4920255 - DNA, 25 bp, Homo sapien
tagataaccacttggcagattgctc

SEQ ID NO: 4920256 - DNA, 25 bp, Homo sapien
taaccacttggcagattgctcaatt

SEQ ID NO: 4920257 - DNA, 25 bp, Homo sapien
tggctctagataaccacttggcaga

SEQ ID NO: 4920258 - DNA, 25 bp, Homo sapien
gatatggctctagataaccacttgg

SEQ ID NO: 4920259 - DNA, 25 bp, Homo sapien
cagcagcagaggatgccctgctgac

SEQ ID NO: 4920260 - DNA, 25 bp, Homo sapien
tgtgttgtgagggaatgatgccatt

SEQ ID NO: 4920261 - DNA, 25 bp, Homo sapien
agcagaggatgccctgctgacagag

SEQ ID NO: 4920262 - DNA, 25 bp, Homo sapien
gtgttgtgagggaatgatgccattt

SEQ ID NO: 4920263 - DNA, 25 bp, Homo sapien
ttgttcacgtggcagtaatctgctg

SEQ ID NO: 4920264 - DNA, 25 bp, Homo sapien
cgtggcagtaatctgctgtcaccat

SEQ ID NO: 4920265 - DNA, 25 bp, Homo sapien
ttcacgtggcagtaatctgctgtca

SEQ ID NO: 4920266 - DNA, 25 bp, Homo sapien
cacgtggcagtaatctgctgtcacc

SEQ ID NO: 4920267 - DNA, 25 bp, Homo sapien
agaaattatgttgaattggcaaagc

SEQ ID NO: 4920268 - DNA, 25 bp, Homo sapien
gagaaattatgttgaattggcaaag

SEQ ID NO: 4920269 - DNA, 25 bp, Homo sapien
tgagaaattatgttgaattggcaaa

SEQ ID NO: 4920270 - DNA, 25 bp, Homo sapien
cttggaccttgggttccaacgcctg

SEQ ID NO: 4920271 - DNA, 25 bp, Homo sapien
tggaccttgggttccaacgcctgga

SEQ ID NO: 4920272 - DNA, 25 bp, Homo sapien
caaacaataagatcccagaatatgc

SEQ ID NO: 4920273 - DNA, 25 bp, Homo sapien
tctcttggaggctacatgattcacc

SEQ ID NO: 4920274 - DNA, 25 bp, Homo sapien
tagtctgtcctatcgcaactcacac

SEQ ID NO: 4920275 - DNA, 25 bp, Homo sapien
gaagagagctaccttattcatatga

SEQ ID NO: 4920276 - DNA, 25 bp, Homo sapien
gcagaacatgatgaggggtcacaat

SEQ ID NO: 4920277 - DNA, 25 bp, Homo sapien
tctcacaccataggcagaacatgat

SEQ ID NO: 4920278 - DNA, 25 bp, Homo sapien
gggtcacaatatccaggctggccag

SEQ ID NO: 4920279 - DNA, 25 bp, Homo sapien
cccagatgacctggtgggcctcttg

SEQ ID NO: 4920280 - DNA, 25 bp, Homo sapien
gggataaattcttggcacacgatca

SEQ ID NO: 4920281 - DNA, 25 bp, Homo sapien
caatggaaccagagtggaggatttc

SEQ ID NO: 4920282 - DNA, 25 bp, Homo sapien
gatcatatacctctatccaggctga

SEQ ID NO: 4920283 - DNA, 25 bp, Homo sapien
catcatgtttggagcagagtgggca

SEQ ID NO: 4920284 - DNA, 25 bp, Homo sapien
tgtggggagaggaaggaggaagagg

SEQ ID NO: 4920285 - DNA, 25 bp, Homo sapien
tgtgtggggagaggaaggaggaaga

SEQ ID NO: 4920286 - DNA, 25 bp, Homo sapien
ctgtgtggggagaggaaggaggaag

SEQ ID NO: 4920287 - DNA, 25 bp, Homo sapien
gtgtggggagaggaaggaggaagag

SEQ ID NO: 4920288 - DNA, 25 bp, Homo sapien
cagaagaaaccctgaaaactcagca

SEQ ID NO: 4920289 - DNA, 25 bp, Homo sapien
tctcatgttagaagtccatcaccag

SEQ ID NO: 4920290 - DNA, 25 bp, Homo sapien
gaggaagggagagtagggtggtcaa

SEQ ID NO: 4920291 - DNA, 25 bp, Homo sapien
agagtagggtggtcaaggagaaaga

SEQ ID NO: 4920292 - DNA, 25 bp, Homo sapien
tagacgaagggaaagatacattaca

SEQ ID NO: 4920293 - DNA, 25 bp, Homo sapien
cacagagatatcctgctgggtaaaa

SEQ ID NO: 4920294 - DNA, 25 bp, Homo sapien
tccccataaggtttcagacagttag

SEQ ID NO: 4920295 - DNA, 25 bp, Homo sapien
tcacctgggtccttagagacacaga

SEQ ID NO: 4920296 - DNA, 25 bp, Homo sapien
tcatcttggacaggggtgaactctg

SEQ ID NO: 4920297 - DNA, 25 bp, Homo sapien
gacaggggtgaactctggctgatct

SEQ ID NO: 4920298 - DNA, 25 bp, Homo sapien
gtgaactctggctgatctggatggg

SEQ ID NO: 4920299 - DNA, 25 bp, Homo sapien
agctcatcttggacaggggtgaact

SEQ ID NO: 4920300 - DNA, 25 bp, Homo sapien
tcagcaaggttattcctacagcaag

SEQ ID NO: 4920301 - DNA, 25 bp, Homo sapien
ctacagcaagtaggagtaagtgaca

SEQ ID NO: 4920302 - DNA, 25 bp, Homo sapien
ccgtagataaggagaggcaacccct

SEQ ID NO: 4920303 - DNA, 25 bp, Homo sapien
ggaacacactgctggataaatcgtt

SEQ ID NO: 4920304 - DNA, 25 bp, Homo sapien
gactctgggtcaggccatcttgatg

SEQ ID NO: 4920305 - DNA, 25 bp, Homo sapien
tcagaagataggtgggctcctcagt

SEQ ID NO: 4920306 - DNA, 25 bp, Homo sapien
gaagcaactgattacacaccctagt

SEQ ID NO: 4920307 - DNA, 25 bp, Homo sapien
tatactgggtccaagtgatgacaca

SEQ ID NO: 4920308 - DNA, 25 bp, Homo sapien
gatataagtatatttctgccaaagt

SEQ ID NO: 4920309 - DNA, 25 bp, Homo sapien
aagtatatttctgccaaagtaagtc

SEQ ID NO: 4920310 - DNA, 25 bp, Homo sapien
taagatataagtatatttctgccaa

SEQ ID NO: 4920311 - DNA, 25 bp, Homo sapien
tatttctgccaaagtaagtcaagaa

SEQ ID NO: 4920312 - DNA, 25 bp, Homo sapien
gttttatgtgccgaatcactgtggg

SEQ ID NO: 4920313 - DNA, 25 bp, Homo sapien
gatggagtaaaacaactgctacagt

SEQ ID NO: 4920314 - DNA, 25 bp, Homo sapien
aaggtcaggaaggtatagtccttca

SEQ ID NO: 4920315 - DNA, 25 bp, Homo sapien
agcacctgttttatgtgccgaatca

SEQ ID NO: 4920316 - DNA, 25 bp, Homo sapien
tttcaatgaaaaacccttggctagc

SEQ ID NO: 4920317 - DNA, 25 bp, Homo sapien
actctccgcttgactgttgctggtg

SEQ ID NO: 4920318 - DNA, 25 bp, Homo sapien
tttgttatcccaaatctgtgcaggc

SEQ ID NO: 4920319 - DNA, 25 bp, Homo sapien
tacattggcatgagttagagataca

SEQ ID NO: 4920320 - DNA, 25 bp, Homo sapien
taggcattcggctaggataccagaa

SEQ ID NO: 4920321 - DNA, 25 bp, Homo sapien
taaatagtgatcaggagacttacac

SEQ ID NO: 4920322 - DNA, 25 bp, Homo sapien
tccttagcaatggtatcagcagata

SEQ ID NO: 4920323 - DNA, 25 bp, Homo sapien
gacagtcgagtaaactaaaatcagg

SEQ ID NO: 4920324 - DNA, 25 bp, Homo sapien
aactttaggtctcggcttccacatc

SEQ ID NO: 4920325 - DNA, 25 bp, Homo sapien
ccaactttaggtctcggcttccaca

SEQ ID NO: 4920326 - DNA, 25 bp, Homo sapien
ctcctcagagatcaccccccaactt

SEQ ID NO: 4920327 - DNA, 25 bp, Homo sapien
cagagatcaccccccaactttaggt

SEQ ID NO: 4920328 - DNA, 25 bp, Homo sapien
ctccctactggccgccgacgggaat

SEQ ID NO: 4920329 - DNA, 25 bp, Homo sapien
ccggctgattctcagtaccctcacc

SEQ ID NO: 4920330 - DNA, 25 bp, Homo sapien
taccctcacccgacgacacctctgg

SEQ ID NO: 4920331 - DNA, 25 bp, Homo sapien
tgattctcagtaccctcacccgacg

SEQ ID NO: 4920332 - DNA, 25 bp, Homo sapien
tgcttcttttcaagaggtgataaac

SEQ ID NO: 4920333 - DNA, 25 bp, Homo sapien
gtactatcttctggattaattgaag

SEQ ID NO: 4920334 - DNA, 25 bp, Homo sapien
tggattaattgaagcactaatgctt

SEQ ID NO: 4920335 - DNA, 25 bp, Homo sapien
cagggaaagtactatcttctggatt

SEQ ID NO: 4920336 - DNA, 25 bp, Homo sapien
tcttggaaccaggtatacctcccac

SEQ ID NO: 4920337 - DNA, 25 bp, Homo sapien
ccatatattgcctgcactgcaaaga

SEQ ID NO: 4920338 - DNA, 25 bp, Homo sapien
ttcttggaaccaggtatacctccca

SEQ ID NO: 4920339 - DNA, 25 bp, Homo sapien
aaaatccatatattgcctgcactgc

SEQ ID NO: 4920340 - DNA, 25 bp, Homo sapien
gacattcattagtagctatctttaa

SEQ ID NO: 4920341 - DNA, 25 bp, Homo sapien
agacattcattagtagctatcttta

SEQ ID NO: 4920342 - DNA, 25 bp, Homo sapien
cattcattagtagctatctttaaat

SEQ ID NO: 4920343 - DNA, 25 bp, Homo sapien
acattcattagtagctatctttaaa

SEQ ID NO: 4920344 - DNA, 25 bp, Homo sapien
cgatattcgtttgaagaacatcttc

SEQ ID NO: 4920345 - DNA, 25 bp, Homo sapien
gataatgattccctgctattactgt

SEQ ID NO: 4920346 - DNA, 25 bp, Homo sapien
cacccaaacattcttcgatattcgt

SEQ ID NO: 4920347 - DNA, 25 bp, Homo sapien
tcagccaaggataatgattccctgc

SEQ ID NO: 4920348 - DNA, 25 bp, Homo sapien
taggctgtagcaagccgtgactgca

SEQ ID NO: 4920349 - DNA, 25 bp, Homo sapien
ttttaaaaggtacctgaaatgctgc

SEQ ID NO: 4920350 - DNA, 25 bp, Homo sapien
cgtgactggcctaagattgtgtaaa

SEQ ID NO: 4920351 - DNA, 25 bp, Homo sapien
cacaacttatgtcacctggatcaac

SEQ ID NO: 4920352 - DNA, 25 bp, Homo sapien
ggattcaaaccctgagtacaagttc

SEQ ID NO: 4920353 - DNA, 25 bp, Homo sapien
tatgtatggaagctaggattcaaac

SEQ ID NO: 4920354 - DNA, 25 bp, Homo sapien
tttgatctttatgacaattccagga

SEQ ID NO: 4920355 - DNA, 25 bp, Homo sapien
gattgttgtacagacactgttaaac

SEQ ID NO: 4920356 - DNA, 25 bp, Homo sapien
caggagcaggaagcttgtctgacag

SEQ ID NO: 4920357 - DNA, 25 bp, Homo sapien
acagctgatgcaaattttctgcagc

SEQ ID NO: 4920358 - DNA, 25 bp, Homo sapien
gtctgacagctgatgcaaattttct

SEQ ID NO: 4920359 - DNA, 25 bp, Homo sapien
cttgtctgacagctgatgcaaattt

SEQ ID NO: 4920360 - DNA, 25 bp, Homo sapien
gatttcctgctatagtgatctttgc

SEQ ID NO: 4920361 - DNA, 25 bp, Homo sapien
caatttaggaggatctttgtcagaa

SEQ ID NO: 4920362 - DNA, 25 bp, Homo sapien
cagtattatatctaccattgctcta

SEQ ID NO: 4920363 - DNA, 25 bp, Homo sapien
aatgttttaatgctcctacagtagg

SEQ ID NO: 4920364 - DNA, 25 bp, Homo sapien
ccataattcctttgagtcaataaca

SEQ ID NO: 4920365 - DNA, 25 bp, Homo sapien
tccataattcctttgagtcaataac

SEQ ID NO: 4920366 - DNA, 25 bp, Homo sapien
atcttctaaagatacaacattagca

SEQ ID NO: 4920367 - DNA, 25 bp, Homo sapien
cctccataattcctttgagtcaata

SEQ ID NO: 4920368 - DNA, 25 bp, Homo sapien
tgaaaggcctacttggcaaactgtg

SEQ ID NO: 4920369 - DNA, 25 bp, Homo sapien
taaagtgctcagtagcaataagtgg

SEQ ID NO: 4920370 - DNA, 25 bp, Homo sapien
gcagaaagttctacttagtgctatt

SEQ ID NO: 4920371 - DNA, 25 bp, Homo sapien
caataagtggtttgtaggctagtgt

SEQ ID NO: 4920372 - DNA, 25 bp, Homo sapien
ggaactcaaaagtctactcatgctc

SEQ ID NO: 4920373 - DNA, 25 bp, Homo sapien
aaattcaggattagaagagtccacc

SEQ ID NO: 4920374 - DNA, 25 bp, Homo sapien
cctaaggtagtattatgggaagaca

SEQ ID NO: 4920375 - DNA, 25 bp, Homo sapien
tctgagggctggttaataaacagca

SEQ ID NO: 4920376 - DNA, 25 bp, Homo sapien
cagagaaagttcacctgcagattta

SEQ ID NO: 4920377 - DNA, 25 bp, Homo sapien
tgcctcaagagtcccagcctcttga

SEQ ID NO: 4920378 - DNA, 25 bp, Homo sapien
gcagagaaagttcacctgcagattt

SEQ ID NO: 4920379 - DNA, 25 bp, Homo sapien
ctgcctcaagagtcccagcctcttg

SEQ ID NO: 4920380 - DNA, 25 bp, Homo sapien
cacagtgtctcacatagtttgtctt

SEQ ID NO: 4920381 - DNA, 25 bp, Homo sapien
tattctttactagatccttagcaca

SEQ ID NO: 4920382 - DNA, 25 bp, Homo sapien
tctttactagatccttagcacagtg

SEQ ID NO: 4920383 - DNA, 25 bp, Homo sapien
ttctttactagatccttagcacagt

SEQ ID NO: 4920384 - DNA, 25 bp, Homo sapien
ttcaggaaaactaatttcaaatcca

SEQ ID NO: 4920385 - DNA, 25 bp, Homo sapien
ctaaaattcttaagtgtgactccct

SEQ ID NO: 4920386 - DNA, 25 bp, Homo sapien
cctttgatggtatgatctttttggc

SEQ ID NO: 4920387 - DNA, 25 bp, Homo sapien
ttcttatcctttgatggtatgatct

SEQ ID NO: 4920388 - DNA, 25 bp, Homo sapien
aagcagggccataataatggaaaac

SEQ ID NO: 4920389 - DNA, 25 bp, Homo sapien
tcaaattcaatatccgacatatagc

SEQ ID NO: 4920390 - DNA, 25 bp, Homo sapien
cgacatatagcaggagggtagatct

SEQ ID NO: 4920391 - DNA, 25 bp, Homo sapien
aaattctaaagcagggccataataa

SEQ ID NO: 4920392 - DNA, 25 bp, Homo sapien
acagaaaatgtaatctaaaatgaac

SEQ ID NO: 4920393 - DNA, 25 bp, Homo sapien
taaaatgaacatgtaaatgaaagga

SEQ ID NO: 4920394 - DNA, 25 bp, Homo sapien
cagaaaatgtaatctaaaatgaaca

SEQ ID NO: 4920395 - DNA, 25 bp, Homo sapien
aatgaacatgtaaatgaaaggatac

SEQ ID NO: 4920396 - DNA, 25 bp, Homo sapien
aacagcaacacagaattctgtttgg

SEQ ID NO: 4920397 - DNA, 25 bp, Homo sapien
acagcaacacagaattctgtttggt

SEQ ID NO: 4920398 - DNA, 25 bp, Homo sapien
cagcaacacagaattctgtttggta

SEQ ID NO: 4920399 - DNA, 25 bp, Homo sapien
tagaaagctcaataaggccaggcat

SEQ ID NO: 4920400 - DNA, 25 bp, Homo sapien
cttgaagatgagtggtatagcggcc

SEQ ID NO: 4920401 - DNA, 25 bp, Homo sapien
gactagcctggtggttggaccgaaa

SEQ ID NO: 4920402 - DNA, 25 bp, Homo sapien
aaatgcttccacaggcaaggcagga

SEQ ID NO: 4920403 - DNA, 25 bp, Homo sapien
tgttactaatggtacatggcaatac

SEQ ID NO: 4920404 - DNA, 25 bp, Homo sapien
gggaggtggaatcagtatgttacta

SEQ ID NO: 4920405 - DNA, 25 bp, Homo sapien
aatggtacatggcaatacaaaaaga

SEQ ID NO: 4920406 - DNA, 25 bp, Homo sapien
ggtggaatcagtatgttactaatgg

SEQ ID NO: 4920407 - DNA, 25 bp, Homo sapien
tgttttaggctttttagctatatat

SEQ ID NO: 4920408 - DNA, 25 bp, Homo sapien
actttaggtcaagtgcggtggccca

SEQ ID NO: 4920409 - DNA, 25 bp, Homo sapien
ccatgtggcaaggaaaaggctctaa

SEQ ID NO: 4920410 - DNA, 25 bp, Homo sapien
ttcctcaaaattcaagggcgctgtg

SEQ ID NO: 4920411 - DNA, 25 bp, Homo sapien
gatcatctgagaagaccatgtggca

SEQ ID NO: 4920412 - DNA, 25 bp, Homo sapien
ccaatattaatgctcagatttcaag

SEQ ID NO: 4920413 - DNA, 25 bp, Homo sapien
aaaatcagaagttccaacataatgg

SEQ ID NO: 4920414 - DNA, 25 bp, Homo sapien
cataatggtagtttgaagttggaga

SEQ ID NO: 4920415 - DNA, 25 bp, Homo sapien
gcccttaatgatccagcctaatcag

SEQ ID NO: 4920416 - DNA, 25 bp, Homo sapien
tttggttcacactacatggatggag

SEQ ID NO: 4920417 - DNA, 25 bp, Homo sapien
tcaaaggatgaaacctaggaaactg

SEQ ID NO: 4920418 - DNA, 25 bp, Homo sapien
taactgttaagcatcaggtagacac

SEQ ID NO: 4920419 - DNA, 25 bp, Homo sapien
taggaactagtcatatggctatctg

SEQ ID NO: 4920420 - DNA, 25 bp, Homo sapien
tagaagaattgttagtcaacaaaac

SEQ ID NO: 4920421 - DNA, 25 bp, Homo sapien
gcaatattggagtttagagttctaa

SEQ ID NO: 4920422 - DNA, 25 bp, Homo sapien
tattctgctacatgaggataaatta

SEQ ID NO: 4920423 - DNA, 25 bp, Homo sapien
tatttccacaaatatcaagacataa

SEQ ID NO: 4920424 - DNA, 25 bp, Homo sapien
gcaaatgagccattgatctggttgg

SEQ ID NO: 4920425 - DNA, 25 bp, Homo sapien
gagataatagctagaacactctcct

SEQ ID NO: 4920426 - DNA, 25 bp, Homo sapien
gaattaaattgagtgcaaatgagcc

SEQ ID NO: 4920427 - DNA, 25 bp, Homo sapien
gaatcaatgtggctttacatcttct

SEQ ID NO: 4920428 - DNA, 25 bp, Homo sapien
aatttggcttcttctgtctttgttt

SEQ ID NO: 4920429 - DNA, 25 bp, Homo sapien
tcaatttggcttcttctgtctttgt

SEQ ID NO: 4920430 - DNA, 25 bp, Homo sapien
tggcttcttctgtctttgttttcat

SEQ ID NO: 4920431 - DNA, 25 bp, Homo sapien
tttggcttcttctgtctttgttttc

SEQ ID NO: 4920432 - DNA, 25 bp, Homo sapien
gtggaagtgataataagtcaaaagg

SEQ ID NO: 4920433 - DNA, 25 bp, Homo sapien
tggaagtgataataagtcaaaagga

SEQ ID NO: 4920434 - DNA, 25 bp, Homo sapien
aacattagctaactgtttctctctc

SEQ ID NO: 4920435 - DNA, 25 bp, Homo sapien
ttaggcattcttccaaagctaaaac

SEQ ID NO: 4920436 - DNA, 25 bp, Homo sapien
tgtttccttgtgagtactaacagac

SEQ ID NO: 4920437 - DNA, 25 bp, Homo sapien
ctaacagacttttgagttcagcaac

SEQ ID NO: 4920438 - DNA, 25 bp, Homo sapien
ttttgagttcagcaacagaaactgt

SEQ ID NO: 4920439 - DNA, 25 bp, Homo sapien
tccttgtgagtactaacagactttt

SEQ ID NO: 4920440 - DNA, 25 bp, Homo sapien
aagatcagaaaacatgcccaaggtc

SEQ ID NO: 4920441 - DNA, 25 bp, Homo sapien
caatcaagaaggtctgggcaaagga

SEQ ID NO: 4920442 - DNA, 25 bp, Homo sapien
tgcagctcagtgtgtcaagtatcct

SEQ ID NO: 4920443 - DNA, 25 bp, Homo sapien
agtaagctgctagtcttgctccaga

SEQ ID NO: 4920444 - DNA, 25 bp, Homo sapien
tggagtgcactggcccaatctccgc

SEQ ID NO: 4920445 - DNA, 25 bp, Homo sapien
ctttttccagagacaagagtctcac

SEQ ID NO: 4920446 - DNA, 25 bp, Homo sapien
gagtgcactggcccaatctccgctc

SEQ ID NO: 4920447 - DNA, 25 bp, Homo sapien
gctggagtgcactggcccaatctcc

SEQ ID NO: 4920448 - DNA, 25 bp, Homo sapien
ttttgaagaacatgcctttctggcc

SEQ ID NO: 4920449 - DNA, 25 bp, Homo sapien
cttgaggaattaggttccactggac

SEQ ID NO: 4920450 - DNA, 25 bp, Homo sapien
ccagaggattggtttccattagact

SEQ ID NO: 4920451 - DNA, 25 bp, Homo sapien
gaggaattaggttccactggactaa

SEQ ID NO: 4920452 - DNA, 25 bp, Homo sapien
caatgtgattgagtcccgaggaccc

SEQ ID NO: 4920453 - DNA, 25 bp, Homo sapien
gaatcggtaaaggttgaagatctcc

SEQ ID NO: 4920454 - DNA, 25 bp, Homo sapien
gaggaccctctttgtggcccagcaa

SEQ ID NO: 4920455 - DNA, 25 bp, Homo sapien
ccagcaactgttcagatgaatgagg

SEQ ID NO: 4920456 - DNA, 25 bp, Homo sapien
caggactaagttctggtgtcaaaac

SEQ ID NO: 4920457 - DNA, 25 bp, Homo sapien
gataatgacatactgaggctttctc

SEQ ID NO: 4920458 - DNA, 25 bp, Homo sapien
ctttctcaaaaggtaagacctgaag

SEQ ID NO: 4920459 - DNA, 25 bp, Homo sapien
agtttcccaggactaagttctggtg

SEQ ID NO: 4920460 - DNA, 25 bp, Homo sapien
ccaggatctgacgaaactacaggag

SEQ ID NO: 4920461 - DNA, 25 bp, Homo sapien
tcaatcgggatacttcagttcgaag

SEQ ID NO: 4920462 - DNA, 25 bp, Homo sapien
ctttagatctccgtttcaatcggga

SEQ ID NO: 4920463 - DNA, 25 bp, Homo sapien
gaagagggctcaacacagtaggtac

SEQ ID NO: 4920464 - DNA, 25 bp, Homo sapien
gattactattaccagttgtctgaga

SEQ ID NO: 4920465 - DNA, 25 bp, Homo sapien
caagtcactggtaaggaccgttctg

SEQ ID NO: 4920466 - DNA, 25 bp, Homo sapien
aggaattggaaccaatggacaagtc

SEQ ID NO: 4920467 - DNA, 25 bp, Homo sapien
tctggatgtcacatgatgatgatag

SEQ ID NO: 4920468 - DNA, 25 bp, Homo sapien
ctgaactggtctttgtagcaagttt

SEQ ID NO: 4920469 - DNA, 25 bp, Homo sapien
atgtttttgattcatgcatactttt

SEQ ID NO: 4920470 - DNA, 25 bp, Homo sapien
ttttgattcatgcatacttttttga

SEQ ID NO: 4920471 - DNA, 25 bp, Homo sapien
tttgattcatgcatacttttttgac

SEQ ID NO: 4920472 - DNA, 25 bp, Homo sapien
ttgatgtttttgattcatgcatact

SEQ ID NO: 4920473 - DNA, 25 bp, Homo sapien
gacagacaggttcattaagacaaaa

SEQ ID NO: 4920474 - DNA, 25 bp, Homo sapien
cattcattttgctgtgctaaaagac

SEQ ID NO: 4920475 - DNA, 25 bp, Homo sapien
aaagatctaacatttacatggtcag

SEQ ID NO: 4920476 - DNA, 25 bp, Homo sapien
cagctttagagttcaatcctgtgaa

SEQ ID NO: 4920477 - DNA, 25 bp, Homo sapien
ctcggtaatactgtgtttcttcagg

SEQ ID NO: 4920478 - DNA, 25 bp, Homo sapien
agagatttcaaagagacgctggctg

SEQ ID NO: 4920479 - DNA, 25 bp, Homo sapien
ctttagatagaacttagagatttca

SEQ ID NO: 4920480 - DNA, 25 bp, Homo sapien
gaaacattcatgagtctcggtaata

SEQ ID NO: 4920481 - DNA, 25 bp, Homo sapien
taaatctggcagcaagtatacgctc

SEQ ID NO: 4920482 - DNA, 25 bp, Homo sapien
tcaatttgcagttaacccatggatg

SEQ ID NO: 4920483 - DNA, 25 bp, Homo sapien
gccattagtagagaagataccgtac

SEQ ID NO: 4920484 - DNA, 25 bp, Homo sapien
aaaccatcgtcttgagtgactgacc

SEQ ID NO: 4920485 - DNA, 25 bp, Homo sapien
tgcctaggcctggtcctattaggac

SEQ ID NO: 4920486 - DNA, 25 bp, Homo sapien
taggtaagtcaccttccctcagaag

SEQ ID NO: 4920487 - DNA, 25 bp, Homo sapien
gatttagtcccttgttctgttgaac

SEQ ID NO: 4920488 - DNA, 25 bp, Homo sapien
atttgttctagttgctgcctaggcc

SEQ ID NO: 4920489 - DNA, 25 bp, Homo sapien
cctccaccgtgagcatccactaatg

SEQ ID NO: 4920490 - DNA, 25 bp, Homo sapien
ccaccgtgagcatccactaatgctg

SEQ ID NO: 4920491 - DNA, 25 bp, Homo sapien
tccaccgtgagcatccactaatgct

SEQ ID NO: 4920492 - DNA, 25 bp, Homo sapien
tcctccaccgtgagcatccactaat

SEQ ID NO: 4920493 - DNA, 25 bp, Homo sapien
gcattttacaatctgcacattaaat

SEQ ID NO: 4920494 - DNA, 25 bp, Homo sapien
aaatcattctacacgtattaatgtg

SEQ ID NO: 4920495 - DNA, 25 bp, Homo sapien
tgattagggacagactacaacaaca

SEQ ID NO: 4920496 - DNA, 25 bp, Homo sapien
tattaaatacacttgagattattct

SEQ ID NO: 4920497 - DNA, 25 bp, Homo sapien
atttcttcaaatagaccccttgaag

SEQ ID NO: 4920498 - DNA, 25 bp, Homo sapien
tgtacagcattgttgtttgctgttt

SEQ ID NO: 4920499 - DNA, 25 bp, Homo sapien
ctgtacagcattgttgtttgctgtt

SEQ ID NO: 4920500 - DNA, 25 bp, Homo sapien
catttcttcaaatagaccccttgaa

SEQ ID NO: 4920501 - DNA, 25 bp, Homo sapien
ttgtcttttctaatacccagtcaat

SEQ ID NO: 4920502 - DNA, 25 bp, Homo sapien
tgcttgtcttttctaatacccagtc

SEQ ID NO: 4920503 - DNA, 25 bp, Homo sapien
ttgcttgtcttttctaatacccagt

SEQ ID NO: 4920504 - DNA, 25 bp, Homo sapien
gcttgtcttttctaatacccagtca

SEQ ID NO: 4920505 - DNA, 25 bp, Homo sapien
tatagtaacactttacaaaatatgt

SEQ ID NO: 4920506 - DNA, 25 bp, Homo sapien
aacatagcatccctcaaactataca

SEQ ID NO: 4920507 - DNA, 25 bp, Homo sapien
aatagctccatccaatttataattg

SEQ ID NO: 4920508 - DNA, 25 bp, Homo sapien
gaaaagaagtagtgaataatagctc

SEQ ID NO: 4920509 - DNA, 25 bp, Homo sapien
tgtaactgtatgagtgcacaaaggc

SEQ ID NO: 4920510 - DNA, 25 bp, Homo sapien
taacgatcatctctgcagcgttgct

SEQ ID NO: 4920511 - DNA, 25 bp, Homo sapien
tctaagtgctagctctgtgaggtgc

SEQ ID NO: 4920512 - DNA, 25 bp, Homo sapien
gatgacagccctacatccaatggaa

SEQ ID NO: 4920513 - DNA, 25 bp, Homo sapien
gacaagtcaaggctggacgctacta

SEQ ID NO: 4920514 - DNA, 25 bp, Homo sapien
agtcaaggctggacgctactaagta

SEQ ID NO: 4920515 - DNA, 25 bp, Homo sapien
aaaaagacaagtcaaggctggacgc

SEQ ID NO: 4920516 - DNA, 25 bp, Homo sapien
aagacaagtcaaggctggacgctac

SEQ ID NO: 4920517 - DNA, 25 bp, Homo sapien
gaatcaaccgagtcactttgaggaa

SEQ ID NO: 4920518 - DNA, 25 bp, Homo sapien
cacaaactcataagtctggatcatg

SEQ ID NO: 4920519 - DNA, 25 bp, Homo sapien
catgcttgggtacagtcaatgaatc

SEQ ID NO: 4920520 - DNA, 25 bp, Homo sapien
tgctggtgtgtatgacacaaactca

SEQ ID NO: 4920521 - DNA, 25 bp, Homo sapien
tacatgaagtatgagttaactgctc

SEQ ID NO: 4920522 - DNA, 25 bp, Homo sapien
caacaatatgtaatctaaggtgctc

SEQ ID NO: 4920523 - DNA, 25 bp, Homo sapien
ttcaaatgctgaaaagtcaagtccc

SEQ ID NO: 4920524 - DNA, 25 bp, Homo sapien
taaggtgctcggttctacatgaagt

SEQ ID NO: 4920525 - DNA, 25 bp, Homo sapien
agtttcagcaactacaagggatacc

SEQ ID NO: 4920526 - DNA, 25 bp, Homo sapien
tctcaagagtcgtatgtaactgtcc

SEQ ID NO: 4920527 - DNA, 25 bp, Homo sapien
gacaccatctgtagtgagcagcgca

SEQ ID NO: 4920528 - DNA, 25 bp, Homo sapien
tgccaccagagaacgtgatgtcaga

SEQ ID NO: 4920529 - DNA, 25 bp, Homo sapien
aatgcaagtagtccatgtgttgaaa

SEQ ID NO: 4920530 - DNA, 25 bp, Homo sapien
gcaagtagtccatgtgttgaaattc

SEQ ID NO: 4920531 - DNA, 25 bp, Homo sapien
cgtctcaatgcaagtagtccatgtg

SEQ ID NO: 4920532 - DNA, 25 bp, Homo sapien
gtctcgtctcaatgcaagtagtcca

SEQ ID NO: 4920533 - DNA, 25 bp, Homo sapien
taatgctgccttactcttattcggc

SEQ ID NO: 4920534 - DNA, 25 bp, Homo sapien
tattcggcatttgactgctaatgat

SEQ ID NO: 4920535 - DNA, 25 bp, Homo sapien
tgatccttgaaaaacggtgattagg

SEQ ID NO: 4920536 - DNA, 25 bp, Homo sapien
tgctaatgatgtgcttgcaagccca

SEQ ID NO: 4920537 - DNA, 25 bp, Homo sapien
gctcaaaatgtcttcagatgatgga

SEQ ID NO: 4920538 - DNA, 25 bp, Homo sapien
ccatacattatgagaatggattttc

SEQ ID NO: 4920539 - DNA, 25 bp, Homo sapien
aaaaccaggagtgccgtttgaccat

SEQ ID NO: 4920540 - DNA, 25 bp, Homo sapien
tacagtctccttatgaaaagctcaa

SEQ ID NO: 4920541 - DNA, 25 bp, Homo sapien
gattgccatggttcatacttgtctc

SEQ ID NO: 4920542 - DNA, 25 bp, Homo sapien
attttagcaagaaattcgtagctga

SEQ ID NO: 4920543 - DNA, 25 bp, Homo sapien
tgggaaaatggattgattgccatgg

SEQ ID NO: 4920544 - DNA, 25 bp, Homo sapien
ttcgtagctgatcgctgggactgag

SEQ ID NO: 4920545 - DNA, 25 bp, Homo sapien
tttccattcctcacacaaaatcttc

SEQ ID NO: 4920546 - DNA, 25 bp, Homo sapien
ctcttttccattcctcacacaaaat

SEQ ID NO: 4920547 - DNA, 25 bp, Homo sapien
aaatcttctcttttccagacaaact

SEQ ID NO: 4920548 - DNA, 25 bp, Homo sapien
tcttctcttttccagacaaactcat

SEQ ID NO: 4920549 - DNA, 25 bp, Homo sapien
gcctttcactaccatattcagatta

SEQ ID NO: 4920550 - DNA, 25 bp, Homo sapien
tatcaactttctgagacatgggatc

SEQ ID NO: 4920551 - DNA, 25 bp, Homo sapien
ggaattgactccaagctgttttgct

SEQ ID NO: 4920552 - DNA, 25 bp, Homo sapien
tgccactgaatagtcaggaattgac

SEQ ID NO: 4920553 - DNA, 25 bp, Homo sapien
gaaaggtatggaggacagtcacttg

SEQ ID NO: 4920554 - DNA, 25 bp, Homo sapien
tactactggcagatggtcgtggcag

SEQ ID NO: 4920555 - DNA, 25 bp, Homo sapien
tgtccataatactactggcagatgg

SEQ ID NO: 4920556 - DNA, 25 bp, Homo sapien
gaacatccgcttttctctgtccata

SEQ ID NO: 4920557 - DNA, 25 bp, Homo sapien
agtgcagctcataataccactttca

SEQ ID NO: 4920558 - DNA, 25 bp, Homo sapien
gcgttgcggcaattaaacaagataa

SEQ ID NO: 4920559 - DNA, 25 bp, Homo sapien
ccttgtttataaagtgcagctcata

SEQ ID NO: 4920560 - DNA, 25 bp, Homo sapien
tatttcactgcaatagaaccatgga

SEQ ID NO: 4920561 - DNA, 25 bp, Homo sapien
cctaagtagttgggattacaggcat

SEQ ID NO: 4920562 - DNA, 25 bp, Homo sapien
ttcaagcgatcctcagcctcctaag

SEQ ID NO: 4920563 - DNA, 25 bp, Homo sapien
tgatccattcatctcagcctcccca

SEQ ID NO: 4920564 - DNA, 25 bp, Homo sapien
atccattcatctcagcctccccaaa

SEQ ID NO: 4920565 - DNA, 25 bp, Homo sapien
gctgtgcctcatcccattcccttgg

SEQ ID NO: 4920566 - DNA, 25 bp, Homo sapien
gcagctgtgcctcatcccattccct

SEQ ID NO: 4920567 - DNA, 25 bp, Homo sapien
agctgtgcctcatcccattcccttg

SEQ ID NO: 4920568 - DNA, 25 bp, Homo sapien
tgtgcctcatcccattcccttggga

SEQ ID NO: 4920569 - DNA, 25 bp, Homo sapien
cctgccctgtgtcttttgcttgtgc

SEQ ID NO: 4920570 - DNA, 25 bp, Homo sapien
ctgccctgtgtcttttgcttgtgct

SEQ ID NO: 4920571 - DNA, 25 bp, Homo sapien
atcagagtctaaccactcccctgtg

SEQ ID NO: 4920572 - DNA, 25 bp, Homo sapien
tgtcctctgtatgagctgtttgctt

SEQ ID NO: 4920573 - DNA, 25 bp, Homo sapien
tctgtatgagctgtttgcttttcct

SEQ ID NO: 4920574 - DNA, 25 bp, Homo sapien
ttcccatcagagtctaaccactccc

SEQ ID NO: 4920575 - DNA, 25 bp, Homo sapien
gcacctcttgacataactccaggca

SEQ ID NO: 4920576 - DNA, 25 bp, Homo sapien
tgatgatgactccaggaatagcaaa

SEQ ID NO: 4920577 - DNA, 25 bp, Homo sapien
gaaagtgttcattgtgtctgaccca

SEQ ID NO: 4920578 - DNA, 25 bp, Homo sapien
gattattccgcagagtgaaagtgtt

SEQ ID NO: 4920579 - DNA, 25 bp, Homo sapien
tcaagtccttgtctcgggttctgct

SEQ ID NO: 4920580 - DNA, 25 bp, Homo sapien
tacatggagcaatgatggatggcaa

SEQ ID NO: 4920581 - DNA, 25 bp, Homo sapien
gacagcgagttcaaccttcttcagc

SEQ ID NO: 4920582 - DNA, 25 bp, Homo sapien
gggaagccaaactaagacagcgagt

SEQ ID NO: 4920583 - DNA, 25 bp, Homo sapien
ctctagctctaactccattaagcat

SEQ ID NO: 4920584 - DNA, 25 bp, Homo sapien
tgtagcttcagagaccgaaaagatc

SEQ ID NO: 4920585 - DNA, 25 bp, Homo sapien
ttcagagaccgaaaagatcttggca

SEQ ID NO: 4920586 - DNA, 25 bp, Homo sapien
ttcttctgtagcttcagagaccgaa

SEQ ID NO: 4920587 - DNA, 25 bp, Homo sapien
ccatgtgttgggcaaggtcccctga

SEQ ID NO: 4920588 - DNA, 25 bp, Homo sapien
caggtgacacaagatgaagggctct

SEQ ID NO: 4920589 - DNA, 25 bp, Homo sapien
ggtaaagtcttggtacactaactca

SEQ ID NO: 4920590 - DNA, 25 bp, Homo sapien
gtttgcagttgacctgatgccacag

SEQ ID NO: 4920591 - DNA, 25 bp, Homo sapien
tatgtgtgggacatcactaacgggt

SEQ ID NO: 4920592 - DNA, 25 bp, Homo sapien
tgagtgagacaactgctttcgcagg

SEQ ID NO: 4920593 - DNA, 25 bp, Homo sapien
ctcttgatagaattcggcagtaagc

SEQ ID NO: 4920594 - DNA, 25 bp, Homo sapien
caaaaccagctcttgatagaattcg

SEQ ID NO: 4920595 - DNA, 25 bp, Homo sapien
aaccagctcttgatagaattcggca

SEQ ID NO: 4920596 - DNA, 25 bp, Homo sapien
gatagaattcggcagtaagcaggtt

SEQ ID NO: 4920597 - DNA, 25 bp, Homo sapien
ccagcatacatcacggaaatgttat

SEQ ID NO: 4920598 - DNA, 25 bp, Homo sapien
catcacggaaatgttatttccagca

SEQ ID NO: 4920599 - DNA, 25 bp, Homo sapien
ctcccagcatacatcacggaaatgt

SEQ ID NO: 4920600 - DNA, 25 bp, Homo sapien
gcatacatcacggaaatgttatttc

SEQ ID NO: 4920601 - DNA, 25 bp, Homo sapien
ctgctgtgttctcctaagtgactcc

SEQ ID NO: 4920602 - DNA, 25 bp, Homo sapien
tattgcttgtgattagatctctctg

SEQ ID NO: 4920603 - DNA, 25 bp, Homo sapien
taagtgactcctgaactctaatctc

SEQ ID NO: 4920604 - DNA, 25 bp, Homo sapien
tctaatctctgcatattgcttgtga

SEQ ID NO: 4920605 - DNA, 25 bp, Homo sapien
tcctgtgactcgatccctttgcttc

SEQ ID NO: 4920606 - DNA, 25 bp, Homo sapien
ttcagctgtaggaggaagctcagca

SEQ ID NO: 4920607 - DNA, 25 bp, Homo sapien
aggtgccatcctgtgactcgatccc

SEQ ID NO: 4920608 - DNA, 25 bp, Homo sapien
gagacagggatgctcaggtgccatc

SEQ ID NO: 4920609 - DNA, 25 bp, Homo sapien
caccaacactcccaaggtgtgagtt

SEQ ID NO: 4920610 - DNA, 25 bp, Homo sapien
tcactgttggtttcacttgttcctc

SEQ ID NO: 4920611 - DNA, 25 bp, Homo sapien
tatctggctttatgctggtccccag

SEQ ID NO: 4920612 - DNA, 25 bp, Homo sapien
tgtgagttgatctgtcctccccact

SEQ ID NO: 4920613 - DNA, 25 bp, Homo sapien
gcagcaaattgcattgctaacattg

SEQ ID NO: 4920614 - DNA, 25 bp, Homo sapien
gggctaagacaaatgattgttttct

SEQ ID NO: 4920615 - DNA, 25 bp, Homo sapien
ctttgtacgtttttctgttgcagca

SEQ ID NO: 4920616 - DNA, 25 bp, Homo sapien
aaggtttgcatttgtattctgaggg

SEQ ID NO: 4920617 - DNA, 25 bp, Homo sapien
agtcagaggtccctttacaaactgt

SEQ ID NO: 4920618 - DNA, 25 bp, Homo sapien
attggcaacattattacaagtcaga

SEQ ID NO: 4920619 - DNA, 25 bp, Homo sapien
aatcaattcccttttcggcagcatc

SEQ ID NO: 4920620 - DNA, 25 bp, Homo sapien
caaatgagcattcatgacccttggt

SEQ ID NO: 4920621 - DNA, 25 bp, Homo sapien
gaccctggagctgtattgaccttgg

SEQ ID NO: 4920622 - DNA, 25 bp, Homo sapien
cctctgaaagatagcaatccatgga

SEQ ID NO: 4920623 - DNA, 25 bp, Homo sapien
ccatggagatgatgcaccgttgatc

SEQ ID NO: 4920624 - DNA, 25 bp, Homo sapien
gaattctagctcaaccacttgctgg

SEQ ID NO: 4920625 - DNA, 25 bp, Homo sapien
tgtcagaggctaaaatttctgctgg

SEQ ID NO: 4920626 - DNA, 25 bp, Homo sapien
aagttagtctgtgtttattgtttgc

SEQ ID NO: 4920627 - DNA, 25 bp, Homo sapien
gtgtcagaggctaaaatttctgctg

SEQ ID NO: 4920628 - DNA, 25 bp, Homo sapien
tgtttgtttatttgcctagaagtta

SEQ ID NO: 4920629 - DNA, 25 bp, Homo sapien
agcacagggatcaggtcctaatgca

SEQ ID NO: 4920630 - DNA, 25 bp, Homo sapien
cttctttcatcaggtaacaagagat

SEQ ID NO: 4920631 - DNA, 25 bp, Homo sapien
tcatcaggtaacaagagatgacagc

SEQ ID NO: 4920632 - DNA, 25 bp, Homo sapien
caggtcctaatgcacagcctttcat

SEQ ID NO: 4920633 - DNA, 25 bp, Homo sapien
ctccaggtcacagaatggcttctga

SEQ ID NO: 4920634 - DNA, 25 bp, Homo sapien
tgaaactctagctatcatggccact

SEQ ID NO: 4920635 - DNA, 25 bp, Homo sapien
actctagctatcatggccactgctg

SEQ ID NO: 4920636 - DNA, 25 bp, Homo sapien
ggcttctgaaactctagctatcatg

SEQ ID NO: 4920637 - DNA, 25 bp, Homo sapien
gtataatgccttgttctattaaaca

SEQ ID NO: 4920638 - DNA, 25 bp, Homo sapien
agaagagtgccgtaaactgtttcct

SEQ ID NO: 4920639 - DNA, 25 bp, Homo sapien
gaaatctaactgtagtggctttaca

SEQ ID NO: 4920640 - DNA, 25 bp, Homo sapien
ggctgctgagtactgaataatttta

SEQ ID NO: 4920641 - DNA, 25 bp, Homo sapien
tcttttaaggcacccactggtagtg

SEQ ID NO: 4920642 - DNA, 25 bp, Homo sapien
ggcaaacaggtctatgtccacaggc

SEQ ID NO: 4920643 - DNA, 25 bp, Homo sapien
gactgcaacccctaggctgagatgg

SEQ ID NO: 4920644 - DNA, 25 bp, Homo sapien
gggaccctgggtctaaactggctga

SEQ ID NO: 4920645 - DNA, 25 bp, Homo sapien
caaagcgactcttcttgctatagta

SEQ ID NO: 4920646 - DNA, 25 bp, Homo sapien
agatgatccaaagcgactcttcttg

SEQ ID NO: 4920647 - DNA, 25 bp, Homo sapien
tcttgctatagtattctgagatcat

SEQ ID NO: 4920648 - DNA, 25 bp, Homo sapien
aaatagatgatccaaagcgactctt

SEQ ID NO: 4920649 - DNA, 25 bp, Homo sapien
ctcccacgtagtgatattttaccct

SEQ ID NO: 4920650 - DNA, 25 bp, Homo sapien
tacccttccattgagtgaccaacct

SEQ ID NO: 4920651 - DNA, 25 bp, Homo sapien
tccagtgttgctgcatctctaaagt

SEQ ID NO: 4920652 - DNA, 25 bp, Homo sapien
tgttccgcccacaaatccagtgttg

SEQ ID NO: 4920653 - DNA, 25 bp, Homo sapien
ggcccctccagccttgaatgagtgt

SEQ ID NO: 4920654 - DNA, 25 bp, Homo sapien
tgttgtgatccctgttttagactag

SEQ ID NO: 4920655 - DNA, 25 bp, Homo sapien
tgccagagtccatcaatttaaaacc

SEQ ID NO: 4920656 - DNA, 25 bp, Homo sapien
tggtcgggttgcctctcatggcagc

SEQ ID NO: 4920657 - DNA, 25 bp, Homo sapien
tctgaagctgggatcaccaggatgt

SEQ ID NO: 4920658 - DNA, 25 bp, Homo sapien
gcaacagtgaactcaagtccccgtg

SEQ ID NO: 4920659 - DNA, 25 bp, Homo sapien
accaggatgtggttagtatgttgcg

SEQ ID NO: 4920660 - DNA, 25 bp, Homo sapien
aatgaatgtcgctgggattcaaagc

SEQ ID NO: 4920661 - DNA, 25 bp, Homo sapien
cagtgtgagctttgatcttgacttc

SEQ ID NO: 4920662 - DNA, 25 bp, Homo sapien
tgcagtgtgagctttgatcttgact

SEQ ID NO: 4920663 - DNA, 25 bp, Homo sapien
cacatcaaaagcagaaagtttggtt

SEQ ID NO: 4920664 - DNA, 25 bp, Homo sapien
tggaggttggcccacatcaaaagca

SEQ ID NO: 4920665 - DNA, 25 bp, Homo sapien
ttactctgtaggagtcaggcatcct

SEQ ID NO: 4920666 - DNA, 25 bp, Homo sapien
gtctgtagaaatggctcaggcaccc

SEQ ID NO: 4920667 - DNA, 25 bp, Homo sapien
ttctccccaagaaacaatgtaggtg

SEQ ID NO: 4920668 - DNA, 25 bp, Homo sapien
cacaggtctcaaaagtggaagtgac

SEQ ID NO: 4920669 - DNA, 25 bp, Homo sapien
tattcatccatgtgtgcacttattc

SEQ ID NO: 4920670 - DNA, 25 bp, Homo sapien
aaggcctcacattaagactcttgac

SEQ ID NO: 4920671 - DNA, 25 bp, Homo sapien
gcaggaggccttgtattcataaaag

SEQ ID NO: 4920672 - DNA, 25 bp, Homo sapien
gggtactgatatgaccaggcttatg

SEQ ID NO: 4920673 - DNA, 25 bp, Homo sapien
agtgaggaaggtagatgtcaagtta

SEQ ID NO: 4920674 - DNA, 25 bp, Homo sapien
tcctctttctaagggctgtgaatct

SEQ ID NO: 4920675 - DNA, 25 bp, Homo sapien
tttctaagggctgtgaatctgaagc

SEQ ID NO: 4920676 - DNA, 25 bp, Homo sapien
aaggtagatgtcaagttatgttttc

SEQ ID NO: 4920677 - DNA, 25 bp, Homo sapien
gcagacattccccatagcctgtagg

SEQ ID NO: 4920678 - DNA, 25 bp, Homo sapien
tctctatggatctaatttgagcaaa

SEQ ID NO: 4920679 - DNA, 25 bp, Homo sapien
ggagtctcattctctatggatctaa

SEQ ID NO: 4920680 - DNA, 25 bp, Homo sapien
acattccccatagcctgtaggtcca

SEQ ID NO: 4920681 - DNA, 25 bp, Homo sapien
ctctgcccattccttcagtttgttc

SEQ ID NO: 4920682 - DNA, 25 bp, Homo sapien
ccttcagtttgttcatgaaggggaa

SEQ ID NO: 4920683 - DNA, 25 bp, Homo sapien
tttgttcatgaaggggaagggagcc

SEQ ID NO: 4920684 - DNA, 25 bp, Homo sapien
gcccattccttcagtttgttcatga

SEQ ID NO: 4920685 - DNA, 25 bp, Homo sapien
tatcaacccctgaataacaaagtca

SEQ ID NO: 4920686 - DNA, 25 bp, Homo sapien
tatgtcaactcctgattgaatatca

SEQ ID NO: 4920687 - DNA, 25 bp, Homo sapien
gtcatatgtgctgtcccgatcctta

SEQ ID NO: 4920688 - DNA, 25 bp, Homo sapien
catatgtgctgtcccgatccttact

SEQ ID NO: 4920689 - DNA, 25 bp, Homo sapien
gtccgttagagcttccccttcagca

SEQ ID NO: 4920690 - DNA, 25 bp, Homo sapien
gatggtctggaacctcgctgtcaca

SEQ ID NO: 4920691 - DNA, 25 bp, Homo sapien
cctggaatgtttgcctgagatggtc

SEQ ID NO: 4920692 - DNA, 25 bp, Homo sapien
cactttctccaagggtggaagtggg

SEQ ID NO: 4920693 - DNA, 25 bp, Homo sapien
gagtggaccatgagacctgcttaga

SEQ ID NO: 4920694 - DNA, 25 bp, Homo sapien
taaggacaggaggtttaagccactc

SEQ ID NO: 4920695 - DNA, 25 bp, Homo sapien
gagtccatctcgaaccagaagcgtg

SEQ ID NO: 4920696 - DNA, 25 bp, Homo sapien
caggtaagaactccgcagaggcagc

SEQ ID NO: 4920697 - DNA, 25 bp, Homo sapien
gatcatgacatataatagccttaga

SEQ ID NO: 4920698 - DNA, 25 bp, Homo sapien
agtgtatgagcgaattcccaggatc

SEQ ID NO: 4920699 - DNA, 25 bp, Homo sapien
tcccaggatcagctagaataagact

SEQ ID NO: 4920700 - DNA, 25 bp, Homo sapien
tattcttgctctgtgggtaagaagc

SEQ ID NO: 4920701 - DNA, 25 bp, Homo sapien
tcaatgcgtggatttaggtagggga

SEQ ID NO: 4920702 - DNA, 25 bp, Homo sapien
gatttaggtaggggagcagacacta

SEQ ID NO: 4920703 - DNA, 25 bp, Homo sapien
tccatcagaactacaagtagtgggt

SEQ ID NO: 4920704 - DNA, 25 bp, Homo sapien
cagaactacaagtagtgggttagga

SEQ ID NO: 4920705 - DNA, 25 bp, Homo sapien
ccctgcgtggtgctccagaggctca

SEQ ID NO: 4920706 - DNA, 25 bp, Homo sapien
ccagggctcctgtttgcaggactca

SEQ ID NO: 4920707 - DNA, 25 bp, Homo sapien
cagtggtgccctgcgtggtgctcca

SEQ ID NO: 4920708 - DNA, 25 bp, Homo sapien
ttgcaggactcagcggtgcatccat

SEQ ID NO: 4920709 - DNA, 25 bp, Homo sapien
gcattgtgggcttcgagcactctct

SEQ ID NO: 4920710 - DNA, 25 bp, Homo sapien
tctttctaaagcttgggtgggaaca

SEQ ID NO: 4920711 - DNA, 25 bp, Homo sapien
tgctccctcctttctggatctagcg

SEQ ID NO: 4920712 - DNA, 25 bp, Homo sapien
tagcttggaacctaaagtagggagc

SEQ ID NO: 4920713 - DNA, 25 bp, Homo sapien
agacagctggtgtagtcccttgctg

SEQ ID NO: 4920714 - DNA, 25 bp, Homo sapien
acagacagctggtgtagtcccttgc

SEQ ID NO: 4920715 - DNA, 25 bp, Homo sapien
agctggtgtagtcccttgctgtcat

SEQ ID NO: 4920716 - DNA, 25 bp, Homo sapien
acagctggtgtagtcccttgctgtc

SEQ ID NO: 4920717 - DNA, 25 bp, Homo sapien
cttgaaaaggtagatcaccattatg

SEQ ID NO: 4920718 - DNA, 25 bp, Homo sapien
aaaggtagatcaccattatgagccc

SEQ ID NO: 4920719 - DNA, 25 bp, Homo sapien
tgagcccagcaagggcaactaacgc

SEQ ID NO: 4920720 - DNA, 25 bp, Homo sapien
gatcaccattatgagcccagcaagg

SEQ ID NO: 4920721 - DNA, 25 bp, Homo sapien
gtagcggcagcatcacggaccctct

SEQ ID NO: 4920722 - DNA, 25 bp, Homo sapien
tccagggcccctgtagcggcagcat

SEQ ID NO: 4920723 - DNA, 25 bp, Homo sapien
agggcccctgtagcggcagcatcac

SEQ ID NO: 4920724 - DNA, 25 bp, Homo sapien
ctgtagcggcagcatcacggaccct

SEQ ID NO: 4920725 - DNA, 25 bp, Homo sapien
aggacaactgaaccctgaggaatat

SEQ ID NO: 4920726 - DNA, 25 bp, Homo sapien
gtttctgcagtgtatacttcaggac

SEQ ID NO: 4920727 - DNA, 25 bp, Homo sapien
accctgaggaatatcagcataggcc

SEQ ID NO: 4920728 - DNA, 25 bp, Homo sapien
acatcctctggtttctgcagtgtat

SEQ ID NO: 4920729 - DNA, 25 bp, Homo sapien
gaaatggtagttagttggatgctct

SEQ ID NO: 4920730 - DNA, 25 bp, Homo sapien
tctgagtgtaaggagctaggcagcc

SEQ ID NO: 4920731 - DNA, 25 bp, Homo sapien
agccgtgtccctgaggagatcctcc

SEQ ID NO: 4920732 - DNA, 25 bp, Homo sapien
gaaacacctggtgcttcagaaatgg

SEQ ID NO: 4920733 - DNA, 25 bp, Homo sapien
gtactgcttgttcatgcaagtctga

SEQ ID NO: 4920734 - DNA, 25 bp, Homo sapien
tactgcttgttcatgcaagtctgaa

SEQ ID NO: 4920735 - DNA, 25 bp, Homo sapien
ttcttcatggagacacatcttcccc

SEQ ID NO: 4920736 - DNA, 25 bp, Homo sapien
accacatagaaggaaacctgccaag

SEQ ID NO: 4920737 - DNA, 25 bp, Homo sapien
gatgaatagtccaccacatagaagg

SEQ ID NO: 4920738 - DNA, 25 bp, Homo sapien
taatttgcactgcttttcccccttg

SEQ ID NO: 4920739 - DNA, 25 bp, Homo sapien
ccccttgtgtgatgaatagtccacc

SEQ ID NO: 4920740 - DNA, 25 bp, Homo sapien
ctgcaagcaggtggctatgcttctc

SEQ ID NO: 4920741 - DNA, 25 bp, Homo sapien
ttattgggctgctgattccccgaaa

SEQ ID NO: 4920742 - DNA, 25 bp, Homo sapien
gcaagcaggtggctatgcttctcat

SEQ ID NO: 4920743 - DNA, 25 bp, Homo sapien
actattattgggctgctgattcccc

SEQ ID NO: 4920744 - DNA, 25 bp, Homo sapien
cactaggcagttgaatagacactga

SEQ ID NO: 4920745 - DNA, 25 bp, Homo sapien
tatgcacacccataacaagatgtag

SEQ ID NO: 4920746 - DNA, 25 bp, Homo sapien
caagatgtagcacctcattgggaac

SEQ ID NO: 4920747 - DNA, 25 bp, Homo sapien
taaaacttcatagactgccatacac

SEQ ID NO: 4920748 - DNA, 25 bp, Homo sapien
ctattcttccaagctcacagtctta

SEQ ID NO: 4920749 - DNA, 25 bp, Homo sapien
ccaagctcacagtcttaaagtgttt

SEQ ID NO: 4920750 - DNA, 25 bp, Homo sapien
ttcttccaagctcacagtcttaaag

SEQ ID NO: 4920751 - DNA, 25 bp, Homo sapien
cttccaagctcacagtcttaaagtg

SEQ ID NO: 4920752 - DNA, 25 bp, Homo sapien
gatgcccaagggaatatgaatttga

SEQ ID NO: 4920753 - DNA, 25 bp, Homo sapien
gcctaattctcacccatatgcatgg

SEQ ID NO: 4920754 - DNA, 25 bp, Homo sapien
gaaaattggcatactcctgtacagg

SEQ ID NO: 4920755 - DNA, 25 bp, Homo sapien
gaaaggtccaatagtacagctacag

SEQ ID NO: 4920756 - DNA, 25 bp, Homo sapien
taggacactttacagagactttaat

SEQ ID NO: 4920757 - DNA, 25 bp, Homo sapien
gggagtgggtccatggaacttctta

SEQ ID NO: 4920758 - DNA, 25 bp, Homo sapien
gacactttacagagactttaattta

SEQ ID NO: 4920759 - DNA, 25 bp, Homo sapien
tgggtccatggaacttcttatgctg

SEQ ID NO: 4920760 - DNA, 25 bp, Homo sapien
taccctcactgggtataccaactct

SEQ ID NO: 4920761 - DNA, 25 bp, Homo sapien
ttccataccctcactgggtatacca

SEQ ID NO: 4920762 - DNA, 25 bp, Homo sapien
aggtttcattatataggcatttttg

SEQ ID NO: 4920763 - DNA, 25 bp, Homo sapien
gaggtttcattatataggcattttt

SEQ ID NO: 4920764 - DNA, 25 bp, Homo sapien
tgtggacccatcactctaatctgtg

SEQ ID NO: 4920765 - DNA, 25 bp, Homo sapien
tctggtggttgtttgaggaccctga

SEQ ID NO: 4920766 - DNA, 25 bp, Homo sapien
ccatagtcacatcgcatttcccttg

SEQ ID NO: 4920767 - DNA, 25 bp, Homo sapien
ggctctagggtatgatccttgcctc

SEQ ID NO: 4920768 - DNA, 25 bp, Homo sapien
taacttctcatgttacccacttttg

SEQ ID NO: 4920769 - DNA, 25 bp, Homo sapien
ctttaacttctcatgttacccactt

SEQ ID NO: 4920770 - DNA, 25 bp, Homo sapien
catgttacccacttttgcatatggg

SEQ ID NO: 4920771 - DNA, 25 bp, Homo sapien
cttctcatgttacccacttttgcat

SEQ ID NO: 4920772 - DNA, 25 bp, Homo sapien
ttccacattcaaactgcagctgttt

SEQ ID NO: 4920773 - DNA, 25 bp, Homo sapien
tcccaaggagactaagcatggcttt

SEQ ID NO: 4920774 - DNA, 25 bp, Homo sapien
tcatatgatggtgttctagaaagga

SEQ ID NO: 4920775 - DNA, 25 bp, Homo sapien
gaaaggatcttcagtcggctagccc

SEQ ID NO: 4920776 - DNA, 25 bp, Homo sapien
tgcattccattctttagcagtgaat

SEQ ID NO: 4920777 - DNA, 25 bp, Homo sapien
ttagcagtgaatcaataaatccagc

SEQ ID NO: 4920778 - DNA, 25 bp, Homo sapien
agtgaatcaataaatccagcacaca

SEQ ID NO: 4920779 - DNA, 25 bp, Homo sapien
cattccattctttagcagtgaatca

SEQ ID NO: 4920780 - DNA, 25 bp, Homo sapien
ggtctctcacaaagttgcagccgag

SEQ ID NO: 4920781 - DNA, 25 bp, Homo sapien
taagctctcacatatgtttgtcggc

SEQ ID NO: 4920782 - DNA, 25 bp, Homo sapien
catcagaagtatcagctagggaaat

SEQ ID NO: 4920783 - DNA, 25 bp, Homo sapien
tgcagccgagctgtcaaacagtatt

SEQ ID NO: 4920784 - DNA, 25 bp, Homo sapien
ggatatagttcaagtgttcctgtct

SEQ ID NO: 4920785 - DNA, 25 bp, Homo sapien
tgtccaaacatctttcgggatatag

SEQ ID NO: 4920786 - DNA, 25 bp, Homo sapien
gctctctatacttggaatatctggc

SEQ ID NO: 4920787 - DNA, 25 bp, Homo sapien
gctgtaatccaaacttctgcaatgt

SEQ ID NO: 4920788 - DNA, 25 bp, Homo sapien
cagactcaccagaaccacaactggg

SEQ ID NO: 4920789 - DNA, 25 bp, Homo sapien
ttgcagagactacacccatcagagg

SEQ ID NO: 4920790 - DNA, 25 bp, Homo sapien
agactacacccatcagaggcacaac

SEQ ID NO: 4920791 - DNA, 25 bp, Homo sapien
acccatcagaggcacaaccactgtg

SEQ ID NO: 4920792 - DNA, 25 bp, Homo sapien
ccacatattgttttagagccttccc

SEQ ID NO: 4920793 - DNA, 25 bp, Homo sapien
tgagactcagatacacctacgtcac

SEQ ID NO: 4920794 - DNA, 25 bp, Homo sapien
gataattgcatcgtctagaaactga

SEQ ID NO: 4920795 - DNA, 25 bp, Homo sapien
ttatcgtgggcaggagtcatgagac

SEQ ID NO: 4920796 - DNA, 25 bp, Homo sapien
tgctatcacagaaccatacactggg

SEQ ID NO: 4920797 - DNA, 25 bp, Homo sapien
caacaggttatccagagcaagtcag

SEQ ID NO: 4920798 - DNA, 25 bp, Homo sapien
tcaaaccatggtatgagggaaactg

SEQ ID NO: 4920799 - DNA, 25 bp, Homo sapien
tatgaactaataacctcccaatggc

SEQ ID NO: 4920800 - DNA, 25 bp, Homo sapien
acccatttgctttgccgggtacctg

SEQ ID NO: 4920801 - DNA, 25 bp, Homo sapien
catgtaaaaagggttgctgactttg

SEQ ID NO: 4920802 - DNA, 25 bp, Homo sapien
tgactttgggtaagagtgagctttg

SEQ ID NO: 4920803 - DNA, 25 bp, Homo sapien
ctttgccgggtacctgaaaaagcat

SEQ ID NO: 4920804 - DNA, 25 bp, Homo sapien
tacatgaggcatgcagatagctgaa

SEQ ID NO: 4920805 - DNA, 25 bp, Homo sapien
caaagtgctcatagagtgacccagg

SEQ ID NO: 4920806 - DNA, 25 bp, Homo sapien
gaaaatgaccattgacgttggaaag

SEQ ID NO: 4920807 - DNA, 25 bp, Homo sapien
cagtggacaccaaaaagacaatgca

SEQ ID NO: 4920808 - DNA, 25 bp, Homo sapien
gatgttgtagatcaacggcatccat

SEQ ID NO: 4920809 - DNA, 25 bp, Homo sapien
cataggatgttgtagatcaacggca

SEQ ID NO: 4920810 - DNA, 25 bp, Homo sapien
ggatgttgtagatcaacggcatcca

SEQ ID NO: 4920811 - DNA, 25 bp, Homo sapien
taggatgttgtagatcaacggcatc

SEQ ID NO: 4920812 - DNA, 25 bp, Homo sapien
ccaagatatggcttgagagcaacgt

SEQ ID NO: 4920813 - DNA, 25 bp, Homo sapien
aagatatggcttgagagcaacgtct

SEQ ID NO: 4920814 - DNA, 25 bp, Homo sapien
caagatatggcttgagagcaacgtc

SEQ ID NO: 4920815 - DNA, 25 bp, Homo sapien
gatatggcttgagagcaacgtctaa

SEQ ID NO: 4920816 - DNA, 25 bp, Homo sapien
catctgccgtgtatgcacaaggcag

SEQ ID NO: 4920817 - DNA, 25 bp, Homo sapien
ttcttcatctgccgtgtatgcacaa

SEQ ID NO: 4920818 - DNA, 25 bp, Homo sapien
tctgccgtgtatgcacaaggcaggg

SEQ ID NO: 4920819 - DNA, 25 bp, Homo sapien
gcttcttcatctgccgtgtatgcac

SEQ ID NO: 4920820 - DNA, 25 bp, Homo sapien
gataagaattgacgagacccaggag

SEQ ID NO: 4920821 - DNA, 25 bp, Homo sapien
taagcctcttcgatggccagagaca

SEQ ID NO: 4920822 - DNA, 25 bp, Homo sapien
gtctctgactctagcaacttggcag

SEQ ID NO: 4920823 - DNA, 25 bp, Homo sapien
cagtcttgtgcttccccgtgttggc

SEQ ID NO: 4920824 - DNA, 25 bp, Homo sapien
ggcagacatttggtacctatctaaa

SEQ ID NO: 4920825 - DNA, 25 bp, Homo sapien
gctattggtgttatcttcatggtca

SEQ ID NO: 4920826 - DNA, 25 bp, Homo sapien
caatcaatgtttgtgtaaattctcc

SEQ ID NO: 4920827 - DNA, 25 bp, Homo sapien
agcaaaacggcagacatttggtacc

SEQ ID NO: 4920828 - DNA, 25 bp, Homo sapien
gctaaatctcctgcaggtattagga

SEQ ID NO: 4920829 - DNA, 25 bp, Homo sapien
aacatgctaaatctcctgcaggtat

SEQ ID NO: 4920830 - DNA, 25 bp, Homo sapien
catgctaaatctcctgcaggtatta

SEQ ID NO: 4920831 - DNA, 25 bp, Homo sapien
tgctaaatctcctgcaggtattagg

SEQ ID NO: 4920832 - DNA, 25 bp, Homo sapien
gctggcccctgagtgttctcagatt

SEQ ID NO: 4920833 - DNA, 25 bp, Homo sapien
tgttctcagattgtgagctcttaat

SEQ ID NO: 4920834 - DNA, 25 bp, Homo sapien
gcccctgagtgttctcagattgtga

SEQ ID NO: 4920835 - DNA, 25 bp, Homo sapien
gtgttctcagattgtgagctcttaa

SEQ ID NO: 4920836 - DNA, 25 bp, Homo sapien
caggtcccacccttcatctctgctc

SEQ ID NO: 4920837 - DNA, 25 bp, Homo sapien
gaagaccccctgacattctggtcca

SEQ ID NO: 4920838 - DNA, 25 bp, Homo sapien
ccctgacattctggtccacattaag

SEQ ID NO: 4920839 - DNA, 25 bp, Homo sapien
ttcactcacagaagaccccctgaca

SEQ ID NO: 4920840 - DNA, 25 bp, Homo sapien
caaagcaacgtccatcctcttctgt

SEQ ID NO: 4920841 - DNA, 25 bp, Homo sapien
gcaatgcttcgtaatcatgaatggg

SEQ ID NO: 4920842 - DNA, 25 bp, Homo sapien
ccaaagcacaactacctctgtggag

SEQ ID NO: 4920843 - DNA, 25 bp, Homo sapien
tacaaagttgatacattaccaaagc

SEQ ID NO: 4920844 - DNA, 25 bp, Homo sapien
cgaacactctattccagtggagaac

SEQ ID NO: 4920845 - DNA, 25 bp, Homo sapien
gcttgggtgtgttaaactgtatacc

SEQ ID NO: 4920846 - DNA, 25 bp, Homo sapien
agtggagaacatcctatatgccagc

SEQ ID NO: 4920847 - DNA, 25 bp, Homo sapien
cttgacgaacactctattccagtgg

SEQ ID NO: 4920848 - DNA, 25 bp, Homo sapien
tgttccaatgtggattgggtttcct

SEQ ID NO: 4920849 - DNA, 25 bp, Homo sapien
ccaaattacatccatgtcttaagaa

SEQ ID NO: 4920850 - DNA, 25 bp, Homo sapien
caccaaattacatccatgtcttaag

SEQ ID NO: 4920851 - DNA, 25 bp, Homo sapien
ccaatgtggattgggtttcctctga

SEQ ID NO: 4920852 - DNA, 25 bp, Homo sapien
tcaccagagcatgacacagcatact

SEQ ID NO: 4920853 - DNA, 25 bp, Homo sapien
catgacacagcatactgagagccaa

SEQ ID NO: 4920854 - DNA, 25 bp, Homo sapien
cccatgagggtatgtaaaagttagc

SEQ ID NO: 4920855 - DNA, 25 bp, Homo sapien
tagctgagaactctctggggatctc

SEQ ID NO: 4920856 - DNA, 25 bp, Homo sapien
tgaagaattatggtctgcagggaaa

SEQ ID NO: 4920857 - DNA, 25 bp, Homo sapien
attatggtctgcagggaaaaatcac

SEQ ID NO: 4920858 - DNA, 25 bp, Homo sapien
tatctctgaagaattatggtctgca

SEQ ID NO: 4920859 - DNA, 25 bp, Homo sapien
tctgcctttccttacttctgcattt

SEQ ID NO: 4920860 - DNA, 25 bp, Homo sapien
taaacttattattactctcagacac

SEQ ID NO: 4920861 - DNA, 25 bp, Homo sapien
acagtaacagggactaatgattaaa

SEQ ID NO: 4920862 - DNA, 25 bp, Homo sapien
tagcaaagttaaatttatgacttag

SEQ ID NO: 4920863 - DNA, 25 bp, Homo sapien
tatgacttagattatatggcaggac

SEQ ID NO: 4920864 - DNA, 25 bp, Homo sapien
tctagttccatgaaactgtttagct

SEQ ID NO: 4920865 - DNA, 25 bp, Homo sapien
ttagctttggtacgggaaattatca

SEQ ID NO: 4920866 - DNA, 25 bp, Homo sapien
tcctttactaagaaccatctagttc

SEQ ID NO: 4920867 - DNA, 25 bp, Homo sapien
tttggtacgggaaattatcacagcc

SEQ ID NO: 4920868 - DNA, 25 bp, Homo sapien
cactgggagtatcaatcttccaaag

SEQ ID NO: 4920869 - DNA, 25 bp, Homo sapien
gcagttagtggtgccaaaagattca

SEQ ID NO: 4920870 - DNA, 25 bp, Homo sapien
gggatcttcataaaacaatccaccc

SEQ ID NO: 4920871 - DNA, 25 bp, Homo sapien
ttccaaaggctaaagctaatgtttg

SEQ ID NO: 4920872 - DNA, 25 bp, Homo sapien
caaggtcactttctgcacaaacatt

SEQ ID NO: 4920873 - DNA, 25 bp, Homo sapien
tcttcatgacccatctcaaggtcac

SEQ ID NO: 4920874 - DNA, 25 bp, Homo sapien
cacaaacatttgtaattcccccaag

SEQ ID NO: 4920875 - DNA, 25 bp, Homo sapien
taaatttctccgtgactgtggcttc

SEQ ID NO: 4920876 - DNA, 25 bp, Homo sapien
tagtgccatattccgaagcaatctt

SEQ ID NO: 4920877 - DNA, 25 bp, Homo sapien
cagtggcatggttagtgccatattc

SEQ ID NO: 4920878 - DNA, 25 bp, Homo sapien
aacagtggcatggttagtgccatat

SEQ ID NO: 4920879 - DNA, 25 bp, Homo sapien
catggttagtgccatattccgaagc

SEQ ID NO: 4920880 - DNA, 25 bp, Homo sapien
aatattaactatgaacttcctttag

SEQ ID NO: 4920881 - DNA, 25 bp, Homo sapien
gggctacgcatagcatagtgttaaa

SEQ ID NO: 4920882 - DNA, 25 bp, Homo sapien
gcatgaatctccagggctacgcata

SEQ ID NO: 4920883 - DNA, 25 bp, Homo sapien
aattagactgcatgaatctccaggg

SEQ ID NO: 4920884 - DNA, 25 bp, Homo sapien
aaatgatccatgtttggccgggcgc

SEQ ID NO: 4920885 - DNA, 25 bp, Homo sapien
aaagtcaagaacctggaccagccta

SEQ ID NO: 4920886 - DNA, 25 bp, Homo sapien
gatcattgttctgcgcagcctgctg

SEQ ID NO: 4920887 - DNA, 25 bp, Homo sapien
gacttcattctgacaccaacaggga

SEQ ID NO: 4920888 - DNA, 25 bp, Homo sapien
cactgtgctcgtcttcctcagacat

SEQ ID NO: 4920889 - DNA, 25 bp, Homo sapien
agtggtattcaggagctcctcggcc

SEQ ID NO: 4920890 - DNA, 25 bp, Homo sapien
gtgtagacagtggtattcaggagct

SEQ ID NO: 4920891 - DNA, 25 bp, Homo sapien
gcctggctgcgctgagaagctattt

SEQ ID NO: 4920892 - DNA, 25 bp, Homo sapien
tagctgatattctgaaggtgtgatt

SEQ ID NO: 4920893 - DNA, 25 bp, Homo sapien
ctagctgatattctgaaggtgtgat

SEQ ID NO: 4920894 - DNA, 25 bp, Homo sapien
agctgatattctgaaggtgtgattc

SEQ ID NO: 4920895 - DNA, 25 bp, Homo sapien
gctgatattctgaaggtgtgattca

SEQ ID NO: 4920896 - DNA, 25 bp, Homo sapien
cagtggcccattcctattggagtca

SEQ ID NO: 4920897 - DNA, 25 bp, Homo sapien
tcactttaagttcaaatggcagatt

SEQ ID NO: 4920898 - DNA, 25 bp, Homo sapien
cactttaagttcaaatggcagattg

SEQ ID NO: 4920899 - DNA, 25 bp, Homo sapien
ccattcctattggagtcactttaag

SEQ ID NO: 4920900 - DNA, 25 bp, Homo sapien
aaagccactagtgtctccagaacca

SEQ ID NO: 4920901 - DNA, 25 bp, Homo sapien
caaagccactagtgtctccagaacc

SEQ ID NO: 4920902 - DNA, 25 bp, Homo sapien
tcaaagccactagtgtctccagaac

SEQ ID NO: 4920903 - DNA, 25 bp, Homo sapien
cttccatcacaaagcttacacactg

SEQ ID NO: 4920904 - DNA, 25 bp, Homo sapien
gttgccgaaatgctctattcttttc

SEQ ID NO: 4920905 - DNA, 25 bp, Homo sapien
ctgttgccgaaatgctctattcttt

SEQ ID NO: 4920906 - DNA, 25 bp, Homo sapien
tgttgccgaaatgctctattctttt

SEQ ID NO: 4920907 - DNA, 25 bp, Homo sapien
caagctgaagagagatatatgacag

SEQ ID NO: 4920908 - DNA, 25 bp, Homo sapien
tggtcctctgttggctctgccaact

SEQ ID NO: 4920909 - DNA, 25 bp, Homo sapien
ctggaaagggctggtcctctgttgg

SEQ ID NO: 4920910 - DNA, 25 bp, Homo sapien
ttgcctctggcataagacaagctga

SEQ ID NO: 4920911 - DNA, 25 bp, Homo sapien
ctggaagttattattacagctgaaa

SEQ ID NO: 4920912 - DNA, 25 bp, Homo sapien
tgaaaagattctcctctgaggcaga

SEQ ID NO: 4920913 - DNA, 25 bp, Homo sapien
agattctcctctgaggcagaaactg

SEQ ID NO: 4920914 - DNA, 25 bp, Homo sapien
acagctgaaaagattctcctctgag

SEQ ID NO: 4920915 - DNA, 25 bp, Homo sapien
caatgacatttcaacgtcttcatca

SEQ ID NO: 4920916 - DNA, 25 bp, Homo sapien
tgtgccaatgacatttcaacgtctt

SEQ ID NO: 4920917 - DNA, 25 bp, Homo sapien
cttctcccttaattaccatatcttg

SEQ ID NO: 4920918 - DNA, 25 bp, Homo sapien
tttggatctttatcaagctcttctc

SEQ ID NO: 4920919 - DNA, 25 bp, Homo sapien
tgcttggagggaccttttggagaaa

SEQ ID NO: 4920920 - DNA, 25 bp, Homo sapien
tcttacgggtactgtgtcctggacc

SEQ ID NO: 4920921 - DNA, 25 bp, Homo sapien
ggagaaactgacatactcaattatc

SEQ ID NO: 4920922 - DNA, 25 bp, Homo sapien
ccttatctgcttggagggacctttt

SEQ ID NO: 4920923 - DNA, 25 bp, Homo sapien
tccataaacagctggttgaacttca

SEQ ID NO: 4920924 - DNA, 25 bp, Homo sapien
ggtggttccataaacagctggttga

SEQ ID NO: 4920925 - DNA, 25 bp, Homo sapien
tgagaagaaggtggttccataaaca

SEQ ID NO: 4920926 - DNA, 25 bp, Homo sapien
gaaggtggttccataaacagctggt

SEQ ID NO: 4920927 - DNA, 25 bp, Homo sapien
ccgtctgcccatcgctgcaaagagg

SEQ ID NO: 4920928 - DNA, 25 bp, Homo sapien
agaggagagcaagcccttcagaggc

SEQ ID NO: 4920929 - DNA, 25 bp, Homo sapien
ttcctgctgccgtctgcccatcgct

SEQ ID NO: 4920930 - DNA, 25 bp, Homo sapien
ccatcgctgcaaagaggagagcaag

SEQ ID NO: 4920931 - DNA, 25 bp, Homo sapien
tattgaatccatcagctgttgctgc

SEQ ID NO: 4920932 - DNA, 25 bp, Homo sapien
ggctgcccaaacttataacctattg

SEQ ID NO: 4920933 - DNA, 25 bp, Homo sapien
gcataacagctaccccatattgcat

SEQ ID NO: 4920934 - DNA, 25 bp, Homo sapien
caatacttggctgcccaaacttata

SEQ ID NO: 4920935 - DNA, 25 bp, Homo sapien
ggttggcctatttctgagcatagtg

SEQ ID NO: 4920936 - DNA, 25 bp, Homo sapien
ttggcctatttctgagcatagtgtg

SEQ ID NO: 4920937 - DNA, 25 bp, Homo sapien
ggcctatttctgagcatagtgtgac

SEQ ID NO: 4920938 - DNA, 25 bp, Homo sapien
ctatttctgagcatagtgtgacaca

SEQ ID NO: 4920939 - DNA, 25 bp, Homo sapien
tgcttttgcgatgccgtgaccaaca

SEQ ID NO: 4920940 - DNA, 25 bp, Homo sapien
agcaaaacatctgcacagatctttt

SEQ ID NO: 4920941 - DNA, 25 bp, Homo sapien
gatgccgtgaccaacaatctggcat

SEQ ID NO: 4920942 - DNA, 25 bp, Homo sapien
ttttcttgcttttgcgatgccgtga

SEQ ID NO: 4920943 - DNA, 25 bp, Homo sapien
aatgttggctctggctggaaggtct

SEQ ID NO: 4920944 - DNA, 25 bp, Homo sapien
taagagcaatagactctcaagctca

SEQ ID NO: 4920945 - DNA, 25 bp, Homo sapien
ggttggagactgtagtcactggctt

SEQ ID NO: 4920946 - DNA, 25 bp, Homo sapien
tatgccttggcactgcttttaagag

SEQ ID NO: 4920947 - DNA, 25 bp, Homo sapien
tcactggatttcacctctgactagt

SEQ ID NO: 4920948 - DNA, 25 bp, Homo sapien
tactgagcagcttgccagcaaagct

SEQ ID NO: 4920949 - DNA, 25 bp, Homo sapien
gatttcacctctgactagtgtgcca

SEQ ID NO: 4920950 - DNA, 25 bp, Homo sapien
cagaccaacatcctattatgtccag

SEQ ID NO: 4920951 - DNA, 25 bp, Homo sapien
gtctgttccataagaatgaagccag

SEQ ID NO: 4920952 - DNA, 25 bp, Homo sapien
gtttgaccagcagggctttttctac

SEQ ID NO: 4920953 - DNA, 25 bp, Homo sapien
cagaacagtgcgtgtactgtgtgga

SEQ ID NO: 4920954 - DNA, 25 bp, Homo sapien
gacagacctgctttctgtttgacca

SEQ ID NO: 4920955 - DNA, 25 bp, Homo sapien
tcacttccctggactaaaaaccatg

SEQ ID NO: 4920956 - DNA, 25 bp, Homo sapien
cagagcatgtaacttcaatagtcgc

SEQ ID NO: 4920957 - DNA, 25 bp, Homo sapien
taacaatagtctacagtctcacgga

SEQ ID NO: 4920958 - DNA, 25 bp, Homo sapien
cacggactatgctccttttgccata

SEQ ID NO: 4920959 - DNA, 25 bp, Homo sapien
agtagaatgccctttgaaatgctgg

SEQ ID NO: 4920960 - DNA, 25 bp, Homo sapien
tagaatgccctttgaaatgctggcc

SEQ ID NO: 4920961 - DNA, 25 bp, Homo sapien
gtagaatgccctttgaaatgctggc

SEQ ID NO: 4920962 - DNA, 25 bp, Homo sapien
tacccaaggctgagaccactgtact

SEQ ID NO: 4920963 - DNA, 25 bp, Homo sapien
ttctacccaaggctgagaccactgt

SEQ ID NO: 4920964 - DNA, 25 bp, Homo sapien
ccaaggctgagaccactgtacttac

SEQ ID NO: 4920965 - DNA, 25 bp, Homo sapien
tctacccaaggctgagaccactgta

SEQ ID NO: 4920966 - DNA, 25 bp, Homo sapien
tagcctatgatgtaggaataccctc

SEQ ID NO: 4920967 - DNA, 25 bp, Homo sapien
atctgagcagatgtagcctatgatg

SEQ ID NO: 4920968 - DNA, 25 bp, Homo sapien
gcagatgtagcctatgatgtaggaa

SEQ ID NO: 4920969 - DNA, 25 bp, Homo sapien
tgtagcctatgatgtaggaataccc

SEQ ID NO: 4920970 - DNA, 25 bp, Homo sapien
aaaatgtgaagcttggttgactgat

SEQ ID NO: 4920971 - DNA, 25 bp, Homo sapien
caatatacctatcacactttggaag

SEQ ID NO: 4920972 - DNA, 25 bp, Homo sapien
tccttactgtgcatccgcctgaaag

SEQ ID NO: 4920973 - DNA, 25 bp, Homo sapien
cctatacaacctaacttatggactg

SEQ ID NO: 4920974 - DNA, 25 bp, Homo sapien
gagaataattggaaccacactcttt

SEQ ID NO: 4920975 - DNA, 25 bp, Homo sapien
cagtttatccaaacggataattact

SEQ ID NO: 4920976 - DNA, 25 bp, Homo sapien
tcctgagaataattggaaccacact

SEQ ID NO: 4920977 - DNA, 25 bp, Homo sapien
gtatcctgagaataattggaaccac

SEQ ID NO: 4920978 - DNA, 25 bp, Homo sapien
aagttccaagtctggtgctcccagc

SEQ ID NO: 4920979 - DNA, 25 bp, Homo sapien
aagtctggtgctcccagcaccttca

SEQ ID NO: 4920980 - DNA, 25 bp, Homo sapien
gcaccttcaggcattggttaatgta

SEQ ID NO: 4920981 - DNA, 25 bp, Homo sapien
cattggttaatgtaccatgtgggag

SEQ ID NO: 4920982 - DNA, 25 bp, Homo sapien
tgagccagggctccgaaatgggtcc

SEQ ID NO: 4920983 - DNA, 25 bp, Homo sapien
gctgggttgggatggataatcaaca

SEQ ID NO: 4920984 - DNA, 25 bp, Homo sapien
acaggagggcgggtctgaaaggagg

SEQ ID NO: 4920985 - DNA, 25 bp, Homo sapien
gggaattcgtcacggcagttcccgc

SEQ ID NO: 4920986 - DNA, 25 bp, Homo sapien
ggtgggagatctgggggcgccgtct

SEQ ID NO: 4920987 - DNA, 25 bp, Homo sapien
ggcgccgtctcgagcgcccagccga

SEQ ID NO: 4920988 - DNA, 25 bp, Homo sapien
ggacactgcccggtgggagatctgg

SEQ ID NO: 4920989 - DNA, 25 bp, Homo sapien
ctcgagcgcccagccgatgaacggg

SEQ ID NO: 4920990 - DNA, 25 bp, Homo sapien
gtggcaccgcgcacgccggcgcttc

SEQ ID NO: 4920991 - DNA, 25 bp, Homo sapien
acgccggcgcttctctcctcagctg

SEQ ID NO: 4920992 - DNA, 25 bp, Homo sapien
tggcaccgcgcacgccggcgcttct

SEQ ID NO: 4920993 - DNA, 25 bp, Homo sapien
cgcacgccggcgcttctctcctcag

SEQ ID NO: 4920994 - DNA, 25 bp, Homo sapien
ggaggagggcgcgcatccctcctct

SEQ ID NO: 4920995 - DNA, 25 bp, Homo sapien
ccgcgcgctgcgcttcggcagctgc

SEQ ID NO: 4920996 - DNA, 25 bp, Homo sapien
cggtggcacccgcagataggagcgg

SEQ ID NO: 4920997 - DNA, 25 bp, Homo sapien
gggtccctgacgcaggcggtggcac

SEQ ID NO: 4920998 - DNA, 25 bp, Homo sapien
ggctgaggacgactttatgaccaag

SEQ ID NO: 4920999 - DNA, 25 bp, Homo sapien
ttggccggtcgtctcaaattcatct

SEQ ID NO: 4921000 - DNA, 25 bp, Homo sapien
tgaagtgcaacggaaacataaagag

SEQ ID NO: 4921001 - DNA, 25 bp, Homo sapien
ttattacctcaattttggaaactgc

SEQ ID NO: 4921002 - DNA, 25 bp, Homo sapien
tttctcccaattctgcgcttcctgg

SEQ ID NO: 4921003 - DNA, 25 bp, Homo sapien
cctggcttcgagcagcccattgaac

SEQ ID NO: 4921004 - DNA, 25 bp, Homo sapien
acagccccagccaaagacttttctc

SEQ ID NO: 4921005 - DNA, 25 bp, Homo sapien
tgaaccagagacttgaaacagcccc

SEQ ID NO: 4921006 - DNA, 25 bp, Homo sapien
ccacagggagtttatcgcttggagg

SEQ ID NO: 4921007 - DNA, 25 bp, Homo sapien
tgtaacgcgggagttcagggaaatc

SEQ ID NO: 4921008 - DNA, 25 bp, Homo sapien
ctccgccgccagaggaaagtaagga

SEQ ID NO: 4921009 - DNA, 25 bp, Homo sapien
ggaaatccaagaggcgagggctccc

SEQ ID NO: 4921010 - DNA, 25 bp, Homo sapien
taacaagtggtggaccagcgcgatc

SEQ ID NO: 4921011 - DNA, 25 bp, Homo sapien
gaaaggctttgacacttgacgtcag

SEQ ID NO: 4921012 - DNA, 25 bp, Homo sapien
ggctgtcgaaggctccaggtacaca

SEQ ID NO: 4921013 - DNA, 25 bp, Homo sapien
gatctttttagagtcccagccggct

SEQ ID NO: 4921014 - DNA, 25 bp, Homo sapien
cttcaaggtcctgtcgagttccaaa

SEQ ID NO: 4921015 - DNA, 25 bp, Homo sapien
gagttccaaagaagtccacccctca

SEQ ID NO: 4921016 - DNA, 25 bp, Homo sapien
tcatttccagtttattcgacttttc

SEQ ID NO: 4921017 - DNA, 25 bp, Homo sapien
tatatgtgataaggactaagaaccc

SEQ ID NO: 4921018 - DNA, 25 bp, Homo sapien
tattgctaagtcacatctactcaag

SEQ ID NO: 4921019 - DNA, 25 bp, Homo sapien
gaaaacataacaggtatgggttcca

SEQ ID NO: 4921020 - DNA, 25 bp, Homo sapien
agttctagaaccacatatacagagg

SEQ ID NO: 4921021 - DNA, 25 bp, Homo sapien
gatgtcaaaacctgaaagggatggg

SEQ ID NO: 4921022 - DNA, 25 bp, Homo sapien
tctaaaggccgctgtgtatacacat

SEQ ID NO: 4921023 - DNA, 25 bp, Homo sapien
agccctgggccaattcacaacattg

SEQ ID NO: 4921024 - DNA, 25 bp, Homo sapien
tcatactgaggagacactgacaggc

SEQ ID NO: 4921025 - DNA, 25 bp, Homo sapien
caaatcttcagagggccaagccctg

SEQ ID NO: 4921026 - DNA, 25 bp, Homo sapien
tgcagaacaagtgcataacccagag

SEQ ID NO: 4921027 - DNA, 25 bp, Homo sapien
actcaagcaaccattgtcacagtgg

SEQ ID NO: 4921028 - DNA, 25 bp, Homo sapien
tgacactgtctatgtgaccccaacg

SEQ ID NO: 4921029 - DNA, 25 bp, Homo sapien
ggaaggtgttctcagtctacggccc

SEQ ID NO: 4921030 - DNA, 25 bp, Homo sapien
tacggccctacatcctgtcttgaat

SEQ ID NO: 4921031 - DNA, 25 bp, Homo sapien
gtcctctgttatatttgaccttcaa

SEQ ID NO: 4921032 - DNA, 25 bp, Homo sapien
tatttgaccttcaaagcactacctt

SEQ ID NO: 4921033 - DNA, 25 bp, Homo sapien
tgcccagtcctctgttatatttgac

SEQ ID NO: 4921034 - DNA, 25 bp, Homo sapien
tttgaccttcaaagcactaccttca

SEQ ID NO: 4921035 - DNA, 25 bp, Homo sapien
aatgcagtctactgagagatacatc

SEQ ID NO: 4921036 - DNA, 25 bp, Homo sapien
atgcagtctactgagagatacatca

SEQ ID NO: 4921037 - DNA, 25 bp, Homo sapien
tgttaaatgcagtctactgagagat

SEQ ID NO: 4921038 - DNA, 25 bp, Homo sapien
taaatgcagtctactgagagataca

SEQ ID NO: 4921039 - DNA, 25 bp, Homo sapien
gactggataggttccagcaagtttt

SEQ ID NO: 4921040 - DNA, 25 bp, Homo sapien
gatgactggataggttccagcaagt

SEQ ID NO: 4921041 - DNA, 25 bp, Homo sapien
ctttgaagatgactggataggttcc

SEQ ID NO: 4921042 - DNA, 25 bp, Homo sapien
tgaagatgactggataggttccagc

SEQ ID NO: 4921043 - DNA, 25 bp, Homo sapien
gggccatcatcaaacagctcatgca

SEQ ID NO: 4921044 - DNA, 25 bp, Homo sapien
agatttggaatgtctaggagggcca

SEQ ID NO: 4921045 - DNA, 25 bp, Homo sapien
tggacagtggcaaccagaagcagag

SEQ ID NO: 4921046 - DNA, 25 bp, Homo sapien
actgtggacagtggcaaccagaagc

SEQ ID NO: 4921047 - DNA, 25 bp, Homo sapien
aagatgcccagtagttggcttctgg

SEQ ID NO: 4921048 - DNA, 25 bp, Homo sapien
tcaaagatgcccagtagttggcttc

SEQ ID NO: 4921049 - DNA, 25 bp, Homo sapien
ttcaaagatgcccagtagttggctt

SEQ ID NO: 4921050 - DNA, 25 bp, Homo sapien
caaagatgcccagtagttggcttct

SEQ ID NO: 4921051 - DNA, 25 bp, Homo sapien
ccaggctcatatttacaatcctttg

SEQ ID NO: 4921052 - DNA, 25 bp, Homo sapien
ctgattatgagatttgacacttgtt

SEQ ID NO: 4921053 - DNA, 25 bp, Homo sapien
tcacactgaaaatgcgaaagcagcc

SEQ ID NO: 4921054 - DNA, 25 bp, Homo sapien
ttatctccgtcagagagtagggtag

SEQ ID NO: 4921055 - DNA, 25 bp, Homo sapien
ttattccagcaagcgctccactgaa

SEQ ID NO: 4921056 - DNA, 25 bp, Homo sapien
gcaagcgctccactgaattcaacat

SEQ ID NO: 4921057 - DNA, 25 bp, Homo sapien
tgaattcaacatcatggtaatcagc

SEQ ID NO: 4921058 - DNA, 25 bp, Homo sapien
ccagcaagcgctccactgaattcaa

SEQ ID NO: 4921059 - DNA, 25 bp, Homo sapien
tacatgaatggctagcttacggtcc

SEQ ID NO: 4921060 - DNA, 25 bp, Homo sapien
taaaagcaccccagtcttctgtctt

SEQ ID NO: 4921061 - DNA, 25 bp, Homo sapien
tgtctgccaacatgaatggttgcta

SEQ ID NO: 4921062 - DNA, 25 bp, Homo sapien
tatcattacatcagcctccagtgac

SEQ ID NO: 4921063 - DNA, 25 bp, Homo sapien
gcagctgatgcaagtgcctgagtgc

SEQ ID NO: 4921064 - DNA, 25 bp, Homo sapien
gctgatgcaagtgcctgagtgcccc

SEQ ID NO: 4921065 - DNA, 25 bp, Homo sapien
gatgcaagtgcctgagtgcccccac

SEQ ID NO: 4921066 - DNA, 25 bp, Homo sapien
agctgatgcaagtgcctgagtgccc

SEQ ID NO: 4921067 - DNA, 25 bp, Homo sapien
gaactctctatctgaagagatggga

SEQ ID NO: 4921068 - DNA, 25 bp, Homo sapien
cttggaaggccagtaagtcgggtat

SEQ ID NO: 4921069 - DNA, 25 bp, Homo sapien
gggccattacagattctaaactgca

SEQ ID NO: 4921070 - DNA, 25 bp, Homo sapien
agtaagtcgggtatgcactaaccgg

SEQ ID NO: 4921071 - DNA, 25 bp, Homo sapien
taaaaccagctcagattagcatctg

SEQ ID NO: 4921072 - DNA, 25 bp, Homo sapien
agcatctgaattcttgttcacaaca

SEQ ID NO: 4921073 - DNA, 25 bp, Homo sapien
tctgaattcttgttcacaacactgg

SEQ ID NO: 4921074 - DNA, 25 bp, Homo sapien
gaattcttgttcacaacactggaag

SEQ ID NO: 4921075 - DNA, 25 bp, Homo sapien
tttctaaatggccaaagcccaaata

SEQ ID NO: 4921076 - DNA, 25 bp, Homo sapien
tcctggaagaagcttaaaatcctat

SEQ ID NO: 4921077 - DNA, 25 bp, Homo sapien
ttggcaaaggttcatctacttcctg

SEQ ID NO: 4921078 - DNA, 25 bp, Homo sapien
aaggttcatctacttcctggaagaa

SEQ ID NO: 4921079 - DNA, 25 bp, Homo sapien
tacttcctggaagaagcttaaaatc

SEQ ID NO: 4921080 - DNA, 25 bp, Homo sapien
ttgaaaacacaatccagttctcctg

SEQ ID NO: 4921081 - DNA, 25 bp, Homo sapien
tggacaaaatgtaggcaacttgaaa

SEQ ID NO: 4921082 - DNA, 25 bp, Homo sapien
gcagaacctgtcttccgtggaatga

SEQ ID NO: 4921083 - DNA, 25 bp, Homo sapien
tacagttaaatgtcacaaatggaca

SEQ ID NO: 4921084 - DNA, 25 bp, Homo sapien
gcaagacgtggaggagctttccctt

SEQ ID NO: 4921085 - DNA, 25 bp, Homo sapien
gggctgctgatatgtcctctccatt

SEQ ID NO: 4921086 - DNA, 25 bp, Homo sapien
gttcccagggacatggtgaacatga

SEQ ID NO: 4921087 - DNA, 25 bp, Homo sapien
ccacatatgcttggattcatgtggg

SEQ ID NO: 4921088 - DNA, 25 bp, Homo sapien
tgggtccccgtggtccactgctcca

SEQ ID NO: 4921089 - DNA, 25 bp, Homo sapien
cagctctgcttttcgtcctcttcca

SEQ ID NO: 4921090 - DNA, 25 bp, Homo sapien
catgggggtggcacgggaaggctga

SEQ ID NO: 4921091 - DNA, 25 bp, Homo sapien
tctgcttttcgtcctcttccagttc

SEQ ID NO: 4921092 - DNA, 25 bp, Homo sapien
aagagatattgatgtttttgggcaa

SEQ ID NO: 4921093 - DNA, 25 bp, Homo sapien
ggcaatatagaaatcaattgtttca

SEQ ID NO: 4921094 - DNA, 25 bp, Homo sapien
ttccacttgtaggaagagatattga

SEQ ID NO: 4921095 - DNA, 25 bp, Homo sapien
attgtttcatagactggaattagaa

SEQ ID NO: 4921096 - DNA, 25 bp, Homo sapien
taaactgactcctaactacagtggc

SEQ ID NO: 4921097 - DNA, 25 bp, Homo sapien
gattttcccactcgacaaggttatg

SEQ ID NO: 4921098 - DNA, 25 bp, Homo sapien
catgaaggctggctctactgtcgcc

SEQ ID NO: 4921099 - DNA, 25 bp, Homo sapien
caaggttatgcaaggatccaggctt

SEQ ID NO: 4921100 - DNA, 25 bp, Homo sapien
aatttgatgcttctggttgtgatta

SEQ ID NO: 4921101 - DNA, 25 bp, Homo sapien
ttgcaaaatttgatgcttctggttg

SEQ ID NO: 4921102 - DNA, 25 bp, Homo sapien
gttgcaaaatttgatgcttctggtt

SEQ ID NO: 4921103 - DNA, 25 bp, Homo sapien
caaaatttgatgcttctggttgtga

SEQ ID NO: 4921104 - DNA, 25 bp, Homo sapien
caaatcttaaggaaacatgttgcct

SEQ ID NO: 4921105 - DNA, 25 bp, Homo sapien
tgtacattgaacaggcctctggctg

SEQ ID NO: 4921106 - DNA, 25 bp, Homo sapien
ttaatgcaacccacacaaggatgtc

SEQ ID NO: 4921107 - DNA, 25 bp, Homo sapien
tattcctcataatgagagctgccag

SEQ ID NO: 4921108 - DNA, 25 bp, Homo sapien
agacacttattgtcagcctttgtcc

SEQ ID NO: 4921109 - DNA, 25 bp, Homo sapien
cagacacttattgtcagcctttgtc

SEQ ID NO: 4921110 - DNA, 25 bp, Homo sapien
cgccagacacttattgtcagccttt

SEQ ID NO: 4921111 - DNA, 25 bp, Homo sapien
cctcgccagacacttattgtcagcc

SEQ ID NO: 4921112 - DNA, 25 bp, Homo sapien
agggagattagagtttctcagctgc

SEQ ID NO: 4921113 - DNA, 25 bp, Homo sapien
gcatgaggtgcttgcagggagatta

SEQ ID NO: 4921114 - DNA, 25 bp, Homo sapien
aactgaatacctagagggcatgagg

SEQ ID NO: 4921115 - DNA, 25 bp, Homo sapien
ctgaatacctagagggcatgaggtg

SEQ ID NO: 4921116 - DNA, 25 bp, Homo sapien
tttcatggcatctagctccttttgg

SEQ ID NO: 4921117 - DNA, 25 bp, Homo sapien
tgagctagagccaaagattcgtaaa

SEQ ID NO: 4921118 - DNA, 25 bp, Homo sapien
gcagtagtcagacactggctcagac

SEQ ID NO: 4921119 - DNA, 25 bp, Homo sapien
tggctcagacctaatccatgaacag

SEQ ID NO: 4921120 - DNA, 25 bp, Homo sapien
cctggccacaagatatctatctgcc

SEQ ID NO: 4921121 - DNA, 25 bp, Homo sapien
tggccacaagatatctatctgcctt

SEQ ID NO: 4921122 - DNA, 25 bp, Homo sapien
ctcctggccacaagatatctatctg

SEQ ID NO: 4921123 - DNA, 25 bp, Homo sapien
actcctggccacaagatatctatct

SEQ ID NO: 4921124 - DNA, 25 bp, Homo sapien
tgattcgggcacaatcttcccccat

SEQ ID NO: 4921125 - DNA, 25 bp, Homo sapien
catttcttaggcaatgggaccatac

SEQ ID NO: 4921126 - DNA, 25 bp, Homo sapien
tcaggtcccatttcttaggcaatgg

SEQ ID NO: 4921127 - DNA, 25 bp, Homo sapien
gaccatacttttgattcgggcacaa

SEQ ID NO: 4921128 - DNA, 25 bp, Homo sapien
aagctttgcaaggaagtgttgttca

SEQ ID NO: 4921129 - DNA, 25 bp, Homo sapien
cagaagtagagaagagtctctgcca

SEQ ID NO: 4921130 - DNA, 25 bp, Homo sapien
cttcaggacagcaattttctaggta

SEQ ID NO: 4921131 - DNA, 25 bp, Homo sapien
ttctaggtattgtggcaggcaggta

SEQ ID NO: 4921132 - DNA, 25 bp, Homo sapien
aaattcagggtcaagtgtgctttca

SEQ ID NO: 4921133 - DNA, 25 bp, Homo sapien
tatgaagtggccgtaaagatctcac

SEQ ID NO: 4921134 - DNA, 25 bp, Homo sapien
tccacatagacactaaagaagagtt

SEQ ID NO: 4921135 - DNA, 25 bp, Homo sapien
tgtcactaccatgtagactctccac

SEQ ID NO: 4921136 - DNA, 25 bp, Homo sapien
catcgaaccccccagtccactttcg

SEQ ID NO: 4921137 - DNA, 25 bp, Homo sapien
tcatcgaaccccccagtccactttc

SEQ ID NO: 4921138 - DNA, 25 bp, Homo sapien
tattatgggtatattgacaaatgga

SEQ ID NO: 4921139 - DNA, 25 bp, Homo sapien
atgatggtattatgggtatattgac

SEQ ID NO: 4921140 - DNA, 25 bp, Homo sapien
tgatggtattatgggtatattgaca

SEQ ID NO: 4921141 - DNA, 25 bp, Homo sapien
tggtattatgggtatattgacaaat

SEQ ID NO: 4921142 - DNA, 25 bp, Homo sapien
gctgccagagaaattacgcgagctc

SEQ ID NO: 4921143 - DNA, 25 bp, Homo sapien
gtagtaagttctgcatagacacaga

SEQ ID NO: 4921144 - DNA, 25 bp, Homo sapien
gagaaattacgcgagctcttaaact

SEQ ID NO: 4921145 - DNA, 25 bp, Homo sapien
ctagaatgtagcaccagtagtaagt

SEQ ID NO: 4921146 - DNA, 25 bp, Homo sapien
acttctatgctggagtttgtggctc

SEQ ID NO: 4921147 - DNA, 25 bp, Homo sapien
gtcttcacaacttctatgctggagt

SEQ ID NO: 4921148 - DNA, 25 bp, Homo sapien
cccctgtctttaagaggctaccaat

SEQ ID NO: 4921149 - DNA, 25 bp, Homo sapien
ggctcctgttgtaagggtagcaaaa

SEQ ID NO: 4921150 - DNA, 25 bp, Homo sapien
accgcttccctttcagattccggtg

SEQ ID NO: 4921151 - DNA, 25 bp, Homo sapien
taaggcatgacaccgcttccctttc

SEQ ID NO: 4921152 - DNA, 25 bp, Homo sapien
ttcagattccggtgcagtcctctga

SEQ ID NO: 4921153 - DNA, 25 bp, Homo sapien
ctggctaaggcatgacaccgcttcc

SEQ ID NO: 4921154 - DNA, 25 bp, Homo sapien
agattggcagtagaatgttgagcac

SEQ ID NO: 4921155 - DNA, 25 bp, Homo sapien
aaagattggcagtagaatgttgagc

SEQ ID NO: 4921156 - DNA, 25 bp, Homo sapien
gaaagattggcagtagaatgttgag

SEQ ID NO: 4921157 - DNA, 25 bp, Homo sapien
aagattggcagtagaatgttgagca

SEQ ID NO: 4921158 - DNA, 25 bp, Homo sapien
ttctgcagccactgaatttaaagcc

SEQ ID NO: 4921159 - DNA, 25 bp, Homo sapien
tgtagcctcatcaccatgctggaag

SEQ ID NO: 4921160 - DNA, 25 bp, Homo sapien
cattgggcttggatggctgttcctc

SEQ ID NO: 4921161 - DNA, 25 bp, Homo sapien
tgagaaaccatagctttaaggcaaa

SEQ ID NO: 4921162 - DNA, 25 bp, Homo sapien
gaatgttgccaataacttcccactg

SEQ ID NO: 4921163 - DNA, 25 bp, Homo sapien
tgggtttcctcgtattggtcctatg

SEQ ID NO: 4921164 - DNA, 25 bp, Homo sapien
tatgttcagtccaaattcggcatgg

SEQ ID NO: 4921165 - DNA, 25 bp, Homo sapien
gggctttagtgagagccagcattaa

SEQ ID NO: 4921166 - DNA, 25 bp, Homo sapien
cccgtaattcgatcaaagtcttgag

SEQ ID NO: 4921167 - DNA, 25 bp, Homo sapien
cttctgattggaaaagctgcctcaa

SEQ ID NO: 4921168 - DNA, 25 bp, Homo sapien
aaaagctgcctcaataataagagag

SEQ ID NO: 4921169 - DNA, 25 bp, Homo sapien
tggaaaagctgcctcaataataaga

SEQ ID NO: 4921170 - DNA, 25 bp, Homo sapien
ctcaataataagagaggtgctgtga

SEQ ID NO: 4921171 - DNA, 25 bp, Homo sapien
aatctctgaactctttgggccccga

SEQ ID NO: 4921172 - DNA, 25 bp, Homo sapien
cctgtacagccttggatctggcact

SEQ ID NO: 4921173 - DNA, 25 bp, Homo sapien
gaatctattcattactcactgagcc

SEQ ID NO: 4921174 - DNA, 25 bp, Homo sapien
tctggcactaactagatctgtgact

SEQ ID NO: 4921175 - DNA, 25 bp, Homo sapien
ctagtgtaatgcgttgtccatgttg

SEQ ID NO: 4921176 - DNA, 25 bp, Homo sapien
ttttctagtgtaatgcgttgtccat

SEQ ID NO: 4921177 - DNA, 25 bp, Homo sapien
agtgtaatgcgttgtccatgttgct

SEQ ID NO: 4921178 - DNA, 25 bp, Homo sapien
ttctagtgtaatgcgttgtccatgt

SEQ ID NO: 4921179 - DNA, 25 bp, Homo sapien
tccatgcaggcatgatgtgccatct

SEQ ID NO: 4921180 - DNA, 25 bp, Homo sapien
atccatgcaggcatgatgtgccatc

SEQ ID NO: 4921181 - DNA, 25 bp, Homo sapien
agttcacaactatggagtcttccaa

SEQ ID NO: 4921182 - DNA, 25 bp, Homo sapien
actatggagtcttccaatgctgaag

SEQ ID NO: 4921183 - DNA, 25 bp, Homo sapien
tcacaactatggagtcttccaatgc

SEQ ID NO: 4921184 - DNA, 25 bp, Homo sapien
tgagttcacaactatggagtcttcc

SEQ ID NO: 4921185 - DNA, 25 bp, Homo sapien
ctgttggcaaagtagccacttactg

SEQ ID NO: 4921186 - DNA, 25 bp, Homo sapien
tgttggcaaagtagccacttactgg

SEQ ID NO: 4921187 - DNA, 25 bp, Homo sapien
taatgttttacccaacttgccagat

SEQ ID NO: 4921188 - DNA, 25 bp, Homo sapien
gattctctctaacatcttcatttcc

SEQ ID NO: 4921189 - DNA, 25 bp, Homo sapien
gttttacccaacttgccagatacag

SEQ ID NO: 4921190 - DNA, 25 bp, Homo sapien
tttacccaacttgccagatacagtc

SEQ ID NO: 4921191 - DNA, 25 bp, Homo sapien
ggattctggataccaattccaggtt

SEQ ID NO: 4921192 - DNA, 25 bp, Homo sapien
taatcttgactttgtgcctggaatc

SEQ ID NO: 4921193 - DNA, 25 bp, Homo sapien
gatagcatatggctctcatgaaatt

SEQ ID NO: 4921194 - DNA, 25 bp, Homo sapien
gattttgcatcctatccctttcatg

SEQ ID NO: 4921195 - DNA, 25 bp, Homo sapien
cagaaacttctgtcaatccattaat

SEQ ID NO: 4921196 - DNA, 25 bp, Homo sapien
gatgctgtccattggctgtgaaaga

SEQ ID NO: 4921197 - DNA, 25 bp, Homo sapien
gctgtccattggctgtgaaagattt

SEQ ID NO: 4921198 - DNA, 25 bp, Homo sapien
agaaacttctgtcaatccattaatg

SEQ ID NO: 4921199 - DNA, 25 bp, Homo sapien
gtctctggagcctgacgtatttggg

SEQ ID NO: 4921200 - DNA, 25 bp, Homo sapien
ggttatcccaagctagacttgatgg

SEQ ID NO: 4921201 - DNA, 25 bp, Homo sapien
gtttcttcatgagtgggttatccca

SEQ ID NO: 4921202 - DNA, 25 bp, Homo sapien
gacttgatggctgcagagatcttag

SEQ ID NO: 4921203 - DNA, 25 bp, Homo sapien
aaaggcaggggttgcaatcctagtc

SEQ ID NO: 4921204 - DNA, 25 bp, Homo sapien
tctaccaagcaaatggaaaacaaaa

SEQ ID NO: 4921205 - DNA, 25 bp, Homo sapien
acataggctcaaaatgaaaggagag

SEQ ID NO: 4921206 - DNA, 25 bp, Homo sapien
gaagatctaccaagcaaatggaaaa

SEQ ID NO: 4921207 - DNA, 25 bp, Homo sapien
ccatgatcaaaggagaaccaagttt

SEQ ID NO: 4921208 - DNA, 25 bp, Homo sapien
cagccatgatcaaaggagaaccaag

SEQ ID NO: 4921209 - DNA, 25 bp, Homo sapien
cgccagccatgatcaaaggagaacc

SEQ ID NO: 4921210 - DNA, 25 bp, Homo sapien
tgatcaaaggagaaccaagttttat

SEQ ID NO: 4921211 - DNA, 25 bp, Homo sapien
aatcagcaaaattaagtttttgact

SEQ ID NO: 4921212 - DNA, 25 bp, Homo sapien
ctgcaaggaaatcagcaaaattaag

SEQ ID NO: 4921213 - DNA, 25 bp, Homo sapien
atcagcaaaattaagtttttgactt

SEQ ID NO: 4921214 - DNA, 25 bp, Homo sapien
caaggaaatcagcaaaattaagttt

SEQ ID NO: 4921215 - DNA, 25 bp, Homo sapien
ctagatggcaacaatagccaaaatc

SEQ ID NO: 4921216 - DNA, 25 bp, Homo sapien
tagccaaaatctgcaggaagatttc

SEQ ID NO: 4921217 - DNA, 25 bp, Homo sapien
gaacctatatctgatacagaaactt

SEQ ID NO: 4921218 - DNA, 25 bp, Homo sapien
ttccacatctcatagaacctatatc

SEQ ID NO: 4921219 - DNA, 25 bp, Homo sapien
ggctgtggataagtgcctgaaaagt

SEQ ID NO: 4921220 - DNA, 25 bp, Homo sapien
aggcatacaattgtgttcatgggaa

SEQ ID NO: 4921221 - DNA, 25 bp, Homo sapien
taatccaatctcaatctaggcatac

SEQ ID NO: 4921222 - DNA, 25 bp, Homo sapien
catacaattgtgttcatgggaatat

SEQ ID NO: 4921223 - DNA, 25 bp, Homo sapien
gattttactgaagtgttctggggga

SEQ ID NO: 4921224 - DNA, 25 bp, Homo sapien
aatatatccgattttccttcacaag

SEQ ID NO: 4921225 - DNA, 25 bp, Homo sapien
tctgggggaatgagcaagcagaatc

SEQ ID NO: 4921226 - DNA, 25 bp, Homo sapien
ctggtttaatgccacactcaataaa

SEQ ID NO: 4921227 - DNA, 25 bp, Homo sapien
ctttaacagatataagtggagtcat

SEQ ID NO: 4921228 - DNA, 25 bp, Homo sapien
caagtgctttgaggacgttttgatc

SEQ ID NO: 4921229 - DNA, 25 bp, Homo sapien
tgaaaggcaatgataatgaagcaac

SEQ ID NO: 4921230 - DNA, 25 bp, Homo sapien
tttcctacagttcttgtgaaaggca

SEQ ID NO: 4921231 - DNA, 25 bp, Homo sapien
aacaaagacaaatgggcaagtgctt

SEQ ID NO: 4921232 - DNA, 25 bp, Homo sapien
ttgttatttaaccagttcatgaggg

SEQ ID NO: 4921233 - DNA, 25 bp, Homo sapien
gaacagctctgtgagcagtacttgt

SEQ ID NO: 4921234 - DNA, 25 bp, Homo sapien
tcatgaggggataactcacccttct

SEQ ID NO: 4921235 - DNA, 25 bp, Homo sapien
tttggcaagaaagccttcattaata

SEQ ID NO: 4921236 - DNA, 25 bp, Homo sapien
attttgtgaagaatcaggctgaccc

SEQ ID NO: 4921237 - DNA, 25 bp, Homo sapien
aagaatcaggctgaccccatcgctc

SEQ ID NO: 4921238 - DNA, 25 bp, Homo sapien
ccatcgctcatccatcactggccct

SEQ ID NO: 4921239 - DNA, 25 bp, Homo sapien
ttggctgccacgtcaaaaatggatt

SEQ ID NO: 4921240 - DNA, 25 bp, Homo sapien
gaacaggaatagtacattaggtgca

SEQ ID NO: 4921241 - DNA, 25 bp, Homo sapien
atagtacattaggtgcagagatcca

SEQ ID NO: 4921242 - DNA, 25 bp, Homo sapien
gaaagaacaggaatagtacattagg

SEQ ID NO: 4921243 - DNA, 25 bp, Homo sapien
gaatagtacattaggtgcagagatc

SEQ ID NO: 4921244 - DNA, 25 bp, Homo sapien
ggaggaaagctgttcaattcagagc

SEQ ID NO: 4921245 - DNA, 25 bp, Homo sapien
tgtaactgctgttctgggattctgg

SEQ ID NO: 4921246 - DNA, 25 bp, Homo sapien
taatcacttccaggacttagttgga

SEQ ID NO: 4921247 - DNA, 25 bp, Homo sapien
tctggtgagtgagtaagttccccga

SEQ ID NO: 4921248 - DNA, 25 bp, Homo sapien
cagacaggtaggagcagaacttgaa

SEQ ID NO: 4921249 - DNA, 25 bp, Homo sapien
ctgatgacagacaggtaggagcaga

SEQ ID NO: 4921250 - DNA, 25 bp, Homo sapien
gacaggtaggagcagaacttgaagc

SEQ ID NO: 4921251 - DNA, 25 bp, Homo sapien
caggtaggagcagaacttgaagcat

SEQ ID NO: 4921252 - DNA, 25 bp, Homo sapien
caggtggacctggtgaaattgctac

SEQ ID NO: 4921253 - DNA, 25 bp, Homo sapien
ggagccaaggtaatgttaccacaca

SEQ ID NO: 4921254 - DNA, 25 bp, Homo sapien
caggaagaactaaatcagagccagg

SEQ ID NO: 4921255 - DNA, 25 bp, Homo sapien
agtgtagggatatgttgccatggtc

SEQ ID NO: 4921256 - DNA, 25 bp, Homo sapien
gataaggttcttgataccaagcagg

SEQ ID NO: 4921257 - DNA, 25 bp, Homo sapien
gctgataaggttcttgataccaagc

SEQ ID NO: 4921258 - DNA, 25 bp, Homo sapien
ctgcagctgataaggttcttgatac

SEQ ID NO: 4921259 - DNA, 25 bp, Homo sapien
tgataccaagcaggtgcatcctcag

SEQ ID NO: 4921260 - DNA, 25 bp, Homo sapien
ctactgaagtaagcctgtggaaatc

SEQ ID NO: 4921261 - DNA, 25 bp, Homo sapien
tttgtttgactagatccaggagctg

SEQ ID NO: 4921262 - DNA, 25 bp, Homo sapien
ggcaatgtctcttctgatttgtttg

SEQ ID NO: 4921263 - DNA, 25 bp, Homo sapien
ctcaatgtcattacttttcagtctt

SEQ ID NO: 4921264 - DNA, 25 bp, Homo sapien
tgtcattacttttcagtcttggctt

SEQ ID NO: 4921265 - DNA, 25 bp, Homo sapien
aatgtcattacttttcagtcttggc

SEQ ID NO: 4921266 - DNA, 25 bp, Homo sapien
tcattacttttcagtcttggctttg

SEQ ID NO: 4921267 - DNA, 25 bp, Homo sapien
tagacatagagttaacccagtagaa

SEQ ID NO: 4921268 - DNA, 25 bp, Homo sapien
gacatagagttaacccagtagaagg

SEQ ID NO: 4921269 - DNA, 25 bp, Homo sapien
ttctagacatagagttaacccagta

SEQ ID NO: 4921270 - DNA, 25 bp, Homo sapien
agagttaacccagtagaaggagttg

SEQ ID NO: 4921271 - DNA, 25 bp, Homo sapien
aatcacattgattgctcctgttaca

SEQ ID NO: 4921272 - DNA, 25 bp, Homo sapien
agaaatcacattgattgctcctgtt

SEQ ID NO: 4921273 - DNA, 25 bp, Homo sapien
gaaatcacattgattgctcctgtta

SEQ ID NO: 4921274 - DNA, 25 bp, Homo sapien
tgtgcttttactacctggattctgg

SEQ ID NO: 4921275 - DNA, 25 bp, Homo sapien
tatcacctctggacttcctaaagat

SEQ ID NO: 4921276 - DNA, 25 bp, Homo sapien
gatatagacaccatagtcctgtgct

SEQ ID NO: 4921277 - DNA, 25 bp, Homo sapien
cctggattctggaagtattatcacc

SEQ ID NO: 4921278 - DNA, 25 bp, Homo sapien
ggcctctcgtcagggctgcccttcc

SEQ ID NO: 4921279 - DNA, 25 bp, Homo sapien
ctctcgtcagggctgcccttccatc

SEQ ID NO: 4921280 - DNA, 25 bp, Homo sapien
tctcgtcagggctgcccttccatcc

SEQ ID NO: 4921281 - DNA, 25 bp, Homo sapien
ctggcctctcgtcagggctgccctt

SEQ ID NO: 4921282 - DNA, 25 bp, Homo sapien
cctaacatggcatcccagggagaca

SEQ ID NO: 4921283 - DNA, 25 bp, Homo sapien
ctgagaggagtcaataagccctaac

SEQ ID NO: 4921284 - DNA, 25 bp, Homo sapien
agtcaataagccctaacatggcatc

SEQ ID NO: 4921285 - DNA, 25 bp, Homo sapien
aagccctaacatggcatcccaggga

SEQ ID NO: 4921286 - DNA, 25 bp, Homo sapien
ccactgacatgtggtcattggcagt

SEQ ID NO: 4921287 - DNA, 25 bp, Homo sapien
tccactgacatgtggtcattggcag

SEQ ID NO: 4921288 - DNA, 25 bp, Homo sapien
cactgacatgtggtcattggcagta

SEQ ID NO: 4921289 - DNA, 25 bp, Homo sapien
ctccactgacatgtggtcattggca

SEQ ID NO: 4921290 - DNA, 25 bp, Homo sapien
cattgtctccccatggcagagttcc

SEQ ID NO: 4921291 - DNA, 25 bp, Homo sapien
gtgttgggtaaattgacacccaaga

SEQ ID NO: 4921292 - DNA, 25 bp, Homo sapien
aattgacacccaagatttggagaca

SEQ ID NO: 4921293 - DNA, 25 bp, Homo sapien
gagacaagtcttgggtgtcagttta

SEQ ID NO: 4921294 - DNA, 25 bp, Homo sapien
caaaaccagagtgtgggatcagtag

SEQ ID NO: 4921295 - DNA, 25 bp, Homo sapien
aaaccggggtcttcagcactattgg

SEQ ID NO: 4921296 - DNA, 25 bp, Homo sapien
ggttcacagcatcaaagtagtgttc

SEQ ID NO: 4921297 - DNA, 25 bp, Homo sapien
ttcctccacctcatagattttaaga

SEQ ID NO: 4921298 - DNA, 25 bp, Homo sapien
tatgctctcttgggcgtttattact

SEQ ID NO: 4921299 - DNA, 25 bp, Homo sapien
ctcttgagtcaaacttagtactttc

SEQ ID NO: 4921300 - DNA, 25 bp, Homo sapien
cttttcctcttgagtcaaacttagt

SEQ ID NO: 4921301 - DNA, 25 bp, Homo sapien
tttcctcttgagtcaaacttagtac

SEQ ID NO: 4921302 - DNA, 25 bp, Homo sapien
tggcttctctgccgggtatcacggt

SEQ ID NO: 4921303 - DNA, 25 bp, Homo sapien
gtggcttctctgccgggtatcacgg

SEQ ID NO: 4921304 - DNA, 25 bp, Homo sapien
ggaagtatgtagtggtagctcagaa

SEQ ID NO: 4921305 - DNA, 25 bp, Homo sapien
gagaaagcccacaactttcatgaca

SEQ ID NO: 4921306 - DNA, 25 bp, Homo sapien
ttctcaaagcggtctgtgatacccc

SEQ ID NO: 4921307 - DNA, 25 bp, Homo sapien
tttggaacaattgggacagcatatg

SEQ ID NO: 4921308 - DNA, 25 bp, Homo sapien
ctggtggaaaggacattccctgcac

SEQ ID NO: 4921309 - DNA, 25 bp, Homo sapien
cacatttctgtgaatgggtgggatt

SEQ ID NO: 4921310 - DNA, 25 bp, Homo sapien
cctgcacatttctgtgaatgggtgg

SEQ ID NO: 4921311 - DNA, 25 bp, Homo sapien
attccctgcacatttctgtgaatgg

SEQ ID NO: 4921312 - DNA, 25 bp, Homo sapien
gctgtgccgtctctgcttggagaag

SEQ ID NO: 4921313 - DNA, 25 bp, Homo sapien
tctgggagacaggttttagcagaga

SEQ ID NO: 4921314 - DNA, 25 bp, Homo sapien
agagcaggtctgatgatttctggga

SEQ ID NO: 4921315 - DNA, 25 bp, Homo sapien
agacagcttgttctttctcaatccc

SEQ ID NO: 4921316 - DNA, 25 bp, Homo sapien
gggctacattgatccaccacaagct

SEQ ID NO: 4921317 - DNA, 25 bp, Homo sapien
catcgtgaaggttgatgatgcttgc

SEQ ID NO: 4921318 - DNA, 25 bp, Homo sapien
tgatgcttgcatagtcaaccactac

SEQ ID NO: 4921319 - DNA, 25 bp, Homo sapien
caagcttagattgtgcatcgtgaag

SEQ ID NO: 4921320 - DNA, 25 bp, Homo sapien
tagctttcatgtcactcccaaacat

SEQ ID NO: 4921321 - DNA, 25 bp, Homo sapien
aacactagctttcatgtcactccca

SEQ ID NO: 4921322 - DNA, 25 bp, Homo sapien
tctcggtcacctcctaatataacac

SEQ ID NO: 4921323 - DNA, 25 bp, Homo sapien
tcctaatataacactagctttcatg

SEQ ID NO: 4921324 - DNA, 25 bp, Homo sapien
ccttttttaccactgacttgcagac

SEQ ID NO: 4921325 - DNA, 25 bp, Homo sapien
cactgacttgcagaccttcctctgg

SEQ ID NO: 4921326 - DNA, 25 bp, Homo sapien
atctttgttaccctcggacagattt

SEQ ID NO: 4921327 - DNA, 25 bp, Homo sapien
ttaccactgacttgcagaccttcct

SEQ ID NO: 4921328 - DNA, 25 bp, Homo sapien
tccactccatcactatctaaattat

SEQ ID NO: 4921329 - DNA, 25 bp, Homo sapien
tgacctccactccatcactatctaa

SEQ ID NO: 4921330 - DNA, 25 bp, Homo sapien
ctttttctctgacctccactccatc

SEQ ID NO: 4921331 - DNA, 25 bp, Homo sapien
acctccactccatcactatctaaat

SEQ ID NO: 4921332 - DNA, 25 bp, Homo sapien
tgtaatttcgatagatcttgggcct

SEQ ID NO: 4921333 - DNA, 25 bp, Homo sapien
tcaaggaagtcttatagccagagtg

SEQ ID NO: 4921334 - DNA, 25 bp, Homo sapien
tgtccatgtaaggaacgctggactc

SEQ ID NO: 4921335 - DNA, 25 bp, Homo sapien
tcttgggccttgataaagttgctca

SEQ ID NO: 4921336 - DNA, 25 bp, Homo sapien
gttaaaattcctttgcataatgaag

SEQ ID NO: 4921337 - DNA, 25 bp, Homo sapien
gctataggaatttttgtgtccttcc

SEQ ID NO: 4921338 - DNA, 25 bp, Homo sapien
cctttgcataatgaagctataggaa

SEQ ID NO: 4921339 - DNA, 25 bp, Homo sapien
gatgccaatggctgaaacaaagaag

SEQ ID NO: 4921340 - DNA, 25 bp, Homo sapien
catctgcaccaaggataatgtccaa

SEQ ID NO: 4921341 - DNA, 25 bp, Homo sapien
ggtgtgcatgcggagatttgttccc

SEQ ID NO: 4921342 - DNA, 25 bp, Homo sapien
tgagcagttgggctgttcacctgga

SEQ ID NO: 4921343 - DNA, 25 bp, Homo sapien
ttccctcatggtgtttgtgaaggtc

SEQ ID NO: 4921344 - DNA, 25 bp, Homo sapien
gattttcaatcatcgtgtctcctcc

SEQ ID NO: 4921345 - DNA, 25 bp, Homo sapien
tgctgcttttcaagagttttgcctc

SEQ ID NO: 4921346 - DNA, 25 bp, Homo sapien
tggcagaacagtttcgtagacagct

SEQ ID NO: 4921347 - DNA, 25 bp, Homo sapien
tccatggagtccagatgattttcaa

SEQ ID NO: 4921348 - DNA, 25 bp, Homo sapien
cagatgctttccattgtaaagtggc

SEQ ID NO: 4921349 - DNA, 25 bp, Homo sapien
taatgtgggtgtatgaggttctgcc

SEQ ID NO: 4921350 - DNA, 25 bp, Homo sapien
ctgtttgattaggtgttttaggctc

SEQ ID NO: 4921351 - DNA, 25 bp, Homo sapien
gggtgacgcagctgcttaggattgc

SEQ ID NO: 4921352 - DNA, 25 bp, Homo sapien
gcctcatcctagtaccaagggctga

SEQ ID NO: 4921353 - DNA, 25 bp, Homo sapien
gaagaggctccggttagaaatcaag

SEQ ID NO: 4921354 - DNA, 25 bp, Homo sapien
gtcaagctatcttccctgttctagg

SEQ ID NO: 4921355 - DNA, 25 bp, Homo sapien
gcatgtttctattccaacaggtggg

SEQ ID NO: 4921356 - DNA, 25 bp, Homo sapien
gccctaaccccagttgcagcagtag

SEQ ID NO: 4921357 - DNA, 25 bp, Homo sapien
gacatctcttatatggcaccattgg

SEQ ID NO: 4921358 - DNA, 25 bp, Homo sapien
tgttatagccccatcggcaggaaga

SEQ ID NO: 4921359 - DNA, 25 bp, Homo sapien
gatgccttcattgcatggcctgtga

SEQ ID NO: 4921360 - DNA, 25 bp, Homo sapien
cacaggagataggaacaacccctat

SEQ ID NO: 4921361 - DNA, 25 bp, Homo sapien
ggagataggaacaacccctatccat

SEQ ID NO: 4921362 - DNA, 25 bp, Homo sapien
aggagataggaacaacccctatcca

SEQ ID NO: 4921363 - DNA, 25 bp, Homo sapien
caggagataggaacaacccctatcc

SEQ ID NO: 4921364 - DNA, 25 bp, Homo sapien
ttcacttccaacattctgagcatgc

SEQ ID NO: 4921365 - DNA, 25 bp, Homo sapien
tcacttccaacattctgagcatgct

SEQ ID NO: 4921366 - DNA, 25 bp, Homo sapien
catctggtacagatctatagacctt

SEQ ID NO: 4921367 - DNA, 25 bp, Homo sapien
ccatccagaccattctgcgaagctt

SEQ ID NO: 4921368 - DNA, 25 bp, Homo sapien
cattctgcgaagcttgctttggaaa

SEQ ID NO: 4921369 - DNA, 25 bp, Homo sapien
tctggtacagatctatagaccttcc

SEQ ID NO: 4921370 - DNA, 25 bp, Homo sapien
tagttggagcgtggaacgagtaacc

SEQ ID NO: 4921371 - DNA, 25 bp, Homo sapien
tggaacgagtaaccacaattaccac

SEQ ID NO: 4921372 - DNA, 25 bp, Homo sapien
tagacggccgtcattgcggcagtgc

SEQ ID NO: 4921373 - DNA, 25 bp, Homo sapien
tgcttgggcttcctgctagttggag

SEQ ID NO: 4921374 - DNA, 25 bp, Homo sapien
ctgctttgccgagtcaaaaaatatg

SEQ ID NO: 4921375 - DNA, 25 bp, Homo sapien
agcatgtattgtctgctttgccgag

SEQ ID NO: 4921376 - DNA, 25 bp, Homo sapien
ggttaagctattcacgacattgcat

SEQ ID NO: 4921377 - DNA, 25 bp, Homo sapien
gtttttggttaagctattcacgaca

SEQ ID NO: 4921378 - DNA, 25 bp, Homo sapien
ctgagtatgcgtctctgtccctcta

SEQ ID NO: 4921379 - DNA, 25 bp, Homo sapien
gtctcctatgtcatgcccattcctg

SEQ ID NO: 4921380 - DNA, 25 bp, Homo sapien
tacgcaaaccacaaactgtagccag

SEQ ID NO: 4921381 - DNA, 25 bp, Homo sapien
ttagcacagcaattgccatacctcc

SEQ ID NO: 4921382 - DNA, 25 bp, Homo sapien
tcttaggagctgagagagtgttgtc

SEQ ID NO: 4921383 - DNA, 25 bp, Homo sapien
gaattctgaggtccggtgtgcctgt

SEQ ID NO: 4921384 - DNA, 25 bp, Homo sapien
gaaacaccgacagtatgggtcagca

SEQ ID NO: 4921385 - DNA, 25 bp, Homo sapien
agcatttgctccctccctagcgtgg

SEQ ID NO: 4921386 - DNA, 25 bp, Homo sapien
cagcggtccaaatgatgccgactga

SEQ ID NO: 4921387 - DNA, 25 bp, Homo sapien
ggcttctagagaccaccttagttcc

SEQ ID NO: 4921388 - DNA, 25 bp, Homo sapien
cgactgagatccaggacatgtgatg

SEQ ID NO: 4921389 - DNA, 25 bp, Homo sapien
gaggatgtggcttctagagaccacc

SEQ ID NO: 4921390 - DNA, 25 bp, Homo sapien
ctagtgcgttctcttcttgtaccac

SEQ ID NO: 4921391 - DNA, 25 bp, Homo sapien
gcagaagccttgtcatgctcctcag

SEQ ID NO: 4921392 - DNA, 25 bp, Homo sapien
tgcagaagccttgtcatgctcctca

SEQ ID NO: 4921393 - DNA, 25 bp, Homo sapien
gctgcagaagccttgtcatgctcct

SEQ ID NO: 4921394 - DNA, 25 bp, Homo sapien
cagaagccttgtcatgctcctcagt

SEQ ID NO: 4921395 - DNA, 25 bp, Homo sapien
caccaagccatagctgggccagccc

SEQ ID NO: 4921396 - DNA, 25 bp, Homo sapien
ctgggccagccccagatcactgagc

SEQ ID NO: 4921397 - DNA, 25 bp, Homo sapien
ccaagccatagctgggccagcccca

SEQ ID NO: 4921398 - DNA, 25 bp, Homo sapien
agctgggccagccccagatcactga

SEQ ID NO: 4921399 - DNA, 25 bp, Homo sapien
taaatagctgcaatttgggtgttgc

SEQ ID NO: 4921400 - DNA, 25 bp, Homo sapien
gtaaatagctgcaatttgggtgttg

SEQ ID NO: 4921401 - DNA, 25 bp, Homo sapien
agtaaatagctgcaatttgggtgtt

SEQ ID NO: 4921402 - DNA, 25 bp, Homo sapien
gaaatgaagtggataaggccagttg

SEQ ID NO: 4921403 - DNA, 25 bp, Homo sapien
gggctcttggactctgtgaaattgc

SEQ ID NO: 4921404 - DNA, 25 bp, Homo sapien
gtgaaattgctgtttcagaggaaga

SEQ ID NO: 4921405 - DNA, 25 bp, Homo sapien
tgtgctgagcgcagtggggaaatga

SEQ ID NO: 4921406 - DNA, 25 bp, Homo sapien
caatgtaacagacattgtgggtggg

SEQ ID NO: 4921407 - DNA, 25 bp, Homo sapien
tcttgacttcccgtttctcttcaat

SEQ ID NO: 4921408 - DNA, 25 bp, Homo sapien
cagggtgaagaagggaaggctcagt

SEQ ID NO: 4921409 - DNA, 25 bp, Homo sapien
gacttcccgtttctcttcaatgtaa

SEQ ID NO: 4921410 - DNA, 25 bp, Homo sapien
tgacccacactgctgactttggcat

SEQ ID NO: 4921411 - DNA, 25 bp, Homo sapien
ctttgccacactgacccacactgct

SEQ ID NO: 4921412 - DNA, 25 bp, Homo sapien
ccacactgacccacactgctgactt

SEQ ID NO: 4921413 - DNA, 25 bp, Homo sapien
actgacccacactgctgactttggc

SEQ ID NO: 4921414 - DNA, 25 bp, Homo sapien
tacaagaggcgatgaaatgtgctat

SEQ ID NO: 4921415 - DNA, 25 bp, Homo sapien
gagaagctcacagtcgttataagta

SEQ ID NO: 4921416 - DNA, 25 bp, Homo sapien
gacacccttggatcctaccctctcc

SEQ ID NO: 4921417 - DNA, 25 bp, Homo sapien
tcgttataagtaaagatccatctgt

SEQ ID NO: 4921418 - DNA, 25 bp, Homo sapien
gattcaccttagacgttgcctgctg

SEQ ID NO: 4921419 - DNA, 25 bp, Homo sapien
tgtcgtggaatccagaccacaggca

SEQ ID NO: 4921420 - DNA, 25 bp, Homo sapien
catggtgagccctagttgatcctgg

SEQ ID NO: 4921421 - DNA, 25 bp, Homo sapien
gcttctgtggtttagaggccacatg

SEQ ID NO: 4921422 - DNA, 25 bp, Homo sapien
ctgcatgctgattatattcactcct

SEQ ID NO: 4921423 - DNA, 25 bp, Homo sapien
tcccattctcagttatcagtgctcc

SEQ ID NO: 4921424 - DNA, 25 bp, Homo sapien
ctcctcccattctcagttatcagtg

SEQ ID NO: 4921425 - DNA, 25 bp, Homo sapien
gcatgctgattatattcactcctcc

SEQ ID NO: 4921426 - DNA, 25 bp, Homo sapien
ctgctcggagaagcttgaattcaat

SEQ ID NO: 4921427 - DNA, 25 bp, Homo sapien
cctcctctgtagcagcctcattacc

SEQ ID NO: 4921428 - DNA, 25 bp, Homo sapien
cctctgtagcagcctcattacccca

SEQ ID NO: 4921429 - DNA, 25 bp, Homo sapien
ccctcctctgtagcagcctcattac

SEQ ID NO: 4921430 - DNA, 25 bp, Homo sapien
ctgtagcagcctcattaccccatca

SEQ ID NO: 4921431 - DNA, 25 bp, Homo sapien
caggactgctcagttcttgggatct

SEQ ID NO: 4921432 - DNA, 25 bp, Homo sapien
gcttttggagcaaattccacccttg

SEQ ID NO: 4921433 - DNA, 25 bp, Homo sapien
aggactgctcagttcttgggatctc

SEQ ID NO: 4921434 - DNA, 25 bp, Homo sapien
gcatctgtgagaagcgcagactggg

SEQ ID NO: 4921435 - DNA, 25 bp, Homo sapien
ttgcatctgtgagaagcgcagactg

SEQ ID NO: 4921436 - DNA, 25 bp, Homo sapien
catctgtgagaagcgcagactgggc

SEQ ID NO: 4921437 - DNA, 25 bp, Homo sapien
tgcatctgtgagaagcgcagactgg

SEQ ID NO: 4921438 - DNA, 25 bp, Homo sapien
tgaggaccatggtcactaaggttga

SEQ ID NO: 4921439 - DNA, 25 bp, Homo sapien
catggtcactaaggttgaccatgga

SEQ ID NO: 4921440 - DNA, 25 bp, Homo sapien
ggaccatggtcactaaggttgacca

SEQ ID NO: 4921441 - DNA, 25 bp, Homo sapien
ctgtgaggaccatggtcactaaggt

SEQ ID NO: 4921442 - DNA, 25 bp, Homo sapien
tcagagccttcaggaagtaatatct

SEQ ID NO: 4921443 - DNA, 25 bp, Homo sapien
tgaattttgattccgttctgatgca

SEQ ID NO: 4921444 - DNA, 25 bp, Homo sapien
tcgtcccaggagtggcatttgtaat

SEQ ID NO: 4921445 - DNA, 25 bp, Homo sapien
taaaccactcttcagtcgtcccagg

SEQ ID NO: 4921446 - DNA, 25 bp, Homo sapien
ggcaggtggcacctttaggcagctc

SEQ ID NO: 4921447 - DNA, 25 bp, Homo sapien
gattgaaggtctgggtgtctctgtc

SEQ ID NO: 4921448 - DNA, 25 bp, Homo sapien
gatggcctgtctccccttaggtgga

SEQ ID NO: 4921449 - DNA, 25 bp, Homo sapien
ggtgaatattatgtggcagccaact

SEQ ID NO: 4921450 - DNA, 25 bp, Homo sapien
catgctcggacatgaacacccgatc

SEQ ID NO: 4921451 - DNA, 25 bp, Homo sapien
gaaatgtgccaacgtcacaacaagg

SEQ ID NO: 4921452 - DNA, 25 bp, Homo sapien
gggaaatgtgccaacgtcacaacaa

SEQ ID NO: 4921453 - DNA, 25 bp, Homo sapien
ggcacatctcatgctcggacatgaa

SEQ ID NO: 4921454 - DNA, 25 bp, Homo sapien
tggctagaaagactccggtcgcaac

SEQ ID NO: 4921455 - DNA, 25 bp, Homo sapien
agaaagactccggtcgcaaccttgc

SEQ ID NO: 4921456 - DNA, 25 bp, Homo sapien
caggaaggttccagttgagcagctc

SEQ ID NO: 4921457 - DNA, 25 bp, Homo sapien
gctggtgccaagtgggtgtccttcc

SEQ ID NO: 4921458 - DNA, 25 bp, Homo sapien
ctgggctgattctgttctgtgtgcc

SEQ ID NO: 4921459 - DNA, 25 bp, Homo sapien
atcagttctgggctgattctgttct

SEQ ID NO: 4921460 - DNA, 25 bp, Homo sapien
ttctgggctgattctgttctgtgtg

SEQ ID NO: 4921461 - DNA, 25 bp, Homo sapien
cagttctgggctgattctgttctgt

SEQ ID NO: 4921462 - DNA, 25 bp, Homo sapien
tgtggcagccactcattgtttagag

SEQ ID NO: 4921463 - DNA, 25 bp, Homo sapien
ctctcattactagtatgtggcagcc

SEQ ID NO: 4921464 - DNA, 25 bp, Homo sapien
gaaggtgggcacttcttctggttga

SEQ ID NO: 4921465 - DNA, 25 bp, Homo sapien
tcatggtagtacatggcactgtctc

SEQ ID NO: 4921466 - DNA, 25 bp, Homo sapien
ccagcaatcctgctggcagggttct

SEQ ID NO: 4921467 - DNA, 25 bp, Homo sapien
gtttggctgcctaggtgcgatcgcc

SEQ ID NO: 4921468 - DNA, 25 bp, Homo sapien
gatggctttgaaacagctcttttgt

SEQ ID NO: 4921469 - DNA, 25 bp, Homo sapien
tcttttgtggcccttcgcaggtgaa

SEQ ID NO: 4921470 - DNA, 25 bp, Homo sapien
ctcttctgaccgttcctccactgct

SEQ ID NO: 4921471 - DNA, 25 bp, Homo sapien
tcttctgaccgttcctccactgctt

SEQ ID NO: 4921472 - DNA, 25 bp, Homo sapien
cctttgcctgactgggagcatgcat

SEQ ID NO: 4921473 - DNA, 25 bp, Homo sapien
ctgcctttgcctgactgggagcatg

SEQ ID NO: 4921474 - DNA, 25 bp, Homo sapien
ctcatgggttccttcatgggtaatt

SEQ ID NO: 4921475 - DNA, 25 bp, Homo sapien
gcagcaaccgcctcttatctgcctt

SEQ ID NO: 4921476 - DNA, 25 bp, Homo sapien
tccagccatctggggttgacagatg

SEQ ID NO: 4921477 - DNA, 25 bp, Homo sapien
cgctggtggtgttccagccatctgg

SEQ ID NO: 4921478 - DNA, 25 bp, Homo sapien
tgggaagagactcactccgctggtg

SEQ ID NO: 4921479 - DNA, 25 bp, Homo sapien
gggtgggaagagactcactccgctg

SEQ ID NO: 4921480 - DNA, 25 bp, Homo sapien
ctttaaccgctttgcatatttggct

SEQ ID NO: 4921481 - DNA, 25 bp, Homo sapien
aaccgctttgcatatttggctttac

SEQ ID NO: 4921482 - DNA, 25 bp, Homo sapien
ctgtgggttcccttcaaaactgctg

SEQ ID NO: 4921483 - DNA, 25 bp, Homo sapien
ttctgtgggttcccttcaaaactgc

SEQ ID NO: 4921484 - DNA, 25 bp, Homo sapien
ttcaaccaaatttcttaggtcatct

SEQ ID NO: 4921485 - DNA, 25 bp, Homo sapien
gtttctttctctataacctctctat

SEQ ID NO: 4921486 - DNA, 25 bp, Homo sapien
tttcaaccaaatttcttaggtcatc

SEQ ID NO: 4921487 - DNA, 25 bp, Homo sapien
ctttctctataacctctctatttct

SEQ ID NO: 4921488 - DNA, 25 bp, Homo sapien
gaagtttggaacaatccagagaacc

SEQ ID NO: 4921489 - DNA, 25 bp, Homo sapien
catctgcctgtagggcccagaaaga

SEQ ID NO: 4921490 - DNA, 25 bp, Homo sapien
gagatggcacctggtatcctgggta

SEQ ID NO: 4921491 - DNA, 25 bp, Homo sapien
ccaaactttcagctgccagagatgg

SEQ ID NO: 4921492 - DNA, 25 bp, Homo sapien
tctcaggttgggagttgctgccatg

SEQ ID NO: 4921493 - DNA, 25 bp, Homo sapien
gctgccatggagaccacaagagtgg

SEQ ID NO: 4921494 - DNA, 25 bp, Homo sapien
gataaaagtccaatgcactctgtgg

SEQ ID NO: 4921495 - DNA, 25 bp, Homo sapien
tgcactctgtggggtgaaacagcct

SEQ ID NO: 4921496 - DNA, 25 bp, Homo sapien
ttatcacaggggcagctataatggc

SEQ ID NO: 4921497 - DNA, 25 bp, Homo sapien
agttatcacaggggcagctataatg

SEQ ID NO: 4921498 - DNA, 25 bp, Homo sapien
tatcacaggggcagctataatggca

SEQ ID NO: 4921499 - DNA, 25 bp, Homo sapien
cacagttatcacaggggcagctata

SEQ ID NO: 4921500 - DNA, 25 bp, Homo sapien
tttgccaagacaagtgctctggttg

SEQ ID NO: 4921501 - DNA, 25 bp, Homo sapien
caaacggaatgaaagtacctgatgt

SEQ ID NO: 4921502 - DNA, 25 bp, Homo sapien
ttaaaaatcatagtcagggcctccc

SEQ ID NO: 4921503 - DNA, 25 bp, Homo sapien
gcctttttcatctagcaaacggaat

SEQ ID NO: 4921504 - DNA, 25 bp, Homo sapien
tgcacagagacttcagggctacact

SEQ ID NO: 4921505 - DNA, 25 bp, Homo sapien
gctgcacagagacttcagggctaca

SEQ ID NO: 4921506 - DNA, 25 bp, Homo sapien
gcacagagacttcagggctacactc

SEQ ID NO: 4921507 - DNA, 25 bp, Homo sapien
cctgctgcacagagacttcagggct

SEQ ID NO: 4921508 - DNA, 25 bp, Homo sapien
aatgtcaggttctgttccataaaga

SEQ ID NO: 4921509 - DNA, 25 bp, Homo sapien
tgctatgggatttttggcacgtcca

SEQ ID NO: 4921510 - DNA, 25 bp, Homo sapien
aaacttttctagattcagccaagca

SEQ ID NO: 4921511 - DNA, 25 bp, Homo sapien
taacattctgttgggtatcccttca

SEQ ID NO: 4921512 - DNA, 25 bp, Homo sapien
taacctcctccatacactactgcag

SEQ ID NO: 4921513 - DNA, 25 bp, Homo sapien
tctacattgcttccgagaggaccaa

SEQ ID NO: 4921514 - DNA, 25 bp, Homo sapien
tccgagaggaccaacagccttctct

SEQ ID NO: 4921515 - DNA, 25 bp, Homo sapien
tgctccggttctacattgcttccga

SEQ ID NO: 4921516 - DNA, 25 bp, Homo sapien
gatccgaagatatgtcacttgcctg

SEQ ID NO: 4921517 - DNA, 25 bp, Homo sapien
ttctctaatgcaaggcagatgccat

SEQ ID NO: 4921518 - DNA, 25 bp, Homo sapien
tctgatctaataacttggcccattg

SEQ ID NO: 4921519 - DNA, 25 bp, Homo sapien
catcctttgctggagatgttctcgg

SEQ ID NO: 4921520 - DNA, 25 bp, Homo sapien
aaatttttggtcttgagtactgtga

SEQ ID NO: 4921521 - DNA, 25 bp, Homo sapien
tgctaggtatctgactggaaaacct

SEQ ID NO: 4921522 - DNA, 25 bp, Homo sapien
gatttttcaaaacttgctaggtatc

SEQ ID NO: 4921523 - DNA, 25 bp, Homo sapien
gactgtaactttcccagtaccatac

SEQ ID NO: 4921524 - DNA, 25 bp, Homo sapien
gggagcagatgtggacccaacactc

SEQ ID NO: 4921525 - DNA, 25 bp, Homo sapien
gatgtggacccaacactcgcctggg

SEQ ID NO: 4921526 - DNA, 25 bp, Homo sapien
cacctatcatgttctcctgactcag

SEQ ID NO: 4921527 - DNA, 25 bp, Homo sapien
acctatcatgttctcctgactcagg

SEQ ID NO: 4921528 - DNA, 25 bp, Homo sapien
cttttatttctgcattgcggtggcc

SEQ ID NO: 4921529 - DNA, 25 bp, Homo sapien
tatttctgcattgcggtggccgcag

SEQ ID NO: 4921530 - DNA, 25 bp, Homo sapien
tttatttctgcattgcggtggccgc

SEQ ID NO: 4921531 - DNA, 25 bp, Homo sapien
gcattgcggtggccgcaggggcccc

SEQ ID NO: 4921532 - DNA, 25 bp, Homo sapien
tgtcccataggtgccttccccaatc

SEQ ID NO: 4921533 - DNA, 25 bp, Homo sapien
ctgtcccataggtgccttccccaat

SEQ ID NO: 4921534 - DNA, 25 bp, Homo sapien
aggtgccttccccaatcttctccag

SEQ ID NO: 4921535 - DNA, 25 bp, Homo sapien
tgccttccccaatcttctccagttt

SEQ ID NO: 4921536 - DNA, 25 bp, Homo sapien
gagggcagaactcggcacaccgtca

SEQ ID NO: 4921537 - DNA, 25 bp, Homo sapien
ggcagaactcggcacaccgtcatca

SEQ ID NO: 4921538 - DNA, 25 bp, Homo sapien
ggagggcagaactcggcacaccgtc

SEQ ID NO: 4921539 - DNA, 25 bp, Homo sapien
agaactcggcacaccgtcatcattg

SEQ ID NO: 4921540 - DNA, 25 bp, Homo sapien
caccattgcaactgtcaaaatactt

SEQ ID NO: 4921541 - DNA, 25 bp, Homo sapien
tcaccattgcaactgtcaaaatact

SEQ ID NO: 4921542 - DNA, 25 bp, Homo sapien
gtgacagaatccgaggccttttagc

SEQ ID NO: 4921543 - DNA, 25 bp, Homo sapien
attgcggctgtgacagaatccgagg

SEQ ID NO: 4921544 - DNA, 25 bp, Homo sapien
gacagaatccgaggccttttagcag

SEQ ID NO: 4921545 - DNA, 25 bp, Homo sapien
ggctgtgacagaatccgaggccttt

SEQ ID NO: 4921546 - DNA, 25 bp, Homo sapien
gcagatggggatcccaaaggctcga

SEQ ID NO: 4921547 - DNA, 25 bp, Homo sapien
agcagatggggatcccaaaggctcg

SEQ ID NO: 4921548 - DNA, 25 bp, Homo sapien
cagtgtgaccactccagctcagtaa

SEQ ID NO: 4921549 - DNA, 25 bp, Homo sapien
ggtaccacagtgtgaccactccagc

SEQ ID NO: 4921550 - DNA, 25 bp, Homo sapien
agtgtgaccactccagctcagtaac

SEQ ID NO: 4921551 - DNA, 25 bp, Homo sapien
ccacagtgtgaccactccagctcag

SEQ ID NO: 4921552 - DNA, 25 bp, Homo sapien
aatgggtacagcttatagtctggca

SEQ ID NO: 4921553 - DNA, 25 bp, Homo sapien
atccctagcagccagaagatcctct

SEQ ID NO: 4921554 - DNA, 25 bp, Homo sapien
agctgaccacaagtcaatggacgtg

SEQ ID NO: 4921555 - DNA, 25 bp, Homo sapien
tggccgggtacaatgggtacagctt

SEQ ID NO: 4921556 - DNA, 25 bp, Homo sapien
ggcaggggttacacttcagaagatt

SEQ ID NO: 4921557 - DNA, 25 bp, Homo sapien
cttctgctgagatacattggcaggg

SEQ ID NO: 4921558 - DNA, 25 bp, Homo sapien
ccagggcggacagaagtcggaaaag

SEQ ID NO: 4921559 - DNA, 25 bp, Homo sapien
gcagggcctcttctgctgagataca

SEQ ID NO: 4921560 - DNA, 25 bp, Homo sapien
ccagcctggtggctgggggtccctg

SEQ ID NO: 4921561 - DNA, 25 bp, Homo sapien
caggccccagcctggtggctggggg

SEQ ID NO: 4921562 - DNA, 25 bp, Homo sapien
aaggcttaaataggccaggccccag

SEQ ID NO: 4921563 - DNA, 25 bp, Homo sapien
taaggcttaaataggccaggcccca

SEQ ID NO: 4921564 - DNA, 25 bp, Homo sapien
gggctcaggcatcccatcctggctg

SEQ ID NO: 4921565 - DNA, 25 bp, Homo sapien
ccacaaaggaagtgagaaacttggg

SEQ ID NO: 4921566 - DNA, 25 bp, Homo sapien
agtgagaaacttgggctcaggcatc

SEQ ID NO: 4921567 - DNA, 25 bp, Homo sapien
ctggagctcagcacactgggcaccc

SEQ ID NO: 4921568 - DNA, 25 bp, Homo sapien
cagagaagtccctcggaagctaggc

SEQ ID NO: 4921569 - DNA, 25 bp, Homo sapien
ccatgaacttgtattccgggcgccg

SEQ ID NO: 4921570 - DNA, 25 bp, Homo sapien
gaagaaatgcacacgcctgcggtgc

SEQ ID NO: 4921571 - DNA, 25 bp, Homo sapien
aattcgggatctgggtacacttcgg

SEQ ID NO: 4921572 - DNA, 25 bp, Homo sapien
ccgtacggagaacgatggccaaaat

SEQ ID NO: 4921573 - DNA, 25 bp, Homo sapien
gcccccgtacggagaacgatggcca

SEQ ID NO: 4921574 - DNA, 25 bp, Homo sapien
cgtacggagaacgatggccaaaatt

SEQ ID NO: 4921575 - DNA, 25 bp, Homo sapien
cgcggcacgggcgttccaaaatgga

SEQ ID NO: 4921576 - DNA, 25 bp, Homo sapien
ggcgttccaaaatggaactctgctg

SEQ ID NO: 4921577 - DNA, 25 bp, Homo sapien
ctgggaacgcggagacgcggcacgg

SEQ ID NO: 4921578 - DNA, 25 bp, Homo sapien
ccggctcgggctccgtgggaaagag

SEQ ID NO: 4921579 - DNA, 25 bp, Homo sapien
ttaacaacacattttcgggagccgc

SEQ ID NO: 4921580 - DNA, 25 bp, Homo sapien
ttgggctggagtggccggcgcccgg

SEQ ID NO: 4921581 - DNA, 25 bp, Homo sapien
acaacacattttcgggagccgcggc

SEQ ID NO: 4921582 - DNA, 25 bp, Homo sapien
gctggagtggccggcgcccggcgtg

SEQ ID NO: 4921583 - DNA, 25 bp, Homo sapien
gcccccgccaggtagctcggctgcc

SEQ ID NO: 4921584 - DNA, 25 bp, Homo sapien
gcgggggtgaggacagcgccgcgct

SEQ ID NO: 4921585 - DNA, 25 bp, Homo sapien
cagaggcagcctcggcccacggcgt

SEQ ID NO: 4921586 - DNA, 25 bp, Homo sapien
gccgccgggagcgacgagagcagag

SEQ ID NO: 4921587 - DNA, 25 bp, Homo sapien
gcgaacgtgggctcgggctggcaga

SEQ ID NO: 4921588 - DNA, 25 bp, Homo sapien
ggcgaacgtgggctcgggctggcag

SEQ ID NO: 4921589 - DNA, 25 bp, Homo sapien
ggcagacgaaaagcgccagctgccg

SEQ ID NO: 4921590 - DNA, 25 bp, Homo sapien
ctcttgtggggcagacgaaaagcgc

SEQ ID NO: 4921591 - DNA, 25 bp, Homo sapien
aaagggaccgtcctgtgatgcctgc

SEQ ID NO: 4921592 - DNA, 25 bp, Homo sapien
gcaagtttgcaaagccgaggataca

SEQ ID NO: 4921593 - DNA, 25 bp, Homo sapien
tttccgctcatcttcgtctccgcag

SEQ ID NO: 4921594 - DNA, 25 bp, Homo sapien
ctggtttccaactttccgctcatct

SEQ ID NO: 4921595 - DNA, 25 bp, Homo sapien
tgccctgggagtgaactgcttaaac

SEQ ID NO: 4921596 - DNA, 25 bp, Homo sapien
ccttctggccttaaaagaagctgtg

SEQ ID NO: 4921597 - DNA, 25 bp, Homo sapien
tgcttaaactcgctgccctcataaa

SEQ ID NO: 4921598 - DNA, 25 bp, Homo sapien
tggtcgtcatccaaacgctttttga

SEQ ID NO: 4921599 - DNA, 25 bp, Homo sapien
cactgatagaggctttacaatggcc

SEQ ID NO: 4921600 - DNA, 25 bp, Homo sapien
tgcatcctgaaaggagcacccagat

SEQ ID NO: 4921601 - DNA, 25 bp, Homo sapien
aactttgcagctttcagcccacggg

SEQ ID NO: 4921602 - DNA, 25 bp, Homo sapien
cattggctggcgaggccactctgca

SEQ ID NO: 4921603 - DNA, 25 bp, Homo sapien
tggaaacaacgtgaagtcttcgggc

SEQ ID NO: 4921604 - DNA, 25 bp, Homo sapien
gaatgcaagttctccgttctttgga

SEQ ID NO: 4921605 - DNA, 25 bp, Homo sapien
tcaagaccgtttccgttctgtggct

SEQ ID NO: 4921606 - DNA, 25 bp, Homo sapien
caaagtcaggcactgtccaagttca

SEQ ID NO: 4921607 - DNA, 25 bp, Homo sapien
tctagggcatgcctaggtgccaggc

SEQ ID NO: 4921608 - DNA, 25 bp, Homo sapien
cagcaaccctgtgagcagcgattca

SEQ ID NO: 4921609 - DNA, 25 bp, Homo sapien
cagcgattcaggctctgcaagtcca

SEQ ID NO: 4921610 - DNA, 25 bp, Homo sapien
gcggtatggccatctctgtgttcac

SEQ ID NO: 4921611 - DNA, 25 bp, Homo sapien
tatatgggatcagatgtcactcaga

SEQ ID NO: 4921612 - DNA, 25 bp, Homo sapien
actgtgacagggcaagtatatggga

SEQ ID NO: 4921613 - DNA, 25 bp, Homo sapien
cgcgcctggccttaacacagaatct

SEQ ID NO: 4921614 - DNA, 25 bp, Homo sapien
tcctttacataacagtccagcactg

SEQ ID NO: 4921615 - DNA, 25 bp, Homo sapien
ttttagcagcgtggatccccaagtc

SEQ ID NO: 4921616 - DNA, 25 bp, Homo sapien
taaactctgccttatgaagccactg

SEQ ID NO: 4921617 - DNA, 25 bp, Homo sapien
caattgagcgtggtccttagcgtca

SEQ ID NO: 4921618 - DNA, 25 bp, Homo sapien
caaagacggcgctgactaagtgtca

SEQ ID NO: 4921619 - DNA, 25 bp, Homo sapien
gtgtcacgggtatggtttgttgttc

SEQ ID NO: 4921620 - DNA, 25 bp, Homo sapien
tgtgtcacgggtatggtttgttgtt

SEQ ID NO: 4921621 - DNA, 25 bp, Homo sapien
agggggcagtgctgtttgtgtcacg

SEQ ID NO: 4921622 - DNA, 25 bp, Homo sapien
gcagtgctgtttgtgtcacgggtat

SEQ ID NO: 4921623 - DNA, 25 bp, Homo sapien
tcaggatcaaaagaagaggcttatg

SEQ ID NO: 4921624 - DNA, 25 bp, Homo sapien
ccctcaaaccttgcagctgcgtggg

SEQ ID NO: 4921625 - DNA, 25 bp, Homo sapien
accataggtggtgatcaggatcaaa

SEQ ID NO: 4921626 - DNA, 25 bp, Homo sapien
gctgggagtggtgaaacattctgtc

SEQ ID NO: 4921627 - DNA, 25 bp, Homo sapien
gggacaaccattactctgactatag

SEQ ID NO: 4921628 - DNA, 25 bp, Homo sapien
tactctgactatagctactacgtga

SEQ ID NO: 4921629 - DNA, 25 bp, Homo sapien
gaaacactagggacaaccattactc

SEQ ID NO: 4921630 - DNA, 25 bp, Homo sapien
tagctactacgtgaacccaggacag

SEQ ID NO: 4921631 - DNA, 25 bp, Homo sapien
tgaatcaacaggctatacaagggag

SEQ ID NO: 4921632 - DNA, 25 bp, Homo sapien
ctatacaagggagctagggcagcca

SEQ ID NO: 4921633 - DNA, 25 bp, Homo sapien
gggcagccacgggcctctgacagca

SEQ ID NO: 4921634 - DNA, 25 bp, Homo sapien
gacagcaacaggtcttacctgcagg

SEQ ID NO: 4921635 - DNA, 25 bp, Homo sapien
gctttccacggaaacgtcatgacag

SEQ ID NO: 4921636 - DNA, 25 bp, Homo sapien
ggaaacgtcatgacagttctgtggg

SEQ ID NO: 4921637 - DNA, 25 bp, Homo sapien
tagcttggactagcaggggccatgc

SEQ ID NO: 4921638 - DNA, 25 bp, Homo sapien
tgctcaacaccatgcgggctttcca

SEQ ID NO: 4921639 - DNA, 25 bp, Homo sapien
gacaggagacctgataccgaagagg

SEQ ID NO: 4921640 - DNA, 25 bp, Homo sapien
agacctgataccgaagaggcaagac

SEQ ID NO: 4921641 - DNA, 25 bp, Homo sapien
gatgacaggagacctgataccgaag

SEQ ID NO: 4921642 - DNA, 25 bp, Homo sapien
caggagacctgataccgaagaggca

SEQ ID NO: 4921643 - DNA, 25 bp, Homo sapien
caacatcacttcaggggctgagtct

SEQ ID NO: 4921644 - DNA, 25 bp, Homo sapien
tctctgttatgatgtaactgccaac

SEQ ID NO: 4921645 - DNA, 25 bp, Homo sapien
ccagccactgcagacatctcccatc

SEQ ID NO: 4921646 - DNA, 25 bp, Homo sapien
cagccactgcagacatctcccatct

SEQ ID NO: 4921647 - DNA, 25 bp, Homo sapien
tagagatggcattttgccattttgg

SEQ ID NO: 4921648 - DNA, 25 bp, Homo sapien
agagatggcattttgccattttggc

SEQ ID NO: 4921649 - DNA, 25 bp, Homo sapien
gtagagatggcattttgccattttg

SEQ ID NO: 4921650 - DNA, 25 bp, Homo sapien
agtagagatggcattttgccatttt

SEQ ID NO: 4921651 - DNA, 25 bp, Homo sapien
gctcatgtgggacttgatgctgttc

SEQ ID NO: 4921652 - DNA, 25 bp, Homo sapien
agggccgcgtttcctgctcatgtgg

SEQ ID NO: 4921653 - DNA, 25 bp, Homo sapien
gacgtgacacctcagggccgcgttt

SEQ ID NO: 4921654 - DNA, 25 bp, Homo sapien
ccacgcaggacgtgacacctcaggg

SEQ ID NO: 4921655 - DNA, 25 bp, Homo sapien
agaccataaagccagtgaacctgca

SEQ ID NO: 4921656 - DNA, 25 bp, Homo sapien
tctttacgtaaacgctctggaccta

SEQ ID NO: 4921657 - DNA, 25 bp, Homo sapien
aaagtggactaaaggcctgattggc

SEQ ID NO: 4921658 - DNA, 25 bp, Homo sapien
gattggcaggtgacagccactcacg

SEQ ID NO: 4921659 - DNA, 25 bp, Homo sapien
gaatctctttctgttttgaacccaa

SEQ ID NO: 4921660 - DNA, 25 bp, Homo sapien
ctcctcagtccaaaaatgtaagttc

SEQ ID NO: 4921661 - DNA, 25 bp, Homo sapien
gttccatgagagaaggaatctcttt

SEQ ID NO: 4921662 - DNA, 25 bp, Homo sapien
gtctctcctcagtccaaaaatgtaa

SEQ ID NO: 4921663 - DNA, 25 bp, Homo sapien
tccacttccctcgagtctaaggtta

SEQ ID NO: 4921664 - DNA, 25 bp, Homo sapien
caatgaccgctttctagcatagtct

SEQ ID NO: 4921665 - DNA, 25 bp, Homo sapien
gcacgctcctgccttagggtctttg

SEQ ID NO: 4921666 - DNA, 25 bp, Homo sapien
caccagctgtcgctctgcctggaat

SEQ ID NO: 4921667 - DNA, 25 bp, Homo sapien
ggcccagtacctacttcttagagta

SEQ ID NO: 4921668 - DNA, 25 bp, Homo sapien
aactatcacacttcaccagcttaca

SEQ ID NO: 4921669 - DNA, 25 bp, Homo sapien
ggcacatgggaagcaatcagttggt

SEQ ID NO: 4921670 - DNA, 25 bp, Homo sapien
tatttactatgactgatgccaccgc

SEQ ID NO: 4921671 - DNA, 25 bp, Homo sapien
ctccttggaaggtttaattatagtg

SEQ ID NO: 4921672 - DNA, 25 bp, Homo sapien
cttggaaggtttaattatagtgact

SEQ ID NO: 4921673 - DNA, 25 bp, Homo sapien
tctccacccaaatgtactccttgga

SEQ ID NO: 4921674 - DNA, 25 bp, Homo sapien
cacccaaatgtactccttggaaggt

SEQ ID NO: 4921675 - DNA, 25 bp, Homo sapien
tagttctcttgctataaaacacagt

SEQ ID NO: 4921676 - DNA, 25 bp, Homo sapien
attacagggcatgagccaccacgcc

SEQ ID NO: 4921677 - DNA, 25 bp, Homo sapien
tgaacacctaacctcaggtgttccg

SEQ ID NO: 4921678 - DNA, 25 bp, Homo sapien
acctcagcttcctgaagcgctggga

SEQ ID NO: 4921679 - DNA, 25 bp, Homo sapien
cacctaacctcaggtgttccgtcca

SEQ ID NO: 4921680 - DNA, 25 bp, Homo sapien
gataatgggtgtccaaaggcagcac

SEQ ID NO: 4921681 - DNA, 25 bp, Homo sapien
gcccaaggttcatagtgcagccaag

SEQ ID NO: 4921682 - DNA, 25 bp, Homo sapien
tggcaagaggcagtaatcacagaac

SEQ ID NO: 4921683 - DNA, 25 bp, Homo sapien
cttactgctgatgccttgcccaagg

SEQ ID NO: 4921684 - DNA, 25 bp, Homo sapien
gcatcgatcagctctcaaatggcag

SEQ ID NO: 4921685 - DNA, 25 bp, Homo sapien
catattcgccttgcagacacgaggg

SEQ ID NO: 4921686 - DNA, 25 bp, Homo sapien
tgttttcatgcaaacgtcctcggca

SEQ ID NO: 4921687 - DNA, 25 bp, Homo sapien
taacagggaatgtgggagagcccca

SEQ ID NO: 4921688 - DNA, 25 bp, Homo sapien
aagcagatgtgtcccagtctggcca

SEQ ID NO: 4921689 - DNA, 25 bp, Homo sapien
ggatggagagcatctactgtgagca

SEQ ID NO: 4921690 - DNA, 25 bp, Homo sapien
tgctgggaataacggtctggactgc

SEQ ID NO: 4921691 - DNA, 25 bp, Homo sapien
tcccagtctggccacttgaacatca

SEQ ID NO: 4921692 - DNA, 25 bp, Homo sapien
tttaactgtcaactctccagtgaca

SEQ ID NO: 4921693 - DNA, 25 bp, Homo sapien
aattttaactgtcaactctccagtg

SEQ ID NO: 4921694 - DNA, 25 bp, Homo sapien
ttaactgtcaactctccagtgacag

SEQ ID NO: 4921695 - DNA, 25 bp, Homo sapien
ttttaactgtcaactctccagtgac

SEQ ID NO: 4921696 - DNA, 25 bp, Homo sapien
gggcacctggccgttggctttgatt

SEQ ID NO: 4921697 - DNA, 25 bp, Homo sapien
taaaaccatctcgtggagttgaagc

SEQ ID NO: 4921698 - DNA, 25 bp, Homo sapien
gagacacctttaatattcggagaca

SEQ ID NO: 4921699 - DNA, 25 bp, Homo sapien
taagaaaccttttggcaggaggctc

SEQ ID NO: 4921700 - DNA, 25 bp, Homo sapien
tgccagcagatccaaggacacaaag

SEQ ID NO: 4921701 - DNA, 25 bp, Homo sapien
agaactctagttcccgtccatgcag

SEQ ID NO: 4921702 - DNA, 25 bp, Homo sapien
tctagaattcgcgagaacattgccc

SEQ ID NO: 4921703 - DNA, 25 bp, Homo sapien
tatagcttagcctgctcacagagga

SEQ ID NO: 4921704 - DNA, 25 bp, Homo sapien
tggaatgtaccataagatagccttg

SEQ ID NO: 4921705 - DNA, 25 bp, Homo sapien
atccttcctaggttgatgaatcctg

SEQ ID NO: 4921706 - DNA, 25 bp, Homo sapien
ggcaagctgcttgatctgtccatct

SEQ ID NO: 4921707 - DNA, 25 bp, Homo sapien
ttaccagcggtgtggctttaggcaa

SEQ ID NO: 4921708 - DNA, 25 bp, Homo sapien
gcctggttaggatctgcagacatca

SEQ ID NO: 4921709 - DNA, 25 bp, Homo sapien
ttcttggttagagactgacagactc

SEQ ID NO: 4921710 - DNA, 25 bp, Homo sapien
cacaagagctttgagtccagaaaca

SEQ ID NO: 4921711 - DNA, 25 bp, Homo sapien
ggacaccggtctcccagaaagctgt

SEQ ID NO: 4921712 - DNA, 25 bp, Homo sapien
caccctgcgatctttagaagggcca

SEQ ID NO: 4921713 - DNA, 25 bp, Homo sapien
caggcaccctgcgatctttagaagg

SEQ ID NO: 4921714 - DNA, 25 bp, Homo sapien
caccaggcaccctgcgatctttaga

SEQ ID NO: 4921715 - DNA, 25 bp, Homo sapien
ctgcgatctttagaagggccaccat

SEQ ID NO: 4921716 - DNA, 25 bp, Homo sapien
gattctgtgtctgcggttcctggaa

SEQ ID NO: 4921717 - DNA, 25 bp, Homo sapien
caagcactgtgcaatgtggcaagat

SEQ ID NO: 4921718 - DNA, 25 bp, Homo sapien
gagattaggtgaaccctggccttag

SEQ ID NO: 4921719 - DNA, 25 bp, Homo sapien
cattattgcgctaactcaagcactg

SEQ ID NO: 4921720 - DNA, 25 bp, Homo sapien
tattccaaaagcagtcggtacatcc

SEQ ID NO: 4921721 - DNA, 25 bp, Homo sapien
cacatcctgggaatctttttattcc

SEQ ID NO: 4921722 - DNA, 25 bp, Homo sapien
acatcctgggaatctttttattcca

SEQ ID NO: 4921723 - DNA, 25 bp, Homo sapien
tccaaaagcagtcggtacatccaga

SEQ ID NO: 4921724 - DNA, 25 bp, Homo sapien
gaccacatacagcaggtgtttgggc

SEQ ID NO: 4921725 - DNA, 25 bp, Homo sapien
tggaccacatacagcaggtgtttgg

SEQ ID NO: 4921726 - DNA, 25 bp, Homo sapien
ggaccacatacagcaggtgtttggg

SEQ ID NO: 4921727 - DNA, 25 bp, Homo sapien
ctggaccacatacagcaggtgtttg

SEQ ID NO: 4921728 - DNA, 25 bp, Homo sapien
caagagcccacgattccaggtgaag

SEQ ID NO: 4921729 - DNA, 25 bp, Homo sapien
ctatgtggtctggatcttgggccga

SEQ ID NO: 4921730 - DNA, 25 bp, Homo sapien
gttctggcatgagataggctcccca

SEQ ID NO: 4921731 - DNA, 25 bp, Homo sapien
cttgggccgagtcccttgatgacat

SEQ ID NO: 4921732 - DNA, 25 bp, Homo sapien
tcatcactatgggaatctggcgaca

SEQ ID NO: 4921733 - DNA, 25 bp, Homo sapien
tgacaagtgtttcaggcgaatgcaa

SEQ ID NO: 4921734 - DNA, 25 bp, Homo sapien
tctggcgacacgctgtttgtcttcc

SEQ ID NO: 4921735 - DNA, 25 bp, Homo sapien
taagaaatgtaaacctgacaagtgt

SEQ ID NO: 4921736 - DNA, 25 bp, Homo sapien
gactgaatggtaagaaggctcaact

SEQ ID NO: 4921737 - DNA, 25 bp, Homo sapien
acctgctaagcacaggtcctgtggc

SEQ ID NO: 4921738 - DNA, 25 bp, Homo sapien
tgtggctcctccgttagcaccagtt

SEQ ID NO: 4921739 - DNA, 25 bp, Homo sapien
tcaggtgcattcagccatgtggtca

SEQ ID NO: 4921740 - DNA, 25 bp, Homo sapien
cagtttggcattagatcacccttcc

SEQ ID NO: 4921741 - DNA, 25 bp, Homo sapien
tggaatagccgaatcaccgtatgac

SEQ ID NO: 4921742 - DNA, 25 bp, Homo sapien
tcagtctgtactagagaaacccgct

SEQ ID NO: 4921743 - DNA, 25 bp, Homo sapien
gctaaaaggctcaatcgtgtcacaa

SEQ ID NO: 4921744 - DNA, 25 bp, Homo sapien
tctgcagtctgcctcattgaccttg

SEQ ID NO: 4921745 - DNA, 25 bp, Homo sapien
tgagcacggcacctgagagcctctg

SEQ ID NO: 4921746 - DNA, 25 bp, Homo sapien
ccttcagggtctaattgaaagcctc

SEQ ID NO: 4921747 - DNA, 25 bp, Homo sapien
atgaggctctacctgctccagcaac

SEQ ID NO: 4921748 - DNA, 25 bp, Homo sapien
cctgcagacctgaaggatgcggcac

SEQ ID NO: 4921749 - DNA, 25 bp, Homo sapien
gacctgaaggatgcggcacattccc

SEQ ID NO: 4921750 - DNA, 25 bp, Homo sapien
atcttttttcttcgcctgcagacct

SEQ ID NO: 4921751 - DNA, 25 bp, Homo sapien
gatgcggcacattcccattggtcat

SEQ ID NO: 4921752 - DNA, 25 bp, Homo sapien
cacaggggccaagtacggacaggca

SEQ ID NO: 4921753 - DNA, 25 bp, Homo sapien
agaagtggaagcatacagaggatac

SEQ ID NO: 4921754 - DNA, 25 bp, Homo sapien
atacagaggatactgcccaagcccc

SEQ ID NO: 4921755 - DNA, 25 bp, Homo sapien
ggccaagtacggacaggcaccagct

SEQ ID NO: 4921756 - DNA, 25 bp, Homo sapien
gagcatcacctgaagcaaagatggc

SEQ ID NO: 4921757 - DNA, 25 bp, Homo sapien
tcaaccagtgaccatctactgagtg

SEQ ID NO: 4921758 - DNA, 25 bp, Homo sapien
gatgctgctcaaccagtgaccatct

SEQ ID NO: 4921759 - DNA, 25 bp, Homo sapien
tgaagcaaagatggcgtcctgcacc

SEQ ID NO: 4921760 - DNA, 25 bp, Homo sapien
taacaacactatcatgaaggcaaga

SEQ ID NO: 4921761 - DNA, 25 bp, Homo sapien
caaggccacatgttggcaggaaaca

SEQ ID NO: 4921762 - DNA, 25 bp, Homo sapien
gaaagtcacataactgggcctcact

SEQ ID NO: 4921763 - DNA, 25 bp, Homo sapien
ggcaagtgatatatccaaggccaca

SEQ ID NO: 4921764 - DNA, 25 bp, Homo sapien
gagtctggacatcaggccaaatgca

SEQ ID NO: 4921765 - DNA, 25 bp, Homo sapien
catgtgtcagagcaactggctagag

SEQ ID NO: 4921766 - DNA, 25 bp, Homo sapien
tctcaagaagtgatgggtcagctca

SEQ ID NO: 4921767 - DNA, 25 bp, Homo sapien
gaagctctcaggtggttacaatctc

SEQ ID NO: 4921768 - DNA, 25 bp, Homo sapien
ttctacctgattgacccaagagctc

SEQ ID NO: 4921769 - DNA, 25 bp, Homo sapien
gcagcttttgcactcaggttctacc

SEQ ID NO: 4921770 - DNA, 25 bp, Homo sapien
gatacttgcgggagttgctgcagct

SEQ ID NO: 4921771 - DNA, 25 bp, Homo sapien
tcggtgaagaccaggcttccatggc

SEQ ID NO: 4921772 - DNA, 25 bp, Homo sapien
tttacaaggcagagtgaaggtgtcc

SEQ ID NO: 4921773 - DNA, 25 bp, Homo sapien
cagactatgggcttttgcaggaggc

SEQ ID NO: 4921774 - DNA, 25 bp, Homo sapien
ccagaaaggtctcgccagtgaagtt

SEQ ID NO: 4921775 - DNA, 25 bp, Homo sapien
ttagacactagcagagcccactagg

SEQ ID NO: 4921776 - DNA, 25 bp, Homo sapien
tgtgtttctggactctgaactctgc

SEQ ID NO: 4921777 - DNA, 25 bp, Homo sapien
tgtgtggcttggaaccctcggaaca

SEQ ID NO: 4921778 - DNA, 25 bp, Homo sapien
tgctgcctggtcctcttagtccctt

SEQ ID NO: 4921779 - DNA, 25 bp, Homo sapien
cccgagttgcttggccccactgaag

SEQ ID NO: 4921780 - DNA, 25 bp, Homo sapien
tttcagccaaaacctcacagagcag

SEQ ID NO: 4921781 - DNA, 25 bp, Homo sapien
gaaatcatcatcactagactggcct

SEQ ID NO: 4921782 - DNA, 25 bp, Homo sapien
taacaggtactttcagaggcacact

SEQ ID NO: 4921783 - DNA, 25 bp, Homo sapien
cttataagacatgcttgggctgggc

SEQ ID NO: 4921784 - DNA, 25 bp, Homo sapien
tgctcaaaagcactaactcatggtg

SEQ ID NO: 4921785 - DNA, 25 bp, Homo sapien
actcatggtggttactgttatcccc

SEQ ID NO: 4921786 - DNA, 25 bp, Homo sapien
tctcagtctgcaagggataaatcca

SEQ ID NO: 4921787 - DNA, 25 bp, Homo sapien
caatactctgggatgctaacctagt

SEQ ID NO: 4921788 - DNA, 25 bp, Homo sapien
tcctgaagtgtttcattcactcgaa

SEQ ID NO: 4921789 - DNA, 25 bp, Homo sapien
tcactcgaatggagcggaccaccat

SEQ ID NO: 4921790 - DNA, 25 bp, Homo sapien
tgtttcattcactcgaatggagcgg

SEQ ID NO: 4921791 - DNA, 25 bp, Homo sapien
cattcactcgaatggagcggaccac

SEQ ID NO: 4921792 - DNA, 25 bp, Homo sapien
tgggccaggagggatttaatacaca

SEQ ID NO: 4921793 - DNA, 25 bp, Homo sapien
gactgaatccctaaccctagaccag

SEQ ID NO: 4921794 - DNA, 25 bp, Homo sapien
tatgaggccttggatttacagtgtc

SEQ ID NO: 4921795 - DNA, 25 bp, Homo sapien
cacatttgctgcataggtgttccat

SEQ ID NO: 4921796 - DNA, 25 bp, Homo sapien
gaatggatggcaatcctgctgcttc

SEQ ID NO: 4921797 - DNA, 25 bp, Homo sapien
ttcaggaatggatggcaatcctgct

SEQ ID NO: 4921798 - DNA, 25 bp, Homo sapien
gcttcttgttcaggaatggatggca

SEQ ID NO: 4921799 - DNA, 25 bp, Homo sapien
atggctttgcatttgaatctcacag

SEQ ID NO: 4921800 - DNA, 25 bp, Homo sapien
tcataggcttcttgagactcagact

SEQ ID NO: 4921801 - DNA, 25 bp, Homo sapien
tacaatcatgtttgcgccaacccaa

SEQ ID NO: 4921802 - DNA, 25 bp, Homo sapien
tattcactcaaccatgtgtcgcagc

SEQ ID NO: 4921803 - DNA, 25 bp, Homo sapien
tgatggactcacaggttatctccga

SEQ ID NO: 4921804 - DNA, 25 bp, Homo sapien
cagggcaaggatgtacgcaggtctt

SEQ ID NO: 4921805 - DNA, 25 bp, Homo sapien
tagtgcctaacatgaacctggtgct

SEQ ID NO: 4921806 - DNA, 25 bp, Homo sapien
cattcaaacagaggctagggcagca

SEQ ID NO: 4921807 - DNA, 25 bp, Homo sapien
tcatttgtccaatacctctgggagg

SEQ ID NO: 4921808 - DNA, 25 bp, Homo sapien
ggttaagcaacttgatgatcaacca

SEQ ID NO: 4921809 - DNA, 25 bp, Homo sapien
caagggttttctatgctatggaaac

SEQ ID NO: 4921810 - DNA, 25 bp, Homo sapien
tgatcaaccaccaccgtggtccatg

SEQ ID NO: 4921811 - DNA, 25 bp, Homo sapien
tatggaaacaaggaccactataggc

SEQ ID NO: 4921812 - DNA, 25 bp, Homo sapien
cctagccacagtcgttcactggcaa

SEQ ID NO: 4921813 - DNA, 25 bp, Homo sapien
tagccacagtcgttcactggcaagt

SEQ ID NO: 4921814 - DNA, 25 bp, Homo sapien
agccacagtcgttcactggcaagtg

SEQ ID NO: 4921815 - DNA, 25 bp, Homo sapien
gccacagtcgttcactggcaagtgt

SEQ ID NO: 4921816 - DNA, 25 bp, Homo sapien
aagtgtgctcagagccgaagccaac

SEQ ID NO: 4921817 - DNA, 25 bp, Homo sapien
tggaaggtgcaagcaagtcttccct

SEQ ID NO: 4921818 - DNA, 25 bp, Homo sapien
gagttctaacctccattgtctcagt

SEQ ID NO: 4921819 - DNA, 25 bp, Homo sapien
ttagctactacacccaaatcagatg

SEQ ID NO: 4921820 - DNA, 25 bp, Homo sapien
gatggcccgggaactagagtctgct

SEQ ID NO: 4921821 - DNA, 25 bp, Homo sapien
gcacttcaaggcaggccgttgaaac

SEQ ID NO: 4921822 - DNA, 25 bp, Homo sapien
cctggacttgggtgagagatggccc

SEQ ID NO: 4921823 - DNA, 25 bp, Homo sapien
ttgaaacccactgaggcaagaggcc

SEQ ID NO: 4921824 - DNA, 25 bp, Homo sapien
tcttcttgttctcgcctcgttgcca

SEQ ID NO: 4921825 - DNA, 25 bp, Homo sapien
cgcctcgttgccagtctttggagcc

SEQ ID NO: 4921826 - DNA, 25 bp, Homo sapien
ctcgttgccagtctttggagccttg

SEQ ID NO: 4921827 - DNA, 25 bp, Homo sapien
tcctcttcttgttctcgcctcgttg

SEQ ID NO: 4921828 - DNA, 25 bp, Homo sapien
tataacactgcgtgggatgaatgcg

SEQ ID NO: 4921829 - DNA, 25 bp, Homo sapien
gctgactgtgatccgcttggaggcc

SEQ ID NO: 4921830 - DNA, 25 bp, Homo sapien
gaaacgcaggtcataattataacac

SEQ ID NO: 4921831 - DNA, 25 bp, Homo sapien
acgccacagtaggtggagacaaaac

SEQ ID NO: 4921832 - DNA, 25 bp, Homo sapien
gcttcccaatgcagctctctacctc

SEQ ID NO: 4921833 - DNA, 25 bp, Homo sapien
tcatcacatcgatcctgcccttgtg

SEQ ID NO: 4921834 - DNA, 25 bp, Homo sapien
tcctctcgtgggtgacttgtgctca

SEQ ID NO: 4921835 - DNA, 25 bp, Homo sapien
ttctctgagaggctgcggctgtgaa

SEQ ID NO: 4921836 - DNA, 25 bp, Homo sapien
gtggcgagagcacttaagatctgcg

SEQ ID NO: 4921837 - DNA, 25 bp, Homo sapien
cttttttgtggcgagagcacttaag

SEQ ID NO: 4921838 - DNA, 25 bp, Homo sapien
cacgcccacgcttcttttttgtggc

SEQ ID NO: 4921839 - DNA, 25 bp, Homo sapien
gagcacttaagatctgcggatccaa

SEQ ID NO: 4921840 - DNA, 25 bp, Homo sapien
gcaacacactaggatacggactctg

SEQ ID NO: 4921841 - DNA, 25 bp, Homo sapien
tcatcaagaggcacagcttctagag

SEQ ID NO: 4921842 - DNA, 25 bp, Homo sapien
tagaggcccctgtgtatttgtttcc

SEQ ID NO: 4921843 - DNA, 25 bp, Homo sapien
caaagagctacaagtgtcatcccag

SEQ ID NO: 4921844 - DNA, 25 bp, Homo sapien
ccagcagcccaccgggcagatggaa

SEQ ID NO: 4921845 - DNA, 25 bp, Homo sapien
gggccacctggttggctctgtcagc

SEQ ID NO: 4921846 - DNA, 25 bp, Homo sapien
gcccaccgggcagatggaaaatgtg

SEQ ID NO: 4921847 - DNA, 25 bp, Homo sapien
agaggctgaactgccccctttgcag

SEQ ID NO: 4921848 - DNA, 25 bp, Homo sapien
ctagactttgacactgacaagtaat

SEQ ID NO: 4921849 - DNA, 25 bp, Homo sapien
tctcaggttgaggtggagtccacac

SEQ ID NO: 4921850 - DNA, 25 bp, Homo sapien
aaggtctcaggttgaggtggagtcc

SEQ ID NO: 4921851 - DNA, 25 bp, Homo sapien
tagactttgacactgacaagtaatt

SEQ ID NO: 4921852 - DNA, 25 bp, Homo sapien
ggcagcattgtggtcctccaaaaga

SEQ ID NO: 4921853 - DNA, 25 bp, Homo sapien
tacacactagcactgaagatagagg

SEQ ID NO: 4921854 - DNA, 25 bp, Homo sapien
tcctcagtgtcattctaagagagag

SEQ ID NO: 4921855 - DNA, 25 bp, Homo sapien
tgggtgggccctaaacgccatcctc

SEQ ID NO: 4921856 - DNA, 25 bp, Homo sapien
ccaggtgctgtactagcttgtgagg

SEQ ID NO: 4921857 - DNA, 25 bp, Homo sapien
cagtcccaggtgctgtactagcttg

SEQ ID NO: 4921858 - DNA, 25 bp, Homo sapien
ccagtcccaggtgctgtactagctt

SEQ ID NO: 4921859 - DNA, 25 bp, Homo sapien
tcccaggtgctgtactagcttgtga

SEQ ID NO: 4921860 - DNA, 25 bp, Homo sapien
tatttattgattcattcgctatgtc

SEQ ID NO: 4921861 - DNA, 25 bp, Homo sapien
tattgattcattcgctatgtcactg

SEQ ID NO: 4921862 - DNA, 25 bp, Homo sapien
acaacactatttattgattcattcg

SEQ ID NO: 4921863 - DNA, 25 bp, Homo sapien
gcctggcctggggtatatctttatt

SEQ ID NO: 4921864 - DNA, 25 bp, Homo sapien
cagtaataatccatgctggttcccc

SEQ ID NO: 4921865 - DNA, 25 bp, Homo sapien
ccaagtcaagatgatcacctggctt

SEQ ID NO: 4921866 - DNA, 25 bp, Homo sapien
tcccaagtcaagatgatcacctggc

SEQ ID NO: 4921867 - DNA, 25 bp, Homo sapien
caagtcaagatgatcacctggcttc

SEQ ID NO: 4921868 - DNA, 25 bp, Homo sapien
cccaagtcaagatgatcacctggct

SEQ ID NO: 4921869 - DNA, 25 bp, Homo sapien
cctgtgtactccatagattttgaga

SEQ ID NO: 4921870 - DNA, 25 bp, Homo sapien
tggtaacctgtgtactccatagatt

SEQ ID NO: 4921871 - DNA, 25 bp, Homo sapien
tagagttggatttatactggtaacc

SEQ ID NO: 4921872 - DNA, 25 bp, Homo sapien
ttcccatagcgccatagagttggat

SEQ ID NO: 4921873 - DNA, 25 bp, Homo sapien
taatgaccgcggtgatgctgctgat

SEQ ID NO: 4921874 - DNA, 25 bp, Homo sapien
cccttgggtcttgagtgtgcattgc

SEQ ID NO: 4921875 - DNA, 25 bp, Homo sapien
tgctgctgatggtaataagtatccc

SEQ ID NO: 4921876 - DNA, 25 bp, Homo sapien
tgcattgcagcccacaaaacatttc

SEQ ID NO: 4921877 - DNA, 25 bp, Homo sapien
tgacagcctagtggaagacgtgccc

SEQ ID NO: 4921878 - DNA, 25 bp, Homo sapien
gacgtgccctatctggacctggaac

SEQ ID NO: 4921879 - DNA, 25 bp, Homo sapien
gcataatactcgtggctcctggagg

SEQ ID NO: 4921880 - DNA, 25 bp, Homo sapien
gaaattatggctgcaagtctggacc

SEQ ID NO: 4921881 - DNA, 25 bp, Homo sapien
tctgatagaatgtcctccacaaagc

SEQ ID NO: 4921882 - DNA, 25 bp, Homo sapien
tgtcagatctttctccattctaccc

SEQ ID NO: 4921883 - DNA, 25 bp, Homo sapien
tggataaatggtgaaggtttactct

SEQ ID NO: 4921884 - DNA, 25 bp, Homo sapien
tacctcgaagagacttccctttatc

SEQ ID NO: 4921885 - DNA, 25 bp, Homo sapien
cacggaaaaccagggcttagagaag

SEQ ID NO: 4921886 - DNA, 25 bp, Homo sapien
gaaagaatcgtaacagctgccacca

SEQ ID NO: 4921887 - DNA, 25 bp, Homo sapien
gaggctgcgagactacagggattta

SEQ ID NO: 4921888 - DNA, 25 bp, Homo sapien
tatcaaaacatttagagaggctgcg

SEQ ID NO: 4921889 - DNA, 25 bp, Homo sapien
cacaactgcagtgagtgctgcacct

SEQ ID NO: 4921890 - DNA, 25 bp, Homo sapien
aactgcagtgagtgctgcacctggc

SEQ ID NO: 4921891 - DNA, 25 bp, Homo sapien
tctgcttccatgaggtctcctaatt

SEQ ID NO: 4921892 - DNA, 25 bp, Homo sapien
ttccatgaggtctcctaattcttca

SEQ ID NO: 4921893 - DNA, 25 bp, Homo sapien
gctcagagaggttcgatggcttgct

SEQ ID NO: 4921894 - DNA, 25 bp, Homo sapien
ccttgcccctctgggagtgttcaaa

SEQ ID NO: 4921895 - DNA, 25 bp, Homo sapien
gagggtagaacctagataatcctgg

SEQ ID NO: 4921896 - DNA, 25 bp, Homo sapien
gcttgatccctatgacacacagttg

SEQ ID NO: 4921897 - DNA, 25 bp, Homo sapien
aggtggtggcatttcctgacctttc

SEQ ID NO: 4921898 - DNA, 25 bp, Homo sapien
ggtggtggcatttcctgacctttcc

SEQ ID NO: 4921899 - DNA, 25 bp, Homo sapien
caggtggtggcatttcctgaccttt

SEQ ID NO: 4921900 - DNA, 25 bp, Homo sapien
tcctcaaggagttcgtagctggtac

SEQ ID NO: 4921901 - DNA, 25 bp, Homo sapien
gttcgtagctggtacattagttcgc

SEQ ID NO: 4921902 - DNA, 25 bp, Homo sapien
cattagttcgctagggctgccatga

SEQ ID NO: 4921903 - DNA, 25 bp, Homo sapien
gctggtacattagttcgctagggct

SEQ ID NO: 4921904 - DNA, 25 bp, Homo sapien
tggagctccaaatacacccttgctg

SEQ ID NO: 4921905 - DNA, 25 bp, Homo sapien
ggctgtagacagaccatcccttatc

SEQ ID NO: 4921906 - DNA, 25 bp, Homo sapien
cctgctcctcgtgggataactaaga

SEQ ID NO: 4921907 - DNA, 25 bp, Homo sapien
ttacatggaaacgatcctggagctc

SEQ ID NO: 4921908 - DNA, 25 bp, Homo sapien
tggtggatctgcaagaaatatggcc

SEQ ID NO: 4921909 - DNA, 25 bp, Homo sapien
gagcaaagtcttcgggtctgatatg

SEQ ID NO: 4921910 - DNA, 25 bp, Homo sapien
ttttgaaagcccgtgaaccaccagc

SEQ ID NO: 4921911 - DNA, 25 bp, Homo sapien
tagaaggatgatcctggcaccaggg

SEQ ID NO: 4921912 - DNA, 25 bp, Homo sapien
taaatttgcacccattggccaaagg

SEQ ID NO: 4921913 - DNA, 25 bp, Homo sapien
ggagtactattaacacagcagaatg

SEQ ID NO: 4921914 - DNA, 25 bp, Homo sapien
gaggtatgctaaaatctcctgtgaa

SEQ ID NO: 4921915 - DNA, 25 bp, Homo sapien
catcacaaattaactgtagggaggc

SEQ ID NO: 4921916 - DNA, 25 bp, Homo sapien
cagtgctcaagaagcaattgtggct

SEQ ID NO: 4921917 - DNA, 25 bp, Homo sapien
aattcagtaccacagtcatactagc

SEQ ID NO: 4921918 - DNA, 25 bp, Homo sapien
aaagaggagcaagtgtctatccact

SEQ ID NO: 4921919 - DNA, 25 bp, Homo sapien
ggctggtggctattgtctaatacaa

SEQ ID NO: 4921920 - DNA, 25 bp, Homo sapien
catgtgtaggctggtcaaattcatc

SEQ ID NO: 4921921 - DNA, 25 bp, Homo sapien
ctggcccctcgaagatgaaagcact

SEQ ID NO: 4921922 - DNA, 25 bp, Homo sapien
agagaagagggcagccgtttctttt

SEQ ID NO: 4921923 - DNA, 25 bp, Homo sapien
gaaagggccattccccggctagtga

SEQ ID NO: 4921924 - DNA, 25 bp, Homo sapien
aattggaatggcaccaaccactaaa

SEQ ID NO: 4921925 - DNA, 25 bp, Homo sapien
tgtgtgctgaagtctactgtttgag

SEQ ID NO: 4921926 - DNA, 25 bp, Homo sapien
tttccttgtgtgctgaagtctactg

SEQ ID NO: 4921927 - DNA, 25 bp, Homo sapien
agcacagaaaattggaatggcacca

SEQ ID NO: 4921928 - DNA, 25 bp, Homo sapien
cctgtctgtgtgcaatggcttattt

SEQ ID NO: 4921929 - DNA, 25 bp, Homo sapien
gctgcctgtctgtgtgcaatggctt

SEQ ID NO: 4921930 - DNA, 25 bp, Homo sapien
gtgtgcaatggcttatttttggagg

SEQ ID NO: 4921931 - DNA, 25 bp, Homo sapien
tgtgtgcaatggcttatttttggag

SEQ ID NO: 4921932 - DNA, 25 bp, Homo sapien
gacatgctccgtgaactcgttcagg

SEQ ID NO: 4921933 - DNA, 25 bp, Homo sapien
gtgatgtccgaaccatgcatggagt

SEQ ID NO: 4921934 - DNA, 25 bp, Homo sapien
gagaatcacgttgggatgctgcatg

SEQ ID NO: 4921935 - DNA, 25 bp, Homo sapien
tgtctacttcctcgggcacatcttg

SEQ ID NO: 4921936 - DNA, 25 bp, Homo sapien
gttgtgaagttacattctgcacaca

SEQ ID NO: 4921937 - DNA, 25 bp, Homo sapien
ggttgtgaagttacattctgcacac

SEQ ID NO: 4921938 - DNA, 25 bp, Homo sapien
ttttggttgtgaagttacattctgc

SEQ ID NO: 4921939 - DNA, 25 bp, Homo sapien
ttggttgtgaagttacattctgcac

SEQ ID NO: 4921940 - DNA, 25 bp, Homo sapien
cttgaagttggcctccccgggatgg

SEQ ID NO: 4921941 - DNA, 25 bp, Homo sapien
ttcgatggactgttccaagacagtt

SEQ ID NO: 4921942 - DNA, 25 bp, Homo sapien
tgattattgcgtttaattaacttca

SEQ ID NO: 4921943 - DNA, 25 bp, Homo sapien
agttgtggtcggatagggagtcgta

SEQ ID NO: 4921944 - DNA, 25 bp, Homo sapien
catcgtggcatttgtatccagggca

SEQ ID NO: 4921945 - DNA, 25 bp, Homo sapien
gggttttactcaccgagatcccaga

SEQ ID NO: 4921946 - DNA, 25 bp, Homo sapien
ggacaactcagcctgggtcgggtaa

SEQ ID NO: 4921947 - DNA, 25 bp, Homo sapien
tacagaaggcatgacgtgtcctaat

SEQ ID NO: 4921948 - DNA, 25 bp, Homo sapien
gctttaagcgctgggtggcaaacca

SEQ ID NO: 4921949 - DNA, 25 bp, Homo sapien
gatgcccctttgacaccgatatcgg

SEQ ID NO: 4921950 - DNA, 25 bp, Homo sapien
taaacctcggcatcgtcagggaact

SEQ ID NO: 4921951 - DNA, 25 bp, Homo sapien
gagaacttgttaactgggcaccgga

SEQ ID NO: 4921952 - DNA, 25 bp, Homo sapien
cagggacgcagtcggagtctgattc

SEQ ID NO: 4921953 - DNA, 25 bp, Homo sapien
acgcagtcggagtctgattcagcca

SEQ ID NO: 4921954 - DNA, 25 bp, Homo sapien
gcagtcggagtctgattcagccagt

SEQ ID NO: 4921955 - DNA, 25 bp, Homo sapien
ggacgcagtcggagtctgattcagc

SEQ ID NO: 4921956 - DNA, 25 bp, Homo sapien
taaccctggcaacgaaaagaaagca

SEQ ID NO: 4921957 - DNA, 25 bp, Homo sapien
agaaagcaagctgcgttctcccctg

SEQ ID NO: 4921958 - DNA, 25 bp, Homo sapien
attacaagaaaaagacgccaccatc

SEQ ID NO: 4921959 - DNA, 25 bp, Homo sapien
ccatctgtgtcaacatctctgtacc

SEQ ID NO: 4921960 - DNA, 25 bp, Homo sapien
cttacaaatgaggacgtaggttcca

SEQ ID NO: 4921961 - DNA, 25 bp, Homo sapien
gcacagccttacaaatgaggacgta

SEQ ID NO: 4921962 - DNA, 25 bp, Homo sapien
ttcagaatggacaggcctgaaggct

SEQ ID NO: 4921963 - DNA, 25 bp, Homo sapien
caggccacagccagcggtgctgccc

SEQ ID NO: 4921964 - DNA, 25 bp, Homo sapien
gctgctgtgcttcaggcctcgattt

SEQ ID NO: 4921965 - DNA, 25 bp, Homo sapien
gcttcaggcctcgatttgcactgac

SEQ ID NO: 4921966 - DNA, 25 bp, Homo sapien
tgtgcttcaggcctcgatttgcact

SEQ ID NO: 4921967 - DNA, 25 bp, Homo sapien
tgctgtgcttcaggcctcgatttgc

SEQ ID NO: 4921968 - DNA, 25 bp, Homo sapien
tcctccttgtaatatttgctttccc

SEQ ID NO: 4921969 - DNA, 25 bp, Homo sapien
ctgggcaaatcgtgcatcttcctcc

SEQ ID NO: 4921970 - DNA, 25 bp, Homo sapien
gcaaatcgtgcatcttcctccttgt

SEQ ID NO: 4921971 - DNA, 25 bp, Homo sapien
tcttcctccttgtaatatttgcttt

SEQ ID NO: 4921972 - DNA, 25 bp, Homo sapien
caggcgaccttcgttcatcattcca

SEQ ID NO: 4921973 - DNA, 25 bp, Homo sapien
ggcgaccttcgttcatcattccatc

SEQ ID NO: 4921974 - DNA, 25 bp, Homo sapien
ctattcaggcgaccttcgttcatca

SEQ ID NO: 4921975 - DNA, 25 bp, Homo sapien
ttcaggcgaccttcgttcatcattc

SEQ ID NO: 4921976 - DNA, 25 bp, Homo sapien
ttccccttgagtatgttgtttcttc

SEQ ID NO: 4921977 - DNA, 25 bp, Homo sapien
ccccttgagtatgttgtttcttctg

SEQ ID NO: 4921978 - DNA, 25 bp, Homo sapien
catggccacctttcagttccccttg

SEQ ID NO: 4921979 - DNA, 25 bp, Homo sapien
tcagttccccttgagtatgttgttt

SEQ ID NO: 4921980 - DNA, 25 bp, Homo sapien
tcatcaagatggaaagccaacaaag

SEQ ID NO: 4921981 - DNA, 25 bp, Homo sapien
caaactacaccgtagaacaaatggg

SEQ ID NO: 4921982 - DNA, 25 bp, Homo sapien
gcacatagtactagagctcccaaat

SEQ ID NO: 4921983 - DNA, 25 bp, Homo sapien
cgaatgttctactcaacaactgcag

SEQ ID NO: 4921984 - DNA, 25 bp, Homo sapien
gcaacttcccagtggatgacaaaaa

SEQ ID NO: 4921985 - DNA, 25 bp, Homo sapien
cctggcctgcctcataatatttgag

SEQ ID NO: 4921986 - DNA, 25 bp, Homo sapien
actccgtgccatcccaaattgtctg

SEQ ID NO: 4921987 - DNA, 25 bp, Homo sapien
aaattgtctgtacaccaggcttgag

SEQ ID NO: 4921988 - DNA, 25 bp, Homo sapien
gatcatcgataatgccattcatgcc

SEQ ID NO: 4921989 - DNA, 25 bp, Homo sapien
catctggatgttaaacgcacccaca

SEQ ID NO: 4921990 - DNA, 25 bp, Homo sapien
ctcctgggagtaagattgaatattg

SEQ ID NO: 4921991 - DNA, 25 bp, Homo sapien
gccagaggcatcagctgatcatcga

SEQ ID NO: 4921992 - DNA, 25 bp, Homo sapien
tctgagcacagtccgccataatagg

SEQ ID NO: 4921993 - DNA, 25 bp, Homo sapien
aggacttgatcactctagggcttag

SEQ ID NO: 4921994 - DNA, 25 bp, Homo sapien
gaaacgagtgtgttttctgagcaca

SEQ ID NO: 4921995 - DNA, 25 bp, Homo sapien
cacagagtcaagatgtcaggcaaat

SEQ ID NO: 4921996 - DNA, 25 bp, Homo sapien
tcagcacagcagttctaacagactt

SEQ ID NO: 4921997 - DNA, 25 bp, Homo sapien
agcacagcagttctaacagacttcc

SEQ ID NO: 4921998 - DNA, 25 bp, Homo sapien
tcttcaaagacggagcgtcccgttg

SEQ ID NO: 4921999 - DNA, 25 bp, Homo sapien
agcgtcccgttgatcagcacagcag

SEQ ID NO: 4922000 - DNA, 25 bp, Homo sapien
cctccaggcacacgcgagctaagta

SEQ ID NO: 4922001 - DNA, 25 bp, Homo sapien
tctgagagtcgctggacttcccgca

SEQ ID NO: 4922002 - DNA, 25 bp, Homo sapien
gctaagtagttccacttggagtcac

SEQ ID NO: 4922003 - DNA, 25 bp, Homo sapien
gtgcgtctgagagtcgctggacttc

SEQ ID NO: 4922004 - DNA, 25 bp, Homo sapien
tactgatcatgctaacagaggcggg

SEQ ID NO: 4922005 - DNA, 25 bp, Homo sapien
ggatttcagcccttcctgccgagaa

SEQ ID NO: 4922006 - DNA, 25 bp, Homo sapien
ccaagaggccgagcagttgagaagc

SEQ ID NO: 4922007 - DNA, 25 bp, Homo sapien
cagatcccctcttggcagttcagaa

SEQ ID NO: 4922008 - DNA, 25 bp, Homo sapien
tgccgtgggtcactgctgtagatcg

SEQ ID NO: 4922009 - DNA, 25 bp, Homo sapien
ctgtagatcggagagtgggtcacca

SEQ ID NO: 4922010 - DNA, 25 bp, Homo sapien
tactagagtgccgtgggtcactgct

SEQ ID NO: 4922011 - DNA, 25 bp, Homo sapien
ctgtccctgaatagggtactagagt

SEQ ID NO: 4922012 - DNA, 25 bp, Homo sapien
gatgaggtgtatcctattgatagca

SEQ ID NO: 4922013 - DNA, 25 bp, Homo sapien
cagttgcatttcacgtgtactgcga

SEQ ID NO: 4922014 - DNA, 25 bp, Homo sapien
tattgatagcaggatatgttttcag

SEQ ID NO: 4922015 - DNA, 25 bp, Homo sapien
gtagcactattgaagctgtgacccc

SEQ ID NO: 4922016 - DNA, 25 bp, Homo sapien
ggaggcagtctcctaacaagcttca

SEQ ID NO: 4922017 - DNA, 25 bp, Homo sapien
gtctaaccctgtgcagcatctccgg

SEQ ID NO: 4922018 - DNA, 25 bp, Homo sapien
gctttcacgcttggtacacagtcag

SEQ ID NO: 4922019 - DNA, 25 bp, Homo sapien
gaccacgtgggctctaacattcatg

SEQ ID NO: 4922020 - DNA, 25 bp, Homo sapien
tctgatgtaccctccctgagtcatc

SEQ ID NO: 4922021 - DNA, 25 bp, Homo sapien
atccccatgctttccttcgtaacag

SEQ ID NO: 4922022 - DNA, 25 bp, Homo sapien
tgctctgatgtaccctccctgagtc

SEQ ID NO: 4922023 - DNA, 25 bp, Homo sapien
taacagcgggctcaggtcccacagg

SEQ ID NO: 4922024 - DNA, 25 bp, Homo sapien
tgccctccatacaggagaccagagc

SEQ ID NO: 4922025 - DNA, 25 bp, Homo sapien
ggagaccagagcaggcttcacagtg

SEQ ID NO: 4922026 - DNA, 25 bp, Homo sapien
gtatttagtgaagcttattttccca

SEQ ID NO: 4922027 - DNA, 25 bp, Homo sapien
tggtatttagtgaagcttattttcc

SEQ ID NO: 4922028 - DNA, 25 bp, Homo sapien
cctttgtccaatgttaacctgagcc

SEQ ID NO: 4922029 - DNA, 25 bp, Homo sapien
tctggtccctgctccttgtcggcat

SEQ ID NO: 4922030 - DNA, 25 bp, Homo sapien
ttgctctctggtccctgctccttgt

SEQ ID NO: 4922031 - DNA, 25 bp, Homo sapien
ctaggcacgtaaggctcggtgcctt

SEQ ID NO: 4922032 - DNA, 25 bp, Homo sapien
cctcaaacttgaaataggcctggcc

SEQ ID NO: 4922033 - DNA, 25 bp, Homo sapien
ctcaaacttgaaataggcctggcca

SEQ ID NO: 4922034 - DNA, 25 bp, Homo sapien
tgtcagccccattgtgtggattctt

SEQ ID NO: 4922035 - DNA, 25 bp, Homo sapien
gtcagccccattgtgtggattcttc

SEQ ID NO: 4922036 - DNA, 25 bp, Homo sapien
gggagagtctgaaccttaactgtca

SEQ ID NO: 4922037 - DNA, 25 bp, Homo sapien
tacactcattgtacaggcgtggaga

SEQ ID NO: 4922038 - DNA, 25 bp, Homo sapien
gagtctctggtgtaccctcttacca

SEQ ID NO: 4922039 - DNA, 25 bp, Homo sapien
tgacagtgagtgacccggagtctct

SEQ ID NO: 4922040 - DNA, 25 bp, Homo sapien
tctaagggaataacatgatttaagg

SEQ ID NO: 4922041 - DNA, 25 bp, Homo sapien
tgtaagcacatctaagggaataaca

SEQ ID NO: 4922042 - DNA, 25 bp, Homo sapien
gctaatgtaagcacatctaagggaa

SEQ ID NO: 4922043 - DNA, 25 bp, Homo sapien
ttttaaagctaatgtaagcacatct

SEQ ID NO: 4922044 - DNA, 25 bp, Homo sapien
tcatgttggctacagggagatgctc

SEQ ID NO: 4922045 - DNA, 25 bp, Homo sapien
ggagagaccctcatacgctatttaa

SEQ ID NO: 4922046 - DNA, 25 bp, Homo sapien
tgcgtttcatatgtaggcctactgg

SEQ ID NO: 4922047 - DNA, 25 bp, Homo sapien
tcaagactgtagtggagttgcagct

SEQ ID NO: 4922048 - DNA, 25 bp, Homo sapien
cccctttggtggcagaactgtagca

SEQ ID NO: 4922049 - DNA, 25 bp, Homo sapien
gaattgcttcgacctgacatccgtt

SEQ ID NO: 4922050 - DNA, 25 bp, Homo sapien
caagcagcggatgaagcgttttctc

SEQ ID NO: 4922051 - DNA, 25 bp, Homo sapien
gccagggctttcgacttggagacca

SEQ ID NO: 4922052 - DNA, 25 bp, Homo sapien
tattctacgcgacttgaaacaggta

SEQ ID NO: 4922053 - DNA, 25 bp, Homo sapien
tgtccatctccttagtggctgagct

SEQ ID NO: 4922054 - DNA, 25 bp, Homo sapien
gatcagaggttgacatggcttgtcc

SEQ ID NO: 4922055 - DNA, 25 bp, Homo sapien
cttgtccttcagtgcagaattgggc

SEQ ID NO: 4922056 - DNA, 25 bp, Homo sapien
tggggcctttgtaacaagtccacat

SEQ ID NO: 4922057 - DNA, 25 bp, Homo sapien
ccattcagttattgtgctcttgcaa

SEQ ID NO: 4922058 - DNA, 25 bp, Homo sapien
tcttggggcctttgtaacaagtcca

SEQ ID NO: 4922059 - DNA, 25 bp, Homo sapien
ttattgtgctcttgcaattcttggg

SEQ ID NO: 4922060 - DNA, 25 bp, Homo sapien
gagattagtcgttggtagttgtcaa

SEQ ID NO: 4922061 - DNA, 25 bp, Homo sapien
tgtcaatctgttggacgctggcgat

SEQ ID NO: 4922062 - DNA, 25 bp, Homo sapien
ggtatagtgagattgtgcttcccgc

SEQ ID NO: 4922063 - DNA, 25 bp, Homo sapien
cgctcttcgcactcagtgaaggaag

SEQ ID NO: 4922064 - DNA, 25 bp, Homo sapien
cttggtcggcaaactcggcctcatc

SEQ ID NO: 4922065 - DNA, 25 bp, Homo sapien
gatcacgcgctattggttcgccgcc

SEQ ID NO: 4922066 - DNA, 25 bp, Homo sapien
tcggacatcggagactggttcagga

SEQ ID NO: 4922067 - DNA, 25 bp, Homo sapien
gaagccttcctttatcgctttcagg

SEQ ID NO: 4922068 - DNA, 25 bp, Homo sapien
agacacctaacagtcgcggagccgg

SEQ ID NO: 4922069 - DNA, 25 bp, Homo sapien
agccggccgcgtcgtgagggggtcg

SEQ ID NO: 4922070 - DNA, 25 bp, Homo sapien
ggagtcgggcggtcttgtgcatctt

SEQ ID NO: 4922071 - DNA, 25 bp, Homo sapien
ctagacacctaacagtcgcggagcc

SEQ ID NO: 4922072 - DNA, 25 bp, Homo sapien
aaggctgcctcgctggtccgaattc

SEQ ID NO: 4922073 - DNA, 25 bp, Homo sapien
gtccgaattcggtggcgccacgtcc

SEQ ID NO: 4922074 - DNA, 25 bp, Homo sapien
tttaagcggcgggacttctggtcac

SEQ ID NO: 4922075 - DNA, 25 bp, Homo sapien
ggaagtttcgcctcagaaggctgcc

SEQ ID NO: 4922076 - DNA, 25 bp, Homo sapien
agttctgataaatcactaccatcgg

SEQ ID NO: 4922077 - DNA, 25 bp, Homo sapien
taataagttctgataaatcactacc

SEQ ID NO: 4922078 - DNA, 25 bp, Homo sapien
taagttctgataaatcactaccatc

SEQ ID NO: 4922079 - DNA, 25 bp, Homo sapien
aataagttctgataaatcactacca

SEQ ID NO: 4922080 - DNA, 25 bp, Homo sapien
attggtgttgtaaagctatagtcat

SEQ ID NO: 4922081 - DNA, 25 bp, Homo sapien
tcattggtgttgtaaagctatagtc

SEQ ID NO: 4922082 - DNA, 25 bp, Homo sapien
ttggtgttgtaaagctatagtcata

SEQ ID NO: 4922083 - DNA, 25 bp, Homo sapien
cattggtgttgtaaagctatagtca

SEQ ID NO: 4922084 - DNA, 25 bp, Homo sapien
agtttcgtaatctgacaggccttcc

SEQ ID NO: 4922085 - DNA, 25 bp, Homo sapien
aatctgacaggccttccagcattat

SEQ ID NO: 4922086 - DNA, 25 bp, Homo sapien
tgacaggccttccagcattatgatg

SEQ ID NO: 4922087 - DNA, 25 bp, Homo sapien
tcgtaatctgacaggccttccagca

SEQ ID NO: 4922088 - DNA, 25 bp, Homo sapien
agatgaaatagttcattcttcctga

SEQ ID NO: 4922089 - DNA, 25 bp, Homo sapien
gatgaaatagttcattcttcctgac

SEQ ID NO: 4922090 - DNA, 25 bp, Homo sapien
gcccgctgggtaaccgtcccagcgc

SEQ ID NO: 4922091 - DNA, 25 bp, Homo sapien
gctgggtaaccgtcccagcgccttc

SEQ ID NO: 4922092 - DNA, 25 bp, Homo sapien
gaagcttgcccacgaccgccggcgg

SEQ ID NO: 4922093 - DNA, 25 bp, Homo sapien
ggcgaagcttgcccacgaccgccgg

SEQ ID NO: 4922094 - DNA, 25 bp, Homo sapien
gcttgcggtgccatatcttgccgct

SEQ ID NO: 4922095 - DNA, 25 bp, Homo sapien
tgttgcctaggtcagtgctctgcat

SEQ ID NO: 4922096 - DNA, 25 bp, Homo sapien
ggacggcttgcggtgccatatcttg

SEQ ID NO: 4922097 - DNA, 25 bp, Homo sapien
ttgccgctctccttgttgcctaggt

SEQ ID NO: 4922098 - DNA, 25 bp, Homo sapien
caaatagttgatgaatgcttgtgcg

SEQ ID NO: 4922099 - DNA, 25 bp, Homo sapien
gatatgtaaactccagagaaccgga

SEQ ID NO: 4922100 - DNA, 25 bp, Homo sapien
gtgtgttttgttccatcgccgtccc

SEQ ID NO: 4922101 - DNA, 25 bp, Homo sapien
tccccagcgcttagaggcgtgcttg

SEQ ID NO: 4922102 - DNA, 25 bp, Homo sapien
tctgcccctccgatttttcatataa

SEQ ID NO: 4922103 - DNA, 25 bp, Homo sapien
tagtgacattctgcccctccgattt

SEQ ID NO: 4922104 - DNA, 25 bp, Homo sapien
tttcatataaatcacacgtaaaaaa

SEQ ID NO: 4922105 - DNA, 25 bp, Homo sapien
tagatgtaatcacaatagtgacatt

SEQ ID NO: 4922106 - DNA, 25 bp, Homo sapien
ttcattaaagtatactaaattgaat

SEQ ID NO: 4922107 - DNA, 25 bp, Homo sapien
tattagaaacatctatcttcattat

SEQ ID NO: 4922108 - DNA, 25 bp, Homo sapien
ggtaatcggaagtgttgtgaataat

SEQ ID NO: 4922109 - DNA, 25 bp, Homo sapien
atttccttggtggtccccagcaatt

SEQ ID NO: 4922110 - DNA, 25 bp, Homo sapien
gcaattaagcagtcgcctgtgccat

SEQ ID NO: 4922111 - DNA, 25 bp, Homo sapien
gcaaaacttttggatggtaatcgga

SEQ ID NO: 4922112 - DNA, 25 bp, Homo sapien
cgtcctttagcacttatgacagtat

SEQ ID NO: 4922113 - DNA, 25 bp, Homo sapien
ccactttcgtcctttagcacttatg

SEQ ID NO: 4922114 - DNA, 25 bp, Homo sapien
tagcacttatgacagtattttgcaa

SEQ ID NO: 4922115 - DNA, 25 bp, Homo sapien
cttatgacagtattttgcaaggtac

SEQ ID NO: 4922116 - DNA, 25 bp, Homo sapien
ataaggattactttgagctaaaggt

SEQ ID NO: 4922117 - DNA, 25 bp, Homo sapien
tgagctaccattttaggccaaaaat

SEQ ID NO: 4922118 - DNA, 25 bp, Homo sapien
tccgtagagacgaagaaaatgaaac

SEQ ID NO: 4922119 - DNA, 25 bp, Homo sapien
agattatgaagggtgctatgtgcca

SEQ ID NO: 4922120 - DNA, 25 bp, Homo sapien
taagagatcattgcattagtatcac

SEQ ID NO: 4922121 - DNA, 25 bp, Homo sapien
tagaataatcagctaatgccacaag

SEQ ID NO: 4922122 - DNA, 25 bp, Homo sapien
gcttgtgctgttcgctgaacaagat

SEQ ID NO: 4922123 - DNA, 25 bp, Homo sapien
tgtgcaagcttgtgctgttcgctga

SEQ ID NO: 4922124 - DNA, 25 bp, Homo sapien
ttcagatttcctacgaagattaaag

SEQ ID NO: 4922125 - DNA, 25 bp, Homo sapien
tgtcatctgagagggcaatgcatcc

SEQ ID NO: 4922126 - DNA, 25 bp, Homo sapien
tatggagggcctcaactaagaaaga

SEQ ID NO: 4922127 - DNA, 25 bp, Homo sapien
caccaatgctgggagtgtcatctga

SEQ ID NO: 4922128 - DNA, 25 bp, Homo sapien
gactccctgcgtcaacagtgcttgg

SEQ ID NO: 4922129 - DNA, 25 bp, Homo sapien
gaagaagttgtgatggcatatttcc

SEQ ID NO: 4922130 - DNA, 25 bp, Homo sapien
tacccacagactggcgaatattcag

SEQ ID NO: 4922131 - DNA, 25 bp, Homo sapien
tctctgaaaggtatccaagtcccat

SEQ ID NO: 4922132 - DNA, 25 bp, Homo sapien
cccataattgtgctgtatcagaaga

SEQ ID NO: 4922133 - DNA, 25 bp, Homo sapien
taaaacagctgaggatggtattact

SEQ ID NO: 4922134 - DNA, 25 bp, Homo sapien
acagctgaggatggtattacttaat

SEQ ID NO: 4922135 - DNA, 25 bp, Homo sapien
tttaaaacagctgaggatggtatta

SEQ ID NO: 4922136 - DNA, 25 bp, Homo sapien
gctgaggatggtattacttaatggt

SEQ ID NO: 4922137 - DNA, 25 bp, Homo sapien
ttgtataatatactagagctttcag

SEQ ID NO: 4922138 - DNA, 25 bp, Homo sapien
gctggcaattgatatttgcaaaaaa

SEQ ID NO: 4922139 - DNA, 25 bp, Homo sapien
caaacactttgtataatatactaga

SEQ ID NO: 4922140 - DNA, 25 bp, Homo sapien
tggagctggcaattgatatttgcaa

SEQ ID NO: 4922141 - DNA, 25 bp, Homo sapien
ttctaaagagctgcctagcttccaa

SEQ ID NO: 4922142 - DNA, 25 bp, Homo sapien
ccagcatcaaaactatcaggaagaa

SEQ ID NO: 4922143 - DNA, 25 bp, Homo sapien
gaaattccagatggcgaatggctcg

SEQ ID NO: 4922144 - DNA, 25 bp, Homo sapien
tttagtgggcatctggataattcta

SEQ ID NO: 4922145 - DNA, 25 bp, Homo sapien
caattaacaggaatgttgacgagtc

SEQ ID NO: 4922146 - DNA, 25 bp, Homo sapien
tcctgcctatgccaaagaattaagg

SEQ ID NO: 4922147 - DNA, 25 bp, Homo sapien
ctaatatagttcagagacggatgcg

SEQ ID NO: 4922148 - DNA, 25 bp, Homo sapien
gacggatgcgttctttctcaaaaag

SEQ ID NO: 4922149 - DNA, 25 bp, Homo sapien
taattccttcatcgaggctcccaat

SEQ ID NO: 4922150 - DNA, 25 bp, Homo sapien
tagatgcaatgtaccgtccatgtgg

SEQ ID NO: 4922151 - DNA, 25 bp, Homo sapien
ctcaaagagaagtttacaagtctgc

SEQ ID NO: 4922152 - DNA, 25 bp, Homo sapien
gctaattgctgatgagctaattcct

SEQ ID NO: 4922153 - DNA, 25 bp, Homo sapien
ggaaaaagggtatctggtgactcaa

SEQ ID NO: 4922154 - DNA, 25 bp, Homo sapien
gaactgctagttactcgctgtgtga

SEQ ID NO: 4922155 - DNA, 25 bp, Homo sapien
gaaacaataaatagcgcttcagcgc

SEQ ID NO: 4922156 - DNA, 25 bp, Homo sapien
gcctcatttgacttcagctgggaaa

SEQ ID NO: 4922157 - DNA, 25 bp, Homo sapien
tgatgttactttcatcttaagatca

SEQ ID NO: 4922158 - DNA, 25 bp, Homo sapien
ttttgttggatattcaccatagcct

SEQ ID NO: 4922159 - DNA, 25 bp, Homo sapien
tggatattcaccatagccttttaat

SEQ ID NO: 4922160 - DNA, 25 bp, Homo sapien
ttgtttaatccatctggtaattcat

SEQ ID NO: 4922161 - DNA, 25 bp, Homo sapien
ttttgtttaatccatctggtaattc

SEQ ID NO: 4922162 - DNA, 25 bp, Homo sapien
catgagtccccttatctatgagggt

SEQ ID NO: 4922163 - DNA, 25 bp, Homo sapien
ttgtagcagagagcgccaaatgaac

SEQ ID NO: 4922164 - DNA, 25 bp, Homo sapien
tgagtagcttcctacttttgatggg

SEQ ID NO: 4922165 - DNA, 25 bp, Homo sapien
tatctatgagggtactaaacgcagt

SEQ ID NO: 4922166 - DNA, 25 bp, Homo sapien
ccaagagtggaagatatggtgtgtc

SEQ ID NO: 4922167 - DNA, 25 bp, Homo sapien
ccagtgagctaatgcagataaggtt

SEQ ID NO: 4922168 - DNA, 25 bp, Homo sapien
ttacaaatggaaatgccaagagtgg

SEQ ID NO: 4922169 - DNA, 25 bp, Homo sapien
acttcaaaacagatgagttggttgt

SEQ ID NO: 4922170 - DNA, 25 bp, Homo sapien
tttgcatacttcttgtcaaaaggct

SEQ ID NO: 4922171 - DNA, 25 bp, Homo sapien
gtggtgttgctccacgtctctccca

SEQ ID NO: 4922172 - DNA, 25 bp, Homo sapien
acttcttgtcaaaaggctgtttgtc

SEQ ID NO: 4922173 - DNA, 25 bp, Homo sapien
gctgtttgtcatctgcagtggtgtt

SEQ ID NO: 4922174 - DNA, 25 bp, Homo sapien
caaaggcctgatccttacaatcttc

SEQ ID NO: 4922175 - DNA, 25 bp, Homo sapien
ccaaaggcctgatccttacaatctt

SEQ ID NO: 4922176 - DNA, 25 bp, Homo sapien
aaggcctgatccttacaatcttcat

SEQ ID NO: 4922177 - DNA, 25 bp, Homo sapien
aaaggcctgatccttacaatcttca

SEQ ID NO: 4922178 - DNA, 25 bp, Homo sapien
gcagcagttccttgtcatgaaatgc

SEQ ID NO: 4922179 - DNA, 25 bp, Homo sapien
tcaaaccagtgttgacaccaattga

SEQ ID NO: 4922180 - DNA, 25 bp, Homo sapien
ctgggaggttatatcatgatctatg

SEQ ID NO: 4922181 - DNA, 25 bp, Homo sapien
gaatattgataggaggattaggaaa

SEQ ID NO: 4922182 - DNA, 25 bp, Homo sapien
agatattatcgaacaatttcagcca

SEQ ID NO: 4922183 - DNA, 25 bp, Homo sapien
tgtaggctacaacagtcatcagaag

SEQ ID NO: 4922184 - DNA, 25 bp, Homo sapien
cagctgagcagaggcgttctagaac

SEQ ID NO: 4922185 - DNA, 25 bp, Homo sapien
ggatggttggaaaagatattatcga

SEQ ID NO: 4922186 - DNA, 25 bp, Homo sapien
tatccaggttattccgatggtgaaa

SEQ ID NO: 4922187 - DNA, 25 bp, Homo sapien
acatttatatccaggttattccgat

SEQ ID NO: 4922188 - DNA, 25 bp, Homo sapien
acttgtctaatcacaacatttatat

SEQ ID NO: 4922189 - DNA, 25 bp, Homo sapien
ttatatccaggttattccgatggtg

SEQ ID NO: 4922190 - DNA, 25 bp, Homo sapien
gaatgtcagtaggcgtggtctccat

SEQ ID NO: 4922191 - DNA, 25 bp, Homo sapien
tgaatgtcagtaggcgtggtctcca

SEQ ID NO: 4922192 - DNA, 25 bp, Homo sapien
ggatgaatgtcagtaggcgtggtct

SEQ ID NO: 4922193 - DNA, 25 bp, Homo sapien
atgaatgtcagtaggcgtggtctcc

SEQ ID NO: 4922194 - DNA, 25 bp, Homo sapien
aatactggatactgcccttttgtca

SEQ ID NO: 4922195 - DNA, 25 bp, Homo sapien
ttccttattctttctcgttcctgtg

SEQ ID NO: 4922196 - DNA, 25 bp, Homo sapien
tgtgtttgatagtccacaataaact

SEQ ID NO: 4922197 - DNA, 25 bp, Homo sapien
gattaaatactggatactgcccttt

SEQ ID NO: 4922198 - DNA, 25 bp, Homo sapien
tggtcgactttagcttgcatatctt

SEQ ID NO: 4922199 - DNA, 25 bp, Homo sapien
ttcagctttacgaagcagctcctgt

SEQ ID NO: 4922200 - DNA, 25 bp, Homo sapien
caactctttgctggtcgactttagc

SEQ ID NO: 4922201 - DNA, 25 bp, Homo sapien
tcctgtttctggtaccaagcttcat

SEQ ID NO: 4922202 - DNA, 25 bp, Homo sapien
tgaagcttcagaaaacgccttcttg

SEQ ID NO: 4922203 - DNA, 25 bp, Homo sapien
ttcagaaaacgccttcttgcagcat

SEQ ID NO: 4922204 - DNA, 25 bp, Homo sapien
gaaaacgccttcttgcagcatcttg

SEQ ID NO: 4922205 - DNA, 25 bp, Homo sapien
acgccttcttgcagcatcttgtaag

SEQ ID NO: 4922206 - DNA, 25 bp, Homo sapien
ggctgtggcagcaatttctcgatct

SEQ ID NO: 4922207 - DNA, 25 bp, Homo sapien
ttttgtgattcgagttccagctgtc

SEQ ID NO: 4922208 - DNA, 25 bp, Homo sapien
gtctcttttgtgattcgagttccag

SEQ ID NO: 4922209 - DNA, 25 bp, Homo sapien
gcaatttctcgatctctcatatata

SEQ ID NO: 4922210 - DNA, 25 bp, Homo sapien
gtggcaatcactacagccaatttga

SEQ ID NO: 4922211 - DNA, 25 bp, Homo sapien
aaaaactcagcataggctgggagca

SEQ ID NO: 4922212 - DNA, 25 bp, Homo sapien
gaaaaaggtagtggcagcacatccg

SEQ ID NO: 4922213 - DNA, 25 bp, Homo sapien
gcacatccgtacctaactgaccaga

SEQ ID NO: 4922214 - DNA, 25 bp, Homo sapien
tgcttctatcagcttatgaaacatg

SEQ ID NO: 4922215 - DNA, 25 bp, Homo sapien
gaaacatgtgttcttcaagatccac

SEQ ID NO: 4922216 - DNA, 25 bp, Homo sapien
cacttttcgtctataggcatctgca

SEQ ID NO: 4922217 - DNA, 25 bp, Homo sapien
tctgctcgcatttcttttgcaagag

SEQ ID NO: 4922218 - DNA, 25 bp, Homo sapien
ctacttcctggtaacatttgtttcg

SEQ ID NO: 4922219 - DNA, 25 bp, Homo sapien
tgtttatgtaaagactgaatctgcc

SEQ ID NO: 4922220 - DNA, 25 bp, Homo sapien
ccctaaggagtttggctacttcctg

SEQ ID NO: 4922221 - DNA, 25 bp, Homo sapien
tgaatctgccagtcggtatttaggc

SEQ ID NO: 4922222 - DNA, 25 bp, Homo sapien
gtatagccctagtgtcagcaatgtt

SEQ ID NO: 4922223 - DNA, 25 bp, Homo sapien
cagtgaatttcacacagtatagccc

SEQ ID NO: 4922224 - DNA, 25 bp, Homo sapien
tcacacagtatagccctagtgtcag

SEQ ID NO: 4922225 - DNA, 25 bp, Homo sapien
aaagtccagcagcagtgaatttcac

SEQ ID NO: 4922226 - DNA, 25 bp, Homo sapien
gacatggattttcagcatgttctac

SEQ ID NO: 4922227 - DNA, 25 bp, Homo sapien
tttctttgctgatctcaaacggaac

SEQ ID NO: 4922228 - DNA, 25 bp, Homo sapien
gcatgttctacagccgcatttatct

SEQ ID NO: 4922229 - DNA, 25 bp, Homo sapien
tgctgatctcaaacggaactctttt

SEQ ID NO: 4922230 - DNA, 25 bp, Homo sapien
agcacgctggccactgctacatttg

SEQ ID NO: 4922231 - DNA, 25 bp, Homo sapien
aagcacgctggccactgctacattt

SEQ ID NO: 4922232 - DNA, 25 bp, Homo sapien
taagctccatgtgtcgagcccagaa

SEQ ID NO: 4922233 - DNA, 25 bp, Homo sapien
tcattaaatcggtaagatgtctgcc

SEQ ID NO: 4922234 - DNA, 25 bp, Homo sapien
tcaaacatctgaagggcgggacatg

SEQ ID NO: 4922235 - DNA, 25 bp, Homo sapien
gacatggcggaggtagtaaacgtaa

SEQ ID NO: 4922236 - DNA, 25 bp, Homo sapien
tctgtgttgagggatccatttcaga

SEQ ID NO: 4922237 - DNA, 25 bp, Homo sapien
ggcaaacagcttgagtcctgttcat

SEQ ID NO: 4922238 - DNA, 25 bp, Homo sapien
acagcttgagtcctgttcattttgg

SEQ ID NO: 4922239 - DNA, 25 bp, Homo sapien
catttaattgtgaggttctaggcaa

SEQ ID NO: 4922240 - DNA, 25 bp, Homo sapien
tctctggcgaagatttctcactttc

SEQ ID NO: 4922241 - DNA, 25 bp, Homo sapien
gtttgacatctgtgacgagcccggg

SEQ ID NO: 4922242 - DNA, 25 bp, Homo sapien
gcccgggcagtgagtctctggcgaa

SEQ ID NO: 4922243 - DNA, 25 bp, Homo sapien
gtcccgtggtgtcccattctactgc

SEQ ID NO: 4922244 - DNA, 25 bp, Homo sapien
ccatttacaagccaaaaagtatcag

SEQ ID NO: 4922245 - DNA, 25 bp, Homo sapien
tcaatgtcactgattgcaaaatagg

SEQ ID NO: 4922246 - DNA, 25 bp, Homo sapien
cgaccgtctcaaggtgacatgcatt

SEQ ID NO: 4922247 - DNA, 25 bp, Homo sapien
gattgcaaaataggtctctctctcg

SEQ ID NO: 4922248 - DNA, 25 bp, Homo sapien
ttcctttagcaataatgtaggtaaa

SEQ ID NO: 4922249 - DNA, 25 bp, Homo sapien
ttatgataggggcacgcagtttcct

SEQ ID NO: 4922250 - DNA, 25 bp, Homo sapien
cctttagcaataatgtaggtaaatg

SEQ ID NO: 4922251 - DNA, 25 bp, Homo sapien
atgataggggcacgcagtttccttt

SEQ ID NO: 4922252 - DNA, 25 bp, Homo sapien
taatatgttgggtagcttgccagtc

SEQ ID NO: 4922253 - DNA, 25 bp, Homo sapien
caggaccgttgggatttaatctgca

SEQ ID NO: 4922254 - DNA, 25 bp, Homo sapien
ttgtaattgtggtagacaggaccgt

SEQ ID NO: 4922255 - DNA, 25 bp, Homo sapien
tgggactgctacacccgaaagtggg

SEQ ID NO: 4922256 - DNA, 25 bp, Homo sapien
tctaattcctacagttcgcctttta

SEQ ID NO: 4922257 - DNA, 25 bp, Homo sapien
taaggtacgtcaacatttaaatagc

SEQ ID NO: 4922258 - DNA, 25 bp, Homo sapien
cttcatcccagaaaaactgtcagcc

SEQ ID NO: 4922259 - DNA, 25 bp, Homo sapien
aagtcttcatcccagaaaaactgtc

SEQ ID NO: 4922260 - DNA, 25 bp, Homo sapien
ggtactgcaagctcttcagttactg

SEQ ID NO: 4922261 - DNA, 25 bp, Homo sapien
ctgaaggaatgttgaaggtactgca

SEQ ID NO: 4922262 - DNA, 25 bp, Homo sapien
tgttctccaagtcatcaaactggtt

SEQ ID NO: 4922263 - DNA, 25 bp, Homo sapien
caaactggttggtgattctcatcag

SEQ ID NO: 4922264 - DNA, 25 bp, Homo sapien
tgctctaacaggatgccacagactg

SEQ ID NO: 4922265 - DNA, 25 bp, Homo sapien
tgcactgtgcatcccatactgtatg

SEQ ID NO: 4922266 - DNA, 25 bp, Homo sapien
cttccctggcagacattactagttg

SEQ ID NO: 4922267 - DNA, 25 bp, Homo sapien
tgatcataggattctgccagtgagc

SEQ ID NO: 4922268 - DNA, 25 bp, Homo sapien
cagaggtgagtatcctgtagggacc

SEQ ID NO: 4922269 - DNA, 25 bp, Homo sapien
tctttcttggttgaataaatgcttg

SEQ ID NO: 4922270 - DNA, 25 bp, Homo sapien
gagtatcctgtagggaccattttct

SEQ ID NO: 4922271 - DNA, 25 bp, Homo sapien
tgcttgagtgtctccctgagacaga

SEQ ID NO: 4922272 - DNA, 25 bp, Homo sapien
cattacagatcctctgattggttcc

SEQ ID NO: 4922273 - DNA, 25 bp, Homo sapien
cctttctactcacagcgcattacag

SEQ ID NO: 4922274 - DNA, 25 bp, Homo sapien
cacagcgcattacagatcctctgat

SEQ ID NO: 4922275 - DNA, 25 bp, Homo sapien
tactcacagcgcattacagatcctc

SEQ ID NO: 4922276 - DNA, 25 bp, Homo sapien
gcacaaaatggtcccacatgttcat

SEQ ID NO: 4922277 - DNA, 25 bp, Homo sapien
aatggtcccacatgttcattccagc

SEQ ID NO: 4922278 - DNA, 25 bp, Homo sapien
gccatcgctgagtgctcactgcatg

SEQ ID NO: 4922279 - DNA, 25 bp, Homo sapien
tccagcatggcttctcccatacttg

SEQ ID NO: 4922280 - DNA, 25 bp, Homo sapien
gactatactctcagtgaccagttcc

SEQ ID NO: 4922281 - DNA, 25 bp, Homo sapien
caactgccatgtgccattgaagatg

SEQ ID NO: 4922282 - DNA, 25 bp, Homo sapien
ggtccatggatttgctcggcttcac

SEQ ID NO: 4922283 - DNA, 25 bp, Homo sapien
gctccgaagctgtccatagagacta

SEQ ID NO: 4922284 - DNA, 25 bp, Homo sapien
cattgtcgtgtttgcagagaccgca

SEQ ID NO: 4922285 - DNA, 25 bp, Homo sapien
gaacactgtctggagaacgagccga

SEQ ID NO: 4922286 - DNA, 25 bp, Homo sapien
tccaagaagtgatttaccgctgtcc

SEQ ID NO: 4922287 - DNA, 25 bp, Homo sapien
gcaaatggaacacaccacggaggag

SEQ ID NO: 4922288 - DNA, 25 bp, Homo sapien
gagcacccgccagtaggcttcagaa

SEQ ID NO: 4922289 - DNA, 25 bp, Homo sapien
gccgggcactctcgttgtcactaaa

SEQ ID NO: 4922290 - DNA, 25 bp, Homo sapien
tgcttgacggtctggaagtacacag

SEQ ID NO: 4922291 - DNA, 25 bp, Homo sapien
cagacgcttccggattttgcccagg

SEQ ID NO: 4922292 - DNA, 25 bp, Homo sapien
ctctatcagcccccgatcctccctg

SEQ ID NO: 4922293 - DNA, 25 bp, Homo sapien
atcagcccccgatcctccctgctac

SEQ ID NO: 4922294 - DNA, 25 bp, Homo sapien
ctatcagcccccgatcctccctgct

SEQ ID NO: 4922295 - DNA, 25 bp, Homo sapien
ctgctctatcagcccccgatcctcc

SEQ ID NO: 4922296 - DNA, 25 bp, Homo sapien
gcctcttcacccttggatggtttat

SEQ ID NO: 4922297 - DNA, 25 bp, Homo sapien
cacccttggatggtttatctggaag

SEQ ID NO: 4922298 - DNA, 25 bp, Homo sapien
actaaattttccagaactctgctcc

SEQ ID NO: 4922299 - DNA, 25 bp, Homo sapien
taaattttccagaactctgctccct

SEQ ID NO: 4922300 - DNA, 25 bp, Homo sapien
ccctcgggagagcactgaacttcat

SEQ ID NO: 4922301 - DNA, 25 bp, Homo sapien
gaactggcacactcaggaacaggcc

SEQ ID NO: 4922302 - DNA, 25 bp, Homo sapien
tttagtccggcataggagctgagcc

SEQ ID NO: 4922303 - DNA, 25 bp, Homo sapien
gaacttcatgcggaaagaccagaac

SEQ ID NO: 4922304 - DNA, 25 bp, Homo sapien
caggcttccttccagggatccttcc

SEQ ID NO: 4922305 - DNA, 25 bp, Homo sapien
ggcttccttccagggatccttcctc

SEQ ID NO: 4922306 - DNA, 25 bp, Homo sapien
cttccttccagggatccttcctcac

SEQ ID NO: 4922307 - DNA, 25 bp, Homo sapien
aggcttccttccagggatccttcct

SEQ ID NO: 4922308 - DNA, 25 bp, Homo sapien
cctgtctaggtttatcttgtttgct

SEQ ID NO: 4922309 - DNA, 25 bp, Homo sapien
tgtcttccagctggattaatttgaa

SEQ ID NO: 4922310 - DNA, 25 bp, Homo sapien
tcctgttgggattgtcttccagctg

SEQ ID NO: 4922311 - DNA, 25 bp, Homo sapien
tgggattgtcttccagctggattaa

SEQ ID NO: 4922312 - DNA, 25 bp, Homo sapien
tcagagatctggactttgtcacaca

SEQ ID NO: 4922313 - DNA, 25 bp, Homo sapien
aacgaacaccccacgcttgttggct

SEQ ID NO: 4922314 - DNA, 25 bp, Homo sapien
tggctgcctctagaatgtcacagaa

SEQ ID NO: 4922315 - DNA, 25 bp, Homo sapien
tgtcacagaagatctccacatccgt

SEQ ID NO: 4922316 - DNA, 25 bp, Homo sapien
caggaggcagcactgaactcagctg

SEQ ID NO: 4922317 - DNA, 25 bp, Homo sapien
gccagaggtcccaaggcctgtggca

SEQ ID NO: 4922318 - DNA, 25 bp, Homo sapien
gaggcagcactgaactcagctgcat

SEQ ID NO: 4922319 - DNA, 25 bp, Homo sapien
agccagaggtcccaaggcctgtggc

SEQ ID NO: 4922320 - DNA, 25 bp, Homo sapien
caaatctccagtccgagatgatgaa

SEQ ID NO: 4922321 - DNA, 25 bp, Homo sapien
tgacttggcacagtatatctctcct

SEQ ID NO: 4922322 - DNA, 25 bp, Homo sapien
ttggccagcgaatttcctgcctgac

SEQ ID NO: 4922323 - DNA, 25 bp, Homo sapien
cttctcccggatttggccagcgaat

SEQ ID NO: 4922324 - DNA, 25 bp, Homo sapien
ttgacaggagatgaatccaaggctc

SEQ ID NO: 4922325 - DNA, 25 bp, Homo sapien
gacaggagatgaatccaaggctcac

SEQ ID NO: 4922326 - DNA, 25 bp, Homo sapien
tgacaggagatgaatccaaggctca

SEQ ID NO: 4922327 - DNA, 25 bp, Homo sapien
cttgacaggagatgaatccaaggct

SEQ ID NO: 4922328 - DNA, 25 bp, Homo sapien
tttgtgtctgagcagcgggagctgg

SEQ ID NO: 4922329 - DNA, 25 bp, Homo sapien
cagagggagaccttctgggagctgc

SEQ ID NO: 4922330 - DNA, 25 bp, Homo sapien
gcagcgggagctggtctgcacctca

SEQ ID NO: 4922331 - DNA, 25 bp, Homo sapien
cccatctatgtgatgcagctccagc

SEQ ID NO: 4922332 - DNA, 25 bp, Homo sapien
agggtccacatttcttgcctctcac

SEQ ID NO: 4922333 - DNA, 25 bp, Homo sapien
tggaattcttgccagaaagggtcca

SEQ ID NO: 4922334 - DNA, 25 bp, Homo sapien
gccagaaagggtccacatttcttgc

SEQ ID NO: 4922335 - DNA, 25 bp, Homo sapien
ctggaattcttgccagaaagggtcc

SEQ ID NO: 4922336 - DNA, 25 bp, Homo sapien
ttctacgtcctattgcaatatcaag

SEQ ID NO: 4922337 - DNA, 25 bp, Homo sapien
tgcaatatcaagggaaacggaggca

SEQ ID NO: 4922338 - DNA, 25 bp, Homo sapien
attctacgtcctattgcaatatcaa

SEQ ID NO: 4922339 - DNA, 25 bp, Homo sapien
ttgcaatatcaagggaaacggaggc

SEQ ID NO: 4922340 - DNA, 25 bp, Homo sapien
ttgtgtgaatgtgcctcctaagcca

SEQ ID NO: 4922341 - DNA, 25 bp, Homo sapien
aaggtgtgaactgcacttgtgtgaa

SEQ ID NO: 4922342 - DNA, 25 bp, Homo sapien
ttttcccatagccttgttctcctac

SEQ ID NO: 4922343 - DNA, 25 bp, Homo sapien
tagccttgttctcctaccttcaaat

SEQ ID NO: 4922344 - DNA, 25 bp, Homo sapien
tatgaaggacattccagacctcaag

SEQ ID NO: 4922345 - DNA, 25 bp, Homo sapien
tgctatgaaggacattccagacctc

SEQ ID NO: 4922346 - DNA, 25 bp, Homo sapien
aggacattccagacctcaaggcaag

SEQ ID NO: 4922347 - DNA, 25 bp, Homo sapien
gggaccctcggtgctatgaaggaca

SEQ ID NO: 4922348 - DNA, 25 bp, Homo sapien
tcgtgtgcaatgcagctagtgggtc

SEQ ID NO: 4922349 - DNA, 25 bp, Homo sapien
ctgccccatggtcgtgtgcaatgca

SEQ ID NO: 4922350 - DNA, 25 bp, Homo sapien
catggtcgtgtgcaatgcagctagt

SEQ ID NO: 4922351 - DNA, 25 bp, Homo sapien
ccccatggtcgtgtgcaatgcagct

SEQ ID NO: 4922352 - DNA, 25 bp, Homo sapien
tccaaatcatgatgggagtgaagcc

SEQ ID NO: 4922353 - DNA, 25 bp, Homo sapien
tctctgaggcaatgatctggaagct

SEQ ID NO: 4922354 - DNA, 25 bp, Homo sapien
gaaaacatacccagtccagtccctg

SEQ ID NO: 4922355 - DNA, 25 bp, Homo sapien
tactgtacttcatgccaggaaagca

SEQ ID NO: 4922356 - DNA, 25 bp, Homo sapien
agccagtcgccctctgttgtctgaa

SEQ ID NO: 4922357 - DNA, 25 bp, Homo sapien
aagcgcagggacaaagggccgcact

SEQ ID NO: 4922358 - DNA, 25 bp, Homo sapien
aggtgagcagttgatgccgagccaa

SEQ ID NO: 4922359 - DNA, 25 bp, Homo sapien
aaagggccgcactgcactcagaagc

SEQ ID NO: 4922360 - DNA, 25 bp, Homo sapien
cacgtgtccgcagagccaggtgaag

SEQ ID NO: 4922361 - DNA, 25 bp, Homo sapien
aggatgttccggtgcacgtgtccgc

SEQ ID NO: 4922362 - DNA, 25 bp, Homo sapien
tgttccggtgcacgtgtccgcagag

SEQ ID NO: 4922363 - DNA, 25 bp, Homo sapien
cttggagaggatgttccggtgcacg

SEQ ID NO: 4922364 - DNA, 25 bp, Homo sapien
gaggaggcgtagaggtggcggaact

SEQ ID NO: 4922365 - DNA, 25 bp, Homo sapien
ggcggaactcctcgtcaaacagctc

SEQ ID NO: 4922366 - DNA, 25 bp, Homo sapien
tggcggaactcctcgtcaaacagct

SEQ ID NO: 4922367 - DNA, 25 bp, Homo sapien
aggtggcggaactcctcgtcaaaca

SEQ ID NO: 4922368 - DNA, 25 bp, Homo sapien
gaaggggttggaggacgtgcggtca

SEQ ID NO: 4922369 - DNA, 25 bp, Homo sapien
gctgctgctaaggcggccattggcc

SEQ ID NO: 4922370 - DNA, 25 bp, Homo sapien
ctgctgctaaggcggccattggccg

SEQ ID NO: 4922371 - DNA, 25 bp, Homo sapien
gctgcctgccgagcggccgctgaag

SEQ ID NO: 4922372 - DNA, 25 bp, Homo sapien
ctgcagccgcgtgggcctgtaggcc

SEQ ID NO: 4922373 - DNA, 25 bp, Homo sapien
ccagctgcagccgcgtgggcctgta

SEQ ID NO: 4922374 - DNA, 25 bp, Homo sapien
cgcggggctacagggccctgaagac

SEQ ID NO: 4922375 - DNA, 25 bp, Homo sapien
ttgctgtagacagcggcgggcgggc

SEQ ID NO: 4922376 - DNA, 25 bp, Homo sapien
gaagggcctccaggttggagtcagc

SEQ ID NO: 4922377 - DNA, 25 bp, Homo sapien
gcctccaggttggagtcagcctcgg

SEQ ID NO: 4922378 - DNA, 25 bp, Homo sapien
tccaggttggagtcagcctcggcac

SEQ ID NO: 4922379 - DNA, 25 bp, Homo sapien
aagggcctccaggttggagtcagcc

SEQ ID NO: 4922380 - DNA, 25 bp, Homo sapien
ttcaaagggaagtggctcaacgcca

SEQ ID NO: 4922381 - DNA, 25 bp, Homo sapien
tcattgggcccaaggataccctagt

SEQ ID NO: 4922382 - DNA, 25 bp, Homo sapien
tattcctcaggaggtgaccaggctg

SEQ ID NO: 4922383 - DNA, 25 bp, Homo sapien
tgctgcacaggtcaaactagagcgg

SEQ ID NO: 4922384 - DNA, 25 bp, Homo sapien
gagctctgtgctctcgtccctccac

SEQ ID NO: 4922385 - DNA, 25 bp, Homo sapien
gctgagcttccccgccaaaaaccga

SEQ ID NO: 4922386 - DNA, 25 bp, Homo sapien
tgagcttccccgccaaaaaccgaca

SEQ ID NO: 4922387 - DNA, 25 bp, Homo sapien
tccctccacagcgaaggctgagctt

SEQ ID NO: 4922388 - DNA, 25 bp, Homo sapien
gagaattggaacagagggatggatg

SEQ ID NO: 4922389 - DNA, 25 bp, Homo sapien
gccatcaggaaccaaagtgttgttt

SEQ ID NO: 4922390 - DNA, 25 bp, Homo sapien
tcagaaagccatcaggaaccaaagt

SEQ ID NO: 4922391 - DNA, 25 bp, Homo sapien
catcaggaaccaaagtgttgtttgt

SEQ ID NO: 4922392 - DNA, 25 bp, Homo sapien
aagccatcaggaaccaaagtgttgt

SEQ ID NO: 4922393 - DNA, 25 bp, Homo sapien
tgaaacaacaaggtcagggctgggt

SEQ ID NO: 4922394 - DNA, 25 bp, Homo sapien
tgtgaaacaacaaggtcagggctgg

SEQ ID NO: 4922395 - DNA, 25 bp, Homo sapien
ctgtgaaacaacaaggtcagggctg

SEQ ID NO: 4922396 - DNA, 25 bp, Homo sapien
gtgaaacaacaaggtcagggctggg

SEQ ID NO: 4922397 - DNA, 25 bp, Homo sapien
tgtcaacaaagacgaccacggaggg

SEQ ID NO: 4922398 - DNA, 25 bp, Homo sapien
tttggaatgttcagccgggcccagt

SEQ ID NO: 4922399 - DNA, 25 bp, Homo sapien
gattctgctcatcgcttaggacccc

SEQ ID NO: 4922400 - DNA, 25 bp, Homo sapien
catcacatgttacaggtgcccagga

SEQ ID NO: 4922401 - DNA, 25 bp, Homo sapien
gaggagcagcgttgatcattagcaa

SEQ ID NO: 4922402 - DNA, 25 bp, Homo sapien
tgttcaaccagggaggactgactgt

SEQ ID NO: 4922403 - DNA, 25 bp, Homo sapien
ggtaacagatcattcctaggagaca

SEQ ID NO: 4922404 - DNA, 25 bp, Homo sapien
tgtggcaccaatgtagctctggacc

SEQ ID NO: 4922405 - DNA, 25 bp, Homo sapien
ctgaaaatcaagggaaaggcctgct

SEQ ID NO: 4922406 - DNA, 25 bp, Homo sapien
caagggaaaggcctgcttgtatttt

SEQ ID NO: 4922407 - DNA, 25 bp, Homo sapien
aaaatcaagggaaaggcctgcttgt

SEQ ID NO: 4922408 - DNA, 25 bp, Homo sapien
gcctgcttgtatttttccggggaga

SEQ ID NO: 4922409 - DNA, 25 bp, Homo sapien
tgtgtgcttcgtcggtggcatcttc

SEQ ID NO: 4922410 - DNA, 25 bp, Homo sapien
ttgcatttgttattcctccacgttc

SEQ ID NO: 4922411 - DNA, 25 bp, Homo sapien
ctgctttgtgtgcttcgtcggtggc

SEQ ID NO: 4922412 - DNA, 25 bp, Homo sapien
cagggtttgcatttgttattcctcc

SEQ ID NO: 4922413 - DNA, 25 bp, Homo sapien
cctcaggagagacgaaggtttgcag

SEQ ID NO: 4922414 - DNA, 25 bp, Homo sapien
agagacgaaggtttgcagcaggctc

SEQ ID NO: 4922415 - DNA, 25 bp, Homo sapien
gagaggtatcgtgtcagggtcctca

SEQ ID NO: 4922416 - DNA, 25 bp, Homo sapien
aggctcggtggagaatgagaggtat

SEQ ID NO: 4922417 - DNA, 25 bp, Homo sapien
aaatactatatgtggcccttttgtc

SEQ ID NO: 4922418 - DNA, 25 bp, Homo sapien
atatgtggcccttttgtctcatgtc

SEQ ID NO: 4922419 - DNA, 25 bp, Homo sapien
tctaaatactatatgtggccctttt

SEQ ID NO: 4922420 - DNA, 25 bp, Homo sapien
tccaaataaggtctaaatactatat

SEQ ID NO: 4922421 - DNA, 25 bp, Homo sapien
ttgaagtaccgagtcgcgggtgcct

SEQ ID NO: 4922422 - DNA, 25 bp, Homo sapien
taccgccgcatctgaagaggttact

SEQ ID NO: 4922423 - DNA, 25 bp, Homo sapien
cctagcgtagtgttgggcatgttcc

SEQ ID NO: 4922424 - DNA, 25 bp, Homo sapien
tcctttctgaaacgcccggatggct

SEQ ID NO: 4922425 - DNA, 25 bp, Homo sapien
gaatctggggccagctctttcagca

SEQ ID NO: 4922426 - DNA, 25 bp, Homo sapien
ctgaatctggggccagctctttcag

SEQ ID NO: 4922427 - DNA, 25 bp, Homo sapien
tggggccagctctttcagcagcact

SEQ ID NO: 4922428 - DNA, 25 bp, Homo sapien
atctggggccagctctttcagcagc

SEQ ID NO: 4922429 - DNA, 25 bp, Homo sapien
tgtgacggtggttactgtcttttca

SEQ ID NO: 4922430 - DNA, 25 bp, Homo sapien
ttttgttactagctctggcccatat

SEQ ID NO: 4922431 - DNA, 25 bp, Homo sapien
ctgaggaccctcgccttttgttact

SEQ ID NO: 4922432 - DNA, 25 bp, Homo sapien
gaccctcgccttttgttactagctc

SEQ ID NO: 4922433 - DNA, 25 bp, Homo sapien
gtctgcacggcattctcatttcctg

SEQ ID NO: 4922434 - DNA, 25 bp, Homo sapien
ctgcacggcattctcatttcctggt

SEQ ID NO: 4922435 - DNA, 25 bp, Homo sapien
tgcgtgtctgcacggcattctcatt

SEQ ID NO: 4922436 - DNA, 25 bp, Homo sapien
cttgcgtgtctgcacggcattctca

SEQ ID NO: 4922437 - DNA, 25 bp, Homo sapien
gcttagggaatctgtttcggtggct

SEQ ID NO: 4922438 - DNA, 25 bp, Homo sapien
tttactactgtcctgctcgctcggc

SEQ ID NO: 4922439 - DNA, 25 bp, Homo sapien
gctcggcgtttcttgcacgtcactg

SEQ ID NO: 4922440 - DNA, 25 bp, Homo sapien
tctctggttccttctagcttaggga

SEQ ID NO: 4922441 - DNA, 25 bp, Homo sapien
ctctgcatctggagctcggcagcct

SEQ ID NO: 4922442 - DNA, 25 bp, Homo sapien
ctgcatctggagctcggcagcctcg

SEQ ID NO: 4922443 - DNA, 25 bp, Homo sapien
tctgcatctggagctcggcagcctc

SEQ ID NO: 4922444 - DNA, 25 bp, Homo sapien
cgttgctgggctcgatctcaagggt

SEQ ID NO: 4922445 - DNA, 25 bp, Homo sapien
aggcctgggcaggacgccgctcttt

SEQ ID NO: 4922446 - DNA, 25 bp, Homo sapien
tgtcctgaattttggcgttgctggg

SEQ ID NO: 4922447 - DNA, 25 bp, Homo sapien
tgtggccgcgcttcttgcgggagtt

SEQ ID NO: 4922448 - DNA, 25 bp, Homo sapien
taacagtgtaccaagttagtgtggt

SEQ ID NO: 4922449 - DNA, 25 bp, Homo sapien
tatgaggtggaaaagcatagctcac

SEQ ID NO: 4922450 - DNA, 25 bp, Homo sapien
gacctggcctacagacgacaagagt

SEQ ID NO: 4922451 - DNA, 25 bp, Homo sapien
gtgtttataatctgaggctcccaag

SEQ ID NO: 4922452 - DNA, 25 bp, Homo sapien
tgtaaagaccgtaatgcactaagct

SEQ ID NO: 4922453 - DNA, 25 bp, Homo sapien
aatgtagctgatttcctcactcaga

SEQ ID NO: 4922454 - DNA, 25 bp, Homo sapien
aagaagcaatgtaaagaccgtaatg

SEQ ID NO: 4922455 - DNA, 25 bp, Homo sapien
gatttcctcactcagacagctggct

SEQ ID NO: 4922456 - DNA, 25 bp, Homo sapien
aacacatccatgaataccactgttt

SEQ ID NO: 4922457 - DNA, 25 bp, Homo sapien
catggtaatttggatagggtgaagc

SEQ ID NO: 4922458 - DNA, 25 bp, Homo sapien
ggcccttaataattggatccttcat

SEQ ID NO: 4922459 - DNA, 25 bp, Homo sapien
agattttatggtttcactggccctt

SEQ ID NO: 4922460 - DNA, 25 bp, Homo sapien
caactgttggtactgcacagcctaa

SEQ ID NO: 4922461 - DNA, 25 bp, Homo sapien
taacaggcctgacgaaaggagagat

SEQ ID NO: 4922462 - DNA, 25 bp, Homo sapien
cagtgatgaaaccacggaatcccca

SEQ ID NO: 4922463 - DNA, 25 bp, Homo sapien
cctgattcatttggcattcgggcaa

SEQ ID NO: 4922464 - DNA, 25 bp, Homo sapien
tcaacaacaccttgcatggtccttg

SEQ ID NO: 4922465 - DNA, 25 bp, Homo sapien
tacttgattgcaccatgagaaagct

SEQ ID NO: 4922466 - DNA, 25 bp, Homo sapien
tgccagtgaacaagatccagacctt

SEQ ID NO: 4922467 - DNA, 25 bp, Homo sapien
ctgaacagttttaagcctcgatgct

SEQ ID NO: 4922468 - DNA, 25 bp, Homo sapien
tatttgtgctgtggaagccagcact

SEQ ID NO: 4922469 - DNA, 25 bp, Homo sapien
ttttagtatttgtgctgtggaagcc

SEQ ID NO: 4922470 - DNA, 25 bp, Homo sapien
ttagtatttgtgctgtggaagccag

SEQ ID NO: 4922471 - DNA, 25 bp, Homo sapien
agtatttgtgctgtggaagccagca

SEQ ID NO: 4922472 - DNA, 25 bp, Homo sapien
ggagcggtcgcaggcaaagggcggg

SEQ ID NO: 4922473 - DNA, 25 bp, Homo sapien
gggcggagcggtcgcaggcaaaggg

SEQ ID NO: 4922474 - DNA, 25 bp, Homo sapien
cgggcggagcggtcgcaggcaaagg

SEQ ID NO: 4922475 - DNA, 25 bp, Homo sapien
gcggagcggtcgcaggcaaagggcg

SEQ ID NO: 4922476 - DNA, 25 bp, Homo sapien
gaggagcggggtccgaagcgaggag

SEQ ID NO: 4922477 - DNA, 25 bp, Homo sapien
cggaggagcggggtccgaagcgagg

SEQ ID NO: 4922478 - DNA, 25 bp, Homo sapien
ccgcggaggagcggggtccgaagcg

SEQ ID NO: 4922479 - DNA, 25 bp, Homo sapien
gagcggggtccgaagcgaggagagg

SEQ ID NO: 4922480 - DNA, 25 bp, Homo sapien
ctcgactcggacagaagcctctgga

SEQ ID NO: 4922481 - DNA, 25 bp, Homo sapien
gaactgaactttcggtgtcagcggg

SEQ ID NO: 4922482 - DNA, 25 bp, Homo sapien
ccgacgggatgtgaagccctcgact

SEQ ID NO: 4922483 - DNA, 25 bp, Homo sapien
tgagtcgccgctctccgctttggtt

SEQ ID NO: 4922484 - DNA, 25 bp, Homo sapien
gatttgggaattggggcattaactc

SEQ ID NO: 4922485 - DNA, 25 bp, Homo sapien
tcaggttctctctttagatttggga

SEQ ID NO: 4922486 - DNA, 25 bp, Homo sapien
ctctaatgaacagagctcaacagtc

SEQ ID NO: 4922487 - DNA, 25 bp, Homo sapien
agaagaaatgtgctggaccaatcag

SEQ ID NO: 4922488 - DNA, 25 bp, Homo sapien
catttaaaatgacgtcaggagggta

SEQ ID NO: 4922489 - DNA, 25 bp, Homo sapien
ggtagatcctaatcctgtgtactgg

SEQ ID NO: 4922490 - DNA, 25 bp, Homo sapien
cagcgccttagaacgtgaccaaggt

SEQ ID NO: 4922491 - DNA, 25 bp, Homo sapien
atgcagaactgtggataagcccagg

SEQ ID NO: 4922492 - DNA, 25 bp, Homo sapien
tacctatttgctctaccacatttcc

SEQ ID NO: 4922493 - DNA, 25 bp, Homo sapien
gctctaccacatttcccataactag

SEQ ID NO: 4922494 - DNA, 25 bp, Homo sapien
caaaatacctatttgctctaccaca

SEQ ID NO: 4922495 - DNA, 25 bp, Homo sapien
ctatttgctctaccacatttcccat

SEQ ID NO: 4922496 - DNA, 25 bp, Homo sapien
ctgaatcatagctggccacttttcc

SEQ ID NO: 4922497 - DNA, 25 bp, Homo sapien
gcaattgaactctgtggatgatatc

SEQ ID NO: 4922498 - DNA, 25 bp, Homo sapien
gaactctgtggatgatatcccagtc

SEQ ID NO: 4922499 - DNA, 25 bp, Homo sapien
caaaagaatggtccctcagaattcc

SEQ ID NO: 4922500 - DNA, 25 bp, Homo sapien
catgtgatcccatgctttccagggt

SEQ ID NO: 4922501 - DNA, 25 bp, Homo sapien
tcatgtgatcccatgctttccaggg

SEQ ID NO: 4922502 - DNA, 25 bp, Homo sapien
ttcatgtgatcccatgctttccagg

SEQ ID NO: 4922503 - DNA, 25 bp, Homo sapien
tgtgatcccatgctttccagggtca

SEQ ID NO: 4922504 - DNA, 25 bp, Homo sapien
tttagggcttccacaaaatcttcag

SEQ ID NO: 4922505 - DNA, 25 bp, Homo sapien
agggcttccacaaaatcttcaggca

SEQ ID NO: 4922506 - DNA, 25 bp, Homo sapien
ctggctttagggcttccacaaaatc

SEQ ID NO: 4922507 - DNA, 25 bp, Homo sapien
cagcgatgctacataatctggcttt

SEQ ID NO: 4922508 - DNA, 25 bp, Homo sapien
tacttagaactacaatgatactgcc

SEQ ID NO: 4922509 - DNA, 25 bp, Homo sapien
tgcaagtattgttccccataaagaa

SEQ ID NO: 4922510 - DNA, 25 bp, Homo sapien
tgtcttacaaccactccaagggtcc

SEQ ID NO: 4922511 - DNA, 25 bp, Homo sapien
taactccaaaggtaggcaaacagaa

SEQ ID NO: 4922512 - DNA, 25 bp, Homo sapien
ggcataagattcacatatgcatttg

SEQ ID NO: 4922513 - DNA, 25 bp, Homo sapien
tgttggcataagattcacatatgca

SEQ ID NO: 4922514 - DNA, 25 bp, Homo sapien
ccatctcacgcccaacatccttaaa

SEQ ID NO: 4922515 - DNA, 25 bp, Homo sapien
tcacgcccaacatccttaaaaggca

SEQ ID NO: 4922516 - DNA, 25 bp, Homo sapien
cttcagtctgccagtaacagatgcc

SEQ ID NO: 4922517 - DNA, 25 bp, Homo sapien
ttgcctagaactacctccatgaaat

SEQ ID NO: 4922518 - DNA, 25 bp, Homo sapien
tcaagcttgcctagaactacctcca

SEQ ID NO: 4922519 - DNA, 25 bp, Homo sapien
agggtcaagcttgcctagaactacc

SEQ ID NO: 4922520 - DNA, 25 bp, Homo sapien
tatttcctccatatcccggccaata

SEQ ID NO: 4922521 - DNA, 25 bp, Homo sapien
tatgtacaagtcttagaggtggctg

SEQ ID NO: 4922522 - DNA, 25 bp, Homo sapien
cggccaatacttggaatggtcagat

SEQ ID NO: 4922523 - DNA, 25 bp, Homo sapien
tttacattcccacaataattctatt

SEQ ID NO: 4922524 - DNA, 25 bp, Homo sapien
gggcggctgccgggcagagatgctc

SEQ ID NO: 4922525 - DNA, 25 bp, Homo sapien
ccagacggggcggcggggcagaggc

SEQ ID NO: 4922526 - DNA, 25 bp, Homo sapien
agatgctcctcacctcccagacggg

SEQ ID NO: 4922527 - DNA, 25 bp, Homo sapien
ggggcggctgccgggcagagatgct

SEQ ID NO: 4922528 - DNA, 25 bp, Homo sapien
acagtactggttaagatggcagtaa

SEQ ID NO: 4922529 - DNA, 25 bp, Homo sapien
ctaaataaacggaaagacagcctgt

SEQ ID NO: 4922530 - DNA, 25 bp, Homo sapien
tagcaatgaacagcccaaaaggaaa

SEQ ID NO: 4922531 - DNA, 25 bp, Homo sapien
ttaacatactgataactacaaactg

SEQ ID NO: 4922532 - DNA, 25 bp, Homo sapien
aggtagtaaaagaactcagcaggct

SEQ ID NO: 4922533 - DNA, 25 bp, Homo sapien
ttatatgtaggaaatccttttttga

SEQ ID NO: 4922534 - DNA, 25 bp, Homo sapien
taggaaatcctgaagaatccacaaa

SEQ ID NO: 4922535 - DNA, 25 bp, Homo sapien
ttgtattatgtaggaaatcctgaag

SEQ ID NO: 4922536 - DNA, 25 bp, Homo sapien
caagtcatgatttgcgggagggctc

SEQ ID NO: 4922537 - DNA, 25 bp, Homo sapien
tctgccttgagattccctcgtcttc

SEQ ID NO: 4922538 - DNA, 25 bp, Homo sapien
cctcgtcttcacttaaaagccagag

SEQ ID NO: 4922539 - DNA, 25 bp, Homo sapien
gagggctcttgaaccacttctggct

SEQ ID NO: 4922540 - DNA, 25 bp, Homo sapien
tcttaccagtggataaaaagataca

SEQ ID NO: 4922541 - DNA, 25 bp, Homo sapien
ttttgatggcttcctgttattacag

SEQ ID NO: 4922542 - DNA, 25 bp, Homo sapien
ttctggagtcaagcagtaggaaaca

SEQ ID NO: 4922543 - DNA, 25 bp, Homo sapien
aaattggtggtgcttgttagttaga

SEQ ID NO: 4922544 - DNA, 25 bp, Homo sapien
taatggctttatgctccgggtaaca

SEQ ID NO: 4922545 - DNA, 25 bp, Homo sapien
catatagtatagtcgcattaagtgc

SEQ ID NO: 4922546 - DNA, 25 bp, Homo sapien
ttaataccacattctataagtaggg

SEQ ID NO: 4922547 - DNA, 25 bp, Homo sapien
tctaagcatataattgcaaactggg

SEQ ID NO: 4922548 - DNA, 25 bp, Homo sapien
tatatgtgctgctgaagtgagcaca

SEQ ID NO: 4922549 - DNA, 25 bp, Homo sapien
cttacaaaggggtcatgctaatctt

SEQ ID NO: 4922550 - DNA, 25 bp, Homo sapien
tagtatatgtgctgctgaagtgagc

SEQ ID NO: 4922551 - DNA, 25 bp, Homo sapien
ctgtattgttccaattttagtatat

SEQ ID NO: 4922552 - DNA, 25 bp, Homo sapien
tggtcattggtgctacgaacaggct

SEQ ID NO: 4922553 - DNA, 25 bp, Homo sapien
caccctgctagctcttatggatgga

SEQ ID NO: 4922554 - DNA, 25 bp, Homo sapien
cattggaaatagtgaggtgccctga

SEQ ID NO: 4922555 - DNA, 25 bp, Homo sapien
cctggtcgctttgatagagaattcc

SEQ ID NO: 4922556 - DNA, 25 bp, Homo sapien
tagttttaatagagatgaggtttcg

SEQ ID NO: 4922557 - DNA, 25 bp, Homo sapien
tgaggtttcgccatgttggccaggc

SEQ ID NO: 4922558 - DNA, 25 bp, Homo sapien
gccaagttgctcgaatgatttttag

SEQ ID NO: 4922559 - DNA, 25 bp, Homo sapien
aacagatgtgctacaaccatacctg

SEQ ID NO: 4922560 - DNA, 25 bp, Homo sapien
ggacaacagatgtgctacaaccata

SEQ ID NO: 4922561 - DNA, 25 bp, Homo sapien
caaatcttgccaagttgctcgaatg

SEQ ID NO: 4922562 - DNA, 25 bp, Homo sapien
ggttttaacgtaagtatatgccatg

SEQ ID NO: 4922563 - DNA, 25 bp, Homo sapien
tagtgaggtgtgtagttctacctac

SEQ ID NO: 4922564 - DNA, 25 bp, Homo sapien
cctgttggacgatggagtgcaatcc

SEQ ID NO: 4922565 - DNA, 25 bp, Homo sapien
caccacaataagatagtgaaggtaa

SEQ ID NO: 4922566 - DNA, 25 bp, Homo sapien
tgagttgccccatcgtggtacacag

SEQ ID NO: 4922567 - DNA, 25 bp, Homo sapien
ggtacacagcagtatatatagcaat

SEQ ID NO: 4922568 - DNA, 25 bp, Homo sapien
ggcaatatgatgtggtagcatgaca

SEQ ID NO: 4922569 - DNA, 25 bp, Homo sapien
tacacaacatgccaaactcgagaga

SEQ ID NO: 4922570 - DNA, 25 bp, Homo sapien
tggttctccgcagcagcttggagct

SEQ ID NO: 4922571 - DNA, 25 bp, Homo sapien
tcagtctggagcacatcggccggag

SEQ ID NO: 4922572 - DNA, 25 bp, Homo sapien
tcggccacgggctccttggacctgt

SEQ ID NO: 4922573 - DNA, 25 bp, Homo sapien
accacagccaaagcgggcgtgagta

SEQ ID NO: 4922574 - DNA, 25 bp, Homo sapien
cagcgagccggaactatgtgaagaa

SEQ ID NO: 4922575 - DNA, 25 bp, Homo sapien
agaagtcagcgttttccccaggact

SEQ ID NO: 4922576 - DNA, 25 bp, Homo sapien
tcgagcctgctgttctacggtggtg

SEQ ID NO: 4922577 - DNA, 25 bp, Homo sapien
ccttcgctctacaaatgggaggaga

SEQ ID NO: 4922578 - DNA, 25 bp, Homo sapien
tgccagagacccggcgacccaacat

SEQ ID NO: 4922579 - DNA, 25 bp, Homo sapien
ctgccagagacccggcgacccaaca

SEQ ID NO: 4922580 - DNA, 25 bp, Homo sapien
ccaggtaagggctgaggtgaggtcc

SEQ ID NO: 4922581 - DNA, 25 bp, Homo sapien
cctcgggcacgcagccggtgccctg

SEQ ID NO: 4922582 - DNA, 25 bp, Homo sapien
aggtaagggctgaggtgaggtccgc

SEQ ID NO: 4922583 - DNA, 25 bp, Homo sapien
gcacgcagccggtgccctggctcat

SEQ ID NO: 4922584 - DNA, 25 bp, Homo sapien
ccagagccatcgtgatggccatgtt

SEQ ID NO: 4922585 - DNA, 25 bp, Homo sapien
catcgtgatggccatgttgccctct

SEQ ID NO: 4922586 - DNA, 25 bp, Homo sapien
agagccatcgtgatggccatgttgc

SEQ ID NO: 4922587 - DNA, 25 bp, Homo sapien
tgatggccatgttgccctctgtcac

SEQ ID NO: 4922588 - DNA, 25 bp, Homo sapien
ggcttgctgcccatggtgcctgtct

SEQ ID NO: 4922589 - DNA, 25 bp, Homo sapien
cagcacatcacccacagggtgcgag

SEQ ID NO: 4922590 - DNA, 25 bp, Homo sapien
gaaagtcgatgtctcgggaagtgac

SEQ ID NO: 4922591 - DNA, 25 bp, Homo sapien
agtgacgatgcccaccggcttgctg

SEQ ID NO: 4922592 - DNA, 25 bp, Homo sapien
accaccagctcaatccttggcatca

SEQ ID NO: 4922593 - DNA, 25 bp, Homo sapien
ccaccagctcaatccttggcatcat

SEQ ID NO: 4922594 - DNA, 25 bp, Homo sapien
tttgcctctttcaacatcactcctg

SEQ ID NO: 4922595 - DNA, 25 bp, Homo sapien
ctctttcaacatcactcctgctgga

SEQ ID NO: 4922596 - DNA, 25 bp, Homo sapien
gttcttcaggtcggtgagggcaatg

SEQ ID NO: 4922597 - DNA, 25 bp, Homo sapien
ggtccaggcggtatttgtcatcctc

SEQ ID NO: 4922598 - DNA, 25 bp, Homo sapien
tgagcaggtccaggcggtatttgtc

SEQ ID NO: 4922599 - DNA, 25 bp, Homo sapien
tccaggcggtatttgtcatcctcac

SEQ ID NO: 4922600 - DNA, 25 bp, Homo sapien
caggtccaggcggtatttgtcatcc

SEQ ID NO: 4922601 - DNA, 25 bp, Homo sapien
cagcaagttcccttcggacaagtcc

SEQ ID NO: 4922602 - DNA, 25 bp, Homo sapien
agcaagttcccttcggacaagtcca

SEQ ID NO: 4922603 - DNA, 25 bp, Homo sapien
ctgtcaccacgttccccccaatcac

SEQ ID NO: 4922604 - DNA, 25 bp, Homo sapien
tcaatcaggttcttggcctgggctg

SEQ ID NO: 4922605 - DNA, 25 bp, Homo sapien
gcatcaatcaggttcttggcctggg

SEQ ID NO: 4922606 - DNA, 25 bp, Homo sapien
catcaatcaggttcttggcctgggc

SEQ ID NO: 4922607 - DNA, 25 bp, Homo sapien
cagcatcaatcaggttcttggcctg

SEQ ID NO: 4922608 - DNA, 25 bp, Homo sapien
tatgcccacacacagcccgtccaca

SEQ ID NO: 4922609 - DNA, 25 bp, Homo sapien
ctatgcccacacacagcccgtccac

SEQ ID NO: 4922610 - DNA, 25 bp, Homo sapien
atgcccacacacagcccgtccacac

SEQ ID NO: 4922611 - DNA, 25 bp, Homo sapien
cctgggtgatgcagagggagccgca

SEQ ID NO: 4922612 - DNA, 25 bp, Homo sapien
tgggtgatgcagagggagccgcagc

SEQ ID NO: 4922613 - DNA, 25 bp, Homo sapien
ttcctgggtgatgcagagggagccg

SEQ ID NO: 4922614 - DNA, 25 bp, Homo sapien
tcctgggtgatgcagagggagccgc

SEQ ID NO: 4922615 - DNA, 25 bp, Homo sapien
gcacaccaaagtgccgggcatactc

SEQ ID NO: 4922616 - DNA, 25 bp, Homo sapien
caaagtgccgggcatactcagccac

SEQ ID NO: 4922617 - DNA, 25 bp, Homo sapien
agtcaggatgccaccatcggctatg

SEQ ID NO: 4922618 - DNA, 25 bp, Homo sapien
caccaaagtgccgggcatactcagc

SEQ ID NO: 4922619 - DNA, 25 bp, Homo sapien
ctatggaggcaccaagggccggcac

SEQ ID NO: 4922620 - DNA, 25 bp, Homo sapien
cactatggaggcaccaagggccggc

SEQ ID NO: 4922621 - DNA, 25 bp, Homo sapien
actatggaggcaccaagggccggca

SEQ ID NO: 4922622 - DNA, 25 bp, Homo sapien
ctattcgctgggggcctccgaggtg

SEQ ID NO: 4922623 - DNA, 25 bp, Homo sapien
ttcgctgggggcctccgaggtggca

SEQ ID NO: 4922624 - DNA, 25 bp, Homo sapien
ggcctccgaggtggcagccagcagg

SEQ ID NO: 4922625 - DNA, 25 bp, Homo sapien
ctgggggcctccgaggtggcagcca

SEQ ID NO: 4922626 - DNA, 25 bp, Homo sapien
ccagcaagcctgtgccccagtattt

SEQ ID NO: 4922627 - DNA, 25 bp, Homo sapien
ctccatggcatccagcaagcctgtg

SEQ ID NO: 4922628 - DNA, 25 bp, Homo sapien
atccagcaagcctgtgccccagtat

SEQ ID NO: 4922629 - DNA, 25 bp, Homo sapien
ccatggcatccagcaagcctgtgcc

SEQ ID NO: 4922630 - DNA, 25 bp, Homo sapien
caccctgtgtgatcttcaccttatc

SEQ ID NO: 4922631 - DNA, 25 bp, Homo sapien
cgggccctgatatcctggcagccat

SEQ ID NO: 4922632 - DNA, 25 bp, Homo sapien
ggatggagcccgagacaccctgtgt

SEQ ID NO: 4922633 - DNA, 25 bp, Homo sapien
agacaggctgcgggccctgatatcc

SEQ ID NO: 4922634 - DNA, 25 bp, Homo sapien
cctcaatctgggccgacatggtacg

SEQ ID NO: 4922635 - DNA, 25 bp, Homo sapien
accctcaatctgggccgacatggta

SEQ ID NO: 4922636 - DNA, 25 bp, Homo sapien
aatctgggccgacatggtacgcttc

SEQ ID NO: 4922637 - DNA, 25 bp, Homo sapien
tcaatctgggccgacatggtacgct

SEQ ID NO: 4922638 - DNA, 25 bp, Homo sapien
cagacgtaggaaagggcgggcttgt

SEQ ID NO: 4922639 - DNA, 25 bp, Homo sapien
ccgactggaccagacgtaggaaagg

SEQ ID NO: 4922640 - DNA, 25 bp, Homo sapien
cgggcttgtagtggcccgcgtgggt

SEQ ID NO: 4922641 - DNA, 25 bp, Homo sapien
cggaggaagaccgactggaccagac

SEQ ID NO: 4922642 - DNA, 25 bp, Homo sapien
gggctggccggctggtagtggacag

SEQ ID NO: 4922643 - DNA, 25 bp, Homo sapien
cagctgctgtagacgcaggcgtccc

SEQ ID NO: 4922644 - DNA, 25 bp, Homo sapien
agcagctgctgtagacgcaggcgtc

SEQ ID NO: 4922645 - DNA, 25 bp, Homo sapien
agtagcagctgctgtagacgcaggc

SEQ ID NO: 4922646 - DNA, 25 bp, Homo sapien
ttcacagagcttccaaatattttct

SEQ ID NO: 4922647 - DNA, 25 bp, Homo sapien
tctaaaggatactggtcatggtttt

SEQ ID NO: 4922648 - DNA, 25 bp, Homo sapien
aacattcttctaaaggatactggtc

SEQ ID NO: 4922649 - DNA, 25 bp, Homo sapien
cttcctctcattagatatgaagaca

SEQ ID NO: 4922650 - DNA, 25 bp, Homo sapien
caggtctcgcctgttgtttccagat

SEQ ID NO: 4922651 - DNA, 25 bp, Homo sapien
ctcgcctgttgtttccagataggta

SEQ ID NO: 4922652 - DNA, 25 bp, Homo sapien
ggtctcgcctgttgtttccagatag

SEQ ID NO: 4922653 - DNA, 25 bp, Homo sapien
tccaggtctcgcctgttgtttccag

SEQ ID NO: 4922654 - DNA, 25 bp, Homo sapien
tcagactcaaggtactgcccaacac

SEQ ID NO: 4922655 - DNA, 25 bp, Homo sapien
cagactcaaggtactgcccaacacc

SEQ ID NO: 4922656 - DNA, 25 bp, Homo sapien
agactcaaggtactgcccaacacca

SEQ ID NO: 4922657 - DNA, 25 bp, Homo sapien
gactcaaggtactgcccaacaccag

SEQ ID NO: 4922658 - DNA, 25 bp, Homo sapien
gtgcgcattcagaagtacatttgca

SEQ ID NO: 4922659 - DNA, 25 bp, Homo sapien
catgtgaatgcagaggaaaacgtct

SEQ ID NO: 4922660 - DNA, 25 bp, Homo sapien
gaggaaaacgtctgcaaggatctgc

SEQ ID NO: 4922661 - DNA, 25 bp, Homo sapien
ggatctgctccaaactagtaacaaa

SEQ ID NO: 4922662 - DNA, 25 bp, Homo sapien
aggcagggaaatggcaagacagtat

SEQ ID NO: 4922663 - DNA, 25 bp, Homo sapien
ggcaagacagtatcgagatcataaa

SEQ ID NO: 4922664 - DNA, 25 bp, Homo sapien
tcttctacataagtgtcaaagaggc

SEQ ID NO: 4922665 - DNA, 25 bp, Homo sapien
ttctacataagtgtcaaagaggcag

SEQ ID NO: 4922666 - DNA, 25 bp, Homo sapien
gatcggtcagaagcaaagttcttca

SEQ ID NO: 4922667 - DNA, 25 bp, Homo sapien
tctttcatgtgagatcggtcagaag

SEQ ID NO: 4922668 - DNA, 25 bp, Homo sapien
tatgaatctgcacggatcactctaa

SEQ ID NO: 4922669 - DNA, 25 bp, Homo sapien
cagtctcaatgcagggatatggcgg

SEQ ID NO: 4922670 - DNA, 25 bp, Homo sapien
tacatccaataatccagcagtttgc

SEQ ID NO: 4922671 - DNA, 25 bp, Homo sapien
catggcaaggtgctactagtcccgc

SEQ ID NO: 4922672 - DNA, 25 bp, Homo sapien
tgacacaagcatgcgagtatcctga

SEQ ID NO: 4922673 - DNA, 25 bp, Homo sapien
tgatgttcagtgtccccgcagtagc

SEQ ID NO: 4922674 - DNA, 25 bp, Homo sapien
taaatgtcaggaaattatcaactgg

SEQ ID NO: 4922675 - DNA, 25 bp, Homo sapien
gaccctttatcttcttaaatgtcag

SEQ ID NO: 4922676 - DNA, 25 bp, Homo sapien
tcaaactcatatgaatgccaaacaa

SEQ ID NO: 4922677 - DNA, 25 bp, Homo sapien
caggaaattatcaactggattgatg

SEQ ID NO: 4922678 - DNA, 25 bp, Homo sapien
ctgatgaaatcgttcaggttcattt

SEQ ID NO: 4922679 - DNA, 25 bp, Homo sapien
gaaatcgttcaggttcattttggaa

SEQ ID NO: 4922680 - DNA, 25 bp, Homo sapien
tccatactgatgaaatcgttcaggt

SEQ ID NO: 4922681 - DNA, 25 bp, Homo sapien
catactgatgaaatcgttcaggttc

SEQ ID NO: 4922682 - DNA, 25 bp, Homo sapien
tgtaaattcggatagtgtgtagacg

SEQ ID NO: 4922683 - DNA, 25 bp, Homo sapien
atagtgtgtagacggcgccccatcc

SEQ ID NO: 4922684 - DNA, 25 bp, Homo sapien
cgatgtgtaaattcggatagtgtgt

SEQ ID NO: 4922685 - DNA, 25 bp, Homo sapien
ttcggatagtgtgtagacggcgccc

SEQ ID NO: 4922686 - DNA, 25 bp, Homo sapien
tgctgtcctcgatgaaaggatagct

SEQ ID NO: 4922687 - DNA, 25 bp, Homo sapien
tgtcctcgatgaaaggatagcttgt

SEQ ID NO: 4922688 - DNA, 25 bp, Homo sapien
gcttgttcatgtcctagaatttctc

SEQ ID NO: 4922689 - DNA, 25 bp, Homo sapien
atgtttgctgtcctcgatgaaagga

SEQ ID NO: 4922690 - DNA, 25 bp, Homo sapien
acttacaatgtagctggagagacac

SEQ ID NO: 4922691 - DNA, 25 bp, Homo sapien
caggaatatcttagcaagtacgcac

SEQ ID NO: 4922692 - DNA, 25 bp, Homo sapien
tgttgtaacgcatgagccacaggaa

SEQ ID NO: 4922693 - DNA, 25 bp, Homo sapien
gaaagacataattccaagccaactg

SEQ ID NO: 4922694 - DNA, 25 bp, Homo sapien
aattaacgctcaagtctgagagggc

SEQ ID NO: 4922695 - DNA, 25 bp, Homo sapien
tcaagaaaacattttatgggcacct

SEQ ID NO: 4922696 - DNA, 25 bp, Homo sapien
tattacccctttccagacaacagca

SEQ ID NO: 4922697 - DNA, 25 bp, Homo sapien
gggcaccttttatgggcatttgaga

SEQ ID NO: 4922698 - DNA, 25 bp, Homo sapien
taataacatgcaaatttggccgggt

SEQ ID NO: 4922699 - DNA, 25 bp, Homo sapien
gaatccactggctcatagaaccagg

SEQ ID NO: 4922700 - DNA, 25 bp, Homo sapien
gggctgagcccatgagacttcttgg

SEQ ID NO: 4922701 - DNA, 25 bp, Homo sapien
tattgaagcggtagtgttacaaccc

SEQ ID NO: 4922702 - DNA, 25 bp, Homo sapien
aaatagtgccaaccccatcagattg

SEQ ID NO: 4922703 - DNA, 25 bp, Homo sapien
tcagattgtcagaaaattgcctggc

SEQ ID NO: 4922704 - DNA, 25 bp, Homo sapien
taaggaggtgatcagaaagcagcag

SEQ ID NO: 4922705 - DNA, 25 bp, Homo sapien
tactggctagtgacttggtgagcta

SEQ ID NO: 4922706 - DNA, 25 bp, Homo sapien
gcacgagtttcacaggtcagtcatg

SEQ ID NO: 4922707 - DNA, 25 bp, Homo sapien
tgaaggagtgggcacgagtttcaca

SEQ ID NO: 4922708 - DNA, 25 bp, Homo sapien
gagtgggcacgagtttcacaggtca

SEQ ID NO: 4922709 - DNA, 25 bp, Homo sapien
tgggcacgagtttcacaggtcagtc

SEQ ID NO: 4922710 - DNA, 25 bp, Homo sapien
catagagttatcaggaatccaggct

SEQ ID NO: 4922711 - DNA, 25 bp, Homo sapien
gataagtagcttccgaggtcactcc

SEQ ID NO: 4922712 - DNA, 25 bp, Homo sapien
tttaggcaggcatgcaactcggctc

SEQ ID NO: 4922713 - DNA, 25 bp, Homo sapien
gaggtcactccagtcatcaccattt

SEQ ID NO: 4922714 - DNA, 25 bp, Homo sapien
tgggaagggcagtaattccacaaaa

SEQ ID NO: 4922715 - DNA, 25 bp, Homo sapien
agcccacgggacaagcctataaacg

SEQ ID NO: 4922716 - DNA, 25 bp, Homo sapien
tataaacgtctgaaccctaaatgag

SEQ ID NO: 4922717 - DNA, 25 bp, Homo sapien
catgcaaaacaacaggactggatag

SEQ ID NO: 4922718 - DNA, 25 bp, Homo sapien
cacaaggctcctgaacctcatgcaa

SEQ ID NO: 4922719 - DNA, 25 bp, Homo sapien
agagtgagaactgaggagtgtttgc

SEQ ID NO: 4922720 - DNA, 25 bp, Homo sapien
agtgagaactgaggagtgtttgccc

SEQ ID NO: 4922721 - DNA, 25 bp, Homo sapien
tacagagtgagaactgaggagtgtt

SEQ ID NO: 4922722 - DNA, 25 bp, Homo sapien
gtgagaactgaggagtgtttgccct

SEQ ID NO: 4922723 - DNA, 25 bp, Homo sapien
cctttattgaatgcttgaggaatat

SEQ ID NO: 4922724 - DNA, 25 bp, Homo sapien
tatcctgagatccagtggagtggcg

SEQ ID NO: 4922725 - DNA, 25 bp, Homo sapien
gaatagaatctagtcaacgggaata

SEQ ID NO: 4922726 - DNA, 25 bp, Homo sapien
caaagcacaagactttagcagcagt

SEQ ID NO: 4922727 - DNA, 25 bp, Homo sapien
tcataacgtgcttttcacaccaaaa

SEQ ID NO: 4922728 - DNA, 25 bp, Homo sapien
ggtggaagagtagggcttggagtta

SEQ ID NO: 4922729 - DNA, 25 bp, Homo sapien
aagagtagggcttggagttaaggct

SEQ ID NO: 4922730 - DNA, 25 bp, Homo sapien
cgtgcttttcacaccaaaaggtgga

SEQ ID NO: 4922731 - DNA, 25 bp, Homo sapien
tgctttccatatctgcgtttgtgac

SEQ ID NO: 4922732 - DNA, 25 bp, Homo sapien
gtgctttccatatctgcgtttgtga

SEQ ID NO: 4922733 - DNA, 25 bp, Homo sapien
gaatgtgagagaactaattaaataa

SEQ ID NO: 4922734 - DNA, 25 bp, Homo sapien
tgagagaactaattaaataaatcca

SEQ ID NO: 4922735 - DNA, 25 bp, Homo sapien
gggaagctcagtgacccactcctgc

SEQ ID NO: 4922736 - DNA, 25 bp, Homo sapien
tacttcaggtggacagctgtgaagg

SEQ ID NO: 4922737 - DNA, 25 bp, Homo sapien
gaaggacacttcatcccgaccatgg

SEQ ID NO: 4922738 - DNA, 25 bp, Homo sapien
aaggacacttcatcccgaccatggg

SEQ ID NO: 4922739 - DNA, 25 bp, Homo sapien
ttgcaccaactaatacatacaaaag

SEQ ID NO: 4922740 - DNA, 25 bp, Homo sapien
tgcaccaactaatacatacaaaaga

SEQ ID NO: 4922741 - DNA, 25 bp, Homo sapien
gaagtgggaatgataacaggactca

SEQ ID NO: 4922742 - DNA, 25 bp, Homo sapien
aagtgggaatgataacaggactcat

SEQ ID NO: 4922743 - DNA, 25 bp, Homo sapien
gtcaaacagtcaaatgaatcccact

SEQ ID NO: 4922744 - DNA, 25 bp, Homo sapien
tcccactttggccacttactagctg

SEQ ID NO: 4922745 - DNA, 25 bp, Homo sapien
gacctctttgagtgtccgcttcgta

SEQ ID NO: 4922746 - DNA, 25 bp, Homo sapien
tgtagccatgcccatgaatgcatga

SEQ ID NO: 4922747 - DNA, 25 bp, Homo sapien
caaaatgcccttcacagtgggaaag

SEQ ID NO: 4922748 - DNA, 25 bp, Homo sapien
gccccaagacttttacagaacgtga

SEQ ID NO: 4922749 - DNA, 25 bp, Homo sapien
gagccaccgtattcccattcctgta

SEQ ID NO: 4922750 - DNA, 25 bp, Homo sapien
tcccaagtcctaaccaacagtgtag

SEQ ID NO: 4922751 - DNA, 25 bp, Homo sapien
gaccacatattagacatcattgttg

SEQ ID NO: 4922752 - DNA, 25 bp, Homo sapien
ggatatctggagaagtttgaataca

SEQ ID NO: 4922753 - DNA, 25 bp, Homo sapien
tcatcataaagcagaagaatatctt

SEQ ID NO: 4922754 - DNA, 25 bp, Homo sapien
tcttagacgtgataataatatcatc

SEQ ID NO: 4922755 - DNA, 25 bp, Homo sapien
tgaacccaggaggcggagcttgcag

SEQ ID NO: 4922756 - DNA, 25 bp, Homo sapien
tccagctgagggaggctgaggatca

SEQ ID NO: 4922757 - DNA, 25 bp, Homo sapien
ccagctgagggaggctgaggatcac

SEQ ID NO: 4922758 - DNA, 25 bp, Homo sapien
cagctgagggaggctgaggatcact

SEQ ID NO: 4922759 - DNA, 25 bp, Homo sapien
ctagtgggtgaaggtacaagaaaca

SEQ ID NO: 4922760 - DNA, 25 bp, Homo sapien
gggaggagaataactctctcttaga

SEQ ID NO: 4922761 - DNA, 25 bp, Homo sapien
tccccaagatatctgttagtcactg

SEQ ID NO: 4922762 - DNA, 25 bp, Homo sapien
ccacgcctggcaatatttgcgtagt

SEQ ID NO: 4922763 - DNA, 25 bp, Homo sapien
gtagcaatgagactactcaatgcca

SEQ ID NO: 4922764 - DNA, 25 bp, Homo sapien
tacaagatgagcctagattaaaaag

SEQ ID NO: 4922765 - DNA, 25 bp, Homo sapien
agtatgccttagagatattcacaca

SEQ ID NO: 4922766 - DNA, 25 bp, Homo sapien
ggacgcagaagcaatgaaaccccag

SEQ ID NO: 4922767 - DNA, 25 bp, Homo sapien
gaggtggggattgaagtggtgtttg

SEQ ID NO: 4922768 - DNA, 25 bp, Homo sapien
ttaagggatgtcccccagttcagca

SEQ ID NO: 4922769 - DNA, 25 bp, Homo sapien
cagcctcagcagccagtaaaggagg

SEQ ID NO: 4922770 - DNA, 25 bp, Homo sapien
tggtgtttgtagaaccatcccagct

SEQ ID NO: 4922771 - DNA, 25 bp, Homo sapien
tttcagatgagcttgaggcggtgtc

SEQ ID NO: 4922772 - DNA, 25 bp, Homo sapien
ttttttcagatgagcttgaggcggt

SEQ ID NO: 4922773 - DNA, 25 bp, Homo sapien
aggttgcctatttctgtattgtaca

SEQ ID NO: 4922774 - DNA, 25 bp, Homo sapien
tgctctctacctgactggcaccagg

SEQ ID NO: 4922775 - DNA, 25 bp, Homo sapien
ggtgcccgcaaccatgccctgctaa

SEQ ID NO: 4922776 - DNA, 25 bp, Homo sapien
agagacgaggtttcatggtgttagc

SEQ ID NO: 4922777 - DNA, 25 bp, Homo sapien
gtagagacgaggtttcatggtgtta

SEQ ID NO: 4922778 - DNA, 25 bp, Homo sapien
caggtgcccgcaaccatgccctgct

SEQ ID NO: 4922779 - DNA, 25 bp, Homo sapien
caccttttggtgtggctggaaacac

SEQ ID NO: 4922780 - DNA, 25 bp, Homo sapien
tagagcgtctgcctttcacgatgag

SEQ ID NO: 4922781 - DNA, 25 bp, Homo sapien
agctgaatgcgaacttgaggcctcc

SEQ ID NO: 4922782 - DNA, 25 bp, Homo sapien
gtgcgtcagcccacctggtacagtg

SEQ ID NO: 4922783 - DNA, 25 bp, Homo sapien
tgttctttgatatatcttgggtcct

SEQ ID NO: 4922784 - DNA, 25 bp, Homo sapien
ctgtaggccaatacagagatgttgt

SEQ ID NO: 4922785 - DNA, 25 bp, Homo sapien
tcagtgttttctgtagataccttct

SEQ ID NO: 4922786 - DNA, 25 bp, Homo sapien
ctcagtttcattaagaagagtaacc

SEQ ID NO: 4922787 - DNA, 25 bp, Homo sapien
tagtgcttaaacagacctcaaaaca

SEQ ID NO: 4922788 - DNA, 25 bp, Homo sapien
ctggatgctggcctaaaatcctatt

SEQ ID NO: 4922789 - DNA, 25 bp, Homo sapien
taaaatcctattagtgcttaaacag

SEQ ID NO: 4922790 - DNA, 25 bp, Homo sapien
tgactggatgctggcctaaaatcct

SEQ ID NO: 4922791 - DNA, 25 bp, Homo sapien
catgattgtacgatagactccaggc

SEQ ID NO: 4922792 - DNA, 25 bp, Homo sapien
taccaagatggtaccagtgggctct

SEQ ID NO: 4922793 - DNA, 25 bp, Homo sapien
gcccagggcagtatgagcaaatcca

SEQ ID NO: 4922794 - DNA, 25 bp, Homo sapien
tctgttaagtatggccagagcctca

SEQ ID NO: 4922795 - DNA, 25 bp, Homo sapien
tcgcagaaacattgcctgctgtgga

SEQ ID NO: 4922796 - DNA, 25 bp, Homo sapien
tagaaactcctcgtcgccttcaggt

SEQ ID NO: 4922797 - DNA, 25 bp, Homo sapien
ccttcaggtttgcagtcgcagaaac

SEQ ID NO: 4922798 - DNA, 25 bp, Homo sapien
tgagagagctctggaacttttgact

SEQ ID NO: 4922799 - DNA, 25 bp, Homo sapien
gagctttggaaggtcacgaaccatt

SEQ ID NO: 4922800 - DNA, 25 bp, Homo sapien
gctatgatacaacaccgcttcagcc

SEQ ID NO: 4922801 - DNA, 25 bp, Homo sapien
tttgtgctacgccagaatttctcca

SEQ ID NO: 4922802 - DNA, 25 bp, Homo sapien
gaaggaacctactgtttagtgctcc

SEQ ID NO: 4922803 - DNA, 25 bp, Homo sapien
ttcaagttgaggaacagtgtatctt

SEQ ID NO: 4922804 - DNA, 25 bp, Homo sapien
aacagtgtatctttaagagctgagc

SEQ ID NO: 4922805 - DNA, 25 bp, Homo sapien
gaacagtgtatctttaagagctgag

SEQ ID NO: 4922806 - DNA, 25 bp, Homo sapien
gcacatgacaacacttcagaagggt

SEQ ID NO: 4922807 - DNA, 25 bp, Homo sapien
tcactagaattggtatggaaaagca

SEQ ID NO: 4922808 - DNA, 25 bp, Homo sapien
taaacattggctcgaaacttcagag

SEQ ID NO: 4922809 - DNA, 25 bp, Homo sapien
tcagagataagtcatggagaggaca

SEQ ID NO: 4922810 - DNA, 25 bp, Homo sapien
tcatatcaccttcttccgagcagct

SEQ ID NO: 4922811 - DNA, 25 bp, Homo sapien
cagagccggagacagtcagtaaatc

SEQ ID NO: 4922812 - DNA, 25 bp, Homo sapien
aatgaatggttgaaagggagtctcc

SEQ ID NO: 4922813 - DNA, 25 bp, Homo sapien
tatctcttctgcacgaggagctcca

SEQ ID NO: 4922814 - DNA, 25 bp, Homo sapien
tatttagcacctaattagtgccagg

SEQ ID NO: 4922815 - DNA, 25 bp, Homo sapien
ggcaccaagaaatatagtaacttgc

SEQ ID NO: 4922816 - DNA, 25 bp, Homo sapien
tgcccatcatcacggagctaataca

SEQ ID NO: 4922817 - DNA, 25 bp, Homo sapien
caaatcaagacctgaatctaaggcc

SEQ ID NO: 4922818 - DNA, 25 bp, Homo sapien
tgccctgttaactcactatttcctg

SEQ ID NO: 4922819 - DNA, 25 bp, Homo sapien
tttaaatgggttgcactttgccctg

SEQ ID NO: 4922820 - DNA, 25 bp, Homo sapien
taatgctctgtattatggtaaaagc

SEQ ID NO: 4922821 - DNA, 25 bp, Homo sapien
cagttatgagtgctatgtgaataca

SEQ ID NO: 4922822 - DNA, 25 bp, Homo sapien
cagtaccacttcagagactgctgga

SEQ ID NO: 4922823 - DNA, 25 bp, Homo sapien
taccacttcagagactgctggatca

SEQ ID NO: 4922824 - DNA, 25 bp, Homo sapien
acttcagagactgctggatcaaaag

SEQ ID NO: 4922825 - DNA, 25 bp, Homo sapien
ttccagtaccacttcagagactgct

SEQ ID NO: 4922826 - DNA, 25 bp, Homo sapien
agtaggattttagcatatccaacca

SEQ ID NO: 4922827 - DNA, 25 bp, Homo sapien
aagtaggattttagcatatccaacc

SEQ ID NO: 4922828 - DNA, 25 bp, Homo sapien
ttaagtaggattttagcatatccaa

SEQ ID NO: 4922829 - DNA, 25 bp, Homo sapien
gtaggattttagcatatccaaccat

SEQ ID NO: 4922830 - DNA, 25 bp, Homo sapien
acacattttggaaattcccttgagg

SEQ ID NO: 4922831 - DNA, 25 bp, Homo sapien
ttggaaattcccttgaggaactgga

SEQ ID NO: 4922832 - DNA, 25 bp, Homo sapien
cacattttggaaattcccttgagga

SEQ ID NO: 4922833 - DNA, 25 bp, Homo sapien
tggaaattcccttgaggaactggaa

SEQ ID NO: 4922834 - DNA, 25 bp, Homo sapien
aggcctggatccttcacctgtcatc

SEQ ID NO: 4922835 - DNA, 25 bp, Homo sapien
tcacctgtcatctgggcagatgcag

SEQ ID NO: 4922836 - DNA, 25 bp, Homo sapien
gtgcttctcggtgccatgtcactga

SEQ ID NO: 4922837 - DNA, 25 bp, Homo sapien
tctttttcctgggttgttgtgcttc

SEQ ID NO: 4922838 - DNA, 25 bp, Homo sapien
tcaggctatataactacaattaaac

SEQ ID NO: 4922839 - DNA, 25 bp, Homo sapien
aagtatcttggtatgtggtaatgtg

SEQ ID NO: 4922840 - DNA, 25 bp, Homo sapien
ggcacgtcacagctttcttaaatgg

SEQ ID NO: 4922841 - DNA, 25 bp, Homo sapien
tatctgctgccaaaacagacttatt

SEQ ID NO: 4922842 - DNA, 25 bp, Homo sapien
tgctctagaactgggagtatcactt

SEQ ID NO: 4922843 - DNA, 25 bp, Homo sapien
gattgctctagaactgggagtatca

SEQ ID NO: 4922844 - DNA, 25 bp, Homo sapien
ttgctctagaactgggagtatcact

SEQ ID NO: 4922845 - DNA, 25 bp, Homo sapien
tagattgctctagaactgggagtat

SEQ ID NO: 4922846 - DNA, 25 bp, Homo sapien
tatacaggattagtagatctgttta

SEQ ID NO: 4922847 - DNA, 25 bp, Homo sapien
caggattagtagatctgtttacata

SEQ ID NO: 4922848 - DNA, 25 bp, Homo sapien
tttatacaggattagtagatctgtt

SEQ ID NO: 4922849 - DNA, 25 bp, Homo sapien
tacaggattagtagatctgtttaca

SEQ ID NO: 4922850 - DNA, 25 bp, Homo sapien
caggatgctcctagcttgtgtttgg

SEQ ID NO: 4922851 - DNA, 25 bp, Homo sapien
gactgagtcgacagctcctgaacca

SEQ ID NO: 4922852 - DNA, 25 bp, Homo sapien
tgagggttgcctaagaataaacacc

SEQ ID NO: 4922853 - DNA, 25 bp, Homo sapien
gcatccaatgggaaagacaccaagg

SEQ ID NO: 4922854 - DNA, 25 bp, Homo sapien
cagtattcgacctgcctgtccaggc

SEQ ID NO: 4922855 - DNA, 25 bp, Homo sapien
tgtccaggcccgtatagtgcagccc

SEQ ID NO: 4922856 - DNA, 25 bp, Homo sapien
caggcctggattccccggcagaaag

SEQ ID NO: 4922857 - DNA, 25 bp, Homo sapien
gagcccaggtagagtctcagaaaca

SEQ ID NO: 4922858 - DNA, 25 bp, Homo sapien
ttattgctgataaaccacagcccca

SEQ ID NO: 4922859 - DNA, 25 bp, Homo sapien
aagtaacgagctatagaaacgatcc

SEQ ID NO: 4922860 - DNA, 25 bp, Homo sapien
tttcaagtaacgagctatagaaacg

SEQ ID NO: 4922861 - DNA, 25 bp, Homo sapien
tcaagtaacgagctatagaaacgat

SEQ ID NO: 4922862 - DNA, 25 bp, Homo sapien
aacttttcaagtaacgagctataga

SEQ ID NO: 4922863 - DNA, 25 bp, Homo sapien
tatatcattcatcacccaacaagta

SEQ ID NO: 4922864 - DNA, 25 bp, Homo sapien
tatcattcatcacccaacaagtatt

SEQ ID NO: 4922865 - DNA, 25 bp, Homo sapien
ttatatcattcatcacccaacaagt

SEQ ID NO: 4922866 - DNA, 25 bp, Homo sapien
atatcattcatcacccaacaagtat

SEQ ID NO: 4922867 - DNA, 25 bp, Homo sapien
agatccattgaatagcacccacagg

SEQ ID NO: 4922868 - DNA, 25 bp, Homo sapien
tagagatccattgaatagcacccac

SEQ ID NO: 4922869 - DNA, 25 bp, Homo sapien
aaatcacagctctccccagcgatcc

SEQ ID NO: 4922870 - DNA, 25 bp, Homo sapien
aatagagatccattgaatagcaccc

SEQ ID NO: 4922871 - DNA, 25 bp, Homo sapien
tccactctacgatcggcaactgtga

SEQ ID NO: 4922872 - DNA, 25 bp, Homo sapien
ctacgatcggcaactgtgaatgaga

SEQ ID NO: 4922873 - DNA, 25 bp, Homo sapien
aatccactctacgatcggcaactgt

SEQ ID NO: 4922874 - DNA, 25 bp, Homo sapien
ctctacgatcggcaactgtgaatga

SEQ ID NO: 4922875 - DNA, 25 bp, Homo sapien
tgaccttctggactcttttgggcat

SEQ ID NO: 4922876 - DNA, 25 bp, Homo sapien
cttaggcctcctgctcctaattctg

SEQ ID NO: 4922877 - DNA, 25 bp, Homo sapien
tgcttgtgcctccatgggtctctga

SEQ ID NO: 4922878 - DNA, 25 bp, Homo sapien
ggtctctgacccccttagcttaggc

SEQ ID NO: 4922879 - DNA, 25 bp, Homo sapien
taggcctcctgctcctaattctggc

SEQ ID NO: 4922880 - DNA, 25 bp, Homo sapien
ggcacctgctgggagctcgacttag

SEQ ID NO: 4922881 - DNA, 25 bp, Homo sapien
tgggagctcgacttaggtttcttct

SEQ ID NO: 4922882 - DNA, 25 bp, Homo sapien
caggcgagagccgtgaggaagctct

SEQ ID NO: 4922883 - DNA, 25 bp, Homo sapien
agggcaaactcatcaagggcacctg

SEQ ID NO: 4922884 - DNA, 25 bp, Homo sapien
ccatagctatggttcctaattagag

SEQ ID NO: 4922885 - DNA, 25 bp, Homo sapien
ccacaggggcctttatgtgcatgtt

SEQ ID NO: 4922886 - DNA, 25 bp, Homo sapien
ccagagagaccgcagcaccacaggg

SEQ ID NO: 4922887 - DNA, 25 bp, Homo sapien
agcaatcaccatagctatggttcct

SEQ ID NO: 4922888 - DNA, 25 bp, Homo sapien
gtttctctccacctgtaagaacagg

SEQ ID NO: 4922889 - DNA, 25 bp, Homo sapien
ctgtctgctcctcatgtttctctcc

SEQ ID NO: 4922890 - DNA, 25 bp, Homo sapien
cacctgtaagaacaggagattctct

SEQ ID NO: 4922891 - DNA, 25 bp, Homo sapien
tgtaagaacaggagattctctgatg

SEQ ID NO: 4922892 - DNA, 25 bp, Homo sapien
ggagccgcagataaagaaagtcccc

SEQ ID NO: 4922893 - DNA, 25 bp, Homo sapien
aacgttctactttaggagccgcaga

SEQ ID NO: 4922894 - DNA, 25 bp, Homo sapien
ttaggagccgcagataaagaaagtc

SEQ ID NO: 4922895 - DNA, 25 bp, Homo sapien
acaccccattgcataacgttctact

SEQ ID NO: 4922896 - DNA, 25 bp, Homo sapien
ttgccttgcccctagagaactggtt

SEQ ID NO: 4922897 - DNA, 25 bp, Homo sapien
tgagcagttggatgtgcccacagaa

SEQ ID NO: 4922898 - DNA, 25 bp, Homo sapien
aggaggccgggccattaagtccaga

SEQ ID NO: 4922899 - DNA, 25 bp, Homo sapien
taacagaagggataacaggacagtg

SEQ ID NO: 4922900 - DNA, 25 bp, Homo sapien
gaagcttcctataagcagctcctcc

SEQ ID NO: 4922901 - DNA, 25 bp, Homo sapien
ctttggatttgcaccatcagaggtg

SEQ ID NO: 4922902 - DNA, 25 bp, Homo sapien
ctttacttcacctctaatgtctgtg

SEQ ID NO: 4922903 - DNA, 25 bp, Homo sapien
tgaccactctttacttcacctctaa

SEQ ID NO: 4922904 - DNA, 25 bp, Homo sapien
aaaggcacccaagaacttagctgac

SEQ ID NO: 4922905 - DNA, 25 bp, Homo sapien
tcccagtggacggaaacgtatggct

SEQ ID NO: 4922906 - DNA, 25 bp, Homo sapien
attccaaacaggttctcaaatccag

SEQ ID NO: 4922907 - DNA, 25 bp, Homo sapien
gcaggtcaaccccatttcccagtgg

SEQ ID NO: 4922908 - DNA, 25 bp, Homo sapien
tgggcaatgtggcagccacaagggt

SEQ ID NO: 4922909 - DNA, 25 bp, Homo sapien
cagccacaagggtagcgaaaggtga

SEQ ID NO: 4922910 - DNA, 25 bp, Homo sapien
cacaagggtagcgaaaggtgagcct

SEQ ID NO: 4922911 - DNA, 25 bp, Homo sapien
tgtggcagccacaagggtagcgaaa

SEQ ID NO: 4922912 - DNA, 25 bp, Homo sapien
gagcccagctaggagcaacaggtct

SEQ ID NO: 4922913 - DNA, 25 bp, Homo sapien
tccaccaactgaattactgacacgt

SEQ ID NO: 4922914 - DNA, 25 bp, Homo sapien
gttgttcaatttcatccgaggtcac

SEQ ID NO: 4922915 - DNA, 25 bp, Homo sapien
ggtccacagataattacccagttgt

SEQ ID NO: 4922916 - DNA, 25 bp, Homo sapien
gccacagtcaggtgttcgggtttta

SEQ ID NO: 4922917 - DNA, 25 bp, Homo sapien
ctgtaaatgtacttttgaggtacca

SEQ ID NO: 4922918 - DNA, 25 bp, Homo sapien
gaagtggccaagagatccctggaca

SEQ ID NO: 4922919 - DNA, 25 bp, Homo sapien
cacagtcaggtgttcgggttttact

SEQ ID NO: 4922920 - DNA, 25 bp, Homo sapien
tgaactgggagggacctatgaggac

SEQ ID NO: 4922921 - DNA, 25 bp, Homo sapien
ggacctatgaggacagcttggccca

SEQ ID NO: 4922922 - DNA, 25 bp, Homo sapien
atgaggacagcttggcccacccagc

SEQ ID NO: 4922923 - DNA, 25 bp, Homo sapien
ctgggagggacctatgaggacagct

SEQ ID NO: 4922924 - DNA, 25 bp, Homo sapien
caggcccacccctcaaatgtgtggg

SEQ ID NO: 4922925 - DNA, 25 bp, Homo sapien
caaatgtgtgggtccagcccatttc

SEQ ID NO: 4922926 - DNA, 25 bp, Homo sapien
cagtgccagggcttccacgtggctc

SEQ ID NO: 4922927 - DNA, 25 bp, Homo sapien
catagatccctctcagcagtgccag

SEQ ID NO: 4922928 - DNA, 25 bp, Homo sapien
tggagccagtttctaggtattcgcc

SEQ ID NO: 4922929 - DNA, 25 bp, Homo sapien
tgctgagtgagacatcaaggttcct

SEQ ID NO: 4922930 - DNA, 25 bp, Homo sapien
caatattgctcatcacttgcaagct

SEQ ID NO: 4922931 - DNA, 25 bp, Homo sapien
tattcgcctagggtctggtctgccc

SEQ ID NO: 4922932 - DNA, 25 bp, Homo sapien
agctcagtgcatggcaggatgccca

SEQ ID NO: 4922933 - DNA, 25 bp, Homo sapien
ccttcaggtacaatggtgcccacca

SEQ ID NO: 4922934 - DNA, 25 bp, Homo sapien
gaggataccatcagtaccttcaggt

SEQ ID NO: 4922935 - DNA, 25 bp, Homo sapien
cattgtttacactcctgaggatacc

SEQ ID NO: 4922936 - DNA, 25 bp, Homo sapien
tttcataactcctgaaagcatggtt

SEQ ID NO: 4922937 - DNA, 25 bp, Homo sapien
tcattgaattggcaaaagacgacct

SEQ ID NO: 4922938 - DNA, 25 bp, Homo sapien
tgttgatgcaatacagtggtaattg

SEQ ID NO: 4922939 - DNA, 25 bp, Homo sapien
agcatggttcctttcacggttgaga

SEQ ID NO: 4922940 - DNA, 25 bp, Homo sapien
ccccacctaggtgcaagataactgt

SEQ ID NO: 4922941 - DNA, 25 bp, Homo sapien
cattagggacccaagctatgtctgc

SEQ ID NO: 4922942 - DNA, 25 bp, Homo sapien
gatgtattagcaatgtctccccacc

SEQ ID NO: 4922943 - DNA, 25 bp, Homo sapien
tcaagatagtcacaagcaagaagga

SEQ ID NO: 4922944 - DNA, 25 bp, Homo sapien
taagcctccttgtaatgccgtggga

SEQ ID NO: 4922945 - DNA, 25 bp, Homo sapien
gaccagggcccatagataattgaca

SEQ ID NO: 4922946 - DNA, 25 bp, Homo sapien
tgtgctcaacatgaaatggtcccaa

SEQ ID NO: 4922947 - DNA, 25 bp, Homo sapien
gggaccttctctcggcttacacaca

SEQ ID NO: 4922948 - DNA, 25 bp, Homo sapien
tggatcgcctgaacagctccaagtt

SEQ ID NO: 4922949 - DNA, 25 bp, Homo sapien
atggcctaggctcccgacagttcag

SEQ ID NO: 4922950 - DNA, 25 bp, Homo sapien
gggccaaccgagtacaagagcagca

SEQ ID NO: 4922951 - DNA, 25 bp, Homo sapien
agcagcagcgattggaggctggatc

SEQ ID NO: 4922952 - DNA, 25 bp, Homo sapien
gtgccggatgtggaactccacgtct

SEQ ID NO: 4922953 - DNA, 25 bp, Homo sapien
cggatgtggaactccacgtctatgt

SEQ ID NO: 4922954 - DNA, 25 bp, Homo sapien
gtagttgtgccggatgtggaactcc

SEQ ID NO: 4922955 - DNA, 25 bp, Homo sapien
cttgttccaggggtagttgtgccgg

SEQ ID NO: 4922956 - DNA, 25 bp, Homo sapien
gattgcggatactgtacaggacaac

SEQ ID NO: 4922957 - DNA, 25 bp, Homo sapien
attctctctgtgaatttccaagact

SEQ ID NO: 4922958 - DNA, 25 bp, Homo sapien
acaggacaacctgcttttcatattc

SEQ ID NO: 4922959 - DNA, 25 bp, Homo sapien
tatatcgtaactgattgcggatact

SEQ ID NO: 4922960 - DNA, 25 bp, Homo sapien
ggtaagggtacagcatgagatgatc

SEQ ID NO: 4922961 - DNA, 25 bp, Homo sapien
gtaagggtacagcatgagatgatct

SEQ ID NO: 4922962 - DNA, 25 bp, Homo sapien
gaaaatggtgttatcctcaagcctt

SEQ ID NO: 4922963 - DNA, 25 bp, Homo sapien
aatggtgttatcctcaagcctttca

SEQ ID NO: 4922964 - DNA, 25 bp, Homo sapien
tccataatcccagtataatatgaaa

SEQ ID NO: 4922965 - DNA, 25 bp, Homo sapien
taatatgaaaatggtgttatcctca

SEQ ID NO: 4922966 - DNA, 25 bp, Homo sapien
aaattgggcaatgaatcataacttt

SEQ ID NO: 4922967 - DNA, 25 bp, Homo sapien
cagcagcagtaaaattgggcaatga

SEQ ID NO: 4922968 - DNA, 25 bp, Homo sapien
aacttttctcactgttcataatatc

SEQ ID NO: 4922969 - DNA, 25 bp, Homo sapien
agcagtaaaattgggcaatgaatca

SEQ ID NO: 4922970 - DNA, 25 bp, Homo sapien
cttcttcagcacaattaaatactta

SEQ ID NO: 4922971 - DNA, 25 bp, Homo sapien
ttcttcagcacaattaaatacttac

SEQ ID NO: 4922972 - DNA, 25 bp, Homo sapien
taagatcaatatactggtttcttcc

SEQ ID NO: 4922973 - DNA, 25 bp, Homo sapien
tccactggctttattggtagaagat

SEQ ID NO: 4922974 - DNA, 25 bp, Homo sapien
ccactggctttattggtagaagatc

SEQ ID NO: 4922975 - DNA, 25 bp, Homo sapien
cactggctttattggtagaagatca

SEQ ID NO: 4922976 - DNA, 25 bp, Homo sapien
tcgatgatcttatcaacagcgcatt

SEQ ID NO: 4922977 - DNA, 25 bp, Homo sapien
gggcctgaatcgatgatcttatcaa

SEQ ID NO: 4922978 - DNA, 25 bp, Homo sapien
tgaatcgatgatcttatcaacagcg

SEQ ID NO: 4922979 - DNA, 25 bp, Homo sapien
gatcttatcaacagcgcatttctca

SEQ ID NO: 4922980 - DNA, 25 bp, Homo sapien
catcagatattggtacatccagata

SEQ ID NO: 4922981 - DNA, 25 bp, Homo sapien
ctgctatacaactgtcatcagatat

SEQ ID NO: 4922982 - DNA, 25 bp, Homo sapien
gataaataaatcctttgttatacaa

SEQ ID NO: 4922983 - DNA, 25 bp, Homo sapien
atccagataaataaatcctttgtta

SEQ ID NO: 4922984 - DNA, 25 bp, Homo sapien
caaaataatcaccttgcactcgatt

SEQ ID NO: 4922985 - DNA, 25 bp, Homo sapien
aaaataatcaccttgcactcgattc

SEQ ID NO: 4922986 - DNA, 25 bp, Homo sapien
cagggataagtcaatctcaaggaca

SEQ ID NO: 4922987 - DNA, 25 bp, Homo sapien
agtcaatctcaaggacatttgcaag

SEQ ID NO: 4922988 - DNA, 25 bp, Homo sapien
gataagtcaatctcaaggacatttg

SEQ ID NO: 4922989 - DNA, 25 bp, Homo sapien
cttaaccagggataagtcaatctca

SEQ ID NO: 4922990 - DNA, 25 bp, Homo sapien
gtcccttcttatgggcaaagcccaa

SEQ ID NO: 4922991 - DNA, 25 bp, Homo sapien
aaggtgggtggatcagttggggcca

SEQ ID NO: 4922992 - DNA, 25 bp, Homo sapien
taaataaaatttctgggccaggtgc

SEQ ID NO: 4922993 - DNA, 25 bp, Homo sapien
tcagttggggccaggagttcgacac

SEQ ID NO: 4922994 - DNA, 25 bp, Homo sapien
ctcaactgacaggttgaataaataa

SEQ ID NO: 4922995 - DNA, 25 bp, Homo sapien
ttgccgatgaagcttcttgtacagg

SEQ ID NO: 4922996 - DNA, 25 bp, Homo sapien
gttgccgatgaagcttcttgtacag

SEQ ID NO: 4922997 - DNA, 25 bp, Homo sapien
tcccatcattaagaaggcagtaaga

SEQ ID NO: 4922998 - DNA, 25 bp, Homo sapien
ttctagttctataagaaagctgtcc

SEQ ID NO: 4922999 - DNA, 25 bp, Homo sapien
acttcaaacattgtgactgcatgac

SEQ ID NO: 4923000 - DNA, 25 bp, Homo sapien
tctataagaaagctgtccagagact

SEQ ID NO: 4923001 - DNA, 25 bp, Homo sapien
ctgagagtttgcctacttcaaacat

SEQ ID NO: 4923002 - DNA, 25 bp, Homo sapien
ggagttgcagaatcaccacaaattc

SEQ ID NO: 4923003 - DNA, 25 bp, Homo sapien
ggccagaataaaatatccgaagaat

SEQ ID NO: 4923004 - DNA, 25 bp, Homo sapien
gcacaaaaggcacgaaaagtattag

SEQ ID NO: 4923005 - DNA, 25 bp, Homo sapien
tagtcaaggaacagattaggcacac

SEQ ID NO: 4923006 - DNA, 25 bp, Homo sapien
ataattgggttggtctggctgtgca

SEQ ID NO: 4923007 - DNA, 25 bp, Homo sapien
cataattgggttggtctggctgtgc

SEQ ID NO: 4923008 - DNA, 25 bp, Homo sapien
caattcagatgaggagctaagctaa

SEQ ID NO: 4923009 - DNA, 25 bp, Homo sapien
tgagaacggtactaatgtgcaccat

SEQ ID NO: 4923010 - DNA, 25 bp, Homo sapien
aattaaatctccaactagggtcagg

SEQ ID NO: 4923011 - DNA, 25 bp, Homo sapien
cttaaaggttaggattgcacaggac

SEQ ID NO: 4923012 - DNA, 25 bp, Homo sapien
tcaagcacacacacagaataaaaga

SEQ ID NO: 4923013 - DNA, 25 bp, Homo sapien
ctgagttatgatcaagcacacacac

SEQ ID NO: 4923014 - DNA, 25 bp, Homo sapien
gatcaagcacacacacagaataaaa

SEQ ID NO: 4923015 - DNA, 25 bp, Homo sapien
gagttatgatcaagcacacacacag

SEQ ID NO: 4923016 - DNA, 25 bp, Homo sapien
ttagaactctgctgcaagttgcagg

SEQ ID NO: 4923017 - DNA, 25 bp, Homo sapien
aatttttgtttagaactctgctgca

SEQ ID NO: 4923018 - DNA, 25 bp, Homo sapien
caagttgcagggtccaaaccaagaa

SEQ ID NO: 4923019 - DNA, 25 bp, Homo sapien
tctgctgcaagttgcagggtccaaa

SEQ ID NO: 4923020 - DNA, 25 bp, Homo sapien
tgaagaacagcaacataatccccac

SEQ ID NO: 4923021 - DNA, 25 bp, Homo sapien
ctgaagaacagcaacataatcccca

SEQ ID NO: 4923022 - DNA, 25 bp, Homo sapien
gaagaacagcaacataatccccact

SEQ ID NO: 4923023 - DNA, 25 bp, Homo sapien
tctaggaacccaggtaagatgcagc

SEQ ID NO: 4923024 - DNA, 25 bp, Homo sapien
tgcattgtctaggaacccaggtaag

SEQ ID NO: 4923025 - DNA, 25 bp, Homo sapien
cattaaaccctgcattgtctaggaa

SEQ ID NO: 4923026 - DNA, 25 bp, Homo sapien
ccttcctttctgctacatcattaaa

SEQ ID NO: 4923027 - DNA, 25 bp, Homo sapien
gctgacttctgggatagctggtcca

SEQ ID NO: 4923028 - DNA, 25 bp, Homo sapien
gatggtggtccttgtccagtgacat

SEQ ID NO: 4923029 - DNA, 25 bp, Homo sapien
ccagtgacatgataaatgtacagtt

SEQ ID NO: 4923030 - DNA, 25 bp, Homo sapien
tgtacagtttaaaccagacagagct

SEQ ID NO: 4923031 - DNA, 25 bp, Homo sapien
tatatctggcagttttcgaagtctt

SEQ ID NO: 4923032 - DNA, 25 bp, Homo sapien
tctggcagttttcgaagtcttgtac

SEQ ID NO: 4923033 - DNA, 25 bp, Homo sapien
atatatctggcagttttcgaagtct

SEQ ID NO: 4923034 - DNA, 25 bp, Homo sapien
tatctggcagttttcgaagtcttgt

SEQ ID NO: 4923035 - DNA, 25 bp, Homo sapien
catcgtgagcacatttgaggtagga

SEQ ID NO: 4923036 - DNA, 25 bp, Homo sapien
atgttattagcaatcgatcataact

SEQ ID NO: 4923037 - DNA, 25 bp, Homo sapien
ggtaggaactactccaggatcatga

SEQ ID NO: 4923038 - DNA, 25 bp, Homo sapien
taaagcatcattcaacatcgtgagc

SEQ ID NO: 4923039 - DNA, 25 bp, Homo sapien
catggacagtttctcctatcccatg

SEQ ID NO: 4923040 - DNA, 25 bp, Homo sapien
tttctcctatcccatgcagaccatg

SEQ ID NO: 4923041 - DNA, 25 bp, Homo sapien
agtttctcctatcccatgcagacca

SEQ ID NO: 4923042 - DNA, 25 bp, Homo sapien
gacagtttctcctatcccatgcaga

SEQ ID NO: 4923043 - DNA, 25 bp, Homo sapien
ttattccaagacagactagtagtct

SEQ ID NO: 4923044 - DNA, 25 bp, Homo sapien
aggcaaaggatctactaagcagttt

SEQ ID NO: 4923045 - DNA, 25 bp, Homo sapien
ctttgtggatggcaaagcacatgac

SEQ ID NO: 4923046 - DNA, 25 bp, Homo sapien
taagatcctgttgtcactatctgca

SEQ ID NO: 4923047 - DNA, 25 bp, Homo sapien
acaaacagaacggacatcacattaa

SEQ ID NO: 4923048 - DNA, 25 bp, Homo sapien
ctacaaacagaacggacatcacatt

SEQ ID NO: 4923049 - DNA, 25 bp, Homo sapien
caaacagaacggacatcacattaat

SEQ ID NO: 4923050 - DNA, 25 bp, Homo sapien
aacagaacggacatcacattaatga

SEQ ID NO: 4923051 - DNA, 25 bp, Homo sapien
gcaatgctttatgaacacccatatt

SEQ ID NO: 4923052 - DNA, 25 bp, Homo sapien
tatgaacacccatattgacacgagt

SEQ ID NO: 4923053 - DNA, 25 bp, Homo sapien
tgctttatgaacacccatattgaca

SEQ ID NO: 4923054 - DNA, 25 bp, Homo sapien
acacccatattgacacgagtgaact

SEQ ID NO: 4923055 - DNA, 25 bp, Homo sapien
ccaaagaatccaactattggctaac

SEQ ID NO: 4923056 - DNA, 25 bp, Homo sapien
ttaacactgtgtcaaactcaaaacc

SEQ ID NO: 4923057 - DNA, 25 bp, Homo sapien
tatattaacactgtgtcaaactcaa

SEQ ID NO: 4923058 - DNA, 25 bp, Homo sapien
caaaaccaattatcttaatccaaag

SEQ ID NO: 4923059 - DNA, 25 bp, Homo sapien
gagtaagtacctatctcaatgggag

SEQ ID NO: 4923060 - DNA, 25 bp, Homo sapien
tactggatggcaagtaatcaatcac

SEQ ID NO: 4923061 - DNA, 25 bp, Homo sapien
aaaatgctcctgcaatatttggcag

SEQ ID NO: 4923062 - DNA, 25 bp, Homo sapien
gggagccaacccaatctactggatg

SEQ ID NO: 4923063 - DNA, 25 bp, Homo sapien
tcctcaatgaccatttcaaatgact

SEQ ID NO: 4923064 - DNA, 25 bp, Homo sapien
tgttgctgaatctatagttgcttcc

SEQ ID NO: 4923065 - DNA, 25 bp, Homo sapien
atagttgcttcctcaatgaccattt

SEQ ID NO: 4923066 - DNA, 25 bp, Homo sapien
cccatttacatctgagccagaagcc

SEQ ID NO: 4923067 - DNA, 25 bp, Homo sapien
gaaggtacatagctttcatccaatg

SEQ ID NO: 4923068 - DNA, 25 bp, Homo sapien
tctaagtatgtaaaaaggcttccta

SEQ ID NO: 4923069 - DNA, 25 bp, Homo sapien
tagacaaatggcatgcaaatgcctt

SEQ ID NO: 4923070 - DNA, 25 bp, Homo sapien
actgatatccaccagtgggcttggc

SEQ ID NO: 4923071 - DNA, 25 bp, Homo sapien
gaacagtggaattccaaagcacagc

SEQ ID NO: 4923072 - DNA, 25 bp, Homo sapien
tccaaagcacagctcgagaggaacc

SEQ ID NO: 4923073 - DNA, 25 bp, Homo sapien
gtttaattcggaactgaacagtgga

SEQ ID NO: 4923074 - DNA, 25 bp, Homo sapien
gaacccaatctgcttctgttgtggc

SEQ ID NO: 4923075 - DNA, 25 bp, Homo sapien
gctactcacaatggatcagagctgg

SEQ ID NO: 4923076 - DNA, 25 bp, Homo sapien
gatttaggcactctgaggaatgaca

SEQ ID NO: 4923077 - DNA, 25 bp, Homo sapien
taggttcatactccatatcagcatg

SEQ ID NO: 4923078 - DNA, 25 bp, Homo sapien
taaatgcatctatatatcctggcca

SEQ ID NO: 4923079 - DNA, 25 bp, Homo sapien
gtgaacaaagttaaggacttgcaga

SEQ ID NO: 4923080 - DNA, 25 bp, Homo sapien
tgaacaaagttaaggacttgcagag

SEQ ID NO: 4923081 - DNA, 25 bp, Homo sapien
tgcagagagagttttctactggaat

SEQ ID NO: 4923082 - DNA, 25 bp, Homo sapien
gagagagttttctactggaatgtaa

SEQ ID NO: 4923083 - DNA, 25 bp, Homo sapien
tacttaaagctcagtacaagtacca

SEQ ID NO: 4923084 - DNA, 25 bp, Homo sapien
cttaaagctcagtacaagtaccatt

SEQ ID NO: 4923085 - DNA, 25 bp, Homo sapien
acttaaagctcagtacaagtaccat

SEQ ID NO: 4923086 - DNA, 25 bp, Homo sapien
atacttaaagctcagtacaagtacc

SEQ ID NO: 4923087 - DNA, 25 bp, Homo sapien
tctggcataggtcagggtcaagcat

SEQ ID NO: 4923088 - DNA, 25 bp, Homo sapien
aacagacaggccagtattgacagaa

SEQ ID NO: 4923089 - DNA, 25 bp, Homo sapien
gaagacctggcgagtgaaatgtgca

SEQ ID NO: 4923090 - DNA, 25 bp, Homo sapien
tcccagcagtggagaatcgctttag

SEQ ID NO: 4923091 - DNA, 25 bp, Homo sapien
gatcaggagttcaaaacgagcctgg

SEQ ID NO: 4923092 - DNA, 25 bp, Homo sapien
tgaggcgggtgaatcacttgagatc

SEQ ID NO: 4923093 - DNA, 25 bp, Homo sapien
aatcccagcactctgggaggctgag

SEQ ID NO: 4923094 - DNA, 25 bp, Homo sapien
caggtgcagtggcttgtgcgcctgt

SEQ ID NO: 4923095 - DNA, 25 bp, Homo sapien
tgagcccaaagcaatcaatgacagg

SEQ ID NO: 4923096 - DNA, 25 bp, Homo sapien
gattgcaaagcagtacaggagatgc

SEQ ID NO: 4923097 - DNA, 25 bp, Homo sapien
caatgacaggtattaatatgtgcaa

SEQ ID NO: 4923098 - DNA, 25 bp, Homo sapien
agagaccttgattacctgagaagtg

SEQ ID NO: 4923099 - DNA, 25 bp, Homo sapien
ttgcaggaagtggaacacccatgtc

SEQ ID NO: 4923100 - DNA, 25 bp, Homo sapien
gcaggaagtggaacacccatgtcag

SEQ ID NO: 4923101 - DNA, 25 bp, Homo sapien
aggaagtggaacacccatgtcagca

SEQ ID NO: 4923102 - DNA, 25 bp, Homo sapien
ttattgcaaatggagattagcaata

SEQ ID NO: 4923103 - DNA, 25 bp, Homo sapien
caggatgctttttagtggctgacac

SEQ ID NO: 4923104 - DNA, 25 bp, Homo sapien
gcagcaggatgctttttagtggctg

SEQ ID NO: 4923105 - DNA, 25 bp, Homo sapien
tagtggctgacactataaagctaac

SEQ ID NO: 4923106 - DNA, 25 bp, Homo sapien
cactataaagctaacgttaagaaag

SEQ ID NO: 4923107 - DNA, 25 bp, Homo sapien
ggttaagttatacacaactatgctg

SEQ ID NO: 4923108 - DNA, 25 bp, Homo sapien
ctatagataggccatggtattgaat

SEQ ID NO: 4923109 - DNA, 25 bp, Homo sapien
cacaactatgctgatttacatacct

SEQ ID NO: 4923110 - DNA, 25 bp, Homo sapien
tattgaatgcatggttaagttttag

SEQ ID NO: 4923111 - DNA, 25 bp, Homo sapien
gccaaattcacaaagcaaggcgcaa

SEQ ID NO: 4923112 - DNA, 25 bp, Homo sapien
gaaaccaatattccgctcccctgaa

SEQ ID NO: 4923113 - DNA, 25 bp, Homo sapien
cagaggtcttcagctcggaatcaga

SEQ ID NO: 4923114 - DNA, 25 bp, Homo sapien
tctccctccttaagaggaccagagg

SEQ ID NO: 4923115 - DNA, 25 bp, Homo sapien
tccaacaatcactcctccatagagt

SEQ ID NO: 4923116 - DNA, 25 bp, Homo sapien
tagagtctatattgattccctgagc

SEQ ID NO: 4923117 - DNA, 25 bp, Homo sapien
catccaaaatgtgtttcgtcatata

SEQ ID NO: 4923118 - DNA, 25 bp, Homo sapien
tctctgtcctcctaaacttgttcat

SEQ ID NO: 4923119 - DNA, 25 bp, Homo sapien
tgattggatgtcttactctttcccc

SEQ ID NO: 4923120 - DNA, 25 bp, Homo sapien
ttgtcttcatgccattgattggatg

SEQ ID NO: 4923121 - DNA, 25 bp, Homo sapien
accttctctggtggtctatcatgtt

SEQ ID NO: 4923122 - DNA, 25 bp, Homo sapien
tctctggtggtctatcatgttgctc

SEQ ID NO: 4923123 - DNA, 25 bp, Homo sapien
gtgctatgatagcagacttcacagc

SEQ ID NO: 4923124 - DNA, 25 bp, Homo sapien
ttcacagcgcacacgccagctgttc

SEQ ID NO: 4923125 - DNA, 25 bp, Homo sapien
ggtaaatttgccctgtaattctctg

SEQ ID NO: 4923126 - DNA, 25 bp, Homo sapien
taccataaaaccagggtgtgctatg

SEQ ID NO: 4923127 - DNA, 25 bp, Homo sapien
agggagccaagatgtcatcctcagt

SEQ ID NO: 4923128 - DNA, 25 bp, Homo sapien
gccaagatgtcatcctcagttatga

SEQ ID NO: 4923129 - DNA, 25 bp, Homo sapien
gatgtcatcctcagttatgacagtt

SEQ ID NO: 4923130 - DNA, 25 bp, Homo sapien
ggagccaagatgtcatcctcagtta

SEQ ID NO: 4923131 - DNA, 25 bp, Homo sapien
ttggctttggatggcttctccattc

SEQ ID NO: 4923132 - DNA, 25 bp, Homo sapien
tcctctttttagcagctcctctggg

SEQ ID NO: 4923133 - DNA, 25 bp, Homo sapien
cttcctctttttagcagctcctctg

SEQ ID NO: 4923134 - DNA, 25 bp, Homo sapien
attcttcctctttttagcagctcct

SEQ ID NO: 4923135 - DNA, 25 bp, Homo sapien
tggtttttcacaggtcacaatttga

SEQ ID NO: 4923136 - DNA, 25 bp, Homo sapien
gtttttcacaggtcacaatttgaga

SEQ ID NO: 4923137 - DNA, 25 bp, Homo sapien
ggtttttcacaggtcacaatttgag

SEQ ID NO: 4923138 - DNA, 25 bp, Homo sapien
tttttcacaggtcacaatttgagaa

SEQ ID NO: 4923139 - DNA, 25 bp, Homo sapien
gatgtgcaagtggaagtaaccactg

SEQ ID NO: 4923140 - DNA, 25 bp, Homo sapien
gaaaatcaatctggactctagtcca

SEQ ID NO: 4923141 - DNA, 25 bp, Homo sapien
tgagcttcaccagcaattgaggtag

SEQ ID NO: 4923142 - DNA, 25 bp, Homo sapien
gagtgggcaagtccatatgattcag

SEQ ID NO: 4923143 - DNA, 25 bp, Homo sapien
caaacccaaagccataacacccagt

SEQ ID NO: 4923144 - DNA, 25 bp, Homo sapien
acccaaagccataacacccagtacg

SEQ ID NO: 4923145 - DNA, 25 bp, Homo sapien
tccaaacccaaagccataacaccca

SEQ ID NO: 4923146 - DNA, 25 bp, Homo sapien
ccaaagccataacacccagtacggg

SEQ ID NO: 4923147 - DNA, 25 bp, Homo sapien
ggattagaaaattgctcacagccag

SEQ ID NO: 4923148 - DNA, 25 bp, Homo sapien
agccagagttgccacgtgttctccc

SEQ ID NO: 4923149 - DNA, 25 bp, Homo sapien
tgttctcccacttgtgtcaccagat

SEQ ID NO: 4923150 - DNA, 25 bp, Homo sapien
caggattagaaaattgctcacagcc

SEQ ID NO: 4923151 - DNA, 25 bp, Homo sapien
taggatcataatatcctcccagggt

SEQ ID NO: 4923152 - DNA, 25 bp, Homo sapien
tttaggatcataatatcctcccagg

SEQ ID NO: 4923153 - DNA, 25 bp, Homo sapien
ctggtttaggatcataatatcctcc

SEQ ID NO: 4923154 - DNA, 25 bp, Homo sapien
gatcataatatcctcccagggtcat

SEQ ID NO: 4923155 - DNA, 25 bp, Homo sapien
cacttcacaaaaagtatagggcttt

SEQ ID NO: 4923156 - DNA, 25 bp, Homo sapien
atgagaaccctcccacttcacaaaa

SEQ ID NO: 4923157 - DNA, 25 bp, Homo sapien
agagaattccagcatgagaaccctc

SEQ ID NO: 4923158 - DNA, 25 bp, Homo sapien
gagaattccagcatgagaaccctcc

SEQ ID NO: 4923159 - DNA, 25 bp, Homo sapien
agctgccaccacatccccaaccacc

SEQ ID NO: 4923160 - DNA, 25 bp, Homo sapien
ctggtaagccactaaggcagctgcc

SEQ ID NO: 4923161 - DNA, 25 bp, Homo sapien
gccaccacatccccaaccacctcta

SEQ ID NO: 4923162 - DNA, 25 bp, Homo sapien
caccacatccccaaccacctctact

SEQ ID NO: 4923163 - DNA, 25 bp, Homo sapien
aaatcccacccgaattggaatcgtg

SEQ ID NO: 4923164 - DNA, 25 bp, Homo sapien
tcagcagcacccaacaagctctcca

SEQ ID NO: 4923165 - DNA, 25 bp, Homo sapien
cccgaattggaatcgtgaggtccac

SEQ ID NO: 4923166 - DNA, 25 bp, Homo sapien
cccaggatgagggcaaaagacaagt

SEQ ID NO: 4923167 - DNA, 25 bp, Homo sapien
ctttcgcagccttgttggctaggat

SEQ ID NO: 4923168 - DNA, 25 bp, Homo sapien
cgcagccttgttggctaggattaac

SEQ ID NO: 4923169 - DNA, 25 bp, Homo sapien
ttcgcagccttgttggctaggatta

SEQ ID NO: 4923170 - DNA, 25 bp, Homo sapien
cagccttgttggctaggattaaccc

SEQ ID NO: 4923171 - DNA, 25 bp, Homo sapien
ctcgctcccattgagagagaactgc

SEQ ID NO: 4923172 - DNA, 25 bp, Homo sapien
ggtcgggggcagcacattcacactc

SEQ ID NO: 4923173 - DNA, 25 bp, Homo sapien
gtcgggggcagcacattcacactcc

SEQ ID NO: 4923174 - DNA, 25 bp, Homo sapien
cccctcgctcccattgagagagaac

SEQ ID NO: 4923175 - DNA, 25 bp, Homo sapien
cttgggcccacacctgtgactagaa

SEQ ID NO: 4923176 - DNA, 25 bp, Homo sapien
ggcccacacctgtgactagaaggac

SEQ ID NO: 4923177 - DNA, 25 bp, Homo sapien
tggcccagatgaccaagggccttgg

SEQ ID NO: 4923178 - DNA, 25 bp, Homo sapien
ctgtttggcccagatgaccaagggc

SEQ ID NO: 4923179 - DNA, 25 bp, Homo sapien
tcgctgattttaaacagcaaaccac

SEQ ID NO: 4923180 - DNA, 25 bp, Homo sapien
tgcattttggttcgctgattttaaa

SEQ ID NO: 4923181 - DNA, 25 bp, Homo sapien
gctttggtgcattttggttcgctga

SEQ ID NO: 4923182 - DNA, 25 bp, Homo sapien
taaggtaccttccagctttggtgca

SEQ ID NO: 4923183 - DNA, 25 bp, Homo sapien
gacaggaaagatagaagcatcatca

SEQ ID NO: 4923184 - DNA, 25 bp, Homo sapien
gggacaggaaagatagaagcatcat

SEQ ID NO: 4923185 - DNA, 25 bp, Homo sapien
ggacaggaaagatagaagcatcatc

SEQ ID NO: 4923186 - DNA, 25 bp, Homo sapien
tgacctccccatcatggatcttagt

SEQ ID NO: 4923187 - DNA, 25 bp, Homo sapien
tgataattttgggatctgacctccc

SEQ ID NO: 4923188 - DNA, 25 bp, Homo sapien
catggatcttagtcaacagttttga

SEQ ID NO: 4923189 - DNA, 25 bp, Homo sapien
gataattttgggatctgacctcccc

SEQ ID NO: 4923190 - DNA, 25 bp, Homo sapien
aagcagtgtggacaccattccggac

SEQ ID NO: 4923191 - DNA, 25 bp, Homo sapien
gcagtgtggacaccattccggacac

SEQ ID NO: 4923192 - DNA, 25 bp, Homo sapien
gtgtggacaccattccggacaccgc

SEQ ID NO: 4923193 - DNA, 25 bp, Homo sapien
ggacaccgccatccatgcacacagg

SEQ ID NO: 4923194 - DNA, 25 bp, Homo sapien
acccaccagctggcgagcctcggtg

SEQ ID NO: 4923195 - DNA, 25 bp, Homo sapien
gagcctcggtgatggttatggcaat

SEQ ID NO: 4923196 - DNA, 25 bp, Homo sapien
tggcgagcctcggtgatggttatgg

SEQ ID NO: 4923197 - DNA, 25 bp, Homo sapien
caccagctggcgagcctcggtgatg

SEQ ID NO: 4923198 - DNA, 25 bp, Homo sapien
tggggcccaatgaagtcgaagacaa

SEQ ID NO: 4923199 - DNA, 25 bp, Homo sapien
acttggggcccaatgaagtcgaaga

SEQ ID NO: 4923200 - DNA, 25 bp, Homo sapien
gggcccaatgaagtcgaagacaaag

SEQ ID NO: 4923201 - DNA, 25 bp, Homo sapien
ttggggcccaatgaagtcgaagaca

SEQ ID NO: 4923202 - DNA, 25 bp, Homo sapien
ctaagtatgctgagttgtcccagag

SEQ ID NO: 4923203 - DNA, 25 bp, Homo sapien
caactattaccaccaatgctatact

SEQ ID NO: 4923204 - DNA, 25 bp, Homo sapien
agttgtcccagagagtccccaatgc

SEQ ID NO: 4923205 - DNA, 25 bp, Homo sapien
tccacaactattaccaccaatgcta

SEQ ID NO: 4923206 - DNA, 25 bp, Homo sapien
actgacacttgccctcctgaatcta

SEQ ID NO: 4923207 - DNA, 25 bp, Homo sapien
gacacttgccctcctgaatctattc

SEQ ID NO: 4923208 - DNA, 25 bp, Homo sapien
caactgacacttgccctcctgaatc

SEQ ID NO: 4923209 - DNA, 25 bp, Homo sapien
tgacacttgccctcctgaatctatt

SEQ ID NO: 4923210 - DNA, 25 bp, Homo sapien
tcccagacacctccatactggtgat

SEQ ID NO: 4923211 - DNA, 25 bp, Homo sapien
caagaagcatagatcttcttaaagt

SEQ ID NO: 4923212 - DNA, 25 bp, Homo sapien
gcatagatcttcttaaagtggtttt

SEQ ID NO: 4923213 - DNA, 25 bp, Homo sapien
tccatactggtgatttcaagttctg

SEQ ID NO: 4923214 - DNA, 25 bp, Homo sapien
gccataatgcaggactttgctgaca

SEQ ID NO: 4923215 - DNA, 25 bp, Homo sapien
ctaggccataatgcaggactttgct

SEQ ID NO: 4923216 - DNA, 25 bp, Homo sapien
taggccataatgcaggactttgctg

SEQ ID NO: 4923217 - DNA, 25 bp, Homo sapien
ggccataatgcaggactttgctgac

SEQ ID NO: 4923218 - DNA, 25 bp, Homo sapien
ttcctatcagcttgtggtgaaagac

SEQ ID NO: 4923219 - DNA, 25 bp, Homo sapien
tacacggtccccaggtctactttga

SEQ ID NO: 4923220 - DNA, 25 bp, Homo sapien
gtccccaggtctactttgaaagagc

SEQ ID NO: 4923221 - DNA, 25 bp, Homo sapien
ggtctactttgaaagagccaatcag

SEQ ID NO: 4923222 - DNA, 25 bp, Homo sapien
cccaggtctactttgaaagagccaa

SEQ ID NO: 4923223 - DNA, 25 bp, Homo sapien
cagggcccacttgttgcagaactga

SEQ ID NO: 4923224 - DNA, 25 bp, Homo sapien
gcagggcccacttgttgcagaactg

SEQ ID NO: 4923225 - DNA, 25 bp, Homo sapien
atcaccttttcccatgacactgatg

SEQ ID NO: 4923226 - DNA, 25 bp, Homo sapien
caccttttcccatgacactgatgtc

SEQ ID NO: 4923227 - DNA, 25 bp, Homo sapien
ttttctattggctcctcggtgtcag

SEQ ID NO: 4923228 - DNA, 25 bp, Homo sapien
ctcctcggtgtcagaagttttaggg

SEQ ID NO: 4923229 - DNA, 25 bp, Homo sapien
tagagtctcacatagaatctggccc

SEQ ID NO: 4923230 - DNA, 25 bp, Homo sapien
caaatgccttggtgacgttcgccat

SEQ ID NO: 4923231 - DNA, 25 bp, Homo sapien
tggcccacggtctctccagtggaaa

SEQ ID NO: 4923232 - DNA, 25 bp, Homo sapien
gcttgaattcattttgggcaaccct

SEQ ID NO: 4923233 - DNA, 25 bp, Homo sapien
caaagggatccaccaggtccttact

SEQ ID NO: 4923234 - DNA, 25 bp, Homo sapien
agggatccaccaggtccttactgtc

SEQ ID NO: 4923235 - DNA, 25 bp, Homo sapien
ggatccaccaggtccttactgtcac

SEQ ID NO: 4923236 - DNA, 25 bp, Homo sapien
aaagggatccaccaggtccttactg

SEQ ID NO: 4923237 - DNA, 25 bp, Homo sapien
cgacacaagggagggaacatttcct

SEQ ID NO: 4923238 - DNA, 25 bp, Homo sapien
tggattttcaccctccgacacaagg

SEQ ID NO: 4923239 - DNA, 25 bp, Homo sapien
tgttcatgccacacaggatcagcac

SEQ ID NO: 4923240 - DNA, 25 bp, Homo sapien
ggttgccagggctacgtcattcatg

SEQ ID NO: 4923241 - DNA, 25 bp, Homo sapien
ggttcctgggcgagccatacaggtt

SEQ ID NO: 4923242 - DNA, 25 bp, Homo sapien
caggttaatccaggcaggcccaaag

SEQ ID NO: 4923243 - DNA, 25 bp, Homo sapien
tagtcatccatcagactgtggttcc

SEQ ID NO: 4923244 - DNA, 25 bp, Homo sapien
gagccatacaggttaatccaggcag

SEQ ID NO: 4923245 - DNA, 25 bp, Homo sapien
gggacatcgaacgattccacctcca

SEQ ID NO: 4923246 - DNA, 25 bp, Homo sapien
aatttagattcctgtgcccgtcctg

SEQ ID NO: 4923247 - DNA, 25 bp, Homo sapien
aagattctgcccctgaatgacacac

SEQ ID NO: 4923248 - DNA, 25 bp, Homo sapien
ccacctccacctcggttgagttagt

SEQ ID NO: 4923249 - DNA, 25 bp, Homo sapien
caatagaaacttcaaagctgatggg

SEQ ID NO: 4923250 - DNA, 25 bp, Homo sapien
caatcttccggtcaatcatggtagc

SEQ ID NO: 4923251 - DNA, 25 bp, Homo sapien
catggtagcttcaaaaaatgctcca

SEQ ID NO: 4923252 - DNA, 25 bp, Homo sapien
gggtttatctccaatcttccggtca

SEQ ID NO: 4923253 - DNA, 25 bp, Homo sapien
tcttactcccatgatgggatcctcc

SEQ ID NO: 4923254 - DNA, 25 bp, Homo sapien
tggaggccataggaatgggaacatc

SEQ ID NO: 4923255 - DNA, 25 bp, Homo sapien
ccttgcccttcgtgaagcagtggaa

SEQ ID NO: 4923256 - DNA, 25 bp, Homo sapien
gctgattcagctgacttcttactcc

SEQ ID NO: 4923257 - DNA, 25 bp, Homo sapien
gaggttgttattacagcaggagaac

SEQ ID NO: 4923258 - DNA, 25 bp, Homo sapien
ataaaattagtgaaggtgccccgtg

SEQ ID NO: 4923259 - DNA, 25 bp, Homo sapien
gaccagcaggtgtttactcagaaga

SEQ ID NO: 4923260 - DNA, 25 bp, Homo sapien
tgcagatagataaattcccacccca

SEQ ID NO: 4923261 - DNA, 25 bp, Homo sapien
tttctccagcatgttggaccagtgc

SEQ ID NO: 4923262 - DNA, 25 bp, Homo sapien
agcatgttggaccagtgcagcctga

SEQ ID NO: 4923263 - DNA, 25 bp, Homo sapien
caagagctgatgaaatagacacagg

SEQ ID NO: 4923264 - DNA, 25 bp, Homo sapien
gaaatagacacagggcttcttagcc

SEQ ID NO: 4923265 - DNA, 25 bp, Homo sapien
tcttcaggtgcctcctgtgaaatct

SEQ ID NO: 4923266 - DNA, 25 bp, Homo sapien
ggtgcctcctgtgaaatcttgatca

SEQ ID NO: 4923267 - DNA, 25 bp, Homo sapien
aattctctcacttcttctatacttt

SEQ ID NO: 4923268 - DNA, 25 bp, Homo sapien
gaaatcttgatcaattctctcactt

SEQ ID NO: 4923269 - DNA, 25 bp, Homo sapien
ctatgccggctgtctctcccggtac

SEQ ID NO: 4923270 - DNA, 25 bp, Homo sapien
ggctttttttctgcttcagagataa

SEQ ID NO: 4923271 - DNA, 25 bp, Homo sapien
ttttttctgcttcagagataaaggc

SEQ ID NO: 4923272 - DNA, 25 bp, Homo sapien
tgggctttttttctgcttcagagat

SEQ ID NO: 4923273 - DNA, 25 bp, Homo sapien
gctttttttctgcttcagagataaa

SEQ ID NO: 4923274 - DNA, 25 bp, Homo sapien
cagagcgtaagtcgcttcttatcta

SEQ ID NO: 4923275 - DNA, 25 bp, Homo sapien
ccagcagagcgtaagtcgcttctta

SEQ ID NO: 4923276 - DNA, 25 bp, Homo sapien
tcctgccagcagagcgtaagtcgct

SEQ ID NO: 4923277 - DNA, 25 bp, Homo sapien
gtaagtcgcttcttatctaaagtgg

SEQ ID NO: 4923278 - DNA, 25 bp, Homo sapien
agttttgggcttcgtgaatcatttc

SEQ ID NO: 4923279 - DNA, 25 bp, Homo sapien
catcaacaagaaagcggattttttc

SEQ ID NO: 4923280 - DNA, 25 bp, Homo sapien
tcatcaacaagaaagcggatttttt

SEQ ID NO: 4923281 - DNA, 25 bp, Homo sapien
gcttcgtgaatcatttcatcaacag

SEQ ID NO: 4923282 - DNA, 25 bp, Homo sapien
gatgaaaacgtcagggatagtgtgc

SEQ ID NO: 4923283 - DNA, 25 bp, Homo sapien
gggcataggccactctcctgttgtt

SEQ ID NO: 4923284 - DNA, 25 bp, Homo sapien
gaagtgagttttgatcttgccgcag

SEQ ID NO: 4923285 - DNA, 25 bp, Homo sapien
tcttgccgcagtgtttgcccatctg

SEQ ID NO: 4923286 - DNA, 25 bp, Homo sapien
ggtacacgtcgacttttgcttgcac

SEQ ID NO: 4923287 - DNA, 25 bp, Homo sapien
gcactggcatgcttgatggagccca

SEQ ID NO: 4923288 - DNA, 25 bp, Homo sapien
ccagcccctttggaggacatttctg

SEQ ID NO: 4923289 - DNA, 25 bp, Homo sapien
ttcatagcctactggcaagttgtcc

SEQ ID NO: 4923290 - DNA, 25 bp, Homo sapien
gcttggtacatgtgagccctcagct

SEQ ID NO: 4923291 - DNA, 25 bp, Homo sapien
gagaaaggaacgtgactttggcaaa

SEQ ID NO: 4923292 - DNA, 25 bp, Homo sapien
caaaagggtctgaaagtccattgct

SEQ ID NO: 4923293 - DNA, 25 bp, Homo sapien
attgctgtcagctgcgatgaggccc

SEQ ID NO: 4923294 - DNA, 25 bp, Homo sapien
tggttccaggtcggagagagggtct

SEQ ID NO: 4923295 - DNA, 25 bp, Homo sapien
acagcgtcgctgtcatacagctcca

SEQ ID NO: 4923296 - DNA, 25 bp, Homo sapien
ccaaatcattgaacagcagcatctg

SEQ ID NO: 4923297 - DNA, 25 bp, Homo sapien
caccaccactaagggcggggactct

SEQ ID NO: 4923298 - DNA, 25 bp, Homo sapien
tcttgcccatttccgtaggtctggg

SEQ ID NO: 4923299 - DNA, 25 bp, Homo sapien
gctcctcttgcccatttccgtaggt

SEQ ID NO: 4923300 - DNA, 25 bp, Homo sapien
tcctcttgcccatttccgtaggtct

SEQ ID NO: 4923301 - DNA, 25 bp, Homo sapien
caagctcctcttgcccatttccgta

SEQ ID NO: 4923302 - DNA, 25 bp, Homo sapien
aaagatggggtgatagcataacctg

SEQ ID NO: 4923303 - DNA, 25 bp, Homo sapien
caaggagatcccctccagagagatt

SEQ ID NO: 4923304 - DNA, 25 bp, Homo sapien
agttcaaatacagcaaggagatccc

SEQ ID NO: 4923305 - DNA, 25 bp, Homo sapien
gcttcacaacaggagcagccactgt

SEQ ID NO: 4923306 - DNA, 25 bp, Homo sapien
tcagcaccggccgaatgttggcagg

SEQ ID NO: 4923307 - DNA, 25 bp, Homo sapien
atgtctggtggctcaacgggtggga

SEQ ID NO: 4923308 - DNA, 25 bp, Homo sapien
aaccgggtagatctgggtgatgtct

SEQ ID NO: 4923309 - DNA, 25 bp, Homo sapien
tccactcggtatttgctcagcaccg

SEQ ID NO: 4923310 - DNA, 25 bp, Homo sapien
cctggatgctgaagttcgggttgtt

SEQ ID NO: 4923311 - DNA, 25 bp, Homo sapien
ggatcacgcaggacttcacaccttg

SEQ ID NO: 4923312 - DNA, 25 bp, Homo sapien
aatgagagcctgaggccgatccaca

SEQ ID NO: 4923313 - DNA, 25 bp, Homo sapien
ttcttgtagctctggatcacgcagg

SEQ ID NO: 4923314 - DNA, 25 bp, Homo sapien
caagtagttgatggtgtaggtgccc

SEQ ID NO: 4923315 - DNA, 25 bp, Homo sapien
agtccaccacgcagatgctcagtgg

SEQ ID NO: 4923316 - DNA, 25 bp, Homo sapien
taggtgcccacaagggtactcctcc

SEQ ID NO: 4923317 - DNA, 25 bp, Homo sapien
gcagaagctcgttctcaggcagttc

SEQ ID NO: 4923318 - DNA, 25 bp, Homo sapien
ggctgggttccatccacctgtgtga

SEQ ID NO: 4923319 - DNA, 25 bp, Homo sapien
ccaggctgggttccatccacctgtg

SEQ ID NO: 4923320 - DNA, 25 bp, Homo sapien
tgtgatgggggcaaggggctctctg

SEQ ID NO: 4923321 - DNA, 25 bp, Homo sapien
acctgtgtgatgggggcaaggggct

SEQ ID NO: 4923322 - DNA, 25 bp, Homo sapien
gactcagtggctgttagcgaatctg

SEQ ID NO: 4923323 - DNA, 25 bp, Homo sapien
ggactcagtggctgttagcgaatct

SEQ ID NO: 4923324 - DNA, 25 bp, Homo sapien
catccacataaatgtgatctgctgg

SEQ ID NO: 4923325 - DNA, 25 bp, Homo sapien
caccactgtgggaggtggctcaaca

SEQ ID NO: 4923326 - DNA, 25 bp, Homo sapien
gatgagtcagggacgtcaaccagga

SEQ ID NO: 4923327 - DNA, 25 bp, Homo sapien
tcaggctccagcatcggggatgagt

SEQ ID NO: 4923328 - DNA, 25 bp, Homo sapien
gggaggcataatacttagaccacca

SEQ ID NO: 4923329 - DNA, 25 bp, Homo sapien
ccagtcaatcacgttttcagcagat

SEQ ID NO: 4923330 - DNA, 25 bp, Homo sapien
ctcttagtggacctccgggaaggct

SEQ ID NO: 4923331 - DNA, 25 bp, Homo sapien
cagattcatctgctatggtcctctt

SEQ ID NO: 4923332 - DNA, 25 bp, Homo sapien
ttcccttgggatttctctcctttgc

SEQ ID NO: 4923333 - DNA, 25 bp, Homo sapien
atcttctatatctaccactacctca

SEQ ID NO: 4923334 - DNA, 25 bp, Homo sapien
tatctaccactacctcatctggctt

SEQ ID NO: 4923335 - DNA, 25 bp, Homo sapien
gttggggattccatcatctttgggt

SEQ ID NO: 4923336 - DNA, 25 bp, Homo sapien
ggccaggttggggattccatcatct

SEQ ID NO: 4923337 - DNA, 25 bp, Homo sapien
agttttcacccagtcttcaaaattg

SEQ ID NO: 4923338 - DNA, 25 bp, Homo sapien
catcttccgtagacttgcctctgaa

SEQ ID NO: 4923339 - DNA, 25 bp, Homo sapien
tcggtctccatcaagaccatggtca

SEQ ID NO: 4923340 - DNA, 25 bp, Homo sapien
gcctctgaagagctcaaaagttttc

SEQ ID NO: 4923341 - DNA, 25 bp, Homo sapien
acagggagagccaaataaaaggatt

SEQ ID NO: 4923342 - DNA, 25 bp, Homo sapien
ggacagggagagccaaataaaagga

SEQ ID NO: 4923343 - DNA, 25 bp, Homo sapien
atggacagggagagccaaataaaag

SEQ ID NO: 4923344 - DNA, 25 bp, Homo sapien
ttatggacagggagagccaaataaa

SEQ ID NO: 4923345 - DNA, 25 bp, Homo sapien
tcccacaccacaattccattaacag

SEQ ID NO: 4923346 - DNA, 25 bp, Homo sapien
tccattaacagaatcgagtcatagc

SEQ ID NO: 4923347 - DNA, 25 bp, Homo sapien
cattaacagaatcgagtcatagctg

SEQ ID NO: 4923348 - DNA, 25 bp, Homo sapien
ttaacagaatcgagtcatagctgac

SEQ ID NO: 4923349 - DNA, 25 bp, Homo sapien
cactgtgacagggtgattgggcgga

SEQ ID NO: 4923350 - DNA, 25 bp, Homo sapien
gtgattgggcggaatcccttgctgg

SEQ ID NO: 4923351 - DNA, 25 bp, Homo sapien
cgcgacaatgtatactctgatcagc

SEQ ID NO: 4923352 - DNA, 25 bp, Homo sapien
ctgcccgctgtcctcagagctagaa

SEQ ID NO: 4923353 - DNA, 25 bp, Homo sapien
tactgggttcagttgtttagggatg

SEQ ID NO: 4923354 - DNA, 25 bp, Homo sapien
tatttatcccggtctttgatttctg

SEQ ID NO: 4923355 - DNA, 25 bp, Homo sapien
tagggatctgatttgccatctggat

SEQ ID NO: 4923356 - DNA, 25 bp, Homo sapien
ttgccaagcttgatcacaatgtagg

SEQ ID NO: 4923357 - DNA, 25 bp, Homo sapien
actgcattgggactggtacttgaaa

SEQ ID NO: 4923358 - DNA, 25 bp, Homo sapien
caacgcaaggtgtctcaaggaacat

SEQ ID NO: 4923359 - DNA, 25 bp, Homo sapien
caatctgagataagtgccaggttcc

SEQ ID NO: 4923360 - DNA, 25 bp, Homo sapien
ggttcctaattcctagctcggtgct

SEQ ID NO: 4923361 - DNA, 25 bp, Homo sapien
catggtcatagatcaggatggagag

SEQ ID NO: 4923362 - DNA, 25 bp, Homo sapien
agatggctcggtgtttgctgtagaa

SEQ ID NO: 4923363 - DNA, 25 bp, Homo sapien
ccaataaggtcatctgtgccaatca

SEQ ID NO: 4923364 - DNA, 25 bp, Homo sapien
tggagagcagggactcttttgggaa

SEQ ID NO: 4923365 - DNA, 25 bp, Homo sapien
tcccagggtgaaagtagggtccatc

SEQ ID NO: 4923366 - DNA, 25 bp, Homo sapien
tgtctttgcagagcttagtgaggat

SEQ ID NO: 4923367 - DNA, 25 bp, Homo sapien
agggtgaaagtagggtccatccagc

SEQ ID NO: 4923368 - DNA, 25 bp, Homo sapien
tgcagagcttagtgaggatttcggt

SEQ ID NO: 4923369 - DNA, 25 bp, Homo sapien
cattcctggcttatccttgtggtac

SEQ ID NO: 4923370 - DNA, 25 bp, Homo sapien
agagtgtaaaaccttgagggccagg

SEQ ID NO: 4923371 - DNA, 25 bp, Homo sapien
cgacttccgggatatcctcccaaga

SEQ ID NO: 4923372 - DNA, 25 bp, Homo sapien
tacagtggccgagtttctatgtgtt

SEQ ID NO: 4923373 - DNA, 25 bp, Homo sapien
tcactaggtctatatcccaataact

SEQ ID NO: 4923374 - DNA, 25 bp, Homo sapien
gcggtcgtccacacgtgcaatcact

SEQ ID NO: 4923375 - DNA, 25 bp, Homo sapien
aatcactaggtctatatcccaataa

SEQ ID NO: 4923376 - DNA, 25 bp, Homo sapien
ctctcaacgcggtcgtccacacgtg

SEQ ID NO: 4923377 - DNA, 25 bp, Homo sapien
aaaatatcttctttagctttgggag

SEQ ID NO: 4923378 - DNA, 25 bp, Homo sapien
aaatatcttctttagctttgggagg

SEQ ID NO: 4923379 - DNA, 25 bp, Homo sapien
atatcttctttagctttgggagggg

SEQ ID NO: 4923380 - DNA, 25 bp, Homo sapien
aatatcttctttagctttgggaggg

SEQ ID NO: 4923381 - DNA, 25 bp, Homo sapien
ggtccaggttgaggcatatccttgg

SEQ ID NO: 4923382 - DNA, 25 bp, Homo sapien
gaggcatatccttgggaaacatgtc

SEQ ID NO: 4923383 - DNA, 25 bp, Homo sapien
tttgggtcgccttggagagatgtca

SEQ ID NO: 4923384 - DNA, 25 bp, Homo sapien
tcgccttggagagatgtcaacagga

SEQ ID NO: 4923385 - DNA, 25 bp, Homo sapien
ttttggcctgtgaagatattctcat

SEQ ID NO: 4923386 - DNA, 25 bp, Homo sapien
cacagcaggagtcttacactccatc

SEQ ID NO: 4923387 - DNA, 25 bp, Homo sapien
tgaggacagcctttcaaaatcccaa

SEQ ID NO: 4923388 - DNA, 25 bp, Homo sapien
gagaagatgttctccctcttggtaa

SEQ ID NO: 4923389 - DNA, 25 bp, Homo sapien
tccagtcagggagttgtaatgcaca

SEQ ID NO: 4923390 - DNA, 25 bp, Homo sapien
cacttgcattttcaaacttggcaag

SEQ ID NO: 4923391 - DNA, 25 bp, Homo sapien
gctggaatatagagatcttggtctc

SEQ ID NO: 4923392 - DNA, 25 bp, Homo sapien
cagccacgcacacgtttttgctgga

SEQ ID NO: 4923393 - DNA, 25 bp, Homo sapien
ttagctgctcgagggaaactgttga

SEQ ID NO: 4923394 - DNA, 25 bp, Homo sapien
ctccacctcccatagctgtcactta

SEQ ID NO: 4923395 - DNA, 25 bp, Homo sapien
tctcctccacctcccatagctgtca

SEQ ID NO: 4923396 - DNA, 25 bp, Homo sapien
tccacctcccatagctgtcacttac

SEQ ID NO: 4923397 - DNA, 25 bp, Homo sapien
tcctccacctcccatagctgtcact

SEQ ID NO: 4923398 - DNA, 25 bp, Homo sapien
gacccactgagccaatggcaacctt

SEQ ID NO: 4923399 - DNA, 25 bp, Homo sapien
agatgcaaaaccttttgtttccagt

SEQ ID NO: 4923400 - DNA, 25 bp, Homo sapien
ttccagtcacaaagacccactgagc

SEQ ID NO: 4923401 - DNA, 25 bp, Homo sapien
gtcacaaagacccactgagccaatg

SEQ ID NO: 4923402 - DNA, 25 bp, Homo sapien
tctggctcctttcgggcttttccaa

SEQ ID NO: 4923403 - DNA, 25 bp, Homo sapien
cttctgctgtaactaggtggaactc

SEQ ID NO: 4923404 - DNA, 25 bp, Homo sapien
ttcttctgctgtaactaggtggaac

SEQ ID NO: 4923405 - DNA, 25 bp, Homo sapien
gctctggctcctttcgggcttttcc

SEQ ID NO: 4923406 - DNA, 25 bp, Homo sapien
agaatgcttaagaccccaggaagtg

SEQ ID NO: 4923407 - DNA, 25 bp, Homo sapien
tcaacactcagaatgcttaagaccc

SEQ ID NO: 4923408 - DNA, 25 bp, Homo sapien
ctcagaatgcttaagaccccaggaa

SEQ ID NO: 4923409 - DNA, 25 bp, Homo sapien
acactcagaatgcttaagaccccag

SEQ ID NO: 4923410 - DNA, 25 bp, Homo sapien
tcatgaaccacgaaaaggaggtgtc

SEQ ID NO: 4923411 - DNA, 25 bp, Homo sapien
gctcctggcaaggtgtagatgaaaa

SEQ ID NO: 4923412 - DNA, 25 bp, Homo sapien
atccttcggctgatggctcctggca

SEQ ID NO: 4923413 - DNA, 25 bp, Homo sapien
cttccagatgaggtagtacaggcac

SEQ ID NO: 4923414 - DNA, 25 bp, Homo sapien
ttccaagaagggttgatctgtcccc

SEQ ID NO: 4923415 - DNA, 25 bp, Homo sapien
tagtatatggcgaggatctgggtcc

SEQ ID NO: 4923416 - DNA, 25 bp, Homo sapien
gatgctcccagataaggaagagagg

SEQ ID NO: 4923417 - DNA, 25 bp, Homo sapien
gctgcccaagggataaaacatgcct

SEQ ID NO: 4923418 - DNA, 25 bp, Homo sapien
aaactgaccccgtttgacaagtgcg

SEQ ID NO: 4923419 - DNA, 25 bp, Homo sapien
gaagagttacatctgtgctaggcta

SEQ ID NO: 4923420 - DNA, 25 bp, Homo sapien
taataccaacacatggctcttgctg

SEQ ID NO: 4923421 - DNA, 25 bp, Homo sapien
catctagggccagaattcagtgaaa

SEQ ID NO: 4923422 - DNA, 25 bp, Homo sapien
gattctttcacgtggagcagcgtcc

SEQ ID NO: 4923423 - DNA, 25 bp, Homo sapien
ataataatgttcatcgaagctcgat

SEQ ID NO: 4923424 - DNA, 25 bp, Homo sapien
caaatgtcatactggattgcaggaa

SEQ ID NO: 4923425 - DNA, 25 bp, Homo sapien
ggagggtttttcatgccgcagtaat

SEQ ID NO: 4923426 - DNA, 25 bp, Homo sapien
gagtgcactattccatcggctccca

SEQ ID NO: 4923427 - DNA, 25 bp, Homo sapien
ttcttgttgtacctgactagagtgc

SEQ ID NO: 4923428 - DNA, 25 bp, Homo sapien
gtgcactattccatcggctcccaag

SEQ ID NO: 4923429 - DNA, 25 bp, Homo sapien
tgcactattccatcggctcccaaga

SEQ ID NO: 4923430 - DNA, 25 bp, Homo sapien
actgctttcatcgtagactgcaaca

SEQ ID NO: 4923431 - DNA, 25 bp, Homo sapien
tcatctgcccacatttgtatcacgc

SEQ ID NO: 4923432 - DNA, 25 bp, Homo sapien
tatcacgcctattcctgttttaagc

SEQ ID NO: 4923433 - DNA, 25 bp, Homo sapien
tcatcgtagactgcaacaatgtctc

SEQ ID NO: 4923434 - DNA, 25 bp, Homo sapien
aatgccaataactgtcccatgagtt

SEQ ID NO: 4923435 - DNA, 25 bp, Homo sapien
aataactgtcccatgagtttcagtg

SEQ ID NO: 4923436 - DNA, 25 bp, Homo sapien
tgttcagatagtcctgccttttctc

SEQ ID NO: 4923437 - DNA, 25 bp, Homo sapien
cagtgatttgttcagatagtcctgc

SEQ ID NO: 4923438 - DNA, 25 bp, Homo sapien
cagtggtggtcatggatgcactggg

SEQ ID NO: 4923439 - DNA, 25 bp, Homo sapien
agtggtggtcatggatgcactggga

SEQ ID NO: 4923440 - DNA, 25 bp, Homo sapien
tggaaaggaagctccgtggaactga

SEQ ID NO: 4923441 - DNA, 25 bp, Homo sapien
ctcctccattacttgatcttctagg

SEQ ID NO: 4923442 - DNA, 25 bp, Homo sapien
cagggcacttgtgtccccgtttgaa

SEQ ID NO: 4923443 - DNA, 25 bp, Homo sapien
ggctgttcagggcacttgtgtcccc

SEQ ID NO: 4923444 - DNA, 25 bp, Homo sapien
tatgcagaatcttctctccccccga

SEQ ID NO: 4923445 - DNA, 25 bp, Homo sapien
atgcagaatcttctctccccccgac

SEQ ID NO: 4923446 - DNA, 25 bp, Homo sapien
ttatgcagaatcttctctccccccg

SEQ ID NO: 4923447 - DNA, 25 bp, Homo sapien
tcccaccgcatcagcagaaagcaag

SEQ ID NO: 4923448 - DNA, 25 bp, Homo sapien
aagcaagactgattcggtcctggag

SEQ ID NO: 4923449 - DNA, 25 bp, Homo sapien
agactgattcggtcctggagagctg

SEQ ID NO: 4923450 - DNA, 25 bp, Homo sapien
ccaccgcatcagcagaaagcaagac

SEQ ID NO: 4923451 - DNA, 25 bp, Homo sapien
cattttccttactagttgttctgca

SEQ ID NO: 4923452 - DNA, 25 bp, Homo sapien
cgatgctaccactgggtatccaaag

SEQ ID NO: 4923453 - DNA, 25 bp, Homo sapien
ttccttactagttgttctgcactgg

SEQ ID NO: 4923454 - DNA, 25 bp, Homo sapien
ttctggaaaattgcgatgctaccac

SEQ ID NO: 4923455 - DNA, 25 bp, Homo sapien
gaaggagagagtagtgaaatagtta

SEQ ID NO: 4923456 - DNA, 25 bp, Homo sapien
tggggtgaatcaagattaaatagtc

SEQ ID NO: 4923457 - DNA, 25 bp, Homo sapien
tgataaagaaggagagagtagtgaa

SEQ ID NO: 4923458 - DNA, 25 bp, Homo sapien
tagtcactgttgattatgataaaga

SEQ ID NO: 4923459 - DNA, 25 bp, Homo sapien
ttgtgtcattaccaactggtaacaa

SEQ ID NO: 4923460 - DNA, 25 bp, Homo sapien
tgtgtcattaccaactggtaacaac

SEQ ID NO: 4923461 - DNA, 25 bp, Homo sapien
atgatgggcacttcttttgtgccaa

SEQ ID NO: 4923462 - DNA, 25 bp, Homo sapien
tgtcccccatgcttgcgagtgggtg

SEQ ID NO: 4923463 - DNA, 25 bp, Homo sapien
gatgggcacttcttttgtgccaaaa

SEQ ID NO: 4923464 - DNA, 25 bp, Homo sapien
cccatgcttgcgagtgggtggaagg

SEQ ID NO: 4923465 - DNA, 25 bp, Homo sapien
cttcagcttgtacaggattggcgtc

SEQ ID NO: 4923466 - DNA, 25 bp, Homo sapien
tgtagggagtgagccccaacgtgtc

SEQ ID NO: 4923467 - DNA, 25 bp, Homo sapien
gccccgcttgttggaggactgcatc

SEQ ID NO: 4923468 - DNA, 25 bp, Homo sapien
ggacggtggtcataatctcgcccaa

SEQ ID NO: 4923469 - DNA, 25 bp, Homo sapien
gcttctggcactcacaccatgaact

SEQ ID NO: 4923470 - DNA, 25 bp, Homo sapien
atggtgactcaaccacagaggcagc

SEQ ID NO: 4923471 - DNA, 25 bp, Homo sapien
ggcactcacaccatgaactacacat

SEQ ID NO: 4923472 - DNA, 25 bp, Homo sapien
ttacagcacggtgagatgcacatgg

SEQ ID NO: 4923473 - DNA, 25 bp, Homo sapien
acatgacaccttttgctgtgccgaa

SEQ ID NO: 4923474 - DNA, 25 bp, Homo sapien
caagacatagggttttattagcggc

SEQ ID NO: 4923475 - DNA, 25 bp, Homo sapien
cagccttttgggagagcaattttgc

SEQ ID NO: 4923476 - DNA, 25 bp, Homo sapien
ttaacctcattagggaagacaccag

SEQ ID NO: 4923477 - DNA, 25 bp, Homo sapien
gggctgaggggtgcggggactctct

SEQ ID NO: 4923478 - DNA, 25 bp, Homo sapien
tgggtcattttcaggcagggctgag

SEQ ID NO: 4923479 - DNA, 25 bp, Homo sapien
ggagaaattctgctgggtcattttc

SEQ ID NO: 4923480 - DNA, 25 bp, Homo sapien
tgctgggtcattttcaggcagggct

SEQ ID NO: 4923481 - DNA, 25 bp, Homo sapien
cattgagtgggtgccttgtgccaca

SEQ ID NO: 4923482 - DNA, 25 bp, Homo sapien
tctagagatgggagcactgaggttc

SEQ ID NO: 4923483 - DNA, 25 bp, Homo sapien
cagtagcccacttatccttgaggag

SEQ ID NO: 4923484 - DNA, 25 bp, Homo sapien
gacgttatagtccaagggatctccc

SEQ ID NO: 4923485 - DNA, 25 bp, Homo sapien
tcaggacagcctagtcctagtccag

SEQ ID NO: 4923486 - DNA, 25 bp, Homo sapien
caagtgctctgattttaattgcagc

SEQ ID NO: 4923487 - DNA, 25 bp, Homo sapien
cagctgctcaggacagcctagtcct

SEQ ID NO: 4923488 - DNA, 25 bp, Homo sapien
cctagtcctagtccagcaggagcca

SEQ ID NO: 4923489 - DNA, 25 bp, Homo sapien
ctctgtttctgacttattccttccc

SEQ ID NO: 4923490 - DNA, 25 bp, Homo sapien
gtccttcttgatgacccctctgttt

SEQ ID NO: 4923491 - DNA, 25 bp, Homo sapien
ctgtccttcttgatgacccctctgt

SEQ ID NO: 4923492 - DNA, 25 bp, Homo sapien
ccctctgtttctgacttattccttc

SEQ ID NO: 4923493 - DNA, 25 bp, Homo sapien
gtgcatctcaaagcctgagtcctca

SEQ ID NO: 4923494 - DNA, 25 bp, Homo sapien
gaattgctggtggattctgctgtgt

SEQ ID NO: 4923495 - DNA, 25 bp, Homo sapien
tcctaagtttgtgagtaaagcgtcc

SEQ ID NO: 4923496 - DNA, 25 bp, Homo sapien
acctataaggcccattgctgaggag

SEQ ID NO: 4923497 - DNA, 25 bp, Homo sapien
attaagcgtcccatctaataacaat

SEQ ID NO: 4923498 - DNA, 25 bp, Homo sapien
cattaagcgtcccatctaataacaa

SEQ ID NO: 4923499 - DNA, 25 bp, Homo sapien
tcaggtgaaccaaagcattctgccc

SEQ ID NO: 4923500 - DNA, 25 bp, Homo sapien
catttcaggtgaaccaaagcattct

SEQ ID NO: 4923501 - DNA, 25 bp, Homo sapien
tgaaaagccatttcaggtgaaccaa

SEQ ID NO: 4923502 - DNA, 25 bp, Homo sapien
cctctgaaaagccatttcaggtgaa

SEQ ID NO: 4923503 - DNA, 25 bp, Homo sapien
gaggcaaggagagagcactaccatc

SEQ ID NO: 4923504 - DNA, 25 bp, Homo sapien
tcagagcccatttagcccatgcatg

SEQ ID NO: 4923505 - DNA, 25 bp, Homo sapien
attgcatctccataacatccccggg

SEQ ID NO: 4923506 - DNA, 25 bp, Homo sapien
ccattgtgggtgtccaaagaggcaa

SEQ ID NO: 4923507 - DNA, 25 bp, Homo sapien
gagacagttctgacctttagccact

SEQ ID NO: 4923508 - DNA, 25 bp, Homo sapien
tctgagggttatagccagagccaca

SEQ ID NO: 4923509 - DNA, 25 bp, Homo sapien
gacctttagccactggtgtggacac

SEQ ID NO: 4923510 - DNA, 25 bp, Homo sapien
cacataggagcagccacccttggtt

SEQ ID NO: 4923511 - DNA, 25 bp, Homo sapien
ccacatccagtgaggagccttgcca

SEQ ID NO: 4923512 - DNA, 25 bp, Homo sapien
gtgtttgactccgatttctcccgat

SEQ ID NO: 4923513 - DNA, 25 bp, Homo sapien
taccactgacttggtacttaatcac

SEQ ID NO: 4923514 - DNA, 25 bp, Homo sapien
ctttgccagggtcctacgcctgtca

SEQ ID NO: 4923515 - DNA, 25 bp, Homo sapien
cacttggcagtgattgtcctgagaa

SEQ ID NO: 4923516 - DNA, 25 bp, Homo sapien
gaatcactgagtgtggccttggcaa

SEQ ID NO: 4923517 - DNA, 25 bp, Homo sapien
ggtgatgtgggtcctttctgtactc

SEQ ID NO: 4923518 - DNA, 25 bp, Homo sapien
tctgtactctgggacaacccatgct

SEQ ID NO: 4923519 - DNA, 25 bp, Homo sapien
tgtgcacctgatgggaaacctctca

SEQ ID NO: 4923520 - DNA, 25 bp, Homo sapien
gacctgggccataagactcagcagt

SEQ ID NO: 4923521 - DNA, 25 bp, Homo sapien
aagcctcttccctatcttagcctgg

SEQ ID NO: 4923522 - DNA, 25 bp, Homo sapien
tcataggacattgtagacctgggcc

SEQ ID NO: 4923523 - DNA, 25 bp, Homo sapien
tcacctgcttttatggaggctccct

SEQ ID NO: 4923524 - DNA, 25 bp, Homo sapien
ccctcacctgcttttatggaggctc

SEQ ID NO: 4923525 - DNA, 25 bp, Homo sapien
ctcacctgcttttatggaggctccc

SEQ ID NO: 4923526 - DNA, 25 bp, Homo sapien
tggccctcacctgcttttatggagg

SEQ ID NO: 4923527 - DNA, 25 bp, Homo sapien
tgtagctattgtagaagtgattgag

SEQ ID NO: 4923528 - DNA, 25 bp, Homo sapien
tagctattgtagaagtgattgagtt

SEQ ID NO: 4923529 - DNA, 25 bp, Homo sapien
tgtctggccgaggttgatgttttga

SEQ ID NO: 4923530 - DNA, 25 bp, Homo sapien
ccaccgtgtctggccgaggttgatg

SEQ ID NO: 4923531 - DNA, 25 bp, Homo sapien
cacttgcccgtgactttgttgatct

SEQ ID NO: 4923532 - DNA, 25 bp, Homo sapien
gatagtatcacccacgtggaccctt

SEQ ID NO: 4923533 - DNA, 25 bp, Homo sapien
gaagttctccatcaggttagacgtg

SEQ ID NO: 4923534 - DNA, 25 bp, Homo sapien
tagacgtgtctatacacactggaaa

SEQ ID NO: 4923535 - DNA, 25 bp, Homo sapien
tttgagcctgaccttgaagaagctt

SEQ ID NO: 4923536 - DNA, 25 bp, Homo sapien
tgagcctgaccttgaagaagcttat

SEQ ID NO: 4923537 - DNA, 25 bp, Homo sapien
gaagcttatttctcttggtgctgat

SEQ ID NO: 4923538 - DNA, 25 bp, Homo sapien
gcctttgagcctgaccttgaagaag

SEQ ID NO: 4923539 - DNA, 25 bp, Homo sapien
tatgacattgaaccctgtccctgct

SEQ ID NO: 4923540 - DNA, 25 bp, Homo sapien
tgcaaggcccaacacccaaggtgat

SEQ ID NO: 4923541 - DNA, 25 bp, Homo sapien
ctttctatatcaggaagcaaagggc

SEQ ID NO: 4923542 - DNA, 25 bp, Homo sapien
tcaggcccttctgaatgtttatgac

SEQ ID NO: 4923543 - DNA, 25 bp, Homo sapien
gactctagaggaatgaacggaagca

SEQ ID NO: 4923544 - DNA, 25 bp, Homo sapien
aggtcccagtgaggcataagcagaa

SEQ ID NO: 4923545 - DNA, 25 bp, Homo sapien
gggaggcctggaaacacatgactta

SEQ ID NO: 4923546 - DNA, 25 bp, Homo sapien
gctgactcagaagatgggccttaga

SEQ ID NO: 4923547 - DNA, 25 bp, Homo sapien
gcagagttggtttgttcaatgcgct

SEQ ID NO: 4923548 - DNA, 25 bp, Homo sapien
gtcagaagacatttgtgagctcctt

SEQ ID NO: 4923549 - DNA, 25 bp, Homo sapien
tccaggacaggttagctcaaaagca

SEQ ID NO: 4923550 - DNA, 25 bp, Homo sapien
tccttggagttccagatccaggaca

SEQ ID NO: 4923551 - DNA, 25 bp, Homo sapien
tgaatcttctctgcatcatttcagt

SEQ ID NO: 4923552 - DNA, 25 bp, Homo sapien
cttgagcaggggccatgtgaatctt

SEQ ID NO: 4923553 - DNA, 25 bp, Homo sapien
catgtgaatcttctctgcatcattt

SEQ ID NO: 4923554 - DNA, 25 bp, Homo sapien
ttgagcaggggccatgtgaatcttc

SEQ ID NO: 4923555 - DNA, 25 bp, Homo sapien
cacacaggaatgtggttttatgtac

SEQ ID NO: 4923556 - DNA, 25 bp, Homo sapien
ggaggcacacaggaatgtggtttta

SEQ ID NO: 4923557 - DNA, 25 bp, Homo sapien
ggcacacaggaatgtggttttatgt

SEQ ID NO: 4923558 - DNA, 25 bp, Homo sapien
acaggaatgtggttttatgtacacc

SEQ ID NO: 4923559 - DNA, 25 bp, Homo sapien
gcttttgcgtggctttaattgtcat

SEQ ID NO: 4923560 - DNA, 25 bp, Homo sapien
ctttgcagttgtgcttttgcgtggc

SEQ ID NO: 4923561 - DNA, 25 bp, Homo sapien
catatcctttgcagttgtgcttttg

SEQ ID NO: 4923562 - DNA, 25 bp, Homo sapien
cagttgtgcttttgcgtggctttaa

SEQ ID NO: 4923563 - DNA, 25 bp, Homo sapien
tcgggtccagctctagtacattgtc

SEQ ID NO: 4923564 - DNA, 25 bp, Homo sapien
catagggaacggagaacaaagctga

SEQ ID NO: 4923565 - DNA, 25 bp, Homo sapien
gaaaatgaaggtggccctgtaccag

SEQ ID NO: 4923566 - DNA, 25 bp, Homo sapien
gcccggcctgcgaatggtttcttaa

SEQ ID NO: 4923567 - DNA, 25 bp, Homo sapien
gaggtcatggccgttggtagagtag

SEQ ID NO: 4923568 - DNA, 25 bp, Homo sapien
tcatggccgttggtagagtaggaag

SEQ ID NO: 4923569 - DNA, 25 bp, Homo sapien
ctctggggtcaatgcacaacttcct

SEQ ID NO: 4923570 - DNA, 25 bp, Homo sapien
gctcctctggggtcaatgcacaact

SEQ ID NO: 4923571 - DNA, 25 bp, Homo sapien
tattggtttccaacgaaaagtggca

SEQ ID NO: 4923572 - DNA, 25 bp, Homo sapien
tagatcagtcctaggaagtggtgcg

SEQ ID NO: 4923573 - DNA, 25 bp, Homo sapien
tgcactggctcatctatggaaggtc

SEQ ID NO: 4923574 - DNA, 25 bp, Homo sapien
cgacctttggcagtatgatcttgca

SEQ ID NO: 4923575 - DNA, 25 bp, Homo sapien
tgggtcctggatgcatatgggtaaa

SEQ ID NO: 4923576 - DNA, 25 bp, Homo sapien
tgttccctcggaatgccttgtacat

SEQ ID NO: 4923577 - DNA, 25 bp, Homo sapien
ggctggcggcctcttcattgggtcc

SEQ ID NO: 4923578 - DNA, 25 bp, Homo sapien
tgggtaaaatgttccctcggaatgc

SEQ ID NO: 4923579 - DNA, 25 bp, Homo sapien
accactttcaagcttgggggctgca

SEQ ID NO: 4923580 - DNA, 25 bp, Homo sapien
caggtggaatgggtggcaccagtgc

SEQ ID NO: 4923581 - DNA, 25 bp, Homo sapien
ccaaccactttcaagcttgggggct

SEQ ID NO: 4923582 - DNA, 25 bp, Homo sapien
gaatgggtggcaccagtgcttctcc

SEQ ID NO: 4923583 - DNA, 25 bp, Homo sapien
tgtggccttacccatcaagagattt

SEQ ID NO: 4923584 - DNA, 25 bp, Homo sapien
tattctcaacttgtcacagtgggga

SEQ ID NO: 4923585 - DNA, 25 bp, Homo sapien
aagacaagcagatggactcctcttg

SEQ ID NO: 4923586 - DNA, 25 bp, Homo sapien
ctctaaagacaagcagatggactcc

SEQ ID NO: 4923587 - DNA, 25 bp, Homo sapien
gggtctatgccaattgaagtcagat

SEQ ID NO: 4923588 - DNA, 25 bp, Homo sapien
gaagaggggcttggttgctgctcct

SEQ ID NO: 4923589 - DNA, 25 bp, Homo sapien
ccctaaggggtctatgccaattgaa

SEQ ID NO: 4923590 - DNA, 25 bp, Homo sapien
ccaattgaagtcagatgattgcctg

SEQ ID NO: 4923591 - DNA, 25 bp, Homo sapien
ctgactctgtcatttccaccgaggg

SEQ ID NO: 4923592 - DNA, 25 bp, Homo sapien
gactctgtcatttccaccgaggggg

SEQ ID NO: 4923593 - DNA, 25 bp, Homo sapien
actctgtcatttccaccgagggggg

SEQ ID NO: 4923594 - DNA, 25 bp, Homo sapien
tctgtcatttccaccgaggggggct

SEQ ID NO: 4923595 - DNA, 25 bp, Homo sapien
ctttactcctccttgaccataaatt

SEQ ID NO: 4923596 - DNA, 25 bp, Homo sapien
ttactcctccttgaccataaatttc

SEQ ID NO: 4923597 - DNA, 25 bp, Homo sapien
caacatgtatcttggttcgcaaagc

SEQ ID NO: 4923598 - DNA, 25 bp, Homo sapien
gcatcttcatgcaaaggatctcgtt

SEQ ID NO: 4923599 - DNA, 25 bp, Homo sapien
gatctcgttttagtttcacaaccca

SEQ ID NO: 4923600 - DNA, 25 bp, Homo sapien
aagtagctgagtggaaactctcccc

SEQ ID NO: 4923601 - DNA, 25 bp, Homo sapien
gccagctggtgagttcgcagaagct

SEQ ID NO: 4923602 - DNA, 25 bp, Homo sapien
tataagatcaccacgcatcctctgg

SEQ ID NO: 4923603 - DNA, 25 bp, Homo sapien
catagatggcttgaaggcggcgact

SEQ ID NO: 4923604 - DNA, 25 bp, Homo sapien
cacaggtgtttacctatgccagaac

SEQ ID NO: 4923605 - DNA, 25 bp, Homo sapien
gctgcatctgcgcggcaccgttggc

SEQ ID NO: 4923606 - DNA, 25 bp, Homo sapien
gcgcggcaccgttggcgtggaggcc

SEQ ID NO: 4923607 - DNA, 25 bp, Homo sapien
atctgcgcggcaccgttggcgtgga

SEQ ID NO: 4923608 - DNA, 25 bp, Homo sapien
gtggaggcccgggtgctgtgcgtag

SEQ ID NO: 4923609 - DNA, 25 bp, Homo sapien
tgtaggtgggcgagcagttctcgca

SEQ ID NO: 4923610 - DNA, 25 bp, Homo sapien
ttctcgcaggtctgcgaactggtca

SEQ ID NO: 4923611 - DNA, 25 bp, Homo sapien
gcgagcagttctcgcaggtctgcga

SEQ ID NO: 4923612 - DNA, 25 bp, Homo sapien
cgcaggtctgcgaactggtcatgga

SEQ ID NO: 4923613 - DNA, 25 bp, Homo sapien
gagtgggaggaagaggtaaccacag

SEQ ID NO: 4923614 - DNA, 25 bp, Homo sapien
tgggaggaagaggtaaccacagcgg

SEQ ID NO: 4923615 - DNA, 25 bp, Homo sapien
agtgggaggaagaggtaaccacagc

SEQ ID NO: 4923616 - DNA, 25 bp, Homo sapien
tggagtgggaggaagaggtaaccac

SEQ ID NO: 4923617 - DNA, 25 bp, Homo sapien
ggtaaggtacgtgctgatcaggtcc

SEQ ID NO: 4923618 - DNA, 25 bp, Homo sapien
aggtacgtgctgatcaggtcccgga

SEQ ID NO: 4923619 - DNA, 25 bp, Homo sapien
ctcggcgcgggtaaggtacgtgctg

SEQ ID NO: 4923620 - DNA, 25 bp, Homo sapien
gcgcgggtaaggtacgtgctgatca

SEQ ID NO: 4923621 - DNA, 25 bp, Homo sapien
cgggcaccgggctgctcctgtagtg

SEQ ID NO: 4923622 - DNA, 25 bp, Homo sapien
agttggctggggcggcgtgttccgg

SEQ ID NO: 4923623 - DNA, 25 bp, Homo sapien
ttccccctccagttcgctgtccggc

SEQ ID NO: 4923624 - DNA, 25 bp, Homo sapien
ccctccagttcgctgtccggccctc

SEQ ID NO: 4923625 - DNA, 25 bp, Homo sapien
ctccagttcgctgtccggccctcac

SEQ ID NO: 4923626 - DNA, 25 bp, Homo sapien
tcttccccctccagttcgctgtccg

SEQ ID NO: 4923627 - DNA, 25 bp, Homo sapien
aatgcagcaagaagcttctcgttga

SEQ ID NO: 4923628 - DNA, 25 bp, Homo sapien
agaatattttttcatcgcctggaga

SEQ ID NO: 4923629 - DNA, 25 bp, Homo sapien
gaatattttttcatcgcctggagac

SEQ ID NO: 4923630 - DNA, 25 bp, Homo sapien
gcttctcgttgaaaaatactggcaa

SEQ ID NO: 4923631 - DNA, 25 bp, Homo sapien
gcttacctaactctgggcttaatac

SEQ ID NO: 4923632 - DNA, 25 bp, Homo sapien
tttgccctgaggattaatattaagt

SEQ ID NO: 4923633 - DNA, 25 bp, Homo sapien
cccctctcttcttaacgtgacattg

SEQ ID NO: 4923634 - DNA, 25 bp, Homo sapien
cgttttggccttaagatcttaacat

SEQ ID NO: 4923635 - DNA, 25 bp, Homo sapien
aatttaccacctccctggaatctgc

SEQ ID NO: 4923636 - DNA, 25 bp, Homo sapien
gagatagtgaatggaacaatttacc

SEQ ID NO: 4923637 - DNA, 25 bp, Homo sapien
tggcagcaatgtcactgagatagtg

SEQ ID NO: 4923638 - DNA, 25 bp, Homo sapien
tggaacaatttaccacctccctgga

SEQ ID NO: 4923639 - DNA, 25 bp, Homo sapien
aacagcgtaattaaacacatcatgg

SEQ ID NO: 4923640 - DNA, 25 bp, Homo sapien
tctcatctgaatggaataagtctga

SEQ ID NO: 4923641 - DNA, 25 bp, Homo sapien
tgtggtctgttacacatgctaaaaa

SEQ ID NO: 4923642 - DNA, 25 bp, Homo sapien
gcttttttgctacatagtctactca

SEQ ID NO: 4923643 - DNA, 25 bp, Homo sapien
cactctgtatacagacttgtttcct

SEQ ID NO: 4923644 - DNA, 25 bp, Homo sapien
atttcaccttaagacaatgttaaca

SEQ ID NO: 4923645 - DNA, 25 bp, Homo sapien
tttcaccttaagacaatgttaacag

SEQ ID NO: 4923646 - DNA, 25 bp, Homo sapien
aaacagaatcttggttcaaaggtat

SEQ ID NO: 4923647 - DNA, 25 bp, Homo sapien
cagaatcttggttcaaaggtattct

SEQ ID NO: 4923648 - DNA, 25 bp, Homo sapien
gaaagggtggcaaggtggaatatga

SEQ ID NO: 4923649 - DNA, 25 bp, Homo sapien
ccctggatttgctcataatcatctc

SEQ ID NO: 4923650 - DNA, 25 bp, Homo sapien
tctctaactgaaatcgtgaagatgc

SEQ ID NO: 4923651 - DNA, 25 bp, Homo sapien
ctctttcatataggtgccagcagct

SEQ ID NO: 4923652 - DNA, 25 bp, Homo sapien
aatagctctccctggatttgctcat

SEQ ID NO: 4923653 - DNA, 25 bp, Homo sapien
cagatttaggatcgccttcttcaag

SEQ ID NO: 4923654 - DNA, 25 bp, Homo sapien
ttcagatttaggatcgccttcttca

SEQ ID NO: 4923655 - DNA, 25 bp, Homo sapien
taggatcgccttcttcaagaagacc

SEQ ID NO: 4923656 - DNA, 25 bp, Homo sapien
tcgccttcttcaagaagaccttcca

SEQ ID NO: 4923657 - DNA, 25 bp, Homo sapien
taggcagtgcgtgaaaggcccctgg

SEQ ID NO: 4923658 - DNA, 25 bp, Homo sapien
ggcagtgcgtgaaaggcccctggga

SEQ ID NO: 4923659 - DNA, 25 bp, Homo sapien
ctaggcagtgcgtgaaaggcccctg

SEQ ID NO: 4923660 - DNA, 25 bp, Homo sapien
aggcagtgcgtgaaaggcccctggg

SEQ ID NO: 4923661 - DNA, 25 bp, Homo sapien
tagatggcagcaggcacctgcaccg

SEQ ID NO: 4923662 - DNA, 25 bp, Homo sapien
atggcagcaggcacctgcaccgagg

SEQ ID NO: 4923663 - DNA, 25 bp, Homo sapien
ctagatggcagcaggcacctgcacc

SEQ ID NO: 4923664 - DNA, 25 bp, Homo sapien
ggcagcaggcacctgcaccgaggca

SEQ ID NO: 4923665 - DNA, 25 bp, Homo sapien
caggctgactaaattcccggtctta

SEQ ID NO: 4923666 - DNA, 25 bp, Homo sapien
taaggtagcctgcagctcacccggc

SEQ ID NO: 4923667 - DNA, 25 bp, Homo sapien
ccggtcttaaataaggtagcctgca

SEQ ID NO: 4923668 - DNA, 25 bp, Homo sapien
atctcctcagagtcggctcaccagg

SEQ ID NO: 4923669 - DNA, 25 bp, Homo sapien
gttgctaacaaccacattctctctc

SEQ ID NO: 4923670 - DNA, 25 bp, Homo sapien
ttgctaacaaccacattctctctca

SEQ ID NO: 4923671 - DNA, 25 bp, Homo sapien
gctgcgtgagcatacagggactgcc

SEQ ID NO: 4923672 - DNA, 25 bp, Homo sapien
tattctctgtatcgctgggtaaacc

SEQ ID NO: 4923673 - DNA, 25 bp, Homo sapien
cctcttcgaaggaacaggatccggg

SEQ ID NO: 4923674 - DNA, 25 bp, Homo sapien
tgggtaaaccaaggctcagtcacaa

SEQ ID NO: 4923675 - DNA, 25 bp, Homo sapien
ggagttcgagtaccatccggtgata

SEQ ID NO: 4923676 - DNA, 25 bp, Homo sapien
cactcacaagcatggacgaaggcag

SEQ ID NO: 4923677 - DNA, 25 bp, Homo sapien
tttgccaaacgctggacgccaagtg

SEQ ID NO: 4923678 - DNA, 25 bp, Homo sapien
gagaacatacactgggtcacgtcaa

SEQ ID NO: 4923679 - DNA, 25 bp, Homo sapien
agcatttttcccctagaatccctgg

SEQ ID NO: 4923680 - DNA, 25 bp, Homo sapien
gattcgagtttctgcagattctgcc

SEQ ID NO: 4923681 - DNA, 25 bp, Homo sapien
ctgaagaagagtggcgattcgagtt

SEQ ID NO: 4923682 - DNA, 25 bp, Homo sapien
cctagaatccctggtagctccattt

SEQ ID NO: 4923683 - DNA, 25 bp, Homo sapien
caactgaaggacaggggcagcattc

SEQ ID NO: 4923684 - DNA, 25 bp, Homo sapien
tggggagcataggatttcactggtt

SEQ ID NO: 4923685 - DNA, 25 bp, Homo sapien
gcagaatttgtgtcttccatggttt

SEQ ID NO: 4923686 - DNA, 25 bp, Homo sapien
tccaggactatgtgatccacatggg

SEQ ID NO: 4923687 - DNA, 25 bp, Homo sapien
ccatgtgtcccaggatctacctcct

SEQ ID NO: 4923688 - DNA, 25 bp, Homo sapien
catttaagggccactcgcacgtgga

SEQ ID NO: 4923689 - DNA, 25 bp, Homo sapien
tcccatgtgtcccaggatctacctc

SEQ ID NO: 4923690 - DNA, 25 bp, Homo sapien
atttaagggccactcgcacgtggat

SEQ ID NO: 4923691 - DNA, 25 bp, Homo sapien
aattgatctagagcctgctttcagg

SEQ ID NO: 4923692 - DNA, 25 bp, Homo sapien
gaaataatttgaattgatctagagc

SEQ ID NO: 4923693 - DNA, 25 bp, Homo sapien
taatttgaattgatctagagcctgc

SEQ ID NO: 4923694 - DNA, 25 bp, Homo sapien
ttgaattgatctagagcctgctttc

SEQ ID NO: 4923695 - DNA, 25 bp, Homo sapien
aagttaccatcacctcagacctgga

SEQ ID NO: 4923696 - DNA, 25 bp, Homo sapien
ttgcaaataacgaaacccgaggcca

SEQ ID NO: 4923697 - DNA, 25 bp, Homo sapien
tcataattgcacagatgagcctcat

SEQ ID NO: 4923698 - DNA, 25 bp, Homo sapien
tagttgcttaatagtcacgtgagac

SEQ ID NO: 4923699 - DNA, 25 bp, Homo sapien
aacccctcacaatcatttaggaatg

SEQ ID NO: 4923700 - DNA, 25 bp, Homo sapien
cacagtaagggaatggaaatacact

SEQ ID NO: 4923701 - DNA, 25 bp, Homo sapien
tagtcagtcataataacaaagcagc

SEQ ID NO: 4923702 - DNA, 25 bp, Homo sapien
ccttctctctctaatttagtcagtc

SEQ ID NO: 4923703 - DNA, 25 bp, Homo sapien
gaagattccatatctcctcagttgg

SEQ ID NO: 4923704 - DNA, 25 bp, Homo sapien
cagttggcctcccttaccttgacaa

SEQ ID NO: 4923705 - DNA, 25 bp, Homo sapien
cacagccgcaagatagaagattcca

SEQ ID NO: 4923706 - DNA, 25 bp, Homo sapien
gaagcctggaaactcagtcatgcaa

SEQ ID NO: 4923707 - DNA, 25 bp, Homo sapien
tgtttcccaagtgaacagggttgga

SEQ ID NO: 4923708 - DNA, 25 bp, Homo sapien
ttgtcacatgtatgcccagggtagg

SEQ ID NO: 4923709 - DNA, 25 bp, Homo sapien
tataaagtggctgtaccctgaggct

SEQ ID NO: 4923710 - DNA, 25 bp, Homo sapien
ccctgaggctgttcagagtgatata

SEQ ID NO: 4923711 - DNA, 25 bp, Homo sapien
taaatgaccttttgcaactggattc

SEQ ID NO: 4923712 - DNA, 25 bp, Homo sapien
aaatcaacccagtacctattagcag

SEQ ID NO: 4923713 - DNA, 25 bp, Homo sapien
catatattatagagttgtgcaatca

SEQ ID NO: 4923714 - DNA, 25 bp, Homo sapien
ctgaagcaagtagggaaattcaccc

SEQ ID NO: 4923715 - DNA, 25 bp, Homo sapien
aaaatgcagctctggtgttccttcc

SEQ ID NO: 4923716 - DNA, 25 bp, Homo sapien
taataaaatgcagctctggtgttcc

SEQ ID NO: 4923717 - DNA, 25 bp, Homo sapien
aaaaataataaaatgcagctctggt

SEQ ID NO: 4923718 - DNA, 25 bp, Homo sapien
acccagcctgcagtgaaccttgatt

SEQ ID NO: 4923719 - DNA, 25 bp, Homo sapien
ctgggccccagtgaaaaggttcttg

SEQ ID NO: 4923720 - DNA, 25 bp, Homo sapien
taagaaatcagtcctacaatgctgc

SEQ ID NO: 4923721 - DNA, 25 bp, Homo sapien
gctgtgtagctgatcaaagatcccc

SEQ ID NO: 4923722 - DNA, 25 bp, Homo sapien
tactgtgagtcaattctgggcccca

SEQ ID NO: 4923723 - DNA, 25 bp, Homo sapien
cttgcctatccgtgtaattaatatg

SEQ ID NO: 4923724 - DNA, 25 bp, Homo sapien
ccgtgtaattaatatgatctggcta

SEQ ID NO: 4923725 - DNA, 25 bp, Homo sapien
atgctttcttgcctatccgtgtaat

SEQ ID NO: 4923726 - DNA, 25 bp, Homo sapien
ctttgtctttgttccgaaacttcag

SEQ ID NO: 4923727 - DNA, 25 bp, Homo sapien
ctctgggtttcggtgtttccggctg

SEQ ID NO: 4923728 - DNA, 25 bp, Homo sapien
tcgcccgctggcctctgccgttgct

SEQ ID NO: 4923729 - DNA, 25 bp, Homo sapien
gtccctcgaggtggagcaggcggcg

SEQ ID NO: 4923730 - DNA, 25 bp, Homo sapien
cgctgccacaccagggctcggtggg

SEQ ID NO: 4923731 - DNA, 25 bp, Homo sapien
aggaagatctggagcacgatgcaga

SEQ ID NO: 4923732 - DNA, 25 bp, Homo sapien
cagaaccggctttggctggaatccg

SEQ ID NO: 4923733 - DNA, 25 bp, Homo sapien
tcgatgatgtaaaggcagggcaccc

SEQ ID NO: 4923734 - DNA, 25 bp, Homo sapien
gctgatgggccatccgcacctgctg

SEQ ID NO: 4923735 - DNA, 25 bp, Homo sapien
cataggacgcggtaagccagtactc

SEQ ID NO: 4923736 - DNA, 25 bp, Homo sapien
tttcgaaggctgtcgcataggacgc

SEQ ID NO: 4923737 - DNA, 25 bp, Homo sapien
tcccaaggcaaacgggcaaagagct

SEQ ID NO: 4923738 - DNA, 25 bp, Homo sapien
cacacacgacgagactgggatagca

SEQ ID NO: 4923739 - DNA, 25 bp, Homo sapien
tgacacagtaagaagagtcggatga

SEQ ID NO: 4923740 - DNA, 25 bp, Homo sapien
aaagtctgatccagagattccaggg

SEQ ID NO: 4923741 - DNA, 25 bp, Homo sapien
cacagtagtactgagaagtctacaa

SEQ ID NO: 4923742 - DNA, 25 bp, Homo sapien
cacaaacctgtgtcttttagtaaca

SEQ ID NO: 4923743 - DNA, 25 bp, Homo sapien
tcaagacattgcatattattacagt

SEQ ID NO: 4923744 - DNA, 25 bp, Homo sapien
atcaagacattgcatattattacag

SEQ ID NO: 4923745 - DNA, 25 bp, Homo sapien
caagacattgcatattattacagta

SEQ ID NO: 4923746 - DNA, 25 bp, Homo sapien
tccttttcttcaaactgtgaactca

SEQ ID NO: 4923747 - DNA, 25 bp, Homo sapien
ccttttcttcaaactgtgaactcat

SEQ ID NO: 4923748 - DNA, 25 bp, Homo sapien
tccacttaattcctccttttcttca

SEQ ID NO: 4923749 - DNA, 25 bp, Homo sapien
tcctccttttcttcaaactgtgaac

SEQ ID NO: 4923750 - DNA, 25 bp, Homo sapien
tgtaggcaccatagaagtcaatgtg

SEQ ID NO: 4923751 - DNA, 25 bp, Homo sapien
ttttcgaggaagcagctcaattcca

SEQ ID NO: 4923752 - DNA, 25 bp, Homo sapien
gatcgttgtgacaagatcagaacaa

SEQ ID NO: 4923753 - DNA, 25 bp, Homo sapien
caaaagctgacgtgttgtaggcacc

SEQ ID NO: 4923754 - DNA, 25 bp, Homo sapien
gattaagcctattacaggaaccaag

SEQ ID NO: 4923755 - DNA, 25 bp, Homo sapien
acgataagtgccatccacagcgagg

SEQ ID NO: 4923756 - DNA, 25 bp, Homo sapien
ctctgatgtgtaatggtagctctgt

SEQ ID NO: 4923757 - DNA, 25 bp, Homo sapien
gagtagtgtaacgtatccaattcca

SEQ ID NO: 4923758 - DNA, 25 bp, Homo sapien
cataatcgtcaagcttttcccagag

SEQ ID NO: 4923759 - DNA, 25 bp, Homo sapien
tatgtctgggaaacgaatcctcttc

SEQ ID NO: 4923760 - DNA, 25 bp, Homo sapien
tacagttagtgtagaatcgcaccca

SEQ ID NO: 4923761 - DNA, 25 bp, Homo sapien
taaattcgatacatgtgcctcacca

SEQ ID NO: 4923762 - DNA, 25 bp, Homo sapien
tgctgcgcctgtgtgctgaatcact

SEQ ID NO: 4923763 - DNA, 25 bp, Homo sapien
tgcgcctgtgtgctgaatcactcca

SEQ ID NO: 4923764 - DNA, 25 bp, Homo sapien
gcctgtgtgctgaatcactccattt

SEQ ID NO: 4923765 - DNA, 25 bp, Homo sapien
tgtgtgctgaatcactccatttctt

SEQ ID NO: 4923766 - DNA, 25 bp, Homo sapien
ggtcaccaaagagaccagaagtaat

SEQ ID NO: 4923767 - DNA, 25 bp, Homo sapien
catcacagtaaacggaaaaccattc

SEQ ID NO: 4923768 - DNA, 25 bp, Homo sapien
tgtacacaaatttaaacaggtcacc

SEQ ID NO: 4923769 - DNA, 25 bp, Homo sapien
actgtttttgtgcttggttacacac

SEQ ID NO: 4923770 - DNA, 25 bp, Homo sapien
ggatccactggaattagccaataca

SEQ ID NO: 4923771 - DNA, 25 bp, Homo sapien
gaatatttggcacaggtgacgcacc

SEQ ID NO: 4923772 - DNA, 25 bp, Homo sapien
tctcgtaaaatcagatcaggatgtt

SEQ ID NO: 4923773 - DNA, 25 bp, Homo sapien
gaaatactatatatcggtacacacc

SEQ ID NO: 4923774 - DNA, 25 bp, Homo sapien
gaacataatacagatggctgcttta

SEQ ID NO: 4923775 - DNA, 25 bp, Homo sapien
tattaaaggtgtgccaatattttcc

SEQ ID NO: 4923776 - DNA, 25 bp, Homo sapien
gacagtccataaatctgtttccagt

SEQ ID NO: 4923777 - DNA, 25 bp, Homo sapien
gctctagttatatgcaagacagtcc

SEQ ID NO: 4923778 - DNA, 25 bp, Homo sapien
cgcaagggtagaggtacagaaagcc

SEQ ID NO: 4923779 - DNA, 25 bp, Homo sapien
caaattacgttgtgacttaggacac

SEQ ID NO: 4923780 - DNA, 25 bp, Homo sapien
taagtatggagacactacggatcat

SEQ ID NO: 4923781 - DNA, 25 bp, Homo sapien
gaaactgaaagatgcggccaggcgc

SEQ ID NO: 4923782 - DNA, 25 bp, Homo sapien
aatcctaccattttgggaggccgag

SEQ ID NO: 4923783 - DNA, 25 bp, Homo sapien
ttaaaaacctttgcctggctgggca

SEQ ID NO: 4923784 - DNA, 25 bp, Homo sapien
gtggctcacacctgtaatcctacca

SEQ ID NO: 4923785 - DNA, 25 bp, Homo sapien
aaaaacctttgcctggctgggcaca

SEQ ID NO: 4923786 - DNA, 25 bp, Homo sapien
aacagatgttttggagcccctgcca

SEQ ID NO: 4923787 - DNA, 25 bp, Homo sapien
caagtaggaatctatgaccaggacc

SEQ ID NO: 4923788 - DNA, 25 bp, Homo sapien
gaagggcctggctaatccagaggaa

SEQ ID NO: 4923789 - DNA, 25 bp, Homo sapien
cagacagagtccaagatagtagtgc

SEQ ID NO: 4923790 - DNA, 25 bp, Homo sapien
taacatgcttgagctgacaaagtct

SEQ ID NO: 4923791 - DNA, 25 bp, Homo sapien
gacaattgggcatacttataacaca

SEQ ID NO: 4923792 - DNA, 25 bp, Homo sapien
gaagataagccagataagaacagtg

SEQ ID NO: 4923793 - DNA, 25 bp, Homo sapien
gataagtgatcttaaggacaaaccc

SEQ ID NO: 4923794 - DNA, 25 bp, Homo sapien
ccattttggaagctgaatcacggtt

SEQ ID NO: 4923795 - DNA, 25 bp, Homo sapien
ccttggtgtggagtcaaaagtacac

SEQ ID NO: 4923796 - DNA, 25 bp, Homo sapien
gcaaacctcactacatgcatagcga

SEQ ID NO: 4923797 - DNA, 25 bp, Homo sapien
gcttaactagatgcaccttggtgtg

SEQ ID NO: 4923798 - DNA, 25 bp, Homo sapien
cattatcatcttaatctgagtctct

SEQ ID NO: 4923799 - DNA, 25 bp, Homo sapien
aatccacttatagtagcatattaca

SEQ ID NO: 4923800 - DNA, 25 bp, Homo sapien
ggatgttagtttaagctaatcacaa

SEQ ID NO: 4923801 - DNA, 25 bp, Homo sapien
tctgaggaatgataacttaatccac

SEQ ID NO: 4923802 - DNA, 25 bp, Homo sapien
aggctgggcttcaagtttaagaaag

SEQ ID NO: 4923803 - DNA, 25 bp, Homo sapien
tgagggaggttaatccaggaaaaca

SEQ ID NO: 4923804 - DNA, 25 bp, Homo sapien
caggctgggcttcaagtttaagaaa

SEQ ID NO: 4923805 - DNA, 25 bp, Homo sapien
aatatgagggaggttaatccaggaa

SEQ ID NO: 4923806 - DNA, 25 bp, Homo sapien
tcactctcaatgtcgttatttcaga

SEQ ID NO: 4923807 - DNA, 25 bp, Homo sapien
cagtgctatgccaagtatgagaggg

SEQ ID NO: 4923808 - DNA, 25 bp, Homo sapien
tgagcacattagttcttatatcccg

SEQ ID NO: 4923809 - DNA, 25 bp, Homo sapien
agcatgaccttaccccaagtcagct

SEQ ID NO: 4923810 - DNA, 25 bp, Homo sapien
aacgttttgcatcatgtcactggag

SEQ ID NO: 4923811 - DNA, 25 bp, Homo sapien
gagagaaattctcggcagctaacgt

SEQ ID NO: 4923812 - DNA, 25 bp, Homo sapien
gcaacactgccactctaaagagaga

SEQ ID NO: 4923813 - DNA, 25 bp, Homo sapien
tgctagtgcagagacagcaacactg

SEQ ID NO: 4923814 - DNA, 25 bp, Homo sapien
ctgcacgcctgctgcgggtgactga

SEQ ID NO: 4923815 - DNA, 25 bp, Homo sapien
ggccagccggaagggcggagttgcc

SEQ ID NO: 4923816 - DNA, 25 bp, Homo sapien
gagttgccggcggccacttccgctt

SEQ ID NO: 4923817 - DNA, 25 bp, Homo sapien
cggagagccgggaaactgcacgcct

SEQ ID NO: 4923818 - DNA, 25 bp, Homo sapien
cacgactcgaggtggcgtagcgccc

SEQ ID NO: 4923819 - DNA, 25 bp, Homo sapien
cgaggtggcgtagcgcccgcttata

SEQ ID NO: 4923820 - DNA, 25 bp, Homo sapien
agggtcccgacgccaagaacgccat

SEQ ID NO: 4923821 - DNA, 25 bp, Homo sapien
tagcgcccgcttataaagccgcaac

SEQ ID NO: 4923822 - DNA, 25 bp, Homo sapien
ggctgttgaactcctggcctcaggt

SEQ ID NO: 4923823 - DNA, 25 bp, Homo sapien
gagacgcggtttcacatgtaggcca

SEQ ID NO: 4923824 - DNA, 25 bp, Homo sapien
cctctgcctcccaggttcaagcggt

SEQ ID NO: 4923825 - DNA, 25 bp, Homo sapien
tcttctgcctcagcctcatgagtag

SEQ ID NO: 4923826 - DNA, 25 bp, Homo sapien
gaaacagtattgcttagctcataca

SEQ ID NO: 4923827 - DNA, 25 bp, Homo sapien
taagaaaggtgttacttggcagaaa

SEQ ID NO: 4923828 - DNA, 25 bp, Homo sapien
gctaggtttgtatcctgactctgac

SEQ ID NO: 4923829 - DNA, 25 bp, Homo sapien
gacactagctgcataaacttaggca

SEQ ID NO: 4923830 - DNA, 25 bp, Homo sapien
tggtcagtgttgctgtctgacagga

SEQ ID NO: 4923831 - DNA, 25 bp, Homo sapien
cacttctgataccttctggatgggc

SEQ ID NO: 4923832 - DNA, 25 bp, Homo sapien
tactcacgtggtcagtgttgctgtc

SEQ ID NO: 4923833 - DNA, 25 bp, Homo sapien
tgaagattagaaatgttacctactc

SEQ ID NO: 4923834 - DNA, 25 bp, Homo sapien
catcaaacaagcaaagtatcggtat

SEQ ID NO: 4923835 - DNA, 25 bp, Homo sapien
ctcatcaaacaagcaaagtatcggt

SEQ ID NO: 4923836 - DNA, 25 bp, Homo sapien
caaacaagcaaagtatcggtatttg

SEQ ID NO: 4923837 - DNA, 25 bp, Homo sapien
tcaaacaagcaaagtatcggtattt

SEQ ID NO: 4923838 - DNA, 25 bp, Homo sapien
cagctgggtggccttcgccatatcc

SEQ ID NO: 4923839 - DNA, 25 bp, Homo sapien
cttgtagcaatcgtatctctcatag

SEQ ID NO: 4923840 - DNA, 25 bp, Homo sapien
ggccttcgccatatccttttcattc

SEQ ID NO: 4923841 - DNA, 25 bp, Homo sapien
tcgtatctctcataggaggtgcccc

SEQ ID NO: 4923842 - DNA, 25 bp, Homo sapien
gattctatgagggtaggagttccag

SEQ ID NO: 4923843 - DNA, 25 bp, Homo sapien
tcagggtgatgattgccaaaggctg

SEQ ID NO: 4923844 - DNA, 25 bp, Homo sapien
taaaataacgaggtttgcgacatca

SEQ ID NO: 4923845 - DNA, 25 bp, Homo sapien
gaaatacgttattgataaaaactgc

SEQ ID NO: 4923846 - DNA, 25 bp, Homo sapien
gaacagcagaggataagtaggaagc

SEQ ID NO: 4923847 - DNA, 25 bp, Homo sapien
tcaggagaggaaatcatggtatcaa

SEQ ID NO: 4923848 - DNA, 25 bp, Homo sapien
gacacatttacctatccctgacagg

SEQ ID NO: 4923849 - DNA, 25 bp, Homo sapien
gactgtttctaactctaagcaagga

SEQ ID NO: 4923850 - DNA, 25 bp, Homo sapien
aggatacattgccttctcagaagga

SEQ ID NO: 4923851 - DNA, 25 bp, Homo sapien
ggatgccagtcatctaagcaccatt

SEQ ID NO: 4923852 - DNA, 25 bp, Homo sapien
cagtcatctaagcaccattctggga

SEQ ID NO: 4923853 - DNA, 25 bp, Homo sapien
tctcttggcaaagtaatcaggatac

SEQ ID NO: 4923854 - DNA, 25 bp, Homo sapien
gaagcaagggcccagagtaactgtc

SEQ ID NO: 4923855 - DNA, 25 bp, Homo sapien
gcttgtggggagcaaaacttcactc

SEQ ID NO: 4923856 - DNA, 25 bp, Homo sapien
agtaactgtcatggctggaatctgg

SEQ ID NO: 4923857 - DNA, 25 bp, Homo sapien
aatgttaaattgatacacttagata

SEQ ID NO: 4923858 - DNA, 25 bp, Homo sapien
tagcaaagcctacccttcctattct

SEQ ID NO: 4923859 - DNA, 25 bp, Homo sapien
gcaaggaaggaatcattaccaaagg

SEQ ID NO: 4923860 - DNA, 25 bp, Homo sapien
ccaaaggaatctaattgactataaa

SEQ ID NO: 4923861 - DNA, 25 bp, Homo sapien
cactatctgatcacaatattgaaaa

SEQ ID NO: 4923862 - DNA, 25 bp, Homo sapien
cagggggcaaagcttcagttaaagg

SEQ ID NO: 4923863 - DNA, 25 bp, Homo sapien
ccaccaggtggcgtttcctcctgca

SEQ ID NO: 4923864 - DNA, 25 bp, Homo sapien
ttcagttaaaggaccaccaggtggc

SEQ ID NO: 4923865 - DNA, 25 bp, Homo sapien
ccaggtggcgtttcctcctgcagct

SEQ ID NO: 4923866 - DNA, 25 bp, Homo sapien
ctggtcacaatataccaccacagtg

SEQ ID NO: 4923867 - DNA, 25 bp, Homo sapien
ctcccggggtctggtcacaatatac

SEQ ID NO: 4923868 - DNA, 25 bp, Homo sapien
ggtctggtcacaatataccaccaca

SEQ ID NO: 4923869 - DNA, 25 bp, Homo sapien
gggtctggtcacaatataccaccac

SEQ ID NO: 4923870 - DNA, 25 bp, Homo sapien
ctgtaacatatttcacttgcaagca

SEQ ID NO: 4923871 - DNA, 25 bp, Homo sapien
catatttcacttgcaagcatgaaag

SEQ ID NO: 4923872 - DNA, 25 bp, Homo sapien
caagcatgaaagatgaggtctctct

SEQ ID NO: 4923873 - DNA, 25 bp, Homo sapien
taacatatttcacttgcaagcatga

SEQ ID NO: 4923874 - DNA, 25 bp, Homo sapien
tcactgattttttattagggcaagt

SEQ ID NO: 4923875 - DNA, 25 bp, Homo sapien
taagcgccacaaagttttatcccag

SEQ ID NO: 4923876 - DNA, 25 bp, Homo sapien
tattcccttacctttgagtccgcag

SEQ ID NO: 4923877 - DNA, 25 bp, Homo sapien
caagctacggtagcagaagcaaagc

SEQ ID NO: 4923878 - DNA, 25 bp, Homo sapien
gagtccgcagacaatccaagctacg

SEQ ID NO: 4923879 - DNA, 25 bp, Homo sapien
gtttttgcatattgtaaaagcagtg

SEQ ID NO: 4923880 - DNA, 25 bp, Homo sapien
tgtttttgcatattgtaaaagcagt

SEQ ID NO: 4923881 - DNA, 25 bp, Homo sapien
ttttgcatattgtaaaagcagtgtc

SEQ ID NO: 4923882 - DNA, 25 bp, Homo sapien
ttgcatattgtaaaagcagtgtcac

SEQ ID NO: 4923883 - DNA, 25 bp, Homo sapien
gaacactgctgcgattgctcaagga

SEQ ID NO: 4923884 - DNA, 25 bp, Homo sapien
gcagtcaggtcataacagggcacat

SEQ ID NO: 4923885 - DNA, 25 bp, Homo sapien
caagcaagtcccttagcagtcaggt

SEQ ID NO: 4923886 - DNA, 25 bp, Homo sapien
cattggatgtgagagtaacgtaccg

SEQ ID NO: 4923887 - DNA, 25 bp, Homo sapien
cagatttgacaagggtagccagctt

SEQ ID NO: 4923888 - DNA, 25 bp, Homo sapien
cagcttggagtctagcaacttgcca

SEQ ID NO: 4923889 - DNA, 25 bp, Homo sapien
caggctgggtgcgttaaaaagccca

SEQ ID NO: 4923890 - DNA, 25 bp, Homo sapien
caaatacatccaaaagggtaaggca

SEQ ID NO: 4923891 - DNA, 25 bp, Homo sapien
catggtaaatgcatccgaataagcc

SEQ ID NO: 4923892 - DNA, 25 bp, Homo sapien
gggtacatcgtcaacatagccgatc

SEQ ID NO: 4923893 - DNA, 25 bp, Homo sapien
gcaggagtaacaattgatgagcaat

SEQ ID NO: 4923894 - DNA, 25 bp, Homo sapien
catttaagagtagcctcgtaggttg

SEQ ID NO: 4923895 - DNA, 25 bp, Homo sapien
gcttttgtagatgcattgtagtagt

SEQ ID NO: 4923896 - DNA, 25 bp, Homo sapien
ttttccccacaagcttttgtagatg

SEQ ID NO: 4923897 - DNA, 25 bp, Homo sapien
tctagcttagaagcaaatgcaagtt

SEQ ID NO: 4923898 - DNA, 25 bp, Homo sapien
tgcacattttaatcttagtttccct

SEQ ID NO: 4923899 - DNA, 25 bp, Homo sapien
caccctgggacctgctatggtcact

SEQ ID NO: 4923900 - DNA, 25 bp, Homo sapien
cagcaggagttcgacaagtcctcca

SEQ ID NO: 4923901 - DNA, 25 bp, Homo sapien
tctctgtaagtggtgaccaggaggc

SEQ ID NO: 4923902 - DNA, 25 bp, Homo sapien
taccgacggatgttccaagccaagc

SEQ ID NO: 4923903 - DNA, 25 bp, Homo sapien
tcagcagcatcacgtgggaactggc

SEQ ID NO: 4923904 - DNA, 25 bp, Homo sapien
taattgagaacttgcactgcaggcg

SEQ ID NO: 4923905 - DNA, 25 bp, Homo sapien
gaatttgagttgttcccctgagcac

SEQ ID NO: 4923906 - DNA, 25 bp, Homo sapien
tttgtctcaccaagtcaagaaggcc

SEQ ID NO: 4923907 - DNA, 25 bp, Homo sapien
tatttcccctcatggcgatgttggg

SEQ ID NO: 4923908 - DNA, 25 bp, Homo sapien
tgttagcacaacactctgagagcct

SEQ ID NO: 4923909 - DNA, 25 bp, Homo sapien
tgctgtgggctttccgtggttgtcc

SEQ ID NO: 4923910 - DNA, 25 bp, Homo sapien
tacagcaaacccagtgcacaaaggt

SEQ ID NO: 4923911 - DNA, 25 bp, Homo sapien
cattttcatcccaccctaagctttg

SEQ ID NO: 4923912 - DNA, 25 bp, Homo sapien
taatatgttaactgcacagctgaca

SEQ ID NO: 4923913 - DNA, 25 bp, Homo sapien
gactcacagagttctatacgagcat

SEQ ID NO: 4923914 - DNA, 25 bp, Homo sapien
gatggtaaatgacactcgaaaggtt

SEQ ID NO: 4923915 - DNA, 25 bp, Homo sapien
tccaaaacagctgaagcatagtctt

SEQ ID NO: 4923916 - DNA, 25 bp, Homo sapien
gtcttctggatcctgcgcctctttg

SEQ ID NO: 4923917 - DNA, 25 bp, Homo sapien
tggatcctgcgcctctttgtgaagt

SEQ ID NO: 4923918 - DNA, 25 bp, Homo sapien
gaagcatagtcttctggatcctgcg

SEQ ID NO: 4923919 - DNA, 25 bp, Homo sapien
ttcctcctgtgatcctgaacggctg

SEQ ID NO: 4923920 - DNA, 25 bp, Homo sapien
actgaccaggagaagggtgctggcc

SEQ ID NO: 4923921 - DNA, 25 bp, Homo sapien
ctcctgtgatcctgaacggctggtt

SEQ ID NO: 4923922 - DNA, 25 bp, Homo sapien
caggagaagggtgctggcctcagcc

SEQ ID NO: 4923923 - DNA, 25 bp, Homo sapien
gacatcacagcagagcgtttgcatg

SEQ ID NO: 4923924 - DNA, 25 bp, Homo sapien
tggcatcatgaacttgcactcttgg

SEQ ID NO: 4923925 - DNA, 25 bp, Homo sapien
gctgaagcgtaggatgttaggcctc

SEQ ID NO: 4923926 - DNA, 25 bp, Homo sapien
gaatcctgaaggtcgaaggccatgg

SEQ ID NO: 4923927 - DNA, 25 bp, Homo sapien
acaacagccgcagcaatgacaaaaa

SEQ ID NO: 4923928 - DNA, 25 bp, Homo sapien
atgagaagatgcctgggtcaagggt

SEQ ID NO: 4923929 - DNA, 25 bp, Homo sapien
cacttaacaacagccgcagcaatga

SEQ ID NO: 4923930 - DNA, 25 bp, Homo sapien
tgagaagatgcctgggtcaagggtc

SEQ ID NO: 4923931 - DNA, 25 bp, Homo sapien
ttcaccgagtctactctgccagctg

SEQ ID NO: 4923932 - DNA, 25 bp, Homo sapien
gtttcagcagcatgttcaccgagtc

SEQ ID NO: 4923933 - DNA, 25 bp, Homo sapien
gtgtggtttcagcagcatgttcacc

SEQ ID NO: 4923934 - DNA, 25 bp, Homo sapien
gcagcatgttcaccgagtctactct

SEQ ID NO: 4923935 - DNA, 25 bp, Homo sapien
tcctgttcctagttgctgtccttca

SEQ ID NO: 4923936 - DNA, 25 bp, Homo sapien
taccagagtcattgcagagccagtg

SEQ ID NO: 4923937 - DNA, 25 bp, Homo sapien
aatgactctgagctcctgttcctag

SEQ ID NO: 4923938 - DNA, 25 bp, Homo sapien
tgtgaaggcaaatgcaggaaacctc

SEQ ID NO: 4923939 - DNA, 25 bp, Homo sapien
cagcatttgcgatccttaggttccc

SEQ ID NO: 4923940 - DNA, 25 bp, Homo sapien
catttgcgatccttaggttcccaac

SEQ ID NO: 4923941 - DNA, 25 bp, Homo sapien
ttcagcatttgcgatccttaggttc

SEQ ID NO: 4923942 - DNA, 25 bp, Homo sapien
ttgcgatccttaggttcccaaccat

SEQ ID NO: 4923943 - DNA, 25 bp, Homo sapien
gaacttcgccatgaaagccgcctgt

SEQ ID NO: 4923944 - DNA, 25 bp, Homo sapien
gctgaacttcgccatgaaagccgcc

SEQ ID NO: 4923945 - DNA, 25 bp, Homo sapien
ttcgccatgaaagccgcctgtgttg

SEQ ID NO: 4923946 - DNA, 25 bp, Homo sapien
atgaaagccgcctgtgttggagaac

SEQ ID NO: 4923947 - DNA, 25 bp, Homo sapien
agagttgcctcgccagcaggtggtc

SEQ ID NO: 4923948 - DNA, 25 bp, Homo sapien
gagttgcctcgccagcaggtggtct

SEQ ID NO: 4923949 - DNA, 25 bp, Homo sapien
gggtagagttgcctcgccagcaggt

SEQ ID NO: 4923950 - DNA, 25 bp, Homo sapien
gtagagttgcctcgccagcaggtgg

SEQ ID NO: 4923951 - DNA, 25 bp, Homo sapien
gatgtgattcttgttgccttttcct

SEQ ID NO: 4923952 - DNA, 25 bp, Homo sapien
gagatgtgattcttgttgccttttc

SEQ ID NO: 4923953 - DNA, 25 bp, Homo sapien
ggagatgtgattcttgttgcctttt

SEQ ID NO: 4923954 - DNA, 25 bp, Homo sapien
agatgtgattcttgttgccttttcc

SEQ ID NO: 4923955 - DNA, 25 bp, Homo sapien
cttgggagacctttcctagtgttgg

SEQ ID NO: 4923956 - DNA, 25 bp, Homo sapien
tggggcagcgtatatcaggctctgt

SEQ ID NO: 4923957 - DNA, 25 bp, Homo sapien
tgccttgggagacctttcctagtgt

SEQ ID NO: 4923958 - DNA, 25 bp, Homo sapien
ctagtgttggggcagcgtatatcag

SEQ ID NO: 4923959 - DNA, 25 bp, Homo sapien
tgggcaggggctgggtgcgggctgc

SEQ ID NO: 4923960 - DNA, 25 bp, Homo sapien
gggctgggtgcgggctgctgactca

SEQ ID NO: 4923961 - DNA, 25 bp, Homo sapien
gcaggggctgggtgcgggctgctga

SEQ ID NO: 4923962 - DNA, 25 bp, Homo sapien
aggggctgggtgcgggctgctgact

SEQ ID NO: 4923963 - DNA, 25 bp, Homo sapien
ggaatgtgcacaggactcgaggaat

SEQ ID NO: 4923964 - DNA, 25 bp, Homo sapien
tgcgtgacaggttcgtgtccaaccc

SEQ ID NO: 4923965 - DNA, 25 bp, Homo sapien
tcgaggaatgaagcaatgttgcgtg

SEQ ID NO: 4923966 - DNA, 25 bp, Homo sapien
tgaagcaatgttgcgtgacaggttc

SEQ ID NO: 4923967 - DNA, 25 bp, Homo sapien
cggtgcaaactttggtgtgagccac

SEQ ID NO: 4923968 - DNA, 25 bp, Homo sapien
ggcagccttggaagcttttctcggt

SEQ ID NO: 4923969 - DNA, 25 bp, Homo sapien
cttggaagcttttctcggtgcaaac

SEQ ID NO: 4923970 - DNA, 25 bp, Homo sapien
gcttttctcggtgcaaactttggtg

SEQ ID NO: 4923971 - DNA, 25 bp, Homo sapien
ctggaatccgagtccaggagacctg

SEQ ID NO: 4923972 - DNA, 25 bp, Homo sapien
ccagaagggctcatgtcttgtgaaa

SEQ ID NO: 4923973 - DNA, 25 bp, Homo sapien
tgtcttgtgaaatcaggttgctgtg

SEQ ID NO: 4923974 - DNA, 25 bp, Homo sapien
gctcatgtcttgtgaaatcaggttg

SEQ ID NO: 4923975 - DNA, 25 bp, Homo sapien
tgtcattagggagattggtgggtca

SEQ ID NO: 4923976 - DNA, 25 bp, Homo sapien
agcagcaggcccaaagctcagatct

SEQ ID NO: 4923977 - DNA, 25 bp, Homo sapien
caggcccaaagctcagatctgttat

SEQ ID NO: 4923978 - DNA, 25 bp, Homo sapien
cagcaggcccaaagctcagatctgt

SEQ ID NO: 4923979 - DNA, 25 bp, Homo sapien
aaccaaatgacacaaccaccatcat

SEQ ID NO: 4923980 - DNA, 25 bp, Homo sapien
gagtttgtgaaggacaaggactcct

SEQ ID NO: 4923981 - DNA, 25 bp, Homo sapien
taaggcccaagactaaggcaagtga

SEQ ID NO: 4923982 - DNA, 25 bp, Homo sapien
tgacaacaaccctttggctggagaa

SEQ ID NO: 4923983 - DNA, 25 bp, Homo sapien
tcccaagaggttttgaccaaacata

SEQ ID NO: 4923984 - DNA, 25 bp, Homo sapien
ggagtgtatccttggtgacagacca

SEQ ID NO: 4923985 - DNA, 25 bp, Homo sapien
tgagatgagtatttccctgttgtca

SEQ ID NO: 4923986 - DNA, 25 bp, Homo sapien
aaggtttctggctctaatcagccca

SEQ ID NO: 4923987 - DNA, 25 bp, Homo sapien
cctgttgtcataaccccttagggtg

SEQ ID NO: 4923988 - DNA, 25 bp, Homo sapien
gggagcacactttgaataccaagga

SEQ ID NO: 4923989 - DNA, 25 bp, Homo sapien
tcacagcatagaacggcacttccca

SEQ ID NO: 4923990 - DNA, 25 bp, Homo sapien
gcatttccgtcacactcccaggtga

SEQ ID NO: 4923991 - DNA, 25 bp, Homo sapien
tgggcagctttaacgttccaggctt

SEQ ID NO: 4923992 - DNA, 25 bp, Homo sapien
cttgcccgcagcaaatgctgactgt

SEQ ID NO: 4923993 - DNA, 25 bp, Homo sapien
tattggctccttgcccgcagcaaat

SEQ ID NO: 4923994 - DNA, 25 bp, Homo sapien
gcagagtcagttgctattggctcct

SEQ ID NO: 4923995 - DNA, 25 bp, Homo sapien
ggagaggataatttcggcagagtca

SEQ ID NO: 4923996 - DNA, 25 bp, Homo sapien
tcatcttttagggtacacgtccaac

SEQ ID NO: 4923997 - DNA, 25 bp, Homo sapien
gcatgaaccaacacggatgcttcag

SEQ ID NO: 4923998 - DNA, 25 bp, Homo sapien
aagtctagccatcttatttgagctc

SEQ ID NO: 4923999 - DNA, 25 bp, Homo sapien
cttaggcagggctgcgtttcctcat

SEQ ID NO: 4924000 - DNA, 25 bp, Homo sapien
gcctgctggccaaagtgactgtggt

SEQ ID NO: 4924001 - DNA, 25 bp, Homo sapien
ctggtccatttgacccatcagggca

SEQ ID NO: 4924002 - DNA, 25 bp, Homo sapien
tgactgtggtcttccattcccctgg

SEQ ID NO: 4924003 - DNA, 25 bp, Homo sapien
actgggcctgctggccaaagtgact

SEQ ID NO: 4924004 - DNA, 25 bp, Homo sapien
ggggggtctggagggagctctctta

SEQ ID NO: 4924005 - DNA, 25 bp, Homo sapien
ggattggggggtctggagggagctc

SEQ ID NO: 4924006 - DNA, 25 bp, Homo sapien
tatatggggattggggggtctggag

SEQ ID NO: 4924007 - DNA, 25 bp, Homo sapien
ggggtctggagggagctctcttaac

SEQ ID NO: 4924008 - DNA, 25 bp, Homo sapien
aagcatcagcaattaatggcgtgct

SEQ ID NO: 4924009 - DNA, 25 bp, Homo sapien
taatgtaactcaaaccgtgggccta

SEQ ID NO: 4924010 - DNA, 25 bp, Homo sapien
tgcccatgttcccaggtcttaaagg

SEQ ID NO: 4924011 - DNA, 25 bp, Homo sapien
aatagtacatgaaaatgagcaatgc

SEQ ID NO: 4924012 - DNA, 25 bp, Homo sapien
gaacaccgtctggtcagtatctggg

SEQ ID NO: 4924013 - DNA, 25 bp, Homo sapien
gaagactcttcctataatcctgagc

SEQ ID NO: 4924014 - DNA, 25 bp, Homo sapien
gggctgctatttgggatgaagactc

SEQ ID NO: 4924015 - DNA, 25 bp, Homo sapien
ctttccttggaacaccgtctggtca

SEQ ID NO: 4924016 - DNA, 25 bp, Homo sapien
gaccctgggtgacaatgctcttagt

SEQ ID NO: 4924017 - DNA, 25 bp, Homo sapien
tttccatatctaggaggctgccgta

SEQ ID NO: 4924018 - DNA, 25 bp, Homo sapien
tctatgactcaacacagagagagcc

SEQ ID NO: 4924019 - DNA, 25 bp, Homo sapien
agatacaatgttcggagacagaccc

SEQ ID NO: 4924020 - DNA, 25 bp, Homo sapien
tagcagtaagacgtttccagaagca

SEQ ID NO: 4924021 - DNA, 25 bp, Homo sapien
aaggaggccttttcctgcaaccagg

SEQ ID NO: 4924022 - DNA, 25 bp, Homo sapien
cagaagcatccgtctagcaggagct

SEQ ID NO: 4924023 - DNA, 25 bp, Homo sapien
gcaggagctctggaatgtaagtaac

SEQ ID NO: 4924024 - DNA, 25 bp, Homo sapien
ctggctaaaggagagcagctgcccc

SEQ ID NO: 4924025 - DNA, 25 bp, Homo sapien
ctaaaggagagcagctgccccttgg

SEQ ID NO: 4924026 - DNA, 25 bp, Homo sapien
taaaggagagcagctgccccttggt

SEQ ID NO: 4924027 - DNA, 25 bp, Homo sapien
aggagagcagctgccccttggttac

SEQ ID NO: 4924028 - DNA, 25 bp, Homo sapien
cccgaaagggagtgtctggccatgc

SEQ ID NO: 4924029 - DNA, 25 bp, Homo sapien
tgtctgagtgcaggctaagtacaag

SEQ ID NO: 4924030 - DNA, 25 bp, Homo sapien
tttcctagagacacgtgtgcaggtg

SEQ ID NO: 4924031 - DNA, 25 bp, Homo sapien
caagttgcccatttcggctccagaa

SEQ ID NO: 4924032 - DNA, 25 bp, Homo sapien
aagtgtcttctcaccgacctgggca

SEQ ID NO: 4924033 - DNA, 25 bp, Homo sapien
gctgaagtgtcttctcaccgacctg

SEQ ID NO: 4924034 - DNA, 25 bp, Homo sapien
tctcctgctgaagtgtcttctcacc

SEQ ID NO: 4924035 - DNA, 25 bp, Homo sapien
gacctgggcacaggttacttctgtg

SEQ ID NO: 4924036 - DNA, 25 bp, Homo sapien
acatgtcgcgctttcacagttgccc

SEQ ID NO: 4924037 - DNA, 25 bp, Homo sapien
gagggtgccagaatccatgcacagc

SEQ ID NO: 4924038 - DNA, 25 bp, Homo sapien
tgataataatacctcctcccggagt

SEQ ID NO: 4924039 - DNA, 25 bp, Homo sapien
ggccttctctcagaaacatgtcgcg

SEQ ID NO: 4924040 - DNA, 25 bp, Homo sapien
catgaacgagaaaggcgggttttca

SEQ ID NO: 4924041 - DNA, 25 bp, Homo sapien
acggagctaggacaggatgaattcc

SEQ ID NO: 4924042 - DNA, 25 bp, Homo sapien
aattcctgccgtagatgtgagctga

SEQ ID NO: 4924043 - DNA, 25 bp, Homo sapien
tgagctgaggtatggaaacctggct

SEQ ID NO: 4924044 - DNA, 25 bp, Homo sapien
gctaagttgaccttgtaggtctgtt

SEQ ID NO: 4924045 - DNA, 25 bp, Homo sapien
catgctgtcgaagagtgtcacgggt

SEQ ID NO: 4924046 - DNA, 25 bp, Homo sapien
tgtcacgggtaggtgctaagttgac

SEQ ID NO: 4924047 - DNA, 25 bp, Homo sapien
taatagccgagtctggcatgctgtc

SEQ ID NO: 4924048 - DNA, 25 bp, Homo sapien
cttcctaacatagtgcactagtcca

SEQ ID NO: 4924049 - DNA, 25 bp, Homo sapien
gcaagcttggggttaccctgaagga

SEQ ID NO: 4924050 - DNA, 25 bp, Homo sapien
taacatagtgcactagtccagcgag

SEQ ID NO: 4924051 - DNA, 25 bp, Homo sapien
gtgcactagtccagcgagaacatcc

SEQ ID NO: 4924052 - DNA, 25 bp, Homo sapien
tccatgaaatatgggcacgttggtg

SEQ ID NO: 4924053 - DNA, 25 bp, Homo sapien
cacgttggtgaaatactcttaggct

SEQ ID NO: 4924054 - DNA, 25 bp, Homo sapien
tatgggcacgttggtgaaatactct

SEQ ID NO: 4924055 - DNA, 25 bp, Homo sapien
ggttccatgaaatatgggcacgttg

SEQ ID NO: 4924056 - DNA, 25 bp, Homo sapien
gagaagttgtcttggaagcagtgac

SEQ ID NO: 4924057 - DNA, 25 bp, Homo sapien
cctgagtttagatttgagcacgttc

SEQ ID NO: 4924058 - DNA, 25 bp, Homo sapien
aacacctagagggagttgagactct

SEQ ID NO: 4924059 - DNA, 25 bp, Homo sapien
gagcacgttctttcatttgcccaga

SEQ ID NO: 4924060 - DNA, 25 bp, Homo sapien
cactcgctttatactgaatttgaag

SEQ ID NO: 4924061 - DNA, 25 bp, Homo sapien
tatactgaatttgaagccccaaacc

SEQ ID NO: 4924062 - DNA, 25 bp, Homo sapien
tgattgcactcgctttatactgaat

SEQ ID NO: 4924063 - DNA, 25 bp, Homo sapien
gctttatactgaatttgaagcccca

SEQ ID NO: 4924064 - DNA, 25 bp, Homo sapien
gcattttgccccttcaagtaaccta

SEQ ID NO: 4924065 - DNA, 25 bp, Homo sapien
ctaaggtgagattgcattttgcccc

SEQ ID NO: 4924066 - DNA, 25 bp, Homo sapien
ccacatttgaccatatggcagtttg

SEQ ID NO: 4924067 - DNA, 25 bp, Homo sapien
aacatgctctgaacatgttccacag

SEQ ID NO: 4924068 - DNA, 25 bp, Homo sapien
tcacatccacatttgaccatatggc

SEQ ID NO: 4924069 - DNA, 25 bp, Homo sapien
ttgttccttggtctagccaacatgc

SEQ ID NO: 4924070 - DNA, 25 bp, Homo sapien
tgcttaaaggtggttaaggagctcc

SEQ ID NO: 4924071 - DNA, 25 bp, Homo sapien
caggtggccctgaacagattattaa

SEQ ID NO: 4924072 - DNA, 25 bp, Homo sapien
gagctcctctcctgcggtctaaaga

SEQ ID NO: 4924073 - DNA, 25 bp, Homo sapien
ttggtgaccttgccgaaccatcctc

SEQ ID NO: 4924074 - DNA, 25 bp, Homo sapien
caccgcatgtgggtaccggcttgtt

SEQ ID NO: 4924075 - DNA, 25 bp, Homo sapien
ggtaacttctcttattgacactgga

SEQ ID NO: 4924076 - DNA, 25 bp, Homo sapien
tatggcccaggtcactttttcggtc

SEQ ID NO: 4924077 - DNA, 25 bp, Homo sapien
agtatttgagaatcctatggcccag

SEQ ID NO: 4924078 - DNA, 25 bp, Homo sapien
ttcctggaatgacacttgaaagggc

SEQ ID NO: 4924079 - DNA, 25 bp, Homo sapien
tacccctaacagagagaaagtcttg

SEQ ID NO: 4924080 - DNA, 25 bp, Homo sapien
gaattccacacccaagcatgtgtgt

SEQ ID NO: 4924081 - DNA, 25 bp, Homo sapien
tgttagcccagaatgaactcaccgg

SEQ ID NO: 4924082 - DNA, 25 bp, Homo sapien
tagacgattctataacaaggtgttc

SEQ ID NO: 4924083 - DNA, 25 bp, Homo sapien
gatttctcagatgtgcctttaaggc

SEQ ID NO: 4924084 - DNA, 25 bp, Homo sapien
caggtctccaatgcatgaaggcaga

SEQ ID NO: 4924085 - DNA, 25 bp, Homo sapien
gactgggcgtgatttttgtccccta

SEQ ID NO: 4924086 - DNA, 25 bp, Homo sapien
gcagcaagctactttgggcaacctt

SEQ ID NO: 4924087 - DNA, 25 bp, Homo sapien
caagtgtcattaagtcagcagcaag

SEQ ID NO: 4924088 - DNA, 25 bp, Homo sapien
gaaattgtctggcactgaacaccca

SEQ ID NO: 4924089 - DNA, 25 bp, Homo sapien
tattgcctaaaacaggtgggcctga

SEQ ID NO: 4924090 - DNA, 25 bp, Homo sapien
tcatttgaggcagggactgccatca

SEQ ID NO: 4924091 - DNA, 25 bp, Homo sapien
cattgagtcatcaaagcagagttga

SEQ ID NO: 4924092 - DNA, 25 bp, Homo sapien
cacatctggaattggcaggctgact

SEQ ID NO: 4924093 - DNA, 25 bp, Homo sapien
cagtcagggtgattggcatcgtaca

SEQ ID NO: 4924094 - DNA, 25 bp, Homo sapien
gagggcagtgttcagtgcaagggaa

SEQ ID NO: 4924095 - DNA, 25 bp, Homo sapien
ggaggtggcgttagagcaacaactt

SEQ ID NO: 4924096 - DNA, 25 bp, Homo sapien
ttaagaaccgtgaagatgtgggcag

SEQ ID NO: 4924097 - DNA, 25 bp, Homo sapien
aagccagtacctccctcatttgtgt

SEQ ID NO: 4924098 - DNA, 25 bp, Homo sapien
gaggtcatcctgcaaccagaagttg

SEQ ID NO: 4924099 - DNA, 25 bp, Homo sapien
ggtggcagccacacgacacatgttt

SEQ ID NO: 4924100 - DNA, 25 bp, Homo sapien
caatagggttgtctaaggtggcagc

SEQ ID NO: 4924101 - DNA, 25 bp, Homo sapien
ctgaataattggatgaggcacccca

SEQ ID NO: 4924102 - DNA, 25 bp, Homo sapien
tgatttggccccagctaagtggccc

SEQ ID NO: 4924103 - DNA, 25 bp, Homo sapien
taaccttttgtgtgaggacacctgt

SEQ ID NO: 4924104 - DNA, 25 bp, Homo sapien
tcccatgggccgaatgtggcagtcc

SEQ ID NO: 4924105 - DNA, 25 bp, Homo sapien
aaaagtggccatcctgtgcctctag

SEQ ID NO: 4924106 - DNA, 25 bp, Homo sapien
tgaaaaggttgaaactattgattca

SEQ ID NO: 4924107 - DNA, 25 bp, Homo sapien
gaaactattgattcattagatgctt

SEQ ID NO: 4924108 - DNA, 25 bp, Homo sapien
ctattgattcattagatgctttatc

SEQ ID NO: 4924109 - DNA, 25 bp, Homo sapien
ggttgaaactattgattcattagat

SEQ ID NO: 4924110 - DNA, 25 bp, Homo sapien
tagacgatcttgactgcatcaagga

SEQ ID NO: 4924111 - DNA, 25 bp, Homo sapien
gaagggcccatagctggtttgtctg

SEQ ID NO: 4924112 - DNA, 25 bp, Homo sapien
gactgccttccgatgtgtagacgat

SEQ ID NO: 4924113 - DNA, 25 bp, Homo sapien
caagatattcacgtggctggaggga

SEQ ID NO: 4924114 - DNA, 25 bp, Homo sapien
gcgtttttcaatggcgctggccccg

SEQ ID NO: 4924115 - DNA, 25 bp, Homo sapien
taggcgaataccctacagagcggtt

SEQ ID NO: 4924116 - DNA, 25 bp, Homo sapien
tgattgagaaggaatgcagcgcgct

SEQ ID NO: 4924117 - DNA, 25 bp, Homo sapien
tttttaaggccaggagccgagcgct

SEQ ID NO: 4924118 - DNA, 25 bp, Homo sapien
ggacacggaacaggtccttcttgcc

SEQ ID NO: 4924119 - DNA, 25 bp, Homo sapien
cagagtgaggacacggaacaggtcc

SEQ ID NO: 4924120 - DNA, 25 bp, Homo sapien
agtgaggacacggaacaggtccttc

SEQ ID NO: 4924121 - DNA, 25 bp, Homo sapien
acacggaacaggtccttcttgccat

SEQ ID NO: 4924122 - DNA, 25 bp, Homo sapien
ggcgttactgtaacaggattgcgga

SEQ ID NO: 4924123 - DNA, 25 bp, Homo sapien
ctgggtcagtggattggtacccata

SEQ ID NO: 4924124 - DNA, 25 bp, Homo sapien
tgtaacaggattgcggatgatgtca

SEQ ID NO: 4924125 - DNA, 25 bp, Homo sapien
gattggtacccataggcgttactgt

SEQ ID NO: 4924126 - DNA, 25 bp, Homo sapien
cttggaattggaactcagtgtccct

SEQ ID NO: 4924127 - DNA, 25 bp, Homo sapien
cagtgtccctccactctatccccac

SEQ ID NO: 4924128 - DNA, 25 bp, Homo sapien
ttaagcttggaattggaactcagtg

SEQ ID NO: 4924129 - DNA, 25 bp, Homo sapien
agcttggaattggaactcagtgtcc

SEQ ID NO: 4924130 - DNA, 25 bp, Homo sapien
cacattcccatgtggtctggaccac

SEQ ID NO: 4924131 - DNA, 25 bp, Homo sapien
acattcgtgctaccagggaagccag

SEQ ID NO: 4924132 - DNA, 25 bp, Homo sapien
ggtctggaccactaccacattcgtg

SEQ ID NO: 4924133 - DNA, 25 bp, Homo sapien
cagtcaagaagagtcttcttcctct

SEQ ID NO: 4924134 - DNA, 25 bp, Homo sapien
agatgagaggtcacaccggccaact

SEQ ID NO: 4924135 - DNA, 25 bp, Homo sapien
atgagaggtcacaccggccaactgg

SEQ ID NO: 4924136 - DNA, 25 bp, Homo sapien
acagatgagaggtcacaccggccaa

SEQ ID NO: 4924137 - DNA, 25 bp, Homo sapien
tgagaggtcacaccggccaactggg

SEQ ID NO: 4924138 - DNA, 25 bp, Homo sapien
cccaactctgcttcttgcttgccac

SEQ ID NO: 4924139 - DNA, 25 bp, Homo sapien
tcaatcccaactctgcttcttgctt

SEQ ID NO: 4924140 - DNA, 25 bp, Homo sapien
tcccaactctgcttcttgcttgcca

SEQ ID NO: 4924141 - DNA, 25 bp, Homo sapien
aatcccaactctgcttcttgcttgc

SEQ ID NO: 4924142 - DNA, 25 bp, Homo sapien
caggtcatccgctggttttgcatta

SEQ ID NO: 4924143 - DNA, 25 bp, Homo sapien
gttttgcattaggagaatgggatgt

SEQ ID NO: 4924144 - DNA, 25 bp, Homo sapien
ccgctggttttgcattaggagaatg

SEQ ID NO: 4924145 - DNA, 25 bp, Homo sapien
aggcaccaggtcatccgctggtttt

SEQ ID NO: 4924146 - DNA, 25 bp, Homo sapien
tctcaggtgcacgttctctaattgt

SEQ ID NO: 4924147 - DNA, 25 bp, Homo sapien
cacgttctctaattgtgcagagtga

SEQ ID NO: 4924148 - DNA, 25 bp, Homo sapien
gaggcttctcaggtgcacgttctct

SEQ ID NO: 4924149 - DNA, 25 bp, Homo sapien
ccccaagagtcacagcttgcgaggc

SEQ ID NO: 4924150 - DNA, 25 bp, Homo sapien
gcatccctcactggcctgaagggtt

SEQ ID NO: 4924151 - DNA, 25 bp, Homo sapien
cacagtaattttatgagtaaaccat

SEQ ID NO: 4924152 - DNA, 25 bp, Homo sapien
gttctgaatttatgccaaacacagt

SEQ ID NO: 4924153 - DNA, 25 bp, Homo sapien
taaaccatgttgcacgggcatccct

SEQ ID NO: 4924154 - DNA, 25 bp, Homo sapien
agctctcagttctgaatttatgcca

SEQ ID NO: 4924155 - DNA, 25 bp, Homo sapien
gtgagctaataagtcatgtacggaa

SEQ ID NO: 4924156 - DNA, 25 bp, Homo sapien
tgtgagctaataagtcatgtacgga

SEQ ID NO: 4924157 - DNA, 25 bp, Homo sapien
tgagctaataagtcatgtacggaac

SEQ ID NO: 4924158 - DNA, 25 bp, Homo sapien
agttcatgaggaagagtctgtattg

SEQ ID NO: 4924159 - DNA, 25 bp, Homo sapien
aagagtctgtattgaagccaatttg

SEQ ID NO: 4924160 - DNA, 25 bp, Homo sapien
atttcaggggacaatgtgccaggtg

SEQ ID NO: 4924161 - DNA, 25 bp, Homo sapien
agtaaaatttcaggggacaatgtgc

SEQ ID NO: 4924162 - DNA, 25 bp, Homo sapien
tttcaccgatctgtatgtccatctt

SEQ ID NO: 4924163 - DNA, 25 bp, Homo sapien
ctgggcctgggtagcattctagttt

SEQ ID NO: 4924164 - DNA, 25 bp, Homo sapien
gggtagcattctagttttgtaggca

SEQ ID NO: 4924165 - DNA, 25 bp, Homo sapien
gttttgtaggcatttcaccgatctg

SEQ ID NO: 4924166 - DNA, 25 bp, Homo sapien
gcaaagagatgtgtagctgagccac

SEQ ID NO: 4924167 - DNA, 25 bp, Homo sapien
tcctttcattcaggtagtgagcatg

SEQ ID NO: 4924168 - DNA, 25 bp, Homo sapien
tatgaagtagagtacccaggatctg

SEQ ID NO: 4924169 - DNA, 25 bp, Homo sapien
gcctaagttcatatggccagttatg

SEQ ID NO: 4924170 - DNA, 25 bp, Homo sapien
actctactgaagtggaagttacaag

SEQ ID NO: 4924171 - DNA, 25 bp, Homo sapien
cagcttaagaattgatccgggcacc

SEQ ID NO: 4924172 - DNA, 25 bp, Homo sapien
caatagaaacttgaagacgttaggg

SEQ ID NO: 4924173 - DNA, 25 bp, Homo sapien
tcttgccagagctgtataagacaca

SEQ ID NO: 4924174 - DNA, 25 bp, Homo sapien
aaggcactgccatagaatcaacact

SEQ ID NO: 4924175 - DNA, 25 bp, Homo sapien
ggcactgccatagaatcaacactga

SEQ ID NO: 4924176 - DNA, 25 bp, Homo sapien
aggcactgccatagaatcaacactg

SEQ ID NO: 4924177 - DNA, 25 bp, Homo sapien
agcaatatgttagatgtatcactgg

SEQ ID NO: 4924178 - DNA, 25 bp, Homo sapien
ctctagcaatatgttagatgtatca

SEQ ID NO: 4924179 - DNA, 25 bp, Homo sapien
tgttagatgtatcactggttgggtc

SEQ ID NO: 4924180 - DNA, 25 bp, Homo sapien
gatgtatcactggttgggtctaaag

SEQ ID NO: 4924181 - DNA, 25 bp, Homo sapien
cacagagttgcaaaggtgccagctg

SEQ ID NO: 4924182 - DNA, 25 bp, Homo sapien
acagagttgcaaaggtgccagctgc

SEQ ID NO: 4924183 - DNA, 25 bp, Homo sapien
ggcagactgaacacccacagagcat

SEQ ID NO: 4924184 - DNA, 25 bp, Homo sapien
gcagactgaacacccacagagcatg

SEQ ID NO: 4924185 - DNA, 25 bp, Homo sapien
aatcaagtaatgtgccctatgtatc

SEQ ID NO: 4924186 - DNA, 25 bp, Homo sapien
ttgtgaaatgggagtacgtgagtca

SEQ ID NO: 4924187 - DNA, 25 bp, Homo sapien
ccaggattgccagacctacttttgt

SEQ ID NO: 4924188 - DNA, 25 bp, Homo sapien
tctcccatttcacctatttcatctt

SEQ ID NO: 4924189 - DNA, 25 bp, Homo sapien
tgctgacaaccgtggctttgtgtct

SEQ ID NO: 4924190 - DNA, 25 bp, Homo sapien
gctgacaaccgtggctttgtgtctt

SEQ ID NO: 4924191 - DNA, 25 bp, Homo sapien
tagtgtacaagacggcctttgtctg

SEQ ID NO: 4924192 - DNA, 25 bp, Homo sapien
aatagatagtgtacaagacggcctt

SEQ ID NO: 4924193 - DNA, 25 bp, Homo sapien
tgcacgggtccctgttgtggtaaag

SEQ ID NO: 4924194 - DNA, 25 bp, Homo sapien
cactaagtttgcaactttctggaga

SEQ ID NO: 4924195 - DNA, 25 bp, Homo sapien
cagataattgaaagccaaccatgca

SEQ ID NO: 4924196 - DNA, 25 bp, Homo sapien
aaagaaagtccagatacacactaag

SEQ ID NO: 4924197 - DNA, 25 bp, Homo sapien
tctgtgggaagctccaagctttgtc

SEQ ID NO: 4924198 - DNA, 25 bp, Homo sapien
tgtacaacaggcaccaagaacaggc

SEQ ID NO: 4924199 - DNA, 25 bp, Homo sapien
tgtcacttcaagtctccatgaggat

SEQ ID NO: 4924200 - DNA, 25 bp, Homo sapien
agaacaggctggaattttctgtggg

SEQ ID NO: 4924201 - DNA, 25 bp, Homo sapien
cctgcgtgtaaattctccggaaaag

SEQ ID NO: 4924202 - DNA, 25 bp, Homo sapien
tgcagaagcggaaagtcaggctgcc

SEQ ID NO: 4924203 - DNA, 25 bp, Homo sapien
gtctcgttccttccaggcgtgcaga

SEQ ID NO: 4924204 - DNA, 25 bp, Homo sapien
cttctccggcttgcacaatgctggc

SEQ ID NO: 4924205 - DNA, 25 bp, Homo sapien
gtgtttcctcagacaaagagagaaa

SEQ ID NO: 4924206 - DNA, 25 bp, Homo sapien
tcagaaaagcagtggccagaaacca

SEQ ID NO: 4924207 - DNA, 25 bp, Homo sapien
gaagggatcagaggccaagctctgt

SEQ ID NO: 4924208 - DNA, 25 bp, Homo sapien
gagagatggcggcagcatgtgacac

SEQ ID NO: 4924209 - DNA, 25 bp, Homo sapien
ttgctgtttcccatgatgtccccac

SEQ ID NO: 4924210 - DNA, 25 bp, Homo sapien
gcgatgagatggaagtcagcgaggg

SEQ ID NO: 4924211 - DNA, 25 bp, Homo sapien
agatggaagtcagcgagggggtctc

SEQ ID NO: 4924212 - DNA, 25 bp, Homo sapien
tgagatggaagtcagcgagggggtc

SEQ ID NO: 4924213 - DNA, 25 bp, Homo sapien
tggaagtcagcgagggggtctcggg

SEQ ID NO: 4924214 - DNA, 25 bp, Homo sapien
gggctctcgtctgcagtcctgctgc

SEQ ID NO: 4924215 - DNA, 25 bp, Homo sapien
tctgctgagagcccatctgctgggt

SEQ ID NO: 4924216 - DNA, 25 bp, Homo sapien
gctctgtcgggctcaagagtggaga

SEQ ID NO: 4924217 - DNA, 25 bp, Homo sapien
cctgctgcaggatagctctttacct

SEQ ID NO: 4924218 - DNA, 25 bp, Homo sapien
tgcactgcaagttcatcaccctgtg

SEQ ID NO: 4924219 - DNA, 25 bp, Homo sapien
gaccaaggatcacatagccccgata

SEQ ID NO: 4924220 - DNA, 25 bp, Homo sapien
catgctgacccatgagaccagaggg

SEQ ID NO: 4924221 - DNA, 25 bp, Homo sapien
tatgtcttagcaccattactgggac

SEQ ID NO: 4924222 - DNA, 25 bp, Homo sapien
ggctgcttcgcaggctaccgaagct

SEQ ID NO: 4924223 - DNA, 25 bp, Homo sapien
aaatggctgcttcgcaggctaccga

SEQ ID NO: 4924224 - DNA, 25 bp, Homo sapien
cttcgcaggctaccgaagctctctg

SEQ ID NO: 4924225 - DNA, 25 bp, Homo sapien
aagtgaaaatggctgcttcgcaggc

SEQ ID NO: 4924226 - DNA, 25 bp, Homo sapien
gtcatgaaatcctcaggcaggatct

SEQ ID NO: 4924227 - DNA, 25 bp, Homo sapien
catgaaatcctcaggcaggatcttc

SEQ ID NO: 4924228 - DNA, 25 bp, Homo sapien
tgtcatgaaatcctcaggcaggatc

SEQ ID NO: 4924229 - DNA, 25 bp, Homo sapien
ctgtcatgaaatcctcaggcaggat

SEQ ID NO: 4924230 - DNA, 25 bp, Homo sapien
taccattggtcaccgctgtgcgttg

SEQ ID NO: 4924231 - DNA, 25 bp, Homo sapien
caggcctcacatctatcacaggtgg

SEQ ID NO: 4924232 - DNA, 25 bp, Homo sapien
ctgtgcgttgcatctgccgtgggta

SEQ ID NO: 4924233 - DNA, 25 bp, Homo sapien
gatctggcatgcaagaagtactgaa

SEQ ID NO: 4924234 - DNA, 25 bp, Homo sapien
tctgtacactcatgtgtacagatta

SEQ ID NO: 4924235 - DNA, 25 bp, Homo sapien
caaggaaattccagtatatgctaca

SEQ ID NO: 4924236 - DNA, 25 bp, Homo sapien
acaaggaaattccagtatatgctac

SEQ ID NO: 4924237 - DNA, 25 bp, Homo sapien
cactcatgtgtacagattattcaca

SEQ ID NO: 4924238 - DNA, 25 bp, Homo sapien
taaaagcgcgattcttgaccatgac

SEQ ID NO: 4924239 - DNA, 25 bp, Homo sapien
tcctgcgggatgatagtggactcct

SEQ ID NO: 4924240 - DNA, 25 bp, Homo sapien
caaagtctagatgcatcctgcggga

SEQ ID NO: 4924241 - DNA, 25 bp, Homo sapien
gagactagtgctacccttaaaggcc

SEQ ID NO: 4924242 - DNA, 25 bp, Homo sapien
tgcctacagtggcttgagagacatc

SEQ ID NO: 4924243 - DNA, 25 bp, Homo sapien
actgcctacagtggcttgagagaca

SEQ ID NO: 4924244 - DNA, 25 bp, Homo sapien
cctacagtggcttgagagacatcag

SEQ ID NO: 4924245 - DNA, 25 bp, Homo sapien
tcaaattttgttgcggtaaatactg

SEQ ID NO: 4924246 - DNA, 25 bp, Homo sapien
ttaccatcatctaatatcaggagac

SEQ ID NO: 4924247 - DNA, 25 bp, Homo sapien
taaagggggttgatccagtatttca

SEQ ID NO: 4924248 - DNA, 25 bp, Homo sapien
ggtgcttccatagcactaaactcaa

SEQ ID NO: 4924249 - DNA, 25 bp, Homo sapien
taaagagtatgtaacaggttgaccc

SEQ ID NO: 4924250 - DNA, 25 bp, Homo sapien
ctgcatggcgaatcccagtactgct

SEQ ID NO: 4924251 - DNA, 25 bp, Homo sapien
tctgcatggcgaatcccagtactgc

SEQ ID NO: 4924252 - DNA, 25 bp, Homo sapien
ttctgcatggcgaatcccagtactg

SEQ ID NO: 4924253 - DNA, 25 bp, Homo sapien
actgtattgaagagatcgtcagcca

SEQ ID NO: 4924254 - DNA, 25 bp, Homo sapien
aactgtattgaagagatcgtcagcc

SEQ ID NO: 4924255 - DNA, 25 bp, Homo sapien
aaactgtattgaagagatcgtcagc

SEQ ID NO: 4924256 - DNA, 25 bp, Homo sapien
acttcgtgaatcatcagtcagtacc

SEQ ID NO: 4924257 - DNA, 25 bp, Homo sapien
cgtgaatcatcagtcagtaccctaa

SEQ ID NO: 4924258 - DNA, 25 bp, Homo sapien
aaaatgatacttcgtgaatcatcag

SEQ ID NO: 4924259 - DNA, 25 bp, Homo sapien
tgatacttcgtgaatcatcagtcag

SEQ ID NO: 4924260 - DNA, 25 bp, Homo sapien
ttgtgaggatgcttcagcctgatcc

SEQ ID NO: 4924261 - DNA, 25 bp, Homo sapien
ttttcagtaaagaggccatcatagg

SEQ ID NO: 4924262 - DNA, 25 bp, Homo sapien
gcaacggagcttccggctgtcgtcc

SEQ ID NO: 4924263 - DNA, 25 bp, Homo sapien
tgtaatcagccaaaacactctaggg

SEQ ID NO: 4924264 - DNA, 25 bp, Homo sapien
taaacgctggtcacgctttctctgt

SEQ ID NO: 4924265 - DNA, 25 bp, Homo sapien
tctcaaatacatggtgggtttcaca

SEQ ID NO: 4924266 - DNA, 25 bp, Homo sapien
ggtaactgatcctcttaaacgctgg

SEQ ID NO: 4924267 - DNA, 25 bp, Homo sapien
ttatggctgtctggaaaatgcagct

SEQ ID NO: 4924268 - DNA, 25 bp, Homo sapien
cctggagcaacggcttcctgatgct

SEQ ID NO: 4924269 - DNA, 25 bp, Homo sapien
ctggagcaacggcttcctgatgctt

SEQ ID NO: 4924270 - DNA, 25 bp, Homo sapien
ctttctgagcatgggcgctgtgccc

SEQ ID NO: 4924271 - DNA, 25 bp, Homo sapien
aaagtcccaactcgctctccttcac

SEQ ID NO: 4924272 - DNA, 25 bp, Homo sapien
acgatcctgcctcaaagtcccaact

SEQ ID NO: 4924273 - DNA, 25 bp, Homo sapien
ttcacccacgaatccatccctagaa

SEQ ID NO: 4924274 - DNA, 25 bp, Homo sapien
tggagaagccgggcttggctggaag

SEQ ID NO: 4924275 - DNA, 25 bp, Homo sapien
tgtggagtgagacagagctgaaatg

SEQ ID NO: 4924276 - DNA, 25 bp, Homo sapien
gtggagtgagacagagctgaaatgg

SEQ ID NO: 4924277 - DNA, 25 bp, Homo sapien
tggagtgagacagagctgaaatgga

SEQ ID NO: 4924278 - DNA, 25 bp, Homo sapien
tggctgacatggtccagaagattct

SEQ ID NO: 4924279 - DNA, 25 bp, Homo sapien
ggttgtactttccaggagagcctcc

SEQ ID NO: 4924280 - DNA, 25 bp, Homo sapien
gttagcaggcgaatctctgggtcag

SEQ ID NO: 4924281 - DNA, 25 bp, Homo sapien
tgaagcagacatttaggcgatggcc

SEQ ID NO: 4924282 - DNA, 25 bp, Homo sapien
ttaagagaatcaagcacgtaggtgc

SEQ ID NO: 4924283 - DNA, 25 bp, Homo sapien
gactgctggacacacttcacaactg

SEQ ID NO: 4924284 - DNA, 25 bp, Homo sapien
cagaaagcttgccacttgagagagc

SEQ ID NO: 4924285 - DNA, 25 bp, Homo sapien
gcagatctcatgacagtttccctaa

SEQ ID NO: 4924286 - DNA, 25 bp, Homo sapien
aggtctgagagtctgttcttaattt

SEQ ID NO: 4924287 - DNA, 25 bp, Homo sapien
tgaatgcaaagggaaggcaggtctg

SEQ ID NO: 4924288 - DNA, 25 bp, Homo sapien
gaatgcaaagggaaggcaggtctga

SEQ ID NO: 4924289 - DNA, 25 bp, Homo sapien
tctgagagtctgttcttaattttcc

SEQ ID NO: 4924290 - DNA, 25 bp, Homo sapien
gacctgatcacggaggacctggaga

SEQ ID NO: 4924291 - DNA, 25 bp, Homo sapien
tttctcaaccagtgtcccgacaggg

SEQ ID NO: 4924292 - DNA, 25 bp, Homo sapien
tagagcccacttagttcagcccagg

SEQ ID NO: 4924293 - DNA, 25 bp, Homo sapien
tgattagccagtacgaagctcctga

SEQ ID NO: 4924294 - DNA, 25 bp, Homo sapien
ctagcatcacggaagatgtaattat

SEQ ID NO: 4924295 - DNA, 25 bp, Homo sapien
tagcatcacggaagatgtaattatt

SEQ ID NO: 4924296 - DNA, 25 bp, Homo sapien
ctattgttatgcatttcaatccctc

SEQ ID NO: 4924297 - DNA, 25 bp, Homo sapien
gttatgcatttcaatccctctgtgt

SEQ ID NO: 4924298 - DNA, 25 bp, Homo sapien
taaaatactcaatcagggctcctcc

SEQ ID NO: 4924299 - DNA, 25 bp, Homo sapien
ttcatttatcactcttcgtgtttca

SEQ ID NO: 4924300 - DNA, 25 bp, Homo sapien
ggtgtcattgtcttactctgacaca

SEQ ID NO: 4924301 - DNA, 25 bp, Homo sapien
ggattttgataaccatctggcttgg

SEQ ID NO: 4924302 - DNA, 25 bp, Homo sapien
gctgcatactcaacggaagccacct

SEQ ID NO: 4924303 - DNA, 25 bp, Homo sapien
tatgcattaatcattacttagctgc

SEQ ID NO: 4924304 - DNA, 25 bp, Homo sapien
ataaactgcaaccctggcttgtgtg

SEQ ID NO: 4924305 - DNA, 25 bp, Homo sapien
ggaataaactgcaaccctggcttgt

SEQ ID NO: 4924306 - DNA, 25 bp, Homo sapien
gaataaactgcaaccctggcttgtg

SEQ ID NO: 4924307 - DNA, 25 bp, Homo sapien
atagggagaagaaatttatgctggt

SEQ ID NO: 4924308 - DNA, 25 bp, Homo sapien
tctaagagtcgcaggcagaagctgc

SEQ ID NO: 4924309 - DNA, 25 bp, Homo sapien
tattatcattcacagggcctcatgg

SEQ ID NO: 4924310 - DNA, 25 bp, Homo sapien
cttaggagctagcttcagaagtcac

SEQ ID NO: 4924311 - DNA, 25 bp, Homo sapien
tagagtgtctcaaatggtggcagtc

SEQ ID NO: 4924312 - DNA, 25 bp, Homo sapien
cataattttattaccatgctaatat

SEQ ID NO: 4924313 - DNA, 25 bp, Homo sapien
cttgttatctataaacttataacaa

SEQ ID NO: 4924314 - DNA, 25 bp, Homo sapien
ttattaccatgctaatataactttt

SEQ ID NO: 4924315 - DNA, 25 bp, Homo sapien
gttatctataaacttataacaaatc

SEQ ID NO: 4924316 - DNA, 25 bp, Homo sapien
gaactctgaagcaagtttgcctgct

SEQ ID NO: 4924317 - DNA, 25 bp, Homo sapien
gctcatgggtttcctaaggctgcag

SEQ ID NO: 4924318 - DNA, 25 bp, Homo sapien
tattgagccctctctctatagctgt

SEQ ID NO: 4924319 - DNA, 25 bp, Homo sapien
gctgtcttagcaaagaacccaaggg

SEQ ID NO: 4924320 - DNA, 25 bp, Homo sapien
cgtatcttcaatcctgtgatctcag

SEQ ID NO: 4924321 - DNA, 25 bp, Homo sapien
aacagcatgactctggtcgtatctt

SEQ ID NO: 4924322 - DNA, 25 bp, Homo sapien
ctatatcgcaagacaacagacacac

SEQ ID NO: 4924323 - DNA, 25 bp, Homo sapien
tcatcactactcagccagtctcttt

SEQ ID NO: 4924324 - DNA, 25 bp, Homo sapien
tttctggtgcttgcaggagatctct

SEQ ID NO: 4924325 - DNA, 25 bp, Homo sapien
ttttggtggtgagctttctggtgct

SEQ ID NO: 4924326 - DNA, 25 bp, Homo sapien
cagagttatggggtttgctgtgatt

SEQ ID NO: 4924327 - DNA, 25 bp, Homo sapien
taatcctcatcttccagagttatgg

SEQ ID NO: 4924328 - DNA, 25 bp, Homo sapien
ctaaactctcaaacccggaaggcag

SEQ ID NO: 4924329 - DNA, 25 bp, Homo sapien
tgcacccccagcggtccgggaggaa

SEQ ID NO: 4924330 - DNA, 25 bp, Homo sapien
tgttctgggtgctacacccaaggcg

SEQ ID NO: 4924331 - DNA, 25 bp, Homo sapien
cctgcacccccagcggtccgggagg

SEQ ID NO: 4924332 - DNA, 25 bp, Homo sapien
gatcacagccaagttagagatcaga

SEQ ID NO: 4924333 - DNA, 25 bp, Homo sapien
atcacagccaagttagagatcagaa

SEQ ID NO: 4924334 - DNA, 25 bp, Homo sapien
gctgttagaatctgagaccaacagt

SEQ ID NO: 4924335 - DNA, 25 bp, Homo sapien
ctgttagaatctgagaccaacagtt

SEQ ID NO: 4924336 - DNA, 25 bp, Homo sapien
agctgttagaatctgagaccaacag

SEQ ID NO: 4924337 - DNA, 25 bp, Homo sapien
cctccggtgcctgataaggttaaag

SEQ ID NO: 4924338 - DNA, 25 bp, Homo sapien
aatcaccagggtggaactctgactg

SEQ ID NO: 4924339 - DNA, 25 bp, Homo sapien
ttaggacatagctgtgactgaagcc

SEQ ID NO: 4924340 - DNA, 25 bp, Homo sapien
tctgtctacaaaggatgaattctgc

SEQ ID NO: 4924341 - DNA, 25 bp, Homo sapien
ttttccgatgctgactgaggtaggc

SEQ ID NO: 4924342 - DNA, 25 bp, Homo sapien
gcttttctacgtgaattttccgatg

SEQ ID NO: 4924343 - DNA, 25 bp, Homo sapien
tcatgaggaaaatccccaacgtcgg

SEQ ID NO: 4924344 - DNA, 25 bp, Homo sapien
ccaacgtcgggagactcaaaaggct

SEQ ID NO: 4924345 - DNA, 25 bp, Homo sapien
gcaattctagcttcggttctcatgg

SEQ ID NO: 4924346 - DNA, 25 bp, Homo sapien
aaatcatgggcaactcaggagtcct

SEQ ID NO: 4924347 - DNA, 25 bp, Homo sapien
cggctagaggctatggtactggaca

SEQ ID NO: 4924348 - DNA, 25 bp, Homo sapien
tgtcagtaccaaagctaagaagtct

SEQ ID NO: 4924349 - DNA, 25 bp, Homo sapien
ccaaagagacaaggatttttgccaa

SEQ ID NO: 4924350 - DNA, 25 bp, Homo sapien
ttctggtagacatcaaggtttgtga

SEQ ID NO: 4924351 - DNA, 25 bp, Homo sapien
tcatggagctaaacaaagagcctac

SEQ ID NO: 4924352 - DNA, 25 bp, Homo sapien
gctgagtcctttatgctagcaagaa

SEQ ID NO: 4924353 - DNA, 25 bp, Homo sapien
ctttcttcttgaggtaatgatgaaa

SEQ ID NO: 4924354 - DNA, 25 bp, Homo sapien
gacaaaatgtctcactgtcccacca

SEQ ID NO: 4924355 - DNA, 25 bp, Homo sapien
taggcattgtgatgtaaatagaaaa

SEQ ID NO: 4924356 - DNA, 25 bp, Homo sapien
aatgatgaaatagtacaatggcttc

SEQ ID NO: 4924357 - DNA, 25 bp, Homo sapien
tgaataaggcagacatggtacctgt

SEQ ID NO: 4924358 - DNA, 25 bp, Homo sapien
aattctagttgcaagtgatggagcc

SEQ ID NO: 4924359 - DNA, 25 bp, Homo sapien
taaaaccatagttagagtgaccatc

SEQ ID NO: 4924360 - DNA, 25 bp, Homo sapien
gagccaacggtattaattcggaaca

SEQ ID NO: 4924361 - DNA, 25 bp, Homo sapien
tttggccaatcggaggcggcgcaac

SEQ ID NO: 4924362 - DNA, 25 bp, Homo sapien
gcgcggtaggccgagatggcgctat

SEQ ID NO: 4924363 - DNA, 25 bp, Homo sapien
tatgccgcgtttggccaatcggagg

SEQ ID NO: 4924364 - DNA, 25 bp, Homo sapien
gccgagatggcgctatgccgcgttt

SEQ ID NO: 4924365 - DNA, 25 bp, Homo sapien
aggctccacgcgtctcagccagctg

SEQ ID NO: 4924366 - DNA, 25 bp, Homo sapien
gcggcgcggccccagtaaccagagt

SEQ ID NO: 4924367 - DNA, 25 bp, Homo sapien
agtaaccagagtaaccgtcgcacgc

SEQ ID NO: 4924368 - DNA, 25 bp, Homo sapien
gcgggctcggcccagacgagggacc

SEQ ID NO: 4924369 - DNA, 25 bp, Homo sapien
gcggcggctcccgacggcttcctca

SEQ ID NO: 4924370 - DNA, 25 bp, Homo sapien
gcggcggcggctcccgacggcttcc

SEQ ID NO: 4924371 - DNA, 25 bp, Homo sapien
ggcggcggctcccgacggcttcctc

SEQ ID NO: 4924372 - DNA, 25 bp, Homo sapien
cggcggctcccgacggcttcctcac

SEQ ID NO: 4924373 - DNA, 25 bp, Homo sapien
gggtcacagaaacacctcggcactg

SEQ ID NO: 4924374 - DNA, 25 bp, Homo sapien
tccagtaaacagtgtcccaggacga

SEQ ID NO: 4924375 - DNA, 25 bp, Homo sapien
ttccgcggacggagacactgtacag

SEQ ID NO: 4924376 - DNA, 25 bp, Homo sapien
caaaagatggcctcggactcaagag

SEQ ID NO: 4924377 - DNA, 25 bp, Homo sapien
tgaggtaccaagaggagcacggaga

SEQ ID NO: 4924378 - DNA, 25 bp, Homo sapien
tgctcgagtgggtttaaggttctcc

SEQ ID NO: 4924379 - DNA, 25 bp, Homo sapien
tggcaccggtcaaggcggagattat

SEQ ID NO: 4924380 - DNA, 25 bp, Homo sapien
caaggcggagattatctgctcgagt

SEQ ID NO: 4924381 - DNA, 25 bp, Homo sapien
ccaaagtgatgaagtccccgaactt

SEQ ID NO: 4924382 - DNA, 25 bp, Homo sapien
ggccaaagtgatgaagtccccgaac

SEQ ID NO: 4924383 - DNA, 25 bp, Homo sapien
aaagtgatgaagtccccgaacttct

SEQ ID NO: 4924384 - DNA, 25 bp, Homo sapien
aataggtgaaagtggcaatgcccag

SEQ ID NO: 4924385 - DNA, 25 bp, Homo sapien
gtggcgacagcggtaggagagcacc

SEQ ID NO: 4924386 - DNA, 25 bp, Homo sapien
aatatccgagaagagggcgaactgg

SEQ ID NO: 4924387 - DNA, 25 bp, Homo sapien
gagctgctccttattttctgattca

SEQ ID NO: 4924388 - DNA, 25 bp, Homo sapien
aggaacaccagcacgcacaacagga

SEQ ID NO: 4924389 - DNA, 25 bp, Homo sapien
ttttcatcatggaaagtggttgttc

SEQ ID NO: 4924390 - DNA, 25 bp, Homo sapien
ggcacaaatccaatccttacccaag

SEQ ID NO: 4924391 - DNA, 25 bp, Homo sapien
ttctaacatttcgttccatctttca

SEQ ID NO: 4924392 - DNA, 25 bp, Homo sapien
ttcataatcaaatatccaacctcca

SEQ ID NO: 4924393 - DNA, 25 bp, Homo sapien
gaaataactcataccgactcttaga

SEQ ID NO: 4924394 - DNA, 25 bp, Homo sapien
actaagaacaacagtgcacagtggc

SEQ ID NO: 4924395 - DNA, 25 bp, Homo sapien
gagagatttatgaccactaagaaca

SEQ ID NO: 4924396 - DNA, 25 bp, Homo sapien
tactctaagagatcctagtcaaaga

SEQ ID NO: 4924397 - DNA, 25 bp, Homo sapien
ctgaaatattggttccttttctgcg

SEQ ID NO: 4924398 - DNA, 25 bp, Homo sapien
cagctcccacgatgataacttctgg

SEQ ID NO: 4924399 - DNA, 25 bp, Homo sapien
tacaggcagctgttcctattaagct

SEQ ID NO: 4924400 - DNA, 25 bp, Homo sapien
agctgccaaagcagagccaagcacg

SEQ ID NO: 4924401 - DNA, 25 bp, Homo sapien
tttgagaacatgataaccacccggc

SEQ ID NO: 4924402 - DNA, 25 bp, Homo sapien
atgatgaatcttccgtgatggaaag

SEQ ID NO: 4924403 - DNA, 25 bp, Homo sapien
tctgccatagctgctttccggagac

SEQ ID NO: 4924404 - DNA, 25 bp, Homo sapien
cgtgatggaaagctcttccactctg

SEQ ID NO: 4924405 - DNA, 25 bp, Homo sapien
gctgctttccggagactcatgatga

SEQ ID NO: 4924406 - DNA, 25 bp, Homo sapien
taactgtaacacaacaccttcaata

SEQ ID NO: 4924407 - DNA, 25 bp, Homo sapien
acacaacaccttcaataaactttgc

SEQ ID NO: 4924408 - DNA, 25 bp, Homo sapien
ataactgtaacacaacaccttcaat

SEQ ID NO: 4924409 - DNA, 25 bp, Homo sapien
actgtaacacaacaccttcaataaa

SEQ ID NO: 4924410 - DNA, 25 bp, Homo sapien
tttatccttgtactgaactccccat

SEQ ID NO: 4924411 - DNA, 25 bp, Homo sapien
tatccttgtactgaactccccatca

SEQ ID NO: 4924412 - DNA, 25 bp, Homo sapien
ctttatccttgtactgaactcccca

SEQ ID NO: 4924413 - DNA, 25 bp, Homo sapien
ttatccttgtactgaactccccatc

SEQ ID NO: 4924414 - DNA, 25 bp, Homo sapien
catctgcaacaacagtcagtggagc

SEQ ID NO: 4924415 - DNA, 25 bp, Homo sapien
ccatctgcaacaacagtcagtggag

SEQ ID NO: 4924416 - DNA, 25 bp, Homo sapien
cactggatgaaatctggtagatgag

SEQ ID NO: 4924417 - DNA, 25 bp, Homo sapien
agatgagaactggactcgggttagc

SEQ ID NO: 4924418 - DNA, 25 bp, Homo sapien
ctggactcgggttagctaaaataag

SEQ ID NO: 4924419 - DNA, 25 bp, Homo sapien
acaagtactcgagtttcactggatg

SEQ ID NO: 4924420 - DNA, 25 bp, Homo sapien
tcagatgagaattgtcagtggcttc

SEQ ID NO: 4924421 - DNA, 25 bp, Homo sapien
tcagtggcttctaagaatggttctt

SEQ ID NO: 4924422 - DNA, 25 bp, Homo sapien
gaaggaagcttgctggcatggacct

SEQ ID NO: 4924423 - DNA, 25 bp, Homo sapien
ggacctcagatgagaattgtcagtg

SEQ ID NO: 4924424 - DNA, 25 bp, Homo sapien
agtcattcctccaccagtaagtgga

SEQ ID NO: 4924425 - DNA, 25 bp, Homo sapien
tatgcgtctcccaaaagaagaacac

SEQ ID NO: 4924426 - DNA, 25 bp, Homo sapien
aagtggatgcctcatattatatgcg

SEQ ID NO: 4924427 - DNA, 25 bp, Homo sapien
tcagggataccctttagcagttttc

SEQ ID NO: 4924428 - DNA, 25 bp, Homo sapien
taagtggcccatagcaatcaagtgt

SEQ ID NO: 4924429 - DNA, 25 bp, Homo sapien
ttagtacagatctccccatcagagc

SEQ ID NO: 4924430 - DNA, 25 bp, Homo sapien
caatgggttatatgacactgaagct

SEQ ID NO: 4924431 - DNA, 25 bp, Homo sapien
taagcctaagcaagatgcctaagag

SEQ ID NO: 4924432 - DNA, 25 bp, Homo sapien
tattcacgacaaaggaatgagatgt

SEQ ID NO: 4924433 - DNA, 25 bp, Homo sapien
attcacgacaaaggaatgagatgtt

SEQ ID NO: 4924434 - DNA, 25 bp, Homo sapien
ttcacgacaaaggaatgagatgttt

SEQ ID NO: 4924435 - DNA, 25 bp, Homo sapien
tatttctggacaaatcactaacttg

SEQ ID NO: 4924436 - DNA, 25 bp, Homo sapien
gctaaaaatctgcaattgagtaata

SEQ ID NO: 4924437 - DNA, 25 bp, Homo sapien
tgagtaatattcactaaaaagtgtc

SEQ ID NO: 4924438 - DNA, 25 bp, Homo sapien
ccaacttgggagttagcaaactcag

SEQ ID NO: 4924439 - DNA, 25 bp, Homo sapien
aacctactattaaactgatgtgtac

SEQ ID NO: 4924440 - DNA, 25 bp, Homo sapien
actatatatagctcactgtagtgag

SEQ ID NO: 4924441 - DNA, 25 bp, Homo sapien
cttcatatagctcactatatatagc

SEQ ID NO: 4924442 - DNA, 25 bp, Homo sapien
aagcctagtttcattaacctactat

SEQ ID NO: 4924443 - DNA, 25 bp, Homo sapien
cacacttatgtaggatgctaatgat

SEQ ID NO: 4924444 - DNA, 25 bp, Homo sapien
taatgatatatcagaaaaaatgaga

SEQ ID NO: 4924445 - DNA, 25 bp, Homo sapien
tagtcctagaatttcaacaaccagg

SEQ ID NO: 4924446 - DNA, 25 bp, Homo sapien
taacaaacgctacatcttgcagata

SEQ ID NO: 4924447 - DNA, 25 bp, Homo sapien
caacaggacccgcaacacattcgcc

SEQ ID NO: 4924448 - DNA, 25 bp, Homo sapien
aacaggacccgcaacacattcgcca

SEQ ID NO: 4924449 - DNA, 25 bp, Homo sapien
caacacattcgccaccaagtttgaa

SEQ ID NO: 4924450 - DNA, 25 bp, Homo sapien
acccgcaacacattcgccaccaagt

SEQ ID NO: 4924451 - DNA, 25 bp, Homo sapien
cattgggatactaacagataataaa

SEQ ID NO: 4924452 - DNA, 25 bp, Homo sapien
atctggcaggtttgtatcctctgtg

SEQ ID NO: 4924453 - DNA, 25 bp, Homo sapien
ttgggccaccttctcattgggatac

SEQ ID NO: 4924454 - DNA, 25 bp, Homo sapien
cagtactaaatattgcgtttcttca

SEQ ID NO: 4924455 - DNA, 25 bp, Homo sapien
tgaaatatctagatggcctggtctg

SEQ ID NO: 4924456 - DNA, 25 bp, Homo sapien
tcaagggttatagcttcctctacca

SEQ ID NO: 4924457 - DNA, 25 bp, Homo sapien
tacgctcaaaactaatactgggttg

SEQ ID NO: 4924458 - DNA, 25 bp, Homo sapien
cctttcagaaaagctagtaactcct

SEQ ID NO: 4924459 - DNA, 25 bp, Homo sapien
catattggtaagactcagaaactaa

SEQ ID NO: 4924460 - DNA, 25 bp, Homo sapien
aatacatattggtaagactcagaaa

SEQ ID NO: 4924461 - DNA, 25 bp, Homo sapien
tacatattggtaagactcagaaact

SEQ ID NO: 4924462 - DNA, 25 bp, Homo sapien
tattggtaagactcagaaactaaaa

SEQ ID NO: 4924463 - DNA, 25 bp, Homo sapien
gaggaaatattacagaacacgcttt

SEQ ID NO: 4924464 - DNA, 25 bp, Homo sapien
gaagggctcgaggttttgtaatcca

SEQ ID NO: 4924465 - DNA, 25 bp, Homo sapien
tacacggcatagattgcaacagcaa

SEQ ID NO: 4924466 - DNA, 25 bp, Homo sapien
gtacaatacagcaccactactgaga

SEQ ID NO: 4924467 - DNA, 25 bp, Homo sapien
cattcacaaatggttcccctttaag

SEQ ID NO: 4924468 - DNA, 25 bp, Homo sapien
ctttataagtggtatggtactatgc

SEQ ID NO: 4924469 - DNA, 25 bp, Homo sapien
ttgcatgtcccaacaactcatctca

SEQ ID NO: 4924470 - DNA, 25 bp, Homo sapien
tgtagttctcctcagcattagcact

SEQ ID NO: 4924471 - DNA, 25 bp, Homo sapien
ttgaagtttcttggtgtctcatcat

SEQ ID NO: 4924472 - DNA, 25 bp, Homo sapien
cttctgtaggactccttaacaaagc

SEQ ID NO: 4924473 - DNA, 25 bp, Homo sapien
tccaatcccacatgccctagggggt

SEQ ID NO: 4924474 - DNA, 25 bp, Homo sapien
cctagggggtccacagcattccttc

SEQ ID NO: 4924475 - DNA, 25 bp, Homo sapien
gtactgcctctcttaaatgctgaat

SEQ ID NO: 4924476 - DNA, 25 bp, Homo sapien
tattatgggaaacatcagacgttct

SEQ ID NO: 4924477 - DNA, 25 bp, Homo sapien
taaagaactatttgtgcaactccag

SEQ ID NO: 4924478 - DNA, 25 bp, Homo sapien
cagacgttctgagtaagatatatct

SEQ ID NO: 4924479 - DNA, 25 bp, Homo sapien
ggatgataaatcctaggactgcaaa

SEQ ID NO: 4924480 - DNA, 25 bp, Homo sapien
aaacatgctttaggcctgatcccag

SEQ ID NO: 4924481 - DNA, 25 bp, Homo sapien
aaagtaatcctgtggccctcgctga

SEQ ID NO: 4924482 - DNA, 25 bp, Homo sapien
tagtctaccaataacaactaagggc

SEQ ID NO: 4924483 - DNA, 25 bp, Homo sapien
cacaagttggaaatatcagaaggcc

SEQ ID NO: 4924484 - DNA, 25 bp, Homo sapien
ggccattgggacttaacggcttata

SEQ ID NO: 4924485 - DNA, 25 bp, Homo sapien
gcgatgggcccattcatatagttta

SEQ ID NO: 4924486 - DNA, 25 bp, Homo sapien
gacttacagtggtgttacatcccaa

SEQ ID NO: 4924487 - DNA, 25 bp, Homo sapien
catctagcaagggtcaatatatgcc

SEQ ID NO: 4924488 - DNA, 25 bp, Homo sapien
cataacacaattgcctgccaagggc

SEQ ID NO: 4924489 - DNA, 25 bp, Homo sapien
tacctcttaacgctgacacaatggc

SEQ ID NO: 4924490 - DNA, 25 bp, Homo sapien
ttggaagacgcattgaaaccgcagc

SEQ ID NO: 4924491 - DNA, 25 bp, Homo sapien
agtcatggtgttcagaaaagcaggc

SEQ ID NO: 4924492 - DNA, 25 bp, Homo sapien
caggcctagtctcattgcctcctgt

SEQ ID NO: 4924493 - DNA, 25 bp, Homo sapien
gtcttaggatgcttgtacagaacct

SEQ ID NO: 4924494 - DNA, 25 bp, Homo sapien
gacctatctgattgtgagtcacaca

SEQ ID NO: 4924495 - DNA, 25 bp, Homo sapien
aaaatcagaagctacccacagatgc

SEQ ID NO: 4924496 - DNA, 25 bp, Homo sapien
tcattccacgtccttctgaaggcaa

SEQ ID NO: 4924497 - DNA, 25 bp, Homo sapien
gaattcagtccaaaccagccacaaa

SEQ ID NO: 4924498 - DNA, 25 bp, Homo sapien
tttattagcacaagggttaagctgt

SEQ ID NO: 4924499 - DNA, 25 bp, Homo sapien
tctccagttgcccttcgccttctac

SEQ ID NO: 4924500 - DNA, 25 bp, Homo sapien
tgtaagtctttctcgcttccttctc

SEQ ID NO: 4924501 - DNA, 25 bp, Homo sapien
cctgctatctgcactggctgtagga

SEQ ID NO: 4924502 - DNA, 25 bp, Homo sapien
gccttctaccatctgctcacccctg

SEQ ID NO: 4924503 - DNA, 25 bp, Homo sapien
gatctctgtcgttatcccagactga

SEQ ID NO: 4924504 - DNA, 25 bp, Homo sapien
cacattgttgccctgtcatggtatc

SEQ ID NO: 4924505 - DNA, 25 bp, Homo sapien
cagactgaagcttccccgaatgtgt

SEQ ID NO: 4924506 - DNA, 25 bp, Homo sapien
gagagtagagtaaagggcaagtaat

SEQ ID NO: 4924507 - DNA, 25 bp, Homo sapien
ctcttagctgcaacttgattaggca

SEQ ID NO: 4924508 - DNA, 25 bp, Homo sapien
tcttagctgcaacttgattaggcat

SEQ ID NO: 4924509 - DNA, 25 bp, Homo sapien
tggggatggagtgagcgcgccccat

SEQ ID NO: 4924510 - DNA, 25 bp, Homo sapien
gtggaaactgggtgccggctccgcg

SEQ ID NO: 4924511 - DNA, 25 bp, Homo sapien
acctccggccctgcgcgtgcgccgt

SEQ ID NO: 4924512 - DNA, 25 bp, Homo sapien
actgcggatagaagaggaccgccgc

SEQ ID NO: 4924513 - DNA, 25 bp, Homo sapien
ctggggagtcaggggcggaagtcgg

SEQ ID NO: 4924514 - DNA, 25 bp, Homo sapien
cgctgaaaagtgagagcgggctctt

SEQ ID NO: 4924515 - DNA, 25 bp, Homo sapien
cgtcgccggcgagtggtcacatgat

SEQ ID NO: 4924516 - DNA, 25 bp, Homo sapien
gagagcgggctcttgcgtcatcagc

SEQ ID NO: 4924517 - DNA, 25 bp, Homo sapien
tgctcccagccgcttcggtcatgtg

SEQ ID NO: 4924518 - DNA, 25 bp, Homo sapien
tggtagtccaagctgtctccgtctg

SEQ ID NO: 4924519 - DNA, 25 bp, Homo sapien
ctggtagtccaagctgtctccgtct

SEQ ID NO: 4924520 - DNA, 25 bp, Homo sapien
ggaaaacacgatcatgctcttctgt

SEQ ID NO: 4924521 - DNA, 25 bp, Homo sapien
gaccaaggaaaacacgatcatgctc

SEQ ID NO: 4924522 - DNA, 25 bp, Homo sapien
ctttagtgaaacttcacttttgcag

SEQ ID NO: 4924523 - DNA, 25 bp, Homo sapien
tactttagtgaaacttcacttttgc

SEQ ID NO: 4924524 - DNA, 25 bp, Homo sapien
ctgtgaagaagtcaacaatagcaca

SEQ ID NO: 4924525 - DNA, 25 bp, Homo sapien
gaagtcaacaatagcacagttctta

SEQ ID NO: 4924526 - DNA, 25 bp, Homo sapien
gaagaagtcaacaatagcacagttc

SEQ ID NO: 4924527 - DNA, 25 bp, Homo sapien
caacaatagcacagttcttaaaagc

SEQ ID NO: 4924528 - DNA, 25 bp, Homo sapien
agagagattaccctcttccaaaaga

SEQ ID NO: 4924529 - DNA, 25 bp, Homo sapien
cagctggactcaatatatggggaag

SEQ ID NO: 4924530 - DNA, 25 bp, Homo sapien
gagattaccctcttccaaaagagtg

SEQ ID NO: 4924531 - DNA, 25 bp, Homo sapien
taccctcttccaaaagagtgcttga

SEQ ID NO: 4924532 - DNA, 25 bp, Homo sapien
aaacaagattcgtaagtcagaataa

SEQ ID NO: 4924533 - DNA, 25 bp, Homo sapien
acaatgaaacaagattcgtaagtca

SEQ ID NO: 4924534 - DNA, 25 bp, Homo sapien
caagattcgtaagtcagaataataa

SEQ ID NO: 4924535 - DNA, 25 bp, Homo sapien
aatgaaacaagattcgtaagtcaga

SEQ ID NO: 4924536 - DNA, 25 bp, Homo sapien
tgaaaccagttgaacctgaatttga

SEQ ID NO: 4924537 - DNA, 25 bp, Homo sapien
gaacctgaatttgaactggaacgtc

SEQ ID NO: 4924538 - DNA, 25 bp, Homo sapien
cctgaatttgaactggaacgtcctg

SEQ ID NO: 4924539 - DNA, 25 bp, Homo sapien
gaatttgaactggaacgtcctggca

SEQ ID NO: 4924540 - DNA, 25 bp, Homo sapien
gaagctgtgtccataccagagttga

SEQ ID NO: 4924541 - DNA, 25 bp, Homo sapien
gcaacactagaagctgtgtccatac

SEQ ID NO: 4924542 - DNA, 25 bp, Homo sapien
tccataccagagttgatacaggctt

SEQ ID NO: 4924543 - DNA, 25 bp, Homo sapien
gatacaggcttggaagtttttcaag

SEQ ID NO: 4924544 - DNA, 25 bp, Homo sapien
gacagaaaccacatggcctacagag

SEQ ID NO: 4924545 - DNA, 25 bp, Homo sapien
gaggccacccactaaaaagattatg

SEQ ID NO: 4924546 - DNA, 25 bp, Homo sapien
tgacacctgctgttagccgtaaatg

SEQ ID NO: 4924547 - DNA, 25 bp, Homo sapien
caactttggctttagagcatgaacc

SEQ ID NO: 4924548 - DNA, 25 bp, Homo sapien
aaaattacttaatgacaatctgcgg

SEQ ID NO: 4924549 - DNA, 25 bp, Homo sapien
taaactctatgaagggaagaactac

SEQ ID NO: 4924550 - DNA, 25 bp, Homo sapien
ttcccactaagatggtaaactctat

SEQ ID NO: 4924551 - DNA, 25 bp, Homo sapien
ggtgactctgtgtctgtctaagttg

SEQ ID NO: 4924552 - DNA, 25 bp, Homo sapien
caggttttcgtcatgttagccaggc

SEQ ID NO: 4924553 - DNA, 25 bp, Homo sapien
acagcacccggccaaaatgaaagtt

SEQ ID NO: 4924554 - DNA, 25 bp, Homo sapien
ccacagcacccggccaaaatgaaag

SEQ ID NO: 4924555 - DNA, 25 bp, Homo sapien
agcacccggccaaaatgaaagttgt

SEQ ID NO: 4924556 - DNA, 25 bp, Homo sapien
atcaatcactggtaaatgaaactga

SEQ ID NO: 4924557 - DNA, 25 bp, Homo sapien
gtgaaaggatctgcatcaatcactg

SEQ ID NO: 4924558 - DNA, 25 bp, Homo sapien
gcatcaatcactggtaaatgaaact

SEQ ID NO: 4924559 - DNA, 25 bp, Homo sapien
ttgtgaaaggatctgcatcaatcac

SEQ ID NO: 4924560 - DNA, 25 bp, Homo sapien
aagttctcctccaaactaggttcat

SEQ ID NO: 4924561 - DNA, 25 bp, Homo sapien
taggttcataactcccacccacaga

SEQ ID NO: 4924562 - DNA, 25 bp, Homo sapien
aagaagcacatctgtttggagcttg

SEQ ID NO: 4924563 - DNA, 25 bp, Homo sapien
agcacatctgtttggagcttgcccc

SEQ ID NO: 4924564 - DNA, 25 bp, Homo sapien
agactggaacacgaagccccaactt

SEQ ID NO: 4924565 - DNA, 25 bp, Homo sapien
caaacttctctagaccacggatgag

SEQ ID NO: 4924566 - DNA, 25 bp, Homo sapien
taaacacacctgagtctaggagaac

SEQ ID NO: 4924567 - DNA, 25 bp, Homo sapien
tgagtagtgcaacacagactggaac

SEQ ID NO: 4924568 - DNA, 25 bp, Homo sapien
tgaaaaccttatgctaagaaaacag

SEQ ID NO: 4924569 - DNA, 25 bp, Homo sapien
aaaccttatgctaagaaaacagcca

SEQ ID NO: 4924570 - DNA, 25 bp, Homo sapien
ttgaaaaccttatgctaagaaaaca

SEQ ID NO: 4924571 - DNA, 25 bp, Homo sapien
aaccttatgctaagaaaacagccag

SEQ ID NO: 4924572 - DNA, 25 bp, Homo sapien
tccagcagcaaataggactttcgtg

SEQ ID NO: 4924573 - DNA, 25 bp, Homo sapien
gctgaagctataatacgtggtggta

SEQ ID NO: 4924574 - DNA, 25 bp, Homo sapien
caggtgctgggacactattcctcat

SEQ ID NO: 4924575 - DNA, 25 bp, Homo sapien
ggcccaacctgaagttaacatgcag

SEQ ID NO: 4924576 - DNA, 25 bp, Homo sapien
agagctagcagatagcagaacttgc

SEQ ID NO: 4924577 - DNA, 25 bp, Homo sapien
agctagcagatagcagaacttgcat

SEQ ID NO: 4924578 - DNA, 25 bp, Homo sapien
gagctagcagatagcagaacttgca

SEQ ID NO: 4924579 - DNA, 25 bp, Homo sapien
gctagcagatagcagaacttgcatt

SEQ ID NO: 4924580 - DNA, 25 bp, Homo sapien
gacttgcactagctttgatatgacg

SEQ ID NO: 4924581 - DNA, 25 bp, Homo sapien
gatatgacgtgatgagaagggccct

SEQ ID NO: 4924582 - DNA, 25 bp, Homo sapien
aggttgacattactggtcatgttga

SEQ ID NO: 4924583 - DNA, 25 bp, Homo sapien
ttgacaaacactactagggccaggt

SEQ ID NO: 4924584 - DNA, 25 bp, Homo sapien
ctctttgttgagtgaagtaaactac

SEQ ID NO: 4924585 - DNA, 25 bp, Homo sapien
aactacttctataatgggaataagc

SEQ ID NO: 4924586 - DNA, 25 bp, Homo sapien
tgggaataagcacccactagtgtat

SEQ ID NO: 4924587 - DNA, 25 bp, Homo sapien
cacccactagtgtatctgtgtttgg

SEQ ID NO: 4924588 - DNA, 25 bp, Homo sapien
tttcctactgagtggcaaaccctgg

SEQ ID NO: 4924589 - DNA, 25 bp, Homo sapien
taattatgcaatctaagcagtcaca

SEQ ID NO: 4924590 - DNA, 25 bp, Homo sapien
aaagtctctaaatgggtgaagttgg

SEQ ID NO: 4924591 - DNA, 25 bp, Homo sapien
tggcctgcgtatgattttcctaaag

SEQ ID NO: 4924592 - DNA, 25 bp, Homo sapien
tgctgtaagagcaaccaagtcactc

SEQ ID NO: 4924593 - DNA, 25 bp, Homo sapien
gatgaaagcagctccagactgacta

SEQ ID NO: 4924594 - DNA, 25 bp, Homo sapien
ttgtactaggccaagagcaccggca

SEQ ID NO: 4924595 - DNA, 25 bp, Homo sapien
tgactaccaggcagcaaatgaagag

SEQ ID NO: 4924596 - DNA, 25 bp, Homo sapien
tgccttgtccatactatattcacta

SEQ ID NO: 4924597 - DNA, 25 bp, Homo sapien
catactatattcactactcacttca

SEQ ID NO: 4924598 - DNA, 25 bp, Homo sapien
gtccatactatattcactactcact

SEQ ID NO: 4924599 - DNA, 25 bp, Homo sapien
ttgtccatactatattcactactca

SEQ ID NO: 4924600 - DNA, 25 bp, Homo sapien
tgatttattgtagattgaacagcct

SEQ ID NO: 4924601 - DNA, 25 bp, Homo sapien
tgccgatccaatgtagcaaattcaa

SEQ ID NO: 4924602 - DNA, 25 bp, Homo sapien
gattgaacagcctttacataatggt

SEQ ID NO: 4924603 - DNA, 25 bp, Homo sapien
tacataatggtttagttgccgatcc

SEQ ID NO: 4924604 - DNA, 25 bp, Homo sapien
cttaactgccttatgtgttgttcct

SEQ ID NO: 4924605 - DNA, 25 bp, Homo sapien
ttaactgccttatgtgttgttcctg

SEQ ID NO: 4924606 - DNA, 25 bp, Homo sapien
tttcaaaaggagcataatctttaga

SEQ ID NO: 4924607 - DNA, 25 bp, Homo sapien
tctgaggttccaaagaaaacttcca

SEQ ID NO: 4924608 - DNA, 25 bp, Homo sapien
cttttcaaaaggagcataatcttta

SEQ ID NO: 4924609 - DNA, 25 bp, Homo sapien
caaaaggagcataatctttagaatt

SEQ ID NO: 4924610 - DNA, 25 bp, Homo sapien
ttcccagggattgttggtaagttga

SEQ ID NO: 4924611 - DNA, 25 bp, Homo sapien
cagggattgttggtaagttgaccca

SEQ ID NO: 4924612 - DNA, 25 bp, Homo sapien
tcccagggattgttggtaagttgac

SEQ ID NO: 4924613 - DNA, 25 bp, Homo sapien
ggattgttggtaagttgacccatac

SEQ ID NO: 4924614 - DNA, 25 bp, Homo sapien
ttttgctaaactctgagactatact

SEQ ID NO: 4924615 - DNA, 25 bp, Homo sapien
aaagctgaagtataatgtgactctc

SEQ ID NO: 4924616 - DNA, 25 bp, Homo sapien
gagactatactggtcaccaaaaaca

SEQ ID NO: 4924617 - DNA, 25 bp, Homo sapien
aactctgagactatactggtcacca

SEQ ID NO: 4924618 - DNA, 25 bp, Homo sapien
catgtggaactgagaaaacttcccc

SEQ ID NO: 4924619 - DNA, 25 bp, Homo sapien
ctcctcaaagacatcacagcatgtg

SEQ ID NO: 4924620 - DNA, 25 bp, Homo sapien
gacatcacagcatgtggaactgaga

SEQ ID NO: 4924621 - DNA, 25 bp, Homo sapien
gaaaacttcccccaatgcttgcatt

SEQ ID NO: 4924622 - DNA, 25 bp, Homo sapien
catcaggccttcataatcgctccct

SEQ ID NO: 4924623 - DNA, 25 bp, Homo sapien
aggccttcataatcgctccctttca

SEQ ID NO: 4924624 - DNA, 25 bp, Homo sapien
ggccttcataatcgctccctttcat

SEQ ID NO: 4924625 - DNA, 25 bp, Homo sapien
tcaggccttcataatcgctcccttt

SEQ ID NO: 4924626 - DNA, 25 bp, Homo sapien
ctctcaacgggctcttttctcaaga

SEQ ID NO: 4924627 - DNA, 25 bp, Homo sapien
cttttctcaagaacctttacacagg

SEQ ID NO: 4924628 - DNA, 25 bp, Homo sapien
caaactttcctctcaacgggctctt

SEQ ID NO: 4924629 - DNA, 25 bp, Homo sapien
ttcacaacaaactttcctctcaacg

SEQ ID NO: 4924630 - DNA, 25 bp, Homo sapien
cctggttctgttcaaggctaaattc

SEQ ID NO: 4924631 - DNA, 25 bp, Homo sapien
cttgaccttccataatgtcctgcca

SEQ ID NO: 4924632 - DNA, 25 bp, Homo sapien
gaccttccataatgtcctgccatgc

SEQ ID NO: 4924633 - DNA, 25 bp, Homo sapien
tgccaaggaataagtgccccctggt

SEQ ID NO: 4924634 - DNA, 25 bp, Homo sapien
gctctgtaaagccaaaaatttcttc

SEQ ID NO: 4924635 - DNA, 25 bp, Homo sapien
tcagctgttgtttaaactgtacaaa

SEQ ID NO: 4924636 - DNA, 25 bp, Homo sapien
gcatcagaattcttgctctgtaaag

SEQ ID NO: 4924637 - DNA, 25 bp, Homo sapien
atctggtattttttctggacgttct

SEQ ID NO: 4924638 - DNA, 25 bp, Homo sapien
tgagcaggctgatttgaaccaaaaa

SEQ ID NO: 4924639 - DNA, 25 bp, Homo sapien
tgaggatcaagccaagcagataagc

SEQ ID NO: 4924640 - DNA, 25 bp, Homo sapien
caatacacataactagctgctggga

SEQ ID NO: 4924641 - DNA, 25 bp, Homo sapien
taaaacgcaacttagaatgaggatc

SEQ ID NO: 4924642 - DNA, 25 bp, Homo sapien
gccacagtttatgagtactggctcc

SEQ ID NO: 4924643 - DNA, 25 bp, Homo sapien
gctacttagaccaacaccaaaactg

SEQ ID NO: 4924644 - DNA, 25 bp, Homo sapien
aaactcaggaattgtgattggatgc

SEQ ID NO: 4924645 - DNA, 25 bp, Homo sapien
gattggatgctaagtctgccacagt

SEQ ID NO: 4924646 - DNA, 25 bp, Homo sapien
cataagctctcaggatgcaatccag

SEQ ID NO: 4924647 - DNA, 25 bp, Homo sapien
agcatctcccaacaattattcagca

SEQ ID NO: 4924648 - DNA, 25 bp, Homo sapien
gctctcaggatgcaatccagcctga

SEQ ID NO: 4924649 - DNA, 25 bp, Homo sapien
tgcaatccagcctgaaaaagtccat

SEQ ID NO: 4924650 - DNA, 25 bp, Homo sapien
taaatgtagaagatatgctaataga

SEQ ID NO: 4924651 - DNA, 25 bp, Homo sapien
tgtagaagatatgctaatagacaaa

SEQ ID NO: 4924652 - DNA, 25 bp, Homo sapien
gaagatatgctaatagacaaacatg

SEQ ID NO: 4924653 - DNA, 25 bp, Homo sapien
tagaagatatgctaatagacaaaca

SEQ ID NO: 4924654 - DNA, 25 bp, Homo sapien
gatgggtgagcacctccgctgtaaa

SEQ ID NO: 4924655 - DNA, 25 bp, Homo sapien
gaaaattcagtcttactctcccagt

SEQ ID NO: 4924656 - DNA, 25 bp, Homo sapien
agttgatattgacgcctagggatgg

SEQ ID NO: 4924657 - DNA, 25 bp, Homo sapien
caaactttgggttacaggagaatca

SEQ ID NO: 4924658 - DNA, 25 bp, Homo sapien
attataaaccactgctcaatgaaat

SEQ ID NO: 4924659 - DNA, 25 bp, Homo sapien
gggcctcttcaaggagaattataaa

SEQ ID NO: 4924660 - DNA, 25 bp, Homo sapien
ggcctcttcaaggagaattataaac

SEQ ID NO: 4924661 - DNA, 25 bp, Homo sapien
gaagggcctcttcaaggagaattat

SEQ ID NO: 4924662 - DNA, 25 bp, Homo sapien
ggcccacagagtacatagtgatagc

SEQ ID NO: 4924663 - DNA, 25 bp, Homo sapien
ttttcatcagagcataggaaggttc

SEQ ID NO: 4924664 - DNA, 25 bp, Homo sapien
gaatccctactgtattaaaggccca

SEQ ID NO: 4924665 - DNA, 25 bp, Homo sapien
gatagctgcagctccatttcatttg

SEQ ID NO: 4924666 - DNA, 25 bp, Homo sapien
aattgctagctttgggatgaactga

SEQ ID NO: 4924667 - DNA, 25 bp, Homo sapien
caaagccaaatagtcacgagccaaa

SEQ ID NO: 4924668 - DNA, 25 bp, Homo sapien
ggagcagggatcagctgtcacagct

SEQ ID NO: 4924669 - DNA, 25 bp, Homo sapien
acattctaggcgcagaagctcccag

SEQ ID NO: 4924670 - DNA, 25 bp, Homo sapien
ccccatgaagatctacagggcattt

SEQ ID NO: 4924671 - DNA, 25 bp, Homo sapien
ggcattttccaatggcacgattcat

SEQ ID NO: 4924672 - DNA, 25 bp, Homo sapien
tagtttcctgtacgctgctggctac

SEQ ID NO: 4924673 - DNA, 25 bp, Homo sapien
gggaaaatctcacaacagagaataa

SEQ ID NO: 4924674 - DNA, 25 bp, Homo sapien
cacacccagctaagtttgtattttt

SEQ ID NO: 4924675 - DNA, 25 bp, Homo sapien
tagtagaaagcgggtttctccatgt

SEQ ID NO: 4924676 - DNA, 25 bp, Homo sapien
acaggcatgagccatcgcgcccgga

SEQ ID NO: 4924677 - DNA, 25 bp, Homo sapien
aggcatgagccatcgcgcccggacc

SEQ ID NO: 4924678 - DNA, 25 bp, Homo sapien
tatgaagatctctagacctctagga

SEQ ID NO: 4924679 - DNA, 25 bp, Homo sapien
tgagaaagcctagcacaagcataat

SEQ ID NO: 4924680 - DNA, 25 bp, Homo sapien
caaaacacatgcctcctagggaaca

SEQ ID NO: 4924681 - DNA, 25 bp, Homo sapien
taggactccctgaaaattacagtgg

SEQ ID NO: 4924682 - DNA, 25 bp, Homo sapien
caagtcaagtctggaaaacagccac

SEQ ID NO: 4924683 - DNA, 25 bp, Homo sapien
gcctaatcgaagactcatgctctga

SEQ ID NO: 4924684 - DNA, 25 bp, Homo sapien
tatagtggaaaaggctgggtcagca

SEQ ID NO: 4924685 - DNA, 25 bp, Homo sapien
taacaggactgagcacagtgacagt

SEQ ID NO: 4924686 - DNA, 25 bp, Homo sapien
tctctgacagagttacatgttctaa

SEQ ID NO: 4924687 - DNA, 25 bp, Homo sapien
tactttcaatgaagtcaagcagaga

SEQ ID NO: 4924688 - DNA, 25 bp, Homo sapien
cagctgaaactaaacctcatttgaa

SEQ ID NO: 4924689 - DNA, 25 bp, Homo sapien
gaaattatactgttaggcaactcca

SEQ ID NO: 4924690 - DNA, 25 bp, Homo sapien
ggactggttctgtctcttataagct

SEQ ID NO: 4924691 - DNA, 25 bp, Homo sapien
gctttgtaacttagagggaatcact

SEQ ID NO: 4924692 - DNA, 25 bp, Homo sapien
tatagtgaaaaaaggaatggacttc

SEQ ID NO: 4924693 - DNA, 25 bp, Homo sapien
cttagagggaatcactcaggctttc

SEQ ID NO: 4924694 - DNA, 25 bp, Homo sapien
ccttttactatgacctgcagcaaga

SEQ ID NO: 4924695 - DNA, 25 bp, Homo sapien
ggcagacctgtcttaagtgttaaaa

SEQ ID NO: 4924696 - DNA, 25 bp, Homo sapien
gatgtcatccatgctacagttaagt

SEQ ID NO: 4924697 - DNA, 25 bp, Homo sapien
aactgataactacctgatgatgtca

SEQ ID NO: 4924698 - DNA, 25 bp, Homo sapien
tactgtgagatacagtgggtgatat

SEQ ID NO: 4924699 - DNA, 25 bp, Homo sapien
tgatactgtgagatacagtgggtga

SEQ ID NO: 4924700 - DNA, 25 bp, Homo sapien
gttcatcatctcaactgatgttcaa

SEQ ID NO: 4924701 - DNA, 25 bp, Homo sapien
tcaactgatgttcaagatgatactg

SEQ ID NO: 4924702 - DNA, 25 bp, Homo sapien
tgtgcacagtgcttacagaaagtac

SEQ ID NO: 4924703 - DNA, 25 bp, Homo sapien
gcaattgcgtaactaagcctccaga

SEQ ID NO: 4924704 - DNA, 25 bp, Homo sapien
gatcccagaatgtagcttaaagcag

SEQ ID NO: 4924705 - DNA, 25 bp, Homo sapien
gaagatgacagagccggcaattgcg

SEQ ID NO: 4924706 - DNA, 25 bp, Homo sapien
atgcccggtcagagatttttctaaa

SEQ ID NO: 4924707 - DNA, 25 bp, Homo sapien
actggtggaatggtgatgtctctga

SEQ ID NO: 4924708 - DNA, 25 bp, Homo sapien
tagaaagtgacagcggaaaaagtga

SEQ ID NO: 4924709 - DNA, 25 bp, Homo sapien
ggagttatgacaatcttatcacgag

SEQ ID NO: 4924710 - DNA, 25 bp, Homo sapien
aaatgggctctgtaggactggcagt

SEQ ID NO: 4924711 - DNA, 25 bp, Homo sapien
acttgaaatgggctctgtaggactg

SEQ ID NO: 4924712 - DNA, 25 bp, Homo sapien
gctctgtaggactggcagtgtttaa

SEQ ID NO: 4924713 - DNA, 25 bp, Homo sapien
gccaggacttgaaatgggctctgta

SEQ ID NO: 4924714 - DNA, 25 bp, Homo sapien
ccttagggattagaaggcaagcatc

SEQ ID NO: 4924715 - DNA, 25 bp, Homo sapien
aattatcccgtacagctaccaccag

SEQ ID NO: 4924716 - DNA, 25 bp, Homo sapien
taacctctcgtgtacacaggtgtgg

SEQ ID NO: 4924717 - DNA, 25 bp, Homo sapien
taagcgcaaaaagtttcagttctcc

SEQ ID NO: 4924718 - DNA, 25 bp, Homo sapien
ggactgaatgcttgcctcaatctgg

SEQ ID NO: 4924719 - DNA, 25 bp, Homo sapien
gggtaatttcatgtccctgctgcct

SEQ ID NO: 4924720 - DNA, 25 bp, Homo sapien
cagtgctttgttaggaaccgtaaca

SEQ ID NO: 4924721 - DNA, 25 bp, Homo sapien
taagatgtcaatgccctcgattagg

SEQ ID NO: 4924722 - DNA, 25 bp, Homo sapien
ccttcttggcaagggattgctgtta

SEQ ID NO: 4924723 - DNA, 25 bp, Homo sapien
cttaagagttataatggatttgccc

SEQ ID NO: 4924724 - DNA, 25 bp, Homo sapien
gaaatatggtttcagttccgttata

SEQ ID NO: 4924725 - DNA, 25 bp, Homo sapien
tagataagctgaacatgtcacagag

SEQ ID NO: 4924726 - DNA, 25 bp, Homo sapien
catctaaataatcaggaatgggctg

SEQ ID NO: 4924727 - DNA, 25 bp, Homo sapien
tgatcttacatccagagtggctcag

SEQ ID NO: 4924728 - DNA, 25 bp, Homo sapien
caaatgggatgaaaactggatcctc

SEQ ID NO: 4924729 - DNA, 25 bp, Homo sapien
ttatttgaataacaattcggcccca

SEQ ID NO: 4924730 - DNA, 25 bp, Homo sapien
tctcagtgccctgcatagtttctgg

SEQ ID NO: 4924731 - DNA, 25 bp, Homo sapien
aacatagcactacttcttcagagaa

SEQ ID NO: 4924732 - DNA, 25 bp, Homo sapien
ttcctgatgccctaaagctgactta

SEQ ID NO: 4924733 - DNA, 25 bp, Homo sapien
tccacattgcttacccagatagagt

SEQ ID NO: 4924734 - DNA, 25 bp, Homo sapien
taacaacatagggtagtcactgcat

SEQ ID NO: 4924735 - DNA, 25 bp, Homo sapien
gatgtacctttggatcatatagtgg

SEQ ID NO: 4924736 - DNA, 25 bp, Homo sapien
taaaagccaattcgaatccttgtct

SEQ ID NO: 4924737 - DNA, 25 bp, Homo sapien
tctaattcaacagtagcaccccaaa

SEQ ID NO: 4924738 - DNA, 25 bp, Homo sapien
tttttgctgactatactctcctggg

SEQ ID NO: 4924739 - DNA, 25 bp, Homo sapien
tccaggtcttatggtggcagtataa

SEQ ID NO: 4924740 - DNA, 25 bp, Homo sapien
tctcttaaaagttcgtgttcccaga

SEQ ID NO: 4924741 - DNA, 25 bp, Homo sapien
tgtctaagacataacgggcatccaa

SEQ ID NO: 4924742 - DNA, 25 bp, Homo sapien
tattggcaggcagttacagagctca

SEQ ID NO: 4924743 - DNA, 25 bp, Homo sapien
caattagcaagaggattaaggctca

SEQ ID NO: 4924744 - DNA, 25 bp, Homo sapien
ggcagagtcccacttgctaatgaga

SEQ ID NO: 4924745 - DNA, 25 bp, Homo sapien
cagtctcagtcatttgcaccaagga

SEQ ID NO: 4924746 - DNA, 25 bp, Homo sapien
taatttaggcctcattgtccttgcc

SEQ ID NO: 4924747 - DNA, 25 bp, Homo sapien
cccactgctgatagaaggatttgtc

SEQ ID NO: 4924748 - DNA, 25 bp, Homo sapien
cacatccggccagttagtattcttt

SEQ ID NO: 4924749 - DNA, 25 bp, Homo sapien
tgctgcaacggccatctgactggtc

SEQ ID NO: 4924750 - DNA, 25 bp, Homo sapien
tcatcctcttactcctctgtgtttt

SEQ ID NO: 4924751 - DNA, 25 bp, Homo sapien
ttttcttatctgtggcttttctcat

SEQ ID NO: 4924752 - DNA, 25 bp, Homo sapien
tctccattaccctcatcctcttact

SEQ ID NO: 4924753 - DNA, 25 bp, Homo sapien
ctcctctgtgttttcttatctgtgg

SEQ ID NO: 4924754 - DNA, 25 bp, Homo sapien
tccaggtagtcacattccggggcca

SEQ ID NO: 4924755 - DNA, 25 bp, Homo sapien
tagcctaaggaactagattcttcca

SEQ ID NO: 4924756 - DNA, 25 bp, Homo sapien
gggctaacactagtgacttagccta

SEQ ID NO: 4924757 - DNA, 25 bp, Homo sapien
cactcccttccactattctgactca

SEQ ID NO: 4924758 - DNA, 25 bp, Homo sapien
gaatacctagctggagttttctgac

SEQ ID NO: 4924759 - DNA, 25 bp, Homo sapien
gattagcttgcataaacttgctccc

SEQ ID NO: 4924760 - DNA, 25 bp, Homo sapien
tctttccctagattaacacagcagg

SEQ ID NO: 4924761 - DNA, 25 bp, Homo sapien
taaaatgcctgaagtgtgctgaatc

SEQ ID NO: 4924762 - DNA, 25 bp, Homo sapien
ctacccaggatataacacactgctg

SEQ ID NO: 4924763 - DNA, 25 bp, Homo sapien
taaagcaattcaacacatgccattg

SEQ ID NO: 4924764 - DNA, 25 bp, Homo sapien
gatgttcataatctatctcctgtat

SEQ ID NO: 4924765 - DNA, 25 bp, Homo sapien
aattcaacacatgccattgccttca

SEQ ID NO: 4924766 - DNA, 25 bp, Homo sapien
ctgtagcccagaattgccggcctca

SEQ ID NO: 4924767 - DNA, 25 bp, Homo sapien
tactgtagcccagaattgccggcct

SEQ ID NO: 4924768 - DNA, 25 bp, Homo sapien
cactcgatcagcatactgtactgta

SEQ ID NO: 4924769 - DNA, 25 bp, Homo sapien
cgatcagcatactgtactgtagccc

SEQ ID NO: 4924770 - DNA, 25 bp, Homo sapien
gagtagtcttatactgacttccctg

SEQ ID NO: 4924771 - DNA, 25 bp, Homo sapien
gtagtcttatactgacttccctgcc

SEQ ID NO: 4924772 - DNA, 25 bp, Homo sapien
agtcttatactgacttccctgcctc

SEQ ID NO: 4924773 - DNA, 25 bp, Homo sapien
tagagtagtcttatactgacttccc

SEQ ID NO: 4924774 - DNA, 25 bp, Homo sapien
gaaagcacacgctctgctctgctgg

SEQ ID NO: 4924775 - DNA, 25 bp, Homo sapien
gccttcgcttcctctgcactagcat

SEQ ID NO: 4924776 - DNA, 25 bp, Homo sapien
tggcaatggcttgccttcgcttcct

SEQ ID NO: 4924777 - DNA, 25 bp, Homo sapien
ggcttgccttcgcttcctctgcact

SEQ ID NO: 4924778 - DNA, 25 bp, Homo sapien
tagctcatattatccacgttcttgc

SEQ ID NO: 4924779 - DNA, 25 bp, Homo sapien
ggcagtgagtcctccaacatttggt

SEQ ID NO: 4924780 - DNA, 25 bp, Homo sapien
agtttacaatgaaccaacttccagc

SEQ ID NO: 4924781 - DNA, 25 bp, Homo sapien
ggttgataaccactagatgagaaca

SEQ ID NO: 4924782 - DNA, 25 bp, Homo sapien
ttatacacagacaacggggagtaac

SEQ ID NO: 4924783 - DNA, 25 bp, Homo sapien
ccaagcacagtatattatacacaga

SEQ ID NO: 4924784 - DNA, 25 bp, Homo sapien
gcattattactggtgcccaagcaca

SEQ ID NO: 4924785 - DNA, 25 bp, Homo sapien
gaagggataagctgtgtagcattat

SEQ ID NO: 4924786 - DNA, 25 bp, Homo sapien
actgctcttgcacagtcaacagata

SEQ ID NO: 4924787 - DNA, 25 bp, Homo sapien
atagatgccctcatcagaacgattc

SEQ ID NO: 4924788 - DNA, 25 bp, Homo sapien
atattttcaagtggagtccagaact

SEQ ID NO: 4924789 - DNA, 25 bp, Homo sapien
aactgcccagtagggctgtacactg

SEQ ID NO: 4924790 - DNA, 25 bp, Homo sapien
gaacgattctcatagtttccatcca

SEQ ID NO: 4924791 - DNA, 25 bp, Homo sapien
tgtggatcaaatgcctgagttgaaa

SEQ ID NO: 4924792 - DNA, 25 bp, Homo sapien
gctgtggatcaaatgcctgagttga

SEQ ID NO: 4924793 - DNA, 25 bp, Homo sapien
taaagccagtaatagtccaatgctt

SEQ ID NO: 4924794 - DNA, 25 bp, Homo sapien
agccagtaatagtccaatgcttgct

SEQ ID NO: 4924795 - DNA, 25 bp, Homo sapien
cccgcacaagggagtaatgagtatc

SEQ ID NO: 4924796 - DNA, 25 bp, Homo sapien
cattagctagacacgggacaatctc

SEQ ID NO: 4924797 - DNA, 25 bp, Homo sapien
gagttagttgagaaggatcccgcac

SEQ ID NO: 4924798 - DNA, 25 bp, Homo sapien
tatctgggagcgtcgagtagtcaaa

SEQ ID NO: 4924799 - DNA, 25 bp, Homo sapien
catgtgtacaccagcttttgtggct

SEQ ID NO: 4924800 - DNA, 25 bp, Homo sapien
cctagaatgctatgaggtagctacc

SEQ ID NO: 4924801 - DNA, 25 bp, Homo sapien
tcaagggcagaacatcaaagaccaa

SEQ ID NO: 4924802 - DNA, 25 bp, Homo sapien
tagctaccttctgccaggtggtcag

SEQ ID NO: 4924803 - DNA, 25 bp, Homo sapien
tattgtcgggcactgctaggtacta

SEQ ID NO: 4924804 - DNA, 25 bp, Homo sapien
tctgctgtagtttggtaacccttcc

SEQ ID NO: 4924805 - DNA, 25 bp, Homo sapien
ccagtctcttcggatgaataagcaa

SEQ ID NO: 4924806 - DNA, 25 bp, Homo sapien
gctttcatgaccagactataattcc

SEQ ID NO: 4924807 - DNA, 25 bp, Homo sapien
tatctgcactgaactttatatagga

SEQ ID NO: 4924808 - DNA, 25 bp, Homo sapien
tattgtttacgagatctggcttgct

SEQ ID NO: 4924809 - DNA, 25 bp, Homo sapien
tctacagtttaataagccactaggg

SEQ ID NO: 4924810 - DNA, 25 bp, Homo sapien
gaataaagctaggtaaaaagctctg

SEQ ID NO: 4924811 - DNA, 25 bp, Homo sapien
ttcttagttgggaaatactgctcca

SEQ ID NO: 4924812 - DNA, 25 bp, Homo sapien
tatggtatcagacctaaaccaggcc

SEQ ID NO: 4924813 - DNA, 25 bp, Homo sapien
gaaactcgttcatgttgaggaacac

SEQ ID NO: 4924814 - DNA, 25 bp, Homo sapien
gtcatcatggacaagagcatatggt

SEQ ID NO: 4924815 - DNA, 25 bp, Homo sapien
tatacgatcgcaagtttagccctag

SEQ ID NO: 4924816 - DNA, 25 bp, Homo sapien
tgtgcagcccaatgaagagaattcc

SEQ ID NO: 4924817 - DNA, 25 bp, Homo sapien
tgaggacgcggagcaattggaaccc

SEQ ID NO: 4924818 - DNA, 25 bp, Homo sapien
taaaggcctcggaacactgtgaatg

SEQ ID NO: 4924819 - DNA, 25 bp, Homo sapien
tgaccatggcaacaacaatttgact

SEQ ID NO: 4924820 - DNA, 25 bp, Homo sapien
tgggagttaagggtgcaaactgcac

SEQ ID NO: 4924821 - DNA, 25 bp, Homo sapien
catgtacccagcagaagtgagtgtt

SEQ ID NO: 4924822 - DNA, 25 bp, Homo sapien
cagtacctagttcatagggccatgg

SEQ ID NO: 4924823 - DNA, 25 bp, Homo sapien
taagcaacaatacgaaggaggaaaa

SEQ ID NO: 4924824 - DNA, 25 bp, Homo sapien
cagccttgagtttgcttctcctcag

SEQ ID NO: 4924825 - DNA, 25 bp, Homo sapien
tctcctcagcagttattgtcttatg

SEQ ID NO: 4924826 - DNA, 25 bp, Homo sapien
gtacaccttggccattttcctgcag

SEQ ID NO: 4924827 - DNA, 25 bp, Homo sapien
ggcttgaagagctaccttttggcca

SEQ ID NO: 4924828 - DNA, 25 bp, Homo sapien
gaagcaggccttaaagaagacaaca

SEQ ID NO: 4924829 - DNA, 25 bp, Homo sapien
tgggtaaaataagctctacagattc

SEQ ID NO: 4924830 - DNA, 25 bp, Homo sapien
tgtattatcctggagatgactgctg

SEQ ID NO: 4924831 - DNA, 25 bp, Homo sapien
gctggatctcacgtttactggctgg

SEQ ID NO: 4924832 - DNA, 25 bp, Homo sapien
cattatcctgctaatgaggcgcagc

SEQ ID NO: 4924833 - DNA, 25 bp, Homo sapien
ctgcttgactgcaaacgctggatct

SEQ ID NO: 4924834 - DNA, 25 bp, Homo sapien
tttgtagtacatgcctcaaagggct

SEQ ID NO: 4924835 - DNA, 25 bp, Homo sapien
ttcacattttgtgcaggtctcctag

SEQ ID NO: 4924836 - DNA, 25 bp, Homo sapien
tattgactctcaagcctggctttgg

SEQ ID NO: 4924837 - DNA, 25 bp, Homo sapien
ggtctcctagagcaattatgtgttc

SEQ ID NO: 4924838 - DNA, 25 bp, Homo sapien
gagtggtgaaaacagctgttgctca

SEQ ID NO: 4924839 - DNA, 25 bp, Homo sapien
agtcaggcagactgtttccacaggg

SEQ ID NO: 4924840 - DNA, 25 bp, Homo sapien
tatacaactatgtgggtcaagccga

SEQ ID NO: 4924841 - DNA, 25 bp, Homo sapien
agcaagagctgacacatcctccagg

SEQ ID NO: 4924842 - DNA, 25 bp, Homo sapien
cctccagggagcaaacgacacttgc

SEQ ID NO: 4924843 - DNA, 25 bp, Homo sapien
tctttcatggacagctgcacgctgg

SEQ ID NO: 4924844 - DNA, 25 bp, Homo sapien
cacgttatcaagctcaaattgtcct

SEQ ID NO: 4924845 - DNA, 25 bp, Homo sapien
tggccccacgttatcaagctcaaat

SEQ ID NO: 4924846 - DNA, 25 bp, Homo sapien
gcccggcctcataacacaattcttt

SEQ ID NO: 4924847 - DNA, 25 bp, Homo sapien
tagctcagtgtaggccttgctcaat

SEQ ID NO: 4924848 - DNA, 25 bp, Homo sapien
tctgtttacctaggatgagggtccc

SEQ ID NO: 4924849 - DNA, 25 bp, Homo sapien
taggtgccctttaggactctagcaa

SEQ ID NO: 4924850 - DNA, 25 bp, Homo sapien
gattgggcactcatcatatggtagg

SEQ ID NO: 4924851 - DNA, 25 bp, Homo sapien
tcagtcctaaagtcagcctaaacct

SEQ ID NO: 4924852 - DNA, 25 bp, Homo sapien
ggctgaaacagatcacagtgactca

SEQ ID NO: 4924853 - DNA, 25 bp, Homo sapien
gatgcaaacattatactcctcggta

SEQ ID NO: 4924854 - DNA, 25 bp, Homo sapien
cgttacatggtaattcaacagcagg

SEQ ID NO: 4924855 - DNA, 25 bp, Homo sapien
tttccaagcaacacattacattctt

SEQ ID NO: 4924856 - DNA, 25 bp, Homo sapien
cagatttcttccaaaatagttaagg

SEQ ID NO: 4924857 - DNA, 25 bp, Homo sapien
ttccaagcaacacattacattcttc

SEQ ID NO: 4924858 - DNA, 25 bp, Homo sapien
gaaatccctgatgatttcagctgac

SEQ ID NO: 4924859 - DNA, 25 bp, Homo sapien
ctttaaagggcaaatgtttgcccat

SEQ ID NO: 4924860 - DNA, 25 bp, Homo sapien
tatttttggataaagtgcagtgaag

SEQ ID NO: 4924861 - DNA, 25 bp, Homo sapien
taaaatacttgtacagaatgtgaga

SEQ ID NO: 4924862 - DNA, 25 bp, Homo sapien
gcaaaataaatctagacctgatatc

SEQ ID NO: 4924863 - DNA, 25 bp, Homo sapien
ggtaaagaacctctgaagatgtcta

SEQ ID NO: 4924864 - DNA, 25 bp, Homo sapien
gccactgtgcccggcagcagttgta

SEQ ID NO: 4924865 - DNA, 25 bp, Homo sapien
tcaagacagtacatgcaagttgttc

SEQ ID NO: 4924866 - DNA, 25 bp, Homo sapien
gttcgtatagcctgtccattctcca

SEQ ID NO: 4924867 - DNA, 25 bp, Homo sapien
cctgtgcaggtactcaagacagtac

SEQ ID NO: 4924868 - DNA, 25 bp, Homo sapien
tattttagagagttgtaagtaccac

SEQ ID NO: 4924869 - DNA, 25 bp, Homo sapien
agaaaatctaatgcacacattctat

SEQ ID NO: 4924870 - DNA, 25 bp, Homo sapien
aaatctaatgcacacattctatttc

SEQ ID NO: 4924871 - DNA, 25 bp, Homo sapien
cagaaaatctaatgcacacattcta

SEQ ID NO: 4924872 - DNA, 25 bp, Homo sapien
gaaaatctaatgcacacattctatt

SEQ ID NO: 4924873 - DNA, 25 bp, Homo sapien
gccatgcactacaccaaattccagg

SEQ ID NO: 4924874 - DNA, 25 bp, Homo sapien
caaggtgagcctcctagaagaaggt

SEQ ID NO: 4924875 - DNA, 25 bp, Homo sapien
tctatcattatcagcagggtgctct

SEQ ID NO: 4924876 - DNA, 25 bp, Homo sapien
tctatgtacgtggtgaagctatctc

SEQ ID NO: 4924877 - DNA, 25 bp, Homo sapien
tctcgagagagaacagggtcagcct

SEQ ID NO: 4924878 - DNA, 25 bp, Homo sapien
gctagacatgcatggtattggtgaa

SEQ ID NO: 4924879 - DNA, 25 bp, Homo sapien
caaagtgttcttgtgaaggtcatgc

SEQ ID NO: 4924880 - DNA, 25 bp, Homo sapien
ttcagggagctcagtcacacagaac

SEQ ID NO: 4924881 - DNA, 25 bp, Homo sapien
actgccagctgtttggttgggccat

SEQ ID NO: 4924882 - DNA, 25 bp, Homo sapien
gactgccagctgtttggttgggcca

SEQ ID NO: 4924883 - DNA, 25 bp, Homo sapien
caaaattgtaggtggctaccagcat

SEQ ID NO: 4924884 - DNA, 25 bp, Homo sapien
ctgagtggggaacttcaaaattgta

SEQ ID NO: 4924885 - DNA, 25 bp, Homo sapien
ggaacttcaaaattgtaggtggcta

SEQ ID NO: 4924886 - DNA, 25 bp, Homo sapien
acttcaaaattgtaggtggctacca

SEQ ID NO: 4924887 - DNA, 25 bp, Homo sapien
gaaaatggagagttgataagcctct

SEQ ID NO: 4924888 - DNA, 25 bp, Homo sapien
aatggagagttgataagcctctctg

SEQ ID NO: 4924889 - DNA, 25 bp, Homo sapien
tggagagttgataagcctctctggt

SEQ ID NO: 4924890 - DNA, 25 bp, Homo sapien
aaaatggagagttgataagcctctc

SEQ ID NO: 4924891 - DNA, 25 bp, Homo sapien
cacaattatatcttcatccactcct

SEQ ID NO: 4924892 - DNA, 25 bp, Homo sapien
ggtgaagttggtctgactttgggtc

SEQ ID NO: 4924893 - DNA, 25 bp, Homo sapien
tcatccactccttctgttccgtcag

SEQ ID NO: 4924894 - DNA, 25 bp, Homo sapien
gggcaggtgaagttggtctgacttt

SEQ ID NO: 4924895 - DNA, 25 bp, Homo sapien
cataggtgtggccacacactttatt

SEQ ID NO: 4924896 - DNA, 25 bp, Homo sapien
tcaatcatgcgaacaatggcgtcct

SEQ ID NO: 4924897 - DNA, 25 bp, Homo sapien
cttttgcctggactcaatcatgcga

SEQ ID NO: 4924898 - DNA, 25 bp, Homo sapien
gaacaatggcgtcctcttcataggt

SEQ ID NO: 4924899 - DNA, 25 bp, Homo sapien
agagcatttcgctgcagcacagggc

SEQ ID NO: 4924900 - DNA, 25 bp, Homo sapien
gaattccaaggtttagtctacaagc

SEQ ID NO: 4924901 - DNA, 25 bp, Homo sapien
tctacaagctatagacagaaggtct

SEQ ID NO: 4924902 - DNA, 25 bp, Homo sapien
ctgctgagcaaagggaaccgggtct

SEQ ID NO: 4924903 - DNA, 25 bp, Homo sapien
aaaagcagctaagatcatgaagagg

SEQ ID NO: 4924904 - DNA, 25 bp, Homo sapien
actccaagtaggttgctgggatgac

SEQ ID NO: 4924905 - DNA, 25 bp, Homo sapien
aaagccaagtatcataactttggct

SEQ ID NO: 4924906 - DNA, 25 bp, Homo sapien
catgaagaggatacagacacttttg

SEQ ID NO: 4924907 - DNA, 25 bp, Homo sapien
gcttcatcctggataagatctgact

SEQ ID NO: 4924908 - DNA, 25 bp, Homo sapien
tcttatatccgtgtggctacagcca

SEQ ID NO: 4924909 - DNA, 25 bp, Homo sapien
ctactcggaatgacgatgtcttttc

SEQ ID NO: 4924910 - DNA, 25 bp, Homo sapien
tatggttctcaattgcccttctaag

SEQ ID NO: 4924911 - DNA, 25 bp, Homo sapien
ccccaacaagtatgctatgcagcca

SEQ ID NO: 4924912 - DNA, 25 bp, Homo sapien
aacaagtatgctatgcagccagtcc

SEQ ID NO: 4924913 - DNA, 25 bp, Homo sapien
tatgcagccagtccctaactgctgg

SEQ ID NO: 4924914 - DNA, 25 bp, Homo sapien
ttttacccccaacaagtatgctatg

SEQ ID NO: 4924915 - DNA, 25 bp, Homo sapien
gtcactggagcattctattccattc

SEQ ID NO: 4924916 - DNA, 25 bp, Homo sapien
tagaaaatgcctcccaataggggtg

SEQ ID NO: 4924917 - DNA, 25 bp, Homo sapien
cttggagggctgcagcaaagtattc

SEQ ID NO: 4924918 - DNA, 25 bp, Homo sapien
gcatttatatgtttggaactgtcaa

SEQ ID NO: 4924919 - DNA, 25 bp, Homo sapien
gagattttaggactgggctctccag

SEQ ID NO: 4924920 - DNA, 25 bp, Homo sapien
ctctcactgggctatgaagattata

SEQ ID NO: 4924921 - DNA, 25 bp, Homo sapien
catgggtgacttcgcttctctgtgc

SEQ ID NO: 4924922 - DNA, 25 bp, Homo sapien
gcacttagaatagcacctggtatac

SEQ ID NO: 4924923 - DNA, 25 bp, Homo sapien
tgtttgtgacaaaagatgatccttg

SEQ ID NO: 4924924 - DNA, 25 bp, Homo sapien
catgcggactcgtttcttaacagca

SEQ ID NO: 4924925 - DNA, 25 bp, Homo sapien
tggtgtttgtgacaaaagatgatcc

SEQ ID NO: 4924926 - DNA, 25 bp, Homo sapien
cagcagcatgcggactcgtttctta

SEQ ID NO: 4924927 - DNA, 25 bp, Homo sapien
ggtcatctttaagctcagtgtctag

SEQ ID NO: 4924928 - DNA, 25 bp, Homo sapien
tgtctagcacagaactaggactgga

SEQ ID NO: 4924929 - DNA, 25 bp, Homo sapien
gaagtcgtcctttcagggtgggatc

SEQ ID NO: 4924930 - DNA, 25 bp, Homo sapien
tgggatctgggtcttggtcatcttt

SEQ ID NO: 4924931 - DNA, 25 bp, Homo sapien
acatgactcagacgtggactccatc

SEQ ID NO: 4924932 - DNA, 25 bp, Homo sapien
atgcgtaggggggaaacatgactca

SEQ ID NO: 4924933 - DNA, 25 bp, Homo sapien
tgagaaaccttgatgcgtagggggg

SEQ ID NO: 4924934 - DNA, 25 bp, Homo sapien
aaacatgactcagacgtggactcca

SEQ ID NO: 4924935 - DNA, 25 bp, Homo sapien
tgataaaggcgagcctggacctcac

SEQ ID NO: 4924936 - DNA, 25 bp, Homo sapien
cagcttttccggtcgactgataaag

SEQ ID NO: 4924937 - DNA, 25 bp, Homo sapien
ttttccggtcgactgataaaggcga

SEQ ID NO: 4924938 - DNA, 25 bp, Homo sapien
gtcgactgataaaggcgagcctgga

SEQ ID NO: 4924939 - DNA, 25 bp, Homo sapien
cacctctgacacgtggttggatgcg

SEQ ID NO: 4924940 - DNA, 25 bp, Homo sapien
catatgtggcgtcaaaggcaaacag

SEQ ID NO: 4924941 - DNA, 25 bp, Homo sapien
gatttgtagaatggaagtctcccag

SEQ ID NO: 4924942 - DNA, 25 bp, Homo sapien
cgcagagcgctggaaaggcttgttt

SEQ ID NO: 4924943 - DNA, 25 bp, Homo sapien
gagtttgctggtaaatctgttgagt

SEQ ID NO: 4924944 - DNA, 25 bp, Homo sapien
gcaactacacgttcaaattcagagg

SEQ ID NO: 4924945 - DNA, 25 bp, Homo sapien
cacagacgtggatcgtgagtttgct

SEQ ID NO: 4924946 - DNA, 25 bp, Homo sapien
tattggcagaaacctcccactcaca

SEQ ID NO: 4924947 - DNA, 25 bp, Homo sapien
ctacaggggtgcgccaccagtccca

SEQ ID NO: 4924948 - DNA, 25 bp, Homo sapien
acaggggtgcgccaccagtcccagc

SEQ ID NO: 4924949 - DNA, 25 bp, Homo sapien
gggtgcgccaccagtcccagctaag

SEQ ID NO: 4924950 - DNA, 25 bp, Homo sapien
aggggtgcgccaccagtcccagcta

SEQ ID NO: 4924951 - DNA, 25 bp, Homo sapien
caaagtgagagcttgccggcactct

SEQ ID NO: 4924952 - DNA, 25 bp, Homo sapien
aagtgagagcttgccggcactctct

SEQ ID NO: 4924953 - DNA, 25 bp, Homo sapien
tgagagcttgccggcactctctcgg

SEQ ID NO: 4924954 - DNA, 25 bp, Homo sapien
agagcttgccggcactctctcggct

SEQ ID NO: 4924955 - DNA, 25 bp, Homo sapien
aataagatgtacagactttgttcca

SEQ ID NO: 4924956 - DNA, 25 bp, Homo sapien
cagaataagatgtacagactttgtt

SEQ ID NO: 4924957 - DNA, 25 bp, Homo sapien
gatgtacagactttgttccagaggc

SEQ ID NO: 4924958 - DNA, 25 bp, Homo sapien
atgtacagactttgttccagaggcc

SEQ ID NO: 4924959 - DNA, 25 bp, Homo sapien
aggcacaacagatattctaaacatc

SEQ ID NO: 4924960 - DNA, 25 bp, Homo sapien
ggaatatgaggtgtctttccggagc

SEQ ID NO: 4924961 - DNA, 25 bp, Homo sapien
gcagttcccgggtagaggcacagac

SEQ ID NO: 4924962 - DNA, 25 bp, Homo sapien
tatgaggtgtctttccggagccagg

SEQ ID NO: 4924963 - DNA, 25 bp, Homo sapien
agttcccgggtagaggcacagacgt

SEQ ID NO: 4924964 - DNA, 25 bp, Homo sapien
ttgtcgttcacccagcacaggaatc

SEQ ID NO: 4924965 - DNA, 25 bp, Homo sapien
agctcctcccgggaagcactaggtg

SEQ ID NO: 4924966 - DNA, 25 bp, Homo sapien
agcactaggtgggttgtggcccatt

SEQ ID NO: 4924967 - DNA, 25 bp, Homo sapien
aggtgactcagagcccctctgccag

SEQ ID NO: 4924968 - DNA, 25 bp, Homo sapien
tcaggagtctcagcgctgtgagtaa

SEQ ID NO: 4924969 - DNA, 25 bp, Homo sapien
ccatcagtatcctgtatccgtctga

SEQ ID NO: 4924970 - DNA, 25 bp, Homo sapien
cgctggaagcacagagtcgggccct

SEQ ID NO: 4924971 - DNA, 25 bp, Homo sapien
agccctttaaagcggactcctcgct

SEQ ID NO: 4924972 - DNA, 25 bp, Homo sapien
ttgtcccgtctgcatgttctgagct

SEQ ID NO: 4924973 - DNA, 25 bp, Homo sapien
tcattgtcccgtctgcatgttctga

SEQ ID NO: 4924974 - DNA, 25 bp, Homo sapien
gtctgcatgttctgagctccctcct

SEQ ID NO: 4924975 - DNA, 25 bp, Homo sapien
cgtctgcatgttctgagctccctcc

SEQ ID NO: 4924976 - DNA, 25 bp, Homo sapien
agtcactcactacagaacagtcccc

SEQ ID NO: 4924977 - DNA, 25 bp, Homo sapien
gcagtagccagacttggaggcaggc

SEQ ID NO: 4924978 - DNA, 25 bp, Homo sapien
catattccttaggtgggatccatcc

SEQ ID NO: 4924979 - DNA, 25 bp, Homo sapien
ccgtgtccagcaggcctaagtcact

SEQ ID NO: 4924980 - DNA, 25 bp, Homo sapien
acatcacacgggcactgtcctctgt

SEQ ID NO: 4924981 - DNA, 25 bp, Homo sapien
gataaactggtttttacacagcagc

SEQ ID NO: 4924982 - DNA, 25 bp, Homo sapien
gccctctgataaactggtttttaca

SEQ ID NO: 4924983 - DNA, 25 bp, Homo sapien
ggtttttacacagcagcgtgcacca

SEQ ID NO: 4924984 - DNA, 25 bp, Homo sapien
tggaccgggctctggaagggatcct

SEQ ID NO: 4924985 - DNA, 25 bp, Homo sapien
ccgggctctggaagggatccttgtc

SEQ ID NO: 4924986 - DNA, 25 bp, Homo sapien
ctctggaagggatccttgtccttgg

SEQ ID NO: 4924987 - DNA, 25 bp, Homo sapien
atccttgtccttgggccagagtcat

SEQ ID NO: 4924988 - DNA, 25 bp, Homo sapien
acttgtttgtataagaccttttgtg

SEQ ID NO: 4924989 - DNA, 25 bp, Homo sapien
tttgtataagaccttttgtgtattg

SEQ ID NO: 4924990 - DNA, 25 bp, Homo sapien
cttgtttgtataagaccttttgtgt

SEQ ID NO: 4924991 - DNA, 25 bp, Homo sapien
ttgaacaaagctagccccaagcaca

SEQ ID NO: 4924992 - DNA, 25 bp, Homo sapien
agcacaggaccgtttggtttctggg

SEQ ID NO: 4924993 - DNA, 25 bp, Homo sapien
tcattcttgaacaaagctagcccca

SEQ ID NO: 4924994 - DNA, 25 bp, Homo sapien
tcttctgcaatattcgtgaggagtg

SEQ ID NO: 4924995 - DNA, 25 bp, Homo sapien
tgttgccgaggctgccgatagtccg

SEQ ID NO: 4924996 - DNA, 25 bp, Homo sapien
cgagacgcgctcagagagagtgact

SEQ ID NO: 4924997 - DNA, 25 bp, Homo sapien
tttttcgcggcgctcgggatcctga

SEQ ID NO: 4924998 - DNA, 25 bp, Homo sapien
acttcccaaagcgatgagtctccag

SEQ ID NO: 4924999 - DNA, 25 bp, Homo sapien
gcagctcgcgtccagtgtggatgca

SEQ ID NO: 4925000 - DNA, 25 bp, Homo sapien
gccgctcatggcagagcgcaccgga

SEQ ID NO: 4925001 - DNA, 25 bp, Homo sapien
gggacacatgctcgcgctcggctag

SEQ ID NO: 4925002 - DNA, 25 bp, Homo sapien
tgtggatgcacagcgcccgggacac

SEQ ID NO: 4925003 - DNA, 25 bp, Homo sapien
ttctcaacctgtgggcttaggatgt

SEQ ID NO: 4925004 - DNA, 25 bp, Homo sapien
aaagctctagacttgcaaataccca

SEQ ID NO: 4925005 - DNA, 25 bp, Homo sapien
aagggttacccgctttcacacagat

SEQ ID NO: 4925006 - DNA, 25 bp, Homo sapien
tgagtaagttccattcacctactcc

SEQ ID NO: 4925007 - DNA, 25 bp, Homo sapien
cctccgtggagaagacgaacttcct

SEQ ID NO: 4925008 - DNA, 25 bp, Homo sapien
aatctgcttgaagagccgggcggct

SEQ ID NO: 4925009 - DNA, 25 bp, Homo sapien
ccagtaatgttgctgtgcgatggca

SEQ ID NO: 4925010 - DNA, 25 bp, Homo sapien
cataggagtgcatgtccccaaagtc

SEQ ID NO: 4925011 - DNA, 25 bp, Homo sapien
gactttgttttgcaccaacacacag

SEQ ID NO: 4925012 - DNA, 25 bp, Homo sapien
tactaaatctgggacatatgagccc

SEQ ID NO: 4925013 - DNA, 25 bp, Homo sapien
tgcacctccgctttggttccaaaag

SEQ ID NO: 4925014 - DNA, 25 bp, Homo sapien
caacacacagcacctaactacatga

SEQ ID NO: 4925015 - DNA, 25 bp, Homo sapien
tctgaagacggatccaaacaagctg

SEQ ID NO: 4925016 - DNA, 25 bp, Homo sapien
tggatttcagggacgcagggaccct

SEQ ID NO: 4925017 - DNA, 25 bp, Homo sapien
tttgcaaagtatcggcagagcgcct

SEQ ID NO: 4925018 - DNA, 25 bp, Homo sapien
tcaagtgtggtctatctcatgcggc

SEQ ID NO: 4925019 - DNA, 25 bp, Homo sapien
tatcgtccaaccagaagggtgtaga

SEQ ID NO: 4925020 - DNA, 25 bp, Homo sapien
ggtactctggaacaatctggtctga

SEQ ID NO: 4925021 - DNA, 25 bp, Homo sapien
ggctgcgaatgaggcacctggcttt

SEQ ID NO: 4925022 - DNA, 25 bp, Homo sapien
tctgagtcgatgtacccgggttcca

SEQ ID NO: 4925023 - DNA, 25 bp, Homo sapien
ttattacacacttgaccaccgggtg

SEQ ID NO: 4925024 - DNA, 25 bp, Homo sapien
gcagggcagccaatcacagcatatg

SEQ ID NO: 4925025 - DNA, 25 bp, Homo sapien
tctggttggtaccacgccaaagggc

SEQ ID NO: 4925026 - DNA, 25 bp, Homo sapien
caccgggtgtaagatgtccatactc

SEQ ID NO: 4925027 - DNA, 25 bp, Homo sapien
cagtcgagcaaccacgagagcgtta

SEQ ID NO: 4925028 - DNA, 25 bp, Homo sapien
gatgtacacacaatgccaaaggcgg

SEQ ID NO: 4925029 - DNA, 25 bp, Homo sapien
gacagaatgctccaccctgagatgg

SEQ ID NO: 4925030 - DNA, 25 bp, Homo sapien
tagacacgcaggttattcagacaga

SEQ ID NO: 4925031 - DNA, 25 bp, Homo sapien
ctcttgagactcacccatgctgttg

SEQ ID NO: 4925032 - DNA, 25 bp, Homo sapien
gacaaatgtgtacacctgttcacca

SEQ ID NO: 4925033 - DNA, 25 bp, Homo sapien
tagaatgcctctgttttaagtgtac

SEQ ID NO: 4925034 - DNA, 25 bp, Homo sapien
tggtttatacaatcaccagttgatg

SEQ ID NO: 4925035 - DNA, 25 bp, Homo sapien
tttgtttcctcctctgcaatacggt

SEQ ID NO: 4925036 - DNA, 25 bp, Homo sapien
tttcctcctctgcaatacggtacat

SEQ ID NO: 4925037 - DNA, 25 bp, Homo sapien
cttactgtctgagtttgtttcctcc

SEQ ID NO: 4925038 - DNA, 25 bp, Homo sapien
tgtttcctcctctgcaatacggtac

SEQ ID NO: 4925039 - DNA, 25 bp, Homo sapien
gtctggaaggcccttgtcatgtggg

SEQ ID NO: 4925040 - DNA, 25 bp, Homo sapien
gccatggatctatccaaatcagcat

SEQ ID NO: 4925041 - DNA, 25 bp, Homo sapien
tggatctatccaaatcagcatcaga

SEQ ID NO: 4925042 - DNA, 25 bp, Homo sapien
gatctatccaaatcagcatcagacc

SEQ ID NO: 4925043 - DNA, 25 bp, Homo sapien
cagtttgccatggatctatccaaat

SEQ ID NO: 4925044 - DNA, 25 bp, Homo sapien
tcagggttgacattgcatgacatta

SEQ ID NO: 4925045 - DNA, 25 bp, Homo sapien
tacatccaagcctgcaactgctgac

SEQ ID NO: 4925046 - DNA, 25 bp, Homo sapien
caggaaggaacaacagtcgatggca

SEQ ID NO: 4925047 - DNA, 25 bp, Homo sapien
gcatgacattatatggctgcttaca

SEQ ID NO: 4925048 - DNA, 25 bp, Homo sapien
attctggaagctctgttgaccgcca

SEQ ID NO: 4925049 - DNA, 25 bp, Homo sapien
cagtgccaggcccattgctttcaat

SEQ ID NO: 4925050 - DNA, 25 bp, Homo sapien
gtgagtacctctcagtcagtgccag

SEQ ID NO: 4925051 - DNA, 25 bp, Homo sapien
gctgtgtactggcagagctacttca

SEQ ID NO: 4925052 - DNA, 25 bp, Homo sapien
tagtacctgacaaagacacatcctc

SEQ ID NO: 4925053 - DNA, 25 bp, Homo sapien
caaatatagtacctgacaaagacac

SEQ ID NO: 4925054 - DNA, 25 bp, Homo sapien
tctctatttccagggggcggcattt

SEQ ID NO: 4925055 - DNA, 25 bp, Homo sapien
gatcaaatatagtacctgacaaaga

SEQ ID NO: 4925056 - DNA, 25 bp, Homo sapien
gatggcccctgacttccgaggaata

SEQ ID NO: 4925057 - DNA, 25 bp, Homo sapien
tgagagaggtcccgtgaatccagga

SEQ ID NO: 4925058 - DNA, 25 bp, Homo sapien
gctgtcaggatggcccctgacttcc

SEQ ID NO: 4925059 - DNA, 25 bp, Homo sapien
gagaggtcccgtgaatccaggaagc

SEQ ID NO: 4925060 - DNA, 25 bp, Homo sapien
ctcccaactggctatctctaaccac

SEQ ID NO: 4925061 - DNA, 25 bp, Homo sapien
cactcccaactggctatctctaacc

SEQ ID NO: 4925062 - DNA, 25 bp, Homo sapien
actcccaactggctatctctaacca

SEQ ID NO: 4925063 - DNA, 25 bp, Homo sapien
ccactcccaactggctatctctaac

SEQ ID NO: 4925064 - DNA, 25 bp, Homo sapien
tcacggaggttgtgatcagatgcca

SEQ ID NO: 4925065 - DNA, 25 bp, Homo sapien
caaagctggcaatagagaatctgat

SEQ ID NO: 4925066 - DNA, 25 bp, Homo sapien
tctacaatggcaggtggcatcacgg

SEQ ID NO: 4925067 - DNA, 25 bp, Homo sapien
gaggcctggcactaagacatcgtgt

SEQ ID NO: 4925068 - DNA, 25 bp, Homo sapien
ctagcaaagggagcaggaaagccat

SEQ ID NO: 4925069 - DNA, 25 bp, Homo sapien
catgagacagtttacaacatggagg

SEQ ID NO: 4925070 - DNA, 25 bp, Homo sapien
ccatgagacagtttacaacatggag

SEQ ID NO: 4925071 - DNA, 25 bp, Homo sapien
tccatgagacagtttacaacatgga

SEQ ID NO: 4925072 - DNA, 25 bp, Homo sapien
aaagtctcttacaaagctacaatca

SEQ ID NO: 4925073 - DNA, 25 bp, Homo sapien
tcgaaaccagatactgtttgcttgc

SEQ ID NO: 4925074 - DNA, 25 bp, Homo sapien
gctgacacatccttgttgaaattcg

SEQ ID NO: 4925075 - DNA, 25 bp, Homo sapien
gagcaaagccaagtctagcctcctt

SEQ ID NO: 4925076 - DNA, 25 bp, Homo sapien
tgcttgctggtttgttggagagcaa

SEQ ID NO: 4925077 - DNA, 25 bp, Homo sapien
ccatgcaaatgcacctgggttcaaa

SEQ ID NO: 4925078 - DNA, 25 bp, Homo sapien
tacaagttccctctcgagccagtgg

SEQ ID NO: 4925079 - DNA, 25 bp, Homo sapien
ggagggctccgaaaaagatgctatg

SEQ ID NO: 4925080 - DNA, 25 bp, Homo sapien
cctctgtggagtgaggattctcgga

SEQ ID NO: 4925081 - DNA, 25 bp, Homo sapien
gaaagccgtgggctagccactgagt

SEQ ID NO: 4925082 - DNA, 25 bp, Homo sapien
aggagaaagccgtgggctagccact

SEQ ID NO: 4925083 - DNA, 25 bp, Homo sapien
aagccgtgggctagccactgagtta

SEQ ID NO: 4925084 - DNA, 25 bp, Homo sapien
cgtgggctagccactgagttagcat

SEQ ID NO: 4925085 - DNA, 25 bp, Homo sapien
taggcgtcagaggtcaccaccccat

SEQ ID NO: 4925086 - DNA, 25 bp, Homo sapien
gcagccgtaggcgtcagaggtcacc

SEQ ID NO: 4925087 - DNA, 25 bp, Homo sapien
cttcgggaaaacttcccatgagtca

SEQ ID NO: 4925088 - DNA, 25 bp, Homo sapien
aaacttcccatgagtcatctccaga

SEQ ID NO: 4925089 - DNA, 25 bp, Homo sapien
tttatcagacgagacaaggtcagcc

SEQ ID NO: 4925090 - DNA, 25 bp, Homo sapien
taatgacaggccaatgaacttgccc

SEQ ID NO: 4925091 - DNA, 25 bp, Homo sapien
gaaggccccactagatagatacaca

SEQ ID NO: 4925092 - DNA, 25 bp, Homo sapien
ttgaagacgactgcatctaggtccc

SEQ ID NO: 4925093 - DNA, 25 bp, Homo sapien
tatggatccagataaaaggcaactg

SEQ ID NO: 4925094 - DNA, 25 bp, Homo sapien
cagtcctgagataagccccacagaa

SEQ ID NO: 4925095 - DNA, 25 bp, Homo sapien
taattctcatcgcagccctacaagg

SEQ ID NO: 4925096 - DNA, 25 bp, Homo sapien
tgtgctaggcattgactggactggt

SEQ ID NO: 4925097 - DNA, 25 bp, Homo sapien
aaagcccagagcaggtcagtttgga

SEQ ID NO: 4925098 - DNA, 25 bp, Homo sapien
caggtcagtttggaagcagaatgct

SEQ ID NO: 4925099 - DNA, 25 bp, Homo sapien
gtcaatgacccactctgcaggatgg

SEQ ID NO: 4925100 - DNA, 25 bp, Homo sapien
gctgaggagggaccatgggaggcct

SEQ ID NO: 4925101 - DNA, 25 bp, Homo sapien
ctgtgtttcctccagtagaactgca

SEQ ID NO: 4925102 - DNA, 25 bp, Homo sapien
cctgtgtttcctccagtagaactgc

SEQ ID NO: 4925103 - DNA, 25 bp, Homo sapien
tagtctcatttcttcgaggaagtcc

SEQ ID NO: 4925104 - DNA, 25 bp, Homo sapien
tcatttcttcgaggaagtcctcctt

SEQ ID NO: 4925105 - DNA, 25 bp, Homo sapien
tcctcaacacctggattgggaaccc

SEQ ID NO: 4925106 - DNA, 25 bp, Homo sapien
gtcctccttgcacccattcctcaac

SEQ ID NO: 4925107 - DNA, 25 bp, Homo sapien
ctagagctagcaggaatgtttgttc

SEQ ID NO: 4925108 - DNA, 25 bp, Homo sapien
cccgtgatggctgttaagaatgacc

SEQ ID NO: 4925109 - DNA, 25 bp, Homo sapien
caatcctgccagttgctagagctag

SEQ ID NO: 4925110 - DNA, 25 bp, Homo sapien
tgtgcagtgcacttgcccgtgatgg

SEQ ID NO: 4925111 - DNA, 25 bp, Homo sapien
tggatggtagtgctctgtggaaagg

SEQ ID NO: 4925112 - DNA, 25 bp, Homo sapien
aagtcagtccttgcagaatcggcgt

SEQ ID NO: 4925113 - DNA, 25 bp, Homo sapien
gagctcagaccgtgaaatgcagagg

SEQ ID NO: 4925114 - DNA, 25 bp, Homo sapien
gcgtctggacgtgggtggatggtag

SEQ ID NO: 4925115 - DNA, 25 bp, Homo sapien
cactgagatctgttggatgagaagc

SEQ ID NO: 4925116 - DNA, 25 bp, Homo sapien
ttcaaggcagatagtgcccaggctc

SEQ ID NO: 4925117 - DNA, 25 bp, Homo sapien
gagcactttccaatctccactgaga

SEQ ID NO: 4925118 - DNA, 25 bp, Homo sapien
tggatatagctctcgtcaccccaag

SEQ ID NO: 4925119 - DNA, 25 bp, Homo sapien
ttaaccacttggcaatagcagccct

SEQ ID NO: 4925120 - DNA, 25 bp, Homo sapien
acttggcaatagcagccctggtcct

SEQ ID NO: 4925121 - DNA, 25 bp, Homo sapien
tgcacagcctcgcagtgtgctgtgc

SEQ ID NO: 4925122 - DNA, 25 bp, Homo sapien
acagcctcgcagtgtgctgtgcaca

SEQ ID NO: 4925123 - DNA, 25 bp, Homo sapien
tcttggagagtctcccatgcacaag

SEQ ID NO: 4925124 - DNA, 25 bp, Homo sapien
cactcaacttgtgcttcctgtcatt

SEQ ID NO: 4925125 - DNA, 25 bp, Homo sapien
tcctttccgatccaagaggtcttgg

SEQ ID NO: 4925126 - DNA, 25 bp, Homo sapien
ccctgccaagatatactgaaacctc

SEQ ID NO: 4925127 - DNA, 25 bp, Homo sapien
tggaagattatgagcccggacctga

SEQ ID NO: 4925128 - DNA, 25 bp, Homo sapien
tcttcctgcaggatcgacgaaagtg

SEQ ID NO: 4925129 - DNA, 25 bp, Homo sapien
ttaatggccattggccaaagcccgc

SEQ ID NO: 4925130 - DNA, 25 bp, Homo sapien
tgtctcccatgcaaaaatcactaag

SEQ ID NO: 4925131 - DNA, 25 bp, Homo sapien
tctgcaatccaaagaggctgccagt

SEQ ID NO: 4925132 - DNA, 25 bp, Homo sapien
tattactcgagctcacctggatgcc

SEQ ID NO: 4925133 - DNA, 25 bp, Homo sapien
agtgtaccgacccttcatgatccgg

SEQ ID NO: 4925134 - DNA, 25 bp, Homo sapien
cagtatttgcagctcttgcttcagc

SEQ ID NO: 4925135 - DNA, 25 bp, Homo sapien
agggcaacgcgggactgtcaggaca

SEQ ID NO: 4925136 - DNA, 25 bp, Homo sapien
tcagattgagggcaacgcgggactg

SEQ ID NO: 4925137 - DNA, 25 bp, Homo sapien
gattgagggcaacgcgggactgtca

SEQ ID NO: 4925138 - DNA, 25 bp, Homo sapien
ctggggaagagcgcctgcgcggtgc

SEQ ID NO: 4925139 - DNA, 25 bp, Homo sapien
gaatttaaacacgacatgagcgcca

SEQ ID NO: 4925140 - DNA, 25 bp, Homo sapien
aattgcggtattcccattactgtca

SEQ ID NO: 4925141 - DNA, 25 bp, Homo sapien
tcatagctgatacttggtaagaact

SEQ ID NO: 4925142 - DNA, 25 bp, Homo sapien
gctggttaaaatgagacatatctgc

SEQ ID NO: 4925143 - DNA, 25 bp, Homo sapien
aagaagcatgaacttgaccgttcct

SEQ ID NO: 4925144 - DNA, 25 bp, Homo sapien
tgaacttgaccgttcctgccgacgc

SEQ ID NO: 4925145 - DNA, 25 bp, Homo sapien
gcatgaacttgaccgttcctgccga

SEQ ID NO: 4925146 - DNA, 25 bp, Homo sapien
gaagcatgaacttgaccgttcctgc

SEQ ID NO: 4925147 - DNA, 25 bp, Homo sapien
caagaggagaaagagtcaggtttag

SEQ ID NO: 4925148 - DNA, 25 bp, Homo sapien
gatgatgatcctgtaacccctagac

SEQ ID NO: 4925149 - DNA, 25 bp, Homo sapien
tagccactcattcaaattacgcagc

SEQ ID NO: 4925150 - DNA, 25 bp, Homo sapien
aattacgcagcaagtccaggcagaa

SEQ ID NO: 4925151 - DNA, 25 bp, Homo sapien
aagccgtttgggctctgtgctgcag

SEQ ID NO: 4925152 - DNA, 25 bp, Homo sapien
tgcagcctccactgatcgtcaataa

SEQ ID NO: 4925153 - DNA, 25 bp, Homo sapien
tgatcgtcaataataaaggtggcat

SEQ ID NO: 4925154 - DNA, 25 bp, Homo sapien
tgggaaatacgcaagccgtttgggc

SEQ ID NO: 4925155 - DNA, 25 bp, Homo sapien
cagcagtgacttgagaaagtgtgga

SEQ ID NO: 4925156 - DNA, 25 bp, Homo sapien
gaggagacaattcatcaaaggtggt

SEQ ID NO: 4925157 - DNA, 25 bp, Homo sapien
ggatttcccagtccatgtacaacag

SEQ ID NO: 4925158 - DNA, 25 bp, Homo sapien
ccatatttctcaatagggaggagac

SEQ ID NO: 4925159 - DNA, 25 bp, Homo sapien
caagccctcatcgtccctcagctgt

SEQ ID NO: 4925160 - DNA, 25 bp, Homo sapien
aatacccaagccctcatcgtccctc

SEQ ID NO: 4925161 - DNA, 25 bp, Homo sapien
ccctcatcgtccctcagctgtacat

SEQ ID NO: 4925162 - DNA, 25 bp, Homo sapien
ttctccaatagctctcaagccccac

SEQ ID NO: 4925163 - DNA, 25 bp, Homo sapien
aggcttctcagaacaggtgactctg

SEQ ID NO: 4925164 - DNA, 25 bp, Homo sapien
gaaggcttctcagaacaggtgactc

SEQ ID NO: 4925165 - DNA, 25 bp, Homo sapien
ggcttctcagaacaggtgactctga

SEQ ID NO: 4925166 - DNA, 25 bp, Homo sapien
aaggcttctcagaacaggtgactct

SEQ ID NO: 4925167 - DNA, 25 bp, Homo sapien
gaatcagcagggctcttatcctttc

SEQ ID NO: 4925168 - DNA, 25 bp, Homo sapien
ccaaatgtacagtgcatcggaggat

SEQ ID NO: 4925169 - DNA, 25 bp, Homo sapien
aaatgacgataacagtgacagctcc

SEQ ID NO: 4925170 - DNA, 25 bp, Homo sapien
ttgacaatgataatgaccaccactg

SEQ ID NO: 4925171 - DNA, 25 bp, Homo sapien
tgcaaaaacctgaaactcaaagttc

SEQ ID NO: 4925172 - DNA, 25 bp, Homo sapien
ttctctgtgatgtaagggtgtcccc

SEQ ID NO: 4925173 - DNA, 25 bp, Homo sapien
cctctttcttccaccgctctgtcct

SEQ ID NO: 4925174 - DNA, 25 bp, Homo sapien
tccaccttctgccagccctctttct

SEQ ID NO: 4925175 - DNA, 25 bp, Homo sapien
atcttctctgtgatgtaagggtgtc

SEQ ID NO: 4925176 - DNA, 25 bp, Homo sapien
caacagtgcagtggtctattcccat

SEQ ID NO: 4925177 - DNA, 25 bp, Homo sapien
ctgcatcttcatgccgtggcacccg

SEQ ID NO: 4925178 - DNA, 25 bp, Homo sapien
ttcatgccgtggcacccggcttctg

SEQ ID NO: 4925179 - DNA, 25 bp, Homo sapien
ttctgccctcactactggactggca

SEQ ID NO: 4925180 - DNA, 25 bp, Homo sapien
gacttgtaagcacctgtgagacagc

SEQ ID NO: 4925181 - DNA, 25 bp, Homo sapien
ctgacttgtaagcacctgtgagaca

SEQ ID NO: 4925182 - DNA, 25 bp, Homo sapien
ttgtaagcacctgtgagacagctgg

SEQ ID NO: 4925183 - DNA, 25 bp, Homo sapien
agacccacagggcaactgacttgta

SEQ ID NO: 4925184 - DNA, 25 bp, Homo sapien
gccacaatgaggtgccccagggaac

SEQ ID NO: 4925185 - DNA, 25 bp, Homo sapien
gaagaggacaccatgaaagaatgcc

SEQ ID NO: 4925186 - DNA, 25 bp, Homo sapien
agcagtgctggccacaatgaggtgc

SEQ ID NO: 4925187 - DNA, 25 bp, Homo sapien
gcaagaagaggacaccatgaaagaa

SEQ ID NO: 4925188 - DNA, 25 bp, Homo sapien
ttcccaactcaacgcactgaagaaa

SEQ ID NO: 4925189 - DNA, 25 bp, Homo sapien
caactcaacgcactgaagaaagtcc

SEQ ID NO: 4925190 - DNA, 25 bp, Homo sapien
ctcaacgcactgaagaaagtccagg

SEQ ID NO: 4925191 - DNA, 25 bp, Homo sapien
tggctttcccaactcaacgcactga

SEQ ID NO: 4925192 - DNA, 25 bp, Homo sapien
gactcagaccctgatggagcttgaa

SEQ ID NO: 4925193 - DNA, 25 bp, Homo sapien
gaccctgatggagcttgaaccagac

SEQ ID NO: 4925194 - DNA, 25 bp, Homo sapien
tcagaccctgatggagcttgaacca

SEQ ID NO: 4925195 - DNA, 25 bp, Homo sapien
aagtccagactcagaccctgatgga

SEQ ID NO: 4925196 - DNA, 25 bp, Homo sapien
ccaacagccagtacgccaaagagat

SEQ ID NO: 4925197 - DNA, 25 bp, Homo sapien
caccatgtgggtgatcaatcaatgc

SEQ ID NO: 4925198 - DNA, 25 bp, Homo sapien
tacgccaaagagattgcaggcactg

SEQ ID NO: 4925199 - DNA, 25 bp, Homo sapien
tcaatcaatgctttctgacagttgg

SEQ ID NO: 4925200 - DNA, 25 bp, Homo sapien
ctttcaagtgagagcgaagtggcca

SEQ ID NO: 4925201 - DNA, 25 bp, Homo sapien
cctctgatcaaaagcccgggcaaag

SEQ ID NO: 4925202 - DNA, 25 bp, Homo sapien
aattgctttccgacctttgaagccg

SEQ ID NO: 4925203 - DNA, 25 bp, Homo sapien
tcccaggaatccctaaggaagagct

SEQ ID NO: 4925204 - DNA, 25 bp, Homo sapien
acacaaacagccaaaatgactcagt

SEQ ID NO: 4925205 - DNA, 25 bp, Homo sapien
gacacaaacagccaaaatgactcag

SEQ ID NO: 4925206 - DNA, 25 bp, Homo sapien
aaatgactcagtgctggcttcatgc

SEQ ID NO: 4925207 - DNA, 25 bp, Homo sapien
tcaatctcgaaagctgtctccaggt

SEQ ID NO: 4925208 - DNA, 25 bp, Homo sapien
gctaacatacaggatacccatgcca

SEQ ID NO: 4925209 - DNA, 25 bp, Homo sapien
gactatgccacctgtatataagaca

SEQ ID NO: 4925210 - DNA, 25 bp, Homo sapien
tggctccttcaaccgcaaaataaga

SEQ ID NO: 4925211 - DNA, 25 bp, Homo sapien
tatatgtgtaataggatagccatgc

SEQ ID NO: 4925212 - DNA, 25 bp, Homo sapien
gaccatacccagtagctcatggcag

SEQ ID NO: 4925213 - DNA, 25 bp, Homo sapien
caaacatgtggcagcctgatgacct

SEQ ID NO: 4925214 - DNA, 25 bp, Homo sapien
cctctggtaatatcagctgaccata

SEQ ID NO: 4925215 - DNA, 25 bp, Homo sapien
tagctcatggcagtgcaatgtggct

SEQ ID NO: 4925216 - DNA, 25 bp, Homo sapien
acatgtctgtggatgagccaatggg

SEQ ID NO: 4925217 - DNA, 25 bp, Homo sapien
tcacagcactactgagaagaattac

SEQ ID NO: 4925218 - DNA, 25 bp, Homo sapien
caattccagttctgagttctggcat

SEQ ID NO: 4925219 - DNA, 25 bp, Homo sapien
ttctctagaaggtgtcagctctggg

SEQ ID NO: 4925220 - DNA, 25 bp, Homo sapien
gaagatttctgatcaagtccttcac

SEQ ID NO: 4925221 - DNA, 25 bp, Homo sapien
gatttctgatcaagtccttcaccaa

SEQ ID NO: 4925222 - DNA, 25 bp, Homo sapien
tcctaatctagaagatttctgatca

SEQ ID NO: 4925223 - DNA, 25 bp, Homo sapien
gatggtttgtagtttcctaatctag

SEQ ID NO: 4925224 - DNA, 25 bp, Homo sapien
tgcctcagatgctatgtctaaaacc

SEQ ID NO: 4925225 - DNA, 25 bp, Homo sapien
gcctcagatgctatgtctaaaaccc

SEQ ID NO: 4925226 - DNA, 25 bp, Homo sapien
cctcagatgctatgtctaaaacccc

SEQ ID NO: 4925227 - DNA, 25 bp, Homo sapien
tcagatgctatgtctaaaaccccac

SEQ ID NO: 4925228 - DNA, 25 bp, Homo sapien
aagtctacacatttgttcagactgg

SEQ ID NO: 4925229 - DNA, 25 bp, Homo sapien
ccctgtttaccaagtctacacattt

SEQ ID NO: 4925230 - DNA, 25 bp, Homo sapien
tctacacatttgttcagactggtaa

SEQ ID NO: 4925231 - DNA, 25 bp, Homo sapien
caccctgtttaccaagtctacacat

SEQ ID NO: 4925232 - DNA, 25 bp, Homo sapien
gccaaccgtagctgagcaagctcag

SEQ ID NO: 4925233 - DNA, 25 bp, Homo sapien
cagggcaaaggccaaccgtagctga

SEQ ID NO: 4925234 - DNA, 25 bp, Homo sapien
actgatttctcagccaatgtttctg

SEQ ID NO: 4925235 - DNA, 25 bp, Homo sapien
tgctctgagaagtacgagcgctcct

SEQ ID NO: 4925236 - DNA, 25 bp, Homo sapien
tctcttctctttgttacattggttt

SEQ ID NO: 4925237 - DNA, 25 bp, Homo sapien
ctcttctctttgttacattggtttt

SEQ ID NO: 4925238 - DNA, 25 bp, Homo sapien
ctgtgtcattccaattttcgtacat

SEQ ID NO: 4925239 - DNA, 25 bp, Homo sapien
gtcattccaattttcgtacatgtgc

SEQ ID NO: 4925240 - DNA, 25 bp, Homo sapien
tacatgtgctgccaaaacaagaact

SEQ ID NO: 4925241 - DNA, 25 bp, Homo sapien
gtacatgtgctgccaaaacaagaac

SEQ ID NO: 4925242 - DNA, 25 bp, Homo sapien
tgggggatacttgttccttcagtac

SEQ ID NO: 4925243 - DNA, 25 bp, Homo sapien
tcagtatcccccaaaatgttcttct

SEQ ID NO: 4925244 - DNA, 25 bp, Homo sapien
cttcttccattttgggggatacttg

SEQ ID NO: 4925245 - DNA, 25 bp, Homo sapien
atgttcttcttcttccattttgggg

SEQ ID NO: 4925246 - DNA, 25 bp, Homo sapien
tgatttcaacttaatgtatgagatc

SEQ ID NO: 4925247 - DNA, 25 bp, Homo sapien
ttgatttcaacttaatgtatgagat

SEQ ID NO: 4925248 - DNA, 25 bp, Homo sapien
gaacaatttgacactcgcagcctag

SEQ ID NO: 4925249 - DNA, 25 bp, Homo sapien
gcttcctcctgatttgctgccatgg

SEQ ID NO: 4925250 - DNA, 25 bp, Homo sapien
taatgtggtgaacacctagcttcct

SEQ ID NO: 4925251 - DNA, 25 bp, Homo sapien
gcagcctagaagcactcaggaggga

SEQ ID NO: 4925252 - DNA, 25 bp, Homo sapien
gtggattaaacaagaggacgaattg

SEQ ID NO: 4925253 - DNA, 25 bp, Homo sapien
caagtcagaagtcttgggttatacc

SEQ ID NO: 4925254 - DNA, 25 bp, Homo sapien
tactccatggagtaataatgtggat

SEQ ID NO: 4925255 - DNA, 25 bp, Homo sapien
ccaatttttagacctccaaatgagg

SEQ ID NO: 4925256 - DNA, 25 bp, Homo sapien
cactccagttaactgaatctctgac

SEQ ID NO: 4925257 - DNA, 25 bp, Homo sapien
gagcaggttttgtctaatacataga

SEQ ID NO: 4925258 - DNA, 25 bp, Homo sapien
cagaataaagaaatattcgctactg

SEQ ID NO: 4925259 - DNA, 25 bp, Homo sapien
tcgctactggttctgccaggatctc

SEQ ID NO: 4925260 - DNA, 25 bp, Homo sapien
aatggagcatgaaggctccaagtgt

SEQ ID NO: 4925261 - DNA, 25 bp, Homo sapien
taggtccctgtattgccagtcacaa

SEQ ID NO: 4925262 - DNA, 25 bp, Homo sapien
ttaggtccctgtattgccagtcaca

SEQ ID NO: 4925263 - DNA, 25 bp, Homo sapien
aggtccctgtattgccagtcacaaa

SEQ ID NO: 4925264 - DNA, 25 bp, Homo sapien
tatctaacaacaagcaaagcgaccc

SEQ ID NO: 4925265 - DNA, 25 bp, Homo sapien
cagcctagcatatactggttccaga

SEQ ID NO: 4925266 - DNA, 25 bp, Homo sapien
aaaatcctgagacattagatgccac

SEQ ID NO: 4925267 - DNA, 25 bp, Homo sapien
gggctggtaccgagaattatccatt

SEQ ID NO: 4925268 - DNA, 25 bp, Homo sapien
aataaggcaaggaccaagcaaaggg

SEQ ID NO: 4925269 - DNA, 25 bp, Homo sapien
aaggcagtgagggtggttgttccac

SEQ ID NO: 4925270 - DNA, 25 bp, Homo sapien
ctcttgtgggtgaaggacgaaggca

SEQ ID NO: 4925271 - DNA, 25 bp, Homo sapien
tgagggtggttgttccacagggtaa

SEQ ID NO: 4925272 - DNA, 25 bp, Homo sapien
tcagtgtatgaatttggaggccagg

SEQ ID NO: 4925273 - DNA, 25 bp, Homo sapien
tttgtagggcacataccagctctta

SEQ ID NO: 4925274 - DNA, 25 bp, Homo sapien
ggaggccaggacatgagtcatccca

SEQ ID NO: 4925275 - DNA, 25 bp, Homo sapien
tgactcacacgtgaacagcatctgg

SEQ ID NO: 4925276 - DNA, 25 bp, Homo sapien
cagtgtcagcttgaaggtaaccaca

SEQ ID NO: 4925277 - DNA, 25 bp, Homo sapien
agccatctgggacaaccccttggca

SEQ ID NO: 4925278 - DNA, 25 bp, Homo sapien
ttggcagtgcgcctacagcctttta

SEQ ID NO: 4925279 - DNA, 25 bp, Homo sapien
gccgtcctcactgggaatgcgaggc

SEQ ID NO: 4925280 - DNA, 25 bp, Homo sapien
aggactgccttttacagacctcttc

SEQ ID NO: 4925281 - DNA, 25 bp, Homo sapien
tcatacatcattcatctgcatgaca

SEQ ID NO: 4925282 - DNA, 25 bp, Homo sapien
tctgcatgacactcaaggactgcct

SEQ ID NO: 4925283 - DNA, 25 bp, Homo sapien
tcaaggactgccttttacagacctc

SEQ ID NO: 4925284 - DNA, 25 bp, Homo sapien
tggcagatataagtaatggacttca

SEQ ID NO: 4925285 - DNA, 25 bp, Homo sapien
agtttggcagatataagtaatggac

SEQ ID NO: 4925286 - DNA, 25 bp, Homo sapien
gtttggcagatataagtaatggact

SEQ ID NO: 4925287 - DNA, 25 bp, Homo sapien
ttggcagatataagtaatggacttc

SEQ ID NO: 4925288 - DNA, 25 bp, Homo sapien
tgttctgtgcacataggcatcagtt

SEQ ID NO: 4925289 - DNA, 25 bp, Homo sapien
cagaaagctcaaagcgtccgggagt

SEQ ID NO: 4925290 - DNA, 25 bp, Homo sapien
tttgcttctactgagttgcatctgc

SEQ ID NO: 4925291 - DNA, 25 bp, Homo sapien
gcctcctgggttgtaagcacagaaa

SEQ ID NO: 4925292 - DNA, 25 bp, Homo sapien
tccctatcccccctcatgcacatct

SEQ ID NO: 4925293 - DNA, 25 bp, Homo sapien
aaacttccctatcccccctcatgca

SEQ ID NO: 4925294 - DNA, 25 bp, Homo sapien
atcccccctcatgcacatcttaaag

SEQ ID NO: 4925295 - DNA, 25 bp, Homo sapien
ccaaacttccctatcccccctcatg

SEQ ID NO: 4925296 - DNA, 25 bp, Homo sapien
cctatggactacactcttagaaggg

SEQ ID NO: 4925297 - DNA, 25 bp, Homo sapien
tgaggaggttttcaccctggaggca

SEQ ID NO: 4925298 - DNA, 25 bp, Homo sapien
gggacatagcctgaggtgacttctt

SEQ ID NO: 4925299 - DNA, 25 bp, Homo sapien
gcccaggtctactttgtatgtcttg

SEQ ID NO: 4925300 - DNA, 25 bp, Homo sapien
gcatcccggccttgcagaaccaagg

SEQ ID NO: 4925301 - DNA, 25 bp, Homo sapien
tcccggccttgcagaaccaagggtc

SEQ ID NO: 4925302 - DNA, 25 bp, Homo sapien
catcccggccttgcagaaccaaggg

SEQ ID NO: 4925303 - DNA, 25 bp, Homo sapien
cagcatcccggccttgcagaaccaa

SEQ ID NO: 4925304 - DNA, 25 bp, Homo sapien
ttacttcctttatgggggctgctct

SEQ ID NO: 4925305 - DNA, 25 bp, Homo sapien
ctgtttctgccccaaggttgcctgt

SEQ ID NO: 4925306 - DNA, 25 bp, Homo sapien
gctcctcggtgaccttcttcttgga

SEQ ID NO: 4925307 - DNA, 25 bp, Homo sapien
ggagcctcaactttgactggtttag

SEQ ID NO: 4925308 - DNA, 25 bp, Homo sapien
ttccgttttgcttgactcctgatgg

SEQ ID NO: 4925309 - DNA, 25 bp, Homo sapien
ttgactcctgatggacctcttcttg

SEQ ID NO: 4925310 - DNA, 25 bp, Homo sapien
gactcctgatggacctcttcttgca

SEQ ID NO: 4925311 - DNA, 25 bp, Homo sapien
aagcttccgttttgcttgactcctg

SEQ ID NO: 4925312 - DNA, 25 bp, Homo sapien
cagtttctgttcctcgttctcaaaa

SEQ ID NO: 4925313 - DNA, 25 bp, Homo sapien
ctgttcctcgttctcaaaaccagca

SEQ ID NO: 4925314 - DNA, 25 bp, Homo sapien
tttctgttcctcgttctcaaaacca

SEQ ID NO: 4925315 - DNA, 25 bp, Homo sapien
aatttcagtttctgttcctcgttct

SEQ ID NO: 4925316 - DNA, 25 bp, Homo sapien
ccaaagcaggctcggcggctgtact

SEQ ID NO: 4925317 - DNA, 25 bp, Homo sapien
tcatggcccggtcgtagtcctgctg

SEQ ID NO: 4925318 - DNA, 25 bp, Homo sapien
ggaagtgttcctgtcaatataaaag

SEQ ID NO: 4925319 - DNA, 25 bp, Homo sapien
cggtggagaagccaaagcaggctcg

SEQ ID NO: 4925320 - DNA, 25 bp, Homo sapien
caaatggctggcaggattgagtctg

SEQ ID NO: 4925321 - DNA, 25 bp, Homo sapien
acttgttttaacctaggctggcttg

SEQ ID NO: 4925322 - DNA, 25 bp, Homo sapien
agagatcagtgatgtatgacagtcc

SEQ ID NO: 4925323 - DNA, 25 bp, Homo sapien
tcaacatctgaatgcaaagtaggtg

SEQ ID NO: 4925324 - DNA, 25 bp, Homo sapien
ctcttggactctccactgtccgaga

SEQ ID NO: 4925325 - DNA, 25 bp, Homo sapien
tccactgtccgagagaaacaaaaca

SEQ ID NO: 4925326 - DNA, 25 bp, Homo sapien
tatctgcacccttcaaaaaccttct

SEQ ID NO: 4925327 - DNA, 25 bp, Homo sapien
gactctccactgtccgagagaaaca

SEQ ID NO: 4925328 - DNA, 25 bp, Homo sapien
cctttttcgataagctagagtcaga

SEQ ID NO: 4925329 - DNA, 25 bp, Homo sapien
gggacagattagactcagcatagca

SEQ ID NO: 4925330 - DNA, 25 bp, Homo sapien
tccaacaaggaatagaggcaactgt

SEQ ID NO: 4925331 - DNA, 25 bp, Homo sapien
tagagtcagactaggaactccaaca

SEQ ID NO: 4925332 - DNA, 25 bp, Homo sapien
agtgagaggtaattggtaattgaat

SEQ ID NO: 4925333 - DNA, 25 bp, Homo sapien
tcaataagggtccatccaggaaaac

SEQ ID NO: 4925334 - DNA, 25 bp, Homo sapien
taacagtgatcctgacagatgggag

SEQ ID NO: 4925335 - DNA, 25 bp, Homo sapien
tgatgccacagagaatacacagccc

SEQ ID NO: 4925336 - DNA, 25 bp, Homo sapien
tcaataagggtccatccaggaaaaa

SEQ ID NO: 4925337 - DNA, 25 bp, Homo sapien
ggaatagatgagataggcttcttga

SEQ ID NO: 4925338 - DNA, 25 bp, Homo sapien
gaggttgaattttctacaagcccag

SEQ ID NO: 4925339 - DNA, 25 bp, Homo sapien
tgtaaactttcttgatgatctgcct

SEQ ID NO: 4925340 - DNA, 25 bp, Homo sapien
ggcacatcagctgtaagtagtgtaa

SEQ ID NO: 4925341 - DNA, 25 bp, Homo sapien
ggtgcctgtgtacctgtgcacgtgt

SEQ ID NO: 4925342 - DNA, 25 bp, Homo sapien
agagtcagcaagatccagttgtggg

SEQ ID NO: 4925343 - DNA, 25 bp, Homo sapien
ctaacaggaagagtcagcaagatcc

SEQ ID NO: 4925344 - DNA, 25 bp, Homo sapien
acaggaagagtcagcaagatccagt

SEQ ID NO: 4925345 - DNA, 25 bp, Homo sapien
agatgctgacagatctgcctgggca

SEQ ID NO: 4925346 - DNA, 25 bp, Homo sapien
gctgatccaggtgaacaagtactcc

SEQ ID NO: 4925347 - DNA, 25 bp, Homo sapien
gccacgtgatctatgtccaggaatg

SEQ ID NO: 4925348 - DNA, 25 bp, Homo sapien
gcactaagatctctacgcaggaggg

SEQ ID NO: 4925349 - DNA, 25 bp, Homo sapien
ggctaagcacatgtgggaggagaca

SEQ ID NO: 4925350 - DNA, 25 bp, Homo sapien
gagtggctaagcacatgtgggagga

SEQ ID NO: 4925351 - DNA, 25 bp, Homo sapien
gtggctaagcacatgtgggaggaga

SEQ ID NO: 4925352 - DNA, 25 bp, Homo sapien
ccagagtggctaagcacatgtggga

SEQ ID NO: 4925353 - DNA, 25 bp, Homo sapien
tctcttgtcatgctttgactcttct

SEQ ID NO: 4925354 - DNA, 25 bp, Homo sapien
tgtcatgctttgactcttcttctct

SEQ ID NO: 4925355 - DNA, 25 bp, Homo sapien
cctctcttgtcatgctttgactctt

SEQ ID NO: 4925356 - DNA, 25 bp, Homo sapien
catgctttgactcttcttctctcat

SEQ ID NO: 4925357 - DNA, 25 bp, Homo sapien
tgccaaaagcttgataactagacaa

SEQ ID NO: 4925358 - DNA, 25 bp, Homo sapien
tctagtctttgaatgcagaacccag

SEQ ID NO: 4925359 - DNA, 25 bp, Homo sapien
cacttgggctggcaaatatctgagc

SEQ ID NO: 4925360 - DNA, 25 bp, Homo sapien
tgggaagaggaatcaaataattgcc

SEQ ID NO: 4925361 - DNA, 25 bp, Homo sapien
gttggaacgtccatgaacagctgac

SEQ ID NO: 4925362 - DNA, 25 bp, Homo sapien
aaaaccaagtaggatgtagatacat

SEQ ID NO: 4925363 - DNA, 25 bp, Homo sapien
aacagctgacgttaccgatccaggg

SEQ ID NO: 4925364 - DNA, 25 bp, Homo sapien
tgtcccttcttgaacatcgagttgg

SEQ ID NO: 4925365 - DNA, 25 bp, Homo sapien
ggcaaagcttgagacaaaacagcag

SEQ ID NO: 4925366 - DNA, 25 bp, Homo sapien
tcacctggtaatagaactgaaaacc

SEQ ID NO: 4925367 - DNA, 25 bp, Homo sapien
aacttagaagaaccttgagtgggag

SEQ ID NO: 4925368 - DNA, 25 bp, Homo sapien
tgggaggttttttagcatgtggcaa

SEQ ID NO: 4925369 - DNA, 25 bp, Homo sapien
cttctttgtccataagtcctgtcat

SEQ ID NO: 4925370 - DNA, 25 bp, Homo sapien
tattgaagctaggttgtcagattta

SEQ ID NO: 4925371 - DNA, 25 bp, Homo sapien
ttcccaagaatttgtctattgaagc

SEQ ID NO: 4925372 - DNA, 25 bp, Homo sapien
atttattgttgagtagccttccaaa

SEQ ID NO: 4925373 - DNA, 25 bp, Homo sapien
tattgttgagtagccttccaaacat

SEQ ID NO: 4925374 - DNA, 25 bp, Homo sapien
ctttcaagtaatcaatcagagcccc

SEQ ID NO: 4925375 - DNA, 25 bp, Homo sapien
tcagagcccctgctgaacttctctt

SEQ ID NO: 4925376 - DNA, 25 bp, Homo sapien
gtaccccagggaacaagcacatctg

SEQ ID NO: 4925377 - DNA, 25 bp, Homo sapien
tggcacactttaattcaggtgtagt

SEQ ID NO: 4925378 - DNA, 25 bp, Homo sapien
gagaaggagatgggtcctaatggac

SEQ ID NO: 4925379 - DNA, 25 bp, Homo sapien
ctgtttcttgctggttgcaatggat

SEQ ID NO: 4925380 - DNA, 25 bp, Homo sapien
cttgctggttgcaatggatggagaa

SEQ ID NO: 4925381 - DNA, 25 bp, Homo sapien
ttcttgctggttgcaatggatggag

SEQ ID NO: 4925382 - DNA, 25 bp, Homo sapien
tctgacgccatctttacatattaca

SEQ ID NO: 4925383 - DNA, 25 bp, Homo sapien
tctgcgagtgttacttctgacgcca

SEQ ID NO: 4925384 - DNA, 25 bp, Homo sapien
gtttttctccattctgcgagtgtta

SEQ ID NO: 4925385 - DNA, 25 bp, Homo sapien
gagtgttacttctgacgccatcttt

SEQ ID NO: 4925386 - DNA, 25 bp, Homo sapien
tagctccatagtatttagacccagc

SEQ ID NO: 4925387 - DNA, 25 bp, Homo sapien
ccagcaattggaagaatgactctca

SEQ ID NO: 4925388 - DNA, 25 bp, Homo sapien
caacaagattggctagtgcattgcc

SEQ ID NO: 4925389 - DNA, 25 bp, Homo sapien
cattgccatgcgtggtgtgagcaaa

SEQ ID NO: 4925390 - DNA, 25 bp, Homo sapien
ttgttatcgccacattgtctcagag

SEQ ID NO: 4925391 - DNA, 25 bp, Homo sapien
gtctcagagcaatagttactccctc

SEQ ID NO: 4925392 - DNA, 25 bp, Homo sapien
gttgatgttacggcagagcaaagac

SEQ ID NO: 4925393 - DNA, 25 bp, Homo sapien
taagggttgaaggagagcctttgcg

SEQ ID NO: 4925394 - DNA, 25 bp, Homo sapien
tcacagtggtccgaagtccatttct

SEQ ID NO: 4925395 - DNA, 25 bp, Homo sapien
acagtggtccgaagtccatttcttc

SEQ ID NO: 4925396 - DNA, 25 bp, Homo sapien
tccaacctgtggatgacgatgtcac

SEQ ID NO: 4925397 - DNA, 25 bp, Homo sapien
tcttccaacctgtggatgacgatgt

SEQ ID NO: 4925398 - DNA, 25 bp, Homo sapien
ttctgcctcttcttctggagtgccc

SEQ ID NO: 4925399 - DNA, 25 bp, Homo sapien
gcctcttcttctggagtgcccacat

SEQ ID NO: 4925400 - DNA, 25 bp, Homo sapien
tgcttatttgtttgattacttttgt

SEQ ID NO: 4925401 - DNA, 25 bp, Homo sapien
tgcctcttcttctggagtgcccaca

SEQ ID NO: 4925402 - DNA, 25 bp, Homo sapien
gctgaaaccattgtcaggaaacaag

SEQ ID NO: 4925403 - DNA, 25 bp, Homo sapien
caaggtcatcaacaacgggtaatgg

SEQ ID NO: 4925404 - DNA, 25 bp, Homo sapien
tgagtcccgacctgggaagcagttg

SEQ ID NO: 4925405 - DNA, 25 bp, Homo sapien
atgattgttgctgaaaccattgtca

SEQ ID NO: 4925406 - DNA, 25 bp, Homo sapien
tttaagctcaaaggttcctcaagag

SEQ ID NO: 4925407 - DNA, 25 bp, Homo sapien
gttcgtacgggtatgtctgcacccc

SEQ ID NO: 4925408 - DNA, 25 bp, Homo sapien
tctgcaccccaggataatgtggcct

SEQ ID NO: 4925409 - DNA, 25 bp, Homo sapien
tagggaacctcaaatagccgtgcat

SEQ ID NO: 4925410 - DNA, 25 bp, Homo sapien
tggaagctgcctatgaccaggaaat

SEQ ID NO: 4925411 - DNA, 25 bp, Homo sapien
ttaggcttgagtaattgaattcttt

SEQ ID NO: 4925412 - DNA, 25 bp, Homo sapien
gcatccagatgttcttgtgtggaag

SEQ ID NO: 4925413 - DNA, 25 bp, Homo sapien
tgtacagtgcagatcaataacttga

SEQ ID NO: 4925414 - DNA, 25 bp, Homo sapien
gaccttcaggagtagaccatggacc

SEQ ID NO: 4925415 - DNA, 25 bp, Homo sapien
catatcagagggtatccaagccttg

SEQ ID NO: 4925416 - DNA, 25 bp, Homo sapien
catctactcttgaagtgggccgggc

SEQ ID NO: 4925417 - DNA, 25 bp, Homo sapien
cgctgtgcctgcaaccagattggaa

SEQ ID NO: 4925418 - DNA, 25 bp, Homo sapien
ttggcacagggcttatatgcagcgt

SEQ ID NO: 4925419 - DNA, 25 bp, Homo sapien
gctcagagctgacacaacaacactt

SEQ ID NO: 4925420 - DNA, 25 bp, Homo sapien
caaactataaggtctcttgaggcct

SEQ ID NO: 4925421 - DNA, 25 bp, Homo sapien
gacaaaaattatgagagcaacccag

SEQ ID NO: 4925422 - DNA, 25 bp, Homo sapien
gatgagctggatctgtcactgcgga

SEQ ID NO: 4925423 - DNA, 25 bp, Homo sapien
gaattttaacaagccgatttgccca

SEQ ID NO: 4925424 - DNA, 25 bp, Homo sapien
ccttgactggtgagcaggaagaatg

SEQ ID NO: 4925425 - DNA, 25 bp, Homo sapien
tagccatgtcacaagcacagatgag

SEQ ID NO: 4925426 - DNA, 25 bp, Homo sapien
gcactacctcgtcctagatgacact

SEQ ID NO: 4925427 - DNA, 25 bp, Homo sapien
actacctcgtcctagatgacacttc

SEQ ID NO: 4925428 - DNA, 25 bp, Homo sapien
acctcgtcctagatgacacttcaca

SEQ ID NO: 4925429 - DNA, 25 bp, Homo sapien
aggcactacctcgtcctagatgaca

SEQ ID NO: 4925430 - DNA, 25 bp, Homo sapien
gactgcttctgcctcatggtcctca

SEQ ID NO: 4925431 - DNA, 25 bp, Homo sapien
actgcttctgcctcatggtcctcac

SEQ ID NO: 4925432 - DNA, 25 bp, Homo sapien
ttcagccactggtctcccgactaaa

SEQ ID NO: 4925433 - DNA, 25 bp, Homo sapien
aaagcacacactgcatctccatatt

SEQ ID NO: 4925434 - DNA, 25 bp, Homo sapien
ggattcatcgctgcaaaagcacaca

SEQ ID NO: 4925435 - DNA, 25 bp, Homo sapien
tctccatattccttactccacagaa

SEQ ID NO: 4925436 - DNA, 25 bp, Homo sapien
agcatgaaaacccttttcactcctt

SEQ ID NO: 4925437 - DNA, 25 bp, Homo sapien
gtatctgaaccgtagctgccggaat

SEQ ID NO: 4925438 - DNA, 25 bp, Homo sapien
gcagtatctgaaccgtagctgccgg

SEQ ID NO: 4925439 - DNA, 25 bp, Homo sapien
aagcatgaaaacccttttcactcct

SEQ ID NO: 4925440 - DNA, 25 bp, Homo sapien
gaaataatgaagaatgaccacttac

SEQ ID NO: 4925441 - DNA, 25 bp, Homo sapien
ttgaaataatgaagaatgaccactt

SEQ ID NO: 4925442 - DNA, 25 bp, Homo sapien
tgaaataatgaagaatgaccactta

SEQ ID NO: 4925443 - DNA, 25 bp, Homo sapien
tttgaaataatgaagaatgaccact

SEQ ID NO: 4925444 - DNA, 25 bp, Homo sapien
gacttcacagaggaattgtgattta

SEQ ID NO: 4925445 - DNA, 25 bp, Homo sapien
gtgatttaaatagcaaggtatgttc

SEQ ID NO: 4925446 - DNA, 25 bp, Homo sapien
caggtagaattagagcagacttcac

SEQ ID NO: 4925447 - DNA, 25 bp, Homo sapien
taaatagcaaggtatgttctgcaca

SEQ ID NO: 4925448 - DNA, 25 bp, Homo sapien
ctaattctagtgtgaggcagagcct

SEQ ID NO: 4925449 - DNA, 25 bp, Homo sapien
tctagtgtgaggcagagccttcctg

SEQ ID NO: 4925450 - DNA, 25 bp, Homo sapien
aattctagtgtgaggcagagccttc

SEQ ID NO: 4925451 - DNA, 25 bp, Homo sapien
tctaattctagtgtgaggcagagcc

SEQ ID NO: 4925452 - DNA, 25 bp, Homo sapien
cgctgtctgctaaagatgtggcctc

SEQ ID NO: 4925453 - DNA, 25 bp, Homo sapien
gccgtgccatgcgactgcaatctgt

SEQ ID NO: 4925454 - DNA, 25 bp, Homo sapien
tctcagtctgacaattgatagagtc

SEQ ID NO: 4925455 - DNA, 25 bp, Homo sapien
tcagagtcacccagcggtcttggag

SEQ ID NO: 4925456 - DNA, 25 bp, Homo sapien
cttccccgcattctctagtaggcca

SEQ ID NO: 4925457 - DNA, 25 bp, Homo sapien
cttgggagagaagagtatcccttcc

SEQ ID NO: 4925458 - DNA, 25 bp, Homo sapien
gggtcattgacttctctgttgattc

SEQ ID NO: 4925459 - DNA, 25 bp, Homo sapien
gattcttggggcaccgagttcctct

SEQ ID NO: 4925460 - DNA, 25 bp, Homo sapien
cgaagcctagtccatccaacttctg

SEQ ID NO: 4925461 - DNA, 25 bp, Homo sapien
agtggaattattgaagtctgtctgc

SEQ ID NO: 4925462 - DNA, 25 bp, Homo sapien
ttcactgatgaaggatctgaatgaa

SEQ ID NO: 4925463 - DNA, 25 bp, Homo sapien
ccacagaggcttttgagtggaatta

SEQ ID NO: 4925464 - DNA, 25 bp, Homo sapien
ccctcctttctaggagtttctcaca

SEQ ID NO: 4925465 - DNA, 25 bp, Homo sapien
tcttatggcctctagtactaagagc

SEQ ID NO: 4925466 - DNA, 25 bp, Homo sapien
tgaggcgaaacagttgccttggccc

SEQ ID NO: 4925467 - DNA, 25 bp, Homo sapien
taagagcattttcggctgttgagct

SEQ ID NO: 4925468 - DNA, 25 bp, Homo sapien
gaccaccaagaagtccccaagacat

SEQ ID NO: 4925469 - DNA, 25 bp, Homo sapien
gacaaaccatcaaagtcaacagtga

SEQ ID NO: 4925470 - DNA, 25 bp, Homo sapien
gacatttcgggactaaggcaagagg

SEQ ID NO: 4925471 - DNA, 25 bp, Homo sapien
tcaactactgactggtgatggcaaa

SEQ ID NO: 4925472 - DNA, 25 bp, Homo sapien
ccagattggactcattttctcagtg

SEQ ID NO: 4925473 - DNA, 25 bp, Homo sapien
tcaggtgtctgatgttagtccaatc

SEQ ID NO: 4925474 - DNA, 25 bp, Homo sapien
tggtcggtccgtccagcttcgttca

SEQ ID NO: 4925475 - DNA, 25 bp, Homo sapien
ggagagacacctggtcggtccgtcc

SEQ ID NO: 4925476 - DNA, 25 bp, Homo sapien
ttttgggccttttagcagctaccat

SEQ ID NO: 4925477 - DNA, 25 bp, Homo sapien
attttgggccttttagcagctacca

SEQ ID NO: 4925478 - DNA, 25 bp, Homo sapien
ccagacactcgccagagcaccagaa

SEQ ID NO: 4925479 - DNA, 25 bp, Homo sapien
ctttccagacactcgccagagcacc

SEQ ID NO: 4925480 - DNA, 25 bp, Homo sapien
tttccagacactcgccagagcacca

SEQ ID NO: 4925481 - DNA, 25 bp, Homo sapien
acactcgccagagcaccagaaccat

SEQ ID NO: 4925482 - DNA, 25 bp, Homo sapien
tctgagtgtgagcaagtccatagct

SEQ ID NO: 4925483 - DNA, 25 bp, Homo sapien
tggaaagacaagtggcctccacaca

SEQ ID NO: 4925484 - DNA, 25 bp, Homo sapien
tctgaaaaagtagaccagatttgcc

SEQ ID NO: 4925485 - DNA, 25 bp, Homo sapien
ctttatgaagtgtccccacaggtct

SEQ ID NO: 4925486 - DNA, 25 bp, Homo sapien
ctttcattgctagtgtctccaggcc

SEQ ID NO: 4925487 - DNA, 25 bp, Homo sapien
tttcattgctagtgtctccaggccc

SEQ ID NO: 4925488 - DNA, 25 bp, Homo sapien
gaagacaagttgtaggactgaacac

SEQ ID NO: 4925489 - DNA, 25 bp, Homo sapien
ggcgtcagttagcaatccaatattt

SEQ ID NO: 4925490 - DNA, 25 bp, Homo sapien
gacatttgcattggcgtcagttagc

SEQ ID NO: 4925491 - DNA, 25 bp, Homo sapien
tgccagagacatttgcattggcgtc

SEQ ID NO: 4925492 - DNA, 25 bp, Homo sapien
gcattggcgtcagttagcaatccaa

SEQ ID NO: 4925493 - DNA, 25 bp, Homo sapien
tggctggcgaaggactaagtagtgg

SEQ ID NO: 4925494 - DNA, 25 bp, Homo sapien
tctgatggtggctggcgaaggacta

SEQ ID NO: 4925495 - DNA, 25 bp, Homo sapien
tggtggctggcgaaggactaagtag

SEQ ID NO: 4925496 - DNA, 25 bp, Homo sapien
gcgaaggactaagtagtggagacat

SEQ ID NO: 4925497 - DNA, 25 bp, Homo sapien
tgcactgaatctctgcttgatcctc

SEQ ID NO: 4925498 - DNA, 25 bp, Homo sapien
tactacaacctcatcgcatccttga

SEQ ID NO: 4925499 - DNA, 25 bp, Homo sapien
ccactactacaacctcatcgcatcc

SEQ ID NO: 4925500 - DNA, 25 bp, Homo sapien
acttcctgcactgaatctctgcttg

SEQ ID NO: 4925501 - DNA, 25 bp, Homo sapien
ctgaggagttatggagggcttggaa

SEQ ID NO: 4925502 - DNA, 25 bp, Homo sapien
ggtttacgggctgcaatctgttggg

SEQ ID NO: 4925503 - DNA, 25 bp, Homo sapien
ggcagctctaaaggcgtgtttagga

SEQ ID NO: 4925504 - DNA, 25 bp, Homo sapien
cctgtgcacagacgatgctctgagg

SEQ ID NO: 4925505 - DNA, 25 bp, Homo sapien
acatgtattgaacacctatgatgta

SEQ ID NO: 4925506 - DNA, 25 bp, Homo sapien
cctatgatgtaccatgaaacttacc

SEQ ID NO: 4925507 - DNA, 25 bp, Homo sapien
ccatgaaacttaccattaacagggc

SEQ ID NO: 4925508 - DNA, 25 bp, Homo sapien
tgtattgaacacctatgatgtacca

SEQ ID NO: 4925509 - DNA, 25 bp, Homo sapien
tctcctcctgcttgtttactaaatg

SEQ ID NO: 4925510 - DNA, 25 bp, Homo sapien
cagtgttgaggggatccttctcctc

SEQ ID NO: 4925511 - DNA, 25 bp, Homo sapien
tcttgtttcctcttcattactaaca

SEQ ID NO: 4925512 - DNA, 25 bp, Homo sapien
catcatcgttgtcatcagtgttgag

SEQ ID NO: 4925513 - DNA, 25 bp, Homo sapien
tgacaggttaccctacatacaggtt

SEQ ID NO: 4925514 - DNA, 25 bp, Homo sapien
ggcactctcatttgacctaggcatg

SEQ ID NO: 4925515 - DNA, 25 bp, Homo sapien
gatttgaattaagaccccggcactc

SEQ ID NO: 4925516 - DNA, 25 bp, Homo sapien
aagtgagaatgggtcatactgtgcc

SEQ ID NO: 4925517 - DNA, 25 bp, Homo sapien
gctgattcactcctaaggatggagc

SEQ ID NO: 4925518 - DNA, 25 bp, Homo sapien
agctgattcactcctaaggatggag

SEQ ID NO: 4925519 - DNA, 25 bp, Homo sapien
aggtcaccctttggctgatctgcag

SEQ ID NO: 4925520 - DNA, 25 bp, Homo sapien
aaggacaaatgaagccatcggaaga

SEQ ID NO: 4925521 - DNA, 25 bp, Homo sapien
caaatgaagccatcggaagaagtta

SEQ ID NO: 4925522 - DNA, 25 bp, Homo sapien
tgaaaggtcaccctttggctgatct

SEQ ID NO: 4925523 - DNA, 25 bp, Homo sapien
gcccctgacttctttcttcccctca

SEQ ID NO: 4925524 - DNA, 25 bp, Homo sapien
cctgacttctttcttcccctcaagg

SEQ ID NO: 4925525 - DNA, 25 bp, Homo sapien
tgacttctttcttcccctcaaggca

SEQ ID NO: 4925526 - DNA, 25 bp, Homo sapien
gacttctttcttcccctcaaggcaa

SEQ ID NO: 4925527 - DNA, 25 bp, Homo sapien
gcatgtgcttctgatcttctggagg

SEQ ID NO: 4925528 - DNA, 25 bp, Homo sapien
tactgctatcagatggtccctgaag

SEQ ID NO: 4925529 - DNA, 25 bp, Homo sapien
cagcatttgagtcctgtcccaaggc

SEQ ID NO: 4925530 - DNA, 25 bp, Homo sapien
gcacttccgctgatgtgtcaccact

SEQ ID NO: 4925531 - DNA, 25 bp, Homo sapien
cagctgacgtttcatgtgatcacca

SEQ ID NO: 4925532 - DNA, 25 bp, Homo sapien
tgcagtttcactccttgcaggcttc

SEQ ID NO: 4925533 - DNA, 25 bp, Homo sapien
gggcctctcttctactgggcatttc

SEQ ID NO: 4925534 - DNA, 25 bp, Homo sapien
tccacatggtggaccccagttgttt

SEQ ID NO: 4925535 - DNA, 25 bp, Homo sapien
gtatatgtactgccagagcgagcac

SEQ ID NO: 4925536 - DNA, 25 bp, Homo sapien
tatatgtactgccagagcgagcacc

SEQ ID NO: 4925537 - DNA, 25 bp, Homo sapien
tctggcctcaatacacatgactgag

SEQ ID NO: 4925538 - DNA, 25 bp, Homo sapien
catgactgagtaatttggccctgtg

SEQ ID NO: 4925539 - DNA, 25 bp, Homo sapien
aataatgcatttctggcctcaatac

SEQ ID NO: 4925540 - DNA, 25 bp, Homo sapien
tacacatgactgagtaatttggccc

SEQ ID NO: 4925541 - DNA, 25 bp, Homo sapien
gctggctgtgatgctctcttgactg

SEQ ID NO: 4925542 - DNA, 25 bp, Homo sapien
aaatgttggctcttccagttggcac

SEQ ID NO: 4925543 - DNA, 25 bp, Homo sapien
aaagccttccaaatggtaagatcca

SEQ ID NO: 4925544 - DNA, 25 bp, Homo sapien
tttccaatataatagctgtggaggg

SEQ ID NO: 4925545 - DNA, 25 bp, Homo sapien
tccttaacctgtgtctactgtgctc

SEQ ID NO: 4925546 - DNA, 25 bp, Homo sapien
gcaggggatctccttaacctgtgtc

SEQ ID NO: 4925547 - DNA, 25 bp, Homo sapien
gtctactgtgctcccaagatatgct

SEQ ID NO: 4925548 - DNA, 25 bp, Homo sapien
tgtctactgtgctcccaagatatgc

SEQ ID NO: 4925549 - DNA, 25 bp, Homo sapien
gctcaccccagagtctcacagtgtt

SEQ ID NO: 4925550 - DNA, 25 bp, Homo sapien
tgcacctgggtgagtgtaacctctc

SEQ ID NO: 4925551 - DNA, 25 bp, Homo sapien
ctttcacatgctgggcaactgcacc

SEQ ID NO: 4925552 - DNA, 25 bp, Homo sapien
ggtgagtgtaacctctccagccctt

SEQ ID NO: 4925553 - DNA, 25 bp, Homo sapien
tagcaatgacatagatgagtggctt

SEQ ID NO: 4925554 - DNA, 25 bp, Homo sapien
gacgtagcaatgacatagatgagtg

SEQ ID NO: 4925555 - DNA, 25 bp, Homo sapien
cgtagcaatgacatagatgagtggc

SEQ ID NO: 4925556 - DNA, 25 bp, Homo sapien
aggccactggggacgtagcaatgac

SEQ ID NO: 4925557 - DNA, 25 bp, Homo sapien
tcaccccatggagagtactcggaac

SEQ ID NO: 4925558 - DNA, 25 bp, Homo sapien
tctgctccaacaagtggcatgacgc

SEQ ID NO: 4925559 - DNA, 25 bp, Homo sapien
ggcatgacgcattatctgaatagca

SEQ ID NO: 4925560 - DNA, 25 bp, Homo sapien
tgcttccacttttattgaagcaacc

SEQ ID NO: 4925561 - DNA, 25 bp, Homo sapien
gataagcaggacatcgactggaacg

SEQ ID NO: 4925562 - DNA, 25 bp, Homo sapien
tcaaaggagcccacaacttcagcta

SEQ ID NO: 4925563 - DNA, 25 bp, Homo sapien
tggacaacaccacgaccacatggaa

SEQ ID NO: 4925564 - DNA, 25 bp, Homo sapien
gctttggccctaatagcactggaca

SEQ ID NO: 4925565 - DNA, 25 bp, Homo sapien
ggagaacctgctgtatctaacccag

SEQ ID NO: 4925566 - DNA, 25 bp, Homo sapien
cagtagtgaaaatagaaggtaggcc

SEQ ID NO: 4925567 - DNA, 25 bp, Homo sapien
gcagagcaagtagtaataaccaccg

SEQ ID NO: 4925568 - DNA, 25 bp, Homo sapien
ctttcatgcttaacacagtagtgaa

SEQ ID NO: 4925569 - DNA, 25 bp, Homo sapien
taaatcattgtcaagggccagccag

SEQ ID NO: 4925570 - DNA, 25 bp, Homo sapien
taaagtatctattgtggaagcagcc

SEQ ID NO: 4925571 - DNA, 25 bp, Homo sapien
tgcgggaccagcacgaaagctgctt

SEQ ID NO: 4925572 - DNA, 25 bp, Homo sapien
tgtttatccgcagggcaggtcacag

SEQ ID NO: 4925573 - DNA, 25 bp, Homo sapien
taccgggacgaatgcatctaccaga

SEQ ID NO: 4925574 - DNA, 25 bp, Homo sapien
cactgggccgtatatgtgggtaact

SEQ ID NO: 4925575 - DNA, 25 bp, Homo sapien
tacggcaagcgcgagttcaagatcg

SEQ ID NO: 4925576 - DNA, 25 bp, Homo sapien
cctgatcatggagaagcgacgcaac

SEQ ID NO: 4925577 - DNA, 25 bp, Homo sapien
tggcggcggcttgcccgacggtggg

SEQ ID NO: 4925578 - DNA, 25 bp, Homo sapien
ggccagatggcggcggcttgcccga

SEQ ID NO: 4925579 - DNA, 25 bp, Homo sapien
ctcaggggccagatggcggcggctt

SEQ ID NO: 4925580 - DNA, 25 bp, Homo sapien
agatggcggcggcttgcccgacggt

SEQ ID NO: 4925581 - DNA, 25 bp, Homo sapien
ttctccaatgacgatgaggacgtgg

SEQ ID NO: 4925582 - DNA, 25 bp, Homo sapien
ggacctgtgcaaatgaccctggagt

SEQ ID NO: 4925583 - DNA, 25 bp, Homo sapien
gagaaattgacccacctaagttaca

SEQ ID NO: 4925584 - DNA, 25 bp, Homo sapien
tgtgaacgtgtgtccgcagcgtgat

SEQ ID NO: 4925585 - DNA, 25 bp, Homo sapien
cgcccttttcacggaggggctcctg

SEQ ID NO: 4925586 - DNA, 25 bp, Homo sapien
cccttttcacggaggggctcctgca

SEQ ID NO: 4925587 - DNA, 25 bp, Homo sapien
ccttttcacggaggggctcctgcat

SEQ ID NO: 4925588 - DNA, 25 bp, Homo sapien
gcccttttcacggaggggctcctgc

SEQ ID NO: 4925589 - DNA, 25 bp, Homo sapien
ggaaagctcgctacacccgagactt

SEQ ID NO: 4925590 - DNA, 25 bp, Homo sapien
tgaccgtgaccttacaggtggagaa

SEQ ID NO: 4925591 - DNA, 25 bp, Homo sapien
gggacagggagaacaggagttgccc

SEQ ID NO: 4925592 - DNA, 25 bp, Homo sapien
ggagaaacgagggaaagctcgctac

SEQ ID NO: 4925593 - DNA, 25 bp, Homo sapien
gtccaggtcgcgctctgagatcctc

SEQ ID NO: 4925594 - DNA, 25 bp, Homo sapien
cagtagaagctgctgatgcaatggg

SEQ ID NO: 4925595 - DNA, 25 bp, Homo sapien
gcccaagcttggcaggtagggcgca

SEQ ID NO: 4925596 - DNA, 25 bp, Homo sapien
tgagatcctcgcttgttcctctggg

SEQ ID NO: 4925597 - DNA, 25 bp, Homo sapien
caaactcgccctagaagtctcgggg

SEQ ID NO: 4925598 - DNA, 25 bp, Homo sapien
tgagtttgtgcaggtaacccgagcc

SEQ ID NO: 4925599 - DNA, 25 bp, Homo sapien
agaggagggactgccgagcctacac

SEQ ID NO: 4925600 - DNA, 25 bp, Homo sapien
ggccttcacctctccgcgggtgagt

SEQ ID NO: 4925601 - DNA, 25 bp, Homo sapien
ctgttgccgccaggctgcgaggctg

SEQ ID NO: 4925602 - DNA, 25 bp, Homo sapien
gccccacctcccccgagagctggct

SEQ ID NO: 4925603 - DNA, 25 bp, Homo sapien
ccgccaggctgcgaggctgccgtcc

SEQ ID NO: 4925604 - DNA, 25 bp, Homo sapien
cccacctcccccgagagctggctga

SEQ ID NO: 4925605 - DNA, 25 bp, Homo sapien
agctccggtgcttgttgctcgcccg

SEQ ID NO: 4925606 - DNA, 25 bp, Homo sapien
gagcccggagccggatctacaatcc

SEQ ID NO: 4925607 - DNA, 25 bp, Homo sapien
gagccggatctacaatcccgtccct

SEQ ID NO: 4925608 - DNA, 25 bp, Homo sapien
ttaaatgccacgggctgcgctcccg

SEQ ID NO: 4925609 - DNA, 25 bp, Homo sapien
ctcatttccacactggcaagttgtg

SEQ ID NO: 4925610 - DNA, 25 bp, Homo sapien
ccaggcggcgggtggattatttaca

SEQ ID NO: 4925611 - DNA, 25 bp, Homo sapien
gtgtttgccttctaacttgtctcgg

SEQ ID NO: 4925612 - DNA, 25 bp, Homo sapien
gccgctcggcgcaatgtgaaaaaga

SEQ ID NO: 4925613 - DNA, 25 bp, Homo sapien
tgacctttagggcaagaaatatgtt

SEQ ID NO: 4925614 - DNA, 25 bp, Homo sapien
gaaaacacctctaggatgacgcact

SEQ ID NO: 4925615 - DNA, 25 bp, Homo sapien
ttcgagctgtcctggtgaagaatcc

SEQ ID NO: 4925616 - DNA, 25 bp, Homo sapien
caaagtttcccactactaactctga

SEQ ID NO: 4925617 - DNA, 25 bp, Homo sapien
cctctctggaaataacggaggttat

SEQ ID NO: 4925618 - DNA, 25 bp, Homo sapien
tatccaacgaactggtacctctctg

SEQ ID NO: 4925619 - DNA, 25 bp, Homo sapien
aacagagcggtggtcttgggaccca

SEQ ID NO: 4925620 - DNA, 25 bp, Homo sapien
aaaagcagtcagagctgcacgcttc

SEQ ID NO: 4925621 - DNA, 25 bp, Homo sapien
tccatgggagttattaattttagag

SEQ ID NO: 4925622 - DNA, 25 bp, Homo sapien
caagaccctgttggcaggcacttgg

SEQ ID NO: 4925623 - DNA, 25 bp, Homo sapien
ttgtgtttccccgatgagcccaaga

SEQ ID NO: 4925624 - DNA, 25 bp, Homo sapien
ttagagttgtgtttccccgatgagc

SEQ ID NO: 4925625 - DNA, 25 bp, Homo sapien
ctgtactctggtcacaactgtagtc

SEQ ID NO: 4925626 - DNA, 25 bp, Homo sapien
tgaccatcttaacccaagtaggcca

SEQ ID NO: 4925627 - DNA, 25 bp, Homo sapien
aggtaatatcaaggctggctcctca

SEQ ID NO: 4925628 - DNA, 25 bp, Homo sapien
gctcttggtcttccctctggaggta

SEQ ID NO: 4925629 - DNA, 25 bp, Homo sapien
tgggatgtgacactcgggtcactgt

SEQ ID NO: 4925630 - DNA, 25 bp, Homo sapien
gtgcctcctccgaagaggtgtgtgg

SEQ ID NO: 4925631 - DNA, 25 bp, Homo sapien
cctcctccgaagaggtgtgtgggat

SEQ ID NO: 4925632 - DNA, 25 bp, Homo sapien
tgtgtgggatgtgacactcgggtca

SEQ ID NO: 4925633 - DNA, 25 bp, Homo sapien
tcccagcaaactcgctcagcccttt

SEQ ID NO: 4925634 - DNA, 25 bp, Homo sapien
gaggtgcaggtaagtctaaggattt

SEQ ID NO: 4925635 - DNA, 25 bp, Homo sapien
aaaccccagcagtgaataagaggtg

SEQ ID NO: 4925636 - DNA, 25 bp, Homo sapien
ttcccactgtaaggaaggtgtggag

SEQ ID NO: 4925637 - DNA, 25 bp, Homo sapien
ccaccgggtgggagcaaaagtgaat

SEQ ID NO: 4925638 - DNA, 25 bp, Homo sapien
gaaatgcgacgttaatggactacag

SEQ ID NO: 4925639 - DNA, 25 bp, Homo sapien
cactgcacagcggaatttatacgga

SEQ ID NO: 4925640 - DNA, 25 bp, Homo sapien
tttacggtgagagccaaaaatcctc

SEQ ID NO: 4925641 - DNA, 25 bp, Homo sapien
gggccacatgtacggccctctgttg

SEQ ID NO: 4925642 - DNA, 25 bp, Homo sapien
catgtacggccctctgttgttccag

SEQ ID NO: 4925643 - DNA, 25 bp, Homo sapien
tgttgttccagttaagtcctgcttc

SEQ ID NO: 4925644 - DNA, 25 bp, Homo sapien
ttgttccagttaagtcctgcttcat

SEQ ID NO: 4925645 - DNA, 25 bp, Homo sapien
tggtgaatagtagcttaaaggacat

SEQ ID NO: 4925646 - DNA, 25 bp, Homo sapien
caaagaacgcttactcttttgagaa

SEQ ID NO: 4925647 - DNA, 25 bp, Homo sapien
gaatgcttacattggtgaatagtag

SEQ ID NO: 4925648 - DNA, 25 bp, Homo sapien
tgtccctcctataatccaaagaacg

SEQ ID NO: 4925649 - DNA, 25 bp, Homo sapien
gaaagcctcttttgtatgactgggg

SEQ ID NO: 4925650 - DNA, 25 bp, Homo sapien
tctgaaagcctcttttgtatgactg

SEQ ID NO: 4925651 - DNA, 25 bp, Homo sapien
aagcctcttttgtatgactggggag

SEQ ID NO: 4925652 - DNA, 25 bp, Homo sapien
tgaaagcctcttttgtatgactggg

SEQ ID NO: 4925653 - DNA, 25 bp, Homo sapien
aatgtctaatcccactgaaagcccc

SEQ ID NO: 4925654 - DNA, 25 bp, Homo sapien
tagcacaggcctgaataatgtctaa

SEQ ID NO: 4925655 - DNA, 25 bp, Homo sapien
aagggaacagtaatccatctcttgg

SEQ ID NO: 4925656 - DNA, 25 bp, Homo sapien
cacccctctccatttggcaagggaa

SEQ ID NO: 4925657 - DNA, 25 bp, Homo sapien
aactccatggttctcctgtgtgcac

SEQ ID NO: 4925658 - DNA, 25 bp, Homo sapien
tcctgtgtgcacttagggctgactg

SEQ ID NO: 4925659 - DNA, 25 bp, Homo sapien
gctgactggtttcggtaggccttag

SEQ ID NO: 4925660 - DNA, 25 bp, Homo sapien
cacaaacgcggtgacttttgtgaga

SEQ ID NO: 4925661 - DNA, 25 bp, Homo sapien
tgagtgaacatctctgctccacagg

SEQ ID NO: 4925662 - DNA, 25 bp, Homo sapien
catgaagctcttaaactgcgatctg

SEQ ID NO: 4925663 - DNA, 25 bp, Homo sapien
tttcaagaaggttatcatgcagtcc

SEQ ID NO: 4925664 - DNA, 25 bp, Homo sapien
catgctgattggcacagagcggcag

SEQ ID NO: 4925665 - DNA, 25 bp, Homo sapien
ccttagcctttctcagatgtccatc

SEQ ID NO: 4925666 - DNA, 25 bp, Homo sapien
agagtctgaacaggaagcctgttac

SEQ ID NO: 4925667 - DNA, 25 bp, Homo sapien
cctcactaggcaggattctgaagga

SEQ ID NO: 4925668 - DNA, 25 bp, Homo sapien
gaagcctgttactccattggagcct

SEQ ID NO: 4925669 - DNA, 25 bp, Homo sapien
tactccattggagcctcactaggca

SEQ ID NO: 4925670 - DNA, 25 bp, Homo sapien
aagccacgtggtgagttgaaactcc

SEQ ID NO: 4925671 - DNA, 25 bp, Homo sapien
cagtgatgtcacacgggcatggctt

SEQ ID NO: 4925672 - DNA, 25 bp, Homo sapien
ggtttccagtttctaggatcatgca

SEQ ID NO: 4925673 - DNA, 25 bp, Homo sapien
gaaccactgaatagatatccgtgca

SEQ ID NO: 4925674 - DNA, 25 bp, Homo sapien
tccacactcaaataatcgcaaacag

SEQ ID NO: 4925675 - DNA, 25 bp, Homo sapien
acactcaaataatcgcaaacagacc

SEQ ID NO: 4925676 - DNA, 25 bp, Homo sapien
aaaactggggtgacttctctgtgca

SEQ ID NO: 4925677 - DNA, 25 bp, Homo sapien
aggcacagtttcaggaaaactgggg

SEQ ID NO: 4925678 - DNA, 25 bp, Homo sapien
atctgtcactctgaagagtctgctg

SEQ ID NO: 4925679 - DNA, 25 bp, Homo sapien
ccagtaaatctgtcactctgaagag

SEQ ID NO: 4925680 - DNA, 25 bp, Homo sapien
tgctgaaaccgtataaaaaagcaca

SEQ ID NO: 4925681 - DNA, 25 bp, Homo sapien
tgaagagtctgctgaaaccgtataa

SEQ ID NO: 4925682 - DNA, 25 bp, Homo sapien
aatgatgtggaagtgacagacacca

SEQ ID NO: 4925683 - DNA, 25 bp, Homo sapien
agtcccacggccagaactgtgctgg

SEQ ID NO: 4925684 - DNA, 25 bp, Homo sapien
cacagtgcagctgcgcggcaggaat

SEQ ID NO: 4925685 - DNA, 25 bp, Homo sapien
gcaggaatcaccagagggatgtgcc

SEQ ID NO: 4925686 - DNA, 25 bp, Homo sapien
gggccccgcgtcagagcatgagacc

SEQ ID NO: 4925687 - DNA, 25 bp, Homo sapien
aggaagatgatgtctctgatgtaat

SEQ ID NO: 4925688 - DNA, 25 bp, Homo sapien
taggaagatgatgtctctgatgtaa

SEQ ID NO: 4925689 - DNA, 25 bp, Homo sapien
ctaggaagatgatgtctctgatgta

SEQ ID NO: 4925690 - DNA, 25 bp, Homo sapien
ggaagatgatgtctctgatgtaatc

SEQ ID NO: 4925691 - DNA, 25 bp, Homo sapien
cacttgtttgaaggcgtggtaaggc

SEQ ID NO: 4925692 - DNA, 25 bp, Homo sapien
attcttcctgggcgcccgtgtcctt

SEQ ID NO: 4925693 - DNA, 25 bp, Homo sapien
cagatggagcacttgtttgaaggcg

SEQ ID NO: 4925694 - DNA, 25 bp, Homo sapien
gagcacttgtttgaaggcgtggtaa

SEQ ID NO: 4925695 - DNA, 25 bp, Homo sapien
catgtcactaccctgtttaagttca

SEQ ID NO: 4925696 - DNA, 25 bp, Homo sapien
cactaccctgtttaagttcaatggt

SEQ ID NO: 4925697 - DNA, 25 bp, Homo sapien
ccgtgcttgagacatgtcactaccc

SEQ ID NO: 4925698 - DNA, 25 bp, Homo sapien
gagacatgtcactaccctgtttaag

SEQ ID NO: 4925699 - DNA, 25 bp, Homo sapien
cactcacagtgtgacacacctgctt

SEQ ID NO: 4925700 - DNA, 25 bp, Homo sapien
ttaaaagtgagtggcacctccttcc

SEQ ID NO: 4925701 - DNA, 25 bp, Homo sapien
acagtggcacatgctggcaccatgc

SEQ ID NO: 4925702 - DNA, 25 bp, Homo sapien
ctctttcttgctgtcacactcacag

SEQ ID NO: 4925703 - DNA, 25 bp, Homo sapien
caattccacatgaagagcaatctgg

SEQ ID NO: 4925704 - DNA, 25 bp, Homo sapien
ggttgccctacataggccactcatg

SEQ ID NO: 4925705 - DNA, 25 bp, Homo sapien
gatgccaagaccaatgattaccagc

SEQ ID NO: 4925706 - DNA, 25 bp, Homo sapien
aatgattaccagctgcccaacttcc

SEQ ID NO: 4925707 - DNA, 25 bp, Homo sapien
tatggactaatgtctgctgataaag

SEQ ID NO: 4925708 - DNA, 25 bp, Homo sapien
tttatatggactaatgtctgctgat

SEQ ID NO: 4925709 - DNA, 25 bp, Homo sapien
tggactaatgtctgctgataaagac

SEQ ID NO: 4925710 - DNA, 25 bp, Homo sapien
tatatggactaatgtctgctgataa

SEQ ID NO: 4925711 - DNA, 25 bp, Homo sapien
cacaaagagctatttacaaaacaag

SEQ ID NO: 4925712 - DNA, 25 bp, Homo sapien
ggcagttgcctattaacagataaaa

SEQ ID NO: 4925713 - DNA, 25 bp, Homo sapien
tctatgacaaatatgatttatagga

SEQ ID NO: 4925714 - DNA, 25 bp, Homo sapien
gatttataggataagatatcaaact

SEQ ID NO: 4925715 - DNA, 25 bp, Homo sapien
gtctggctggtgtttaaagattggc

SEQ ID NO: 4925716 - DNA, 25 bp, Homo sapien
ctggctggtgtttaaagattggcat

SEQ ID NO: 4925717 - DNA, 25 bp, Homo sapien
gtactgctataactttactgcacac

SEQ ID NO: 4925718 - DNA, 25 bp, Homo sapien
agtactgctataactttactgcaca

SEQ ID NO: 4925719 - DNA, 25 bp, Homo sapien
tgtttactctacaaacccatgaggc

SEQ ID NO: 4925720 - DNA, 25 bp, Homo sapien
tattctaagacctgaatggagtact

SEQ ID NO: 4925721 - DNA, 25 bp, Homo sapien
taactcaaaactcggcttcaatccc

SEQ ID NO: 4925722 - DNA, 25 bp, Homo sapien
tgacctttattcataggatgtagcc

SEQ ID NO: 4925723 - DNA, 25 bp, Homo sapien
gaggccagcaaggaatcaaaagcca

SEQ ID NO: 4925724 - DNA, 25 bp, Homo sapien
gccaaccggatacctcaaagagtct

SEQ ID NO: 4925725 - DNA, 25 bp, Homo sapien
gacttcaatcagaatggtagagcca

SEQ ID NO: 4925726 - DNA, 25 bp, Homo sapien
gagtctcccagacagaataaacagc

SEQ ID NO: 4925727 - DNA, 25 bp, Homo sapien
tttgagttgcctgtaaaccaaaaca

SEQ ID NO: 4925728 - DNA, 25 bp, Homo sapien
gaaaaggccgacatttcattggcaa

SEQ ID NO: 4925729 - DNA, 25 bp, Homo sapien
aattaatctattgaatgccagggac

SEQ ID NO: 4925730 - DNA, 25 bp, Homo sapien
tgtgatacctttcatgaaaaggccg

SEQ ID NO: 4925731 - DNA, 25 bp, Homo sapien
tctaaaaactcagcctatcagggga

SEQ ID NO: 4925732 - DNA, 25 bp, Homo sapien
tttctgaataaaagcttgcggccag

SEQ ID NO: 4925733 - DNA, 25 bp, Homo sapien
taagatatagtatgagctttctaaa

SEQ ID NO: 4925734 - DNA, 25 bp, Homo sapien
ggctgtttaccaggaacacgaagag

SEQ ID NO: 4925735 - DNA, 25 bp, Homo sapien
gctaaaggagtgcttagacagaaat

SEQ ID NO: 4925736 - DNA, 25 bp, Homo sapien
ccagaacatatggaatgcagctaaa

SEQ ID NO: 4925737 - DNA, 25 bp, Homo sapien
tctgagaactacaggatgaaattgg

SEQ ID NO: 4925738 - DNA, 25 bp, Homo sapien
taaaccaagtggcaggaagaaacta

SEQ ID NO: 4925739 - DNA, 25 bp, Homo sapien
taactggaggagtagatgtggaatg

SEQ ID NO: 4925740 - DNA, 25 bp, Homo sapien
aactggaggagtagatgtggaatgt

SEQ ID NO: 4925741 - DNA, 25 bp, Homo sapien
ataactggaggagtagatgtggaat

SEQ ID NO: 4925742 - DNA, 25 bp, Homo sapien
ctggaggagtagatgtggaatgttc

SEQ ID NO: 4925743 - DNA, 25 bp, Homo sapien
ctgcctcatcacctttgccccacat

SEQ ID NO: 4925744 - DNA, 25 bp, Homo sapien
ctacctcatctggttcagacagagg

SEQ ID NO: 4925745 - DNA, 25 bp, Homo sapien
gtgttatgcggtgagaaatgaagcc

SEQ ID NO: 4925746 - DNA, 25 bp, Homo sapien
acacttgagtgcgatctacctcatc

SEQ ID NO: 4925747 - DNA, 25 bp, Homo sapien
ttatgcggtgagaaatgaagccagc

SEQ ID NO: 4925748 - DNA, 25 bp, Homo sapien
tttccattttatcagaccagctggg

SEQ ID NO: 4925749 - DNA, 25 bp, Homo sapien
atttccattttatcagaccagctgg

SEQ ID NO: 4925750 - DNA, 25 bp, Homo sapien
ttcctggattctcggatgattcttg

SEQ ID NO: 4925751 - DNA, 25 bp, Homo sapien
cctgaattcctggattctcggatga

SEQ ID NO: 4925752 - DNA, 25 bp, Homo sapien
ctgaattcctggattctcggatgat

SEQ ID NO: 4925753 - DNA, 25 bp, Homo sapien
gaattcctggattctcggatgattc

SEQ ID NO: 4925754 - DNA, 25 bp, Homo sapien
ttttagcctgaattaggtgtgctcc

SEQ ID NO: 4925755 - DNA, 25 bp, Homo sapien
tctgtaatcagtgggaaatactcag

SEQ ID NO: 4925756 - DNA, 25 bp, Homo sapien
taggcttctggaccatgaccatttg

SEQ ID NO: 4925757 - DNA, 25 bp, Homo sapien
tgaccatttgtacagggaagaaaag

SEQ ID NO: 4925758 - DNA, 25 bp, Homo sapien
gaaaaagcagtatctcaaacctcct

SEQ ID NO: 4925759 - DNA, 25 bp, Homo sapien
catgttgctgccgatgtttctcccc

SEQ ID NO: 4925760 - DNA, 25 bp, Homo sapien
catgatggcgttcagtatgatcaac

SEQ ID NO: 4925761 - DNA, 25 bp, Homo sapien
aattctaggccgaaatattgttgcc

SEQ ID NO: 4925762 - DNA, 25 bp, Homo sapien
tgaccgctgcttttcttagctcctc

SEQ ID NO: 4925763 - DNA, 25 bp, Homo sapien
gggcttagtttatcttgaccgctgc

SEQ ID NO: 4925764 - DNA, 25 bp, Homo sapien
tccaccgggtaacaagagcttcttc

SEQ ID NO: 4925765 - DNA, 25 bp, Homo sapien
tccattgcgatctgctttccaccgg

SEQ ID NO: 4925766 - DNA, 25 bp, Homo sapien
ttcattcccatggaagaaagactga

SEQ ID NO: 4925767 - DNA, 25 bp, Homo sapien
gacttcattcccatggaagaaagac

SEQ ID NO: 4925768 - DNA, 25 bp, Homo sapien
ccctgacttcattcccatggaagaa

SEQ ID NO: 4925769 - DNA, 25 bp, Homo sapien
cctgacttcattcccatggaagaaa

SEQ ID NO: 4925770 - DNA, 25 bp, Homo sapien
caggaatacagctggcatgacccca

SEQ ID NO: 4925771 - DNA, 25 bp, Homo sapien
aggaatacagctggcatgaccccat

SEQ ID NO: 4925772 - DNA, 25 bp, Homo sapien
taggaataggatgaactacgctgat

SEQ ID NO: 4925773 - DNA, 25 bp, Homo sapien
tgaggttaactataggaataggatg

SEQ ID NO: 4925774 - DNA, 25 bp, Homo sapien
tttcttagacctatgaggttaacta

SEQ ID NO: 4925775 - DNA, 25 bp, Homo sapien
ccaactctccatcaaaagagggttt

SEQ ID NO: 4925776 - DNA, 25 bp, Homo sapien
cagaggtcttctagcttaatggtcc

SEQ ID NO: 4925777 - DNA, 25 bp, Homo sapien
taatggtccaaagctgcgaattctc

SEQ ID NO: 4925778 - DNA, 25 bp, Homo sapien
ttcagagtgctcaagaggtccacca

SEQ ID NO: 4925779 - DNA, 25 bp, Homo sapien
tacaaagtggtgtttcgtcctctac

SEQ ID NO: 4925780 - DNA, 25 bp, Homo sapien
gggaaatgaagactctgcacatagc

SEQ ID NO: 4925781 - DNA, 25 bp, Homo sapien
gctgtccaccactgagctgggaaat

SEQ ID NO: 4925782 - DNA, 25 bp, Homo sapien
gaagactctgcacatagcatttcat

SEQ ID NO: 4925783 - DNA, 25 bp, Homo sapien
tagcatttcatctggctgatccttg

SEQ ID NO: 4925784 - DNA, 25 bp, Homo sapien
ggtcagggcatgtcaaggtagttca

SEQ ID NO: 4925785 - DNA, 25 bp, Homo sapien
tcttcattcctgtcctagcctgggt

SEQ ID NO: 4925786 - DNA, 25 bp, Homo sapien
caaggtagttcatttatgaggtgat

SEQ ID NO: 4925787 - DNA, 25 bp, Homo sapien
tagcctgggtttccaaataaagagc

SEQ ID NO: 4925788 - DNA, 25 bp, Homo sapien
ttgagagtcaaaattgtcatagatc

SEQ ID NO: 4925789 - DNA, 25 bp, Homo sapien
gcaataatctcagggaatgaagcat

SEQ ID NO: 4925790 - DNA, 25 bp, Homo sapien
tctcagggaatgaagcatagggcag

SEQ ID NO: 4925791 - DNA, 25 bp, Homo sapien
ttttggcaataatctcagggaatga

SEQ ID NO: 4925792 - DNA, 25 bp, Homo sapien
acaatctctttgtcccgctcacaca

SEQ ID NO: 4925793 - DNA, 25 bp, Homo sapien
aaagctgtcccaaagacagcatgtg

SEQ ID NO: 4925794 - DNA, 25 bp, Homo sapien
caaaggaaagctgtcccaaagacag

SEQ ID NO: 4925795 - DNA, 25 bp, Homo sapien
tctttgtcccgctcacacattcttc

SEQ ID NO: 4925796 - DNA, 25 bp, Homo sapien
tacaggcgtgaacatactgctttat

SEQ ID NO: 4925797 - DNA, 25 bp, Homo sapien
acaggcgtgaacatactgctttatt

SEQ ID NO: 4925798 - DNA, 25 bp, Homo sapien
caggcgtgaacatactgctttattt

SEQ ID NO: 4925799 - DNA, 25 bp, Homo sapien
aggcgtgaacatactgctttatttt

SEQ ID NO: 4925800 - DNA, 25 bp, Homo sapien
cagaagcttagcagcattagagatg

SEQ ID NO: 4925801 - DNA, 25 bp, Homo sapien
agcttagcagcattagagatggata

SEQ ID NO: 4925802 - DNA, 25 bp, Homo sapien
gaagcttagcagcattagagatgga

SEQ ID NO: 4925803 - DNA, 25 bp, Homo sapien
cttagcagcattagagatggataac

SEQ ID NO: 4925804 - DNA, 25 bp, Homo sapien
tggttctgccccagtacataataga

SEQ ID NO: 4925805 - DNA, 25 bp, Homo sapien
aatggcagataagtctgtggttctg

SEQ ID NO: 4925806 - DNA, 25 bp, Homo sapien
tcagcagggtccactggtgaagtga

SEQ ID NO: 4925807 - DNA, 25 bp, Homo sapien
cagctgtccataagacccttgcaac

SEQ ID NO: 4925808 - DNA, 25 bp, Homo sapien
gcatccaggataaaagagacccttg

SEQ ID NO: 4925809 - DNA, 25 bp, Homo sapien
gtttgccgtcattgccttgatgtca

SEQ ID NO: 4925810 - DNA, 25 bp, Homo sapien
ccaatgacgtgactggcaaggtgtc

SEQ ID NO: 4925811 - DNA, 25 bp, Homo sapien
tcaggataaacaggtggagatgcat

SEQ ID NO: 4925812 - DNA, 25 bp, Homo sapien
ggagcatcaggtacccagagatttt

SEQ ID NO: 4925813 - DNA, 25 bp, Homo sapien
taagctgctcgagtccaatctcaga

SEQ ID NO: 4925814 - DNA, 25 bp, Homo sapien
cagagattttcagctttcataaggc

SEQ ID NO: 4925815 - DNA, 25 bp, Homo sapien
tctgttgatggctgaaggagcatca

SEQ ID NO: 4925816 - DNA, 25 bp, Homo sapien
cacatcacgcagttgaagagaaacg

SEQ ID NO: 4925817 - DNA, 25 bp, Homo sapien
aagagaaacgtgtgcatcccaagag

SEQ ID NO: 4925818 - DNA, 25 bp, Homo sapien
agagaaacgtgtgcatcccaagagg

SEQ ID NO: 4925819 - DNA, 25 bp, Homo sapien
catgtgacgcagttcacatcacgca

SEQ ID NO: 4925820 - DNA, 25 bp, Homo sapien
ccagaccaccataggtagctctttg

SEQ ID NO: 4925821 - DNA, 25 bp, Homo sapien
ctttgtactcaagagaggttccttt

SEQ ID NO: 4925822 - DNA, 25 bp, Homo sapien
catcttatatcctttgatgctgtgg

SEQ ID NO: 4925823 - DNA, 25 bp, Homo sapien
tcagttggctatgcatcttatatcc

SEQ ID NO: 4925824 - DNA, 25 bp, Homo sapien
tctttcccttcgatattgggtttgc

SEQ ID NO: 4925825 - DNA, 25 bp, Homo sapien
gggtttgctattctgagtcgtttgt

SEQ ID NO: 4925826 - DNA, 25 bp, Homo sapien
aagtgatttcagtcctcttgctcta

SEQ ID NO: 4925827 - DNA, 25 bp, Homo sapien
ttagaacaagctgggacgcactgac

SEQ ID NO: 4925828 - DNA, 25 bp, Homo sapien
tgagaggacagattgcccacatagc

SEQ ID NO: 4925829 - DNA, 25 bp, Homo sapien
gatatttgaactgatacacacatca

SEQ ID NO: 4925830 - DNA, 25 bp, Homo sapien
aggcctctccacaagactccgtatg

SEQ ID NO: 4925831 - DNA, 25 bp, Homo sapien
cacagcactgtccacgatgatattt

SEQ ID NO: 4925832 - DNA, 25 bp, Homo sapien
caatgttggcatcctgtttctgggt

SEQ ID NO: 4925833 - DNA, 25 bp, Homo sapien
tccaagtgcttcaaggcccagctaa

SEQ ID NO: 4925834 - DNA, 25 bp, Homo sapien
tgcttagtgtatgtccctcggaggg

SEQ ID NO: 4925835 - DNA, 25 bp, Homo sapien
ccgggaataaaattgacagggccag

SEQ ID NO: 4925836 - DNA, 25 bp, Homo sapien
tcagggtcgatgtccattaaggtca

SEQ ID NO: 4925837 - DNA, 25 bp, Homo sapien
cagaatcctctagggatggcaggga

SEQ ID NO: 4925838 - DNA, 25 bp, Homo sapien
tctaggctggtaattctcagggtcg

SEQ ID NO: 4925839 - DNA, 25 bp, Homo sapien
gcagggaacctgcatttggaacaat

SEQ ID NO: 4925840 - DNA, 25 bp, Homo sapien
gagagtgattgggattctctttgct

SEQ ID NO: 4925841 - DNA, 25 bp, Homo sapien
catttaagggtgaatgtgctgcttc

SEQ ID NO: 4925842 - DNA, 25 bp, Homo sapien
gagtgattgggattctctttgctca

SEQ ID NO: 4925843 - DNA, 25 bp, Homo sapien
aatgtgctgcttcttctacagaatg

SEQ ID NO: 4925844 - DNA, 25 bp, Homo sapien
cagggattgagcctaggctgtccaa

SEQ ID NO: 4925845 - DNA, 25 bp, Homo sapien
gtccaaataccatgtggctgaagag

SEQ ID NO: 4925846 - DNA, 25 bp, Homo sapien
taggctgtccaaataccatgtggct

SEQ ID NO: 4925847 - DNA, 25 bp, Homo sapien
ttgagcctaggctgtccaaatacca

SEQ ID NO: 4925848 - DNA, 25 bp, Homo sapien
cagacttggttgttcagtgactggc

SEQ ID NO: 4925849 - DNA, 25 bp, Homo sapien
gctttagccctccagccacgatagg

SEQ ID NO: 4925850 - DNA, 25 bp, Homo sapien
aaggctttagccctccagccacgat

SEQ ID NO: 4925851 - DNA, 25 bp, Homo sapien
tttagccctccagccacgataggct

SEQ ID NO: 4925852 - DNA, 25 bp, Homo sapien
ggctttagccctccagccacgatag

SEQ ID NO: 4925853 - DNA, 25 bp, Homo sapien
aacaatcgtgtgaataatgatggtg

SEQ ID NO: 4925854 - DNA, 25 bp, Homo sapien
gaggaataatgataaccaggtgaat

SEQ ID NO: 4925855 - DNA, 25 bp, Homo sapien
taaccaggtgaataacaatcgtgtg

SEQ ID NO: 4925856 - DNA, 25 bp, Homo sapien
taatgataaccaggtgaataacaat

SEQ ID NO: 4925857 - DNA, 25 bp, Homo sapien
agaggcatcagcactccgtctgtca

SEQ ID NO: 4925858 - DNA, 25 bp, Homo sapien
taagaccactaatcctgttcacaag

SEQ ID NO: 4925859 - DNA, 25 bp, Homo sapien
tcagttgatctagcaaataggcatc

SEQ ID NO: 4925860 - DNA, 25 bp, Homo sapien
tacctataggcactgatgctctcag

SEQ ID NO: 4925861 - DNA, 25 bp, Homo sapien
gacttggaggaatttctcatacatt

SEQ ID NO: 4925862 - DNA, 25 bp, Homo sapien
tggatattaacgctttatcatatac

SEQ ID NO: 4925863 - DNA, 25 bp, Homo sapien
tattaacgctttatcatatacatgg

SEQ ID NO: 4925864 - DNA, 25 bp, Homo sapien
tttgtttgctattgacttggaggaa

SEQ ID NO: 4925865 - DNA, 25 bp, Homo sapien
gagacattccccttcccggagtgct

SEQ ID NO: 4925866 - DNA, 25 bp, Homo sapien
tcctcagaagatgaacgacccaaga

SEQ ID NO: 4925867 - DNA, 25 bp, Homo sapien
aagaatggtgaggttggcaagcggc

SEQ ID NO: 4925868 - DNA, 25 bp, Homo sapien
gacccaagagatcccatgtgaagaa

SEQ ID NO: 4925869 - DNA, 25 bp, Homo sapien
ggcaagcttacagaccatacaaggt

SEQ ID NO: 4925870 - DNA, 25 bp, Homo sapien
taaacccacagtgtcctggcaaaca

SEQ ID NO: 4925871 - DNA, 25 bp, Homo sapien
caaaaatatgaacagagccatgaca

SEQ ID NO: 4925872 - DNA, 25 bp, Homo sapien
cagaagcataacttaaatgggagct

SEQ ID NO: 4925873 - DNA, 25 bp, Homo sapien
attataaatcactgtactacaaaga

SEQ ID NO: 4925874 - DNA, 25 bp, Homo sapien
ggattataaatcactgtactacaaa

SEQ ID NO: 4925875 - DNA, 25 bp, Homo sapien
tataaatcactgtactacaaagaca

SEQ ID NO: 4925876 - DNA, 25 bp, Homo sapien
aaggattataaatcactgtactaca

SEQ ID NO: 4925877 - DNA, 25 bp, Homo sapien
tgattcccacaacgtaaccttcctc

SEQ ID NO: 4925878 - DNA, 25 bp, Homo sapien
ggcttttattgttgacccctgattc

SEQ ID NO: 4925879 - DNA, 25 bp, Homo sapien
ccagaaaattgcctggtggggacag

SEQ ID NO: 4925880 - DNA, 25 bp, Homo sapien
gtgcctgccctgatcgtacttcgag

SEQ ID NO: 4925881 - DNA, 25 bp, Homo sapien
caatatggttgcttacataagttca

SEQ ID NO: 4925882 - DNA, 25 bp, Homo sapien
caacctttagcaattgagtagagtg

SEQ ID NO: 4925883 - DNA, 25 bp, Homo sapien
aatttatggcaatatggttgcttac

SEQ ID NO: 4925884 - DNA, 25 bp, Homo sapien
tagcaattgagtagagtgtactctt

SEQ ID NO: 4925885 - DNA, 25 bp, Homo sapien
tgaaggtccccactccatcgtaaaa

SEQ ID NO: 4925886 - DNA, 25 bp, Homo sapien
tctagtttgacgtagaagcagcttg

SEQ ID NO: 4925887 - DNA, 25 bp, Homo sapien
cctgtaaactggtagaaattatgat

SEQ ID NO: 4925888 - DNA, 25 bp, Homo sapien
ctactaactttgaggctttgggctg

SEQ ID NO: 4925889 - DNA, 25 bp, Homo sapien
gacctccaaacagcttgagaaggag

SEQ ID NO: 4925890 - DNA, 25 bp, Homo sapien
tgcctgaagttcaccactttctacc

SEQ ID NO: 4925891 - DNA, 25 bp, Homo sapien
gcttctgagttggactggcttggat

SEQ ID NO: 4925892 - DNA, 25 bp, Homo sapien
ttattgcacaatgtttaagagccct

SEQ ID NO: 4925893 - DNA, 25 bp, Homo sapien
catgagctagcatgctcggctgtga

SEQ ID NO: 4925894 - DNA, 25 bp, Homo sapien
taagcacacataagtagaagctggc

SEQ ID NO: 4925895 - DNA, 25 bp, Homo sapien
ccaggcgcaaacttatggtggaagg

SEQ ID NO: 4925896 - DNA, 25 bp, Homo sapien
ggaagggacctacattaagcacaca

SEQ ID NO: 4925897 - DNA, 25 bp, Homo sapien
gccatagtccggagatattttaaaa

SEQ ID NO: 4925898 - DNA, 25 bp, Homo sapien
tagtaatagttcctagccatagtcc

SEQ ID NO: 4925899 - DNA, 25 bp, Homo sapien
gttcctagccatagtccggagatat

SEQ ID NO: 4925900 - DNA, 25 bp, Homo sapien
cacttgttagccatagtaatagttc

SEQ ID NO: 4925901 - DNA, 25 bp, Homo sapien
caggcgtgatttagtaggtagtttt

SEQ ID NO: 4925902 - DNA, 25 bp, Homo sapien
ttacaggcgtgatttagtaggtagt

SEQ ID NO: 4925903 - DNA, 25 bp, Homo sapien
agtagggagtatacatttaaaatgc

SEQ ID NO: 4925904 - DNA, 25 bp, Homo sapien
taggtagttttgagtagggagtata

SEQ ID NO: 4925905 - DNA, 25 bp, Homo sapien
gttgtccggttccaaaactgacatc

SEQ ID NO: 4925906 - DNA, 25 bp, Homo sapien
gaggatgcctgaacacctttgggcc

SEQ ID NO: 4925907 - DNA, 25 bp, Homo sapien
tagttgtccggttccaaaactgaca

SEQ ID NO: 4925908 - DNA, 25 bp, Homo sapien
ctgaacacctttgggccttagttgt

SEQ ID NO: 4925909 - DNA, 25 bp, Homo sapien
gaatctaagcatgaaggacctgtcc

SEQ ID NO: 4925910 - DNA, 25 bp, Homo sapien
ggctagaaagacctccatccttggg

SEQ ID NO: 4925911 - DNA, 25 bp, Homo sapien
ttaaatggcatctacaccgcaggct

SEQ ID NO: 4925912 - DNA, 25 bp, Homo sapien
tagcctttcgtcagatgggttcaga

SEQ ID NO: 4925913 - DNA, 25 bp, Homo sapien
tgaaggccctgactcaacagtagtg

SEQ ID NO: 4925914 - DNA, 25 bp, Homo sapien
ttgaatgtgcgatcttcagagggcc

SEQ ID NO: 4925915 - DNA, 25 bp, Homo sapien
gaaagagaacccaactggaccagtg

SEQ ID NO: 4925916 - DNA, 25 bp, Homo sapien
cattggcagcatatctgaaggccct

SEQ ID NO: 4925917 - DNA, 25 bp, Homo sapien
tttggcgaaagtcaggtaaagcctc

SEQ ID NO: 4925918 - DNA, 25 bp, Homo sapien
gaataacctaagctgaagacacgcc

SEQ ID NO: 4925919 - DNA, 25 bp, Homo sapien
tactaggagcctgacatcatggtga

SEQ ID NO: 4925920 - DNA, 25 bp, Homo sapien
tattctctcggaccatatggctgtg

SEQ ID NO: 4925921 - DNA, 25 bp, Homo sapien
tctgttagagaactttaaggacgat

SEQ ID NO: 4925922 - DNA, 25 bp, Homo sapien
ccactcccggccacaatatgggata

SEQ ID NO: 4925923 - DNA, 25 bp, Homo sapien
taaatgaagcttaattctgttagag

SEQ ID NO: 4925924 - DNA, 25 bp, Homo sapien
tagagaactttaaggacgatattcc

SEQ ID NO: 4925925 - DNA, 25 bp, Homo sapien
tctcacagaaggaaaacgatggctc

SEQ ID NO: 4925926 - DNA, 25 bp, Homo sapien
aaaaagcctagggagtctgcaagcc

SEQ ID NO: 4925927 - DNA, 25 bp, Homo sapien
tagtgagcaagtcatagggaagcca

SEQ ID NO: 4925928 - DNA, 25 bp, Homo sapien
tgtcaagctggagggtacagaaacc

SEQ ID NO: 4925929 - DNA, 25 bp, Homo sapien
ttttgtaacgagttattcggtgtga

SEQ ID NO: 4925930 - DNA, 25 bp, Homo sapien
cgagttattcggtgtgaggcccagt

SEQ ID NO: 4925931 - DNA, 25 bp, Homo sapien
taacgagttattcggtgtgaggccc

SEQ ID NO: 4925932 - DNA, 25 bp, Homo sapien
ttattcggtgtgaggcccagtcatg

SEQ ID NO: 4925933 - DNA, 25 bp, Homo sapien
tgtgttctcccatcagggcaaggga

SEQ ID NO: 4925934 - DNA, 25 bp, Homo sapien
tatgtctccaattttacctgcaggc

SEQ ID NO: 4925935 - DNA, 25 bp, Homo sapien
taaattcttaaaatggccagctccc

SEQ ID NO: 4925936 - DNA, 25 bp, Homo sapien
gaaatgcaactgtctcaagatgcct

SEQ ID NO: 4925937 - DNA, 25 bp, Homo sapien
tcagagccttgtcaccaagcatggc

SEQ ID NO: 4925938 - DNA, 25 bp, Homo sapien
cataatcagagccttgtcaccaagc

SEQ ID NO: 4925939 - DNA, 25 bp, Homo sapien
ccaagcatggctgcctcagtgactg

SEQ ID NO: 4925940 - DNA, 25 bp, Homo sapien
accaagcatggctgcctcagtgact

SEQ ID NO: 4925941 - DNA, 25 bp, Homo sapien
aatcatatagaactgctgggtgtct

SEQ ID NO: 4925942 - DNA, 25 bp, Homo sapien
agtgcagagccaatgctagatgaaa

SEQ ID NO: 4925943 - DNA, 25 bp, Homo sapien
gctcctggtggtgtctattctgctc

SEQ ID NO: 4925944 - DNA, 25 bp, Homo sapien
cacagttaagtgaataggagcctga

SEQ ID NO: 4925945 - DNA, 25 bp, Homo sapien
agtcttagcatctgagaagtcatcc

SEQ ID NO: 4925946 - DNA, 25 bp, Homo sapien
ttgttcacattgactcaataatgtc

SEQ ID NO: 4925947 - DNA, 25 bp, Homo sapien
taatgtcacagtcttagcatctgag

SEQ ID NO: 4925948 - DNA, 25 bp, Homo sapien
gactcaataatgtcacagtcttagc

SEQ ID NO: 4925949 - DNA, 25 bp, Homo sapien
caggggacagatgaattgtttgaat

SEQ ID NO: 4925950 - DNA, 25 bp, Homo sapien
aaccacaggggacagatgaattgtt

SEQ ID NO: 4925951 - DNA, 25 bp, Homo sapien
cacaggggacagatgaattgtttga

SEQ ID NO: 4925952 - DNA, 25 bp, Homo sapien
tgggccaaatgcactatgaatgtaa

SEQ ID NO: 4925953 - DNA, 25 bp, Homo sapien
cccaggacattgtactgttctcctc

SEQ ID NO: 4925954 - DNA, 25 bp, Homo sapien
caggacattgtactgttctcctcat

SEQ ID NO: 4925955 - DNA, 25 bp, Homo sapien
atttctgtcccaggacattgtactg

SEQ ID NO: 4925956 - DNA, 25 bp, Homo sapien
ctgtcccaggacattgtactgttct

SEQ ID NO: 4925957 - DNA, 25 bp, Homo sapien
cacgcgttgaactgggaagagccca

SEQ ID NO: 4925958 - DNA, 25 bp, Homo sapien
aagcatgttgcttgctcctttgggt

SEQ ID NO: 4925959 - DNA, 25 bp, Homo sapien
gctcctttgggtatttggcacgcgt

SEQ ID NO: 4925960 - DNA, 25 bp, Homo sapien
cactgtgagagtgcaccacaacccg

SEQ ID NO: 4925961 - DNA, 25 bp, Homo sapien
ctgcaccacttccacagccactgcc

SEQ ID NO: 4925962 - DNA, 25 bp, Homo sapien
ccacttccacagccactgccatcat

SEQ ID NO: 4925963 - DNA, 25 bp, Homo sapien
accacttccacagccactgccatca

SEQ ID NO: 4925964 - DNA, 25 bp, Homo sapien
gcaccacttccacagccactgccat

SEQ ID NO: 4925965 - DNA, 25 bp, Homo sapien
caacatcagtagggctacctctatc

SEQ ID NO: 4925966 - DNA, 25 bp, Homo sapien
gtagggctacctctatcatcagtat

SEQ ID NO: 4925967 - DNA, 25 bp, Homo sapien
agggctacctctatcatcagtatca

SEQ ID NO: 4925968 - DNA, 25 bp, Homo sapien
tcagtagggctacctctatcatcag

SEQ ID NO: 4925969 - DNA, 25 bp, Homo sapien
taggtcaaccaaatctgggctcaaa

SEQ ID NO: 4925970 - DNA, 25 bp, Homo sapien
cagtgtcctattctatcaaatggta

SEQ ID NO: 4925971 - DNA, 25 bp, Homo sapien
cctcaaaatcttagcctcagtgtcc

SEQ ID NO: 4925972 - DNA, 25 bp, Homo sapien
tagaattataggacataggtcaacc

SEQ ID NO: 4925973 - DNA, 25 bp, Homo sapien
agggtcataccaaagggtgtcatta

SEQ ID NO: 4925974 - DNA, 25 bp, Homo sapien
cagagagaaagggtatttccctctc

SEQ ID NO: 4925975 - DNA, 25 bp, Homo sapien
taccaaagggtgtcattatgattca

SEQ ID NO: 4925976 - DNA, 25 bp, Homo sapien
tcagaaacctcaactaagtcacatt

SEQ ID NO: 4925977 - DNA, 25 bp, Homo sapien
tgtgcgcttcacctgacagtaagct

SEQ ID NO: 4925978 - DNA, 25 bp, Homo sapien
catatttagccttgtagggtgtgcg

SEQ ID NO: 4925979 - DNA, 25 bp, Homo sapien
tagccttgtagggtgtgcgcttcac

SEQ ID NO: 4925980 - DNA, 25 bp, Homo sapien
tagggtgtgcgcttcacctgacagt

SEQ ID NO: 4925981 - DNA, 25 bp, Homo sapien
tactccagtctgagcaaccaagtga

SEQ ID NO: 4925982 - DNA, 25 bp, Homo sapien
tgtactccagtctgagcaaccaagt

SEQ ID NO: 4925983 - DNA, 25 bp, Homo sapien
gagaaatgcttgaagccaggaagca

SEQ ID NO: 4925984 - DNA, 25 bp, Homo sapien
ccagtctgagcaaccaagtgagact

SEQ ID NO: 4925985 - DNA, 25 bp, Homo sapien
actggtgcctttgtttgctcccaga

SEQ ID NO: 4925986 - DNA, 25 bp, Homo sapien
tgtctttggcccgaatctgaagcag

SEQ ID NO: 4925987 - DNA, 25 bp, Homo sapien
ccagattctgccctttgatgttctt

SEQ ID NO: 4925988 - DNA, 25 bp, Homo sapien
aaaatcagttgtcttagaaatactt

SEQ ID NO: 4925989 - DNA, 25 bp, Homo sapien
tagaaactgcactcaaagcacagag

SEQ ID NO: 4925990 - DNA, 25 bp, Homo sapien
agagtatttactcccctagaaactg

SEQ ID NO: 4925991 - DNA, 25 bp, Homo sapien
gaagagaggagaatagcatcagagt

SEQ ID NO: 4925992 - DNA, 25 bp, Homo sapien
aatgccatctcttaaggttgcccgt

SEQ ID NO: 4925993 - DNA, 25 bp, Homo sapien
cttggacactgcatcaatagtttcc

SEQ ID NO: 4925994 - DNA, 25 bp, Homo sapien
tcaccatgctggacgtcttctcttg

SEQ ID NO: 4925995 - DNA, 25 bp, Homo sapien
ctgcatcaatagtttccatgcactc

SEQ ID NO: 4925996 - DNA, 25 bp, Homo sapien
cactcaggtttaaggttgaatttgc

SEQ ID NO: 4925997 - DNA, 25 bp, Homo sapien
tcaacagctgggttttctgtcctgc

SEQ ID NO: 4925998 - DNA, 25 bp, Homo sapien
tgaggttcagtcaaaggaaatagtc

SEQ ID NO: 4925999 - DNA, 25 bp, Homo sapien
tctttatggccctagcagcagatag

SEQ ID NO: 4926000 - DNA, 25 bp, Homo sapien
gcagatacagaagctacggtccctt

SEQ ID NO: 4926001 - DNA, 25 bp, Homo sapien
gatgctttctgtcaactgagtgatg

SEQ ID NO: 4926002 - DNA, 25 bp, Homo sapien
tagtgctcacagctctattacggca

SEQ ID NO: 4926003 - DNA, 25 bp, Homo sapien
tattacggcatccagtaccctgtaa

SEQ ID NO: 4926004 - DNA, 25 bp, Homo sapien
gcctttcgctgacacattctagatg

SEQ ID NO: 4926005 - DNA, 25 bp, Homo sapien
gagcaaggacaggatctgattcatc

SEQ ID NO: 4926006 - DNA, 25 bp, Homo sapien
ctgattgtaaatcattgagagcaag

SEQ ID NO: 4926007 - DNA, 25 bp, Homo sapien
atctgattcatctctggactcaggg

SEQ ID NO: 4926008 - DNA, 25 bp, Homo sapien
tgtaaatcattgagagcaaggacag

SEQ ID NO: 4926009 - DNA, 25 bp, Homo sapien
tgtcttaattcttttcgccgctttg

SEQ ID NO: 4926010 - DNA, 25 bp, Homo sapien
ttttcgccgctttgctgacttgact

SEQ ID NO: 4926011 - DNA, 25 bp, Homo sapien
ttcagggtcatgaagacttggtatt

SEQ ID NO: 4926012 - DNA, 25 bp, Homo sapien
cagggtcatgaagacttggtatttg

SEQ ID NO: 4926013 - DNA, 25 bp, Homo sapien
tcctgtataactgaggttgcagtag

SEQ ID NO: 4926014 - DNA, 25 bp, Homo sapien
ggtgagcttaacaaaggcacgtagc

SEQ ID NO: 4926015 - DNA, 25 bp, Homo sapien
gggtgaatccgcgtcctgtataact

SEQ ID NO: 4926016 - DNA, 25 bp, Homo sapien
gttgcagtaggtgagcttaacaaag

SEQ ID NO: 4926017 - DNA, 25 bp, Homo sapien
tgatgtatttttccacgcctgtagt

SEQ ID NO: 4926018 - DNA, 25 bp, Homo sapien
ccagtgggcagagcctgtagtgagc

SEQ ID NO: 4926019 - DNA, 25 bp, Homo sapien
gatgtatttttccacgcctgtagtc

SEQ ID NO: 4926020 - DNA, 25 bp, Homo sapien
tctgtaggaacgcagcttcttcatg

SEQ ID NO: 4926021 - DNA, 25 bp, Homo sapien
tttctgtaggaacgcagcttcttca

SEQ ID NO: 4926022 - DNA, 25 bp, Homo sapien
ttctgtaggaacgcagcttcttcat

SEQ ID NO: 4926023 - DNA, 25 bp, Homo sapien
tggctttgtgcttttctctaggttt

SEQ ID NO: 4926024 - DNA, 25 bp, Homo sapien
aaaaccaccaccaaccacaaggctg

SEQ ID NO: 4926025 - DNA, 25 bp, Homo sapien
accaccaccaaccacaaggctgtgg

SEQ ID NO: 4926026 - DNA, 25 bp, Homo sapien
aaccaccaccaaccacaaggctgtg

SEQ ID NO: 4926027 - DNA, 25 bp, Homo sapien
ctgaaaaccaccaccaaccacaagg

SEQ ID NO: 4926028 - DNA, 25 bp, Homo sapien
tgaaaatgtcatcgtagggctcggt

SEQ ID NO: 4926029 - DNA, 25 bp, Homo sapien
tgtttgcaaatgtgttccccgatgg

SEQ ID NO: 4926030 - DNA, 25 bp, Homo sapien
gattagatcctggacagtagagaac

SEQ ID NO: 4926031 - DNA, 25 bp, Homo sapien
tacaatctagtcttgggctgatggg

SEQ ID NO: 4926032 - DNA, 25 bp, Homo sapien
ggcatttgctagtagaactcagcca

SEQ ID NO: 4926033 - DNA, 25 bp, Homo sapien
caacaggaaccacatctccggcatt

SEQ ID NO: 4926034 - DNA, 25 bp, Homo sapien
cccactctgtataaggaatgtgatg

SEQ ID NO: 4926035 - DNA, 25 bp, Homo sapien
tcacatcagttaaaaggccaacagg

SEQ ID NO: 4926036 - DNA, 25 bp, Homo sapien
tccttcgtctctcatcacatagctt

SEQ ID NO: 4926037 - DNA, 25 bp, Homo sapien
tagcttctcttgatatgtgtctccc

SEQ ID NO: 4926038 - DNA, 25 bp, Homo sapien
tcttgggccttaaaatgtggatatg

SEQ ID NO: 4926039 - DNA, 25 bp, Homo sapien
catcttctctcagtgggcccaaaca

SEQ ID NO: 4926040 - DNA, 25 bp, Homo sapien
acgttcaaggtaagaaatagcagga

SEQ ID NO: 4926041 - DNA, 25 bp, Homo sapien
gtgaaagagaaggacgttcaaggta

SEQ ID NO: 4926042 - DNA, 25 bp, Homo sapien
tgaaagagaaggacgttcaaggtaa

SEQ ID NO: 4926043 - DNA, 25 bp, Homo sapien
gctccaggattagattaggcttttc

SEQ ID NO: 4926044 - DNA, 25 bp, Homo sapien
ggttcgtaaccttggtgctccagga

SEQ ID NO: 4926045 - DNA, 25 bp, Homo sapien
taaaagctgaccacggaactgtcca

SEQ ID NO: 4926046 - DNA, 25 bp, Homo sapien
cctaggtcagggatgaagtctctac

SEQ ID NO: 4926047 - DNA, 25 bp, Homo sapien
cactgtgacaagtctgcgtgcaggg

SEQ ID NO: 4926048 - DNA, 25 bp, Homo sapien
tgcatattaagaaggcccgcaggcc

SEQ ID NO: 4926049 - DNA, 25 bp, Homo sapien
tgccctggctctgcgaagaattcca

SEQ ID NO: 4926050 - DNA, 25 bp, Homo sapien
gaagaattccagtcagagttgtgaa

SEQ ID NO: 4926051 - DNA, 25 bp, Homo sapien
aataaagtcctagtgcaatgtctgg

SEQ ID NO: 4926052 - DNA, 25 bp, Homo sapien
gtaattagccttcaccatttggcag

SEQ ID NO: 4926053 - DNA, 25 bp, Homo sapien
gacctagtctctgaaatcgcacact

SEQ ID NO: 4926054 - DNA, 25 bp, Homo sapien
caaggtaagtgtttaagcagtgggc

SEQ ID NO: 4926055 - DNA, 25 bp, Homo sapien
gttgctcaccatgtgggcttttcca

SEQ ID NO: 4926056 - DNA, 25 bp, Homo sapien
ttttccataaagctgcttgagtgtc

SEQ ID NO: 4926057 - DNA, 25 bp, Homo sapien
ccggtttcttgttggctgttggtag

SEQ ID NO: 4926058 - DNA, 25 bp, Homo sapien
tgtcctcacaacatgtcagctggat

SEQ ID NO: 4926059 - DNA, 25 bp, Homo sapien
ccattgtgtcagtggccgatctgaa

SEQ ID NO: 4926060 - DNA, 25 bp, Homo sapien
tctgaaattccagtgtaggcaccat

SEQ ID NO: 4926061 - DNA, 25 bp, Homo sapien
tgaaagctctgtgaccgtatggctg

SEQ ID NO: 4926062 - DNA, 25 bp, Homo sapien
gatgctagattcttcatgggagcca

SEQ ID NO: 4926063 - DNA, 25 bp, Homo sapien
gggcgagaaggcgaaatccgaagcc

SEQ ID NO: 4926064 - DNA, 25 bp, Homo sapien
agaggatcaacccagcccggctccg

SEQ ID NO: 4926065 - DNA, 25 bp, Homo sapien
aatccgaagccaggtgtcccgccat

SEQ ID NO: 4926066 - DNA, 25 bp, Homo sapien
ttagccaggtcagaggatcaaccca

SEQ ID NO: 4926067 - DNA, 25 bp, Homo sapien
ccggcccgattcctggccctccagg

SEQ ID NO: 4926068 - DNA, 25 bp, Homo sapien
cccggcccgattcctggccctccag

SEQ ID NO: 4926069 - DNA, 25 bp, Homo sapien
tcctggccctccaggagggccttgg

SEQ ID NO: 4926070 - DNA, 25 bp, Homo sapien
tggccctccaggagggccttggaag

SEQ ID NO: 4926071 - DNA, 25 bp, Homo sapien
acataactcatacggcggggggcaa

SEQ ID NO: 4926072 - DNA, 25 bp, Homo sapien
gcaagggggaatcccccacacctca

SEQ ID NO: 4926073 - DNA, 25 bp, Homo sapien
ccccccacataactcatacggcggg

SEQ ID NO: 4926074 - DNA, 25 bp, Homo sapien
cccacataactcatacggcgggggg

SEQ ID NO: 4926075 - DNA, 25 bp, Homo sapien
ccgactcctgcttcgctctcaggct

SEQ ID NO: 4926076 - DNA, 25 bp, Homo sapien
tgagaggtctccaagccgccttggg

SEQ ID NO: 4926077 - DNA, 25 bp, Homo sapien
ccactccaacctgaggcccacagta

SEQ ID NO: 4926078 - DNA, 25 bp, Homo sapien
caacctgaggcccacagtacgccat

SEQ ID NO: 4926079 - DNA, 25 bp, Homo sapien
aggccccattggagttgctctccac

SEQ ID NO: 4926080 - DNA, 25 bp, Homo sapien
tgggacttctccgggttttgctcta

SEQ ID NO: 4926081 - DNA, 25 bp, Homo sapien
acttctccgggttttgctctagctt

SEQ ID NO: 4926082 - DNA, 25 bp, Homo sapien
gggaggccccattggagttgctctc

SEQ ID NO: 4926083 - DNA, 25 bp, Homo sapien
cttggcaaattgctcgagttctttc

SEQ ID NO: 4926084 - DNA, 25 bp, Homo sapien
gcctgtgtatatcccagggtgatcc

SEQ ID NO: 4926085 - DNA, 25 bp, Homo sapien
ctcttctgcttcaggagcttggcaa

SEQ ID NO: 4926086 - DNA, 25 bp, Homo sapien
atcggcctgtgtatatcccagggtg

SEQ ID NO: 4926087 - DNA, 25 bp, Homo sapien
gtcttttggctgaacaccttcccaa

SEQ ID NO: 4926088 - DNA, 25 bp, Homo sapien
tcccaaatagaacccccaggatgag

SEQ ID NO: 4926089 - DNA, 25 bp, Homo sapien
cttcccaaatagaacccccaggatg

SEQ ID NO: 4926090 - DNA, 25 bp, Homo sapien
tcaaagcggcagatggtcttttggc

SEQ ID NO: 4926091 - DNA, 25 bp, Homo sapien
tcggttctcgatactggttcgcttt

SEQ ID NO: 4926092 - DNA, 25 bp, Homo sapien
ttcgggcctgcatgagggtttctgc

SEQ ID NO: 4926093 - DNA, 25 bp, Homo sapien
ttcgctttctctttcgggcctgcat

SEQ ID NO: 4926094 - DNA, 25 bp, Homo sapien
gcaagggccgcagcttacacatgtt

SEQ ID NO: 4926095 - DNA, 25 bp, Homo sapien
ctgcaggaacaaattctccaggttg

SEQ ID NO: 4926096 - DNA, 25 bp, Homo sapien
acaaattctccaggttgcctctcac

SEQ ID NO: 4926097 - DNA, 25 bp, Homo sapien
aggaacaaattctccaggttgcctc

SEQ ID NO: 4926098 - DNA, 25 bp, Homo sapien
tgcaggaacaaattctccaggttgc

SEQ ID NO: 4926099 - DNA, 25 bp, Homo sapien
cccaagctgctgggcgatgtggctg

SEQ ID NO: 4926100 - DNA, 25 bp, Homo sapien
ccaagctgctgggcgatgtggctga

SEQ ID NO: 4926101 - DNA, 25 bp, Homo sapien
tgcttgatcgcttgcccttctggcg

SEQ ID NO: 4926102 - DNA, 25 bp, Homo sapien
gatcgcttgcccttctggcgccggt

SEQ ID NO: 4926103 - DNA, 25 bp, Homo sapien
ttgatcgcttgcccttctggcgccg

SEQ ID NO: 4926104 - DNA, 25 bp, Homo sapien
gcttgatcgcttgcccttctggcgc

SEQ ID NO: 4926105 - DNA, 25 bp, Homo sapien
agggctcccatagcctggggtacca

SEQ ID NO: 4926106 - DNA, 25 bp, Homo sapien
ctcccatagcctggggtaccaaaat

SEQ ID NO: 4926107 - DNA, 25 bp, Homo sapien
tgagggctcccatagcctggggtac

SEQ ID NO: 4926108 - DNA, 25 bp, Homo sapien
ggctcccatagcctggggtaccaaa

SEQ ID NO: 4926109 - DNA, 25 bp, Homo sapien
gaacttaatcccaaaagccctgcca

SEQ ID NO: 4926110 - DNA, 25 bp, Homo sapien
tgttccccattcctagaagggcagg

SEQ ID NO: 4926111 - DNA, 25 bp, Homo sapien
ccttccttagtgaatgaagaactta

SEQ ID NO: 4926112 - DNA, 25 bp, Homo sapien
tgtcccaggcttctttatttaagaa

SEQ ID NO: 4926113 - DNA, 25 bp, Homo sapien
tttgccatctgctatgaaaccactg

SEQ ID NO: 4926114 - DNA, 25 bp, Homo sapien
cctggagactggcatctttatttct

SEQ ID NO: 4926115 - DNA, 25 bp, Homo sapien
agaggatccagggttctaatccctc

SEQ ID NO: 4926116 - DNA, 25 bp, Homo sapien
taatgccaggagttaaattccagaa

SEQ ID NO: 4926117 - DNA, 25 bp, Homo sapien
gattgtgctcgttaggatcttctcc

SEQ ID NO: 4926118 - DNA, 25 bp, Homo sapien
taaattcataagtctctgaggatct

SEQ ID NO: 4926119 - DNA, 25 bp, Homo sapien
aatcagtatcagttctttgtatgcc

SEQ ID NO: 4926120 - DNA, 25 bp, Homo sapien
gccagatttttgtatcaggctgatg

SEQ ID NO: 4926121 - DNA, 25 bp, Homo sapien
tgagcatggtaaccacaaggtagtt

SEQ ID NO: 4926122 - DNA, 25 bp, Homo sapien
gtgtctacactatttattattccca

SEQ ID NO: 4926123 - DNA, 25 bp, Homo sapien
ctatgtatgctcaatatttacctcc

SEQ ID NO: 4926124 - DNA, 25 bp, Homo sapien
ggccacctgggtggattccacgtct

SEQ ID NO: 4926125 - DNA, 25 bp, Homo sapien
tacaaagcctttcaacatctggtac

SEQ ID NO: 4926126 - DNA, 25 bp, Homo sapien
tgggccacagattatctcatccaat

SEQ ID NO: 4926127 - DNA, 25 bp, Homo sapien
atctggtacacatttgggccacaga

SEQ ID NO: 4926128 - DNA, 25 bp, Homo sapien
aaagcctttcaacatctggtacaca

SEQ ID NO: 4926129 - DNA, 25 bp, Homo sapien
tcctctctcacccacaagtgtgtag

SEQ ID NO: 4926130 - DNA, 25 bp, Homo sapien
taagcatgtcgaagccacatagcac

SEQ ID NO: 4926131 - DNA, 25 bp, Homo sapien
gtaggtggcagactaagaggaccaa

SEQ ID NO: 4926132 - DNA, 25 bp, Homo sapien
caagccagataattagggaaatagg

SEQ ID NO: 4926133 - DNA, 25 bp, Homo sapien
aagccctgctgaatgcctcctaatg

SEQ ID NO: 4926134 - DNA, 25 bp, Homo sapien
gggagcatgcagagaaatccccgcc

SEQ ID NO: 4926135 - DNA, 25 bp, Homo sapien
gaattagtgcaactcggccagccat

SEQ ID NO: 4926136 - DNA, 25 bp, Homo sapien
cactctcgtagaagctggtggcgcc

SEQ ID NO: 4926137 - DNA, 25 bp, Homo sapien
caatgctttcgggtatgctgtaagg

SEQ ID NO: 4926138 - DNA, 25 bp, Homo sapien
gaaatcgtatcccattctgtgacca

SEQ ID NO: 4926139 - DNA, 25 bp, Homo sapien
caataaaaaagttgcgggctgtcac

SEQ ID NO: 4926140 - DNA, 25 bp, Homo sapien
gaccacattgtcctctgttcgtacc

SEQ ID NO: 4926141 - DNA, 25 bp, Homo sapien
tgtgttggtaaagcagcttctagca

SEQ ID NO: 4926142 - DNA, 25 bp, Homo sapien
ggtaaagcagcttctagcatgggac

SEQ ID NO: 4926143 - DNA, 25 bp, Homo sapien
ccgcctgttgtggagatagcagctg

SEQ ID NO: 4926144 - DNA, 25 bp, Homo sapien
ttgtggagatagcagctgactgtgt

SEQ ID NO: 4926145 - DNA, 25 bp, Homo sapien
cttgatcaattgttctttgtctagt

SEQ ID NO: 4926146 - DNA, 25 bp, Homo sapien
gttctttgtctagttcatttactga

SEQ ID NO: 4926147 - DNA, 25 bp, Homo sapien
attcttgatcaattgttctttgtct

SEQ ID NO: 4926148 - DNA, 25 bp, Homo sapien
tgttctttgtctagttcatttactg

SEQ ID NO: 4926149 - DNA, 25 bp, Homo sapien
cttcagaactgccaacaaagggctg

SEQ ID NO: 4926150 - DNA, 25 bp, Homo sapien
cagaactgccaacaaagggctgcat

SEQ ID NO: 4926151 - DNA, 25 bp, Homo sapien
aattcttcagaactgccaacaaagg

SEQ ID NO: 4926152 - DNA, 25 bp, Homo sapien
ctgggagcatgacccagagagaagc

SEQ ID NO: 4926153 - DNA, 25 bp, Homo sapien
gcggcctgtgagtgtagatgacaaa

SEQ ID NO: 4926154 - DNA, 25 bp, Homo sapien
tagatgacaaacagcatgggccacg

SEQ ID NO: 4926155 - DNA, 25 bp, Homo sapien
cgtcccagcggcctgtgagtgtaga

SEQ ID NO: 4926156 - DNA, 25 bp, Homo sapien
tgagtgtagatgacaaacagcatgg

SEQ ID NO: 4926157 - DNA, 25 bp, Homo sapien
ggcctctcagtgaatacaaatacta

SEQ ID NO: 4926158 - DNA, 25 bp, Homo sapien
tggaagtgatctccttggagctgcc

SEQ ID NO: 4926159 - DNA, 25 bp, Homo sapien
tgtgtgggcctctcagtgaatacaa

SEQ ID NO: 4926160 - DNA, 25 bp, Homo sapien
agtggaagtgatctccttggagctg

SEQ ID NO: 4926161 - DNA, 25 bp, Homo sapien
ctgatcccatgccagattctaagag

SEQ ID NO: 4926162 - DNA, 25 bp, Homo sapien
aatcaaacaatgtgtgcctgatccc

SEQ ID NO: 4926163 - DNA, 25 bp, Homo sapien
gggttgacatagtctgtgttcttat

SEQ ID NO: 4926164 - DNA, 25 bp, Homo sapien
tgccagattctaagaggatagaggg

SEQ ID NO: 4926165 - DNA, 25 bp, Homo sapien
cccaatggctgctaggacgatgact

SEQ ID NO: 4926166 - DNA, 25 bp, Homo sapien
ggacgatgactatgagtggtaacct

SEQ ID NO: 4926167 - DNA, 25 bp, Homo sapien
gcttttccccaatggctgctaggac

SEQ ID NO: 4926168 - DNA, 25 bp, Homo sapien
actatgagtggtaaccttgacttgc

SEQ ID NO: 4926169 - DNA, 25 bp, Homo sapien
ctcccattttgtaagataaggatac

SEQ ID NO: 4926170 - DNA, 25 bp, Homo sapien
cctccctccattatcctctcccatt

SEQ ID NO: 4926171 - DNA, 25 bp, Homo sapien
aagagcctcctcgagatggaagctc

SEQ ID NO: 4926172 - DNA, 25 bp, Homo sapien
cagaccttgggttgagggacacagc

SEQ ID NO: 4926173 - DNA, 25 bp, Homo sapien
cctgaatgagtgaagtactgccaga

SEQ ID NO: 4926174 - DNA, 25 bp, Homo sapien
ccccttgcctgaatgagtgaagtac

SEQ ID NO: 4926175 - DNA, 25 bp, Homo sapien
ccccagcgaagttcactctgctggt

SEQ ID NO: 4926176 - DNA, 25 bp, Homo sapien
tggtcattgaggagcctcaattcat

SEQ ID NO: 4926177 - DNA, 25 bp, Homo sapien
gctcaagaaaccctcagccccataa

SEQ ID NO: 4926178 - DNA, 25 bp, Homo sapien
tcagccccataatcagtggccacat

SEQ ID NO: 4926179 - DNA, 25 bp, Homo sapien
atgtggtctccaaccaggtgccatc

SEQ ID NO: 4926180 - DNA, 25 bp, Homo sapien
gggatgtggtctccaaccaggtgcc

SEQ ID NO: 4926181 - DNA, 25 bp, Homo sapien
ggatgtggtctccaaccaggtgcca

SEQ ID NO: 4926182 - DNA, 25 bp, Homo sapien
gatgtggtctccaaccaggtgccat

SEQ ID NO: 4926183 - DNA, 25 bp, Homo sapien
ctggagtatccagtgagatgtagat

SEQ ID NO: 4926184 - DNA, 25 bp, Homo sapien
gatgtagatgattctagttctttct

SEQ ID NO: 4926185 - DNA, 25 bp, Homo sapien
gttctttctggatctagagaggcca

SEQ ID NO: 4926186 - DNA, 25 bp, Homo sapien
tggatctagagaggccactgtttga

SEQ ID NO: 4926187 - DNA, 25 bp, Homo sapien
cctcatgcagatgtgctccataaag

SEQ ID NO: 4926188 - DNA, 25 bp, Homo sapien
caatgtaattcaaagcagaagctga

SEQ ID NO: 4926189 - DNA, 25 bp, Homo sapien
agaagctgaaatcctcatgcagatg

SEQ ID NO: 4926190 - DNA, 25 bp, Homo sapien
caaattgcttgtacaatagttaaca

SEQ ID NO: 4926191 - DNA, 25 bp, Homo sapien
tttgggagtccaaatagtgtgaacc

SEQ ID NO: 4926192 - DNA, 25 bp, Homo sapien
tacttttcggcagctggatgcaaaa

SEQ ID NO: 4926193 - DNA, 25 bp, Homo sapien
gagcaaagtcatgtcacctgtatcc

SEQ ID NO: 4926194 - DNA, 25 bp, Homo sapien
gtgtgaacctgcaggctaagacaca

SEQ ID NO: 4926195 - DNA, 25 bp, Homo sapien
cctctgaggtgagatactttgcagc

SEQ ID NO: 4926196 - DNA, 25 bp, Homo sapien
tccctctggaaattagtaaaatagc

SEQ ID NO: 4926197 - DNA, 25 bp, Homo sapien
aaatcctccttctggatgcctctgg

SEQ ID NO: 4926198 - DNA, 25 bp, Homo sapien
cctggtatccagttggccaccaaat

SEQ ID NO: 4926199 - DNA, 25 bp, Homo sapien
cacagcatcttacaggatccgaggt

SEQ ID NO: 4926200 - DNA, 25 bp, Homo sapien
gatccgaggtctgcatcttccctga

SEQ ID NO: 4926201 - DNA, 25 bp, Homo sapien
gaaaggcaagttgggccacaaaata

SEQ ID NO: 4926202 - DNA, 25 bp, Homo sapien
taactctggaatagtcaggatccaa

SEQ ID NO: 4926203 - DNA, 25 bp, Homo sapien
ggagagcaccaaagctggatagtga

SEQ ID NO: 4926204 - DNA, 25 bp, Homo sapien
caccaaagctggatagtgacagtac

SEQ ID NO: 4926205 - DNA, 25 bp, Homo sapien
gcaccaaagctggatagtgacagta

SEQ ID NO: 4926206 - DNA, 25 bp, Homo sapien
gagcaccaaagctggatagtgacag

SEQ ID NO: 4926207 - DNA, 25 bp, Homo sapien
taagctgagttcacaatatggatgg

SEQ ID NO: 4926208 - DNA, 25 bp, Homo sapien
cagcttttccaaaggccaactcctg

SEQ ID NO: 4926209 - DNA, 25 bp, Homo sapien
tcacaatatggatgggttggccgag

SEQ ID NO: 4926210 - DNA, 25 bp, Homo sapien
agttcacaatatggatgggttggcc

SEQ ID NO: 4926211 - DNA, 25 bp, Homo sapien
ccaacaactggtgtctctgggagct

SEQ ID NO: 4926212 - DNA, 25 bp, Homo sapien
tccatggagaggtgtgttgcattcc

SEQ ID NO: 4926213 - DNA, 25 bp, Homo sapien
cgagtcagtgagtacagcagggaaa

SEQ ID NO: 4926214 - DNA, 25 bp, Homo sapien
gttggtgcctgtgctcttccctgag

SEQ ID NO: 4926215 - DNA, 25 bp, Homo sapien
cttgactggtggtgaagattgatga

SEQ ID NO: 4926216 - DNA, 25 bp, Homo sapien
gaaggccatgccttgaccatccatg

SEQ ID NO: 4926217 - DNA, 25 bp, Homo sapien
gaagattgatgaacacccagttgag

SEQ ID NO: 4926218 - DNA, 25 bp, Homo sapien
ccagttgagtgttgacaagagaggt

SEQ ID NO: 4926219 - DNA, 25 bp, Homo sapien
tggaatccactctgtcttgactgag

SEQ ID NO: 4926220 - DNA, 25 bp, Homo sapien
gagacatccctcatttaaattataa

SEQ ID NO: 4926221 - DNA, 25 bp, Homo sapien
gcattagcagtgtgttggaatccac

SEQ ID NO: 4926222 - DNA, 25 bp, Homo sapien
tctgctctacgtctttccagggacc

SEQ ID NO: 4926223 - DNA, 25 bp, Homo sapien
cgttgaatacggtcaatgactgacg

SEQ ID NO: 4926224 - DNA, 25 bp, Homo sapien
ctgtagacaagggtcgttgaatacg

SEQ ID NO: 4926225 - DNA, 25 bp, Homo sapien
tgactgacgatgctgaggttcttgt

SEQ ID NO: 4926226 - DNA, 25 bp, Homo sapien
tacggtcaatgactgacgatgctga

SEQ ID NO: 4926227 - DNA, 25 bp, Homo sapien
gaaggtacacttttggtgtctgcaa

SEQ ID NO: 4926228 - DNA, 25 bp, Homo sapien
tagaaggtacacttttggtgtctgc

SEQ ID NO: 4926229 - DNA, 25 bp, Homo sapien
tggtagaaggtacacttttggtgtc

SEQ ID NO: 4926230 - DNA, 25 bp, Homo sapien
gtagaaggtacacttttggtgtctg

SEQ ID NO: 4926231 - DNA, 25 bp, Homo sapien
tctcacggcctgtaaagacaaccct

SEQ ID NO: 4926232 - DNA, 25 bp, Homo sapien
gatgcatatttctcacggcctgtaa

SEQ ID NO: 4926233 - DNA, 25 bp, Homo sapien
cctgtaaagacaacccttggactct

SEQ ID NO: 4926234 - DNA, 25 bp, Homo sapien
gggaaaatgcaagtgcaagccccac

SEQ ID NO: 4926235 - DNA, 25 bp, Homo sapien
ctgtactcggcattggtgatgcaga

SEQ ID NO: 4926236 - DNA, 25 bp, Homo sapien
acaacgttggatagtctataaccgc

SEQ ID NO: 4926237 - DNA, 25 bp, Homo sapien
gatagtctataaccgctgtactcgg

SEQ ID NO: 4926238 - DNA, 25 bp, Homo sapien
tactcggcattggtgatgcagatgg

SEQ ID NO: 4926239 - DNA, 25 bp, Homo sapien
ggaacttcaaagctgagccgtaggg

SEQ ID NO: 4926240 - DNA, 25 bp, Homo sapien
ggtgcagaggtcttatcggtagctt

SEQ ID NO: 4926241 - DNA, 25 bp, Homo sapien
tatcggtagcttgaatgttcccacc

SEQ ID NO: 4926242 - DNA, 25 bp, Homo sapien
tgttcccacccttatcaatccagaa

SEQ ID NO: 4926243 - DNA, 25 bp, Homo sapien
tgaagtatcactgaaggccctaagg

SEQ ID NO: 4926244 - DNA, 25 bp, Homo sapien
gtttccgtaactaaggacgctgtca

SEQ ID NO: 4926245 - DNA, 25 bp, Homo sapien
gaagtatcactgaaggccctaaggt

SEQ ID NO: 4926246 - DNA, 25 bp, Homo sapien
actaaggacgctgtcaggtggtcta

SEQ ID NO: 4926247 - DNA, 25 bp, Homo sapien
agggctgactggctccctcacagct

SEQ ID NO: 4926248 - DNA, 25 bp, Homo sapien
gctgtgggtggattccagggctgac

SEQ ID NO: 4926249 - DNA, 25 bp, Homo sapien
tctttcctgagacctgctccttctg

SEQ ID NO: 4926250 - DNA, 25 bp, Homo sapien
ttagggagcagccagcactctttcc

SEQ ID NO: 4926251 - DNA, 25 bp, Homo sapien
ttgtcatcatggcccatccccaatg

SEQ ID NO: 4926252 - DNA, 25 bp, Homo sapien
ctatccacacagacccggcaaccat

SEQ ID NO: 4926253 - DNA, 25 bp, Homo sapien
tggcccatccccaatgagccgctgg

SEQ ID NO: 4926254 - DNA, 25 bp, Homo sapien
tatccacacagacccggcaaccatc

SEQ ID NO: 4926255 - DNA, 25 bp, Homo sapien
gagagaggctgtcttaccgagggaa

SEQ ID NO: 4926256 - DNA, 25 bp, Homo sapien
gagaggctgtcttaccgagggaagg

SEQ ID NO: 4926257 - DNA, 25 bp, Homo sapien
agaggctgtcttaccgagggaaggt

SEQ ID NO: 4926258 - DNA, 25 bp, Homo sapien
agagaggctgtcttaccgagggaag

SEQ ID NO: 4926259 - DNA, 25 bp, Homo sapien
tgggcaaatcctccccgtgccagtg

SEQ ID NO: 4926260 - DNA, 25 bp, Homo sapien
aggcctcctgagctcgttagctgag

SEQ ID NO: 4926261 - DNA, 25 bp, Homo sapien
gctcgttagctgagctctcacatct

SEQ ID NO: 4926262 - DNA, 25 bp, Homo sapien
tctggctgggcaaatcctccccgtg

SEQ ID NO: 4926263 - DNA, 25 bp, Homo sapien
ggtcactgattgagcccagttccct

SEQ ID NO: 4926264 - DNA, 25 bp, Homo sapien
tgcccacattcttgtgcggtcactg

SEQ ID NO: 4926265 - DNA, 25 bp, Homo sapien
ttcgcagggattcagcatgcccaca

SEQ ID NO: 4926266 - DNA, 25 bp, Homo sapien
ttccaatccccggtgcattcttggc

SEQ ID NO: 4926267 - DNA, 25 bp, Homo sapien
ttgcggcatttgaattcgtgtctca

SEQ ID NO: 4926268 - DNA, 25 bp, Homo sapien
cagatccgactggttgagtgtgttt

SEQ ID NO: 4926269 - DNA, 25 bp, Homo sapien
cattggattccatgattgactcagc

SEQ ID NO: 4926270 - DNA, 25 bp, Homo sapien
gcatttgaattcgtgtctcattgga

SEQ ID NO: 4926271 - DNA, 25 bp, Homo sapien
tggttgtatgtctactgagcaaggg

SEQ ID NO: 4926272 - DNA, 25 bp, Homo sapien
gttgtatgtctactgagcaaggggc

SEQ ID NO: 4926273 - DNA, 25 bp, Homo sapien
ttgtatgtctactgagcaaggggct

SEQ ID NO: 4926274 - DNA, 25 bp, Homo sapien
ggttgtatgtctactgagcaagggg

SEQ ID NO: 4926275 - DNA, 25 bp, Homo sapien
ctgcagcttgccattgatagtgtct

SEQ ID NO: 4926276 - DNA, 25 bp, Homo sapien
ggtctgcagcttgccattgatagtg

SEQ ID NO: 4926277 - DNA, 25 bp, Homo sapien
caacagatctgtgaggaattgtgca

SEQ ID NO: 4926278 - DNA, 25 bp, Homo sapien
aacagatctgtgaggaattgtgcag

SEQ ID NO: 4926279 - DNA, 25 bp, Homo sapien
ccctctattcgaggttctgggctgc

SEQ ID NO: 4926280 - DNA, 25 bp, Homo sapien
gaactctgagtaactctcccggata

SEQ ID NO: 4926281 - DNA, 25 bp, Homo sapien
tctcccggataagtgagcaggcaca

SEQ ID NO: 4926282 - DNA, 25 bp, Homo sapien
tgggctgccagggatgcataatcca

SEQ ID NO: 4926283 - DNA, 25 bp, Homo sapien
catggagccgtctctgcaaactggg

SEQ ID NO: 4926284 - DNA, 25 bp, Homo sapien
cagcagctgctaaagtggttgtgca

SEQ ID NO: 4926285 - DNA, 25 bp, Homo sapien
actgggtcaacaggtcaattgggcc

SEQ ID NO: 4926286 - DNA, 25 bp, Homo sapien
gaatgtctctgagtccagtgccggg

SEQ ID NO: 4926287 - DNA, 25 bp, Homo sapien
gtccataacagacgcaggactcaag

SEQ ID NO: 4926288 - DNA, 25 bp, Homo sapien
ccataacagacgcaggactcaagtc

SEQ ID NO: 4926289 - DNA, 25 bp, Homo sapien
ttgtccataacagacgcaggactca

SEQ ID NO: 4926290 - DNA, 25 bp, Homo sapien
cataacagacgcaggactcaagtcc

SEQ ID NO: 4926291 - DNA, 25 bp, Homo sapien
gtacagtgcaggcatgatggacagc

SEQ ID NO: 4926292 - DNA, 25 bp, Homo sapien
ggggtacagtgcaggcatgatggac

SEQ ID NO: 4926293 - DNA, 25 bp, Homo sapien
cagtgcaggcatgatggacagcccc

SEQ ID NO: 4926294 - DNA, 25 bp, Homo sapien
tacagtgcaggcatgatggacagcc

SEQ ID NO: 4926295 - DNA, 25 bp, Homo sapien
tgtattctccaaatgccggcagctc

SEQ ID NO: 4926296 - DNA, 25 bp, Homo sapien
tccacctatagcagagatcagaggt

SEQ ID NO: 4926297 - DNA, 25 bp, Homo sapien
ggcagctccttgaggaaatgaccaa

SEQ ID NO: 4926298 - DNA, 25 bp, Homo sapien
gatcagaggtgttgccggcataccc

SEQ ID NO: 4926299 - DNA, 25 bp, Homo sapien
gaaaacttctgcgttgcagagctta

SEQ ID NO: 4926300 - DNA, 25 bp, Homo sapien
cgttgcagagcttaacggatttaga

SEQ ID NO: 4926301 - DNA, 25 bp, Homo sapien
agagtaacgacattcttatgacagc

SEQ ID NO: 4926302 - DNA, 25 bp, Homo sapien
taacggatttagagtaacgacattc

SEQ ID NO: 4926303 - DNA, 25 bp, Homo sapien
caatggaaccactgtcttgggatat

SEQ ID NO: 4926304 - DNA, 25 bp, Homo sapien
tgaaaatcaatggaaccactgtctt

SEQ ID NO: 4926305 - DNA, 25 bp, Homo sapien
aaatcaatggaaccactgtcttggg

SEQ ID NO: 4926306 - DNA, 25 bp, Homo sapien
tcaatggaaccactgtcttgggata

SEQ ID NO: 4926307 - DNA, 25 bp, Homo sapien
tggaccagacatggctggtcatctc

SEQ ID NO: 4926308 - DNA, 25 bp, Homo sapien
catttgaagggtcatgttagatcct

SEQ ID NO: 4926309 - DNA, 25 bp, Homo sapien
gttagatcctgatgaagcaggctgc

SEQ ID NO: 4926310 - DNA, 25 bp, Homo sapien
cagacatggctggtcatctctgaga

SEQ ID NO: 4926311 - DNA, 25 bp, Homo sapien
gccagataatgacaacctgggtttg

SEQ ID NO: 4926312 - DNA, 25 bp, Homo sapien
ttgcactttgtggttatccttggaa

SEQ ID NO: 4926313 - DNA, 25 bp, Homo sapien
tcagaagacaagaatggccgaaaac

SEQ ID NO: 4926314 - DNA, 25 bp, Homo sapien
caagaatggccgaaaacaacgccag

SEQ ID NO: 4926315 - DNA, 25 bp, Homo sapien
tcatcgcgcctggatgtcaacgagg

SEQ ID NO: 4926316 - DNA, 25 bp, Homo sapien
cgaaagtaaagtaagtgtgccctct

SEQ ID NO: 4926317 - DNA, 25 bp, Homo sapien
gcacccgcgttcaggtttgcgaaag

SEQ ID NO: 4926318 - DNA, 25 bp, Homo sapien
tatagtagcttccaaatccgatgca

SEQ ID NO: 4926319 - DNA, 25 bp, Homo sapien
gttattccacggcatgaaaaacaaa

SEQ ID NO: 4926320 - DNA, 25 bp, Homo sapien
tttgtgttattccacggcatgaaaa

SEQ ID NO: 4926321 - DNA, 25 bp, Homo sapien
attttgtgttattccacggcatgaa

SEQ ID NO: 4926322 - DNA, 25 bp, Homo sapien
tgtgttattccacggcatgaaaaac

SEQ ID NO: 4926323 - DNA, 25 bp, Homo sapien
taaaataacccagcaacgcattgcc

SEQ ID NO: 4926324 - DNA, 25 bp, Homo sapien
ccacgtatacttggagagcgcgtta

SEQ ID NO: 4926325 - DNA, 25 bp, Homo sapien
gcgctttgatcaagagtcccaggga

SEQ ID NO: 4926326 - DNA, 25 bp, Homo sapien
aagggtattaatgggcgcgcgttca

SEQ ID NO: 4926327 - DNA, 25 bp, Homo sapien
tgctgctcctccgtagcagtactgt

SEQ ID NO: 4926328 - DNA, 25 bp, Homo sapien
agcagtactgtttgacaaaccgcat

SEQ ID NO: 4926329 - DNA, 25 bp, Homo sapien
tctctgctgctcctccgtagcagta

SEQ ID NO: 4926330 - DNA, 25 bp, Homo sapien
gtagcagtactgtttgacaaaccgc

SEQ ID NO: 4926331 - DNA, 25 bp, Homo sapien
gaaaaccggcttttatactcagcgc

SEQ ID NO: 4926332 - DNA, 25 bp, Homo sapien
ctcgcattataaagggccggtgggc

SEQ ID NO: 4926333 - DNA, 25 bp, Homo sapien
tctttttcccgccaagcctctgaga

SEQ ID NO: 4926334 - DNA, 25 bp, Homo sapien
gcatgaattaactacgcgcgcctac

SEQ ID NO: 4926335 - DNA, 25 bp, Homo sapien
ggcaaagtttcgtggatgcggcaag

SEQ ID NO: 4926336 - DNA, 25 bp, Homo sapien
agtttcgtggatgcggcaagggttg

SEQ ID NO: 4926337 - DNA, 25 bp, Homo sapien
caaagtttcgtggatgcggcaaggg

SEQ ID NO: 4926338 - DNA, 25 bp, Homo sapien
ctatgggcaaagtttcgtggatgcg

SEQ ID NO: 4926339 - DNA, 25 bp, Homo sapien
cccgcgtcgggagagtcgcgtcctt

SEQ ID NO: 4926340 - DNA, 25 bp, Homo sapien
agcctttcagagaagcgggtcctgg

SEQ ID NO: 4926341 - DNA, 25 bp, Homo sapien
aaaaaatccagcgtctaagcagctg

SEQ ID NO: 4926342 - DNA, 25 bp, Homo sapien
tcgcgtccttgctcgggtgttgtaa

SEQ ID NO: 4926343 - DNA, 25 bp, Homo sapien
caacttcttaaaaggatcagggcgg

SEQ ID NO: 4926344 - DNA, 25 bp, Homo sapien
gctgtcagaaatgcggtgagccgaa

SEQ ID NO: 4926345 - DNA, 25 bp, Homo sapien
caataaagcaggaatgtccgaccgg

SEQ ID NO: 4926346 - DNA, 25 bp, Homo sapien
gatatgcggtccctactccaaggag

SEQ ID NO: 4926347 - DNA, 25 bp, Homo sapien
tcccttcgcactcaatacggagatg

SEQ ID NO: 4926348 - DNA, 25 bp, Homo sapien
cagctgttctggaaccgcccagagc

SEQ ID NO: 4926349 - DNA, 25 bp, Homo sapien
ccccaccaagggtagcagctgttct

SEQ ID NO: 4926350 - DNA, 25 bp, Homo sapien
ggagatgcaactgcgccagagaccc

SEQ ID NO: 4926351 - DNA, 25 bp, Homo sapien
ctgaaggagaaggcgagaggcgcct

SEQ ID NO: 4926352 - DNA, 25 bp, Homo sapien
gaggcgcctgggcgctagcggctgc

SEQ ID NO: 4926353 - DNA, 25 bp, Homo sapien
tgaaggagaaggcgagaggcgcctg

SEQ ID NO: 4926354 - DNA, 25 bp, Homo sapien
gaaggagaaggcgagaggcgcctgg

SEQ ID NO: 4926355 - DNA, 25 bp, Homo sapien
gtggcggtgaggaaaacaatttgcc

SEQ ID NO: 4926356 - DNA, 25 bp, Homo sapien
gccgcgggaggtggcggtgaggaaa

SEQ ID NO: 4926357 - DNA, 25 bp, Homo sapien
aggtggcggtgaggaaaacaatttg

SEQ ID NO: 4926358 - DNA, 25 bp, Homo sapien
gcggtgaggaaaacaatttgccaaa

SEQ ID NO: 4926359 - DNA, 25 bp, Homo sapien
ccgcagcggcagaggaatcgaaatc

SEQ ID NO: 4926360 - DNA, 25 bp, Homo sapien
aaccagcggcttggtgcccgccgag

SEQ ID NO: 4926361 - DNA, 25 bp, Homo sapien
ggacagtcccctgctatctcggaga

SEQ ID NO: 4926362 - DNA, 25 bp, Homo sapien
gacgcacttagtgaaccagcggctt

SEQ ID NO: 4926363 - DNA, 25 bp, Homo sapien
cacacaaagcgggaggcagtcttga

SEQ ID NO: 4926364 - DNA, 25 bp, Homo sapien
cttgcagagctatcccctaaagcgg

SEQ ID NO: 4926365 - DNA, 25 bp, Homo sapien
gtgcggaaacctggcgcagcgcgca

SEQ ID NO: 4926366 - DNA, 25 bp, Homo sapien
cccctaaagcggctgggtggtcttg

SEQ ID NO: 4926367 - DNA, 25 bp, Homo sapien
gcttctctgagacgagcttggcggc

SEQ ID NO: 4926368 - DNA, 25 bp, Homo sapien
ttttgatgaaggtctcgtcgtccgg

SEQ ID NO: 4926369 - DNA, 25 bp, Homo sapien
cgtcgtccgggtcgcagatgaaact

SEQ ID NO: 4926370 - DNA, 25 bp, Homo sapien
tcctcgtcgcagtagaaatacggct

SEQ ID NO: 4926371 - DNA, 25 bp, Homo sapien
gctcctctgcttggacggacaggat

SEQ ID NO: 4926372 - DNA, 25 bp, Homo sapien
tctggtcacgcagggcaaaaaagct

SEQ ID NO: 4926373 - DNA, 25 bp, Homo sapien
tctggcgctccaagacgttgtgtgt

SEQ ID NO: 4926374 - DNA, 25 bp, Homo sapien
cctcttggcagcaggatagtccttc

SEQ ID NO: 4926375 - DNA, 25 bp, Homo sapien
gccaaggttgtgaggttgcatttga

SEQ ID NO: 4926376 - DNA, 25 bp, Homo sapien
gttcataggtgattgctcaggacat

SEQ ID NO: 4926377 - DNA, 25 bp, Homo sapien
caaagtccaatttgaggcagtttac

SEQ ID NO: 4926378 - DNA, 25 bp, Homo sapien
ctcaggacatttctgttagaaggaa

SEQ ID NO: 4926379 - DNA, 25 bp, Homo sapien
taatactaggtactatatactagga

SEQ ID NO: 4926380 - DNA, 25 bp, Homo sapien
tttatagtacctataatactaggta

SEQ ID NO: 4926381 - DNA, 25 bp, Homo sapien
ttatagtacctataatactaggtac

SEQ ID NO: 4926382 - DNA, 25 bp, Homo sapien
acctataatactaggtactatatac

SEQ ID NO: 4926383 - DNA, 25 bp, Homo sapien
agctgattcctaccgtcgtctgaga

SEQ ID NO: 4926384 - DNA, 25 bp, Homo sapien
ttagacccagatgaaccaaggcatg

SEQ ID NO: 4926385 - DNA, 25 bp, Homo sapien
tcaacaaatggctaaggtaggagtc

SEQ ID NO: 4926386 - DNA, 25 bp, Homo sapien
ccaaggcatgatagcgaagggttaa

SEQ ID NO: 4926387 - DNA, 25 bp, Homo sapien
agtcatttacagtcgtctccaacca

SEQ ID NO: 4926388 - DNA, 25 bp, Homo sapien
tacagtcgtctccaaccagtttggc

SEQ ID NO: 4926389 - DNA, 25 bp, Homo sapien
catttacagtcgtctccaaccagtt

SEQ ID NO: 4926390 - DNA, 25 bp, Homo sapien
cagtcgtctccaaccagtttggcaa

SEQ ID NO: 4926391 - DNA, 25 bp, Homo sapien
tctctgatgatgtcttctcctttgg

SEQ ID NO: 4926392 - DNA, 25 bp, Homo sapien
cattggttacatgctttcctccaag

SEQ ID NO: 4926393 - DNA, 25 bp, Homo sapien
caagcttctccttatctctctgatg

SEQ ID NO: 4926394 - DNA, 25 bp, Homo sapien
gggctctttcctggattctattttc

SEQ ID NO: 4926395 - DNA, 25 bp, Homo sapien
caggaagctgcgttcatgtgattaa

SEQ ID NO: 4926396 - DNA, 25 bp, Homo sapien
cagccaggaagctgcgttcatgtga

SEQ ID NO: 4926397 - DNA, 25 bp, Homo sapien
aagctgcgttcatgtgattaaatcc

SEQ ID NO: 4926398 - DNA, 25 bp, Homo sapien
ccaggaagctgcgttcatgtgatta

SEQ ID NO: 4926399 - DNA, 25 bp, Homo sapien
tgctccttccattctgctttgctct

SEQ ID NO: 4926400 - DNA, 25 bp, Homo sapien
ttcctgctccttccattctgctttg

SEQ ID NO: 4926401 - DNA, 25 bp, Homo sapien
ccaggggtggaaattctcttgtcct

SEQ ID NO: 4926402 - DNA, 25 bp, Homo sapien
tggaaattctcttgtccttcctgct

SEQ ID NO: 4926403 - DNA, 25 bp, Homo sapien
tccttgcatttagactcccaaacct

SEQ ID NO: 4926404 - DNA, 25 bp, Homo sapien
ccaccaaggtcacaaatggagactg

SEQ ID NO: 4926405 - DNA, 25 bp, Homo sapien
actctcacggctctgatctttgatt

SEQ ID NO: 4926406 - DNA, 25 bp, Homo sapien
tgacattagtagtctttccatccag

SEQ ID NO: 4926407 - DNA, 25 bp, Homo sapien
tgtgtcagaaccgtgtcctcatttt

SEQ ID NO: 4926408 - DNA, 25 bp, Homo sapien
atttgtgtcagaaccgtgtcctcat

SEQ ID NO: 4926409 - DNA, 25 bp, Homo sapien
tcagaaccgtgtcctcatttttcat

SEQ ID NO: 4926410 - DNA, 25 bp, Homo sapien
tgtcagaaccgtgtcctcatttttc

SEQ ID NO: 4926411 - DNA, 25 bp, Homo sapien
gccatctcaggcacaattccgtata

SEQ ID NO: 4926412 - DNA, 25 bp, Homo sapien
caattccgtatagctctagtttcgt

SEQ ID NO: 4926413 - DNA, 25 bp, Homo sapien
ggcacaattccgtatagctctagtt

SEQ ID NO: 4926414 - DNA, 25 bp, Homo sapien
tctcaggcacaattccgtatagctc

SEQ ID NO: 4926415 - DNA, 25 bp, Homo sapien
cttaaaggcaattatatgtggacac

SEQ ID NO: 4926416 - DNA, 25 bp, Homo sapien
cgtctcccctactgctgcgtgagtt

SEQ ID NO: 4926417 - DNA, 25 bp, Homo sapien
tgtggacacttcgtctcccctactg

SEQ ID NO: 4926418 - DNA, 25 bp, Homo sapien
cctactgctgcgtgagttatgagtt

SEQ ID NO: 4926419 - DNA, 25 bp, Homo sapien
cgacgtctcccgctgtttccagaag

SEQ ID NO: 4926420 - DNA, 25 bp, Homo sapien
gatctgagcgcctctttgggtacca

SEQ ID NO: 4926421 - DNA, 25 bp, Homo sapien
gaagccgagttgcaaacccgtgcag

SEQ ID NO: 4926422 - DNA, 25 bp, Homo sapien
aagcggtcttcccactttcctgctg

SEQ ID NO: 4926423 - DNA, 25 bp, Homo sapien
ccagctcgcttgtgcgccgagcttt

SEQ ID NO: 4926424 - DNA, 25 bp, Homo sapien
ccggagggaatccccggtgatgcca

SEQ ID NO: 4926425 - DNA, 25 bp, Homo sapien
gagctttccacggtctttccctgag

SEQ ID NO: 4926426 - DNA, 25 bp, Homo sapien
gaatccccggtgatgccagctcgct

SEQ ID NO: 4926427 - DNA, 25 bp, Homo sapien
cggcccgcgggcccatgtgctcggc

SEQ ID NO: 4926428 - DNA, 25 bp, Homo sapien
ggcccgcgggcccatgtgctcggcc

SEQ ID NO: 4926429 - DNA, 25 bp, Homo sapien
gcccgcgggcccatgtgctcggccg

SEQ ID NO: 4926430 - DNA, 25 bp, Homo sapien
gggtcccggggcacatctttgctcg

SEQ ID NO: 4926431 - DNA, 25 bp, Homo sapien
gcacatctttgctcgcagctcgtcg

SEQ ID NO: 4926432 - DNA, 25 bp, Homo sapien
atctttgctcgcagctcgtcgtcgc

SEQ ID NO: 4926433 - DNA, 25 bp, Homo sapien
gggcacatctttgctcgcagctcgt

SEQ ID NO: 4926434 - DNA, 25 bp, Homo sapien
gaccgccaacatcctttccgcaagg

SEQ ID NO: 4926435 - DNA, 25 bp, Homo sapien
cagggaccgccaacatcctttccgc

SEQ ID NO: 4926436 - DNA, 25 bp, Homo sapien
ccaacatcctttccgcaaggaaatc

SEQ ID NO: 4926437 - DNA, 25 bp, Homo sapien
cgccaacatcctttccgcaaggaaa

SEQ ID NO: 4926438 - DNA, 25 bp, Homo sapien
tctcgagagtttccagaaacgcagg

SEQ ID NO: 4926439 - DNA, 25 bp, Homo sapien
agcgcatccctactcagggccaagt

SEQ ID NO: 4926440 - DNA, 25 bp, Homo sapien
cctactcagggccaagtctcgagag

SEQ ID NO: 4926441 - DNA, 25 bp, Homo sapien
gccaagtctcgagagtttccagaaa

SEQ ID NO: 4926442 - DNA, 25 bp, Homo sapien
ttcctagcaaggaactagccccagt

SEQ ID NO: 4926443 - DNA, 25 bp, Homo sapien
gacaggctaacagcctctctctgga

SEQ ID NO: 4926444 - DNA, 25 bp, Homo sapien
aagtctcaacttgtcgctgccagta

SEQ ID NO: 4926445 - DNA, 25 bp, Homo sapien
ttataacagacaacacagcagacac

SEQ ID NO: 4926446 - DNA, 25 bp, Homo sapien
cagggttctgaggattgatacaacc

SEQ ID NO: 4926447 - DNA, 25 bp, Homo sapien
agaaagattcgctatgaccacagga

SEQ ID NO: 4926448 - DNA, 25 bp, Homo sapien
gctttagaaagattcgctatgacca

SEQ ID NO: 4926449 - DNA, 25 bp, Homo sapien
caacccccttcttgactgatcagag

SEQ ID NO: 4926450 - DNA, 25 bp, Homo sapien
tctgcagcttccgggaaggtttttc

SEQ ID NO: 4926451 - DNA, 25 bp, Homo sapien
taactcatctcaaataatggagacc

SEQ ID NO: 4926452 - DNA, 25 bp, Homo sapien
aatggagaccaggccacgaggtttc

SEQ ID NO: 4926453 - DNA, 25 bp, Homo sapien
ccagacacggattctgtatttgtcc

SEQ ID NO: 4926454 - DNA, 25 bp, Homo sapien
ggactcaatggtccaaatgattcca

SEQ ID NO: 4926455 - DNA, 25 bp, Homo sapien
gtcccaccatggacactgggaatat

SEQ ID NO: 4926456 - DNA, 25 bp, Homo sapien
agggtcccaccatggacactgggaa

SEQ ID NO: 4926457 - DNA, 25 bp, Homo sapien
ccacaggactcaatggtccaaatga

SEQ ID NO: 4926458 - DNA, 25 bp, Homo sapien
tgtccttcccctacttcaggtggag

SEQ ID NO: 4926459 - DNA, 25 bp, Homo sapien
cttcccagagcctgaaacgcctgtc

SEQ ID NO: 4926460 - DNA, 25 bp, Homo sapien
tgaccggacaacttaaccacacagc

SEQ ID NO: 4926461 - DNA, 25 bp, Homo sapien
tcaggtggaggttaacgtcagctcc

SEQ ID NO: 4926462 - DNA, 25 bp, Homo sapien
gaaaatatgattcaacccacatgta

SEQ ID NO: 4926463 - DNA, 25 bp, Homo sapien
gttccatccagcgaaaatatgattc

SEQ ID NO: 4926464 - DNA, 25 bp, Homo sapien
tccagcgaaaatatgattcaaccca

SEQ ID NO: 4926465 - DNA, 25 bp, Homo sapien
cattgttccatccagcgaaaatatg

SEQ ID NO: 4926466 - DNA, 25 bp, Homo sapien
cagttacatctgcagtgtgcctccc

SEQ ID NO: 4926467 - DNA, 25 bp, Homo sapien
agactgagacccaacaccccagtgt

SEQ ID NO: 4926468 - DNA, 25 bp, Homo sapien
gacttgcagtccaaggccttgaacc

SEQ ID NO: 4926469 - DNA, 25 bp, Homo sapien
tcccgaagatggcaacggtttctca

SEQ ID NO: 4926470 - DNA, 25 bp, Homo sapien
tggccagggcttttcaccgacaaaa

SEQ ID NO: 4926471 - DNA, 25 bp, Homo sapien
gcaatgaccataggaagcccagcct

SEQ ID NO: 4926472 - DNA, 25 bp, Homo sapien
tctctaagtgcgaagattggctgac

SEQ ID NO: 4926473 - DNA, 25 bp, Homo sapien
agaggaagctactggtctccaccgg

SEQ ID NO: 4926474 - DNA, 25 bp, Homo sapien
gcagagaatgtcttcctaatgcaga

SEQ ID NO: 4926475 - DNA, 25 bp, Homo sapien
gcatgcagagaatgtcttcctaatg

SEQ ID NO: 4926476 - DNA, 25 bp, Homo sapien
ttcctttttaacgagatcagcatgc

SEQ ID NO: 4926477 - DNA, 25 bp, Homo sapien
gcttttcctttttaacgagatcagc

SEQ ID NO: 4926478 - DNA, 25 bp, Homo sapien
acagtgagggccagattcctcgccc

SEQ ID NO: 4926479 - DNA, 25 bp, Homo sapien
caggcactcaagctaataatgggaa

SEQ ID NO: 4926480 - DNA, 25 bp, Homo sapien
catgatcactatttctaaccccagg

SEQ ID NO: 4926481 - DNA, 25 bp, Homo sapien
aatacacgctcactgagagcctctg

SEQ ID NO: 4926482 - DNA, 25 bp, Homo sapien
cagcagggctgaggttcaagccaca

SEQ ID NO: 4926483 - DNA, 25 bp, Homo sapien
gggtctgcctctcgtttccatgtgg

SEQ ID NO: 4926484 - DNA, 25 bp, Homo sapien
gaggtgtgcagcaactcacttaatt

SEQ ID NO: 4926485 - DNA, 25 bp, Homo sapien
gaccatgtttttgttgaaggagcca

SEQ ID NO: 4926486 - DNA, 25 bp, Homo sapien
attctggagagacccagatatggcc

SEQ ID NO: 4926487 - DNA, 25 bp, Homo sapien
gaagctcttttcttgggaataatga

SEQ ID NO: 4926488 - DNA, 25 bp, Homo sapien
aatctctctattctcacgtccactt

SEQ ID NO: 4926489 - DNA, 25 bp, Homo sapien
tcagcctctcccagaaacccagaag

SEQ ID NO: 4926490 - DNA, 25 bp, Homo sapien
atgatgcagagcggcaaaggaagct

SEQ ID NO: 4926491 - DNA, 25 bp, Homo sapien
atgcagagcggcaaaggaagctgaa

SEQ ID NO: 4926492 - DNA, 25 bp, Homo sapien
aacatgatgcagagcggcaaaggaa

SEQ ID NO: 4926493 - DNA, 25 bp, Homo sapien
caacatgatgcagagcggcaaagga

SEQ ID NO: 4926494 - DNA, 25 bp, Homo sapien
tattccagaacagcgctctcaacca

SEQ ID NO: 4926495 - DNA, 25 bp, Homo sapien
tgtgtctctcctattccagaacagc

SEQ ID NO: 4926496 - DNA, 25 bp, Homo sapien
tgttaagttcattgcataatgaact

SEQ ID NO: 4926497 - DNA, 25 bp, Homo sapien
gtctctcctattccagaacagcgct

SEQ ID NO: 4926498 - DNA, 25 bp, Homo sapien
agccaccataccaggtctctatctt

SEQ ID NO: 4926499 - DNA, 25 bp, Homo sapien
catgagccaccataccaggtctcta

SEQ ID NO: 4926500 - DNA, 25 bp, Homo sapien
accataccaggtctctatcttattt

SEQ ID NO: 4926501 - DNA, 25 bp, Homo sapien
tgagccaccataccaggtctctatc

SEQ ID NO: 4926502 - DNA, 25 bp, Homo sapien
caacaggaacaaggcgaacagcagg

SEQ ID NO: 4926503 - DNA, 25 bp, Homo sapien
aacaccaacaggaacaaggcgaaca

SEQ ID NO: 4926504 - DNA, 25 bp, Homo sapien
ttaaacaccaacaggaacaaggcga

SEQ ID NO: 4926505 - DNA, 25 bp, Homo sapien
accaacaggaacaaggcgaacagca

SEQ ID NO: 4926506 - DNA, 25 bp, Homo sapien
ctggcgtccttggcccacgttgagg

SEQ ID NO: 4926507 - DNA, 25 bp, Homo sapien
gaaagccacaatccagccggactat

SEQ ID NO: 4926508 - DNA, 25 bp, Homo sapien
tctgctagttactgcccctctcctg

SEQ ID NO: 4926509 - DNA, 25 bp, Homo sapien
ccggactatgatcctgcctggcgtc

SEQ ID NO: 4926510 - DNA, 25 bp, Homo sapien
tcaagtctaaaatgggaagcctgga

SEQ ID NO: 4926511 - DNA, 25 bp, Homo sapien
tcactgagacttccggagcagggtg

SEQ ID NO: 4926512 - DNA, 25 bp, Homo sapien
gggagccccttctattcagttgcga

SEQ ID NO: 4926513 - DNA, 25 bp, Homo sapien
caagggcacacatctactggaggag

SEQ ID NO: 4926514 - DNA, 25 bp, Homo sapien
ggtgtgagatcatagcatacgtgcc

SEQ ID NO: 4926515 - DNA, 25 bp, Homo sapien
ccttgcagataaagcacaggagtct

SEQ ID NO: 4926516 - DNA, 25 bp, Homo sapien
gaaaccacctttagatatgcaccat

SEQ ID NO: 4926517 - DNA, 25 bp, Homo sapien
gagggtccagaagtctaagtcaaca

SEQ ID NO: 4926518 - DNA, 25 bp, Homo sapien
aagcttgctctttacaacacatgga

SEQ ID NO: 4926519 - DNA, 25 bp, Homo sapien
gacaagctgtcattgcaataggatg

SEQ ID NO: 4926520 - DNA, 25 bp, Homo sapien
caacacatggaaatactaatactac

SEQ ID NO: 4926521 - DNA, 25 bp, Homo sapien
cctaatagtgcagataaaattggga

SEQ ID NO: 4926522 - DNA, 25 bp, Homo sapien
agatgtcatcatctactgtgtgccc

SEQ ID NO: 4926523 - DNA, 25 bp, Homo sapien
tcatctactgtgtgcccttcaaagc

SEQ ID NO: 4926524 - DNA, 25 bp, Homo sapien
gtcatcatctactgtgtgcccttca

SEQ ID NO: 4926525 - DNA, 25 bp, Homo sapien
cccttcaaagctgtgccccttcaaa

SEQ ID NO: 4926526 - DNA, 25 bp, Homo sapien
tatgtcagatgcagaacctaagccc

SEQ ID NO: 4926527 - DNA, 25 bp, Homo sapien
ttcgaggacacccatatagctgagg

SEQ ID NO: 4926528 - DNA, 25 bp, Homo sapien
tgagtgacgcggctaggaacataca

SEQ ID NO: 4926529 - DNA, 25 bp, Homo sapien
gagatgcacgccatatgaagaaggt

SEQ ID NO: 4926530 - DNA, 25 bp, Homo sapien
caatctagcggaagcactttgttca

SEQ ID NO: 4926531 - DNA, 25 bp, Homo sapien
gaaatcaccaggattaggcaccagg

SEQ ID NO: 4926532 - DNA, 25 bp, Homo sapien
tcatcaggtctggtggactccacta

SEQ ID NO: 4926533 - DNA, 25 bp, Homo sapien
aggcaccaggtcaagcaatctagcg

SEQ ID NO: 4926534 - DNA, 25 bp, Homo sapien
gcaagatgctcctgcagaactcaac

SEQ ID NO: 4926535 - DNA, 25 bp, Homo sapien
ggcttcgggccagaatgaagatcaa

SEQ ID NO: 4926536 - DNA, 25 bp, Homo sapien
gcagggaatccatcgtatttgccag

SEQ ID NO: 4926537 - DNA, 25 bp, Homo sapien
tcaaaggctttcaggacagaggagg

SEQ ID NO: 4926538 - DNA, 25 bp, Homo sapien
ccgtgaagaggtttcatgcaagttt

SEQ ID NO: 4926539 - DNA, 25 bp, Homo sapien
gcttggctcccaaaaccaccgtgaa

SEQ ID NO: 4926540 - DNA, 25 bp, Homo sapien
tctgaggatggactgtcctcaacat

SEQ ID NO: 4926541 - DNA, 25 bp, Homo sapien
gaaaaacctggcctcgcttggctcc

SEQ ID NO: 4926542 - DNA, 25 bp, Homo sapien
ggctagccggttttcctgacaccat

SEQ ID NO: 4926543 - DNA, 25 bp, Homo sapien
tccttgttgactctgatagtagttt

SEQ ID NO: 4926544 - DNA, 25 bp, Homo sapien
tggctagccggttttcctgacacca

SEQ ID NO: 4926545 - DNA, 25 bp, Homo sapien
gatacgcaatcaagagtctccttca

SEQ ID NO: 4926546 - DNA, 25 bp, Homo sapien
tactcaatgtttgagctgctcccga

SEQ ID NO: 4926547 - DNA, 25 bp, Homo sapien
gagctgctcccgatttcaatatatt

SEQ ID NO: 4926548 - DNA, 25 bp, Homo sapien
ccttcatagtctgaggttgcagcaa

SEQ ID NO: 4926549 - DNA, 25 bp, Homo sapien
tatgttgtaaaccagaccgaccgct

SEQ ID NO: 4926550 - DNA, 25 bp, Homo sapien
taggatacctgaaccagggccgtgg

SEQ ID NO: 4926551 - DNA, 25 bp, Homo sapien
ccaattatgtcaggcaaagtcgcta

SEQ ID NO: 4926552 - DNA, 25 bp, Homo sapien
tacaggctgtgtacccatgcatatg

SEQ ID NO: 4926553 - DNA, 25 bp, Homo sapien
cctatggtcagccaacaggccagtt

SEQ ID NO: 4926554 - DNA, 25 bp, Homo sapien
tgacaaggagagtcaccagctcgct

SEQ ID NO: 4926555 - DNA, 25 bp, Homo sapien
tatgggctacccagagtcacctatg

SEQ ID NO: 4926556 - DNA, 25 bp, Homo sapien
ttctgtaaccagaaatcgaggcagc

SEQ ID NO: 4926557 - DNA, 25 bp, Homo sapien
gaagactcgctgtccttctaccatg

SEQ ID NO: 4926558 - DNA, 25 bp, Homo sapien
tctctgggaggctatatcttgtctc

SEQ ID NO: 4926559 - DNA, 25 bp, Homo sapien
tagagttgcaggagtcactttcccc

SEQ ID NO: 4926560 - DNA, 25 bp, Homo sapien
cctgctgggtatggttctttcacga

SEQ ID NO: 4926561 - DNA, 25 bp, Homo sapien
caactggactgagctaaagaggccc

SEQ ID NO: 4926562 - DNA, 25 bp, Homo sapien
gccggagacttacgcagctggcatc

SEQ ID NO: 4926563 - DNA, 25 bp, Homo sapien
taaagctcagttacgaccacgtgcc

SEQ ID NO: 4926564 - DNA, 25 bp, Homo sapien
gacttaaaaagcatcgtgccccgcc

SEQ ID NO: 4926565 - DNA, 25 bp, Homo sapien
agcaggactcctaagaacacttttg

SEQ ID NO: 4926566 - DNA, 25 bp, Homo sapien
gcttcaccggctcaatccacagtga

SEQ ID NO: 4926567 - DNA, 25 bp, Homo sapien
tcagcgatgaaatccctcagggctt

SEQ ID NO: 4926568 - DNA, 25 bp, Homo sapien
ggctcaatccacagtgacagcagga

SEQ ID NO: 4926569 - DNA, 25 bp, Homo sapien
gagaagactttggttctggcggttc

SEQ ID NO: 4926570 - DNA, 25 bp, Homo sapien
tgaagatgccttcgagaagactttg

SEQ ID NO: 4926571 - DNA, 25 bp, Homo sapien
gagctcactgggagccggttctctt

SEQ ID NO: 4926572 - DNA, 25 bp, Homo sapien
ccagagctggaagccgattctgcca

SEQ ID NO: 4926573 - DNA, 25 bp, Homo sapien
gggtagatccttgtattcacttgca

SEQ ID NO: 4926574 - DNA, 25 bp, Homo sapien
ccatagaaatggaggtgtcgaatcc

SEQ ID NO: 4926575 - DNA, 25 bp, Homo sapien
ggtttggtatcacaatcagatgcag

SEQ ID NO: 4926576 - DNA, 25 bp, Homo sapien
ataaataaaactagcaactgcccag

SEQ ID NO: 4926577 - DNA, 25 bp, Homo sapien
tgatcagcttgaggagtaggtcgtc

SEQ ID NO: 4926578 - DNA, 25 bp, Homo sapien
gagaacgccaacagaccaacaattt

SEQ ID NO: 4926579 - DNA, 25 bp, Homo sapien
gacacagccagcagatatgatcagc

SEQ ID NO: 4926580 - DNA, 25 bp, Homo sapien
cacatcctattcctgtgggtcaggg

SEQ ID NO: 4926581 - DNA, 25 bp, Homo sapien
gagtgtcttacacaaagctgtgagc

SEQ ID NO: 4926582 - DNA, 25 bp, Homo sapien
tctcccagatatagggtgcttggct

SEQ ID NO: 4926583 - DNA, 25 bp, Homo sapien
tgagctttgcatgttcccttgagtg

SEQ ID NO: 4926584 - DNA, 25 bp, Homo sapien
gcttgaggacagtgactacacagcc

SEQ ID NO: 4926585 - DNA, 25 bp, Homo sapien
taaaacctggattagctgggcttcc

SEQ ID NO: 4926586 - DNA, 25 bp, Homo sapien
ggtctctactcaagtcacgcaggca

SEQ ID NO: 4926587 - DNA, 25 bp, Homo sapien
caaatgaaagcgatgacagcacgaa

SEQ ID NO: 4926588 - DNA, 25 bp, Homo sapien
gcacctaggagctgacatggttccc

SEQ ID NO: 4926589 - DNA, 25 bp, Homo sapien
aagacatcagaacaccccttcaagg

SEQ ID NO: 4926590 - DNA, 25 bp, Homo sapien
ccttcaaggcctgggaatcggcagc

SEQ ID NO: 4926591 - DNA, 25 bp, Homo sapien
gaattgccccacaagaaaacgtggc

SEQ ID NO: 4926592 - DNA, 25 bp, Homo sapien
tgtttcatcgtattctcacgcccca

SEQ ID NO: 4926593 - DNA, 25 bp, Homo sapien
ggttccaccagcgttattccccaga

SEQ ID NO: 4926594 - DNA, 25 bp, Homo sapien
atacttgaacgaagctccatgcagc

SEQ ID NO: 4926595 - DNA, 25 bp, Homo sapien
tatcctgaaatgtgccgggcgtgtg

SEQ ID NO: 4926596 - DNA, 25 bp, Homo sapien
tgagcgccggatggaacgtgcatca

SEQ ID NO: 4926597 - DNA, 25 bp, Homo sapien
agctgcagaactgcaacaggccttt

SEQ ID NO: 4926598 - DNA, 25 bp, Homo sapien
tccagctggcatgagactccatttc

SEQ ID NO: 4926599 - DNA, 25 bp, Homo sapien
gtccttccacttgtcagctgcagaa

SEQ ID NO: 4926600 - DNA, 25 bp, Homo sapien
acttgtcactctgccttcccatggg

SEQ ID NO: 4926601 - DNA, 25 bp, Homo sapien
tcaaggcttgttacactgaatactc

SEQ ID NO: 4926602 - DNA, 25 bp, Homo sapien
aaggcttgttacactgaatactccc

SEQ ID NO: 4926603 - DNA, 25 bp, Homo sapien
gggggctgcaatcttcatacccaca

SEQ ID NO: 4926604 - DNA, 25 bp, Homo sapien
aggagggggctgcaatcttcatacc

SEQ ID NO: 4926605 - DNA, 25 bp, Homo sapien
tgctcttcctatggacagctgagaa

SEQ ID NO: 4926606 - DNA, 25 bp, Homo sapien
gagttcttctttgcagtgcctacaa

SEQ ID NO: 4926607 - DNA, 25 bp, Homo sapien
ggtcctgcaccacagcgtgagagtt

SEQ ID NO: 4926608 - DNA, 25 bp, Homo sapien
ttcacgcaggtacaaaggacagggt

SEQ ID NO: 4926609 - DNA, 25 bp, Homo sapien
tgaagagctctacctggcagaacct

SEQ ID NO: 4926610 - DNA, 25 bp, Homo sapien
cttcacttagagaggcactggagcc

SEQ ID NO: 4926611 - DNA, 25 bp, Homo sapien
tatgaagagcatgttgcgcctgacc

SEQ ID NO: 4926612 - DNA, 25 bp, Homo sapien
tactgaaaagcaggtgtgaggccag

SEQ ID NO: 4926613 - DNA, 25 bp, Homo sapien
gtcactgatatggttcccctggatc

SEQ ID NO: 4926614 - DNA, 25 bp, Homo sapien
aaagccagcaattgagaactccaca

SEQ ID NO: 4926615 - DNA, 25 bp, Homo sapien
catcatagattactgtggctaaaag

SEQ ID NO: 4926616 - DNA, 25 bp, Homo sapien
ctaaaaggggcctcttgaggtcact

SEQ ID NO: 4926617 - DNA, 25 bp, Homo sapien
tcagtgactggccagaaattgcacc

SEQ ID NO: 4926618 - DNA, 25 bp, Homo sapien
ccacagtcgccaatagagccggagt

SEQ ID NO: 4926619 - DNA, 25 bp, Homo sapien
cgtgcaatcacatctctagggaggg

SEQ ID NO: 4926620 - DNA, 25 bp, Homo sapien
aaacctgacagtggaatggtgggcc

SEQ ID NO: 4926621 - DNA, 25 bp, Homo sapien
ggccaaatggaggtcagctacgagt

SEQ ID NO: 4926622 - DNA, 25 bp, Homo sapien
ttaattcagtgagtaggccaaatgg

SEQ ID NO: 4926623 - DNA, 25 bp, Homo sapien
ttttggcacgctgactagagatgca

SEQ ID NO: 4926624 - DNA, 25 bp, Homo sapien
actagtagtaacaagccttctgggc

SEQ ID NO: 4926625 - DNA, 25 bp, Homo sapien
gatttaacagggagcaacctcagga

SEQ ID NO: 4926626 - DNA, 25 bp, Homo sapien
aacgtgttgccggatagtgtctgag

SEQ ID NO: 4926627 - DNA, 25 bp, Homo sapien
gctgaggtcattgtcggcacagaaa

SEQ ID NO: 4926628 - DNA, 25 bp, Homo sapien
cctcgtgtccgattagcctgaaaag

SEQ ID NO: 4926629 - DNA, 25 bp, Homo sapien
acaggaagtacacagatgggcctag

SEQ ID NO: 4926630 - DNA, 25 bp, Homo sapien
cagatatggaagatattgacggccg

SEQ ID NO: 4926631 - DNA, 25 bp, Homo sapien
gggtcagcacggcttacagatgact

SEQ ID NO: 4926632 - DNA, 25 bp, Homo sapien
tgctcgtgaattcagaggatgccag

SEQ ID NO: 4926633 - DNA, 25 bp, Homo sapien
gtcctagagataaacatagtgcccc

SEQ ID NO: 4926634 - DNA, 25 bp, Homo sapien
atgaagtagaatcatacacacacag

SEQ ID NO: 4926635 - DNA, 25 bp, Homo sapien
taacagaggagataagcttggaaat

SEQ ID NO: 4926636 - DNA, 25 bp, Homo sapien
ggtctccctgggagcaaataacaga

SEQ ID NO: 4926637 - DNA, 25 bp, Homo sapien
gggattggcaaaaacatctgatgag

SEQ ID NO: 4926638 - DNA, 25 bp, Homo sapien
tcgcgctgagtgaaatcaattccca

SEQ ID NO: 4926639 - DNA, 25 bp, Homo sapien
tctggacgggagttctgcttggctc

SEQ ID NO: 4926640 - DNA, 25 bp, Homo sapien
aaacactggctttattagggtggtg

SEQ ID NO: 4926641 - DNA, 25 bp, Homo sapien
gtaacccgttgttatgcagtcacac

SEQ ID NO: 4926642 - DNA, 25 bp, Homo sapien
tcacacagcgccaagcgaggaagtg

SEQ ID NO: 4926643 - DNA, 25 bp, Homo sapien
acagcgccaagcgaggaagtggcat

SEQ ID NO: 4926644 - DNA, 25 bp, Homo sapien
ccagaggaaatgagtaacccgttgt

SEQ ID NO: 4926645 - DNA, 25 bp, Homo sapien
agccacagactgtccaccgccaaag

SEQ ID NO: 4926646 - DNA, 25 bp, Homo sapien
cccactcctgacgttcccacccagc

SEQ ID NO: 4926647 - DNA, 25 bp, Homo sapien
gcacggcattcccagcaaagaggca

SEQ ID NO: 4926648 - DNA, 25 bp, Homo sapien
ccctccatggtggtgttcccaggaa

SEQ ID NO: 4926649 - DNA, 25 bp, Homo sapien
cttgaggctaatcccgccctgggag

SEQ ID NO: 4926650 - DNA, 25 bp, Homo sapien
gatcaaacctaaagcagacacccgt

SEQ ID NO: 4926651 - DNA, 25 bp, Homo sapien
cacccgttagtaatgggagaggagc

SEQ ID NO: 4926652 - DNA, 25 bp, Homo sapien
ggagcaccttatacccatggctggg

SEQ ID NO: 4926653 - DNA, 25 bp, Homo sapien
caatgggagtccagtgatgcttcca

SEQ ID NO: 4926654 - DNA, 25 bp, Homo sapien
tccgttactgctcacctgcgaagtc

SEQ ID NO: 4926655 - DNA, 25 bp, Homo sapien
gaagctgtacgtagcttggtgtcca

SEQ ID NO: 4926656 - DNA, 25 bp, Homo sapien
tcaggtaccatgtctacgaacagcg

SEQ ID NO: 4926657 - DNA, 25 bp, Homo sapien
tccatctgcggtcgtaggcccccat

SEQ ID NO: 4926658 - DNA, 25 bp, Homo sapien
ctcccgtgctgcctaacgcggcttt

SEQ ID NO: 4926659 - DNA, 25 bp, Homo sapien
acctgccggaccataccctgtccac

SEQ ID NO: 4926660 - DNA, 25 bp, Homo sapien
cgtgctgcctaacgcggcttttctc

SEQ ID NO: 4926661 - DNA, 25 bp, Homo sapien
ggagatgattcagcctccacttaaa

SEQ ID NO: 4926662 - DNA, 25 bp, Homo sapien
tctcagtgtcctggcagtaaaaggg

SEQ ID NO: 4926663 - DNA, 25 bp, Homo sapien
tgtatgtgccaaggtcacccgcgca

SEQ ID NO: 4926664 - DNA, 25 bp, Homo sapien
taccatcatgatggctgtatgtgcc

SEQ ID NO: 4926665 - DNA, 25 bp, Homo sapien
tgtggaaaatgtacagacccttagg

SEQ ID NO: 4926666 - DNA, 25 bp, Homo sapien
tccacaaaatgcagggttcaggcct

SEQ ID NO: 4926667 - DNA, 25 bp, Homo sapien
gatctgctttggtcaggcctctaaa

SEQ ID NO: 4926668 - DNA, 25 bp, Homo sapien
ccgtgtctaggcatgttccccaggg

SEQ ID NO: 4926669 - DNA, 25 bp, Homo sapien
cagcgagtaaacaggtacctcccca

SEQ ID NO: 4926670 - DNA, 25 bp, Homo sapien
tttgtgaaagcggtcccataacagc

SEQ ID NO: 4926671 - DNA, 25 bp, Homo sapien
gcggtcccataacagcgagtaaaca

SEQ ID NO: 4926672 - DNA, 25 bp, Homo sapien
tgaaagcggtcccataacagcgagt

SEQ ID NO: 4926673 - DNA, 25 bp, Homo sapien
ttaaaagatcttggcctgtccaggc

SEQ ID NO: 4926674 - DNA, 25 bp, Homo sapien
gacaccaggcctgatattcagcagg

SEQ ID NO: 4926675 - DNA, 25 bp, Homo sapien
tggctcgagatgaactaacataggg

SEQ ID NO: 4926676 - DNA, 25 bp, Homo sapien
tgggctgactctaccaaaagttggg

SEQ ID NO: 4926677 - DNA, 25 bp, Homo sapien
gggttatcatttcccctatggcagc

SEQ ID NO: 4926678 - DNA, 25 bp, Homo sapien
ggtggctatcactcatcctggtcaa

SEQ ID NO: 4926679 - DNA, 25 bp, Homo sapien
tcagcagctgtagaatgggttatca

SEQ ID NO: 4926680 - DNA, 25 bp, Homo sapien
caacagtacatggtggacctcagaa

SEQ ID NO: 4926681 - DNA, 25 bp, Homo sapien
tatttctcaaatcctaaggaataat

SEQ ID NO: 4926682 - DNA, 25 bp, Homo sapien
agtttatacaaatctcagcattgga

SEQ ID NO: 4926683 - DNA, 25 bp, Homo sapien
tttatacaaatctcagcattggaca

SEQ ID NO: 4926684 - DNA, 25 bp, Homo sapien
cattggacatgacagtttcattcca

SEQ ID NO: 4926685 - DNA, 25 bp, Homo sapien
tgccagccatatggccacgcttctt

SEQ ID NO: 4926686 - DNA, 25 bp, Homo sapien
gaatgcctgatcgtccataatggaa

SEQ ID NO: 4926687 - DNA, 25 bp, Homo sapien
cctcctcggtatcagctgcagaggg

SEQ ID NO: 4926688 - DNA, 25 bp, Homo sapien
tcccctgaatgcctgatcgtccata

SEQ ID NO: 4926689 - DNA, 25 bp, Homo sapien
aaaggtaggctgaccgatgctggca

SEQ ID NO: 4926690 - DNA, 25 bp, Homo sapien
tcttacaagagggtccagcacatat

SEQ ID NO: 4926691 - DNA, 25 bp, Homo sapien
tcagtttccttgtagatcaaatggg

SEQ ID NO: 4926692 - DNA, 25 bp, Homo sapien
ggaattccaacaagtgacaccaaca

SEQ ID NO: 4926693 - DNA, 25 bp, Homo sapien
ctgccatgtgacaggctttcaacaa

SEQ ID NO: 4926694 - DNA, 25 bp, Homo sapien
tgaccacgggtttaacttgtacaca

SEQ ID NO: 4926695 - DNA, 25 bp, Homo sapien
caagggaccacctcttgtcataaac

SEQ ID NO: 4926696 - DNA, 25 bp, Homo sapien
tatataaatgaacgggactgttccc

SEQ ID NO: 4926697 - DNA, 25 bp, Homo sapien
acagccgcttcgtaaaagaggcggg

SEQ ID NO: 4926698 - DNA, 25 bp, Homo sapien
gtctgggtaactccacagccggcac

SEQ ID NO: 4926699 - DNA, 25 bp, Homo sapien
catcaaccatgacagccgcttcgta

SEQ ID NO: 4926700 - DNA, 25 bp, Homo sapien
gacactcacccatcaaccatgacag

SEQ ID NO: 4926701 - DNA, 25 bp, Homo sapien
cagaagagtctctggcctgtgacta

SEQ ID NO: 4926702 - DNA, 25 bp, Homo sapien
agtcagaatccagccgctgggcagg

SEQ ID NO: 4926703 - DNA, 25 bp, Homo sapien
cccattcagggtgatgcgtttttac

SEQ ID NO: 4926704 - DNA, 25 bp, Homo sapien
ctaaggcacagcgagtcagaatcca

SEQ ID NO: 4926705 - DNA, 25 bp, Homo sapien
tctctgctagtgcacgggtatgaca

SEQ ID NO: 4926706 - DNA, 25 bp, Homo sapien
gagctttgcctcaggaatattgagc

SEQ ID NO: 4926707 - DNA, 25 bp, Homo sapien
acacggctgtggacactgctgtgca

SEQ ID NO: 4926708 - DNA, 25 bp, Homo sapien
aggaatattgagctccagcagtgca

SEQ ID NO: 4926709 - DNA, 25 bp, Homo sapien
actgccccagacacacggtatattg

SEQ ID NO: 4926710 - DNA, 25 bp, Homo sapien
cagactcttgggcataactcttata

SEQ ID NO: 4926711 - DNA, 25 bp, Homo sapien
ggaaacttagtatcttgacctgaac

SEQ ID NO: 4926712 - DNA, 25 bp, Homo sapien
attttgggcttggttagaggcactg

SEQ ID NO: 4926713 - DNA, 25 bp, Homo sapien
ctgtccccatatcacacaggctgcc

SEQ ID NO: 4926714 - DNA, 25 bp, Homo sapien
ggctgcccgctgtttctcggccttg

SEQ ID NO: 4926715 - DNA, 25 bp, Homo sapien
gctttgatcacccagcagggcttct

SEQ ID NO: 4926716 - DNA, 25 bp, Homo sapien
tcagctttgatcacccagcagggct

SEQ ID NO: 4926717 - DNA, 25 bp, Homo sapien
tctgtgtaatttaagtgcccaccct

SEQ ID NO: 4926718 - DNA, 25 bp, Homo sapien
tattagcaacgtcagctctccaggc

SEQ ID NO: 4926719 - DNA, 25 bp, Homo sapien
cccatggcacatccggcagtatctg

SEQ ID NO: 4926720 - DNA, 25 bp, Homo sapien
gagaaaggatcaaactcagaggcat

SEQ ID NO: 4926721 - DNA, 25 bp, Homo sapien
ggctgccatgagtgcgaagtcatga

SEQ ID NO: 4926722 - DNA, 25 bp, Homo sapien
tgagtaatcccatgctacttaatgc

SEQ ID NO: 4926723 - DNA, 25 bp, Homo sapien
ttaatgctgagtccccggcacacag

SEQ ID NO: 4926724 - DNA, 25 bp, Homo sapien
gagtgcgaagtcatgagtaatccca

SEQ ID NO: 4926725 - DNA, 25 bp, Homo sapien
gaccacaagctacagaacaagaggg

SEQ ID NO: 4926726 - DNA, 25 bp, Homo sapien
tactactgttcctacagcccatggc

SEQ ID NO: 4926727 - DNA, 25 bp, Homo sapien
caacttactcaaatggatcaggaaa

SEQ ID NO: 4926728 - DNA, 25 bp, Homo sapien
gcgagaatcaccctgaagagcctgg

SEQ ID NO: 4926729 - DNA, 25 bp, Homo sapien
cagcacgttgaaaggccaaagtgag

SEQ ID NO: 4926730 - DNA, 25 bp, Homo sapien
aaaaatgtcagagtcgtccgggtgc

SEQ ID NO: 4926731 - DNA, 25 bp, Homo sapien
acgttgaaaggccaaagtgagtgga

SEQ ID NO: 4926732 - DNA, 25 bp, Homo sapien
aaaatgtcagagtcgtccgggtgcg

SEQ ID NO: 4926733 - DNA, 25 bp, Homo sapien
gcctaaatcccaggtgtaacaggat

SEQ ID NO: 4926734 - DNA, 25 bp, Homo sapien
tcagattgaaagtgcctaaatccca

SEQ ID NO: 4926735 - DNA, 25 bp, Homo sapien
acagttctcaagtccgtccagagtg

SEQ ID NO: 4926736 - DNA, 25 bp, Homo sapien
tactccagctttaggtcacgtaagg

SEQ ID NO: 4926737 - DNA, 25 bp, Homo sapien
ttcacaagacagctggagcatcctg

SEQ ID NO: 4926738 - DNA, 25 bp, Homo sapien
ctgattatataaccctcacctcacc

SEQ ID NO: 4926739 - DNA, 25 bp, Homo sapien
tctccacatgttttcacaagacagc

SEQ ID NO: 4926740 - DNA, 25 bp, Homo sapien
ttccccaaggctgtctccacatgtt

SEQ ID NO: 4926741 - DNA, 25 bp, Homo sapien
gatgacatatgtagcacaacagaag

SEQ ID NO: 4926742 - DNA, 25 bp, Homo sapien
gccacaggaatgctgactatcacag

SEQ ID NO: 4926743 - DNA, 25 bp, Homo sapien
ctatcacagcagatttgaaacgcaa

SEQ ID NO: 4926744 - DNA, 25 bp, Homo sapien
tgaaacgcaaatgcgcttttgaaaa

SEQ ID NO: 4926745 - DNA, 25 bp, Homo sapien
ccaggctgatttctagacaggtaca

SEQ ID NO: 4926746 - DNA, 25 bp, Homo sapien
taagtgtctgactccgtgttcctgg

SEQ ID NO: 4926747 - DNA, 25 bp, Homo sapien
aacagtcccgactcatgggtgggaa

SEQ ID NO: 4926748 - DNA, 25 bp, Homo sapien
ctcctattggtgtgcgtcccagcca

SEQ ID NO: 4926749 - DNA, 25 bp, Homo sapien
tctgtgggtgtgacggtgtatgatc

SEQ ID NO: 4926750 - DNA, 25 bp, Homo sapien
tcgttttcaggtggtggcgcagcca

SEQ ID NO: 4926751 - DNA, 25 bp, Homo sapien
ttgcagacatcacggaggaagctcc

SEQ ID NO: 4926752 - DNA, 25 bp, Homo sapien
gactgggcctagtgcattgcagaca

SEQ ID NO: 4926753 - DNA, 25 bp, Homo sapien
cagatggtcctcttcaatgtgggtt

SEQ ID NO: 4926754 - DNA, 25 bp, Homo sapien
gatgagattatcacttcaaccagga

SEQ ID NO: 4926755 - DNA, 25 bp, Homo sapien
gctgagatgcacgttacccagtaaa

SEQ ID NO: 4926756 - DNA, 25 bp, Homo sapien
tgggccaagtcaatcaaaccagcct

SEQ ID NO: 4926757 - DNA, 25 bp, Homo sapien
taaatacctaactgatgtctgagca

SEQ ID NO: 4926758 - DNA, 25 bp, Homo sapien
gactgacggactgatataatgcaca

SEQ ID NO: 4926759 - DNA, 25 bp, Homo sapien
cagtccaataggtttcaaagagcaa

SEQ ID NO: 4926760 - DNA, 25 bp, Homo sapien
tgacaacagtcaattgggcttagct

SEQ ID NO: 4926761 - DNA, 25 bp, Homo sapien
gcgcttcacatacgttccgcaggaa

SEQ ID NO: 4926762 - DNA, 25 bp, Homo sapien
tgaaagccggcctatacctgggaag

SEQ ID NO: 4926763 - DNA, 25 bp, Homo sapien
gctctgggagggtgaccaaactaaa

SEQ ID NO: 4926764 - DNA, 25 bp, Homo sapien
gaggctcagtgttgttgtgcagtcc

SEQ ID NO: 4926765 - DNA, 25 bp, Homo sapien
agcttgaagccagggtgcccacact

SEQ ID NO: 4926766 - DNA, 25 bp, Homo sapien
gtgagcttgaagccagggtgcccac

SEQ ID NO: 4926767 - DNA, 25 bp, Homo sapien
ctggtttctcgtgagcttgaagcca

SEQ ID NO: 4926768 - DNA, 25 bp, Homo sapien
tggtttctcgtgagcttgaagccag

SEQ ID NO: 4926769 - DNA, 25 bp, Homo sapien
tgtctttatgaaactttgctttaac

SEQ ID NO: 4926770 - DNA, 25 bp, Homo sapien
tatgaaactttgctttaacccaaca

SEQ ID NO: 4926771 - DNA, 25 bp, Homo sapien
atgaaactttgctttaacccaacat

SEQ ID NO: 4926772 - DNA, 25 bp, Homo sapien
gaggagttaaatctcccaggtagaa

SEQ ID NO: 4926773 - DNA, 25 bp, Homo sapien
catgtagatcctctagccatggaga

SEQ ID NO: 4926774 - DNA, 25 bp, Homo sapien
ctaaatagttcatgtagatcctcta

SEQ ID NO: 4926775 - DNA, 25 bp, Homo sapien
tcttcttaggggatggctatgcaca

SEQ ID NO: 4926776 - DNA, 25 bp, Homo sapien
tatttcactgctctgtcagttgaga

SEQ ID NO: 4926777 - DNA, 25 bp, Homo sapien
ggaggaaacaacacctcaagcacat

SEQ ID NO: 4926778 - DNA, 25 bp, Homo sapien
gaaacaacacctcaagcacatctag

SEQ ID NO: 4926779 - DNA, 25 bp, Homo sapien
agatctggaggaaacaacacctcaa

SEQ ID NO: 4926780 - DNA, 25 bp, Homo sapien
aagtctcccacatttgggggaatca

SEQ ID NO: 4926781 - DNA, 25 bp, Homo sapien
cagggaaaagtgtaaatgcagtccc

SEQ ID NO: 4926782 - DNA, 25 bp, Homo sapien
aagtgtaaatgcagtcccccattac

SEQ ID NO: 4926783 - DNA, 25 bp, Homo sapien
caagtctcccacatttgggggaatc

SEQ ID NO: 4926784 - DNA, 25 bp, Homo sapien
cctgggatgtctaggctacagtggg

SEQ ID NO: 4926785 - DNA, 25 bp, Homo sapien
ctgggatgtctaggctacagtgggc

SEQ ID NO: 4926786 - DNA, 25 bp, Homo sapien
gcctgggatgtctaggctacagtgg

SEQ ID NO: 4926787 - DNA, 25 bp, Homo sapien
tgggatgtctaggctacagtgggcc

SEQ ID NO: 4926788 - DNA, 25 bp, Homo sapien
aggcattgttacatttacaggtaac

SEQ ID NO: 4926789 - DNA, 25 bp, Homo sapien
cgcaacaacatagagaaaggcattg

SEQ ID NO: 4926790 - DNA, 25 bp, Homo sapien
tcaatttcatgtcactttatgtgga

SEQ ID NO: 4926791 - DNA, 25 bp, Homo sapien
cactttatgtggacttcgcaacaac

SEQ ID NO: 4926792 - DNA, 25 bp, Homo sapien
ttcaatgtgtttctcaaaatctctg

SEQ ID NO: 4926793 - DNA, 25 bp, Homo sapien
agtgttaacagatccttcaatgtgt

SEQ ID NO: 4926794 - DNA, 25 bp, Homo sapien
acagatcagcactggcacaaccact

SEQ ID NO: 4926795 - DNA, 25 bp, Homo sapien
caaccactgcttttattgggtatat

SEQ ID NO: 4926796 - DNA, 25 bp, Homo sapien
tattactctgtcacatgtcttggga

SEQ ID NO: 4926797 - DNA, 25 bp, Homo sapien
taatttggcgaagaagttggctgct

SEQ ID NO: 4926798 - DNA, 25 bp, Homo sapien
ctctgtcacatgtcttgggagaggt

SEQ ID NO: 4926799 - DNA, 25 bp, Homo sapien
tgtattactctgtcacatgtcttgg

SEQ ID NO: 4926800 - DNA, 25 bp, Homo sapien
tagccaatgaggtttcaccgaggtg

SEQ ID NO: 4926801 - DNA, 25 bp, Homo sapien
tcttgtgcggaaaagaaggcaaacc

SEQ ID NO: 4926802 - DNA, 25 bp, Homo sapien
gccatgagctttgcgcagtggcagt

SEQ ID NO: 4926803 - DNA, 25 bp, Homo sapien
cagggaccgaacttggcttttgaag

SEQ ID NO: 4926804 - DNA, 25 bp, Homo sapien
tctctgtgaagctaagacggcccta

SEQ ID NO: 4926805 - DNA, 25 bp, Homo sapien
agagtacagtagagacccaggtcca

SEQ ID NO: 4926806 - DNA, 25 bp, Homo sapien
ggtaccacaatagctccttcatgca

SEQ ID NO: 4926807 - DNA, 25 bp, Homo sapien
gatgagatcccaaccactgtcagag

SEQ ID NO: 4926808 - DNA, 25 bp, Homo sapien
gaaagttcagggcacaagactctga

SEQ ID NO: 4926809 - DNA, 25 bp, Homo sapien
gacaaggatacacaactcacaaggt

SEQ ID NO: 4926810 - DNA, 25 bp, Homo sapien
gctaattgcttaagtgcccctagag

SEQ ID NO: 4926811 - DNA, 25 bp, Homo sapien
cctagagtccagatgaagaaagttc

SEQ ID NO: 4926812 - DNA, 25 bp, Homo sapien
gcttccaggagcctaacagaggtga

SEQ ID NO: 4926813 - DNA, 25 bp, Homo sapien
aattctgtgcacgtgctggagggcc

SEQ ID NO: 4926814 - DNA, 25 bp, Homo sapien
tgcgtatgcgcaacaggattcggaa

SEQ ID NO: 4926815 - DNA, 25 bp, Homo sapien
tacggccacctgaagacgagacttt

SEQ ID NO: 4926816 - DNA, 25 bp, Homo sapien
gagacttgtcacatggcacagagca

SEQ ID NO: 4926817 - DNA, 25 bp, Homo sapien
tctccagggacctcaaacagtgaag

SEQ ID NO: 4926818 - DNA, 25 bp, Homo sapien
gggtaaacccaggatataggatgcc

SEQ ID NO: 4926819 - DNA, 25 bp, Homo sapien
ctatatgctcagtaagtgttggcca

SEQ ID NO: 4926820 - DNA, 25 bp, Homo sapien
cactgtgccggtgaactgggtgctc

SEQ ID NO: 4926821 - DNA, 25 bp, Homo sapien
tgcctgggacaaaccagagggcttc

SEQ ID NO: 4926822 - DNA, 25 bp, Homo sapien
ggcatgaagcagataggtccctagc

SEQ ID NO: 4926823 - DNA, 25 bp, Homo sapien
gaggcgctcgacactcatctgaagc

SEQ ID NO: 4926824 - DNA, 25 bp, Homo sapien
aaaggccccgctggcagcaaataca

SEQ ID NO: 4926825 - DNA, 25 bp, Homo sapien
cccgggagattcacaaggaggtgcc

SEQ ID NO: 4926826 - DNA, 25 bp, Homo sapien
ggctgataagctccctggcagtttc

SEQ ID NO: 4926827 - DNA, 25 bp, Homo sapien
ttttgtgttctacaatgcccttggc

SEQ ID NO: 4926828 - DNA, 25 bp, Homo sapien
gcagattgctacatgaaatgaaggg

SEQ ID NO: 4926829 - DNA, 25 bp, Homo sapien
tcttcagccgtctcttaaggcccgg

SEQ ID NO: 4926830 - DNA, 25 bp, Homo sapien
cgaatgactgctcgggtcttcagcc

SEQ ID NO: 4926831 - DNA, 25 bp, Homo sapien
ttcaaaatgattccgcctccaaggc

SEQ ID NO: 4926832 - DNA, 25 bp, Homo sapien
caggatccagagctgtaggcacagc

SEQ ID NO: 4926833 - DNA, 25 bp, Homo sapien
agcagtgtgggctgcgaccgtttct

SEQ ID NO: 4926834 - DNA, 25 bp, Homo sapien
tcaggatccagagctgtaggcacag

SEQ ID NO: 4926835 - DNA, 25 bp, Homo sapien
gggctgcgaccgtttctacacccat

SEQ ID NO: 4926836 - DNA, 25 bp, Homo sapien
ccaggtcttcaatggaacataaaaa

SEQ ID NO: 4926837 - DNA, 25 bp, Homo sapien
gaacataaaaagtttaggagagaga

SEQ ID NO: 4926838 - DNA, 25 bp, Homo sapien
agacataggtcagctgtggcaaagc

SEQ ID NO: 4926839 - DNA, 25 bp, Homo sapien
gaggagtcaaggagtagagttggtc

SEQ ID NO: 4926840 - DNA, 25 bp, Homo sapien
gaaggtccatttcaaggctctcccg

SEQ ID NO: 4926841 - DNA, 25 bp, Homo sapien
ttaatcagcgaagtcagatctgccc

SEQ ID NO: 4926842 - DNA, 25 bp, Homo sapien
gggaggatcggctcatacatccact

SEQ ID NO: 4926843 - DNA, 25 bp, Homo sapien
gatctgcccaacttaactgacaatg

SEQ ID NO: 4926844 - DNA, 25 bp, Homo sapien
tgtgttgcatccaccctgataatgc

SEQ ID NO: 4926845 - DNA, 25 bp, Homo sapien
tggaggggcccacggaagctcccca

SEQ ID NO: 4926846 - DNA, 25 bp, Homo sapien
agtggaaggataggccccctgacct

SEQ ID NO: 4926847 - DNA, 25 bp, Homo sapien
gaagagcaaggagtggacctggagg

SEQ ID NO: 4926848 - DNA, 25 bp, Homo sapien
cctttgtttcatgcaccacccattt

SEQ ID NO: 4926849 - DNA, 25 bp, Homo sapien
aatgaccctttgtttcatgcaccac

SEQ ID NO: 4926850 - DNA, 25 bp, Homo sapien
aataggataatgaccctttgtttca

SEQ ID NO: 4926851 - DNA, 25 bp, Homo sapien
gataatgaccctttgtttcatgcac

SEQ ID NO: 4926852 - DNA, 25 bp, Homo sapien
gggagatttaatgccgagatccgaa

SEQ ID NO: 4926853 - DNA, 25 bp, Homo sapien
tgttctgcaaatggcaaggccccgc

SEQ ID NO: 4926854 - DNA, 25 bp, Homo sapien
gaacctcgttctacaaggatgacga

SEQ ID NO: 4926855 - DNA, 25 bp, Homo sapien
tcgcagctgtcaggataagccaagg

SEQ ID NO: 4926856 - DNA, 25 bp, Homo sapien
tgtctggcacacacataaatctcaa

SEQ ID NO: 4926857 - DNA, 25 bp, Homo sapien
catccactctcttagccttgttcat

SEQ ID NO: 4926858 - DNA, 25 bp, Homo sapien
gccttgttcatgaatacaacacatt

SEQ ID NO: 4926859 - DNA, 25 bp, Homo sapien
cagtggatacattatggaattacta

SEQ ID NO: 4926860 - DNA, 25 bp, Homo sapien
cctgatacagcagcgagggtcaggc

SEQ ID NO: 4926861 - DNA, 25 bp, Homo sapien
tgtgcccatgcctgatacagcagcg

SEQ ID NO: 4926862 - DNA, 25 bp, Homo sapien
ccctgagtgcagcagtgtgcgctgt

SEQ ID NO: 4926863 - DNA, 25 bp, Homo sapien
agtgtgcgctgtgcccatgcctgat

SEQ ID NO: 4926864 - DNA, 25 bp, Homo sapien
aagagtgttgagtaagcaaaagaac

SEQ ID NO: 4926865 - DNA, 25 bp, Homo sapien
aaattgagatctatagcagaatccc

SEQ ID NO: 4926866 - DNA, 25 bp, Homo sapien
agtgttgagtaagcaaaagaaccaa

SEQ ID NO: 4926867 - DNA, 25 bp, Homo sapien
aaaagagtgttgagtaagcaaaaga

SEQ ID NO: 4926868 - DNA, 25 bp, Homo sapien
aaacagggcaggatctatggcatgg

SEQ ID NO: 4926869 - DNA, 25 bp, Homo sapien
ctcatgtccactagcagcaacagga

SEQ ID NO: 4926870 - DNA, 25 bp, Homo sapien
catgtccactagcagcaacaggaga

SEQ ID NO: 4926871 - DNA, 25 bp, Homo sapien
cagggcaggatctatggcatgggca

SEQ ID NO: 4926872 - DNA, 25 bp, Homo sapien
tatgggtacaggtgtgaagagctta

SEQ ID NO: 4926873 - DNA, 25 bp, Homo sapien
catatcagagaaactctcccacagt

SEQ ID NO: 4926874 - DNA, 25 bp, Homo sapien
gaaactctcccacagtccatatggg

SEQ ID NO: 4926875 - DNA, 25 bp, Homo sapien
agagcttatcacagaactaggctgt

SEQ ID NO: 4926876 - DNA, 25 bp, Homo sapien
gcatccacgtggctgacaagaaggg

SEQ ID NO: 4926877 - DNA, 25 bp, Homo sapien
tctctgacaggtattcatctgcacc

SEQ ID NO: 4926878 - DNA, 25 bp, Homo sapien
cattctgctttgacatcatggtgca

SEQ ID NO: 4926879 - DNA, 25 bp, Homo sapien
ggaactttggtgctctgcccttcga

SEQ ID NO: 4926880 - DNA, 25 bp, Homo sapien
gccacctggcaaagataagtgctca

SEQ ID NO: 4926881 - DNA, 25 bp, Homo sapien
taatatatcaatgctctcagagggc

SEQ ID NO: 4926882 - DNA, 25 bp, Homo sapien
ggccacatggctgataattgtcaga

SEQ ID NO: 4926883 - DNA, 25 bp, Homo sapien
gctgccaagagatatctatgagatc

SEQ ID NO: 4926884 - DNA, 25 bp, Homo sapien
ttttagcatctctgactagcagttt

SEQ ID NO: 4926885 - DNA, 25 bp, Homo sapien
tttcatctttgctacttatcagctg

SEQ ID NO: 4926886 - DNA, 25 bp, Homo sapien
atttttagcatctctgactagcagt

SEQ ID NO: 4926887 - DNA, 25 bp, Homo sapien
gctacttatcagctgtgcctagtta

SEQ ID NO: 4926888 - DNA, 25 bp, Homo sapien
tctgttgggttcatgactagcacaa

SEQ ID NO: 4926889 - DNA, 25 bp, Homo sapien
tgcccggtcgggatatgcttttcta

SEQ ID NO: 4926890 - DNA, 25 bp, Homo sapien
aaaatggcacttgctttctgttggg

SEQ ID NO: 4926891 - DNA, 25 bp, Homo sapien
gcagccaagttaagatctcagagat

SEQ ID NO: 4926892 - DNA, 25 bp, Homo sapien
cagagagctgagcaacagtcatatc

SEQ ID NO: 4926893 - DNA, 25 bp, Homo sapien
tacaggacatactaggaagaaaact

SEQ ID NO: 4926894 - DNA, 25 bp, Homo sapien
taatgattccactgatgagatcctc

SEQ ID NO: 4926895 - DNA, 25 bp, Homo sapien
tcagcaacctgtagttcatcacaaa

SEQ ID NO: 4926896 - DNA, 25 bp, Homo sapien
aattctggtagaggatttggagcaa

SEQ ID NO: 4926897 - DNA, 25 bp, Homo sapien
agacaaggcattgactgggagaaaa

SEQ ID NO: 4926898 - DNA, 25 bp, Homo sapien
ttgcacaagacatgtcacttaaagg

SEQ ID NO: 4926899 - DNA, 25 bp, Homo sapien
tgagcaggcatctcatcgaagaagg

SEQ ID NO: 4926900 - DNA, 25 bp, Homo sapien
gcttagaggcttaggaaccttcagg

SEQ ID NO: 4926901 - DNA, 25 bp, Homo sapien
caataattgcgctccttggtgtcta

SEQ ID NO: 4926902 - DNA, 25 bp, Homo sapien
cctatgtacgaatgtctgtagcacc

SEQ ID NO: 4926903 - DNA, 25 bp, Homo sapien
tatactcacggtgccatggaagcca

SEQ ID NO: 4926904 - DNA, 25 bp, Homo sapien
cttttctatctttgctgctccacca

SEQ ID NO: 4926905 - DNA, 25 bp, Homo sapien
taattaccagatggctgctgcacat

SEQ ID NO: 4926906 - DNA, 25 bp, Homo sapien
tgctgcacatccaggtatcatgtcc

SEQ ID NO: 4926907 - DNA, 25 bp, Homo sapien
agtctattgacttgtcacctcataa

SEQ ID NO: 4926908 - DNA, 25 bp, Homo sapien
caggacatgttgtacataacaagaa

SEQ ID NO: 4926909 - DNA, 25 bp, Homo sapien
caatccaagttagagtgacttaaac

SEQ ID NO: 4926910 - DNA, 25 bp, Homo sapien
tagtcaactgtcttaggctgatgga

SEQ ID NO: 4926911 - DNA, 25 bp, Homo sapien
ttcaacaatgctataaaaaatccag

SEQ ID NO: 4926912 - DNA, 25 bp, Homo sapien
gccaattacaatgcgccaagcgatg

SEQ ID NO: 4926913 - DNA, 25 bp, Homo sapien
tgagagacccaggttacaccagttc

SEQ ID NO: 4926914 - DNA, 25 bp, Homo sapien
ccaaattagagtgggaccccgacag

SEQ ID NO: 4926915 - DNA, 25 bp, Homo sapien
gaaaatcgtatgtgcaaaagccctg

SEQ ID NO: 4926916 - DNA, 25 bp, Homo sapien
gttttcaacttgcggctgaccgcaa

SEQ ID NO: 4926917 - DNA, 25 bp, Homo sapien
agaagccagctctgaccatgccgaa

SEQ ID NO: 4926918 - DNA, 25 bp, Homo sapien
gaatgcgtacctcaagctggttcct

SEQ ID NO: 4926919 - DNA, 25 bp, Homo sapien
cttagaaagggcatcgagaatgcgt

SEQ ID NO: 4926920 - DNA, 25 bp, Homo sapien
tggcccactcgcattgctcagctgg

SEQ ID NO: 4926921 - DNA, 25 bp, Homo sapien
tctagataccaaggcctcgagaggc

SEQ ID NO: 4926922 - DNA, 25 bp, Homo sapien
taaaatggtagcaggacagtggccc

SEQ ID NO: 4926923 - DNA, 25 bp, Homo sapien
cccttcaaatgaggacgtcagagca

SEQ ID NO: 4926924 - DNA, 25 bp, Homo sapien
gtgaatctgggagcccgttattctg

SEQ ID NO: 4926925 - DNA, 25 bp, Homo sapien
ctccaagcgttcctggggtgatcct

SEQ ID NO: 4926926 - DNA, 25 bp, Homo sapien
gcctccaagcgttcctggggtgatc

SEQ ID NO: 4926927 - DNA, 25 bp, Homo sapien
cagcctccaagcgttcctggggtga

SEQ ID NO: 4926928 - DNA, 25 bp, Homo sapien
cacctgcctcagtgttgataagaga

SEQ ID NO: 4926929 - DNA, 25 bp, Homo sapien
taaggacccctgatctagactaaag

SEQ ID NO: 4926930 - DNA, 25 bp, Homo sapien
tcgcagtttaagaagcacctgaggc

SEQ ID NO: 4926931 - DNA, 25 bp, Homo sapien
tgaagctcatccctacgctgaaggc

SEQ ID NO: 4926932 - DNA, 25 bp, Homo sapien
caagcagagttccaggtgccgggta

SEQ ID NO: 4926933 - DNA, 25 bp, Homo sapien
gagcctcgtctaagtccctgcagga

SEQ ID NO: 4926934 - DNA, 25 bp, Homo sapien
catggagatgtgtccagcctcagag

SEQ ID NO: 4926935 - DNA, 25 bp, Homo sapien
gctggggtgcaaaatgcctgtccac

SEQ ID NO: 4926936 - DNA, 25 bp, Homo sapien
tgtgtgatcacgtgacccgcatgtc

SEQ ID NO: 4926937 - DNA, 25 bp, Homo sapien
aattccagccccaaggacatggtgg

SEQ ID NO: 4926938 - DNA, 25 bp, Homo sapien
tctaatataagacacgctgccaggt

SEQ ID NO: 4926939 - DNA, 25 bp, Homo sapien
gaaatgcaacttgtcggctgggccc

SEQ ID NO: 4926940 - DNA, 25 bp, Homo sapien
tgctgccgttttcccacagtgatgc

SEQ ID NO: 4926941 - DNA, 25 bp, Homo sapien
agctgcaaggtcagtagtgattccc

SEQ ID NO: 4926942 - DNA, 25 bp, Homo sapien
atataagtctataataagctgcaag

SEQ ID NO: 4926943 - DNA, 25 bp, Homo sapien
agcacgcaggcgagaggacatttcc

SEQ ID NO: 4926944 - DNA, 25 bp, Homo sapien
tgcagtgctacatccaagaaccaag

SEQ ID NO: 4926945 - DNA, 25 bp, Homo sapien
taaccttcggaataatgtctgcagc

SEQ ID NO: 4926946 - DNA, 25 bp, Homo sapien
ggaacctgagggcttaagacactta

SEQ ID NO: 4926947 - DNA, 25 bp, Homo sapien
gcagactcagcatttaaacccaggt

SEQ ID NO: 4926948 - DNA, 25 bp, Homo sapien
aaatcgtaatgggttgaagctgtcc

SEQ ID NO: 4926949 - DNA, 25 bp, Homo sapien
gccacgccacgtgggcgatgaagtt

SEQ ID NO: 4926950 - DNA, 25 bp, Homo sapien
caaagctcataggttagggattttt

SEQ ID NO: 4926951 - DNA, 25 bp, Homo sapien
agttcgtactcatcttattcaaagc

SEQ ID NO: 4926952 - DNA, 25 bp, Homo sapien
tagaaaaagaatttaatagacacga

SEQ ID NO: 4926953 - DNA, 25 bp, Homo sapien
tgccaggtgcctgaaaggtaaacag

SEQ ID NO: 4926954 - DNA, 25 bp, Homo sapien
acttaactctcataacaggcgtggg

SEQ ID NO: 4926955 - DNA, 25 bp, Homo sapien
ggagcatcaggcaactagtccaggc

SEQ ID NO: 4926956 - DNA, 25 bp, Homo sapien
tactgtttctgcctgacaagagagc

SEQ ID NO: 4926957 - DNA, 25 bp, Homo sapien
cccaacctcagcaatattggcattg

SEQ ID NO: 4926958 - DNA, 25 bp, Homo sapien
ttggtgaaaaccagtcacaaggccg

SEQ ID NO: 4926959 - DNA, 25 bp, Homo sapien
tatagtcactgaccaagcagccact

SEQ ID NO: 4926960 - DNA, 25 bp, Homo sapien
aaggccgcagctagatgcaagggaa

SEQ ID NO: 4926961 - DNA, 25 bp, Homo sapien
tctgcctggccagctgccctgtccg

SEQ ID NO: 4926962 - DNA, 25 bp, Homo sapien
tggccagctgccctgtccgggaggg

SEQ ID NO: 4926963 - DNA, 25 bp, Homo sapien
cccctctgcctggccagctgccctg

SEQ ID NO: 4926964 - DNA, 25 bp, Homo sapien
tgcctggccagctgccctgtccggg

SEQ ID NO: 4926965 - DNA, 25 bp, Homo sapien
tgcatgcccatatgttacttattag

SEQ ID NO: 4926966 - DNA, 25 bp, Homo sapien
tagtgtgtcccatctcaggcagaat

SEQ ID NO: 4926967 - DNA, 25 bp, Homo sapien
aggagttgtcccctgtgatgttggc

SEQ ID NO: 4926968 - DNA, 25 bp, Homo sapien
aactggtatatgaagagagtagccc

SEQ ID NO: 4926969 - DNA, 25 bp, Homo sapien
gacaattggccacggttctacctct

SEQ ID NO: 4926970 - DNA, 25 bp, Homo sapien
tcccgcctcttagcctccctgagag

SEQ ID NO: 4926971 - DNA, 25 bp, Homo sapien
tttctggagaacggggtctcgctat

SEQ ID NO: 4926972 - DNA, 25 bp, Homo sapien
caagctatcctcccgcctcttagcc

SEQ ID NO: 4926973 - DNA, 25 bp, Homo sapien
ttttctggagaacggggtctcgcta

SEQ ID NO: 4926974 - DNA, 25 bp, Homo sapien
atctctgggtcctactccgagtgtc

SEQ ID NO: 4926975 - DNA, 25 bp, Homo sapien
tatgtgaacaccatctctgggtcct

SEQ ID NO: 4926976 - DNA, 25 bp, Homo sapien
catttatcaggtcactcagtaggga

SEQ ID NO: 4926977 - DNA, 25 bp, Homo sapien
gaacataggatgagtttgggccagc

SEQ ID NO: 4926978 - DNA, 25 bp, Homo sapien
ttcacccttggttgtctttggagag

SEQ ID NO: 4926979 - DNA, 25 bp, Homo sapien
cctttgtcatggagccccttggtac

SEQ ID NO: 4926980 - DNA, 25 bp, Homo sapien
cactcctgaggttaatatccctgcg

SEQ ID NO: 4926981 - DNA, 25 bp, Homo sapien
cagaaacaccgagttccactgagaa

SEQ ID NO: 4926982 - DNA, 25 bp, Homo sapien
ttatcatccgagaaatgtgcttgag

SEQ ID NO: 4926983 - DNA, 25 bp, Homo sapien
ttttaagccccaacggctggttgca

SEQ ID NO: 4926984 - DNA, 25 bp, Homo sapien
taaaagctttatgagacacagtgga

SEQ ID NO: 4926985 - DNA, 25 bp, Homo sapien
tcatgacacaggatctgctgaagag

SEQ ID NO: 4926986 - DNA, 25 bp, Homo sapien
gaagagatgactgaggcttcataaa

SEQ ID NO: 4926987 - DNA, 25 bp, Homo sapien
cacctttgtaaagtccagctgctgc

SEQ ID NO: 4926988 - DNA, 25 bp, Homo sapien
tgcacaggtgtagcactcttctgtt

SEQ ID NO: 4926989 - DNA, 25 bp, Homo sapien
tctcaggaaatacatgatgggactg

SEQ ID NO: 4926990 - DNA, 25 bp, Homo sapien
gggactgtattatactgaggaccca

SEQ ID NO: 4926991 - DNA, 25 bp, Homo sapien
tctgttgggtcaataaagacgctcc

SEQ ID NO: 4926992 - DNA, 25 bp, Homo sapien
atgtaaatgcatacgtgctggccat

SEQ ID NO: 4926993 - DNA, 25 bp, Homo sapien
aatgtaaatgcatacgtgctggcca

SEQ ID NO: 4926994 - DNA, 25 bp, Homo sapien
tctctgtcagggaatggtcgtcctc

SEQ ID NO: 4926995 - DNA, 25 bp, Homo sapien
gattagccgaatcaatgctggcgat

SEQ ID NO: 4926996 - DNA, 25 bp, Homo sapien
tctagcaggagagctcagctaatca

SEQ ID NO: 4926997 - DNA, 25 bp, Homo sapien
gcaaggaagggacaccagcttagcc

SEQ ID NO: 4926998 - DNA, 25 bp, Homo sapien
gattgaaggacatccagaacactgt

SEQ ID NO: 4926999 - DNA, 25 bp, Homo sapien
tgttcgaagcgttccaagcacgacc

SEQ ID NO: 4927000 - DNA, 25 bp, Homo sapien
aaaatgtcattaggtttcacagggc

SEQ ID NO: 4927001 - DNA, 25 bp, Homo sapien
gaacactgtggcttgtaagcgtccg

SEQ ID NO: 4927002 - DNA, 25 bp, Homo sapien
gggacagactgagaaatagaggtga

SEQ ID NO: 4927003 - DNA, 25 bp, Homo sapien
gacaagaatgcccaattgcctctcc

SEQ ID NO: 4927004 - DNA, 25 bp, Homo sapien
tgaccagttgctagatgaagacctg

SEQ ID NO: 4927005 - DNA, 25 bp, Homo sapien
aattgcctctcccacatagggacag

SEQ ID NO: 4927006 - DNA, 25 bp, Homo sapien
cattaggctgtactgttggtcttca

SEQ ID NO: 4927007 - DNA, 25 bp, Homo sapien
tgaggttcagctttggaaggcccca

SEQ ID NO: 4927008 - DNA, 25 bp, Homo sapien
taagagtatgccacattctggagcc

SEQ ID NO: 4927009 - DNA, 25 bp, Homo sapien
caacgtaggtctttctcaatccaga

SEQ ID NO: 4927010 - DNA, 25 bp, Homo sapien
attctgtgttcaaaatggataactg

SEQ ID NO: 4927011 - DNA, 25 bp, Homo sapien
cattctgtgttcaaaatggataact

SEQ ID NO: 4927012 - DNA, 25 bp, Homo sapien
tatgaacgcataggaataacttttg

SEQ ID NO: 4927013 - DNA, 25 bp, Homo sapien
tgcaatgaacctcacccacgtaaga

SEQ ID NO: 4927014 - DNA, 25 bp, Homo sapien
catatgcttgtttcatgtcctgtca

SEQ ID NO: 4927015 - DNA, 25 bp, Homo sapien
gagttgagcaaatctattagcacca

SEQ ID NO: 4927016 - DNA, 25 bp, Homo sapien
tcaggtatcaccaatggttggaagc

SEQ ID NO: 4927017 - DNA, 25 bp, Homo sapien
gaattatctctgtagtgtgtgctcc

SEQ ID NO: 4927018 - DNA, 25 bp, Homo sapien
caaaacacttgtgcatgtaattatc

SEQ ID NO: 4927019 - DNA, 25 bp, Homo sapien
ggttggaagcatcctctgatcttca

SEQ ID NO: 4927020 - DNA, 25 bp, Homo sapien
agctaatgctaggtttgcagatacc

SEQ ID NO: 4927021 - DNA, 25 bp, Homo sapien
ataccatcgcagagctcaggccaaa

SEQ ID NO: 4927022 - DNA, 25 bp, Homo sapien
ccacacgaaaatgctgcaaagctaa

SEQ ID NO: 4927023 - DNA, 25 bp, Homo sapien
tggatactttagaggctcttctccc

SEQ ID NO: 4927024 - DNA, 25 bp, Homo sapien
ggcatgttaaagtgcaaattaagca

SEQ ID NO: 4927025 - DNA, 25 bp, Homo sapien
tagttagaagaacctccataagccc

SEQ ID NO: 4927026 - DNA, 25 bp, Homo sapien
aaagggatgccagcaagaatgacac

SEQ ID NO: 4927027 - DNA, 25 bp, Homo sapien
cagccacatgacacatagctatgat

SEQ ID NO: 4927028 - DNA, 25 bp, Homo sapien
caggtcagttacatctacagccaca

SEQ ID NO: 4927029 - DNA, 25 bp, Homo sapien
accatgcatgcatctcacagagaac

SEQ ID NO: 4927030 - DNA, 25 bp, Homo sapien
gcatgcatctcacagagaacataag

SEQ ID NO: 4927031 - DNA, 25 bp, Homo sapien
cagagaacataagttcccacccttc

SEQ ID NO: 4927032 - DNA, 25 bp, Homo sapien
catctcacagagaacataagttccc

SEQ ID NO: 4927033 - DNA, 25 bp, Homo sapien
ctacagaccagatcagtcaataggg

SEQ ID NO: 4927034 - DNA, 25 bp, Homo sapien
gtcaatagggatggactgtcagaga

SEQ ID NO: 4927035 - DNA, 25 bp, Homo sapien
caagttgattaaccaccgtgagcct

SEQ ID NO: 4927036 - DNA, 25 bp, Homo sapien
tgagccttagatccctcttctgtaa

SEQ ID NO: 4927037 - DNA, 25 bp, Homo sapien
atttcccttgttgaccactggccac

SEQ ID NO: 4927038 - DNA, 25 bp, Homo sapien
tgtaggtgccctagagtatggaaac

SEQ ID NO: 4927039 - DNA, 25 bp, Homo sapien
caaagttcccgtggagccaaatgac

SEQ ID NO: 4927040 - DNA, 25 bp, Homo sapien
actagacaaagttcccgtggagcca

SEQ ID NO: 4927041 - DNA, 25 bp, Homo sapien
ttcgatctccgaaatctctgcaggg

SEQ ID NO: 4927042 - DNA, 25 bp, Homo sapien
cactaagtgggcaggtaatgcgaca

SEQ ID NO: 4927043 - DNA, 25 bp, Homo sapien
caaatgtaactggatttctgagctt

SEQ ID NO: 4927044 - DNA, 25 bp, Homo sapien
gaacagactacaccaaagccactaa

SEQ ID NO: 4927045 - DNA, 25 bp, Homo sapien
ctggtttagtcttagtaaagtgtat

SEQ ID NO: 4927046 - DNA, 25 bp, Homo sapien
gtcttagtaaagtgtatgtgtcgag

SEQ ID NO: 4927047 - DNA, 25 bp, Homo sapien
tagtcttagtaaagtgtatgtgtcg

SEQ ID NO: 4927048 - DNA, 25 bp, Homo sapien
gtttagtcttagtaaagtgtatgtg

SEQ ID NO: 4927049 - DNA, 25 bp, Homo sapien
tgccacaaatatacactccactcat

SEQ ID NO: 4927050 - DNA, 25 bp, Homo sapien
tctctcccctgtcccattacctgac

SEQ ID NO: 4927051 - DNA, 25 bp, Homo sapien
tcccctgtcccattacctgacctca

SEQ ID NO: 4927052 - DNA, 25 bp, Homo sapien
aaatatacactccactcatctttct

SEQ ID NO: 4927053 - DNA, 25 bp, Homo sapien
gtggccgctaccctcaaggaggatg

SEQ ID NO: 4927054 - DNA, 25 bp, Homo sapien
gctaccctcaaggaggatgtttcca

SEQ ID NO: 4927055 - DNA, 25 bp, Homo sapien
caaggaggatgtttccagccgtctc

SEQ ID NO: 4927056 - DNA, 25 bp, Homo sapien
atgtatacagggtggccgctaccct

SEQ ID NO: 4927057 - DNA, 25 bp, Homo sapien
gtggttgggtttcccatgatgtgtc

SEQ ID NO: 4927058 - DNA, 25 bp, Homo sapien
ttgggtttcccatgatgtgtcaggc

SEQ ID NO: 4927059 - DNA, 25 bp, Homo sapien
ggttgggtttcccatgatgtgtcag

SEQ ID NO: 4927060 - DNA, 25 bp, Homo sapien
aggggtggttgggtttcccatgatg

SEQ ID NO: 4927061 - DNA, 25 bp, Homo sapien
ggaaagactgcttgacacccagtat

SEQ ID NO: 4927062 - DNA, 25 bp, Homo sapien
taaaagtgctcatctacattctctc

SEQ ID NO: 4927063 - DNA, 25 bp, Homo sapien
ggacggacacactcacatcgctgag

SEQ ID NO: 4927064 - DNA, 25 bp, Homo sapien
attcatcacccaggacggacacact

SEQ ID NO: 4927065 - DNA, 25 bp, Homo sapien
cactcacatcgctgagagacagaga

SEQ ID NO: 4927066 - DNA, 25 bp, Homo sapien
tagccccattcatcacccaggacgg

SEQ ID NO: 4927067 - DNA, 25 bp, Homo sapien
aagcaagtcctcagtgacctacaaa

SEQ ID NO: 4927068 - DNA, 25 bp, Homo sapien
cataaagcaagtcctcagtgaccta

SEQ ID NO: 4927069 - DNA, 25 bp, Homo sapien
agtcctcagtgacctacaaagagac

SEQ ID NO: 4927070 - DNA, 25 bp, Homo sapien
aagtcctcagtgacctacaaagaga

SEQ ID NO: 4927071 - DNA, 25 bp, Homo sapien
tcttccagataatgacaagagtaaa

SEQ ID NO: 4927072 - DNA, 25 bp, Homo sapien
caattaccttatgctcaatggtttc

SEQ ID NO: 4927073 - DNA, 25 bp, Homo sapien
gtcactctgtatagagatgagcttt

SEQ ID NO: 4927074 - DNA, 25 bp, Homo sapien
tcagggattgtagccaaggtcactc

SEQ ID NO: 4927075 - DNA, 25 bp, Homo sapien
tcaaatctattccaaggcgtaatat

SEQ ID NO: 4927076 - DNA, 25 bp, Homo sapien
ctattccaaggcgtaatattccttc

SEQ ID NO: 4927077 - DNA, 25 bp, Homo sapien
ttccaaggcgtaatattccttcttc

SEQ ID NO: 4927078 - DNA, 25 bp, Homo sapien
aatctattccaaggcgtaatattcc

SEQ ID NO: 4927079 - DNA, 25 bp, Homo sapien
ggttctgacctttaccactgaggtc

SEQ ID NO: 4927080 - DNA, 25 bp, Homo sapien
gcaccactaccacaatggtcctttg

SEQ ID NO: 4927081 - DNA, 25 bp, Homo sapien
ttctggctcaaccaggttctgacct

SEQ ID NO: 4927082 - DNA, 25 bp, Homo sapien
gatgtttgttcaacccagtattctg

SEQ ID NO: 4927083 - DNA, 25 bp, Homo sapien
aagaatacttcctcaagatcattta

SEQ ID NO: 4927084 - DNA, 25 bp, Homo sapien
gaatacttcctcaagatcatttaat

SEQ ID NO: 4927085 - DNA, 25 bp, Homo sapien
aatacttcctcaagatcatttaata

SEQ ID NO: 4927086 - DNA, 25 bp, Homo sapien
aaaagaatacttcctcaagatcatt

SEQ ID NO: 4927087 - DNA, 25 bp, Homo sapien
ttatctatgagaaggcagatagttt

SEQ ID NO: 4927088 - DNA, 25 bp, Homo sapien
agaaggcagatagttttctgaagga

SEQ ID NO: 4927089 - DNA, 25 bp, Homo sapien
gaaggaggaagctggatcctcaaaa

SEQ ID NO: 4927090 - DNA, 25 bp, Homo sapien
aaggaggaagctggatcctcaaaaa

SEQ ID NO: 4927091 - DNA, 25 bp, Homo sapien
cagtcatcagtcaaaggccactggg

SEQ ID NO: 4927092 - DNA, 25 bp, Homo sapien
aacttcaaaggactgtctgcaagta

SEQ ID NO: 4927093 - DNA, 25 bp, Homo sapien
ccttggctggcatttaccaacctca

SEQ ID NO: 4927094 - DNA, 25 bp, Homo sapien
ggctggcatttaccaacctcacttc

SEQ ID NO: 4927095 - DNA, 25 bp, Homo sapien
gctatattgcctttcagccataccc

SEQ ID NO: 4927096 - DNA, 25 bp, Homo sapien
gtaggctatattgcctttcagccat

SEQ ID NO: 4927097 - DNA, 25 bp, Homo sapien
ttcataatataaacagctccttgtg

SEQ ID NO: 4927098 - DNA, 25 bp, Homo sapien
catgcttataactatgctcacatta

SEQ ID NO: 4927099 - DNA, 25 bp, Homo sapien
tgctgggaattatgttgcatcatgc

SEQ ID NO: 4927100 - DNA, 25 bp, Homo sapien
aacagctccttgtgtatcaaggaca

SEQ ID NO: 4927101 - DNA, 25 bp, Homo sapien
tttctgagggtcgttctggattggt

SEQ ID NO: 4927102 - DNA, 25 bp, Homo sapien
tcagtgaatgggaagggaataagat

SEQ ID NO: 4927103 - DNA, 25 bp, Homo sapien
tgagttgaaggaattccatcacccc

SEQ ID NO: 4927104 - DNA, 25 bp, Homo sapien
gacttctgttccaattctacattgg

SEQ ID NO: 4927105 - DNA, 25 bp, Homo sapien
taataagaacataactcaggagttt

SEQ ID NO: 4927106 - DNA, 25 bp, Homo sapien
gaatatggctgacacgcatagacac

SEQ ID NO: 4927107 - DNA, 25 bp, Homo sapien
aaatgtctatttacttcaggccacc

SEQ ID NO: 4927108 - DNA, 25 bp, Homo sapien
gcagacaaggcttatatttaaggtc

SEQ ID NO: 4927109 - DNA, 25 bp, Homo sapien
ggctgatgactgataaaacttgtgg

SEQ ID NO: 4927110 - DNA, 25 bp, Homo sapien
gatgaagcagttcagtcccatcttc

SEQ ID NO: 4927111 - DNA, 25 bp, Homo sapien
tcaaatcttgccactgctcaactgg

SEQ ID NO: 4927112 - DNA, 25 bp, Homo sapien
cactatatgataatacagggagcac

SEQ ID NO: 4927113 - DNA, 25 bp, Homo sapien
tagagtattccaaaatgacaaatcc

SEQ ID NO: 4927114 - DNA, 25 bp, Homo sapien
ggttctccttttagaaaatgacatg

SEQ ID NO: 4927115 - DNA, 25 bp, Homo sapien
atgacatgtagagtattccaaaatg

SEQ ID NO: 4927116 - DNA, 25 bp, Homo sapien
tagaaaatgacatgtagagtattcc

SEQ ID NO: 4927117 - DNA, 25 bp, Homo sapien
gccacatgtgctgacttttgcctaa

SEQ ID NO: 4927118 - DNA, 25 bp, Homo sapien
tcttctttgggtcctcgtcacggcc

SEQ ID NO: 4927119 - DNA, 25 bp, Homo sapien
gacttttgcctaatctagcggtctt

SEQ ID NO: 4927120 - DNA, 25 bp, Homo sapien
cctaatctagcggtcttctttgggt

SEQ ID NO: 4927121 - DNA, 25 bp, Homo sapien
cttttgcaaatggccttcaaattct

SEQ ID NO: 4927122 - DNA, 25 bp, Homo sapien
ttttgcaaatggccttcaaattctg

SEQ ID NO: 4927123 - DNA, 25 bp, Homo sapien
tcttttgcaaatggccttcaaattc

SEQ ID NO: 4927124 - DNA, 25 bp, Homo sapien
gacatcgagtgggtatgatggtcca

SEQ ID NO: 4927125 - DNA, 25 bp, Homo sapien
tgattgggaggtggacatcgagtgg

SEQ ID NO: 4927126 - DNA, 25 bp, Homo sapien
catcgagtgggtatgatggtccaaa

SEQ ID NO: 4927127 - DNA, 25 bp, Homo sapien
cgagtgggtatgatggtccaaagat

SEQ ID NO: 4927128 - DNA, 25 bp, Homo sapien
tgccaaggtgacagcctcagggtgc

SEQ ID NO: 4927129 - DNA, 25 bp, Homo sapien
aggcctctgccaaggtgacagcctc

SEQ ID NO: 4927130 - DNA, 25 bp, Homo sapien
cttgtaaaaggtccatatctgcagg

SEQ ID NO: 4927131 - DNA, 25 bp, Homo sapien
aaaaggtccatatctgcaggcctct

SEQ ID NO: 4927132 - DNA, 25 bp, Homo sapien
tggatctttcgatcaaagaaggaat

SEQ ID NO: 4927133 - DNA, 25 bp, Homo sapien
taaatatgtctatggacaaattcca

SEQ ID NO: 4927134 - DNA, 25 bp, Homo sapien
tgtctatggacaaattccatccact

SEQ ID NO: 4927135 - DNA, 25 bp, Homo sapien
ttagagtttcaaattggatctttcg

SEQ ID NO: 4927136 - DNA, 25 bp, Homo sapien
actgacagtccttttacacataatg

SEQ ID NO: 4927137 - DNA, 25 bp, Homo sapien
ggatttactgacagtccttttacac

SEQ ID NO: 4927138 - DNA, 25 bp, Homo sapien
cagtccttttacacataatgtcatt

SEQ ID NO: 4927139 - DNA, 25 bp, Homo sapien
tttttggaaggatttactgacagtc

SEQ ID NO: 4927140 - DNA, 25 bp, Homo sapien
ttactttagttatacattctcctaa

SEQ ID NO: 4927141 - DNA, 25 bp, Homo sapien
ctttagttatacattctcctaaatt

SEQ ID NO: 4927142 - DNA, 25 bp, Homo sapien
ttggttactttagttatacattctc

SEQ ID NO: 4927143 - DNA, 25 bp, Homo sapien
tggttactttagttatacattctcc

SEQ ID NO: 4927144 - DNA, 25 bp, Homo sapien
ttttgcaatgtcatacacagcagag

SEQ ID NO: 4927145 - DNA, 25 bp, Homo sapien
tgcattttgcaatgtcatacacagc

SEQ ID NO: 4927146 - DNA, 25 bp, Homo sapien
gagggatgattccaagtccagagaa

SEQ ID NO: 4927147 - DNA, 25 bp, Homo sapien
gcagagggatgattccaagtccaga

SEQ ID NO: 4927148 - DNA, 25 bp, Homo sapien
tttttgcttggttggtatattgaat

SEQ ID NO: 4927149 - DNA, 25 bp, Homo sapien
ttttgcttggttggtatattgaatt

SEQ ID NO: 4927150 - DNA, 25 bp, Homo sapien
gcatgcaagacttctgaaagcttca

SEQ ID NO: 4927151 - DNA, 25 bp, Homo sapien
tggcaatgtgacacaatcagttctc

SEQ ID NO: 4927152 - DNA, 25 bp, Homo sapien
tctctgcccagagtataagggaagg

SEQ ID NO: 4927153 - DNA, 25 bp, Homo sapien
ggcagacactggatgaatcatggca

SEQ ID NO: 4927154 - DNA, 25 bp, Homo sapien
caggtccgacttctctaatggatgt

SEQ ID NO: 4927155 - DNA, 25 bp, Homo sapien
ttgtccaggtccgacttctctaatg

SEQ ID NO: 4927156 - DNA, 25 bp, Homo sapien
gcaaagttgtccaggtccgacttct

SEQ ID NO: 4927157 - DNA, 25 bp, Homo sapien
ggcaaagttgtccaggtccgacttc

SEQ ID NO: 4927158 - DNA, 25 bp, Homo sapien
caagccatgcttgcttcctacgaag

SEQ ID NO: 4927159 - DNA, 25 bp, Homo sapien
tccggaaagtaatgcagatgaggct

SEQ ID NO: 4927160 - DNA, 25 bp, Homo sapien
ctttattaggacaaatggtactgga

SEQ ID NO: 4927161 - DNA, 25 bp, Homo sapien
tgaggctggtttgactcaagccatg

SEQ ID NO: 4927162 - DNA, 25 bp, Homo sapien
tggcaatagtgatgtgccttttgcc

SEQ ID NO: 4927163 - DNA, 25 bp, Homo sapien
tgccatggcaatagtgatgtgcctt

SEQ ID NO: 4927164 - DNA, 25 bp, Homo sapien
caatagtgatgtgccttttgccaag

SEQ ID NO: 4927165 - DNA, 25 bp, Homo sapien
ccatggcaatagtgatgtgcctttt

SEQ ID NO: 4927166 - DNA, 25 bp, Homo sapien
ttttgtttggattagctgagggctc

SEQ ID NO: 4927167 - DNA, 25 bp, Homo sapien
cattaaaattgttcagactttgacc

SEQ ID NO: 4927168 - DNA, 25 bp, Homo sapien
ccacttgtgtggtacgttttgattt

SEQ ID NO: 4927169 - DNA, 25 bp, Homo sapien
gatctaactgtgtggcctatcttca

SEQ ID NO: 4927170 - DNA, 25 bp, Homo sapien
gaaaatctgcattgagtatagtctg

SEQ ID NO: 4927171 - DNA, 25 bp, Homo sapien
gagcctgggacatttgtagaaaatc

SEQ ID NO: 4927172 - DNA, 25 bp, Homo sapien
gtctgatgaaatagagagagtgcct

SEQ ID NO: 4927173 - DNA, 25 bp, Homo sapien
tttcattagataaactacctatatt

SEQ ID NO: 4927174 - DNA, 25 bp, Homo sapien
ccagcatttccaccgtaaacttatc

SEQ ID NO: 4927175 - DNA, 25 bp, Homo sapien
catttccaccgtaaacttatctggt

SEQ ID NO: 4927176 - DNA, 25 bp, Homo sapien
aacttatctggtagttgagccacat

SEQ ID NO: 4927177 - DNA, 25 bp, Homo sapien
gctcatcatcagcaaggaacttctt

SEQ ID NO: 4927178 - DNA, 25 bp, Homo sapien
tgtgggcactttctgacatcccttt

SEQ ID NO: 4927179 - DNA, 25 bp, Homo sapien
gtgttcccacaacttaatccctgtg

SEQ ID NO: 4927180 - DNA, 25 bp, Homo sapien
agcgctcttggaatcagtgttccca

SEQ ID NO: 4927181 - DNA, 25 bp, Homo sapien
tgggttgtacaagtaatgaatcatc

SEQ ID NO: 4927182 - DNA, 25 bp, Homo sapien
ctttggtactggtggaaaattggct

SEQ ID NO: 4927183 - DNA, 25 bp, Homo sapien
ttcttcataagccattcccgtgata

SEQ ID NO: 4927184 - DNA, 25 bp, Homo sapien
cattcccgtgatatttgatttggct

SEQ ID NO: 4927185 - DNA, 25 bp, Homo sapien
taagccattcccgtgatatttgatt

SEQ ID NO: 4927186 - DNA, 25 bp, Homo sapien
tgtgtgtttatgtggcgcgtgtgag

SEQ ID NO: 4927187 - DNA, 25 bp, Homo sapien
agagagattggattagaagccagga

SEQ ID NO: 4927188 - DNA, 25 bp, Homo sapien
aaacagaaagcgagcgagtgagaga

SEQ ID NO: 4927189 - DNA, 25 bp, Homo sapien
ttgggcaaagtcatttaatactatc

SEQ ID NO: 4927190 - DNA, 25 bp, Homo sapien
aagacaaagaggtgcttgccttctt

SEQ ID NO: 4927191 - DNA, 25 bp, Homo sapien
gtcattgcttataactgcattaagc

SEQ ID NO: 4927192 - DNA, 25 bp, Homo sapien
tgtcattgcttataactgcattaag

SEQ ID NO: 4927193 - DNA, 25 bp, Homo sapien
ttgtcattgcttataactgcattaa

SEQ ID NO: 4927194 - DNA, 25 bp, Homo sapien
tttgcttctggaggcgaaaatgcca

SEQ ID NO: 4927195 - DNA, 25 bp, Homo sapien
gatctctgatcttgtcatactatct

SEQ ID NO: 4927196 - DNA, 25 bp, Homo sapien
gcaacattgaactaaaagttgaaag

SEQ ID NO: 4927197 - DNA, 25 bp, Homo sapien
tgctgatgacaatacagaaggtgtt

SEQ ID NO: 4927198 - DNA, 25 bp, Homo sapien
gttgctgaggcaactctattgatcc

SEQ ID NO: 4927199 - DNA, 25 bp, Homo sapien
gcaactctattgatccttcctatgg

SEQ ID NO: 4927200 - DNA, 25 bp, Homo sapien
gtttcatggctgattactgttgctg

SEQ ID NO: 4927201 - DNA, 25 bp, Homo sapien
tctgctcccagtccactcagtgtat

SEQ ID NO: 4927202 - DNA, 25 bp, Homo sapien
atggaaatggcccataggaagtctt

SEQ ID NO: 4927203 - DNA, 25 bp, Homo sapien
tcaggtaaagcacgaatcttgtccc

SEQ ID NO: 4927204 - DNA, 25 bp, Homo sapien
ggtccttctttcaggtaaagcacga

SEQ ID NO: 4927205 - DNA, 25 bp, Homo sapien
ctgtttggctcttggattccccaga

SEQ ID NO: 4927206 - DNA, 25 bp, Homo sapien
tgtacaggagaagatgaacatatgg

SEQ ID NO: 4927207 - DNA, 25 bp, Homo sapien
catggtgagttttcctccagagtaa

SEQ ID NO: 4927208 - DNA, 25 bp, Homo sapien
ggaatgtcaaaccacaaagaatctt

SEQ ID NO: 4927209 - DNA, 25 bp, Homo sapien
gaacatatggaaattttcatggtga

SEQ ID NO: 4927210 - DNA, 25 bp, Homo sapien
gtttgaaagttctgaatatacatga

SEQ ID NO: 4927211 - DNA, 25 bp, Homo sapien
cattttgacccgagcaatatcattt

SEQ ID NO: 4927212 - DNA, 25 bp, Homo sapien
gaatatcctaacttcacttagcagc

SEQ ID NO: 4927213 - DNA, 25 bp, Homo sapien
tttatgtgctgtatagtattttggc

SEQ ID NO: 4927214 - DNA, 25 bp, Homo sapien
catgagttgtctggtagttctgctg

SEQ ID NO: 4927215 - DNA, 25 bp, Homo sapien
tgggctttcccatagtgcgtattca

SEQ ID NO: 4927216 - DNA, 25 bp, Homo sapien
tcttgtctagacttctggatttaca

SEQ ID NO: 4927217 - DNA, 25 bp, Homo sapien
ctgacctaatatggcctcaaccagg

SEQ ID NO: 4927218 - DNA, 25 bp, Homo sapien
tggactttctccaattgtggtcaga

SEQ ID NO: 4927219 - DNA, 25 bp, Homo sapien
tccaattgtggtcagaaacagccac

SEQ ID NO: 4927220 - DNA, 25 bp, Homo sapien
tacagacggcgaccagtgacctctg

SEQ ID NO: 4927221 - DNA, 25 bp, Homo sapien
ggaaccacaggcattctgtacagac

SEQ ID NO: 4927222 - DNA, 25 bp, Homo sapien
tagtgggagaaacacctagagcgag

SEQ ID NO: 4927223 - DNA, 25 bp, Homo sapien
ctagagcgaggcaccagtgtctcaa

SEQ ID NO: 4927224 - DNA, 25 bp, Homo sapien
tgcattcagagttccctcagagaga

SEQ ID NO: 4927225 - DNA, 25 bp, Homo sapien
tactgagcctgtgagcggcaactct

SEQ ID NO: 4927226 - DNA, 25 bp, Homo sapien
cccacagatgttagagagagcctaa

SEQ ID NO: 4927227 - DNA, 25 bp, Homo sapien
gttagagagagcctaaaggacacag

SEQ ID NO: 4927228 - DNA, 25 bp, Homo sapien
cacagatgttagagagagcctaaag

SEQ ID NO: 4927229 - DNA, 25 bp, Homo sapien
gagagagcctaaaggacacagtgac

SEQ ID NO: 4927230 - DNA, 25 bp, Homo sapien
agagcacaccacaaatgcatagatt

SEQ ID NO: 4927231 - DNA, 25 bp, Homo sapien
gaggcacaaagcaaaagatacagat

SEQ ID NO: 4927232 - DNA, 25 bp, Homo sapien
gtttgtaaagatatgtatgaggcac

SEQ ID NO: 4927233 - DNA, 25 bp, Homo sapien
ctccaaaccaagctttcagcagttt

SEQ ID NO: 4927234 - DNA, 25 bp, Homo sapien
ttggagtttttccattaagcttcca

SEQ ID NO: 4927235 - DNA, 25 bp, Homo sapien
tttccattaagcttccacaaagcat

SEQ ID NO: 4927236 - DNA, 25 bp, Homo sapien
tttttccattaagcttccacaaagc

SEQ ID NO: 4927237 - DNA, 25 bp, Homo sapien
caaggacaattgttttatcataaaa

SEQ ID NO: 4927238 - DNA, 25 bp, Homo sapien
tcaggatccaggtctagccttgtgc

SEQ ID NO: 4927239 - DNA, 25 bp, Homo sapien
tctccgggttggctcagtaactgaa

SEQ ID NO: 4927240 - DNA, 25 bp, Homo sapien
gacttatgtcctgaacttctccggg

SEQ ID NO: 4927241 - DNA, 25 bp, Homo sapien
ctgggcagggacattggtagctact

SEQ ID NO: 4927242 - DNA, 25 bp, Homo sapien
cttgaaatgcttgcatttatcggca

SEQ ID NO: 4927243 - DNA, 25 bp, Homo sapien
catttatcggcagggatttcagaat

SEQ ID NO: 4927244 - DNA, 25 bp, Homo sapien
aaatgcttgcatttatcggcaggga

SEQ ID NO: 4927245 - DNA, 25 bp, Homo sapien
gcttgcatttatcggcagggatttc

SEQ ID NO: 4927246 - DNA, 25 bp, Homo sapien
gttaaaatcattgagggcagaggcg

SEQ ID NO: 4927247 - DNA, 25 bp, Homo sapien
ctggttaaaatcattgagggcagag

SEQ ID NO: 4927248 - DNA, 25 bp, Homo sapien
ggttaaaatcattgagggcagaggc

SEQ ID NO: 4927249 - DNA, 25 bp, Homo sapien
cactggttaaaatcattgagggcag

SEQ ID NO: 4927250 - DNA, 25 bp, Homo sapien
ggaaagactgacgtaaaatgctgtt

SEQ ID NO: 4927251 - DNA, 25 bp, Homo sapien
tccttgtcccgatgaagacggagaa

SEQ ID NO: 4927252 - DNA, 25 bp, Homo sapien
gctgttaattgcaccctctctggaa

SEQ ID NO: 4927253 - DNA, 25 bp, Homo sapien
gacgtaaaatgctgttaattgcacc

SEQ ID NO: 4927254 - DNA, 25 bp, Homo sapien
gacctcgtgatcaggcaatctcctg

SEQ ID NO: 4927255 - DNA, 25 bp, Homo sapien
agcttttacgcattcagtatgatac

SEQ ID NO: 4927256 - DNA, 25 bp, Homo sapien
ctatgttgaaaaggcatctttgtct

SEQ ID NO: 4927257 - DNA, 25 bp, Homo sapien
ttgtgtatgatgacccagccttgcg

SEQ ID NO: 4927258 - DNA, 25 bp, Homo sapien
ctctgtgattcttcccatgagtcac

SEQ ID NO: 4927259 - DNA, 25 bp, Homo sapien
tcactgggacatgaggttattataa

SEQ ID NO: 4927260 - DNA, 25 bp, Homo sapien
tacaatttattgtactctgtgattc

SEQ ID NO: 4927261 - DNA, 25 bp, Homo sapien
cactgggacatgaggttattataat

SEQ ID NO: 4927262 - DNA, 25 bp, Homo sapien
tacacaagcttgactcacccttggc

SEQ ID NO: 4927263 - DNA, 25 bp, Homo sapien
tctttgcaatccagaggattcttct

SEQ ID NO: 4927264 - DNA, 25 bp, Homo sapien
ttctaacagcccaacaaagtcgtca

SEQ ID NO: 4927265 - DNA, 25 bp, Homo sapien
gcatgcccatacaggcagcacggag

SEQ ID NO: 4927266 - DNA, 25 bp, Homo sapien
tctccacttagccctaacaatgatg

SEQ ID NO: 4927267 - DNA, 25 bp, Homo sapien
acttagccctaacaatgatgatata

SEQ ID NO: 4927268 - DNA, 25 bp, Homo sapien
cacttagccctaacaatgatgatat

SEQ ID NO: 4927269 - DNA, 25 bp, Homo sapien
tccacttagccctaacaatgatgat

SEQ ID NO: 4927270 - DNA, 25 bp, Homo sapien
tccatcaacaaataggacagttttg

SEQ ID NO: 4927271 - DNA, 25 bp, Homo sapien
gttttggtgcatttatgtgtcctca

SEQ ID NO: 4927272 - DNA, 25 bp, Homo sapien
acagttttggtgcatttatgtgtcc

SEQ ID NO: 4927273 - DNA, 25 bp, Homo sapien
ctgctccatcaacaaataggacagt

SEQ ID NO: 4927274 - DNA, 25 bp, Homo sapien
ccaataccgcatctgtttccaagag

SEQ ID NO: 4927275 - DNA, 25 bp, Homo sapien
ccaagaggtagcagtaagtttttat

SEQ ID NO: 4927276 - DNA, 25 bp, Homo sapien
tcttcatgtgggaagccgatgctat

SEQ ID NO: 4927277 - DNA, 25 bp, Homo sapien
cagtaagtttttattggaccatcca

SEQ ID NO: 4927278 - DNA, 25 bp, Homo sapien
ttgtagttgaggctctggctactat

SEQ ID NO: 4927279 - DNA, 25 bp, Homo sapien
ggctctggctactattgataaggaa

SEQ ID NO: 4927280 - DNA, 25 bp, Homo sapien
ttgaggctctggctactattgataa

SEQ ID NO: 4927281 - DNA, 25 bp, Homo sapien
tggctactattgataaggaattttg

SEQ ID NO: 4927282 - DNA, 25 bp, Homo sapien
catcaggggtagtagagtcacagtc

SEQ ID NO: 4927283 - DNA, 25 bp, Homo sapien
ctgacattgagtaccaccgggaggg

SEQ ID NO: 4927284 - DNA, 25 bp, Homo sapien
tatttctgacattgagtaccaccgg

SEQ ID NO: 4927285 - DNA, 25 bp, Homo sapien
ccaatatttctgacattgagtacca

SEQ ID NO: 4927286 - DNA, 25 bp, Homo sapien
ttttttctcctgtcaaatatgattc

SEQ ID NO: 4927287 - DNA, 25 bp, Homo sapien
tttttctcctgtcaaatatgattcc

SEQ ID NO: 4927288 - DNA, 25 bp, Homo sapien
gaattcctgccacaaactcactcac

SEQ ID NO: 4927289 - DNA, 25 bp, Homo sapien
ccaatccagatggtctctaccatag

SEQ ID NO: 4927290 - DNA, 25 bp, Homo sapien
ctctaccatagattctcctttgaat

SEQ ID NO: 4927291 - DNA, 25 bp, Homo sapien
catctccgaaaagccaatccagatg

SEQ ID NO: 4927292 - DNA, 25 bp, Homo sapien
agtgttttcgctggcgctgttgtca

SEQ ID NO: 4927293 - DNA, 25 bp, Homo sapien
gaacatctcccttgaaaggataaca

SEQ ID NO: 4927294 - DNA, 25 bp, Homo sapien
aaggataacaaagtgttttcgctgg

SEQ ID NO: 4927295 - DNA, 25 bp, Homo sapien
aggcagaagttctttctcgaacatc

SEQ ID NO: 4927296 - DNA, 25 bp, Homo sapien
tagagaagtgcttccccatctattt

SEQ ID NO: 4927297 - DNA, 25 bp, Homo sapien
ttagagaagtgcttccccatctatt

SEQ ID NO: 4927298 - DNA, 25 bp, Homo sapien
ctgcttgtacaaatgggttctgttt

SEQ ID NO: 4927299 - DNA, 25 bp, Homo sapien
tgcttgtacaaatgggttctgtttt

SEQ ID NO: 4927300 - DNA, 25 bp, Homo sapien
gcttgtacaaatgggttctgttttc

SEQ ID NO: 4927301 - DNA, 25 bp, Homo sapien
aattctattcatgaaggtcatcctc

SEQ ID NO: 4927302 - DNA, 25 bp, Homo sapien
tgttgcagcatcacactacttcctg

SEQ ID NO: 4927303 - DNA, 25 bp, Homo sapien
ggcccagttcatcgtagatgctgtc

SEQ ID NO: 4927304 - DNA, 25 bp, Homo sapien
gaagtccaagatttgggcgtgaaaa

SEQ ID NO: 4927305 - DNA, 25 bp, Homo sapien
ttcctgggctggtccgccagattcc

SEQ ID NO: 4927306 - DNA, 25 bp, Homo sapien
tttcctgggctggtccgccagattc

SEQ ID NO: 4927307 - DNA, 25 bp, Homo sapien
tgccatggtgctcaacaggtgaaag

SEQ ID NO: 4927308 - DNA, 25 bp, Homo sapien
ggtacaggctgcagatttgttgcca

SEQ ID NO: 4927309 - DNA, 25 bp, Homo sapien
gctttacttgatgcagacatcttca

SEQ ID NO: 4927310 - DNA, 25 bp, Homo sapien
tcaacttgtgctcagataatagcgt

SEQ ID NO: 4927311 - DNA, 25 bp, Homo sapien
gcccttgtcttcagccatatctcta

SEQ ID NO: 4927312 - DNA, 25 bp, Homo sapien
tctaggtaacgctttttgctgctct

SEQ ID NO: 4927313 - DNA, 25 bp, Homo sapien
tatctctaggtaacgctttttgctg

SEQ ID NO: 4927314 - DNA, 25 bp, Homo sapien
tcagccatatctctaggtaacgctt

SEQ ID NO: 4927315 - DNA, 25 bp, Homo sapien
ctgtgtctcttggtgctttgagttg

SEQ ID NO: 4927316 - DNA, 25 bp, Homo sapien
tggctcatctgatgcgagtatggga

SEQ ID NO: 4927317 - DNA, 25 bp, Homo sapien
gtgattagtggctcatctgatgcga

SEQ ID NO: 4927318 - DNA, 25 bp, Homo sapien
tagtggctcatctgatgcgagtatg

SEQ ID NO: 4927319 - DNA, 25 bp, Homo sapien
cctaaggacattaaagattctctgg

SEQ ID NO: 4927320 - DNA, 25 bp, Homo sapien
cataggtttcatatgggtcacagga

SEQ ID NO: 4927321 - DNA, 25 bp, Homo sapien
agagagagattagagttgttctgga

SEQ ID NO: 4927322 - DNA, 25 bp, Homo sapien
caagtggaaatgtagcctaaggaca

SEQ ID NO: 4927323 - DNA, 25 bp, Homo sapien
aagttaggatgatgtccaagtactc

SEQ ID NO: 4927324 - DNA, 25 bp, Homo sapien
gcaaggtatcaagttgtgcaagctt

SEQ ID NO: 4927325 - DNA, 25 bp, Homo sapien
caacagtgtcagtggtgtgctcatg

SEQ ID NO: 4927326 - DNA, 25 bp, Homo sapien
ggatgatgtccaagtactcattttc

SEQ ID NO: 4927327 - DNA, 25 bp, Homo sapien
ctctgatgtagtgttggctgaggct

SEQ ID NO: 4927328 - DNA, 25 bp, Homo sapien
caatgtgagtgtttggcttggctta

SEQ ID NO: 4927329 - DNA, 25 bp, Homo sapien
cagctggcttgactaaactcatttc

SEQ ID NO: 4927330 - DNA, 25 bp, Homo sapien
ggagagcagcccctttgaagtcaca

SEQ ID NO: 4927331 - DNA, 25 bp, Homo sapien
tcactgaagggggaaccctttctca

SEQ ID NO: 4927332 - DNA, 25 bp, Homo sapien
tccaatttccgcattttccacgtac

SEQ ID NO: 4927333 - DNA, 25 bp, Homo sapien
agttccaatttccgcattttccacg

SEQ ID NO: 4927334 - DNA, 25 bp, Homo sapien
taagttccaatttccgcattttcca

SEQ ID NO: 4927335 - DNA, 25 bp, Homo sapien
ttccaatttccgcattttccacgta

SEQ ID NO: 4927336 - DNA, 25 bp, Homo sapien
caactctgcgggagcccaaaggcag

SEQ ID NO: 4927337 - DNA, 25 bp, Homo sapien
tctcccttcattcgcctcaactctg

SEQ ID NO: 4927338 - DNA, 25 bp, Homo sapien
cccttcattcgcctcaactctgcgg

SEQ ID NO: 4927339 - DNA, 25 bp, Homo sapien
tctctcccttcattcgcctcaactc

SEQ ID NO: 4927340 - DNA, 25 bp, Homo sapien
cacaagtggctattgttcctttgca

SEQ ID NO: 4927341 - DNA, 25 bp, Homo sapien
aacaattcccgcttgattcacctgg

SEQ ID NO: 4927342 - DNA, 25 bp, Homo sapien
agaacagtgttcgggaagttctcct

SEQ ID NO: 4927343 - DNA, 25 bp, Homo sapien
ggtgaatctcccatggtacattgtc

SEQ ID NO: 4927344 - DNA, 25 bp, Homo sapien
ttgagggaggtaggaatattctgcc

SEQ ID NO: 4927345 - DNA, 25 bp, Homo sapien
ctgtcttcaaagatagcatcaagga

SEQ ID NO: 4927346 - DNA, 25 bp, Homo sapien
tctgccttgtccagcttaaggaaga

SEQ ID NO: 4927347 - DNA, 25 bp, Homo sapien
tcttaaaagggtcagtgggcctgtc

SEQ ID NO: 4927348 - DNA, 25 bp, Homo sapien
ggagaaagcagacacgccctggcca

SEQ ID NO: 4927349 - DNA, 25 bp, Homo sapien
tgagggagaaagcagacacgccctg

SEQ ID NO: 4927350 - DNA, 25 bp, Homo sapien
agggagaaagcagacacgccctggc

SEQ ID NO: 4927351 - DNA, 25 bp, Homo sapien
agaaagcagacacgccctggccagt

SEQ ID NO: 4927352 - DNA, 25 bp, Homo sapien
cctgtgaagttttagacgccagaga

SEQ ID NO: 4927353 - DNA, 25 bp, Homo sapien
catgcttttctacaggaacatatgg

SEQ ID NO: 4927354 - DNA, 25 bp, Homo sapien
ggtgaggcacaactcccaacatgga

SEQ ID NO: 4927355 - DNA, 25 bp, Homo sapien
gaagcgagtcaatagatcaggccca

SEQ ID NO: 4927356 - DNA, 25 bp, Homo sapien
tatagcacgtggagtcggtacagga

SEQ ID NO: 4927357 - DNA, 25 bp, Homo sapien
tgaccatggtagtaagcagagagtt

SEQ ID NO: 4927358 - DNA, 25 bp, Homo sapien
gatctgtctaaatctaatggccact

SEQ ID NO: 4927359 - DNA, 25 bp, Homo sapien
cacacatgcaaagggattattcaat

SEQ ID NO: 4927360 - DNA, 25 bp, Homo sapien
tttctctaaagaagttagtagcttc

SEQ ID NO: 4927361 - DNA, 25 bp, Homo sapien
tcctagttaacctctactcatcctt

SEQ ID NO: 4927362 - DNA, 25 bp, Homo sapien
cctgtgaaaggtgccggacctttgt

SEQ ID NO: 4927363 - DNA, 25 bp, Homo sapien
ggtgccggacctttgtgtaagctat

SEQ ID NO: 4927364 - DNA, 25 bp, Homo sapien
acctttgtgtaagctattgcctgtg

SEQ ID NO: 4927365 - DNA, 25 bp, Homo sapien
tctatgatgtgagctgaaccctgtc

SEQ ID NO: 4927366 - DNA, 25 bp, Homo sapien
taaggcctaaacactacctgttgtc

SEQ ID NO: 4927367 - DNA, 25 bp, Homo sapien
caaaagcagtttaatagttgtgcca

SEQ ID NO: 4927368 - DNA, 25 bp, Homo sapien
gttgtgccagagagtatatatatcg

SEQ ID NO: 4927369 - DNA, 25 bp, Homo sapien
taatcaactcattggggagaaacag

SEQ ID NO: 4927370 - DNA, 25 bp, Homo sapien
aatcaactcattggggagaaacaga

SEQ ID NO: 4927371 - DNA, 25 bp, Homo sapien
tctgacaggatataatcaactcatt

SEQ ID NO: 4927372 - DNA, 25 bp, Homo sapien
gacaggatataatcaactcattggg

SEQ ID NO: 4927373 - DNA, 25 bp, Homo sapien
gccatattccaatcagtgcaagatt

SEQ ID NO: 4927374 - DNA, 25 bp, Homo sapien
tgccatattccaatcagtgcaagat

SEQ ID NO: 4927375 - DNA, 25 bp, Homo sapien
gaagcagttggttttatgcctgaga

SEQ ID NO: 4927376 - DNA, 25 bp, Homo sapien
tccagagtaacccacgaagcagttg

SEQ ID NO: 4927377 - DNA, 25 bp, Homo sapien
gctacatgtggaagttctgaggtaa

SEQ ID NO: 4927378 - DNA, 25 bp, Homo sapien
tctgaggtaatgtcgcctttctcaa

SEQ ID NO: 4927379 - DNA, 25 bp, Homo sapien
caggccaatggctaaatgagttgcc

SEQ ID NO: 4927380 - DNA, 25 bp, Homo sapien
gttgcctttattgcactggaatcca

SEQ ID NO: 4927381 - DNA, 25 bp, Homo sapien
ttttggccacaattcctggtggagc

SEQ ID NO: 4927382 - DNA, 25 bp, Homo sapien
tttctcatagtatcacaggccaatg

SEQ ID NO: 4927383 - DNA, 25 bp, Homo sapien
tgaaggtaggtatcttaccaccttc

SEQ ID NO: 4927384 - DNA, 25 bp, Homo sapien
ttaagtctctgggaagcaacctgtt

SEQ ID NO: 4927385 - DNA, 25 bp, Homo sapien
tatataggaaaagttggtactgtga

SEQ ID NO: 4927386 - DNA, 25 bp, Homo sapien
ccgagggtcattctcaactctcttg

SEQ ID NO: 4927387 - DNA, 25 bp, Homo sapien
gccaatttaattgctatcagttctc

SEQ ID NO: 4927388 - DNA, 25 bp, Homo sapien
cagttctcttccacaattgttcaga

SEQ ID NO: 4927389 - DNA, 25 bp, Homo sapien
tagttattgtattcaggtcaagtcc

SEQ ID NO: 4927390 - DNA, 25 bp, Homo sapien
tgttcagattcaagttattttgtcc

SEQ ID NO: 4927391 - DNA, 25 bp, Homo sapien
gtcacaagttgcagtttcatacctc

SEQ ID NO: 4927392 - DNA, 25 bp, Homo sapien
ctgtcacaagttgcagtttcatacc

SEQ ID NO: 4927393 - DNA, 25 bp, Homo sapien
cacaagttgcagtttcatacctcac

SEQ ID NO: 4927394 - DNA, 25 bp, Homo sapien
ctctgtcacaagttgcagtttcata

SEQ ID NO: 4927395 - DNA, 25 bp, Homo sapien
tgcgcccaccctgcttgaatatttt

SEQ ID NO: 4927396 - DNA, 25 bp, Homo sapien
ggtagatggcttattcagcagtgcg

SEQ ID NO: 4927397 - DNA, 25 bp, Homo sapien
tatccagctgtgtagtgtgtgaact

SEQ ID NO: 4927398 - DNA, 25 bp, Homo sapien
ccttatgccttctatggtagatggc

SEQ ID NO: 4927399 - DNA, 25 bp, Homo sapien
ctctttttagctggttgcattggtg

SEQ ID NO: 4927400 - DNA, 25 bp, Homo sapien
tcagggaacattgcgtggattgtgt

SEQ ID NO: 4927401 - DNA, 25 bp, Homo sapien
tggtgaagggcagatatagcttctc

SEQ ID NO: 4927402 - DNA, 25 bp, Homo sapien
tgtacatggagagtagggaatactg

SEQ ID NO: 4927403 - DNA, 25 bp, Homo sapien
ctgtgatgatcatgtacacagtgct

SEQ ID NO: 4927404 - DNA, 25 bp, Homo sapien
tacacagtgctttcagcagttcctt

SEQ ID NO: 4927405 - DNA, 25 bp, Homo sapien
ctcaggcaacttattctttggaaag

SEQ ID NO: 4927406 - DNA, 25 bp, Homo sapien
caggcaacttattctttggaaagca

SEQ ID NO: 4927407 - DNA, 25 bp, Homo sapien
tgtcaggttccactcagtttccacc

SEQ ID NO: 4927408 - DNA, 25 bp, Homo sapien
ctgtcaggttccactcagtttccac

SEQ ID NO: 4927409 - DNA, 25 bp, Homo sapien
taagcagattgtgttatatgctctg

SEQ ID NO: 4927410 - DNA, 25 bp, Homo sapien
gtccatttcttcaactctaacataa

SEQ ID NO: 4927411 - DNA, 25 bp, Homo sapien
aatagatggccaattgtttccatca

SEQ ID NO: 4927412 - DNA, 25 bp, Homo sapien
atattaatagatggccaattgtttc

SEQ ID NO: 4927413 - DNA, 25 bp, Homo sapien
atgtaaatattaatagatggccaat

SEQ ID NO: 4927414 - DNA, 25 bp, Homo sapien
taaatattaatagatggccaattgt

SEQ ID NO: 4927415 - DNA, 25 bp, Homo sapien
ttctggagcatagcattcaatgcca

SEQ ID NO: 4927416 - DNA, 25 bp, Homo sapien
gccctttattgaagggtggatgcag

SEQ ID NO: 4927417 - DNA, 25 bp, Homo sapien
catgagtagttttgggccctttatt

SEQ ID NO: 4927418 - DNA, 25 bp, Homo sapien
tacaattgcatacatgagtagtttt

SEQ ID NO: 4927419 - DNA, 25 bp, Homo sapien
tctgtgaacagacttcttcagccac

SEQ ID NO: 4927420 - DNA, 25 bp, Homo sapien
cacagccagatggagccttctgtga

SEQ ID NO: 4927421 - DNA, 25 bp, Homo sapien
ctggagtttgccctagcactggttc

SEQ ID NO: 4927422 - DNA, 25 bp, Homo sapien
agccacagaaaagtactggggatct

SEQ ID NO: 4927423 - DNA, 25 bp, Homo sapien
tctctctctctatctacatcaacat

SEQ ID NO: 4927424 - DNA, 25 bp, Homo sapien
atcatcatcattatctatatttgaa

SEQ ID NO: 4927425 - DNA, 25 bp, Homo sapien
tctctctctatctacatcaacatca

SEQ ID NO: 4927426 - DNA, 25 bp, Homo sapien
tctctctatctacatcaacatcatc

SEQ ID NO: 4927427 - DNA, 25 bp, Homo sapien
accagctgaaatgcctgatctgggt

SEQ ID NO: 4927428 - DNA, 25 bp, Homo sapien
ccagctgaaatgcctgatctgggtc

SEQ ID NO: 4927429 - DNA, 25 bp, Homo sapien
ctctgctttgctaggatgatgaacc

SEQ ID NO: 4927430 - DNA, 25 bp, Homo sapien
tgccactcaagtcccagattagagt

SEQ ID NO: 4927431 - DNA, 25 bp, Homo sapien
cccagattagagtgacagagcggag

SEQ ID NO: 4927432 - DNA, 25 bp, Homo sapien
tctgctttgctaggatgatgaaccc

SEQ ID NO: 4927433 - DNA, 25 bp, Homo sapien
actgggtccaagctgtaggtccttt

SEQ ID NO: 4927434 - DNA, 25 bp, Homo sapien
tcctttgggtatatttgttggttgc

SEQ ID NO: 4927435 - DNA, 25 bp, Homo sapien
gtccaagctgtaggtcctttgggta

SEQ ID NO: 4927436 - DNA, 25 bp, Homo sapien
caagctgtaggtcctttgggtatat

SEQ ID NO: 4927437 - DNA, 25 bp, Homo sapien
ctagtgacaggtgttctgctctgtg

SEQ ID NO: 4927438 - DNA, 25 bp, Homo sapien
cccaggtgctgtcggtgattgctgt

SEQ ID NO: 4927439 - DNA, 25 bp, Homo sapien
gggaccacttccctctaggttcaca

SEQ ID NO: 4927440 - DNA, 25 bp, Homo sapien
caggtgttctgctctgtggcaattt

SEQ ID NO: 4927441 - DNA, 25 bp, Homo sapien
aaataagacatttcaaagctgtgtg

SEQ ID NO: 4927442 - DNA, 25 bp, Homo sapien
taaataagacatttcaaagctgtgt

SEQ ID NO: 4927443 - DNA, 25 bp, Homo sapien
aataagacatttcaaagctgtgtgt

SEQ ID NO: 4927444 - DNA, 25 bp, Homo sapien
ctaaataagacatttcaaagctgtg

SEQ ID NO: 4927445 - DNA, 25 bp, Homo sapien
cacgtttccatggcagctggctgtg

SEQ ID NO: 4927446 - DNA, 25 bp, Homo sapien
tcacgtttccatggcagctggctgt

SEQ ID NO: 4927447 - DNA, 25 bp, Homo sapien
taaaatcactcgacaagatcttttg

SEQ ID NO: 4927448 - DNA, 25 bp, Homo sapien
aaatcactcgacaagatcttttgcc

SEQ ID NO: 4927449 - DNA, 25 bp, Homo sapien
tcactcgacaagatcttttgcctag

SEQ ID NO: 4927450 - DNA, 25 bp, Homo sapien
tcattaaaatcactcgacaagatct

SEQ ID NO: 4927451 - DNA, 25 bp, Homo sapien
aagagagggcagagaataacaaacc

SEQ ID NO: 4927452 - DNA, 25 bp, Homo sapien
tggccagctggaatgatgaaagaga

SEQ ID NO: 4927453 - DNA, 25 bp, Homo sapien
gaataacaaaccagccatgagtagt

SEQ ID NO: 4927454 - DNA, 25 bp, Homo sapien
gcagagaataacaaaccagccatga

SEQ ID NO: 4927455 - DNA, 25 bp, Homo sapien
cacgcaatccaactataagggacat

SEQ ID NO: 4927456 - DNA, 25 bp, Homo sapien
agaagcagaacgtccaagtgaaaga

SEQ ID NO: 4927457 - DNA, 25 bp, Homo sapien
ccaagaagcagaacgtccaagtgaa

SEQ ID NO: 4927458 - DNA, 25 bp, Homo sapien
aagcagaacgtccaagtgaaagatt

SEQ ID NO: 4927459 - DNA, 25 bp, Homo sapien
gcagaacgtccaagtgaaagatttc

SEQ ID NO: 4927460 - DNA, 25 bp, Homo sapien
aaagcttcagattcttcttccacca

SEQ ID NO: 4927461 - DNA, 25 bp, Homo sapien
aagcttcagattcttcttccaccat

SEQ ID NO: 4927462 - DNA, 25 bp, Homo sapien
cagtctcatcaaaagcttcagattc

SEQ ID NO: 4927463 - DNA, 25 bp, Homo sapien
tcaaaagcttcagattcttcttcca

SEQ ID NO: 4927464 - DNA, 25 bp, Homo sapien
tgaaatgtaaggtgccaatggaatc

SEQ ID NO: 4927465 - DNA, 25 bp, Homo sapien
tatttgtggtggaagggcacttgta

SEQ ID NO: 4927466 - DNA, 25 bp, Homo sapien
agccaccaccaaactgctacccttc

SEQ ID NO: 4927467 - DNA, 25 bp, Homo sapien
aatggaatctatatccacagccacc

SEQ ID NO: 4927468 - DNA, 25 bp, Homo sapien
ccttctaaagaggtgggtaagcaga

SEQ ID NO: 4927469 - DNA, 25 bp, Homo sapien
cctcttttgaagtttgtagggagat

SEQ ID NO: 4927470 - DNA, 25 bp, Homo sapien
caccttctaaagaggtgggtaagca

SEQ ID NO: 4927471 - DNA, 25 bp, Homo sapien
ttgtacacctcttttgaagtttgta

SEQ ID NO: 4927472 - DNA, 25 bp, Homo sapien
gaacaggaggagagggcataagttt

SEQ ID NO: 4927473 - DNA, 25 bp, Homo sapien
aggaagaatgatggggaacaggagg

SEQ ID NO: 4927474 - DNA, 25 bp, Homo sapien
tcaaggatgattaggaccccactcc

SEQ ID NO: 4927475 - DNA, 25 bp, Homo sapien
gaccccactccaggaagaatgatgg

SEQ ID NO: 4927476 - DNA, 25 bp, Homo sapien
taaaaggcacgatgaattacaatat

SEQ ID NO: 4927477 - DNA, 25 bp, Homo sapien
ttaaaaggcacgatgaattacaata

SEQ ID NO: 4927478 - DNA, 25 bp, Homo sapien
cgatgaattacaatattgtccaaaa

SEQ ID NO: 4927479 - DNA, 25 bp, Homo sapien
gcacgatgaattacaatattgtcca

SEQ ID NO: 4927480 - DNA, 25 bp, Homo sapien
ggcagcacgctgtagactctttgat

SEQ ID NO: 4927481 - DNA, 25 bp, Homo sapien
tctctgtaagggtatgagtctggca

SEQ ID NO: 4927482 - DNA, 25 bp, Homo sapien
gatgttggtcctagccctgaggcag

SEQ ID NO: 4927483 - DNA, 25 bp, Homo sapien
tggccttcccggaagtaatagtcca

SEQ ID NO: 4927484 - DNA, 25 bp, Homo sapien
gatgagtggcaggattttaaacaga

SEQ ID NO: 4927485 - DNA, 25 bp, Homo sapien
taaacagagtacatttgggctttgc

SEQ ID NO: 4927486 - DNA, 25 bp, Homo sapien
tgctgtgcattctccgtcctcggtg

SEQ ID NO: 4927487 - DNA, 25 bp, Homo sapien
ccatggagctagcatccttctgctg

SEQ ID NO: 4927488 - DNA, 25 bp, Homo sapien
tgagttattaatgctcctgtcatcc

SEQ ID NO: 4927489 - DNA, 25 bp, Homo sapien
gagacattcaagagcagtccctctg

SEQ ID NO: 4927490 - DNA, 25 bp, Homo sapien
caaggaaggaagctgaacgaggtat

SEQ ID NO: 4927491 - DNA, 25 bp, Homo sapien
cataattagtaagcttctgaatggg

SEQ ID NO: 4927492 - DNA, 25 bp, Homo sapien
gtgaggcatccctggtgattccaca

SEQ ID NO: 4927493 - DNA, 25 bp, Homo sapien
gattccacatccagcagactgggtg

SEQ ID NO: 4927494 - DNA, 25 bp, Homo sapien
ttaggacaccaccactcttgcctgg

SEQ ID NO: 4927495 - DNA, 25 bp, Homo sapien
catccagcagactgggtgaaggcac

SEQ ID NO: 4927496 - DNA, 25 bp, Homo sapien
ggagcattcagaagcagcccccttc

SEQ ID NO: 4927497 - DNA, 25 bp, Homo sapien
tcaggagcattcagaagcagccccc

SEQ ID NO: 4927498 - DNA, 25 bp, Homo sapien
gagcattcagaagcagcccccttcc

SEQ ID NO: 4927499 - DNA, 25 bp, Homo sapien
aggagcattcagaagcagccccctt

SEQ ID NO: 4927500 - DNA, 25 bp, Homo sapien
cttggtgcatatcagaagtactaga

SEQ ID NO: 4927501 - DNA, 25 bp, Homo sapien
ctagaagatgtaattaccaatatgt

SEQ ID NO: 4927502 - DNA, 25 bp, Homo sapien
agaagtactagaagatgtaattacc

SEQ ID NO: 4927503 - DNA, 25 bp, Homo sapien
aagttgatttcggtttcttggtgca

SEQ ID NO: 4927504 - DNA, 25 bp, Homo sapien
ttctataacgtttcttctcaactgt

SEQ ID NO: 4927505 - DNA, 25 bp, Homo sapien
tcttctcaactgtgacacttaccat

SEQ ID NO: 4927506 - DNA, 25 bp, Homo sapien
ccatattttctataacgtttcttct

SEQ ID NO: 4927507 - DNA, 25 bp, Homo sapien
tattttctataacgtttcttctcaa

SEQ ID NO: 4927508 - DNA, 25 bp, Homo sapien
ctgaataagggaagtgatctgctgg

SEQ ID NO: 4927509 - DNA, 25 bp, Homo sapien
tgaataagggaagtgatctgctggc

SEQ ID NO: 4927510 - DNA, 25 bp, Homo sapien
ggagatgatggatgtgaatttgtca

SEQ ID NO: 4927511 - DNA, 25 bp, Homo sapien
tgtgaatttgtcatcatctcctgtc

SEQ ID NO: 4927512 - DNA, 25 bp, Homo sapien
gtgcacacggaatcctcggaatggc

SEQ ID NO: 4927513 - DNA, 25 bp, Homo sapien
tcctcggaatggctgcaaggctctg

SEQ ID NO: 4927514 - DNA, 25 bp, Homo sapien
cttctagatcctgctggactttcat

SEQ ID NO: 4927515 - DNA, 25 bp, Homo sapien
ccttctagatcctgctggactttca

SEQ ID NO: 4927516 - DNA, 25 bp, Homo sapien
caagacaatgccactccggtacaag

SEQ ID NO: 4927517 - DNA, 25 bp, Homo sapien
aagtcataaccatatccagatctgg

SEQ ID NO: 4927518 - DNA, 25 bp, Homo sapien
gacgttggatctgatatgcaggaca

SEQ ID NO: 4927519 - DNA, 25 bp, Homo sapien
gatctggtttgtataggtgactgag

SEQ ID NO: 4927520 - DNA, 25 bp, Homo sapien
ttcgttcacatgaataataataaac

SEQ ID NO: 4927521 - DNA, 25 bp, Homo sapien
ttcacatgaataataataaactcca

SEQ ID NO: 4927522 - DNA, 25 bp, Homo sapien
cgttcacatgaataataataaactc

SEQ ID NO: 4927523 - DNA, 25 bp, Homo sapien
tcacatgaataataataaactccat

SEQ ID NO: 4927524 - DNA, 25 bp, Homo sapien
accttttctctcattggggagattt

SEQ ID NO: 4927525 - DNA, 25 bp, Homo sapien
cagaggtagtggtcaggggagtatg

SEQ ID NO: 4927526 - DNA, 25 bp, Homo sapien
ccttttctctcattggggagatttc

SEQ ID NO: 4927527 - DNA, 25 bp, Homo sapien
ctggcagaggtagtggtcaggggag

SEQ ID NO: 4927528 - DNA, 25 bp, Homo sapien
tgaccacagaggctgataacaccat

SEQ ID NO: 4927529 - DNA, 25 bp, Homo sapien
tgataacaccattggactctggttt

SEQ ID NO: 4927530 - DNA, 25 bp, Homo sapien
taaccagaggtagggtcttgaccac

SEQ ID NO: 4927531 - DNA, 25 bp, Homo sapien
ttctctctctagcacatgacaggat

SEQ ID NO: 4927532 - DNA, 25 bp, Homo sapien
tgttggtttcccatccactagctct

SEQ ID NO: 4927533 - DNA, 25 bp, Homo sapien
taggaatgattagccgcagcagtca

SEQ ID NO: 4927534 - DNA, 25 bp, Homo sapien
tgttctgaaagatccagcctcgcag

SEQ ID NO: 4927535 - DNA, 25 bp, Homo sapien
aaagcttatccaagagaactgtgac

SEQ ID NO: 4927536 - DNA, 25 bp, Homo sapien
tctagccatagtgctggaagacagg

SEQ ID NO: 4927537 - DNA, 25 bp, Homo sapien
cctgttgagggctgatctagccata

SEQ ID NO: 4927538 - DNA, 25 bp, Homo sapien
gggtgacagttctatagctccttcc

SEQ ID NO: 4927539 - DNA, 25 bp, Homo sapien
cattttcatgttacctggatgtgac

SEQ ID NO: 4927540 - DNA, 25 bp, Homo sapien
aagctctgtgaatgccaaatagcag

SEQ ID NO: 4927541 - DNA, 25 bp, Homo sapien
tcttgccgttacaaatggatgtcag

SEQ ID NO: 4927542 - DNA, 25 bp, Homo sapien
gctgcaccagcgaggttcttgccgt

SEQ ID NO: 4927543 - DNA, 25 bp, Homo sapien
tgcgttgtatgaacagtgactgcca

SEQ ID NO: 4927544 - DNA, 25 bp, Homo sapien
aaaatggccctttgtcctgtggtgg

SEQ ID NO: 4927545 - DNA, 25 bp, Homo sapien
gggttgttttgcgtcagccggcagc

SEQ ID NO: 4927546 - DNA, 25 bp, Homo sapien
gccggcagccggcaaattctgtcaa

SEQ ID NO: 4927547 - DNA, 25 bp, Homo sapien
ggagagaagtggtcaaaacacccag

SEQ ID NO: 4927548 - DNA, 25 bp, Homo sapien
acactggccccttcatgggcgctgg

SEQ ID NO: 4927549 - DNA, 25 bp, Homo sapien
tctgtccccaaactaccaagcctgg

SEQ ID NO: 4927550 - DNA, 25 bp, Homo sapien
tgatcatcattcttcacgggccggg

SEQ ID NO: 4927551 - DNA, 25 bp, Homo sapien
gggcatctgccagcttgccgatgaa

SEQ ID NO: 4927552 - DNA, 25 bp, Homo sapien
cccaaactaccaagcctgggctgtg

SEQ ID NO: 4927553 - DNA, 25 bp, Homo sapien
ctagagagaggctctatcatggggc

SEQ ID NO: 4927554 - DNA, 25 bp, Homo sapien
tcatggggcccaaagcaactgagct

SEQ ID NO: 4927555 - DNA, 25 bp, Homo sapien
agagagaggctctatcatggggccc

SEQ ID NO: 4927556 - DNA, 25 bp, Homo sapien
tatcatggggcccaaagcaactgag

SEQ ID NO: 4927557 - DNA, 25 bp, Homo sapien
tggacctcgatgtcaagagaagaat

SEQ ID NO: 4927558 - DNA, 25 bp, Homo sapien
tgggaaatctctccaaaaagccagg

SEQ ID NO: 4927559 - DNA, 25 bp, Homo sapien
gcttcacgcataatagacccatttg

SEQ ID NO: 4927560 - DNA, 25 bp, Homo sapien
ggttacaatctgcttctcgcatccg

SEQ ID NO: 4927561 - DNA, 25 bp, Homo sapien
tggctggaagcctcggttcccatcc

SEQ ID NO: 4927562 - DNA, 25 bp, Homo sapien
aatggactttgcaaatccaacctga

SEQ ID NO: 4927563 - DNA, 25 bp, Homo sapien
cctgaacttagtgatgtgggcttga

SEQ ID NO: 4927564 - DNA, 25 bp, Homo sapien
taatcagatctatatcaaagctcac

SEQ ID NO: 4927565 - DNA, 25 bp, Homo sapien
tattctattccgagtcttatctcct

SEQ ID NO: 4927566 - DNA, 25 bp, Homo sapien
tgatcatagaaactccactgtgtgt

SEQ ID NO: 4927567 - DNA, 25 bp, Homo sapien
aattatgctgtctcctggtttggcc

SEQ ID NO: 4927568 - DNA, 25 bp, Homo sapien
tcctgacggattctcctgatcatag

SEQ ID NO: 4927569 - DNA, 25 bp, Homo sapien
gaaataaactttggtagcaggatag

SEQ ID NO: 4927570 - DNA, 25 bp, Homo sapien
cagttgaggcaacagtgttggtaca

SEQ ID NO: 4927571 - DNA, 25 bp, Homo sapien
tggtacaaagtcttgagtctgattc

SEQ ID NO: 4927572 - DNA, 25 bp, Homo sapien
caggatagagggtgcattggaaatg

SEQ ID NO: 4927573 - DNA, 25 bp, Homo sapien
tgtgcttctgggcaatagctcaggg

SEQ ID NO: 4927574 - DNA, 25 bp, Homo sapien
tagctcagggtagcagctgactgat

SEQ ID NO: 4927575 - DNA, 25 bp, Homo sapien
aagaatagagacaatcaccctgggc

SEQ ID NO: 4927576 - DNA, 25 bp, Homo sapien
gactgattttcctatccatgcactt

SEQ ID NO: 4927577 - DNA, 25 bp, Homo sapien
gttgggccaccaaagtctaggatct

SEQ ID NO: 4927578 - DNA, 25 bp, Homo sapien
tgggccaccaaagtctaggatctcc

SEQ ID NO: 4927579 - DNA, 25 bp, Homo sapien
ttgggccaccaaagtctaggatctc

SEQ ID NO: 4927580 - DNA, 25 bp, Homo sapien
agttgggccaccaaagtctaggatc

SEQ ID NO: 4927581 - DNA, 25 bp, Homo sapien
taccttctgctggtttctcatgagc

SEQ ID NO: 4927582 - DNA, 25 bp, Homo sapien
cacctcattgttggtgagaaggaca

SEQ ID NO: 4927583 - DNA, 25 bp, Homo sapien
ctggcaggagcaaacattagctggg

SEQ ID NO: 4927584 - DNA, 25 bp, Homo sapien
tagtgcaaagaacaacacctcattg

SEQ ID NO: 4927585 - DNA, 25 bp, Homo sapien
gctttgggatacaatctaggatgcc

SEQ ID NO: 4927586 - DNA, 25 bp, Homo sapien
gttgtaaagacagtggccccctgca

SEQ ID NO: 4927587 - DNA, 25 bp, Homo sapien
tataatacagtattccaaccaagac

SEQ ID NO: 4927588 - DNA, 25 bp, Homo sapien
tgccatgctggacttacagctgttg

SEQ ID NO: 4927589 - DNA, 25 bp, Homo sapien
ctcagactgtctccccggtcatggt

SEQ ID NO: 4927590 - DNA, 25 bp, Homo sapien
ggttgatattcacattcctcagaaa

SEQ ID NO: 4927591 - DNA, 25 bp, Homo sapien
tctccccggtcatggttctttgcac

SEQ ID NO: 4927592 - DNA, 25 bp, Homo sapien
aatggttgatattcacattcctcag

SEQ ID NO: 4927593 - DNA, 25 bp, Homo sapien
ctgcaatgatgaacgagtgaggcgg

SEQ ID NO: 4927594 - DNA, 25 bp, Homo sapien
tgcaatgatgaacgagtgaggcggg

SEQ ID NO: 4927595 - DNA, 25 bp, Homo sapien
ctgtttttgatctttggcacatttt

SEQ ID NO: 4927596 - DNA, 25 bp, Homo sapien
tgtttttgatctttggcacattttc

SEQ ID NO: 4927597 - DNA, 25 bp, Homo sapien
gcagtagatggcagtagaggctttt

SEQ ID NO: 4927598 - DNA, 25 bp, Homo sapien
gcttttgaatgaggactttcaggtt

SEQ ID NO: 4927599 - DNA, 25 bp, Homo sapien
gctttttgccaatgagttcttcaga

SEQ ID NO: 4927600 - DNA, 25 bp, Homo sapien
gactttcaggttgcttggctcacct

SEQ ID NO: 4927601 - DNA, 25 bp, Homo sapien
ccagtgggtccgtggcattgaaaag

SEQ ID NO: 4927602 - DNA, 25 bp, Homo sapien
ctccacatctactgcgtgcccttgc

SEQ ID NO: 4927603 - DNA, 25 bp, Homo sapien
gagcaaacagcgtgatgacactcac

SEQ ID NO: 4927604 - DNA, 25 bp, Homo sapien
tgttctgagcaaacagcgtgatgac

SEQ ID NO: 4927605 - DNA, 25 bp, Homo sapien
tgtgactgcgggtctcgggaacggt

SEQ ID NO: 4927606 - DNA, 25 bp, Homo sapien
ttggaatgcccctgcccgctggctt

SEQ ID NO: 4927607 - DNA, 25 bp, Homo sapien
cgggaacggtgttggaatgcccctg

SEQ ID NO: 4927608 - DNA, 25 bp, Homo sapien
cggtgttggaatgcccctgcccgct

SEQ ID NO: 4927609 - DNA, 25 bp, Homo sapien
agatggtgaggttaggtctgccttc

SEQ ID NO: 4927610 - DNA, 25 bp, Homo sapien
ctgtgagatggtgaggttaggtctg

SEQ ID NO: 4927611 - DNA, 25 bp, Homo sapien
tgagatggtgaggttaggtctgcct

SEQ ID NO: 4927612 - DNA, 25 bp, Homo sapien
gatggtgaggttaggtctgccttcc

SEQ ID NO: 4927613 - DNA, 25 bp, Homo sapien
tcaatggcaagaggcgactgggaac

SEQ ID NO: 4927614 - DNA, 25 bp, Homo sapien
gttagcttctggcaacatcctggaa

SEQ ID NO: 4927615 - DNA, 25 bp, Homo sapien
ccctgacttgacctggagttgaact

SEQ ID NO: 4927616 - DNA, 25 bp, Homo sapien
tgtcagccctgatagtagcatgaaa

SEQ ID NO: 4927617 - DNA, 25 bp, Homo sapien
taaataccaccgatgtcaaggtccc

SEQ ID NO: 4927618 - DNA, 25 bp, Homo sapien
gcaagcagcagttttaccacgatga

SEQ ID NO: 4927619 - DNA, 25 bp, Homo sapien
acatgaggagagctgcataaatacc

SEQ ID NO: 4927620 - DNA, 25 bp, Homo sapien
aaaaggaattgcagagcgaggctcc

SEQ ID NO: 4927621 - DNA, 25 bp, Homo sapien
gttccatctcgttcttccttgacat

SEQ ID NO: 4927622 - DNA, 25 bp, Homo sapien
tgcccactccccactaagagttcat

SEQ ID NO: 4927623 - DNA, 25 bp, Homo sapien
aagagttcatcctctgggtccactg

SEQ ID NO: 4927624 - DNA, 25 bp, Homo sapien
cactggttccatctcgttcttcctt

SEQ ID NO: 4927625 - DNA, 25 bp, Homo sapien
tgttccaggataaaactcaatgttc

SEQ ID NO: 4927626 - DNA, 25 bp, Homo sapien
tgaaggaccttttacttccagctct

SEQ ID NO: 4927627 - DNA, 25 bp, Homo sapien
catggagaggtgattttgatcttac

SEQ ID NO: 4927628 - DNA, 25 bp, Homo sapien
acttcaaggtttctagaccacccag

SEQ ID NO: 4927629 - DNA, 25 bp, Homo sapien
tggcctacttccaagacactgtgat

SEQ ID NO: 4927630 - DNA, 25 bp, Homo sapien
cctttctcagcagacacccctggcc

SEQ ID NO: 4927631 - DNA, 25 bp, Homo sapien
acacccctggcctacttccaagaca

SEQ ID NO: 4927632 - DNA, 25 bp, Homo sapien
tttctcagcagacacccctggccta

SEQ ID NO: 4927633 - DNA, 25 bp, Homo sapien
agtccttgctgttaaacatagcttc

SEQ ID NO: 4927634 - DNA, 25 bp, Homo sapien
gctgcccaggatccttgagtccccc

SEQ ID NO: 4927635 - DNA, 25 bp, Homo sapien
tgctgttaaacatagcttcccctga

SEQ ID NO: 4927636 - DNA, 25 bp, Homo sapien
tccttgctgttaaacatagcttccc

SEQ ID NO: 4927637 - DNA, 25 bp, Homo sapien
agtaggagggcgtggggtgggctag

SEQ ID NO: 4927638 - DNA, 25 bp, Homo sapien
caagggtggagtaggagggcgtggg

SEQ ID NO: 4927639 - DNA, 25 bp, Homo sapien
gccaagggtggagtaggagggcgtg

SEQ ID NO: 4927640 - DNA, 25 bp, Homo sapien
tggagtaggagggcgtggggtgggc

SEQ ID NO: 4927641 - DNA, 25 bp, Homo sapien
ttctggagaccttaagactctctcc

SEQ ID NO: 4927642 - DNA, 25 bp, Homo sapien
caaggagtcagctcagatgatggag

SEQ ID NO: 4927643 - DNA, 25 bp, Homo sapien
tctcccttgccacgtagtcttaggg

SEQ ID NO: 4927644 - DNA, 25 bp, Homo sapien
cctgccagaccgcatttgtgtatga

SEQ ID NO: 4927645 - DNA, 25 bp, Homo sapien
aacactggctcatttcatgcactgg

SEQ ID NO: 4927646 - DNA, 25 bp, Homo sapien
tcttcgaagcccaagttcatcactg

SEQ ID NO: 4927647 - DNA, 25 bp, Homo sapien
catcactgagcccttgaaacactgg

SEQ ID NO: 4927648 - DNA, 25 bp, Homo sapien
attctctacaaccaaattcacctcg

SEQ ID NO: 4927649 - DNA, 25 bp, Homo sapien
ccttaacaggaccagcgatggcaga

SEQ ID NO: 4927650 - DNA, 25 bp, Homo sapien
caggaccagcgatggcagattgtgc

SEQ ID NO: 4927651 - DNA, 25 bp, Homo sapien
tcccttaacaggaccagcgatggca

SEQ ID NO: 4927652 - DNA, 25 bp, Homo sapien
ttaacaggaccagcgatggcagatt

SEQ ID NO: 4927653 - DNA, 25 bp, Homo sapien
tggacctcctagatatagacttgtg

SEQ ID NO: 4927654 - DNA, 25 bp, Homo sapien
tggctgatgatggacctcctagata

SEQ ID NO: 4927655 - DNA, 25 bp, Homo sapien
caatgattcgggtcttggtggctga

SEQ ID NO: 4927656 - DNA, 25 bp, Homo sapien
tgtagagtacaacttgcccctgttt

SEQ ID NO: 4927657 - DNA, 25 bp, Homo sapien
tgttgtagggagattgttctcagag

SEQ ID NO: 4927658 - DNA, 25 bp, Homo sapien
tgctgttgtagggagattgttctca

SEQ ID NO: 4927659 - DNA, 25 bp, Homo sapien
tggctttgctgttgtagggagattg

SEQ ID NO: 4927660 - DNA, 25 bp, Homo sapien
agagacatctctgtcaggttcagct

SEQ ID NO: 4927661 - DNA, 25 bp, Homo sapien
gccaattgctttaggctgtcactcc

SEQ ID NO: 4927662 - DNA, 25 bp, Homo sapien
aaagatgtaaaatggaagggttgtg

SEQ ID NO: 4927663 - DNA, 25 bp, Homo sapien
gttgtgagagatgaagctctgttgc

SEQ ID NO: 4927664 - DNA, 25 bp, Homo sapien
tgaaagctcgggtaagaggcacact

SEQ ID NO: 4927665 - DNA, 25 bp, Homo sapien
tggtgcttgaggaaggtccacaaga

SEQ ID NO: 4927666 - DNA, 25 bp, Homo sapien
ggtgcttgaggaaggtccacaagag

SEQ ID NO: 4927667 - DNA, 25 bp, Homo sapien
attttcatcctcatcgtgcagcaag

SEQ ID NO: 4927668 - DNA, 25 bp, Homo sapien
cgttcagcagcttgaccaccgccac

SEQ ID NO: 4927669 - DNA, 25 bp, Homo sapien
agcagcttgaccaccgccaccacct

SEQ ID NO: 4927670 - DNA, 25 bp, Homo sapien
catcctcatcgtgcagcaagctctt

SEQ ID NO: 4927671 - DNA, 25 bp, Homo sapien
tcttctgatgcttcaactgagttat

SEQ ID NO: 4927672 - DNA, 25 bp, Homo sapien
ttctgatgcttcaactgagttattt

SEQ ID NO: 4927673 - DNA, 25 bp, Homo sapien
ttcttctgatgcttcaactgagtta

SEQ ID NO: 4927674 - DNA, 25 bp, Homo sapien
gtttcttctgatgcttcaactgagt

SEQ ID NO: 4927675 - DNA, 25 bp, Homo sapien
cttttctgtctttggcactctttgt

SEQ ID NO: 4927676 - DNA, 25 bp, Homo sapien
tctagcatcgtgtcttttattcatt

SEQ ID NO: 4927677 - DNA, 25 bp, Homo sapien
ttcaagatcatgcagtgacttgctt

SEQ ID NO: 4927678 - DNA, 25 bp, Homo sapien
agtgacttgcttattctgtgatctg

SEQ ID NO: 4927679 - DNA, 25 bp, Homo sapien
cagctctttattttttcgggtgaga

SEQ ID NO: 4927680 - DNA, 25 bp, Homo sapien
cctacgtagggttaggataagcaat

SEQ ID NO: 4927681 - DNA, 25 bp, Homo sapien
cgtagggttaggataagcaatatca

SEQ ID NO: 4927682 - DNA, 25 bp, Homo sapien
cagtcctacgtagggttaggataag

SEQ ID NO: 4927683 - DNA, 25 bp, Homo sapien
ggttaggataagcaatatcactttc

SEQ ID NO: 4927684 - DNA, 25 bp, Homo sapien
tgggctccgtgtttgggtagggaca

SEQ ID NO: 4927685 - DNA, 25 bp, Homo sapien
tgctttgtagttgggcaggccacag

SEQ ID NO: 4927686 - DNA, 25 bp, Homo sapien
actgactaggttttgtaattggtgg

SEQ ID NO: 4927687 - DNA, 25 bp, Homo sapien
tgccatattcagatggagccactga

SEQ ID NO: 4927688 - DNA, 25 bp, Homo sapien
ccttctcttatgcactgctccagaa

SEQ ID NO: 4927689 - DNA, 25 bp, Homo sapien
taatggttctcggtccatcaatcca

SEQ ID NO: 4927690 - DNA, 25 bp, Homo sapien
agaaataatggttctcggtccatca

SEQ ID NO: 4927691 - DNA, 25 bp, Homo sapien
tctcggtccatcaatccaacagttt

SEQ ID NO: 4927692 - DNA, 25 bp, Homo sapien
tgctattgtcctttagcacaggagt

SEQ ID NO: 4927693 - DNA, 25 bp, Homo sapien
tcctttagcacaggagtgctgatca

SEQ ID NO: 4927694 - DNA, 25 bp, Homo sapien
caggagtgctgatcagttctgtggc

SEQ ID NO: 4927695 - DNA, 25 bp, Homo sapien
ttagcacaggagtgctgatcagttc

SEQ ID NO: 4927696 - DNA, 25 bp, Homo sapien
atatagcagccacccctttagatct

SEQ ID NO: 4927697 - DNA, 25 bp, Homo sapien
tatcaatactgaataatctcatata

SEQ ID NO: 4927698 - DNA, 25 bp, Homo sapien
ctttagatcttctagaatccatcat

SEQ ID NO: 4927699 - DNA, 25 bp, Homo sapien
tagaatccatcatttacccaaagca

SEQ ID NO: 4927700 - DNA, 25 bp, Homo sapien
gtcctcttctaggagtaactcacca

SEQ ID NO: 4927701 - DNA, 25 bp, Homo sapien
aggagtaactcaccaactaaacttg

SEQ ID NO: 4927702 - DNA, 25 bp, Homo sapien
tctaggagtaactcaccaactaaac

SEQ ID NO: 4927703 - DNA, 25 bp, Homo sapien
tcttctaggagtaactcaccaacta

SEQ ID NO: 4927704 - DNA, 25 bp, Homo sapien
ctcagcatttcggaagggagaggac

SEQ ID NO: 4927705 - DNA, 25 bp, Homo sapien
agctgggactcagcatttcggaagg

SEQ ID NO: 4927706 - DNA, 25 bp, Homo sapien
tcagcatttcggaagggagaggaca

SEQ ID NO: 4927707 - DNA, 25 bp, Homo sapien
ggactcagcatttcggaagggagag

SEQ ID NO: 4927708 - DNA, 25 bp, Homo sapien
tgcacaagtttggagggtttagcct

SEQ ID NO: 4927709 - DNA, 25 bp, Homo sapien
gaagcggagtctgctaagtgcacaa

SEQ ID NO: 4927710 - DNA, 25 bp, Homo sapien
tcatgccgactcctcattagagagc

SEQ ID NO: 4927711 - DNA, 25 bp, Homo sapien
ccctggaccagatatagtgacgttg

SEQ ID NO: 4927712 - DNA, 25 bp, Homo sapien
taaaatcaccgtatggttcgccatg

SEQ ID NO: 4927713 - DNA, 25 bp, Homo sapien
tgatcttggagagcaccactatttc

SEQ ID NO: 4927714 - DNA, 25 bp, Homo sapien
tgtcaacacatacgaaataggctat

SEQ ID NO: 4927715 - DNA, 25 bp, Homo sapien
tatgagattaaccttctgacttcat

SEQ ID NO: 4927716 - DNA, 25 bp, Homo sapien
tgcatcgatgaggactgccagttct

SEQ ID NO: 4927717 - DNA, 25 bp, Homo sapien
tgtggccactgctaatgcggctgac

SEQ ID NO: 4927718 - DNA, 25 bp, Homo sapien
gttctcatgccattcctgcgccttg

SEQ ID NO: 4927719 - DNA, 25 bp, Homo sapien
tcagtaggatgggtcctgcatcgat

SEQ ID NO: 4927720 - DNA, 25 bp, Homo sapien
gagaaacagtttccgcctgagcctt

SEQ ID NO: 4927721 - DNA, 25 bp, Homo sapien
cgccctgcggttatacattgagaaa

SEQ ID NO: 4927722 - DNA, 25 bp, Homo sapien
caaaatcgctgagaaaatagtgcat

SEQ ID NO: 4927723 - DNA, 25 bp, Homo sapien
tagtccgagttaacagagcaggaag

SEQ ID NO: 4927724 - DNA, 25 bp, Homo sapien
cctggcttctggtggatgccggcat

SEQ ID NO: 4927725 - DNA, 25 bp, Homo sapien
gatgccggcatccttggtgttcctg

SEQ ID NO: 4927726 - DNA, 25 bp, Homo sapien
gcatccttggtgttcctgggcttgt

SEQ ID NO: 4927727 - DNA, 25 bp, Homo sapien
ggtgttcctgggcttgtacgcatca

SEQ ID NO: 4927728 - DNA, 25 bp, Homo sapien
cagtaagattgctgtggcctatgca

SEQ ID NO: 4927729 - DNA, 25 bp, Homo sapien
tagcaaaccggtctgtgggccaatt

SEQ ID NO: 4927730 - DNA, 25 bp, Homo sapien
tgggccaatttactcaccgtctgtt

SEQ ID NO: 4927731 - DNA, 25 bp, Homo sapien
cacactctgcatgttgaggagtaag

SEQ ID NO: 4927732 - DNA, 25 bp, Homo sapien
tctggataccggagagtctgcgaac

SEQ ID NO: 4927733 - DNA, 25 bp, Homo sapien
tctgcgaacttgagagaagggccgt

SEQ ID NO: 4927734 - DNA, 25 bp, Homo sapien
tcttgcacagtacccagatttggag

SEQ ID NO: 4927735 - DNA, 25 bp, Homo sapien
cttcagtgtcccaaggaaggatctt

SEQ ID NO: 4927736 - DNA, 25 bp, Homo sapien
catgtatctcgtaaaacacctctga

SEQ ID NO: 4927737 - DNA, 25 bp, Homo sapien
gaatctgatacatgtatctcgtaaa

SEQ ID NO: 4927738 - DNA, 25 bp, Homo sapien
gtacagcagccttaagaatctgata

SEQ ID NO: 4927739 - DNA, 25 bp, Homo sapien
tctcgtaaaacacctctgatactta

SEQ ID NO: 4927740 - DNA, 25 bp, Homo sapien
tgaagccttctggataacattggcc

SEQ ID NO: 4927741 - DNA, 25 bp, Homo sapien
gaaatgagatcaacctgtagtaggg

SEQ ID NO: 4927742 - DNA, 25 bp, Homo sapien
tacattcactgggaatctccacgtg

SEQ ID NO: 4927743 - DNA, 25 bp, Homo sapien
tgtgaccctctaatgaacgccaact

SEQ ID NO: 4927744 - DNA, 25 bp, Homo sapien
aataagcacctgctgtagacagaag

SEQ ID NO: 4927745 - DNA, 25 bp, Homo sapien
caaacgggccatctaaggcagctaa

SEQ ID NO: 4927746 - DNA, 25 bp, Homo sapien
gggatatcatcctttcaaacgggcc

SEQ ID NO: 4927747 - DNA, 25 bp, Homo sapien
taacgttaaaagctgtgatgtgtgc

SEQ ID NO: 4927748 - DNA, 25 bp, Homo sapien
tcccacagaaggagcgagaacttgc

SEQ ID NO: 4927749 - DNA, 25 bp, Homo sapien
tctttagtaaaacagtcgcacttgg

SEQ ID NO: 4927750 - DNA, 25 bp, Homo sapien
gaagaattttgagaactacgagaca

SEQ ID NO: 4927751 - DNA, 25 bp, Homo sapien
gaggaaaacacttagcactctttga

SEQ ID NO: 4927752 - DNA, 25 bp, Homo sapien
ccattagttaggacttgtgctttct

SEQ ID NO: 4927753 - DNA, 25 bp, Homo sapien
taattgatctgcatgttagagagcc

SEQ ID NO: 4927754 - DNA, 25 bp, Homo sapien
taagacagacagtagtttggataga

SEQ ID NO: 4927755 - DNA, 25 bp, Homo sapien
ttcctttagatgcagtacagcctgt

SEQ ID NO: 4927756 - DNA, 25 bp, Homo sapien
gctttgtccaagtcaccaggttgct

SEQ ID NO: 4927757 - DNA, 25 bp, Homo sapien
taaaattagggagttgagctcgttc

SEQ ID NO: 4927758 - DNA, 25 bp, Homo sapien
gaaacccagggaagctgtgtacaga

SEQ ID NO: 4927759 - DNA, 25 bp, Homo sapien
cacaaaccctttagtctgggctcag

SEQ ID NO: 4927760 - DNA, 25 bp, Homo sapien
caaggttgctgtgtagatggactgc

SEQ ID NO: 4927761 - DNA, 25 bp, Homo sapien
gagaagtgagaccacatgagggaaa

SEQ ID NO: 4927762 - DNA, 25 bp, Homo sapien
cccagaggagatgcattacaggaat

SEQ ID NO: 4927763 - DNA, 25 bp, Homo sapien
aggaacccctgaaagcattcctgaa

SEQ ID NO: 4927764 - DNA, 25 bp, Homo sapien
tatcctttcccttagagagttatgg

SEQ ID NO: 4927765 - DNA, 25 bp, Homo sapien
tccagggtatcttcccttgtcccag

SEQ ID NO: 4927766 - DNA, 25 bp, Homo sapien
ccagcccagaggatagtgaacaact

SEQ ID NO: 4927767 - DNA, 25 bp, Homo sapien
tgcccttattgttatgatactcccc

SEQ ID NO: 4927768 - DNA, 25 bp, Homo sapien
tgcgcggccagatcttccaacttag

SEQ ID NO: 4927769 - DNA, 25 bp, Homo sapien
aaactctagtggaagtggcaattgc

SEQ ID NO: 4927770 - DNA, 25 bp, Homo sapien
gaagttggtgtctttatcgctcccc

SEQ ID NO: 4927771 - DNA, 25 bp, Homo sapien
taatgatcagcgtttaaagtccaga

SEQ ID NO: 4927772 - DNA, 25 bp, Homo sapien
ctgtacatccgggtcacttgccctc

SEQ ID NO: 4927773 - DNA, 25 bp, Homo sapien
ctcggagctgccgcctggcttgtcg

SEQ ID NO: 4927774 - DNA, 25 bp, Homo sapien
atccgggtcacttgccctccccgct

SEQ ID NO: 4927775 - DNA, 25 bp, Homo sapien
ctccccgctcggagctgccgcctgg

SEQ ID NO: 4927776 - DNA, 25 bp, Homo sapien
tgcgcacggccggacaggtccgcgg

SEQ ID NO: 4927777 - DNA, 25 bp, Homo sapien
gcgcatgcgcacggccggacaggtc

SEQ ID NO: 4927778 - DNA, 25 bp, Homo sapien
ggacaggtccgcggcgccctcactt

SEQ ID NO: 4927779 - DNA, 25 bp, Homo sapien
cttgcggggcgggcgtgcggcgcat

SEQ ID NO: 4927780 - DNA, 25 bp, Homo sapien
cagccagtgagtctgtaaatggagc

SEQ ID NO: 4927781 - DNA, 25 bp, Homo sapien
ccagtgagtctgtaaatggagccat

SEQ ID NO: 4927782 - DNA, 25 bp, Homo sapien
gccatgggcttggtctgcaaactgc

SEQ ID NO: 4927783 - DNA, 25 bp, Homo sapien
gccagtgagtctgtaaatggagcca

SEQ ID NO: 4927784 - DNA, 25 bp, Homo sapien
ctttattacgtatttattgtataca

SEQ ID NO: 4927785 - DNA, 25 bp, Homo sapien
cacattcatcttgttatcattgagt

SEQ ID NO: 4927786 - DNA, 25 bp, Homo sapien
tgtatatacaattttgcattctatt

SEQ ID NO: 4927787 - DNA, 25 bp, Homo sapien
tctccataggggtacatattttata

SEQ ID NO: 4927788 - DNA, 25 bp, Homo sapien
tatttccattaatagagtaactacc

SEQ ID NO: 4927789 - DNA, 25 bp, Homo sapien
cattaatagagtaactaccagccat

SEQ ID NO: 4927790 - DNA, 25 bp, Homo sapien
ctttctgcctgtgtgattctatttc

SEQ ID NO: 4927791 - DNA, 25 bp, Homo sapien
ttccattaatagagtaactaccagc

SEQ ID NO: 4927792 - DNA, 25 bp, Homo sapien
aagacagtatagacataaatccctc

SEQ ID NO: 4927793 - DNA, 25 bp, Homo sapien
ataaatccctctaatcttccccctg

SEQ ID NO: 4927794 - DNA, 25 bp, Homo sapien
tcttccccctgggtccagagttcat

SEQ ID NO: 4927795 - DNA, 25 bp, Homo sapien
ctttggaaataaagacagtatagac

SEQ ID NO: 4927796 - DNA, 25 bp, Homo sapien
agcctcgatgtgtaggtaggagttt

SEQ ID NO: 4927797 - DNA, 25 bp, Homo sapien
ccgacgtctgtagagatttctgatg

SEQ ID NO: 4927798 - DNA, 25 bp, Homo sapien
gcggaaacgtgggagtgttgtggaa

SEQ ID NO: 4927799 - DNA, 25 bp, Homo sapien
ctaatatctctatagatttccgacg

SEQ ID NO: 4927800 - DNA, 25 bp, Homo sapien
tttctacaataagcagggccttggg

SEQ ID NO: 4927801 - DNA, 25 bp, Homo sapien
gaaattccatgacggcctgcaaggt

SEQ ID NO: 4927802 - DNA, 25 bp, Homo sapien
ccatgacggcctgcaaggtgttttg

SEQ ID NO: 4927803 - DNA, 25 bp, Homo sapien
ttccatgacggcctgcaaggtgttt

SEQ ID NO: 4927804 - DNA, 25 bp, Homo sapien
gggaaattccatgacggcctgcaag

SEQ ID NO: 4927805 - DNA, 25 bp, Homo sapien
taagaacctcctacctctgttgaaa

SEQ ID NO: 4927806 - DNA, 25 bp, Homo sapien
ccaaactgtacctctactatgggaa

SEQ ID NO: 4927807 - DNA, 25 bp, Homo sapien
tacccagttggtaagtaacagagct

SEQ ID NO: 4927808 - DNA, 25 bp, Homo sapien
taaagtggatggtgatggctacaag

SEQ ID NO: 4927809 - DNA, 25 bp, Homo sapien
agcaagactatgtcttaaaaacaaa

SEQ ID NO: 4927810 - DNA, 25 bp, Homo sapien
gcaagactatgtcttaaaaacaaac

SEQ ID NO: 4927811 - DNA, 25 bp, Homo sapien
gccaggcatgcttgcttgaacctgg

SEQ ID NO: 4927812 - DNA, 25 bp, Homo sapien
ttagccaggcatgcttgcttgaacc

SEQ ID NO: 4927813 - DNA, 25 bp, Homo sapien
gggtcccaatatcctttatactgaa

SEQ ID NO: 4927814 - DNA, 25 bp, Homo sapien
taaactcaagttgaactgagcattt

SEQ ID NO: 4927815 - DNA, 25 bp, Homo sapien
caggaagtgattcaggggacagaat

SEQ ID NO: 4927816 - DNA, 25 bp, Homo sapien
ggacagaatgactaagaccgtttta

SEQ ID NO: 4927817 - DNA, 25 bp, Homo sapien
gtgagccaccacgcccagcgcatat

SEQ ID NO: 4927818 - DNA, 25 bp, Homo sapien
gagccaccacgcccagcgcatattg

SEQ ID NO: 4927819 - DNA, 25 bp, Homo sapien
ccaccacgcccagcgcatattgttt

SEQ ID NO: 4927820 - DNA, 25 bp, Homo sapien
gccaccacgcccagcgcatattgtt

SEQ ID NO: 4927821 - DNA, 25 bp, Homo sapien
ctgtagttccagccattctgaaggc

SEQ ID NO: 4927822 - DNA, 25 bp, Homo sapien
gaatggggggctaactctgtctctc

SEQ ID NO: 4927823 - DNA, 25 bp, Homo sapien
cagtttaactgagatggtattggga

SEQ ID NO: 4927824 - DNA, 25 bp, Homo sapien
gggatctggcttttcagtacaccat

SEQ ID NO: 4927825 - DNA, 25 bp, Homo sapien
cttctgtagtggcttggtgacagcc

SEQ ID NO: 4927826 - DNA, 25 bp, Homo sapien
ttctgtagtggcttggtgacagcca

SEQ ID NO: 4927827 - DNA, 25 bp, Homo sapien
agtggcttggtgacagccagctgca

SEQ ID NO: 4927828 - DNA, 25 bp, Homo sapien
ggcttggtgacagccagctgcaggc

SEQ ID NO: 4927829 - DNA, 25 bp, Homo sapien
tgcagagcgcacgtgagcgctgcct

SEQ ID NO: 4927830 - DNA, 25 bp, Homo sapien
cggagcccggcgatgcgcaggacgt

SEQ ID NO: 4927831 - DNA, 25 bp, Homo sapien
gcgtccccgcatccctgtggctggt

SEQ ID NO: 4927832 - DNA, 25 bp, Homo sapien
tgcgcaggacgtgctcccgggcggt

SEQ ID NO: 4927833 - DNA, 25 bp, Homo sapien
gtgttatcctgactggtagagcctg

SEQ ID NO: 4927834 - DNA, 25 bp, Homo sapien
ggcattcctagaggacccaggacta

SEQ ID NO: 4927835 - DNA, 25 bp, Homo sapien
tgaattaaagccctagcgtgtgcaa

SEQ ID NO: 4927836 - DNA, 25 bp, Homo sapien
gactattttgaggaggacaggtggg

SEQ ID NO: 4927837 - DNA, 25 bp, Homo sapien
tgtttagagttgaggcccagtagga

SEQ ID NO: 4927838 - DNA, 25 bp, Homo sapien
cattctttctcgcagcctgtggcct

SEQ ID NO: 4927839 - DNA, 25 bp, Homo sapien
gaaccctcagtatgtaagtcttgga

SEQ ID NO: 4927840 - DNA, 25 bp, Homo sapien
tgtctgcagcagacgtcctgtgacg

SEQ ID NO: 4927841 - DNA, 25 bp, Homo sapien
caccaatgggaaatttcgtcagcag

SEQ ID NO: 4927842 - DNA, 25 bp, Homo sapien
ggagccatattaaagcaccaatggg

SEQ ID NO: 4927843 - DNA, 25 bp, Homo sapien
attgattgttttctgggccccactg

SEQ ID NO: 4927844 - DNA, 25 bp, Homo sapien
cgtcagcagtgcttaatcaaaggca

SEQ ID NO: 4927845 - DNA, 25 bp, Homo sapien
attgcatctggtccttgggtgcgtg

SEQ ID NO: 4927846 - DNA, 25 bp, Homo sapien
ctgagggtgtcaattgcatctggtc

SEQ ID NO: 4927847 - DNA, 25 bp, Homo sapien
tggtccttgggtgcgtggcgcacgt

SEQ ID NO: 4927848 - DNA, 25 bp, Homo sapien
tggcgcacgtgggccttgcctctgc

SEQ ID NO: 4927849 - DNA, 25 bp, Homo sapien
catctgggctctcttctcctcagca

SEQ ID NO: 4927850 - DNA, 25 bp, Homo sapien
acatctgggctctcttctcctcagc

SEQ ID NO: 4927851 - DNA, 25 bp, Homo sapien
tcacatctgggctctcttctcctca

SEQ ID NO: 4927852 - DNA, 25 bp, Homo sapien
atctgggctctcttctcctcagcac

SEQ ID NO: 4927853 - DNA, 25 bp, Homo sapien
ttggggagagggaccacttttcaga

SEQ ID NO: 4927854 - DNA, 25 bp, Homo sapien
gagggtgtgcccaacttctcttggg

SEQ ID NO: 4927855 - DNA, 25 bp, Homo sapien
cttttcagaaccctcttcctgtgct

SEQ ID NO: 4927856 - DNA, 25 bp, Homo sapien
cagggagcaaggatgcagagggtgt

SEQ ID NO: 4927857 - DNA, 25 bp, Homo sapien
tgtatgtgtgattatccgagggtct

SEQ ID NO: 4927858 - DNA, 25 bp, Homo sapien
tatccgagggtctctcatgcttgag

SEQ ID NO: 4927859 - DNA, 25 bp, Homo sapien
tctctcatgcttgagtgtgataacc

SEQ ID NO: 4927860 - DNA, 25 bp, Homo sapien
catgcttgagtgtgataaccttgga

SEQ ID NO: 4927861 - DNA, 25 bp, Homo sapien
taagttgtcttgatacccagtgggg

SEQ ID NO: 4927862 - DNA, 25 bp, Homo sapien
aagttgtcttgatacccagtggggg

SEQ ID NO: 4927863 - DNA, 25 bp, Homo sapien
ctaagttgtcttgatacccagtggg

SEQ ID NO: 4927864 - DNA, 25 bp, Homo sapien
gattttccgctggttcctaacagac

SEQ ID NO: 4927865 - DNA, 25 bp, Homo sapien
gctgggctgattttccgctggttcc

SEQ ID NO: 4927866 - DNA, 25 bp, Homo sapien
ggtttcctgttctgatccgagctgg

SEQ ID NO: 4927867 - DNA, 25 bp, Homo sapien
tttcctgttctgatccgagctgggc

SEQ ID NO: 4927868 - DNA, 25 bp, Homo sapien
gcatttggtgttgcgatttgtagca

SEQ ID NO: 4927869 - DNA, 25 bp, Homo sapien
cttgatgcatttggtgttgcgattt

SEQ ID NO: 4927870 - DNA, 25 bp, Homo sapien
gtagcactttgcattgtctgcatac

SEQ ID NO: 4927871 - DNA, 25 bp, Homo sapien
gcgatttgtagcactttgcattgtc

SEQ ID NO: 4927872 - DNA, 25 bp, Homo sapien
gcccggcctgtgtgtaagctttgaa

SEQ ID NO: 4927873 - DNA, 25 bp, Homo sapien
ggtaaatcactattctattaacgag

SEQ ID NO: 4927874 - DNA, 25 bp, Homo sapien
tattctattaacgagctgattcctc

SEQ ID NO: 4927875 - DNA, 25 bp, Homo sapien
gtaagctttgaacatggtaaatcac

SEQ ID NO: 4927876 - DNA, 25 bp, Homo sapien
catcagcaccttgtgtaacctccgg

SEQ ID NO: 4927877 - DNA, 25 bp, Homo sapien
tgttgagcttgctaggcatggcctg

SEQ ID NO: 4927878 - DNA, 25 bp, Homo sapien
ggctcaggccatgaccagatgttga

SEQ ID NO: 4927879 - DNA, 25 bp, Homo sapien
caagttgtggggctcaggccatgac

SEQ ID NO: 4927880 - DNA, 25 bp, Homo sapien
tgggcctagtctgttccgggttctg

SEQ ID NO: 4927881 - DNA, 25 bp, Homo sapien
agcctttgggcctagtctgttccgg

SEQ ID NO: 4927882 - DNA, 25 bp, Homo sapien
ccgggagcctttgggcctagtctgt

SEQ ID NO: 4927883 - DNA, 25 bp, Homo sapien
agtctgttccgggttctgccactct

SEQ ID NO: 4927884 - DNA, 25 bp, Homo sapien
taagccgctgaacagattcacagga

SEQ ID NO: 4927885 - DNA, 25 bp, Homo sapien
ttgtctgaatgtgcaagcctggttc

SEQ ID NO: 4927886 - DNA, 25 bp, Homo sapien
aagccgctgaacagattcacaggaa

SEQ ID NO: 4927887 - DNA, 25 bp, Homo sapien
ctgaatgtgcaagcctggttcctgc

SEQ ID NO: 4927888 - DNA, 25 bp, Homo sapien
acaggctgcttgacaatggacctct

SEQ ID NO: 4927889 - DNA, 25 bp, Homo sapien
caggctgcttgacaatggacctctt

SEQ ID NO: 4927890 - DNA, 25 bp, Homo sapien
tcctccatgcttgacctgcagttgg

SEQ ID NO: 4927891 - DNA, 25 bp, Homo sapien
cgagtgagcacatgaaaccggtcaa

SEQ ID NO: 4927892 - DNA, 25 bp, Homo sapien
gtcaaaaataacgagcagagcgccc

SEQ ID NO: 4927893 - DNA, 25 bp, Homo sapien
tccccggtgacaagtgataaattag

SEQ ID NO: 4927894 - DNA, 25 bp, Homo sapien
ctaggagcctgcacagattgagctc

SEQ ID NO: 4927895 - DNA, 25 bp, Homo sapien
ctgaagaaaggagcgtagctcatcc

SEQ ID NO: 4927896 - DNA, 25 bp, Homo sapien
taggagcctgcacagattgagctcc

SEQ ID NO: 4927897 - DNA, 25 bp, Homo sapien
ggcctttggttgcaaagacagcccc

SEQ ID NO: 4927898 - DNA, 25 bp, Homo sapien
cccatattctgtccctgagaagcgg

SEQ ID NO: 4927899 - DNA, 25 bp, Homo sapien
tgagaagcggagaaacacaggtaag

SEQ ID NO: 4927900 - DNA, 25 bp, Homo sapien
cacatggtccacaagcattccattt

SEQ ID NO: 4927901 - DNA, 25 bp, Homo sapien
acatctctagcaggggtgtctgagc

SEQ ID NO: 4927902 - DNA, 25 bp, Homo sapien
ggtgtctgagcacgtgtccctccca

SEQ ID NO: 4927903 - DNA, 25 bp, Homo sapien
aggggtgtctgagcacgtgtccctc

SEQ ID NO: 4927904 - DNA, 25 bp, Homo sapien
cacatctctagcaggggtgtctgag

SEQ ID NO: 4927905 - DNA, 25 bp, Homo sapien
cacgtccacttgtgcgcccgttgat

SEQ ID NO: 4927906 - DNA, 25 bp, Homo sapien
actgtgggccttcggcccctttctg

SEQ ID NO: 4927907 - DNA, 25 bp, Homo sapien
cttacatgttgtcgtgtggacagca

SEQ ID NO: 4927908 - DNA, 25 bp, Homo sapien
cccgttgatgtgaacagggcaagaa

SEQ ID NO: 4927909 - DNA, 25 bp, Homo sapien
tattgcctagaacttcaacatgttg

SEQ ID NO: 4927910 - DNA, 25 bp, Homo sapien
tataggaatcctgtagtgccactag

SEQ ID NO: 4927911 - DNA, 25 bp, Homo sapien
ttaaactcagtaagccactatctgc

SEQ ID NO: 4927912 - DNA, 25 bp, Homo sapien
ccagcttactgtgggacataggaaa

SEQ ID NO: 4927913 - DNA, 25 bp, Homo sapien
ccaagtttttgaacgctgctatgaa

SEQ ID NO: 4927914 - DNA, 25 bp, Homo sapien
tattagcctctacattacgcatgca

SEQ ID NO: 4927915 - DNA, 25 bp, Homo sapien
cactggctttctcaagagtatggat

SEQ ID NO: 4927916 - DNA, 25 bp, Homo sapien
aatagttgtactccacagtcagtgg

SEQ ID NO: 4927917 - DNA, 25 bp, Homo sapien
cttcaccagtatgagggtagcctcg

SEQ ID NO: 4927918 - DNA, 25 bp, Homo sapien
gtaagaaactcatggaagggccacc

SEQ ID NO: 4927919 - DNA, 25 bp, Homo sapien
tgccttcatgtaaccctgggcacag

SEQ ID NO: 4927920 - DNA, 25 bp, Homo sapien
tgtctgactagcaaaacgcagaacc

SEQ ID NO: 4927921 - DNA, 25 bp, Homo sapien
ggcgccctggttcagagcaaggact

SEQ ID NO: 4927922 - DNA, 25 bp, Homo sapien
taaatgtatcacacaagcctggaga

SEQ ID NO: 4927923 - DNA, 25 bp, Homo sapien
aatggtctgtatgcatcctacctgg

SEQ ID NO: 4927924 - DNA, 25 bp, Homo sapien
tttgagtatggtaccccgcagtggg

SEQ ID NO: 4927925 - DNA, 25 bp, Homo sapien
tatcatgtaaccttgtgagttgtag

SEQ ID NO: 4927926 - DNA, 25 bp, Homo sapien
tactaaagcggaagaaagttgagca

SEQ ID NO: 4927927 - DNA, 25 bp, Homo sapien
gagcatgttgcctgtggtccctcag

SEQ ID NO: 4927928 - DNA, 25 bp, Homo sapien
ccagtaagcaggctaagtcaagatt

SEQ ID NO: 4927929 - DNA, 25 bp, Homo sapien
catccttctataagcctgcaaggcc

SEQ ID NO: 4927930 - DNA, 25 bp, Homo sapien
gatttgtgaccccagtctagtgctc

SEQ ID NO: 4927931 - DNA, 25 bp, Homo sapien
ggcccaccttggatacagacggaag

SEQ ID NO: 4927932 - DNA, 25 bp, Homo sapien
tccttggattttcagtgccagcagc

SEQ ID NO: 4927933 - DNA, 25 bp, Homo sapien
ttttgctgctcacccgctagaaagt

SEQ ID NO: 4927934 - DNA, 25 bp, Homo sapien
acctgtccaggtgctatgtcttccc

SEQ ID NO: 4927935 - DNA, 25 bp, Homo sapien
gctgctcacccgctagaaagttctt

SEQ ID NO: 4927936 - DNA, 25 bp, Homo sapien
tccaggtgctatgtcttccccagac

SEQ ID NO: 4927937 - DNA, 25 bp, Homo sapien
aggtagcctttgcatagctatgaga

SEQ ID NO: 4927938 - DNA, 25 bp, Homo sapien
ggtagcctttgcatagctatgagag

SEQ ID NO: 4927939 - DNA, 25 bp, Homo sapien
tcttgtcaaccagaccatagacgcc

SEQ ID NO: 4927940 - DNA, 25 bp, Homo sapien
tgtcaaccagaccatagacgcctac

SEQ ID NO: 4927941 - DNA, 25 bp, Homo sapien
ggataattgagaggtacccagagct

SEQ ID NO: 4927942 - DNA, 25 bp, Homo sapien
ggtttcatggcttctcgctacacaa

SEQ ID NO: 4927943 - DNA, 25 bp, Homo sapien
taccattaaagtgttgcctcagcca

SEQ ID NO: 4927944 - DNA, 25 bp, Homo sapien
cgaggaatcccgctcataggagggt

SEQ ID NO: 4927945 - DNA, 25 bp, Homo sapien
taaatggatcaatcaataaaacgtg

SEQ ID NO: 4927946 - DNA, 25 bp, Homo sapien
cactgtagcctgttgacacataaaa

SEQ ID NO: 4927947 - DNA, 25 bp, Homo sapien
taaaattaaccatgaagctaggcat

SEQ ID NO: 4927948 - DNA, 25 bp, Homo sapien
gactagtatttgaccaaacaccagg

SEQ ID NO: 4927949 - DNA, 25 bp, Homo sapien
aacacctggtgcactgtgagagagt

SEQ ID NO: 4927950 - DNA, 25 bp, Homo sapien
gagtcacccagatttggagttgtca

SEQ ID NO: 4927951 - DNA, 25 bp, Homo sapien
gtcatcaggtccaaattgctccccg

SEQ ID NO: 4927952 - DNA, 25 bp, Homo sapien
taggatgcctactggacaaatgccc

SEQ ID NO: 4927953 - DNA, 25 bp, Homo sapien
cacacgtagtgtcaggaaatggcaa

SEQ ID NO: 4927954 - DNA, 25 bp, Homo sapien
gtacatgtatgatagtgacacacgt

SEQ ID NO: 4927955 - DNA, 25 bp, Homo sapien
atggcaagcaggtagtaaaatctca

SEQ ID NO: 4927956 - DNA, 25 bp, Homo sapien
aatctcaagcattgaccagtcagga

SEQ ID NO: 4927957 - DNA, 25 bp, Homo sapien
ttcctgtcccatcagtggcacagaa

SEQ ID NO: 4927958 - DNA, 25 bp, Homo sapien
tatgcaaagccttgagaatacaaca

SEQ ID NO: 4927959 - DNA, 25 bp, Homo sapien
tttctggagagccacagaattctgc

SEQ ID NO: 4927960 - DNA, 25 bp, Homo sapien
gctgtatgccaaggctatgcaaagc

SEQ ID NO: 4927961 - DNA, 25 bp, Homo sapien
caagaattggatgtgtctcttctcc

SEQ ID NO: 4927962 - DNA, 25 bp, Homo sapien
tgccccatccagagcgctgaagata

SEQ ID NO: 4927963 - DNA, 25 bp, Homo sapien
aagagacctgcaaaatggattgctc

SEQ ID NO: 4927964 - DNA, 25 bp, Homo sapien
tgtttctgttactggccttcggagc

SEQ ID NO: 4927965 - DNA, 25 bp, Homo sapien
ccccgccaattgcttggattacagg

SEQ ID NO: 4927966 - DNA, 25 bp, Homo sapien
aatgaaggtcatacaggaagtttac

SEQ ID NO: 4927967 - DNA, 25 bp, Homo sapien
tacccttcgacttcttatagacttg

SEQ ID NO: 4927968 - DNA, 25 bp, Homo sapien
tgagccaccattcctcgtcctgaaa

SEQ ID NO: 4927969 - DNA, 25 bp, Homo sapien
taatgaaagatagacctcggcctcc

SEQ ID NO: 4927970 - DNA, 25 bp, Homo sapien
ggataacgggctatttgtatactgc

SEQ ID NO: 4927971 - DNA, 25 bp, Homo sapien
gaagcaattgtaaggaataaacggc

SEQ ID NO: 4927972 - DNA, 25 bp, Homo sapien
catctccagtgactaggataacggg

SEQ ID NO: 4927973 - DNA, 25 bp, Homo sapien
tgggcagtattcaggcaagccagaa

SEQ ID NO: 4927974 - DNA, 25 bp, Homo sapien
ctgtctttctgccagttggctgctc

SEQ ID NO: 4927975 - DNA, 25 bp, Homo sapien
atgatagtacagtgtgacctacaac

SEQ ID NO: 4927976 - DNA, 25 bp, Homo sapien
aagccagaaatgatagtacagtgtg

SEQ ID NO: 4927977 - DNA, 25 bp, Homo sapien
gtggtaggaaagaccattttccata

SEQ ID NO: 4927978 - DNA, 25 bp, Homo sapien
aaggggaattgtaggtgcctgctac

SEQ ID NO: 4927979 - DNA, 25 bp, Homo sapien
tggtaggaaagaccattttccataa

SEQ ID NO: 4927980 - DNA, 25 bp, Homo sapien
tttccataaggggaattgtaggtgc

SEQ ID NO: 4927981 - DNA, 25 bp, Homo sapien
gagtccagtatgagtctggtgctca

SEQ ID NO: 4927982 - DNA, 25 bp, Homo sapien
caagcccagaaatccgaggaatgac

SEQ ID NO: 4927983 - DNA, 25 bp, Homo sapien
cagaaagcgactgagcattgtggtc

SEQ ID NO: 4927984 - DNA, 25 bp, Homo sapien
tgacgttgagtccagtatgagtctg

SEQ ID NO: 4927985 - DNA, 25 bp, Homo sapien
tgtaaaaacccaagtttgatgatca

SEQ ID NO: 4927986 - DNA, 25 bp, Homo sapien
gatgtaaaaacccaagtttgatgat

SEQ ID NO: 4927987 - DNA, 25 bp, Homo sapien
aatgatgtaaaaacccaagtttgat

SEQ ID NO: 4927988 - DNA, 25 bp, Homo sapien
gtaaaaacccaagtttgatgatcat

SEQ ID NO: 4927989 - DNA, 25 bp, Homo sapien
gctgctgctttgctgtggcaagaag

SEQ ID NO: 4927990 - DNA, 25 bp, Homo sapien
gaagcgtctagcacactgagtggat

SEQ ID NO: 4927991 - DNA, 25 bp, Homo sapien
ggagaggtagatgcacaatttggtt

SEQ ID NO: 4927992 - DNA, 25 bp, Homo sapien
tggttttcacactttggctggtgcc

SEQ ID NO: 4927993 - DNA, 25 bp, Homo sapien
ttatcaatcttatcagaagccttac

SEQ ID NO: 4927994 - DNA, 25 bp, Homo sapien
tttatcaatcttatcagaagcctta

SEQ ID NO: 4927995 - DNA, 25 bp, Homo sapien
aggagattccgggaccatctgttca

SEQ ID NO: 4927996 - DNA, 25 bp, Homo sapien
tttcaagtaatcaggagattccggg

SEQ ID NO: 4927997 - DNA, 25 bp, Homo sapien
tggtcattttggattcttgcacagt

SEQ ID NO: 4927998 - DNA, 25 bp, Homo sapien
ggtcattttggattcttgcacagtc

SEQ ID NO: 4927999 - DNA, 25 bp, Homo sapien
cctccaggattgcaggggttaaaga

SEQ ID NO: 4928000 - DNA, 25 bp, Homo sapien
aatgccatgggcgtcttctcctcca

SEQ ID NO: 4928001 - DNA, 25 bp, Homo sapien
tgtctgcacccttactcccattcct

SEQ ID NO: 4928002 - DNA, 25 bp, Homo sapien
ggcttgttccaagaggagtgtcaga

SEQ ID NO: 4928003 - DNA, 25 bp, Homo sapien
tcacattgtcattttatcatcatca

SEQ ID NO: 4928004 - DNA, 25 bp, Homo sapien
cacattgtcattttatcatcatcaa

SEQ ID NO: 4928005 - DNA, 25 bp, Homo sapien
cattgtcattttatcatcatcaata

SEQ ID NO: 4928006 - DNA, 25 bp, Homo sapien
acattgtcattttatcatcatcaat

SEQ ID NO: 4928007 - DNA, 25 bp, Homo sapien
taaactaattctgtagtcggccttg

SEQ ID NO: 4928008 - DNA, 25 bp, Homo sapien
tagtcggccttgtgctctgtagagc

SEQ ID NO: 4928009 - DNA, 25 bp, Homo sapien
gtaatgaatgataaatctctagctg

SEQ ID NO: 4928010 - DNA, 25 bp, Homo sapien
aggttaaatatgtgagggccagaag

SEQ ID NO: 4928011 - DNA, 25 bp, Homo sapien
tagcagctaagtgagtcgtagaccc

SEQ ID NO: 4928012 - DNA, 25 bp, Homo sapien
ctgagaagggaggaatatcatggcc

SEQ ID NO: 4928013 - DNA, 25 bp, Homo sapien
gacgtgggctcattctgattcacag

SEQ ID NO: 4928014 - DNA, 25 bp, Homo sapien
tctacaggttctgatggaagcatca

SEQ ID NO: 4928015 - DNA, 25 bp, Homo sapien
gaatctttggtgctgaaccagaccc

SEQ ID NO: 4928016 - DNA, 25 bp, Homo sapien
ctttggaatctttggtgctgaacca

SEQ ID NO: 4928017 - DNA, 25 bp, Homo sapien
tctttggtgctgaaccagaccctca

SEQ ID NO: 4928018 - DNA, 25 bp, Homo sapien
tggaatctttggtgctgaaccagac

SEQ ID NO: 4928019 - DNA, 25 bp, Homo sapien
ggccatactcccagacctgctgttt

SEQ ID NO: 4928020 - DNA, 25 bp, Homo sapien
cttagacagtttcggccatactccc

SEQ ID NO: 4928021 - DNA, 25 bp, Homo sapien
agtttcggccatactcccagacctg

SEQ ID NO: 4928022 - DNA, 25 bp, Homo sapien
ttccaagacagccttagacagtttc

SEQ ID NO: 4928023 - DNA, 25 bp, Homo sapien
gaggatgcaagggtgtgcttttgct

SEQ ID NO: 4928024 - DNA, 25 bp, Homo sapien
ggatgcaagggtgtgcttttgcttt

SEQ ID NO: 4928025 - DNA, 25 bp, Homo sapien
gatgcaagggtgtgcttttgctttt

SEQ ID NO: 4928026 - DNA, 25 bp, Homo sapien
ctgaggatgcaagggtgtgcttttg

SEQ ID NO: 4928027 - DNA, 25 bp, Homo sapien
ggcagactgtctagagcctctcctg

SEQ ID NO: 4928028 - DNA, 25 bp, Homo sapien
tctggaagggcctgcaagcagggct

SEQ ID NO: 4928029 - DNA, 25 bp, Homo sapien
gcttttgcagagctcggggttacga

SEQ ID NO: 4928030 - DNA, 25 bp, Homo sapien
tcttgcaccagatgctcatgcactg

SEQ ID NO: 4928031 - DNA, 25 bp, Homo sapien
tcttttgtacgtgagcatgctggga

SEQ ID NO: 4928032 - DNA, 25 bp, Homo sapien
gtagacttgtaaaagcaaactcctg

SEQ ID NO: 4928033 - DNA, 25 bp, Homo sapien
ttgcaggcaggtgaattcacaggct

SEQ ID NO: 4928034 - DNA, 25 bp, Homo sapien
gcaagtcggtgcatgagtactgtaa

SEQ ID NO: 4928035 - DNA, 25 bp, Homo sapien
tattgcagcactgatgttttataaa

SEQ ID NO: 4928036 - DNA, 25 bp, Homo sapien
attgcagcactgatgttttataaaa

SEQ ID NO: 4928037 - DNA, 25 bp, Homo sapien
ttgcagcactgatgttttataaaag

SEQ ID NO: 4928038 - DNA, 25 bp, Homo sapien
ctattgcagcactgatgttttataa

SEQ ID NO: 4928039 - DNA, 25 bp, Homo sapien
tcatggtgctctgatgtggactgac

SEQ ID NO: 4928040 - DNA, 25 bp, Homo sapien
caaaatagagcatgacacggtttcg

SEQ ID NO: 4928041 - DNA, 25 bp, Homo sapien
tccatatgaaagattgaaccgcttt

SEQ ID NO: 4928042 - DNA, 25 bp, Homo sapien
acacggtttcgcctccaaacagaat

SEQ ID NO: 4928043 - DNA, 25 bp, Homo sapien
gaaccgctttgtgcttgaatcactg

SEQ ID NO: 4928044 - DNA, 25 bp, Homo sapien
cattgtacccaaaggctagggtcag

SEQ ID NO: 4928045 - DNA, 25 bp, Homo sapien
tgtagcattgtacccaaaggctagg

SEQ ID NO: 4928046 - DNA, 25 bp, Homo sapien
tgcatttctgtagcattgtacccaa

SEQ ID NO: 4928047 - DNA, 25 bp, Homo sapien
acccaaaggctagggtcagaatggc

SEQ ID NO: 4928048 - DNA, 25 bp, Homo sapien
taagggaaccagtgaccagtgctgc

SEQ ID NO: 4928049 - DNA, 25 bp, Homo sapien
tcgtcgagtcctctccattggtgtg

SEQ ID NO: 4928050 - DNA, 25 bp, Homo sapien
aggccagcctgatgggctctaccag

SEQ ID NO: 4928051 - DNA, 25 bp, Homo sapien
gaaagctgccccttctgattcttgc

SEQ ID NO: 4928052 - DNA, 25 bp, Homo sapien
tgcagagtgacttggttagtatgtg

SEQ ID NO: 4928053 - DNA, 25 bp, Homo sapien
agaattttccagatgcagagtgact

SEQ ID NO: 4928054 - DNA, 25 bp, Homo sapien
gatgcagagtgacttggttagtatg

SEQ ID NO: 4928055 - DNA, 25 bp, Homo sapien
ccagatgcagagtgacttggttagt

SEQ ID NO: 4928056 - DNA, 25 bp, Homo sapien
taatggcgacaacagagatgatgct

SEQ ID NO: 4928057 - DNA, 25 bp, Homo sapien
tgaatgctgtcgctggctaacactg

SEQ ID NO: 4928058 - DNA, 25 bp, Homo sapien
ttccatgagggcatcgggagcctgt

SEQ ID NO: 4928059 - DNA, 25 bp, Homo sapien
tcaaggcgacaaagtgcatcctgcc

SEQ ID NO: 4928060 - DNA, 25 bp, Homo sapien
ggtcacagagatcgcatactttaca

SEQ ID NO: 4928061 - DNA, 25 bp, Homo sapien
cagagatcgcatactttacaaggta

SEQ ID NO: 4928062 - DNA, 25 bp, Homo sapien
tggccgggttgagaaataaagagac

SEQ ID NO: 4928063 - DNA, 25 bp, Homo sapien
cacagagatcgcatactttacaagg

SEQ ID NO: 4928064 - DNA, 25 bp, Homo sapien
gacttgtggttgattgggatctgct

SEQ ID NO: 4928065 - DNA, 25 bp, Homo sapien
tggttcatgccggacttgtggttga

SEQ ID NO: 4928066 - DNA, 25 bp, Homo sapien
ggtttggctgatctagttgcatggc

SEQ ID NO: 4928067 - DNA, 25 bp, Homo sapien
tcaaggatctatgggttggttgtgg

SEQ ID NO: 4928068 - DNA, 25 bp, Homo sapien
gacgtagctgctaacctacttcgaa

SEQ ID NO: 4928069 - DNA, 25 bp, Homo sapien
tctcagagcatcagatgggtctcca

SEQ ID NO: 4928070 - DNA, 25 bp, Homo sapien
tgaggtacggacatagacgtagctg

SEQ ID NO: 4928071 - DNA, 25 bp, Homo sapien
cccagaaatgaaatcgccttagtat

SEQ ID NO: 4928072 - DNA, 25 bp, Homo sapien
tatgaacaatcaggaaatgatacca

SEQ ID NO: 4928073 - DNA, 25 bp, Homo sapien
ctctatgaacaatcaggaaatgata

SEQ ID NO: 4928074 - DNA, 25 bp, Homo sapien
ctatgaacaatcaggaaatgatacc

SEQ ID NO: 4928075 - DNA, 25 bp, Homo sapien
tgataccaaatggggtgtgtttggt

SEQ ID NO: 4928076 - DNA, 25 bp, Homo sapien
ctgggaagatagagttatcagaagg

SEQ ID NO: 4928077 - DNA, 25 bp, Homo sapien
gcctattggattatcctgggaagat

SEQ ID NO: 4928078 - DNA, 25 bp, Homo sapien
gagttatcagaagggcccatctcaa

SEQ ID NO: 4928079 - DNA, 25 bp, Homo sapien
tctctctgaactgtagcctattgga

SEQ ID NO: 4928080 - DNA, 25 bp, Homo sapien
cacatgtacttcatgggaagggaga

SEQ ID NO: 4928081 - DNA, 25 bp, Homo sapien
ggagatcccagttgaaatcagcaat

SEQ ID NO: 4928082 - DNA, 25 bp, Homo sapien
agaaaacccatagcgccgtgtcctt

SEQ ID NO: 4928083 - DNA, 25 bp, Homo sapien
tgcagggcctgatgtgccatgttcg

SEQ ID NO: 4928084 - DNA, 25 bp, Homo sapien
taggccgtcagaccaataggctggg

SEQ ID NO: 4928085 - DNA, 25 bp, Homo sapien
tgctctccgaggcttgtctacatgg

SEQ ID NO: 4928086 - DNA, 25 bp, Homo sapien
cagaggcatgtggataattgcatca

SEQ ID NO: 4928087 - DNA, 25 bp, Homo sapien
aagtggagtgctctccgaggcttgt

SEQ ID NO: 4928088 - DNA, 25 bp, Homo sapien
ttgtgttggcctccctgtgcattgc

SEQ ID NO: 4928089 - DNA, 25 bp, Homo sapien
gtgcattgcattgagaggatattca

SEQ ID NO: 4928090 - DNA, 25 bp, Homo sapien
gttggcctccctgtgcattgcattg

SEQ ID NO: 4928091 - DNA, 25 bp, Homo sapien
tccaggttgtgttggcctccctgtg

SEQ ID NO: 4928092 - DNA, 25 bp, Homo sapien
tgggctgtcctttggctaggtcatt

SEQ ID NO: 4928093 - DNA, 25 bp, Homo sapien
ctttgacccactgttctttgcggct

SEQ ID NO: 4928094 - DNA, 25 bp, Homo sapien
gacctcatcaatatgggccgagccg

SEQ ID NO: 4928095 - DNA, 25 bp, Homo sapien
gagccgtcacagagagccgttctgg

SEQ ID NO: 4928096 - DNA, 25 bp, Homo sapien
gatgggctgtaagcatttcaggtct

SEQ ID NO: 4928097 - DNA, 25 bp, Homo sapien
gctcggctcccgcgcctcgcctggc

SEQ ID NO: 4928098 - DNA, 25 bp, Homo sapien
atggtcgcccgccccttcctgcgcc

SEQ ID NO: 4928099 - DNA, 25 bp, Homo sapien
ggtcgcccgccccttcctgcgccgc

SEQ ID NO: 4928100 - DNA, 25 bp, Homo sapien
gccgcgctcggctcccgcgcctcgc

SEQ ID NO: 4928101 - DNA, 25 bp, Homo sapien
tcggatttcaccagaagggggtctg

SEQ ID NO: 4928102 - DNA, 25 bp, Homo sapien
gatttcaccagaagggggtctgcca

SEQ ID NO: 4928103 - DNA, 25 bp, Homo sapien
tcagattaggagcaaaatcccaaat

SEQ ID NO: 4928104 - DNA, 25 bp, Homo sapien
tctgtttcggatttcaccagaaggg

SEQ ID NO: 4928105 - DNA, 25 bp, Homo sapien
aggtagacacccccgaaatgtggca

SEQ ID NO: 4928106 - DNA, 25 bp, Homo sapien
ggtagacacccccgaaatgtggcat

SEQ ID NO: 4928107 - DNA, 25 bp, Homo sapien
ccaggtagacacccccgaaatgtgg

SEQ ID NO: 4928108 - DNA, 25 bp, Homo sapien
tccaggtagacacccccgaaatgtg

SEQ ID NO: 4928109 - DNA, 25 bp, Homo sapien
tgggatcaggatccttgtcttctcc

SEQ ID NO: 4928110 - DNA, 25 bp, Homo sapien
tccattggctcttgtcctgtggggc

SEQ ID NO: 4928111 - DNA, 25 bp, Homo sapien
gggatcaggatccttgtcttctcct

SEQ ID NO: 4928112 - DNA, 25 bp, Homo sapien
ggctgggatcaggatccttgtcttc

SEQ ID NO: 4928113 - DNA, 25 bp, Homo sapien
tccatggcagggatgccgtgttctc

SEQ ID NO: 4928114 - DNA, 25 bp, Homo sapien
tagaggctctaagggatccatggca

SEQ ID NO: 4928115 - DNA, 25 bp, Homo sapien
tcttgtggcagaacgctgcaggtac

SEQ ID NO: 4928116 - DNA, 25 bp, Homo sapien
ggagccccttgaagcattccttgtg

SEQ ID NO: 4928117 - DNA, 25 bp, Homo sapien
gtaggcgagagctcctcctttttct

SEQ ID NO: 4928118 - DNA, 25 bp, Homo sapien
ggaactgagataagtaggcgagagc

SEQ ID NO: 4928119 - DNA, 25 bp, Homo sapien
agctagctttgcctgctactgccat

SEQ ID NO: 4928120 - DNA, 25 bp, Homo sapien
ccactgtctgtggagagctagcttt

SEQ ID NO: 4928121 - DNA, 25 bp, Homo sapien
gtttctcctcccctggagagaatac

SEQ ID NO: 4928122 - DNA, 25 bp, Homo sapien
cagtttctcctcccctggagagaat

SEQ ID NO: 4928123 - DNA, 25 bp, Homo sapien
tcagtttctcctcccctggagagaa

SEQ ID NO: 4928124 - DNA, 25 bp, Homo sapien
agtttctcctcccctggagagaata

SEQ ID NO: 4928125 - DNA, 25 bp, Homo sapien
taacaaactctggtctgttcttatc

SEQ ID NO: 4928126 - DNA, 25 bp, Homo sapien
caccacttattataacaaactctgg

SEQ ID NO: 4928127 - DNA, 25 bp, Homo sapien
cactgagagcaccacttattataac

SEQ ID NO: 4928128 - DNA, 25 bp, Homo sapien
tattataacaaactctggtctgttc

SEQ ID NO: 4928129 - DNA, 25 bp, Homo sapien
tgatgacaactaataccgctattcg

SEQ ID NO: 4928130 - DNA, 25 bp, Homo sapien
tgacaactaataccgctattcgctg

SEQ ID NO: 4928131 - DNA, 25 bp, Homo sapien
tgatgatgacaactaataccgctat

SEQ ID NO: 4928132 - DNA, 25 bp, Homo sapien
actaataccgctattcgctgagtac

SEQ ID NO: 4928133 - DNA, 25 bp, Homo sapien
ctttgtcagtgactgtgggccccag

SEQ ID NO: 4928134 - DNA, 25 bp, Homo sapien
gtcagccatccaaggcctgaacaca

SEQ ID NO: 4928135 - DNA, 25 bp, Homo sapien
ttgtcagccatccaaggcctgaaca

SEQ ID NO: 4928136 - DNA, 25 bp, Homo sapien
aaggcctgaacacaaccttgtgtag

SEQ ID NO: 4928137 - DNA, 25 bp, Homo sapien
gaacacaaccttgtgtagtttgcaa

SEQ ID NO: 4928138 - DNA, 25 bp, Homo sapien
gatgagggtggtgtacaaacagcac

SEQ ID NO: 4928139 - DNA, 25 bp, Homo sapien
caccaacctgtgactgattcagcag

SEQ ID NO: 4928140 - DNA, 25 bp, Homo sapien
ttcagcagacctcagagacagggcc

SEQ ID NO: 4928141 - DNA, 25 bp, Homo sapien
tgaattgaaagcagagccagtcccc

SEQ ID NO: 4928142 - DNA, 25 bp, Homo sapien
agagcgccatccaggacacaacact

SEQ ID NO: 4928143 - DNA, 25 bp, Homo sapien
gccatccaggacacaacactgtctt

SEQ ID NO: 4928144 - DNA, 25 bp, Homo sapien
aaatccaggtcagagcgccatccag

SEQ ID NO: 4928145 - DNA, 25 bp, Homo sapien
aggtcagagcgccatccaggacaca

SEQ ID NO: 4928146 - DNA, 25 bp, Homo sapien
aagaagcaagcccaacattctgctc

SEQ ID NO: 4928147 - DNA, 25 bp, Homo sapien
caccagtgtcgtggctatggagata

SEQ ID NO: 4928148 - DNA, 25 bp, Homo sapien
agagttttcaccagtgtcgtggcta

SEQ ID NO: 4928149 - DNA, 25 bp, Homo sapien
ctatggagatagtcagagtttgagg

SEQ ID NO: 4928150 - DNA, 25 bp, Homo sapien
gcacatagctgagactctttgctga

SEQ ID NO: 4928151 - DNA, 25 bp, Homo sapien
gcttccatccggctgcctgcagatt

SEQ ID NO: 4928152 - DNA, 25 bp, Homo sapien
ttcctggatccactgaaaccacggg

SEQ ID NO: 4928153 - DNA, 25 bp, Homo sapien
gggagcccacactctagtgatgcag

SEQ ID NO: 4928154 - DNA, 25 bp, Homo sapien
gcagcccaactccgcaactagatat

SEQ ID NO: 4928155 - DNA, 25 bp, Homo sapien
ctaaatttccctgcatacttgggtt

SEQ ID NO: 4928156 - DNA, 25 bp, Homo sapien
agtttgtatcacgtttaagaaggca

SEQ ID NO: 4928157 - DNA, 25 bp, Homo sapien
tggctaccatttgtctaaacataac

SEQ ID NO: 4928158 - DNA, 25 bp, Homo sapien
tggcataaggaatgaagaagagatc

SEQ ID NO: 4928159 - DNA, 25 bp, Homo sapien
taattgccacaagagacttggcact

SEQ ID NO: 4928160 - DNA, 25 bp, Homo sapien
cccagtaattgccacaagagacttg

SEQ ID NO: 4928161 - DNA, 25 bp, Homo sapien
ccgagtccccagtaattgccacaag

SEQ ID NO: 4928162 - DNA, 25 bp, Homo sapien
gagtccccagtaattgccacaagag

SEQ ID NO: 4928163 - DNA, 25 bp, Homo sapien
ggttcctggtgacaacatcagtacc

SEQ ID NO: 4928164 - DNA, 25 bp, Homo sapien
ttcctggtgacaacatcagtaccat

SEQ ID NO: 4928165 - DNA, 25 bp, Homo sapien
gttcctggtgacaacatcagtacca

SEQ ID NO: 4928166 - DNA, 25 bp, Homo sapien
ccagaataccctgtggctgtcgtgc

SEQ ID NO: 4928167 - DNA, 25 bp, Homo sapien
gctgctcagccgagaaaggtgccaa

SEQ ID NO: 4928168 - DNA, 25 bp, Homo sapien
tcagctggtgcgagcccagaatacc

SEQ ID NO: 4928169 - DNA, 25 bp, Homo sapien
cacttgtatgacgtggcaggagctc

SEQ ID NO: 4928170 - DNA, 25 bp, Homo sapien
ctattagagtgtggccgatacggtc

SEQ ID NO: 4928171 - DNA, 25 bp, Homo sapien
ggagctccctggcatctattagagt

SEQ ID NO: 4928172 - DNA, 25 bp, Homo sapien
tagaaccttttgttgacaacagccc

SEQ ID NO: 4928173 - DNA, 25 bp, Homo sapien
taggagtcttatttagtaagcacag

SEQ ID NO: 4928174 - DNA, 25 bp, Homo sapien
tatagttgtggcttgtcgtccactg

SEQ ID NO: 4928175 - DNA, 25 bp, Homo sapien
tggtgatggttttagtatagttgtg

SEQ ID NO: 4928176 - DNA, 25 bp, Homo sapien
gtggcttgtcgtccactggtctctg

SEQ ID NO: 4928177 - DNA, 25 bp, Homo sapien
tctgactttgtagcacagagccaac

SEQ ID NO: 4928178 - DNA, 25 bp, Homo sapien
taaaatttactgttagccacacgat

SEQ ID NO: 4928179 - DNA, 25 bp, Homo sapien
tttactgttagccacacgatgccac

SEQ ID NO: 4928180 - DNA, 25 bp, Homo sapien
cacacgatgccacaggatccataga

SEQ ID NO: 4928181 - DNA, 25 bp, Homo sapien
tagatgccccctcttactgtatact

SEQ ID NO: 4928182 - DNA, 25 bp, Homo sapien
tcataacagcagtccaaagaagtca

SEQ ID NO: 4928183 - DNA, 25 bp, Homo sapien
cataacagcagtccaaagaagtcat

SEQ ID NO: 4928184 - DNA, 25 bp, Homo sapien
tggatgtttacatccacacataagt

SEQ ID NO: 4928185 - DNA, 25 bp, Homo sapien
agactgttgcttgctgcgattttca

SEQ ID NO: 4928186 - DNA, 25 bp, Homo sapien
taagtaaagattgttgtgaattcca

SEQ ID NO: 4928187 - DNA, 25 bp, Homo sapien
ttgatatgagcccagtggttttcca

SEQ ID NO: 4928188 - DNA, 25 bp, Homo sapien
aactcacgatcgtgaggacagtagc

SEQ ID NO: 4928189 - DNA, 25 bp, Homo sapien
tttttaagtgaccacatctcatgag

SEQ ID NO: 4928190 - DNA, 25 bp, Homo sapien
ccaccacctacacgggaattacaat

SEQ ID NO: 4928191 - DNA, 25 bp, Homo sapien
gaggaggaaaaggtgcgacacattt

SEQ ID NO: 4928192 - DNA, 25 bp, Homo sapien
cagaagggctaactctcaacagcag

SEQ ID NO: 4928193 - DNA, 25 bp, Homo sapien
gaattgcttgggaaccaagagctgc

SEQ ID NO: 4928194 - DNA, 25 bp, Homo sapien
tctgcctcagtgacacattttgtgc

SEQ ID NO: 4928195 - DNA, 25 bp, Homo sapien
tgtctcccatggcaccgaccagaga

SEQ ID NO: 4928196 - DNA, 25 bp, Homo sapien
gggagctccaatctcccaggagcag

SEQ ID NO: 4928197 - DNA, 25 bp, Homo sapien
gccccacaccataggaagatgcttt

SEQ ID NO: 4928198 - DNA, 25 bp, Homo sapien
cagccaggaacagcgttgacttctt

SEQ ID NO: 4928199 - DNA, 25 bp, Homo sapien
tctctgagtcagtatgggagctcca

SEQ ID NO: 4928200 - DNA, 25 bp, Homo sapien
ctttgacttgttctacctcccaact

SEQ ID NO: 4928201 - DNA, 25 bp, Homo sapien
caaaacggccgtccatattctccat

SEQ ID NO: 4928202 - DNA, 25 bp, Homo sapien
agacccagcatccaccctaacttca

SEQ ID NO: 4928203 - DNA, 25 bp, Homo sapien
aacttcctagtctgtggattcccca

SEQ ID NO: 4928204 - DNA, 25 bp, Homo sapien
aattctcccatactgcaagcatccg

SEQ ID NO: 4928205 - DNA, 25 bp, Homo sapien
tctactagttctgtctgcaagaggt

SEQ ID NO: 4928206 - DNA, 25 bp, Homo sapien
gttccatgcccagcgtctactagtt

SEQ ID NO: 4928207 - DNA, 25 bp, Homo sapien
tgtctgcaagaggtaatccatagtt

SEQ ID NO: 4928208 - DNA, 25 bp, Homo sapien
caccctgagccaagagattccaagt

SEQ ID NO: 4928209 - DNA, 25 bp, Homo sapien
tctcagcatgaagggaataattgtc

SEQ ID NO: 4928210 - DNA, 25 bp, Homo sapien
tttgcaatatgacaagtaggcgtcc

SEQ ID NO: 4928211 - DNA, 25 bp, Homo sapien
ttccaaaagcatacgtggcagcccg

SEQ ID NO: 4928212 - DNA, 25 bp, Homo sapien
aggttatcccaactggcactggccc

SEQ ID NO: 4928213 - DNA, 25 bp, Homo sapien
caggttatcccaactggcactggcc

SEQ ID NO: 4928214 - DNA, 25 bp, Homo sapien
ggttatcccaactggcactggccct

SEQ ID NO: 4928215 - DNA, 25 bp, Homo sapien
gttatcccaactggcactggccctg

SEQ ID NO: 4928216 - DNA, 25 bp, Homo sapien
gaatttgtgctgagacctcacagaa

SEQ ID NO: 4928217 - DNA, 25 bp, Homo sapien
caacgtgctcggctgcgttcaccat

SEQ ID NO: 4928218 - DNA, 25 bp, Homo sapien
ggcaatactgtttcaagtcaggctc

SEQ ID NO: 4928219 - DNA, 25 bp, Homo sapien
tcacagaatcctccaacgtgctcgg

SEQ ID NO: 4928220 - DNA, 25 bp, Homo sapien
cttcatcgtctctgtgaacacggac

SEQ ID NO: 4928221 - DNA, 25 bp, Homo sapien
ggttgtaggcaacaagcattgcctc

SEQ ID NO: 4928222 - DNA, 25 bp, Homo sapien
gaacacggactcatgcatgtgaagg

SEQ ID NO: 4928223 - DNA, 25 bp, Homo sapien
tcgtccaggtcagagatcccgatgg

SEQ ID NO: 4928224 - DNA, 25 bp, Homo sapien
ggactcatcaaatctgaagtcaact

SEQ ID NO: 4928225 - DNA, 25 bp, Homo sapien
gactcatcaaatctgaagtcaactg

SEQ ID NO: 4928226 - DNA, 25 bp, Homo sapien
aggactcatcaaatctgaagtcaac

SEQ ID NO: 4928227 - DNA, 25 bp, Homo sapien
tcaggagcggaaaagctggaatagg

SEQ ID NO: 4928228 - DNA, 25 bp, Homo sapien
aaaaatgaggtcaggagcggaaaag

SEQ ID NO: 4928229 - DNA, 25 bp, Homo sapien
tctgccatcatagatttcagggtgc

SEQ ID NO: 4928230 - DNA, 25 bp, Homo sapien
agcttcacgcagtcccagtaccctt

SEQ ID NO: 4928231 - DNA, 25 bp, Homo sapien
aatatagcttataagggacatgagg

SEQ ID NO: 4928232 - DNA, 25 bp, Homo sapien
taggaatatagcttataagggacat

SEQ ID NO: 4928233 - DNA, 25 bp, Homo sapien
cctaggaatatagcttataagggac

SEQ ID NO: 4928234 - DNA, 25 bp, Homo sapien
tatagcttataagggacatgaggga

SEQ ID NO: 4928235 - DNA, 25 bp, Homo sapien
gaaatgatccctggatgtgtagtgt

SEQ ID NO: 4928236 - DNA, 25 bp, Homo sapien
tagaaatgatccctggatgtgtagt

SEQ ID NO: 4928237 - DNA, 25 bp, Homo sapien
agaaatgatccctggatgtgtagtg

SEQ ID NO: 4928238 - DNA, 25 bp, Homo sapien
aatgatccctggatgtgtagtgttt

SEQ ID NO: 4928239 - DNA, 25 bp, Homo sapien
gtataacagagtggactttaaattc

SEQ ID NO: 4928240 - DNA, 25 bp, Homo sapien
tagaatatcagaacggtataacaga

SEQ ID NO: 4928241 - DNA, 25 bp, Homo sapien
ttaaattctggctctaacactgacc

SEQ ID NO: 4928242 - DNA, 25 bp, Homo sapien
taaattctggctctaacactgacca

SEQ ID NO: 4928243 - DNA, 25 bp, Homo sapien
atgacacctcagtggtaatgagcac

SEQ ID NO: 4928244 - DNA, 25 bp, Homo sapien
aatgacacctcagtggtaatgagca

SEQ ID NO: 4928245 - DNA, 25 bp, Homo sapien
caatgacacctcagtggtaatgagc

SEQ ID NO: 4928246 - DNA, 25 bp, Homo sapien
gggtcaccgctgagtgcaaggtaca

SEQ ID NO: 4928247 - DNA, 25 bp, Homo sapien
gtggaaaaatcagtcaacacttttg

SEQ ID NO: 4928248 - DNA, 25 bp, Homo sapien
aacacttttggggtcaccgctgagt

SEQ ID NO: 4928249 - DNA, 25 bp, Homo sapien
tgcaaggtacaatactgtacagagg

SEQ ID NO: 4928250 - DNA, 25 bp, Homo sapien
tcttctaagattccggggcaccagg

SEQ ID NO: 4928251 - DNA, 25 bp, Homo sapien
caggaagggtcagcaacgctttcat

SEQ ID NO: 4928252 - DNA, 25 bp, Homo sapien
aaggaaatgctgacttggcgcacag

SEQ ID NO: 4928253 - DNA, 25 bp, Homo sapien
cctgacttggtctctattgttcttc

SEQ ID NO: 4928254 - DNA, 25 bp, Homo sapien
gaggtcatggttctgggtgtcttaa

SEQ ID NO: 4928255 - DNA, 25 bp, Homo sapien
acagaggtcatggttctgggtgtct

SEQ ID NO: 4928256 - DNA, 25 bp, Homo sapien
ggtcatggttctgggtgtcttaacg

SEQ ID NO: 4928257 - DNA, 25 bp, Homo sapien
catggttctgggtgtcttaacgtca

SEQ ID NO: 4928258 - DNA, 25 bp, Homo sapien
agatttgatcgactggcccatgtga

SEQ ID NO: 4928259 - DNA, 25 bp, Homo sapien
gctggtcaggatgctcaacgagctc

SEQ ID NO: 4928260 - DNA, 25 bp, Homo sapien
cacgaccttgtctgctcaggagctg

SEQ ID NO: 4928261 - DNA, 25 bp, Homo sapien
aacgagctctttgccagatttgatc

SEQ ID NO: 4928262 - DNA, 25 bp, Homo sapien
gttccatattccttccctggtggca

SEQ ID NO: 4928263 - DNA, 25 bp, Homo sapien
agagccacggtccatgcagagaatc

SEQ ID NO: 4928264 - DNA, 25 bp, Homo sapien
tatttgagacgaagtcagccaagtg

SEQ ID NO: 4928265 - DNA, 25 bp, Homo sapien
gcagagaatcataggtggtgttcca

SEQ ID NO: 4928266 - DNA, 25 bp, Homo sapien
caaaactggaccaaagaggtgggca

SEQ ID NO: 4928267 - DNA, 25 bp, Homo sapien
aactttccactttccggtgatcaca

SEQ ID NO: 4928268 - DNA, 25 bp, Homo sapien
tccggtgatcacaaaactggaccaa

SEQ ID NO: 4928269 - DNA, 25 bp, Homo sapien
gaggtgggcaattggaattcactca

SEQ ID NO: 4928270 - DNA, 25 bp, Homo sapien
gagctggtctttccacgcacacaat

SEQ ID NO: 4928271 - DNA, 25 bp, Homo sapien
tcttctttccgctctgaataaagca

SEQ ID NO: 4928272 - DNA, 25 bp, Homo sapien
gatccagaaataggtggaagtatct

SEQ ID NO: 4928273 - DNA, 25 bp, Homo sapien
tagccttcaacagcttgggctgcag

SEQ ID NO: 4928274 - DNA, 25 bp, Homo sapien
cataaagcactctagatgcaatgct

SEQ ID NO: 4928275 - DNA, 25 bp, Homo sapien
taaatgttgttaaagcagagccctt

SEQ ID NO: 4928276 - DNA, 25 bp, Homo sapien
agctttggcagtgacctgctggccc

SEQ ID NO: 4928277 - DNA, 25 bp, Homo sapien
ctctgggggtcaggcactgagaatg

SEQ ID NO: 4928278 - DNA, 25 bp, Homo sapien
tcatatagcttccagagagccaggg

SEQ ID NO: 4928279 - DNA, 25 bp, Homo sapien
gctcttcgccacctacagtatgctg

SEQ ID NO: 4928280 - DNA, 25 bp, Homo sapien
cccggctggcggtcatttccatcaa

SEQ ID NO: 4928281 - DNA, 25 bp, Homo sapien
gacggcataggctacgtgctcttca

SEQ ID NO: 4928282 - DNA, 25 bp, Homo sapien
agggatgcttctggccagagccagc

SEQ ID NO: 4928283 - DNA, 25 bp, Homo sapien
tcagtccttgctcccgaactaggaa

SEQ ID NO: 4928284 - DNA, 25 bp, Homo sapien
gaaagagcctaggagggagcctcag

SEQ ID NO: 4928285 - DNA, 25 bp, Homo sapien
tgcttctggccagagccagcgctgc

SEQ ID NO: 4928286 - DNA, 25 bp, Homo sapien
tcagatatccgcaccggcggcttct

SEQ ID NO: 4928287 - DNA, 25 bp, Homo sapien
tcttcgttctcggagctcttggctt

SEQ ID NO: 4928288 - DNA, 25 bp, Homo sapien
aagcttcggttctcagcctcagata

SEQ ID NO: 4928289 - DNA, 25 bp, Homo sapien
gctttggagccctcaccactttttc

SEQ ID NO: 4928290 - DNA, 25 bp, Homo sapien
ggaaaccctgtattccgtcgcgctg

SEQ ID NO: 4928291 - DNA, 25 bp, Homo sapien
tagcccgaaagttggctttgccaaa

SEQ ID NO: 4928292 - DNA, 25 bp, Homo sapien
ctttgccaaaagacgcacgggtagg

SEQ ID NO: 4928293 - DNA, 25 bp, Homo sapien
aaactgactgcctctatgattgcgg

SEQ ID NO: 4928294 - DNA, 25 bp, Homo sapien
catccggctgcgggactgcggcggc

SEQ ID NO: 4928295 - DNA, 25 bp, Homo sapien
tcattggccatcagctgactgtgct

SEQ ID NO: 4928296 - DNA, 25 bp, Homo sapien
cattggccatcagctgactgtgctc

SEQ ID NO: 4928297 - DNA, 25 bp, Homo sapien
cctgcatccggctgcgggactgcgg

SEQ ID NO: 4928298 - DNA, 25 bp, Homo sapien
gggtaaaacagtcacatcaatcctg

SEQ ID NO: 4928299 - DNA, 25 bp, Homo sapien
ttctctttgcctgaactatagtccc

SEQ ID NO: 4928300 - DNA, 25 bp, Homo sapien
tagtcccaaatagatttctcttatc

SEQ ID NO: 4928301 - DNA, 25 bp, Homo sapien
aagggtaaaacagtcacatcaatcc

SEQ ID NO: 4928302 - DNA, 25 bp, Homo sapien
tctctggatgtctagcaagactggc

SEQ ID NO: 4928303 - DNA, 25 bp, Homo sapien
cagtagatctgagagttctctggat

SEQ ID NO: 4928304 - DNA, 25 bp, Homo sapien
ccaactaaagttaacacgaacacag

SEQ ID NO: 4928305 - DNA, 25 bp, Homo sapien
gtctagcaagactggcaagttttta

SEQ ID NO: 4928306 - DNA, 25 bp, Homo sapien
taccaggtgttcaggatagagatga

SEQ ID NO: 4928307 - DNA, 25 bp, Homo sapien
ctgagcttaaagtcctatagtcatc

SEQ ID NO: 4928308 - DNA, 25 bp, Homo sapien
gtcatcagtgccatctaccaggtgt

SEQ ID NO: 4928309 - DNA, 25 bp, Homo sapien
gatagagatgatttggctggtgctc

SEQ ID NO: 4928310 - DNA, 25 bp, Homo sapien
tattcttgagaagctttgcacagat

SEQ ID NO: 4928311 - DNA, 25 bp, Homo sapien
ctattcttgagaagctttgcacaga

SEQ ID NO: 4928312 - DNA, 25 bp, Homo sapien
aaatacttggtctgggaagacgcca

SEQ ID NO: 4928313 - DNA, 25 bp, Homo sapien
gaagacgccatttaatgttaagtca

SEQ ID NO: 4928314 - DNA, 25 bp, Homo sapien
tggtctgggaagacgccatttaatg

SEQ ID NO: 4928315 - DNA, 25 bp, Homo sapien
ccatttaatgttaagtcaatttgca

SEQ ID NO: 4928316 - DNA, 25 bp, Homo sapien
tcagaggatttaagtaggtgaccct

SEQ ID NO: 4928317 - DNA, 25 bp, Homo sapien
ttaagtaggtgaccctcattacctg

SEQ ID NO: 4928318 - DNA, 25 bp, Homo sapien
tcattacctgtttcagacctccact

SEQ ID NO: 4928319 - DNA, 25 bp, Homo sapien
tgacaggggtaactgatggcccatt

SEQ ID NO: 4928320 - DNA, 25 bp, Homo sapien
tgcaaggcttgtgcttgcttccgtc

SEQ ID NO: 4928321 - DNA, 25 bp, Homo sapien
caaggcttgtgcttgcttccgtcat

SEQ ID NO: 4928322 - DNA, 25 bp, Homo sapien
gcaaggcttgtgcttgcttccgtca

SEQ ID NO: 4928323 - DNA, 25 bp, Homo sapien
ctgcaaggcttgtgcttgcttccgt

SEQ ID NO: 4928324 - DNA, 25 bp, Homo sapien
cagcacagacttgagtaatccatta

SEQ ID NO: 4928325 - DNA, 25 bp, Homo sapien
cagacttgagtaatccattagactc

SEQ ID NO: 4928326 - DNA, 25 bp, Homo sapien
gcacagacttgagtaatccattaga

SEQ ID NO: 4928327 - DNA, 25 bp, Homo sapien
ggcagcacagacttgagtaatccat

SEQ ID NO: 4928328 - DNA, 25 bp, Homo sapien
ctttgtgctcccagggcggtccttg

SEQ ID NO: 4928329 - DNA, 25 bp, Homo sapien
ttgtgctcccagggcggtccttgct

SEQ ID NO: 4928330 - DNA, 25 bp, Homo sapien
tgcaaagtgcattgtgcaggtgtca

SEQ ID NO: 4928331 - DNA, 25 bp, Homo sapien
atgcaaagtgcattgtgcaggtgtc

SEQ ID NO: 4928332 - DNA, 25 bp, Homo sapien
tatatgggcacagttcacagcatcc

SEQ ID NO: 4928333 - DNA, 25 bp, Homo sapien
cagggtttccacaaacttcaatttg

SEQ ID NO: 4928334 - DNA, 25 bp, Homo sapien
accaatagacttgtttgatgcaggg

SEQ ID NO: 4928335 - DNA, 25 bp, Homo sapien
gggaaaatgtcaccaatagacttgt

SEQ ID NO: 4928336 - DNA, 25 bp, Homo sapien
cttatgacagcgaaggaagacgcca

SEQ ID NO: 4928337 - DNA, 25 bp, Homo sapien
cagcgaaggaagacgccatttacca

SEQ ID NO: 4928338 - DNA, 25 bp, Homo sapien
cgttgatgctcgtagtgcccctcat

SEQ ID NO: 4928339 - DNA, 25 bp, Homo sapien
ccaaatgttggtcgttaccgttgat

SEQ ID NO: 4928340 - DNA, 25 bp, Homo sapien
gagatagggaagctgccatagcatc

SEQ ID NO: 4928341 - DNA, 25 bp, Homo sapien
aaggagatagggaagctgccatagc

SEQ ID NO: 4928342 - DNA, 25 bp, Homo sapien
ttcctttcaggacataaggcagcat

SEQ ID NO: 4928343 - DNA, 25 bp, Homo sapien
caggacataaggcagcatcaccaaa

SEQ ID NO: 4928344 - DNA, 25 bp, Homo sapien
ggtgctaaggttacagagggacagg

SEQ ID NO: 4928345 - DNA, 25 bp, Homo sapien
tgctaaggttacagagggacaggtc

SEQ ID NO: 4928346 - DNA, 25 bp, Homo sapien
taggtgctaaggttacagagggaca

SEQ ID NO: 4928347 - DNA, 25 bp, Homo sapien
gtaggtgctaaggttacagagggac

SEQ ID NO: 4928348 - DNA, 25 bp, Homo sapien
ttggccataaaactgataccctctg

SEQ ID NO: 4928349 - DNA, 25 bp, Homo sapien
gttctttgcctagatgctcacatgg

SEQ ID NO: 4928350 - DNA, 25 bp, Homo sapien
tgcatggcccttggtaacagctcag

SEQ ID NO: 4928351 - DNA, 25 bp, Homo sapien
tcaagactatagaaccacggttttc

SEQ ID NO: 4928352 - DNA, 25 bp, Homo sapien
ttggtcttcaaaacctgggatccca

SEQ ID NO: 4928353 - DNA, 25 bp, Homo sapien
tgctcatctgaggcgaatcacccat

SEQ ID NO: 4928354 - DNA, 25 bp, Homo sapien
ctgctcatctgaggcgaatcaccca

SEQ ID NO: 4928355 - DNA, 25 bp, Homo sapien
gatcaaaataaccagcgcacaagtg

SEQ ID NO: 4928356 - DNA, 25 bp, Homo sapien
caacgttgctactgatttgctggta

SEQ ID NO: 4928357 - DNA, 25 bp, Homo sapien
tccttctgaactgacccttactggg

SEQ ID NO: 4928358 - DNA, 25 bp, Homo sapien
gaaatttctttgctcagcccttgag

SEQ ID NO: 4928359 - DNA, 25 bp, Homo sapien
gaactttcagtgctcaattttccaa

SEQ ID NO: 4928360 - DNA, 25 bp, Homo sapien
ggcagaatgaagtcccagagtgccc

SEQ ID NO: 4928361 - DNA, 25 bp, Homo sapien
gcaaactcccttaatagcctcacat

SEQ ID NO: 4928362 - DNA, 25 bp, Homo sapien
ctcacatctacttgacgtttggcag

SEQ ID NO: 4928363 - DNA, 25 bp, Homo sapien
tcagaaatgccgtctatacccagag

SEQ ID NO: 4928364 - DNA, 25 bp, Homo sapien
gccgtctatacccagagtgaacctc

SEQ ID NO: 4928365 - DNA, 25 bp, Homo sapien
ccagagtgaacctcttgaacgggaa

SEQ ID NO: 4928366 - DNA, 25 bp, Homo sapien
cctcttgaacgggaagcatgatttt

SEQ ID NO: 4928367 - DNA, 25 bp, Homo sapien
gaaaagtaagatgctcagccatgca

SEQ ID NO: 4928368 - DNA, 25 bp, Homo sapien
gataatctccatcagagaaggcgcc

SEQ ID NO: 4928369 - DNA, 25 bp, Homo sapien
catgcaaagaactctgatctttcca

SEQ ID NO: 4928370 - DNA, 25 bp, Homo sapien
actgtcaataatgtcagtcaatgcc

SEQ ID NO: 4928371 - DNA, 25 bp, Homo sapien
tattcactgagtttgcacactccct

SEQ ID NO: 4928372 - DNA, 25 bp, Homo sapien
cactccctgtttttgaagagttgag

SEQ ID NO: 4928373 - DNA, 25 bp, Homo sapien
atattcactgagtttgcacactccc

SEQ ID NO: 4928374 - DNA, 25 bp, Homo sapien
agagttcacctcccaaatcatgctt

SEQ ID NO: 4928375 - DNA, 25 bp, Homo sapien
gcccagctgactgtttcttctctat

SEQ ID NO: 4928376 - DNA, 25 bp, Homo sapien
tgtgagcattgcacaacattgaatg

SEQ ID NO: 4928377 - DNA, 25 bp, Homo sapien
aaaaagttggaagtagttgtgagca

SEQ ID NO: 4928378 - DNA, 25 bp, Homo sapien
cacaggatgatattcggccataagt

SEQ ID NO: 4928379 - DNA, 25 bp, Homo sapien
ggtgaacaccaatatgctctccatt

SEQ ID NO: 4928380 - DNA, 25 bp, Homo sapien
gagactaccatataagtggatttac

SEQ ID NO: 4928381 - DNA, 25 bp, Homo sapien
ttgccttttatagctactgtcacct

SEQ ID NO: 4928382 - DNA, 25 bp, Homo sapien
cactataacagaacagttccaccac

SEQ ID NO: 4928383 - DNA, 25 bp, Homo sapien
catgtagaaaatgataactggagtt

SEQ ID NO: 4928384 - DNA, 25 bp, Homo sapien
tggagtttaccaatcattttaacag

SEQ ID NO: 4928385 - DNA, 25 bp, Homo sapien
acttccataacactcaaaatctctg

SEQ ID NO: 4928386 - DNA, 25 bp, Homo sapien
tcagttgacgtcacaaaattacatt

SEQ ID NO: 4928387 - DNA, 25 bp, Homo sapien
taaaataagacatgaatccctccat

SEQ ID NO: 4928388 - DNA, 25 bp, Homo sapien
gactccttccctaaaataagacatg

SEQ ID NO: 4928389 - DNA, 25 bp, Homo sapien
ttccctaaaataagacatgaatccc

SEQ ID NO: 4928390 - DNA, 25 bp, Homo sapien
tgcctttcctcaaagaattcaacaa

SEQ ID NO: 4928391 - DNA, 25 bp, Homo sapien
taatggtaactctgacaaaactgct

SEQ ID NO: 4928392 - DNA, 25 bp, Homo sapien
atggtaactctgacaaaactgctgc

SEQ ID NO: 4928393 - DNA, 25 bp, Homo sapien
aatggtaactctgacaaaactgctg

SEQ ID NO: 4928394 - DNA, 25 bp, Homo sapien
tggaaggtgacctataaccctgtgg

SEQ ID NO: 4928395 - DNA, 25 bp, Homo sapien
atcaaatcgggcatgatcagctcag

SEQ ID NO: 4928396 - DNA, 25 bp, Homo sapien
tgatgtttagacagcaggcccactc

SEQ ID NO: 4928397 - DNA, 25 bp, Homo sapien
ggatgcctgcccctatggaaggtga

SEQ ID NO: 4928398 - DNA, 25 bp, Homo sapien
tggctgttgttgacatgccattaac

SEQ ID NO: 4928399 - DNA, 25 bp, Homo sapien
catgccattaactcaggtccctgtg

SEQ ID NO: 4928400 - DNA, 25 bp, Homo sapien
tgttgttgacatgccattaactcag

SEQ ID NO: 4928401 - DNA, 25 bp, Homo sapien
tgttgacatgccattaactcaggtc

SEQ ID NO: 4928402 - DNA, 25 bp, Homo sapien
tggcctttgttaaggcagggtccag

SEQ ID NO: 4928403 - DNA, 25 bp, Homo sapien
aaggtcatggcctttgttaaggcag

SEQ ID NO: 4928404 - DNA, 25 bp, Homo sapien
gtcatggcctttgttaaggcagggt

SEQ ID NO: 4928405 - DNA, 25 bp, Homo sapien
ctttgttaaggcagggtccaggtag

SEQ ID NO: 4928406 - DNA, 25 bp, Homo sapien
gtgctaggaataatctttcctctgg

SEQ ID NO: 4928407 - DNA, 25 bp, Homo sapien
tgtgctggaacagcatccggatttc

SEQ ID NO: 4928408 - DNA, 25 bp, Homo sapien
ctggaacagcatccggatttctggt

SEQ ID NO: 4928409 - DNA, 25 bp, Homo sapien
ctgcagtgctaggaataatctttcc

SEQ ID NO: 4928410 - DNA, 25 bp, Homo sapien
gtctttggacatttgcttgtcctgt

SEQ ID NO: 4928411 - DNA, 25 bp, Homo sapien
cagtgataagatgagctacaatgat

SEQ ID NO: 4928412 - DNA, 25 bp, Homo sapien
tcttctgtatggcaattatgttttt

SEQ ID NO: 4928413 - DNA, 25 bp, Homo sapien
ttttggtttcagcaacagtgataag

SEQ ID NO: 4928414 - DNA, 25 bp, Homo sapien
ccatgtgtttggcatcgttactaac

SEQ ID NO: 4928415 - DNA, 25 bp, Homo sapien
tgtgtttggcatcgttactaaccat

SEQ ID NO: 4928416 - DNA, 25 bp, Homo sapien
gtctgggcccctctctcacaatggt

SEQ ID NO: 4928417 - DNA, 25 bp, Homo sapien
aaatcttcaatgctgcagtctctct

SEQ ID NO: 4928418 - DNA, 25 bp, Homo sapien
tgatgcacgtcgttctcctctgtct

SEQ ID NO: 4928419 - DNA, 25 bp, Homo sapien
gatgcacgtcgttctcctctgtctt

SEQ ID NO: 4928420 - DNA, 25 bp, Homo sapien
taatgaagtatgatgcacgtcgttc

SEQ ID NO: 4928421 - DNA, 25 bp, Homo sapien
gaagtatgatgcacgtcgttctcct

SEQ ID NO: 4928422 - DNA, 25 bp, Homo sapien
attcaccagcatagaaccttccttt

SEQ ID NO: 4928423 - DNA, 25 bp, Homo sapien
cagcatagaaccttccttttgtgtg

SEQ ID NO: 4928424 - DNA, 25 bp, Homo sapien
tggaacaccaatccttttgtgcacc

SEQ ID NO: 4928425 - DNA, 25 bp, Homo sapien
tacagggtcctcaatattcaccagc

SEQ ID NO: 4928426 - DNA, 25 bp, Homo sapien
caagtatggattgcatgttgatgtc

SEQ ID NO: 4928427 - DNA, 25 bp, Homo sapien
gatgtccacgatgtgtttatttgcc

SEQ ID NO: 4928428 - DNA, 25 bp, Homo sapien
ggacaccatatgaaaaacggctttc

SEQ ID NO: 4928429 - DNA, 25 bp, Homo sapien
gccagaactcttcaggacaccatat

SEQ ID NO: 4928430 - DNA, 25 bp, Homo sapien
ctgtcctggagcctaatatggctaa

SEQ ID NO: 4928431 - DNA, 25 bp, Homo sapien
actgttttgtgtatgtggtagcaat

SEQ ID NO: 4928432 - DNA, 25 bp, Homo sapien
ttctgtcatgacttgcattgcccct

SEQ ID NO: 4928433 - DNA, 25 bp, Homo sapien
tggctaatgactgttttgtgtatgt

SEQ ID NO: 4928434 - DNA, 25 bp, Homo sapien
cacctttgcaggtcttggcaaggcc

SEQ ID NO: 4928435 - DNA, 25 bp, Homo sapien
aagcacctttgcaggtcttggcaag

SEQ ID NO: 4928436 - DNA, 25 bp, Homo sapien
aaagcacctttgcaggtcttggcaa

SEQ ID NO: 4928437 - DNA, 25 bp, Homo sapien
gcacctttgcaggtcttggcaaggc

SEQ ID NO: 4928438 - DNA, 25 bp, Homo sapien
cttcaggtagccccggtcctcttct

SEQ ID NO: 4928439 - DNA, 25 bp, Homo sapien
ttagattaagtcaaccttaaattca

SEQ ID NO: 4928440 - DNA, 25 bp, Homo sapien
cagggaagaccttcaggtagccccg

SEQ ID NO: 4928441 - DNA, 25 bp, Homo sapien
gaagggtgtttatcatgatatttcc

SEQ ID NO: 4928442 - DNA, 25 bp, Homo sapien
acttgacttctgacagcactagagg

SEQ ID NO: 4928443 - DNA, 25 bp, Homo sapien
tgacagcactagaggcccatggaag

SEQ ID NO: 4928444 - DNA, 25 bp, Homo sapien
gaggcccatggaagggtgtttatca

SEQ ID NO: 4928445 - DNA, 25 bp, Homo sapien
gtgccagttccaggaattgtcttgt

SEQ ID NO: 4928446 - DNA, 25 bp, Homo sapien
ctctttgctccatctgttactcttc

SEQ ID NO: 4928447 - DNA, 25 bp, Homo sapien
tgtgcttttgctttctccattgtct

SEQ ID NO: 4928448 - DNA, 25 bp, Homo sapien
tgctccatctgttactcttctcttc

SEQ ID NO: 4928449 - DNA, 25 bp, Homo sapien
tttgctccatctgttactcttctct

SEQ ID NO: 4928450 - DNA, 25 bp, Homo sapien
acattccctgatgagccccaagcct

SEQ ID NO: 4928451 - DNA, 25 bp, Homo sapien
agctcacattccctgatgagcccca

SEQ ID NO: 4928452 - DNA, 25 bp, Homo sapien
tcacattccctgatgagccccaagc

SEQ ID NO: 4928453 - DNA, 25 bp, Homo sapien
ctcacattccctgatgagccccaag

SEQ ID NO: 4928454 - DNA, 25 bp, Homo sapien
gggctgattcacataacttccaatc

SEQ ID NO: 4928455 - DNA, 25 bp, Homo sapien
tttgattgggaccatctctggcttc

SEQ ID NO: 4928456 - DNA, 25 bp, Homo sapien
ccaatcttccagattcgatttggcc

SEQ ID NO: 4928457 - DNA, 25 bp, Homo sapien
tctagtttgtaattccaccttgggc

SEQ ID NO: 4928458 - DNA, 25 bp, Homo sapien
tgggtacaatctcaatcacaggact

SEQ ID NO: 4928459 - DNA, 25 bp, Homo sapien
tgactcttatctctatctgctcttg

SEQ ID NO: 4928460 - DNA, 25 bp, Homo sapien
tgtgagtccctaaccctgggtacaa

SEQ ID NO: 4928461 - DNA, 25 bp, Homo sapien
gactactacattgtatttctcggtg

SEQ ID NO: 4928462 - DNA, 25 bp, Homo sapien
cctggcatttgtatcatcatctgga

SEQ ID NO: 4928463 - DNA, 25 bp, Homo sapien
catcatctggataaggtgggggtgt

SEQ ID NO: 4928464 - DNA, 25 bp, Homo sapien
gtgggggtgtcaaagagatagctcc

SEQ ID NO: 4928465 - DNA, 25 bp, Homo sapien
ggcatttgtatcatcatctggataa

SEQ ID NO: 4928466 - DNA, 25 bp, Homo sapien
tgctttattgtaacaatttactttc

SEQ ID NO: 4928467 - DNA, 25 bp, Homo sapien
ctttgcttgtctgacgttggatcct

SEQ ID NO: 4928468 - DNA, 25 bp, Homo sapien
tctgacgttggatccttggttttcc

SEQ ID NO: 4928469 - DNA, 25 bp, Homo sapien
ccttgactaacattgcttctccttc

SEQ ID NO: 4928470 - DNA, 25 bp, Homo sapien
ggttttccttgactaacattgcttc

SEQ ID NO: 4928471 - DNA, 25 bp, Homo sapien
tgcatcactatcccctaaaaatctt

SEQ ID NO: 4928472 - DNA, 25 bp, Homo sapien
ctgcatcactatcccctaaaaatct

SEQ ID NO: 4928473 - DNA, 25 bp, Homo sapien
ccatttgactctagatggttgtatg

SEQ ID NO: 4928474 - DNA, 25 bp, Homo sapien
gttgtatgtgtactcccacaaaaca

SEQ ID NO: 4928475 - DNA, 25 bp, Homo sapien
gatggttgtatgtgtactcccacaa

SEQ ID NO: 4928476 - DNA, 25 bp, Homo sapien
catttgactctagatggttgtatgt

SEQ ID NO: 4928477 - DNA, 25 bp, Homo sapien
tctctctgagactaggctgcctggt

SEQ ID NO: 4928478 - DNA, 25 bp, Homo sapien
gagctgatttgctgagctggcacag

SEQ ID NO: 4928479 - DNA, 25 bp, Homo sapien
ggcaagaatcttggaatctgggcca

SEQ ID NO: 4928480 - DNA, 25 bp, Homo sapien
catcttgtattgtgtcctttgctgc

SEQ ID NO: 4928481 - DNA, 25 bp, Homo sapien
acttgaatctagtccaggaaagcca

SEQ ID NO: 4928482 - DNA, 25 bp, Homo sapien
ggcagcctgaggtgactacgatagc

SEQ ID NO: 4928483 - DNA, 25 bp, Homo sapien
gactacgatagcaggacttgaatct

SEQ ID NO: 4928484 - DNA, 25 bp, Homo sapien
taagtatctgctgtttaaggctccc

SEQ ID NO: 4928485 - DNA, 25 bp, Homo sapien
ccttctgcctctgtctttccaccat

SEQ ID NO: 4928486 - DNA, 25 bp, Homo sapien
ctccttctgcctctgtctttccacc

SEQ ID NO: 4928487 - DNA, 25 bp, Homo sapien
tccttctgcctctgtctttccacca

SEQ ID NO: 4928488 - DNA, 25 bp, Homo sapien
gttgtttggctgtctcagtgccagc

SEQ ID NO: 4928489 - DNA, 25 bp, Homo sapien
gtgttgtttggctgtctcagtgcca

SEQ ID NO: 4928490 - DNA, 25 bp, Homo sapien
tgtttggctgtctcagtgccagcat

SEQ ID NO: 4928491 - DNA, 25 bp, Homo sapien
ttggctgtctcagtgccagcatcca

SEQ ID NO: 4928492 - DNA, 25 bp, Homo sapien
tggcatgtaggaagacctcagatac

SEQ ID NO: 4928493 - DNA, 25 bp, Homo sapien
gctttcagatgcagtgggtacattt

SEQ ID NO: 4928494 - DNA, 25 bp, Homo sapien
caaatgagaataggcaaagaagacc

SEQ ID NO: 4928495 - DNA, 25 bp, Homo sapien
tgggtacatttggtaggagcttctg

SEQ ID NO: 4928496 - DNA, 25 bp, Homo sapien
tctgtgttgattgccttctcttgca

SEQ ID NO: 4928497 - DNA, 25 bp, Homo sapien
gcagacatctttgagaccggttctc

SEQ ID NO: 4928498 - DNA, 25 bp, Homo sapien
ttgcccatcaattgacagccctcta

SEQ ID NO: 4928499 - DNA, 25 bp, Homo sapien
tgtccttgcccatcaattgacagcc

SEQ ID NO: 4928500 - DNA, 25 bp, Homo sapien
tttagctcccatatgaatcttcagg

SEQ ID NO: 4928501 - DNA, 25 bp, Homo sapien
agctcccatatgaatcttcaggtcc

SEQ ID NO: 4928502 - DNA, 25 bp, Homo sapien
tagctcccatatgaatcttcaggtc

SEQ ID NO: 4928503 - DNA, 25 bp, Homo sapien
ttttagctcccatatgaatcttcag

SEQ ID NO: 4928504 - DNA, 25 bp, Homo sapien
tcagggatctggatgccaccctgtg

SEQ ID NO: 4928505 - DNA, 25 bp, Homo sapien
gggatctggatgccaccctgtgtga

SEQ ID NO: 4928506 - DNA, 25 bp, Homo sapien
caccctgtgtgaaagtccactgctt

SEQ ID NO: 4928507 - DNA, 25 bp, Homo sapien
accctgtgtgaaagtccactgcttt

SEQ ID NO: 4928508 - DNA, 25 bp, Homo sapien
tctcagaaaccactctgctgtagca

SEQ ID NO: 4928509 - DNA, 25 bp, Homo sapien
cttcccctggtcctaatgagtgcac

SEQ ID NO: 4928510 - DNA, 25 bp, Homo sapien
tggtcctaatgagtgcacagttctc

SEQ ID NO: 4928511 - DNA, 25 bp, Homo sapien
aatgagtgcacagttctcagaaacc

SEQ ID NO: 4928512 - DNA, 25 bp, Homo sapien
ggctgacaggaacgaggatttagcc

SEQ ID NO: 4928513 - DNA, 25 bp, Homo sapien
gtctgggctgacaggaacgaggatt

SEQ ID NO: 4928514 - DNA, 25 bp, Homo sapien
ctgggctgacaggaacgaggattta

SEQ ID NO: 4928515 - DNA, 25 bp, Homo sapien
ctgacaggaacgaggatttagccat

SEQ ID NO: 4928516 - DNA, 25 bp, Homo sapien
agagcagagagtctgccgtcatctt

SEQ ID NO: 4928517 - DNA, 25 bp, Homo sapien
catgaagatcagagctaggaagcgc

SEQ ID NO: 4928518 - DNA, 25 bp, Homo sapien
gaaatgatattgtgcagtactggga

SEQ ID NO: 4928519 - DNA, 25 bp, Homo sapien
ggaagcgctgaggagaaattagtct

SEQ ID NO: 4928520 - DNA, 25 bp, Homo sapien
cttgaggtggacttggaagaaagca

SEQ ID NO: 4928521 - DNA, 25 bp, Homo sapien
tcacgcaaccaagcgggcgacagct

SEQ ID NO: 4928522 - DNA, 25 bp, Homo sapien
ccgcggaggccggaacgaggcgaag

SEQ ID NO: 4928523 - DNA, 25 bp, Homo sapien
gaacgaggcgaagggcgaagggcga

SEQ ID NO: 4928524 - DNA, 25 bp, Homo sapien
tggagggagcggacgcggaccccgc

SEQ ID NO: 4928525 - DNA, 25 bp, Homo sapien
gccgacggcaccatgacggccgttg

SEQ ID NO: 4928526 - DNA, 25 bp, Homo sapien
ggcatggcgatctcgaccgcgctcg

SEQ ID NO: 4928527 - DNA, 25 bp, Homo sapien
ggtaggcatggcgatctcgaccgcg

SEQ ID NO: 4928528 - DNA, 25 bp, Homo sapien
ggccgcgcagggagcgccgacggca

SEQ ID NO: 4928529 - DNA, 25 bp, Homo sapien
cctggaaattcagcgtcccagatgg

SEQ ID NO: 4928530 - DNA, 25 bp, Homo sapien
gaaacgtgcattggagactgacctg

SEQ ID NO: 4928531 - DNA, 25 bp, Homo sapien
tagacgaaacgtgcattggagactg

SEQ ID NO: 4928532 - DNA, 25 bp, Homo sapien
tttcccaccactagacgaaacgtgc

SEQ ID NO: 4928533 - DNA, 25 bp, Homo sapien
caggactatgtaaagatttgccaca

SEQ ID NO: 4928534 - DNA, 25 bp, Homo sapien
ctgtgaagctagataaccctagaac

SEQ ID NO: 4928535 - DNA, 25 bp, Homo sapien
cacagtacccacacatgtatgagga

SEQ ID NO: 4928536 - DNA, 25 bp, Homo sapien
tatttactggatgcgaagtccaaga

SEQ ID NO: 4928537 - DNA, 25 bp, Homo sapien
ggcacttggatttagaaagctgtcc

SEQ ID NO: 4928538 - DNA, 25 bp, Homo sapien
tctgtagtatactttaaggcacttg

SEQ ID NO: 4928539 - DNA, 25 bp, Homo sapien
atctcaaacagtttccccaatccag

SEQ ID NO: 4928540 - DNA, 25 bp, Homo sapien
cctttgaccactgtatctgtagtat

SEQ ID NO: 4928541 - DNA, 25 bp, Homo sapien
gagcataaagaatctatcacaggca

SEQ ID NO: 4928542 - DNA, 25 bp, Homo sapien
cacaggcaatgactaggatctttct

SEQ ID NO: 4928543 - DNA, 25 bp, Homo sapien
tactagcctattgtccaaaatgaaa

SEQ ID NO: 4928544 - DNA, 25 bp, Homo sapien
gatctttcttagctaaccaagttgg

SEQ ID NO: 4928545 - DNA, 25 bp, Homo sapien
tcttggcaagaagactataccgccc

SEQ ID NO: 4928546 - DNA, 25 bp, Homo sapien
caagaagactataccgccccggtgt

SEQ ID NO: 4928547 - DNA, 25 bp, Homo sapien
agagtcttggcaagaagactatacc

SEQ ID NO: 4928548 - DNA, 25 bp, Homo sapien
gcaagaagactataccgccccggtg

SEQ ID NO: 4928549 - DNA, 25 bp, Homo sapien
gactcccttgttgaagtaaattcat

SEQ ID NO: 4928550 - DNA, 25 bp, Homo sapien
gcaggtacctgaacatagtccttca

SEQ ID NO: 4928551 - DNA, 25 bp, Homo sapien
gttcagctgcaggtacctgaacata

SEQ ID NO: 4928552 - DNA, 25 bp, Homo sapien
agtatagaaatgtaggtgactccct

SEQ ID NO: 4928553 - DNA, 25 bp, Homo sapien
tcctttggatcttaactctcactgt

SEQ ID NO: 4928554 - DNA, 25 bp, Homo sapien
gcccaagtatctactaacagctata

SEQ ID NO: 4928555 - DNA, 25 bp, Homo sapien
aattcttcatctacgcctctctgac

SEQ ID NO: 4928556 - DNA, 25 bp, Homo sapien
tgctaattctaaccagctagacccc

SEQ ID NO: 4928557 - DNA, 25 bp, Homo sapien
tcttcagggaatatgttgtccacca

SEQ ID NO: 4928558 - DNA, 25 bp, Homo sapien
ccaggcgtttgtagcgaggacgcaa

SEQ ID NO: 4928559 - DNA, 25 bp, Homo sapien
tagcgaggacgcaaagcggaacagc

SEQ ID NO: 4928560 - DNA, 25 bp, Homo sapien
tgtccaccaggcgtttgtagcgagg

SEQ ID NO: 4928561 - DNA, 25 bp, Homo sapien
gtcagcggggggcagaatgggtcag

SEQ ID NO: 4928562 - DNA, 25 bp, Homo sapien
ggcagaatgggtcagcaaagagaag

SEQ ID NO: 4928563 - DNA, 25 bp, Homo sapien
tcagcggggggcagaatgggtcagc

SEQ ID NO: 4928564 - DNA, 25 bp, Homo sapien
tttctgccaggtaagaaccaattcg

SEQ ID NO: 4928565 - DNA, 25 bp, Homo sapien
gaaccaattcgatccagtttctctg

SEQ ID NO: 4928566 - DNA, 25 bp, Homo sapien
ccatatcagttttcacaaggccatc

SEQ ID NO: 4928567 - DNA, 25 bp, Homo sapien
gaacgatgtctgacaacatccctgc

SEQ ID NO: 4928568 - DNA, 25 bp, Homo sapien
tgaagctttggttcccccgattcca

SEQ ID NO: 4928569 - DNA, 25 bp, Homo sapien
tgaagaaagctttctacaaatggct

SEQ ID NO: 4928570 - DNA, 25 bp, Homo sapien
ccatgagaagttggtccagtgcctc

SEQ ID NO: 4928571 - DNA, 25 bp, Homo sapien
agcagctttgccaccatatgaagaa

SEQ ID NO: 4928572 - DNA, 25 bp, Homo sapien
ttagtaacagaatagttttactcac

SEQ ID NO: 4928573 - DNA, 25 bp, Homo sapien
tttagtaacagaatagttttactca

SEQ ID NO: 4928574 - DNA, 25 bp, Homo sapien
gatggtgtgtcttcttcaatatttg

SEQ ID NO: 4928575 - DNA, 25 bp, Homo sapien
tctggatcactatgacaggaatggc

SEQ ID NO: 4928576 - DNA, 25 bp, Homo sapien
tcataacgtctgtgataggatggtg

SEQ ID NO: 4928577 - DNA, 25 bp, Homo sapien
ggcactgaatcgagacacaaaaaag

SEQ ID NO: 4928578 - DNA, 25 bp, Homo sapien
gatcataaagtaaaataatacatac

SEQ ID NO: 4928579 - DNA, 25 bp, Homo sapien
tagatcataaagtaaaataatacat

SEQ ID NO: 4928580 - DNA, 25 bp, Homo sapien
tatagatcataaagtaaaataatac

SEQ ID NO: 4928581 - DNA, 25 bp, Homo sapien
ttactatagatcataaagtaaaata

SEQ ID NO: 4928582 - DNA, 25 bp, Homo sapien
tcttatccatatgctgaggttccca

SEQ ID NO: 4928583 - DNA, 25 bp, Homo sapien
aaatggtggcccgaagttcatcgtt

SEQ ID NO: 4928584 - DNA, 25 bp, Homo sapien
cgttgactgttttgcgaaccacacc

SEQ ID NO: 4928585 - DNA, 25 bp, Homo sapien
tatcttttgcatgttaaacaggagg

SEQ ID NO: 4928586 - DNA, 25 bp, Homo sapien
tcttctttgtcagttgcagaaggag

SEQ ID NO: 4928587 - DNA, 25 bp, Homo sapien
aaagttgctcgacccagcagttctc

SEQ ID NO: 4928588 - DNA, 25 bp, Homo sapien
gccagcacagcaggattctcttctt

SEQ ID NO: 4928589 - DNA, 25 bp, Homo sapien
aggagaagaaggagggcctatgcga

SEQ ID NO: 4928590 - DNA, 25 bp, Homo sapien
tcccacagtttgtgatgatctaaat

SEQ ID NO: 4928591 - DNA, 25 bp, Homo sapien
aattttaaagcagtgaactgcaaat

SEQ ID NO: 4928592 - DNA, 25 bp, Homo sapien
ccacagtttgtgatgatctaaatgc

SEQ ID NO: 4928593 - DNA, 25 bp, Homo sapien
tttaaagcagtgaactgcaaattca

SEQ ID NO: 4928594 - DNA, 25 bp, Homo sapien
tcaaggtgtcctagaatctcctgga

SEQ ID NO: 4928595 - DNA, 25 bp, Homo sapien
agaacctgaataatacctgctcgaa

SEQ ID NO: 4928596 - DNA, 25 bp, Homo sapien
tgaataatacctgctcgaacccggg

SEQ ID NO: 4928597 - DNA, 25 bp, Homo sapien
gggagcatcttttttacgagcatca

SEQ ID NO: 4928598 - DNA, 25 bp, Homo sapien
tattgaagacttccagcactgtcgg

SEQ ID NO: 4928599 - DNA, 25 bp, Homo sapien
tgagacgcagatgtttcaaaagggt

SEQ ID NO: 4928600 - DNA, 25 bp, Homo sapien
taagttgacactgcctacagatccc

SEQ ID NO: 4928601 - DNA, 25 bp, Homo sapien
gcttcgaattcaacgctgagacgca

SEQ ID NO: 4928602 - DNA, 25 bp, Homo sapien
tgttattctgaatgtgctgtatcac

SEQ ID NO: 4928603 - DNA, 25 bp, Homo sapien
cagaaatatggcttgagtctgctat

SEQ ID NO: 4928604 - DNA, 25 bp, Homo sapien
aatattctagagtgaaagagtaaca

SEQ ID NO: 4928605 - DNA, 25 bp, Homo sapien
taaagcaatgtaaatcaattctgtg

SEQ ID NO: 4928606 - DNA, 25 bp, Homo sapien
taacgccatgatctgacaactgcca

SEQ ID NO: 4928607 - DNA, 25 bp, Homo sapien
caggaataacgccatgatctgacaa

SEQ ID NO: 4928608 - DNA, 25 bp, Homo sapien
gaataacgccatgatctgacaactg

SEQ ID NO: 4928609 - DNA, 25 bp, Homo sapien
ccatgatctgacaactgccagaata

SEQ ID NO: 4928610 - DNA, 25 bp, Homo sapien
gtgcaaaagctatagcagccctgtt

SEQ ID NO: 4928611 - DNA, 25 bp, Homo sapien
tcaccaaaagcatctcattcactat

SEQ ID NO: 4928612 - DNA, 25 bp, Homo sapien
gcaggtagctatgttcttcactatt

SEQ ID NO: 4928613 - DNA, 25 bp, Homo sapien
gccaacagcctgataacttaaagtg

SEQ ID NO: 4928614 - DNA, 25 bp, Homo sapien
gacaggtactttccccataatgaac

SEQ ID NO: 4928615 - DNA, 25 bp, Homo sapien
cctagttgactgatatccaaagtat

SEQ ID NO: 4928616 - DNA, 25 bp, Homo sapien
gataatctggtaggttacttccaaa

SEQ ID NO: 4928617 - DNA, 25 bp, Homo sapien
agtatgggtagatgttccaaagaca

SEQ ID NO: 4928618 - DNA, 25 bp, Homo sapien
atctcagcaacattatctgaattct

SEQ ID NO: 4928619 - DNA, 25 bp, Homo sapien
gatctcagcaacattatctgaattc

SEQ ID NO: 4928620 - DNA, 25 bp, Homo sapien
agatctcagcaacattatctgaatt

SEQ ID NO: 4928621 - DNA, 25 bp, Homo sapien
tatgcattacttccaagaccaactg

SEQ ID NO: 4928622 - DNA, 25 bp, Homo sapien
aactgtctcagttcgtagtcctcca

SEQ ID NO: 4928623 - DNA, 25 bp, Homo sapien
ggcagtgcagtaacaatcgtcttcg

SEQ ID NO: 4928624 - DNA, 25 bp, Homo sapien
gaagctttgccctattgtcatgacg

SEQ ID NO: 4928625 - DNA, 25 bp, Homo sapien
ctttttatctttaggtcagctacat

SEQ ID NO: 4928626 - DNA, 25 bp, Homo sapien
tcatgaaacttgtgtcttgtctgca

SEQ ID NO: 4928627 - DNA, 25 bp, Homo sapien
tgaaacttgtgtcttgtctgcaaat

SEQ ID NO: 4928628 - DNA, 25 bp, Homo sapien
taggtcagctacatccggtattatt

SEQ ID NO: 4928629 - DNA, 25 bp, Homo sapien
aagccacacgcagatgaattttacc

SEQ ID NO: 4928630 - DNA, 25 bp, Homo sapien
catggaatactatcgaagccacacg

SEQ ID NO: 4928631 - DNA, 25 bp, Homo sapien
caggccttggagaaatgggagttat

SEQ ID NO: 4928632 - DNA, 25 bp, Homo sapien
taggagcacagttcataacactcac

SEQ ID NO: 4928633 - DNA, 25 bp, Homo sapien
agcaatggccagtcgaatgagatca

SEQ ID NO: 4928634 - DNA, 25 bp, Homo sapien
cattagccagttcaatagttataag

SEQ ID NO: 4928635 - DNA, 25 bp, Homo sapien
tataaagtagttcatagtttttctg

SEQ ID NO: 4928636 - DNA, 25 bp, Homo sapien
tatgtgccgatacagctgttgccca

SEQ ID NO: 4928637 - DNA, 25 bp, Homo sapien
cagtgccatgattccacaacgatgg

SEQ ID NO: 4928638 - DNA, 25 bp, Homo sapien
caaaatgcagggacagctatcatct

SEQ ID NO: 4928639 - DNA, 25 bp, Homo sapien
gaggtatgctgcaaccagtgccatg

SEQ ID NO: 4928640 - DNA, 25 bp, Homo sapien
tatcatctgacttacaaagttgagg

SEQ ID NO: 4928641 - DNA, 25 bp, Homo sapien
tggtagaaaataaggggcttccata

SEQ ID NO: 4928642 - DNA, 25 bp, Homo sapien
gcttccatagttcgaatttcaataa

SEQ ID NO: 4928643 - DNA, 25 bp, Homo sapien
aggggcttccatagttcgaatttca

SEQ ID NO: 4928644 - DNA, 25 bp, Homo sapien
aataaggggcttccatagttcgaat

SEQ ID NO: 4928645 - DNA, 25 bp, Homo sapien
atcaaaacaacaatcattcagtatt

SEQ ID NO: 4928646 - DNA, 25 bp, Homo sapien
cagaaagtacaaatctttttcatgc

SEQ ID NO: 4928647 - DNA, 25 bp, Homo sapien
gtcagaaagtacaaatctttttcat

SEQ ID NO: 4928648 - DNA, 25 bp, Homo sapien
gaaagtacaaatctttttcatgctt

SEQ ID NO: 4928649 - DNA, 25 bp, Homo sapien
aaagtacaaatctttttcatgcttc

SEQ ID NO: 4928650 - DNA, 25 bp, Homo sapien
acctagcgactctgcaatcttgttg

SEQ ID NO: 4928651 - DNA, 25 bp, Homo sapien
ttccacctagcgactctgcaatctt

SEQ ID NO: 4928652 - DNA, 25 bp, Homo sapien
ctgttacttgtggtacatacggaac

SEQ ID NO: 4928653 - DNA, 25 bp, Homo sapien
ggaactgacaatctctcaacactat

SEQ ID NO: 4928654 - DNA, 25 bp, Homo sapien
ttctggatgcctgaacaatatttga

SEQ ID NO: 4928655 - DNA, 25 bp, Homo sapien
tggatctttctggatgcctgaacaa

SEQ ID NO: 4928656 - DNA, 25 bp, Homo sapien
ggatgcctgaacaatatttgagtcc

SEQ ID NO: 4928657 - DNA, 25 bp, Homo sapien
tcaatctggatctttctggatgcct

SEQ ID NO: 4928658 - DNA, 25 bp, Homo sapien
tctcctaaggatgactaacatgcca

SEQ ID NO: 4928659 - DNA, 25 bp, Homo sapien
gatgcctctttattatgggccactg

SEQ ID NO: 4928660 - DNA, 25 bp, Homo sapien
tggtaagtaaatcctatgcgtcccc

SEQ ID NO: 4928661 - DNA, 25 bp, Homo sapien
actcaagtgcccaagccagaatcct

SEQ ID NO: 4928662 - DNA, 25 bp, Homo sapien
tggagctttacgttccttcccaaca

SEQ ID NO: 4928663 - DNA, 25 bp, Homo sapien
tgctgagttaacctagaccctgtat

SEQ ID NO: 4928664 - DNA, 25 bp, Homo sapien
caaaagtcatccaggttctactgca

SEQ ID NO: 4928665 - DNA, 25 bp, Homo sapien
ggacattctaggctctctcatcaga

SEQ ID NO: 4928666 - DNA, 25 bp, Homo sapien
cacgctgtgggatatctgctttcta

SEQ ID NO: 4928667 - DNA, 25 bp, Homo sapien
tgccagacagtggtagctccattag

SEQ ID NO: 4928668 - DNA, 25 bp, Homo sapien
gattgcaatttctgtcctctctgtg

SEQ ID NO: 4928669 - DNA, 25 bp, Homo sapien
ggttctgtaacaagtcctggccaat

SEQ ID NO: 4928670 - DNA, 25 bp, Homo sapien
tacagtatgagtaatgtgccagaca

SEQ ID NO: 4928671 - DNA, 25 bp, Homo sapien
ggaagcttctagtctgatctccacc

SEQ ID NO: 4928672 - DNA, 25 bp, Homo sapien
ttacagtgcattacaatttgtgggc

SEQ ID NO: 4928673 - DNA, 25 bp, Homo sapien
taaaattccacggtcttccaaatca

SEQ ID NO: 4928674 - DNA, 25 bp, Homo sapien
tcacgaaacagtgaaagctgtcagc

SEQ ID NO: 4928675 - DNA, 25 bp, Homo sapien
gctgaagtcctgtaattataatccc

SEQ ID NO: 4928676 - DNA, 25 bp, Homo sapien
tatccacctgaatggatacggtgtc

SEQ ID NO: 4928677 - DNA, 25 bp, Homo sapien
aaatatccacctgaatggatacggt

SEQ ID NO: 4928678 - DNA, 25 bp, Homo sapien
aatatccacctgaatggatacggtg

SEQ ID NO: 4928679 - DNA, 25 bp, Homo sapien
atccacctgaatggatacggtgtcc

SEQ ID NO: 4928680 - DNA, 25 bp, Homo sapien
ggaagcattcgtctaaagtcaacca

SEQ ID NO: 4928681 - DNA, 25 bp, Homo sapien
cttccctagaaaggtaatagtggca

SEQ ID NO: 4928682 - DNA, 25 bp, Homo sapien
caactactcttgatgccgtgctgat

SEQ ID NO: 4928683 - DNA, 25 bp, Homo sapien
aatagtttgatattctgctgcacca

SEQ ID NO: 4928684 - DNA, 25 bp, Homo sapien
tagactatataatgcccttgggcct

SEQ ID NO: 4928685 - DNA, 25 bp, Homo sapien
tgcaaaggcaccatcctaaaggaat

SEQ ID NO: 4928686 - DNA, 25 bp, Homo sapien
taatgacactgactaaatttcggtg

SEQ ID NO: 4928687 - DNA, 25 bp, Homo sapien
tagatcctcattccatcaactgtgg

SEQ ID NO: 4928688 - DNA, 25 bp, Homo sapien
ttgttttgttctagatattcggagc

SEQ ID NO: 4928689 - DNA, 25 bp, Homo sapien
gcagacatgtaagattaggctctgg

SEQ ID NO: 4928690 - DNA, 25 bp, Homo sapien
agttctagttgaagtcagattaaac

SEQ ID NO: 4928691 - DNA, 25 bp, Homo sapien
tcagattaaacttgggaatcttctg

SEQ ID NO: 4928692 - DNA, 25 bp, Homo sapien
tctgcaatacaaaggctttagctgg

SEQ ID NO: 4928693 - DNA, 25 bp, Homo sapien
gcagcaagagttccactccctcagt

SEQ ID NO: 4928694 - DNA, 25 bp, Homo sapien
gcttctctgcaatacaaaggcttta

SEQ ID NO: 4928695 - DNA, 25 bp, Homo sapien
cttagcttctctgcaatacaaaggc

SEQ ID NO: 4928696 - DNA, 25 bp, Homo sapien
cctagttacaagtcatctaagaagt

SEQ ID NO: 4928697 - DNA, 25 bp, Homo sapien
tgaaatcgagagttaaaaagggtca

SEQ ID NO: 4928698 - DNA, 25 bp, Homo sapien
agtgataagtgaaatcgagagttaa

SEQ ID NO: 4928699 - DNA, 25 bp, Homo sapien
acacctttacctagttacaagtcat

SEQ ID NO: 4928700 - DNA, 25 bp, Homo sapien
tcaaaagtgatttcttcagtgttac

SEQ ID NO: 4928701 - DNA, 25 bp, Homo sapien
caattgctttcttcaatgcttcaaa

SEQ ID NO: 4928702 - DNA, 25 bp, Homo sapien
attgctttcttcaatgcttcaaaag

SEQ ID NO: 4928703 - DNA, 25 bp, Homo sapien
gctttcttcaatgcttcaaaagtga

SEQ ID NO: 4928704 - DNA, 25 bp, Homo sapien
ctctatcacaagacgcctcttttcc

SEQ ID NO: 4928705 - DNA, 25 bp, Homo sapien
tctctatcacaagacgcctcttttc

SEQ ID NO: 4928706 - DNA, 25 bp, Homo sapien
ttctctatcacaagacgcctctttt

SEQ ID NO: 4928707 - DNA, 25 bp, Homo sapien
acaaaacaacagtccacccacaagc

SEQ ID NO: 4928708 - DNA, 25 bp, Homo sapien
acaagcccttcaccgtttcttcact

SEQ ID NO: 4928709 - DNA, 25 bp, Homo sapien
cacccacaagcccttcaccgtttct

SEQ ID NO: 4928710 - DNA, 25 bp, Homo sapien
ttccacaaaacaacagtccacccac

SEQ ID NO: 4928711 - DNA, 25 bp, Homo sapien
tatttgggcaagtctatcatgaagc

SEQ ID NO: 4928712 - DNA, 25 bp, Homo sapien
caagtctatcatgaagcaaatttgc

SEQ ID NO: 4928713 - DNA, 25 bp, Homo sapien
caatatttgggcaagtctatcatga

SEQ ID NO: 4928714 - DNA, 25 bp, Homo sapien
tgggcaagtctatcatgaagcaaat

SEQ ID NO: 4928715 - DNA, 25 bp, Homo sapien
tagagtctgttgcagatattaaata

SEQ ID NO: 4928716 - DNA, 25 bp, Homo sapien
tagtagttgtggtaccaatgaaaca

SEQ ID NO: 4928717 - DNA, 25 bp, Homo sapien
caatgaatgtaagtattagtagtag

SEQ ID NO: 4928718 - DNA, 25 bp, Homo sapien
agcacagtgcttagaacaacatagg

SEQ ID NO: 4928719 - DNA, 25 bp, Homo sapien
ctgtttcttttatggaggatacaaa

SEQ ID NO: 4928720 - DNA, 25 bp, Homo sapien
gatgtcttaacatgtcagtttcctg

SEQ ID NO: 4928721 - DNA, 25 bp, Homo sapien
taactgggttatctgtgaggctgct

SEQ ID NO: 4928722 - DNA, 25 bp, Homo sapien
tgtgtggtgttctaagggccttttc

SEQ ID NO: 4928723 - DNA, 25 bp, Homo sapien
cgatcgtgagaataagcaatgtcac

SEQ ID NO: 4928724 - DNA, 25 bp, Homo sapien
cacttttacacatgcttattggcga

SEQ ID NO: 4928725 - DNA, 25 bp, Homo sapien
aaacaactactgtcttggccactga

SEQ ID NO: 4928726 - DNA, 25 bp, Homo sapien
tacaggctctatgaacagtccaaca

SEQ ID NO: 4928727 - DNA, 25 bp, Homo sapien
cacgtaaatggtctatacaggctct

SEQ ID NO: 4928728 - DNA, 25 bp, Homo sapien
ttactaaaatgatagcttaatctac

SEQ ID NO: 4928729 - DNA, 25 bp, Homo sapien
cctattcaagaataagatgtttcca

SEQ ID NO: 4928730 - DNA, 25 bp, Homo sapien
acttcctattcaagaataagatgtt

SEQ ID NO: 4928731 - DNA, 25 bp, Homo sapien
gcttaatctacagaaaactgacatc

SEQ ID NO: 4928732 - DNA, 25 bp, Homo sapien
gctcttgcatgtggattctttcaca

SEQ ID NO: 4928733 - DNA, 25 bp, Homo sapien
ccatatgcaggtccaatctggtgta

SEQ ID NO: 4928734 - DNA, 25 bp, Homo sapien
tctaccaagcaaggcaaatactccc

SEQ ID NO: 4928735 - DNA, 25 bp, Homo sapien
taagtaccaaagatctgtcatatgt

SEQ ID NO: 4928736 - DNA, 25 bp, Homo sapien
tgttcagcagttgtccaaatgagat

SEQ ID NO: 4928737 - DNA, 25 bp, Homo sapien
cctcgctggtcagtagtgttcagca

SEQ ID NO: 4928738 - DNA, 25 bp, Homo sapien
tctaccttggcaaaagaagtgaagt

SEQ ID NO: 4928739 - DNA, 25 bp, Homo sapien
ccacagataccttctatacttgaat

SEQ ID NO: 4928740 - DNA, 25 bp, Homo sapien
tactcaaaatgttgactttggtaca

SEQ ID NO: 4928741 - DNA, 25 bp, Homo sapien
ttattccgactgattgtcaccttgg

SEQ ID NO: 4928742 - DNA, 25 bp, Homo sapien
gaatttctgcatcaaagtgtactca

SEQ ID NO: 4928743 - DNA, 25 bp, Homo sapien
gccggaataccagcaatttacactt

SEQ ID NO: 4928744 - DNA, 25 bp, Homo sapien
catctcatagactgggacagattgg

SEQ ID NO: 4928745 - DNA, 25 bp, Homo sapien
tgcccagaagtaatggtcagtgttc

SEQ ID NO: 4928746 - DNA, 25 bp, Homo sapien
gacagattggtattgggcatgccca

SEQ ID NO: 4928747 - DNA, 25 bp, Homo sapien
ggtcagtgttcctgatggactggga

SEQ ID NO: 4928748 - DNA, 25 bp, Homo sapien
tcttgcagatatgggagagtcagcc

SEQ ID NO: 4928749 - DNA, 25 bp, Homo sapien
tacctgaactggctacaacaccgtg

SEQ ID NO: 4928750 - DNA, 25 bp, Homo sapien
caaaaattctacatctaagcggctg

SEQ ID NO: 4928751 - DNA, 25 bp, Homo sapien
tacaacttggctttacggactggtg

SEQ ID NO: 4928752 - DNA, 25 bp, Homo sapien
taaaactctataagcggtcacagac

SEQ ID NO: 4928753 - DNA, 25 bp, Homo sapien
gcataggtattcaggtaaacaccaa

SEQ ID NO: 4928754 - DNA, 25 bp, Homo sapien
tcacagacaacacaagtacaggagg

SEQ ID NO: 4928755 - DNA, 25 bp, Homo sapien
tacagatataagcacgaataagaca

SEQ ID NO: 4928756 - DNA, 25 bp, Homo sapien
ttgctgacatatgaattgcacagtg

SEQ ID NO: 4928757 - DNA, 25 bp, Homo sapien
aaataatctatgttttattgctgac

SEQ ID NO: 4928758 - DNA, 25 bp, Homo sapien
tattgctgacatatgaattgcacag

SEQ ID NO: 4928759 - DNA, 25 bp, Homo sapien
tgctgacatatgaattgcacagtga

SEQ ID NO: 4928760 - DNA, 25 bp, Homo sapien
tcatggaagtggaatggcaatgctt

SEQ ID NO: 4928761 - DNA, 25 bp, Homo sapien
tgcctcatggaagtggaatggcaat

SEQ ID NO: 4928762 - DNA, 25 bp, Homo sapien
acaatttccacacggactctgactg

SEQ ID NO: 4928763 - DNA, 25 bp, Homo sapien
cttcagaccctgctgtgataacaat

SEQ ID NO: 4928764 - DNA, 25 bp, Homo sapien
caacggtgcaaaaggtattatggcc

SEQ ID NO: 4928765 - DNA, 25 bp, Homo sapien
tgttcttaactaccagactagatgg

SEQ ID NO: 4928766 - DNA, 25 bp, Homo sapien
caaagggtcagcaaatacaacggtg

SEQ ID NO: 4928767 - DNA, 25 bp, Homo sapien
cataagctttgaatgaacctgactc

SEQ ID NO: 4928768 - DNA, 25 bp, Homo sapien
gaatgaagtaggtctagattcctga

SEQ ID NO: 4928769 - DNA, 25 bp, Homo sapien
ctgagaatgaagtaggtctagattc

SEQ ID NO: 4928770 - DNA, 25 bp, Homo sapien
agtaggtctagattcctgaaaagtc

SEQ ID NO: 4928771 - DNA, 25 bp, Homo sapien
cagctgctcaggtactgagaatgaa

SEQ ID NO: 4928772 - DNA, 25 bp, Homo sapien
tctatacccctctgaatacttttcc

SEQ ID NO: 4928773 - DNA, 25 bp, Homo sapien
ctgatctggtaattgggcccttcta

SEQ ID NO: 4928774 - DNA, 25 bp, Homo sapien
caagttgcaagatttggggcagcca

SEQ ID NO: 4928775 - DNA, 25 bp, Homo sapien
caggtggtggccaagttgcaagatt

SEQ ID NO: 4928776 - DNA, 25 bp, Homo sapien
gcagaaacaggtgagtctataaaaa

SEQ ID NO: 4928777 - DNA, 25 bp, Homo sapien
cctgagtcaggctgaagtgaaagct

SEQ ID NO: 4928778 - DNA, 25 bp, Homo sapien
ctgtggtaggatgtttcagttctcc

SEQ ID NO: 4928779 - DNA, 25 bp, Homo sapien
atgtttcagttctcctgagtcaggc

SEQ ID NO: 4928780 - DNA, 25 bp, Homo sapien
ctgagtcaggctgaagtgaaagctc

SEQ ID NO: 4928781 - DNA, 25 bp, Homo sapien
gggctccccagcagtccttgtgaat

SEQ ID NO: 4928782 - DNA, 25 bp, Homo sapien
atcggccagaatttggcagggctcc

SEQ ID NO: 4928783 - DNA, 25 bp, Homo sapien
attgttctcgggataaatcggccag

SEQ ID NO: 4928784 - DNA, 25 bp, Homo sapien
ggcagggctccccagcagtccttgt

SEQ ID NO: 4928785 - DNA, 25 bp, Homo sapien
ccagagaatccccatgttgtcagga

SEQ ID NO: 4928786 - DNA, 25 bp, Homo sapien
gcagatactctagggccttcaccaa

SEQ ID NO: 4928787 - DNA, 25 bp, Homo sapien
tcatttgaacacagcttgggtcctc

SEQ ID NO: 4928788 - DNA, 25 bp, Homo sapien
ttgtcaggacataagcagatactct

SEQ ID NO: 4928789 - DNA, 25 bp, Homo sapien
cagttgagaaagggaatgaagaaca

SEQ ID NO: 4928790 - DNA, 25 bp, Homo sapien
gaataagattgatgtttccatgctg

SEQ ID NO: 4928791 - DNA, 25 bp, Homo sapien
cttcccttctctggaataagattga

SEQ ID NO: 4928792 - DNA, 25 bp, Homo sapien
gttccttctcccagattcctgctgt

SEQ ID NO: 4928793 - DNA, 25 bp, Homo sapien
ttccatgctgtgaaagacgatgatg

SEQ ID NO: 4928794 - DNA, 25 bp, Homo sapien
gcatcagacatgaagccccacgggc

SEQ ID NO: 4928795 - DNA, 25 bp, Homo sapien
gacatgaagccccacgggcttccat

SEQ ID NO: 4928796 - DNA, 25 bp, Homo sapien
aagccccacgggcttccatttgaca

SEQ ID NO: 4928797 - DNA, 25 bp, Homo sapien
gccccacgggcttccatttgacatg

SEQ ID NO: 4928798 - DNA, 25 bp, Homo sapien
gagagccccataaatggatgggtgt

SEQ ID NO: 4928799 - DNA, 25 bp, Homo sapien
tatggagagccccataaatggatgg

SEQ ID NO: 4928800 - DNA, 25 bp, Homo sapien
ccataaatggatgggtgtagacctt

SEQ ID NO: 4928801 - DNA, 25 bp, Homo sapien
ggatgggtgtagaccttgaagtctg

SEQ ID NO: 4928802 - DNA, 25 bp, Homo sapien
tcaagagccacagtagctatggcag

SEQ ID NO: 4928803 - DNA, 25 bp, Homo sapien
tagctatggcagacatttggttgat

SEQ ID NO: 4928804 - DNA, 25 bp, Homo sapien
catttcctaatacgagagtctggca

SEQ ID NO: 4928805 - DNA, 25 bp, Homo sapien
gctattctccctcacagtcttgtca

SEQ ID NO: 4928806 - DNA, 25 bp, Homo sapien
caaaagacctcacttggcctgatgt

SEQ ID NO: 4928807 - DNA, 25 bp, Homo sapien
gggctgcctactgagctaacattag

SEQ ID NO: 4928808 - DNA, 25 bp, Homo sapien
tggtggtaatcccaagtgtagcatt

SEQ ID NO: 4928809 - DNA, 25 bp, Homo sapien
caaaaccacattgtgtatcagtggg

SEQ ID NO: 4928810 - DNA, 25 bp, Homo sapien
taagggcctttgaggagatcgtaaa

SEQ ID NO: 4928811 - DNA, 25 bp, Homo sapien
ggtctcaagactcccaacagggtgt

SEQ ID NO: 4928812 - DNA, 25 bp, Homo sapien
ccaggagtagatgatcaaggtctca

SEQ ID NO: 4928813 - DNA, 25 bp, Homo sapien
gagccttttctatacagacatgaag

SEQ ID NO: 4928814 - DNA, 25 bp, Homo sapien
tggccgaaggtgaggaaagaatact

SEQ ID NO: 4928815 - DNA, 25 bp, Homo sapien
gaagatggccgaaggtgaggaaaga

SEQ ID NO: 4928816 - DNA, 25 bp, Homo sapien
gatggccgaaggtgaggaaagaata

SEQ ID NO: 4928817 - DNA, 25 bp, Homo sapien
tggaagatggccgaaggtgaggaaa

SEQ ID NO: 4928818 - DNA, 25 bp, Homo sapien
ggagtctataaatggatgccagaca

SEQ ID NO: 4928819 - DNA, 25 bp, Homo sapien
tgggcctggacagctcgcactggtt

SEQ ID NO: 4928820 - DNA, 25 bp, Homo sapien
acagaggttaggtatccagtgggcc

SEQ ID NO: 4928821 - DNA, 25 bp, Homo sapien
tggtcatccctcacatctgcatctg

SEQ ID NO: 4928822 - DNA, 25 bp, Homo sapien
cagctgagggacttctgctagagag

SEQ ID NO: 4928823 - DNA, 25 bp, Homo sapien
gctgttctagatatttcctgccctg

SEQ ID NO: 4928824 - DNA, 25 bp, Homo sapien
tagaagcagggtgctgtccccaata

SEQ ID NO: 4928825 - DNA, 25 bp, Homo sapien
ccttgcacatctattaatacagctg

SEQ ID NO: 4928826 - DNA, 25 bp, Homo sapien
catcctctaagcctgtggcctttga

SEQ ID NO: 4928827 - DNA, 25 bp, Homo sapien
gaccctgggaagttgtcagcagcca

SEQ ID NO: 4928828 - DNA, 25 bp, Homo sapien
gggtgacatgcactctgcagtagct

SEQ ID NO: 4928829 - DNA, 25 bp, Homo sapien
ggcccactcagaaagctgtctctct

SEQ ID NO: 4928830 - DNA, 25 bp, Homo sapien
cagtctgcatgcctttctttattct

SEQ ID NO: 4928831 - DNA, 25 bp, Homo sapien
tgcctttctttattcttggaattgc

SEQ ID NO: 4928832 - DNA, 25 bp, Homo sapien
tttctttattcttggaattgcaggg

SEQ ID NO: 4928833 - DNA, 25 bp, Homo sapien
tgcatgcctttctttattcttggaa

SEQ ID NO: 4928834 - DNA, 25 bp, Homo sapien
tgaactcgtataactggtgtgacca

SEQ ID NO: 4928835 - DNA, 25 bp, Homo sapien
cccattgatcgtggttctaattgcc

SEQ ID NO: 4928836 - DNA, 25 bp, Homo sapien
cattgatcgtggttctaattgccat

SEQ ID NO: 4928837 - DNA, 25 bp, Homo sapien
tctgcattcatattgaactcgtata

SEQ ID NO: 4928838 - DNA, 25 bp, Homo sapien
gcttccagggtcacttcctactagg

SEQ ID NO: 4928839 - DNA, 25 bp, Homo sapien
aagtgactgtcagtttgcaaatgag

SEQ ID NO: 4928840 - DNA, 25 bp, Homo sapien
gattctgattacatccaaattggag

SEQ ID NO: 4928841 - DNA, 25 bp, Homo sapien
aggagacatggaaaggagccagttt

SEQ ID NO: 4928842 - DNA, 25 bp, Homo sapien
ggatagaataacctgatggaggtca

SEQ ID NO: 4928843 - DNA, 25 bp, Homo sapien
atccctgcgagcttcaaagatttgt

SEQ ID NO: 4928844 - DNA, 25 bp, Homo sapien
aatccctgcgagcttcaaagatttg

SEQ ID NO: 4928845 - DNA, 25 bp, Homo sapien
tttgttgtttgcttcgtgtgtttgg

SEQ ID NO: 4928846 - DNA, 25 bp, Homo sapien
tgtctctggcatccagataggtgtt

SEQ ID NO: 4928847 - DNA, 25 bp, Homo sapien
ccccgttggcttcttgtgatgtctc

SEQ ID NO: 4928848 - DNA, 25 bp, Homo sapien
tgacttatcaaagccccgttggctt

SEQ ID NO: 4928849 - DNA, 25 bp, Homo sapien
ggtgttggttgccttccaggagtaa

SEQ ID NO: 4928850 - DNA, 25 bp, Homo sapien
ttagtaccggtgaagacgaatccaa

SEQ ID NO: 4928851 - DNA, 25 bp, Homo sapien
aatggttagaaacatgcaatgtgtc

SEQ ID NO: 4928852 - DNA, 25 bp, Homo sapien
gaatggttagaaacatgcaatgtgt

SEQ ID NO: 4928853 - DNA, 25 bp, Homo sapien
cggtgaagacgaatccaagagaaaa

SEQ ID NO: 4928854 - DNA, 25 bp, Homo sapien
gggtgttcttgcatgtgttgacaaa

SEQ ID NO: 4928855 - DNA, 25 bp, Homo sapien
tgtgaaaagacgctcaaaaatctgt

SEQ ID NO: 4928856 - DNA, 25 bp, Homo sapien
tgcgagtctgcgaactcatccatct

SEQ ID NO: 4928857 - DNA, 25 bp, Homo sapien
tcatttgggcttcttagcagggtgt

SEQ ID NO: 4928858 - DNA, 25 bp, Homo sapien
ccctggtcactggaccaggaataac

SEQ ID NO: 4928859 - DNA, 25 bp, Homo sapien
cctggtcactggaccaggaataaca

SEQ ID NO: 4928860 - DNA, 25 bp, Homo sapien
ctggtcactggaccaggaataacaa

SEQ ID NO: 4928861 - DNA, 25 bp, Homo sapien
tacatgatttgacatcggcaatgtc

SEQ ID NO: 4928862 - DNA, 25 bp, Homo sapien
gtgtgcccctcatgtgaagcatgat

SEQ ID NO: 4928863 - DNA, 25 bp, Homo sapien
taaataactctgagaacatggcttt

SEQ ID NO: 4928864 - DNA, 25 bp, Homo sapien
ttgctgttgtacttcccactgatat

SEQ ID NO: 4928865 - DNA, 25 bp, Homo sapien
agatgcaggtcccttgtcaagcctt

SEQ ID NO: 4928866 - DNA, 25 bp, Homo sapien
tttctgggggcacactcatggatgt

SEQ ID NO: 4928867 - DNA, 25 bp, Homo sapien
aggggatttctagtgtgtggtcctt

SEQ ID NO: 4928868 - DNA, 25 bp, Homo sapien
tttggtgttgcagctcgcttgtcag

SEQ ID NO: 4928869 - DNA, 25 bp, Homo sapien
gggggcacactcatggatgtagtcc

SEQ ID NO: 4928870 - DNA, 25 bp, Homo sapien
ctgttcatcactctgctctgagcca

SEQ ID NO: 4928871 - DNA, 25 bp, Homo sapien
cagtgcttggcatagggtctcctaa

SEQ ID NO: 4928872 - DNA, 25 bp, Homo sapien
aacaaagggcccaaactgctcgact

SEQ ID NO: 4928873 - DNA, 25 bp, Homo sapien
aagcttcccggatccgtgatgggca

SEQ ID NO: 4928874 - DNA, 25 bp, Homo sapien
aacgcagtaaccttgcaagtggtgc

SEQ ID NO: 4928875 - DNA, 25 bp, Homo sapien
cagggctcctaccaagctgtgttgt

SEQ ID NO: 4928876 - DNA, 25 bp, Homo sapien
gctcctaccaagctgtgttgtgtgg

SEQ ID NO: 4928877 - DNA, 25 bp, Homo sapien
gacaaggctcgagaaagccagccta

SEQ ID NO: 4928878 - DNA, 25 bp, Homo sapien
cagcctatcaccatgtgggcgtcag

SEQ ID NO: 4928879 - DNA, 25 bp, Homo sapien
tcttcttaggcctggataatcaagc

SEQ ID NO: 4928880 - DNA, 25 bp, Homo sapien
gcacaaccatgtggggtagtcctga

SEQ ID NO: 4928881 - DNA, 25 bp, Homo sapien
tgagagcggttccttgtcttcttag

SEQ ID NO: 4928882 - DNA, 25 bp, Homo sapien
cctctagagtttggggaacactgtg

SEQ ID NO: 4928883 - DNA, 25 bp, Homo sapien
ctctgaggtattctcatctggaagc

SEQ ID NO: 4928884 - DNA, 25 bp, Homo sapien
ttgccaggatcagttatctctgagg

SEQ ID NO: 4928885 - DNA, 25 bp, Homo sapien
acaagcactcaaatcccactgtggg

SEQ ID NO: 4928886 - DNA, 25 bp, Homo sapien
gggagatcatttaggtacagtcctt

SEQ ID NO: 4928887 - DNA, 25 bp, Homo sapien
ctcattggaaggtccctaaagaagc

SEQ ID NO: 4928888 - DNA, 25 bp, Homo sapien
tctcattggaaggtccctaaagaag

SEQ ID NO: 4928889 - DNA, 25 bp, Homo sapien
ctctcattggaaggtccctaaagaa

SEQ ID NO: 4928890 - DNA, 25 bp, Homo sapien
tgaagtggcacttgcatgagcagag

SEQ ID NO: 4928891 - DNA, 25 bp, Homo sapien
tatgtggcttaaagttccagaccca

SEQ ID NO: 4928892 - DNA, 25 bp, Homo sapien
tccagacccacttgtagattagctc

SEQ ID NO: 4928893 - DNA, 25 bp, Homo sapien
tgccttttttggaacctgacagccc

SEQ ID NO: 4928894 - DNA, 25 bp, Homo sapien
gaccctcatggtcatccactgggag

SEQ ID NO: 4928895 - DNA, 25 bp, Homo sapien
tgagctgtacagcctgagctgtagc

SEQ ID NO: 4928896 - DNA, 25 bp, Homo sapien
gctgtagcaggtgaccctcatggtc

SEQ ID NO: 4928897 - DNA, 25 bp, Homo sapien
tccactgggagggcctacttccagc

SEQ ID NO: 4928898 - DNA, 25 bp, Homo sapien
tcctaagcgagtcctgctctgtgtt

SEQ ID NO: 4928899 - DNA, 25 bp, Homo sapien
taagcgagtcctgctctgtgttcct

SEQ ID NO: 4928900 - DNA, 25 bp, Homo sapien
cctaagcgagtcctgctctgtgttc

SEQ ID NO: 4928901 - DNA, 25 bp, Homo sapien
ctaagcgagtcctgctctgtgttcc

SEQ ID NO: 4928902 - DNA, 25 bp, Homo sapien
tgccaccttgcggtccgatctgtca

SEQ ID NO: 4928903 - DNA, 25 bp, Homo sapien
ccccagagctaaggaacacctccct

SEQ ID NO: 4928904 - DNA, 25 bp, Homo sapien
ttgtgccaccttgcggtccgatctg

SEQ ID NO: 4928905 - DNA, 25 bp, Homo sapien
gagctaaggaacacctccctgcaag

SEQ ID NO: 4928906 - DNA, 25 bp, Homo sapien
tgaccccagaatacgacctgcctgg

SEQ ID NO: 4928907 - DNA, 25 bp, Homo sapien
agtgtcctctgagcattgttcaggg

SEQ ID NO: 4928908 - DNA, 25 bp, Homo sapien
tacgacctgcctggtcttagtggct

SEQ ID NO: 4928909 - DNA, 25 bp, Homo sapien
gtgtgctgaccccagaatacgacct

SEQ ID NO: 4928910 - DNA, 25 bp, Homo sapien
aatttatgcacattgagcctacagc

SEQ ID NO: 4928911 - DNA, 25 bp, Homo sapien
acaaatagccttgaggtgtttttat

SEQ ID NO: 4928912 - DNA, 25 bp, Homo sapien
gtaatttatgcacattgagcctaca

SEQ ID NO: 4928913 - DNA, 25 bp, Homo sapien
ctgattaacaaatagccttgaggtg

SEQ ID NO: 4928914 - DNA, 25 bp, Homo sapien
ttcaggatcaggtagttgagggact

SEQ ID NO: 4928915 - DNA, 25 bp, Homo sapien
ctctccccgagtaaaaggaccattg

SEQ ID NO: 4928916 - DNA, 25 bp, Homo sapien
ttggagaatccatgcaatctttgga

SEQ ID NO: 4928917 - DNA, 25 bp, Homo sapien
taaaaggaccattggagaatccatg

SEQ ID NO: 4928918 - DNA, 25 bp, Homo sapien
ccgagtaaaaggaccattggagaat

SEQ ID NO: 4928919 - DNA, 25 bp, Homo sapien
gatgccagctttgttgccgataatt

SEQ ID NO: 4928920 - DNA, 25 bp, Homo sapien
tccaagactagagtgtgtgttattc

SEQ ID NO: 4928921 - DNA, 25 bp, Homo sapien
aagagcttcctgatattctgtttcc

SEQ ID NO: 4928922 - DNA, 25 bp, Homo sapien
ttagatggggtctcgtagatgccag

SEQ ID NO: 4928923 - DNA, 25 bp, Homo sapien
tgcccgcatgtatgagccttccttg

SEQ ID NO: 4928924 - DNA, 25 bp, Homo sapien
ggtgctcttgggtcttctttatgta

SEQ ID NO: 4928925 - DNA, 25 bp, Homo sapien
tataaggcccacttttgacaccctc

SEQ ID NO: 4928926 - DNA, 25 bp, Homo sapien
cacctggcccggtagcattttccaa

SEQ ID NO: 4928927 - DNA, 25 bp, Homo sapien
tccttgaagaaggtggtattgtttc

SEQ ID NO: 4928928 - DNA, 25 bp, Homo sapien
atggtgcagtatattcctgcatcat

SEQ ID NO: 4928929 - DNA, 25 bp, Homo sapien
tccctttctagatggtgcagtatat

SEQ ID NO: 4928930 - DNA, 25 bp, Homo sapien
gtattgtttccctttctagatggtg

SEQ ID NO: 4928931 - DNA, 25 bp, Homo sapien
tctcctcttcccaattgattggagc

SEQ ID NO: 4928932 - DNA, 25 bp, Homo sapien
agttcccccgttgctctgcagctga

SEQ ID NO: 4928933 - DNA, 25 bp, Homo sapien
cagctgaatttggcttgaacgtctt

SEQ ID NO: 4928934 - DNA, 25 bp, Homo sapien
ctacaccaactgtgtaacgagttcc

SEQ ID NO: 4928935 - DNA, 25 bp, Homo sapien
cagtaagaagggcattcctcgctat

SEQ ID NO: 4928936 - DNA, 25 bp, Homo sapien
tcagcctggagtgcgtgattcccac

SEQ ID NO: 4928937 - DNA, 25 bp, Homo sapien
ctcagcctggagtgcgtgattccca

SEQ ID NO: 4928938 - DNA, 25 bp, Homo sapien
gcattcctcgctatgggctctgctc

SEQ ID NO: 4928939 - DNA, 25 bp, Homo sapien
gagagtggtgttggtttttgcctgg

SEQ ID NO: 4928940 - DNA, 25 bp, Homo sapien
cagagcaagatctcagagagggatt

SEQ ID NO: 4928941 - DNA, 25 bp, Homo sapien
aaagacaaggatcgccttccctgcc

SEQ ID NO: 4928942 - DNA, 25 bp, Homo sapien
tgtccccacttataacagagcaaga

SEQ ID NO: 4928943 - DNA, 25 bp, Homo sapien
gctgatctggcaacatgactctcca

SEQ ID NO: 4928944 - DNA, 25 bp, Homo sapien
actgagggggttgccgtggcctgca

SEQ ID NO: 4928945 - DNA, 25 bp, Homo sapien
gtggtggatgctgatctggcaacat

SEQ ID NO: 4928946 - DNA, 25 bp, Homo sapien
gactctccactgagggggttgccgt

SEQ ID NO: 4928947 - DNA, 25 bp, Homo sapien
accctgtcccgatccgcatccacaa

SEQ ID NO: 4928948 - DNA, 25 bp, Homo sapien
tgtcccgatccgcatccacaaggtc

SEQ ID NO: 4928949 - DNA, 25 bp, Homo sapien
cgatccgcatccacaaggtctgcat

SEQ ID NO: 4928950 - DNA, 25 bp, Homo sapien
tcccgatccgcatccacaaggtctg

SEQ ID NO: 4928951 - DNA, 25 bp, Homo sapien
aggctggctggcatttggttgagaa

SEQ ID NO: 4928952 - DNA, 25 bp, Homo sapien
gctggcatttggttgagaatatgtc

SEQ ID NO: 4928953 - DNA, 25 bp, Homo sapien
tccatacccaccctcgccagtgcag

SEQ ID NO: 4928954 - DNA, 25 bp, Homo sapien
ttccaagacagcggctgcccaggtg

SEQ ID NO: 4928955 - DNA, 25 bp, Homo sapien
caggtttctaatgccggcagcctgg

SEQ ID NO: 4928956 - DNA, 25 bp, Homo sapien
tttatcacactgagcacagcaaggg

SEQ ID NO: 4928957 - DNA, 25 bp, Homo sapien
gagcctgggtctgactagagcttta

SEQ ID NO: 4928958 - DNA, 25 bp, Homo sapien
cagtaggtagctggcaaaccctggc

SEQ ID NO: 4928959 - DNA, 25 bp, Homo sapien
ctaattaatgaacccaaagctgctg

SEQ ID NO: 4928960 - DNA, 25 bp, Homo sapien
tgctcctcgaatgtgccagacatgg

SEQ ID NO: 4928961 - DNA, 25 bp, Homo sapien
catggcatttggagtaggctgctcc

SEQ ID NO: 4928962 - DNA, 25 bp, Homo sapien
tgagggagtgtctccatccacaggg

SEQ ID NO: 4928963 - DNA, 25 bp, Homo sapien
taggtgatgcttctttccatctaga

SEQ ID NO: 4928964 - DNA, 25 bp, Homo sapien
tagaaccacgactctacagagcatc

SEQ ID NO: 4928965 - DNA, 25 bp, Homo sapien
gcaagtctgagacatgttattccag

SEQ ID NO: 4928966 - DNA, 25 bp, Homo sapien
cctggagcttttggtaggtgatgct

SEQ ID NO: 4928967 - DNA, 25 bp, Homo sapien
gagatattagggaaatgagccctag

SEQ ID NO: 4928968 - DNA, 25 bp, Homo sapien
gatattagggaaatgagccctagca

SEQ ID NO: 4928969 - DNA, 25 bp, Homo sapien
ttagggaaatgagccctagcacttc

SEQ ID NO: 4928970 - DNA, 25 bp, Homo sapien
gaaatgagccctagcacttctctca

SEQ ID NO: 4928971 - DNA, 25 bp, Homo sapien
tctttggtggagtggagtactcacc

SEQ ID NO: 4928972 - DNA, 25 bp, Homo sapien
agcacagcccctgacactgagtggg

SEQ ID NO: 4928973 - DNA, 25 bp, Homo sapien
ggagtggagtactcacccgtcaacc

SEQ ID NO: 4928974 - DNA, 25 bp, Homo sapien
gagtgggtgctttatcagggttctt

SEQ ID NO: 4928975 - DNA, 25 bp, Homo sapien
aaggcatgggcgcagaggcattttc

SEQ ID NO: 4928976 - DNA, 25 bp, Homo sapien
tctggtaaaggcatgggcgcagagg

SEQ ID NO: 4928977 - DNA, 25 bp, Homo sapien
ttcctcggcaggacctgcctgtctg

SEQ ID NO: 4928978 - DNA, 25 bp, Homo sapien
gcctgtctgtgcaggaatgtcttct

SEQ ID NO: 4928979 - DNA, 25 bp, Homo sapien
tgctgtctccgctggcctgaaggag

SEQ ID NO: 4928980 - DNA, 25 bp, Homo sapien
tccttgtccactagagatggtctca

SEQ ID NO: 4928981 - DNA, 25 bp, Homo sapien
taagatcgtgggtccattcgaggca

SEQ ID NO: 4928982 - DNA, 25 bp, Homo sapien
tttggaaagggtgtccgctgccact

SEQ ID NO: 4928983 - DNA, 25 bp, Homo sapien
gaaagacaagggaacaagccaacag

SEQ ID NO: 4928984 - DNA, 25 bp, Homo sapien
aaagacaagggaacaagccaacagc

SEQ ID NO: 4928985 - DNA, 25 bp, Homo sapien
aagacaagggaacaagccaacagct

SEQ ID NO: 4928986 - DNA, 25 bp, Homo sapien
tcctccatttcaatatgcactgact

SEQ ID NO: 4928987 - DNA, 25 bp, Homo sapien
gaatggggctgcatatccaactgtc

SEQ ID NO: 4928988 - DNA, 25 bp, Homo sapien
ctcctccatttcaatatgcactgac

SEQ ID NO: 4928989 - DNA, 25 bp, Homo sapien
gcatatccaactgtcccagtgtctc

SEQ ID NO: 4928990 - DNA, 25 bp, Homo sapien
tatctgttgtatagccattgctgac

SEQ ID NO: 4928991 - DNA, 25 bp, Homo sapien
gtatcaagtgttaagctcctaaggg

SEQ ID NO: 4928992 - DNA, 25 bp, Homo sapien
catatcagatgtgacagggcttctc

SEQ ID NO: 4928993 - DNA, 25 bp, Homo sapien
cacgtgctgctctgaatgttaaatc

SEQ ID NO: 4928994 - DNA, 25 bp, Homo sapien
gctgctgtttcagttgctccttgga

SEQ ID NO: 4928995 - DNA, 25 bp, Homo sapien
tgctgtttcagttgctccttggaga

SEQ ID NO: 4928996 - DNA, 25 bp, Homo sapien
ctgtttcagttgctccttggagaag

SEQ ID NO: 4928997 - DNA, 25 bp, Homo sapien
gctgtttcagttgctccttggagaa

SEQ ID NO: 4928998 - DNA, 25 bp, Homo sapien
tctgatgtgagtagcagcaggaggg

SEQ ID NO: 4928999 - DNA, 25 bp, Homo sapien
ctctccccggctagtgacacatggg

SEQ ID NO: 4929000 - DNA, 25 bp, Homo sapien
cggctagtgacacatgggaatggtc

SEQ ID NO: 4929001 - DNA, 25 bp, Homo sapien
cagatcctgtgggacaatgtgattc

SEQ ID NO: 4929002 - DNA, 25 bp, Homo sapien
tcagagatgttactggtccatcacc

SEQ ID NO: 4929003 - DNA, 25 bp, Homo sapien
gatgttactggtccatcaccaagca

SEQ ID NO: 4929004 - DNA, 25 bp, Homo sapien
cccacacgttgcaggggttcccttg

SEQ ID NO: 4929005 - DNA, 25 bp, Homo sapien
ttactggtccatcaccaagcagccg

SEQ ID NO: 4929006 - DNA, 25 bp, Homo sapien
gagtttgagaagtttgccattggca

SEQ ID NO: 4929007 - DNA, 25 bp, Homo sapien
aagctagagtttgagaagtttgcca

SEQ ID NO: 4929008 - DNA, 25 bp, Homo sapien
aagtttgccattggcatttagagtc

SEQ ID NO: 4929009 - DNA, 25 bp, Homo sapien
cttgttggaagctagagtttgagaa

SEQ ID NO: 4929010 - DNA, 25 bp, Homo sapien
cggccgcagatgaggatttatggcc

SEQ ID NO: 4929011 - DNA, 25 bp, Homo sapien
tgcttcggcctcaggagcctgtctc

SEQ ID NO: 4929012 - DNA, 25 bp, Homo sapien
tttatggcctgagctgcttcggcct

SEQ ID NO: 4929013 - DNA, 25 bp, Homo sapien
gcagatgaggatttatggcctgagc

SEQ ID NO: 4929014 - DNA, 25 bp, Homo sapien
ctgggccaccggctctaattggtag

SEQ ID NO: 4929015 - DNA, 25 bp, Homo sapien
gccagagcgaatactcctgggccac

SEQ ID NO: 4929016 - DNA, 25 bp, Homo sapien
ggtggtgcctttagcggtgaacaaa

SEQ ID NO: 4929017 - DNA, 25 bp, Homo sapien
gggccaccggctctaattggtagtg

SEQ ID NO: 4929018 - DNA, 25 bp, Homo sapien
gggctccagagggaataccatcaga

SEQ ID NO: 4929019 - DNA, 25 bp, Homo sapien
gacaggtacaggagtaagcacatga

SEQ ID NO: 4929020 - DNA, 25 bp, Homo sapien
ctgacaatgatgacaggtacaggag

SEQ ID NO: 4929021 - DNA, 25 bp, Homo sapien
tgatgacaggtacaggagtaagcac

SEQ ID NO: 4929022 - DNA, 25 bp, Homo sapien
tggtgtgatgcctgcccctcagtgc

SEQ ID NO: 4929023 - DNA, 25 bp, Homo sapien
tggaactgctgattgcaaaattgat

SEQ ID NO: 4929024 - DNA, 25 bp, Homo sapien
tcagtgccctgtagcccttccactt

SEQ ID NO: 4929025 - DNA, 25 bp, Homo sapien
tcctgctatggaacctgtggctgga

SEQ ID NO: 4929026 - DNA, 25 bp, Homo sapien
cttgccccagtcgtccattgaaggg

SEQ ID NO: 4929027 - DNA, 25 bp, Homo sapien
tgccccagtcgtccattgaagggca

SEQ ID NO: 4929028 - DNA, 25 bp, Homo sapien
ccttgccccagtcgtccattgaagg

SEQ ID NO: 4929029 - DNA, 25 bp, Homo sapien
cccagtcgtccattgaagggcagag

SEQ ID NO: 4929030 - DNA, 25 bp, Homo sapien
aaggtgatcaccctttggaaagacg

SEQ ID NO: 4929031 - DNA, 25 bp, Homo sapien
tatagggatgttagcttccccaagg

SEQ ID NO: 4929032 - DNA, 25 bp, Homo sapien
aatgtgaagttttgaggccccctct

SEQ ID NO: 4929033 - DNA, 25 bp, Homo sapien
ctcagcacctgtgtctatagggatg

SEQ ID NO: 4929034 - DNA, 25 bp, Homo sapien
gagagtttacctgaacatctcgcct

SEQ ID NO: 4929035 - DNA, 25 bp, Homo sapien
gtttacctgaacatctcgcctatac

SEQ ID NO: 4929036 - DNA, 25 bp, Homo sapien
acctgaacatctcgcctatacattg

SEQ ID NO: 4929037 - DNA, 25 bp, Homo sapien
catctcgcctatacattgagatgaa

SEQ ID NO: 4929038 - DNA, 25 bp, Homo sapien
cttgccaagcctggaagatcctgga

SEQ ID NO: 4929039 - DNA, 25 bp, Homo sapien
tccttgccaagcctggaagatcctg

SEQ ID NO: 4929040 - DNA, 25 bp, Homo sapien
attccttgccaagcctggaagatcc

SEQ ID NO: 4929041 - DNA, 25 bp, Homo sapien
tcattccttgccaagcctggaagat

SEQ ID NO: 4929042 - DNA, 25 bp, Homo sapien
ctggaaggttttgatcagcactgtg

SEQ ID NO: 4929043 - DNA, 25 bp, Homo sapien
tggaaggttttgatcagcactgtgc

SEQ ID NO: 4929044 - DNA, 25 bp, Homo sapien
ggaaggttttgatcagcactgtgcc

SEQ ID NO: 4929045 - DNA, 25 bp, Homo sapien
ttggctctgcctacataccatcggc

SEQ ID NO: 4929046 - DNA, 25 bp, Homo sapien
gccagaactgggattgtggtcatac

SEQ ID NO: 4929047 - DNA, 25 bp, Homo sapien
tgatgtcaactgtccgaaccaggct

SEQ ID NO: 4929048 - DNA, 25 bp, Homo sapien
tgcatggtccctgaagattcacctt

SEQ ID NO: 4929049 - DNA, 25 bp, Homo sapien
gagatgctggcttaaatgcatcttt

SEQ ID NO: 4929050 - DNA, 25 bp, Homo sapien
tttactgtgtaatctaggagttgtt

SEQ ID NO: 4929051 - DNA, 25 bp, Homo sapien
tgtaatctaggagttgttgtggttg

SEQ ID NO: 4929052 - DNA, 25 bp, Homo sapien
tctgagagatgctggcttaaatgca

SEQ ID NO: 4929053 - DNA, 25 bp, Homo sapien
ggccacagcttcggagactcgggtc

SEQ ID NO: 4929054 - DNA, 25 bp, Homo sapien
cacagcttcggagactcgggtcagg

SEQ ID NO: 4929055 - DNA, 25 bp, Homo sapien
tactggccacagcttcggagactcg

SEQ ID NO: 4929056 - DNA, 25 bp, Homo sapien
ttactggccacagcttcggagactc

SEQ ID NO: 4929057 - DNA, 25 bp, Homo sapien
cagccactttaatgaggttgttaga

SEQ ID NO: 4929058 - DNA, 25 bp, Homo sapien
cattttgctgagctttaaaatgagg

SEQ ID NO: 4929059 - DNA, 25 bp, Homo sapien
ctgggttatttctgccctcagccac

SEQ ID NO: 4929060 - DNA, 25 bp, Homo sapien
ctgtctagacctgggttatttctgc

SEQ ID NO: 4929061 - DNA, 25 bp, Homo sapien
gaacccagtaccattgacagtaagc

SEQ ID NO: 4929062 - DNA, 25 bp, Homo sapien
ctgggtgaagggtaccattgaaaga

SEQ ID NO: 4929063 - DNA, 25 bp, Homo sapien
tgaaagatgtcgaagaacccagtac

SEQ ID NO: 4929064 - DNA, 25 bp, Homo sapien
cagtaagcctggtggtaacccttca

SEQ ID NO: 4929065 - DNA, 25 bp, Homo sapien
tgctttccgtgattctggtgggctt

SEQ ID NO: 4929066 - DNA, 25 bp, Homo sapien
tttccgtgattctggtgggcttctc

SEQ ID NO: 4929067 - DNA, 25 bp, Homo sapien
cttcttctccaaatacgttggaaga

SEQ ID NO: 4929068 - DNA, 25 bp, Homo sapien
caaatacgttggaagattctgcttt

SEQ ID NO: 4929069 - DNA, 25 bp, Homo sapien
tttcattcaacctgatgaaggccat

SEQ ID NO: 4929070 - DNA, 25 bp, Homo sapien
tgtcatcgccagtatcccatcccat

SEQ ID NO: 4929071 - DNA, 25 bp, Homo sapien
gcctgtcatcgccagtatcccatcc

SEQ ID NO: 4929072 - DNA, 25 bp, Homo sapien
tcatcgccagtatcccatcccatca

SEQ ID NO: 4929073 - DNA, 25 bp, Homo sapien
ttggcctgtcatcgccagtatccca

SEQ ID NO: 4929074 - DNA, 25 bp, Homo sapien
gcagagcgaggacaagtatggcatt

SEQ ID NO: 4929075 - DNA, 25 bp, Homo sapien
tccactggtcagaaccctggcagag

SEQ ID NO: 4929076 - DNA, 25 bp, Homo sapien
tcccacgggatagtgatcattagac

SEQ ID NO: 4929077 - DNA, 25 bp, Homo sapien
ttgaggtgcccgaagtgcctgtgac

SEQ ID NO: 4929078 - DNA, 25 bp, Homo sapien
ttacacagagcacacggcatctcca

SEQ ID NO: 4929079 - DNA, 25 bp, Homo sapien
tggaactgttctgtcccggaactgt

SEQ ID NO: 4929080 - DNA, 25 bp, Homo sapien
ttctcctgggttgcactatcccctg

SEQ ID NO: 4929081 - DNA, 25 bp, Homo sapien
gcctgctgttctgggttggaactgt

SEQ ID NO: 4929082 - DNA, 25 bp, Homo sapien
gaggagtcctccagttgcaactcat

SEQ ID NO: 4929083 - DNA, 25 bp, Homo sapien
tgaggagtcctccagttgcaactca

SEQ ID NO: 4929084 - DNA, 25 bp, Homo sapien
ggtttgaggagtcctccagttgcaa

SEQ ID NO: 4929085 - DNA, 25 bp, Homo sapien
tttgaggagtcctccagttgcaact

SEQ ID NO: 4929086 - DNA, 25 bp, Homo sapien
tgagcacgaaaccacatggcagacc

SEQ ID NO: 4929087 - DNA, 25 bp, Homo sapien
aagagcctctgagcacgaaaccaca

SEQ ID NO: 4929088 - DNA, 25 bp, Homo sapien
gggtagagaaaatcaaagcccttga

SEQ ID NO: 4929089 - DNA, 25 bp, Homo sapien
tcagcaaatgatgccaagagcctct

SEQ ID NO: 4929090 - DNA, 25 bp, Homo sapien
atgtagcccatgagaacagagaggc

SEQ ID NO: 4929091 - DNA, 25 bp, Homo sapien
catgtagcccatgagaacagagagg

SEQ ID NO: 4929092 - DNA, 25 bp, Homo sapien
gggtcctgcacgcttttgcctttgt

SEQ ID NO: 4929093 - DNA, 25 bp, Homo sapien
cttttccttcccatatcctcctaat

SEQ ID NO: 4929094 - DNA, 25 bp, Homo sapien
atcctcctaatttacgtttgacttg

SEQ ID NO: 4929095 - DNA, 25 bp, Homo sapien
atggggtcctgcacgcttttgcctt

SEQ ID NO: 4929096 - DNA, 25 bp, Homo sapien
cacttgaaatggtggtcgaaggaag

SEQ ID NO: 4929097 - DNA, 25 bp, Homo sapien
gcacttgaaatggtggtcgaaggaa

SEQ ID NO: 4929098 - DNA, 25 bp, Homo sapien
agcacttgaaatggtggtcgaagga

SEQ ID NO: 4929099 - DNA, 25 bp, Homo sapien
agtactgagaagacgtggacaaaca

SEQ ID NO: 4929100 - DNA, 25 bp, Homo sapien
ttaagtactgagaagacgtggacaa

SEQ ID NO: 4929101 - DNA, 25 bp, Homo sapien
caaacaggaacactccttctgctct

SEQ ID NO: 4929102 - DNA, 25 bp, Homo sapien
ctgagaagacgtggacaaacaggaa

SEQ ID NO: 4929103 - DNA, 25 bp, Homo sapien
tacaaacagatactggatctccaag

SEQ ID NO: 4929104 - DNA, 25 bp, Homo sapien
gacccaactttgtacaccactggtg

SEQ ID NO: 4929105 - DNA, 25 bp, Homo sapien
aaaagctccgataattgacccaact

SEQ ID NO: 4929106 - DNA, 25 bp, Homo sapien
aaagcctcgcactctaggacttgag

SEQ ID NO: 4929107 - DNA, 25 bp, Homo sapien
cccaggggagctcctttcaggcttg

SEQ ID NO: 4929108 - DNA, 25 bp, Homo sapien
caggggagctcctttcaggcttggg

SEQ ID NO: 4929109 - DNA, 25 bp, Homo sapien
gagctcctttcaggcttgggcagga

SEQ ID NO: 4929110 - DNA, 25 bp, Homo sapien
gggagctcctttcaggcttgggcag

SEQ ID NO: 4929111 - DNA, 25 bp, Homo sapien
tgaccccctgctggtggtgtgcctg

SEQ ID NO: 4929112 - DNA, 25 bp, Homo sapien
cccctgaccccctgctggtggtgtg

SEQ ID NO: 4929113 - DNA, 25 bp, Homo sapien
acagcaccaaggttgtcaccatccc

SEQ ID NO: 4929114 - DNA, 25 bp, Homo sapien
ccacagcaccaaggttgtcaccatc

SEQ ID NO: 4929115 - DNA, 25 bp, Homo sapien
tccaggggagaccactgacagtgac

SEQ ID NO: 4929116 - DNA, 25 bp, Homo sapien
tgtccaggggagaccactgacagtg

SEQ ID NO: 4929117 - DNA, 25 bp, Homo sapien
aaatgtccaggggagaccactgaca

SEQ ID NO: 4929118 - DNA, 25 bp, Homo sapien
ccaggggagaccactgacagtgacc

SEQ ID NO: 4929119 - DNA, 25 bp, Homo sapien
ggccctgtggtatcaatgcctatcc

SEQ ID NO: 4929120 - DNA, 25 bp, Homo sapien
cgacgaagaaactcatcaggcgtga

SEQ ID NO: 4929121 - DNA, 25 bp, Homo sapien
ctggctgccatgatgagcctggcag

SEQ ID NO: 4929122 - DNA, 25 bp, Homo sapien
caacaccctgcatgccatgcatttt

SEQ ID NO: 4929123 - DNA, 25 bp, Homo sapien
caatgactgagtataacacctttct

SEQ ID NO: 4929124 - DNA, 25 bp, Homo sapien
cactgcgactgatggcaatgactga

SEQ ID NO: 4929125 - DNA, 25 bp, Homo sapien
tggtcaactctacccaggaaccacg

SEQ ID NO: 4929126 - DNA, 25 bp, Homo sapien
gaactcaacctctaccaacttggaa

SEQ ID NO: 4929127 - DNA, 25 bp, Homo sapien
gtttagcagataaccaaaatgcatc

SEQ ID NO: 4929128 - DNA, 25 bp, Homo sapien
tacacacagactatgtcaggtggtg

SEQ ID NO: 4929129 - DNA, 25 bp, Homo sapien
gagaggtctatggaaattatcatgc

SEQ ID NO: 4929130 - DNA, 25 bp, Homo sapien
tggttataggaatgcaattgggcac

SEQ ID NO: 4929131 - DNA, 25 bp, Homo sapien
tcctccaaacgaaaggatttattga

SEQ ID NO: 4929132 - DNA, 25 bp, Homo sapien
gctgactctgctacatgatgctatg

SEQ ID NO: 4929133 - DNA, 25 bp, Homo sapien
ccaagatgtcaaagttgataagtgg

SEQ ID NO: 4929134 - DNA, 25 bp, Homo sapien
tcttcaagaataacactgcagataa

SEQ ID NO: 4929135 - DNA, 25 bp, Homo sapien
caggtgctgcctcggaatgtaatga

SEQ ID NO: 4929136 - DNA, 25 bp, Homo sapien
tagatcgtctcaatgcaggtgctgc

SEQ ID NO: 4929137 - DNA, 25 bp, Homo sapien
aagtcatgcatcagaaaagcctcag

SEQ ID NO: 4929138 - DNA, 25 bp, Homo sapien
tgtaatgaaacttcaacccaggtac

SEQ ID NO: 4929139 - DNA, 25 bp, Homo sapien
gaagaggtgtactctggccatctca

SEQ ID NO: 4929140 - DNA, 25 bp, Homo sapien
tgcatagagcacttaccaggaatgg

SEQ ID NO: 4929141 - DNA, 25 bp, Homo sapien
caagggtcactgtctaggctagaag

SEQ ID NO: 4929142 - DNA, 25 bp, Homo sapien
cataaagatagcatccagcaacggg

SEQ ID NO: 4929143 - DNA, 25 bp, Homo sapien
tcaataccataaagaactgtagctg

SEQ ID NO: 4929144 - DNA, 25 bp, Homo sapien
gaatggaaccaattatttcagtggc

SEQ ID NO: 4929145 - DNA, 25 bp, Homo sapien
aaagtgactctacagctgtgggatc

SEQ ID NO: 4929146 - DNA, 25 bp, Homo sapien
tgcaaaaggccagattgaaccaatt

SEQ ID NO: 4929147 - DNA, 25 bp, Homo sapien
tgcgacgaggacgaagactgggttt

SEQ ID NO: 4929148 - DNA, 25 bp, Homo sapien
cgtcctcgatcgttccccttgtgga

SEQ ID NO: 4929149 - DNA, 25 bp, Homo sapien
ggagctcaggaaacgcggcttgttt

SEQ ID NO: 4929150 - DNA, 25 bp, Homo sapien
gggtgaaaagcgtcattcgaggtcc

SEQ ID NO: 4929151 - DNA, 25 bp, Homo sapien
ctaattaaagcttcacagtgatcct

SEQ ID NO: 4929152 - DNA, 25 bp, Homo sapien
agtgtaaggtcacgccgctggtaga

SEQ ID NO: 4929153 - DNA, 25 bp, Homo sapien
gaagtgtaaggtcacgccgctggta

SEQ ID NO: 4929154 - DNA, 25 bp, Homo sapien
acagtgatcctcttaggttatttct

SEQ ID NO: 4929155 - DNA, 25 bp, Homo sapien
acactgcaccagtgtcatcccactt

SEQ ID NO: 4929156 - DNA, 25 bp, Homo sapien
ctgcaccagtgtcatcccacttccc

SEQ ID NO: 4929157 - DNA, 25 bp, Homo sapien
cactgcaccagtgtcatcccacttc

SEQ ID NO: 4929158 - DNA, 25 bp, Homo sapien
tcacactgcaccagtgtcatcccac

SEQ ID NO: 4929159 - DNA, 25 bp, Homo sapien
cataagtctacttctgggctgtcta

SEQ ID NO: 4929160 - DNA, 25 bp, Homo sapien
ggttggaaatgcacaattagtatgc

SEQ ID NO: 4929161 - DNA, 25 bp, Homo sapien
gcttctgcgcctcaattaaaatcag

SEQ ID NO: 4929162 - DNA, 25 bp, Homo sapien
caccattggttgaaaagacggtatg

SEQ ID NO: 4929163 - DNA, 25 bp, Homo sapien
aaaaatcattcttcgctgggcatgg

SEQ ID NO: 4929164 - DNA, 25 bp, Homo sapien
aaaaaatcattcttcgctgggcatg

SEQ ID NO: 4929165 - DNA, 25 bp, Homo sapien
tctgtgaagtttgagcaagcggcct

SEQ ID NO: 4929166 - DNA, 25 bp, Homo sapien
aagcggccttcccaagatgtaccga

SEQ ID NO: 4929167 - DNA, 25 bp, Homo sapien
taaccatctgtcagtagcttgtgct

SEQ ID NO: 4929168 - DNA, 25 bp, Homo sapien
gatgtaccgaatatctcaactgatg

SEQ ID NO: 4929169 - DNA, 25 bp, Homo sapien
ggagctgggtccgagccctcaagct

SEQ ID NO: 4929170 - DNA, 25 bp, Homo sapien
aagctcgctcagggtccgctgccat

SEQ ID NO: 4929171 - DNA, 25 bp, Homo sapien
gcagcgccggatccgcccaaggttt

SEQ ID NO: 4929172 - DNA, 25 bp, Homo sapien
cccaaggtttcgcgggagggagctg

SEQ ID NO: 4929173 - DNA, 25 bp, Homo sapien
gtagtccagtgcctccaaacgagca

SEQ ID NO: 4929174 - DNA, 25 bp, Homo sapien
aacgagcaccaatctcaaaagtgat

SEQ ID NO: 4929175 - DNA, 25 bp, Homo sapien
agtgcctccaaacgagcaccaatct

SEQ ID NO: 4929176 - DNA, 25 bp, Homo sapien
tttgtaagtagtccagtgcctccaa

SEQ ID NO: 4929177 - DNA, 25 bp, Homo sapien
gcttggtgtagatgtatatgggtat

SEQ ID NO: 4929178 - DNA, 25 bp, Homo sapien
gactgaattccctgaggctgcatgc

SEQ ID NO: 4929179 - DNA, 25 bp, Homo sapien
agtggtccacattcacaaaaccaaa

SEQ ID NO: 4929180 - DNA, 25 bp, Homo sapien
tttattaactcaaactgtcagcgct

SEQ ID NO: 4929181 - DNA, 25 bp, Homo sapien
tcatcataacgatgactccagcgct

SEQ ID NO: 4929182 - DNA, 25 bp, Homo sapien
tattgctatcccagtaaatccactc

SEQ ID NO: 4929183 - DNA, 25 bp, Homo sapien
tttcttagtgctggtctctcaaggg

SEQ ID NO: 4929184 - DNA, 25 bp, Homo sapien
aaaatggaccaacatcttgccctcc

SEQ ID NO: 4929185 - DNA, 25 bp, Homo sapien
tgtatattaaataagcatttcttaa

SEQ ID NO: 4929186 - DNA, 25 bp, Homo sapien
caacttttaagatcaattccatgta

SEQ ID NO: 4929187 - DNA, 25 bp, Homo sapien
aacaacttttaagatcaattccatg

SEQ ID NO: 4929188 - DNA, 25 bp, Homo sapien
taaacaacttttaagatcaattcca

SEQ ID NO: 4929189 - DNA, 25 bp, Homo sapien
tgtccaacgagccagaacttcttct

SEQ ID NO: 4929190 - DNA, 25 bp, Homo sapien
cagggtaatagcgacagtctgtcca

SEQ ID NO: 4929191 - DNA, 25 bp, Homo sapien
ttctttgttaattgcttcaatcttg

SEQ ID NO: 4929192 - DNA, 25 bp, Homo sapien
ttcaatcttggcagggtaatagcga

SEQ ID NO: 4929193 - DNA, 25 bp, Homo sapien
cacactcttgggtagatgttcataa

SEQ ID NO: 4929194 - DNA, 25 bp, Homo sapien
tcaaatgctcccgaaaaagaatact

SEQ ID NO: 4929195 - DNA, 25 bp, Homo sapien
gttagccacaaactagaaacagaga

SEQ ID NO: 4929196 - DNA, 25 bp, Homo sapien
taaacactacttaggtagcaaacca

SEQ ID NO: 4929197 - DNA, 25 bp, Homo sapien
tttccacagttgcagtcaaccgcgg

SEQ ID NO: 4929198 - DNA, 25 bp, Homo sapien
taaaaaacacgtgcaagtattccaa

SEQ ID NO: 4929199 - DNA, 25 bp, Homo sapien
cttcttgccaagaagctgtcactca

SEQ ID NO: 4929200 - DNA, 25 bp, Homo sapien
tcaaccgcggtctgaaaaggagtga

SEQ ID NO: 4929201 - DNA, 25 bp, Homo sapien
ggccgtctgggcattaatacctctc

SEQ ID NO: 4929202 - DNA, 25 bp, Homo sapien
gaaaaactcagcttgcacaccaggc

SEQ ID NO: 4929203 - DNA, 25 bp, Homo sapien
gttatgcaaacaactgatcaggcga

SEQ ID NO: 4929204 - DNA, 25 bp, Homo sapien
tgctcttacactgaacggatggctt

SEQ ID NO: 4929205 - DNA, 25 bp, Homo sapien
aacaacgaattactccatcataaaa

SEQ ID NO: 4929206 - DNA, 25 bp, Homo sapien
taaacaacgaattactccatcataa

SEQ ID NO: 4929207 - DNA, 25 bp, Homo sapien
tttaaacaacgaattactccatcat

SEQ ID NO: 4929208 - DNA, 25 bp, Homo sapien
caacgaattactccatcataaaact

SEQ ID NO: 4929209 - DNA, 25 bp, Homo sapien
tgccccttagcatcctcgggcatgg

SEQ ID NO: 4929210 - DNA, 25 bp, Homo sapien
agcatcctcgggcatggctttaatg

SEQ ID NO: 4929211 - DNA, 25 bp, Homo sapien
atcctcgggcatggctttaatgtgc

SEQ ID NO: 4929212 - DNA, 25 bp, Homo sapien
ccttagcatcctcgggcatggcttt

SEQ ID NO: 4929213 - DNA, 25 bp, Homo sapien
tagcaggtctaaaccaaagaagcaa

SEQ ID NO: 4929214 - DNA, 25 bp, Homo sapien
gacctataactttagcaggtctaaa

SEQ ID NO: 4929215 - DNA, 25 bp, Homo sapien
gaaactagtgacctataactttagc

SEQ ID NO: 4929216 - DNA, 25 bp, Homo sapien
tataactttagcaggtctaaaccaa

SEQ ID NO: 4929217 - DNA, 25 bp, Homo sapien
tccagctgggtcgataggacaacac

SEQ ID NO: 4929218 - DNA, 25 bp, Homo sapien
tcacttcccatagactggttacacg

SEQ ID NO: 4929219 - DNA, 25 bp, Homo sapien
tggttacacgatccagctgggtcga

SEQ ID NO: 4929220 - DNA, 25 bp, Homo sapien
ggacaacaccagcttagtggatgct

SEQ ID NO: 4929221 - DNA, 25 bp, Homo sapien
cagagagccctatctgaaacagcct

SEQ ID NO: 4929222 - DNA, 25 bp, Homo sapien
gaaacagcctacagagtgtcaggta

SEQ ID NO: 4929223 - DNA, 25 bp, Homo sapien
tgacagttttcaccgcatggtatgg

SEQ ID NO: 4929224 - DNA, 25 bp, Homo sapien
tgtttacacttgactgaagctgacc

SEQ ID NO: 4929225 - DNA, 25 bp, Homo sapien
taagagtagagcatttaatcctggg

SEQ ID NO: 4929226 - DNA, 25 bp, Homo sapien
ttgtcagagttgctagaaaatgtca

SEQ ID NO: 4929227 - DNA, 25 bp, Homo sapien
tgcatgggaatcactgtagctctgt

SEQ ID NO: 4929228 - DNA, 25 bp, Homo sapien
ttcagtgtatttagggtgtccatca

SEQ ID NO: 4929229 - DNA, 25 bp, Homo sapien
ttacatgatagctgaacatggtagg

SEQ ID NO: 4929230 - DNA, 25 bp, Homo sapien
taggaagcatattcaataacaggta

SEQ ID NO: 4929231 - DNA, 25 bp, Homo sapien
caaatgagttagattgcataacctc

SEQ ID NO: 4929232 - DNA, 25 bp, Homo sapien
ataacaggtattccatggatatatt

SEQ ID NO: 4929233 - DNA, 25 bp, Homo sapien
ggctatacaagttgaagtttcctcc

SEQ ID NO: 4929234 - DNA, 25 bp, Homo sapien
tagcgctggttcgaggtttactccc

SEQ ID NO: 4929235 - DNA, 25 bp, Homo sapien
tcactagatgtaggcagatcttcct

SEQ ID NO: 4929236 - DNA, 25 bp, Homo sapien
tctctacgtctggtgtggctataca

SEQ ID NO: 4929237 - DNA, 25 bp, Homo sapien
gtcataaggaattaacgtaagaatg

SEQ ID NO: 4929238 - DNA, 25 bp, Homo sapien
cataaggaattaacgtaagaatgta

SEQ ID NO: 4929239 - DNA, 25 bp, Homo sapien
gtgtcataaggaattaacgtaagaa

SEQ ID NO: 4929240 - DNA, 25 bp, Homo sapien
cagtgtcataaggaattaacgtaag

SEQ ID NO: 4929241 - DNA, 25 bp, Homo sapien
ctttcaacagaacacatatatgaga

SEQ ID NO: 4929242 - DNA, 25 bp, Homo sapien
caacagaacacatatatgagagttt

SEQ ID NO: 4929243 - DNA, 25 bp, Homo sapien
ttcaacagaacacatatatgagagt

SEQ ID NO: 4929244 - DNA, 25 bp, Homo sapien
acagaacacatatatgagagtttat

SEQ ID NO: 4929245 - DNA, 25 bp, Homo sapien
tctctttgcctgaaacgagttgcct

SEQ ID NO: 4929246 - DNA, 25 bp, Homo sapien
cagtaatcttgttaagtcgagctct

SEQ ID NO: 4929247 - DNA, 25 bp, Homo sapien
ggctgtggaaagaccatctttggaa

SEQ ID NO: 4929248 - DNA, 25 bp, Homo sapien
tctttggaacgttctctacatgaag

SEQ ID NO: 4929249 - DNA, 25 bp, Homo sapien
tcgggtttaaaatcatcacatggtg

SEQ ID NO: 4929250 - DNA, 25 bp, Homo sapien
aaagttatccaatagctggtccacg

SEQ ID NO: 4929251 - DNA, 25 bp, Homo sapien
gctgctgctgtcaaactgtaactta

SEQ ID NO: 4929252 - DNA, 25 bp, Homo sapien
tattcatttgagactcccaagggaa

SEQ ID NO: 4929253 - DNA, 25 bp, Homo sapien
caataaagttacaaccttccagtat

SEQ ID NO: 4929254 - DNA, 25 bp, Homo sapien
gatgtaaaggtatccatgggcaaca

SEQ ID NO: 4929255 - DNA, 25 bp, Homo sapien
aaaattctttgctaagcctgtcagg

SEQ ID NO: 4929256 - DNA, 25 bp, Homo sapien
tctacattaaggttgctcaggttgc

SEQ ID NO: 4929257 - DNA, 25 bp, Homo sapien
tatcagacagctaccctaaagaagt

SEQ ID NO: 4929258 - DNA, 25 bp, Homo sapien
gcattggagctgtttcattgtagtc

SEQ ID NO: 4929259 - DNA, 25 bp, Homo sapien
cattggagctgtttcattgtagtct

SEQ ID NO: 4929260 - DNA, 25 bp, Homo sapien
cagcaccatcaaccccaacagcttt

SEQ ID NO: 4929261 - DNA, 25 bp, Homo sapien
atcaaccccaacagctttggatgcc

SEQ ID NO: 4929262 - DNA, 25 bp, Homo sapien
ttttaaaacgcatctagaggagagc

SEQ ID NO: 4929263 - DNA, 25 bp, Homo sapien
gagctccgtgatcattccagtggga

SEQ ID NO: 4929264 - DNA, 25 bp, Homo sapien
ttctctctaagacgggtactgccct

SEQ ID NO: 4929265 - DNA, 25 bp, Homo sapien
gacttaaccgttggatgatcacaga

SEQ ID NO: 4929266 - DNA, 25 bp, Homo sapien
ccaattgagatgtaattaagagctt

SEQ ID NO: 4929267 - DNA, 25 bp, Homo sapien
tcggctttttaactatgaagcgagg

SEQ ID NO: 4929268 - DNA, 25 bp, Homo sapien
gataccaattgagatgtaattaaga

SEQ ID NO: 4929269 - DNA, 25 bp, Homo sapien
ttataactcggctttttaactatga

SEQ ID NO: 4929270 - DNA, 25 bp, Homo sapien
ttcacatatgtgaaagacatcacta

SEQ ID NO: 4929271 - DNA, 25 bp, Homo sapien
gataaggtgcttaacttctaaacaa

SEQ ID NO: 4929272 - DNA, 25 bp, Homo sapien
taaataagtccattagcacagtaag

SEQ ID NO: 4929273 - DNA, 25 bp, Homo sapien
cacagtaagttttgactacaggcct

SEQ ID NO: 4929274 - DNA, 25 bp, Homo sapien
ggcagaactgctaatgtcagcttca

SEQ ID NO: 4929275 - DNA, 25 bp, Homo sapien
caaagttgaggataacagtgcaggt

SEQ ID NO: 4929276 - DNA, 25 bp, Homo sapien
gagatacaagcgtcaaatcctcgac

SEQ ID NO: 4929277 - DNA, 25 bp, Homo sapien
gactttgaggtttaggtgaaatcgc

SEQ ID NO: 4929278 - DNA, 25 bp, Homo sapien
tatccacaaggaatggcatgttcca

SEQ ID NO: 4929279 - DNA, 25 bp, Homo sapien
gagttttataaacatgtctgggcct

SEQ ID NO: 4929280 - DNA, 25 bp, Homo sapien
catgttccaaaggtaatcaaaggca

SEQ ID NO: 4929281 - DNA, 25 bp, Homo sapien
tagatagatatacccatgtgaaagg

SEQ ID NO: 4929282 - DNA, 25 bp, Homo sapien
aatgggaaaaaatgatttatattct

SEQ ID NO: 4929283 - DNA, 25 bp, Homo sapien
cttacaatatttaaggagataaatg

SEQ ID NO: 4929284 - DNA, 25 bp, Homo sapien
caatatttaaggagataaatgggaa

SEQ ID NO: 4929285 - DNA, 25 bp, Homo sapien
tacaatatttaaggagataaatggg

SEQ ID NO: 4929286 - DNA, 25 bp, Homo sapien
ttcaatgttcacgaagcagatacat

SEQ ID NO: 4929287 - DNA, 25 bp, Homo sapien
aatgttcacgaagcagatacatacc

SEQ ID NO: 4929288 - DNA, 25 bp, Homo sapien
gatcttcaatgttcacgaagcagat

SEQ ID NO: 4929289 - DNA, 25 bp, Homo sapien
tcttcaatgttcacgaagcagatac

SEQ ID NO: 4929290 - DNA, 25 bp, Homo sapien
catgggtaaggtggctaaacgctga

SEQ ID NO: 4929291 - DNA, 25 bp, Homo sapien
gagatcttcttctccgctcactatg

SEQ ID NO: 4929292 - DNA, 25 bp, Homo sapien
gaagaaaccttttctacagaatcat

SEQ ID NO: 4929293 - DNA, 25 bp, Homo sapien
ctgattttgagaactgatggagaat

SEQ ID NO: 4929294 - DNA, 25 bp, Homo sapien
tatttgtagaataagtgaagtgctt

SEQ ID NO: 4929295 - DNA, 25 bp, Homo sapien
tccagaagatataagagcagaaata

SEQ ID NO: 4929296 - DNA, 25 bp, Homo sapien
gtgcttataactccagaagatataa

SEQ ID NO: 4929297 - DNA, 25 bp, Homo sapien
aacacagataaaatggctcagttac

SEQ ID NO: 4929298 - DNA, 25 bp, Homo sapien
tctgccctgggacattcattacggt

SEQ ID NO: 4929299 - DNA, 25 bp, Homo sapien
tcattacggtaagaggaatctgagg

SEQ ID NO: 4929300 - DNA, 25 bp, Homo sapien
cacgacttaagtcaagagggagaca

SEQ ID NO: 4929301 - DNA, 25 bp, Homo sapien
gaggctaccggtgctgtaacttctg

SEQ ID NO: 4929302 - DNA, 25 bp, Homo sapien
gatcaagtgacaaggttaagcagca

SEQ ID NO: 4929303 - DNA, 25 bp, Homo sapien
tgtaaaatgatcacacaaaagacct

SEQ ID NO: 4929304 - DNA, 25 bp, Homo sapien
tgtttatacctaataactgcaagcc

SEQ ID NO: 4929305 - DNA, 25 bp, Homo sapien
taagcagcatgtatgtccagggaat

SEQ ID NO: 4929306 - DNA, 25 bp, Homo sapien
tacaagaagttcacgatctcgtcct

SEQ ID NO: 4929307 - DNA, 25 bp, Homo sapien
gagtgatttctcaagcctcttctgg

SEQ ID NO: 4929308 - DNA, 25 bp, Homo sapien
tattcatatatgcaacggcaggact

SEQ ID NO: 4929309 - DNA, 25 bp, Homo sapien
taccacgtgctagaatttggtgacc

SEQ ID NO: 4929310 - DNA, 25 bp, Homo sapien
aaagttaactgtactaggccatcag

SEQ ID NO: 4929311 - DNA, 25 bp, Homo sapien
taaaggtctactctagcaccacagc

SEQ ID NO: 4929312 - DNA, 25 bp, Homo sapien
catctgagtagtagttccaggtacc

SEQ ID NO: 4929313 - DNA, 25 bp, Homo sapien
cagccttcggcaatccaaaagatac

SEQ ID NO: 4929314 - DNA, 25 bp, Homo sapien
atgctgttgagcttttgtcttccaa

SEQ ID NO: 4929315 - DNA, 25 bp, Homo sapien
aatgctgttgagcttttgtcttcca

SEQ ID NO: 4929316 - DNA, 25 bp, Homo sapien
gctgttgagcttttgtcttccaatt

SEQ ID NO: 4929317 - DNA, 25 bp, Homo sapien
caaatgctgttgagcttttgtcttc

SEQ ID NO: 4929318 - DNA, 25 bp, Homo sapien
tcatgtatctggagctgactaacac

SEQ ID NO: 4929319 - DNA, 25 bp, Homo sapien
taacaatgaaggctaagaacacgag

SEQ ID NO: 4929320 - DNA, 25 bp, Homo sapien
gacttttagtcattacagcacagaa

SEQ ID NO: 4929321 - DNA, 25 bp, Homo sapien
tcctttggagaaagcaagagactct

SEQ ID NO: 4929322 - DNA, 25 bp, Homo sapien
cctgataagcttattggactataag

SEQ ID NO: 4929323 - DNA, 25 bp, Homo sapien
tggactataagaggggatcttcatt

SEQ ID NO: 4929324 - DNA, 25 bp, Homo sapien
gataagcttattggactataagagg

SEQ ID NO: 4929325 - DNA, 25 bp, Homo sapien
gcagtgctgagaaatcccaactcct

SEQ ID NO: 4929326 - DNA, 25 bp, Homo sapien
agagtggatgggttcaattaaactg

SEQ ID NO: 4929327 - DNA, 25 bp, Homo sapien
agtggatgggttcaattaaactgtt

SEQ ID NO: 4929328 - DNA, 25 bp, Homo sapien
gagtggatgggttcaattaaactgt

SEQ ID NO: 4929329 - DNA, 25 bp, Homo sapien
gtgaatactttagcaatcacgactg

SEQ ID NO: 4929330 - DNA, 25 bp, Homo sapien
agcatttatgttttaatcagctatt

SEQ ID NO: 4929331 - DNA, 25 bp, Homo sapien
aatcacgactgatcctgagttgttc

SEQ ID NO: 4929332 - DNA, 25 bp, Homo sapien
tgtggttaacctaaaagcagcattt

SEQ ID NO: 4929333 - DNA, 25 bp, Homo sapien
gttttggtctgtagtgatctttgtc

SEQ ID NO: 4929334 - DNA, 25 bp, Homo sapien
tttggtctgtagtgatctttgtctc

SEQ ID NO: 4929335 - DNA, 25 bp, Homo sapien
ttttggtctgtagtgatctttgtct

SEQ ID NO: 4929336 - DNA, 25 bp, Homo sapien
gcttggtcagggcatcgagtctacc

SEQ ID NO: 4929337 - DNA, 25 bp, Homo sapien
ggcttgacaaggaagtgctccctct

SEQ ID NO: 4929338 - DNA, 25 bp, Homo sapien
tacttgagcatgctaaagggtgctt

SEQ ID NO: 4929339 - DNA, 25 bp, Homo sapien
tggcctttgctgataccaaattctg

SEQ ID NO: 4929340 - DNA, 25 bp, Homo sapien
cagtttgaactgataatggcccttc

SEQ ID NO: 4929341 - DNA, 25 bp, Homo sapien
ttggcgcacacatcgtcaccttact

SEQ ID NO: 4929342 - DNA, 25 bp, Homo sapien
tgatgcaccgtgtgagtttcctcac

SEQ ID NO: 4929343 - DNA, 25 bp, Homo sapien
gggtttttaggccacttggcgcaca

SEQ ID NO: 4929344 - DNA, 25 bp, Homo sapien
actatagaggtgaaaaaggattatt

SEQ ID NO: 4929345 - DNA, 25 bp, Homo sapien
tgaaaaaggattatttcacattttc

SEQ ID NO: 4929346 - DNA, 25 bp, Homo sapien
tgtaaacttttgtgaagtactatag

SEQ ID NO: 4929347 - DNA, 25 bp, Homo sapien
cttttgtgaagtactatagaggtga

SEQ ID NO: 4929348 - DNA, 25 bp, Homo sapien
aagatcgagttagtggagaagagca

SEQ ID NO: 4929349 - DNA, 25 bp, Homo sapien
tagtggagaagagcacctttccaaa

SEQ ID NO: 4929350 - DNA, 25 bp, Homo sapien
ccagagaactcccagaagatcgagt

SEQ ID NO: 4929351 - DNA, 25 bp, Homo sapien
ttcgagggaactgtcttcatagtct

SEQ ID NO: 4929352 - DNA, 25 bp, Homo sapien
tagaattgcccttgggtactgatag

SEQ ID NO: 4929353 - DNA, 25 bp, Homo sapien
agatcaacggatagaattgcccttg

SEQ ID NO: 4929354 - DNA, 25 bp, Homo sapien
gcccttgggtactgataggttgtag

SEQ ID NO: 4929355 - DNA, 25 bp, Homo sapien
tttcaccactaagatcaacggatag

SEQ ID NO: 4929356 - DNA, 25 bp, Homo sapien
tcttaacagagtacgttttattctc

SEQ ID NO: 4929357 - DNA, 25 bp, Homo sapien
caagtttttaaatcgcatgctctta

SEQ ID NO: 4929358 - DNA, 25 bp, Homo sapien
ttttattctcagttacacatttagg

SEQ ID NO: 4929359 - DNA, 25 bp, Homo sapien
aatttctcacatcaagactttcata

SEQ ID NO: 4929360 - DNA, 25 bp, Homo sapien
caaatgtgaataatacctactctgt

SEQ ID NO: 4929361 - DNA, 25 bp, Homo sapien
cctactctgtcagttgatagtgaag

SEQ ID NO: 4929362 - DNA, 25 bp, Homo sapien
cattatctacggagttaagacagac

SEQ ID NO: 4929363 - DNA, 25 bp, Homo sapien
tttaattctaacactagctaagccg

SEQ ID NO: 4929364 - DNA, 25 bp, Homo sapien
cagcattttgcaagtgtggtttcct

SEQ ID NO: 4929365 - DNA, 25 bp, Homo sapien
gacaatggctccaactgagtggcca

SEQ ID NO: 4929366 - DNA, 25 bp, Homo sapien
ttgagtaaaatggatgacagagctg

SEQ ID NO: 4929367 - DNA, 25 bp, Homo sapien
gcttgaatagccacctagacaatgg

SEQ ID NO: 4929368 - DNA, 25 bp, Homo sapien
gcagcatcaactactatagcactta

SEQ ID NO: 4929369 - DNA, 25 bp, Homo sapien
cattattgacagtatcagcagcatc

SEQ ID NO: 4929370 - DNA, 25 bp, Homo sapien
cacaggatatataacttgcttgaga

SEQ ID NO: 4929371 - DNA, 25 bp, Homo sapien
ggtaaaggagcttgcctagggtcta

SEQ ID NO: 4929372 - DNA, 25 bp, Homo sapien
agaaaggagctatgagaagtgaaca

SEQ ID NO: 4929373 - DNA, 25 bp, Homo sapien
tttcataaagaaaggagctatgaga

SEQ ID NO: 4929374 - DNA, 25 bp, Homo sapien
agtatacttagaacaacttttctat

SEQ ID NO: 4929375 - DNA, 25 bp, Homo sapien
actgtactgtacttgtctctggaca

SEQ ID NO: 4929376 - DNA, 25 bp, Homo sapien
caaaattggttgaatcaaagtcctg

SEQ ID NO: 4929377 - DNA, 25 bp, Homo sapien
gaatcatctaggaagtctacatctg

SEQ ID NO: 4929378 - DNA, 25 bp, Homo sapien
tacatcgcacaatttcattaagagc

SEQ ID NO: 4929379 - DNA, 25 bp, Homo sapien
tcagaagcaaactctccgttgaaga

SEQ ID NO: 4929380 - DNA, 25 bp, Homo sapien
gagaaaggttgctgtagcctgccct

SEQ ID NO: 4929381 - DNA, 25 bp, Homo sapien
tagcagtgtctataccaatgatctc

SEQ ID NO: 4929382 - DNA, 25 bp, Homo sapien
aacaccgtgatgcatttgctgagca

SEQ ID NO: 4929383 - DNA, 25 bp, Homo sapien
ggcactgaactacataccctagaaa

SEQ ID NO: 4929384 - DNA, 25 bp, Homo sapien
gaaatggtcaactacttcacgaact

SEQ ID NO: 4929385 - DNA, 25 bp, Homo sapien
taagctaggaataaggatacatgcc

SEQ ID NO: 4929386 - DNA, 25 bp, Homo sapien
cagaggagtattacagtcacccgat

SEQ ID NO: 4929387 - DNA, 25 bp, Homo sapien
gatcctcactaggaataagctagga

SEQ ID NO: 4929388 - DNA, 25 bp, Homo sapien
cacacgctgtgttgccaacacaagc

SEQ ID NO: 4929389 - DNA, 25 bp, Homo sapien
cgctgtgttgccaacacaagcactc

SEQ ID NO: 4929390 - DNA, 25 bp, Homo sapien
cggcagatatagcagatgtactgct

SEQ ID NO: 4929391 - DNA, 25 bp, Homo sapien
gatatagcagatgtactgctctgga

SEQ ID NO: 4929392 - DNA, 25 bp, Homo sapien
cagcaagcaggtgatgtgtagaaac

SEQ ID NO: 4929393 - DNA, 25 bp, Homo sapien
acgatattttgcactccacctctga

SEQ ID NO: 4929394 - DNA, 25 bp, Homo sapien
ttagtattccaatcttcagctgtag

SEQ ID NO: 4929395 - DNA, 25 bp, Homo sapien
ctgtagcccgtgtagcacttctgta

SEQ ID NO: 4929396 - DNA, 25 bp, Homo sapien
tatttcagaattaggttaggaggac

SEQ ID NO: 4929397 - DNA, 25 bp, Homo sapien
tacaaatgtaccagtcgagccaacc

SEQ ID NO: 4929398 - DNA, 25 bp, Homo sapien
ttaggaggacatctaggactcaaga

SEQ ID NO: 4929399 - DNA, 25 bp, Homo sapien
ggaatccaatcatcagagctgaagt

SEQ ID NO: 4929400 - DNA, 25 bp, Homo sapien
ttctccaccccagctattatttgat

SEQ ID NO: 4929401 - DNA, 25 bp, Homo sapien
aacgaggtggttctttatggttctg

SEQ ID NO: 4929402 - DNA, 25 bp, Homo sapien
tcgattaactgtgtcttgagctatt

SEQ ID NO: 4929403 - DNA, 25 bp, Homo sapien
tttcgcttcccggaacaagcccaga

SEQ ID NO: 4929404 - DNA, 25 bp, Homo sapien
cagggtctgcgagagatttacagtc

SEQ ID NO: 4929405 - DNA, 25 bp, Homo sapien
ccatgttcttttgctgagtactgta

SEQ ID NO: 4929406 - DNA, 25 bp, Homo sapien
cagtcctgaccaaaactttgtggct

SEQ ID NO: 4929407 - DNA, 25 bp, Homo sapien
ggcttttgatagctatgctcacttg

SEQ ID NO: 4929408 - DNA, 25 bp, Homo sapien
aattcagtatgccttattttataaa

SEQ ID NO: 4929409 - DNA, 25 bp, Homo sapien
atctccttactttaacaaggtactg

SEQ ID NO: 4929410 - DNA, 25 bp, Homo sapien
aatcaaatgttcaaatggccagtgt

SEQ ID NO: 4929411 - DNA, 25 bp, Homo sapien
aaatgttcaaatggccagtgttttc

SEQ ID NO: 4929412 - DNA, 25 bp, Homo sapien
ttcttaagagctgatgcacccacca

SEQ ID NO: 4929413 - DNA, 25 bp, Homo sapien
cacaatgtgcgtttggatttgccag

SEQ ID NO: 4929414 - DNA, 25 bp, Homo sapien
tatgcctcgcatggtgctacacagg

SEQ ID NO: 4929415 - DNA, 25 bp, Homo sapien
caagaaggcttcaataaaatgcgct

SEQ ID NO: 4929416 - DNA, 25 bp, Homo sapien
acattttctatgtgtgtaaggagat

SEQ ID NO: 4929417 - DNA, 25 bp, Homo sapien
catcctgctggtaacttcgttctgc

SEQ ID NO: 4929418 - DNA, 25 bp, Homo sapien
gagtctcctgggtcttcggtgccct

SEQ ID NO: 4929419 - DNA, 25 bp, Homo sapien
tttttctattaggtccatcctgctg

SEQ ID NO: 4929420 - DNA, 25 bp, Homo sapien
atgaaacaatcagaaagttggagct

SEQ ID NO: 4929421 - DNA, 25 bp, Homo sapien
gataaacaaatttaaactgcaactg

SEQ ID NO: 4929422 - DNA, 25 bp, Homo sapien
ctgcaactggaagaacagtcagaaa

SEQ ID NO: 4929423 - DNA, 25 bp, Homo sapien
tgaaacaatcagaaagttggagctg

SEQ ID NO: 4929424 - DNA, 25 bp, Homo sapien
gttggggcaatcttgcaagaggatc

SEQ ID NO: 4929425 - DNA, 25 bp, Homo sapien
tttatgtggcgtttaagttggggca

SEQ ID NO: 4929426 - DNA, 25 bp, Homo sapien
agaggatctggtggctccaactccc

SEQ ID NO: 4929427 - DNA, 25 bp, Homo sapien
gtactttgcccatgtcaattaggag

SEQ ID NO: 4929428 - DNA, 25 bp, Homo sapien
tgaccagacattactaagcttttaa

SEQ ID NO: 4929429 - DNA, 25 bp, Homo sapien
cacaaatcagtgaatgaccagacat

SEQ ID NO: 4929430 - DNA, 25 bp, Homo sapien
taaattatccacttagccatcacgt

SEQ ID NO: 4929431 - DNA, 25 bp, Homo sapien
ccatcacgtggataataaaaatgct

SEQ ID NO: 4929432 - DNA, 25 bp, Homo sapien
tactagcttccttgataaagttgtt

SEQ ID NO: 4929433 - DNA, 25 bp, Homo sapien
ctagcttccttgataaagttgttct

SEQ ID NO: 4929434 - DNA, 25 bp, Homo sapien
agcttccttgataaagttgttcttc

SEQ ID NO: 4929435 - DNA, 25 bp, Homo sapien
aatactagcttccttgataaagttg

SEQ ID NO: 4929436 - DNA, 25 bp, Homo sapien
tgtacgttgagcctgaatactgcca

SEQ ID NO: 4929437 - DNA, 25 bp, Homo sapien
taggacctaggctcaaaatccagca

SEQ ID NO: 4929438 - DNA, 25 bp, Homo sapien
tgatcacttggcacatcggaccctt

SEQ ID NO: 4929439 - DNA, 25 bp, Homo sapien
tgattgagaacattcatcgcccaag

SEQ ID NO: 4929440 - DNA, 25 bp, Homo sapien
aaatataaggccgcaaaaaggcaag

SEQ ID NO: 4929441 - DNA, 25 bp, Homo sapien
tataaggccgcaaaaaggcaagctg

SEQ ID NO: 4929442 - DNA, 25 bp, Homo sapien
aatataaggccgcaaaaaggcaagc

SEQ ID NO: 4929443 - DNA, 25 bp, Homo sapien
ataaggccgcaaaaaggcaagctga

SEQ ID NO: 4929444 - DNA, 25 bp, Homo sapien
ttatcagtaacataccaagagggag

SEQ ID NO: 4929445 - DNA, 25 bp, Homo sapien
ttcaataagaaaagctcagcgcact

SEQ ID NO: 4929446 - DNA, 25 bp, Homo sapien
tactccacacatggaatacaggcac

SEQ ID NO: 4929447 - DNA, 25 bp, Homo sapien
tcagcgcactacttgtgaaaggctt

SEQ ID NO: 4929448 - DNA, 25 bp, Homo sapien
tgcagagttcatgcctgttccacta

SEQ ID NO: 4929449 - DNA, 25 bp, Homo sapien
aaggctctaagctgggcattattcc

SEQ ID NO: 4929450 - DNA, 25 bp, Homo sapien
cagacaaggatagtgaagttccaaa

SEQ ID NO: 4929451 - DNA, 25 bp, Homo sapien
tacaatgcaggataccatgaaaggc

SEQ ID NO: 4929452 - DNA, 25 bp, Homo sapien
tgttgacataaaaccgagaatacat

SEQ ID NO: 4929453 - DNA, 25 bp, Homo sapien
aggcaggtgccgctacacctagcaa

SEQ ID NO: 4929454 - DNA, 25 bp, Homo sapien
ggtgccgctacacctagcaattgtt

SEQ ID NO: 4929455 - DNA, 25 bp, Homo sapien
tcaggacataagatactaaatgctt

SEQ ID NO: 4929456 - DNA, 25 bp, Homo sapien
tattgagattaacatataggtcgta

SEQ ID NO: 4929457 - DNA, 25 bp, Homo sapien
tgctttgcccctcatcttagggagg

SEQ ID NO: 4929458 - DNA, 25 bp, Homo sapien
cctccaatacaatgctggatagaag

SEQ ID NO: 4929459 - DNA, 25 bp, Homo sapien
ggtgatagtggacgttcttgctttg

SEQ ID NO: 4929460 - DNA, 25 bp, Homo sapien
tgtacacgttcccagaaagatgcaa

SEQ ID NO: 4929461 - DNA, 25 bp, Homo sapien
caattaagtcagtgcctagagggaa

SEQ ID NO: 4929462 - DNA, 25 bp, Homo sapien
taagagacatgactacagactaacc

SEQ ID NO: 4929463 - DNA, 25 bp, Homo sapien
gcaacaacttcttgaaagggtaaca

SEQ ID NO: 4929464 - DNA, 25 bp, Homo sapien
ttagcttatggaggtttttgaaggc

SEQ ID NO: 4929465 - DNA, 25 bp, Homo sapien
tagcttatggaggtttttgaaggct

SEQ ID NO: 4929466 - DNA, 25 bp, Homo sapien
tggaattttgcaaccctctgaaatc

SEQ ID NO: 4929467 - DNA, 25 bp, Homo sapien
ctggaattttgcaaccctctgaaat

SEQ ID NO: 4929468 - DNA, 25 bp, Homo sapien
catctccttgtgttgaacatccttg

SEQ ID NO: 4929469 - DNA, 25 bp, Homo sapien
tgttgaacatccttgaaacctctca

SEQ ID NO: 4929470 - DNA, 25 bp, Homo sapien
ggtggacgtatctggccatacttct

SEQ ID NO: 4929471 - DNA, 25 bp, Homo sapien
tcccaatatgcaacactgaaggtgg

SEQ ID NO: 4929472 - DNA, 25 bp, Homo sapien
tgggaggaaggaggagaaaccactg

SEQ ID NO: 4929473 - DNA, 25 bp, Homo sapien
tggcccttcctgggaggaaggagga

SEQ ID NO: 4929474 - DNA, 25 bp, Homo sapien
tcctggcccttcctgggaggaagga

SEQ ID NO: 4929475 - DNA, 25 bp, Homo sapien
gggaggaaggaggagaaaccactgc

SEQ ID NO: 4929476 - DNA, 25 bp, Homo sapien
gatattggccgacacccagcagatg

SEQ ID NO: 4929477 - DNA, 25 bp, Homo sapien
agatattggccgacacccagcagat

SEQ ID NO: 4929478 - DNA, 25 bp, Homo sapien
ctctgcagctcacagggacgaaggg

SEQ ID NO: 4929479 - DNA, 25 bp, Homo sapien
ttgcttcagaaaggccgtttccctc

SEQ ID NO: 4929480 - DNA, 25 bp, Homo sapien
tccctctgcagctcacagggacgaa

SEQ ID NO: 4929481 - DNA, 25 bp, Homo sapien
tgcacactggggcacgtagtctgct

SEQ ID NO: 4929482 - DNA, 25 bp, Homo sapien
agttcgctgctgacataagccttac

SEQ ID NO: 4929483 - DNA, 25 bp, Homo sapien
tgagagttcgctgctgacataagcc

SEQ ID NO: 4929484 - DNA, 25 bp, Homo sapien
cttgagagttcgctgctgacataag

SEQ ID NO: 4929485 - DNA, 25 bp, Homo sapien
gagttcgctgctgacataagcctta

SEQ ID NO: 4929486 - DNA, 25 bp, Homo sapien
ttcactgccgttggcacccacacac

SEQ ID NO: 4929487 - DNA, 25 bp, Homo sapien
ctgcccagcacttcactgccgttgg

SEQ ID NO: 4929488 - DNA, 25 bp, Homo sapien
caggagcggccgtcgttctggcact

SEQ ID NO: 4929489 - DNA, 25 bp, Homo sapien
ggccgtcgttctggcactggacagt

SEQ ID NO: 4929490 - DNA, 25 bp, Homo sapien
aggtgtctgtgctgttaatgtagcc

SEQ ID NO: 4929491 - DNA, 25 bp, Homo sapien
tgaacaggcgcgtagtcccctgaat

SEQ ID NO: 4929492 - DNA, 25 bp, Homo sapien
tggacctgctgcacatcacactgaa

SEQ ID NO: 4929493 - DNA, 25 bp, Homo sapien
cccctgaatcctgacactgagggag

SEQ ID NO: 4929494 - DNA, 25 bp, Homo sapien
ccctaaatgtgttggatcgcagtga

SEQ ID NO: 4929495 - DNA, 25 bp, Homo sapien
tacacgtgacagttagagacccatg

SEQ ID NO: 4929496 - DNA, 25 bp, Homo sapien
ctggtgaccaaaacatccgtatgca

SEQ ID NO: 4929497 - DNA, 25 bp, Homo sapien
tctgcaacaggagactcacaacgtt

SEQ ID NO: 4929498 - DNA, 25 bp, Homo sapien
ccccgtggagaagacgacgatttct

SEQ ID NO: 4929499 - DNA, 25 bp, Homo sapien
aggcataaactctccctccgcagaa

SEQ ID NO: 4929500 - DNA, 25 bp, Homo sapien
gctgtggaccagatcaaaaatcatc

SEQ ID NO: 4929501 - DNA, 25 bp, Homo sapien
ggtgttgacaaatttgcactggaca

SEQ ID NO: 4929502 - DNA, 25 bp, Homo sapien
ccaccacaggtgtctgtaatgaggg

SEQ ID NO: 4929503 - DNA, 25 bp, Homo sapien
caatctgggtagcatgggtggctaa

SEQ ID NO: 4929504 - DNA, 25 bp, Homo sapien
tagcctagcagagcgcctgatgcat

SEQ ID NO: 4929505 - DNA, 25 bp, Homo sapien
ctgatgcatagccaaccaccacagg

SEQ ID NO: 4929506 - DNA, 25 bp, Homo sapien
tctgtcctgcactagggagggtgct

SEQ ID NO: 4929507 - DNA, 25 bp, Homo sapien
agggagggtgctccttaaaagagcg

SEQ ID NO: 4929508 - DNA, 25 bp, Homo sapien
tgtcctgcactagggagggtgctcc

SEQ ID NO: 4929509 - DNA, 25 bp, Homo sapien
ctgcactagggagggtgctccttaa

SEQ ID NO: 4929510 - DNA, 25 bp, Homo sapien
tggcaatacccagatacctcaggga

SEQ ID NO: 4929511 - DNA, 25 bp, Homo sapien
tcagcacagtggcaatacccagata

SEQ ID NO: 4929512 - DNA, 25 bp, Homo sapien
tctcagccagttcccgcccttggct

SEQ ID NO: 4929513 - DNA, 25 bp, Homo sapien
gcacagtggcaatacccagatacct

SEQ ID NO: 4929514 - DNA, 25 bp, Homo sapien
caggccagcaaaaatggtgtcataa

SEQ ID NO: 4929515 - DNA, 25 bp, Homo sapien
cgtctctgcagtatccggtacaggg

SEQ ID NO: 4929516 - DNA, 25 bp, Homo sapien
tgaactgcgaggaaccgtctctgca

SEQ ID NO: 4929517 - DNA, 25 bp, Homo sapien
atcggaatctgccagagatgactga

SEQ ID NO: 4929518 - DNA, 25 bp, Homo sapien
ccatttcggcggcagcttggaacat

SEQ ID NO: 4929519 - DNA, 25 bp, Homo sapien
tgctgccgggttccatgcatttcct

SEQ ID NO: 4929520 - DNA, 25 bp, Homo sapien
gcaccgcctgatagtcgccatttcg

SEQ ID NO: 4929521 - DNA, 25 bp, Homo sapien
aaagctggttgctgtaaaccgctcc

SEQ ID NO: 4929522 - DNA, 25 bp, Homo sapien
aaaatgcaacgaggtctgacacaag

SEQ ID NO: 4929523 - DNA, 25 bp, Homo sapien
tgatccgaggccgaaagaggaagcc

SEQ ID NO: 4929524 - DNA, 25 bp, Homo sapien
tcagctctggaacatggcaatgacc

SEQ ID NO: 4929525 - DNA, 25 bp, Homo sapien
gaccgccaaagtaatatgatccgag

SEQ ID NO: 4929526 - DNA, 25 bp, Homo sapien
tgccaaaaagaaagtcagccaattt

SEQ ID NO: 4929527 - DNA, 25 bp, Homo sapien
tcacataaatgccaaaaagaaagtc

SEQ ID NO: 4929528 - DNA, 25 bp, Homo sapien
agccaatttccttctgtaaccaggc

SEQ ID NO: 4929529 - DNA, 25 bp, Homo sapien
ttttcctcttgattcacataaatgc

SEQ ID NO: 4929530 - DNA, 25 bp, Homo sapien
ctgcctttcggaggcacaagattgg

SEQ ID NO: 4929531 - DNA, 25 bp, Homo sapien
gaggtcccaaagtagagtctggaca

SEQ ID NO: 4929532 - DNA, 25 bp, Homo sapien
gggaagagaacaggtcgtgctggct

SEQ ID NO: 4929533 - DNA, 25 bp, Homo sapien
tgctggctgaagtagcctgaggtcc

SEQ ID NO: 4929534 - DNA, 25 bp, Homo sapien
tggtaaactgaagggcaagacgagc

SEQ ID NO: 4929535 - DNA, 25 bp, Homo sapien
tgtgccaagggctccagacaagtta

SEQ ID NO: 4929536 - DNA, 25 bp, Homo sapien
tgaagttaaatgtgcctcttgtgcc

SEQ ID NO: 4929537 - DNA, 25 bp, Homo sapien
gcaaatctggctactcttggagagg

SEQ ID NO: 4929538 - DNA, 25 bp, Homo sapien
gaagcttgcaagaccaagttgctgg

SEQ ID NO: 4929539 - DNA, 25 bp, Homo sapien
agagagtggcttggccaaatcttct

SEQ ID NO: 4929540 - DNA, 25 bp, Homo sapien
tgaatctaatcccacagagagtggc

SEQ ID NO: 4929541 - DNA, 25 bp, Homo sapien
aatcttcttgtctccctccattcaa

SEQ ID NO: 4929542 - DNA, 25 bp, Homo sapien
aatgtccctcactagtacaagcagg

SEQ ID NO: 4929543 - DNA, 25 bp, Homo sapien
gcactctgagttgaagcactggaca

SEQ ID NO: 4929544 - DNA, 25 bp, Homo sapien
cagggacaaacaaggtggagccagc

SEQ ID NO: 4929545 - DNA, 25 bp, Homo sapien
cgtgcatgatgggacaaatagcctt

SEQ ID NO: 4929546 - DNA, 25 bp, Homo sapien
cagttccgaagatcaaaatgtgcca

SEQ ID NO: 4929547 - DNA, 25 bp, Homo sapien
tattgtgacagcaccgggaagacat

SEQ ID NO: 4929548 - DNA, 25 bp, Homo sapien
catgatcttcactagcagcttggca

SEQ ID NO: 4929549 - DNA, 25 bp, Homo sapien
gatctgccagaagaggtagggctcc

SEQ ID NO: 4929550 - DNA, 25 bp, Homo sapien
tctcactctgggaatagtgatcttg

SEQ ID NO: 4929551 - DNA, 25 bp, Homo sapien
ggatggatggatatcaaaagttgaa

SEQ ID NO: 4929552 - DNA, 25 bp, Homo sapien
gatcttgactagctgtctctaatga

SEQ ID NO: 4929553 - DNA, 25 bp, Homo sapien
ctctaatgaaggataggcagatgat

SEQ ID NO: 4929554 - DNA, 25 bp, Homo sapien
gaactgcagtacacggagctttgct

SEQ ID NO: 4929555 - DNA, 25 bp, Homo sapien
actgagccgccaggcgaatggcgta

SEQ ID NO: 4929556 - DNA, 25 bp, Homo sapien
gaatggcgtaatcactcccacgcag

SEQ ID NO: 4929557 - DNA, 25 bp, Homo sapien
ccccagagggaaccgagaactgttg

SEQ ID NO: 4929558 - DNA, 25 bp, Homo sapien
acgcatcacactgtggcatgtaggg

SEQ ID NO: 4929559 - DNA, 25 bp, Homo sapien
ggaaaagcggcgtctctgatagaag

SEQ ID NO: 4929560 - DNA, 25 bp, Homo sapien
tgcacaggctcccaacttccaaacg

SEQ ID NO: 4929561 - DNA, 25 bp, Homo sapien
cccgaccgcagaagggcggatgctc

SEQ ID NO: 4929562 - DNA, 25 bp, Homo sapien
gcagagagcgggcagtcagtgagcc

SEQ ID NO: 4929563 - DNA, 25 bp, Homo sapien
actgtggaatctgcagagagcgggc

SEQ ID NO: 4929564 - DNA, 25 bp, Homo sapien
tttctcatctacacaccagcagtgc

SEQ ID NO: 4929565 - DNA, 25 bp, Homo sapien
gcaggctgggacgaacaggtctttt

SEQ ID NO: 4929566 - DNA, 25 bp, Homo sapien
gttttcttgggatctagcctgtttc

SEQ ID NO: 4929567 - DNA, 25 bp, Homo sapien
cgagatttctcgcaggttgtcgggc

SEQ ID NO: 4929568 - DNA, 25 bp, Homo sapien
gggatctagcctgtttccaactgga

SEQ ID NO: 4929569 - DNA, 25 bp, Homo sapien
gacaagtcccggctccaatcctgtg

SEQ ID NO: 4929570 - DNA, 25 bp, Homo sapien
gggacaagtcccggctccaatcctg

SEQ ID NO: 4929571 - DNA, 25 bp, Homo sapien
cagcggggacaagtcccggctccaa

SEQ ID NO: 4929572 - DNA, 25 bp, Homo sapien
aagtcccggctccaatcctgtgctt

SEQ ID NO: 4929573 - DNA, 25 bp, Homo sapien
gccagcccccgatgcctgcagcctg

SEQ ID NO: 4929574 - DNA, 25 bp, Homo sapien
gtgccagcccccgatgcctgcagcc

SEQ ID NO: 4929575 - DNA, 25 bp, Homo sapien
caggtgccagcccccgatgcctgca

SEQ ID NO: 4929576 - DNA, 25 bp, Homo sapien
cctgcagcctggcatactctcctgt

SEQ ID NO: 4929577 - DNA, 25 bp, Homo sapien
aggccgcaactcttctcctgatgca

SEQ ID NO: 4929578 - DNA, 25 bp, Homo sapien
actgctgctcgagccaggccgcaac

SEQ ID NO: 4929579 - DNA, 25 bp, Homo sapien
aactcttctcctgatgcagggtcca

SEQ ID NO: 4929580 - DNA, 25 bp, Homo sapien
cgcaactcttctcctgatgcagggt

SEQ ID NO: 4929581 - DNA, 25 bp, Homo sapien
ggacatctgcacattgccctttggg

SEQ ID NO: 4929582 - DNA, 25 bp, Homo sapien
aagggccctcgagccattccaggga

SEQ ID NO: 4929583 - DNA, 25 bp, Homo sapien
tgggagcatttatggtgtttaggca

SEQ ID NO: 4929584 - DNA, 25 bp, Homo sapien
agggagctcaagcacggccccgaag

SEQ ID NO: 4929585 - DNA, 25 bp, Homo sapien
tggagaggactccactcttgagcac

SEQ ID NO: 4929586 - DNA, 25 bp, Homo sapien
cctgggctgactctcctggagagga

SEQ ID NO: 4929587 - DNA, 25 bp, Homo sapien
ctcttgagcacattgcagaggcttg

SEQ ID NO: 4929588 - DNA, 25 bp, Homo sapien
tccgctgtccatgacacaccagcag

SEQ ID NO: 4929589 - DNA, 25 bp, Homo sapien
cctgtgacttgagagattggagaaa

SEQ ID NO: 4929590 - DNA, 25 bp, Homo sapien
tgagatcctgcaaccacggtccttc

SEQ ID NO: 4929591 - DNA, 25 bp, Homo sapien
tttccctgcagttccaaaatgttgc

SEQ ID NO: 4929592 - DNA, 25 bp, Homo sapien
cggtgtgtggtaaaagccttggaca

SEQ ID NO: 4929593 - DNA, 25 bp, Homo sapien
gattgtctcacacaggattgttcca

SEQ ID NO: 4929594 - DNA, 25 bp, Homo sapien
gacgcgttgaatggcagcggacacc

SEQ ID NO: 4929595 - DNA, 25 bp, Homo sapien
gctacatatcaatggccctggtgga

SEQ ID NO: 4929596 - DNA, 25 bp, Homo sapien
aattggcactgctgcatggcagagc

SEQ ID NO: 4929597 - DNA, 25 bp, Homo sapien
tggaaagtctgcagcaaatccgcgt

SEQ ID NO: 4929598 - DNA, 25 bp, Homo sapien
gcgggctgtcagctcatccaatatg

SEQ ID NO: 4929599 - DNA, 25 bp, Homo sapien
agcactgcacatcttgcccggcggg

SEQ ID NO: 4929600 - DNA, 25 bp, Homo sapien
ttgggtctggatggtctgccacagc

SEQ ID NO: 4929601 - DNA, 25 bp, Homo sapien
tgcacagaggagttgttgcagacag

SEQ ID NO: 4929602 - DNA, 25 bp, Homo sapien
ttgttgcagacaggaatggaaacca

SEQ ID NO: 4929603 - DNA, 25 bp, Homo sapien
gagttgttgcagacaggaatggaaa

SEQ ID NO: 4929604 - DNA, 25 bp, Homo sapien
ctgcacagaggagttgttgcagaca

SEQ ID NO: 4929605 - DNA, 25 bp, Homo sapien
tcctaaacgctccctggtcagacaa

SEQ ID NO: 4929606 - DNA, 25 bp, Homo sapien
ccgtgatttccatgtaacattcact

SEQ ID NO: 4929607 - DNA, 25 bp, Homo sapien
tgggatgtcctcaagccgtgatttc

SEQ ID NO: 4929608 - DNA, 25 bp, Homo sapien
acattcactcctaaacgctccctgg

SEQ ID NO: 4929609 - DNA, 25 bp, Homo sapien
caatgtcatgtaagtcaggaagaga

SEQ ID NO: 4929610 - DNA, 25 bp, Homo sapien
cctctgttgactcatccatatcgtg

SEQ ID NO: 4929611 - DNA, 25 bp, Homo sapien
ttgactcatccatatcgtgactgcc

SEQ ID NO: 4929612 - DNA, 25 bp, Homo sapien
tctgttgactcatccatatcgtgac

SEQ ID NO: 4929613 - DNA, 25 bp, Homo sapien
tgttgactcatccatatcgtgactg

SEQ ID NO: 4929614 - DNA, 25 bp, Homo sapien
tcagagctgaacatggcacatgccc

SEQ ID NO: 4929615 - DNA, 25 bp, Homo sapien
agctcagagctgaacatggcacatg

SEQ ID NO: 4929616 - DNA, 25 bp, Homo sapien
agagctgaacatggcacatgcccac

SEQ ID NO: 4929617 - DNA, 25 bp, Homo sapien
agaaagctcagagctgaacatggca

SEQ ID NO: 4929618 - DNA, 25 bp, Homo sapien
catctcatgtttttgcggctccaaa

SEQ ID NO: 4929619 - DNA, 25 bp, Homo sapien
caagcaaacatctcatgtttttgcg

SEQ ID NO: 4929620 - DNA, 25 bp, Homo sapien
ttttgcggctccaaacatacccaca

SEQ ID NO: 4929621 - DNA, 25 bp, Homo sapien
tgtttttgcggctccaaacataccc

SEQ ID NO: 4929622 - DNA, 25 bp, Homo sapien
caagacttggtagaatccttccgag

SEQ ID NO: 4929623 - DNA, 25 bp, Homo sapien
tccgctgggaacgtcttggagtcca

SEQ ID NO: 4929624 - DNA, 25 bp, Homo sapien
ctgtgaagcgcccaaggagatcctt

SEQ ID NO: 4929625 - DNA, 25 bp, Homo sapien
gagaggtgccaaagtggtccccttg

SEQ ID NO: 4929626 - DNA, 25 bp, Homo sapien
tcccagtccgtcctgactggcctca

SEQ ID NO: 4929627 - DNA, 25 bp, Homo sapien
catcccagtccgtcctgactggcct

SEQ ID NO: 4929628 - DNA, 25 bp, Homo sapien
cccagtccgtcctgactggcctcac

SEQ ID NO: 4929629 - DNA, 25 bp, Homo sapien
cgcatcccagtccgtcctgactggc

SEQ ID NO: 4929630 - DNA, 25 bp, Homo sapien
gcttccagacccatgtggtacatca

SEQ ID NO: 4929631 - DNA, 25 bp, Homo sapien
ctgcttccagacccatgtggtacat

SEQ ID NO: 4929632 - DNA, 25 bp, Homo sapien
tgcttccagacccatgtggtacatc

SEQ ID NO: 4929633 - DNA, 25 bp, Homo sapien
ttccagacccatgtggtacatcacc

SEQ ID NO: 4929634 - DNA, 25 bp, Homo sapien
gaaatggtcgttctgcccacaggac

SEQ ID NO: 4929635 - DNA, 25 bp, Homo sapien
tgttcttggtagaatccaacaggac

SEQ ID NO: 4929636 - DNA, 25 bp, Homo sapien
ccctgcctgttcttggtagaatcca

SEQ ID NO: 4929637 - DNA, 25 bp, Homo sapien
ttgggaatagcttccttcaggacac

SEQ ID NO: 4929638 - DNA, 25 bp, Homo sapien
tggctggctcgatactggccattct

SEQ ID NO: 4929639 - DNA, 25 bp, Homo sapien
tcgttcctctgacagtcagtgacac

SEQ ID NO: 4929640 - DNA, 25 bp, Homo sapien
cattgcaggcctgcttcgttcctct

SEQ ID NO: 4929641 - DNA, 25 bp, Homo sapien
tctggctggctcgatactggccatt

SEQ ID NO: 4929642 - DNA, 25 bp, Homo sapien
aacactgtgagtcctcaagaggggc

SEQ ID NO: 4929643 - DNA, 25 bp, Homo sapien
tcaaacactgtgagtcctcaagagg

SEQ ID NO: 4929644 - DNA, 25 bp, Homo sapien
actgtgagtcctcaagaggggcctc

SEQ ID NO: 4929645 - DNA, 25 bp, Homo sapien
cactgtgagtcctcaagaggggcct

SEQ ID NO: 4929646 - DNA, 25 bp, Homo sapien
aagggaccttgcagactgtttcagc

SEQ ID NO: 4929647 - DNA, 25 bp, Homo sapien
aggattaagggaccttgcagactgt

SEQ ID NO: 4929648 - DNA, 25 bp, Homo sapien
ttaagggaccttgcagactgtttca

SEQ ID NO: 4929649 - DNA, 25 bp, Homo sapien
gaccttgcagactgtttcagcctcc

SEQ ID NO: 4929650 - DNA, 25 bp, Homo sapien
tggaggctattcagaagccagcgcc

SEQ ID NO: 4929651 - DNA, 25 bp, Homo sapien
gcttagtggcatagaaatccccagg

SEQ ID NO: 4929652 - DNA, 25 bp, Homo sapien
gaagagatgtgttgacatcccagtg

SEQ ID NO: 4929653 - DNA, 25 bp, Homo sapien
tcaaagctcagctgtgactcgtgag

SEQ ID NO: 4929654 - DNA, 25 bp, Homo sapien
cttaaggacctagcctgaaggacaa

SEQ ID NO: 4929655 - DNA, 25 bp, Homo sapien
aagagaaagttcctctcaaaggcaa

SEQ ID NO: 4929656 - DNA, 25 bp, Homo sapien
gtcccttgcttaaggacctagcctg

SEQ ID NO: 4929657 - DNA, 25 bp, Homo sapien
tctggggaggtataagtcccttgct

SEQ ID NO: 4929658 - DNA, 25 bp, Homo sapien
caaatggtgctttatcccaagagca

SEQ ID NO: 4929659 - DNA, 25 bp, Homo sapien
tctcagggcttgtaaaattgaccac

SEQ ID NO: 4929660 - DNA, 25 bp, Homo sapien
cagtaagtgctaagtccctctgtcc

SEQ ID NO: 4929661 - DNA, 25 bp, Homo sapien
tgtcaaagagtacctatggccctgg

SEQ ID NO: 4929662 - DNA, 25 bp, Homo sapien
cattggcgtcgaagatcacctttga

SEQ ID NO: 4929663 - DNA, 25 bp, Homo sapien
gggaactcagaatcaggaactttgg

SEQ ID NO: 4929664 - DNA, 25 bp, Homo sapien
acagccacaggagcattggcgtcga

SEQ ID NO: 4929665 - DNA, 25 bp, Homo sapien
ctgtcaagcactgcatcacggggaa

SEQ ID NO: 4929666 - DNA, 25 bp, Homo sapien
ttcttctgagtgcatatctccccac

SEQ ID NO: 4929667 - DNA, 25 bp, Homo sapien
cttcttctgagtgcatatctcccca

SEQ ID NO: 4929668 - DNA, 25 bp, Homo sapien
tcttctgagtgcatatctccccacc

SEQ ID NO: 4929669 - DNA, 25 bp, Homo sapien
cttctgagtgcatatctccccacca

SEQ ID NO: 4929670 - DNA, 25 bp, Homo sapien
ttcgggctcagggacaaattcagtc

SEQ ID NO: 4929671 - DNA, 25 bp, Homo sapien
taattcttactggtccactggctca

SEQ ID NO: 4929672 - DNA, 25 bp, Homo sapien
acaaattcagtcaagaaaacaatta

SEQ ID NO: 4929673 - DNA, 25 bp, Homo sapien
ctaacctaatcttcacggcaagcag

SEQ ID NO: 4929674 - DNA, 25 bp, Homo sapien
gaaatctctggctccgtcgtggaca

SEQ ID NO: 4929675 - DNA, 25 bp, Homo sapien
caggcaacattgtcacttgtccaag

SEQ ID NO: 4929676 - DNA, 25 bp, Homo sapien
tggtcagaagtcatgcaggcaacat

SEQ ID NO: 4929677 - DNA, 25 bp, Homo sapien
cattgtcacttgtccaagcatagaa

SEQ ID NO: 4929678 - DNA, 25 bp, Homo sapien
ctttgagttccccagtgcatctcgt

SEQ ID NO: 4929679 - DNA, 25 bp, Homo sapien
tttgagttccccagtgcatctcgtt

SEQ ID NO: 4929680 - DNA, 25 bp, Homo sapien
ttgagttccccagtgcatctcgttt

SEQ ID NO: 4929681 - DNA, 25 bp, Homo sapien
cagcgaagacttccaaagctggtgg

SEQ ID NO: 4929682 - DNA, 25 bp, Homo sapien
gagaatcttgaccatggctcctcac

SEQ ID NO: 4929683 - DNA, 25 bp, Homo sapien
ctggagaatcttgaccatggctcct

SEQ ID NO: 4929684 - DNA, 25 bp, Homo sapien
actttcacctggcagcgaagacttc

SEQ ID NO: 4929685 - DNA, 25 bp, Homo sapien
cgcctggccgatgggctgcttttca

SEQ ID NO: 4929686 - DNA, 25 bp, Homo sapien
ttttcatccttcagatcagagttcc

SEQ ID NO: 4929687 - DNA, 25 bp, Homo sapien
ctgcgcctggccgatgggctgcttt

SEQ ID NO: 4929688 - DNA, 25 bp, Homo sapien
ctggccgatgggctgcttttcatcc

SEQ ID NO: 4929689 - DNA, 25 bp, Homo sapien
ctgaagtgttgtggtggatccttgg

SEQ ID NO: 4929690 - DNA, 25 bp, Homo sapien
tgaagtgttgtggtggatccttggc

SEQ ID NO: 4929691 - DNA, 25 bp, Homo sapien
catcggttagattggctcctgaggc

SEQ ID NO: 4929692 - DNA, 25 bp, Homo sapien
tcacggtcgcatgcaagaagacaga

SEQ ID NO: 4929693 - DNA, 25 bp, Homo sapien
acctgtgtgaggacgaagccatcgc

SEQ ID NO: 4929694 - DNA, 25 bp, Homo sapien
gccatcgcaacacagatcacggtcg

SEQ ID NO: 4929695 - DNA, 25 bp, Homo sapien
caagacgcaatatcacctggtggct

SEQ ID NO: 4929696 - DNA, 25 bp, Homo sapien
caggacatgtagcattagcccaggc

SEQ ID NO: 4929697 - DNA, 25 bp, Homo sapien
cctggtggctctcctggtcatatgt

SEQ ID NO: 4929698 - DNA, 25 bp, Homo sapien
tgggtgagctcagcaacccacagat

SEQ ID NO: 4929699 - DNA, 25 bp, Homo sapien
tgctcgtgtgaagagtaattttgaa

SEQ ID NO: 4929700 - DNA, 25 bp, Homo sapien
agggccttgctcgtgtgaagagtaa

SEQ ID NO: 4929701 - DNA, 25 bp, Homo sapien
tagcagagggccttgctcgtgtgaa

SEQ ID NO: 4929702 - DNA, 25 bp, Homo sapien
gccttgctcgtgtgaagagtaattt

SEQ ID NO: 4929703 - DNA, 25 bp, Homo sapien
cttgagttccttctaagggtgtcag

SEQ ID NO: 4929704 - DNA, 25 bp, Homo sapien
gtgtcttgagttccttctaagggtg

SEQ ID NO: 4929705 - DNA, 25 bp, Homo sapien
aaggtgtcttgagttccttctaagg

SEQ ID NO: 4929706 - DNA, 25 bp, Homo sapien
tgagttccttctaagggtgtcagac

SEQ ID NO: 4929707 - DNA, 25 bp, Homo sapien
cccatagactcaggccgagacccca

SEQ ID NO: 4929708 - DNA, 25 bp, Homo sapien
tcccatagactcaggccgagacccc

SEQ ID NO: 4929709 - DNA, 25 bp, Homo sapien
atcccatagactcaggccgagaccc

SEQ ID NO: 4929710 - DNA, 25 bp, Homo sapien
cttctgttggagatgctggccttgg

SEQ ID NO: 4929711 - DNA, 25 bp, Homo sapien
gctggccttggcactgtgtcttttc

SEQ ID NO: 4929712 - DNA, 25 bp, Homo sapien
tgttggagatgctggccttggcact

SEQ ID NO: 4929713 - DNA, 25 bp, Homo sapien
gagatgctggccttggcactgtgtc

SEQ ID NO: 4929714 - DNA, 25 bp, Homo sapien
tagtgattgatttccattgacaatg

SEQ ID NO: 4929715 - DNA, 25 bp, Homo sapien
tgctgggctgaaaacaggtgcttga

SEQ ID NO: 4929716 - DNA, 25 bp, Homo sapien
gagaaaggcaccataggtttgcctg

SEQ ID NO: 4929717 - DNA, 25 bp, Homo sapien
aacaggtgcttgaaaagccagtgct

SEQ ID NO: 4929718 - DNA, 25 bp, Homo sapien
caggtgaagtacaaggatgcactct

SEQ ID NO: 4929719 - DNA, 25 bp, Homo sapien
gaacagggcctttggcatctgaggc

SEQ ID NO: 4929720 - DNA, 25 bp, Homo sapien
tgaggcaggatcagtctgcagccct

SEQ ID NO: 4929721 - DNA, 25 bp, Homo sapien
tctgcgagctgacagaaagagtgct

SEQ ID NO: 4929722 - DNA, 25 bp, Homo sapien
tttatttctaatggatatccccatc

SEQ ID NO: 4929723 - DNA, 25 bp, Homo sapien
aacggcaggcgagtgtaaaagttct

SEQ ID NO: 4929724 - DNA, 25 bp, Homo sapien
tatttctaatggatatccccatcag

SEQ ID NO: 4929725 - DNA, 25 bp, Homo sapien
catcagtttttggaacggcaggcga

SEQ ID NO: 4929726 - DNA, 25 bp, Homo sapien
taataaacattaggggtgagacaca

SEQ ID NO: 4929727 - DNA, 25 bp, Homo sapien
actactagcatgtgccgccaccatg

SEQ ID NO: 4929728 - DNA, 25 bp, Homo sapien
aaagtgctgggtatgcttctgtttt

SEQ ID NO: 4929729 - DNA, 25 bp, Homo sapien
taggggtgagacacaagtagcttac

SEQ ID NO: 4929730 - DNA, 25 bp, Homo sapien
gtaagcagaaggtctcagctttgga

SEQ ID NO: 4929731 - DNA, 25 bp, Homo sapien
ggtaagcagaaggtctcagctttgg

SEQ ID NO: 4929732 - DNA, 25 bp, Homo sapien
agcatgggtccgcatcgcaccgtcg

SEQ ID NO: 4929733 - DNA, 25 bp, Homo sapien
gtgcagcatgggtccgcatcgcacc

SEQ ID NO: 4929734 - DNA, 25 bp, Homo sapien
atgggtccgcatcgcaccgtcgttc

SEQ ID NO: 4929735 - DNA, 25 bp, Homo sapien
cgcatcgcaccgtcgttcacattca

SEQ ID NO: 4929736 - DNA, 25 bp, Homo sapien
ctcacataaccttacgaggaaggta

SEQ ID NO: 4929737 - DNA, 25 bp, Homo sapien
tgtgctaggtctctgttggtatcac

SEQ ID NO: 4929738 - DNA, 25 bp, Homo sapien
ggaaggtagctttggtagccctata

SEQ ID NO: 4929739 - DNA, 25 bp, Homo sapien
acttcacttggtcctcacataacct

SEQ ID NO: 4929740 - DNA, 25 bp, Homo sapien
tgtcaggagagccacagtccaaaat

SEQ ID NO: 4929741 - DNA, 25 bp, Homo sapien
gaattcccaagctgttcagagtgag

SEQ ID NO: 4929742 - DNA, 25 bp, Homo sapien
catccgaagggataggtgtggactt

SEQ ID NO: 4929743 - DNA, 25 bp, Homo sapien
tgggcttctggtaccatccgaaggg

SEQ ID NO: 4929744 - DNA, 25 bp, Homo sapien
catcttgttaggaccgtcaagctgt

SEQ ID NO: 4929745 - DNA, 25 bp, Homo sapien
ctgactaagcccaggtgggaccaaa

SEQ ID NO: 4929746 - DNA, 25 bp, Homo sapien
tggcagcgtgctgactaagcccagg

SEQ ID NO: 4929747 - DNA, 25 bp, Homo sapien
tgaatttaaaggttgaatataacca

SEQ ID NO: 4929748 - DNA, 25 bp, Homo sapien
caccagcaggaagattccattcaaa

SEQ ID NO: 4929749 - DNA, 25 bp, Homo sapien
taggctcatgagcaagggccgagca

SEQ ID NO: 4929750 - DNA, 25 bp, Homo sapien
gattccattcaaactggtaataatt

SEQ ID NO: 4929751 - DNA, 25 bp, Homo sapien
cacacagggaatgggtaggctcatg

SEQ ID NO: 4929752 - DNA, 25 bp, Homo sapien
acacaaccttgtgacagccagtcct

SEQ ID NO: 4929753 - DNA, 25 bp, Homo sapien
cagaatgcccataagccatgtgcat

SEQ ID NO: 4929754 - DNA, 25 bp, Homo sapien
tctgaaatgagaaccacggagccac

SEQ ID NO: 4929755 - DNA, 25 bp, Homo sapien
tgtgcatcccatggtgttttctgtt

SEQ ID NO: 4929756 - DNA, 25 bp, Homo sapien
gcaaaaactgggagcattattttga

SEQ ID NO: 4929757 - DNA, 25 bp, Homo sapien
ggaaggcagaacaaccaaagggcaa

SEQ ID NO: 4929758 - DNA, 25 bp, Homo sapien
tgtgagggaaggcagaacaaccaaa

SEQ ID NO: 4929759 - DNA, 25 bp, Homo sapien
ccaaagggcaaaaactgggagcatt

SEQ ID NO: 4929760 - DNA, 25 bp, Homo sapien
gcgacttaggtcttactctgcttca

SEQ ID NO: 4929761 - DNA, 25 bp, Homo sapien
ggtactcaccccacttatacatgtg

SEQ ID NO: 4929762 - DNA, 25 bp, Homo sapien
tgaaaactgggagaacgcgacttag

SEQ ID NO: 4929763 - DNA, 25 bp, Homo sapien
taatgcgagtgatatgcaagctatc

SEQ ID NO: 4929764 - DNA, 25 bp, Homo sapien
cccagtgtggccgataactgtaagc

SEQ ID NO: 4929765 - DNA, 25 bp, Homo sapien
ggccataaataacaccattcttgac

SEQ ID NO: 4929766 - DNA, 25 bp, Homo sapien
agtgtttcatcattagatgtcacag

SEQ ID NO: 4929767 - DNA, 25 bp, Homo sapien
tttgcactaataaggagctgacttc

SEQ ID NO: 4929768 - DNA, 25 bp, Homo sapien
aaccttacagtatctcaggaagcta

SEQ ID NO: 4929769 - DNA, 25 bp, Homo sapien
atctggctagcacatgtattatctg

SEQ ID NO: 4929770 - DNA, 25 bp, Homo sapien
tgacatggcaataacgatgccaacc

SEQ ID NO: 4929771 - DNA, 25 bp, Homo sapien
caactgtgtttgtacactaacttga

SEQ ID NO: 4929772 - DNA, 25 bp, Homo sapien
tgatatcagaccatacagagagcct

SEQ ID NO: 4929773 - DNA, 25 bp, Homo sapien
gaaataatctggtcttctggaggga

SEQ ID NO: 4929774 - DNA, 25 bp, Homo sapien
tcatcactagaaggtgagcatcgtg

SEQ ID NO: 4929775 - DNA, 25 bp, Homo sapien
tacggctggtaagtatgcaactagc

SEQ ID NO: 4929776 - DNA, 25 bp, Homo sapien
tccagttatacggaagccctcactc

SEQ ID NO: 4929777 - DNA, 25 bp, Homo sapien
gtactccagttatacggaagccctc

SEQ ID NO: 4929778 - DNA, 25 bp, Homo sapien
agttatacggaagccctcactccat

SEQ ID NO: 4929779 - DNA, 25 bp, Homo sapien
catgacaccaggtactccagttata

SEQ ID NO: 4929780 - DNA, 25 bp, Homo sapien
cccatttgaaactctggtctcagtt

SEQ ID NO: 4929781 - DNA, 25 bp, Homo sapien
cctgctaaaatcttgagtggtttca

SEQ ID NO: 4929782 - DNA, 25 bp, Homo sapien
cttaactgagaatgcctagtcattc

SEQ ID NO: 4929783 - DNA, 25 bp, Homo sapien
catcttagggagagtagaagcccat

SEQ ID NO: 4929784 - DNA, 25 bp, Homo sapien
taagagtgaatgttaatagtagtga

SEQ ID NO: 4929785 - DNA, 25 bp, Homo sapien
ccaaaatttaatattaagagtgaat

SEQ ID NO: 4929786 - DNA, 25 bp, Homo sapien
gtagtgatgttacagttgctacccc

SEQ ID NO: 4929787 - DNA, 25 bp, Homo sapien
tgaatgttaatagtagtgatgttac

SEQ ID NO: 4929788 - DNA, 25 bp, Homo sapien
aaggatttgacctcccatacatcaa

SEQ ID NO: 4929789 - DNA, 25 bp, Homo sapien
catttgttaaggatttgacctccca

SEQ ID NO: 4929790 - DNA, 25 bp, Homo sapien
ttgttaaggatttgacctcccatac

SEQ ID NO: 4929791 - DNA, 25 bp, Homo sapien
gttaaggatttgacctcccatacat

SEQ ID NO: 4929792 - DNA, 25 bp, Homo sapien
gaaaagtctttcaggcccccagcaa

SEQ ID NO: 4929793 - DNA, 25 bp, Homo sapien
ggaaaagtctttcaggcccccagca

SEQ ID NO: 4929794 - DNA, 25 bp, Homo sapien
aaccgtgacattctgaaacctttca

SEQ ID NO: 4929795 - DNA, 25 bp, Homo sapien
gctggctggggtaaaccgtgacatt

SEQ ID NO: 4929796 - DNA, 25 bp, Homo sapien
cttcccgcaatcaaaaccaagagga

SEQ ID NO: 4929797 - DNA, 25 bp, Homo sapien
tcagctgctcagcactcatcaagtg

SEQ ID NO: 4929798 - DNA, 25 bp, Homo sapien
tcttcccgcaatcaaaaccaagagg

SEQ ID NO: 4929799 - DNA, 25 bp, Homo sapien
cagctgctcagcactcatcaagtga

SEQ ID NO: 4929800 - DNA, 25 bp, Homo sapien
gggcagaatgtcaaaccggcagcaa

SEQ ID NO: 4929801 - DNA, 25 bp, Homo sapien
catttttgtatcagatccaagggca

SEQ ID NO: 4929802 - DNA, 25 bp, Homo sapien
aacaggcggaaagtgcctccaagca

SEQ ID NO: 4929803 - DNA, 25 bp, Homo sapien
cagtgagtccaaggcatccaaaagt

SEQ ID NO: 4929804 - DNA, 25 bp, Homo sapien
tgctggcattgttgcaaatgaacaa

SEQ ID NO: 4929805 - DNA, 25 bp, Homo sapien
ccccagtgtactgctggcattgttg

SEQ ID NO: 4929806 - DNA, 25 bp, Homo sapien
ctggcattgttgcaaatgaacaagg

SEQ ID NO: 4929807 - DNA, 25 bp, Homo sapien
atgttccccagtgtactgctggcat

SEQ ID NO: 4929808 - DNA, 25 bp, Homo sapien
ctgtaagaaaggtgatatggtaggc

SEQ ID NO: 4929809 - DNA, 25 bp, Homo sapien
tatggtaggcatcaagggaatgggc

SEQ ID NO: 4929810 - DNA, 25 bp, Homo sapien
ctgttcaaaaaggtataacccacag

SEQ ID NO: 4929811 - DNA, 25 bp, Homo sapien
tgggcactgttcaaaaaggtataac

SEQ ID NO: 4929812 - DNA, 25 bp, Homo sapien
gttgttcgtttggccaggtacatgt

SEQ ID NO: 4929813 - DNA, 25 bp, Homo sapien
tggagttgttcgtttggccaggtac

SEQ ID NO: 4929814 - DNA, 25 bp, Homo sapien
aaaaataagtatccgagggatggct

SEQ ID NO: 4929815 - DNA, 25 bp, Homo sapien
gactatagttaacatatggcacatt

SEQ ID NO: 4929816 - DNA, 25 bp, Homo sapien
ggcacatttcgaaactactaagaga

SEQ ID NO: 4929817 - DNA, 25 bp, Homo sapien
tatgtatatgatgcagaggagtact

SEQ ID NO: 4929818 - DNA, 25 bp, Homo sapien
tcctgcgcagtgtgcctgcggtgcc

SEQ ID NO: 4929819 - DNA, 25 bp, Homo sapien
ctgcgcagtgtgcctgcggtgccat

SEQ ID NO: 4929820 - DNA, 25 bp, Homo sapien
ctcctgcgcagtgtgcctgcggtgc

SEQ ID NO: 4929821 - DNA, 25 bp, Homo sapien
cctgcgcagtgtgcctgcggtgcca

SEQ ID NO: 4929822 - DNA, 25 bp, Homo sapien
tttttgtttatctggctggctatat

SEQ ID NO: 4929823 - DNA, 25 bp, Homo sapien
cagtctggtctaattctagtttttg

SEQ ID NO: 4929824 - DNA, 25 bp, Homo sapien
gtttatctggctggctatatttttg

SEQ ID NO: 4929825 - DNA, 25 bp, Homo sapien
ctccactaaaatactcagtctggtc

SEQ ID NO: 4929826 - DNA, 25 bp, Homo sapien
ggccatactctgtgtttaggttgat

SEQ ID NO: 4929827 - DNA, 25 bp, Homo sapien
aatggaagccttggccatactctgt

SEQ ID NO: 4929828 - DNA, 25 bp, Homo sapien
ttggccatactctgtgtttaggttg

SEQ ID NO: 4929829 - DNA, 25 bp, Homo sapien
tatggtcttaaaatggaagccttgg

SEQ ID NO: 4929830 - DNA, 25 bp, Homo sapien
cgacaaacagaggtctcggacagca

SEQ ID NO: 4929831 - DNA, 25 bp, Homo sapien
ccgacaaacagaggtctcggacagc

SEQ ID NO: 4929832 - DNA, 25 bp, Homo sapien
gatgtgggtggcctcttcacgaagc

SEQ ID NO: 4929833 - DNA, 25 bp, Homo sapien
ttcacgaagcagaagtcggcagttc

SEQ ID NO: 4929834 - DNA, 25 bp, Homo sapien
tctgaccctgcagactatgtgtgca

SEQ ID NO: 4929835 - DNA, 25 bp, Homo sapien
cagagtggtgatgagacaggcctca

SEQ ID NO: 4929836 - DNA, 25 bp, Homo sapien
agatgcctcatagctgagcagagag

SEQ ID NO: 4929837 - DNA, 25 bp, Homo sapien
gatgcctcatagctgagcagagaga

SEQ ID NO: 4929838 - DNA, 25 bp, Homo sapien
ctggtgcctggaagcgcctctctgc

SEQ ID NO: 4929839 - DNA, 25 bp, Homo sapien
ctgtccagttcaagggctctggtgc

SEQ ID NO: 4929840 - DNA, 25 bp, Homo sapien
tggtgcctggaagcgcctctctgcc

SEQ ID NO: 4929841 - DNA, 25 bp, Homo sapien
ggaactggtccacttgcttccatga

SEQ ID NO: 4929842 - DNA, 25 bp, Homo sapien
ggatgaacacattgagatacaaaca

SEQ ID NO: 4929843 - DNA, 25 bp, Homo sapien
gaacacattgagatacaaacaatct

SEQ ID NO: 4929844 - DNA, 25 bp, Homo sapien
ctgagggatgaacacattgagatac

SEQ ID NO: 4929845 - DNA, 25 bp, Homo sapien
cacattctgagggatgaacacattg

SEQ ID NO: 4929846 - DNA, 25 bp, Homo sapien
gaaaaggccgtttggcttgtggctg

SEQ ID NO: 4929847 - DNA, 25 bp, Homo sapien
agaaggagccgtcgatagccggcca

SEQ ID NO: 4929848 - DNA, 25 bp, Homo sapien
aggaagccgaagacacccactcggt

SEQ ID NO: 4929849 - DNA, 25 bp, Homo sapien
gaacaccagcacagacgcgttaggg

SEQ ID NO: 4929850 - DNA, 25 bp, Homo sapien
cactcggtagctggcagtgaccacg

SEQ ID NO: 4929851 - DNA, 25 bp, Homo sapien
tctccatgaggcaccatagttatga

SEQ ID NO: 4929852 - DNA, 25 bp, Homo sapien
tgaattcagtagatccttgccaaac

SEQ ID NO: 4929853 - DNA, 25 bp, Homo sapien
gtcctgtgtgtgtcagcggcccagc

SEQ ID NO: 4929854 - DNA, 25 bp, Homo sapien
tgattcacaggattcagcatccagc

SEQ ID NO: 4929855 - DNA, 25 bp, Homo sapien
acagctctccggaaaagttgggagt

SEQ ID NO: 4929856 - DNA, 25 bp, Homo sapien
agggtccccgccaaatcctcggatg

SEQ ID NO: 4929857 - DNA, 25 bp, Homo sapien
acggtctgctgccagggacacgcgc

SEQ ID NO: 4929858 - DNA, 25 bp, Homo sapien
gatgtgggtctgcacccaggtcaga

SEQ ID NO: 4929859 - DNA, 25 bp, Homo sapien
tcacatgcatcccaaggactgctgg

SEQ ID NO: 4929860 - DNA, 25 bp, Homo sapien
ggagcagttgtaaaagctacttcca

SEQ ID NO: 4929861 - DNA, 25 bp, Homo sapien
cacatgcatcccaaggactgctggg

SEQ ID NO: 4929862 - DNA, 25 bp, Homo sapien
agttgtaaaagctacttccaaatga

SEQ ID NO: 4929863 - DNA, 25 bp, Homo sapien
agagaggagtaaagatcacccagag

SEQ ID NO: 4929864 - DNA, 25 bp, Homo sapien
taaagatcacccagagaaacctggt

SEQ ID NO: 4929865 - DNA, 25 bp, Homo sapien
gaaacctggtgccagttagcagctc

SEQ ID NO: 4929866 - DNA, 25 bp, Homo sapien
acctggtgccagttagcagctcagc

SEQ ID NO: 4929867 - DNA, 25 bp, Homo sapien
cacataagcattccgtccatctgag

SEQ ID NO: 4929868 - DNA, 25 bp, Homo sapien
tgacttcccgcataaggcagggtga

SEQ ID NO: 4929869 - DNA, 25 bp, Homo sapien
taacactgtggacattgacttcccg

SEQ ID NO: 4929870 - DNA, 25 bp, Homo sapien
tttcaaaggaaccagccaacgtatg

SEQ ID NO: 4929871 - DNA, 25 bp, Homo sapien
caagcctggttcatggtgacccgca

SEQ ID NO: 4929872 - DNA, 25 bp, Homo sapien
aacaagaggctgcaatccctgggct

SEQ ID NO: 4929873 - DNA, 25 bp, Homo sapien
gctttgacccctgaggagaccatga

SEQ ID NO: 4929874 - DNA, 25 bp, Homo sapien
gattaagtgccaaggagagccgtgt

SEQ ID NO: 4929875 - DNA, 25 bp, Homo sapien
ccagacatgggcagtacaggatttt

SEQ ID NO: 4929876 - DNA, 25 bp, Homo sapien
tcacagcgacagcatgatgcagggc

SEQ ID NO: 4929877 - DNA, 25 bp, Homo sapien
tacaacctagggaagtcccgctgtg

SEQ ID NO: 4929878 - DNA, 25 bp, Homo sapien
tgagcttccagtaatgttccgtgga

SEQ ID NO: 4929879 - DNA, 25 bp, Homo sapien
tatgtattgagcttctagggaatcc

SEQ ID NO: 4929880 - DNA, 25 bp, Homo sapien
caagtgatgctttatgatgccccag

SEQ ID NO: 4929881 - DNA, 25 bp, Homo sapien
gatgccccaggattgaggtatccta

SEQ ID NO: 4929882 - DNA, 25 bp, Homo sapien
ttgacagatagatgggcattgcccc

SEQ ID NO: 4929883 - DNA, 25 bp, Homo sapien
tagaccaaatgcctgggagctgtag

SEQ ID NO: 4929884 - DNA, 25 bp, Homo sapien
ttccctatggagcatctactgagcc

SEQ ID NO: 4929885 - DNA, 25 bp, Homo sapien
gagagtagaaacaaacctgctggct

SEQ ID NO: 4929886 - DNA, 25 bp, Homo sapien
caaatgaccgtcgaattgtgaccca

SEQ ID NO: 4929887 - DNA, 25 bp, Homo sapien
gaggtgatatccaccatcccgagtg

SEQ ID NO: 4929888 - DNA, 25 bp, Homo sapien
gctgtggtccttcgaaaagtggaga

SEQ ID NO: 4929889 - DNA, 25 bp, Homo sapien
gagctgcaagtctattaaactgggc

SEQ ID NO: 4929890 - DNA, 25 bp, Homo sapien
ggagcctcagcgagaacaagcggat

SEQ ID NO: 4929891 - DNA, 25 bp, Homo sapien
tgggaaaccgaaatcagagaagctg

SEQ ID NO: 4929892 - DNA, 25 bp, Homo sapien
cagagttaagctggccatattctca

SEQ ID NO: 4929893 - DNA, 25 bp, Homo sapien
gcagctcttagccacagccttcgtg

SEQ ID NO: 4929894 - DNA, 25 bp, Homo sapien
agagcaaattcacagccccattgat

SEQ ID NO: 4929895 - DNA, 25 bp, Homo sapien
cattgagtttctttgatgggtcgcc

SEQ ID NO: 4929896 - DNA, 25 bp, Homo sapien
tctagttcttttcccgtgacccaca

SEQ ID NO: 4929897 - DNA, 25 bp, Homo sapien
tattcagtctttcccataggactcc

SEQ ID NO: 4929898 - DNA, 25 bp, Homo sapien
tgtgcaaagtagcacatctgcgccc

SEQ ID NO: 4929899 - DNA, 25 bp, Homo sapien
gcaaatacgtaatgaacattgtttt

SEQ ID NO: 4929900 - DNA, 25 bp, Homo sapien
aatttacaatagatgttggctaaag

SEQ ID NO: 4929901 - DNA, 25 bp, Homo sapien
tacaatagatgttggctaaagtgag

SEQ ID NO: 4929902 - DNA, 25 bp, Homo sapien
ttggctaaagtgagtaattcagcaa

SEQ ID NO: 4929903 - DNA, 25 bp, Homo sapien
tatcccaagttgctttgattcacat

SEQ ID NO: 4929904 - DNA, 25 bp, Homo sapien
gagagtctatcccaagttgctttga

SEQ ID NO: 4929905 - DNA, 25 bp, Homo sapien
tgcagactgaaaaggccttgtgaga

SEQ ID NO: 4929906 - DNA, 25 bp, Homo sapien
tgtgagacaagggagagtctatccc

SEQ ID NO: 4929907 - DNA, 25 bp, Homo sapien
cagagctccatgttctaaccagtgt

SEQ ID NO: 4929908 - DNA, 25 bp, Homo sapien
gttgaagccacttccctagagtctc

SEQ ID NO: 4929909 - DNA, 25 bp, Homo sapien
ggagctgggtaacaacagtattatt

SEQ ID NO: 4929910 - DNA, 25 bp, Homo sapien
gccaggatttgagcctaggctgcag

SEQ ID NO: 4929911 - DNA, 25 bp, Homo sapien
tctcatggctgatgacggcggccgg

SEQ ID NO: 4929912 - DNA, 25 bp, Homo sapien
tgggcatcattgaggacattggcag

SEQ ID NO: 4929913 - DNA, 25 bp, Homo sapien
ggcggaggcaggacaccacttcttg

SEQ ID NO: 4929914 - DNA, 25 bp, Homo sapien
gctggatgacatggggcaactgacc

SEQ ID NO: 4929915 - DNA, 25 bp, Homo sapien
ggaagtggccatcgatcacaggacc

SEQ ID NO: 4929916 - DNA, 25 bp, Homo sapien
gttgatgagcccgtcgtcctgagaa

SEQ ID NO: 4929917 - DNA, 25 bp, Homo sapien
tgagcagatcgacctctacccataa

SEQ ID NO: 4929918 - DNA, 25 bp, Homo sapien
cctgagaactcccaatgagcagatc

SEQ ID NO: 4929919 - DNA, 25 bp, Homo sapien
cttttttgcttcaggcgggacctgg

SEQ ID NO: 4929920 - DNA, 25 bp, Homo sapien
gagtgctccagagagtaataccatg

SEQ ID NO: 4929921 - DNA, 25 bp, Homo sapien
gcatagtcatccgtggagtgctcca

SEQ ID NO: 4929922 - DNA, 25 bp, Homo sapien
tgttttgctactggtccggcctcga

SEQ ID NO: 4929923 - DNA, 25 bp, Homo sapien
taataccatgtagcagcagcctcga

SEQ ID NO: 4929924 - DNA, 25 bp, Homo sapien
catagcagtaggaatctgcaccctc

SEQ ID NO: 4929925 - DNA, 25 bp, Homo sapien
tttatttctcattcatgacctgaac

SEQ ID NO: 4929926 - DNA, 25 bp, Homo sapien
gacctgaacaccaactgagtctgct

SEQ ID NO: 4929927 - DNA, 25 bp, Homo sapien
gagtctgctccaaaacatagcagta

SEQ ID NO: 4929928 - DNA, 25 bp, Homo sapien
tgccatggccgtagttttcaggagc

SEQ ID NO: 4929929 - DNA, 25 bp, Homo sapien
atgaagacgtttcctcgggccctct

SEQ ID NO: 4929930 - DNA, 25 bp, Homo sapien
ggagcatggtacatgaagacgtttc

SEQ ID NO: 4929931 - DNA, 25 bp, Homo sapien
gcactggccatgtcgattatagggc

SEQ ID NO: 4929932 - DNA, 25 bp, Homo sapien
gttccctgggttgccgcagtggaac

SEQ ID NO: 4929933 - DNA, 25 bp, Homo sapien
gccacggagccacgggaggtagtta

SEQ ID NO: 4929934 - DNA, 25 bp, Homo sapien
tttcatgggaggttccctgggttgc

SEQ ID NO: 4929935 - DNA, 25 bp, Homo sapien
ccacgggaggtagttatgagggcct

SEQ ID NO: 4929936 - DNA, 25 bp, Homo sapien
tctatccttcggtatgatttcctga

SEQ ID NO: 4929937 - DNA, 25 bp, Homo sapien
tatccttcggtatgatttcctgagc

SEQ ID NO: 4929938 - DNA, 25 bp, Homo sapien
catctatccttcggtatgatttcct

SEQ ID NO: 4929939 - DNA, 25 bp, Homo sapien
ctatccttcggtatgatttcctgag

SEQ ID NO: 4929940 - DNA, 25 bp, Homo sapien
aggacctgcagggaggctaagcctg

SEQ ID NO: 4929941 - DNA, 25 bp, Homo sapien
gcaccccagcgagccaaaagcctca

SEQ ID NO: 4929942 - DNA, 25 bp, Homo sapien
tgcagggaggctaagcctgcacccc

SEQ ID NO: 4929943 - DNA, 25 bp, Homo sapien
acactgctcatcattaatcctgctg

SEQ ID NO: 4929944 - DNA, 25 bp, Homo sapien
ctaattcttcgaaaggtgtgacggc

SEQ ID NO: 4929945 - DNA, 25 bp, Homo sapien
ggaatctaattcttcgaaaggtgtg

SEQ ID NO: 4929946 - DNA, 25 bp, Homo sapien
gtctactggaatctaattcttcgaa

SEQ ID NO: 4929947 - DNA, 25 bp, Homo sapien
tactggaatctaattcttcgaaagg

SEQ ID NO: 4929948 - DNA, 25 bp, Homo sapien
actgcccctcgtaggctgggtagaa

SEQ ID NO: 4929949 - DNA, 25 bp, Homo sapien
cctgatctgatgaagtgggaaaagt

SEQ ID NO: 4929950 - DNA, 25 bp, Homo sapien
ccagagaaaactgcccctcgtaggc

SEQ ID NO: 4929951 - DNA, 25 bp, Homo sapien
tgattttcagcgacaggctcttctc

SEQ ID NO: 4929952 - DNA, 25 bp, Homo sapien
aagaaatatccatgagggaaatttg

SEQ ID NO: 4929953 - DNA, 25 bp, Homo sapien
gaaagaaatatccatgagggaaatt

SEQ ID NO: 4929954 - DNA, 25 bp, Homo sapien
ctttccgtgagaactcataagggta

SEQ ID NO: 4929955 - DNA, 25 bp, Homo sapien
gagatgtacttggaccagaaggagc

SEQ ID NO: 4929956 - DNA, 25 bp, Homo sapien
tgtcttcagagacgagatgtacttg

SEQ ID NO: 4929957 - DNA, 25 bp, Homo sapien
aggagcagtcggctttcttcaggcc

SEQ ID NO: 4929958 - DNA, 25 bp, Homo sapien
gctatagggacatgctaagggtaca

SEQ ID NO: 4929959 - DNA, 25 bp, Homo sapien
aggttggtccaagccagattaggac

SEQ ID NO: 4929960 - DNA, 25 bp, Homo sapien
gacatttcttgctaatgccctttag

SEQ ID NO: 4929961 - DNA, 25 bp, Homo sapien
caagccagattaggacttctcttct

SEQ ID NO: 4929962 - DNA, 25 bp, Homo sapien
ggttcctggaggcttaggagatctt

SEQ ID NO: 4929963 - DNA, 25 bp, Homo sapien
taggagatcttctcttagcccagat

SEQ ID NO: 4929964 - DNA, 25 bp, Homo sapien
agatccagccgtcaactcctcctct

SEQ ID NO: 4929965 - DNA, 25 bp, Homo sapien
tgtaggtcttagagcctggttcctg

SEQ ID NO: 4929966 - DNA, 25 bp, Homo sapien
agatgaccatagtgggcagcctcgg

SEQ ID NO: 4929967 - DNA, 25 bp, Homo sapien
agaaaaagatgaccatagtgggcag

SEQ ID NO: 4929968 - DNA, 25 bp, Homo sapien
gatactttattgaaggtaagtggct

SEQ ID NO: 4929969 - DNA, 25 bp, Homo sapien
aaagatgaccatagtgggcagcctc

SEQ ID NO: 4929970 - DNA, 25 bp, Homo sapien
gcataacagatgctcataaacattt

SEQ ID NO: 4929971 - DNA, 25 bp, Homo sapien
tggtgttaccaacgaattgccttgg

SEQ ID NO: 4929972 - DNA, 25 bp, Homo sapien
ttattaagatatagttggtgttacc

SEQ ID NO: 4929973 - DNA, 25 bp, Homo sapien
ttgccttggattcacacattagagt

SEQ ID NO: 4929974 - DNA, 25 bp, Homo sapien
tgcagctcacacaccctagctattg

SEQ ID NO: 4929975 - DNA, 25 bp, Homo sapien
ggtaggactgtgatcgcctggcctc

SEQ ID NO: 4929976 - DNA, 25 bp, Homo sapien
ctgaaggtagttccagggtaggact

SEQ ID NO: 4929977 - DNA, 25 bp, Homo sapien
tagattgtctcttccgctgcaggtt

SEQ ID NO: 4929978 - DNA, 25 bp, Homo sapien
catgccttgcagattgtgaatatca

SEQ ID NO: 4929979 - DNA, 25 bp, Homo sapien
gacttttggttgaccctaagcttga

SEQ ID NO: 4929980 - DNA, 25 bp, Homo sapien
tatcactctggttctcgatgcgagg

SEQ ID NO: 4929981 - DNA, 25 bp, Homo sapien
tgatgtgggtgtactgtgaccttcc

SEQ ID NO: 4929982 - DNA, 25 bp, Homo sapien
tgaagtctcctctggccaaatttac

SEQ ID NO: 4929983 - DNA, 25 bp, Homo sapien
gtctcctctggccaaatttacatgt

SEQ ID NO: 4929984 - DNA, 25 bp, Homo sapien
tctggccaaatttacatgtacttgg

SEQ ID NO: 4929985 - DNA, 25 bp, Homo sapien
atttacatgtacttggctgtccagg

SEQ ID NO: 4929986 - DNA, 25 bp, Homo sapien
caggggagactttgctgacgggcat

SEQ ID NO: 4929987 - DNA, 25 bp, Homo sapien
cagaagccaggggagactttgctga

SEQ ID NO: 4929988 - DNA, 25 bp, Homo sapien
ctggatgaccagagttcttctgcag

SEQ ID NO: 4929989 - DNA, 25 bp, Homo sapien
tggatgaccagagttcttctgcaga

SEQ ID NO: 4929990 - DNA, 25 bp, Homo sapien
gagacgtctggaaggaacagctggc

SEQ ID NO: 4929991 - DNA, 25 bp, Homo sapien
gaggtttctggagacgtctggaagg

SEQ ID NO: 4929992 - DNA, 25 bp, Homo sapien
tccaagggactcatagaggtttctg

SEQ ID NO: 4929993 - DNA, 25 bp, Homo sapien
ggagacgtctggaaggaacagctgg

SEQ ID NO: 4929994 - DNA, 25 bp, Homo sapien
tgcggttatgatgtcattcactgcc

SEQ ID NO: 4929995 - DNA, 25 bp, Homo sapien
gtcctgatgtcacctggcgagccag

SEQ ID NO: 4929996 - DNA, 25 bp, Homo sapien
gagccagctcggctgcggttatgat

SEQ ID NO: 4929997 - DNA, 25 bp, Homo sapien
ctaacacatgtcagagctatttggg

SEQ ID NO: 4929998 - DNA, 25 bp, Homo sapien
tgaacataagctatttctagatgaa

SEQ ID NO: 4929999 - DNA, 25 bp, Homo sapien
aacataatcgtaatttcagactttt

SEQ ID NO: 4930000 - DNA, 25 bp, Homo sapien
cataagctatttctagatgaagaca

SEQ ID NO: 4930001 - DNA, 25 bp, Homo sapien
agatgaagacaactttcctgataac

SEQ ID NO: 4930002 - DNA, 25 bp, Homo sapien
tataggctacagctccaagcacagt

SEQ ID NO: 4930003 - DNA, 25 bp, Homo sapien
acaataacctgcatataggctacag

SEQ ID NO: 4930004 - DNA, 25 bp, Homo sapien
gcatataggctacagctccaagcac

SEQ ID NO: 4930005 - DNA, 25 bp, Homo sapien
taacctgcatataggctacagctcc

SEQ ID NO: 4930006 - DNA, 25 bp, Homo sapien
aaaacagtggtttggattcaggcaa

SEQ ID NO: 4930007 - DNA, 25 bp, Homo sapien
gcaaagctgttatttcctggccacc

SEQ ID NO: 4930008 - DNA, 25 bp, Homo sapien
gccacccaacaagcaaggaccaaat

SEQ ID NO: 4930009 - DNA, 25 bp, Homo sapien
gggctataggtctttctctcaccac

SEQ ID NO: 4930010 - DNA, 25 bp, Homo sapien
taaaaattgagtgtccgcaggctga

SEQ ID NO: 4930011 - DNA, 25 bp, Homo sapien
gatgtcagcctaaccatggtcaggg

SEQ ID NO: 4930012 - DNA, 25 bp, Homo sapien
gagtcagaattagcaggatcaggtc

SEQ ID NO: 4930013 - DNA, 25 bp, Homo sapien
tgaagagcagttgggccatggcacc

SEQ ID NO: 4930014 - DNA, 25 bp, Homo sapien
ggggcatcgttgactctgcgtgggc

SEQ ID NO: 4930015 - DNA, 25 bp, Homo sapien
ggcatcgttgactctgcgtgggcag

SEQ ID NO: 4930016 - DNA, 25 bp, Homo sapien
gcatcgttgactctgcgtgggcagc

SEQ ID NO: 4930017 - DNA, 25 bp, Homo sapien
gggcatcgttgactctgcgtgggca

SEQ ID NO: 4930018 - DNA, 25 bp, Homo sapien
ctctaacagctgctgagttgattga

SEQ ID NO: 4930019 - DNA, 25 bp, Homo sapien
aatctgaacattctgcccatgtggg

SEQ ID NO: 4930020 - DNA, 25 bp, Homo sapien
gctgctgagttgattgacttaataa

SEQ ID NO: 4930021 - DNA, 25 bp, Homo sapien
gacttaataatctgaacattctgcc

SEQ ID NO: 4930022 - DNA, 25 bp, Homo sapien
tggcctccgtacttccatatttccc

SEQ ID NO: 4930023 - DNA, 25 bp, Homo sapien
cccaggataacagcctggagaggtg

SEQ ID NO: 4930024 - DNA, 25 bp, Homo sapien
gaggtgacagctgatgaaagctcac

SEQ ID NO: 4930025 - DNA, 25 bp, Homo sapien
aggataacagcctggagaggtgaca

SEQ ID NO: 4930026 - DNA, 25 bp, Homo sapien
tctctgcatgcgctctcgccaaatt

SEQ ID NO: 4930027 - DNA, 25 bp, Homo sapien
accacaagtgcaaattctccaagga

SEQ ID NO: 4930028 - DNA, 25 bp, Homo sapien
gaacgtgcttgagcctctggactgg

SEQ ID NO: 4930029 - DNA, 25 bp, Homo sapien
aattcccttaagtcaaccacaagtg

SEQ ID NO: 4930030 - DNA, 25 bp, Homo sapien
gatgtgtggcccagatgagcctctg

SEQ ID NO: 4930031 - DNA, 25 bp, Homo sapien
ttagacctttgcctcccggcagtgc

SEQ ID NO: 4930032 - DNA, 25 bp, Homo sapien
cagtgcagatgtgtggcccagatga

SEQ ID NO: 4930033 - DNA, 25 bp, Homo sapien
tttgcctcccggcagtgcagatgtg

SEQ ID NO: 4930034 - DNA, 25 bp, Homo sapien
atcgaccgagcagcccagaggatcc

SEQ ID NO: 4930035 - DNA, 25 bp, Homo sapien
ggcccatcaggagcaccagatatgc

SEQ ID NO: 4930036 - DNA, 25 bp, Homo sapien
caagatctgacgtcagggtgaagga

SEQ ID NO: 4930037 - DNA, 25 bp, Homo sapien
gtcagtggcacaggcatcgaccgag

SEQ ID NO: 4930038 - DNA, 25 bp, Homo sapien
tggccaggacggtgctggcggctgc

SEQ ID NO: 4930039 - DNA, 25 bp, Homo sapien
cgtggccaggacggtgctggcggct

SEQ ID NO: 4930040 - DNA, 25 bp, Homo sapien
tgccagcgtccagggcaggaaccac

SEQ ID NO: 4930041 - DNA, 25 bp, Homo sapien
ctgctgccagcgtccagggcaggaa

SEQ ID NO: 4930042 - DNA, 25 bp, Homo sapien
ggcttttggaggtgcagacctttgt

SEQ ID NO: 4930043 - DNA, 25 bp, Homo sapien
ttttggaggtgcagacctttgtccc

SEQ ID NO: 4930044 - DNA, 25 bp, Homo sapien
gaggtgcagacctttgtcccttccc

SEQ ID NO: 4930045 - DNA, 25 bp, Homo sapien
tggaggtgcagacctttgtcccttc

SEQ ID NO: 4930046 - DNA, 25 bp, Homo sapien
tctgttggggtccatggaaaaagga

SEQ ID NO: 4930047 - DNA, 25 bp, Homo sapien
tcagaaactcacagttggcattgag

SEQ ID NO: 4930048 - DNA, 25 bp, Homo sapien
gaaactcacagttggcattgaggga

SEQ ID NO: 4930049 - DNA, 25 bp, Homo sapien
aaactcacagttggcattgagggac

SEQ ID NO: 4930050 - DNA, 25 bp, Homo sapien
ggttgcccccctgaatcccatctgt

SEQ ID NO: 4930051 - DNA, 25 bp, Homo sapien
tgtgccctttgctctatctcgaaag

SEQ ID NO: 4930052 - DNA, 25 bp, Homo sapien
tttgctctatctcgaaagagacctg

SEQ ID NO: 4930053 - DNA, 25 bp, Homo sapien
gctctatctcgaaagagacctgggc

SEQ ID NO: 4930054 - DNA, 25 bp, Homo sapien
actcctattgcgtacctcgggcggt

SEQ ID NO: 4930055 - DNA, 25 bp, Homo sapien
ccaagctgctgagcgcacatcttac

SEQ ID NO: 4930056 - DNA, 25 bp, Homo sapien
tggcgggcactcacatggccacttg

SEQ ID NO: 4930057 - DNA, 25 bp, Homo sapien
gctgtagtcacagtagaggccccgg

SEQ ID NO: 4930058 - DNA, 25 bp, Homo sapien
gttctagtgtaagaagtccaggcca

SEQ ID NO: 4930059 - DNA, 25 bp, Homo sapien
tcaaggcaggacctaagatgcagag

SEQ ID NO: 4930060 - DNA, 25 bp, Homo sapien
taaaacttcatgaccagggaaccac

SEQ ID NO: 4930061 - DNA, 25 bp, Homo sapien
ctataaatgagtggtgcctggcaga

SEQ ID NO: 4930062 - DNA, 25 bp, Homo sapien
gacccagcttcatttaaacgtagag

SEQ ID NO: 4930063 - DNA, 25 bp, Homo sapien
gggcttgcacacaccagattgccat

SEQ ID NO: 4930064 - DNA, 25 bp, Homo sapien
cagatgtatttagtttggcccacag

SEQ ID NO: 4930065 - DNA, 25 bp, Homo sapien
catggtcacgtagctagcaagtggc

SEQ ID NO: 4930066 - DNA, 25 bp, Homo sapien
aaggactggccgttgttgtagcgca

SEQ ID NO: 4930067 - DNA, 25 bp, Homo sapien
tcttgcgtggcctcttggcgtcgtc

SEQ ID NO: 4930068 - DNA, 25 bp, Homo sapien
tacttgcagttaggctggaaggact

SEQ ID NO: 4930069 - DNA, 25 bp, Homo sapien
agtggccaggtatgctcacgcgccg

SEQ ID NO: 4930070 - DNA, 25 bp, Homo sapien
cacagaaattggctgtacctcccca

SEQ ID NO: 4930071 - DNA, 25 bp, Homo sapien
ctcactttcaccacactaaggtctg

SEQ ID NO: 4930072 - DNA, 25 bp, Homo sapien
ccccacaggacagcaagttggcttc

SEQ ID NO: 4930073 - DNA, 25 bp, Homo sapien
tggcttctaaccagcaaaggtaccc

SEQ ID NO: 4930074 - DNA, 25 bp, Homo sapien
tccaggggcttgtgtaggctatgca

SEQ ID NO: 4930075 - DNA, 25 bp, Homo sapien
ctccaggggcttgtgtaggctatgc

SEQ ID NO: 4930076 - DNA, 25 bp, Homo sapien
cttgtgtaggctatgcagttcctgt

SEQ ID NO: 4930077 - DNA, 25 bp, Homo sapien
gggcttgtgtaggctatgcagttcc

SEQ ID NO: 4930078 - DNA, 25 bp, Homo sapien
cttaatgagtgtatggatgtccaca

SEQ ID NO: 4930079 - DNA, 25 bp, Homo sapien
gtccacatcgcatggccgcaagttg

SEQ ID NO: 4930080 - DNA, 25 bp, Homo sapien
cagcactgggcgttaacattggaga

SEQ ID NO: 4930081 - DNA, 25 bp, Homo sapien
cgcaagttgcagaggcggctctctt

SEQ ID NO: 4930082 - DNA, 25 bp, Homo sapien
tcattgggattcctacagctcaggt

SEQ ID NO: 4930083 - DNA, 25 bp, Homo sapien
cacagtacttgggttgataggagcg

SEQ ID NO: 4930084 - DNA, 25 bp, Homo sapien
tgcagcccgcaagtgtgaagttcat

SEQ ID NO: 4930085 - DNA, 25 bp, Homo sapien
cattaatccataggacctggcggga

SEQ ID NO: 4930086 - DNA, 25 bp, Homo sapien
catttggtcagcagaacgaaaggct

SEQ ID NO: 4930087 - DNA, 25 bp, Homo sapien
gatttaggcaagatccagcaggact

SEQ ID NO: 4930088 - DNA, 25 bp, Homo sapien
tccagatcagggtaactaaggctca

SEQ ID NO: 4930089 - DNA, 25 bp, Homo sapien
gcttcacaggcattgggttagtccc

SEQ ID NO: 4930090 - DNA, 25 bp, Homo sapien
gtttaggaatctctctgcacactgc

SEQ ID NO: 4930091 - DNA, 25 bp, Homo sapien
cactgtataccttgcactggactag

SEQ ID NO: 4930092 - DNA, 25 bp, Homo sapien
gtcacagtaaggaggatgtattccc

SEQ ID NO: 4930093 - DNA, 25 bp, Homo sapien
caatatgcagcattgggtaaacaga

SEQ ID NO: 4930094 - DNA, 25 bp, Homo sapien
tttctcaaaaccaatggcgactggg

SEQ ID NO: 4930095 - DNA, 25 bp, Homo sapien
taaaagtaggaacacatgcacagct

SEQ ID NO: 4930096 - DNA, 25 bp, Homo sapien
tcaggccacaccattgcagggaaat

SEQ ID NO: 4930097 - DNA, 25 bp, Homo sapien
ccctccgggctctgcataagatagt

SEQ ID NO: 4930098 - DNA, 25 bp, Homo sapien
tatagttaacaagggaccacagagg

SEQ ID NO: 4930099 - DNA, 25 bp, Homo sapien
tgagatatggcaggaaagcaccttc

SEQ ID NO: 4930100 - DNA, 25 bp, Homo sapien
cacacacagtacaaggctagcgaga

SEQ ID NO: 4930101 - DNA, 25 bp, Homo sapien
taggcgtagcacaagaagagatggc

SEQ ID NO: 4930102 - DNA, 25 bp, Homo sapien
tccatcattgtctcataacaactgc

SEQ ID NO: 4930103 - DNA, 25 bp, Homo sapien
cattgtctcataacaactgcctgta

SEQ ID NO: 4930104 - DNA, 25 bp, Homo sapien
tgctcaatgctccatcattgtctca

SEQ ID NO: 4930105 - DNA, 25 bp, Homo sapien
ctcataacaactgcctgtacaagaa

SEQ ID NO: 4930106 - DNA, 25 bp, Homo sapien
acagctgggctggaacgtgaactca

SEQ ID NO: 4930107 - DNA, 25 bp, Homo sapien
tccctggccttgagtagaaaagtcg

SEQ ID NO: 4930108 - DNA, 25 bp, Homo sapien
cagtagctgaacctgtctgacccgg

SEQ ID NO: 4930109 - DNA, 25 bp, Homo sapien
tacggatgggaaactattgtgcaca

SEQ ID NO: 4930110 - DNA, 25 bp, Homo sapien
tcaaacgggtgcctggtcagaaggc

SEQ ID NO: 4930111 - DNA, 25 bp, Homo sapien
aatgaggtctattacgtgggtgccc

SEQ ID NO: 4930112 - DNA, 25 bp, Homo sapien
cctgagcatcctggttcaaacgggt

SEQ ID NO: 4930113 - DNA, 25 bp, Homo sapien
aaaacaagacgcgtagcagcacaca

SEQ ID NO: 4930114 - DNA, 25 bp, Homo sapien
tgctgcctaaatgatcctggactgt

SEQ ID NO: 4930115 - DNA, 25 bp, Homo sapien
tagtagccagttgacctccttgctg

SEQ ID NO: 4930116 - DNA, 25 bp, Homo sapien
ccggccatggtgtctgagggtaccc

SEQ ID NO: 4930117 - DNA, 25 bp, Homo sapien
gaaatcccagcgtgattcctgacta

SEQ ID NO: 4930118 - DNA, 25 bp, Homo sapien
tttgcccaattttgggtggctgcca

SEQ ID NO: 4930119 - DNA, 25 bp, Homo sapien
tgccagggaccgatggtttgaaggg

SEQ ID NO: 4930120 - DNA, 25 bp, Homo sapien
cattccagttgaaataggacagagt

SEQ ID NO: 4930121 - DNA, 25 bp, Homo sapien
tctttcaagctgaggtgatcgcagc

SEQ ID NO: 4930122 - DNA, 25 bp, Homo sapien
tttgtatcctcaccgagcaattgtg

SEQ ID NO: 4930123 - DNA, 25 bp, Homo sapien
gacccgtattctccacagttgtgtg

SEQ ID NO: 4930124 - DNA, 25 bp, Homo sapien
actgagtactctgctatgacactgc

SEQ ID NO: 4930125 - DNA, 25 bp, Homo sapien
ggcactcctgggtcataactgattc

SEQ ID NO: 4930126 - DNA, 25 bp, Homo sapien
gctgagctggtcttagggatgtaca

SEQ ID NO: 4930127 - DNA, 25 bp, Homo sapien
gggatgtacaatcccattcggtggg

SEQ ID NO: 4930128 - DNA, 25 bp, Homo sapien
atgtgacccacagggcctccgtgtg

SEQ ID NO: 4930129 - DNA, 25 bp, Homo sapien
ccttttcttggaagcggaccagctc

SEQ ID NO: 4930130 - DNA, 25 bp, Homo sapien
ggcaattgtgtttgcagatttgatg

SEQ ID NO: 4930131 - DNA, 25 bp, Homo sapien
tggctagaattctagagtccaagac

SEQ ID NO: 4930132 - DNA, 25 bp, Homo sapien
ctagaattctagagtccaagacttc

SEQ ID NO: 4930133 - DNA, 25 bp, Homo sapien
tgtttgcagatttgatgagtaggga

SEQ ID NO: 4930134 - DNA, 25 bp, Homo sapien
ccaaaatcttgggtgtagggttgct

SEQ ID NO: 4930135 - DNA, 25 bp, Homo sapien
tgcagtgtgacgacggaagctctct

SEQ ID NO: 4930136 - DNA, 25 bp, Homo sapien
ttccttcagaagatgcagtgcagtg

SEQ ID NO: 4930137 - DNA, 25 bp, Homo sapien
gggttgctgtagaatttccttcaga

SEQ ID NO: 4930138 - DNA, 25 bp, Homo sapien
ctgcacctgccctgtgttagagcac

SEQ ID NO: 4930139 - DNA, 25 bp, Homo sapien
gctcttggaggcatgcttaatagat

SEQ ID NO: 4930140 - DNA, 25 bp, Homo sapien
gcttcagtctggttttgcagcccac

SEQ ID NO: 4930141 - DNA, 25 bp, Homo sapien
gtcagtggcagcattccaagtcttc

SEQ ID NO: 4930142 - DNA, 25 bp, Homo sapien
cagaggcttgcattctctcgaccat

SEQ ID NO: 4930143 - DNA, 25 bp, Homo sapien
tctgtaagacttgaccttattctgc

SEQ ID NO: 4930144 - DNA, 25 bp, Homo sapien
gaaagtctggatctgtgaactgggt

SEQ ID NO: 4930145 - DNA, 25 bp, Homo sapien
ggtcaggcgttttccattcagaaag

SEQ ID NO: 4930146 - DNA, 25 bp, Homo sapien
gacagatctcaactgagctgagggc

SEQ ID NO: 4930147 - DNA, 25 bp, Homo sapien
ccctgggttacgttgaaatccgctg

SEQ ID NO: 4930148 - DNA, 25 bp, Homo sapien
tgttcttgagagattagcaaagcca

SEQ ID NO: 4930149 - DNA, 25 bp, Homo sapien
ctggcctgaacttgcctcctcatgg

SEQ ID NO: 4930150 - DNA, 25 bp, Homo sapien
ggcaggcaacaggatcaatgaaagc

SEQ ID NO: 4930151 - DNA, 25 bp, Homo sapien
cacaccacggatggcgtggtgaact

SEQ ID NO: 4930152 - DNA, 25 bp, Homo sapien
tgaaagccctaataaggcagaacct

SEQ ID NO: 4930153 - DNA, 25 bp, Homo sapien
ggaatatccctattgccacaccacg

SEQ ID NO: 4930154 - DNA, 25 bp, Homo sapien
aatgagtgaagtcaccataggtgaa

SEQ ID NO: 4930155 - DNA, 25 bp, Homo sapien
tgagtgaagtcaccataggtgaagg

SEQ ID NO: 4930156 - DNA, 25 bp, Homo sapien
agtgaatgagtgaagtcaccatagg

SEQ ID NO: 4930157 - DNA, 25 bp, Homo sapien
tgaatgagtgaagtcaccataggtg

SEQ ID NO: 4930158 - DNA, 25 bp, Homo sapien
ctcagcttcgtccagctggctgctt

SEQ ID NO: 4930159 - DNA, 25 bp, Homo sapien
ttgggcagctgtagccacgttttct

SEQ ID NO: 4930160 - DNA, 25 bp, Homo sapien
tcctcagcttcgtccagctggctgc

SEQ ID NO: 4930161 - DNA, 25 bp, Homo sapien
ccatggtcacagccactggttgcat

SEQ ID NO: 4930162 - DNA, 25 bp, Homo sapien
catgcataattgtaggcctcctcct

SEQ ID NO: 4930163 - DNA, 25 bp, Homo sapien
ccctacagatgtgtttcgaggaaca

SEQ ID NO: 4930164 - DNA, 25 bp, Homo sapien
cttcacctgttgtgcagagggtaaa

SEQ ID NO: 4930165 - DNA, 25 bp, Homo sapien
ggtctccaaaggagggccctacaga

SEQ ID NO: 4930166 - DNA, 25 bp, Homo sapien
tcttggacttcacaaggggtctaag

SEQ ID NO: 4930167 - DNA, 25 bp, Homo sapien
tctttttgacgatcttggacttcac

SEQ ID NO: 4930168 - DNA, 25 bp, Homo sapien
tggacttcacaaggggtctaagggc

SEQ ID NO: 4930169 - DNA, 25 bp, Homo sapien
gatcttggacttcacaaggggtcta

SEQ ID NO: 4930170 - DNA, 25 bp, Homo sapien
cccatcagttacacttaattctgac

SEQ ID NO: 4930171 - DNA, 25 bp, Homo sapien
ggttcccatcagttacacttaattc

SEQ ID NO: 4930172 - DNA, 25 bp, Homo sapien
ttcccatcagttacacttaattctg

SEQ ID NO: 4930173 - DNA, 25 bp, Homo sapien
gttcccatcagttacacttaattct

SEQ ID NO: 4930174 - DNA, 25 bp, Homo sapien
cttctgtgaaccctgctgtcaatac

SEQ ID NO: 4930175 - DNA, 25 bp, Homo sapien
tctgtgaaccctgctgtcaatacct

SEQ ID NO: 4930176 - DNA, 25 bp, Homo sapien
ttctgtgaaccctgctgtcaatacc

SEQ ID NO: 4930177 - DNA, 25 bp, Homo sapien
gtaagatttattgcacatcagcagc

SEQ ID NO: 4930178 - DNA, 25 bp, Homo sapien
gggcatcaagatctggcctttgaac

SEQ ID NO: 4930179 - DNA, 25 bp, Homo sapien
tgtgctttgttttttggttgctccc

SEQ ID NO: 4930180 - DNA, 25 bp, Homo sapien
tccagctccttgacattgtggacca

SEQ ID NO: 4930181 - DNA, 25 bp, Homo sapien
ctttgccacactgcctggcattagg

SEQ ID NO: 4930182 - DNA, 25 bp, Homo sapien
ctagctgggcggctctttccatgtt

SEQ ID NO: 4930183 - DNA, 25 bp, Homo sapien
ggaggcaacattgtgagcgatgtca

SEQ ID NO: 4930184 - DNA, 25 bp, Homo sapien
gccacactgcctggcattagggttg

SEQ ID NO: 4930185 - DNA, 25 bp, Homo sapien
tgcatcacgcacagaatgtactgta

SEQ ID NO: 4930186 - DNA, 25 bp, Homo sapien
tcacgcacagaatgtactgtatgaa

SEQ ID NO: 4930187 - DNA, 25 bp, Homo sapien
gtatgaatctttcttggatctcacc

SEQ ID NO: 4930188 - DNA, 25 bp, Homo sapien
agtgcatcacgcacagaatgtactg

SEQ ID NO: 4930189 - DNA, 25 bp, Homo sapien
gcacacaccactgtgggcatttagc

SEQ ID NO: 4930190 - DNA, 25 bp, Homo sapien
tggctctgcaaagcacacaccactg

SEQ ID NO: 4930191 - DNA, 25 bp, Homo sapien
caccactgtgggcatttagcgtcat

SEQ ID NO: 4930192 - DNA, 25 bp, Homo sapien
acacaccactgtgggcatttagcgt

SEQ ID NO: 4930193 - DNA, 25 bp, Homo sapien
ctcctctcaggcccaaggttgacca

SEQ ID NO: 4930194 - DNA, 25 bp, Homo sapien
ctctcaggcccaaggttgaccaggg

SEQ ID NO: 4930195 - DNA, 25 bp, Homo sapien
ctcaggcccaaggttgaccagggct

SEQ ID NO: 4930196 - DNA, 25 bp, Homo sapien
tcctctcaggcccaaggttgaccag

SEQ ID NO: 4930197 - DNA, 25 bp, Homo sapien
ggcgtcaggcggaagtggttctgaa

SEQ ID NO: 4930198 - DNA, 25 bp, Homo sapien
tcacggtaacaagagtgggacagaa

SEQ ID NO: 4930199 - DNA, 25 bp, Homo sapien
gggtggtgtcgatgacagccataac

SEQ ID NO: 4930200 - DNA, 25 bp, Homo sapien
tccagtctgttctgggcggccatga

SEQ ID NO: 4930201 - DNA, 25 bp, Homo sapien
gatgcccagagggtcatcagcctgt

SEQ ID NO: 4930202 - DNA, 25 bp, Homo sapien
tgaaggcaactttcacctccagagc

SEQ ID NO: 4930203 - DNA, 25 bp, Homo sapien
atgcttccaggctaccgcgtggtcg

SEQ ID NO: 4930204 - DNA, 25 bp, Homo sapien
gatgggttctagcttggcgtttgcc

SEQ ID NO: 4930205 - DNA, 25 bp, Homo sapien
tcgtcatctggggtaatacccaagg

SEQ ID NO: 4930206 - DNA, 25 bp, Homo sapien
tcatctttcacaaccagtgggggtg

SEQ ID NO: 4930207 - DNA, 25 bp, Homo sapien
gggtgaagaatcgtcgtcatctggg

SEQ ID NO: 4930208 - DNA, 25 bp, Homo sapien
ctgatcacaaagtggctgccagctg

SEQ ID NO: 4930209 - DNA, 25 bp, Homo sapien
tgtgttggtggcatgcatggttttc

SEQ ID NO: 4930210 - DNA, 25 bp, Homo sapien
ggtggcatgcatggttttctgaccc

SEQ ID NO: 4930211 - DNA, 25 bp, Homo sapien
ccctggcagtctctagggcatatgg

SEQ ID NO: 4930212 - DNA, 25 bp, Homo sapien
catatggtagctaacttgagcatgt

SEQ ID NO: 4930213 - DNA, 25 bp, Homo sapien
tatatactagcaccactgactgccc

SEQ ID NO: 4930214 - DNA, 25 bp, Homo sapien
gaccagtgtgcatgtagctgactct

SEQ ID NO: 4930215 - DNA, 25 bp, Homo sapien
gggactaatgcttcctacccttgga

SEQ ID NO: 4930216 - DNA, 25 bp, Homo sapien
gaaggatcacattcagaccagtgtg

SEQ ID NO: 4930217 - DNA, 25 bp, Homo sapien
gaaccactgccaaagtaacccatgg

SEQ ID NO: 4930218 - DNA, 25 bp, Homo sapien
gagtctccttgcaaactgtgggaac

SEQ ID NO: 4930219 - DNA, 25 bp, Homo sapien
taaggctagagtttaaggcccaaca

SEQ ID NO: 4930220 - DNA, 25 bp, Homo sapien
tcagctggcccatatggcatgagaa

SEQ ID NO: 4930221 - DNA, 25 bp, Homo sapien
aatgggcgccttcaaggaggtggga

SEQ ID NO: 4930222 - DNA, 25 bp, Homo sapien
cctctaggaagccacgtccaaaagc

SEQ ID NO: 4930223 - DNA, 25 bp, Homo sapien
gggagataacatcccctctaggaag

SEQ ID NO: 4930224 - DNA, 25 bp, Homo sapien
ggcaaccccagaaatgggcgccttc

SEQ ID NO: 4930225 - DNA, 25 bp, Homo sapien
gctcgttcactttgcaggggtccat

SEQ ID NO: 4930226 - DNA, 25 bp, Homo sapien
agcgcatttcctcggtgtgcagaat

SEQ ID NO: 4930227 - DNA, 25 bp, Homo sapien
ggcccgaagctcgttcactttgcag

SEQ ID NO: 4930228 - DNA, 25 bp, Homo sapien
cggtgtgcagaatgctcggatcctg

SEQ ID NO: 4930229 - DNA, 25 bp, Homo sapien
aggtggtactttacctcccatgctc

SEQ ID NO: 4930230 - DNA, 25 bp, Homo sapien
ggtactttacctcccatgctctcca

SEQ ID NO: 4930231 - DNA, 25 bp, Homo sapien
gagtagcaggtggtactttacctcc

SEQ ID NO: 4930232 - DNA, 25 bp, Homo sapien
cctcacttgatggttcgtctgcctt

SEQ ID NO: 4930233 - DNA, 25 bp, Homo sapien
tggcgtctgtcaataactcaatggc

SEQ ID NO: 4930234 - DNA, 25 bp, Homo sapien
tgatggcgtctgtcaataactcaat

SEQ ID NO: 4930235 - DNA, 25 bp, Homo sapien
gtctgtcaataactcaatggctttc

SEQ ID NO: 4930236 - DNA, 25 bp, Homo sapien
gcgtctgtcaataactcaatggctt

SEQ ID NO: 4930237 - DNA, 25 bp, Homo sapien
tgtcacagtcttgggtggcagcatt

SEQ ID NO: 4930238 - DNA, 25 bp, Homo sapien
ctcgctcttcatgttttcgctcata

SEQ ID NO: 4930239 - DNA, 25 bp, Homo sapien
ccgccacttgtgaggctgagctgaa

SEQ ID NO: 4930240 - DNA, 25 bp, Homo sapien
aagatcatggtctgcttctccccag

SEQ ID NO: 4930241 - DNA, 25 bp, Homo sapien
gccacctggaaaagagccatactga

SEQ ID NO: 4930242 - DNA, 25 bp, Homo sapien
cacctggaaaagagccatactgagc

SEQ ID NO: 4930243 - DNA, 25 bp, Homo sapien
ctggaaaagagccatactgagctcc

SEQ ID NO: 4930244 - DNA, 25 bp, Homo sapien
aagccacctggaaaagagccatact

SEQ ID NO: 4930245 - DNA, 25 bp, Homo sapien
attccagccattccagacatgcccc

SEQ ID NO: 4930246 - DNA, 25 bp, Homo sapien
tttcattgaatccaggcattccagc

SEQ ID NO: 4930247 - DNA, 25 bp, Homo sapien
tccagccattccagacatgccccct

SEQ ID NO: 4930248 - DNA, 25 bp, Homo sapien
aggcattccagccattccagacatg

SEQ ID NO: 4930249 - DNA, 25 bp, Homo sapien
atttatcagaagggcattacacttg

SEQ ID NO: 4930250 - DNA, 25 bp, Homo sapien
gggcattacacttgacctccaaatt

SEQ ID NO: 4930251 - DNA, 25 bp, Homo sapien
tcagcaagggctttatttatcagaa

SEQ ID NO: 4930252 - DNA, 25 bp, Homo sapien
atcagaagggcattacacttgacct

SEQ ID NO: 4930253 - DNA, 25 bp, Homo sapien
cagttttaacctaacaggcttctct

SEQ ID NO: 4930254 - DNA, 25 bp, Homo sapien
atggaaagaaggccccatagtccat

SEQ ID NO: 4930255 - DNA, 25 bp, Homo sapien
gcccagcctttgatgcttggccacc

SEQ ID NO: 4930256 - DNA, 25 bp, Homo sapien
gattcctgatgagcgacgcctagca

SEQ ID NO: 4930257 - DNA, 25 bp, Homo sapien
aggcagtagttttggcccctccatg

SEQ ID NO: 4930258 - DNA, 25 bp, Homo sapien
atgagcgacgcctagcaaacaagcc

SEQ ID NO: 4930259 - DNA, 25 bp, Homo sapien
ccgctgaactttccgaagtaagatg

SEQ ID NO: 4930260 - DNA, 25 bp, Homo sapien
ctttccgaagtaagatggaaaatgc

SEQ ID NO: 4930261 - DNA, 25 bp, Homo sapien
gctgaactttccgaagtaagatgga

SEQ ID NO: 4930262 - DNA, 25 bp, Homo sapien
tccgaagtaagatggaaaatgcaga

SEQ ID NO: 4930263 - DNA, 25 bp, Homo sapien
cctgtgctcgatgggtgggaattct

SEQ ID NO: 4930264 - DNA, 25 bp, Homo sapien
caagcatctccattgctgggcctca

SEQ ID NO: 4930265 - DNA, 25 bp, Homo sapien
ctgggcctcagcgccagaggttggg

SEQ ID NO: 4930266 - DNA, 25 bp, Homo sapien
caggttgagtcgcagggcagctgtc

SEQ ID NO: 4930267 - DNA, 25 bp, Homo sapien
cactcatcactctttgtccagaaca

SEQ ID NO: 4930268 - DNA, 25 bp, Homo sapien
tgtccactcatcactctttgtccag

SEQ ID NO: 4930269 - DNA, 25 bp, Homo sapien
cactctttgtccagaacatccgcat

SEQ ID NO: 4930270 - DNA, 25 bp, Homo sapien
caggtcttgtccactcatcactctt

SEQ ID NO: 4930271 - DNA, 25 bp, Homo sapien
catgtcgttacgcagctgagcactg

SEQ ID NO: 4930272 - DNA, 25 bp, Homo sapien
catcggttgtacgtcctgagctgtg

SEQ ID NO: 4930273 - DNA, 25 bp, Homo sapien
cactggttgggatgcattcgaatga

SEQ ID NO: 4930274 - DNA, 25 bp, Homo sapien
ttcctagtacaaaactgccatcggt

SEQ ID NO: 4930275 - DNA, 25 bp, Homo sapien
cctgcacccctggggtgctacctga

SEQ ID NO: 4930276 - DNA, 25 bp, Homo sapien
ctgcacccctggggtgctacctgac

SEQ ID NO: 4930277 - DNA, 25 bp, Homo sapien
tgcacccctggggtgctacctgaca

SEQ ID NO: 4930278 - DNA, 25 bp, Homo sapien
acttgagtggcgattacctccagca

SEQ ID NO: 4930279 - DNA, 25 bp, Homo sapien
tgccagcgtggcagagcatgtcttg

SEQ ID NO: 4930280 - DNA, 25 bp, Homo sapien
tcttgcttggcgtgataaccctgtc

SEQ ID NO: 4930281 - DNA, 25 bp, Homo sapien
ttgcacccagccgttggcagcatct

SEQ ID NO: 4930282 - DNA, 25 bp, Homo sapien
atgcatcacgagctctttgacaaat

SEQ ID NO: 4930283 - DNA, 25 bp, Homo sapien
ccttgcaaagagatgataacatcca

SEQ ID NO: 4930284 - DNA, 25 bp, Homo sapien
tcacgagctctttgacaaatgtttg

SEQ ID NO: 4930285 - DNA, 25 bp, Homo sapien
aacatggaggggacaccttctgcat

SEQ ID NO: 4930286 - DNA, 25 bp, Homo sapien
tgtgcttgttgctgaaatccaaaat

SEQ ID NO: 4930287 - DNA, 25 bp, Homo sapien
tgttgtgcttgttgctgaaatccaa

SEQ ID NO: 4930288 - DNA, 25 bp, Homo sapien
gttgttgtgcttgttgctgaaatcc

SEQ ID NO: 4930289 - DNA, 25 bp, Homo sapien
gttgtgcttgttgctgaaatccaaa

SEQ ID NO: 4930290 - DNA, 25 bp, Homo sapien
cagttgtaccatacagaaatcccaa

SEQ ID NO: 4930291 - DNA, 25 bp, Homo sapien
tccgatgggcatttgagaggtacct

SEQ ID NO: 4930292 - DNA, 25 bp, Homo sapien
gcaaagaccaaaaagaccacgctcc

SEQ ID NO: 4930293 - DNA, 25 bp, Homo sapien
aatcccaaggtgtcggtgagagcca

SEQ ID NO: 4930294 - DNA, 25 bp, Homo sapien
ttggtctgtggcgtcttggcccaga

SEQ ID NO: 4930295 - DNA, 25 bp, Homo sapien
cttggcccagatgtcatttccggga

SEQ ID NO: 4930296 - DNA, 25 bp, Homo sapien
gcccagatgtcatttccgggagcca

SEQ ID NO: 4930297 - DNA, 25 bp, Homo sapien
cacttgacatgcagagatctttggt

SEQ ID NO: 4930298 - DNA, 25 bp, Homo sapien
ctggtgaccccgctaagctctgttg

SEQ ID NO: 4930299 - DNA, 25 bp, Homo sapien
cccgctaagctctgttgtgtgcagg

SEQ ID NO: 4930300 - DNA, 25 bp, Homo sapien
ttttcagtccccaaaagtgtgctga

SEQ ID NO: 4930301 - DNA, 25 bp, Homo sapien
gctgacatttgtcagtcttgtgctg

SEQ ID NO: 4930302 - DNA, 25 bp, Homo sapien
catagtacaggggagacagaaattg

SEQ ID NO: 4930303 - DNA, 25 bp, Homo sapien
tcatagtacaggggagacagaaatt

SEQ ID NO: 4930304 - DNA, 25 bp, Homo sapien
atagtacaggggagacagaaattgg

SEQ ID NO: 4930305 - DNA, 25 bp, Homo sapien
cagagcaattttgaggaaccttttc

SEQ ID NO: 4930306 - DNA, 25 bp, Homo sapien
gagcggcgttgagtgggtccaggcc

SEQ ID NO: 4930307 - DNA, 25 bp, Homo sapien
gcggcgttgagtgggtccaggcctg

SEQ ID NO: 4930308 - DNA, 25 bp, Homo sapien
tggctcccctcacggctgatccttc

SEQ ID NO: 4930309 - DNA, 25 bp, Homo sapien
aacgggtctggctcccctcacggct

SEQ ID NO: 4930310 - DNA, 25 bp, Homo sapien
gactggcctcggcttctgaagtggc

SEQ ID NO: 4930311 - DNA, 25 bp, Homo sapien
ccaagtcacgctgtgctccgtggct

SEQ ID NO: 4930312 - DNA, 25 bp, Homo sapien
tctgaagtggcccaagtcacgctgt

SEQ ID NO: 4930313 - DNA, 25 bp, Homo sapien
agctgactggcctcggcttctgaag

SEQ ID NO: 4930314 - DNA, 25 bp, Homo sapien
gagccactatttgtgcttcagcaga

SEQ ID NO: 4930315 - DNA, 25 bp, Homo sapien
catcgaagggttctcccaacctgct

SEQ ID NO: 4930316 - DNA, 25 bp, Homo sapien
gaacaagcaggaggcactaaggtgc

SEQ ID NO: 4930317 - DNA, 25 bp, Homo sapien
gaagatttgcaagcacatcgaaggg

SEQ ID NO: 4930318 - DNA, 25 bp, Homo sapien
ctcgtatcgtccatcccgagcctca

SEQ ID NO: 4930319 - DNA, 25 bp, Homo sapien
tgagcatgccctgaccccgtggtgc

SEQ ID NO: 4930320 - DNA, 25 bp, Homo sapien
ggcctctgctggtccaagctgccca

SEQ ID NO: 4930321 - DNA, 25 bp, Homo sapien
agctgcccagtgtcccctcgtatcg

SEQ ID NO: 4930322 - DNA, 25 bp, Homo sapien
aattgaatctgaagaccctgtgctt

SEQ ID NO: 4930323 - DNA, 25 bp, Homo sapien
caggcatattgtggggtcttgtaaa

SEQ ID NO: 4930324 - DNA, 25 bp, Homo sapien
ctgcaaaatagggagaacattgctt

SEQ ID NO: 4930325 - DNA, 25 bp, Homo sapien
aatagggagaacattgcttcccagg

SEQ ID NO: 4930326 - DNA, 25 bp, Homo sapien
aatcctgaggcagttgacagaaggc

SEQ ID NO: 4930327 - DNA, 25 bp, Homo sapien
caggatgcacctcattaagacaagg

SEQ ID NO: 4930328 - DNA, 25 bp, Homo sapien
gacaaggcttgttctgcccacgaca

SEQ ID NO: 4930329 - DNA, 25 bp, Homo sapien
tctgtggctattcctacgtattggg

SEQ ID NO: 4930330 - DNA, 25 bp, Homo sapien
catgctgctcaggtttcctgctcgt

SEQ ID NO: 4930331 - DNA, 25 bp, Homo sapien
gctgctcaggtttcctgctcgtcct

SEQ ID NO: 4930332 - DNA, 25 bp, Homo sapien
tttcctgctcgtcctttgggctggc

SEQ ID NO: 4930333 - DNA, 25 bp, Homo sapien
tcaggtttcctgctcgtcctttggg

SEQ ID NO: 4930334 - DNA, 25 bp, Homo sapien
gctgacaaattagcctgctgacaga

SEQ ID NO: 4930335 - DNA, 25 bp, Homo sapien
tctgcttgcctctaagtcttatggg

SEQ ID NO: 4930336 - DNA, 25 bp, Homo sapien
cctggatcagagacaagggacttca

SEQ ID NO: 4930337 - DNA, 25 bp, Homo sapien
tgtaaagaactgtgacaagcctgag

SEQ ID NO: 4930338 - DNA, 25 bp, Homo sapien
aaagagccaaagattggccgccgca

SEQ ID NO: 4930339 - DNA, 25 bp, Homo sapien
actgggtccaggcaacatgacgctg

SEQ ID NO: 4930340 - DNA, 25 bp, Homo sapien
tgttctcagcttatggtggccacca

SEQ ID NO: 4930341 - DNA, 25 bp, Homo sapien
tgcgtgaatcatacagtgtgaggac

SEQ ID NO: 4930342 - DNA, 25 bp, Homo sapien
ttcaatcagtcaggtcagggatcag

SEQ ID NO: 4930343 - DNA, 25 bp, Homo sapien
gacgtcacactgtagcttagggcaa

SEQ ID NO: 4930344 - DNA, 25 bp, Homo sapien
taatgagctctcgatgggaatgggc

SEQ ID NO: 4930345 - DNA, 25 bp, Homo sapien
aacgtcaggctatttctaccccagg

SEQ ID NO: 4930346 - DNA, 25 bp, Homo sapien
agctgatgccccgtcttgtgacacg

SEQ ID NO: 4930347 - DNA, 25 bp, Homo sapien
ccttgctaactcatgggaaggacca

SEQ ID NO: 4930348 - DNA, 25 bp, Homo sapien
cacgttttcatctggtcacattgga

SEQ ID NO: 4930349 - DNA, 25 bp, Homo sapien
tcacattggactgcgaatgcaaagc

SEQ ID NO: 4930350 - DNA, 25 bp, Homo sapien
cttgtacatttgctcggtagcagca

SEQ ID NO: 4930351 - DNA, 25 bp, Homo sapien
ctctctggcccgctttctgtctggc

SEQ ID NO: 4930352 - DNA, 25 bp, Homo sapien
ttcttcatcagaactgccgcatcct

SEQ ID NO: 4930353 - DNA, 25 bp, Homo sapien
accttcgacctataagctcccaagg

SEQ ID NO: 4930354 - DNA, 25 bp, Homo sapien
tctatcatatggtaacataaatgac

SEQ ID NO: 4930355 - DNA, 25 bp, Homo sapien
taaagaatctatcatatggtaacat

SEQ ID NO: 4930356 - DNA, 25 bp, Homo sapien
tcacaataaagaatctatcatatgg

SEQ ID NO: 4930357 - DNA, 25 bp, Homo sapien
gaaaaatcacaataaagaatctatc

SEQ ID NO: 4930358 - DNA, 25 bp, Homo sapien
cctttcgataagttcccaggagaga

SEQ ID NO: 4930359 - DNA, 25 bp, Homo sapien
aacaccaccgtgttgcctttagcat

SEQ ID NO: 4930360 - DNA, 25 bp, Homo sapien
gcttatttgcatattaacgtatgtc

SEQ ID NO: 4930361 - DNA, 25 bp, Homo sapien
gagagatactgaaaacgctttgaag

SEQ ID NO: 4930362 - DNA, 25 bp, Homo sapien
tggctgcagcagagacattcttccc

SEQ ID NO: 4930363 - DNA, 25 bp, Homo sapien
cttgccggcttggaagaccgtctgg

SEQ ID NO: 4930364 - DNA, 25 bp, Homo sapien
tgccggcttggaagaccgtctggct

SEQ ID NO: 4930365 - DNA, 25 bp, Homo sapien
cggcttggaagaccgtctggctgca

SEQ ID NO: 4930366 - DNA, 25 bp, Homo sapien
tctgctgggattttcgaaggcactt

SEQ ID NO: 4930367 - DNA, 25 bp, Homo sapien
ttcgaaggcactttccttgaagttc

SEQ ID NO: 4930368 - DNA, 25 bp, Homo sapien
cagggcgaaagaacttcgttcttct

SEQ ID NO: 4930369 - DNA, 25 bp, Homo sapien
tccttgtgcttgggctcagggaaca

SEQ ID NO: 4930370 - DNA, 25 bp, Homo sapien
ctgcctgccgggtgagctggccaca

SEQ ID NO: 4930371 - DNA, 25 bp, Homo sapien
gccacaaggggagttggcggtggga

SEQ ID NO: 4930372 - DNA, 25 bp, Homo sapien
tgctgcctgccgggtgagctggcca

SEQ ID NO: 4930373 - DNA, 25 bp, Homo sapien
agttggcggtgggaatcctggtgct

SEQ ID NO: 4930374 - DNA, 25 bp, Homo sapien
gaatcgggacggtggcgcaactttc

SEQ ID NO: 4930375 - DNA, 25 bp, Homo sapien
cagttagtttggaatcgggacggtg

SEQ ID NO: 4930376 - DNA, 25 bp, Homo sapien
gagcgcacggggacggacagcggtg

SEQ ID NO: 4930377 - DNA, 25 bp, Homo sapien
gaggcgctctggtgagggtacagtt

SEQ ID NO: 4930378 - DNA, 25 bp, Homo sapien
tatcaaaaaccaagggcgtcaggca

SEQ ID NO: 4930379 - DNA, 25 bp, Homo sapien
tagccgatgtaagcagaactctctg

SEQ ID NO: 4930380 - DNA, 25 bp, Homo sapien
ttgaaccaagaagtccggccatgcg

SEQ ID NO: 4930381 - DNA, 25 bp, Homo sapien
tattggcccagacgatattcccagc

SEQ ID NO: 4930382 - DNA, 25 bp, Homo sapien
taaatcaatgtcagcgctccctgga

SEQ ID NO: 4930383 - DNA, 25 bp, Homo sapien
ttgctggtgctccaaaaggtaggag

SEQ ID NO: 4930384 - DNA, 25 bp, Homo sapien
gactatgatccttgttctctggcag

SEQ ID NO: 4930385 - DNA, 25 bp, Homo sapien
ggacatacactcagggtgacaaaga

SEQ ID NO: 4930386 - DNA, 25 bp, Homo sapien
cacctccgtggtctttaatcacttt

SEQ ID NO: 4930387 - DNA, 25 bp, Homo sapien
tcaccaattttccacctccgtggtc

SEQ ID NO: 4930388 - DNA, 25 bp, Homo sapien
ttcatttccagctcaatcactgata

SEQ ID NO: 4930389 - DNA, 25 bp, Homo sapien
tttccagctcaatcactgatatggt

SEQ ID NO: 4930390 - DNA, 25 bp, Homo sapien
tcagctatgcactcctattccagtt

SEQ ID NO: 4930391 - DNA, 25 bp, Homo sapien
tcctggttttgcttgtaggcagata

SEQ ID NO: 4930392 - DNA, 25 bp, Homo sapien
cagacttcttaaggagcttgttgga

SEQ ID NO: 4930393 - DNA, 25 bp, Homo sapien
cccctctaggaattactcaatgtca

SEQ ID NO: 4930394 - DNA, 25 bp, Homo sapien
tgaggacaccttcttttacactagg

SEQ ID NO: 4930395 - DNA, 25 bp, Homo sapien
tacactaggcttgctacacccagaa

SEQ ID NO: 4930396 - DNA, 25 bp, Homo sapien
ccgtgatcttaaactgcagcaggta

SEQ ID NO: 4930397 - DNA, 25 bp, Homo sapien
gatctcttatcataattgaaggcag

SEQ ID NO: 4930398 - DNA, 25 bp, Homo sapien
tcccatccctgtgccgctgtgcacc

SEQ ID NO: 4930399 - DNA, 25 bp, Homo sapien
gcagagaggacccacggaccattct

SEQ ID NO: 4930400 - DNA, 25 bp, Homo sapien
caacaattgagggaattttcctcac

SEQ ID NO: 4930401 - DNA, 25 bp, Homo sapien
ctgtgtatttgtcaacaattgaggg

SEQ ID NO: 4930402 - DNA, 25 bp, Homo sapien
gcatacagcccataaatgtctgcaa

SEQ ID NO: 4930403 - DNA, 25 bp, Homo sapien
tactgtccatgtctagttagtagaa

SEQ ID NO: 4930404 - DNA, 25 bp, Homo sapien
tatgtgcttgtcataaatatgccac

SEQ ID NO: 4930405 - DNA, 25 bp, Homo sapien
tccacgggacagcaatgaagataaa

SEQ ID NO: 4930406 - DNA, 25 bp, Homo sapien
aagagatttgtgtccttgttctcca

SEQ ID NO: 4930407 - DNA, 25 bp, Homo sapien
tctgccaaccaatgaggagtcatta

SEQ ID NO: 4930408 - DNA, 25 bp, Homo sapien
ggagtcattaatgattccatagtcc

SEQ ID NO: 4930409 - DNA, 25 bp, Homo sapien
ccgttggcatgacattgataatgga

SEQ ID NO: 4930410 - DNA, 25 bp, Homo sapien
gagagacctggacacgaattactgc

SEQ ID NO: 4930411 - DNA, 25 bp, Homo sapien
tagaagctggcatcagagagacctg

SEQ ID NO: 4930412 - DNA, 25 bp, Homo sapien
gccaggaatccacccattatgagta

SEQ ID NO: 4930413 - DNA, 25 bp, Homo sapien
tcctgtagttcagatctaggcctcg

SEQ ID NO: 4930414 - DNA, 25 bp, Homo sapien
caaactcagcccctgatgaagtccg

SEQ ID NO: 4930415 - DNA, 25 bp, Homo sapien
aagtccgtgatgcagcaaaccagga

SEQ ID NO: 4930416 - DNA, 25 bp, Homo sapien
accaggactctaacacggggatcag

SEQ ID NO: 4930417 - DNA, 25 bp, Homo sapien
tctaacacggggatcaggtgaacct

SEQ ID NO: 4930418 - DNA, 25 bp, Homo sapien
ttcagaaatggagagctgtgcttcc

SEQ ID NO: 4930419 - DNA, 25 bp, Homo sapien
tccacggtcctgatatagaggagca

SEQ ID NO: 4930420 - DNA, 25 bp, Homo sapien
tgatacggcgtagagggcctacctg

SEQ ID NO: 4930421 - DNA, 25 bp, Homo sapien
ccctgccgcgtgaggtggctgatca

SEQ ID NO: 4930422 - DNA, 25 bp, Homo sapien
gcttggagctgggaaatgaccacca

SEQ ID NO: 4930423 - DNA, 25 bp, Homo sapien
caggcgcttgaccaggtctttaatc

SEQ ID NO: 4930424 - DNA, 25 bp, Homo sapien
cctctgaccaatctgctgagaagca

SEQ ID NO: 4930425 - DNA, 25 bp, Homo sapien
tgaccaccaggttgacacttcggca

SEQ ID NO: 4930426 - DNA, 25 bp, Homo sapien
tcaaaaggcgctgatgtgccaaagt

SEQ ID NO: 4930427 - DNA, 25 bp, Homo sapien
ggcctggagcctcgcattctctttc

SEQ ID NO: 4930428 - DNA, 25 bp, Homo sapien
tttcatatcctgctcccatgcttgc

SEQ ID NO: 4930429 - DNA, 25 bp, Homo sapien
tctcgagatccctcttgggacctgg

SEQ ID NO: 4930430 - DNA, 25 bp, Homo sapien
gggtcttgtttgaccttcatccact

SEQ ID NO: 4930431 - DNA, 25 bp, Homo sapien
cttggtctgggcgaggaaacactag

SEQ ID NO: 4930432 - DNA, 25 bp, Homo sapien
caaagctgttaattcaagtggtgac

SEQ ID NO: 4930433 - DNA, 25 bp, Homo sapien
cactaggtagaatatgcaaagctgt

SEQ ID NO: 4930434 - DNA, 25 bp, Homo sapien
catgatgcctctaagactctgcaga

SEQ ID NO: 4930435 - DNA, 25 bp, Homo sapien
gggcaaaccatctcgaaatactgtg

SEQ ID NO: 4930436 - DNA, 25 bp, Homo sapien
tatgacgacacccatgcactaaggt

SEQ ID NO: 4930437 - DNA, 25 bp, Homo sapien
caatgccactgggatgagggcgaac

SEQ ID NO: 4930438 - DNA, 25 bp, Homo sapien
tccttagagaggcagaaccgctatg

SEQ ID NO: 4930439 - DNA, 25 bp, Homo sapien
cagactggcacaattctatgagtgg

SEQ ID NO: 4930440 - DNA, 25 bp, Homo sapien
taactacggctgaaaagcgacagcc

SEQ ID NO: 4930441 - DNA, 25 bp, Homo sapien
aataagtcagctaggtaactacggc

SEQ ID NO: 4930442 - DNA, 25 bp, Homo sapien
gaagtaccaagctaatgacatctca

SEQ ID NO: 4930443 - DNA, 25 bp, Homo sapien
aacaattagccgggccaacatagcg

SEQ ID NO: 4930444 - DNA, 25 bp, Homo sapien
acaattagccgggccaacatagcga

SEQ ID NO: 4930445 - DNA, 25 bp, Homo sapien
caattagccgggccaacatagcgaa

SEQ ID NO: 4930446 - DNA, 25 bp, Homo sapien
agtggttctggtatctcttaaggct

SEQ ID NO: 4930447 - DNA, 25 bp, Homo sapien
gctgagtggttctggtatctcttaa

SEQ ID NO: 4930448 - DNA, 25 bp, Homo sapien
tgagtggttctggtatctcttaagg

SEQ ID NO: 4930449 - DNA, 25 bp, Homo sapien
gagtggttctggtatctcttaaggc

SEQ ID NO: 4930450 - DNA, 25 bp, Homo sapien
ggtccatggaggatgaaatatgcat

SEQ ID NO: 4930451 - DNA, 25 bp, Homo sapien
tgctactgtcgtcaccatgacaaaa

SEQ ID NO: 4930452 - DNA, 25 bp, Homo sapien
ttctcatgctactgtcgtcaccatg

SEQ ID NO: 4930453 - DNA, 25 bp, Homo sapien
tatgcatagagcagacctgacccca

SEQ ID NO: 4930454 - DNA, 25 bp, Homo sapien
ttccagagagctcttccttatcctg

SEQ ID NO: 4930455 - DNA, 25 bp, Homo sapien
ccagagagctcttccttatcctgca

SEQ ID NO: 4930456 - DNA, 25 bp, Homo sapien
ctttccagagagctcttccttatcc

SEQ ID NO: 4930457 - DNA, 25 bp, Homo sapien
cagagagctcttccttatcctgcat

SEQ ID NO: 4930458 - DNA, 25 bp, Homo sapien
tgcaaagtatctcggtgcctggtgt

SEQ ID NO: 4930459 - DNA, 25 bp, Homo sapien
ggagttgcaaagtatctcggtgcct

SEQ ID NO: 4930460 - DNA, 25 bp, Homo sapien
acctagcaagagtgggagtggtgga

SEQ ID NO: 4930461 - DNA, 25 bp, Homo sapien
gggtccaggacctagcaagagtggg

SEQ ID NO: 4930462 - DNA, 25 bp, Homo sapien
gaaagcgcaggtcggccgatgaaaa

SEQ ID NO: 4930463 - DNA, 25 bp, Homo sapien
tggaaagcgcaggtccgttggtgga

SEQ ID NO: 4930464 - DNA, 25 bp, Homo sapien
aacacaggtcagatggtagaaagag

SEQ ID NO: 4930465 - DNA, 25 bp, Homo sapien
agcgggttggatggtagaaagtgca

SEQ ID NO: 4930466 - DNA, 25 bp, Homo sapien
gtcacctgggacctcagtcaatgtt

SEQ ID NO: 4930467 - DNA, 25 bp, Homo sapien
tgtcacctgggacctcagtcaatgt

SEQ ID NO: 4930468 - DNA, 25 bp, Homo sapien
tcacctgggacctcagtcaatgttc

SEQ ID NO: 4930469 - DNA, 25 bp, Homo sapien
acctgggacctcagtcaatgttctc

SEQ ID NO: 4930470 - DNA, 25 bp, Homo sapien
ccgccagctgggcatagcaagccat

SEQ ID NO: 4930471 - DNA, 25 bp, Homo sapien
atccgccagctgggcatagcaagcc

SEQ ID NO: 4930472 - DNA, 25 bp, Homo sapien
tccgccagctgggcatagcaagcca

SEQ ID NO: 4930473 - DNA, 25 bp, Homo sapien
taggtggtttcaatgaggcctcttc

SEQ ID NO: 4930474 - DNA, 25 bp, Homo sapien
tcctgcggtaaagatcctggatgcg

SEQ ID NO: 4930475 - DNA, 25 bp, Homo sapien
tcctggatgcgataggtggtttcaa

SEQ ID NO: 4930476 - DNA, 25 bp, Homo sapien
ggctcagaggtcctgcggtaaagat

SEQ ID NO: 4930477 - DNA, 25 bp, Homo sapien
cagcacgccacgtctgagagcaaag

SEQ ID NO: 4930478 - DNA, 25 bp, Homo sapien
agcacgccacgtctgagagcaaagc

SEQ ID NO: 4930479 - DNA, 25 bp, Homo sapien
ttcccacacagcagtcattatgatc

SEQ ID NO: 4930480 - DNA, 25 bp, Homo sapien
gatgatggcaggagtgtctttcctg

SEQ ID NO: 4930481 - DNA, 25 bp, Homo sapien
tccagtctccctctgctatactttt

SEQ ID NO: 4930482 - DNA, 25 bp, Homo sapien
gtcattgcttgcctggatgatggca

SEQ ID NO: 4930483 - DNA, 25 bp, Homo sapien
aaattcaggatcttgaacaggtcct

SEQ ID NO: 4930484 - DNA, 25 bp, Homo sapien
ggatcttgaacaggtcctcaagact

SEQ ID NO: 4930485 - DNA, 25 bp, Homo sapien
ggttcaaggatggcaaaattcagga

SEQ ID NO: 4930486 - DNA, 25 bp, Homo sapien
gttcaaggatggcaaaattcaggat

SEQ ID NO: 4930487 - DNA, 25 bp, Homo sapien
tagcaggctaagttttcttggcagc

SEQ ID NO: 4930488 - DNA, 25 bp, Homo sapien
gacttctatggagtaagtacccagc

SEQ ID NO: 4930489 - DNA, 25 bp, Homo sapien
catctacactctaggatcttcagcc

SEQ ID NO: 4930490 - DNA, 25 bp, Homo sapien
tctggacttggcagcatgaccaatt

SEQ ID NO: 4930491 - DNA, 25 bp, Homo sapien
tgcacatggtatttggctcacatca

SEQ ID NO: 4930492 - DNA, 25 bp, Homo sapien
gaagcactggttgtagtttctttaa

SEQ ID NO: 4930493 - DNA, 25 bp, Homo sapien
tttctttaatatgggatgtaggcct

SEQ ID NO: 4930494 - DNA, 25 bp, Homo sapien
tcacattaagaagcactggttgtag

SEQ ID NO: 4930495 - DNA, 25 bp, Homo sapien
cctctaaactggagggtgaggactc

SEQ ID NO: 4930496 - DNA, 25 bp, Homo sapien
gggacagggcgccctccattctgtt

SEQ ID NO: 4930497 - DNA, 25 bp, Homo sapien
tttgtggtggccacgtcctcacctg

SEQ ID NO: 4930498 - DNA, 25 bp, Homo sapien
atttgaatgggttgtaggagccccg

SEQ ID NO: 4930499 - DNA, 25 bp, Homo sapien
attcatgtctgttggcaataatgtg

SEQ ID NO: 4930500 - DNA, 25 bp, Homo sapien
ccttcaattcatgtctgttggcaat

SEQ ID NO: 4930501 - DNA, 25 bp, Homo sapien
tcaattcatgtctgttggcaataat

SEQ ID NO: 4930502 - DNA, 25 bp, Homo sapien
ttcatgtctgttggcaataatgtgc

SEQ ID NO: 4930503 - DNA, 25 bp, Homo sapien
aatcatacataaaggtgctaggcag

SEQ ID NO: 4930504 - DNA, 25 bp, Homo sapien
ggggctccacatggcgttaatcata

SEQ ID NO: 4930505 - DNA, 25 bp, Homo sapien
tccacatggcgttaatcatacataa

SEQ ID NO: 4930506 - DNA, 25 bp, Homo sapien
taatcatacataaaggtgctaggca

SEQ ID NO: 4930507 - DNA, 25 bp, Homo sapien
caataccgtggcccaaggtgggctg

SEQ ID NO: 4930508 - DNA, 25 bp, Homo sapien
cagcagacgaagtagtgggctgata

SEQ ID NO: 4930509 - DNA, 25 bp, Homo sapien
gaccaggatgccacaggtgacctct

SEQ ID NO: 4930510 - DNA, 25 bp, Homo sapien
gatgccacaggtgacctctaacagg

SEQ ID NO: 4930511 - DNA, 25 bp, Homo sapien
gaagaaatgagcttgagcattgtaa

SEQ ID NO: 4930512 - DNA, 25 bp, Homo sapien
gagcattgtaaggattttggccgac

SEQ ID NO: 4930513 - DNA, 25 bp, Homo sapien
tggccgactgaaatacagtccagat

SEQ ID NO: 4930514 - DNA, 25 bp, Homo sapien
ggaaaggcctctggatggaaaagcc

SEQ ID NO: 4930515 - DNA, 25 bp, Homo sapien
cgcacagtcttataggcattatgaa

SEQ ID NO: 4930516 - DNA, 25 bp, Homo sapien
tgagaccccggtgagagcctttgtt

SEQ ID NO: 4930517 - DNA, 25 bp, Homo sapien
ccagatacaatcctctgagaccctg

SEQ ID NO: 4930518 - DNA, 25 bp, Homo sapien
ccctgagcgcacagtcttataggca

SEQ ID NO: 4930519 - DNA, 25 bp, Homo sapien
ttccatccttgccagactggcatcc

SEQ ID NO: 4930520 - DNA, 25 bp, Homo sapien
ggcaggcttagtgtcccagtggctg

SEQ ID NO: 4930521 - DNA, 25 bp, Homo sapien
gggcaggcttagtgtcccagtggct

SEQ ID NO: 4930522 - DNA, 25 bp, Homo sapien
atccttgccagactggcatccaggg

SEQ ID NO: 4930523 - DNA, 25 bp, Homo sapien
tgggggtacagggtcggagcttgtg

SEQ ID NO: 4930524 - DNA, 25 bp, Homo sapien
tacagggtcggagcttgtggggagg

SEQ ID NO: 4930525 - DNA, 25 bp, Homo sapien
ggtacagggtcggagcttgtgggga

SEQ ID NO: 4930526 - DNA, 25 bp, Homo sapien
cagggtcggagcttgtggggaggga

SEQ ID NO: 4930527 - DNA, 25 bp, Homo sapien
tcaagcaagtgcttggatgaaagag

SEQ ID NO: 4930528 - DNA, 25 bp, Homo sapien
tggatgaaagagtggtgctggcgag

SEQ ID NO: 4930529 - DNA, 25 bp, Homo sapien
gtgcttggatgaaagagtggtgctg

SEQ ID NO: 4930530 - DNA, 25 bp, Homo sapien
caagcaagtgcttggatgaaagagt

SEQ ID NO: 4930531 - DNA, 25 bp, Homo sapien
ctgaggtgccattatcaggaagtgg

SEQ ID NO: 4930532 - DNA, 25 bp, Homo sapien
tggagctgaaggcattgtcaggacc

SEQ ID NO: 4930533 - DNA, 25 bp, Homo sapien
gctgctgacaccacacaggtctttg

SEQ ID NO: 4930534 - DNA, 25 bp, Homo sapien
tgaaggcattgtcaggaccggagcc

SEQ ID NO: 4930535 - DNA, 25 bp, Homo sapien
ggcattgtcaggaccggagcctctg

SEQ ID NO: 4930536 - DNA, 25 bp, Homo sapien
gggtgctgcatcactgcttccattg

SEQ ID NO: 4930537 - DNA, 25 bp, Homo sapien
tcctctgggacatgtgggtgctgca

SEQ ID NO: 4930538 - DNA, 25 bp, Homo sapien
caaagggccagacttctgttcgtca

SEQ ID NO: 4930539 - DNA, 25 bp, Homo sapien
ccattgcagataacctgctctggga

SEQ ID NO: 4930540 - DNA, 25 bp, Homo sapien
tataaacgagaaggcacatgcatgg

SEQ ID NO: 4930541 - DNA, 25 bp, Homo sapien
tttattgggtcagcagcccagatac

SEQ ID NO: 4930542 - DNA, 25 bp, Homo sapien
catgcgggaccagttgtgaaagccc

SEQ ID NO: 4930543 - DNA, 25 bp, Homo sapien
catgcatggagagtgtctgacttgc

SEQ ID NO: 4930544 - DNA, 25 bp, Homo sapien
tgcatgcagtcttatccttgctccc

SEQ ID NO: 4930545 - DNA, 25 bp, Homo sapien
gcatgcagtcttatccttgctccct

SEQ ID NO: 4930546 - DNA, 25 bp, Homo sapien
catgcagtcttatccttgctccctt

SEQ ID NO: 4930547 - DNA, 25 bp, Homo sapien
atgcagtcttatccttgctcccttc

SEQ ID NO: 4930548 - DNA, 25 bp, Homo sapien
ctagatgtggtaaaatccagaagca

SEQ ID NO: 4930549 - DNA, 25 bp, Homo sapien
gtggtaaaatccagaagcatttctt

SEQ ID NO: 4930550 - DNA, 25 bp, Homo sapien
gatgtggtaaaatccagaagcattt

SEQ ID NO: 4930551 - DNA, 25 bp, Homo sapien
tagatgtggtaaaatccagaagcat

SEQ ID NO: 4930552 - DNA, 25 bp, Homo sapien
tgccttctaagacggcccagctttg

SEQ ID NO: 4930553 - DNA, 25 bp, Homo sapien
gcagctgttaggcaatagccatcag

SEQ ID NO: 4930554 - DNA, 25 bp, Homo sapien
ataagactccggcaagttcgagctc

SEQ ID NO: 4930555 - DNA, 25 bp, Homo sapien
gaaagggagcttctgaaaagagtaa

SEQ ID NO: 4930556 - DNA, 25 bp, Homo sapien
cctgcatcttctcccgcagtttgga

SEQ ID NO: 4930557 - DNA, 25 bp, Homo sapien
catgtaagatgtgtccctgcatctt

SEQ ID NO: 4930558 - DNA, 25 bp, Homo sapien
cagtttggatgggttcattaggccc

SEQ ID NO: 4930559 - DNA, 25 bp, Homo sapien
taaatgaaggcaactcagcattcac

SEQ ID NO: 4930560 - DNA, 25 bp, Homo sapien
gtttattgttcatccccagcggcag

SEQ ID NO: 4930561 - DNA, 25 bp, Homo sapien
cagctgaggccggttgtttattgtt

SEQ ID NO: 4930562 - DNA, 25 bp, Homo sapien
ccagttgccgcccatttcgtcatga

SEQ ID NO: 4930563 - DNA, 25 bp, Homo sapien
gttgccgcccatttcgtcatgattt

SEQ ID NO: 4930564 - DNA, 25 bp, Homo sapien
tggagcatgagagtctttagcttcc

SEQ ID NO: 4930565 - DNA, 25 bp, Homo sapien
gagcatgagagtctttagcttccca

SEQ ID NO: 4930566 - DNA, 25 bp, Homo sapien
ggagcatgagagtctttagcttccc

SEQ ID NO: 4930567 - DNA, 25 bp, Homo sapien
cagccttaactgtcaaccacttatt

SEQ ID NO: 4930568 - DNA, 25 bp, Homo sapien
tgaaagattcaaagaatctttccat

SEQ ID NO: 4930569 - DNA, 25 bp, Homo sapien
tttgatatcaagtataatcagctga

SEQ ID NO: 4930570 - DNA, 25 bp, Homo sapien
tattagaagttttgatatcaagtat

SEQ ID NO: 4930571 - DNA, 25 bp, Homo sapien
agataagagacaatggtttcttttt

SEQ ID NO: 4930572 - DNA, 25 bp, Homo sapien
tcaaattaagataagagacaatggt

SEQ ID NO: 4930573 - DNA, 25 bp, Homo sapien
aattaagataagagacaatggtttc

SEQ ID NO: 4930574 - DNA, 25 bp, Homo sapien
caaattaagataagagacaatggtt

SEQ ID NO: 4930575 - DNA, 25 bp, Homo sapien
aacatttggacccagatggcagttg

SEQ ID NO: 4930576 - DNA, 25 bp, Homo sapien
cccagatggcagttgttcttagcca

SEQ ID NO: 4930577 - DNA, 25 bp, Homo sapien
ggacccagatggcagttgttcttag

SEQ ID NO: 4930578 - DNA, 25 bp, Homo sapien
tttggacccagatggcagttgttct

SEQ ID NO: 4930579 - DNA, 25 bp, Homo sapien
tgtgttgactatgggatccttttgt

SEQ ID NO: 4930580 - DNA, 25 bp, Homo sapien
ggttgtgttgactatgggatccttt

SEQ ID NO: 4930581 - DNA, 25 bp, Homo sapien
tggtggttgtgttgactatgggatc

SEQ ID NO: 4930582 - DNA, 25 bp, Homo sapien
gtggttgtgttgactatgggatcct

SEQ ID NO: 4930583 - DNA, 25 bp, Homo sapien
ttaagattcaatgtcatgaaccatc

SEQ ID NO: 4930584 - DNA, 25 bp, Homo sapien
aaccatcttcttgattgaggtgaca

SEQ ID NO: 4930585 - DNA, 25 bp, Homo sapien
ttgaggtgacattgactgagacctg

SEQ ID NO: 4930586 - DNA, 25 bp, Homo sapien
gattcaatgtcatgaaccatcttct

SEQ ID NO: 4930587 - DNA, 25 bp, Homo sapien
gcctccacaacactttactgccagc

SEQ ID NO: 4930588 - DNA, 25 bp, Homo sapien
cacaacactttactgccagcaccca

SEQ ID NO: 4930589 - DNA, 25 bp, Homo sapien
tgccagcacccactcatgttgctct

SEQ ID NO: 4930590 - DNA, 25 bp, Homo sapien
acccactcatgttgctctgtgtcct

SEQ ID NO: 4930591 - DNA, 25 bp, Homo sapien
ccagctcaatcatccttcggctctc

SEQ ID NO: 4930592 - DNA, 25 bp, Homo sapien
ctgggccagctcaatcatccttcgg

SEQ ID NO: 4930593 - DNA, 25 bp, Homo sapien
cactgggccagctcaatcatccttc

SEQ ID NO: 4930594 - DNA, 25 bp, Homo sapien
gggccagctcaatcatccttcggct

SEQ ID NO: 4930595 - DNA, 25 bp, Homo sapien
tgtcatccctgaagttgacgttgta

SEQ ID NO: 4930596 - DNA, 25 bp, Homo sapien
aaagaaccctggctaccaatcacgg

SEQ ID NO: 4930597 - DNA, 25 bp, Homo sapien
caatcacggaaagctgttggactcc

SEQ ID NO: 4930598 - DNA, 25 bp, Homo sapien
tggactccaatctgcccttgctctg

SEQ ID NO: 4930599 - DNA, 25 bp, Homo sapien
gcctttagcattgcccctctggtca

SEQ ID NO: 4930600 - DNA, 25 bp, Homo sapien
ctttagcattgcccctctggtcaat

SEQ ID NO: 4930601 - DNA, 25 bp, Homo sapien
ttagcattgcccctctggtcaatct

SEQ ID NO: 4930602 - DNA, 25 bp, Homo sapien
ctgcctttagcattgcccctctggt

SEQ ID NO: 4930603 - DNA, 25 bp, Homo sapien
cttctcttctattccgactgttcct

SEQ ID NO: 4930604 - DNA, 25 bp, Homo sapien
tctattccgactgttcctttcccat

SEQ ID NO: 4930605 - DNA, 25 bp, Homo sapien
gttcctcaatagtgcttctccaggc

SEQ ID NO: 4930606 - DNA, 25 bp, Homo sapien
cctcaatagtgcttctccaggccat

SEQ ID NO: 4930607 - DNA, 25 bp, Homo sapien
aagcaagtcctcagtgacctacaaa

SEQ ID NO: 4930608 - DNA, 25 bp, Homo sapien
agtcctcagtgacctacaaagagac

SEQ ID NO: 4930609 - DNA, 25 bp, Homo sapien
aagtcctcagtgacctacaaagaga

SEQ ID NO: 4930610 - DNA, 25 bp, Homo sapien
cataaagcaagtcctcagtgaccta

SEQ ID NO: 4930611 - DNA, 25 bp, Homo sapien
cacgtggttaccatttttgaccagg

SEQ ID NO: 4930612 - DNA, 25 bp, Homo sapien
gcttcacgattgatgaccctgggtg

SEQ ID NO: 4930613 - DNA, 25 bp, Homo sapien
gaccctgggtgaacagaacacgtgg

SEQ ID NO: 4930614 - DNA, 25 bp, Homo sapien
cttgggcttcacgattgatgaccct

SEQ ID NO: 4930615 - DNA, 25 bp, Homo sapien
aattgaggggtgtaactgttccagg

SEQ ID NO: 4930616 - DNA, 25 bp, Homo sapien
cagaattgaggggtgtaactgttcc

SEQ ID NO: 4930617 - DNA, 25 bp, Homo sapien
gtgtaactgttccaggtagtcagca

SEQ ID NO: 4930618 - DNA, 25 bp, Homo sapien
gcaataactgaacatctcaaagatg

SEQ ID NO: 4930619 - DNA, 25 bp, Homo sapien
cccttgcagtcagccttgtatggtc

SEQ ID NO: 4930620 - DNA, 25 bp, Homo sapien
gctgttgcaggccaatgaccccgtc

SEQ ID NO: 4930621 - DNA, 25 bp, Homo sapien
tatggtcccatccaagggccaggct

SEQ ID NO: 4930622 - DNA, 25 bp, Homo sapien
tgcaggccaatgaccccgtccattg

SEQ ID NO: 4930623 - DNA, 25 bp, Homo sapien
tgagctggctgctggtcagctggca

SEQ ID NO: 4930624 - DNA, 25 bp, Homo sapien
cctgagctggctgctggtcagctgg

SEQ ID NO: 4930625 - DNA, 25 bp, Homo sapien
gtcagctggcagctgctggatgtga

SEQ ID NO: 4930626 - DNA, 25 bp, Homo sapien
tggtcagctggcagctgctggatgt

SEQ ID NO: 4930627 - DNA, 25 bp, Homo sapien
ggcagtccttctacaaccactgtta

SEQ ID NO: 4930628 - DNA, 25 bp, Homo sapien
cactgttaagtgcttccatgaaaag

SEQ ID NO: 4930629 - DNA, 25 bp, Homo sapien
aaaaatggcagtccttctacaacca

SEQ ID NO: 4930630 - DNA, 25 bp, Homo sapien
tctacaaccactgttaagtgcttcc

SEQ ID NO: 4930631 - DNA, 25 bp, Homo sapien
tgtgggtggagaaagcccatactgt

SEQ ID NO: 4930632 - DNA, 25 bp, Homo sapien
aaagcccatactgttgggttgtgga

SEQ ID NO: 4930633 - DNA, 25 bp, Homo sapien
gttgtggatcagcactgccatcaca

SEQ ID NO: 4930634 - DNA, 25 bp, Homo sapien
tgttgggttgtggatcagcactgcc

SEQ ID NO: 4930635 - DNA, 25 bp, Homo sapien
tgcagttgacaggtttacgcctcat

SEQ ID NO: 4930636 - DNA, 25 bp, Homo sapien
gggtaattgcagttgacaggtttac

SEQ ID NO: 4930637 - DNA, 25 bp, Homo sapien
aattgcagttgacaggtttacgcct

SEQ ID NO: 4930638 - DNA, 25 bp, Homo sapien
gtaattgcagttgacaggtttacgc

SEQ ID NO: 4930639 - DNA, 25 bp, Homo sapien
caatgacctctttgccagggcactg

SEQ ID NO: 4930640 - DNA, 25 bp, Homo sapien
atccatgtggttaccatcggaaccg

SEQ ID NO: 4930641 - DNA, 25 bp, Homo sapien
ggtcttctcaatgacctctttgcca

SEQ ID NO: 4930642 - DNA, 25 bp, Homo sapien
ggtaagtaccacatgaaactctctc

SEQ ID NO: 4930643 - DNA, 25 bp, Homo sapien
tgccttggagtggttgaaaacattc

SEQ ID NO: 4930644 - DNA, 25 bp, Homo sapien
atgacttgctcaaacgctgctctgg

SEQ ID NO: 4930645 - DNA, 25 bp, Homo sapien
taacggaggcctttggattgattga

SEQ ID NO: 4930646 - DNA, 25 bp, Homo sapien
gttgtccctcaccacgtacaatgga

SEQ ID NO: 4930647 - DNA, 25 bp, Homo sapien
tcagaccagatgtcaggttctccat

SEQ ID NO: 4930648 - DNA, 25 bp, Homo sapien
ctcagaccagatgtcaggttctcca

SEQ ID NO: 4930649 - DNA, 25 bp, Homo sapien
cggccatgtgcgagtcatgtctcca

SEQ ID NO: 4930650 - DNA, 25 bp, Homo sapien
ccatgtgcgagtcatgtctccagcc

SEQ ID NO: 4930651 - DNA, 25 bp, Homo sapien
ccggccatgtgcgagtcatgtctcc

SEQ ID NO: 4930652 - DNA, 25 bp, Homo sapien
ggccatgtgcgagtcatgtctccag

SEQ ID NO: 4930653 - DNA, 25 bp, Homo sapien
atgctgagtgctggcattgaaaacc

SEQ ID NO: 4930654 - DNA, 25 bp, Homo sapien
tctcaacaatgagctatgctgagtg

SEQ ID NO: 4930655 - DNA, 25 bp, Homo sapien
aaattcattctgtctccggctgtag

SEQ ID NO: 4930656 - DNA, 25 bp, Homo sapien
tctccggctgtaggactggcctagg

SEQ ID NO: 4930657 - DNA, 25 bp, Homo sapien
gaccaaaacagcaagacttaggtcc

SEQ ID NO: 4930658 - DNA, 25 bp, Homo sapien
gagaccaaaacagcaagacttaggt

SEQ ID NO: 4930659 - DNA, 25 bp, Homo sapien
accaaaacagcaagacttaggtcca

SEQ ID NO: 4930660 - DNA, 25 bp, Homo sapien
agaccaaaacagcaagacttaggtc

SEQ ID NO: 4930661 - DNA, 25 bp, Homo sapien
tcaatccctatggctggcacaccag

SEQ ID NO: 4930662 - DNA, 25 bp, Homo sapien
accaggagatcttctgagtgcgatc

SEQ ID NO: 4930663 - DNA, 25 bp, Homo sapien
tgcgatcttcacacccctctggaat

SEQ ID NO: 4930664 - DNA, 25 bp, Homo sapien
agcctgtcctcaatccctatggctg

SEQ ID NO: 4930665 - DNA, 25 bp, Homo sapien
cttcattgccagattgaggtggttg

SEQ ID NO: 4930666 - DNA, 25 bp, Homo sapien
cattgccagattgaggtggttgcat

SEQ ID NO: 4930667 - DNA, 25 bp, Homo sapien
ttcttcattgccagattgaggtggt

SEQ ID NO: 4930668 - DNA, 25 bp, Homo sapien
tcattgccagattgaggtggttgca

SEQ ID NO: 4930669 - DNA, 25 bp, Homo sapien
agtaagccagcagtaatgaattggt

SEQ ID NO: 4930670 - DNA, 25 bp, Homo sapien
taatgaattggttgccaggttgccc

SEQ ID NO: 4930671 - DNA, 25 bp, Homo sapien
tgccaggttgccctggaaaccaggt

SEQ ID NO: 4930672 - DNA, 25 bp, Homo sapien
agccagcagtaatgaattggttgcc

SEQ ID NO: 4930673 - DNA, 25 bp, Homo sapien
tacacaggtaagaatacccaggaaa

SEQ ID NO: 4930674 - DNA, 25 bp, Homo sapien
gcctagaccccagcattaatgcaat

SEQ ID NO: 4930675 - DNA, 25 bp, Homo sapien
taagaatcaactacccttatcaggt

SEQ ID NO: 4930676 - DNA, 25 bp, Homo sapien
tttagacaggctgattgtgagcatc

SEQ ID NO: 4930677 - DNA, 25 bp, Homo sapien
tgtgctgaagcctaactgttggcag

SEQ ID NO: 4930678 - DNA, 25 bp, Homo sapien
cagttgtaccagtgtgctgaagtgc

SEQ ID NO: 4930679 - DNA, 25 bp, Homo sapien
gggaaccaccgcaggttcatcagtg

SEQ ID NO: 4930680 - DNA, 25 bp, Homo sapien
gcttaatgaaactttgccagtgtgg

SEQ ID NO: 4930681 - DNA, 25 bp, Homo sapien
gatgttggcccctagagagtgtgta

SEQ ID NO: 4930682 - DNA, 25 bp, Homo sapien
gaaaatggaaatcatagcagaaatc

SEQ ID NO: 4930683 - DNA, 25 bp, Homo sapien
agagagtgtgtagctccttctctag

SEQ ID NO: 4930684 - DNA, 25 bp, Homo sapien
gatggaaaacacatagatgttggcc

SEQ ID NO: 4930685 - DNA, 25 bp, Homo sapien
gacagaaggttctctacggtgacat

SEQ ID NO: 4930686 - DNA, 25 bp, Homo sapien
caacgaacagagtgtgaaacagtgt

SEQ ID NO: 4930687 - DNA, 25 bp, Homo sapien
taaatgccgttttttgcaacgaaca

SEQ ID NO: 4930688 - DNA, 25 bp, Homo sapien
gcagcagctcatccaaactctattg

SEQ ID NO: 4930689 - DNA, 25 bp, Homo sapien
caccaaaggatcatgaactacgccg

SEQ ID NO: 4930690 - DNA, 25 bp, Homo sapien
gccaaatctctatagggtccacaag

SEQ ID NO: 4930691 - DNA, 25 bp, Homo sapien
cattcagcttcgtccttaaaccagg

SEQ ID NO: 4930692 - DNA, 25 bp, Homo sapien
tgaaccagagcaaatgggcgcaaat

SEQ ID NO: 4930693 - DNA, 25 bp, Homo sapien
gcctttgctctgagggtgacccgag

SEQ ID NO: 4930694 - DNA, 25 bp, Homo sapien
tggcttctcattgtccacatgctgc

SEQ ID NO: 4930695 - DNA, 25 bp, Homo sapien
tgctgcttggtcagacaccaggcct

SEQ ID NO: 4930696 - DNA, 25 bp, Homo sapien
gtgacccgagcccaaatgttaggag

SEQ ID NO: 4930697 - DNA, 25 bp, Homo sapien
ataccccagcatttagctgagtttt

SEQ ID NO: 4930698 - DNA, 25 bp, Homo sapien
cttcttaccatgacaagcaaggttg

SEQ ID NO: 4930699 - DNA, 25 bp, Homo sapien
tcttcttgaccatcagataccccag

SEQ ID NO: 4930700 - DNA, 25 bp, Homo sapien
tgagttttcgatgctgtccttgagg

SEQ ID NO: 4930701 - DNA, 25 bp, Homo sapien
aatctggacagaaggaataacaatc

SEQ ID NO: 4930702 - DNA, 25 bp, Homo sapien
tcacagcgtgtgtataaaggagaag

SEQ ID NO: 4930703 - DNA, 25 bp, Homo sapien
cactgggttaggaattctgtaggct

SEQ ID NO: 4930704 - DNA, 25 bp, Homo sapien
gaaggtaacacttagggacatgagt

SEQ ID NO: 4930705 - DNA, 25 bp, Homo sapien
tgacacctggtacatggagcctgat

SEQ ID NO: 4930706 - DNA, 25 bp, Homo sapien
ggcaagctgctattggaaggacaga

SEQ ID NO: 4930707 - DNA, 25 bp, Homo sapien
ttaacagccggcaagataatgtatc

SEQ ID NO: 4930708 - DNA, 25 bp, Homo sapien
tcatacaactcgtaaatcacccggc

SEQ ID NO: 4930709 - DNA, 25 bp, Homo sapien
tcttggctgtactgatgggcaaaca

SEQ ID NO: 4930710 - DNA, 25 bp, Homo sapien
atgctgagcccgcacatcgtatctt

SEQ ID NO: 4930711 - DNA, 25 bp, Homo sapien
gtactgatgggcaaacatcaatcat

SEQ ID NO: 4930712 - DNA, 25 bp, Homo sapien
gcacatcgtatcttggctgtactga

SEQ ID NO: 4930713 - DNA, 25 bp, Homo sapien
ttggcaagtagcctagtttggcaaa

SEQ ID NO: 4930714 - DNA, 25 bp, Homo sapien
ctagtttggcaaaagtgttggctga

SEQ ID NO: 4930715 - DNA, 25 bp, Homo sapien
tttggcaaaagtgttggctgaggat

SEQ ID NO: 4930716 - DNA, 25 bp, Homo sapien
cccatttggcaagtagcctagtttg

SEQ ID NO: 4930717 - DNA, 25 bp, Homo sapien
tcttgtccatggtggggagccagaa

SEQ ID NO: 4930718 - DNA, 25 bp, Homo sapien
agccaattctaccagccgctgtgca

SEQ ID NO: 4930719 - DNA, 25 bp, Homo sapien
gggcccattcagtgtcaacggaccc

SEQ ID NO: 4930720 - DNA, 25 bp, Homo sapien
cagggatactacctccatcatgaac

SEQ ID NO: 4930721 - DNA, 25 bp, Homo sapien
gtaggtagcacacgagaagacacca

SEQ ID NO: 4930722 - DNA, 25 bp, Homo sapien
taggtagcacacgagaagacaccat

SEQ ID NO: 4930723 - DNA, 25 bp, Homo sapien
gtcccgcagaaccagagaggcaact

SEQ ID NO: 4930724 - DNA, 25 bp, Homo sapien
tgggtcccgcagaaccagagaggca

SEQ ID NO: 4930725 - DNA, 25 bp, Homo sapien
tgacagcggctctgtctccctttga

SEQ ID NO: 4930726 - DNA, 25 bp, Homo sapien
actcctgactgtgacagcggctctg

SEQ ID NO: 4930727 - DNA, 25 bp, Homo sapien
gaactgtaggcttgtggcccagccc

SEQ ID NO: 4930728 - DNA, 25 bp, Homo sapien
gcctgcagaactgtaggcttgtggc

SEQ ID NO: 4930729 - DNA, 25 bp, Homo sapien
tgcctttccagacaacccacttcct

SEQ ID NO: 4930730 - DNA, 25 bp, Homo sapien
agccctgcctttccagacaacccac

SEQ ID NO: 4930731 - DNA, 25 bp, Homo sapien
cctcattgaggtcactaaagacccc

SEQ ID NO: 4930732 - DNA, 25 bp, Homo sapien
attgaggtcactaaagacccctgag

SEQ ID NO: 4930733 - DNA, 25 bp, Homo sapien
tcattgaggtcactaaagacccctg

SEQ ID NO: 4930734 - DNA, 25 bp, Homo sapien
ctacctcattgaggtcactaaagac

SEQ ID NO: 4930735 - DNA, 25 bp, Homo sapien
cgtactgtcgcagtttatatctcag

SEQ ID NO: 4930736 - DNA, 25 bp, Homo sapien
acaggctgtctcgtactgtcgcagt

SEQ ID NO: 4930737 - DNA, 25 bp, Homo sapien
gtcgcagtttatatctcagttcagg

SEQ ID NO: 4930738 - DNA, 25 bp, Homo sapien
tttatatctcagttcaggtggcaca

SEQ ID NO: 4930739 - DNA, 25 bp, Homo sapien
cctgagttacagcagcaacgtccac

SEQ ID NO: 4930740 - DNA, 25 bp, Homo sapien
tgcttacacagaaagacgtaaatgc

SEQ ID NO: 4930741 - DNA, 25 bp, Homo sapien
cataatcaatagaacttcatatgga

SEQ ID NO: 4930742 - DNA, 25 bp, Homo sapien
acctccatatgccttcctgagttac

SEQ ID NO: 4930743 - DNA, 25 bp, Homo sapien
gagaaaacgccccactgagaagata

SEQ ID NO: 4930744 - DNA, 25 bp, Homo sapien
aagagaaaacgccccactgagaaga

SEQ ID NO: 4930745 - DNA, 25 bp, Homo sapien
aaaacgccccactgagaagatatgc

SEQ ID NO: 4930746 - DNA, 25 bp, Homo sapien
gaaaacgccccactgagaagatatg

SEQ ID NO: 4930747 - DNA, 25 bp, Homo sapien
ctgctggatgtactttcctgtctga

SEQ ID NO: 4930748 - DNA, 25 bp, Homo sapien
tgctggatgtactttcctgtctgac

SEQ ID NO: 4930749 - DNA, 25 bp, Homo sapien
accccagacactttcactaaatgtg

SEQ ID NO: 4930750 - DNA, 25 bp, Homo sapien
taaaagtcacccctaatgatggggc

SEQ ID NO: 4930751 - DNA, 25 bp, Homo sapien
tgcttctgtttcagtcgtggactct

SEQ ID NO: 4930752 - DNA, 25 bp, Homo sapien
gggtgcagaagatgctttgctcctt

SEQ ID NO: 4930753 - DNA, 25 bp, Homo sapien
gagaaatttggggaaggaggagatg

SEQ ID NO: 4930754 - DNA, 25 bp, Homo sapien
tgagaaggagaaatttggggaagga

SEQ ID NO: 4930755 - DNA, 25 bp, Homo sapien
ttgagggcatgagaaggagaaattt

SEQ ID NO: 4930756 - DNA, 25 bp, Homo sapien
ctgttgagggcatgagaaggagaaa

SEQ ID NO: 4930757 - DNA, 25 bp, Homo sapien
aactatggagttgtaagccttagcc

SEQ ID NO: 4930758 - DNA, 25 bp, Homo sapien
tgggttgatataacagacagcttcc

SEQ ID NO: 4930759 - DNA, 25 bp, Homo sapien
ttagcctctataagcttcatgccag

SEQ ID NO: 4930760 - DNA, 25 bp, Homo sapien
gacatgcatgcaactatggagttgt

SEQ ID NO: 4930761 - DNA, 25 bp, Homo sapien
cctttaggtgccaagatgtcacaga

SEQ ID NO: 4930762 - DNA, 25 bp, Homo sapien
ccaagatgtcacagacaacagacat

SEQ ID NO: 4930763 - DNA, 25 bp, Homo sapien
taggtgccaagatgtcacagacaac

SEQ ID NO: 4930764 - DNA, 25 bp, Homo sapien
ggtgccaagatgtcacagacaacag

SEQ ID NO: 4930765 - DNA, 25 bp, Homo sapien
ctgaacaggactgagccagtatgaa

SEQ ID NO: 4930766 - DNA, 25 bp, Homo sapien
tgaacaggactgagccagtatgaac

SEQ ID NO: 4930767 - DNA, 25 bp, Homo sapien
tgccctcgccatcaactagagaatg

SEQ ID NO: 4930768 - DNA, 25 bp, Homo sapien
tagggatccctgtaatcgagctcaa

SEQ ID NO: 4930769 - DNA, 25 bp, Homo sapien
gataagatggttccgtagggatccc

SEQ ID NO: 4930770 - DNA, 25 bp, Homo sapien
gaacagagtatcagctatttggtcc

SEQ ID NO: 4930771 - DNA, 25 bp, Homo sapien
aggaacacaggttcctctgcttggc

SEQ ID NO: 4930772 - DNA, 25 bp, Homo sapien
gcttggcttgggtgctaactgcttc

SEQ ID NO: 4930773 - DNA, 25 bp, Homo sapien
ggaacacaggttcctctgcttggct

SEQ ID NO: 4930774 - DNA, 25 bp, Homo sapien
ggtgccaccgcactgaactttcgtt

SEQ ID NO: 4930775 - DNA, 25 bp, Homo sapien
gcatgacccaggactccatttagag

SEQ ID NO: 4930776 - DNA, 25 bp, Homo sapien
tgcttgagatacttcaaaggcttcc

SEQ ID NO: 4930777 - DNA, 25 bp, Homo sapien
taaactgacctacttctgcagggtt

SEQ ID NO: 4930778 - DNA, 25 bp, Homo sapien
cattctgagtcgtaactgtttgcag

SEQ ID NO: 4930779 - DNA, 25 bp, Homo sapien
tgttaggacactgggatctgaggat

SEQ ID NO: 4930780 - DNA, 25 bp, Homo sapien
caaggtctttcagaacaggatttcc

SEQ ID NO: 4930781 - DNA, 25 bp, Homo sapien
tttgcagtactggttcctccggaaa

SEQ ID NO: 4930782 - DNA, 25 bp, Homo sapien
agccaaatacagtctctctgcagac

SEQ ID NO: 4930783 - DNA, 25 bp, Homo sapien
cagccaaatacagtctctctgcaga

SEQ ID NO: 4930784 - DNA, 25 bp, Homo sapien
ggatgtttagagagcttccaaatgc

SEQ ID NO: 4930785 - DNA, 25 bp, Homo sapien
caattggcctaattccattggtctc

SEQ ID NO: 4930786 - DNA, 25 bp, Homo sapien
ggtattccacagtttagtcattctg

SEQ ID NO: 4930787 - DNA, 25 bp, Homo sapien
ccaaatgcttactctcacagatagt

SEQ ID NO: 4930788 - DNA, 25 bp, Homo sapien
gctaccaccagggggaacagattct

SEQ ID NO: 4930789 - DNA, 25 bp, Homo sapien
ccatttcctgctggtattagaaaga

SEQ ID NO: 4930790 - DNA, 25 bp, Homo sapien
gaaagagcctccaatgtgcatctgc

SEQ ID NO: 4930791 - DNA, 25 bp, Homo sapien
tgtcctgtgcccttgcccctcatca

SEQ ID NO: 4930792 - DNA, 25 bp, Homo sapien
cacttggtccttacctcaggctgag

SEQ ID NO: 4930793 - DNA, 25 bp, Homo sapien
tctgcacttggtccttacctcaggc

SEQ ID NO: 4930794 - DNA, 25 bp, Homo sapien
ttggtgtgtgcacccctactgattt

SEQ ID NO: 4930795 - DNA, 25 bp, Homo sapien
gtccttacctcaggctgagtcaggg

SEQ ID NO: 4930796 - DNA, 25 bp, Homo sapien
catccgtccaccgtctgaagaggtg

SEQ ID NO: 4930797 - DNA, 25 bp, Homo sapien
gctcatcatcactggaagccatccg

SEQ ID NO: 4930798 - DNA, 25 bp, Homo sapien
tggaagccatccgtccaccgtctga

SEQ ID NO: 4930799 - DNA, 25 bp, Homo sapien
aagaggtggcatgaaccattggaag

SEQ ID NO: 4930800 - DNA, 25 bp, Homo sapien
tcttctctgaagttaggcctgtgaa

SEQ ID NO: 4930801 - DNA, 25 bp, Homo sapien
ctgcttcctggtggaaactggaatg

SEQ ID NO: 4930802 - DNA, 25 bp, Homo sapien
tgaaagacatgttgtgacttcaggg

SEQ ID NO: 4930803 - DNA, 25 bp, Homo sapien
tcctttgggacctgtgaggctcagc

SEQ ID NO: 4930804 - DNA, 25 bp, Homo sapien
tggtcccttgactgcctgatagtgg

SEQ ID NO: 4930805 - DNA, 25 bp, Homo sapien
tggctctactgctctactctatatg

SEQ ID NO: 4930806 - DNA, 25 bp, Homo sapien
tatatgacagtacataagtcggtgc

SEQ ID NO: 4930807 - DNA, 25 bp, Homo sapien
aaatcctctgtgaatagttgactgc

SEQ ID NO: 4930808 - DNA, 25 bp, Homo sapien
tgacgttcagatcaagcgttttctc

SEQ ID NO: 4930809 - DNA, 25 bp, Homo sapien
tgatctccctaaaagagacgctggg

SEQ ID NO: 4930810 - DNA, 25 bp, Homo sapien
ggaatcctctttagaaatgacccca

SEQ ID NO: 4930811 - DNA, 25 bp, Homo sapien
tcatggcccctagagaaagtttttg

SEQ ID NO: 4930812 - DNA, 25 bp, Homo sapien
caaggttcggaaactcattggtcat

SEQ ID NO: 4930813 - DNA, 25 bp, Homo sapien
gttatatggtacttctgttccttcc

SEQ ID NO: 4930814 - DNA, 25 bp, Homo sapien
tcccctgggtcacatcagactggca

SEQ ID NO: 4930815 - DNA, 25 bp, Homo sapien
tgtatttcgtttggtccgatgccat

SEQ ID NO: 4930816 - DNA, 25 bp, Homo sapien
tagatccctgcagaatttgctttgt

SEQ ID NO: 4930817 - DNA, 25 bp, Homo sapien
gacatactcgtaggcgaggaactgg

SEQ ID NO: 4930818 - DNA, 25 bp, Homo sapien
taggcgaggaactggaatcagcatg

SEQ ID NO: 4930819 - DNA, 25 bp, Homo sapien
gcaccataatatggagacatactcg

SEQ ID NO: 4930820 - DNA, 25 bp, Homo sapien
tatggagacatactcgtaggcgagg

SEQ ID NO: 4930821 - DNA, 25 bp, Homo sapien
gaccagttgcattggcttatttttc

SEQ ID NO: 4930822 - DNA, 25 bp, Homo sapien
gcttcctaagtgttcactcactaca

SEQ ID NO: 4930823 - DNA, 25 bp, Homo sapien
taggcacacgtttttgaccagttgc

SEQ ID NO: 4930824 - DNA, 25 bp, Homo sapien
tctatatcaaaatcagagcctccga

SEQ ID NO: 4930825 - DNA, 25 bp, Homo sapien
agagctctgacccacttcccagctt

SEQ ID NO: 4930826 - DNA, 25 bp, Homo sapien
gcctgaaacacaaccactgagcccc

SEQ ID NO: 4930827 - DNA, 25 bp, Homo sapien
cagcctgaaacacaaccactgagcc

SEQ ID NO: 4930828 - DNA, 25 bp, Homo sapien
ttcagcctgaaacacaaccactgag

SEQ ID NO: 4930829 - DNA, 25 bp, Homo sapien
agctctagagatggctttcatcctg

SEQ ID NO: 4930830 - DNA, 25 bp, Homo sapien
actgacagctctagagatggctttc

SEQ ID NO: 4930831 - DNA, 25 bp, Homo sapien
ctgctgagctcagcactgacagctc

SEQ ID NO: 4930832 - DNA, 25 bp, Homo sapien
tggctttcatcctgttctgctccat

SEQ ID NO: 4930833 - DNA, 25 bp, Homo sapien
tggaacaagcacctttcaatatctt

SEQ ID NO: 4930834 - DNA, 25 bp, Homo sapien
gagacatgaaccaagatgcatactc

SEQ ID NO: 4930835 - DNA, 25 bp, Homo sapien
gtgtgtttctcccttaaatggaaca

SEQ ID NO: 4930836 - DNA, 25 bp, Homo sapien
ccacagatggcacaattaaacctgg

SEQ ID NO: 4930837 - DNA, 25 bp, Homo sapien
tcttcgacctcctgtagtattctta

SEQ ID NO: 4930838 - DNA, 25 bp, Homo sapien
tctccaaaaagtacctgagctgcat

SEQ ID NO: 4930839 - DNA, 25 bp, Homo sapien
ttgaatagtatcaccctctgagagt

SEQ ID NO: 4930840 - DNA, 25 bp, Homo sapien
tttcaacctgtagggtgatatttcc

SEQ ID NO: 4930841 - DNA, 25 bp, Homo sapien
tcttcaaggttcctatctccttcgg

SEQ ID NO: 4930842 - DNA, 25 bp, Homo sapien
cacctggaatatggcacttcttcaa

SEQ ID NO: 4930843 - DNA, 25 bp, Homo sapien
tggaatatggcacttcttcaaggtt

SEQ ID NO: 4930844 - DNA, 25 bp, Homo sapien
cctctccacctggaatatggcactt

SEQ ID NO: 4930845 - DNA, 25 bp, Homo sapien
gtcatatttaatactgggcttgtaa

SEQ ID NO: 4930846 - DNA, 25 bp, Homo sapien
agcaagctcaggacacaactgattt

SEQ ID NO: 4930847 - DNA, 25 bp, Homo sapien
agctcaggacacaactgatttgaca

SEQ ID NO: 4930848 - DNA, 25 bp, Homo sapien
catatttaatactgggcttgtaaag

SEQ ID NO: 4930849 - DNA, 25 bp, Homo sapien
tcagcccatacgttcagtctggcac

SEQ ID NO: 4930850 - DNA, 25 bp, Homo sapien
tacgttcagtctggcactgattcac

SEQ ID NO: 4930851 - DNA, 25 bp, Homo sapien
ggcactgattcacgtattcttccag

SEQ ID NO: 4930852 - DNA, 25 bp, Homo sapien
cagtctggcactgattcacgtattc

SEQ ID NO: 4930853 - DNA, 25 bp, Homo sapien
cccacatgctgccattggggatcat

SEQ ID NO: 4930854 - DNA, 25 bp, Homo sapien
gctgccattggggatcatcacagtt

SEQ ID NO: 4930855 - DNA, 25 bp, Homo sapien
cacatgctgccattggggatcatca

SEQ ID NO: 4930856 - DNA, 25 bp, Homo sapien
catgctgccattggggatcatcaca

SEQ ID NO: 4930857 - DNA, 25 bp, Homo sapien
ccttagagcactcgttgctgttctc

SEQ ID NO: 4930858 - DNA, 25 bp, Homo sapien
tacatcacctccttagagcactcgt

SEQ ID NO: 4930859 - DNA, 25 bp, Homo sapien
ccttttccctggaatccagccacct

SEQ ID NO: 4930860 - DNA, 25 bp, Homo sapien
cactcgttgctgttctcatggcttc

SEQ ID NO: 4930861 - DNA, 25 bp, Homo sapien
atgaaggagaaggtgtggcttgcat

SEQ ID NO: 4930862 - DNA, 25 bp, Homo sapien
tgctgtgcctgacctcttggtggtt

SEQ ID NO: 4930863 - DNA, 25 bp, Homo sapien
aaggtgtggcttgcattgctgtgcc

SEQ ID NO: 4930864 - DNA, 25 bp, Homo sapien
gctggcccacagttggatgaaggag

SEQ ID NO: 4930865 - DNA, 25 bp, Homo sapien
tcaatatcagcatgaagcctggaag

SEQ ID NO: 4930866 - DNA, 25 bp, Homo sapien
gaaaataagtacataaggctcctcc

SEQ ID NO: 4930867 - DNA, 25 bp, Homo sapien
tctgggtcagtccttcaatatcagc

SEQ ID NO: 4930868 - DNA, 25 bp, Homo sapien
tctagggcacaaagaggcgtcctct

SEQ ID NO: 4930869 - DNA, 25 bp, Homo sapien
tctgactctaagtgcctggctgaca

SEQ ID NO: 4930870 - DNA, 25 bp, Homo sapien
gaaacagggctgtcagttctcactt

SEQ ID NO: 4930871 - DNA, 25 bp, Homo sapien
tgggccatggtattaggcttttcgg

SEQ ID NO: 4930872 - DNA, 25 bp, Homo sapien
ccctatcaatttgggccaccttagg

SEQ ID NO: 4930873 - DNA, 25 bp, Homo sapien
gcaaccgctatgcagtctggtgaga

SEQ ID NO: 4930874 - DNA, 25 bp, Homo sapien
ccccatctaggtgccaaatgttcat

SEQ ID NO: 4930875 - DNA, 25 bp, Homo sapien
gtatcaagtgaggtaaattcaccca

SEQ ID NO: 4930876 - DNA, 25 bp, Homo sapien
tattaagggcccttggtatcaagtg

SEQ ID NO: 4930877 - DNA, 25 bp, Homo sapien
gccaggaaaggacccggacatgtcg

SEQ ID NO: 4930878 - DNA, 25 bp, Homo sapien
ttctcactcatggagactggaataa

SEQ ID NO: 4930879 - DNA, 25 bp, Homo sapien
ggagtagaaggccacccaatgccaa

SEQ ID NO: 4930880 - DNA, 25 bp, Homo sapien
cggacatgtcgtgagtgggacctca

SEQ ID NO: 4930881 - DNA, 25 bp, Homo sapien
ctctgcggcgtctatgggcagcagc

SEQ ID NO: 4930882 - DNA, 25 bp, Homo sapien
cctctgcggcgtctatgggcagcag

SEQ ID NO: 4930883 - DNA, 25 bp, Homo sapien
tctgcggcgtctatgggcagcagcc

SEQ ID NO: 4930884 - DNA, 25 bp, Homo sapien
cttccaagaagtggtcccaggcgct

SEQ ID NO: 4930885 - DNA, 25 bp, Homo sapien
caagaagtggtcccaggcgctgctg

SEQ ID NO: 4930886 - DNA, 25 bp, Homo sapien
gcagagttactaacacatcgtttac

SEQ ID NO: 4930887 - DNA, 25 bp, Homo sapien
ctgctgctgcagagttactaacaca

SEQ ID NO: 4930888 - DNA, 25 bp, Homo sapien
tcttctctcgcctgtgatgtccttt

SEQ ID NO: 4930889 - DNA, 25 bp, Homo sapien
actctgataattagcagtggatgaa

SEQ ID NO: 4930890 - DNA, 25 bp, Homo sapien
tgctcttcgcaggacttgggaaata

SEQ ID NO: 4930891 - DNA, 25 bp, Homo sapien
gtgaattaagcccaaagaatgacat

SEQ ID NO: 4930892 - DNA, 25 bp, Homo sapien
cattgcctccatcgctttttctggt

SEQ ID NO: 4930893 - DNA, 25 bp, Homo sapien
gttagctttttgtgacgtggacatc

SEQ ID NO: 4930894 - DNA, 25 bp, Homo sapien
tagctttttgtgacgtggacatctg

SEQ ID NO: 4930895 - DNA, 25 bp, Homo sapien
ttgtgacgtggacatctgtgtgggc

SEQ ID NO: 4930896 - DNA, 25 bp, Homo sapien
ttttgtgacgtggacatctgtgtgg

SEQ ID NO: 4930897 - DNA, 25 bp, Homo sapien
cttggagccctgtgggagcaatgca

SEQ ID NO: 4930898 - DNA, 25 bp, Homo sapien
tgtgcagaggtggattgtaatagcc

SEQ ID NO: 4930899 - DNA, 25 bp, Homo sapien
gtgtcctgagctagaggaacttctg

SEQ ID NO: 4930900 - DNA, 25 bp, Homo sapien
gagcaatgcaggacccaccttcctt

SEQ ID NO: 4930901 - DNA, 25 bp, Homo sapien
tgaaacacggaaggctggatctgga

SEQ ID NO: 4930902 - DNA, 25 bp, Homo sapien
ccctgaaacacggaaggctggatct

SEQ ID NO: 4930903 - DNA, 25 bp, Homo sapien
cctcccctgaaacacggaaggctgg

SEQ ID NO: 4930904 - DNA, 25 bp, Homo sapien
acacggaaggctggatctggatctg

SEQ ID NO: 4930905 - DNA, 25 bp, Homo sapien
ttcaggtcattatgagaagtgactg

SEQ ID NO: 4930906 - DNA, 25 bp, Homo sapien
tgactgtaaaccagggggcaagtag

SEQ ID NO: 4930907 - DNA, 25 bp, Homo sapien
tcattatgagaagtgactgtaaacc

SEQ ID NO: 4930908 - DNA, 25 bp, Homo sapien
aaccagggggcaagtagtgtcacag

SEQ ID NO: 4930909 - DNA, 25 bp, Homo sapien
acaggagtcagcacagcgttgtagg

SEQ ID NO: 4930910 - DNA, 25 bp, Homo sapien
ggagagcatgacacaggttgcacct

SEQ ID NO: 4930911 - DNA, 25 bp, Homo sapien
ggcatgaagtgctagctgggatcca

SEQ ID NO: 4930912 - DNA, 25 bp, Homo sapien
gctgctggtgtttaacaggagtcag

SEQ ID NO: 4930913 - DNA, 25 bp, Homo sapien
ctttgatctcgaggtatggaagcat

SEQ ID NO: 4930914 - DNA, 25 bp, Homo sapien
gctttcctttgatctcgaggtatgg

SEQ ID NO: 4930915 - DNA, 25 bp, Homo sapien
tgcacgctttcctttgatctcgagg

SEQ ID NO: 4930916 - DNA, 25 bp, Homo sapien
aaataatgaattgcacgctttcctt

SEQ ID NO: 4930917 - DNA, 25 bp, Homo sapien
ctgagtggaagggaccatagaagat

SEQ ID NO: 4930918 - DNA, 25 bp, Homo sapien
agtggaagggaccatagaagatgtt

SEQ ID NO: 4930919 - DNA, 25 bp, Homo sapien
agggaccatagaagatgttggccat

SEQ ID NO: 4930920 - DNA, 25 bp, Homo sapien
ggaagggaccatagaagatgttggc

SEQ ID NO: 4930921 - DNA, 25 bp, Homo sapien
agaatcgactgcaggtagattcttt

SEQ ID NO: 4930922 - DNA, 25 bp, Homo sapien
aagaatcgactgcaggtagattctt

SEQ ID NO: 4930923 - DNA, 25 bp, Homo sapien
ttcttgttgttaggttgtatttgga

SEQ ID NO: 4930924 - DNA, 25 bp, Homo sapien
ttcattcttgttgttaggttgtatt

SEQ ID NO: 4930925 - DNA, 25 bp, Homo sapien
tggtggacaagtccgtgttgcaggt

SEQ ID NO: 4930926 - DNA, 25 bp, Homo sapien
cctggtggacaagtccgtgttgcag

SEQ ID NO: 4930927 - DNA, 25 bp, Homo sapien
tggacaagtccgtgttgcaggtggc

SEQ ID NO: 4930928 - DNA, 25 bp, Homo sapien
gacctggtggacaagtccgtgttgc

SEQ ID NO: 4930929 - DNA, 25 bp, Homo sapien
caggcaccgagacagtgtcctcgag

SEQ ID NO: 4930930 - DNA, 25 bp, Homo sapien
tcaagtactgggaaagaaactgcta

SEQ ID NO: 4930931 - DNA, 25 bp, Homo sapien
cactaaagggcagcggatcgatcct

SEQ ID NO: 4930932 - DNA, 25 bp, Homo sapien
tgtcctcgagatggcccactaaagg

SEQ ID NO: 4930933 - DNA, 25 bp, Homo sapien
ctgcttctggtcgcttccatttagc

SEQ ID NO: 4930934 - DNA, 25 bp, Homo sapien
tgagtgctgatgctggtgttgtcta

SEQ ID NO: 4930935 - DNA, 25 bp, Homo sapien
aggtgagtgctgatgctggtgttgt

SEQ ID NO: 4930936 - DNA, 25 bp, Homo sapien
tgctgatgctggtgttgtctaggct

SEQ ID NO: 4930937 - DNA, 25 bp, Homo sapien
gtcagcttcagctgttggattgtca

SEQ ID NO: 4930938 - DNA, 25 bp, Homo sapien
gttggattgtcaggtccttcctgcc

SEQ ID NO: 4930939 - DNA, 25 bp, Homo sapien
ctgttggattgtcaggtccttcctg

SEQ ID NO: 4930940 - DNA, 25 bp, Homo sapien
ccggtggtcagcttcagctgttgga

SEQ ID NO: 4930941 - DNA, 25 bp, Homo sapien
gaggcgcaagatccgggagcagctg

SEQ ID NO: 4930942 - DNA, 25 bp, Homo sapien
ctgtgggaggcgcaagatccgggag

SEQ ID NO: 4930943 - DNA, 25 bp, Homo sapien
caaacactccaagaaggagcacgac

SEQ ID NO: 4930944 - DNA, 25 bp, Homo sapien
ctctgcataaaagcaaacactccaa

SEQ ID NO: 4930945 - DNA, 25 bp, Homo sapien
agacctgtattctctcgcaccgtaa

SEQ ID NO: 4930946 - DNA, 25 bp, Homo sapien
tggtacattacaatagcagacctgt

SEQ ID NO: 4930947 - DNA, 25 bp, Homo sapien
tatcatttactccactttcccgtaa

SEQ ID NO: 4930948 - DNA, 25 bp, Homo sapien
ggaaccctagcatcttcagttgtat

SEQ ID NO: 4930949 - DNA, 25 bp, Homo sapien
ttctctgtgactcggccaccattcc

SEQ ID NO: 4930950 - DNA, 25 bp, Homo sapien
tcttgtccaagtgaggctgtccagc

SEQ ID NO: 4930951 - DNA, 25 bp, Homo sapien
gcactttaccaagcctgcttctctg

SEQ ID NO: 4930952 - DNA, 25 bp, Homo sapien
cagcagcatgcactttaccaagcct

SEQ ID NO: 4930953 - DNA, 25 bp, Homo sapien
ccttgtgagtgtagggtgggagcag

SEQ ID NO: 4930954 - DNA, 25 bp, Homo sapien
gggaggccttgtgagtgtagggtgg

SEQ ID NO: 4930955 - DNA, 25 bp, Homo sapien
gaggccttgtgagtgtagggtggga

SEQ ID NO: 4930956 - DNA, 25 bp, Homo sapien
tgagtgtagggtgggagcagggctc

SEQ ID NO: 4930957 - DNA, 25 bp, Homo sapien
aggtatggaaaatgcagccttaaac

SEQ ID NO: 4930958 - DNA, 25 bp, Homo sapien
taaacaggcagttccgatcgagagt

SEQ ID NO: 4930959 - DNA, 25 bp, Homo sapien
tcgagagtgatgaatgcttcaggga

SEQ ID NO: 4930960 - DNA, 25 bp, Homo sapien
tcagaactggtcaagaggtatggaa

SEQ ID NO: 4930961 - DNA, 25 bp, Homo sapien
accagcttcccatctgctttcaaac

SEQ ID NO: 4930962 - DNA, 25 bp, Homo sapien
tacctcatcaccagcttcccatctg

SEQ ID NO: 4930963 - DNA, 25 bp, Homo sapien
ctcatcaccagcttcccatctgctt

SEQ ID NO: 4930964 - DNA, 25 bp, Homo sapien
cagcttcccatctgctttcaaacat

SEQ ID NO: 4930965 - DNA, 25 bp, Homo sapien
ctgatgacagccttcttgcttgctg

SEQ ID NO: 4930966 - DNA, 25 bp, Homo sapien
ggagccaacagagcaactcctcttt

SEQ ID NO: 4930967 - DNA, 25 bp, Homo sapien
cattgcagtcagttgccaatgtcat

SEQ ID NO: 4930968 - DNA, 25 bp, Homo sapien
aaagccatcctgtacattgcagtca

SEQ ID NO: 4930969 - DNA, 25 bp, Homo sapien
ccgagcccatctccttttggctgcc

SEQ ID NO: 4930970 - DNA, 25 bp, Homo sapien
tatacactctctttctatggctgtg

SEQ ID NO: 4930971 - DNA, 25 bp, Homo sapien
gttgcctgtgctaatatgctaatga

SEQ ID NO: 4930972 - DNA, 25 bp, Homo sapien
cttgtccttcttccgagcccatctc

SEQ ID NO: 4930973 - DNA, 25 bp, Homo sapien
gggcagttgatgtataagtaggtac

SEQ ID NO: 4930974 - DNA, 25 bp, Homo sapien
taggtacagtttaatagggtcatgg

SEQ ID NO: 4930975 - DNA, 25 bp, Homo sapien
gcagcctcctacacaaggtcccggg

SEQ ID NO: 4930976 - DNA, 25 bp, Homo sapien
tggtgtaggtgggacttttcgtagc

SEQ ID NO: 4930977 - DNA, 25 bp, Homo sapien
tgtgcagtaactgcatgtgcctggc

SEQ ID NO: 4930978 - DNA, 25 bp, Homo sapien
gtgcagtaactgcatgtgcctggct

SEQ ID NO: 4930979 - DNA, 25 bp, Homo sapien
tagtaccacaagtcaatgggtagac

SEQ ID NO: 4930980 - DNA, 25 bp, Homo sapien
cttagtaccacaagtcaatgggtag

SEQ ID NO: 4930981 - DNA, 25 bp, Homo sapien
caagtcaatgggtagacatttttaa

SEQ ID NO: 4930982 - DNA, 25 bp, Homo sapien
taccacaagtcaatgggtagacatt

SEQ ID NO: 4930983 - DNA, 25 bp, Homo sapien
gagtaaagagcaagatgaggctcgt

SEQ ID NO: 4930984 - DNA, 25 bp, Homo sapien
ggagcctagctcatcaacattccca

SEQ ID NO: 4930985 - DNA, 25 bp, Homo sapien
ctgggagagttagggaaaatttcag

SEQ ID NO: 4930986 - DNA, 25 bp, Homo sapien
tgaggctcgtgaagaatggatggga

SEQ ID NO: 4930987 - DNA, 25 bp, Homo sapien
tgactgaggcatgtagtagaaactc

SEQ ID NO: 4930988 - DNA, 25 bp, Homo sapien
gtgactgaggcatgtagtagaaact

SEQ ID NO: 4930989 - DNA, 25 bp, Homo sapien
gtgacagctctcattatctgttgtg

SEQ ID NO: 4930990 - DNA, 25 bp, Homo sapien
tatctgttgtgaatttggggtcccc

SEQ ID NO: 4930991 - DNA, 25 bp, Homo sapien
ccctgggtagataatgggccttgga

SEQ ID NO: 4930992 - DNA, 25 bp, Homo sapien
agtcgggcagtcagccaatcaggct

SEQ ID NO: 4930993 - DNA, 25 bp, Homo sapien
cgcgtgttccgttctgagtctctag

SEQ ID NO: 4930994 - DNA, 25 bp, Homo sapien
tctcgtgggcacagttaacgtggag

SEQ ID NO: 4930995 - DNA, 25 bp, Homo sapien
gctaaagagtcttctaagcttgcac

SEQ ID NO: 4930996 - DNA, 25 bp, Homo sapien
taaaatcctgtctaagagtgtgcaa

SEQ ID NO: 4930997 - DNA, 25 bp, Homo sapien
gagataattgcctcaacacaagcca

SEQ ID NO: 4930998 - DNA, 25 bp, Homo sapien
gatgtttaaagcacctctggaaaaa

SEQ ID NO: 4930999 - DNA, 25 bp, Homo sapien
cagctgccagcgtttcaggatgctg

SEQ ID NO: 4931000 - DNA, 25 bp, Homo sapien
ccttagctggtacacgtggagtctg

SEQ ID NO: 4931001 - DNA, 25 bp, Homo sapien
aaggcttgcaggctttagggacacg

SEQ ID NO: 4931002 - DNA, 25 bp, Homo sapien
gcccacccggcaagcagttgtaaaa

SEQ ID NO: 4931003 - DNA, 25 bp, Homo sapien
gattgtgttcgggagtgtccaccac

SEQ ID NO: 4931004 - DNA, 25 bp, Homo sapien
ttctgggccagcaacctctctggct

SEQ ID NO: 4931005 - DNA, 25 bp, Homo sapien
atggtccagacccttgatattctgg

SEQ ID NO: 4931006 - DNA, 25 bp, Homo sapien
ctgactttcagggttatgtctgagg

SEQ ID NO: 4931007 - DNA, 25 bp, Homo sapien
tgtctgaggtccttgtgagatggtc

SEQ ID NO: 4931008 - DNA, 25 bp, Homo sapien
aatctcacctcgagtaaatactagg

SEQ ID NO: 4931009 - DNA, 25 bp, Homo sapien
tcagaagtctcttgatagaaagcca

SEQ ID NO: 4931010 - DNA, 25 bp, Homo sapien
cacgtacagccattcgatgtgcatc

SEQ ID NO: 4931011 - DNA, 25 bp, Homo sapien
tgggagattcgcatccacgtacagc

SEQ ID NO: 4931012 - DNA, 25 bp, Homo sapien
tgttagtgccaagtcgccaggctgg

SEQ ID NO: 4931013 - DNA, 25 bp, Homo sapien
tccttcaacgtggagagtcaacggg

SEQ ID NO: 4931014 - DNA, 25 bp, Homo sapien
actctcgtaggtttggtcggtcaca

SEQ ID NO: 4931015 - DNA, 25 bp, Homo sapien
ctgagcttcagaggtctagggcgac

SEQ ID NO: 4931016 - DNA, 25 bp, Homo sapien
agtcttgaacagtgatccccatttg

SEQ ID NO: 4931017 - DNA, 25 bp, Homo sapien
tcaccacagatgctagaactgtgaa

SEQ ID NO: 4931018 - DNA, 25 bp, Homo sapien
tatttctgttcgatttgccactgca

SEQ ID NO: 4931019 - DNA, 25 bp, Homo sapien
gaagttacatgtttccccgtgactc

SEQ ID NO: 4931020 - DNA, 25 bp, Homo sapien
ctggaccaactgatatagagggatg

SEQ ID NO: 4931021 - DNA, 25 bp, Homo sapien
ctctgagttcttcggcaggaaaggg

SEQ ID NO: 4931022 - DNA, 25 bp, Homo sapien
ctttgagcagatagaagccatttaa

SEQ ID NO: 4931023 - DNA, 25 bp, Homo sapien
agtagttggtggtatcacgggtcca

SEQ ID NO: 4931024 - DNA, 25 bp, Homo sapien
aggtgtcttcagaaagccttgatcc

SEQ ID NO: 4931025 - DNA, 25 bp, Homo sapien
tgggtgtgtcggtgccagtggtgga

SEQ ID NO: 4931026 - DNA, 25 bp, Homo sapien
ggaggtgtcttcagaaagccttgat

SEQ ID NO: 4931027 - DNA, 25 bp, Homo sapien
gaggtgtcttcagaaagccttgatc

SEQ ID NO: 4931028 - DNA, 25 bp, Homo sapien
tcaattgaatttagtgactgtctgc

SEQ ID NO: 4931029 - DNA, 25 bp, Homo sapien
aattgaatttagtgactgtctgctc

SEQ ID NO: 4931030 - DNA, 25 bp, Homo sapien
caattgaatttagtgactgtctgct

SEQ ID NO: 4931031 - DNA, 25 bp, Homo sapien
ggccatttccgtcagagcaaacaga

SEQ ID NO: 4931032 - DNA, 25 bp, Homo sapien
caggccatgctgcagcttcgtgcag

SEQ ID NO: 4931033 - DNA, 25 bp, Homo sapien
gctgggctctcctaccgtcattaag

SEQ ID NO: 4931034 - DNA, 25 bp, Homo sapien
gggtcctgattgctttgaaggccat

SEQ ID NO: 4931035 - DNA, 25 bp, Homo sapien
ttgcagcgcctgacacataacaggg

SEQ ID NO: 4931036 - DNA, 25 bp, Homo sapien
tcctcactgatggttgggttccacg

SEQ ID NO: 4931037 - DNA, 25 bp, Homo sapien
tcccaaatcgagcacgtttctggct

SEQ ID NO: 4931038 - DNA, 25 bp, Homo sapien
gatgagcattcgagcgcctgagagt

SEQ ID NO: 4931039 - DNA, 25 bp, Homo sapien
agatggaagcaggtattataattct

SEQ ID NO: 4931040 - DNA, 25 bp, Homo sapien
tcccacctgcccttcaaatgggccc

SEQ ID NO: 4931041 - DNA, 25 bp, Homo sapien
gatggaagcaggtattataattctg

SEQ ID NO: 4931042 - DNA, 25 bp, Homo sapien
gagatggaagcaggtattataattc

SEQ ID NO: 4931043 - DNA, 25 bp, Homo sapien
aggactgtgatcatggcagggtcta

SEQ ID NO: 4931044 - DNA, 25 bp, Homo sapien
aagtgccttatggatgtccatgtgg

SEQ ID NO: 4931045 - DNA, 25 bp, Homo sapien
gtggagtgaaaaatacttccctgct

SEQ ID NO: 4931046 - DNA, 25 bp, Homo sapien
ctccagtgggatagcgtgattgtgc

SEQ ID NO: 4931047 - DNA, 25 bp, Homo sapien
tacgtgtcgggcattgagattttca

SEQ ID NO: 4931048 - DNA, 25 bp, Homo sapien
ccagcagaaacgcttttaaaggtga

SEQ ID NO: 4931049 - DNA, 25 bp, Homo sapien
gattttcaagtaggatctggtccct

SEQ ID NO: 4931050 - DNA, 25 bp, Homo sapien
tgtgttgccgctgcttccaaagcca

SEQ ID NO: 4931051 - DNA, 25 bp, Homo sapien
ggtcattaacagcaaccacatggtt

SEQ ID NO: 4931052 - DNA, 25 bp, Homo sapien
catggttcttggtaggtctcttgga

SEQ ID NO: 4931053 - DNA, 25 bp, Homo sapien
catctgaaggaatgtggttgaggca

SEQ ID NO: 4931054 - DNA, 25 bp, Homo sapien
gcagttgtgctttatgctacgataa

SEQ ID NO: 4931055 - DNA, 25 bp, Homo sapien
ggaaccgctgttacatagatactga

SEQ ID NO: 4931056 - DNA, 25 bp, Homo sapien
tcatggaaccgctgttacatagata

SEQ ID NO: 4931057 - DNA, 25 bp, Homo sapien
ccgctgttacatagatactgattcc

SEQ ID NO: 4931058 - DNA, 25 bp, Homo sapien
gctgttacatagatactgattccag

SEQ ID NO: 4931059 - DNA, 25 bp, Homo sapien
gaggatgatgagtgatgcagggagt

SEQ ID NO: 4931060 - DNA, 25 bp, Homo sapien
gaaggaggaagcggatgggttgagg

SEQ ID NO: 4931061 - DNA, 25 bp, Homo sapien
aggaggaagcggatgggttgaggat

SEQ ID NO: 4931062 - DNA, 25 bp, Homo sapien
aggatgatgagtgatgcagggagtt

SEQ ID NO: 4931063 - DNA, 25 bp, Homo sapien
gactgcaggatatccaagagggcat

SEQ ID NO: 4931064 - DNA, 25 bp, Homo sapien
aaagggtgagttagttgtggccaca

SEQ ID NO: 4931065 - DNA, 25 bp, Homo sapien
gaggagatgcagatttggaggaaaa

SEQ ID NO: 4931066 - DNA, 25 bp, Homo sapien
gccacacattgatctggggactgca

SEQ ID NO: 4931067 - DNA, 25 bp, Homo sapien
cagagtcgtgtgaattcaaacctcc

SEQ ID NO: 4931068 - DNA, 25 bp, Homo sapien
gggtggtcctccgattctccacgct

SEQ ID NO: 4931069 - DNA, 25 bp, Homo sapien
gctgctgattgggtggtcctccgat

SEQ ID NO: 4931070 - DNA, 25 bp, Homo sapien
cccctgcttcagagtcgtgtgaatt

SEQ ID NO: 4931071 - DNA, 25 bp, Homo sapien
atgtgacttccaggcagcgttgagc

SEQ ID NO: 4931072 - DNA, 25 bp, Homo sapien
agccaggtgtggattgccagccgtc

SEQ ID NO: 4931073 - DNA, 25 bp, Homo sapien
gagcgcagagcttgtatgattgcca

SEQ ID NO: 4931074 - DNA, 25 bp, Homo sapien
gcatcaccaggcagtaaatggcgta

SEQ ID NO: 4931075 - DNA, 25 bp, Homo sapien
tgaggtgtccaaggctagccagatg

SEQ ID NO: 4931076 - DNA, 25 bp, Homo sapien
tgttggccatgtctagtcagtgatg

SEQ ID NO: 4931077 - DNA, 25 bp, Homo sapien
agatgctgtttccaatgacctcaca

SEQ ID NO: 4931078 - DNA, 25 bp, Homo sapien
tggtgtcagtcccacccgtcttggg

SEQ ID NO: 4931079 - DNA, 25 bp, Homo sapien
caaaggcttgaaagtcttggaaagc

SEQ ID NO: 4931080 - DNA, 25 bp, Homo sapien
gagggtgcctgctttctgaatatcc

SEQ ID NO: 4931081 - DNA, 25 bp, Homo sapien
gaatatccctgccttgatctcagcc

SEQ ID NO: 4931082 - DNA, 25 bp, Homo sapien
ccagccggccaaaggatgcttcctt

SEQ ID NO: 4931083 - DNA, 25 bp, Homo sapien
gtgggcggatgacccagaagaggct

SEQ ID NO: 4931084 - DNA, 25 bp, Homo sapien
gggcggatgacccagaagaggctgc

SEQ ID NO: 4931085 - DNA, 25 bp, Homo sapien
tgtgggcggatgacccagaagaggc

SEQ ID NO: 4931086 - DNA, 25 bp, Homo sapien
tgggcggatgacccagaagaggctg

SEQ ID NO: 4931087 - DNA, 25 bp, Homo sapien
ttgggcatagggctggtcccgaaaa

SEQ ID NO: 4931088 - DNA, 25 bp, Homo sapien
ctgcgctgcagagcaactttgtagg

SEQ ID NO: 4931089 - DNA, 25 bp, Homo sapien
cagagcaactttgtagggagaagtg

SEQ ID NO: 4931090 - DNA, 25 bp, Homo sapien
catagggctggtcccgaaaaccaga

SEQ ID NO: 4931091 - DNA, 25 bp, Homo sapien
cctttgccatggcagtattcgttca

SEQ ID NO: 4931092 - DNA, 25 bp, Homo sapien
tggcccctttgccatggcagtattc

SEQ ID NO: 4931093 - DNA, 25 bp, Homo sapien
cagtattcgttcatgagagcagcag

SEQ ID NO: 4931094 - DNA, 25 bp, Homo sapien
catggcagtattcgttcatgagagc

SEQ ID NO: 4931095 - DNA, 25 bp, Homo sapien
tggaaccctccctaagtgcaaggga

SEQ ID NO: 4931096 - DNA, 25 bp, Homo sapien
ctggaaccctccctaagtgcaaggg

SEQ ID NO: 4931097 - DNA, 25 bp, Homo sapien
gaggggtccctcagagtaggccaac

SEQ ID NO: 4931098 - DNA, 25 bp, Homo sapien
cctcatcaccccttcccttgagggc

SEQ ID NO: 4931099 - DNA, 25 bp, Homo sapien
gtccctcagagtaggccaactccat

SEQ ID NO: 4931100 - DNA, 25 bp, Homo sapien
gggtccctcagagtaggccaactcc

SEQ ID NO: 4931101 - DNA, 25 bp, Homo sapien
tggagcagttcaacttccccttttc

SEQ ID NO: 4931102 - DNA, 25 bp, Homo sapien
tcctggagcagttcaacttcccctt

SEQ ID NO: 4931103 - DNA, 25 bp, Homo sapien
acctcctggagcagttcaacttccc

SEQ ID NO: 4931104 - DNA, 25 bp, Homo sapien
gagcagttcaacttccccttttctg

SEQ ID NO: 4931105 - DNA, 25 bp, Homo sapien
cggtctgtggcggggggctcttggt

SEQ ID NO: 4931106 - DNA, 25 bp, Homo sapien
ggctcttggtggagccgccacagct

SEQ ID NO: 4931107 - DNA, 25 bp, Homo sapien
tggagccgccacagctctcagtgtg

SEQ ID NO: 4931108 - DNA, 25 bp, Homo sapien
ggtggagccgccacagctctcagtg

SEQ ID NO: 4931109 - DNA, 25 bp, Homo sapien
gatgggcctcctgcttgcggggcag

SEQ ID NO: 4931110 - DNA, 25 bp, Homo sapien
gggcaggagcttcttgcatccattt

SEQ ID NO: 4931111 - DNA, 25 bp, Homo sapien
ttgcggggcaggagcttcttgcatc

SEQ ID NO: 4931112 - DNA, 25 bp, Homo sapien
gcaggagcttcttgcatccatttcc

SEQ ID NO: 4931113 - DNA, 25 bp, Homo sapien
agccaggcactggtatggggtgtta

SEQ ID NO: 4931114 - DNA, 25 bp, Homo sapien
caagccaggcactggtatggggtgt

SEQ ID NO: 4931115 - DNA, 25 bp, Homo sapien
caggcactggtatggggtgttaggg

SEQ ID NO: 4931116 - DNA, 25 bp, Homo sapien
ccaagccaggcactggtatggggtg

SEQ ID NO: 4931117 - DNA, 25 bp, Homo sapien
ctaatcaacgtcaaggagaaatacc

SEQ ID NO: 4931118 - DNA, 25 bp, Homo sapien
ccctggccttgatctcggtcttgaa

SEQ ID NO: 4931119 - DNA, 25 bp, Homo sapien
tgtgtctagagctggcgtgtcccta

SEQ ID NO: 4931120 - DNA, 25 bp, Homo sapien
cgtgtccctatggtgtgggcagccc

SEQ ID NO: 4931121 - DNA, 25 bp, Homo sapien
gcagcgtaaacacctccttgcagct

SEQ ID NO: 4931122 - DNA, 25 bp, Homo sapien
taataggaacgtctgtgtgaccaac

SEQ ID NO: 4931123 - DNA, 25 bp, Homo sapien
ccaacaggaggcagcgtaaacacct

SEQ ID NO: 4931124 - DNA, 25 bp, Homo sapien
ccagtgtggtcactaataggaacgt

SEQ ID NO: 4931125 - DNA, 25 bp, Homo sapien
tcacttatatctggcatactgttat

SEQ ID NO: 4931126 - DNA, 25 bp, Homo sapien
cagctgttgctccccgaaatgaatt

SEQ ID NO: 4931127 - DNA, 25 bp, Homo sapien
gggtgggttggtatcacttatatct

SEQ ID NO: 4931128 - DNA, 25 bp, Homo sapien
ggttggtatcacttatatctggcat

SEQ ID NO: 4931129 - DNA, 25 bp, Homo sapien
tctgctgttccctggttctggacct

SEQ ID NO: 4931130 - DNA, 25 bp, Homo sapien
ctgccccacggaggaacagaaatac

SEQ ID NO: 4931131 - DNA, 25 bp, Homo sapien
tgccccacggaggaacagaaataca

SEQ ID NO: 4931132 - DNA, 25 bp, Homo sapien
aaccagggcttctgagccgagctca

SEQ ID NO: 4931133 - DNA, 25 bp, Homo sapien
tcagcgctgaggctggctttcaggc

SEQ ID NO: 4931134 - DNA, 25 bp, Homo sapien
cagtcacactgaagtggctgatgcc

SEQ ID NO: 4931135 - DNA, 25 bp, Homo sapien
ccatttttgagctgagtccctacag

SEQ ID NO: 4931136 - DNA, 25 bp, Homo sapien
tgtgggaccctgaacgagtgttgtc

SEQ ID NO: 4931137 - DNA, 25 bp, Homo sapien
aatgcgggtagaatttgaggcccct

SEQ ID NO: 4931138 - DNA, 25 bp, Homo sapien
tgctgtggctcaaactctggaaacc

SEQ ID NO: 4931139 - DNA, 25 bp, Homo sapien
tggaactgggtgacaattccctgct

SEQ ID NO: 4931140 - DNA, 25 bp, Homo sapien
gctctctatcgtagtatgcgaatca

SEQ ID NO: 4931141 - DNA, 25 bp, Homo sapien
cctctgctctctatcgtagtatgcg

SEQ ID NO: 4931142 - DNA, 25 bp, Homo sapien
tatgcgaatcacatctttgttgaat

SEQ ID NO: 4931143 - DNA, 25 bp, Homo sapien
cgtagtatgcgaatcacatctttgt

SEQ ID NO: 4931144 - DNA, 25 bp, Homo sapien
ccctgtggccagagttctcgtttgt

SEQ ID NO: 4931145 - DNA, 25 bp, Homo sapien
tgcaggccagaacaagctgccctgt

SEQ ID NO: 4931146 - DNA, 25 bp, Homo sapien
accttgcaaaattgcaagcctgcag

SEQ ID NO: 4931147 - DNA, 25 bp, Homo sapien
tgcaaaattgcaagcctgcaggcca

SEQ ID NO: 4931148 - DNA, 25 bp, Homo sapien
tgagccaacttgatttgaggattcc

SEQ ID NO: 4931149 - DNA, 25 bp, Homo sapien
tttctgcaagtaaaagaccatggat

SEQ ID NO: 4931150 - DNA, 25 bp, Homo sapien
ggcacaggaacacacgagagctgaa

SEQ ID NO: 4931151 - DNA, 25 bp, Homo sapien
agtaaaagaccatggatctggagct

SEQ ID NO: 4931152 - DNA, 25 bp, Homo sapien
cttggttagagatgcgggtagggcc

SEQ ID NO: 4931153 - DNA, 25 bp, Homo sapien
tccttggttagagatgccgcctggg

SEQ ID NO: 4931154 - DNA, 25 bp, Homo sapien
ttgggcctgcggatgggctcctcct

SEQ ID NO: 4931155 - DNA, 25 bp, Homo sapien
ttcgttagagatgggacttgggcct

SEQ ID NO: 4931156 - DNA, 25 bp, Homo sapien
tcagaggtgtctcggctgttctcca

SEQ ID NO: 4931157 - DNA, 25 bp, Homo sapien
tacgaggtaattctcccgatgcgag

SEQ ID NO: 4931158 - DNA, 25 bp, Homo sapien
tggtcgcctatagcaactcctggca

SEQ ID NO: 4931159 - DNA, 25 bp, Homo sapien
caggaacgctgtactgctttgcagg

SEQ ID NO: 4931160 - DNA, 25 bp, Homo sapien
tcacttgtacaagggtcgcttgggc

SEQ ID NO: 4931161 - DNA, 25 bp, Homo sapien
tacaagggtcgcttgggcagtgcca

SEQ ID NO: 4931162 - DNA, 25 bp, Homo sapien
ggcagtgccagaagcttgtacaagg

SEQ ID NO: 4931163 - DNA, 25 bp, Homo sapien
cagaagcttgtacaaggtagagtag

SEQ ID NO: 4931164 - DNA, 25 bp, Homo sapien
cctgcaggcattccatccatgtttg

SEQ ID NO: 4931165 - DNA, 25 bp, Homo sapien
gcaggcattccatccatgtttgttt

SEQ ID NO: 4931166 - DNA, 25 bp, Homo sapien
ttagggacctgcaggcattccatcc

SEQ ID NO: 4931167 - DNA, 25 bp, Homo sapien
tagggacctgcaggcattccatcca

SEQ ID NO: 4931168 - DNA, 25 bp, Homo sapien
tgcatagaccttaagtgtagagttt

SEQ ID NO: 4931169 - DNA, 25 bp, Homo sapien
tctcttgccccttactatcccatcc

SEQ ID NO: 4931170 - DNA, 25 bp, Homo sapien
tagagtttgaccactcacataaccc

SEQ ID NO: 4931171 - DNA, 25 bp, Homo sapien
atgctgaaatgcatagaccttaagt

SEQ ID NO: 4931172 - DNA, 25 bp, Homo sapien
gctttatcttccgagcctaccagtt

SEQ ID NO: 4931173 - DNA, 25 bp, Homo sapien
catctactgaaacatctgtagtgtg

SEQ ID NO: 4931174 - DNA, 25 bp, Homo sapien
gagcctaccagttcatctactgaaa

SEQ ID NO: 4931175 - DNA, 25 bp, Homo sapien
gttcatctactgaaacatctgtagt

SEQ ID NO: 4931176 - DNA, 25 bp, Homo sapien
tgtgcaaatcacatagtaaggccgt

SEQ ID NO: 4931177 - DNA, 25 bp, Homo sapien
cagtttccagtaataataggtgctc

SEQ ID NO: 4931178 - DNA, 25 bp, Homo sapien
ctaggaaccatcaccgaggcagctt

SEQ ID NO: 4931179 - DNA, 25 bp, Homo sapien
cacatactagcttcaagaggccaac

SEQ ID NO: 4931180 - DNA, 25 bp, Homo sapien
actcccatgtgcatgaagtcttggg

SEQ ID NO: 4931181 - DNA, 25 bp, Homo sapien
gaagtcttgggtccatgatgttctg

SEQ ID NO: 4931182 - DNA, 25 bp, Homo sapien
agttcttgcaatcttcactcccatg

SEQ ID NO: 4931183 - DNA, 25 bp, Homo sapien
gatgttctgccacagtttacaatga

SEQ ID NO: 4931184 - DNA, 25 bp, Homo sapien
cagctcagggcacaacgttgtcaca

SEQ ID NO: 4931185 - DNA, 25 bp, Homo sapien
ggatgagctcatgtttccaggcccc

SEQ ID NO: 4931186 - DNA, 25 bp, Homo sapien
taaacacacgtagggctggcaccct

SEQ ID NO: 4931187 - DNA, 25 bp, Homo sapien
ccctggacaagtggatgatagagcc

SEQ ID NO: 4931188 - DNA, 25 bp, Homo sapien
tgctcagcagcacgctgactggttg

SEQ ID NO: 4931189 - DNA, 25 bp, Homo sapien
gcacgctgactggttgctcagcaga

SEQ ID NO: 4931190 - DNA, 25 bp, Homo sapien
ccgggtgctcagcagcacgctgact

SEQ ID NO: 4931191 - DNA, 25 bp, Homo sapien
agcagcacgctgactggttgctcag

SEQ ID NO: 4931192 - DNA, 25 bp, Homo sapien
ttgaaaggcatgcatgagaattctg

SEQ ID NO: 4931193 - DNA, 25 bp, Homo sapien
ctgtgagctcctcggtttgaaaggc

SEQ ID NO: 4931194 - DNA, 25 bp, Homo sapien
tgagaattctgttaagacaggaatc

SEQ ID NO: 4931195 - DNA, 25 bp, Homo sapien
gcctgtgagctcctcggtttgaaag

SEQ ID NO: 4931196 - DNA, 25 bp, Homo sapien
tttctcaaggcctgtgtactatttt

SEQ ID NO: 4931197 - DNA, 25 bp, Homo sapien
cagggattggagcagtgttcacgtc

SEQ ID NO: 4931198 - DNA, 25 bp, Homo sapien
agctcacaggaatccctgttactcc

SEQ ID NO: 4931199 - DNA, 25 bp, Homo sapien
gcgatgtgataagagggaggtccca

SEQ ID NO: 4931200 - DNA, 25 bp, Homo sapien
ttctctctgagccagttactgcggg

SEQ ID NO: 4931201 - DNA, 25 bp, Homo sapien
ttcgtcaagttgttcctcatgcagg

SEQ ID NO: 4931202 - DNA, 25 bp, Homo sapien
cggagtacggtctgggcatttattc

SEQ ID NO: 4931203 - DNA, 25 bp, Homo sapien
tactgcgggaacttcataaatgtgc

SEQ ID NO: 4931204 - DNA, 25 bp, Homo sapien
agtgtgcccaggaaacgggcaggaa

SEQ ID NO: 4931205 - DNA, 25 bp, Homo sapien
tctgtggaggttacctccagcccag

SEQ ID NO: 4931206 - DNA, 25 bp, Homo sapien
tctgagggagaaagtagttaaacga

SEQ ID NO: 4931207 - DNA, 25 bp, Homo sapien
cgagccataacgatatgtgggatgg

SEQ ID NO: 4931208 - DNA, 25 bp, Homo sapien
ctagctaggcaagggaggagtacgt

SEQ ID NO: 4931209 - DNA, 25 bp, Homo sapien
tacgttgggcctttgccttgtcact

SEQ ID NO: 4931210 - DNA, 25 bp, Homo sapien
aggagtacgttgggcctttgccttg

SEQ ID NO: 4931211 - DNA, 25 bp, Homo sapien
taggcaagggaggagtacgttgggc

SEQ ID NO: 4931212 - DNA, 25 bp, Homo sapien
gatgcagataactgcaagctgcagg

SEQ ID NO: 4931213 - DNA, 25 bp, Homo sapien
ttaaaaggcgagagtcatgggagat

SEQ ID NO: 4931214 - DNA, 25 bp, Homo sapien
gcaactctgtagcatccaagggagg

SEQ ID NO: 4931215 - DNA, 25 bp, Homo sapien
gtgccacgtgcacctttaaaaggcg

SEQ ID NO: 4931216 - DNA, 25 bp, Homo sapien
cacagcctcataagatttagcagcc

SEQ ID NO: 4931217 - DNA, 25 bp, Homo sapien
gcctcataagatttagcagccctgg

SEQ ID NO: 4931218 - DNA, 25 bp, Homo sapien
aagcagcgggcacagcctcataaga

SEQ ID NO: 4931219 - DNA, 25 bp, Homo sapien
gcgggcacagcctcataagatttag

SEQ ID NO: 4931220 - DNA, 25 bp, Homo sapien
tcttccccaggagcggttgttgctg

SEQ ID NO: 4931221 - DNA, 25 bp, Homo sapien
ctcattttggccgtggaggacttgg

SEQ ID NO: 4931222 - DNA, 25 bp, Homo sapien
gtcacctaaagcgtgatattggctc

SEQ ID NO: 4931223 - DNA, 25 bp, Homo sapien
gttgctggactctggcagctctagg

SEQ ID NO: 4931224 - DNA, 25 bp, Homo sapien
cagagtatcctgaagtggtggtggg

SEQ ID NO: 4931225 - DNA, 25 bp, Homo sapien
aggagtatcctgaggttgtgaaagc

SEQ ID NO: 4931226 - DNA, 25 bp, Homo sapien
tgtgaaagcagcctaaagttgccag

SEQ ID NO: 4931227 - DNA, 25 bp, Homo sapien
tcacaagggtataggaacagcctga

SEQ ID NO: 4931228 - DNA, 25 bp, Homo sapien
gccagctggccagcaagtagttcat

SEQ ID NO: 4931229 - DNA, 25 bp, Homo sapien
gacaggagcatgtcccctgtcacca

SEQ ID NO: 4931230 - DNA, 25 bp, Homo sapien
cagtgacagcgggacattgccaata

SEQ ID NO: 4931231 - DNA, 25 bp, Homo sapien
attcttctctagtgccggaagtata

SEQ ID NO: 4931232 - DNA, 25 bp, Homo sapien
tgccggaagtataccaggagacagg

SEQ ID NO: 4931233 - DNA, 25 bp, Homo sapien
agagaaaccagcatcaccaggaggc

SEQ ID NO: 4931234 - DNA, 25 bp, Homo sapien
ctagggagagaaaccagcatcacca

SEQ ID NO: 4931235 - DNA, 25 bp, Homo sapien
cactgccactggcagctccagcccc

SEQ ID NO: 4931236 - DNA, 25 bp, Homo sapien
atcaccaggaggcagccactgccac

SEQ ID NO: 4931237 - DNA, 25 bp, Homo sapien
ttgcaggcacaataaccaaagccac

SEQ ID NO: 4931238 - DNA, 25 bp, Homo sapien
aagggttgaagaaatcgatctctgt

SEQ ID NO: 4931239 - DNA, 25 bp, Homo sapien
cacaatgccgatctgaattgccaag

SEQ ID NO: 4931240 - DNA, 25 bp, Homo sapien
cgatctctgttgagcttgcaggcac

SEQ ID NO: 4931241 - DNA, 25 bp, Homo sapien
gaatgtgactgagtatactgccatg

SEQ ID NO: 4931242 - DNA, 25 bp, Homo sapien
cagttggcccatttgagctgtatac

SEQ ID NO: 4931243 - DNA, 25 bp, Homo sapien
cacaggctgtgcgactggaatgtga

SEQ ID NO: 4931244 - DNA, 25 bp, Homo sapien
gccttcctactagcagtgcctgcgg

SEQ ID NO: 4931245 - DNA, 25 bp, Homo sapien
aattgaaaagtgaaatgccctggca

SEQ ID NO: 4931246 - DNA, 25 bp, Homo sapien
taaacagaatatgccctggagtaac

SEQ ID NO: 4931247 - DNA, 25 bp, Homo sapien
taaaagtagttgtacagcaccacac

SEQ ID NO: 4931248 - DNA, 25 bp, Homo sapien
caggtttggaagcagacacgcatca

SEQ ID NO: 4931249 - DNA, 25 bp, Homo sapien
tggccactagcctgaacagactctc

SEQ ID NO: 4931250 - DNA, 25 bp, Homo sapien
ctgaacagactctccaatatagcca

SEQ ID NO: 4931251 - DNA, 25 bp, Homo sapien
tagcctgaacagactctccaatata

SEQ ID NO: 4931252 - DNA, 25 bp, Homo sapien
ctctggccactagcctgaacagact

SEQ ID NO: 4931253 - DNA, 25 bp, Homo sapien
ctgaggcacacaattccaagaccac

SEQ ID NO: 4931254 - DNA, 25 bp, Homo sapien
tccaagaccactgagttaagcccac

SEQ ID NO: 4931255 - DNA, 25 bp, Homo sapien
ctaagctgattccctggttacccct

SEQ ID NO: 4931256 - DNA, 25 bp, Homo sapien
ctgctaagctgattccctggttacc

SEQ ID NO: 4931257 - DNA, 25 bp, Homo sapien
tgctaagctgattccctggttaccc

SEQ ID NO: 4931258 - DNA, 25 bp, Homo sapien
gctaagctgattccctggttacccc

SEQ ID NO: 4931259 - DNA, 25 bp, Homo sapien
atttttcaaactcattctcctcctc

SEQ ID NO: 4931260 - DNA, 25 bp, Homo sapien
ttatttttcaaactcattctcctcc

SEQ ID NO: 4931261 - DNA, 25 bp, Homo sapien
aactcattctcctcctcctgttgag

SEQ ID NO: 4931262 - DNA, 25 bp, Homo sapien
ctcattctcctcctcctgttgagac

SEQ ID NO: 4931263 - DNA, 25 bp, Homo sapien
taaatggcactaggacaattgcatg

SEQ ID NO: 4931264 - DNA, 25 bp, Homo sapien
tacatgagaacttgatacgtgacac

SEQ ID NO: 4931265 - DNA, 25 bp, Homo sapien
tgatgccaggatagacatgtaaatc

SEQ ID NO: 4931266 - DNA, 25 bp, Homo sapien
ctatcataaaagacagtagggctta

SEQ ID NO: 4931267 - DNA, 25 bp, Homo sapien
cacaatcccataactctaaacttac

SEQ ID NO: 4931268 - DNA, 25 bp, Homo sapien
gccagaatagtgaactcagcagctg

SEQ ID NO: 4931269 - DNA, 25 bp, Homo sapien
aaaggaaatcccagctgccagaagt

SEQ ID NO: 4931270 - DNA, 25 bp, Homo sapien
tataggttacttattctgactaaca

SEQ ID NO: 4931271 - DNA, 25 bp, Homo sapien
tcatttgtcatagattggaggattt

SEQ ID NO: 4931272 - DNA, 25 bp, Homo sapien
catttgtcatagattggaggatttc

SEQ ID NO: 4931273 - DNA, 25 bp, Homo sapien
ctgggcatattgtcactgagcaaaa

SEQ ID NO: 4931274 - DNA, 25 bp, Homo sapien
catttgccacaactgcgtaacatgg

SEQ ID NO: 4931275 - DNA, 25 bp, Homo sapien
tggtgtaacagagaactctaagaca

SEQ ID NO: 4931276 - DNA, 25 bp, Homo sapien
catggctatcttttagctgtaagag

SEQ ID NO: 4931277 - DNA, 25 bp, Homo sapien
tcagccgtattctgtgagtgaactt

SEQ ID NO: 4931278 - DNA, 25 bp, Homo sapien
cttctaatgcgctgatagagtgctc

SEQ ID NO: 4931279 - DNA, 25 bp, Homo sapien
ctgtgagtgaacttctaatgcgctg

SEQ ID NO: 4931280 - DNA, 25 bp, Homo sapien
aatgcgctgatagagtgctccaggg

SEQ ID NO: 4931281 - DNA, 25 bp, Homo sapien
acgcgcgcgcacagccgctctccct

SEQ ID NO: 4931282 - DNA, 25 bp, Homo sapien
aggtcaaactaaaggcgagggagca

SEQ ID NO: 4931283 - DNA, 25 bp, Homo sapien
tccctcagacacactggagggaaag

SEQ ID NO: 4931284 - DNA, 25 bp, Homo sapien
gcagagagaccggagggagccgctg

SEQ ID NO: 4931285 - DNA, 25 bp, Homo sapien
tcctccgagatttccctcaactgcc

SEQ ID NO: 4931286 - DNA, 25 bp, Homo sapien
ttgatcgcaggtaacctcctccgag

SEQ ID NO: 4931287 - DNA, 25 bp, Homo sapien
ctacgcagccccagtttgatcgcag

SEQ ID NO: 4931288 - DNA, 25 bp, Homo sapien
tcctcgcttcactggcgtccaaagc

SEQ ID NO: 4931289 - DNA, 25 bp, Homo sapien
cttattgctcgttcagatgcaaatt

SEQ ID NO: 4931290 - DNA, 25 bp, Homo sapien
gctcgttcagatgcaaattcagaag

SEQ ID NO: 4931291 - DNA, 25 bp, Homo sapien
aagctgaacaactgccctccaaaag

SEQ ID NO: 4931292 - DNA, 25 bp, Homo sapien
tgcaccaaggcccttatgtccagct

SEQ ID NO: 4931293 - DNA, 25 bp, Homo sapien
ttagagacgtggaggacctggagct

SEQ ID NO: 4931294 - DNA, 25 bp, Homo sapien
tgctgtttacaccttaaccaaaatg

SEQ ID NO: 4931295 - DNA, 25 bp, Homo sapien
gcttaatgtcttatgctactgccaa

SEQ ID NO: 4931296 - DNA, 25 bp, Homo sapien
tagatccatagtggcagctgttgaa

SEQ ID NO: 4931297 - DNA, 25 bp, Homo sapien
gccttctttcactgcacgagtgtga

SEQ ID NO: 4931298 - DNA, 25 bp, Homo sapien
ggaaagctctcatcctagatccata

SEQ ID NO: 4931299 - DNA, 25 bp, Homo sapien
gtataaatactctcaccgtggccaa

SEQ ID NO: 4931300 - DNA, 25 bp, Homo sapien
taagttgacttaggcctgttccaca

SEQ ID NO: 4931301 - DNA, 25 bp, Homo sapien
gaagaacccctgcagtcttgctgtg

SEQ ID NO: 4931302 - DNA, 25 bp, Homo sapien
gagccactatgagcatgctacagca

SEQ ID NO: 4931303 - DNA, 25 bp, Homo sapien
aataccttctcacagggagggccac

SEQ ID NO: 4931304 - DNA, 25 bp, Homo sapien
tctgtggatcctgagatgatcttca

SEQ ID NO: 4931305 - DNA, 25 bp, Homo sapien
gatcttcacacctagagggaaccat

SEQ ID NO: 4931306 - DNA, 25 bp, Homo sapien
catgggccaggcactacattatgtg

SEQ ID NO: 4931307 - DNA, 25 bp, Homo sapien
taaagagacacagagtcaatgacag

SEQ ID NO: 4931308 - DNA, 25 bp, Homo sapien
gaaaccttggtactaggctggacta

SEQ ID NO: 4931309 - DNA, 25 bp, Homo sapien
gaatgacgcattagaagcctgggct

SEQ ID NO: 4931310 - DNA, 25 bp, Homo sapien
tgtctaagtagaggagcagcctgca

SEQ ID NO: 4931311 - DNA, 25 bp, Homo sapien
cagtcaagggaatggaagcagaccc

SEQ ID NO: 4931312 - DNA, 25 bp, Homo sapien
tgaacccagggagtccaacatcaga

SEQ ID NO: 4931313 - DNA, 25 bp, Homo sapien
catagctggtcaaggttagagtcca

SEQ ID NO: 4931314 - DNA, 25 bp, Homo sapien
tactgagtgcttacttcttgctggg

SEQ ID NO: 4931315 - DNA, 25 bp, Homo sapien
tgagaaaaacgatgcttacagagat

SEQ ID NO: 4931316 - DNA, 25 bp, Homo sapien
gctggatagggtcctggcgatattt

SEQ ID NO: 4931317 - DNA, 25 bp, Homo sapien
ggtcctggcgatatttatcatctgt

SEQ ID NO: 4931318 - DNA, 25 bp, Homo sapien
gactccctttgccatccctccaagt

SEQ ID NO: 4931319 - DNA, 25 bp, Homo sapien
aagtccgacaaaccaccgctgacac

SEQ ID NO: 4931320 - DNA, 25 bp, Homo sapien
tggggtctagtgagggcttcctggt

SEQ ID NO: 4931321 - DNA, 25 bp, Homo sapien
tgaggaatccaagttcgaggtgctg

SEQ ID NO: 4931322 - DNA, 25 bp, Homo sapien
gaatccaagttcgaggtgctggcag

SEQ ID NO: 4931323 - DNA, 25 bp, Homo sapien
actgaggaatccaagttcgaggtgc

SEQ ID NO: 4931324 - DNA, 25 bp, Homo sapien
aaatacaacataccactacattggg

SEQ ID NO: 4931325 - DNA, 25 bp, Homo sapien
acaaggcagattgttctccgagaga

SEQ ID NO: 4931326 - DNA, 25 bp, Homo sapien
gtagggaaagcctcagctatgcagg

SEQ ID NO: 4931327 - DNA, 25 bp, Homo sapien
tgccttctccctaggagtagggaaa

SEQ ID NO: 4931328 - DNA, 25 bp, Homo sapien
ggtggatatccccagttggccaatg

SEQ ID NO: 4931329 - DNA, 25 bp, Homo sapien
ttggatcaaagctgcaagacccttg

SEQ ID NO: 4931330 - DNA, 25 bp, Homo sapien
tcaggagcctctccgtttacatggc

SEQ ID NO: 4931331 - DNA, 25 bp, Homo sapien
gaaagagagcggcaacttgggcctt

SEQ ID NO: 4931332 - DNA, 25 bp, Homo sapien
ggccccgccataggttcatcagtct

SEQ ID NO: 4931333 - DNA, 25 bp, Homo sapien
cataggttcatcagtctccagttcc

SEQ ID NO: 4931334 - DNA, 25 bp, Homo sapien
gttccctttctagctggcatatgtg

SEQ ID NO: 4931335 - DNA, 25 bp, Homo sapien
tctagctggcatatgtgagcaggac

SEQ ID NO: 4931336 - DNA, 25 bp, Homo sapien
agacctggattcacaaagaggtcat

SEQ ID NO: 4931337 - DNA, 25 bp, Homo sapien
gcaagaatatgccagacttgggacc

SEQ ID NO: 4931338 - DNA, 25 bp, Homo sapien
ggtagcaggagcaaggtagccaaat

SEQ ID NO: 4931339 - DNA, 25 bp, Homo sapien
ttgggacccactggcagaggtagca

SEQ ID NO: 4931340 - DNA, 25 bp, Homo sapien
caaagtcagacgaaagagagcatgg

SEQ ID NO: 4931341 - DNA, 25 bp, Homo sapien
gagctgtagcgggtaggtcatctac

SEQ ID NO: 4931342 - DNA, 25 bp, Homo sapien
ttggtggagctgtagcgggtaggtc

SEQ ID NO: 4931343 - DNA, 25 bp, Homo sapien
catggaacagcatgcttggtggagc

SEQ ID NO: 4931344 - DNA, 25 bp, Homo sapien
tcatggggtttcttgatggtgggat

SEQ ID NO: 4931345 - DNA, 25 bp, Homo sapien
catgtgatgtgaggtttttacagtc

SEQ ID NO: 4931346 - DNA, 25 bp, Homo sapien
tctggtctatcaaggctgccgtggc

SEQ ID NO: 4931347 - DNA, 25 bp, Homo sapien
tcaagtactttagggtccatttgaa

SEQ ID NO: 4931348 - DNA, 25 bp, Homo sapien
ccacacttcccctgaacctggagat

SEQ ID NO: 4931349 - DNA, 25 bp, Homo sapien
catgaaagcgtctgaagcaggacag

SEQ ID NO: 4931350 - DNA, 25 bp, Homo sapien
tcatgaaagcgtctgaagcaggaca

SEQ ID NO: 4931351 - DNA, 25 bp, Homo sapien
atgaaagcgtctgaagcaggacagc

SEQ ID NO: 4931352 - DNA, 25 bp, Homo sapien
gctgcagatgtacgctttcaaaccc

SEQ ID NO: 4931353 - DNA, 25 bp, Homo sapien
agctgcagatgtacgctttcaaacc

SEQ ID NO: 4931354 - DNA, 25 bp, Homo sapien
cagatgtacgctttcaaacccacca

SEQ ID NO: 4931355 - DNA, 25 bp, Homo sapien
tgcagatgtacgctttcaaacccac

SEQ ID NO: 4931356 - DNA, 25 bp, Homo sapien
aaaaggagaaaactgttgtgtgcgg

SEQ ID NO: 4931357 - DNA, 25 bp, Homo sapien
tagaaaggtctttactgaggatggg

SEQ ID NO: 4931358 - DNA, 25 bp, Homo sapien
tgggtgtttgccagagagccaggcc

SEQ ID NO: 4931359 - DNA, 25 bp, Homo sapien
aggcctggaagacagcttgaaggaa

SEQ ID NO: 4931360 - DNA, 25 bp, Homo sapien
ggagagaaatgacaacactgattct

SEQ ID NO: 4931361 - DNA, 25 bp, Homo sapien
gaaagccagtggactgcaggagaga

SEQ ID NO: 4931362 - DNA, 25 bp, Homo sapien
tctaggttcccagctgttacacgac

SEQ ID NO: 4931363 - DNA, 25 bp, Homo sapien
ctaacttgcaaggttgctcggaagc

SEQ ID NO: 4931364 - DNA, 25 bp, Homo sapien
ttcttcagaccccagtacaagtact

SEQ ID NO: 4931365 - DNA, 25 bp, Homo sapien
ctttgctttgactcggccatgtgcc

SEQ ID NO: 4931366 - DNA, 25 bp, Homo sapien
gactgaattggatccagttcttcag

SEQ ID NO: 4931367 - DNA, 25 bp, Homo sapien
aaatttctttctccatagtggcaga

SEQ ID NO: 4931368 - DNA, 25 bp, Homo sapien
ccatctctccaaggagggaaaaaag

SEQ ID NO: 4931369 - DNA, 25 bp, Homo sapien
ctctccaaggagggaaaaaagccat

SEQ ID NO: 4931370 - DNA, 25 bp, Homo sapien
tttctccatctctccaaggagggaa

SEQ ID NO: 4931371 - DNA, 25 bp, Homo sapien
ttctccatctctccaaggagggaaa

SEQ ID NO: 4931372 - DNA, 25 bp, Homo sapien
catggcactgtagtatagtgtggaa

SEQ ID NO: 4931373 - DNA, 25 bp, Homo sapien
tgctccacatggcactgtagtatag

SEQ ID NO: 4931374 - DNA, 25 bp, Homo sapien
cccactgctccacatggcactgtag

SEQ ID NO: 4931375 - DNA, 25 bp, Homo sapien
tccacatggcactgtagtatagtgt

SEQ ID NO: 4931376 - DNA, 25 bp, Homo sapien
cctgcctctgctagtatcctaacgg

SEQ ID NO: 4931377 - DNA, 25 bp, Homo sapien
ctctgctagtatcctaacggctcga

SEQ ID NO: 4931378 - DNA, 25 bp, Homo sapien
caaaccagacaccagtggatgtcca

SEQ ID NO: 4931379 - DNA, 25 bp, Homo sapien
tgtttcactggcaatgtgtggccaa

SEQ ID NO: 4931380 - DNA, 25 bp, Homo sapien
ccgtgacagattgggaaccggggag

SEQ ID NO: 4931381 - DNA, 25 bp, Homo sapien
aagcagccagcatcatggaacgcat

SEQ ID NO: 4931382 - DNA, 25 bp, Homo sapien
gaagcagccagcatcatggaacgca

SEQ ID NO: 4931383 - DNA, 25 bp, Homo sapien
agagaagcagccagcatcatggaac

SEQ ID NO: 4931384 - DNA, 25 bp, Homo sapien
ggtgtcccccgcagatatgacatcc

SEQ ID NO: 4931385 - DNA, 25 bp, Homo sapien
gcacggaggtgcacttgcagcagaa

SEQ ID NO: 4931386 - DNA, 25 bp, Homo sapien
gaggtgcacttgcagcagaagcccg

SEQ ID NO: 4931387 - DNA, 25 bp, Homo sapien
tattgcaggattgacccgtgggcag

SEQ ID NO: 4931388 - DNA, 25 bp, Homo sapien
gaagacctccctctcaatagtccaa

SEQ ID NO: 4931389 - DNA, 25 bp, Homo sapien
tgccattcacgtgctagatgttggg

SEQ ID NO: 4931390 - DNA, 25 bp, Homo sapien
tccctctcaatagtccaaactccag

SEQ ID NO: 4931391 - DNA, 25 bp, Homo sapien
cacgtgctagatgttggggactcaa

SEQ ID NO: 4931392 - DNA, 25 bp, Homo sapien
agttttctgacccacctgaaggaga

SEQ ID NO: 4931393 - DNA, 25 bp, Homo sapien
cctgggaagtaaatgtgtgatcgac

SEQ ID NO: 4931394 - DNA, 25 bp, Homo sapien
tctgtggcagacactggcgtattcc

SEQ ID NO: 4931395 - DNA, 25 bp, Homo sapien
tatttgcatcatgaataagagagcc

SEQ ID NO: 4931396 - DNA, 25 bp, Homo sapien
gcggctgcctgagtcgctttctctt

SEQ ID NO: 4931397 - DNA, 25 bp, Homo sapien
tgccagagaaagtttgcggctgcct

SEQ ID NO: 4931398 - DNA, 25 bp, Homo sapien
tgcctgagtcgctttctcttctgag

SEQ ID NO: 4931399 - DNA, 25 bp, Homo sapien
cagagaaagtttgcggctgcctgag

SEQ ID NO: 4931400 - DNA, 25 bp, Homo sapien
caaaaacaactggagagtatttggc

SEQ ID NO: 4931401 - DNA, 25 bp, Homo sapien
aacaaaaacaactggagagtatttg

SEQ ID NO: 4931402 - DNA, 25 bp, Homo sapien
aaaacaactggagagtatttggctt

SEQ ID NO: 4931403 - DNA, 25 bp, Homo sapien
aacaactggagagtatttggctttc

SEQ ID NO: 4931404 - DNA, 25 bp, Homo sapien
cagactccggtcttgcagaaactga

SEQ ID NO: 4931405 - DNA, 25 bp, Homo sapien
gaagccagctaaggtatgctcagac

SEQ ID NO: 4931406 - DNA, 25 bp, Homo sapien
tgtaacaacatcagacagccctact

SEQ ID NO: 4931407 - DNA, 25 bp, Homo sapien
cagaagggacatgaccatttcctaa

SEQ ID NO: 4931408 - DNA, 25 bp, Homo sapien
tcctgacaactcctccagcatgctt

SEQ ID NO: 4931409 - DNA, 25 bp, Homo sapien
tatctgggcatcgtgcaattgtgca

SEQ ID NO: 4931410 - DNA, 25 bp, Homo sapien
tggcttacggaatgggcagacaaca

SEQ ID NO: 4931411 - DNA, 25 bp, Homo sapien
ctttcttcccgtgacatggctatct

SEQ ID NO: 4931412 - DNA, 25 bp, Homo sapien
agtcagcctttactcacctaagttg

SEQ ID NO: 4931413 - DNA, 25 bp, Homo sapien
ccaaacatcgagaggttgccaatca

SEQ ID NO: 4931414 - DNA, 25 bp, Homo sapien
ggcaagcattcttttacagtcaaat

SEQ ID NO: 4931415 - DNA, 25 bp, Homo sapien
tcattctgtgttgatgatgtgaaac

SEQ ID NO: 4931416 - DNA, 25 bp, Homo sapien
tgacccaagcccagaatcaggtaat

SEQ ID NO: 4931417 - DNA, 25 bp, Homo sapien
tagatccccggcagaattttcttgg

SEQ ID NO: 4931418 - DNA, 25 bp, Homo sapien
gatgagctgctgcttccgattcata

SEQ ID NO: 4931419 - DNA, 25 bp, Homo sapien
catacactgtagacatctgtgagga

SEQ ID NO: 4931420 - DNA, 25 bp, Homo sapien
tgctggctgagaatgttgacaccag

SEQ ID NO: 4931421 - DNA, 25 bp, Homo sapien
gacaccagtgaaattttgccctcag

SEQ ID NO: 4931422 - DNA, 25 bp, Homo sapien
cagcgttgtatggaagtcttggatg

SEQ ID NO: 4931423 - DNA, 25 bp, Homo sapien
gctgtttcttccaccgcaggatgtg

SEQ ID NO: 4931424 - DNA, 25 bp, Homo sapien
ccaaatgtgggatgatctgaacaga

SEQ ID NO: 4931425 - DNA, 25 bp, Homo sapien
gaccttaggcctcttcgtggcaggg

SEQ ID NO: 4931426 - DNA, 25 bp, Homo sapien
ggctgttccatctctacctgagttg

SEQ ID NO: 4931427 - DNA, 25 bp, Homo sapien
tctcctgcattctgtggaccttagg

SEQ ID NO: 4931428 - DNA, 25 bp, Homo sapien
acttccaataaagctggctttgtgg

SEQ ID NO: 4931429 - DNA, 25 bp, Homo sapien
acgagtcacttccaataaagctggc

SEQ ID NO: 4931430 - DNA, 25 bp, Homo sapien
ggatccacgagtcacttccaataaa

SEQ ID NO: 4931431 - DNA, 25 bp, Homo sapien
ttaataggatccacgagtcacttcc

SEQ ID NO: 4931432 - DNA, 25 bp, Homo sapien
tcttaacctgggagtaagtgtagta

SEQ ID NO: 4931433 - DNA, 25 bp, Homo sapien
gtagtagtcaatccattctctgttg

SEQ ID NO: 4931434 - DNA, 25 bp, Homo sapien
tgtttcacagcctccattcttaacc

SEQ ID NO: 4931435 - DNA, 25 bp, Homo sapien
cctgggagtaagtgtagtagtcaat

SEQ ID NO: 4931436 - DNA, 25 bp, Homo sapien
tcttttctgcatttgcaacatccaa

SEQ ID NO: 4931437 - DNA, 25 bp, Homo sapien
ttctgcatttgcaacatccaaattg

SEQ ID NO: 4931438 - DNA, 25 bp, Homo sapien
tgcatttgcaacatccaaattgaat

SEQ ID NO: 4931439 - DNA, 25 bp, Homo sapien
atcttttctgcatttgcaacatcca

SEQ ID NO: 4931440 - DNA, 25 bp, Homo sapien
gaaatgtggaatataaaggcttcag

SEQ ID NO: 4931441 - DNA, 25 bp, Homo sapien
gaatataaaggcttcagctaatgaa

SEQ ID NO: 4931442 - DNA, 25 bp, Homo sapien
gtggaatataaaggcttcagctaat

SEQ ID NO: 4931443 - DNA, 25 bp, Homo sapien
tattggaaatgtggaatataaaggc

SEQ ID NO: 4931444 - DNA, 25 bp, Homo sapien
gatgttagcgtgctttgactgcagt

SEQ ID NO: 4931445 - DNA, 25 bp, Homo sapien
aaaacagttggcatgtgggaatctg

SEQ ID NO: 4931446 - DNA, 25 bp, Homo sapien
gcatgtgggaatctgatgttagcgt

SEQ ID NO: 4931447 - DNA, 25 bp, Homo sapien
ctttgactgcagtaagatgtgtggg

SEQ ID NO: 4931448 - DNA, 25 bp, Homo sapien
ataccaggcttttatgaaagtccct

SEQ ID NO: 4931449 - DNA, 25 bp, Homo sapien
gcttttatgaaagtccctaacgagc

SEQ ID NO: 4931450 - DNA, 25 bp, Homo sapien
caggcttttatgaaagtccctaacg

SEQ ID NO: 4931451 - DNA, 25 bp, Homo sapien
taccaggcttttatgaaagtcccta

SEQ ID NO: 4931452 - DNA, 25 bp, Homo sapien
gcctccaaaggcagctttgcctggg

SEQ ID NO: 4931453 - DNA, 25 bp, Homo sapien
aaaggcagctttgcctgggttattc

SEQ ID NO: 4931454 - DNA, 25 bp, Homo sapien
ctgggttattctgggccagtgtcat

SEQ ID NO: 4931455 - DNA, 25 bp, Homo sapien
gcctgggttattctgggccagtgtc

SEQ ID NO: 4931456 - DNA, 25 bp, Homo sapien
ggctgagacaccagttctgcagaaa

SEQ ID NO: 4931457 - DNA, 25 bp, Homo sapien
gctgagacaccagttctgcagaaag

SEQ ID NO: 4931458 - DNA, 25 bp, Homo sapien
agaaagagcagtgccagctctgtca

SEQ ID NO: 4931459 - DNA, 25 bp, Homo sapien
catcaaaacctgaaagcctcatcct

SEQ ID NO: 4931460 - DNA, 25 bp, Homo sapien
gtccaacatcaaaacctgaaagcct

SEQ ID NO: 4931461 - DNA, 25 bp, Homo sapien
ttaaaatgtccagtccagtccaaca

SEQ ID NO: 4931462 - DNA, 25 bp, Homo sapien
gcctcatcctatttaaaacatctct

SEQ ID NO: 4931463 - DNA, 25 bp, Homo sapien
gtctgcatttctcagcagcaccaca

SEQ ID NO: 4931464 - DNA, 25 bp, Homo sapien
ctgggcctcttgttcatcctgctca

SEQ ID NO: 4931465 - DNA, 25 bp, Homo sapien
atttcctccagcatgtctgcatttc

SEQ ID NO: 4931466 - DNA, 25 bp, Homo sapien
ttttggtggcaccgcctgggcctct

SEQ ID NO: 4931467 - DNA, 25 bp, Homo sapien
gaggtagacaaggagctgtgtgcag

SEQ ID NO: 4931468 - DNA, 25 bp, Homo sapien
tgtgtgcaggacacccagtttgtct

SEQ ID NO: 4931469 - DNA, 25 bp, Homo sapien
cagtttgtctggataggacggcagc

SEQ ID NO: 4931470 - DNA, 25 bp, Homo sapien
gttaatgtcctgcacttgcaggctg

SEQ ID NO: 4931471 - DNA, 25 bp, Homo sapien
catgaccccatgaggggtcagttcc

SEQ ID NO: 4931472 - DNA, 25 bp, Homo sapien
aggcacagaaggcatatcatgacag

SEQ ID NO: 4931473 - DNA, 25 bp, Homo sapien
cagaaggcatatcatgacaggccat

SEQ ID NO: 4931474 - DNA, 25 bp, Homo sapien
cacagaaggcatatcatgacaggcc

SEQ ID NO: 4931475 - DNA, 25 bp, Homo sapien
gaaagataatctgtgccatgaaggg

SEQ ID NO: 4931476 - DNA, 25 bp, Homo sapien
aaagataatctgtgccatgaagggt

SEQ ID NO: 4931477 - DNA, 25 bp, Homo sapien
tctgacaagcaaagaagtagatgcc

SEQ ID NO: 4931478 - DNA, 25 bp, Homo sapien
aaaacaaggtgactagcaaggaagc

SEQ ID NO: 4931479 - DNA, 25 bp, Homo sapien
gagctccctcatagccttcttgaga

SEQ ID NO: 4931480 - DNA, 25 bp, Homo sapien
agtagatgccatccaaggttctgga

SEQ ID NO: 4931481 - DNA, 25 bp, Homo sapien
tgcctcatgtgaatactgtggtcca

SEQ ID NO: 4931482 - DNA, 25 bp, Homo sapien
tcagaactcgccaatcataggtcag

SEQ ID NO: 4931483 - DNA, 25 bp, Homo sapien
cataggtcagccctttggaggagag

SEQ ID NO: 4931484 - DNA, 25 bp, Homo sapien
ttctcctctattgctcagaactcgc

SEQ ID NO: 4931485 - DNA, 25 bp, Homo sapien
ttacacgtcttcatcccctgcgacc

SEQ ID NO: 4931486 - DNA, 25 bp, Homo sapien
tctgactcccgaggatcacagagga

SEQ ID NO: 4931487 - DNA, 25 bp, Homo sapien
cgacccctttctgactcccgaggat

SEQ ID NO: 4931488 - DNA, 25 bp, Homo sapien
ttcatcccctgcgacccctttctga

SEQ ID NO: 4931489 - DNA, 25 bp, Homo sapien
ccatgtttctttagtgacgtttggg

SEQ ID NO: 4931490 - DNA, 25 bp, Homo sapien
tagaacaaagagaaaggccatttga

SEQ ID NO: 4931491 - DNA, 25 bp, Homo sapien
gagtgtttgaattcatgacatgtaa

SEQ ID NO: 4931492 - DNA, 25 bp, Homo sapien
cagctgcagatgattagaccctttc

SEQ ID NO: 4931493 - DNA, 25 bp, Homo sapien
tgagaagtcagacccctcatccttc

SEQ ID NO: 4931494 - DNA, 25 bp, Homo sapien
tcaggacccagatagtatcaaggaa

SEQ ID NO: 4931495 - DNA, 25 bp, Homo sapien
ggctcacaagcaggcatgggaaacc

SEQ ID NO: 4931496 - DNA, 25 bp, Homo sapien
ttggtcctcataacaggctcacaag

SEQ ID NO: 4931497 - DNA, 25 bp, Homo sapien
gctgattggctattcttgggcacaa

SEQ ID NO: 4931498 - DNA, 25 bp, Homo sapien
acagccaacaggagagcaccaactc

SEQ ID NO: 4931499 - DNA, 25 bp, Homo sapien
tctggagaccctggtgctgattggc

SEQ ID NO: 4931500 - DNA, 25 bp, Homo sapien
tcttgggcacaaggccctgggtcac

SEQ ID NO: 4931501 - DNA, 25 bp, Homo sapien
caaaactgtgttcagtatatttcag

SEQ ID NO: 4931502 - DNA, 25 bp, Homo sapien
gacaggtggcctctagtattttcct

SEQ ID NO: 4931503 - DNA, 25 bp, Homo sapien
agtgaagggcagcacttccccctgt

SEQ ID NO: 4931504 - DNA, 25 bp, Homo sapien
gcacttccccctgtgatgggactca

SEQ ID NO: 4931505 - DNA, 25 bp, Homo sapien
ttcccctaggaagctgagcacagct

SEQ ID NO: 4931506 - DNA, 25 bp, Homo sapien
tagggcccagactagttaggaaagc

SEQ ID NO: 4931507 - DNA, 25 bp, Homo sapien
taggccattcgatgtacagtcggaa

SEQ ID NO: 4931508 - DNA, 25 bp, Homo sapien
agtttgcctttcgattagggcccag

SEQ ID NO: 4931509 - DNA, 25 bp, Homo sapien
cagtgggacttcctccaagcccgga

SEQ ID NO: 4931510 - DNA, 25 bp, Homo sapien
agaaccctccagcaaccttaaatct

SEQ ID NO: 4931511 - DNA, 25 bp, Homo sapien
ctccaagcccggaagttgcaggcca

SEQ ID NO: 4931512 - DNA, 25 bp, Homo sapien
ttataagcccagattggtgggctgg

SEQ ID NO: 4931513 - DNA, 25 bp, Homo sapien
tacctgtagtcctaggagagccaca

SEQ ID NO: 4931514 - DNA, 25 bp, Homo sapien
tctaccgaggaagaactggcgctca

SEQ ID NO: 4931515 - DNA, 25 bp, Homo sapien
tatgagagttcccaacacagtcaca

SEQ ID NO: 4931516 - DNA, 25 bp, Homo sapien
gcagtttgtaaacagcacagccgag

SEQ ID NO: 4931517 - DNA, 25 bp, Homo sapien
ccacagcagagccttctttacctga

SEQ ID NO: 4931518 - DNA, 25 bp, Homo sapien
tcctgcactaagtgaggtgtctctc

SEQ ID NO: 4931519 - DNA, 25 bp, Homo sapien
gatactccttaatctccttcagttg

SEQ ID NO: 4931520 - DNA, 25 bp, Homo sapien
ttgcagaataatgccccgagcccct

SEQ ID NO: 4931521 - DNA, 25 bp, Homo sapien
gccatgttttgggggcggtataaga

SEQ ID NO: 4931522 - DNA, 25 bp, Homo sapien
gcggtataagaagggacttgccatt

SEQ ID NO: 4931523 - DNA, 25 bp, Homo sapien
ccttccagcagtgtgccatgttttg

SEQ ID NO: 4931524 - DNA, 25 bp, Homo sapien
gggcggtataagaagggacttgcca

SEQ ID NO: 4931525 - DNA, 25 bp, Homo sapien
cagtggtgttgaagcatgcgtgaga

SEQ ID NO: 4931526 - DNA, 25 bp, Homo sapien
gcataacagttctgatgcagcccag

SEQ ID NO: 4931527 - DNA, 25 bp, Homo sapien
catgcgtgagagtgggttagcataa

SEQ ID NO: 4931528 - DNA, 25 bp, Homo sapien
gagtgggttagcataacagttctga

SEQ ID NO: 4931529 - DNA, 25 bp, Homo sapien
aggtagcaacgcaacctccagcaag

SEQ ID NO: 4931530 - DNA, 25 bp, Homo sapien
gtagcaacgcaacctccagcaagga

SEQ ID NO: 4931531 - DNA, 25 bp, Homo sapien
taggtagcaacgcaacctccagcaa

SEQ ID NO: 4931532 - DNA, 25 bp, Homo sapien
agcaacgcaacctccagcaaggagg

SEQ ID NO: 4931533 - DNA, 25 bp, Homo sapien
gctcccagttttttagatcttcgaa

SEQ ID NO: 4931534 - DNA, 25 bp, Homo sapien
gaaaaccctgatgatgtgccatccc

SEQ ID NO: 4931535 - DNA, 25 bp, Homo sapien
cgaagttgagataaaatgccactgc

SEQ ID NO: 4931536 - DNA, 25 bp, Homo sapien
tggaaggctccaggcatacataccc

SEQ ID NO: 4931537 - DNA, 25 bp, Homo sapien
aacacggccatcaaactcaacaaag

SEQ ID NO: 4931538 - DNA, 25 bp, Homo sapien
caaacacggccatcaaactcaacaa

SEQ ID NO: 4931539 - DNA, 25 bp, Homo sapien
agcaaacacggccatcaaactcaac

SEQ ID NO: 4931540 - DNA, 25 bp, Homo sapien
tcagcaaacacggccatcaaactca

SEQ ID NO: 4931541 - DNA, 25 bp, Homo sapien
tctaaaagatagatgcagtgacaga

SEQ ID NO: 4931542 - DNA, 25 bp, Homo sapien
tatgctctcataacacacagtttct

SEQ ID NO: 4931543 - DNA, 25 bp, Homo sapien
gtgacagaaaacagctatgctctca

SEQ ID NO: 4931544 - DNA, 25 bp, Homo sapien
aaagatagatgcagtgacagaaaac

SEQ ID NO: 4931545 - DNA, 25 bp, Homo sapien
cagggaagcttcctccgtttgctat

SEQ ID NO: 4931546 - DNA, 25 bp, Homo sapien
ttttgcaagacaaaagaggtccaga

SEQ ID NO: 4931547 - DNA, 25 bp, Homo sapien
cacatgatgcatgccacgttgtcag

SEQ ID NO: 4931548 - DNA, 25 bp, Homo sapien
cttgccaactatgagaagaagtaga

SEQ ID NO: 4931549 - DNA, 25 bp, Homo sapien
tattcacacttgcaaagatcctggg

SEQ ID NO: 4931550 - DNA, 25 bp, Homo sapien
aatcctgagggggaagtcgacatct

SEQ ID NO: 4931551 - DNA, 25 bp, Homo sapien
gtcgacatctaattaggatttcttg

SEQ ID NO: 4931552 - DNA, 25 bp, Homo sapien
ctattcacacttgcaaagatcctgg

SEQ ID NO: 4931553 - DNA, 25 bp, Homo sapien
cgtttgctagtgtgaaggtgttccc

SEQ ID NO: 4931554 - DNA, 25 bp, Homo sapien
tctggatccaaaagccgtttgctag

SEQ ID NO: 4931555 - DNA, 25 bp, Homo sapien
cctgtgtgtgccttgtagtgatttc

SEQ ID NO: 4931556 - DNA, 25 bp, Homo sapien
tgtccagccaaaaggcacgcatgct

SEQ ID NO: 4931557 - DNA, 25 bp, Homo sapien
aggatgccagggagcaacaataaac

SEQ ID NO: 4931558 - DNA, 25 bp, Homo sapien
gtgagcccgttgctgaaattcctct

SEQ ID NO: 4931559 - DNA, 25 bp, Homo sapien
ggcagtgagcccgttgctgaaattc

SEQ ID NO: 4931560 - DNA, 25 bp, Homo sapien
cagtgagcccgttgctgaaattcct

SEQ ID NO: 4931561 - DNA, 25 bp, Homo sapien
gcaggcagtgagcccgttgctgaaa

SEQ ID NO: 4931562 - DNA, 25 bp, Homo sapien
aacagatgtatctgctgctcctgag

SEQ ID NO: 4931563 - DNA, 25 bp, Homo sapien
acagatgtatctgctgctcctgaga

SEQ ID NO: 4931564 - DNA, 25 bp, Homo sapien
ctcctgagaagcccttcgttccctg

SEQ ID NO: 4931565 - DNA, 25 bp, Homo sapien
cagtggtaggattcatgaagtgctc

SEQ ID NO: 4931566 - DNA, 25 bp, Homo sapien
tccaccaggtcctcgggtgctaggg

SEQ ID NO: 4931567 - DNA, 25 bp, Homo sapien
gtgctcaagaatgtccaggcctcca

SEQ ID NO: 4931568 - DNA, 25 bp, Homo sapien
tttgcaagggacttgtgctgttcct

SEQ ID NO: 4931569 - DNA, 25 bp, Homo sapien
cctgggtgattccaatcttgcaggt

SEQ ID NO: 4931570 - DNA, 25 bp, Homo sapien
gggtgattccaatcttgcaggttta

SEQ ID NO: 4931571 - DNA, 25 bp, Homo sapien
acctgggtgattccaatcttgcagg

SEQ ID NO: 4931572 - DNA, 25 bp, Homo sapien
ctgggtgattccaatcttgcaggtt

SEQ ID NO: 4931573 - DNA, 25 bp, Homo sapien
ttatttatgtaatgttgactgagaa

SEQ ID NO: 4931574 - DNA, 25 bp, Homo sapien
agcgttcatcatcaatatgcctatc

SEQ ID NO: 4931575 - DNA, 25 bp, Homo sapien
gcgttcatcatcaatatgcctatct

SEQ ID NO: 4931576 - DNA, 25 bp, Homo sapien
ttatgtaatgttgactgagaatctg

SEQ ID NO: 4931577 - DNA, 25 bp, Homo sapien
cccagattattggttgttaatggga

SEQ ID NO: 4931578 - DNA, 25 bp, Homo sapien
cccatagggagttactgctagttca

SEQ ID NO: 4931579 - DNA, 25 bp, Homo sapien
gcactgtggctctttatttaatgtt

SEQ ID NO: 4931580 - DNA, 25 bp, Homo sapien
ttcagtttcaaacgaattcagcagc

SEQ ID NO: 4931581 - DNA, 25 bp, Homo sapien
aagagagtgaccactgatagctgtc

SEQ ID NO: 4931582 - DNA, 25 bp, Homo sapien
gatagctgtcctcaggattcattga

SEQ ID NO: 4931583 - DNA, 25 bp, Homo sapien
caggaactggcgctatcagaaagag

SEQ ID NO: 4931584 - DNA, 25 bp, Homo sapien
gttccatttcaagcccaagagagtg

SEQ ID NO: 4931585 - DNA, 25 bp, Homo sapien
aaagcgggtgcggagttccacattc

SEQ ID NO: 4931586 - DNA, 25 bp, Homo sapien
tgttctgagaaagcgggtgcggagt

SEQ ID NO: 4931587 - DNA, 25 bp, Homo sapien
catgacagggctcgctgagagactc

SEQ ID NO: 4931588 - DNA, 25 bp, Homo sapien
cacattctcctggatgccttccatg

SEQ ID NO: 4931589 - DNA, 25 bp, Homo sapien
tcaatgctgtgattctgagggtcat

SEQ ID NO: 4931590 - DNA, 25 bp, Homo sapien
cctctcaatgctgtgattctgaggg

SEQ ID NO: 4931591 - DNA, 25 bp, Homo sapien
acctctcaatgctgtgattctgagg

SEQ ID NO: 4931592 - DNA, 25 bp, Homo sapien
tctcaatgctgtgattctgagggtc

SEQ ID NO: 4931593 - DNA, 25 bp, Homo sapien
tcagggtctcggtccctagtgcaca

SEQ ID NO: 4931594 - DNA, 25 bp, Homo sapien
agtgcacagaccattcaaacatggg

SEQ ID NO: 4931595 - DNA, 25 bp, Homo sapien
ggtccctagtgcacagaccattcaa

SEQ ID NO: 4931596 - DNA, 25 bp, Homo sapien
cacaggcttgtcctcagggtctcgg

SEQ ID NO: 4931597 - DNA, 25 bp, Homo sapien
aaaccatgtcaggagatgagtgaac

SEQ ID NO: 4931598 - DNA, 25 bp, Homo sapien
gagccatggaacacaaaaccatgtc

SEQ ID NO: 4931599 - DNA, 25 bp, Homo sapien
catgtcaggagatgagtgaacttca

SEQ ID NO: 4931600 - DNA, 25 bp, Homo sapien
caaaaccatgtcaggagatgagtga

SEQ ID NO: 4931601 - DNA, 25 bp, Homo sapien
gtggtgcttgaggggacagttggac

SEQ ID NO: 4931602 - DNA, 25 bp, Homo sapien
gagtggtgcttgaggggacagttgg

SEQ ID NO: 4931603 - DNA, 25 bp, Homo sapien
agtggtgcttgaggggacagttgga

SEQ ID NO: 4931604 - DNA, 25 bp, Homo sapien
atcctggtccatgccaattacagca

SEQ ID NO: 4931605 - DNA, 25 bp, Homo sapien
ttacagcatcgtaacctagaatgaa

SEQ ID NO: 4931606 - DNA, 25 bp, Homo sapien
caactgaagcattccctggtggcgt

SEQ ID NO: 4931607 - DNA, 25 bp, Homo sapien
aaattgtccatgtgggagacagggc

SEQ ID NO: 4931608 - DNA, 25 bp, Homo sapien
ttgtggcagtttgaaacaaaggagt

SEQ ID NO: 4931609 - DNA, 25 bp, Homo sapien
tgtggcagtttgaaacaaaggagtc

SEQ ID NO: 4931610 - DNA, 25 bp, Homo sapien
ttacttgtggcagtttgaaacaaag

SEQ ID NO: 4931611 - DNA, 25 bp, Homo sapien
ctgtttacttgtggcagtttgaaac

SEQ ID NO: 4931612 - DNA, 25 bp, Homo sapien
tttccaccctatactgccatggact

SEQ ID NO: 4931613 - DNA, 25 bp, Homo sapien
tgattccactcatgcagcacatctg

SEQ ID NO: 4931614 - DNA, 25 bp, Homo sapien
tgtctgtgagagtgggtataatctg

SEQ ID NO: 4931615 - DNA, 25 bp, Homo sapien
cttccttgattccactcatgcagca

SEQ ID NO: 4931616 - DNA, 25 bp, Homo sapien
agggtaggaggggtgagtgaacctg

SEQ ID NO: 4931617 - DNA, 25 bp, Homo sapien
gggtaggaggggtgagtgaacctga

SEQ ID NO: 4931618 - DNA, 25 bp, Homo sapien
gatatcagcgtcagaagagggcctt

SEQ ID NO: 4931619 - DNA, 25 bp, Homo sapien
gagggccttgctgagatcttatgct

SEQ ID NO: 4931620 - DNA, 25 bp, Homo sapien
gccaaataaaggctgtgtctctcag

SEQ ID NO: 4931621 - DNA, 25 bp, Homo sapien
ctctcagcaggtaaagaactaaaca

SEQ ID NO: 4931622 - DNA, 25 bp, Homo sapien
tgcctgctacagagagtgaacaata

SEQ ID NO: 4931623 - DNA, 25 bp, Homo sapien
atacacagcagcaggtctacgccaa

SEQ ID NO: 4931624 - DNA, 25 bp, Homo sapien
tcatggagtaaagtatccccagtca

SEQ ID NO: 4931625 - DNA, 25 bp, Homo sapien
ggtctacgccaagtaatgccagcag

SEQ ID NO: 4931626 - DNA, 25 bp, Homo sapien
gcagctctatatttgtcacatggca

SEQ ID NO: 4931627 - DNA, 25 bp, Homo sapien
aagtcgtgatgcaaacttgccacct

SEQ ID NO: 4931628 - DNA, 25 bp, Homo sapien
ccacctttaggaggcacgatctggt

SEQ ID NO: 4931629 - DNA, 25 bp, Homo sapien
tcccgctgtcagtgccaagagcatt

SEQ ID NO: 4931630 - DNA, 25 bp, Homo sapien
tagtcagggcatcctctatctgcag

SEQ ID NO: 4931631 - DNA, 25 bp, Homo sapien
gaatgaggacttcctaaacagtgtg

SEQ ID NO: 4931632 - DNA, 25 bp, Homo sapien
tcccttgagattggagcaccatgat

SEQ ID NO: 4931633 - DNA, 25 bp, Homo sapien
tctgggctaccttcatgtttagggt

SEQ ID NO: 4931634 - DNA, 25 bp, Homo sapien
tcgggaggagccacatgacagtgaa

SEQ ID NO: 4931635 - DNA, 25 bp, Homo sapien
caagcctggtttgtccacgggcatc

SEQ ID NO: 4931636 - DNA, 25 bp, Homo sapien
catctttgctatcacatcgggagga

SEQ ID NO: 4931637 - DNA, 25 bp, Homo sapien
gaacgcggacaaatgcagagacctg

SEQ ID NO: 4931638 - DNA, 25 bp, Homo sapien
taatgcaatattaggcaggagtgac

SEQ ID NO: 4931639 - DNA, 25 bp, Homo sapien
agaggtgagctggggttgagttctg

SEQ ID NO: 4931640 - DNA, 25 bp, Homo sapien
aatgcaatattaggcaggagtgact

SEQ ID NO: 4931641 - DNA, 25 bp, Homo sapien
gtgagctggggttgagttctgtctt

SEQ ID NO: 4931642 - DNA, 25 bp, Homo sapien
tgataggttaacaaatagcgaaatc

SEQ ID NO: 4931643 - DNA, 25 bp, Homo sapien
aatctcagcatttacttcttgtatc

SEQ ID NO: 4931644 - DNA, 25 bp, Homo sapien
cattgagcactgatgatatatattt

SEQ ID NO: 4931645 - DNA, 25 bp, Homo sapien
ggttaacaaatagcgaaatctcagc

SEQ ID NO: 4931646 - DNA, 25 bp, Homo sapien
tgtgttagacagagcattgactggc

SEQ ID NO: 4931647 - DNA, 25 bp, Homo sapien
tctctgcagtagtccccaaggatgg

SEQ ID NO: 4931648 - DNA, 25 bp, Homo sapien
tgccctggagcatttgtgagccctg

SEQ ID NO: 4931649 - DNA, 25 bp, Homo sapien
tagttatatttccagatccgagggt

SEQ ID NO: 4931650 - DNA, 25 bp, Homo sapien
gctccgaagcggaaagccaggataa

SEQ ID NO: 4931651 - DNA, 25 bp, Homo sapien
tgggtactcttgaacaaacatgagg

SEQ ID NO: 4931652 - DNA, 25 bp, Homo sapien
tgtgctgcttgacatccaatgcctg

SEQ ID NO: 4931653 - DNA, 25 bp, Homo sapien
tgaagttgagagagtgctccgaagc

SEQ ID NO: 4931654 - DNA, 25 bp, Homo sapien
gcctcatattcagcatagcgtggta

SEQ ID NO: 4931655 - DNA, 25 bp, Homo sapien
gaatgcaaatggtcacggtttccaa

SEQ ID NO: 4931656 - DNA, 25 bp, Homo sapien
tttttctccacaatgcactgcctca

SEQ ID NO: 4931657 - DNA, 25 bp, Homo sapien
aaagcccgtagggtgcaatactgcc

SEQ ID NO: 4931658 - DNA, 25 bp, Homo sapien
ctcttctaacctctggatatgtctc

SEQ ID NO: 4931659 - DNA, 25 bp, Homo sapien
acctctggatatgtctccattctga

SEQ ID NO: 4931660 - DNA, 25 bp, Homo sapien
taacctctggatatgtctccattct

SEQ ID NO: 4931661 - DNA, 25 bp, Homo sapien
ttctaacctctggatatgtctccat

SEQ ID NO: 4931662 - DNA, 25 bp, Homo sapien
aggccatccaggctgttttgcccac

SEQ ID NO: 4931663 - DNA, 25 bp, Homo sapien
caaaaccatactgacgatatcccca

SEQ ID NO: 4931664 - DNA, 25 bp, Homo sapien
tgttttgcccaccagagctggtggc

SEQ ID NO: 4931665 - DNA, 25 bp, Homo sapien
tactgacgatatccccaagggatag

SEQ ID NO: 4931666 - DNA, 25 bp, Homo sapien
cagttggaaattcttctttctctga

SEQ ID NO: 4931667 - DNA, 25 bp, Homo sapien
gaaattcttctttctctgattaagc

SEQ ID NO: 4931668 - DNA, 25 bp, Homo sapien
aattcttctttctctgattaagcat

SEQ ID NO: 4931669 - DNA, 25 bp, Homo sapien
tggaaattcttctttctctgattaa

SEQ ID NO: 4931670 - DNA, 25 bp, Homo sapien
caaatccgtctgctctggcgcagga

SEQ ID NO: 4931671 - DNA, 25 bp, Homo sapien
gaaatgcgtgttttggctgctcctc

SEQ ID NO: 4931672 - DNA, 25 bp, Homo sapien
gcgcaggaaggaacactaagcccaa

SEQ ID NO: 4931673 - DNA, 25 bp, Homo sapien
tgtcagatatgcgacactgtgtctg

SEQ ID NO: 4931674 - DNA, 25 bp, Homo sapien
tcctgggagactgcgagttttcaac

SEQ ID NO: 4931675 - DNA, 25 bp, Homo sapien
tgtgactgaccctccttgttattca

SEQ ID NO: 4931676 - DNA, 25 bp, Homo sapien
tggtatctctctcggctcctcttgc

SEQ ID NO: 4931677 - DNA, 25 bp, Homo sapien
ttgatgtcgctctccccgcaatgtt

SEQ ID NO: 4931678 - DNA, 25 bp, Homo sapien
cactgtgacatcctttggttgcagc

SEQ ID NO: 4931679 - DNA, 25 bp, Homo sapien
cttgtcccactctgccacgaggagt

SEQ ID NO: 4931680 - DNA, 25 bp, Homo sapien
gagctctgtccaggcttgagctgca

SEQ ID NO: 4931681 - DNA, 25 bp, Homo sapien
ttttcatccctcttgttagttctgg

SEQ ID NO: 4931682 - DNA, 25 bp, Homo sapien
tacatctgcgacagatgggcagatc

SEQ ID NO: 4931683 - DNA, 25 bp, Homo sapien
aaatgggagcctaaaggtggagcac

SEQ ID NO: 4931684 - DNA, 25 bp, Homo sapien
cttgcattcagacaaggtggcttct

SEQ ID NO: 4931685 - DNA, 25 bp, Homo sapien
gctcctcagaagaagtgacattaag

SEQ ID NO: 4931686 - DNA, 25 bp, Homo sapien
tggacataggatagggcagagtttt

SEQ ID NO: 4931687 - DNA, 25 bp, Homo sapien
ggtgctgaagcaggtacacttctgc

SEQ ID NO: 4931688 - DNA, 25 bp, Homo sapien
tcaacaggggagctctggacatagg

SEQ ID NO: 4931689 - DNA, 25 bp, Homo sapien
ttttcctgattgaatgagggtgctg

SEQ ID NO: 4931690 - DNA, 25 bp, Homo sapien
agacaagtgcatccctagagagatt

SEQ ID NO: 4931691 - DNA, 25 bp, Homo sapien
cctagagagattggccccaaggagg

SEQ ID NO: 4931692 - DNA, 25 bp, Homo sapien
ccccaaggaggcatcagacaccagt

SEQ ID NO: 4931693 - DNA, 25 bp, Homo sapien
catccctagagagattggccccaag

SEQ ID NO: 4931694 - DNA, 25 bp, Homo sapien
gagtccatgaggcagtgaagttctg

SEQ ID NO: 4931695 - DNA, 25 bp, Homo sapien
gatgatgtgctccatgagtccatga

SEQ ID NO: 4931696 - DNA, 25 bp, Homo sapien
gaagacctcaggctccagtgtaggc

SEQ ID NO: 4931697 - DNA, 25 bp, Homo sapien
tgctcactcgttgcctttggatgca

SEQ ID NO: 4931698 - DNA, 25 bp, Homo sapien
gctctggctcccgtagcttcttgga

SEQ ID NO: 4931699 - DNA, 25 bp, Homo sapien
gctcccgtagcttcttggacttctc

SEQ ID NO: 4931700 - DNA, 25 bp, Homo sapien
tctggctcccgtagcttcttggact

SEQ ID NO: 4931701 - DNA, 25 bp, Homo sapien
tggctcccgtagcttcttggacttc

SEQ ID NO: 4931702 - DNA, 25 bp, Homo sapien
tgtccagtatctggcctttctcctc

SEQ ID NO: 4931703 - DNA, 25 bp, Homo sapien
tctgccactgtagtggtagtgaatt

SEQ ID NO: 4931704 - DNA, 25 bp, Homo sapien
gcagagaagagctgcctgtccagta

SEQ ID NO: 4931705 - DNA, 25 bp, Homo sapien
ggtagtgaatttcctcacatagact

SEQ ID NO: 4931706 - DNA, 25 bp, Homo sapien
catcccggcacattgttacataagg

SEQ ID NO: 4931707 - DNA, 25 bp, Homo sapien
cataaggaatgagctatggctacaa

SEQ ID NO: 4931708 - DNA, 25 bp, Homo sapien
tagaattttgtagtcaggtgggctg

SEQ ID NO: 4931709 - DNA, 25 bp, Homo sapien
ccagtaggatcattgaaagggcagg

SEQ ID NO: 4931710 - DNA, 25 bp, Homo sapien
cttacaacaatggctaagagaacag

SEQ ID NO: 4931711 - DNA, 25 bp, Homo sapien
aagagaacagctaccctgaagctgc

SEQ ID NO: 4931712 - DNA, 25 bp, Homo sapien
acaacaatggctaagagaacagcta

SEQ ID NO: 4931713 - DNA, 25 bp, Homo sapien
agagaacagctaccctgaagctgct

SEQ ID NO: 4931714 - DNA, 25 bp, Homo sapien
tccaccctgattcctcgatactggt

SEQ ID NO: 4931715 - DNA, 25 bp, Homo sapien
cctgattcctcgatactggtagact

SEQ ID NO: 4931716 - DNA, 25 bp, Homo sapien
ggtagacttctcctcagcaaggccc

SEQ ID NO: 4931717 - DNA, 25 bp, Homo sapien
cgatactggtagacttctcctcagc

SEQ ID NO: 4931718 - DNA, 25 bp, Homo sapien
ctctataggacactgcagttccgga

SEQ ID NO: 4931719 - DNA, 25 bp, Homo sapien
gcagttccggatgcaccctcattgc

SEQ ID NO: 4931720 - DNA, 25 bp, Homo sapien
gttccggatgcaccctcattgctca

SEQ ID NO: 4931721 - DNA, 25 bp, Homo sapien
tataggacactgcagttccggatgc

SEQ ID NO: 4931722 - DNA, 25 bp, Homo sapien
aaatcttgtgatgataccctccatg

SEQ ID NO: 4931723 - DNA, 25 bp, Homo sapien
catgaattggcttatgacaacacca

SEQ ID NO: 4931724 - DNA, 25 bp, Homo sapien
tgtcaacagggggtcagtgttctca

SEQ ID NO: 4931725 - DNA, 25 bp, Homo sapien
acttctaaggcttctcgtcccagat

SEQ ID NO: 4931726 - DNA, 25 bp, Homo sapien
tgggaagaagagtcatgaccaccac

SEQ ID NO: 4931727 - DNA, 25 bp, Homo sapien
gaagaagagtcatgaccaccacaaa

SEQ ID NO: 4931728 - DNA, 25 bp, Homo sapien
catgaccaccacaaagggctttgtt

SEQ ID NO: 4931729 - DNA, 25 bp, Homo sapien
gaagagtcatgaccaccacaaaggg

SEQ ID NO: 4931730 - DNA, 25 bp, Homo sapien
tcatcaggaagggacatgtagggac

SEQ ID NO: 4931731 - DNA, 25 bp, Homo sapien
ccttgtctttcagtagtggccttgc

SEQ ID NO: 4931732 - DNA, 25 bp, Homo sapien
gacatttcgcattactccaagtgac

SEQ ID NO: 4931733 - DNA, 25 bp, Homo sapien
tctactggctgtgatcccactaggg

SEQ ID NO: 4931734 - DNA, 25 bp, Homo sapien
ctatgtaagcctgaaaagatctgtc

SEQ ID NO: 4931735 - DNA, 25 bp, Homo sapien
ggtcacttgcaaaagtggctcaaca

SEQ ID NO: 4931736 - DNA, 25 bp, Homo sapien
caggtgctttgatgtgcttactgaa

SEQ ID NO: 4931737 - DNA, 25 bp, Homo sapien
ttactgaaagttgacccacatgggt

SEQ ID NO: 4931738 - DNA, 25 bp, Homo sapien
aaatcagtgtagtcagagatacagc

SEQ ID NO: 4931739 - DNA, 25 bp, Homo sapien
cagaaaaaatctcatcgctagcatc

SEQ ID NO: 4931740 - DNA, 25 bp, Homo sapien
tcagtaaatcagcataataaatcag

SEQ ID NO: 4931741 - DNA, 25 bp, Homo sapien
tcgctagcatcataactcctttgtg

SEQ ID NO: 4931742 - DNA, 25 bp, Homo sapien
ccaaagatgtttccatgggctcagc

SEQ ID NO: 4931743 - DNA, 25 bp, Homo sapien
gcttggaggtctttcttgagatgct

SEQ ID NO: 4931744 - DNA, 25 bp, Homo sapien
ggaacagatgcactgtgaacctcag

SEQ ID NO: 4931745 - DNA, 25 bp, Homo sapien
cactatgcctctgctcattgttgag

SEQ ID NO: 4931746 - DNA, 25 bp, Homo sapien
gtgctttggaagatgctgtgatttg

SEQ ID NO: 4931747 - DNA, 25 bp, Homo sapien
cgtgtccatctcctagtccactatt

SEQ ID NO: 4931748 - DNA, 25 bp, Homo sapien
tatttcttgtcaggatgcatagaga

SEQ ID NO: 4931749 - DNA, 25 bp, Homo sapien
cagtagtaaaaatatccgtgtccat

SEQ ID NO: 4931750 - DNA, 25 bp, Homo sapien
cagctggccatcctgtacacaggca

SEQ ID NO: 4931751 - DNA, 25 bp, Homo sapien
cactgcctgacttggtaatattttc

SEQ ID NO: 4931752 - DNA, 25 bp, Homo sapien
atgagaggtgacagggcccgtatct

SEQ ID NO: 4931753 - DNA, 25 bp, Homo sapien
aatgcgaattggtgtgtccagggtc

SEQ ID NO: 4931754 - DNA, 25 bp, Homo sapien
aaatggaggcagctttacaaacccg

SEQ ID NO: 4931755 - DNA, 25 bp, Homo sapien
aatagcctgaggacaatcgccacag

SEQ ID NO: 4931756 - DNA, 25 bp, Homo sapien
ttcagagtccccagtaagagtcttc

SEQ ID NO: 4931757 - DNA, 25 bp, Homo sapien
tcagggtcctcatccgtcaagtgga

SEQ ID NO: 4931758 - DNA, 25 bp, Homo sapien
tctaagttatgtcgcgttgctgtcc

SEQ ID NO: 4931759 - DNA, 25 bp, Homo sapien
gcctttcagatgcacggactgggaa

SEQ ID NO: 4931760 - DNA, 25 bp, Homo sapien
cccagtcgcgctctgaggaatagca

SEQ ID NO: 4931761 - DNA, 25 bp, Homo sapien
tcagagaagtcaagtggctcgccca

SEQ ID NO: 4931762 - DNA, 25 bp, Homo sapien
cagcacccgagccacagctgcgacc

SEQ ID NO: 4931763 - DNA, 25 bp, Homo sapien
tgaggcagtccacggcgatccccgc

SEQ ID NO: 4931764 - DNA, 25 bp, Homo sapien
acagctgcgacctgcacgccgcgcg

SEQ ID NO: 4931765 - DNA, 25 bp, Homo sapien
gcagtccacggcgatccccgccagt

SEQ ID NO: 4931766 - DNA, 25 bp, Homo sapien
gcgggaaccgaccgctcagccccga

SEQ ID NO: 4931767 - DNA, 25 bp, Homo sapien
ccggtggccgccgagtacccagcgc

SEQ ID NO: 4931768 - DNA, 25 bp, Homo sapien
ccgccgagtacccagcgccggcggc

SEQ ID NO: 4931769 - DNA, 25 bp, Homo sapien
gggaaccgaccgctcagccccgatc

SEQ ID NO: 4931770 - DNA, 25 bp, Homo sapien
cgccgggcccgggatgtggactcca

SEQ ID NO: 4931771 - DNA, 25 bp, Homo sapien
cccgggatgtggactccaggcgcac

SEQ ID NO: 4931772 - DNA, 25 bp, Homo sapien
gggatgtggactccaggcgcacggg

SEQ ID NO: 4931773 - DNA, 25 bp, Homo sapien
gggcccgggatgtggactccaggcg

SEQ ID NO: 4931774 - DNA, 25 bp, Homo sapien
gccatcagctcgggcaggtacttct

SEQ ID NO: 4931775 - DNA, 25 bp, Homo sapien
ccgccatcagctcgggcaggtactt

SEQ ID NO: 4931776 - DNA, 25 bp, Homo sapien
gggcgtgcgtgaaggaggggtccag

SEQ ID NO: 4931777 - DNA, 25 bp, Homo sapien
cttggttcaccaggcgcagggcgtg

SEQ ID NO: 4931778 - DNA, 25 bp, Homo sapien
catcagggtcttcccctaggtgtcc

SEQ ID NO: 4931779 - DNA, 25 bp, Homo sapien
ttcacatcagggtcttcccctaggt

SEQ ID NO: 4931780 - DNA, 25 bp, Homo sapien
tctccgccgcgtccgctgacagcag

SEQ ID NO: 4931781 - DNA, 25 bp, Homo sapien
cgcgtccgctgacagcagagggcac

SEQ ID NO: 4931782 - DNA, 25 bp, Homo sapien
caagggccagcctgcaaggcttggc

SEQ ID NO: 4931783 - DNA, 25 bp, Homo sapien
gagctggctggagtcgtgtgaaaat

SEQ ID NO: 4931784 - DNA, 25 bp, Homo sapien
ctccggaacggtgctcttttgccgg

SEQ ID NO: 4931785 - DNA, 25 bp, Homo sapien
tgactgccccgccagggctgttgga

SEQ ID NO: 4931786 - DNA, 25 bp, Homo sapien
cacagttgcattagaggcaaacaca

SEQ ID NO: 4931787 - DNA, 25 bp, Homo sapien
caatttagtgctgaaataccaactc

SEQ ID NO: 4931788 - DNA, 25 bp, Homo sapien
actccaatgtgaataactgctgaaa

SEQ ID NO: 4931789 - DNA, 25 bp, Homo sapien
ctaaggtttgccatgctggcccatt

SEQ ID NO: 4931790 - DNA, 25 bp, Homo sapien
ttagtgtttttgagccttagaggcc

SEQ ID NO: 4931791 - DNA, 25 bp, Homo sapien
ggcacgcagggaataaaacctccta

SEQ ID NO: 4931792 - DNA, 25 bp, Homo sapien
taagctgtgtaccttgactgggcaa

SEQ ID NO: 4931793 - DNA, 25 bp, Homo sapien
gaatgcctactgaagactgccggag

SEQ ID NO: 4931794 - DNA, 25 bp, Homo sapien
agaagtgaacttgcattagttccat

SEQ ID NO: 4931795 - DNA, 25 bp, Homo sapien
gccatggtttaatactaagcagaga

SEQ ID NO: 4931796 - DNA, 25 bp, Homo sapien
tttaatactaagcagagagactctg

SEQ ID NO: 4931797 - DNA, 25 bp, Homo sapien
ctcagagatgccatggtttaatact

SEQ ID NO: 4931798 - DNA, 25 bp, Homo sapien
aacaatgagattgtgaactctcaac

SEQ ID NO: 4931799 - DNA, 25 bp, Homo sapien
gacacatcactaattcctcgtatgg

SEQ ID NO: 4931800 - DNA, 25 bp, Homo sapien
gattgtgaactctcaactgacacat

SEQ ID NO: 4931801 - DNA, 25 bp, Homo sapien
caactgacacatcactaattcctcg

SEQ ID NO: 4931802 - DNA, 25 bp, Homo sapien
aaacagacaagaatcttggaaactt

SEQ ID NO: 4931803 - DNA, 25 bp, Homo sapien
tacaggtggtacttacacagggttc

SEQ ID NO: 4931804 - DNA, 25 bp, Homo sapien
tatgtaaagagtgccttctatgtac

SEQ ID NO: 4931805 - DNA, 25 bp, Homo sapien
gtactagacatttgtacaggtggta

SEQ ID NO: 4931806 - DNA, 25 bp, Homo sapien
tgaagcacttctgtgtaacaagatc

SEQ ID NO: 4931807 - DNA, 25 bp, Homo sapien
tgaatactgatgtcccacatacaca

SEQ ID NO: 4931808 - DNA, 25 bp, Homo sapien
tgtttctgaaatcaatacggtagta

SEQ ID NO: 4931809 - DNA, 25 bp, Homo sapien
tgatcagtatcagcacatgtaccag

SEQ ID NO: 4931810 - DNA, 25 bp, Homo sapien
tcagtaaccctcacaatcaatgcct

SEQ ID NO: 4931811 - DNA, 25 bp, Homo sapien
tatgattaggtgaagtaatgatcca

SEQ ID NO: 4931812 - DNA, 25 bp, Homo sapien
gtctttctcatttatcccgctggca

SEQ ID NO: 4931813 - DNA, 25 bp, Homo sapien
gattagttctgttcagactgcactc

SEQ ID NO: 4931814 - DNA, 25 bp, Homo sapien
tcctgcaaggatctgaattaaaaaa

SEQ ID NO: 4931815 - DNA, 25 bp, Homo sapien
tatggtaacatgtactctggctttg

SEQ ID NO: 4931816 - DNA, 25 bp, Homo sapien
gctgcaccatccaggtatgtttaag

SEQ ID NO: 4931817 - DNA, 25 bp, Homo sapien
tagcctatgtgtacagcaagccggc

SEQ ID NO: 4931818 - DNA, 25 bp, Homo sapien
tcctgtggttaagcaacaaaagaca

SEQ ID NO: 4931819 - DNA, 25 bp, Homo sapien
ctcacccagagcaacttccagttcc

SEQ ID NO: 4931820 - DNA, 25 bp, Homo sapien
tcacccagagcaacttccagttcca

SEQ ID NO: 4931821 - DNA, 25 bp, Homo sapien
cactcaaccactgactcacccagag

SEQ ID NO: 4931822 - DNA, 25 bp, Homo sapien
cccagagcaacttccagttccacag

SEQ ID NO: 4931823 - DNA, 25 bp, Homo sapien
cactgggaaccacctaaatgtctta

SEQ ID NO: 4931824 - DNA, 25 bp, Homo sapien
caaagatcggtaccaaatgcactgt

SEQ ID NO: 4931825 - DNA, 25 bp, Homo sapien
gctgggtaagtaggctagagcacac

SEQ ID NO: 4931826 - DNA, 25 bp, Homo sapien
gcacaccctggaataaaatagcatg

SEQ ID NO: 4931827 - DNA, 25 bp, Homo sapien
ttccacacgttttcccttgtgtcag

SEQ ID NO: 4931828 - DNA, 25 bp, Homo sapien
cacgttttcccttgtgtcagtgtca

SEQ ID NO: 4931829 - DNA, 25 bp, Homo sapien
ttttcccttgtgtcagtgtcactta

SEQ ID NO: 4931830 - DNA, 25 bp, Homo sapien
agaattccacacgttttcccttgtg

SEQ ID NO: 4931831 - DNA, 25 bp, Homo sapien
cactgaaacagccaatgggcttcat

SEQ ID NO: 4931832 - DNA, 25 bp, Homo sapien
cacccaggttcagagaaggataaag

SEQ ID NO: 4931833 - DNA, 25 bp, Homo sapien
ccaacctatagacacccaggttcag

SEQ ID NO: 4931834 - DNA, 25 bp, Homo sapien
aagcaccaacctatagacacccagg

SEQ ID NO: 4931835 - DNA, 25 bp, Homo sapien
ctccaagcaccaacctatagacacc

SEQ ID NO: 4931836 - DNA, 25 bp, Homo sapien
cttcatccttgccttctcctttttg

SEQ ID NO: 4931837 - DNA, 25 bp, Homo sapien
tttcttcatccttgccttctccttt

SEQ ID NO: 4931838 - DNA, 25 bp, Homo sapien
catccttgccttctcctttttgaaa

SEQ ID NO: 4931839 - DNA, 25 bp, Homo sapien
cttttcttcatccttgccttctcct

SEQ ID NO: 4931840 - DNA, 25 bp, Homo sapien
gggaattaacactttctgtcccagc

SEQ ID NO: 4931841 - DNA, 25 bp, Homo sapien
ggaattaacactttctgtcccagct

SEQ ID NO: 4931842 - DNA, 25 bp, Homo sapien
cgggaattaacactttctgtcccag

SEQ ID NO: 4931843 - DNA, 25 bp, Homo sapien
gaacaggacaaatgtagcttctgaa

SEQ ID NO: 4931844 - DNA, 25 bp, Homo sapien
caaatgtagcttctgaagatttact

SEQ ID NO: 4931845 - DNA, 25 bp, Homo sapien
tcctgctgccgcttaccggttctct

SEQ ID NO: 4931846 - DNA, 25 bp, Homo sapien
tgctgccgcttaccggttctcttct

SEQ ID NO: 4931847 - DNA, 25 bp, Homo sapien
caagaatgggactgggtactgaccc

SEQ ID NO: 4931848 - DNA, 25 bp, Homo sapien
tcatacatgggacttggcaacagca

SEQ ID NO: 4931849 - DNA, 25 bp, Homo sapien
tgggaatcccatcactaagcacgca

SEQ ID NO: 4931850 - DNA, 25 bp, Homo sapien
gaggtgtaagcccagctgccagaat

SEQ ID NO: 4931851 - DNA, 25 bp, Homo sapien
tgtcaaggtttcttcttgtaaacgc

SEQ ID NO: 4931852 - DNA, 25 bp, Homo sapien
cttggccttgtctctcatggaacct

SEQ ID NO: 4931853 - DNA, 25 bp, Homo sapien
tcagagaattgccacgtggacccaa

SEQ ID NO: 4931854 - DNA, 25 bp, Homo sapien
tctctcatggaacctttcccaagga

SEQ ID NO: 4931855 - DNA, 25 bp, Homo sapien
agatcatcattgagatggaagtact

SEQ ID NO: 4931856 - DNA, 25 bp, Homo sapien
caggtggggcaaacacttcaatgag

SEQ ID NO: 4931857 - DNA, 25 bp, Homo sapien
gatggaagtacttcgcttctccact

SEQ ID NO: 4931858 - DNA, 25 bp, Homo sapien
tcaatgagaacatggagatcatcat

SEQ ID NO: 4931859 - DNA, 25 bp, Homo sapien
gaactacttggcagatgtgtcagct

SEQ ID NO: 4931860 - DNA, 25 bp, Homo sapien
tctacttgaggtgatgtccatacag

SEQ ID NO: 4931861 - DNA, 25 bp, Homo sapien
gctgtagtatgtaagtcaatccacc

SEQ ID NO: 4931862 - DNA, 25 bp, Homo sapien
taacctgggataaccaaagacagtc

SEQ ID NO: 4931863 - DNA, 25 bp, Homo sapien
gtttccctcgaaccactggaacatc

SEQ ID NO: 4931864 - DNA, 25 bp, Homo sapien
tgtacgcaaggtgggtttccctcga

SEQ ID NO: 4931865 - DNA, 25 bp, Homo sapien
gggctggtacacctcttgtacgcaa

SEQ ID NO: 4931866 - DNA, 25 bp, Homo sapien
cctggagctgtgcttgcctgatctc

SEQ ID NO: 4931867 - DNA, 25 bp, Homo sapien
tacatgttctgtccgtccttgacca

SEQ ID NO: 4931868 - DNA, 25 bp, Homo sapien
tacaaacgcacattagcctatagcc

SEQ ID NO: 4931869 - DNA, 25 bp, Homo sapien
tatctgggagaactacagtaaggga

SEQ ID NO: 4931870 - DNA, 25 bp, Homo sapien
caaaacacaagggaaggaccaagca

SEQ ID NO: 4931871 - DNA, 25 bp, Homo sapien
gaaaactgataaatgaccctgggtg

SEQ ID NO: 4931872 - DNA, 25 bp, Homo sapien
ggtaaaataccagcgtcacaaagat

SEQ ID NO: 4931873 - DNA, 25 bp, Homo sapien
caatatctgggaacacgcacttaat

SEQ ID NO: 4931874 - DNA, 25 bp, Homo sapien
catattgggtgctacgtaacttctc

SEQ ID NO: 4931875 - DNA, 25 bp, Homo sapien
gttgttaattcctctctatctcggc

SEQ ID NO: 4931876 - DNA, 25 bp, Homo sapien
tcaagttcctcctctaatgtgaaga

SEQ ID NO: 4931877 - DNA, 25 bp, Homo sapien
tcttgggaggcttgaatgtaccgtg

SEQ ID NO: 4931878 - DNA, 25 bp, Homo sapien
tcatcaactgatctacttcatcctc

SEQ ID NO: 4931879 - DNA, 25 bp, Homo sapien
tctgagcaactctagagaccacccg

SEQ ID NO: 4931880 - DNA, 25 bp, Homo sapien
agatgatgttggcagctctcactct

SEQ ID NO: 4931881 - DNA, 25 bp, Homo sapien
cgaaatgtggttctagggcagcgca

SEQ ID NO: 4931882 - DNA, 25 bp, Homo sapien
ttcatgcgcatccacatcgcctgag

SEQ ID NO: 4931883 - DNA, 25 bp, Homo sapien
gaacacttcctaacccaatctgtgg

SEQ ID NO: 4931884 - DNA, 25 bp, Homo sapien
aaagcatcaactccatatggtttca

SEQ ID NO: 4931885 - DNA, 25 bp, Homo sapien
tacattactcatcagaggctgggac

SEQ ID NO: 4931886 - DNA, 25 bp, Homo sapien
gctggtcattggaagtgcctcgttc

SEQ ID NO: 4931887 - DNA, 25 bp, Homo sapien
gagttggcgtccctcgtggtactac

SEQ ID NO: 4931888 - DNA, 25 bp, Homo sapien
tccccgactcactggccctcgggtg

SEQ ID NO: 4931889 - DNA, 25 bp, Homo sapien
tggcggtggaggtctgtacccagtt

SEQ ID NO: 4931890 - DNA, 25 bp, Homo sapien
acaactccaactggccgggctgtaa

SEQ ID NO: 4931891 - DNA, 25 bp, Homo sapien
gaacaaggctgttgtctgacacctt

SEQ ID NO: 4931892 - DNA, 25 bp, Homo sapien
tgaacaaggctgttgtctgacacct

SEQ ID NO: 4931893 - DNA, 25 bp, Homo sapien
gatgaacaaggctgttgtctgacac

SEQ ID NO: 4931894 - DNA, 25 bp, Homo sapien
aacaaggctgttgtctgacaccttc

SEQ ID NO: 4931895 - DNA, 25 bp, Homo sapien
tgcaagacttgtaattgtatgaagc

SEQ ID NO: 4931896 - DNA, 25 bp, Homo sapien
cacacagctgttttatgtatgcaag

SEQ ID NO: 4931897 - DNA, 25 bp, Homo sapien
ccagccaaattacaacactggcgga

SEQ ID NO: 4931898 - DNA, 25 bp, Homo sapien
tatgaccgtcagttatttgaaggca

SEQ ID NO: 4931899 - DNA, 25 bp, Homo sapien
taccatgctgcaaaactaagcgtga

SEQ ID NO: 4931900 - DNA, 25 bp, Homo sapien
gaggtcaaacgggtatctgcaaggc

SEQ ID NO: 4931901 - DNA, 25 bp, Homo sapien
ggcagtgctactgatggcaagccac

SEQ ID NO: 4931902 - DNA, 25 bp, Homo sapien
caaacagttgagaccaatggccaag

SEQ ID NO: 4931903 - DNA, 25 bp, Homo sapien
aagtaccttaaataagatgtatact

SEQ ID NO: 4931904 - DNA, 25 bp, Homo sapien
gtaccttaaataagatgtatacttg

SEQ ID NO: 4931905 - DNA, 25 bp, Homo sapien
tactctaagataagtaccttaaata

SEQ ID NO: 4931906 - DNA, 25 bp, Homo sapien
accttaaataagatgtatacttgtg

SEQ ID NO: 4931907 - DNA, 25 bp, Homo sapien
aatgttgtctcctctaaagtcttac

SEQ ID NO: 4931908 - DNA, 25 bp, Homo sapien
tctcaaggttaactgtgtttcgtct

SEQ ID NO: 4931909 - DNA, 25 bp, Homo sapien
cctgtttgttcctccctattctttg

SEQ ID NO: 4931910 - DNA, 25 bp, Homo sapien
accacattccatcaagcagttgtac

SEQ ID NO: 4931911 - DNA, 25 bp, Homo sapien
cttctttagaaattggcagaagctc

SEQ ID NO: 4931912 - DNA, 25 bp, Homo sapien
ttctttagaaattggcagaagctca

SEQ ID NO: 4931913 - DNA, 25 bp, Homo sapien
tctttagaaattggcagaagctcat

SEQ ID NO: 4931914 - DNA, 25 bp, Homo sapien
caaggggatttatcagtcccttcac

SEQ ID NO: 4931915 - DNA, 25 bp, Homo sapien
cccacaaaggactgctatgattgga

SEQ ID NO: 4931916 - DNA, 25 bp, Homo sapien
tggaagctgaccatcagtgcattct

SEQ ID NO: 4931917 - DNA, 25 bp, Homo sapien
ccttcacctaagctgggtggaccct

SEQ ID NO: 4931918 - DNA, 25 bp, Homo sapien
ggctggggtgctatagctgttatca

SEQ ID NO: 4931919 - DNA, 25 bp, Homo sapien
ctgttatcataggaatcataactct

SEQ ID NO: 4931920 - DNA, 25 bp, Homo sapien
aagcagtgccatatccatcatcata

SEQ ID NO: 4931921 - DNA, 25 bp, Homo sapien
tatcataggaatcataactctgttc

SEQ ID NO: 4931922 - DNA, 25 bp, Homo sapien
tgctcgcacagtccttgcaggtttc

SEQ ID NO: 4931923 - DNA, 25 bp, Homo sapien
agaacctgctcttcgtagccactct

SEQ ID NO: 4931924 - DNA, 25 bp, Homo sapien
tcgtagccactcttgtgtgaaacaa

SEQ ID NO: 4931925 - DNA, 25 bp, Homo sapien
tataaaacatttgctcgcacagtcc

SEQ ID NO: 4931926 - DNA, 25 bp, Homo sapien
ctaatctgtaaaacctccaaagata

SEQ ID NO: 4931927 - DNA, 25 bp, Homo sapien
taatctgtaaaacctccaaagataa

SEQ ID NO: 4931928 - DNA, 25 bp, Homo sapien
gctggaagcaatctatcacctggtg

SEQ ID NO: 4931929 - DNA, 25 bp, Homo sapien
ggtgccaatgatcatccctccacag

SEQ ID NO: 4931930 - DNA, 25 bp, Homo sapien
agtactacttacagagcaccagcaa

SEQ ID NO: 4931931 - DNA, 25 bp, Homo sapien
cctggtgataacgaaggtgccaatg

SEQ ID NO: 4931932 - DNA, 25 bp, Homo sapien
cattgaattgccaggagaacaaggg

SEQ ID NO: 4931933 - DNA, 25 bp, Homo sapien
tctacttcggaaagctatagaacat

SEQ ID NO: 4931934 - DNA, 25 bp, Homo sapien
tgtatgccacagatgaaggctttgt

SEQ ID NO: 4931935 - DNA, 25 bp, Homo sapien
ggaaaatgaccctgtattgcagagg

SEQ ID NO: 4931936 - DNA, 25 bp, Homo sapien
cctagaagcatgaggctgtatcatc

SEQ ID NO: 4931937 - DNA, 25 bp, Homo sapien
gatgctccatcaagctcaggtggga

SEQ ID NO: 4931938 - DNA, 25 bp, Homo sapien
gatacacagatactgaccaccgtta

SEQ ID NO: 4931939 - DNA, 25 bp, Homo sapien
tccccagggagtcagtctgctgaaa

SEQ ID NO: 4931940 - DNA, 25 bp, Homo sapien
gaactaggcttactcagacttgggt

SEQ ID NO: 4931941 - DNA, 25 bp, Homo sapien
tacaagggtgatctcaaggaaaagc

SEQ ID NO: 4931942 - DNA, 25 bp, Homo sapien
tcttacattgtgaggccaactagct

SEQ ID NO: 4931943 - DNA, 25 bp, Homo sapien
tatgatgacgggaaaagtgctcttg

SEQ ID NO: 4931944 - DNA, 25 bp, Homo sapien
gttcactagtgctcctactagggca

SEQ ID NO: 4931945 - DNA, 25 bp, Homo sapien
cactgctacgactactgtcatctaa

SEQ ID NO: 4931946 - DNA, 25 bp, Homo sapien
tggtccttgttcactagtgctccta

SEQ ID NO: 4931947 - DNA, 25 bp, Homo sapien
tcctactagggcaatgccactgcta

SEQ ID NO: 4931948 - DNA, 25 bp, Homo sapien
cgtttcttgtacctcaaatgtctat

SEQ ID NO: 4931949 - DNA, 25 bp, Homo sapien
cagcatttcgtttcttgtacctcaa

SEQ ID NO: 4931950 - DNA, 25 bp, Homo sapien
tcacagcatttcgtttcttgtacct

SEQ ID NO: 4931951 - DNA, 25 bp, Homo sapien
tacctcaaatgtctattaaccaaag

SEQ ID NO: 4931952 - DNA, 25 bp, Homo sapien
gagagcagggaaatggatctctgca

SEQ ID NO: 4931953 - DNA, 25 bp, Homo sapien
tctctgcagtccagtcacaagtctg

SEQ ID NO: 4931954 - DNA, 25 bp, Homo sapien
tctggttacatgaggccaaggatct

SEQ ID NO: 4931955 - DNA, 25 bp, Homo sapien
ggcaaatccacgttccaatgtacaa

SEQ ID NO: 4931956 - DNA, 25 bp, Homo sapien
gcccagatgaaatgttttctttgac

SEQ ID NO: 4931957 - DNA, 25 bp, Homo sapien
aaaacaaatgcccagatgaaatgtt

SEQ ID NO: 4931958 - DNA, 25 bp, Homo sapien
aaacaaatgcccagatgaaatgttt

SEQ ID NO: 4931959 - DNA, 25 bp, Homo sapien
ttaaaaacaaatgcccagatgaaat

SEQ ID NO: 4931960 - DNA, 25 bp, Homo sapien
tccgtaatcatagtaatcagcacca

SEQ ID NO: 4931961 - DNA, 25 bp, Homo sapien
gtccgtaatcatagtaatcagcacc

SEQ ID NO: 4931962 - DNA, 25 bp, Homo sapien
cgtaggaatcataagtctcctcact

SEQ ID NO: 4931963 - DNA, 25 bp, Homo sapien
taggaatcataagtctcctcactga

SEQ ID NO: 4931964 - DNA, 25 bp, Homo sapien
gaatcataagtctcctcactgagtc

SEQ ID NO: 4931965 - DNA, 25 bp, Homo sapien
ggaatcataagtctcctcactgagt

SEQ ID NO: 4931966 - DNA, 25 bp, Homo sapien
gccatatggctggtctctgtagacg

SEQ ID NO: 4931967 - DNA, 25 bp, Homo sapien
gctggtctctgtagacgccctttgc

SEQ ID NO: 4931968 - DNA, 25 bp, Homo sapien
tgtcctcgctgaaggtgccttgtgt

SEQ ID NO: 4931969 - DNA, 25 bp, Homo sapien
ccttgtgtcttgagttagtccactc

SEQ ID NO: 4931970 - DNA, 25 bp, Homo sapien
atacaggactggtggagattggcta

SEQ ID NO: 4931971 - DNA, 25 bp, Homo sapien
ggtggagattggctatttcacaaca

SEQ ID NO: 4931972 - DNA, 25 bp, Homo sapien
aggactggtggagattggctatttc

SEQ ID NO: 4931973 - DNA, 25 bp, Homo sapien
gactggtggagattggctatttcac

SEQ ID NO: 4931974 - DNA, 25 bp, Homo sapien
tatttaaaaagggattgttcataga

SEQ ID NO: 4931975 - DNA, 25 bp, Homo sapien
tatttagtatcaagcaagaggagac

SEQ ID NO: 4931976 - DNA, 25 bp, Homo sapien
taaaatgaaaggtgaggcttatgtt

SEQ ID NO: 4931977 - DNA, 25 bp, Homo sapien
ggagactttgcttaacactacagaa

SEQ ID NO: 4931978 - DNA, 25 bp, Homo sapien
attatttgcacttgtaattggcttc

SEQ ID NO: 4931979 - DNA, 25 bp, Homo sapien
caagcagctcgataccatttggact

SEQ ID NO: 4931980 - DNA, 25 bp, Homo sapien
ggcgagtgcgacctcaattagtcaa

SEQ ID NO: 4931981 - DNA, 25 bp, Homo sapien
tgcgtagtttaacgtgccactcaag

SEQ ID NO: 4931982 - DNA, 25 bp, Homo sapien
tgcactagtgaaaaaacgctcaaca

SEQ ID NO: 4931983 - DNA, 25 bp, Homo sapien
ttcaggtgttcaaccagttcctgtg

SEQ ID NO: 4931984 - DNA, 25 bp, Homo sapien
caggtgttcaaccagttcctgtgac

SEQ ID NO: 4931985 - DNA, 25 bp, Homo sapien
tttgcttcaggtgttcaaccagttc

SEQ ID NO: 4931986 - DNA, 25 bp, Homo sapien
tgcttcaggtgttcaaccagttcct

SEQ ID NO: 4931987 - DNA, 25 bp, Homo sapien
tgtccagtatggagctcatgttcca

SEQ ID NO: 4931988 - DNA, 25 bp, Homo sapien
gggctgtcacctccattcggttttg

SEQ ID NO: 4931989 - DNA, 25 bp, Homo sapien
tcagtctttgtatgaccagtgcctc

SEQ ID NO: 4931990 - DNA, 25 bp, Homo sapien
taccgggttccatgtcttatcagtc

SEQ ID NO: 4931991 - DNA, 25 bp, Homo sapien
taggcataaggcatggtaattgccc

SEQ ID NO: 4931992 - DNA, 25 bp, Homo sapien
ggcatggtaattgccctaaagatat

SEQ ID NO: 4931993 - DNA, 25 bp, Homo sapien
taaggcatggtaattgccctaaaga

SEQ ID NO: 4931994 - DNA, 25 bp, Homo sapien
ggtaattgccctaaagatatttaca

SEQ ID NO: 4931995 - DNA, 25 bp, Homo sapien
tggtcatacaagtcccaggccctag

SEQ ID NO: 4931996 - DNA, 25 bp, Homo sapien
tcccagcatgttatattccagcagc

SEQ ID NO: 4931997 - DNA, 25 bp, Homo sapien
cagcagctgcttatacgttcctaaa

SEQ ID NO: 4931998 - DNA, 25 bp, Homo sapien
aacaactcaggacatcgccgatggc

SEQ ID NO: 4931999 - DNA, 25 bp, Homo sapien
ttgatgtgtcatacgaaacaaaact

SEQ ID NO: 4932000 - DNA, 25 bp, Homo sapien
gaacctattttgatgtgtcatacga

SEQ ID NO: 4932001 - DNA, 25 bp, Homo sapien
cctattttgatgtgtcatacgaaac

SEQ ID NO: 4932002 - DNA, 25 bp, Homo sapien
accccaaagaacctattttgatgtg

SEQ ID NO: 4932003 - DNA, 25 bp, Homo sapien
caataggcagcctttattaactact

SEQ ID NO: 4932004 - DNA, 25 bp, Homo sapien
catttgctgactaggcacgttggtg

SEQ ID NO: 4932005 - DNA, 25 bp, Homo sapien
gcagctgtacatggttttcaagtgt

SEQ ID NO: 4932006 - DNA, 25 bp, Homo sapien
tgtatacaatttagagctgtgctga

SEQ ID NO: 4932007 - DNA, 25 bp, Homo sapien
ttctagccccagtgcaaacgctggg

SEQ ID NO: 4932008 - DNA, 25 bp, Homo sapien
gccccagtgcaaacgctgggttcat

SEQ ID NO: 4932009 - DNA, 25 bp, Homo sapien
tagccccagtgcaaacgctgggttc

SEQ ID NO: 4932010 - DNA, 25 bp, Homo sapien
tctagccccagtgcaaacgctgggt

SEQ ID NO: 4932011 - DNA, 25 bp, Homo sapien
gaaaagtcttcgtggcatgccaagg

SEQ ID NO: 4932012 - DNA, 25 bp, Homo sapien
aggtgccggcgagcagacactgcat

SEQ ID NO: 4932013 - DNA, 25 bp, Homo sapien
agaaccacagccgacagcccatagg

SEQ ID NO: 4932014 - DNA, 25 bp, Homo sapien
gcccatagggaacgttaggccaggc

SEQ ID NO: 4932015 - DNA, 25 bp, Homo sapien
ttgcagtacgagtgcctgaatgaag

SEQ ID NO: 4932016 - DNA, 25 bp, Homo sapien
tcttgcagtacgagtgcctgaatga

SEQ ID NO: 4932017 - DNA, 25 bp, Homo sapien
cgtaggggaggcgtgtcagcacaga

SEQ ID NO: 4932018 - DNA, 25 bp, Homo sapien
agaggaggtcttgcagtacgagtgc

SEQ ID NO: 4932019 - DNA, 25 bp, Homo sapien
tctgtatctgacactgatgcggcca

SEQ ID NO: 4932020 - DNA, 25 bp, Homo sapien
tgtatctgacactgatgcggccaaa

SEQ ID NO: 4932021 - DNA, 25 bp, Homo sapien
agcctctcggttcctgttgttaggc

SEQ ID NO: 4932022 - DNA, 25 bp, Homo sapien
actgatgcggccaaagactggaaga

SEQ ID NO: 4932023 - DNA, 25 bp, Homo sapien
ttaacgcaagacgtgaagatgagaa

SEQ ID NO: 4932024 - DNA, 25 bp, Homo sapien
taacgcaagacgtgaagatgagaaa

SEQ ID NO: 4932025 - DNA, 25 bp, Homo sapien
aacgcaagacgtgaagatgagaaag

SEQ ID NO: 4932026 - DNA, 25 bp, Homo sapien
cttaacgcaagacgtgaagatgaga

SEQ ID NO: 4932027 - DNA, 25 bp, Homo sapien
aaaatgtcccgcatccgcagaagtg

SEQ ID NO: 4932028 - DNA, 25 bp, Homo sapien
cctggataaagaggccagctctctg

SEQ ID NO: 4932029 - DNA, 25 bp, Homo sapien
tggtggaatctttagcctggataaa

SEQ ID NO: 4932030 - DNA, 25 bp, Homo sapien
aaggatagagagagactgagcacca

SEQ ID NO: 4932031 - DNA, 25 bp, Homo sapien
ggatcttggtcctgtctcaccacga

SEQ ID NO: 4932032 - DNA, 25 bp, Homo sapien
cacgatacgcctgtttgctcaggat

SEQ ID NO: 4932033 - DNA, 25 bp, Homo sapien
ttcactcccttgatcacggagaatg

SEQ ID NO: 4932034 - DNA, 25 bp, Homo sapien
ttgatcacggagaatgcctggcgca

SEQ ID NO: 4932035 - DNA, 25 bp, Homo sapien
tgtgtccttggggtgtcccggctta

SEQ ID NO: 4932036 - DNA, 25 bp, Homo sapien
gatggccccgatctatttctgcaaa

SEQ ID NO: 4932037 - DNA, 25 bp, Homo sapien
cccgcacaggatggccccgatctat

SEQ ID NO: 4932038 - DNA, 25 bp, Homo sapien
ggccccgatctatttctgcaaagca

SEQ ID NO: 4932039 - DNA, 25 bp, Homo sapien
cgcacaggatggccccgatctattt

SEQ ID NO: 4932040 - DNA, 25 bp, Homo sapien
taagccccttggtgcgccctggtcc

SEQ ID NO: 4932041 - DNA, 25 bp, Homo sapien
ctaagccccttggtgcgccctggtc

SEQ ID NO: 4932042 - DNA, 25 bp, Homo sapien
gtccccagcccacttctcctctcac

SEQ ID NO: 4932043 - DNA, 25 bp, Homo sapien
ccctggtccccagcccacttctcct

SEQ ID NO: 4932044 - DNA, 25 bp, Homo sapien
tctcttcctcgtggatcttgggctg

SEQ ID NO: 4932045 - DNA, 25 bp, Homo sapien
gctctttttatcatgctgggcttgc

SEQ ID NO: 4932046 - DNA, 25 bp, Homo sapien
tatgggtccctagtgtagcacctcc

SEQ ID NO: 4932047 - DNA, 25 bp, Homo sapien
gaaatgcacctgagcttaggtccct

SEQ ID NO: 4932048 - DNA, 25 bp, Homo sapien
gctccatccaagataacagaagcaa

SEQ ID NO: 4932049 - DNA, 25 bp, Homo sapien
ctctgaagtcagttgagtgatcaaa

SEQ ID NO: 4932050 - DNA, 25 bp, Homo sapien
caaaatggcaccttctgttatttat

SEQ ID NO: 4932051 - DNA, 25 bp, Homo sapien
aggccagagggagcagcttatctgc

SEQ ID NO: 4932052 - DNA, 25 bp, Homo sapien
cattattcatgaagctaaagaggag

SEQ ID NO: 4932053 - DNA, 25 bp, Homo sapien
tctgagctgcctgcaacgtgctgag

SEQ ID NO: 4932054 - DNA, 25 bp, Homo sapien
caatgccagcctgggggtatcaact

SEQ ID NO: 4932055 - DNA, 25 bp, Homo sapien
ctgggggtatcaactggaactggaa

SEQ ID NO: 4932056 - DNA, 25 bp, Homo sapien
acaacttaatagtgctctggtgtga

SEQ ID NO: 4932057 - DNA, 25 bp, Homo sapien
ttcctctgttccacatctgagttcc

SEQ ID NO: 4932058 - DNA, 25 bp, Homo sapien
ctgcactgttgaagccacttcctct

SEQ ID NO: 4932059 - DNA, 25 bp, Homo sapien
tcctctgttccacatctgagttcca

SEQ ID NO: 4932060 - DNA, 25 bp, Homo sapien
cacttcctctgttccacatctgagt

SEQ ID NO: 4932061 - DNA, 25 bp, Homo sapien
ccctcatgatgaccgatggtggttg

SEQ ID NO: 4932062 - DNA, 25 bp, Homo sapien
tgaccgatggtggttgagttccacg

SEQ ID NO: 4932063 - DNA, 25 bp, Homo sapien
tcatgatgaccgatggtggttgagt

SEQ ID NO: 4932064 - DNA, 25 bp, Homo sapien
ccgaaccctcatgatgaccgatggt

SEQ ID NO: 4932065 - DNA, 25 bp, Homo sapien
taacttcagcaagatagggcgggag

SEQ ID NO: 4932066 - DNA, 25 bp, Homo sapien
ggagatagacttgagaaccacccca

SEQ ID NO: 4932067 - DNA, 25 bp, Homo sapien
tgtgaaagcagaaggacaatggtcc

SEQ ID NO: 4932068 - DNA, 25 bp, Homo sapien
taggaagatcttactggtgacaatg

SEQ ID NO: 4932069 - DNA, 25 bp, Homo sapien
tccaactggtgaggttccttagcct

SEQ ID NO: 4932070 - DNA, 25 bp, Homo sapien
catttcagcgtctggctttgggagc

SEQ ID NO: 4932071 - DNA, 25 bp, Homo sapien
caggagagcttttgcattgccccat

SEQ ID NO: 4932072 - DNA, 25 bp, Homo sapien
ggtgaggttccttagcctcagggcc

SEQ ID NO: 4932073 - DNA, 25 bp, Homo sapien
gccaaacaccctaccccttgtgcag

SEQ ID NO: 4932074 - DNA, 25 bp, Homo sapien
ctgttgccaaacaccctaccccttg

SEQ ID NO: 4932075 - DNA, 25 bp, Homo sapien
ctgggattggggacaagggtctgca

SEQ ID NO: 4932076 - DNA, 25 bp, Homo sapien
aacaccctaccccttgtgcagcagc

SEQ ID NO: 4932077 - DNA, 25 bp, Homo sapien
gggccactggagacagctgaaggag

SEQ ID NO: 4932078 - DNA, 25 bp, Homo sapien
gcaggggccactggagacagctgaa

SEQ ID NO: 4932079 - DNA, 25 bp, Homo sapien
gccactggagacagctgaaggagga

SEQ ID NO: 4932080 - DNA, 25 bp, Homo sapien
aggggccactggagacagctgaagg

SEQ ID NO: 4932081 - DNA, 25 bp, Homo sapien
tcagcagggtgtcgggggagaagac

SEQ ID NO: 4932082 - DNA, 25 bp, Homo sapien
tggttcagcagggtgtcgggggaga

SEQ ID NO: 4932083 - DNA, 25 bp, Homo sapien
gttcagcagggtgtcgggggagaag

SEQ ID NO: 4932084 - DNA, 25 bp, Homo sapien
cagggtgtcgggggagaagacagac

SEQ ID NO: 4932085 - DNA, 25 bp, Homo sapien
ctgcgaaggcaaaggcaaaagacca

SEQ ID NO: 4932086 - DNA, 25 bp, Homo sapien
aaaagaccaatgagagaggggggca

SEQ ID NO: 4932087 - DNA, 25 bp, Homo sapien
aaaggcaaaagaccaatgagagagg

SEQ ID NO: 4932088 - DNA, 25 bp, Homo sapien
aagaccaatgagagaggggggcaga

SEQ ID NO: 4932089 - DNA, 25 bp, Homo sapien
agtggaccagaccacaggatgtgga

SEQ ID NO: 4932090 - DNA, 25 bp, Homo sapien
gaccagaccacaggatgtggacccc

SEQ ID NO: 4932091 - DNA, 25 bp, Homo sapien
ccacaggatgtggaccccagcaatg

SEQ ID NO: 4932092 - DNA, 25 bp, Homo sapien
cagaccacaggatgtggaccccagc

SEQ ID NO: 4932093 - DNA, 25 bp, Homo sapien
gagattccttttcagggggtccagc

SEQ ID NO: 4932094 - DNA, 25 bp, Homo sapien
tgagattccttttcagggggtccag

SEQ ID NO: 4932095 - DNA, 25 bp, Homo sapien
ttgagattccttttcagggggtcca

SEQ ID NO: 4932096 - DNA, 25 bp, Homo sapien
tgagcccatgcgctttctggtgaga

SEQ ID NO: 4932097 - DNA, 25 bp, Homo sapien
tgcaccttcaagagggagcacctcc

SEQ ID NO: 4932098 - DNA, 25 bp, Homo sapien
gagagcatctaaaatccgtgcacct

SEQ ID NO: 4932099 - DNA, 25 bp, Homo sapien
gcgctttctggtgagagcatctaaa

SEQ ID NO: 4932100 - DNA, 25 bp, Homo sapien
ttcggtgtctcttgccagtgctccc

SEQ ID NO: 4932101 - DNA, 25 bp, Homo sapien
tcaacattgaaagagccaacgccag

SEQ ID NO: 4932102 - DNA, 25 bp, Homo sapien
tcatgggacatgatctgggccctca

SEQ ID NO: 4932103 - DNA, 25 bp, Homo sapien
gctgagtccgttagccaaaggcaca

SEQ ID NO: 4932104 - DNA, 25 bp, Homo sapien
gatggagaagatattggtcccattg

SEQ ID NO: 4932105 - DNA, 25 bp, Homo sapien
cagacacagaatgttgacgcccagg

SEQ ID NO: 4932106 - DNA, 25 bp, Homo sapien
tattggtcccattgacagagctcca

SEQ ID NO: 4932107 - DNA, 25 bp, Homo sapien
gacagagctccatatccaggagctt

SEQ ID NO: 4932108 - DNA, 25 bp, Homo sapien
gattttgcttgggagattggaggtc

SEQ ID NO: 4932109 - DNA, 25 bp, Homo sapien
tttgcttgggagattggaggtcaga

SEQ ID NO: 4932110 - DNA, 25 bp, Homo sapien
tgcttgggagattggaggtcagaca

SEQ ID NO: 4932111 - DNA, 25 bp, Homo sapien
cagggtctcaatgatgggttggatt

SEQ ID NO: 4932112 - DNA, 25 bp, Homo sapien
ccagcttcctgttgatgccggagcc

SEQ ID NO: 4932113 - DNA, 25 bp, Homo sapien
gtgttctaacccgtgaccctcagtg

SEQ ID NO: 4932114 - DNA, 25 bp, Homo sapien
aagcctagcctagattccagcttcc

SEQ ID NO: 4932115 - DNA, 25 bp, Homo sapien
ccctgacagaataagacagtgtgca

SEQ ID NO: 4932116 - DNA, 25 bp, Homo sapien
cattctggtaacgtggagacaataa

SEQ ID NO: 4932117 - DNA, 25 bp, Homo sapien
ggtaacgtggagacaataaggcatg

SEQ ID NO: 4932118 - DNA, 25 bp, Homo sapien
catcttcatggagacgaaagcaatg

SEQ ID NO: 4932119 - DNA, 25 bp, Homo sapien
ggccccagcagtaagtggctccaag

SEQ ID NO: 4932120 - DNA, 25 bp, Homo sapien
gggtcatatcaatcacttctgtgcc

SEQ ID NO: 4932121 - DNA, 25 bp, Homo sapien
gacacttcgtgtaccatggcagctc

SEQ ID NO: 4932122 - DNA, 25 bp, Homo sapien
tgtaagattcttcaagttcatgaat

SEQ ID NO: 4932123 - DNA, 25 bp, Homo sapien
tgtgccctctgtgttgtaagattct

SEQ ID NO: 4932124 - DNA, 25 bp, Homo sapien
ttgtggcttcctctaacagaactgt

SEQ ID NO: 4932125 - DNA, 25 bp, Homo sapien
tcagcaataccccagaggatcttgt

SEQ ID NO: 4932126 - DNA, 25 bp, Homo sapien
tctcctcccgcttttggcatccctc

SEQ ID NO: 4932127 - DNA, 25 bp, Homo sapien
tcgtccctctttaattgtggcttcc

SEQ ID NO: 4932128 - DNA, 25 bp, Homo sapien
tccagtgacttgcactgttgccctt

SEQ ID NO: 4932129 - DNA, 25 bp, Homo sapien
agtgacttgcactgttgcccttgat

SEQ ID NO: 4932130 - DNA, 25 bp, Homo sapien
tgtgctgctatgacataactcatgg

SEQ ID NO: 4932131 - DNA, 25 bp, Homo sapien
cagtgacttgcactgttgcccttga

SEQ ID NO: 4932132 - DNA, 25 bp, Homo sapien
gaagagctgcagaagtgccttgagt

SEQ ID NO: 4932133 - DNA, 25 bp, Homo sapien
gacttggcctcaattggcttaagaa

SEQ ID NO: 4932134 - DNA, 25 bp, Homo sapien
agtgttttgatgaagctcattatcc

SEQ ID NO: 4932135 - DNA, 25 bp, Homo sapien
ctaagcaatctaggctcaatctgtc

SEQ ID NO: 4932136 - DNA, 25 bp, Homo sapien
caaatggaagggatgatgagcctca

SEQ ID NO: 4932137 - DNA, 25 bp, Homo sapien
aaatggaagggatgatgagcctcac

SEQ ID NO: 4932138 - DNA, 25 bp, Homo sapien
tcaaatggaagggatgatgagcctc

SEQ ID NO: 4932139 - DNA, 25 bp, Homo sapien
cccctggagcttcatttactttgct

SEQ ID NO: 4932140 - DNA, 25 bp, Homo sapien
cacctcagaagcctccaactaaaaa

SEQ ID NO: 4932141 - DNA, 25 bp, Homo sapien
tgagggcttttgcagcttcactgag

SEQ ID NO: 4932142 - DNA, 25 bp, Homo sapien
aaaaatatagttcaccgttctgtag

SEQ ID NO: 4932143 - DNA, 25 bp, Homo sapien
caccaccacgttacatttacatttt

SEQ ID NO: 4932144 - DNA, 25 bp, Homo sapien
tcaccaccacgttacatttacattt

SEQ ID NO: 4932145 - DNA, 25 bp, Homo sapien
actagcaggacaaccctggcactgt

SEQ ID NO: 4932146 - DNA, 25 bp, Homo sapien
tccatgtggaagaacactgatatag

SEQ ID NO: 4932147 - DNA, 25 bp, Homo sapien
gggtggcactggaccgcttccacta

SEQ ID NO: 4932148 - DNA, 25 bp, Homo sapien
actgtccatgtggaagaacactgat

SEQ ID NO: 4932149 - DNA, 25 bp, Homo sapien
gctcaacacgcccaatttaatctta

SEQ ID NO: 4932150 - DNA, 25 bp, Homo sapien
ttatctgtcctccaatcagagaggt

SEQ ID NO: 4932151 - DNA, 25 bp, Homo sapien
aagtctgagctcaacacgcccaatt

SEQ ID NO: 4932152 - DNA, 25 bp, Homo sapien
tctatagggaaggtaaagtctgagc

SEQ ID NO: 4932153 - DNA, 25 bp, Homo sapien
tcagaacccaggttgtctagagtgg

SEQ ID NO: 4932154 - DNA, 25 bp, Homo sapien
ggtgactcactaggcccatggacat

SEQ ID NO: 4932155 - DNA, 25 bp, Homo sapien
ggatcctctcttgggtcagaaccca

SEQ ID NO: 4932156 - DNA, 25 bp, Homo sapien
tctagagtgggtgactcactaggcc

SEQ ID NO: 4932157 - DNA, 25 bp, Homo sapien
tcctgattgtaacacagaggtacag

SEQ ID NO: 4932158 - DNA, 25 bp, Homo sapien
tctcccacaagatctgctgtaatca

SEQ ID NO: 4932159 - DNA, 25 bp, Homo sapien
attcggaaagttagcctggaccacg

SEQ ID NO: 4932160 - DNA, 25 bp, Homo sapien
tgtaatcaacactccctcaagaagt

SEQ ID NO: 4932161 - DNA, 25 bp, Homo sapien
gaactcagactcatagtgctctgag

SEQ ID NO: 4932162 - DNA, 25 bp, Homo sapien
tgttttatcagtcctaagtttgcac

SEQ ID NO: 4932163 - DNA, 25 bp, Homo sapien
catctgtcctgctctttgtatctgt

SEQ ID NO: 4932164 - DNA, 25 bp, Homo sapien
tcctctctgttttatcagtcctaag

SEQ ID NO: 4932165 - DNA, 25 bp, Homo sapien
tgtgcttttccaataggcttaaaaa

SEQ ID NO: 4932166 - DNA, 25 bp, Homo sapien
agatcaaactgcaagactgggggag

SEQ ID NO: 4932167 - DNA, 25 bp, Homo sapien
tactgtgcttttccaataggcttaa

SEQ ID NO: 4932168 - DNA, 25 bp, Homo sapien
attatatcccacacatggcttggag

SEQ ID NO: 4932169 - DNA, 25 bp, Homo sapien
ttttcttcagagtcagcggttgaca

SEQ ID NO: 4932170 - DNA, 25 bp, Homo sapien
gagctcctaaagctaataagctttt

SEQ ID NO: 4932171 - DNA, 25 bp, Homo sapien
ttgacactcaaacatgccagggcct

SEQ ID NO: 4932172 - DNA, 25 bp, Homo sapien
gactgtcgtccactaaaacagcagt

SEQ ID NO: 4932173 - DNA, 25 bp, Homo sapien
taaatcagccgtaaatccaaagcag

SEQ ID NO: 4932174 - DNA, 25 bp, Homo sapien
ccaaaataaatcagccgtaaatcca

SEQ ID NO: 4932175 - DNA, 25 bp, Homo sapien
tcagccgtaaatccaaagcagactt

SEQ ID NO: 4932176 - DNA, 25 bp, Homo sapien
aataaatcagccgtaaatccaaagc

SEQ ID NO: 4932177 - DNA, 25 bp, Homo sapien
tcatatgcaggacctgcactgctat

SEQ ID NO: 4932178 - DNA, 25 bp, Homo sapien
tgctctcctattggataaagcttcc

SEQ ID NO: 4932179 - DNA, 25 bp, Homo sapien
actgctgctacctgctctcctattg

SEQ ID NO: 4932180 - DNA, 25 bp, Homo sapien
cactcaagtggattttctcagacac

SEQ ID NO: 4932181 - DNA, 25 bp, Homo sapien
gtgtcatttcctaccagaacatccc

SEQ ID NO: 4932182 - DNA, 25 bp, Homo sapien
ctgccaatgcaactggccagctcct

SEQ ID NO: 4932183 - DNA, 25 bp, Homo sapien
ctctgccaatgcaactggccagctc

SEQ ID NO: 4932184 - DNA, 25 bp, Homo sapien
ctgtgtcatttcctaccagaacatc

SEQ ID NO: 4932185 - DNA, 25 bp, Homo sapien
tgcgtttagaagtgaaacactgacc

SEQ ID NO: 4932186 - DNA, 25 bp, Homo sapien
tttcctgtgcgtttagaagtgaaac

SEQ ID NO: 4932187 - DNA, 25 bp, Homo sapien
tcaaatcactttttcctgtgcgttt

SEQ ID NO: 4932188 - DNA, 25 bp, Homo sapien
tcactttttcctgtgcgtttagaag

SEQ ID NO: 4932189 - DNA, 25 bp, Homo sapien
aatgcctcgtccatctctgagtctc

SEQ ID NO: 4932190 - DNA, 25 bp, Homo sapien
ctagtggaatacagtccccaagggc

SEQ ID NO: 4932191 - DNA, 25 bp, Homo sapien
gtggaatacagtccccaagggcaga

SEQ ID NO: 4932192 - DNA, 25 bp, Homo sapien
cctctctagtggaatacagtcccca

SEQ ID NO: 4932193 - DNA, 25 bp, Homo sapien
ctccaatctattcactacagcaggt

SEQ ID NO: 4932194 - DNA, 25 bp, Homo sapien
aaacactctccaatctattcactac

SEQ ID NO: 4932195 - DNA, 25 bp, Homo sapien
actctccaatctattcactacagca

SEQ ID NO: 4932196 - DNA, 25 bp, Homo sapien
acactctccaatctattcactacag

SEQ ID NO: 4932197 - DNA, 25 bp, Homo sapien
ttgagcagcagtttgtaccaggaac

SEQ ID NO: 4932198 - DNA, 25 bp, Homo sapien
actacaccaattagagaataaaggg

SEQ ID NO: 4932199 - DNA, 25 bp, Homo sapien
tttcatggtcctcctttgagtcctt

SEQ ID NO: 4932200 - DNA, 25 bp, Homo sapien
tctggtttcggctctcatggagcaa

SEQ ID NO: 4932201 - DNA, 25 bp, Homo sapien
cctcaaattctcttgccagtgctga

SEQ ID NO: 4932202 - DNA, 25 bp, Homo sapien
ccttcttcaaagaacgatctttagg

SEQ ID NO: 4932203 - DNA, 25 bp, Homo sapien
ccagtgctgagtgcccatccatcag

SEQ ID NO: 4932204 - DNA, 25 bp, Homo sapien
tgatgttctctgtttgccactacaa

SEQ ID NO: 4932205 - DNA, 25 bp, Homo sapien
cagtccaacagagctcagatgttcc

SEQ ID NO: 4932206 - DNA, 25 bp, Homo sapien
gggtaagtggcagtccaacagagct

SEQ ID NO: 4932207 - DNA, 25 bp, Homo sapien
gttcctgtaaggacaacactgtcat

SEQ ID NO: 4932208 - DNA, 25 bp, Homo sapien
tgtaaggacaacactgtcatccagc

SEQ ID NO: 4932209 - DNA, 25 bp, Homo sapien
aaatatcagctcgaatggctgccaa

SEQ ID NO: 4932210 - DNA, 25 bp, Homo sapien
gtaaatatcagctcgaatggctgcc

SEQ ID NO: 4932211 - DNA, 25 bp, Homo sapien
taaatatcagctcgaatggctgcca

SEQ ID NO: 4932212 - DNA, 25 bp, Homo sapien
aaatgctttctctcaataggctctg

SEQ ID NO: 4932213 - DNA, 25 bp, Homo sapien
tcacaggagagcttctacaactcca

SEQ ID NO: 4932214 - DNA, 25 bp, Homo sapien
ccctctcagggtgaagggaagttgt

SEQ ID NO: 4932215 - DNA, 25 bp, Homo sapien
gaaatgaagcttcttgtgggtcttc

SEQ ID NO: 4932216 - DNA, 25 bp, Homo sapien
gtccccatgtgttaagtggctaata

SEQ ID NO: 4932217 - DNA, 25 bp, Homo sapien
ttcatcccacatagttgccaatttg

SEQ ID NO: 4932218 - DNA, 25 bp, Homo sapien
ggctaatacataggcactgtgctga

SEQ ID NO: 4932219 - DNA, 25 bp, Homo sapien
cactcagctcccgaaaatgctactg

SEQ ID NO: 4932220 - DNA, 25 bp, Homo sapien
cctctcgactcagtcactgggaggc

SEQ ID NO: 4932221 - DNA, 25 bp, Homo sapien
ggagagtgtagctgtatagtttagc

SEQ ID NO: 4932222 - DNA, 25 bp, Homo sapien
ttcctgaattcagtgtgagagagga

SEQ ID NO: 4932223 - DNA, 25 bp, Homo sapien
gaggcagcatgatgttgctaaaaga

SEQ ID NO: 4932224 - DNA, 25 bp, Homo sapien
ctgacagatatgagcagcttgggag

SEQ ID NO: 4932225 - DNA, 25 bp, Homo sapien
tgggtcccaagacagttgatagtcg

SEQ ID NO: 4932226 - DNA, 25 bp, Homo sapien
tttagattgaagagccctgggtccc

SEQ ID NO: 4932227 - DNA, 25 bp, Homo sapien
cctgtgcttttagattgaagagccc

SEQ ID NO: 4932228 - DNA, 25 bp, Homo sapien
gctctgagaggttctctggcatcca

SEQ ID NO: 4932229 - DNA, 25 bp, Homo sapien
tgggtctctattaaccaggtttctc

SEQ ID NO: 4932230 - DNA, 25 bp, Homo sapien
caggagggtcgcttcacaaaggaca

SEQ ID NO: 4932231 - DNA, 25 bp, Homo sapien
tcacaaaggacacctgcttgactgg

SEQ ID NO: 4932232 - DNA, 25 bp, Homo sapien
ctcagtgggccagagaaaaggaatg

SEQ ID NO: 4932233 - DNA, 25 bp, Homo sapien
aaagaattattgctccctgactcag

SEQ ID NO: 4932234 - DNA, 25 bp, Homo sapien
ttagaaagaattattgctccctgac

SEQ ID NO: 4932235 - DNA, 25 bp, Homo sapien
ttattgctccctgactcagtgggcc

SEQ ID NO: 4932236 - DNA, 25 bp, Homo sapien
tatcttgaagatcccgaataagctc

SEQ ID NO: 4932237 - DNA, 25 bp, Homo sapien
gccagattaaggtcgagcatgaaga

SEQ ID NO: 4932238 - DNA, 25 bp, Homo sapien
aggatgtcccgaacgtgcaaggcag

SEQ ID NO: 4932239 - DNA, 25 bp, Homo sapien
taaataggcgaaggatgtttgagac

SEQ ID NO: 4932240 - DNA, 25 bp, Homo sapien
tcttcccaaagccacgaagatcaga

SEQ ID NO: 4932241 - DNA, 25 bp, Homo sapien
caaagccacgaagatcagactgtgg

SEQ ID NO: 4932242 - DNA, 25 bp, Homo sapien
tcagactgtggttttattatgctca

SEQ ID NO: 4932243 - DNA, 25 bp, Homo sapien
cagactgtggttttattatgctcat

SEQ ID NO: 4932244 - DNA, 25 bp, Homo sapien
gacacacagggatgattcttgtttc

SEQ ID NO: 4932245 - DNA, 25 bp, Homo sapien
cactgacaagcaatcagagtgtccc

SEQ ID NO: 4932246 - DNA, 25 bp, Homo sapien
ctctgctggtagcagcatttgttct

SEQ ID NO: 4932247 - DNA, 25 bp, Homo sapien
tcctttaatctgtccagatctccat

SEQ ID NO: 4932248 - DNA, 25 bp, Homo sapien
gcaggctgagctaagactcctcctt

SEQ ID NO: 4932249 - DNA, 25 bp, Homo sapien
aagactcctccttgcccgaactggt

SEQ ID NO: 4932250 - DNA, 25 bp, Homo sapien
tcactaagaagactcctgcgtgcct

SEQ ID NO: 4932251 - DNA, 25 bp, Homo sapien
tcttcgctcttaggaaagcaggctg

SEQ ID NO: 4932252 - DNA, 25 bp, Homo sapien
caaaagttcactctagatccagact

SEQ ID NO: 4932253 - DNA, 25 bp, Homo sapien
actctagatccagacttgaggccac

SEQ ID NO: 4932254 - DNA, 25 bp, Homo sapien
gacttgaggccacctccctcgatga

SEQ ID NO: 4932255 - DNA, 25 bp, Homo sapien
tcatcacaaaagttcactctagatc

SEQ ID NO: 4932256 - DNA, 25 bp, Homo sapien
gcataagtcattgagtttagtcaca

SEQ ID NO: 4932257 - DNA, 25 bp, Homo sapien
tctgctcttatggactttgctgctc

SEQ ID NO: 4932258 - DNA, 25 bp, Homo sapien
ctcttgcaaatctatgcataagtca

SEQ ID NO: 4932259 - DNA, 25 bp, Homo sapien
tttagtcacatcataaaccttccac

SEQ ID NO: 4932260 - DNA, 25 bp, Homo sapien
gttattgtaagagcctgaatagtgg

SEQ ID NO: 4932261 - DNA, 25 bp, Homo sapien
tagtggggatgtggataaggacggt

SEQ ID NO: 4932262 - DNA, 25 bp, Homo sapien
tgaatagtggggatgtggataagga

SEQ ID NO: 4932263 - DNA, 25 bp, Homo sapien
tggggatgtggataaggacggtaaa

SEQ ID NO: 4932264 - DNA, 25 bp, Homo sapien
cccatcgagagacaattgcagtcac

SEQ ID NO: 4932265 - DNA, 25 bp, Homo sapien
gggagacccatcgagagacaattgc

SEQ ID NO: 4932266 - DNA, 25 bp, Homo sapien
gagacccatcgagagacaattgcag

SEQ ID NO: 4932267 - DNA, 25 bp, Homo sapien
atagggagacccatcgagagacaat

SEQ ID NO: 4932268 - DNA, 25 bp, Homo sapien
taagtgtgggccgtagtcacagaag

SEQ ID NO: 4932269 - DNA, 25 bp, Homo sapien
aacttccccagctattgcagtggct

SEQ ID NO: 4932270 - DNA, 25 bp, Homo sapien
tgtgggccgtagtcacagaagtact

SEQ ID NO: 4932271 - DNA, 25 bp, Homo sapien
ggatttggaacttccccagctattg

SEQ ID NO: 4932272 - DNA, 25 bp, Homo sapien
tcatgacgccaataaggcaggtgcc

SEQ ID NO: 4932273 - DNA, 25 bp, Homo sapien
ctccggggacatttctttcagcttg

SEQ ID NO: 4932274 - DNA, 25 bp, Homo sapien
tcttactcatgacgccaataaggca

SEQ ID NO: 4932275 - DNA, 25 bp, Homo sapien
agtggtgcctcttactcatgacgcc

SEQ ID NO: 4932276 - DNA, 25 bp, Homo sapien
aacagatatgtctcagcagtgaact

SEQ ID NO: 4932277 - DNA, 25 bp, Homo sapien
cagcgccagccaaaaacagatatgt

SEQ ID NO: 4932278 - DNA, 25 bp, Homo sapien
cctagggtcagaggcatttgtgtca

SEQ ID NO: 4932279 - DNA, 25 bp, Homo sapien
ccaggatcccttggccaaaacgtag

SEQ ID NO: 4932280 - DNA, 25 bp, Homo sapien
tagagttctcatcacacagaagccc

SEQ ID NO: 4932281 - DNA, 25 bp, Homo sapien
caaggtcttggtaggcaacaggaga

SEQ ID NO: 4932282 - DNA, 25 bp, Homo sapien
tgaagtggctgacaacattagctcc

SEQ ID NO: 4932283 - DNA, 25 bp, Homo sapien
gctggactctgcctgtatcgtgcaa

SEQ ID NO: 4932284 - DNA, 25 bp, Homo sapien
actggaccaagtttgcactggttac

SEQ ID NO: 4932285 - DNA, 25 bp, Homo sapien
cccactggaccaagtttgcactggt

SEQ ID NO: 4932286 - DNA, 25 bp, Homo sapien
acccactggaccaagtttgcactgg

SEQ ID NO: 4932287 - DNA, 25 bp, Homo sapien
cactggaccaagtttgcactggtta

SEQ ID NO: 4932288 - DNA, 25 bp, Homo sapien
tcatgaggagaccgcagtaaaccgg

SEQ ID NO: 4932289 - DNA, 25 bp, Homo sapien
agaccgcagtaaaccggctgtagaa

SEQ ID NO: 4932290 - DNA, 25 bp, Homo sapien
ggagaccgcagtaaaccggctgtag

SEQ ID NO: 4932291 - DNA, 25 bp, Homo sapien
gaggagaccgcagtaaaccggctgt

SEQ ID NO: 4932292 - DNA, 25 bp, Homo sapien
agcagagtaaactcctgcagggagg

SEQ ID NO: 4932293 - DNA, 25 bp, Homo sapien
tatccatgtagcagagtaaactcct

SEQ ID NO: 4932294 - DNA, 25 bp, Homo sapien
gagcagttacactgggcgtgatgac

SEQ ID NO: 4932295 - DNA, 25 bp, Homo sapien
tacactgggcgtgatgacaacatgt

SEQ ID NO: 4932296 - DNA, 25 bp, Homo sapien
acacacaggaagtcccaacccaagc

SEQ ID NO: 4932297 - DNA, 25 bp, Homo sapien
atggactggtcttgcccagtgggtc

SEQ ID NO: 4932298 - DNA, 25 bp, Homo sapien
catggactggtcttgcccagtgggt

SEQ ID NO: 4932299 - DNA, 25 bp, Homo sapien
cacacacaggaagtcccaacccaag

SEQ ID NO: 4932300 - DNA, 25 bp, Homo sapien
cttgctgcagctaattccactcaag

SEQ ID NO: 4932301 - DNA, 25 bp, Homo sapien
ccttgctgcagctaattccactcaa

SEQ ID NO: 4932302 - DNA, 25 bp, Homo sapien
tgctgcagctaattccactcaagtg

SEQ ID NO: 4932303 - DNA, 25 bp, Homo sapien
ttgctgcagctaattccactcaagt

SEQ ID NO: 4932304 - DNA, 25 bp, Homo sapien
aagtgaaagttctttgtcgtggaag

SEQ ID NO: 4932305 - DNA, 25 bp, Homo sapien
caaagtgaaagttctttgtcgtgga

SEQ ID NO: 4932306 - DNA, 25 bp, Homo sapien
tgaaagttctttgtcgtggaagctc

SEQ ID NO: 4932307 - DNA, 25 bp, Homo sapien
tccaaagtgaaagttctttgtcgtg

SEQ ID NO: 4932308 - DNA, 25 bp, Homo sapien
cctggcttcacatagtctcccagat

SEQ ID NO: 4932309 - DNA, 25 bp, Homo sapien
ttcagatcccctgtacccagaggct

SEQ ID NO: 4932310 - DNA, 25 bp, Homo sapien
cagataaaggacaaaccaaagacca

SEQ ID NO: 4932311 - DNA, 25 bp, Homo sapien
tctcccagataaaggacaaaccaaa

SEQ ID NO: 4932312 - DNA, 25 bp, Homo sapien
ctcacgaagactggagaatgttggg

SEQ ID NO: 4932313 - DNA, 25 bp, Homo sapien
tcaccaatttcactgtgtagatagt

SEQ ID NO: 4932314 - DNA, 25 bp, Homo sapien
cgtactgtaatggaagctgggcccc

SEQ ID NO: 4932315 - DNA, 25 bp, Homo sapien
gggatgtctcacgtactgtaatgga

SEQ ID NO: 4932316 - DNA, 25 bp, Homo sapien
tgtagcttcaaagacactccatgaa

SEQ ID NO: 4932317 - DNA, 25 bp, Homo sapien
catgagaaatgtagcttcaaagaca

SEQ ID NO: 4932318 - DNA, 25 bp, Homo sapien
cttcacatgagaaatgtagcttcaa

SEQ ID NO: 4932319 - DNA, 25 bp, Homo sapien
agcttcaaagacactccatgaatga

SEQ ID NO: 4932320 - DNA, 25 bp, Homo sapien
cccaataactaaaggacagtgagtc

SEQ ID NO: 4932321 - DNA, 25 bp, Homo sapien
gtcccaataactaaaggacagtgag

SEQ ID NO: 4932322 - DNA, 25 bp, Homo sapien
ccaataactaaaggacagtgagtca

SEQ ID NO: 4932323 - DNA, 25 bp, Homo sapien
caataactaaaggacagtgagtcat

SEQ ID NO: 4932324 - DNA, 25 bp, Homo sapien
taccattggtgaacaattcacgtag

SEQ ID NO: 4932325 - DNA, 25 bp, Homo sapien
ccattggtgaacaattcacgtagca

SEQ ID NO: 4932326 - DNA, 25 bp, Homo sapien
accattggtgaacaattcacgtagc

SEQ ID NO: 4932327 - DNA, 25 bp, Homo sapien
cattggtgaacaattcacgtagcat

SEQ ID NO: 4932328 - DNA, 25 bp, Homo sapien
ccttagtgatgacaatatggatcat

SEQ ID NO: 4932329 - DNA, 25 bp, Homo sapien
ggggcttagactccttagtgatgac

SEQ ID NO: 4932330 - DNA, 25 bp, Homo sapien
ccaggggcttagactccttagtgat

SEQ ID NO: 4932331 - DNA, 25 bp, Homo sapien
agactccttagtgatgacaatatgg

SEQ ID NO: 4932332 - DNA, 25 bp, Homo sapien
tcatcgtccaagaagggttcacctt

SEQ ID NO: 4932333 - DNA, 25 bp, Homo sapien
tgttgatatggcagatataaatggt

SEQ ID NO: 4932334 - DNA, 25 bp, Homo sapien
gaaatttctggaactgcgagtagat

SEQ ID NO: 4932335 - DNA, 25 bp, Homo sapien
gttctcttagtagccacatcatcgt

SEQ ID NO: 4932336 - DNA, 25 bp, Homo sapien
tcatgagctaggttgatgatacctc

SEQ ID NO: 4932337 - DNA, 25 bp, Homo sapien
ggttgatgatacctctgagaatctt

SEQ ID NO: 4932338 - DNA, 25 bp, Homo sapien
cttcatgagctaggttgatgatacc

SEQ ID NO: 4932339 - DNA, 25 bp, Homo sapien
atgagctaggttgatgatacctctg

SEQ ID NO: 4932340 - DNA, 25 bp, Homo sapien
tattttatacctgcggaacacaggc

SEQ ID NO: 4932341 - DNA, 25 bp, Homo sapien
cactttctagaacctagtgtcttaa

SEQ ID NO: 4932342 - DNA, 25 bp, Homo sapien
gaacacaggcgctatactgttaaca

SEQ ID NO: 4932343 - DNA, 25 bp, Homo sapien
catggaagctatatttttggacgta

SEQ ID NO: 4932344 - DNA, 25 bp, Homo sapien
taaatgaaaggcatgctgcttgcct

SEQ ID NO: 4932345 - DNA, 25 bp, Homo sapien
gagtcaaaccaatgcatcaagttca

SEQ ID NO: 4932346 - DNA, 25 bp, Homo sapien
tcgaatgaactccagtcaccacctt

SEQ ID NO: 4932347 - DNA, 25 bp, Homo sapien
gaattggctctagataagttggata

SEQ ID NO: 4932348 - DNA, 25 bp, Homo sapien
gtgaggcccacattggtccgcaaaa

SEQ ID NO: 4932349 - DNA, 25 bp, Homo sapien
gaggcccacattggtccgcaaaaga

SEQ ID NO: 4932350 - DNA, 25 bp, Homo sapien
aggcccacattggtccgcaaaagac

SEQ ID NO: 4932351 - DNA, 25 bp, Homo sapien
gcccacattggtccgcaaaagacca

SEQ ID NO: 4932352 - DNA, 25 bp, Homo sapien
ctggtcctataggtgcaatcagggc

SEQ ID NO: 4932353 - DNA, 25 bp, Homo sapien
tctggactctgtgatcctcaaggat

SEQ ID NO: 4932354 - DNA, 25 bp, Homo sapien
cagcctgaagtagttgcgactgatg

SEQ ID NO: 4932355 - DNA, 25 bp, Homo sapien
tgggtggtctctgatcacaagtcag

SEQ ID NO: 4932356 - DNA, 25 bp, Homo sapien
cccagttgtggaaacgagttgagtt

SEQ ID NO: 4932357 - DNA, 25 bp, Homo sapien
ttgtttctcaggattttccattcac

SEQ ID NO: 4932358 - DNA, 25 bp, Homo sapien
tagactcagtatgtcttaatcccag

SEQ ID NO: 4932359 - DNA, 25 bp, Homo sapien
ccattcactcgaagtctgccaggta

SEQ ID NO: 4932360 - DNA, 25 bp, Homo sapien
caagacctaggttctgcttacagca

SEQ ID NO: 4932361 - DNA, 25 bp, Homo sapien
tatgttgatagttcacaggcagtct

SEQ ID NO: 4932362 - DNA, 25 bp, Homo sapien
catgagcattatgttgatagttcac

SEQ ID NO: 4932363 - DNA, 25 bp, Homo sapien
ctttacagttacattagccatctgg

SEQ ID NO: 4932364 - DNA, 25 bp, Homo sapien
cagctggcccctaggcttgtggcaa

SEQ ID NO: 4932365 - DNA, 25 bp, Homo sapien
taagtaatgccaaccacaaaagaag

SEQ ID NO: 4932366 - DNA, 25 bp, Homo sapien
tgggtggcatagctaagcaggatca

SEQ ID NO: 4932367 - DNA, 25 bp, Homo sapien
taacaggttgactgccaaatgctgc

SEQ ID NO: 4932368 - DNA, 25 bp, Homo sapien
aaccaaagtcgcctcttctttgtct

SEQ ID NO: 4932369 - DNA, 25 bp, Homo sapien
tttcttgcttccttcagctgagaga

SEQ ID NO: 4932370 - DNA, 25 bp, Homo sapien
ctgtttaatttttggcaggagtgta

SEQ ID NO: 4932371 - DNA, 25 bp, Homo sapien
tggcaggagtgtaaaaaccaaagtc

SEQ ID NO: 4932372 - DNA, 25 bp, Homo sapien
tccatagactgggtcaataaggtga

SEQ ID NO: 4932373 - DNA, 25 bp, Homo sapien
catagactgggtcaataaggtgagg

SEQ ID NO: 4932374 - DNA, 25 bp, Homo sapien
tagactgggtcaataaggtgagggg

SEQ ID NO: 4932375 - DNA, 25 bp, Homo sapien
gtccatagactgggtcaataaggtg

SEQ ID NO: 4932376 - DNA, 25 bp, Homo sapien
caagttagttcatcacaatacgtta

SEQ ID NO: 4932377 - DNA, 25 bp, Homo sapien
agatctgagctctcagtttttatag

SEQ ID NO: 4932378 - DNA, 25 bp, Homo sapien
gacgactgagtgggcctgaacaagt

SEQ ID NO: 4932379 - DNA, 25 bp, Homo sapien
tcagtttttatagcttgacgactga

SEQ ID NO: 4932380 - DNA, 25 bp, Homo sapien
ccttgggtggtttagagacctcagt

SEQ ID NO: 4932381 - DNA, 25 bp, Homo sapien
gatgcccttatactcattgacataa

SEQ ID NO: 4932382 - DNA, 25 bp, Homo sapien
aatgtggagctgttccgatgccctt

SEQ ID NO: 4932383 - DNA, 25 bp, Homo sapien
cataatagaaccttgggtggtttag

SEQ ID NO: 4932384 - DNA, 25 bp, Homo sapien
ccacctgaatcagtgacagagccca

SEQ ID NO: 4932385 - DNA, 25 bp, Homo sapien
gagaatgtgagcctcttcctaaagt

SEQ ID NO: 4932386 - DNA, 25 bp, Homo sapien
agccagaaagtgcagattggtgatg

SEQ ID NO: 4932387 - DNA, 25 bp, Homo sapien
ggcgacagctattctggttcctgga

SEQ ID NO: 4932388 - DNA, 25 bp, Homo sapien
tcctgttggtggttaaggagttgaa

SEQ ID NO: 4932389 - DNA, 25 bp, Homo sapien
tatcctgttggtggttaaggagttg

SEQ ID NO: 4932390 - DNA, 25 bp, Homo sapien
ctgtgttatcctgttggtggttaag

SEQ ID NO: 4932391 - DNA, 25 bp, Homo sapien
tgttatcctgttggtggttaaggag

SEQ ID NO: 4932392 - DNA, 25 bp, Homo sapien
gaccatgcacagatcatttagattt

SEQ ID NO: 4932393 - DNA, 25 bp, Homo sapien
ctgtgaccatagtacttggtctgac

SEQ ID NO: 4932394 - DNA, 25 bp, Homo sapien
ctgaccatgcacagatcatttagat

SEQ ID NO: 4932395 - DNA, 25 bp, Homo sapien
tagtacttggtctgaccatgcacag

SEQ ID NO: 4932396 - DNA, 25 bp, Homo sapien
aatctgctcttccatcaaattcata

SEQ ID NO: 4932397 - DNA, 25 bp, Homo sapien
tcacataattcatcatcgatcctgg

SEQ ID NO: 4932398 - DNA, 25 bp, Homo sapien
tatctcctatcctcacataattcat

SEQ ID NO: 4932399 - DNA, 25 bp, Homo sapien
tcctggaatctagggtgtctttaat

SEQ ID NO: 4932400 - DNA, 25 bp, Homo sapien
gcacatattgcagatttggttttgc

SEQ ID NO: 4932401 - DNA, 25 bp, Homo sapien
ctggaggaatgaattagttcttggg

SEQ ID NO: 4932402 - DNA, 25 bp, Homo sapien
tattagtattggtattctcaccctg

SEQ ID NO: 4932403 - DNA, 25 bp, Homo sapien
caaatttggttttgcacatatttgg

SEQ ID NO: 4932404 - DNA, 25 bp, Homo sapien
ttagttgagcttggttgacttagca

SEQ ID NO: 4932405 - DNA, 25 bp, Homo sapien
tgagcttggttgacttagcatcctt

SEQ ID NO: 4932406 - DNA, 25 bp, Homo sapien
gttgagcttggttgacttagcatcc

SEQ ID NO: 4932407 - DNA, 25 bp, Homo sapien
gagcttggttgacttagcatcctta

SEQ ID NO: 4932408 - DNA, 25 bp, Homo sapien
cagtcagtcatgacagtttgcttca

SEQ ID NO: 4932409 - DNA, 25 bp, Homo sapien
ctatccgattccaattgaccagtca

SEQ ID NO: 4932410 - DNA, 25 bp, Homo sapien
gattccaattgaccagtcagtcatg

SEQ ID NO: 4932411 - DNA, 25 bp, Homo sapien
caattgaccagtcagtcatgacagt

SEQ ID NO: 4932412 - DNA, 25 bp, Homo sapien
tttaatatggactcatgatagctaa

SEQ ID NO: 4932413 - DNA, 25 bp, Homo sapien
tcattttaatcgtataatatttgct

SEQ ID NO: 4932414 - DNA, 25 bp, Homo sapien
gctttgaagtacattaagacttgaa

SEQ ID NO: 4932415 - DNA, 25 bp, Homo sapien
taatcatggatcaatgtatttcatt

SEQ ID NO: 4932416 - DNA, 25 bp, Homo sapien
tcttagcaaaccagctgatttctcc

SEQ ID NO: 4932417 - DNA, 25 bp, Homo sapien
ctcttagcaaaccagctgatttctc

SEQ ID NO: 4932418 - DNA, 25 bp, Homo sapien
cctcttagcaaaccagctgatttct

SEQ ID NO: 4932419 - DNA, 25 bp, Homo sapien
tcctcttagcaaaccagctgatttc

SEQ ID NO: 4932420 - DNA, 25 bp, Homo sapien
tgttgagttatagccttaatgtctg

SEQ ID NO: 4932421 - DNA, 25 bp, Homo sapien
taatgtctgcatctattgcttctct

SEQ ID NO: 4932422 - DNA, 25 bp, Homo sapien
tagccttaatgtctgcatctattgc

SEQ ID NO: 4932423 - DNA, 25 bp, Homo sapien
ggattcatctgattgttgagttata

SEQ ID NO: 4932424 - DNA, 25 bp, Homo sapien
aacattgtaattgtctgattcttcc

SEQ ID NO: 4932425 - DNA, 25 bp, Homo sapien
tcttccattggactgtgttctcctt

SEQ ID NO: 4932426 - DNA, 25 bp, Homo sapien
ttatcccaaaacattgtaattgtct

SEQ ID NO: 4932427 - DNA, 25 bp, Homo sapien
tctgattcttccattggactgtgtt

SEQ ID NO: 4932428 - DNA, 25 bp, Homo sapien
ttttggagataagatcagtccacta

SEQ ID NO: 4932429 - DNA, 25 bp, Homo sapien
tccactagggatggaacaactgcct

SEQ ID NO: 4932430 - DNA, 25 bp, Homo sapien
aggctccttgttactcaaagtttgg

SEQ ID NO: 4932431 - DNA, 25 bp, Homo sapien
gatagatgtgccttctaggttctcc

SEQ ID NO: 4932432 - DNA, 25 bp, Homo sapien
ccaacagcaaagaatctgcctcttc

SEQ ID NO: 4932433 - DNA, 25 bp, Homo sapien
tcacttcttgtccaacagcaaagaa

SEQ ID NO: 4932434 - DNA, 25 bp, Homo sapien
tgtccaacagcaaagaatctgcctc

SEQ ID NO: 4932435 - DNA, 25 bp, Homo sapien
tcttgtccaacagcaaagaatctgc

SEQ ID NO: 4932436 - DNA, 25 bp, Homo sapien
agcaaaggtgacctcatcccctgga

SEQ ID NO: 4932437 - DNA, 25 bp, Homo sapien
tgcttaacagccagagcaaaggtga

SEQ ID NO: 4932438 - DNA, 25 bp, Homo sapien
gcaaaggtgacctcatcccctggac

SEQ ID NO: 4932439 - DNA, 25 bp, Homo sapien
catgcttaacagccagagcaaaggt

SEQ ID NO: 4932440 - DNA, 25 bp, Homo sapien
atgctcacagaaacaaacttgctct

SEQ ID NO: 4932441 - DNA, 25 bp, Homo sapien
tgctcacagaaacaaacttgctctg

SEQ ID NO: 4932442 - DNA, 25 bp, Homo sapien
gctcacagaaacaaacttgctctgc

SEQ ID NO: 4932443 - DNA, 25 bp, Homo sapien
ctcacagaaacaaacttgctctgct

SEQ ID NO: 4932444 - DNA, 25 bp, Homo sapien
tctggtggtgtgaaagttaaataca

SEQ ID NO: 4932445 - DNA, 25 bp, Homo sapien
gtcaattgtgcatctcttgatccaa

SEQ ID NO: 4932446 - DNA, 25 bp, Homo sapien
tatgtgtggagtcaccccaatccat

SEQ ID NO: 4932447 - DNA, 25 bp, Homo sapien
gaaaaaagctttcatccaggggatc

SEQ ID NO: 4932448 - DNA, 25 bp, Homo sapien
gaaaagtgtcctaggtcccattgcc

SEQ ID NO: 4932449 - DNA, 25 bp, Homo sapien
cacggagaatggcagaagaaaacca

SEQ ID NO: 4932450 - DNA, 25 bp, Homo sapien
tgctgatggaataacggcttggatc

SEQ ID NO: 4932451 - DNA, 25 bp, Homo sapien
tggatcaggccatcaacaatgtctc

SEQ ID NO: 4932452 - DNA, 25 bp, Homo sapien
ttcaaagtaactctaggctccccga

SEQ ID NO: 4932453 - DNA, 25 bp, Homo sapien
taggctccccgatctggtcaaataa

SEQ ID NO: 4932454 - DNA, 25 bp, Homo sapien
tcttgctgcttactgcatttcaaag

SEQ ID NO: 4932455 - DNA, 25 bp, Homo sapien
tcaaataaccaatcccaaagtccca

SEQ ID NO: 4932456 - DNA, 25 bp, Homo sapien
ccagctctttgttgcatgtctaatg

SEQ ID NO: 4932457 - DNA, 25 bp, Homo sapien
atgtacaactttccagctgacttga

SEQ ID NO: 4932458 - DNA, 25 bp, Homo sapien
ctctttgttgcatgtctaatgagca

SEQ ID NO: 4932459 - DNA, 25 bp, Homo sapien
tgtacaactttccagctgacttgag

SEQ ID NO: 4932460 - DNA, 25 bp, Homo sapien
atcattcacatttgtgctgcctggg

SEQ ID NO: 4932461 - DNA, 25 bp, Homo sapien
ccatcattcacatttgtgctgcctg

SEQ ID NO: 4932462 - DNA, 25 bp, Homo sapien
catcattcacatttgtgctgcctgg

SEQ ID NO: 4932463 - DNA, 25 bp, Homo sapien
tcactgacacagtgtctgatgaggt

SEQ ID NO: 4932464 - DNA, 25 bp, Homo sapien
cagcttcactacctttagaacgtca

SEQ ID NO: 4932465 - DNA, 25 bp, Homo sapien
cactacctttagaacgtcactgaca

SEQ ID NO: 4932466 - DNA, 25 bp, Homo sapien
ctttagaacgtcactgacacagtgt

SEQ ID NO: 4932467 - DNA, 25 bp, Homo sapien
tcctgctagttgagtaatttgaaag

SEQ ID NO: 4932468 - DNA, 25 bp, Homo sapien
aaatgcacagatctcaatgtttggc

SEQ ID NO: 4932469 - DNA, 25 bp, Homo sapien
gccacagcagtaatgcttcctgcta

SEQ ID NO: 4932470 - DNA, 25 bp, Homo sapien
ttcccatgacaaatgcacagatctc

SEQ ID NO: 4932471 - DNA, 25 bp, Homo sapien
tgctagttctgagatatagtgaaac

SEQ ID NO: 4932472 - DNA, 25 bp, Homo sapien
ctctgtgctagttctgagatatagt

SEQ ID NO: 4932473 - DNA, 25 bp, Homo sapien
tctgagatatagtgaaactgtattt

SEQ ID NO: 4932474 - DNA, 25 bp, Homo sapien
cttgtctttcatgcagcctgcaggg

SEQ ID NO: 4932475 - DNA, 25 bp, Homo sapien
cagaatagacgccacccagtcaagt

SEQ ID NO: 4932476 - DNA, 25 bp, Homo sapien
tcctcttaaagtctatgggccagaa

SEQ ID NO: 4932477 - DNA, 25 bp, Homo sapien
ccagtcaagttcctatgagagatga

SEQ ID NO: 4932478 - DNA, 25 bp, Homo sapien
cagacttgagcaaagtgaagcttcc

SEQ ID NO: 4932479 - DNA, 25 bp, Homo sapien
tttctattccatatttttctctgca

SEQ ID NO: 4932480 - DNA, 25 bp, Homo sapien
catttcttccttttgttcacctcct

SEQ ID NO: 4932481 - DNA, 25 bp, Homo sapien
catatttctattccatatttttctc

SEQ ID NO: 4932482 - DNA, 25 bp, Homo sapien
cttccttttgttcacctccttctct

SEQ ID NO: 4932483 - DNA, 25 bp, Homo sapien
aaagatgtaatcagttgagtttgtc

SEQ ID NO: 4932484 - DNA, 25 bp, Homo sapien
gtaatcagttgagtttgtcataaaa

SEQ ID NO: 4932485 - DNA, 25 bp, Homo sapien
aagatgtagccagtttgctaatatc

SEQ ID NO: 4932486 - DNA, 25 bp, Homo sapien
aaagatgtagccagtttgctaatat

SEQ ID NO: 4932487 - DNA, 25 bp, Homo sapien
ctggttcacaaatagattggcaatc

SEQ ID NO: 4932488 - DNA, 25 bp, Homo sapien
tagattggcaatctatatgagtgag

SEQ ID NO: 4932489 - DNA, 25 bp, Homo sapien
caatctatatgagtgagaggtgaca

SEQ ID NO: 4932490 - DNA, 25 bp, Homo sapien
tggttcacaaatagattggcaatct

SEQ ID NO: 4932491 - DNA, 25 bp, Homo sapien
tcagtagtaaatccaaactccagca

SEQ ID NO: 4932492 - DNA, 25 bp, Homo sapien
gtttctgactcggtaatctcagttg

SEQ ID NO: 4932493 - DNA, 25 bp, Homo sapien
caaatatgactcagtagtaaatcca

SEQ ID NO: 4932494 - DNA, 25 bp, Homo sapien
agttgtaagattccagcatgctcca

SEQ ID NO: 4932495 - DNA, 25 bp, Homo sapien
aatagcagtttacatcagataacag

SEQ ID NO: 4932496 - DNA, 25 bp, Homo sapien
atggaatagcagtttacatcagata

SEQ ID NO: 4932497 - DNA, 25 bp, Homo sapien
gaatagcagtttacatcagataaca

SEQ ID NO: 4932498 - DNA, 25 bp, Homo sapien
ggaatagcagtttacatcagataac

SEQ ID NO: 4932499 - DNA, 25 bp, Homo sapien
tgtaaccgttccagtccagatatat

SEQ ID NO: 4932500 - DNA, 25 bp, Homo sapien
tccaagttgcttgaaagtgctgtga

SEQ ID NO: 4932501 - DNA, 25 bp, Homo sapien
tacccaatcgcacactctgagtctt

SEQ ID NO: 4932502 - DNA, 25 bp, Homo sapien
gtttctttgactcgacatgatgcta

SEQ ID NO: 4932503 - DNA, 25 bp, Homo sapien
gaaaacctgtgtaatgagatatcca

SEQ ID NO: 4932504 - DNA, 25 bp, Homo sapien
taagcacatgtgcagggacgcatac

SEQ ID NO: 4932505 - DNA, 25 bp, Homo sapien
caagcaaggtgtgaaagccaaggat

SEQ ID NO: 4932506 - DNA, 25 bp, Homo sapien
ggatgagtttaacctgactgagcat

SEQ ID NO: 4932507 - DNA, 25 bp, Homo sapien
cacaggtctagtccctgaaagatga

SEQ ID NO: 4932508 - DNA, 25 bp, Homo sapien
tctgtcagttggaaatggccagatg

SEQ ID NO: 4932509 - DNA, 25 bp, Homo sapien
tattcaaagcaaaggtagcagagcc

SEQ ID NO: 4932510 - DNA, 25 bp, Homo sapien
gacttagccactagaaatcacttgt

SEQ ID NO: 4932511 - DNA, 25 bp, Homo sapien
aatataactatgactttatcctact

SEQ ID NO: 4932512 - DNA, 25 bp, Homo sapien
ttaatataactatgactttatccta

SEQ ID NO: 4932513 - DNA, 25 bp, Homo sapien
taaggcaaggatgaaaatctcttcc

SEQ ID NO: 4932514 - DNA, 25 bp, Homo sapien
gacatataggaatatgtagtttaaa

SEQ ID NO: 4932515 - DNA, 25 bp, Homo sapien
tgtctataacaactgtgagctttca

SEQ ID NO: 4932516 - DNA, 25 bp, Homo sapien
caggatcagaaactgactgactcct

SEQ ID NO: 4932517 - DNA, 25 bp, Homo sapien
ttgcagacgagtgcatcaggatcag

SEQ ID NO: 4932518 - DNA, 25 bp, Homo sapien
ggttaaatccggattcaaatgtagc

SEQ ID NO: 4932519 - DNA, 25 bp, Homo sapien
gtataagccttaagatttagatgaa

SEQ ID NO: 4932520 - DNA, 25 bp, Homo sapien
taggaactctaggacaaagattagg

SEQ ID NO: 4932521 - DNA, 25 bp, Homo sapien
gtttgtagtagtatctatgtatgtg

SEQ ID NO: 4932522 - DNA, 25 bp, Homo sapien
tccaacagaacacttagattaagta

SEQ ID NO: 4932523 - DNA, 25 bp, Homo sapien
cattcactatgatgagagcagagca

SEQ ID NO: 4932524 - DNA, 25 bp, Homo sapien
aaaccatatcaggatacttctggag

SEQ ID NO: 4932525 - DNA, 25 bp, Homo sapien
tgaccttataaagcaatattgacac

SEQ ID NO: 4932526 - DNA, 25 bp, Homo sapien
taatgagaccctgacttggctctgg

SEQ ID NO: 4932527 - DNA, 25 bp, Homo sapien
ctgtatggttatggtcacatttgtc

SEQ ID NO: 4932528 - DNA, 25 bp, Homo sapien
catttgtcagctggatttatagtta

SEQ ID NO: 4932529 - DNA, 25 bp, Homo sapien
tgtatggttatggtcacatttgtca

SEQ ID NO: 4932530 - DNA, 25 bp, Homo sapien
cacatttgtcagctggatttatagt

SEQ ID NO: 4932531 - DNA, 25 bp, Homo sapien
gcacagagctgggatacagagctgt

SEQ ID NO: 4932532 - DNA, 25 bp, Homo sapien
cagattggaagggacatatgaaggc

SEQ ID NO: 4932533 - DNA, 25 bp, Homo sapien
gacttacctgcgatcacaaaaccta

SEQ ID NO: 4932534 - DNA, 25 bp, Homo sapien
gagctgtctccttgaatctaatatg

SEQ ID NO: 4932535 - DNA, 25 bp, Homo sapien
cttaatgcctgtcagcatctttttc

SEQ ID NO: 4932536 - DNA, 25 bp, Homo sapien
gaatctgccaccttaatgcctgtca

SEQ ID NO: 4932537 - DNA, 25 bp, Homo sapien
tctagaatctgccaccttaatgcct

SEQ ID NO: 4932538 - DNA, 25 bp, Homo sapien
tgccaccttaatgcctgtcagcatc

SEQ ID NO: 4932539 - DNA, 25 bp, Homo sapien
gttgggaattagttccagacataat

SEQ ID NO: 4932540 - DNA, 25 bp, Homo sapien
tgttgggaattagttccagacataa

SEQ ID NO: 4932541 - DNA, 25 bp, Homo sapien
gggaattagttccagacataattta

SEQ ID NO: 4932542 - DNA, 25 bp, Homo sapien
tgggaattagttccagacataattt

SEQ ID NO: 4932543 - DNA, 25 bp, Homo sapien
tagccagggttttggctaaagagca

SEQ ID NO: 4932544 - DNA, 25 bp, Homo sapien
agagcaaggacagggcaagaagtcc

SEQ ID NO: 4932545 - DNA, 25 bp, Homo sapien
ggttttggctaaagagcaaggacag

SEQ ID NO: 4932546 - DNA, 25 bp, Homo sapien
ccagggttttggctaaagagcaagg

SEQ ID NO: 4932547 - DNA, 25 bp, Homo sapien
taatcagtgtcagtatacggcatga

SEQ ID NO: 4932548 - DNA, 25 bp, Homo sapien
tcaaaggagccctggtaatcagtgt

SEQ ID NO: 4932549 - DNA, 25 bp, Homo sapien
gccatttagcaactccatgacactg

SEQ ID NO: 4932550 - DNA, 25 bp, Homo sapien
tgtgtatcaccagcccctattggag

SEQ ID NO: 4932551 - DNA, 25 bp, Homo sapien
tggacaggtggagcaagcattagct

SEQ ID NO: 4932552 - DNA, 25 bp, Homo sapien
catctggaccacctcacagcgtgtt

SEQ ID NO: 4932553 - DNA, 25 bp, Homo sapien
taggtagcatggcacctggatggcc

SEQ ID NO: 4932554 - DNA, 25 bp, Homo sapien
gttccagatatattgtcacccggtg

SEQ ID NO: 4932555 - DNA, 25 bp, Homo sapien
ctttgtgtcattccataggctggac

SEQ ID NO: 4932556 - DNA, 25 bp, Homo sapien
tctttcctgcctcgtgaactcctag

SEQ ID NO: 4932557 - DNA, 25 bp, Homo sapien
tgtggatcctgacacacaccactgg

SEQ ID NO: 4932558 - DNA, 25 bp, Homo sapien
cattttagtcacatgaacctgtctg

SEQ ID NO: 4932559 - DNA, 25 bp, Homo sapien
gacacatcggtatcttcgctgttgt

SEQ ID NO: 4932560 - DNA, 25 bp, Homo sapien
ttatctggagccttgcatattgctg

SEQ ID NO: 4932561 - DNA, 25 bp, Homo sapien
taacacaaggtaaatctgcatgcca

SEQ ID NO: 4932562 - DNA, 25 bp, Homo sapien
tgcatattgctgactagatgtttct

SEQ ID NO: 4932563 - DNA, 25 bp, Homo sapien
tgtttgctgatgcatggcccaatta

SEQ ID NO: 4932564 - DNA, 25 bp, Homo sapien
tgtgtagagactgcaatttccccgg

SEQ ID NO: 4932565 - DNA, 25 bp, Homo sapien
cccaattatttcaggccgaatgtca

SEQ ID NO: 4932566 - DNA, 25 bp, Homo sapien
tcatgggctgcaaacataaaaggca

SEQ ID NO: 4932567 - DNA, 25 bp, Homo sapien
attctggtccatgcctctgggctga

SEQ ID NO: 4932568 - DNA, 25 bp, Homo sapien
tgctagtcatgctgggtacactctc

SEQ ID NO: 4932569 - DNA, 25 bp, Homo sapien
ttcagttgctagtcatgctgggtac

SEQ ID NO: 4932570 - DNA, 25 bp, Homo sapien
ccctaccccttcacattgcattctg

SEQ ID NO: 4932571 - DNA, 25 bp, Homo sapien
cctcagagatcatttctatatgcac

SEQ ID NO: 4932572 - DNA, 25 bp, Homo sapien
gaaggctgcacagtcaaattgataa

SEQ ID NO: 4932573 - DNA, 25 bp, Homo sapien
gaaaagcacgaaaaatgtaagccca

SEQ ID NO: 4932574 - DNA, 25 bp, Homo sapien
tctgattgctcaagtgaagcatcac

SEQ ID NO: 4932575 - DNA, 25 bp, Homo sapien
accgtgcctggccgtcagtacactc

SEQ ID NO: 4932576 - DNA, 25 bp, Homo sapien
caccgtgcctggccgtcagtacact

SEQ ID NO: 4932577 - DNA, 25 bp, Homo sapien
tcagtaaccaaaattaccgtctgag

SEQ ID NO: 4932578 - DNA, 25 bp, Homo sapien
tgaaatcccttcaccataagtacgg

SEQ ID NO: 4932579 - DNA, 25 bp, Homo sapien
ctgagaatagcatcctatatctgaa

SEQ ID NO: 4932580 - DNA, 25 bp, Homo sapien
ccataagtacggtatgtgtgggaag

SEQ ID NO: 4932581 - DNA, 25 bp, Homo sapien
gagttggggtcccacagcacgtcca

SEQ ID NO: 4932582 - DNA, 25 bp, Homo sapien
ccagaagtgtggatgtgccgtcact

SEQ ID NO: 4932583 - DNA, 25 bp, Homo sapien
actcctacagtcagacgacccagct

SEQ ID NO: 4932584 - DNA, 25 bp, Homo sapien
cactgataagtcagctttggcattt

SEQ ID NO: 4932585 - DNA, 25 bp, Homo sapien
tgcacagttggtcgaccactctggg

SEQ ID NO: 4932586 - DNA, 25 bp, Homo sapien
tggatatgagtgcaagcctgttctg

SEQ ID NO: 4932587 - DNA, 25 bp, Homo sapien
gctggcatcagagtgtgtcttccag

SEQ ID NO: 4932588 - DNA, 25 bp, Homo sapien
gggctatgaagctattactctggct

SEQ ID NO: 4932589 - DNA, 25 bp, Homo sapien
tgtgttcccagtagtctccagagca

SEQ ID NO: 4932590 - DNA, 25 bp, Homo sapien
ttgtgttcccagtagtctccagagc

SEQ ID NO: 4932591 - DNA, 25 bp, Homo sapien
tgttcccagtagtctccagagcagg

SEQ ID NO: 4932592 - DNA, 25 bp, Homo sapien
gtttgtgttcccagtagtctccaga

SEQ ID NO: 4932593 - DNA, 25 bp, Homo sapien
cattttcaacctttatcaccaggac

SEQ ID NO: 4932594 - DNA, 25 bp, Homo sapien
tcacttaacgaaagcgaggacttgg

SEQ ID NO: 4932595 - DNA, 25 bp, Homo sapien
cttggcctgaagacaatgggtcaga

SEQ ID NO: 4932596 - DNA, 25 bp, Homo sapien
ttttgagtacaccaactgtgggctg

SEQ ID NO: 4932597 - DNA, 25 bp, Homo sapien
tcagacaactttcagtcatgatgga

SEQ ID NO: 4932598 - DNA, 25 bp, Homo sapien
gacctcagacaactttcagtcatga

SEQ ID NO: 4932599 - DNA, 25 bp, Homo sapien
ggagacctcagacaactttcagtca

SEQ ID NO: 4932600 - DNA, 25 bp, Homo sapien
cctcagacaactttcagtcatgatg

SEQ ID NO: 4932601 - DNA, 25 bp, Homo sapien
tagcaatccacagcatggtgcctgg

SEQ ID NO: 4932602 - DNA, 25 bp, Homo sapien
taactagatgcaaattacgaagctg

SEQ ID NO: 4932603 - DNA, 25 bp, Homo sapien
ttgaaaaagctagcttggaagacca

SEQ ID NO: 4932604 - DNA, 25 bp, Homo sapien
gcctggattcaataaatgtctccat

SEQ ID NO: 4932605 - DNA, 25 bp, Homo sapien
tcccaggtatcatttcttctagcct

SEQ ID NO: 4932606 - DNA, 25 bp, Homo sapien
ttcccaggtatcatttcttctagcc

SEQ ID NO: 4932607 - DNA, 25 bp, Homo sapien
cttcccaggtatcatttcttctagc

SEQ ID NO: 4932608 - DNA, 25 bp, Homo sapien
ttttcagataagtggaagacattct

SEQ ID NO: 4932609 - DNA, 25 bp, Homo sapien
gaaacctgggttcagtagatgctat

SEQ ID NO: 4932610 - DNA, 25 bp, Homo sapien
tattaggtataacggcatatttgtc

SEQ ID NO: 4932611 - DNA, 25 bp, Homo sapien
gaaagactggcctggcgccatggtt

SEQ ID NO: 4932612 - DNA, 25 bp, Homo sapien
acttcatgaggcacattgattctct

SEQ ID NO: 4932613 - DNA, 25 bp, Homo sapien
caagttaaatgtggcgctgcaggga

SEQ ID NO: 4932614 - DNA, 25 bp, Homo sapien
ggagcctcatcacctataacagtga

SEQ ID NO: 4932615 - DNA, 25 bp, Homo sapien
ctgcagggataagaggctggtaaac

SEQ ID NO: 4932616 - DNA, 25 bp, Homo sapien
cagacctaggttacaagacttggct

SEQ ID NO: 4932617 - DNA, 25 bp, Homo sapien
ggcccatggcttagcaaaaatacag

SEQ ID NO: 4932618 - DNA, 25 bp, Homo sapien
aacacatttagccacttgaagggac

SEQ ID NO: 4932619 - DNA, 25 bp, Homo sapien
tgaagggacattggagacccacctg

SEQ ID NO: 4932620 - DNA, 25 bp, Homo sapien
tgctccaatgtactcagaattagga

SEQ ID NO: 4932621 - DNA, 25 bp, Homo sapien
cctttgctccaatgtactcagaatt

SEQ ID NO: 4932622 - DNA, 25 bp, Homo sapien
aatgtactcagaattaggagagccc

SEQ ID NO: 4932623 - DNA, 25 bp, Homo sapien
ccaatgtactcagaattaggagagc

SEQ ID NO: 4932624 - DNA, 25 bp, Homo sapien
ttcagtgccactgggtcaggtgtga

SEQ ID NO: 4932625 - DNA, 25 bp, Homo sapien
cctccctctgttttgctgtctgcaa

SEQ ID NO: 4932626 - DNA, 25 bp, Homo sapien
tgcaaaggtggtctgctgttacaga

SEQ ID NO: 4932627 - DNA, 25 bp, Homo sapien
caggtgtgaaaactgcctccctctg

SEQ ID NO: 4932628 - DNA, 25 bp, Homo sapien
caggagtatagcacagtcaggcact

SEQ ID NO: 4932629 - DNA, 25 bp, Homo sapien
catagtcttggagtaaccttgtctg

SEQ ID NO: 4932630 - DNA, 25 bp, Homo sapien
gaattggtgttctgagagacagctc

SEQ ID NO: 4932631 - DNA, 25 bp, Homo sapien
tcagccaacttccacaccagaggtt

SEQ ID NO: 4932632 - DNA, 25 bp, Homo sapien
cactgatgggtcctgtggttgtcta

SEQ ID NO: 4932633 - DNA, 25 bp, Homo sapien
ggtcctgtggttgtctactgtccat

SEQ ID NO: 4932634 - DNA, 25 bp, Homo sapien
tgctcccttgaagcccactgatggg

SEQ ID NO: 4932635 - DNA, 25 bp, Homo sapien
tgctccccattcgtcaggcactgat

SEQ ID NO: 4932636 - DNA, 25 bp, Homo sapien
ctctgtgttgcaccacttagcttct

SEQ ID NO: 4932637 - DNA, 25 bp, Homo sapien
tctcaaatggctgtacagggctctc

SEQ ID NO: 4932638 - DNA, 25 bp, Homo sapien
aaatctaaactcactatttcctcca

SEQ ID NO: 4932639 - DNA, 25 bp, Homo sapien
tcttgatgagccacgtggatgccac

SEQ ID NO: 4932640 - DNA, 25 bp, Homo sapien
ctggtacttagagtcgggatgcaca

SEQ ID NO: 4932641 - DNA, 25 bp, Homo sapien
cagttgtctcaaacctgttctgggt

SEQ ID NO: 4932642 - DNA, 25 bp, Homo sapien
gcagttgtctcaaacctgttctggg

SEQ ID NO: 4932643 - DNA, 25 bp, Homo sapien
cttagagtcgggatgcacaacttca

SEQ ID NO: 4932644 - DNA, 25 bp, Homo sapien
cgtctctgagtcctagggtagccag

SEQ ID NO: 4932645 - DNA, 25 bp, Homo sapien
agtcctagggtagccagaatggcct

SEQ ID NO: 4932646 - DNA, 25 bp, Homo sapien
tctctgagtcctagggtagccagaa

SEQ ID NO: 4932647 - DNA, 25 bp, Homo sapien
gagtcctagggtagccagaatggcc

SEQ ID NO: 4932648 - DNA, 25 bp, Homo sapien
tgtaatttggccatcggatctctgc

SEQ ID NO: 4932649 - DNA, 25 bp, Homo sapien
ttcagtggcagactgtaatttggcc

SEQ ID NO: 4932650 - DNA, 25 bp, Homo sapien
actgtaatttggccatcggatctct

SEQ ID NO: 4932651 - DNA, 25 bp, Homo sapien
taatttggccatcggatctctgctt

SEQ ID NO: 4932652 - DNA, 25 bp, Homo sapien
cactgttgtgaaggccgggaagtta

SEQ ID NO: 4932653 - DNA, 25 bp, Homo sapien
cacatggtggaagagactaaagaat

SEQ ID NO: 4932654 - DNA, 25 bp, Homo sapien
gggcccacattctgctccatagaag

SEQ ID NO: 4932655 - DNA, 25 bp, Homo sapien
ggaagagactaaagaatactctgaa

SEQ ID NO: 4932656 - DNA, 25 bp, Homo sapien
gtcacattggattttaccaactctg

SEQ ID NO: 4932657 - DNA, 25 bp, Homo sapien
tcctgcgggcttcttggacagcatt

SEQ ID NO: 4932658 - DNA, 25 bp, Homo sapien
gtcctgcgggcttcttggacagcat

SEQ ID NO: 4932659 - DNA, 25 bp, Homo sapien
ctcactttgctgtagtcacattgga

SEQ ID NO: 4932660 - DNA, 25 bp, Homo sapien
tgaaatctcaagcttgcgtgacaac

SEQ ID NO: 4932661 - DNA, 25 bp, Homo sapien
acagtattcttgtgtttggcgacta

SEQ ID NO: 4932662 - DNA, 25 bp, Homo sapien
tcaatgtgtgactgaaatctcaagc

SEQ ID NO: 4932663 - DNA, 25 bp, Homo sapien
gcttgcgtgacaacacagtattctt

SEQ ID NO: 4932664 - DNA, 25 bp, Homo sapien
gtcttcttctaattacaacttcgtc

SEQ ID NO: 4932665 - DNA, 25 bp, Homo sapien
ctccacacgcagcattggccaatgt

SEQ ID NO: 4932666 - DNA, 25 bp, Homo sapien
acacgcagcattggccaatgtctcc

SEQ ID NO: 4932667 - DNA, 25 bp, Homo sapien
caacttcgtctatactcttcacaag

SEQ ID NO: 4932668 - DNA, 25 bp, Homo sapien
ccaggcacgaatccaggctgtccaa

SEQ ID NO: 4932669 - DNA, 25 bp, Homo sapien
gctgtccaagttcccgttggcactg

SEQ ID NO: 4932670 - DNA, 25 bp, Homo sapien
caagttcccgttggcactgtgacac

SEQ ID NO: 4932671 - DNA, 25 bp, Homo sapien
ggcacgaatccaggctgtccaagtt

SEQ ID NO: 4932672 - DNA, 25 bp, Homo sapien
cgcgggatagtaaatggacatctta

SEQ ID NO: 4932673 - DNA, 25 bp, Homo sapien
gtatataatatctatcacagacgac

SEQ ID NO: 4932674 - DNA, 25 bp, Homo sapien
tatcacagacgacatctggcgcggg

SEQ ID NO: 4932675 - DNA, 25 bp, Homo sapien
tactatatgcaattttaacaaggcc

SEQ ID NO: 4932676 - DNA, 25 bp, Homo sapien
taaacattggagcattaaaagtgaa

SEQ ID NO: 4932677 - DNA, 25 bp, Homo sapien
acacgaattgtaatcagatgtttgc

SEQ ID NO: 4932678 - DNA, 25 bp, Homo sapien
tctgtttgcaagaaggactaaacat

SEQ ID NO: 4932679 - DNA, 25 bp, Homo sapien
tcaataagattcacacgaattgtaa

SEQ ID NO: 4932680 - DNA, 25 bp, Homo sapien
cagactaatacacctaattaatata

SEQ ID NO: 4932681 - DNA, 25 bp, Homo sapien
atataatcttttaaatcttgagggt

SEQ ID NO: 4932682 - DNA, 25 bp, Homo sapien
cctttttgtcttcatgatagtgagt

SEQ ID NO: 4932683 - DNA, 25 bp, Homo sapien
ttctttcctgcctggccatgtgaag

SEQ ID NO: 4932684 - DNA, 25 bp, Homo sapien
gcctgtaggagagtgatccaacttc

SEQ ID NO: 4932685 - DNA, 25 bp, Homo sapien
catcagtgatgtggtcttcattgcc

SEQ ID NO: 4932686 - DNA, 25 bp, Homo sapien
tcattgcctgtaggagagtgatcca

SEQ ID NO: 4932687 - DNA, 25 bp, Homo sapien
tgtaggagagtgatccaacttcaaa

SEQ ID NO: 4932688 - DNA, 25 bp, Homo sapien
ttgtctgaagttcttcacattttaa

SEQ ID NO: 4932689 - DNA, 25 bp, Homo sapien
cacattttaaattattactatttgc

SEQ ID NO: 4932690 - DNA, 25 bp, Homo sapien
ttaaattattactatttgctatcat

SEQ ID NO: 4932691 - DNA, 25 bp, Homo sapien
cattttaaattattactatttgcta

SEQ ID NO: 4932692 - DNA, 25 bp, Homo sapien
tgtggtatcatctaagggatttcct

SEQ ID NO: 4932693 - DNA, 25 bp, Homo sapien
ctacagatgtggtatcatctaaggg

SEQ ID NO: 4932694 - DNA, 25 bp, Homo sapien
cagatgtggtatcatctaagggatt

SEQ ID NO: 4932695 - DNA, 25 bp, Homo sapien
tatcatctaagggatttccttcaaa

SEQ ID NO: 4932696 - DNA, 25 bp, Homo sapien
catcaaggcctttaaggagggctgc

SEQ ID NO: 4932697 - DNA, 25 bp, Homo sapien
gacacctgaacgagaaagagccctt

SEQ ID NO: 4932698 - DNA, 25 bp, Homo sapien
taagactctcatagggaggctgcca

SEQ ID NO: 4932699 - DNA, 25 bp, Homo sapien
tgtcacgaccacagggcattgaaaa

SEQ ID NO: 4932700 - DNA, 25 bp, Homo sapien
gaggtgcccgtctcttcaattcctc

SEQ ID NO: 4932701 - DNA, 25 bp, Homo sapien
aatatccaaaattctgcaagttcat

SEQ ID NO: 4932702 - DNA, 25 bp, Homo sapien
ggtgaggtgcccgtctcttcaattc

SEQ ID NO: 4932703 - DNA, 25 bp, Homo sapien
aaggtgaggtgcccgtctcttcaat

SEQ ID NO: 4932704 - DNA, 25 bp, Homo sapien
tatcaaagaagccttccttaggtcc

SEQ ID NO: 4932705 - DNA, 25 bp, Homo sapien
gacttacacttactcatgcttttcc

SEQ ID NO: 4932706 - DNA, 25 bp, Homo sapien
taggtcccacatccgtggcatgcag

SEQ ID NO: 4932707 - DNA, 25 bp, Homo sapien
ggtgagagtacaagtgtagccaagc

SEQ ID NO: 4932708 - DNA, 25 bp, Homo sapien
gcattatcagggttcagctttagcc

SEQ ID NO: 4932709 - DNA, 25 bp, Homo sapien
cataattatggctctgggtcctacc

SEQ ID NO: 4932710 - DNA, 25 bp, Homo sapien
tagcctctgcttttggcaactcagg

SEQ ID NO: 4932711 - DNA, 25 bp, Homo sapien
cagagtgccagaggaaagaccggca

SEQ ID NO: 4932712 - DNA, 25 bp, Homo sapien
agctgcgctacaatgtccccgaact

SEQ ID NO: 4932713 - DNA, 25 bp, Homo sapien
gtattgagagagctgcgctacaatg

SEQ ID NO: 4932714 - DNA, 25 bp, Homo sapien
tcagtctaacttcgcagactctctt

SEQ ID NO: 4932715 - DNA, 25 bp, Homo sapien
agtctaacttcgcagactctcttcc

SEQ ID NO: 4932716 - DNA, 25 bp, Homo sapien
gcagcaccggggctgtagcaccatc

SEQ ID NO: 4932717 - DNA, 25 bp, Homo sapien
gggctgtagcaccatcagctgtcat

SEQ ID NO: 4932718 - DNA, 25 bp, Homo sapien
tgggaagttctgacaccggtttgtg

SEQ ID NO: 4932719 - DNA, 25 bp, Homo sapien
gtttgtgtcattagatgatgctgcc

SEQ ID NO: 4932720 - DNA, 25 bp, Homo sapien
tgagatgaaattgtcattgagaaac

SEQ ID NO: 4932721 - DNA, 25 bp, Homo sapien
atgaaattgtcattgagaaacctac

SEQ ID NO: 4932722 - DNA, 25 bp, Homo sapien
tgaggcctgtggcatttgtaatgag

SEQ ID NO: 4932723 - DNA, 25 bp, Homo sapien
gtaatgagatgaaattgtcattgag

SEQ ID NO: 4932724 - DNA, 25 bp, Homo sapien
ttggaataggacagggactcatccc

SEQ ID NO: 4932725 - DNA, 25 bp, Homo sapien
gcaaagtgcaggactttccttccag

SEQ ID NO: 4932726 - DNA, 25 bp, Homo sapien
tgttccgatagactacaagccttcc

SEQ ID NO: 4932727 - DNA, 25 bp, Homo sapien
ttccttccagtcatcatatttgatc

SEQ ID NO: 4932728 - DNA, 25 bp, Homo sapien
caccatcccctactctgggatttgt

SEQ ID NO: 4932729 - DNA, 25 bp, Homo sapien
atcccctactctgggatttgttgcc

SEQ ID NO: 4932730 - DNA, 25 bp, Homo sapien
ctactctgggatttgttgccaggga

SEQ ID NO: 4932731 - DNA, 25 bp, Homo sapien
tcactgaattcaactgttatttctt

SEQ ID NO: 4932732 - DNA, 25 bp, Homo sapien
tcctgttcattaattcacataggcc

SEQ ID NO: 4932733 - DNA, 25 bp, Homo sapien
gttccctcttgcaagtgagaatatg

SEQ ID NO: 4932734 - DNA, 25 bp, Homo sapien
ctatgctccatgctcaagtaggccc

SEQ ID NO: 4932735 - DNA, 25 bp, Homo sapien
cgagtaaattgtgtgttgctgagct

SEQ ID NO: 4932736 - DNA, 25 bp, Homo sapien
tgtgcttgaaaaccctcttctttgc

SEQ ID NO: 4932737 - DNA, 25 bp, Homo sapien
tccccacctgtgcttgaaaaccctc

SEQ ID NO: 4932738 - DNA, 25 bp, Homo sapien
tcacctttgttgtttggagatactc

SEQ ID NO: 4932739 - DNA, 25 bp, Homo sapien
tgtttggagatactcccttatttcc

SEQ ID NO: 4932740 - DNA, 25 bp, Homo sapien
tgaggcttaagaaactttccttgaa

SEQ ID NO: 4932741 - DNA, 25 bp, Homo sapien
gaagatatatcatgcttagacatag

SEQ ID NO: 4932742 - DNA, 25 bp, Homo sapien
ggtgctcttccattgaagttgaggg

SEQ ID NO: 4932743 - DNA, 25 bp, Homo sapien
ttaagtctattacagcaaggtgctc

SEQ ID NO: 4932744 - DNA, 25 bp, Homo sapien
cagtgaaggaatcaggtagttgcag

SEQ ID NO: 4932745 - DNA, 25 bp, Homo sapien
agtgaaggaatcaggtagttgcagc

SEQ ID NO: 4932746 - DNA, 25 bp, Homo sapien
gtgaaggaatcaggtagttgcagct

SEQ ID NO: 4932747 - DNA, 25 bp, Homo sapien
ctgtgtgtgactttctgagagttat

SEQ ID NO: 4932748 - DNA, 25 bp, Homo sapien
acagtgaagtaactgggaaaggaag

SEQ ID NO: 4932749 - DNA, 25 bp, Homo sapien
gaaaggaaggcaaggtatgctcttg

SEQ ID NO: 4932750 - DNA, 25 bp, Homo sapien
ggcaaggtatgctcttgatccaata

SEQ ID NO: 4932751 - DNA, 25 bp, Homo sapien
attgtccactaatctggacttttag

SEQ ID NO: 4932752 - DNA, 25 bp, Homo sapien
ttgtccactaatctggacttttagt

SEQ ID NO: 4932753 - DNA, 25 bp, Homo sapien
cattgtccactaatctggactttta

SEQ ID NO: 4932754 - DNA, 25 bp, Homo sapien
tcattgtccactaatctggactttt

SEQ ID NO: 4932755 - DNA, 25 bp, Homo sapien
tcaatgtagtgatattgtctgaaca

SEQ ID NO: 4932756 - DNA, 25 bp, Homo sapien
tccttcaatgtagtgatattgtctg

SEQ ID NO: 4932757 - DNA, 25 bp, Homo sapien
cagttcctaattgtggaattccttc

SEQ ID NO: 4932758 - DNA, 25 bp, Homo sapien
cagtcctaccacggccttgttcagt

SEQ ID NO: 4932759 - DNA, 25 bp, Homo sapien
gcaaagcagcttatggcagttggac

SEQ ID NO: 4932760 - DNA, 25 bp, Homo sapien
gttcctcagtttgtatggcaaagca

SEQ ID NO: 4932761 - DNA, 25 bp, Homo sapien
cagttggactggaagtgtaattgag

SEQ ID NO: 4932762 - DNA, 25 bp, Homo sapien
ttcctcagtttgtatggcaaagcag

SEQ ID NO: 4932763 - DNA, 25 bp, Homo sapien
cattcaccaatgccaaaacatgacc

SEQ ID NO: 4932764 - DNA, 25 bp, Homo sapien
atgtaactcttccttaatgatccag

SEQ ID NO: 4932765 - DNA, 25 bp, Homo sapien
ctgataattatcaggcgcatctcca

SEQ ID NO: 4932766 - DNA, 25 bp, Homo sapien
catctccaaagaatgtaactcttcc

SEQ ID NO: 4932767 - DNA, 25 bp, Homo sapien
aattatcaggcgcatctccaaagaa

SEQ ID NO: 4932768 - DNA, 25 bp, Homo sapien
agtcacaatgctctgagctcctatc

SEQ ID NO: 4932769 - DNA, 25 bp, Homo sapien
agacagtcacaatgctctgagctcc

SEQ ID NO: 4932770 - DNA, 25 bp, Homo sapien
gtcacaatgctctgagctcctatca

SEQ ID NO: 4932771 - DNA, 25 bp, Homo sapien
cagtcacaatgctctgagctcctat

SEQ ID NO: 4932772 - DNA, 25 bp, Homo sapien
caccagcacttgcacctgtagctgt

SEQ ID NO: 4932773 - DNA, 25 bp, Homo sapien
ggatcacctccgacaatctccacca

SEQ ID NO: 4932774 - DNA, 25 bp, Homo sapien
gccagagttgtctgcatagacagac

SEQ ID NO: 4932775 - DNA, 25 bp, Homo sapien
gcacctgtagctgttcatagccaga

SEQ ID NO: 4932776 - DNA, 25 bp, Homo sapien
gtatagattatacttatgtgaagat

SEQ ID NO: 4932777 - DNA, 25 bp, Homo sapien
tctcagcttcaaaaggtagtacctt

SEQ ID NO: 4932778 - DNA, 25 bp, Homo sapien
ctcagcttcaaaaggtagtaccttt

SEQ ID NO: 4932779 - DNA, 25 bp, Homo sapien
cctcaatgtatagattatacttatg

SEQ ID NO: 4932780 - DNA, 25 bp, Homo sapien
acttcggagtctgggttgtggcaca

SEQ ID NO: 4932781 - DNA, 25 bp, Homo sapien
gtggcacaattgcaactggagaagc

SEQ ID NO: 4932782 - DNA, 25 bp, Homo sapien
tcaggctcgtactacttcctgcaca

SEQ ID NO: 4932783 - DNA, 25 bp, Homo sapien
tttacccttgtgcttgtcagatttg

SEQ ID NO: 4932784 - DNA, 25 bp, Homo sapien
cgtcttctgaccctttgggtctatg

SEQ ID NO: 4932785 - DNA, 25 bp, Homo sapien
tttaaggtcttggttttcatcatgt

SEQ ID NO: 4932786 - DNA, 25 bp, Homo sapien
ctgaccctttgggtctatgggttca

SEQ ID NO: 4932787 - DNA, 25 bp, Homo sapien
tcatcatgtcatgttgatcttcttt

SEQ ID NO: 4932788 - DNA, 25 bp, Homo sapien
catctgcagggagctaaaatgcttc

SEQ ID NO: 4932789 - DNA, 25 bp, Homo sapien
ctgaaagcttttaggatccatctgc

SEQ ID NO: 4932790 - DNA, 25 bp, Homo sapien
atctgcagggagctaaaatgcttca

SEQ ID NO: 4932791 - DNA, 25 bp, Homo sapien
ctggaaggttgtctcttgtgcctaa

SEQ ID NO: 4932792 - DNA, 25 bp, Homo sapien
ctcttatcctttaaggaaacagtca

SEQ ID NO: 4932793 - DNA, 25 bp, Homo sapien
tgctatcagccaattcctcttatcc

SEQ ID NO: 4932794 - DNA, 25 bp, Homo sapien
ctaaaatatcctgctatcagccaat

SEQ ID NO: 4932795 - DNA, 25 bp, Homo sapien
gcctgtctcccgttttgtaatgttc

SEQ ID NO: 4932796 - DNA, 25 bp, Homo sapien
cctgtctcccgttttgtaatgttca

SEQ ID NO: 4932797 - DNA, 25 bp, Homo sapien
ctgtctcccgttttgtaatgttcat

SEQ ID NO: 4932798 - DNA, 25 bp, Homo sapien
ctgcttgaaatagcttcagcaacat

SEQ ID NO: 4932799 - DNA, 25 bp, Homo sapien
ggctgtgagctgctcgaatacaaca

SEQ ID NO: 4932800 - DNA, 25 bp, Homo sapien
tgatcttcatattcacttgaatggc

SEQ ID NO: 4932801 - DNA, 25 bp, Homo sapien
aacgtgggcgtgtatgtcatttgag

SEQ ID NO: 4932802 - DNA, 25 bp, Homo sapien
ctgtgtgtgaaacgtgggcgtgtat

SEQ ID NO: 4932803 - DNA, 25 bp, Homo sapien
ctgagagacgccagaggacagagtg

SEQ ID NO: 4932804 - DNA, 25 bp, Homo sapien
gtgctgagtgtgccgtacaggtgac

SEQ ID NO: 4932805 - DNA, 25 bp, Homo sapien
agtgctgagtgtgccgtacaggtga

SEQ ID NO: 4932806 - DNA, 25 bp, Homo sapien
cctctgaattatgtgctgatgagaa

SEQ ID NO: 4932807 - DNA, 25 bp, Homo sapien
tgcgccaagaaaacaccaaaggttg

SEQ ID NO: 4932808 - DNA, 25 bp, Homo sapien
tctcctttgaaaaatcgcctctgaa

SEQ ID NO: 4932809 - DNA, 25 bp, Homo sapien
agaaaaggatttccctgcgccaaga

SEQ ID NO: 4932810 - DNA, 25 bp, Homo sapien
aatgtctcttgtagtgtctgcaaat

SEQ ID NO: 4932811 - DNA, 25 bp, Homo sapien
gactgagtttaaacaagaacagcaa

SEQ ID NO: 4932812 - DNA, 25 bp, Homo sapien
tcttgtagtgtctgcaaattgactg

SEQ ID NO: 4932813 - DNA, 25 bp, Homo sapien
ctgcaaattgactgagtttaaacaa

SEQ ID NO: 4932814 - DNA, 25 bp, Homo sapien
ggcagccgatgggaacattcagcgt

SEQ ID NO: 4932815 - DNA, 25 bp, Homo sapien
atgggaacattcagcgtgggagaca

SEQ ID NO: 4932816 - DNA, 25 bp, Homo sapien
aaagtcagcagttcggggcagccga

SEQ ID NO: 4932817 - DNA, 25 bp, Homo sapien
aaaagtcagcagttcggggcagccg

SEQ ID NO: 4932818 - DNA, 25 bp, Homo sapien
tgagcatgcgccattggatccacta

SEQ ID NO: 4932819 - DNA, 25 bp, Homo sapien
gcttattccctgtacgctctccttg

SEQ ID NO: 4932820 - DNA, 25 bp, Homo sapien
ttagagcttattccctgtacgctct

SEQ ID NO: 4932821 - DNA, 25 bp, Homo sapien
tggatccactagcactgacagaacc

SEQ ID NO: 4932822 - DNA, 25 bp, Homo sapien
tccagtgtgactcaaacacaagaat

SEQ ID NO: 4932823 - DNA, 25 bp, Homo sapien
ccagtgtgactcaaacacaagaatt

SEQ ID NO: 4932824 - DNA, 25 bp, Homo sapien
cagtccaagtggatgtagaaatgat

SEQ ID NO: 4932825 - DNA, 25 bp, Homo sapien
ccaagtggatgtagaaatgatactg

SEQ ID NO: 4932826 - DNA, 25 bp, Homo sapien
gcacacagtccaagtggatgtagaa

SEQ ID NO: 4932827 - DNA, 25 bp, Homo sapien
cacagtccaagtggatgtagaaatg

SEQ ID NO: 4932828 - DNA, 25 bp, Homo sapien
gagcttgacgaaacccatgcagagg

SEQ ID NO: 4932829 - DNA, 25 bp, Homo sapien
gaaaatttgctttgaaggccacgta

SEQ ID NO: 4932830 - DNA, 25 bp, Homo sapien
ccagtttgcaatggactgcacgagt

SEQ ID NO: 4932831 - DNA, 25 bp, Homo sapien
gggtgtgactcaatgggcatctgca

SEQ ID NO: 4932832 - DNA, 25 bp, Homo sapien
ctgtgtaagctaaccctaaataggt

SEQ ID NO: 4932833 - DNA, 25 bp, Homo sapien
catctgtgtaagctaaccctaaata

SEQ ID NO: 4932834 - DNA, 25 bp, Homo sapien
atctgtgtaagctaaccctaaatag

SEQ ID NO: 4932835 - DNA, 25 bp, Homo sapien
tctgtgtaagctaaccctaaatagg

SEQ ID NO: 4932836 - DNA, 25 bp, Homo sapien
gagtgtgagttttattatctgcatg

SEQ ID NO: 4932837 - DNA, 25 bp, Homo sapien
tttattatctgcatgcaagttcaag

SEQ ID NO: 4932838 - DNA, 25 bp, Homo sapien
tgagttttattatctgcatgcaagt

SEQ ID NO: 4932839 - DNA, 25 bp, Homo sapien
tgcatgcaagttcaagtctatttca

SEQ ID NO: 4932840 - DNA, 25 bp, Homo sapien
cacaatgtctacaccagtgtcagca

SEQ ID NO: 4932841 - DNA, 25 bp, Homo sapien
ccacacaatgtctacaccagtgtca

SEQ ID NO: 4932842 - DNA, 25 bp, Homo sapien
cagcaggtgtaccaggcctctgcaa

SEQ ID NO: 4932843 - DNA, 25 bp, Homo sapien
tgtaccacacaatgtctacaccagt

SEQ ID NO: 4932844 - DNA, 25 bp, Homo sapien
taatgcatgagtgttaaatacccga

SEQ ID NO: 4932845 - DNA, 25 bp, Homo sapien
gagatgcctctgtattgatttatgt

SEQ ID NO: 4932846 - DNA, 25 bp, Homo sapien
tctccttagctatgtcagttcttgc

SEQ ID NO: 4932847 - DNA, 25 bp, Homo sapien
gatttatgtctactcactttgttag

SEQ ID NO: 4932848 - DNA, 25 bp, Homo sapien
gactgcactgcaagtagacacagcc

SEQ ID NO: 4932849 - DNA, 25 bp, Homo sapien
tcctcagttgggcatctaagactgc

SEQ ID NO: 4932850 - DNA, 25 bp, Homo sapien
gatatagtcaagcattgcctgccag

SEQ ID NO: 4932851 - DNA, 25 bp, Homo sapien
gtgtaagaactacgatgcaggcccc

SEQ ID NO: 4932852 - DNA, 25 bp, Homo sapien
taatgtctgacgtttttaggacctc

SEQ ID NO: 4932853 - DNA, 25 bp, Homo sapien
aatgtctgacgtttttaggacctca

SEQ ID NO: 4932854 - DNA, 25 bp, Homo sapien
agatattaagcttccaagttgtggc

SEQ ID NO: 4932855 - DNA, 25 bp, Homo sapien
ctgagggccaagagacaccctgact

SEQ ID NO: 4932856 - DNA, 25 bp, Homo sapien
gagggccaagagacaccctgactct

SEQ ID NO: 4932857 - DNA, 25 bp, Homo sapien
cttccacccttggaagatattaagc

SEQ ID NO: 4932858 - DNA, 25 bp, Homo sapien
cccctgaacagccttcgtactctgc

SEQ ID NO: 4932859 - DNA, 25 bp, Homo sapien
tgctgccatggctactgcaccggca

SEQ ID NO: 4932860 - DNA, 25 bp, Homo sapien
ctgaacagccttcgtactctgcttg

SEQ ID NO: 4932861 - DNA, 25 bp, Homo sapien
tgcaccggcaccctcgccggcccct

SEQ ID NO: 4932862 - DNA, 25 bp, Homo sapien
gggactggtcctcgcccatgctaca

SEQ ID NO: 4932863 - DNA, 25 bp, Homo sapien
tggtcctcgcccatgctacagagat

SEQ ID NO: 4932864 - DNA, 25 bp, Homo sapien
gcccatgctacagagatcacccatg

SEQ ID NO: 4932865 - DNA, 25 bp, Homo sapien
acagagatcacccatggtccaccag

SEQ ID NO: 4932866 - DNA, 25 bp, Homo sapien
aattgtaattggctggagacataaa

SEQ ID NO: 4932867 - DNA, 25 bp, Homo sapien
gtggtaattgtaattggctggagac

SEQ ID NO: 4932868 - DNA, 25 bp, Homo sapien
cataaaatgtgatcgagccatttcc

SEQ ID NO: 4932869 - DNA, 25 bp, Homo sapien
gacataaaatgtgatcgagccattt

SEQ ID NO: 4932870 - DNA, 25 bp, Homo sapien
caaatgacagtgcatagagatgtcc

SEQ ID NO: 4932871 - DNA, 25 bp, Homo sapien
tgtgtactgtaaaatgcctccacaa

SEQ ID NO: 4932872 - DNA, 25 bp, Homo sapien
ggaacagaaaccatctggtgtaggc

SEQ ID NO: 4932873 - DNA, 25 bp, Homo sapien
ttgtgagatgagtatcagaggaaca

SEQ ID NO: 4932874 - DNA, 25 bp, Homo sapien
ccagcatagggcatgggaaaccatt

SEQ ID NO: 4932875 - DNA, 25 bp, Homo sapien
tatagccagtgtctgaacagaaaga

SEQ ID NO: 4932876 - DNA, 25 bp, Homo sapien
ttaccgtatagccagtgtctgaaca

SEQ ID NO: 4932877 - DNA, 25 bp, Homo sapien
ttcatcattttgatcttggtatctc

SEQ ID NO: 4932878 - DNA, 25 bp, Homo sapien
gcaagggttacagccaacaagtcag

SEQ ID NO: 4932879 - DNA, 25 bp, Homo sapien
ctaggcaagggttacagccaacaag

SEQ ID NO: 4932880 - DNA, 25 bp, Homo sapien
taggcaagggttacagccaacaagt

SEQ ID NO: 4932881 - DNA, 25 bp, Homo sapien
gggttacagccaacaagtcagaatt

SEQ ID NO: 4932882 - DNA, 25 bp, Homo sapien
cacttcctagctttggtgtatttct

SEQ ID NO: 4932883 - DNA, 25 bp, Homo sapien
atttcactgaggatcggatggtgga

SEQ ID NO: 4932884 - DNA, 25 bp, Homo sapien
tgtggctgatccaacgtctacagag

SEQ ID NO: 4932885 - DNA, 25 bp, Homo sapien
ccaacgtctacagagtcttttgggc

SEQ ID NO: 4932886 - DNA, 25 bp, Homo sapien
ctgggcttttttcccaggtgatgtc

SEQ ID NO: 4932887 - DNA, 25 bp, Homo sapien
tcatctgggcttttttcccaggtga

SEQ ID NO: 4932888 - DNA, 25 bp, Homo sapien
aatggttcttcaaataggcacttct

SEQ ID NO: 4932889 - DNA, 25 bp, Homo sapien
ggttcttcaaataggcacttctaac

SEQ ID NO: 4932890 - DNA, 25 bp, Homo sapien
aacatgagggcactgaagacaagaa

SEQ ID NO: 4932891 - DNA, 25 bp, Homo sapien
ggcactgaagacaagaacagtttca

SEQ ID NO: 4932892 - DNA, 25 bp, Homo sapien
catgagggcactgaagacaagaaca

SEQ ID NO: 4932893 - DNA, 25 bp, Homo sapien
tgagggcactgaagacaagaacagt

SEQ ID NO: 4932894 - DNA, 25 bp, Homo sapien
tcttcatacaactctccatgcttat

SEQ ID NO: 4932895 - DNA, 25 bp, Homo sapien
ccctctttgtcgacatccagaaagt

SEQ ID NO: 4932896 - DNA, 25 bp, Homo sapien
ctattggatcctgaataagattttc

SEQ ID NO: 4932897 - DNA, 25 bp, Homo sapien
ccaagtgctccatctgattgatgca

SEQ ID NO: 4932898 - DNA, 25 bp, Homo sapien
aaagattctgccaagatctgtcaac

SEQ ID NO: 4932899 - DNA, 25 bp, Homo sapien
gtcaacctgagcctctaaataacca

SEQ ID NO: 4932900 - DNA, 25 bp, Homo sapien
aagattctgccaagatctgtcaacc

SEQ ID NO: 4932901 - DNA, 25 bp, Homo sapien
gagcctctaaataaccagtgacaaa

SEQ ID NO: 4932902 - DNA, 25 bp, Homo sapien
gcagaagtaaccttgatcttcagta

SEQ ID NO: 4932903 - DNA, 25 bp, Homo sapien
taggaatatgattgcagaagtaacc

SEQ ID NO: 4932904 - DNA, 25 bp, Homo sapien
tatgagagttgaactggagttagga

SEQ ID NO: 4932905 - DNA, 25 bp, Homo sapien
gccaatcctacttgaagcttcctta

SEQ ID NO: 4932906 - DNA, 25 bp, Homo sapien
taaaaaatcttagagatctttctgt

SEQ ID NO: 4932907 - DNA, 25 bp, Homo sapien
tgtgctacgcctcttaaaaaatctt

SEQ ID NO: 4932908 - DNA, 25 bp, Homo sapien
tattgagagctaatatgtgctacgc

SEQ ID NO: 4932909 - DNA, 25 bp, Homo sapien
gaaacatagtaactgggtgtcttcc

SEQ ID NO: 4932910 - DNA, 25 bp, Homo sapien
gaaaatcgaaactcttctcttatcc

SEQ ID NO: 4932911 - DNA, 25 bp, Homo sapien
ttgtgaaaatcgaaactcttctctt

SEQ ID NO: 4932912 - DNA, 25 bp, Homo sapien
tctggttgtgaaaatcgaaactctt

SEQ ID NO: 4932913 - DNA, 25 bp, Homo sapien
aatcgaaactcttctcttatcctca

SEQ ID NO: 4932914 - DNA, 25 bp, Homo sapien
catcccattattgtaggtttgtcct

SEQ ID NO: 4932915 - DNA, 25 bp, Homo sapien
ccttttagttgatctgagatggccc

SEQ ID NO: 4932916 - DNA, 25 bp, Homo sapien
gacattagggggagcttggctcttc

SEQ ID NO: 4932917 - DNA, 25 bp, Homo sapien
gatggcccttggctgagacattagg

SEQ ID NO: 4932918 - DNA, 25 bp, Homo sapien
tccatgtgaccgagtgggaatcggt

SEQ ID NO: 4932919 - DNA, 25 bp, Homo sapien
ctggaatgagctgtcaacattctcc

SEQ ID NO: 4932920 - DNA, 25 bp, Homo sapien
caagtcctggaatgagctgtcaaca

SEQ ID NO: 4932921 - DNA, 25 bp, Homo sapien
cccagtgattgggttggcaaaattt

SEQ ID NO: 4932922 - DNA, 25 bp, Homo sapien
atcttatcctcttcactttgaccca

SEQ ID NO: 4932923 - DNA, 25 bp, Homo sapien
gaatttatcccatgcagtttacgtc

SEQ ID NO: 4932924 - DNA, 25 bp, Homo sapien
tctactacagataggcttcttcctt

SEQ ID NO: 4932925 - DNA, 25 bp, Homo sapien
gcagtttacgtcttctaaatatctc

SEQ ID NO: 4932926 - DNA, 25 bp, Homo sapien
tcttttttctgggctagcatctgga

SEQ ID NO: 4932927 - DNA, 25 bp, Homo sapien
aatggaaggttggaacctttcatct

SEQ ID NO: 4932928 - DNA, 25 bp, Homo sapien
catctttgaaacatgaagcacagca

SEQ ID NO: 4932929 - DNA, 25 bp, Homo sapien
aagctccttgtagtaaaatggaagg

SEQ ID NO: 4932930 - DNA, 25 bp, Homo sapien
caatgctggcgtcatccagcgtgga

SEQ ID NO: 4932931 - DNA, 25 bp, Homo sapien
tggcgtcatccagcgtggatagatg

SEQ ID NO: 4932932 - DNA, 25 bp, Homo sapien
tccagcgtggatagatgacaccagc

SEQ ID NO: 4932933 - DNA, 25 bp, Homo sapien
ctgcacatcccaatgctggcgtcat

SEQ ID NO: 4932934 - DNA, 25 bp, Homo sapien
tcctaacctgcgtccattcactcat

SEQ ID NO: 4932935 - DNA, 25 bp, Homo sapien
ttccatatctaggaaagcaccttct

SEQ ID NO: 4932936 - DNA, 25 bp, Homo sapien
agtttccatatctaggaaagcacct

SEQ ID NO: 4932937 - DNA, 25 bp, Homo sapien
caccttctccattcctaacctgcgt

SEQ ID NO: 4932938 - DNA, 25 bp, Homo sapien
gccacagagggactgatgtttctcc

SEQ ID NO: 4932939 - DNA, 25 bp, Homo sapien
tcagggatcactggaatggacgggg

SEQ ID NO: 4932940 - DNA, 25 bp, Homo sapien
atcactggaatggacggggtcctgc

SEQ ID NO: 4932941 - DNA, 25 bp, Homo sapien
acaggctcccaggattccgatggca

SEQ ID NO: 4932942 - DNA, 25 bp, Homo sapien
caccaaatttgacatgaatatctcc

SEQ ID NO: 4932943 - DNA, 25 bp, Homo sapien
agtcaccaaatttgacatgaatatc

SEQ ID NO: 4932944 - DNA, 25 bp, Homo sapien
cttccaagccaatcgaagtcaccaa

SEQ ID NO: 4932945 - DNA, 25 bp, Homo sapien
caagccaatcgaagtcaccaaattt

SEQ ID NO: 4932946 - DNA, 25 bp, Homo sapien
tcttcgcaggagagttctaaggagt

SEQ ID NO: 4932947 - DNA, 25 bp, Homo sapien
cagaatttgtgtactggttatgagc

SEQ ID NO: 4932948 - DNA, 25 bp, Homo sapien
tgttgagctcactgctattggcctg

SEQ ID NO: 4932949 - DNA, 25 bp, Homo sapien
tgtgcaatgcttcgtagatcccttt

SEQ ID NO: 4932950 - DNA, 25 bp, Homo sapien
caaacacgaggggacacaggtggct

SEQ ID NO: 4932951 - DNA, 25 bp, Homo sapien
ctgggaaccacacggcgcaagccag

SEQ ID NO: 4932952 - DNA, 25 bp, Homo sapien
caagagttggttgtcacacaggaaa

SEQ ID NO: 4932953 - DNA, 25 bp, Homo sapien
tcactttggcgaacttcttggccat

SEQ ID NO: 4932954 - DNA, 25 bp, Homo sapien
ctgtaactttcgctttggggctttg

SEQ ID NO: 4932955 - DNA, 25 bp, Homo sapien
tgtaactttcgctttggggctttga

SEQ ID NO: 4932956 - DNA, 25 bp, Homo sapien
ctttcttagtcactggtccatttgc

SEQ ID NO: 4932957 - DNA, 25 bp, Homo sapien
tgctgtcacaggatgaggtcttctt

SEQ ID NO: 4932958 - DNA, 25 bp, Homo sapien
tcttagctttcttagtcactggtcc

SEQ ID NO: 4932959 - DNA, 25 bp, Homo sapien
aggatgaggtcttcttcttagcttt

SEQ ID NO: 4932960 - DNA, 25 bp, Homo sapien
ctcccatggcaggtacagcagcctt

SEQ ID NO: 4932961 - DNA, 25 bp, Homo sapien
ggcccttgagcgtccccgtcctctc

SEQ ID NO: 4932962 - DNA, 25 bp, Homo sapien
tgttgaggcagactggctcccatgg

SEQ ID NO: 4932963 - DNA, 25 bp, Homo sapien
cagcagccttcttagctgggggccc

SEQ ID NO: 4932964 - DNA, 25 bp, Homo sapien
tgtcactagattattcacagctgct

SEQ ID NO: 4932965 - DNA, 25 bp, Homo sapien
actgtcactagattattcacagctg

SEQ ID NO: 4932966 - DNA, 25 bp, Homo sapien
agctgctgctctgacgctttcgcca

SEQ ID NO: 4932967 - DNA, 25 bp, Homo sapien
ctcactgtcactagattattcacag

SEQ ID NO: 4932968 - DNA, 25 bp, Homo sapien
ttggcccaagtttagctgccacaga

SEQ ID NO: 4932969 - DNA, 25 bp, Homo sapien
cttctggttctgtggtgtgcctcat

SEQ ID NO: 4932970 - DNA, 25 bp, Homo sapien
ttctggttctgtggtgtgcctcatc

SEQ ID NO: 4932971 - DNA, 25 bp, Homo sapien
tttggcccaagtttagctgccacag

SEQ ID NO: 4932972 - DNA, 25 bp, Homo sapien
tactttaggtgctgctggagctgga

SEQ ID NO: 4932973 - DNA, 25 bp, Homo sapien
ctttaggtgctgctggagctggagt

SEQ ID NO: 4932974 - DNA, 25 bp, Homo sapien
tattggctactttaggtgctgctgg

SEQ ID NO: 4932975 - DNA, 25 bp, Homo sapien
ttaggtgctgctggagctggagtac

SEQ ID NO: 4932976 - DNA, 25 bp, Homo sapien
ttgctttttgggtatagtcttcttg

SEQ ID NO: 4932977 - DNA, 25 bp, Homo sapien
tgctttttgggtatagtcttcttgg

SEQ ID NO: 4932978 - DNA, 25 bp, Homo sapien
gggtatagtcttcttggggatggct

SEQ ID NO: 4932979 - DNA, 25 bp, Homo sapien
tatagtcttcttggggatggctgct

SEQ ID NO: 4932980 - DNA, 25 bp, Homo sapien
gattgaggagcaggaggtcggggga

SEQ ID NO: 4932981 - DNA, 25 bp, Homo sapien
tgaggagcaggaggtcgggggactg

SEQ ID NO: 4932982 - DNA, 25 bp, Homo sapien
attgaggagcaggaggtcgggggac

SEQ ID NO: 4932983 - DNA, 25 bp, Homo sapien
aggagcaggaggtcgggggactgaa

SEQ ID NO: 4932984 - DNA, 25 bp, Homo sapien
tttcttcttcgcagttttcttggga

SEQ ID NO: 4932985 - DNA, 25 bp, Homo sapien
gagatgactcccgtagacagggtct

SEQ ID NO: 4932986 - DNA, 25 bp, Homo sapien
ttgagttagagtcatcagtgctgtc

SEQ ID NO: 4932987 - DNA, 25 bp, Homo sapien
tgttgctttagagatgactcccgta

SEQ ID NO: 4932988 - DNA, 25 bp, Homo sapien
tctgaagctttatgctcttggcttg

SEQ ID NO: 4932989 - DNA, 25 bp, Homo sapien
gtctgaagctttatgctcttggctt

SEQ ID NO: 4932990 - DNA, 25 bp, Homo sapien
atggaaatctgttacgggtctgaag

SEQ ID NO: 4932991 - DNA, 25 bp, Homo sapien
tcatggaaatctgttacgggtctga

SEQ ID NO: 4932992 - DNA, 25 bp, Homo sapien
caagcagaaggtgaatatatctttc

SEQ ID NO: 4932993 - DNA, 25 bp, Homo sapien
cagtgttagttgctgcccttgccag

SEQ ID NO: 4932994 - DNA, 25 bp, Homo sapien
atcttaggataaattgttcaactct

SEQ ID NO: 4932995 - DNA, 25 bp, Homo sapien
tagttcataatataccacgtaggct

SEQ ID NO: 4932996 - DNA, 25 bp, Homo sapien
gcgtggctgactgagcgtcccactt

SEQ ID NO: 4932997 - DNA, 25 bp, Homo sapien
gaacacaatacaggcgtggctgact

SEQ ID NO: 4932998 - DNA, 25 bp, Homo sapien
gtggttgaacacaatacaggcgtgg

SEQ ID NO: 4932999 - DNA, 25 bp, Homo sapien
ctgactgagcgtcccacttctgtgg

SEQ ID NO: 4933000 - DNA, 25 bp, Homo sapien
gccagtgaccccattaggcttttgt

SEQ ID NO: 4933001 - DNA, 25 bp, Homo sapien
ttgccctggactgctccagaatagc

SEQ ID NO: 4933002 - DNA, 25 bp, Homo sapien
tgtatcaaaccgttcccctgcagag

SEQ ID NO: 4933003 - DNA, 25 bp, Homo sapien
gctgcttcttggagtatcttgccct

SEQ ID NO: 4933004 - DNA, 25 bp, Homo sapien
ggcctgtgggcggaaagggcagaca

SEQ ID NO: 4933005 - DNA, 25 bp, Homo sapien
tgtgggcggaaagggcagacaccaa

SEQ ID NO: 4933006 - DNA, 25 bp, Homo sapien
ttaggcctgtgggcggaaagggcag

SEQ ID NO: 4933007 - DNA, 25 bp, Homo sapien
ctgtgggcggaaagggcagacacca

SEQ ID NO: 4933008 - DNA, 25 bp, Homo sapien
agaatattggctcacaaagtaatat

SEQ ID NO: 4933009 - DNA, 25 bp, Homo sapien
ataaagaaccaatagagctggatga

SEQ ID NO: 4933010 - DNA, 25 bp, Homo sapien
ctataaagaaccaatagagctggat

SEQ ID NO: 4933011 - DNA, 25 bp, Homo sapien
tataaagaaccaatagagctggatg

SEQ ID NO: 4933012 - DNA, 25 bp, Homo sapien
taaagaaccaatagagctggatgat

SEQ ID NO: 4933013 - DNA, 25 bp, Homo sapien
tccatctccatagaaacagaggaag

SEQ ID NO: 4933014 - DNA, 25 bp, Homo sapien
tctataatctttggccgtacacagt

SEQ ID NO: 4933015 - DNA, 25 bp, Homo sapien
cacaaagagtgtccaagttaatccc

SEQ ID NO: 4933016 - DNA, 25 bp, Homo sapien
cacagtagtagctaaatccatccat

SEQ ID NO: 4933017 - DNA, 25 bp, Homo sapien
cacgctattcggagactgtgatgtc

SEQ ID NO: 4933018 - DNA, 25 bp, Homo sapien
tgtccacgaagctggctgatgtctg

SEQ ID NO: 4933019 - DNA, 25 bp, Homo sapien
atgtctttcaccacgctattcggag

SEQ ID NO: 4933020 - DNA, 25 bp, Homo sapien
tgatgtctgtccacgaagctggctg

SEQ ID NO: 4933021 - DNA, 25 bp, Homo sapien
ctgagggtcacgctgaagttactgg

SEQ ID NO: 4933022 - DNA, 25 bp, Homo sapien
ggtgaaggttattgtcatttgggcc

SEQ ID NO: 4933023 - DNA, 25 bp, Homo sapien
cacgctgaagttactggtgaaggtt

SEQ ID NO: 4933024 - DNA, 25 bp, Homo sapien
tttgtcatttgacatccctccagca

SEQ ID NO: 4933025 - DNA, 25 bp, Homo sapien
aggtgactgatgcttcttgattata

SEQ ID NO: 4933026 - DNA, 25 bp, Homo sapien
ggccaaggtgactgatgcttcttga

SEQ ID NO: 4933027 - DNA, 25 bp, Homo sapien
tgactgatgcttcttgattatatcc

SEQ ID NO: 4933028 - DNA, 25 bp, Homo sapien
caaggtgactgatgcttcttgatta

SEQ ID NO: 4933029 - DNA, 25 bp, Homo sapien
ggtgtgatctgatacagcacatgga

SEQ ID NO: 4933030 - DNA, 25 bp, Homo sapien
gttggtggtgtgatctgatacagca

SEQ ID NO: 4933031 - DNA, 25 bp, Homo sapien
ctatgtcttcaggtctgttggtggt

SEQ ID NO: 4933032 - DNA, 25 bp, Homo sapien
gatacagcacatggaataataaggg

SEQ ID NO: 4933033 - DNA, 25 bp, Homo sapien
agacatcttgttcacacaaaccaga

SEQ ID NO: 4933034 - DNA, 25 bp, Homo sapien
gtagacatcttgttcacacaaacca

SEQ ID NO: 4933035 - DNA, 25 bp, Homo sapien
gacatcttgttcacacaaaccagag

SEQ ID NO: 4933036 - DNA, 25 bp, Homo sapien
acatcttgttcacacaaaccagagc

SEQ ID NO: 4933037 - DNA, 25 bp, Homo sapien
ctccagaaagttggagtctaccagt

SEQ ID NO: 4933038 - DNA, 25 bp, Homo sapien
tcctccagaaagttggagtctacca

SEQ ID NO: 4933039 - DNA, 25 bp, Homo sapien
gtcctccagaaagttggagtctacc

SEQ ID NO: 4933040 - DNA, 25 bp, Homo sapien
cctccagaaagttggagtctaccag

SEQ ID NO: 4933041 - DNA, 25 bp, Homo sapien
tttaacttcttgctcgatcagcccc

SEQ ID NO: 4933042 - DNA, 25 bp, Homo sapien
taacttcttgctcgatcagccccaa

SEQ ID NO: 4933043 - DNA, 25 bp, Homo sapien
aacttcttgctcgatcagccccaaa

SEQ ID NO: 4933044 - DNA, 25 bp, Homo sapien
atttttaacttcttgctcgatcagc

SEQ ID NO: 4933045 - DNA, 25 bp, Homo sapien
aacgtgggcaggattgacattgtca

SEQ ID NO: 4933046 - DNA, 25 bp, Homo sapien
cagggttcatctcatcagtgccatc

SEQ ID NO: 4933047 - DNA, 25 bp, Homo sapien
gataatgcaaagttacaggcatggg

SEQ ID NO: 4933048 - DNA, 25 bp, Homo sapien
aagatagtaagtgccttcctagagg

SEQ ID NO: 4933049 - DNA, 25 bp, Homo sapien
cagatatcaaggaggtagggactag

SEQ ID NO: 4933050 - DNA, 25 bp, Homo sapien
gggtaactgatgatcaattccctga

SEQ ID NO: 4933051 - DNA, 25 bp, Homo sapien
aggaagacacggatagggtaactga

SEQ ID NO: 4933052 - DNA, 25 bp, Homo sapien
tgatgatcaattccctgagacccca

SEQ ID NO: 4933053 - DNA, 25 bp, Homo sapien
tgtttcttgctaggagtaattttga

SEQ ID NO: 4933054 - DNA, 25 bp, Homo sapien
tgctaggagtaattttgagttggcc

SEQ ID NO: 4933055 - DNA, 25 bp, Homo sapien
ttttgagttggccaactgaaggaat

SEQ ID NO: 4933056 - DNA, 25 bp, Homo sapien
gagtaattttgagttggccaactga

SEQ ID NO: 4933057 - DNA, 25 bp, Homo sapien
taatagtggatctgtcttcctgatc

SEQ ID NO: 4933058 - DNA, 25 bp, Homo sapien
tgtgacatggcattgtcccctctcc

SEQ ID NO: 4933059 - DNA, 25 bp, Homo sapien
caatggcaatggtagtaatagtgga

SEQ ID NO: 4933060 - DNA, 25 bp, Homo sapien
agctccctccgtcctgacactcaat

SEQ ID NO: 4933061 - DNA, 25 bp, Homo sapien
ctagtagggtcccaggaatgcaagg

SEQ ID NO: 4933062 - DNA, 25 bp, Homo sapien
agggtcccaggaatgcaaggatcac

SEQ ID NO: 4933063 - DNA, 25 bp, Homo sapien
gtagggtcccaggaatgcaaggatc

SEQ ID NO: 4933064 - DNA, 25 bp, Homo sapien
tagtagggtcccaggaatgcaagga

SEQ ID NO: 4933065 - DNA, 25 bp, Homo sapien
actcttccactttgcaagagtgtgc

SEQ ID NO: 4933066 - DNA, 25 bp, Homo sapien
gaggacaccaactagcctcttggtt

SEQ ID NO: 4933067 - DNA, 25 bp, Homo sapien
ccaactagcctcttggttacaagtt

SEQ ID NO: 4933068 - DNA, 25 bp, Homo sapien
cactttgcaagagtgtgctggctgt

SEQ ID NO: 4933069 - DNA, 25 bp, Homo sapien
ctggctggctatattgatgaaggtg

SEQ ID NO: 4933070 - DNA, 25 bp, Homo sapien
gctgctgtactgggatccaatttca

SEQ ID NO: 4933071 - DNA, 25 bp, Homo sapien
ggctggctatattgatgaaggtgca

SEQ ID NO: 4933072 - DNA, 25 bp, Homo sapien
tggctggctatattgatgaaggtgc

SEQ ID NO: 4933073 - DNA, 25 bp, Homo sapien
ctccttatctaaaagggctagttgc

SEQ ID NO: 4933074 - DNA, 25 bp, Homo sapien
tggcctcagtaaatgctgaaacgaa

SEQ ID NO: 4933075 - DNA, 25 bp, Homo sapien
gctagttgctggttgcaagagataa

SEQ ID NO: 4933076 - DNA, 25 bp, Homo sapien
tgctgaaacgaaaacctccttatct

SEQ ID NO: 4933077 - DNA, 25 bp, Homo sapien
tcagcattcttatcgttgttattgg

SEQ ID NO: 4933078 - DNA, 25 bp, Homo sapien
caattagcatgaccatcagcattct

SEQ ID NO: 4933079 - DNA, 25 bp, Homo sapien
cgttgttattggcacctgtaattaa

SEQ ID NO: 4933080 - DNA, 25 bp, Homo sapien
catcatcacaattagcatgaccatc

SEQ ID NO: 4933081 - DNA, 25 bp, Homo sapien
gaagaacccggagtaatttgcagta

SEQ ID NO: 4933082 - DNA, 25 bp, Homo sapien
aatgaactgtggtctaggtagtgac

SEQ ID NO: 4933083 - DNA, 25 bp, Homo sapien
gccacgagctcactgccaatgaact

SEQ ID NO: 4933084 - DNA, 25 bp, Homo sapien
tgcattcacggattggccacgagct

SEQ ID NO: 4933085 - DNA, 25 bp, Homo sapien
tgcaagtcttcatcgcaggagacag

SEQ ID NO: 4933086 - DNA, 25 bp, Homo sapien
ctgcaagtcttcatcgcaggagaca

SEQ ID NO: 4933087 - DNA, 25 bp, Homo sapien
cagaaacctcatccactgactgaag

SEQ ID NO: 4933088 - DNA, 25 bp, Homo sapien
ggctttccagaaacctcatccactg

SEQ ID NO: 4933089 - DNA, 25 bp, Homo sapien
aggcagaagctgaggattcactcat

SEQ ID NO: 4933090 - DNA, 25 bp, Homo sapien
tcccggaacgatgagacagtggctg

SEQ ID NO: 4933091 - DNA, 25 bp, Homo sapien
tagaagcctctacagtaaccatgtg

SEQ ID NO: 4933092 - DNA, 25 bp, Homo sapien
tactgtgccctgatgaccggtagca

SEQ ID NO: 4933093 - DNA, 25 bp, Homo sapien
tactgtatgtcagaacgctgtgcat

SEQ ID NO: 4933094 - DNA, 25 bp, Homo sapien
tccgaataattgagagtgacaatgc

SEQ ID NO: 4933095 - DNA, 25 bp, Homo sapien
ttttctccgaataattgagagtgac

SEQ ID NO: 4933096 - DNA, 25 bp, Homo sapien
tctgcatttttctccgaataattga

SEQ ID NO: 4933097 - DNA, 25 bp, Homo sapien
taattgagagtgacaatgcagctct

SEQ ID NO: 4933098 - DNA, 25 bp, Homo sapien
agctgtgttactccccttactttca

SEQ ID NO: 4933099 - DNA, 25 bp, Homo sapien
tcagagctgtgttactccccttact

SEQ ID NO: 4933100 - DNA, 25 bp, Homo sapien
gatgaagtcagagctgtgttactcc

SEQ ID NO: 4933101 - DNA, 25 bp, Homo sapien
gaagtcagagctgtgttactcccct

SEQ ID NO: 4933102 - DNA, 25 bp, Homo sapien
taaacttgggatgttgtcactgaga

SEQ ID NO: 4933103 - DNA, 25 bp, Homo sapien
tgctgacagatttcttgggtgctcc

SEQ ID NO: 4933104 - DNA, 25 bp, Homo sapien
tgggtgctccaatgcaggctgcata

SEQ ID NO: 4933105 - DNA, 25 bp, Homo sapien
tatgggaattaagagatgctggtgc

SEQ ID NO: 4933106 - DNA, 25 bp, Homo sapien
gtgtgtgggacacgccaaaatagtc

SEQ ID NO: 4933107 - DNA, 25 bp, Homo sapien
aatgtgacttgtcctagggccgggc

SEQ ID NO: 4933108 - DNA, 25 bp, Homo sapien
gacttgtcttaggtcacagaactca

SEQ ID NO: 4933109 - DNA, 25 bp, Homo sapien
tcatctgagattggcggcacaatgc

SEQ ID NO: 4933110 - DNA, 25 bp, Homo sapien
gaagttgatggatatccaaattacc

SEQ ID NO: 4933111 - DNA, 25 bp, Homo sapien
taaatattgaagttgatggatatcc

SEQ ID NO: 4933112 - DNA, 25 bp, Homo sapien
tctttacacattatatgaaggtatc

SEQ ID NO: 4933113 - DNA, 25 bp, Homo sapien
gtgtacgtctattatgcagcaatga

SEQ ID NO: 4933114 - DNA, 25 bp, Homo sapien
gtccccagggtgtacttttgccatc

SEQ ID NO: 4933115 - DNA, 25 bp, Homo sapien
ggtggtgagtgtagtgcccaacaat

SEQ ID NO: 4933116 - DNA, 25 bp, Homo sapien
tagtccccagggtgtacttttgcca

SEQ ID NO: 4933117 - DNA, 25 bp, Homo sapien
tcccattacccaggtggtgagtgta

SEQ ID NO: 4933118 - DNA, 25 bp, Homo sapien
cctcgtgtggaggaatgcgatctca

SEQ ID NO: 4933119 - DNA, 25 bp, Homo sapien
tagaaacctccaagaggctaccgag

SEQ ID NO: 4933120 - DNA, 25 bp, Homo sapien
acagtggcctaaagaaagttctcct

SEQ ID NO: 4933121 - DNA, 25 bp, Homo sapien
tcaattttttgaagagccctcgtgt

SEQ ID NO: 4933122 - DNA, 25 bp, Homo sapien
cagcaactggacttcacaatggagc

SEQ ID NO: 4933123 - DNA, 25 bp, Homo sapien
tgctccagcaactggacttcacaat

SEQ ID NO: 4933124 - DNA, 25 bp, Homo sapien
cacaatggagcttgggttgatctct

SEQ ID NO: 4933125 - DNA, 25 bp, Homo sapien
actggacttcacaatggagcttggg

SEQ ID NO: 4933126 - DNA, 25 bp, Homo sapien
tatagtggctgctgcctacaaacag

SEQ ID NO: 4933127 - DNA, 25 bp, Homo sapien
tcgaagttacttttatagtggctgc

SEQ ID NO: 4933128 - DNA, 25 bp, Homo sapien
gacaataggtcttgatggggaagta

SEQ ID NO: 4933129 - DNA, 25 bp, Homo sapien
gttcatggagatgcagtcgaagtta

SEQ ID NO: 4933130 - DNA, 25 bp, Homo sapien
tctttccacagctgtcccaggccat

SEQ ID NO: 4933131 - DNA, 25 bp, Homo sapien
ctttctttccacagctgtcccaggc

SEQ ID NO: 4933132 - DNA, 25 bp, Homo sapien
tttctttccacagctgtcccaggcc

SEQ ID NO: 4933133 - DNA, 25 bp, Homo sapien
ttctttccacagctgtcccaggcca

SEQ ID NO: 4933134 - DNA, 25 bp, Homo sapien
agggctgctagggacagttgtgggg

SEQ ID NO: 4933135 - DNA, 25 bp, Homo sapien
tctgagcattagaaataaccagggc

SEQ ID NO: 4933136 - DNA, 25 bp, Homo sapien
gagcattagaaataaccagggctgc

SEQ ID NO: 4933137 - DNA, 25 bp, Homo sapien
gctgctagggacagttgtgggggtc

SEQ ID NO: 4933138 - DNA, 25 bp, Homo sapien
atgatgctgtggctgaatgatgttc

SEQ ID NO: 4933139 - DNA, 25 bp, Homo sapien
atgctgtggctgaatgatgttctgt

SEQ ID NO: 4933140 - DNA, 25 bp, Homo sapien
tgttctgtatctggaagcaagtcat

SEQ ID NO: 4933141 - DNA, 25 bp, Homo sapien
gttctgtatctggaagcaagtcatc

SEQ ID NO: 4933142 - DNA, 25 bp, Homo sapien
ctgtaaccacaaggccccgtatggg

SEQ ID NO: 4933143 - DNA, 25 bp, Homo sapien
cttctgtaaccacaaggccccgtat

SEQ ID NO: 4933144 - DNA, 25 bp, Homo sapien
gtctgactcatcttttgcgtcgcac

SEQ ID NO: 4933145 - DNA, 25 bp, Homo sapien
tgactcatcttttgcgtcgcacatc

SEQ ID NO: 4933146 - DNA, 25 bp, Homo sapien
aaatgccgccaccagtgtcactgct

SEQ ID NO: 4933147 - DNA, 25 bp, Homo sapien
cagtgtgtggtattgtcctgcgtta

SEQ ID NO: 4933148 - DNA, 25 bp, Homo sapien
agtagtgggtgaaggcttctgccca

SEQ ID NO: 4933149 - DNA, 25 bp, Homo sapien
tactgatccaatggaccagtgtgtg

SEQ ID NO: 4933150 - DNA, 25 bp, Homo sapien
gatgcctttttctcttagccagtaa

SEQ ID NO: 4933151 - DNA, 25 bp, Homo sapien
ggcacattggctagttgcctggcta

SEQ ID NO: 4933152 - DNA, 25 bp, Homo sapien
tttgtgttgggaaagcgctgctatc

SEQ ID NO: 4933153 - DNA, 25 bp, Homo sapien
caagttcctcctaaaggtagtatgg

SEQ ID NO: 4933154 - DNA, 25 bp, Homo sapien
tggaggggatgatagagctgtgtgt

SEQ ID NO: 4933155 - DNA, 25 bp, Homo sapien
gaggggatgatagagctgtgcgtag

SEQ ID NO: 4933156 - DNA, 25 bp, Homo sapien
gatgctggagttgtgggtaggtgga

SEQ ID NO: 4933157 - DNA, 25 bp, Homo sapien
tggaggggatgatagagctgtgggt

SEQ ID NO: 4933158 - DNA, 25 bp, Homo sapien
ccatgcataggtggagaggatgctg

SEQ ID NO: 4933159 - DNA, 25 bp, Homo sapien
tcaacactcgcttgtaggatccttt

SEQ ID NO: 4933160 - DNA, 25 bp, Homo sapien
tcgcttgtaggatcctttgatgctg

SEQ ID NO: 4933161 - DNA, 25 bp, Homo sapien
gagccatgcataggtggagaggatg

SEQ ID NO: 4933162 - DNA, 25 bp, Homo sapien
tctgatcctcttccctctgctccat

SEQ ID NO: 4933163 - DNA, 25 bp, Homo sapien
tatttttttctgatcctcttccctc

SEQ ID NO: 4933164 - DNA, 25 bp, Homo sapien
tttttctgatcctcttccctctgct

SEQ ID NO: 4933165 - DNA, 25 bp, Homo sapien
tttttttctgatcctcttccctctg

SEQ ID NO: 4933166 - DNA, 25 bp, Homo sapien
ttgtcaaacacaggtccgctcccca

SEQ ID NO: 4933167 - DNA, 25 bp, Homo sapien
aggtccgctccccaccaacatatgt

SEQ ID NO: 4933168 - DNA, 25 bp, Homo sapien
aacatatgtctctcaagctccacac

SEQ ID NO: 4933169 - DNA, 25 bp, Homo sapien
gctccccaccaacatatgtctctca

SEQ ID NO: 4933170 - DNA, 25 bp, Homo sapien
tgagtaggaggcagtaaagtatccc

SEQ ID NO: 4933171 - DNA, 25 bp, Homo sapien
tgacccctgagtaggaggcagtaaa

SEQ ID NO: 4933172 - DNA, 25 bp, Homo sapien
tgctgacccctgagtaggaggcagt

SEQ ID NO: 4933173 - DNA, 25 bp, Homo sapien
gcagtaaagtatccctagtaggaca

SEQ ID NO: 4933174 - DNA, 25 bp, Homo sapien
taaagtagaaggcagatttgggaaa

SEQ ID NO: 4933175 - DNA, 25 bp, Homo sapien
aaaagcagtaaagtagaaggcagat

SEQ ID NO: 4933176 - DNA, 25 bp, Homo sapien
aaatgggcacgatttccacagtaac

SEQ ID NO: 4933177 - DNA, 25 bp, Homo sapien
accagttgttaagagctcctgagac

SEQ ID NO: 4933178 - DNA, 25 bp, Homo sapien
gctccccaattttgaatatcctgcc

SEQ ID NO: 4933179 - DNA, 25 bp, Homo sapien
tgtgctccccaattttgaatatcct

SEQ ID NO: 4933180 - DNA, 25 bp, Homo sapien
ccccaattttgaatatcctgccctg

SEQ ID NO: 4933181 - DNA, 25 bp, Homo sapien
gcaagtgcaaccctggtgtgtgggt

SEQ ID NO: 4933182 - DNA, 25 bp, Homo sapien
catagctagaggatttacaccaggg

SEQ ID NO: 4933183 - DNA, 25 bp, Homo sapien
ctagaggatttacaccagggcagcc

SEQ ID NO: 4933184 - DNA, 25 bp, Homo sapien
tttacaccagggcagccggtgacct

SEQ ID NO: 4933185 - DNA, 25 bp, Homo sapien
gaggatttacaccagggcagccggt

SEQ ID NO: 4933186 - DNA, 25 bp, Homo sapien
ggtggttgcctctgcaccataatgt

SEQ ID NO: 4933187 - DNA, 25 bp, Homo sapien
gataagtgctccttgtgctcagccc

SEQ ID NO: 4933188 - DNA, 25 bp, Homo sapien
tggagcctaaacagcaaacttggtg

SEQ ID NO: 4933189 - DNA, 25 bp, Homo sapien
gccagccgattgtggccctggagcc

SEQ ID NO: 4933190 - DNA, 25 bp, Homo sapien
gcagggtatgataagccaaagttca

SEQ ID NO: 4933191 - DNA, 25 bp, Homo sapien
ttttaccgtgttggctgtggctcag

SEQ ID NO: 4933192 - DNA, 25 bp, Homo sapien
cagggtatgataagccaaagttcat

SEQ ID NO: 4933193 - DNA, 25 bp, Homo sapien
cagtgtaagaggtgaagacagttcc

SEQ ID NO: 4933194 - DNA, 25 bp, Homo sapien
tgccgatgttttcctcctcaaaagg

SEQ ID NO: 4933195 - DNA, 25 bp, Homo sapien
tcttgccgatgttttcctcctcaaa

SEQ ID NO: 4933196 - DNA, 25 bp, Homo sapien
ttgccgatgttttcctcctcaaaag

SEQ ID NO: 4933197 - DNA, 25 bp, Homo sapien
ttcttgccgatgttttcctcctcaa

SEQ ID NO: 4933198 - DNA, 25 bp, Homo sapien
tttaaggatggatgtgggtcagccc

SEQ ID NO: 4933199 - DNA, 25 bp, Homo sapien
cctggatatcagaatgctgagccca

SEQ ID NO: 4933200 - DNA, 25 bp, Homo sapien
atggatgtgggtcagcccgacaagg

SEQ ID NO: 4933201 - DNA, 25 bp, Homo sapien
agcccgacaagggacctggatatca

SEQ ID NO: 4933202 - DNA, 25 bp, Homo sapien
gccctggacgttgcctatgtctttc

SEQ ID NO: 4933203 - DNA, 25 bp, Homo sapien
gcctatgtctttccctagcaactca

SEQ ID NO: 4933204 - DNA, 25 bp, Homo sapien
tgtctttccctagcaactcagcttc

SEQ ID NO: 4933205 - DNA, 25 bp, Homo sapien
ggacgttgcctatgtctttccctag

SEQ ID NO: 4933206 - DNA, 25 bp, Homo sapien
tgggtctcaaagtccaatgggagaa

SEQ ID NO: 4933207 - DNA, 25 bp, Homo sapien
ctcagcactttcaggataggctggg

SEQ ID NO: 4933208 - DNA, 25 bp, Homo sapien
gattcattgatgttaggtcatcttc

SEQ ID NO: 4933209 - DNA, 25 bp, Homo sapien
gaatgtgaggttctggattcattga

SEQ ID NO: 4933210 - DNA, 25 bp, Homo sapien
cacctgttgcgtcgtggtacggtaa

SEQ ID NO: 4933211 - DNA, 25 bp, Homo sapien
tctgaagggcagagtttccaaattg

SEQ ID NO: 4933212 - DNA, 25 bp, Homo sapien
gctttccctgggtagcacctgttgc

SEQ ID NO: 4933213 - DNA, 25 bp, Homo sapien
caaatttgctatccccagagctcag

SEQ ID NO: 4933214 - DNA, 25 bp, Homo sapien
taatgggaggacagggattccaggg

SEQ ID NO: 4933215 - DNA, 25 bp, Homo sapien
ttaatgggaggacagggattccagg

SEQ ID NO: 4933216 - DNA, 25 bp, Homo sapien
gccaggctcctgctattttggggct

SEQ ID NO: 4933217 - DNA, 25 bp, Homo sapien
aggtgcggcgtctcccagccaggct

SEQ ID NO: 4933218 - DNA, 25 bp, Homo sapien
ctattttggggctggcagttctgct

SEQ ID NO: 4933219 - DNA, 25 bp, Homo sapien
tccataaccaagcaggtgcggcgtc

SEQ ID NO: 4933220 - DNA, 25 bp, Homo sapien
gattcagggatctcattcacaccaa

SEQ ID NO: 4933221 - DNA, 25 bp, Homo sapien
ccaaagcccgagctccagagagatt

SEQ ID NO: 4933222 - DNA, 25 bp, Homo sapien
gctccagagagattcagggatctca

SEQ ID NO: 4933223 - DNA, 25 bp, Homo sapien
aagcccgagctccagagagattcag

SEQ ID NO: 4933224 - DNA, 25 bp, Homo sapien
tagacatttccaaggttgtagaact

SEQ ID NO: 4933225 - DNA, 25 bp, Homo sapien
ccaaggttgtagaactttggacact

SEQ ID NO: 4933226 - DNA, 25 bp, Homo sapien
aaaataaggttgatgttagaggtgg

SEQ ID NO: 4933227 - DNA, 25 bp, Homo sapien
aagtcattgatctgtagacatttcc

SEQ ID NO: 4933228 - DNA, 25 bp, Homo sapien
cacaggtaagccaggattagtgttg

SEQ ID NO: 4933229 - DNA, 25 bp, Homo sapien
gcactccagttctccagtgggtcca

SEQ ID NO: 4933230 - DNA, 25 bp, Homo sapien
tgggtccattcttgcacaggtaagc

SEQ ID NO: 4933231 - DNA, 25 bp, Homo sapien
ttagtgttggcatcccaggaaccat

SEQ ID NO: 4933232 - DNA, 25 bp, Homo sapien
atattcaaaacagcttccccagcac

SEQ ID NO: 4933233 - DNA, 25 bp, Homo sapien
tgctctgtgccatatgacttctctg

SEQ ID NO: 4933234 - DNA, 25 bp, Homo sapien
tgaggccttgattcagcttgccaaa

SEQ ID NO: 4933235 - DNA, 25 bp, Homo sapien
tcacgtatgatacagaggatgttct

SEQ ID NO: 4933236 - DNA, 25 bp, Homo sapien
tcctgtgaggatatgtgctgacttg

SEQ ID NO: 4933237 - DNA, 25 bp, Homo sapien
gccaggtaaattcaaagtgccaagg

SEQ ID NO: 4933238 - DNA, 25 bp, Homo sapien
gtcatccagccgcaaggatctctgt

SEQ ID NO: 4933239 - DNA, 25 bp, Homo sapien
tactgcggcagtacagaatgattgg

SEQ ID NO: 4933240 - DNA, 25 bp, Homo sapien
ctcttccacgaaagcatcatcaggg

SEQ ID NO: 4933241 - DNA, 25 bp, Homo sapien
tctggatgcagctgcccacctggtc

SEQ ID NO: 4933242 - DNA, 25 bp, Homo sapien
cattagtgaacacattctagtgcca

SEQ ID NO: 4933243 - DNA, 25 bp, Homo sapien
gcctttcctggtgcatttgttcctg

SEQ ID NO: 4933244 - DNA, 25 bp, Homo sapien
gtaactgctcatgccaaaacaccat

SEQ ID NO: 4933245 - DNA, 25 bp, Homo sapien
tctgtaactgctcatgccaaaacac

SEQ ID NO: 4933246 - DNA, 25 bp, Homo sapien
tatctgtaactgctcatgccaaaac

SEQ ID NO: 4933247 - DNA, 25 bp, Homo sapien
cctatctgtaactgctcatgccaaa

SEQ ID NO: 4933248 - DNA, 25 bp, Homo sapien
cttccacctgcagcagaaccagggc

SEQ ID NO: 4933249 - DNA, 25 bp, Homo sapien
agaaccagggcctggatttggcttg

SEQ ID NO: 4933250 - DNA, 25 bp, Homo sapien
tatccatctcagaaccagtgtccat

SEQ ID NO: 4933251 - DNA, 25 bp, Homo sapien
ggatttggcttgtatccatctcaga

SEQ ID NO: 4933252 - DNA, 25 bp, Homo sapien
actctggggcatggaacttattctg

SEQ ID NO: 4933253 - DNA, 25 bp, Homo sapien
gcatggaacttattctggaagtcca

SEQ ID NO: 4933254 - DNA, 25 bp, Homo sapien
tctggggcatggaacttattctgga

SEQ ID NO: 4933255 - DNA, 25 bp, Homo sapien
gggcatggaacttattctggaagtc

SEQ ID NO: 4933256 - DNA, 25 bp, Homo sapien
ggacagcgcagagatcttgctccat

SEQ ID NO: 4933257 - DNA, 25 bp, Homo sapien
ctggacagcgcagagatcttgctcc

SEQ ID NO: 4933258 - DNA, 25 bp, Homo sapien
tggacagcgcagagatcttgctcca

SEQ ID NO: 4933259 - DNA, 25 bp, Homo sapien
gaagtcaaatgatcgcacggtgctt

SEQ ID NO: 4933260 - DNA, 25 bp, Homo sapien
tccttctgtgtatcgaagtcaaatg

SEQ ID NO: 4933261 - DNA, 25 bp, Homo sapien
acggtgcttgtgtccatttcttggg

SEQ ID NO: 4933262 - DNA, 25 bp, Homo sapien
tgctctctcataggtactccttgtg

SEQ ID NO: 4933263 - DNA, 25 bp, Homo sapien
tgggcattcacggaagaccccactg

SEQ ID NO: 4933264 - DNA, 25 bp, Homo sapien
ccatcacatgggactgagcgtccga

SEQ ID NO: 4933265 - DNA, 25 bp, Homo sapien
agtttgggaggcactcgggccatca

SEQ ID NO: 4933266 - DNA, 25 bp, Homo sapien
gggactgagcgtccgatcctccatg

SEQ ID NO: 4933267 - DNA, 25 bp, Homo sapien
atttcccattgcaggtcagaagtag

SEQ ID NO: 4933268 - DNA, 25 bp, Homo sapien
gcaggtcagaagtaggggagccatg

SEQ ID NO: 4933269 - DNA, 25 bp, Homo sapien
ttcccattgcaggtcagaagtaggg

SEQ ID NO: 4933270 - DNA, 25 bp, Homo sapien
ttatttcccattgcaggtcagaagt

SEQ ID NO: 4933271 - DNA, 25 bp, Homo sapien
taatcataatatccatgagtgtctt

SEQ ID NO: 4933272 - DNA, 25 bp, Homo sapien
atgtctcatcttctgacggtttatc

SEQ ID NO: 4933273 - DNA, 25 bp, Homo sapien
tgtctcatcttctgacggtttatcg

SEQ ID NO: 4933274 - DNA, 25 bp, Homo sapien
cagtggaactaacagtgagaccttt

SEQ ID NO: 4933275 - DNA, 25 bp, Homo sapien
cttagtggcggcatatctggcagaa

SEQ ID NO: 4933276 - DNA, 25 bp, Homo sapien
tggcagaagcagtggaactaacagt

SEQ ID NO: 4933277 - DNA, 25 bp, Homo sapien
cttttcctcttagtggcggcatatc

SEQ ID NO: 4933278 - DNA, 25 bp, Homo sapien
tcctcaagctaaaccgctctttcat

SEQ ID NO: 4933279 - DNA, 25 bp, Homo sapien
gtcctcaagctaaaccgctctttca

SEQ ID NO: 4933280 - DNA, 25 bp, Homo sapien
ttggatctccagtcctcaagctaaa

SEQ ID NO: 4933281 - DNA, 25 bp, Homo sapien
ctttggatctccagtcctcaagcta

SEQ ID NO: 4933282 - DNA, 25 bp, Homo sapien
tgctgccagctgtaagggtgctcag

SEQ ID NO: 4933283 - DNA, 25 bp, Homo sapien
cttgagaagcctccctgaactgctg

SEQ ID NO: 4933284 - DNA, 25 bp, Homo sapien
aaccctggaccttctagtctgctga

SEQ ID NO: 4933285 - DNA, 25 bp, Homo sapien
ctgcagtctctgtaccctgagctgg

SEQ ID NO: 4933286 - DNA, 25 bp, Homo sapien
ggcttcattctcagtcatgcccgga

SEQ ID NO: 4933287 - DNA, 25 bp, Homo sapien
tacaaaaccctgaccagacacttgg

SEQ ID NO: 4933288 - DNA, 25 bp, Homo sapien
tgacgcgtaactgcccattttaagg

SEQ ID NO: 4933289 - DNA, 25 bp, Homo sapien
ttaaatccaacagacgctgccggtc

SEQ ID NO: 4933290 - DNA, 25 bp, Homo sapien
aagactgcagtggatttctgaaact

SEQ ID NO: 4933291 - DNA, 25 bp, Homo sapien
ccagaagactgcagtggatttctga

SEQ ID NO: 4933292 - DNA, 25 bp, Homo sapien
tctgaaacttgaactcagagcccag

SEQ ID NO: 4933293 - DNA, 25 bp, Homo sapien
gaaacttgaactcagagcccagtgg

SEQ ID NO: 4933294 - DNA, 25 bp, Homo sapien
ccaccagggcaagaatggatcaccg

SEQ ID NO: 4933295 - DNA, 25 bp, Homo sapien
cagggcaagaatggatcaccgggat

SEQ ID NO: 4933296 - DNA, 25 bp, Homo sapien
aagaatggatcaccgggatctccag

SEQ ID NO: 4933297 - DNA, 25 bp, Homo sapien
ggatcaccgggatctccaggagagc

SEQ ID NO: 4933298 - DNA, 25 bp, Homo sapien
cgaaatttctccatacactcgtggg

SEQ ID NO: 4933299 - DNA, 25 bp, Homo sapien
tctctgagccttaagcagtgcttgt

SEQ ID NO: 4933300 - DNA, 25 bp, Homo sapien
ccagctcagctatgcaggatatttg

SEQ ID NO: 4933301 - DNA, 25 bp, Homo sapien
atatttgagcatagaccccgtgggc

SEQ ID NO: 4933302 - DNA, 25 bp, Homo sapien
ccagaactgggtcagtgagttgagt

SEQ ID NO: 4933303 - DNA, 25 bp, Homo sapien
ggaaataatcctgcatagtatgcaa

SEQ ID NO: 4933304 - DNA, 25 bp, Homo sapien
tagctccctcacaggtaggtctggg

SEQ ID NO: 4933305 - DNA, 25 bp, Homo sapien
gggtctccgacagctctggtcttca

SEQ ID NO: 4933306 - DNA, 25 bp, Homo sapien
acaatccagattgcaaacagtttgc

SEQ ID NO: 4933307 - DNA, 25 bp, Homo sapien
gctcttttgggatatccatgacaat

SEQ ID NO: 4933308 - DNA, 25 bp, Homo sapien
catactaggttgtggatgactgata

SEQ ID NO: 4933309 - DNA, 25 bp, Homo sapien
ttgcctcccacggtactcatatgac

SEQ ID NO: 4933310 - DNA, 25 bp, Homo sapien
ctttttctgcgcaggtgctttctgg

SEQ ID NO: 4933311 - DNA, 25 bp, Homo sapien
cctcctcctgcatgatgcttttcag

SEQ ID NO: 4933312 - DNA, 25 bp, Homo sapien
ccctccaatttccagatctttttct

SEQ ID NO: 4933313 - DNA, 25 bp, Homo sapien
tgatgcttttcagggtgccccattc

SEQ ID NO: 4933314 - DNA, 25 bp, Homo sapien
ctctgctgatagaacacgtactctt

SEQ ID NO: 4933315 - DNA, 25 bp, Homo sapien
tgatagaacatgtactctctgctgg

SEQ ID NO: 4933316 - DNA, 25 bp, Homo sapien
atacaccctgctgatagatgctgat

SEQ ID NO: 4933317 - DNA, 25 bp, Homo sapien
gaacacgtactctttgctgatagaa

SEQ ID NO: 4933318 - DNA, 25 bp, Homo sapien
cagagaggcttcgttggcattgtct

SEQ ID NO: 4933319 - DNA, 25 bp, Homo sapien
gaagccgatgggatgtggccatacc

SEQ ID NO: 4933320 - DNA, 25 bp, Homo sapien
taattgcaggttgtggacagtgctt

SEQ ID NO: 4933321 - DNA, 25 bp, Homo sapien
ggagcagcacaatcaaaatggacag

SEQ ID NO: 4933322 - DNA, 25 bp, Homo sapien
gagacaggcagctgaatggacgctg

SEQ ID NO: 4933323 - DNA, 25 bp, Homo sapien
aatggacgctggcacttctggctgt

SEQ ID NO: 4933324 - DNA, 25 bp, Homo sapien
ctgaatggacgctggcacttctggc

SEQ ID NO: 4933325 - DNA, 25 bp, Homo sapien
tgaatggacgctggcacttctggct

SEQ ID NO: 4933326 - DNA, 25 bp, Homo sapien
tgccgcgagggcatagttgtggcca

SEQ ID NO: 4933327 - DNA, 25 bp, Homo sapien
tctgatgccgcgagggcatagttgt

SEQ ID NO: 4933328 - DNA, 25 bp, Homo sapien
caagggtctgatgccgcgagggcat

SEQ ID NO: 4933329 - DNA, 25 bp, Homo sapien
attcaagggtctgatgccgcgaggg

SEQ ID NO: 4933330 - DNA, 25 bp, Homo sapien
ttgtcaggcagtaggtgtaggaaat

SEQ ID NO: 4933331 - DNA, 25 bp, Homo sapien
gacccactttaggacacgtgctgtc

SEQ ID NO: 4933332 - DNA, 25 bp, Homo sapien
ggtgtaggaaatgccaggtccattc

SEQ ID NO: 4933333 - DNA, 25 bp, Homo sapien
gacaagacccactttaggacacgtg

SEQ ID NO: 4933334 - DNA, 25 bp, Homo sapien
gtgacgggaggaaagcgcaaactac

SEQ ID NO: 4933335 - DNA, 25 bp, Homo sapien
tgtgacgggaggaaagcgcaaacta

SEQ ID NO: 4933336 - DNA, 25 bp, Homo sapien
ctgtgacgggaggaaagcgcaaact

SEQ ID NO: 4933337 - DNA, 25 bp, Homo sapien
tctgcatcaccgagctcctctgaga

SEQ ID NO: 4933338 - DNA, 25 bp, Homo sapien
tctgagaagtcacctcgattctcgg

SEQ ID NO: 4933339 - DNA, 25 bp, Homo sapien
cctctgagaagtcacctcgattctc

SEQ ID NO: 4933340 - DNA, 25 bp, Homo sapien
aggatggcaggggtttctgcatcac

SEQ ID NO: 4933341 - DNA, 25 bp, Homo sapien
cagaaggtctgctggctgtcacaca

SEQ ID NO: 4933342 - DNA, 25 bp, Homo sapien
tctcctagagaaagctccacacagt

SEQ ID NO: 4933343 - DNA, 25 bp, Homo sapien
tctggtgacacctactggtgcttgg

SEQ ID NO: 4933344 - DNA, 25 bp, Homo sapien
tggtgcttggttcttgagccattcc

SEQ ID NO: 4933345 - DNA, 25 bp, Homo sapien
cttctgaagcttctccccagatgta

SEQ ID NO: 4933346 - DNA, 25 bp, Homo sapien
tgaagcttctccccagatgtagggc

SEQ ID NO: 4933347 - DNA, 25 bp, Homo sapien
catcctcatgtccatcttctgaagc

SEQ ID NO: 4933348 - DNA, 25 bp, Homo sapien
ccatcctcatgtccatcttctgaag

SEQ ID NO: 4933349 - DNA, 25 bp, Homo sapien
gcatgtcttctctgagaaccacaga

SEQ ID NO: 4933350 - DNA, 25 bp, Homo sapien
tgtttgcatgtcttctctgagaacc

SEQ ID NO: 4933351 - DNA, 25 bp, Homo sapien
tgtcttgtttgcatgtcttctctga

SEQ ID NO: 4933352 - DNA, 25 bp, Homo sapien
gtttgcatgtcttctctgagaacca

SEQ ID NO: 4933353 - DNA, 25 bp, Homo sapien
tgaggcccagtgaaggggtcctggc

SEQ ID NO: 4933354 - DNA, 25 bp, Homo sapien
ctgaggcccagtgaaggggtcctgg

SEQ ID NO: 4933355 - DNA, 25 bp, Homo sapien
gggcagccatatcccgttctgtccg

SEQ ID NO: 4933356 - DNA, 25 bp, Homo sapien
agccatatcccgttctgtccgctga

SEQ ID NO: 4933357 - DNA, 25 bp, Homo sapien
ggatgcaccagtgcccattccagga

SEQ ID NO: 4933358 - DNA, 25 bp, Homo sapien
cctcagggatgcaccagtgcccatt

SEQ ID NO: 4933359 - DNA, 25 bp, Homo sapien
tcttgtgatgtgtagaagtctgacg

SEQ ID NO: 4933360 - DNA, 25 bp, Homo sapien
atgtgtagaagtctgacggaggaat

SEQ ID NO: 4933361 - DNA, 25 bp, Homo sapien
tctgacggaggaatgtgagccagca

SEQ ID NO: 4933362 - DNA, 25 bp, Homo sapien
cagaggtcttgtgatgtgtagaagt

SEQ ID NO: 4933363 - DNA, 25 bp, Homo sapien
gtttggtgtttgactatatcctttg

SEQ ID NO: 4933364 - DNA, 25 bp, Homo sapien
tctctttcaatgctcttgtcctctc

SEQ ID NO: 4933365 - DNA, 25 bp, Homo sapien
gatgacgcatagtttggtgtttgac

SEQ ID NO: 4933366 - DNA, 25 bp, Homo sapien
cctctccttcttgtaaactggatga

SEQ ID NO: 4933367 - DNA, 25 bp, Homo sapien
caacttgggaggtctcatctggtgg

SEQ ID NO: 4933368 - DNA, 25 bp, Homo sapien
ccaacttgggaggtctcatctggtg

SEQ ID NO: 4933369 - DNA, 25 bp, Homo sapien
cccaacttgggaggtctcatctggt

SEQ ID NO: 4933370 - DNA, 25 bp, Homo sapien
tgcgaagccgttgtcctgagggacc

SEQ ID NO: 4933371 - DNA, 25 bp, Homo sapien
cctctgctttgatggttgtggtagc

SEQ ID NO: 4933372 - DNA, 25 bp, Homo sapien
ggccacctttgccacgaaagcttca

SEQ ID NO: 4933373 - DNA, 25 bp, Homo sapien
tgtgtttcgggcatccacgtggtgc

SEQ ID NO: 4933374 - DNA, 25 bp, Homo sapien
cggcaggtccaggccaattggagct

SEQ ID NO: 4933375 - DNA, 25 bp, Homo sapien
tccaggccaattggagctggcctcg

SEQ ID NO: 4933376 - DNA, 25 bp, Homo sapien
cgcctgccccgtggctgagttgtca

SEQ ID NO: 4933377 - DNA, 25 bp, Homo sapien
cctgccccgtggctgagttgtcagg

SEQ ID NO: 4933378 - DNA, 25 bp, Homo sapien
tttgcacatgctgggaatgatgcgg

SEQ ID NO: 4933379 - DNA, 25 bp, Homo sapien
tcaactaagacctttttgcacatgc

SEQ ID NO: 4933380 - DNA, 25 bp, Homo sapien
tgcacatgctgggaatgatgcgggc

SEQ ID NO: 4933381 - DNA, 25 bp, Homo sapien
gtttcaactaagacctttttgcaca

SEQ ID NO: 4933382 - DNA, 25 bp, Homo sapien
tagcttgggtcaaaaagagcagctc

SEQ ID NO: 4933383 - DNA, 25 bp, Homo sapien
gaagctctcacggagatacgcgatt

SEQ ID NO: 4933384 - DNA, 25 bp, Homo sapien
tacgcgatttgagagcagctagcag

SEQ ID NO: 4933385 - DNA, 25 bp, Homo sapien
tgtgaaaccggaggtgaagctctca

SEQ ID NO: 4933386 - DNA, 25 bp, Homo sapien
ctcttgtttctccaagtagattata

SEQ ID NO: 4933387 - DNA, 25 bp, Homo sapien
gtttctccaagtagattataagaat

SEQ ID NO: 4933388 - DNA, 25 bp, Homo sapien
tcttgtttctccaagtagattataa

SEQ ID NO: 4933389 - DNA, 25 bp, Homo sapien
ttgtttctccaagtagattataaga

SEQ ID NO: 4933390 - DNA, 25 bp, Homo sapien
ttagctttctctgttgtgtttcatt

SEQ ID NO: 4933391 - DNA, 25 bp, Homo sapien
tttctctgttgtgtttcattgtgtt

SEQ ID NO: 4933392 - DNA, 25 bp, Homo sapien
tagctttctctgttgtgtttcattg

SEQ ID NO: 4933393 - DNA, 25 bp, Homo sapien
ctctgttgtgtttcattgtgtttac

SEQ ID NO: 4933394 - DNA, 25 bp, Homo sapien
gatacaaggcttggaacttgaacta

SEQ ID NO: 4933395 - DNA, 25 bp, Homo sapien
cagatacaaggcttggaacttgaac

SEQ ID NO: 4933396 - DNA, 25 bp, Homo sapien
ctgcagatacaaggcttggaacttg

SEQ ID NO: 4933397 - DNA, 25 bp, Homo sapien
acaaggcttggaacttgaactactg

SEQ ID NO: 4933398 - DNA, 25 bp, Homo sapien
tccctgaccatcaaggaagtggcta

SEQ ID NO: 4933399 - DNA, 25 bp, Homo sapien
cttaattccctgaccatcaaggaag

SEQ ID NO: 4933400 - DNA, 25 bp, Homo sapien
attccctgaccatcaaggaagtggc

SEQ ID NO: 4933401 - DNA, 25 bp, Homo sapien
taattccctgaccatcaaggaagtg

SEQ ID NO: 4933402 - DNA, 25 bp, Homo sapien
gatgtcctcgaattcctaagaaaga

SEQ ID NO: 4933403 - DNA, 25 bp, Homo sapien
taagaaagatttagactcgggcgat

SEQ ID NO: 4933404 - DNA, 25 bp, Homo sapien
ctcgggcgatatgttggcggcctct

SEQ ID NO: 4933405 - DNA, 25 bp, Homo sapien
gaaagatttagactcgggcgatatg

SEQ ID NO: 4933406 - DNA, 25 bp, Homo sapien
ttctgctgagaataaccgaccccat

SEQ ID NO: 4933407 - DNA, 25 bp, Homo sapien
tttcctactggttctgctgagaata

SEQ ID NO: 4933408 - DNA, 25 bp, Homo sapien
tactggttctgctgagaataaccga

SEQ ID NO: 4933409 - DNA, 25 bp, Homo sapien
tggttctgctgagaataaccgaccc

SEQ ID NO: 4933410 - DNA, 25 bp, Homo sapien
cataatatgttccacattgtcccaa

SEQ ID NO: 4933411 - DNA, 25 bp, Homo sapien
cacattgtcccaattaggaccatga

SEQ ID NO: 4933412 - DNA, 25 bp, Homo sapien
tgtcccaattaggaccatgacccct

SEQ ID NO: 4933413 - DNA, 25 bp, Homo sapien
tctgccataatatgttccacattgt

SEQ ID NO: 4933414 - DNA, 25 bp, Homo sapien
ttaaaagatggtgggagatttgact

SEQ ID NO: 4933415 - DNA, 25 bp, Homo sapien
cttaaaagatggtgggagatttgac

SEQ ID NO: 4933416 - DNA, 25 bp, Homo sapien
catgtacattggatggttcattctt

SEQ ID NO: 4933417 - DNA, 25 bp, Homo sapien
tgacactcttgggtccacaggacgc

SEQ ID NO: 4933418 - DNA, 25 bp, Homo sapien
cactcttgggtccacaggacgctga

SEQ ID NO: 4933419 - DNA, 25 bp, Homo sapien
ctcttgggtccacaggacgctgatg

SEQ ID NO: 4933420 - DNA, 25 bp, Homo sapien
gcaagcagatgataccagtggcccc

SEQ ID NO: 4933421 - DNA, 25 bp, Homo sapien
ccctgctgctcggtgccgcagaaca

SEQ ID NO: 4933422 - DNA, 25 bp, Homo sapien
gcattgagattgcttctctgcacct

SEQ ID NO: 4933423 - DNA, 25 bp, Homo sapien
gctcggtgccgcagaacaccaggct

SEQ ID NO: 4933424 - DNA, 25 bp, Homo sapien
cttcctgggctgcttggcgggaggg

SEQ ID NO: 4933425 - DNA, 25 bp, Homo sapien
tcctgggctgcttggcgggagggtt

SEQ ID NO: 4933426 - DNA, 25 bp, Homo sapien
tgcttggcgggagggttgacatcca

SEQ ID NO: 4933427 - DNA, 25 bp, Homo sapien
gctgcttggcgggagggttgacatc

SEQ ID NO: 4933428 - DNA, 25 bp, Homo sapien
cctaagagtcctttacagcaaagct

SEQ ID NO: 4933429 - DNA, 25 bp, Homo sapien
ttcctaagagtcctttacagcaaag

SEQ ID NO: 4933430 - DNA, 25 bp, Homo sapien
ctttcctaagagtcctttacagcaa

SEQ ID NO: 4933431 - DNA, 25 bp, Homo sapien
cctttcctaagagtcctttacagca

SEQ ID NO: 4933432 - DNA, 25 bp, Homo sapien
ctaatcttatgagctcccctttctt

SEQ ID NO: 4933433 - DNA, 25 bp, Homo sapien
gcatggactgatttgttgtctttat

SEQ ID NO: 4933434 - DNA, 25 bp, Homo sapien
ctgctacccacggacactaatctta

SEQ ID NO: 4933435 - DNA, 25 bp, Homo sapien
ccacggacactaatcttatgagctc

SEQ ID NO: 4933436 - DNA, 25 bp, Homo sapien
tagttgttgaccatagactttcctt

SEQ ID NO: 4933437 - DNA, 25 bp, Homo sapien
gactttccttatgttccttggcagg

SEQ ID NO: 4933438 - DNA, 25 bp, Homo sapien
aaatttgtcactggattttccacag

SEQ ID NO: 4933439 - DNA, 25 bp, Homo sapien
gggacctgacaaggctttgacagtg

SEQ ID NO: 4933440 - DNA, 25 bp, Homo sapien
ttaagtcattgtaaactctcaagca

SEQ ID NO: 4933441 - DNA, 25 bp, Homo sapien
gaggaaaccctcaaatgatagctgc

SEQ ID NO: 4933442 - DNA, 25 bp, Homo sapien
tgaaaagtgacctgaacatctatct

SEQ ID NO: 4933443 - DNA, 25 bp, Homo sapien
gttctgcctctggaccattgctaaa

SEQ ID NO: 4933444 - DNA, 25 bp, Homo sapien
tgaaagcccagctcagtcctctgca

SEQ ID NO: 4933445 - DNA, 25 bp, Homo sapien
gctaaatctatagaagttctcttgg

SEQ ID NO: 4933446 - DNA, 25 bp, Homo sapien
cgttcatggcatactgtctcacagg

SEQ ID NO: 4933447 - DNA, 25 bp, Homo sapien
gggctagtgaacgttattagagtca

SEQ ID NO: 4933448 - DNA, 25 bp, Homo sapien
ggatgtccaaaatgtcgttcatggc

SEQ ID NO: 4933449 - DNA, 25 bp, Homo sapien
cctattgctgcatcaagattctgga

SEQ ID NO: 4933450 - DNA, 25 bp, Homo sapien
tctacactcctttaagaggtagtac

SEQ ID NO: 4933451 - DNA, 25 bp, Homo sapien
aagaggtagtacttctggtcctcca

SEQ ID NO: 4933452 - DNA, 25 bp, Homo sapien
tgaagacacgctggcacctctacac

SEQ ID NO: 4933453 - DNA, 25 bp, Homo sapien
tcaggggccgatcctgaagacacgc

SEQ ID NO: 4933454 - DNA, 25 bp, Homo sapien
gacgagggaacaggtcaacagctca

SEQ ID NO: 4933455 - DNA, 25 bp, Homo sapien
aaagacgagggaacaggtcaacagc

SEQ ID NO: 4933456 - DNA, 25 bp, Homo sapien
cgaaagacgagggaacaggtcaaca

SEQ ID NO: 4933457 - DNA, 25 bp, Homo sapien
agacgagggaacaggtcaacagctc

SEQ ID NO: 4933458 - DNA, 25 bp, Homo sapien
gagaagacagttggagaacttccag

SEQ ID NO: 4933459 - DNA, 25 bp, Homo sapien
aagacagttggagaacttccagttc

SEQ ID NO: 4933460 - DNA, 25 bp, Homo sapien
gaagacagttggagaacttccagtt

SEQ ID NO: 4933461 - DNA, 25 bp, Homo sapien
agacagttggagaacttccagttcc

SEQ ID NO: 4933462 - DNA, 25 bp, Homo sapien
catgtgtcagctttgtgtcataagg

SEQ ID NO: 4933463 - DNA, 25 bp, Homo sapien
gtcagctttgtgtcataaggcttta

SEQ ID NO: 4933464 - DNA, 25 bp, Homo sapien
agctttgtgtcataaggctttaaaa

SEQ ID NO: 4933465 - DNA, 25 bp, Homo sapien
aaaatggaatccttgttgtagttct

SEQ ID NO: 4933466 - DNA, 25 bp, Homo sapien
tggaagacttcaatatttggtcata

SEQ ID NO: 4933467 - DNA, 25 bp, Homo sapien
ggaagacttcaatatttggtcatag

SEQ ID NO: 4933468 - DNA, 25 bp, Homo sapien
gccatcacatcctgtggaagacttc

SEQ ID NO: 4933469 - DNA, 25 bp, Homo sapien
tagccaccttgtgtctgaactccat

SEQ ID NO: 4933470 - DNA, 25 bp, Homo sapien
tactgtcctagtaggtcacctttag

SEQ ID NO: 4933471 - DNA, 25 bp, Homo sapien
gctttccttacacctatactgtcct

SEQ ID NO: 4933472 - DNA, 25 bp, Homo sapien
gtcacctttagccaccttgtgtctg

SEQ ID NO: 4933473 - DNA, 25 bp, Homo sapien
ccctagtcggtggattggcagatct

SEQ ID NO: 4933474 - DNA, 25 bp, Homo sapien
ctaagcatgttgacttcatcttggg

SEQ ID NO: 4933475 - DNA, 25 bp, Homo sapien
cagatctagtgctggctaagcatgt

SEQ ID NO: 4933476 - DNA, 25 bp, Homo sapien
ttggctatgtccctagtcggtggat

SEQ ID NO: 4933477 - DNA, 25 bp, Homo sapien
gacagcaagttggtacagtacctgg

SEQ ID NO: 4933478 - DNA, 25 bp, Homo sapien
tccttgcattctcagtcttctacca

SEQ ID NO: 4933479 - DNA, 25 bp, Homo sapien
aagtgtgcgccatgactgactagtc

SEQ ID NO: 4933480 - DNA, 25 bp, Homo sapien
caagttctcccatcgactggacgca

SEQ ID NO: 4933481 - DNA, 25 bp, Homo sapien
tcaaattcctcatgggtatctgagc

SEQ ID NO: 4933482 - DNA, 25 bp, Homo sapien
tgagctccatccaatcagattgttc

SEQ ID NO: 4933483 - DNA, 25 bp, Homo sapien
ctgaaaccagccaagactttcaaat

SEQ ID NO: 4933484 - DNA, 25 bp, Homo sapien
attcctcatgggtatctgagctcca

SEQ ID NO: 4933485 - DNA, 25 bp, Homo sapien
aacagcatctaacagcaactcttgt

SEQ ID NO: 4933486 - DNA, 25 bp, Homo sapien
tgacacagtcccaagtaacagcatc

SEQ ID NO: 4933487 - DNA, 25 bp, Homo sapien
cacagtcccaagtaacagcatctaa

SEQ ID NO: 4933488 - DNA, 25 bp, Homo sapien
ctggatgacacagtcccaagtaaca

SEQ ID NO: 4933489 - DNA, 25 bp, Homo sapien
tattgagatctgtatctcctacagc

SEQ ID NO: 4933490 - DNA, 25 bp, Homo sapien
gagtgtacgctggaatgatggccac

SEQ ID NO: 4933491 - DNA, 25 bp, Homo sapien
tggccacttggtcccatgtaacagc

SEQ ID NO: 4933492 - DNA, 25 bp, Homo sapien
tttgtttatagagaggagtgtacgc

SEQ ID NO: 4933493 - DNA, 25 bp, Homo sapien
gcacccaggtcctgcatctttgaat

SEQ ID NO: 4933494 - DNA, 25 bp, Homo sapien
ggtcctgcatctttgaattcagagt

SEQ ID NO: 4933495 - DNA, 25 bp, Homo sapien
ccaggtcctgcatctttgaattcag

SEQ ID NO: 4933496 - DNA, 25 bp, Homo sapien
ggcacccaggtcctgcatctttgaa

SEQ ID NO: 4933497 - DNA, 25 bp, Homo sapien
cctggctcacatacactacttcgtg

SEQ ID NO: 4933498 - DNA, 25 bp, Homo sapien
gggagtagtatacctggctcacata

SEQ ID NO: 4933499 - DNA, 25 bp, Homo sapien
ggtgggagtagtatacctggctcac

SEQ ID NO: 4933500 - DNA, 25 bp, Homo sapien
atacactacttcgtgcccactgagc

SEQ ID NO: 4933501 - DNA, 25 bp, Homo sapien
tcaccagtgctaagccacagagtgc

SEQ ID NO: 4933502 - DNA, 25 bp, Homo sapien
gccagtcaccagtgctaagccacag

SEQ ID NO: 4933503 - DNA, 25 bp, Homo sapien
cagtcaccagtgctaagccacagag

SEQ ID NO: 4933504 - DNA, 25 bp, Homo sapien
ccagtgctaagccacagagtgcctg

SEQ ID NO: 4933505 - DNA, 25 bp, Homo sapien
gcatggcaagaagccttttctcaga

SEQ ID NO: 4933506 - DNA, 25 bp, Homo sapien
ccaggtacttaagtgctgagtaagc

SEQ ID NO: 4933507 - DNA, 25 bp, Homo sapien
ttttctcagaggaatctcaagcctg

SEQ ID NO: 4933508 - DNA, 25 bp, Homo sapien
cagacgaactctggcctaacacttc

SEQ ID NO: 4933509 - DNA, 25 bp, Homo sapien
ttctgtggaaggtaagttgtctttc

SEQ ID NO: 4933510 - DNA, 25 bp, Homo sapien
cacaggtttataagctttctgtgga

SEQ ID NO: 4933511 - DNA, 25 bp, Homo sapien
ttccagggactaagagcttatgtct

SEQ ID NO: 4933512 - DNA, 25 bp, Homo sapien
cacttatgagcaccacaggtttata

SEQ ID NO: 4933513 - DNA, 25 bp, Homo sapien
caaagtacatcccagttgactttaa

SEQ ID NO: 4933514 - DNA, 25 bp, Homo sapien
ggatccctgagcctaaagacctgac

SEQ ID NO: 4933515 - DNA, 25 bp, Homo sapien
aaggatccctgagcctaaagacctg

SEQ ID NO: 4933516 - DNA, 25 bp, Homo sapien
tgactttaaagctggccccaaggat

SEQ ID NO: 4933517 - DNA, 25 bp, Homo sapien
tcctggtttggagtgtagctctcta

SEQ ID NO: 4933518 - DNA, 25 bp, Homo sapien
ctcataggagatggctgcagcctca

SEQ ID NO: 4933519 - DNA, 25 bp, Homo sapien
gatgctccaactaaccctaattagg

SEQ ID NO: 4933520 - DNA, 25 bp, Homo sapien
tttccttcctgatgctccaactaac

SEQ ID NO: 4933521 - DNA, 25 bp, Homo sapien
tgcaaaagcctaactgtctcatgaa

SEQ ID NO: 4933522 - DNA, 25 bp, Homo sapien
aaagagctgctgttatgccccatcc

SEQ ID NO: 4933523 - DNA, 25 bp, Homo sapien
ccatgatacagtcgctggagcaggg

SEQ ID NO: 4933524 - DNA, 25 bp, Homo sapien
tgggacagggaactttgcaaaagcc

SEQ ID NO: 4933525 - DNA, 25 bp, Homo sapien
gagacatagtcattccgtctatgcg

SEQ ID NO: 4933526 - DNA, 25 bp, Homo sapien
catagtcattccgtctatgcgtgga

SEQ ID NO: 4933527 - DNA, 25 bp, Homo sapien
agtcattccgtctatgcgtggaggg

SEQ ID NO: 4933528 - DNA, 25 bp, Homo sapien
tgtcagagacatagtcattccgtct

SEQ ID NO: 4933529 - DNA, 25 bp, Homo sapien
caaaccccactccaacaatgtcaca

SEQ ID NO: 4933530 - DNA, 25 bp, Homo sapien
aaaccccactccaacaatgtcacag

SEQ ID NO: 4933531 - DNA, 25 bp, Homo sapien
tccttggtcacaatttcctctacag

SEQ ID NO: 4933532 - DNA, 25 bp, Homo sapien
aagcttctgagcagtcgatgggatc

SEQ ID NO: 4933533 - DNA, 25 bp, Homo sapien
gcctgctgcattctacttggatcct

SEQ ID NO: 4933534 - DNA, 25 bp, Homo sapien
cttggtcacaatttcctctacagtc

SEQ ID NO: 4933535 - DNA, 25 bp, Homo sapien
gaaggtgtacaagcgcttccaaaca

SEQ ID NO: 4933536 - DNA, 25 bp, Homo sapien
tttgccgtggctttgacagtatgag

SEQ ID NO: 4933537 - DNA, 25 bp, Homo sapien
cggagtggcccaaaagtcggtagca

SEQ ID NO: 4933538 - DNA, 25 bp, Homo sapien
ccagcctaaaggactggaggtagga

SEQ ID NO: 4933539 - DNA, 25 bp, Homo sapien
gactttggtcctaacaggtgatagc

SEQ ID NO: 4933540 - DNA, 25 bp, Homo sapien
tctgcagcagggttgagaggtacac

SEQ ID NO: 4933541 - DNA, 25 bp, Homo sapien
gaagcatccctcctgaaagtttggg

SEQ ID NO: 4933542 - DNA, 25 bp, Homo sapien
tgaaaatagccaatccagggacagg

SEQ ID NO: 4933543 - DNA, 25 bp, Homo sapien
gatacggggcactacagggaccacc

SEQ ID NO: 4933544 - DNA, 25 bp, Homo sapien
tccagggatacggggcactacaggg

SEQ ID NO: 4933545 - DNA, 25 bp, Homo sapien
tttgcgaaggtccagcatggtccca

SEQ ID NO: 4933546 - DNA, 25 bp, Homo sapien
agcatggtcccaactgcatctccag

SEQ ID NO: 4933547 - DNA, 25 bp, Homo sapien
catatgtttaggttctcaagaaccc

SEQ ID NO: 4933548 - DNA, 25 bp, Homo sapien
tatgagtctgttgtgagatacatgg

SEQ ID NO: 4933549 - DNA, 25 bp, Homo sapien
aaagctctaggatctagcgatcctc

SEQ ID NO: 4933550 - DNA, 25 bp, Homo sapien
gccccaatgtacaattgctgggtca

SEQ ID NO: 4933551 - DNA, 25 bp, Homo sapien
aggaaatggaatgcggtgctcatac

SEQ ID NO: 4933552 - DNA, 25 bp, Homo sapien
tgcggtgctcatacttgctgggctg

SEQ ID NO: 4933553 - DNA, 25 bp, Homo sapien
gaggaaatggaatgcggtgctcata

SEQ ID NO: 4933554 - DNA, 25 bp, Homo sapien
gtgctcatacttgctgggctgcaac

SEQ ID NO: 4933555 - DNA, 25 bp, Homo sapien
tgttgaggggacttgagctctgtcc

SEQ ID NO: 4933556 - DNA, 25 bp, Homo sapien
gggaacagtgaggtgcagtggcttg

SEQ ID NO: 4933557 - DNA, 25 bp, Homo sapien
tgggaacagtgaggtgcagtggctt

SEQ ID NO: 4933558 - DNA, 25 bp, Homo sapien
ctctgtcctcaatggggcctggaga

SEQ ID NO: 4933559 - DNA, 25 bp, Homo sapien
aaatgatttttcaactgggatcagc

SEQ ID NO: 4933560 - DNA, 25 bp, Homo sapien
cggcaaatgatttttcaactgggat

SEQ ID NO: 4933561 - DNA, 25 bp, Homo sapien
gcaaatgatttttcaactgggatca

SEQ ID NO: 4933562 - DNA, 25 bp, Homo sapien
ggcaaatgatttttcaactgggatc

SEQ ID NO: 4933563 - DNA, 25 bp, Homo sapien
ccaaaccagacaataaggctgctgt

SEQ ID NO: 4933564 - DNA, 25 bp, Homo sapien
ctggctggtaagacccaaaccagac

SEQ ID NO: 4933565 - DNA, 25 bp, Homo sapien
tgctgtgatgaacagagttattcca

SEQ ID NO: 4933566 - DNA, 25 bp, Homo sapien
gatgaacagagttattccagtggga

SEQ ID NO: 4933567 - DNA, 25 bp, Homo sapien
cctgttaacgtattaggtttgtcat

SEQ ID NO: 4933568 - DNA, 25 bp, Homo sapien
gttaacgtattaggtttgtcataga

SEQ ID NO: 4933569 - DNA, 25 bp, Homo sapien
ctgcttcaaccacggcgagatactt

SEQ ID NO: 4933570 - DNA, 25 bp, Homo sapien
caaccacggcgagatactttccttc

SEQ ID NO: 4933571 - DNA, 25 bp, Homo sapien
agaaccactggggcccaaacatgga

SEQ ID NO: 4933572 - DNA, 25 bp, Homo sapien
ttagaaccactggggcccaaacatg

SEQ ID NO: 4933573 - DNA, 25 bp, Homo sapien
gaaccactggggcccaaacatggaa

SEQ ID NO: 4933574 - DNA, 25 bp, Homo sapien
tagaaccactggggcccaaacatgg

SEQ ID NO: 4933575 - DNA, 25 bp, Homo sapien
gctataagccccgctttacaaacca

SEQ ID NO: 4933576 - DNA, 25 bp, Homo sapien
tctttttgctataagccccgcttta

SEQ ID NO: 4933577 - DNA, 25 bp, Homo sapien
tttttgctataagccccgctttaca

SEQ ID NO: 4933578 - DNA, 25 bp, Homo sapien
tttgctataagccccgctttacaaa

SEQ ID NO: 4933579 - DNA, 25 bp, Homo sapien
gaggagcacatgtaaagttatttcc

SEQ ID NO: 4933580 - DNA, 25 bp, Homo sapien
aggagcacatgtaaagttatttcct

SEQ ID NO: 4933581 - DNA, 25 bp, Homo sapien
agaggagcacatgtaaagttatttc

SEQ ID NO: 4933582 - DNA, 25 bp, Homo sapien
atggaccctctacaaacacctggca

SEQ ID NO: 4933583 - DNA, 25 bp, Homo sapien
gctcctctcagcatggaccctctac

SEQ ID NO: 4933584 - DNA, 25 bp, Homo sapien
cctctacaaacacctggcagctccc

SEQ ID NO: 4933585 - DNA, 25 bp, Homo sapien
tctcagcatggaccctctacaaaca

SEQ ID NO: 4933586 - DNA, 25 bp, Homo sapien
ttgaggtcagggatagtgtcagagt

SEQ ID NO: 4933587 - DNA, 25 bp, Homo sapien
agagtcttcctgattccctatcacc

SEQ ID NO: 4933588 - DNA, 25 bp, Homo sapien
tgaaagaggagacacttgaggtcag

SEQ ID NO: 4933589 - DNA, 25 bp, Homo sapien
cagggatagtgtcagagtcttcctg

SEQ ID NO: 4933590 - DNA, 25 bp, Homo sapien
gacattctgacttctgacaggacaa

SEQ ID NO: 4933591 - DNA, 25 bp, Homo sapien
caagagctgctctatcagtgaatgg

SEQ ID NO: 4933592 - DNA, 25 bp, Homo sapien
gttgccaaggaataccagctgccga

SEQ ID NO: 4933593 - DNA, 25 bp, Homo sapien
cttggccttgacattctgacttctg

SEQ ID NO: 4933594 - DNA, 25 bp, Homo sapien
gaagacaaactggcccttgtgcttt

SEQ ID NO: 4933595 - DNA, 25 bp, Homo sapien
ggaagacaaactggcccttgtgctt

SEQ ID NO: 4933596 - DNA, 25 bp, Homo sapien
agacaaactggcccttgtgcttttt

SEQ ID NO: 4933597 - DNA, 25 bp, Homo sapien
tggaagacaaactggcccttgtgct

SEQ ID NO: 4933598 - DNA, 25 bp, Homo sapien
agaaaccgaagggtgtatctgctcc

SEQ ID NO: 4933599 - DNA, 25 bp, Homo sapien
aaaccgaagggtgtatctgctccct

SEQ ID NO: 4933600 - DNA, 25 bp, Homo sapien
gaccagaaaccgaagggtgtatctg

SEQ ID NO: 4933601 - DNA, 25 bp, Homo sapien
ccagaaaccgaagggtgtatctgct

SEQ ID NO: 4933602 - DNA, 25 bp, Homo sapien
ggctctagggtcgttttctgttcac

SEQ ID NO: 4933603 - DNA, 25 bp, Homo sapien
gaggctctagggtcgttttctgttc

SEQ ID NO: 4933604 - DNA, 25 bp, Homo sapien
tctagggtcgttttctgttcaccgc

SEQ ID NO: 4933605 - DNA, 25 bp, Homo sapien
caagaggctctagggtcgttttctg

SEQ ID NO: 4933606 - DNA, 25 bp, Homo sapien
cttggaaaacaggtcggagtgttcg

SEQ ID NO: 4933607 - DNA, 25 bp, Homo sapien
ggctggtagattatcgattggtcca

SEQ ID NO: 4933608 - DNA, 25 bp, Homo sapien
gagtaagctggctggtagattatcg

SEQ ID NO: 4933609 - DNA, 25 bp, Homo sapien
gattatcgattggtccaggcagtgg

SEQ ID NO: 4933610 - DNA, 25 bp, Homo sapien
tgacgatggatgagaacttcagttt

SEQ ID NO: 4933611 - DNA, 25 bp, Homo sapien
tggaggaacctcttaaatacattca

SEQ ID NO: 4933612 - DNA, 25 bp, Homo sapien
tacattcaagatgacgatggatgag

SEQ ID NO: 4933613 - DNA, 25 bp, Homo sapien
ggccccacctgctagagatcttctg

SEQ ID NO: 4933614 - DNA, 25 bp, Homo sapien
ggtggggacttagctgtactttcag

SEQ ID NO: 4933615 - DNA, 25 bp, Homo sapien
ctttgtttgctgatattgaagcaaa

SEQ ID NO: 4933616 - DNA, 25 bp, Homo sapien
taagtcaaagtccacggctaattgc

SEQ ID NO: 4933617 - DNA, 25 bp, Homo sapien
gagccgcttggatttgttaagtcaa

SEQ ID NO: 4933618 - DNA, 25 bp, Homo sapien
gagctctctaagccagcgcagaggc

SEQ ID NO: 4933619 - DNA, 25 bp, Homo sapien
agcaaaaaccttgcacacatccaag

SEQ ID NO: 4933620 - DNA, 25 bp, Homo sapien
tcagttgtcagagaaggtgtcaaag

SEQ ID NO: 4933621 - DNA, 25 bp, Homo sapien
gaaggtgtcaaagaagaggttaaca

SEQ ID NO: 4933622 - DNA, 25 bp, Homo sapien
agagaaggtgtcaaagaagaggtta

SEQ ID NO: 4933623 - DNA, 25 bp, Homo sapien
agttgtcagagaaggtgtcaaagaa

SEQ ID NO: 4933624 - DNA, 25 bp, Homo sapien
gggctcctatttgctccacctcaaa

SEQ ID NO: 4933625 - DNA, 25 bp, Homo sapien
tgctaggctgtgagactcctcgata

SEQ ID NO: 4933626 - DNA, 25 bp, Homo sapien
tcaaacattgtaggactgaaaatcc

SEQ ID NO: 4933627 - DNA, 25 bp, Homo sapien
aatccttggaattgggagggctcct

SEQ ID NO: 4933628 - DNA, 25 bp, Homo sapien
gccaggggatcacagagccagttga

SEQ ID NO: 4933629 - DNA, 25 bp, Homo sapien
gccagttgacatagttctcatctct

SEQ ID NO: 4933630 - DNA, 25 bp, Homo sapien
ggatcacagagccagttgacatagt

SEQ ID NO: 4933631 - DNA, 25 bp, Homo sapien
tcaactagcagccaggggatcacag

SEQ ID NO: 4933632 - DNA, 25 bp, Homo sapien
catggctgtctccagtgttcatgtc

SEQ ID NO: 4933633 - DNA, 25 bp, Homo sapien
tccccatggctgtctccagtgttca

SEQ ID NO: 4933634 - DNA, 25 bp, Homo sapien
tggctgtctccagtgttcatgtcct

SEQ ID NO: 4933635 - DNA, 25 bp, Homo sapien
cttccccatggctgtctccagtgtt

SEQ ID NO: 4933636 - DNA, 25 bp, Homo sapien
gctgtgggaagcagcggagggagcg

SEQ ID NO: 4933637 - DNA, 25 bp, Homo sapien
tgtgtctgttgccacagcaagaggc

SEQ ID NO: 4933638 - DNA, 25 bp, Homo sapien
tggattccagcttctatgttccggg

SEQ ID NO: 4933639 - DNA, 25 bp, Homo sapien
tatgttccgggattcttccagcagg

SEQ ID NO: 4933640 - DNA, 25 bp, Homo sapien
gtggaatttgtctccgaggggtaca

SEQ ID NO: 4933641 - DNA, 25 bp, Homo sapien
cgcactcgagggtggaatttgtctc

SEQ ID NO: 4933642 - DNA, 25 bp, Homo sapien
aatttgtctccgaggggtacagcat

SEQ ID NO: 4933643 - DNA, 25 bp, Homo sapien
gaatttgtctccgaggggtacagca

SEQ ID NO: 4933644 - DNA, 25 bp, Homo sapien
ttggtgggaactttccaaccatgcc

SEQ ID NO: 4933645 - DNA, 25 bp, Homo sapien
ccgtactgtgctggccgctgatctc

SEQ ID NO: 4933646 - DNA, 25 bp, Homo sapien
actttccaaccatgcccgtactgtg

SEQ ID NO: 4933647 - DNA, 25 bp, Homo sapien
aaccatgcccgtactgtgctggccg

SEQ ID NO: 4933648 - DNA, 25 bp, Homo sapien
tgcagaggtccaccagtgaaggcag

SEQ ID NO: 4933649 - DNA, 25 bp, Homo sapien
gagctgcagaggtccaccagtgaag

SEQ ID NO: 4933650 - DNA, 25 bp, Homo sapien
aggagctgcagaggtccaccagtga

SEQ ID NO: 4933651 - DNA, 25 bp, Homo sapien
ccagtgaaggcagaggaacctgcag

SEQ ID NO: 4933652 - DNA, 25 bp, Homo sapien
gcgggactcccgtgacttcagacat

SEQ ID NO: 4933653 - DNA, 25 bp, Homo sapien
aaggtggatctgtgaacggttgttc

SEQ ID NO: 4933654 - DNA, 25 bp, Homo sapien
ccggtgagaaccatgaaggtggatc

SEQ ID NO: 4933655 - DNA, 25 bp, Homo sapien
tactggcactcataaaccaccggtg

SEQ ID NO: 4933656 - DNA, 25 bp, Homo sapien
ctaatgatggtggagtcttgggctc

SEQ ID NO: 4933657 - DNA, 25 bp, Homo sapien
tcttgggctcgcttgcatttctggc

SEQ ID NO: 4933658 - DNA, 25 bp, Homo sapien
actcagtacagtagggtaacagcac

SEQ ID NO: 4933659 - DNA, 25 bp, Homo sapien
gctccagcaactcagtacagtaggg

SEQ ID NO: 4933660 - DNA, 25 bp, Homo sapien
gtaagtgaaagtacatgaaccgtcc

SEQ ID NO: 4933661 - DNA, 25 bp, Homo sapien
taagtgaaagtacatgaaccgtccc

SEQ ID NO: 4933662 - DNA, 25 bp, Homo sapien
gcaattccacgataaaattctcccc

SEQ ID NO: 4933663 - DNA, 25 bp, Homo sapien
cattatgcagggatgagctctgctc

SEQ ID NO: 4933664 - DNA, 25 bp, Homo sapien
tgttccctcgcaaacatccagcatg

SEQ ID NO: 4933665 - DNA, 25 bp, Homo sapien
atccccagttccacgatcaaagtct

SEQ ID NO: 4933666 - DNA, 25 bp, Homo sapien
atggttgagtcaagtgttttccctt

SEQ ID NO: 4933667 - DNA, 25 bp, Homo sapien
ccctgcctttgtgttgggatggatg

SEQ ID NO: 4933668 - DNA, 25 bp, Homo sapien
ttgagtcaagtgttttccctttgct

SEQ ID NO: 4933669 - DNA, 25 bp, Homo sapien
ggatggttgagtcaagtgttttccc

SEQ ID NO: 4933670 - DNA, 25 bp, Homo sapien
gacaatgatttggaatgacttgaac

SEQ ID NO: 4933671 - DNA, 25 bp, Homo sapien
tgacaatgatttggaatgacttgaa

SEQ ID NO: 4933672 - DNA, 25 bp, Homo sapien
ctgacaatgatttggaatgacttga

SEQ ID NO: 4933673 - DNA, 25 bp, Homo sapien
acaatgatttggaatgacttgaacc

SEQ ID NO: 4933674 - DNA, 25 bp, Homo sapien
tggcccttttgctgaaaccacttca

SEQ ID NO: 4933675 - DNA, 25 bp, Homo sapien
gggctccaacatggctcatggcaca

SEQ ID NO: 4933676 - DNA, 25 bp, Homo sapien
ttgggctccaacatggctcatggca

SEQ ID NO: 4933677 - DNA, 25 bp, Homo sapien
tttccataacccctgtagtcactgg

SEQ ID NO: 4933678 - DNA, 25 bp, Homo sapien
tatcacccaaatttgtcttttccgc

SEQ ID NO: 4933679 - DNA, 25 bp, Homo sapien
tgtcttttccgcttggcacttgtga

SEQ ID NO: 4933680 - DNA, 25 bp, Homo sapien
tatattatgacccttagacgcccac

SEQ ID NO: 4933681 - DNA, 25 bp, Homo sapien
tcagtatgtcctgtggtgccagttg

SEQ ID NO: 4933682 - DNA, 25 bp, Homo sapien
cagtgactagtatgatgttctttga

SEQ ID NO: 4933683 - DNA, 25 bp, Homo sapien
ccacttttggatgtgtttgggctga

SEQ ID NO: 4933684 - DNA, 25 bp, Homo sapien
ttcatgggaccgaaggaacacagct

SEQ ID NO: 4933685 - DNA, 25 bp, Homo sapien
atttttgcttcatgggaccgaagga

SEQ ID NO: 4933686 - DNA, 25 bp, Homo sapien
cacattgattatatccctggcaggg

SEQ ID NO: 4933687 - DNA, 25 bp, Homo sapien
gatgtagaaatccaccacattgatt

SEQ ID NO: 4933688 - DNA, 25 bp, Homo sapien
gatgcgttagatgcgctagtgcctg

SEQ ID NO: 4933689 - DNA, 25 bp, Homo sapien
ccatgtttaatgatagtatcctgat

SEQ ID NO: 4933690 - DNA, 25 bp, Homo sapien
gatcctgcatgagctgtgtccccat

SEQ ID NO: 4933691 - DNA, 25 bp, Homo sapien
ttttgaccaacccattacactagaa

SEQ ID NO: 4933692 - DNA, 25 bp, Homo sapien
aaactgatcctgcatgagctgtgtc

SEQ ID NO: 4933693 - DNA, 25 bp, Homo sapien
ttgaccaacccattacactagaaac

SEQ ID NO: 4933694 - DNA, 25 bp, Homo sapien
tttcagctgcttgcctagacgcact

SEQ ID NO: 4933695 - DNA, 25 bp, Homo sapien
cagctgcttgcctagacgcacttac

SEQ ID NO: 4933696 - DNA, 25 bp, Homo sapien
tcagctgcttgcctagacgcactta

SEQ ID NO: 4933697 - DNA, 25 bp, Homo sapien
agtttcagctgcttgcctagacgca

SEQ ID NO: 4933698 - DNA, 25 bp, Homo sapien
cagaatctttctgggggtttaagat

SEQ ID NO: 4933699 - DNA, 25 bp, Homo sapien
ttatgtgagttgattaagtttcttt

SEQ ID NO: 4933700 - DNA, 25 bp, Homo sapien
tttaatgccatcttgaccagcagcc

SEQ ID NO: 4933701 - DNA, 25 bp, Homo sapien
tttttaatgccatcttgaccagcag

SEQ ID NO: 4933702 - DNA, 25 bp, Homo sapien
acagttataccctttgtcctgttgg

SEQ ID NO: 4933703 - DNA, 25 bp, Homo sapien
gtcctgttggctcacattctttttg

SEQ ID NO: 4933704 - DNA, 25 bp, Homo sapien
gcataggactctacatccccacagt

SEQ ID NO: 4933705 - DNA, 25 bp, Homo sapien
caggccaagagaatgctgtcttttt

SEQ ID NO: 4933706 - DNA, 25 bp, Homo sapien
tgtgccaggggatgatctaggaccc

SEQ ID NO: 4933707 - DNA, 25 bp, Homo sapien
tccttttgtgccaggggatgatcta

SEQ ID NO: 4933708 - DNA, 25 bp, Homo sapien
ggatgatctaggacccaaggcttga

SEQ ID NO: 4933709 - DNA, 25 bp, Homo sapien
tcatgcaggcagtggtcccctcctt

SEQ ID NO: 4933710 - DNA, 25 bp, Homo sapien
tatcatcacaactactagcaaggga

SEQ ID NO: 4933711 - DNA, 25 bp, Homo sapien
ggtactgaggtcctgatcttggaag

SEQ ID NO: 4933712 - DNA, 25 bp, Homo sapien
caagggatcattttcggtactgagg

SEQ ID NO: 4933713 - DNA, 25 bp, Homo sapien
tcagaccacatcctcatggcagaga

SEQ ID NO: 4933714 - DNA, 25 bp, Homo sapien
accaccagggctgaagttagtgact

SEQ ID NO: 4933715 - DNA, 25 bp, Homo sapien
actgcaactctcataccaggaacat

SEQ ID NO: 4933716 - DNA, 25 bp, Homo sapien
tgacattgtggatgactgcttggtg

SEQ ID NO: 4933717 - DNA, 25 bp, Homo sapien
accaggaacatagtatgacattgtg

SEQ ID NO: 4933718 - DNA, 25 bp, Homo sapien
ccagtgaagacctgctccaatgaaa

SEQ ID NO: 4933719 - DNA, 25 bp, Homo sapien
tgtccttctctatgggctctgctac

SEQ ID NO: 4933720 - DNA, 25 bp, Homo sapien
agaatcagtaaggactttctctcca

SEQ ID NO: 4933721 - DNA, 25 bp, Homo sapien
tccattgtaagagagctgcttgtat

SEQ ID NO: 4933722 - DNA, 25 bp, Homo sapien
cgacggcggttaatgccaaaccctg

SEQ ID NO: 4933723 - DNA, 25 bp, Homo sapien
ggttaatgccaaaccctgtagctga

SEQ ID NO: 4933724 - DNA, 25 bp, Homo sapien
ttgacgacggcggttaatgccaaac

SEQ ID NO: 4933725 - DNA, 25 bp, Homo sapien
aatgccaaaccctgtagctgaaggc

SEQ ID NO: 4933726 - DNA, 25 bp, Homo sapien
caggcacagctttaccttattcacc

SEQ ID NO: 4933727 - DNA, 25 bp, Homo sapien
ctcaggcacagctttaccttattca

SEQ ID NO: 4933728 - DNA, 25 bp, Homo sapien
ggcacagctttaccttattcaccat

SEQ ID NO: 4933729 - DNA, 25 bp, Homo sapien
gtccctcaggcacagctttacctta

SEQ ID NO: 4933730 - DNA, 25 bp, Homo sapien
catgctatcggggaagccaccaaga

SEQ ID NO: 4933731 - DNA, 25 bp, Homo sapien
gtccaggagatcaggcccgtgaggg

SEQ ID NO: 4933732 - DNA, 25 bp, Homo sapien
ctacacaagagcgagggaagtccgc

SEQ ID NO: 4933733 - DNA, 25 bp, Homo sapien
gagatcaggcccgtgagggatgaca

SEQ ID NO: 4933734 - DNA, 25 bp, Homo sapien
ccaaactgatccttgtaagcagaag

SEQ ID NO: 4933735 - DNA, 25 bp, Homo sapien
actctgtaccaaactgatccttgta

SEQ ID NO: 4933736 - DNA, 25 bp, Homo sapien
ctgatccttgtaagcagaaggtcat

SEQ ID NO: 4933737 - DNA, 25 bp, Homo sapien
tcagcttgtccactctgtaccaaac

SEQ ID NO: 4933738 - DNA, 25 bp, Homo sapien
gcttccacgttctctgatccatgat

SEQ ID NO: 4933739 - DNA, 25 bp, Homo sapien
gggatgacaacactagcttccacgt

SEQ ID NO: 4933740 - DNA, 25 bp, Homo sapien
tggaggtgccagtcaaactctggga

SEQ ID NO: 4933741 - DNA, 25 bp, Homo sapien
tgtgaatcaaatcgggaccctctgc

SEQ ID NO: 4933742 - DNA, 25 bp, Homo sapien
cacttgtaacaatatcctacggata

SEQ ID NO: 4933743 - DNA, 25 bp, Homo sapien
acttgtaacaatatcctacggataa

SEQ ID NO: 4933744 - DNA, 25 bp, Homo sapien
tgtaacaatatcctacggataaacc

SEQ ID NO: 4933745 - DNA, 25 bp, Homo sapien
accacttgtaacaatatcctacgga

SEQ ID NO: 4933746 - DNA, 25 bp, Homo sapien
tttccccgtctgcaactctctcacc

SEQ ID NO: 4933747 - DNA, 25 bp, Homo sapien
caaccaagaatcgcgttcataaaca

SEQ ID NO: 4933748 - DNA, 25 bp, Homo sapien
caagaatcgcgttcataaacagact

SEQ ID NO: 4933749 - DNA, 25 bp, Homo sapien
tcagagcctgcgtgccgtggggttt

SEQ ID NO: 4933750 - DNA, 25 bp, Homo sapien
tgtgccgctgcccaaatgaggaatt

SEQ ID NO: 4933751 - DNA, 25 bp, Homo sapien
tgccgctgcccaaatgaggaattgg

SEQ ID NO: 4933752 - DNA, 25 bp, Homo sapien
tcattcaatccaaacacacgggtgc

SEQ ID NO: 4933753 - DNA, 25 bp, Homo sapien
caggtgggagactttggagcatatt

SEQ ID NO: 4933754 - DNA, 25 bp, Homo sapien
gagtccctggctaatcagtgcacga

SEQ ID NO: 4933755 - DNA, 25 bp, Homo sapien
ggaccgtccaactcatgaggcagga

SEQ ID NO: 4933756 - DNA, 25 bp, Homo sapien
gaactctgtgtgatcaggacacctg

SEQ ID NO: 4933757 - DNA, 25 bp, Homo sapien
tattattttagccaaggcccaagct

SEQ ID NO: 4933758 - DNA, 25 bp, Homo sapien
tggaagctgccacgccaggtatttc

SEQ ID NO: 4933759 - DNA, 25 bp, Homo sapien
tcactctgaagaagttgggccccgt

SEQ ID NO: 4933760 - DNA, 25 bp, Homo sapien
gcagggtggagtgtgccccatacaa

SEQ ID NO: 4933761 - DNA, 25 bp, Homo sapien
tcataaggccggtacagggatggca

SEQ ID NO: 4933762 - DNA, 25 bp, Homo sapien
atccagatctatgagaagaaaactg

SEQ ID NO: 4933763 - DNA, 25 bp, Homo sapien
caatccagatctatgagaagaaaac

SEQ ID NO: 4933764 - DNA, 25 bp, Homo sapien
aaaccaatccagatctatgagaaga

SEQ ID NO: 4933765 - DNA, 25 bp, Homo sapien
ccaatccagatctatgagaagaaaa

SEQ ID NO: 4933766 - DNA, 25 bp, Homo sapien
gaaacagggtaactcaatgcacgcc

SEQ ID NO: 4933767 - DNA, 25 bp, Homo sapien
tggaaacagggtaactcaatgcacg

SEQ ID NO: 4933768 - DNA, 25 bp, Homo sapien
ctgaagtggaaacagggtaactcaa

SEQ ID NO: 4933769 - DNA, 25 bp, Homo sapien
gggtaactcaatgcacgcctctgca

SEQ ID NO: 4933770 - DNA, 25 bp, Homo sapien
ggaccatcgcgagaataaaggcact

SEQ ID NO: 4933771 - DNA, 25 bp, Homo sapien
caccagggagcaaaccttctatggc

SEQ ID NO: 4933772 - DNA, 25 bp, Homo sapien
caccgtgattgaggcacgtcttaac

SEQ ID NO: 4933773 - DNA, 25 bp, Homo sapien
ttgttttggttgtgagcgaccgcac

SEQ ID NO: 4933774 - DNA, 25 bp, Homo sapien
ggtgtctcctgacccttttgctccc

SEQ ID NO: 4933775 - DNA, 25 bp, Homo sapien
caaattaaagggacgctgagaccac

SEQ ID NO: 4933776 - DNA, 25 bp, Homo sapien
cagagagaggattctaggtcttccc

SEQ ID NO: 4933777 - DNA, 25 bp, Homo sapien
tgagaccaccctgcatacagagctg

SEQ ID NO: 4933778 - DNA, 25 bp, Homo sapien
ggcgaacacttatctagaggtcaca

SEQ ID NO: 4933779 - DNA, 25 bp, Homo sapien
catagtggacatagagaggtttctc

SEQ ID NO: 4933780 - DNA, 25 bp, Homo sapien
tcccctctcagtggcatagtgcaag

SEQ ID NO: 4933781 - DNA, 25 bp, Homo sapien
tctgaagaaatcaagctaccctgct

SEQ ID NO: 4933782 - DNA, 25 bp, Homo sapien
tatgtaagaggattcagcactgtgc

SEQ ID NO: 4933783 - DNA, 25 bp, Homo sapien
agttcttctaccatagacttttcaa

SEQ ID NO: 4933784 - DNA, 25 bp, Homo sapien
agagggtattaggacctagcttgat

SEQ ID NO: 4933785 - DNA, 25 bp, Homo sapien
agggtattaggacctagcttgattt

SEQ ID NO: 4933786 - DNA, 25 bp, Homo sapien
tcagttcttctaccatagacttttc

SEQ ID NO: 4933787 - DNA, 25 bp, Homo sapien
tcttctgacccatagatccttccag

SEQ ID NO: 4933788 - DNA, 25 bp, Homo sapien
cccatagatccttccagggtgaact

SEQ ID NO: 4933789 - DNA, 25 bp, Homo sapien
ctcccagtaactcggcattcaaggc

SEQ ID NO: 4933790 - DNA, 25 bp, Homo sapien
agctcccagtaactcggcattcaag

SEQ ID NO: 4933791 - DNA, 25 bp, Homo sapien
ggttcttctcgcatgttgttgaaca

SEQ ID NO: 4933792 - DNA, 25 bp, Homo sapien
ccaaaccgaggggttcttctcgcat

SEQ ID NO: 4933793 - DNA, 25 bp, Homo sapien
caggttcaacttctgtgcttgtaca

SEQ ID NO: 4933794 - DNA, 25 bp, Homo sapien
atggacgtgactgcaccaaaccgag

SEQ ID NO: 4933795 - DNA, 25 bp, Homo sapien
cacaggggttggctacggcctggcg

SEQ ID NO: 4933796 - DNA, 25 bp, Homo sapien
ttgtccagaatctgtcagaggtggc

SEQ ID NO: 4933797 - DNA, 25 bp, Homo sapien
gggcggcgcaggagtgactgtggca

SEQ ID NO: 4933798 - DNA, 25 bp, Homo sapien
aggttttgtccagaatctgtcagag

SEQ ID NO: 4933799 - DNA, 25 bp, Homo sapien
tgacagcaggctccggtcatcgacg

SEQ ID NO: 4933800 - DNA, 25 bp, Homo sapien
cagcaggctccggtcatcgacgctg

SEQ ID NO: 4933801 - DNA, 25 bp, Homo sapien
aggctccggtcatcgacgctgtcca

SEQ ID NO: 4933802 - DNA, 25 bp, Homo sapien
tttgctgggcatgtgacagcaggct

SEQ ID NO: 4933803 - DNA, 25 bp, Homo sapien
ctcagcgcagtcagtgaagaggtgg

SEQ ID NO: 4933804 - DNA, 25 bp, Homo sapien
ggctcagcgcagtcagtgaagaggt

SEQ ID NO: 4933805 - DNA, 25 bp, Homo sapien
ggaggctcagcgcagtcagtgaaga

SEQ ID NO: 4933806 - DNA, 25 bp, Homo sapien
agtgaagaggtggcagcgaggtatc

SEQ ID NO: 4933807 - DNA, 25 bp, Homo sapien
gtagcgggcacggcagggacaaggg

SEQ ID NO: 4933808 - DNA, 25 bp, Homo sapien
aaagtcagctggtcctcccccagga

SEQ ID NO: 4933809 - DNA, 25 bp, Homo sapien
agtcagctggtcctcccccaggagg

SEQ ID NO: 4933810 - DNA, 25 bp, Homo sapien
gggaaagtcagctggtcctccccca

SEQ ID NO: 4933811 - DNA, 25 bp, Homo sapien
cagggaaagtcagctggtcctcccc

SEQ ID NO: 4933812 - DNA, 25 bp, Homo sapien
ccagggcttgtagatgagggaagag

SEQ ID NO: 4933813 - DNA, 25 bp, Homo sapien
gaaccagggcttgtagatgagggaa

SEQ ID NO: 4933814 - DNA, 25 bp, Homo sapien
aggtggcggcggttgaaccagggct

SEQ ID NO: 4933815 - DNA, 25 bp, Homo sapien
cggcggttgaaccagggcttgtaga

SEQ ID NO: 4933816 - DNA, 25 bp, Homo sapien
gaggcacaaatagatcagagatggc

SEQ ID NO: 4933817 - DNA, 25 bp, Homo sapien
gcagaggtgcgctggcagtgccggg

SEQ ID NO: 4933818 - DNA, 25 bp, Homo sapien
ggggcccagcggaggtggccctgaa

SEQ ID NO: 4933819 - DNA, 25 bp, Homo sapien
ctgaagcccggtcagtgcctgagtg

SEQ ID NO: 4933820 - DNA, 25 bp, Homo sapien
gatgcttgtacgtgcatcagcccct

SEQ ID NO: 4933821 - DNA, 25 bp, Homo sapien
gggcccctacaaggtgcatcattgg

SEQ ID NO: 4933822 - DNA, 25 bp, Homo sapien
gcccctgccccgaagatggtgaatt

SEQ ID NO: 4933823 - DNA, 25 bp, Homo sapien
taaaaagagggctctcggccatttg

SEQ ID NO: 4933824 - DNA, 25 bp, Homo sapien
tttgctgtgcccatgaggaggggtg

SEQ ID NO: 4933825 - DNA, 25 bp, Homo sapien
cagagggagtactgaattgtttgaa

SEQ ID NO: 4933826 - DNA, 25 bp, Homo sapien
gacacagagggagtactgaattgtt

SEQ ID NO: 4933827 - DNA, 25 bp, Homo sapien
cacagagggagtactgaattgtttg

SEQ ID NO: 4933828 - DNA, 25 bp, Homo sapien
tctgtctgcacctggcgggtcctgt

SEQ ID NO: 4933829 - DNA, 25 bp, Homo sapien
actcatctgtctgcacctggcgggt

SEQ ID NO: 4933830 - DNA, 25 bp, Homo sapien
tcatctgtctgcacctggcgggtcc

SEQ ID NO: 4933831 - DNA, 25 bp, Homo sapien
tcactcatctgtctgcacctggcgg

SEQ ID NO: 4933832 - DNA, 25 bp, Homo sapien
gctctcccctccgtggtatcttttg

SEQ ID NO: 4933833 - DNA, 25 bp, Homo sapien
tgagaatagcatccaggacccagtt

SEQ ID NO: 4933834 - DNA, 25 bp, Homo sapien
cgtggtatcttttgtacagtggagg

SEQ ID NO: 4933835 - DNA, 25 bp, Homo sapien
agaaggcaggggttgtgctctcccc

SEQ ID NO: 4933836 - DNA, 25 bp, Homo sapien
agcacctcggacagtgcctgaggca

SEQ ID NO: 4933837 - DNA, 25 bp, Homo sapien
cagcaaaccttagtccttcccgtgt

SEQ ID NO: 4933838 - DNA, 25 bp, Homo sapien
cacaactgcctcagcaaaccttagt

SEQ ID NO: 4933839 - DNA, 25 bp, Homo sapien
ttcccgtgtaccctcatccacagca

SEQ ID NO: 4933840 - DNA, 25 bp, Homo sapien
cctgagacatggccagcatcggcta

SEQ ID NO: 4933841 - DNA, 25 bp, Homo sapien
ccctgagacatggccagcatcggct

SEQ ID NO: 4933842 - DNA, 25 bp, Homo sapien
tttggccatttctatacagctggga

SEQ ID NO: 4933843 - DNA, 25 bp, Homo sapien
ggccatttctatacagctgggatgg

SEQ ID NO: 4933844 - DNA, 25 bp, Homo sapien
gtcccccttcgcctcacactgccct

SEQ ID NO: 4933845 - DNA, 25 bp, Homo sapien
cagtcccccttcgcctcacactgcc

SEQ ID NO: 4933846 - DNA, 25 bp, Homo sapien
cacctgcgtgtcccctcgtccccca

SEQ ID NO: 4933847 - DNA, 25 bp, Homo sapien
gccctggccacctgcgtgtcccctc

SEQ ID NO: 4933848 - DNA, 25 bp, Homo sapien
cttgaagggggcaggtgccttaagg

SEQ ID NO: 4933849 - DNA, 25 bp, Homo sapien
ctgggcatggctacagaggcagccg

SEQ ID NO: 4933850 - DNA, 25 bp, Homo sapien
tgggcatggctacagaggcagccgt

SEQ ID NO: 4933851 - DNA, 25 bp, Homo sapien
cagccgtggcaatgctgccataggg

SEQ ID NO: 4933852 - DNA, 25 bp, Homo sapien
aggcagccgtggcaatgctgccata

SEQ ID NO: 4933853 - DNA, 25 bp, Homo sapien
gggtgcttggctttagtgactgaca

SEQ ID NO: 4933854 - DNA, 25 bp, Homo sapien
tggctctcacaaacgtgtaggcagc

SEQ ID NO: 4933855 - DNA, 25 bp, Homo sapien
agagaccgtctggccccgtgaggca

SEQ ID NO: 4933856 - DNA, 25 bp, Homo sapien
cagcaccagtggctctcacaaacgt

SEQ ID NO: 4933857 - DNA, 25 bp, Homo sapien
cttccataggctgtcattggctgga

SEQ ID NO: 4933858 - DNA, 25 bp, Homo sapien
cataggctgtcattggctggaagtg

SEQ ID NO: 4933859 - DNA, 25 bp, Homo sapien
cacttccataggctgtcattggctg

SEQ ID NO: 4933860 - DNA, 25 bp, Homo sapien
tccataggctgtcattggctggaag

SEQ ID NO: 4933861 - DNA, 25 bp, Homo sapien
caagctgctacttgtaggcccggga

SEQ ID NO: 4933862 - DNA, 25 bp, Homo sapien
gaggtatgtaggacccagttagccc

SEQ ID NO: 4933863 - DNA, 25 bp, Homo sapien
tcctccatgggtaaggatccatctt

SEQ ID NO: 4933864 - DNA, 25 bp, Homo sapien
ggatcatagcccctccggaggtatg

SEQ ID NO: 4933865 - DNA, 25 bp, Homo sapien
ccattcggagggcttctttcggagc

SEQ ID NO: 4933866 - DNA, 25 bp, Homo sapien
tggtgccaccggaagcttccatggg

SEQ ID NO: 4933867 - DNA, 25 bp, Homo sapien
tgtccaggccgcataagatgccggt

SEQ ID NO: 4933868 - DNA, 25 bp, Homo sapien
gcagcccacgaatctgaatggcagg

SEQ ID NO: 4933869 - DNA, 25 bp, Homo sapien
gcatctggggatgtcccaagagtcc

SEQ ID NO: 4933870 - DNA, 25 bp, Homo sapien
catctggggatgtcccaagagtccc

SEQ ID NO: 4933871 - DNA, 25 bp, Homo sapien
catgcgtgagtaagcccatggacaa

SEQ ID NO: 4933872 - DNA, 25 bp, Homo sapien
tggctggtgatggaaactctcagac

SEQ ID NO: 4933873 - DNA, 25 bp, Homo sapien
ggctttgaagtctagtggctggtga

SEQ ID NO: 4933874 - DNA, 25 bp, Homo sapien
tagtctccccatgcgtgagtaagcc

SEQ ID NO: 4933875 - DNA, 25 bp, Homo sapien
gcagcgcacatgtggtgtttgtcag

SEQ ID NO: 4933876 - DNA, 25 bp, Homo sapien
cacgcagcgcacatgtggtgtttgt

SEQ ID NO: 4933877 - DNA, 25 bp, Homo sapien
ctgacaggcacgcagcgcacatgtg

SEQ ID NO: 4933878 - DNA, 25 bp, Homo sapien
aggcacgcagcgcacatgtggtgtt

SEQ ID NO: 4933879 - DNA, 25 bp, Homo sapien
ggacaggctgcagccttttgaactc

SEQ ID NO: 4933880 - DNA, 25 bp, Homo sapien
caggacaggctgcagccttttgaac

SEQ ID NO: 4933881 - DNA, 25 bp, Homo sapien
ctgggtaggtgcaggacaggctgca

SEQ ID NO: 4933882 - DNA, 25 bp, Homo sapien
acaggctgcagccttttgaactcaa

SEQ ID NO: 4933883 - DNA, 25 bp, Homo sapien
ttggggtgacatctttctgcttggt

SEQ ID NO: 4933884 - DNA, 25 bp, Homo sapien
cagtttggggtgacatctttctgct

SEQ ID NO: 4933885 - DNA, 25 bp, Homo sapien
agctgagcagtttggggtgacatct

SEQ ID NO: 4933886 - DNA, 25 bp, Homo sapien
gagcagtttggggtgacatctttct

SEQ ID NO: 4933887 - DNA, 25 bp, Homo sapien
gaagatgagagggatttcagctcac

SEQ ID NO: 4933888 - DNA, 25 bp, Homo sapien
tcagctcacagatgcgaagttgagc

SEQ ID NO: 4933889 - DNA, 25 bp, Homo sapien
ctggaacgtggggggcttagacctg

SEQ ID NO: 4933890 - DNA, 25 bp, Homo sapien
agatgagagggatttcagctcacag

SEQ ID NO: 4933891 - DNA, 25 bp, Homo sapien
gtgttttcccgtgcacctgcagggc

SEQ ID NO: 4933892 - DNA, 25 bp, Homo sapien
gtgtgttttcccgtgcacctgcagg

SEQ ID NO: 4933893 - DNA, 25 bp, Homo sapien
tgtgtgttttcccgtgcacctgcag

SEQ ID NO: 4933894 - DNA, 25 bp, Homo sapien
tgtgttttcccgtgcacctgcaggg

SEQ ID NO: 4933895 - DNA, 25 bp, Homo sapien
ggaagccgtacatcaggggcagtat

SEQ ID NO: 4933896 - DNA, 25 bp, Homo sapien
ctacagtttgcaggagcggaagccg

SEQ ID NO: 4933897 - DNA, 25 bp, Homo sapien
cagtttgcaggagcggaagccgtac

SEQ ID NO: 4933898 - DNA, 25 bp, Homo sapien
tgcaggagcggaagccgtacatcag

SEQ ID NO: 4933899 - DNA, 25 bp, Homo sapien
cactttgcgttgaatctgtggccga

SEQ ID NO: 4933900 - DNA, 25 bp, Homo sapien
gatcccggggcacagtgaccattgt

SEQ ID NO: 4933901 - DNA, 25 bp, Homo sapien
tgtggccgagccttcctaaaaggct

SEQ ID NO: 4933902 - DNA, 25 bp, Homo sapien
tggagggatattaccctgagtctca

SEQ ID NO: 4933903 - DNA, 25 bp, Homo sapien
tctcagatgcagctattagcttgcc

SEQ ID NO: 4933904 - DNA, 25 bp, Homo sapien
cttcttctcagatgcagctattagc

SEQ ID NO: 4933905 - DNA, 25 bp, Homo sapien
ctaaccttgagctatttcttgagca

SEQ ID NO: 4933906 - DNA, 25 bp, Homo sapien
ctgggcggccacgaatgaaggcttc

SEQ ID NO: 4933907 - DNA, 25 bp, Homo sapien
tgattctgattggtagctctgggtg

SEQ ID NO: 4933908 - DNA, 25 bp, Homo sapien
gctgatcccgagagttgagcgacaa

SEQ ID NO: 4933909 - DNA, 25 bp, Homo sapien
gagactgatgaagttcttactgagg

SEQ ID NO: 4933910 - DNA, 25 bp, Homo sapien
tgagcgacaacatcgaggagaggat

SEQ ID NO: 4933911 - DNA, 25 bp, Homo sapien
gaggagcgggctggccgaccgccac

SEQ ID NO: 4933912 - DNA, 25 bp, Homo sapien
ccccgaagccgctccatcgcggtcc

SEQ ID NO: 4933913 - DNA, 25 bp, Homo sapien
cgggctggccgaccgccaccgcgcc

SEQ ID NO: 4933914 - DNA, 25 bp, Homo sapien
cggaggagcgggctggccgaccgcc

SEQ ID NO: 4933915 - DNA, 25 bp, Homo sapien
gactccaaaagtggcggcccatgct

SEQ ID NO: 4933916 - DNA, 25 bp, Homo sapien
gaaacgactcgggtctgcaggtgct

SEQ ID NO: 4933917 - DNA, 25 bp, Homo sapien
tgcgatgtctttccccgctgtcctg

SEQ ID NO: 4933918 - DNA, 25 bp, Homo sapien
ttagcgctctccagggaaacgactc

SEQ ID NO: 4933919 - DNA, 25 bp, Homo sapien
cccagcgaggacctgacggctcaga

SEQ ID NO: 4933920 - DNA, 25 bp, Homo sapien
ccaaaatgaatctggggagagtgcc

SEQ ID NO: 4933921 - DNA, 25 bp, Homo sapien
agccaggctcacttgccgagcgcgg

SEQ ID NO: 4933922 - DNA, 25 bp, Homo sapien
ggctcagacgtagcccacagcgcgg

SEQ ID NO: 4933923 - DNA, 25 bp, Homo sapien
tcaggtcacctatctgctgacagcc

SEQ ID NO: 4933924 - DNA, 25 bp, Homo sapien
aatgcacttgctcaccccagttggg

SEQ ID NO: 4933925 - DNA, 25 bp, Homo sapien
ggcttgggaccaactgactgtggct

SEQ ID NO: 4933926 - DNA, 25 bp, Homo sapien
gctgtaaacacagcgcatgggcacc

SEQ ID NO: 4933927 - DNA, 25 bp, Homo sapien
tggcccagacacactgcggtgatgt

SEQ ID NO: 4933928 - DNA, 25 bp, Homo sapien
tggaagaagtactggcctgggaatt

SEQ ID NO: 4933929 - DNA, 25 bp, Homo sapien
tcactgtgggaccaggataaactgc

SEQ ID NO: 4933930 - DNA, 25 bp, Homo sapien
gaattgggtcctcccttactcactg

SEQ ID NO: 4933931 - DNA, 25 bp, Homo sapien
cttatcactaactgagtcctgggga

SEQ ID NO: 4933932 - DNA, 25 bp, Homo sapien
ttatcactaactgagtcctggggac

SEQ ID NO: 4933933 - DNA, 25 bp, Homo sapien
actgagtcctggggactcctcttgc

SEQ ID NO: 4933934 - DNA, 25 bp, Homo sapien
gagtcctggggactcctcttgccat

SEQ ID NO: 4933935 - DNA, 25 bp, Homo sapien
tcccatcctgttcctgcacagtgtg

SEQ ID NO: 4933936 - DNA, 25 bp, Homo sapien
gcacaccaagaagcttcgagcttga

SEQ ID NO: 4933937 - DNA, 25 bp, Homo sapien
gcttcgagcttgaaaatgcccagga

SEQ ID NO: 4933938 - DNA, 25 bp, Homo sapien
catcctgttcctgcacagtgtgggt

SEQ ID NO: 4933939 - DNA, 25 bp, Homo sapien
tcacactgcgaagttgctgccacct

SEQ ID NO: 4933940 - DNA, 25 bp, Homo sapien
ccccgaaatagcagcggcgtgtgca

SEQ ID NO: 4933941 - DNA, 25 bp, Homo sapien
gatacacctgtgcatccccgaaata

SEQ ID NO: 4933942 - DNA, 25 bp, Homo sapien
gcgtgtgcagggacgccgcatcaca

SEQ ID NO: 4933943 - DNA, 25 bp, Homo sapien
ctggggcagcgccagtgcctgaggg

SEQ ID NO: 4933944 - DNA, 25 bp, Homo sapien
gaacagcttagggtccaggaaggcc

SEQ ID NO: 4933945 - DNA, 25 bp, Homo sapien
tggaagcacccaatcctctcttccc

SEQ ID NO: 4933946 - DNA, 25 bp, Homo sapien
ccctttctctgggagttgacagcgc

SEQ ID NO: 4933947 - DNA, 25 bp, Homo sapien
gttgctgatgatgaaccatggccat

SEQ ID NO: 4933948 - DNA, 25 bp, Homo sapien
ggccttgttgctgatgatgaaccat

SEQ ID NO: 4933949 - DNA, 25 bp, Homo sapien
ctggggggccttgttgctgatgatg

SEQ ID NO: 4933950 - DNA, 25 bp, Homo sapien
tgttgctgatgatgaaccatggcca

SEQ ID NO: 4933951 - DNA, 25 bp, Homo sapien
tctcgtttgccttcccacatgaggg

SEQ ID NO: 4933952 - DNA, 25 bp, Homo sapien
agatgtgggtgattcaggcagcatg

SEQ ID NO: 4933953 - DNA, 25 bp, Homo sapien
aacttctctcgtttgccttcccaca

SEQ ID NO: 4933954 - DNA, 25 bp, Homo sapien
gatgtgggtgattcaggcagcatgc

SEQ ID NO: 4933955 - DNA, 25 bp, Homo sapien
caagcgtttggagctttaccgtggg

SEQ ID NO: 4933956 - DNA, 25 bp, Homo sapien
tgttagaaataacccaggcctcctg

SEQ ID NO: 4933957 - DNA, 25 bp, Homo sapien
gctacagatatagatccagccacag

SEQ ID NO: 4933958 - DNA, 25 bp, Homo sapien
gagtcaggccttgtgtgtgctccaa

SEQ ID NO: 4933959 - DNA, 25 bp, Homo sapien
gagcgtgctgaaggcggagctgagc

SEQ ID NO: 4933960 - DNA, 25 bp, Homo sapien
caatcgctttgagcgtgctgaaggc

SEQ ID NO: 4933961 - DNA, 25 bp, Homo sapien
ccgctgtcctaccaatcgctttgag

SEQ ID NO: 4933962 - DNA, 25 bp, Homo sapien
tgtcctaccaatcgctttgagcgtg

SEQ ID NO: 4933963 - DNA, 25 bp, Homo sapien
aaaggccacagggagtcagcaggag

SEQ ID NO: 4933964 - DNA, 25 bp, Homo sapien
gatggagcaggggaagtcgcagggc

SEQ ID NO: 4933965 - DNA, 25 bp, Homo sapien
ctttggaaaggccacagggagtcag

SEQ ID NO: 4933966 - DNA, 25 bp, Homo sapien
ggagggagggacagatggagcaggg

SEQ ID NO: 4933967 - DNA, 25 bp, Homo sapien
gtccctcagcagcagattcccgtgt

SEQ ID NO: 4933968 - DNA, 25 bp, Homo sapien
cagcagcagattcccgtgtgggcca

SEQ ID NO: 4933969 - DNA, 25 bp, Homo sapien
catgcaggccatggcgggttgctgg

SEQ ID NO: 4933970 - DNA, 25 bp, Homo sapien
cagcagattcccgtgtgggccatgc

SEQ ID NO: 4933971 - DNA, 25 bp, Homo sapien
ctcctgcgacctgctgtcctcatcc

SEQ ID NO: 4933972 - DNA, 25 bp, Homo sapien
gggcccactgcacagcccacttcca

SEQ ID NO: 4933973 - DNA, 25 bp, Homo sapien
gcccctgcgacatgccatcctaata

SEQ ID NO: 4933974 - DNA, 25 bp, Homo sapien
cttccagggcccctgcgacatgcca

SEQ ID NO: 4933975 - DNA, 25 bp, Homo sapien
actgggcccactgcacagcccactt

SEQ ID NO: 4933976 - DNA, 25 bp, Homo sapien
gttgccatcaacacctctaccactg

SEQ ID NO: 4933977 - DNA, 25 bp, Homo sapien
agttgccatcaacacctctaccact

SEQ ID NO: 4933978 - DNA, 25 bp, Homo sapien
ctgtactgcaccttggtggattgca

SEQ ID NO: 4933979 - DNA, 25 bp, Homo sapien
cctgtactgcaccttggtggattgc

SEQ ID NO: 4933980 - DNA, 25 bp, Homo sapien
tgtactgcaccttggtggattgcaa

SEQ ID NO: 4933981 - DNA, 25 bp, Homo sapien
tctgtttcctgggcacatgtatact

SEQ ID NO: 4933982 - DNA, 25 bp, Homo sapien
tggccatctgtttcctgggcacatg

SEQ ID NO: 4933983 - DNA, 25 bp, Homo sapien
gccatctgtttcctgggcacatgta

SEQ ID NO: 4933984 - DNA, 25 bp, Homo sapien
catctgtttcctgggcacatgtata

SEQ ID NO: 4933985 - DNA, 25 bp, Homo sapien
ggtgtgtccttgtgaacacaggcat

SEQ ID NO: 4933986 - DNA, 25 bp, Homo sapien
ggtttccggtcattaagtgtggagc

SEQ ID NO: 4933987 - DNA, 25 bp, Homo sapien
aggacagggacgcctccaacttggg

SEQ ID NO: 4933988 - DNA, 25 bp, Homo sapien
ccggtcattaagtgtggagcctggt

SEQ ID NO: 4933989 - DNA, 25 bp, Homo sapien
tgatctgaacacaggtctgattcca

SEQ ID NO: 4933990 - DNA, 25 bp, Homo sapien
gtcctgatctgaacacaggtctgat

SEQ ID NO: 4933991 - DNA, 25 bp, Homo sapien
ctgagtccccacgtgatgccggtta

SEQ ID NO: 4933992 - DNA, 25 bp, Homo sapien
taggtcgttatcaatgaggaggagc

SEQ ID NO: 4933993 - DNA, 25 bp, Homo sapien
atgatagaaactgtgtgttgagcac

SEQ ID NO: 4933994 - DNA, 25 bp, Homo sapien
aatgatagaaactgtgtgttgagca

SEQ ID NO: 4933995 - DNA, 25 bp, Homo sapien
taatgatagaaactgtgtgttgagc

SEQ ID NO: 4933996 - DNA, 25 bp, Homo sapien
cttaatgatagaaactgtgtgttga

SEQ ID NO: 4933997 - DNA, 25 bp, Homo sapien
tgcgcagtttcacgatgtcacagag

SEQ ID NO: 4933998 - DNA, 25 bp, Homo sapien
agttgaggcactgtttgcgcagttt

SEQ ID NO: 4933999 - DNA, 25 bp, Homo sapien
tttgcgcagtttcacgatgtcacag

SEQ ID NO: 4934000 - DNA, 25 bp, Homo sapien
tcagttgaggcactgtttgcgcagt

SEQ ID NO: 4934001 - DNA, 25 bp, Homo sapien
gtcgctattgcgatgaagctcccgt

SEQ ID NO: 4934002 - DNA, 25 bp, Homo sapien
aacacagctgcgaatgaggcctggg

SEQ ID NO: 4934003 - DNA, 25 bp, Homo sapien
cccgtttgccgaatgggttgagatg

SEQ ID NO: 4934004 - DNA, 25 bp, Homo sapien
tcagctgtgccttcctaattaggca

SEQ ID NO: 4934005 - DNA, 25 bp, Homo sapien
accgttcttcatgggctgtcgtgga

SEQ ID NO: 4934006 - DNA, 25 bp, Homo sapien
tcgtggagtggccacggacctccat

SEQ ID NO: 4934007 - DNA, 25 bp, Homo sapien
atgggccgcccgatggctggctgtg

SEQ ID NO: 4934008 - DNA, 25 bp, Homo sapien
gtgggtaccgttcttcatgggctgt

SEQ ID NO: 4934009 - DNA, 25 bp, Homo sapien
gaggtgggagaacaaagcgtgtgcc

SEQ ID NO: 4934010 - DNA, 25 bp, Homo sapien
tgggagaacaaagcgtgtgcccagg

SEQ ID NO: 4934011 - DNA, 25 bp, Homo sapien
gggagaacaaagcgtgtgcccaggg

SEQ ID NO: 4934012 - DNA, 25 bp, Homo sapien
ggtgggagaacaaagcgtgtgccca

SEQ ID NO: 4934013 - DNA, 25 bp, Homo sapien
tcaggcgatgctgctgtgataacca

SEQ ID NO: 4934014 - DNA, 25 bp, Homo sapien
gggcagcgtgcacacccttcgacca

SEQ ID NO: 4934015 - DNA, 25 bp, Homo sapien
acccttcgaccacatccctgtggct

SEQ ID NO: 4934016 - DNA, 25 bp, Homo sapien
gctgctgtgataaccacacacagcc

SEQ ID NO: 4934017 - DNA, 25 bp, Homo sapien
gtggtaatttgagatgtctgcaggc

SEQ ID NO: 4934018 - DNA, 25 bp, Homo sapien
ctgtctatggacagcgacatctgga

SEQ ID NO: 4934019 - DNA, 25 bp, Homo sapien
agcgacatctggaaacggcctgaga

SEQ ID NO: 4934020 - DNA, 25 bp, Homo sapien
ctgcaggcgagtacctgaggttcag

SEQ ID NO: 4934021 - DNA, 25 bp, Homo sapien
tggtgtgacctgcaccgctgtggcc

SEQ ID NO: 4934022 - DNA, 25 bp, Homo sapien
ggctcttctgaacgcatgggtcatg

SEQ ID NO: 4934023 - DNA, 25 bp, Homo sapien
tgtcccgctggctatgctttctggc

SEQ ID NO: 4934024 - DNA, 25 bp, Homo sapien
tcttcaaaggactcctgtcccgctg

SEQ ID NO: 4934025 - DNA, 25 bp, Homo sapien
cttttgtggaggacccgcttcaatc

SEQ ID NO: 4934026 - DNA, 25 bp, Homo sapien
gtccgcagtgcctccgccggtggtt

SEQ ID NO: 4934027 - DNA, 25 bp, Homo sapien
tgtgttgaggacgtctcctgtcggc

SEQ ID NO: 4934028 - DNA, 25 bp, Homo sapien
tcctgtcggctcctgtgctgttcat

SEQ ID NO: 4934029 - DNA, 25 bp, Homo sapien
acagtcacagctactggggttgagg

SEQ ID NO: 4934030 - DNA, 25 bp, Homo sapien
ctggggactccttaagagagaatgg

SEQ ID NO: 4934031 - DNA, 25 bp, Homo sapien
cagtcacagctactggggttgaggt

SEQ ID NO: 4934032 - DNA, 25 bp, Homo sapien
actccttaagagagaatgggggctt

SEQ ID NO: 4934033 - DNA, 25 bp, Homo sapien
tgcagagatgccagatgtgcctcta

SEQ ID NO: 4934034 - DNA, 25 bp, Homo sapien
tgctttcagcgcacacaggagtcag

SEQ ID NO: 4934035 - DNA, 25 bp, Homo sapien
gtgatttagcatcaggcagatgtgc

SEQ ID NO: 4934036 - DNA, 25 bp, Homo sapien
gttacccagtgatttagcatcaggc

SEQ ID NO: 4934037 - DNA, 25 bp, Homo sapien
ctattgagaagtcccctgccatcca

SEQ ID NO: 4934038 - DNA, 25 bp, Homo sapien
ggtgacctgcttgcttctcttggga

SEQ ID NO: 4934039 - DNA, 25 bp, Homo sapien
ttggaattgtgaaggtgttgctctc

SEQ ID NO: 4934040 - DNA, 25 bp, Homo sapien
taattgatcactcagcagaatttag

SEQ ID NO: 4934041 - DNA, 25 bp, Homo sapien
agctagcagcatcgttttccagacc

SEQ ID NO: 4934042 - DNA, 25 bp, Homo sapien
aaggagctagcagcatcgttttcca

SEQ ID NO: 4934043 - DNA, 25 bp, Homo sapien
tgtcctcaaggagctagcagcatcg

SEQ ID NO: 4934044 - DNA, 25 bp, Homo sapien
tcctcaaggagctagcagcatcgtt

SEQ ID NO: 4934045 - DNA, 25 bp, Homo sapien
gcagcaaggagcatgcgggtttcct

SEQ ID NO: 4934046 - DNA, 25 bp, Homo sapien
gctttgccgtacacatactggtggc

SEQ ID NO: 4934047 - DNA, 25 bp, Homo sapien
aagctgctaagagtcgggcccaggt

SEQ ID NO: 4934048 - DNA, 25 bp, Homo sapien
tgtgacatcaatggccctgctggca

SEQ ID NO: 4934049 - DNA, 25 bp, Homo sapien
gcagcactgaatcgcagactcatcc

SEQ ID NO: 4934050 - DNA, 25 bp, Homo sapien
acgctgcggctgctcgattgagggc

SEQ ID NO: 4934051 - DNA, 25 bp, Homo sapien
actagttcatcctctcggtagtcta

SEQ ID NO: 4934052 - DNA, 25 bp, Homo sapien
cgtgaggacgatccatgggtctggc

SEQ ID NO: 4934053 - DNA, 25 bp, Homo sapien
aaggggttaatgaacgagaagccag

SEQ ID NO: 4934054 - DNA, 25 bp, Homo sapien
tggcgcctgctgccgggacgcatcc

SEQ ID NO: 4934055 - DNA, 25 bp, Homo sapien
gcgcctgctgccgggacgcatccac

SEQ ID NO: 4934056 - DNA, 25 bp, Homo sapien
cgcatccacgggtaaggggttaatg

SEQ ID NO: 4934057 - DNA, 25 bp, Homo sapien
cagtaacctgggagccactttggag

SEQ ID NO: 4934058 - DNA, 25 bp, Homo sapien
ccagtaacctgggagccactttgga

SEQ ID NO: 4934059 - DNA, 25 bp, Homo sapien
ttggagtgggtcatgccgtcttcca

SEQ ID NO: 4934060 - DNA, 25 bp, Homo sapien
tgccgtcttccaggtctgcttcctg

SEQ ID NO: 4934061 - DNA, 25 bp, Homo sapien
gaaggctgtggagatcatctcctca

SEQ ID NO: 4934062 - DNA, 25 bp, Homo sapien
tggagatcatctcctcatatgtcac

SEQ ID NO: 4934063 - DNA, 25 bp, Homo sapien
ttagaaggctgtggagatcatctcc

SEQ ID NO: 4934064 - DNA, 25 bp, Homo sapien
ggagatcatctcctcatatgtcact

SEQ ID NO: 4934065 - DNA, 25 bp, Homo sapien
tcccaggaacactgtccgtcagcag

SEQ ID NO: 4934066 - DNA, 25 bp, Homo sapien
ggaaagactggcacctctgctgcag

SEQ ID NO: 4934067 - DNA, 25 bp, Homo sapien
tccagggataaacaggggcatctgc

SEQ ID NO: 4934068 - DNA, 25 bp, Homo sapien
cagacaaggctttttataggtctct

SEQ ID NO: 4934069 - DNA, 25 bp, Homo sapien
atgtggccgcgagaccccagctgtt

SEQ ID NO: 4934070 - DNA, 25 bp, Homo sapien
tctctttgtggcagcgcagttgcct

SEQ ID NO: 4934071 - DNA, 25 bp, Homo sapien
gggcttgaacaccatcatgtggccg

SEQ ID NO: 4934072 - DNA, 25 bp, Homo sapien
ctctctttgtggcagcgcagttgcc

SEQ ID NO: 4934073 - DNA, 25 bp, Homo sapien
gtccagcacctttcaactctctctc

SEQ ID NO: 4934074 - DNA, 25 bp, Homo sapien
ccaagaccttctgtgccaagggtgg

SEQ ID NO: 4934075 - DNA, 25 bp, Homo sapien
acaaattctcagcagtcagtccagc

SEQ ID NO: 4934076 - DNA, 25 bp, Homo sapien
ccttctgtgccaagggtgggtgaga

SEQ ID NO: 4934077 - DNA, 25 bp, Homo sapien
ctgcacagccatgggatggacaggc

SEQ ID NO: 4934078 - DNA, 25 bp, Homo sapien
gcccgtcattccttatcctgcacag

SEQ ID NO: 4934079 - DNA, 25 bp, Homo sapien
tccggcgcccgggaagcacttcctg

SEQ ID NO: 4934080 - DNA, 25 bp, Homo sapien
gtgcccatccatccggcgcccggga

SEQ ID NO: 4934081 - DNA, 25 bp, Homo sapien
tcacggctgttgtctcggaggctcg

SEQ ID NO: 4934082 - DNA, 25 bp, Homo sapien
tattctgattcaggaacccatgggt

SEQ ID NO: 4934083 - DNA, 25 bp, Homo sapien
tggcatggcgctttgcacaggaaat

SEQ ID NO: 4934084 - DNA, 25 bp, Homo sapien
gaggctcgtctgctcttcggaattg

SEQ ID NO: 4934085 - DNA, 25 bp, Homo sapien
ctgtgccctcccctacttcagacct

SEQ ID NO: 4934086 - DNA, 25 bp, Homo sapien
ccctcccctacttcagacctggcca

SEQ ID NO: 4934087 - DNA, 25 bp, Homo sapien
gtgccctcccctacttcagacctgg

SEQ ID NO: 4934088 - DNA, 25 bp, Homo sapien
ctctgtgccctcccctacttcagac

SEQ ID NO: 4934089 - DNA, 25 bp, Homo sapien
gtctctgttccccccaggcaccgac

SEQ ID NO: 4934090 - DNA, 25 bp, Homo sapien
tctctgttccccccaggcaccgacc

SEQ ID NO: 4934091 - DNA, 25 bp, Homo sapien
ggtctctgttccccccaggcaccga

SEQ ID NO: 4934092 - DNA, 25 bp, Homo sapien
ttcagttgtgcgtttatttggtgcc

SEQ ID NO: 4934093 - DNA, 25 bp, Homo sapien
tgtgcgtttatttggtgccactcac

SEQ ID NO: 4934094 - DNA, 25 bp, Homo sapien
cttcattcagttgtgcgtttatttg

SEQ ID NO: 4934095 - DNA, 25 bp, Homo sapien
cagttgtgcgtttatttggtgccac

SEQ ID NO: 4934096 - DNA, 25 bp, Homo sapien
aacaccccgcgcattctgtctgcat

SEQ ID NO: 4934097 - DNA, 25 bp, Homo sapien
tcgggccatacctgctcgtcccaga

SEQ ID NO: 4934098 - DNA, 25 bp, Homo sapien
ggtctcactagctgctccacgcgaa

SEQ ID NO: 4934099 - DNA, 25 bp, Homo sapien
cagaccaaccagcggctgggcttct

SEQ ID NO: 4934100 - DNA, 25 bp, Homo sapien
gccaggtgccgtggccggattcttc

SEQ ID NO: 4934101 - DNA, 25 bp, Homo sapien
cggattcttcgtgaccagctccttc

SEQ ID NO: 4934102 - DNA, 25 bp, Homo sapien
tggccggattcttcgtgaccagctc

SEQ ID NO: 4934103 - DNA, 25 bp, Homo sapien
gtgccgtggccggattcttcgtgac

SEQ ID NO: 4934104 - DNA, 25 bp, Homo sapien
ggtgggatagaaatcgcctatttaa

SEQ ID NO: 4934105 - DNA, 25 bp, Homo sapien
tcagcaccggcatgaaataaatcct

SEQ ID NO: 4934106 - DNA, 25 bp, Homo sapien
ccaggcgagtcagcaccggcatgaa

SEQ ID NO: 4934107 - DNA, 25 bp, Homo sapien
tcctcaacaggtgggatagaaatcg

SEQ ID NO: 4934108 - DNA, 25 bp, Homo sapien
ccccagcggcttcccatgcacttgc

SEQ ID NO: 4934109 - DNA, 25 bp, Homo sapien
tgagcttgctcatggaagctctttc

SEQ ID NO: 4934110 - DNA, 25 bp, Homo sapien
ggtccccccagcggcttcccatgca

SEQ ID NO: 4934111 - DNA, 25 bp, Homo sapien
ttgagcttgctcatggaagctcttt

SEQ ID NO: 4934112 - DNA, 25 bp, Homo sapien
aatccaggatcactcctgatccata

SEQ ID NO: 4934113 - DNA, 25 bp, Homo sapien
ttccccgaatccaggatcactcctg

SEQ ID NO: 4934114 - DNA, 25 bp, Homo sapien
ctcctgatccataggagattagaat

SEQ ID NO: 4934115 - DNA, 25 bp, Homo sapien
gatccataggagattagaatcaatt

SEQ ID NO: 4934116 - DNA, 25 bp, Homo sapien
caatttgagtcgtgcagtttcctca

SEQ ID NO: 4934117 - DNA, 25 bp, Homo sapien
cgtccaccgctgctaagttagttcc

SEQ ID NO: 4934118 - DNA, 25 bp, Homo sapien
tcgccgacctccaatttgagtcgtg

SEQ ID NO: 4934119 - DNA, 25 bp, Homo sapien
tcatcaacgtccaccgctgctaagt

SEQ ID NO: 4934120 - DNA, 25 bp, Homo sapien
tgcttctgccagacaagcaggcacg

SEQ ID NO: 4934121 - DNA, 25 bp, Homo sapien
gaccatgagcacagtcatttccgtg

SEQ ID NO: 4934122 - DNA, 25 bp, Homo sapien
tgccctgggatggattggccagagc

SEQ ID NO: 4934123 - DNA, 25 bp, Homo sapien
cactcggcaggtgtgttgaccatga

SEQ ID NO: 4934124 - DNA, 25 bp, Homo sapien
ttcgtcctggaactctgtcacttgg

SEQ ID NO: 4934125 - DNA, 25 bp, Homo sapien
tcctgccctgtctagtaaacctgga

SEQ ID NO: 4934126 - DNA, 25 bp, Homo sapien
cctgcatccatgaggtgcctgtgac

SEQ ID NO: 4934127 - DNA, 25 bp, Homo sapien
cactgtgggttctgcgaattctgcc

SEQ ID NO: 4934128 - DNA, 25 bp, Homo sapien
tgatggcccagtgggacaccaagct

SEQ ID NO: 4934129 - DNA, 25 bp, Homo sapien
tgtggtactgatggcccagtgggac

SEQ ID NO: 4934130 - DNA, 25 bp, Homo sapien
aaccacgatgaatccgggcagggct

SEQ ID NO: 4934131 - DNA, 25 bp, Homo sapien
accaagctgctgacacgggatgtgc

SEQ ID NO: 4934132 - DNA, 25 bp, Homo sapien
ctcaaattggagaaactcagctccg

SEQ ID NO: 4934133 - DNA, 25 bp, Homo sapien
caaattggagaaactcagctccgtg

SEQ ID NO: 4934134 - DNA, 25 bp, Homo sapien
tggagaaactcagctccgtgttgct

SEQ ID NO: 4934135 - DNA, 25 bp, Homo sapien
agaaactcagctccgtgttgcttga

SEQ ID NO: 4934136 - DNA, 25 bp, Homo sapien
tccatgcccaactccgggatggcct

SEQ ID NO: 4934137 - DNA, 25 bp, Homo sapien
ccatgcccaactccgggatggcctc

SEQ ID NO: 4934138 - DNA, 25 bp, Homo sapien
atgcccaactccgggatggcctcgc

SEQ ID NO: 4934139 - DNA, 25 bp, Homo sapien
gcccaactccgggatggcctcgcgt

SEQ ID NO: 4934140 - DNA, 25 bp, Homo sapien
ggcctcctccacagacagcatggtg

SEQ ID NO: 4934141 - DNA, 25 bp, Homo sapien
agcatggtgggtggcctgctgggca

SEQ ID NO: 4934142 - DNA, 25 bp, Homo sapien
tcctccacagacagcatggtgggtg

SEQ ID NO: 4934143 - DNA, 25 bp, Homo sapien
ccacagacagcatggtgggtggcct

SEQ ID NO: 4934144 - DNA, 25 bp, Homo sapien
agttccggcagaccaagtccaggcc

SEQ ID NO: 4934145 - DNA, 25 bp, Homo sapien
ttccagttccggcagaccaagtcca

SEQ ID NO: 4934146 - DNA, 25 bp, Homo sapien
cttgttccagttccggcagaccaag

SEQ ID NO: 4934147 - DNA, 25 bp, Homo sapien
gccttgttccagttccggcagacca

SEQ ID NO: 4934148 - DNA, 25 bp, Homo sapien
gagttggcgaagcaaacgctgagcc

SEQ ID NO: 4934149 - DNA, 25 bp, Homo sapien
cagcagcatctagagttggcgaagc

SEQ ID NO: 4934150 - DNA, 25 bp, Homo sapien
tctagagttggcgaagcaaacgctg

SEQ ID NO: 4934151 - DNA, 25 bp, Homo sapien
cgaagcaaacgctgagccaagggaa

SEQ ID NO: 4934152 - DNA, 25 bp, Homo sapien
cacagcggactttcccagagtcatg

SEQ ID NO: 4934153 - DNA, 25 bp, Homo sapien
tatctggcacacagcggactttccc

SEQ ID NO: 4934154 - DNA, 25 bp, Homo sapien
tctggtatctggcacacagcggact

SEQ ID NO: 4934155 - DNA, 25 bp, Homo sapien
cacacagcggactttcccagagtca

SEQ ID NO: 4934156 - DNA, 25 bp, Homo sapien
cgcggggatacagtttctggctctt

SEQ ID NO: 4934157 - DNA, 25 bp, Homo sapien
gagtcataggtaccatgggcgcggg

SEQ ID NO: 4934158 - DNA, 25 bp, Homo sapien
aataagatgggggagtcataggtac

SEQ ID NO: 4934159 - DNA, 25 bp, Homo sapien
cagagtctctttggtgaataagatg

SEQ ID NO: 4934160 - DNA, 25 bp, Homo sapien
aatcattgacgcatctgcctcagga

SEQ ID NO: 4934161 - DNA, 25 bp, Homo sapien
caggtaggcccgattggcttccagg

SEQ ID NO: 4934162 - DNA, 25 bp, Homo sapien
aggagaccaggtaggcccgattggc

SEQ ID NO: 4934163 - DNA, 25 bp, Homo sapien
cgcctctcagagacatgaacaaata

SEQ ID NO: 4934164 - DNA, 25 bp, Homo sapien
cttcctcggccagtggcagccgtga

SEQ ID NO: 4934165 - DNA, 25 bp, Homo sapien
ctgctccggctgttgtgaggctgct

SEQ ID NO: 4934166 - DNA, 25 bp, Homo sapien
cgtgagagtgaacgggccttggact

SEQ ID NO: 4934167 - DNA, 25 bp, Homo sapien
gctccggctgttgtgaggctgctct

SEQ ID NO: 4934168 - DNA, 25 bp, Homo sapien
cctcagcttggcctccacgccactc

SEQ ID NO: 4934169 - DNA, 25 bp, Homo sapien
aatccctcagcttggcctccacgcc

SEQ ID NO: 4934170 - DNA, 25 bp, Homo sapien
aaaatccctcagcttggcctccacg

SEQ ID NO: 4934171 - DNA, 25 bp, Homo sapien
acaaaatccctcagcttggcctcca

SEQ ID NO: 4934172 - DNA, 25 bp, Homo sapien
gcagctcggtgcacagcggtgactc

SEQ ID NO: 4934173 - DNA, 25 bp, Homo sapien
gcacgtggcatcagacgcaggcagc

SEQ ID NO: 4934174 - DNA, 25 bp, Homo sapien
cacggccacacaggggcacgtggca

SEQ ID NO: 4934175 - DNA, 25 bp, Homo sapien
acagcggtgactcctcctggactct

SEQ ID NO: 4934176 - DNA, 25 bp, Homo sapien
agcatgcatgaggactgtcagagcc

SEQ ID NO: 4934177 - DNA, 25 bp, Homo sapien
gagcatgcatgaggactgtcagagc

SEQ ID NO: 4934178 - DNA, 25 bp, Homo sapien
tgagcatgcatgaggactgtcagag

SEQ ID NO: 4934179 - DNA, 25 bp, Homo sapien
cagagcacatcccctctccagtggc

SEQ ID NO: 4934180 - DNA, 25 bp, Homo sapien
agcaccccagagcacatcccctctc

SEQ ID NO: 4934181 - DNA, 25 bp, Homo sapien
cccagagcacatcccctctccagtg

SEQ ID NO: 4934182 - DNA, 25 bp, Homo sapien
accccagagcacatcccctctccag

SEQ ID NO: 4934183 - DNA, 25 bp, Homo sapien
agacagtgcgtcttcacgttttccc

SEQ ID NO: 4934184 - DNA, 25 bp, Homo sapien
ggtctgttcaaaaccactcgatttg

SEQ ID NO: 4934185 - DNA, 25 bp, Homo sapien
aaaaccactcgatttgtgggctcca

SEQ ID NO: 4934186 - DNA, 25 bp, Homo sapien
cggtgaagacccctgcttttgtggg

SEQ ID NO: 4934187 - DNA, 25 bp, Homo sapien
cggatcgaaaggtggcgccacacgg

SEQ ID NO: 4934188 - DNA, 25 bp, Homo sapien
ggcgccacacggagcacacatgtct

SEQ ID NO: 4934189 - DNA, 25 bp, Homo sapien
acacatgtctgtacaatgacctagg

SEQ ID NO: 4934190 - DNA, 25 bp, Homo sapien
gagcacacatgtctgtacaatgacc

SEQ ID NO: 4934191 - DNA, 25 bp, Homo sapien
tgagcttttgtcagtagtctgggaa

SEQ ID NO: 4934192 - DNA, 25 bp, Homo sapien
tgcaaagtccgtagccttcctggct

SEQ ID NO: 4934193 - DNA, 25 bp, Homo sapien
ccggagaagacacgccaaatgagct

SEQ ID NO: 4934194 - DNA, 25 bp, Homo sapien
ttctcccggagaagacacgccaaat

SEQ ID NO: 4934195 - DNA, 25 bp, Homo sapien
tcaaggttccacgctctggatttca

SEQ ID NO: 4934196 - DNA, 25 bp, Homo sapien
aaggttccacgctctggatttcacc

SEQ ID NO: 4934197 - DNA, 25 bp, Homo sapien
caaggttccacgctctggatttcac

SEQ ID NO: 4934198 - DNA, 25 bp, Homo sapien
ttctgcagtcgtctattcctgtggg

SEQ ID NO: 4934199 - DNA, 25 bp, Homo sapien
tccaggaaatataaggttctaatag

SEQ ID NO: 4934200 - DNA, 25 bp, Homo sapien
gggccatgcctttcatcatttgatt

SEQ ID NO: 4934201 - DNA, 25 bp, Homo sapien
tgctattgaacacctttggtgccag

SEQ ID NO: 4934202 - DNA, 25 bp, Homo sapien
ccactgcccacagcgccttcttcat

SEQ ID NO: 4934203 - DNA, 25 bp, Homo sapien
tgaggatggactcccaagcctggcc

SEQ ID NO: 4934204 - DNA, 25 bp, Homo sapien
ccacgatggtgaattgggtggtttt

SEQ ID NO: 4934205 - DNA, 25 bp, Homo sapien
agcctggtcggcctgagttgagagc

SEQ ID NO: 4934206 - DNA, 25 bp, Homo sapien
tgttgactctgagggcctggtctgc

SEQ ID NO: 4934207 - DNA, 25 bp, Homo sapien
gccacttcctggagaccacgatggt

SEQ ID NO: 4934208 - DNA, 25 bp, Homo sapien
tacagcgagaacgtgccctttcatc

SEQ ID NO: 4934209 - DNA, 25 bp, Homo sapien
ggctttgcagagagacatgtcccta

SEQ ID NO: 4934210 - DNA, 25 bp, Homo sapien
tgaatacattcagagctcagactgc

SEQ ID NO: 4934211 - DNA, 25 bp, Homo sapien
gaatggctgctacgagttgctgaat

SEQ ID NO: 4934212 - DNA, 25 bp, Homo sapien
gttcaggtgcaagctagcaggccca

SEQ ID NO: 4934213 - DNA, 25 bp, Homo sapien
taggttgttatttccgagccctgcc

SEQ ID NO: 4934214 - DNA, 25 bp, Homo sapien
cctgaggttctcccatgtagaggaa

SEQ ID NO: 4934215 - DNA, 25 bp, Homo sapien
gcaactgttttgcaggacagctcac

SEQ ID NO: 4934216 - DNA, 25 bp, Homo sapien
ggtgaaagctgtcgggaccaggtgg

SEQ ID NO: 4934217 - DNA, 25 bp, Homo sapien
gtgaaagctgtcgggaccaggtggg

SEQ ID NO: 4934218 - DNA, 25 bp, Homo sapien
aggtgaaagctgtcgggaccaggtg

SEQ ID NO: 4934219 - DNA, 25 bp, Homo sapien
gactcctgaaccagctcgtcctgga

SEQ ID NO: 4934220 - DNA, 25 bp, Homo sapien
gccagccacccatcgattctgggtg

SEQ ID NO: 4934221 - DNA, 25 bp, Homo sapien
gtgtggctgggcaccccaaatgttg

SEQ ID NO: 4934222 - DNA, 25 bp, Homo sapien
ggtactgaaggtcatcacgggaaac

SEQ ID NO: 4934223 - DNA, 25 bp, Homo sapien
gggatatgcccgctctgctgagcac

SEQ ID NO: 4934224 - DNA, 25 bp, Homo sapien
agccctctgtggctattgcattgga

SEQ ID NO: 4934225 - DNA, 25 bp, Homo sapien
ctgtggtggtgtgaccggcgggctc

SEQ ID NO: 4934226 - DNA, 25 bp, Homo sapien
tgggcagccttcttgtctggacagc

SEQ ID NO: 4934227 - DNA, 25 bp, Homo sapien
tgggttccacgtgtgctggctcgtt

SEQ ID NO: 4934228 - DNA, 25 bp, Homo sapien
ggcctccgtcctcatcgtgggagat

SEQ ID NO: 4934229 - DNA, 25 bp, Homo sapien
tcctcatcgtgggagatgcaggaag

SEQ ID NO: 4934230 - DNA, 25 bp, Homo sapien
gagtcggattcgcttttgcaaaaag

SEQ ID NO: 4934231 - DNA, 25 bp, Homo sapien
tgtaaatccttagagggcagagtga

SEQ ID NO: 4934232 - DNA, 25 bp, Homo sapien
ggctacgagaaacacggcacgtctt

SEQ ID NO: 4934233 - DNA, 25 bp, Homo sapien
cccacagggcctgtagcatcagtaa

SEQ ID NO: 4934234 - DNA, 25 bp, Homo sapien
cagagtgagtttaactcccacaggg

SEQ ID NO: 4934235 - DNA, 25 bp, Homo sapien
gagcagggtgcgtccaggtctgcgg

SEQ ID NO: 4934236 - DNA, 25 bp, Homo sapien
tgcgtccaggtctgcggcacgccgt

SEQ ID NO: 4934237 - DNA, 25 bp, Homo sapien
gcacgccgtgaggatgtggatctcc

SEQ ID NO: 4934238 - DNA, 25 bp, Homo sapien
gcatggttgtgttgggtctgaaaga

SEQ ID NO: 4934239 - DNA, 25 bp, Homo sapien
ccagtgggagcgttttcttcagtga

SEQ ID NO: 4934240 - DNA, 25 bp, Homo sapien
tgtcgtagtgcccaacatggctcag

SEQ ID NO: 4934241 - DNA, 25 bp, Homo sapien
tctgggacccagttggacgactctg

SEQ ID NO: 4934242 - DNA, 25 bp, Homo sapien
gagcgtgacttcgtgtgcccatgag

SEQ ID NO: 4934243 - DNA, 25 bp, Homo sapien
tgtggttgagccctccggtttctgg

SEQ ID NO: 4934244 - DNA, 25 bp, Homo sapien
gttttgcaggaaagagcctggcctc

SEQ ID NO: 4934245 - DNA, 25 bp, Homo sapien
tggcctctggagttaaagtggctcc

SEQ ID NO: 4934246 - DNA, 25 bp, Homo sapien
cagtctggcagacgggctcttgagc

SEQ ID NO: 4934247 - DNA, 25 bp, Homo sapien
gcctcgtcaacagggatgcttttcc

SEQ ID NO: 4934248 - DNA, 25 bp, Homo sapien
aataataagtacatgcaaacaccct

SEQ ID NO: 4934249 - DNA, 25 bp, Homo sapien
tattaccgcaaagcgggagcatgcc

SEQ ID NO: 4934250 - DNA, 25 bp, Homo sapien
cttactgcatatcttgggaaacttc

SEQ ID NO: 4934251 - DNA, 25 bp, Homo sapien
ggtctagtttgggaaatcggtcatg

SEQ ID NO: 4934252 - DNA, 25 bp, Homo sapien
atcggtcatggccacaagtatctga

SEQ ID NO: 4934253 - DNA, 25 bp, Homo sapien
ccacaagtatctgaagcccagggtg

SEQ ID NO: 4934254 - DNA, 25 bp, Homo sapien
gggaaatcggtcatggccacaagta

SEQ ID NO: 4934255 - DNA, 25 bp, Homo sapien
caggcaagatttgcagcagtgagcc

SEQ ID NO: 4934256 - DNA, 25 bp, Homo sapien
ttgggtctctcacaccagggagctc

SEQ ID NO: 4934257 - DNA, 25 bp, Homo sapien
cttctgtccagttgggtctctcaca

SEQ ID NO: 4934258 - DNA, 25 bp, Homo sapien
ttggcagcgcgtcccactgtgtgac

SEQ ID NO: 4934259 - DNA, 25 bp, Homo sapien
tttctgtctttctgttgggtctttc

SEQ ID NO: 4934260 - DNA, 25 bp, Homo sapien
gtttctgataatctttctgtctttc

SEQ ID NO: 4934261 - DNA, 25 bp, Homo sapien
tgtctttctgttgggtctttctgat

SEQ ID NO: 4934262 - DNA, 25 bp, Homo sapien
tctgtctttctgttgggtctttctg

SEQ ID NO: 4934263 - DNA, 25 bp, Homo sapien
ctcccagcgtctatgctgggtcttg

SEQ ID NO: 4934264 - DNA, 25 bp, Homo sapien
gtctatgctgggtcttgggtctttc

SEQ ID NO: 4934265 - DNA, 25 bp, Homo sapien
cgtctatgctgggtcttgggtcttt

SEQ ID NO: 4934266 - DNA, 25 bp, Homo sapien
cagcgtctatgctgggtcttgggtc

SEQ ID NO: 4934267 - DNA, 25 bp, Homo sapien
tgaagatgccattttgaaaagttgg

SEQ ID NO: 4934268 - DNA, 25 bp, Homo sapien
cgaggcatgaagatgccattttgaa

SEQ ID NO: 4934269 - DNA, 25 bp, Homo sapien
gccattttgaaaagttggagagagt

SEQ ID NO: 4934270 - DNA, 25 bp, Homo sapien
tggagagagttttcagaaggattgt

SEQ ID NO: 4934271 - DNA, 25 bp, Homo sapien
catgttagtgacaggttctaatggc

SEQ ID NO: 4934272 - DNA, 25 bp, Homo sapien
taatggccacctatcagtgccgggc

SEQ ID NO: 4934273 - DNA, 25 bp, Homo sapien
aaaggccccactcggagcagtattg

SEQ ID NO: 4934274 - DNA, 25 bp, Homo sapien
cggtggtgctctcgtctttggatca

SEQ ID NO: 4934275 - DNA, 25 bp, Homo sapien
agttccacgttgctggagaagcctc

SEQ ID NO: 4934276 - DNA, 25 bp, Homo sapien
ttccacgttgctggagaagcctcac

SEQ ID NO: 4934277 - DNA, 25 bp, Homo sapien
gaagcctcacaatcatgatgaaggc

SEQ ID NO: 4934278 - DNA, 25 bp, Homo sapien
aggcaaggaggagcaagtcacgtct

SEQ ID NO: 4934279 - DNA, 25 bp, Homo sapien
ctggtggggaggagccaggaggagg

SEQ ID NO: 4934280 - DNA, 25 bp, Homo sapien
gggggctcaggtttaggggctgtgc

SEQ ID NO: 4934281 - DNA, 25 bp, Homo sapien
agggggctcaggtttaggggctgtg

SEQ ID NO: 4934282 - DNA, 25 bp, Homo sapien
ggaggagccaggaggagggggctca

SEQ ID NO: 4934283 - DNA, 25 bp, Homo sapien
cctccatgggaaagcctctcgcagt

SEQ ID NO: 4934284 - DNA, 25 bp, Homo sapien
ctgcacacaatgcagcagtgtcttc

SEQ ID NO: 4934285 - DNA, 25 bp, Homo sapien
ggctctcgccttccatcacgcaggc

SEQ ID NO: 4934286 - DNA, 25 bp, Homo sapien
cagttttccgggttaacagtcacag

SEQ ID NO: 4934287 - DNA, 25 bp, Homo sapien
cattgaatttagagcaaggtcacct

SEQ ID NO: 4934288 - DNA, 25 bp, Homo sapien
attgaatttagagcaaggtcaccta

SEQ ID NO: 4934289 - DNA, 25 bp, Homo sapien
ttgaatttagagcaaggtcacctac

SEQ ID NO: 4934290 - DNA, 25 bp, Homo sapien
ttatggagccatcaaggcactcagc

SEQ ID NO: 4934291 - DNA, 25 bp, Homo sapien
ctcattgagaaagccgttatggagc

SEQ ID NO: 4934292 - DNA, 25 bp, Homo sapien
gcatgaatgtggcatcaaggcgtcg

SEQ ID NO: 4934293 - DNA, 25 bp, Homo sapien
cactcagctgatcgtggcctgtggc

SEQ ID NO: 4934294 - DNA, 25 bp, Homo sapien
ccaggacgaggagggatgtgccgtc

SEQ ID NO: 4934295 - DNA, 25 bp, Homo sapien
gagggatgtgccgtcctgtgcaaac

SEQ ID NO: 4934296 - DNA, 25 bp, Homo sapien
gatgtgccgtcctgtgcaaaccaca

SEQ ID NO: 4934297 - DNA, 25 bp, Homo sapien
tgtgcaaaccacacctgcaggtggg

SEQ ID NO: 4934298 - DNA, 25 bp, Homo sapien
acagaagcaagtagtggtggagacc

SEQ ID NO: 4934299 - DNA, 25 bp, Homo sapien
taggtcatctccttagcgcctcagc

SEQ ID NO: 4934300 - DNA, 25 bp, Homo sapien
ccggccccgcatctggtatttgaaa

SEQ ID NO: 4934301 - DNA, 25 bp, Homo sapien
taactctgccgtcagagatgaacag

SEQ ID NO: 4934302 - DNA, 25 bp, Homo sapien
ttgcaaaacagcataggctggtgtt

SEQ ID NO: 4934303 - DNA, 25 bp, Homo sapien
ttctttgcaaaacagcataggctgg

SEQ ID NO: 4934304 - DNA, 25 bp, Homo sapien
ttggcatcgtacttctttgcaaaac

SEQ ID NO: 4934305 - DNA, 25 bp, Homo sapien
tcacttggcatcgtacttctttgca

SEQ ID NO: 4934306 - DNA, 25 bp, Homo sapien
cattgatccggagaagtgcaagcga

SEQ ID NO: 4934307 - DNA, 25 bp, Homo sapien
atgtcgggcacttccacgctgagaa

SEQ ID NO: 4934308 - DNA, 25 bp, Homo sapien
tctggctgagtcctaaagggcaagg

SEQ ID NO: 4934309 - DNA, 25 bp, Homo sapien
ccagccaggctgacagatcgaggaa

SEQ ID NO: 4934310 - DNA, 25 bp, Homo sapien
tcaggcaggatcagtgcctgatact

SEQ ID NO: 4934311 - DNA, 25 bp, Homo sapien
ttctcaggcaggatcagtgcctgat

SEQ ID NO: 4934312 - DNA, 25 bp, Homo sapien
aggcaggatcagtgcctgatactgc

SEQ ID NO: 4934313 - DNA, 25 bp, Homo sapien
tgtgtgtcttaacttggtcaacact

SEQ ID NO: 4934314 - DNA, 25 bp, Homo sapien
aaaacactcctgccaatttctcttg

SEQ ID NO: 4934315 - DNA, 25 bp, Homo sapien
aaacactcctgccaatttctcttgc

SEQ ID NO: 4934316 - DNA, 25 bp, Homo sapien
aaaaacactcctgccaatttctctt

SEQ ID NO: 4934317 - DNA, 25 bp, Homo sapien
tgtagggcttgactctgctggttct

SEQ ID NO: 4934318 - DNA, 25 bp, Homo sapien
tgctggttctgtggtttctgatgag

SEQ ID NO: 4934319 - DNA, 25 bp, Homo sapien
catctgcagctcttctacaaaagct

SEQ ID NO: 4934320 - DNA, 25 bp, Homo sapien
caaaagctgttgtagggcttgactc

SEQ ID NO: 4934321 - DNA, 25 bp, Homo sapien
tcagacgtgcttcgtcagggaagcc

SEQ ID NO: 4934322 - DNA, 25 bp, Homo sapien
cagacgtgcttcgtcagggaagcca

SEQ ID NO: 4934323 - DNA, 25 bp, Homo sapien
tggcctgcaacaatagtttgttcct

SEQ ID NO: 4934324 - DNA, 25 bp, Homo sapien
tcctttttgtagttgagtatttcat

SEQ ID NO: 4934325 - DNA, 25 bp, Homo sapien
acgtggttggcctgcaacaatagtt

SEQ ID NO: 4934326 - DNA, 25 bp, Homo sapien
tatgtatgcattcgcctgttgatgg

SEQ ID NO: 4934327 - DNA, 25 bp, Homo sapien
tagggaccgaggagaatcaacagac

SEQ ID NO: 4934328 - DNA, 25 bp, Homo sapien
tgcaaggcgttgtcttagggaccga

SEQ ID NO: 4934329 - DNA, 25 bp, Homo sapien
cgtctcccgtaagcaacatcgaggg

SEQ ID NO: 4934330 - DNA, 25 bp, Homo sapien
caacagactgtgatgcaagggactg

SEQ ID NO: 4934331 - DNA, 25 bp, Homo sapien
aaacacgtatattgatggccttctg

SEQ ID NO: 4934332 - DNA, 25 bp, Homo sapien
gctgctcctgaggactgcacctaca

SEQ ID NO: 4934333 - DNA, 25 bp, Homo sapien
ctgttcataacagagaagtgtagag

SEQ ID NO: 4934334 - DNA, 25 bp, Homo sapien
aatcggcagaatccacgcacagtgc

SEQ ID NO: 4934335 - DNA, 25 bp, Homo sapien
gggcaccaccgagtgcagagtcaat

SEQ ID NO: 4934336 - DNA, 25 bp, Homo sapien
tcaacagtgttgctgtcgtcgtgat

SEQ ID NO: 4934337 - DNA, 25 bp, Homo sapien
tccttccctgttttgagcgtctcct

SEQ ID NO: 4934338 - DNA, 25 bp, Homo sapien
caatgagctaatgcaggtgtccagc

SEQ ID NO: 4934339 - DNA, 25 bp, Homo sapien
gatagccccgtagcatgcagagaaa

SEQ ID NO: 4934340 - DNA, 25 bp, Homo sapien
caaatcgtggagatccgcactggtc

SEQ ID NO: 4934341 - DNA, 25 bp, Homo sapien
tgtatgctcggctctactgcagctg

SEQ ID NO: 4934342 - DNA, 25 bp, Homo sapien
caggccatcgtcagctgctatagag

SEQ ID NO: 4934343 - DNA, 25 bp, Homo sapien
gaattgtattattgctcttaggtgc

SEQ ID NO: 4934344 - DNA, 25 bp, Homo sapien
gagcgaggccccgtggtgcgggact

SEQ ID NO: 4934345 - DNA, 25 bp, Homo sapien
gtaaggtcaatgcttctgagcacca

SEQ ID NO: 4934346 - DNA, 25 bp, Homo sapien
tgctcttgtaatgctggacaaattc

SEQ ID NO: 4934347 - DNA, 25 bp, Homo sapien
gaaagaaagggagccataccacgtg

SEQ ID NO: 4934348 - DNA, 25 bp, Homo sapien
ggagtcaggtcagccaacatcttgt

SEQ ID NO: 4934349 - DNA, 25 bp, Homo sapien
ccgcgcccagtgtctacatgacatt

SEQ ID NO: 4934350 - DNA, 25 bp, Homo sapien
cttgtacttatgacgggagaaagaa

SEQ ID NO: 4934351 - DNA, 25 bp, Homo sapien
gaaagcatttgtgcaccggagcaga

SEQ ID NO: 4934352 - DNA, 25 bp, Homo sapien
tgtaatttaccggagctcacacggc

SEQ ID NO: 4934353 - DNA, 25 bp, Homo sapien
cacgcggtgcagagatctgggcaaa

SEQ ID NO: 4934354 - DNA, 25 bp, Homo sapien
tcagagcactgttccctagggcatg

SEQ ID NO: 4934355 - DNA, 25 bp, Homo sapien
agagcgtgtgtggagccctggtggc

SEQ ID NO: 4934356 - DNA, 25 bp, Homo sapien
ccacagcgggcaccagagcgtgtgt

SEQ ID NO: 4934357 - DNA, 25 bp, Homo sapien
gctcagcgatggctttgtcaagcgc

SEQ ID NO: 4934358 - DNA, 25 bp, Homo sapien
ctttgtcaagcgctggccagagaag

SEQ ID NO: 4934359 - DNA, 25 bp, Homo sapien
aaatatagcccttagcgaagtatgg

SEQ ID NO: 4934360 - DNA, 25 bp, Homo sapien
cgaagtatggtggagttgcctgctc

SEQ ID NO: 4934361 - DNA, 25 bp, Homo sapien
tcatgtttgaatggcccttgtgtcc

SEQ ID NO: 4934362 - DNA, 25 bp, Homo sapien
ccagcagaggtgttatctcttccag

SEQ ID NO: 4934363 - DNA, 25 bp, Homo sapien
tgcaggcctgcagcttcaaacagga

SEQ ID NO: 4934364 - DNA, 25 bp, Homo sapien
gacctggacgggttgggagcagatc

SEQ ID NO: 4934365 - DNA, 25 bp, Homo sapien
aacaggagcctttgtggacctggac

SEQ ID NO: 4934366 - DNA, 25 bp, Homo sapien
tgcagcttcaaacaggagcctttgt

SEQ ID NO: 4934367 - DNA, 25 bp, Homo sapien
gcccagtccagctcgcaggtatatt

SEQ ID NO: 4934368 - DNA, 25 bp, Homo sapien
aggccgtggcggatcctgtaagaca

SEQ ID NO: 4934369 - DNA, 25 bp, Homo sapien
gatgtgttccaaccaaacgacggga

SEQ ID NO: 4934370 - DNA, 25 bp, Homo sapien
cgacgggaatcccagacgtgtggcc

SEQ ID NO: 4934371 - DNA, 25 bp, Homo sapien
tcctctctggctgatttggtcatag

SEQ ID NO: 4934372 - DNA, 25 bp, Homo sapien
ggacgttggccaaggtgcctgtggc

SEQ ID NO: 4934373 - DNA, 25 bp, Homo sapien
ggaagagggacgttggccaaggtgc

SEQ ID NO: 4934374 - DNA, 25 bp, Homo sapien
tctggctgatttggtcatagcttct

SEQ ID NO: 4934375 - DNA, 25 bp, Homo sapien
cacggcctgaaggaggtgcttgtcc

SEQ ID NO: 4934376 - DNA, 25 bp, Homo sapien
gcctgaaggaggtgcttgtcctcca

SEQ ID NO: 4934377 - DNA, 25 bp, Homo sapien
cctcagcacggcctgaaggaggtgc

SEQ ID NO: 4934378 - DNA, 25 bp, Homo sapien
tcagcacggcctgaaggaggtgctt

SEQ ID NO: 4934379 - DNA, 25 bp, Homo sapien
caagcttccggactagggtggctgt

SEQ ID NO: 4934380 - DNA, 25 bp, Homo sapien
tgggctggcccaagcttccggacta

SEQ ID NO: 4934381 - DNA, 25 bp, Homo sapien
gtttccatggcaaccctcttggcct

SEQ ID NO: 4934382 - DNA, 25 bp, Homo sapien
gtggctgttggactcattggaactg

SEQ ID NO: 4934383 - DNA, 25 bp, Homo sapien
gccacctggaaactggggtcggcaa

SEQ ID NO: 4934384 - DNA, 25 bp, Homo sapien
caaagactgtgagtctcatggagac

SEQ ID NO: 4934385 - DNA, 25 bp, Homo sapien
tcagagctgtgggaacggtgtggtt

SEQ ID NO: 4934386 - DNA, 25 bp, Homo sapien
gggtcggcaaagactgtgagtctca

SEQ ID NO: 4934387 - DNA, 25 bp, Homo sapien
tgctgtgctgtttccgtagcccggg

SEQ ID NO: 4934388 - DNA, 25 bp, Homo sapien
gctgtagcatgaaggtgtgcttaat

SEQ ID NO: 4934389 - DNA, 25 bp, Homo sapien
gctttgcaggtatgctgtagcatga

SEQ ID NO: 4934390 - DNA, 25 bp, Homo sapien
tatgctgtagcatgaaggtgtgctt

SEQ ID NO: 4934391 - DNA, 25 bp, Homo sapien
tgcaggtatgctgtagcatgaaggt

SEQ ID NO: 4934392 - DNA, 25 bp, Homo sapien
tggccccgagtccagtggatcagta

SEQ ID NO: 4934393 - DNA, 25 bp, Homo sapien
ccagtggatcagtaggagagcaaca

SEQ ID NO: 4934394 - DNA, 25 bp, Homo sapien
ggtacgataggatagatcagctgca

SEQ ID NO: 4934395 - DNA, 25 bp, Homo sapien
caacagccccagttaggctcggtac

SEQ ID NO: 4934396 - DNA, 25 bp, Homo sapien
cttcccttcagccttacatgatgct

SEQ ID NO: 4934397 - DNA, 25 bp, Homo sapien
ggaccgagttctgcagttcccagca

SEQ ID NO: 4934398 - DNA, 25 bp, Homo sapien
tctctttgggcatcgctggcgcctg

SEQ ID NO: 4934399 - DNA, 25 bp, Homo sapien
tggcgcctgtttccgaggtgcttcc

SEQ ID NO: 4934400 - DNA, 25 bp, Homo sapien
taaacgtttgtctatgcagggccac

SEQ ID NO: 4934401 - DNA, 25 bp, Homo sapien
tgatcacagatcttgcagggacggc

SEQ ID NO: 4934402 - DNA, 25 bp, Homo sapien
tccacctgcgctctagttgttgaag

SEQ ID NO: 4934403 - DNA, 25 bp, Homo sapien
tttcctcttggacggatgcctcaga

SEQ ID NO: 4934404 - DNA, 25 bp, Homo sapien
caagtgcctctgtcttcatgattac

SEQ ID NO: 4934405 - DNA, 25 bp, Homo sapien
caattcctgacatctagtaggccag

SEQ ID NO: 4934406 - DNA, 25 bp, Homo sapien
tctggtccaagcatactcaacctgt

SEQ ID NO: 4934407 - DNA, 25 bp, Homo sapien
tgaacataacgtgggttgagcatcc

SEQ ID NO: 4934408 - DNA, 25 bp, Homo sapien
gggtctcggcactgtccaaccatag

SEQ ID NO: 4934409 - DNA, 25 bp, Homo sapien
caagtgcccgctgacagacgaatgg

SEQ ID NO: 4934410 - DNA, 25 bp, Homo sapien
tagagaatacccgtatgattcagaa

SEQ ID NO: 4934411 - DNA, 25 bp, Homo sapien
gagtaagacacagtacatacatgta

SEQ ID NO: 4934412 - DNA, 25 bp, Homo sapien
atctgaagcctcttcgagggcctca

SEQ ID NO: 4934413 - DNA, 25 bp, Homo sapien
cgggattcttaagtctccatctgaa

SEQ ID NO: 4934414 - DNA, 25 bp, Homo sapien
gggcctcacattcgctcttagacat

SEQ ID NO: 4934415 - DNA, 25 bp, Homo sapien
tgcagaacccgggattcttaagtct

SEQ ID NO: 4934416 - DNA, 25 bp, Homo sapien
gattcccggtgaagtcacagtgccc

SEQ ID NO: 4934417 - DNA, 25 bp, Homo sapien
cacgtggagcaaggcatcgaaagac

SEQ ID NO: 4934418 - DNA, 25 bp, Homo sapien
acagtgccctgtcctttatcagtgg

SEQ ID NO: 4934419 - DNA, 25 bp, Homo sapien
aagacgcttcttcaggccgattccc

SEQ ID NO: 4934420 - DNA, 25 bp, Homo sapien
ttgactgtttcccccttttcatgga

SEQ ID NO: 4934421 - DNA, 25 bp, Homo sapien
tcttgactgtttcccccttttcatg

SEQ ID NO: 4934422 - DNA, 25 bp, Homo sapien
gactgtttcccccttttcatggaca

SEQ ID NO: 4934423 - DNA, 25 bp, Homo sapien
ctcttgactgtttcccccttttcat

SEQ ID NO: 4934424 - DNA, 25 bp, Homo sapien
tctgttgaacgtttccacctttcca

SEQ ID NO: 4934425 - DNA, 25 bp, Homo sapien
aatgccagcgccagcatcaaatgtt

SEQ ID NO: 4934426 - DNA, 25 bp, Homo sapien
gtagttgtcgaaggtaaatgccagc

SEQ ID NO: 4934427 - DNA, 25 bp, Homo sapien
gtggacacctctgttgaacgtttcc

SEQ ID NO: 4934428 - DNA, 25 bp, Homo sapien
atggaagagacaggaccggtgggcc

SEQ ID NO: 4934429 - DNA, 25 bp, Homo sapien
cctagctccttaactttcatcaggc

SEQ ID NO: 4934430 - DNA, 25 bp, Homo sapien
cctgactcttgttctgccagtcgag

SEQ ID NO: 4934431 - DNA, 25 bp, Homo sapien
ggacagctgatgtccatggaagaga

SEQ ID NO: 4934432 - DNA, 25 bp, Homo sapien
gaagccaacagagggtttagagcag

SEQ ID NO: 4934433 - DNA, 25 bp, Homo sapien
caacagagggtttagagcagcgttc

SEQ ID NO: 4934434 - DNA, 25 bp, Homo sapien
agccaacagagggtttagagcagcg

SEQ ID NO: 4934435 - DNA, 25 bp, Homo sapien
gccaacagagggtttagagcagcgt

SEQ ID NO: 4934436 - DNA, 25 bp, Homo sapien
cttctagccagcgtgacagaagctg

SEQ ID NO: 4934437 - DNA, 25 bp, Homo sapien
tccgccgaggagcatgtgttttgtg

SEQ ID NO: 4934438 - DNA, 25 bp, Homo sapien
tgagcttctgcatgcgtgtttctga

SEQ ID NO: 4934439 - DNA, 25 bp, Homo sapien
cccgtgcactgcaggtggattgact

SEQ ID NO: 4934440 - DNA, 25 bp, Homo sapien
tgaccatccgccctggagtctgagg

SEQ ID NO: 4934441 - DNA, 25 bp, Homo sapien
atgttgtccttcagcagaggctgtg

SEQ ID NO: 4934442 - DNA, 25 bp, Homo sapien
tcagcaccaactgggtgttgttgtt

SEQ ID NO: 4934443 - DNA, 25 bp, Homo sapien
gcccctcagcaccaactgggtgttg

SEQ ID NO: 4934444 - DNA, 25 bp, Homo sapien
tgctgttgttctccatgttgtcctt

SEQ ID NO: 4934445 - DNA, 25 bp, Homo sapien
gagtcattgtcatcattgtcattat

SEQ ID NO: 4934446 - DNA, 25 bp, Homo sapien
gtacaaggtggagtcattgtcatca

SEQ ID NO: 4934447 - DNA, 25 bp, Homo sapien
agtcattgtcatcattgtcattatc

SEQ ID NO: 4934448 - DNA, 25 bp, Homo sapien
cctgtacaaggtggagtcattgtca

SEQ ID NO: 4934449 - DNA, 25 bp, Homo sapien
tgtgttccgggcaccgagggtataa

SEQ ID NO: 4934450 - DNA, 25 bp, Homo sapien
ggtggtactgacgaactggttggag

SEQ ID NO: 4934451 - DNA, 25 bp, Homo sapien
cagcttctcgtgtttccttttggta

SEQ ID NO: 4934452 - DNA, 25 bp, Homo sapien
tgattcctgccttcgactagagggg

SEQ ID NO: 4934453 - DNA, 25 bp, Homo sapien
ggtgggcagaacacatcaccgaggg

SEQ ID NO: 4934454 - DNA, 25 bp, Homo sapien
cccgcagtgtccacagtgtgccttc

SEQ ID NO: 4934455 - DNA, 25 bp, Homo sapien
tcttcatgcttgatgagaggtgggc

SEQ ID NO: 4934456 - DNA, 25 bp, Homo sapien
gggcagaacacatcaccgagggccg

SEQ ID NO: 4934457 - DNA, 25 bp, Homo sapien
caaggactgtttcggtgacttccgt

SEQ ID NO: 4934458 - DNA, 25 bp, Homo sapien
taattccttgtacggaatggccaca

SEQ ID NO: 4934459 - DNA, 25 bp, Homo sapien
tgtagtgggagctcatcatacttgt

SEQ ID NO: 4934460 - DNA, 25 bp, Homo sapien
tggccacaaaccctctctgtacgag

SEQ ID NO: 4934461 - DNA, 25 bp, Homo sapien
tcactggagagtgtcaccgaaggcc

SEQ ID NO: 4934462 - DNA, 25 bp, Homo sapien
accgaaggcccactgacgagcaagg

SEQ ID NO: 4934463 - DNA, 25 bp, Homo sapien
actgacgagcaagggccacacacac

SEQ ID NO: 4934464 - DNA, 25 bp, Homo sapien
gcagctcttttcgaggctctccggg

SEQ ID NO: 4934465 - DNA, 25 bp, Homo sapien
tgcacgagttgtaaagcaaggatgc

SEQ ID NO: 4934466 - DNA, 25 bp, Homo sapien
ggatgcacgagttgtaaagcaagga

SEQ ID NO: 4934467 - DNA, 25 bp, Homo sapien
gcacgagttgtaaagcaaggatgca

SEQ ID NO: 4934468 - DNA, 25 bp, Homo sapien
aaggatgcacgagttgtaaagcaag

SEQ ID NO: 4934469 - DNA, 25 bp, Homo sapien
gaaagaacagtgtctgtggactttt

SEQ ID NO: 4934470 - DNA, 25 bp, Homo sapien
tggctttttcagaaagaacagtgtc

SEQ ID NO: 4934471 - DNA, 25 bp, Homo sapien
tcagaaagaacagtgtctgtggact

SEQ ID NO: 4934472 - DNA, 25 bp, Homo sapien
ttttcagaaagaacagtgtctgtgg

SEQ ID NO: 4934473 - DNA, 25 bp, Homo sapien
tagcctgacaggtgtggccacggca

SEQ ID NO: 4934474 - DNA, 25 bp, Homo sapien
tagagtgaccactggattgggcttc

SEQ ID NO: 4934475 - DNA, 25 bp, Homo sapien
gcgttgaagacctgctgaagcctcc

SEQ ID NO: 4934476 - DNA, 25 bp, Homo sapien
agctttgaggaactgccggccatgg

SEQ ID NO: 4934477 - DNA, 25 bp, Homo sapien
caggtgcatgttataaagctgtcat

SEQ ID NO: 4934478 - DNA, 25 bp, Homo sapien
tctgtcaggtgcatgttataaagct

SEQ ID NO: 4934479 - DNA, 25 bp, Homo sapien
catctgtcaggtgcatgttataaag

SEQ ID NO: 4934480 - DNA, 25 bp, Homo sapien
gtcaggtgcatgttataaagctgtc

SEQ ID NO: 4934481 - DNA, 25 bp, Homo sapien
cattcttatcctgccgactgtggca

SEQ ID NO: 4934482 - DNA, 25 bp, Homo sapien
cagctgggcattcttatcctgccga

SEQ ID NO: 4934483 - DNA, 25 bp, Homo sapien
tgggcattcttatcctgccgactgt

SEQ ID NO: 4934484 - DNA, 25 bp, Homo sapien
tcttatcctgccgactgtggcacgt

SEQ ID NO: 4934485 - DNA, 25 bp, Homo sapien
cagcggcacagctgcgactgcgtat

SEQ ID NO: 4934486 - DNA, 25 bp, Homo sapien
ctgggtaggcgtcatgaccctggga

SEQ ID NO: 4934487 - DNA, 25 bp, Homo sapien
ctgcgactgcgtatggaggacccag

SEQ ID NO: 4934488 - DNA, 25 bp, Homo sapien
gctcctcactctgccgactgcagcg

SEQ ID NO: 4934489 - DNA, 25 bp, Homo sapien
ctttcccggtaggactgcggcacgt

SEQ ID NO: 4934490 - DNA, 25 bp, Homo sapien
ggcatccttatccttcagacggcgg

SEQ ID NO: 4934491 - DNA, 25 bp, Homo sapien
cgtctttactgtgcggactgcggca

SEQ ID NO: 4934492 - DNA, 25 bp, Homo sapien
tgagagctacctgggtgacactacc

SEQ ID NO: 4934493 - DNA, 25 bp, Homo sapien
tgctgaagccggcactgagagctac

SEQ ID NO: 4934494 - DNA, 25 bp, Homo sapien
tactttgtggatcgcgggattgctg

SEQ ID NO: 4934495 - DNA, 25 bp, Homo sapien
tgcacggctgcggaggatctgggcg

SEQ ID NO: 4934496 - DNA, 25 bp, Homo sapien
gggtgtcctcccctgtgcacggctg

SEQ ID NO: 4934497 - DNA, 25 bp, Homo sapien
tctgggcgggcgtcattactttgtg

SEQ ID NO: 4934498 - DNA, 25 bp, Homo sapien
cggagaactctggagggcgtcagta

SEQ ID NO: 4934499 - DNA, 25 bp, Homo sapien
tgcggagaactctggagggcgtcag

SEQ ID NO: 4934500 - DNA, 25 bp, Homo sapien
ctgcggagaactctggagggcgtca

SEQ ID NO: 4934501 - DNA, 25 bp, Homo sapien
gagaactctggagggcgtcagtagc

SEQ ID NO: 4934502 - DNA, 25 bp, Homo sapien
ctgagacctgtctcccctgcggaag

SEQ ID NO: 4934503 - DNA, 25 bp, Homo sapien
gctgagacctgtctcccctgcggaa

SEQ ID NO: 4934504 - DNA, 25 bp, Homo sapien
tgtggatcccgggatactgaagcag

SEQ ID NO: 4934505 - DNA, 25 bp, Homo sapien
tggagaacccgggtgggcttcagta

SEQ ID NO: 4934506 - DNA, 25 bp, Homo sapien
acctagctgtgcgtcgtcccctgtg

SEQ ID NO: 4934507 - DNA, 25 bp, Homo sapien
gaagcagctgagacctagctgtgcg

SEQ ID NO: 4934508 - DNA, 25 bp, Homo sapien
tgcggaggacccgggtgggcgtcaa

SEQ ID NO: 4934509 - DNA, 25 bp, Homo sapien
gaagattgcggcactccttccgcag

SEQ ID NO: 4934510 - DNA, 25 bp, Homo sapien
cctgaggattgtggcactctttccg

SEQ ID NO: 4934511 - DNA, 25 bp, Homo sapien
ttccgcagttccctgctctaggctg

SEQ ID NO: 4934512 - DNA, 25 bp, Homo sapien
ccgggtgggcgtcaataccctgaag

SEQ ID NO: 4934513 - DNA, 25 bp, Homo sapien
tcctgaagccatgcgctgagacctg

SEQ ID NO: 4934514 - DNA, 25 bp, Homo sapien
ttggtgggcatcagtaccctgcgga

SEQ ID NO: 4934515 - DNA, 25 bp, Homo sapien
tgggtgtcgctaccctgctgacggc

SEQ ID NO: 4934516 - DNA, 25 bp, Homo sapien
gatgctgaagctgcgcactgagacc

SEQ ID NO: 4934517 - DNA, 25 bp, Homo sapien
catacagcagtagaagacctgggtg

SEQ ID NO: 4934518 - DNA, 25 bp, Homo sapien
ctgcatacagcagtagaagacctgg

SEQ ID NO: 4934519 - DNA, 25 bp, Homo sapien
gaagacctgggtgaccgtcagtacc

SEQ ID NO: 4934520 - DNA, 25 bp, Homo sapien
tagaagacctgggtgaccgtcagta

SEQ ID NO: 4934521 - DNA, 25 bp, Homo sapien
accgagacgtagctgggtgtcccga

SEQ ID NO: 4934522 - DNA, 25 bp, Homo sapien
tacgcggatcatgttgcggctgaag

SEQ ID NO: 4934523 - DNA, 25 bp, Homo sapien
tcatgttgcggctgaagtcgcgaac

SEQ ID NO: 4934524 - DNA, 25 bp, Homo sapien
tgaagtcgcgaaccgagacgtagct

SEQ ID NO: 4934525 - DNA, 25 bp, Homo sapien
tttacgctgcagtctgcgccagagc

SEQ ID NO: 4934526 - DNA, 25 bp, Homo sapien
gaccaggggtgtttacgctgcagtc

SEQ ID NO: 4934527 - DNA, 25 bp, Homo sapien
ccgcagcggtacatggaagacctgg

SEQ ID NO: 4934528 - DNA, 25 bp, Homo sapien
agtctgcgccagagccgcagcggta

SEQ ID NO: 4934529 - DNA, 25 bp, Homo sapien
tgaatgcagagtccgcttcggatcc

SEQ ID NO: 4934530 - DNA, 25 bp, Homo sapien
cagagcgcgtgagcctgaatgcaga

SEQ ID NO: 4934531 - DNA, 25 bp, Homo sapien
cttcggatccggtgcgagcacagcc

SEQ ID NO: 4934532 - DNA, 25 bp, Homo sapien
gtcacaaacacaggcttcacagctc

SEQ ID NO: 4934533 - DNA, 25 bp, Homo sapien
gtctaggacacggagtcatcctcag

SEQ ID NO: 4934534 - DNA, 25 bp, Homo sapien
ccgcagtctaggacacggagtcatc

SEQ ID NO: 4934535 - DNA, 25 bp, Homo sapien
cgcagtctaggacacggagtcatcc

SEQ ID NO: 4934536 - DNA, 25 bp, Homo sapien
cagtctaggacacggagtcatcctc

SEQ ID NO: 4934537 - DNA, 25 bp, Homo sapien
gctgagccctgtgtgattcatcatc

SEQ ID NO: 4934538 - DNA, 25 bp, Homo sapien
ttgttctgaaggttgagctgagccc

SEQ ID NO: 4934539 - DNA, 25 bp, Homo sapien
tagctctttggataggcttggacct

SEQ ID NO: 4934540 - DNA, 25 bp, Homo sapien
tcatcatcccgcactttgtcattgg

SEQ ID NO: 4934541 - DNA, 25 bp, Homo sapien
gcgagcgggagctttgtgctaccaa

SEQ ID NO: 4934542 - DNA, 25 bp, Homo sapien
gcgggagctttgtgctaccaaaatg

SEQ ID NO: 4934543 - DNA, 25 bp, Homo sapien
cctgtgagggtaggcgtagatgtcg

SEQ ID NO: 4934544 - DNA, 25 bp, Homo sapien
ctgggaggcctgtgagggtaggcgt

SEQ ID NO: 4934545 - DNA, 25 bp, Homo sapien
gggtgcaggggggagctgctacagg

SEQ ID NO: 4934546 - DNA, 25 bp, Homo sapien
gggagctgctacagggggagctgct

SEQ ID NO: 4934547 - DNA, 25 bp, Homo sapien
aggggggagctgctacagggggagc

SEQ ID NO: 4934548 - DNA, 25 bp, Homo sapien
agctgctacagggggagctgctgta

SEQ ID NO: 4934549 - DNA, 25 bp, Homo sapien
ctgctgtagggggaggtaccacggg

SEQ ID NO: 4934550 - DNA, 25 bp, Homo sapien
cagggggagcatggggggagctgct

SEQ ID NO: 4934551 - DNA, 25 bp, Homo sapien
ctgctgcagggggagcatgggggga

SEQ ID NO: 4934552 - DNA, 25 bp, Homo sapien
tacagggggttcagggggagctgct

SEQ ID NO: 4934553 - DNA, 25 bp, Homo sapien
tgcagggggtgcagggggagctgct

SEQ ID NO: 4934554 - DNA, 25 bp, Homo sapien
gcacctgtcccaccatcgtctggaa

SEQ ID NO: 4934555 - DNA, 25 bp, Homo sapien
tgtccaccatcgtctggaattctcc

SEQ ID NO: 4934556 - DNA, 25 bp, Homo sapien
ccatcgtctggaattctccattcct

SEQ ID NO: 4934557 - DNA, 25 bp, Homo sapien
tccattactctcctcgcacctgtcc

SEQ ID NO: 4934558 - DNA, 25 bp, Homo sapien
gggcttgcggagactccctggactt

SEQ ID NO: 4934559 - DNA, 25 bp, Homo sapien
ggaacctgcctctttgtgacttggg

SEQ ID NO: 4934560 - DNA, 25 bp, Homo sapien
atgggcttgcggagactccctggac

SEQ ID NO: 4934561 - DNA, 25 bp, Homo sapien
tgaggaacctgcctctttgtgactt

SEQ ID NO: 4934562 - DNA, 25 bp, Homo sapien
tccgcagatgagcaggcctgacttt

SEQ ID NO: 4934563 - DNA, 25 bp, Homo sapien
taaatgagccagaagttccgcagat

SEQ ID NO: 4934564 - DNA, 25 bp, Homo sapien
gactttccgatcgagtgggaagcgt

SEQ ID NO: 4934565 - DNA, 25 bp, Homo sapien
caggctttgattgtgtcagggactc

SEQ ID NO: 4934566 - DNA, 25 bp, Homo sapien
ctgtctggttcccattccaggcggc

SEQ ID NO: 4934567 - DNA, 25 bp, Homo sapien
gtatcaaagcgccacccacgtgcat

SEQ ID NO: 4934568 - DNA, 25 bp, Homo sapien
gttcccattccaggcggctggtctg

SEQ ID NO: 4934569 - DNA, 25 bp, Homo sapien
gggtcttgctcctcggtatcaaagc

SEQ ID NO: 4934570 - DNA, 25 bp, Homo sapien
tgtgtcagtgactaggttctcgtcg

SEQ ID NO: 4934571 - DNA, 25 bp, Homo sapien
tcataaacctgagttgaccccgtgg

SEQ ID NO: 4934572 - DNA, 25 bp, Homo sapien
tgggtcaccgcagccgtctgctgag

SEQ ID NO: 4934573 - DNA, 25 bp, Homo sapien
ttctcgtcgatgcttcctgggtcac

SEQ ID NO: 4934574 - DNA, 25 bp, Homo sapien
tcttggggcttcgactctcccctgg

SEQ ID NO: 4934575 - DNA, 25 bp, Homo sapien
cctcttggggcttcgactctcccct

SEQ ID NO: 4934576 - DNA, 25 bp, Homo sapien
atcctcttggggcttcgactctccc

SEQ ID NO: 4934577 - DNA, 25 bp, Homo sapien
ttggggcttcgactctcccctgggc

SEQ ID NO: 4934578 - DNA, 25 bp, Homo sapien
tctgcagcctttggacggaggactg

SEQ ID NO: 4934579 - DNA, 25 bp, Homo sapien
caaggagcacgttgttttggaggca

SEQ ID NO: 4934580 - DNA, 25 bp, Homo sapien
cagcctttggacggaggactgtgct

SEQ ID NO: 4934581 - DNA, 25 bp, Homo sapien
gcctttggacggaggactgtgctgt

SEQ ID NO: 4934582 - DNA, 25 bp, Homo sapien
agttaaaattgtcaggccatggtgg

SEQ ID NO: 4934583 - DNA, 25 bp, Homo sapien
catggtgggtgtgcattgcccgagc

SEQ ID NO: 4934584 - DNA, 25 bp, Homo sapien
tgtgcattgcccgagccctgtgggt

SEQ ID NO: 4934585 - DNA, 25 bp, Homo sapien
gtgggtgtgcattgcccgagccctg

SEQ ID NO: 4934586 - DNA, 25 bp, Homo sapien
ctttgtctatttgccaattgtggcc

SEQ ID NO: 4934587 - DNA, 25 bp, Homo sapien
ggctttgtctatttgccaattgtgg

SEQ ID NO: 4934588 - DNA, 25 bp, Homo sapien
gctttgtctatttgccaattgtggc

SEQ ID NO: 4934589 - DNA, 25 bp, Homo sapien
actcccaggaagacttgagtgaggg

SEQ ID NO: 4934590 - DNA, 25 bp, Homo sapien
gtgaggagcaccgactcccaggaag

SEQ ID NO: 4934591 - DNA, 25 bp, Homo sapien
ccagtgaggagcaccgactcccagg

SEQ ID NO: 4934592 - DNA, 25 bp, Homo sapien
gaggagcaccgactcccaggaagac

SEQ ID NO: 4934593 - DNA, 25 bp, Homo sapien
catctggaccagcacatggctgccc

SEQ ID NO: 4934594 - DNA, 25 bp, Homo sapien
atctggaccagcacatggctgccct

SEQ ID NO: 4934595 - DNA, 25 bp, Homo sapien
tctggaccagcacatggctgccctt

SEQ ID NO: 4934596 - DNA, 25 bp, Homo sapien
tagttcctggccaaatgcgacttgg

SEQ ID NO: 4934597 - DNA, 25 bp, Homo sapien
gcacgcatggttcccactgacaaat

SEQ ID NO: 4934598 - DNA, 25 bp, Homo sapien
gacaaattctcctcaaggttgagtg

SEQ ID NO: 4934599 - DNA, 25 bp, Homo sapien
gaacctattctgagtgggcagatag

SEQ ID NO: 4934600 - DNA, 25 bp, Homo sapien
ctttccagtgccggccaccgcacct

SEQ ID NO: 4934601 - DNA, 25 bp, Homo sapien
cagtgccggccaccgcacctgagtc

SEQ ID NO: 4934602 - DNA, 25 bp, Homo sapien
tttccagtgccggccaccgcacctg

SEQ ID NO: 4934603 - DNA, 25 bp, Homo sapien
tccagtgccggccaccgcacctgag

SEQ ID NO: 4934604 - DNA, 25 bp, Homo sapien
gctgctgttgggactcattagtcct

SEQ ID NO: 4934605 - DNA, 25 bp, Homo sapien
tgctgttgggactcattagtccttg

SEQ ID NO: 4934606 - DNA, 25 bp, Homo sapien
tcttctaggcccgtgctgaccatgc

SEQ ID NO: 4934607 - DNA, 25 bp, Homo sapien
ggtccattggaagtggcttgtcttc

SEQ ID NO: 4934608 - DNA, 25 bp, Homo sapien
catgtgctgcgtcaaggcgagcaga

SEQ ID NO: 4934609 - DNA, 25 bp, Homo sapien
cactgctcgcactcgtacttcatgt

SEQ ID NO: 4934610 - DNA, 25 bp, Homo sapien
atgtaggctccactgctcgcactcg

SEQ ID NO: 4934611 - DNA, 25 bp, Homo sapien
cactcgtacttcatgtgctgcgtca

SEQ ID NO: 4934612 - DNA, 25 bp, Homo sapien
tatgcatgatatacagagagccacc

SEQ ID NO: 4934613 - DNA, 25 bp, Homo sapien
gctgccaccttcttgcaggaactgg

SEQ ID NO: 4934614 - DNA, 25 bp, Homo sapien
caagttagaaactcgaggaatttgg

SEQ ID NO: 4934615 - DNA, 25 bp, Homo sapien
ctggagctgagggttgatggccctg

SEQ ID NO: 4934616 - DNA, 25 bp, Homo sapien
gagtgggtagcagctctgcacaggg

SEQ ID NO: 4934617 - DNA, 25 bp, Homo sapien
ttgaaagtcaccgtgaggcagacca

SEQ ID NO: 4934618 - DNA, 25 bp, Homo sapien
tccagttgagttttgttggtctaag

SEQ ID NO: 4934619 - DNA, 25 bp, Homo sapien
tgttggtctaagctcacatctggat

SEQ ID NO: 4934620 - DNA, 25 bp, Homo sapien
ggatattggtgtgatggcactcact

SEQ ID NO: 4934621 - DNA, 25 bp, Homo sapien
tggatattggtgtgatggcactcac

SEQ ID NO: 4934622 - DNA, 25 bp, Homo sapien
ttctctccccaactgttgagtggag

SEQ ID NO: 4934623 - DNA, 25 bp, Homo sapien
tttctctccccaactgttgagtgga

SEQ ID NO: 4934624 - DNA, 25 bp, Homo sapien
tctctccccaactgttgagtggagg

SEQ ID NO: 4934625 - DNA, 25 bp, Homo sapien
ctctccccaactgttgagtggaggc

SEQ ID NO: 4934626 - DNA, 25 bp, Homo sapien
gggtcagctttcgtgtggccttttg

SEQ ID NO: 4934627 - DNA, 25 bp, Homo sapien
tcatcgagaaaatggagatgttccc

SEQ ID NO: 4934628 - DNA, 25 bp, Homo sapien
tctttgtagaagtactgggtcagct

SEQ ID NO: 4934629 - DNA, 25 bp, Homo sapien
aattactgtcgtttctttgtagaag

SEQ ID NO: 4934630 - DNA, 25 bp, Homo sapien
cagtgcatctcgttattgagcaagt

SEQ ID NO: 4934631 - DNA, 25 bp, Homo sapien
tcagtgcatctcgttattgagcaag

SEQ ID NO: 4934632 - DNA, 25 bp, Homo sapien
tcttgtaagatctaacaggacatag

SEQ ID NO: 4934633 - DNA, 25 bp, Homo sapien
tgtaaataagtcttgtaagatctaa

SEQ ID NO: 4934634 - DNA, 25 bp, Homo sapien
tggtgcgctttgactcgacaggtac

SEQ ID NO: 4934635 - DNA, 25 bp, Homo sapien
gctttgactcgacaggtacttttat

SEQ ID NO: 4934636 - DNA, 25 bp, Homo sapien
tatgttccgaatggtgacccctagc

SEQ ID NO: 4934637 - DNA, 25 bp, Homo sapien
agcaccctcggtgattcctgcacag

SEQ ID NO: 4934638 - DNA, 25 bp, Homo sapien
cacagtgccttggttggtgcggcca

SEQ ID NO: 4934639 - DNA, 25 bp, Homo sapien
tgcggcacccatagcagttgtcatt

SEQ ID NO: 4934640 - DNA, 25 bp, Homo sapien
cagaagatgtctttaatccaagggt

SEQ ID NO: 4934641 - DNA, 25 bp, Homo sapien
cagttaatgggttgtgcatacgtca

SEQ ID NO: 4934642 - DNA, 25 bp, Homo sapien
taaaacctagtacaaatgcagaccc

SEQ ID NO: 4934643 - DNA, 25 bp, Homo sapien
ttctagtttgtgattccactgcccc

SEQ ID NO: 4934644 - DNA, 25 bp, Homo sapien
tctgtatggtggatcgttgtgtttc

SEQ ID NO: 4934645 - DNA, 25 bp, Homo sapien
tctgtacagtggattgttgagtgtg

SEQ ID NO: 4934646 - DNA, 25 bp, Homo sapien
tgagtgtgttttagtgttacaggtg

SEQ ID NO: 4934647 - DNA, 25 bp, Homo sapien
caagctgtgtagtggatcgttgtgt

SEQ ID NO: 4934648 - DNA, 25 bp, Homo sapien
gctgctccccttttcccattcttcc

SEQ ID NO: 4934649 - DNA, 25 bp, Homo sapien
cttttcccattcttcccttcataag

SEQ ID NO: 4934650 - DNA, 25 bp, Homo sapien
ccctggctgctccccttttcccatt

SEQ ID NO: 4934651 - DNA, 25 bp, Homo sapien
cccagtccctggctgctcccctttt

SEQ ID NO: 4934652 - DNA, 25 bp, Homo sapien
agccttctcgctccctctcgcctga

SEQ ID NO: 4934653 - DNA, 25 bp, Homo sapien
tctcgcctgacacggcactgctgct

SEQ ID NO: 4934654 - DNA, 25 bp, Homo sapien
ctgacacggcactgctgctgtgtgc

SEQ ID NO: 4934655 - DNA, 25 bp, Homo sapien
ctccctctcgcctgacacggcactg

SEQ ID NO: 4934656 - DNA, 25 bp, Homo sapien
tgctcttgccgtagaggtgtgcagt

SEQ ID NO: 4934657 - DNA, 25 bp, Homo sapien
gtttgttcccaagacagccatgtaa

SEQ ID NO: 4934658 - DNA, 25 bp, Homo sapien
ttgaaaatcttgcagtagagccggg

SEQ ID NO: 4934659 - DNA, 25 bp, Homo sapien
tccacagaagcaatggtgcccagcg

SEQ ID NO: 4934660 - DNA, 25 bp, Homo sapien
ctcctccacggctttagcgtgggaa

SEQ ID NO: 4934661 - DNA, 25 bp, Homo sapien
tgctgccttgcgacccccgtctgcc

SEQ ID NO: 4934662 - DNA, 25 bp, Homo sapien
tctgcccttggaggccagccacttt

SEQ ID NO: 4934663 - DNA, 25 bp, Homo sapien
cactttcctcgagtggcctgggcac

SEQ ID NO: 4934664 - DNA, 25 bp, Homo sapien
tggacagagtcccaacgcctctgta

SEQ ID NO: 4934665 - DNA, 25 bp, Homo sapien
gaggcctttgatgccttccccttgg

SEQ ID NO: 4934666 - DNA, 25 bp, Homo sapien
ggaccatcatttcatcggttctctg

SEQ ID NO: 4934667 - DNA, 25 bp, Homo sapien
tctgtatcctgcactcgaggccttt

SEQ ID NO: 4934668 - DNA, 25 bp, Homo sapien
gtggagagggcattcccgaacctgc

SEQ ID NO: 4934669 - DNA, 25 bp, Homo sapien
gagggcattcccgaacctgcggctg

SEQ ID NO: 4934670 - DNA, 25 bp, Homo sapien
cattcccgaacctgcggctggcagg

SEQ ID NO: 4934671 - DNA, 25 bp, Homo sapien
agtggagagggcattcccgaacctg

SEQ ID NO: 4934672 - DNA, 25 bp, Homo sapien
gacatttccagtagtaggcacacga

SEQ ID NO: 4934673 - DNA, 25 bp, Homo sapien
caacttctgaaaggacgtgtgcttc

SEQ ID NO: 4934674 - DNA, 25 bp, Homo sapien
ctaggagtctattggaggtgtcacc

SEQ ID NO: 4934675 - DNA, 25 bp, Homo sapien
aagcattcggcatattcagggaccc

SEQ ID NO: 4934676 - DNA, 25 bp, Homo sapien
cttgtcaataaacgccactgcctgg

SEQ ID NO: 4934677 - DNA, 25 bp, Homo sapien
gacattagaagctgacacggagggt

SEQ ID NO: 4934678 - DNA, 25 bp, Homo sapien
cacatgggtccatacagtttagcag

SEQ ID NO: 4934679 - DNA, 25 bp, Homo sapien
tgataaatcaggagtctttcccgcc

SEQ ID NO: 4934680 - DNA, 25 bp, Homo sapien
aacagcagagcgtgaacccagatgc

SEQ ID NO: 4934681 - DNA, 25 bp, Homo sapien
ggtgatgaactgtctcccctacgga

SEQ ID NO: 4934682 - DNA, 25 bp, Homo sapien
catcactaggaattcgaagacagca

SEQ ID NO: 4934683 - DNA, 25 bp, Homo sapien
gcaaaatgcaaacatagggcctttg

SEQ ID NO: 4934684 - DNA, 25 bp, Homo sapien
gctccggactcggagcaagcagcct

SEQ ID NO: 4934685 - DNA, 25 bp, Homo sapien
tacacacgaggcacttgaggccagt

SEQ ID NO: 4934686 - DNA, 25 bp, Homo sapien
agctctctcagttgctccggactcg

SEQ ID NO: 4934687 - DNA, 25 bp, Homo sapien
cttgctactacagctggcgcggttg

SEQ ID NO: 4934688 - DNA, 25 bp, Homo sapien
aatgtccacatcacatgtagggttg

SEQ ID NO: 4934689 - DNA, 25 bp, Homo sapien
ccacatcacatgtagggttgtcccc

SEQ ID NO: 4934690 - DNA, 25 bp, Homo sapien
tgcagtagttaaatgtccacatcac

SEQ ID NO: 4934691 - DNA, 25 bp, Homo sapien
ctgtgtgcagtagttaaatgtccac

SEQ ID NO: 4934692 - DNA, 25 bp, Homo sapien
gagcgggctcgtgttgttaatgctc

SEQ ID NO: 4934693 - DNA, 25 bp, Homo sapien
tcgtgttgttaatgctctcagcacc

SEQ ID NO: 4934694 - DNA, 25 bp, Homo sapien
gctctcagcacctggtccgtggcag

SEQ ID NO: 4934695 - DNA, 25 bp, Homo sapien
gggctcgtgttgttaatgctctcag

SEQ ID NO: 4934696 - DNA, 25 bp, Homo sapien
catctaggataacgggtgggctgct

SEQ ID NO: 4934697 - DNA, 25 bp, Homo sapien
gagttgggcaacagagaatccagag

SEQ ID NO: 4934698 - DNA, 25 bp, Homo sapien
tgttctcaggcatcaagaagagctg

SEQ ID NO: 4934699 - DNA, 25 bp, Homo sapien
gaatccagagttatgttctcaggca

SEQ ID NO: 4934700 - DNA, 25 bp, Homo sapien
catggtcttggaggaggaatctcgg

SEQ ID NO: 4934701 - DNA, 25 bp, Homo sapien
ggaatctcggttgttctcttgtcta

SEQ ID NO: 4934702 - DNA, 25 bp, Homo sapien
tggaggaggaatctcggttgttctc

SEQ ID NO: 4934703 - DNA, 25 bp, Homo sapien
ctcggttgttctcttgtctaccaag

SEQ ID NO: 4934704 - DNA, 25 bp, Homo sapien
catctttagcttcaggtgtttggtc

SEQ ID NO: 4934705 - DNA, 25 bp, Homo sapien
ggatttgaccttctgttggcttggg

SEQ ID NO: 4934706 - DNA, 25 bp, Homo sapien
gcttcaggtgtttggtcaggatttg

SEQ ID NO: 4934707 - DNA, 25 bp, Homo sapien
gtcaggatttgaccttctgttggct

SEQ ID NO: 4934708 - DNA, 25 bp, Homo sapien
ggtgtagccttggtcctagctctcc

SEQ ID NO: 4934709 - DNA, 25 bp, Homo sapien
atctgcagttgagctgggtgtagcc

SEQ ID NO: 4934710 - DNA, 25 bp, Homo sapien
gggtgtagccttggtcctagctctc

SEQ ID NO: 4934711 - DNA, 25 bp, Homo sapien
tctcagtgtccgacactgacaaggg

SEQ ID NO: 4934712 - DNA, 25 bp, Homo sapien
gggctgcacccactaaagactgtac

SEQ ID NO: 4934713 - DNA, 25 bp, Homo sapien
tcagacaccagtcaagggtgttgct

SEQ ID NO: 4934714 - DNA, 25 bp, Homo sapien
tggttgttggatctcagtgtccgac

SEQ ID NO: 4934715 - DNA, 25 bp, Homo sapien
tgtctctcggtctccccggatgtcc

SEQ ID NO: 4934716 - DNA, 25 bp, Homo sapien
agagctggctttgaacactaggatg

SEQ ID NO: 4934717 - DNA, 25 bp, Homo sapien
catgtctgagtatggatttggaggt

SEQ ID NO: 4934718 - DNA, 25 bp, Homo sapien
cttgcatgtctgagtatggatttgg

SEQ ID NO: 4934719 - DNA, 25 bp, Homo sapien
ctgactacccacgcggttgttccgg

SEQ ID NO: 4934720 - DNA, 25 bp, Homo sapien
tgactacccacgcggttgttccggc

SEQ ID NO: 4934721 - DNA, 25 bp, Homo sapien
cagggccaccgtggaagctggctcc

SEQ ID NO: 4934722 - DNA, 25 bp, Homo sapien
tccttttctgcgtgtattgggtcgc

SEQ ID NO: 4934723 - DNA, 25 bp, Homo sapien
tgcgacagccgtgcagctccttttc

SEQ ID NO: 4934724 - DNA, 25 bp, Homo sapien
gccgttggcatcctcgtgtggagta

SEQ ID NO: 4934725 - DNA, 25 bp, Homo sapien
caagtgaatctctgctctgaccggg

SEQ ID NO: 4934726 - DNA, 25 bp, Homo sapien
gctcctcggccgccacactccatgg

SEQ ID NO: 4934727 - DNA, 25 bp, Homo sapien
taggccgtggctaagtttcctgatg

SEQ ID NO: 4934728 - DNA, 25 bp, Homo sapien
tcagatggctgtgcttacacagcct

SEQ ID NO: 4934729 - DNA, 25 bp, Homo sapien
taacacattcgctttcatcgcctcg

SEQ ID NO: 4934730 - DNA, 25 bp, Homo sapien
tcgcctcgtgcatcttggctctgaa

SEQ ID NO: 4934731 - DNA, 25 bp, Homo sapien
tatttttggagatgccgctactagg

SEQ ID NO: 4934732 - DNA, 25 bp, Homo sapien
tatttgaattgctgtcgtccgaaag

SEQ ID NO: 4934733 - DNA, 25 bp, Homo sapien
tgtcgtccgaaagaatgcctagtgc

SEQ ID NO: 4934734 - DNA, 25 bp, Homo sapien
gccggagcggcatcaatttattttt

SEQ ID NO: 4934735 - DNA, 25 bp, Homo sapien
ctccctgagcccacgtgttctcgtt

SEQ ID NO: 4934736 - DNA, 25 bp, Homo sapien
ctgagcccacgtgttctcgttgttc

SEQ ID NO: 4934737 - DNA, 25 bp, Homo sapien
tccctgagcccacgtgttctcgttg

SEQ ID NO: 4934738 - DNA, 25 bp, Homo sapien
caccgtgttaatcgggctggtcccg

SEQ ID NO: 4934739 - DNA, 25 bp, Homo sapien
aggtgagcggcggagtgagctccat

SEQ ID NO: 4934740 - DNA, 25 bp, Homo sapien
agagacggaaggtgcttgggcctga

SEQ ID NO: 4934741 - DNA, 25 bp, Homo sapien
tggaggaaggtgagcggcggagtga

SEQ ID NO: 4934742 - DNA, 25 bp, Homo sapien
cggaaggtgcttgggcctgaggagc

SEQ ID NO: 4934743 - DNA, 25 bp, Homo sapien
gacaccacagtgtgagctggcggcg

SEQ ID NO: 4934744 - DNA, 25 bp, Homo sapien
gtgatgaagccgcagggactctgaa

SEQ ID NO: 4934745 - DNA, 25 bp, Homo sapien
gctggcggcgtttggttggcaatgg

SEQ ID NO: 4934746 - DNA, 25 bp, Homo sapien
accacagtgtgagctggcggcgttt

SEQ ID NO: 4934747 - DNA, 25 bp, Homo sapien
cggcgggcccgaccgcgaagtggct

SEQ ID NO: 4934748 - DNA, 25 bp, Homo sapien
cccgctgccccgtgggagttgtagt

SEQ ID NO: 4934749 - DNA, 25 bp, Homo sapien
cgtccgggaaactacgagctccgtg

SEQ ID NO: 4934750 - DNA, 25 bp, Homo sapien
gcccgaccgcgaagtggctgccctg

SEQ ID NO: 4934751 - DNA, 25 bp, Homo sapien
gctgctccccgcccttgtctttacc

SEQ ID NO: 4934752 - DNA, 25 bp, Homo sapien
tagaggcagcgagatgagccgctgc

SEQ ID NO: 4934753 - DNA, 25 bp, Homo sapien
gatgacccggatgcgggatagaggc

SEQ ID NO: 4934754 - DNA, 25 bp, Homo sapien
gatgcgggatagaggcagcgagatg

SEQ ID NO: 4934755 - DNA, 25 bp, Homo sapien
tgcaaatgaaaggtgtgctttgaaa

SEQ ID NO: 4934756 - DNA, 25 bp, Homo sapien
atgcaaatgaaaggtgtgctttgaa

SEQ ID NO: 4934757 - DNA, 25 bp, Homo sapien
ctttccactgccgtgtctgtaggaa

SEQ ID NO: 4934758 - DNA, 25 bp, Homo sapien
aataggtggctaggcattgaacaaa

SEQ ID NO: 4934759 - DNA, 25 bp, Homo sapien
aatcactgtaagtcagtactttctt

SEQ ID NO: 4934760 - DNA, 25 bp, Homo sapien
cactgccgtgtctgtaggaataggt

SEQ ID NO: 4934761 - DNA, 25 bp, Homo sapien
tagccccagggtagacttaagctct

SEQ ID NO: 4934762 - DNA, 25 bp, Homo sapien
tagagagtaaaggactgcccagcat

SEQ ID NO: 4934763 - DNA, 25 bp, Homo sapien
gactacctgagatagcctaggctag

SEQ ID NO: 4934764 - DNA, 25 bp, Homo sapien
tacgcggccaaccaacatcttgtga

SEQ ID NO: 4934765 - DNA, 25 bp, Homo sapien
taagcattttcaggtatttactagc

SEQ ID NO: 4934766 - DNA, 25 bp, Homo sapien
gcattttcaggtatttactagctaa

SEQ ID NO: 4934767 - DNA, 25 bp, Homo sapien
taggagtcagcttcatcatggtcac

SEQ ID NO: 4934768 - DNA, 25 bp, Homo sapien
caggtatttactagctaaaatcttc

SEQ ID NO: 4934769 - DNA, 25 bp, Homo sapien
catagagggctctaaaactagttcc

SEQ ID NO: 4934770 - DNA, 25 bp, Homo sapien
tggcagaactgtcctatcgattggt

SEQ ID NO: 4934771 - DNA, 25 bp, Homo sapien
tctggctgtctgtggcgtaggtaca

SEQ ID NO: 4934772 - DNA, 25 bp, Homo sapien
tctcggcctggaaagaatacctcga

SEQ ID NO: 4934773 - DNA, 25 bp, Homo sapien
ggtagtgacttgactgcatttgcca

SEQ ID NO: 4934774 - DNA, 25 bp, Homo sapien
gatgacacctggtatagggacagag

SEQ ID NO: 4934775 - DNA, 25 bp, Homo sapien
gagaatagcttgacggttgccacgg

SEQ ID NO: 4934776 - DNA, 25 bp, Homo sapien
gcttgaactatttactgcatggccc

SEQ ID NO: 4934777 - DNA, 25 bp, Homo sapien
ttggctactctcaaatccctggtgg

SEQ ID NO: 4934778 - DNA, 25 bp, Homo sapien
cactttgctactctgtcccggctag

SEQ ID NO: 4934779 - DNA, 25 bp, Homo sapien
tcccggctaggtttacgcacattgg

SEQ ID NO: 4934780 - DNA, 25 bp, Homo sapien
taagcccgtcacaagcaaagtcctg

SEQ ID NO: 4934781 - DNA, 25 bp, Homo sapien
ggtgtgtcggatagttggctctttc

SEQ ID NO: 4934782 - DNA, 25 bp, Homo sapien
atggtgtgtcggatagttggctctt

SEQ ID NO: 4934783 - DNA, 25 bp, Homo sapien
catgagttggactagtgggagcagc

SEQ ID NO: 4934784 - DNA, 25 bp, Homo sapien
cacaggcatgagttggactagtggg

SEQ ID NO: 4934785 - DNA, 25 bp, Homo sapien
tgatatatgctttttggaccccaat

SEQ ID NO: 4934786 - DNA, 25 bp, Homo sapien
ttctcagtaataagacgtgccgggc

SEQ ID NO: 4934787 - DNA, 25 bp, Homo sapien
caatatctggctcgaaggttgccct

SEQ ID NO: 4934788 - DNA, 25 bp, Homo sapien
aattggctccccaggacgcattgtg

SEQ ID NO: 4934789 - DNA, 25 bp, Homo sapien
gagccagagctcgtggctttgtgga

SEQ ID NO: 4934790 - DNA, 25 bp, Homo sapien
ggaggtgctaatggccatggacaga

SEQ ID NO: 4934791 - DNA, 25 bp, Homo sapien
gggcgagccagagctcgtggctttg

SEQ ID NO: 4934792 - DNA, 25 bp, Homo sapien
tgctaatggccatggacagaaaggg

SEQ ID NO: 4934793 - DNA, 25 bp, Homo sapien
taagctttcttcaggtagtaccacc

SEQ ID NO: 4934794 - DNA, 25 bp, Homo sapien
gatctacctcagttaaacagttggg

SEQ ID NO: 4934795 - DNA, 25 bp, Homo sapien
tagtaccacctgtcatcgcttctgc

SEQ ID NO: 4934796 - DNA, 25 bp, Homo sapien
agtgtattataatcccgactgcccc

SEQ ID NO: 4934797 - DNA, 25 bp, Homo sapien
gacacgcgtgactcaaatcctacag

SEQ ID NO: 4934798 - DNA, 25 bp, Homo sapien
caatatagaaaccatgcagtgctgt

SEQ ID NO: 4934799 - DNA, 25 bp, Homo sapien
cttcaaagccaaacagacacgcgtg

SEQ ID NO: 4934800 - DNA, 25 bp, Homo sapien
caagggcctcgtttcaggtggtact

SEQ ID NO: 4934801 - DNA, 25 bp, Homo sapien
agtgcaagcgacttcatagatcggg

SEQ ID NO: 4934802 - DNA, 25 bp, Homo sapien
tgagtgagttgatcccaagaacacc

SEQ ID NO: 4934803 - DNA, 25 bp, Homo sapien
ccttaaaatgagtgagttgatccca

SEQ ID NO: 4934804 - DNA, 25 bp, Homo sapien
agggcacagtgcaagcgacttcata

SEQ ID NO: 4934805 - DNA, 25 bp, Homo sapien
ccctcgactcagtcatgggagctgc

SEQ ID NO: 4934806 - DNA, 25 bp, Homo sapien
tgccggcccagggtacaggctgctt

SEQ ID NO: 4934807 - DNA, 25 bp, Homo sapien
gcatctccggaatgctgcgctgggc

SEQ ID NO: 4934808 - DNA, 25 bp, Homo sapien
tggccttgggctgtcagaatctggt

SEQ ID NO: 4934809 - DNA, 25 bp, Homo sapien
tgttttgtaattctgccgccacgct

SEQ ID NO: 4934810 - DNA, 25 bp, Homo sapien
tcattccggaagagctaagtgtcct

SEQ ID NO: 4934811 - DNA, 25 bp, Homo sapien
atcagacattgagtttggccccggc

SEQ ID NO: 4934812 - DNA, 25 bp, Homo sapien
tactacgtcactacctggaagcaat

SEQ ID NO: 4934813 - DNA, 25 bp, Homo sapien
tttgattcctcgtcgcttaccgtgg

SEQ ID NO: 4934814 - DNA, 25 bp, Homo sapien
aagcatggtctttgagttccaccca

SEQ ID NO: 4934815 - DNA, 25 bp, Homo sapien
tccgcctgctactaggacgcaaggg

SEQ ID NO: 4934816 - DNA, 25 bp, Homo sapien
ggttactgtcgtgtcaaagctgtca

SEQ ID NO: 4934817 - DNA, 25 bp, Homo sapien
gttgcttttcggtggtggtctcaca

SEQ ID NO: 4934818 - DNA, 25 bp, Homo sapien
tggaaagctgccctcgtgtgtgagc

SEQ ID NO: 4934819 - DNA, 25 bp, Homo sapien
gacgacgcaattaacgaacaccagg

SEQ ID NO: 4934820 - DNA, 25 bp, Homo sapien
tgtgtgagcccttcggtgacgcaaa

SEQ ID NO: 4934821 - DNA, 25 bp, Homo sapien
tcctgcgtgcggtacttcagggatg

SEQ ID NO: 4934822 - DNA, 25 bp, Homo sapien
catgcagatttgtgggcctgctgcc

SEQ ID NO: 4934823 - DNA, 25 bp, Homo sapien
cacctcctgcgtgcggtacttcagg

SEQ ID NO: 4934824 - DNA, 25 bp, Homo sapien
tggcggttcttgtttaacatgcaga

SEQ ID NO: 4934825 - DNA, 25 bp, Homo sapien
caagccgcaggtcgggggtctcccg

SEQ ID NO: 4934826 - DNA, 25 bp, Homo sapien
gaggggcagcaagccgcaggtcggg

SEQ ID NO: 4934827 - DNA, 25 bp, Homo sapien
gcagcaagccgcaggtcgggggtct

SEQ ID NO: 4934828 - DNA, 25 bp, Homo sapien
ggaggggcagcaagccgcaggtcgg

SEQ ID NO: 4934829 - DNA, 25 bp, Homo sapien
gtcggtcacagcgaaggagcttgcc

SEQ ID NO: 4934830 - DNA, 25 bp, Homo sapien
tgagattcgtagaaagctgttggtg

SEQ ID NO: 4934831 - DNA, 25 bp, Homo sapien
gccgtcggtcacagcgaaggagctt

SEQ ID NO: 4934832 - DNA, 25 bp, Homo sapien
tgacttccatagatctatgcactga

SEQ ID NO: 4934833 - DNA, 25 bp, Homo sapien
tattaaaacagagtcccgtgtgtcc

SEQ ID NO: 4934834 - DNA, 25 bp, Homo sapien
tgcagacctgtatgagaacccaatg

SEQ ID NO: 4934835 - DNA, 25 bp, Homo sapien
taccgagtgggattcacgagaccag

SEQ ID NO: 4934836 - DNA, 25 bp, Homo sapien
tcacccggcctgaactaaggagcag

SEQ ID NO: 4934837 - DNA, 25 bp, Homo sapien
gcttcaagcccacccgcatcatctt

SEQ ID NO: 4934838 - DNA, 25 bp, Homo sapien
cacgcgcttcaagcccacccgcatc

SEQ ID NO: 4934839 - DNA, 25 bp, Homo sapien
ctacaagtccacgcgcttcaagccc

SEQ ID NO: 4934840 - DNA, 25 bp, Homo sapien
agtccacgcgcttcaagcccacccg

SEQ ID NO: 4934841 - DNA, 25 bp, Homo sapien
cccgtcgtcctgtatgatgccatgg

SEQ ID NO: 4934842 - DNA, 25 bp, Homo sapien
cgtgcttctgcaaatacgcgcaggg

SEQ ID NO: 4934843 - DNA, 25 bp, Homo sapien
tctgctgcactgagaaaggtgctcc

SEQ ID NO: 4934844 - DNA, 25 bp, Homo sapien
cctgaagaacacgtatgcgggcctg

SEQ ID NO: 4934845 - DNA, 25 bp, Homo sapien
tgagccatcactccgtcctgttctg

SEQ ID NO: 4934846 - DNA, 25 bp, Homo sapien
tcgtgctgatggcacggatctcggt

SEQ ID NO: 4934847 - DNA, 25 bp, Homo sapien
tgttctgcggctcgtgctgatggca

SEQ ID NO: 4934848 - DNA, 25 bp, Homo sapien
tggcacggatctcggtggctgctgt

SEQ ID NO: 4934849 - DNA, 25 bp, Homo sapien
ggaaatcacagtcctagccctgtgg

SEQ ID NO: 4934850 - DNA, 25 bp, Homo sapien
tccactgagaggtgtcaggcttcga

SEQ ID NO: 4934851 - DNA, 25 bp, Homo sapien
ggtctcatcagttgccccgattggg

SEQ ID NO: 4934852 - DNA, 25 bp, Homo sapien
ttgcagtgcctacattctagtggga

SEQ ID NO: 4934853 - DNA, 25 bp, Homo sapien
tgggttagatcttgtacaatagtaa

SEQ ID NO: 4934854 - DNA, 25 bp, Homo sapien
gaaaggagagctgtgcgccctacag

SEQ ID NO: 4934855 - DNA, 25 bp, Homo sapien
taagctcagtgttcgacctggcacc

SEQ ID NO: 4934856 - DNA, 25 bp, Homo sapien
aaggagagctgtgcgccctacagcc

SEQ ID NO: 4934857 - DNA, 25 bp, Homo sapien
ctgaccccgaggtcggcagtggctg

SEQ ID NO: 4934858 - DNA, 25 bp, Homo sapien
tgaccccgaggtcggcagtggctga

SEQ ID NO: 4934859 - DNA, 25 bp, Homo sapien
gaccccgaggtcggcagtggctgag

SEQ ID NO: 4934860 - DNA, 25 bp, Homo sapien
ccccgaggtcggcagtggctgagct

SEQ ID NO: 4934861 - DNA, 25 bp, Homo sapien
cctgctgcctttgccgaagagaatt

SEQ ID NO: 4934862 - DNA, 25 bp, Homo sapien
tcaagtaacggaacgcaaacgtctg

SEQ ID NO: 4934863 - DNA, 25 bp, Homo sapien
gacatcttcccatacgggtcgtgga

SEQ ID NO: 4934864 - DNA, 25 bp, Homo sapien
cccatacgggtcgtggacgctcttg

SEQ ID NO: 4934865 - DNA, 25 bp, Homo sapien
gcattctcctggtaaaaccgtagga

SEQ ID NO: 4934866 - DNA, 25 bp, Homo sapien
cacggtagccatgagtcctgcaagg

SEQ ID NO: 4934867 - DNA, 25 bp, Homo sapien
caggttggagaagagctaggcattc

SEQ ID NO: 4934868 - DNA, 25 bp, Homo sapien
cgtgggcttgtacgcacagggaaat

SEQ ID NO: 4934869 - DNA, 25 bp, Homo sapien
ggacgtggcgccagcagacatggag

SEQ ID NO: 4934870 - DNA, 25 bp, Homo sapien
acataggacggacgtggcgccagca

SEQ ID NO: 4934871 - DNA, 25 bp, Homo sapien
ttctcctccgaatgggaaaacagag

SEQ ID NO: 4934872 - DNA, 25 bp, Homo sapien
tctttccagaaggatgtaattctcc

SEQ ID NO: 4934873 - DNA, 25 bp, Homo sapien
cctccacctccccgtcaatcctacg

SEQ ID NO: 4934874 - DNA, 25 bp, Homo sapien
tacggggtcttggtgacccactcac

SEQ ID NO: 4934875 - DNA, 25 bp, Homo sapien
ctccacctccccgtcaatcctacgg

SEQ ID NO: 4934876 - DNA, 25 bp, Homo sapien
ccgtcaatcctacggggtcttggtg

SEQ ID NO: 4934877 - DNA, 25 bp, Homo sapien
aggtgcttggcctgcgcagtggagg

SEQ ID NO: 4934878 - DNA, 25 bp, Homo sapien
tccccgtggattgtcctggctggtg

SEQ ID NO: 4934879 - DNA, 25 bp, Homo sapien
tgctttcgtctgatgcaggacgttt

SEQ ID NO: 4934880 - DNA, 25 bp, Homo sapien
gtgctggatcagtggccccaaactg

SEQ ID NO: 4934881 - DNA, 25 bp, Homo sapien
ctgcagacatttttcggggtcccat

SEQ ID NO: 4934882 - DNA, 25 bp, Homo sapien
tctgcagacatttttcggggtccca

SEQ ID NO: 4934883 - DNA, 25 bp, Homo sapien
agtttcatttaactgtggctgcccc

SEQ ID NO: 4934884 - DNA, 25 bp, Homo sapien
tttcatttaactgtggctgccccct

SEQ ID NO: 4934885 - DNA, 25 bp, Homo sapien
cttgagcgtggtaaaagtttcattt

SEQ ID NO: 4934886 - DNA, 25 bp, Homo sapien
actgtggctgccccctaaacatcgg

SEQ ID NO: 4934887 - DNA, 25 bp, Homo sapien
atgagcaagcaagagggtggtccgg

SEQ ID NO: 4934888 - DNA, 25 bp, Homo sapien
caagcaagagggtggtccggttccg

SEQ ID NO: 4934889 - DNA, 25 bp, Homo sapien
atctgtggcgaagccgcgtggagag

SEQ ID NO: 4934890 - DNA, 25 bp, Homo sapien
gggcaggatctgtggcgaagccgcg

SEQ ID NO: 4934891 - DNA, 25 bp, Homo sapien
tggttacaagggttcttgtacaaga

SEQ ID NO: 4934892 - DNA, 25 bp, Homo sapien
gcttggttacaagggttcttgtaca

SEQ ID NO: 4934893 - DNA, 25 bp, Homo sapien
ttacaagggttcttgtacaagaatg

SEQ ID NO: 4934894 - DNA, 25 bp, Homo sapien
ggatgaggggggtccactctctcac

SEQ ID NO: 4934895 - DNA, 25 bp, Homo sapien
tcctgctgcatctccgatccagcat

SEQ ID NO: 4934896 - DNA, 25 bp, Homo sapien
ctgcatctccgatccagcatcgttg

SEQ ID NO: 4934897 - DNA, 25 bp, Homo sapien
tgaggggggtccactctctcactgc

SEQ ID NO: 4934898 - DNA, 25 bp, Homo sapien
ctgcagggtggaaaacgattggcag

SEQ ID NO: 4934899 - DNA, 25 bp, Homo sapien
gcaggtggcttggagatcatcagaa

SEQ ID NO: 4934900 - DNA, 25 bp, Homo sapien
gaaaacgattggcaggtggcttgga

SEQ ID NO: 4934901 - DNA, 25 bp, Homo sapien
caggtggcttggagatcatcagaaa

SEQ ID NO: 4934902 - DNA, 25 bp, Homo sapien
gaggggcaagtgtgggagacaggca

SEQ ID NO: 4934903 - DNA, 25 bp, Homo sapien
ctgccagggaacggccatcatcatc

SEQ ID NO: 4934904 - DNA, 25 bp, Homo sapien
catccagcccaaggaggggcaagtg

SEQ ID NO: 4934905 - DNA, 25 bp, Homo sapien
ccagggaacggccatcatcatccag

SEQ ID NO: 4934906 - DNA, 25 bp, Homo sapien
tggcaggtgtctccagtgcaagcaa

SEQ ID NO: 4934907 - DNA, 25 bp, Homo sapien
aatggcaggtgtctccagtgcaagc

SEQ ID NO: 4934908 - DNA, 25 bp, Homo sapien
atggcaggtgtctccagtgcaagca

SEQ ID NO: 4934909 - DNA, 25 bp, Homo sapien
ctggagcatggggtgtcggggactg

SEQ ID NO: 4934910 - DNA, 25 bp, Homo sapien
gtttgtggctcggtggcaagtggcc

SEQ ID NO: 4934911 - DNA, 25 bp, Homo sapien
tgatggtggccattatggagggagg

SEQ ID NO: 4934912 - DNA, 25 bp, Homo sapien
ttcttgtggtttgtggctcggtggc

SEQ ID NO: 4934913 - DNA, 25 bp, Homo sapien
tggctcggtggcaagtggcctccca

SEQ ID NO: 4934914 - DNA, 25 bp, Homo sapien
tgttcgcagttggtggcctcggaat

SEQ ID NO: 4934915 - DNA, 25 bp, Homo sapien
tgcatctcctgggtgtagcccggcg

SEQ ID NO: 4934916 - DNA, 25 bp, Homo sapien
ttcttgcagattggtggccggagct

SEQ ID NO: 4934917 - DNA, 25 bp, Homo sapien
ctcggaatgcgaggaccagagcctc

SEQ ID NO: 4934918 - DNA, 25 bp, Homo sapien
ctggatacgagggatgaaagaccat

SEQ ID NO: 4934919 - DNA, 25 bp, Homo sapien
taaagcaccccctggatacgaggga

SEQ ID NO: 4934920 - DNA, 25 bp, Homo sapien
caggtgtaaagcaccccctggatac

SEQ ID NO: 4934921 - DNA, 25 bp, Homo sapien
atgaaagaccatggttgagcagggt

SEQ ID NO: 4934922 - DNA, 25 bp, Homo sapien
ggccatgaacccagctgaagccggt

SEQ ID NO: 4934923 - DNA, 25 bp, Homo sapien
ctttgccgtggtggctcgagtggcc

SEQ ID NO: 4934924 - DNA, 25 bp, Homo sapien
ttccttgcccgctcgtagacaggag

SEQ ID NO: 4934925 - DNA, 25 bp, Homo sapien
aactagaaggccacgtgctgcccat

SEQ ID NO: 4934926 - DNA, 25 bp, Homo sapien
gaggtagaagccctcgagcagctcc

SEQ ID NO: 4934927 - DNA, 25 bp, Homo sapien
ggaggtagaagccctcgagcagctc

SEQ ID NO: 4934928 - DNA, 25 bp, Homo sapien
aggtagaagccctcgagcagctcca

SEQ ID NO: 4934929 - DNA, 25 bp, Homo sapien
ctggccccgggcacgggcgcctgcg

SEQ ID NO: 4934930 - DNA, 25 bp, Homo sapien
ccgtggggcagttgacatggccgag

SEQ ID NO: 4934931 - DNA, 25 bp, Homo sapien
ggcagttgacatggccgaggccatc

SEQ ID NO: 4934932 - DNA, 25 bp, Homo sapien
ttgacatggccgaggccatcgcggc

SEQ ID NO: 4934933 - DNA, 25 bp, Homo sapien
tgacatggccgaggccatcgcggca

SEQ ID NO: 4934934 - DNA, 25 bp, Homo sapien
gatccacaggctcgtttctgtcact

SEQ ID NO: 4934935 - DNA, 25 bp, Homo sapien
gtttctgtcactcgctgctttttgg

SEQ ID NO: 4934936 - DNA, 25 bp, Homo sapien
cttggtgtgggcctggtagggagtg

SEQ ID NO: 4934937 - DNA, 25 bp, Homo sapien
ttggccctcatgatccacaggctcg

SEQ ID NO: 4934938 - DNA, 25 bp, Homo sapien
tctgtggcgcgctccgttgtggccc

SEQ ID NO: 4934939 - DNA, 25 bp, Homo sapien
gttgtggcccttcttgttgccggca

SEQ ID NO: 4934940 - DNA, 25 bp, Homo sapien
tgtagttagggctgtcgcctggaaa

SEQ ID NO: 4934941 - DNA, 25 bp, Homo sapien
attttggccaattcctgtagttagg

SEQ ID NO: 4934942 - DNA, 25 bp, Homo sapien
tcctccgagactgcagagaactagt

SEQ ID NO: 4934943 - DNA, 25 bp, Homo sapien
tcaggagcacgttttgtatcggcaa

SEQ ID NO: 4934944 - DNA, 25 bp, Homo sapien
caaagggcaccattgcaggaaggaa

SEQ ID NO: 4934945 - DNA, 25 bp, Homo sapien
tccaagcggtgatgaagaatgccat

SEQ ID NO: 4934946 - DNA, 25 bp, Homo sapien
caggttcactaatggcaggagaggt

SEQ ID NO: 4934947 - DNA, 25 bp, Homo sapien
atgtcacagcaagcaccgagacgca

SEQ ID NO: 4934948 - DNA, 25 bp, Homo sapien
agggctggagacatgtcacagcaag

SEQ ID NO: 4934949 - DNA, 25 bp, Homo sapien
ccgagacgcacagtcagatgagtta

SEQ ID NO: 4934950 - DNA, 25 bp, Homo sapien
tttagactgagtgcacccagtgtgc

SEQ ID NO: 4934951 - DNA, 25 bp, Homo sapien
aaggaattgtatcagggagaagcac

SEQ ID NO: 4934952 - DNA, 25 bp, Homo sapien
tccagaagacccagagtcggctgag

SEQ ID NO: 4934953 - DNA, 25 bp, Homo sapien
tagagcccacggtcttatcaaagca

SEQ ID NO: 4934954 - DNA, 25 bp, Homo sapien
agattagccgggcacggtggcgcgc

SEQ ID NO: 4934955 - DNA, 25 bp, Homo sapien
gattagccgggcacggtggcgcgcg

SEQ ID NO: 4934956 - DNA, 25 bp, Homo sapien
caaagattagccgggcacggtggcg

SEQ ID NO: 4934957 - DNA, 25 bp, Homo sapien
cctgtagtcccagctactcgggagg

SEQ ID NO: 4934958 - DNA, 25 bp, Homo sapien
ggttttactgtgttagccaggcttg

SEQ ID NO: 4934959 - DNA, 25 bp, Homo sapien
tcagtacagacggggttttactgtg

SEQ ID NO: 4934960 - DNA, 25 bp, Homo sapien
cagtacagacggggttttactgtgt

SEQ ID NO: 4934961 - DNA, 25 bp, Homo sapien
gttttactgtgttagccaggcttgt

SEQ ID NO: 4934962 - DNA, 25 bp, Homo sapien
gactattttacagccactggagtta

SEQ ID NO: 4934963 - DNA, 25 bp, Homo sapien
cagaaatgctttgtaccagagcacc

SEQ ID NO: 4934964 - DNA, 25 bp, Homo sapien
taccttagctgcatagtggaagagg

SEQ ID NO: 4934965 - DNA, 25 bp, Homo sapien
cattgggtcgggaactagctgtaga

SEQ ID NO: 4934966 - DNA, 25 bp, Homo sapien
gggaaaggtgctactatttatccta

SEQ ID NO: 4934967 - DNA, 25 bp, Homo sapien
agaacggggtccaaagcaaggctgc

SEQ ID NO: 4934968 - DNA, 25 bp, Homo sapien
tcagtgtgcctaatagatgaagcct

SEQ ID NO: 4934969 - DNA, 25 bp, Homo sapien
ctggccagcctcatgaggtgtttga

SEQ ID NO: 4934970 - DNA, 25 bp, Homo sapien
gcagctaagctgagccataccgttt

SEQ ID NO: 4934971 - DNA, 25 bp, Homo sapien
tcttgagcagagaggctcctagcga

SEQ ID NO: 4934972 - DNA, 25 bp, Homo sapien
gaacatgtttccattaggcggctga

SEQ ID NO: 4934973 - DNA, 25 bp, Homo sapien
tcagtcacgacctgcaaacagatgc

SEQ ID NO: 4934974 - DNA, 25 bp, Homo sapien
gcctaatatctttaaactcagcccc

SEQ ID NO: 4934975 - DNA, 25 bp, Homo sapien
tggatctcaaggatattgaggggcc

SEQ ID NO: 4934976 - DNA, 25 bp, Homo sapien
tctttatgatagcattatggctaga

SEQ ID NO: 4934977 - DNA, 25 bp, Homo sapien
cattatggctagatgatgaagtgga

SEQ ID NO: 4934978 - DNA, 25 bp, Homo sapien
aacatgaaatatacacctctgtttc

SEQ ID NO: 4934979 - DNA, 25 bp, Homo sapien
caccgcacccgacctaagtagattt

SEQ ID NO: 4934980 - DNA, 25 bp, Homo sapien
gaacagtattgttctaatactgcaa

SEQ ID NO: 4934981 - DNA, 25 bp, Homo sapien
gaggtcattgaatccatcctaaaag

SEQ ID NO: 4934982 - DNA, 25 bp, Homo sapien
cagctacaacgagggtgtcaaggtg

SEQ ID NO: 4934983 - DNA, 25 bp, Homo sapien
gatttgtggtgtcccctagttctca

SEQ ID NO: 4934984 - DNA, 25 bp, Homo sapien
taacgcacatgacttaatgggaatc

SEQ ID NO: 4934985 - DNA, 25 bp, Homo sapien
gggaatcattctctctcaccagatc

SEQ ID NO: 4934986 - DNA, 25 bp, Homo sapien
tgaccacatcgtaagttgggcctgg

SEQ ID NO: 4934987 - DNA, 25 bp, Homo sapien
aatgttatgtgaaggctgtagaatc

SEQ ID NO: 4934988 - DNA, 25 bp, Homo sapien
aacattgttttgtcagtttgcccta

SEQ ID NO: 4934989 - DNA, 25 bp, Homo sapien
cagtggaacgttgtgcagccttaaa

SEQ ID NO: 4934990 - DNA, 25 bp, Homo sapien
gactagagaactgcagtggatctgg

SEQ ID NO: 4934991 - DNA, 25 bp, Homo sapien
tggatctggagaggccaaggaccta

SEQ ID NO: 4934992 - DNA, 25 bp, Homo sapien
cctagagagataacaagcaccccag

SEQ ID NO: 4934993 - DNA, 25 bp, Homo sapien
tcagaaagatcaccttagggctggg

SEQ ID NO: 4934994 - DNA, 25 bp, Homo sapien
taatagcatcccagagttaaaacca

SEQ ID NO: 4934995 - DNA, 25 bp, Homo sapien
gatgcttcatcggttcaggttttac

SEQ ID NO: 4934996 - DNA, 25 bp, Homo sapien
cccttaagggccatgtgtgtttcag

SEQ ID NO: 4934997 - DNA, 25 bp, Homo sapien
ccaggagttctagattacggtaagc

SEQ ID NO: 4934998 - DNA, 25 bp, Homo sapien
tcatcgtacttaccagcagttgaca

SEQ ID NO: 4934999 - DNA, 25 bp, Homo sapien
tatcattgacaatagggagacacag

SEQ ID NO: 4935000 - DNA, 25 bp, Homo sapien
ggaacagtgccatccagttgaggac

SEQ ID NO: 4935001 - DNA, 25 bp, Homo sapien
catatttaatcttcacggcagctcc

SEQ ID NO: 4935002 - DNA, 25 bp, Homo sapien
accatgcccggtcctgatgtgatca

SEQ ID NO: 4935003 - DNA, 25 bp, Homo sapien
cccggtcctgatgtgatcatttctt

SEQ ID NO: 4935004 - DNA, 25 bp, Homo sapien
catgcccggtcctgatgtgatcatt

SEQ ID NO: 4935005 - DNA, 25 bp, Homo sapien
tgcccggtcctgatgtgatcatttc

SEQ ID NO: 4935006 - DNA, 25 bp, Homo sapien
tgtggcaagggactccacagggtcc

SEQ ID NO: 4935007 - DNA, 25 bp, Homo sapien
tcccgttgccttgaagaatatgtcc

SEQ ID NO: 4935008 - DNA, 25 bp, Homo sapien
taacattgcctgatgagaacccatt

SEQ ID NO: 4935009 - DNA, 25 bp, Homo sapien
tagccttaagatcagagtggcccat

SEQ ID NO: 4935010 - DNA, 25 bp, Homo sapien
ctggcgcctgccttctcactaatgg

SEQ ID NO: 4935011 - DNA, 25 bp, Homo sapien
tctaggatcagcagagatgtgtgca

SEQ ID NO: 4935012 - DNA, 25 bp, Homo sapien
tcactaatggccactgaaaagtggg

SEQ ID NO: 4935013 - DNA, 25 bp, Homo sapien
tgcttggagtctgcactgtgtgtgc

SEQ ID NO: 4935014 - DNA, 25 bp, Homo sapien
tattcttagctgcttcatatctaac

SEQ ID NO: 4935015 - DNA, 25 bp, Homo sapien
tctagatattatctagaagactaag

SEQ ID NO: 4935016 - DNA, 25 bp, Homo sapien
ttcacaattatagctacgtacagtt

SEQ ID NO: 4935017 - DNA, 25 bp, Homo sapien
tgttctgttttggcccgcagtcttc

SEQ ID NO: 4935018 - DNA, 25 bp, Homo sapien
acaaatactacccatattctcaaga

SEQ ID NO: 4935019 - DNA, 25 bp, Homo sapien
aatactacccatattctcaagatta

SEQ ID NO: 4935020 - DNA, 25 bp, Homo sapien
cacaaatactacccatattctcaag

SEQ ID NO: 4935021 - DNA, 25 bp, Homo sapien
caaatactacccatattctcaagat

SEQ ID NO: 4935022 - DNA, 25 bp, Homo sapien
gcaacaccttgagagtaaatggaca

SEQ ID NO: 4935023 - DNA, 25 bp, Homo sapien
tcagttgatctgtgagactgccagt

SEQ ID NO: 4935024 - DNA, 25 bp, Homo sapien
tcatacctaagtgaagctgcaaggc

SEQ ID NO: 4935025 - DNA, 25 bp, Homo sapien
taaatggacatgtgtgcgtgtatca

SEQ ID NO: 4935026 - DNA, 25 bp, Homo sapien
tatagagcaatgtctgttggcaggc

SEQ ID NO: 4935027 - DNA, 25 bp, Homo sapien
tttagaaccagtaccatgtgcattg

SEQ ID NO: 4935028 - DNA, 25 bp, Homo sapien
tgtgcattgatagcaagtctccatc

SEQ ID NO: 4935029 - DNA, 25 bp, Homo sapien
gaacaccagtctcaagtatcacctt

SEQ ID NO: 4935030 - DNA, 25 bp, Homo sapien
gttatccggcattaatacaaacttc

SEQ ID NO: 4935031 - DNA, 25 bp, Homo sapien
tggtgtttttgttatccggcattaa

SEQ ID NO: 4935032 - DNA, 25 bp, Homo sapien
gccaagtatcatattagaattggtg

SEQ ID NO: 4935033 - DNA, 25 bp, Homo sapien
aaatttgtttgccaagtatcatatt

SEQ ID NO: 4935034 - DNA, 25 bp, Homo sapien
ggtactgtggtagccacccgcagaa

SEQ ID NO: 4935035 - DNA, 25 bp, Homo sapien
tattacatcccaggccgagcttctg

SEQ ID NO: 4935036 - DNA, 25 bp, Homo sapien
gatttcgtccagtcacatgggctag

SEQ ID NO: 4935037 - DNA, 25 bp, Homo sapien
tgccctagcttcagagtataaccag

SEQ ID NO: 4935038 - DNA, 25 bp, Homo sapien
taacagttcagcattccctagacct

SEQ ID NO: 4935039 - DNA, 25 bp, Homo sapien
tctgctgtccactttaggggccact

SEQ ID NO: 4935040 - DNA, 25 bp, Homo sapien
tctgtaactggcccttctaacagtt

SEQ ID NO: 4935041 - DNA, 25 bp, Homo sapien
tccagcagtccgatctctgtaactg

SEQ ID NO: 4935042 - DNA, 25 bp, Homo sapien
cccggcccataatctaatgtttact

SEQ ID NO: 4935043 - DNA, 25 bp, Homo sapien
ggcccataatctaatgtttactaaa

SEQ ID NO: 4935044 - DNA, 25 bp, Homo sapien
ccagtccccaaggattcacattttg

SEQ ID NO: 4935045 - DNA, 25 bp, Homo sapien
gtccccaaggattcacattttgtta

SEQ ID NO: 4935046 - DNA, 25 bp, Homo sapien
ttactagcagcagcgtataagactg

SEQ ID NO: 4935047 - DNA, 25 bp, Homo sapien
tagcagcagcgtataagactgcaga

SEQ ID NO: 4935048 - DNA, 25 bp, Homo sapien
agcgtataagactgcagatctccac

SEQ ID NO: 4935049 - DNA, 25 bp, Homo sapien
tatattactagcagcagcgtataag

SEQ ID NO: 4935050 - DNA, 25 bp, Homo sapien
cagcctttgtcatcagtaacagttt

SEQ ID NO: 4935051 - DNA, 25 bp, Homo sapien
catcagtaacagtttttataggtga

SEQ ID NO: 4935052 - DNA, 25 bp, Homo sapien
ctttgtcatcagtaacagtttttat

SEQ ID NO: 4935053 - DNA, 25 bp, Homo sapien
tgtcatcagtaacagtttttatagg

SEQ ID NO: 4935054 - DNA, 25 bp, Homo sapien
atccttatacatggagcagctgaag

SEQ ID NO: 4935055 - DNA, 25 bp, Homo sapien
aatccttatacatggagcagctgaa

SEQ ID NO: 4935056 - DNA, 25 bp, Homo sapien
aaatccttatacatggagcagctga

SEQ ID NO: 4935057 - DNA, 25 bp, Homo sapien
tagctttggacagtgcactctacag

SEQ ID NO: 4935058 - DNA, 25 bp, Homo sapien
tgaatagcaaccacactcgagtctg

SEQ ID NO: 4935059 - DNA, 25 bp, Homo sapien
taattaccagagtcctaaacatggg

SEQ ID NO: 4935060 - DNA, 25 bp, Homo sapien
tatgcagtactgtgggcctcacaca

SEQ ID NO: 4935061 - DNA, 25 bp, Homo sapien
gcacaatgccctttcagctttactg

SEQ ID NO: 4935062 - DNA, 25 bp, Homo sapien
aagtcaaactcagttgtttacagcc

SEQ ID NO: 4935063 - DNA, 25 bp, Homo sapien
aactcatgatatgttccacataatt

SEQ ID NO: 4935064 - DNA, 25 bp, Homo sapien
cataatttattagattccggcagga

SEQ ID NO: 4935065 - DNA, 25 bp, Homo sapien
ttttctaggcatggcttggacctcc

SEQ ID NO: 4935066 - DNA, 25 bp, Homo sapien
taatgcatgtgtaaaagaagcccag

SEQ ID NO: 4935067 - DNA, 25 bp, Homo sapien
gaaacttgttttcagctaggaacca

SEQ ID NO: 4935068 - DNA, 25 bp, Homo sapien
tattcctggttctagtcatgcctgg

SEQ ID NO: 4935069 - DNA, 25 bp, Homo sapien
atgctgcccacttaacaacatattc

SEQ ID NO: 4935070 - DNA, 25 bp, Homo sapien
gtaaaggacagcaaatggttctgtc

SEQ ID NO: 4935071 - DNA, 25 bp, Homo sapien
taaaggacagcaaatggttctgtca

SEQ ID NO: 4935072 - DNA, 25 bp, Homo sapien
cctcgtgtaaaggacagcaaatggt

SEQ ID NO: 4935073 - DNA, 25 bp, Homo sapien
cgtgtaaaggacagcaaatggttct

SEQ ID NO: 4935074 - DNA, 25 bp, Homo sapien
caaggataactggtgttggtgcgta

SEQ ID NO: 4935075 - DNA, 25 bp, Homo sapien
ctgtggtttaccaaggataactggt

SEQ ID NO: 4935076 - DNA, 25 bp, Homo sapien
ttggtgcgtactgggtgttgatctg

SEQ ID NO: 4935077 - DNA, 25 bp, Homo sapien
cgtactgggtgttgatctggcagag

SEQ ID NO: 4935078 - DNA, 25 bp, Homo sapien
tgatgtcagggtaagtacgtttttc

SEQ ID NO: 4935079 - DNA, 25 bp, Homo sapien
ctgggccagtattatcaggcatgga

SEQ ID NO: 4935080 - DNA, 25 bp, Homo sapien
catggagatgctactgatgtcaggg

SEQ ID NO: 4935081 - DNA, 25 bp, Homo sapien
atcaggcatggagatgctactgatg

SEQ ID NO: 4935082 - DNA, 25 bp, Homo sapien
ctgggtactggtatggaacgttctc

SEQ ID NO: 4935083 - DNA, 25 bp, Homo sapien
cccattcgtagccttttcttgtctc

SEQ ID NO: 4935084 - DNA, 25 bp, Homo sapien
cagaatccaagatttgatcccttgc

SEQ ID NO: 4935085 - DNA, 25 bp, Homo sapien
tccaagatttgatcccttgctgccg

SEQ ID NO: 4935086 - DNA, 25 bp, Homo sapien
tttgatcccttgctgccgaaagctc

SEQ ID NO: 4935087 - DNA, 25 bp, Homo sapien
tcaggattccgtaactgtcttcagg

SEQ ID NO: 4935088 - DNA, 25 bp, Homo sapien
gattccgtaactgtcttcaggagac

SEQ ID NO: 4935089 - DNA, 25 bp, Homo sapien
aactgtcttcaggagacaacctgca

SEQ ID NO: 4935090 - DNA, 25 bp, Homo sapien
tccgtaactgtcttcaggagacaac

SEQ ID NO: 4935091 - DNA, 25 bp, Homo sapien
gtcttcacagtactgaaaatagtgg

SEQ ID NO: 4935092 - DNA, 25 bp, Homo sapien
ctaggaccagttggaatatccgatt

SEQ ID NO: 4935093 - DNA, 25 bp, Homo sapien
catttggtaaatcagattgagcatc

SEQ ID NO: 4935094 - DNA, 25 bp, Homo sapien
tccgattgcgtcctcttcatttggt

SEQ ID NO: 4935095 - DNA, 25 bp, Homo sapien
gtttatgagggatatctgtttgtaa

SEQ ID NO: 4935096 - DNA, 25 bp, Homo sapien
cctttttacgtttatgtatatgatt

SEQ ID NO: 4935097 - DNA, 25 bp, Homo sapien
caaggtactggtgttctaataaaat

SEQ ID NO: 4935098 - DNA, 25 bp, Homo sapien
cgttttatcaggttttcttatcaag

SEQ ID NO: 4935099 - DNA, 25 bp, Homo sapien
tattgattacagtgttcaactgaat

SEQ ID NO: 4935100 - DNA, 25 bp, Homo sapien
ggtgatacctttggttgattttcca

SEQ ID NO: 4935101 - DNA, 25 bp, Homo sapien
gaagtctcagcagtttataagttga

SEQ ID NO: 4935102 - DNA, 25 bp, Homo sapien
gattttccacgttcttattctcata

SEQ ID NO: 4935103 - DNA, 25 bp, Homo sapien
tggctggtagactcttactttaaac

SEQ ID NO: 4935104 - DNA, 25 bp, Homo sapien
cgttagaagcaaatgagagagtgat

SEQ ID NO: 4935105 - DNA, 25 bp, Homo sapien
tagagataagacctccatattggtc

SEQ ID NO: 4935106 - DNA, 25 bp, Homo sapien
tgggagcaacagaggtttcagtcgt

SEQ ID NO: 4935107 - DNA, 25 bp, Homo sapien
ttttgagattggatggcatggctgt

SEQ ID NO: 4935108 - DNA, 25 bp, Homo sapien
aaagtatttttcagcggaagatggg

SEQ ID NO: 4935109 - DNA, 25 bp, Homo sapien
gtaaagtatttttcagcggaagatg

SEQ ID NO: 4935110 - DNA, 25 bp, Homo sapien
taaagtatttttcagcggaagatgg

SEQ ID NO: 4935111 - DNA, 25 bp, Homo sapien
gactgcaacctctgcctcccaggtt

SEQ ID NO: 4935112 - DNA, 25 bp, Homo sapien
gtgtcacccaggctgccaggctgga

SEQ ID NO: 4935113 - DNA, 25 bp, Homo sapien
caagcaattgccctgcctcagcctc

SEQ ID NO: 4935114 - DNA, 25 bp, Homo sapien
gtggagtggcatgatctcggctgac

SEQ ID NO: 4935115 - DNA, 25 bp, Homo sapien
agtggagtcattcccttattgtcta

SEQ ID NO: 4935116 - DNA, 25 bp, Homo sapien
tcaaggaactcgggggatgttgagt

SEQ ID NO: 4935117 - DNA, 25 bp, Homo sapien
gagtcattcccttattgtctattac

SEQ ID NO: 4935118 - DNA, 25 bp, Homo sapien
tggagtcattcccttattgtctatt

SEQ ID NO: 4935119 - DNA, 25 bp, Homo sapien
tagcatataataacagggtcagggt

SEQ ID NO: 4935120 - DNA, 25 bp, Homo sapien
tttgctaaggagattgccctcactt

SEQ ID NO: 4935121 - DNA, 25 bp, Homo sapien
ggtgcttaaggcacaagctccctgg

SEQ ID NO: 4935122 - DNA, 25 bp, Homo sapien
gaaatgcaagtcataggaggcaaaa

SEQ ID NO: 4935123 - DNA, 25 bp, Homo sapien
tgagcactccgtcccatatttgaaa

SEQ ID NO: 4935124 - DNA, 25 bp, Homo sapien
caagcacacggatgaactagttaca

SEQ ID NO: 4935125 - DNA, 25 bp, Homo sapien
aatgatgtcttcgagagttgagcac

SEQ ID NO: 4935126 - DNA, 25 bp, Homo sapien
tatgagcagtgcgatgcaagcacac

SEQ ID NO: 4935127 - DNA, 25 bp, Homo sapien
ccgagaccagggctttcctcgtccg

SEQ ID NO: 4935128 - DNA, 25 bp, Homo sapien
gagaccagggctttcctcgtccggc

SEQ ID NO: 4935129 - DNA, 25 bp, Homo sapien
ggaccccaggatgtccgctcggcgg

SEQ ID NO: 4935130 - DNA, 25 bp, Homo sapien
caggatgtccgctcggcggggcgac

SEQ ID NO: 4935131 - DNA, 25 bp, Homo sapien
tgcctggagagtgcactgcaaggcc

SEQ ID NO: 4935132 - DNA, 25 bp, Homo sapien
ccgacagcgggcgtccaactctggg

SEQ ID NO: 4935133 - DNA, 25 bp, Homo sapien
caggaaccgctcgttagggtcggtg

SEQ ID NO: 4935134 - DNA, 25 bp, Homo sapien
cgttagggtcggtgtggtgcctgga

SEQ ID NO: 4935135 - DNA, 25 bp, Homo sapien
taggtaacctgtctacctccagtgg

SEQ ID NO: 4935136 - DNA, 25 bp, Homo sapien
cgtctcaggtctgtagccctcggga

SEQ ID NO: 4935137 - DNA, 25 bp, Homo sapien
tccctgctggcgttcatttaggtaa

SEQ ID NO: 4935138 - DNA, 25 bp, Homo sapien
gattgcagggctcgttccctgctgg

SEQ ID NO: 4935139 - DNA, 25 bp, Homo sapien
tctggtttcatttccgaccacaagg

SEQ ID NO: 4935140 - DNA, 25 bp, Homo sapien
ccaactagctcctcgctgaaactgg

SEQ ID NO: 4935141 - DNA, 25 bp, Homo sapien
tgttgcctaaagaataaactccagg

SEQ ID NO: 4935142 - DNA, 25 bp, Homo sapien
ggcacgttccggtcataaccaacta

SEQ ID NO: 4935143 - DNA, 25 bp, Homo sapien
tggagggcggtacacagtaagagct

SEQ ID NO: 4935144 - DNA, 25 bp, Homo sapien
cgcttcatgcagagtacctggtgtg

SEQ ID NO: 4935145 - DNA, 25 bp, Homo sapien
taagagctcaatgtatgtccatccc

SEQ ID NO: 4935146 - DNA, 25 bp, Homo sapien
gtgtggagggcggtacacagtaaga

SEQ ID NO: 4935147 - DNA, 25 bp, Homo sapien
gaatgagggttgagtcggttccaac

SEQ ID NO: 4935148 - DNA, 25 bp, Homo sapien
gggtctgaacaggagtttgtgctct

SEQ ID NO: 4935149 - DNA, 25 bp, Homo sapien
cttttcggaggtgatgaggagccac

SEQ ID NO: 4935150 - DNA, 25 bp, Homo sapien
ttgtgctcttggagcatggcttgtg

SEQ ID NO: 4935151 - DNA, 25 bp, Homo sapien
attaccataacacccaacagaaggg

SEQ ID NO: 4935152 - DNA, 25 bp, Homo sapien
agcaggcacgccgagcagtagggcc

SEQ ID NO: 4935153 - DNA, 25 bp, Homo sapien
caggcacgccgagcagtagggccag

SEQ ID NO: 4935154 - DNA, 25 bp, Homo sapien
agagcaggcacgccgagcagtaggg

SEQ ID NO: 4935155 - DNA, 25 bp, Homo sapien
gcaggcacgccgagcagtagggcca

SEQ ID NO: 4935156 - DNA, 25 bp, Homo sapien
tcatacacccccataagaattcagc

SEQ ID NO: 4935157 - DNA, 25 bp, Homo sapien
ggattgttgtggaagctccctgtgt

SEQ ID NO: 4935158 - DNA, 25 bp, Homo sapien
taagaattcagcatgcctcctgctg

SEQ ID NO: 4935159 - DNA, 25 bp, Homo sapien
ttgttgtggaagctccctgtgtccc

SEQ ID NO: 4935160 - DNA, 25 bp, Homo sapien
ccgtgttgccaggatctgggccagg

SEQ ID NO: 4935161 - DNA, 25 bp, Homo sapien
gtcccccgtgttgccaggatctggg

SEQ ID NO: 4935162 - DNA, 25 bp, Homo sapien
cgtgttgccaggatctgggccagga

SEQ ID NO: 4935163 - DNA, 25 bp, Homo sapien
tgggtcccccgtgttgccaggatct

SEQ ID NO: 4935164 - DNA, 25 bp, Homo sapien
cattgtgctcggttctagaaactgc

SEQ ID NO: 4935165 - DNA, 25 bp, Homo sapien
ctggaccttgtatccccgggccgtg

SEQ ID NO: 4935166 - DNA, 25 bp, Homo sapien
gctgccccagctggaccttgtatcc

SEQ ID NO: 4935167 - DNA, 25 bp, Homo sapien
tccccaacattgtgctcggttctag

SEQ ID NO: 4935168 - DNA, 25 bp, Homo sapien
gatcaaggccgcagatggctgattt

SEQ ID NO: 4935169 - DNA, 25 bp, Homo sapien
tcagatcaaggccgcagatggctga

SEQ ID NO: 4935170 - DNA, 25 bp, Homo sapien
atcaaggccgcagatggctgattta

SEQ ID NO: 4935171 - DNA, 25 bp, Homo sapien
agatcaaggccgcagatggctgatt

SEQ ID NO: 4935172 - DNA, 25 bp, Homo sapien
gagcctcggaacaaggtggtgggaa

SEQ ID NO: 4935173 - DNA, 25 bp, Homo sapien
ccagagcctcggaacaaggtggtgg

SEQ ID NO: 4935174 - DNA, 25 bp, Homo sapien
cagagcctcggaacaaggtggtggg

SEQ ID NO: 4935175 - DNA, 25 bp, Homo sapien
gcctcggaacaaggtggtgggaaga

SEQ ID NO: 4935176 - DNA, 25 bp, Homo sapien
ggagcccagccctgccaggcacaga

SEQ ID NO: 4935177 - DNA, 25 bp, Homo sapien
cagccctgccaggcacagagatgag

SEQ ID NO: 4935178 - DNA, 25 bp, Homo sapien
aggggctcctggtcaagcagggagg

SEQ ID NO: 4935179 - DNA, 25 bp, Homo sapien
tcctggtcaagcagggaggcaggaa

SEQ ID NO: 4935180 - DNA, 25 bp, Homo sapien
ccagccaaccagtttttttatgcag

SEQ ID NO: 4935181 - DNA, 25 bp, Homo sapien
ttttttatgcagtcgttcatccagc

SEQ ID NO: 4935182 - DNA, 25 bp, Homo sapien
gccctctacacagccaaccaatctc

SEQ ID NO: 4935183 - DNA, 25 bp, Homo sapien
tatgcagtcgttcatccagccctct

SEQ ID NO: 4935184 - DNA, 25 bp, Homo sapien
tacccgctgtgtgacatacagccct

SEQ ID NO: 4935185 - DNA, 25 bp, Homo sapien
caggggattagggtcatgaaaacac

SEQ ID NO: 4935186 - DNA, 25 bp, Homo sapien
tattctacatgagtcaggctctgag

SEQ ID NO: 4935187 - DNA, 25 bp, Homo sapien
cacaggccactaagggcctggcata

SEQ ID NO: 4935188 - DNA, 25 bp, Homo sapien
ctaactgactaactggctcttccag

SEQ ID NO: 4935189 - DNA, 25 bp, Homo sapien
ccttgctcagaggtgtgatcctgca

SEQ ID NO: 4935190 - DNA, 25 bp, Homo sapien
tgatcctgcacatctggcccggcag

SEQ ID NO: 4935191 - DNA, 25 bp, Homo sapien
gaggtgtgatcctgcacatctggcc

SEQ ID NO: 4935192 - DNA, 25 bp, Homo sapien
gcagcagcttcttgtgaatgcggtt

SEQ ID NO: 4935193 - DNA, 25 bp, Homo sapien
gcgatgctccacattggaacacacc

SEQ ID NO: 4935194 - DNA, 25 bp, Homo sapien
ggttgtctctccagctctaggaagc

SEQ ID NO: 4935195 - DNA, 25 bp, Homo sapien
ttgtctctccagctctaggaagctg

SEQ ID NO: 4935196 - DNA, 25 bp, Homo sapien
gcagaagctgcgatgctccacattg

SEQ ID NO: 4935197 - DNA, 25 bp, Homo sapien
tgctgcacgggctgcggggggataa

SEQ ID NO: 4935198 - DNA, 25 bp, Homo sapien
gccctgctgcacgggctgcgggggg

SEQ ID NO: 4935199 - DNA, 25 bp, Homo sapien
cctgctgcacgggctgcggggggat

SEQ ID NO: 4935200 - DNA, 25 bp, Homo sapien
tgcacgggctgcggggggataatgc

SEQ ID NO: 4935201 - DNA, 25 bp, Homo sapien
attttcttgttgtaccatggggttg

SEQ ID NO: 4935202 - DNA, 25 bp, Homo sapien
cagagtccacttgtgagtgaggatc

SEQ ID NO: 4935203 - DNA, 25 bp, Homo sapien
tcagagtccacttgtgagtgaggat

SEQ ID NO: 4935204 - DNA, 25 bp, Homo sapien
agagtccacttgtgagtgaggatcc

SEQ ID NO: 4935205 - DNA, 25 bp, Homo sapien
tagccgattgtgaaatctgagcccc

SEQ ID NO: 4935206 - DNA, 25 bp, Homo sapien
gaaggccttatgttagccttagccg

SEQ ID NO: 4935207 - DNA, 25 bp, Homo sapien
tatgttagccttagccgattgtgaa

SEQ ID NO: 4935208 - DNA, 25 bp, Homo sapien
tgtaacctggaaggccttatgttag

SEQ ID NO: 4935209 - DNA, 25 bp, Homo sapien
cctgcgtctcctgatgggttggaga

SEQ ID NO: 4935210 - DNA, 25 bp, Homo sapien
cactgtcattttatcaccagtgtct

SEQ ID NO: 4935211 - DNA, 25 bp, Homo sapien
cttggttcccagtatacagcaggtg

SEQ ID NO: 4935212 - DNA, 25 bp, Homo sapien
gctcaataggtgcatgttatgtaaa

SEQ ID NO: 4935213 - DNA, 25 bp, Homo sapien
cagtctggttaacagggcaaaatcc

SEQ ID NO: 4935214 - DNA, 25 bp, Homo sapien
cacagtcagcatatggtaatgcagc

SEQ ID NO: 4935215 - DNA, 25 bp, Homo sapien
gtccaatgcttacacacacagtcag

SEQ ID NO: 4935216 - DNA, 25 bp, Homo sapien
cagctccatggagtcaaatttctaa

SEQ ID NO: 4935217 - DNA, 25 bp, Homo sapien
gttcaaaaccaggttgatgggccag

SEQ ID NO: 4935218 - DNA, 25 bp, Homo sapien
gggtcaagttcaaggctcaggcaga

SEQ ID NO: 4935219 - DNA, 25 bp, Homo sapien
agggttgggtccagctaagtagcct

SEQ ID NO: 4935220 - DNA, 25 bp, Homo sapien
atgccccaggttagcaacccagagg

SEQ ID NO: 4935221 - DNA, 25 bp, Homo sapien
tccacaggtttatgtcccccccatc

SEQ ID NO: 4935222 - DNA, 25 bp, Homo sapien
ctccacaggtttatgtcccccccat

SEQ ID NO: 4935223 - DNA, 25 bp, Homo sapien
actgcaggtcacaacggcaggtgaa

SEQ ID NO: 4935224 - DNA, 25 bp, Homo sapien
aacggcaggtgaaggcgaggaggag

SEQ ID NO: 4935225 - DNA, 25 bp, Homo sapien
gggttccaggtagggatcaagctgg

SEQ ID NO: 4935226 - DNA, 25 bp, Homo sapien
acagccgggcccacgaacagggtga

SEQ ID NO: 4935227 - DNA, 25 bp, Homo sapien
tcagtcttgtgggtatactgctctc

SEQ ID NO: 4935228 - DNA, 25 bp, Homo sapien
cttgtgggtatactgctctctggag

SEQ ID NO: 4935229 - DNA, 25 bp, Homo sapien
tctggagggggctctcccgggcact

SEQ ID NO: 4935230 - DNA, 25 bp, Homo sapien
tgtgtctccattatgtgatgtgacc

SEQ ID NO: 4935231 - DNA, 25 bp, Homo sapien
gagctccaacaaaggtcaacctccc

SEQ ID NO: 4935232 - DNA, 25 bp, Homo sapien
ctccaacaaaggtcaacctcccaag

SEQ ID NO: 4935233 - DNA, 25 bp, Homo sapien
ttctgagctccaacaaaggtcaacc

SEQ ID NO: 4935234 - DNA, 25 bp, Homo sapien
tttctgagctccaacaaaggtcaac

SEQ ID NO: 4935235 - DNA, 25 bp, Homo sapien
cagtaccgcactcgggcgcctcagc

SEQ ID NO: 4935236 - DNA, 25 bp, Homo sapien
ccgcccgccgccagtaccgcactcg

SEQ ID NO: 4935237 - DNA, 25 bp, Homo sapien
cgagggcagcgacaagtgcggcgac

SEQ ID NO: 4935238 - DNA, 25 bp, Homo sapien
agggcagcgacaagtgcggcgacgc

SEQ ID NO: 4935239 - DNA, 25 bp, Homo sapien
gcagcgacaagtgcggcgacgcggc

SEQ ID NO: 4935240 - DNA, 25 bp, Homo sapien
ccgagggcagcgacaagtgcggcga

SEQ ID NO: 4935241 - DNA, 25 bp, Homo sapien
cgactcgtggcccacgtccgcctca

SEQ ID NO: 4935242 - DNA, 25 bp, Homo sapien
cgctctccgactgctgtcccggctg

SEQ ID NO: 4935243 - DNA, 25 bp, Homo sapien
gggcgcccgctctccgactgctgtc

SEQ ID NO: 4935244 - DNA, 25 bp, Homo sapien
tcgtggcccacgtccgcctcagttt

SEQ ID NO: 4935245 - DNA, 25 bp, Homo sapien
gagcagaaagatgtttgactccctt

SEQ ID NO: 4935246 - DNA, 25 bp, Homo sapien
gggacggcgacatcctcaggctctg

SEQ ID NO: 4935247 - DNA, 25 bp, Homo sapien
tggcaccggccatttgactgtcctc

SEQ ID NO: 4935248 - DNA, 25 bp, Homo sapien
catccgggttttaccgagagtgccg

SEQ ID NO: 4935249 - DNA, 25 bp, Homo sapien
tgtcctctttactgataaaaggagg

SEQ ID NO: 4935250 - DNA, 25 bp, Homo sapien
ataggtcctattcccgcagacatcg

SEQ ID NO: 4935251 - DNA, 25 bp, Homo sapien
gtggacgcaatcctccttaggttca

SEQ ID NO: 4935252 - DNA, 25 bp, Homo sapien
gggccaccacgccataggtcctatt

SEQ ID NO: 4935253 - DNA, 25 bp, Homo sapien
agcaccaggaagtggacgcaatcct

SEQ ID NO: 4935254 - DNA, 25 bp, Homo sapien
tgccattgtagaaacagtactcatc

SEQ ID NO: 4935255 - DNA, 25 bp, Homo sapien
aggacactcccggtgcgttttgcca

SEQ ID NO: 4935256 - DNA, 25 bp, Homo sapien
taatagggaaacctggagaccacgc

SEQ ID NO: 4935257 - DNA, 25 bp, Homo sapien
cacgcacaccgcgaagggcacgaag

SEQ ID NO: 4935258 - DNA, 25 bp, Homo sapien
tgttaccagtcacagagaggagcgc

SEQ ID NO: 4935259 - DNA, 25 bp, Homo sapien
tcctttgataatgagagcccactgg

SEQ ID NO: 4935260 - DNA, 25 bp, Homo sapien
caattcagcgatttgccgtggctca

SEQ ID NO: 4935261 - DNA, 25 bp, Homo sapien
tgagactcaaaagaaacggctccgt

SEQ ID NO: 4935262 - DNA, 25 bp, Homo sapien
aagatgagaacgcagttgtcatcgt

SEQ ID NO: 4935263 - DNA, 25 bp, Homo sapien
catcgttagcgtttctaatcacact

SEQ ID NO: 4935264 - DNA, 25 bp, Homo sapien
aaactcaaaccgcaaaataaagatg

SEQ ID NO: 4935265 - DNA, 25 bp, Homo sapien
cccaggtctgcggtagtgcctgaca

SEQ ID NO: 4935266 - DNA, 25 bp, Homo sapien
gcttcgcagcgaaatcttttatatg

SEQ ID NO: 4935267 - DNA, 25 bp, Homo sapien
ccaggtggcgggctgggtattaaag

SEQ ID NO: 4935268 - DNA, 25 bp, Homo sapien
ggctgggtattaaagacagcttcgc

SEQ ID NO: 4935269 - DNA, 25 bp, Homo sapien
aaatggagcggtccaggtggcgggc

SEQ ID NO: 4935270 - DNA, 25 bp, Homo sapien
cacgggacgcagatcagcaggcact

SEQ ID NO: 4935271 - DNA, 25 bp, Homo sapien
ccaattaagccaaagatttgcaaag

SEQ ID NO: 4935272 - DNA, 25 bp, Homo sapien
caattaagccaaagatttgcaaagc

SEQ ID NO: 4935273 - DNA, 25 bp, Homo sapien
tgccagccacgctgaggacctactg

SEQ ID NO: 4935274 - DNA, 25 bp, Homo sapien
gattttttatgaccagtagtatgcc

SEQ ID NO: 4935275 - DNA, 25 bp, Homo sapien
ttttgtgacccagggcttaatgttg

SEQ ID NO: 4935276 - DNA, 25 bp, Homo sapien
tcaaccctgaactgcaataagcagg

SEQ ID NO: 4935277 - DNA, 25 bp, Homo sapien
tcagttccttcactgagggagggct

SEQ ID NO: 4935278 - DNA, 25 bp, Homo sapien
aatggctactgagacacggctggac

SEQ ID NO: 4935279 - DNA, 25 bp, Homo sapien
cagaatggctactgagacacggctg

SEQ ID NO: 4935280 - DNA, 25 bp, Homo sapien
ttcacagaatggctactgagacacg

SEQ ID NO: 4935281 - DNA, 25 bp, Homo sapien
cacagaatggctactgagacacggc

SEQ ID NO: 4935282 - DNA, 25 bp, Homo sapien
caatctggagcgacttcatgttaaa

SEQ ID NO: 4935283 - DNA, 25 bp, Homo sapien
gtaacacaatctggagcgacttcat

SEQ ID NO: 4935284 - DNA, 25 bp, Homo sapien
acacaatctggagcgacttcatgtt

SEQ ID NO: 4935285 - DNA, 25 bp, Homo sapien
tctggagcgacttcatgttaaatac

SEQ ID NO: 4935286 - DNA, 25 bp, Homo sapien
cactgcagcggatacaggtaggcca

SEQ ID NO: 4935287 - DNA, 25 bp, Homo sapien
tgttccgtcaggatgcatgtcagga

SEQ ID NO: 4935288 - DNA, 25 bp, Homo sapien
gagaagaagacgatccgctgttccg

SEQ ID NO: 4935289 - DNA, 25 bp, Homo sapien
tctggtccgacaggatgggcacgaa

SEQ ID NO: 4935290 - DNA, 25 bp, Homo sapien
gtaggtgatgctcccatgatcaata

SEQ ID NO: 4935291 - DNA, 25 bp, Homo sapien
ggacttggagtaggtgatgctccca

SEQ ID NO: 4935292 - DNA, 25 bp, Homo sapien
ttatcagaactaaaccgtcggcttc

SEQ ID NO: 4935293 - DNA, 25 bp, Homo sapien
tgtccacgttatcgtccgtggactt

SEQ ID NO: 4935294 - DNA, 25 bp, Homo sapien
tacagcccggctgtttgcaaaaagc

SEQ ID NO: 4935295 - DNA, 25 bp, Homo sapien
ttcaccagaagcaagtacagcccgg

SEQ ID NO: 4935296 - DNA, 25 bp, Homo sapien
tggctgcagttggacccacaggttg

SEQ ID NO: 4935297 - DNA, 25 bp, Homo sapien
aaagttcgcgcagaggacagttgcc

SEQ ID NO: 4935298 - DNA, 25 bp, Homo sapien
ggtgggcggcgtgcagctcatggtg

SEQ ID NO: 4935299 - DNA, 25 bp, Homo sapien
aggaggtgggcggcgtgcagctcat

SEQ ID NO: 4935300 - DNA, 25 bp, Homo sapien
gcggcgtgcagctcatggtggagct

SEQ ID NO: 4935301 - DNA, 25 bp, Homo sapien
tgggcggcgtgcagctcatggtgga

SEQ ID NO: 4935302 - DNA, 25 bp, Homo sapien
tttctgctgccaggaccgccggtgg

SEQ ID NO: 4935303 - DNA, 25 bp, Homo sapien
aagatgctcacgagcagctgcaggg

SEQ ID NO: 4935304 - DNA, 25 bp, Homo sapien
gaagatgctcacgagcagctgcagg

SEQ ID NO: 4935305 - DNA, 25 bp, Homo sapien
ctgaagatgctcacgagcagctgca

SEQ ID NO: 4935306 - DNA, 25 bp, Homo sapien
gcaggtttatcagatttgcgtcttc

SEQ ID NO: 4935307 - DNA, 25 bp, Homo sapien
gggacagagccctccacggactgag

SEQ ID NO: 4935308 - DNA, 25 bp, Homo sapien
ctccctgcaggtttatcagatttgc

SEQ ID NO: 4935309 - DNA, 25 bp, Homo sapien
ctggatgcaggcctctcgggacaga

SEQ ID NO: 4935310 - DNA, 25 bp, Homo sapien
tgtggctctcccatagatggtttca

SEQ ID NO: 4935311 - DNA, 25 bp, Homo sapien
ggtttcatgatctagcttatgagtc

SEQ ID NO: 4935312 - DNA, 25 bp, Homo sapien
cacatcaaaatggcctgtctgtccc

SEQ ID NO: 4935313 - DNA, 25 bp, Homo sapien
ggctctcccatagatggtttcatga

SEQ ID NO: 4935314 - DNA, 25 bp, Homo sapien
ctgtgttcatagtttaaatgattct

SEQ ID NO: 4935315 - DNA, 25 bp, Homo sapien
ccctggagccctggttttgagaaat

SEQ ID NO: 4935316 - DNA, 25 bp, Homo sapien
cttcactattaaagactctgtgttc

SEQ ID NO: 4935317 - DNA, 25 bp, Homo sapien
tataaaactgatggtcccctggagc

SEQ ID NO: 4935318 - DNA, 25 bp, Homo sapien
tgtcctcctccgactgggtgtcgag

SEQ ID NO: 4935319 - DNA, 25 bp, Homo sapien
cgactgggtgtcgaggtccatctga

SEQ ID NO: 4935320 - DNA, 25 bp, Homo sapien
tgagccgggctttaagaaaagaatg

SEQ ID NO: 4935321 - DNA, 25 bp, Homo sapien
catctgagcaaaggcgtccatcctc

SEQ ID NO: 4935322 - DNA, 25 bp, Homo sapien
cttggacttagaagcattccattta

SEQ ID NO: 4935323 - DNA, 25 bp, Homo sapien
cagctcaggcatggcaatgtcctgc

SEQ ID NO: 4935324 - DNA, 25 bp, Homo sapien
tacagcctgcggtgtccgtcagccg

SEQ ID NO: 4935325 - DNA, 25 bp, Homo sapien
tgctgaccaccatgcgcctgtgggt

SEQ ID NO: 4935326 - DNA, 25 bp, Homo sapien
ggctcttttctcaacggtcggtctc

SEQ ID NO: 4935327 - DNA, 25 bp, Homo sapien
ttcacgtggtcgtccagcttcgagg

SEQ ID NO: 4935328 - DNA, 25 bp, Homo sapien
cctcggaggtacaaatagcgggcca

SEQ ID NO: 4935329 - DNA, 25 bp, Homo sapien
tgcatcagataaacgagccctcgga

SEQ ID NO: 4935330 - DNA, 25 bp, Homo sapien
tcaaggcctcgaacagccggtgtat

SEQ ID NO: 4935331 - DNA, 25 bp, Homo sapien
tatcagactcaacaacagggatcag

SEQ ID NO: 4935332 - DNA, 25 bp, Homo sapien
gcttcaccacgcagggagaggtaca

SEQ ID NO: 4935333 - DNA, 25 bp, Homo sapien
catcatccgcaggagctcgatggaa

SEQ ID NO: 4935334 - DNA, 25 bp, Homo sapien
tcagtgagcgcacaatctgatggct

SEQ ID NO: 4935335 - DNA, 25 bp, Homo sapien
tgctgatgcccacgggctggctcgt

SEQ ID NO: 4935336 - DNA, 25 bp, Homo sapien
gatgacacggaggagcctccatgca

SEQ ID NO: 4935337 - DNA, 25 bp, Homo sapien
gctcgtgaccgggagacagcaggcc

SEQ ID NO: 4935338 - DNA, 25 bp, Homo sapien
acagaaggagctggcgctagatgac

SEQ ID NO: 4935339 - DNA, 25 bp, Homo sapien
gattctgcccaatgagaggaaacag

SEQ ID NO: 4935340 - DNA, 25 bp, Homo sapien
gatggcattatcacaagcagccagg

SEQ ID NO: 4935341 - DNA, 25 bp, Homo sapien
gcaacgtaagcaaggccaaagtgac

SEQ ID NO: 4935342 - DNA, 25 bp, Homo sapien
tgggcggccacatgacacgattctg

SEQ ID NO: 4935343 - DNA, 25 bp, Homo sapien
cttgcttctgcacggccatgctgga

SEQ ID NO: 4935344 - DNA, 25 bp, Homo sapien
cacctcacgggcagctgcaacaggg

SEQ ID NO: 4935345 - DNA, 25 bp, Homo sapien
gaggtggcagacatgtcagcgtccc

SEQ ID NO: 4935346 - DNA, 25 bp, Homo sapien
gctgcccatggacgtcttgcttctg

SEQ ID NO: 4935347 - DNA, 25 bp, Homo sapien
agttgttgcacacgcccacgtagac

SEQ ID NO: 4935348 - DNA, 25 bp, Homo sapien
tgtgcacacctatggctactacgca

SEQ ID NO: 4935349 - DNA, 25 bp, Homo sapien
gaacaagacagtgcatgcccaaagt

SEQ ID NO: 4935350 - DNA, 25 bp, Homo sapien
tgttcctgctcagctaggtggcgtg

SEQ ID NO: 4935351 - DNA, 25 bp, Homo sapien
gcctgtggacactacgccaccagca

SEQ ID NO: 4935352 - DNA, 25 bp, Homo sapien
tcagccagcctgtggacactacgcc

SEQ ID NO: 4935353 - DNA, 25 bp, Homo sapien
cgcagctgccaccagtgctcagcca

SEQ ID NO: 4935354 - DNA, 25 bp, Homo sapien
gccagcctgtggacactacgccacc

SEQ ID NO: 4935355 - DNA, 25 bp, Homo sapien
caagtgagagtgaatcggcgaagcc

SEQ ID NO: 4935356 - DNA, 25 bp, Homo sapien
cacagactctgggtttaaggcagaa

SEQ ID NO: 4935357 - DNA, 25 bp, Homo sapien
tcacctaatgaaggagccagacacc

SEQ ID NO: 4935358 - DNA, 25 bp, Homo sapien
aaagcaatcttttggtcaggtggcc

SEQ ID NO: 4935359 - DNA, 25 bp, Homo sapien
gacggagctggacaacttacacaca

SEQ ID NO: 4935360 - DNA, 25 bp, Homo sapien
cacacacactcgtttttatccaggt

SEQ ID NO: 4935361 - DNA, 25 bp, Homo sapien
cgatcttgccaacgcctaggtttgt

SEQ ID NO: 4935362 - DNA, 25 bp, Homo sapien
tctgaaggtggaaatctccaagtag

SEQ ID NO: 4935363 - DNA, 25 bp, Homo sapien
tcctcgacagggaaaatgactacct

SEQ ID NO: 4935364 - DNA, 25 bp, Homo sapien
tctactggccgagcatttactatgg

SEQ ID NO: 4935365 - DNA, 25 bp, Homo sapien
tctcatggatgaacgaaggcgtcct

SEQ ID NO: 4935366 - DNA, 25 bp, Homo sapien
ggcgtcctactgtccctaatgagaa

SEQ ID NO: 4935367 - DNA, 25 bp, Homo sapien
taaagtgggtattctccgaagtaga

SEQ ID NO: 4935368 - DNA, 25 bp, Homo sapien
caggttggcttcgaagacttctttc

SEQ ID NO: 4935369 - DNA, 25 bp, Homo sapien
caaaggtcacactcggttttcaggt

SEQ ID NO: 4935370 - DNA, 25 bp, Homo sapien
gtggtcatcggccagcttcttccca

SEQ ID NO: 4935371 - DNA, 25 bp, Homo sapien
agcccgagcactcacagctgaggac

SEQ ID NO: 4935372 - DNA, 25 bp, Homo sapien
cgagcccgagcactcacagctgagg

SEQ ID NO: 4935373 - DNA, 25 bp, Homo sapien
gcccgagcactcacagctgaggact

SEQ ID NO: 4935374 - DNA, 25 bp, Homo sapien
gagcccgagcactcacagctgagga

SEQ ID NO: 4935375 - DNA, 25 bp, Homo sapien
taagatcagttcaccggagaccttg

SEQ ID NO: 4935376 - DNA, 25 bp, Homo sapien
cacagggcactggaatcttagaaag

SEQ ID NO: 4935377 - DNA, 25 bp, Homo sapien
ggagaccttgttgcaacacacagga

SEQ ID NO: 4935378 - DNA, 25 bp, Homo sapien
gctttgtggccagtctcagctgaga

SEQ ID NO: 4935379 - DNA, 25 bp, Homo sapien
tcgttactcatcttatcaaagtagg

SEQ ID NO: 4935380 - DNA, 25 bp, Homo sapien
tcagcaagacgttggtcagcgcctg

SEQ ID NO: 4935381 - DNA, 25 bp, Homo sapien
gtgtgcccacgacggcgtccatcag

SEQ ID NO: 4935382 - DNA, 25 bp, Homo sapien
taggataacttggaggcagcgtaga

SEQ ID NO: 4935383 - DNA, 25 bp, Homo sapien
tgacagatgccacaaagagagcaaa

SEQ ID NO: 4935384 - DNA, 25 bp, Homo sapien
tcctgcagttggtgacagatgccac

SEQ ID NO: 4935385 - DNA, 25 bp, Homo sapien
ctgtacccagaaagtggcagaggtc

SEQ ID NO: 4935386 - DNA, 25 bp, Homo sapien
cagaggtcctgcagttggtgacaga

SEQ ID NO: 4935387 - DNA, 25 bp, Homo sapien
ggtccctctgggtcacgtgggagag

SEQ ID NO: 4935388 - DNA, 25 bp, Homo sapien
tccctctgggtcacgtgggagaggg

SEQ ID NO: 4935389 - DNA, 25 bp, Homo sapien
aggtccctctgggtcacgtgggaga

SEQ ID NO: 4935390 - DNA, 25 bp, Homo sapien
aaggtccctctgggtcacgtgggag

SEQ ID NO: 4935391 - DNA, 25 bp, Homo sapien
tgtttccagggttgtctccggaagc

SEQ ID NO: 4935392 - DNA, 25 bp, Homo sapien
agcagcacgtccaccgcttgtggga

SEQ ID NO: 4935393 - DNA, 25 bp, Homo sapien
ggttgattttatgcttcagtgtttc

SEQ ID NO: 4935394 - DNA, 25 bp, Homo sapien
gttgtctccggaagcgtcatgggca

SEQ ID NO: 4935395 - DNA, 25 bp, Homo sapien
accccttccagaatcggcagccaca

SEQ ID NO: 4935396 - DNA, 25 bp, Homo sapien
attccccacggctgctttgcacgct

SEQ ID NO: 4935397 - DNA, 25 bp, Homo sapien
caaaagccctgctcggctaccagct

SEQ ID NO: 4935398 - DNA, 25 bp, Homo sapien
ccttccagaatcggcagccacagga

SEQ ID NO: 4935399 - DNA, 25 bp, Homo sapien
gatggtccatgaagaagcattgaac

SEQ ID NO: 4935400 - DNA, 25 bp, Homo sapien
tgcagtgcccactttaaaggagtgc

SEQ ID NO: 4935401 - DNA, 25 bp, Homo sapien
cgctcagagcacaccataacttggg

SEQ ID NO: 4935402 - DNA, 25 bp, Homo sapien
gcattgaacacggtcaccttgcctt

SEQ ID NO: 4935403 - DNA, 25 bp, Homo sapien
tcgaatatggatgaacacacttggg

SEQ ID NO: 4935404 - DNA, 25 bp, Homo sapien
gaatagcttgtatcctactgtcgaa

SEQ ID NO: 4935405 - DNA, 25 bp, Homo sapien
cagaaatcacgtgaattcagaggct

SEQ ID NO: 4935406 - DNA, 25 bp, Homo sapien
tgtttacagaaaccgagtgaggctg

SEQ ID NO: 4935407 - DNA, 25 bp, Homo sapien
gattcattaacacgaaacccacggc

SEQ ID NO: 4935408 - DNA, 25 bp, Homo sapien
tcaggccgaggagaggacacttgtt

SEQ ID NO: 4935409 - DNA, 25 bp, Homo sapien
tccttgtgcttagggagctccatgc

SEQ ID NO: 4935410 - DNA, 25 bp, Homo sapien
gaattagcggatatggaaccactgc

SEQ ID NO: 4935411 - DNA, 25 bp, Homo sapien
caggacatgctgtggacgttgatga

SEQ ID NO: 4935412 - DNA, 25 bp, Homo sapien
aatcaaatccgtgacactggagcag

SEQ ID NO: 4935413 - DNA, 25 bp, Homo sapien
tgtccgtcctgcacaatcaaatccg

SEQ ID NO: 4935414 - DNA, 25 bp, Homo sapien
gatgacggagtcttccgagccaacc

SEQ ID NO: 4935415 - DNA, 25 bp, Homo sapien
tgctatgaatgcagccacagccagg

SEQ ID NO: 4935416 - DNA, 25 bp, Homo sapien
ttaacccaagagagaaccaagtcgc

SEQ ID NO: 4935417 - DNA, 25 bp, Homo sapien
taactgactcggcaggaaaaggcgg

SEQ ID NO: 4935418 - DNA, 25 bp, Homo sapien
caagtcgccatgagagaaaatgtgc

SEQ ID NO: 4935419 - DNA, 25 bp, Homo sapien
gtccatgctgcacgagtacacgttg

SEQ ID NO: 4935420 - DNA, 25 bp, Homo sapien
gcagtgtgctcacattccacaccag

SEQ ID NO: 4935421 - DNA, 25 bp, Homo sapien
tgcagtctgatggacgtcaggccac

SEQ ID NO: 4935422 - DNA, 25 bp, Homo sapien
gtcaggccacctcgcggcagctgga

SEQ ID NO: 4935423 - DNA, 25 bp, Homo sapien
cccaggtgtggagacgtgacgcaca

SEQ ID NO: 4935424 - DNA, 25 bp, Homo sapien
aagaaaacatattcccagccgtcac

SEQ ID NO: 4935425 - DNA, 25 bp, Homo sapien
gaagacctcaaagtgccggcaactt

SEQ ID NO: 4935426 - DNA, 25 bp, Homo sapien
catgtaatctggcacatgccgagga

SEQ ID NO: 4935427 - DNA, 25 bp, Homo sapien
cagttaagcagagtgaacccagtgc

SEQ ID NO: 4935428 - DNA, 25 bp, Homo sapien
gaaaaaatgcaagctagaaccctgg

SEQ ID NO: 4935429 - DNA, 25 bp, Homo sapien
aatggactattaccctgcaagaagg

SEQ ID NO: 4935430 - DNA, 25 bp, Homo sapien
gatattgatactcagaacgtcagcg

SEQ ID NO: 4935431 - DNA, 25 bp, Homo sapien
atgaccatgatgctgttacctgtgc

SEQ ID NO: 4935432 - DNA, 25 bp, Homo sapien
tgatggagggatccattcattttca

SEQ ID NO: 4935433 - DNA, 25 bp, Homo sapien
ttttcatgaccatgatgctgttacc

SEQ ID NO: 4935434 - DNA, 25 bp, Homo sapien
ttcatgaccatgatgctgttacctg

SEQ ID NO: 4935435 - DNA, 25 bp, Homo sapien
gggcccacagcccctgctgggatac

SEQ ID NO: 4935436 - DNA, 25 bp, Homo sapien
atgctgggcccacagcccctgctgg

SEQ ID NO: 4935437 - DNA, 25 bp, Homo sapien
tgggcccacagcccctgctgggata

SEQ ID NO: 4935438 - DNA, 25 bp, Homo sapien
gctgggcccacagcccctgctggga

SEQ ID NO: 4935439 - DNA, 25 bp, Homo sapien
acgcagggcacggtgtgggctatgg

SEQ ID NO: 4935440 - DNA, 25 bp, Homo sapien
cacggtgtgggctatgggccccggg

SEQ ID NO: 4935441 - DNA, 25 bp, Homo sapien
tgaaacgcagggcacggtgtgggct

SEQ ID NO: 4935442 - DNA, 25 bp, Homo sapien
cagggcacggtgtgggctatgggcc

SEQ ID NO: 4935443 - DNA, 25 bp, Homo sapien
agatgtaaacctcgctgcgtcctgc

SEQ ID NO: 4935444 - DNA, 25 bp, Homo sapien
cacccggatcatgcagttgatctca

SEQ ID NO: 4935445 - DNA, 25 bp, Homo sapien
gagcagtcctcgaggggcaccctct

SEQ ID NO: 4935446 - DNA, 25 bp, Homo sapien
cttcttcacccggatcatgcagttg

SEQ ID NO: 4935447 - DNA, 25 bp, Homo sapien
gttaatccagtacgaccagcatccc

SEQ ID NO: 4935448 - DNA, 25 bp, Homo sapien
tggacctccagcgtcgagaactgtg

SEQ ID NO: 4935449 - DNA, 25 bp, Homo sapien
gaaaccagcacatggtgacctgtgg

SEQ ID NO: 4935450 - DNA, 25 bp, Homo sapien
caaccctgcacgtgcctgttaggag

SEQ ID NO: 4935451 - DNA, 25 bp, Homo sapien
catgtggaacagatgtggatttagg

SEQ ID NO: 4935452 - DNA, 25 bp, Homo sapien
gagaatgtctaacctctgcctggcc

SEQ ID NO: 4935453 - DNA, 25 bp, Homo sapien
ttctagctgcgcaggttcacggtgc

SEQ ID NO: 4935454 - DNA, 25 bp, Homo sapien
gctttggcttcacttggagatttgg

SEQ ID NO: 4935455 - DNA, 25 bp, Homo sapien
tcctctcggcgtcaatcacgtagat

SEQ ID NO: 4935456 - DNA, 25 bp, Homo sapien
acggtcttcctctcggcgtcaatca

SEQ ID NO: 4935457 - DNA, 25 bp, Homo sapien
gtcaatcacgtagattttccccttg

SEQ ID NO: 4935458 - DNA, 25 bp, Homo sapien
tcggcgtcaatcacgtagattttcc

SEQ ID NO: 4935459 - DNA, 25 bp, Homo sapien
acgtatctgtcctcagccgagcaca

SEQ ID NO: 4935460 - DNA, 25 bp, Homo sapien
tattcgcctttccaaatggcgactt

SEQ ID NO: 4935461 - DNA, 25 bp, Homo sapien
ttcgcctttccaaatggcgactttc

SEQ ID NO: 4935462 - DNA, 25 bp, Homo sapien
tcgcctttccaaatggcgactttcc

SEQ ID NO: 4935463 - DNA, 25 bp, Homo sapien
ttattcgcctttccaaatggcgact

SEQ ID NO: 4935464 - DNA, 25 bp, Homo sapien
ccaacaggaaacacccttggtgcag

SEQ ID NO: 4935465 - DNA, 25 bp, Homo sapien
cccgaaggcctgagagaaggtgcgt

SEQ ID NO: 4935466 - DNA, 25 bp, Homo sapien
cacacggtaagtgggctccatgctg

SEQ ID NO: 4935467 - DNA, 25 bp, Homo sapien
ggtctcgcggctggccacacggtaa

SEQ ID NO: 4935468 - DNA, 25 bp, Homo sapien
ctaggcaacaaagtaacctcccagc

SEQ ID NO: 4935469 - DNA, 25 bp, Homo sapien
ggcaacaaagtaacctcccagcaga

SEQ ID NO: 4935470 - DNA, 25 bp, Homo sapien
cccagcagaggttatcaccaacaag

SEQ ID NO: 4935471 - DNA, 25 bp, Homo sapien
gaggttatcaccaacaagacgcagc

SEQ ID NO: 4935472 - DNA, 25 bp, Homo sapien
tcacctgtgactcggccaagctgct

SEQ ID NO: 4935473 - DNA, 25 bp, Homo sapien
acgggtcacctgtgactcggccaag

SEQ ID NO: 4935474 - DNA, 25 bp, Homo sapien
acgtgagggccacgggtcacctgtg

SEQ ID NO: 4935475 - DNA, 25 bp, Homo sapien
agacgtgagggccacgggtcacctg

SEQ ID NO: 4935476 - DNA, 25 bp, Homo sapien
tgtccaccttctgtgatgggagaga

SEQ ID NO: 4935477 - DNA, 25 bp, Homo sapien
cagtgttcctcggtgattcgtaagg

SEQ ID NO: 4935478 - DNA, 25 bp, Homo sapien
gaaccacccttctcaggcctcgctg

SEQ ID NO: 4935479 - DNA, 25 bp, Homo sapien
tctgtgatgggagagagcccacagt

SEQ ID NO: 4935480 - DNA, 25 bp, Homo sapien
ctgatcgcagggtggtcccctccac

SEQ ID NO: 4935481 - DNA, 25 bp, Homo sapien
ggaagacgagatcacacatgatgct

SEQ ID NO: 4935482 - DNA, 25 bp, Homo sapien
tttgatcccatgtgctttcctgggc

SEQ ID NO: 4935483 - DNA, 25 bp, Homo sapien
ctgggcatgatattttagatggaac

SEQ ID NO: 4935484 - DNA, 25 bp, Homo sapien
ctattttacttttgatcccatgtgc

SEQ ID NO: 4935485 - DNA, 25 bp, Homo sapien
cacgtgtgcacacggattcggggaa

SEQ ID NO: 4935486 - DNA, 25 bp, Homo sapien
gaagacgagatcacacgtgtgcaca

SEQ ID NO: 4935487 - DNA, 25 bp, Homo sapien
ttcagggaactgagcggcacactga

SEQ ID NO: 4935488 - DNA, 25 bp, Homo sapien
gcggcacactgaagacgagatcaca

SEQ ID NO: 4935489 - DNA, 25 bp, Homo sapien
ctttccatctggaggcactgcaggg

SEQ ID NO: 4935490 - DNA, 25 bp, Homo sapien
cacaagctgaagatacctgaggtta

SEQ ID NO: 4935491 - DNA, 25 bp, Homo sapien
aacctctccagagctagaaagtggg

SEQ ID NO: 4935492 - DNA, 25 bp, Homo sapien
ctcagaatgccccaagaagttagta

SEQ ID NO: 4935493 - DNA, 25 bp, Homo sapien
gatggcacagtattgctccaagaca

SEQ ID NO: 4935494 - DNA, 25 bp, Homo sapien
ctgggggatggcacagtattgctcc

SEQ ID NO: 4935495 - DNA, 25 bp, Homo sapien
gggatggcacagtattgctccaaga

SEQ ID NO: 4935496 - DNA, 25 bp, Homo sapien
gggggatggcacagtattgctccaa

SEQ ID NO: 4935497 - DNA, 25 bp, Homo sapien
caaagtgaaggtgagtttaccctct

SEQ ID NO: 4935498 - DNA, 25 bp, Homo sapien
tgctgacacatctcaggaccgccag

SEQ ID NO: 4935499 - DNA, 25 bp, Homo sapien
aggatcctccctgaatgggccggga

SEQ ID NO: 4935500 - DNA, 25 bp, Homo sapien
tcccagtgccttgttaacggtgaga

SEQ ID NO: 4935501 - DNA, 25 bp, Homo sapien
caccaaggtggcaaagatgtgcttg

SEQ ID NO: 4935502 - DNA, 25 bp, Homo sapien
tacgtttatccagtcattgcagcac

SEQ ID NO: 4935503 - DNA, 25 bp, Homo sapien
gactttatgcttgcgcatctagacc

SEQ ID NO: 4935504 - DNA, 25 bp, Homo sapien
catctagaccctacgttgtgttcca

SEQ ID NO: 4935505 - DNA, 25 bp, Homo sapien
gggcgccctgctgcaaaacgcaggc

SEQ ID NO: 4935506 - DNA, 25 bp, Homo sapien
ctgggcgccctgctgcaaaacgcag

SEQ ID NO: 4935507 - DNA, 25 bp, Homo sapien
tgggcgccctgctgcaaaacgcagg

SEQ ID NO: 4935508 - DNA, 25 bp, Homo sapien
ggcgccctgctgcaaaacgcaggct

SEQ ID NO: 4935509 - DNA, 25 bp, Homo sapien
tggagtgtcaggcagggtgtgtcgg

SEQ ID NO: 4935510 - DNA, 25 bp, Homo sapien
taatgtgcgcagaccagttaccaaa

SEQ ID NO: 4935511 - DNA, 25 bp, Homo sapien
ggtcgagtcttgtgtaatgtgcgca

SEQ ID NO: 4935512 - DNA, 25 bp, Homo sapien
tgtcggttggtcgagtcttgtgtaa

SEQ ID NO: 4935513 - DNA, 25 bp, Homo sapien
ctggagttgggctcgtggcaccctt

SEQ ID NO: 4935514 - DNA, 25 bp, Homo sapien
agctggagttgggctcgtggcaccc

SEQ ID NO: 4935515 - DNA, 25 bp, Homo sapien
gagttgggctcgtggcacccttggg

SEQ ID NO: 4935516 - DNA, 25 bp, Homo sapien
gcagctggagttgggctcgtggcac

SEQ ID NO: 4935517 - DNA, 25 bp, Homo sapien
ctcagacggatgcagtaacaaggcg

SEQ ID NO: 4935518 - DNA, 25 bp, Homo sapien
tcagacggatgcagtaacaaggcgg

SEQ ID NO: 4935519 - DNA, 25 bp, Homo sapien
gaggtgctctggctgatagccttgc

SEQ ID NO: 4935520 - DNA, 25 bp, Homo sapien
gctgatagccttgcccgagagggac

SEQ ID NO: 4935521 - DNA, 25 bp, Homo sapien
tgaaaccgtccgtgtcgtcaccttg

SEQ ID NO: 4935522 - DNA, 25 bp, Homo sapien
aaaccgtccgtgtcgtcaccttgtg

SEQ ID NO: 4935523 - DNA, 25 bp, Homo sapien
aaccgtccgtgtcgtcaccttgtgt

SEQ ID NO: 4935524 - DNA, 25 bp, Homo sapien
cgaggcgcagctcccgtcttagctg

SEQ ID NO: 4935525 - DNA, 25 bp, Homo sapien
tacttgtcaggatctcgaggcgcag

SEQ ID NO: 4935526 - DNA, 25 bp, Homo sapien
tatgcaacttgatcctctagcggct

SEQ ID NO: 4935527 - DNA, 25 bp, Homo sapien
cggctttaagactgtagatcccctc

SEQ ID NO: 4935528 - DNA, 25 bp, Homo sapien
tctgaaggactctcctaggaggcca

SEQ ID NO: 4935529 - DNA, 25 bp, Homo sapien
ttcctcagcgagttggacacattgt

SEQ ID NO: 4935530 - DNA, 25 bp, Homo sapien
tgtgagtgtgtctgcgcccagccat

SEQ ID NO: 4935531 - DNA, 25 bp, Homo sapien
gattcgtctctaaaccatttgctgg

SEQ ID NO: 4935532 - DNA, 25 bp, Homo sapien
ttgcgcaccagcattgagagcaccc

SEQ ID NO: 4935533 - DNA, 25 bp, Homo sapien
gcgtgccgccccttccagggaaagc

SEQ ID NO: 4935534 - DNA, 25 bp, Homo sapien
cagcagcgacagctgtcgttgggtg

SEQ ID NO: 4935535 - DNA, 25 bp, Homo sapien
tgggtgtagatgcttggtgccaagg

SEQ ID NO: 4935536 - DNA, 25 bp, Homo sapien
ctggggactgagatggagtcgctga

SEQ ID NO: 4935537 - DNA, 25 bp, Homo sapien
caggcgtcccgtggccgtgctgcct

SEQ ID NO: 4935538 - DNA, 25 bp, Homo sapien
agatggagtcgctgacttcctattg

SEQ ID NO: 4935539 - DNA, 25 bp, Homo sapien
gtgggcacccggcaggcgtcccgtg

SEQ ID NO: 4935540 - DNA, 25 bp, Homo sapien
tgattgacccctgagcttagccagg

SEQ ID NO: 4935541 - DNA, 25 bp, Homo sapien
cagtgtcttcgaaggtcccatgggc

SEQ ID NO: 4935542 - DNA, 25 bp, Homo sapien
cagttggaagcctgctatgctcaca

SEQ ID NO: 4935543 - DNA, 25 bp, Homo sapien
tatgaagcggcacatccagagatgg

SEQ ID NO: 4935544 - DNA, 25 bp, Homo sapien
cacgtgcttgttgagagcctcctag

SEQ ID NO: 4935545 - DNA, 25 bp, Homo sapien
cttgtggccttgacaagggagtgcc

SEQ ID NO: 4935546 - DNA, 25 bp, Homo sapien
gttctgagcgggatgtgagcctggt

SEQ ID NO: 4935547 - DNA, 25 bp, Homo sapien
cactgccttgaagcttgtggccttg

SEQ ID NO: 4935548 - DNA, 25 bp, Homo sapien
cttggaggccttgtggcccctgctg

SEQ ID NO: 4935549 - DNA, 25 bp, Homo sapien
ggccttgtggcccctgctgttggcc

SEQ ID NO: 4935550 - DNA, 25 bp, Homo sapien
gccttgtggcccctgctgttggcca

SEQ ID NO: 4935551 - DNA, 25 bp, Homo sapien
ttctgcttggaggccttgtggcccc

SEQ ID NO: 4935552 - DNA, 25 bp, Homo sapien
agggcagcacgttcaaagcccaagc

SEQ ID NO: 4935553 - DNA, 25 bp, Homo sapien
gggcagcacgttcaaagcccaagct

SEQ ID NO: 4935554 - DNA, 25 bp, Homo sapien
gggctgcaagctcagagccgagcat

SEQ ID NO: 4935555 - DNA, 25 bp, Homo sapien
cagggcagcacgttcaaagcccaag

SEQ ID NO: 4935556 - DNA, 25 bp, Homo sapien
gaaaatagtctaatgcggcctctga

SEQ ID NO: 4935557 - DNA, 25 bp, Homo sapien
tacttccaagagtctactcaccggg

SEQ ID NO: 4935558 - DNA, 25 bp, Homo sapien
gagcggccctcccttgttgagatgg

SEQ ID NO: 4935559 - DNA, 25 bp, Homo sapien
tgcaggcagggatctagtgtccagc

SEQ ID NO: 4935560 - DNA, 25 bp, Homo sapien
ggccttcgcgcacacagagcagtct

SEQ ID NO: 4935561 - DNA, 25 bp, Homo sapien
tgtgtactgggccttcgcgcacaca

SEQ ID NO: 4935562 - DNA, 25 bp, Homo sapien
gcgtcgctgtgtactgggccttcgc

SEQ ID NO: 4935563 - DNA, 25 bp, Homo sapien
caggcgctgttgagaggcgtcgctg

SEQ ID NO: 4935564 - DNA, 25 bp, Homo sapien
agaaccttggtaaagaactgaagtg

SEQ ID NO: 4935565 - DNA, 25 bp, Homo sapien
taaagaactgaagtggggtctcctg

SEQ ID NO: 4935566 - DNA, 25 bp, Homo sapien
ctgatctcgggccatttgccctcac

SEQ ID NO: 4935567 - DNA, 25 bp, Homo sapien
aagtggggtctcctgatctcgggcc

SEQ ID NO: 4935568 - DNA, 25 bp, Homo sapien
gattgttccatgcttgggcatttgg

SEQ ID NO: 4935569 - DNA, 25 bp, Homo sapien
gtgtgcgttcatgttgcagcagcag

SEQ ID NO: 4935570 - DNA, 25 bp, Homo sapien
ggagccactgagtgtgcgttcatgt

SEQ ID NO: 4935571 - DNA, 25 bp, Homo sapien
tgtcttcacctgaggccttggcgtg

SEQ ID NO: 4935572 - DNA, 25 bp, Homo sapien
ttggagatacgagcacgtgacctgg

SEQ ID NO: 4935573 - DNA, 25 bp, Homo sapien
tgagaagcgtgctgagaggagacac

SEQ ID NO: 4935574 - DNA, 25 bp, Homo sapien
acctggcgctcccagttcggtgagg

SEQ ID NO: 4935575 - DNA, 25 bp, Homo sapien
gagcactcgctccagggatcgtgga

SEQ ID NO: 4935576 - DNA, 25 bp, Homo sapien
tgggagagggttcggagactcgggc

SEQ ID NO: 4935577 - DNA, 25 bp, Homo sapien
gagactcgggcacgcgtctgctgcc

SEQ ID NO: 4935578 - DNA, 25 bp, Homo sapien
agtcctaggcgtccacggagcagca

SEQ ID NO: 4935579 - DNA, 25 bp, Homo sapien
tctgctgcccaggagtcctaggcgt

SEQ ID NO: 4935580 - DNA, 25 bp, Homo sapien
tgggctttcatggggctgcgtgtct

SEQ ID NO: 4935581 - DNA, 25 bp, Homo sapien
tcccaggcgcccttcatagcacctc

SEQ ID NO: 4935582 - DNA, 25 bp, Homo sapien
ccggccccctggcagctgtactgtg

SEQ ID NO: 4935583 - DNA, 25 bp, Homo sapien
ggtgcaggcaccccacgtctagcat

SEQ ID NO: 4935584 - DNA, 25 bp, Homo sapien
gagtcacgctcagctccgttggagc

SEQ ID NO: 4935585 - DNA, 25 bp, Homo sapien
acgctcagctccgttggagcacccc

SEQ ID NO: 4935586 - DNA, 25 bp, Homo sapien
agaagtccagtctcccctcctgttg

SEQ ID NO: 4935587 - DNA, 25 bp, Homo sapien
tcacgctcagctccgttggagcacc

SEQ ID NO: 4935588 - DNA, 25 bp, Homo sapien
tgcgtggcctgggatacacattcag

SEQ ID NO: 4935589 - DNA, 25 bp, Homo sapien
ggaagacagtatctgccggctctct

SEQ ID NO: 4935590 - DNA, 25 bp, Homo sapien
cagcttcccgcggtgtttgtataaa

SEQ ID NO: 4935591 - DNA, 25 bp, Homo sapien
tctcgggcctgtgcattgaggtgct

SEQ ID NO: 4935592 - DNA, 25 bp, Homo sapien
cctccgacattggaggacctgctga

SEQ ID NO: 4935593 - DNA, 25 bp, Homo sapien
cacaccgctgtgtaggcttgctcaa

SEQ ID NO: 4935594 - DNA, 25 bp, Homo sapien
gatgccactgcgcttcgtgcttgct

SEQ ID NO: 4935595 - DNA, 25 bp, Homo sapien
gaatgagagcgccattgacacagat

SEQ ID NO: 4935596 - DNA, 25 bp, Homo sapien
tcgatggggattaccagcggaccac

SEQ ID NO: 4935597 - DNA, 25 bp, Homo sapien
tcccctgactctctggccgggttgt

SEQ ID NO: 4935598 - DNA, 25 bp, Homo sapien
gcagatcatccagtcactcgatggg

SEQ ID NO: 4935599 - DNA, 25 bp, Homo sapien
gggccatctggtggccgtcccctga

SEQ ID NO: 4935600 - DNA, 25 bp, Homo sapien
agccacaaagggtgtcgccagctgc

SEQ ID NO: 4935601 - DNA, 25 bp, Homo sapien
aaagggtgtcgccagctgcctccag

SEQ ID NO: 4935602 - DNA, 25 bp, Homo sapien
cacaaagggtgtcgccagctgcctc

SEQ ID NO: 4935603 - DNA, 25 bp, Homo sapien
tgcagccacaaagggtgtcgccagc

SEQ ID NO: 4935604 - DNA, 25 bp, Homo sapien
ccgatcttatcttacctgaggagag

SEQ ID NO: 4935605 - DNA, 25 bp, Homo sapien
aaattctcagtaaggtattggccca

SEQ ID NO: 4935606 - DNA, 25 bp, Homo sapien
gggtgttccacatccccgatcttat

SEQ ID NO: 4935607 - DNA, 25 bp, Homo sapien
agttgaaccgaaccccatgtctgga

SEQ ID NO: 4935608 - DNA, 25 bp, Homo sapien
agtgaagacagcacctcgaggtttc

SEQ ID NO: 4935609 - DNA, 25 bp, Homo sapien
gtgagagaggagccgagtgaagaca

SEQ ID NO: 4935610 - DNA, 25 bp, Homo sapien
tgtgagagaggagccgagtgaagac

SEQ ID NO: 4935611 - DNA, 25 bp, Homo sapien
aagacagcacctcgaggtttctggt

SEQ ID NO: 4935612 - DNA, 25 bp, Homo sapien
ccgctgcagcgtgaaagaagatgta

SEQ ID NO: 4935613 - DNA, 25 bp, Homo sapien
tcgtgtggaatcgtagcgacgttca

SEQ ID NO: 4935614 - DNA, 25 bp, Homo sapien
gcaaatacataggtagcaccacttg

SEQ ID NO: 4935615 - DNA, 25 bp, Homo sapien
gaaagaattctcgagggctgtcgtg

SEQ ID NO: 4935616 - DNA, 25 bp, Homo sapien
tggaacgactcttaggaacagagac

SEQ ID NO: 4935617 - DNA, 25 bp, Homo sapien
cggcttcacttcaggcacaagtctc

SEQ ID NO: 4935618 - DNA, 25 bp, Homo sapien
gagacggcttcacttcaggcacaag

SEQ ID NO: 4935619 - DNA, 25 bp, Homo sapien
taggaacagagacggcttcacttca

SEQ ID NO: 4935620 - DNA, 25 bp, Homo sapien
tagacgcagaattgccaatgctgct

SEQ ID NO: 4935621 - DNA, 25 bp, Homo sapien
ccaatgctgctgttagtgttcctct

SEQ ID NO: 4935622 - DNA, 25 bp, Homo sapien
ctgctgttagtgttcctctccgtgg

SEQ ID NO: 4935623 - DNA, 25 bp, Homo sapien
aggaaatagccttagacgcagaatt

SEQ ID NO: 4935624 - DNA, 25 bp, Homo sapien
gaaagtcgtctagttggaatcacgc

SEQ ID NO: 4935625 - DNA, 25 bp, Homo sapien
acatgcgtctgccattagagtgcca

SEQ ID NO: 4935626 - DNA, 25 bp, Homo sapien
cacgcagttggtagccgtttcagag

SEQ ID NO: 4935627 - DNA, 25 bp, Homo sapien
gataacagatttcccgtgtgcccct

SEQ ID NO: 4935628 - DNA, 25 bp, Homo sapien
gattctgatgaagttcaccagtgtc

SEQ ID NO: 4935629 - DNA, 25 bp, Homo sapien
aaacgatgtctgtccacatgtggcc

SEQ ID NO: 4935630 - DNA, 25 bp, Homo sapien
gatgcagacaaaacgatgtctgtcc

SEQ ID NO: 4935631 - DNA, 25 bp, Homo sapien
tctgtccacatgtggccggcgtgtg

SEQ ID NO: 4935632 - DNA, 25 bp, Homo sapien
aaactggtctttttggtagcccatg

SEQ ID NO: 4935633 - DNA, 25 bp, Homo sapien
aatattcgggcagggatcagttgac

SEQ ID NO: 4935634 - DNA, 25 bp, Homo sapien
gttgacatttctgaaactggtcttt

SEQ ID NO: 4935635 - DNA, 25 bp, Homo sapien
gatggtcctttcattccggtcctcg

SEQ ID NO: 4935636 - DNA, 25 bp, Homo sapien
gagcctggaggtgggtcccgcagaa

SEQ ID NO: 4935637 - DNA, 25 bp, Homo sapien
ctggaggtgggtcccgcagaatgtg

SEQ ID NO: 4935638 - DNA, 25 bp, Homo sapien
cccgcagaatgtgggagccgtcaca

SEQ ID NO: 4935639 - DNA, 25 bp, Homo sapien
aggcaaggaaaggccgcctggcacg

SEQ ID NO: 4935640 - DNA, 25 bp, Homo sapien
aaattcgaggaaactccatcgtggg

SEQ ID NO: 4935641 - DNA, 25 bp, Homo sapien
gccttcttcaggctcgttcagagca

SEQ ID NO: 4935642 - DNA, 25 bp, Homo sapien
gagcagctggccagttttcaggaaa

SEQ ID NO: 4935643 - DNA, 25 bp, Homo sapien
ctagtggctgcttaagtttgtgcag

SEQ ID NO: 4935644 - DNA, 25 bp, Homo sapien
tgagctcaggcccacggacttgcag

SEQ ID NO: 4935645 - DNA, 25 bp, Homo sapien
tcactgtggcacttgagcgggaaag

SEQ ID NO: 4935646 - DNA, 25 bp, Homo sapien
agctcaggcccacggacttgcagct

SEQ ID NO: 4935647 - DNA, 25 bp, Homo sapien
cactggaggcgcacggcagactctt

SEQ ID NO: 4935648 - DNA, 25 bp, Homo sapien
catgtgaggccacctctcggactga

SEQ ID NO: 4935649 - DNA, 25 bp, Homo sapien
gtaacaaccgcgcatgtgaggccac

SEQ ID NO: 4935650 - DNA, 25 bp, Homo sapien
tctgcttgtaacaaccgcgcatgtg

SEQ ID NO: 4935651 - DNA, 25 bp, Homo sapien
ccacctctcggactgagtttcctga

SEQ ID NO: 4935652 - DNA, 25 bp, Homo sapien
cagatgactgtctgtcatagatgga

SEQ ID NO: 4935653 - DNA, 25 bp, Homo sapien
gagccacggttgagataacatcttt

SEQ ID NO: 4935654 - DNA, 25 bp, Homo sapien
ggcgtggaacttaggtttttgatca

SEQ ID NO: 4935655 - DNA, 25 bp, Homo sapien
gactcttagacttcactccagatga

SEQ ID NO: 4935656 - DNA, 25 bp, Homo sapien
gctttggcccctaccctctgtggag

SEQ ID NO: 4935657 - DNA, 25 bp, Homo sapien
taagctagaactctgctcctgcgct

SEQ ID NO: 4935658 - DNA, 25 bp, Homo sapien
tgcgctcttagcctcacctaagcag

SEQ ID NO: 4935659 - DNA, 25 bp, Homo sapien
caattgagatccaagacctgcgggt

SEQ ID NO: 4935660 - DNA, 25 bp, Homo sapien
tgtgaaccgcaggtcccatgatgtg

SEQ ID NO: 4935661 - DNA, 25 bp, Homo sapien
gaagcttccggaaggagctcactct

SEQ ID NO: 4935662 - DNA, 25 bp, Homo sapien
actgccacgtgctgatgcgagagcc

SEQ ID NO: 4935663 - DNA, 25 bp, Homo sapien
ggttcgacattgagggactgccacg

SEQ ID NO: 4935664 - DNA, 25 bp, Homo sapien
cgggaagcaagctgccggagacccc

SEQ ID NO: 4935665 - DNA, 25 bp, Homo sapien
tctttagtgcttagggcactcctgc

SEQ ID NO: 4935666 - DNA, 25 bp, Homo sapien
tgcagggctggactcgcctaacggc

SEQ ID NO: 4935667 - DNA, 25 bp, Homo sapien
cagagtaggactggacctcaggctg

SEQ ID NO: 4935668 - DNA, 25 bp, Homo sapien
agagggccatcctctccttcatgtg

SEQ ID NO: 4935669 - DNA, 25 bp, Homo sapien
ccttcatgtggcacatctgtctcca

SEQ ID NO: 4935670 - DNA, 25 bp, Homo sapien
tgggttcttccgagggccagaggga

SEQ ID NO: 4935671 - DNA, 25 bp, Homo sapien
tggcttgcagagggccatcctctcc

SEQ ID NO: 4935672 - DNA, 25 bp, Homo sapien
gtctttcagtctgataataaacatc

SEQ ID NO: 4935673 - DNA, 25 bp, Homo sapien
ctttcagtctgataataaacatctc

SEQ ID NO: 4935674 - DNA, 25 bp, Homo sapien
tctttcagtctgataataaacatct

SEQ ID NO: 4935675 - DNA, 25 bp, Homo sapien
cgattactcaggtgtaaaaaggagc

SEQ ID NO: 4935676 - DNA, 25 bp, Homo sapien
gcactggcacatgcgataatgcgga

SEQ ID NO: 4935677 - DNA, 25 bp, Homo sapien
tgaaaggatgactccacagtggacg

SEQ ID NO: 4935678 - DNA, 25 bp, Homo sapien
ataatgcggagggacctgaagccac

SEQ ID NO: 4935679 - DNA, 25 bp, Homo sapien
tcagaactctgcatcgtagatccca

SEQ ID NO: 4935680 - DNA, 25 bp, Homo sapien
gcagaggctgttactgatatgtgtc

SEQ ID NO: 4935681 - DNA, 25 bp, Homo sapien
tagatcccatgcgtcttgacacctt

SEQ ID NO: 4935682 - DNA, 25 bp, Homo sapien
tgagcaatccatcagtgtggctgcc

SEQ ID NO: 4935683 - DNA, 25 bp, Homo sapien
gcacctactataagccttggcatgg

SEQ ID NO: 4935684 - DNA, 25 bp, Homo sapien
gaaatgtaagctgggctcaactgcc

SEQ ID NO: 4935685 - DNA, 25 bp, Homo sapien
cagtgagggcctgtcggaaatgtaa

SEQ ID NO: 4935686 - DNA, 25 bp, Homo sapien
tcaggatgaatgagggacaatccct

SEQ ID NO: 4935687 - DNA, 25 bp, Homo sapien
ggtggccgccgactggagggacctg

SEQ ID NO: 4935688 - DNA, 25 bp, Homo sapien
ggaagaaggtggccgccgactggag

SEQ ID NO: 4935689 - DNA, 25 bp, Homo sapien
ccaggccaggggctgtttgaaggca

SEQ ID NO: 4935690 - DNA, 25 bp, Homo sapien
taataatcgaatcgggacatccgtc

SEQ ID NO: 4935691 - DNA, 25 bp, Homo sapien
cagagaggccccgtaataatcgaat

SEQ ID NO: 4935692 - DNA, 25 bp, Homo sapien
cctgcagggtctagagtccccgctt

SEQ ID NO: 4935693 - DNA, 25 bp, Homo sapien
cagggtctagagtccccgcttgcat

SEQ ID NO: 4935694 - DNA, 25 bp, Homo sapien
gacggaggccggcatgaccctggtg

SEQ ID NO: 4935695 - DNA, 25 bp, Homo sapien
ttgtgcacaaactcccggtccagag

SEQ ID NO: 4935696 - DNA, 25 bp, Homo sapien
catgctgggtaaccgtgaggacacc

SEQ ID NO: 4935697 - DNA, 25 bp, Homo sapien
tgctgtgtggatgcaaagcgccctt

SEQ ID NO: 4935698 - DNA, 25 bp, Homo sapien
taaacaggcagacagttccccgaat

SEQ ID NO: 4935699 - DNA, 25 bp, Homo sapien
gctgggtgcccagagctgggtcttg

SEQ ID NO: 4935700 - DNA, 25 bp, Homo sapien
ccagagctgggtcttggtttcccca

SEQ ID NO: 4935701 - DNA, 25 bp, Homo sapien
gggtgcccagagctgggtcttggtt

SEQ ID NO: 4935702 - DNA, 25 bp, Homo sapien
cgagcatctgctgggtgcccagagc

SEQ ID NO: 4935703 - DNA, 25 bp, Homo sapien
tgctccttagaggtcaccagtttcc

SEQ ID NO: 4935704 - DNA, 25 bp, Homo sapien
gtgccagatgtccagccagtagctt

SEQ ID NO: 4935705 - DNA, 25 bp, Homo sapien
tgttctcagagccagagagttcaga

SEQ ID NO: 4935706 - DNA, 25 bp, Homo sapien
gcttgggagggcttgtcccagaaac

SEQ ID NO: 4935707 - DNA, 25 bp, Homo sapien
tctataaatagtggccctgactcct

SEQ ID NO: 4935708 - DNA, 25 bp, Homo sapien
ccattcccgcgcactcctccagggc

SEQ ID NO: 4935709 - DNA, 25 bp, Homo sapien
gaggcagcaggcctctataaatagt

SEQ ID NO: 4935710 - DNA, 25 bp, Homo sapien
gcaggcctctataaatagtggccct

SEQ ID NO: 4935711 - DNA, 25 bp, Homo sapien
ccctgcacgggcaggcctgctggat

SEQ ID NO: 4935712 - DNA, 25 bp, Homo sapien
tgacacgcctcataagcaggaagtg

SEQ ID NO: 4935713 - DNA, 25 bp, Homo sapien
tcttcctgagcttcggcggctccca

SEQ ID NO: 4935714 - DNA, 25 bp, Homo sapien
cagctaagcaccttccgggcctgct

SEQ ID NO: 4935715 - DNA, 25 bp, Homo sapien
gccaggatgtacaaaggtgaaggat

SEQ ID NO: 4935716 - DNA, 25 bp, Homo sapien
aagccaccgggacgctgctgcctgg

SEQ ID NO: 4935717 - DNA, 25 bp, Homo sapien
ctggaactaaccccacacggtggtg

SEQ ID NO: 4935718 - DNA, 25 bp, Homo sapien
aaggatgaaagccaccgggacgctg

SEQ ID NO: 4935719 - DNA, 25 bp, Homo sapien
ggacaaggtgataccaggccccgtc

SEQ ID NO: 4935720 - DNA, 25 bp, Homo sapien
acaagtcaaggagcgacgggaagat

SEQ ID NO: 4935721 - DNA, 25 bp, Homo sapien
ggtcagtgaacaagtcaaggagcga

SEQ ID NO: 4935722 - DNA, 25 bp, Homo sapien
acaaggtgataccaggccccgtcct

SEQ ID NO: 4935723 - DNA, 25 bp, Homo sapien
ctcagagacccttgccaaaccagga

SEQ ID NO: 4935724 - DNA, 25 bp, Homo sapien
gtttctggcattgaagttcccaacc

SEQ ID NO: 4935725 - DNA, 25 bp, Homo sapien
ttgtgatgaggctgtttctcctgtt

SEQ ID NO: 4935726 - DNA, 25 bp, Homo sapien
tccagattcagtgaaggtccctgag

SEQ ID NO: 4935727 - DNA, 25 bp, Homo sapien
tggacaggtgggcaagctgatggtg

SEQ ID NO: 4935728 - DNA, 25 bp, Homo sapien
catctggcaccgagcaggtgcgtgc

SEQ ID NO: 4935729 - DNA, 25 bp, Homo sapien
caggtgggcaagctgatggtgtcca

SEQ ID NO: 4935730 - DNA, 25 bp, Homo sapien
caccgagcaggtgcgtgcaaatcct

SEQ ID NO: 4935731 - DNA, 25 bp, Homo sapien
tggagggctcgggacgcgcgcgccc

SEQ ID NO: 4935732 - DNA, 25 bp, Homo sapien
gcgccggcacgacgggtggagggct

SEQ ID NO: 4935733 - DNA, 25 bp, Homo sapien
tggcggtccgggcggcgccggcacg

SEQ ID NO: 4935734 - DNA, 25 bp, Homo sapien
ggagggctcgggacgcgcgcgccct

SEQ ID NO: 4935735 - DNA, 25 bp, Homo sapien
cggcctgagacctgacgctctgctt

SEQ ID NO: 4935736 - DNA, 25 bp, Homo sapien
ggtatggtctgaggcggactccacc

SEQ ID NO: 4935737 - DNA, 25 bp, Homo sapien
gcctgagacctgacgctctgctttc

SEQ ID NO: 4935738 - DNA, 25 bp, Homo sapien
cgcccgagtcccaacactggtatgg

SEQ ID NO: 4935739 - DNA, 25 bp, Homo sapien
cgccatctggatgtaagtccctaag

SEQ ID NO: 4935740 - DNA, 25 bp, Homo sapien
caagctgtatcaccgccatctggat

SEQ ID NO: 4935741 - DNA, 25 bp, Homo sapien
gtcacgtgcataggcattgggcacc

SEQ ID NO: 4935742 - DNA, 25 bp, Homo sapien
taagtccctaaggaggtcacgtgca

SEQ ID NO: 4935743 - DNA, 25 bp, Homo sapien
gtgaacgcctactgggccatcggaa

SEQ ID NO: 4935744 - DNA, 25 bp, Homo sapien
cacccacactggcacgggctgtgtc

SEQ ID NO: 4935745 - DNA, 25 bp, Homo sapien
ctggcacgggctgtgtccacgtagc

SEQ ID NO: 4935746 - DNA, 25 bp, Homo sapien
ccccaaggaggggagacacgcgcac

SEQ ID NO: 4935747 - DNA, 25 bp, Homo sapien
cccaggtagatgaacgggggctgca

SEQ ID NO: 4935748 - DNA, 25 bp, Homo sapien
aggtagatgaacgggggctgcagga

SEQ ID NO: 4935749 - DNA, 25 bp, Homo sapien
gtagatgaacgggggctgcaggagg

SEQ ID NO: 4935750 - DNA, 25 bp, Homo sapien
ccaggtagatgaacgggggctgcag

SEQ ID NO: 4935751 - DNA, 25 bp, Homo sapien
ctccgtggcgggtgaggacgaggcc

SEQ ID NO: 4935752 - DNA, 25 bp, Homo sapien
ggtagagctagacagagtgggtcca

SEQ ID NO: 4935753 - DNA, 25 bp, Homo sapien
aggcctggcttcgaggtctccgtgg

SEQ ID NO: 4935754 - DNA, 25 bp, Homo sapien
ggtggtagagctagacagagtgggt

SEQ ID NO: 4935755 - DNA, 25 bp, Homo sapien
ggccccaggaccaggcgagccagag

SEQ ID NO: 4935756 - DNA, 25 bp, Homo sapien
aggagggggccagcgttccaggcat

SEQ ID NO: 4935757 - DNA, 25 bp, Homo sapien
catcagtagaagatgccagagtggg

SEQ ID NO: 4935758 - DNA, 25 bp, Homo sapien
taaaggagaagatgtttgccttggc

SEQ ID NO: 4935759 - DNA, 25 bp, Homo sapien
gctgtcctcacaggcccggggcccc

SEQ ID NO: 4935760 - DNA, 25 bp, Homo sapien
ggctgtcctcacaggcccggggccc

SEQ ID NO: 4935761 - DNA, 25 bp, Homo sapien
cgatggctgtcctcacaggcccggg

SEQ ID NO: 4935762 - DNA, 25 bp, Homo sapien
agccgatggctgtcctcacaggccc

SEQ ID NO: 4935763 - DNA, 25 bp, Homo sapien
tcccctggagagaatccagaaggtg

SEQ ID NO: 4935764 - DNA, 25 bp, Homo sapien
ccagaaggtgaaggtggcatcagag

SEQ ID NO: 4935765 - DNA, 25 bp, Homo sapien
cagaaggtgaaggtggcatcagaga

SEQ ID NO: 4935766 - DNA, 25 bp, Homo sapien
ctcctcccctggagagaatccagaa

SEQ ID NO: 4935767 - DNA, 25 bp, Homo sapien
agggcagcaggcatgtacacctctg

SEQ ID NO: 4935768 - DNA, 25 bp, Homo sapien
tcctcctgtccataccgcatctttc

SEQ ID NO: 4935769 - DNA, 25 bp, Homo sapien
taccgcatctttcatcttgcctgga

SEQ ID NO: 4935770 - DNA, 25 bp, Homo sapien
cagggacaccgtgagcccgaatcct

SEQ ID NO: 4935771 - DNA, 25 bp, Homo sapien
agggacaccgtgagcccgaatcctc

SEQ ID NO: 4935772 - DNA, 25 bp, Homo sapien
aaggatcccggaacgctccggctgg

SEQ ID NO: 4935773 - DNA, 25 bp, Homo sapien
ggctgcggcgggcaccctggtcccg

SEQ ID NO: 4935774 - DNA, 25 bp, Homo sapien
gcgggcaccctggtcccggccagag

SEQ ID NO: 4935775 - DNA, 25 bp, Homo sapien
gcctcgaatagggaccggggccgca

SEQ ID NO: 4935776 - DNA, 25 bp, Homo sapien
agctcaccacttccagcagcgtctc

SEQ ID NO: 4935777 - DNA, 25 bp, Homo sapien
cagctcaccacttccagcagcgtct

SEQ ID NO: 4935778 - DNA, 25 bp, Homo sapien
tcagctcaccacttccagcagcgtc

SEQ ID NO: 4935779 - DNA, 25 bp, Homo sapien
gctcaccacttccagcagcgtctcc

SEQ ID NO: 4935780 - DNA, 25 bp, Homo sapien
gcgtcccaccgcctccatacgcgcc

SEQ ID NO: 4935781 - DNA, 25 bp, Homo sapien
gccgcggagccggctccaggcgctg

SEQ ID NO: 4935782 - DNA, 25 bp, Homo sapien
tccatacgcgccggcctggcggtgc

SEQ ID NO: 4935783 - DNA, 25 bp, Homo sapien
gcggtgcccacggtgctggccctgg

SEQ ID NO: 4935784 - DNA, 25 bp, Homo sapien
cccacagtcacaggcgacacctctc

SEQ ID NO: 4935785 - DNA, 25 bp, Homo sapien
aaatgaatagaaagggatcacaggg

SEQ ID NO: 4935786 - DNA, 25 bp, Homo sapien
ctgtggggaaagacgaaggaaatga

SEQ ID NO: 4935787 - DNA, 25 bp, Homo sapien
gtcacaggcgacacctctcccagag

SEQ ID NO: 4935788 - DNA, 25 bp, Homo sapien
gctcaggcggtagagctggccccag

SEQ ID NO: 4935789 - DNA, 25 bp, Homo sapien
ccactccatgaaccccaggtgggtc

SEQ ID NO: 4935790 - DNA, 25 bp, Homo sapien
catcggcaggcgagggcaatggtga

SEQ ID NO: 4935791 - DNA, 25 bp, Homo sapien
cgaccctgggcgcagcagtgcttag

SEQ ID NO: 4935792 - DNA, 25 bp, Homo sapien
tctccacattggtggatgggcagac

SEQ ID NO: 4935793 - DNA, 25 bp, Homo sapien
cagagctggatagtcataaagaggc

SEQ ID NO: 4935794 - DNA, 25 bp, Homo sapien
gaacttgaactgaaccaactccagc

SEQ ID NO: 4935795 - DNA, 25 bp, Homo sapien
tattgtgcaaatacttgggtgtggg

SEQ ID NO: 4935796 - DNA, 25 bp, Homo sapien
aaaatgaggagaacgagatccctgt

SEQ ID NO: 4935797 - DNA, 25 bp, Homo sapien
aaaaatgaggagaacgagatccctg

SEQ ID NO: 4935798 - DNA, 25 bp, Homo sapien
gggcagaagggactgcagagaaggc

SEQ ID NO: 4935799 - DNA, 25 bp, Homo sapien
cgacgggcccggcagggcagaaggg

SEQ ID NO: 4935800 - DNA, 25 bp, Homo sapien
agggcagaagggactgcagagaagg

SEQ ID NO: 4935801 - DNA, 25 bp, Homo sapien
gcctcccgacgggcccggcagggca

SEQ ID NO: 4935802 - DNA, 25 bp, Homo sapien
tgtgtttgtagctcacctccaccgg

SEQ ID NO: 4935803 - DNA, 25 bp, Homo sapien
gggccgggcggttcatccgagccat

SEQ ID NO: 4935804 - DNA, 25 bp, Homo sapien
tcaatgaaggtgctgagcgtggcgt

SEQ ID NO: 4935805 - DNA, 25 bp, Homo sapien
tgaggaagcgcatgtgtttgtagct

SEQ ID NO: 4935806 - DNA, 25 bp, Homo sapien
gagggacagccatcttctgtagggc

SEQ ID NO: 4935807 - DNA, 25 bp, Homo sapien
gcatctcgtcccatctgccagggtt

SEQ ID NO: 4935808 - DNA, 25 bp, Homo sapien
gaaagcttctgtaaacgcatctcgt

SEQ ID NO: 4935809 - DNA, 25 bp, Homo sapien
tgatggcttatctcatgtcacaggg

SEQ ID NO: 4935810 - DNA, 25 bp, Homo sapien
cacgcaccacagtggtagccccgta

SEQ ID NO: 4935811 - DNA, 25 bp, Homo sapien
tttgtcataggtcacttcacacaca

SEQ ID NO: 4935812 - DNA, 25 bp, Homo sapien
ccatccttctccagcggcgttttgt

SEQ ID NO: 4935813 - DNA, 25 bp, Homo sapien
cggcgttttgtcataggtcacttca

SEQ ID NO: 4935814 - DNA, 25 bp, Homo sapien
ctacggagggaagcagacatgagga

SEQ ID NO: 4935815 - DNA, 25 bp, Homo sapien
gcagacatgaggacccccggctgag

SEQ ID NO: 4935816 - DNA, 25 bp, Homo sapien
ctgagggagggtagagaggcggctc

SEQ ID NO: 4935817 - DNA, 25 bp, Homo sapien
gggagggtagagaggcggctctggg

SEQ ID NO: 4935818 - DNA, 25 bp, Homo sapien
agtcttccactaccttgccgggcgg

SEQ ID NO: 4935819 - DNA, 25 bp, Homo sapien
gcccgccacgcagtgcacagccacg

SEQ ID NO: 4935820 - DNA, 25 bp, Homo sapien
cacgcagtgcacagccacgcagctg

SEQ ID NO: 4935821 - DNA, 25 bp, Homo sapien
cagtcttccactaccttgccgggcg

SEQ ID NO: 4935822 - DNA, 25 bp, Homo sapien
atgcccaaccacctgacatggcgag

SEQ ID NO: 4935823 - DNA, 25 bp, Homo sapien
ggcagccctttcctacacaagatgt

SEQ ID NO: 4935824 - DNA, 25 bp, Homo sapien
tgggttagactttgggaagcacttc

SEQ ID NO: 4935825 - DNA, 25 bp, Homo sapien
tcgcgtggacgtgtgttcaagaccc

SEQ ID NO: 4935826 - DNA, 25 bp, Homo sapien
aagggccagcgccacaaggactgga

SEQ ID NO: 4935827 - DNA, 25 bp, Homo sapien
ggccagcgccacaaggactggagcc

SEQ ID NO: 4935828 - DNA, 25 bp, Homo sapien
ctcaataagggccagcgccacaagg

SEQ ID NO: 4935829 - DNA, 25 bp, Homo sapien
caataagggccagcgccacaaggac

SEQ ID NO: 4935830 - DNA, 25 bp, Homo sapien
ggatgaactggatggcgtcctcgta

SEQ ID NO: 4935831 - DNA, 25 bp, Homo sapien
gcggatgaactggatggcgtcctcg

SEQ ID NO: 4935832 - DNA, 25 bp, Homo sapien
gatgaactggatggcgtcctcgtac

SEQ ID NO: 4935833 - DNA, 25 bp, Homo sapien
tggcggatgaactggatggcgtcct

SEQ ID NO: 4935834 - DNA, 25 bp, Homo sapien
gagatcatccaaggacctggctcgg

SEQ ID NO: 4935835 - DNA, 25 bp, Homo sapien
gacaagcccttgctcggtgagacgt

SEQ ID NO: 4935836 - DNA, 25 bp, Homo sapien
catgagcagacaacaagggtggtgc

SEQ ID NO: 4935837 - DNA, 25 bp, Homo sapien
gaaacgcccgtgctgttctgagtcg

SEQ ID NO: 4935838 - DNA, 25 bp, Homo sapien
tgcgtgtgtgggtctttgaaccgca

SEQ ID NO: 4935839 - DNA, 25 bp, Homo sapien
gtctttgaaccgcagcctctgtttg

SEQ ID NO: 4935840 - DNA, 25 bp, Homo sapien
ggccggtatttctccaggtaggtga

SEQ ID NO: 4935841 - DNA, 25 bp, Homo sapien
acgcagcaccgggtcttgtgcgtgt

SEQ ID NO: 4935842 - DNA, 25 bp, Homo sapien
ggtcctgacctacatgacgaccagg

SEQ ID NO: 4935843 - DNA, 25 bp, Homo sapien
caacaaacaggctagaggagaccag

SEQ ID NO: 4935844 - DNA, 25 bp, Homo sapien
tttaaggtgccgagaacaggtcagg

SEQ ID NO: 4935845 - DNA, 25 bp, Homo sapien
tattgccttcgggtgtccggagcac

SEQ ID NO: 4935846 - DNA, 25 bp, Homo sapien
cccacctcggtatcaggacaggaca

SEQ ID NO: 4935847 - DNA, 25 bp, Homo sapien
gaacacatgagcatctggtccacgc

SEQ ID NO: 4935848 - DNA, 25 bp, Homo sapien
aggacagtgctggtgacctgcctcg

SEQ ID NO: 4935849 - DNA, 25 bp, Homo sapien
gcctcggagccggaaatgtggacac

SEQ ID NO: 4935850 - DNA, 25 bp, Homo sapien
cctgggtgacactcttcataggtgg

SEQ ID NO: 4935851 - DNA, 25 bp, Homo sapien
cccaggccgtgttccagatgctgaa

SEQ ID NO: 4935852 - DNA, 25 bp, Homo sapien
tgactcaccacccacaagagaggaa

SEQ ID NO: 4935853 - DNA, 25 bp, Homo sapien
tcctgccacatcaagacctgggtga

SEQ ID NO: 4935854 - DNA, 25 bp, Homo sapien
tgcgcacacgcatgcgagcgagact

SEQ ID NO: 4935855 - DNA, 25 bp, Homo sapien
gtgcacagcccacgaagtcagagct

SEQ ID NO: 4935856 - DNA, 25 bp, Homo sapien
gcagctcacagagcttgtgtgaata

SEQ ID NO: 4935857 - DNA, 25 bp, Homo sapien
tcgatgcggcaggacccggtctttt

SEQ ID NO: 4935858 - DNA, 25 bp, Homo sapien
tccagagcagcgaccaggtgatcgt

SEQ ID NO: 4935859 - DNA, 25 bp, Homo sapien
tagttctcacgttcagtctccaagt

SEQ ID NO: 4935860 - DNA, 25 bp, Homo sapien
gataggcgcccctcaaatgcattca

SEQ ID NO: 4935861 - DNA, 25 bp, Homo sapien
tctgacatgtcagcacggttagcgt

SEQ ID NO: 4935862 - DNA, 25 bp, Homo sapien
agaccacgcagctcctggtggacaa

SEQ ID NO: 4935863 - DNA, 25 bp, Homo sapien
tccagaccacgcagctcctggtgga

SEQ ID NO: 4935864 - DNA, 25 bp, Homo sapien
gtccagaccacgcagctcctggtgg

SEQ ID NO: 4935865 - DNA, 25 bp, Homo sapien
ccacgcagctcctggtggacaaagc

SEQ ID NO: 4935866 - DNA, 25 bp, Homo sapien
aaagacaagtcgaatgtgttggctc

SEQ ID NO: 4935867 - DNA, 25 bp, Homo sapien
aaaaagacaagtcgaatgtgttggc

SEQ ID NO: 4935868 - DNA, 25 bp, Homo sapien
aagacaagtcgaatgtgttggctca

SEQ ID NO: 4935869 - DNA, 25 bp, Homo sapien
aaaaaaagacaagtcgaatgtgttg

SEQ ID NO: 4935870 - DNA, 25 bp, Homo sapien
taaaaatcaccctggtttgcaccca

SEQ ID NO: 4935871 - DNA, 25 bp, Homo sapien
tttgcacccaagtcactgctaaggg

SEQ ID NO: 4935872 - DNA, 25 bp, Homo sapien
gcaaacacgcaatcaagtggagaag

SEQ ID NO: 4935873 - DNA, 25 bp, Homo sapien
cctggtcttcgaacactggctgcaa

SEQ ID NO: 4935874 - DNA, 25 bp, Homo sapien
ggcaaggacgtgtctctctctcggg

SEQ ID NO: 4935875 - DNA, 25 bp, Homo sapien
cagctgggacgtctgtctcactggg

SEQ ID NO: 4935876 - DNA, 25 bp, Homo sapien
ggctccccatacagctgggacgtct

SEQ ID NO: 4935877 - DNA, 25 bp, Homo sapien
gctgagacatctgtctctcgtgggt

SEQ ID NO: 4935878 - DNA, 25 bp, Homo sapien
ttcgttcatgtctgttgagtggttc

SEQ ID NO: 4935879 - DNA, 25 bp, Homo sapien
taagctttcgttcatgtctgttgag

SEQ ID NO: 4935880 - DNA, 25 bp, Homo sapien
gtcagaattaagctttcgttcatgt

SEQ ID NO: 4935881 - DNA, 25 bp, Homo sapien
tgttgagtggttcagcagttgaaca

SEQ ID NO: 4935882 - DNA, 25 bp, Homo sapien
gctaagtgggcaactgatctttgag

SEQ ID NO: 4935883 - DNA, 25 bp, Homo sapien
tccgcagcagcatagtgacaaaccc

SEQ ID NO: 4935884 - DNA, 25 bp, Homo sapien
cctcggcccgtcgtgatttcagtca

SEQ ID NO: 4935885 - DNA, 25 bp, Homo sapien
actcccgccggaacgcttggtgttg

SEQ ID NO: 4935886 - DNA, 25 bp, Homo sapien
tttgcccatacacatgagtatctgc

SEQ ID NO: 4935887 - DNA, 25 bp, Homo sapien
tgcccatacacatgagtatctgcct

SEQ ID NO: 4935888 - DNA, 25 bp, Homo sapien
cacatgagtatctgcctaaaacatg

SEQ ID NO: 4935889 - DNA, 25 bp, Homo sapien
catacacatgagtatctgcctaaaa

SEQ ID NO: 4935890 - DNA, 25 bp, Homo sapien
cagagtagactaactttacacaaca

SEQ ID NO: 4935891 - DNA, 25 bp, Homo sapien
gagtagactaactttacacaacaca

SEQ ID NO: 4935892 - DNA, 25 bp, Homo sapien
ttcagagtagactaactttacacaa

SEQ ID NO: 4935893 - DNA, 25 bp, Homo sapien
gactaactttacacaacacattaaa

SEQ ID NO: 4935894 - DNA, 25 bp, Homo sapien
tccatgacttttcttgggccatccc

SEQ ID NO: 4935895 - DNA, 25 bp, Homo sapien
taattccatgacttttcttgggcca

SEQ ID NO: 4935896 - DNA, 25 bp, Homo sapien
taaccaattaattccatgacttttc

SEQ ID NO: 4935897 - DNA, 25 bp, Homo sapien
catgacttttcttgggccatccctt

SEQ ID NO: 4935898 - DNA, 25 bp, Homo sapien
tcactcaaatggtgggtatgacgag

SEQ ID NO: 4935899 - DNA, 25 bp, Homo sapien
cagccaagaaacagagtccgtgcag

SEQ ID NO: 4935900 - DNA, 25 bp, Homo sapien
tgtcaaatgggaatccaagcacttc

SEQ ID NO: 4935901 - DNA, 25 bp, Homo sapien
gaacacacacccgagtgagtgaggg

SEQ ID NO: 4935902 - DNA, 25 bp, Homo sapien
aggccgcggccctcctgccgcgcga

SEQ ID NO: 4935903 - DNA, 25 bp, Homo sapien
ccgcgcgagtcctgcctgggcccgc

SEQ ID NO: 4935904 - DNA, 25 bp, Homo sapien
ctcctgccgcgcgagtcctgcctgg

SEQ ID NO: 4935905 - DNA, 25 bp, Homo sapien
ctgccgcgcgagtcctgcctgggcc

SEQ ID NO: 4935906 - DNA, 25 bp, Homo sapien
ccggcagaagaagcctctaggtgga

SEQ ID NO: 4935907 - DNA, 25 bp, Homo sapien
cccggcagaagaagcctctaggtgg

SEQ ID NO: 4935908 - DNA, 25 bp, Homo sapien
cggcagaagaagcctctaggtggag

SEQ ID NO: 4935909 - DNA, 25 bp, Homo sapien
gaaggagccgccgaatgagctcgaa

SEQ ID NO: 4935910 - DNA, 25 bp, Homo sapien
gctgcagactttggccagcgtgacc

SEQ ID NO: 4935911 - DNA, 25 bp, Homo sapien
ttgggcagagccttcccgatggcga

SEQ ID NO: 4935912 - DNA, 25 bp, Homo sapien
tctcagttgaaagttgatccggccg

SEQ ID NO: 4935913 - DNA, 25 bp, Homo sapien
taggcgcgcccgatgccgcggaaat

SEQ ID NO: 4935914 - DNA, 25 bp, Homo sapien
ggaaatgcgcctcccagagctgcgc

SEQ ID NO: 4935915 - DNA, 25 bp, Homo sapien
gcgtccccgccgtagatgtccggga

SEQ ID NO: 4935916 - DNA, 25 bp, Homo sapien
cggatggcgaagtcgtcctgcttgc

SEQ ID NO: 4935917 - DNA, 25 bp, Homo sapien
acgggaagggcagcgtgaagttctc

SEQ ID NO: 4935918 - DNA, 25 bp, Homo sapien
aagggcagcgtgaagttctcggtga

SEQ ID NO: 4935919 - DNA, 25 bp, Homo sapien
gaacgggaagggcagcgtgaagttc

SEQ ID NO: 4935920 - DNA, 25 bp, Homo sapien
ggaagggcagcgtgaagttctcggt

SEQ ID NO: 4935921 - DNA, 25 bp, Homo sapien
aagtcgaagtctgcgcggtcgcggg

SEQ ID NO: 4935922 - DNA, 25 bp, Homo sapien
gccgcgcagcaggaagtcgaagtct

SEQ ID NO: 4935923 - DNA, 25 bp, Homo sapien
gcttgcgcatcgctgcctgggccgt

SEQ ID NO: 4935924 - DNA, 25 bp, Homo sapien
gggtcgtagaagagcggcccgcagg

SEQ ID NO: 4935925 - DNA, 25 bp, Homo sapien
ccgtcgctggaagcgctggcctcgg

SEQ ID NO: 4935926 - DNA, 25 bp, Homo sapien
ttatttattctgttcgctctcgggg

SEQ ID NO: 4935927 - DNA, 25 bp, Homo sapien
cagcctgggggtgccgtcgctggaa

SEQ ID NO: 4935928 - DNA, 25 bp, Homo sapien
tattctgttcgctctcggggcagcg

SEQ ID NO: 4935929 - DNA, 25 bp, Homo sapien
tgttcactgcaccttcggacccatg

SEQ ID NO: 4935930 - DNA, 25 bp, Homo sapien
tgaagagggcctgcctccgtcaccg

SEQ ID NO: 4935931 - DNA, 25 bp, Homo sapien
tctactgcgaatatgttcactgcac

SEQ ID NO: 4935932 - DNA, 25 bp, Homo sapien
tccgtcaccgtttctactgcgaata

SEQ ID NO: 4935933 - DNA, 25 bp, Homo sapien
aggaggagatatcggggtcatgccg

SEQ ID NO: 4935934 - DNA, 25 bp, Homo sapien
gaggaggagatatcggggtcatgcc

SEQ ID NO: 4935935 - DNA, 25 bp, Homo sapien
aggaggaggagatatcggggtcatg

SEQ ID NO: 4935936 - DNA, 25 bp, Homo sapien
gaggagatatcggggtcatgccgtc

SEQ ID NO: 4935937 - DNA, 25 bp, Homo sapien
ggtcttcatctaggcagctgccgcc

SEQ ID NO: 4935938 - DNA, 25 bp, Homo sapien
cccgaccttggcgacgaggtcttca

SEQ ID NO: 4935939 - DNA, 25 bp, Homo sapien
ccagccctcgttgtcattccagccc

SEQ ID NO: 4935940 - DNA, 25 bp, Homo sapien
acacgcctttgcctaggccaaacat

SEQ ID NO: 4935941 - DNA, 25 bp, Homo sapien
cacccagagccaacgacagggaccc

SEQ ID NO: 4935942 - DNA, 25 bp, Homo sapien
cccagagccaacgacagggacccca

SEQ ID NO: 4935943 - DNA, 25 bp, Homo sapien
ctggtcacactgcacggccaatgtc

SEQ ID NO: 4935944 - DNA, 25 bp, Homo sapien
tggctggtcacactgcacggccaat

SEQ ID NO: 4935945 - DNA, 25 bp, Homo sapien
tgcacggccaatgtcccttcacttg

SEQ ID NO: 4935946 - DNA, 25 bp, Homo sapien
gccaatgtcccttcacttgtcgggc

SEQ ID NO: 4935947 - DNA, 25 bp, Homo sapien
ccggagaagcggtgctgtggttgat

SEQ ID NO: 4935948 - DNA, 25 bp, Homo sapien
tgtggttgatgagcaatgcttgcag

SEQ ID NO: 4935949 - DNA, 25 bp, Homo sapien
gggtagggcacggtgtacacaccaa

SEQ ID NO: 4935950 - DNA, 25 bp, Homo sapien
acggtgtacacaccaacctgcagct

SEQ ID NO: 4935951 - DNA, 25 bp, Homo sapien
gaaatttacattttcggcagcttgg

SEQ ID NO: 4935952 - DNA, 25 bp, Homo sapien
ttctgaaagggcaccgcagacttct

SEQ ID NO: 4935953 - DNA, 25 bp, Homo sapien
tccagttcctcccaaatgtgctggc

SEQ ID NO: 4935954 - DNA, 25 bp, Homo sapien
ttacattttcggcagcttggcctcc

SEQ ID NO: 4935955 - DNA, 25 bp, Homo sapien
tgggcagtcatgatgccaccattca

SEQ ID NO: 4935956 - DNA, 25 bp, Homo sapien
ctgggcagtcatgatgccaccattc

SEQ ID NO: 4935957 - DNA, 25 bp, Homo sapien
tctctttccaagccatccattgagc

SEQ ID NO: 4935958 - DNA, 25 bp, Homo sapien
ttgagcccctcagccgttcatgcat

SEQ ID NO: 4935959 - DNA, 25 bp, Homo sapien
actgtggcaagtggttcggagccac

SEQ ID NO: 4935960 - DNA, 25 bp, Homo sapien
tgtggcaagtggttcggagccacac

SEQ ID NO: 4935961 - DNA, 25 bp, Homo sapien
ctgtggcaagtggttcggagccaca

SEQ ID NO: 4935962 - DNA, 25 bp, Homo sapien
agggtacgcctgtgtcagcaggtgg

SEQ ID NO: 4935963 - DNA, 25 bp, Homo sapien
ggtacgcctgtgtcagcaggtggta

SEQ ID NO: 4935964 - DNA, 25 bp, Homo sapien
gtaagggaaagcatcagaagaaggc

SEQ ID NO: 4935965 - DNA, 25 bp, Homo sapien
aggtggtaagggaaagcatcagaag

SEQ ID NO: 4935966 - DNA, 25 bp, Homo sapien
gatgaggtggccagtcggccattca

SEQ ID NO: 4935967 - DNA, 25 bp, Homo sapien
gcacttgtggcggccccacaaggat

SEQ ID NO: 4935968 - DNA, 25 bp, Homo sapien
acttgtggcggccccacaaggatga

SEQ ID NO: 4935969 - DNA, 25 bp, Homo sapien
cagtcggccattcaccaggggtggc

SEQ ID NO: 4935970 - DNA, 25 bp, Homo sapien
ccagtgacttcatgacgttccgaca

SEQ ID NO: 4935971 - DNA, 25 bp, Homo sapien
ggtacattctcagacacaatctggg

SEQ ID NO: 4935972 - DNA, 25 bp, Homo sapien
tctgcagggacagggaatttactcc

SEQ ID NO: 4935973 - DNA, 25 bp, Homo sapien
tgacagacatggagcaagaaccttt

SEQ ID NO: 4935974 - DNA, 25 bp, Homo sapien
gagcctttccaagggccgctcagac

SEQ ID NO: 4935975 - DNA, 25 bp, Homo sapien
tgcccgtcttcaagatggaactaaa

SEQ ID NO: 4935976 - DNA, 25 bp, Homo sapien
gactatgggaaatgcccggctctgg

SEQ ID NO: 4935977 - DNA, 25 bp, Homo sapien
tattctccgttcctgtgcccgtctt

SEQ ID NO: 4935978 - DNA, 25 bp, Homo sapien
actgttatgggaagcagcaaggcct

SEQ ID NO: 4935979 - DNA, 25 bp, Homo sapien
tcacacggctggaaggtcggagaac

SEQ ID NO: 4935980 - DNA, 25 bp, Homo sapien
taccctttcatctccgatggcagag

SEQ ID NO: 4935981 - DNA, 25 bp, Homo sapien
gcagagccagtgcttgtaactgtta

SEQ ID NO: 4935982 - DNA, 25 bp, Homo sapien
tcccacattcgaggaaggcaagtgg

SEQ ID NO: 4935983 - DNA, 25 bp, Homo sapien
tggagggagctaagcaaacagaggt

SEQ ID NO: 4935984 - DNA, 25 bp, Homo sapien
ggagggagctaagcaaacagaggtc

SEQ ID NO: 4935985 - DNA, 25 bp, Homo sapien
aagtggagggagctaagcaaacaga

SEQ ID NO: 4935986 - DNA, 25 bp, Homo sapien
catcatggtggaagtggaggcaggc

SEQ ID NO: 4935987 - DNA, 25 bp, Homo sapien
acatggtggcaggaggcggggagca

SEQ ID NO: 4935988 - DNA, 25 bp, Homo sapien
gaggcggggagcaggggaagtgcca

SEQ ID NO: 4935989 - DNA, 25 bp, Homo sapien
tggaagtggaggcaggcacatctta

SEQ ID NO: 4935990 - DNA, 25 bp, Homo sapien
gcagagcaactcgaagtaagaggct

SEQ ID NO: 4935991 - DNA, 25 bp, Homo sapien
gagtccttagtgtagctcagtgaat

SEQ ID NO: 4935992 - DNA, 25 bp, Homo sapien
ctttccctgagtccttagtgtagct

SEQ ID NO: 4935993 - DNA, 25 bp, Homo sapien
attggttcagtccagtcaggcagag

SEQ ID NO: 4935994 - DNA, 25 bp, Homo sapien
gctgacattgaccttccgctcatcc

SEQ ID NO: 4935995 - DNA, 25 bp, Homo sapien
tctgagaacttgcctggatctggca

SEQ ID NO: 4935996 - DNA, 25 bp, Homo sapien
tgacattgaccttccgctcatccat

SEQ ID NO: 4935997 - DNA, 25 bp, Homo sapien
ctgacattgaccttccgctcatcca

SEQ ID NO: 4935998 - DNA, 25 bp, Homo sapien
atgttctgagcagcggggatccggc

SEQ ID NO: 4935999 - DNA, 25 bp, Homo sapien
gttttacggctgagttgaatgcaac

SEQ ID NO: 4936000 - DNA, 25 bp, Homo sapien
tctgttttacggctgagttgaatgc

SEQ ID NO: 4936001 - DNA, 25 bp, Homo sapien
tcatgttctgagcagcggggatccg

SEQ ID NO: 4936002 - DNA, 25 bp, Homo sapien
cccgtgctgtttgaggaccttcatc

SEQ ID NO: 4936003 - DNA, 25 bp, Homo sapien
gagcctttgcccacgcttttccaga

SEQ ID NO: 4936004 - DNA, 25 bp, Homo sapien
ctttcccgtgctgtttgaggacctt

SEQ ID NO: 4936005 - DNA, 25 bp, Homo sapien
gacctccaccaatcctgttccagag

SEQ ID NO: 4936006 - DNA, 25 bp, Homo sapien
atgctgttccaggacgttctctcat

SEQ ID NO: 4936007 - DNA, 25 bp, Homo sapien
gacgttctctcatcctgttccagga

SEQ ID NO: 4936008 - DNA, 25 bp, Homo sapien
ggacgttctctcatcctgttccagg

SEQ ID NO: 4936009 - DNA, 25 bp, Homo sapien
ggacctctcccatactgttccagga

SEQ ID NO: 4936010 - DNA, 25 bp, Homo sapien
tgttccagggccttcacccatgctg

SEQ ID NO: 4936011 - DNA, 25 bp, Homo sapien
agaacgtttcccatgctgtaccagg

SEQ ID NO: 4936012 - DNA, 25 bp, Homo sapien
catgctgttcctgaacgttcaccca

SEQ ID NO: 4936013 - DNA, 25 bp, Homo sapien
gttccaggacctctcccatactgtt

SEQ ID NO: 4936014 - DNA, 25 bp, Homo sapien
cagggccttaacccatactgttccg

SEQ ID NO: 4936015 - DNA, 25 bp, Homo sapien
tctcccatactgttccaggactttc

SEQ ID NO: 4936016 - DNA, 25 bp, Homo sapien
catgctgttcctgaacgttcaccca

SEQ ID NO: 4936017 - DNA, 25 bp, Homo sapien
gttccaggacctctcccatactgtt

SEQ ID NO: 4936018 - DNA, 25 bp, Homo sapien
tctcccatactgttccaggactttc

SEQ ID NO: 4936019 - DNA, 25 bp, Homo sapien
cagggccttaacccatactgttccg

SEQ ID NO: 4936020 - DNA, 25 bp, Homo sapien
catgctgttcctgaacgttcaccca

SEQ ID NO: 4936021 - DNA, 25 bp, Homo sapien
gacagaacaatagtgcaacagaagg

SEQ ID NO: 4936022 - DNA, 25 bp, Homo sapien
cagattcaaggtgtataagccccaa

SEQ ID NO: 4936023 - DNA, 25 bp, Homo sapien
gagccttgggtacctgtggacaata

SEQ ID NO: 4936024 - DNA, 25 bp, Homo sapien
gagagaggtgctgaaaaattgtact

SEQ ID NO: 4936025 - DNA, 25 bp, Homo sapien
cccaggcacatccaggattgctgtc

SEQ ID NO: 4936026 - DNA, 25 bp, Homo sapien
tggcagactcagtcctagtcaagtg

SEQ ID NO: 4936027 - DNA, 25 bp, Homo sapien
tgtctggatcagcatcaggggaaga

SEQ ID NO: 4936028 - DNA, 25 bp, Homo sapien
agtcctagtcaagtgcctgtgggtg

SEQ ID NO: 4936029 - DNA, 25 bp, Homo sapien
gaccaagtctgtgccagggccccgg

SEQ ID NO: 4936030 - DNA, 25 bp, Homo sapien
caacgccagggcaccctcccaagtc

SEQ ID NO: 4936031 - DNA, 25 bp, Homo sapien
tgaccaagtctgtgccagggccccg

SEQ ID NO: 4936032 - DNA, 25 bp, Homo sapien
ccaccacgggctgcaacgccagggc

SEQ ID NO: 4936033 - DNA, 25 bp, Homo sapien
ggggagacctccgaggctcccactg

SEQ ID NO: 4936034 - DNA, 25 bp, Homo sapien
ggtggggagacctccgaggctccca

SEQ ID NO: 4936035 - DNA, 25 bp, Homo sapien
ggagcctgtcaagccactgagaggt

SEQ ID NO: 4936036 - DNA, 25 bp, Homo sapien
ccagggagcctgtcaagccactgag

SEQ ID NO: 4936037 - DNA, 25 bp, Homo sapien
tggcaggtgggaagcaccagtgttc

SEQ ID NO: 4936038 - DNA, 25 bp, Homo sapien
ggcaggtgggaagcaccagtgttct

SEQ ID NO: 4936039 - DNA, 25 bp, Homo sapien
ttggcaggtgggaagcaccagtgtt

SEQ ID NO: 4936040 - DNA, 25 bp, Homo sapien
aggctagtttcaggctcagcttaaa

SEQ ID NO: 4936041 - DNA, 25 bp, Homo sapien
aaagccacaagggaccactgagtct

SEQ ID NO: 4936042 - DNA, 25 bp, Homo sapien
cttaaaggctagtttcaggctcagc

SEQ ID NO: 4936043 - DNA, 25 bp, Homo sapien
aagccacaagggaccactgagtctc

SEQ ID NO: 4936044 - DNA, 25 bp, Homo sapien
gaggcaaaaccttcgaaggccctga

SEQ ID NO: 4936045 - DNA, 25 bp, Homo sapien
gctgaatgcccaccgtggattcggg

SEQ ID NO: 4936046 - DNA, 25 bp, Homo sapien
gaaagatggcgagggcatgtggcct

SEQ ID NO: 4936047 - DNA, 25 bp, Homo sapien
cagacacgtgctgaatgcccaccgt

SEQ ID NO: 4936048 - DNA, 25 bp, Homo sapien
gctccttgtaggtcgagagagcagc

SEQ ID NO: 4936049 - DNA, 25 bp, Homo sapien
agctccttgtaggtcgagagagcag

SEQ ID NO: 4936050 - DNA, 25 bp, Homo sapien
ggtccccgggatgccgaggctccca

SEQ ID NO: 4936051 - DNA, 25 bp, Homo sapien
cccgcggcccgagggaattggcagg

SEQ ID NO: 4936052 - DNA, 25 bp, Homo sapien
gcggcccgagggaattggcaggtcc

SEQ ID NO: 4936053 - DNA, 25 bp, Homo sapien
gccccgcggcccgagggaattggca

SEQ ID NO: 4936054 - DNA, 25 bp, Homo sapien
aggcctgcaaactcgcccatgcctg

SEQ ID NO: 4936055 - DNA, 25 bp, Homo sapien
aaattgccccttgttcaggcccagg

SEQ ID NO: 4936056 - DNA, 25 bp, Homo sapien
aaactcgcccatgcctgcccatggg

SEQ ID NO: 4936057 - DNA, 25 bp, Homo sapien
tagaaattgccccttgttcaggccc

SEQ ID NO: 4936058 - DNA, 25 bp, Homo sapien
ttccagggccctcagcgtggaccca

SEQ ID NO: 4936059 - DNA, 25 bp, Homo sapien
cagcgtggacccattcctctgctgg

SEQ ID NO: 4936060 - DNA, 25 bp, Homo sapien
ctggtgaagctgtgtccgctctcgg

SEQ ID NO: 4936061 - DNA, 25 bp, Homo sapien
tgtgtccgctctcggatgccacagt

SEQ ID NO: 4936062 - DNA, 25 bp, Homo sapien
ggccgttgcaggcacgagcaccacg

SEQ ID NO: 4936063 - DNA, 25 bp, Homo sapien
gagattcggcaaccccagagccctt

SEQ ID NO: 4936064 - DNA, 25 bp, Homo sapien
accgagaggagattcggcaacccca

SEQ ID NO: 4936065 - DNA, 25 bp, Homo sapien
ccatgcctctgagcgagcggccgtt

SEQ ID NO: 4936066 - DNA, 25 bp, Homo sapien
gttctggcttgaagatggggggctg

SEQ ID NO: 4936067 - DNA, 25 bp, Homo sapien
ctggcttgaagatggggggctgctc

SEQ ID NO: 4936068 - DNA, 25 bp, Homo sapien
ttctggcttgaagatggggggctgc

SEQ ID NO: 4936069 - DNA, 25 bp, Homo sapien
ggttctggcttgaagatggggggct

SEQ ID NO: 4936070 - DNA, 25 bp, Homo sapien
tcttctcatcgttcagagtccccag

SEQ ID NO: 4936071 - DNA, 25 bp, Homo sapien
ccagcgatacagagatcccgagccc

SEQ ID NO: 4936072 - DNA, 25 bp, Homo sapien
ggctcttctcatcgttcagagtccc

SEQ ID NO: 4936073 - DNA, 25 bp, Homo sapien
gtggctcttctcatcgttcagagtc

SEQ ID NO: 4936074 - DNA, 25 bp, Homo sapien
cttcagcaccatgcagagatgctga

SEQ ID NO: 4936075 - DNA, 25 bp, Homo sapien
tacagcagaaagtcagaggactggt

SEQ ID NO: 4936076 - DNA, 25 bp, Homo sapien
agatgctgaggatcccgggccagcc

SEQ ID NO: 4936077 - DNA, 25 bp, Homo sapien
tcacaccggccacacacttcagcac

SEQ ID NO: 4936078 - DNA, 25 bp, Homo sapien
cttcgatgggccacaagggccgtga

SEQ ID NO: 4936079 - DNA, 25 bp, Homo sapien
tgctctctgcagacgggaagctcga

SEQ ID NO: 4936080 - DNA, 25 bp, Homo sapien
agacgggaagctcgagctcaggcct

SEQ ID NO: 4936081 - DNA, 25 bp, Homo sapien
caagggccgtgagctctctttccac

SEQ ID NO: 4936082 - DNA, 25 bp, Homo sapien
cacaagcaacggcaaggcctggctg

SEQ ID NO: 4936083 - DNA, 25 bp, Homo sapien
agagtcctttcgaccccctgaaatg

SEQ ID NO: 4936084 - DNA, 25 bp, Homo sapien
cctgcagggagcttgcaagactcca

SEQ ID NO: 4936085 - DNA, 25 bp, Homo sapien
aatggccacacaagcaacggcaagg

SEQ ID NO: 4936086 - DNA, 25 bp, Homo sapien
gaatccttccgatgcagatgtgtga

SEQ ID NO: 4936087 - DNA, 25 bp, Homo sapien
cctgggagccatagccggtagtgct

SEQ ID NO: 4936088 - DNA, 25 bp, Homo sapien
aagactctggtagcgacatctcggg

SEQ ID NO: 4936089 - DNA, 25 bp, Homo sapien
gagcacacgccgcatttttcagggt

SEQ ID NO: 4936090 - DNA, 25 bp, Homo sapien
catcgccttagcttccgggcagcga

SEQ ID NO: 4936091 - DNA, 25 bp, Homo sapien
accagcagggcaccgatttgggctt

SEQ ID NO: 4936092 - DNA, 25 bp, Homo sapien
gcttgcgggacagtcttgttcacca

SEQ ID NO: 4936093 - DNA, 25 bp, Homo sapien
gttcaccacaagtgtcttccactgg

SEQ ID NO: 4936094 - DNA, 25 bp, Homo sapien
tgggtccgcggcacaggcggacagc

SEQ ID NO: 4936095 - DNA, 25 bp, Homo sapien
tccaggtggcgccagaatgaggaca

SEQ ID NO: 4936096 - DNA, 25 bp, Homo sapien
cagcagttccgcgtcttccgcccct

SEQ ID NO: 4936097 - DNA, 25 bp, Homo sapien
tcggctcctgggtccgcggcacagg

SEQ ID NO: 4936098 - DNA, 25 bp, Homo sapien
aaggatgggtcgagggctgctcgtg

SEQ ID NO: 4936099 - DNA, 25 bp, Homo sapien
gctgctcgtgggagagggtgaccca

SEQ ID NO: 4936100 - DNA, 25 bp, Homo sapien
cagactgaaggtgtcgtccacgagg

SEQ ID NO: 4936101 - DNA, 25 bp, Homo sapien
gctggcatctccatcattaccaact

SEQ ID NO: 4936102 - DNA, 25 bp, Homo sapien
ggcaagtgggaacagccccgtggga

SEQ ID NO: 4936103 - DNA, 25 bp, Homo sapien
gacccactgagaagcaatgtggatg

SEQ ID NO: 4936104 - DNA, 25 bp, Homo sapien
gaacagccccgtgggaagctgcagg

SEQ ID NO: 4936105 - DNA, 25 bp, Homo sapien
agagaaggtacccgtggcaagtggg

SEQ ID NO: 4936106 - DNA, 25 bp, Homo sapien
catgatggtggcctgggtaaccaag

SEQ ID NO: 4936107 - DNA, 25 bp, Homo sapien
ccccaggaatttcccagagggccag

SEQ ID NO: 4936108 - DNA, 25 bp, Homo sapien
aacattgacctgtgccccaggaatt

SEQ ID NO: 4936109 - DNA, 25 bp, Homo sapien
tggtcatgatggtggcctgggtaac

SEQ ID NO: 4936110 - DNA, 25 bp, Homo sapien
tgcggccgggccgtggtggagggca

SEQ ID NO: 4936111 - DNA, 25 bp, Homo sapien
ggccgtggtggagggcatgcctcgg

SEQ ID NO: 4936112 - DNA, 25 bp, Homo sapien
cagtggaggtgccttgcggccgggc

SEQ ID NO: 4936113 - DNA, 25 bp, Homo sapien
ggcatgcctcggagcgggtggcagt

SEQ ID NO: 4936114 - DNA, 25 bp, Homo sapien
agctgcagccattgaaacagtgttc

SEQ ID NO: 4936115 - DNA, 25 bp, Homo sapien
gctgcagccattgaaacagtgttca

SEQ ID NO: 4936116 - DNA, 25 bp, Homo sapien
ctgcagccattgaaacagtgttcat

SEQ ID NO: 4936117 - DNA, 25 bp, Homo sapien
gaaggaaagtaccaagatcagaaca

SEQ ID NO: 4936118 - DNA, 25 bp, Homo sapien
agagcacaaactgaccttccaaggt

SEQ ID NO: 4936119 - DNA, 25 bp, Homo sapien
cctgaacgcctacatcaaagagact

SEQ ID NO: 4936120 - DNA, 25 bp, Homo sapien
gaccgttagtaagatcaaccaagaa

SEQ ID NO: 4936121 - DNA, 25 bp, Homo sapien
actctacaagctaggaggaattggg

SEQ ID NO: 4936122 - DNA, 25 bp, Homo sapien
aagctacccctacaacaactgctga

SEQ ID NO: 4936123 - DNA, 25 bp, Homo sapien
aaagcatacatcacacaggccctag

SEQ ID NO: 4936124 - DNA, 25 bp, Homo sapien
tatccgttgcctacaggacctaaca

SEQ ID NO: 4936125 - DNA, 25 bp, Homo sapien
gtcttacatttagcaagtccaaggt

SEQ ID NO: 4936126 - DNA, 25 bp, Homo sapien
cacaggtcctttgtgcgtcttggtg

SEQ ID NO: 4936127 - DNA, 25 bp, Homo sapien
tccacaggtcctttgtgcgtcttgg

SEQ ID NO: 4936128 - DNA, 25 bp, Homo sapien
catttagcaagtccaaggtggacat

SEQ ID NO: 4936129 - DNA, 25 bp, Homo sapien
tgaccggtttagtgcccatcagctc

SEQ ID NO: 4936130 - DNA, 25 bp, Homo sapien
gggatgaccggtttagtgcccatca

SEQ ID NO: 4936131 - DNA, 25 bp, Homo sapien
gatgaccggtttagtgcccatcagc

SEQ ID NO: 4936132 - DNA, 25 bp, Homo sapien
gaccggtttagtgcccatcagctcc

SEQ ID NO: 4936133 - DNA, 25 bp, Homo sapien
ctgcgtgacagtccccgggtgaaac

SEQ ID NO: 4936134 - DNA, 25 bp, Homo sapien
caggacctgttctcatgcagagagg

SEQ ID NO: 4936135 - DNA, 25 bp, Homo sapien
aacatcccctctttcaggacctgtt

SEQ ID NO: 4936136 - DNA, 25 bp, Homo sapien
aaagcagctgagtgcctactgcgtg

SEQ ID NO: 4936137 - DNA, 25 bp, Homo sapien
gcagggagggccgagatctggtgcg

SEQ ID NO: 4936138 - DNA, 25 bp, Homo sapien
tctggtgcgggcgaagcccagaaac

SEQ ID NO: 4936139 - DNA, 25 bp, Homo sapien
cagaaacgtgatcaacgtcagtcct

SEQ ID NO: 4936140 - DNA, 25 bp, Homo sapien
agggttgctcccgacggcagggagg

SEQ ID NO: 4936141 - DNA, 25 bp, Homo sapien
ttctccaattactgcggctccgcgg

SEQ ID NO: 4936142 - DNA, 25 bp, Homo sapien
aatggcccgtgcagtcattaacaag

SEQ ID NO: 4936143 - DNA, 25 bp, Homo sapien
ggctccgcggcaaataatggcccgt

SEQ ID NO: 4936144 - DNA, 25 bp, Homo sapien
ggcggctgctctctccttatggtgg

SEQ ID NO: 4936145 - DNA, 25 bp, Homo sapien
ccagcgcacctttgattttggagag

SEQ ID NO: 4936146 - DNA, 25 bp, Homo sapien
tcgtcttggatcaggttagcagccc

SEQ ID NO: 4936147 - DNA, 25 bp, Homo sapien
ggtccaaaaggtgtctcagataggg

SEQ ID NO: 4936148 - DNA, 25 bp, Homo sapien
gagggtctgtccagagttggtccaa

SEQ ID NO: 4936149 - DNA, 25 bp, Homo sapien
ccaaagcaaatgaccccggttctgg

SEQ ID NO: 4936150 - DNA, 25 bp, Homo sapien
tctggcaaaggtgacccaagcgtgg

SEQ ID NO: 4936151 - DNA, 25 bp, Homo sapien
caaatatctaagtatccgggaagtt

SEQ ID NO: 4936152 - DNA, 25 bp, Homo sapien
gcacagttcccattgagagatttcc

SEQ ID NO: 4936153 - DNA, 25 bp, Homo sapien
ttgctgggaaaatgctcgggagtcc

SEQ ID NO: 4936154 - DNA, 25 bp, Homo sapien
cttcccgctcaagtacagccttgag

SEQ ID NO: 4936155 - DNA, 25 bp, Homo sapien
aagtacagccttgagtgctccctcc

SEQ ID NO: 4936156 - DNA, 25 bp, Homo sapien
cacagacacttctcgtttctcaggc

SEQ ID NO: 4936157 - DNA, 25 bp, Homo sapien
gcccacaatgccctgatcttggtag

SEQ ID NO: 4936158 - DNA, 25 bp, Homo sapien
cccacaatgccctgatcttggtagc

SEQ ID NO: 4936159 - DNA, 25 bp, Homo sapien
tcttggtagccagggtctctccctg

SEQ ID NO: 4936160 - DNA, 25 bp, Homo sapien
ccacaatgccctgatcttggtagcc

SEQ ID NO: 4936161 - DNA, 25 bp, Homo sapien
cactgaggccgacaggaagcatcca

SEQ ID NO: 4936162 - DNA, 25 bp, Homo sapien
tcagggcacattgagagcttcccgg

SEQ ID NO: 4936163 - DNA, 25 bp, Homo sapien
gtcactgaggccgacaggaagcatc

SEQ ID NO: 4936164 - DNA, 25 bp, Homo sapien
gcacattgagagcttcccggagcag

SEQ ID NO: 4936165 - DNA, 25 bp, Homo sapien
ttcctctgcagcctgaaggccagac

SEQ ID NO: 4936166 - DNA, 25 bp, Homo sapien
gttttgtcctagatgctgtccttgt

SEQ ID NO: 4936167 - DNA, 25 bp, Homo sapien
tccctccagttttgtcctagatgct

SEQ ID NO: 4936168 - DNA, 25 bp, Homo sapien
tgtggcctccagttcattcctctgc

SEQ ID NO: 4936169 - DNA, 25 bp, Homo sapien
ccctgatacgtagtggtgtctggca

SEQ ID NO: 4936170 - DNA, 25 bp, Homo sapien
tcacacccggccctgatacgtagtg

SEQ ID NO: 4936171 - DNA, 25 bp, Homo sapien
atacgtagtggtgtctggcacaggc

SEQ ID NO: 4936172 - DNA, 25 bp, Homo sapien
ccggccctgatacgtagtggtgtct

SEQ ID NO: 4936173 - DNA, 25 bp, Homo sapien
cctggttggaccaccatgggctgct

SEQ ID NO: 4936174 - DNA, 25 bp, Homo sapien
cctgggggccatcgttctgttggat

SEQ ID NO: 4936175 - DNA, 25 bp, Homo sapien
gctgccctggttggaccaccatggg

SEQ ID NO: 4936176 - DNA, 25 bp, Homo sapien
gttctgttggatcctcgcccacggg

SEQ ID NO: 4936177 - DNA, 25 bp, Homo sapien
ctgggaaggagcccgcagggaaggt

SEQ ID NO: 4936178 - DNA, 25 bp, Homo sapien
gagcccgcagggaaggtgcagtccc

SEQ ID NO: 4936179 - DNA, 25 bp, Homo sapien
gaaggagcccgcagggaaggtgcag

SEQ ID NO: 4936180 - DNA, 25 bp, Homo sapien
agcccgcagggaaggtgcagtccca

SEQ ID NO: 4936181 - DNA, 25 bp, Homo sapien
cctgcaaaaccagccgtctcagtgt

SEQ ID NO: 4936182 - DNA, 25 bp, Homo sapien
cagccgtctcagtgtctgggtctgc

SEQ ID NO: 4936183 - DNA, 25 bp, Homo sapien
ctcggatggggcctgttggagattt

SEQ ID NO: 4936184 - DNA, 25 bp, Homo sapien
gtcctgcaaaaccagccgtctcagt

SEQ ID NO: 4936185 - DNA, 25 bp, Homo sapien
aaggccaagctttcccaaggtgctg

SEQ ID NO: 4936186 - DNA, 25 bp, Homo sapien
tgcgcttctgcgtctggaaggccaa

SEQ ID NO: 4936187 - DNA, 25 bp, Homo sapien
atgcacctggagttgggagctcagc

SEQ ID NO: 4936188 - DNA, 25 bp, Homo sapien
ggggccaggaaagtccctctgtcag

SEQ ID NO: 4936189 - DNA, 25 bp, Homo sapien
ggacagatggattcgggccaagcca

SEQ ID NO: 4936190 - DNA, 25 bp, Homo sapien
tgtgtcaaaatccaacagttggcag

SEQ ID NO: 4936191 - DNA, 25 bp, Homo sapien
atctgcttcgacgtctattccaggg

SEQ ID NO: 4936192 - DNA, 25 bp, Homo sapien
ggtgtgcccacactggacgaaatgt

SEQ ID NO: 4936193 - DNA, 25 bp, Homo sapien
acagaggccgtggagtactcagaag

SEQ ID NO: 4936194 - DNA, 25 bp, Homo sapien
ggccgtggagtactcagaagggctg

SEQ ID NO: 4936195 - DNA, 25 bp, Homo sapien
gaggccgtggagtactcagaagggc

SEQ ID NO: 4936196 - DNA, 25 bp, Homo sapien
ccgtggagtactcagaagggctgtg

SEQ ID NO: 4936197 - DNA, 25 bp, Homo sapien
cctgagcggcggttgtgcatctggt

SEQ ID NO: 4936198 - DNA, 25 bp, Homo sapien
gagaagacgcccctgagcggcggtt

SEQ ID NO: 4936199 - DNA, 25 bp, Homo sapien
aagagtgtggaaggcgaagagtgtg

SEQ ID NO: 4936200 - DNA, 25 bp, Homo sapien
tatgtagggcagcagcaccgaatgg

SEQ ID NO: 4936201 - DNA, 25 bp, Homo sapien
gaagacctatctccttgcagtagac

SEQ ID NO: 4936202 - DNA, 25 bp, Homo sapien
cattctctcggtgcctgcatcagca

SEQ ID NO: 4936203 - DNA, 25 bp, Homo sapien
agcagccggccctcccttgtttatt

SEQ ID NO: 4936204 - DNA, 25 bp, Homo sapien
actgcctaggcctggtgtgcgtcca

SEQ ID NO: 4936205 - DNA, 25 bp, Homo sapien
tccagcctctgctgttccggggctg

SEQ ID NO: 4936206 - DNA, 25 bp, Homo sapien
cttcggctccagcctctgctgttcc

SEQ ID NO: 4936207 - DNA, 25 bp, Homo sapien
cggctccagcctctgctgttccggg

SEQ ID NO: 4936208 - DNA, 25 bp, Homo sapien
agcctctgctgttccggggctgggc

SEQ ID NO: 4936209 - DNA, 25 bp, Homo sapien
cgtccaagggtgagcgtgtatgtga

SEQ ID NO: 4936210 - DNA, 25 bp, Homo sapien
ttcctgcagacgtcttcccgagctt

SEQ ID NO: 4936211 - DNA, 25 bp, Homo sapien
tgcaaatcctgtttcgggacacggc

SEQ ID NO: 4936212 - DNA, 25 bp, Homo sapien
gagcttctcccatgcgaagatcccg

SEQ ID NO: 4936213 - DNA, 25 bp, Homo sapien
ggctaccagccaccgtcatgtgggt

SEQ ID NO: 4936214 - DNA, 25 bp, Homo sapien
tgttagaaggatcctctgggattgt

SEQ ID NO: 4936215 - DNA, 25 bp, Homo sapien
tgtgggttagcactctgccatttcc

SEQ ID NO: 4936216 - DNA, 25 bp, Homo sapien
ggcactttcccaacggagttctcag

SEQ ID NO: 4936217 - DNA, 25 bp, Homo sapien
agggactcccagcagtgacagcacg

SEQ ID NO: 4936218 - DNA, 25 bp, Homo sapien
cttggctgacaaatgaatgagggac

SEQ ID NO: 4936219 - DNA, 25 bp, Homo sapien
gcagtgacagcacgcccccagaatg

SEQ ID NO: 4936220 - DNA, 25 bp, Homo sapien
atgagggcccccagcattgacagca

SEQ ID NO: 4936221 - DNA, 25 bp, Homo sapien
cactgggcaaaatccataacctggt

SEQ ID NO: 4936222 - DNA, 25 bp, Homo sapien
tccatgtcctggagaaagtcacgcc

SEQ ID NO: 4936223 - DNA, 25 bp, Homo sapien
tgctccccacaccaggcgatgggct

SEQ ID NO: 4936224 - DNA, 25 bp, Homo sapien
ggctgctgagagacactctgcattt

SEQ ID NO: 4936225 - DNA, 25 bp, Homo sapien
acagtgactcggcagctgccaaaag

SEQ ID NO: 4936226 - DNA, 25 bp, Homo sapien
tctctaagccggtattctttcggta

SEQ ID NO: 4936227 - DNA, 25 bp, Homo sapien
cggtaaagaggaagttttgtctgat

SEQ ID NO: 4936228 - DNA, 25 bp, Homo sapien
tccctggacgctcgtggagtgaacg

SEQ ID NO: 4936229 - DNA, 25 bp, Homo sapien
cgcgttggcatttccacttgtgaat

SEQ ID NO: 4936230 - DNA, 25 bp, Homo sapien
gctgacccctaatccataacccctg

SEQ ID NO: 4936231 - DNA, 25 bp, Homo sapien
ccctgatcctggacaaattctgagt

SEQ ID NO: 4936232 - DNA, 25 bp, Homo sapien
ctgactctggttccacgctgacccc

SEQ ID NO: 4936233 - DNA, 25 bp, Homo sapien
ctgtcacagactgagccctgatcct

SEQ ID NO: 4936234 - DNA, 25 bp, Homo sapien
catcactttgccagactgggcatca

SEQ ID NO: 4936235 - DNA, 25 bp, Homo sapien
cacagagagtcgaatgctgctcagc

SEQ ID NO: 4936236 - DNA, 25 bp, Homo sapien
actccatcgaggtccacagcttctg

SEQ ID NO: 4936237 - DNA, 25 bp, Homo sapien
caacaggcttgtcccattgacacag

SEQ ID NO: 4936238 - DNA, 25 bp, Homo sapien
gaggcagaagccaggaaccctgaaa

SEQ ID NO: 4936239 - DNA, 25 bp, Homo sapien
ggctgctggagaaccttcctcgcct

SEQ ID NO: 4936240 - DNA, 25 bp, Homo sapien
cctgaaaggctgctggagaaccttc

SEQ ID NO: 4936241 - DNA, 25 bp, Homo sapien
gccaggaaccctgaaaggctgctgg

SEQ ID NO: 4936242 - DNA, 25 bp, Homo sapien
atgttttgtggggtcttcatggtga

SEQ ID NO: 4936243 - DNA, 25 bp, Homo sapien
gatgttttgtggggtcttcatggtg

SEQ ID NO: 4936244 - DNA, 25 bp, Homo sapien
tcccaccttccagaaccaggcccat

SEQ ID NO: 4936245 - DNA, 25 bp, Homo sapien
tctctcccaccttccagaaccaggc

SEQ ID NO: 4936246 - DNA, 25 bp, Homo sapien
tgccagggcagcctggtctctccca

SEQ ID NO: 4936247 - DNA, 25 bp, Homo sapien
gccagggcagcctggtctctcccac

SEQ ID NO: 4936248 - DNA, 25 bp, Homo sapien
tgttgactccagtttccgagtgggt

SEQ ID NO: 4936249 - DNA, 25 bp, Homo sapien
gagcagctgcggctctctgttgact

SEQ ID NO: 4936250 - DNA, 25 bp, Homo sapien
ccaatcctgcgtcctgggacagggt

SEQ ID NO: 4936251 - DNA, 25 bp, Homo sapien
tgtcgtgtgatctggcccgaggcct

SEQ ID NO: 4936252 - DNA, 25 bp, Homo sapien
taaacaatggatacggccctgagtg

SEQ ID NO: 4936253 - DNA, 25 bp, Homo sapien
cacgagaatttagacccggaatgcc

SEQ ID NO: 4936254 - DNA, 25 bp, Homo sapien
cagcgcctggtctatacggtgataa

SEQ ID NO: 4936255 - DNA, 25 bp, Homo sapien
cactgcgcagcgttgggaaagtcgc

SEQ ID NO: 4936256 - DNA, 25 bp, Homo sapien
gccttgcctggaccccatctcgccc

SEQ ID NO: 4936257 - DNA, 25 bp, Homo sapien
atcttcctgaatcccgccttgccca

SEQ ID NO: 4936258 - DNA, 25 bp, Homo sapien
tggaccccatctcgcccatcagggt

SEQ ID NO: 4936259 - DNA, 25 bp, Homo sapien
agggttggtgagatcttcctgaatc

SEQ ID NO: 4936260 - DNA, 25 bp, Homo sapien
tcagcacgaggtgttgcgttcatcc

SEQ ID NO: 4936261 - DNA, 25 bp, Homo sapien
catctgtctttctgctgatgggtgt

SEQ ID NO: 4936262 - DNA, 25 bp, Homo sapien
tcgctgccactcgtgctggctgctg

SEQ ID NO: 4936263 - DNA, 25 bp, Homo sapien
ggcctctgtagtgtcccatctgtga

SEQ ID NO: 4936264 - DNA, 25 bp, Homo sapien
agatggaggagatatagcaccagat

SEQ ID NO: 4936265 - DNA, 25 bp, Homo sapien
ggctgcagaagctctacgtcctcta

SEQ ID NO: 4936266 - DNA, 25 bp, Homo sapien
tcctgcaggaggacaagcaatgacc

SEQ ID NO: 4936267 - DNA, 25 bp, Homo sapien
taatatctttataccagcggcagag

SEQ ID NO: 4936268 - DNA, 25 bp, Homo sapien
cagaagccgtgcagtgctgggaatc

SEQ ID NO: 4936269 - DNA, 25 bp, Homo sapien
tctgagtgattgtgccggctgagca

SEQ ID NO: 4936270 - DNA, 25 bp, Homo sapien
acatgttctgagtgattgtgccggc

SEQ ID NO: 4936271 - DNA, 25 bp, Homo sapien
tcaaggagacaggtgagggccgcgc

SEQ ID NO: 4936272 - DNA, 25 bp, Homo sapien
ctgggctatggacatgttctgagtg

SEQ ID NO: 4936273 - DNA, 25 bp, Homo sapien
cccacggggtcttcgaggctggtct

SEQ ID NO: 4936274 - DNA, 25 bp, Homo sapien
gctgtgtccagaccggccccattcc

SEQ ID NO: 4936275 - DNA, 25 bp, Homo sapien
ccaccgctgtgtccagaccggcccc

SEQ ID NO: 4936276 - DNA, 25 bp, Homo sapien
acggggtcttcgaggctggtctcca

SEQ ID NO: 4936277 - DNA, 25 bp, Homo sapien
cacaatatcattgcgccggatggct

SEQ ID NO: 4936278 - DNA, 25 bp, Homo sapien
aagatgccgttggtaacgacccgtg

SEQ ID NO: 4936279 - DNA, 25 bp, Homo sapien
ataagctgtcgattggaccgggccc

SEQ ID NO: 4936280 - DNA, 25 bp, Homo sapien
gacagctgctatattgatattccca

SEQ ID NO: 4936281 - DNA, 25 bp, Homo sapien
tcaaatcgattgcacgtgggctcca

SEQ ID NO: 4936282 - DNA, 25 bp, Homo sapien
tcaggattgccccatcttagtcggc

SEQ ID NO: 4936283 - DNA, 25 bp, Homo sapien
gtgcaaacggattggccctacgggc

SEQ ID NO: 4936284 - DNA, 25 bp, Homo sapien
gccctcggcccatacactggatagt

SEQ ID NO: 4936285 - DNA, 25 bp, Homo sapien
aggtccgtgtagtgagttcctggcc

SEQ ID NO: 4936286 - DNA, 25 bp, Homo sapien
tttgggctccgaggtccgtgtagtg

SEQ ID NO: 4936287 - DNA, 25 bp, Homo sapien
ggctacaatggatgaagatgtgtgt

SEQ ID NO: 4936288 - DNA, 25 bp, Homo sapien
ttctcttggctacaatggatgaaga

SEQ ID NO: 4936289 - DNA, 25 bp, Homo sapien
gcttcccatgtgcaagagcgtgtgg

SEQ ID NO: 4936290 - DNA, 25 bp, Homo sapien
tctcgaaaactaaaagcttcccatg

SEQ ID NO: 4936291 - DNA, 25 bp, Homo sapien
tgttttgcgtccatttctcgaaaac

SEQ ID NO: 4936292 - DNA, 25 bp, Homo sapien
ggcctggtgagacccccagtctaca

SEQ ID NO: 4936293 - DNA, 25 bp, Homo sapien
ctatccttcaaacacactgctagca

SEQ ID NO: 4936294 - DNA, 25 bp, Homo sapien
cttcaaacacactgctagcaataaa

SEQ ID NO: 4936295 - DNA, 25 bp, Homo sapien
tatccttcaaacacactgctagcaa

SEQ ID NO: 4936296 - DNA, 25 bp, Homo sapien
tccttcaaacacactgctagcaata

SEQ ID NO: 4936297 - DNA, 25 bp, Homo sapien
cccaggatctgccatgggcgccaaa

SEQ ID NO: 4936298 - DNA, 25 bp, Homo sapien
aggatctgccatgggcgccaaaggc

SEQ ID NO: 4936299 - DNA, 25 bp, Homo sapien
tgccatgggcgccaaaggcctctct

SEQ ID NO: 4936300 - DNA, 25 bp, Homo sapien
taggtttggggagtacagcagtgct

SEQ ID NO: 4936301 - DNA, 25 bp, Homo sapien
agtcaatcagtcctttcacggtgag

SEQ ID NO: 4936302 - DNA, 25 bp, Homo sapien
gagtgcttccctgctcttcaagtgg

SEQ ID NO: 4936303 - DNA, 25 bp, Homo sapien
tcacggtgagcaaatcgtcgtggcc

SEQ ID NO: 4936304 - DNA, 25 bp, Homo sapien
ccctggcgagatgcgacgagtgctt

SEQ ID NO: 4936305 - DNA, 25 bp, Homo sapien
gcaacacagcccgtggcgagcttcg

SEQ ID NO: 4936306 - DNA, 25 bp, Homo sapien
agcccgtggcgagcttcgccttgga

SEQ ID NO: 4936307 - DNA, 25 bp, Homo sapien
cagacagcaacacagcccgtggcga

SEQ ID NO: 4936308 - DNA, 25 bp, Homo sapien
tgaagactgaaaccttggggactgg

SEQ ID NO: 4936309 - DNA, 25 bp, Homo sapien
gcctggccgaaatcttttggtatcc

SEQ ID NO: 4936310 - DNA, 25 bp, Homo sapien
tgctcccgcctgatggtcagaaact

SEQ ID NO: 4936311 - DNA, 25 bp, Homo sapien
gtgcaggcgatgacagggctcacat

SEQ ID NO: 4936312 - DNA, 25 bp, Homo sapien
cacatgagcgctcagaaaatctcct

SEQ ID NO: 4936313 - DNA, 25 bp, Homo sapien
ggcgtctcccgggtcttcaaatcca

SEQ ID NO: 4936314 - DNA, 25 bp, Homo sapien
gtctcccgggtcttcaaatccagtc

SEQ ID NO: 4936315 - DNA, 25 bp, Homo sapien
gatggccgagcagcgagcccccgag

SEQ ID NO: 4936316 - DNA, 25 bp, Homo sapien
gcggaggcgtctcccgggtcttcaa

SEQ ID NO: 4936317 - DNA, 25 bp, Homo sapien
tcttctgactcgaggctccctggac

SEQ ID NO: 4936318 - DNA, 25 bp, Homo sapien
aggtctgactggacatccccaagaa

SEQ ID NO: 4936319 - DNA, 25 bp, Homo sapien
ttgtggctggaagtccccgcagtct

SEQ ID NO: 4936320 - DNA, 25 bp, Homo sapien
cagagttttaaatgggagctatcac

SEQ ID NO: 4936321 - DNA, 25 bp, Homo sapien
cagctcacagccgtgggcgagggtc

SEQ ID NO: 4936322 - DNA, 25 bp, Homo sapien
gggaggggctttcagagacgctctg

SEQ ID NO: 4936323 - DNA, 25 bp, Homo sapien
gaggggctttcagagacgctctgca

SEQ ID NO: 4936324 - DNA, 25 bp, Homo sapien
aaaggcagctcacagccgtgggcga

SEQ ID NO: 4936325 - DNA, 25 bp, Homo sapien
tctttcacgtatgtcagtgtatggg

SEQ ID NO: 4936326 - DNA, 25 bp, Homo sapien
gggagcatctccctgccagcagatt

SEQ ID NO: 4936327 - DNA, 25 bp, Homo sapien
catgcctctgggatcccaggattct

SEQ ID NO: 4936328 - DNA, 25 bp, Homo sapien
ggaaccggtgctggccatgcctctg

SEQ ID NO: 4936329 - DNA, 25 bp, Homo sapien
tgccagcggcttcatttcttgtgcg

SEQ ID NO: 4936330 - DNA, 25 bp, Homo sapien
cagaacgggcctgttcatacagagg

SEQ ID NO: 4936331 - DNA, 25 bp, Homo sapien
gctgggattcgtatccgccttctca

SEQ ID NO: 4936332 - DNA, 25 bp, Homo sapien
tatgagcgacaaggctccggtctgt

SEQ ID NO: 4936333 - DNA, 25 bp, Homo sapien
gccgccggctgtggttggagaagca

SEQ ID NO: 4936334 - DNA, 25 bp, Homo sapien
acagccccggggctgtgtcagccgc

SEQ ID NO: 4936335 - DNA, 25 bp, Homo sapien
ccgccggctgtggttggagaagcag

SEQ ID NO: 4936336 - DNA, 25 bp, Homo sapien
gtgtcagccgccggctgtggttgga

SEQ ID NO: 4936337 - DNA, 25 bp, Homo sapien
gctgctagctgtgattcatggctgt

SEQ ID NO: 4936338 - DNA, 25 bp, Homo sapien
cctccgtcaaagcaccgagtgctcc

SEQ ID NO: 4936339 - DNA, 25 bp, Homo sapien
ctccgtcaaagcaccgagtgctcct

SEQ ID NO: 4936340 - DNA, 25 bp, Homo sapien
ggcctgtttctgggtgattccggtg

SEQ ID NO: 4936341 - DNA, 25 bp, Homo sapien
ttctgggtgattccggtggagggcc

SEQ ID NO: 4936342 - DNA, 25 bp, Homo sapien
tgggtgattccggtggagggcctgt

SEQ ID NO: 4936343 - DNA, 25 bp, Homo sapien
gcctgtttctgggtgattccggtgg

SEQ ID NO: 4936344 - DNA, 25 bp, Homo sapien
tgtgttcaccttgtggagtacgctc

SEQ ID NO: 4936345 - DNA, 25 bp, Homo sapien
cagaaggaattcagaagctacgctg

SEQ ID NO: 4936346 - DNA, 25 bp, Homo sapien
tcaggtcaccgcagctggaaactgg

SEQ ID NO: 4936347 - DNA, 25 bp, Homo sapien
actggagattctctgtggtgacaca

SEQ ID NO: 4936348 - DNA, 25 bp, Homo sapien
ctggccaagaacccacaggtcttgg

SEQ ID NO: 4936349 - DNA, 25 bp, Homo sapien
ggccaagaacccacaggtcttggca

SEQ ID NO: 4936350 - DNA, 25 bp, Homo sapien
tggccaagaacccacaggtcttggc

SEQ ID NO: 4936351 - DNA, 25 bp, Homo sapien
gattggagaaccgtgtctggaccca

SEQ ID NO: 4936352 - DNA, 25 bp, Homo sapien
tcccggaagaggcatccttcatcag

SEQ ID NO: 4936353 - DNA, 25 bp, Homo sapien
caccggtgagggcttcccggaagag

SEQ ID NO: 4936354 - DNA, 25 bp, Homo sapien
tccttcatcaggattggagaaccgt

SEQ ID NO: 4936355 - DNA, 25 bp, Homo sapien
gggcatggagacccagctccggaaa

SEQ ID NO: 4936356 - DNA, 25 bp, Homo sapien
aggggcatggagacccagctccgga

SEQ ID NO: 4936357 - DNA, 25 bp, Homo sapien
ggcatggagacccagctccggaaac

SEQ ID NO: 4936358 - DNA, 25 bp, Homo sapien
gcatggagacccagctccggaaacc

SEQ ID NO: 4936359 - DNA, 25 bp, Homo sapien
gagagacacaagctcattgccatgg

SEQ ID NO: 4936360 - DNA, 25 bp, Homo sapien
tctgcttcagtacccgaagcttcac

SEQ ID NO: 4936361 - DNA, 25 bp, Homo sapien
gctcctgcttctggcgacacttgtt

SEQ ID NO: 4936362 - DNA, 25 bp, Homo sapien
tgttgccttgtcttacacagaaccc

SEQ ID NO: 4936363 - DNA, 25 bp, Homo sapien
tggagcagctggcgcccgcacacag

SEQ ID NO: 4936364 - DNA, 25 bp, Homo sapien
tagattgcttgtctttatatagccc

SEQ ID NO: 4936365 - DNA, 25 bp, Homo sapien
aggtcaaatattgctcggtgagaat

SEQ ID NO: 4936366 - DNA, 25 bp, Homo sapien
gccgtcttacagaggcgctgatgta

SEQ ID NO: 4936367 - DNA, 25 bp, Homo sapien
gcccacctcctcgacgaagtgtgtg

SEQ ID NO: 4936368 - DNA, 25 bp, Homo sapien
ggcggccacgggccctccgagagct

SEQ ID NO: 4936369 - DNA, 25 bp, Homo sapien
tcaggagcaggaagtcggcactcag

SEQ ID NO: 4936370 - DNA, 25 bp, Homo sapien
catcaggagcaggaagtcggcactc

SEQ ID NO: 4936371 - DNA, 25 bp, Homo sapien
ccatcaggagcaggaagtcggcact

SEQ ID NO: 4936372 - DNA, 25 bp, Homo sapien
aggagcaggaagtcggcactcagcg

SEQ ID NO: 4936373 - DNA, 25 bp, Homo sapien
ggcgtcttgtgacaggtgtgactct

SEQ ID NO: 4936374 - DNA, 25 bp, Homo sapien
atttgttgggcgtcttgtgacaggt

SEQ ID NO: 4936375 - DNA, 25 bp, Homo sapien
taatcatcgaggatttgttgggcgt

SEQ ID NO: 4936376 - DNA, 25 bp, Homo sapien
agctgatcttccacttaatcatcga

SEQ ID NO: 4936377 - DNA, 25 bp, Homo sapien
ggggcagcagccggacaggagagag

SEQ ID NO: 4936378 - DNA, 25 bp, Homo sapien
aacgcactcgctcttgggagaagag

SEQ ID NO: 4936379 - DNA, 25 bp, Homo sapien
ccaacgcactcgctcttgggagaag

SEQ ID NO: 4936380 - DNA, 25 bp, Homo sapien
ggcagcagccggacaggagagaggc

SEQ ID NO: 4936381 - DNA, 25 bp, Homo sapien
caggttgacagatcggttatgaatc

SEQ ID NO: 4936382 - DNA, 25 bp, Homo sapien
tatgtatgtggcatcccacggatgc

SEQ ID NO: 4936383 - DNA, 25 bp, Homo sapien
cccacggatgcattgatttctcagg

SEQ ID NO: 4936384 - DNA, 25 bp, Homo sapien
gaatcaggtaatagaccagcttgta

SEQ ID NO: 4936385 - DNA, 25 bp, Homo sapien
cacattcaccatgggcggcacagag

SEQ ID NO: 4936386 - DNA, 25 bp, Homo sapien
gggagtgcatccatgtagacagaga

SEQ ID NO: 4936387 - DNA, 25 bp, Homo sapien
tgtcacaggtcaggtaacattgctg

SEQ ID NO: 4936388 - DNA, 25 bp, Homo sapien
aacataggaagtaaagcaggactcc

SEQ ID NO: 4936389 - DNA, 25 bp, Homo sapien
tttgcttgttaacttggtggcacca

SEQ ID NO: 4936390 - DNA, 25 bp, Homo sapien
ttgcttgttaacttggtggcaccag

SEQ ID NO: 4936391 - DNA, 25 bp, Homo sapien
aggagatcctctgggttgtgggcac

SEQ ID NO: 4936392 - DNA, 25 bp, Homo sapien
gataatcagggttgattccccagcc

SEQ ID NO: 4936393 - DNA, 25 bp, Homo sapien
gggttgtgggcactctcttcatgtg

SEQ ID NO: 4936394 - DNA, 25 bp, Homo sapien
caggcctcctatccttgataatcag

SEQ ID NO: 4936395 - DNA, 25 bp, Homo sapien
gggaccggcatctttcaagagcctt

SEQ ID NO: 4936396 - DNA, 25 bp, Homo sapien
tgcgatagtgttgaaaggtcccacc

SEQ ID NO: 4936397 - DNA, 25 bp, Homo sapien
gagggaaaggctgtacccattctct

SEQ ID NO: 4936398 - DNA, 25 bp, Homo sapien
catagcaccacctcttgatggaata

SEQ ID NO: 4936399 - DNA, 25 bp, Homo sapien
gatggtgacagtggtggtggtggtg

SEQ ID NO: 4936400 - DNA, 25 bp, Homo sapien
tgacagtggtggtggtggtgatggt

SEQ ID NO: 4936401 - DNA, 25 bp, Homo sapien
acagtggtggtggtggtgatggtga

SEQ ID NO: 4936402 - DNA, 25 bp, Homo sapien
agtggtggtggtggtgatggtgatg

SEQ ID NO: 4936403 - DNA, 25 bp, Homo sapien
tggtggtggtggtgatgatgatggt

SEQ ID NO: 4936404 - DNA, 25 bp, Homo sapien
agtggtggtggtggtgatgatgatg

SEQ ID NO: 4936405 - DNA, 25 bp, Homo sapien
atggtgacagtggtggtggtggtga

SEQ ID NO: 4936406 - DNA, 25 bp, Homo sapien
gtggtggtggtgatgatgatggtga

SEQ ID NO: 4936407 - DNA, 25 bp, Homo sapien
tccaggtcacacactacgatcagag

SEQ ID NO: 4936408 - DNA, 25 bp, Homo sapien
tgggcagtgccatgctggctaagaa

SEQ ID NO: 4936409 - DNA, 25 bp, Homo sapien
ctgtgttagcccagaccaccatggc

SEQ ID NO: 4936410 - DNA, 25 bp, Homo sapien
tgtgcatctctgtgcactgcgccgg

SEQ ID NO: 4936411 - DNA, 25 bp, Homo sapien
gcagagaccttttctgcccacggtc

SEQ ID NO: 4936412 - DNA, 25 bp, Homo sapien
tcctcacacctgtggagcgcatggt

SEQ ID NO: 4936413 - DNA, 25 bp, Homo sapien
ctgccaagtaagtgggccttcccca

SEQ ID NO: 4936414 - DNA, 25 bp, Homo sapien
acctgcgaggtgctgtgcgcaagaa

SEQ ID NO: 4936415 - DNA, 25 bp, Homo sapien
acgtctgtggtctttcccaggtgac

SEQ ID NO: 4936416 - DNA, 25 bp, Homo sapien
atctgtctgtcatcagcagagtccc

SEQ ID NO: 4936417 - DNA, 25 bp, Homo sapien
gggactgacgtctgtggtctttccc

SEQ ID NO: 4936418 - DNA, 25 bp, Homo sapien
cctgggaggcccagattgatgccca

SEQ ID NO: 4936419 - DNA, 25 bp, Homo sapien
cacacccacacaaataactagagca

SEQ ID NO: 4936420 - DNA, 25 bp, Homo sapien
gaggattccggttggctcataagcc

SEQ ID NO: 4936421 - DNA, 25 bp, Homo sapien
atggcaaagaaacccatgatggtaa

SEQ ID NO: 4936422 - DNA, 25 bp, Homo sapien
tgtacttggcaacacgagttatcag

SEQ ID NO: 4936423 - DNA, 25 bp, Homo sapien
tgttgtctttgatgcctgtgtcctg

SEQ ID NO: 4936424 - DNA, 25 bp, Homo sapien
tggtctcagggtcccatggagctcg

SEQ ID NO: 4936425 - DNA, 25 bp, Homo sapien
cgggagtctggattggccctgccat

SEQ ID NO: 4936426 - DNA, 25 bp, Homo sapien
ggcagtgaacccctcttgatgttgt

SEQ ID NO: 4936427 - DNA, 25 bp, Homo sapien
tggttgggtactgtggtcgagtact

SEQ ID NO: 4936428 - DNA, 25 bp, Homo sapien
tgaggtgtggtgaccctaaatttgg

SEQ ID NO: 4936429 - DNA, 25 bp, Homo sapien
tttgggtctttccagcaagcctgtc

SEQ ID NO: 4936430 - DNA, 25 bp, Homo sapien
tactgtggttgaggtgtggtgaccc

SEQ ID NO: 4936431 - DNA, 25 bp, Homo sapien
atcactaaagacacgtgtatagacc

SEQ ID NO: 4936432 - DNA, 25 bp, Homo sapien
catcactaaagacacgtgtatagac

SEQ ID NO: 4936433 - DNA, 25 bp, Homo sapien
cacatcactaaagacacgtgtatag

SEQ ID NO: 4936434 - DNA, 25 bp, Homo sapien
ccacatcactaaagacacgtgtata

SEQ ID NO: 4936435 - DNA, 25 bp, Homo sapien
aaaggaccgcatagttcaccgcgcg

SEQ ID NO: 4936436 - DNA, 25 bp, Homo sapien
gctggatcagggactgctgcgtctt

SEQ ID NO: 4936437 - DNA, 25 bp, Homo sapien
tcttgatatcagaaaggaccgcata

SEQ ID NO: 4936438 - DNA, 25 bp, Homo sapien
gggctgcgcctttccagcatgtaag

SEQ ID NO: 4936439 - DNA, 25 bp, Homo sapien
ctgctgtgtccggtggtgcccggaa

SEQ ID NO: 4936440 - DNA, 25 bp, Homo sapien
tggccatgggtgggaccccgggctc

SEQ ID NO: 4936441 - DNA, 25 bp, Homo sapien
aaggaggaaggggccgttggccatg

SEQ ID NO: 4936442 - DNA, 25 bp, Homo sapien
tgtgtccggtggtgcccggaaggag

SEQ ID NO: 4936443 - DNA, 25 bp, Homo sapien
cctgttcccaatgccaaggcaggca

SEQ ID NO: 4936444 - DNA, 25 bp, Homo sapien
gaggtgacgatgcttgcccaggtca

SEQ ID NO: 4936445 - DNA, 25 bp, Homo sapien
ctgagagtgggtgcgggcatgagcc

SEQ ID NO: 4936446 - DNA, 25 bp, Homo sapien
tgagccgtggctgtgactcagtgtc

SEQ ID NO: 4936447 - DNA, 25 bp, Homo sapien
cattccacacggaggctgcacaggg

SEQ ID NO: 4936448 - DNA, 25 bp, Homo sapien
atgccactcggatgcccatgcgcag

SEQ ID NO: 4936449 - DNA, 25 bp, Homo sapien
caacactgattcatgtaactgcagc

SEQ ID NO: 4936450 - DNA, 25 bp, Homo sapien
tctggctctctgtcgcacacatgag

SEQ ID NO: 4936451 - DNA, 25 bp, Homo sapien
ccgctcagcctttgatgcacggggc

SEQ ID NO: 4936452 - DNA, 25 bp, Homo sapien
gctcagcctttgatgcacggggccg

SEQ ID NO: 4936453 - DNA, 25 bp, Homo sapien
tcagcctttgatgcacggggccgcc

SEQ ID NO: 4936454 - DNA, 25 bp, Homo sapien
agcctttgatgcacggggccgcccc

SEQ ID NO: 4936455 - DNA, 25 bp, Homo sapien
tgtcctagccgaagagtgaagccct

SEQ ID NO: 4936456 - DNA, 25 bp, Homo sapien
tttcggaggagccaacaggtacgga

SEQ ID NO: 4936457 - DNA, 25 bp, Homo sapien
ttgtatggtcaagaaagcggctcct

SEQ ID NO: 4936458 - DNA, 25 bp, Homo sapien
tgaaatacaccaaggcaaggagcgt

SEQ ID NO: 4936459 - DNA, 25 bp, Homo sapien
gccggtggggaaggccactgcccag

SEQ ID NO: 4936460 - DNA, 25 bp, Homo sapien
caggccggtggggaaggccactgcc

SEQ ID NO: 4936461 - DNA, 25 bp, Homo sapien
ccaggcccctctctgtcaccgtgag

SEQ ID NO: 4936462 - DNA, 25 bp, Homo sapien
tctctgtcaccgtgagctccataca

SEQ ID NO: 4936463 - DNA, 25 bp, Homo sapien
tcccgctccacccaggggagccgcg

SEQ ID NO: 4936464 - DNA, 25 bp, Homo sapien
gccgcggcagctccggcaatggcca

SEQ ID NO: 4936465 - DNA, 25 bp, Homo sapien
cgctccacccaggggagccgcggca

SEQ ID NO: 4936466 - DNA, 25 bp, Homo sapien
ggagccgcggcagctccggcaatgg

SEQ ID NO: 4936467 - DNA, 25 bp, Homo sapien
catccgacggcgtcgctgtgacagc

SEQ ID NO: 4936468 - DNA, 25 bp, Homo sapien
gacggcgtcgctgtgacagcagccc

SEQ ID NO: 4936469 - DNA, 25 bp, Homo sapien
ccgacggcgtcgctgtgacagcagc

SEQ ID NO: 4936470 - DNA, 25 bp, Homo sapien
atccgacggcgtcgctgtgacagca

SEQ ID NO: 4936471 - DNA, 25 bp, Homo sapien
ctggaaggtggtgccgggcgtgtct

SEQ ID NO: 4936472 - DNA, 25 bp, Homo sapien
gtgtctggtgaaggcgccgttggca

SEQ ID NO: 4936473 - DNA, 25 bp, Homo sapien
gtggtgccgggcgtgtctggtgaag

SEQ ID NO: 4936474 - DNA, 25 bp, Homo sapien
gaaggtggtgccgggcgtgtctggt

SEQ ID NO: 4936475 - DNA, 25 bp, Homo sapien
tgtggctgcccggtacccgttcctg

SEQ ID NO: 4936476 - DNA, 25 bp, Homo sapien
ggtacccgttcctgagaatcagcca

SEQ ID NO: 4936477 - DNA, 25 bp, Homo sapien
gccgtagcttgtgtacttccaagga

SEQ ID NO: 4936478 - DNA, 25 bp, Homo sapien
agggaccccaaaggatgtcacccag

SEQ ID NO: 4936479 - DNA, 25 bp, Homo sapien
gcactgtggtagctcctggctgcct

SEQ ID NO: 4936480 - DNA, 25 bp, Homo sapien
gtccgaggcactgtggtagctcctg

SEQ ID NO: 4936481 - DNA, 25 bp, Homo sapien
cagcaaccaggagcctttacgtggg

SEQ ID NO: 4936482 - DNA, 25 bp, Homo sapien
cctgtctccccgagagggatgtgca

SEQ ID NO: 4936483 - DNA, 25 bp, Homo sapien
tcgctgcaccagcagtcatggccac

SEQ ID NO: 4936484 - DNA, 25 bp, Homo sapien
gctgcctctgaggatcccctgcgga

SEQ ID NO: 4936485 - DNA, 25 bp, Homo sapien
cctcccagtcctggcggcgatgccc

SEQ ID NO: 4936486 - DNA, 25 bp, Homo sapien
cctggcggcgatgccctgccgtctc

SEQ ID NO: 4936487 - DNA, 25 bp, Homo sapien
tggccgcttcggctgccttggatca

SEQ ID NO: 4936488 - DNA, 25 bp, Homo sapien
ccactctgagtgcaagtccccttgt

SEQ ID NO: 4936489 - DNA, 25 bp, Homo sapien
aagtgactgcgggatccttctccac

SEQ ID NO: 4936490 - DNA, 25 bp, Homo sapien
ttccaggaccgctggacaggtaccc

SEQ ID NO: 4936491 - DNA, 25 bp, Homo sapien
ccggcgaggactcgatccggcgagt

SEQ ID NO: 4936492 - DNA, 25 bp, Homo sapien
atccggcgagttgcaaatccccgcg

SEQ ID NO: 4936493 - DNA, 25 bp, Homo sapien
gcgagttgcaaatccccgcgagcgc

SEQ ID NO: 4936494 - DNA, 25 bp, Homo sapien
actcgatccggcgagttgcaaatcc

SEQ ID NO: 4936495 - DNA, 25 bp, Homo sapien
gcgacgcggacccgggagtgctcgg

SEQ ID NO: 4936496 - DNA, 25 bp, Homo sapien
gggcgcagagtttcgctgccgccca

SEQ ID NO: 4936497 - DNA, 25 bp, Homo sapien
gggagcggctcgacctccctcgttg

SEQ ID NO: 4936498 - DNA, 25 bp, Homo sapien
tgggtactcaaagccggactcggcg

SEQ ID NO: 4936499 - DNA, 25 bp, Homo sapien
cttgctgggtactcaaagccggact

SEQ ID NO: 4936500 - DNA, 25 bp, Homo sapien
ccccagatcgaggcgcaacaagtct

SEQ ID NO: 4936501 - DNA, 25 bp, Homo sapien
atcgaggcgcaacaagtctgaaagc

SEQ ID NO: 4936502 - DNA, 25 bp, Homo sapien
ccgcgcgcctctctggcgcatccct

SEQ ID NO: 4936503 - DNA, 25 bp, Homo sapien
tgggcttcgcggctcggccctcagc

SEQ ID NO: 4936504 - DNA, 25 bp, Homo sapien
ctcgggacaagtgcggagggtcggg

SEQ ID NO: 4936505 - DNA, 25 bp, Homo sapien
cgggcacgttggatctcgggacaag

SEQ ID NO: 4936506 - DNA, 25 bp, Homo sapien
tggaagggatccgagagcagagccc

SEQ ID NO: 4936507 - DNA, 25 bp, Homo sapien
atttcacggacgcggccaccgaggt

SEQ ID NO: 4936508 - DNA, 25 bp, Homo sapien
tgtggcctgcgtcttgtgcagtgca

SEQ ID NO: 4936509 - DNA, 25 bp, Homo sapien
ggtgtgctcgtgctgacccatgtcc

SEQ ID NO: 4936510 - DNA, 25 bp, Homo sapien
acacgcgtgcctgctctgggtgtct

SEQ ID NO: 4936511 - DNA, 25 bp, Homo sapien
gcccacaatgggacacaggttttcg

SEQ ID NO: 4936512 - DNA, 25 bp, Homo sapien
ccgcaacgccgtgtggactgtgcag

SEQ ID NO: 4936513 - DNA, 25 bp, Homo sapien
ttggtgagaaaacacggaagagtcc

SEQ ID NO: 4936514 - DNA, 25 bp, Homo sapien
ctggtgtccgcaacgccgtgtggac

SEQ ID NO: 4936515 - DNA, 25 bp, Homo sapien
gaaggggagcgcagcctcataagcc

SEQ ID NO: 4936516 - DNA, 25 bp, Homo sapien
cacctggaaactggtacagcctggc

SEQ ID NO: 4936517 - DNA, 25 bp, Homo sapien
ccgagttggtgtcagccccagatgc

SEQ ID NO: 4936518 - DNA, 25 bp, Homo sapien
catatgcccctccaagtgcaaagga

SEQ ID NO: 4936519 - DNA, 25 bp, Homo sapien
gcacggagtctagggcctcggtcat

SEQ ID NO: 4936520 - DNA, 25 bp, Homo sapien
tcttgacatgccagggtccggcggc

SEQ ID NO: 4936521 - DNA, 25 bp, Homo sapien
caggcgcggaccaggtcttgacatg

SEQ ID NO: 4936522 - DNA, 25 bp, Homo sapien
acagagagggcagcaacggcttcta

SEQ ID NO: 4936523 - DNA, 25 bp, Homo sapien
agagggccccgcttcaggtgacaga

SEQ ID NO: 4936524 - DNA, 25 bp, Homo sapien
ctgcaccagcgtggcgcacggctcg

SEQ ID NO: 4936525 - DNA, 25 bp, Homo sapien
tagcagcggggcgaggatccagacg

SEQ ID NO: 4936526 - DNA, 25 bp, Homo sapien
gcagtagcagcggggcgaggatcca

SEQ ID NO: 4936527 - DNA, 25 bp, Homo sapien
gcggggcgaggatccagacggggcc

SEQ ID NO: 4936528 - DNA, 25 bp, Homo sapien
ttcatgtagagagtgtagcgccgcg

SEQ ID NO: 4936529 - DNA, 25 bp, Homo sapien
actcgaggaaggagtcgaactggta

SEQ ID NO: 4936530 - DNA, 25 bp, Homo sapien
tctccacgcccaggtaggtgcgcgt

SEQ ID NO: 4936531 - DNA, 25 bp, Homo sapien
tccgggttgcgtagcgtccaggagc

SEQ ID NO: 4936532 - DNA, 25 bp, Homo sapien
tactccacggagaagtcgtcggtgg

SEQ ID NO: 4936533 - DNA, 25 bp, Homo sapien
aggtactccacggagaagtcgtcgg

SEQ ID NO: 4936534 - DNA, 25 bp, Homo sapien
caccaggtactccacggagaagtcg

SEQ ID NO: 4936535 - DNA, 25 bp, Homo sapien
gctgctggcgccgcatctgcaggaa

SEQ ID NO: 4936536 - DNA, 25 bp, Homo sapien
aggcgcagggggtctgcatgatccc

SEQ ID NO: 4936537 - DNA, 25 bp, Homo sapien
tcaagcagacatccccgcggggggc

SEQ ID NO: 4936538 - DNA, 25 bp, Homo sapien
tctcaagcagacatccccgcggggg

SEQ ID NO: 4936539 - DNA, 25 bp, Homo sapien
ccgcaggggtgcgagctgcgactac

SEQ ID NO: 4936540 - DNA, 25 bp, Homo sapien
cccgccccggtcctgggtcaggctg

SEQ ID NO: 4936541 - DNA, 25 bp, Homo sapien
tggcgccgtgcccgccccggtcctg

SEQ ID NO: 4936542 - DNA, 25 bp, Homo sapien
cgtgcccgccccggtcctgggtcag

SEQ ID NO: 4936543 - DNA, 25 bp, Homo sapien
ctgtggcgccgtgcccgccccggtc

SEQ ID NO: 4936544 - DNA, 25 bp, Homo sapien
ctgccggagagaaagggcgggccct

SEQ ID NO: 4936545 - DNA, 25 bp, Homo sapien
gccaggaggatgaccctttcccatc

SEQ ID NO: 4936546 - DNA, 25 bp, Homo sapien
agagaaagggcgggccctctcccag

SEQ ID NO: 4936547 - DNA, 25 bp, Homo sapien
cctctcccagccaggaggatgaccc

SEQ ID NO: 4936548 - DNA, 25 bp, Homo sapien
gcagcctctggcccattaaagttgt

SEQ ID NO: 4936549 - DNA, 25 bp, Homo sapien
cagcctctggcccattaaagttgtc

SEQ ID NO: 4936550 - DNA, 25 bp, Homo sapien
ccctgagacccatcaactggaggaa

SEQ ID NO: 4936551 - DNA, 25 bp, Homo sapien
gatgctgctaacgaccagctcttca

SEQ ID NO: 4936552 - DNA, 25 bp, Homo sapien
gctcttcagtagtgggtgtaatctt

SEQ ID NO: 4936553 - DNA, 25 bp, Homo sapien
cactattaggaatggcagagctgct

SEQ ID NO: 4936554 - DNA, 25 bp, Homo sapien
agagtctgacgcgtgacgtggccat

SEQ ID NO: 4936555 - DNA, 25 bp, Homo sapien
cctgaggagtgtttgcagagtctga

SEQ ID NO: 4936556 - DNA, 25 bp, Homo sapien
ccactcaccctaggcggaaaaatgc

SEQ ID NO: 4936557 - DNA, 25 bp, Homo sapien
ttgcctgctagggacatggacggat

SEQ ID NO: 4936558 - DNA, 25 bp, Homo sapien
gctgcctcctccatagcgtgcttag

SEQ ID NO: 4936559 - DNA, 25 bp, Homo sapien
ccatagcgtgcttagcccgtgccat

SEQ ID NO: 4936560 - DNA, 25 bp, Homo sapien
ctcctccatagcgtgcttagcccgt

SEQ ID NO: 4936561 - DNA, 25 bp, Homo sapien
ctccatagcgtgcttagcccgtgcc

SEQ ID NO: 4936562 - DNA, 25 bp, Homo sapien
tcctcgtgctgccaaaaacactttg

SEQ ID NO: 4936563 - DNA, 25 bp, Homo sapien
gggggtcctcgtgctgccaaaaaca

SEQ ID NO: 4936564 - DNA, 25 bp, Homo sapien
aacactttgggctgcttggagtgcc

SEQ ID NO: 4936565 - DNA, 25 bp, Homo sapien
tcgtgctgccaaaaacactttgggc

SEQ ID NO: 4936566 - DNA, 25 bp, Homo sapien
tgagcctgaagggtccccgtgtgcc

SEQ ID NO: 4936567 - DNA, 25 bp, Homo sapien
tctggagagctcaggtcacgtctga

SEQ ID NO: 4936568 - DNA, 25 bp, Homo sapien
caggtttgccgccaggatgatgaag

SEQ ID NO: 4936569 - DNA, 25 bp, Homo sapien
atgaagggatgacgacctccgccca

SEQ ID NO: 4936570 - DNA, 25 bp, Homo sapien
gcgcgggcaggcaggtgcgcgtccg

SEQ ID NO: 4936571 - DNA, 25 bp, Homo sapien
tcccgcgtgcattcgccccacaggg

SEQ ID NO: 4936572 - DNA, 25 bp, Homo sapien
gcaggtgcgcgtccgcgtctggagg

SEQ ID NO: 4936573 - DNA, 25 bp, Homo sapien
gcctcgcggttgcactggcgaccct

SEQ ID NO: 4936574 - DNA, 25 bp, Homo sapien
cgccgccgggcatctgtggaccgca

SEQ ID NO: 4936575 - DNA, 25 bp, Homo sapien
ctgtggaccgcagggactggctccg

SEQ ID NO: 4936576 - DNA, 25 bp, Homo sapien
tcctcgcgccgccgggcatctgtgg

SEQ ID NO: 4936577 - DNA, 25 bp, Homo sapien
ggcatctgtggaccgcagggactgg

SEQ ID NO: 4936578 - DNA, 25 bp, Homo sapien
gaggacacgcagaagcgcgtgcggg

SEQ ID NO: 4936579 - DNA, 25 bp, Homo sapien
agttgttgcacagccgctgctcgcg

SEQ ID NO: 4936580 - DNA, 25 bp, Homo sapien
ctgggcacacggcagagttgttgca

SEQ ID NO: 4936581 - DNA, 25 bp, Homo sapien
ggtctgccagccctcgccgcaggtg

SEQ ID NO: 4936582 - DNA, 25 bp, Homo sapien
atcccgaaagccacggccacaggtg

SEQ ID NO: 4936583 - DNA, 25 bp, Homo sapien
gggcctgcaggtgcgcgtgcgatcc

SEQ ID NO: 4936584 - DNA, 25 bp, Homo sapien
agggcgaccactcatcccaggcacc

SEQ ID NO: 4936585 - DNA, 25 bp, Homo sapien
tgcgcgtgcgatcccgaaagccacg

SEQ ID NO: 4936586 - DNA, 25 bp, Homo sapien
cacaaagtgggcgtgaacacccggc

SEQ ID NO: 4936587 - DNA, 25 bp, Homo sapien
gacacaaagtgggcgtgaacacccg

SEQ ID NO: 4936588 - DNA, 25 bp, Homo sapien
caaagtgggcgtgaacacccggcac

SEQ ID NO: 4936589 - DNA, 25 bp, Homo sapien
gagacacaaagtgggcgtgaacacc

SEQ ID NO: 4936590 - DNA, 25 bp, Homo sapien
tgcaggaagcagtctcgggtctcca

SEQ ID NO: 4936591 - DNA, 25 bp, Homo sapien
gtaggaaggcccgttgcattcacgc

SEQ ID NO: 4936592 - DNA, 25 bp, Homo sapien
tccagctcgaccactcattccagtt

SEQ ID NO: 4936593 - DNA, 25 bp, Homo sapien
gcattcacgcgtgcgctgctgtcgg

SEQ ID NO: 4936594 - DNA, 25 bp, Homo sapien
gacaggaggacacaaagacagggac

SEQ ID NO: 4936595 - DNA, 25 bp, Homo sapien
gcggcagtgaaacatagggacccag

SEQ ID NO: 4936596 - DNA, 25 bp, Homo sapien
acaggcgacaagaagggcagggtcc

SEQ ID NO: 4936597 - DNA, 25 bp, Homo sapien
gaaacatagggacccaggaatgtgg

SEQ ID NO: 4936598 - DNA, 25 bp, Homo sapien
agccccacacgtgacgctgcaactg

SEQ ID NO: 4936599 - DNA, 25 bp, Homo sapien
tgctcccccgaagaagggcccagag

SEQ ID NO: 4936600 - DNA, 25 bp, Homo sapien
agagcagacacgctcccgtcgctgg

SEQ ID NO: 4936601 - DNA, 25 bp, Homo sapien
tgggtgccgcactgccggtactcat

SEQ ID NO: 4936602 - DNA, 25 bp, Homo sapien
ctctggaaggtgcaaggcgcctgga

SEQ ID NO: 4936603 - DNA, 25 bp, Homo sapien
ctggagcaggcatcattatgaggac

SEQ ID NO: 4936604 - DNA, 25 bp, Homo sapien
caggcatcattatgaggacaggacg

SEQ ID NO: 4936605 - DNA, 25 bp, Homo sapien
ggcgcctggagcaggcatcattatg

SEQ ID NO: 4936606 - DNA, 25 bp, Homo sapien
cacctctcccgctggggtctccttc

SEQ ID NO: 4936607 - DNA, 25 bp, Homo sapien
cagcaccaaagttgtcctcatcaca

SEQ ID NO: 4936608 - DNA, 25 bp, Homo sapien
gtggcgttgcggggacaccggacag

SEQ ID NO: 4936609 - DNA, 25 bp, Homo sapien
ctgtggcgttgcggggacaccggac

SEQ ID NO: 4936610 - DNA, 25 bp, Homo sapien
tcagcatttgcaatctgctaccgag

SEQ ID NO: 4936611 - DNA, 25 bp, Homo sapien
tctgctaccgagaacatgccctgtt

SEQ ID NO: 4936612 - DNA, 25 bp, Homo sapien
tttgcaatctgctaccgagaacatg

SEQ ID NO: 4936613 - DNA, 25 bp, Homo sapien
aatctgctaccgagaacatgccctg

SEQ ID NO: 4936614 - DNA, 25 bp, Homo sapien
ggaatcccacccttggcccctggca

SEQ ID NO: 4936615 - DNA, 25 bp, Homo sapien
ggagaccatccccttctcaggtgga

SEQ ID NO: 4936616 - DNA, 25 bp, Homo sapien
cccccagaaacagggactcgcccat

SEQ ID NO: 4936617 - DNA, 25 bp, Homo sapien
gaccttctggaagggaccctgtggc

SEQ ID NO: 4936618 - DNA, 25 bp, Homo sapien
tcaatggaaacacagcggatgtagg

SEQ ID NO: 4936619 - DNA, 25 bp, Homo sapien
tggatgtttctgtagtcaatggaaa

SEQ ID NO: 4936620 - DNA, 25 bp, Homo sapien
agctcacaccgtcgcaggatgagtc

SEQ ID NO: 4936621 - DNA, 25 bp, Homo sapien
gggctcccagtaggcgatgccttcc

SEQ ID NO: 4936622 - DNA, 25 bp, Homo sapien
cctcaggacatcgatggtggacagc

SEQ ID NO: 4936623 - DNA, 25 bp, Homo sapien
ggctgtagtacgctctccggaaaat

SEQ ID NO: 4936624 - DNA, 25 bp, Homo sapien
tggtcccgtcctgagagatctccac

SEQ ID NO: 4936625 - DNA, 25 bp, Homo sapien
aggcagccctcgctgagccttggcc

SEQ ID NO: 4936626 - DNA, 25 bp, Homo sapien
acttgtcccgattctcctctgccaa

SEQ ID NO: 4936627 - DNA, 25 bp, Homo sapien
ggcctcctcccacttgtcccgattc

SEQ ID NO: 4936628 - DNA, 25 bp, Homo sapien
caacaggttgctaaggatctggaca

SEQ ID NO: 4936629 - DNA, 25 bp, Homo sapien
ctctgccaacaggttgctaaggatc

SEQ ID NO: 4936630 - DNA, 25 bp, Homo sapien
caccagccggaacagctccttggcg

SEQ ID NO: 4936631 - DNA, 25 bp, Homo sapien
ccagccggaacagctccttggcgtt

SEQ ID NO: 4936632 - DNA, 25 bp, Homo sapien
agtcctccaccagccggaacagctc

SEQ ID NO: 4936633 - DNA, 25 bp, Homo sapien
tccaccagccggaacagctccttgg

SEQ ID NO: 4936634 - DNA, 25 bp, Homo sapien
cctcaggtccttcatgcggaagccg

SEQ ID NO: 4936635 - DNA, 25 bp, Homo sapien
ccaggttgtctgtcacctggtatgc

SEQ ID NO: 4936636 - DNA, 25 bp, Homo sapien
cctggtatgcatccctcaggtcctt

SEQ ID NO: 4936637 - DNA, 25 bp, Homo sapien
caggtccttcatgcggaagccgatg

SEQ ID NO: 4936638 - DNA, 25 bp, Homo sapien
tggtttgcataaacagatgcgatgg

SEQ ID NO: 4936639 - DNA, 25 bp, Homo sapien
tgcataaacagatgcgatgggaagc

SEQ ID NO: 4936640 - DNA, 25 bp, Homo sapien
tctgacagtcgggagggattattcc

SEQ ID NO: 4936641 - DNA, 25 bp, Homo sapien
taaacagatgcgatgggaagccgct

SEQ ID NO: 4936642 - DNA, 25 bp, Homo sapien
catcagtagcgccaaatgcagtggg

SEQ ID NO: 4936643 - DNA, 25 bp, Homo sapien
ggaattcggactgggtcagcaccca

SEQ ID NO: 4936644 - DNA, 25 bp, Homo sapien
acagggttttgcaccatggatgtca

SEQ ID NO: 4936645 - DNA, 25 bp, Homo sapien
cacggatgcccgagaacagggtttt

SEQ ID NO: 4936646 - DNA, 25 bp, Homo sapien
ttggcccagtcacccgtggcccgcc

SEQ ID NO: 4936647 - DNA, 25 bp, Homo sapien
ccgccagcccttcatggggaagctg

SEQ ID NO: 4936648 - DNA, 25 bp, Homo sapien
caccttggcccagtcacccgtggcc

SEQ ID NO: 4936649 - DNA, 25 bp, Homo sapien
atgtcagtggctccgctggctggga

SEQ ID NO: 4936650 - DNA, 25 bp, Homo sapien
ccaggttcctgtagagcacggtgcc

SEQ ID NO: 4936651 - DNA, 25 bp, Homo sapien
accacaaacacggatgcttcatcgg

SEQ ID NO: 4936652 - DNA, 25 bp, Homo sapien
tgtagagcacggtgcccaccacaaa

SEQ ID NO: 4936653 - DNA, 25 bp, Homo sapien
acaaacacggatgcttcatcggcct

SEQ ID NO: 4936654 - DNA, 25 bp, Homo sapien
cttagaattcaggacggtcgtgttc

SEQ ID NO: 4936655 - DNA, 25 bp, Homo sapien
tgtgggcaaactcgatctccaaggg

SEQ ID NO: 4936656 - DNA, 25 bp, Homo sapien
caaactcgatctccaagggtgtgcg

SEQ ID NO: 4936657 - DNA, 25 bp, Homo sapien
ctcgatctccaagggtgtgcgcagg

SEQ ID NO: 4936658 - DNA, 25 bp, Homo sapien
tatacatgtgggcaaactcgatctc

SEQ ID NO: 4936659 - DNA, 25 bp, Homo sapien
atcccacaggatacaggtctggttg

SEQ ID NO: 4936660 - DNA, 25 bp, Homo sapien
cccacaggatacaggtctggttggt

SEQ ID NO: 4936661 - DNA, 25 bp, Homo sapien
acatccgtctcatcccacaggatac

SEQ ID NO: 4936662 - DNA, 25 bp, Homo sapien
gtctcatcccacaggatacaggtct

SEQ ID NO: 4936663 - DNA, 25 bp, Homo sapien
gctgccaggccagcgttcaggactg

SEQ ID NO: 4936664 - DNA, 25 bp, Homo sapien
ggacaccaggtgctcttagggctca

SEQ ID NO: 4936665 - DNA, 25 bp, Homo sapien
tgagcagacatcatgggcttgagtg

SEQ ID NO: 4936666 - DNA, 25 bp, Homo sapien
tttggttacggatctagttgctggg

SEQ ID NO: 4936667 - DNA, 25 bp, Homo sapien
tcccctacaccctccagggcagaag

SEQ ID NO: 4936668 - DNA, 25 bp, Homo sapien
ctgtgtccatcccctacaccctcca

SEQ ID NO: 4936669 - DNA, 25 bp, Homo sapien
acctgtgtccatcccctacaccctc

SEQ ID NO: 4936670 - DNA, 25 bp, Homo sapien
tgtccatcccctacaccctccaggg

SEQ ID NO: 4936671 - DNA, 25 bp, Homo sapien
aggctgttctgcgtccgcaacacag

SEQ ID NO: 4936672 - DNA, 25 bp, Homo sapien
acagaatagaatcctggacccaggc

SEQ ID NO: 4936673 - DNA, 25 bp, Homo sapien
ttctgcgtccgcaacacaggatggc

SEQ ID NO: 4936674 - DNA, 25 bp, Homo sapien
ggatggccgaaaagtcatagacctg

SEQ ID NO: 4936675 - DNA, 25 bp, Homo sapien
ccccactgtaccaacgggggctgag

SEQ ID NO: 4936676 - DNA, 25 bp, Homo sapien
cttccatccggtccccactgtacca

SEQ ID NO: 4936677 - DNA, 25 bp, Homo sapien
tccccactgtaccaacgggggctga

SEQ ID NO: 4936678 - DNA, 25 bp, Homo sapien
catccggtccccactgtaccaacgg

SEQ ID NO: 4936679 - DNA, 25 bp, Homo sapien
gcaccgtgcggcagccgcgccacga

SEQ ID NO: 4936680 - DNA, 25 bp, Homo sapien
ccggagggcgtcgaggggcaccgtg

SEQ ID NO: 4936681 - DNA, 25 bp, Homo sapien
agccgcgccacgaccagggcccgag

SEQ ID NO: 4936682 - DNA, 25 bp, Homo sapien
cgctgagctgggctaagatggcgaa

SEQ ID NO: 4936683 - DNA, 25 bp, Homo sapien
atgccgtctccatagaaaccggcag

SEQ ID NO: 4936684 - DNA, 25 bp, Homo sapien
agcggctgaccccagatgccgtctc

SEQ ID NO: 4936685 - DNA, 25 bp, Homo sapien
tgccgtctccatagaaaccggcagc

SEQ ID NO: 4936686 - DNA, 25 bp, Homo sapien
ggctgaccccagatgccgtctccat

SEQ ID NO: 4936687 - DNA, 25 bp, Homo sapien
cttccagggagcctccgagatggcc

SEQ ID NO: 4936688 - DNA, 25 bp, Homo sapien
actttaccagcgcagagctgaggtc

SEQ ID NO: 4936689 - DNA, 25 bp, Homo sapien
cggtaactttaccagcgcagagctg

SEQ ID NO: 4936690 - DNA, 25 bp, Homo sapien
ctggctcatcagtcaccggtaactt

SEQ ID NO: 4936691 - DNA, 25 bp, Homo sapien
tcagtcaccggtaactttaccagcg

SEQ ID NO: 4936692 - DNA, 25 bp, Homo sapien
acagtcatatgccaagcccgatgcc

SEQ ID NO: 4936693 - DNA, 25 bp, Homo sapien
agcccgatgccagataagtctttgc

SEQ ID NO: 4936694 - DNA, 25 bp, Homo sapien
ggaaccccgtcaattccaggcaggc

SEQ ID NO: 4936695 - DNA, 25 bp, Homo sapien
ggttgggccctttgcctgtgcccca

SEQ ID NO: 4936696 - DNA, 25 bp, Homo sapien
acggacacgtagatgatgaccagca

SEQ ID NO: 4936697 - DNA, 25 bp, Homo sapien
ctccacacggacacgtagatgatga

SEQ ID NO: 4936698 - DNA, 25 bp, Homo sapien
ccacgatgagcgtcaccgacggcag

SEQ ID NO: 4936699 - DNA, 25 bp, Homo sapien
cgacggcagagtcgccttctccatg

SEQ ID NO: 4936700 - DNA, 25 bp, Homo sapien
aaactgtcggcagaaaacttcctca

SEQ ID NO: 4936701 - DNA, 25 bp, Homo sapien
agctgagttcagagcccctgaaccc

SEQ ID NO: 4936702 - DNA, 25 bp, Homo sapien
tcagaactcaggacatcagagctga

SEQ ID NO: 4936703 - DNA, 25 bp, Homo sapien
tgctttgaaaactgtcggcagaaaa

SEQ ID NO: 4936704 - DNA, 25 bp, Homo sapien
gatgacagaacgctctgagcgaatg

SEQ ID NO: 4936705 - DNA, 25 bp, Homo sapien
tgaggatgacagaacgctctgagcg

SEQ ID NO: 4936706 - DNA, 25 bp, Homo sapien
gacagaacgctctgagcgaatgtac

SEQ ID NO: 4936707 - DNA, 25 bp, Homo sapien
gttgatgaggatgacagaacgctct

SEQ ID NO: 4936708 - DNA, 25 bp, Homo sapien
cttgttgcgggtctgggtctgcccg

SEQ ID NO: 4936709 - DNA, 25 bp, Homo sapien
tgttgcgggtctgggtctgcccgat

SEQ ID NO: 4936710 - DNA, 25 bp, Homo sapien
ttgcgggtctgggtctgcccgatga

SEQ ID NO: 4936711 - DNA, 25 bp, Homo sapien
cgggtctgggtctgcccgatgagga

SEQ ID NO: 4936712 - DNA, 25 bp, Homo sapien
ccgtcaccgccatgtaggactgcca

SEQ ID NO: 4936713 - DNA, 25 bp, Homo sapien
gtcaccgccatgtaggactgccagg

SEQ ID NO: 4936714 - DNA, 25 bp, Homo sapien
tcaccgccatgtaggactgccaggc

SEQ ID NO: 4936715 - DNA, 25 bp, Homo sapien
tgcggatgaggcggttccggaggtg

SEQ ID NO: 4936716 - DNA, 25 bp, Homo sapien
tagttcatggtgctgtaccctttgg

SEQ ID NO: 4936717 - DNA, 25 bp, Homo sapien
cttggtgaatcccacagaaatggcc

SEQ ID NO: 4936718 - DNA, 25 bp, Homo sapien
agaaatggccacaaccagtgcaggg

SEQ ID NO: 4936719 - DNA, 25 bp, Homo sapien
tggtgctgtaccctttggccttggt

SEQ ID NO: 4936720 - DNA, 25 bp, Homo sapien
acgaaggcatagagcagtcccccct

SEQ ID NO: 4936721 - DNA, 25 bp, Homo sapien
gtcccacgaaggcatagagcagtcc

SEQ ID NO: 4936722 - DNA, 25 bp, Homo sapien
gcaggtcccacgaaggcatagagca

SEQ ID NO: 4936723 - DNA, 25 bp, Homo sapien
gcagcggcaggtcccacgaaggcat

SEQ ID NO: 4936724 - DNA, 25 bp, Homo sapien
gtggtagaccgtgtagccctccagc

SEQ ID NO: 4936725 - DNA, 25 bp, Homo sapien
caggcatttcacgtccagaagacca

SEQ ID NO: 4936726 - DNA, 25 bp, Homo sapien
tgctttccacaatggatgcagagtt

SEQ ID NO: 4936727 - DNA, 25 bp, Homo sapien
caatggatgcagagttcccagacac

SEQ ID NO: 4936728 - DNA, 25 bp, Homo sapien
tcttgtccgtgatgccgtctttgga

SEQ ID NO: 4936729 - DNA, 25 bp, Homo sapien
agcttcttgtccgtgatgccgtctt

SEQ ID NO: 4936730 - DNA, 25 bp, Homo sapien
gatgccgtctttggacacgagcttg

SEQ ID NO: 4936731 - DNA, 25 bp, Homo sapien
tggacacgagcttgttgaacaccag

SEQ ID NO: 4936732 - DNA, 25 bp, Homo sapien
ggcgtcggaggtggcatcggcggca

SEQ ID NO: 4936733 - DNA, 25 bp, Homo sapien
cggaggtggcatcggcggcagagag

SEQ ID NO: 4936734 - DNA, 25 bp, Homo sapien
tcggcacacttgagggcgcgcccga

SEQ ID NO: 4936735 - DNA, 25 bp, Homo sapien
atggcgttactggtggcgtcggagg

SEQ ID NO: 4936736 - DNA, 25 bp, Homo sapien
agcacagccgacatccaggtcagcg

SEQ ID NO: 4936737 - DNA, 25 bp, Homo sapien
ctctctacggaggatacagtgcacc

SEQ ID NO: 4936738 - DNA, 25 bp, Homo sapien
tccagcgagtcgaagacagcgaaga

SEQ ID NO: 4936739 - DNA, 25 bp, Homo sapien
tcggtgacggcgagcacagccgaca

SEQ ID NO: 4936740 - DNA, 25 bp, Homo sapien
tggatgctgcgcctacccacaatct

SEQ ID NO: 4936741 - DNA, 25 bp, Homo sapien
gggtcatggatgctgcgcctaccca

SEQ ID NO: 4936742 - DNA, 25 bp, Homo sapien
tctgtggaccaccgaggcctgcaga

SEQ ID NO: 4936743 - DNA, 25 bp, Homo sapien
atgtgtcagggtcatggatgctgcg

SEQ ID NO: 4936744 - DNA, 25 bp, Homo sapien
gccagcgccagatcagatgagcagc

SEQ ID NO: 4936745 - DNA, 25 bp, Homo sapien
gccacgcccccaccctgcgccagcg

SEQ ID NO: 4936746 - DNA, 25 bp, Homo sapien
cgccagcgccagatcagatgagcag

SEQ ID NO: 4936747 - DNA, 25 bp, Homo sapien
ctgcgccagcgccagatcagatgag

SEQ ID NO: 4936748 - DNA, 25 bp, Homo sapien
tcaaccacacggcatttcacagcgt

SEQ ID NO: 4936749 - DNA, 25 bp, Homo sapien
tgccggtcaaccacacggcatttca

SEQ ID NO: 4936750 - DNA, 25 bp, Homo sapien
cacggcatttcacagcgtcctggac

SEQ ID NO: 4936751 - DNA, 25 bp, Homo sapien
tgagctgggcgtggccgttctggaa

SEQ ID NO: 4936752 - DNA, 25 bp, Homo sapien
aggacctgtgcgtgtcgtgggaacg

SEQ ID NO: 4936753 - DNA, 25 bp, Homo sapien
acctgtgcgtgtcgtgggaacgctg

SEQ ID NO: 4936754 - DNA, 25 bp, Homo sapien
gacctgtgcgtgtcgtgggaacgct

SEQ ID NO: 4936755 - DNA, 25 bp, Homo sapien
ctgtgcgtgtcgtgggaacgctgtg

SEQ ID NO: 4936756 - DNA, 25 bp, Homo sapien
ccagaaaggtggcaccatggggcaa

SEQ ID NO: 4936757 - DNA, 25 bp, Homo sapien
gggacccacgggagtgcgcagggtg

SEQ ID NO: 4936758 - DNA, 25 bp, Homo sapien
gggcgtggcctgagcccagaaaggt

SEQ ID NO: 4936759 - DNA, 25 bp, Homo sapien
cagccgtgcagagttcaccaggggc

SEQ ID NO: 4936760 - DNA, 25 bp, Homo sapien
gatctacaggccagatccacgtcct

SEQ ID NO: 4936761 - DNA, 25 bp, Homo sapien
aggccagatccacgtccttctcgaa

SEQ ID NO: 4936762 - DNA, 25 bp, Homo sapien
gatccacgtccttctcgaagtcggt

SEQ ID NO: 4936763 - DNA, 25 bp, Homo sapien
tgatctacaggccagatccacgtcc

SEQ ID NO: 4936764 - DNA, 25 bp, Homo sapien
gaagcttctgatcatgccccatgga

SEQ ID NO: 4936765 - DNA, 25 bp, Homo sapien
atggaccctccttcggcctcaggaa

SEQ ID NO: 4936766 - DNA, 25 bp, Homo sapien
tgcacttggttccaggaagctcagc

SEQ ID NO: 4936767 - DNA, 25 bp, Homo sapien
gcttcctttattgggcagtcgttcg

SEQ ID NO: 4936768 - DNA, 25 bp, Homo sapien
ccgtgatggtggcagtgcggcaggc

SEQ ID NO: 4936769 - DNA, 25 bp, Homo sapien
ctgttgaaattggtgggcggcccct

SEQ ID NO: 4936770 - DNA, 25 bp, Homo sapien
cggcaggccgcgatgtccttgttca

SEQ ID NO: 4936771 - DNA, 25 bp, Homo sapien
cggccgcttcagtgtgcccgtgatg

SEQ ID NO: 4936772 - DNA, 25 bp, Homo sapien
gaggacttgggcgccttgtccctct

SEQ ID NO: 4936773 - DNA, 25 bp, Homo sapien
gatcacgtagctcgtgtccagagcc

SEQ ID NO: 4936774 - DNA, 25 bp, Homo sapien
atcacgtagctcgtgtccagagcct

SEQ ID NO: 4936775 - DNA, 25 bp, Homo sapien
tggccgtgggcaggatcacgtagct

SEQ ID NO: 4936776 - DNA, 25 bp, Homo sapien
gtctgcggcatctggtcaatgtgga

SEQ ID NO: 4936777 - DNA, 25 bp, Homo sapien
ggtgccggctccagattgggcggtg

SEQ ID NO: 4936778 - DNA, 25 bp, Homo sapien
cggcatctggtcaatgtggatgctg

SEQ ID NO: 4936779 - DNA, 25 bp, Homo sapien
tgcggcatctggtcaatgtggatgc

SEQ ID NO: 4936780 - DNA, 25 bp, Homo sapien
ctgggtcccggatgggcggcaggct

SEQ ID NO: 4936781 - DNA, 25 bp, Homo sapien
ggtggcgacattctcgttcttggtg

SEQ ID NO: 4936782 - DNA, 25 bp, Homo sapien
ggagctcacagacaaggtggcgaca

SEQ ID NO: 4936783 - DNA, 25 bp, Homo sapien
cacagacaaggtggcgacattctcg

SEQ ID NO: 4936784 - DNA, 25 bp, Homo sapien
ctccccaggatcaaggagacctgaa

SEQ ID NO: 4936785 - DNA, 25 bp, Homo sapien
actccccaggatcaaggagacctga

SEQ ID NO: 4936786 - DNA, 25 bp, Homo sapien
caaagtccagttctgcataccgcga

SEQ ID NO: 4936787 - DNA, 25 bp, Homo sapien
gtccagttctgcataccgcgacttc

SEQ ID NO: 4936788 - DNA, 25 bp, Homo sapien
ctcaaagtccagttctgcataccgc

SEQ ID NO: 4936789 - DNA, 25 bp, Homo sapien
aaagtccagttctgcataccgcgac

SEQ ID NO: 4936790 - DNA, 25 bp, Homo sapien
gccaggaggagggcatggcccatcc

SEQ ID NO: 4936791 - DNA, 25 bp, Homo sapien
gaggagggcatggcccatcctgcct

SEQ ID NO: 4936792 - DNA, 25 bp, Homo sapien
tcctgcctgccccgcccgtcccctg

SEQ ID NO: 4936793 - DNA, 25 bp, Homo sapien
ctgcctgccccgcccgtcccctggc

SEQ ID NO: 4936794 - DNA, 25 bp, Homo sapien
gcaggcggggtctgggcagtgagtc

SEQ ID NO: 4936795 - DNA, 25 bp, Homo sapien
ctgcaggcggggtctgggcagtgag

SEQ ID NO: 4936796 - DNA, 25 bp, Homo sapien
tgcaggcggggtctgggcagtgagt

SEQ ID NO: 4936797 - DNA, 25 bp, Homo sapien
ttgtccttctccgctgcgtgctgca

SEQ ID NO: 4936798 - DNA, 25 bp, Homo sapien
tgcagcttccggttcaggtcctgga

SEQ ID NO: 4936799 - DNA, 25 bp, Homo sapien
tccggttcaggtcctggaacatgtc

SEQ ID NO: 4936800 - DNA, 25 bp, Homo sapien
gttcaggtcctggaacatgtcttgg

SEQ ID NO: 4936801 - DNA, 25 bp, Homo sapien
cttcacccacgtgggcgtcccgtgg

SEQ ID NO: 4936802 - DNA, 25 bp, Homo sapien
tctcccactccacgctgcgaagctc

SEQ ID NO: 4936803 - DNA, 25 bp, Homo sapien
agcgggatcgtggcgcccgacctct

SEQ ID NO: 4936804 - DNA, 25 bp, Homo sapien
ctgcgaagctccagcggcgacggct

SEQ ID NO: 4936805 - DNA, 25 bp, Homo sapien
gggccgcctcctgtcctgcatctgg

SEQ ID NO: 4936806 - DNA, 25 bp, Homo sapien
ctgaggcaccttcggcctctggtgc

SEQ ID NO: 4936807 - DNA, 25 bp, Homo sapien
ggagcagcatccctcctccgtggcc

SEQ ID NO: 4936808 - DNA, 25 bp, Homo sapien
tgcccgcgagcgtgtctgtgcccgt

SEQ ID NO: 4936809 - DNA, 25 bp, Homo sapien
cacgtgaccatctgtgatcacccat

SEQ ID NO: 4936810 - DNA, 25 bp, Homo sapien
gccacacgtgaccatctgtgatcac

SEQ ID NO: 4936811 - DNA, 25 bp, Homo sapien
cacacgtgaccatctgtgatcaccc

SEQ ID NO: 4936812 - DNA, 25 bp, Homo sapien
ggccacacgtgaccatctgtgatca

SEQ ID NO: 4936813 - DNA, 25 bp, Homo sapien
ggtcatctgctcaacgtccacccac

SEQ ID NO: 4936814 - DNA, 25 bp, Homo sapien
tcaacgtccacccactcaatgcagt

SEQ ID NO: 4936815 - DNA, 25 bp, Homo sapien
gttcccggtcatctgctcaacgtcc

SEQ ID NO: 4936816 - DNA, 25 bp, Homo sapien
accccgttcccggtcatctgctcaa

SEQ ID NO: 4936817 - DNA, 25 bp, Homo sapien
tgtggtgggcttctgcatatcgtgg

SEQ ID NO: 4936818 - DNA, 25 bp, Homo sapien
gtggtgggcttctgcatatcgtggg

SEQ ID NO: 4936819 - DNA, 25 bp, Homo sapien
tggtgggcttctgcatatcgtgggc

SEQ ID NO: 4936820 - DNA, 25 bp, Homo sapien
tctcctgcatgtcgtgggcttctcc

SEQ ID NO: 4936821 - DNA, 25 bp, Homo sapien
tcacgttgctgctgcgtatcgtggg

SEQ ID NO: 4936822 - DNA, 25 bp, Homo sapien
cacgttgctgctgcgtatcgtgggc

SEQ ID NO: 4936823 - DNA, 25 bp, Homo sapien
tagaggtcaaaggaggccatgtttc

SEQ ID NO: 4936824 - DNA, 25 bp, Homo sapien
ctgtttagcaagttggcatggggcc

SEQ ID NO: 4936825 - DNA, 25 bp, Homo sapien
ttcctacgctgagccatcttgctga

SEQ ID NO: 4936826 - DNA, 25 bp, Homo sapien
ctgggcgccgagaaccacattttta

SEQ ID NO: 4936827 - DNA, 25 bp, Homo sapien
gaagttccggaaggagctgtttagc

SEQ ID NO: 4936828 - DNA, 25 bp, Homo sapien
gcaccagcagactgtgcggccaggg

SEQ ID NO: 4936829 - DNA, 25 bp, Homo sapien
ggcaccagcagactgtgcggccagg

SEQ ID NO: 4936830 - DNA, 25 bp, Homo sapien
tgagtgacacgtccctctgttccct

SEQ ID NO: 4936831 - DNA, 25 bp, Homo sapien
ctcatggtggcagcgcccggcaatg

SEQ ID NO: 4936832 - DNA, 25 bp, Homo sapien
ggtccctcggagtcgagctctggcc

SEQ ID NO: 4936833 - DNA, 25 bp, Homo sapien
gtggcgaggagaccgggtgaggact

SEQ ID NO: 4936834 - DNA, 25 bp, Homo sapien
agggcagaagcgagcatgtttaacc

SEQ ID NO: 4936835 - DNA, 25 bp, Homo sapien
cgggaagtttgtgccgaggttccat

SEQ ID NO: 4936836 - DNA, 25 bp, Homo sapien
tcttcggttagcctgtgtgtcagga

SEQ ID NO: 4936837 - DNA, 25 bp, Homo sapien
ctttcttcgcaggtgcttcttcggt

SEQ ID NO: 4936838 - DNA, 25 bp, Homo sapien
gttctaagatccctcagggcacctg

SEQ ID NO: 4936839 - DNA, 25 bp, Homo sapien
gcctggtccagttctaagatccctc

SEQ ID NO: 4936840 - DNA, 25 bp, Homo sapien
tgcagctgagaaccaaacctcacct

SEQ ID NO: 4936841 - DNA, 25 bp, Homo sapien
tgagaaccaaacctcacctcgggaa

SEQ ID NO: 4936842 - DNA, 25 bp, Homo sapien
ttactgctaagtttcctgacatggc

SEQ ID NO: 4936843 - DNA, 25 bp, Homo sapien
atgcctgggccgtcagtcatgagcc

SEQ ID NO: 4936844 - DNA, 25 bp, Homo sapien
taaagaagactcagggtgaccccat

SEQ ID NO: 4936845 - DNA, 25 bp, Homo sapien
tgggtttagccacgccctagctgtc

SEQ ID NO: 4936846 - DNA, 25 bp, Homo sapien
gcctcgtcttgtggagtctggatct

SEQ ID NO: 4936847 - DNA, 25 bp, Homo sapien
tgtgctcagcctcgtcttgtggagt

SEQ ID NO: 4936848 - DNA, 25 bp, Homo sapien
agtctggatctccacgtactccacg

SEQ ID NO: 4936849 - DNA, 25 bp, Homo sapien
ggagtctggatctccacgtactcca

SEQ ID NO: 4936850 - DNA, 25 bp, Homo sapien
gctgcgacccctcacgctgtctccc

SEQ ID NO: 4936851 - DNA, 25 bp, Homo sapien
gagtttgatggcgccgctgcgaccc

SEQ ID NO: 4936852 - DNA, 25 bp, Homo sapien
cacgctgtctcccagcgggggccac

SEQ ID NO: 4936853 - DNA, 25 bp, Homo sapien
acgcagaggccaccgtgactgctga

SEQ ID NO: 4936854 - DNA, 25 bp, Homo sapien
tgacagcaggctggtactgcggtcc

SEQ ID NO: 4936855 - DNA, 25 bp, Homo sapien
caggctggtactgcggtccattctc

SEQ ID NO: 4936856 - DNA, 25 bp, Homo sapien
tactgcggtccattctcagggtggg

SEQ ID NO: 4936857 - DNA, 25 bp, Homo sapien
gctggtactgcggtccattctcagg

SEQ ID NO: 4936858 - DNA, 25 bp, Homo sapien
gcagcgggaacacaggagtcccatc

SEQ ID NO: 4936859 - DNA, 25 bp, Homo sapien
agcgggaacacaggagtcccatctt

SEQ ID NO: 4936860 - DNA, 25 bp, Homo sapien
cagcgggaacacaggagtcccatct

SEQ ID NO: 4936861 - DNA, 25 bp, Homo sapien
tgcagcgggaacacaggagtcccat

SEQ ID NO: 4936862 - DNA, 25 bp, Homo sapien
ctgtggtcatcacccgagtaggggt

SEQ ID NO: 4936863 - DNA, 25 bp, Homo sapien
gtggtcatcacccgagtaggggtct

SEQ ID NO: 4936864 - DNA, 25 bp, Homo sapien
cactgtggtcatcacccgagtaggg

SEQ ID NO: 4936865 - DNA, 25 bp, Homo sapien
ccactgtggtcatcacccgagtagg

SEQ ID NO: 4936866 - DNA, 25 bp, Homo sapien
cacttccgcgcgcttatggcatttt

SEQ ID NO: 4936867 - DNA, 25 bp, Homo sapien
cttccgcgcgcttatggcatttttg

SEQ ID NO: 4936868 - DNA, 25 bp, Homo sapien
cctggaggaacacttccgcgcgctt

SEQ ID NO: 4936869 - DNA, 25 bp, Homo sapien
ggaggaacacttccgcgcgcttatg

SEQ ID NO: 4936870 - DNA, 25 bp, Homo sapien
tcggaggacttgcccaccgcagagg

SEQ ID NO: 4936871 - DNA, 25 bp, Homo sapien
ggggcttagcctcggaggacttgcc

SEQ ID NO: 4936872 - DNA, 25 bp, Homo sapien
gcccaccgcagaggggctcagcggg

SEQ ID NO: 4936873 - DNA, 25 bp, Homo sapien
accagctgaaggattccacgtcttc

SEQ ID NO: 4936874 - DNA, 25 bp, Homo sapien
agctgaaggattccacgtcttctgg

SEQ ID NO: 4936875 - DNA, 25 bp, Homo sapien
gattccacgtcttctggccaaacag

SEQ ID NO: 4936876 - DNA, 25 bp, Homo sapien
gaaggattccacgtcttctggccaa

SEQ ID NO: 4936877 - DNA, 25 bp, Homo sapien
ggtgcaggggtagccaagagcagaa

SEQ ID NO: 4936878 - DNA, 25 bp, Homo sapien
aaggtgcaggggtagccaagagcag

SEQ ID NO: 4936879 - DNA, 25 bp, Homo sapien
caaaggtgcaggggtagccaagagc

SEQ ID NO: 4936880 - DNA, 25 bp, Homo sapien
aaaggtgcaggggtagccaagagca

SEQ ID NO: 4936881 - DNA, 25 bp, Homo sapien
tcacgtcccagctggtgagtgcaac

SEQ ID NO: 4936882 - DNA, 25 bp, Homo sapien
gtgcaacccggtcctggtgccagca

SEQ ID NO: 4936883 - DNA, 25 bp, Homo sapien
cttaaggccaccttcaccctcacgt

SEQ ID NO: 4936884 - DNA, 25 bp, Homo sapien
ctggtgagtgcaacccggtcctggt

SEQ ID NO: 4936885 - DNA, 25 bp, Homo sapien
tgcccaggggtccataggggacttc

SEQ ID NO: 4936886 - DNA, 25 bp, Homo sapien
tcattagaggaccttcgttcagggt

SEQ ID NO: 4936887 - DNA, 25 bp, Homo sapien
tcctggacaccggacactggctctg

SEQ ID NO: 4936888 - DNA, 25 bp, Homo sapien
gacaccggacactggctctgttgga

SEQ ID NO: 4936889 - DNA, 25 bp, Homo sapien
ctgtgccggattccccagcgtccct

SEQ ID NO: 4936890 - DNA, 25 bp, Homo sapien
gccggattccccagcgtccctgcat

SEQ ID NO: 4936891 - DNA, 25 bp, Homo sapien
cctgctctgtgccggattccccagc

SEQ ID NO: 4936892 - DNA, 25 bp, Homo sapien
tgctctgtgccggattccccagcgt

SEQ ID NO: 4936893 - DNA, 25 bp, Homo sapien
gactgcaggattcgtggagagggag

SEQ ID NO: 4936894 - DNA, 25 bp, Homo sapien
gtgctgccaggcgaccgccgctgga

SEQ ID NO: 4936895 - DNA, 25 bp, Homo sapien
agggtgactgcaggattcgtggaga

SEQ ID NO: 4936896 - DNA, 25 bp, Homo sapien
gagggaggtgcgtcagagagggtgt

SEQ ID NO: 4936897 - DNA, 25 bp, Homo sapien
acttgcttcacagctgggcgtgtat

SEQ ID NO: 4936898 - DNA, 25 bp, Homo sapien
agctgggcgtgtatcctcggtctcc

SEQ ID NO: 4936899 - DNA, 25 bp, Homo sapien
ccaggaagccccactgatgcttgct

SEQ ID NO: 4936900 - DNA, 25 bp, Homo sapien
agtcagccctggacacgtcacttgc

SEQ ID NO: 4936901 - DNA, 25 bp, Homo sapien
gagctgcaaccctgtacgcagcctt

SEQ ID NO: 4936902 - DNA, 25 bp, Homo sapien
agagcagggtccgtccggccgctgt

SEQ ID NO: 4936903 - DNA, 25 bp, Homo sapien
cagccttggcctgcggccagttaca

SEQ ID NO: 4936904 - DNA, 25 bp, Homo sapien
ccagttatagggtgctgcgggatgc

SEQ ID NO: 4936905 - DNA, 25 bp, Homo sapien
tctgcagcctaagcaggtgctggct

SEQ ID NO: 4936906 - DNA, 25 bp, Homo sapien
ctacagagaggagtcggctgcagca

SEQ ID NO: 4936907 - DNA, 25 bp, Homo sapien
ttaaatgtcggtccaggccctgtgc

SEQ ID NO: 4936908 - DNA, 25 bp, Homo sapien
gctggctcagggttcatcgttctgc

SEQ ID NO: 4936909 - DNA, 25 bp, Homo sapien
ccagagcgaggtggctgcgtctccc

SEQ ID NO: 4936910 - DNA, 25 bp, Homo sapien
cctgcactcccctttcgctcgtggt

SEQ ID NO: 4936911 - DNA, 25 bp, Homo sapien
actcccctttcgctcgtggttctca

SEQ ID NO: 4936912 - DNA, 25 bp, Homo sapien
cccctttcgctcgtggttctcaggg

SEQ ID NO: 4936913 - DNA, 25 bp, Homo sapien
gcctctgaggggaggccccccgaca

SEQ ID NO: 4936914 - DNA, 25 bp, Homo sapien
ctctgaggggaggccccccgacaag

SEQ ID NO: 4936915 - DNA, 25 bp, Homo sapien
cactgcctcactggctatgagtgtg

SEQ ID NO: 4936916 - DNA, 25 bp, Homo sapien
tcagagaagagggatcctgggcttc

SEQ ID NO: 4936917 - DNA, 25 bp, Homo sapien
tgcctcactggctatgagtgtgggt

SEQ ID NO: 4936918 - DNA, 25 bp, Homo sapien
ggatcctgggcttcaccggatgaac

SEQ ID NO: 4936919 - DNA, 25 bp, Homo sapien
agtaccacagcctcgcctgcagggc

SEQ ID NO: 4936920 - DNA, 25 bp, Homo sapien
cagtaccacagcctcgcctgcaggg

SEQ ID NO: 4936921 - DNA, 25 bp, Homo sapien
tcctctggcatcacaattctgcctc

SEQ ID NO: 4936922 - DNA, 25 bp, Homo sapien
cctctggcatcacaattctgcctca

SEQ ID NO: 4936923 - DNA, 25 bp, Homo sapien
ctctggcatcacaattctgcctcac

SEQ ID NO: 4936924 - DNA, 25 bp, Homo sapien
caggtgccccgacccagaaagcagg

SEQ ID NO: 4936925 - DNA, 25 bp, Homo sapien
tcctgtgttttctctcggggagcaa

SEQ ID NO: 4936926 - DNA, 25 bp, Homo sapien
tctctcggggagcaaacagtgccct

SEQ ID NO: 4936927 - DNA, 25 bp, Homo sapien
aggttcctccgggatcagcccagaa

SEQ ID NO: 4936928 - DNA, 25 bp, Homo sapien
cacagtaggttggagctcagggatc

SEQ ID NO: 4936929 - DNA, 25 bp, Homo sapien
ccaaagagcagactggagctccgga

SEQ ID NO: 4936930 - DNA, 25 bp, Homo sapien
ccggccaaagagcagactggagctc

SEQ ID NO: 4936931 - DNA, 25 bp, Homo sapien
tcgccacaggcctccaactccggat

SEQ ID NO: 4936932 - DNA, 25 bp, Homo sapien
cctgcctgagaaatttcatgccccc

SEQ ID NO: 4936933 - DNA, 25 bp, Homo sapien
ctgcctgagaaatttcatgccccca

SEQ ID NO: 4936934 - DNA, 25 bp, Homo sapien
tggcctgcgtcatgcctcgatagct

SEQ ID NO: 4936935 - DNA, 25 bp, Homo sapien
gagtcagtggcctgcgtcatgcctc

SEQ ID NO: 4936936 - DNA, 25 bp, Homo sapien
cagcctggcgtggtgagtcagtggc

SEQ ID NO: 4936937 - DNA, 25 bp, Homo sapien
gcgtcatgcctcgatagctgccgca

SEQ ID NO: 4936938 - DNA, 25 bp, Homo sapien
ggacgtcctcccactgttgttggca

SEQ ID NO: 4936939 - DNA, 25 bp, Homo sapien
tgctgacgtacagccccaagctcaa

SEQ ID NO: 4936940 - DNA, 25 bp, Homo sapien
tcccactgttgttggcacgtcaggg

SEQ ID NO: 4936941 - DNA, 25 bp, Homo sapien
gggctctgtgctgctctatgctgac

SEQ ID NO: 4936942 - DNA, 25 bp, Homo sapien
gggtcccgtgttcgctctcctggga

SEQ ID NO: 4936943 - DNA, 25 bp, Homo sapien
tcctgggaacccattgtagaggtgg

SEQ ID NO: 4936944 - DNA, 25 bp, Homo sapien
tgggttcagggcctttcggtcacga

SEQ ID NO: 4936945 - DNA, 25 bp, Homo sapien
gttcggcctcctaactcactcatgg

SEQ ID NO: 4936946 - DNA, 25 bp, Homo sapien
tcaggctcacttccatcatgagctg

SEQ ID NO: 4936947 - DNA, 25 bp, Homo sapien
atgaggtctctcataaacctctctc

SEQ ID NO: 4936948 - DNA, 25 bp, Homo sapien
gctctcaccgtaccttgctgttgaa

SEQ ID NO: 4936949 - DNA, 25 bp, Homo sapien
ctcttcagtgacagggttcactgca

SEQ ID NO: 4936950 - DNA, 25 bp, Homo sapien
gatgccatgccgtccttacagccat

SEQ ID NO: 4936951 - DNA, 25 bp, Homo sapien
tggatgccatgccgtccttacagcc

SEQ ID NO: 4936952 - DNA, 25 bp, Homo sapien
ggcctggatgccatgccgtccttac

SEQ ID NO: 4936953 - DNA, 25 bp, Homo sapien
cctggatgccatgccgtccttacag

SEQ ID NO: 4936954 - DNA, 25 bp, Homo sapien
gccaaagcccggatcttgcccatgt

SEQ ID NO: 4936955 - DNA, 25 bp, Homo sapien
agcccggatcttgcccatgtggtgc

SEQ ID NO: 4936956 - DNA, 25 bp, Homo sapien
aaagcccggatcttgcccatgtggt

SEQ ID NO: 4936957 - DNA, 25 bp, Homo sapien
caaagcccggatcttgcccatgtgg

SEQ ID NO: 4936958 - DNA, 25 bp, Homo sapien
cctaactgtacaggaataaaacatc

SEQ ID NO: 4936959 - DNA, 25 bp, Homo sapien
taaaacatcctagccatgaaagacc

SEQ ID NO: 4936960 - DNA, 25 bp, Homo sapien
acatcctagccatgaaagaccagac

SEQ ID NO: 4936961 - DNA, 25 bp, Homo sapien
taataattccggacctaactgtaca

SEQ ID NO: 4936962 - DNA, 25 bp, Homo sapien
ttggtttgataccaatcagcagacc

SEQ ID NO: 4936963 - DNA, 25 bp, Homo sapien
tggtttgataccaatcagcagaccc

SEQ ID NO: 4936964 - DNA, 25 bp, Homo sapien
ggtttgataccaatcagcagaccct

SEQ ID NO: 4936965 - DNA, 25 bp, Homo sapien
ctaggtcttctgcttgctcttgtcc

SEQ ID NO: 4936966 - DNA, 25 bp, Homo sapien
cctcatcttcactgaggagggcctg

SEQ ID NO: 4936967 - DNA, 25 bp, Homo sapien
gcctggggcagctcaaggctcttgg

SEQ ID NO: 4936968 - DNA, 25 bp, Homo sapien
tcttgtcctcatcttcactgaggag

SEQ ID NO: 4936969 - DNA, 25 bp, Homo sapien
aaggccaaggcattaggattgcatg

SEQ ID NO: 4936970 - DNA, 25 bp, Homo sapien
gccaaggcattaggattgcatgagt

SEQ ID NO: 4936971 - DNA, 25 bp, Homo sapien
gaaggccaaggcattaggattgcat

SEQ ID NO: 4936972 - DNA, 25 bp, Homo sapien
aaggcattaggattgcatgagtcca

SEQ ID NO: 4936973 - DNA, 25 bp, Homo sapien
caattcctaagtgctgcctggaggc

SEQ ID NO: 4936974 - DNA, 25 bp, Homo sapien
ccaccagtgcccttgaggttatggg

SEQ ID NO: 4936975 - DNA, 25 bp, Homo sapien
ggaagtgactacacccctatggtgt

SEQ ID NO: 4936976 - DNA, 25 bp, Homo sapien
ccatgacgatggtgttaaggactgc

SEQ ID NO: 4936977 - DNA, 25 bp, Homo sapien
tgtcatcagttgtccccagttaaag

SEQ ID NO: 4936978 - DNA, 25 bp, Homo sapien
catttggaggaggttcagggtccca

SEQ ID NO: 4936979 - DNA, 25 bp, Homo sapien
cacagggcagtgacaacttgggaca

SEQ ID NO: 4936980 - DNA, 25 bp, Homo sapien
tgtagactgcatccattcttgggag

SEQ ID NO: 4936981 - DNA, 25 bp, Homo sapien
gacattcagagattagtcttaggtt

SEQ ID NO: 4936982 - DNA, 25 bp, Homo sapien
gaatacgtcttgatcagacattcag

SEQ ID NO: 4936983 - DNA, 25 bp, Homo sapien
atacttacggcctttacatgaatac

SEQ ID NO: 4936984 - DNA, 25 bp, Homo sapien
ttacggcctttacatgaatacgtct

SEQ ID NO: 4936985 - DNA, 25 bp, Homo sapien
gctcatcacccggatagaggacacg

SEQ ID NO: 4936986 - DNA, 25 bp, Homo sapien
catcacccggatagaggacacggac

SEQ ID NO: 4936987 - DNA, 25 bp, Homo sapien
aggacacggaccctgtgtggtattt

SEQ ID NO: 4936988 - DNA, 25 bp, Homo sapien
acggaccctgtgtggtattttggca

SEQ ID NO: 4936989 - DNA, 25 bp, Homo sapien
gactcagttcttggcctgctagcgg

SEQ ID NO: 4936990 - DNA, 25 bp, Homo sapien
ggccccacggagagttgacttggta

SEQ ID NO: 4936991 - DNA, 25 bp, Homo sapien
gttacccgcagatcctgtcccatgg

SEQ ID NO: 4936992 - DNA, 25 bp, Homo sapien
cacttcagttgtggcctcattcagc

SEQ ID NO: 4936993 - DNA, 25 bp, Homo sapien
cgcatcagaaactgcaccgggaaga

SEQ ID NO: 4936994 - DNA, 25 bp, Homo sapien
accgggaagaccgtcctgggctgat

SEQ ID NO: 4936995 - DNA, 25 bp, Homo sapien
tggattggaccccagctaagtaagg

SEQ ID NO: 4936996 - DNA, 25 bp, Homo sapien
tgagcactggtcctggtgaccggaa

SEQ ID NO: 4936997 - DNA, 25 bp, Homo sapien
tctggggccccacacggtcccatgc

SEQ ID NO: 4936998 - DNA, 25 bp, Homo sapien
cacggtcccatgctggaacacacat

SEQ ID NO: 4936999 - DNA, 25 bp, Homo sapien
ttctggggccccacacggtcccatg

SEQ ID NO: 4937000 - DNA, 25 bp, Homo sapien
ttttgcccctgaaaaggctctggca

SEQ ID NO: 4937001 - DNA, 25 bp, Homo sapien
tcctctcctcgattttgcccctgaa

SEQ ID NO: 4937002 - DNA, 25 bp, Homo sapien
ctcctctcctcgattttgcccctga

SEQ ID NO: 4937003 - DNA, 25 bp, Homo sapien
tgcccctgaaaaggctctggcacat

SEQ ID NO: 4937004 - DNA, 25 bp, Homo sapien
ctgagggctgaaacgtcctcaagac

SEQ ID NO: 4937005 - DNA, 25 bp, Homo sapien
tcctcaagacccagattatgcctct

SEQ ID NO: 4937006 - DNA, 25 bp, Homo sapien
agggctgaaacgtcctcaagaccca

SEQ ID NO: 4937007 - DNA, 25 bp, Homo sapien
agccaaggatgagggcacctccctg

SEQ ID NO: 4937008 - DNA, 25 bp, Homo sapien
cagcgggtttcctggagccagtgag

SEQ ID NO: 4937009 - DNA, 25 bp, Homo sapien
ctgcccacagtcaacaccagcgggt

SEQ ID NO: 4937010 - DNA, 25 bp, Homo sapien
gtgactttatatggcctcaaatggg

SEQ ID NO: 4937011 - DNA, 25 bp, Homo sapien
ggagagggcctcaggtgactttata

SEQ ID NO: 4937012 - DNA, 25 bp, Homo sapien
ctgccatcaacagggcaagcagcac

SEQ ID NO: 4937013 - DNA, 25 bp, Homo sapien
catcaacagggcaagcagcacagcc

SEQ ID NO: 4937014 - DNA, 25 bp, Homo sapien
gctgcagggccaagcctgccatcaa

SEQ ID NO: 4937015 - DNA, 25 bp, Homo sapien
ggccaagcctgccatcaacagggca

SEQ ID NO: 4937016 - DNA, 25 bp, Homo sapien
gggctttgcaggagtagcacagcag

SEQ ID NO: 4937017 - DNA, 25 bp, Homo sapien
ggcagtcctcgttgctcacctgggc

SEQ ID NO: 4937018 - DNA, 25 bp, Homo sapien
gctttgcaggagtagcacagcaggg

SEQ ID NO: 4937019 - DNA, 25 bp, Homo sapien
acctgcaggcagtcctcgttgctca

SEQ ID NO: 4937020 - DNA, 25 bp, Homo sapien
ggtctcagccctatccagatgtccg

SEQ ID NO: 4937021 - DNA, 25 bp, Homo sapien
cagatgcggacagatggccagaaag

SEQ ID NO: 4937022 - DNA, 25 bp, Homo sapien
gatgtccgaggcagatggaccaccc

SEQ ID NO: 4937023 - DNA, 25 bp, Homo sapien
tggcctcaggattgcaagcagtgcg

SEQ ID NO: 4937024 - DNA, 25 bp, Homo sapien
cacaagtcggtgtcacagcacgtga

SEQ ID NO: 4937025 - DNA, 25 bp, Homo sapien
cagcacgtgatgttcttcttgccca

SEQ ID NO: 4937026 - DNA, 25 bp, Homo sapien
atgggccccgctggcgttgcacaag

SEQ ID NO: 4937027 - DNA, 25 bp, Homo sapien
gtgagtcatccacgcagttcaagct

SEQ ID NO: 4937028 - DNA, 25 bp, Homo sapien
ttcagggagccccacgaatgtgagg

SEQ ID NO: 4937029 - DNA, 25 bp, Homo sapien
ggcggatctgtgtcaatagagccga

SEQ ID NO: 4937030 - DNA, 25 bp, Homo sapien
tcagacttgcgttaggatgtgcctc

SEQ ID NO: 4937031 - DNA, 25 bp, Homo sapien
tattaagggcctacgctgtgctgag

SEQ ID NO: 4937032 - DNA, 25 bp, Homo sapien
ttctcatgctgttcctaagggtcac

SEQ ID NO: 4937033 - DNA, 25 bp, Homo sapien
tttaactgttggaatgacctgatgc

SEQ ID NO: 4937034 - DNA, 25 bp, Homo sapien
gcctcccaggaactagtcttattga

SEQ ID NO: 4937035 - DNA, 25 bp, Homo sapien
tcctgtaagaagaagcggtctcact

SEQ ID NO: 4937036 - DNA, 25 bp, Homo sapien
cttctccgctgaagagcacgggctc

SEQ ID NO: 4937037 - DNA, 25 bp, Homo sapien
gagtcccgccttgtgctgctgttgg

SEQ ID NO: 4937038 - DNA, 25 bp, Homo sapien
agcccaagggccgtctccttgagga

SEQ ID NO: 4937039 - DNA, 25 bp, Homo sapien
aaaggcgcgtgtggaaacgcagccc

SEQ ID NO: 4937040 - DNA, 25 bp, Homo sapien
cctgtcggggtctttggagcctcat

SEQ ID NO: 4937041 - DNA, 25 bp, Homo sapien
cgcgcctcccacccgccggggcctg

SEQ ID NO: 4937042 - DNA, 25 bp, Homo sapien
tcgttgtctcgcagtcaggttggcg

SEQ ID NO: 4937043 - DNA, 25 bp, Homo sapien
tcctctggatctcgttgtctcgcag

SEQ ID NO: 4937044 - DNA, 25 bp, Homo sapien
cacgaccagcagcaaggcgagcagc

SEQ ID NO: 4937045 - DNA, 25 bp, Homo sapien
gcgtctgtccacacccgcggtaggg

SEQ ID NO: 4937046 - DNA, 25 bp, Homo sapien
ggctctgtccatttgcacctccttg

SEQ ID NO: 4937047 - DNA, 25 bp, Homo sapien
tcacggccgctataacgcagtatgg

SEQ ID NO: 4937048 - DNA, 25 bp, Homo sapien
catgacaccacactctattgtcacc

SEQ ID NO: 4937049 - DNA, 25 bp, Homo sapien
ggttctggcactcgaaagtgttttc

SEQ ID NO: 4937050 - DNA, 25 bp, Homo sapien
tttgggtccccaacaagagcgaaga

SEQ ID NO: 4937051 - DNA, 25 bp, Homo sapien
tctggacccactgtagcaggcactg

SEQ ID NO: 4937052 - DNA, 25 bp, Homo sapien
ggtggcgcgcatccataataccagc

SEQ ID NO: 4937053 - DNA, 25 bp, Homo sapien
catagacactgttctctgtggcgca

SEQ ID NO: 4937054 - DNA, 25 bp, Homo sapien
caaacacagggttggctcaggcctt

SEQ ID NO: 4937055 - DNA, 25 bp, Homo sapien
aagttataaagtcgatgtgggccac

SEQ ID NO: 4937056 - DNA, 25 bp, Homo sapien
caacttcgtggataccgaagggctg

SEQ ID NO: 4937057 - DNA, 25 bp, Homo sapien
gaatcagaattcacgagccctgaag

SEQ ID NO: 4937058 - DNA, 25 bp, Homo sapien
gcttctgcgtggtatggcctgtcca

SEQ ID NO: 4937059 - DNA, 25 bp, Homo sapien
catatgcactgggaatgcgggtcta

SEQ ID NO: 4937060 - DNA, 25 bp, Homo sapien
aggcctgtgtgttgaatgctgcttc

SEQ ID NO: 4937061 - DNA, 25 bp, Homo sapien
gccaggcctgtgtgttgaatgctgc

SEQ ID NO: 4937062 - DNA, 25 bp, Homo sapien
cctggcggccctgctcaaaggtgca

SEQ ID NO: 4937063 - DNA, 25 bp, Homo sapien
gcggccctgctcaaaggtgcacagt

SEQ ID NO: 4937064 - DNA, 25 bp, Homo sapien
tggcggccctgctcaaaggtgcaca

SEQ ID NO: 4937065 - DNA, 25 bp, Homo sapien
gccctgctcaaaggtgcacagtcaa

SEQ ID NO: 4937066 - DNA, 25 bp, Homo sapien
cgcaattccaatgcctgacaccgag

SEQ ID NO: 4937067 - DNA, 25 bp, Homo sapien
ctaataggaaataaagaccgagaga

SEQ ID NO: 4937068 - DNA, 25 bp, Homo sapien
gagagaaggcaatcacgcaattcca

SEQ ID NO: 4937069 - DNA, 25 bp, Homo sapien
atgcctgacaccgaggcccttctgt

SEQ ID NO: 4937070 - DNA, 25 bp, Homo sapien
cttcgcaaccatgaaaaaacgtgga

SEQ ID NO: 4937071 - DNA, 25 bp, Homo sapien
cgcaaccatgaaaaaacgtggaaat

SEQ ID NO: 4937072 - DNA, 25 bp, Homo sapien
ttcgcaaccatgaaaaaacgtggaa

SEQ ID NO: 4937073 - DNA, 25 bp, Homo sapien
caaccatgaaaaaacgtggaaatat

SEQ ID NO: 4937074 - DNA, 25 bp, Homo sapien
ggcttgggtctctccatcgctgcac

SEQ ID NO: 4937075 - DNA, 25 bp, Homo sapien
gtagcgaattttacaacacttgagg

SEQ ID NO: 4937076 - DNA, 25 bp, Homo sapien
gataggtggcccctctaaattgcag

SEQ ID NO: 4937077 - DNA, 25 bp, Homo sapien
ggctcttccaggagaaaccgcttct

SEQ ID NO: 4937078 - DNA, 25 bp, Homo sapien
tcaagacaggctgaggccggctgca

SEQ ID NO: 4937079 - DNA, 25 bp, Homo sapien
ccggctgcaatggaggccagcagca

SEQ ID NO: 4937080 - DNA, 25 bp, Homo sapien
gctgaggccggctgcaatggaggcc

SEQ ID NO: 4937081 - DNA, 25 bp, Homo sapien
agcaggaggatggccagccacagcc

SEQ ID NO: 4937082 - DNA, 25 bp, Homo sapien
ctggagcgagtccatgctccggaag

SEQ ID NO: 4937083 - DNA, 25 bp, Homo sapien
tggagcgagtccatgctccggaagg

SEQ ID NO: 4937084 - DNA, 25 bp, Homo sapien
ggagcgagtccatgctccggaaggc

SEQ ID NO: 4937085 - DNA, 25 bp, Homo sapien
gtttaatgcaacaggtgacaacggt

SEQ ID NO: 4937086 - DNA, 25 bp, Homo sapien
acagaaaacaagtttaatgcaacag

SEQ ID NO: 4937087 - DNA, 25 bp, Homo sapien
gaaaacaagtttaatgcaacaggtg

SEQ ID NO: 4937088 - DNA, 25 bp, Homo sapien
aagtttaatgcaacaggtgacaacg

SEQ ID NO: 4937089 - DNA, 25 bp, Homo sapien
cccttgagggttaagagccaactgc

SEQ ID NO: 4937090 - DNA, 25 bp, Homo sapien
tctccatgagtggtacttaggcctc

SEQ ID NO: 4937091 - DNA, 25 bp, Homo sapien
tgttcctgcgtcacctgaaaggtcg

SEQ ID NO: 4937092 - DNA, 25 bp, Homo sapien
tgaaaggtcggaagcatctcagcac

SEQ ID NO: 4937093 - DNA, 25 bp, Homo sapien
caaggccagttttgtgagagtttca

SEQ ID NO: 4937094 - DNA, 25 bp, Homo sapien
caaccgttttgtgaatgctcaaggc

SEQ ID NO: 4937095 - DNA, 25 bp, Homo sapien
gagtgtatagagaaagtcagccaac

SEQ ID NO: 4937096 - DNA, 25 bp, Homo sapien
tcaagggcaaaggtcgtggcaaccg

SEQ ID NO: 4937097 - DNA, 25 bp, Homo sapien
aagtggataactcattggaagaaga

SEQ ID NO: 4937098 - DNA, 25 bp, Homo sapien
taagaggactgattaatagcagcag

SEQ ID NO: 4937099 - DNA, 25 bp, Homo sapien
aagtttatagggacaatgcctcaaa

SEQ ID NO: 4937100 - DNA, 25 bp, Homo sapien
gtctgtgaggaaacaattcatcttg

SEQ ID NO: 4937101 - DNA, 25 bp, Homo sapien
tgaatggcaggatgtgaacaccagc

SEQ ID NO: 4937102 - DNA, 25 bp, Homo sapien
tactgtttctgggtgctggtgtgaa

SEQ ID NO: 4937103 - DNA, 25 bp, Homo sapien
gtgtgaatggcaggatgtgaacacc

SEQ ID NO: 4937104 - DNA, 25 bp, Homo sapien
ctactgtttctgggtgctggtgtga

SEQ ID NO: 4937105 - DNA, 25 bp, Homo sapien
ttctcttctcggaggtactgagact

SEQ ID NO: 4937106 - DNA, 25 bp, Homo sapien
cttctcggaggtactgagacttata

SEQ ID NO: 4937107 - DNA, 25 bp, Homo sapien
gccagaagggccagtaaatggattc

SEQ ID NO: 4937108 - DNA, 25 bp, Homo sapien
cggaggtactgagacttatattgca

SEQ ID NO: 4937109 - DNA, 25 bp, Homo sapien
atcatattgcaagatggcctgctga

SEQ ID NO: 4937110 - DNA, 25 bp, Homo sapien
tctataggtttacgggagtagactg

SEQ ID NO: 4937111 - DNA, 25 bp, Homo sapien
tccaagcaggcctgtcgtccatcag

SEQ ID NO: 4937112 - DNA, 25 bp, Homo sapien
caggcctgtcgtccatcaggagaag

SEQ ID NO: 4937113 - DNA, 25 bp, Homo sapien
acaaatacttgaggtcctctatagg

SEQ ID NO: 4937114 - DNA, 25 bp, Homo sapien
cggtgccggtgtccgcggcgctggt

SEQ ID NO: 4937115 - DNA, 25 bp, Homo sapien
tgcggagtccgtggcgccggtgccg

SEQ ID NO: 4937116 - DNA, 25 bp, Homo sapien
ctcctgggaactcacgagcgcagcg

SEQ ID NO: 4937117 - DNA, 25 bp, Homo sapien
gctggttacggtgcccgccaggcct

SEQ ID NO: 4937118 - DNA, 25 bp, Homo sapien
ccgggaagcgctgctcagctagcag

SEQ ID NO: 4937119 - DNA, 25 bp, Homo sapien
ggaaggcgcaccaggtaccagacgt

SEQ ID NO: 4937120 - DNA, 25 bp, Homo sapien
tagcgcgcgttgttcatgtgcagca

SEQ ID NO: 4937121 - DNA, 25 bp, Homo sapien
cgcaaagtcggcctcgcgcaggtag

SEQ ID NO: 4937122 - DNA, 25 bp, Homo sapien
gcaggctgacaaagcgcgcctccag

SEQ ID NO: 4937123 - DNA, 25 bp, Homo sapien
gacaaagcgcgcctccaggtagaac

SEQ ID NO: 4937124 - DNA, 25 bp, Homo sapien
tgcacgacgcgctcgggtgaggtgc

SEQ ID NO: 4937125 - DNA, 25 bp, Homo sapien
ctccaggtagaacgcgcggtcgtcc

SEQ ID NO: 4937126 - DNA, 25 bp, Homo sapien
gcgggagcggtaagaggcaggactc

SEQ ID NO: 4937127 - DNA, 25 bp, Homo sapien
agcagtatccgaaagaggtgcaggc

SEQ ID NO: 4937128 - DNA, 25 bp, Homo sapien
ccagcagtatccgaaagaggtgcag

SEQ ID NO: 4937129 - DNA, 25 bp, Homo sapien
cagtatccgaaagaggtgcaggcag

SEQ ID NO: 4937130 - DNA, 25 bp, Homo sapien
gtccgagaccggagagggcagtgcc

SEQ ID NO: 4937131 - DNA, 25 bp, Homo sapien
tgtccgagaccggagagggcagtgc

SEQ ID NO: 4937132 - DNA, 25 bp, Homo sapien
ctgtccgagaccggagagggcagtg

SEQ ID NO: 4937133 - DNA, 25 bp, Homo sapien
ttgaccctcgtctgctcgggaggca

SEQ ID NO: 4937134 - DNA, 25 bp, Homo sapien
tgaccctcgtctgctcgggaggcac

SEQ ID NO: 4937135 - DNA, 25 bp, Homo sapien
aatcatggatgactgtactaggacc

SEQ ID NO: 4937136 - DNA, 25 bp, Homo sapien
gatggacatggttacccctagctct

SEQ ID NO: 4937137 - DNA, 25 bp, Homo sapien
tgttaaccactgagactgccatccg

SEQ ID NO: 4937138 - DNA, 25 bp, Homo sapien
tgcttgttctgtcataccttgcgga

SEQ ID NO: 4937139 - DNA, 25 bp, Homo sapien
gtgaactggatgttaaaagcacaat

SEQ ID NO: 4937140 - DNA, 25 bp, Homo sapien
taataacaggattataaggagacat

SEQ ID NO: 4937141 - DNA, 25 bp, Homo sapien
tataaaaatcttaccctatagtcag

SEQ ID NO: 4937142 - DNA, 25 bp, Homo sapien
aggagacataatatggatttttacc

SEQ ID NO: 4937143 - DNA, 25 bp, Homo sapien
tccaggaaagtaccagacagggctc

SEQ ID NO: 4937144 - DNA, 25 bp, Homo sapien
ttgcagatgggcattgggagctccc

SEQ ID NO: 4937145 - DNA, 25 bp, Homo sapien
agaacccagccagaaacccgtgaag

SEQ ID NO: 4937146 - DNA, 25 bp, Homo sapien
gcagagaggaaatccagaggcctca

SEQ ID NO: 4937147 - DNA, 25 bp, Homo sapien
agcccgtgaccttccaagatcccct

SEQ ID NO: 4937148 - DNA, 25 bp, Homo sapien
gtgaccttccaagatcccctgcccc

SEQ ID NO: 4937149 - DNA, 25 bp, Homo sapien
ccgtgaccttccaagatcccctgcc

SEQ ID NO: 4937150 - DNA, 25 bp, Homo sapien
ccccagcccgtgaccttccaagatc

SEQ ID NO: 4937151 - DNA, 25 bp, Homo sapien
ggacacccagctaagctacggcctt

SEQ ID NO: 4937152 - DNA, 25 bp, Homo sapien
aaggggacacccagctaagctacgg

SEQ ID NO: 4937153 - DNA, 25 bp, Homo sapien
gaaaggggacacccagctaagctac

SEQ ID NO: 4937154 - DNA, 25 bp, Homo sapien
ggggacacccagctaagctacggcc

SEQ ID NO: 4937155 - DNA, 25 bp, Homo sapien
tggcctcgttgtaggagatccagtg

SEQ ID NO: 4937156 - DNA, 25 bp, Homo sapien
tgctgcagatcagcgggcagctcag

SEQ ID NO: 4937157 - DNA, 25 bp, Homo sapien
atcactgagcccactctccatgcgg

SEQ ID NO: 4937158 - DNA, 25 bp, Homo sapien
tctccatgcggagcagctggctgct

SEQ ID NO: 4937159 - DNA, 25 bp, Homo sapien
ctccagctggaacagagtatggctg

SEQ ID NO: 4937160 - DNA, 25 bp, Homo sapien
tccttctgcctagcgtggagcccag

SEQ ID NO: 4937161 - DNA, 25 bp, Homo sapien
caggctggtcaggaggctactccag

SEQ ID NO: 4937162 - DNA, 25 bp, Homo sapien
cagcacagaggggtatcaataactg

SEQ ID NO: 4937163 - DNA, 25 bp, Homo sapien
cttgagggcagagctgggtcaggat

SEQ ID NO: 4937164 - DNA, 25 bp, Homo sapien
tgagggcagagctgggtcaggatgc

SEQ ID NO: 4937165 - DNA, 25 bp, Homo sapien
ttgagggcagagctgggtcaggatg

SEQ ID NO: 4937166 - DNA, 25 bp, Homo sapien
tcatcgtagggccaggcaggactct

SEQ ID NO: 4937167 - DNA, 25 bp, Homo sapien
aggagttaagaagacgcctgccggc

SEQ ID NO: 4937168 - DNA, 25 bp, Homo sapien
caggatctaggctcgggaggcactt

SEQ ID NO: 4937169 - DNA, 25 bp, Homo sapien
ggtgcgagtggacaaggacacccct

SEQ ID NO: 4937170 - DNA, 25 bp, Homo sapien
tggtgtctccattagggagacctga

SEQ ID NO: 4937171 - DNA, 25 bp, Homo sapien
ggtgtctccattagggagacctgag

SEQ ID NO: 4937172 - DNA, 25 bp, Homo sapien
ctggtgtctccattagggagacctg

SEQ ID NO: 4937173 - DNA, 25 bp, Homo sapien
ccccagctgtaaggtgaggcattag

SEQ ID NO: 4937174 - DNA, 25 bp, Homo sapien
ccccaactttgccttggtgactctg

SEQ ID NO: 4937175 - DNA, 25 bp, Homo sapien
ctttgccttggtgactctgggccat

SEQ ID NO: 4937176 - DNA, 25 bp, Homo sapien
cagctgtaaggtgaggcattaggca

SEQ ID NO: 4937177 - DNA, 25 bp, Homo sapien
tgcagcccttgactctggctcaagg

SEQ ID NO: 4937178 - DNA, 25 bp, Homo sapien
cgtgttctatcgggcagtgctgcag

SEQ ID NO: 4937179 - DNA, 25 bp, Homo sapien
gcagcggcaaggaggcagttctgga

SEQ ID NO: 4937180 - DNA, 25 bp, Homo sapien
agggccctgagctgacaagcagtga

SEQ ID NO: 4937181 - DNA, 25 bp, Homo sapien
aaaggttgcagctttcccatggtgg

SEQ ID NO: 4937182 - DNA, 25 bp, Homo sapien
taaaacagaaaggttgcagctttcc

SEQ ID NO: 4937183 - DNA, 25 bp, Homo sapien
aaataaaacagaaaggttgcagctt

SEQ ID NO: 4937184 - DNA, 25 bp, Homo sapien
gaaaggttgcagctttcccatggtg

SEQ ID NO: 4937185 - DNA, 25 bp, Homo sapien
ctgcccccaatggctaccagcaccc

SEQ ID NO: 4937186 - DNA, 25 bp, Homo sapien
ctaccagcaccctgcccgaggctct

SEQ ID NO: 4937187 - DNA, 25 bp, Homo sapien
tgcccccaatggctaccagcaccct

SEQ ID NO: 4937188 - DNA, 25 bp, Homo sapien
tgggcccgacacctggacactgtgc

SEQ ID NO: 4937189 - DNA, 25 bp, Homo sapien
ctgggcccgacacctggacactgtg

SEQ ID NO: 4937190 - DNA, 25 bp, Homo sapien
gggcccgacacctggacactgtgca

SEQ ID NO: 4937191 - DNA, 25 bp, Homo sapien
agaattccggacaccaggcacagta

SEQ ID NO: 4937192 - DNA, 25 bp, Homo sapien
ccaggcacagtagaactccactcag

SEQ ID NO: 4937193 - DNA, 25 bp, Homo sapien
agtagaactccactcagcaaggcct

SEQ ID NO: 4937194 - DNA, 25 bp, Homo sapien
cagcaaggcctcagatgtggggatc

SEQ ID NO: 4937195 - DNA, 25 bp, Homo sapien
agagccccgtggtgacccgctcctg

SEQ ID NO: 4937196 - DNA, 25 bp, Homo sapien
ccctgcagagtaccccttcaaccag

SEQ ID NO: 4937197 - DNA, 25 bp, Homo sapien
gggccgcccacctgatcttctgctg

SEQ ID NO: 4937198 - DNA, 25 bp, Homo sapien
tgtggccaccgaccccgacagcatc

SEQ ID NO: 4937199 - DNA, 25 bp, Homo sapien
tgagaggtttcgatgtaaaaagagg

SEQ ID NO: 4937200 - DNA, 25 bp, Homo sapien
gaatgagaggtttcgatgtaaaaag

SEQ ID NO: 4937201 - DNA, 25 bp, Homo sapien
actgaatgagaggtttcgatgtaaa

SEQ ID NO: 4937202 - DNA, 25 bp, Homo sapien
agaggtttcgatgtaaaaagaggag

SEQ ID NO: 4937203 - DNA, 25 bp, Homo sapien
caggataaggctggatcatcacctc

SEQ ID NO: 4937204 - DNA, 25 bp, Homo sapien
tcatcacctctctcgctacagccaa

SEQ ID NO: 4937205 - DNA, 25 bp, Homo sapien
cctctctcgctacagccaaaggcat

SEQ ID NO: 4937206 - DNA, 25 bp, Homo sapien
gagaacaggataaggctggatcatc

SEQ ID NO: 4937207 - DNA, 25 bp, Homo sapien
tggagatacccagataagctcaaga

SEQ ID NO: 4937208 - DNA, 25 bp, Homo sapien
cataaacagggtgcgctggagatac

SEQ ID NO: 4937209 - DNA, 25 bp, Homo sapien
aggacaactttcagagtagccccgg

SEQ ID NO: 4937210 - DNA, 25 bp, Homo sapien
cggacactcaggtgcaggacaactt

SEQ ID NO: 4937211 - DNA, 25 bp, Homo sapien
ttggcaacgttctcatgaagaatca

SEQ ID NO: 4937212 - DNA, 25 bp, Homo sapien
cttggcaacgttctcatgaagaatc

SEQ ID NO: 4937213 - DNA, 25 bp, Homo sapien
cagctgcacaactagagaaacggtg

SEQ ID NO: 4937214 - DNA, 25 bp, Homo sapien
gacagtgattcaatgaattgagaca

SEQ ID NO: 4937215 - DNA, 25 bp, Homo sapien
tagagaaacggtgtctccacagcgc

SEQ ID NO: 4937216 - DNA, 25 bp, Homo sapien
gaattgagacattccttacatcatt

SEQ ID NO: 4937217 - DNA, 25 bp, Homo sapien
ttggcacctggcgtagagcacacag

SEQ ID NO: 4937218 - DNA, 25 bp, Homo sapien
gtgggcagcttctcacacctgcctc

SEQ ID NO: 4937219 - DNA, 25 bp, Homo sapien
agctgagaacaaggacctgctggag

SEQ ID NO: 4937220 - DNA, 25 bp, Homo sapien
ctgagaacaaggacctgctggagct

SEQ ID NO: 4937221 - DNA, 25 bp, Homo sapien
gacagtgccagtcttctgcaaaggg

SEQ ID NO: 4937222 - DNA, 25 bp, Homo sapien
agtgagtctatatgcaggcctgcgt

SEQ ID NO: 4937223 - DNA, 25 bp, Homo sapien
gctgcagccagcgatgccttgggat

SEQ ID NO: 4937224 - DNA, 25 bp, Homo sapien
tccagagctttgatgcaggacccct

SEQ ID NO: 4937225 - DNA, 25 bp, Homo sapien
ccactgtaaacctctttccagagag

SEQ ID NO: 4937226 - DNA, 25 bp, Homo sapien
gtaaacctctttccagagagggcat

SEQ ID NO: 4937227 - DNA, 25 bp, Homo sapien
ccccactgtaaacctctttccagag

SEQ ID NO: 4937228 - DNA, 25 bp, Homo sapien
ctgtaaacctctttccagagagggc

SEQ ID NO: 4937229 - DNA, 25 bp, Homo sapien
cggtacctcacggtggtgaaggtca

SEQ ID NO: 4937230 - DNA, 25 bp, Homo sapien
cctcgacctgggaccgcagtgtttg

SEQ ID NO: 4937231 - DNA, 25 bp, Homo sapien
tgatagtcccgctcgcgccgagagc

SEQ ID NO: 4937232 - DNA, 25 bp, Homo sapien
ttgggaagctcgaagccgcaggcct

SEQ ID NO: 4937233 - DNA, 25 bp, Homo sapien
tctgtgtcggagatccagatgcctg

SEQ ID NO: 4937234 - DNA, 25 bp, Homo sapien
gtggctgcctctgtgtcggagatcc

SEQ ID NO: 4937235 - DNA, 25 bp, Homo sapien
gctgcctctgtgtcggagatccaga

SEQ ID NO: 4937236 - DNA, 25 bp, Homo sapien
ggagatccagatgcctggactggcc

SEQ ID NO: 4937237 - DNA, 25 bp, Homo sapien
cgcaaggctggtgccggccgacaaa

SEQ ID NO: 4937238 - DNA, 25 bp, Homo sapien
cattttgccaaaaacagaaccaata

SEQ ID NO: 4937239 - DNA, 25 bp, Homo sapien
tccgggctgaacacgtgagtctgag

SEQ ID NO: 4937240 - DNA, 25 bp, Homo sapien
ccaaagggcgccagttccggagctg

SEQ ID NO: 4937241 - DNA, 25 bp, Homo sapien
agaggggatacagagtgctccagac

SEQ ID NO: 4937242 - DNA, 25 bp, Homo sapien
gtgctccagacaaggcaatcttgct

SEQ ID NO: 4937243 - DNA, 25 bp, Homo sapien
gaggactggagccaatcccagtggg

SEQ ID NO: 4937244 - DNA, 25 bp, Homo sapien
tgttcagggtacaagggaaggcctg

SEQ ID NO: 4937245 - DNA, 25 bp, Homo sapien
ggaagccgctaagcccagaggtgac

SEQ ID NO: 4937246 - DNA, 25 bp, Homo sapien
catggccaggaagccgctaagccca

SEQ ID NO: 4937247 - DNA, 25 bp, Homo sapien
gccaggaagccgctaagcccagagg

SEQ ID NO: 4937248 - DNA, 25 bp, Homo sapien
caggaagccgctaagcccagaggtg

SEQ ID NO: 4937249 - DNA, 25 bp, Homo sapien
tggccctgcacagccagactgcaaa

SEQ ID NO: 4937250 - DNA, 25 bp, Homo sapien
gcacagccagactgcaaactgccat

SEQ ID NO: 4937251 - DNA, 25 bp, Homo sapien
cctgcacagccagactgcaaactgc

SEQ ID NO: 4937252 - DNA, 25 bp, Homo sapien
aggaagcggcggctggccctgcaca

SEQ ID NO: 4937253 - DNA, 25 bp, Homo sapien
caatgatgcaggtaaagaagaggct

SEQ ID NO: 4937254 - DNA, 25 bp, Homo sapien
gagggaaagtggtcttctttggcac

SEQ ID NO: 4937255 - DNA, 25 bp, Homo sapien
tagacaacgtgatagtcgtgaagtc

SEQ ID NO: 4937256 - DNA, 25 bp, Homo sapien
gattcaggtcttatagtcacactcc

SEQ ID NO: 4937257 - DNA, 25 bp, Homo sapien
ccacttcgcgggcagagaacttcaa

SEQ ID NO: 4937258 - DNA, 25 bp, Homo sapien
gctggtgagctcctaatgacccttc

SEQ ID NO: 4937259 - DNA, 25 bp, Homo sapien
tcaagacagtgtgttcggagatgga

SEQ ID NO: 4937260 - DNA, 25 bp, Homo sapien
atggaagcccttgcgggtgttgcct

SEQ ID NO: 4937261 - DNA, 25 bp, Homo sapien
tctccagaatactcctggagaggcc

SEQ ID NO: 4937262 - DNA, 25 bp, Homo sapien
aattctctccagaatactcctggag

SEQ ID NO: 4937263 - DNA, 25 bp, Homo sapien
accccagctcttagccacgtcctcc

SEQ ID NO: 4937264 - DNA, 25 bp, Homo sapien
gaatactcctggagaggccgcaaca

SEQ ID NO: 4937265 - DNA, 25 bp, Homo sapien
cgtgtggccagcgacggtcattcag

SEQ ID NO: 4937266 - DNA, 25 bp, Homo sapien
agtcgtgcctctggcccttcggtga

SEQ ID NO: 4937267 - DNA, 25 bp, Homo sapien
tcattcagcaatggcgacggctgtg

SEQ ID NO: 4937268 - DNA, 25 bp, Homo sapien
ccttcggtgagttgtggccatggtc

SEQ ID NO: 4937269 - DNA, 25 bp, Homo sapien
ggctgggcaccggtccagcttgcac

SEQ ID NO: 4937270 - DNA, 25 bp, Homo sapien
ctggaagataaagcagaggtttgca

SEQ ID NO: 4937271 - DNA, 25 bp, Homo sapien
ccctaagaaggccatcggggaggct

SEQ ID NO: 4937272 - DNA, 25 bp, Homo sapien
aagataaagcagaggtttgcagggt

SEQ ID NO: 4937273 - DNA, 25 bp, Homo sapien
ctaagggatgcaggcgtggccttcc

SEQ ID NO: 4937274 - DNA, 25 bp, Homo sapien
taagggatgcaggcgtggccttccc

SEQ ID NO: 4937275 - DNA, 25 bp, Homo sapien
cctaagggatgcaggcgtggccttc

SEQ ID NO: 4937276 - DNA, 25 bp, Homo sapien
catgggcaggactaagctgtaggga

SEQ ID NO: 4937277 - DNA, 25 bp, Homo sapien
ggcaggactaagctgtagggaggca

SEQ ID NO: 4937278 - DNA, 25 bp, Homo sapien
gcctgcagggcgtcttggcttctga

SEQ ID NO: 4937279 - DNA, 25 bp, Homo sapien
gcagagcctgcagggcgtcttggct

SEQ ID NO: 4937280 - DNA, 25 bp, Homo sapien
gtccttctgcacatacaggatttgg

SEQ ID NO: 4937281 - DNA, 25 bp, Homo sapien
tgggcaggctctcacggggtccttc

SEQ ID NO: 4937282 - DNA, 25 bp, Homo sapien
catacaggatttggcccagccccgg

SEQ ID NO: 4937283 - DNA, 25 bp, Homo sapien
cagccccggcatagggcccagccag

SEQ ID NO: 4937284 - DNA, 25 bp, Homo sapien
gccccttgtgtctcagccatccctt

SEQ ID NO: 4937285 - DNA, 25 bp, Homo sapien
tgccccttgtgtctcagccatccct

SEQ ID NO: 4937286 - DNA, 25 bp, Homo sapien
aagatgtgcagcctccaaccaggca

SEQ ID NO: 4937287 - DNA, 25 bp, Homo sapien
aaccccagccaaagatgtgcagcct

SEQ ID NO: 4937288 - DNA, 25 bp, Homo sapien
tggtttcattagatctgcatgagta

SEQ ID NO: 4937289 - DNA, 25 bp, Homo sapien
agtattgccaaggttggctgcccag

SEQ ID NO: 4937290 - DNA, 25 bp, Homo sapien
gattgtccccttaagctgaaaggag

SEQ ID NO: 4937291 - DNA, 25 bp, Homo sapien
gaaaggagttccattcctctcaggt

SEQ ID NO: 4937292 - DNA, 25 bp, Homo sapien
cagaagaagagacctttgcccaaaa

SEQ ID NO: 4937293 - DNA, 25 bp, Homo sapien
aggaatgacactcgcctcagcagga

SEQ ID NO: 4937294 - DNA, 25 bp, Homo sapien
gacattcgaatttgggctcctcttg

SEQ ID NO: 4937295 - DNA, 25 bp, Homo sapien
tctccattctcaatgacaccaggga

SEQ ID NO: 4937296 - DNA, 25 bp, Homo sapien
tggaattgttttccctcgaggccac

SEQ ID NO: 4937297 - DNA, 25 bp, Homo sapien
ctcctcttggaattgttttccctcg

SEQ ID NO: 4937298 - DNA, 25 bp, Homo sapien
tcacacattggggtgaggactgcta

SEQ ID NO: 4937299 - DNA, 25 bp, Homo sapien
ggtgaggactgctaacccctagtcc

SEQ ID NO: 4937300 - DNA, 25 bp, Homo sapien
agccccgcagtgtgcgtgcccgccg

SEQ ID NO: 4937301 - DNA, 25 bp, Homo sapien
gtgcccctcggagccccgcagtgtg

SEQ ID NO: 4937302 - DNA, 25 bp, Homo sapien
ctgtgcccctcggagccccgcagtg

SEQ ID NO: 4937303 - DNA, 25 bp, Homo sapien
ctcggagccccgcagtgtgcgtgcc

SEQ ID NO: 4937304 - DNA, 25 bp, Homo sapien
aatctccaggtacctaaagatcaag

SEQ ID NO: 4937305 - DNA, 25 bp, Homo sapien
caggtacctaaagatcaagacagtt

SEQ ID NO: 4937306 - DNA, 25 bp, Homo sapien
gggaaccaaagtggcccagaatctc

SEQ ID NO: 4937307 - DNA, 25 bp, Homo sapien
tccaggtacctaaagatcaagacag

SEQ ID NO: 4937308 - DNA, 25 bp, Homo sapien
atcaggatccagtacccactttgcc

SEQ ID NO: 4937309 - DNA, 25 bp, Homo sapien
gggtcagagcctgatgtgtagctcc

SEQ ID NO: 4937310 - DNA, 25 bp, Homo sapien
tcagagcctgatgtgtagctccctc

SEQ ID NO: 4937311 - DNA, 25 bp, Homo sapien
tgtgtagctccctccaccgcaggag

SEQ ID NO: 4937312 - DNA, 25 bp, Homo sapien
ccaggtcaccaatcagttgccacaa

SEQ ID NO: 4937313 - DNA, 25 bp, Homo sapien
aggtcaccaatcagttgccacaact

SEQ ID NO: 4937314 - DNA, 25 bp, Homo sapien
ccccaggtcaccaatcagttgccac

SEQ ID NO: 4937315 - DNA, 25 bp, Homo sapien
aaacgccccccaggtcaccaatcag

SEQ ID NO: 4937316 - DNA, 25 bp, Homo sapien
gctccatggctaggagtaaggcaaa

SEQ ID NO: 4937317 - DNA, 25 bp, Homo sapien
gcactggctgccaccaatgggagct

SEQ ID NO: 4937318 - DNA, 25 bp, Homo sapien
ccatggctaggagtaaggcaaagag

SEQ ID NO: 4937319 - DNA, 25 bp, Homo sapien
gagctccatggctaggagtaaggca

SEQ ID NO: 4937320 - DNA, 25 bp, Homo sapien
gccaaggaagactggatactcacag

SEQ ID NO: 4937321 - DNA, 25 bp, Homo sapien
cgccaaggaagactggatactcaca

SEQ ID NO: 4937322 - DNA, 25 bp, Homo sapien
tcgccaaggaagactggatactcac

SEQ ID NO: 4937323 - DNA, 25 bp, Homo sapien
ctcgccaaggaagactggatactca

SEQ ID NO: 4937324 - DNA, 25 bp, Homo sapien
gaccgcacagtcatggcatctcaaa

SEQ ID NO: 4937325 - DNA, 25 bp, Homo sapien
gatacggacatactctaatgttggg

SEQ ID NO: 4937326 - DNA, 25 bp, Homo sapien
tacagcgcctaatatgatacggaca

SEQ ID NO: 4937327 - DNA, 25 bp, Homo sapien
aatggagattgtcatacagcgccta

SEQ ID NO: 4937328 - DNA, 25 bp, Homo sapien
tggggagagagggcaccagagggct

SEQ ID NO: 4937329 - DNA, 25 bp, Homo sapien
ctggggagagagggcaccagagggc

SEQ ID NO: 4937330 - DNA, 25 bp, Homo sapien
tgtgcgccagggcatacactggctg

SEQ ID NO: 4937331 - DNA, 25 bp, Homo sapien
catacatcttctgcaggttagggcc

SEQ ID NO: 4937332 - DNA, 25 bp, Homo sapien
accctccctgcttgctccattggtc

SEQ ID NO: 4937333 - DNA, 25 bp, Homo sapien
tggccatacatcttctgcaggttag

SEQ ID NO: 4937334 - DNA, 25 bp, Homo sapien
catcctgcacagccccagaaatcag

SEQ ID NO: 4937335 - DNA, 25 bp, Homo sapien
cacagccccagaaatcagcaaatct

SEQ ID NO: 4937336 - DNA, 25 bp, Homo sapien
tgcacagccccagaaatcagcaaat

SEQ ID NO: 4937337 - DNA, 25 bp, Homo sapien
cctgcacagccccagaaatcagcaa

SEQ ID NO: 4937338 - DNA, 25 bp, Homo sapien
agattagtaggtcctcctgcattgc

SEQ ID NO: 4937339 - DNA, 25 bp, Homo sapien
caacaaacccagtagaagctattag

SEQ ID NO: 4937340 - DNA, 25 bp, Homo sapien
tacttcatcgggtaacatgtccctt

SEQ ID NO: 4937341 - DNA, 25 bp, Homo sapien
gcaaaccatgctattacaacaacaa

SEQ ID NO: 4937342 - DNA, 25 bp, Homo sapien
gcaacagttttgatacccccagcct

SEQ ID NO: 4937343 - DNA, 25 bp, Homo sapien
tgactatgatagaggcaaaactcag

SEQ ID NO: 4937344 - DNA, 25 bp, Homo sapien
tcatggcaatatattgctgactatg

SEQ ID NO: 4937345 - DNA, 25 bp, Homo sapien
aactcagcaacagttttgatacccc

SEQ ID NO: 4937346 - DNA, 25 bp, Homo sapien
ccacctagaggagcagtggataagg

SEQ ID NO: 4937347 - DNA, 25 bp, Homo sapien
aacaaaccataaatgggccacctag

SEQ ID NO: 4937348 - DNA, 25 bp, Homo sapien
ataagggtctctggcttagaaggga

SEQ ID NO: 4937349 - DNA, 25 bp, Homo sapien
tagaagggaataatggagagcaaca

SEQ ID NO: 4937350 - DNA, 25 bp, Homo sapien
ccaggtggcccagtccagcacccgt

SEQ ID NO: 4937351 - DNA, 25 bp, Homo sapien
aggtggcccagtccagcacccgttg

SEQ ID NO: 4937352 - DNA, 25 bp, Homo sapien
tgccaggtggcccagtccagcaccc

SEQ ID NO: 4937353 - DNA, 25 bp, Homo sapien
ctgccaggtggcccagtccagcacc

SEQ ID NO: 4937354 - DNA, 25 bp, Homo sapien
caggacttctagctgccagttgatg

SEQ ID NO: 4937355 - DNA, 25 bp, Homo sapien
tcatcatcgaactgtggcagtctct

SEQ ID NO: 4937356 - DNA, 25 bp, Homo sapien
cttctagctgccagttgatgtgacg

SEQ ID NO: 4937357 - DNA, 25 bp, Homo sapien
tgtctgcatcatcatcgaactgtgg

SEQ ID NO: 4937358 - DNA, 25 bp, Homo sapien
cagggactctgcacaggctatcagg

SEQ ID NO: 4937359 - DNA, 25 bp, Homo sapien
caggctatcaggtagttggggccct

SEQ ID NO: 4937360 - DNA, 25 bp, Homo sapien
aacgctgtggctgcgacagggactc

SEQ ID NO: 4937361 - DNA, 25 bp, Homo sapien
cagcacacggtgcaataccaggcac

SEQ ID NO: 4937362 - DNA, 25 bp, Homo sapien
caccttggtgactagatttcagcct

SEQ ID NO: 4937363 - DNA, 25 bp, Homo sapien
cctatgaattctggaggcggacaca

SEQ ID NO: 4937364 - DNA, 25 bp, Homo sapien
aacatgggtaagactcaaggtacaa

SEQ ID NO: 4937365 - DNA, 25 bp, Homo sapien
ttatcctgagtccaactgttcttgc

SEQ ID NO: 4937366 - DNA, 25 bp, Homo sapien
cgccagttccattcaagagggcact

SEQ ID NO: 4937367 - DNA, 25 bp, Homo sapien
taaggacgccagttccattcaagag

SEQ ID NO: 4937368 - DNA, 25 bp, Homo sapien
tataaggacgccagttccattcaag

SEQ ID NO: 4937369 - DNA, 25 bp, Homo sapien
aggacgccagttccattcaagaggg

SEQ ID NO: 4937370 - DNA, 25 bp, Homo sapien
ctgaaggcttagaaggctaagatca

SEQ ID NO: 4937371 - DNA, 25 bp, Homo sapien
gaaggcttagaaggctaagatcaag

SEQ ID NO: 4937372 - DNA, 25 bp, Homo sapien
tgaggacccacctcttgtttcatag

SEQ ID NO: 4937373 - DNA, 25 bp, Homo sapien
aggcttagaaggctaagatcaaggt

SEQ ID NO: 4937374 - DNA, 25 bp, Homo sapien
aagcagcaatgccagggcacagctg

SEQ ID NO: 4937375 - DNA, 25 bp, Homo sapien
tcgtgtggccatacaagggtgctgt

SEQ ID NO: 4937376 - DNA, 25 bp, Homo sapien
cagcaagcactgtcctctgggcagt

SEQ ID NO: 4937377 - DNA, 25 bp, Homo sapien
gcacaaatggaactcccgagggcct

SEQ ID NO: 4937378 - DNA, 25 bp, Homo sapien
ttcggggcactcctgtagacacagc

SEQ ID NO: 4937379 - DNA, 25 bp, Homo sapien
acaaaggattataaggcaatagtgg

SEQ ID NO: 4937380 - DNA, 25 bp, Homo sapien
gcttgcattaatctgatgttttgac

SEQ ID NO: 4937381 - DNA, 25 bp, Homo sapien
taaggcaatagtggaatctatttct

SEQ ID NO: 4937382 - DNA, 25 bp, Homo sapien
tctcaaaggccccatatcttaatac

SEQ ID NO: 4937383 - DNA, 25 bp, Homo sapien
ggtctctgtttccaagcggcacctt

SEQ ID NO: 4937384 - DNA, 25 bp, Homo sapien
tctgtcaagcccctttacaagggca

SEQ ID NO: 4937385 - DNA, 25 bp, Homo sapien
cttgaacattgcatcgtctggaggg

SEQ ID NO: 4937386 - DNA, 25 bp, Homo sapien
tgtgtggggatccatgctccaggct

SEQ ID NO: 4937387 - DNA, 25 bp, Homo sapien
caggctggaagaaagttggatgagg

SEQ ID NO: 4937388 - DNA, 25 bp, Homo sapien
gctccaggctggaagaaagttggat

SEQ ID NO: 4937389 - DNA, 25 bp, Homo sapien
ggaagaaagttggatgaggccctgg

SEQ ID NO: 4937390 - DNA, 25 bp, Homo sapien
ggcccgtggagagggtggcgcctgg

SEQ ID NO: 4937391 - DNA, 25 bp, Homo sapien
tggcccgtggagagggtggcgcctg

SEQ ID NO: 4937392 - DNA, 25 bp, Homo sapien
cccgtggagagggtggcgcctggtc

SEQ ID NO: 4937393 - DNA, 25 bp, Homo sapien
cgtggagagggtggcgcctggtcag

SEQ ID NO: 4937394 - DNA, 25 bp, Homo sapien
agggcatcaggaaccctgtcatcct

SEQ ID NO: 4937395 - DNA, 25 bp, Homo sapien
gggcatcaggaaccctgtcatcctc

SEQ ID NO: 4937396 - DNA, 25 bp, Homo sapien
ccagggcatcaggaaccctgtcatc

SEQ ID NO: 4937397 - DNA, 25 bp, Homo sapien
gcatcaggaaccctgtcatcctccc

SEQ ID NO: 4937398 - DNA, 25 bp, Homo sapien
tattcgaagacagttgctctggcct

SEQ ID NO: 4937399 - DNA, 25 bp, Homo sapien
ctattcgaagacagttgctctggcc

SEQ ID NO: 4937400 - DNA, 25 bp, Homo sapien
tctggccttggcccgtgaccgcagc

SEQ ID NO: 4937401 - DNA, 25 bp, Homo sapien
caaacattctccagtcaacaggcat

SEQ ID NO: 4937402 - DNA, 25 bp, Homo sapien
cacaaacattctccagtcaacaggc

SEQ ID NO: 4937403 - DNA, 25 bp, Homo sapien
gcacaaacattctccagtcaacagg

SEQ ID NO: 4937404 - DNA, 25 bp, Homo sapien
acaaacattctccagtcaacaggca

SEQ ID NO: 4937405 - DNA, 25 bp, Homo sapien
aggaagtcttcagatccccttggca

SEQ ID NO: 4937406 - DNA, 25 bp, Homo sapien
cctcacagccattgacaaggtggca

SEQ ID NO: 4937407 - DNA, 25 bp, Homo sapien
caaggtggcaagcaccgtctcatct

SEQ ID NO: 4937408 - DNA, 25 bp, Homo sapien
gaagtcttcagatccccttggcatt

SEQ ID NO: 4937409 - DNA, 25 bp, Homo sapien
gctgcaggtacacaacgtgctccct

SEQ ID NO: 4937410 - DNA, 25 bp, Homo sapien
gcaggtacacaacgtgctccctgag

SEQ ID NO: 4937411 - DNA, 25 bp, Homo sapien
ggtacacaacgtgctccctgaggag

SEQ ID NO: 4937412 - DNA, 25 bp, Homo sapien
tacacaacgtgctccctgaggagtc

SEQ ID NO: 4937413 - DNA, 25 bp, Homo sapien
ccagcccaagcttgaggcagtgagc

SEQ ID NO: 4937414 - DNA, 25 bp, Homo sapien
ctgtgcgtttctgaaagcggaggac

SEQ ID NO: 4937415 - DNA, 25 bp, Homo sapien
cagcctgatgccagcccaagcttga

SEQ ID NO: 4937416 - DNA, 25 bp, Homo sapien
agctgtgcgtttctgaaagcggagg

SEQ ID NO: 4937417 - DNA, 25 bp, Homo sapien
cctcaggaagaagcaagaatgccgc

SEQ ID NO: 4937418 - DNA, 25 bp, Homo sapien
cattttagccttcgccacaggtggt

SEQ ID NO: 4937419 - DNA, 25 bp, Homo sapien
ggatgtgtaagacaactggcctacc

SEQ ID NO: 4937420 - DNA, 25 bp, Homo sapien
tcatcggaagtccacatggcgggtc

SEQ ID NO: 4937421 - DNA, 25 bp, Homo sapien
gatggaaatttgtttgttgtgtagg

SEQ ID NO: 4937422 - DNA, 25 bp, Homo sapien
tggaaatttgtttgttgtgtaggat

SEQ ID NO: 4937423 - DNA, 25 bp, Homo sapien
atggaaatttgtttgttgtgtagga

SEQ ID NO: 4937424 - DNA, 25 bp, Homo sapien
ggaaatttgtttgttgtgtaggata

SEQ ID NO: 4937425 - DNA, 25 bp, Homo sapien
ctgagatgaattagggtcccaacaa

SEQ ID NO: 4937426 - DNA, 25 bp, Homo sapien
tgagttatcttagacacccactttc

SEQ ID NO: 4937427 - DNA, 25 bp, Homo sapien
tggacagtggtgagttatcttagac

SEQ ID NO: 4937428 - DNA, 25 bp, Homo sapien
tagacacccactttcctttcacatt

SEQ ID NO: 4937429 - DNA, 25 bp, Homo sapien
ggtcacggatcagcttttcagcagt

SEQ ID NO: 4937430 - DNA, 25 bp, Homo sapien
caggtcacggatcagcttttcagca

SEQ ID NO: 4937431 - DNA, 25 bp, Homo sapien
gacagccttcaggtcacggatcagc

SEQ ID NO: 4937432 - DNA, 25 bp, Homo sapien
cttcaggtcacggatcagcttttca

SEQ ID NO: 4937433 - DNA, 25 bp, Homo sapien
tgtggctcttcttcagttctggagg

SEQ ID NO: 4937434 - DNA, 25 bp, Homo sapien
tccttaggcctttctgtgtgagtgc

SEQ ID NO: 4937435 - DNA, 25 bp, Homo sapien
tattgcttcatcaaatacattcctt

SEQ ID NO: 4937436 - DNA, 25 bp, Homo sapien
gtgtgagtgcagaacacaccacata

SEQ ID NO: 4937437 - DNA, 25 bp, Homo sapien
ggtgcaggacatttgtcattattgc

SEQ ID NO: 4937438 - DNA, 25 bp, Homo sapien
tgtgggtaggtgcaggacatttgtc

SEQ ID NO: 4937439 - DNA, 25 bp, Homo sapien
gacatttgtcattattgcaaaaacg

SEQ ID NO: 4937440 - DNA, 25 bp, Homo sapien
gaccttgtctcacacgagtgcatgt

SEQ ID NO: 4937441 - DNA, 25 bp, Homo sapien
ggacgggcctgctgtcatgcggagg

SEQ ID NO: 4937442 - DNA, 25 bp, Homo sapien
tcataagactgggacgggcctgctg

SEQ ID NO: 4937443 - DNA, 25 bp, Homo sapien
gagatcataagactgggacgggcct

SEQ ID NO: 4937444 - DNA, 25 bp, Homo sapien
gatcataagactgggacgggcctgc

SEQ ID NO: 4937445 - DNA, 25 bp, Homo sapien
gccatccctgccatggcaggggctc

SEQ ID NO: 4937446 - DNA, 25 bp, Homo sapien
ctctggaatgttggcggtgagggca

SEQ ID NO: 4937447 - DNA, 25 bp, Homo sapien
tctggaatgttggcggtgagggcag

SEQ ID NO: 4937448 - DNA, 25 bp, Homo sapien
ggggtgaccgtcactgacacctgga

SEQ ID NO: 4937449 - DNA, 25 bp, Homo sapien
gagcagacgtgtttgggtgtgagca

SEQ ID NO: 4937450 - DNA, 25 bp, Homo sapien
ctggacagtcctcgttgtgttcggg

SEQ ID NO: 4937451 - DNA, 25 bp, Homo sapien
gtgggaagcccacgggtgagcagac

SEQ ID NO: 4937452 - DNA, 25 bp, Homo sapien
tggccgagctccccgaacctcgcgc

SEQ ID NO: 4937453 - DNA, 25 bp, Homo sapien
tcgcgcgctctggaccgcggctggc

SEQ ID NO: 4937454 - DNA, 25 bp, Homo sapien
ctccccgaacctcgcgcgctctgga

SEQ ID NO: 4937455 - DNA, 25 bp, Homo sapien
ccgagctccccgaacctcgcgcgct

SEQ ID NO: 4937456 - DNA, 25 bp, Homo sapien
caggagcgtctggagttgggtgatg

SEQ ID NO: 4937457 - DNA, 25 bp, Homo sapien
tcccggcccacgtagaggagccagg

SEQ ID NO: 4937458 - DNA, 25 bp, Homo sapien
gtcaatcctccctttccggccagga

SEQ ID NO: 4937459 - DNA, 25 bp, Homo sapien
gccaggagctctgcaaggtcccgtg

SEQ ID NO: 4937460 - DNA, 25 bp, Homo sapien
cagggagttcaagactgaagtgaac

SEQ ID NO: 4937461 - DNA, 25 bp, Homo sapien
tgagccagggagttcaagactgaag

SEQ ID NO: 4937462 - DNA, 25 bp, Homo sapien
gccagggagttcaagactgaagtga

SEQ ID NO: 4937463 - DNA, 25 bp, Homo sapien
gagccagggagttcaagactgaagt

SEQ ID NO: 4937464 - DNA, 25 bp, Homo sapien
aggtcacaaaccaaagcagcctgtc

SEQ ID NO: 4937465 - DNA, 25 bp, Homo sapien
ctggaggtcacaaaccaaagcagcc

SEQ ID NO: 4937466 - DNA, 25 bp, Homo sapien
tggaggtcacaaaccaaagcagcct

SEQ ID NO: 4937467 - DNA, 25 bp, Homo sapien
gaggtcacaaaccaaagcagcctgt

SEQ ID NO: 4937468 - DNA, 25 bp, Homo sapien
tcgctccacacccagaagggcagcc

SEQ ID NO: 4937469 - DNA, 25 bp, Homo sapien
cagccagcagcactggcaagaagat

SEQ ID NO: 4937470 - DNA, 25 bp, Homo sapien
ccagcagcactggcaagaagatctt

SEQ ID NO: 4937471 - DNA, 25 bp, Homo sapien
gcagcactggcaagaagatcttcat

SEQ ID NO: 4937472 - DNA, 25 bp, Homo sapien
ctggttcaagcaggagaagcacatc

SEQ ID NO: 4937473 - DNA, 25 bp, Homo sapien
gttcaagcaggagaagcacatcagc

SEQ ID NO: 4937474 - DNA, 25 bp, Homo sapien
caagcaggagaagcacatcagcgag

SEQ ID NO: 4937475 - DNA, 25 bp, Homo sapien
ttcaagcaggagaagcacatcagcg

SEQ ID NO: 4937476 - DNA, 25 bp, Homo sapien
cagtagttgtcctggtcggagcaga

SEQ ID NO: 4937477 - DNA, 25 bp, Homo sapien
tcggcttcaggcagtacagattgct

SEQ ID NO: 4937478 - DNA, 25 bp, Homo sapien
actagcagacacagtcacgcagtag

SEQ ID NO: 4937479 - DNA, 25 bp, Homo sapien
gcagatggtcggcttcaggcagtac

SEQ ID NO: 4937480 - DNA, 25 bp, Homo sapien
ctgtggccaaatgtcacgagattcc

SEQ ID NO: 4937481 - DNA, 25 bp, Homo sapien
tcaggctgtggccaaatgtcacgag

SEQ ID NO: 4937482 - DNA, 25 bp, Homo sapien
gggcaggccggggaacaggtcttgc

SEQ ID NO: 4937483 - DNA, 25 bp, Homo sapien
caggccggggaacaggtcttgctca

SEQ ID NO: 4937484 - DNA, 25 bp, Homo sapien
ggaagccacaccaacattgacgcct

SEQ ID NO: 4937485 - DNA, 25 bp, Homo sapien
gaagccacaccaacattgacgcctt

SEQ ID NO: 4937486 - DNA, 25 bp, Homo sapien
agcagggtgacgcttgcccgcagcc

SEQ ID NO: 4937487 - DNA, 25 bp, Homo sapien
cggccgcactgaaattgcacagaaa

SEQ ID NO: 4937488 - DNA, 25 bp, Homo sapien
ctgaaattgcacagaaagctctggc

SEQ ID NO: 4937489 - DNA, 25 bp, Homo sapien
cgccatcggccgcactgaaattgca

SEQ ID NO: 4937490 - DNA, 25 bp, Homo sapien
cacagatcaggcacgtgaggagtca

SEQ ID NO: 4937491 - DNA, 25 bp, Homo sapien
ggaccctgtcagcatgtccatggga

SEQ ID NO: 4937492 - DNA, 25 bp, Homo sapien
gatgttggaccgtaagactccaggg

SEQ ID NO: 4937493 - DNA, 25 bp, Homo sapien
gcctagacccggaagtggcagaaac

SEQ ID NO: 4937494 - DNA, 25 bp, Homo sapien
caggaccctccaaacctggggtgct

SEQ ID NO: 4937495 - DNA, 25 bp, Homo sapien
ctctccccgcaaggggcagccacac

SEQ ID NO: 4937496 - DNA, 25 bp, Homo sapien
tgggccataccacagaagaccccag

SEQ ID NO: 4937497 - DNA, 25 bp, Homo sapien
tgtggctcaggggacgactcctcct

SEQ ID NO: 4937498 - DNA, 25 bp, Homo sapien
cccagcctgagcgtgctccttcttg

SEQ ID NO: 4937499 - DNA, 25 bp, Homo sapien
cattcccaagtcctacggccctggg

SEQ ID NO: 4937500 - DNA, 25 bp, Homo sapien
agcttttgtaccctctgcaccagcg

SEQ ID NO: 4937501 - DNA, 25 bp, Homo sapien
tgcaccagcgggtccagacagacac

SEQ ID NO: 4937502 - DNA, 25 bp, Homo sapien
tgctgcccagagcttctgcgtggga

SEQ ID NO: 4937503 - DNA, 25 bp, Homo sapien
agccctctgggcagcgcacagcacc

SEQ ID NO: 4937504 - DNA, 25 bp, Homo sapien
ctgcagtccaggcacggatgggtca

SEQ ID NO: 4937505 - DNA, 25 bp, Homo sapien
caactgcagacacggcggcctgggc

SEQ ID NO: 4937506 - DNA, 25 bp, Homo sapien
gatgccagagatggaagcgcaagtt

SEQ ID NO: 4937507 - DNA, 25 bp, Homo sapien
gtcagatccaggttcccggccatgg

SEQ ID NO: 4937508 - DNA, 25 bp, Homo sapien
gcgcaagttagctttagcagaaaca

SEQ ID NO: 4937509 - DNA, 25 bp, Homo sapien
tagaaattccatcatcgcccagcgc

SEQ ID NO: 4937510 - DNA, 25 bp, Homo sapien
ccgggacgggccgcccatcctccag

SEQ ID NO: 4937511 - DNA, 25 bp, Homo sapien
ccagaggctcatccgcgggcagatg

SEQ ID NO: 4937512 - DNA, 25 bp, Homo sapien
cagcgccgggacgggccgcccatcc

SEQ ID NO: 4937513 - DNA, 25 bp, Homo sapien
aggaagtccccacaggggttgagcg

SEQ ID NO: 4937514 - DNA, 25 bp, Homo sapien
tggcactgcccctggtgggtaaaca

SEQ ID NO: 4937515 - DNA, 25 bp, Homo sapien
aatagcctccgtaacaaggcggcca

SEQ ID NO: 4937516 - DNA, 25 bp, Homo sapien
gagctcagggtggttgcccagtgca

SEQ ID NO: 4937517 - DNA, 25 bp, Homo sapien
tagtaaatgcaggtgttcgcccaag

SEQ ID NO: 4937518 - DNA, 25 bp, Homo sapien
agatgccatggactctccaagcaga

SEQ ID NO: 4937519 - DNA, 25 bp, Homo sapien
aaatcagtcgagtgggacacaatca

SEQ ID NO: 4937520 - DNA, 25 bp, Homo sapien
tgctcgtgctctgactggcatgtaa

SEQ ID NO: 4937521 - DNA, 25 bp, Homo sapien
aaagccgtgctttcattatccatag

SEQ ID NO: 4937522 - DNA, 25 bp, Homo sapien
cttgatctgtggctggacgcacttt

SEQ ID NO: 4937523 - DNA, 25 bp, Homo sapien
tactattgagtatggatcaggcact

SEQ ID NO: 4937524 - DNA, 25 bp, Homo sapien
ggctggttctcccaaaggcatctgg

SEQ ID NO: 4937525 - DNA, 25 bp, Homo sapien
ggaactgtctccgtgtatctgctat

SEQ ID NO: 4937526 - DNA, 25 bp, Homo sapien
catgtccagcctaaagatcactttt

SEQ ID NO: 4937527 - DNA, 25 bp, Homo sapien
aagatatacaatggagtctctaaga

SEQ ID NO: 4937528 - DNA, 25 bp, Homo sapien
ttgttggccaagtgccctgtaagat

SEQ ID NO: 4937529 - DNA, 25 bp, Homo sapien
catgggggcacacattagtggctca

SEQ ID NO: 4937530 - DNA, 25 bp, Homo sapien
ggccaagtgccctgtaagatataca

SEQ ID NO: 4937531 - DNA, 25 bp, Homo sapien
tcagccaatattgcacacgacaacg

SEQ ID NO: 4937532 - DNA, 25 bp, Homo sapien
gccagtctgtggatcttgcaaggat

SEQ ID NO: 4937533 - DNA, 25 bp, Homo sapien
caaggaggcatgctgcttagtgctc

SEQ ID NO: 4937534 - DNA, 25 bp, Homo sapien
gaagacagaaacctcctggtctggg

SEQ ID NO: 4937535 - DNA, 25 bp, Homo sapien
tatcagtcgcaaagaaagagcaccc

SEQ ID NO: 4937536 - DNA, 25 bp, Homo sapien
ggagcgcctcaatgcacctcttgat

SEQ ID NO: 4937537 - DNA, 25 bp, Homo sapien
tcaccggaagcggagtttgttccca

SEQ ID NO: 4937538 - DNA, 25 bp, Homo sapien
gagcacccaattggacaaaaggcaa

SEQ ID NO: 4937539 - DNA, 25 bp, Homo sapien
ggatgtggccagggcagaggtcggg

SEQ ID NO: 4937540 - DNA, 25 bp, Homo sapien
ggccagggcagaggtcggggcttcc

SEQ ID NO: 4937541 - DNA, 25 bp, Homo sapien
gagatcaggggaaggatgtggccag

SEQ ID NO: 4937542 - DNA, 25 bp, Homo sapien
atgtggccagggcagaggtcggggc

SEQ ID NO: 4937543 - DNA, 25 bp, Homo sapien
tgcctcactgaattgcaggaattct

SEQ ID NO: 4937544 - DNA, 25 bp, Homo sapien
gcctcactgaattgcaggaattctg

SEQ ID NO: 4937545 - DNA, 25 bp, Homo sapien
cctcactgaattgcaggaattctgg

SEQ ID NO: 4937546 - DNA, 25 bp, Homo sapien
ccctgtgcgtcaccagctgcttggt

SEQ ID NO: 4937547 - DNA, 25 bp, Homo sapien
tgccgttgtggactcccagatctct

SEQ ID NO: 4937548 - DNA, 25 bp, Homo sapien
caagggagacctctgcaatgcggtg

SEQ ID NO: 4937549 - DNA, 25 bp, Homo sapien
ctcttgctgcaagggagacctctgc

SEQ ID NO: 4937550 - DNA, 25 bp, Homo sapien
gacctctgcaatgcggtggtcctgg

SEQ ID NO: 4937551 - DNA, 25 bp, Homo sapien
gagaggcgcaggctgtgagcattca

SEQ ID NO: 4937552 - DNA, 25 bp, Homo sapien
aggcgcaggctgtgagcattcagtg

SEQ ID NO: 4937553 - DNA, 25 bp, Homo sapien
gtgagcattcagtgagttacctgcc

SEQ ID NO: 4937554 - DNA, 25 bp, Homo sapien
gagcattcagtgagttacctgcctg

SEQ ID NO: 4937555 - DNA, 25 bp, Homo sapien
tctgcgctgctacagatgcttggcg

SEQ ID NO: 4937556 - DNA, 25 bp, Homo sapien
tctttggcagtgagtccctggggtg

SEQ ID NO: 4937557 - DNA, 25 bp, Homo sapien
tcctgcagcgtggtctcgtgcccct

SEQ ID NO: 4937558 - DNA, 25 bp, Homo sapien
tgtctcccagaaagtgagcgtcttt

SEQ ID NO: 4937559 - DNA, 25 bp, Homo sapien
gcagtagctgcacctgcttgctcat

SEQ ID NO: 4937560 - DNA, 25 bp, Homo sapien
gctcatacgtcgcatgtgtcattag

SEQ ID NO: 4937561 - DNA, 25 bp, Homo sapien
tgcacctgcttgctcatacgtcgca

SEQ ID NO: 4937562 - DNA, 25 bp, Homo sapien
gcttgctcatacgtcgcatgtgtca

SEQ ID NO: 4937563 - DNA, 25 bp, Homo sapien
tccatgggagtcttccatgattact

SEQ ID NO: 4937564 - DNA, 25 bp, Homo sapien
tgatgcagaagagataggacgccct

SEQ ID NO: 4937565 - DNA, 25 bp, Homo sapien
aggctcctccatgggagtcttccat

SEQ ID NO: 4937566 - DNA, 25 bp, Homo sapien
ttgtaagggcgagacagcagagact

SEQ ID NO: 4937567 - DNA, 25 bp, Homo sapien
tggttcccgtggtgccgagagaatc

SEQ ID NO: 4937568 - DNA, 25 bp, Homo sapien
gtggttcccgtggtgccgagagaat

SEQ ID NO: 4937569 - DNA, 25 bp, Homo sapien
tgagagtagagaaggtggttcccgt

SEQ ID NO: 4937570 - DNA, 25 bp, Homo sapien
gtagagaaggtggttcccgtggtgc

SEQ ID NO: 4937571 - DNA, 25 bp, Homo sapien
tccaatttttacagatacatcccag

SEQ ID NO: 4937572 - DNA, 25 bp, Homo sapien
aggtgttccaatttttacagataca

SEQ ID NO: 4937573 - DNA, 25 bp, Homo sapien
gttccaatttttacagatacatccc

SEQ ID NO: 4937574 - DNA, 25 bp, Homo sapien
caatttttacagatacatcccaggg

SEQ ID NO: 4937575 - DNA, 25 bp, Homo sapien
tctattctactgtggaaggcctggc

SEQ ID NO: 4937576 - DNA, 25 bp, Homo sapien
caagagcttttgacctatgagccac

SEQ ID NO: 4937577 - DNA, 25 bp, Homo sapien
tgttgcaaccctggaacgagttagg

SEQ ID NO: 4937578 - DNA, 25 bp, Homo sapien
accaggattctagagggtgcacccc

SEQ ID NO: 4937579 - DNA, 25 bp, Homo sapien
cagacgtcctagttgtgctgacagg

SEQ ID NO: 4937580 - DNA, 25 bp, Homo sapien
cagcgtttggtagtcatggaaagcc

SEQ ID NO: 4937581 - DNA, 25 bp, Homo sapien
ggaacttaaagaacccatgagccca

SEQ ID NO: 4937582 - DNA, 25 bp, Homo sapien
aaaccatgccggtcagggaacagga

SEQ ID NO: 4937583 - DNA, 25 bp, Homo sapien
ttttgggatggagtgtagctctgtc

SEQ ID NO: 4937584 - DNA, 25 bp, Homo sapien
acaagtgtagttctctctctttttt

SEQ ID NO: 4937585 - DNA, 25 bp, Homo sapien
tgggatggagtgtagctctgtcccc

SEQ ID NO: 4937586 - DNA, 25 bp, Homo sapien
ctcctaggttcgccattctcttgcc

SEQ ID NO: 4937587 - DNA, 25 bp, Homo sapien
aggcggttttctattttctggcctg

SEQ ID NO: 4937588 - DNA, 25 bp, Homo sapien
ataagaggcggttttctattttctg

SEQ ID NO: 4937589 - DNA, 25 bp, Homo sapien
tggtaaaagcagtggaggttctata

SEQ ID NO: 4937590 - DNA, 25 bp, Homo sapien
aagcagtggaggttctataagaggc

SEQ ID NO: 4937591 - DNA, 25 bp, Homo sapien
ggccattcagtctcccaagacagtt

SEQ ID NO: 4937592 - DNA, 25 bp, Homo sapien
gacagtttatgctggattcccaagg

SEQ ID NO: 4937593 - DNA, 25 bp, Homo sapien
ctcgcgcaatgttggtacgtgggaa

SEQ ID NO: 4937594 - DNA, 25 bp, Homo sapien
gatggagcgctgtcccttccagagt

SEQ ID NO: 4937595 - DNA, 25 bp, Homo sapien
ctgccaaacttatggattctcacta

SEQ ID NO: 4937596 - DNA, 25 bp, Homo sapien
tgtgaactgccaaacttatggattc

SEQ ID NO: 4937597 - DNA, 25 bp, Homo sapien
attctcactaggttatcaggcatac

SEQ ID NO: 4937598 - DNA, 25 bp, Homo sapien
ctcactaggttatcaggcatacatt

SEQ ID NO: 4937599 - DNA, 25 bp, Homo sapien
catgagtaaacagatgaggcacgcc

SEQ ID NO: 4937600 - DNA, 25 bp, Homo sapien
ggaaacccgcggcactgtgtaaata

SEQ ID NO: 4937601 - DNA, 25 bp, Homo sapien
tatatgtttcccgatgtgactcagg

SEQ ID NO: 4937602 - DNA, 25 bp, Homo sapien
aaataacaagtgatagtgccacccc

SEQ ID NO: 4937603 - DNA, 25 bp, Homo sapien
tagagctgatcagatcgacacagtg

SEQ ID NO: 4937604 - DNA, 25 bp, Homo sapien
taaacaacgccttactgcttgctgg

SEQ ID NO: 4937605 - DNA, 25 bp, Homo sapien
tgaattcaaccctcccaaaactgtg

SEQ ID NO: 4937606 - DNA, 25 bp, Homo sapien
cagcggctgagtcttcaacattgaa

SEQ ID NO: 4937607 - DNA, 25 bp, Homo sapien
ttcagaacattacacagcataactt

SEQ ID NO: 4937608 - DNA, 25 bp, Homo sapien
gcataacttcatttacctacctcta

SEQ ID NO: 4937609 - DNA, 25 bp, Homo sapien
cacactcatgaacaattcagaacat

SEQ ID NO: 4937610 - DNA, 25 bp, Homo sapien
cctctattccattgtactttcattg

SEQ ID NO: 4937611 - DNA, 25 bp, Homo sapien
aaaggctggctccttgtgtaagggc

SEQ ID NO: 4937612 - DNA, 25 bp, Homo sapien
aaggctggctccttgtgtaagggca

SEQ ID NO: 4937613 - DNA, 25 bp, Homo sapien
ccaaactgggatgttgtagaggaca

SEQ ID NO: 4937614 - DNA, 25 bp, Homo sapien
tatgctcactgcagatgagctatgg

SEQ ID NO: 4937615 - DNA, 25 bp, Homo sapien
agatcccgactggagcaattccccg

SEQ ID NO: 4937616 - DNA, 25 bp, Homo sapien
gatgaaaatccagacgacactccag

SEQ ID NO: 4937617 - DNA, 25 bp, Homo sapien
gcagccgattcgctgcacgaatggt

SEQ ID NO: 4937618 - DNA, 25 bp, Homo sapien
ggtgcctgatgtgtggccaaggaca

SEQ ID NO: 4937619 - DNA, 25 bp, Homo sapien
ccgattcgctgcacgaatggtgcct

SEQ ID NO: 4937620 - DNA, 25 bp, Homo sapien
tcgctgcacgaatggtgcctgatgt

SEQ ID NO: 4937621 - DNA, 25 bp, Homo sapien
taattggctcttggtattgcaggct

SEQ ID NO: 4937622 - DNA, 25 bp, Homo sapien
aggtttaattggctcttggtattgc

SEQ ID NO: 4937623 - DNA, 25 bp, Homo sapien
gctcttggtattgcaggctgtacag

SEQ ID NO: 4937624 - DNA, 25 bp, Homo sapien
ttggctcttggtattgcaggctgta

SEQ ID NO: 4937625 - DNA, 25 bp, Homo sapien
gacgacggctgtctcctcaaacagg

SEQ ID NO: 4937626 - DNA, 25 bp, Homo sapien
gacggctgtctcctcaaacagggac

SEQ ID NO: 4937627 - DNA, 25 bp, Homo sapien
acgacggctgtctcctcaaacagga

SEQ ID NO: 4937628 - DNA, 25 bp, Homo sapien
tcaaacaggaatcccgaggacgacg

SEQ ID NO: 4937629 - DNA, 25 bp, Homo sapien
ggagggtgcacagggttaggacgag

SEQ ID NO: 4937630 - DNA, 25 bp, Homo sapien
ggcgtcgtggcgcagccagcagacg

SEQ ID NO: 4937631 - DNA, 25 bp, Homo sapien
acagggttaggacgagcctctccat

SEQ ID NO: 4937632 - DNA, 25 bp, Homo sapien
gcgtcgtggcgcagccagcagacgc

SEQ ID NO: 4937633 - DNA, 25 bp, Homo sapien
agatgcagacttggtccagcgggct

SEQ ID NO: 4937634 - DNA, 25 bp, Homo sapien
ccacctcgttggagatgcagacttg

SEQ ID NO: 4937635 - DNA, 25 bp, Homo sapien
tgggcgggcactccgtccagctgct

SEQ ID NO: 4937636 - DNA, 25 bp, Homo sapien
cactggtagcagctcaggttgcgag

SEQ ID NO: 4937637 - DNA, 25 bp, Homo sapien
tgtcgttgggacatctgggagcaca

SEQ ID NO: 4937638 - DNA, 25 bp, Homo sapien
agcagcgcctggtgatcacgccttg

SEQ ID NO: 4937639 - DNA, 25 bp, Homo sapien
tttgctgagcaggacgcgtacactc

SEQ ID NO: 4937640 - DNA, 25 bp, Homo sapien
gggccggcgaccattcgaacttcat

SEQ ID NO: 4937641 - DNA, 25 bp, Homo sapien
aacagggccctgaggaggctgaggc

SEQ ID NO: 4937642 - DNA, 25 bp, Homo sapien
tcacaacagggccctgaggaggctg

SEQ ID NO: 4937643 - DNA, 25 bp, Homo sapien
gggccctgaggaggctgaggcccac

SEQ ID NO: 4937644 - DNA, 25 bp, Homo sapien
cagggccctgaggaggctgaggccc

SEQ ID NO: 4937645 - DNA, 25 bp, Homo sapien
tcacccacaccggaggcaccgtcct

SEQ ID NO: 4937646 - DNA, 25 bp, Homo sapien
ccatcacccacatcagaggcactgt

SEQ ID NO: 4937647 - DNA, 25 bp, Homo sapien
acccacatcagaggcaccgtccttc

SEQ ID NO: 4937648 - DNA, 25 bp, Homo sapien
gaggcaccgtccttctcatcaccca

SEQ ID NO: 4937649 - DNA, 25 bp, Homo sapien
ggctggtgtgttaccctgggacact

SEQ ID NO: 4937650 - DNA, 25 bp, Homo sapien
gctggtgcgttaccctgggacgttg

SEQ ID NO: 4937651 - DNA, 25 bp, Homo sapien
gtgtgttaccctgggacactgaaca

SEQ ID NO: 4937652 - DNA, 25 bp, Homo sapien
tggtgtgttaccctgggacactgaa

SEQ ID NO: 4937653 - DNA, 25 bp, Homo sapien
cacgtctcggtggaggtagatcccc

SEQ ID NO: 4937654 - DNA, 25 bp, Homo sapien
cattcactgagtaagccctggaggg

SEQ ID NO: 4937655 - DNA, 25 bp, Homo sapien
gaaggctgcggctcattatgtcacg

SEQ ID NO: 4937656 - DNA, 25 bp, Homo sapien
catagtctattccatcgagggtcac

SEQ ID NO: 4937657 - DNA, 25 bp, Homo sapien
tgcatacaccagcatgggccccagg

SEQ ID NO: 4937658 - DNA, 25 bp, Homo sapien
ctgcatacaccagcatgggccccag

SEQ ID NO: 4937659 - DNA, 25 bp, Homo sapien
tctgcatacaccagcatgggcccca

SEQ ID NO: 4937660 - DNA, 25 bp, Homo sapien
acgatgcggttgttggtgcagcccc

SEQ ID NO: 4937661 - DNA, 25 bp, Homo sapien
cgggacgggccgagacgatgcggtt

SEQ ID NO: 4937662 - DNA, 25 bp, Homo sapien
tctccaaacagcacaagacgctggc

SEQ ID NO: 4937663 - DNA, 25 bp, Homo sapien
gtgacctctgtcacttgttctgacc

SEQ ID NO: 4937664 - DNA, 25 bp, Homo sapien
cctcctcgttgctcactgtttgctg

SEQ ID NO: 4937665 - DNA, 25 bp, Homo sapien
ggcttccccgatgggcgtggaatct

SEQ ID NO: 4937666 - DNA, 25 bp, Homo sapien
gggcacattcccagtgctggtgcct

SEQ ID NO: 4937667 - DNA, 25 bp, Homo sapien
cagtgctggtgcctttgccgggctt

SEQ ID NO: 4937668 - DNA, 25 bp, Homo sapien
gtcctggctgccttcctcgctttcc

SEQ ID NO: 4937669 - DNA, 25 bp, Homo sapien
ctggctgccttcctcgctttcctca

SEQ ID NO: 4937670 - DNA, 25 bp, Homo sapien
tgccactgagtcctggctgccttcc

SEQ ID NO: 4937671 - DNA, 25 bp, Homo sapien
tggctgccttcctcgctttcctcac

SEQ ID NO: 4937672 - DNA, 25 bp, Homo sapien
ccgactcccggcacaagcctggtgg

SEQ ID NO: 4937673 - DNA, 25 bp, Homo sapien
ggcacgggatgttgttcccgccatc

SEQ ID NO: 4937674 - DNA, 25 bp, Homo sapien
aggggcctgcgtcgtctgctcagca

SEQ ID NO: 4937675 - DNA, 25 bp, Homo sapien
tcaagaggggcctgcgtcgtctgct

SEQ ID NO: 4937676 - DNA, 25 bp, Homo sapien
tacggctgacccctgttgcactcct

SEQ ID NO: 4937677 - DNA, 25 bp, Homo sapien
cggctgacccctgttgcactccttg

SEQ ID NO: 4937678 - DNA, 25 bp, Homo sapien
acggctgacccctgttgcactcctt

SEQ ID NO: 4937679 - DNA, 25 bp, Homo sapien
ggctgacccctgttgcactccttgg

SEQ ID NO: 4937680 - DNA, 25 bp, Homo sapien
cctcagttctgactgcggacagagc

SEQ ID NO: 4937681 - DNA, 25 bp, Homo sapien
tgactgcggacagagctgtctggtc

SEQ ID NO: 4937682 - DNA, 25 bp, Homo sapien
aagatagaagcagccgggtctcggg

SEQ ID NO: 4937683 - DNA, 25 bp, Homo sapien
tcctttcagctgtgcgatgacacag

SEQ ID NO: 4937684 - DNA, 25 bp, Homo sapien
agagttacgtctggctgaaccccgg

SEQ ID NO: 4937685 - DNA, 25 bp, Homo sapien
gaaaagctgaatggccgctggctga

SEQ ID NO: 4937686 - DNA, 25 bp, Homo sapien
tgaaccccggtcatcagcaaggtgc

SEQ ID NO: 4937687 - DNA, 25 bp, Homo sapien
gtgcgtgccgtgacctcactaccgt

SEQ ID NO: 4937688 - DNA, 25 bp, Homo sapien
gagacagcacgcagagcgggatggt

SEQ ID NO: 4937689 - DNA, 25 bp, Homo sapien
agacagcacgcagagcgggatggtc

SEQ ID NO: 4937690 - DNA, 25 bp, Homo sapien
ggagacagcacgcagagcgggatgg

SEQ ID NO: 4937691 - DNA, 25 bp, Homo sapien
tccgtcccctcggtaaggtgtgctc

SEQ ID NO: 4937692 - DNA, 25 bp, Homo sapien
ttctgtctgggtgtcagtggcacct

SEQ ID NO: 4937693 - DNA, 25 bp, Homo sapien
tcccttgtgccggtctttggccagc

SEQ ID NO: 4937694 - DNA, 25 bp, Homo sapien
ctctccgtcccctcggtaaggtgtg

SEQ ID NO: 4937695 - DNA, 25 bp, Homo sapien
acacgtatgcttgccgtgtttcctg

SEQ ID NO: 4937696 - DNA, 25 bp, Homo sapien
tttcctggaccgtctcagtgtcctg

SEQ ID NO: 4937697 - DNA, 25 bp, Homo sapien
gacgggacgagcagtgtggtgcaca

SEQ ID NO: 4937698 - DNA, 25 bp, Homo sapien
tcctggtgccagcaagagtgggtac

SEQ ID NO: 4937699 - DNA, 25 bp, Homo sapien
tcagaggccactaggagctgtttgc

SEQ ID NO: 4937700 - DNA, 25 bp, Homo sapien
tgggcaccactgaaactgcgggctg

SEQ ID NO: 4937701 - DNA, 25 bp, Homo sapien
actggcaaggagctgtccacgctgg

SEQ ID NO: 4937702 - DNA, 25 bp, Homo sapien
tggcaaggaaccgtcccactggcaa

SEQ ID NO: 4937703 - DNA, 25 bp, Homo sapien
tttatggacgaaggctaacagagct

SEQ ID NO: 4937704 - DNA, 25 bp, Homo sapien
ggtgccgtgtgactttatggacgaa

SEQ ID NO: 4937705 - DNA, 25 bp, Homo sapien
cctctctgaggggtgccgtgtgact

SEQ ID NO: 4937706 - DNA, 25 bp, Homo sapien
ctctggtgtggtcagccacagcctc

SEQ ID NO: 4937707 - DNA, 25 bp, Homo sapien
ggcttgcggtcaccatgggagaggc

SEQ ID NO: 4937708 - DNA, 25 bp, Homo sapien
tggcttgcggtcaccatgggagagg

SEQ ID NO: 4937709 - DNA, 25 bp, Homo sapien
gcgaggcagaacaacgcacccagaa

SEQ ID NO: 4937710 - DNA, 25 bp, Homo sapien
ggccagatcagggtcgcgaggccct

SEQ ID NO: 4937711 - DNA, 25 bp, Homo sapien
gttgcccagcgaggcagaacaacgc

SEQ ID NO: 4937712 - DNA, 25 bp, Homo sapien
ggatccacagttgcccagcgaggca

SEQ ID NO: 4937713 - DNA, 25 bp, Homo sapien
ttgcggggccatcaccaagcatgcg

SEQ ID NO: 4937714 - DNA, 25 bp, Homo sapien
gcggggccatcaccaagcatgcgtt

SEQ ID NO: 4937715 - DNA, 25 bp, Homo sapien
ggggccatcaccaagcatgcgtttc

SEQ ID NO: 4937716 - DNA, 25 bp, Homo sapien
ggccatcaccaagcatgcgtttcct

SEQ ID NO: 4937717 - DNA, 25 bp, Homo sapien
tgagggagccgtgcatttgtaactg

SEQ ID NO: 4937718 - DNA, 25 bp, Homo sapien
catggacggtgctgagaaattgatc

SEQ ID NO: 4937719 - DNA, 25 bp, Homo sapien
gaagattctggacacacttgctagc

SEQ ID NO: 4937720 - DNA, 25 bp, Homo sapien
tctactgagcagttcaccggtgatg

SEQ ID NO: 4937721 - DNA, 25 bp, Homo sapien
tgtacagggacacctactgagtgcc

SEQ ID NO: 4937722 - DNA, 25 bp, Homo sapien
cactcttatacagggactctgggtc

SEQ ID NO: 4937723 - DNA, 25 bp, Homo sapien
actctgggtccagctaagagacgca

SEQ ID NO: 4937724 - DNA, 25 bp, Homo sapien
aaggcagtgtgaaatttgaaacgga

SEQ ID NO: 4937725 - DNA, 25 bp, Homo sapien
cactgcacccgtgaacctgtagaag

SEQ ID NO: 4937726 - DNA, 25 bp, Homo sapien
tgcacccgtgaacctgtagaagaca

SEQ ID NO: 4937727 - DNA, 25 bp, Homo sapien
cccgtgaacctgtagaagacatgcg

SEQ ID NO: 4937728 - DNA, 25 bp, Homo sapien
tgaacctgtagaagacatgcggtac

SEQ ID NO: 4937729 - DNA, 25 bp, Homo sapien
caatggccagaccattgaaggctac

SEQ ID NO: 4937730 - DNA, 25 bp, Homo sapien
cacaatatcagctagacagtcaggt

SEQ ID NO: 4937731 - DNA, 25 bp, Homo sapien
tctgtaaagctcctaacactggccc

SEQ ID NO: 4937732 - DNA, 25 bp, Homo sapien
tgaaggctacatcgtaatactaacc

SEQ ID NO: 4937733 - DNA, 25 bp, Homo sapien
tgctgtgtccctgactctgagtcct

SEQ ID NO: 4937734 - DNA, 25 bp, Homo sapien
gctgtgtccctgactctgagtcctc

SEQ ID NO: 4937735 - DNA, 25 bp, Homo sapien
ctctggagctgcggtaagtgggatg

SEQ ID NO: 4937736 - DNA, 25 bp, Homo sapien
tggagctgcggtaagtgggatgaag

SEQ ID NO: 4937737 - DNA, 25 bp, Homo sapien
ctggccgcccgcacagcaagagggc

SEQ ID NO: 4937738 - DNA, 25 bp, Homo sapien
tggccgcccgcacagcaagagggca

SEQ ID NO: 4937739 - DNA, 25 bp, Homo sapien
ttcctcgtcgtagtcatctggcccg

SEQ ID NO: 4937740 - DNA, 25 bp, Homo sapien
catcttcctcgtcgtagtcatctgg

SEQ ID NO: 4937741 - DNA, 25 bp, Homo sapien
tcgtagtcatctggcccgtggtcct

SEQ ID NO: 4937742 - DNA, 25 bp, Homo sapien
tcgtcgtagtcatctggcccgtggt

SEQ ID NO: 4937743 - DNA, 25 bp, Homo sapien
acctggaggtgggtctgactcagtc

SEQ ID NO: 4937744 - DNA, 25 bp, Homo sapien
caggctcctgccgtggtcacagaaa

SEQ ID NO: 4937745 - DNA, 25 bp, Homo sapien
gaaacctggaggtgggtctgactca

SEQ ID NO: 4937746 - DNA, 25 bp, Homo sapien
gctcctgccgtggtcacagaaacct

SEQ ID NO: 4937747 - DNA, 25 bp, Homo sapien
aggttgcagcgctcgtccctgggca

SEQ ID NO: 4937748 - DNA, 25 bp, Homo sapien
ttgcaggtgtagcaccgcagcagca

SEQ ID NO: 4937749 - DNA, 25 bp, Homo sapien
tggccatgtgagcagttctgcgtca

SEQ ID NO: 4937750 - DNA, 25 bp, Homo sapien
tcccgtgggcaatgagggttgtgca

SEQ ID NO: 4937751 - DNA, 25 bp, Homo sapien
tctgtgcaccacgtggagtgggtgg

SEQ ID NO: 4937752 - DNA, 25 bp, Homo sapien
gtctgtgcaccacgtggagtgggtg

SEQ ID NO: 4937753 - DNA, 25 bp, Homo sapien
ccttgcctgttgggtcctggactcg

SEQ ID NO: 4937754 - DNA, 25 bp, Homo sapien
tccaaggccggcaaggaggttgagc

SEQ ID NO: 4937755 - DNA, 25 bp, Homo sapien
aggccggcaaggaggttgagcagga

SEQ ID NO: 4937756 - DNA, 25 bp, Homo sapien
tggcccccattgctccaaggccggc

SEQ ID NO: 4937757 - DNA, 25 bp, Homo sapien
ccattgctccaaggccggcaaggag

SEQ ID NO: 4937758 - DNA, 25 bp, Homo sapien
agagaacagttagcggaggcctccc

SEQ ID NO: 4937759 - DNA, 25 bp, Homo sapien
taggcagtgacttctgtcggcagcg

SEQ ID NO: 4937760 - DNA, 25 bp, Homo sapien
gagcagagacaggtattcccagcct

SEQ ID NO: 4937761 - DNA, 25 bp, Homo sapien
tactgccctagatggtcacctcaag

SEQ ID NO: 4937762 - DNA, 25 bp, Homo sapien
cggtgagtggtctgatggcggagac

SEQ ID NO: 4937763 - DNA, 25 bp, Homo sapien
gtgagtggtctgatggcggagaccc

SEQ ID NO: 4937764 - DNA, 25 bp, Homo sapien
tgagtggtctgatggcggagacccc

SEQ ID NO: 4937765 - DNA, 25 bp, Homo sapien
tgcggtgagtggtctgatggcggag

SEQ ID NO: 4937766 - DNA, 25 bp, Homo sapien
tcaggcgatggtccctggggaaccc

SEQ ID NO: 4937767 - DNA, 25 bp, Homo sapien
ctcaggcgatggtccctggggaacc

SEQ ID NO: 4937768 - DNA, 25 bp, Homo sapien
ccaaagtgctcaggcgatggtccct

SEQ ID NO: 4937769 - DNA, 25 bp, Homo sapien
aagtgctcaggcgatggtccctggg

SEQ ID NO: 4937770 - DNA, 25 bp, Homo sapien
atcccagatcccggacctgggcgcc

SEQ ID NO: 4937771 - DNA, 25 bp, Homo sapien
ttgctcctgcggctgacatcccaga

SEQ ID NO: 4937772 - DNA, 25 bp, Homo sapien
tgctcctgcggctgacatcccagat

SEQ ID NO: 4937773 - DNA, 25 bp, Homo sapien
ccagatcccggacctgggcgcccac

SEQ ID NO: 4937774 - DNA, 25 bp, Homo sapien
ttagtctagacggggtttcagcgtg

SEQ ID NO: 4937775 - DNA, 25 bp, Homo sapien
agtctagacggggtttcagcgtgtt

SEQ ID NO: 4937776 - DNA, 25 bp, Homo sapien
tagtctagacggggtttcagcgtgt

SEQ ID NO: 4937777 - DNA, 25 bp, Homo sapien
gctgggcactgtctcggcctttcgt

SEQ ID NO: 4937778 - DNA, 25 bp, Homo sapien
ctgtggtggtaccaggcacacccta

SEQ ID NO: 4937779 - DNA, 25 bp, Homo sapien
caccctatccgctgggtgctcatga

SEQ ID NO: 4937780 - DNA, 25 bp, Homo sapien
actgtctcggcctttcgtgcgtcct

SEQ ID NO: 4937781 - DNA, 25 bp, Homo sapien
cgggccctaccaggactgctggagg

SEQ ID NO: 4937782 - DNA, 25 bp, Homo sapien
aggacctcccgctgcagagcgcgga

SEQ ID NO: 4937783 - DNA, 25 bp, Homo sapien
aaaggagagccctagatgcgggacc

SEQ ID NO: 4937784 - DNA, 25 bp, Homo sapien
agacgagaggcgacgaggacctccc

SEQ ID NO: 4937785 - DNA, 25 bp, Homo sapien
gctcaaagccgggtcttgccacatc

SEQ ID NO: 4937786 - DNA, 25 bp, Homo sapien
gcgcccgggaggtgctcaaagccgg

SEQ ID NO: 4937787 - DNA, 25 bp, Homo sapien
acgctgcgcgtcctgggccggaggc

SEQ ID NO: 4937788 - DNA, 25 bp, Homo sapien
gcagagctaggtcggcctcggggcc

SEQ ID NO: 4937789 - DNA, 25 bp, Homo sapien
taatatgaagctctgggtatccgtg

SEQ ID NO: 4937790 - DNA, 25 bp, Homo sapien
aatctgcactaaaacagcctgctgg

SEQ ID NO: 4937791 - DNA, 25 bp, Homo sapien
ggtcccgtgcgtgctcctagttaga

SEQ ID NO: 4937792 - DNA, 25 bp, Homo sapien
ggttctgtcgtgcaactccagcgta

SEQ ID NO: 4937793 - DNA, 25 bp, Homo sapien
ccagacacttgtcactgcacgtgtg

SEQ ID NO: 4937794 - DNA, 25 bp, Homo sapien
agacacttgtcactgcacgtgtggc

SEQ ID NO: 4937795 - DNA, 25 bp, Homo sapien
tggcagtctccttatgcgacagggt

SEQ ID NO: 4937796 - DNA, 25 bp, Homo sapien
cagtctccttatgcgacagggtctc

SEQ ID NO: 4937797 - DNA, 25 bp, Homo sapien
gaccagctgtttgcctcatgggcag

SEQ ID NO: 4937798 - DNA, 25 bp, Homo sapien
ggagctggagaaacggcagctctcc

SEQ ID NO: 4937799 - DNA, 25 bp, Homo sapien
agcacagaagaccagtcgaccagct

SEQ ID NO: 4937800 - DNA, 25 bp, Homo sapien
catggcgggaacctatctggctctc

SEQ ID NO: 4937801 - DNA, 25 bp, Homo sapien
tgtcgtaagtgacacaactcaacac

SEQ ID NO: 4937802 - DNA, 25 bp, Homo sapien
ttgaccctaggtagaaagtggagct

SEQ ID NO: 4937803 - DNA, 25 bp, Homo sapien
agggaccacacgtgcccagtggaga

SEQ ID NO: 4937804 - DNA, 25 bp, Homo sapien
cctcatgagtgcaggtaacacataa

SEQ ID NO: 4937805 - DNA, 25 bp, Homo sapien
gggttccgggtctgcacaccatgtc

SEQ ID NO: 4937806 - DNA, 25 bp, Homo sapien
tggttcctgccgtagtctccttctc

SEQ ID NO: 4937807 - DNA, 25 bp, Homo sapien
tccttctccaccatactgggcttgg

SEQ ID NO: 4937808 - DNA, 25 bp, Homo sapien
cagtcaccgtgctttgaagctacag

SEQ ID NO: 4937809 - DNA, 25 bp, Homo sapien
cccagcgtgggactgatgctctgca

SEQ ID NO: 4937810 - DNA, 25 bp, Homo sapien
ggccccacttcctcaatggcttgct

SEQ ID NO: 4937811 - DNA, 25 bp, Homo sapien
tcaatggcttgcttcccacgcacct

SEQ ID NO: 4937812 - DNA, 25 bp, Homo sapien
ctcccagcgtgggactgatgctctg

SEQ ID NO: 4937813 - DNA, 25 bp, Homo sapien
tgtcttgtgcttaaagatccgccca

SEQ ID NO: 4937814 - DNA, 25 bp, Homo sapien
ccacagtgcgtgcattcgtagggct

SEQ ID NO: 4937815 - DNA, 25 bp, Homo sapien
tcaggagattggagccgcagttaaa

SEQ ID NO: 4937816 - DNA, 25 bp, Homo sapien
cttcttccgagggtggcgtttctga

SEQ ID NO: 4937817 - DNA, 25 bp, Homo sapien
aagtccatccaggtaagtcaggccg

SEQ ID NO: 4937818 - DNA, 25 bp, Homo sapien
tgaatactccctggtctctggtgct

SEQ ID NO: 4937819 - DNA, 25 bp, Homo sapien
ccatcgggaacttggaaaatgctct

SEQ ID NO: 4937820 - DNA, 25 bp, Homo sapien
aaaggcttaagcagagtggacatca

SEQ ID NO: 4937821 - DNA, 25 bp, Homo sapien
gactgaagcatcctcccagtgggag

SEQ ID NO: 4937822 - DNA, 25 bp, Homo sapien
cactctgcgtgtggaatgtgcttcc

SEQ ID NO: 4937823 - DNA, 25 bp, Homo sapien
gaccgcggcaggaaaaatgtgttaa

SEQ ID NO: 4937824 - DNA, 25 bp, Homo sapien
gacaggcaggaatattacagccctc

SEQ ID NO: 4937825 - DNA, 25 bp, Homo sapien
ggcccgcaggcgagcacagccacac

SEQ ID NO: 4937826 - DNA, 25 bp, Homo sapien
gcctcaacccaaacaaaggcagggc

SEQ ID NO: 4937827 - DNA, 25 bp, Homo sapien
acagcctcaacccaaacaaaggcag

SEQ ID NO: 4937828 - DNA, 25 bp, Homo sapien
aacacagcctcaacccaaacaaagg

SEQ ID NO: 4937829 - DNA, 25 bp, Homo sapien
ggaccacgggccattgagaagccac

SEQ ID NO: 4937830 - DNA, 25 bp, Homo sapien
acgaaggccgtgcttccagcagcga

SEQ ID NO: 4937831 - DNA, 25 bp, Homo sapien
ccccattgggaccacgggccattga

SEQ ID NO: 4937832 - DNA, 25 bp, Homo sapien
cattgagaagccacgaaggccgtgc

SEQ ID NO: 4937833 - DNA, 25 bp, Homo sapien
tccatttctgggagtgcgagtattc

SEQ ID NO: 4937834 - DNA, 25 bp, Homo sapien
ttctgggagtgcgagtattcctctc

SEQ ID NO: 4937835 - DNA, 25 bp, Homo sapien
tgggagtgcgagtattcctctcctg

SEQ ID NO: 4937836 - DNA, 25 bp, Homo sapien
tatgtccatttctgggagtgcgagt

SEQ ID NO: 4937837 - DNA, 25 bp, Homo sapien
tgctgcgctggtgctgactgtgcct

SEQ ID NO: 4937838 - DNA, 25 bp, Homo sapien
aagtccttcaaagcaactcttccga

SEQ ID NO: 4937839 - DNA, 25 bp, Homo sapien
gagtctacaatccaggtcggccaaa

SEQ ID NO: 4937840 - DNA, 25 bp, Homo sapien
cacgtcacacgtgctctgatgcctg

SEQ ID NO: 4937841 - DNA, 25 bp, Homo sapien
cgttggcatgaactgcagacgccac

SEQ ID NO: 4937842 - DNA, 25 bp, Homo sapien
atgaactgcagacgccacgctctgc

SEQ ID NO: 4937843 - DNA, 25 bp, Homo sapien
tggcatgaactgcagacgccacgct

SEQ ID NO: 4937844 - DNA, 25 bp, Homo sapien
agacgccacgctctgcggccaagag

SEQ ID NO: 4937845 - DNA, 25 bp, Homo sapien
gcctgacccttcatcggagaagcgt

SEQ ID NO: 4937846 - DNA, 25 bp, Homo sapien
gccacgctcgttcattcatatgcca

SEQ ID NO: 4937847 - DNA, 25 bp, Homo sapien
tcttcacgggagagctagttgttta

SEQ ID NO: 4937848 - DNA, 25 bp, Homo sapien
agaagcgtgcccacctgtgctctag

SEQ ID NO: 4937849 - DNA, 25 bp, Homo sapien
gaagtggataagtcacctgtgcctt

SEQ ID NO: 4937850 - DNA, 25 bp, Homo sapien
taacctaggttggaaacagcccaca

SEQ ID NO: 4937851 - DNA, 25 bp, Homo sapien
tgagatgtcaatccacacctgggaa

SEQ ID NO: 4937852 - DNA, 25 bp, Homo sapien
gaatccgtcctattggccctaaata

SEQ ID NO: 4937853 - DNA, 25 bp, Homo sapien
ctgaggtggtcctgccagccatgcg

SEQ ID NO: 4937854 - DNA, 25 bp, Homo sapien
cagccatgcgctgctgcaggcgtct

SEQ ID NO: 4937855 - DNA, 25 bp, Homo sapien
aggtggtcctgccagccatgcgctg

SEQ ID NO: 4937856 - DNA, 25 bp, Homo sapien
ctgcctgctgctagagaggctgagg

SEQ ID NO: 4937857 - DNA, 25 bp, Homo sapien
agagctatgctcttgacccactacg

SEQ ID NO: 4937858 - DNA, 25 bp, Homo sapien
tacgtgcgtcctagaaatcaaagac

SEQ ID NO: 4937859 - DNA, 25 bp, Homo sapien
cacagcccctgacttgagagctatg

SEQ ID NO: 4937860 - DNA, 25 bp, Homo sapien
tccagagtgagggtcaagtccacag

SEQ ID NO: 4937861 - DNA, 25 bp, Homo sapien
tcatggcgatggattctgtgtgcgt

SEQ ID NO: 4937862 - DNA, 25 bp, Homo sapien
tgtgcgtgtctcctcgagctgggct

SEQ ID NO: 4937863 - DNA, 25 bp, Homo sapien
cgtgactttcctcctgatggtcgaa

SEQ ID NO: 4937864 - DNA, 25 bp, Homo sapien
caccttttcagcatcggatgtggct

SEQ ID NO: 4937865 - DNA, 25 bp, Homo sapien
cgttaacccgtgcaccccagggctg

SEQ ID NO: 4937866 - DNA, 25 bp, Homo sapien
gtggaagtgggcgttaacccgtgca

SEQ ID NO: 4937867 - DNA, 25 bp, Homo sapien
ggttcatgaggaagtgctccctgtt

SEQ ID NO: 4937868 - DNA, 25 bp, Homo sapien
gtgggagggtgtcagatgtgtaagc

SEQ ID NO: 4937869 - DNA, 25 bp, Homo sapien
tggcttaaatttgggttgagtggaa

SEQ ID NO: 4937870 - DNA, 25 bp, Homo sapien
tggtaaagaccacactctgaaagca

SEQ ID NO: 4937871 - DNA, 25 bp, Homo sapien
ggttcctctgttggtaaagaccaca

SEQ ID NO: 4937872 - DNA, 25 bp, Homo sapien
tctgaaagcaagaagatggcttaaa

SEQ ID NO: 4937873 - DNA, 25 bp, Homo sapien
aatatcttctgaatacatgagaagt

SEQ ID NO: 4937874 - DNA, 25 bp, Homo sapien
atatcttctgaatacatgagaagtg

SEQ ID NO: 4937875 - DNA, 25 bp, Homo sapien
gaggctgcttcttatgcatatttca

SEQ ID NO: 4937876 - DNA, 25 bp, Homo sapien
tcttatgcatatttcatctggaact

SEQ ID NO: 4937877 - DNA, 25 bp, Homo sapien
tttgaggctgcttcttatgcatatt

SEQ ID NO: 4937878 - DNA, 25 bp, Homo sapien
tgcttcttatgcatatttcatctgg

SEQ ID NO: 4937879 - DNA, 25 bp, Homo sapien
ttcttctctttccagcgcttttctt

SEQ ID NO: 4937880 - DNA, 25 bp, Homo sapien
ctgctgcacagaaggaggttccttt

SEQ ID NO: 4937881 - DNA, 25 bp, Homo sapien
agcctgctgcacagaaggaggttcc

SEQ ID NO: 4937882 - DNA, 25 bp, Homo sapien
cttctctttccagcgcttttcttct

SEQ ID NO: 4937883 - DNA, 25 bp, Homo sapien
ttgaagaaatttgggaaccaagtga

SEQ ID NO: 4937884 - DNA, 25 bp, Homo sapien
acgctgacacttggctgaaaggtcc

SEQ ID NO: 4937885 - DNA, 25 bp, Homo sapien
cacaacatttgaggttctctgcact

SEQ ID NO: 4937886 - DNA, 25 bp, Homo sapien
gctggtccgggtggccaagagaggc

SEQ ID NO: 4937887 - DNA, 25 bp, Homo sapien
gatcacatctcagcgccccaaatgg

SEQ ID NO: 4937888 - DNA, 25 bp, Homo sapien
caacaggcctaagtcgctgatcggc

SEQ ID NO: 4937889 - DNA, 25 bp, Homo sapien
agaaacgcaggtggaccccaccaca

SEQ ID NO: 4937890 - DNA, 25 bp, Homo sapien
cactgggaatgaaacccaggtacac

SEQ ID NO: 4937891 - DNA, 25 bp, Homo sapien
gctctgtaagcgtgaggctccctgc

SEQ ID NO: 4937892 - DNA, 25 bp, Homo sapien
gggacacggcctttctcccggtgca

SEQ ID NO: 4937893 - DNA, 25 bp, Homo sapien
tggacctcagctgttcctcattgac

SEQ ID NO: 4937894 - DNA, 25 bp, Homo sapien
gggctccctgaccacgtggctaggt

SEQ ID NO: 4937895 - DNA, 25 bp, Homo sapien
gaatccatttggctgagcggtggcc

SEQ ID NO: 4937896 - DNA, 25 bp, Homo sapien
agtaactgggaaatgggacatctgc

SEQ ID NO: 4937897 - DNA, 25 bp, Homo sapien
gccaagaccacagctgttacaggag

SEQ ID NO: 4937898 - DNA, 25 bp, Homo sapien
tctatcagagtaatgctcagcagct

SEQ ID NO: 4937899 - DNA, 25 bp, Homo sapien
tcctcgggatgtgtccgcagcgatg

SEQ ID NO: 4937900 - DNA, 25 bp, Homo sapien
gaggatgttacaggttccccaaagc

SEQ ID NO: 4937901 - DNA, 25 bp, Homo sapien
tctgtgcttacgacctgaaaagaga

SEQ ID NO: 4937902 - DNA, 25 bp, Homo sapien
gagttgcttccacgttcagctcgcg

SEQ ID NO: 4937903 - DNA, 25 bp, Homo sapien
gcgcgccggacggaagtgtccggcc

SEQ ID NO: 4937904 - DNA, 25 bp, Homo sapien
cgggaggaggacgccgcgcgccgga

SEQ ID NO: 4937905 - DNA, 25 bp, Homo sapien
cgcgcgccggacggaagtgtccggc

SEQ ID NO: 4937906 - DNA, 25 bp, Homo sapien
ccgcgcgccggacggaagtgtccgg

SEQ ID NO: 4937907 - DNA, 25 bp, Homo sapien
gatctaagaacagcagacagtgcct

SEQ ID NO: 4937908 - DNA, 25 bp, Homo sapien
gacacctggtaaaagggcctgctcg

SEQ ID NO: 4937909 - DNA, 25 bp, Homo sapien
gagaagagacgtttccagagggcaa

SEQ ID NO: 4937910 - DNA, 25 bp, Homo sapien
taatgatgggaagggtcaggtcacc

SEQ ID NO: 4937911 - DNA, 25 bp, Homo sapien
tccctgagacctgctgaaggtgtca

SEQ ID NO: 4937912 - DNA, 25 bp, Homo sapien
cttccctgagacctgctgaaggtgt

SEQ ID NO: 4937913 - DNA, 25 bp, Homo sapien
ctgagacctgctgaaggtgtcacac

SEQ ID NO: 4937914 - DNA, 25 bp, Homo sapien
gacctgctgaaggtgtcacacctgg

SEQ ID NO: 4937915 - DNA, 25 bp, Homo sapien
gctgaggctcgtggtgctgggttcc

SEQ ID NO: 4937916 - DNA, 25 bp, Homo sapien
ggactcctgaatgtcccctagggct

SEQ ID NO: 4937917 - DNA, 25 bp, Homo sapien
tgtccctggtgatgagagactgaca

SEQ ID NO: 4937918 - DNA, 25 bp, Homo sapien
gagagactgacaggggacgggacag

SEQ ID NO: 4937919 - DNA, 25 bp, Homo sapien
cctgcagaaactggcctgcagccac

SEQ ID NO: 4937920 - DNA, 25 bp, Homo sapien
cctgtgctgtgccaagatgatctgc

SEQ ID NO: 4937921 - DNA, 25 bp, Homo sapien
tgcagccacctcagtgtgtgtcctg

SEQ ID NO: 4937922 - DNA, 25 bp, Homo sapien
gggcgtcagtttcttatcctgcaga

SEQ ID NO: 4937923 - DNA, 25 bp, Homo sapien
tggaagttgggacagtagctgccca

SEQ ID NO: 4937924 - DNA, 25 bp, Homo sapien
gcagaggaagctggaaacgcccaga

SEQ ID NO: 4937925 - DNA, 25 bp, Homo sapien
agttccagaaacagcgaggtctccc

SEQ ID NO: 4937926 - DNA, 25 bp, Homo sapien
gaggtctcccctgcttaggaatctg

SEQ ID NO: 4937927 - DNA, 25 bp, Homo sapien
ggggacaggcggcaggtgggtgctt

SEQ ID NO: 4937928 - DNA, 25 bp, Homo sapien
caggcggcaggtgggtgctttcctg

SEQ ID NO: 4937929 - DNA, 25 bp, Homo sapien
acaggcggcaggtgggtgctttcct

SEQ ID NO: 4937930 - DNA, 25 bp, Homo sapien
ggacaggcggcaggtgggtgctttc

SEQ ID NO: 4937931 - DNA, 25 bp, Homo sapien
ggtcttccaagtggaggtgaggtgg

SEQ ID NO: 4937932 - DNA, 25 bp, Homo sapien
gctggtcttccaagtggaggtgagg

SEQ ID NO: 4937933 - DNA, 25 bp, Homo sapien
ttccaagtggaggtgaggtggctgt

SEQ ID NO: 4937934 - DNA, 25 bp, Homo sapien
gggctggtcttccaagtggaggtga

SEQ ID NO: 4937935 - DNA, 25 bp, Homo sapien
gtgtggcccgaactggagaaacacc

SEQ ID NO: 4937936 - DNA, 25 bp, Homo sapien
cacctttgccctgcgctgggacacc

SEQ ID NO: 4937937 - DNA, 25 bp, Homo sapien
tccagcgccatgctcctacagaggg

SEQ ID NO: 4937938 - DNA, 25 bp, Homo sapien
cgctgggacaccactggagaggacc

SEQ ID NO: 4937939 - DNA, 25 bp, Homo sapien
taccctccccattgtggagacaggc

SEQ ID NO: 4937940 - DNA, 25 bp, Homo sapien
tggagatccaggtcggacggctggg

SEQ ID NO: 4937941 - DNA, 25 bp, Homo sapien
acttcctctacgtcttggagatcca

SEQ ID NO: 4937942 - DNA, 25 bp, Homo sapien
cagaaggtgtctctgccgatctcca

SEQ ID NO: 4937943 - DNA, 25 bp, Homo sapien
acggctgggagagcaccttagggct

SEQ ID NO: 4937944 - DNA, 25 bp, Homo sapien
ctggtcccccagtaacccgattctg

SEQ ID NO: 4937945 - DNA, 25 bp, Homo sapien
gcctggcacgcgcagagctctggtc

SEQ ID NO: 4937946 - DNA, 25 bp, Homo sapien
agaggtgggcattgtgaggagcctg

SEQ ID NO: 4937947 - DNA, 25 bp, Homo sapien
cagtaacccgattctgctcactcac

SEQ ID NO: 4937948 - DNA, 25 bp, Homo sapien
gcctcgggaagcatcagtaactgga

SEQ ID NO: 4937949 - DNA, 25 bp, Homo sapien
acacaggataactcgtggatctggg

SEQ ID NO: 4937950 - DNA, 25 bp, Homo sapien
gggacacaggataactcgtggatct

SEQ ID NO: 4937951 - DNA, 25 bp, Homo sapien
tgcagtcaccgcctcgggaagcatc

SEQ ID NO: 4937952 - DNA, 25 bp, Homo sapien
ccgcccagatgtgggcgagggctca

SEQ ID NO: 4937953 - DNA, 25 bp, Homo sapien
tatcactaacatcgcccagagggaa

SEQ ID NO: 4937954 - DNA, 25 bp, Homo sapien
aatccagccatatcactaacatcgc

SEQ ID NO: 4937955 - DNA, 25 bp, Homo sapien
agggctcagcactgttaaatccagc

SEQ ID NO: 4937956 - DNA, 25 bp, Homo sapien
gccacagtggcaagacagaccatgg

SEQ ID NO: 4937957 - DNA, 25 bp, Homo sapien
gggtcacccttagccaggaggaagc

SEQ ID NO: 4937958 - DNA, 25 bp, Homo sapien
aggagcttcccacgcaaatctctgg

SEQ ID NO: 4937959 - DNA, 25 bp, Homo sapien
aaagcccttgccgaggatgtggtcc

SEQ ID NO: 4937960 - DNA, 25 bp, Homo sapien
gacaagcggacaggggctcggagtg

SEQ ID NO: 4937961 - DNA, 25 bp, Homo sapien
cggacaggggctcggagtgccgtgc

SEQ ID NO: 4937962 - DNA, 25 bp, Homo sapien
gggctcggagtgccgtgcccaggag

SEQ ID NO: 4937963 - DNA, 25 bp, Homo sapien
gtggatgggagacaagcggacaggg

SEQ ID NO: 4937964 - DNA, 25 bp, Homo sapien
ctgaaatgagaaacggcagaggcgg

SEQ ID NO: 4937965 - DNA, 25 bp, Homo sapien
atgcccccaccgtggcacggaggga

SEQ ID NO: 4937966 - DNA, 25 bp, Homo sapien
agaaacggcagaggcggatagtacc

SEQ ID NO: 4937967 - DNA, 25 bp, Homo sapien
gaggcggatagtacccgcatgcccc

SEQ ID NO: 4937968 - DNA, 25 bp, Homo sapien
cgcccgccccctcgtcaggggcctg

SEQ ID NO: 4937969 - DNA, 25 bp, Homo sapien
cctcaggaggctgcgcagcgccccg

SEQ ID NO: 4937970 - DNA, 25 bp, Homo sapien
ctgggcgcaagggacggccccaggc

SEQ ID NO: 4937971 - DNA, 25 bp, Homo sapien
gctggattcaggcccgaagccggcg

SEQ ID NO: 4937972 - DNA, 25 bp, Homo sapien
tggattcaggcccgaagccggcgct

SEQ ID NO: 4937973 - DNA, 25 bp, Homo sapien
ctggattcaggcccgaagccggcgc

SEQ ID NO: 4937974 - DNA, 25 bp, Homo sapien
tcaggagcagcgagttatacttgaa

SEQ ID NO: 4937975 - DNA, 25 bp, Homo sapien
ccgaagttgactcccagctcggcag

SEQ ID NO: 4937976 - DNA, 25 bp, Homo sapien
tatacttgaaactcttgccgcaggc

SEQ ID NO: 4937977 - DNA, 25 bp, Homo sapien
gccgctgcttgctgcacgagcgtca

SEQ ID NO: 4937978 - DNA, 25 bp, Homo sapien
tgaagcccgaccagccgcggaagcg

SEQ ID NO: 4937979 - DNA, 25 bp, Homo sapien
tggatgaagcccgaccagccgcgga

SEQ ID NO: 4937980 - DNA, 25 bp, Homo sapien
gtgctggatgaagcccgaccagccg

SEQ ID NO: 4937981 - DNA, 25 bp, Homo sapien
ggtgctggatgaagcccgaccagcc

SEQ ID NO: 4937982 - DNA, 25 bp, Homo sapien
aaggcgcggccgcactggccgcact

SEQ ID NO: 4937983 - DNA, 25 bp, Homo sapien
cgcggccgcactggccgcactcgta

SEQ ID NO: 4937984 - DNA, 25 bp, Homo sapien
ctgcgtgaagtgcgagctgtggctg

SEQ ID NO: 4937985 - DNA, 25 bp, Homo sapien
gcgtgaagtgcgagctgtggctgaa

SEQ ID NO: 4937986 - DNA, 25 bp, Homo sapien
gtgctcgatgagcacggagctccag

SEQ ID NO: 4937987 - DNA, 25 bp, Homo sapien
acggagctccagatgaaggccttgc

SEQ ID NO: 4937988 - DNA, 25 bp, Homo sapien
tggtgctcgatgagcacggagctcc

SEQ ID NO: 4937989 - DNA, 25 bp, Homo sapien
gctcgatgagcacggagctccagat

SEQ ID NO: 4937990 - DNA, 25 bp, Homo sapien
gcgagcggccgcggaaggctttgcc

SEQ ID NO: 4937991 - DNA, 25 bp, Homo sapien
cgcaggtgccggaagaagtgcgagc

SEQ ID NO: 4937992 - DNA, 25 bp, Homo sapien
gaagaagtgcgagcggccgcggaag

SEQ ID NO: 4937993 - DNA, 25 bp, Homo sapien
gcaggcgccacacgcgaagggcttc

SEQ ID NO: 4937994 - DNA, 25 bp, Homo sapien
gaatttattccggacacgtggcatg

SEQ ID NO: 4937995 - DNA, 25 bp, Homo sapien
tattccggacacgtggcatgcggtg

SEQ ID NO: 4937996 - DNA, 25 bp, Homo sapien
tttattccggacacgtggcatgcgg

SEQ ID NO: 4937997 - DNA, 25 bp, Homo sapien
aagaatttattccggacacgtggca

SEQ ID NO: 4937998 - DNA, 25 bp, Homo sapien
gcgctggtggccatagggcccccag

SEQ ID NO: 4937999 - DNA, 25 bp, Homo sapien
gagcgctggtggccatagggccccc

SEQ ID NO: 4938000 - DNA, 25 bp, Homo sapien
cagagcgctggtggccatagggccc

SEQ ID NO: 4938001 - DNA, 25 bp, Homo sapien
ccagagcgctggtggccatagggcc

SEQ ID NO: 4938002 - DNA, 25 bp, Homo sapien
cagcccgcacccctaaactcgttct

SEQ ID NO: 4938003 - DNA, 25 bp, Homo sapien
ctccagcccgcacccctaaactcgt

SEQ ID NO: 4938004 - DNA, 25 bp, Homo sapien
gcccgcacccctaaactcgttctca

SEQ ID NO: 4938005 - DNA, 25 bp, Homo sapien
ggcctgtgagatcactgtcctgttg

SEQ ID NO: 4938006 - DNA, 25 bp, Homo sapien
tccccgctttttggcggtgtctgcg

SEQ ID NO: 4938007 - DNA, 25 bp, Homo sapien
ccaggtgtgcccgtggtgggcctgt

SEQ ID NO: 4938008 - DNA, 25 bp, Homo sapien
tgaagacgaaggctaccgtccccgc

SEQ ID NO: 4938009 - DNA, 25 bp, Homo sapien
agatccctggtcacttcggggagga

SEQ ID NO: 4938010 - DNA, 25 bp, Homo sapien
cttggctcccagataccatgggatc

SEQ ID NO: 4938011 - DNA, 25 bp, Homo sapien
tgctccaggtggtctgcgtccaggt

SEQ ID NO: 4938012 - DNA, 25 bp, Homo sapien
gagattggccgttgagctggagatg

SEQ ID NO: 4938013 - DNA, 25 bp, Homo sapien
catccctggtgacggccctggcatt

SEQ ID NO: 4938014 - DNA, 25 bp, Homo sapien
gagatgggtgtttcactccctgctg

SEQ ID NO: 4938015 - DNA, 25 bp, Homo sapien
ttgcttaaaggttttgcggtggtca

SEQ ID NO: 4938016 - DNA, 25 bp, Homo sapien
ctcgtggtgaatcccttggctacgg

SEQ ID NO: 4938017 - DNA, 25 bp, Homo sapien
gagggtgcgagtgcacctccgcaag

SEQ ID NO: 4938018 - DNA, 25 bp, Homo sapien
tcctgcctctgagaccgtagcgcag

SEQ ID NO: 4938019 - DNA, 25 bp, Homo sapien
gggacacacttggcgacagttccat

SEQ ID NO: 4938020 - DNA, 25 bp, Homo sapien
ggctcggcatgctgcgttgaatttt

SEQ ID NO: 4938021 - DNA, 25 bp, Homo sapien
tccacccacgctgcggggaactgca

SEQ ID NO: 4938022 - DNA, 25 bp, Homo sapien
cctccacccacgctgcggggaactg

SEQ ID NO: 4938023 - DNA, 25 bp, Homo sapien
ctccacccacgctgcggggaactgc

SEQ ID NO: 4938024 - DNA, 25 bp, Homo sapien
ccacccacgctgcggggaactgcat

SEQ ID NO: 4938025 - DNA, 25 bp, Homo sapien
caacatagttagaaccgtgtcgact

SEQ ID NO: 4938026 - DNA, 25 bp, Homo sapien
taaaacacttagactgggtgggcga

SEQ ID NO: 4938027 - DNA, 25 bp, Homo sapien
ggaaccgcgttcattgcgcactgca

SEQ ID NO: 4938028 - DNA, 25 bp, Homo sapien
tgaagaaccgattcccatgagagaa

SEQ ID NO: 4938029 - DNA, 25 bp, Homo sapien
catgggtgcaaagtgtacagctgca

SEQ ID NO: 4938030 - DNA, 25 bp, Homo sapien
aaggtcacgcatctccagctggaat

SEQ ID NO: 4938031 - DNA, 25 bp, Homo sapien
gctgcaatgtggacttgttccctct

SEQ ID NO: 4938032 - DNA, 25 bp, Homo sapien
aagtgacgcttttcatcatgggtgc

SEQ ID NO: 4938033 - DNA, 25 bp, Homo sapien
gccgagtccttcctgccgggcagga

SEQ ID NO: 4938034 - DNA, 25 bp, Homo sapien
gcacttccggcgacgctctgggcag

SEQ ID NO: 4938035 - DNA, 25 bp, Homo sapien
ttcagctcatcggttgcccgcaggc

SEQ ID NO: 4938036 - DNA, 25 bp, Homo sapien
ggatccggctcgagccaactgagga

SEQ ID NO: 4938037 - DNA, 25 bp, Homo sapien
gcggcggtgaccgccccgttctctc

SEQ ID NO: 4938038 - DNA, 25 bp, Homo sapien
ccagcaagagaagccggggcctcag

SEQ ID NO: 4938039 - DNA, 25 bp, Homo sapien
tcagccctcccgaatcgacacccca

SEQ ID NO: 4938040 - DNA, 25 bp, Homo sapien
gccccgttctctcggccgcgccctc

SEQ ID NO: 4938041 - DNA, 25 bp, Homo sapien
gcacgtgtcggaccccgggtacgca

SEQ ID NO: 4938042 - DNA, 25 bp, Homo sapien
gcagcggggactcagctcgcaggaa

SEQ ID NO: 4938043 - DNA, 25 bp, Homo sapien
agctcgcaggaagccccgcacgtgt

SEQ ID NO: 4938044 - DNA, 25 bp, Homo sapien
cacgccgcgcccgagagcggctggg

SEQ ID NO: 4938045 - DNA, 25 bp, Homo sapien
acagctgggaagaagctcgatgagc

SEQ ID NO: 4938046 - DNA, 25 bp, Homo sapien
gctcgatgagctgggccggtgggaa

SEQ ID NO: 4938047 - DNA, 25 bp, Homo sapien
gcaagaattagggaacaggccctcc

SEQ ID NO: 4938048 - DNA, 25 bp, Homo sapien
aagaagctcgatgagctgggccggt

SEQ ID NO: 4938049 - DNA, 25 bp, Homo sapien
gaaaaggaaaataaatcacagccag

SEQ ID NO: 4938050 - DNA, 25 bp, Homo sapien
agaaaaggaaaataaatcacagcca

SEQ ID NO: 4938051 - DNA, 25 bp, Homo sapien
aaaggaaaataaatcacagccaggg

SEQ ID NO: 4938052 - DNA, 25 bp, Homo sapien
aaaaggaaaataaatcacagccagg

SEQ ID NO: 4938053 - DNA, 25 bp, Homo sapien
agaacaccagcagttggaacaattt

SEQ ID NO: 4938054 - DNA, 25 bp, Homo sapien
cttgcagaacaccagcagttggaac

SEQ ID NO: 4938055 - DNA, 25 bp, Homo sapien
gcagaacaccagcagttggaacaat

SEQ ID NO: 4938056 - DNA, 25 bp, Homo sapien
ttgcagaacaccagcagttggaaca

SEQ ID NO: 4938057 - DNA, 25 bp, Homo sapien
gggactccatcagggtactgctctc

SEQ ID NO: 4938058 - DNA, 25 bp, Homo sapien
ctgcaagggactccatcagggtact

SEQ ID NO: 4938059 - DNA, 25 bp, Homo sapien
caagggactccatcagggtactgct

SEQ ID NO: 4938060 - DNA, 25 bp, Homo sapien
gactccatcagggtactgctctctt

SEQ ID NO: 4938061 - DNA, 25 bp, Homo sapien
tgcgcccaaggacacagtatatgct

SEQ ID NO: 4938062 - DNA, 25 bp, Homo sapien
tctgggcccgactgtggacatgtcc

SEQ ID NO: 4938063 - DNA, 25 bp, Homo sapien
agacagtcaccaaacagatgcccag

SEQ ID NO: 4938064 - DNA, 25 bp, Homo sapien
tatatgctctgcgtcagtgactgag

SEQ ID NO: 4938065 - DNA, 25 bp, Homo sapien
caatggcccttgtctggcagtcaag

SEQ ID NO: 4938066 - DNA, 25 bp, Homo sapien
agatttggttccactggctcacagg

SEQ ID NO: 4938067 - DNA, 25 bp, Homo sapien
aaaagaaatccggaacaagagctgg

SEQ ID NO: 4938068 - DNA, 25 bp, Homo sapien
catccaggctgcgttatcaatggcc

SEQ ID NO: 4938069 - DNA, 25 bp, Homo sapien
ctgtatctccgcactttcagaggct

SEQ ID NO: 4938070 - DNA, 25 bp, Homo sapien
acacctgtatctccgcactttcaga

SEQ ID NO: 4938071 - DNA, 25 bp, Homo sapien
tgaggtagacgagaatcctgcactg

SEQ ID NO: 4938072 - DNA, 25 bp, Homo sapien
ccccatggttatgaggtagacgaga

SEQ ID NO: 4938073 - DNA, 25 bp, Homo sapien
ccactcggggcctgcgccaggaaag

SEQ ID NO: 4938074 - DNA, 25 bp, Homo sapien
tcggggcctgcgccaggaaagcagc

SEQ ID NO: 4938075 - DNA, 25 bp, Homo sapien
agctgcctgcacctcggctgaccgg

SEQ ID NO: 4938076 - DNA, 25 bp, Homo sapien
actcggggcctgcgccaggaaagca

SEQ ID NO: 4938077 - DNA, 25 bp, Homo sapien
cacaggcgccgcacgggaaaggccg

SEQ ID NO: 4938078 - DNA, 25 bp, Homo sapien
cctgcgttcggagggacgtctgact

SEQ ID NO: 4938079 - DNA, 25 bp, Homo sapien
acgtctgactcgaggccactctgtc

SEQ ID NO: 4938080 - DNA, 25 bp, Homo sapien
ttttctcagaagtgaccgggcctcg

SEQ ID NO: 4938081 - DNA, 25 bp, Homo sapien
ggaccacgttcgagctgtgcaggaa

SEQ ID NO: 4938082 - DNA, 25 bp, Homo sapien
ttgccgcgtccgaggagcacttgaa

SEQ ID NO: 4938083 - DNA, 25 bp, Homo sapien
ctggtgccggaagaagcccgacagc

SEQ ID NO: 4938084 - DNA, 25 bp, Homo sapien
tggatgctccggtgctttgccgcgt

SEQ ID NO: 4938085 - DNA, 25 bp, Homo sapien
tgattgctcccaagccaaggcggat

SEQ ID NO: 4938086 - DNA, 25 bp, Homo sapien
tggcgaggctttcgcaacccgagaa

SEQ ID NO: 4938087 - DNA, 25 bp, Homo sapien
catatgaaccggctgtgaaaaggcg

SEQ ID NO: 4938088 - DNA, 25 bp, Homo sapien
gaatgaccgattcaatcaccggcca

SEQ ID NO: 4938089 - DNA, 25 bp, Homo sapien
caattagtccttacctgggcagaga

SEQ ID NO: 4938090 - DNA, 25 bp, Homo sapien
gattctgtcaccaattgcccggagc

SEQ ID NO: 4938091 - DNA, 25 bp, Homo sapien
caaagcgactgtcttggaagcggca

SEQ ID NO: 4938092 - DNA, 25 bp, Homo sapien
taacaaaatcggtgccaagagccct

SEQ ID NO: 4938093 - DNA, 25 bp, Homo sapien
atatctaagaccatcactcggctca

SEQ ID NO: 4938094 - DNA, 25 bp, Homo sapien
tacactatgcacatttaacttatca

SEQ ID NO: 4938095 - DNA, 25 bp, Homo sapien
gtcccttctaatttacatgctattg

SEQ ID NO: 4938096 - DNA, 25 bp, Homo sapien
ttagagatgtatagactggttacac

SEQ ID NO: 4938097 - DNA, 25 bp, Homo sapien
gcccagcctgatttcgttcttattt

SEQ ID NO: 4938098 - DNA, 25 bp, Homo sapien
ggcccagcctgatttcgttcttatt

SEQ ID NO: 4938099 - DNA, 25 bp, Homo sapien
cccagcctgatttcgttcttatttt

SEQ ID NO: 4938100 - DNA, 25 bp, Homo sapien
gcagagccacctcgtctaagacagc

SEQ ID NO: 4938101 - DNA, 25 bp, Homo sapien
agcacacacgggacggtcacatgag

SEQ ID NO: 4938102 - DNA, 25 bp, Homo sapien
gcaacacctaagacgcagtgcactg

SEQ ID NO: 4938103 - DNA, 25 bp, Homo sapien
caacctcgtctaagacaggtgccgg

SEQ ID NO: 4938104 - DNA, 25 bp, Homo sapien
cagagcagccctgagtaaccgggca

SEQ ID NO: 4938105 - DNA, 25 bp, Homo sapien
tggctggaacatccgtctgcatcgg

SEQ ID NO: 4938106 - DNA, 25 bp, Homo sapien
tgggtggttactcagcaagtgccag

SEQ ID NO: 4938107 - DNA, 25 bp, Homo sapien
tgctgtggactggatacttgtccct

SEQ ID NO: 4938108 - DNA, 25 bp, Homo sapien
actttgaattctaacgacgagccgt

SEQ ID NO: 4938109 - DNA, 25 bp, Homo sapien
cgacgagccgtgttgaaacttcttt

SEQ ID NO: 4938110 - DNA, 25 bp, Homo sapien
ggttcgcctgggctctcgccatggc

SEQ ID NO: 4938111 - DNA, 25 bp, Homo sapien
catggcaggagaagactttgaattc

SEQ ID NO: 4938112 - DNA, 25 bp, Homo sapien
gaatttgtttagtctagggtgtcta

SEQ ID NO: 4938113 - DNA, 25 bp, Homo sapien
cattcctcattattgtggctgcggt

SEQ ID NO: 4938114 - DNA, 25 bp, Homo sapien
tatactttgtgagttggttctggta

SEQ ID NO: 4938115 - DNA, 25 bp, Homo sapien
tagtctagggtgtctaactggctgg

SEQ ID NO: 4938116 - DNA, 25 bp, Homo sapien
caatctgcctgtctcggcctcccaa

SEQ ID NO: 4938117 - DNA, 25 bp, Homo sapien
tctctgcctccaggtttcaagcaat

SEQ ID NO: 4938118 - DNA, 25 bp, Homo sapien
gcaatctgcctgtctcggcctccca

SEQ ID NO: 4938119 - DNA, 25 bp, Homo sapien
atctctgcctccaggtttcaagcaa

SEQ ID NO: 4938120 - DNA, 25 bp, Homo sapien
ggttggcctggcaataggcatcttc

SEQ ID NO: 4938121 - DNA, 25 bp, Homo sapien
agtgataggtgagatcacgtgggtc

SEQ ID NO: 4938122 - DNA, 25 bp, Homo sapien
cagtgataggtgagatcacgtgggt

SEQ ID NO: 4938123 - DNA, 25 bp, Homo sapien
gaacgcccctcgcaagttctcggtg

SEQ ID NO: 4938124 - DNA, 25 bp, Homo sapien
ttactccatggaccgctgaaaggac

SEQ ID NO: 4938125 - DNA, 25 bp, Homo sapien
cataggcggtgccagtgtgtccagc

SEQ ID NO: 4938126 - DNA, 25 bp, Homo sapien
gaggccgatttgtggtccttactcc

SEQ ID NO: 4938127 - DNA, 25 bp, Homo sapien
gggctcaaagcggtggtcccgcaca

SEQ ID NO: 4938128 - DNA, 25 bp, Homo sapien
ctgagctccaggtacccgtcctcac

SEQ ID NO: 4938129 - DNA, 25 bp, Homo sapien
gctacagctgcgtcacagaggagcc

SEQ ID NO: 4938130 - DNA, 25 bp, Homo sapien
cctggctgctacagctgcgtcacag

SEQ ID NO: 4938131 - DNA, 25 bp, Homo sapien
tgtggagagcgtgatgaatttgcct

SEQ ID NO: 4938132 - DNA, 25 bp, Homo sapien
gtcattcttgcacagcggccatgag

SEQ ID NO: 4938133 - DNA, 25 bp, Homo sapien
cattcttgcacagcggccatgagaa

SEQ ID NO: 4938134 - DNA, 25 bp, Homo sapien
ggagagcgtgatgaatttgcctgtc

SEQ ID NO: 4938135 - DNA, 25 bp, Homo sapien
ggaatcctttgacggctgctgccag

SEQ ID NO: 4938136 - DNA, 25 bp, Homo sapien
actgtaatggcaagcagccgtgggc

SEQ ID NO: 4938137 - DNA, 25 bp, Homo sapien
ctggaatcctttgacggctgctgcc

SEQ ID NO: 4938138 - DNA, 25 bp, Homo sapien
aggctttggttgaactgtaatggca

SEQ ID NO: 4938139 - DNA, 25 bp, Homo sapien
cactggtgttgccgtttcttctttg

SEQ ID NO: 4938140 - DNA, 25 bp, Homo sapien
tctttggagttacaggagcgtattt

SEQ ID NO: 4938141 - DNA, 25 bp, Homo sapien
catcactacaatggtagagaatggg

SEQ ID NO: 4938142 - DNA, 25 bp, Homo sapien
ggcgtgatgtcactgctttcctgtg

SEQ ID NO: 4938143 - DNA, 25 bp, Homo sapien
tctgccccagagtgacggctttgga

SEQ ID NO: 4938144 - DNA, 25 bp, Homo sapien
ggcagccaccttgtaacacctcagg

SEQ ID NO: 4938145 - DNA, 25 bp, Homo sapien
gctttggatgcgctttgccccaggg

SEQ ID NO: 4938146 - DNA, 25 bp, Homo sapien
tcttctcctggcgtggtgacctgcc

SEQ ID NO: 4938147 - DNA, 25 bp, Homo sapien
ttgctccatgagcttttctcaaaat

SEQ ID NO: 4938148 - DNA, 25 bp, Homo sapien
tttatcttcagagtcgcagaagcgc

SEQ ID NO: 4938149 - DNA, 25 bp, Homo sapien
cgctgcagggactggcgagactcca

SEQ ID NO: 4938150 - DNA, 25 bp, Homo sapien
gtcgcggaagccaacagcacgtcgg

SEQ ID NO: 4938151 - DNA, 25 bp, Homo sapien
cctgagtccacctcccggataaaat

SEQ ID NO: 4938152 - DNA, 25 bp, Homo sapien
ttgccgtgcccttgtacacagagct

SEQ ID NO: 4938153 - DNA, 25 bp, Homo sapien
tggccacttgccgtgcccttgtaca

SEQ ID NO: 4938154 - DNA, 25 bp, Homo sapien
tggagggagccgtactccacactgg

SEQ ID NO: 4938155 - DNA, 25 bp, Homo sapien
tgtgcccactggtgccatcatctct

SEQ ID NO: 4938156 - DNA, 25 bp, Homo sapien
cagtgtgcccactggtgccatcatc

SEQ ID NO: 4938157 - DNA, 25 bp, Homo sapien
agtgtgcccactggtgccatcatct

SEQ ID NO: 4938158 - DNA, 25 bp, Homo sapien
gtgtgcccactggtgccatcatctc

SEQ ID NO: 4938159 - DNA, 25 bp, Homo sapien
agtaacaggtaccacagggcgagca

SEQ ID NO: 4938160 - DNA, 25 bp, Homo sapien
ttagaggtgcacaaacccacacaaa

SEQ ID NO: 4938161 - DNA, 25 bp, Homo sapien
gctgcacgcaggctgctcaactgtg

SEQ ID NO: 4938162 - DNA, 25 bp, Homo sapien
ggataaataactgcaaggcccgaag

SEQ ID NO: 4938163 - DNA, 25 bp, Homo sapien
tgatttgatgctgatcgctggtact

SEQ ID NO: 4938164 - DNA, 25 bp, Homo sapien
gcaagtgtgagcctggcagactctt

SEQ ID NO: 4938165 - DNA, 25 bp, Homo sapien
ctggttggaagccttaattagtgga

SEQ ID NO: 4938166 - DNA, 25 bp, Homo sapien
aagtagcagggaccgcttgcatgcg

SEQ ID NO: 4938167 - DNA, 25 bp, Homo sapien
catgggccgatgcttccaaagttca

SEQ ID NO: 4938168 - DNA, 25 bp, Homo sapien
tcagagtcagctatgtgtacaggag

SEQ ID NO: 4938169 - DNA, 25 bp, Homo sapien
gaatcacacaggctacatgagacct

SEQ ID NO: 4938170 - DNA, 25 bp, Homo sapien
tacaggaggcattaccatatcagtg

SEQ ID NO: 4938171 - DNA, 25 bp, Homo sapien
tcggggtcagccagcccgccgctcg

SEQ ID NO: 4938172 - DNA, 25 bp, Homo sapien
cctcggggtcagccagcccgccgct

SEQ ID NO: 4938173 - DNA, 25 bp, Homo sapien
agccgggctagggccgcccgcacca

SEQ ID NO: 4938174 - DNA, 25 bp, Homo sapien
cgccgcacccgctgcgctgggggtc

SEQ ID NO: 4938175 - DNA, 25 bp, Homo sapien
cgtccggcctctcctccaggatcat

SEQ ID NO: 4938176 - DNA, 25 bp, Homo sapien
gcgccgtccggcctctcctccagga

SEQ ID NO: 4938177 - DNA, 25 bp, Homo sapien
tgcagccgcgggctctcctcgccgg

SEQ ID NO: 4938178 - DNA, 25 bp, Homo sapien
ggcgcccgcgccgtccggcctctcc

SEQ ID NO: 4938179 - DNA, 25 bp, Homo sapien
agcagcccgcggctgaaagcccgtg

SEQ ID NO: 4938180 - DNA, 25 bp, Homo sapien
gaaagcccgtggcgggcgtgggcgc

SEQ ID NO: 4938181 - DNA, 25 bp, Homo sapien
ctggggcagcctcgagctggtccgc

SEQ ID NO: 4938182 - DNA, 25 bp, Homo sapien
ggcagcctcgagctggtccgcaggg

SEQ ID NO: 4938183 - DNA, 25 bp, Homo sapien
cctgttcatcagacgggctgaggcc

SEQ ID NO: 4938184 - DNA, 25 bp, Homo sapien
ccctggcaccaggtaagcgcttgct

SEQ ID NO: 4938185 - DNA, 25 bp, Homo sapien
gactccagctgtagcactggccctg

SEQ ID NO: 4938186 - DNA, 25 bp, Homo sapien
gcaccaatggcaggactccagctgt

SEQ ID NO: 4938187 - DNA, 25 bp, Homo sapien
tacagccaggctgtattccttgtgg

SEQ ID NO: 4938188 - DNA, 25 bp, Homo sapien
tgcatacagccaggctgtattcctt

SEQ ID NO: 4938189 - DNA, 25 bp, Homo sapien
cagccaggctgtattccttgtggtc

SEQ ID NO: 4938190 - DNA, 25 bp, Homo sapien
ggctgtattccttgtggtcctcccc

SEQ ID NO: 4938191 - DNA, 25 bp, Homo sapien
cagtcaatgcagaaggacgtggtcg

SEQ ID NO: 4938192 - DNA, 25 bp, Homo sapien
actagtgtgaacacaggcctggcca

SEQ ID NO: 4938193 - DNA, 25 bp, Homo sapien
ggacagaactagtgtgaacacaggc

SEQ ID NO: 4938194 - DNA, 25 bp, Homo sapien
acaggaggcagtcaatgcagaagga

SEQ ID NO: 4938195 - DNA, 25 bp, Homo sapien
tgcagctggccgcactggatctgcg

SEQ ID NO: 4938196 - DNA, 25 bp, Homo sapien
cgcactggatctgcgtcagggagtc

SEQ ID NO: 4938197 - DNA, 25 bp, Homo sapien
ctggccgcactggatctgcgtcagg

SEQ ID NO: 4938198 - DNA, 25 bp, Homo sapien
tggatctgcgtcagggagtcacagc

SEQ ID NO: 4938199 - DNA, 25 bp, Homo sapien
gcgcccgtccgcatctgcagctcct

SEQ ID NO: 4938200 - DNA, 25 bp, Homo sapien
tagaggttctcagcgcccgtccgca

SEQ ID NO: 4938201 - DNA, 25 bp, Homo sapien
ctgtagaggttctcagcgcccgtcc

SEQ ID NO: 4938202 - DNA, 25 bp, Homo sapien
agcgcccgtccgcatctgcagctcc

SEQ ID NO: 4938203 - DNA, 25 bp, Homo sapien
caggttggagttgacgtagctcagc

SEQ ID NO: 4938204 - DNA, 25 bp, Homo sapien
tctctcacccggttgttgctggtgg

SEQ ID NO: 4938205 - DNA, 25 bp, Homo sapien
ggccagggtccacgccaccgctgag

SEQ ID NO: 4938206 - DNA, 25 bp, Homo sapien
agggcgaccgtctctctcacccggt

SEQ ID NO: 4938207 - DNA, 25 bp, Homo sapien
tcagcggtgtagaccagtccagctc

SEQ ID NO: 4938208 - DNA, 25 bp, Homo sapien
gcggtgtagaccagtccagctcctt

SEQ ID NO: 4938209 - DNA, 25 bp, Homo sapien
tgtagaccagtccagctccttggtc

SEQ ID NO: 4938210 - DNA, 25 bp, Homo sapien
cttcagcggtgtagaccagtccagc

SEQ ID NO: 4938211 - DNA, 25 bp, Homo sapien
ctgatttctgcctcgtaggaggcgc

SEQ ID NO: 4938212 - DNA, 25 bp, Homo sapien
gaggcgccgtcctctccaaagtgca

SEQ ID NO: 4938213 - DNA, 25 bp, Homo sapien
tccctgatttctgcctcgtaggagg

SEQ ID NO: 4938214 - DNA, 25 bp, Homo sapien
aggaggcgccgtcctctccaaagtg

SEQ ID NO: 4938215 - DNA, 25 bp, Homo sapien
aaggccagcagcatgcggcaccgga

SEQ ID NO: 4938216 - DNA, 25 bp, Homo sapien
tgggcagccgtgactcccgaaggcc

SEQ ID NO: 4938217 - DNA, 25 bp, Homo sapien
tcgagatgtctacgctgagctcctc

SEQ ID NO: 4938218 - DNA, 25 bp, Homo sapien
tctccccacgtcctcgagatgtcta

SEQ ID NO: 4938219 - DNA, 25 bp, Homo sapien
tccaggcccgactcattccggctgg

SEQ ID NO: 4938220 - DNA, 25 bp, Homo sapien
agctggttgtaataggctgtgagca

SEQ ID NO: 4938221 - DNA, 25 bp, Homo sapien
tgaggaagcgcgcatccaggaagca

SEQ ID NO: 4938222 - DNA, 25 bp, Homo sapien
gcacagctggttgtaataggctgtg

SEQ ID NO: 4938223 - DNA, 25 bp, Homo sapien
caatctgcgtgtggagggcaccgat

SEQ ID NO: 4938224 - DNA, 25 bp, Homo sapien
gggcaccgatgttgaagagaacgct

SEQ ID NO: 4938225 - DNA, 25 bp, Homo sapien
ttctcgaaggccagggcacgctgct

SEQ ID NO: 4938226 - DNA, 25 bp, Homo sapien
caccctcggtgcaggagcggtcctg

SEQ ID NO: 4938227 - DNA, 25 bp, Homo sapien
ggctcggcgcatgggagaagttctc

SEQ ID NO: 4938228 - DNA, 25 bp, Homo sapien
tgctccagtgcgcagagggacgcag

SEQ ID NO: 4938229 - DNA, 25 bp, Homo sapien
gagctgctccagtgcgcagagggac

SEQ ID NO: 4938230 - DNA, 25 bp, Homo sapien
ggacgcagcgctcatgtctgggctc

SEQ ID NO: 4938231 - DNA, 25 bp, Homo sapien
gtgagaggccctcaaacacacattc

SEQ ID NO: 4938232 - DNA, 25 bp, Homo sapien
ccaggcagtcttggggggccatgga

SEQ ID NO: 4938233 - DNA, 25 bp, Homo sapien
tggtgagaggccctcaaacacacat

SEQ ID NO: 4938234 - DNA, 25 bp, Homo sapien
gcaggtggtgagaggccctcaaaca

SEQ ID NO: 4938235 - DNA, 25 bp, Homo sapien
tgccggtggatgtggcaggcacgcg

SEQ ID NO: 4938236 - DNA, 25 bp, Homo sapien
cctgcatcctgacacgggtgcccga

SEQ ID NO: 4938237 - DNA, 25 bp, Homo sapien
tggctcggggctgacacacaaggaa

SEQ ID NO: 4938238 - DNA, 25 bp, Homo sapien
tgggagagctcacgcatgcctggac

SEQ ID NO: 4938239 - DNA, 25 bp, Homo sapien
agtactcggccttgacatgcaccag

SEQ ID NO: 4938240 - DNA, 25 bp, Homo sapien
ggtccggtgcactagcctgtactcg

SEQ ID NO: 4938241 - DNA, 25 bp, Homo sapien
ccaggagacaggcacgtagtcgtgg

SEQ ID NO: 4938242 - DNA, 25 bp, Homo sapien
ccatggctacgtggtagtgggccag

SEQ ID NO: 4938243 - DNA, 25 bp, Homo sapien
aggctgtgagccctgcgcggggggg

SEQ ID NO: 4938244 - DNA, 25 bp, Homo sapien
ggggccttggcagtaccatgggcaa

SEQ ID NO: 4938245 - DNA, 25 bp, Homo sapien
gctgtgagccctgcgcgggggggcc

SEQ ID NO: 4938246 - DNA, 25 bp, Homo sapien
cgcgggggggccttggcagtaccat

SEQ ID NO: 4938247 - DNA, 25 bp, Homo sapien
aagacctgctcgtgcgtggggagct

SEQ ID NO: 4938248 - DNA, 25 bp, Homo sapien
acctgctcgtgcgtggggagctctc

SEQ ID NO: 4938249 - DNA, 25 bp, Homo sapien
ctgctcgtgcgtggggagctctccc

SEQ ID NO: 4938250 - DNA, 25 bp, Homo sapien
gcaggaagacctgctcgtgcgtggg

SEQ ID NO: 4938251 - DNA, 25 bp, Homo sapien
tgagccccagggcactccacccatg

SEQ ID NO: 4938252 - DNA, 25 bp, Homo sapien
accgttggtgaccatctgagcccca

SEQ ID NO: 4938253 - DNA, 25 bp, Homo sapien
gggcactccacccatgggcgcctta

SEQ ID NO: 4938254 - DNA, 25 bp, Homo sapien
ctgccaccgttggtgaccatctgag

SEQ ID NO: 4938255 - DNA, 25 bp, Homo sapien
ccatccagggataggtaggtggccc

SEQ ID NO: 4938256 - DNA, 25 bp, Homo sapien
ggcagaaggagtgggcaacgccagg

SEQ ID NO: 4938257 - DNA, 25 bp, Homo sapien
gctcatcacagccactttcgttggg

SEQ ID NO: 4938258 - DNA, 25 bp, Homo sapien
aggtggcccaactcgtcagcacggg

SEQ ID NO: 4938259 - DNA, 25 bp, Homo sapien
tgcacgcggggcactgggatgtcac

SEQ ID NO: 4938260 - DNA, 25 bp, Homo sapien
ctgcacgcggggcactgggatgtca

SEQ ID NO: 4938261 - DNA, 25 bp, Homo sapien
gcacgcggggcactgggatgtcaca

SEQ ID NO: 4938262 - DNA, 25 bp, Homo sapien
cccaggatggcacgcttcaggtgtg

SEQ ID NO: 4938263 - DNA, 25 bp, Homo sapien
catacttggccagtgagcgctgcag

SEQ ID NO: 4938264 - DNA, 25 bp, Homo sapien
tgggagatcacagcccgaagcaggt

SEQ ID NO: 4938265 - DNA, 25 bp, Homo sapien
tcacggtcgagctccgcatacttgg

SEQ ID NO: 4938266 - DNA, 25 bp, Homo sapien
tttaattcatcgtggtgactgcatc

SEQ ID NO: 4938267 - DNA, 25 bp, Homo sapien
tgtgggcttcccctcagggtaggag

SEQ ID NO: 4938268 - DNA, 25 bp, Homo sapien
gatcgtggcctggaaagtgctactg

SEQ ID NO: 4938269 - DNA, 25 bp, Homo sapien
tctgtgggtccctgtgatcgtggcc

SEQ ID NO: 4938270 - DNA, 25 bp, Homo sapien
ccttcccctgggacaggcgtggcat

SEQ ID NO: 4938271 - DNA, 25 bp, Homo sapien
gatggaagatgtcaggccccttccc

SEQ ID NO: 4938272 - DNA, 25 bp, Homo sapien
ggacaggcgtggcatcctggcctct

SEQ ID NO: 4938273 - DNA, 25 bp, Homo sapien
cagccgatggaagatgtcaggcccc

SEQ ID NO: 4938274 - DNA, 25 bp, Homo sapien
ggagggctggaccaccatcaatggc

SEQ ID NO: 4938275 - DNA, 25 bp, Homo sapien
aggccatgtgctggtcagagccaca

SEQ ID NO: 4938276 - DNA, 25 bp, Homo sapien
gactagcacatccatccaacctgtg

SEQ ID NO: 4938277 - DNA, 25 bp, Homo sapien
aacctgtgcaccgagggacaccgtg

SEQ ID NO: 4938278 - DNA, 25 bp, Homo sapien
gctccctggaatgacggcagcgatg

SEQ ID NO: 4938279 - DNA, 25 bp, Homo sapien
tccctggaatgacggcagcgatgag

SEQ ID NO: 4938280 - DNA, 25 bp, Homo sapien
tccccgaagcgtgaggccaaagccg

SEQ ID NO: 4938281 - DNA, 25 bp, Homo sapien
tgaggacaggcgagtctccccgaag

SEQ ID NO: 4938282 - DNA, 25 bp, Homo sapien
actgacacaatgtagtcgccctcct

SEQ ID NO: 4938283 - DNA, 25 bp, Homo sapien
cacctgcaggctggcgcccgcctct

SEQ ID NO: 4938284 - DNA, 25 bp, Homo sapien
accacctccgcgtgtctccaccacc

SEQ ID NO: 4938285 - DNA, 25 bp, Homo sapien
acacaatgtagtcgccctccttcag

SEQ ID NO: 4938286 - DNA, 25 bp, Homo sapien
tctggctccttagaagccccctggg

SEQ ID NO: 4938287 - DNA, 25 bp, Homo sapien
ggtcttgcaaccatgctccctctgg

SEQ ID NO: 4938288 - DNA, 25 bp, Homo sapien
tgcttcaaggatgagggcggagctg

SEQ ID NO: 4938289 - DNA, 25 bp, Homo sapien
tgctgggcctttcggctccagttga

SEQ ID NO: 4938290 - DNA, 25 bp, Homo sapien
acaggtctgaccagtctttaatggg

SEQ ID NO: 4938291 - DNA, 25 bp, Homo sapien
tgctcggtgcttgctgccagctgga

SEQ ID NO: 4938292 - DNA, 25 bp, Homo sapien
ggacaggcattgcccggaggtcctc

SEQ ID NO: 4938293 - DNA, 25 bp, Homo sapien
gaccagtctttaatgggcaggcagg

SEQ ID NO: 4938294 - DNA, 25 bp, Homo sapien
gacctcagaccgacagagggactgg

SEQ ID NO: 4938295 - DNA, 25 bp, Homo sapien
cccagcaggaatcactgggcaccag

SEQ ID NO: 4938296 - DNA, 25 bp, Homo sapien
aaggccatgtctgggacccggccta

SEQ ID NO: 4938297 - DNA, 25 bp, Homo sapien
tgaggagcaccctgtaaggagccct

SEQ ID NO: 4938298 - DNA, 25 bp, Homo sapien
cacagggcgcagaggtggggagtcc

SEQ ID NO: 4938299 - DNA, 25 bp, Homo sapien
gcaaacgggacacttgctgggttga

SEQ ID NO: 4938300 - DNA, 25 bp, Homo sapien
aacgggacacttgctgggttgacca

SEQ ID NO: 4938301 - DNA, 25 bp, Homo sapien
gactcctgggcaaacgggacacttg

SEQ ID NO: 4938302 - DNA, 25 bp, Homo sapien
agctcacggcctgtggaggccagca

SEQ ID NO: 4938303 - DNA, 25 bp, Homo sapien
actgacagctcacggcctgtggagg

SEQ ID NO: 4938304 - DNA, 25 bp, Homo sapien
cagcaggagcggcccaagcaggctg

SEQ ID NO: 4938305 - DNA, 25 bp, Homo sapien
agacactgacagctcacggcctgtg

SEQ ID NO: 4938306 - DNA, 25 bp, Homo sapien
ccggctccgtggctcctcttgggtg

SEQ ID NO: 4938307 - DNA, 25 bp, Homo sapien
aggtggtgttcttgccgacggcctt

SEQ ID NO: 4938308 - DNA, 25 bp, Homo sapien
ctgtctcttccggaacctgccaggc

SEQ ID NO: 4938309 - DNA, 25 bp, Homo sapien
cccagtacacggaggcctggaggca

SEQ ID NO: 4938310 - DNA, 25 bp, Homo sapien
attaacacgtgctggggagacctgc

SEQ ID NO: 4938311 - DNA, 25 bp, Homo sapien
gagacagggattttcccacaagggc

SEQ ID NO: 4938312 - DNA, 25 bp, Homo sapien
tcttggctgaagcacgagggaggtg

SEQ ID NO: 4938313 - DNA, 25 bp, Homo sapien
ccttgatccacagttttattaacca

SEQ ID NO: 4938314 - DNA, 25 bp, Homo sapien
tgcgcatgaggacagctgtagcctt

SEQ ID NO: 4938315 - DNA, 25 bp, Homo sapien
acctcgcacaggcacagatcctgac

SEQ ID NO: 4938316 - DNA, 25 bp, Homo sapien
gatcctgaccatggccgttgggaac

SEQ ID NO: 4938317 - DNA, 25 bp, Homo sapien
gccatgtctgcagatggtccgcggt

SEQ ID NO: 4938318 - DNA, 25 bp, Homo sapien
tgtgcaggacataagaagcgcacac

SEQ ID NO: 4938319 - DNA, 25 bp, Homo sapien
gtgcaggacataagaagcgcacaca

SEQ ID NO: 4938320 - DNA, 25 bp, Homo sapien
tgcaggacataagaagcgcacacag

SEQ ID NO: 4938321 - DNA, 25 bp, Homo sapien
gacagctcgataagtcactcctgcc

SEQ ID NO: 4938322 - DNA, 25 bp, Homo sapien
ccttaatgcatgtctggcgcacggt

SEQ ID NO: 4938323 - DNA, 25 bp, Homo sapien
ctggaaccagcgcattatgaaggct

SEQ ID NO: 4938324 - DNA, 25 bp, Homo sapien
tgtcttaaaacgctccccctgacag

SEQ ID NO: 4938325 - DNA, 25 bp, Homo sapien
tggcagctgattaccctggacacca

SEQ ID NO: 4938326 - DNA, 25 bp, Homo sapien
gggcaccgccacgagtttaacagcc

SEQ ID NO: 4938327 - DNA, 25 bp, Homo sapien
cactctcaggagtaagcaccgtgcg

SEQ ID NO: 4938328 - DNA, 25 bp, Homo sapien
ggcaccgggcaggtgtcactctcag

SEQ ID NO: 4938329 - DNA, 25 bp, Homo sapien
gaccccaggtggattaatctcttct

SEQ ID NO: 4938330 - DNA, 25 bp, Homo sapien
gcctctgtgcctcatgtgaactgcc

SEQ ID NO: 4938331 - DNA, 25 bp, Homo sapien
tggctgccatgcttcgtgggccagg

SEQ ID NO: 4938332 - DNA, 25 bp, Homo sapien
tgcctcatgtgaactgcccagccag

SEQ ID NO: 4938333 - DNA, 25 bp, Homo sapien
gcggactctcagtgttcacccagat

SEQ ID NO: 4938334 - DNA, 25 bp, Homo sapien
gatgagcagaaactgaccaaccccc

SEQ ID NO: 4938335 - DNA, 25 bp, Homo sapien
tctgggagcggactctcagtgttca

SEQ ID NO: 4938336 - DNA, 25 bp, Homo sapien
ccatgcggatgtcaaggcagctctg

SEQ ID NO: 4938337 - DNA, 25 bp, Homo sapien
agggcctgcaggaagcgtaggggca

SEQ ID NO: 4938338 - DNA, 25 bp, Homo sapien
ggcagcagcgagagggagggcttcc

SEQ ID NO: 4938339 - DNA, 25 bp, Homo sapien
ctgcaggaagcgtaggggcagcagc

SEQ ID NO: 4938340 - DNA, 25 bp, Homo sapien
gggcagcagcgagagggagggcttc

SEQ ID NO: 4938341 - DNA, 25 bp, Homo sapien
ccagggagttgagggagtaagggct

SEQ ID NO: 4938342 - DNA, 25 bp, Homo sapien
catgggcagcgtgaagtggaaagca

SEQ ID NO: 4938343 - DNA, 25 bp, Homo sapien
gccgcgtgctgtgggtagaggtggg

SEQ ID NO: 4938344 - DNA, 25 bp, Homo sapien
tgaagtggaaagcactcaggctggc

SEQ ID NO: 4938345 - DNA, 25 bp, Homo sapien
tcttgggaatagctgaggctgcctg

SEQ ID NO: 4938346 - DNA, 25 bp, Homo sapien
gaggaagcttttggatgcggaccca

SEQ ID NO: 4938347 - DNA, 25 bp, Homo sapien
agagcctcttgggaatagctgaggc

SEQ ID NO: 4938348 - DNA, 25 bp, Homo sapien
ttttggatgcggacccaggagagcc

SEQ ID NO: 4938349 - DNA, 25 bp, Homo sapien
gcacctgcttcttctccggtctccc

SEQ ID NO: 4938350 - DNA, 25 bp, Homo sapien
cctgcttcttctccggtctcccgcc

SEQ ID NO: 4938351 - DNA, 25 bp, Homo sapien
cgtgcacctgcttcttctccggtct

SEQ ID NO: 4938352 - DNA, 25 bp, Homo sapien
tccccgtgcacctgcttcttctccg

SEQ ID NO: 4938353 - DNA, 25 bp, Homo sapien
accacagtgtcctggcgccatctgt

SEQ ID NO: 4938354 - DNA, 25 bp, Homo sapien
tccaagcagccacaggtccacggga

SEQ ID NO: 4938355 - DNA, 25 bp, Homo sapien
ggcagagtgtgtcctggagcctcca

SEQ ID NO: 4938356 - DNA, 25 bp, Homo sapien
agccactggccctgtccaggctctg

SEQ ID NO: 4938357 - DNA, 25 bp, Homo sapien
tgccaagataggcaccccagccatg

SEQ ID NO: 4938358 - DNA, 25 bp, Homo sapien
ccaagataggcaccccagccatgga

SEQ ID NO: 4938359 - DNA, 25 bp, Homo sapien
tccactctgccaagataggcacccc

SEQ ID NO: 4938360 - DNA, 25 bp, Homo sapien
actctgccaagataggcaccccagc

SEQ ID NO: 4938361 - DNA, 25 bp, Homo sapien
gctggcacatccaagggtcgcggct

SEQ ID NO: 4938362 - DNA, 25 bp, Homo sapien
tggtcttgtcggcagatgggccttt

SEQ ID NO: 4938363 - DNA, 25 bp, Homo sapien
tcgcggctgggcttaactcactggg

SEQ ID NO: 4938364 - DNA, 25 bp, Homo sapien
agctgatcatgagtgaggcctggca

SEQ ID NO: 4938365 - DNA, 25 bp, Homo sapien
cctcctgggatgctgttctgttagc

SEQ ID NO: 4938366 - DNA, 25 bp, Homo sapien
tttgaagtgatatatgcacatctgt

SEQ ID NO: 4938367 - DNA, 25 bp, Homo sapien
cctgggatgctgttctgttagcagc

SEQ ID NO: 4938368 - DNA, 25 bp, Homo sapien
gcctcctgggatgctgttctgttag

SEQ ID NO: 4938369 - DNA, 25 bp, Homo sapien
gcctggcaccgaggaggtgctccat

SEQ ID NO: 4938370 - DNA, 25 bp, Homo sapien
tgccaccgtcggattcctgtgctgg

SEQ ID NO: 4938371 - DNA, 25 bp, Homo sapien
gtgtttccacggttgatttcctaga

SEQ ID NO: 4938372 - DNA, 25 bp, Homo sapien
tccaagcttgtttctctcggcgctg

SEQ ID NO: 4938373 - DNA, 25 bp, Homo sapien
gccgtggtgactgcttcacagaacg

SEQ ID NO: 4938374 - DNA, 25 bp, Homo sapien
ggattgaggctcttttcatcttggc

SEQ ID NO: 4938375 - DNA, 25 bp, Homo sapien
gactgcttcacagaacgctctggat

SEQ ID NO: 4938376 - DNA, 25 bp, Homo sapien
gaacgctctggattgaggctctttt

SEQ ID NO: 4938377 - DNA, 25 bp, Homo sapien
cctcccctgagcactcggagtggaa

SEQ ID NO: 4938378 - DNA, 25 bp, Homo sapien
cgctctttggactagccgggagaga

SEQ ID NO: 4938379 - DNA, 25 bp, Homo sapien
tcaggggccatcagtgggattccag

SEQ ID NO: 4938380 - DNA, 25 bp, Homo sapien
gaaggcgcgccgactcgttgaaagt

SEQ ID NO: 4938381 - DNA, 25 bp, Homo sapien
taaggaaacttgagccaggtctaac

SEQ ID NO: 4938382 - DNA, 25 bp, Homo sapien
tgcagcagcggcacattctggagag

SEQ ID NO: 4938383 - DNA, 25 bp, Homo sapien
tctggagagcgagaagtgccaactc

SEQ ID NO: 4938384 - DNA, 25 bp, Homo sapien
gaggtcatccggctcaagcagaagc

SEQ ID NO: 4938385 - DNA, 25 bp, Homo sapien
aggctgtagctcagcggcacaatca

SEQ ID NO: 4938386 - DNA, 25 bp, Homo sapien
tatccttgatgatttgcggtctagt

SEQ ID NO: 4938387 - DNA, 25 bp, Homo sapien
aatagagcttgctagttaaaggtgc

SEQ ID NO: 4938388 - DNA, 25 bp, Homo sapien
ccactgttgttggtgctctgtaaat

SEQ ID NO: 4938389 - DNA, 25 bp, Homo sapien
tgtccctgttatgggcaagcccttg

SEQ ID NO: 4938390 - DNA, 25 bp, Homo sapien
cccaggcccggctgtgaatggctgt

SEQ ID NO: 4938391 - DNA, 25 bp, Homo sapien
cgtggttccgtgtgggccggcagtg

SEQ ID NO: 4938392 - DNA, 25 bp, Homo sapien
ccggcagtggcatcgcagggacagg

SEQ ID NO: 4938393 - DNA, 25 bp, Homo sapien
ggtcatctgccggagccccatcctc

SEQ ID NO: 4938394 - DNA, 25 bp, Homo sapien
aggctcctgcactgtggggtgaggt

SEQ ID NO: 4938395 - DNA, 25 bp, Homo sapien
acccctcgggggtcatctgccggag

SEQ ID NO: 4938396 - DNA, 25 bp, Homo sapien
gtcctgtgctcacccctcgggggtc

SEQ ID NO: 4938397 - DNA, 25 bp, Homo sapien
gctgtgactggtggcggggttgggg

SEQ ID NO: 4938398 - DNA, 25 bp, Homo sapien
ggcggtgctgcttgatggacaggtg

SEQ ID NO: 4938399 - DNA, 25 bp, Homo sapien
attgggaaggcggtgctgcttgatg

SEQ ID NO: 4938400 - DNA, 25 bp, Homo sapien
ggtgctgcttgatggacaggtggat

SEQ ID NO: 4938401 - DNA, 25 bp, Homo sapien
gggacctggacttggccgtaccaga

SEQ ID NO: 4938402 - DNA, 25 bp, Homo sapien
tgcctactccaggactccactgaga

SEQ ID NO: 4938403 - DNA, 25 bp, Homo sapien
gccatgtagcgacggccctggttca

SEQ ID NO: 4938404 - DNA, 25 bp, Homo sapien
tcctgaccgcagcattgcgtctgtg

SEQ ID NO: 4938405 - DNA, 25 bp, Homo sapien
ctgcatggaagctatggccccgtgg

SEQ ID NO: 4938406 - DNA, 25 bp, Homo sapien
cctgcctgcatggaagctatggccc

SEQ ID NO: 4938407 - DNA, 25 bp, Homo sapien
gccctgcctgcatggaagctatggc

SEQ ID NO: 4938408 - DNA, 25 bp, Homo sapien
gcctgcatggaagctatggccccgt

SEQ ID NO: 4938409 - DNA, 25 bp, Homo sapien
ccacagtggtccctgagagccggcc

SEQ ID NO: 4938410 - DNA, 25 bp, Homo sapien
cacagtggtccctgagagccggcct

SEQ ID NO: 4938411 - DNA, 25 bp, Homo sapien
acagtggtccctgagagccggcctt

SEQ ID NO: 4938412 - DNA, 25 bp, Homo sapien
cagtggtccctgagagccggccttg

SEQ ID NO: 4938413 - DNA, 25 bp, Homo sapien
gctcgtcgttgtcagatggaaggca

SEQ ID NO: 4938414 - DNA, 25 bp, Homo sapien
tttgtggccggccagtgctcgtcgt

SEQ ID NO: 4938415 - DNA, 25 bp, Homo sapien
cctcaggtttgtggccggccagtgc

SEQ ID NO: 4938416 - DNA, 25 bp, Homo sapien
ccggccagtgctcgtcgttgtcaga

SEQ ID NO: 4938417 - DNA, 25 bp, Homo sapien
ttgatggctgggtttgtaatagggg

SEQ ID NO: 4938418 - DNA, 25 bp, Homo sapien
cctccctgtcagcggctttctctgg

SEQ ID NO: 4938419 - DNA, 25 bp, Homo sapien
tcctccctgtcagcggctttctctg

SEQ ID NO: 4938420 - DNA, 25 bp, Homo sapien
gatgattttcctcagggcggaccca

SEQ ID NO: 4938421 - DNA, 25 bp, Homo sapien
gctcggggccaagtgatgattttcc

SEQ ID NO: 4938422 - DNA, 25 bp, Homo sapien
agcccgacgtcgagggtccacctct

SEQ ID NO: 4938423 - DNA, 25 bp, Homo sapien
acagaaacaagtgcccatgccctgg

SEQ ID NO: 4938424 - DNA, 25 bp, Homo sapien
tagaagtgacctcttgatggcgggc

SEQ ID NO: 4938425 - DNA, 25 bp, Homo sapien
catggtgccgtgtgcaagagctcaa

SEQ ID NO: 4938426 - DNA, 25 bp, Homo sapien
gcatcgccggcaataaaggcgcaag

SEQ ID NO: 4938427 - DNA, 25 bp, Homo sapien
acagcagggctctcgaggtgcctga

SEQ ID NO: 4938428 - DNA, 25 bp, Homo sapien
gatggctcgcgcacaataattaacg

SEQ ID NO: 4938429 - DNA, 25 bp, Homo sapien
taattaacgggaactagcagcttgt

SEQ ID NO: 4938430 - DNA, 25 bp, Homo sapien
tcatacagacgggtcaggtgtcggc

SEQ ID NO: 4938431 - DNA, 25 bp, Homo sapien
ttaatagggctctgacagtccgcgg

SEQ ID NO: 4938432 - DNA, 25 bp, Homo sapien
cacagaccctcctgggtcaagagta

SEQ ID NO: 4938433 - DNA, 25 bp, Homo sapien
ggaaccttgctctccgatgtcttct

SEQ ID NO: 4938434 - DNA, 25 bp, Homo sapien
cacagtaagaggtttcacagaccct

SEQ ID NO: 4938435 - DNA, 25 bp, Homo sapien
agagtaattgttaactggcccttct

SEQ ID NO: 4938436 - DNA, 25 bp, Homo sapien
aagcccagctcttctattgggtatg

SEQ ID NO: 4938437 - DNA, 25 bp, Homo sapien
gcccagctcttctattgggtatggt

SEQ ID NO: 4938438 - DNA, 25 bp, Homo sapien
tcgttctcttcgactgagctgcagc

SEQ ID NO: 4938439 - DNA, 25 bp, Homo sapien
cgttctcttcgactgagctgcagct

SEQ ID NO: 4938440 - DNA, 25 bp, Homo sapien
ctgcttcttatagggcactagtccc

SEQ ID NO: 4938441 - DNA, 25 bp, Homo sapien
agccatcgcgcctgtcctgtctgct

SEQ ID NO: 4938442 - DNA, 25 bp, Homo sapien
tctgcttcttatagggcactagtcc

SEQ ID NO: 4938443 - DNA, 25 bp, Homo sapien
tatccctgacgcaagtggtccctgt

SEQ ID NO: 4938444 - DNA, 25 bp, Homo sapien
gaggtaacgaactgaacatattgac

SEQ ID NO: 4938445 - DNA, 25 bp, Homo sapien
aaatgggtatgacagagcaggtaac

SEQ ID NO: 4938446 - DNA, 25 bp, Homo sapien
ggctaaataattccgattggctgat

SEQ ID NO: 4938447 - DNA, 25 bp, Homo sapien
cgaggacaggtgctctgtccacact

SEQ ID NO: 4938448 - DNA, 25 bp, Homo sapien
gaggacaggtgctctgtccacactc

SEQ ID NO: 4938449 - DNA, 25 bp, Homo sapien
cgtgcccgcaggtcaacgggcagtg

SEQ ID NO: 4938450 - DNA, 25 bp, Homo sapien
ggtcaacgggcagtgacgaagttac

SEQ ID NO: 4938451 - DNA, 25 bp, Homo sapien
caggtcaacgggcagtgacgaagtt

SEQ ID NO: 4938452 - DNA, 25 bp, Homo sapien
cccgcaggtcaacgggcagtgacga

SEQ ID NO: 4938453 - DNA, 25 bp, Homo sapien
cttcctccgtgaccccggcaggcaa

SEQ ID NO: 4938454 - DNA, 25 bp, Homo sapien
ccgtgaccccggcaggcaaggagcc

SEQ ID NO: 4938455 - DNA, 25 bp, Homo sapien
ctccgtgaccccggcaggcaaggag

SEQ ID NO: 4938456 - DNA, 25 bp, Homo sapien
tcctccgtgaccccggcaggcaagg

SEQ ID NO: 4938457 - DNA, 25 bp, Homo sapien
aaagtgaaactgcaacctgacgcag

SEQ ID NO: 4938458 - DNA, 25 bp, Homo sapien
aaactgcaacctgacgcagggcccg

SEQ ID NO: 4938459 - DNA, 25 bp, Homo sapien
tgaaactgcaacctgacgcagggcc

SEQ ID NO: 4938460 - DNA, 25 bp, Homo sapien
ctaaaagtgaaactgcaacctgacg

SEQ ID NO: 4938461 - DNA, 25 bp, Homo sapien
cgtctggcgcgtctgctctccctgg

SEQ ID NO: 4938462 - DNA, 25 bp, Homo sapien
gtctggcgcgtctgctctccctggg

SEQ ID NO: 4938463 - DNA, 25 bp, Homo sapien
cgctgggatagggggcacctgggcc

SEQ ID NO: 4938464 - DNA, 25 bp, Homo sapien
tccgctgggatagggggcacctggg

SEQ ID NO: 4938465 - DNA, 25 bp, Homo sapien
ggccatagcgggcctccgctgggat

SEQ ID NO: 4938466 - DNA, 25 bp, Homo sapien
ccatagcgggcctccgctgggatag

SEQ ID NO: 4938467 - DNA, 25 bp, Homo sapien
tccagggccttctctgtgcctggag

SEQ ID NO: 4938468 - DNA, 25 bp, Homo sapien
ctgtgcctggagctccatgagccac

SEQ ID NO: 4938469 - DNA, 25 bp, Homo sapien
tctgtgcctggagctccatgagcca

SEQ ID NO: 4938470 - DNA, 25 bp, Homo sapien
cccagctgcgtcctccagggccttc

SEQ ID NO: 4938471 - DNA, 25 bp, Homo sapien
ctcctgagcgtggtgcagggaccca

SEQ ID NO: 4938472 - DNA, 25 bp, Homo sapien
tgggatgctcccactagcagaaagc

SEQ ID NO: 4938473 - DNA, 25 bp, Homo sapien
tgtctacggtaccatgagcacctcc

SEQ ID NO: 4938474 - DNA, 25 bp, Homo sapien
actgcaaaacccagccagagtgtcg

SEQ ID NO: 4938475 - DNA, 25 bp, Homo sapien
agtgggagaagggtcagtacttgga

SEQ ID NO: 4938476 - DNA, 25 bp, Homo sapien
tgggtcaggcattgtgctctcgggg

SEQ ID NO: 4938477 - DNA, 25 bp, Homo sapien
gggagaagggtcagtacttggatgt

SEQ ID NO: 4938478 - DNA, 25 bp, Homo sapien
caggcattgtgctctcggggcgggc

SEQ ID NO: 4938479 - DNA, 25 bp, Homo sapien
caggctggtcacagggatgaactcc

SEQ ID NO: 4938480 - DNA, 25 bp, Homo sapien
actctccggactacccgctcaaagg

SEQ ID NO: 4938481 - DNA, 25 bp, Homo sapien
taacggggtttccagaaccatgagc

SEQ ID NO: 4938482 - DNA, 25 bp, Homo sapien
ttgagggcttcctaaccaccaggca

SEQ ID NO: 4938483 - DNA, 25 bp, Homo sapien
gtccttgatagacaggttgacacac

SEQ ID NO: 4938484 - DNA, 25 bp, Homo sapien
tgtccttgatagacaggttgacaca

SEQ ID NO: 4938485 - DNA, 25 bp, Homo sapien
aggatgtccttgatagacaggttga

SEQ ID NO: 4938486 - DNA, 25 bp, Homo sapien
gatgtccttgatagacaggttgaca

SEQ ID NO: 4938487 - DNA, 25 bp, Homo sapien
cagagcccagtggatggttggcccc

SEQ ID NO: 4938488 - DNA, 25 bp, Homo sapien
agtggatggttggccccagcccgct

SEQ ID NO: 4938489 - DNA, 25 bp, Homo sapien
cagtggatggttggccccagcccgc

SEQ ID NO: 4938490 - DNA, 25 bp, Homo sapien
ctgcagagcccagtggatggttggc

SEQ ID NO: 4938491 - DNA, 25 bp, Homo sapien
tggagctgtcagacaccgcggcccc

SEQ ID NO: 4938492 - DNA, 25 bp, Homo sapien
gcctgcgatctttgcctgtcctggg

SEQ ID NO: 4938493 - DNA, 25 bp, Homo sapien
ggccccgcctgcgatctttgcctgt

SEQ ID NO: 4938494 - DNA, 25 bp, Homo sapien
catggcatcgtagaagtggaagctc

SEQ ID NO: 4938495 - DNA, 25 bp, Homo sapien
gagtctgccaggtgttagggtccac

SEQ ID NO: 4938496 - DNA, 25 bp, Homo sapien
agtctgccaggtgttagggtccaca

SEQ ID NO: 4938497 - DNA, 25 bp, Homo sapien
tgtgaccttcccaagagcaaggctg

SEQ ID NO: 4938498 - DNA, 25 bp, Homo sapien
tcctgatgccccaaggttgtgacct

SEQ ID NO: 4938499 - DNA, 25 bp, Homo sapien
tccaagtccagactcgaggtgcggc

SEQ ID NO: 4938500 - DNA, 25 bp, Homo sapien
gaccccatgaggaaaggtggactcg

SEQ ID NO: 4938501 - DNA, 25 bp, Homo sapien
cttgtgggtgcgcgtgacttccacc

SEQ ID NO: 4938502 - DNA, 25 bp, Homo sapien
tgtgggtgcgcgtgacttccacctc

SEQ ID NO: 4938503 - DNA, 25 bp, Homo sapien
tcccgcttgtgggtgcgcgtgactt

SEQ ID NO: 4938504 - DNA, 25 bp, Homo sapien
ccgcttgtgggtgcgcgtgacttcc

SEQ ID NO: 4938505 - DNA, 25 bp, Homo sapien
aggtgacttcggctccgcagccaag

SEQ ID NO: 4938506 - DNA, 25 bp, Homo sapien
gccgcatgcccacgtggggggccag

SEQ ID NO: 4938507 - DNA, 25 bp, Homo sapien
aggcccgccgccaggtgacttcggc

SEQ ID NO: 4938508 - DNA, 25 bp, Homo sapien
ttcggctccgcagccaagcgcaggg

SEQ ID NO: 4938509 - DNA, 25 bp, Homo sapien
cagctgggccacccggaatgcgagg

SEQ ID NO: 4938510 - DNA, 25 bp, Homo sapien
tgggccacccggaatgcgagggtgc

SEQ ID NO: 4938511 - DNA, 25 bp, Homo sapien
ccacccggaatgcgagggtgctgcc

SEQ ID NO: 4938512 - DNA, 25 bp, Homo sapien
gccacccggaatgcgagggtgctgc

SEQ ID NO: 4938513 - DNA, 25 bp, Homo sapien
gacacaggacgttgttcagccaggg

SEQ ID NO: 4938514 - DNA, 25 bp, Homo sapien
aagctggcgggtagctctccccagg

SEQ ID NO: 4938515 - DNA, 25 bp, Homo sapien
tgccagacacaggacgttgttcagc

SEQ ID NO: 4938516 - DNA, 25 bp, Homo sapien
ccacggcagcccaagctggcgggta

SEQ ID NO: 4938517 - DNA, 25 bp, Homo sapien
gacaggcatgtcacctagatcccag

SEQ ID NO: 4938518 - DNA, 25 bp, Homo sapien
caggcatgtcacctagatcccagca

SEQ ID NO: 4938519 - DNA, 25 bp, Homo sapien
tgtcacctagatcccagcatcccct

SEQ ID NO: 4938520 - DNA, 25 bp, Homo sapien
ggcatgtcacctagatcccagcatc

SEQ ID NO: 4938521 - DNA, 25 bp, Homo sapien
aaggtcctctgcttcttatccggga

SEQ ID NO: 4938522 - DNA, 25 bp, Homo sapien
tctgcttcttatccgggaagagaag

SEQ ID NO: 4938523 - DNA, 25 bp, Homo sapien
tcctctgcttcttatccgggaagag

SEQ ID NO: 4938524 - DNA, 25 bp, Homo sapien
ggaaggtcctctgcttcttatccgg

SEQ ID NO: 4938525 - DNA, 25 bp, Homo sapien
ccttcgctcgtggaacgcttgtggc

SEQ ID NO: 4938526 - DNA, 25 bp, Homo sapien
tcaggaagttgtggaggcacctcat

SEQ ID NO: 4938527 - DNA, 25 bp, Homo sapien
tgtggaggcacctcatcatggagag

SEQ ID NO: 4938528 - DNA, 25 bp, Homo sapien
tggccaggcgccttcgctcgtggaa

SEQ ID NO: 4938529 - DNA, 25 bp, Homo sapien
gcactgcccaggtgcttacagggcc

SEQ ID NO: 4938530 - DNA, 25 bp, Homo sapien
gcaggagagcccaccaaaggtcccc

SEQ ID NO: 4938531 - DNA, 25 bp, Homo sapien
aagcctcggtcaggacaggcagacc

SEQ ID NO: 4938532 - DNA, 25 bp, Homo sapien
cagggccctggaaagcctcggtcag

SEQ ID NO: 4938533 - DNA, 25 bp, Homo sapien
cagttccttggagatggtctccacc

SEQ ID NO: 4938534 - DNA, 25 bp, Homo sapien
tggcacagctctctgtccaaaagct

SEQ ID NO: 4938535 - DNA, 25 bp, Homo sapien
ctccaaggctcgcagggccagctgg

SEQ ID NO: 4938536 - DNA, 25 bp, Homo sapien
aagtcttcagtgaacgccccctccg

SEQ ID NO: 4938537 - DNA, 25 bp, Homo sapien
caggccttgtgtgccccgggcaccc

SEQ ID NO: 4938538 - DNA, 25 bp, Homo sapien
aggccttgtgtgccccgggcaccct

SEQ ID NO: 4938539 - DNA, 25 bp, Homo sapien
agcaggtagacaacagggatagcga

SEQ ID NO: 4938540 - DNA, 25 bp, Homo sapien
gagttccggcaccagcattccggag

SEQ ID NO: 4938541 - DNA, 25 bp, Homo sapien
ggcaccagcattccggaggacaaca

SEQ ID NO: 4938542 - DNA, 25 bp, Homo sapien
aacagggatagcgagttccggcacc

SEQ ID NO: 4938543 - DNA, 25 bp, Homo sapien
tctgaacgcccaccgggaaagccca

SEQ ID NO: 4938544 - DNA, 25 bp, Homo sapien
aacagggtctgcgactccagcgcct

SEQ ID NO: 4938545 - DNA, 25 bp, Homo sapien
cagcagcttgtgctgcgtttcactc

SEQ ID NO: 4938546 - DNA, 25 bp, Homo sapien
gcagcttgtgctgcgtttcactcag

SEQ ID NO: 4938547 - DNA, 25 bp, Homo sapien
agctcgagcggccccaacagggtct

SEQ ID NO: 4938548 - DNA, 25 bp, Homo sapien
ccagctctaggccacactcgtccag

SEQ ID NO: 4938549 - DNA, 25 bp, Homo sapien
agggaggcgtagagtgcacacatgc

SEQ ID NO: 4938550 - DNA, 25 bp, Homo sapien
tcccagcacacgtggggagtgtcct

SEQ ID NO: 4938551 - DNA, 25 bp, Homo sapien
tcgtccagcaagacccaggccggtg

SEQ ID NO: 4938552 - DNA, 25 bp, Homo sapien
ccatggtagactggccacatggcta

SEQ ID NO: 4938553 - DNA, 25 bp, Homo sapien
tggtgggcaaacactctgccctgct

SEQ ID NO: 4938554 - DNA, 25 bp, Homo sapien
gtatgccacctttattgtgtttccc

SEQ ID NO: 4938555 - DNA, 25 bp, Homo sapien
ctggccttcctagggctagcagctg

SEQ ID NO: 4938556 - DNA, 25 bp, Homo sapien
aagcggaagcgggcaggtcttacat

SEQ ID NO: 4938557 - DNA, 25 bp, Homo sapien
agcggaagcgggcaggtcttacatg

SEQ ID NO: 4938558 - DNA, 25 bp, Homo sapien
gaagcggaagcgggcaggtcttaca

SEQ ID NO: 4938559 - DNA, 25 bp, Homo sapien
ggagcagaggcccagtccagccagc

SEQ ID NO: 4938560 - DNA, 25 bp, Homo sapien
gggcttcagggtgggcagcaccact

SEQ ID NO: 4938561 - DNA, 25 bp, Homo sapien
cagcaccactgtgtggttggctgag

SEQ ID NO: 4938562 - DNA, 25 bp, Homo sapien
tggctccccgggcttcagggtgggc

SEQ ID NO: 4938563 - DNA, 25 bp, Homo sapien
ttgtgtcgtttgttcacccagccca

SEQ ID NO: 4938564 - DNA, 25 bp, Homo sapien
ctgggctggagtcgggaatctgagc

SEQ ID NO: 4938565 - DNA, 25 bp, Homo sapien
aatctgagctcgaggtagcaggaag

SEQ ID NO: 4938566 - DNA, 25 bp, Homo sapien
ctgtgttgtttgtgtcgtttgttca

SEQ ID NO: 4938567 - DNA, 25 bp, Homo sapien
gcccagctgtccctgagccgactca

SEQ ID NO: 4938568 - DNA, 25 bp, Homo sapien
tgtccctgagccgactcagccctga

SEQ ID NO: 4938569 - DNA, 25 bp, Homo sapien
gcagctgtgtgagccgctcccatcc

SEQ ID NO: 4938570 - DNA, 25 bp, Homo sapien
ctgtgtgagccgctcccatccctgg

SEQ ID NO: 4938571 - DNA, 25 bp, Homo sapien
tccacctacagctacctgggcggtg

SEQ ID NO: 4938572 - DNA, 25 bp, Homo sapien
tgttccacagatgttggcgccagca

SEQ ID NO: 4938573 - DNA, 25 bp, Homo sapien
gtcacttccttttcaggcagcgagg

SEQ ID NO: 4938574 - DNA, 25 bp, Homo sapien
tgctctcaaactagggtgtccctgg

SEQ ID NO: 4938575 - DNA, 25 bp, Homo sapien
tatggccggtggaagtccttgtccc

SEQ ID NO: 4938576 - DNA, 25 bp, Homo sapien
agttacctcgtttccagacgtgcag

SEQ ID NO: 4938577 - DNA, 25 bp, Homo sapien
caccatggcgttgggctattggcgc

SEQ ID NO: 4938578 - DNA, 25 bp, Homo sapien
tgcgttcttcgagcaccttcgggcc

SEQ ID NO: 4938579 - DNA, 25 bp, Homo sapien
ccacgattaaagactgagaccggcc

SEQ ID NO: 4938580 - DNA, 25 bp, Homo sapien
taggtcactatctggagaggccacc

SEQ ID NO: 4938581 - DNA, 25 bp, Homo sapien
tcttttggtgccagccgacagtggg

SEQ ID NO: 4938582 - DNA, 25 bp, Homo sapien
gattctccctgggtagtggcccctg

SEQ ID NO: 4938583 - DNA, 25 bp, Homo sapien
tgtgtgcgctctatccagctggacg

SEQ ID NO: 4938584 - DNA, 25 bp, Homo sapien
tagaagtcttgggataaacacaaac

SEQ ID NO: 4938585 - DNA, 25 bp, Homo sapien
cacagtgggatgatgagacggacat

SEQ ID NO: 4938586 - DNA, 25 bp, Homo sapien
tctgtgggccctttaaggaaacaga

SEQ ID NO: 4938587 - DNA, 25 bp, Homo sapien
gaaggtttacagttagccctgggca

SEQ ID NO: 4938588 - DNA, 25 bp, Homo sapien
tggatcacctagagactggcttgct

SEQ ID NO: 4938589 - DNA, 25 bp, Homo sapien
tccatgatcgaggtggcagcaaggc

SEQ ID NO: 4938590 - DNA, 25 bp, Homo sapien
taaatggcccatgcgtgcaggtaga

SEQ ID NO: 4938591 - DNA, 25 bp, Homo sapien
cttgcttgaggtttttgcaaatctc

SEQ ID NO: 4938592 - DNA, 25 bp, Homo sapien
acccagcttcgtgtgagtgaaaggg

SEQ ID NO: 4938593 - DNA, 25 bp, Homo sapien
tgtttgacataaacccagcttcgtg

SEQ ID NO: 4938594 - DNA, 25 bp, Homo sapien
aatctctcgggtgtctggcttagtg

SEQ ID NO: 4938595 - DNA, 25 bp, Homo sapien
tccttgccgagagagtgtcctgggt

SEQ ID NO: 4938596 - DNA, 25 bp, Homo sapien
gactccagccctttgttaccgagag

SEQ ID NO: 4938597 - DNA, 25 bp, Homo sapien
acctgccctggtgttcacggtggcc

SEQ ID NO: 4938598 - DNA, 25 bp, Homo sapien
cacttggcaaggtccagcgatggtc

SEQ ID NO: 4938599 - DNA, 25 bp, Homo sapien
ttcgaccaggctgagcgggccttcg

SEQ ID NO: 4938600 - DNA, 25 bp, Homo sapien
caagtcacttttcgaccaggcagag

SEQ ID NO: 4938601 - DNA, 25 bp, Homo sapien
gtcaacaagtcctccttcgaccagg

SEQ ID NO: 4938602 - DNA, 25 bp, Homo sapien
acgaccctgaggacgctgatgaggc

SEQ ID NO: 4938603 - DNA, 25 bp, Homo sapien
tcccaagagcagatttgcccctggc

SEQ ID NO: 4938604 - DNA, 25 bp, Homo sapien
aagagcagatttgcccctggccttc

SEQ ID NO: 4938605 - DNA, 25 bp, Homo sapien
ctgggagcagagcgtgcccccggca

SEQ ID NO: 4938606 - DNA, 25 bp, Homo sapien
ccaagagcagatttgcccctggcct

SEQ ID NO: 4938607 - DNA, 25 bp, Homo sapien
gggcgaagacccatagccactggtg

SEQ ID NO: 4938608 - DNA, 25 bp, Homo sapien
ccactggtgtgaagggtctgctctt

SEQ ID NO: 4938609 - DNA, 25 bp, Homo sapien
gtctgctcttgaccgaaggctgcct

SEQ ID NO: 4938610 - DNA, 25 bp, Homo sapien
ccatagccactggtgtgaagggtct

SEQ ID NO: 4938611 - DNA, 25 bp, Homo sapien
tcgcgggagccacacgcccagccgc

SEQ ID NO: 4938612 - DNA, 25 bp, Homo sapien
ggccgcgcgggtcgcgggagccaca

SEQ ID NO: 4938613 - DNA, 25 bp, Homo sapien
cgggccgcgcgggtcgcgggagcca

SEQ ID NO: 4938614 - DNA, 25 bp, Homo sapien
cgcgggtcgcgggagccacacgccc

SEQ ID NO: 4938615 - DNA, 25 bp, Homo sapien
gggcaggggacggcggccgcggcgc

SEQ ID NO: 4938616 - DNA, 25 bp, Homo sapien
cttcacggccacgcggggccgcggc

SEQ ID NO: 4938617 - DNA, 25 bp, Homo sapien
gcggcggccgtgcagcggggacggg

SEQ ID NO: 4938618 - DNA, 25 bp, Homo sapien
ggggcggcggccgtgcagcggggac

SEQ ID NO: 4938619 - DNA, 25 bp, Homo sapien
gatggagtaggccttgcggaaggcc

SEQ ID NO: 4938620 - DNA, 25 bp, Homo sapien
gcccttgacgcgctcgatggcctgc

SEQ ID NO: 4938621 - DNA, 25 bp, Homo sapien
gcacgccgaagtcgcggcacacact

SEQ ID NO: 4938622 - DNA, 25 bp, Homo sapien
tgggctcgtccttgagccagccgcg

SEQ ID NO: 4938623 - DNA, 25 bp, Homo sapien
cttgaaggtgcactcgggcccgtag

SEQ ID NO: 4938624 - DNA, 25 bp, Homo sapien
accaggcgtacacggcgcggtcgat

SEQ ID NO: 4938625 - DNA, 25 bp, Homo sapien
cgcagcgccaggaaccaggcgtaca

SEQ ID NO: 4938626 - DNA, 25 bp, Homo sapien
tgcgcctggatgagcgggccagaca

SEQ ID NO: 4938627 - DNA, 25 bp, Homo sapien
gccggtgacgctggcgctgtaaatc

SEQ ID NO: 4938628 - DNA, 25 bp, Homo sapien
cggcctcgccgtagaagcgctggct

SEQ ID NO: 4938629 - DNA, 25 bp, Homo sapien
tgtaaatctgctcgtccccgtagcc

SEQ ID NO: 4938630 - DNA, 25 bp, Homo sapien
ccggtcaggtttgcggccagcagca

SEQ ID NO: 4938631 - DNA, 25 bp, Homo sapien
gatgaccagcggcttcagcttgtgg

SEQ ID NO: 4938632 - DNA, 25 bp, Homo sapien
cccgatgaccagcggcttcagcttg

SEQ ID NO: 4938633 - DNA, 25 bp, Homo sapien
gcagccgcccgatgaccagcggctt

SEQ ID NO: 4938634 - DNA, 25 bp, Homo sapien
gccgcccgatgaccagcggcttcag

SEQ ID NO: 4938635 - DNA, 25 bp, Homo sapien
cagcttcggcgcaggtagcgtttga

SEQ ID NO: 4938636 - DNA, 25 bp, Homo sapien
caggtagcgtttgacgcctgggaca

SEQ ID NO: 4938637 - DNA, 25 bp, Homo sapien
attcctcaaagaaccagccccgcag

SEQ ID NO: 4938638 - DNA, 25 bp, Homo sapien
gacgcctgggacaaattcctcaaag

SEQ ID NO: 4938639 - DNA, 25 bp, Homo sapien
atgagtgagcgcaactgcaccagcc

SEQ ID NO: 4938640 - DNA, 25 bp, Homo sapien
gctcgcgcttgtacagctgtttgaa

SEQ ID NO: 4938641 - DNA, 25 bp, Homo sapien
tgaggtccctccatagtcggtggcc

SEQ ID NO: 4938642 - DNA, 25 bp, Homo sapien
gcacagcgccatccggtgtctgcag

SEQ ID NO: 4938643 - DNA, 25 bp, Homo sapien
caagccatgctggatttggattcct

SEQ ID NO: 4938644 - DNA, 25 bp, Homo sapien
tagcagacaggagtttcggccctcg

SEQ ID NO: 4938645 - DNA, 25 bp, Homo sapien
tagcaccagggctcgatagcagaca

SEQ ID NO: 4938646 - DNA, 25 bp, Homo sapien
tagaatcaagtggtgtgcttcgcca

SEQ ID NO: 4938647 - DNA, 25 bp, Homo sapien
tctgcaaaggcagttcccaccctac

SEQ ID NO: 4938648 - DNA, 25 bp, Homo sapien
gctcgggcagcatctctgcaaaggc

SEQ ID NO: 4938649 - DNA, 25 bp, Homo sapien
tctctgcaaaggcagttcccaccct

SEQ ID NO: 4938650 - DNA, 25 bp, Homo sapien
tcacaccagctcgggcagcatctct

SEQ ID NO: 4938651 - DNA, 25 bp, Homo sapien
accgcggccgtgaagtcagcttctc

SEQ ID NO: 4938652 - DNA, 25 bp, Homo sapien
tcgccaaagacgcagcggcaatgag

SEQ ID NO: 4938653 - DNA, 25 bp, Homo sapien
gactacagacaaggcctggctatgc

SEQ ID NO: 4938654 - DNA, 25 bp, Homo sapien
atccccagcagttcaggccagaggc

SEQ ID NO: 4938655 - DNA, 25 bp, Homo sapien
actggagcgcggtgttgtgatcttg

SEQ ID NO: 4938656 - DNA, 25 bp, Homo sapien
cgcgcagactggagcgcggtgttgt

SEQ ID NO: 4938657 - DNA, 25 bp, Homo sapien
cccatgggtgtctcaactaggtagg

SEQ ID NO: 4938658 - DNA, 25 bp, Homo sapien
gtgatgtttcatccgcagcccagtg

SEQ ID NO: 4938659 - DNA, 25 bp, Homo sapien
cctagggactccgacatgctgttgg

SEQ ID NO: 4938660 - DNA, 25 bp, Homo sapien
aggaagggccctcaacagagcatga

SEQ ID NO: 4938661 - DNA, 25 bp, Homo sapien
agtgcaagtgcttgggacgacaacc

SEQ ID NO: 4938662 - DNA, 25 bp, Homo sapien
caagtgcttgggacgacaacccggg

SEQ ID NO: 4938663 - DNA, 25 bp, Homo sapien
ttgggacgacaacccgggctcctca

SEQ ID NO: 4938664 - DNA, 25 bp, Homo sapien
tgcttgggacgacaacccgggctcc

SEQ ID NO: 4938665 - DNA, 25 bp, Homo sapien
tcgccgtaactctggtgttgtttgc

SEQ ID NO: 4938666 - DNA, 25 bp, Homo sapien
gattcgccgtaactctggtgttgtt

SEQ ID NO: 4938667 - DNA, 25 bp, Homo sapien
cgtgattcgccgtaactctggtgtt

SEQ ID NO: 4938668 - DNA, 25 bp, Homo sapien
ccaacgtgattcgccgtaactctgg

SEQ ID NO: 4938669 - DNA, 25 bp, Homo sapien
tttgtttacaatactccagcactgg

SEQ ID NO: 4938670 - DNA, 25 bp, Homo sapien
tgactgctctcataaaggaggctag

SEQ ID NO: 4938671 - DNA, 25 bp, Homo sapien
taagacacggcgctatctatggcct

SEQ ID NO: 4938672 - DNA, 25 bp, Homo sapien
gaaagactgttgctgtaagacacgg

SEQ ID NO: 4938673 - DNA, 25 bp, Homo sapien
cgcctgggaaacttcctgcgccgtt

SEQ ID NO: 4938674 - DNA, 25 bp, Homo sapien
cctctcagtggtgcggacttccggg

SEQ ID NO: 4938675 - DNA, 25 bp, Homo sapien
ttctaggagcgccagggatcggctc

SEQ ID NO: 4938676 - DNA, 25 bp, Homo sapien
acagatcagccgacaaagcctgcac

SEQ ID NO: 4938677 - DNA, 25 bp, Homo sapien
tctcggcggactgtgccctggcaag

SEQ ID NO: 4938678 - DNA, 25 bp, Homo sapien
ggagactgactagccaaggccccgc

SEQ ID NO: 4938679 - DNA, 25 bp, Homo sapien
gcccgaggcgggctcgctggagaga

SEQ ID NO: 4938680 - DNA, 25 bp, Homo sapien
ccccgctcctggacgccctagcggg

SEQ ID NO: 4938681 - DNA, 25 bp, Homo sapien
ggaaaacaagtacgcttcttgacat

SEQ ID NO: 4938682 - DNA, 25 bp, Homo sapien
tgcccggctgaggtgttgcttctta

SEQ ID NO: 4938683 - DNA, 25 bp, Homo sapien
catgcccggctgaggtgttgcttct

SEQ ID NO: 4938684 - DNA, 25 bp, Homo sapien
tacgcttcttgacatggaatctgct

SEQ ID NO: 4938685 - DNA, 25 bp, Homo sapien
caaagattgaaaaggacaggctgac

SEQ ID NO: 4938686 - DNA, 25 bp, Homo sapien
tcttgcatcaaacggctgagcggca

SEQ ID NO: 4938687 - DNA, 25 bp, Homo sapien
gaatgcagctggtgacgtgaagcca

SEQ ID NO: 4938688 - DNA, 25 bp, Homo sapien
caactttgcccgacagctggtgtga

SEQ ID NO: 4938689 - DNA, 25 bp, Homo sapien
aatcagggcaggataaaatccatat

SEQ ID NO: 4938690 - DNA, 25 bp, Homo sapien
ccttacttaacagatggggatctcc

SEQ ID NO: 4938691 - DNA, 25 bp, Homo sapien
ccaagcctgtcccacataagatggc

SEQ ID NO: 4938692 - DNA, 25 bp, Homo sapien
tccacttttaacatccaacaccagg

SEQ ID NO: 4938693 - DNA, 25 bp, Homo sapien
ctgaaacaaaagacaacaaaatcat

SEQ ID NO: 4938694 - DNA, 25 bp, Homo sapien
acgtcgtcctatgtgagttttcatc

SEQ ID NO: 4938695 - DNA, 25 bp, Homo sapien
ctgacgtcgtcctatgtgagttttc

SEQ ID NO: 4938696 - DNA, 25 bp, Homo sapien
ttcttctcaccagttcctacattag

SEQ ID NO: 4938697 - DNA, 25 bp, Homo sapien
tcttctcaccagttcctacattaga

SEQ ID NO: 4938698 - DNA, 25 bp, Homo sapien
tgggctcgtggacttcctcagactc

SEQ ID NO: 4938699 - DNA, 25 bp, Homo sapien
aagagctcccctaatctgggctcgt

SEQ ID NO: 4938700 - DNA, 25 bp, Homo sapien
caggctctgaccttctggatttccc

SEQ ID NO: 4938701 - DNA, 25 bp, Homo sapien
tctgaagcagaagaaggtctgaatt

SEQ ID NO: 4938702 - DNA, 25 bp, Homo sapien
tctccccagcatgcgaaatccgatg

SEQ ID NO: 4938703 - DNA, 25 bp, Homo sapien
tgaactctctggtgcctaatcaggt

SEQ ID NO: 4938704 - DNA, 25 bp, Homo sapien
tgaacgcgctgatgctcaatgagac

SEQ ID NO: 4938705 - DNA, 25 bp, Homo sapien
tgatcgcacgtgtaaggtttctccc

SEQ ID NO: 4938706 - DNA, 25 bp, Homo sapien
taatggcgaatgaggctcgagctcc

SEQ ID NO: 4938707 - DNA, 25 bp, Homo sapien
cactcattgcatacgtaaggcctct

SEQ ID NO: 4938708 - DNA, 25 bp, Homo sapien
gaagtttgacgtctggctgaagcgc

SEQ ID NO: 4938709 - DNA, 25 bp, Homo sapien
tctgagcgatgacggaatgccttcc

SEQ ID NO: 4938710 - DNA, 25 bp, Homo sapien
tctggtgttgaaggaagtttgacct

SEQ ID NO: 4938711 - DNA, 25 bp, Homo sapien
agcctttcccacaataactgcacac

SEQ ID NO: 4938712 - DNA, 25 bp, Homo sapien
tgaaggaagtttgacctctgaataa

SEQ ID NO: 4938713 - DNA, 25 bp, Homo sapien
ttgacctctgaataaagcctttccc

SEQ ID NO: 4938714 - DNA, 25 bp, Homo sapien
tgtgttcccccttatctacagacct

SEQ ID NO: 4938715 - DNA, 25 bp, Homo sapien
tgtagttgagttaaaatctctccca

SEQ ID NO: 4938716 - DNA, 25 bp, Homo sapien
tgtatgggggccttactcaaggaga

SEQ ID NO: 4938717 - DNA, 25 bp, Homo sapien
ctcaaggagagtccctcttggtgaa

SEQ ID NO: 4938718 - DNA, 25 bp, Homo sapien
ggaacccaacagcatagtgacagag

SEQ ID NO: 4938719 - DNA, 25 bp, Homo sapien
gcattaaccgtgtggcaggaagtca

SEQ ID NO: 4938720 - DNA, 25 bp, Homo sapien
caaggatggactctgcttaactggg

SEQ ID NO: 4938721 - DNA, 25 bp, Homo sapien
tcaagccctgtgactctcctgagga

SEQ ID NO: 4938722 - DNA, 25 bp, Homo sapien
tccagctgagccaggtgtcaatgcc

SEQ ID NO: 4938723 - DNA, 25 bp, Homo sapien
cactacacggtggatgacttcaggg

SEQ ID NO: 4938724 - DNA, 25 bp, Homo sapien
tgagactgtgcctttcgagtgagac

SEQ ID NO: 4938725 - DNA, 25 bp, Homo sapien
tacaacagaagagttacgtagcgca

SEQ ID NO: 4938726 - DNA, 25 bp, Homo sapien
gacacatcacaaaagacgacacgga

SEQ ID NO: 4938727 - DNA, 25 bp, Homo sapien
catgccaaagtgagacatcagacgc

SEQ ID NO: 4938728 - DNA, 25 bp, Homo sapien
taaagactaacagtttggcgaggcg

SEQ ID NO: 4938729 - DNA, 25 bp, Homo sapien
catagttttaagagccgagactgga

SEQ ID NO: 4938730 - DNA, 25 bp, Homo sapien
ggtgtccagaacagaccacttctat

SEQ ID NO: 4938731 - DNA, 25 bp, Homo sapien
gaatcttgacccttatcacatatgg

SEQ ID NO: 4938732 - DNA, 25 bp, Homo sapien
tatacacacaagaagaatggtgtcc

SEQ ID NO: 4938733 - DNA, 25 bp, Homo sapien
cccggatgttcgaggttacattagc

SEQ ID NO: 4938734 - DNA, 25 bp, Homo sapien
cctggcctgaagttgatagaagttg

SEQ ID NO: 4938735 - DNA, 25 bp, Homo sapien
gaaaaccttaccacttgcaatagca

SEQ ID NO: 4938736 - DNA, 25 bp, Homo sapien
tcaactacagttggccaggagtggt

SEQ ID NO: 4938737 - DNA, 25 bp, Homo sapien
cgaaaatgcaaaggatctagaagtc

SEQ ID NO: 4938738 - DNA, 25 bp, Homo sapien
atggacacagcatgggatgtgtgtg

SEQ ID NO: 4938739 - DNA, 25 bp, Homo sapien
agagggaggccacgcatggacacag

SEQ ID NO: 4938740 - DNA, 25 bp, Homo sapien
atggacacagcatgggatgtgtgtg

SEQ ID NO: 4938741 - DNA, 25 bp, Homo sapien
agagggaggccacgcatggacacag

SEQ ID NO: 4938742 - DNA, 25 bp, Homo sapien
cacagcgtgggatgtacatgcacac

SEQ ID NO: 4938743 - DNA, 25 bp, Homo sapien
ccacgtagggacacaggatgggata

SEQ ID NO: 4938744 - DNA, 25 bp, Homo sapien
gccacgcatggacacagcgtgggat

SEQ ID NO: 4938745 - DNA, 25 bp, Homo sapien
tggacacagcgtgggatgtacatgc

SEQ ID NO: 4938746 - DNA, 25 bp, Homo sapien
acccatggcattgcaagtgaagttg

SEQ ID NO: 4938747 - DNA, 25 bp, Homo sapien
ggatccacccatggcattgcaagtg

SEQ ID NO: 4938748 - DNA, 25 bp, Homo sapien
ggggatccacccatggcattgcaag

SEQ ID NO: 4938749 - DNA, 25 bp, Homo sapien
atccacccatggcattgcaagtgaa

SEQ ID NO: 4938750 - DNA, 25 bp, Homo sapien
gctaaggttctaactatgtgaaccc

SEQ ID NO: 4938751 - DNA, 25 bp, Homo sapien
actgctaaggttctaactatgtgaa

SEQ ID NO: 4938752 - DNA, 25 bp, Homo sapien
ctttactgctaaggttctaactatg

SEQ ID NO: 4938753 - DNA, 25 bp, Homo sapien
ttactgctaaggttctaactatgtg

SEQ ID NO: 4938754 - DNA, 25 bp, Homo sapien
gcgccggtagcccagacttttacaa

SEQ ID NO: 4938755 - DNA, 25 bp, Homo sapien
taggatgctgcatccactacgccgc

SEQ ID NO: 4938756 - DNA, 25 bp, Homo sapien
tacgccgcgccggtagcccagactt

SEQ ID NO: 4938757 - DNA, 25 bp, Homo sapien
acaggggcgtcctccactaggatgc

SEQ ID NO: 4938758 - DNA, 25 bp, Homo sapien
gcagccgcgacgctgggtctcacag

SEQ ID NO: 4938759 - DNA, 25 bp, Homo sapien
ccccgaatagccgagggcacgggca

SEQ ID NO: 4938760 - DNA, 25 bp, Homo sapien
aagaagctgaagaacagcccccgaa

SEQ ID NO: 4938761 - DNA, 25 bp, Homo sapien
gcagcctccccggtctgtcccagca

SEQ ID NO: 4938762 - DNA, 25 bp, Homo sapien
agaagttgcggcgagccgatatcgc

SEQ ID NO: 4938763 - DNA, 25 bp, Homo sapien
cctggatgttagactgagacgctgt

SEQ ID NO: 4938764 - DNA, 25 bp, Homo sapien
agcctggatgttagactgagacgct

SEQ ID NO: 4938765 - DNA, 25 bp, Homo sapien
gcctggatgttagactgagacgctg

SEQ ID NO: 4938766 - DNA, 25 bp, Homo sapien
tcttaatgaggccagcaaaacccaa

SEQ ID NO: 4938767 - DNA, 25 bp, Homo sapien
gtggcagtgcacatatgcagtccca

SEQ ID NO: 4938768 - DNA, 25 bp, Homo sapien
caaagcctacggaagcacagtactg

SEQ ID NO: 4938769 - DNA, 25 bp, Homo sapien
cagaggaagagcagacgctatccag

SEQ ID NO: 4938770 - DNA, 25 bp, Homo sapien
cagacatggaagtatcctaaagggc

SEQ ID NO: 4938771 - DNA, 25 bp, Homo sapien
ggccgtcaggagcaactcatgcaaa

SEQ ID NO: 4938772 - DNA, 25 bp, Homo sapien
gaagtatcctaaagggccgtcagga

SEQ ID NO: 4938773 - DNA, 25 bp, Homo sapien
gggccgtcaggagcaactcatgcaa

SEQ ID NO: 4938774 - DNA, 25 bp, Homo sapien
tcaggggaggggaggagatgtcact

SEQ ID NO: 4938775 - DNA, 25 bp, Homo sapien
ctcgtcaggggaggggaggagatgt

SEQ ID NO: 4938776 - DNA, 25 bp, Homo sapien
tcgtcaggggaggggaggagatgtc

SEQ ID NO: 4938777 - DNA, 25 bp, Homo sapien
gtcaggggaggggaggagatgtcac

SEQ ID NO: 4938778 - DNA, 25 bp, Homo sapien
agctcccgaagaggccattcccaag

SEQ ID NO: 4938779 - DNA, 25 bp, Homo sapien
cgtcccggtagagggccctctggct

SEQ ID NO: 4938780 - DNA, 25 bp, Homo sapien
ctgggttccagacacgcccactcct

SEQ ID NO: 4938781 - DNA, 25 bp, Homo sapien
ctcctcccttgagaagtagatggcc

SEQ ID NO: 4938782 - DNA, 25 bp, Homo sapien
ttgagaagtagatggccacgtccct

SEQ ID NO: 4938783 - DNA, 25 bp, Homo sapien
tgttttacttgtactgaggacaaag

SEQ ID NO: 4938784 - DNA, 25 bp, Homo sapien
tcagagcagttgtgcatcagcctaa

SEQ ID NO: 4938785 - DNA, 25 bp, Homo sapien
aagccaataacttctagctcctgag

SEQ ID NO: 4938786 - DNA, 25 bp, Homo sapien
tgggaggccccactactgtcctgga

SEQ ID NO: 4938787 - DNA, 25 bp, Homo sapien
ctcccactgttccaggcgagagacg

SEQ ID NO: 4938788 - DNA, 25 bp, Homo sapien
ggtcttcaacccacggctcctccca

SEQ ID NO: 4938789 - DNA, 25 bp, Homo sapien
ggcgagagacgaggtctggtctggg

SEQ ID NO: 4938790 - DNA, 25 bp, Homo sapien
ctctcccggtcttcaacccacggct

SEQ ID NO: 4938791 - DNA, 25 bp, Homo sapien
ccagtgtccatcagggcaggagcgt

SEQ ID NO: 4938792 - DNA, 25 bp, Homo sapien
caaacaaggacgtggagcaaactcc

SEQ ID NO: 4938793 - DNA, 25 bp, Homo sapien
tgggaaggacacacccttggtcact

SEQ ID NO: 4938794 - DNA, 25 bp, Homo sapien
tcacgtgcagtcagtaccaggcctg

SEQ ID NO: 4938795 - DNA, 25 bp, Homo sapien
ctggatgatcacaaggtctcttggg

SEQ ID NO: 4938796 - DNA, 25 bp, Homo sapien
gtctcttggggtctgcagacttcct

SEQ ID NO: 4938797 - DNA, 25 bp, Homo sapien
cttggggtctgcagacttccttgcc

SEQ ID NO: 4938798 - DNA, 25 bp, Homo sapien
tcttggggtctgcagacttccttgc

SEQ ID NO: 4938799 - DNA, 25 bp, Homo sapien
gaagctgcccgtcatccgtgtccag

SEQ ID NO: 4938800 - DNA, 25 bp, Homo sapien
ctgacacgggaaagccgtgggcttg

SEQ ID NO: 4938801 - DNA, 25 bp, Homo sapien
cacgtgggttttcttgtgagcccaa

SEQ ID NO: 4938802 - DNA, 25 bp, Homo sapien
ctggctctttctcgccgcacgtggg

SEQ ID NO: 4938803 - DNA, 25 bp, Homo sapien
cgccgcccacaacgctgcgtgagca

SEQ ID NO: 4938804 - DNA, 25 bp, Homo sapien
cttcccgcacgtgccgcagatgaat

SEQ ID NO: 4938805 - DNA, 25 bp, Homo sapien
tgacagctctactgcgcgctgcttc

SEQ ID NO: 4938806 - DNA, 25 bp, Homo sapien
cacgtgccgcagatgaatgacagct

SEQ ID NO: 4938807 - DNA, 25 bp, Homo sapien
tagaacctcttcgtcaggtgcagcc

SEQ ID NO: 4938808 - DNA, 25 bp, Homo sapien
tggcgctgcaggtttgaagcccacc

SEQ ID NO: 4938809 - DNA, 25 bp, Homo sapien
cgtgaagaaccccaggtgacggaag

SEQ ID NO: 4938810 - DNA, 25 bp, Homo sapien
tgagtcctctgatgccgcgtgaaga

SEQ ID NO: 4938811 - DNA, 25 bp, Homo sapien
cccacgaaatgcgatgtggtggata

SEQ ID NO: 4938812 - DNA, 25 bp, Homo sapien
caggttgattttccaggctgaagag

SEQ ID NO: 4938813 - DNA, 25 bp, Homo sapien
aaaggctcttgtttctacggcccag

SEQ ID NO: 4938814 - DNA, 25 bp, Homo sapien
tgaggttcagtattacaaaggctct

SEQ ID NO: 4938815 - DNA, 25 bp, Homo sapien
cctgaaacacggcagtgtcccgacc

SEQ ID NO: 4938816 - DNA, 25 bp, Homo sapien
tggactctgtaagagaaaggcaccc

SEQ ID NO: 4938817 - DNA, 25 bp, Homo sapien
ccctaggcccgacgtgatggtatga

SEQ ID NO: 4938818 - DNA, 25 bp, Homo sapien
gtgaggattcctccgtaaccctgtg

SEQ ID NO: 4938819 - DNA, 25 bp, Homo sapien
tctgaaattcccatgtggaagccct

SEQ ID NO: 4938820 - DNA, 25 bp, Homo sapien
atgatccgccgcatctactgccgag

SEQ ID NO: 4938821 - DNA, 25 bp, Homo sapien
caaccatccagtgtgtgagccctgg

SEQ ID NO: 4938822 - DNA, 25 bp, Homo sapien
cattgtgagggactaacgaccaggc

SEQ ID NO: 4938823 - DNA, 25 bp, Homo sapien
tcctgcacaagagcgtcacaaagtg

SEQ ID NO: 4938824 - DNA, 25 bp, Homo sapien
ttacactggacacatgtgtgctgag

SEQ ID NO: 4938825 - DNA, 25 bp, Homo sapien
tcaaggctgccagtggctaccacgt

SEQ ID NO: 4938826 - DNA, 25 bp, Homo sapien
taatcttggtggactttacactgga

SEQ ID NO: 4938827 - DNA, 25 bp, Homo sapien
tgctgagcgctaacacaaaggccag

SEQ ID NO: 4938828 - DNA, 25 bp, Homo sapien
gggccgagcgcagggagccagccag

SEQ ID NO: 4938829 - DNA, 25 bp, Homo sapien
acccatggcgcccaagaaaaagcgc

SEQ ID NO: 4938830 - DNA, 25 bp, Homo sapien
ctggtggtccaggcaccaacccatg

SEQ ID NO: 4938831 - DNA, 25 bp, Homo sapien
gcccaagaaaaagcgcgggccgagc

SEQ ID NO: 4938832 - DNA, 25 bp, Homo sapien
accagctgggtcagtcgcttcatgg

SEQ ID NO: 4938833 - DNA, 25 bp, Homo sapien
agctgggtcagtcgcttcatgggtg

SEQ ID NO: 4938834 - DNA, 25 bp, Homo sapien
ccagctgggtcagtcgcttcatggg

SEQ ID NO: 4938835 - DNA, 25 bp, Homo sapien
cagctgggtcagtcgcttcatgggt

SEQ ID NO: 4938836 - DNA, 25 bp, Homo sapien
tccagtggcagatgcgcgggtgcag

SEQ ID NO: 4938837 - DNA, 25 bp, Homo sapien
aagagcaaccgagaccctccagtgg

SEQ ID NO: 4938838 - DNA, 25 bp, Homo sapien
aaaggccaagagcaaccgagaccct

SEQ ID NO: 4938839 - DNA, 25 bp, Homo sapien
accctccagtggcagatgcgcgggt

SEQ ID NO: 4938840 - DNA, 25 bp, Homo sapien
tgggagctgatgcatgtcacggcct

SEQ ID NO: 4938841 - DNA, 25 bp, Homo sapien
gctttctctgggacaatcctgggtg

SEQ ID NO: 4938842 - DNA, 25 bp, Homo sapien
ctgggactgaccgagagccttgtgt

SEQ ID NO: 4938843 - DNA, 25 bp, Homo sapien
ttatggccctcgtggtgctgtggac

SEQ ID NO: 4938844 - DNA, 25 bp, Homo sapien
tgaatctggaggcatggactcagga

SEQ ID NO: 4938845 - DNA, 25 bp, Homo sapien
cagatgtgggctacagactcagata

SEQ ID NO: 4938846 - DNA, 25 bp, Homo sapien
tcacttacttgagccccttcggtgg

SEQ ID NO: 4938847 - DNA, 25 bp, Homo sapien
ttgtgtgggccgagatcctaccttg

SEQ ID NO: 4938848 - DNA, 25 bp, Homo sapien
gacgcccgcggggccttactgttga

SEQ ID NO: 4938849 - DNA, 25 bp, Homo sapien
gcccgcggggccttactgttgagtc

SEQ ID NO: 4938850 - DNA, 25 bp, Homo sapien
cgcccgcggggccttactgttgagt

SEQ ID NO: 4938851 - DNA, 25 bp, Homo sapien
cccgcggggccttactgttgagtcg

SEQ ID NO: 4938852 - DNA, 25 bp, Homo sapien
acaatgcgagggtccactacggtgc

SEQ ID NO: 4938853 - DNA, 25 bp, Homo sapien
taggtatctccggacaatgcgaggg

SEQ ID NO: 4938854 - DNA, 25 bp, Homo sapien
ccgagctgccgcctgagtaggtatc

SEQ ID NO: 4938855 - DNA, 25 bp, Homo sapien
cctgagtaggtatctccggacaatg

SEQ ID NO: 4938856 - DNA, 25 bp, Homo sapien
acacacaggcttacatgctcacaca

SEQ ID NO: 4938857 - DNA, 25 bp, Homo sapien
gaagcgggcgactgtggacgcgtgg

SEQ ID NO: 4938858 - DNA, 25 bp, Homo sapien
ccagagcgtcgtgtgcacccgggaa

SEQ ID NO: 4938859 - DNA, 25 bp, Homo sapien
gggcgccaggatccctctgcctgag

SEQ ID NO: 4938860 - DNA, 25 bp, Homo sapien
acctcaccagtcctccggtccactg

SEQ ID NO: 4938861 - DNA, 25 bp, Homo sapien
tgtcttatccctaaaagcatcaaag

SEQ ID NO: 4938862 - DNA, 25 bp, Homo sapien
ctgtcttatccctaaaagcatcaaa

SEQ ID NO: 4938863 - DNA, 25 bp, Homo sapien
tttcttgatggccacgacctcacca

SEQ ID NO: 4938864 - DNA, 25 bp, Homo sapien
tggaggagcgtgatttcccggaatg

SEQ ID NO: 4938865 - DNA, 25 bp, Homo sapien
gaggagcgtgatttcccggaatgtt

SEQ ID NO: 4938866 - DNA, 25 bp, Homo sapien
ctggaggagcgtgatttcccggaat

SEQ ID NO: 4938867 - DNA, 25 bp, Homo sapien
ggagcgtgatttcccggaatgttct

SEQ ID NO: 4938868 - DNA, 25 bp, Homo sapien
aaatgtccctgtcgttctctgcccg

SEQ ID NO: 4938869 - DNA, 25 bp, Homo sapien
ttctctgcccggatcacgtcaagga

SEQ ID NO: 4938870 - DNA, 25 bp, Homo sapien
aacaccaggtaaatgtccctgtcgt

SEQ ID NO: 4938871 - DNA, 25 bp, Homo sapien
tcacgtcaaggaggctgatgatgtt

SEQ ID NO: 4938872 - DNA, 25 bp, Homo sapien
tccctgagtccagggtacatggtga

SEQ ID NO: 4938873 - DNA, 25 bp, Homo sapien
ctggaggctgacactagtcagctgt

SEQ ID NO: 4938874 - DNA, 25 bp, Homo sapien
gcaactgcaaactgtggtcagagca

SEQ ID NO: 4938875 - DNA, 25 bp, Homo sapien
gcagacggcgtcaggacagaacaga

SEQ ID NO: 4938876 - DNA, 25 bp, Homo sapien
cggtgcacaacgtgccccgagtgga

SEQ ID NO: 4938877 - DNA, 25 bp, Homo sapien
ccggatgactgcgttcaggtcagtg

SEQ ID NO: 4938878 - DNA, 25 bp, Homo sapien
aagatggagcgcacgtggacgtcct

SEQ ID NO: 4938879 - DNA, 25 bp, Homo sapien
agcaggccgcccttccggatgactg

SEQ ID NO: 4938880 - DNA, 25 bp, Homo sapien
gagccgggccacgtggcatagcggg

SEQ ID NO: 4938881 - DNA, 25 bp, Homo sapien
ggagccgggccacgtggcatagcgg

SEQ ID NO: 4938882 - DNA, 25 bp, Homo sapien
cgggagccgggccacgtggcatagc

SEQ ID NO: 4938883 - DNA, 25 bp, Homo sapien
gccgggagccgggccacgtggcata

SEQ ID NO: 4938884 - DNA, 25 bp, Homo sapien
aagagagcagcacctccggtgctcg

SEQ ID NO: 4938885 - DNA, 25 bp, Homo sapien
tgtgcagttggcatccaggagcaca

SEQ ID NO: 4938886 - DNA, 25 bp, Homo sapien
ccggtgctcggtaccagcgtgtggc

SEQ ID NO: 4938887 - DNA, 25 bp, Homo sapien
acgtactctgtcacggcctggtcct

SEQ ID NO: 4938888 - DNA, 25 bp, Homo sapien
ggaacaggggtctcccccgcagcat

SEQ ID NO: 4938889 - DNA, 25 bp, Homo sapien
tggagggtggacgtgccggggaaca

SEQ ID NO: 4938890 - DNA, 25 bp, Homo sapien
tcagatggcggtgggatggtctcca

SEQ ID NO: 4938891 - DNA, 25 bp, Homo sapien
tccacatgtccaccccaagggtgta

SEQ ID NO: 4938892 - DNA, 25 bp, Homo sapien
cagaggcacggcagcctgagccgag

SEQ ID NO: 4938893 - DNA, 25 bp, Homo sapien
agaggcacggcagcctgagccgaga

SEQ ID NO: 4938894 - DNA, 25 bp, Homo sapien
acagaggcacggcagcctgagccga

SEQ ID NO: 4938895 - DNA, 25 bp, Homo sapien
aggcacggcagcctgagccgagagc

SEQ ID NO: 4938896 - DNA, 25 bp, Homo sapien
tcccttgagataggccaccctgtca

SEQ ID NO: 4938897 - DNA, 25 bp, Homo sapien
ggtggccctgctcccttgagatagg

SEQ ID NO: 4938898 - DNA, 25 bp, Homo sapien
acaaactggccccagtaaacttgca

SEQ ID NO: 4938899 - DNA, 25 bp, Homo sapien
cagaatctgaactggtacaaactgg

SEQ ID NO: 4938900 - DNA, 25 bp, Homo sapien
tgctttcagtgtggccaacagttgt

SEQ ID NO: 4938901 - DNA, 25 bp, Homo sapien
tgtgggctgccgtgtgtcgtctcca

SEQ ID NO: 4938902 - DNA, 25 bp, Homo sapien
tgtctaggtagatgcccctgtgcct

SEQ ID NO: 4938903 - DNA, 25 bp, Homo sapien
tcctcagatccatgttcgtggctgg

SEQ ID NO: 4938904 - DNA, 25 bp, Homo sapien
taggagggcatccagcgtctgtcgt

SEQ ID NO: 4938905 - DNA, 25 bp, Homo sapien
gcggtaggagggcatccagcgtctg

SEQ ID NO: 4938906 - DNA, 25 bp, Homo sapien
ctggcggtaggagggcatccagcgt

SEQ ID NO: 4938907 - DNA, 25 bp, Homo sapien
ggtaggagggcatccagcgtctgtc

SEQ ID NO: 4938908 - DNA, 25 bp, Homo sapien
gagtcgcctaaggaggtccaaggcc

SEQ ID NO: 4938909 - DNA, 25 bp, Homo sapien
gggcgaacaccaggagtcgcctaag

SEQ ID NO: 4938910 - DNA, 25 bp, Homo sapien
tgcagtgcctgggtcgcgcttaacc

SEQ ID NO: 4938911 - DNA, 25 bp, Homo sapien
tgggtcgcgcttaaccgcttgtccg

SEQ ID NO: 4938912 - DNA, 25 bp, Homo sapien
cctctcgtgcccactcgtcgctggg

SEQ ID NO: 4938913 - DNA, 25 bp, Homo sapien
tcaggcacagagagctggacccctt

SEQ ID NO: 4938914 - DNA, 25 bp, Homo sapien
tgatagacgcggctgcggtactcag

SEQ ID NO: 4938915 - DNA, 25 bp, Homo sapien
agctggaccccttcgtgtgcccggg

SEQ ID NO: 4938916 - DNA, 25 bp, Homo sapien
caggggatgataggggtcgagagcc

SEQ ID NO: 4938917 - DNA, 25 bp, Homo sapien
cagtagacaggggatgataggggtc

SEQ ID NO: 4938918 - DNA, 25 bp, Homo sapien
tgataggggtcgagagccggagcac

SEQ ID NO: 4938919 - DNA, 25 bp, Homo sapien
gcatggggcgtttgggggtctctga

SEQ ID NO: 4938920 - DNA, 25 bp, Homo sapien
agggtcggctctgggtttgtgcagg

SEQ ID NO: 4938921 - DNA, 25 bp, Homo sapien
tgctgcctccacactccaggatcat

SEQ ID NO: 4938922 - DNA, 25 bp, Homo sapien
cttctctctcgaggtgccgctgctg

SEQ ID NO: 4938923 - DNA, 25 bp, Homo sapien
ggcagctgagggtcggctctgggtt

SEQ ID NO: 4938924 - DNA, 25 bp, Homo sapien
ggtcagtgggtcaaccccagggtca

SEQ ID NO: 4938925 - DNA, 25 bp, Homo sapien
gctgcgcatagttggcagcacaggc

SEQ ID NO: 4938926 - DNA, 25 bp, Homo sapien
cagggtcaggaaccgaatgctgcgc

SEQ ID NO: 4938927 - DNA, 25 bp, Homo sapien
gcgtgggcggccagcaaagatcaca

SEQ ID NO: 4938928 - DNA, 25 bp, Homo sapien
gaacgttcttggctgcacgggggga

SEQ ID NO: 4938929 - DNA, 25 bp, Homo sapien
cctgggaacgttcttggctgcacgg

SEQ ID NO: 4938930 - DNA, 25 bp, Homo sapien
aggggagcggagttctgcctgggaa

SEQ ID NO: 4938931 - DNA, 25 bp, Homo sapien
gttctgcctgggaacgttcttggct

SEQ ID NO: 4938932 - DNA, 25 bp, Homo sapien
cagcgagagtgtcaaggggggcgct

SEQ ID NO: 4938933 - DNA, 25 bp, Homo sapien
gtgtcaaggggggcgcttccttcgc

SEQ ID NO: 4938934 - DNA, 25 bp, Homo sapien
cgagagtgtcaaggggggcgcttcc

SEQ ID NO: 4938935 - DNA, 25 bp, Homo sapien
gagtgtcaaggggggcgcttccttc

SEQ ID NO: 4938936 - DNA, 25 bp, Homo sapien
cagctcccctcccgcttggcttcac

SEQ ID NO: 4938937 - DNA, 25 bp, Homo sapien
agggcgcagctcccctcccgcttgg

SEQ ID NO: 4938938 - DNA, 25 bp, Homo sapien
gagggcgcagctcccctcccgcttg

SEQ ID NO: 4938939 - DNA, 25 bp, Homo sapien
cggttccagtcaccccggatcaggg

SEQ ID NO: 4938940 - DNA, 25 bp, Homo sapien
gcctggttggccacctgagccgcag

SEQ ID NO: 4938941 - DNA, 25 bp, Homo sapien
ctgttgtacgctggccaccctcacc

SEQ ID NO: 4938942 - DNA, 25 bp, Homo sapien
agggcctggttggccacctgagccg

SEQ ID NO: 4938943 - DNA, 25 bp, Homo sapien
ggccttgaggtcctcgagagatttg

SEQ ID NO: 4938944 - DNA, 25 bp, Homo sapien
gtacagttgagggtcacataaaggg

SEQ ID NO: 4938945 - DNA, 25 bp, Homo sapien
agagatttgaactggacattggagg

SEQ ID NO: 4938946 - DNA, 25 bp, Homo sapien
ctgtgtacagttgagggtcacataa

SEQ ID NO: 4938947 - DNA, 25 bp, Homo sapien
gcagaggtgctgaacatcctccggc

SEQ ID NO: 4938948 - DNA, 25 bp, Homo sapien
ggcagaggtgctgaacatcctccgg

SEQ ID NO: 4938949 - DNA, 25 bp, Homo sapien
agacagtcccgtaggcttgggagta

SEQ ID NO: 4938950 - DNA, 25 bp, Homo sapien
gtgccgagtggcagacagtcccgta

SEQ ID NO: 4938951 - DNA, 25 bp, Homo sapien
agtggcagacagtcccgtaggcttg

SEQ ID NO: 4938952 - DNA, 25 bp, Homo sapien
cgagtggcagacagtcccgtaggct

SEQ ID NO: 4938953 - DNA, 25 bp, Homo sapien
gggcagacatgactttattggagga

SEQ ID NO: 4938954 - DNA, 25 bp, Homo sapien
ggagacccgggcaagctccctggaa

SEQ ID NO: 4938955 - DNA, 25 bp, Homo sapien
ccaggcaaagcagggagggctaagg

SEQ ID NO: 4938956 - DNA, 25 bp, Homo sapien
ctggaacttcaacgggccaggcaaa

SEQ ID NO: 4938957 - DNA, 25 bp, Homo sapien
catgttattcttggtgctgcctggg

SEQ ID NO: 4938958 - DNA, 25 bp, Homo sapien
gcgcctgtgcgtctcttggccatga

SEQ ID NO: 4938959 - DNA, 25 bp, Homo sapien
aaaccaccgtgcaagtcgggatgac

SEQ ID NO: 4938960 - DNA, 25 bp, Homo sapien
aacaaggccgccaaacaaaggcagc

SEQ ID NO: 4938961 - DNA, 25 bp, Homo sapien
tggccccagatatgtccgacaagga

SEQ ID NO: 4938962 - DNA, 25 bp, Homo sapien
caaaggctccttgcgtcttaggcag

SEQ ID NO: 4938963 - DNA, 25 bp, Homo sapien
catggaagtcctgcgcaaaggctcc

SEQ ID NO: 4938964 - DNA, 25 bp, Homo sapien
cagcagcaaccttcgggatgacacg

SEQ ID NO: 4938965 - DNA, 25 bp, Homo sapien
gttttccactcgaagaggaagtcca

SEQ ID NO: 4938966 - DNA, 25 bp, Homo sapien
ctacaggatttatcgagcagaaggg

SEQ ID NO: 4938967 - DNA, 25 bp, Homo sapien
ggaagtccaactacaggatttatcg

SEQ ID NO: 4938968 - DNA, 25 bp, Homo sapien
ctgggttttccactcgaagaggaag

SEQ ID NO: 4938969 - DNA, 25 bp, Homo sapien
accagcggctggactacgtgccgtc

SEQ ID NO: 4938970 - DNA, 25 bp, Homo sapien
ggacccggatgacttcaccctgggc

SEQ ID NO: 4938971 - DNA, 25 bp, Homo sapien
agacgttcctcagccacggcgacga

SEQ ID NO: 4938972 - DNA, 25 bp, Homo sapien
caaggcctgttcgagaagcttcgcg

SEQ ID NO: 4938973 - DNA, 25 bp, Homo sapien
tgaggacgaggcatgtctgctggga

SEQ ID NO: 4938974 - DNA, 25 bp, Homo sapien
cagttggaggtctgggcatcaccct

SEQ ID NO: 4938975 - DNA, 25 bp, Homo sapien
tggccacgggggcttccactgtctg

SEQ ID NO: 4938976 - DNA, 25 bp, Homo sapien
ccatgaaaggagacgacgtgaggaa

SEQ ID NO: 4938977 - DNA, 25 bp, Homo sapien
attgcccatgggtgggttccgcgcc

SEQ ID NO: 4938978 - DNA, 25 bp, Homo sapien
cctcccttgggcagacgtttggtag

SEQ ID NO: 4938979 - DNA, 25 bp, Homo sapien
gattcgtgctgagtcattgcccatg

SEQ ID NO: 4938980 - DNA, 25 bp, Homo sapien
tgagggccctgacttcgagtcagag

SEQ ID NO: 4938981 - DNA, 25 bp, Homo sapien
cccaactcggcgaggaggccagagc

SEQ ID NO: 4938982 - DNA, 25 bp, Homo sapien
cagagctccgcccctggcgtcgggc

SEQ ID NO: 4938983 - DNA, 25 bp, Homo sapien
ctcccccaactcggcgaggaggcca

SEQ ID NO: 4938984 - DNA, 25 bp, Homo sapien
ggccagagctccgcccctggcgtcg

SEQ ID NO: 4938985 - DNA, 25 bp, Homo sapien
ggcactggtctgaccccccacccat

SEQ ID NO: 4938986 - DNA, 25 bp, Homo sapien
cacagttgcctgggcactggtctga

SEQ ID NO: 4938987 - DNA, 25 bp, Homo sapien
gttgcctgggcactggtctgacccc

SEQ ID NO: 4938988 - DNA, 25 bp, Homo sapien
ccgctgcagcacagttgcctgggca

SEQ ID NO: 4938989 - DNA, 25 bp, Homo sapien
cagcagcagctcttgtcttgggccc

SEQ ID NO: 4938990 - DNA, 25 bp, Homo sapien
agctcttgtcttgggcccagggtgg

SEQ ID NO: 4938991 - DNA, 25 bp, Homo sapien
agctgcagctttgggtctccccttc

SEQ ID NO: 4938992 - DNA, 25 bp, Homo sapien
cagctgcagctttgggtctcccctt

SEQ ID NO: 4938993 - DNA, 25 bp, Homo sapien
gcacgtgaccagcatcgagccagca

SEQ ID NO: 4938994 - DNA, 25 bp, Homo sapien
tgccggccactgctccggggtctga

SEQ ID NO: 4938995 - DNA, 25 bp, Homo sapien
agcatcgagccagcacctcagggac

SEQ ID NO: 4938996 - DNA, 25 bp, Homo sapien
acaggcagcctcgagaccggtgccg

SEQ ID NO: 4938997 - DNA, 25 bp, Homo sapien
gccctttccggtctctgtgtgtcca

SEQ ID NO: 4938998 - DNA, 25 bp, Homo sapien
aggccctttccggtctctgtgtgtc

SEQ ID NO: 4938999 - DNA, 25 bp, Homo sapien
caattcggcactcccctggcaggtg

SEQ ID NO: 4939000 - DNA, 25 bp, Homo sapien
ctctgtgtgtccaattcggcactcc

SEQ ID NO: 4939001 - DNA, 25 bp, Homo sapien
cctctgcggcgggcggttctccccg

SEQ ID NO: 4939002 - DNA, 25 bp, Homo sapien
ggctctcagccgacgcgggctccct

SEQ ID NO: 4939003 - DNA, 25 bp, Homo sapien
tgtgggctctcagccgacgcgggct

SEQ ID NO: 4939004 - DNA, 25 bp, Homo sapien
tcctctgcggcgggcggttctcccc

SEQ ID NO: 4939005 - DNA, 25 bp, Homo sapien
tggagaccgacgacgagttcgcgtt

SEQ ID NO: 4939006 - DNA, 25 bp, Homo sapien
cggaggaaggtttgagcggccgaca

SEQ ID NO: 4939007 - DNA, 25 bp, Homo sapien
gccgacaccggtcgggaacagcgca

SEQ ID NO: 4939008 - DNA, 25 bp, Homo sapien
ggaaccgtgggtgaggcagtcccgc

SEQ ID NO: 4939009 - DNA, 25 bp, Homo sapien
tcctccgaaggcatgtcagctgggt

SEQ ID NO: 4939010 - DNA, 25 bp, Homo sapien
tgagtttccctcgacaagatggagc

SEQ ID NO: 4939011 - DNA, 25 bp, Homo sapien
tcttggtttcccaccaggagcctgc

SEQ ID NO: 4939012 - DNA, 25 bp, Homo sapien
ggagtccacctcaaactacagaaag

SEQ ID NO: 4939013 - DNA, 25 bp, Homo sapien
ggacttcctggaatagcctcgagtg

SEQ ID NO: 4939014 - DNA, 25 bp, Homo sapien
ctctttacagatcaccagacgtggg

SEQ ID NO: 4939015 - DNA, 25 bp, Homo sapien
cctcgagtgcaaaaatagcgtgtcc

SEQ ID NO: 4939016 - DNA, 25 bp, Homo sapien
ggtggttacaccaacggcatgagct

SEQ ID NO: 4939017 - DNA, 25 bp, Homo sapien
tgactccggacaccagtgagggctg

SEQ ID NO: 4939018 - DNA, 25 bp, Homo sapien
gagcgctgtgtatcactgactccgg

SEQ ID NO: 4939019 - DNA, 25 bp, Homo sapien
agtggtgatgcggacagctgggaaa

SEQ ID NO: 4939020 - DNA, 25 bp, Homo sapien
tgctgtagtcccaagcagggagatc

SEQ ID NO: 4939021 - DNA, 25 bp, Homo sapien
aaaggctcccacaccaactccagcc

SEQ ID NO: 4939022 - DNA, 25 bp, Homo sapien
gggaaaggctcccacaccaactcca

SEQ ID NO: 4939023 - DNA, 25 bp, Homo sapien
cacaggccatgtttgggaccatccc

SEQ ID NO: 4939024 - DNA, 25 bp, Homo sapien
ggcccaagtgtctacatcgcattcg

SEQ ID NO: 4939025 - DNA, 25 bp, Homo sapien
ctaaggtgaaagtagccaggctgct

SEQ ID NO: 4939026 - DNA, 25 bp, Homo sapien
gcattcgccccttttgcagctcaga

SEQ ID NO: 4939027 - DNA, 25 bp, Homo sapien
tgctatagcagcaacgggacacagg

SEQ ID NO: 4939028 - DNA, 25 bp, Homo sapien
taaatgtcctgccagatctacggaa

SEQ ID NO: 4939029 - DNA, 25 bp, Homo sapien
caaagatgcactctcgaggtgttcc

SEQ ID NO: 4939030 - DNA, 25 bp, Homo sapien
catagatctaggctgtgccgggaca

SEQ ID NO: 4939031 - DNA, 25 bp, Homo sapien
tgtagccggacactgacattgacgc

SEQ ID NO: 4939032 - DNA, 25 bp, Homo sapien
gatacacattcttagctgccagctg

SEQ ID NO: 4939033 - DNA, 25 bp, Homo sapien
ctcgggagggtcagaagcagttcat

SEQ ID NO: 4939034 - DNA, 25 bp, Homo sapien
gatccaatgcaatcacgagggtcca

SEQ ID NO: 4939035 - DNA, 25 bp, Homo sapien
gaaacttgtcacatacaagggatcc

SEQ ID NO: 4939036 - DNA, 25 bp, Homo sapien
tagaatcctgaaagtagcaagaggg

SEQ ID NO: 4939037 - DNA, 25 bp, Homo sapien
cagttcattgatgaccaaaatgtca

SEQ ID NO: 4939038 - DNA, 25 bp, Homo sapien
tccaagcagctcaagtaactccaag

SEQ ID NO: 4939039 - DNA, 25 bp, Homo sapien
aagtttataccccagctgagccttg

SEQ ID NO: 4939040 - DNA, 25 bp, Homo sapien
agaccgtaagtttataccccagctg

SEQ ID NO: 4939041 - DNA, 25 bp, Homo sapien
aagagacagcctacaacagtagaaa

SEQ ID NO: 4939042 - DNA, 25 bp, Homo sapien
gctcagaagagtcccaagaagaccg

SEQ ID NO: 4939043 - DNA, 25 bp, Homo sapien
tcatcatgaaccgatggcaccagac

SEQ ID NO: 4939044 - DNA, 25 bp, Homo sapien
accaatggcatcctgggaagctcct

SEQ ID NO: 4939045 - DNA, 25 bp, Homo sapien
aagaaactgggtgtgcgaaggtcct

SEQ ID NO: 4939046 - DNA, 25 bp, Homo sapien
tacaccatttgggatagtcatcatg

SEQ ID NO: 4939047 - DNA, 25 bp, Homo sapien
tttcagtagagacgaagtttctcca

SEQ ID NO: 4939048 - DNA, 25 bp, Homo sapien
gactacaggcatgtgccaccatgcc

SEQ ID NO: 4939049 - DNA, 25 bp, Homo sapien
cagctaattttgtattttcagtaga

SEQ ID NO: 4939050 - DNA, 25 bp, Homo sapien
cctgcgtcagccttcgagtagctag

SEQ ID NO: 4939051 - DNA, 25 bp, Homo sapien
cattctagctgaaaatgttcaagga

SEQ ID NO: 4939052 - DNA, 25 bp, Homo sapien
caggggccaggtgtcactgccagtt

SEQ ID NO: 4939053 - DNA, 25 bp, Homo sapien
gccagttttgatccaggccccttca

SEQ ID NO: 4939054 - DNA, 25 bp, Homo sapien
tgttttatgtaggagaatgccgtgt

SEQ ID NO: 4939055 - DNA, 25 bp, Homo sapien
caaaggcagcgcagggaaaccttgg

SEQ ID NO: 4939056 - DNA, 25 bp, Homo sapien
ccaggccatgggaagaagacaaagg

SEQ ID NO: 4939057 - DNA, 25 bp, Homo sapien
agctcttcccggcatggcgggtgca

SEQ ID NO: 4939058 - DNA, 25 bp, Homo sapien
ggaaattccagctggtcccatcggg

SEQ ID NO: 4939059 - DNA, 25 bp, Homo sapien
cattgcgaagaattgctatggagaa

SEQ ID NO: 4939060 - DNA, 25 bp, Homo sapien
tattgagtcatgtccggccaaatgc

SEQ ID NO: 4939061 - DNA, 25 bp, Homo sapien
caccgattgggaccccattgcgaag

SEQ ID NO: 4939062 - DNA, 25 bp, Homo sapien
tcatggcagtcgaagatcagtattg

SEQ ID NO: 4939063 - DNA, 25 bp, Homo sapien
tccacagccctagtgtgaagcagtg

SEQ ID NO: 4939064 - DNA, 25 bp, Homo sapien
gaaccaggctatgtttgcgagagga

SEQ ID NO: 4939065 - DNA, 25 bp, Homo sapien
tggtgcagggctgtaacgtccacag

SEQ ID NO: 4939066 - DNA, 25 bp, Homo sapien
tgtgcaagggaagctcctcatcgtg

SEQ ID NO: 4939067 - DNA, 25 bp, Homo sapien
gcagtagcagtcacccgtggaatca

SEQ ID NO: 4939068 - DNA, 25 bp, Homo sapien
ctgggcagtagcagtcacccgtgga

SEQ ID NO: 4939069 - DNA, 25 bp, Homo sapien
tcacccgtggaatcagtgccagaac

SEQ ID NO: 4939070 - DNA, 25 bp, Homo sapien
tagcagtcacccgtggaatcagtgc

SEQ ID NO: 4939071 - DNA, 25 bp, Homo sapien
aagttcatctcgagctgggcctggg

SEQ ID NO: 4939072 - DNA, 25 bp, Homo sapien
tctgatagatgcagtacttggcacc

SEQ ID NO: 4939073 - DNA, 25 bp, Homo sapien
caaaagatgtgaacgatgcagggct

SEQ ID NO: 4939074 - DNA, 25 bp, Homo sapien
tctcaggtgtgcaggacttgccctc

SEQ ID NO: 4939075 - DNA, 25 bp, Homo sapien
tactatgattcccacaaccaagctc

SEQ ID NO: 4939076 - DNA, 25 bp, Homo sapien
gcccgctggggagccaagtactatg

SEQ ID NO: 4939077 - DNA, 25 bp, Homo sapien
ccacaaccaagctcccagggagcat

SEQ ID NO: 4939078 - DNA, 25 bp, Homo sapien
gggagccaagtactatgattcccac

SEQ ID NO: 4939079 - DNA, 25 bp, Homo sapien
gcggcgggcgagctccctcctggcc

SEQ ID NO: 4939080 - DNA, 25 bp, Homo sapien
ggcggcgggcgagctccctcctggc

SEQ ID NO: 4939081 - DNA, 25 bp, Homo sapien
gaaggcgccctggatcgctctggcc

SEQ ID NO: 4939082 - DNA, 25 bp, Homo sapien
cgcccggatctcgcccacgtccccg

SEQ ID NO: 4939083 - DNA, 25 bp, Homo sapien
ggatctcgcccacgtccccgtcgaa

SEQ ID NO: 4939084 - DNA, 25 bp, Homo sapien
gatctcgcccacgtccccgtcgaag

SEQ ID NO: 4939085 - DNA, 25 bp, Homo sapien
ccggatctcgcccacgtccccgtcg

SEQ ID NO: 4939086 - DNA, 25 bp, Homo sapien
tagctgtcctcgcactccgccagag

SEQ ID NO: 4939087 - DNA, 25 bp, Homo sapien
tccgccagagccacgcgtcgctgca

SEQ ID NO: 4939088 - DNA, 25 bp, Homo sapien
cagcggcgtgttcccgtagctgtcc

SEQ ID NO: 4939089 - DNA, 25 bp, Homo sapien
gctcggcccgcagctggatggccag

SEQ ID NO: 4939090 - DNA, 25 bp, Homo sapien
gcaagacgggccccccgagcaagat

SEQ ID NO: 4939091 - DNA, 25 bp, Homo sapien
ctgcaagacgggccccccgagcaag

SEQ ID NO: 4939092 - DNA, 25 bp, Homo sapien
gacgggccccccgagcaagatccag

SEQ ID NO: 4939093 - DNA, 25 bp, Homo sapien
cgggccccccgagcaagatccaggc

SEQ ID NO: 4939094 - DNA, 25 bp, Homo sapien
acccgggggtctgctccgagcttca

SEQ ID NO: 4939095 - DNA, 25 bp, Homo sapien
gggtctgctccgagcttcaggagca

SEQ ID NO: 4939096 - DNA, 25 bp, Homo sapien
acagcggcgtcggaccgaaagcgcc

SEQ ID NO: 4939097 - DNA, 25 bp, Homo sapien
ccccaaaggctgcacggtacagcgg

SEQ ID NO: 4939098 - DNA, 25 bp, Homo sapien
tcaggggtgctcccgtcctctgcgt

SEQ ID NO: 4939099 - DNA, 25 bp, Homo sapien
ctcaggggtgctcccgtcctctgcg

SEQ ID NO: 4939100 - DNA, 25 bp, Homo sapien
aggggtgctcccgtcctctgcgtac

SEQ ID NO: 4939101 - DNA, 25 bp, Homo sapien
ccgctcaggggtgctcccgtcctct

SEQ ID NO: 4939102 - DNA, 25 bp, Homo sapien
ctttcagagacagccggtcgggtga

SEQ ID NO: 4939103 - DNA, 25 bp, Homo sapien
gaaaaccgacgtactgacagtgagg

SEQ ID NO: 4939104 - DNA, 25 bp, Homo sapien
cacaaaatgggagtcgctgccactt

SEQ ID NO: 4939105 - DNA, 25 bp, Homo sapien
cactgcagactgacgaggttttaaa

SEQ ID NO: 4939106 - DNA, 25 bp, Homo sapien
gaaccttaagacaatacacttccat

SEQ ID NO: 4939107 - DNA, 25 bp, Homo sapien
taaaccactgcacatataagaacct

SEQ ID NO: 4939108 - DNA, 25 bp, Homo sapien
tatacagctctaaattgtcacaatc

SEQ ID NO: 4939109 - DNA, 25 bp, Homo sapien
ctttaggctttagagtatacagctc

SEQ ID NO: 4939110 - DNA, 25 bp, Homo sapien
atgtctgaatgaatagtagataaaa

SEQ ID NO: 4939111 - DNA, 25 bp, Homo sapien
gaataattatttaaacatggtgtaa

SEQ ID NO: 4939112 - DNA, 25 bp, Homo sapien
tgtaagggtggaatgggcacattaa

SEQ ID NO: 4939113 - DNA, 25 bp, Homo sapien
gagtggatagcttataagtttataa

SEQ ID NO: 4939114 - DNA, 25 bp, Homo sapien
gactatgtcacctgcataacaaacc

SEQ ID NO: 4939115 - DNA, 25 bp, Homo sapien
gatactaggatctacttgagggtgg

SEQ ID NO: 4939116 - DNA, 25 bp, Homo sapien
tctgtacgacaaatccccatgacta

SEQ ID NO: 4939117 - DNA, 25 bp, Homo sapien
ggaagcaagcactataaaattcagg

SEQ ID NO: 4939118 - DNA, 25 bp, Homo sapien
cgccggcgttcccacagagcaaggg

SEQ ID NO: 4939119 - DNA, 25 bp, Homo sapien
gaactgggaagaactcacagatgca

SEQ ID NO: 4939120 - DNA, 25 bp, Homo sapien
cacagacaagtgcaaacagggagac

SEQ ID NO: 4939121 - DNA, 25 bp, Homo sapien
gagtcggtgctgacttaagcatttg

SEQ ID NO: 4939122 - DNA, 25 bp, Homo sapien
cctcagtgcgtgttccgagtctcct

SEQ ID NO: 4939123 - DNA, 25 bp, Homo sapien
gacagacgacatttgtcgggccctc

SEQ ID NO: 4939124 - DNA, 25 bp, Homo sapien
gtgggccccaaagcatgagcccctg

SEQ ID NO: 4939125 - DNA, 25 bp, Homo sapien
ccgctgggaattctcctgggctccc

SEQ ID NO: 4939126 - DNA, 25 bp, Homo sapien
acgagcgcagcacgctcaccactgt

SEQ ID NO: 4939127 - DNA, 25 bp, Homo sapien
ctcaccactgtgtccagtgaggcca

SEQ ID NO: 4939128 - DNA, 25 bp, Homo sapien
tgaggctcaggtcccacgagcgcag

SEQ ID NO: 4939129 - DNA, 25 bp, Homo sapien
tgttctggagcatggcctccgtgag

SEQ ID NO: 4939130 - DNA, 25 bp, Homo sapien
cagctgttggaccttgagggtcata

SEQ ID NO: 4939131 - DNA, 25 bp, Homo sapien
ccctggtcagctgttggaccttgag

SEQ ID NO: 4939132 - DNA, 25 bp, Homo sapien
tcagctgttggaccttgagggtcat

SEQ ID NO: 4939133 - DNA, 25 bp, Homo sapien
tgctccctggtcagctgttggacct

SEQ ID NO: 4939134 - DNA, 25 bp, Homo sapien
tgggtgggcgtacgggcaggccctg

SEQ ID NO: 4939135 - DNA, 25 bp, Homo sapien
tgggcgtacgggcaggccctggcaa

SEQ ID NO: 4939136 - DNA, 25 bp, Homo sapien
ggcgtacgggcaggccctggcaagg

SEQ ID NO: 4939137 - DNA, 25 bp, Homo sapien
ggtgggcgtacgggcaggccctggc

SEQ ID NO: 4939138 - DNA, 25 bp, Homo sapien
taagctcacagtaggcctgttgcag

SEQ ID NO: 4939139 - DNA, 25 bp, Homo sapien
tccactcacactggtcgtgctctga

SEQ ID NO: 4939140 - DNA, 25 bp, Homo sapien
actggtcgtgctctgagatcctccg

SEQ ID NO: 4939141 - DNA, 25 bp, Homo sapien
gagatcctccggctaagctcacagt

SEQ ID NO: 4939142 - DNA, 25 bp, Homo sapien
tcctgccgcagcctgtccacctggg

SEQ ID NO: 4939143 - DNA, 25 bp, Homo sapien
tccagcctggccatagccagcgcct

SEQ ID NO: 4939144 - DNA, 25 bp, Homo sapien
gtctgctcccgaagctccagcctgg

SEQ ID NO: 4939145 - DNA, 25 bp, Homo sapien
cctcctgcgtctgctcccgaagctc

SEQ ID NO: 4939146 - DNA, 25 bp, Homo sapien
gagtgcagctgacaggcaagcccga

SEQ ID NO: 4939147 - DNA, 25 bp, Homo sapien
gtgcagctgacaggcaagcccgacg

SEQ ID NO: 4939148 - DNA, 25 bp, Homo sapien
gctgacaggcaagcccgacgccgga

SEQ ID NO: 4939149 - DNA, 25 bp, Homo sapien
cagagtgcagctgacaggcaagccc

SEQ ID NO: 4939150 - DNA, 25 bp, Homo sapien
agcacatcgtgcagctcggtgacct

SEQ ID NO: 4939151 - DNA, 25 bp, Homo sapien
tgcggttgcctacatctttcatcag

SEQ ID NO: 4939152 - DNA, 25 bp, Homo sapien
acatcgtgcagctcggtgacctggc

SEQ ID NO: 4939153 - DNA, 25 bp, Homo sapien
gccatcggcacggatgcggttgcct

SEQ ID NO: 4939154 - DNA, 25 bp, Homo sapien
tggggacacccatcaggtcactgct

SEQ ID NO: 4939155 - DNA, 25 bp, Homo sapien
caaaccccaaatcgcccacgtctgg

SEQ ID NO: 4939156 - DNA, 25 bp, Homo sapien
gggacacccatcaggtcactgctgt

SEQ ID NO: 4939157 - DNA, 25 bp, Homo sapien
aaatcgcccacgtctggcccggaga

SEQ ID NO: 4939158 - DNA, 25 bp, Homo sapien
gggctccgggttcaccgtgtccaca

SEQ ID NO: 4939159 - DNA, 25 bp, Homo sapien
cgtgtccacatagttggtatcctgg

SEQ ID NO: 4939160 - DNA, 25 bp, Homo sapien
agcgcaggaaggtggccgcctggcc

SEQ ID NO: 4939161 - DNA, 25 bp, Homo sapien
caaagggtcaataacaagaggccac

SEQ ID NO: 4939162 - DNA, 25 bp, Homo sapien
ctgccccatgaggctggtgaggcca

SEQ ID NO: 4939163 - DNA, 25 bp, Homo sapien
ccatgaggctggtgaggccagggtg

SEQ ID NO: 4939164 - DNA, 25 bp, Homo sapien
tgaggctggtgaggccagggtgggg

SEQ ID NO: 4939165 - DNA, 25 bp, Homo sapien
tgccccatgaggctggtgaggccag

SEQ ID NO: 4939166 - DNA, 25 bp, Homo sapien
aggtcttcctctcgcaggtcgaaca

SEQ ID NO: 4939167 - DNA, 25 bp, Homo sapien
tcgcaggtcgaacaccagcggcttc

SEQ ID NO: 4939168 - DNA, 25 bp, Homo sapien
tgccgctgcacgactgggaacaggt

SEQ ID NO: 4939169 - DNA, 25 bp, Homo sapien
tgggccgcagcagcgacaggtacct

SEQ ID NO: 4939170 - DNA, 25 bp, Homo sapien
gccgctgctcctggaactgcgtggg

SEQ ID NO: 4939171 - DNA, 25 bp, Homo sapien
gctcctggaactgcgtggggctata

SEQ ID NO: 4939172 - DNA, 25 bp, Homo sapien
gcggccactggaccttggtgacgaa

SEQ ID NO: 4939173 - DNA, 25 bp, Homo sapien
cgaaaaagaggcggaagtgctccag

SEQ ID NO: 4939174 - DNA, 25 bp, Homo sapien
gggagcagcacctgcagctgctcag

SEQ ID NO: 4939175 - DNA, 25 bp, Homo sapien
tgggagcagcacctgcagctgctca

SEQ ID NO: 4939176 - DNA, 25 bp, Homo sapien
ctgtgcctggcagctgcacgcgcac

SEQ ID NO: 4939177 - DNA, 25 bp, Homo sapien
ctagaggcctgtgcctggcagctgc

SEQ ID NO: 4939178 - DNA, 25 bp, Homo sapien
aggcctgtgcctggcagctgcacgc

SEQ ID NO: 4939179 - DNA, 25 bp, Homo sapien
agaggcctgtgcctggcagctgcac

SEQ ID NO: 4939180 - DNA, 25 bp, Homo sapien
actacattttacctcccgtctgcct

SEQ ID NO: 4939181 - DNA, 25 bp, Homo sapien
tttacctcccgtctgcctgtccatc

SEQ ID NO: 4939182 - DNA, 25 bp, Homo sapien
attttacctcccgtctgcctgtcca

SEQ ID NO: 4939183 - DNA, 25 bp, Homo sapien
tacattttacctcccgtctgcctgt

SEQ ID NO: 4939184 - DNA, 25 bp, Homo sapien
aggcacctcccccagacttggggtg

SEQ ID NO: 4939185 - DNA, 25 bp, Homo sapien
accccacaggagttctggcctgtga

SEQ ID NO: 4939186 - DNA, 25 bp, Homo sapien
agtcttttaacctgggtgttagcat

SEQ ID NO: 4939187 - DNA, 25 bp, Homo sapien
gcattttaaagagaccccacaggag

SEQ ID NO: 4939188 - DNA, 25 bp, Homo sapien
cccgtgattcctccggcggcagaat

SEQ ID NO: 4939189 - DNA, 25 bp, Homo sapien
tggcagcggtcatcaggtgcttgcc

SEQ ID NO: 4939190 - DNA, 25 bp, Homo sapien
gaacttggattcaggtggctgatga

SEQ ID NO: 4939191 - DNA, 25 bp, Homo sapien
ggatagcgattgtcaccgagcctgg

SEQ ID NO: 4939192 - DNA, 25 bp, Homo sapien
gctgaagtgtacgaccaggagcgtt

SEQ ID NO: 4939193 - DNA, 25 bp, Homo sapien
taacagtgacctctctgcgtgacag

SEQ ID NO: 4939194 - DNA, 25 bp, Homo sapien
tgagactcataaggccatccaggcc

SEQ ID NO: 4939195 - DNA, 25 bp, Homo sapien
cctcaatggccgctggtttgctggc

SEQ ID NO: 4939196 - DNA, 25 bp, Homo sapien
ggctctggagccattctactgctgc

SEQ ID NO: 4939197 - DNA, 25 bp, Homo sapien
gctccctgccttgtgatgttgccca

SEQ ID NO: 4939198 - DNA, 25 bp, Homo sapien
tgaggatcccatgaatgaatgtgtg

SEQ ID NO: 4939199 - DNA, 25 bp, Homo sapien
tatccattgcatagcactgggttgt

SEQ ID NO: 4939200 - DNA, 25 bp, Homo sapien
cacatatgcttaacagtgcgactag

SEQ ID NO: 4939201 - DNA, 25 bp, Homo sapien
agctacaaaaagcttggcttggttg

SEQ ID NO: 4939202 - DNA, 25 bp, Homo sapien
ccacagtctttatgctaacctcaca

SEQ ID NO: 4939203 - DNA, 25 bp, Homo sapien
caagaactcttgtgccttcctgaat

SEQ ID NO: 4939204 - DNA, 25 bp, Homo sapien
tggagcatgcaatcaggttttatat

SEQ ID NO: 4939205 - DNA, 25 bp, Homo sapien
ggagcatgcaatcaggttttatatg

SEQ ID NO: 4939206 - DNA, 25 bp, Homo sapien
tagcaggttcagtctgtgtcacgaa

SEQ ID NO: 4939207 - DNA, 25 bp, Homo sapien
gaatccacatcctttcggtggcagg

SEQ ID NO: 4939208 - DNA, 25 bp, Homo sapien
taggttgggcccagccagataatac

SEQ ID NO: 4939209 - DNA, 25 bp, Homo sapien
tgctgactgtaaactaaggccactt

SEQ ID NO: 4939210 - DNA, 25 bp, Homo sapien
tggaacgagctccacttcggagaca

SEQ ID NO: 4939211 - DNA, 25 bp, Homo sapien
caggtaaaccaagggaacatgccag

SEQ ID NO: 4939212 - DNA, 25 bp, Homo sapien
aagatccagaccgtgttcgagcagc

SEQ ID NO: 4939213 - DNA, 25 bp, Homo sapien
cagagcaccttcctagccatggaca

SEQ ID NO: 4939214 - DNA, 25 bp, Homo sapien
cagactgggcgacagagtctctgtc

SEQ ID NO: 4939215 - DNA, 25 bp, Homo sapien
tccagactgggcgacagagtctctg

SEQ ID NO: 4939216 - DNA, 25 bp, Homo sapien
ccagactgggcgacagagtctctgt

SEQ ID NO: 4939217 - DNA, 25 bp, Homo sapien
ctccagactgggcgacagagtctct

SEQ ID NO: 4939218 - DNA, 25 bp, Homo sapien
tgggaactcatgagcgcccactcca

SEQ ID NO: 4939219 - DNA, 25 bp, Homo sapien
accttggctcgtgggtgggaactca

SEQ ID NO: 4939220 - DNA, 25 bp, Homo sapien
gagtttatcccatctggagttggcc

SEQ ID NO: 4939221 - DNA, 25 bp, Homo sapien
tgcttataatcacgggaggatgagg

SEQ ID NO: 4939222 - DNA, 25 bp, Homo sapien
taatagctctcatccagaccacgtg

SEQ ID NO: 4939223 - DNA, 25 bp, Homo sapien
caaaaacaagtggaggaaaggcatc

SEQ ID NO: 4939224 - DNA, 25 bp, Homo sapien
tccaatggtagcagaacacagcaag

SEQ ID NO: 4939225 - DNA, 25 bp, Homo sapien
caaaatccagggttcctagagccgt

SEQ ID NO: 4939226 - DNA, 25 bp, Homo sapien
tacccattcgttatctgtggaaaac

SEQ ID NO: 4939227 - DNA, 25 bp, Homo sapien
tgtccatcgaggtgtttcataagtt

SEQ ID NO: 4939228 - DNA, 25 bp, Homo sapien
gccatcgggtactcttgttgcagtg

SEQ ID NO: 4939229 - DNA, 25 bp, Homo sapien
gactctcagtccatcatgccatcgg

SEQ ID NO: 4939230 - DNA, 25 bp, Homo sapien
cagcctgcccacttttacttacatg

SEQ ID NO: 4939231 - DNA, 25 bp, Homo sapien
agcctgcccacttttacttacatgc

SEQ ID NO: 4939232 - DNA, 25 bp, Homo sapien
ctgcccacttttacttacatgcaaa

SEQ ID NO: 4939233 - DNA, 25 bp, Homo sapien
gcctgcccacttttacttacatgca

SEQ ID NO: 4939234 - DNA, 25 bp, Homo sapien
gacaccatcatgcacccactagaat

SEQ ID NO: 4939235 - DNA, 25 bp, Homo sapien
tcaacagacctttcaccagtgaaga

SEQ ID NO: 4939236 - DNA, 25 bp, Homo sapien
gatggaaataccagtgcttcaacca

SEQ ID NO: 4939237 - DNA, 25 bp, Homo sapien
cctggaaaagagtttagcagatgca

SEQ ID NO: 4939238 - DNA, 25 bp, Homo sapien
gtacagaagaacttcagtgaaaaaa

SEQ ID NO: 4939239 - DNA, 25 bp, Homo sapien
ggtacagaagaacttcagtgaaaaa

SEQ ID NO: 4939240 - DNA, 25 bp, Homo sapien
aaggtacagaagaacttcagtgaaa

SEQ ID NO: 4939241 - DNA, 25 bp, Homo sapien
aaaggtacagaagaacttcagtgaa

SEQ ID NO: 4939242 - DNA, 25 bp, Homo sapien
acgccgtcaacaagggcctggtgga

SEQ ID NO: 4939243 - DNA, 25 bp, Homo sapien
agcaccggtgagcgcttccctgtca

SEQ ID NO: 4939244 - DNA, 25 bp, Homo sapien
ggtggaccgcatcaacctggcccag

SEQ ID NO: 4939245 - DNA, 25 bp, Homo sapien
tggacaagatcatggtggaccgcat

SEQ ID NO: 4939246 - DNA, 25 bp, Homo sapien
caagcgccgagtggtcatcgtggac

SEQ ID NO: 4939247 - DNA, 25 bp, Homo sapien
agacgtacctggagctgtccgagca

SEQ ID NO: 4939248 - DNA, 25 bp, Homo sapien
aagggcctgattgaccaccagacgt

SEQ ID NO: 4939249 - DNA, 25 bp, Homo sapien
gcctgtgtctcttgccgctgaagga

SEQ ID NO: 4939250 - DNA, 25 bp, Homo sapien
ctgaggagcgcgtgcagaagagcct

SEQ ID NO: 4939251 - DNA, 25 bp, Homo sapien
agcaacgcggaggacacgctgcgca

SEQ ID NO: 4939252 - DNA, 25 bp, Homo sapien
cagcaaggagcaggccgagctggag

SEQ ID NO: 4939253 - DNA, 25 bp, Homo sapien
gctgggacgcatccgcagcaacgcg

SEQ ID NO: 4939254 - DNA, 25 bp, Homo sapien
tgaggtaactacactggaggccacc

SEQ ID NO: 4939255 - DNA, 25 bp, Homo sapien
taccgtcaacgtgcattctcctggg

SEQ ID NO: 4939256 - DNA, 25 bp, Homo sapien
gatttctgtagatcgccggcaggct

SEQ ID NO: 4939257 - DNA, 25 bp, Homo sapien
gctcctgaaataccgctgggcacat

SEQ ID NO: 4939258 - DNA, 25 bp, Homo sapien
agctgccggcctcgctcctggatca

SEQ ID NO: 4939259 - DNA, 25 bp, Homo sapien
ctgccggcctcgctcctggatcatg

SEQ ID NO: 4939260 - DNA, 25 bp, Homo sapien
gggagctgccggcctcgctcctgga

SEQ ID NO: 4939261 - DNA, 25 bp, Homo sapien
gccggcctcgctcctggatcatggt

SEQ ID NO: 4939262 - DNA, 25 bp, Homo sapien
gccaaatttaggtttatccagatac

SEQ ID NO: 4939263 - DNA, 25 bp, Homo sapien
gaggtttactaaggaagtatgattc

SEQ ID NO: 4939264 - DNA, 25 bp, Homo sapien
atttaggtttatccagatacagctc

SEQ ID NO: 4939265 - DNA, 25 bp, Homo sapien
tatgattcacttgcaggccaaattt

SEQ ID NO: 4939266 - DNA, 25 bp, Homo sapien
ctgcagcttgtcgataagcctctgg

SEQ ID NO: 4939267 - DNA, 25 bp, Homo sapien
ctgctgcagcttgtcgataagcctc

SEQ ID NO: 4939268 - DNA, 25 bp, Homo sapien
atgtggccaccgttccaggcaggct

SEQ ID NO: 4939269 - DNA, 25 bp, Homo sapien
cttcccagggtcatcgtggccgccc

SEQ ID NO: 4939270 - DNA, 25 bp, Homo sapien
aggctggctggcccgactgagctcg

SEQ ID NO: 4939271 - DNA, 25 bp, Homo sapien
gccctggtgggcatccagtcccgca

SEQ ID NO: 4939272 - DNA, 25 bp, Homo sapien
ggctggcccgactgagctcgcactg

SEQ ID NO: 4939273 - DNA, 25 bp, Homo sapien
ctggtgggcatccagtcccgcagtg

SEQ ID NO: 4939274 - DNA, 25 bp, Homo sapien
tttaatctgctagtgaagtcaacga

SEQ ID NO: 4939275 - DNA, 25 bp, Homo sapien
tcaacgatattaacagagttctggg

SEQ ID NO: 4939276 - DNA, 25 bp, Homo sapien
gacaccttcgtgtctggtgctgggt

SEQ ID NO: 4939277 - DNA, 25 bp, Homo sapien
ggaaagtgcattatccctgaactcc

SEQ ID NO: 4939278 - DNA, 25 bp, Homo sapien
aagggcgatgctagtgggaccaggt

SEQ ID NO: 4939279 - DNA, 25 bp, Homo sapien
acccacagtgggtagggagatgcgg

SEQ ID NO: 4939280 - DNA, 25 bp, Homo sapien
atgctagtgggaccaggtgcccaga

SEQ ID NO: 4939281 - DNA, 25 bp, Homo sapien
gctgggaagggcgatgctagtggga

SEQ ID NO: 4939282 - DNA, 25 bp, Homo sapien
gtggtcgctcacatttacccagcca

SEQ ID NO: 4939283 - DNA, 25 bp, Homo sapien
ggtgagtactgagtggtcgctcaca

SEQ ID NO: 4939284 - DNA, 25 bp, Homo sapien
tggcccagggtgagtactgagtggt

SEQ ID NO: 4939285 - DNA, 25 bp, Homo sapien
ggccagtccagactgctgctcacca

SEQ ID NO: 4939286 - DNA, 25 bp, Homo sapien
cagccgggaagcagagcagtgggca

SEQ ID NO: 4939287 - DNA, 25 bp, Homo sapien
gcagccgggaagcagagcagtgggc

SEQ ID NO: 4939288 - DNA, 25 bp, Homo sapien
agacctcgcccgagtcggctctgtt

SEQ ID NO: 4939289 - DNA, 25 bp, Homo sapien
cagagcccaggaggcgacaccgccc

SEQ ID NO: 4939290 - DNA, 25 bp, Homo sapien
ccgagtcggctctgttgtttgaata

SEQ ID NO: 4939291 - DNA, 25 bp, Homo sapien
ggctctgttgtttgaataaacgtga

SEQ ID NO: 4939292 - DNA, 25 bp, Homo sapien
ccgatggccataaggcggtgttcgt

SEQ ID NO: 4939293 - DNA, 25 bp, Homo sapien
tccctgtcggtgcaggaccgctact

SEQ ID NO: 4939294 - DNA, 25 bp, Homo sapien
acgacagcgccgtggactgcatctg

SEQ ID NO: 4939295 - DNA, 25 bp, Homo sapien
tctgcgggctccagaaggcggtgtg

SEQ ID NO: 4939296 - DNA, 25 bp, Homo sapien
tgactggccgttcggtagttaagaa

SEQ ID NO: 4939297 - DNA, 25 bp, Homo sapien
agctgcccgggactgaccgtccgtt

SEQ ID NO: 4939298 - DNA, 25 bp, Homo sapien
cctaaatgcgggatttgctgaagct

SEQ ID NO: 4939299 - DNA, 25 bp, Homo sapien
gaggcagaagtctggtctggccaat

SEQ ID NO: 4939300 - DNA, 25 bp, Homo sapien
gtacgcacggtgtccgctgcgcggc

SEQ ID NO: 4939301 - DNA, 25 bp, Homo sapien
cgccgcaggccggtacgcacggtgt

SEQ ID NO: 4939302 - DNA, 25 bp, Homo sapien
cgcggccgcgcggtgatggccgatg

SEQ ID NO: 4939303 - DNA, 25 bp, Homo sapien
gctcggcggccgctcagctgggcct

SEQ ID NO: 4939304 - DNA, 25 bp, Homo sapien
ctcggatgcgcaagatccgcgtggg

SEQ ID NO: 4939305 - DNA, 25 bp, Homo sapien
cacgctcggatgcgcaagatccgcg

SEQ ID NO: 4939306 - DNA, 25 bp, Homo sapien
cgctcggatgcgcaagatccgcgtg

SEQ ID NO: 4939307 - DNA, 25 bp, Homo sapien
gccacgctcggatgcgcaagatccg

SEQ ID NO: 4939308 - DNA, 25 bp, Homo sapien
cgtgcggggaacaaagcgggcgtgg

SEQ ID NO: 4939309 - DNA, 25 bp, Homo sapien
gggcgaggcgggtaggggctgcggc

SEQ ID NO: 4939310 - DNA, 25 bp, Homo sapien
gatggaagcgaccacggggcgtgcg

SEQ ID NO: 4939311 - DNA, 25 bp, Homo sapien
cacggggcgtgcggggaacaaagcg

SEQ ID NO: 4939312 - DNA, 25 bp, Homo sapien
cgcatcccgccccttaagcagcttt

SEQ ID NO: 4939313 - DNA, 25 bp, Homo sapien
atcccgccccttaagcagctttaag

SEQ ID NO: 4939314 - DNA, 25 bp, Homo sapien
cggagccggcggctatttctatccc

SEQ ID NO: 4939315 - DNA, 25 bp, Homo sapien
gccggcggctatttctatcccagga

SEQ ID NO: 4939316 - DNA, 25 bp, Homo sapien
cagacaaggaacagtggaacagttg

SEQ ID NO: 4939317 - DNA, 25 bp, Homo sapien
ccggagaagcgcgtgaggaccggac

SEQ ID NO: 4939318 - DNA, 25 bp, Homo sapien
ttgacgacagcgtcgggacccagcc

SEQ ID NO: 4939319 - DNA, 25 bp, Homo sapien
accgtgacctttgccccgggctgtg

SEQ ID NO: 4939320 - DNA, 25 bp, Homo sapien
tggctggggcccccccggatatcca

SEQ ID NO: 4939321 - DNA, 25 bp, Homo sapien
gaggatagttgtccccagacaccaa

SEQ ID NO: 4939322 - DNA, 25 bp, Homo sapien
tggggggaggatagttgtccccaga

SEQ ID NO: 4939323 - DNA, 25 bp, Homo sapien
gggaggatagttgtccccagacacc

SEQ ID NO: 4939324 - DNA, 25 bp, Homo sapien
ccagggtagggaggctgagcatagg

SEQ ID NO: 4939325 - DNA, 25 bp, Homo sapien
gggccccagggtagggaggctgagc

SEQ ID NO: 4939326 - DNA, 25 bp, Homo sapien
gtagggaggctgagcataggggggc

SEQ ID NO: 4939327 - DNA, 25 bp, Homo sapien
tagggaggctgagcataggggggca

SEQ ID NO: 4939328 - DNA, 25 bp, Homo sapien
agtcagggtcttgtcctgggaagac

SEQ ID NO: 4939329 - DNA, 25 bp, Homo sapien
tgggaagacctgtggctgtccatag

SEQ ID NO: 4939330 - DNA, 25 bp, Homo sapien
ctctggggatatggcccctgggggt

SEQ ID NO: 4939331 - DNA, 25 bp, Homo sapien
tgtgggtagccctcttgtgggtagg

SEQ ID NO: 4939332 - DNA, 25 bp, Homo sapien
gccactcacaagcacctccccctgc

SEQ ID NO: 4939333 - DNA, 25 bp, Homo sapien
ggtcagcgccactcacaagcacctc

SEQ ID NO: 4939334 - DNA, 25 bp, Homo sapien
gggtcagcgccactcacaagcacct

SEQ ID NO: 4939335 - DNA, 25 bp, Homo sapien
tcagcgccactcacaagcacctccc

SEQ ID NO: 4939336 - DNA, 25 bp, Homo sapien
tcatagtaggatgggggaccctcct

SEQ ID NO: 4939337 - DNA, 25 bp, Homo sapien
aggcctgtcggatgctcttgtcatc

SEQ ID NO: 4939338 - DNA, 25 bp, Homo sapien
cttgcggatgaaggcctgtcggatg

SEQ ID NO: 4939339 - DNA, 25 bp, Homo sapien
ggaagtcctggttgtcatagtagga

SEQ ID NO: 4939340 - DNA, 25 bp, Homo sapien
cagctgcaaggtcagcactaggaac

SEQ ID NO: 4939341 - DNA, 25 bp, Homo sapien
gctgcaaggtcagcactaggaacac

SEQ ID NO: 4939342 - DNA, 25 bp, Homo sapien
agctgcaaggtcagcactaggaaca

SEQ ID NO: 4939343 - DNA, 25 bp, Homo sapien
cccacaacagctgaggacgatgaga

SEQ ID NO: 4939344 - DNA, 25 bp, Homo sapien
ggtccagacattctcccggacaaag

SEQ ID NO: 4939345 - DNA, 25 bp, Homo sapien
cagcataggagacatagtaggtcca

SEQ ID NO: 4939346 - DNA, 25 bp, Homo sapien
gtgctttcgccggaagtccccacaa

SEQ ID NO: 4939347 - DNA, 25 bp, Homo sapien
ctcatgagcacaaggagaaccacgg

SEQ ID NO: 4939348 - DNA, 25 bp, Homo sapien
gaagagtgggcgtgtgggactgcat

SEQ ID NO: 4939349 - DNA, 25 bp, Homo sapien
aggagaaccacggtgaccaggcccg

SEQ ID NO: 4939350 - DNA, 25 bp, Homo sapien
ccacggtgaccaggcccggaagagt

SEQ ID NO: 4939351 - DNA, 25 bp, Homo sapien
ctgcagttgggagacacaggctgac

SEQ ID NO: 4939352 - DNA, 25 bp, Homo sapien
cacggccatgatgactgcctcggtg

SEQ ID NO: 4939353 - DNA, 25 bp, Homo sapien
aagcagacggctgtggtgatgccca

SEQ ID NO: 4939354 - DNA, 25 bp, Homo sapien
gttgtagaagctggcgatcatcccc

SEQ ID NO: 4939355 - DNA, 25 bp, Homo sapien
tggagaagatgacgacggtgaagca

SEQ ID NO: 4939356 - DNA, 25 bp, Homo sapien
ccatgcatgaggtgaagtcgtagcg

SEQ ID NO: 4939357 - DNA, 25 bp, Homo sapien
agtgaggcgtacacgatctccagga

SEQ ID NO: 4939358 - DNA, 25 bp, Homo sapien
cggttccggatgaagatgcagagaa

SEQ ID NO: 4939359 - DNA, 25 bp, Homo sapien
tcaccaggagcacgcccatgcatga

SEQ ID NO: 4939360 - DNA, 25 bp, Homo sapien
tggaggtgacagcacagtggtgttg

SEQ ID NO: 4939361 - DNA, 25 bp, Homo sapien
gaggtgacagcacagtggtgttgag

SEQ ID NO: 4939362 - DNA, 25 bp, Homo sapien
ctggaggtgacagcacagtggtgtt

SEQ ID NO: 4939363 - DNA, 25 bp, Homo sapien
gtgacagcacagtggtgttgaggga

SEQ ID NO: 4939364 - DNA, 25 bp, Homo sapien
tggcgcggccaatgatggtgaggat

SEQ ID NO: 4939365 - DNA, 25 bp, Homo sapien
tgatgtctgtgtacaggttcagcgc

SEQ ID NO: 4939366 - DNA, 25 bp, Homo sapien
caggttcagcgcagcaaacacatac

SEQ ID NO: 4939367 - DNA, 25 bp, Homo sapien
tactccttggcgcggccaatgatgg

SEQ ID NO: 4939368 - DNA, 25 bp, Homo sapien
gcacggaaacgtggccttggtgccc

SEQ ID NO: 4939369 - DNA, 25 bp, Homo sapien
caacaatgagtagacaggaggtggc

SEQ ID NO: 4939370 - DNA, 25 bp, Homo sapien
caacaaattgagaggaaggcttccc

SEQ ID NO: 4939371 - DNA, 25 bp, Homo sapien
gacaggagggaagacgtgcaccctc

SEQ ID NO: 4939372 - DNA, 25 bp, Homo sapien
agggtctctgaggtaggagcgtcgc

SEQ ID NO: 4939373 - DNA, 25 bp, Homo sapien
aaaactaaggttcggccaggcactg

SEQ ID NO: 4939374 - DNA, 25 bp, Homo sapien
taggagcgtcgctggattccaaagg

SEQ ID NO: 4939375 - DNA, 25 bp, Homo sapien
ctaaggttcggccaggcactgtgtc

SEQ ID NO: 4939376 - DNA, 25 bp, Homo sapien
tgtggctgttctccctcaaacctct

SEQ ID NO: 4939377 - DNA, 25 bp, Homo sapien
tgagtactgagtgaggccgtgtcct

SEQ ID NO: 4939378 - DNA, 25 bp, Homo sapien
gagaggatagcgaagtccaggtaca

SEQ ID NO: 4939379 - DNA, 25 bp, Homo sapien
gaggacagactcctggtagaatgtg

SEQ ID NO: 4939380 - DNA, 25 bp, Homo sapien
agggtgcggcccacgggagggcact

SEQ ID NO: 4939381 - DNA, 25 bp, Homo sapien
agtggcaagggtgcggcccacggga

SEQ ID NO: 4939382 - DNA, 25 bp, Homo sapien
gcagtggcaagggtgcggcccacgg

SEQ ID NO: 4939383 - DNA, 25 bp, Homo sapien
ggggcagtggcaagggtgcggccca

SEQ ID NO: 4939384 - DNA, 25 bp, Homo sapien
cttcataattggtgagtagagacat

SEQ ID NO: 4939385 - DNA, 25 bp, Homo sapien
cgtgattctcccgaatgagccgcac

SEQ ID NO: 4939386 - DNA, 25 bp, Homo sapien
tcttgatcgctgacttgagctcgtg

SEQ ID NO: 4939387 - DNA, 25 bp, Homo sapien
agcccgcctgcctgagtcttgatcg

SEQ ID NO: 4939388 - DNA, 25 bp, Homo sapien
cagcctctctatctgatgccgaagc

SEQ ID NO: 4939389 - DNA, 25 bp, Homo sapien
ttgttctggcgtgaggaaaggcctg

SEQ ID NO: 4939390 - DNA, 25 bp, Homo sapien
attgttctggcgtgaggaaaggcct

SEQ ID NO: 4939391 - DNA, 25 bp, Homo sapien
tgttctggcgtgaggaaaggcctgc

SEQ ID NO: 4939392 - DNA, 25 bp, Homo sapien
cattgttctggcgtgaggaaaggcc

SEQ ID NO: 4939393 - DNA, 25 bp, Homo sapien
acttcttcgaggactcgttcgtttg

SEQ ID NO: 4939394 - DNA, 25 bp, Homo sapien
gaggactcgttcgtttgccactgct

SEQ ID NO: 4939395 - DNA, 25 bp, Homo sapien
tcgaggactcgttcgtttgccactg

SEQ ID NO: 4939396 - DNA, 25 bp, Homo sapien
cttcgaggactcgttcgtttgccac

SEQ ID NO: 4939397 - DNA, 25 bp, Homo sapien
gctcatgagtgagcccggtgtggcg

SEQ ID NO: 4939398 - DNA, 25 bp, Homo sapien
cagtgtgcctgttaggggtcccgca

SEQ ID NO: 4939399 - DNA, 25 bp, Homo sapien
tagcatctcggccaggggtgccaag

SEQ ID NO: 4939400 - DNA, 25 bp, Homo sapien
tgtggcgctgggctgcaagctggtt

SEQ ID NO: 4939401 - DNA, 25 bp, Homo sapien
cacagggcctgccacgaggctgctg

SEQ ID NO: 4939402 - DNA, 25 bp, Homo sapien
gtcagggtgccagtggagggcaggc

SEQ ID NO: 4939403 - DNA, 25 bp, Homo sapien
cctgccacgaggctgctgggagtca

SEQ ID NO: 4939404 - DNA, 25 bp, Homo sapien
gagtcagggtgccagtggagggcag

SEQ ID NO: 4939405 - DNA, 25 bp, Homo sapien
cagtgggtaccacgcaagctgggga

SEQ ID NO: 4939406 - DNA, 25 bp, Homo sapien
caggttgctcatggggttggccagc

SEQ ID NO: 4939407 - DNA, 25 bp, Homo sapien
gtgcccatcacaggggctatcaggg

SEQ ID NO: 4939408 - DNA, 25 bp, Homo sapien
agcaggttctgagagacccctggtg

SEQ ID NO: 4939409 - DNA, 25 bp, Homo sapien
gggtgctcctgcaaacgccatgctg

SEQ ID NO: 4939410 - DNA, 25 bp, Homo sapien
caggtgtgcccatggctccgatagg

SEQ ID NO: 4939411 - DNA, 25 bp, Homo sapien
aaacgccatgctgagaggctctggg

SEQ ID NO: 4939412 - DNA, 25 bp, Homo sapien
aagtgttgaaggagaaggccgtctt

SEQ ID NO: 4939413 - DNA, 25 bp, Homo sapien
ccctgggcgatgtgggtggtgcttg

SEQ ID NO: 4939414 - DNA, 25 bp, Homo sapien
gaattatgcattcgggaagggggat

SEQ ID NO: 4939415 - DNA, 25 bp, Homo sapien
ggcagaggcaaggacggtgaccgtg

SEQ ID NO: 4939416 - DNA, 25 bp, Homo sapien
gggtgtgtagctggtggcaacctgg

SEQ ID NO: 4939417 - DNA, 25 bp, Homo sapien
gatgaggtacgaggtggggagtggg

SEQ ID NO: 4939418 - DNA, 25 bp, Homo sapien
ggatgaggtacgaggtggggagtgg

SEQ ID NO: 4939419 - DNA, 25 bp, Homo sapien
aggatgaggtacgaggtggggagtg

SEQ ID NO: 4939420 - DNA, 25 bp, Homo sapien
tggtgcgtggacctcgagagtcatt

SEQ ID NO: 4939421 - DNA, 25 bp, Homo sapien
tcttcgtcgacggttctgtggtgcg

SEQ ID NO: 4939422 - DNA, 25 bp, Homo sapien
ttctcggggaacttgctggtcttgc

SEQ ID NO: 4939423 - DNA, 25 bp, Homo sapien
ttgcggtgggccagcttccgttcca

SEQ ID NO: 4939424 - DNA, 25 bp, Homo sapien
acaggatcctgcggtccagctggaa

SEQ ID NO: 4939425 - DNA, 25 bp, Homo sapien
tctgggaagatgctggacaggatcc

SEQ ID NO: 4939426 - DNA, 25 bp, Homo sapien
agccgtagagccgtacgcgctctgg

SEQ ID NO: 4939427 - DNA, 25 bp, Homo sapien
gctggaaggcaatctcacccaccag

SEQ ID NO: 4939428 - DNA, 25 bp, Homo sapien
gcctgttcatgacgctcacatagcg

SEQ ID NO: 4939429 - DNA, 25 bp, Homo sapien
tcatcgtgcgccagctggctgaggc

SEQ ID NO: 4939430 - DNA, 25 bp, Homo sapien
gaacatgggcttgccgtcatcgtgc

SEQ ID NO: 4939431 - DNA, 25 bp, Homo sapien
gcaggatgccataagcgttcaccag

SEQ ID NO: 4939432 - DNA, 25 bp, Homo sapien
ggaagctttaatggccgtgcacagg

SEQ ID NO: 4939433 - DNA, 25 bp, Homo sapien
tttaatggccgtgcacagggctgtg

SEQ ID NO: 4939434 - DNA, 25 bp, Homo sapien
tgtctgtgggaagctttaatggccg

SEQ ID NO: 4939435 - DNA, 25 bp, Homo sapien
ctgtgggaagctttaatggccgtgc

SEQ ID NO: 4939436 - DNA, 25 bp, Homo sapien
cagcaccacccaggagcgctggcac

SEQ ID NO: 4939437 - DNA, 25 bp, Homo sapien
aggcagcaccacccaggagcgctgg

SEQ ID NO: 4939438 - DNA, 25 bp, Homo sapien
gaggcagcaccacccaggagcgctg

SEQ ID NO: 4939439 - DNA, 25 bp, Homo sapien
gcagcaccacccaggagcgctggca

SEQ ID NO: 4939440 - DNA, 25 bp, Homo sapien
acgtggaggacgacctgccttgagt

SEQ ID NO: 4939441 - DNA, 25 bp, Homo sapien
agccagcggcacgtggaggacgacc

SEQ ID NO: 4939442 - DNA, 25 bp, Homo sapien
cgcccgacgcaagcgggatcgggat

SEQ ID NO: 4939443 - DNA, 25 bp, Homo sapien
cctgccttgagtgcgggcggcgcag

SEQ ID NO: 4939444 - DNA, 25 bp, Homo sapien
caggcacagattggcggtgaggaag

SEQ ID NO: 4939445 - DNA, 25 bp, Homo sapien
gtaggttgccgaagcgcgcttgccc

SEQ ID NO: 4939446 - DNA, 25 bp, Homo sapien
tggcctcggccggtcgctggctgtg

SEQ ID NO: 4939447 - DNA, 25 bp, Homo sapien
agcagcgcccgggttcggcaggcgg

SEQ ID NO: 4939448 - DNA, 25 bp, Homo sapien
agcagcccgctgtccagcagcttga

SEQ ID NO: 4939449 - DNA, 25 bp, Homo sapien
gtcgtacagcaacgggcccaggttg

SEQ ID NO: 4939450 - DNA, 25 bp, Homo sapien
caggttgggcgccaggcgattcacc

SEQ ID NO: 4939451 - DNA, 25 bp, Homo sapien
cgagccctgcgcagatcgaatacct

SEQ ID NO: 4939452 - DNA, 25 bp, Homo sapien
cgggctgcaccggataggccagtac

SEQ ID NO: 4939453 - DNA, 25 bp, Homo sapien
ccctctgcgggctgcaccggatagg

SEQ ID NO: 4939454 - DNA, 25 bp, Homo sapien
agctttctccgccttctcggccgaa

SEQ ID NO: 4939455 - DNA, 25 bp, Homo sapien
ggacggctccagctttctccgcctt

SEQ ID NO: 4939456 - DNA, 25 bp, Homo sapien
gtgcaggaatcccacgatgcggcgc

SEQ ID NO: 4939457 - DNA, 25 bp, Homo sapien
aggaatcccacgatgcggcgcccgt

SEQ ID NO: 4939458 - DNA, 25 bp, Homo sapien
ccagtgcttgcaaatgcgtgcagtg

SEQ ID NO: 4939459 - DNA, 25 bp, Homo sapien
gcaaatgcgtgcagtgcaggaatcc

SEQ ID NO: 4939460 - DNA, 25 bp, Homo sapien
tgtttgctgcgcaagggcccgtctt

SEQ ID NO: 4939461 - DNA, 25 bp, Homo sapien
gcggcgtcagctgtttgctgcgcaa

SEQ ID NO: 4939462 - DNA, 25 bp, Homo sapien
tcagctgtttgctgcgcaagggccc

SEQ ID NO: 4939463 - DNA, 25 bp, Homo sapien
agcagcggcgtcagctgtttgctgc

SEQ ID NO: 4939464 - DNA, 25 bp, Homo sapien
cactttgttctctgtcggcctcaaa

SEQ ID NO: 4939465 - DNA, 25 bp, Homo sapien
tcggcctcaaacttctcggccccaa

SEQ ID NO: 4939466 - DNA, 25 bp, Homo sapien
gtcggcctcaaacttctcggcccca

SEQ ID NO: 4939467 - DNA, 25 bp, Homo sapien
ctttccagcagttatcgaagtttag

SEQ ID NO: 4939468 - DNA, 25 bp, Homo sapien
tatcgaagtttaggtcgcccaggag

SEQ ID NO: 4939469 - DNA, 25 bp, Homo sapien
gcagttatcgaagtttaggtcgccc

SEQ ID NO: 4939470 - DNA, 25 bp, Homo sapien
cgaagtttaggtcgcccaggagcac

SEQ ID NO: 4939471 - DNA, 25 bp, Homo sapien
atcctggaaacagcggaagagctcg

SEQ ID NO: 4939472 - DNA, 25 bp, Homo sapien
ggcgcgtgcccagccggcagggatc

SEQ ID NO: 4939473 - DNA, 25 bp, Homo sapien
gaaacagcggaagagctcgtgctcc

SEQ ID NO: 4939474 - DNA, 25 bp, Homo sapien
cagggatcctggaaacagcggaaga

SEQ ID NO: 4939475 - DNA, 25 bp, Homo sapien
ggcgcgtgcccagccggcgggggta

SEQ ID NO: 4939476 - DNA, 25 bp, Homo sapien
gcgcgtgcccagccggcgggggtac

SEQ ID NO: 4939477 - DNA, 25 bp, Homo sapien
catggactggtggagcacggaggtg

SEQ ID NO: 4939478 - DNA, 25 bp, Homo sapien
atggactggtggagcacggaggtgc

SEQ ID NO: 4939479 - DNA, 25 bp, Homo sapien
tccgcggtacgtgatgtagtccagg

SEQ ID NO: 4939480 - DNA, 25 bp, Homo sapien
tgatgtagtccaggcgccgacctct

SEQ ID NO: 4939481 - DNA, 25 bp, Homo sapien
tccagggcttagctcggcggcttct

SEQ ID NO: 4939482 - DNA, 25 bp, Homo sapien
ttagctcggcggcttctgccgggaa

SEQ ID NO: 4939483 - DNA, 25 bp, Homo sapien
tcaggttgagggtcgtcccagtgcc

SEQ ID NO: 4939484 - DNA, 25 bp, Homo sapien
gagtcaggttgagggtcgtcccagt

SEQ ID NO: 4939485 - DNA, 25 bp, Homo sapien
ggagtcaggttgagggtcgtcccag

SEQ ID NO: 4939486 - DNA, 25 bp, Homo sapien
ggcgggagtcaggttgagggtcgtc

SEQ ID NO: 4939487 - DNA, 25 bp, Homo sapien
gctgcaggcgcactgcccggtggtc

SEQ ID NO: 4939488 - DNA, 25 bp, Homo sapien
tgagcccctccagggcggtactgaa

SEQ ID NO: 4939489 - DNA, 25 bp, Homo sapien
aggacactgagactcggagctgcag

SEQ ID NO: 4939490 - DNA, 25 bp, Homo sapien
gcggtactgaacgtcacctgctcca

SEQ ID NO: 4939491 - DNA, 25 bp, Homo sapien
tacggcgcctagttcgtgctccgag

SEQ ID NO: 4939492 - DNA, 25 bp, Homo sapien
gcgtctatgagtatcgccgggccca

SEQ ID NO: 4939493 - DNA, 25 bp, Homo sapien
gatgccttaagtctcccggttctgg

SEQ ID NO: 4939494 - DNA, 25 bp, Homo sapien
gccgtgtgaggatcccgcaataaag

SEQ ID NO: 4939495 - DNA, 25 bp, Homo sapien
ccggccgagaattaaattgtcacaa

SEQ ID NO: 4939496 - DNA, 25 bp, Homo sapien
gttgcccccagtctcctggagcact

SEQ ID NO: 4939497 - DNA, 25 bp, Homo sapien
gccgagaattaaattgtcacaattt

SEQ ID NO: 4939498 - DNA, 25 bp, Homo sapien
cacccggccgagaattaaattgtca

SEQ ID NO: 4939499 - DNA, 25 bp, Homo sapien
gaatttatgctgaagggagtggcca

SEQ ID NO: 4939500 - DNA, 25 bp, Homo sapien
gcttccagcgtcaaatggtgcagca

SEQ ID NO: 4939501 - DNA, 25 bp, Homo sapien
agcgtagcctccagtcagaagtcaa

SEQ ID NO: 4939502 - DNA, 25 bp, Homo sapien
gggagcacacaaacgcacaatttag

SEQ ID NO: 4939503 - DNA, 25 bp, Homo sapien
tctgagccgcgggagaactacagct

SEQ ID NO: 4939504 - DNA, 25 bp, Homo sapien
cggcggctccgaccgcccggaatct

SEQ ID NO: 4939505 - DNA, 25 bp, Homo sapien
tctgcctacttctctgagccgcggg

SEQ ID NO: 4939506 - DNA, 25 bp, Homo sapien
gggagaactacagctcccggcggct

SEQ ID NO: 4939507 - DNA, 25 bp, Homo sapien
tcaatgtaggccgagccgtcagcct

SEQ ID NO: 4939508 - DNA, 25 bp, Homo sapien
cggtagccctggtccgacaagagct

SEQ ID NO: 4939509 - DNA, 25 bp, Homo sapien
gtgcgggccgtagaccacagccagt

SEQ ID NO: 4939510 - DNA, 25 bp, Homo sapien
atccgcgcctggatcttgcgcagct

SEQ ID NO: 4939511 - DNA, 25 bp, Homo sapien
tccgagtgagatgcggtgctgagca

SEQ ID NO: 4939512 - DNA, 25 bp, Homo sapien
ctcaagtccccgagccagcgctcag

SEQ ID NO: 4939513 - DNA, 25 bp, Homo sapien
tgagatgcggtgctgagcatcggct

SEQ ID NO: 4939514 - DNA, 25 bp, Homo sapien
gtgctgagcatcggctgtgtagact

SEQ ID NO: 4939515 - DNA, 25 bp, Homo sapien
tattgtagggcgagaagtaccgcgt

SEQ ID NO: 4939516 - DNA, 25 bp, Homo sapien
gcagcacactaaggacttgcgttta

SEQ ID NO: 4939517 - DNA, 25 bp, Homo sapien
gagtgcctagcacgttgaagagccg

SEQ ID NO: 4939518 - DNA, 25 bp, Homo sapien
taccgcgtggataataaggtcgtct

SEQ ID NO: 4939519 - DNA, 25 bp, Homo sapien
tgtcttgcatgtgtcgccctctggc

SEQ ID NO: 4939520 - DNA, 25 bp, Homo sapien
tttctgctctgcataagtgccttgc

SEQ ID NO: 4939521 - DNA, 25 bp, Homo sapien
cgggaaccctcaacctgatttggag

SEQ ID NO: 4939522 - DNA, 25 bp, Homo sapien
gggcaactgcgttacctccaaaaca

SEQ ID NO: 4939523 - DNA, 25 bp, Homo sapien
gaagaggacagacacatgagccagg

SEQ ID NO: 4939524 - DNA, 25 bp, Homo sapien
aggacagacacatgagccaggccca

SEQ ID NO: 4939525 - DNA, 25 bp, Homo sapien
ctggaagaggacagacacatgagcc

SEQ ID NO: 4939526 - DNA, 25 bp, Homo sapien
aagaggacagacacatgagccaggc

SEQ ID NO: 4939527 - DNA, 25 bp, Homo sapien
atatcaatctgggagcgtgggtgca

SEQ ID NO: 4939528 - DNA, 25 bp, Homo sapien
gctgcttcgaaagtctggcggagct

SEQ ID NO: 4939529 - DNA, 25 bp, Homo sapien
gctcacctgtgctgaaggtcgctga

SEQ ID NO: 4939530 - DNA, 25 bp, Homo sapien
tattgacagttcactagggccctgt

SEQ ID NO: 4939531 - DNA, 25 bp, Homo sapien
taagagggtgtgcacatctcgggca

SEQ ID NO: 4939532 - DNA, 25 bp, Homo sapien
aaagtctctcatgggtatcccggca

SEQ ID NO: 4939533 - DNA, 25 bp, Homo sapien
gggcatccatctcaagcagcgcaat

SEQ ID NO: 4939534 - DNA, 25 bp, Homo sapien
atgctgccggaccactcgatctaag

SEQ ID NO: 4939535 - DNA, 25 bp, Homo sapien
cccagcaagatagaggcctcacgca

SEQ ID NO: 4939536 - DNA, 25 bp, Homo sapien
ccagcaagatagaggcctcacgcac

SEQ ID NO: 4939537 - DNA, 25 bp, Homo sapien
gtcccccagcaagatagaggcctca

SEQ ID NO: 4939538 - DNA, 25 bp, Homo sapien
tcagtcccccagcaagatagaggcc

SEQ ID NO: 4939539 - DNA, 25 bp, Homo sapien
gggttttattctggacatgggtggc

SEQ ID NO: 4939540 - DNA, 25 bp, Homo sapien
tccagaggttgtgggacatggcccc

SEQ ID NO: 4939541 - DNA, 25 bp, Homo sapien
gggctccaaaccatagtccagaggt

SEQ ID NO: 4939542 - DNA, 25 bp, Homo sapien
cacatccctagggtgggtacccaga

SEQ ID NO: 4939543 - DNA, 25 bp, Homo sapien
tgttgtactttcagagcccaaggta

SEQ ID NO: 4939544 - DNA, 25 bp, Homo sapien
tttgggagtccgctaggcgctgccc

SEQ ID NO: 4939545 - DNA, 25 bp, Homo sapien
actagagtcggactcgcagtgcacc

SEQ ID NO: 4939546 - DNA, 25 bp, Homo sapien
aggtagccctacagccggaggacag

SEQ ID NO: 4939547 - DNA, 25 bp, Homo sapien
gagggcgcgcccctaacactgtgtg

SEQ ID NO: 4939548 - DNA, 25 bp, Homo sapien
aactaccgccgcggtgcccacaggc

SEQ ID NO: 4939549 - DNA, 25 bp, Homo sapien
gcagggcggcgcggctacggaccct

SEQ ID NO: 4939550 - DNA, 25 bp, Homo sapien
cctctcccgcctccaactaccgccg

SEQ ID NO: 4939551 - DNA, 25 bp, Homo sapien
agggcggcgcggctacggaccctct

SEQ ID NO: 4939552 - DNA, 25 bp, Homo sapien
cgcgccggcgaaccgggtccgacag

SEQ ID NO: 4939553 - DNA, 25 bp, Homo sapien
cacaacggcgcgttgaggcgcagca

SEQ ID NO: 4939554 - DNA, 25 bp, Homo sapien
gcgttgaggcgcagcactaggcggg

SEQ ID NO: 4939555 - DNA, 25 bp, Homo sapien
aacggcgcgttgaggcgcagcacta

SEQ ID NO: 4939556 - DNA, 25 bp, Homo sapien
gcccatggcgttctccgacatgtaa

SEQ ID NO: 4939557 - DNA, 25 bp, Homo sapien
aaaaccagcgccaagaaccaggcga

SEQ ID NO: 4939558 - DNA, 25 bp, Homo sapien
cgacttcttgcggtgggcggcgaag

SEQ ID NO: 4939559 - DNA, 25 bp, Homo sapien
cgacatgtaagtgcgctgggtcagc

SEQ ID NO: 4939560 - DNA, 25 bp, Homo sapien
tgcagacacgaagggagcctctgag

SEQ ID NO: 4939561 - DNA, 25 bp, Homo sapien
agcagagctccccggccttagccac

SEQ ID NO: 4939562 - DNA, 25 bp, Homo sapien
tgctcgccccatacgccctgctctg

SEQ ID NO: 4939563 - DNA, 25 bp, Homo sapien
cttagccaccactgctcgccccata

SEQ ID NO: 4939564 - DNA, 25 bp, Homo sapien
cgcatcgtccgttcaagccaggcca

SEQ ID NO: 4939565 - DNA, 25 bp, Homo sapien
gcagtttccgggagaaactctgcgt

SEQ ID NO: 4939566 - DNA, 25 bp, Homo sapien
gggcagtttccgggagaaactctgc

SEQ ID NO: 4939567 - DNA, 25 bp, Homo sapien
ggcagtttccgggagaaactctgcg

SEQ ID NO: 4939568 - DNA, 25 bp, Homo sapien
ccccgcaaggtgatacccagcccag

SEQ ID NO: 4939569 - DNA, 25 bp, Homo sapien
gacacccccgcaaggtgatacccag

SEQ ID NO: 4939570 - DNA, 25 bp, Homo sapien
ccgcaaggtgatacccagcccagac

SEQ ID NO: 4939571 - DNA, 25 bp, Homo sapien
ccatgacacccccgcaaggtgatac

SEQ ID NO: 4939572 - DNA, 25 bp, Homo sapien
cagtgtaactttgtggtagggggct

SEQ ID NO: 4939573 - DNA, 25 bp, Homo sapien
cgtacacgttggtgcccgacaccat

SEQ ID NO: 4939574 - DNA, 25 bp, Homo sapien
aagcgactcggtgctggcagcacgc

SEQ ID NO: 4939575 - DNA, 25 bp, Homo sapien
acggtgagcacaagcgactcggtgc

SEQ ID NO: 4939576 - DNA, 25 bp, Homo sapien
gggcccgcaggatgccgtacacgtt

SEQ ID NO: 4939577 - DNA, 25 bp, Homo sapien
cccggaagtgggcagccagtgccag

SEQ ID NO: 4939578 - DNA, 25 bp, Homo sapien
cggaagtgggcagccagtgccagca

SEQ ID NO: 4939579 - DNA, 25 bp, Homo sapien
tgccagcagcagccccacagcctgg

SEQ ID NO: 4939580 - DNA, 25 bp, Homo sapien
agtgccagcagcagccccacagcct

SEQ ID NO: 4939581 - DNA, 25 bp, Homo sapien
ctgttaccaggaagacgatatcttt

SEQ ID NO: 4939582 - DNA, 25 bp, Homo sapien
taccaggaagacgatatctttggcc

SEQ ID NO: 4939583 - DNA, 25 bp, Homo sapien
ggaagacgatatctttggcccaata

SEQ ID NO: 4939584 - DNA, 25 bp, Homo sapien
caggaagacgatatctttggcccaa

SEQ ID NO: 4939585 - DNA, 25 bp, Homo sapien
catcgtggtaggcttcaagccaagc

SEQ ID NO: 4939586 - DNA, 25 bp, Homo sapien
atcgtggtaggcttcaagccaagcc

SEQ ID NO: 4939587 - DNA, 25 bp, Homo sapien
gacatcgtggtaggcttcaagccaa

SEQ ID NO: 4939588 - DNA, 25 bp, Homo sapien
acatcgtggtaggcttcaagccaag

SEQ ID NO: 4939589 - DNA, 25 bp, Homo sapien
ggttgggcagctgcccgttaagccc

SEQ ID NO: 4939590 - DNA, 25 bp, Homo sapien
ccacggccacatcgaggctggtgac

SEQ ID NO: 4939591 - DNA, 25 bp, Homo sapien
cggccacatcgaggctggtgaccac

SEQ ID NO: 4939592 - DNA, 25 bp, Homo sapien
caaggttgggcagctgcccgttaag

SEQ ID NO: 4939593 - DNA, 25 bp, Homo sapien
cttgccctgaagcgtgcacaacagg

SEQ ID NO: 4939594 - DNA, 25 bp, Homo sapien
cacaacaggccccctttctggcaga

SEQ ID NO: 4939595 - DNA, 25 bp, Homo sapien
tgccctgaagcgtgcacaacaggcc

SEQ ID NO: 4939596 - DNA, 25 bp, Homo sapien
caacaggccccctttctggcagaag

SEQ ID NO: 4939597 - DNA, 25 bp, Homo sapien
caggatgagacagcccctcccacag

SEQ ID NO: 4939598 - DNA, 25 bp, Homo sapien
aggatgagacagcccctcccacaga

SEQ ID NO: 4939599 - DNA, 25 bp, Homo sapien
atgagacagcccctcccacagaccc

SEQ ID NO: 4939600 - DNA, 25 bp, Homo sapien
acaggatgagacagcccctcccaca

SEQ ID NO: 4939601 - DNA, 25 bp, Homo sapien
ggtccatccaatgatgtccagtcct

SEQ ID NO: 4939602 - DNA, 25 bp, Homo sapien
ctgcagcggtccatccaatgatgtc

SEQ ID NO: 4939603 - DNA, 25 bp, Homo sapien
caatgatgtccagtcctcgggctgc

SEQ ID NO: 4939604 - DNA, 25 bp, Homo sapien
catccaatgatgtccagtcctcggg

SEQ ID NO: 4939605 - DNA, 25 bp, Homo sapien
ccaccaggtcatacttgtactggcg

SEQ ID NO: 4939606 - DNA, 25 bp, Homo sapien
ctgccaccaggtcatacttgtactg

SEQ ID NO: 4939607 - DNA, 25 bp, Homo sapien
caggtcatacttgtactggcggaag

SEQ ID NO: 4939608 - DNA, 25 bp, Homo sapien
gtcatacttgtactggcggaagcta

SEQ ID NO: 4939609 - DNA, 25 bp, Homo sapien
gcgggcatgtagaggccgatggaga

SEQ ID NO: 4939610 - DNA, 25 bp, Homo sapien
cgggcatgtagaggccgatggagac

SEQ ID NO: 4939611 - DNA, 25 bp, Homo sapien
tagaggccgatggagacgaagcggg

SEQ ID NO: 4939612 - DNA, 25 bp, Homo sapien
catgtagaggccgatggagacgaag

SEQ ID NO: 4939613 - DNA, 25 bp, Homo sapien
tcaggatggaagactctccccagcc

SEQ ID NO: 4939614 - DNA, 25 bp, Homo sapien
cccaacaagaggtgtaacgggatct

SEQ ID NO: 4939615 - DNA, 25 bp, Homo sapien
caagaggtgtaacgggatctgccca

SEQ ID NO: 4939616 - DNA, 25 bp, Homo sapien
tcaaggaccccaacaagaggtgtaa

SEQ ID NO: 4939617 - DNA, 25 bp, Homo sapien
gcacccccgggctcctcaaggccca

SEQ ID NO: 4939618 - DNA, 25 bp, Homo sapien
gccaggggcacccccgggctcctca

SEQ ID NO: 4939619 - DNA, 25 bp, Homo sapien
cacccccgggctcctcaaggcccat

SEQ ID NO: 4939620 - DNA, 25 bp, Homo sapien
caggggcacccccgggctcctcaag

SEQ ID NO: 4939621 - DNA, 25 bp, Homo sapien
gaggctaagttgcaacactaaacac

SEQ ID NO: 4939622 - DNA, 25 bp, Homo sapien
tgcaacactaaacaccagtcagacc

SEQ ID NO: 4939623 - DNA, 25 bp, Homo sapien
cagctgaggctaagttgcaacacta

SEQ ID NO: 4939624 - DNA, 25 bp, Homo sapien
gctaagttgcaacactaaacaccag

SEQ ID NO: 4939625 - DNA, 25 bp, Homo sapien
agatcagcagaggtgccacgagcga

SEQ ID NO: 4939626 - DNA, 25 bp, Homo sapien
tgagatcagcagaggtgccacgagc

SEQ ID NO: 4939627 - DNA, 25 bp, Homo sapien
ctgtgagatcagcagaggtgccacg

SEQ ID NO: 4939628 - DNA, 25 bp, Homo sapien
tgtgagatcagcagaggtgccacga

SEQ ID NO: 4939629 - DNA, 25 bp, Homo sapien
gaagtgctgggtggcaacgtgttgg

SEQ ID NO: 4939630 - DNA, 25 bp, Homo sapien
tgcataaatcgccagcagtgtcagc

SEQ ID NO: 4939631 - DNA, 25 bp, Homo sapien
ccagcactggcaggacatagagggc

SEQ ID NO: 4939632 - DNA, 25 bp, Homo sapien
tggcaacgtgttggcccagcactgg

SEQ ID NO: 4939633 - DNA, 25 bp, Homo sapien
gcatgtccaggggacctctacccct

SEQ ID NO: 4939634 - DNA, 25 bp, Homo sapien
aaaggactcagaggcaacccacaag

SEQ ID NO: 4939635 - DNA, 25 bp, Homo sapien
aacccacaagctgtctgcatgtcca

SEQ ID NO: 4939636 - DNA, 25 bp, Homo sapien
ctgtaagacaaaggactcagaggca

SEQ ID NO: 4939637 - DNA, 25 bp, Homo sapien
gcttggcaagcgcagcagtgggcac

SEQ ID NO: 4939638 - DNA, 25 bp, Homo sapien
tgaggcttggcaagcgcagcagtgg

SEQ ID NO: 4939639 - DNA, 25 bp, Homo sapien
atgaggcttggcaagcgcagcagtg

SEQ ID NO: 4939640 - DNA, 25 bp, Homo sapien
ggcttggcaagcgcagcagtgggca

SEQ ID NO: 4939641 - DNA, 25 bp, Homo sapien
aaagggctactgaatgagggtgcgg

SEQ ID NO: 4939642 - DNA, 25 bp, Homo sapien
agggtgcggtctgtgatgagggcac

SEQ ID NO: 4939643 - DNA, 25 bp, Homo sapien
agaagcaacatcaaggtaggctcca

SEQ ID NO: 4939644 - DNA, 25 bp, Homo sapien
ctgggtggagaagcaacatcaaggt

SEQ ID NO: 4939645 - DNA, 25 bp, Homo sapien
cacaccctgggctagcgctgccagg

SEQ ID NO: 4939646 - DNA, 25 bp, Homo sapien
tccttggggagtctctgtcccagcc

SEQ ID NO: 4939647 - DNA, 25 bp, Homo sapien
aggacctccagagaaagggcggctt

SEQ ID NO: 4939648 - DNA, 25 bp, Homo sapien
tcttcgggttgtcgtggaaactggc

SEQ ID NO: 4939649 - DNA, 25 bp, Homo sapien
cgtctctctgttgccgtgacagcgc

SEQ ID NO: 4939650 - DNA, 25 bp, Homo sapien
agagtcaaaacctcgcgaaagccgg

SEQ ID NO: 4939651 - DNA, 25 bp, Homo sapien
ggcccaacactaccccgcgaagcga

SEQ ID NO: 4939652 - DNA, 25 bp, Homo sapien
ccgggacgcgcgctgcacagcagac

SEQ ID NO: 4939653 - DNA, 25 bp, Homo sapien
ctgaggtgtccgtagcgggagctgc

SEQ ID NO: 4939654 - DNA, 25 bp, Homo sapien
ctgcacagcagaccccgggcacgcg

SEQ ID NO: 4939655 - DNA, 25 bp, Homo sapien
tgatcccacacgctcaaggtcggca

SEQ ID NO: 4939656 - DNA, 25 bp, Homo sapien
ggacgggctctctgccgttcggaga

SEQ ID NO: 4939657 - DNA, 25 bp, Homo sapien
ctgggtggccggtaccgcttccgcg

SEQ ID NO: 4939658 - DNA, 25 bp, Homo sapien
tccccgccgtgaccttcacggagat

SEQ ID NO: 4939659 - DNA, 25 bp, Homo sapien
agcgctgacagcatcactttccggc

SEQ ID NO: 4939660 - DNA, 25 bp, Homo sapien
gaaaggccagacttcgacgacaagg

SEQ ID NO: 4939661 - DNA, 25 bp, Homo sapien
gccacggtgagaccacggatagctg

SEQ ID NO: 4939662 - DNA, 25 bp, Homo sapien
ctcacagccgaatgcagagccatgg

SEQ ID NO: 4939663 - DNA, 25 bp, Homo sapien
gctccttagcttcatcctccgtgta

SEQ ID NO: 4939664 - DNA, 25 bp, Homo sapien
ggcgcacacctgcttatatacctgg

SEQ ID NO: 4939665 - DNA, 25 bp, Homo sapien
ggtaggccacgaagtccatgctgtg

SEQ ID NO: 4939666 - DNA, 25 bp, Homo sapien
tagcttcatcctccgtgtagcacac

SEQ ID NO: 4939667 - DNA, 25 bp, Homo sapien
aatagtcgaacagcttccctggccg

SEQ ID NO: 4939668 - DNA, 25 bp, Homo sapien
ttttgggaaatagtcgaacagcttc

SEQ ID NO: 4939669 - DNA, 25 bp, Homo sapien
tccgttgttggcagctcgagcagcc

SEQ ID NO: 4939670 - DNA, 25 bp, Homo sapien
ctcgcacgatgtagctgaggtcagg

SEQ ID NO: 4939671 - DNA, 25 bp, Homo sapien
tagttccaagcacaagtcagccctt

SEQ ID NO: 4939672 - DNA, 25 bp, Homo sapien
acaccccggtgggtggctcgcagta

SEQ ID NO: 4939673 - DNA, 25 bp, Homo sapien
tgagcagggagaagacgtagtcctc

SEQ ID NO: 4939674 - DNA, 25 bp, Homo sapien
tcgtcaaactctaagacatctgtgt

SEQ ID NO: 4939675 - DNA, 25 bp, Homo sapien
aagtagagaccttcccgcagtgaca

SEQ ID NO: 4939676 - DNA, 25 bp, Homo sapien
tccttggctatctgggacatggtag

SEQ ID NO: 4939677 - DNA, 25 bp, Homo sapien
cttgagccccatgcgttttcgatgg

SEQ ID NO: 4939678 - DNA, 25 bp, Homo sapien
ggaaggtgcacacatccttggctat

SEQ ID NO: 4939679 - DNA, 25 bp, Homo sapien
tcgatggtcgtgctctggctcagat

SEQ ID NO: 4939680 - DNA, 25 bp, Homo sapien
gcccttctctgatacccaccatggc

SEQ ID NO: 4939681 - DNA, 25 bp, Homo sapien
ccagcccttctctgatacccaccat

SEQ ID NO: 4939682 - DNA, 25 bp, Homo sapien
ccttctctgatacccaccatggcct

SEQ ID NO: 4939683 - DNA, 25 bp, Homo sapien
agcccttctctgatacccaccatgg

SEQ ID NO: 4939684 - DNA, 25 bp, Homo sapien
acttgggcggccgatatgccagctt

SEQ ID NO: 4939685 - DNA, 25 bp, Homo sapien
gatatgccagcttccgactcttcag

SEQ ID NO: 4939686 - DNA, 25 bp, Homo sapien
ctgaccacttgtgccgctttatggt

SEQ ID NO: 4939687 - DNA, 25 bp, Homo sapien
tgccgctttatggtgtagaccaggg

SEQ ID NO: 4939688 - DNA, 25 bp, Homo sapien
gatgaagagaggcttagctgaggcc

SEQ ID NO: 4939689 - DNA, 25 bp, Homo sapien
atgaagagaggcttagctgaggcct

SEQ ID NO: 4939690 - DNA, 25 bp, Homo sapien
ccccagccagcacaagttgcagcct

SEQ ID NO: 4939691 - DNA, 25 bp, Homo sapien
cccagccagcacaagttgcagcctc

SEQ ID NO: 4939692 - DNA, 25 bp, Homo sapien
cggacaacaacaagcgtccgccggg

SEQ ID NO: 4939693 - DNA, 25 bp, Homo sapien
gcagcgcgggctcttcaagatcgga

SEQ ID NO: 4939694 - DNA, 25 bp, Homo sapien
ccgctccagtctccgagatcgagag

SEQ ID NO: 4939695 - DNA, 25 bp, Homo sapien
tggctgggttagatcaggccgcgcc

SEQ ID NO: 4939696 - DNA, 25 bp, Homo sapien
taactcttgagtccgcaacgggacg

SEQ ID NO: 4939697 - DNA, 25 bp, Homo sapien
taagaggctgcatcccggttaggaa

SEQ ID NO: 4939698 - DNA, 25 bp, Homo sapien
tagtttctccagacgcctaggaggg

SEQ ID NO: 4939699 - DNA, 25 bp, Homo sapien
ggcgggcgctctttcgttttggcta

SEQ ID NO: 4939700 - DNA, 25 bp, Homo sapien
ataccccctgcagaacacgcgagtt

SEQ ID NO: 4939701 - DNA, 25 bp, Homo sapien
tctgggactagactagaccaccggg

SEQ ID NO: 4939702 - DNA, 25 bp, Homo sapien
agttctgggactagactagaccacc

SEQ ID NO: 4939703 - DNA, 25 bp, Homo sapien
cagaacacgcgagttctgggactag

SEQ ID NO: 4939704 - DNA, 25 bp, Homo sapien
ttggggaaggagctccgtgctccag

SEQ ID NO: 4939705 - DNA, 25 bp, Homo sapien
tcaaagctcgagttctccaatagct

SEQ ID NO: 4939706 - DNA, 25 bp, Homo sapien
tcagctgtgagttgatggcttcaaa

SEQ ID NO: 4939707 - DNA, 25 bp, Homo sapien
ctgccaatgatgtgggcatctccag

SEQ ID NO: 4939708 - DNA, 25 bp, Homo sapien
caatgatgtgggcatctccagtctc

SEQ ID NO: 4939709 - DNA, 25 bp, Homo sapien
gaaagtgcctccagcacgtggggct

SEQ ID NO: 4939710 - DNA, 25 bp, Homo sapien
ttgtcgtctcctgccatcttacatg

SEQ ID NO: 4939711 - DNA, 25 bp, Homo sapien
gctcagtcctgaagtctggggtgga

SEQ ID NO: 4939712 - DNA, 25 bp, Homo sapien
cagaactgcttgaacatgtgtttgt

SEQ ID NO: 4939713 - DNA, 25 bp, Homo sapien
cattgagcgtggcaatcaggtagaa

SEQ ID NO: 4939714 - DNA, 25 bp, Homo sapien
ctgaaggactcattgagcgtggcaa

SEQ ID NO: 4939715 - DNA, 25 bp, Homo sapien
tcttgcggctgcacttgtcactgag

SEQ ID NO: 4939716 - DNA, 25 bp, Homo sapien
caatcaggtagaagagggtcttgcg

SEQ ID NO: 4939717 - DNA, 25 bp, Homo sapien
tagggcaggtcacagtcagggtgac

SEQ ID NO: 4939718 - DNA, 25 bp, Homo sapien
gcaggtcacagtcagggtgacagga

SEQ ID NO: 4939719 - DNA, 25 bp, Homo sapien
tcacagtcagggtgacaggagccca

SEQ ID NO: 4939720 - DNA, 25 bp, Homo sapien
ctagggcaggtcacagtcagggtga

SEQ ID NO: 4939721 - DNA, 25 bp, Homo sapien
ggcagatctcctcgtccaccgcgtt

SEQ ID NO: 4939722 - DNA, 25 bp, Homo sapien
gtagatgtcacattcagccaggcag

SEQ ID NO: 4939723 - DNA, 25 bp, Homo sapien
tgtggtttcagatccttgaagtcct

SEQ ID NO: 4939724 - DNA, 25 bp, Homo sapien
tccaccgcgttccacagctgtggtt

SEQ ID NO: 4939725 - DNA, 25 bp, Homo sapien
gccatctgcagggatgccggcccac

SEQ ID NO: 4939726 - DNA, 25 bp, Homo sapien
cctggaggccatctgcagggatgcc

SEQ ID NO: 4939727 - DNA, 25 bp, Homo sapien
gaggccatctgcagggatgccggcc

SEQ ID NO: 4939728 - DNA, 25 bp, Homo sapien
ctggaggcctggaggccatctgcag

SEQ ID NO: 4939729 - DNA, 25 bp, Homo sapien
gtgacaggtggtgtgaggcgccaag

SEQ ID NO: 4939730 - DNA, 25 bp, Homo sapien
gtgaggcgccaagtgccccacaaac

SEQ ID NO: 4939731 - DNA, 25 bp, Homo sapien
gggagtatagggtgacaggtggtgt

SEQ ID NO: 4939732 - DNA, 25 bp, Homo sapien
caggtggtgtgaggcgccaagtgcc

SEQ ID NO: 4939733 - DNA, 25 bp, Homo sapien
cgattcgcttgagccgcttgttgta

SEQ ID NO: 4939734 - DNA, 25 bp, Homo sapien
cggcagctaaagaagacgattcgct

SEQ ID NO: 4939735 - DNA, 25 bp, Homo sapien
ccgaagggatctgagtccaagtctg

SEQ ID NO: 4939736 - DNA, 25 bp, Homo sapien
aggctaccatcctccccgaagggat

SEQ ID NO: 4939737 - DNA, 25 bp, Homo sapien
gtccagctcgttgcctgcctctgag

SEQ ID NO: 4939738 - DNA, 25 bp, Homo sapien
cagctccatgtccagctcgttgcct

SEQ ID NO: 4939739 - DNA, 25 bp, Homo sapien
atgtccagctcgttgcctgcctctg

SEQ ID NO: 4939740 - DNA, 25 bp, Homo sapien
cctctgagggtgtgtaggtggagcc

SEQ ID NO: 4939741 - DNA, 25 bp, Homo sapien
gctggtctcctcggccccactgccc

SEQ ID NO: 4939742 - DNA, 25 bp, Homo sapien
actgcccccgcttctgctttcttcc

SEQ ID NO: 4939743 - DNA, 25 bp, Homo sapien
cactgcccccgcttctgctttcttc

SEQ ID NO: 4939744 - DNA, 25 bp, Homo sapien
ctccaggcttcaaggacccgggtca

SEQ ID NO: 4939745 - DNA, 25 bp, Homo sapien
tcaaggacccgggtcatggccccca

SEQ ID NO: 4939746 - DNA, 25 bp, Homo sapien
tgttgtacccactccaggcttcaag

SEQ ID NO: 4939747 - DNA, 25 bp, Homo sapien
aggacccgggtcatggcccccatca

SEQ ID NO: 4939748 - DNA, 25 bp, Homo sapien
cacagtgggccttcaggagccacca

SEQ ID NO: 4939749 - DNA, 25 bp, Homo sapien
caccacttagaccaagtagaggagg

SEQ ID NO: 4939750 - DNA, 25 bp, Homo sapien
tgggcggaggttggcacacagtggg

SEQ ID NO: 4939751 - DNA, 25 bp, Homo sapien
ttcaggagccaccacttagaccaag

SEQ ID NO: 4939752 - DNA, 25 bp, Homo sapien
caggactgtggcagcgccagggtct

SEQ ID NO: 4939753 - DNA, 25 bp, Homo sapien
gcaggtatggccttgggcagtgcca

SEQ ID NO: 4939754 - DNA, 25 bp, Homo sapien
agtgggcatccacaggatggagcca

SEQ ID NO: 4939755 - DNA, 25 bp, Homo sapien
gacaggtccaggcattggttgaagc

SEQ ID NO: 4939756 - DNA, 25 bp, Homo sapien
ggccccctgctgacaagtccggcca

SEQ ID NO: 4939757 - DNA, 25 bp, Homo sapien
aagtccggccacagcatgggcagca

SEQ ID NO: 4939758 - DNA, 25 bp, Homo sapien
gacaagtccggccacagcatgggca

SEQ ID NO: 4939759 - DNA, 25 bp, Homo sapien
ctgctgacaagtccggccacagcat

SEQ ID NO: 4939760 - DNA, 25 bp, Homo sapien
cagttcatttgggcagggcagtcgc

SEQ ID NO: 4939761 - DNA, 25 bp, Homo sapien
cacagaccctttgggctggagtgtg

SEQ ID NO: 4939762 - DNA, 25 bp, Homo sapien
tgctcgtggggcctccggccacaga

SEQ ID NO: 4939763 - DNA, 25 bp, Homo sapien
gctgcagcaaagtgacactcagtgc

SEQ ID NO: 4939764 - DNA, 25 bp, Homo sapien
tagccatccgcatcatacaggtccg

SEQ ID NO: 4939765 - DNA, 25 bp, Homo sapien
catttcagcaactgcggtcccagag

SEQ ID NO: 4939766 - DNA, 25 bp, Homo sapien
aacagctcccaggacttagcggtca

SEQ ID NO: 4939767 - DNA, 25 bp, Homo sapien
tacaggtccgagtccagaactaggt

SEQ ID NO: 4939768 - DNA, 25 bp, Homo sapien
ctgcgacggctccgtgaaagtcaac

SEQ ID NO: 4939769 - DNA, 25 bp, Homo sapien
tgcgacggctccgtgaaagtcaact

SEQ ID NO: 4939770 - DNA, 25 bp, Homo sapien
tttccacgacttcgtggaggctggt

SEQ ID NO: 4939771 - DNA, 25 bp, Homo sapien
cgcggggtcaggctttgccactgtt

SEQ ID NO: 4939772 - DNA, 25 bp, Homo sapien
tccacgacttcgtggaggctggtgc

SEQ ID NO: 4939773 - DNA, 25 bp, Homo sapien
cttttccacgacttcgtggaggctg

SEQ ID NO: 4939774 - DNA, 25 bp, Homo sapien
ccaggcatgcagatcgaaggtgagc

SEQ ID NO: 4939775 - DNA, 25 bp, Homo sapien
gcacatctacgagagtccaggcatg

SEQ ID NO: 4939776 - DNA, 25 bp, Homo sapien
tgttcatctccgcaacgagcagcag

SEQ ID NO: 4939777 - DNA, 25 bp, Homo sapien
gccagacgcatgagcctgcctgttg

SEQ ID NO: 4939778 - DNA, 25 bp, Homo sapien
tctacttcctcgcagtaagccaggt

SEQ ID NO: 4939779 - DNA, 25 bp, Homo sapien
accttcacggtgctgtcccgggaag

SEQ ID NO: 4939780 - DNA, 25 bp, Homo sapien
gctgtcccgggaagctgtcaccatt

SEQ ID NO: 4939781 - DNA, 25 bp, Homo sapien
tgtgtggcccacgaacaccatccgg

SEQ ID NO: 4939782 - DNA, 25 bp, Homo sapien
tcgggagcacagtcatagccgtcac

SEQ ID NO: 4939783 - DNA, 25 bp, Homo sapien
gcagtgagctcactatgcgcccggt

SEQ ID NO: 4939784 - DNA, 25 bp, Homo sapien
acaccagggtcgtgttcgggagcac

SEQ ID NO: 4939785 - DNA, 25 bp, Homo sapien
aaggcgccttcgagatccgtgaggt

SEQ ID NO: 4939786 - DNA, 25 bp, Homo sapien
aagagcctgttggcgcggaccctgc

SEQ ID NO: 4939787 - DNA, 25 bp, Homo sapien
ttggcgcggaccctgccgctccttc

SEQ ID NO: 4939788 - DNA, 25 bp, Homo sapien
cctgttggcgcggaccctgccgctc

SEQ ID NO: 4939789 - DNA, 25 bp, Homo sapien
agagcctgttggcgcggaccctgcc

SEQ ID NO: 4939790 - DNA, 25 bp, Homo sapien
ttccaggtggatgcgatggcgacaa

SEQ ID NO: 4939791 - DNA, 25 bp, Homo sapien
gaagacagtcttcgacgagagccac

SEQ ID NO: 4939792 - DNA, 25 bp, Homo sapien
ggctgtgcgcctccgtttggaagac

SEQ ID NO: 4939793 - DNA, 25 bp, Homo sapien
agcaccgacagcgtgccgtccgtgt

SEQ ID NO: 4939794 - DNA, 25 bp, Homo sapien
gagggggctctgtggcggcctggcc

SEQ ID NO: 4939795 - DNA, 25 bp, Homo sapien
ggggctctgtggcggcctggccttt

SEQ ID NO: 4939796 - DNA, 25 bp, Homo sapien
ctggctgggccttgtcggaggggag

SEQ ID NO: 4939797 - DNA, 25 bp, Homo sapien
tggctgggccttgtcggaggggagg

SEQ ID NO: 4939798 - DNA, 25 bp, Homo sapien
tgcaccaggccgtaggtagcgctgt

SEQ ID NO: 4939799 - DNA, 25 bp, Homo sapien
tgacgcgtctgcctagcgcacagag

SEQ ID NO: 4939800 - DNA, 25 bp, Homo sapien
cggtggtctaatcgcggactgtcgc

SEQ ID NO: 4939801 - DNA, 25 bp, Homo sapien
ggctcaggctctcttcggcataggg

SEQ ID NO: 4939802 - DNA, 25 bp, Homo sapien
ggttcagggtcaggaaccggagctg

SEQ ID NO: 4939803 - DNA, 25 bp, Homo sapien
gctggagcaggcatacagtttgagc

SEQ ID NO: 4939804 - DNA, 25 bp, Homo sapien
tggagcaggcatacagtttgagcgt

SEQ ID NO: 4939805 - DNA, 25 bp, Homo sapien
aggctggagcaggcatacagtttga

SEQ ID NO: 4939806 - DNA, 25 bp, Homo sapien
catacagtttgagcgtggggcagca

SEQ ID NO: 4939807 - DNA, 25 bp, Homo sapien
gagcagaggtaggagaccccagccc

SEQ ID NO: 4939808 - DNA, 25 bp, Homo sapien
gggacaaggccttctccactcagtc

SEQ ID NO: 4939809 - DNA, 25 bp, Homo sapien
tggagaggcacccagggcagccgag

SEQ ID NO: 4939810 - DNA, 25 bp, Homo sapien
agccgaggctcagcagggacaaggc

SEQ ID NO: 4939811 - DNA, 25 bp, Homo sapien
taggcaggtagagcctgtgggacac

SEQ ID NO: 4939812 - DNA, 25 bp, Homo sapien
taactaggtaggatgtaggcaggta

SEQ ID NO: 4939813 - DNA, 25 bp, Homo sapien
gggcctgaggggcaccattcagctg

SEQ ID NO: 4939814 - DNA, 25 bp, Homo sapien
ccagcaccaggtctccactgttgct

SEQ ID NO: 4939815 - DNA, 25 bp, Homo sapien
cttgctcactctgtcctcaccacac

SEQ ID NO: 4939816 - DNA, 25 bp, Homo sapien
ttgctcactctgtcctcaccacaca

SEQ ID NO: 4939817 - DNA, 25 bp, Homo sapien
tgctcactctgtcctcaccacacac

SEQ ID NO: 4939818 - DNA, 25 bp, Homo sapien
acctgggtctgccccccaaggtgag

SEQ ID NO: 4939819 - DNA, 25 bp, Homo sapien
agcctgtatccctggctgggggaac

SEQ ID NO: 4939820 - DNA, 25 bp, Homo sapien
ctgaataggggaaggagcctgtatc

SEQ ID NO: 4939821 - DNA, 25 bp, Homo sapien
gtctgccccccaaggtgagcaaggg

SEQ ID NO: 4939822 - DNA, 25 bp, Homo sapien
agcctctgcagttgggcggaagtca

SEQ ID NO: 4939823 - DNA, 25 bp, Homo sapien
agcggagggtcgtccaccacgtctg

SEQ ID NO: 4939824 - DNA, 25 bp, Homo sapien
cacgtctggggccttccggcacatc

SEQ ID NO: 4939825 - DNA, 25 bp, Homo sapien
tcctggctcatcagtggcagcggag

SEQ ID NO: 4939826 - DNA, 25 bp, Homo sapien
cttgtatcaactccagagggcccca

SEQ ID NO: 4939827 - DNA, 25 bp, Homo sapien
cccaaacgggtgtgccagggctcag

SEQ ID NO: 4939828 - DNA, 25 bp, Homo sapien
ctcaggcaggcttgtatcaactcca

SEQ ID NO: 4939829 - DNA, 25 bp, Homo sapien
gctgggtggcatgccagtgggctgg

SEQ ID NO: 4939830 - DNA, 25 bp, Homo sapien
gccctccgacgatggatgagagaca

SEQ ID NO: 4939831 - DNA, 25 bp, Homo sapien
tgagatgttgccctccgacgatgga

SEQ ID NO: 4939832 - DNA, 25 bp, Homo sapien
caggtgctgagatgttgccctccga

SEQ ID NO: 4939833 - DNA, 25 bp, Homo sapien
tgttgccctccgacgatggatgaga

SEQ ID NO: 4939834 - DNA, 25 bp, Homo sapien
cccgggcaaccatggggatcccagg

SEQ ID NO: 4939835 - DNA, 25 bp, Homo sapien
tgagtcagggttcagggatcagcct

SEQ ID NO: 4939836 - DNA, 25 bp, Homo sapien
gctcttccttgagccttgctatgtg

SEQ ID NO: 4939837 - DNA, 25 bp, Homo sapien
ggttcagggatcagcctgctcttcc

SEQ ID NO: 4939838 - DNA, 25 bp, Homo sapien
cagacggaggtaattgtcaaagcct

SEQ ID NO: 4939839 - DNA, 25 bp, Homo sapien
aactgctgaaggtctcggtcccggg

SEQ ID NO: 4939840 - DNA, 25 bp, Homo sapien
tcccgggccactatggcgtccaagt

SEQ ID NO: 4939841 - DNA, 25 bp, Homo sapien
caggccagagccgtagatcagacgg

SEQ ID NO: 4939842 - DNA, 25 bp, Homo sapien
tggggacagggctgttggcactgtt

SEQ ID NO: 4939843 - DNA, 25 bp, Homo sapien
agcttggggtacagcacacacatcc

SEQ ID NO: 4939844 - DNA, 25 bp, Homo sapien
gacctcagcccgggcaagacagtgg

SEQ ID NO: 4939845 - DNA, 25 bp, Homo sapien
tgagggtcccggcactccactgctg

SEQ ID NO: 4939846 - DNA, 25 bp, Homo sapien
cggggagactgggagaagtgctggc

SEQ ID NO: 4939847 - DNA, 25 bp, Homo sapien
ctcggggagactgggagaagtgctg

SEQ ID NO: 4939848 - DNA, 25 bp, Homo sapien
gggagactgggagaagtgctggccc

SEQ ID NO: 4939849 - DNA, 25 bp, Homo sapien
ggagactgggagaagtgctggccca

SEQ ID NO: 4939850 - DNA, 25 bp, Homo sapien
gatgccttgctgtgcaccctacggt

SEQ ID NO: 4939851 - DNA, 25 bp, Homo sapien
ccttgctgtgcaccctacggtgggt

SEQ ID NO: 4939852 - DNA, 25 bp, Homo sapien
tgccttgctgtgcaccctacggtgg

SEQ ID NO: 4939853 - DNA, 25 bp, Homo sapien
tgcaccctacggtgggtgggtggga

SEQ ID NO: 4939854 - DNA, 25 bp, Homo sapien
cagactgatgcccaggtagtggctc

SEQ ID NO: 4939855 - DNA, 25 bp, Homo sapien
tgatgcccaggtagtggctcagtga

SEQ ID NO: 4939856 - DNA, 25 bp, Homo sapien
gctgcagatccagactgatgcccag

SEQ ID NO: 4939857 - DNA, 25 bp, Homo sapien
gatccagactgatgcccaggtagtg

SEQ ID NO: 4939858 - DNA, 25 bp, Homo sapien
ggctagagagaggttccttgtccca

SEQ ID NO: 4939859 - DNA, 25 bp, Homo sapien
aggctagagagaggttccttgtccc

SEQ ID NO: 4939860 - DNA, 25 bp, Homo sapien
ctgaggctagagagaggttccttgt

SEQ ID NO: 4939861 - DNA, 25 bp, Homo sapien
gaggctagagagaggttccttgtcc

SEQ ID NO: 4939862 - DNA, 25 bp, Homo sapien
ggagaggagtggctctccaggagct

SEQ ID NO: 4939863 - DNA, 25 bp, Homo sapien
cccttgggtcagatttggacacaaa

SEQ ID NO: 4939864 - DNA, 25 bp, Homo sapien
gggagatggcaggcacaagagtgat

SEQ ID NO: 4939865 - DNA, 25 bp, Homo sapien
tggacacaaagatttgtagcaaagg

SEQ ID NO: 4939866 - DNA, 25 bp, Homo sapien
ggctttgcctgatgtcagctcccag

SEQ ID NO: 4939867 - DNA, 25 bp, Homo sapien
caaacacagctgtactggaacaggg

SEQ ID NO: 4939868 - DNA, 25 bp, Homo sapien
gaaaggggtgtgtggcataaccggc

SEQ ID NO: 4939869 - DNA, 25 bp, Homo sapien
gcagcaaggagcctgtggccacaaa

SEQ ID NO: 4939870 - DNA, 25 bp, Homo sapien
aaagagtcaattacccacctgggca

SEQ ID NO: 4939871 - DNA, 25 bp, Homo sapien
agagctggctgagctagcaacccct

SEQ ID NO: 4939872 - DNA, 25 bp, Homo sapien
tctgacaaacgagaagggaaacctg

SEQ ID NO: 4939873 - DNA, 25 bp, Homo sapien
cagtggattctaaagggccaggttc

SEQ ID NO: 4939874 - DNA, 25 bp, Homo sapien
tagccacatctgctgtagcaccgcg

SEQ ID NO: 4939875 - DNA, 25 bp, Homo sapien
atctgctgtagcaccgcggagttgg

SEQ ID NO: 4939876 - DNA, 25 bp, Homo sapien
agttgggcacatagccggggaagca

SEQ ID NO: 4939877 - DNA, 25 bp, Homo sapien
gcatttagccacatctgctgtagca

SEQ ID NO: 4939878 - DNA, 25 bp, Homo sapien
ctttctctgggaggcgagctgagtc

SEQ ID NO: 4939879 - DNA, 25 bp, Homo sapien
gccccttgcctcgagctttctctgg

SEQ ID NO: 4939880 - DNA, 25 bp, Homo sapien
gatggtgcctgatgggttgcaagga

SEQ ID NO: 4939881 - DNA, 25 bp, Homo sapien
tgcagaggggcaagagatggtgcct

SEQ ID NO: 4939882 - DNA, 25 bp, Homo sapien
agctgctggttggagtgcgggctca

SEQ ID NO: 4939883 - DNA, 25 bp, Homo sapien
ggtttgggatggcctggggcgccac

SEQ ID NO: 4939884 - DNA, 25 bp, Homo sapien
gctgctggttggagtgcgggctcag

SEQ ID NO: 4939885 - DNA, 25 bp, Homo sapien
ctgctggttggagtgcgggctcagg

SEQ ID NO: 4939886 - DNA, 25 bp, Homo sapien
ctcccatgacggtgccagggatgag

SEQ ID NO: 4939887 - DNA, 25 bp, Homo sapien
ggtgggtcctggcaaccttgcagct

SEQ ID NO: 4939888 - DNA, 25 bp, Homo sapien
agagcaaactcccatgacggtgcca

SEQ ID NO: 4939889 - DNA, 25 bp, Homo sapien
gatgcccgtaatgctcatccaagag

SEQ ID NO: 4939890 - DNA, 25 bp, Homo sapien
ctgaagatggggaacaactttttga

SEQ ID NO: 4939891 - DNA, 25 bp, Homo sapien
tgaagatggggaacaactttttgaa

SEQ ID NO: 4939892 - DNA, 25 bp, Homo sapien
gctgaagatggggaacaactttttg

SEQ ID NO: 4939893 - DNA, 25 bp, Homo sapien
ggccctgctcccatgtcacacccaa

SEQ ID NO: 4939894 - DNA, 25 bp, Homo sapien
cagggtagcatgctgaggccctgct

SEQ ID NO: 4939895 - DNA, 25 bp, Homo sapien
gtccctcaccctaacccatgcttct

SEQ ID NO: 4939896 - DNA, 25 bp, Homo sapien
ccctgtccctcaccctaacccatgc

SEQ ID NO: 4939897 - DNA, 25 bp, Homo sapien
agctggccttggagatcactgctca

SEQ ID NO: 4939898 - DNA, 25 bp, Homo sapien
tgttgggcagcagtctcagtagcac

SEQ ID NO: 4939899 - DNA, 25 bp, Homo sapien
ttgagcaagtgtacgagcaggccct

SEQ ID NO: 4939900 - DNA, 25 bp, Homo sapien
acctgcaggatgtgcacacggtcga

SEQ ID NO: 4939901 - DNA, 25 bp, Homo sapien
aggcaggcggtggggatgtggttgc

SEQ ID NO: 4939902 - DNA, 25 bp, Homo sapien
gggatgtggttgctgagggccggtg

SEQ ID NO: 4939903 - DNA, 25 bp, Homo sapien
gatgtggttgctgagggccggtggg

SEQ ID NO: 4939904 - DNA, 25 bp, Homo sapien
tgtggttgctgagggccggtgggcg

SEQ ID NO: 4939905 - DNA, 25 bp, Homo sapien
ggacatgagctccagcaccacatcc

SEQ ID NO: 4939906 - DNA, 25 bp, Homo sapien
cagctgcagcgccagtatcacgaac

SEQ ID NO: 4939907 - DNA, 25 bp, Homo sapien
gcagcgccagtatcacgaacttctt

SEQ ID NO: 4939908 - DNA, 25 bp, Homo sapien
gccagtatcacgaacttcttctgtg

SEQ ID NO: 4939909 - DNA, 25 bp, Homo sapien
gtcctgaaggcccagcccgtgcagc

SEQ ID NO: 4939910 - DNA, 25 bp, Homo sapien
atctccttgaataggaagccctctg

SEQ ID NO: 4939911 - DNA, 25 bp, Homo sapien
tggtggcagcaagtgcgcaggccgg

SEQ ID NO: 4939912 - DNA, 25 bp, Homo sapien
ctgaagctcctggatcatgtcctcc

SEQ ID NO: 4939913 - DNA, 25 bp, Homo sapien
ctggatcatgtcctccagtttctgg

SEQ ID NO: 4939914 - DNA, 25 bp, Homo sapien
ccagtttctggtggcagcaagtgcg

SEQ ID NO: 4939915 - DNA, 25 bp, Homo sapien
cacagaagaagttgagcgcgtcgat

SEQ ID NO: 4939916 - DNA, 25 bp, Homo sapien
tcggagagcactctgagacggagct

SEQ ID NO: 4939917 - DNA, 25 bp, Homo sapien
ttctcctggagcgaactccgctgct

SEQ ID NO: 4939918 - DNA, 25 bp, Homo sapien
cagaagctcttcagcgtctcggaga

SEQ ID NO: 4939919 - DNA, 25 bp, Homo sapien
ccctcagtctcatcgcggacctcgc

SEQ ID NO: 4939920 - DNA, 25 bp, Homo sapien
tcagtctcatcgcggacctcgcgga

SEQ ID NO: 4939921 - DNA, 25 bp, Homo sapien
tcatcgcggacctcgcggacctctg

SEQ ID NO: 4939922 - DNA, 25 bp, Homo sapien
gacctcgcggacctctgcggcttgg

SEQ ID NO: 4939923 - DNA, 25 bp, Homo sapien
ggcccgcacagagccgggaccgcat

SEQ ID NO: 4939924 - DNA, 25 bp, Homo sapien
cttcagcgtccggatggggccgtcc

SEQ ID NO: 4939925 - DNA, 25 bp, Homo sapien
ttcagcgtccggatggggccgtcca

SEQ ID NO: 4939926 - DNA, 25 bp, Homo sapien
gggccgtccagggtgcggcccgcac

SEQ ID NO: 4939927 - DNA, 25 bp, Homo sapien
gcgcgggggcataggccagtccagg

SEQ ID NO: 4939928 - DNA, 25 bp, Homo sapien
gcgtccgctggcagaaagtagcgct

SEQ ID NO: 4939929 - DNA, 25 bp, Homo sapien
tcagctgtaggtgtcagggtccgcg

SEQ ID NO: 4939930 - DNA, 25 bp, Homo sapien
tcagggtccgcgtccgctggcagaa

SEQ ID NO: 4939931 - DNA, 25 bp, Homo sapien
ctctggactttattcccgatgcagg

SEQ ID NO: 4939932 - DNA, 25 bp, Homo sapien
ctttattcccgatgcaggccttggc

SEQ ID NO: 4939933 - DNA, 25 bp, Homo sapien
gactttattcccgatgcaggccttg

SEQ ID NO: 4939934 - DNA, 25 bp, Homo sapien
aattctctggactttattcccgatg

SEQ ID NO: 4939935 - DNA, 25 bp, Homo sapien
tgcgttgccgctcagaaaaaagctc

SEQ ID NO: 4939936 - DNA, 25 bp, Homo sapien
taacaagagccaccgcacagtttgg

SEQ ID NO: 4939937 - DNA, 25 bp, Homo sapien
ggagaagcgattctaaccagagcca

SEQ ID NO: 4939938 - DNA, 25 bp, Homo sapien
tgctcagacaacacaaaagacaggt

SEQ ID NO: 4939939 - DNA, 25 bp, Homo sapien
tggccttctgcagtgggaggatgcg

SEQ ID NO: 4939940 - DNA, 25 bp, Homo sapien
ttctgcagtgggaggatgcggtagt

SEQ ID NO: 4939941 - DNA, 25 bp, Homo sapien
ctgcagtgggaggatgcggtagtgc

SEQ ID NO: 4939942 - DNA, 25 bp, Homo sapien
ccttctgcagtgggaggatgcggta

SEQ ID NO: 4939943 - DNA, 25 bp, Homo sapien
tcaagtcctctagtgacagactcag

SEQ ID NO: 4939944 - DNA, 25 bp, Homo sapien
tcagaggcaagactcagacaacagc

SEQ ID NO: 4939945 - DNA, 25 bp, Homo sapien
ccaaaaatcagagggccttggccac

SEQ ID NO: 4939946 - DNA, 25 bp, Homo sapien
gggccttgacatcgctagacactga

SEQ ID NO: 4939947 - DNA, 25 bp, Homo sapien
gcaattgtgtgatctcggctcactg

SEQ ID NO: 4939948 - DNA, 25 bp, Homo sapien
cacctaggctggagggcaattgtgt

SEQ ID NO: 4939949 - DNA, 25 bp, Homo sapien
gacatggtcttgctcttgtcaccta

SEQ ID NO: 4939950 - DNA, 25 bp, Homo sapien
tcacctaggctggagggcaattgtg

SEQ ID NO: 4939951 - DNA, 25 bp, Homo sapien
aacagaaataggaaccagcaaggga

SEQ ID NO: 4939952 - DNA, 25 bp, Homo sapien
gaggccaacttatcacggcaggcat

SEQ ID NO: 4939953 - DNA, 25 bp, Homo sapien
tggcgcagagcagtgttccagagct

SEQ ID NO: 4939954 - DNA, 25 bp, Homo sapien
tcaagaacttgattacacaggtgac

SEQ ID NO: 4939955 - DNA, 25 bp, Homo sapien
gagaatattcctccaccgagggccg

SEQ ID NO: 4939956 - DNA, 25 bp, Homo sapien
ccgcgggccgtcagggagaatattc

SEQ ID NO: 4939957 - DNA, 25 bp, Homo sapien
gctggtagaatattccccgccgagg

SEQ ID NO: 4939958 - DNA, 25 bp, Homo sapien
ggtagaatattcctgcagtgcgggc

SEQ ID NO: 4939959 - DNA, 25 bp, Homo sapien
gccacccgaccggtgccagcggtcc

SEQ ID NO: 4939960 - DNA, 25 bp, Homo sapien
tgctgccacccgaccggtgccagcg

SEQ ID NO: 4939961 - DNA, 25 bp, Homo sapien
ccgaccggtgccagcggtccgctta

SEQ ID NO: 4939962 - DNA, 25 bp, Homo sapien
ctgctgccacccgaccggtgccagc

SEQ ID NO: 4939963 - DNA, 25 bp, Homo sapien
gccagcgccagccccggcctccccc

SEQ ID NO: 4939964 - DNA, 25 bp, Homo sapien
gcgccagcgccagccccggcctccc

SEQ ID NO: 4939965 - DNA, 25 bp, Homo sapien
ctcccgaggcgccagcgccagcccc

SEQ ID NO: 4939966 - DNA, 25 bp, Homo sapien
cagcgccagccccggcctcccccat

SEQ ID NO: 4939967 - DNA, 25 bp, Homo sapien
ccgcctgcaggtccgcccgcgcgcc

SEQ ID NO: 4939968 - DNA, 25 bp, Homo sapien
gccgcctgcaggtccgcccgcgcgc

SEQ ID NO: 4939969 - DNA, 25 bp, Homo sapien
ctgccccgccaacagcgcgcggccg

SEQ ID NO: 4939970 - DNA, 25 bp, Homo sapien
ggtccgcagccagtcagcgccagca

SEQ ID NO: 4939971 - DNA, 25 bp, Homo sapien
gggtcggccgccagcaatgtctcgt

SEQ ID NO: 4939972 - DNA, 25 bp, Homo sapien
gccagcaatgtctcgtgcaggccgg

SEQ ID NO: 4939973 - DNA, 25 bp, Homo sapien
aacgcgcggcccatcaggcgcgctg

SEQ ID NO: 4939974 - DNA, 25 bp, Homo sapien
tcggcggccaagttcacgagcgcgc

SEQ ID NO: 4939975 - DNA, 25 bp, Homo sapien
atgagcgctgcacacggcgccggct

SEQ ID NO: 4939976 - DNA, 25 bp, Homo sapien
gactgaggttggctagcgcggcggc

SEQ ID NO: 4939977 - DNA, 25 bp, Homo sapien
cgccatgagcgctgcacacggcgcc

SEQ ID NO: 4939978 - DNA, 25 bp, Homo sapien
acggcgccggctcgcgactgaggtt

SEQ ID NO: 4939979 - DNA, 25 bp, Homo sapien
caggggcgcgcgggcgttgtagccg

SEQ ID NO: 4939980 - DNA, 25 bp, Homo sapien
ccgggcgtgcacagcgcgcgcacca

SEQ ID NO: 4939981 - DNA, 25 bp, Homo sapien
aggggcgcgcgggcgttgtagccgg

SEQ ID NO: 4939982 - DNA, 25 bp, Homo sapien
cacagcgcgcgcaccagccgctcca

SEQ ID NO: 4939983 - DNA, 25 bp, Homo sapien
gcgccgcagggcgttggctgaggtt

SEQ ID NO: 4939984 - DNA, 25 bp, Homo sapien
gccgcagggcgttggctgaggttgg

SEQ ID NO: 4939985 - DNA, 25 bp, Homo sapien
cccgcgccgcagggcgttggctgag

SEQ ID NO: 4939986 - DNA, 25 bp, Homo sapien
ccgcgccgcagggcgttggctgagg

SEQ ID NO: 4939987 - DNA, 25 bp, Homo sapien
ctcgaagcagcaattccgcagcgtc

SEQ ID NO: 4939988 - DNA, 25 bp, Homo sapien
ccgcccctgcgtacagaggagtcgg

SEQ ID NO: 4939989 - DNA, 25 bp, Homo sapien
caccccgcccctgcgtacagaggag

SEQ ID NO: 4939990 - DNA, 25 bp, Homo sapien
gtgctcgaagcagcaattccgcagc

SEQ ID NO: 4939991 - DNA, 25 bp, Homo sapien
acctcaggtccaagcaaccactcgt

SEQ ID NO: 4939992 - DNA, 25 bp, Homo sapien
aaaaggggagaatgtccacctcagg

SEQ ID NO: 4939993 - DNA, 25 bp, Homo sapien
caggtccaagcaaccactcgtgatg

SEQ ID NO: 4939994 - DNA, 25 bp, Homo sapien
ggtccaagcaaccactcgtgatgtc

SEQ ID NO: 4939995 - DNA, 25 bp, Homo sapien
aactcactgctgcaaagtttcagga

SEQ ID NO: 4939996 - DNA, 25 bp, Homo sapien
ctgctgcaaagtttcaggagcctgt

SEQ ID NO: 4939997 - DNA, 25 bp, Homo sapien
acctgtgctcagcaactcactgctg

SEQ ID NO: 4939998 - DNA, 25 bp, Homo sapien
tgctcagcaactcactgctgcaaag

SEQ ID NO: 4939999 - DNA, 25 bp, Homo sapien
tcaacaagcatcttgcggatgtctg

SEQ ID NO: 4940000 - DNA, 25 bp, Homo sapien
tgcatcaggttctcgctgcttgtct

SEQ ID NO: 4940001 - DNA, 25 bp, Homo sapien
agcatcttgcggatgtctgcatcag

SEQ ID NO: 4940002 - DNA, 25 bp, Homo sapien
atgatggcttcaacaagcatcttgc

SEQ ID NO: 4940003 - DNA, 25 bp, Homo sapien
cagctgtgcagctctcgaaggatca

SEQ ID NO: 4940004 - DNA, 25 bp, Homo sapien
tctcgaaggatcaggtaggctccct

SEQ ID NO: 4940005 - DNA, 25 bp, Homo sapien
ctggatgagcttctcacaagccgtc

SEQ ID NO: 4940006 - DNA, 25 bp, Homo sapien
gatgagcttctcacaagccgtccgc

SEQ ID NO: 4940007 - DNA, 25 bp, Homo sapien
agcaggttttccatgccacgttcag

SEQ ID NO: 4940008 - DNA, 25 bp, Homo sapien
cacgttcaggctcgtccccaataag

SEQ ID NO: 4940009 - DNA, 25 bp, Homo sapien
tttccatgccacgttcaggctcgtc

SEQ ID NO: 4940010 - DNA, 25 bp, Homo sapien
gttcaggctcgtccccaataagcac

SEQ ID NO: 4940011 - DNA, 25 bp, Homo sapien
tgctggtagcaacactgcacagggc

SEQ ID NO: 4940012 - DNA, 25 bp, Homo sapien
tactggagcctaagcgtagctctgc

SEQ ID NO: 4940013 - DNA, 25 bp, Homo sapien
cagggactaggctgcaggcacatct

SEQ ID NO: 4940014 - DNA, 25 bp, Homo sapien
tcaggatcccaatgcaagaggtggc

SEQ ID NO: 4940015 - DNA, 25 bp, Homo sapien
agtgctaagagggcaactggcctcc

SEQ ID NO: 4940016 - DNA, 25 bp, Homo sapien
ctgagtgctaagagggcaactggcc

SEQ ID NO: 4940017 - DNA, 25 bp, Homo sapien
gtgctaagagggcaactggcctcca

SEQ ID NO: 4940018 - DNA, 25 bp, Homo sapien
tgagtgctaagagggcaactggcct

SEQ ID NO: 4940019 - DNA, 25 bp, Homo sapien
tgagatcccagatgtgaactgcccc

SEQ ID NO: 4940020 - DNA, 25 bp, Homo sapien
ccacagatcttggtggagaccccaa

SEQ ID NO: 4940021 - DNA, 25 bp, Homo sapien
caagaagacgcaccctttgagggca

SEQ ID NO: 4940022 - DNA, 25 bp, Homo sapien
tctcaagaagctcgtggtccaaaag

SEQ ID NO: 4940023 - DNA, 25 bp, Homo sapien
ggggcgccgccttcccgcccagcag

SEQ ID NO: 4940024 - DNA, 25 bp, Homo sapien
cggggcgccgccttcccgcccagca

SEQ ID NO: 4940025 - DNA, 25 bp, Homo sapien
agccgccgccacctcggccggggcg

SEQ ID NO: 4940026 - DNA, 25 bp, Homo sapien
cgccacctcggccggggcgccgcct

SEQ ID NO: 4940027 - DNA, 25 bp, Homo sapien
tgctcgcgatcgtcagagaatacgg

SEQ ID NO: 4940028 - DNA, 25 bp, Homo sapien
cttcctgctcgcgatcgtcagagaa

SEQ ID NO: 4940029 - DNA, 25 bp, Homo sapien
cgcgatcgtcagagaatacggaagg

SEQ ID NO: 4940030 - DNA, 25 bp, Homo sapien
tcctgctcgcgatcgtcagagaata

SEQ ID NO: 4940031 - DNA, 25 bp, Homo sapien
tgtcccttccccaactgagcaggca

SEQ ID NO: 4940032 - DNA, 25 bp, Homo sapien
ccttccccaactgagcaggcaaagg

SEQ ID NO: 4940033 - DNA, 25 bp, Homo sapien
cttgagtttatgagtctgtcccttc

SEQ ID NO: 4940034 - DNA, 25 bp, Homo sapien
ctcactgcacttgagtttatgagtc

SEQ ID NO: 4940035 - DNA, 25 bp, Homo sapien
agctggcggctgacaagaaaacagg

SEQ ID NO: 4940036 - DNA, 25 bp, Homo sapien
cagctggcggctgacaagaaaacag

SEQ ID NO: 4940037 - DNA, 25 bp, Homo sapien
cctcagctggcggctgacaagaaaa

SEQ ID NO: 4940038 - DNA, 25 bp, Homo sapien
tcagctggcggctgacaagaaaaca

SEQ ID NO: 4940039 - DNA, 25 bp, Homo sapien
ctgtggtttcagcttccttcaccca

SEQ ID NO: 4940040 - DNA, 25 bp, Homo sapien
tcttcatggaggactcagtcatgtc

SEQ ID NO: 4940041 - DNA, 25 bp, Homo sapien
ggaggactcagtcatgtctgtggtt

SEQ ID NO: 4940042 - DNA, 25 bp, Homo sapien
ccttcacccagtgtgaacatggaca

SEQ ID NO: 4940043 - DNA, 25 bp, Homo sapien
gaggcctcacacccggccactccca

SEQ ID NO: 4940044 - DNA, 25 bp, Homo sapien
ccactcccaatccccatgcactcac

SEQ ID NO: 4940045 - DNA, 25 bp, Homo sapien
ggcctcacacccggccactcccaat

SEQ ID NO: 4940046 - DNA, 25 bp, Homo sapien
cggccactcccaatccccatgcact

SEQ ID NO: 4940047 - DNA, 25 bp, Homo sapien
gctccccgagggtctatgcccaggc

SEQ ID NO: 4940048 - DNA, 25 bp, Homo sapien
ctccccgagggtctatgcccaggca

SEQ ID NO: 4940049 - DNA, 25 bp, Homo sapien
cttatcggtgatggcgtccagcagg

SEQ ID NO: 4940050 - DNA, 25 bp, Homo sapien
gggtccttatcggtgatggcgtcca

SEQ ID NO: 4940051 - DNA, 25 bp, Homo sapien
gcagatactcctcgcaggcacggag

SEQ ID NO: 4940052 - DNA, 25 bp, Homo sapien
cgcagatactcctcgcaggcacgga

SEQ ID NO: 4940053 - DNA, 25 bp, Homo sapien
cacggccggtatagtgcaggaactg

SEQ ID NO: 4940054 - DNA, 25 bp, Homo sapien
cagctcaggtgtagcagggcattta

SEQ ID NO: 4940055 - DNA, 25 bp, Homo sapien
tcccaggtaggagacaatgtagtcc

SEQ ID NO: 4940056 - DNA, 25 bp, Homo sapien
ggcatttatacccatccgaccggac

SEQ ID NO: 4940057 - DNA, 25 bp, Homo sapien
gagaaacaatagtaggaaggattgg

SEQ ID NO: 4940058 - DNA, 25 bp, Homo sapien
agtgctaccggctcagtgaagacag

SEQ ID NO: 4940059 - DNA, 25 bp, Homo sapien
actctgacagctatggccgccacgg

SEQ ID NO: 4940060 - DNA, 25 bp, Homo sapien
caaggtcgtttggaggagaaacaat

SEQ ID NO: 4940061 - DNA, 25 bp, Homo sapien
ggcgcgactgctcaggaccctctcc

SEQ ID NO: 4940062 - DNA, 25 bp, Homo sapien
ggccctcaggaccgctgctcggtat

SEQ ID NO: 4940063 - DNA, 25 bp, Homo sapien
accgctgctcggtatgggtgtgcca

SEQ ID NO: 4940064 - DNA, 25 bp, Homo sapien
cttcgtcttggtcatctcgctggag

SEQ ID NO: 4940065 - DNA, 25 bp, Homo sapien
caccttgctgatgaactgtcttccc

SEQ ID NO: 4940066 - DNA, 25 bp, Homo sapien
accaggacgccactcgccgcctgct

SEQ ID NO: 4940067 - DNA, 25 bp, Homo sapien
ggctggcgagggtgtgcagcacggc

SEQ ID NO: 4940068 - DNA, 25 bp, Homo sapien
gggtgtgcagcacggcgcagtgtgg

SEQ ID NO: 4940069 - DNA, 25 bp, Homo sapien
gatggcaggaaggggactacgccga

SEQ ID NO: 4940070 - DNA, 25 bp, Homo sapien
tggcaggaaggggactacgccgaac

SEQ ID NO: 4940071 - DNA, 25 bp, Homo sapien
atggcaggaaggggactacgccgaa

SEQ ID NO: 4940072 - DNA, 25 bp, Homo sapien
tcccacacgaggaggtcccatggaa

SEQ ID NO: 4940073 - DNA, 25 bp, Homo sapien
cagggaacgttccatttgtggtggg

SEQ ID NO: 4940074 - DNA, 25 bp, Homo sapien
aatcttcgctggctgaacccatgtg

SEQ ID NO: 4940075 - DNA, 25 bp, Homo sapien
ggtggggagcacacgtcccacacga

SEQ ID NO: 4940076 - DNA, 25 bp, Homo sapien
cagaagctcaccagaatctgtgatg

SEQ ID NO: 4940077 - DNA, 25 bp, Homo sapien
aacccaatggttgactcaggccctg

SEQ ID NO: 4940078 - DNA, 25 bp, Homo sapien
tgatcgattcacagaggagctggca

SEQ ID NO: 4940079 - DNA, 25 bp, Homo sapien
tgcgggactctcatcagaagctcac

SEQ ID NO: 4940080 - DNA, 25 bp, Homo sapien
cgtccccttcatggggccactggcc

SEQ ID NO: 4940081 - DNA, 25 bp, Homo sapien
ctgtacccctcgtccccttcatggg

SEQ ID NO: 4940082 - DNA, 25 bp, Homo sapien
ctcgtccccttcatggggccactgg

SEQ ID NO: 4940083 - DNA, 25 bp, Homo sapien
tccccttcatggggccactggccac

SEQ ID NO: 4940084 - DNA, 25 bp, Homo sapien
ctggctcccgtgtagccatcggtcc

SEQ ID NO: 4940085 - DNA, 25 bp, Homo sapien
ccatcggtccccataaagcctccct

SEQ ID NO: 4940086 - DNA, 25 bp, Homo sapien
agccatcggtccccataaagcctcc

SEQ ID NO: 4940087 - DNA, 25 bp, Homo sapien
ggctcccgtgtagccatcggtcccc

SEQ ID NO: 4940088 - DNA, 25 bp, Homo sapien
ctacaaaaccggccagtggtaagtg

SEQ ID NO: 4940089 - DNA, 25 bp, Homo sapien
catcgtaggcgctgaagatgtcggt

SEQ ID NO: 4940090 - DNA, 25 bp, Homo sapien
tggcttctcgactctgcagccactg

SEQ ID NO: 4940091 - DNA, 25 bp, Homo sapien
agatgtcggtggcaaaggcgtcctt

SEQ ID NO: 4940092 - DNA, 25 bp, Homo sapien
caggttggctaggtactccagggca

SEQ ID NO: 4940093 - DNA, 25 bp, Homo sapien
gacaagtagaaggtctctgcgtgct

SEQ ID NO: 4940094 - DNA, 25 bp, Homo sapien
gcttcttgtagagggcgagaatccc

SEQ ID NO: 4940095 - DNA, 25 bp, Homo sapien
ctctgcgtgcttcttgtagagggcg

SEQ ID NO: 4940096 - DNA, 25 bp, Homo sapien
caagtagaaggtctctgcgtgcttc

SEQ ID NO: 4940097 - DNA, 25 bp, Homo sapien
gccgcccgaactgactaaggtcaat

SEQ ID NO: 4940098 - DNA, 25 bp, Homo sapien
gcccgaactgactaaggtcaatcag

SEQ ID NO: 4940099 - DNA, 25 bp, Homo sapien
tccagccgcccgaactgactaaggt

SEQ ID NO: 4940100 - DNA, 25 bp, Homo sapien
cgaactgactaaggtcaatcagagc

SEQ ID NO: 4940101 - DNA, 25 bp, Homo sapien
agggagaagaggccgtcagtcctac

SEQ ID NO: 4940102 - DNA, 25 bp, Homo sapien
gtagggagaagaggccgtcagtcct

SEQ ID NO: 4940103 - DNA, 25 bp, Homo sapien
ggtagggagaagaggccgtcagtcc

SEQ ID NO: 4940104 - DNA, 25 bp, Homo sapien
tagggagaagaggccgtcagtccta

SEQ ID NO: 4940105 - DNA, 25 bp, Homo sapien
ctgcctcgaggatctggcccaggct

SEQ ID NO: 4940106 - DNA, 25 bp, Homo sapien
agtgcagccaagagggcatccagct

SEQ ID NO: 4940107 - DNA, 25 bp, Homo sapien
ctgggtctccagtgtgcggctgccc

SEQ ID NO: 4940108 - DNA, 25 bp, Homo sapien
ctcacagctgcctcgaggatctggc

SEQ ID NO: 4940109 - DNA, 25 bp, Homo sapien
catcgctaagaagtcacccgagtga

SEQ ID NO: 4940110 - DNA, 25 bp, Homo sapien
tgaccttcagggaatgcccagtcct

SEQ ID NO: 4940111 - DNA, 25 bp, Homo sapien
gctgctatgtcacctgcatgtgcca

SEQ ID NO: 4940112 - DNA, 25 bp, Homo sapien
gggcaagagcatcgccacatcgcta

SEQ ID NO: 4940113 - DNA, 25 bp, Homo sapien
ctgtactcagctacattttttctgt

SEQ ID NO: 4940114 - DNA, 25 bp, Homo sapien
gagccaccacgccttgcaggaactt

SEQ ID NO: 4940115 - DNA, 25 bp, Homo sapien
gattacagatctgtgccactgtact

SEQ ID NO: 4940116 - DNA, 25 bp, Homo sapien
gccactgtactcagctacatttttt

SEQ ID NO: 4940117 - DNA, 25 bp, Homo sapien
taggtccccactcgcaggtgtcaca

SEQ ID NO: 4940118 - DNA, 25 bp, Homo sapien
tgtcagaaatcactgcgaggtggag

SEQ ID NO: 4940119 - DNA, 25 bp, Homo sapien
tcaggtgtgacatcctaggtcccca

SEQ ID NO: 4940120 - DNA, 25 bp, Homo sapien
cagagccctcttatgagccagaaga

SEQ ID NO: 4940121 - DNA, 25 bp, Homo sapien
tccttctggttactcatcaccaggg

SEQ ID NO: 4940122 - DNA, 25 bp, Homo sapien
cttctggttactcatcaccaggggg

SEQ ID NO: 4940123 - DNA, 25 bp, Homo sapien
cagcacctccttctggttactcatc

SEQ ID NO: 4940124 - DNA, 25 bp, Homo sapien
agcacagtgaagcagcgcagcacct

SEQ ID NO: 4940125 - DNA, 25 bp, Homo sapien
ctccaggatggctatgagggcctgt

SEQ ID NO: 4940126 - DNA, 25 bp, Homo sapien
cctccaggatggctatgagggcctg

SEQ ID NO: 4940127 - DNA, 25 bp, Homo sapien
gtgacaggatgcatggcacctccag

SEQ ID NO: 4940128 - DNA, 25 bp, Homo sapien
tccaggatggctatgagggcctgtg

SEQ ID NO: 4940129 - DNA, 25 bp, Homo sapien
tgcccacgcgggtcctctcattgct

SEQ ID NO: 4940130 - DNA, 25 bp, Homo sapien
ccagtaggcggtcaggcgagctgca

SEQ ID NO: 4940131 - DNA, 25 bp, Homo sapien
agcaggaaggccagtaggcggtcag

SEQ ID NO: 4940132 - DNA, 25 bp, Homo sapien
tgcagggtgcccacgcgggtcctct

SEQ ID NO: 4940133 - DNA, 25 bp, Homo sapien
tagagggacacaatctgccaggacc

SEQ ID NO: 4940134 - DNA, 25 bp, Homo sapien
gatcccagaatgagctagagcagtg

SEQ ID NO: 4940135 - DNA, 25 bp, Homo sapien
tctaattgcgaagaaaccgtcacac

SEQ ID NO: 4940136 - DNA, 25 bp, Homo sapien
ccagctgtcaaagcaagtgtgagcc

SEQ ID NO: 4940137 - DNA, 25 bp, Homo sapien
gcttgagtgcggtttagccatctca

SEQ ID NO: 4940138 - DNA, 25 bp, Homo sapien
ggcttgagtgcggtttagccatctc

SEQ ID NO: 4940139 - DNA, 25 bp, Homo sapien
ttgagtgcggtttagccatctcagc

SEQ ID NO: 4940140 - DNA, 25 bp, Homo sapien
aggcttgagtgcggtttagccatct

SEQ ID NO: 4940141 - DNA, 25 bp, Homo sapien
acaaatggtaattatgggatagtcc

SEQ ID NO: 4940142 - DNA, 25 bp, Homo sapien
taattatgggatagtccaattctat

SEQ ID NO: 4940143 - DNA, 25 bp, Homo sapien
taacgagatcaaacaaatggtaatt

SEQ ID NO: 4940144 - DNA, 25 bp, Homo sapien
ctgtgtaacgagatcaaacaaatgg

SEQ ID NO: 4940145 - DNA, 25 bp, Homo sapien
taacagccgtggtgactcaagcaac

SEQ ID NO: 4940146 - DNA, 25 bp, Homo sapien
tgtaaccagcaaaaccatcaacgat

SEQ ID NO: 4940147 - DNA, 25 bp, Homo sapien
gctttggacaacaagagtggcagag

SEQ ID NO: 4940148 - DNA, 25 bp, Homo sapien
cacggaacctacagagaaagagctt

SEQ ID NO: 4940149 - DNA, 25 bp, Homo sapien
gctaggccctttataaggcagatgg

SEQ ID NO: 4940150 - DNA, 25 bp, Homo sapien
gggtcaacaccaagggctattctga

SEQ ID NO: 4940151 - DNA, 25 bp, Homo sapien
tctgaaaagtgaccctgaagctaag

SEQ ID NO: 4940152 - DNA, 25 bp, Homo sapien
caacatcaggcagccgagtgtggcc

SEQ ID NO: 4940153 - DNA, 25 bp, Homo sapien
ctgttggtgtccaggagaggaagcc

SEQ ID NO: 4940154 - DNA, 25 bp, Homo sapien
ctcatggaagacaggataaagggct

SEQ ID NO: 4940155 - DNA, 25 bp, Homo sapien
ggaagcctcatggaagacaggataa

SEQ ID NO: 4940156 - DNA, 25 bp, Homo sapien
agaggaagcctcatggaagacagga

SEQ ID NO: 4940157 - DNA, 25 bp, Homo sapien
tgggccatggcgctaatcacctgca

SEQ ID NO: 4940158 - DNA, 25 bp, Homo sapien
cacgatgtactcgatcatcgcctca

SEQ ID NO: 4940159 - DNA, 25 bp, Homo sapien
ctccaggtagccgtggtgggccatg

SEQ ID NO: 4940160 - DNA, 25 bp, Homo sapien
ctgcacgatgtactcgatcatcgcc

SEQ ID NO: 4940161 - DNA, 25 bp, Homo sapien
cagcagcatgctagagacttcacca

SEQ ID NO: 4940162 - DNA, 25 bp, Homo sapien
agttcatgcctaacgacccgtggag

SEQ ID NO: 4940163 - DNA, 25 bp, Homo sapien
tagagagaatccatacagttgcctg

SEQ ID NO: 4940164 - DNA, 25 bp, Homo sapien
cagaacaggcatgtgtgcggcttcc

SEQ ID NO: 4940165 - DNA, 25 bp, Homo sapien
gataacgaacagtgaggacatactc

SEQ ID NO: 4940166 - DNA, 25 bp, Homo sapien
aacgaacagtgaggacatactccac

SEQ ID NO: 4940167 - DNA, 25 bp, Homo sapien
cacgaacgttaggacacagactggg

SEQ ID NO: 4940168 - DNA, 25 bp, Homo sapien
caccagaaacacgaacgttaggaca

SEQ ID NO: 4940169 - DNA, 25 bp, Homo sapien
tagagggtgcgcacgctgatggccc

SEQ ID NO: 4940170 - DNA, 25 bp, Homo sapien
gtgactcatcctgtccacggtggtg

SEQ ID NO: 4940171 - DNA, 25 bp, Homo sapien
tcatcctgtccacggtggtgctgac

SEQ ID NO: 4940172 - DNA, 25 bp, Homo sapien
tggtgctgaccaggtagagggtgcg

SEQ ID NO: 4940173 - DNA, 25 bp, Homo sapien
cctcttctgcgccagatgcacgagg

SEQ ID NO: 4940174 - DNA, 25 bp, Homo sapien
gccagatgcacgaggctcctgcaga

SEQ ID NO: 4940175 - DNA, 25 bp, Homo sapien
cgtactggatgaggaaggcgtcggc

SEQ ID NO: 4940176 - DNA, 25 bp, Homo sapien
ctcctgcagagcggagtcagggccc

SEQ ID NO: 4940177 - DNA, 25 bp, Homo sapien
caacagtcttccggttacagcatag

SEQ ID NO: 4940178 - DNA, 25 bp, Homo sapien
agtcttccggttacagcatagggag

SEQ ID NO: 4940179 - DNA, 25 bp, Homo sapien
acagtcttccggttacagcataggg

SEQ ID NO: 4940180 - DNA, 25 bp, Homo sapien
cagtcttccggttacagcataggga

SEQ ID NO: 4940181 - DNA, 25 bp, Homo sapien
cccagcaaagggtgaatgtttgggt

SEQ ID NO: 4940182 - DNA, 25 bp, Homo sapien
gcagcagcgggacagtcgtttccca

SEQ ID NO: 4940183 - DNA, 25 bp, Homo sapien
tttcccaatgctgacccagcaaagg

SEQ ID NO: 4940184 - DNA, 25 bp, Homo sapien
tgcagaacactgaggaggcgcagcg

SEQ ID NO: 4940185 - DNA, 25 bp, Homo sapien
gagtgcctttcaagccccaggtcat

SEQ ID NO: 4940186 - DNA, 25 bp, Homo sapien
ttatacaaccctagtccccattggc

SEQ ID NO: 4940187 - DNA, 25 bp, Homo sapien
cattggccaccctagtgccacttgg

SEQ ID NO: 4940188 - DNA, 25 bp, Homo sapien
gagctagcaccctcctactctgaga

SEQ ID NO: 4940189 - DNA, 25 bp, Homo sapien
cactcctcctgtggcagggtctctt

SEQ ID NO: 4940190 - DNA, 25 bp, Homo sapien
ttgatgctgcctgatccttggctcc

SEQ ID NO: 4940191 - DNA, 25 bp, Homo sapien
cagacaacaccttaaggcccaggat

SEQ ID NO: 4940192 - DNA, 25 bp, Homo sapien
caaaccacgaggtgaggtcgaggca

SEQ ID NO: 4940193 - DNA, 25 bp, Homo sapien
ctagagggccggtgccttgtcacag

SEQ ID NO: 4940194 - DNA, 25 bp, Homo sapien
aggctcagctggcagatccacgcgt

SEQ ID NO: 4940195 - DNA, 25 bp, Homo sapien
gaaatgatggccagggtgtctcgca

SEQ ID NO: 4940196 - DNA, 25 bp, Homo sapien
cacgcgttgtcagaaatgatggcca

SEQ ID NO: 4940197 - DNA, 25 bp, Homo sapien
ggtgcctcatcgtagcagggcagct

SEQ ID NO: 4940198 - DNA, 25 bp, Homo sapien
agctcttgaaggtgcttcctcacca

SEQ ID NO: 4940199 - DNA, 25 bp, Homo sapien
cacccagggtggtgcctatgcattt

SEQ ID NO: 4940200 - DNA, 25 bp, Homo sapien
cctccttacttgaagcagcacccag

SEQ ID NO: 4940201 - DNA, 25 bp, Homo sapien
tcctggtatctggccgtctccagca

SEQ ID NO: 4940202 - DNA, 25 bp, Homo sapien
ccagcgtgtcctcgaggtgggagat

SEQ ID NO: 4940203 - DNA, 25 bp, Homo sapien
gggagatggcacagatcccgaagca

SEQ ID NO: 4940204 - DNA, 25 bp, Homo sapien
aaaatgttgagaatgccaatggatt

SEQ ID NO: 4940205 - DNA, 25 bp, Homo sapien
ggattttctgaagacctctgacctc

SEQ ID NO: 4940206 - DNA, 25 bp, Homo sapien
cagaggtgtgacccagccgtgcacg

SEQ ID NO: 4940207 - DNA, 25 bp, Homo sapien
gaggccagaggaaccagcgggactt

SEQ ID NO: 4940208 - DNA, 25 bp, Homo sapien
agttacacaattacactccccgacg

SEQ ID NO: 4940209 - DNA, 25 bp, Homo sapien
gaatcctcggctcagaaactcctga

SEQ ID NO: 4940210 - DNA, 25 bp, Homo sapien
gggccgccacgtgcccatagcacag

SEQ ID NO: 4940211 - DNA, 25 bp, Homo sapien
ctgaagtgctggcagatgttccgga

SEQ ID NO: 4940212 - DNA, 25 bp, Homo sapien
cacaggatcagagcactcttcacct

SEQ ID NO: 4940213 - DNA, 25 bp, Homo sapien
tgttccggaggatgtctgactctac

SEQ ID NO: 4940214 - DNA, 25 bp, Homo sapien
gaaatgagttaagacgtgactcccc

SEQ ID NO: 4940215 - DNA, 25 bp, Homo sapien
tgagttaagacgtgactccccggca

SEQ ID NO: 4940216 - DNA, 25 bp, Homo sapien
aatgagttaagacgtgactccccgg

SEQ ID NO: 4940217 - DNA, 25 bp, Homo sapien
ccctgcgtggcaggcccaccgcagt

SEQ ID NO: 4940218 - DNA, 25 bp, Homo sapien
ctcaacccgcccagaggagagccga

SEQ ID NO: 4940219 - DNA, 25 bp, Homo sapien
tccggcctctgcctatgaagctcaa

SEQ ID NO: 4940220 - DNA, 25 bp, Homo sapien
cagcacttaattcctacacactgta

SEQ ID NO: 4940221 - DNA, 25 bp, Homo sapien
ccagcacttaattcctacacactgt

SEQ ID NO: 4940222 - DNA, 25 bp, Homo sapien
aggcgcagacgcctcccttcttccc

SEQ ID NO: 4940223 - DNA, 25 bp, Homo sapien
ccctcggaggcgcagacgcctccct

SEQ ID NO: 4940224 - DNA, 25 bp, Homo sapien
aggtacagcccccatgagcactggg

SEQ ID NO: 4940225 - DNA, 25 bp, Homo sapien
ccctggtgatgctctcgaacgcctc

SEQ ID NO: 4940226 - DNA, 25 bp, Homo sapien
actgccacttccactggctttgggc

SEQ ID NO: 4940227 - DNA, 25 bp, Homo sapien
ttccactggctttgggccttggccc

SEQ ID NO: 4940228 - DNA, 25 bp, Homo sapien
cttggcccctctcctaggtgctcac

SEQ ID NO: 4940229 - DNA, 25 bp, Homo sapien
gccacttccactggctttgggcctt

SEQ ID NO: 4940230 - DNA, 25 bp, Homo sapien
tagccagcccttttgcttatcaaag

SEQ ID NO: 4940231 - DNA, 25 bp, Homo sapien
tttcctctgaaaccagaagtgctgc

SEQ ID NO: 4940232 - DNA, 25 bp, Homo sapien
ccagagggcctattcttcaaggagg

SEQ ID NO: 4940233 - DNA, 25 bp, Homo sapien
cagacactgtgtggtgtgaccagag

SEQ ID NO: 4940234 - DNA, 25 bp, Homo sapien
tgcacacactctggacaaggcacag

SEQ ID NO: 4940235 - DNA, 25 bp, Homo sapien
cggctgaccatgcacacactctgga

SEQ ID NO: 4940236 - DNA, 25 bp, Homo sapien
atggcgcggctgaccatgcacacac

SEQ ID NO: 4940237 - DNA, 25 bp, Homo sapien
ctgcagatggcgcggctgaccatgc

SEQ ID NO: 4940238 - DNA, 25 bp, Homo sapien
tctgtgccaccagctctgctttccg

SEQ ID NO: 4940239 - DNA, 25 bp, Homo sapien
tgccaccagctctgctttccgggtg

SEQ ID NO: 4940240 - DNA, 25 bp, Homo sapien
catctgtgccaccagctctgctttc

SEQ ID NO: 4940241 - DNA, 25 bp, Homo sapien
tgtgccaccagctctgctttccggg

SEQ ID NO: 4940242 - DNA, 25 bp, Homo sapien
ctttcttccgaataggtgtcctcaa

SEQ ID NO: 4940243 - DNA, 25 bp, Homo sapien
ggctttcttccgaataggtgtcctc

SEQ ID NO: 4940244 - DNA, 25 bp, Homo sapien
tcttccgaataggtgtcctcaagga

SEQ ID NO: 4940245 - DNA, 25 bp, Homo sapien
ttcttccgaataggtgtcctcaagg

SEQ ID NO: 4940246 - DNA, 25 bp, Homo sapien
aggcagccatggatcacatccgccc

SEQ ID NO: 4940247 - DNA, 25 bp, Homo sapien
cagccatggatcacatccgcccggg

SEQ ID NO: 4940248 - DNA, 25 bp, Homo sapien
atccgcccgggcctgctcgtccagc

SEQ ID NO: 4940249 - DNA, 25 bp, Homo sapien
gcaggcagccatggatcacatccgc

SEQ ID NO: 4940250 - DNA, 25 bp, Homo sapien
aggctcgtcagcagatcctcaaggg

SEQ ID NO: 4940251 - DNA, 25 bp, Homo sapien
tcagcagatcctcaagggcgtgcag

SEQ ID NO: 4940252 - DNA, 25 bp, Homo sapien
tgcaggaggctcgtcagcagatcct

SEQ ID NO: 4940253 - DNA, 25 bp, Homo sapien
tcaagggcgtgcagtgtctccagat

SEQ ID NO: 4940254 - DNA, 25 bp, Homo sapien
gctgacacgcaggtgctccaggaag

SEQ ID NO: 4940255 - DNA, 25 bp, Homo sapien
gacacgcaggtgctccaggaagtag

SEQ ID NO: 4940256 - DNA, 25 bp, Homo sapien
cgcaggtgctccaggaagtagcgca

SEQ ID NO: 4940257 - DNA, 25 bp, Homo sapien
ccgctcgtgacctcttggggacttg

SEQ ID NO: 4940258 - DNA, 25 bp, Homo sapien
cacgggctctgccaatttgggtgag

SEQ ID NO: 4940259 - DNA, 25 bp, Homo sapien
gaaacctggtatctacttgggcgcc

SEQ ID NO: 4940260 - DNA, 25 bp, Homo sapien
cttgggcgccactgatgagaaagaa

SEQ ID NO: 4940261 - DNA, 25 bp, Homo sapien
gtgctgctggtgtccacgaagccct

SEQ ID NO: 4940262 - DNA, 25 bp, Homo sapien
agaaggcccaggttgtggaagggca

SEQ ID NO: 4940263 - DNA, 25 bp, Homo sapien
gcagggagtagacacagtccacggc

SEQ ID NO: 4940264 - DNA, 25 bp, Homo sapien
ggtggcaggccacaggtccgcacac

SEQ ID NO: 4940265 - DNA, 25 bp, Homo sapien
gagaagaggccgatgagaaggccca

SEQ ID NO: 4940266 - DNA, 25 bp, Homo sapien
cgtccttgaggctgaggagccgctc

SEQ ID NO: 4940267 - DNA, 25 bp, Homo sapien
ggtcagggtgcacgaggccgtcctt

SEQ ID NO: 4940268 - DNA, 25 bp, Homo sapien
tcatcgcggtagtcccgggagaagc

SEQ ID NO: 4940269 - DNA, 25 bp, Homo sapien
cgctccgccacgtcatcgcggtagt

SEQ ID NO: 4940270 - DNA, 25 bp, Homo sapien
gaggaaggcgatgccagaggttgag

SEQ ID NO: 4940271 - DNA, 25 bp, Homo sapien
aaggcgatgccagaggttgagggaa

SEQ ID NO: 4940272 - DNA, 25 bp, Homo sapien
ggaaggcgatgccagaggttgaggg

SEQ ID NO: 4940273 - DNA, 25 bp, Homo sapien
taggaggaaggcgatgccagaggtt

SEQ ID NO: 4940274 - DNA, 25 bp, Homo sapien
ctggtctggggggaggcgcttggca

SEQ ID NO: 4940275 - DNA, 25 bp, Homo sapien
tagcaagaggctgatgagctggtct

SEQ ID NO: 4940276 - DNA, 25 bp, Homo sapien
atggttagcaagaggctgatgagct

SEQ ID NO: 4940277 - DNA, 25 bp, Homo sapien
ctggggggaggcgcttggcaataat

SEQ ID NO: 4940278 - DNA, 25 bp, Homo sapien
ggtagctgctcgggagcagttcttt

SEQ ID NO: 4940279 - DNA, 25 bp, Homo sapien
gtagctgctcgggagcagttctttt

SEQ ID NO: 4940280 - DNA, 25 bp, Homo sapien
gctgctcgggagcagttcttttcgg

SEQ ID NO: 4940281 - DNA, 25 bp, Homo sapien
ctgctcgggagcagttcttttcggg

SEQ ID NO: 4940282 - DNA, 25 bp, Homo sapien
ctcctggagcacaccgccccgctcc

SEQ ID NO: 4940283 - DNA, 25 bp, Homo sapien
ctggagcacaccgccccgctcctgc

SEQ ID NO: 4940284 - DNA, 25 bp, Homo sapien
tcctggagcacaccgccccgctcct

SEQ ID NO: 4940285 - DNA, 25 bp, Homo sapien
tggagcacaccgccccgctcctgca

SEQ ID NO: 4940286 - DNA, 25 bp, Homo sapien
gcaggacgctcacgatctcgggcac

SEQ ID NO: 4940287 - DNA, 25 bp, Homo sapien
tcctgaagcttggagcgcaggacgc

SEQ ID NO: 4940288 - DNA, 25 bp, Homo sapien
ggtggccaggaggtacacgctgtgc

SEQ ID NO: 4940289 - DNA, 25 bp, Homo sapien
tggacaccacggctgcgcagtgctg

SEQ ID NO: 4940290 - DNA, 25 bp, Homo sapien
gccaggcggtaatcacggaggaaat

SEQ ID NO: 4940291 - DNA, 25 bp, Homo sapien
cagtgaggatcccaaaacgcctgga

SEQ ID NO: 4940292 - DNA, 25 bp, Homo sapien
tagccggaaccaagacacagggtga

SEQ ID NO: 4940293 - DNA, 25 bp, Homo sapien
ggaaatacaagtcaacgccggctgt

SEQ ID NO: 4940294 - DNA, 25 bp, Homo sapien
gtaaacagagctggtaataaaggac

SEQ ID NO: 4940295 - DNA, 25 bp, Homo sapien
acagagctggtaataaaggacacag

SEQ ID NO: 4940296 - DNA, 25 bp, Homo sapien
ctgtaaacagagctggtaataaagg

SEQ ID NO: 4940297 - DNA, 25 bp, Homo sapien
ggatctgtaaacagagctggtaata

SEQ ID NO: 4940298 - DNA, 25 bp, Homo sapien
cagcgcccgccacagcatgcaggtg

SEQ ID NO: 4940299 - DNA, 25 bp, Homo sapien
tccttgaaagggacgtccctactca

SEQ ID NO: 4940300 - DNA, 25 bp, Homo sapien
acctgggcagctaggcgaggctcca

SEQ ID NO: 4940301 - DNA, 25 bp, Homo sapien
acgcggtctggggtgcggcccagca

SEQ ID NO: 4940302 - DNA, 25 bp, Homo sapien
cagctgacgcgcagcagaagcacca

SEQ ID NO: 4940303 - DNA, 25 bp, Homo sapien
caggcgtggacatgacctcaaacag

SEQ ID NO: 4940304 - DNA, 25 bp, Homo sapien
ttccaggttcctggtggctagggct

SEQ ID NO: 4940305 - DNA, 25 bp, Homo sapien
agctggacacccacggtgcagctga

SEQ ID NO: 4940306 - DNA, 25 bp, Homo sapien
tgagcccaggtagcctgggtgccaa

SEQ ID NO: 4940307 - DNA, 25 bp, Homo sapien
tgttggggcctgatctttgagccca

SEQ ID NO: 4940308 - DNA, 25 bp, Homo sapien
ccaaggtcggacgtacgagaaggca

SEQ ID NO: 4940309 - DNA, 25 bp, Homo sapien
cacagcccttgatgagtgtccccag

SEQ ID NO: 4940310 - DNA, 25 bp, Homo sapien
agcacctggcccaaaagcagacaac

SEQ ID NO: 4940311 - DNA, 25 bp, Homo sapien
cccctggtgtgctgcgacgtggagt

SEQ ID NO: 4940312 - DNA, 25 bp, Homo sapien
ccacaaggcttcgtcctcaggagca

SEQ ID NO: 4940313 - DNA, 25 bp, Homo sapien
acgggccgtgtggtgaccgctggtg

SEQ ID NO: 4940314 - DNA, 25 bp, Homo sapien
agtagcatggaccgcagggtgtcca

SEQ ID NO: 4940315 - DNA, 25 bp, Homo sapien
cggagtagcatggaccgcagggtgt

SEQ ID NO: 4940316 - DNA, 25 bp, Homo sapien
gagtagcatggaccgcagggtgtcc

SEQ ID NO: 4940317 - DNA, 25 bp, Homo sapien
ctgcggagtagcatggaccgcaggg

SEQ ID NO: 4940318 - DNA, 25 bp, Homo sapien
catgcgctgtaccacatcctcgctg

SEQ ID NO: 4940319 - DNA, 25 bp, Homo sapien
gccccgccgaggtcctgagcagttc

SEQ ID NO: 4940320 - DNA, 25 bp, Homo sapien
tccaggtccatgcgctgtaccacat

SEQ ID NO: 4940321 - DNA, 25 bp, Homo sapien
cccgccgaggtcctgagcagttccc

SEQ ID NO: 4940322 - DNA, 25 bp, Homo sapien
gtgcatgccagcgtcttcagcacca

SEQ ID NO: 4940323 - DNA, 25 bp, Homo sapien
tctggttctcatacgcactgctgtg

SEQ ID NO: 4940324 - DNA, 25 bp, Homo sapien
ccaggaaggcggtggtggtcaccct

SEQ ID NO: 4940325 - DNA, 25 bp, Homo sapien
tgtgtgcatgccagcgtcttcagca

SEQ ID NO: 4940326 - DNA, 25 bp, Homo sapien
caagagcatgaggtcgttggccacg

SEQ ID NO: 4940327 - DNA, 25 bp, Homo sapien
catgaggtcgttggccacgttgctg

SEQ ID NO: 4940328 - DNA, 25 bp, Homo sapien
agcctccgcacgctggcgcatgtgt

SEQ ID NO: 4940329 - DNA, 25 bp, Homo sapien
tgtccttctggcgagccgccaggct

SEQ ID NO: 4940330 - DNA, 25 bp, Homo sapien
gaaaggccggatgcggatggccacg

SEQ ID NO: 4940331 - DNA, 25 bp, Homo sapien
actgtcgaagaaaggccggatgcgg

SEQ ID NO: 4940332 - DNA, 25 bp, Homo sapien
caccaggtgcaccagcctcgcaagg

SEQ ID NO: 4940333 - DNA, 25 bp, Homo sapien
tgtgagggttgtccccgtcgtccag

SEQ ID NO: 4940334 - DNA, 25 bp, Homo sapien
gctaaagctcagagtaagaggcagg

SEQ ID NO: 4940335 - DNA, 25 bp, Homo sapien
gctggggctaaagctcagagtaaga

SEQ ID NO: 4940336 - DNA, 25 bp, Homo sapien
gggctggggctaaagctcagagtaa

SEQ ID NO: 4940337 - DNA, 25 bp, Homo sapien
gggctaaagctcagagtaagaggca

SEQ ID NO: 4940338 - DNA, 25 bp, Homo sapien
cccctgccattgatgggtgcccttg

SEQ ID NO: 4940339 - DNA, 25 bp, Homo sapien
ctgggaaggacatgcagcatacgtc

SEQ ID NO: 4940340 - DNA, 25 bp, Homo sapien
ccattgatgggtgcccttgcctgac

SEQ ID NO: 4940341 - DNA, 25 bp, Homo sapien
tgcagcatacgtctcctcacaggct

SEQ ID NO: 4940342 - DNA, 25 bp, Homo sapien
ggatagatgccgtccggaactccat

SEQ ID NO: 4940343 - DNA, 25 bp, Homo sapien
cccaaagaggcggatagatgccgtc

SEQ ID NO: 4940344 - DNA, 25 bp, Homo sapien
cagaccttgttaaggtgcccaaaga

SEQ ID NO: 4940345 - DNA, 25 bp, Homo sapien
tcacagtctccgtggcagaccttgt

SEQ ID NO: 4940346 - DNA, 25 bp, Homo sapien
gaggaactccccgaagtgcagggct

SEQ ID NO: 4940347 - DNA, 25 bp, Homo sapien
cacacatgcgcagggcaaacctgca

SEQ ID NO: 4940348 - DNA, 25 bp, Homo sapien
cttgcaggtggtgttgaggaactcc

SEQ ID NO: 4940349 - DNA, 25 bp, Homo sapien
tcacatgccagattggggccacaca

SEQ ID NO: 4940350 - DNA, 25 bp, Homo sapien
ccagcaggtctgggaaatggtgcat

SEQ ID NO: 4940351 - DNA, 25 bp, Homo sapien
aggtggtcaggagacggcccagcag

SEQ ID NO: 4940352 - DNA, 25 bp, Homo sapien
agctgctcttgaagtagaacaggca

SEQ ID NO: 4940353 - DNA, 25 bp, Homo sapien
agcagctcggacgttctcccagctg

SEQ ID NO: 4940354 - DNA, 25 bp, Homo sapien
tgaagtgggggcatcaggcggggct

SEQ ID NO: 4940355 - DNA, 25 bp, Homo sapien
gggggcatcaggcggggctgccggg

SEQ ID NO: 4940356 - DNA, 25 bp, Homo sapien
ctgtgaagtgggggcatcaggcggg

SEQ ID NO: 4940357 - DNA, 25 bp, Homo sapien
aagtgggggcatcaggcggggctgc

SEQ ID NO: 4940358 - DNA, 25 bp, Homo sapien
ggctccgagtgcagcaccaggaacc

SEQ ID NO: 4940359 - DNA, 25 bp, Homo sapien
tgggctccgagtgcagcaccaggaa

SEQ ID NO: 4940360 - DNA, 25 bp, Homo sapien
ctgggctccgagtgcagcaccagga

SEQ ID NO: 4940361 - DNA, 25 bp, Homo sapien
gggctccgagtgcagcaccaggaac

SEQ ID NO: 4940362 - DNA, 25 bp, Homo sapien
ccgcaatgagctggtccaggtccac

SEQ ID NO: 4940363 - DNA, 25 bp, Homo sapien
gaaaatcacttagtccctgcgggtg

SEQ ID NO: 4940364 - DNA, 25 bp, Homo sapien
cctgcgggtgcctacagggtcagca

SEQ ID NO: 4940365 - DNA, 25 bp, Homo sapien
tcaccagtgacagggaaaaagtcct

SEQ ID NO: 4940366 - DNA, 25 bp, Homo sapien
gaagtttccgtgaattactagagac

SEQ ID NO: 4940367 - DNA, 25 bp, Homo sapien
cctgcgggctgtgacctcggcatgc

SEQ ID NO: 4940368 - DNA, 25 bp, Homo sapien
gctcaggagccaacggaaagatcgt

SEQ ID NO: 4940369 - DNA, 25 bp, Homo sapien
tcggcatgcccatgcctgcgcgtgg

SEQ ID NO: 4940370 - DNA, 25 bp, Homo sapien
gtgggccacgctctcctgacagcct

SEQ ID NO: 4940371 - DNA, 25 bp, Homo sapien
ctcgggggccgggtccttcagcagg

SEQ ID NO: 4940372 - DNA, 25 bp, Homo sapien
cgggggccgggtccttcagcaggat

SEQ ID NO: 4940373 - DNA, 25 bp, Homo sapien
cagccctcgtccgcacctcgggggc

SEQ ID NO: 4940374 - DNA, 25 bp, Homo sapien
ggggccgggtccttcagcaggatct

SEQ ID NO: 4940375 - DNA, 25 bp, Homo sapien
caggtctgggtgcatactcctcgct

SEQ ID NO: 4940376 - DNA, 25 bp, Homo sapien
agtttattgggcacatccctcactg

SEQ ID NO: 4940377 - DNA, 25 bp, Homo sapien
gtctgggtgcatactcctcgctggg

SEQ ID NO: 4940378 - DNA, 25 bp, Homo sapien
gatgagtttattgggcacatccctc

SEQ ID NO: 4940379 - DNA, 25 bp, Homo sapien
cactctttgcgtcaggctcggacga

SEQ ID NO: 4940380 - DNA, 25 bp, Homo sapien
gaccttctgcagaaccccttgctgg

SEQ ID NO: 4940381 - DNA, 25 bp, Homo sapien
gacacgtgctgacccgagatctggg

SEQ ID NO: 4940382 - DNA, 25 bp, Homo sapien
tgtacaagtgagtgctgaccctgcc

SEQ ID NO: 4940383 - DNA, 25 bp, Homo sapien
ccgttttctcccgtggcacaactga

SEQ ID NO: 4940384 - DNA, 25 bp, Homo sapien
tagttactcagggccccaaaactgc

SEQ ID NO: 4940385 - DNA, 25 bp, Homo sapien
gctgcgcctttatagcggcgtcccg

SEQ ID NO: 4940386 - DNA, 25 bp, Homo sapien
ggaactgggaggtcgcttctgggct

SEQ ID NO: 4940387 - DNA, 25 bp, Homo sapien
cgcgtgcacgcgacagggtttctcg

SEQ ID NO: 4940388 - DNA, 25 bp, Homo sapien
ggagagcttgcggtcggcgggctcg

SEQ ID NO: 4940389 - DNA, 25 bp, Homo sapien
tcacctcggggtacaggtagcggcc

SEQ ID NO: 4940390 - DNA, 25 bp, Homo sapien
tgttcacgctgttggtgcggtctcg

SEQ ID NO: 4940391 - DNA, 25 bp, Homo sapien
tgcagatctgtttgggctgggtgtt

SEQ ID NO: 4940392 - DNA, 25 bp, Homo sapien
cgccgcgtggaagaaggcgggcccg

SEQ ID NO: 4940393 - DNA, 25 bp, Homo sapien
ggtgttctcgccgtcgcgggcggga

SEQ ID NO: 4940394 - DNA, 25 bp, Homo sapien
tgtccgtcgccgcaggcctcgcccg

SEQ ID NO: 4940395 - DNA, 25 bp, Homo sapien
ccccggcaggcctgtgttacaggtg

SEQ ID NO: 4940396 - DNA, 25 bp, Homo sapien
ggcctgtgttacaggtgtgcctgcc

SEQ ID NO: 4940397 - DNA, 25 bp, Homo sapien
ctcggcgccccacggcccgtgctca

SEQ ID NO: 4940398 - DNA, 25 bp, Homo sapien
gcaggcctgtgttacaggtgtgcct

SEQ ID NO: 4940399 - DNA, 25 bp, Homo sapien
gtgggcccctttggccatccctagc

SEQ ID NO: 4940400 - DNA, 25 bp, Homo sapien
cactccgcctttcaacttactgaaa

SEQ ID NO: 4940401 - DNA, 25 bp, Homo sapien
aagggaagcttgcagcggcctggtc

SEQ ID NO: 4940402 - DNA, 25 bp, Homo sapien
tccacactccactgggagccgagtg

SEQ ID NO: 4940403 - DNA, 25 bp, Homo sapien
aaagccgtgccgtattttctccctg

SEQ ID NO: 4940404 - DNA, 25 bp, Homo sapien
ggagctcgcgcgtgctgtctggaga

SEQ ID NO: 4940405 - DNA, 25 bp, Homo sapien
ggagcatactgctgcacagccgaaa

SEQ ID NO: 4940406 - DNA, 25 bp, Homo sapien
agggaggagtgtcaggccccggcag

SEQ ID NO: 4940407 - DNA, 25 bp, Homo sapien
cacagtggccggaagaaaagccagc

SEQ ID NO: 4940408 - DNA, 25 bp, Homo sapien
aaaagccagcgcagaaagttccagt

SEQ ID NO: 4940409 - DNA, 25 bp, Homo sapien
gtctgtacgtccgtctgtccctcgg

SEQ ID NO: 4940410 - DNA, 25 bp, Homo sapien
tgcgaatcgctgtctttctgtcgcg

SEQ ID NO: 4940411 - DNA, 25 bp, Homo sapien
ctgctgccacccgaccggtgccagc

SEQ ID NO: 4940412 - DNA, 25 bp, Homo sapien
gccacccgaccggtgccagcggtcc

SEQ ID NO: 4940413 - DNA, 25 bp, Homo sapien
gctgccacccgaccggtgccagcgg

SEQ ID NO: 4940414 - DNA, 25 bp, Homo sapien
cccgaccggtgccagcggtccgctt

SEQ ID NO: 4940415 - DNA, 25 bp, Homo sapien
ccgcctgcaggtccgcccgcgcgcc

SEQ ID NO: 4940416 - DNA, 25 bp, Homo sapien
gccgcctgcaggtccgcccgcgcgc

SEQ ID NO: 4940417 - DNA, 25 bp, Homo sapien
ctgccccgccaacagcgcgcggccg

SEQ ID NO: 4940418 - DNA, 25 bp, Homo sapien
ggtccgcagccagtcagcgccagca

SEQ ID NO: 4940419 - DNA, 25 bp, Homo sapien
gggtcggccgccagcaatgtctcgt

SEQ ID NO: 4940420 - DNA, 25 bp, Homo sapien
aacgcgcggcccatcaggcgcgctg

SEQ ID NO: 4940421 - DNA, 25 bp, Homo sapien
tcggcggccaagttcacgagcgcgc

SEQ ID NO: 4940422 - DNA, 25 bp, Homo sapien
gccagcaatgtctcgtgcaggccgg

SEQ ID NO: 4940423 - DNA, 25 bp, Homo sapien
atgagcgctgcacacggcgccggct

SEQ ID NO: 4940424 - DNA, 25 bp, Homo sapien
gactgaggttggctagcgcggcggc

SEQ ID NO: 4940425 - DNA, 25 bp, Homo sapien
acggcgccggctcgcgactgaggtt

SEQ ID NO: 4940426 - DNA, 25 bp, Homo sapien
ccgggcgtgcacagcgcgcgcacca

SEQ ID NO: 4940427 - DNA, 25 bp, Homo sapien
gcgccgcagggcgttggctgaggtt

SEQ ID NO: 4940428 - DNA, 25 bp, Homo sapien
cccgcgccgcagggcgttggctgag

SEQ ID NO: 4940429 - DNA, 25 bp, Homo sapien
ccgcgccgcagggcgttggctgagg

SEQ ID NO: 4940430 - DNA, 25 bp, Homo sapien
gccgcagggcgttggctgaggttgg

SEQ ID NO: 4940431 - DNA, 25 bp, Homo sapien
gtgctcgaagcagcaattccgcagc

SEQ ID NO: 4940432 - DNA, 25 bp, Homo sapien
ccgcccctgcgtacagaggagtcgg

SEQ ID NO: 4940433 - DNA, 25 bp, Homo sapien
caccccgcccctgcgtacagaggag

SEQ ID NO: 4940434 - DNA, 25 bp, Homo sapien
ctcgaagcagcaattccgcagcgtc

SEQ ID NO: 4940435 - DNA, 25 bp, Homo sapien
acctcaggtccaagcaaccactcgt

SEQ ID NO: 4940436 - DNA, 25 bp, Homo sapien
caggtccaagcaaccactcgtgatg

SEQ ID NO: 4940437 - DNA, 25 bp, Homo sapien
ggtccaagcaaccactcgtgatgtc

SEQ ID NO: 4940438 - DNA, 25 bp, Homo sapien
aaaaggggagaatgtccacctcagg

SEQ ID NO: 4940439 - DNA, 25 bp, Homo sapien
acctgtgctcagcaactcactgctg

SEQ ID NO: 4940440 - DNA, 25 bp, Homo sapien
ctgctgcaaagtttcaggagcctgt

SEQ ID NO: 4940441 - DNA, 25 bp, Homo sapien
aactcactgctgcaaagtttcagga

SEQ ID NO: 4940442 - DNA, 25 bp, Homo sapien
tgctcagcaactcactgctgcaaag

SEQ ID NO: 4940443 - DNA, 25 bp, Homo sapien
agcatcttgcggatgtctgcatcag

SEQ ID NO: 4940444 - DNA, 25 bp, Homo sapien
tgcatcaggttctcgctgcttgtct

SEQ ID NO: 4940445 - DNA, 25 bp, Homo sapien
atgatggcttcaacaagcatcttgc

SEQ ID NO: 4940446 - DNA, 25 bp, Homo sapien
tcaacaagcatcttgcggatgtctg

SEQ ID NO: 4940447 - DNA, 25 bp, Homo sapien
aggttacccagatgtcagcatgctc

SEQ ID NO: 4940448 - DNA, 25 bp, Homo sapien
gttacccagatgtcagcatgctcat

SEQ ID NO: 4940449 - DNA, 25 bp, Homo sapien
gtggaagaggttacccagatgtcag

SEQ ID NO: 4940450 - DNA, 25 bp, Homo sapien
aggaggtggaagaggttacccagat

SEQ ID NO: 4940451 - DNA, 25 bp, Homo sapien
tctcgaaggatcaggtaggctccct

SEQ ID NO: 4940452 - DNA, 25 bp, Homo sapien
cagctgtgcagctctcgaaggatca

SEQ ID NO: 4940453 - DNA, 25 bp, Homo sapien
ctggatgagcttctcacaagccgtc

SEQ ID NO: 4940454 - DNA, 25 bp, Homo sapien
gatgagcttctcacaagccgtccgc

SEQ ID NO: 4940455 - DNA, 25 bp, Homo sapien
agcaggttttccatgccacgttcag

SEQ ID NO: 4940456 - DNA, 25 bp, Homo sapien
tttccatgccacgttcaggctcgtc

SEQ ID NO: 4940457 - DNA, 25 bp, Homo sapien
gttcaggctcgtccccaataagcac

SEQ ID NO: 4940458 - DNA, 25 bp, Homo sapien
cacgttcaggctcgtccccaataag

SEQ ID NO: 4940459 - DNA, 25 bp, Homo sapien
tcaggatcccaatgcaagaggtggc

SEQ ID NO: 4940460 - DNA, 25 bp, Homo sapien
tactggagcctaagcgtagctctgc

SEQ ID NO: 4940461 - DNA, 25 bp, Homo sapien
cagggactaggctgcaggcacatct

SEQ ID NO: 4940462 - DNA, 25 bp, Homo sapien
tgctggtagcaacactgcacagggc

SEQ ID NO: 4940463 - DNA, 25 bp, Homo sapien
agtgctaagagggcaactggcctcc

SEQ ID NO: 4940464 - DNA, 25 bp, Homo sapien
ctgagtgctaagagggcaactggcc

SEQ ID NO: 4940465 - DNA, 25 bp, Homo sapien
tgagtgctaagagggcaactggcct

SEQ ID NO: 4940466 - DNA, 25 bp, Homo sapien
gtgctaagagggcaactggcctcca

SEQ ID NO: 4940467 - DNA, 25 bp, Homo sapien
tctcaagaagctcgtggtccaaaag

SEQ ID NO: 4940468 - DNA, 25 bp, Homo sapien
caagaagacgcaccctttgagggca

SEQ ID NO: 4940469 - DNA, 25 bp, Homo sapien
tgagatcccagatgtgaactgcccc

SEQ ID NO: 4940470 - DNA, 25 bp, Homo sapien
ccacagatcttggtggagaccccaa

SEQ ID NO: 4940471 - DNA, 25 bp, Homo sapien
gcagggtgatgagaaggtcagcaaa

SEQ ID NO: 4940472 - DNA, 25 bp, Homo sapien
ggagagcagggtgatgagaaggtca

SEQ ID NO: 4940473 - DNA, 25 bp, Homo sapien
caaaaaacgtgagcaaaagcatcta

SEQ ID NO: 4940474 - DNA, 25 bp, Homo sapien
tctcctagctcagaactgaatgtac

SEQ ID NO: 4940475 - DNA, 25 bp, Homo sapien
ggcacgctatgaccagtcatcctcg

SEQ ID NO: 4940476 - DNA, 25 bp, Homo sapien
gtgactagggacaaatcaccttcct

SEQ ID NO: 4940477 - DNA, 25 bp, Homo sapien
gctatgcccggcacgctatgaccag

SEQ ID NO: 4940478 - DNA, 25 bp, Homo sapien
tgaccagtcatcctcgtgactaggg

SEQ ID NO: 4940479 - DNA, 25 bp, Homo sapien
cagaaggcgtccctgtaagcagacg

SEQ ID NO: 4940480 - DNA, 25 bp, Homo sapien
aagcagacgacttctgtttcccaca

SEQ ID NO: 4940481 - DNA, 25 bp, Homo sapien
tgctgtcctctctgtacgctcagct

SEQ ID NO: 4940482 - DNA, 25 bp, Homo sapien
gtccctgtaagcagacgacttctgt

SEQ ID NO: 4940483 - DNA, 25 bp, Homo sapien
aggcaaaggcgtgcgtgggcggcca

SEQ ID NO: 4940484 - DNA, 25 bp, Homo sapien
aaaggcgtgcgtgggcggccatggc

SEQ ID NO: 4940485 - DNA, 25 bp, Homo sapien
gcaaaaggcaaaggcgtgcgtgggc

SEQ ID NO: 4940486 - DNA, 25 bp, Homo sapien
aggcaaaaggcaaaggcgtgcgtgg

SEQ ID NO: 4940487 - DNA, 25 bp, Homo sapien
tagagggtgcgcacgctgatggccc

SEQ ID NO: 4940488 - DNA, 25 bp, Homo sapien
gtgactcatcctgtccacggtggtg

SEQ ID NO: 4940489 - DNA, 25 bp, Homo sapien
tcatcctgtccacggtggtgctgac

SEQ ID NO: 4940490 - DNA, 25 bp, Homo sapien
tggtgctgaccaggtagagggtgcg

SEQ ID NO: 4940491 - DNA, 25 bp, Homo sapien
cgtactggatgaggaaggcgtcggc

SEQ ID NO: 4940492 - DNA, 25 bp, Homo sapien
cctcttctgcgccagatgcacgagg

SEQ ID NO: 4940493 - DNA, 25 bp, Homo sapien
gccagatgcacgaggctcctgcaga

SEQ ID NO: 4940494 - DNA, 25 bp, Homo sapien
ctcctgcagagcggagtcagggccc

SEQ ID NO: 4940495 - DNA, 25 bp, Homo sapien
caacagtcttccggttacagcatag

SEQ ID NO: 4940496 - DNA, 25 bp, Homo sapien
agtcttccggttacagcatagggag

SEQ ID NO: 4940497 - DNA, 25 bp, Homo sapien
acagtcttccggttacagcataggg

SEQ ID NO: 4940498 - DNA, 25 bp, Homo sapien
cagtcttccggttacagcataggga

SEQ ID NO: 4940499 - DNA, 25 bp, Homo sapien
cactgagaaggtaaccccttccaag

SEQ ID NO: 4940500 - DNA, 25 bp, Homo sapien
ccacatcacccgacggggagcctgg

SEQ ID NO: 4940501 - DNA, 25 bp, Homo sapien
accacatcacccgacggggagcctg

SEQ ID NO: 4940502 - DNA, 25 bp, Homo sapien
gaggaaaaccacacctgagccctga

SEQ ID NO: 4940503 - DNA, 25 bp, Homo sapien
cccagcaaagggtgaatgtttgggt

SEQ ID NO: 4940504 - DNA, 25 bp, Homo sapien
tttcccaatgctgacccagcaaagg

SEQ ID NO: 4940505 - DNA, 25 bp, Homo sapien
gcagcagcgggacagtcgtttccca

SEQ ID NO: 4940506 - DNA, 25 bp, Homo sapien
tgcagaacactgaggaggcgcagcg

SEQ ID NO: 4940507 - DNA, 25 bp, Homo sapien
cactcctcctgtggcagggtctctt

SEQ ID NO: 4940508 - DNA, 25 bp, Homo sapien
ggtgcctcatcgtagcagggcagct

SEQ ID NO: 4940509 - DNA, 25 bp, Homo sapien
cacgcgttgtcagaaatgatggcca

SEQ ID NO: 4940510 - DNA, 25 bp, Homo sapien
gaaatgatggccagggtgtctcgca

SEQ ID NO: 4940511 - DNA, 25 bp, Homo sapien
aggctcagctggcagatccacgcgt

SEQ ID NO: 4940512 - DNA, 25 bp, Homo sapien
cacccagggtggtgcctatgcattt

SEQ ID NO: 4940513 - DNA, 25 bp, Homo sapien
cctccttacttgaagcagcacccag

SEQ ID NO: 4940514 - DNA, 25 bp, Homo sapien
tcctggtatctggccgtctccagca

SEQ ID NO: 4940515 - DNA, 25 bp, Homo sapien
agctcttgaaggtgcttcctcacca

SEQ ID NO: 4940516 - DNA, 25 bp, Homo sapien
ggattttctgaagacctctgacctc

SEQ ID NO: 4940517 - DNA, 25 bp, Homo sapien
ccagcgtgtcctcgaggtgggagat

SEQ ID NO: 4940518 - DNA, 25 bp, Homo sapien
aaaatgttgagaatgccaatggatt

SEQ ID NO: 4940519 - DNA, 25 bp, Homo sapien
gggagatggcacagatcccgaagca

SEQ ID NO: 4940520 - DNA, 25 bp, Homo sapien
gaggccagaggaaccagcgggactt

SEQ ID NO: 4940521 - DNA, 25 bp, Homo sapien
cagaggtgtgacccagccgtgcacg

SEQ ID NO: 4940522 - DNA, 25 bp, Homo sapien
agttacacaattacactccccgacg

SEQ ID NO: 4940523 - DNA, 25 bp, Homo sapien
gaatcctcggctcagaaactcctga

SEQ ID NO: 4940524 - DNA, 25 bp, Homo sapien
gggccgccacgtgcccatagcacag

SEQ ID NO: 4940525 - DNA, 25 bp, Homo sapien
tgttccggaggatgtctgactctac

SEQ ID NO: 4940526 - DNA, 25 bp, Homo sapien
ctgaagtgctggcagatgttccgga

SEQ ID NO: 4940527 - DNA, 25 bp, Homo sapien
cacaggatcagagcactcttcacct

SEQ ID NO: 4940528 - DNA, 25 bp, Homo sapien
ccctcggaggcgcagacgcctccct

SEQ ID NO: 4940529 - DNA, 25 bp, Homo sapien
aggcgcagacgcctcccttcttccc

SEQ ID NO: 4940530 - DNA, 25 bp, Homo sapien
aggtacagcccccatgagcactggg

SEQ ID NO: 4940531 - DNA, 25 bp, Homo sapien
ccctggtgatgctctcgaacgcctc

SEQ ID NO: 4940532 - DNA, 25 bp, Homo sapien
caccagctctgctttccgggtgaag

SEQ ID NO: 4940533 - DNA, 25 bp, Homo sapien
cagctctgctttccgggtgaagtgg

SEQ ID NO: 4940534 - DNA, 25 bp, Homo sapien
cagatggcgcggctgaccatgcaca

SEQ ID NO: 4940535 - DNA, 25 bp, Homo sapien
tgcacacactctggacaaggcacag

SEQ ID NO: 4940536 - DNA, 25 bp, Homo sapien
cagtctcccaggaacctgcctgagg

SEQ ID NO: 4940537 - DNA, 25 bp, Homo sapien
gtctcccaggaacctgcctgaggac

SEQ ID NO: 4940538 - DNA, 25 bp, Homo sapien
tcagtctcccaggaacctgcctgag

SEQ ID NO: 4940539 - DNA, 25 bp, Homo sapien
cctcagtctcccaggaacctgcctg

SEQ ID NO: 4940540 - DNA, 25 bp, Homo sapien
ctttcttccgaataggtgtcctcaa

SEQ ID NO: 4940541 - DNA, 25 bp, Homo sapien
tcttccgaataggtgtcctcaagga

SEQ ID NO: 4940542 - DNA, 25 bp, Homo sapien
ggctttcttccgaataggtgtcctc

SEQ ID NO: 4940543 - DNA, 25 bp, Homo sapien
ttcttccgaataggtgtcctcaagg

SEQ ID NO: 4940544 - DNA, 25 bp, Homo sapien
atccgcccgggcctgctcgtccagc

SEQ ID NO: 4940545 - DNA, 25 bp, Homo sapien
cagccatggatcacatccgcccggg

SEQ ID NO: 4940546 - DNA, 25 bp, Homo sapien
aggcagccatggatcacatccgccc

SEQ ID NO: 4940547 - DNA, 25 bp, Homo sapien
gcaggcagccatggatcacatccgc

SEQ ID NO: 4940548 - DNA, 25 bp, Homo sapien
aggctcgtcagcagatcctcaaggg

SEQ ID NO: 4940549 - DNA, 25 bp, Homo sapien
tcagcagatcctcaagggcgtgcag

SEQ ID NO: 4940550 - DNA, 25 bp, Homo sapien
tgcaggaggctcgtcagcagatcct

SEQ ID NO: 4940551 - DNA, 25 bp, Homo sapien
tcaagggcgtgcagtgtctccagat

SEQ ID NO: 4940552 - DNA, 25 bp, Homo sapien
cgcaggtgctccaggaagtagcgca

SEQ ID NO: 4940553 - DNA, 25 bp, Homo sapien
gacacgcaggtgctccaggaagtag

SEQ ID NO: 4940554 - DNA, 25 bp, Homo sapien
gctgacacgcaggtgctccaggaag

SEQ ID NO: 4940555 - DNA, 25 bp, Homo sapien
ccgctcgtgacctcttggggacttg

SEQ ID NO: 4940556 - DNA, 25 bp, Homo sapien
cacgggctctgccaatttgggtgag

SEQ ID NO: 4940557 - DNA, 25 bp, Homo sapien
gaaacctggtatctacttgggcgcc

SEQ ID NO: 4940558 - DNA, 25 bp, Homo sapien
cttgggcgccactgatgagaaagaa

SEQ ID NO: 4940559 - DNA, 25 bp, Homo sapien
gtgctgctggtgtccacgaagccct

SEQ ID NO: 4940560 - DNA, 25 bp, Homo sapien
ggtggcaggccacaggtccgcacac

SEQ ID NO: 4940561 - DNA, 25 bp, Homo sapien
agaaggcccaggttgtggaagggca

SEQ ID NO: 4940562 - DNA, 25 bp, Homo sapien
gcagggagtagacacagtccacggc

SEQ ID NO: 4940563 - DNA, 25 bp, Homo sapien
gagaagaggccgatgagaaggccca

SEQ ID NO: 4940564 - DNA, 25 bp, Homo sapien
ggtcagggtgcacgaggccgtcctt

SEQ ID NO: 4940565 - DNA, 25 bp, Homo sapien
cgtccttgaggctgaggagccgctc

SEQ ID NO: 4940566 - DNA, 25 bp, Homo sapien
cgctccgccacgtcatcgcggtagt

SEQ ID NO: 4940567 - DNA, 25 bp, Homo sapien
tcatcgcggtagtcccgggagaagc

SEQ ID NO: 4940568 - DNA, 25 bp, Homo sapien
cacgtggctcttgggtagcctctgg

SEQ ID NO: 4940569 - DNA, 25 bp, Homo sapien
ttgaccagctggaaccaagggcagg

SEQ ID NO: 4940570 - DNA, 25 bp, Homo sapien
tcagatggcagtagacaaagcacct

SEQ ID NO: 4940571 - DNA, 25 bp, Homo sapien
gcaagagggctagagcccgctgcac

SEQ ID NO: 4940572 - DNA, 25 bp, Homo sapien
taggaggaaggcgatgccagaggtt

SEQ ID NO: 4940573 - DNA, 25 bp, Homo sapien
gaggaaggcgatgccagaggttgag

SEQ ID NO: 4940574 - DNA, 25 bp, Homo sapien
aaggcgatgccagaggttgagggaa

SEQ ID NO: 4940575 - DNA, 25 bp, Homo sapien
ggaaggcgatgccagaggttgaggg

SEQ ID NO: 4940576 - DNA, 25 bp, Homo sapien
ctggggggaggcgcttggcaataat

SEQ ID NO: 4940577 - DNA, 25 bp, Homo sapien
ctggtctggggggaggcgcttggca

SEQ ID NO: 4940578 - DNA, 25 bp, Homo sapien
tagcaagaggctgatgagctggtct

SEQ ID NO: 4940579 - DNA, 25 bp, Homo sapien
atggttagcaagaggctgatgagct

SEQ ID NO: 4940580 - DNA, 25 bp, Homo sapien
gctgctcgggagcagttcttttcgg

SEQ ID NO: 4940581 - DNA, 25 bp, Homo sapien
ggtagctgctcgggagcagttcttt

SEQ ID NO: 4940582 - DNA, 25 bp, Homo sapien
ctgctcgggagcagttcttttcggg

SEQ ID NO: 4940583 - DNA, 25 bp, Homo sapien
gtagctgctcgggagcagttctttt

SEQ ID NO: 4940584 - DNA, 25 bp, Homo sapien
tggagcacaccgccccgctcctgca

SEQ ID NO: 4940585 - DNA, 25 bp, Homo sapien
ctggagcacaccgccccgctcctgc

SEQ ID NO: 4940586 - DNA, 25 bp, Homo sapien
tcctggagcacaccgccccgctcct

SEQ ID NO: 4940587 - DNA, 25 bp, Homo sapien
ctcctggagcacaccgccccgctcc

SEQ ID NO: 4940588 - DNA, 25 bp, Homo sapien
ctactgccaaatgcttactgcacag

SEQ ID NO: 4940589 - DNA, 25 bp, Homo sapien
ggtgacccctactgccaaatgctta

SEQ ID NO: 4940590 - DNA, 25 bp, Homo sapien
gacccctactgccaaatgcttactg

SEQ ID NO: 4940591 - DNA, 25 bp, Homo sapien
ccctactgccaaatgcttactgcac

SEQ ID NO: 4940592 - DNA, 25 bp, Homo sapien
gctccctgctcatgatgggtattgg

SEQ ID NO: 4940593 - DNA, 25 bp, Homo sapien
ctcactctgggggacggccttgtca

SEQ ID NO: 4940594 - DNA, 25 bp, Homo sapien
cagcatagcatgagcctcactctgg

SEQ ID NO: 4940595 - DNA, 25 bp, Homo sapien
ggccttgtcacgagggggctccctg

SEQ ID NO: 4940596 - DNA, 25 bp, Homo sapien
cacagctgccaacggcactcctgcg

SEQ ID NO: 4940597 - DNA, 25 bp, Homo sapien
agctgccaacggcactcctgcggga

SEQ ID NO: 4940598 - DNA, 25 bp, Homo sapien
tgccaacggcactcctgcgggagct

SEQ ID NO: 4940599 - DNA, 25 bp, Homo sapien
ccaacggcactcctgcgggagctgg

SEQ ID NO: 4940600 - DNA, 25 bp, Homo sapien
ctgctgggtgcaactctcaggctcc

SEQ ID NO: 4940601 - DNA, 25 bp, Homo sapien
ttctgcgtgcaaagtggccagtgcc

SEQ ID NO: 4940602 - DNA, 25 bp, Homo sapien
aactggagccacgacctggattctg

SEQ ID NO: 4940603 - DNA, 25 bp, Homo sapien
ggcaggcatccaacagagccagcgg

SEQ ID NO: 4940604 - DNA, 25 bp, Homo sapien
tcctgaagcttggagcgcaggacgc

SEQ ID NO: 4940605 - DNA, 25 bp, Homo sapien
gcaggacgctcacgatctcgggcac

SEQ ID NO: 4940606 - DNA, 25 bp, Homo sapien
ggtggccaggaggtacacgctgtgc

SEQ ID NO: 4940607 - DNA, 25 bp, Homo sapien
tggacaccacggctgcgcagtgctg

SEQ ID NO: 4940608 - DNA, 25 bp, Homo sapien
agccaggcagttttgggaccttaga

SEQ ID NO: 4940609 - DNA, 25 bp, Homo sapien
gggagcatcattccagagggacccc

SEQ ID NO: 4940610 - DNA, 25 bp, Homo sapien
tagccggaaccaagacacagggtga

SEQ ID NO: 4940611 - DNA, 25 bp, Homo sapien
cagtgaggatcccaaaacgcctgga

SEQ ID NO: 4940612 - DNA, 25 bp, Homo sapien
tcccaggggtctgctcacaggcagc

SEQ ID NO: 4940613 - DNA, 25 bp, Homo sapien
agatcaggcagttcccaggggtctg

SEQ ID NO: 4940614 - DNA, 25 bp, Homo sapien
ccaggggtctgctcacaggcagcag

SEQ ID NO: 4940615 - DNA, 25 bp, Homo sapien
tcagatcaggcagttcccaggggtc

SEQ ID NO: 4940616 - DNA, 25 bp, Homo sapien
actacccggcaaggagaaaggatgg

SEQ ID NO: 4940617 - DNA, 25 bp, Homo sapien
ggaaatacaagtcaacgccggctgt

SEQ ID NO: 4940618 - DNA, 25 bp, Homo sapien
gccaggcggtaatcacggaggaaat

SEQ ID NO: 4940619 - DNA, 25 bp, Homo sapien
gcagccacctttagggcaaacgcta

SEQ ID NO: 4940620 - DNA, 25 bp, Homo sapien
tgaaagggacgtccctactcatctt

SEQ ID NO: 4940621 - DNA, 25 bp, Homo sapien
tccttgaaagggacgtccctactca

SEQ ID NO: 4940622 - DNA, 25 bp, Homo sapien
acctgggcagctaggcgaggctcca

SEQ ID NO: 4940623 - DNA, 25 bp, Homo sapien
acgcggtctggggtgcggcccagca

SEQ ID NO: 4940624 - DNA, 25 bp, Homo sapien
cagctgacgcgcagcagaagcacca

SEQ ID NO: 4940625 - DNA, 25 bp, Homo sapien
ttccaggttcctggtggctagggct

SEQ ID NO: 4940626 - DNA, 25 bp, Homo sapien
caggcgtggacatgacctcaaacag

SEQ ID NO: 4940627 - DNA, 25 bp, Homo sapien
agctggacacccacggtgcagctga

SEQ ID NO: 4940628 - DNA, 25 bp, Homo sapien
tgttggggcctgatctttgagccca

SEQ ID NO: 4940629 - DNA, 25 bp, Homo sapien
tgagcccaggtagcctgggtgccaa

SEQ ID NO: 4940630 - DNA, 25 bp, Homo sapien
ccaaggtcggacgtacgagaaggca

SEQ ID NO: 4940631 - DNA, 25 bp, Homo sapien
cacagcccttgatgagtgtccccag

SEQ ID NO: 4940632 - DNA, 25 bp, Homo sapien
acgggccgtgtggtgaccgctggtg

SEQ ID NO: 4940633 - DNA, 25 bp, Homo sapien
gagcacctggcccaaaagcagacaa

SEQ ID NO: 4940634 - DNA, 25 bp, Homo sapien
aaaagcagacaacccccgagcggca

SEQ ID NO: 4940635 - DNA, 25 bp, Homo sapien
ccacaaggcttcgtcctcaggagca

SEQ ID NO: 4940636 - DNA, 25 bp, Homo sapien
ctcacacttaggcccccgccgcctt

SEQ ID NO: 4940637 - DNA, 25 bp, Homo sapien
agtagcatggaccgcagggtgtcca

SEQ ID NO: 4940638 - DNA, 25 bp, Homo sapien
ctgcggagtagcatggaccgcaggg

SEQ ID NO: 4940639 - DNA, 25 bp, Homo sapien
gagtagcatggaccgcagggtgtcc

SEQ ID NO: 4940640 - DNA, 25 bp, Homo sapien
cggagtagcatggaccgcagggtgt

SEQ ID NO: 4940641 - DNA, 25 bp, Homo sapien
catgcgctgtaccacatcctcgctg

SEQ ID NO: 4940642 - DNA, 25 bp, Homo sapien
tccaggtccatgcgctgtaccacat

SEQ ID NO: 4940643 - DNA, 25 bp, Homo sapien
gccccgccgaggtcctgagcagttc

SEQ ID NO: 4940644 - DNA, 25 bp, Homo sapien
cccgccgaggtcctgagcagttccc

SEQ ID NO: 4940645 - DNA, 25 bp, Homo sapien
gtgcatgccagcgtcttcagcacca

SEQ ID NO: 4940646 - DNA, 25 bp, Homo sapien
ccaggaaggcggtggtggtcaccct

SEQ ID NO: 4940647 - DNA, 25 bp, Homo sapien
tctggttctcatacgcactgctgtg

SEQ ID NO: 4940648 - DNA, 25 bp, Homo sapien
tgtgtgcatgccagcgtcttcagca

SEQ ID NO: 4940649 - DNA, 25 bp, Homo sapien
agcctccgcacgctggcgcatgtgt

SEQ ID NO: 4940650 - DNA, 25 bp, Homo sapien
catgaggtcgttggccacgttgctg

SEQ ID NO: 4940651 - DNA, 25 bp, Homo sapien
caagagcatgaggtcgttggccacg

SEQ ID NO: 4940652 - DNA, 25 bp, Homo sapien
tgtccttctggcgagccgccaggct

SEQ ID NO: 4940653 - DNA, 25 bp, Homo sapien
tgtgagggttgtccccgtcgtccag

SEQ ID NO: 4940654 - DNA, 25 bp, Homo sapien
gaaaggccggatgcggatggccacg

SEQ ID NO: 4940655 - DNA, 25 bp, Homo sapien
caccaggtgcaccagcctcgcaagg

SEQ ID NO: 4940656 - DNA, 25 bp, Homo sapien
actgtcgaagaaaggccggatgcgg

SEQ ID NO: 4940657 - DNA, 25 bp, Homo sapien
gctaaagctcagagtaagaggcagg

SEQ ID NO: 4940658 - DNA, 25 bp, Homo sapien
gggctaaagctcagagtaagaggca

SEQ ID NO: 4940659 - DNA, 25 bp, Homo sapien
gctggggctaaagctcagagtaaga

SEQ ID NO: 4940660 - DNA, 25 bp, Homo sapien
gggctggggctaaagctcagagtaa

SEQ ID NO: 4940661 - DNA, 25 bp, Homo sapien
agccctgcaggtccgcgctctccac

SEQ ID NO: 4940662 - DNA, 25 bp, Homo sapien
cccctgccattgatgggtgcccttg

SEQ ID NO: 4940663 - DNA, 25 bp, Homo sapien
ctgggaaggacatgcagcatacgtc

SEQ ID NO: 4940664 - DNA, 25 bp, Homo sapien
ccattgatgggtgcccttgcctgac

SEQ ID NO: 4940665 - DNA, 25 bp, Homo sapien
tgcagcatacgtctcctcacaggct

SEQ ID NO: 4940666 - DNA, 25 bp, Homo sapien
cccaaagaggcggatagatgccgtc

SEQ ID NO: 4940667 - DNA, 25 bp, Homo sapien
ggatagatgccgtccggaactccat

SEQ ID NO: 4940668 - DNA, 25 bp, Homo sapien
cagaccttgttaaggtgcccaaaga

SEQ ID NO: 4940669 - DNA, 25 bp, Homo sapien
tcacagtctccgtggcagaccttgt

SEQ ID NO: 4940670 - DNA, 25 bp, Homo sapien
ctcacatgccagattggggccacac

SEQ ID NO: 4940671 - DNA, 25 bp, Homo sapien
cacacatgcgcagggcaaacctgca

SEQ ID NO: 4940672 - DNA, 25 bp, Homo sapien
attggggccacacatgcgcagggca

SEQ ID NO: 4940673 - DNA, 25 bp, Homo sapien
cagattggggccacacatgcgcagg

SEQ ID NO: 4940674 - DNA, 25 bp, Homo sapien
tgttgaggaactccccgaagtgcag

SEQ ID NO: 4940675 - DNA, 25 bp, Homo sapien
caggtggtgttgaggaactccccga

SEQ ID NO: 4940676 - DNA, 25 bp, Homo sapien
aactccccgaagtgcagggctcggc

SEQ ID NO: 4940677 - DNA, 25 bp, Homo sapien
cttgcaggtggtgttgaggaactcc

SEQ ID NO: 4940678 - DNA, 25 bp, Homo sapien
aggtggtcaggagacggcccagcag

SEQ ID NO: 4940679 - DNA, 25 bp, Homo sapien
ccagcaggtctgggaaatggtgcat

SEQ ID NO: 4940680 - DNA, 25 bp, Homo sapien
cttgaagtagaacaggcaggtggtc

SEQ ID NO: 4940681 - DNA, 25 bp, Homo sapien
aacaggcaggtggtcaggagacggc

SEQ ID NO: 4940682 - DNA, 25 bp, Homo sapien
cagctcggacgttctcccagctgct

SEQ ID NO: 4940683 - DNA, 25 bp, Homo sapien
ggtgcagcagctcggacgttctccc

SEQ ID NO: 4940684 - DNA, 25 bp, Homo sapien
tgaacaggggtgcagcagctcggac

SEQ ID NO: 4940685 - DNA, 25 bp, Homo sapien
cggtgaacaggggtgcagcagctcg

SEQ ID NO: 4940686 - DNA, 25 bp, Homo sapien
aagtgggggcatcaggcggggctgc

SEQ ID NO: 4940687 - DNA, 25 bp, Homo sapien
tgaagtgggggcatcaggcggggct

SEQ ID NO: 4940688 - DNA, 25 bp, Homo sapien
ctgtgaagtgggggcatcaggcggg

SEQ ID NO: 4940689 - DNA, 25 bp, Homo sapien
gggggcatcaggcggggctgccggg

SEQ ID NO: 4940690 - DNA, 25 bp, Homo sapien
ggctccgagtgcagcaccaggaacc

SEQ ID NO: 4940691 - DNA, 25 bp, Homo sapien
gggctccgagtgcagcaccaggaac

SEQ ID NO: 4940692 - DNA, 25 bp, Homo sapien
ctgggctccgagtgcagcaccagga

SEQ ID NO: 4940693 - DNA, 25 bp, Homo sapien
tgggctccgagtgcagcaccaggaa

SEQ ID NO: 4940694 - DNA, 25 bp, Homo sapien
ccgcaatgagctggtccaggtccac

SEQ ID NO: 4940695 - DNA, 25 bp, Homo sapien
ctacagggtcagcagggcccagcgg

SEQ ID NO: 4940696 - DNA, 25 bp, Homo sapien
cagggcccagcggaggggccccgtg

SEQ ID NO: 4940697 - DNA, 25 bp, Homo sapien
acagggtcagcagggcccagcggag

SEQ ID NO: 4940698 - DNA, 25 bp, Homo sapien
tcagcagggcccagcggaggggccc

SEQ ID NO: 4940699 - DNA, 25 bp, Homo sapien
gctcaggagccaacggaaagatcgt

SEQ ID NO: 4940700 - DNA, 25 bp, Homo sapien
cctgcgggctgtgacctcggcatgc

SEQ ID NO: 4940701 - DNA, 25 bp, Homo sapien
tcggcatgcccatgcctgcgcgtgg

SEQ ID NO: 4940702 - DNA, 25 bp, Homo sapien
gtgggccacgctctcctgacagcct

SEQ ID NO: 4940703 - DNA, 25 bp, Homo sapien
ctcgggggccgggtccttcagcagg

SEQ ID NO: 4940704 - DNA, 25 bp, Homo sapien
ggggccgggtccttcagcaggatct

SEQ ID NO: 4940705 - DNA, 25 bp, Homo sapien
cgggggccgggtccttcagcaggat

SEQ ID NO: 4940706 - DNA, 25 bp, Homo sapien
cagccctcgtccgcacctcgggggc

SEQ ID NO: 4940707 - DNA, 25 bp, Homo sapien
gtctgggtgcatactcctcgctggg

SEQ ID NO: 4940708 - DNA, 25 bp, Homo sapien
gatgagtttattgggcacatccctc

SEQ ID NO: 4940709 - DNA, 25 bp, Homo sapien
agtttattgggcacatccctcactg

SEQ ID NO: 4940710 - DNA, 25 bp, Homo sapien
caggtctgggtgcatactcctcgct

SEQ ID NO: 4940711 - DNA, 25 bp, Homo sapien
cactctttgcgtcaggctcggacga

SEQ ID NO: 4940712 - DNA, 25 bp, Homo sapien
gaccttctgcagaaccccttgctgg

SEQ ID NO: 4940713 - DNA, 25 bp, Homo sapien
tgtacaagtgagtgctgaccctgcc

SEQ ID NO: 4940714 - DNA, 25 bp, Homo sapien
gacacgtgctgacccgagatctggg

SEQ ID NO: 4940715 - DNA, 25 bp, Homo sapien
ggaactgggaggtcgcttctgggct

SEQ ID NO: 4940716 - DNA, 25 bp, Homo sapien
ccgttttctcccgtggcacaactga

SEQ ID NO: 4940717 - DNA, 25 bp, Homo sapien
gctgcgcctttatagcggcgtcccg

SEQ ID NO: 4940718 - DNA, 25 bp, Homo sapien
tagttactcagggccccaaaactgc

SEQ ID NO: 4940719 - DNA, 25 bp, Homo sapien
cgggggcgcggcgtcagctctgtcg

SEQ ID NO: 4940720 - DNA, 25 bp, Homo sapien
ggcgggggcgcggcgtcagctctgt

SEQ ID NO: 4940721 - DNA, 25 bp, Homo sapien
ggggcgcggcgtcagctctgtcgcg

SEQ ID NO: 4940722 - DNA, 25 bp, Homo sapien
gggcgcggcgtcagctctgtcgcgc

SEQ ID NO: 4940723 - DNA, 25 bp, Homo sapien
tcacctcggggtacaggtagcggcc

SEQ ID NO: 4940724 - DNA, 25 bp, Homo sapien
cgcgtgcacgcgacagggtttctcg

SEQ ID NO: 4940725 - DNA, 25 bp, Homo sapien
ggagagcttgcggtcggcgggctcg

SEQ ID NO: 4940726 - DNA, 25 bp, Homo sapien
tgttcacgctgttggtgcggtctcg

SEQ ID NO: 4940727 - DNA, 25 bp, Homo sapien
tgcagatctgtttgggctgggtgtt

SEQ ID NO: 4940728 - DNA, 25 bp, Homo sapien
ggtgttctcgccgtcgcgggcggga

SEQ ID NO: 4940729 - DNA, 25 bp, Homo sapien
tgtccgtcgccgcaggcctcgcccg

SEQ ID NO: 4940730 - DNA, 25 bp, Homo sapien
cgccgcgtggaagaaggcgggcccg

SEQ ID NO: 4940731 - DNA, 25 bp, Homo sapien
ggagctcgcgcgtgctgtctggaga

SEQ ID NO: 4940732 - DNA, 25 bp, Homo sapien
ggagcatactgctgcacagccgaaa

SEQ ID NO: 4940733 - DNA, 25 bp, Homo sapien
aaagccgtgccgtattttctccctg

SEQ ID NO: 4940734 - DNA, 25 bp, Homo sapien
agggaggagtgtcaggccccggcag

SEQ ID NO: 4940735 - DNA, 25 bp, Homo sapien
tgcgaatcgctgtctttctgtcgcg

SEQ ID NO: 4940736 - DNA, 25 bp, Homo sapien
aaaagccagcgcagaaagttccagt

SEQ ID NO: 4940737 - DNA, 25 bp, Homo sapien
cacagtggccggaagaaaagccagc

SEQ ID NO: 4940738 - DNA, 25 bp, Homo sapien
gtctgtacgtccgtctgtccctcgg

SEQ ID NO: 4940739 - DNA, 25 bp, Homo sapien
tgtgtgtagcctgactgccgcgtgc

SEQ ID NO: 4940740 - DNA, 25 bp, Homo sapien
gctgcactcagttgtccggtttggg

SEQ ID NO: 4940741 - DNA, 25 bp, Homo sapien
ttggccggcttgaaggccctcctag

SEQ ID NO: 4940742 - DNA, 25 bp, Homo sapien
ggcttgaaggccctcctaggcctgg

SEQ ID NO: 4940743 - DNA, 25 bp, Homo sapien
ggcctgtccttgagacccatgatgg

SEQ ID NO: 4940744 - DNA, 25 bp, Homo sapien
gcctgtgatcgtcagggcccatggt

SEQ ID NO: 4940745 - DNA, 25 bp, Homo sapien
acggtcatggcccttggtggtcatg

SEQ ID NO: 4940746 - DNA, 25 bp, Homo sapien
catggtggtcttagggcctgtggcg

SEQ ID NO: 4940747 - DNA, 25 bp, Homo sapien
cccggggcccagcatggccgccgcc

SEQ ID NO: 4940748 - DNA, 25 bp, Homo sapien
gggcccagcatggccgccgccatct

SEQ ID NO: 4940749 - DNA, 25 bp, Homo sapien
agccccggggcccagcatggccgcc

SEQ ID NO: 4940750 - DNA, 25 bp, Homo sapien
ccgccgccatcttgcaacgggcgcg

SEQ ID NO: 4940751 - DNA, 25 bp, Homo sapien
agcaaggagggaataggcggaggga

SEQ ID NO: 4940752 - DNA, 25 bp, Homo sapien
ggccgggctaacgccgtcgccgcgc

SEQ ID NO: 4940753 - DNA, 25 bp, Homo sapien
ggagcggccgcaaagaggggccgag

SEQ ID NO: 4940754 - DNA, 25 bp, Homo sapien
ctcgagcaaggagggaataggcgga

SEQ ID NO: 4940755 - DNA, 25 bp, Homo sapien
caggaaggccgggacgttgctgggc

SEQ ID NO: 4940756 - DNA, 25 bp, Homo sapien
ctccagcagatgagcgcgtcggtgt

SEQ ID NO: 4940757 - DNA, 25 bp, Homo sapien
tcggtgtccgggtcgctcacgaggg

SEQ ID NO: 4940758 - DNA, 25 bp, Homo sapien
ccgggtcgctcacgagggtccacag

SEQ ID NO: 4940759 - DNA, 25 bp, Homo sapien
tccagcagatgagcgcgtcggtgtc

SEQ ID NO: 4940760 - DNA, 25 bp, Homo sapien
aagctgaagtgcggcagggcccctc

SEQ ID NO: 4940761 - DNA, 25 bp, Homo sapien
ctccacttcacgtgccaagtcctga

SEQ ID NO: 4940762 - DNA, 25 bp, Homo sapien
tctcctaatagttgccgacccagca

SEQ ID NO: 4940763 - DNA, 25 bp, Homo sapien
gtcctgactttctcctaatagttgc

SEQ ID NO: 4940764 - DNA, 25 bp, Homo sapien
gactttctcctaatagttgccgacc

SEQ ID NO: 4940765 - DNA, 25 bp, Homo sapien
tttacttctgcaaaccggagctgtc

SEQ ID NO: 4940766 - DNA, 25 bp, Homo sapien
tccggtcttgcagggtcggaccatg

SEQ ID NO: 4940767 - DNA, 25 bp, Homo sapien
aaccggagctgtccggtcttgcagg

SEQ ID NO: 4940768 - DNA, 25 bp, Homo sapien
cagggtcggaccatgtaaacaagcc

SEQ ID NO: 4940769 - DNA, 25 bp, Homo sapien
agccgggatgtgaacagcagattct

SEQ ID NO: 4940770 - DNA, 25 bp, Homo sapien
ggacacgacgtcacagccgggatgt

SEQ ID NO: 4940771 - DNA, 25 bp, Homo sapien
gaacagcagattctgatctccaact

SEQ ID NO: 4940772 - DNA, 25 bp, Homo sapien
ggatgtgaacagcagattctgatct

SEQ ID NO: 4940773 - DNA, 25 bp, Homo sapien
agaactctggggtcttagctcctgg

SEQ ID NO: 4940774 - DNA, 25 bp, Homo sapien
gccacacatgcttggtggcaccctg

SEQ ID NO: 4940775 - DNA, 25 bp, Homo sapien
cactctgtaggtaaagcagagcctc

SEQ ID NO: 4940776 - DNA, 25 bp, Homo sapien
tccaaaagctcccaatgatcagtgg

SEQ ID NO: 4940777 - DNA, 25 bp, Homo sapien
tgctgtcctccacgacttgctgggt

SEQ ID NO: 4940778 - DNA, 25 bp, Homo sapien
ctgtgctgtcctccacgacttgctg

SEQ ID NO: 4940779 - DNA, 25 bp, Homo sapien
gtgggtggggtgctcatgggaatga

SEQ ID NO: 4940780 - DNA, 25 bp, Homo sapien
tgctcttatgtggatccccgggatc

SEQ ID NO: 4940781 - DNA, 25 bp, Homo sapien
cacgtgcacgcccatgctcttatgt

SEQ ID NO: 4940782 - DNA, 25 bp, Homo sapien
gatccccgggatcataaccttgtgg

SEQ ID NO: 4940783 - DNA, 25 bp, Homo sapien
tgcacgcccatgctcttatgtggat

SEQ ID NO: 4940784 - DNA, 25 bp, Homo sapien
catccttctagagtctttccagctg

SEQ ID NO: 4940785 - DNA, 25 bp, Homo sapien
gagccccagggtttcagcacatcct

SEQ ID NO: 4940786 - DNA, 25 bp, Homo sapien
atccaggagcccacatctaaggagg

SEQ ID NO: 4940787 - DNA, 25 bp, Homo sapien
aggagcccacatctaaggaggcccc

SEQ ID NO: 4940788 - DNA, 25 bp, Homo sapien
catcttgggccaaataccagatctt

SEQ ID NO: 4940789 - DNA, 25 bp, Homo sapien
tgcctgccgtgggagctccggacac

SEQ ID NO: 4940790 - DNA, 25 bp, Homo sapien
atcttgggccaaataccagatcttc

SEQ ID NO: 4940791 - DNA, 25 bp, Homo sapien
cctgccgtgggagctccggacacga

SEQ ID NO: 4940792 - DNA, 25 bp, Homo sapien
aatctcctgacctcctgatctcgtg

SEQ ID NO: 4940793 - DNA, 25 bp, Homo sapien
caatctcctgacctcctgatctcgt

SEQ ID NO: 4940794 - DNA, 25 bp, Homo sapien
atctcctgacctcctgatctcgtga

SEQ ID NO: 4940795 - DNA, 25 bp, Homo sapien
gtgttctcgccacacaaggaccaag

SEQ ID NO: 4940796 - DNA, 25 bp, Homo sapien
aagagcagcacaatcgccctcatct

SEQ ID NO: 4940797 - DNA, 25 bp, Homo sapien
gagccacccgcacctttctcataaa

SEQ ID NO: 4940798 - DNA, 25 bp, Homo sapien
gtctggttctgtccacatctgagcc

SEQ ID NO: 4940799 - DNA, 25 bp, Homo sapien
tcggctggccggctgttccctctcc

SEQ ID NO: 4940800 - DNA, 25 bp, Homo sapien
cggctggccggctgttccctctccg

SEQ ID NO: 4940801 - DNA, 25 bp, Homo sapien
ctcggctggccggctgttccctctc

SEQ ID NO: 4940802 - DNA, 25 bp, Homo sapien
ccagcctcctgccaagtcaaagctg

SEQ ID NO: 4940803 - DNA, 25 bp, Homo sapien
cagcctcctgccaagtcaaagctgt

SEQ ID NO: 4940804 - DNA, 25 bp, Homo sapien
gccacaagcctcttgttccagcctc

SEQ ID NO: 4940805 - DNA, 25 bp, Homo sapien
caggccacaagcctcttgttccagc

SEQ ID NO: 4940806 - DNA, 25 bp, Homo sapien
gagtatcttctcaaagggctccctg

SEQ ID NO: 4940807 - DNA, 25 bp, Homo sapien
ccaaaacgtgaacagtgccgtattc

SEQ ID NO: 4940808 - DNA, 25 bp, Homo sapien
gtgccgtattctacaaggtggcccc

SEQ ID NO: 4940809 - DNA, 25 bp, Homo sapien
ttacatagaaagtgtctgtgtctct

SEQ ID NO: 4940810 - DNA, 25 bp, Homo sapien
gagagaggccgtccataaggaaaga

SEQ ID NO: 4940811 - DNA, 25 bp, Homo sapien
gaaaagctacgaagagccctgctgg

SEQ ID NO: 4940812 - DNA, 25 bp, Homo sapien
cagaggctgctgtcttacccagtgc

SEQ ID NO: 4940813 - DNA, 25 bp, Homo sapien
tagggtagagcacccatgctgggaa

SEQ ID NO: 4940814 - DNA, 25 bp, Homo sapien
gactaagatcctggtgcacgtggcc

SEQ ID NO: 4940815 - DNA, 25 bp, Homo sapien
tttcctggatctcatgggctgggca

SEQ ID NO: 4940816 - DNA, 25 bp, Homo sapien
catgatgggtactacactcagggag

SEQ ID NO: 4940817 - DNA, 25 bp, Homo sapien
ggtacgaacattaagcctggtggca

SEQ ID NO: 4940818 - DNA, 25 bp, Homo sapien
gacagataaccacgacaaacagcag

SEQ ID NO: 4940819 - DNA, 25 bp, Homo sapien
ttttccagccggctgcgctggttca

SEQ ID NO: 4940820 - DNA, 25 bp, Homo sapien
gggagtccgagctccagagctgcca

SEQ ID NO: 4940821 - DNA, 25 bp, Homo sapien
gagctgccactctcaaccgatgaga

SEQ ID NO: 4940822 - DNA, 25 bp, Homo sapien
gctggagtgcaccagcaccaacatg

SEQ ID NO: 4940823 - DNA, 25 bp, Homo sapien
gagtgcaccagcaccaacatggctc

SEQ ID NO: 4940824 - DNA, 25 bp, Homo sapien
gtagctgactataggcgccaccacg

SEQ ID NO: 4940825 - DNA, 25 bp, Homo sapien
tggagtgcaccagcaccaacatggc

SEQ ID NO: 4940826 - DNA, 25 bp, Homo sapien
gaaggcttaggggacagcgagaagc

SEQ ID NO: 4940827 - DNA, 25 bp, Homo sapien
aggcttaggggacagcgagaagccc

SEQ ID NO: 4940828 - DNA, 25 bp, Homo sapien
cgaaggcttaggggacagcgagaag

SEQ ID NO: 4940829 - DNA, 25 bp, Homo sapien
gcttaggggacagcgagaagcccac

SEQ ID NO: 4940830 - DNA, 25 bp, Homo sapien
gagctcaggcccagagctatcagga

SEQ ID NO: 4940831 - DNA, 25 bp, Homo sapien
cttccatttctctaccgagctcagg

SEQ ID NO: 4940832 - DNA, 25 bp, Homo sapien
tctaccgagctcaggcccagagcta

SEQ ID NO: 4940833 - DNA, 25 bp, Homo sapien
cccagagctatcaggaggcgctggt

SEQ ID NO: 4940834 - DNA, 25 bp, Homo sapien
gaacagcgaaggaaatggagcccta

SEQ ID NO: 4940835 - DNA, 25 bp, Homo sapien
gtgggcagatgcgaggccttcctct

SEQ ID NO: 4940836 - DNA, 25 bp, Homo sapien
aaacacagtcgcgttcagaaatcca

SEQ ID NO: 4940837 - DNA, 25 bp, Homo sapien
cattactcccgaggaaaacacagtc

SEQ ID NO: 4940838 - DNA, 25 bp, Homo sapien
ccgcacgaagctggccatgttgttg

SEQ ID NO: 4940839 - DNA, 25 bp, Homo sapien
gcttgaagtacttgggcagcacctc

SEQ ID NO: 4940840 - DNA, 25 bp, Homo sapien
gtcgaacacgtggaagctgttcccg

SEQ ID NO: 4940841 - DNA, 25 bp, Homo sapien
tccttggcaaactggccctggtcga

SEQ ID NO: 4940842 - DNA, 25 bp, Homo sapien
gaccccaggttcatacccacaagga

SEQ ID NO: 4940843 - DNA, 25 bp, Homo sapien
ttggccatggtcagaccctgccctg

SEQ ID NO: 4940844 - DNA, 25 bp, Homo sapien
tccggcttcacggttcttccatggg

SEQ ID NO: 4940845 - DNA, 25 bp, Homo sapien
gacacacgtggagtacagctccggc

SEQ ID NO: 4940846 - DNA, 25 bp, Homo sapien
ctgctcgatgtggaccactttccgg

SEQ ID NO: 4940847 - DNA, 25 bp, Homo sapien
tctggcttgaccaggccgccctgct

SEQ ID NO: 4940848 - DNA, 25 bp, Homo sapien
gctcgatgtggaccactttccggaa

SEQ ID NO: 4940849 - DNA, 25 bp, Homo sapien
tcgatgtggaccactttccggaagc

SEQ ID NO: 4940850 - DNA, 25 bp, Homo sapien
aagcatgggtgctggaactccgtgt

SEQ ID NO: 4940851 - DNA, 25 bp, Homo sapien
gaagcatgggtgctggaactccgtg

SEQ ID NO: 4940852 - DNA, 25 bp, Homo sapien
ggaagcatgggtgctggaactccgt

SEQ ID NO: 4940853 - DNA, 25 bp, Homo sapien
agcatgggtgctggaactccgtgtc

SEQ ID NO: 4940854 - DNA, 25 bp, Homo sapien
tgcacgtccgtcagcagcttggtga

SEQ ID NO: 4940855 - DNA, 25 bp, Homo sapien
tcctggcggatctttatgtcttcac

SEQ ID NO: 4940856 - DNA, 25 bp, Homo sapien
gagcttggagtccatgcactcctgc

SEQ ID NO: 4940857 - DNA, 25 bp, Homo sapien
agcagcttggtgacgctgtcctggc

SEQ ID NO: 4940858 - DNA, 25 bp, Homo sapien
taggctcctgctaaggtttccccag

SEQ ID NO: 4940859 - DNA, 25 bp, Homo sapien
gagtcttcttggtaggccaggtcca

SEQ ID NO: 4940860 - DNA, 25 bp, Homo sapien
cccatgcaggagagtctgaggccaa

SEQ ID NO: 4940861 - DNA, 25 bp, Homo sapien
gagccccaaagtggacgtgagacct

SEQ ID NO: 4940862 - DNA, 25 bp, Homo sapien
tgtcccatgtcctgtaggtgctcag

SEQ ID NO: 4940863 - DNA, 25 bp, Homo sapien
cggttcttcaggctgcgacactggc

SEQ ID NO: 4940864 - DNA, 25 bp, Homo sapien
atggatccatgcgagccaggtgcac

SEQ ID NO: 4940865 - DNA, 25 bp, Homo sapien
cctggcaaacacctggagggctgcc

SEQ ID NO: 4940866 - DNA, 25 bp, Homo sapien
cccaggatgagaacttgtgtgtgga

SEQ ID NO: 4940867 - DNA, 25 bp, Homo sapien
gagcaggggtaagtgtgaccatgtc

SEQ ID NO: 4940868 - DNA, 25 bp, Homo sapien
agggcttgctggtcccactgcccct

SEQ ID NO: 4940869 - DNA, 25 bp, Homo sapien
tggcccaccccaggatgagaacttg

SEQ ID NO: 4940870 - DNA, 25 bp, Homo sapien
ggctggccacctcccgccacagagc

SEQ ID NO: 4940871 - DNA, 25 bp, Homo sapien
tgctgggcatgcttctgccgaaggc

SEQ ID NO: 4940872 - DNA, 25 bp, Homo sapien
catgcttctgccgaaggctggccac

SEQ ID NO: 4940873 - DNA, 25 bp, Homo sapien
ttgacgactttctgttgctgggcat

SEQ ID NO: 4940874 - DNA, 25 bp, Homo sapien
ggatccggtttgactgcaccagtga

SEQ ID NO: 4940875 - DNA, 25 bp, Homo sapien
ccccaggatccggtttgactgcacc

SEQ ID NO: 4940876 - DNA, 25 bp, Homo sapien
ccaggatccggtttgactgcaccag

SEQ ID NO: 4940877 - DNA, 25 bp, Homo sapien
caggatccggtttgactgcaccagt

SEQ ID NO: 4940878 - DNA, 25 bp, Homo sapien
ccgtggacgtgctccagggagaact

SEQ ID NO: 4940879 - DNA, 25 bp, Homo sapien
aactgccggctatacttgggcatgg

SEQ ID NO: 4940880 - DNA, 25 bp, Homo sapien
tgtgctgagccactgtcgttcagca

SEQ ID NO: 4940881 - DNA, 25 bp, Homo sapien
gagccactgtcgttcagcatcaggg

SEQ ID NO: 4940882 - DNA, 25 bp, Homo sapien
acagcatcaggggcgtagaggctgg

SEQ ID NO: 4940883 - DNA, 25 bp, Homo sapien
agcatcaggggcgtagaggctggag

SEQ ID NO: 4940884 - DNA, 25 bp, Homo sapien
catcaggggcgtagaggctggagct

SEQ ID NO: 4940885 - DNA, 25 bp, Homo sapien
tcaggggcgtagaggctggagctgc

SEQ ID NO: 4940886 - DNA, 25 bp, Homo sapien
tctcgtctatgctcccgccggggga

SEQ ID NO: 4940887 - DNA, 25 bp, Homo sapien
ctctcgtctatgctcccgccggggg

SEQ ID NO: 4940888 - DNA, 25 bp, Homo sapien
gctcctccttgacacgcaccagggg

SEQ ID NO: 4940889 - DNA, 25 bp, Homo sapien
gatggagtcaatgagggcggtcggg

SEQ ID NO: 4940890 - DNA, 25 bp, Homo sapien
ggtgtccacggaagatgggcgcccg

SEQ ID NO: 4940891 - DNA, 25 bp, Homo sapien
gggcaggttcactctcccgcaggat

SEQ ID NO: 4940892 - DNA, 25 bp, Homo sapien
aggctacgctgaggcacttttcagg

SEQ ID NO: 4940893 - DNA, 25 bp, Homo sapien
ccaggcaggctacgctgaggcactt

SEQ ID NO: 4940894 - DNA, 25 bp, Homo sapien
tccgtgtggcccctggcgtccgtga

SEQ ID NO: 4940895 - DNA, 25 bp, Homo sapien
tgtccaggcaggctacgctgaggca

SEQ ID NO: 4940896 - DNA, 25 bp, Homo sapien
gcagcctgtccggacatgcccgtgg

SEQ ID NO: 4940897 - DNA, 25 bp, Homo sapien
ccggcagcctgtccggacatgcccg

SEQ ID NO: 4940898 - DNA, 25 bp, Homo sapien
ggcccggcagcctgtccggacatgc

SEQ ID NO: 4940899 - DNA, 25 bp, Homo sapien
ggcagcctgtccggacatgcccgtg

SEQ ID NO: 4940900 - DNA, 25 bp, Homo sapien
tgtgtctgggcagcacgacctgcca

SEQ ID NO: 4940901 - DNA, 25 bp, Homo sapien
gtgtctgggcagcacgacctgccag

SEQ ID NO: 4940902 - DNA, 25 bp, Homo sapien
gggcgaccctagacatctgtggagt

SEQ ID NO: 4940903 - DNA, 25 bp, Homo sapien
gaagaggcgggcgaccctagacatc

SEQ ID NO: 4940904 - DNA, 25 bp, Homo sapien
tggacttggccatgcggagaggaag

SEQ ID NO: 4940905 - DNA, 25 bp, Homo sapien
aggcgggcgaccctagacatctgtg

SEQ ID NO: 4940906 - DNA, 25 bp, Homo sapien
tgaggtttcccgttgcactgggaaa

SEQ ID NO: 4940907 - DNA, 25 bp, Homo sapien
acacctgggctatgggacggacagc

SEQ ID NO: 4940908 - DNA, 25 bp, Homo sapien
gacccacggtctggtggctgtgacc

SEQ ID NO: 4940909 - DNA, 25 bp, Homo sapien
tattcagctccagcacaaggatcag

SEQ ID NO: 4940910 - DNA, 25 bp, Homo sapien
gagggggcagcgcattcgaggacgg

SEQ ID NO: 4940911 - DNA, 25 bp, Homo sapien
agggggcagcgcattcgaggacggc

SEQ ID NO: 4940912 - DNA, 25 bp, Homo sapien
ccccgtgtacgcctgcacaggctgg

SEQ ID NO: 4940913 - DNA, 25 bp, Homo sapien
caggctgcacccccgtgtacgcctg

SEQ ID NO: 4940914 - DNA, 25 bp, Homo sapien
ggcggtacctgaaccagtgccccag

SEQ ID NO: 4940915 - DNA, 25 bp, Homo sapien
cgggataaggcggtacctgaaccag

SEQ ID NO: 4940916 - DNA, 25 bp, Homo sapien
ataaggcggtacctgaaccagtgcc

SEQ ID NO: 4940917 - DNA, 25 bp, Homo sapien
ctggcccgggataaggcggtacctg

SEQ ID NO: 4940918 - DNA, 25 bp, Homo sapien
gagtccatagcatccaagtggtcac

SEQ ID NO: 4940919 - DNA, 25 bp, Homo sapien
ggagtccatagcatccaagtggtca

SEQ ID NO: 4940920 - DNA, 25 bp, Homo sapien
gcatggtctgcaggttatccaggtt

SEQ ID NO: 4940921 - DNA, 25 bp, Homo sapien
ggagggaagtcagaacagcacccgg

SEQ ID NO: 4940922 - DNA, 25 bp, Homo sapien
agggagggaagtcagaacagcaccc

SEQ ID NO: 4940923 - DNA, 25 bp, Homo sapien
ggagggagggaagtcagaacagcac

SEQ ID NO: 4940924 - DNA, 25 bp, Homo sapien
gggagggaagtcagaacagcacccg

SEQ ID NO: 4940925 - DNA, 25 bp, Homo sapien
gcacggtcaccgaggggctgaacag

SEQ ID NO: 4940926 - DNA, 25 bp, Homo sapien
gtcgggcacggtcaccgaggggctg

SEQ ID NO: 4940927 - DNA, 25 bp, Homo sapien
ggcacggtcaccgaggggctgaaca

SEQ ID NO: 4940928 - DNA, 25 bp, Homo sapien
cgggcacggtcaccgaggggctgaa

SEQ ID NO: 4940929 - DNA, 25 bp, Homo sapien
ggctgctgtcaaggtcaggcaggct

SEQ ID NO: 4940930 - DNA, 25 bp, Homo sapien
ccaggctgctgtcaaggtcaggcag

SEQ ID NO: 4940931 - DNA, 25 bp, Homo sapien
ctgctgtcaaggtcaggcaggctca

SEQ ID NO: 4940932 - DNA, 25 bp, Homo sapien
tgctgtcaaggtcaggcaggctcat

SEQ ID NO: 4940933 - DNA, 25 bp, Homo sapien
cggtattgtgagcactcccgctggt

SEQ ID NO: 4940934 - DNA, 25 bp, Homo sapien
tggagacggtattgtgagcactccc

SEQ ID NO: 4940935 - DNA, 25 bp, Homo sapien
gggtggagacggtattgtgagcact

SEQ ID NO: 4940936 - DNA, 25 bp, Homo sapien
gagacggtattgtgagcactcccgc

SEQ ID NO: 4940937 - DNA, 25 bp, Homo sapien
gggggctcctggggagacaggagct

SEQ ID NO: 4940938 - DNA, 25 bp, Homo sapien
ctcgggaggcctggggggctcctgg

SEQ ID NO: 4940939 - DNA, 25 bp, Homo sapien
ggctcctggggagacaggagctctt

SEQ ID NO: 4940940 - DNA, 25 bp, Homo sapien
tcctggggagacaggagctcttgga

SEQ ID NO: 4940941 - DNA, 25 bp, Homo sapien
ctgaatccgggctgctgttctctgc

SEQ ID NO: 4940942 - DNA, 25 bp, Homo sapien
tcggcgaagccgtccccttcggaga

SEQ ID NO: 4940943 - DNA, 25 bp, Homo sapien
agctcaaacagcaccggcaggtcgt

SEQ ID NO: 4940944 - DNA, 25 bp, Homo sapien
ggagaagtaggagccctctcccagc

SEQ ID NO: 4940945 - DNA, 25 bp, Homo sapien
ggcaggtcgttgctcccggtgtcca

SEQ ID NO: 4940946 - DNA, 25 bp, Homo sapien
aggccagggtgaccctcctgaccag

SEQ ID NO: 4940947 - DNA, 25 bp, Homo sapien
tgtttatagatctctgcctgtcttg

SEQ ID NO: 4940948 - DNA, 25 bp, Homo sapien
agacccgagcccgtttgtcctactg

SEQ ID NO: 4940949 - DNA, 25 bp, Homo sapien
ttgtccgtccatccactgtgtgtat

SEQ ID NO: 4940950 - DNA, 25 bp, Homo sapien
ctcccggcgccggaggacagggtcg

SEQ ID NO: 4940951 - DNA, 25 bp, Homo sapien
ggtcgcggccctcgagccacggcgg

SEQ ID NO: 4940952 - DNA, 25 bp, Homo sapien
ggcgccggaggacagggtcgcggcc

SEQ ID NO: 4940953 - DNA, 25 bp, Homo sapien
ccggcgccggaggacagggtcgcgg

SEQ ID NO: 4940954 - DNA, 25 bp, Homo sapien
cgcgcgggggaattccccactcgcg

SEQ ID NO: 4940955 - DNA, 25 bp, Homo sapien
gaattccccactcgcgcaggctgag

SEQ ID NO: 4940956 - DNA, 25 bp, Homo sapien
ggctgaggcatccccgggacccctc

SEQ ID NO: 4940957 - DNA, 25 bp, Homo sapien
gggggaattccccactcgcgcaggc

SEQ ID NO: 4940958 - DNA, 25 bp, Homo sapien
gctcggagcccgtagacccggacca

SEQ ID NO: 4940959 - DNA, 25 bp, Homo sapien
gtgaggggacaatggcggcgccagg

SEQ ID NO: 4940960 - DNA, 25 bp, Homo sapien
ggcgggtgaggggacaatggcggcg

SEQ ID NO: 4940961 - DNA, 25 bp, Homo sapien
gcgctcggagcccgtagacccggac

SEQ ID NO: 4940962 - DNA, 25 bp, Homo sapien
agcgggagcaagagccgccccaatg

SEQ ID NO: 4940963 - DNA, 25 bp, Homo sapien
ccaatggttcccgcgggagcgcctg

SEQ ID NO: 4940964 - DNA, 25 bp, Homo sapien
agcgcctggccacgggacacatgtg

SEQ ID NO: 4940965 - DNA, 25 bp, Homo sapien
ggacacatgtgtgccgctgtgatgc

SEQ ID NO: 4940966 - DNA, 25 bp, Homo sapien
tggagtgcaatggagggcaatggtg

SEQ ID NO: 4940967 - DNA, 25 bp, Homo sapien
gggccggcagcctgcccacgacctc

SEQ ID NO: 4940968 - DNA, 25 bp, Homo sapien
ggcggcagcggacgagcggccaggc

SEQ ID NO: 4940969 - DNA, 25 bp, Homo sapien
agatgcctaagggccgggccggcag

SEQ ID NO: 4940970 - DNA, 25 bp, Homo sapien
cctccatcggctggcgcttccagct

SEQ ID NO: 4940971 - DNA, 25 bp, Homo sapien
tgctctacctcaacctggagtcctg

SEQ ID NO: 4940972 - DNA, 25 bp, Homo sapien
gcccaatttcagatatttgagcatt

SEQ ID NO: 4940973 - DNA, 25 bp, Homo sapien
cctggaggaagtccagtggtgtctg

SEQ ID NO: 4940974 - DNA, 25 bp, Homo sapien
gagtcctgccgctgccttccccggg

SEQ ID NO: 4940975 - DNA, 25 bp, Homo sapien
gagggcagcccctttttgacccaga

SEQ ID NO: 4940976 - DNA, 25 bp, Homo sapien
ctgcgagaactggacttgagtggcc

SEQ ID NO: 4940977 - DNA, 25 bp, Homo sapien
gaagtggtgccatacactgcgagaa

SEQ ID NO: 4940978 - DNA, 25 bp, Homo sapien
tcatctgggcctgtatggcacgtca

SEQ ID NO: 4940979 - DNA, 25 bp, Homo sapien
ttccctagcctagaggagctctgcc

SEQ ID NO: 4940980 - DNA, 25 bp, Homo sapien
tgttgaacctgatgtggctgcccaa

SEQ ID NO: 4940981 - DNA, 25 bp, Homo sapien
tttgtgagcaacgaggtcctgggcc

SEQ ID NO: 4940982 - DNA, 25 bp, Homo sapien
aacctgcgcttactggatcttcgtg

SEQ ID NO: 4940983 - DNA, 25 bp, Homo sapien
gcaccggcatcaaccgtaatagcat

SEQ ID NO: 4940984 - DNA, 25 bp, Homo sapien
cctggaggtgagcaccggcatcaac

SEQ ID NO: 4940985 - DNA, 25 bp, Homo sapien
ggtgagcaccggcatcaaccgtaat

SEQ ID NO: 4940986 - DNA, 25 bp, Homo sapien
tcaaccgtaatagcattccccttca

SEQ ID NO: 4940987 - DNA, 25 bp, Homo sapien
gacagccatcctgggcgcactgctg

SEQ ID NO: 4940988 - DNA, 25 bp, Homo sapien
caagttgtggctgacctacagctcc

SEQ ID NO: 4940989 - DNA, 25 bp, Homo sapien
agacgacagccatcctgggcgcact

SEQ ID NO: 4940990 - DNA, 25 bp, Homo sapien
aggcagggtcccgaatgcgcaagtt

SEQ ID NO: 4940991 - DNA, 25 bp, Homo sapien
tgtcctcggctcactttcctcaagc

SEQ ID NO: 4940992 - DNA, 25 bp, Homo sapien
ctccggctgccacggtgtgactgct

SEQ ID NO: 4940993 - DNA, 25 bp, Homo sapien
tagcctggacctacagcactccatg

SEQ ID NO: 4940994 - DNA, 25 bp, Homo sapien
tctggtcatgctagccaaagcctgc

SEQ ID NO: 4940995 - DNA, 25 bp, Homo sapien
atcagaggcggggacacccaagtag

SEQ ID NO: 4940996 - DNA, 25 bp, Homo sapien
gtactctaggaagtgggtcaggcac

SEQ ID NO: 4940997 - DNA, 25 bp, Homo sapien
cactctgggactgttcagtactcta

SEQ ID NO: 4940998 - DNA, 25 bp, Homo sapien
cttgggggcccaacgctgctccgtg

SEQ ID NO: 4940999 - DNA, 25 bp, Homo sapien
gaagtctcaggtacaccccgtgttg

SEQ ID NO: 4941000 - DNA, 25 bp, Homo sapien
agctccagaggctgaccctcatcca

SEQ ID NO: 4941001 - DNA, 25 bp, Homo sapien
cagaggctgaccctcatccactgga

SEQ ID NO: 4941002 - DNA, 25 bp, Homo sapien
atccactggaagtctcaggtacacc

SEQ ID NO: 4941003 - DNA, 25 bp, Homo sapien
gggagaccgcattcccttggaaatc

SEQ ID NO: 4941004 - DNA, 25 bp, Homo sapien
gaaagcatcggagcgcgcaccgctc

SEQ ID NO: 4941005 - DNA, 25 bp, Homo sapien
agcgtagcggcttgggccagacgtg

SEQ ID NO: 4941006 - DNA, 25 bp, Homo sapien
cctggtgcagattttcgggttgttg

SEQ ID NO: 4941007 - DNA, 25 bp, Homo sapien
cggcaggtccgacgcagagcccggg

SEQ ID NO: 4941008 - DNA, 25 bp, Homo sapien
gccaagcccaaggccgggctcaggt

SEQ ID NO: 4941009 - DNA, 25 bp, Homo sapien
ctcggccgaggactggtggtgggac

SEQ ID NO: 4941010 - DNA, 25 bp, Homo sapien
tgctggtgctgtccgaacccggccc

SEQ ID NO: 4941011 - DNA, 25 bp, Homo sapien
gcccccggcatggcccacgaccgga

SEQ ID NO: 4941012 - DNA, 25 bp, Homo sapien
ccgcccccggcatggcccacgaccg

SEQ ID NO: 4941013 - DNA, 25 bp, Homo sapien
ggcccgcccccggcatggcccacga

SEQ ID NO: 4941014 - DNA, 25 bp, Homo sapien
ccccggcatggcccacgaccggaag

SEQ ID NO: 4941015 - DNA, 25 bp, Homo sapien
cggcagcagccacgacccgactcac

SEQ ID NO: 4941016 - DNA, 25 bp, Homo sapien
ccggcagcagccacgacccgactca

SEQ ID NO: 4941017 - DNA, 25 bp, Homo sapien
cccggcagcagccacgacccgactc

SEQ ID NO: 4941018 - DNA, 25 bp, Homo sapien
gactcgggagccgtccggtccctgc

SEQ ID NO: 4941019 - DNA, 25 bp, Homo sapien
cgccacgccgggacaccgccgtccg

SEQ ID NO: 4941020 - DNA, 25 bp, Homo sapien
gcgctcccgctccagtgccggcttc

SEQ ID NO: 4941021 - DNA, 25 bp, Homo sapien
tgcgcctcccggtcccgcgcccagt

SEQ ID NO: 4941022 - DNA, 25 bp, Homo sapien
cacggtgcccgcgaccgcaagagcc

SEQ ID NO: 4941023 - DNA, 25 bp, Homo sapien
tctgctcggaggggcgccgccctct

SEQ ID NO: 4941024 - DNA, 25 bp, Homo sapien
ggtgcccgcgaccgcaagagccaag

SEQ ID NO: 4941025 - DNA, 25 bp, Homo sapien
gtgcccgcgaccgcaagagccaagt

SEQ ID NO: 4941026 - DNA, 25 bp, Homo sapien
aagcaggaagccggcccgagtcgct

SEQ ID NO: 4941027 - DNA, 25 bp, Homo sapien
aggagcgagtggagccctcctctcc

SEQ ID NO: 4941028 - DNA, 25 bp, Homo sapien
aggaggccgaaggagcgagtggagc

SEQ ID NO: 4941029 - DNA, 25 bp, Homo sapien
gcggggctggagtcaacgccaccac

SEQ ID NO: 4941030 - DNA, 25 bp, Homo sapien
ataggatgcagagccggagtcagaa

SEQ ID NO: 4941031 - DNA, 25 bp, Homo sapien
gaaacagataggatgcagagccgga

SEQ ID NO: 4941032 - DNA, 25 bp, Homo sapien
cagataggatgcagagccggagtca

SEQ ID NO: 4941033 - DNA, 25 bp, Homo sapien
agagaaacagataggatgcagagcc

SEQ ID NO: 4941034 - DNA, 25 bp, Homo sapien
cacctagggccagacacgctttggc

SEQ ID NO: 4941035 - DNA, 25 bp, Homo sapien
ttcttttcccacctagggccagaca

SEQ ID NO: 4941036 - DNA, 25 bp, Homo sapien
ggccagacacgctttggctctcctg

SEQ ID NO: 4941037 - DNA, 25 bp, Homo sapien
cagttcttttcccacctagggccag

SEQ ID NO: 4941038 - DNA, 25 bp, Homo sapien
ggtcagcaccggacgggcgggcgtg

SEQ ID NO: 4941039 - DNA, 25 bp, Homo sapien
aggtgggtcagcaccggacgggcgg

SEQ ID NO: 4941040 - DNA, 25 bp, Homo sapien
agatcccattgaccgcagcccagga

SEQ ID NO: 4941041 - DNA, 25 bp, Homo sapien
ccatgccgaagagagccaccagcag

SEQ ID NO: 4941042 - DNA, 25 bp, Homo sapien
tctggaagctctctgaccaccacag

SEQ ID NO: 4941043 - DNA, 25 bp, Homo sapien
ctctggaagctctctgaccaccaca

SEQ ID NO: 4941044 - DNA, 25 bp, Homo sapien
cctctggaagctctctgaccaccac

SEQ ID NO: 4941045 - DNA, 25 bp, Homo sapien
caggaagaatgaccgtaagaagcga

SEQ ID NO: 4941046 - DNA, 25 bp, Homo sapien
gaaagtgacattcgaggcacagcat

SEQ ID NO: 4941047 - DNA, 25 bp, Homo sapien
cagagccacaagcacagagacgtaa

SEQ ID NO: 4941048 - DNA, 25 bp, Homo sapien
tgccagcacaaaggccagtgctaag

SEQ ID NO: 4941049 - DNA, 25 bp, Homo sapien
gcctgatcctaactcccctgtgggt

SEQ ID NO: 4941050 - DNA, 25 bp, Homo sapien
tgtgggtacagatggtggtggcggc

SEQ ID NO: 4941051 - DNA, 25 bp, Homo sapien
acagatggtggtggcggcaacagca

SEQ ID NO: 4941052 - DNA, 25 bp, Homo sapien
cctgatcctaactcccctgtgggta

SEQ ID NO: 4941053 - DNA, 25 bp, Homo sapien
cacgccattggtcagcgcgttggtg

SEQ ID NO: 4941054 - DNA, 25 bp, Homo sapien
cagacgcccgtagggtaagcaggaa

SEQ ID NO: 4941055 - DNA, 25 bp, Homo sapien
tgataggccttagggtctggaccag

SEQ ID NO: 4941056 - DNA, 25 bp, Homo sapien
actgcgggctgatagaagctgatag

SEQ ID NO: 4941057 - DNA, 25 bp, Homo sapien
ctcccagccctgagttccacccgca

SEQ ID NO: 4941058 - DNA, 25 bp, Homo sapien
actgccagcgccatcaggtagcccc

SEQ ID NO: 4941059 - DNA, 25 bp, Homo sapien
cccccacagaacacgcccagcagag

SEQ ID NO: 4941060 - DNA, 25 bp, Homo sapien
aggactgccagcgccatcaggtagc

SEQ ID NO: 4941061 - DNA, 25 bp, Homo sapien
aggtagcccccacagaacacgccca

SEQ ID NO: 4941062 - DNA, 25 bp, Homo sapien
tgagggggacacagcaccagctgag

SEQ ID NO: 4941063 - DNA, 25 bp, Homo sapien
gagggggacacagcaccagctgagc

SEQ ID NO: 4941064 - DNA, 25 bp, Homo sapien
ctgagggggacacagcaccagctga

SEQ ID NO: 4941065 - DNA, 25 bp, Homo sapien
caccttcacgtaggagaacacgcca

SEQ ID NO: 4941066 - DNA, 25 bp, Homo sapien
tgccaccttcacgtaggagaacacg

SEQ ID NO: 4941067 - DNA, 25 bp, Homo sapien
agctggctgccaccttcacgtagga

SEQ ID NO: 4941068 - DNA, 25 bp, Homo sapien
tcacgtaggagaacacgccaagaca

SEQ ID NO: 4941069 - DNA, 25 bp, Homo sapien
gagtcacaggggtctgcacagtcct

SEQ ID NO: 4941070 - DNA, 25 bp, Homo sapien
tttctgctgtggaacacgtgataga

SEQ ID NO: 4941071 - DNA, 25 bp, Homo sapien
gggaacatagcaacagcgccgagca

SEQ ID NO: 4941072 - DNA, 25 bp, Homo sapien
tggaacacgtgatagatgctggtcg

SEQ ID NO: 4941073 - DNA, 25 bp, Homo sapien
gtgtaccggtgtgcgggcctcctgg

SEQ ID NO: 4941074 - DNA, 25 bp, Homo sapien
ggaaagccaggatctcctatggagt

SEQ ID NO: 4941075 - DNA, 25 bp, Homo sapien
gtgtgtaggtgtccacgagtgtacc

SEQ ID NO: 4941076 - DNA, 25 bp, Homo sapien
tggcagcattgagggaaagacaggt

SEQ ID NO: 4941077 - DNA, 25 bp, Homo sapien
tattacgcaaaccacatgtaggtcc

SEQ ID NO: 4941078 - DNA, 25 bp, Homo sapien
gttttattacgcaaaccacatgtag

SEQ ID NO: 4941079 - DNA, 25 bp, Homo sapien
acgcaaaccacatgtaggtcccagg

SEQ ID NO: 4941080 - DNA, 25 bp, Homo sapien
tttattacgcaaaccacatgtaggt

SEQ ID NO: 4941081 - DNA, 25 bp, Homo sapien
tgaccaccgaagctggtagctcgtg

SEQ ID NO: 4941082 - DNA, 25 bp, Homo sapien
tgactgtacaatccgtgagaccagc

SEQ ID NO: 4941083 - DNA, 25 bp, Homo sapien
tctgggctcagagggcatgactgta

SEQ ID NO: 4941084 - DNA, 25 bp, Homo sapien
gcccagggcagttccaagaagcaat

SEQ ID NO: 4941085 - DNA, 25 bp, Homo sapien
agcccagggagaagacagctgtagc

SEQ ID NO: 4941086 - DNA, 25 bp, Homo sapien
tgtagccaagtctgcctgaagaaac

SEQ ID NO: 4941087 - DNA, 25 bp, Homo sapien
ctgaagaaacagtttggggcctttg

SEQ ID NO: 4941088 - DNA, 25 bp, Homo sapien
ggctaggggcagtgtgccagcagcc

SEQ ID NO: 4941089 - DNA, 25 bp, Homo sapien
atccccagtgcctgcacgctccctg

SEQ ID NO: 4941090 - DNA, 25 bp, Homo sapien
gccaggcccgtcatactgatcacag

SEQ ID NO: 4941091 - DNA, 25 bp, Homo sapien
ccgtcatactgatcacagttcggtg

SEQ ID NO: 4941092 - DNA, 25 bp, Homo sapien
cttgctgccaggcccgtcatactga

SEQ ID NO: 4941093 - DNA, 25 bp, Homo sapien
gaggctttccgggtcacaggggctc

SEQ ID NO: 4941094 - DNA, 25 bp, Homo sapien
actagaggctttccgggtcacaggg

SEQ ID NO: 4941095 - DNA, 25 bp, Homo sapien
ccagactagaggctttccgggtcac

SEQ ID NO: 4941096 - DNA, 25 bp, Homo sapien
cagactagaggctttccgggtcaca

SEQ ID NO: 4941097 - DNA, 25 bp, Homo sapien
ttaccaggcgacttctgaagctcac

SEQ ID NO: 4941098 - DNA, 25 bp, Homo sapien
ctagaaccctcagtacctgcaaccc

SEQ ID NO: 4941099 - DNA, 25 bp, Homo sapien
cttttaccaggcgacttctgaagct

SEQ ID NO: 4941100 - DNA, 25 bp, Homo sapien
ttcttcttttaccaggcgacttctg

SEQ ID NO: 4941101 - DNA, 25 bp, Homo sapien
gagcctccatggatgcctttgatcg

SEQ ID NO: 4941102 - DNA, 25 bp, Homo sapien
tccatggatgcctttgatcgctggc

SEQ ID NO: 4941103 - DNA, 25 bp, Homo sapien
gcctccatggatgcctttgatcgct

SEQ ID NO: 4941104 - DNA, 25 bp, Homo sapien
gcagagcctccatggatgcctttga

SEQ ID NO: 4941105 - DNA, 25 bp, Homo sapien
cacaagacaccatgcaaatacctac

SEQ ID NO: 4941106 - DNA, 25 bp, Homo sapien
actgaggaggctcagtaagagcctc

SEQ ID NO: 4941107 - DNA, 25 bp, Homo sapien
caccatgcaaatacctacgttgcca

SEQ ID NO: 4941108 - DNA, 25 bp, Homo sapien
aatcctccgcccacaagacaccatg

SEQ ID NO: 4941109 - DNA, 25 bp, Homo sapien
tctactaagcaacgggtgacttccc

SEQ ID NO: 4941110 - DNA, 25 bp, Homo sapien
gactccctttcgcagtctactaagc

SEQ ID NO: 4941111 - DNA, 25 bp, Homo sapien
tcgcagtctactaagcaacgggtga

SEQ ID NO: 4941112 - DNA, 25 bp, Homo sapien
actaagcaacgggtgacttcccaga

SEQ ID NO: 4941113 - DNA, 25 bp, Homo sapien
caggcactccttcataacagcaacc

SEQ ID NO: 4941114 - DNA, 25 bp, Homo sapien
aggaggatttgcaggcactccttca

SEQ ID NO: 4941115 - DNA, 25 bp, Homo sapien
tcataacagcaacccaaggtccgca

SEQ ID NO: 4941116 - DNA, 25 bp, Homo sapien
agcaacccaaggtccgcagcagcgg

SEQ ID NO: 4941117 - DNA, 25 bp, Homo sapien
tgcaagccctcctagaccccactgt

SEQ ID NO: 4941118 - DNA, 25 bp, Homo sapien
atgccagggatcctcgggcgccaac

SEQ ID NO: 4941119 - DNA, 25 bp, Homo sapien
caccgtccccgaacatgccagggat

SEQ ID NO: 4941120 - DNA, 25 bp, Homo sapien
gtggaatccacgagggctcctgagt

SEQ ID NO: 4941121 - DNA, 25 bp, Homo sapien
cggaccgcgcctcctgagagcggag

SEQ ID NO: 4941122 - DNA, 25 bp, Homo sapien
ccggaccgcgcctcctgagagcgga

SEQ ID NO: 4941123 - DNA, 25 bp, Homo sapien
ggaccgcgcctcctgagagcggagg

SEQ ID NO: 4941124 - DNA, 25 bp, Homo sapien
gcgccgcttagcgtctcgcagccca

SEQ ID NO: 4941125 - DNA, 25 bp, Homo sapien
cggcgccgcttagcgtctcgcagcc

SEQ ID NO: 4941126 - DNA, 25 bp, Homo sapien
cccggcgccgcttagcgtctcgcag

SEQ ID NO: 4941127 - DNA, 25 bp, Homo sapien
cgcttagcgtctcgcagcccagcag

SEQ ID NO: 4941128 - DNA, 25 bp, Homo sapien
ggcacgagtgggccgtccatctgtg

SEQ ID NO: 4941129 - DNA, 25 bp, Homo sapien
gggcacgagtgggccgtccatctgt

SEQ ID NO: 4941130 - DNA, 25 bp, Homo sapien
ggggcacgagtgggccgtccatctg

SEQ ID NO: 4941131 - DNA, 25 bp, Homo sapien
gagggactgagtggcctgcacgtgg

SEQ ID NO: 4941132 - DNA, 25 bp, Homo sapien
gcctgcacgtgggaagactttgtca

SEQ ID NO: 4941133 - DNA, 25 bp, Homo sapien
tggcctgcacgtgggaagactttgt

SEQ ID NO: 4941134 - DNA, 25 bp, Homo sapien
tgcacgtgggaagactttgtcacct

SEQ ID NO: 4941135 - DNA, 25 bp, Homo sapien
aactgccgagtctcagaatgatgcc

SEQ ID NO: 4941136 - DNA, 25 bp, Homo sapien
gaagcaactgccgagtctcagaatg

SEQ ID NO: 4941137 - DNA, 25 bp, Homo sapien
tgccgagtctcagaatgatgccaga

SEQ ID NO: 4941138 - DNA, 25 bp, Homo sapien
tgagaagcaactgccgagtctcaga

SEQ ID NO: 4941139 - DNA, 25 bp, Homo sapien
gaaccacatgcatgtccgatcgtgt

SEQ ID NO: 4941140 - DNA, 25 bp, Homo sapien
caggtatcatgaagttcacaaccaa

SEQ ID NO: 4941141 - DNA, 25 bp, Homo sapien
caaagggcgtgctttggccgcagaa

SEQ ID NO: 4941142 - DNA, 25 bp, Homo sapien
tccgatcgtgtctggttttccagcg

SEQ ID NO: 4941143 - DNA, 25 bp, Homo sapien
cggcaagtattctgagtggtaacac

SEQ ID NO: 4941144 - DNA, 25 bp, Homo sapien
gcggcaagtattctgagtggtaaca

SEQ ID NO: 4941145 - DNA, 25 bp, Homo sapien
cgcttgatcttggtaggcggagatt

SEQ ID NO: 4941146 - DNA, 25 bp, Homo sapien
acagcagacgccaaccttgaaggtg

SEQ ID NO: 4941147 - DNA, 25 bp, Homo sapien
catctccgaaggaagtggcaacagt

SEQ ID NO: 4941148 - DNA, 25 bp, Homo sapien
gtcctcatctccgaaggaagtggca

SEQ ID NO: 4941149 - DNA, 25 bp, Homo sapien
tggacgcccggatgggaggagtggc

SEQ ID NO: 4941150 - DNA, 25 bp, Homo sapien
gcccctgacgtttctcctgaagaac

SEQ ID NO: 4941151 - DNA, 25 bp, Homo sapien
tgaagaacacagcaggggacggcca

SEQ ID NO: 4941152 - DNA, 25 bp, Homo sapien
gaacacagcaggggacggccagggc

SEQ ID NO: 4941153 - DNA, 25 bp, Homo sapien
aggaaggcccctgacgtttctcctg

SEQ ID NO: 4941154 - DNA, 25 bp, Homo sapien
tcccagggacacaggttgtcctact

SEQ ID NO: 4941155 - DNA, 25 bp, Homo sapien
cagggacacaggttgtcctactgca

SEQ ID NO: 4941156 - DNA, 25 bp, Homo sapien
ggacacaggttgtcctactgcagag

SEQ ID NO: 4941157 - DNA, 25 bp, Homo sapien
gggacacaggttgtcctactgcaga

SEQ ID NO: 4941158 - DNA, 25 bp, Homo sapien
tttctgcacccagccgcaggcgcct

SEQ ID NO: 4941159 - DNA, 25 bp, Homo sapien
ctgagtgcagcaggtgtctgagtgc

SEQ ID NO: 4941160 - DNA, 25 bp, Homo sapien
ggtgtctgagtgcacatctgtttct

SEQ ID NO: 4941161 - DNA, 25 bp, Homo sapien
ggcgcctgagcacccatctgtttct

SEQ ID NO: 4941162 - DNA, 25 bp, Homo sapien
cagcaggaaacccataacgctgagt

SEQ ID NO: 4941163 - DNA, 25 bp, Homo sapien
cacagtagcagctccatatatgctg

SEQ ID NO: 4941164 - DNA, 25 bp, Homo sapien
ccgcccataatgctgagtgccgcag

SEQ ID NO: 4941165 - DNA, 25 bp, Homo sapien
aacccataacgctgagtgcgggagg

SEQ ID NO: 4941166 - DNA, 25 bp, Homo sapien
ttgccaaatacagcaggagcccaat

SEQ ID NO: 4941167 - DNA, 25 bp, Homo sapien
aaatacagcaggagcccaatactcg

SEQ ID NO: 4941168 - DNA, 25 bp, Homo sapien
tgccaaatacagcaggagcccaata

SEQ ID NO: 4941169 - DNA, 25 bp, Homo sapien
ccaaatacagcaggagcccaatact

SEQ ID NO: 4941170 - DNA, 25 bp, Homo sapien
gcaggagcccaatactccctgaata

SEQ ID NO: 4941171 - DNA, 25 bp, Homo sapien
tacttgctgaatacagcaagagccc

SEQ ID NO: 4941172 - DNA, 25 bp, Homo sapien
aatacagcaggagcccaatactccc

SEQ ID NO: 4941173 - DNA, 25 bp, Homo sapien
atacttgctgaatacagcaagagcc

SEQ ID NO: 4941174 - DNA, 25 bp, Homo sapien
agagaagatgctgcggtcggcacgt

SEQ ID NO: 4941175 - DNA, 25 bp, Homo sapien
tgtggagaatcacaaccaccgtcca

SEQ ID NO: 4941176 - DNA, 25 bp, Homo sapien
cgtccacctcgcaggattcaactgg

SEQ ID NO: 4941177 - DNA, 25 bp, Homo sapien
actggatggtcatcagcacagcaga

SEQ ID NO: 4941178 - DNA, 25 bp, Homo sapien
atgacatagcgggctccgaggagca

SEQ ID NO: 4941179 - DNA, 25 bp, Homo sapien
tgccatccaccacgagccgcatcct

SEQ ID NO: 4941180 - DNA, 25 bp, Homo sapien
aaagcgccccatgccatccaccacg

SEQ ID NO: 4941181 - DNA, 25 bp, Homo sapien
gcgcccccactaccgcggtggagag

SEQ ID NO: 4941182 - DNA, 25 bp, Homo sapien
tttctgtgaaacttctggtgaaatc

SEQ ID NO: 4941183 - DNA, 25 bp, Homo sapien
aatttctgtgaaacttctggtgaaa

SEQ ID NO: 4941184 - DNA, 25 bp, Homo sapien
gaaatttctgtgaaacttctggtga

SEQ ID NO: 4941185 - DNA, 25 bp, Homo sapien
ttctgtgaaacttctggtgaaatct

SEQ ID NO: 4941186 - DNA, 25 bp, Homo sapien
ctgcatgccatgaaatagagggtga

SEQ ID NO: 4941187 - DNA, 25 bp, Homo sapien
gccaagccgacatttcagaaccagg

SEQ ID NO: 4941188 - DNA, 25 bp, Homo sapien
tgccaagccgacatttcagaaccag

SEQ ID NO: 4941189 - DNA, 25 bp, Homo sapien
atgaaatagagggtgagacaaaccc

SEQ ID NO: 4941190 - DNA, 25 bp, Homo sapien
caagccggtggccgaggaggtggac

SEQ ID NO: 4941191 - DNA, 25 bp, Homo sapien
agccggtggccgaggaggtggacac

SEQ ID NO: 4941192 - DNA, 25 bp, Homo sapien
aagccggtggccgaggaggtggaca

SEQ ID NO: 4941193 - DNA, 25 bp, Homo sapien
cttcttaagtccttgggatttcctg

SEQ ID NO: 4941194 - DNA, 25 bp, Homo sapien
ttcctgagtgataaggagtgcctct

SEQ ID NO: 4941195 - DNA, 25 bp, Homo sapien
ttcttaagtccttgggatttcctga

SEQ ID NO: 4941196 - DNA, 25 bp, Homo sapien
ctgagtgataaggagtgcctctgtt

SEQ ID NO: 4941197 - DNA, 25 bp, Homo sapien
gggcaactgtgcaccaagtggtcac

SEQ ID NO: 4941198 - DNA, 25 bp, Homo sapien
tctggccacgcatgagcacatgggc

SEQ ID NO: 4941199 - DNA, 25 bp, Homo sapien
cagatgacgaatatgaccacaagca

SEQ ID NO: 4941200 - DNA, 25 bp, Homo sapien
ccatacggctaattacaagggaatc

SEQ ID NO: 4941201 - DNA, 25 bp, Homo sapien
ggagtgtggtggcgatcttggctca

SEQ ID NO: 4941202 - DNA, 25 bp, Homo sapien
tggagtgtggtggcgatcttggctc

SEQ ID NO: 4941203 - DNA, 25 bp, Homo sapien
cctgaggtccactaggaagagagga

SEQ ID NO: 4941204 - DNA, 25 bp, Homo sapien
agcctgaggtccactaggaagagag

SEQ ID NO: 4941205 - DNA, 25 bp, Homo sapien
cagcctgaggtccactaggaagaga

SEQ ID NO: 4941206 - DNA, 25 bp, Homo sapien
tgcagcctgaggtccactaggaaga

SEQ ID NO: 4941207 - DNA, 25 bp, Homo sapien
ccggccagcccttcatgtcccaagg

SEQ ID NO: 4941208 - DNA, 25 bp, Homo sapien
ggccccggtgcttggtcctcttgtc

SEQ ID NO: 4941209 - DNA, 25 bp, Homo sapien
agagccctcatggtctagcctcacc

SEQ ID NO: 4941210 - DNA, 25 bp, Homo sapien
agggtccagcctacagccgcgtagg

SEQ ID NO: 4941211 - DNA, 25 bp, Homo sapien
cacccctcgaaggacaacattggtg

SEQ ID NO: 4941212 - DNA, 25 bp, Homo sapien
tcgaaggacaacattggtgcaccac

SEQ ID NO: 4941213 - DNA, 25 bp, Homo sapien
cctcgaaggacaacattggtgcacc

SEQ ID NO: 4941214 - DNA, 25 bp, Homo sapien
aaggacaacattggtgcaccaccag

SEQ ID NO: 4941215 - DNA, 25 bp, Homo sapien
tggtgacacgcagacatcacctcca

SEQ ID NO: 4941216 - DNA, 25 bp, Homo sapien
gccctgtcctctagcacgcgcaggg

SEQ ID NO: 4941217 - DNA, 25 bp, Homo sapien
tggcccagcttcacgtagaggcccc

SEQ ID NO: 4941218 - DNA, 25 bp, Homo sapien
cacgcgcagggtccgggtatactcg

SEQ ID NO: 4941219 - DNA, 25 bp, Homo sapien
ccaggctggcggcagcaattggctg

SEQ ID NO: 4941220 - DNA, 25 bp, Homo sapien
agtcctcaaggaacaactcatccac

SEQ ID NO: 4941221 - DNA, 25 bp, Homo sapien
tggaagtcctcaaggaacaactcat

SEQ ID NO: 4941222 - DNA, 25 bp, Homo sapien
agccacgctggtgccatcgtgcagc

SEQ ID NO: 4941223 - DNA, 25 bp, Homo sapien
atgacctcaacgagccgcagcagga

SEQ ID NO: 4941224 - DNA, 25 bp, Homo sapien
ggtcccgcaggtcgatgtactgcac

SEQ ID NO: 4941225 - DNA, 25 bp, Homo sapien
catcaaagcggtcccgcaggtcgat

SEQ ID NO: 4941226 - DNA, 25 bp, Homo sapien
aaagctggggtgcatgacctcaacg

SEQ ID NO: 4941227 - DNA, 25 bp, Homo sapien
tctgcctacgtgtttgctcctgctg

SEQ ID NO: 4941228 - DNA, 25 bp, Homo sapien
gccagatggcggttgaagaccagct

SEQ ID NO: 4941229 - DNA, 25 bp, Homo sapien
cagatggcggttgaagaccagctct

SEQ ID NO: 4941230 - DNA, 25 bp, Homo sapien
tcctaccagctctgcctacgtgttt

SEQ ID NO: 4941231 - DNA, 25 bp, Homo sapien
ccgcgcacagcgctctgcgttgcgg

SEQ ID NO: 4941232 - DNA, 25 bp, Homo sapien
tgcggccctcattctcgaagtccag

SEQ ID NO: 4941233 - DNA, 25 bp, Homo sapien
ctggacttgtcccagtgcacgcggg

SEQ ID NO: 4941234 - DNA, 25 bp, Homo sapien
caccacgacgtaggggaagtgcgcc

SEQ ID NO: 4941235 - DNA, 25 bp, Homo sapien
ctggggagagcaagaggctgggctc

SEQ ID NO: 4941236 - DNA, 25 bp, Homo sapien
gggagagcaagaggctgggctcagc

SEQ ID NO: 4941237 - DNA, 25 bp, Homo sapien
tcagcaggcccagcgctgtgcccac

SEQ ID NO: 4941238 - DNA, 25 bp, Homo sapien
gctcagcaggcccagcgctgtgccc

SEQ ID NO: 4941239 - DNA, 25 bp, Homo sapien
gatggcctccacatcgttgaccttg

SEQ ID NO: 4941240 - DNA, 25 bp, Homo sapien
ggcctccacatcgttgaccttgcag

SEQ ID NO: 4941241 - DNA, 25 bp, Homo sapien
tccacatcgttgaccttgcagccgg

SEQ ID NO: 4941242 - DNA, 25 bp, Homo sapien
cgttgaccttgcagccggcgcagaa

SEQ ID NO: 4941243 - DNA, 25 bp, Homo sapien
cagtggacacagcaccagcccgccc

SEQ ID NO: 4941244 - DNA, 25 bp, Homo sapien
tggacacagcaccagcccgccctga

SEQ ID NO: 4941245 - DNA, 25 bp, Homo sapien
ggagaggagaggcattgcagtggac

SEQ ID NO: 4941246 - DNA, 25 bp, Homo sapien
gaggagaggcattgcagtggacaca

SEQ ID NO: 4941247 - DNA, 25 bp, Homo sapien
gccggtgtaaaatatctgctcagca

SEQ ID NO: 4941248 - DNA, 25 bp, Homo sapien
tccgagtggatgaagccggtgtaaa

SEQ ID NO: 4941249 - DNA, 25 bp, Homo sapien
ccaggatgtgggtccgagtggatga

SEQ ID NO: 4941250 - DNA, 25 bp, Homo sapien
cgttgccaggatgtgggtccgagtg

SEQ ID NO: 4941251 - DNA, 25 bp, Homo sapien
gatacagcctcttaggtcgcgctgc

SEQ ID NO: 4941252 - DNA, 25 bp, Homo sapien
tacagcctcttaggtcgcgctgcgc

SEQ ID NO: 4941253 - DNA, 25 bp, Homo sapien
tagggatacagcctcttaggtcgcg

SEQ ID NO: 4941254 - DNA, 25 bp, Homo sapien
gggatacagcctcttaggtcgcgct

SEQ ID NO: 4941255 - DNA, 25 bp, Homo sapien
gcaccagctccgctttcccgtccgg

SEQ ID NO: 4941256 - DNA, 25 bp, Homo sapien
caccagctccgctttcccgtccggg

SEQ ID NO: 4941257 - DNA, 25 bp, Homo sapien
tcctccaggaactggtagagcccgt

SEQ ID NO: 4941258 - DNA, 25 bp, Homo sapien
ctggtagagcccgtggtccagcagc

SEQ ID NO: 4941259 - DNA, 25 bp, Homo sapien
gtgtggatgggcccgcagccatgag

SEQ ID NO: 4941260 - DNA, 25 bp, Homo sapien
tggatgggcccgcagccatgagctc

SEQ ID NO: 4941261 - DNA, 25 bp, Homo sapien
ggatgggcccgcagccatgagctcc

SEQ ID NO: 4941262 - DNA, 25 bp, Homo sapien
ctgggtgtggatgggcccgcagcca

SEQ ID NO: 4941263 - DNA, 25 bp, Homo sapien
gatgatggcccgccacagctggcag

SEQ ID NO: 4941264 - DNA, 25 bp, Homo sapien
atgatggcccgccacagctggcaga

SEQ ID NO: 4941265 - DNA, 25 bp, Homo sapien
cggcgtcgtcccgcaggatgatggc

SEQ ID NO: 4941266 - DNA, 25 bp, Homo sapien
cgtcgtcccgcaggatgatggcccg

SEQ ID NO: 4941267 - DNA, 25 bp, Homo sapien
cttgcacccccagtgcggctgcgtg

SEQ ID NO: 4941268 - DNA, 25 bp, Homo sapien
cccccagtgcggctgcgtgcgccct

SEQ ID NO: 4941269 - DNA, 25 bp, Homo sapien
cccagtgcggctgcgtgcgccctca

SEQ ID NO: 4941270 - DNA, 25 bp, Homo sapien
tgcacccccagtgcggctgcgtgcg

SEQ ID NO: 4941271 - DNA, 25 bp, Homo sapien
gcacggtgttgatgttgcgcagcac

SEQ ID NO: 4941272 - DNA, 25 bp, Homo sapien
ccataaggaagtagcggtccacggg

SEQ ID NO: 4941273 - DNA, 25 bp, Homo sapien
gccacgttgatagcgcgcacggtgt

SEQ ID NO: 4941274 - DNA, 25 bp, Homo sapien
ggcgctgcatgagcatctcggcgaa

SEQ ID NO: 4941275 - DNA, 25 bp, Homo sapien
caccagccccaccacggcccgggcg

SEQ ID NO: 4941276 - DNA, 25 bp, Homo sapien
tcagccccacaccagccccaccacg

SEQ ID NO: 4941277 - DNA, 25 bp, Homo sapien
ccacaccagccccaccacggcccgg

SEQ ID NO: 4941278 - DNA, 25 bp, Homo sapien
cagccccaccacggcccgggcgcct

SEQ ID NO: 4941279 - DNA, 25 bp, Homo sapien
gaggctggtgccgtagacaccccga

SEQ ID NO: 4941280 - DNA, 25 bp, Homo sapien
cccagacgaccttggcgtggcgcag

SEQ ID NO: 4941281 - DNA, 25 bp, Homo sapien
gtgccgtagacaccccgatacgtgg

SEQ ID NO: 4941282 - DNA, 25 bp, Homo sapien
caaacttgagcatctcccagacgac

SEQ ID NO: 4941283 - DNA, 25 bp, Homo sapien
caggagggcggtcagccgcatggcc

SEQ ID NO: 4941284 - DNA, 25 bp, Homo sapien
gggcacgaggctcaggtggaccaga

SEQ ID NO: 4941285 - DNA, 25 bp, Homo sapien
gcacgaggctcaggtggaccagagc

SEQ ID NO: 4941286 - DNA, 25 bp, Homo sapien
aggagggcggtcagccgcatggcca

SEQ ID NO: 4941287 - DNA, 25 bp, Homo sapien
gagtgtgtggtcattacacggcctc

SEQ ID NO: 4941288 - DNA, 25 bp, Homo sapien
tgtgtggtcattacacggcctcctg

SEQ ID NO: 4941289 - DNA, 25 bp, Homo sapien
gtggtcattacacggcctcctggcc

SEQ ID NO: 4941290 - DNA, 25 bp, Homo sapien
gggctcggggtgtctacacctctag

SEQ ID NO: 4941291 - DNA, 25 bp, Homo sapien
gcagcgaggcccagtcgggaacaca

SEQ ID NO: 4941292 - DNA, 25 bp, Homo sapien
actcctttgaggtgagattgaggca

SEQ ID NO: 4941293 - DNA, 25 bp, Homo sapien
cgggtaagtcggtgccgcaggatga

SEQ ID NO: 4941294 - DNA, 25 bp, Homo sapien
acgagattgaagtgtacggcagcga

SEQ ID NO: 4941295 - DNA, 25 bp, Homo sapien
caaagaagaagcgagtggatgcgac

SEQ ID NO: 4941296 - DNA, 25 bp, Homo sapien
gggttctcgcctgggcaattccctc

SEQ ID NO: 4941297 - DNA, 25 bp, Homo sapien
gtacctgttcctgggttctcgcctg

SEQ ID NO: 4941298 - DNA, 25 bp, Homo sapien
tcctcaagtacacggagaagctgca

SEQ ID NO: 4941299 - DNA, 25 bp, Homo sapien
tccagtcgcatgatcagaagagcct

SEQ ID NO: 4941300 - DNA, 25 bp, Homo sapien
tgtgcacaggcccaaagcagttgag

SEQ ID NO: 4941301 - DNA, 25 bp, Homo sapien
cattggtagcacaaggaacaaggcc

SEQ ID NO: 4941302 - DNA, 25 bp, Homo sapien
ggcacacgcctcaagggtttgggaa

SEQ ID NO: 4941303 - DNA, 25 bp, Homo sapien
catgattccgtttctaggtcctagg

SEQ ID NO: 4941304 - DNA, 25 bp, Homo sapien
tacgagcggagtcgcttctccctgc

SEQ ID NO: 4941305 - DNA, 25 bp, Homo sapien
cctgaacccgggagctacgagcgga

SEQ ID NO: 4941306 - DNA, 25 bp, Homo sapien
tctaggaagctttctcggagcccca

SEQ ID NO: 4941307 - DNA, 25 bp, Homo sapien
ggaggatctgccactggaatggtta

SEQ ID NO: 4941308 - DNA, 25 bp, Homo sapien
cgtggtgagccacgccggtaatccc

SEQ ID NO: 4941309 - DNA, 25 bp, Homo sapien
aaagaccaccgaggctgcctgtcca

SEQ ID NO: 4941310 - DNA, 25 bp, Homo sapien
tggaatggttaacccaggcatctcc

SEQ ID NO: 4941311 - DNA, 25 bp, Homo sapien
cagtgagcttgttggatgacagagt

SEQ ID NO: 4941312 - DNA, 25 bp, Homo sapien
tgagccagcgtgaccagccggtgtt

SEQ ID NO: 4941313 - DNA, 25 bp, Homo sapien
ccagcgtgaccagccggtgttgttt

SEQ ID NO: 4941314 - DNA, 25 bp, Homo sapien
ggagtgcgtgatgcgatcgtggctc

SEQ ID NO: 4941315 - DNA, 25 bp, Homo sapien
ctttcccggctcttcctcggctggg

SEQ ID NO: 4941316 - DNA, 25 bp, Homo sapien
tacatgagcggcgacgccctttccc

SEQ ID NO: 4941317 - DNA, 25 bp, Homo sapien
cctttcccggctcttcctcggctgg

SEQ ID NO: 4941318 - DNA, 25 bp, Homo sapien
agcggcgacgccctttcccggctct

SEQ ID NO: 4941319 - DNA, 25 bp, Homo sapien
ctccccgtggctgcctggcaggcgg

SEQ ID NO: 4941320 - DNA, 25 bp, Homo sapien
cccgtggctgcctggcaggcgggtg

SEQ ID NO: 4941321 - DNA, 25 bp, Homo sapien
ataaaataaatgaagctgctgcctc

SEQ ID NO: 4941322 - DNA, 25 bp, Homo sapien
aaaataaatgaagctgctgcctccc

SEQ ID NO: 4941323 - DNA, 25 bp, Homo sapien
atgctgaggcagagaattggttgaa

SEQ ID NO: 4941324 - DNA, 25 bp, Homo sapien
cccgggaggcagaggttgcagtgag

SEQ ID NO: 4941325 - DNA, 25 bp, Homo sapien
ggatgctgaggcagagaattggttg

SEQ ID NO: 4941326 - DNA, 25 bp, Homo sapien
cgggatgctgaggcagagaattggt

SEQ ID NO: 4941327 - DNA, 25 bp, Homo sapien
tgcagaaattgtccgcttcctgctg

SEQ ID NO: 4941328 - DNA, 25 bp, Homo sapien
tcaccctccgcactcgaaaggtgag

SEQ ID NO: 4941329 - DNA, 25 bp, Homo sapien
ctgggcttacgtctcctggtctgca

SEQ ID NO: 4941330 - DNA, 25 bp, Homo sapien
ccgcagtggacgacccaggtggcca

SEQ ID NO: 4941331 - DNA, 25 bp, Homo sapien
tacagctaagttggtcagcctggcc

SEQ ID NO: 4941332 - DNA, 25 bp, Homo sapien
tgggctgagatctgggcaccttccc

SEQ ID NO: 4941333 - DNA, 25 bp, Homo sapien
ttcactggtgacacctaggccggag

SEQ ID NO: 4941334 - DNA, 25 bp, Homo sapien
ggtatgcatctgtgttacagctaag

SEQ ID NO: 4941335 - DNA, 25 bp, Homo sapien
gagatggcacgcgtggtccaggagt

SEQ ID NO: 4941336 - DNA, 25 bp, Homo sapien
attggaggttggcagccgtcagccc

SEQ ID NO: 4941337 - DNA, 25 bp, Homo sapien
gacagtagttgtacccctagcctcc

SEQ ID NO: 4941338 - DNA, 25 bp, Homo sapien
gtcagcccttactttgagccaggca

SEQ ID NO: 4941339 - DNA, 25 bp, Homo sapien
tccaagtagttgccttggctcagag

SEQ ID NO: 4941340 - DNA, 25 bp, Homo sapien
ctccaagtagttgccttggctcaga

SEQ ID NO: 4941341 - DNA, 25 bp, Homo sapien
gccctccaagtagttgccttggctc

SEQ ID NO: 4941342 - DNA, 25 bp, Homo sapien
cctccaagtagttgccttggctcag

SEQ ID NO: 4941343 - DNA, 25 bp, Homo sapien
aggaccgccaaacacacggcttgtg

SEQ ID NO: 4941344 - DNA, 25 bp, Homo sapien
cacgggcttcccgtggcgttgccaa

SEQ ID NO: 4941345 - DNA, 25 bp, Homo sapien
tgtccaagaccctgagacatcttga

SEQ ID NO: 4941346 - DNA, 25 bp, Homo sapien
cgttgccaacgtgggccacacatga

SEQ ID NO: 4941347 - DNA, 25 bp, Homo sapien
gtgcggcccagcgtactcagcaggc

SEQ ID NO: 4941348 - DNA, 25 bp, Homo sapien
aagtgcggcccagcgtactcagcag

SEQ ID NO: 4941349 - DNA, 25 bp, Homo sapien
tgcaagtgcggcccagcgtactcag

SEQ ID NO: 4941350 - DNA, 25 bp, Homo sapien
caagtgcggcccagcgtactcagca

SEQ ID NO: 4941351 - DNA, 25 bp, Homo sapien
ccccgaggaaagactcagagacact

SEQ ID NO: 4941352 - DNA, 25 bp, Homo sapien
ggcagccttgtttcgtactttctgt

SEQ ID NO: 4941353 - DNA, 25 bp, Homo sapien
tagcaattaaaaggcagccttgttt

SEQ ID NO: 4941354 - DNA, 25 bp, Homo sapien
aagcagggtgaaattgtctcttccc

SEQ ID NO: 4941355 - DNA, 25 bp, Homo sapien
gctgcttcacaggactatctgatca

SEQ ID NO: 4941356 - DNA, 25 bp, Homo sapien
ttcaccaacgagagcaacgagacgg

SEQ ID NO: 4941357 - DNA, 25 bp, Homo sapien
gcccctacgacgacgtgaggatcag

SEQ ID NO: 4941358 - DNA, 25 bp, Homo sapien
cgtggagtgcaacaagctgctggct

SEQ ID NO: 4941359 - DNA, 25 bp, Homo sapien
ccttagctgtcctggagataccggg

SEQ ID NO: 4941360 - DNA, 25 bp, Homo sapien
cactggatctcgtggctctctgggc

SEQ ID NO: 4941361 - DNA, 25 bp, Homo sapien
caaactgtagaaccgggagtggaca

SEQ ID NO: 4941362 - DNA, 25 bp, Homo sapien
tgccaccgcctttgaacgtgtcggg

SEQ ID NO: 4941363 - DNA, 25 bp, Homo sapien
catgagctgacggtgcacgaggctg

SEQ ID NO: 4941364 - DNA, 25 bp, Homo sapien
ggtaacccagtgcaagtacaaacgc

SEQ ID NO: 4941365 - DNA, 25 bp, Homo sapien
aacgcatcggctgcccatggcacgg

SEQ ID NO: 4941366 - DNA, 25 bp, Homo sapien
cagtgcaagtacaaacgcatcggct

SEQ ID NO: 4941367 - DNA, 25 bp, Homo sapien
cacgtgccccaattgtcgttgtgag

SEQ ID NO: 4941368 - DNA, 25 bp, Homo sapien
cagagtgtggcttctgcctgcgcca

SEQ ID NO: 4941369 - DNA, 25 bp, Homo sapien
tatccacctactagcagatgcccgg

SEQ ID NO: 4941370 - DNA, 25 bp, Homo sapien
cgttgtgagatcagtaagagcctct

SEQ ID NO: 4941371 - DNA, 25 bp, Homo sapien
cctgtgatgtcattcccccgtgatg

SEQ ID NO: 4941372 - DNA, 25 bp, Homo sapien
ccccatgacatcattcccctgtgat

SEQ ID NO: 4941373 - DNA, 25 bp, Homo sapien
cccctgtgatgtcatacatgtgacg

SEQ ID NO: 4941374 - DNA, 25 bp, Homo sapien
cattcccgtgctgtcaccacatgat

SEQ ID NO: 4941375 - DNA, 25 bp, Homo sapien
gggtagactcttctgcctactgaag

SEQ ID NO: 4941376 - DNA, 25 bp, Homo sapien
gtttgctgcacattgactggtcagg

SEQ ID NO: 4941377 - DNA, 25 bp, Homo sapien
gacacggttgtggatccagagaaga

SEQ ID NO: 4941378 - DNA, 25 bp, Homo sapien
cagagaagaggcctagtctccaata

SEQ ID NO: 4941379 - DNA, 25 bp, Homo sapien
tgggagtgacagttggatacagcca

SEQ ID NO: 4941380 - DNA, 25 bp, Homo sapien
catacacagcgcctccagtgggagt

SEQ ID NO: 4941381 - DNA, 25 bp, Homo sapien
tgctgctaccgaaggaggatgtctg

SEQ ID NO: 4941382 - DNA, 25 bp, Homo sapien
ggtttctgccctgccgaacactttc

SEQ ID NO: 4941383 - DNA, 25 bp, Homo sapien
tcagggatccggaaagtctaggact

SEQ ID NO: 4941384 - DNA, 25 bp, Homo sapien
ctggaacctgggcttactagagtgc

SEQ ID NO: 4941385 - DNA, 25 bp, Homo sapien
caggtcgctggcttctgcgcttcct

SEQ ID NO: 4941386 - DNA, 25 bp, Homo sapien
tatctgtgtcctcgtacatactgcc

SEQ ID NO: 4941387 - DNA, 25 bp, Homo sapien
cgcccgccgcagtgccggtgcgcat

SEQ ID NO: 4941388 - DNA, 25 bp, Homo sapien
gccgcagtgccggtgcgcatgctcg

SEQ ID NO: 4941389 - DNA, 25 bp, Homo sapien
tgccggtgcgcatgctcgcgacggc

SEQ ID NO: 4941390 - DNA, 25 bp, Homo sapien
agtgccggtgcgcatgctcgcgacg

SEQ ID NO: 4941391 - DNA, 25 bp, Homo sapien
catccctgcggaagaggctgtagaa

SEQ ID NO: 4941392 - DNA, 25 bp, Homo sapien
tgtagatgagcaacgagtaaaaggc

SEQ ID NO: 4941393 - DNA, 25 bp, Homo sapien
tgagcaacgagtaaaaggcgtacat

SEQ ID NO: 4941394 - DNA, 25 bp, Homo sapien
ggctgtagaagatgtagatgagcaa

SEQ ID NO: 4941395 - DNA, 25 bp, Homo sapien
ccgggctccgcggccgccgcggcgc

SEQ ID NO: 4941396 - DNA, 25 bp, Homo sapien
ggctccgcggccgccgcggcgccac

SEQ ID NO: 4941397 - DNA, 25 bp, Homo sapien
cccgggctccgcggccgccgcggcg

SEQ ID NO: 4941398 - DNA, 25 bp, Homo sapien
gggctccgcggccgccgcggcgcca

SEQ ID NO: 4941399 - DNA, 25 bp, Homo sapien
gccggtcagctcggtccacagctct

SEQ ID NO: 4941400 - DNA, 25 bp, Homo sapien
ggccggtcagctcggtccacagctc

SEQ ID NO: 4941401 - DNA, 25 bp, Homo sapien
ccggtcagctcggtccacagctctg

SEQ ID NO: 4941402 - DNA, 25 bp, Homo sapien
aggccggtcagctcggtccacagct

SEQ ID NO: 4941403 - DNA, 25 bp, Homo sapien
cgccttccgacccatcctcaggctc

SEQ ID NO: 4941404 - DNA, 25 bp, Homo sapien
gccttccgacccatcctcaggctcg

SEQ ID NO: 4941405 - DNA, 25 bp, Homo sapien
ctgcgccttccgacccatcctcagg

SEQ ID NO: 4941406 - DNA, 25 bp, Homo sapien
tgcgccttccgacccatcctcaggc

SEQ ID NO: 4941407 - DNA, 25 bp, Homo sapien
ggaactcggcgaggcgcagtagggc

SEQ ID NO: 4941408 - DNA, 25 bp, Homo sapien
tcttccgcccccagctggacggaga

SEQ ID NO: 4941409 - DNA, 25 bp, Homo sapien
ctggacggagaggaactcggcgagg

SEQ ID NO: 4941410 - DNA, 25 bp, Homo sapien
gccgggcccccgcagctctcttccg

SEQ ID NO: 4941411 - DNA, 25 bp, Homo sapien
actgtcaacagtgaggggacctcgc

SEQ ID NO: 4941412 - DNA, 25 bp, Homo sapien
ccctggggcttcgaagccatgccag

SEQ ID NO: 4941413 - DNA, 25 bp, Homo sapien
ggcttcgaagccatgccagaagggc

SEQ ID NO: 4941414 - DNA, 25 bp, Homo sapien
gaagccatgccagaagggccaagag

SEQ ID NO: 4941415 - DNA, 25 bp, Homo sapien
tgcggtgaagtgggaagggctttct

SEQ ID NO: 4941416 - DNA, 25 bp, Homo sapien
gggctttcttcttgggatgtggatc

SEQ ID NO: 4941417 - DNA, 25 bp, Homo sapien
ctgcggtgaagtgggaagggctttc

SEQ ID NO: 4941418 - DNA, 25 bp, Homo sapien
gaagggctttcttcttgggatgtgg

SEQ ID NO: 4941419 - DNA, 25 bp, Homo sapien
tctcatcccccagtggctcgcctgg

SEQ ID NO: 4941420 - DNA, 25 bp, Homo sapien
tcatcccccagtggctcgcctggga

SEQ ID NO: 4941421 - DNA, 25 bp, Homo sapien
tgctgtccctgggtctcatccccca

SEQ ID NO: 4941422 - DNA, 25 bp, Homo sapien
ctgtccctgggtctcatcccccagt

SEQ ID NO: 4941423 - DNA, 25 bp, Homo sapien
cgctgccacgccctctgatcctcct

SEQ ID NO: 4941424 - DNA, 25 bp, Homo sapien
ccagccgctgccacgccctctgatc

SEQ ID NO: 4941425 - DNA, 25 bp, Homo sapien
ctctgatcctcctccaactggaggg

SEQ ID NO: 4941426 - DNA, 25 bp, Homo sapien
ctgtcccaggatgagctgctccagc

SEQ ID NO: 4941427 - DNA, 25 bp, Homo sapien
agtaagagagacagggtggacctcc

SEQ ID NO: 4941428 - DNA, 25 bp, Homo sapien
tttttctggcgtcccagccggcaat

SEQ ID NO: 4941429 - DNA, 25 bp, Homo sapien
agacagggtggacctcctttttctg

SEQ ID NO: 4941430 - DNA, 25 bp, Homo sapien
ctttttctggcgtcccagccggcaa

SEQ ID NO: 4941431 - DNA, 25 bp, Homo sapien
cccaggcgcagtcgacccaactcct

SEQ ID NO: 4941432 - DNA, 25 bp, Homo sapien
gcgcagtcgacccaactcctcctcc

SEQ ID NO: 4941433 - DNA, 25 bp, Homo sapien
cacgcccaggcgcagtcgacccaac

SEQ ID NO: 4941434 - DNA, 25 bp, Homo sapien
caggcgcagtcgacccaactcctcc

SEQ ID NO: 4941435 - DNA, 25 bp, Homo sapien
catgcccggccctgccaggtctccc

SEQ ID NO: 4941436 - DNA, 25 bp, Homo sapien
ctccatgcccggccctgccaggtct

SEQ ID NO: 4941437 - DNA, 25 bp, Homo sapien
ccctccatgcccggccctgccaggt

SEQ ID NO: 4941438 - DNA, 25 bp, Homo sapien
ctgaagcaccccctccatgcccggc

SEQ ID NO: 4941439 - DNA, 25 bp, Homo sapien
ggtggagaggaaacctcggcactca

SEQ ID NO: 4941440 - DNA, 25 bp, Homo sapien
gtggagaggaaacctcggcactcac

SEQ ID NO: 4941441 - DNA, 25 bp, Homo sapien
cagagtcagatgctgaacccttttc

SEQ ID NO: 4941442 - DNA, 25 bp, Homo sapien
gagtcagatgctgaacccttttctc

SEQ ID NO: 4941443 - DNA, 25 bp, Homo sapien
agagtcagatgctgaacccttttct

SEQ ID NO: 4941444 - DNA, 25 bp, Homo sapien
gtcagatgctgaacccttttctctg

SEQ ID NO: 4941445 - DNA, 25 bp, Homo sapien
ctgcggagccctgatggggggcccg

SEQ ID NO: 4941446 - DNA, 25 bp, Homo sapien
tgggcctcctgaagccggccctgga

SEQ ID NO: 4941447 - DNA, 25 bp, Homo sapien
gggctcggagggcttctgtggtgtc

SEQ ID NO: 4941448 - DNA, 25 bp, Homo sapien
ctggagctctagcaatgcctctgcc

SEQ ID NO: 4941449 - DNA, 25 bp, Homo sapien
ttctgtggtgtcttgggcctcctga

SEQ ID NO: 4941450 - DNA, 25 bp, Homo sapien
tgcctcagataagcccctcccaaaa

SEQ ID NO: 4941451 - DNA, 25 bp, Homo sapien
cacccctgagccatggatccctggg

SEQ ID NO: 4941452 - DNA, 25 bp, Homo sapien
ctcacccctgagccatggatccctg

SEQ ID NO: 4941453 - DNA, 25 bp, Homo sapien
aggccctgcctcagataagcccctc

SEQ ID NO: 4941454 - DNA, 25 bp, Homo sapien
ctggagggccccttgaaggccctgc

SEQ ID NO: 4941455 - DNA, 25 bp, Homo sapien
tggagggccccttgaaggccctgca

SEQ ID NO: 4941456 - DNA, 25 bp, Homo sapien
gcagctgcacctcctgcacccccag

SEQ ID NO: 4941457 - DNA, 25 bp, Homo sapien
ctgctggagggccccttgaaggccc

SEQ ID NO: 4941458 - DNA, 25 bp, Homo sapien
tagctcacgcctgcagttctgctcc

SEQ ID NO: 4941459 - DNA, 25 bp, Homo sapien
cacgcctgcagttctgctccgtctc

SEQ ID NO: 4941460 - DNA, 25 bp, Homo sapien
tgccagctgcccatgcatctgctgt

SEQ ID NO: 4941461 - DNA, 25 bp, Homo sapien
gcccatgcatctgctgtagctcacg

SEQ ID NO: 4941462 - DNA, 25 bp, Homo sapien
agagggaagtctgttggaagggaag

SEQ ID NO: 4941463 - DNA, 25 bp, Homo sapien
cagggcctcccatgagccccaaccc

SEQ ID NO: 4941464 - DNA, 25 bp, Homo sapien
ctggagagggaagtctgttggaagg

SEQ ID NO: 4941465 - DNA, 25 bp, Homo sapien
gaagtctgttggaagggaaggccca

SEQ ID NO: 4941466 - DNA, 25 bp, Homo sapien
cagccctgacgcaggctggccatcc

SEQ ID NO: 4941467 - DNA, 25 bp, Homo sapien
caggctggccatccgtgcccgaagt

SEQ ID NO: 4941468 - DNA, 25 bp, Homo sapien
gtaaaggtgctgaccaaacctcgga

SEQ ID NO: 4941469 - DNA, 25 bp, Homo sapien
gggcctcactcagcgaaccctgaca

SEQ ID NO: 4941470 - DNA, 25 bp, Homo sapien
ctccagatgacagtgcccccaaggc

SEQ ID NO: 4941471 - DNA, 25 bp, Homo sapien
aggtcagcataatgcctcgcagacc

SEQ ID NO: 4941472 - DNA, 25 bp, Homo sapien
caggtcagcataatgcctcgcagac

SEQ ID NO: 4941473 - DNA, 25 bp, Homo sapien
gatcaggtcagcataatgcctcgca

SEQ ID NO: 4941474 - DNA, 25 bp, Homo sapien
tcaggtcagcataatgcctcgcaga

SEQ ID NO: 4941475 - DNA, 25 bp, Homo sapien
acaaggctagaagatgtccctggcc

SEQ ID NO: 4941476 - DNA, 25 bp, Homo sapien
gaagacccagtctaggcggaatcga

SEQ ID NO: 4941477 - DNA, 25 bp, Homo sapien
tcagccgacacagcacacggatatt

SEQ ID NO: 4941478 - DNA, 25 bp, Homo sapien
ccggtagcaggtggtgacggtgccc

SEQ ID NO: 4941479 - DNA, 25 bp, Homo sapien
tggttcagacacattgactgagagg

SEQ ID NO: 4941480 - DNA, 25 bp, Homo sapien
tccaggacggctgtccagaggacgg

SEQ ID NO: 4941481 - DNA, 25 bp, Homo sapien
agaggacggtgcacaaggcatgccc

SEQ ID NO: 4941482 - DNA, 25 bp, Homo sapien
ctgtccagaggacggtgcacaaggc

SEQ ID NO: 4941483 - DNA, 25 bp, Homo sapien
gacaccaacagtcttttgagcaaca

SEQ ID NO: 4941484 - DNA, 25 bp, Homo sapien
ttgagcaacaacatggctggctttt

SEQ ID NO: 4941485 - DNA, 25 bp, Homo sapien
ttatgcccagaaggtcgctgctaac

SEQ ID NO: 4941486 - DNA, 25 bp, Homo sapien
ttggcactggacaccaacagtcttt

SEQ ID NO: 4941487 - DNA, 25 bp, Homo sapien
acgggggatggtggccagccaggcc

SEQ ID NO: 4941488 - DNA, 25 bp, Homo sapien
ggtacgggggatggtggccagccag

SEQ ID NO: 4941489 - DNA, 25 bp, Homo sapien
ctgcaggtacgggggatggtggcca

SEQ ID NO: 4941490 - DNA, 25 bp, Homo sapien
caggtacgggggatggtggccagcc

SEQ ID NO: 4941491 - DNA, 25 bp, Homo sapien
gctcacaaggcgtgaccccaggaag

SEQ ID NO: 4941492 - DNA, 25 bp, Homo sapien
cacaaggcgtgaccccaggaagggc

SEQ ID NO: 4941493 - DNA, 25 bp, Homo sapien
ctcacaaggcgtgaccccaggaagg

SEQ ID NO: 4941494 - DNA, 25 bp, Homo sapien
tcacaaggcgtgaccccaggaaggg

SEQ ID NO: 4941495 - DNA, 25 bp, Homo sapien
cttgtggcagtgcacctagagggcc

SEQ ID NO: 4941496 - DNA, 25 bp, Homo sapien
gaacacttgtggcagtgcacctaga

SEQ ID NO: 4941497 - DNA, 25 bp, Homo sapien
tgtgaacacttgtggcagtgcacct

SEQ ID NO: 4941498 - DNA, 25 bp, Homo sapien
agtgcacctagagggccggccacac

SEQ ID NO: 4941499 - DNA, 25 bp, Homo sapien
catgctgtaggtcttcccggtgcct

SEQ ID NO: 4941500 - DNA, 25 bp, Homo sapien
tgcagacgctgtagcctcggaggca

SEQ ID NO: 4941501 - DNA, 25 bp, Homo sapien
ctccatgctgtaggtcttcccggtg

SEQ ID NO: 4941502 - DNA, 25 bp, Homo sapien
agatgcagacgctgtagcctcggag

SEQ ID NO: 4941503 - DNA, 25 bp, Homo sapien
gactgcagcgccctaggaactatgc

SEQ ID NO: 4941504 - DNA, 25 bp, Homo sapien
ccatctcccggaacagcgactgcag

SEQ ID NO: 4941505 - DNA, 25 bp, Homo sapien
aacagcgactgcagcgccctaggaa

SEQ ID NO: 4941506 - DNA, 25 bp, Homo sapien
gcagcgccctaggaactatgccggg

SEQ ID NO: 4941507 - DNA, 25 bp, Homo sapien
tgtagatctccaccatgctgagtgt

SEQ ID NO: 4941508 - DNA, 25 bp, Homo sapien
cattgtagatctccaccatgctgag

SEQ ID NO: 4941509 - DNA, 25 bp, Homo sapien
gacagcctcattgtagatctccacc

SEQ ID NO: 4941510 - DNA, 25 bp, Homo sapien
ctgacagcctcattgtagatctcca

SEQ ID NO: 4941511 - DNA, 25 bp, Homo sapien
ctctggaaatccggaagggccctgg

SEQ ID NO: 4941512 - DNA, 25 bp, Homo sapien
ggaaggtcttggttccagaattctc

SEQ ID NO: 4941513 - DNA, 25 bp, Homo sapien
agaattctctggaaatccggaaggg

SEQ ID NO: 4941514 - DNA, 25 bp, Homo sapien
aaggtcttggttccagaattctctg

SEQ ID NO: 4941515 - DNA, 25 bp, Homo sapien
tgggtgaggccagccacctggatcc

SEQ ID NO: 4941516 - DNA, 25 bp, Homo sapien
ctggtgcaatgtctccaggttgggc

SEQ ID NO: 4941517 - DNA, 25 bp, Homo sapien
caatgtctccaggttgggcacgtcc

SEQ ID NO: 4941518 - DNA, 25 bp, Homo sapien
agccacctggatcccgccctggcct

SEQ ID NO: 4941519 - DNA, 25 bp, Homo sapien
agctgcgctggttcatggcggtggc

SEQ ID NO: 4941520 - DNA, 25 bp, Homo sapien
ctggagcgcgcggtggagacgccgc

SEQ ID NO: 4941521 - DNA, 25 bp, Homo sapien
tgaccagggcatgcgagcgggagct

SEQ ID NO: 4941522 - DNA, 25 bp, Homo sapien
gcggtggcccggttgctcctcccca

SEQ ID NO: 4941523 - DNA, 25 bp, Homo sapien
tgctctggagactccgcagggctca

SEQ ID NO: 4941524 - DNA, 25 bp, Homo sapien
ctcgggtgctctggagactccgcag

SEQ ID NO: 4941525 - DNA, 25 bp, Homo sapien
agggctcaggcaccggccgtggtac

SEQ ID NO: 4941526 - DNA, 25 bp, Homo sapien
gccgggcctcgggtgctctggagac

SEQ ID NO: 4941527 - DNA, 25 bp, Homo sapien
ctagaggggcgagcgagcccgacat

SEQ ID NO: 4941528 - DNA, 25 bp, Homo sapien
gtgcgcgttcggatcccgccaggtc

SEQ ID NO: 4941529 - DNA, 25 bp, Homo sapien
ttccgtgcgcgttcggatcccgcca

SEQ ID NO: 4941530 - DNA, 25 bp, Homo sapien
ggccgcccctgccttccgtgcgcgt

SEQ ID NO: 4941531 - DNA, 25 bp, Homo sapien
cctgccttccgtgcgcgttcggatc

SEQ ID NO: 4941532 - DNA, 25 bp, Homo sapien
gcgagcggtttatggtctgggcctc

SEQ ID NO: 4941533 - DNA, 25 bp, Homo sapien
cagcagcgagcggtttatggtctgg

SEQ ID NO: 4941534 - DNA, 25 bp, Homo sapien
cagcgagcggtttatggtctgggcc

SEQ ID NO: 4941535 - DNA, 25 bp, Homo sapien
ccagcagcgagcggtttatggtctg

SEQ ID NO: 4941536 - DNA, 25 bp, Homo sapien
cgccggctgcagcagtcgcgtgagc

SEQ ID NO: 4941537 - DNA, 25 bp, Homo sapien
tgcagcagtcgcgtgagctgcgagt

SEQ ID NO: 4941538 - DNA, 25 bp, Homo sapien
ggaagggcacgtgcggccggtgggc

SEQ ID NO: 4941539 - DNA, 25 bp, Homo sapien
ctgcgagtcgcggaagggcacgtgc

SEQ ID NO: 4941540 - DNA, 25 bp, Homo sapien
gggtgggcggcgaccggcacgcaca

SEQ ID NO: 4941541 - DNA, 25 bp, Homo sapien
ccgggtgggcggcgaccggcacgca

SEQ ID NO: 4941542 - DNA, 25 bp, Homo sapien
tgggcggcgaccggcacgcacacac

SEQ ID NO: 4941543 - DNA, 25 bp, Homo sapien
ggtgggcggcgaccggcacgcacac

SEQ ID NO: 4941544 - DNA, 25 bp, Homo sapien
tcccggtgagcggagtgtcggtgct

SEQ ID NO: 4941545 - DNA, 25 bp, Homo sapien
tgacccactcggtcggcgaacttga

SEQ ID NO: 4941546 - DNA, 25 bp, Homo sapien
agggagcagactgtctccccgagat

SEQ ID NO: 4941547 - DNA, 25 bp, Homo sapien
cgagatcctccggccgcgtggagat

SEQ ID NO: 4941548 - DNA, 25 bp, Homo sapien
cagagacctggcctgagaccccatg

SEQ ID NO: 4941549 - DNA, 25 bp, Homo sapien
acaacacacttcactggctgcggag

SEQ ID NO: 4941550 - DNA, 25 bp, Homo sapien
gagtccacggtgtttattgggccac

SEQ ID NO: 4941551 - DNA, 25 bp, Homo sapien
gagtaaagactgcaccctacatggt

SEQ ID NO: 4941552 - DNA, 25 bp, Homo sapien
tctgtctggaaaggaggtagcacct

SEQ ID NO: 4941553 - DNA, 25 bp, Homo sapien
gccgaccgccgcacaagtgggtccg

SEQ ID NO: 4941554 - DNA, 25 bp, Homo sapien
ggccccgcgctccctgaggcgctgc

SEQ ID NO: 4941555 - DNA, 25 bp, Homo sapien
acaagtgggtccgctggcttccgcg

SEQ ID NO: 4941556 - DNA, 25 bp, Homo sapien
tggcttccgcgggtcagtgggcccc

SEQ ID NO: 4941557 - DNA, 25 bp, Homo sapien
cttggaacaaaacgcgaagcgccca

SEQ ID NO: 4941558 - DNA, 25 bp, Homo sapien
gcctcagccagcaacgcccaaggcg

SEQ ID NO: 4941559 - DNA, 25 bp, Homo sapien
cttcgccttggaacaaaacgcgaag

SEQ ID NO: 4941560 - DNA, 25 bp, Homo sapien
gccttggaacaaaacgcgaagcgcc

SEQ ID NO: 4941561 - DNA, 25 bp, Homo sapien
ccgacgggctgcggagaatccacac

SEQ ID NO: 4941562 - DNA, 25 bp, Homo sapien
gaccgacgggctgcggagaatccac

SEQ ID NO: 4941563 - DNA, 25 bp, Homo sapien
gacgggctgcggagaatccacacac

SEQ ID NO: 4941564 - DNA, 25 bp, Homo sapien
ctgaccgacgggctgcggagaatcc

SEQ ID NO: 4941565 - DNA, 25 bp, Homo sapien
tgggactcggatcacatcttaagtg

SEQ ID NO: 4941566 - DNA, 25 bp, Homo sapien
gacagcatgctcctttgtgggactc

SEQ ID NO: 4941567 - DNA, 25 bp, Homo sapien
tggaaagttcttccaccggatctta

SEQ ID NO: 4941568 - DNA, 25 bp, Homo sapien
ttaagtgcaacctcctcagagatct

SEQ ID NO: 4941569 - DNA, 25 bp, Homo sapien
agatcacttcaggtagtctggccaa

SEQ ID NO: 4941570 - DNA, 25 bp, Homo sapien
gatcacttcaggtagtctggccaac

SEQ ID NO: 4941571 - DNA, 25 bp, Homo sapien
cagatcacttcaggtagtctggcca

SEQ ID NO: 4941572 - DNA, 25 bp, Homo sapien
tcacttcaggtagtctggccaacat

SEQ ID NO: 4941573 - DNA, 25 bp, Homo sapien
tgatgatgcatgaaacaggaggaaa

SEQ ID NO: 4941574 - DNA, 25 bp, Homo sapien
caggaattgggacactggacccaca

SEQ ID NO: 4941575 - DNA, 25 bp, Homo sapien
gaaaacagaacgacacaacacatag

SEQ ID NO: 4941576 - DNA, 25 bp, Homo sapien
gaagccagccaagaacatcatttgt

SEQ ID NO: 4941577 - DNA, 25 bp, Homo sapien
ggctgactcctactcacactctggt

SEQ ID NO: 4941578 - DNA, 25 bp, Homo sapien
gaagaccccgtgatttggacatttg

SEQ ID NO: 4941579 - DNA, 25 bp, Homo sapien
aggagatacgcgtggaccacaccag

SEQ ID NO: 4941580 - DNA, 25 bp, Homo sapien
tttacctcagtaacagctgcctggc

SEQ ID NO: 4941581 - DNA, 25 bp, Homo sapien
tacagatggagaacataccagtggc

SEQ ID NO: 4941582 - DNA, 25 bp, Homo sapien
tggatggacctcaggacatcacgcc

SEQ ID NO: 4941583 - DNA, 25 bp, Homo sapien
caaaccctacagtgacagatgcgca

SEQ ID NO: 4941584 - DNA, 25 bp, Homo sapien
gtaacaggtgaaacatgatggtccg

SEQ ID NO: 4941585 - DNA, 25 bp, Homo sapien
gcgtaggcatgaaatactgcaacct

SEQ ID NO: 4941586 - DNA, 25 bp, Homo sapien
ctgcgtaggcatgaaatactgcaac

SEQ ID NO: 4941587 - DNA, 25 bp, Homo sapien
cgtaggcatgaaatactgcaacctc

SEQ ID NO: 4941588 - DNA, 25 bp, Homo sapien
tgcgtaggcatgaaatactgcaacc

SEQ ID NO: 4941589 - DNA, 25 bp, Homo sapien
gccagtgtcttccactagacgacag

SEQ ID NO: 4941590 - DNA, 25 bp, Homo sapien
tacgactcctcatccgtgtgccagt

SEQ ID NO: 4941591 - DNA, 25 bp, Homo sapien
ttgaagactccaccgttcatgtgcc

SEQ ID NO: 4941592 - DNA, 25 bp, Homo sapien
tagacgacaggcttgctgagagcac

SEQ ID NO: 4941593 - DNA, 25 bp, Homo sapien
aggacagctccaggcccgagagcct

SEQ ID NO: 4941594 - DNA, 25 bp, Homo sapien
gaggacagctccaggcccgagagcc

SEQ ID NO: 4941595 - DNA, 25 bp, Homo sapien
aggcccgagagcctcagtgccctct

SEQ ID NO: 4941596 - DNA, 25 bp, Homo sapien
gcctcagtgccctctctactcccat

SEQ ID NO: 4941597 - DNA, 25 bp, Homo sapien
tcctgtcctgctcgagggtccaact

SEQ ID NO: 4941598 - DNA, 25 bp, Homo sapien
gctgcccaatgtctccatgggactc

SEQ ID NO: 4941599 - DNA, 25 bp, Homo sapien
tgcccaatgtctccatgggactctg

SEQ ID NO: 4941600 - DNA, 25 bp, Homo sapien
ggttcctgtcctgctcgagggtcca

SEQ ID NO: 4941601 - DNA, 25 bp, Homo sapien
ctcctcttccagcagctgctcacac

SEQ ID NO: 4941602 - DNA, 25 bp, Homo sapien
ccggccgcagtgtcttcaggagcac

SEQ ID NO: 4941603 - DNA, 25 bp, Homo sapien
gggcaccaagggcacaggcgggccg

SEQ ID NO: 4941604 - DNA, 25 bp, Homo sapien
accaagggcacaggcgggccggccg

SEQ ID NO: 4941605 - DNA, 25 bp, Homo sapien
aggcgggccggccgcagtgtcttca

SEQ ID NO: 4941606 - DNA, 25 bp, Homo sapien
gagggcaggtagtcagagtcctgga

SEQ ID NO: 4941607 - DNA, 25 bp, Homo sapien
tagtcagagtcctggagtcctggcc

SEQ ID NO: 4941608 - DNA, 25 bp, Homo sapien
tgggggagggcaggtagtcagagtc

SEQ ID NO: 4941609 - DNA, 25 bp, Homo sapien
gcaggtagtcagagtcctggagtcc

SEQ ID NO: 4941610 - DNA, 25 bp, Homo sapien
tgccgaggtcagtgcatcagtacta

SEQ ID NO: 4941611 - DNA, 25 bp, Homo sapien
tgtgccgaggtcagtgcatcagtac

SEQ ID NO: 4941612 - DNA, 25 bp, Homo sapien
ccgaggtcagtgcatcagtactaac

SEQ ID NO: 4941613 - DNA, 25 bp, Homo sapien
ctgtgtgccgaggtcagtgcatcag

SEQ ID NO: 4941614 - DNA, 25 bp, Homo sapien
ttctaggctcaggagcctgggtggg

SEQ ID NO: 4941615 - DNA, 25 bp, Homo sapien
ctaggctcaggagcctgggtggggc

SEQ ID NO: 4941616 - DNA, 25 bp, Homo sapien
cttctaggctcaggagcctgggtgg

SEQ ID NO: 4941617 - DNA, 25 bp, Homo sapien
tctaggctcaggagcctgggtgggg

SEQ ID NO: 4941618 - DNA, 25 bp, Homo sapien
gataacaaggttccagcttccgggc

SEQ ID NO: 4941619 - DNA, 25 bp, Homo sapien
tctagctgtcgacaagcagcgcctc

SEQ ID NO: 4941620 - DNA, 25 bp, Homo sapien
cagggtgcacaacctatgggaggca

SEQ ID NO: 4941621 - DNA, 25 bp, Homo sapien
ttcccagagcttcgtgcccttggct

SEQ ID NO: 4941622 - DNA, 25 bp, Homo sapien
gagtggggagcttgggggccaggct

SEQ ID NO: 4941623 - DNA, 25 bp, Homo sapien
ctgctcggggcaccagagtggggag

SEQ ID NO: 4941624 - DNA, 25 bp, Homo sapien
agtggggagcttgggggccaggctg

SEQ ID NO: 4941625 - DNA, 25 bp, Homo sapien
ggggagcttgggggccaggctgggc

SEQ ID NO: 4941626 - DNA, 25 bp, Homo sapien
cgcgccgcttctgggcatgcttcag

SEQ ID NO: 4941627 - DNA, 25 bp, Homo sapien
gcttcagccgctcctgtgtgctcat

SEQ ID NO: 4941628 - DNA, 25 bp, Homo sapien
ggcgcgccgcttctgggcatgcttc

SEQ ID NO: 4941629 - DNA, 25 bp, Homo sapien
ctgggcgcgccgcttctgggcatgc

SEQ ID NO: 4941630 - DNA, 25 bp, Homo sapien
tggctgcctccttccggggacgctc

SEQ ID NO: 4941631 - DNA, 25 bp, Homo sapien
tctcagcctgggcccacatcttcac

SEQ ID NO: 4941632 - DNA, 25 bp, Homo sapien
ggtcatttcgggcagcggcctccag

SEQ ID NO: 4941633 - DNA, 25 bp, Homo sapien
aggtcatttcgggcagcggcctcca

SEQ ID NO: 4941634 - DNA, 25 bp, Homo sapien
gtcatttcgggcagcggcctccaga

SEQ ID NO: 4941635 - DNA, 25 bp, Homo sapien
ccaagactccagagcaccagaagtg

SEQ ID NO: 4941636 - DNA, 25 bp, Homo sapien
tgtcaactgtgcttcggcccaggac

SEQ ID NO: 4941637 - DNA, 25 bp, Homo sapien
gagagtcacaagcagagcctagggc

SEQ ID NO: 4941638 - DNA, 25 bp, Homo sapien
ccctatttcacggaggtggagacca

SEQ ID NO: 4941639 - DNA, 25 bp, Homo sapien
tggtgcagggccgtcaggccgtcct

SEQ ID NO: 4941640 - DNA, 25 bp, Homo sapien
cgtcaggccgtcctcgttggccaag

SEQ ID NO: 4941641 - DNA, 25 bp, Homo sapien
aggccgtcctcgttggccaagtcag

SEQ ID NO: 4941642 - DNA, 25 bp, Homo sapien
caggccgtcctcgttggccaagtca

SEQ ID NO: 4941643 - DNA, 25 bp, Homo sapien
aaccgtgccacgtgagcgaccagag

SEQ ID NO: 4941644 - DNA, 25 bp, Homo sapien
caaaccgtgccacgtgagcgaccag

SEQ ID NO: 4941645 - DNA, 25 bp, Homo sapien
cgtgccacgtgagcgaccagagcac

SEQ ID NO: 4941646 - DNA, 25 bp, Homo sapien
tgcaaaccgtgccacgtgagcgacc

SEQ ID NO: 4941647 - DNA, 25 bp, Homo sapien
gcatgcagaggcgtccagcactcac

SEQ ID NO: 4941648 - DNA, 25 bp, Homo sapien
tctctcggaaatcatcaatgcagca

SEQ ID NO: 4941649 - DNA, 25 bp, Homo sapien
tggccgcagcatgcagaggcgtcca

SEQ ID NO: 4941650 - DNA, 25 bp, Homo sapien
accatctctcggaaatcatcaatgc

SEQ ID NO: 4941651 - DNA, 25 bp, Homo sapien
agtccagcgtctgctcatcatcaca

SEQ ID NO: 4941652 - DNA, 25 bp, Homo sapien
ggtcatagggcatgttcccgtcggt

SEQ ID NO: 4941653 - DNA, 25 bp, Homo sapien
tgttgaccgccaggagattggcgcc

SEQ ID NO: 4941654 - DNA, 25 bp, Homo sapien
cacggtcggccatggcagtctccag

SEQ ID NO: 4941655 - DNA, 25 bp, Homo sapien
ctcagagggagcgcgaccggcagcc

SEQ ID NO: 4941656 - DNA, 25 bp, Homo sapien
ggctcagagggagcgcgaccggcag

SEQ ID NO: 4941657 - DNA, 25 bp, Homo sapien
agagggagcgcgaccggcagccctc

SEQ ID NO: 4941658 - DNA, 25 bp, Homo sapien
gagcgcgaccggcagccctcccaca

SEQ ID NO: 4941659 - DNA, 25 bp, Homo sapien
agcatgcgcagttctggcacggccc

SEQ ID NO: 4941660 - DNA, 25 bp, Homo sapien
tgcagccggctccggatgtcgtcca

SEQ ID NO: 4941661 - DNA, 25 bp, Homo sapien
ggctccggatgtcgtccagcatgcg

SEQ ID NO: 4941662 - DNA, 25 bp, Homo sapien
ccggatgtcgtccagcatgcgcagt

SEQ ID NO: 4941663 - DNA, 25 bp, Homo sapien
ccacctccaagtagcgaggccccca

SEQ ID NO: 4941664 - DNA, 25 bp, Homo sapien
agccgcctcgctgaacccgttggcg

SEQ ID NO: 4941665 - DNA, 25 bp, Homo sapien
tggccccagtaggccgcggcgtgca

SEQ ID NO: 4941666 - DNA, 25 bp, Homo sapien
tcgctgaacccgttggcggctgcga

SEQ ID NO: 4941667 - DNA, 25 bp, Homo sapien
caggctggctcggtgttccagcagc

SEQ ID NO: 4941668 - DNA, 25 bp, Homo sapien
ggagctgcagactgctgcgctggaa

SEQ ID NO: 4941669 - DNA, 25 bp, Homo sapien
agactgctgcgctggaagccccctc

SEQ ID NO: 4941670 - DNA, 25 bp, Homo sapien
gactgctgcgctggaagccccctcc

SEQ ID NO: 4941671 - DNA, 25 bp, Homo sapien
cggagctgcagactgctgcgctgga

SEQ ID NO: 4941672 - DNA, 25 bp, Homo sapien
cagggactttgcgttcaggtcggcc

SEQ ID NO: 4941673 - DNA, 25 bp, Homo sapien
gggcgtctcgtccatcagggacttt

SEQ ID NO: 4941674 - DNA, 25 bp, Homo sapien
tttgcgttcaggtcggccccgtgcg

SEQ ID NO: 4941675 - DNA, 25 bp, Homo sapien
tgcgccacgagcagctccaccaggg

SEQ ID NO: 4941676 - DNA, 25 bp, Homo sapien
agtgggcgcaggcgtcaggggcgcc

SEQ ID NO: 4941677 - DNA, 25 bp, Homo sapien
gggcgcaggcgtcaggggcgccctc

SEQ ID NO: 4941678 - DNA, 25 bp, Homo sapien
ctgagaagtgggcgcaggcgtcagg

SEQ ID NO: 4941679 - DNA, 25 bp, Homo sapien
tgagaagtgggcgcaggcgtcaggg

SEQ ID NO: 4941680 - DNA, 25 bp, Homo sapien
ggcgcagcaaggagcgctggcggct

SEQ ID NO: 4941681 - DNA, 25 bp, Homo sapien
gtgcggcggcgcagcaaggagcgct

SEQ ID NO: 4941682 - DNA, 25 bp, Homo sapien
gagggcgtcgtgcttgtgcttcagc

SEQ ID NO: 4941683 - DNA, 25 bp, Homo sapien
gggcgcgcaggagggcgtcgtgctt

SEQ ID NO: 4941684 - DNA, 25 bp, Homo sapien
cctgtctggcggtcatcgttgtcct

SEQ ID NO: 4941685 - DNA, 25 bp, Homo sapien
cctcctgggcgtgctgcttgcggta

SEQ ID NO: 4941686 - DNA, 25 bp, Homo sapien
ggcggctgttgccacacgatggcct

SEQ ID NO: 4941687 - DNA, 25 bp, Homo sapien
tcggtgcgctgggttaggctcaccc

SEQ ID NO: 4941688 - DNA, 25 bp, Homo sapien
ctgcgggcagtgaaggtcccagagc

SEQ ID NO: 4941689 - DNA, 25 bp, Homo sapien
agctcgctggcgcttcaggtcagcc

SEQ ID NO: 4941690 - DNA, 25 bp, Homo sapien
tactcggccattgtgcggcctgacc

SEQ ID NO: 4941691 - DNA, 25 bp, Homo sapien
gacactccggtctagtcgcttggag

SEQ ID NO: 4941692 - DNA, 25 bp, Homo sapien
tcgcttggagtatagatgccgcact

SEQ ID NO: 4941693 - DNA, 25 bp, Homo sapien
tgtgcccgcgacagggcccctgcat

SEQ ID NO: 4941694 - DNA, 25 bp, Homo sapien
gtctttgcagccagacatccctcca

SEQ ID NO: 4941695 - DNA, 25 bp, Homo sapien
gggtttccgtgctgcacccgcagca

SEQ ID NO: 4941696 - DNA, 25 bp, Homo sapien
aaacagccctttatcaagagttgca

SEQ ID NO: 4941697 - DNA, 25 bp, Homo sapien
ggcacaggttaacatgggcctggcc

SEQ ID NO: 4941698 - DNA, 25 bp, Homo sapien
cgtgcacgtctctgttccgctgcca

SEQ ID NO: 4941699 - DNA, 25 bp, Homo sapien
cgtgcgcaggcctgcccctctggcc

SEQ ID NO: 4941700 - DNA, 25 bp, Homo sapien
aacagcctccccgtgcgcaggcctg

SEQ ID NO: 4941701 - DNA, 25 bp, Homo sapien
aaacgagctgggataggccgtcaga

SEQ ID NO: 4941702 - DNA, 25 bp, Homo sapien
tccagccctcttgttcccgattgga

SEQ ID NO: 4941703 - DNA, 25 bp, Homo sapien
agtaggaaacgagctgggataggcc

SEQ ID NO: 4941704 - DNA, 25 bp, Homo sapien
ttgttcccgattggaggagagagta

SEQ ID NO: 4941705 - DNA, 25 bp, Homo sapien
ggcctggccctcgtggcacccgcat

SEQ ID NO: 4941706 - DNA, 25 bp, Homo sapien
gaggcctggccctcgtggcacccgc

SEQ ID NO: 4941707 - DNA, 25 bp, Homo sapien
aggcctggccctcgtggcacccgca

SEQ ID NO: 4941708 - DNA, 25 bp, Homo sapien
agggggcagccgtagcagagggaac

SEQ ID NO: 4941709 - DNA, 25 bp, Homo sapien
ccgtctgggaacagctctgccccag

SEQ ID NO: 4941710 - DNA, 25 bp, Homo sapien
aggtggcaggaccagaagtgggaat

SEQ ID NO: 4941711 - DNA, 25 bp, Homo sapien
gagctggggacagttgggccccgcc

SEQ ID NO: 4941712 - DNA, 25 bp, Homo sapien
tggctccggtcacctgtgctcgagg

SEQ ID NO: 4941713 - DNA, 25 bp, Homo sapien
ctggctccggtcacctgtgctcgag

SEQ ID NO: 4941714 - DNA, 25 bp, Homo sapien
ctccggtcacctgtgctcgaggcca

SEQ ID NO: 4941715 - DNA, 25 bp, Homo sapien
ggctccggtcacctgtgctcgaggc

SEQ ID NO: 4941716 - DNA, 25 bp, Homo sapien
agctccaaggctcgctgcactatgg

SEQ ID NO: 4941717 - DNA, 25 bp, Homo sapien
gggttcatgccgtccagcgtcagca

SEQ ID NO: 4941718 - DNA, 25 bp, Homo sapien
cactgcgtactccactctccgcaca

SEQ ID NO: 4941719 - DNA, 25 bp, Homo sapien
cactctccgcacacgcgggttcatg

SEQ ID NO: 4941720 - DNA, 25 bp, Homo sapien
cggatgacctcggtgaaaggcttct

SEQ ID NO: 4941721 - DNA, 25 bp, Homo sapien
gacctcggtgaaaggcttcttcaca

SEQ ID NO: 4941722 - DNA, 25 bp, Homo sapien
gttggcacggatgacctcggtgaaa

SEQ ID NO: 4941723 - DNA, 25 bp, Homo sapien
gcacggatgacctcggtgaaaggct

SEQ ID NO: 4941724 - DNA, 25 bp, Homo sapien
gggtgctccgggcagtgcaggagcc

SEQ ID NO: 4941725 - DNA, 25 bp, Homo sapien
ggtgctccgggcagtgcaggagcct

SEQ ID NO: 4941726 - DNA, 25 bp, Homo sapien
tgggaagacggagtgctgaggccag

SEQ ID NO: 4941727 - DNA, 25 bp, Homo sapien
ggaagacggagtgctgaggccaggg

SEQ ID NO: 4941728 - DNA, 25 bp, Homo sapien
ttcttggcatcgtcagggaagttgg

SEQ ID NO: 4941729 - DNA, 25 bp, Homo sapien
gcaagatgcgctccgcccttttctt

SEQ ID NO: 4941730 - DNA, 25 bp, Homo sapien
ccacacgcctgcaagatgcgctccg

SEQ ID NO: 4941731 - DNA, 25 bp, Homo sapien
ccttttcttggcatcgtcagggaag

SEQ ID NO: 4941732 - DNA, 25 bp, Homo sapien
agtacaggtgaagttctcctcagcc

SEQ ID NO: 4941733 - DNA, 25 bp, Homo sapien
gaagtacaggtgaagttctcctcag

SEQ ID NO: 4941734 - DNA, 25 bp, Homo sapien
atgggaagtacaggtgaagttctcc

SEQ ID NO: 4941735 - DNA, 25 bp, Homo sapien
tacaggtgaagttctcctcagccct

SEQ ID NO: 4941736 - DNA, 25 bp, Homo sapien
tgtaccgcgccacgtcctcccggat

SEQ ID NO: 4941737 - DNA, 25 bp, Homo sapien
gcagggatgcctccgtcacgcctct

SEQ ID NO: 4941738 - DNA, 25 bp, Homo sapien
tcccggatcagctggatgccggagc

SEQ ID NO: 4941739 - DNA, 25 bp, Homo sapien
acgatggcatcgctggcccctgtgg

SEQ ID NO: 4941740 - DNA, 25 bp, Homo sapien
ggaaggcagggttggcgaggcctgg

SEQ ID NO: 4941741 - DNA, 25 bp, Homo sapien
cccctctgcagtgtcaggaatgtct

SEQ ID NO: 4941742 - DNA, 25 bp, Homo sapien
gggcgccccctctgcagtgtcagga

SEQ ID NO: 4941743 - DNA, 25 bp, Homo sapien
cctgggcgccccctctgcagtgtca

SEQ ID NO: 4941744 - DNA, 25 bp, Homo sapien
cagcgtggccgagtagagtgggtac

SEQ ID NO: 4941745 - DNA, 25 bp, Homo sapien
acacccgtgcgtgtgtggccctcgc

SEQ ID NO: 4941746 - DNA, 25 bp, Homo sapien
gcccagtgcacggtgaagctcggcc

SEQ ID NO: 4941747 - DNA, 25 bp, Homo sapien
ttgccagggttgatgacacagagcg

SEQ ID NO: 4941748 - DNA, 25 bp, Homo sapien
gcggcggggaacgcaacgtgggcgc

SEQ ID NO: 4941749 - DNA, 25 bp, Homo sapien
gcggcggggaacgcaccgtgggcgc

SEQ ID NO: 4941750 - DNA, 25 bp, Homo sapien
acgcaacgtgggcgcggggggagtg

SEQ ID NO: 4941751 - DNA, 25 bp, Homo sapien
acgcaccgtgggcgcggggggagtg

SEQ ID NO: 4941752 - DNA, 25 bp, Homo sapien
tgggtgagccaagggggcgcactgc

SEQ ID NO: 4941753 - DNA, 25 bp, Homo sapien
tgggccagggcgcacgtgggtgcgg

SEQ ID NO: 4941754 - DNA, 25 bp, Homo sapien
tgggcagccggggtccagcggaccc

SEQ ID NO: 4941755 - DNA, 25 bp, Homo sapien
gggtccagcggacccggcactgcct

SEQ ID NO: 4941756 - DNA, 25 bp, Homo sapien
ctcgtccgccagcagaaagagccgc

SEQ ID NO: 4941757 - DNA, 25 bp, Homo sapien
gatgcactcgcgggtctgcacctgc

SEQ ID NO: 4941758 - DNA, 25 bp, Homo sapien
tcttcgaaggcgaagcggatcacgg

SEQ ID NO: 4941759 - DNA, 25 bp, Homo sapien
ggatcacggcctcgatgcactcgcg

SEQ ID NO: 4941760 - DNA, 25 bp, Homo sapien
ctggaagggcgcaaggcgtcacggg

SEQ ID NO: 4941761 - DNA, 25 bp, Homo sapien
tcacgggggcggactgttgcccggc

SEQ ID NO: 4941762 - DNA, 25 bp, Homo sapien
cgcaaggcgtcacgggggcggactg

SEQ ID NO: 4941763 - DNA, 25 bp, Homo sapien
cacgggggcggactgttgcccggct

SEQ ID NO: 4941764 - DNA, 25 bp, Homo sapien
aacccgcggcgtacacgttgtcctg

SEQ ID NO: 4941765 - DNA, 25 bp, Homo sapien
gtagggcggccccatctccatgagc

SEQ ID NO: 4941766 - DNA, 25 bp, Homo sapien
agtggaactgcgaacccgcggcgta

SEQ ID NO: 4941767 - DNA, 25 bp, Homo sapien
ccatgagcaccttcttgaatgagtg

SEQ ID NO: 4941768 - DNA, 25 bp, Homo sapien
ctggccatggcccgcgagcccccac

SEQ ID NO: 4941769 - DNA, 25 bp, Homo sapien
gagggggtggcccatcgggcgagga

SEQ ID NO: 4941770 - DNA, 25 bp, Homo sapien
agggggtggcccatcgggcgaggag

SEQ ID NO: 4941771 - DNA, 25 bp, Homo sapien
gcgtccatgttcaccacctccacat

SEQ ID NO: 4941772 - DNA, 25 bp, Homo sapien
cctggaactgcgcaaaggaggggtc

SEQ ID NO: 4941773 - DNA, 25 bp, Homo sapien
agggcctgtcctggcaccggcgggc

SEQ ID NO: 4941774 - DNA, 25 bp, Homo sapien
ggcgcgggcgggctgaccaccaggt

SEQ ID NO: 4941775 - DNA, 25 bp, Homo sapien
catcccccacccctgattaggtcac

SEQ ID NO: 4941776 - DNA, 25 bp, Homo sapien
catcagggcacggcactcggcatcc

SEQ ID NO: 4941777 - DNA, 25 bp, Homo sapien
cggcactcggcatcccccacccctg

SEQ ID NO: 4941778 - DNA, 25 bp, Homo sapien
tcagggcacggcactcggcatcccc

SEQ ID NO: 4941779 - DNA, 25 bp, Homo sapien
aaggagtacatggcgccctgcactg

SEQ ID NO: 4941780 - DNA, 25 bp, Homo sapien
ctgcacgcgcgggaaggagtacatg

SEQ ID NO: 4941781 - DNA, 25 bp, Homo sapien
gccaggagcctcattgaagacctgc

SEQ ID NO: 4941782 - DNA, 25 bp, Homo sapien
acatggcgccctgcactgggttgca

SEQ ID NO: 4941783 - DNA, 25 bp, Homo sapien
ctgtggacggagagccgtcagagag

SEQ ID NO: 4941784 - DNA, 25 bp, Homo sapien
acggagagccgtcagagagggatgc

SEQ ID NO: 4941785 - DNA, 25 bp, Homo sapien
tcagagagggatgcccggccccccc

SEQ ID NO: 4941786 - DNA, 25 bp, Homo sapien
ggacggagagccgtcagagagggat

SEQ ID NO: 4941787 - DNA, 25 bp, Homo sapien
ggcaccacgcagatgccggtctcct

SEQ ID NO: 4941788 - DNA, 25 bp, Homo sapien
agaagaacatatcgggggccaggcc

SEQ ID NO: 4941789 - DNA, 25 bp, Homo sapien
ctgcccaaagccgctccctggcacc

SEQ ID NO: 4941790 - DNA, 25 bp, Homo sapien
cctggcaccacgcagatgccggtct

SEQ ID NO: 4941791 - DNA, 25 bp, Homo sapien
ccagggtggcgggacagggagtgag

SEQ ID NO: 4941792 - DNA, 25 bp, Homo sapien
gggtggcgggacagggagtgagggc

SEQ ID NO: 4941793 - DNA, 25 bp, Homo sapien
ggtggcgggacagggagtgagggcc

SEQ ID NO: 4941794 - DNA, 25 bp, Homo sapien
cagggtggcgggacagggagtgagg

SEQ ID NO: 4941795 - DNA, 25 bp, Homo sapien
ctccaaggggggcagaatggtcatc

SEQ ID NO: 4941796 - DNA, 25 bp, Homo sapien
gaacttggcatggaacctgctcagc

SEQ ID NO: 4941797 - DNA, 25 bp, Homo sapien
aggagtactcgagggtgaacttggc

SEQ ID NO: 4941798 - DNA, 25 bp, Homo sapien
acttggcatggaacctgctcagctt

SEQ ID NO: 4941799 - DNA, 25 bp, Homo sapien
tcaagagcaagtacagtgggctcca

SEQ ID NO: 4941800 - DNA, 25 bp, Homo sapien
tcgaatgtaaggatcggcctgcgcc

SEQ ID NO: 4941801 - DNA, 25 bp, Homo sapien
tcagctcctccgtaaggcggtgaca

SEQ ID NO: 4941802 - DNA, 25 bp, Homo sapien
ccgaagcgtggttgctgcagtgccc

SEQ ID NO: 4941803 - DNA, 25 bp, Homo sapien
tcagtagtttcggatccgctccagg

SEQ ID NO: 4941804 - DNA, 25 bp, Homo sapien
acaccccggcatggctttggttctg

SEQ ID NO: 4941805 - DNA, 25 bp, Homo sapien
tacaggctagggtctggacacgtgc

SEQ ID NO: 4941806 - DNA, 25 bp, Homo sapien
ggacacgtgctctcgggctttagga

SEQ ID NO: 4941807 - DNA, 25 bp, Homo sapien
gaccgggcagagtcagcgtcgtaca

SEQ ID NO: 4941808 - DNA, 25 bp, Homo sapien
ccagcttgagcagccacggagcgta

SEQ ID NO: 4941809 - DNA, 25 bp, Homo sapien
acggagcgtacagaaccttggccag

SEQ ID NO: 4941810 - DNA, 25 bp, Homo sapien
aggccggactggagcccgtagggca

SEQ ID NO: 4941811 - DNA, 25 bp, Homo sapien
cagcggggcccaagccagcttgagc

SEQ ID NO: 4941812 - DNA, 25 bp, Homo sapien
agcaaccccgccacagcggcgggca

SEQ ID NO: 4941813 - DNA, 25 bp, Homo sapien
ggcagcccggcaagcagcccacaca

SEQ ID NO: 4941814 - DNA, 25 bp, Homo sapien
cggcacccaggttcaacaacagcag

SEQ ID NO: 4941815 - DNA, 25 bp, Homo sapien
ctgcatggcggcacccaggttcaac

SEQ ID NO: 4941816 - DNA, 25 bp, Homo sapien
ccagcttgtaggtgagcacaaagcc

SEQ ID NO: 4941817 - DNA, 25 bp, Homo sapien
tgcacggtattgcccggccccagtt

SEQ ID NO: 4941818 - DNA, 25 bp, Homo sapien
gcagaaagagttgcggccacgagaa

SEQ ID NO: 4941819 - DNA, 25 bp, Homo sapien
agcttgtacgcgaccacctgcacgg

SEQ ID NO: 4941820 - DNA, 25 bp, Homo sapien
ccacagtcccaactcgggagcagaa

SEQ ID NO: 4941821 - DNA, 25 bp, Homo sapien
aggagccagcgatggagcagaccac

SEQ ID NO: 4941822 - DNA, 25 bp, Homo sapien
cacagcacccacaccattccacagt

SEQ ID NO: 4941823 - DNA, 25 bp, Homo sapien
tcgggagcagaaacgccgtggtcca

SEQ ID NO: 4941824 - DNA, 25 bp, Homo sapien
aagcgcagcaccgacctcaacagag

SEQ ID NO: 4941825 - DNA, 25 bp, Homo sapien
ccgacctcaacagaggcagcagttt

SEQ ID NO: 4941826 - DNA, 25 bp, Homo sapien
gaccaaggcagtctgacaggctagg

SEQ ID NO: 4941827 - DNA, 25 bp, Homo sapien
ctctcaagattgtgccagcgtccat

SEQ ID NO: 4941828 - DNA, 25 bp, Homo sapien
gcagaagtcagcagtgccccaggct

SEQ ID NO: 4941829 - DNA, 25 bp, Homo sapien
ttcctcctcaaggccagcccctcac

SEQ ID NO: 4941830 - DNA, 25 bp, Homo sapien
gagggcagaagtcagcagtgcccca

SEQ ID NO: 4941831 - DNA, 25 bp, Homo sapien
tgggagggcagaagtcagcagtgcc

SEQ ID NO: 4941832 - DNA, 25 bp, Homo sapien
cagctggctgcagcgcatcatccca

SEQ ID NO: 4941833 - DNA, 25 bp, Homo sapien
tggctgcagcgcatcatcccagtga

SEQ ID NO: 4941834 - DNA, 25 bp, Homo sapien
ctggctgcagcgcatcatcccagtg

SEQ ID NO: 4941835 - DNA, 25 bp, Homo sapien
gctggctgcagcgcatcatcccagt

SEQ ID NO: 4941836 - DNA, 25 bp, Homo sapien
ccaggtacagaacgggaaaggcaga

SEQ ID NO: 4941837 - DNA, 25 bp, Homo sapien
gcgtggccagaaggctgtagtgtgt

SEQ ID NO: 4941838 - DNA, 25 bp, Homo sapien
gctaggtccaggtacagaacgggaa

SEQ ID NO: 4941839 - DNA, 25 bp, Homo sapien
ctgggtgctaggtccaggtacagaa

SEQ ID NO: 4941840 - DNA, 25 bp, Homo sapien
aggcacatgtggctttattgaccac

SEQ ID NO: 4941841 - DNA, 25 bp, Homo sapien
gctttattgaccactccagccactc

SEQ ID NO: 4941842 - DNA, 25 bp, Homo sapien
ttattgaccactccagccactcagc

SEQ ID NO: 4941843 - DNA, 25 bp, Homo sapien
ggcacatgtggctttattgaccact

SEQ ID NO: 4941844 - DNA, 25 bp, Homo sapien
gtgtacgggcaggaccgacgcttct

SEQ ID NO: 4941845 - DNA, 25 bp, Homo sapien
gtgtcttggctccaccgtaggaagc

SEQ ID NO: 4941846 - DNA, 25 bp, Homo sapien
ggagaaaatacctgcacctgagctt

SEQ ID NO: 4941847 - DNA, 25 bp, Homo sapien
tcttccacggcatcggtgaggcctg

SEQ ID NO: 4941848 - DNA, 25 bp, Homo sapien
gacgaggttggagaatcagggctgt

SEQ ID NO: 4941849 - DNA, 25 bp, Homo sapien
ggtaagcacgccctgcccagttgga

SEQ ID NO: 4941850 - DNA, 25 bp, Homo sapien
ccatcgagactttgctgtgctacct

SEQ ID NO: 4941851 - DNA, 25 bp, Homo sapien
cctatacccattgccgtctgaactg

SEQ ID NO: 4941852 - DNA, 25 bp, Homo sapien
gcttcgagagctacgtgcaggccgt

SEQ ID NO: 4941853 - DNA, 25 bp, Homo sapien
ctcatgaaagttgccctgcagggcg

SEQ ID NO: 4941854 - DNA, 25 bp, Homo sapien
ggtacagcgagccttcatgcagggc

SEQ ID NO: 4941855 - DNA, 25 bp, Homo sapien
cagcttaccgtacaggctttggaca

SEQ ID NO: 4941856 - DNA, 25 bp, Homo sapien
ggacacagagcggatcgctgcgctc

SEQ ID NO: 4941857 - DNA, 25 bp, Homo sapien
gagcggatcgctgcgctcctccgaa

SEQ ID NO: 4941858 - DNA, 25 bp, Homo sapien
acacagagcggatcgctgcgctcct

SEQ ID NO: 4941859 - DNA, 25 bp, Homo sapien
tgcaaccggcgcgaggacacagagc

SEQ ID NO: 4941860 - DNA, 25 bp, Homo sapien
ccagccccgcctagaccgtccgccg

SEQ ID NO: 4941861 - DNA, 25 bp, Homo sapien
cctccagccccgcctagaccgtccg

SEQ ID NO: 4941862 - DNA, 25 bp, Homo sapien
ggtcccgcaaccgcagccaccgcct

SEQ ID NO: 4941863 - DNA, 25 bp, Homo sapien
cggtcccgcaaccgcagccaccgcc

SEQ ID NO: 4941864 - DNA, 25 bp, Homo sapien
cgagcgaccggtgccccgccccttg

SEQ ID NO: 4941865 - DNA, 25 bp, Homo sapien
gggcgtgcgccgccccgctcagaca

SEQ ID NO: 4941866 - DNA, 25 bp, Homo sapien
ctcggccaggccgccccgagcgacc

SEQ ID NO: 4941867 - DNA, 25 bp, Homo sapien
agggccaggggcgtgcgccgccccg

SEQ ID NO: 4941868 - DNA, 25 bp, Homo sapien
ggcctgctcctccaggtcggatgcg

SEQ ID NO: 4941869 - DNA, 25 bp, Homo sapien
ggggcctgctcctccaggtcggatg

SEQ ID NO: 4941870 - DNA, 25 bp, Homo sapien
tcccgagcggggcctgctcctccag

SEQ ID NO: 4941871 - DNA, 25 bp, Homo sapien
ccgagcggggcctgctcctccaggt

SEQ ID NO: 4941872 - DNA, 25 bp, Homo sapien
gaacgcgacggtcctcggtcgcctg

SEQ ID NO: 4941873 - DNA, 25 bp, Homo sapien
gggaggcaggcacctccgtgcgacg

SEQ ID NO: 4941874 - DNA, 25 bp, Homo sapien
acggcctgcccaccaagggaggcag

SEQ ID NO: 4941875 - DNA, 25 bp, Homo sapien
gtcgcctgcgtttcgcgaagacgcc

SEQ ID NO: 4941876 - DNA, 25 bp, Homo sapien
gcatcctcaaaactaaatcgcagcc

SEQ ID NO: 4941877 - DNA, 25 bp, Homo sapien
tcaaaactaaatcgcagccatctcc

SEQ ID NO: 4941878 - DNA, 25 bp, Homo sapien
gctgctgcctgtagcatcctcaaaa

SEQ ID NO: 4941879 - DNA, 25 bp, Homo sapien
tgtagcatcctcaaaactaaatcgc

SEQ ID NO: 4941880 - DNA, 25 bp, Homo sapien
gggattcagaaggtgcaaagctaca

SEQ ID NO: 4941881 - DNA, 25 bp, Homo sapien
aagaccaagtcttaagtatgtggga

SEQ ID NO: 4941882 - DNA, 25 bp, Homo sapien
tgttggcccttaccactggcctaaa

SEQ ID NO: 4941883 - DNA, 25 bp, Homo sapien
aaggtgcaaagctacagactgctca

SEQ ID NO: 4941884 - DNA, 25 bp, Homo sapien
ggaggagagaccctaggccactacc

SEQ ID NO: 4941885 - DNA, 25 bp, Homo sapien
ggccactaccaagccacacacaagt

SEQ ID NO: 4941886 - DNA, 25 bp, Homo sapien
ggagagaccctaggccactaccaag

SEQ ID NO: 4941887 - DNA, 25 bp, Homo sapien
gtggtaggaaggcccagcatagtgc

SEQ ID NO: 4941888 - DNA, 25 bp, Homo sapien
ggtgctgggccgggcagacggccac

SEQ ID NO: 4941889 - DNA, 25 bp, Homo sapien
acgtgtgtaccaactcgcgcagtac

SEQ ID NO: 4941890 - DNA, 25 bp, Homo sapien
agtgggcacactcctgtagcagctg

SEQ ID NO: 4941891 - DNA, 25 bp, Homo sapien
ggcagtcagccccaggataacagcc

SEQ ID NO: 4941892 - DNA, 25 bp, Homo sapien
tgcatgctctcagtgctaggccgct

SEQ ID NO: 4941893 - DNA, 25 bp, Homo sapien
agccaccttgggacaggagcaacgc

SEQ ID NO: 4941894 - DNA, 25 bp, Homo sapien
gcatgagctcttgctaactttatga

SEQ ID NO: 4941895 - DNA, 25 bp, Homo sapien
gagcaacgcgcctgctcctgcatga

SEQ ID NO: 4941896 - DNA, 25 bp, Homo sapien
tttatgacccaagcctcctcagggg

SEQ ID NO: 4941897 - DNA, 25 bp, Homo sapien
gcaggcccagattgttgaagcgcag

SEQ ID NO: 4941898 - DNA, 25 bp, Homo sapien
cacagtgttgcgcatgggcaggtcc

SEQ ID NO: 4941899 - DNA, 25 bp, Homo sapien
caatgcatgtgcgagctacggcagc

SEQ ID NO: 4941900 - DNA, 25 bp, Homo sapien
gaagtagcggaagttgtcctcgcca

SEQ ID NO: 4941901 - DNA, 25 bp, Homo sapien
ctgaaaggagagaggagcccatgct

SEQ ID NO: 4941902 - DNA, 25 bp, Homo sapien
aaggagagaggagcccatgctgagc

SEQ ID NO: 4941903 - DNA, 25 bp, Homo sapien
gagagaggagcccatgctgagctca

SEQ ID NO: 4941904 - DNA, 25 bp, Homo sapien
aaaggagagaggagcccatgctgag

SEQ ID NO: 4941905 - DNA, 25 bp, Homo sapien
agcacagaaggccaactccaggctc

SEQ ID NO: 4941906 - DNA, 25 bp, Homo sapien
gagcacagaaggccaactccaggct

SEQ ID NO: 4941907 - DNA, 25 bp, Homo sapien
tccgtgccaggaagcgtaggtcctc

SEQ ID NO: 4941908 - DNA, 25 bp, Homo sapien
ctccgtgccaggaagcgtaggtcct

SEQ ID NO: 4941909 - DNA, 25 bp, Homo sapien
gacactcagtcagctccagatgcaa

SEQ ID NO: 4941910 - DNA, 25 bp, Homo sapien
tggtgcaactcagcttctacgcggg

SEQ ID NO: 4941911 - DNA, 25 bp, Homo sapien
gacaggtcgttaccactcaggtcca

SEQ ID NO: 4941912 - DNA, 25 bp, Homo sapien
ccgtagatgtccgtggtccagagca

SEQ ID NO: 4941913 - DNA, 25 bp, Homo sapien
taaccagtgcttttgtgaaggcctc

SEQ ID NO: 4941914 - DNA, 25 bp, Homo sapien
gcatgctccgtcagtaaaggtggaa

SEQ ID NO: 4941915 - DNA, 25 bp, Homo sapien
gaacgttgcactcgggaatcctggg

SEQ ID NO: 4941916 - DNA, 25 bp, Homo sapien
gtaagtacgagtgcgaggcctccaa

SEQ ID NO: 4941917 - DNA, 25 bp, Homo sapien
ctgttttagcagcaccctcaagcca

SEQ ID NO: 4941918 - DNA, 25 bp, Homo sapien
gactccgtgtgaaaacgctgtggga

SEQ ID NO: 4941919 - DNA, 25 bp, Homo sapien
gcaaaaccccaactgcacaggctgt

SEQ ID NO: 4941920 - DNA, 25 bp, Homo sapien
acagagaacccatggcgctgtgact

SEQ ID NO: 4941921 - DNA, 25 bp, Homo sapien
ttcccaagagagggcatccaaaggc

SEQ ID NO: 4941922 - DNA, 25 bp, Homo sapien
tgtctatgtggacgcccaggttcct

SEQ ID NO: 4941923 - DNA, 25 bp, Homo sapien
aggtgctttctcagagaccgacgga

SEQ ID NO: 4941924 - DNA, 25 bp, Homo sapien
aaacagtggcacttgttgcaggaag

SEQ ID NO: 4941925 - DNA, 25 bp, Homo sapien
caggaactccacagggtgacttaac

SEQ ID NO: 4941926 - DNA, 25 bp, Homo sapien
ggtgacttaacagaattgagggttc

SEQ ID NO: 4941927 - DNA, 25 bp, Homo sapien
aagacaggaactccacagggtgact

SEQ ID NO: 4941928 - DNA, 25 bp, Homo sapien
agggttctgcacacttttaggctga

SEQ ID NO: 4941929 - DNA, 25 bp, Homo sapien
ccacggtgttggcagtagggagcag

SEQ ID NO: 4941930 - DNA, 25 bp, Homo sapien
cttcctcggaaagcgtctctgtctg

SEQ ID NO: 4941931 - DNA, 25 bp, Homo sapien
ctcttcctcggaaagcgtctctgtc

SEQ ID NO: 4941932 - DNA, 25 bp, Homo sapien
agggctgcgggagtgggtgtgctgg

SEQ ID NO: 4941933 - DNA, 25 bp, Homo sapien
tgcaagtcctgcgcctcacaggtac

SEQ ID NO: 4941934 - DNA, 25 bp, Homo sapien
tctagcggggctgtcctccctagca

SEQ ID NO: 4941935 - DNA, 25 bp, Homo sapien
gctctagcggggctgtcctccctag

SEQ ID NO: 4941936 - DNA, 25 bp, Homo sapien
caggctctagcggggctgtcctccc

SEQ ID NO: 4941937 - DNA, 25 bp, Homo sapien
gaaaaggcaacccagtctagcttgg

SEQ ID NO: 4941938 - DNA, 25 bp, Homo sapien
tattggctggctctcgactgccgag

SEQ ID NO: 4941939 - DNA, 25 bp, Homo sapien
tgtccttacttcagcgactgcagga

SEQ ID NO: 4941940 - DNA, 25 bp, Homo sapien
gtcaaaagttagacgcaggtgcagg

SEQ ID NO: 4941941 - DNA, 25 bp, Homo sapien
gaagccacaccagaaacccagttgg

SEQ ID NO: 4941942 - DNA, 25 bp, Homo sapien
gggtggctctccctacatggtcaca

SEQ ID NO: 4941943 - DNA, 25 bp, Homo sapien
ggataacaaggaggcgtgtctgccc

SEQ ID NO: 4941944 - DNA, 25 bp, Homo sapien
tagggcaagatttaaacaccaaggc

SEQ ID NO: 4941945 - DNA, 25 bp, Homo sapien
gccgaaaatcaaccggctctcgtgg

SEQ ID NO: 4941946 - DNA, 25 bp, Homo sapien
cccagcggattagggagttgtcctc

SEQ ID NO: 4941947 - DNA, 25 bp, Homo sapien
gcagtgacagtcgtcgcggaatcct

SEQ ID NO: 4941948 - DNA, 25 bp, Homo sapien
cagacacagggcgttccatcctctt

SEQ ID NO: 4941949 - DNA, 25 bp, Homo sapien
ctgcggcagagagcgcaacttcctg

SEQ ID NO: 4941950 - DNA, 25 bp, Homo sapien
cttgggagcccagcgcgctgagtac

SEQ ID NO: 4941951 - DNA, 25 bp, Homo sapien
cggtggtcttcacgcacctgctgac

SEQ ID NO: 4941952 - DNA, 25 bp, Homo sapien
tgaggccaggcgaacctcttaccgt

SEQ ID NO: 4941953 - DNA, 25 bp, Homo sapien
aggtaatgctgtgcctccctctcca

SEQ ID NO: 4941954 - DNA, 25 bp, Homo sapien
ggcctggccctctatctgcagcttt

SEQ ID NO: 4941955 - DNA, 25 bp, Homo sapien
tgcttcaaaggtaatgctgtgcctc

SEQ ID NO: 4941956 - DNA, 25 bp, Homo sapien
cacctgcacgctgggacttatcacg

SEQ ID NO: 4941957 - DNA, 25 bp, Homo sapien
aggtgcgcatagacgcggataagtc

SEQ ID NO: 4941958 - DNA, 25 bp, Homo sapien
catgcggtgtgcacagacaagcagg

SEQ ID NO: 4941959 - DNA, 25 bp, Homo sapien
gcctccctgcatgcggtgtgcacag

SEQ ID NO: 4941960 - DNA, 25 bp, Homo sapien
agcagaggtgcgcatagacgcggat

SEQ ID NO: 4941961 - DNA, 25 bp, Homo sapien
ggaggtggtacaactgattacaaac

SEQ ID NO: 4941962 - DNA, 25 bp, Homo sapien
ggtggtacaactgattacaaacttg

SEQ ID NO: 4941963 - DNA, 25 bp, Homo sapien
ggtacaactgattacaaacttgaaa

SEQ ID NO: 4941964 - DNA, 25 bp, Homo sapien
gaggaggtggtacaactgattacaa

SEQ ID NO: 4941965 - DNA, 25 bp, Homo sapien
tgcgcggtgggcaacctcgactcct

SEQ ID NO: 4941966 - DNA, 25 bp, Homo sapien
gccgaggctcctacatgggccgcgt

SEQ ID NO: 4941967 - DNA, 25 bp, Homo sapien
gcagcttcggactctgtcctacaag

SEQ ID NO: 4941968 - DNA, 25 bp, Homo sapien
cgcgtccctgctgcgttgtgcagct

SEQ ID NO: 4941969 - DNA, 25 bp, Homo sapien
tgacctgctggtcgcttccggcgcg

SEQ ID NO: 4941970 - DNA, 25 bp, Homo sapien
tacacgcagggccagagtccggagc

SEQ ID NO: 4941971 - DNA, 25 bp, Homo sapien
tatttctactacgtggaccaccagg

SEQ ID NO: 4941972 - DNA, 25 bp, Homo sapien
cgagaggcgacgacacgagtgaata

SEQ ID NO: 4941973 - DNA, 25 bp, Homo sapien
acgagcgagcgggaaggcgccgggc

SEQ ID NO: 4941974 - DNA, 25 bp, Homo sapien
agcgagcgggaaggcgccgggcccg

SEQ ID NO: 4941975 - DNA, 25 bp, Homo sapien
cgagcgagcgggaaggcgccgggcc

SEQ ID NO: 4941976 - DNA, 25 bp, Homo sapien
gagcgagcgggaaggcgccgggccc

SEQ ID NO: 4941977 - DNA, 25 bp, Homo sapien
cagagcaagttgaggtcattccttc

SEQ ID NO: 4941978 - DNA, 25 bp, Homo sapien
cccgtcctccgtgcagagcaagttg

SEQ ID NO: 4941979 - DNA, 25 bp, Homo sapien
gctatttatctctgagccgtccccg

SEQ ID NO: 4941980 - DNA, 25 bp, Homo sapien
tggcttctgaccaaaaaccaagctc

SEQ ID NO: 4941981 - DNA, 25 bp, Homo sapien
tcgctgatcgggagcccagcttcct

SEQ ID NO: 4941982 - DNA, 25 bp, Homo sapien
agaggaggccgtcacccttcctgaa

SEQ ID NO: 4941983 - DNA, 25 bp, Homo sapien
aaagagcgcatgctcatcaaggtcg

SEQ ID NO: 4941984 - DNA, 25 bp, Homo sapien
tatgaacccccgctctacgaggagc

SEQ ID NO: 4941985 - DNA, 25 bp, Homo sapien
ccttattgtcgtcccatcctctgtc

SEQ ID NO: 4941986 - DNA, 25 bp, Homo sapien
tcagggcccttattgtcgtcccatc

SEQ ID NO: 4941987 - DNA, 25 bp, Homo sapien
gcccttattgtcgtcccatcctctg

SEQ ID NO: 4941988 - DNA, 25 bp, Homo sapien
agggcccttattgtcgtcccatcct

SEQ ID NO: 4941989 - DNA, 25 bp, Homo sapien
agccgcttctcaggagcgacagcag

SEQ ID NO: 4941990 - DNA, 25 bp, Homo sapien
gactctggcggagcgttttcctcgg

SEQ ID NO: 4941991 - DNA, 25 bp, Homo sapien
tgtgtctgtatttagggactctggc

SEQ ID NO: 4941992 - DNA, 25 bp, Homo sapien
tttcctcggaaacctgcggcattgg

SEQ ID NO: 4941993 - DNA, 25 bp, Homo sapien
gcccagcctaattatgtagctttat

SEQ ID NO: 4941994 - DNA, 25 bp, Homo sapien
ggtgaacatactgaacattcttaag

SEQ ID NO: 4941995 - DNA, 25 bp, Homo sapien
tagctccctactgttgccactgaat

SEQ ID NO: 4941996 - DNA, 25 bp, Homo sapien
tcttaagttctgaaagtactcccgc

SEQ ID NO: 4941997 - DNA, 25 bp, Homo sapien
tcatcttttggtgacgagtcagaaa

SEQ ID NO: 4941998 - DNA, 25 bp, Homo sapien
cagatacagcaatcttatagatgtc

SEQ ID NO: 4941999 - DNA, 25 bp, Homo sapien
gatgtctttgcctatatggttttcc

SEQ ID NO: 4942000 - DNA, 25 bp, Homo sapien
cagaaatggtaggagggttagatac

SEQ ID NO: 4942001 - DNA, 25 bp, Homo sapien
ggtccgatggaaaccactggagcgc

SEQ ID NO: 4942002 - DNA, 25 bp, Homo sapien
cactggagcgcgatggaaaccactg

SEQ ID NO: 4942003 - DNA, 25 bp, Homo sapien
gaaaccactggagcgcgatggaaac

SEQ ID NO: 4942004 - DNA, 25 bp, Homo sapien
actggagcgcgatggaaaccactgg

SEQ ID NO: 4942005 - DNA, 25 bp, Homo sapien
cactggagcgtgatggaaaccactg

SEQ ID NO: 4942006 - DNA, 25 bp, Homo sapien
ccactggagcgtgatggaaaccact

SEQ ID NO: 4942007 - DNA, 25 bp, Homo sapien
tggaaaccactggagcccgatggaa

SEQ ID NO: 4942008 - DNA, 25 bp, Homo sapien
actggagcccgatggaaaccactgg

SEQ ID NO: 4942009 - DNA, 25 bp, Homo sapien
tacatgtaaacacatatgccacttt

SEQ ID NO: 4942010 - DNA, 25 bp, Homo sapien
atttggctttagacttccagtaatt

SEQ ID NO: 4942011 - DNA, 25 bp, Homo sapien
ccagtaattttctagacaactatat

SEQ ID NO: 4942012 - DNA, 25 bp, Homo sapien
atatacatgtaaacacatatgccac

SEQ ID NO: 4942013 - DNA, 25 bp, Homo sapien
gcccctccaggttctcggtgagctg

SEQ ID NO: 4942014 - DNA, 25 bp, Homo sapien
ccctccaggttctcggtgagctggt

SEQ ID NO: 4942015 - DNA, 25 bp, Homo sapien
cctccaggttctcggtgagctggtg

SEQ ID NO: 4942016 - DNA, 25 bp, Homo sapien
tccaggttctcggtgagctggtgct

SEQ ID NO: 4942017 - DNA, 25 bp, Homo sapien
gcccctccaggttctcggtgagccg

SEQ ID NO: 4942018 - DNA, 25 bp, Homo sapien
tccaggttctcggtgagccggtgct

SEQ ID NO: 4942019 - DNA, 25 bp, Homo sapien
cctccaggttctcggtgagccggtg

SEQ ID NO: 4942020 - DNA, 25 bp, Homo sapien
ccctccaggttctcggtgagccggt

SEQ ID NO: 4942021 - DNA, 25 bp, Homo sapien
tgagaaacgtcatggaaggaagtcc

SEQ ID NO: 4942022 - DNA, 25 bp, Homo sapien
agaggagcccgtcaccaaggtgtag

SEQ ID NO: 4942023 - DNA, 25 bp, Homo sapien
gctgattgcacttccagcagtgtga

SEQ ID NO: 4942024 - DNA, 25 bp, Homo sapien
gggctgagctgattgcacttccagc

SEQ ID NO: 4942025 - DNA, 25 bp, Homo sapien
ctgcggccatgggagggataagact

SEQ ID NO: 4942026 - DNA, 25 bp, Homo sapien
ggagggataagactggaagacactg

SEQ ID NO: 4942027 - DNA, 25 bp, Homo sapien
aagacactgggggtgtcctcggcac

SEQ ID NO: 4942028 - DNA, 25 bp, Homo sapien
gcggccatgggagggataagactgg

SEQ ID NO: 4942029 - DNA, 25 bp, Homo sapien
aggggagcctgggactgccacatgg

SEQ ID NO: 4942030 - DNA, 25 bp, Homo sapien
catcagccagttttctggccactgc

SEQ ID NO: 4942031 - DNA, 25 bp, Homo sapien
agtcacactccgaggctgctcctga

SEQ ID NO: 4942032 - DNA, 25 bp, Homo sapien
tgaaggagtcacactccgaggctgc

SEQ ID NO: 4942033 - DNA, 25 bp, Homo sapien
cactgccccagattgaagcccagtg

SEQ ID NO: 4942034 - DNA, 25 bp, Homo sapien
acagtgctgtcaaccggcacctggc

SEQ ID NO: 4942035 - DNA, 25 bp, Homo sapien
gcaacgagtccccacagtgctgtca

SEQ ID NO: 4942036 - DNA, 25 bp, Homo sapien
cagggcaacgagtccccacagtgct

SEQ ID NO: 4942037 - DNA, 25 bp, Homo sapien
aacgagtccccacagtgctgtcaac

SEQ ID NO: 4942038 - DNA, 25 bp, Homo sapien
ggccctgggccgagtttctccagat

SEQ ID NO: 4942039 - DNA, 25 bp, Homo sapien
atggcttggcgagagccccgcctcc

SEQ ID NO: 4942040 - DNA, 25 bp, Homo sapien
ttagggccacctccccatagggtga

SEQ ID NO: 4942041 - DNA, 25 bp, Homo sapien
tgctgcatacggctgctcttcctgg

SEQ ID NO: 4942042 - DNA, 25 bp, Homo sapien
cagagatggacctagcttcaggtcc

SEQ ID NO: 4942043 - DNA, 25 bp, Homo sapien
ctgcagagatggacctagcttcagg

SEQ ID NO: 4942044 - DNA, 25 bp, Homo sapien
tgcagagatggacctagcttcaggt

SEQ ID NO: 4942045 - DNA, 25 bp, Homo sapien
gcagagatggacctagcttcaggtc

SEQ ID NO: 4942046 - DNA, 25 bp, Homo sapien
tcgtgggaggcctccgagctcgtct

SEQ ID NO: 4942047 - DNA, 25 bp, Homo sapien
cacaccagaggcagagtcgtgggag

SEQ ID NO: 4942048 - DNA, 25 bp, Homo sapien
aggcagagtcgtgggaggcctccga

SEQ ID NO: 4942049 - DNA, 25 bp, Homo sapien
tccgagctcgtcttgggtgtctctg

SEQ ID NO: 4942050 - DNA, 25 bp, Homo sapien
tgtcagtgccactatacaaggtcac

SEQ ID NO: 4942051 - DNA, 25 bp, Homo sapien
cccaaccgcagtgtcgatggcatct

SEQ ID NO: 4942052 - DNA, 25 bp, Homo sapien
tgccatgtggtgtccctggtgagcc

SEQ ID NO: 4942053 - DNA, 25 bp, Homo sapien
caatggcatcttccggagatggccc

SEQ ID NO: 4942054 - DNA, 25 bp, Homo sapien
tctgcttgcaggtgccttcttgggg

SEQ ID NO: 4942055 - DNA, 25 bp, Homo sapien
ctcaagacaagtttcctgcagatgt

SEQ ID NO: 4942056 - DNA, 25 bp, Homo sapien
ctgcaggtctgtgctcacgggagca

SEQ ID NO: 4942057 - DNA, 25 bp, Homo sapien
gctgctgcatctgccgttgtccttt

SEQ ID NO: 4942058 - DNA, 25 bp, Homo sapien
tcaggcccttcacggtggccctgct

SEQ ID NO: 4942059 - DNA, 25 bp, Homo sapien
aggcccttcacggtggccctgctac

SEQ ID NO: 4942060 - DNA, 25 bp, Homo sapien
gcctcaggcccttcacggtggccct

SEQ ID NO: 4942061 - DNA, 25 bp, Homo sapien
ctcaggcccttcacggtggccctgc

SEQ ID NO: 4942062 - DNA, 25 bp, Homo sapien
ggtattacttcttttagggcataga

SEQ ID NO: 4942063 - DNA, 25 bp, Homo sapien
gggagtatctcaactttgttctgct

SEQ ID NO: 4942064 - DNA, 25 bp, Homo sapien
aatgttcgattctctgctgtctgag

SEQ ID NO: 4942065 - DNA, 25 bp, Homo sapien
tctgagcttctctgtactcagaaaa

SEQ ID NO: 4942066 - DNA, 25 bp, Homo sapien
cagcagctgtacgcctccgtccttg

SEQ ID NO: 4942067 - DNA, 25 bp, Homo sapien
gcagctgtacgcctccgtccttgag

SEQ ID NO: 4942068 - DNA, 25 bp, Homo sapien
agctgtacgcctccgtccttgaggt

SEQ ID NO: 4942069 - DNA, 25 bp, Homo sapien
ggccagcagctgtacgcctccgtcc

SEQ ID NO: 4942070 - DNA, 25 bp, Homo sapien
cgaggcgcgagttccccagcccaca

SEQ ID NO: 4942071 - DNA, 25 bp, Homo sapien
ctgtggtggagggccgaggcgcgag

SEQ ID NO: 4942072 - DNA, 25 bp, Homo sapien
gccgaggcgcgagttccccagccca

SEQ ID NO: 4942073 - DNA, 25 bp, Homo sapien
ggccgaggcgcgagttccccagccc

SEQ ID NO: 4942074 - DNA, 25 bp, Homo sapien
tggagctcagcattgccatggccat

SEQ ID NO: 4942075 - DNA, 25 bp, Homo sapien
tgccatggccatcgtggaccctggt

SEQ ID NO: 4942076 - DNA, 25 bp, Homo sapien
cggctggagctcagcattgccatgg

SEQ ID NO: 4942077 - DNA, 25 bp, Homo sapien
cagcattgccatggccatcgtggac

SEQ ID NO: 4942078 - DNA, 25 bp, Homo sapien
cctctgcgggtatctgtggtgattg

SEQ ID NO: 4942079 - DNA, 25 bp, Homo sapien
tctgggtgtcctctgcgggtatctg

SEQ ID NO: 4942080 - DNA, 25 bp, Homo sapien
tgtcatgtgcagttgtgagcagcct

SEQ ID NO: 4942081 - DNA, 25 bp, Homo sapien
gttccggtcatgtgggtttgctgcg

SEQ ID NO: 4942082 - DNA, 25 bp, Homo sapien
caggtcctgcggcaccagtgggtcc

SEQ ID NO: 4942083 - DNA, 25 bp, Homo sapien
atctatcatggtggccgctcctgca

SEQ ID NO: 4942084 - DNA, 25 bp, Homo sapien
gctgtttcttatcttcgccgaggac

SEQ ID NO: 4942085 - DNA, 25 bp, Homo sapien
ccttgcgggtctggaggacgatcta

SEQ ID NO: 4942086 - DNA, 25 bp, Homo sapien
cccgcaggtgtccagccttcgaggc

SEQ ID NO: 4942087 - DNA, 25 bp, Homo sapien
gagctcctactctggccggactctc

SEQ ID NO: 4942088 - DNA, 25 bp, Homo sapien
gccctctggacttccccgggctgct

SEQ ID NO: 4942089 - DNA, 25 bp, Homo sapien
tttacacgcaatgcggaaagggccc

SEQ ID NO: 4942090 - DNA, 25 bp, Homo sapien
gcccggctccgtgtctgatgctttg

SEQ ID NO: 4942091 - DNA, 25 bp, Homo sapien
ctccctgtgtggttggtctttctgg

SEQ ID NO: 4942092 - DNA, 25 bp, Homo sapien
gttgcgatccgcactctgccttgac

SEQ ID NO: 4942093 - DNA, 25 bp, Homo sapien
tcacctggcaacatgacctctgacc

SEQ ID NO: 4942094 - DNA, 25 bp, Homo sapien
agtgtgcatgcaggattctccgtgg

SEQ ID NO: 4942095 - DNA, 25 bp, Homo sapien
gcctcacgagtgggtggaactgctt

SEQ ID NO: 4942096 - DNA, 25 bp, Homo sapien
agaatggattcgtcgctggctgttc

SEQ ID NO: 4942097 - DNA, 25 bp, Homo sapien
tctccgtggagaatggattcgtcgc

SEQ ID NO: 4942098 - DNA, 25 bp, Homo sapien
gccgtggagtccatcgtcatcctgc

SEQ ID NO: 4942099 - DNA, 25 bp, Homo sapien
cgtatggtgccctgacgtctgtcca

SEQ ID NO: 4942100 - DNA, 25 bp, Homo sapien
ccgtctgatgctggcgttgtgcgta

SEQ ID NO: 4942101 - DNA, 25 bp, Homo sapien
aaacagcgatgtcccagacgcagga

SEQ ID NO: 4942102 - DNA, 25 bp, Homo sapien
ggccctgtggcttctataagccagt

SEQ ID NO: 4942103 - DNA, 25 bp, Homo sapien
agcagtgcccaccacggttcggcag

SEQ ID NO: 4942104 - DNA, 25 bp, Homo sapien
ggagtgtagcggcacatgtgaggcc

SEQ ID NO: 4942105 - DNA, 25 bp, Homo sapien
ccacggttcggcagactgttggagt

SEQ ID NO: 4942106 - DNA, 25 bp, Homo sapien
caaggctgggctctcagcctgaagg

SEQ ID NO: 4942107 - DNA, 25 bp, Homo sapien
cctggtttgcggtgctgggtgctca

SEQ ID NO: 4942108 - DNA, 25 bp, Homo sapien
tgggtgctcaggtctcctggtttgt

SEQ ID NO: 4942109 - DNA, 25 bp, Homo sapien
ctcttgctggtgctgcgccgcttgt

SEQ ID NO: 4942110 - DNA, 25 bp, Homo sapien
cagctcttctgaggagtacctgagc

SEQ ID NO: 4942111 - DNA, 25 bp, Homo sapien
acctgagcgtgtgcggcccgcactg

SEQ ID NO: 4942112 - DNA, 25 bp, Homo sapien
agtacctgagcgtgtgcggcccgca

SEQ ID NO: 4942113 - DNA, 25 bp, Homo sapien
ttctgaggagtacctgagcgtgtgc

SEQ ID NO: 4942114 - DNA, 25 bp, Homo sapien
tggcagagcccggagtatctgggag

SEQ ID NO: 4942115 - DNA, 25 bp, Homo sapien
ctggccctcgggtcattgtggcaga

SEQ ID NO: 4942116 - DNA, 25 bp, Homo sapien
tatctgggaggtgccatgccttctg

SEQ ID NO: 4942117 - DNA, 25 bp, Homo sapien
gccgctctggccctcgggtcattgt

SEQ ID NO: 4942118 - DNA, 25 bp, Homo sapien
tgtccactctgaatacattgactcc

SEQ ID NO: 4942119 - DNA, 25 bp, Homo sapien
ctggtagtaatgcttgtttgttcat

SEQ ID NO: 4942120 - DNA, 25 bp, Homo sapien
ttactctgacagaacgcaagtgtcc

SEQ ID NO: 4942121 - DNA, 25 bp, Homo sapien
gaatacattgactcctgtcggtgct

SEQ ID NO: 4942122 - DNA, 25 bp, Homo sapien
tgctttgtgtctgtgccgcgaggcc

SEQ ID NO: 4942123 - DNA, 25 bp, Homo sapien
tctgggtcgcctcgccagtcgcgga

SEQ ID NO: 4942124 - DNA, 25 bp, Homo sapien
tctgtcgctgcagacgtcgggtgcc

SEQ ID NO: 4942125 - DNA, 25 bp, Homo sapien
tcttgtaccatctcctctgtcgctg

SEQ ID NO: 4942126 - DNA, 25 bp, Homo sapien
cgtttcttgggtcggcgttctgcac

SEQ ID NO: 4942127 - DNA, 25 bp, Homo sapien
tgtgtgcttacttgcccagtggcct

SEQ ID NO: 4942128 - DNA, 25 bp, Homo sapien
gattctgggcggtgcatttgacaga

SEQ ID NO: 4942129 - DNA, 25 bp, Homo sapien
tgacatttgcccagacgttgcttca

SEQ ID NO: 4942130 - DNA, 25 bp, Homo sapien
tcatctgcctgcgtctgcatctcca

SEQ ID NO: 4942131 - DNA, 25 bp, Homo sapien
cagcccatcatctgcctgcgtctgc

SEQ ID NO: 4942132 - DNA, 25 bp, Homo sapien
ccatcatctgcctgcgtctgcatct

SEQ ID NO: 4942133 - DNA, 25 bp, Homo sapien
catctgcctgcgtctgcatctccat

SEQ ID NO: 4942134 - DNA, 25 bp, Homo sapien
ggagcttgtggcaggtacccctcct

SEQ ID NO: 4942135 - DNA, 25 bp, Homo sapien
cgtggctgcactgtgatgggatgtc

SEQ ID NO: 4942136 - DNA, 25 bp, Homo sapien
cggagcttgtggcaggtacccctcc

SEQ ID NO: 4942137 - DNA, 25 bp, Homo sapien
gtgatgggatgtccccctctccttg

SEQ ID NO: 4942138 - DNA, 25 bp, Homo sapien
gaaaggccaggtgcgaagtcacgga

SEQ ID NO: 4942139 - DNA, 25 bp, Homo sapien
tcacggacagggacgtggtttggcc

SEQ ID NO: 4942140 - DNA, 25 bp, Homo sapien
cagggacgtggtttggcctgggttg

SEQ ID NO: 4942141 - DNA, 25 bp, Homo sapien
ggtgcgaagtcacggacagggacgt

SEQ ID NO: 4942142 - DNA, 25 bp, Homo sapien
gactgcggttgacatgtgctctctg

SEQ ID NO: 4942143 - DNA, 25 bp, Homo sapien
ttctgtcctgaatgggcgcactggg

SEQ ID NO: 4942144 - DNA, 25 bp, Homo sapien
gatgaaattgagttctgaggaggca

SEQ ID NO: 4942145 - DNA, 25 bp, Homo sapien
ttcgcttcctcctggataacacggg

SEQ ID NO: 4942146 - DNA, 25 bp, Homo sapien
agttcatgtagtgtcccagagcttc

SEQ ID NO: 4942147 - DNA, 25 bp, Homo sapien
cacggctgtgacttcatccagcttc

SEQ ID NO: 4942148 - DNA, 25 bp, Homo sapien
ttctccacatggttgcactggcatc

SEQ ID NO: 4942149 - DNA, 25 bp, Homo sapien
ccagcctgagtttcacggctgtgac

SEQ ID NO: 4942150 - DNA, 25 bp, Homo sapien
tctgggatgatgacattcatgggac

SEQ ID NO: 4942151 - DNA, 25 bp, Homo sapien
gtttgcactttacatgtcatgtctt

SEQ ID NO: 4942152 - DNA, 25 bp, Homo sapien
ctttcattcctaacacgtctgggat

SEQ ID NO: 4942153 - DNA, 25 bp, Homo sapien
taacacgtctgggatgatgacattc

SEQ ID NO: 4942154 - DNA, 25 bp, Homo sapien
ctctgggcgtgtctggtcccggacc

SEQ ID NO: 4942155 - DNA, 25 bp, Homo sapien
ctggggccctctgggcgtgtctggt

SEQ ID NO: 4942156 - DNA, 25 bp, Homo sapien
tgggcgtgtctggtcccggaccctc

SEQ ID NO: 4942157 - DNA, 25 bp, Homo sapien
gaaacaccaccccaaccacagggca

SEQ ID NO: 4942158 - DNA, 25 bp, Homo sapien
ccttttactgtttgtagtttctgtg

SEQ ID NO: 4942159 - DNA, 25 bp, Homo sapien
agctcccaggcaggtagacgccagg

SEQ ID NO: 4942160 - DNA, 25 bp, Homo sapien
gtttataacttgatggactgttcct

SEQ ID NO: 4942161 - DNA, 25 bp, Homo sapien
ttcctattagtgtgttttgcctgag

SEQ ID NO: 4942162 - DNA, 25 bp, Homo sapien
tcagttttctgcatgggagtcttaa

SEQ ID NO: 4942163 - DNA, 25 bp, Homo sapien
ggaggacaagtccagtccctgtcat

SEQ ID NO: 4942164 - DNA, 25 bp, Homo sapien
ggttctccgtgcaagcaggttcctg

SEQ ID NO: 4942165 - DNA, 25 bp, Homo sapien
tccctgtcatgacccgagctgtggc

SEQ ID NO: 4942166 - DNA, 25 bp, Homo sapien
gcagagcaaagtggaggcagcgtgt

SEQ ID NO: 4942167 - DNA, 25 bp, Homo sapien
gtatgaagacatgcggcagagcaaa

SEQ ID NO: 4942168 - DNA, 25 bp, Homo sapien
tggcccagtgcttagtactgtaatc

SEQ ID NO: 4942169 - DNA, 25 bp, Homo sapien
ccaagcttgttttcactaaccctgt

SEQ ID NO: 4942170 - DNA, 25 bp, Homo sapien
cacagacccgcaccaccggcaacat

SEQ ID NO: 4942171 - DNA, 25 bp, Homo sapien
ccttcacagacccgcaccaccggca

SEQ ID NO: 4942172 - DNA, 25 bp, Homo sapien
ttcacagacccgcaccaccggcaac

SEQ ID NO: 4942173 - DNA, 25 bp, Homo sapien
tcacagacccgcaccaccggcaaca

SEQ ID NO: 4942174 - DNA, 25 bp, Homo sapien
tccctgcaccccctcgaaagaggcc

SEQ ID NO: 4942175 - DNA, 25 bp, Homo sapien
agccctgtccatcttgaggcctcag

SEQ ID NO: 4942176 - DNA, 25 bp, Homo sapien
ctcgaaagaggccaccacaaaagaa

SEQ ID NO: 4942177 - DNA, 25 bp, Homo sapien
cacaaaagaagccaccatggcatca

SEQ ID NO: 4942178 - DNA, 25 bp, Homo sapien
agtggttctcgagcatcacatcctg

SEQ ID NO: 4942179 - DNA, 25 bp, Homo sapien
catcctggtagagtgctctctgagg

SEQ ID NO: 4942180 - DNA, 25 bp, Homo sapien
tagggtgcagtggttctcgagcatc

SEQ ID NO: 4942181 - DNA, 25 bp, Homo sapien
acatcctggtagagtgctctctgag

SEQ ID NO: 4942182 - DNA, 25 bp, Homo sapien
gggatggggagcagggacctgaagc

SEQ ID NO: 4942183 - DNA, 25 bp, Homo sapien
ctggggatggggagcagggacctga

SEQ ID NO: 4942184 - DNA, 25 bp, Homo sapien
tggggagcagggacctgaagcccac

SEQ ID NO: 4942185 - DNA, 25 bp, Homo sapien
atggggagcagggacctgaagccca

SEQ ID NO: 4942186 - DNA, 25 bp, Homo sapien
tgctagaatatctgagctgcccctg

SEQ ID NO: 4942187 - DNA, 25 bp, Homo sapien
gaagataatggtcagtgctagaata

SEQ ID NO: 4942188 - DNA, 25 bp, Homo sapien
gataaccctgagtgtggacactgaa

SEQ ID NO: 4942189 - DNA, 25 bp, Homo sapien
aacctgtctatcaagaagataatgg

SEQ ID NO: 4942190 - DNA, 25 bp, Homo sapien
acattcccggtatttgtctgctaca

SEQ ID NO: 4942191 - DNA, 25 bp, Homo sapien
tgtctcagtcctacaagctgatcga

SEQ ID NO: 4942192 - DNA, 25 bp, Homo sapien
caaactcttctggattgcctcttgg

SEQ ID NO: 4942193 - DNA, 25 bp, Homo sapien
gtctgctacaatgattttcaacggg

SEQ ID NO: 4942194 - DNA, 25 bp, Homo sapien
tgtcccactggtaactgcccgatgt

SEQ ID NO: 4942195 - DNA, 25 bp, Homo sapien
gctgaaagacttcccatacacatgg

SEQ ID NO: 4942196 - DNA, 25 bp, Homo sapien
cagatatgactcacatggaaagcct

SEQ ID NO: 4942197 - DNA, 25 bp, Homo sapien
tgtccctcagaggtacaacaggctt

SEQ ID NO: 4942198 - DNA, 25 bp, Homo sapien
cacacacagggtttttctccaccat

SEQ ID NO: 4942199 - DNA, 25 bp, Homo sapien
tacacacacagggtttttctccacc

SEQ ID NO: 4942200 - DNA, 25 bp, Homo sapien
acacacacagggtttttctccacca

SEQ ID NO: 4942201 - DNA, 25 bp, Homo sapien
ctacacacacagggtttttctccac

SEQ ID NO: 4942202 - DNA, 25 bp, Homo sapien
gtttaacaagctttgatgtctccct

SEQ ID NO: 4942203 - DNA, 25 bp, Homo sapien
tgatgtttaacaagctttgatgtct

SEQ ID NO: 4942204 - DNA, 25 bp, Homo sapien
tgtttaacaagctttgatgtctccc

SEQ ID NO: 4942205 - DNA, 25 bp, Homo sapien
ttaacaagctttgatgtctccctaa

SEQ ID NO: 4942206 - DNA, 25 bp, Homo sapien
tgggatttgctttcggattaaaggc

SEQ ID NO: 4942207 - DNA, 25 bp, Homo sapien
tatgtatcagttggtgtttaataag

SEQ ID NO: 4942208 - DNA, 25 bp, Homo sapien
ttctctgatattgcatgggatttgc

SEQ ID NO: 4942209 - DNA, 25 bp, Homo sapien
cattcatcccacctatagggctttt

SEQ ID NO: 4942210 - DNA, 25 bp, Homo sapien
catgcttcctttgattatgaatcac

SEQ ID NO: 4942211 - DNA, 25 bp, Homo sapien
tcaagcatgcttcctttgattatga

SEQ ID NO: 4942212 - DNA, 25 bp, Homo sapien
aagcatgcttcctttgattatgaat

SEQ ID NO: 4942213 - DNA, 25 bp, Homo sapien
gcatgcttcctttgattatgaatca

SEQ ID NO: 4942214 - DNA, 25 bp, Homo sapien
aagcaagattccctacagagcatgg

SEQ ID NO: 4942215 - DNA, 25 bp, Homo sapien
gcatatttgagatcaggccacgcca

SEQ ID NO: 4942216 - DNA, 25 bp, Homo sapien
cattgttcaggataaaaaggcagct

SEQ ID NO: 4942217 - DNA, 25 bp, Homo sapien
caggtgtgatgtttgaagccccttc

SEQ ID NO: 4942218 - DNA, 25 bp, Homo sapien
gattgtgccattgcctgatgacgaa

SEQ ID NO: 4942219 - DNA, 25 bp, Homo sapien
ctcagattgcgcctagaggaaaaat

SEQ ID NO: 4942220 - DNA, 25 bp, Homo sapien
gaaccctggaagattatgtgggctt

SEQ ID NO: 4942221 - DNA, 25 bp, Homo sapien
gatgcatttcatagctgtgttcctc

SEQ ID NO: 4942222 - DNA, 25 bp, Homo sapien
tccacggcatctgagagtatcagcc

SEQ ID NO: 4942223 - DNA, 25 bp, Homo sapien
ccaactccacggcatctgagagtat

SEQ ID NO: 4942224 - DNA, 25 bp, Homo sapien
actccacggcatctgagagtatcag

SEQ ID NO: 4942225 - DNA, 25 bp, Homo sapien
cggcatctgagagtatcagcctctt

SEQ ID NO: 4942226 - DNA, 25 bp, Homo sapien
tttgcagtccacgtacccagatggc

SEQ ID NO: 4942227 - DNA, 25 bp, Homo sapien
tatgacacccctggatgacaggtga

SEQ ID NO: 4942228 - DNA, 25 bp, Homo sapien
catggagcacagtaacttcgtgggc

SEQ ID NO: 4942229 - DNA, 25 bp, Homo sapien
tttacagtctgaggaacagggcagc

SEQ ID NO: 4942230 - DNA, 25 bp, Homo sapien
tgggcatggagaccgctggggcggc

SEQ ID NO: 4942231 - DNA, 25 bp, Homo sapien
ggaagaggcgccctgggcatggaga

SEQ ID NO: 4942232 - DNA, 25 bp, Homo sapien
gggcatggagaccgctggggcggcc

SEQ ID NO: 4942233 - DNA, 25 bp, Homo sapien
ggtctgctctgagacacccggatga

SEQ ID NO: 4942234 - DNA, 25 bp, Homo sapien
agtagccgtccacagaggtctgcgc

SEQ ID NO: 4942235 - DNA, 25 bp, Homo sapien
tgaagacaggacctaaagccggcag

SEQ ID NO: 4942236 - DNA, 25 bp, Homo sapien
tgtgaagcgactgtgggacatcctg

SEQ ID NO: 4942237 - DNA, 25 bp, Homo sapien
cgggcggaaacctgttgggagcgca

SEQ ID NO: 4942238 - DNA, 25 bp, Homo sapien
aaaggagcactgcggccggtgaccc

SEQ ID NO: 4942239 - DNA, 25 bp, Homo sapien
tggagccgaaaggagcactgcggcc

SEQ ID NO: 4942240 - DNA, 25 bp, Homo sapien
gggcggaaacctgttgggagcgcac

SEQ ID NO: 4942241 - DNA, 25 bp, Homo sapien
actgcgagcgcttctgggcacggcc

SEQ ID NO: 4942242 - DNA, 25 bp, Homo sapien
cacttctaggggctcctccgacggt

SEQ ID NO: 4942243 - DNA, 25 bp, Homo sapien
acgccgccaccattgcgcccactgc

SEQ ID NO: 4942244 - DNA, 25 bp, Homo sapien
cctccgacggtcagggatgtgctga

SEQ ID NO: 4942245 - DNA, 25 bp, Homo sapien
caggcgcttccggcggattttgaaa

SEQ ID NO: 4942246 - DNA, 25 bp, Homo sapien
tttaaggcgccgaagaatctagggc

SEQ ID NO: 4942247 - DNA, 25 bp, Homo sapien
aaacctatggtcagacggcagctcc

SEQ ID NO: 4942248 - DNA, 25 bp, Homo sapien
caggtcagggcagagcgcgacttct

SEQ ID NO: 4942249 - DNA, 25 bp, Homo sapien
agggatccgcgctgaggtccgatcc

SEQ ID NO: 4942250 - DNA, 25 bp, Homo sapien
aggaagcctcacctcagggtctgct

SEQ ID NO: 4942251 - DNA, 25 bp, Homo sapien
gaggtccgatccgaacatgttccag

SEQ ID NO: 4942252 - DNA, 25 bp, Homo sapien
cccgacgcgaatggccggcattgca

SEQ ID NO: 4942253 - DNA, 25 bp, Homo sapien
aggctttcttccggcacttcctgag

SEQ ID NO: 4942254 - DNA, 25 bp, Homo sapien
acgcacgcgtcctttgggcccttca

SEQ ID NO: 4942255 - DNA, 25 bp, Homo sapien
caggctttcttccggcacttcctga

SEQ ID NO: 4942256 - DNA, 25 bp, Homo sapien
gtcatgtatggctgtatggatgaac

SEQ ID NO: 4942257 - DNA, 25 bp, Homo sapien
gcatgtgaggtgatgcttaacatca

SEQ ID NO: 4942258 - DNA, 25 bp, Homo sapien
acagtttggcgacccctcaagaagg

SEQ ID NO: 4942259 - DNA, 25 bp, Homo sapien
gatacagaatgggaaggtacaatga

SEQ ID NO: 4942260 - DNA, 25 bp, Homo sapien
gaactgcaggtagacgtttcttcct

SEQ ID NO: 4942261 - DNA, 25 bp, Homo sapien
gcaggtagacgtttcttccttgctt

SEQ ID NO: 4942262 - DNA, 25 bp, Homo sapien
cagatgaactgcaggtagacgtttc

SEQ ID NO: 4942263 - DNA, 25 bp, Homo sapien
gggcgcttagccttactctctccac

SEQ ID NO: 4942264 - DNA, 25 bp, Homo sapien
tgaaccgtgtggtgctgtatccgga

SEQ ID NO: 4942265 - DNA, 25 bp, Homo sapien
gacatccttccagtcttatcctttg

SEQ ID NO: 4942266 - DNA, 25 bp, Homo sapien
ggagggcgtgaaaagtgagcccagc

SEQ ID NO: 4942267 - DNA, 25 bp, Homo sapien
tactcatgacgaatggatggagggc

SEQ ID NO: 4942268 - DNA, 25 bp, Homo sapien
ctacaggtgaggatcatcacaccca

SEQ ID NO: 4942269 - DNA, 25 bp, Homo sapien
gactacaggtgaggatcatcacacc

SEQ ID NO: 4942270 - DNA, 25 bp, Homo sapien
ctaggactacaggtgaggatcatca

SEQ ID NO: 4942271 - DNA, 25 bp, Homo sapien
aggactacaggtgaggatcatcaca

SEQ ID NO: 4942272 - DNA, 25 bp, Homo sapien
tacacggcacgcctgaaggccacat

SEQ ID NO: 4942273 - DNA, 25 bp, Homo sapien
agaggatggagggcgaggatctggg

SEQ ID NO: 4942274 - DNA, 25 bp, Homo sapien
aaggccacatggaggtcggcgcgag

SEQ ID NO: 4942275 - DNA, 25 bp, Homo sapien
tatgtcttgggggtacacggcacgc

SEQ ID NO: 4942276 - DNA, 25 bp, Homo sapien
gtcattcaggctgcacagtttaggc

SEQ ID NO: 4942277 - DNA, 25 bp, Homo sapien
tgaacgccacgggaggtgtccttac

SEQ ID NO: 4942278 - DNA, 25 bp, Homo sapien
agccaggagctccgctcggctcagc

SEQ ID NO: 4942279 - DNA, 25 bp, Homo sapien
gaacgccacgggaggtgtccttaca

SEQ ID NO: 4942280 - DNA, 25 bp, Homo sapien
aacgccacgggaggtgtccttacag

SEQ ID NO: 4942281 - DNA, 25 bp, Homo sapien
gaccacagggccagcggcaccaagt

SEQ ID NO: 4942282 - DNA, 25 bp, Homo sapien
gtgggaggtcactgacccagggtca

SEQ ID NO: 4942283 - DNA, 25 bp, Homo sapien
tgggaggtcactgacccagggtcag

SEQ ID NO: 4942284 - DNA, 25 bp, Homo sapien
catgggattggccacattgagggac

SEQ ID NO: 4942285 - DNA, 25 bp, Homo sapien
gattggccacattgagggacagatg

SEQ ID NO: 4942286 - DNA, 25 bp, Homo sapien
ttgtgggcatgggattggccacatt

SEQ ID NO: 4942287 - DNA, 25 bp, Homo sapien
atttgtgggcatgggattggccaca

SEQ ID NO: 4942288 - DNA, 25 bp, Homo sapien
ttccgtgacctcgtcagtgcttttt

SEQ ID NO: 4942289 - DNA, 25 bp, Homo sapien
ggaggctccgagtgcgcccgtcctt

SEQ ID NO: 4942290 - DNA, 25 bp, Homo sapien
gaggcttccgtgacctcgtcagtgc

SEQ ID NO: 4942291 - DNA, 25 bp, Homo sapien
ttcccacccggtgaggcttccgtga

SEQ ID NO: 4942292 - DNA, 25 bp, Homo sapien
ttctggttgtcccatgatgagggcg

SEQ ID NO: 4942293 - DNA, 25 bp, Homo sapien
gccttcagaaatgcggctgcgtgag

SEQ ID NO: 4942294 - DNA, 25 bp, Homo sapien
tcccatgatgagggcgttgggcaca

SEQ ID NO: 4942295 - DNA, 25 bp, Homo sapien
cagccttcagaaatgcggctgcgtg

SEQ ID NO: 4942296 - DNA, 25 bp, Homo sapien
gcttgttgagttcagaaccccatgg

SEQ ID NO: 4942297 - DNA, 25 bp, Homo sapien
ctgtggctccttccggctactggga

SEQ ID NO: 4942298 - DNA, 25 bp, Homo sapien
tcggcagcacttcgaggaactcagc

SEQ ID NO: 4942299 - DNA, 25 bp, Homo sapien
gggactgttcccttctggcattgcc

SEQ ID NO: 4942300 - DNA, 25 bp, Homo sapien
ggacacttttgagatccacctcggg

SEQ ID NO: 4942301 - DNA, 25 bp, Homo sapien
cagatcttgaggtgtatgggcctaa

SEQ ID NO: 4942302 - DNA, 25 bp, Homo sapien
aaaagaaacctgctgtctcatgaca

SEQ ID NO: 4942303 - DNA, 25 bp, Homo sapien
tgggcctaacaacagcatcaaaata

SEQ ID NO: 4942304 - DNA, 25 bp, Homo sapien
gtgttgtgtacctataagtctcagc

SEQ ID NO: 4942305 - DNA, 25 bp, Homo sapien
cagggacacaagctcagcaagactg

SEQ ID NO: 4942306 - DNA, 25 bp, Homo sapien
gaaagccctgtttactgcaattcct

SEQ ID NO: 4942307 - DNA, 25 bp, Homo sapien
gatattctgtcccacctaatggcag

SEQ ID NO: 4942308 - DNA, 25 bp, Homo sapien
gggaagttcatagtccagggacaca

SEQ ID NO: 4942309 - DNA, 25 bp, Homo sapien
gaatcacaaccacatcttgtgagca

SEQ ID NO: 4942310 - DNA, 25 bp, Homo sapien
aaacaggcagatacaaagaatcaca

SEQ ID NO: 4942311 - DNA, 25 bp, Homo sapien
ggcagatacaaagaatcacaaccac

SEQ ID NO: 4942312 - DNA, 25 bp, Homo sapien
ctggagagataaacaggcagataca

SEQ ID NO: 4942313 - DNA, 25 bp, Homo sapien
ctccaggcataagggaccgccctgg

SEQ ID NO: 4942314 - DNA, 25 bp, Homo sapien
caggcataagggaccgccctggcat

SEQ ID NO: 4942315 - DNA, 25 bp, Homo sapien
tcctccaggcataagggaccgccct

SEQ ID NO: 4942316 - DNA, 25 bp, Homo sapien
ccaggcataagggaccgccctggca

SEQ ID NO: 4942317 - DNA, 25 bp, Homo sapien
tcccctgtcctcccgggcttgcttg

SEQ ID NO: 4942318 - DNA, 25 bp, Homo sapien
tgtcctcccgggcttgcttggaaca

SEQ ID NO: 4942319 - DNA, 25 bp, Homo sapien
tcctcccgggcttgcttggaacaag

SEQ ID NO: 4942320 - DNA, 25 bp, Homo sapien
cctgtcctcccgggcttgcttggaa

SEQ ID NO: 4942321 - DNA, 25 bp, Homo sapien
gggacagacggaccaagagagtcca

SEQ ID NO: 4942322 - DNA, 25 bp, Homo sapien
ctaggggacagacggaccaagagag

SEQ ID NO: 4942323 - DNA, 25 bp, Homo sapien
cagacggaccaagagagtccagcgg

SEQ ID NO: 4942324 - DNA, 25 bp, Homo sapien
gacagacggaccaagagagtccagc

SEQ ID NO: 4942325 - DNA, 25 bp, Homo sapien
tgacgtccagtctttgagggcacag

SEQ ID NO: 4942326 - DNA, 25 bp, Homo sapien
ggcaatgggcagacatccagaacag

SEQ ID NO: 4942327 - DNA, 25 bp, Homo sapien
tgggcagacatccagaacagtaggg

SEQ ID NO: 4942328 - DNA, 25 bp, Homo sapien
acgtccagtctttgagggcacagct

SEQ ID NO: 4942329 - DNA, 25 bp, Homo sapien
ccagccgccttttggtgaagagcta

SEQ ID NO: 4942330 - DNA, 25 bp, Homo sapien
gaagagctagatgcatccatttcct

SEQ ID NO: 4942331 - DNA, 25 bp, Homo sapien
tggtgaagagctagatgcatccatt

SEQ ID NO: 4942332 - DNA, 25 bp, Homo sapien
tctccagccgccttttggtgaagag

SEQ ID NO: 4942333 - DNA, 25 bp, Homo sapien
tcaacaagtgaagtactcagagagc

SEQ ID NO: 4942334 - DNA, 25 bp, Homo sapien
cgtgcccggccctccttgagttact

SEQ ID NO: 4942335 - DNA, 25 bp, Homo sapien
agactggaatgtgcagtgatgtaat

SEQ ID NO: 4942336 - DNA, 25 bp, Homo sapien
agttactttcttattctgtatctga

SEQ ID NO: 4942337 - DNA, 25 bp, Homo sapien
cctccttgagttactttcttattct

SEQ ID NO: 4942338 - DNA, 25 bp, Homo sapien
gcagtggccactcgcaggcgtgatc

SEQ ID NO: 4942339 - DNA, 25 bp, Homo sapien
tgcagtggccactcgcaggcgtgat

SEQ ID NO: 4942340 - DNA, 25 bp, Homo sapien
gtggccactcgcaggcgtgatccca

SEQ ID NO: 4942341 - DNA, 25 bp, Homo sapien
agtgcagtggccactcgcaggcgtg

SEQ ID NO: 4942342 - DNA, 25 bp, Homo sapien
tggccgggcgtaccacaaatataag

SEQ ID NO: 4942343 - DNA, 25 bp, Homo sapien
gaaggctggccgggcgtaccacaaa

SEQ ID NO: 4942344 - DNA, 25 bp, Homo sapien
ggctggccgggcgtaccacaaatat

SEQ ID NO: 4942345 - DNA, 25 bp, Homo sapien
ccgggcgtaccacaaatataaggca

SEQ ID NO: 4942346 - DNA, 25 bp, Homo sapien
cctgagggtacaatcgtgtgctgcc

SEQ ID NO: 4942347 - DNA, 25 bp, Homo sapien
accgtggcaagctggcccgggcatc

SEQ ID NO: 4942348 - DNA, 25 bp, Homo sapien
agggtacaatcgtgtgctgcctgga

SEQ ID NO: 4942349 - DNA, 25 bp, Homo sapien
caccatgcctgagggtacaatcgtg

SEQ ID NO: 4942350 - DNA, 25 bp, Homo sapien
tcaggttgacatgacgtatccaagc

SEQ ID NO: 4942351 - DNA, 25 bp, Homo sapien
gagaatcgctagaactctgtgggca

SEQ ID NO: 4942352 - DNA, 25 bp, Homo sapien
gaaaagtacttagatcagtccctgg

SEQ ID NO: 4942353 - DNA, 25 bp, Homo sapien
tatccaagccatatagacggcaggg

SEQ ID NO: 4942354 - DNA, 25 bp, Homo sapien
gccgccgagacagcgcggggaggag

SEQ ID NO: 4942355 - DNA, 25 bp, Homo sapien
agcgcggggaggagcgcacggcgcc

SEQ ID NO: 4942356 - DNA, 25 bp, Homo sapien
agacagcgcggggaggagcgcacgg

SEQ ID NO: 4942357 - DNA, 25 bp, Homo sapien
ccgagacagcgcggggaggagcgca

SEQ ID NO: 4942358 - DNA, 25 bp, Homo sapien
gcaaccgtccggctcggcggagcgg

SEQ ID NO: 4942359 - DNA, 25 bp, Homo sapien
cgcagggcccttcgccccgataagg

SEQ ID NO: 4942360 - DNA, 25 bp, Homo sapien
ggtccgctccctgccgagctccgcg

SEQ ID NO: 4942361 - DNA, 25 bp, Homo sapien
acagtgacggctgcgggtccgctcc

SEQ ID NO: 4942362 - DNA, 25 bp, Homo sapien
taaatgaacgctgcgggaaacggcg

SEQ ID NO: 4942363 - DNA, 25 bp, Homo sapien
caaaactgcgcagggtaaatgaacg

SEQ ID NO: 4942364 - DNA, 25 bp, Homo sapien
gcaccggaacgctcacagttaaata

SEQ ID NO: 4942365 - DNA, 25 bp, Homo sapien
tacgaaatgactgttggtccaataa

SEQ ID NO: 4942366 - DNA, 25 bp, Homo sapien
ccagggtccctctgtggaggagcag

SEQ ID NO: 4942367 - DNA, 25 bp, Homo sapien
tccagggtccctctgtggaggagca

SEQ ID NO: 4942368 - DNA, 25 bp, Homo sapien
cagggtccctctgtggaggagcaga

SEQ ID NO: 4942369 - DNA, 25 bp, Homo sapien
gggtccctctgtggaggagcagatg

SEQ ID NO: 4942370 - DNA, 25 bp, Homo sapien
tccaggcatcgggagtgccatcgcc

SEQ ID NO: 4942371 - DNA, 25 bp, Homo sapien
caggcatcgggagtgccatcgccat

SEQ ID NO: 4942372 - DNA, 25 bp, Homo sapien
aggtccaggcatcgggagtgccatc

SEQ ID NO: 4942373 - DNA, 25 bp, Homo sapien
tgaggtccaggcatcgggagtgcca

SEQ ID NO: 4942374 - DNA, 25 bp, Homo sapien
tctccacaggctatcagggatttgg

SEQ ID NO: 4942375 - DNA, 25 bp, Homo sapien
tgccctcaatggctgaccatagaag

SEQ ID NO: 4942376 - DNA, 25 bp, Homo sapien
caagctgtaaggttctcagggctga

SEQ ID NO: 4942377 - DNA, 25 bp, Homo sapien
tttgcatgatctgctagaggcctct

SEQ ID NO: 4942378 - DNA, 25 bp, Homo sapien
ccactctatccttgtgaagtacaca

SEQ ID NO: 4942379 - DNA, 25 bp, Homo sapien
ctggtcgggggccaggcaactccac

SEQ ID NO: 4942380 - DNA, 25 bp, Homo sapien
gcaactccactctatccttgtgaag

SEQ ID NO: 4942381 - DNA, 25 bp, Homo sapien
caggcaactccactctatccttgtg

SEQ ID NO: 4942382 - DNA, 25 bp, Homo sapien
ccagcatcacgtccctgtagagtgc

SEQ ID NO: 4942383 - DNA, 25 bp, Homo sapien
gcatcacgtccctgtagagtgcctg

SEQ ID NO: 4942384 - DNA, 25 bp, Homo sapien
tagtgaggccaggttcccatagttc

SEQ ID NO: 4942385 - DNA, 25 bp, Homo sapien
ctagtgaggccaggttcccatagtt

SEQ ID NO: 4942386 - DNA, 25 bp, Homo sapien
ccggccccaggaccaaaggcagaag

SEQ ID NO: 4942387 - DNA, 25 bp, Homo sapien
cccaggaccaaaggcagaagccctc

SEQ ID NO: 4942388 - DNA, 25 bp, Homo sapien
ccccaggaccaaaggcagaagccct

SEQ ID NO: 4942389 - DNA, 25 bp, Homo sapien
gaccttgaatctgcaatggaaccaa

SEQ ID NO: 4942390 - DNA, 25 bp, Homo sapien
cacgtatcagtacaggagggagaag

SEQ ID NO: 4942391 - DNA, 25 bp, Homo sapien
tcctttgaagctaacacagacgcac

SEQ ID NO: 4942392 - DNA, 25 bp, Homo sapien
tgcttggagtgggtcaggaacattc

SEQ ID NO: 4942393 - DNA, 25 bp, Homo sapien
gctggctttggccacgctctgttca

SEQ ID NO: 4942394 - DNA, 25 bp, Homo sapien
gctttggccacgctctgttcagcca

SEQ ID NO: 4942395 - DNA, 25 bp, Homo sapien
tgttcagccacctgcagaatcaagg

SEQ ID NO: 4942396 - DNA, 25 bp, Homo sapien
ctctgttcagccacctgcagaatca

SEQ ID NO: 4942397 - DNA, 25 bp, Homo sapien
cgccctgtgggtgctttgtactcac

SEQ ID NO: 4942398 - DNA, 25 bp, Homo sapien
gcagcacaggacacgccctgtgggt

SEQ ID NO: 4942399 - DNA, 25 bp, Homo sapien
ttggcagcacaggacacgccctgtg

SEQ ID NO: 4942400 - DNA, 25 bp, Homo sapien
ggacacgccctgtgggtgctttgta

SEQ ID NO: 4942401 - DNA, 25 bp, Homo sapien
cccactgtagaagaagggacctgca

SEQ ID NO: 4942402 - DNA, 25 bp, Homo sapien
ccactgtagaagaagggacctgcag

SEQ ID NO: 4942403 - DNA, 25 bp, Homo sapien
actgtagaagaagggacctgcagag

SEQ ID NO: 4942404 - DNA, 25 bp, Homo sapien
ctcccactgtagaagaagggacctg

SEQ ID NO: 4942405 - DNA, 25 bp, Homo sapien
cagaggagactccatgatcccagcc

SEQ ID NO: 4942406 - DNA, 25 bp, Homo sapien
agaggagactccatgatcccagcct

SEQ ID NO: 4942407 - DNA, 25 bp, Homo sapien
caggggaggcacccccacacggtgc

SEQ ID NO: 4942408 - DNA, 25 bp, Homo sapien
tgcccccaggggaggcacccccaca

SEQ ID NO: 4942409 - DNA, 25 bp, Homo sapien
cacagggtgcccccaggggaggcac

SEQ ID NO: 4942410 - DNA, 25 bp, Homo sapien
ccacagggtgcccccaggggaggca

SEQ ID NO: 4942411 - DNA, 25 bp, Homo sapien
ctcaggaccgccatgcgggtggggt

SEQ ID NO: 4942412 - DNA, 25 bp, Homo sapien
tcaggaccgccatgcgggtggggtg

SEQ ID NO: 4942413 - DNA, 25 bp, Homo sapien
ctgcagaacccttggggaggcgctg

SEQ ID NO: 4942414 - DNA, 25 bp, Homo sapien
ttggggaggcgctgtgctcccgagc

SEQ ID NO: 4942415 - DNA, 25 bp, Homo sapien
gggaggcgctgtgctcccgagcccg

SEQ ID NO: 4942416 - DNA, 25 bp, Homo sapien
tgcagaacccttggggaggcgctgt

SEQ ID NO: 4942417 - DNA, 25 bp, Homo sapien
tgccgcacacgcacctgtagcgggg

SEQ ID NO: 4942418 - DNA, 25 bp, Homo sapien
tgcctgagaagcagcgagttgtatc

SEQ ID NO: 4942419 - DNA, 25 bp, Homo sapien
gaagcagcgagttgtatctgaacgc

SEQ ID NO: 4942420 - DNA, 25 bp, Homo sapien
cgagttgtatctgaacgccttgccg

SEQ ID NO: 4942421 - DNA, 25 bp, Homo sapien
ggagctttgcttgaaggccttcccg

SEQ ID NO: 4942422 - DNA, 25 bp, Homo sapien
gtgtggacgcggtggtgggcagcca

SEQ ID NO: 4942423 - DNA, 25 bp, Homo sapien
ggtgtggacgcggtggtgggcagcc

SEQ ID NO: 4942424 - DNA, 25 bp, Homo sapien
agggcttggcgccggtgtggatgat

SEQ ID NO: 4942425 - DNA, 25 bp, Homo sapien
tcaggagcgaggaccctcggatgaa

SEQ ID NO: 4942426 - DNA, 25 bp, Homo sapien
ttcagcgtgtagctcctgcggaacg

SEQ ID NO: 4942427 - DNA, 25 bp, Homo sapien
ctctcgccgctgtggagccggtagt

SEQ ID NO: 4942428 - DNA, 25 bp, Homo sapien
gttggacttgcgaccgaaggccttg

SEQ ID NO: 4942429 - DNA, 25 bp, Homo sapien
caggaagcccaacagggcgcccgcc

SEQ ID NO: 4942430 - DNA, 25 bp, Homo sapien
gggcgcccgcctgccctctgtgtcc

SEQ ID NO: 4942431 - DNA, 25 bp, Homo sapien
cctccccgggctcgcggccgtgcac

SEQ ID NO: 4942432 - DNA, 25 bp, Homo sapien
tcctccccgggctcgcggccgtgca

SEQ ID NO: 4942433 - DNA, 25 bp, Homo sapien
ggtgggcttccagcgtgaatcctcg

SEQ ID NO: 4942434 - DNA, 25 bp, Homo sapien
tgaatttctgcgctagggccccgcc

SEQ ID NO: 4942435 - DNA, 25 bp, Homo sapien
agcgtgaatcctcggcctgtcgtcc

SEQ ID NO: 4942436 - DNA, 25 bp, Homo sapien
cttgggtgggcttccagcgtgaatc

SEQ ID NO: 4942437 - DNA, 25 bp, Homo sapien
tgcccaatggttctgcacgaagacc

SEQ ID NO: 4942438 - DNA, 25 bp, Homo sapien
aatggtggctgatagtggttcctga

SEQ ID NO: 4942439 - DNA, 25 bp, Homo sapien
tgttagtcggctttacagcacctgg

SEQ ID NO: 4942440 - DNA, 25 bp, Homo sapien
acctggaattgaccgccacacggag

SEQ ID NO: 4942441 - DNA, 25 bp, Homo sapien
gatttattaggcgaactggcccaca

SEQ ID NO: 4942442 - DNA, 25 bp, Homo sapien
caaccaagtggatgtgcctgcccac

SEQ ID NO: 4942443 - DNA, 25 bp, Homo sapien
agtacagtgtgtgtgccttagtccc

SEQ ID NO: 4942444 - DNA, 25 bp, Homo sapien
gctgagaagtcctcccataggctgt

SEQ ID NO: 4942445 - DNA, 25 bp, Homo sapien
ttctcttcatctgttaggggtgaca

SEQ ID NO: 4942446 - DNA, 25 bp, Homo sapien
tctgctgggcagtgtattagggtcc

SEQ ID NO: 4942447 - DNA, 25 bp, Homo sapien
caccttctgagctggcagggcttcc

SEQ ID NO: 4942448 - DNA, 25 bp, Homo sapien
ggtgctccccgtggggccaagagga

SEQ ID NO: 4942449 - DNA, 25 bp, Homo sapien
ggctactgcccaggattcttgttct

SEQ ID NO: 4942450 - DNA, 25 bp, Homo sapien
ccggctactgcccaggattcttgtt

SEQ ID NO: 4942451 - DNA, 25 bp, Homo sapien
actgcccaggattcttgttctctgg

SEQ ID NO: 4942452 - DNA, 25 bp, Homo sapien
tactgcccaggattcttgttctctg

SEQ ID NO: 4942453 - DNA, 25 bp, Homo sapien
gggatgctcagggacaacccttcag

SEQ ID NO: 4942454 - DNA, 25 bp, Homo sapien
ctgcccatggcccagacttccgagc

SEQ ID NO: 4942455 - DNA, 25 bp, Homo sapien
gatgctcagggacaacccttcagcc

SEQ ID NO: 4942456 - DNA, 25 bp, Homo sapien
ccagacttccgagctccatgttggg

SEQ ID NO: 4942457 - DNA, 25 bp, Homo sapien
ccatgggatctgcactcggactgca

SEQ ID NO: 4942458 - DNA, 25 bp, Homo sapien
catggtggcgcctgaaaaatctgga

SEQ ID NO: 4942459 - DNA, 25 bp, Homo sapien
gagcaacagaagctacaagtgagtc

SEQ ID NO: 4942460 - DNA, 25 bp, Homo sapien
tatgacacaggactctttcggtgcc

SEQ ID NO: 4942461 - DNA, 25 bp, Homo sapien
acctgagctggtaccgggactggga

SEQ ID NO: 4942462 - DNA, 25 bp, Homo sapien
tcagaagctgattggacctgagctg

SEQ ID NO: 4942463 - DNA, 25 bp, Homo sapien
catgacccagcaataaggggttggg

SEQ ID NO: 4942464 - DNA, 25 bp, Homo sapien
agacagaaacttgtgaacatgaccc

SEQ ID NO: 4942465 - DNA, 25 bp, Homo sapien
ttcaaagagtgaacgagaggcaagg

SEQ ID NO: 4942466 - DNA, 25 bp, Homo sapien
tggtagggagtacataatcactggg

SEQ ID NO: 4942467 - DNA, 25 bp, Homo sapien
caagtataaggttctgggaagcggc

SEQ ID NO: 4942468 - DNA, 25 bp, Homo sapien
gccaatagttaggagaagtgcgtga

SEQ ID NO: 4942469 - DNA, 25 bp, Homo sapien
tctgtgtgtccctcaagaggggccg

SEQ ID NO: 4942470 - DNA, 25 bp, Homo sapien
cctgccttgccggagtctgtgtgtc

SEQ ID NO: 4942471 - DNA, 25 bp, Homo sapien
tgtccctcaagaggggccggtctgc

SEQ ID NO: 4942472 - DNA, 25 bp, Homo sapien
ctcctgccttgccggagtctgtgtg

SEQ ID NO: 4942473 - DNA, 25 bp, Homo sapien
cagcagcaggctgtgagaagctcct

SEQ ID NO: 4942474 - DNA, 25 bp, Homo sapien
agcaggctgtgagaagctcctcctt

SEQ ID NO: 4942475 - DNA, 25 bp, Homo sapien
ggcagcagcaggctgtgagaagctc

SEQ ID NO: 4942476 - DNA, 25 bp, Homo sapien
gcagcaggctgtgagaagctcctcc

SEQ ID NO: 4942477 - DNA, 25 bp, Homo sapien
gctggcgtaaacgtagttactggcc

SEQ ID NO: 4942478 - DNA, 25 bp, Homo sapien
ctgtgcttatggctgctggcgtaaa

SEQ ID NO: 4942479 - DNA, 25 bp, Homo sapien
gtagcaggcctcaaggactccgtgg

SEQ ID NO: 4942480 - DNA, 25 bp, Homo sapien
tcccgggctggtggtatctgcctgt

SEQ ID NO: 4942481 - DNA, 25 bp, Homo sapien
gggtcagagtctcccatgacctcga

SEQ ID NO: 4942482 - DNA, 25 bp, Homo sapien
gctcccctagactccttgggggcag

SEQ ID NO: 4942483 - DNA, 25 bp, Homo sapien
agagtctcccatgacctcgagtcct

SEQ ID NO: 4942484 - DNA, 25 bp, Homo sapien
ccatgacctcgagtcctccagggac

SEQ ID NO: 4942485 - DNA, 25 bp, Homo sapien
gatgagccggcttggattgctgggc

SEQ ID NO: 4942486 - DNA, 25 bp, Homo sapien
ccggcttggattgctgggccatgtc

SEQ ID NO: 4942487 - DNA, 25 bp, Homo sapien
ctgggccatgtcgatgcaggcgaca

SEQ ID NO: 4942488 - DNA, 25 bp, Homo sapien
tggagctgccggatgagccggcttg

SEQ ID NO: 4942489 - DNA, 25 bp, Homo sapien
catgttgtcatattggtcattcggg

SEQ ID NO: 4942490 - DNA, 25 bp, Homo sapien
gcctgttgttgaacaggaacagctg

SEQ ID NO: 4942491 - DNA, 25 bp, Homo sapien
gggttcgattagcagctgttaggac

SEQ ID NO: 4942492 - DNA, 25 bp, Homo sapien
tcattcggggcctgttgttgaacag

SEQ ID NO: 4942493 - DNA, 25 bp, Homo sapien
cgtatccgagtggacagcccagagc

SEQ ID NO: 4942494 - DNA, 25 bp, Homo sapien
agagcaatggtgcttccaatccaca

SEQ ID NO: 4942495 - DNA, 25 bp, Homo sapien
caacagcactctccgtatccgagtg

SEQ ID NO: 4942496 - DNA, 25 bp, Homo sapien
agcccagagcaatggtgcttccaat

SEQ ID NO: 4942497 - DNA, 25 bp, Homo sapien
cggccgccctgggccgctcggaggc

SEQ ID NO: 4942498 - DNA, 25 bp, Homo sapien
acttccggccgccctgggccgctcg

SEQ ID NO: 4942499 - DNA, 25 bp, Homo sapien
ttccggccgccctgggccgctcgga

SEQ ID NO: 4942500 - DNA, 25 bp, Homo sapien
tccggccgccctgggccgctcggag

SEQ ID NO: 4942501 - DNA, 25 bp, Homo sapien
gcaaacgcgcgacgccgccggaaac

SEQ ID NO: 4942502 - DNA, 25 bp, Homo sapien
gaggctcgcaaacgcgcgacgccgc

SEQ ID NO: 4942503 - DNA, 25 bp, Homo sapien
tcgcaaacgcgcgacgccgccggaa

SEQ ID NO: 4942504 - DNA, 25 bp, Homo sapien
acccgaggctcgcaaacgcgcgacg

SEQ ID NO: 4942505 - DNA, 25 bp, Homo sapien
aggaagcgaccagggatcactcgga

SEQ ID NO: 4942506 - DNA, 25 bp, Homo sapien
cactcggaccgagggcaacccgagt

SEQ ID NO: 4942507 - DNA, 25 bp, Homo sapien
ccagggatcactcggaccgagggca

SEQ ID NO: 4942508 - DNA, 25 bp, Homo sapien
aagcgaccagggatcactcggaccg

SEQ ID NO: 4942509 - DNA, 25 bp, Homo sapien
cgcggggaccccaatgccgaaggcg

SEQ ID NO: 4942510 - DNA, 25 bp, Homo sapien
accaggcgctcaaggccccgcaaag

SEQ ID NO: 4942511 - DNA, 25 bp, Homo sapien
cgcgctttcccgcctggaggcccgg

SEQ ID NO: 4942512 - DNA, 25 bp, Homo sapien
agcccccgcgctttcccgcctggag

SEQ ID NO: 4942513 - DNA, 25 bp, Homo sapien
taatctgatataaatcgttcacctc

SEQ ID NO: 4942514 - DNA, 25 bp, Homo sapien
ccaggcacagggatgtaatctgata

SEQ ID NO: 4942515 - DNA, 25 bp, Homo sapien
tgtcgccaggatggaaccaggcaca

SEQ ID NO: 4942516 - DNA, 25 bp, Homo sapien
gttcacctcaattaagccaatgacc

SEQ ID NO: 4942517 - DNA, 25 bp, Homo sapien
tatgaaagccacttagactagaacg

SEQ ID NO: 4942518 - DNA, 25 bp, Homo sapien
gacagcgctcaagtacagggaacta

SEQ ID NO: 4942519 - DNA, 25 bp, Homo sapien
tgtaatgggtcacttccccagggac

SEQ ID NO: 4942520 - DNA, 25 bp, Homo sapien
cccagggacctcggccaaggtaatg

SEQ ID NO: 4942521 - DNA, 25 bp, Homo sapien
tgggtgggcatccacgtgttctggc

SEQ ID NO: 4942522 - DNA, 25 bp, Homo sapien
gggcatccacgtgttctggccgaga

SEQ ID NO: 4942523 - DNA, 25 bp, Homo sapien
catccacgtgttctggccgagagac

SEQ ID NO: 4942524 - DNA, 25 bp, Homo sapien
gtgggcatccacgtgttctggccga

SEQ ID NO: 4942525 - DNA, 25 bp, Homo sapien
cccagcaagggccaaggtagggtct

SEQ ID NO: 4942526 - DNA, 25 bp, Homo sapien
gcaggggtttgctcactaccttggg

SEQ ID NO: 4942527 - DNA, 25 bp, Homo sapien
ggaaggaggcagtcaagcttcctac

SEQ ID NO: 4942528 - DNA, 25 bp, Homo sapien
gccttcacaggacatgcgaggggaa

SEQ ID NO: 4942529 - DNA, 25 bp, Homo sapien
gggttgggcgagacgctcaccagga

SEQ ID NO: 4942530 - DNA, 25 bp, Homo sapien
gggcgagacgctcaccaggactcct

SEQ ID NO: 4942531 - DNA, 25 bp, Homo sapien
ccccttctggcgctgcctcatgaca

SEQ ID NO: 4942532 - DNA, 25 bp, Homo sapien
ccccatggggttgggcgagacgctc

SEQ ID NO: 4942533 - DNA, 25 bp, Homo sapien
aagtgcacagccacatcgccaaatg

SEQ ID NO: 4942534 - DNA, 25 bp, Homo sapien
tcctcccgagagaagtgcacagcca

SEQ ID NO: 4942535 - DNA, 25 bp, Homo sapien
tggccagggtccagacactgccact

SEQ ID NO: 4942536 - DNA, 25 bp, Homo sapien
gccacatcgccaaatgttaccacct

SEQ ID NO: 4942537 - DNA, 25 bp, Homo sapien
ttgccatcacgtggaaagcatggac

SEQ ID NO: 4942538 - DNA, 25 bp, Homo sapien
cacgtggaaagcatggacacagata

SEQ ID NO: 4942539 - DNA, 25 bp, Homo sapien
catcacgtggaaagcatggacacag

SEQ ID NO: 4942540 - DNA, 25 bp, Homo sapien
acaggttgccatcacgtggaaagca

SEQ ID NO: 4942541 - DNA, 25 bp, Homo sapien
gatgagcagttgatccatgggccag

SEQ ID NO: 4942542 - DNA, 25 bp, Homo sapien
gccaaggcctctgtttagaagcttc

SEQ ID NO: 4942543 - DNA, 25 bp, Homo sapien
ctctttgtgccggtcagtacagaga

SEQ ID NO: 4942544 - DNA, 25 bp, Homo sapien
ggcctctgtttagaagcttccttca

SEQ ID NO: 4942545 - DNA, 25 bp, Homo sapien
tggaggtccttggtgcctctgtccc

SEQ ID NO: 4942546 - DNA, 25 bp, Homo sapien
gagagatcagctcaggcttgaaaac

SEQ ID NO: 4942547 - DNA, 25 bp, Homo sapien
gctccagccgagagatcagctcagg

SEQ ID NO: 4942548 - DNA, 25 bp, Homo sapien
tgctccctgcaggtcgaggacccat

SEQ ID NO: 4942549 - DNA, 25 bp, Homo sapien
gaagtcctaacttgaagcacctcag

SEQ ID NO: 4942550 - DNA, 25 bp, Homo sapien
gagatcagagtgagggacgcatcca

SEQ ID NO: 4942551 - DNA, 25 bp, Homo sapien
tcccaaatcgctagaatggccggcg

SEQ ID NO: 4942552 - DNA, 25 bp, Homo sapien
tgaggaccccaagataggctgaagt

SEQ ID NO: 4942553 - DNA, 25 bp, Homo sapien
cagggcgtgaagaggctcagaaacc

SEQ ID NO: 4942554 - DNA, 25 bp, Homo sapien
ggcgtgaagaggctcagaaaccctc

SEQ ID NO: 4942555 - DNA, 25 bp, Homo sapien
ccacagggcgtgaagaggctcagaa

SEQ ID NO: 4942556 - DNA, 25 bp, Homo sapien
tgaagaggctcagaaaccctccttg

SEQ ID NO: 4942557 - DNA, 25 bp, Homo sapien
gagcactgggcacctaggccgttca

SEQ ID NO: 4942558 - DNA, 25 bp, Homo sapien
agcactgggcacctaggccgttcat

SEQ ID NO: 4942559 - DNA, 25 bp, Homo sapien
aagctaccacggattgggctgcggg

SEQ ID NO: 4942560 - DNA, 25 bp, Homo sapien
aagggtgggaagctaccacggattg

SEQ ID NO: 4942561 - DNA, 25 bp, Homo sapien
ggtccatcctacaggcactggtgtg

SEQ ID NO: 4942562 - DNA, 25 bp, Homo sapien
tccgagctggcgaggaaacagtaca

SEQ ID NO: 4942563 - DNA, 25 bp, Homo sapien
cactcattcgatagcaatgaatgtt

SEQ ID NO: 4942564 - DNA, 25 bp, Homo sapien
cttgttcactcattcgatagcaatg

SEQ ID NO: 4942565 - DNA, 25 bp, Homo sapien
tgttcactcattcgatagcaatgaa

SEQ ID NO: 4942566 - DNA, 25 bp, Homo sapien
cattcgatagcaatgaatgttcatt

SEQ ID NO: 4942567 - DNA, 25 bp, Homo sapien
ttctgattttaggatgtccatgtcc

SEQ ID NO: 4942568 - DNA, 25 bp, Homo sapien
tgtcccataggattctgattttagg

SEQ ID NO: 4942569 - DNA, 25 bp, Homo sapien
tcagaaacgtctccaaagccaggat

SEQ ID NO: 4942570 - DNA, 25 bp, Homo sapien
caggcctgctcattttcagtcctaa

SEQ ID NO: 4942571 - DNA, 25 bp, Homo sapien
tattttggaaggtaaagcctgtcac

SEQ ID NO: 4942572 - DNA, 25 bp, Homo sapien
ggctgacaatccaggccgctgcttc

SEQ ID NO: 4942573 - DNA, 25 bp, Homo sapien
agcgatatctgaagtggctctgatg

SEQ ID NO: 4942574 - DNA, 25 bp, Homo sapien
cgggactgcccagatgactgtctaa

SEQ ID NO: 4942575 - DNA, 25 bp, Homo sapien
ccacactctgcacattcgtacggct

SEQ ID NO: 4942576 - DNA, 25 bp, Homo sapien
tctctccatggcagttatttgtatg

SEQ ID NO: 4942577 - DNA, 25 bp, Homo sapien
ctgatgctgattaagctgcgagcag

SEQ ID NO: 4942578 - DNA, 25 bp, Homo sapien
gcgagcagagcctgaagactttccc

SEQ ID NO: 4942579 - DNA, 25 bp, Homo sapien
gcgaataagccgtgaactacaacca

SEQ ID NO: 4942580 - DNA, 25 bp, Homo sapien
caacaaggcttggactgtctgaggc

SEQ ID NO: 4942581 - DNA, 25 bp, Homo sapien
gaataagttttgagctcaggcggaa

SEQ ID NO: 4942582 - DNA, 25 bp, Homo sapien
gactcaggcgagagatccacctaaa

SEQ ID NO: 4942583 - DNA, 25 bp, Homo sapien
ctgaataaggtgtgagccctgaaca

SEQ ID NO: 4942584 - DNA, 25 bp, Homo sapien
gagccctgaacaaagcctttgccac

SEQ ID NO: 4942585 - DNA, 25 bp, Homo sapien
gaataaggtgtgagccctgaacaaa

SEQ ID NO: 4942586 - DNA, 25 bp, Homo sapien
tgctgaataaggtgtgagccctgaa

SEQ ID NO: 4942587 - DNA, 25 bp, Homo sapien
catattcgtaaaaccactgggccct

SEQ ID NO: 4942588 - DNA, 25 bp, Homo sapien
tacggctcacaaaggtggacccttc

SEQ ID NO: 4942589 - DNA, 25 bp, Homo sapien
taagctgtgtgctcatactgaaggc

SEQ ID NO: 4942590 - DNA, 25 bp, Homo sapien
tttccgcattggaggcattcgtagg

SEQ ID NO: 4942591 - DNA, 25 bp, Homo sapien
gctataggtttattcacatatatac

SEQ ID NO: 4942592 - DNA, 25 bp, Homo sapien
ggctataggtttattcacatatata

SEQ ID NO: 4942593 - DNA, 25 bp, Homo sapien
ttaaggctataggtttattcacata

SEQ ID NO: 4942594 - DNA, 25 bp, Homo sapien
aaggctataggtttattcacatata

SEQ ID NO: 4942595 - DNA, 25 bp, Homo sapien
gagggacacaggctttattgaacag

SEQ ID NO: 4942596 - DNA, 25 bp, Homo sapien
cactcggcctgaagttggatattct

SEQ ID NO: 4942597 - DNA, 25 bp, Homo sapien
aactgcagactgcaccctgattttg

SEQ ID NO: 4942598 - DNA, 25 bp, Homo sapien
gggacctgtcaactcaaaactgcag

SEQ ID NO: 4942599 - DNA, 25 bp, Homo sapien
cgcacacgggtgtgctggagatgct

SEQ ID NO: 4942600 - DNA, 25 bp, Homo sapien
ctaggccagtacaagacagtcatca

SEQ ID NO: 4942601 - DNA, 25 bp, Homo sapien
aaagtggggcaactaggccagtaca

SEQ ID NO: 4942602 - DNA, 25 bp, Homo sapien
cctcagggcctgtgcgcacacgggt

SEQ ID NO: 4942603 - DNA, 25 bp, Homo sapien
tccaggttccccctgaatgacaagg

SEQ ID NO: 4942604 - DNA, 25 bp, Homo sapien
caggtgggaggtcaccagtcaggag

SEQ ID NO: 4942605 - DNA, 25 bp, Homo sapien
ggagttccaggttccccctgaatga

SEQ ID NO: 4942606 - DNA, 25 bp, Homo sapien
gggaggtcaccagtcaggagttcca

SEQ ID NO: 4942607 - DNA, 25 bp, Homo sapien
ccatcacccttgtacaccgggagga

SEQ ID NO: 4942608 - DNA, 25 bp, Homo sapien
atactccacgtgcacagaagttccg

SEQ ID NO: 4942609 - DNA, 25 bp, Homo sapien
gcaacccctgtgctagacctgaagg

SEQ ID NO: 4942610 - DNA, 25 bp, Homo sapien
aaggtgaccacctggctaagcacat

SEQ ID NO: 4942611 - DNA, 25 bp, Homo sapien
ccatgaagacgcttgggcatcacca

SEQ ID NO: 4942612 - DNA, 25 bp, Homo sapien
catcgtgcagctagaagaggactcc

SEQ ID NO: 4942613 - DNA, 25 bp, Homo sapien
taccgaagcccgaattgcagtgcag

SEQ ID NO: 4942614 - DNA, 25 bp, Homo sapien
gaaaaataatccttcagtggctgga

SEQ ID NO: 4942615 - DNA, 25 bp, Homo sapien
cactgctccttcaggtgcgtcggaa

SEQ ID NO: 4942616 - DNA, 25 bp, Homo sapien
gacaagtgcctcgaggacaggagct

SEQ ID NO: 4942617 - DNA, 25 bp, Homo sapien
gaaccctctttagttgccgcacttg

SEQ ID NO: 4942618 - DNA, 25 bp, Homo sapien
ggcacgtgcgtttcctctggcatag

SEQ ID NO: 4942619 - DNA, 25 bp, Homo sapien
tgttcggagagctctggatactgcg

SEQ ID NO: 4942620 - DNA, 25 bp, Homo sapien
ggaccaggcccgcttttggctgcat

SEQ ID NO: 4942621 - DNA, 25 bp, Homo sapien
cggcgacggccgagtgccaatttga

SEQ ID NO: 4942622 - DNA, 25 bp, Homo sapien
taggaaaggctgcttcgccgctgtg

SEQ ID NO: 4942623 - DNA, 25 bp, Homo sapien
agaccgtccacacgggacagggacg

SEQ ID NO: 4942624 - DNA, 25 bp, Homo sapien
agcccaaagcggaaccgagtcacgc

SEQ ID NO: 4942625 - DNA, 25 bp, Homo sapien
ctagggcccaacagagcagcccaaa

SEQ ID NO: 4942626 - DNA, 25 bp, Homo sapien
cattgtttcggaccgagctcctgcg

SEQ ID NO: 4942627 - DNA, 25 bp, Homo sapien
attctccgttgctccagtgaccctt

SEQ ID NO: 4942628 - DNA, 25 bp, Homo sapien
tgatcatactatctagcctggacaa

SEQ ID NO: 4942629 - DNA, 25 bp, Homo sapien
tataatctgacgctttccaataaaa

SEQ ID NO: 4942630 - DNA, 25 bp, Homo sapien
ctgcctggaatttctgtgtataatc

SEQ ID NO: 4942631 - DNA, 25 bp, Homo sapien
ctgtgatcatactatctagcctgga

SEQ ID NO: 4942632 - DNA, 25 bp, Homo sapien
ggcacctgctaccacgcccgactaa

SEQ ID NO: 4942633 - DNA, 25 bp, Homo sapien
ggcgtgtgccaccgcacccggccaa

SEQ ID NO: 4942634 - DNA, 25 bp, Homo sapien
tgtgccaccgcacccggccaaggat

SEQ ID NO: 4942635 - DNA, 25 bp, Homo sapien
cgtgtgccaccgcacccggccaagg

SEQ ID NO: 4942636 - DNA, 25 bp, Homo sapien
gtgccccagaaaccgtgagatgtct

SEQ ID NO: 4942637 - DNA, 25 bp, Homo sapien
tcaattcccatgcaggcaaaggagg

SEQ ID NO: 4942638 - DNA, 25 bp, Homo sapien
caagagtccagtatccattgccata

SEQ ID NO: 4942639 - DNA, 25 bp, Homo sapien
gcccttatgacctgcagatcctgtg

SEQ ID NO: 4942640 - DNA, 25 bp, Homo sapien
cagagcgctcgacctgctcccagaa

SEQ ID NO: 4942641 - DNA, 25 bp, Homo sapien
cagcctgcagagcgctcgacctgct

SEQ ID NO: 4942642 - DNA, 25 bp, Homo sapien
gcctgcagagcgctcgacctgctcc

SEQ ID NO: 4942643 - DNA, 25 bp, Homo sapien
tgcagagcgctcgacctgctcccag

SEQ ID NO: 4942644 - DNA, 25 bp, Homo sapien
cagcctgtacacaacaagacagttt

SEQ ID NO: 4942645 - DNA, 25 bp, Homo sapien
tgttgtcacttcaactcgctgtttt

SEQ ID NO: 4942646 - DNA, 25 bp, Homo sapien
gggtaagtgtatgcctgatcttttt

SEQ ID NO: 4942647 - DNA, 25 bp, Homo sapien
tcaaatatgaccacactacagcctg

SEQ ID NO: 4942648 - DNA, 25 bp, Homo sapien
catgggctcggggtcatagtttaca

SEQ ID NO: 4942649 - DNA, 25 bp, Homo sapien
aaatgagattttcccctgcatgctg

SEQ ID NO: 4942650 - DNA, 25 bp, Homo sapien
gctcggggtcatagtttacaaaatg

SEQ ID NO: 4942651 - DNA, 25 bp, Homo sapien
gagattttcccctgcatgctggccc

SEQ ID NO: 4942652 - DNA, 25 bp, Homo sapien
ctgttacaggctcgttccaggaaac

SEQ ID NO: 4942653 - DNA, 25 bp, Homo sapien
tgttacaggctcgttccaggaaact

SEQ ID NO: 4942654 - DNA, 25 bp, Homo sapien
tcctgttacaggctcgttccaggaa

SEQ ID NO: 4942655 - DNA, 25 bp, Homo sapien
ttacaggctcgttccaggaaactga

SEQ ID NO: 4942656 - DNA, 25 bp, Homo sapien
gcttggagttggacgtcagaatccc

SEQ ID NO: 4942657 - DNA, 25 bp, Homo sapien
ccagtattctgtggcggtgatctcc

SEQ ID NO: 4942658 - DNA, 25 bp, Homo sapien
cctggcatctatagaggactcgtca

SEQ ID NO: 4942659 - DNA, 25 bp, Homo sapien
tatgcaaggtttaggttgaggtcca

SEQ ID NO: 4942660 - DNA, 25 bp, Homo sapien
attgcccagaggtgttcggcccctc

SEQ ID NO: 4942661 - DNA, 25 bp, Homo sapien
taaggctcggcgatgggctgtaacc

SEQ ID NO: 4942662 - DNA, 25 bp, Homo sapien
ggcccctgagaaggcgacattcgca

SEQ ID NO: 4942663 - DNA, 25 bp, Homo sapien
gaacgagctcgagttccaggacggc

SEQ ID NO: 4942664 - DNA, 25 bp, Homo sapien
taacaggaggtatagcagagccaaa

SEQ ID NO: 4942665 - DNA, 25 bp, Homo sapien
caaaactgaaagtcatgtaacccgg

SEQ ID NO: 4942666 - DNA, 25 bp, Homo sapien
tgtcaactgctaaaacaatccagga

SEQ ID NO: 4942667 - DNA, 25 bp, Homo sapien
tgacactgaggtgtaaccacaagac

SEQ ID NO: 4942668 - DNA, 25 bp, Homo sapien
ttgcaagaaagtctgagatgtgaca

SEQ ID NO: 4942669 - DNA, 25 bp, Homo sapien
ttctccagcagtcatgaattttgca

SEQ ID NO: 4942670 - DNA, 25 bp, Homo sapien
agtctgagatgtgacagctgtacat

SEQ ID NO: 4942671 - DNA, 25 bp, Homo sapien
acttctccagcagtcatgaattttg

SEQ ID NO: 4942672 - DNA, 25 bp, Homo sapien
gccatcaggaacaattgcaagctct

SEQ ID NO: 4942673 - DNA, 25 bp, Homo sapien
tcaactagcataagttagaagggca

SEQ ID NO: 4942674 - DNA, 25 bp, Homo sapien
aaggaaatggctgccccacagtctg

SEQ ID NO: 4942675 - DNA, 25 bp, Homo sapien
tcttttctctttagatgtggcaagg

SEQ ID NO: 4942676 - DNA, 25 bp, Homo sapien
ctggagaaaagcctcacgtgtgtaa

SEQ ID NO: 4942677 - DNA, 25 bp, Homo sapien
gagagaagccgtacagatgcagtgt

SEQ ID NO: 4942678 - DNA, 25 bp, Homo sapien
tagttatagctcagtgctccgaaag

SEQ ID NO: 4942679 - DNA, 25 bp, Homo sapien
tacgcctgccacgagtgtgggaaga

SEQ ID NO: 4942680 - DNA, 25 bp, Homo sapien
tcagcgtcaaatagtccacactggg

SEQ ID NO: 4942681 - DNA, 25 bp, Homo sapien
tgagaaagcttaccagtgcagcgaa

SEQ ID NO: 4942682 - DNA, 25 bp, Homo sapien
tatgacatgggtggccagagtttcc

SEQ ID NO: 4942683 - DNA, 25 bp, Homo sapien
gatggcatgtcaggaaatccctaca

SEQ ID NO: 4942684 - DNA, 25 bp, Homo sapien
tatcgaccaactttgattgcttcct

SEQ ID NO: 4942685 - DNA, 25 bp, Homo sapien
tgttcccaatatcgaccaactttga

SEQ ID NO: 4942686 - DNA, 25 bp, Homo sapien
caactttgattgcttcctgtagtga

SEQ ID NO: 4942687 - DNA, 25 bp, Homo sapien
gggagtgtggattgttcccaatatc

SEQ ID NO: 4942688 - DNA, 25 bp, Homo sapien
tgtgcatcagaaagggacagatttg

SEQ ID NO: 4942689 - DNA, 25 bp, Homo sapien
gcatgctattgtagacttcttaggt

SEQ ID NO: 4942690 - DNA, 25 bp, Homo sapien
cttgacctccaccactagctcatga

SEQ ID NO: 4942691 - DNA, 25 bp, Homo sapien
gctcatgacccaaaactgaagatgt

SEQ ID NO: 4942692 - DNA, 25 bp, Homo sapien
catatttgcaggtgttgatggttac

SEQ ID NO: 4942693 - DNA, 25 bp, Homo sapien
acaggcctttgtcacctgaagcatt

SEQ ID NO: 4942694 - DNA, 25 bp, Homo sapien
tcatgatccatactgctgacacagg

SEQ ID NO: 4942695 - DNA, 25 bp, Homo sapien
tgatccatactgctgacacaggcct

SEQ ID NO: 4942696 - DNA, 25 bp, Homo sapien
gatccatactgctgacacaggcctt

SEQ ID NO: 4942697 - DNA, 25 bp, Homo sapien
ggtggctggaaaccttaatctcctg

SEQ ID NO: 4942698 - DNA, 25 bp, Homo sapien
gtagttgagatccttgcacttccaa

SEQ ID NO: 4942699 - DNA, 25 bp, Homo sapien
tgcagtcttgtagctggcccaatat

SEQ ID NO: 4942700 - DNA, 25 bp, Homo sapien
tccaagtgtgatggaaccaggctag

SEQ ID NO: 4942701 - DNA, 25 bp, Homo sapien
agcaacgccgatggacaagggccat

SEQ ID NO: 4942702 - DNA, 25 bp, Homo sapien
actggtcagagatctcgtatgtgcc

SEQ ID NO: 4942703 - DNA, 25 bp, Homo sapien
ggtcttctaggtgtcgcagcttcac

SEQ ID NO: 4942704 - DNA, 25 bp, Homo sapien
tatgtgccagtcactagtaggtcct

SEQ ID NO: 4942705 - DNA, 25 bp, Homo sapien
atgctgaagtgtaggacccaagtgt

SEQ ID NO: 4942706 - DNA, 25 bp, Homo sapien
tgaagtgtaggacccaagtgtttgt

SEQ ID NO: 4942707 - DNA, 25 bp, Homo sapien
gtccagtgaggcagaacattgaaaa

SEQ ID NO: 4942708 - DNA, 25 bp, Homo sapien
aggacccaagtgtttgttgactcac

SEQ ID NO: 4942709 - DNA, 25 bp, Homo sapien
tcatgaaaagatatcaccagaagct

SEQ ID NO: 4942710 - DNA, 25 bp, Homo sapien
gaagtccctcattgacttgttgggt

SEQ ID NO: 4942711 - DNA, 25 bp, Homo sapien
tcagctaagggtaaagagaaagtta

SEQ ID NO: 4942712 - DNA, 25 bp, Homo sapien
aacagatcacacaagggaacccagg

SEQ ID NO: 4942713 - DNA, 25 bp, Homo sapien
gaatctgtataaatcccatatgcct

SEQ ID NO: 4942714 - DNA, 25 bp, Homo sapien
tacttaaactgcatcattctcattt

SEQ ID NO: 4942715 - DNA, 25 bp, Homo sapien
cagaccattttggataatatgctca

SEQ ID NO: 4942716 - DNA, 25 bp, Homo sapien
tggtttctgctagcctttatttgag

SEQ ID NO: 4942717 - DNA, 25 bp, Homo sapien
ctgacctgagggctgcatcaagatc

SEQ ID NO: 4942718 - DNA, 25 bp, Homo sapien
tgacctgagggctgcatcaagatct

SEQ ID NO: 4942719 - DNA, 25 bp, Homo sapien
cagtcctgagcctaatatcttctcc

SEQ ID NO: 4942720 - DNA, 25 bp, Homo sapien
gtcctgagcctaatatcttctccct

SEQ ID NO: 4942721 - DNA, 25 bp, Homo sapien
aacttcccttaacatcttggtgacg

SEQ ID NO: 4942722 - DNA, 25 bp, Homo sapien
cttggcaaacttcccttaacatctt

SEQ ID NO: 4942723 - DNA, 25 bp, Homo sapien
gacgagaactgggccttgcggtcac

SEQ ID NO: 4942724 - DNA, 25 bp, Homo sapien
ccttaacatcttggtgacgagaact

SEQ ID NO: 4942725 - DNA, 25 bp, Homo sapien
aagggcagggcggaagttcagatta

SEQ ID NO: 4942726 - DNA, 25 bp, Homo sapien
ggatttagcgttcgcgctccttccc

SEQ ID NO: 4942727 - DNA, 25 bp, Homo sapien
cagattaggcatttccggcccaggg

SEQ ID NO: 4942728 - DNA, 25 bp, Homo sapien
ggctccccgcggcacgggatttagc

SEQ ID NO: 4942729 - DNA, 25 bp, Homo sapien
tactatcagccgcctagagcggacc

SEQ ID NO: 4942730 - DNA, 25 bp, Homo sapien
gagtactatcagccgcctagagcgg

SEQ ID NO: 4942731 - DNA, 25 bp, Homo sapien
gcggacccacgaaacctggaattca

SEQ ID NO: 4942732 - DNA, 25 bp, Homo sapien
gcctagagcggacccacgaaacctg

SEQ ID NO: 4942733 - DNA, 25 bp, Homo sapien
acccccggttgaggagcgtccgcag

SEQ ID NO: 4942734 - DNA, 25 bp, Homo sapien
cagagcacggagaacaacccccggt

SEQ ID NO: 4942735 - DNA, 25 bp, Homo sapien
gtgtcggggtcccttccttcgcagc

SEQ ID NO: 4942736 - DNA, 25 bp, Homo sapien
agcgtccgcaggaacgctcggtgtc

SEQ ID NO: 4942737 - DNA, 25 bp, Homo sapien
tctcagcaccgagtggttggttctc

SEQ ID NO: 4942738 - DNA, 25 bp, Homo sapien
taagcgatggcagcagccttctaga

SEQ ID NO: 4942739 - DNA, 25 bp, Homo sapien
tgaggtcaaaagactacaggtggga

SEQ ID NO: 4942740 - DNA, 25 bp, Homo sapien
gattctgagcttgatcactacttgg

SEQ ID NO: 4942741 - DNA, 25 bp, Homo sapien
ccacagagacaaggagggaagctat

SEQ ID NO: 4942742 - DNA, 25 bp, Homo sapien
gaaacgacatataagcaagcctgct

SEQ ID NO: 4942743 - DNA, 25 bp, Homo sapien
gaagtgagatgttgcaaaggccgct

SEQ ID NO: 4942744 - DNA, 25 bp, Homo sapien
tctgccccgttagccatggaagagc

SEQ ID NO: 4942745 - DNA, 25 bp, Homo sapien
cccaaatagttaccatggagaggaa

SEQ ID NO: 4942746 - DNA, 25 bp, Homo sapien
gaatactactggtgagcaaccctac

SEQ ID NO: 4942747 - DNA, 25 bp, Homo sapien
gatcaaccattatgaagcatcaggg

SEQ ID NO: 4942748 - DNA, 25 bp, Homo sapien
tcagtgtaacaaacgtggaaaggcc

SEQ ID NO: 4942749 - DNA, 25 bp, Homo sapien
caaaccacaggcataatgcactgca

SEQ ID NO: 4942750 - DNA, 25 bp, Homo sapien
acaggcataatgcactgcagaaacc

SEQ ID NO: 4942751 - DNA, 25 bp, Homo sapien
attctctagtgtcaacaaaccacag

SEQ ID NO: 4942752 - DNA, 25 bp, Homo sapien
tagtgtcaacaaaccacaggcataa

SEQ ID NO: 4942753 - DNA, 25 bp, Homo sapien
cccagatgaacttaatctagcaccc

SEQ ID NO: 4942754 - DNA, 25 bp, Homo sapien
gatgaacttaatctagcaccctata

SEQ ID NO: 4942755 - DNA, 25 bp, Homo sapien
aagacagtaaggagtataacacttc

SEQ ID NO: 4942756 - DNA, 25 bp, Homo sapien
taaggagtataacacttcccagatg

SEQ ID NO: 4942757 - DNA, 25 bp, Homo sapien
aacaaccagctctctatgaagtaac

SEQ ID NO: 4942758 - DNA, 25 bp, Homo sapien
acaaccagctctctatgaagtaaca

SEQ ID NO: 4942759 - DNA, 25 bp, Homo sapien
actcattcattacctccaggaaggc

SEQ ID NO: 4942760 - DNA, 25 bp, Homo sapien
ggatcagttttccaacaggacatag

SEQ ID NO: 4942761 - DNA, 25 bp, Homo sapien
caggacatagaaatccttaagctgt

SEQ ID NO: 4942762 - DNA, 25 bp, Homo sapien
tttcagacgaaactgacttcataga

SEQ ID NO: 4942763 - DNA, 25 bp, Homo sapien
ggacagttgggtcaattttactatg

SEQ ID NO: 4942764 - DNA, 25 bp, Homo sapien
tttagcaagtgctgagctccaattg

SEQ ID NO: 4942765 - DNA, 25 bp, Homo sapien
tagcaagtgctgagctccaattgaa

SEQ ID NO: 4942766 - DNA, 25 bp, Homo sapien
tttttagcaagtgctgagctccaat

SEQ ID NO: 4942767 - DNA, 25 bp, Homo sapien
agcaagtgctgagctccaattgaag

SEQ ID NO: 4942768 - DNA, 25 bp, Homo sapien
tttcattccaatgtgaatctgctga

SEQ ID NO: 4942769 - DNA, 25 bp, Homo sapien
ctgatgtataacaagggttggattc

SEQ ID NO: 4942770 - DNA, 25 bp, Homo sapien
gatgtataacaagggttggattctg

SEQ ID NO: 4942771 - DNA, 25 bp, Homo sapien
cagatttcattccaatgtgaatctg

SEQ ID NO: 4942772 - DNA, 25 bp, Homo sapien
agaaagtggtatgaattctgtatgg

SEQ ID NO: 4942773 - DNA, 25 bp, Homo sapien
cacatgcatgagattcataggcttt

SEQ ID NO: 4942774 - DNA, 25 bp, Homo sapien
cacataatataaggtttttgcacat

SEQ ID NO: 4942775 - DNA, 25 bp, Homo sapien
ggtatgaattctgtatggtcttccc

SEQ ID NO: 4942776 - DNA, 25 bp, Homo sapien
cagtcgccaccggaactacgcgggg

SEQ ID NO: 4942777 - DNA, 25 bp, Homo sapien
cgccgcagtcgccaccggaactacg

SEQ ID NO: 4942778 - DNA, 25 bp, Homo sapien
ccaccggaactacgcggggcgcaga

SEQ ID NO: 4942779 - DNA, 25 bp, Homo sapien
ccgcagtcgccaccggaactacgcg

SEQ ID NO: 4942780 - DNA, 25 bp, Homo sapien
aaggcccagccacccgcgcgtcttc

SEQ ID NO: 4942781 - DNA, 25 bp, Homo sapien
ggtagcacgagggtcaccgagagcc

SEQ ID NO: 4942782 - DNA, 25 bp, Homo sapien
agagccgccaacaatgcaaggccca

SEQ ID NO: 4942783 - DNA, 25 bp, Homo sapien
accgagagccgccaacaatgcaagg

SEQ ID NO: 4942784 - DNA, 25 bp, Homo sapien
gcctccccagcaagatgtcccaggg

SEQ ID NO: 4942785 - DNA, 25 bp, Homo sapien
cctccccagcaagatgtcccagggc

SEQ ID NO: 4942786 - DNA, 25 bp, Homo sapien
agacagtggaaggattccgggcgct

SEQ ID NO: 4942787 - DNA, 25 bp, Homo sapien
gacagtggaaggattccgggcgctg

SEQ ID NO: 4942788 - DNA, 25 bp, Homo sapien
tggaaggattccgggcgctggaaac

SEQ ID NO: 4942789 - DNA, 25 bp, Homo sapien
cagtggaaggattccgggcgctgga

SEQ ID NO: 4942790 - DNA, 25 bp, Homo sapien
ctgttccgcgttttcttcttattct

SEQ ID NO: 4942791 - DNA, 25 bp, Homo sapien
ttcatcgcccaacgggtgcgctctg

SEQ ID NO: 4942792 - DNA, 25 bp, Homo sapien
cttttgttttttcgacgctgtgccg

SEQ ID NO: 4942793 - DNA, 25 bp, Homo sapien
gctctggagtcagcgttactgcacg

SEQ ID NO: 4942794 - DNA, 25 bp, Homo sapien
ttaactccgcggaccccagatcaca

SEQ ID NO: 4942795 - DNA, 25 bp, Homo sapien
tggaaaaccatagccgccggcccca

SEQ ID NO: 4942796 - DNA, 25 bp, Homo sapien
cgccttaactccgcggaccccagat

SEQ ID NO: 4942797 - DNA, 25 bp, Homo sapien
ccttaactccgcggaccccagatca

SEQ ID NO: 4942798 - DNA, 25 bp, Homo sapien
caccaagccaattcctgggccaact

SEQ ID NO: 4942799 - DNA, 25 bp, Homo sapien
acacaccaagccaattcctgggcca

SEQ ID NO: 4942800 - DNA, 25 bp, Homo sapien
acaccaagccaattcctgggccaac

SEQ ID NO: 4942801 - DNA, 25 bp, Homo sapien
cacaccaagccaattcctgggccaa

SEQ ID NO: 4942802 - DNA, 25 bp, Homo sapien
tgacctcctaccaccccgccgcaaa

SEQ ID NO: 4942803 - DNA, 25 bp, Homo sapien
caccccgccgcaaagccaacaactc

SEQ ID NO: 4942804 - DNA, 25 bp, Homo sapien
aaataaaggactagtgaacacctct

SEQ ID NO: 4942805 - DNA, 25 bp, Homo sapien
gtgaacacctctattactgacctcc

SEQ ID NO: 4942806 - DNA, 25 bp, Homo sapien
tcttttgctgcgcagggttcggatt

SEQ ID NO: 4942807 - DNA, 25 bp, Homo sapien
ggcaagggcgttcttttgctgcgca

SEQ ID NO: 4942808 - DNA, 25 bp, Homo sapien
gttcggattgctccaatagcctgct

SEQ ID NO: 4942809 - DNA, 25 bp, Homo sapien
gctgcgcagggttcggattgctcca

SEQ ID NO: 4942810 - DNA, 25 bp, Homo sapien
ccatctgagccctatagtctccaaa

SEQ ID NO: 4942811 - DNA, 25 bp, Homo sapien
cccgcagggcctcacgccattcggc

SEQ ID NO: 4942812 - DNA, 25 bp, Homo sapien
gggcctcacgccattcggcttccat

SEQ ID NO: 4942813 - DNA, 25 bp, Homo sapien
ttccatctgagccctatagtctcca

SEQ ID NO: 4942814 - DNA, 25 bp, Homo sapien
ggctccatctacaggttgcacctgg

SEQ ID NO: 4942815 - DNA, 25 bp, Homo sapien
gtggctccatctacaggttgcacct

SEQ ID NO: 4942816 - DNA, 25 bp, Homo sapien
tggctctccatatagagcgaggcct

SEQ ID NO: 4942817 - DNA, 25 bp, Homo sapien
tccatatagagcgaggcctgcagac

SEQ ID NO: 4942818 - DNA, 25 bp, Homo sapien
gctacaaatccttggaccagccagg

SEQ ID NO: 4942819 - DNA, 25 bp, Homo sapien
actccagggttctctgacaacagaa

SEQ ID NO: 4942820 - DNA, 25 bp, Homo sapien
tcacaccttcacaacagctacaaat

SEQ ID NO: 4942821 - DNA, 25 bp, Homo sapien
tgcactcaaaacaaacccctacacc

SEQ ID NO: 4942822 - DNA, 25 bp, Homo sapien
aacagagggcctgagactgaatggc

SEQ ID NO: 4942823 - DNA, 25 bp, Homo sapien
tctaacataggtggtcagcatactc

SEQ ID NO: 4942824 - DNA, 25 bp, Homo sapien
gctgggctccaggtatcaatctagt

SEQ ID NO: 4942825 - DNA, 25 bp, Homo sapien
gaactgttagcgcaagaagctcctt

SEQ ID NO: 4942826 - DNA, 25 bp, Homo sapien
acctccgtttctcgtacaagaactg

SEQ ID NO: 4942827 - DNA, 25 bp, Homo sapien
ccgtttctcgtacaagaactggatc

SEQ ID NO: 4942828 - DNA, 25 bp, Homo sapien
cctccgtttctcgtacaagaactgg

SEQ ID NO: 4942829 - DNA, 25 bp, Homo sapien
tccgtttctcgtacaagaactggat

SEQ ID NO: 4942830 - DNA, 25 bp, Homo sapien
caatggtaacgtgctgcaggagtga

SEQ ID NO: 4942831 - DNA, 25 bp, Homo sapien
gctggaacaacgaagcaaatttttc

SEQ ID NO: 4942832 - DNA, 25 bp, Homo sapien
agtgatgttgttaagggctggaaca

SEQ ID NO: 4942833 - DNA, 25 bp, Homo sapien
gtaggactttccaatggtaacgtgc

SEQ ID NO: 4942834 - DNA, 25 bp, Homo sapien
caccattgctcgtcggacttcggac

SEQ ID NO: 4942835 - DNA, 25 bp, Homo sapien
atcgccaccattgctcgtcggactt

SEQ ID NO: 4942836 - DNA, 25 bp, Homo sapien
atcgccatcgccaccattgctcgtc

SEQ ID NO: 4942837 - DNA, 25 bp, Homo sapien
tgctcgtcggacttcggacttgttt

SEQ ID NO: 4942838 - DNA, 25 bp, Homo sapien
tcataggaacacttacgaagggaaa

SEQ ID NO: 4942839 - DNA, 25 bp, Homo sapien
taatactcataggaacacttacgaa

SEQ ID NO: 4942840 - DNA, 25 bp, Homo sapien
atactcataggaacacttacgaagg

SEQ ID NO: 4942841 - DNA, 25 bp, Homo sapien
actcataggaacacttacgaaggga

SEQ ID NO: 4942842 - DNA, 25 bp, Homo sapien
caataagccgaaggcacatgtggca

SEQ ID NO: 4942843 - DNA, 25 bp, Homo sapien
gcaataagccgaaggcacatgtggc

SEQ ID NO: 4942844 - DNA, 25 bp, Homo sapien
ggcaataagccgaaggcacatgtgg

SEQ ID NO: 4942845 - DNA, 25 bp, Homo sapien
tctgcagtgtggaaacaaattattc

SEQ ID NO: 4942846 - DNA, 25 bp, Homo sapien
tgcagtgtggaaacaaattattcat

SEQ ID NO: 4942847 - DNA, 25 bp, Homo sapien
attattcatgcacaaggtcctctta

SEQ ID NO: 4942848 - DNA, 25 bp, Homo sapien
attcatgcacaaggtcctcttactg

SEQ ID NO: 4942849 - DNA, 25 bp, Homo sapien
tgtggcaaactaccatgcatggacc

SEQ ID NO: 4942850 - DNA, 25 bp, Homo sapien
tggaccaggtctgacacagtctgcg

SEQ ID NO: 4942851 - DNA, 25 bp, Homo sapien
gaccatatggcttggaaaacttaaa

SEQ ID NO: 4942852 - DNA, 25 bp, Homo sapien
gaagacctgagtcattaagagagag

SEQ ID NO: 4942853 - DNA, 25 bp, Homo sapien
ctcctaagcacaagcgatcctcccg

SEQ ID NO: 4942854 - DNA, 25 bp, Homo sapien
gctgtgtggatgtgatataaccctt

SEQ ID NO: 4942855 - DNA, 25 bp, Homo sapien
ggatgtgatataaccctttctgtca

SEQ ID NO: 4942856 - DNA, 25 bp, Homo sapien
cggccaaaagttgcttttgaggagt

SEQ ID NO: 4942857 - DNA, 25 bp, Homo sapien
cttttgaggagttattgctgtgtgg

SEQ ID NO: 4942858 - DNA, 25 bp, Homo sapien
gcctcccgaccctgatggcagagaa

SEQ ID NO: 4942859 - DNA, 25 bp, Homo sapien
agcaaacaccagtcggagagctggg

SEQ ID NO: 4942860 - DNA, 25 bp, Homo sapien
agaagcaaacaccagtcggagagct

SEQ ID NO: 4942861 - DNA, 25 bp, Homo sapien
ggcctcccgaccctgatggcagaga

SEQ ID NO: 4942862 - DNA, 25 bp, Homo sapien
cattgctactcctctgcctgtaggg

SEQ ID NO: 4942863 - DNA, 25 bp, Homo sapien
gaacatgtctgatgtggtcccacct

SEQ ID NO: 4942864 - DNA, 25 bp, Homo sapien
tccctcagctagtcctcgaacatgt

SEQ ID NO: 4942865 - DNA, 25 bp, Homo sapien
tatcaccttctcagtggagactaca

SEQ ID NO: 4942866 - DNA, 25 bp, Homo sapien
aacttgggttcttggaccaggtgcg

SEQ ID NO: 4942867 - DNA, 25 bp, Homo sapien
caattccgggtgacttcaggcgctg

SEQ ID NO: 4942868 - DNA, 25 bp, Homo sapien
tgggcctcaggaaatcaatgtcatg

SEQ ID NO: 4942869 - DNA, 25 bp, Homo sapien
catcactctagatctaaaacttggg

SEQ ID NO: 4942870 - DNA, 25 bp, Homo sapien
tcatcaggaaaagctttggatcaca

SEQ ID NO: 4942871 - DNA, 25 bp, Homo sapien
agaggtcagcaaggcaaacccgagc

SEQ ID NO: 4942872 - DNA, 25 bp, Homo sapien
ggcagctacgtcctctcttgagcta

SEQ ID NO: 4942873 - DNA, 25 bp, Homo sapien
tttggatcacaattcccagtgctga

SEQ ID NO: 4942874 - DNA, 25 bp, Homo sapien
ctgcacgtttttggcgagagcatgg

SEQ ID NO: 4942875 - DNA, 25 bp, Homo sapien
aattgtgctgcacgtttttggcgag

SEQ ID NO: 4942876 - DNA, 25 bp, Homo sapien
tgctgcacgtttttggcgagagcat

SEQ ID NO: 4942877 - DNA, 25 bp, Homo sapien
tgtgctgcacgtttttggcgagagc

SEQ ID NO: 4942878 - DNA, 25 bp, Homo sapien
taggctcaggtggaacagcctcaac

SEQ ID NO: 4942879 - DNA, 25 bp, Homo sapien
gaggcccagctgagtttggatcata

SEQ ID NO: 4942880 - DNA, 25 bp, Homo sapien
gaatatccttaagataaggccccag

SEQ ID NO: 4942881 - DNA, 25 bp, Homo sapien
gagcatttccggttcccctgctgtg

SEQ ID NO: 4942882 - DNA, 25 bp, Homo sapien
atcttgttgttcccacagtgaggtc

SEQ ID NO: 4942883 - DNA, 25 bp, Homo sapien
gatcttgttgttcccacagtgaggt

SEQ ID NO: 4942884 - DNA, 25 bp, Homo sapien
tgatcttgttgttcccacagtgagg

SEQ ID NO: 4942885 - DNA, 25 bp, Homo sapien
tcttgttgttcccacagtgaggtcc

SEQ ID NO: 4942886 - DNA, 25 bp, Homo sapien
cttgatctaatgtgaatagactgag

SEQ ID NO: 4942887 - DNA, 25 bp, Homo sapien
aatgtgaatagactgagtgggaacc

SEQ ID NO: 4942888 - DNA, 25 bp, Homo sapien
gtctagatttgtcttcgtctctgag

SEQ ID NO: 4942889 - DNA, 25 bp, Homo sapien
ggtctgtctagatttgtcttcgtct

SEQ ID NO: 4942890 - DNA, 25 bp, Homo sapien
ctggccgagggaagagcccctgact

SEQ ID NO: 4942891 - DNA, 25 bp, Homo sapien
gccgagggaagagcccctgactcag

SEQ ID NO: 4942892 - DNA, 25 bp, Homo sapien
gcctttcagcctggccgagggaaga

SEQ ID NO: 4942893 - DNA, 25 bp, Homo sapien
ttcagcctggccgagggaagagccc

SEQ ID NO: 4942894 - DNA, 25 bp, Homo sapien
agaggcaaatctcactccagctcgg

SEQ ID NO: 4942895 - DNA, 25 bp, Homo sapien
gaaggcagctccgtagagaggcaaa

SEQ ID NO: 4942896 - DNA, 25 bp, Homo sapien
ctacacggacgtggatgctctcaag

SEQ ID NO: 4942897 - DNA, 25 bp, Homo sapien
gctcgggcaatactcaactacacgg

SEQ ID NO: 4942898 - DNA, 25 bp, Homo sapien
tctgctccatcacgtgtatggggca

SEQ ID NO: 4942899 - DNA, 25 bp, Homo sapien
cagagagtatgcaagcacgaccacg

SEQ ID NO: 4942900 - DNA, 25 bp, Homo sapien
ggttcacacagcacgttttctgctc

SEQ ID NO: 4942901 - DNA, 25 bp, Homo sapien
atgcaagcacgaccacgtcaacagg

SEQ ID NO: 4942902 - DNA, 25 bp, Homo sapien
cggccggcacacgtgggttctctgt

SEQ ID NO: 4942903 - DNA, 25 bp, Homo sapien
gccggcgcacgcgggttctctgtgg

SEQ ID NO: 4942904 - DNA, 25 bp, Homo sapien
ttctctgtggccagcaggcggcgct

SEQ ID NO: 4942905 - DNA, 25 bp, Homo sapien
agatgcccaggcctggcggccggca

SEQ ID NO: 4942906 - DNA, 25 bp, Homo sapien
aagcgtgcccccgattttgcatgcc

SEQ ID NO: 4942907 - DNA, 25 bp, Homo sapien
aacaccaagcgtgcccccgattttg

SEQ ID NO: 4942908 - DNA, 25 bp, Homo sapien
tttgcatgccccagccaattcagag

SEQ ID NO: 4942909 - DNA, 25 bp, Homo sapien
agagtcaagatccacgctcagctcc

SEQ ID NO: 4942910 - DNA, 25 bp, Homo sapien
catccgagttgctctgttggaggaa

SEQ ID NO: 4942911 - DNA, 25 bp, Homo sapien
cataagtgcgctccggtccatgcac

SEQ ID NO: 4942912 - DNA, 25 bp, Homo sapien
ggcagtcttctatggaaaggccact

SEQ ID NO: 4942913 - DNA, 25 bp, Homo sapien
tgtctgaaaggaggactaccggccc

SEQ ID NO: 4942914 - DNA, 25 bp, Homo sapien
gcagacctagtgcatggctccacac

SEQ ID NO: 4942915 - DNA, 25 bp, Homo sapien
cagacctagtgcatggctccacact

SEQ ID NO: 4942916 - DNA, 25 bp, Homo sapien
agatcttcttgtaaatcactagctg

SEQ ID NO: 4942917 - DNA, 25 bp, Homo sapien
ttatgagatcttcttgtaaatcact

SEQ ID NO: 4942918 - DNA, 25 bp, Homo sapien
atgagatcttcttgtaaatcactag

SEQ ID NO: 4942919 - DNA, 25 bp, Homo sapien
tgagatcttcttgtaaatcactagc

SEQ ID NO: 4942920 - DNA, 25 bp, Homo sapien
aagctgtccaacacattagggccac

SEQ ID NO: 4942921 - DNA, 25 bp, Homo sapien
gtaatgcttgccacatagagcacag

SEQ ID NO: 4942922 - DNA, 25 bp, Homo sapien
tccatctgtgaattagggtgtggcc

SEQ ID NO: 4942923 - DNA, 25 bp, Homo sapien
taggtgtcggtacaggctagtctga

SEQ ID NO: 4942924 - DNA, 25 bp, Homo sapien
gaatgagtgagtcccagaaacaaaa

SEQ ID NO: 4942925 - DNA, 25 bp, Homo sapien
gagctggatctcccatgaatgagtg

SEQ ID NO: 4942926 - DNA, 25 bp, Homo sapien
cccatgaatgagtgagtcccagaaa

SEQ ID NO: 4942927 - DNA, 25 bp, Homo sapien
tggatctcccatgaatgagtgagtc

SEQ ID NO: 4942928 - DNA, 25 bp, Homo sapien
gccaactgggctgtggctaaaatta

SEQ ID NO: 4942929 - DNA, 25 bp, Homo sapien
agccaactgggctgtggctaaaatt

SEQ ID NO: 4942930 - DNA, 25 bp, Homo sapien
ccagccaactgggctgtggctaaaa

SEQ ID NO: 4942931 - DNA, 25 bp, Homo sapien
cagccaactgggctgtggctaaaat

SEQ ID NO: 4942932 - DNA, 25 bp, Homo sapien
gaaaatggggaggaaattgtgatta

SEQ ID NO: 4942933 - DNA, 25 bp, Homo sapien
gcaaagaggtttaaagtaacatcaa

SEQ ID NO: 4942934 - DNA, 25 bp, Homo sapien
gaagcaggtgttgttagagccacat

SEQ ID NO: 4942935 - DNA, 25 bp, Homo sapien
ggtgaattccagagcaacattaaat

SEQ ID NO: 4942936 - DNA, 25 bp, Homo sapien
tattttatgactaaaggtgaattcc

SEQ ID NO: 4942937 - DNA, 25 bp, Homo sapien
cctggaatatgcagtaagggctgaa

SEQ ID NO: 4942938 - DNA, 25 bp, Homo sapien
cactatctggtatgtcacgtaggta

SEQ ID NO: 4942939 - DNA, 25 bp, Homo sapien
tcaacactatcatgtaccagtgggc

SEQ ID NO: 4942940 - DNA, 25 bp, Homo sapien
tatggtctgagattctaatccacgg

SEQ ID NO: 4942941 - DNA, 25 bp, Homo sapien
gtccatttaagcatgttacatagcg

SEQ ID NO: 4942942 - DNA, 25 bp, Homo sapien
catagcgttgtttgttcttttcatg

SEQ ID NO: 4942943 - DNA, 25 bp, Homo sapien
tcatgatattctttacagtagtctc

SEQ ID NO: 4942944 - DNA, 25 bp, Homo sapien
tacagtagtctcctaaatgttccct

SEQ ID NO: 4942945 - DNA, 25 bp, Homo sapien
ttcaggttctgctctacttaaaagt

SEQ ID NO: 4942946 - DNA, 25 bp, Homo sapien
ggcgagcaagtggttagaaaatcat

SEQ ID NO: 4942947 - DNA, 25 bp, Homo sapien
caggttctgctctacttaaaagttt

SEQ ID NO: 4942948 - DNA, 25 bp, Homo sapien
gttttccttgttggcgagcaagtgg

SEQ ID NO: 4942949 - DNA, 25 bp, Homo sapien
tatttgtgcacattgcttatactgg

SEQ ID NO: 4942950 - DNA, 25 bp, Homo sapien
tcctctcactctatactatctctgt

SEQ ID NO: 4942951 - DNA, 25 bp, Homo sapien
cactctatactatctctgttagcta

SEQ ID NO: 4942952 - DNA, 25 bp, Homo sapien
tgcacattgcttatactgggcatta

SEQ ID NO: 4942953 - DNA, 25 bp, Homo sapien
tcctgcctagaaaggatcgtccctc

SEQ ID NO: 4942954 - DNA, 25 bp, Homo sapien
caatataagttcctgcagaatgcag

SEQ ID NO: 4942955 - DNA, 25 bp, Homo sapien
ccatattgaactgtaagtctcctga

SEQ ID NO: 4942956 - DNA, 25 bp, Homo sapien
gactttgtcgcatcacacctcagag

SEQ ID NO: 4942957 - DNA, 25 bp, Homo sapien
tctaaatacctcttaggtcagaaaa

SEQ ID NO: 4942958 - DNA, 25 bp, Homo sapien
aagtcaaaagctagagtatagagaa

SEQ ID NO: 4942959 - DNA, 25 bp, Homo sapien
aataaacagattatatggaggattt

SEQ ID NO: 4942960 - DNA, 25 bp, Homo sapien
agaaacgccctaaatttctaatctg

SEQ ID NO: 4942961 - DNA, 25 bp, Homo sapien
ttaaaatgttataactctaggatgt

SEQ ID NO: 4942962 - DNA, 25 bp, Homo sapien
attaaaatgttataactctaggatg

SEQ ID NO: 4942963 - DNA, 25 bp, Homo sapien
aaaagagtagagctatatatatagc

SEQ ID NO: 4942964 - DNA, 25 bp, Homo sapien
gagtagagctatatatatagcagta

SEQ ID NO: 4942965 - DNA, 25 bp, Homo sapien
tctttgtatcggtgctcagctgagt

SEQ ID NO: 4942966 - DNA, 25 bp, Homo sapien
ttgaatcattttaagatgctcgaac

SEQ ID NO: 4942967 - DNA, 25 bp, Homo sapien
tgtctttctttgtatcggtgctcag

SEQ ID NO: 4942968 - DNA, 25 bp, Homo sapien
tctttctttgtatcggtgctcagct

SEQ ID NO: 4942969 - DNA, 25 bp, Homo sapien
gaacacttgcggtgtttgaagtgac

SEQ ID NO: 4942970 - DNA, 25 bp, Homo sapien
tttaaagaacacttgcggtgtttga

SEQ ID NO: 4942971 - DNA, 25 bp, Homo sapien
taaagaacacttgcggtgtttgaag

SEQ ID NO: 4942972 - DNA, 25 bp, Homo sapien
cttgcggtgtttgaagtgacaaagg

SEQ ID NO: 4942973 - DNA, 25 bp, Homo sapien
gaaaacagagaagttacacttgtgt

SEQ ID NO: 4942974 - DNA, 25 bp, Homo sapien
aaacagagaagttacacttgtgtaa

SEQ ID NO: 4942975 - DNA, 25 bp, Homo sapien
aacagagaagttacacttgtgtaag

SEQ ID NO: 4942976 - DNA, 25 bp, Homo sapien
catcccatctaagaattccgaaaac

SEQ ID NO: 4942977 - DNA, 25 bp, Homo sapien
atcccatctaagaattccgaaaaca

SEQ ID NO: 4942978 - DNA, 25 bp, Homo sapien
gctgcgttggaatctcaggcttctt

SEQ ID NO: 4942979 - DNA, 25 bp, Homo sapien
caccttagggaatgccttttgcagg

SEQ ID NO: 4942980 - DNA, 25 bp, Homo sapien
gctccgtcttctgtgccaccttagg

SEQ ID NO: 4942981 - DNA, 25 bp, Homo sapien
tgagtgagcactctctgaagctgcg

SEQ ID NO: 4942982 - DNA, 25 bp, Homo sapien
cactgattctgatgtcaagggcagg

SEQ ID NO: 4942983 - DNA, 25 bp, Homo sapien
tcttaactccggatagcactgcaaa

SEQ ID NO: 4942984 - DNA, 25 bp, Homo sapien
tataaaggactcagaatcagggaag

SEQ ID NO: 4942985 - DNA, 25 bp, Homo sapien
gagtgctctccatgctctcaatgtg

SEQ ID NO: 4942986 - DNA, 25 bp, Homo sapien
taacatccacgaagaacacaagcat

SEQ ID NO: 4942987 - DNA, 25 bp, Homo sapien
aacatccacgaagaacacaagcatg

SEQ ID NO: 4942988 - DNA, 25 bp, Homo sapien
catccacgaagaacacaagcatgtt

SEQ ID NO: 4942989 - DNA, 25 bp, Homo sapien
ttaacatccacgaagaacacaagca

SEQ ID NO: 4942990 - DNA, 25 bp, Homo sapien
ctgaaggtgagtgacatgcggatct

SEQ ID NO: 4942991 - DNA, 25 bp, Homo sapien
gcctgaaggtgagtgacatgcggat

SEQ ID NO: 4942992 - DNA, 25 bp, Homo sapien
ggccgcctgaaggtgagtgacatgc

SEQ ID NO: 4942993 - DNA, 25 bp, Homo sapien
acttgatagcatagtggccaagctt

SEQ ID NO: 4942994 - DNA, 25 bp, Homo sapien
ggaggagcaggagcttccttcgctt

SEQ ID NO: 4942995 - DNA, 25 bp, Homo sapien
actttggcttcggctttaggaggag

SEQ ID NO: 4942996 - DNA, 25 bp, Homo sapien
taggaggagcaggagcttccttcgc

SEQ ID NO: 4942997 - DNA, 25 bp, Homo sapien
agccttcactttggcttcggcttta

SEQ ID NO: 4942998 - DNA, 25 bp, Homo sapien
gaaagtaaagctcgcctcactaaga

SEQ ID NO: 4942999 - DNA, 25 bp, Homo sapien
gcactagggtagacacatcaggtta

SEQ ID NO: 4943000 - DNA, 25 bp, Homo sapien
gattacagggttcacagccttcagg

SEQ ID NO: 4943001 - DNA, 25 bp, Homo sapien
aagccagcctgatacctagattaca

SEQ ID NO: 4943002 - DNA, 25 bp, Homo sapien
ggactgcggctgaaatttgatagta

SEQ ID NO: 4943003 - DNA, 25 bp, Homo sapien
ggtcatctcctgttcttgctgcact

SEQ ID NO: 4943004 - DNA, 25 bp, Homo sapien
aaaaatgatggttactacagagaga

SEQ ID NO: 4943005 - DNA, 25 bp, Homo sapien
cacacaaagccataaggactgcggc

SEQ ID NO: 4943006 - DNA, 25 bp, Homo sapien
attaagtcgcagatggtgggaacca

SEQ ID NO: 4943007 - DNA, 25 bp, Homo sapien
ttctgttactgtagtaacacacatg

SEQ ID NO: 4943008 - DNA, 25 bp, Homo sapien
actgtagtaacacacatgtgtaaac

SEQ ID NO: 4943009 - DNA, 25 bp, Homo sapien
tgttactgtagtaacacacatgtgt

SEQ ID NO: 4943010 - DNA, 25 bp, Homo sapien
gttactgtagtaacacacatgtgta

SEQ ID NO: 4943011 - DNA, 25 bp, Homo sapien
acccacctgctcaccgagataaatg

SEQ ID NO: 4943012 - DNA, 25 bp, Homo sapien
aggatgcatcatgggcgcacatcct

SEQ ID NO: 4943013 - DNA, 25 bp, Homo sapien
catggtgacccgtcctcgggtgggt

SEQ ID NO: 4943014 - DNA, 25 bp, Homo sapien
aagccatggtgacccgtcctcgggt

SEQ ID NO: 4943015 - DNA, 25 bp, Homo sapien
tgctccaaagccatggtgacccgtc

SEQ ID NO: 4943016 - DNA, 25 bp, Homo sapien
caaagccatggtgacccgtcctcgg

SEQ ID NO: 4943017 - DNA, 25 bp, Homo sapien
taaaaagggccaggtaagatggctc

SEQ ID NO: 4943018 - DNA, 25 bp, Homo sapien
ggactgcttgaccccatattgtgga

SEQ ID NO: 4943019 - DNA, 25 bp, Homo sapien
cttgaccccatattgtggaggttgc

SEQ ID NO: 4943020 - DNA, 25 bp, Homo sapien
ataaaaagggccaggtaagatggct

SEQ ID NO: 4943021 - DNA, 25 bp, Homo sapien
tcaaggcactgtcggaagctgagcg

SEQ ID NO: 4943022 - DNA, 25 bp, Homo sapien
taaaatgcaaaaccgtcagaggcct

SEQ ID NO: 4943023 - DNA, 25 bp, Homo sapien
aagacagcatggagtgttcggcgcc

SEQ ID NO: 4943024 - DNA, 25 bp, Homo sapien
attttactcaaccatggacgccgcc

SEQ ID NO: 4943025 - DNA, 25 bp, Homo sapien
ccatgccattgtgacaggagagaaa

SEQ ID NO: 4943026 - DNA, 25 bp, Homo sapien
catgccattgtgacaggagagaaac

SEQ ID NO: 4943027 - DNA, 25 bp, Homo sapien
gagaccatgccattgtgacaggaga

SEQ ID NO: 4943028 - DNA, 25 bp, Homo sapien
gaccatgccattgtgacaggagaga

SEQ ID NO: 4943029 - DNA, 25 bp, Homo sapien
tttcaaccggcggagacactggcag

SEQ ID NO: 4943030 - DNA, 25 bp, Homo sapien
actggcagggccagaaacgcgcgca

SEQ ID NO: 4943031 - DNA, 25 bp, Homo sapien
agaacccgacgcagacacgcgcttt

SEQ ID NO: 4943032 - DNA, 25 bp, Homo sapien
gaacgcactccaacagaacccgacg

SEQ ID NO: 4943033 - DNA, 25 bp, Homo sapien
gttttgtcatctcccgccttaagtg

SEQ ID NO: 4943034 - DNA, 25 bp, Homo sapien
gacccagtgaattcgaacttgtgaa

SEQ ID NO: 4943035 - DNA, 25 bp, Homo sapien
tagatatggcactttcactggaaaa

SEQ ID NO: 4943036 - DNA, 25 bp, Homo sapien
gatcatatgggaagggcttcacacc

SEQ ID NO: 4943037 - DNA, 25 bp, Homo sapien
tcttattatgtttctgcagtgaaac

SEQ ID NO: 4943038 - DNA, 25 bp, Homo sapien
attattttatagacatatgtgtaaa

SEQ ID NO: 4943039 - DNA, 25 bp, Homo sapien
tctatgaaactcatttttgatgtat

SEQ ID NO: 4943040 - DNA, 25 bp, Homo sapien
catttttgatgtatattagatgcta

SEQ ID NO: 4943041 - DNA, 25 bp, Homo sapien
ggaatggagggaggctcctgagggc

SEQ ID NO: 4943042 - DNA, 25 bp, Homo sapien
gacagaatcattcagtacaagtgta

SEQ ID NO: 4943043 - DNA, 25 bp, Homo sapien
cattcagtacaagtgtatccagagg

SEQ ID NO: 4943044 - DNA, 25 bp, Homo sapien
gaatcattcagtacaagtgtatcca

SEQ ID NO: 4943045 - DNA, 25 bp, Homo sapien
tacaccaaggacaaacatactacag

SEQ ID NO: 4943046 - DNA, 25 bp, Homo sapien
taggctgaccatatacaacgtgaga

SEQ ID NO: 4943047 - DNA, 25 bp, Homo sapien
gaatgccatctatgcggaaaagcct

SEQ ID NO: 4943048 - DNA, 25 bp, Homo sapien
tatgtaagaatcatcagctgtagcg

SEQ ID NO: 4943049 - DNA, 25 bp, Homo sapien
tacttaatgtatacaacttaataag

SEQ ID NO: 4943050 - DNA, 25 bp, Homo sapien
gataagcccaggaaaccatcaccac

SEQ ID NO: 4943051 - DNA, 25 bp, Homo sapien
aataagttttgagataaggataagc

SEQ ID NO: 4943052 - DNA, 25 bp, Homo sapien
tgacaaaagctgttacttaatgtat

SEQ ID NO: 4943053 - DNA, 25 bp, Homo sapien
tctgggaccttatgttcccttcatg

SEQ ID NO: 4943054 - DNA, 25 bp, Homo sapien
tttttcctccgcctagacaggccat

SEQ ID NO: 4943055 - DNA, 25 bp, Homo sapien
gcagaaaccccactattttgcacaa

SEQ ID NO: 4943056 - DNA, 25 bp, Homo sapien
cacttctcacaagggctatttatgg

SEQ ID NO: 4943057 - DNA, 25 bp, Homo sapien
caggccagcctgggcaacatagtgc

SEQ ID NO: 4943058 - DNA, 25 bp, Homo sapien
gaggatctcttgagcccaggagttc

SEQ ID NO: 4943059 - DNA, 25 bp, Homo sapien
ccaggacttcgggaggttgaggtgg

SEQ ID NO: 4943060 - DNA, 25 bp, Homo sapien
ctgggcaacatagtgcgaccatgtc

SEQ ID NO: 4943061 - DNA, 25 bp, Homo sapien
gctggataccagcatggcaaacata

SEQ ID NO: 4943062 - DNA, 25 bp, Homo sapien
gaggccagaagctggataccagcat

SEQ ID NO: 4943063 - DNA, 25 bp, Homo sapien
ggataccagcatggcaaacatactg

SEQ ID NO: 4943064 - DNA, 25 bp, Homo sapien
ccagaagctggataccagcatggca

SEQ ID NO: 4943065 - DNA, 25 bp, Homo sapien
aaaagggcgcatcccacacaagaag

SEQ ID NO: 4943066 - DNA, 25 bp, Homo sapien
gctttcttgtgtaacctgcctctgg

SEQ ID NO: 4943067 - DNA, 25 bp, Homo sapien
cagctcaggaatggctcatgggcct

SEQ ID NO: 4943068 - DNA, 25 bp, Homo sapien
tgtgtaatcacgatatgtctccagg

SEQ ID NO: 4943069 - DNA, 25 bp, Homo sapien
cggcgcggctgaagagttggtttag

SEQ ID NO: 4943070 - DNA, 25 bp, Homo sapien
gactccaggcgtccaccagagcggg

SEQ ID NO: 4943071 - DNA, 25 bp, Homo sapien
cagagcggggcttacggtccccgag

SEQ ID NO: 4943072 - DNA, 25 bp, Homo sapien
gggtgtggactctcgggaggcggcg

SEQ ID NO: 4943073 - DNA, 25 bp, Homo sapien
gcggaggtgggggcggccagggtca

SEQ ID NO: 4943074 - DNA, 25 bp, Homo sapien
gaggtgggggcggccagggtcagtg

SEQ ID NO: 4943075 - DNA, 25 bp, Homo sapien
ggtgggggcggccagggtcagtgtc

SEQ ID NO: 4943076 - DNA, 25 bp, Homo sapien
tgggggcggccagggtcagtgtccc

SEQ ID NO: 4943077 - DNA, 25 bp, Homo sapien
cagccagggtccgtgtccacctggg

SEQ ID NO: 4943078 - DNA, 25 bp, Homo sapien
ggtcagggggtcagccttcacctga

SEQ ID NO: 4943079 - DNA, 25 bp, Homo sapien
gggcagccagggtccgtgtccacct

SEQ ID NO: 4943080 - DNA, 25 bp, Homo sapien
cagggggtcagccttcacctgagga

SEQ ID NO: 4943081 - DNA, 25 bp, Homo sapien
tgcgcattggcggaaggggtagtcc

SEQ ID NO: 4943082 - DNA, 25 bp, Homo sapien
gggtcagtgcgcattggcggaaggg

SEQ ID NO: 4943083 - DNA, 25 bp, Homo sapien
gcggagggtgagtgcgcacctggga

SEQ ID NO: 4943084 - DNA, 25 bp, Homo sapien
gacgatctgggggtcagtgcgcatt

SEQ ID NO: 4943085 - DNA, 25 bp, Homo sapien
agtcgggggccagtgcgcacctggg

SEQ ID NO: 4943086 - DNA, 25 bp, Homo sapien
ggcagtctgggggtcagtgcgcacc

SEQ ID NO: 4943087 - DNA, 25 bp, Homo sapien
ggcagtcgggggccagtgcgcacct

SEQ ID NO: 4943088 - DNA, 25 bp, Homo sapien
gcagtctgggggtcagtgcgcacct

SEQ ID NO: 4943089 - DNA, 25 bp, Homo sapien
gaagtgagaagcctgccttgtgtca

SEQ ID NO: 4943090 - DNA, 25 bp, Homo sapien
cagcatgggttaggatacttttcaa

SEQ ID NO: 4943091 - DNA, 25 bp, Homo sapien
gcagggttctattgaagtggccacc

SEQ ID NO: 4943092 - DNA, 25 bp, Homo sapien
aattgattgtttctggcccctctga

SEQ ID NO: 4943093 - DNA, 25 bp, Homo sapien
gctacaatttcagcaggctcactgg

SEQ ID NO: 4943094 - DNA, 25 bp, Homo sapien
tgaacacaggacatcctgcacggag

SEQ ID NO: 4943095 - DNA, 25 bp, Homo sapien
tttttcagaagagcaaacgcaccgg

SEQ ID NO: 4943096 - DNA, 25 bp, Homo sapien
cactcacaggtgagactgagctgct

SEQ ID NO: 4943097 - DNA, 25 bp, Homo sapien
tcctcctggagcgtggactggcata

SEQ ID NO: 4943098 - DNA, 25 bp, Homo sapien
tacacctagagaaactgctttgaag

SEQ ID NO: 4943099 - DNA, 25 bp, Homo sapien
caatgaccaggttgtggacgaacgg

SEQ ID NO: 4943100 - DNA, 25 bp, Homo sapien
ttttttcagtggctatctcgggtca

SEQ ID NO: 4943101 - DNA, 25 bp, Homo sapien
agctgctcagctacaaggttaaggg

SEQ ID NO: 4943102 - DNA, 25 bp, Homo sapien
gcatcatccccaagacgtgtgaaga

SEQ ID NO: 4943103 - DNA, 25 bp, Homo sapien
tcactcccaggtttagtttaggcta

SEQ ID NO: 4943104 - DNA, 25 bp, Homo sapien
ggttatgagccaaggtgatcccctc

SEQ ID NO: 4943105 - DNA, 25 bp, Homo sapien
aggtgcttctcatctatcaactggg

SEQ ID NO: 4943106 - DNA, 25 bp, Homo sapien
gattaaatgcgctttctatgcagac

SEQ ID NO: 4943107 - DNA, 25 bp, Homo sapien
gcctgcttgagttcggttccttttc

SEQ ID NO: 4943108 - DNA, 25 bp, Homo sapien
tgagttcggttccttttcaaagtca

SEQ ID NO: 4943109 - DNA, 25 bp, Homo sapien
acctggaacgcagctgatctcagca

SEQ ID NO: 4943110 - DNA, 25 bp, Homo sapien
tcaggggagcacaggttcccatctg

SEQ ID NO: 4943111 - DNA, 25 bp, Homo sapien
gctcactgaggcgagttactttctc

SEQ ID NO: 4943112 - DNA, 25 bp, Homo sapien
tccaggtcccagtccgaacctggaa

SEQ ID NO: 4943113 - DNA, 25 bp, Homo sapien
cttctgggtagggttgagtcaggaa

SEQ ID NO: 4943114 - DNA, 25 bp, Homo sapien
cagcctctttggtgagggttttggt

SEQ ID NO: 4943115 - DNA, 25 bp, Homo sapien
gaagacagcctctttggtgagggtt

SEQ ID NO: 4943116 - DNA, 25 bp, Homo sapien
atcttctgggtagggttgagtcagg

SEQ ID NO: 4943117 - DNA, 25 bp, Homo sapien
tttgtggggccatcagaagcatact

SEQ ID NO: 4943118 - DNA, 25 bp, Homo sapien
gagctttgagccgtactgtttgtct

SEQ ID NO: 4943119 - DNA, 25 bp, Homo sapien
catcttgaggtgcttctgtttgtgg

SEQ ID NO: 4943120 - DNA, 25 bp, Homo sapien
ttcccagctttcttcgacacagagc

SEQ ID NO: 4943121 - DNA, 25 bp, Homo sapien
gatgtctaaagtccattgtgccgct

SEQ ID NO: 4943122 - DNA, 25 bp, Homo sapien
cagggaactgtctaaggccacgacc

SEQ ID NO: 4943123 - DNA, 25 bp, Homo sapien
gccagcgagtagagaagtccggctt

SEQ ID NO: 4943124 - DNA, 25 bp, Homo sapien
cttggagagtacaaaacaggcgcga

SEQ ID NO: 4943125 - DNA, 25 bp, Homo sapien
tatggaactgaaacgacatgagcag

SEQ ID NO: 4943126 - DNA, 25 bp, Homo sapien
cctctgttcttatccacatggctta

SEQ ID NO: 4943127 - DNA, 25 bp, Homo sapien
actgaaacgacatgagcagcatttc

SEQ ID NO: 4943128 - DNA, 25 bp, Homo sapien
cctgtggtctatggaactgaaacga

SEQ ID NO: 4943129 - DNA, 25 bp, Homo sapien
gttatacacctatctcccaattcta

SEQ ID NO: 4943130 - DNA, 25 bp, Homo sapien
tagtttttatacaccgcctgtcgca

SEQ ID NO: 4943131 - DNA, 25 bp, Homo sapien
cagcacaaatcaccagtgagacaaa

SEQ ID NO: 4943132 - DNA, 25 bp, Homo sapien
cctgtcgcaagccatgtacctggag

SEQ ID NO: 4943133 - DNA, 25 bp, Homo sapien
tggatgtcacccggaactgccccat

SEQ ID NO: 4943134 - DNA, 25 bp, Homo sapien
ctggatgtcacccggaactgcccca

SEQ ID NO: 4943135 - DNA, 25 bp, Homo sapien
cacattctgtagccaaagcctaatg

SEQ ID NO: 4943136 - DNA, 25 bp, Homo sapien
acattctgtagccaaagcctaatgg

SEQ ID NO: 4943137 - DNA, 25 bp, Homo sapien
cattctgtagccaaagcctaatggg

SEQ ID NO: 4943138 - DNA, 25 bp, Homo sapien
tcatcagtttaccacacggcggtca

SEQ ID NO: 4943139 - DNA, 25 bp, Homo sapien
ggttcatcagtttaccacacggcgg

SEQ ID NO: 4943140 - DNA, 25 bp, Homo sapien
ttcatcagtttaccacacggcggtc

SEQ ID NO: 4943141 - DNA, 25 bp, Homo sapien
catcagtttaccacacggcggtcat

SEQ ID NO: 4943142 - DNA, 25 bp, Homo sapien
ttgatcagaagccttgacagcaagc

SEQ ID NO: 4943143 - DNA, 25 bp, Homo sapien
catgttgatcagaagccttgacagc

SEQ ID NO: 4943144 - DNA, 25 bp, Homo sapien
ctcatgttgatcagaagccttgaca

SEQ ID NO: 4943145 - DNA, 25 bp, Homo sapien
gatcagaagccttgacagcaagcct

SEQ ID NO: 4943146 - DNA, 25 bp, Homo sapien
cttgtgacttttaacctctaagtag

SEQ ID NO: 4943147 - DNA, 25 bp, Homo sapien
gtagttatcctaaatccagtcctta

SEQ ID NO: 4943148 - DNA, 25 bp, Homo sapien
aatccagtccttaaacaggatcata

SEQ ID NO: 4943149 - DNA, 25 bp, Homo sapien
gcctcatccatacacccttgtgact

SEQ ID NO: 4943150 - DNA, 25 bp, Homo sapien
gatgcttccccgtgctccatgtgag

SEQ ID NO: 4943151 - DNA, 25 bp, Homo sapien
ggatgcttccccgtgctccatgtga

SEQ ID NO: 4943152 - DNA, 25 bp, Homo sapien
gacggcatcatgacctccagttcct

SEQ ID NO: 4943153 - DNA, 25 bp, Homo sapien
tgctgacggcatcatgacctccagt

SEQ ID NO: 4943154 - DNA, 25 bp, Homo sapien
caccatttaaagcacaagtgctgac

SEQ ID NO: 4943155 - DNA, 25 bp, Homo sapien
aagcacaagtgctgacggcatcatg

SEQ ID NO: 4943156 - DNA, 25 bp, Homo sapien
ggtgggctgggtgcaaccatctcat

SEQ ID NO: 4943157 - DNA, 25 bp, Homo sapien
ctgtgaggattatcatgggtgggct

SEQ ID NO: 4943158 - DNA, 25 bp, Homo sapien
gtttctcgccatccatacatcatgg

SEQ ID NO: 4943159 - DNA, 25 bp, Homo sapien
gcaaccatctcatgcaatggtaaca

SEQ ID NO: 4943160 - DNA, 25 bp, Homo sapien
taactcaaggtccaggtcaagcacg

SEQ ID NO: 4943161 - DNA, 25 bp, Homo sapien
gtccaggtcacgcagggcacttgca

SEQ ID NO: 4943162 - DNA, 25 bp, Homo sapien
aggtcacgcacggtccaggtaactc

SEQ ID NO: 4943163 - DNA, 25 bp, Homo sapien
tgaaggcaaacacccaagtcatgtg

SEQ ID NO: 4943164 - DNA, 25 bp, Homo sapien
cccacaaccacttatcaacatggaa

SEQ ID NO: 4943165 - DNA, 25 bp, Homo sapien
cacttatcaacatggaatgcccaac

SEQ ID NO: 4943166 - DNA, 25 bp, Homo sapien
atcaacatggaatgcccaacactcg

SEQ ID NO: 4943167 - DNA, 25 bp, Homo sapien
agctggcatccccacaaccacttat

SEQ ID NO: 4943168 - DNA, 25 bp, Homo sapien
ccgcctcccagaccggattctgcac

SEQ ID NO: 4943169 - DNA, 25 bp, Homo sapien
tctagggaccactccttggggatgt

SEQ ID NO: 4943170 - DNA, 25 bp, Homo sapien
ccagaccggattctgcacggccttg

SEQ ID NO: 4943171 - DNA, 25 bp, Homo sapien
ggtccttccagacacgcactccgcc

SEQ ID NO: 4943172 - DNA, 25 bp, Homo sapien
aagactggccggtatgcaactccca

SEQ ID NO: 4943173 - DNA, 25 bp, Homo sapien
aataacgttgcctttcagcggtggt

SEQ ID NO: 4943174 - DNA, 25 bp, Homo sapien
tttttggaccatgactgactgagag

SEQ ID NO: 4943175 - DNA, 25 bp, Homo sapien
taagagtgacttgccgacctgaaca

SEQ ID NO: 4943176 - DNA, 25 bp, Homo sapien
aattagaagacaatgacgaggtgca

SEQ ID NO: 4943177 - DNA, 25 bp, Homo sapien
tccaatagacagaatcatagagtct

SEQ ID NO: 4943178 - DNA, 25 bp, Homo sapien
gtaggtcacgcagtccagggatgca

SEQ ID NO: 4943179 - DNA, 25 bp, Homo sapien
tgtgctgagagccttgtaggtcacg

SEQ ID NO: 4943180 - DNA, 25 bp, Homo sapien
tgagagcagaggcgaacggagtccg

SEQ ID NO: 4943181 - DNA, 25 bp, Homo sapien
ctgagagcagaggcgaacggagtcc

SEQ ID NO: 4943182 - DNA, 25 bp, Homo sapien
agctgattcccgcacagacctcggg

SEQ ID NO: 4943183 - DNA, 25 bp, Homo sapien
cagattatgatccagaggccaagcc

SEQ ID NO: 4943184 - DNA, 25 bp, Homo sapien
tttgtgtataaagttctcatggaac

SEQ ID NO: 4943185 - DNA, 25 bp, Homo sapien
tgtggtctacggctgcccctggaca

SEQ ID NO: 4943186 - DNA, 25 bp, Homo sapien
cgtccatagatgagagctggccgag

SEQ ID NO: 4943187 - DNA, 25 bp, Homo sapien
taaaacctgcggaactcactccatg

SEQ ID NO: 4943188 - DNA, 25 bp, Homo sapien
gagtatcatcagagaccaagcttgg

SEQ ID NO: 4943189 - DNA, 25 bp, Homo sapien
gcttctcggagctggaaagaatcca

SEQ ID NO: 4943190 - DNA, 25 bp, Homo sapien
tgccacaattgctgcgtgtgctcat

SEQ ID NO: 4943191 - DNA, 25 bp, Homo sapien
cacaattgctgcgtgtgctcatggc

SEQ ID NO: 4943192 - DNA, 25 bp, Homo sapien
attgctgcgtgtgctcatggcttgg

SEQ ID NO: 4943193 - DNA, 25 bp, Homo sapien
ccaaccacagcggaccaagggcagg

SEQ ID NO: 4943194 - DNA, 25 bp, Homo sapien
gcctcaagggtccaggatgctgctt

SEQ ID NO: 4943195 - DNA, 25 bp, Homo sapien
aatttcgcaggtgcgacggccgtcc

SEQ ID NO: 4943196 - DNA, 25 bp, Homo sapien
cagtcattcctggtgttcaattcct

SEQ ID NO: 4943197 - DNA, 25 bp, Homo sapien
gatgctgcttccttaaaacgagtga

SEQ ID NO: 4943198 - DNA, 25 bp, Homo sapien
actgccatcatgtaagccgctccga

SEQ ID NO: 4943199 - DNA, 25 bp, Homo sapien
tgggacccatgaagctgcacacttt

SEQ ID NO: 4943200 - DNA, 25 bp, Homo sapien
gaggaaactgcggtgtcactgcccg

SEQ ID NO: 4943201 - DNA, 25 bp, Homo sapien
tcaacggcatcgcttctcggacatg

SEQ ID NO: 4943202 - DNA, 25 bp, Homo sapien
taaaggatgcatagtgcgctctgca

SEQ ID NO: 4943203 - DNA, 25 bp, Homo sapien
tggcaaggtcatccagagagcagtg

SEQ ID NO: 4943204 - DNA, 25 bp, Homo sapien
actcatgctcctgggatgccggaca

SEQ ID NO: 4943205 - DNA, 25 bp, Homo sapien
tgagcctgcagagtctaaaggatgc

SEQ ID NO: 4943206 - DNA, 25 bp, Homo sapien
tcctgccaaagcaacgcccttcctt

SEQ ID NO: 4943207 - DNA, 25 bp, Homo sapien
atctccccacgtgtcctgccaaagc

SEQ ID NO: 4943208 - DNA, 25 bp, Homo sapien
ctggaagctgatagcagctacatac

SEQ ID NO: 4943209 - DNA, 25 bp, Homo sapien
gcccttccttccagcgtttctggaa

SEQ ID NO: 4943210 - DNA, 25 bp, Homo sapien
ccagcaggaacacgcgttgcaggaa

SEQ ID NO: 4943211 - DNA, 25 bp, Homo sapien
catgtttacagtctcccagatggga

SEQ ID NO: 4943212 - DNA, 25 bp, Homo sapien
agcatgatccgcactgtagctcgga

SEQ ID NO: 4943213 - DNA, 25 bp, Homo sapien
gactgggaatcgtctcactgtccga

SEQ ID NO: 4943214 - DNA, 25 bp, Homo sapien
tggagaaagcgtggcactgcggcag

SEQ ID NO: 4943215 - DNA, 25 bp, Homo sapien
gccgaggctggtcgccgactctcgt

SEQ ID NO: 4943216 - DNA, 25 bp, Homo sapien
ggttgctagaaagcctctcccaggc

SEQ ID NO: 4943217 - DNA, 25 bp, Homo sapien
cgactctcgtgtgggcacccgtgca

SEQ ID NO: 4943218 - DNA, 25 bp, Homo sapien
ctctccccgtcagcagcggcttctg

SEQ ID NO: 4943219 - DNA, 25 bp, Homo sapien
cagactctccccgtcagcagcggct

SEQ ID NO: 4943220 - DNA, 25 bp, Homo sapien
actctccccgtcagcagcggcttct

SEQ ID NO: 4943221 - DNA, 25 bp, Homo sapien
agactctccccgtcagcagcggctt

SEQ ID NO: 4943222 - DNA, 25 bp, Homo sapien
tcttgcgaatgttcactgagagaca

SEQ ID NO: 4943223 - DNA, 25 bp, Homo sapien
gaactaaacaagcaacatggtggaa

SEQ ID NO: 4943224 - DNA, 25 bp, Homo sapien
caagtgcaaacgtgtccctatcagc

SEQ ID NO: 4943225 - DNA, 25 bp, Homo sapien
ccctatcagcactggttgaactaaa

SEQ ID NO: 4943226 - DNA, 25 bp, Homo sapien
ggtggtttatagagcacagatcccc

SEQ ID NO: 4943227 - DNA, 25 bp, Homo sapien
catccaaaggtggtttatagagcac

SEQ ID NO: 4943228 - DNA, 25 bp, Homo sapien
tgaacttggatccatccaaaggtgg

SEQ ID NO: 4943229 - DNA, 25 bp, Homo sapien
tatagagcacagatcccctggattc

SEQ ID NO: 4943230 - DNA, 25 bp, Homo sapien
aaagatcgtcgcattctctgcttct

SEQ ID NO: 4943231 - DNA, 25 bp, Homo sapien
cacggaaaagatcgtcgcattctct

SEQ ID NO: 4943232 - DNA, 25 bp, Homo sapien
ctcccacggaaaagatcgtcgcatt

SEQ ID NO: 4943233 - DNA, 25 bp, Homo sapien
ggaaaagatcgtcgcattctctgct

SEQ ID NO: 4943234 - DNA, 25 bp, Homo sapien
tattgcaaacaatttaaaacctatc

SEQ ID NO: 4943235 - DNA, 25 bp, Homo sapien
ttctgagacagagtcgctttgtcgc

SEQ ID NO: 4943236 - DNA, 25 bp, Homo sapien
atttcaggcacctgccaccacgcct

SEQ ID NO: 4943237 - DNA, 25 bp, Homo sapien
ggatttcaggcacctgccaccacgc

SEQ ID NO: 4943238 - DNA, 25 bp, Homo sapien
tgggatttcaggcacctgccaccac

SEQ ID NO: 4943239 - DNA, 25 bp, Homo sapien
gagtttgactactcatgtaagtgcc

SEQ ID NO: 4943240 - DNA, 25 bp, Homo sapien
cacacgttgtttgtctgttcgtcta

SEQ ID NO: 4943241 - DNA, 25 bp, Homo sapien
catccatgctgaatatgtgtgagaa

SEQ ID NO: 4943242 - DNA, 25 bp, Homo sapien
gaaactcataccaccttaaacactg

SEQ ID NO: 4943243 - DNA, 25 bp, Homo sapien
tagaagtcctaacatgagtggcgag

SEQ ID NO: 4943244 - DNA, 25 bp, Homo sapien
tactgcgttccccatgcataggtgg

SEQ ID NO: 4943245 - DNA, 25 bp, Homo sapien
taggcagagcacacttacgtggcaa

SEQ ID NO: 4943246 - DNA, 25 bp, Homo sapien
ttgtagatgccggactcagtcagcc

SEQ ID NO: 4943247 - DNA, 25 bp, Homo sapien
tgggacacatggatcagcaggcgta

SEQ ID NO: 4943248 - DNA, 25 bp, Homo sapien
catgtgctcgctgggcccatcatga

SEQ ID NO: 4943249 - DNA, 25 bp, Homo sapien
agtgagagcaggcacacaggtatgt

SEQ ID NO: 4943250 - DNA, 25 bp, Homo sapien
agatatgcacacagggctgttgaca

SEQ ID NO: 4943251 - DNA, 25 bp, Homo sapien
caaaaaacgtgtgtacagacagggc

SEQ ID NO: 4943252 - DNA, 25 bp, Homo sapien
tagaaagccacgacacatcagaagg

SEQ ID NO: 4943253 - DNA, 25 bp, Homo sapien
cactagtgcagtccatgaaagcttc

SEQ ID NO: 4943254 - DNA, 25 bp, Homo sapien
ggaaggtgcttccatagcgaggaca

SEQ ID NO: 4943255 - DNA, 25 bp, Homo sapien
gccatcactacagtcgatgttagga

SEQ ID NO: 4943256 - DNA, 25 bp, Homo sapien
ggatattggcatctgtattagtcca

SEQ ID NO: 4943257 - DNA, 25 bp, Homo sapien
taagataccctccactttatgcagc

SEQ ID NO: 4943258 - DNA, 25 bp, Homo sapien
tattagtccattctccgctgccaat

SEQ ID NO: 4943259 - DNA, 25 bp, Homo sapien
taattccttctaggactgacacctg

SEQ ID NO: 4943260 - DNA, 25 bp, Homo sapien
tccccagttatagggcacagaaggc

SEQ ID NO: 4943261 - DNA, 25 bp, Homo sapien
attatggatatacaggagagaaccc

SEQ ID NO: 4943262 - DNA, 25 bp, Homo sapien
gactattatccctcaagagcaggga

SEQ ID NO: 4943263 - DNA, 25 bp, Homo sapien
ggccatggacacagctagccgcatt

SEQ ID NO: 4943264 - DNA, 25 bp, Homo sapien
cagttctcagctgtgctatcaaatc

SEQ ID NO: 4943265 - DNA, 25 bp, Homo sapien
taaattgagcagtacttgcttggaa

SEQ ID NO: 4943266 - DNA, 25 bp, Homo sapien
gttctgctgggctggcatatttcca

SEQ ID NO: 4943267 - DNA, 25 bp, Homo sapien
taaatgccactgagccggtaggagc

SEQ ID NO: 4943268 - DNA, 25 bp, Homo sapien
tgtgtgcacgtgatggacaccactc

SEQ ID NO: 4943269 - DNA, 25 bp, Homo sapien
gaggcagaccctcaactttggaaag

SEQ ID NO: 4943270 - DNA, 25 bp, Homo sapien
gaaggacctgcatacatgactaacc

SEQ ID NO: 4943271 - DNA, 25 bp, Homo sapien
ctctaccacgtatccacaagttcaa

SEQ ID NO: 4943272 - DNA, 25 bp, Homo sapien
caactttacaagatgaacttttgtc

SEQ ID NO: 4943273 - DNA, 25 bp, Homo sapien
taatcatttgagaaacttgcacaga

SEQ ID NO: 4943274 - DNA, 25 bp, Homo sapien
tgtagggacctcgtatgagtggaac

SEQ ID NO: 4943275 - DNA, 25 bp, Homo sapien
atcatttgacccatatgtgcaaggg

SEQ ID NO: 4943276 - DNA, 25 bp, Homo sapien
tgtttcaatacaacaccattttgat

SEQ ID NO: 4943277 - DNA, 25 bp, Homo sapien
tgaaataaggaagtgagagacctcc

SEQ ID NO: 4943278 - DNA, 25 bp, Homo sapien
ggatgtccacttgtctagcaccatt

SEQ ID NO: 4943279 - DNA, 25 bp, Homo sapien
gtcactcttagctatcaacaaactc

SEQ ID NO: 4943280 - DNA, 25 bp, Homo sapien
aatttccctcctaccactgctttga

SEQ ID NO: 4943281 - DNA, 25 bp, Homo sapien
gatgtaaatttagggttgacttgag

SEQ ID NO: 4943282 - DNA, 25 bp, Homo sapien
tgtgagttccccattaatctgctgg

SEQ ID NO: 4943283 - DNA, 25 bp, Homo sapien
tatgagaattaaccactatctgagg

SEQ ID NO: 4943284 - DNA, 25 bp, Homo sapien
cagtagctgagtttatggatgtcca

SEQ ID NO: 4943285 - DNA, 25 bp, Homo sapien
tgcttcttgtgtcagagccactaag

SEQ ID NO: 4943286 - DNA, 25 bp, Homo sapien
gccaaattgaaatacacctggttaa

SEQ ID NO: 4943287 - DNA, 25 bp, Homo sapien
caagatgaaacggatgtccgattct

SEQ ID NO: 4943288 - DNA, 25 bp, Homo sapien
ctccaagatgaaacggatgtccgat

SEQ ID NO: 4943289 - DNA, 25 bp, Homo sapien
tccaagatgaaacggatgtccgatt

SEQ ID NO: 4943290 - DNA, 25 bp, Homo sapien
ccaagatgaaacggatgtccgattc

SEQ ID NO: 4943291 - DNA, 25 bp, Homo sapien
aaccaggatttagaccgagaaattg

SEQ ID NO: 4943292 - DNA, 25 bp, Homo sapien
gactttatggcgtcaagggagaaac

SEQ ID NO: 4943293 - DNA, 25 bp, Homo sapien
cagctttggccttaatggaaggcgg

SEQ ID NO: 4943294 - DNA, 25 bp, Homo sapien
tagaaatgtcactggctctacttcc

SEQ ID NO: 4943295 - DNA, 25 bp, Homo sapien
agtctgcagtctcccatcatctggt

SEQ ID NO: 4943296 - DNA, 25 bp, Homo sapien
ctcagtctgcagtctcccatcatct

SEQ ID NO: 4943297 - DNA, 25 bp, Homo sapien
tctgcagtctcccatcatctggtgt

SEQ ID NO: 4943298 - DNA, 25 bp, Homo sapien
ctgcagtctcccatcatctggtgtc

SEQ ID NO: 4943299 - DNA, 25 bp, Homo sapien
agctccaacgggaacgtgtccgcat

SEQ ID NO: 4943300 - DNA, 25 bp, Homo sapien
tgtccgcatcaccagatgacccgtg

SEQ ID NO: 4943301 - DNA, 25 bp, Homo sapien
tttgccttatcagaggccgccaaca

SEQ ID NO: 4943302 - DNA, 25 bp, Homo sapien
tgttcttgcggcaacacagcagcaa

SEQ ID NO: 4943303 - DNA, 25 bp, Homo sapien
gagtcaacatagcagagaagtaaaa

SEQ ID NO: 4943304 - DNA, 25 bp, Homo sapien
ggagtcaacatagcagagaagtaaa

SEQ ID NO: 4943305 - DNA, 25 bp, Homo sapien
aggagtcaacatagcagagaagtaa

SEQ ID NO: 4943306 - DNA, 25 bp, Homo sapien
aaatacagattgccaagaaaaactg

SEQ ID NO: 4943307 - DNA, 25 bp, Homo sapien
tacccacctgccgatgccatttaaa

SEQ ID NO: 4943308 - DNA, 25 bp, Homo sapien
aacagagccagaagcactgcaggca

SEQ ID NO: 4943309 - DNA, 25 bp, Homo sapien
tgcaggcatggagcagtataaaccc

SEQ ID NO: 4943310 - DNA, 25 bp, Homo sapien
gggtcaggtgctcccgcaacagagc

SEQ ID NO: 4943311 - DNA, 25 bp, Homo sapien
tgcaccccaaaaacgcagcctcaaa

SEQ ID NO: 4943312 - DNA, 25 bp, Homo sapien
aacgcagcctcaaaggcactgcagg

SEQ ID NO: 4943313 - DNA, 25 bp, Homo sapien
gggctccccgcaaagcatctgcacc

SEQ ID NO: 4943314 - DNA, 25 bp, Homo sapien
catgaggtcggcgagaaaggccagg

SEQ ID NO: 4943315 - DNA, 25 bp, Homo sapien
gcagatgccaataatcatgcaaacc

SEQ ID NO: 4943316 - DNA, 25 bp, Homo sapien
tgttgactgcattctaaaatgaggc

SEQ ID NO: 4943317 - DNA, 25 bp, Homo sapien
tagctctgagtgattaaagccatcg

SEQ ID NO: 4943318 - DNA, 25 bp, Homo sapien
taaataggaaaggtgccattagctc

SEQ ID NO: 4943319 - DNA, 25 bp, Homo sapien
tcaacattaaggaggaacccttctc

SEQ ID NO: 4943320 - DNA, 25 bp, Homo sapien
ggacaactctcttcacacaaggaag

SEQ ID NO: 4943321 - DNA, 25 bp, Homo sapien
cattctcccattaacttgtgaagat

SEQ ID NO: 4943322 - DNA, 25 bp, Homo sapien
agtagaaggagcacaggacaactct

SEQ ID NO: 4943323 - DNA, 25 bp, Homo sapien
gatgctctcaaaccggtcgtcgatt

SEQ ID NO: 4943324 - DNA, 25 bp, Homo sapien
tctgcaggacttgctgataagagcc

SEQ ID NO: 4943325 - DNA, 25 bp, Homo sapien
ttagcgttccaacagaggcacggca

SEQ ID NO: 4943326 - DNA, 25 bp, Homo sapien
gataagagccaaccttccagggacg

SEQ ID NO: 4943327 - DNA, 25 bp, Homo sapien
tccctgcacgtgttcaccaaggagt

SEQ ID NO: 4943328 - DNA, 25 bp, Homo sapien
ggaagattcatcttacctcctgact

SEQ ID NO: 4943329 - DNA, 25 bp, Homo sapien
caatcaaatgtacaatccctgcacg

SEQ ID NO: 4943330 - DNA, 25 bp, Homo sapien
gcatgacagctgcatttatacgtgc

SEQ ID NO: 4943331 - DNA, 25 bp, Homo sapien
tccgggctatctgtcaggtggcctt

SEQ ID NO: 4943332 - DNA, 25 bp, Homo sapien
tggcctttactctgccgtcggatgc

SEQ ID NO: 4943333 - DNA, 25 bp, Homo sapien
tcctccgggctatctgtcaggtggc

SEQ ID NO: 4943334 - DNA, 25 bp, Homo sapien
ctttactctgccgtcggatgctcac

SEQ ID NO: 4943335 - DNA, 25 bp, Homo sapien
gctggtgtacttggtcgagcccttg

SEQ ID NO: 4943336 - DNA, 25 bp, Homo sapien
tggtcgagcccttggcgtcatcctc

SEQ ID NO: 4943337 - DNA, 25 bp, Homo sapien
ccaggctggtgtacttggtcgagcc

SEQ ID NO: 4943338 - DNA, 25 bp, Homo sapien
tgtacttggtcgagcccttggcgtc

SEQ ID NO: 4943339 - DNA, 25 bp, Homo sapien
gccgatatgtcttcaagagcaagtt

SEQ ID NO: 4943340 - DNA, 25 bp, Homo sapien
catctggttttttagactgtatatt

SEQ ID NO: 4943341 - DNA, 25 bp, Homo sapien
gagcaagttttggaggctcccaacc

SEQ ID NO: 4943342 - DNA, 25 bp, Homo sapien
tcagggtcagccgatatgtcttcaa

SEQ ID NO: 4943343 - DNA, 25 bp, Homo sapien
tattatcacacaagagagaacctca

SEQ ID NO: 4943344 - DNA, 25 bp, Homo sapien
gaaagagttaggtgttggtgaccca

SEQ ID NO: 4943345 - DNA, 25 bp, Homo sapien
tccagggtctagattaagaaacaag

SEQ ID NO: 4943346 - DNA, 25 bp, Homo sapien
taacacagcaaggtaaggtcaagca

SEQ ID NO: 4943347 - DNA, 25 bp, Homo sapien
gggagatttacatctttccaggaga

SEQ ID NO: 4943348 - DNA, 25 bp, Homo sapien
aacagtgaagtcacttctttccaac

SEQ ID NO: 4943349 - DNA, 25 bp, Homo sapien
tctttccaacctcggaaacttgctc

SEQ ID NO: 4943350 - DNA, 25 bp, Homo sapien
tgctcatcatctttgttaaacagtg

SEQ ID NO: 4943351 - DNA, 25 bp, Homo sapien
acaactgtgccactacctttaagcg

SEQ ID NO: 4943352 - DNA, 25 bp, Homo sapien
caaaacacataggagactgaccttt

SEQ ID NO: 4943353 - DNA, 25 bp, Homo sapien
tccaaggtcccctggaacaactgtg

SEQ ID NO: 4943354 - DNA, 25 bp, Homo sapien
ctttaagcgtcagcatctccatgga

SEQ ID NO: 4943355 - DNA, 25 bp, Homo sapien
tgctgcacatcccatcagatgaccc

SEQ ID NO: 4943356 - DNA, 25 bp, Homo sapien
gcacatcccatcagatgaccctgga

SEQ ID NO: 4943357 - DNA, 25 bp, Homo sapien
gctgcacatcccatcagatgaccct

SEQ ID NO: 4943358 - DNA, 25 bp, Homo sapien
tgcacatcccatcagatgaccctgg

SEQ ID NO: 4943359 - DNA, 25 bp, Homo sapien
ggaaagtcctcacctgagcactctg

SEQ ID NO: 4943360 - DNA, 25 bp, Homo sapien
tgctcctgtagccagcaaggctggc

SEQ ID NO: 4943361 - DNA, 25 bp, Homo sapien
gggaaagtcctcacctgagcactct

SEQ ID NO: 4943362 - DNA, 25 bp, Homo sapien
aaagtcctcacctgagcactctgct

SEQ ID NO: 4943363 - DNA, 25 bp, Homo sapien
gacagatgagatgtgccgtaaaacg

SEQ ID NO: 4943364 - DNA, 25 bp, Homo sapien
atgaagacagatgagatgtgccgta

SEQ ID NO: 4943365 - DNA, 25 bp, Homo sapien
ctcttgaggaccaagaagaatgatg

SEQ ID NO: 4943366 - DNA, 25 bp, Homo sapien
gaagaatgatggtaaaacattctta

SEQ ID NO: 4943367 - DNA, 25 bp, Homo sapien
tcctgttaggttaaacggcagtgtc

SEQ ID NO: 4943368 - DNA, 25 bp, Homo sapien
gagcaataaacctcatcggcaggcc

SEQ ID NO: 4943369 - DNA, 25 bp, Homo sapien
cggcagtgtcttatcaaaaatgtgc

SEQ ID NO: 4943370 - DNA, 25 bp, Homo sapien
agtgcgcacgtccagatcctgtcca

SEQ ID NO: 4943371 - DNA, 25 bp, Homo sapien
agacgggaacttaacccatggccag

SEQ ID NO: 4943372 - DNA, 25 bp, Homo sapien
ggaacttaacccatggccaggagcc

SEQ ID NO: 4943373 - DNA, 25 bp, Homo sapien
ctcagacgggaacttaacccatggc

SEQ ID NO: 4943374 - DNA, 25 bp, Homo sapien
agcctccatcaacttccagccattt

SEQ ID NO: 4943375 - DNA, 25 bp, Homo sapien
tgtaatatgctttgccccgcacaga

SEQ ID NO: 4943376 - DNA, 25 bp, Homo sapien
taaagatccaactttggcagggagc

SEQ ID NO: 4943377 - DNA, 25 bp, Homo sapien
taaaacacggtttgaagccaagctg

SEQ ID NO: 4943378 - DNA, 25 bp, Homo sapien
cagccctgtttaagatcatgtgacc

SEQ ID NO: 4943379 - DNA, 25 bp, Homo sapien
caagagaaaatcaccgacgggaagg

SEQ ID NO: 4943380 - DNA, 25 bp, Homo sapien
gttaaagtactcatatcttatgtag

SEQ ID NO: 4943381 - DNA, 25 bp, Homo sapien
aagaaaagaccgcagaacaaccaga

SEQ ID NO: 4943382 - DNA, 25 bp, Homo sapien
ctggtaatactaagtacatagaaaa

SEQ ID NO: 4943383 - DNA, 25 bp, Homo sapien
gaaagatggttttgccagctacagt

SEQ ID NO: 4943384 - DNA, 25 bp, Homo sapien
tgtcccaattagagaggtctgccag

SEQ ID NO: 4943385 - DNA, 25 bp, Homo sapien
gaagaacttcaccaatcagctcagc

SEQ ID NO: 4943386 - DNA, 25 bp, Homo sapien
gatccctctggtgcttgtctgtggc

SEQ ID NO: 4943387 - DNA, 25 bp, Homo sapien
taaagtcgaatgctaaattagcctc

SEQ ID NO: 4943388 - DNA, 25 bp, Homo sapien
cctgcctccctgtaaagataggata

SEQ ID NO: 4943389 - DNA, 25 bp, Homo sapien
gacatttcccagaggagacgagcct

SEQ ID NO: 4943390 - DNA, 25 bp, Homo sapien
taagggctggatatggatgacttca

SEQ ID NO: 4943391 - DNA, 25 bp, Homo sapien
caaaactgatacttggctaggtcaa

SEQ ID NO: 4943392 - DNA, 25 bp, Homo sapien
tggtggcaccaacccatatcaagaa

SEQ ID NO: 4943393 - DNA, 25 bp, Homo sapien
caaaagcgaggtcctgactaaagct

SEQ ID NO: 4943394 - DNA, 25 bp, Homo sapien
taggtcaagtggctcaacaaaaggc

SEQ ID NO: 4943395 - DNA, 25 bp, Homo sapien
atttcattgtacatgaaaaagagca

SEQ ID NO: 4943396 - DNA, 25 bp, Homo sapien
aatttcattgtacatgaaaaagagc

SEQ ID NO: 4943397 - DNA, 25 bp, Homo sapien
ctaaatttcattgtacatgaaaaag

SEQ ID NO: 4943398 - DNA, 25 bp, Homo sapien
aaatttcattgtacatgaaaaagag

SEQ ID NO: 4943399 - DNA, 25 bp, Homo sapien
tcggggggctcgtccagcagcactc

SEQ ID NO: 4943400 - DNA, 25 bp, Homo sapien
cactcggccccggcccagcttccac

SEQ ID NO: 4943401 - DNA, 25 bp, Homo sapien
agcagcactcggccccggcccagct

SEQ ID NO: 4943402 - DNA, 25 bp, Homo sapien
cctcctcctcggggggctcgtccag

SEQ ID NO: 4943403 - DNA, 25 bp, Homo sapien
attcgacggggctccgaatcccatc

SEQ ID NO: 4943404 - DNA, 25 bp, Homo sapien
tgttctactgaacgacgtcctcacc

SEQ ID NO: 4943405 - DNA, 25 bp, Homo sapien
tccctccgtccgtgcgtcgggctgt

SEQ ID NO: 4943406 - DNA, 25 bp, Homo sapien
tgcctgcggctcctgcgggacgcgg

SEQ ID NO: 4943407 - DNA, 25 bp, Homo sapien
ccttgacgctgatgtaaacccggga

SEQ ID NO: 4943408 - DNA, 25 bp, Homo sapien
ttcgtgcctgtgacgctctctcagc

SEQ ID NO: 4943409 - DNA, 25 bp, Homo sapien
ttctcccaggacgttgacatggcct

SEQ ID NO: 4943410 - DNA, 25 bp, Homo sapien
cccgggaaatactgacgacttgcta

SEQ ID NO: 4943411 - DNA, 25 bp, Homo sapien
tctgctgcgttgaatcagccagaga

SEQ ID NO: 4943412 - DNA, 25 bp, Homo sapien
caacattcgttcttattttagtgtc

SEQ ID NO: 4943413 - DNA, 25 bp, Homo sapien
cacacatgaacttgtccaacattcg

SEQ ID NO: 4943414 - DNA, 25 bp, Homo sapien
ccttgtcttaatgtacaccaatact

SEQ ID NO: 4943415 - DNA, 25 bp, Homo sapien
caaggcccttgtatgacttaatttc

SEQ ID NO: 4943416 - DNA, 25 bp, Homo sapien
aattataaaatcctagtcagaactg

SEQ ID NO: 4943417 - DNA, 25 bp, Homo sapien
gcataaagtcaaattggcttgaaaa

SEQ ID NO: 4943418 - DNA, 25 bp, Homo sapien
tatttgctcaataagctctccaagg

SEQ ID NO: 4943419 - DNA, 25 bp, Homo sapien
gactttggcactggtttgaccccac

SEQ ID NO: 4943420 - DNA, 25 bp, Homo sapien
catctctaagtgaaagcagggccgg

SEQ ID NO: 4943421 - DNA, 25 bp, Homo sapien
caagatctcagcgaatgcccagaag

SEQ ID NO: 4943422 - DNA, 25 bp, Homo sapien
tgccctaaagctctggtgccacagg

SEQ ID NO: 4943423 - DNA, 25 bp, Homo sapien
tgaaaaagcatccttcgtgacaggt

SEQ ID NO: 4943424 - DNA, 25 bp, Homo sapien
tgggctcccggtccactgcttaaaa

SEQ ID NO: 4943425 - DNA, 25 bp, Homo sapien
tctgtgcccgacaagatggtagctg

SEQ ID NO: 4943426 - DNA, 25 bp, Homo sapien
ggaattgtccaagtcagcaccacag

SEQ ID NO: 4943427 - DNA, 25 bp, Homo sapien
tgtagtcacataagcccacgagttt

SEQ ID NO: 4943428 - DNA, 25 bp, Homo sapien
tgccacgtgtgtgaggctgaccgaa

SEQ ID NO: 4943429 - DNA, 25 bp, Homo sapien
gctgtcatctctacgaggcctgggt

SEQ ID NO: 4943430 - DNA, 25 bp, Homo sapien
caagagggacgcgttaactgaaagt

SEQ ID NO: 4943431 - DNA, 25 bp, Homo sapien
gatgtacattgtaagctccagagca

SEQ ID NO: 4943432 - DNA, 25 bp, Homo sapien
tctgtatttcactggtattaggcta

SEQ ID NO: 4943433 - DNA, 25 bp, Homo sapien
aatagcagcacaaagaagccaggtg

SEQ ID NO: 4943434 - DNA, 25 bp, Homo sapien
cagatagtaaccagtatccaccggg

SEQ ID NO: 4943435 - DNA, 25 bp, Homo sapien
taaaacgttctccacgactgacaat

SEQ ID NO: 4943436 - DNA, 25 bp, Homo sapien
tattgtctgagcacaatagacttaa

SEQ ID NO: 4943437 - DNA, 25 bp, Homo sapien
tatagaatgaataggcagaagatcc

SEQ ID NO: 4943438 - DNA, 25 bp, Homo sapien
gactgacaatatggtgcatacacca

SEQ ID NO: 4943439 - DNA, 25 bp, Homo sapien
tactaaatctggtggtgacgtgatc

SEQ ID NO: 4943440 - DNA, 25 bp, Homo sapien
tgagaagacaccatatctatgaagc

SEQ ID NO: 4943441 - DNA, 25 bp, Homo sapien
tatgaagcagagaacgaagcttttc

SEQ ID NO: 4943442 - DNA, 25 bp, Homo sapien
tcccttctgctacgttgaggatgca

SEQ ID NO: 4943443 - DNA, 25 bp, Homo sapien
aacacagttttcaccttgggctaag

SEQ ID NO: 4943444 - DNA, 25 bp, Homo sapien
cctcgccgggcaatgatgtatgtgt

SEQ ID NO: 4943445 - DNA, 25 bp, Homo sapien
tgtagtctcactgcagcaagtatgg

SEQ ID NO: 4943446 - DNA, 25 bp, Homo sapien
tgaaccgtgcacagttgtaggcctg

SEQ ID NO: 4943447 - DNA, 25 bp, Homo sapien
tttgaacatgtgaatcgtttccaca

SEQ ID NO: 4943448 - DNA, 25 bp, Homo sapien
catgtgaatcgtttccacacaccct

SEQ ID NO: 4943449 - DNA, 25 bp, Homo sapien
ggaaaggaagctgcatatttcgtgg

SEQ ID NO: 4943450 - DNA, 25 bp, Homo sapien
gctttcttctacacatataaatctt

SEQ ID NO: 4943451 - DNA, 25 bp, Homo sapien
taaggaaatgctggcggttggaacc

SEQ ID NO: 4943452 - DNA, 25 bp, Homo sapien
tagagtaaggtaccttccagggcca

SEQ ID NO: 4943453 - DNA, 25 bp, Homo sapien
tcagagccaactattgaggacctgg

SEQ ID NO: 4943454 - DNA, 25 bp, Homo sapien
tgctgcaggtacaaaggtgagcacc

SEQ ID NO: 4943455 - DNA, 25 bp, Homo sapien
ggatggacgtatccctagacacctg

SEQ ID NO: 4943456 - DNA, 25 bp, Homo sapien
catggatattgggaagacagacagc

SEQ ID NO: 4943457 - DNA, 25 bp, Homo sapien
catgtagccactgatgtgctgtgtg

SEQ ID NO: 4943458 - DNA, 25 bp, Homo sapien
caagctctcgtcatggtgtccgaca

SEQ ID NO: 4943459 - DNA, 25 bp, Homo sapien
gatgttatctgcaggctagccaggg

SEQ ID NO: 4943460 - DNA, 25 bp, Homo sapien
aactgtgtggtcatagcaaagagcc

SEQ ID NO: 4943461 - DNA, 25 bp, Homo sapien
gacgatctcataaacaggaccgctg

SEQ ID NO: 4943462 - DNA, 25 bp, Homo sapien
tgagagttccatgttcagccgcagg

SEQ ID NO: 4943463 - DNA, 25 bp, Homo sapien
catgaggcagaggtgactcacagcc

SEQ ID NO: 4943464 - DNA, 25 bp, Homo sapien
taccctcccatgagcaaccatgtgg

SEQ ID NO: 4943465 - DNA, 25 bp, Homo sapien
aacagtccgatgtctgcgccaggaa

SEQ ID NO: 4943466 - DNA, 25 bp, Homo sapien
tctgctgtgtttaatgcctgggtgc

SEQ ID NO: 4943467 - DNA, 25 bp, Homo sapien
gatcatcagtgggtaacataacgcc

SEQ ID NO: 4943468 - DNA, 25 bp, Homo sapien
tcagcagtgccagacaaagatgccg

SEQ ID NO: 4943469 - DNA, 25 bp, Homo sapien
ccacagcaaagagccgtttaggcaa

SEQ ID NO: 4943470 - DNA, 25 bp, Homo sapien
tggcctgagaaacgcacaaccagtg

SEQ ID NO: 4943471 - DNA, 25 bp, Homo sapien
cacccgttgggatggctgctataga

SEQ ID NO: 4943472 - DNA, 25 bp, Homo sapien
tgaacagggtctcgaggatacgtct

SEQ ID NO: 4943473 - DNA, 25 bp, Homo sapien
gcgaggtactcacaacagcatgggt

SEQ ID NO: 4943474 - DNA, 25 bp, Homo sapien
taaatccacgaagcggtgctcacct

SEQ ID NO: 4943475 - DNA, 25 bp, Homo sapien
cgagccgttcaaccagggcgagaag

SEQ ID NO: 4943476 - DNA, 25 bp, Homo sapien
ttcaccccatttaacttgcaagcgg

SEQ ID NO: 4943477 - DNA, 25 bp, Homo sapien
caactctggatccaaaacgcagcag

SEQ ID NO: 4943478 - DNA, 25 bp, Homo sapien
ttgcaagcggctcttacgcggcagg

SEQ ID NO: 4943479 - DNA, 25 bp, Homo sapien
ttgggctagttccaacattcctggg

SEQ ID NO: 4943480 - DNA, 25 bp, Homo sapien
tacagcttccgttacagtgcggtgg

SEQ ID NO: 4943481 - DNA, 25 bp, Homo sapien
acagccacgcttgggcacgttcaga

SEQ ID NO: 4943482 - DNA, 25 bp, Homo sapien
cagcacgggccatgttcttcggaga

SEQ ID NO: 4943483 - DNA, 25 bp, Homo sapien
tctgttctggtagatgttttaagta

SEQ ID NO: 4943484 - DNA, 25 bp, Homo sapien
ggcacaacttgtttgtcagctaaga

SEQ ID NO: 4943485 - DNA, 25 bp, Homo sapien
taagaccgctgctttccagtcctaa

SEQ ID NO: 4943486 - DNA, 25 bp, Homo sapien
tatgaaagaggagatttactcccat

SEQ ID NO: 4943487 - DNA, 25 bp, Homo sapien
tcaagctgcagatgtagagaatcac

SEQ ID NO: 4943488 - DNA, 25 bp, Homo sapien
ctcaagctgcagatgtagagaatca

SEQ ID NO: 4943489 - DNA, 25 bp, Homo sapien
tggaattatcacagggtgttgccct

SEQ ID NO: 4943490 - DNA, 25 bp, Homo sapien
gagtccacgtaggttataagattcc

SEQ ID NO: 4943491 - DNA, 25 bp, Homo sapien
caatgtacggatggaaagagtccac

SEQ ID NO: 4943492 - DNA, 25 bp, Homo sapien
taagattcctgagtccatgtcatcg

SEQ ID NO: 4943493 - DNA, 25 bp, Homo sapien
gaagatcttccaatttgatttcgac

SEQ ID NO: 4943494 - DNA, 25 bp, Homo sapien
ctggaatacttttccacgttgggtg

SEQ ID NO: 4943495 - DNA, 25 bp, Homo sapien
acttttccacgttgggtgcagctgg

SEQ ID NO: 4943496 - DNA, 25 bp, Homo sapien
tgatttcgacaagagccaataaaag

SEQ ID NO: 4943497 - DNA, 25 bp, Homo sapien
gaaatcagccatttaggaggccact

SEQ ID NO: 4943498 - DNA, 25 bp, Homo sapien
taagcagtgtttacagggcctcatt

SEQ ID NO: 4943499 - DNA, 25 bp, Homo sapien
cactggtggaaaacgatgggtcatt

SEQ ID NO: 4943500 - DNA, 25 bp, Homo sapien
ttaggagaatacttgagtcagcccc

SEQ ID NO: 4943501 - DNA, 25 bp, Homo sapien
tcacttgttggaacgtggcccgaaa

SEQ ID NO: 4943502 - DNA, 25 bp, Homo sapien
taaacattgcatgcgattcctgcga

SEQ ID NO: 4943503 - DNA, 25 bp, Homo sapien
tgtggagttctcaccggctcagagg

SEQ ID NO: 4943504 - DNA, 25 bp, Homo sapien
tgagtgagccgatgtgtgccgcaca

SEQ ID NO: 4943505 - DNA, 25 bp, Homo sapien
ctgagtttcgctggccccggttgag

SEQ ID NO: 4943506 - DNA, 25 bp, Homo sapien
tccgcgttgagctgtgaccgcagac

SEQ ID NO: 4943507 - DNA, 25 bp, Homo sapien
agacccctttccctcggctggcact

SEQ ID NO: 4943508 - DNA, 25 bp, Homo sapien
ctcggctggcactggagtccgcgtt

SEQ ID NO: 4943509 - DNA, 25 bp, Homo sapien
gggcttgcttttattctatgctgtc

SEQ ID NO: 4943510 - DNA, 25 bp, Homo sapien
ggtgggtgtatcctgtgcattgtgg

SEQ ID NO: 4943511 - DNA, 25 bp, Homo sapien
cacagagaattccagggtgggtgta

SEQ ID NO: 4943512 - DNA, 25 bp, Homo sapien
tctatgctgtcctcaaggtcaagca

SEQ ID NO: 4943513 - DNA, 25 bp, Homo sapien
gaagcgtgtgctggcgtcagggaga

SEQ ID NO: 4943514 - DNA, 25 bp, Homo sapien
aggagacgtgacaggaccgggcctg

SEQ ID NO: 4943515 - DNA, 25 bp, Homo sapien
gagaagacggcagccgcgacatctg

SEQ ID NO: 4943516 - DNA, 25 bp, Homo sapien
accgggcctggggaagcgtgtgctg

SEQ ID NO: 4943517 - DNA, 25 bp, Homo sapien
cgtcccgttccgtgctggcgatgag

SEQ ID NO: 4943518 - DNA, 25 bp, Homo sapien
ctgagcgcgacctgcgtgtcctgct

SEQ ID NO: 4943519 - DNA, 25 bp, Homo sapien
gaaggttgcggtctcagcgctcgct

SEQ ID NO: 4943520 - DNA, 25 bp, Homo sapien
tcagaagaacaaggccggaaggttg

SEQ ID NO: 4943521 - DNA, 25 bp, Homo sapien
gaaagggcagcccttgtcgccttaa

SEQ ID NO: 4943522 - DNA, 25 bp, Homo sapien
atctcagttaccgtcctcggcaggg

SEQ ID NO: 4943523 - DNA, 25 bp, Homo sapien
tcctaacgtgaggacgaaatgggct

SEQ ID NO: 4943524 - DNA, 25 bp, Homo sapien
cagggcactgtcacatcctaacgtg

SEQ ID NO: 4943525 - DNA, 25 bp, Homo sapien
caaatcagacgtagtgaaagggcca

SEQ ID NO: 4943526 - DNA, 25 bp, Homo sapien
tagaggccattcttagctccggctg

SEQ ID NO: 4943527 - DNA, 25 bp, Homo sapien
gactcagtaatgtgcaggaattcct

SEQ ID NO: 4943528 - DNA, 25 bp, Homo sapien
ccacggaccatgtttgagagagagg

SEQ ID NO: 4943529 - DNA, 25 bp, Homo sapien
agggtccccacatctccggtgtgca

SEQ ID NO: 4943530 - DNA, 25 bp, Homo sapien
tggtagggtccccacatctccggtg

SEQ ID NO: 4943531 - DNA, 25 bp, Homo sapien
catcttggtagggtccccacatctc

SEQ ID NO: 4943532 - DNA, 25 bp, Homo sapien
gatctccacggtgcactgagcatcc

SEQ ID NO: 4943533 - DNA, 25 bp, Homo sapien
tcgagatctccggtgtgcactgagc

SEQ ID NO: 4943534 - DNA, 25 bp, Homo sapien
cgagatctccggtgtgcactgacca

SEQ ID NO: 4943535 - DNA, 25 bp, Homo sapien
cgagatctccggtgtgcactgagca

SEQ ID NO: 4943536 - DNA, 25 bp, Homo sapien
gagatctccggtgtgcactgaccat

SEQ ID NO: 4943537 - DNA, 25 bp, Homo sapien
tcttattttggagcgggtggaacac

SEQ ID NO: 4943538 - DNA, 25 bp, Homo sapien
tcagccttcaggattcacgcagtgg

SEQ ID NO: 4943539 - DNA, 25 bp, Homo sapien
atacagctgcagtggaacagaggcc

SEQ ID NO: 4943540 - DNA, 25 bp, Homo sapien
gccccgggatgagaggacatgtcac

SEQ ID NO: 4943541 - DNA, 25 bp, Homo sapien
acccggcctgactgatgcttttaac

SEQ ID NO: 4943542 - DNA, 25 bp, Homo sapien
aataccaagaactgacgactgcttc

SEQ ID NO: 4943543 - DNA, 25 bp, Homo sapien
taacacttagtaataccaagaactg

SEQ ID NO: 4943544 - DNA, 25 bp, Homo sapien
cccggcctgactgatgcttttaaca

SEQ ID NO: 4943545 - DNA, 25 bp, Homo sapien
tgtctttcaagttcccagagaacta

SEQ ID NO: 4943546 - DNA, 25 bp, Homo sapien
tatgagcttcaaactatacatttaa

SEQ ID NO: 4943547 - DNA, 25 bp, Homo sapien
tcagatggcatcttgcccaccagga

SEQ ID NO: 4943548 - DNA, 25 bp, Homo sapien
cccaccaggaacaaacacgtgaata

SEQ ID NO: 4943549 - DNA, 25 bp, Homo sapien
aagaaagctgagattactctggcat

SEQ ID NO: 4943550 - DNA, 25 bp, Homo sapien
ctgctcttctcaggaaggatatgtg

SEQ ID NO: 4943551 - DNA, 25 bp, Homo sapien
gaaagctgagattactctggcatgg

SEQ ID NO: 4943552 - DNA, 25 bp, Homo sapien
tatgtgtgatccagtaactaaagaa

SEQ ID NO: 4943553 - DNA, 25 bp, Homo sapien
tctcagtgcacggtgggaggaacac

SEQ ID NO: 4943554 - DNA, 25 bp, Homo sapien
taaaacgtcacagaagcgggagagc

SEQ ID NO: 4943555 - DNA, 25 bp, Homo sapien
ctcagagcttcacggcagggacatg

SEQ ID NO: 4943556 - DNA, 25 bp, Homo sapien
tatgtagacacgagcctttgggccc

SEQ ID NO: 4943557 - DNA, 25 bp, Homo sapien
tggacgttggctacagctgcctaac

SEQ ID NO: 4943558 - DNA, 25 bp, Homo sapien
taagtacttgctgtaagaggcctga

SEQ ID NO: 4943559 - DNA, 25 bp, Homo sapien
gaacctgaggtctgactggcacctg

SEQ ID NO: 4943560 - DNA, 25 bp, Homo sapien
gagaaaacaggttcctacacacagt

SEQ ID NO: 4943561 - DNA, 25 bp, Homo sapien
ttggtccacgctgcaggcccctctc

SEQ ID NO: 4943562 - DNA, 25 bp, Homo sapien
ctgtggctgcaccttggtccacgct

SEQ ID NO: 4943563 - DNA, 25 bp, Homo sapien
tgtggctgcaccttggtccacgctg

SEQ ID NO: 4943564 - DNA, 25 bp, Homo sapien
catgaaaaggatgcccggtgaaggt

SEQ ID NO: 4943565 - DNA, 25 bp, Homo sapien
caacagctccttgacggatgagggc

SEQ ID NO: 4943566 - DNA, 25 bp, Homo sapien
aaaagtcgtcatcaccacgtcaggg

SEQ ID NO: 4943567 - DNA, 25 bp, Homo sapien
gagttgacagctcccaagtccggaa

SEQ ID NO: 4943568 - DNA, 25 bp, Homo sapien
gaggcatcgtgcaatgttctgggaa

SEQ ID NO: 4943569 - DNA, 25 bp, Homo sapien
tctcagtatcttgcaggagcagcag

SEQ ID NO: 4943570 - DNA, 25 bp, Homo sapien
ctgtgtgacgcaaggcggtccagca

SEQ ID NO: 4943571 - DNA, 25 bp, Homo sapien
tcatgtggtacaggatggacacgtc

SEQ ID NO: 4943572 - DNA, 25 bp, Homo sapien
ggcagctgaagctgcatctctggag

SEQ ID NO: 4943573 - DNA, 25 bp, Homo sapien
cagctgaagctgcatctctggagac

SEQ ID NO: 4943574 - DNA, 25 bp, Homo sapien
gctgaagctgcatctctggagacac

SEQ ID NO: 4943575 - DNA, 25 bp, Homo sapien
ctgcgagggcagctgaagctgcatc

SEQ ID NO: 4943576 - DNA, 25 bp, Homo sapien
tgcatgaacgactgtggaaacctgg

SEQ ID NO: 4943577 - DNA, 25 bp, Homo sapien
tacgcttccacacagaatgacatat

SEQ ID NO: 4943578 - DNA, 25 bp, Homo sapien
tgagaagctaccagaagagagaatc

SEQ ID NO: 4943579 - DNA, 25 bp, Homo sapien
tcctctcttaaggaaggtctcaaac

SEQ ID NO: 4943580 - DNA, 25 bp, Homo sapien
tctacacgtctgtctggtgagacgc

SEQ ID NO: 4943581 - DNA, 25 bp, Homo sapien
ccgtctacacgtctgtctggtgaga

SEQ ID NO: 4943582 - DNA, 25 bp, Homo sapien
ctggcccgtctacacgtctgtctgg

SEQ ID NO: 4943583 - DNA, 25 bp, Homo sapien
gcccgtctacacgtctgtctggtga

SEQ ID NO: 4943584 - DNA, 25 bp, Homo sapien
ggcgttaaccctgcttggacttggc

SEQ ID NO: 4943585 - DNA, 25 bp, Homo sapien
tgcctctggtggtttcggcgttaac

SEQ ID NO: 4943586 - DNA, 25 bp, Homo sapien
tgtccaacacacgactcagggctac

SEQ ID NO: 4943587 - DNA, 25 bp, Homo sapien
tcagggctacgaacagcagcaggtt

SEQ ID NO: 4943588 - DNA, 25 bp, Homo sapien
tgctgaacgcataggaaagactgca

SEQ ID NO: 4943589 - DNA, 25 bp, Homo sapien
gaggtctaggatggcgacattttcc

SEQ ID NO: 4943590 - DNA, 25 bp, Homo sapien
tcagcacctcaagatggccaagagg

SEQ ID NO: 4943591 - DNA, 25 bp, Homo sapien
catgcccggtaaactgttgctgaac

SEQ ID NO: 4943592 - DNA, 25 bp, Homo sapien
tgaccttagaggcatggaggacacg

SEQ ID NO: 4943593 - DNA, 25 bp, Homo sapien
gaaatcgtgcatccgttctatgtgg

SEQ ID NO: 4943594 - DNA, 25 bp, Homo sapien
cacatcatcggtggaaagcacataa

SEQ ID NO: 4943595 - DNA, 25 bp, Homo sapien
tcctaaaggcgcaagctgtgtttcc

SEQ ID NO: 4943596 - DNA, 25 bp, Homo sapien
tcctcgggctggtacatgaaactga

SEQ ID NO: 4943597 - DNA, 25 bp, Homo sapien
cagtgtcgggtcttcctcgctggtg

SEQ ID NO: 4943598 - DNA, 25 bp, Homo sapien
caggtcttcctcaatggtgtccaca

SEQ ID NO: 4943599 - DNA, 25 bp, Homo sapien
tgccatctgtgtgctgtcgctgaga

SEQ ID NO: 4943600 - DNA, 25 bp, Homo sapien
tctttgatttatgcttcctaattct

SEQ ID NO: 4943601 - DNA, 25 bp, Homo sapien
ctataagaacattattgggattttt

SEQ ID NO: 4943602 - DNA, 25 bp, Homo sapien
tcttcttctctttggctggtcatga

SEQ ID NO: 4943603 - DNA, 25 bp, Homo sapien
tttggctggtcatgaggatcctgat

SEQ ID NO: 4943604 - DNA, 25 bp, Homo sapien
ctaaagttacttgtgtgtgagaata

SEQ ID NO: 4943605 - DNA, 25 bp, Homo sapien
tctatgggcctttccctctatgggg

SEQ ID NO: 4943606 - DNA, 25 bp, Homo sapien
agtaatgatgatttgcccatctgag

SEQ ID NO: 4943607 - DNA, 25 bp, Homo sapien
caagtgattccggtaccactgcctc

SEQ ID NO: 4943608 - DNA, 25 bp, Homo sapien
taaatagcataggttggtgatgtgc

SEQ ID NO: 4943609 - DNA, 25 bp, Homo sapien
actaccactgtggtgttgcggaaca

SEQ ID NO: 4943610 - DNA, 25 bp, Homo sapien
aaccagctctcggaaaagtcctgag

SEQ ID NO: 4943611 - DNA, 25 bp, Homo sapien
aggtagcacagccaattctcacagg

SEQ ID NO: 4943612 - DNA, 25 bp, Homo sapien
gtgtgcaggccaagaacagacggca

SEQ ID NO: 4943613 - DNA, 25 bp, Homo sapien
agggtgtgtgcaggccaagaacaga

SEQ ID NO: 4943614 - DNA, 25 bp, Homo sapien
agataagtaactggcgccatgcggg

SEQ ID NO: 4943615 - DNA, 25 bp, Homo sapien
gaagggtatcagataagtaactggc

SEQ ID NO: 4943616 - DNA, 25 bp, Homo sapien
actgtgagatgacattgctgccgct

SEQ ID NO: 4943617 - DNA, 25 bp, Homo sapien
tgaacgccgctgtggaactgtgaga

SEQ ID NO: 4943618 - DNA, 25 bp, Homo sapien
cctcttcattggatgtagacacccc

SEQ ID NO: 4943619 - DNA, 25 bp, Homo sapien
tgtggaagagagttcccaccgtgtc

SEQ ID NO: 4943620 - DNA, 25 bp, Homo sapien
tttctgatggcccaggatgcatgag

SEQ ID NO: 4943621 - DNA, 25 bp, Homo sapien
ccaggatgcatgagacctccaagtc

SEQ ID NO: 4943622 - DNA, 25 bp, Homo sapien
tgatggcccaggatgcatgagacct

SEQ ID NO: 4943623 - DNA, 25 bp, Homo sapien
catcacagccttttctgatggccca

SEQ ID NO: 4943624 - DNA, 25 bp, Homo sapien
ctggacttgtttccggcaccgtggc

SEQ ID NO: 4943625 - DNA, 25 bp, Homo sapien
tggcatagggacacactgtcgtgct

SEQ ID NO: 4943626 - DNA, 25 bp, Homo sapien
ggacacactgtcgtgctgctgggaa

SEQ ID NO: 4943627 - DNA, 25 bp, Homo sapien
tttccggcaccgtggcatagggaca

SEQ ID NO: 4943628 - DNA, 25 bp, Homo sapien
catttatcacaaggcagtagccagg

SEQ ID NO: 4943629 - DNA, 25 bp, Homo sapien
ggcttctggagagcaagacgcaacc

SEQ ID NO: 4943630 - DNA, 25 bp, Homo sapien
tcaacaagaggaggagtacgtgcat

SEQ ID NO: 4943631 - DNA, 25 bp, Homo sapien
gagccaagacccattaacccaggtg

SEQ ID NO: 4943632 - DNA, 25 bp, Homo sapien
ctggaggctccatcggctctgcagc

SEQ ID NO: 4943633 - DNA, 25 bp, Homo sapien
cttccttcttgtgtgccgtgttccc

SEQ ID NO: 4943634 - DNA, 25 bp, Homo sapien
gtgccgtgttcccacactgaccttg

SEQ ID NO: 4943635 - DNA, 25 bp, Homo sapien
cctggaggctccatcggctctgcag

SEQ ID NO: 4943636 - DNA, 25 bp, Homo sapien
tttgctaaaccaagacaagtactgt

SEQ ID NO: 4943637 - DNA, 25 bp, Homo sapien
tccatgctcaacagtcaaccgtatt

SEQ ID NO: 4943638 - DNA, 25 bp, Homo sapien
tcgtacgacatgcaacaacaatagg

SEQ ID NO: 4943639 - DNA, 25 bp, Homo sapien
tatgtatttagttccagggtactcc

SEQ ID NO: 4943640 - DNA, 25 bp, Homo sapien
gctccggccaacaggggacgtagcc

SEQ ID NO: 4943641 - DNA, 25 bp, Homo sapien
ggacgtagccctcaggaggcccgct

SEQ ID NO: 4943642 - DNA, 25 bp, Homo sapien
gtgtcatccccgctggaggcgttct

SEQ ID NO: 4943643 - DNA, 25 bp, Homo sapien
agtgtagagccgtcgggcagtcggg

SEQ ID NO: 4943644 - DNA, 25 bp, Homo sapien
tttgctagagatgggtgactcgcca

SEQ ID NO: 4943645 - DNA, 25 bp, Homo sapien
gctgcgatataggtgtacatcatca

SEQ ID NO: 4943646 - DNA, 25 bp, Homo sapien
tgataacagggtgagccactttgcc

SEQ ID NO: 4943647 - DNA, 25 bp, Homo sapien
tctgcccttgtgacacgacctgatc

SEQ ID NO: 4943648 - DNA, 25 bp, Homo sapien
cactgaaacgaagtggctgaatgct

SEQ ID NO: 4943649 - DNA, 25 bp, Homo sapien
tcttctagaatgaaactggcctgga

SEQ ID NO: 4943650 - DNA, 25 bp, Homo sapien
gctttgtcagactcaaatggaccca

SEQ ID NO: 4943651 - DNA, 25 bp, Homo sapien
gaaaagacgtcacccaaaggatcac

SEQ ID NO: 4943652 - DNA, 25 bp, Homo sapien
ccatgacagcatcgtacagggcagt

SEQ ID NO: 4943653 - DNA, 25 bp, Homo sapien
cagtcctcggcatcatacagggcag

SEQ ID NO: 4943654 - DNA, 25 bp, Homo sapien
catcctgtgagttgaagcaaacgca

SEQ ID NO: 4943655 - DNA, 25 bp, Homo sapien
gacaatgtcattcgcagagcacaag

SEQ ID NO: 4943656 - DNA, 25 bp, Homo sapien
taagtcagtggtatttatgtgggtc

SEQ ID NO: 4943657 - DNA, 25 bp, Homo sapien
tcttgaagtcatgtaatgccagtcc

SEQ ID NO: 4943658 - DNA, 25 bp, Homo sapien
tgtggatgtctagttgtgccagccc

SEQ ID NO: 4943659 - DNA, 25 bp, Homo sapien
cttttgccaaaaatacgctgtcttg

SEQ ID NO: 4943660 - DNA, 25 bp, Homo sapien
acccacgtctggcttcatagactta

SEQ ID NO: 4943661 - DNA, 25 bp, Homo sapien
aatggacccgcccacatgtgctgca

SEQ ID NO: 4943662 - DNA, 25 bp, Homo sapien
gaaccgaatggacccgcccacatgt

SEQ ID NO: 4943663 - DNA, 25 bp, Homo sapien
ttcatagacttatgtgtttactggg

SEQ ID NO: 4943664 - DNA, 25 bp, Homo sapien
ctttggtggattttggacggccagc

SEQ ID NO: 4943665 - DNA, 25 bp, Homo sapien
tggtggattttggacggccagcgtc

SEQ ID NO: 4943666 - DNA, 25 bp, Homo sapien
gtggattttggacggccagcgtctg

SEQ ID NO: 4943667 - DNA, 25 bp, Homo sapien
ctggctcactttctcagaggtcact

SEQ ID NO: 4943668 - DNA, 25 bp, Homo sapien
gcacaacacaccagggtacggattg

SEQ ID NO: 4943669 - DNA, 25 bp, Homo sapien
tggccccaggtcacggtctttcaag

SEQ ID NO: 4943670 - DNA, 25 bp, Homo sapien
gtacggattggagcgcactgagtct

SEQ ID NO: 4943671 - DNA, 25 bp, Homo sapien
tatggatcggagtgcacggagaaac

SEQ ID NO: 4943672 - DNA, 25 bp, Homo sapien
ccatgcagacccatgtgttgtgcgg

SEQ ID NO: 4943673 - DNA, 25 bp, Homo sapien
tcaggtgccacacgagcagattcga

SEQ ID NO: 4943674 - DNA, 25 bp, Homo sapien
tgctggcacagcgtgcagggaccac

SEQ ID NO: 4943675 - DNA, 25 bp, Homo sapien
tgcactccaatctgtaccctggtgt

SEQ ID NO: 4943676 - DNA, 25 bp, Homo sapien
catgaccgatggcagaacgctgagg

SEQ ID NO: 4943677 - DNA, 25 bp, Homo sapien
aacgctgaggtacccacgatgaagg

SEQ ID NO: 4943678 - DNA, 25 bp, Homo sapien
cacagacacacaggataacaaagct

SEQ ID NO: 4943679 - DNA, 25 bp, Homo sapien
acgatgaaggacgaggacgcatgct

SEQ ID NO: 4943680 - DNA, 25 bp, Homo sapien
agttaaatgcctgctgaaaatatgc

SEQ ID NO: 4943681 - DNA, 25 bp, Homo sapien
gaggagtttcgtaacagaatgacaa

SEQ ID NO: 4943682 - DNA, 25 bp, Homo sapien
tcagtgaacagcagctctagctgat

SEQ ID NO: 4943683 - DNA, 25 bp, Homo sapien
attttatccctataatgaggcaagg

SEQ ID NO: 4943684 - DNA, 25 bp, Homo sapien
cgcctggcccggaccacgagggagc

SEQ ID NO: 4943685 - DNA, 25 bp, Homo sapien
gcctggcccggaccacgagggagcc

SEQ ID NO: 4943686 - DNA, 25 bp, Homo sapien
gccgcctggcccggaccacgaggga

SEQ ID NO: 4943687 - DNA, 25 bp, Homo sapien
ccgcctggcccggaccacgagggag

SEQ ID NO: 4943688 - DNA, 25 bp, Homo sapien
cagaaccttgcatgtgatcggtcac

SEQ ID NO: 4943689 - DNA, 25 bp, Homo sapien
gtctactgcacccagcggacaggac

SEQ ID NO: 4943690 - DNA, 25 bp, Homo sapien
cggacaggaccagcggcagtgacca

SEQ ID NO: 4943691 - DNA, 25 bp, Homo sapien
ctggctgggtcctcacggtgctgcc

SEQ ID NO: 4943692 - DNA, 25 bp, Homo sapien
ctctaaacctccctgttccatgagg

SEQ ID NO: 4943693 - DNA, 25 bp, Homo sapien
tctctaaacctccctgttccatgag

SEQ ID NO: 4943694 - DNA, 25 bp, Homo sapien
ggacctcagaccacggcgcgcggtc

SEQ ID NO: 4943695 - DNA, 25 bp, Homo sapien
cacggcgcgcggtcctgagctgagc

SEQ ID NO: 4943696 - DNA, 25 bp, Homo sapien
gcgggaccctgccgcggacctcaga

SEQ ID NO: 4943697 - DNA, 25 bp, Homo sapien
ctgccgcggacctcagaccacggcg

SEQ ID NO: 4943698 - DNA, 25 bp, Homo sapien
taggcgtgtcgcgaggctccagacc

SEQ ID NO: 4943699 - DNA, 25 bp, Homo sapien
catcacggccgtagattggctgata

SEQ ID NO: 4943700 - DNA, 25 bp, Homo sapien
ctgctctacgcggtggcggaactct

SEQ ID NO: 4943701 - DNA, 25 bp, Homo sapien
ttggctgatatcgagtctgtaggcg

SEQ ID NO: 4943702 - DNA, 25 bp, Homo sapien
atggccagggcggtgtccctggccc

SEQ ID NO: 4943703 - DNA, 25 bp, Homo sapien
gacacagggcatggccagggcggtg

SEQ ID NO: 4943704 - DNA, 25 bp, Homo sapien
acagggcatggccagggcggtgtcc

SEQ ID NO: 4943705 - DNA, 25 bp, Homo sapien
agggcatggccagggcggtgtccct

SEQ ID NO: 4943706 - DNA, 25 bp, Homo sapien
gatgtccgcgctgaggaaggtgcga

SEQ ID NO: 4943707 - DNA, 25 bp, Homo sapien
gctgaggaaggtgcgagccgccggg

SEQ ID NO: 4943708 - DNA, 25 bp, Homo sapien
ggagcgtccgaggatgtccgcgctg

SEQ ID NO: 4943709 - DNA, 25 bp, Homo sapien
gctgagcccggagcgtccgaggatg

SEQ ID NO: 4943710 - DNA, 25 bp, Homo sapien
gggtcgcgcgttgcgctcctcgccg

SEQ ID NO: 4943711 - DNA, 25 bp, Homo sapien
tcctcgccgggctccgcgcatccct

SEQ ID NO: 4943712 - DNA, 25 bp, Homo sapien
ggctccgagagccgtcgaggcgggg

SEQ ID NO: 4943713 - DNA, 25 bp, Homo sapien
cagcctgtgctcgggggtcgcgcgt

SEQ ID NO: 4943714 - DNA, 25 bp, Homo sapien
tggataaacagttgcatgaactcgt

SEQ ID NO: 4943715 - DNA, 25 bp, Homo sapien
gtgaatgcctcgttacgccaccgtc

SEQ ID NO: 4943716 - DNA, 25 bp, Homo sapien
ttctcccgctgcttccgagttgtgg

SEQ ID NO: 4943717 - DNA, 25 bp, Homo sapien
gcatgaactcgtaaatacacaccgt

SEQ ID NO: 4943718 - DNA, 25 bp, Homo sapien
ggtgcctgaacttcagtgatggtcc

SEQ ID NO: 4943719 - DNA, 25 bp, Homo sapien
tgaacttcagtgatggtcctggtcg

SEQ ID NO: 4943720 - DNA, 25 bp, Homo sapien
tgcctgaacttcagtgatggtcctg

SEQ ID NO: 4943721 - DNA, 25 bp, Homo sapien
aacttcagtgatggtcctggtcggg

SEQ ID NO: 4943722 - DNA, 25 bp, Homo sapien
acaaagcaccacagccgggcatcct

SEQ ID NO: 4943723 - DNA, 25 bp, Homo sapien
ttcaccatcccggtgtagcccctgc

SEQ ID NO: 4943724 - DNA, 25 bp, Homo sapien
acggtgcccctgttagggtgatgtc

SEQ ID NO: 4943725 - DNA, 25 bp, Homo sapien
tggtcctgaaggcatgatgcgagga

SEQ ID NO: 4943726 - DNA, 25 bp, Homo sapien
gaggtgtcgcgccatctgtcctcac

SEQ ID NO: 4943727 - DNA, 25 bp, Homo sapien
caagtttctgacagtcgctcaggag

SEQ ID NO: 4943728 - DNA, 25 bp, Homo sapien
tctcgtggaaaggagcgttttcctg

SEQ ID NO: 4943729 - DNA, 25 bp, Homo sapien
tggatctccggccatcctctcgtgg

SEQ ID NO: 4943730 - DNA, 25 bp, Homo sapien
gaagttggatcgtgaggttagaaaa

SEQ ID NO: 4943731 - DNA, 25 bp, Homo sapien
tcgtgaggttagaaaaacttgtctc

SEQ ID NO: 4943732 - DNA, 25 bp, Homo sapien
gaggttagaaaaacttgtctctgag

SEQ ID NO: 4943733 - DNA, 25 bp, Homo sapien
ggacattacggaagttggatcgtga

SEQ ID NO: 4943734 - DNA, 25 bp, Homo sapien
gtccctcactgggtttggccttgag

SEQ ID NO: 4943735 - DNA, 25 bp, Homo sapien
aggcttggtgccctgagccgctagg

SEQ ID NO: 4943736 - DNA, 25 bp, Homo sapien
tgagccgctagggtcctgttttagg

SEQ ID NO: 4943737 - DNA, 25 bp, Homo sapien
tgccctgagccgctagggtcctgtt

SEQ ID NO: 4943738 - DNA, 25 bp, Homo sapien
ttggtgccctgagccgctagggtcc

SEQ ID NO: 4943739 - DNA, 25 bp, Homo sapien
catggccggatagggagcaggtgtg

SEQ ID NO: 4943740 - DNA, 25 bp, Homo sapien
catgctgtttagcaagtgggccagg

SEQ ID NO: 4943741 - DNA, 25 bp, Homo sapien
ggctgacggcaaagacgatgtcgtt

SEQ ID NO: 4943742 - DNA, 25 bp, Homo sapien
gctggtggcataggagacgggagaa

SEQ ID NO: 4943743 - DNA, 25 bp, Homo sapien
atcaataccccccacagccttcctg

SEQ ID NO: 4943744 - DNA, 25 bp, Homo sapien
attatcaatacccctgacagctttc

SEQ ID NO: 4943745 - DNA, 25 bp, Homo sapien
gctgcacactgacggttttctttct

SEQ ID NO: 4943746 - DNA, 25 bp, Homo sapien
tgctgcacactgacggttttctttc

SEQ ID NO: 4943747 - DNA, 25 bp, Homo sapien
ctgctgcacactgacggttttcttt

SEQ ID NO: 4943748 - DNA, 25 bp, Homo sapien
tgttgggtggaagctggcagcgccc

SEQ ID NO: 4943749 - DNA, 25 bp, Homo sapien
ttggccttgtcttgctccgggcccc

SEQ ID NO: 4943750 - DNA, 25 bp, Homo sapien
gcgcccggagtcaggttccaccagc

SEQ ID NO: 4943751 - DNA, 25 bp, Homo sapien
aaatggctttctcagcatcccagat

SEQ ID NO: 4943752 - DNA, 25 bp, Homo sapien
tgttgttattctgtagccaaatggc

SEQ ID NO: 4943753 - DNA, 25 bp, Homo sapien
tattttctcacacagcgtcctgttg

SEQ ID NO: 4943754 - DNA, 25 bp, Homo sapien
tggtacgtcgctcccaaatcatgaa

SEQ ID NO: 4943755 - DNA, 25 bp, Homo sapien
tcctgtgtcatgacaagcatgctgt

SEQ ID NO: 4943756 - DNA, 25 bp, Homo sapien
tgagagcaggcgtccagtgagagca

SEQ ID NO: 4943757 - DNA, 25 bp, Homo sapien
tgtccagtgagaacaggcgtccagt

SEQ ID NO: 4943758 - DNA, 25 bp, Homo sapien
gtccagtgagaacaggcgtccagtg

SEQ ID NO: 4943759 - DNA, 25 bp, Homo sapien
gtgagagcaggcgtccagtgagagc

SEQ ID NO: 4943760 - DNA, 25 bp, Homo sapien
gtaaacgcttgttgagagccttccc

SEQ ID NO: 4943761 - DNA, 25 bp, Homo sapien
aaacgcttgttgagagccttcccac

SEQ ID NO: 4943762 - DNA, 25 bp, Homo sapien
taaacgcttgttgagagccttccca

SEQ ID NO: 4943763 - DNA, 25 bp, Homo sapien
aacgcttgttgagagccttcccact

SEQ ID NO: 4943764 - DNA, 25 bp, Homo sapien
agcctgaggaacagtccgcacccct

SEQ ID NO: 4943765 - DNA, 25 bp, Homo sapien
tcacggcctggggaatggtccacac

SEQ ID NO: 4943766 - DNA, 25 bp, Homo sapien
tcctcacggcctggggaatggtcca

SEQ ID NO: 4943767 - DNA, 25 bp, Homo sapien
catcctcacggcctggggaacagtc

SEQ ID NO: 4943768 - DNA, 25 bp, Homo sapien
gattctccggccttgttgctgtttc

SEQ ID NO: 4943769 - DNA, 25 bp, Homo sapien
gatgcagggctgacatgctatggtt

SEQ ID NO: 4943770 - DNA, 25 bp, Homo sapien
ttccgtgtgttatcaggtgacgaga

SEQ ID NO: 4943771 - DNA, 25 bp, Homo sapien
tgtttcgaggagatcttgggtgacc

SEQ ID NO: 4943772 - DNA, 25 bp, Homo sapien
gcgtgcgcgtctctggactggtcac

SEQ ID NO: 4943773 - DNA, 25 bp, Homo sapien
ccgccagtcgtttctggatctgtga

SEQ ID NO: 4943774 - DNA, 25 bp, Homo sapien
aaggtgttacagctcttctctctgg

SEQ ID NO: 4943775 - DNA, 25 bp, Homo sapien
catggcgctgggtctcaaggtgtta

SEQ ID NO: 4943776 - DNA, 25 bp, Homo sapien
agactgaggcaaggtagcacaagag

SEQ ID NO: 4943777 - DNA, 25 bp, Homo sapien
aagtatggagaggtagggctcccca

SEQ ID NO: 4943778 - DNA, 25 bp, Homo sapien
tgcagagagagtcgataggtgccct

SEQ ID NO: 4943779 - DNA, 25 bp, Homo sapien
cgaacaggtgtacccggaacaggct

SEQ ID NO: 4943780 - DNA, 25 bp, Homo sapien
catgtagcggtgtttggtgcagctc

SEQ ID NO: 4943781 - DNA, 25 bp, Homo sapien
tgtagcggtgtttggtgcagctcca

SEQ ID NO: 4943782 - DNA, 25 bp, Homo sapien
gtgcatgtagcggtgtttggtgcag

SEQ ID NO: 4943783 - DNA, 25 bp, Homo sapien
gtagcggtgtttggtgcagctccat

SEQ ID NO: 4943784 - DNA, 25 bp, Homo sapien
ttgacatctagaggtggctgtggtt

SEQ ID NO: 4943785 - DNA, 25 bp, Homo sapien
gtggctgtggttggatgttcgggta

SEQ ID NO: 4943786 - DNA, 25 bp, Homo sapien
tacacggaattgcaaacttgattag

SEQ ID NO: 4943787 - DNA, 25 bp, Homo sapien
taggagatcctttgtcaatgttgac

SEQ ID NO: 4943788 - DNA, 25 bp, Homo sapien
ctgtgagcttggatggccaccgtgt

SEQ ID NO: 4943789 - DNA, 25 bp, Homo sapien
tctgtttgtttgtgcacggtgcctc

SEQ ID NO: 4943790 - DNA, 25 bp, Homo sapien
tggtcgtgaccctgatttctgtttg

SEQ ID NO: 4943791 - DNA, 25 bp, Homo sapien
caccgtgtagaaggcatcgctgtca

SEQ ID NO: 4943792 - DNA, 25 bp, Homo sapien
tctgcaagctttgtctggtaagtgt

SEQ ID NO: 4943793 - DNA, 25 bp, Homo sapien
ctcctggtggttccgcctgtttggg

SEQ ID NO: 4943794 - DNA, 25 bp, Homo sapien
gctgacctcctggtggttccgcctg

SEQ ID NO: 4943795 - DNA, 25 bp, Homo sapien
tggttccgcctgtttgggttcactg

SEQ ID NO: 4943796 - DNA, 25 bp, Homo sapien
agcctccagccgcaattcactggag

SEQ ID NO: 4943797 - DNA, 25 bp, Homo sapien
gcattgtcccctggcatctcactcc

SEQ ID NO: 4943798 - DNA, 25 bp, Homo sapien
tcctttctgcccactggtttggtgg

SEQ ID NO: 4943799 - DNA, 25 bp, Homo sapien
tggagcaccccgcattgtcccctgg

SEQ ID NO: 4943800 - DNA, 25 bp, Homo sapien
tctttggtggcctacgtgttcctgt

SEQ ID NO: 4943801 - DNA, 25 bp, Homo sapien
tctgtgcttcactcggtcatgctga

SEQ ID NO: 4943802 - DNA, 25 bp, Homo sapien
ctgtgtcccagctacgtttgggatt

SEQ ID NO: 4943803 - DNA, 25 bp, Homo sapien
agaattagctgggagccctgccttc

SEQ ID NO: 4943804 - DNA, 25 bp, Homo sapien
ataaatgccgagatgtaaaggacac

SEQ ID NO: 4943805 - DNA, 25 bp, Homo sapien
ctcagaataaatgccgagatgtaaa

SEQ ID NO: 4943806 - DNA, 25 bp, Homo sapien
agaataaatgccgagatgtaaagga

SEQ ID NO: 4943807 - DNA, 25 bp, Homo sapien
actcagaataaatgccgagatgtaa

SEQ ID NO: 4943808 - DNA, 25 bp, Homo sapien
taaatttagacaccgaatcctgcag

SEQ ID NO: 4943809 - DNA, 25 bp, Homo sapien
agaagatatcggcttggtcctgggc

SEQ ID NO: 4943810 - DNA, 25 bp, Homo sapien
tgcagccatcgggtgagaagatatc

SEQ ID NO: 4943811 - DNA, 25 bp, Homo sapien
cctgtggagtagacgctgtgcagcc

SEQ ID NO: 4943812 - DNA, 25 bp, Homo sapien
aataaagcccgagctggagaacgcg

SEQ ID NO: 4943813 - DNA, 25 bp, Homo sapien
cctgagatctcctggcaagcgttcg

SEQ ID NO: 4943814 - DNA, 25 bp, Homo sapien
tgcaggccagcgtcttgtgggaata

SEQ ID NO: 4943815 - DNA, 25 bp, Homo sapien
ctcctggcaagcgttcgaggcctgg

SEQ ID NO: 4943816 - DNA, 25 bp, Homo sapien
gaattaaatttatgcagactcctga

SEQ ID NO: 4943817 - DNA, 25 bp, Homo sapien
taaattagctactctgtgtggatcc

SEQ ID NO: 4943818 - DNA, 25 bp, Homo sapien
ttacaataatttaagggatgctggc

SEQ ID NO: 4943819 - DNA, 25 bp, Homo sapien
gactcctgatgatgtcctaaacata

SEQ ID NO: 4943820 - DNA, 25 bp, Homo sapien
tctggaggactttatgctgagcgaa

SEQ ID NO: 4943821 - DNA, 25 bp, Homo sapien
cccaggcctggtcttaggatggatg

SEQ ID NO: 4943822 - DNA, 25 bp, Homo sapien
agcagagagtaccatggtggttccc

SEQ ID NO: 4943823 - DNA, 25 bp, Homo sapien
ggaatctaaaacattgagctcacag

SEQ ID NO: 4943824 - DNA, 25 bp, Homo sapien
gggcacttccccgtattttgcactc

SEQ ID NO: 4943825 - DNA, 25 bp, Homo sapien
acacggacgccacgtagatcctggg

SEQ ID NO: 4943826 - DNA, 25 bp, Homo sapien
tctgtccttggacacggacgccacg

SEQ ID NO: 4943827 - DNA, 25 bp, Homo sapien
tgctatcttgttgctttgtgtgatg

SEQ ID NO: 4943828 - DNA, 25 bp, Homo sapien
gcctgggaaccatgtctctgggtcc

SEQ ID NO: 4943829 - DNA, 25 bp, Homo sapien
tctgtgttggaagtcagtgccaggc

SEQ ID NO: 4943830 - DNA, 25 bp, Homo sapien
gggccgtgccggtatctctcatgga

SEQ ID NO: 4943831 - DNA, 25 bp, Homo sapien
tgtcttgtccaggaaacgtgcgtgg

SEQ ID NO: 4943832 - DNA, 25 bp, Homo sapien
agttggccttggtccatgtggccat

SEQ ID NO: 4943833 - DNA, 25 bp, Homo sapien
ggctggagagttggccttggtccat

SEQ ID NO: 4943834 - DNA, 25 bp, Homo sapien
tggagagttggccttggtccatgtg

SEQ ID NO: 4943835 - DNA, 25 bp, Homo sapien
gagtgctgggggtcgtgtctctgtg

SEQ ID NO: 4943836 - DNA, 25 bp, Homo sapien
caccgaggccatgcgtcttctagaa

SEQ ID NO: 4943837 - DNA, 25 bp, Homo sapien
gagacaccataaatcattccccagg

SEQ ID NO: 4943838 - DNA, 25 bp, Homo sapien
tattctcctcatgcacacactttgt

SEQ ID NO: 4943839 - DNA, 25 bp, Homo sapien
acactttgtgcatcctgccaccgag

SEQ ID NO: 4943840 - DNA, 25 bp, Homo sapien
gtctcgctgtgggtgagtcacctga

SEQ ID NO: 4943841 - DNA, 25 bp, Homo sapien
acagtctcgctgtgggtgagtcacc

SEQ ID NO: 4943842 - DNA, 25 bp, Homo sapien
gcgtctcaggctgtctggaccagct

SEQ ID NO: 4943843 - DNA, 25 bp, Homo sapien
cacgtgcagtgaccgttctcttggc

SEQ ID NO: 4943844 - DNA, 25 bp, Homo sapien
cctgcaagttcggaagtggaaccga

SEQ ID NO: 4943845 - DNA, 25 bp, Homo sapien
aagtgagacacccttgcctgcaagt

SEQ ID NO: 4943846 - DNA, 25 bp, Homo sapien
gaagtactttgcacgtccagaggaa

SEQ ID NO: 4943847 - DNA, 25 bp, Homo sapien
tttacaagatgacctgaagtgagac

SEQ ID NO: 4943848 - DNA, 25 bp, Homo sapien
tgagaccacacgcttggcgctgatg

SEQ ID NO: 4943849 - DNA, 25 bp, Homo sapien
ggccttcaggccctttaacgatgaa

SEQ ID NO: 4943850 - DNA, 25 bp, Homo sapien
caggaagggtttgtgtaaccagagc

SEQ ID NO: 4943851 - DNA, 25 bp, Homo sapien
taatgcagtgtgacttagggttcac

SEQ ID NO: 4943852 - DNA, 25 bp, Homo sapien
catgcagcgtctggttccctctcat

SEQ ID NO: 4943853 - DNA, 25 bp, Homo sapien
acatccaaagcccatgcagcgtctg

SEQ ID NO: 4943854 - DNA, 25 bp, Homo sapien
tgagacgcttcatccgcagggcaca

SEQ ID NO: 4943855 - DNA, 25 bp, Homo sapien
ctctagtcacggagacatgattggg

SEQ ID NO: 4943856 - DNA, 25 bp, Homo sapien
tccacaggaacacttccccagctca

SEQ ID NO: 4943857 - DNA, 25 bp, Homo sapien
gcagactgccgcgttccacaggaac

SEQ ID NO: 4943858 - DNA, 25 bp, Homo sapien
tgctcgttatgcagccgcagcagac

SEQ ID NO: 4943859 - DNA, 25 bp, Homo sapien
ctcacattcgtcagggaccctctgt

SEQ ID NO: 4943860 - DNA, 25 bp, Homo sapien
cgtctcaggtgtctggatttttgca

SEQ ID NO: 4943861 - DNA, 25 bp, Homo sapien
tgaagccgagatacacgggaagttg

SEQ ID NO: 4943862 - DNA, 25 bp, Homo sapien
tgactcagggaagagtggacgtctc

SEQ ID NO: 4943863 - DNA, 25 bp, Homo sapien
gagtgagcgttgaagccgagataca

SEQ ID NO: 4943864 - DNA, 25 bp, Homo sapien
tcttccagtggacggcgagacgttc

SEQ ID NO: 4943865 - DNA, 25 bp, Homo sapien
tgctgttctgtacctgtcacggcta

SEQ ID NO: 4943866 - DNA, 25 bp, Homo sapien
tctcctctgagaacgtgcatcttcc

SEQ ID NO: 4943867 - DNA, 25 bp, Homo sapien
gacagtctgtgggattgtcctggtc

SEQ ID NO: 4943868 - DNA, 25 bp, Homo sapien
tatgcttaaccctgcattcagaatg

SEQ ID NO: 4943869 - DNA, 25 bp, Homo sapien
ttgacataactagttaggatattcg

SEQ ID NO: 4943870 - DNA, 25 bp, Homo sapien
tgccaatatgcttaaccctgcattc

SEQ ID NO: 4943871 - DNA, 25 bp, Homo sapien
ctgaagttgacataactagttagga

SEQ ID NO: 4943872 - DNA, 25 bp, Homo sapien
ccagggctacgcagccccttgcctt

SEQ ID NO: 4943873 - DNA, 25 bp, Homo sapien
tgtagaacccagggctacgcagccc

SEQ ID NO: 4943874 - DNA, 25 bp, Homo sapien
gaacccagggctacgcagccccttg

SEQ ID NO: 4943875 - DNA, 25 bp, Homo sapien
cagggctacgcagccccttgccttc

SEQ ID NO: 4943876 - DNA, 25 bp, Homo sapien
agcccttcttactgggctgctgaaa

SEQ ID NO: 4943877 - DNA, 25 bp, Homo sapien
atttgttctctggaacccttgccag

SEQ ID NO: 4943878 - DNA, 25 bp, Homo sapien
cataatgtatgtaaaacccgcaatt

SEQ ID NO: 4943879 - DNA, 25 bp, Homo sapien
tgctggaattcatttggcctctgtc

SEQ ID NO: 4943880 - DNA, 25 bp, Homo sapien
tgcccctcgggagtgttggaaacag

SEQ ID NO: 4943881 - DNA, 25 bp, Homo sapien
gctgcccctcgggagtgttggaaac

SEQ ID NO: 4943882 - DNA, 25 bp, Homo sapien
ccctcgggagtgttggaaacagctt

SEQ ID NO: 4943883 - DNA, 25 bp, Homo sapien
gcccctcgggagtgttggaaacagc

SEQ ID NO: 4943884 - DNA, 25 bp, Homo sapien
ggaaaccctgatggccttcgtagga

SEQ ID NO: 4943885 - DNA, 25 bp, Homo sapien
caggcgcaggacactttgctgtggc

SEQ ID NO: 4943886 - DNA, 25 bp, Homo sapien
ccatctgtgggtggctttcatgcca

SEQ ID NO: 4943887 - DNA, 25 bp, Homo sapien
tccatgctgaggtaccgactgcagc

SEQ ID NO: 4943888 - DNA, 25 bp, Homo sapien
gttcatcacacacgcggctccagag

SEQ ID NO: 4943889 - DNA, 25 bp, Homo sapien
tgttcaccaccgcatgtggctcctg

SEQ ID NO: 4943890 - DNA, 25 bp, Homo sapien
tcctgagtctgacccctgcgctgta

SEQ ID NO: 4943891 - DNA, 25 bp, Homo sapien
tacacggcactgttcatcacacacg

SEQ ID NO: 4943892 - DNA, 25 bp, Homo sapien
ttctcgccagactccctgatgaggt

SEQ ID NO: 4943893 - DNA, 25 bp, Homo sapien
cagctgtaacatctggaccagtgga

SEQ ID NO: 4943894 - DNA, 25 bp, Homo sapien
tgatgaggtcagtcacgcgctgaga

SEQ ID NO: 4943895 - DNA, 25 bp, Homo sapien
caggaagtgtttaccagttgtccac

SEQ ID NO: 4943896 - DNA, 25 bp, Homo sapien
ttccagcctctgttgttgaactact

SEQ ID NO: 4943897 - DNA, 25 bp, Homo sapien
tttccagcctctgttgttgaactac

SEQ ID NO: 4943898 - DNA, 25 bp, Homo sapien
caggggcgtttgtttctgctggtca

SEQ ID NO: 4943899 - DNA, 25 bp, Homo sapien
ttatatttgtgtcgtgatgttgcca

SEQ ID NO: 4943900 - DNA, 25 bp, Homo sapien
atgtgggtgcccaagtcctgcgctg

SEQ ID NO: 4943901 - DNA, 25 bp, Homo sapien
tcctgcgctgcatgggaatcgacct

SEQ ID NO: 4943902 - DNA, 25 bp, Homo sapien
tgcacttagaataagcactctggtt

SEQ ID NO: 4943903 - DNA, 25 bp, Homo sapien
aatagttttcgtcttatagtttgca

SEQ ID NO: 4943904 - DNA, 25 bp, Homo sapien
gtttttattgcctcagacagtcttt

SEQ ID NO: 4943905 - DNA, 25 bp, Homo sapien
gtgatttatattccacacaatcaaa

SEQ ID NO: 4943906 - DNA, 25 bp, Homo sapien
ccaggtgccggttactctccaggta

SEQ ID NO: 4943907 - DNA, 25 bp, Homo sapien
tgctccagatgtgccaggcgtggct

SEQ ID NO: 4943908 - DNA, 25 bp, Homo sapien
tcagaagctgtaggatgctcacggg

SEQ ID NO: 4943909 - DNA, 25 bp, Homo sapien
gcacatattagttacacgcccgtgg

SEQ ID NO: 4943910 - DNA, 25 bp, Homo sapien
ctcattgtgcatggtcggctcggta

SEQ ID NO: 4943911 - DNA, 25 bp, Homo sapien
ctcaatgtgcgtggtcggctcagtt

SEQ ID NO: 4943912 - DNA, 25 bp, Homo sapien
ccatgtggaaatgcgtggtcagctc

SEQ ID NO: 4943913 - DNA, 25 bp, Homo sapien
tcgctgcacgtgttcggctcggtgt

SEQ ID NO: 4943914 - DNA, 25 bp, Homo sapien
tctcaccatgcggaagaatgtcggg

SEQ ID NO: 4943915 - DNA, 25 bp, Homo sapien
gaatgtcgggtaaccatcagtgcct

SEQ ID NO: 4943916 - DNA, 25 bp, Homo sapien
ggaaatgtgtactccgagccccttg

SEQ ID NO: 4943917 - DNA, 25 bp, Homo sapien
gctgtcgaggtaattctgtgtcccc

SEQ ID NO: 4943918 - DNA, 25 bp, Homo sapien
atttgcagagcagaacggccaggga

SEQ ID NO: 4943919 - DNA, 25 bp, Homo sapien
tgcagagcagaacggccagggagtg

SEQ ID NO: 4943920 - DNA, 25 bp, Homo sapien
tgatttgcagagcagaacggccagg

SEQ ID NO: 4943921 - DNA, 25 bp, Homo sapien
ctgatttgcagagcagaacggccag

SEQ ID NO: 4943922 - DNA, 25 bp, Homo sapien
ctgagtgatgccttgtccggctttc

SEQ ID NO: 4943923 - DNA, 25 bp, Homo sapien
gagtgatgccttgtccggctttccc

SEQ ID NO: 4943924 - DNA, 25 bp, Homo sapien
tgagtgatgccttgtccggctttcc

SEQ ID NO: 4943925 - DNA, 25 bp, Homo sapien
ccctggccttcgtaggacaaaggat

SEQ ID NO: 4943926 - DNA, 25 bp, Homo sapien
gctgagagacccctgtgacagtgtt

SEQ ID NO: 4943927 - DNA, 25 bp, Homo sapien
cttctctgtggaaagctccccctgg

SEQ ID NO: 4943928 - DNA, 25 bp, Homo sapien
tgagtgataacgaaaactaggagga

SEQ ID NO: 4943929 - DNA, 25 bp, Homo sapien
aatcggcagccagcaccgttgccat

SEQ ID NO: 4943930 - DNA, 25 bp, Homo sapien
ttggacttccgggtaggacgctgga

SEQ ID NO: 4943931 - DNA, 25 bp, Homo sapien
cagccgtcggataggccgttggtca

SEQ ID NO: 4943932 - DNA, 25 bp, Homo sapien
cctgccataatagcccgggaatcgg

SEQ ID NO: 4943933 - DNA, 25 bp, Homo sapien
gagacactgccgagctggacactgt

SEQ ID NO: 4943934 - DNA, 25 bp, Homo sapien
tccagcctgagcgtggccacgtcgt

SEQ ID NO: 4943935 - DNA, 25 bp, Homo sapien
gtctgagtgaggacagttctccacc

SEQ ID NO: 4943936 - DNA, 25 bp, Homo sapien
cagtcaggtatgagcgaggacagtt

SEQ ID NO: 4943937 - DNA, 25 bp, Homo sapien
tagggcaggtcttcatggtgaaaaa

SEQ ID NO: 4943938 - DNA, 25 bp, Homo sapien
gcctccacacgcggcacctccgtcc

SEQ ID NO: 4943939 - DNA, 25 bp, Homo sapien
ttgtagggcaggtcttcatggtgaa

SEQ ID NO: 4943940 - DNA, 25 bp, Homo sapien
ctccacacgcggcacctccgtccct

SEQ ID NO: 4943941 - DNA, 25 bp, Homo sapien
tttgtatgtgacgtccttgatgacc

SEQ ID NO: 4943942 - DNA, 25 bp, Homo sapien
gaggtctttgtatgtgacgtccttg

SEQ ID NO: 4943943 - DNA, 25 bp, Homo sapien
gttgaggtctttgtatgtgacgtcc

SEQ ID NO: 4943944 - DNA, 25 bp, Homo sapien
actggttgaggtctttgtatgtgac

SEQ ID NO: 4943945 - DNA, 25 bp, Homo sapien
ccatcctggatagagctgcacttca

SEQ ID NO: 4943946 - DNA, 25 bp, Homo sapien
cagttgaccagtaacactgccggaa

SEQ ID NO: 4943947 - DNA, 25 bp, Homo sapien
gcttgttccacgtcaccaaggcggc

SEQ ID NO: 4943948 - DNA, 25 bp, Homo sapien
tgattccctggagctaaatggtagt

SEQ ID NO: 4943949 - DNA, 25 bp, Homo sapien
gccatagtagctgctgcaaaagtaa

SEQ ID NO: 4943950 - DNA, 25 bp, Homo sapien
caattgctctggccatagtagctgc

SEQ ID NO: 4943951 - DNA, 25 bp, Homo sapien
tcatccagcaggctatgcaattgct

SEQ ID NO: 4943952 - DNA, 25 bp, Homo sapien
gtagctgctgcaaaagtaaaaatga

SEQ ID NO: 4943953 - DNA, 25 bp, Homo sapien
ctccggacatggtctattggtctgt

SEQ ID NO: 4943954 - DNA, 25 bp, Homo sapien
cctcactcataaccgtgggctggtg

SEQ ID NO: 4943955 - DNA, 25 bp, Homo sapien
cttttgacaccagccagccgtttgt

SEQ ID NO: 4943956 - DNA, 25 bp, Homo sapien
gtctgtatatgtcggcctgagtggc

SEQ ID NO: 4943957 - DNA, 25 bp, Homo sapien
gcgtgtctcccgtggaagctgcagc

SEQ ID NO: 4943958 - DNA, 25 bp, Homo sapien
tctgggttgttgacgttgcgtgtct

SEQ ID NO: 4943959 - DNA, 25 bp, Homo sapien
tcttgtgggtggacgtctgggttgt

SEQ ID NO: 4943960 - DNA, 25 bp, Homo sapien
tgttgacgttgcgtgtctcccgtgg

SEQ ID NO: 4943961 - DNA, 25 bp, Homo sapien
tcttatagcctttgccgtcagcgat

SEQ ID NO: 4943962 - DNA, 25 bp, Homo sapien
cctggcaccttgaggcctcttatag

SEQ ID NO: 4943963 - DNA, 25 bp, Homo sapien
tctgctgatgtgcaatatgtgtgct

SEQ ID NO: 4943964 - DNA, 25 bp, Homo sapien
ccacgtggatgcgtagggtccgcct

SEQ ID NO: 4943965 - DNA, 25 bp, Homo sapien
ctccctgcgctcaggagagtcgagc

SEQ ID NO: 4943966 - DNA, 25 bp, Homo sapien
tccctgcgctcaggagagtcgagct

SEQ ID NO: 4943967 - DNA, 25 bp, Homo sapien
cctgcgctcaggagagtcgagctgg

SEQ ID NO: 4943968 - DNA, 25 bp, Homo sapien
gagagtcgagctgggagcctagggc

SEQ ID NO: 4943969 - DNA, 25 bp, Homo sapien
tgttgcgtagagacgtgtgtctccg

SEQ ID NO: 4943970 - DNA, 25 bp, Homo sapien
tgcgtagtaactgcgatgaattccc

SEQ ID NO: 4943971 - DNA, 25 bp, Homo sapien
aagaaaacaagcagcgtcctgtgtg

SEQ ID NO: 4943972 - DNA, 25 bp, Homo sapien
cagatcctctccgaatgcgtagtaa

SEQ ID NO: 4943973 - DNA, 25 bp, Homo sapien
actggcagggctttggttaacggtg

SEQ ID NO: 4943974 - DNA, 25 bp, Homo sapien
ccggcagcttccttcttagcagagg

SEQ ID NO: 4943975 - DNA, 25 bp, Homo sapien
gcctctgaagagcaccggcagcttc

SEQ ID NO: 4943976 - DNA, 25 bp, Homo sapien
actcgccagacgccctggagcagag

SEQ ID NO: 4943977 - DNA, 25 bp, Homo sapien
gaaaatctctgccatctcgtgctcg

SEQ ID NO: 4943978 - DNA, 25 bp, Homo sapien
agaaccgatgaccacccatccttgt

SEQ ID NO: 4943979 - DNA, 25 bp, Homo sapien
acagccacccatccttcggaaccca

SEQ ID NO: 4943980 - DNA, 25 bp, Homo sapien
atgaccacccatccttgcccattag

SEQ ID NO: 4943981 - DNA, 25 bp, Homo sapien
catccttgtccattaggacccatga

SEQ ID NO: 4943982 - DNA, 25 bp, Homo sapien
catttcaatacggttgtgcaccata

SEQ ID NO: 4943983 - DNA, 25 bp, Homo sapien
agagcagccccacatttcaatacgg

SEQ ID NO: 4943984 - DNA, 25 bp, Homo sapien
tgtgcaccatatcccggtgttgtgt

SEQ ID NO: 4943985 - DNA, 25 bp, Homo sapien
tagaaaagagcagccccacatttca

SEQ ID NO: 4943986 - DNA, 25 bp, Homo sapien
gaaaaacacgaaggagatgttcatg

SEQ ID NO: 4943987 - DNA, 25 bp, Homo sapien
ttctggtagaaaaacacgaaggaga

SEQ ID NO: 4943988 - DNA, 25 bp, Homo sapien
caaaacaatagatctctgctgagca

SEQ ID NO: 4943989 - DNA, 25 bp, Homo sapien
ggccacttttgtggacagtatgagc

SEQ ID NO: 4943990 - DNA, 25 bp, Homo sapien
atcaggtgttgtctccagggcactt

SEQ ID NO: 4943991 - DNA, 25 bp, Homo sapien
cccctaaggccggtcagctttgcct

SEQ ID NO: 4943992 - DNA, 25 bp, Homo sapien
tgacgtcatcctggaatcaggtgtt

SEQ ID NO: 4943993 - DNA, 25 bp, Homo sapien
catcctggaatcaggtgttgtctcc

SEQ ID NO: 4943994 - DNA, 25 bp, Homo sapien
gaacattggtgccaggattgcgatg

SEQ ID NO: 4943995 - DNA, 25 bp, Homo sapien
tttgcgcccttgtctgcgggcagaa

SEQ ID NO: 4943996 - DNA, 25 bp, Homo sapien
caaggtgcttctcgctttgcgccct

SEQ ID NO: 4943997 - DNA, 25 bp, Homo sapien
tctgcgggcagaaggttttgtgaac

SEQ ID NO: 4943998 - DNA, 25 bp, Homo sapien
aggttgccttgtggtgcggcttcca

SEQ ID NO: 4943999 - DNA, 25 bp, Homo sapien
atacacagggttcgggccccagcgg

SEQ ID NO: 4944000 - DNA, 25 bp, Homo sapien
cacagggttcgggccccaggccgat

SEQ ID NO: 4944001 - DNA, 25 bp, Homo sapien
cccagcgggagtcactgtcgctcag

SEQ ID NO: 4944002 - DNA, 25 bp, Homo sapien
agcccatcgtaggagtcacacatcc

SEQ ID NO: 4944003 - DNA, 25 bp, Homo sapien
gcaagggcgggagacccaggagccc

SEQ ID NO: 4944004 - DNA, 25 bp, Homo sapien
tgcaagggcgggagacccaggagcc

SEQ ID NO: 4944005 - DNA, 25 bp, Homo sapien
aggagcccatcgtaggagtcacaca

SEQ ID NO: 4944006 - DNA, 25 bp, Homo sapien
tgggtgccaggaaaggaggtgaaaa

SEQ ID NO: 4944007 - DNA, 25 bp, Homo sapien
gctttgggtgccaggaaaggaggtg

SEQ ID NO: 4944008 - DNA, 25 bp, Homo sapien
ggtgccaggaaaggaggtgaaaatc

SEQ ID NO: 4944009 - DNA, 25 bp, Homo sapien
tttgggtgccaggaaaggaggtgaa

SEQ ID NO: 4944010 - DNA, 25 bp, Homo sapien
gcagacccatgactagagcccaggt

SEQ ID NO: 4944011 - DNA, 25 bp, Homo sapien
caggggcagacccatgactagagcc

SEQ ID NO: 4944012 - DNA, 25 bp, Homo sapien
cccatgactagagcccaggttccag

SEQ ID NO: 4944013 - DNA, 25 bp, Homo sapien
aggtgcacgcagcagcaaggcgtgg

SEQ ID NO: 4944014 - DNA, 25 bp, Homo sapien
tgactggacattcgtagccgctgcc

SEQ ID NO: 4944015 - DNA, 25 bp, Homo sapien
tggctttctcctctcgtacgtgatg

SEQ ID NO: 4944016 - DNA, 25 bp, Homo sapien
tacgtgatgaaactggctgccgtga

SEQ ID NO: 4944017 - DNA, 25 bp, Homo sapien
tttgaggtgtgcgtggcccctgcac

SEQ ID NO: 4944018 - DNA, 25 bp, Homo sapien
tgtgaactgggatgccgcagtatac

SEQ ID NO: 4944019 - DNA, 25 bp, Homo sapien
tcaagtcaacgtgacaggtgtgaac

SEQ ID NO: 4944020 - DNA, 25 bp, Homo sapien
gatgccgcagtataccaagtccagt

SEQ ID NO: 4944021 - DNA, 25 bp, Homo sapien
gggaccaaatccacgtactgtgaca

SEQ ID NO: 4944022 - DNA, 25 bp, Homo sapien
tcaggaaaggtagtgccatctgcca

SEQ ID NO: 4944023 - DNA, 25 bp, Homo sapien
caccaacagcacttgtgcagaggca

SEQ ID NO: 4944024 - DNA, 25 bp, Homo sapien
tgagctggaacaagtcgtctgtgat

SEQ ID NO: 4944025 - DNA, 25 bp, Homo sapien
tgaaaaccacatatgtcaggaaagg

SEQ ID NO: 4944026 - DNA, 25 bp, Homo sapien
atcgaacgatgcgtccgctgctggc

SEQ ID NO: 4944027 - DNA, 25 bp, Homo sapien
cacatatcggtttggcatcgaacga

SEQ ID NO: 4944028 - DNA, 25 bp, Homo sapien
acttgctggacggaagcttccagaa

SEQ ID NO: 4944029 - DNA, 25 bp, Homo sapien
taacacgggttcctgacttgctgga

SEQ ID NO: 4944030 - DNA, 25 bp, Homo sapien
taaacggagccgtaattgcagtcat

SEQ ID NO: 4944031 - DNA, 25 bp, Homo sapien
gatgaaaatggtcctccagcaggat

SEQ ID NO: 4944032 - DNA, 25 bp, Homo sapien
gggctgacagctccattgtaacatc

SEQ ID NO: 4944033 - DNA, 25 bp, Homo sapien
ccagtcagttgtctgttaaacggag

SEQ ID NO: 4944034 - DNA, 25 bp, Homo sapien
tgtttgagcaccacagtctcttggc

SEQ ID NO: 4944035 - DNA, 25 bp, Homo sapien
aaggcgctgtgagaagggtaggtac

SEQ ID NO: 4944036 - DNA, 25 bp, Homo sapien
ccaaggtgatgttactgtgagctgc

SEQ ID NO: 4944037 - DNA, 25 bp, Homo sapien
ggtaggtacaagtgccaggctgctt

SEQ ID NO: 4944038 - DNA, 25 bp, Homo sapien
cctggagacgtccaggtacctggat

SEQ ID NO: 4944039 - DNA, 25 bp, Homo sapien
ctggagacgtccaggtacctggatg

SEQ ID NO: 4944040 - DNA, 25 bp, Homo sapien
acgtccaggtacctggatgggttca

SEQ ID NO: 4944041 - DNA, 25 bp, Homo sapien
acctggagacgtccaggtacctgga

SEQ ID NO: 4944042 - DNA, 25 bp, Homo sapien
acgtccaggtacctggatgggttca

SEQ ID NO: 4944043 - DNA, 25 bp, Homo sapien
agacgtccaggtacctggatgggtt

SEQ ID NO: 4944044 - DNA, 25 bp, Homo sapien
ctggagacgtccaggtacctggatg

SEQ ID NO: 4944045 - DNA, 25 bp, Homo sapien
acctggagacgtccaggtacctgga

SEQ ID NO: 4944046 - DNA, 25 bp, Homo sapien
cctggtgtggtcgagcacgaagggt

SEQ ID NO: 4944047 - DNA, 25 bp, Homo sapien
gccgtggggaggacagaggcgcctc

SEQ ID NO: 4944048 - DNA, 25 bp, Homo sapien
cgaggtacacgggaccctggtgtgg

SEQ ID NO: 4944049 - DNA, 25 bp, Homo sapien
tgggtggtcccagtatgaccgccgt

SEQ ID NO: 4944050 - DNA, 25 bp, Homo sapien
gtgatggcccacgtcggtggccggg

SEQ ID NO: 4944051 - DNA, 25 bp, Homo sapien
ggagtgatggcccacgtcggtggcc

SEQ ID NO: 4944052 - DNA, 25 bp, Homo sapien
gtgtgggagtgatggcccacgtcgg

SEQ ID NO: 4944053 - DNA, 25 bp, Homo sapien
tgtgggagtgatggcccacgtcggt

SEQ ID NO: 4944054 - DNA, 25 bp, Homo sapien
aagtgatggtccatgttggtggctg

SEQ ID NO: 4944055 - DNA, 25 bp, Homo sapien
gaagtgatggtccatgttggtggct

SEQ ID NO: 4944056 - DNA, 25 bp, Homo sapien
gtgatggtccatgttggtggctggc

SEQ ID NO: 4944057 - DNA, 25 bp, Homo sapien
agtgtggagtgatggtccacatcgg

SEQ ID NO: 4944058 - DNA, 25 bp, Homo sapien
agtgatggtccacgtcggtggccgg

SEQ ID NO: 4944059 - DNA, 25 bp, Homo sapien
tggagtgatggtccacatcggtggc

SEQ ID NO: 4944060 - DNA, 25 bp, Homo sapien
gtgtggagtgatggtccacgtcggt

SEQ ID NO: 4944061 - DNA, 25 bp, Homo sapien
gtgatggtccacgtcggtggccggg

SEQ ID NO: 4944062 - DNA, 25 bp, Homo sapien
tggagtgatggtccacgtcggtggc

SEQ ID NO: 4944063 - DNA, 25 bp, Homo sapien
tgtgggagtgatggcccacgtcggt

SEQ ID NO: 4944064 - DNA, 25 bp, Homo sapien
gtgtggagtgatggtccacgtcggt

SEQ ID NO: 4944065 - DNA, 25 bp, Homo sapien
gtctgatggtccacgtcggtggcca

SEQ ID NO: 4944066 - DNA, 25 bp, Homo sapien
ctttgagatcagtgtgggagtctga

SEQ ID NO: 4944067 - DNA, 25 bp, Homo sapien
gaagacatttgagatcagtgtggag

SEQ ID NO: 4944068 - DNA, 25 bp, Homo sapien
agtctgatggcccacgtcggtggct

SEQ ID NO: 4944069 - DNA, 25 bp, Homo sapien
aagacatttgagatcagtgtggagt

SEQ ID NO: 4944070 - DNA, 25 bp, Homo sapien
tctgatagtccacgtcggtggctcg

SEQ ID NO: 4944071 - DNA, 25 bp, Homo sapien
agtccacgtcggtggctcggaagac

SEQ ID NO: 4944072 - DNA, 25 bp, Homo sapien
gttcagggcgcctgggaagaggact

SEQ ID NO: 4944073 - DNA, 25 bp, Homo sapien
taatggctgagttcagggcgcctgg

SEQ ID NO: 4944074 - DNA, 25 bp, Homo sapien
gacattggatgaatttctcagagag

SEQ ID NO: 4944075 - DNA, 25 bp, Homo sapien
cagccacaatgtaagagcaggaccc

SEQ ID NO: 4944076 - DNA, 25 bp, Homo sapien
cttgaggacacctttggcataaata

SEQ ID NO: 4944077 - DNA, 25 bp, Homo sapien
tgcacacggtcaccaggtatttggc

SEQ ID NO: 4944078 - DNA, 25 bp, Homo sapien
acttggaagaggaaagacgttggtg

SEQ ID NO: 4944079 - DNA, 25 bp, Homo sapien
ctgccgtgtgctcggagacttggaa

SEQ ID NO: 4944080 - DNA, 25 bp, Homo sapien
tccctgtgtctcttagtcactgtca

SEQ ID NO: 4944081 - DNA, 25 bp, Homo sapien
gagcagaggatcctgccgtgtgctc

SEQ ID NO: 4944082 - DNA, 25 bp, Homo sapien
gtccctgcagtcttgatatctgacg

SEQ ID NO: 4944083 - DNA, 25 bp, Homo sapien
ccccgggctgtcacgctggatggca

SEQ ID NO: 4944084 - DNA, 25 bp, Homo sapien
agtgtctttctgagggcccgtgcag

SEQ ID NO: 4944085 - DNA, 25 bp, Homo sapien
tagctgacgtggaagagccagtgtc

SEQ ID NO: 4944086 - DNA, 25 bp, Homo sapien
ctttttaactgcatggttgagaccc

SEQ ID NO: 4944087 - DNA, 25 bp, Homo sapien
catttgccaagggtagcttttgaag

SEQ ID NO: 4944088 - DNA, 25 bp, Homo sapien
ctctggtgtggtcaagcggcgtcat

SEQ ID NO: 4944089 - DNA, 25 bp, Homo sapien
gtaaaagttgctggcgtgcaaggcc

SEQ ID NO: 4944090 - DNA, 25 bp, Homo sapien
cagcagtaaatgagtcccaggacac

SEQ ID NO: 4944091 - DNA, 25 bp, Homo sapien
cccttcatcggtgggcccgtctgcc

SEQ ID NO: 4944092 - DNA, 25 bp, Homo sapien
tgcatttcacagcagtaaatgagtc

SEQ ID NO: 4944093 - DNA, 25 bp, Homo sapien
atttcacagcagtaaatgagtccca

SEQ ID NO: 4944094 - DNA, 25 bp, Homo sapien
tcaaagaaggtccatgagctgccgg

SEQ ID NO: 4944095 - DNA, 25 bp, Homo sapien
tgcaacagacggctctctagagctg

SEQ ID NO: 4944096 - DNA, 25 bp, Homo sapien
gagattcatgaccacgtaaaaggtg

SEQ ID NO: 4944097 - DNA, 25 bp, Homo sapien
tgaaaagaggagcttctgtgccgtg

SEQ ID NO: 4944098 - DNA, 25 bp, Homo sapien
tttgagccacgtgccacattgtgtt

SEQ ID NO: 4944099 - DNA, 25 bp, Homo sapien
gggttttgagccacgtgccacattg

SEQ ID NO: 4944100 - DNA, 25 bp, Homo sapien
cttcaaagtcgtagatgtgggtttt

SEQ ID NO: 4944101 - DNA, 25 bp, Homo sapien
agatgtgggttttgagccacgtgcc

SEQ ID NO: 4944102 - DNA, 25 bp, Homo sapien
caagtatcaggctgcggataccttg

SEQ ID NO: 4944103 - DNA, 25 bp, Homo sapien
gtctcggagcccacacgtgaaggtg

SEQ ID NO: 4944104 - DNA, 25 bp, Homo sapien
ggataccttgcaccgtattggaaag

SEQ ID NO: 4944105 - DNA, 25 bp, Homo sapien
cagaaacagatgtgctgaggtccta

SEQ ID NO: 4944106 - DNA, 25 bp, Homo sapien
tgattttcggaagggtgctttgcag

SEQ ID NO: 4944107 - DNA, 25 bp, Homo sapien
ctgtaaacctttcccgagtgttgat

SEQ ID NO: 4944108 - DNA, 25 bp, Homo sapien
ttctgactccctttcgtggtgcagg

SEQ ID NO: 4944109 - DNA, 25 bp, Homo sapien
tgatgcctgtaaacctttcccgagt

SEQ ID NO: 4944110 - DNA, 25 bp, Homo sapien
cctctttgctgcgtggttttcgtga

SEQ ID NO: 4944111 - DNA, 25 bp, Homo sapien
ggaaacgtttttacagcaatgcggc

SEQ ID NO: 4944112 - DNA, 25 bp, Homo sapien
tgcaatcacagcgatgagaatgaca

SEQ ID NO: 4944113 - DNA, 25 bp, Homo sapien
gagaatgacatggacctccaggtag

SEQ ID NO: 4944114 - DNA, 25 bp, Homo sapien
ctcagtaggtacctcggccacagtc

SEQ ID NO: 4944115 - DNA, 25 bp, Homo sapien
cactgtcgccgtccctcagtggaga

SEQ ID NO: 4944116 - DNA, 25 bp, Homo sapien
taaatacggtttcatggggacacac

SEQ ID NO: 4944117 - DNA, 25 bp, Homo sapien
acagtgtgacacgttctgtactggg

SEQ ID NO: 4944118 - DNA, 25 bp, Homo sapien
cccagatgcataacaggaggtgaat

SEQ ID NO: 4944119 - DNA, 25 bp, Homo sapien
tgttcaaagccaatagcaccgttat

SEQ ID NO: 4944120 - DNA, 25 bp, Homo sapien
cagcatatcgatttgtcagggaaac

SEQ ID NO: 4944121 - DNA, 25 bp, Homo sapien
tacgctggcgtttgcacggctgaaa

SEQ ID NO: 4944122 - DNA, 25 bp, Homo sapien
gagtccagctttgaggttcacctcc

SEQ ID NO: 4944123 - DNA, 25 bp, Homo sapien
cagcacaaatcggagttggaggcga

SEQ ID NO: 4944124 - DNA, 25 bp, Homo sapien
agcacccagcacaaatcggagttgg

SEQ ID NO: 4944125 - DNA, 25 bp, Homo sapien
cagtttttggtgagaacccagagtc

SEQ ID NO: 4944126 - DNA, 25 bp, Homo sapien
tctaggagagtagtatgcacggcca

SEQ ID NO: 4944127 - DNA, 25 bp, Homo sapien
tgagactgcaccatgaacaggacgg

SEQ ID NO: 4944128 - DNA, 25 bp, Homo sapien
tgagccttgctccatacctgggacg

SEQ ID NO: 4944129 - DNA, 25 bp, Homo sapien
catcgatacctgacgtgggagctgg

SEQ ID NO: 4944130 - DNA, 25 bp, Homo sapien
cagtaaaacatgcacgtccttggag

SEQ ID NO: 4944131 - DNA, 25 bp, Homo sapien
ttggagattccatcgccgcaggagt

SEQ ID NO: 4944132 - DNA, 25 bp, Homo sapien
ccttcgtaaggacacagatggttgg

SEQ ID NO: 4944133 - DNA, 25 bp, Homo sapien
caaaacgtctggctgtaactcgcct

SEQ ID NO: 4944134 - DNA, 25 bp, Homo sapien
gtgcagctggccctgatgatgaaga

SEQ ID NO: 4944135 - DNA, 25 bp, Homo sapien
tgtctcactccggaagcctttgaac

SEQ ID NO: 4944136 - DNA, 25 bp, Homo sapien
cagctggccctgatgatgaagacga

SEQ ID NO: 4944137 - DNA, 25 bp, Homo sapien
gatgaagacgacacagatgtctcac

SEQ ID NO: 4944138 - DNA, 25 bp, Homo sapien
gaattccaccaaacaggtaaagatg

SEQ ID NO: 4944139 - DNA, 25 bp, Homo sapien
gcattaccgtggtagctgagcccga

SEQ ID NO: 4944140 - DNA, 25 bp, Homo sapien
cagaatcagatacgttcactggtga

SEQ ID NO: 4944141 - DNA, 25 bp, Homo sapien
ctagttaacccggatgacatggaca

SEQ ID NO: 4944142 - DNA, 25 bp, Homo sapien
aagacgaaaggtgttgcggcctctg

SEQ ID NO: 4944143 - DNA, 25 bp, Homo sapien
atgaagacgaaaggtgttgcggcct

SEQ ID NO: 4944144 - DNA, 25 bp, Homo sapien
gaggaactcgggagtggttgggctc

SEQ ID NO: 4944145 - DNA, 25 bp, Homo sapien
cccagggagttgaggaactcgggag

SEQ ID NO: 4944146 - DNA, 25 bp, Homo sapien
ttgcagacgcagtaccagggcgagt

SEQ ID NO: 4944147 - DNA, 25 bp, Homo sapien
tgcgggaagcaatggctcctgctga

SEQ ID NO: 4944148 - DNA, 25 bp, Homo sapien
tgtagtgcgggaagcaatggctcct

SEQ ID NO: 4944149 - DNA, 25 bp, Homo sapien
tgctgaaccaggattcgaacgtggg

SEQ ID NO: 4944150 - DNA, 25 bp, Homo sapien
caactgaagtgtgcgtctggtctgc

SEQ ID NO: 4944151 - DNA, 25 bp, Homo sapien
tgtgatatccaaccggaaaggctga

SEQ ID NO: 4944152 - DNA, 25 bp, Homo sapien
tgcctcattcggaaagcccagctgt

SEQ ID NO: 4944153 - DNA, 25 bp, Homo sapien
gctgaagctatgtctctagggcctc

SEQ ID NO: 4944154 - DNA, 25 bp, Homo sapien
agatatttgggcaggcacgacttcc

SEQ ID NO: 4944155 - DNA, 25 bp, Homo sapien
caggatgtaaaactgtccaggacac

SEQ ID NO: 4944156 - DNA, 25 bp, Homo sapien
catagggttttcttaagctgcgtgg

SEQ ID NO: 4944157 - DNA, 25 bp, Homo sapien
caagtgttatcctctcaaaagcgcc

SEQ ID NO: 4944158 - DNA, 25 bp, Homo sapien
ttaaaactcacctctgcagggtcac

SEQ ID NO: 4944159 - DNA, 25 bp, Homo sapien
gtcccccagagctggtgtagcggat

SEQ ID NO: 4944160 - DNA, 25 bp, Homo sapien
gctggtgtagcggatggtcttctca

SEQ ID NO: 4944161 - DNA, 25 bp, Homo sapien
aaactcacctctgcagggtcacttt

SEQ ID NO: 4944162 - DNA, 25 bp, Homo sapien
aggaagagacacgaaattgcctcac

SEQ ID NO: 4944163 - DNA, 25 bp, Homo sapien
catggtaaatacatgatacatgtgt

SEQ ID NO: 4944164 - DNA, 25 bp, Homo sapien
ttgacacgctgtaaaggaagagaca

SEQ ID NO: 4944165 - DNA, 25 bp, Homo sapien
tacatgatacatgtgttgacacgct

SEQ ID NO: 4944166 - DNA, 25 bp, Homo sapien
tctaagtaaatcgtagctgttgctg

SEQ ID NO: 4944167 - DNA, 25 bp, Homo sapien
tctcccatcaggcagtatcccggga

SEQ ID NO: 4944168 - DNA, 25 bp, Homo sapien
cctgcggggcacaagtttgccatct

SEQ ID NO: 4944169 - DNA, 25 bp, Homo sapien
tgtcttgcctctctcgcctctttcc

SEQ ID NO: 4944170 - DNA, 25 bp, Homo sapien
ttcagtgaggcgtcaggacctggca

SEQ ID NO: 4944171 - DNA, 25 bp, Homo sapien
gatgaggtacgcaccctgtggagac

SEQ ID NO: 4944172 - DNA, 25 bp, Homo sapien
gaagtaccatggtgtcaggacctgg

SEQ ID NO: 4944173 - DNA, 25 bp, Homo sapien
ctgtggagactgaacgggaagtacc

SEQ ID NO: 4944174 - DNA, 25 bp, Homo sapien
tctttttccgtaattgtagcctctg

SEQ ID NO: 4944175 - DNA, 25 bp, Homo sapien
gcctctggcacatggtcgtgcatgg

SEQ ID NO: 4944176 - DNA, 25 bp, Homo sapien
tctaaactgctttctgccgtctttg

SEQ ID NO: 4944177 - DNA, 25 bp, Homo sapien
gtctttgccgtgagaccaggtgcca

SEQ ID NO: 4944178 - DNA, 25 bp, Homo sapien
gggcctgtgccgtgtagaatctgta

SEQ ID NO: 4944179 - DNA, 25 bp, Homo sapien
taatgcctgcaaatgtcgtactcgg

SEQ ID NO: 4944180 - DNA, 25 bp, Homo sapien
gaatctgtagctgcacacttcgccc

SEQ ID NO: 4944181 - DNA, 25 bp, Homo sapien
cagatgtttccggttcattcacaga

SEQ ID NO: 4944182 - DNA, 25 bp, Homo sapien
ctgtgtggaggttgagttccccgta

SEQ ID NO: 4944183 - DNA, 25 bp, Homo sapien
tgtggaggttgagttccccgtacac

SEQ ID NO: 4944184 - DNA, 25 bp, Homo sapien
ggaggttgagttccccgtacacatc

SEQ ID NO: 4944185 - DNA, 25 bp, Homo sapien
tggaggttgagttccccgtacacat

SEQ ID NO: 4944186 - DNA, 25 bp, Homo sapien
ttgctctcgtgttagctgtgtggag

SEQ ID NO: 4944187 - DNA, 25 bp, Homo sapien
gttgagttcccatacagagctacag

SEQ ID NO: 4944188 - DNA, 25 bp, Homo sapien
gctgcgctgctctcatggtaactgt

SEQ ID NO: 4944189 - DNA, 25 bp, Homo sapien
tatacagagctacattgctctcgtg

SEQ ID NO: 4944190 - DNA, 25 bp, Homo sapien
gccgtgcgggtcctgagtgtgtgtg

SEQ ID NO: 4944191 - DNA, 25 bp, Homo sapien
tcctgagtgtgcgtggaaaggccgt

SEQ ID NO: 4944192 - DNA, 25 bp, Homo sapien
ggtcctgagtgtgcgtggaaaggcc

SEQ ID NO: 4944193 - DNA, 25 bp, Homo sapien
tggaaaggccatgcgggtcctgagt

SEQ ID NO: 4944194 - DNA, 25 bp, Homo sapien
tgtggaaaggccgtgcagatcctga

SEQ ID NO: 4944195 - DNA, 25 bp, Homo sapien
tgtggaaacaccgtgcgggtcctga

SEQ ID NO: 4944196 - DNA, 25 bp, Homo sapien
gaaaggccgtgcagatcctgagtgt

SEQ ID NO: 4944197 - DNA, 25 bp, Homo sapien
tcctgagtgtgtgtggaaacaccgt

SEQ ID NO: 4944198 - DNA, 25 bp, Homo sapien
tgtggaacggccgtgcgggtcctga

SEQ ID NO: 4944199 - DNA, 25 bp, Homo sapien
ccgtgcgggtcctgagtgtgtgtgg

SEQ ID NO: 4944200 - DNA, 25 bp, Homo sapien
aggccgtgcgggtcctgagtgtgtg

SEQ ID NO: 4944201 - DNA, 25 bp, Homo sapien
gtgtggaacggccgtgcgggtcctg

SEQ ID NO: 4944202 - DNA, 25 bp, Homo sapien
tgcgcgtcctgcgtgtggcgtggaa

SEQ ID NO: 4944203 - DNA, 25 bp, Homo sapien
cgtcctgcgtgtggcgtggaaaggc

SEQ ID NO: 4944204 - DNA, 25 bp, Homo sapien
tcctgactgtggaaaggccgtgcgc

SEQ ID NO: 4944205 - DNA, 25 bp, Homo sapien
gacgtgcgcgtcctgcgtgtggcgt

SEQ ID NO: 4944206 - DNA, 25 bp, Homo sapien
tgcccttgtgtctacagtgcccgtg

SEQ ID NO: 4944207 - DNA, 25 bp, Homo sapien
caaacccgcgagcagctgcgagggc

SEQ ID NO: 4944208 - DNA, 25 bp, Homo sapien
acgttcattcggcaaacccgcgagc

SEQ ID NO: 4944209 - DNA, 25 bp, Homo sapien
tgtctacagcgcacgttcattcggc

SEQ ID NO: 4944210 - DNA, 25 bp, Homo sapien
gatctcagtcgcaagggtgctcagg

SEQ ID NO: 4944211 - DNA, 25 bp, Homo sapien
agggcagtgcttctctggctgatgc

SEQ ID NO: 4944212 - DNA, 25 bp, Homo sapien
agtctgtggaccaggaaacgagccg

SEQ ID NO: 4944213 - DNA, 25 bp, Homo sapien
cagagtgtgccggtcctcggagaag

SEQ ID NO: 4944214 - DNA, 25 bp, Homo sapien
gatcggtggcctcgttcttccggta

SEQ ID NO: 4944215 - DNA, 25 bp, Homo sapien
tcttccggtagcttccaaactcctg

SEQ ID NO: 4944216 - DNA, 25 bp, Homo sapien
cggttgcccagaggcacgaggaaac

SEQ ID NO: 4944217 - DNA, 25 bp, Homo sapien
cctgtttgatcatgatggtctgtct

SEQ ID NO: 4944218 - DNA, 25 bp, Homo sapien
gaacacggtttctcgcctctcatcg

SEQ ID NO: 4944219 - DNA, 25 bp, Homo sapien
cacgtgtttcagaagcacagtgccg

SEQ ID NO: 4944220 - DNA, 25 bp, Homo sapien
gcctctcatcgctcacgtgtttcag

SEQ ID NO: 4944221 - DNA, 25 bp, Homo sapien
cggacacgtgaacacggtttctcgc

SEQ ID NO: 4944222 - DNA, 25 bp, Homo sapien
cccactggatgacatgttgcatcga

SEQ ID NO: 4944223 - DNA, 25 bp, Homo sapien
ggatgacatgttgcatcgaggagcc

SEQ ID NO: 4944224 - DNA, 25 bp, Homo sapien
actggatgacatgttgcatcgagga

SEQ ID NO: 4944225 - DNA, 25 bp, Homo sapien
ctcctgagcccgtctcccgtgcctc

SEQ ID NO: 4944226 - DNA, 25 bp, Homo sapien
tggtgaaagggcaccgctgcgagag

SEQ ID NO: 4944227 - DNA, 25 bp, Homo sapien
ggggggtgcagcgaagcagacacat

SEQ ID NO: 4944228 - DNA, 25 bp, Homo sapien
cttcaggaaccccagattctggtga

SEQ ID NO: 4944229 - DNA, 25 bp, Homo sapien
gcaccgctgcgagagggaggcgggc

SEQ ID NO: 4944230 - DNA, 25 bp, Homo sapien
aagaacagacgtgggtccccatctg

SEQ ID NO: 4944231 - DNA, 25 bp, Homo sapien
gtgagagaaccaagcgcactgtgtc

SEQ ID NO: 4944232 - DNA, 25 bp, Homo sapien
attctgcaagggcatgttgtgagag

SEQ ID NO: 4944233 - DNA, 25 bp, Homo sapien
gtgtcctcagggcagcaagaacaga

SEQ ID NO: 4944234 - DNA, 25 bp, Homo sapien
tagacactgagctagttcccgcaca

SEQ ID NO: 4944235 - DNA, 25 bp, Homo sapien
taagtggcgtcttcctgtaatacag

SEQ ID NO: 4944236 - DNA, 25 bp, Homo sapien
aactgatcgtccgttcctgtgccaa

SEQ ID NO: 4944237 - DNA, 25 bp, Homo sapien
ggtcaaattgactgcgatggctcta

SEQ ID NO: 4944238 - DNA, 25 bp, Homo sapien
gggcagtgggcaattgttctcttca

SEQ ID NO: 4944239 - DNA, 25 bp, Homo sapien
gtggacacgtctgcccacaaagagg

SEQ ID NO: 4944240 - DNA, 25 bp, Homo sapien
tgcttgagtgactgcgcagcaagac

SEQ ID NO: 4944241 - DNA, 25 bp, Homo sapien
ccgttggagcgtttgcatttgctgc

SEQ ID NO: 4944242 - DNA, 25 bp, Homo sapien
gatcccaggtcgaggcgcagtccag

SEQ ID NO: 4944243 - DNA, 25 bp, Homo sapien
agatcccaggtcgaggcgcagtcca

SEQ ID NO: 4944244 - DNA, 25 bp, Homo sapien
atcccaggtcgaggcgcagtccaga

SEQ ID NO: 4944245 - DNA, 25 bp, Homo sapien
cgtgtattgacggacctttgccagg

SEQ ID NO: 4944246 - DNA, 25 bp, Homo sapien
tgacggacctttgccaggtgatggc

SEQ ID NO: 4944247 - DNA, 25 bp, Homo sapien
tccagagtcgtgtattgacggacct

SEQ ID NO: 4944248 - DNA, 25 bp, Homo sapien
tcctccagagtcgtgtattgacgga

SEQ ID NO: 4944249 - DNA, 25 bp, Homo sapien
gtaaaatcgctgatcactccaggtg

SEQ ID NO: 4944250 - DNA, 25 bp, Homo sapien
agattaaggcgacttactcgtcgtc

SEQ ID NO: 4944251 - DNA, 25 bp, Homo sapien
agtaaggagattaaggcgacttact

SEQ ID NO: 4944252 - DNA, 25 bp, Homo sapien
gaagggtggatgtgaagtaaggaga

SEQ ID NO: 4944253 - DNA, 25 bp, Homo sapien
cgtgtattgagtgctactgagcgca

SEQ ID NO: 4944254 - DNA, 25 bp, Homo sapien
ctccagagtcgtgtattgagtgcta

SEQ ID NO: 4944255 - DNA, 25 bp, Homo sapien
gagtgctactgagcgcaccacagtg

SEQ ID NO: 4944256 - DNA, 25 bp, Homo sapien
agcgcaccacagtgcttactgagcg

SEQ ID NO: 4944257 - DNA, 25 bp, Homo sapien
ggtgctgagcacagaattgtctaga

SEQ ID NO: 4944258 - DNA, 25 bp, Homo sapien
ttcctcaccgtaggcgcccagctct

SEQ ID NO: 4944259 - DNA, 25 bp, Homo sapien
ctgagcacagaattgtctagaccag

SEQ ID NO: 4944260 - DNA, 25 bp, Homo sapien
cagctctccttggcagtcctggtgc

SEQ ID NO: 4944261 - DNA, 25 bp, Homo sapien
cacggaaggtaacattcacgggcat

SEQ ID NO: 4944262 - DNA, 25 bp, Homo sapien
aatctttgcattgtgaggcactggc

SEQ ID NO: 4944263 - DNA, 25 bp, Homo sapien
gactgcaagcttcgatcagggccca

SEQ ID NO: 4944264 - DNA, 25 bp, Homo sapien
aaaacatgccctcgatctgctgagg

SEQ ID NO: 4944265 - DNA, 25 bp, Homo sapien
gacacggagcctctgattgttgaag

SEQ ID NO: 4944266 - DNA, 25 bp, Homo sapien
cacggagcctctgattgttgaagca

SEQ ID NO: 4944267 - DNA, 25 bp, Homo sapien
tatcctgatcaggacacggagcctc

SEQ ID NO: 4944268 - DNA, 25 bp, Homo sapien
actgcttttatcctgatcaggacac

SEQ ID NO: 4944269 - DNA, 25 bp, Homo sapien
agtttccacggggctcaccagggca

SEQ ID NO: 4944270 - DNA, 25 bp, Homo sapien
gtttccacggggctcaccagggcag

SEQ ID NO: 4944271 - DNA, 25 bp, Homo sapien
tgaaggttaatgtggtaacagtttc

SEQ ID NO: 4944272 - DNA, 25 bp, Homo sapien
gtaacagtttccacggggctcacca

SEQ ID NO: 4944273 - DNA, 25 bp, Homo sapien
ccttctgcttaattttcagatatgc

SEQ ID NO: 4944274 - DNA, 25 bp, Homo sapien
gagctctgagggtgaagaccgaggt

SEQ ID NO: 4944275 - DNA, 25 bp, Homo sapien
cgcagagaaggagccgtgctgcact

SEQ ID NO: 4944276 - DNA, 25 bp, Homo sapien
caggatgcgaatgggagaggcacca

SEQ ID NO: 4944277 - DNA, 25 bp, Homo sapien
ggtgtgcagatgacaccagctgcca

SEQ ID NO: 4944278 - DNA, 25 bp, Homo sapien
gcatgcaggccatatttggagcctg

SEQ ID NO: 4944279 - DNA, 25 bp, Homo sapien
ctttccagcatgttccgccgctgcc

SEQ ID NO: 4944280 - DNA, 25 bp, Homo sapien
ttccagcatgttccgccgctgccag

SEQ ID NO: 4944281 - DNA, 25 bp, Homo sapien
atttggagcctggttcctccttcta

SEQ ID NO: 4944282 - DNA, 25 bp, Homo sapien
caaagccagatgtggcgtgtggcgc

SEQ ID NO: 4944283 - DNA, 25 bp, Homo sapien
gcgatgtcggctggcgtggcctcct

SEQ ID NO: 4944284 - DNA, 25 bp, Homo sapien
gaaactggatattcagatgctctga

SEQ ID NO: 4944285 - DNA, 25 bp, Homo sapien
catgtcttggaatgtggacatgtgc

SEQ ID NO: 4944286 - DNA, 25 bp, Homo sapien
ctcctgggtgggttgaaatcgacca

SEQ ID NO: 4944287 - DNA, 25 bp, Homo sapien
ttacatttccgagctccattccagg

SEQ ID NO: 4944288 - DNA, 25 bp, Homo sapien
gaaagccaagattcatctccattaa

SEQ ID NO: 4944289 - DNA, 25 bp, Homo sapien
tgagggctgagatatctgttttgtg

SEQ ID NO: 4944290 - DNA, 25 bp, Homo sapien
gctgggcacagtcgctgattcggtg

SEQ ID NO: 4944291 - DNA, 25 bp, Homo sapien
gctgggtgcagtcgctgatttggtg

SEQ ID NO: 4944292 - DNA, 25 bp, Homo sapien
gcagtcgctgattcgatgaccagga

SEQ ID NO: 4944293 - DNA, 25 bp, Homo sapien
gctgctgtcacgtgggctgggtgca

SEQ ID NO: 4944294 - DNA, 25 bp, Homo sapien
gctgagtcaaactgatttccgctga

SEQ ID NO: 4944295 - DNA, 25 bp, Homo sapien
tgagcgcagcgtgggtattttgagc

SEQ ID NO: 4944296 - DNA, 25 bp, Homo sapien
tttgagctgagtcaaactgatttcc

SEQ ID NO: 4944297 - DNA, 25 bp, Homo sapien
tcaaactgatttccgctgacaccag

SEQ ID NO: 4944298 - DNA, 25 bp, Homo sapien
gcttccagttgcatagcaccagctg

SEQ ID NO: 4944299 - DNA, 25 bp, Homo sapien
tgagggtggagcagggtgagcccag

SEQ ID NO: 4944300 - DNA, 25 bp, Homo sapien
cagcaggccagtgtttcttcagcgg

SEQ ID NO: 4944301 - DNA, 25 bp, Homo sapien
caccagctgagagcacaaaggcctc

SEQ ID NO: 4944302 - DNA, 25 bp, Homo sapien
tccccgccccaaacacagagtagga

SEQ ID NO: 4944303 - DNA, 25 bp, Homo sapien
ggatgtggggatgggcgtgggaccc

SEQ ID NO: 4944304 - DNA, 25 bp, Homo sapien
cgtgggaccctcgttcggggcatca

SEQ ID NO: 4944305 - DNA, 25 bp, Homo sapien
gcaggcagccgtgcgtggatgtggg

SEQ ID NO: 4944306 - DNA, 25 bp, Homo sapien
gccggagaggcgcaagggagccccg

SEQ ID NO: 4944307 - DNA, 25 bp, Homo sapien
agcctgggagataaaccacgctcgg

SEQ ID NO: 4944308 - DNA, 25 bp, Homo sapien
ttggagctggcttgagtgagcctcc

SEQ ID NO: 4944309 - DNA, 25 bp, Homo sapien
ctgttcttccctccggcactgcctc

SEQ ID NO: 4944310 - DNA, 25 bp, Homo sapien
caagaggcaccatgcgtggatggca

SEQ ID NO: 4944311 - DNA, 25 bp, Homo sapien
tgtctttctagatcgcagtggtgcc

SEQ ID NO: 4944312 - DNA, 25 bp, Homo sapien
tctgtgagtctcctgcaagaggcac

SEQ ID NO: 4944313 - DNA, 25 bp, Homo sapien
gaaaaaatgggaccgtcagctctga

SEQ ID NO: 4944314 - DNA, 25 bp, Homo sapien
tgtcagcaataattagagctgtgat

SEQ ID NO: 4944315 - DNA, 25 bp, Homo sapien
gattgctcctgccacatcgaagcac

SEQ ID NO: 4944316 - DNA, 25 bp, Homo sapien
acaatacccagaacaagtgtcagca

SEQ ID NO: 4944317 - DNA, 25 bp, Homo sapien
gcaataattagagctgtgattgctc

SEQ ID NO: 4944318 - DNA, 25 bp, Homo sapien
agaagggctgtgtacgaccacggag

SEQ ID NO: 4944319 - DNA, 25 bp, Homo sapien
gtgtgctacccatgggaggccaata

SEQ ID NO: 4944320 - DNA, 25 bp, Homo sapien
cgattttgcgtgaagacctgtgtgc

SEQ ID NO: 4944321 - DNA, 25 bp, Homo sapien
tcatggcgacgcagccgattttgcg

SEQ ID NO: 4944322 - DNA, 25 bp, Homo sapien
tcctggcgtaatgacagagtggtag

SEQ ID NO: 4944323 - DNA, 25 bp, Homo sapien
cacagaactagagatgatcactcct

SEQ ID NO: 4944324 - DNA, 25 bp, Homo sapien
ttagagtgaggtcccgagatatgcc

SEQ ID NO: 4944325 - DNA, 25 bp, Homo sapien
acttccccaggcgtcaatttctgca

SEQ ID NO: 4944326 - DNA, 25 bp, Homo sapien
gggtctgaacctgtggccttcccat

SEQ ID NO: 4944327 - DNA, 25 bp, Homo sapien
taatgaggcattgccaggaccgaca

SEQ ID NO: 4944328 - DNA, 25 bp, Homo sapien
ccattgcaggagaagcgacaccaga

SEQ ID NO: 4944329 - DNA, 25 bp, Homo sapien
ggttcatcgtgtcgtcttccaggca

SEQ ID NO: 4944330 - DNA, 25 bp, Homo sapien
ttctcaaggcgcactgcccgagtct

SEQ ID NO: 4944331 - DNA, 25 bp, Homo sapien
tccttcccttctcaaggcgcactgc

SEQ ID NO: 4944332 - DNA, 25 bp, Homo sapien
cagcttgtgacattgagacgactca

SEQ ID NO: 4944333 - DNA, 25 bp, Homo sapien
cttgtgacattgagacgactcatca

SEQ ID NO: 4944334 - DNA, 25 bp, Homo sapien
gagaggcgaccgtatcctcttcatc

SEQ ID NO: 4944335 - DNA, 25 bp, Homo sapien
ctgagaggcgaccgtatcctcttca

SEQ ID NO: 4944336 - DNA, 25 bp, Homo sapien
ggcgaccgtatcctcttcatcagca

SEQ ID NO: 4944337 - DNA, 25 bp, Homo sapien
gaggcgaccgtatcctcttcatcag

SEQ ID NO: 4944338 - DNA, 25 bp, Homo sapien
tgtctctggacaatgttaatgtcat

SEQ ID NO: 4944339 - DNA, 25 bp, Homo sapien
tctctggacaatgttaatgtcatag

SEQ ID NO: 4944340 - DNA, 25 bp, Homo sapien
aatgtcatagttgtgtctattccag

SEQ ID NO: 4944341 - DNA, 25 bp, Homo sapien
caatgttaatgtcatagttgtgtct

SEQ ID NO: 4944342 - DNA, 25 bp, Homo sapien
gatgtgccagtaagaatgacctgga

SEQ ID NO: 4944343 - DNA, 25 bp, Homo sapien
tggaagctcccagacatacgtagca

SEQ ID NO: 4944344 - DNA, 25 bp, Homo sapien
atacgtagcaggctcaacgtggcgg

SEQ ID NO: 4944345 - DNA, 25 bp, Homo sapien
cacatcgctgttgatcattgctgcc

SEQ ID NO: 4944346 - DNA, 25 bp, Homo sapien
ttataatacaagcatcgtcattttc

SEQ ID NO: 4944347 - DNA, 25 bp, Homo sapien
taaatttccctagtgggtgaccatc

SEQ ID NO: 4944348 - DNA, 25 bp, Homo sapien
tataatacaagcatcgtcattttca

SEQ ID NO: 4944349 - DNA, 25 bp, Homo sapien
ataaatttccctagtgggtgaccat

SEQ ID NO: 4944350 - DNA, 25 bp, Homo sapien
tcttccatggacgtaagtgctgtct

SEQ ID NO: 4944351 - DNA, 25 bp, Homo sapien
catcttccatggacgtaagtgctgt

SEQ ID NO: 4944352 - DNA, 25 bp, Homo sapien
tcttccatggacgtaaggtctgtct

SEQ ID NO: 4944353 - DNA, 25 bp, Homo sapien
ccatcttccatggacgtaaggtctg

SEQ ID NO: 4944354 - DNA, 25 bp, Homo sapien
tatgtcactcatcccttcacagctg

SEQ ID NO: 4944355 - DNA, 25 bp, Homo sapien
tcatcccttcacagctgtgtggcct

SEQ ID NO: 4944356 - DNA, 25 bp, Homo sapien
ctatgtcactcatcccttcacagct

SEQ ID NO: 4944357 - DNA, 25 bp, Homo sapien
cactcatcccttcacagctgtgtgg

SEQ ID NO: 4944358 - DNA, 25 bp, Homo sapien
gggccagagaaaccatcatggaggc

SEQ ID NO: 4944359 - DNA, 25 bp, Homo sapien
cctgcacttgagtttcagggccaag

SEQ ID NO: 4944360 - DNA, 25 bp, Homo sapien
ccagagaaaccatcatggaggcatc

SEQ ID NO: 4944361 - DNA, 25 bp, Homo sapien
acttgagtttcagggccaaggtgtc

SEQ ID NO: 4944362 - DNA, 25 bp, Homo sapien
gagtcctggacgtagtgcttcattc

SEQ ID NO: 4944363 - DNA, 25 bp, Homo sapien
aaggtccaagtcttcattccccagg

SEQ ID NO: 4944364 - DNA, 25 bp, Homo sapien
tccgcggtcaccaggaatcgaggtt

SEQ ID NO: 4944365 - DNA, 25 bp, Homo sapien
aatcgaggttcagtagaatcacccc

SEQ ID NO: 4944366 - DNA, 25 bp, Homo sapien
gctttcacgccacgcgtatgataag

SEQ ID NO: 4944367 - DNA, 25 bp, Homo sapien
gggacctgggagctttcacgccacg

SEQ ID NO: 4944368 - DNA, 25 bp, Homo sapien
ccgtgcggcatctcctgggacctgg

SEQ ID NO: 4944369 - DNA, 25 bp, Homo sapien
tgggaacctgcagacggcactgccc

SEQ ID NO: 4944370 - DNA, 25 bp, Homo sapien
tcaggcccagggttctctctgggca

SEQ ID NO: 4944371 - DNA, 25 bp, Homo sapien
cagagcctggaaagggggcggtggc

SEQ ID NO: 4944372 - DNA, 25 bp, Homo sapien
ctctcaggcccagggttctctctgg

SEQ ID NO: 4944373 - DNA, 25 bp, Homo sapien
tggaaagggggcggtggctttgcca

SEQ ID NO: 4944374 - DNA, 25 bp, Homo sapien
ggtgagtgggtgaccagatgaccga

SEQ ID NO: 4944375 - DNA, 25 bp, Homo sapien
cagatgaccgagctgaaacaggccc

SEQ ID NO: 4944376 - DNA, 25 bp, Homo sapien
gtcctcagtcaacatggctttgcca

SEQ ID NO: 4944377 - DNA, 25 bp, Homo sapien
tcttgtcctcagtcaacatggcttt

SEQ ID NO: 4944378 - DNA, 25 bp, Homo sapien
taatgcttaatcgaaaatgtaatga

SEQ ID NO: 4944379 - DNA, 25 bp, Homo sapien
atgcttaatcgaaaatgtaatgaaa

SEQ ID NO: 4944380 - DNA, 25 bp, Homo sapien
cataatgcttaatcgaaaatgtaat

SEQ ID NO: 4944381 - DNA, 25 bp, Homo sapien
aatgcttaatcgaaaatgtaatgaa

SEQ ID NO: 4944382 - DNA, 25 bp, Homo sapien
ggaattaaaccgtttgtgacagtca

SEQ ID NO: 4944383 - DNA, 25 bp, Homo sapien
tgacagtcaactcggtgtagcagga

SEQ ID NO: 4944384 - DNA, 25 bp, Homo sapien
ctgagagtctagtgtgtcggctata

SEQ ID NO: 4944385 - DNA, 25 bp, Homo sapien
gacacgtgagtagcattagccccag

SEQ ID NO: 4944386 - DNA, 25 bp, Homo sapien
ttcctgtttgaaggatgcccgccct

SEQ ID NO: 4944387 - DNA, 25 bp, Homo sapien
agtgagaatttaacttgtgcctgga

SEQ ID NO: 4944388 - DNA, 25 bp, Homo sapien
ccagaagcgcgacgcagagtggact

SEQ ID NO: 4944389 - DNA, 25 bp, Homo sapien
ccgccctcaccaggagctgtgaagg

SEQ ID NO: 4944390 - DNA, 25 bp, Homo sapien
tcctgtgagacagcgtaggcacctg

SEQ ID NO: 4944391 - DNA, 25 bp, Homo sapien
ggatgacaactttatgcagctgtaa

SEQ ID NO: 4944392 - DNA, 25 bp, Homo sapien
cagtgaggctcaccttgaagttaaa

SEQ ID NO: 4944393 - DNA, 25 bp, Homo sapien
ctgtgagaatatgcaggagcaatcc

SEQ ID NO: 4944394 - DNA, 25 bp, Homo sapien
tggacacgatgggaaaactctcact

SEQ ID NO: 4944395 - DNA, 25 bp, Homo sapien
ggttggacacgatgggaaaactctc

SEQ ID NO: 4944396 - DNA, 25 bp, Homo sapien
acgatgggaaaactctcactcccca

SEQ ID NO: 4944397 - DNA, 25 bp, Homo sapien
gacacgatgggaaaactctcactcc

SEQ ID NO: 4944398 - DNA, 25 bp, Homo sapien
tctcagtgacaaagttgatgcgtgt

SEQ ID NO: 4944399 - DNA, 25 bp, Homo sapien
tctgactttaactgataaatgactg

SEQ ID NO: 4944400 - DNA, 25 bp, Homo sapien
tgctcccaggtacctcaggatgagt

SEQ ID NO: 4944401 - DNA, 25 bp, Homo sapien
taaatgactgtaaagaggtgtatct

SEQ ID NO: 4944402 - DNA, 25 bp, Homo sapien
gcagggtagatcttcaccctgtggc

SEQ ID NO: 4944403 - DNA, 25 bp, Homo sapien
tgtggcactgttctgcggagggcag

SEQ ID NO: 4944404 - DNA, 25 bp, Homo sapien
gagggcagggtagatcttcaccctg

SEQ ID NO: 4944405 - DNA, 25 bp, Homo sapien
ttctgcggagggcaggatagatctt

SEQ ID NO: 4944406 - DNA, 25 bp, Homo sapien
gaacgtgtcagcagttcttttttga

SEQ ID NO: 4944407 - DNA, 25 bp, Homo sapien
cgtgtcagcagttcttttttgactg

SEQ ID NO: 4944408 - DNA, 25 bp, Homo sapien
tgagatggaacgtgtcagcagttct

SEQ ID NO: 4944409 - DNA, 25 bp, Homo sapien
cgtcccgtgagatggaacgtgtcag

SEQ ID NO: 4944410 - DNA, 25 bp, Homo sapien
cagtctcctccactaccgtgggctg

SEQ ID NO: 4944411 - DNA, 25 bp, Homo sapien
ttcagttaataggaagccatatgct

SEQ ID NO: 4944412 - DNA, 25 bp, Homo sapien
cagttaataggaagccatatgctcc

SEQ ID NO: 4944413 - DNA, 25 bp, Homo sapien
tctcctccactaccgtgggctgctg

SEQ ID NO: 4944414 - DNA, 25 bp, Homo sapien
tggccgttatcgacatggattcaga

SEQ ID NO: 4944415 - DNA, 25 bp, Homo sapien
tgaacaggcacaaagatgaatgacc

SEQ ID NO: 4944416 - DNA, 25 bp, Homo sapien
gatgcccaagacacagctgggacag

SEQ ID NO: 4944417 - DNA, 25 bp, Homo sapien
gacccttcttcattttgtggacact

SEQ ID NO: 4944418 - DNA, 25 bp, Homo sapien
acacaggagaccgtgatcctggaat

SEQ ID NO: 4944419 - DNA, 25 bp, Homo sapien
gcacacaggagaccgtgatcctgga

SEQ ID NO: 4944420 - DNA, 25 bp, Homo sapien
acaggagaccgtgatcctggaatct

SEQ ID NO: 4944421 - DNA, 25 bp, Homo sapien
caagcacacaggagaccgtgatcct

SEQ ID NO: 4944422 - DNA, 25 bp, Homo sapien
cgcaggagactgtgatccagattgg

SEQ ID NO: 4944423 - DNA, 25 bp, Homo sapien
gcaaaaccatccaatgaatgtcttc

SEQ ID NO: 4944424 - DNA, 25 bp, Homo sapien
gattgggatttgcaaaaccatccaa

SEQ ID NO: 4944425 - DNA, 25 bp, Homo sapien
tagcatgcggaagaccgtgatccag

SEQ ID NO: 4944426 - DNA, 25 bp, Homo sapien
ctctgggacgcattcaaagcagtgt

SEQ ID NO: 4944427 - DNA, 25 bp, Homo sapien
tgggacgcattcaaagcagtgtgta

SEQ ID NO: 4944428 - DNA, 25 bp, Homo sapien
ggacgcattcaaagcagtgtgtaga

SEQ ID NO: 4944429 - DNA, 25 bp, Homo sapien
tctctgggacgcattcaaagcagtg

SEQ ID NO: 4944430 - DNA, 25 bp, Homo sapien
tcagtgaacacggaattaccagcca

SEQ ID NO: 4944431 - DNA, 25 bp, Homo sapien
agccacattggcagagacctcacag

SEQ ID NO: 4944432 - DNA, 25 bp, Homo sapien
aatatgaccacagacacccggcgga

SEQ ID NO: 4944433 - DNA, 25 bp, Homo sapien
cagctgccattgacggcttggaccc

SEQ ID NO: 4944434 - DNA, 25 bp, Homo sapien
tacaaactgccttctgcgcaccatg

SEQ ID NO: 4944435 - DNA, 25 bp, Homo sapien
tttcaggcatcaacacatgtgctcc

SEQ ID NO: 4944436 - DNA, 25 bp, Homo sapien
caaatgacaccgttggcgagaggtt

SEQ ID NO: 4944437 - DNA, 25 bp, Homo sapien
tgtgctccactgtgcatacaaactg

SEQ ID NO: 4944438 - DNA, 25 bp, Homo sapien
acagcccgacgtcttccacactttt

SEQ ID NO: 4944439 - DNA, 25 bp, Homo sapien
cctgcccgtcacacttgctctgttc

SEQ ID NO: 4944440 - DNA, 25 bp, Homo sapien
agccctgcccgtcacacttgctctg

SEQ ID NO: 4944441 - DNA, 25 bp, Homo sapien
ccacctttctgctgcgtgacactca

SEQ ID NO: 4944442 - DNA, 25 bp, Homo sapien
tgggtcactgttagctgcactggga

SEQ ID NO: 4944443 - DNA, 25 bp, Homo sapien
gaagcctttggtggcacatccttca

SEQ ID NO: 4944444 - DNA, 25 bp, Homo sapien
tatagcaaaggacgggtagagccaa

SEQ ID NO: 4944445 - DNA, 25 bp, Homo sapien
caagccagcgtcatgcatctgagca

SEQ ID NO: 4944446 - DNA, 25 bp, Homo sapien
gagcctctgcggtcaagggtatcgc

SEQ ID NO: 4944447 - DNA, 25 bp, Homo sapien
ccaagcaagggtatggcatttccga

SEQ ID NO: 4944448 - DNA, 25 bp, Homo sapien
ccagatgtgggtgccaacagtgaga

SEQ ID NO: 4944449 - DNA, 25 bp, Homo sapien
tactgctttccaaggtaacaaggga

SEQ ID NO: 4944450 - DNA, 25 bp, Homo sapien
tacacgtgataacgctggaacctca

SEQ ID NO: 4944451 - DNA, 25 bp, Homo sapien
gcaaacacgcatcccagtctcggga

SEQ ID NO: 4944452 - DNA, 25 bp, Homo sapien
cagaacacgcatcccagtctagggt

SEQ ID NO: 4944453 - DNA, 25 bp, Homo sapien
tacacccggtgaaagtggacgtctc

SEQ ID NO: 4944454 - DNA, 25 bp, Homo sapien
ggaatcatatcaatggcttaactaa

SEQ ID NO: 4944455 - DNA, 25 bp, Homo sapien
ctggaatcatatcaatggcttaact

SEQ ID NO: 4944456 - DNA, 25 bp, Homo sapien
tatcaatggcttaactaacctttgg

SEQ ID NO: 4944457 - DNA, 25 bp, Homo sapien
tcatatcaatggcttaactaacctt

SEQ ID NO: 4944458 - DNA, 25 bp, Homo sapien
tggggaaagagacgattcggccctg

SEQ ID NO: 4944459 - DNA, 25 bp, Homo sapien
cttactacagaagaggcttcccgcc

SEQ ID NO: 4944460 - DNA, 25 bp, Homo sapien
tactacagaagaggcttcccgccct

SEQ ID NO: 4944461 - DNA, 25 bp, Homo sapien
ctggggaaagagacgattcggccct

SEQ ID NO: 4944462 - DNA, 25 bp, Homo sapien
ggtttaagcagtaccgaggcaggga

SEQ ID NO: 4944463 - DNA, 25 bp, Homo sapien
ggccctacagaaagagggggcacag

SEQ ID NO: 4944464 - DNA, 25 bp, Homo sapien
cggccctacagaaagagggggcaca

SEQ ID NO: 4944465 - DNA, 25 bp, Homo sapien
caggaatcgggcgacaatgtcagac

SEQ ID NO: 4944466 - DNA, 25 bp, Homo sapien
ttttaggccaattagcgaatcgggc

SEQ ID NO: 4944467 - DNA, 25 bp, Homo sapien
cagtgactgcagagacgcaaggtgc

SEQ ID NO: 4944468 - DNA, 25 bp, Homo sapien
gatggtgtccaaaaccctcgcgatg

SEQ ID NO: 4944469 - DNA, 25 bp, Homo sapien
tgtgacgatgcctccatttgacttc

SEQ ID NO: 4944470 - DNA, 25 bp, Homo sapien
cgtttccgccataaccgtcctgtga

SEQ ID NO: 4944471 - DNA, 25 bp, Homo sapien
gctgactgtaagaaactgtgcaccg

SEQ ID NO: 4944472 - DNA, 25 bp, Homo sapien
tgacttctgtatcgctgatgttcac

SEQ ID NO: 4944473 - DNA, 25 bp, Homo sapien
cattgaccaataacgagacgagggc

SEQ ID NO: 4944474 - DNA, 25 bp, Homo sapien
tatcagaggaagactgtcccgtgct

SEQ ID NO: 4944475 - DNA, 25 bp, Homo sapien
caccacggtgatgaggattacttcc

SEQ ID NO: 4944476 - DNA, 25 bp, Homo sapien
tgtgtctgccttccaatactaagag

SEQ ID NO: 4944477 - DNA, 25 bp, Homo sapien
tgtcaaggcaagaggagtccaaagc

SEQ ID NO: 4944478 - DNA, 25 bp, Homo sapien
cagaggcagtagacatgattttgac

SEQ ID NO: 4944479 - DNA, 25 bp, Homo sapien
tgacaaaaagacctcctctgggccg

SEQ ID NO: 4944480 - DNA, 25 bp, Homo sapien
cagcctcttgtcaaggcaagaggag

SEQ ID NO: 4944481 - DNA, 25 bp, Homo sapien
gaaatgcttgtattttggactcatc

SEQ ID NO: 4944482 - DNA, 25 bp, Homo sapien
agataattgtcaagggcaatgaaaa

SEQ ID NO: 4944483 - DNA, 25 bp, Homo sapien
tagccactcaacaggctgcgacggg

SEQ ID NO: 4944484 - DNA, 25 bp, Homo sapien
gacattggagagtgttatggccaca

SEQ ID NO: 4944485 - DNA, 25 bp, Homo sapien
gatggttgtgcacaggcttcggacc

SEQ ID NO: 4944486 - DNA, 25 bp, Homo sapien
gatatcgtttggatgtttgacaccc

SEQ ID NO: 4944487 - DNA, 25 bp, Homo sapien
aacctcaggctgacattggatcgcc

SEQ ID NO: 4944488 - DNA, 25 bp, Homo sapien
gcaaggtcttcctgtctcgaggcct

SEQ ID NO: 4944489 - DNA, 25 bp, Homo sapien
tgtcaatgttggtgtcttttcgctt

SEQ ID NO: 4944490 - DNA, 25 bp, Homo sapien
tctcctgaattgtcaatgttggtgt

SEQ ID NO: 4944491 - DNA, 25 bp, Homo sapien
aagagaactgaatacggtgtctgaa

SEQ ID NO: 4944492 - DNA, 25 bp, Homo sapien
cagcgtattgcagagactcagccac

SEQ ID NO: 4944493 - DNA, 25 bp, Homo sapien
ctgaacagcattccgtgagagaacc

SEQ ID NO: 4944494 - DNA, 25 bp, Homo sapien
agcattccgtgagagaaccacgacc

SEQ ID NO: 4944495 - DNA, 25 bp, Homo sapien
gaacagcattccgtgagagaaccac

SEQ ID NO: 4944496 - DNA, 25 bp, Homo sapien
cagcattccgtgagagaaccacgac

SEQ ID NO: 4944497 - DNA, 25 bp, Homo sapien
gctcattgagtatattaaccgggat

SEQ ID NO: 4944498 - DNA, 25 bp, Homo sapien
gggttttcagggctccgctcattga

SEQ ID NO: 4944499 - DNA, 25 bp, Homo sapien
ttcagggctccgctcattgagtata

SEQ ID NO: 4944500 - DNA, 25 bp, Homo sapien
gggctccgctcattgagtatattaa

SEQ ID NO: 4944501 - DNA, 25 bp, Homo sapien
agtatttaacagtcagcggccagcc

SEQ ID NO: 4944502 - DNA, 25 bp, Homo sapien
aaagtgcttgttctggtcatagagc

SEQ ID NO: 4944503 - DNA, 25 bp, Homo sapien
tgaggtttggatgccccttaagttc

SEQ ID NO: 4944504 - DNA, 25 bp, Homo sapien
aacctctggcaatcggtccattgag

SEQ ID NO: 4944505 - DNA, 25 bp, Homo sapien
gaaccacttggtaggattcgtgcca

SEQ ID NO: 4944506 - DNA, 25 bp, Homo sapien
gattgatgacacagccccatgaggt

SEQ ID NO: 4944507 - DNA, 25 bp, Homo sapien
tatgaagaggctacatcaggccagg

SEQ ID NO: 4944508 - DNA, 25 bp, Homo sapien
tgttgtttgcaagcaccgcggtcct

SEQ ID NO: 4944509 - DNA, 25 bp, Homo sapien
tccctttgaggacaccgtcattttg

SEQ ID NO: 4944510 - DNA, 25 bp, Homo sapien
tttcgcctctcgctcattatacatc

SEQ ID NO: 4944511 - DNA, 25 bp, Homo sapien
cacagacgttctttttcgcctctcg

SEQ ID NO: 4944512 - DNA, 25 bp, Homo sapien
ctctcgctcattatacatccctttg

SEQ ID NO: 4944513 - DNA, 25 bp, Homo sapien
tgcctgcgtcagacacctgtgatgt

SEQ ID NO: 4944514 - DNA, 25 bp, Homo sapien
tgtggaggtgcacacattgctaacc

SEQ ID NO: 4944515 - DNA, 25 bp, Homo sapien
tatgacgtggataatggtgcctgcg

SEQ ID NO: 4944516 - DNA, 25 bp, Homo sapien
tcaaagtgcttagcctgacgcctga

SEQ ID NO: 4944517 - DNA, 25 bp, Homo sapien
atttccccaagaattcggagttcag

SEQ ID NO: 4944518 - DNA, 25 bp, Homo sapien
ggtcccagctaattcagcaagtgca

SEQ ID NO: 4944519 - DNA, 25 bp, Homo sapien
tgaaatcgtatggatcaaagctgtc

SEQ ID NO: 4944520 - DNA, 25 bp, Homo sapien
cctcttggcctgagccggttgctga

SEQ ID NO: 4944521 - DNA, 25 bp, Homo sapien
tcaacaaacctaaatgagccagcag

SEQ ID NO: 4944522 - DNA, 25 bp, Homo sapien
cgcgcccgccaagatgggttgttga

SEQ ID NO: 4944523 - DNA, 25 bp, Homo sapien
tttaaaacgatgtcaccctggctct

SEQ ID NO: 4944524 - DNA, 25 bp, Homo sapien
catgttcttagacaatcctagggac

SEQ ID NO: 4944525 - DNA, 25 bp, Homo sapien
aaatgtttatttcaaagagcgttgg

SEQ ID NO: 4944526 - DNA, 25 bp, Homo sapien
ttgaaatgtttatttcaaagagcgt

SEQ ID NO: 4944527 - DNA, 25 bp, Homo sapien
ttttgaaatgtttatttcaaagagc

SEQ ID NO: 4944528 - DNA, 25 bp, Homo sapien
gaaatgtttatttcaaagagcgttg

SEQ ID NO: 4944529 - DNA, 25 bp, Homo sapien
gatgctctgtatcgatcgcatgcta

SEQ ID NO: 4944530 - DNA, 25 bp, Homo sapien
ggcggacaatcccagtgcagatgct

SEQ ID NO: 4944531 - DNA, 25 bp, Homo sapien
tggtgagtactcctctagatgtcga

SEQ ID NO: 4944532 - DNA, 25 bp, Homo sapien
cgcatgctatcggttctttcaagga

SEQ ID NO: 4944533 - DNA, 25 bp, Homo sapien
tagcaaactgcggaaactcctacag

SEQ ID NO: 4944534 - DNA, 25 bp, Homo sapien
ctcttctggagaacggcgcggtcag

SEQ ID NO: 4944535 - DNA, 25 bp, Homo sapien
gggatgcgctcggtcaagacttgaa

SEQ ID NO: 4944536 - DNA, 25 bp, Homo sapien
aaaaactcaggtgtgggcgcagaag

SEQ ID NO: 4944537 - DNA, 25 bp, Homo sapien
gcgcggatgccggacggagggaggg

SEQ ID NO: 4944538 - DNA, 25 bp, Homo sapien
cgcgacgctgactttggagtccttg

SEQ ID NO: 4944539 - DNA, 25 bp, Homo sapien
tgactttggagtccttgagcggcgc

SEQ ID NO: 4944540 - DNA, 25 bp, Homo sapien
ttgagcggcgcggatgccggacgga

SEQ ID NO: 4944541 - DNA, 25 bp, Homo sapien
gagccacagaggtgccgtcggagct

SEQ ID NO: 4944542 - DNA, 25 bp, Homo sapien
acagaggtgccgtcggagctgctgt

SEQ ID NO: 4944543 - DNA, 25 bp, Homo sapien
agccacagaggtgccgtcggagctg

SEQ ID NO: 4944544 - DNA, 25 bp, Homo sapien
acagcaggtgtcacgtgggtgtggc

SEQ ID NO: 4944545 - DNA, 25 bp, Homo sapien
tgctgcggaagaagaggccatagct

SEQ ID NO: 4944546 - DNA, 25 bp, Homo sapien
aaggcaacgggcagctgctgcggaa

SEQ ID NO: 4944547 - DNA, 25 bp, Homo sapien
agctggcacaccgattctgggaagc

SEQ ID NO: 4944548 - DNA, 25 bp, Homo sapien
cccgcgaatgatggcttttgaatta

SEQ ID NO: 4944549 - DNA, 25 bp, Homo sapien
agctgtagggtggacctggacccct

SEQ ID NO: 4944550 - DNA, 25 bp, Homo sapien
cctgatgatgagtcccaaggtacat

SEQ ID NO: 4944551 - DNA, 25 bp, Homo sapien
tggacccctcagagatgctcgactg

SEQ ID NO: 4944552 - DNA, 25 bp, Homo sapien
taattgactgagttacctacaggca

SEQ ID NO: 4944553 - DNA, 25 bp, Homo sapien
ggtgagtccagtgtattcccaagtg

SEQ ID NO: 4944554 - DNA, 25 bp, Homo sapien
tgcagatacacaaccacagacagtc

SEQ ID NO: 4944555 - DNA, 25 bp, Homo sapien
cccaggagagtgtaaagtgcaaggc

SEQ ID NO: 4944556 - DNA, 25 bp, Homo sapien
cactgccatttcagctccgagagag

SEQ ID NO: 4944557 - DNA, 25 bp, Homo sapien
cggcgcagcgctgcattcgtggtcc

SEQ ID NO: 4944558 - DNA, 25 bp, Homo sapien
ctgcattcgtggtcccgaatccggg

SEQ ID NO: 4944559 - DNA, 25 bp, Homo sapien
agcgtcataggtgcccagcgctgca

SEQ ID NO: 4944560 - DNA, 25 bp, Homo sapien
ctaaacgagcgtcataggtgcccag

SEQ ID NO: 4944561 - DNA, 25 bp, Homo sapien
attgaaaacgatgccggtgaggtcc

SEQ ID NO: 4944562 - DNA, 25 bp, Homo sapien
accattgaaaacgatgccggtgagg

SEQ ID NO: 4944563 - DNA, 25 bp, Homo sapien
ccaccattgaaaacgatgccggtga

SEQ ID NO: 4944564 - DNA, 25 bp, Homo sapien
agccccaccattgaaaacgatgccg

SEQ ID NO: 4944565 - DNA, 25 bp, Homo sapien
cagtgtggtcctctctgtccatggg

SEQ ID NO: 4944566 - DNA, 25 bp, Homo sapien
ttgggttttgtcagggtctcagagc

SEQ ID NO: 4944567 - DNA, 25 bp, Homo sapien
gatgccgtccagtgtggttgctgtc

SEQ ID NO: 4944568 - DNA, 25 bp, Homo sapien
ccgattgtcggaagcattgatgcca

SEQ ID NO: 4944569 - DNA, 25 bp, Homo sapien
tgccgtccgatgtggggactgtcca

SEQ ID NO: 4944570 - DNA, 25 bp, Homo sapien
atctggcgtggatgccgtccgatgt

SEQ ID NO: 4944571 - DNA, 25 bp, Homo sapien
gactgttttgtgtggggactgcctg

SEQ ID NO: 4944572 - DNA, 25 bp, Homo sapien
gccatctggcgtggatgccgtccga

SEQ ID NO: 4944573 - DNA, 25 bp, Homo sapien
ggtgtggggactgtccgctgtgggt

SEQ ID NO: 4944574 - DNA, 25 bp, Homo sapien
ctggtgtggggactgtccgctgtgg

SEQ ID NO: 4944575 - DNA, 25 bp, Homo sapien
tgtggggactgtccgctgtgggtac

SEQ ID NO: 4944576 - DNA, 25 bp, Homo sapien
gtgtggggactgtccgctgtgggta

SEQ ID NO: 4944577 - DNA, 25 bp, Homo sapien
gggactgtccattgtttgctgcact

SEQ ID NO: 4944578 - DNA, 25 bp, Homo sapien
gctgcacttgtctttgaggtttcct

SEQ ID NO: 4944579 - DNA, 25 bp, Homo sapien
ttgaggtttcctcccatgagcgtca

SEQ ID NO: 4944580 - DNA, 25 bp, Homo sapien
ggactgtccattgtttgctgcactt

SEQ ID NO: 4944581 - DNA, 25 bp, Homo sapien
gggactcgctggcatctagctcaca

SEQ ID NO: 4944582 - DNA, 25 bp, Homo sapien
gactcgctggcatctagctcacact

SEQ ID NO: 4944583 - DNA, 25 bp, Homo sapien
actcgctggcatctagctcacactc

SEQ ID NO: 4944584 - DNA, 25 bp, Homo sapien
ccgggactcgctggcatctagctca

SEQ ID NO: 4944585 - DNA, 25 bp, Homo sapien
tgtttgcccggtgtttctttggcca

SEQ ID NO: 4944586 - DNA, 25 bp, Homo sapien
gccagcctctcggttgtttgcccgg

SEQ ID NO: 4944587 - DNA, 25 bp, Homo sapien
gtttctttgtgcgtagcgccagcct

SEQ ID NO: 4944588 - DNA, 25 bp, Homo sapien
gtttctttgtgcgtagcaccagcct

SEQ ID NO: 4944589 - DNA, 25 bp, Homo sapien
gaaaacatggctgcctacacaggaa

SEQ ID NO: 4944590 - DNA, 25 bp, Homo sapien
tacacgttgatccatacctaggccg

SEQ ID NO: 4944591 - DNA, 25 bp, Homo sapien
tctcaaagcgaagaaggacgtggct

SEQ ID NO: 4944592 - DNA, 25 bp, Homo sapien
tagttaatgatgcactcgctgcagg

SEQ ID NO: 4944593 - DNA, 25 bp, Homo sapien
tttcctggtaatcgagcacctttgc

SEQ ID NO: 4944594 - DNA, 25 bp, Homo sapien
cagagtcatcagcaagcaccgagct

SEQ ID NO: 4944595 - DNA, 25 bp, Homo sapien
ttggagtccgctacacagatgttgg

SEQ ID NO: 4944596 - DNA, 25 bp, Homo sapien
cagatgttggcgcaggtcgtttcca

SEQ ID NO: 4944597 - DNA, 25 bp, Homo sapien
gagtgcttcaacgtggaatctcgca

SEQ ID NO: 4944598 - DNA, 25 bp, Homo sapien
tgaaaatcgaagcttgtcgtggcct

SEQ ID NO: 4944599 - DNA, 25 bp, Homo sapien
tagggcatgctcactgcgttacaga

SEQ ID NO: 4944600 - DNA, 25 bp, Homo sapien
tcggaagttgcacccatcaaatggg

SEQ ID NO: 4944601 - DNA, 25 bp, Homo sapien
tacagaggagcttgtgcacgcacat

SEQ ID NO: 4944602 - DNA, 25 bp, Homo sapien
tacagcatcgcgcagagtgggttca

SEQ ID NO: 4944603 - DNA, 25 bp, Homo sapien
tttgcacacactgacgagaccggtt

SEQ ID NO: 4944604 - DNA, 25 bp, Homo sapien
ggacaccgctttggcttgcagcaca

SEQ ID NO: 4944605 - DNA, 25 bp, Homo sapien
gctttagcacgcacgctccgaatga

SEQ ID NO: 4944606 - DNA, 25 bp, Homo sapien
agcttcttgcccctgttgacgtgga

SEQ ID NO: 4944607 - DNA, 25 bp, Homo sapien
taccagtccagttagcatgatttgc

SEQ ID NO: 4944608 - DNA, 25 bp, Homo sapien
gaatgactcctggtgctaggccatg

SEQ ID NO: 4944609 - DNA, 25 bp, Homo sapien
ccccgcgtgagaacgtgcataatga

SEQ ID NO: 4944610 - DNA, 25 bp, Homo sapien
tgagcgccatcctgctgaacgtgta

SEQ ID NO: 4944611 - DNA, 25 bp, Homo sapien
tattctgcagttgcagagccagccc

SEQ ID NO: 4944612 - DNA, 25 bp, Homo sapien
caaggtgcatacttagtgagcgcca

SEQ ID NO: 4944613 - DNA, 25 bp, Homo sapien
gcaggaaacggaaagtccatgctct

SEQ ID NO: 4944614 - DNA, 25 bp, Homo sapien
ctgtcaaatcagagctacgagctgc

SEQ ID NO: 4944615 - DNA, 25 bp, Homo sapien
gatcagtgcatttctgagcacggcc

SEQ ID NO: 4944616 - DNA, 25 bp, Homo sapien
cctgcgtccgatggcttctgctgtt

SEQ ID NO: 4944617 - DNA, 25 bp, Homo sapien
taattatttcttcatgccaagaagc

SEQ ID NO: 4944618 - DNA, 25 bp, Homo sapien
aattatttcttcatgccaagaagct

SEQ ID NO: 4944619 - DNA, 25 bp, Homo sapien
gaacacatgaactcctaagggctaa

SEQ ID NO: 4944620 - DNA, 25 bp, Homo sapien
tttgctaagtcaccgcgcaggagga

SEQ ID NO: 4944621 - DNA, 25 bp, Homo sapien
tccagtatcctgagtgagttgcaca

SEQ ID NO: 4944622 - DNA, 25 bp, Homo sapien
tcacaagacttgcagagggtaaggc

SEQ ID NO: 4944623 - DNA, 25 bp, Homo sapien
ggctcgggctcgagtggcgacgtgg

SEQ ID NO: 4944624 - DNA, 25 bp, Homo sapien
tcgggctcgagtggcgacgtgggcc

SEQ ID NO: 4944625 - DNA, 25 bp, Homo sapien
tcgggctcgggctcgagtggcgacg

SEQ ID NO: 4944626 - DNA, 25 bp, Homo sapien
ctcgggctcgagtggcgacgtgggc

SEQ ID NO: 4944627 - DNA, 25 bp, Homo sapien
actcgctgcagcgtggcagccttga

SEQ ID NO: 4944628 - DNA, 25 bp, Homo sapien
gactccctgtgtgttgagtcagggt

SEQ ID NO: 4944629 - DNA, 25 bp, Homo sapien
tgtcactgtgtgaccgtccatgtac

SEQ ID NO: 4944630 - DNA, 25 bp, Homo sapien
cctgtgtgttgagtcagggtcacca

SEQ ID NO: 4944631 - DNA, 25 bp, Homo sapien
ttttcggcacgactttaacaatctg

SEQ ID NO: 4944632 - DNA, 25 bp, Homo sapien
atctgctcaagctgaatgaccacag

SEQ ID NO: 4944633 - DNA, 25 bp, Homo sapien
tgcatgggctgagtttcccgcagtt

SEQ ID NO: 4944634 - DNA, 25 bp, Homo sapien
ctttgcgaatggttggatcacagac

SEQ ID NO: 4944635 - DNA, 25 bp, Homo sapien
cttctcggctgttatctgaaagggt

SEQ ID NO: 4944636 - DNA, 25 bp, Homo sapien
gctgctgtttggccttctcggctgt

SEQ ID NO: 4944637 - DNA, 25 bp, Homo sapien
tctcggctgttatctgaaagggtct

SEQ ID NO: 4944638 - DNA, 25 bp, Homo sapien
acgttgctgctgtttggccttctcg

SEQ ID NO: 4944639 - DNA, 25 bp, Homo sapien
ggttggccacgttgtgcttgccttt

SEQ ID NO: 4944640 - DNA, 25 bp, Homo sapien
gttggccacgttgtgcttgcctttg

SEQ ID NO: 4944641 - DNA, 25 bp, Homo sapien
tgagactgaaatgggacagttgccg

SEQ ID NO: 4944642 - DNA, 25 bp, Homo sapien
tgagctgtgagactgaaatgggaca

SEQ ID NO: 4944643 - DNA, 25 bp, Homo sapien
atgccgggagcctgtctgggtagat

SEQ ID NO: 4944644 - DNA, 25 bp, Homo sapien
cagttgccgggaagatgccgggagc

SEQ ID NO: 4944645 - DNA, 25 bp, Homo sapien
ggcctctgtagtttggcagtgacct

SEQ ID NO: 4944646 - DNA, 25 bp, Homo sapien
gggcctctgtagtttggcagtgacc

SEQ ID NO: 4944647 - DNA, 25 bp, Homo sapien
gctccgtctcactgttggaccgagg

SEQ ID NO: 4944648 - DNA, 25 bp, Homo sapien
ggttggctcaactccaaaaagagta

SEQ ID NO: 4944649 - DNA, 25 bp, Homo sapien
tcaaactcacatgcctagagcagct

SEQ ID NO: 4944650 - DNA, 25 bp, Homo sapien
gaaaatttcgtaccatgtgctcgct

SEQ ID NO: 4944651 - DNA, 25 bp, Homo sapien
tgggtcgtcaatccccacacctgag

SEQ ID NO: 4944652 - DNA, 25 bp, Homo sapien
gaatgcacacagctgcgggctgatg

SEQ ID NO: 4944653 - DNA, 25 bp, Homo sapien
aagatgcgtccaaacgcttcagcag

SEQ ID NO: 4944654 - DNA, 25 bp, Homo sapien
cgggaatgggtcgtggagcctgggt

SEQ ID NO: 4944655 - DNA, 25 bp, Homo sapien
tgtaggagggacgtcaaatgaacat

SEQ ID NO: 4944656 - DNA, 25 bp, Homo sapien
taaacaggactgtcaacacctaagt

SEQ ID NO: 4944657 - DNA, 25 bp, Homo sapien
cctaagtcataaccaataggtggtg

SEQ ID NO: 4944658 - DNA, 25 bp, Homo sapien
taggtggtgtcgaattaggatacgc

SEQ ID NO: 4944659 - DNA, 25 bp, Homo sapien
tgacacatttattccacccgttaaa

SEQ ID NO: 4944660 - DNA, 25 bp, Homo sapien
agtgatttccagatccagaatgtaa

SEQ ID NO: 4944661 - DNA, 25 bp, Homo sapien
tgtgaagaattgtcacagtgatttc

SEQ ID NO: 4944662 - DNA, 25 bp, Homo sapien
ttgacacatttattccacccgttaa

SEQ ID NO: 4944663 - DNA, 25 bp, Homo sapien
cagggccacgggccaggagggggag

SEQ ID NO: 4944664 - DNA, 25 bp, Homo sapien
aggagggaggcttgcggccttccca

SEQ ID NO: 4944665 - DNA, 25 bp, Homo sapien
gggctttgagaagcgacggggccat

SEQ ID NO: 4944666 - DNA, 25 bp, Homo sapien
gacggggccatagggcggagcgggc

SEQ ID NO: 4944667 - DNA, 25 bp, Homo sapien
atttccgcgtaaccaggaaccgcag

SEQ ID NO: 4944668 - DNA, 25 bp, Homo sapien
gaacacagttctcaacacgggcctc

SEQ ID NO: 4944669 - DNA, 25 bp, Homo sapien
cctgctcggaggtgatgtgattcag

SEQ ID NO: 4944670 - DNA, 25 bp, Homo sapien
ctccagggtctcgaaaatttccgcg

SEQ ID NO: 4944671 - DNA, 25 bp, Homo sapien
atggctgtccttctaaaccagaggg

SEQ ID NO: 4944672 - DNA, 25 bp, Homo sapien
cgtggcaccaaccagcgccgaaggg

SEQ ID NO: 4944673 - DNA, 25 bp, Homo sapien
agaccccgaagaaggactggctcct

SEQ ID NO: 4944674 - DNA, 25 bp, Homo sapien
tggccgtggcaaccgcgtggcacca

SEQ ID NO: 4944675 - DNA, 25 bp, Homo sapien
cacgctcttgacgtcaggtagcaca

SEQ ID NO: 4944676 - DNA, 25 bp, Homo sapien
accctgctgtgcgaggtccatatgg

SEQ ID NO: 4944677 - DNA, 25 bp, Homo sapien
tgaactctttgcacgctcttgacgt

SEQ ID NO: 4944678 - DNA, 25 bp, Homo sapien
aaggttcgctcgcaccaggaccagt

SEQ ID NO: 4944679 - DNA, 25 bp, Homo sapien
cattgtttgagattgctaagccttc

SEQ ID NO: 4944680 - DNA, 25 bp, Homo sapien
tcttatgaacacacggcttgattgc

SEQ ID NO: 4944681 - DNA, 25 bp, Homo sapien
ttctgagccgggcagctggtagccc

SEQ ID NO: 4944682 - DNA, 25 bp, Homo sapien
tcaagcactttcagaacggaatcct

SEQ ID NO: 4944683 - DNA, 25 bp, Homo sapien
gcagccgtggttattagcaagaatc

SEQ ID NO: 4944684 - DNA, 25 bp, Homo sapien
cagtttaaccaaccagcagccgtgg

SEQ ID NO: 4944685 - DNA, 25 bp, Homo sapien
aaacggacccagcatgggaggcagc

SEQ ID NO: 4944686 - DNA, 25 bp, Homo sapien
gacacgagtctatcttaacgaccta

SEQ ID NO: 4944687 - DNA, 25 bp, Homo sapien
gccagacaaatgaggaggccgcact

SEQ ID NO: 4944688 - DNA, 25 bp, Homo sapien
ccagggtcttgacacagttttgtac

SEQ ID NO: 4944689 - DNA, 25 bp, Homo sapien
gttttgtaccttcacgacatcctga

SEQ ID NO: 4944690 - DNA, 25 bp, Homo sapien
gggtcctcagttcaccactcacagg

SEQ ID NO: 4944691 - DNA, 25 bp, Homo sapien
tcaaagcccagagcaagtcagtgtg

SEQ ID NO: 4944692 - DNA, 25 bp, Homo sapien
gaagctgcaagggaagtggtcttta

SEQ ID NO: 4944693 - DNA, 25 bp, Homo sapien
aaaatcagttccttagggagtcagc

SEQ ID NO: 4944694 - DNA, 25 bp, Homo sapien
tgttctgaccgtgccatacaaggtg

SEQ ID NO: 4944695 - DNA, 25 bp, Homo sapien
gaacgatgccatttcccatagcgga

SEQ ID NO: 4944696 - DNA, 25 bp, Homo sapien
ttagtgaaacagacgaaacccctgc

SEQ ID NO: 4944697 - DNA, 25 bp, Homo sapien
gagattcagtcccagtgctgtcgag

SEQ ID NO: 4944698 - DNA, 25 bp, Homo sapien
ggaagacactactttgcagctcagt

SEQ ID NO: 4944699 - DNA, 25 bp, Homo sapien
cacgggaagtcactgctgcaaaaga

SEQ ID NO: 4944700 - DNA, 25 bp, Homo sapien
accatggagctgtggtgcgtgttct

SEQ ID NO: 4944701 - DNA, 25 bp, Homo sapien
tacatgtcgtaatggtgcgtatccc

SEQ ID NO: 4944702 - DNA, 25 bp, Homo sapien
gatctgctgccgatgaagcttttta

SEQ ID NO: 4944703 - DNA, 25 bp, Homo sapien
ttttaagaatccgtgcatgtggcag

SEQ ID NO: 4944704 - DNA, 25 bp, Homo sapien
tggaaagacatcgaggtcgcccact

SEQ ID NO: 4944705 - DNA, 25 bp, Homo sapien
ccctcagggcagaatgcggagaact

SEQ ID NO: 4944706 - DNA, 25 bp, Homo sapien
tcttggaggaagtcagggttccgcc

SEQ ID NO: 4944707 - DNA, 25 bp, Homo sapien
gcccttggctggcagtctgcgatct

SEQ ID NO: 4944708 - DNA, 25 bp, Homo sapien
tccagccgatttccctggtgctgag

SEQ ID NO: 4944709 - DNA, 25 bp, Homo sapien
tctgtcgagtcaagtccagccgatt

SEQ ID NO: 4944710 - DNA, 25 bp, Homo sapien
gcagtctgcgatctgtcgagtcaag

SEQ ID NO: 4944711 - DNA, 25 bp, Homo sapien
caatgcgaatggagtgtctgccgtg

SEQ ID NO: 4944712 - DNA, 25 bp, Homo sapien
gcgtgtatgacctaccctgcatctg

SEQ ID NO: 4944713 - DNA, 25 bp, Homo sapien
ctaaaacttggacggccaatgcgaa

SEQ ID NO: 4944714 - DNA, 25 bp, Homo sapien
gcacttgttactcgggcagcctgaa

SEQ ID NO: 4944715 - DNA, 25 bp, Homo sapien
aggacactgtgaggtctcagcaaag

SEQ ID NO: 4944716 - DNA, 25 bp, Homo sapien
gacgtggaggcagatagcacggaga

SEQ ID NO: 4944717 - DNA, 25 bp, Homo sapien
tcagcaaagacagcccttgagagct

SEQ ID NO: 4944718 - DNA, 25 bp, Homo sapien
gatagcacggagaaaggacactgtg

SEQ ID NO: 4944719 - DNA, 25 bp, Homo sapien
tcccgtgtgtgcctgtactgtcaaa

SEQ ID NO: 4944720 - DNA, 25 bp, Homo sapien
gacatatgtcttggaggagttccct

SEQ ID NO: 4944721 - DNA, 25 bp, Homo sapien
atgaaggcccgcgataacccaggtt

SEQ ID NO: 4944722 - DNA, 25 bp, Homo sapien
gaagagaacagctgatcggatcccg

SEQ ID NO: 4944723 - DNA, 25 bp, Homo sapien
cagccaccatgaatagcgaggatca

SEQ ID NO: 4944724 - DNA, 25 bp, Homo sapien
gccaccatgaatagcgaggatcaac

SEQ ID NO: 4944725 - DNA, 25 bp, Homo sapien
agccaccatgaatagcgaggatcaa

SEQ ID NO: 4944726 - DNA, 25 bp, Homo sapien
tgaagacagcaccgcatggatgtat

SEQ ID NO: 4944727 - DNA, 25 bp, Homo sapien
aagacagcaccgcatggatgtattc

SEQ ID NO: 4944728 - DNA, 25 bp, Homo sapien
ctgaagacagcaccgcatggatgta

SEQ ID NO: 4944729 - DNA, 25 bp, Homo sapien
gacagcaccgcatggatgtattcat

SEQ ID NO: 4944730 - DNA, 25 bp, Homo sapien
tcctgggtaaagtggctgtggctct

SEQ ID NO: 4944731 - DNA, 25 bp, Homo sapien
cttctcatttgagggcccaagttcc

SEQ ID NO: 4944732 - DNA, 25 bp, Homo sapien
cagtggattccagctggttttggca

SEQ ID NO: 4944733 - DNA, 25 bp, Homo sapien
ccaagttcctgtgggtccacgctca

SEQ ID NO: 4944734 - DNA, 25 bp, Homo sapien
gacaggaacgtcagggccaaacatt

SEQ ID NO: 4944735 - DNA, 25 bp, Homo sapien
tgaaacccgaggagtcagatgccag

SEQ ID NO: 4944736 - DNA, 25 bp, Homo sapien
ccaatgaaatagttgcgcaatcgca

SEQ ID NO: 4944737 - DNA, 25 bp, Homo sapien
tgtatcgcatggaggcgtggactca

SEQ ID NO: 4944738 - DNA, 25 bp, Homo sapien
tctccctctcgttgaaatgtttctt

SEQ ID NO: 4944739 - DNA, 25 bp, Homo sapien
tttcctctccctctcgttgaaatgt

SEQ ID NO: 4944740 - DNA, 25 bp, Homo sapien
ttgttttgtctggtggcgaggattt

SEQ ID NO: 4944741 - DNA, 25 bp, Homo sapien
tggtggcgaggattttcctctccct

SEQ ID NO: 4944742 - DNA, 25 bp, Homo sapien
agccagtccgttcatgtcctgtgca

SEQ ID NO: 4944743 - DNA, 25 bp, Homo sapien
gccagtccgttcatgtcctgtgcac

SEQ ID NO: 4944744 - DNA, 25 bp, Homo sapien
cagtccgttcatgtcctgtgcacct

SEQ ID NO: 4944745 - DNA, 25 bp, Homo sapien
tcagccagtccgttcatgtcctgtg

SEQ ID NO: 4944746 - DNA, 25 bp, Homo sapien
tcagccagtcggttcatgtcctccg

SEQ ID NO: 4944747 - DNA, 25 bp, Homo sapien
gaatcagccagtcggttcatgtcct

SEQ ID NO: 4944748 - DNA, 25 bp, Homo sapien
agccagtcggttcatgtcctccgca

SEQ ID NO: 4944749 - DNA, 25 bp, Homo sapien
tggaatcagccagtcggttcatgtc

SEQ ID NO: 4944750 - DNA, 25 bp, Homo sapien
agccagtcggttcatgtcctccgca

SEQ ID NO: 4944751 - DNA, 25 bp, Homo sapien
gaatcagccagtcggttcatgtcct

SEQ ID NO: 4944752 - DNA, 25 bp, Homo sapien
tcggttcatgtcctccgcacctgag

SEQ ID NO: 4944753 - DNA, 25 bp, Homo sapien
tggaatcagccagtcggttcatgtc

SEQ ID NO: 4944754 - DNA, 25 bp, Homo sapien
ccagtccgttttgctgcttgttagt

SEQ ID NO: 4944755 - DNA, 25 bp, Homo sapien
gccagtccgttttgctgcttgttag

SEQ ID NO: 4944756 - DNA, 25 bp, Homo sapien
cagggtggaaaggttgaaataaatg

SEQ ID NO: 4944757 - DNA, 25 bp, Homo sapien
cttgcagggtggaaaggttgaaata

SEQ ID NO: 4944758 - DNA, 25 bp, Homo sapien
tgcagggtggaaaggttgaaataaa

SEQ ID NO: 4944759 - DNA, 25 bp, Homo sapien
ttgcagggtggaaaggttgaaataa

SEQ ID NO: 4944760 - DNA, 25 bp, Homo sapien
tctttcctggatgggtaaccatggt

SEQ ID NO: 4944761 - DNA, 25 bp, Homo sapien
gtggattcatggctttcccgtgtgc

SEQ ID NO: 4944762 - DNA, 25 bp, Homo sapien
cagtctgctccagtgagtcctagag

SEQ ID NO: 4944763 - DNA, 25 bp, Homo sapien
taaccatggtgaggagcgtggtctc

SEQ ID NO: 4944764 - DNA, 25 bp, Homo sapien
tgtatccaagccttcctcgggtact

SEQ ID NO: 4944765 - DNA, 25 bp, Homo sapien
ctggcccctgtatccaagccttcct

SEQ ID NO: 4944766 - DNA, 25 bp, Homo sapien
tatccaagccttcctcgggtactgc

SEQ ID NO: 4944767 - DNA, 25 bp, Homo sapien
cctgtatccaagccttcctcgggta

SEQ ID NO: 4944768 - DNA, 25 bp, Homo sapien
aggggactgttttagagcctccagc

SEQ ID NO: 4944769 - DNA, 25 bp, Homo sapien
cctggatctagatggctctgctctt

SEQ ID NO: 4944770 - DNA, 25 bp, Homo sapien
gcagagagcactggttcccgcgcct

SEQ ID NO: 4944771 - DNA, 25 bp, Homo sapien
ctgtgccagtaaccccggaaaggct

SEQ ID NO: 4944772 - DNA, 25 bp, Homo sapien
cttcacctgtgagtggcaggtgcgc

SEQ ID NO: 4944773 - DNA, 25 bp, Homo sapien
ccatgaccgtctgtgagcttcacct

SEQ ID NO: 4944774 - DNA, 25 bp, Homo sapien
caggtgcgcgtggagtcagttcccc

SEQ ID NO: 4944775 - DNA, 25 bp, Homo sapien
ctcatagcttgtctcagagcaccag

SEQ ID NO: 4944776 - DNA, 25 bp, Homo sapien
agggagaagtatctgttgcgacccc

SEQ ID NO: 4944777 - DNA, 25 bp, Homo sapien
tccacgttaatgaaagagcagccat

SEQ ID NO: 4944778 - DNA, 25 bp, Homo sapien
cgcggtgggaattgccctgctgttt

SEQ ID NO: 4944779 - DNA, 25 bp, Homo sapien
tgttgcgaccccatctgttgcattt

SEQ ID NO: 4944780 - DNA, 25 bp, Homo sapien
gattacagcaaagccataaccctgt

SEQ ID NO: 4944781 - DNA, 25 bp, Homo sapien
gccatccggcagcaaaatgtgatga

SEQ ID NO: 4944782 - DNA, 25 bp, Homo sapien
taaccttgctccctaatcaggaata

SEQ ID NO: 4944783 - DNA, 25 bp, Homo sapien
gaggacactgttcagatgtgacgtc

SEQ ID NO: 4944784 - DNA, 25 bp, Homo sapien
tgccatcaggcaggcgcttaatgag

SEQ ID NO: 4944785 - DNA, 25 bp, Homo sapien
tgttttcacgagatcttcacggtta

SEQ ID NO: 4944786 - DNA, 25 bp, Homo sapien
gagatcttcacggttattttccatt

SEQ ID NO: 4944787 - DNA, 25 bp, Homo sapien
tccttggtgactggaggatgttttc

SEQ ID NO: 4944788 - DNA, 25 bp, Homo sapien
gggagtagaaatttctgcgtcctcc

SEQ ID NO: 4944789 - DNA, 25 bp, Homo sapien
agtagaaatttctgcgtcctcctgg

SEQ ID NO: 4944790 - DNA, 25 bp, Homo sapien
atggggagtagaaatttctgcgtcc

SEQ ID NO: 4944791 - DNA, 25 bp, Homo sapien
gagtagaaatttctgcgtcctcctg

SEQ ID NO: 4944792 - DNA, 25 bp, Homo sapien
ggactgacggcacaaaggttcttgg

SEQ ID NO: 4944793 - DNA, 25 bp, Homo sapien
tcgtggcttatctcaccatggacgc

SEQ ID NO: 4944794 - DNA, 25 bp, Homo sapien
gttggcgactcatcacactggactg

SEQ ID NO: 4944795 - DNA, 25 bp, Homo sapien
gaagagtttgtgttcgcagccacac

SEQ ID NO: 4944796 - DNA, 25 bp, Homo sapien
gctggtctcctggtgcagcatcgga

SEQ ID NO: 4944797 - DNA, 25 bp, Homo sapien
tcccctcggtggtctggtccttatc

SEQ ID NO: 4944798 - DNA, 25 bp, Homo sapien
ttatcaggttctgccacccgaaggc

SEQ ID NO: 4944799 - DNA, 25 bp, Homo sapien
tgtgtgtgcacttgccactcatctg

SEQ ID NO: 4944800 - DNA, 25 bp, Homo sapien
gccacactggccgaggagcagagcc

SEQ ID NO: 4944801 - DNA, 25 bp, Homo sapien
gggcgagtaggacggccacactggc

SEQ ID NO: 4944802 - DNA, 25 bp, Homo sapien
caggacctgtgggacttcctgcagg

SEQ ID NO: 4944803 - DNA, 25 bp, Homo sapien
agcatgccaatcaggacctgtggga

SEQ ID NO: 4944804 - DNA, 25 bp, Homo sapien
gctccttcgccttccgttcaccttc

SEQ ID NO: 4944805 - DNA, 25 bp, Homo sapien
acagagtttttgtcatcatcttatc

SEQ ID NO: 4944806 - DNA, 25 bp, Homo sapien
ctgcccctgtgtgttgcgtctggca

SEQ ID NO: 4944807 - DNA, 25 bp, Homo sapien
ttcaacagcaggtaaagaaaatcta

SEQ ID NO: 4944808 - DNA, 25 bp, Homo sapien
ttgcttcaactttcaatcttggatt

SEQ ID NO: 4944809 - DNA, 25 bp, Homo sapien
ggtttttgtcagcagactcacaggc

SEQ ID NO: 4944810 - DNA, 25 bp, Homo sapien
aatgcttgcgtgacgagctacaggg

SEQ ID NO: 4944811 - DNA, 25 bp, Homo sapien
tcacaggcagtagcatgcagccagc

SEQ ID NO: 4944812 - DNA, 25 bp, Homo sapien
tcctgggaataagtcgtcatgagct

SEQ ID NO: 4944813 - DNA, 25 bp, Homo sapien
cagcctttctggtggcatgaatcca

SEQ ID NO: 4944814 - DNA, 25 bp, Homo sapien
taccatgactgtccgagggagagtg

SEQ ID NO: 4944815 - DNA, 25 bp, Homo sapien
caggactcactgtggtgtgtagccc

SEQ ID NO: 4944816 - DNA, 25 bp, Homo sapien
cagcgttgctgagaggcatgattcc

SEQ ID NO: 4944817 - DNA, 25 bp, Homo sapien
cagtcccgctgttctccttgagtgg

SEQ ID NO: 4944818 - DNA, 25 bp, Homo sapien
gacatcacttgacgtttctggcata

SEQ ID NO: 4944819 - DNA, 25 bp, Homo sapien
gtaagatctccccttggtgccctcg

SEQ ID NO: 4944820 - DNA, 25 bp, Homo sapien
tgcagtcctgtaggacctccccttg

SEQ ID NO: 4944821 - DNA, 25 bp, Homo sapien
gctggatcttcgagaatgttagcaa

SEQ ID NO: 4944822 - DNA, 25 bp, Homo sapien
caggagtgactcaggtagacgcact

SEQ ID NO: 4944823 - DNA, 25 bp, Homo sapien
gcactccatcgcaggtggatgctgg

SEQ ID NO: 4944824 - DNA, 25 bp, Homo sapien
ttagcaaaacgctgacagtccagcc

SEQ ID NO: 4944825 - DNA, 25 bp, Homo sapien
tcatctggcaaaggcgagctccagc

SEQ ID NO: 4944826 - DNA, 25 bp, Homo sapien
ctgtcaggggagatagagtgaagct

SEQ ID NO: 4944827 - DNA, 25 bp, Homo sapien
gccgagttctcctggtggtgcagga

SEQ ID NO: 4944828 - DNA, 25 bp, Homo sapien
gcttcatctggcaaaggcgagctcc

SEQ ID NO: 4944829 - DNA, 25 bp, Homo sapien
ttggaaacaggtgagatgtctgagc

SEQ ID NO: 4944830 - DNA, 25 bp, Homo sapien
tgggcctttcctcgcccacgtgaag

SEQ ID NO: 4944831 - DNA, 25 bp, Homo sapien
agtcttaaatatctgtgggcctttc

SEQ ID NO: 4944832 - DNA, 25 bp, Homo sapien
tccaaaaagcacgacagacacactg

SEQ ID NO: 4944833 - DNA, 25 bp, Homo sapien
cagagggacggtgtcacctctgtca

SEQ ID NO: 4944834 - DNA, 25 bp, Homo sapien
acctctgtcacctctcggagggggg

SEQ ID NO: 4944835 - DNA, 25 bp, Homo sapien
agagggacggtgtcacctctgtcac

SEQ ID NO: 4944836 - DNA, 25 bp, Homo sapien
tctgtcacctctcggaggggggtga

SEQ ID NO: 4944837 - DNA, 25 bp, Homo sapien
ttgtggacactgataaggttctgac

SEQ ID NO: 4944838 - DNA, 25 bp, Homo sapien
ttcgccaagcgtgggcagtagatgt

SEQ ID NO: 4944839 - DNA, 25 bp, Homo sapien
ctggttgcattattttcgccaagcg

SEQ ID NO: 4944840 - DNA, 25 bp, Homo sapien
cagtagatgttcgtagacggtggca

SEQ ID NO: 4944841 - DNA, 25 bp, Homo sapien
gccgtctcccctttgattttgcaga

SEQ ID NO: 4944842 - DNA, 25 bp, Homo sapien
ctgggccggaaacggtcgcacctcg

SEQ ID NO: 4944843 - DNA, 25 bp, Homo sapien
gagtgcgaaggtctcagcgttcctg

SEQ ID NO: 4944844 - DNA, 25 bp, Homo sapien
ggctctcggaggctctgcacgtccg

SEQ ID NO: 4944845 - DNA, 25 bp, Homo sapien
gatctaccaggcaaagcgcctccag

SEQ ID NO: 4944846 - DNA, 25 bp, Homo sapien
ggatctaccaggcaaagcgcctcca

SEQ ID NO: 4944847 - DNA, 25 bp, Homo sapien
tctaccaggcaaagcgcctccagaa

SEQ ID NO: 4944848 - DNA, 25 bp, Homo sapien
atctaccaggcaaagcgcctccaga

SEQ ID NO: 4944849 - DNA, 25 bp, Homo sapien
agcttagagagtttattccatttgc

SEQ ID NO: 4944850 - DNA, 25 bp, Homo sapien
caggctgaactagcttagagagttt

SEQ ID NO: 4944851 - DNA, 25 bp, Homo sapien
tgccctttggaacccgccaacgatc

SEQ ID NO: 4944852 - DNA, 25 bp, Homo sapien
caccagctcaggctgaactagctta

SEQ ID NO: 4944853 - DNA, 25 bp, Homo sapien
tctgcaccaatttccgggtaaaata

SEQ ID NO: 4944854 - DNA, 25 bp, Homo sapien
cagcaaatcctagaatttgcattca

SEQ ID NO: 4944855 - DNA, 25 bp, Homo sapien
gcaattttgcactgataaaatctcc

SEQ ID NO: 4944856 - DNA, 25 bp, Homo sapien
aatctcctcatagtgccatatctca

SEQ ID NO: 4944857 - DNA, 25 bp, Homo sapien
gttagcatctgttggaattaactga

SEQ ID NO: 4944858 - DNA, 25 bp, Homo sapien
tgttagcatctgttggaattaactg

SEQ ID NO: 4944859 - DNA, 25 bp, Homo sapien
ctgttagcatctgttggaattaact

SEQ ID NO: 4944860 - DNA, 25 bp, Homo sapien
ttagcatctgttggaattaactgac

SEQ ID NO: 4944861 - DNA, 25 bp, Homo sapien
aagtggatggagcatagctaatttt

SEQ ID NO: 4944862 - DNA, 25 bp, Homo sapien
atgatgtcatccacattgcaaataa

SEQ ID NO: 4944863 - DNA, 25 bp, Homo sapien
gctaattttccaaatcgtattgatg

SEQ ID NO: 4944864 - DNA, 25 bp, Homo sapien
caaacaggaaggctccagtagccat

SEQ ID NO: 4944865 - DNA, 25 bp, Homo sapien
caattttgatggcaaggggacacat

SEQ ID NO: 4944866 - DNA, 25 bp, Homo sapien
gcctctggccacacggtaatagctc

SEQ ID NO: 4944867 - DNA, 25 bp, Homo sapien
tcatcatctggtgttcaattttgat

SEQ ID NO: 4944868 - DNA, 25 bp, Homo sapien
taatagctcaccacttttgtcatca

SEQ ID NO: 4944869 - DNA, 25 bp, Homo sapien
gagcaaaggcagaaacgccagccag

SEQ ID NO: 4944870 - DNA, 25 bp, Homo sapien
gacgtatccttcatgacaggtgctg

SEQ ID NO: 4944871 - DNA, 25 bp, Homo sapien
gcaaaggcagaaacgccagccaggg

SEQ ID NO: 4944872 - DNA, 25 bp, Homo sapien
ggagaactagaaagggccatatgaa

SEQ ID NO: 4944873 - DNA, 25 bp, Homo sapien
gttcaaaagcgggtccagaacctgc

SEQ ID NO: 4944874 - DNA, 25 bp, Homo sapien
tttaaccccgcagccgtggctggca

SEQ ID NO: 4944875 - DNA, 25 bp, Homo sapien
gcagccctgcggtagatcttggcaa

SEQ ID NO: 4944876 - DNA, 25 bp, Homo sapien
tgaaccctggaatgcacctgacaag

SEQ ID NO: 4944877 - DNA, 25 bp, Homo sapien
gtttgtgggaattgattcaggcctc

SEQ ID NO: 4944878 - DNA, 25 bp, Homo sapien
taagggtttgcttctctccggtgcc

SEQ ID NO: 4944879 - DNA, 25 bp, Homo sapien
ggtgcctggagcttgactgtaagtt

SEQ ID NO: 4944880 - DNA, 25 bp, Homo sapien
gcaaactggcttcggactttcccat

SEQ ID NO: 4944881 - DNA, 25 bp, Homo sapien
agcactgagcgagttgtctgtcttc

SEQ ID NO: 4944882 - DNA, 25 bp, Homo sapien
ccagaagcactgagcgagttgtctg

SEQ ID NO: 4944883 - DNA, 25 bp, Homo sapien
cgttcatccggatttccaatgccag

SEQ ID NO: 4944884 - DNA, 25 bp, Homo sapien
ttatgtcagtgacaagaaatcgttc

SEQ ID NO: 4944885 - DNA, 25 bp, Homo sapien
cagaaggacactcatcaacctaagg

SEQ ID NO: 4944886 - DNA, 25 bp, Homo sapien
tggcatttgcaccttggcccacaca

SEQ ID NO: 4944887 - DNA, 25 bp, Homo sapien
tctgtctatcatagcccagtccaca

SEQ ID NO: 4944888 - DNA, 25 bp, Homo sapien
cactttataacaccagaggctacca

SEQ ID NO: 4944889 - DNA, 25 bp, Homo sapien
agctggcgggtctcaccgtcgttat

SEQ ID NO: 4944890 - DNA, 25 bp, Homo sapien
caggctgaatgttctttcatgactg

SEQ ID NO: 4944891 - DNA, 25 bp, Homo sapien
ccccttttgtctcaggctgaatgtt

SEQ ID NO: 4944892 - DNA, 25 bp, Homo sapien
cgtcgttatcttccctgtgcgttaa

SEQ ID NO: 4944893 - DNA, 25 bp, Homo sapien
tggtgaccacatgaagaactgaacc

SEQ ID NO: 4944894 - DNA, 25 bp, Homo sapien
gtgggataccctgtctgctgtctgg

SEQ ID NO: 4944895 - DNA, 25 bp, Homo sapien
caagcactggtttctggtctgcagg

SEQ ID NO: 4944896 - DNA, 25 bp, Homo sapien
gtggccaggctaacaagcactggtt

SEQ ID NO: 4944897 - DNA, 25 bp, Homo sapien
tcaaaaacaactctgagtgtcgccg

SEQ ID NO: 4944898 - DNA, 25 bp, Homo sapien
tgagctgtagctggccagggtcttt

SEQ ID NO: 4944899 - DNA, 25 bp, Homo sapien
gagtgtcgccgagtattgctgagct

SEQ ID NO: 4944900 - DNA, 25 bp, Homo sapien
agctggccagggtctttcaattgtg

SEQ ID NO: 4944901 - DNA, 25 bp, Homo sapien
cgctgctaaaggctgaccattccaa

SEQ ID NO: 4944902 - DNA, 25 bp, Homo sapien
tttcccacacgctgctaaaggctga

SEQ ID NO: 4944903 - DNA, 25 bp, Homo sapien
aaatactgtcaatgcgatgctggca

SEQ ID NO: 4944904 - DNA, 25 bp, Homo sapien
cattccaaatactgtcaatgcgatg

SEQ ID NO: 4944905 - DNA, 25 bp, Homo sapien
gcccgctcctctcaggcgagcttcc

SEQ ID NO: 4944906 - DNA, 25 bp, Homo sapien
tctcaggcgagcttcccattgcagc

SEQ ID NO: 4944907 - DNA, 25 bp, Homo sapien
tcaggcgagcttcccattgcagctg

SEQ ID NO: 4944908 - DNA, 25 bp, Homo sapien
ccgctcctctcaggcgagcttccca

SEQ ID NO: 4944909 - DNA, 25 bp, Homo sapien
tccctcttcgtttgttcaggcacag

SEQ ID NO: 4944910 - DNA, 25 bp, Homo sapien
accgctccctcttcgtttgttcagg

SEQ ID NO: 4944911 - DNA, 25 bp, Homo sapien
ctgtctgccgcctgctgcatgcggg

SEQ ID NO: 4944912 - DNA, 25 bp, Homo sapien
ggcacagttcactgtctgccgcctg

SEQ ID NO: 4944913 - DNA, 25 bp, Homo sapien
aaggagccccttcgctggtccagtt

SEQ ID NO: 4944914 - DNA, 25 bp, Homo sapien
taccttcctccctgtatccgcctga

SEQ ID NO: 4944915 - DNA, 25 bp, Homo sapien
ttcctccctgtatccgcctgatcct

SEQ ID NO: 4944916 - DNA, 25 bp, Homo sapien
ttcgctggtccagttctaccttcct

SEQ ID NO: 4944917 - DNA, 25 bp, Homo sapien
tggaaatatctacgactctggagga

SEQ ID NO: 4944918 - DNA, 25 bp, Homo sapien
cagagtttccgttggcgtagcttga

SEQ ID NO: 4944919 - DNA, 25 bp, Homo sapien
gtgtggcccaagcatcagagtttcc

SEQ ID NO: 4944920 - DNA, 25 bp, Homo sapien
taggagacgagttcagtgtggccca

SEQ ID NO: 4944921 - DNA, 25 bp, Homo sapien
atgaagtttcgggaagacaggctgc

SEQ ID NO: 4944922 - DNA, 25 bp, Homo sapien
agcatgaagtttcgggaagacaggc

SEQ ID NO: 4944923 - DNA, 25 bp, Homo sapien
gcagcatgaagtttcgggaagacag

SEQ ID NO: 4944924 - DNA, 25 bp, Homo sapien
aagtttcgggaagacaggctgctct

SEQ ID NO: 4944925 - DNA, 25 bp, Homo sapien
tggagttcacagaccgagtggcgct

SEQ ID NO: 4944926 - DNA, 25 bp, Homo sapien
aagtttccagagcaagtggagcccg

SEQ ID NO: 4944927 - DNA, 25 bp, Homo sapien
aaagcagaatgcacgaagtttccag

SEQ ID NO: 4944928 - DNA, 25 bp, Homo sapien
gattgcaccgaagtcacagaccgag

SEQ ID NO: 4944929 - DNA, 25 bp, Homo sapien
tgaaaacgcactgagatcatagacc

SEQ ID NO: 4944930 - DNA, 25 bp, Homo sapien
tgaattcacacaccgagtggtgacc

SEQ ID NO: 4944931 - DNA, 25 bp, Homo sapien
caccgagtggtgaccagcttctctg

SEQ ID NO: 4944932 - DNA, 25 bp, Homo sapien
catagaccgagtggtatctggcttt

SEQ ID NO: 4944933 - DNA, 25 bp, Homo sapien
tccacagaccaagtggtgacggctt

SEQ ID NO: 4944934 - DNA, 25 bp, Homo sapien
cacagaccaagtggtgacggcttcc

SEQ ID NO: 4944935 - DNA, 25 bp, Homo sapien
cctgaggagaatgcacggagttcac

SEQ ID NO: 4944936 - DNA, 25 bp, Homo sapien
cggcttccctgaggagaatgcacgg

SEQ ID NO: 4944937 - DNA, 25 bp, Homo sapien
agatggtaccgaggtcacagaccga

SEQ ID NO: 4944938 - DNA, 25 bp, Homo sapien
cgaaggcgattgcatggagtccaca

SEQ ID NO: 4944939 - DNA, 25 bp, Homo sapien
cacagaccaagtggtgatggcttcc

SEQ ID NO: 4944940 - DNA, 25 bp, Homo sapien
agaccgagtggtgcccggcttccac

SEQ ID NO: 4944941 - DNA, 25 bp, Homo sapien
tgaaggagaccgcacggaagtcaca

SEQ ID NO: 4944942 - DNA, 25 bp, Homo sapien
agaccgcacggaagtcacaggctgc

SEQ ID NO: 4944943 - DNA, 25 bp, Homo sapien
aaggagaccgcacggaagtcacagg

SEQ ID NO: 4944944 - DNA, 25 bp, Homo sapien
cgcacggaagtcacaggctgcgtgt

SEQ ID NO: 4944945 - DNA, 25 bp, Homo sapien
cctgaaggagactgcgccgagttca

SEQ ID NO: 4944946 - DNA, 25 bp, Homo sapien
gccgagttcacagaccgagtggtgt

SEQ ID NO: 4944947 - DNA, 25 bp, Homo sapien
actgagtgatgtccggcttccctga

SEQ ID NO: 4944948 - DNA, 25 bp, Homo sapien
tccctgaaggagattgcaccaagtt

SEQ ID NO: 4944949 - DNA, 25 bp, Homo sapien
tactaggaagcattacagtaatcac

SEQ ID NO: 4944950 - DNA, 25 bp, Homo sapien
cagaaactagagagatttggccaac

SEQ ID NO: 4944951 - DNA, 25 bp, Homo sapien
ggccaactctattccaacagtgtct

SEQ ID NO: 4944952 - DNA, 25 bp, Homo sapien
gacaccttagctacataatccagaa

SEQ ID NO: 4944953 - DNA, 25 bp, Homo sapien
catagcctgcaatcttaaaagtata

SEQ ID NO: 4944954 - DNA, 25 bp, Homo sapien
tagctagcatttacttcccaaaaga

SEQ ID NO: 4944955 - DNA, 25 bp, Homo sapien
ggaatcacctaagatctacctatta

SEQ ID NO: 4944956 - DNA, 25 bp, Homo sapien
tatccaattttaccttgaccacaca

SEQ ID NO: 4944957 - DNA, 25 bp, Homo sapien
aacaggaaccctgcataggaccagc

SEQ ID NO: 4944958 - DNA, 25 bp, Homo sapien
ggaaccctgcataggaccagcccat

SEQ ID NO: 4944959 - DNA, 25 bp, Homo sapien
acaggaaccctgcataggaccagcc

SEQ ID NO: 4944960 - DNA, 25 bp, Homo sapien
ggaacaggaaccctgcataggacca

SEQ ID NO: 4944961 - DNA, 25 bp, Homo sapien
ggatgtgcttttcccagctaggaaa

SEQ ID NO: 4944962 - DNA, 25 bp, Homo sapien
tctgttacagaacagcgtgtgctgg

SEQ ID NO: 4944963 - DNA, 25 bp, Homo sapien
gagcacaaagtccacgggaaggatt

SEQ ID NO: 4944964 - DNA, 25 bp, Homo sapien
ttagggtttcgccttcttcctgctg

SEQ ID NO: 4944965 - DNA, 25 bp, Homo sapien
tcaaaaaggtcacaactcatttctg

SEQ ID NO: 4944966 - DNA, 25 bp, Homo sapien
ggaacagcaggacatatttatcttc

SEQ ID NO: 4944967 - DNA, 25 bp, Homo sapien
actcatttctgagtgtacgttgaca

SEQ ID NO: 4944968 - DNA, 25 bp, Homo sapien
tgtacgttgacatgaaaagttgaca

SEQ ID NO: 4944969 - DNA, 25 bp, Homo sapien
tctgaattgtatctttaatctcctg

SEQ ID NO: 4944970 - DNA, 25 bp, Homo sapien
ctgaattgtatctttaatctcctgg

SEQ ID NO: 4944971 - DNA, 25 bp, Homo sapien
catctgaattgtatctttaatctcc

SEQ ID NO: 4944972 - DNA, 25 bp, Homo sapien
ttcatctgaattgtatctttaatct

SEQ ID NO: 4944973 - DNA, 25 bp, Homo sapien
ccagtatttacagggcattgtccta

SEQ ID NO: 4944974 - DNA, 25 bp, Homo sapien
gagatgagttccctgtcatggcacc

SEQ ID NO: 4944975 - DNA, 25 bp, Homo sapien
tcatggcacctacgtgagaggcaga

SEQ ID NO: 4944976 - DNA, 25 bp, Homo sapien
gctttcagcttggtggaagattcca

SEQ ID NO: 4944977 - DNA, 25 bp, Homo sapien
tttgttatccttggcccattgaaca

SEQ ID NO: 4944978 - DNA, 25 bp, Homo sapien
ttgtaaaatgcaacaccatgcgctc

SEQ ID NO: 4944979 - DNA, 25 bp, Homo sapien
tattcttcaaacatggactcaccca

SEQ ID NO: 4944980 - DNA, 25 bp, Homo sapien
tataaccaaccacacttgaccgcag

SEQ ID NO: 4944981 - DNA, 25 bp, Homo sapien
caggacttaccatattatgttataa

SEQ ID NO: 4944982 - DNA, 25 bp, Homo sapien
tgctcacactcttgttctattttgt

SEQ ID NO: 4944983 - DNA, 25 bp, Homo sapien
tagccccagtgttcaaatcagcaca

SEQ ID NO: 4944984 - DNA, 25 bp, Homo sapien
taattggttatctatctgctcacac

SEQ ID NO: 4944985 - DNA, 25 bp, Homo sapien
ctctgaaaggcggaagttcttctgc

SEQ ID NO: 4944986 - DNA, 25 bp, Homo sapien
ggagggcgctgtgcttaacagcaaa

SEQ ID NO: 4944987 - DNA, 25 bp, Homo sapien
tctttttcttggtcgaacggctctg

SEQ ID NO: 4944988 - DNA, 25 bp, Homo sapien
tgagtccgtctgctcacacatgaga

SEQ ID NO: 4944989 - DNA, 25 bp, Homo sapien
acacaccaaggaacagtacttcatc

SEQ ID NO: 4944990 - DNA, 25 bp, Homo sapien
cacaccaaggaacagtacttcatcc

SEQ ID NO: 4944991 - DNA, 25 bp, Homo sapien
gttctttgccaaatcaacatgctcc

SEQ ID NO: 4944992 - DNA, 25 bp, Homo sapien
caaactgttctttgccaaatcaaca

SEQ ID NO: 4944993 - DNA, 25 bp, Homo sapien
gatgaagactctgatagttggttct

SEQ ID NO: 4944994 - DNA, 25 bp, Homo sapien
tgggaaagatgaagactctgatagt

SEQ ID NO: 4944995 - DNA, 25 bp, Homo sapien
ctgatagttggttcttcaggagcgg

SEQ ID NO: 4944996 - DNA, 25 bp, Homo sapien
cttcaggagcgggtgttgcttttac

SEQ ID NO: 4944997 - DNA, 25 bp, Homo sapien
taggacactaacatccacaagagtc

SEQ ID NO: 4944998 - DNA, 25 bp, Homo sapien
gagttcagattcgtgcccaggagag

SEQ ID NO: 4944999 - DNA, 25 bp, Homo sapien
gcttcagtctgcctccgtcaggatt

SEQ ID NO: 4945000 - DNA, 25 bp, Homo sapien
tagtttccgtcttgcatcccttaga

SEQ ID NO: 4945001 - DNA, 25 bp, Homo sapien
gagctcaggctgctaccagaaggca

SEQ ID NO: 4945002 - DNA, 25 bp, Homo sapien
tacagaatgcctacgaataccagat

SEQ ID NO: 4945003 - DNA, 25 bp, Homo sapien
tgatagggctcagtcgttgccgagt

SEQ ID NO: 4945004 - DNA, 25 bp, Homo sapien
gaatccactcgccaactcagaaatg

SEQ ID NO: 4945005 - DNA, 25 bp, Homo sapien
gatgtgtgttcctgacaactgaatg

SEQ ID NO: 4945006 - DNA, 25 bp, Homo sapien
tgtagagtagaaagtgtttccacac

SEQ ID NO: 4945007 - DNA, 25 bp, Homo sapien
atttcttggcacgtggaaaacagaa

SEQ ID NO: 4945008 - DNA, 25 bp, Homo sapien
cacgtattccatgcgcaagtcagca

SEQ ID NO: 4945009 - DNA, 25 bp, Homo sapien
tcttcactaccacaaggacagtgtg

SEQ ID NO: 4945010 - DNA, 25 bp, Homo sapien
catccccgtgattctgttatcttca

SEQ ID NO: 4945011 - DNA, 25 bp, Homo sapien
gaaaccatccccgtgattctgttat

SEQ ID NO: 4945012 - DNA, 25 bp, Homo sapien
tccccgttatgaaaccatcagctct

SEQ ID NO: 4945013 - DNA, 25 bp, Homo sapien
taggaaaaagtgaatccaggagact

SEQ ID NO: 4945014 - DNA, 25 bp, Homo sapien
taaggaatcaattactctgtcagtc

SEQ ID NO: 4945015 - DNA, 25 bp, Homo sapien
tattgttcttctactggcataagga

SEQ ID NO: 4945016 - DNA, 25 bp, Homo sapien
gaggactccttctaaaagctggaaa

SEQ ID NO: 4945017 - DNA, 25 bp, Homo sapien
cccccgaccttcttcacccatctga

SEQ ID NO: 4945018 - DNA, 25 bp, Homo sapien
tgagcccctgtaccccccgagcctc

SEQ ID NO: 4945019 - DNA, 25 bp, Homo sapien
gagcctctgcacgcatctgagtccc

SEQ ID NO: 4945020 - DNA, 25 bp, Homo sapien
tctgcacgcatctgagtccctgcat

SEQ ID NO: 4945021 - DNA, 25 bp, Homo sapien
gaaaccatggcgatgtgcgagaggg

SEQ ID NO: 4945022 - DNA, 25 bp, Homo sapien
cctgtgcgtcgtcctcggattgagg

SEQ ID NO: 4945023 - DNA, 25 bp, Homo sapien
ggcgatgtgcgagagggtcagggtc

SEQ ID NO: 4945024 - DNA, 25 bp, Homo sapien
tccgttgcggtgcaggaaaccatgg

SEQ ID NO: 4945025 - DNA, 25 bp, Homo sapien
acatcagcaatttgcagggaccacc

SEQ ID NO: 4945026 - DNA, 25 bp, Homo sapien
tttacatcagcaatttgcagggacc

SEQ ID NO: 4945027 - DNA, 25 bp, Homo sapien
ttcatttacatcagcaatttgcagg

SEQ ID NO: 4945028 - DNA, 25 bp, Homo sapien
catttacatcagcaatttgcaggga

SEQ ID NO: 4945029 - DNA, 25 bp, Homo sapien
ccacggtttcttgtctcacatggcc

SEQ ID NO: 4945030 - DNA, 25 bp, Homo sapien
gcatctgcggactcaggaaggctcc

SEQ ID NO: 4945031 - DNA, 25 bp, Homo sapien
caggaaggctcccacggtttcttgt

SEQ ID NO: 4945032 - DNA, 25 bp, Homo sapien
cggactcaggaaggctcccacggtt

SEQ ID NO: 4945033 - DNA, 25 bp, Homo sapien
tcaccagtctgtgctcccattgagc

SEQ ID NO: 4945034 - DNA, 25 bp, Homo sapien
gggaagttcagtgaggcctactctc

SEQ ID NO: 4945035 - DNA, 25 bp, Homo sapien
tgagctagttacaattctgtcacag

SEQ ID NO: 4945036 - DNA, 25 bp, Homo sapien
taggatagacactagaaatcgggaa

SEQ ID NO: 4945037 - DNA, 25 bp, Homo sapien
ttcacgaggttgatgatactaagca

SEQ ID NO: 4945038 - DNA, 25 bp, Homo sapien
tactaagcagactgaacgtccgagc

SEQ ID NO: 4945039 - DNA, 25 bp, Homo sapien
cacagcatgcactaactggctgacg

SEQ ID NO: 4945040 - DNA, 25 bp, Homo sapien
tgatggtgactagtgacccgcctct

SEQ ID NO: 4945041 - DNA, 25 bp, Homo sapien
ggttgttttagccttctcatggaac

SEQ ID NO: 4945042 - DNA, 25 bp, Homo sapien
tgagtagtattgcatggtatccact

SEQ ID NO: 4945043 - DNA, 25 bp, Homo sapien
aaagccaggcatgttttcaaggact

SEQ ID NO: 4945044 - DNA, 25 bp, Homo sapien
caaggactataatggtggaggtaaa

SEQ ID NO: 4945045 - DNA, 25 bp, Homo sapien
gattagagagtccagaaagggaccc

SEQ ID NO: 4945046 - DNA, 25 bp, Homo sapien
tgaacacatcagtcagtagcacaga

SEQ ID NO: 4945047 - DNA, 25 bp, Homo sapien
ttcgtttatacaggcagagagagac

SEQ ID NO: 4945048 - DNA, 25 bp, Homo sapien
tctagagacagacgttacacccttc

SEQ ID NO: 4945049 - DNA, 25 bp, Homo sapien
tacacagttctacagctccctgagg

SEQ ID NO: 4945050 - DNA, 25 bp, Homo sapien
ggtccaggttctatctacacagttc

SEQ ID NO: 4945051 - DNA, 25 bp, Homo sapien
gagttaacctaccagctccacggtg

SEQ ID NO: 4945052 - DNA, 25 bp, Homo sapien
tcgtctctgactacacacattggca

SEQ ID NO: 4945053 - DNA, 25 bp, Homo sapien
tttacaatggaaacgatgtatttta

SEQ ID NO: 4945054 - DNA, 25 bp, Homo sapien
tttatgggggattacacatcaattc

SEQ ID NO: 4945055 - DNA, 25 bp, Homo sapien
ttatgggggattacacatcaattct

SEQ ID NO: 4945056 - DNA, 25 bp, Homo sapien
ctgatttttacaatggaaacgatgt

SEQ ID NO: 4945057 - DNA, 25 bp, Homo sapien
cagtagatccagaagtggcataatc

SEQ ID NO: 4945058 - DNA, 25 bp, Homo sapien
caggtgtgactcagacttcagtaga

SEQ ID NO: 4945059 - DNA, 25 bp, Homo sapien
tctgccatttacatcggtaatagtc

SEQ ID NO: 4945060 - DNA, 25 bp, Homo sapien
ggcataatctgtctctgagaccttc

SEQ ID NO: 4945061 - DNA, 25 bp, Homo sapien
cagcaactcacgtaacctcttagag

SEQ ID NO: 4945062 - DNA, 25 bp, Homo sapien
caagaacacgcactttctttaggcc

SEQ ID NO: 4945063 - DNA, 25 bp, Homo sapien
taattactcaggaaagttcaagaga

SEQ ID NO: 4945064 - DNA, 25 bp, Homo sapien
tttattatttacgtagaggagacag

SEQ ID NO: 4945065 - DNA, 25 bp, Homo sapien
aagagcactgttggcgttcagcgag

SEQ ID NO: 4945066 - DNA, 25 bp, Homo sapien
catctgaggaagagcactgttggcg

SEQ ID NO: 4945067 - DNA, 25 bp, Homo sapien
tcgagcatctgaggaagagcactgt

SEQ ID NO: 4945068 - DNA, 25 bp, Homo sapien
cacaccagtcaaatcgagcatctga

SEQ ID NO: 4945069 - DNA, 25 bp, Homo sapien
gaagtcacgactaagatttgcaaac

SEQ ID NO: 4945070 - DNA, 25 bp, Homo sapien
gcaattattagccagaaattgttgt

SEQ ID NO: 4945071 - DNA, 25 bp, Homo sapien
gagattcaaaattcacgctgcctag

SEQ ID NO: 4945072 - DNA, 25 bp, Homo sapien
taaactaagctttcatgctgaagtc

SEQ ID NO: 4945073 - DNA, 25 bp, Homo sapien
ccaatgtggcgaaacaccgcctata

SEQ ID NO: 4945074 - DNA, 25 bp, Homo sapien
gcaaatgagcatttgttctgaaaaa

SEQ ID NO: 4945075 - DNA, 25 bp, Homo sapien
aaagatcatagtagttagcctagct

SEQ ID NO: 4945076 - DNA, 25 bp, Homo sapien
acatataaaagcttgcatcggccgg

SEQ ID NO: 4945077 - DNA, 25 bp, Homo sapien
ccgcatcgtacaaggctttctgcct

SEQ ID NO: 4945078 - DNA, 25 bp, Homo sapien
tacacatgtataactgctgttactg

SEQ ID NO: 4945079 - DNA, 25 bp, Homo sapien
aaacagatgtctatactggaaccag

SEQ ID NO: 4945080 - DNA, 25 bp, Homo sapien
caaacgcataaggaccagtggcagc

SEQ ID NO: 4945081 - DNA, 25 bp, Homo sapien
tagaacgttcagagatggaacagcc

SEQ ID NO: 4945082 - DNA, 25 bp, Homo sapien
cctgagatgagactaaggctagaac

SEQ ID NO: 4945083 - DNA, 25 bp, Homo sapien
tgatcgtgtgaacggttccatgacc

SEQ ID NO: 4945084 - DNA, 25 bp, Homo sapien
cagcccgagccaagtgatcgtgtga

SEQ ID NO: 4945085 - DNA, 25 bp, Homo sapien
catgaatgacgggaactccaacatc

SEQ ID NO: 4945086 - DNA, 25 bp, Homo sapien
tctgcttacatctctaggacagtcc

SEQ ID NO: 4945087 - DNA, 25 bp, Homo sapien
gggaccactcaggtcattaaggtgc

SEQ ID NO: 4945088 - DNA, 25 bp, Homo sapien
tgcctcctctgcttacatctctagg

SEQ ID NO: 4945089 - DNA, 25 bp, Homo sapien
cacgtccctggattaaaggtaactg

SEQ ID NO: 4945090 - DNA, 25 bp, Homo sapien
ttgcagccagacaataggaacatct

SEQ ID NO: 4945091 - DNA, 25 bp, Homo sapien
tggctttgttcaacaaggagacccg

SEQ ID NO: 4945092 - DNA, 25 bp, Homo sapien
tggcggaagaaactaaagggaagca

SEQ ID NO: 4945093 - DNA, 25 bp, Homo sapien
tcagtggcagggacgacaatgctgc

SEQ ID NO: 4945094 - DNA, 25 bp, Homo sapien
aacggtcctgctgccgctcaaggcg

SEQ ID NO: 4945095 - DNA, 25 bp, Homo sapien
atctttagtcgcagagattcatggg

SEQ ID NO: 4945096 - DNA, 25 bp, Homo sapien
caatgctgcagatcaggaggaacct

SEQ ID NO: 4945097 - DNA, 25 bp, Homo sapien
agcgttcaacctgatgccacttacc

SEQ ID NO: 4945098 - DNA, 25 bp, Homo sapien
cagcgttcaacctgatgccacttac

SEQ ID NO: 4945099 - DNA, 25 bp, Homo sapien
gcagacaagccaagtacaaatccca

SEQ ID NO: 4945100 - DNA, 25 bp, Homo sapien
ttccacatctcacggtgctctgcaa

SEQ ID NO: 4945101 - DNA, 25 bp, Homo sapien
tgcaaggtgaccttggtcctcctcc

SEQ ID NO: 4945102 - DNA, 25 bp, Homo sapien
gtgctcaacaagagatgcacaggtg

SEQ ID NO: 4945103 - DNA, 25 bp, Homo sapien
tctatgtcggccaattctctttaca

SEQ ID NO: 4945104 - DNA, 25 bp, Homo sapien
catgaggatctgctactctttgccc

SEQ ID NO: 4945105 - DNA, 25 bp, Homo sapien
tgtttaagatgtccttcgacgccga

SEQ ID NO: 4945106 - DNA, 25 bp, Homo sapien
gcataaccctgggactaagtttcca

SEQ ID NO: 4945107 - DNA, 25 bp, Homo sapien
gttcaaaagcccaaggatttatatg

SEQ ID NO: 4945108 - DNA, 25 bp, Homo sapien
tctcaacctcatgccaacggaacag

SEQ ID NO: 4945109 - DNA, 25 bp, Homo sapien
caaggaatgcttgcctgatactcta

SEQ ID NO: 4945110 - DNA, 25 bp, Homo sapien
tagaacaaccatacatgctaagcaa

SEQ ID NO: 4945111 - DNA, 25 bp, Homo sapien
taatatctttttgtcataactcacg

SEQ ID NO: 4945112 - DNA, 25 bp, Homo sapien
tcaatgtcttcatccgctgcatggg

SEQ ID NO: 4945113 - DNA, 25 bp, Homo sapien
gctgcatgggagtcataatatcttt

SEQ ID NO: 4945114 - DNA, 25 bp, Homo sapien
tctttttgtcataactcacgagttc

SEQ ID NO: 4945115 - DNA, 25 bp, Homo sapien
aaaaagagcattagcgggcaataga

SEQ ID NO: 4945116 - DNA, 25 bp, Homo sapien
tagaaaatcttcaagtggccgacag

SEQ ID NO: 4945117 - DNA, 25 bp, Homo sapien
agatcatggcggacgggaggcaaga

SEQ ID NO: 4945118 - DNA, 25 bp, Homo sapien
tgtgaaagattagatattgaagaga

SEQ ID NO: 4945119 - DNA, 25 bp, Homo sapien
cgcacgacgcgggactggccggcag

SEQ ID NO: 4945120 - DNA, 25 bp, Homo sapien
tgcgcgcgcacgacgcgggactggc

SEQ ID NO: 4945121 - DNA, 25 bp, Homo sapien
ggagtgcgcgcgcacgacgcgggac

SEQ ID NO: 4945122 - DNA, 25 bp, Homo sapien
gactgaggagtgcgcgcgcacgacg

SEQ ID NO: 4945123 - DNA, 25 bp, Homo sapien
ctgcagcttcactcccgagccagcg

SEQ ID NO: 4945124 - DNA, 25 bp, Homo sapien
aggaagaaactccgaacacatccga

SEQ ID NO: 4945125 - DNA, 25 bp, Homo sapien
aaggaagaaactccgaacacatccg

SEQ ID NO: 4945126 - DNA, 25 bp, Homo sapien
actcccgagccagcgagaccacgaa

SEQ ID NO: 4945127 - DNA, 25 bp, Homo sapien
aggaaatgtaccctccagtgggagc

SEQ ID NO: 4945128 - DNA, 25 bp, Homo sapien
ttttgagtcaaaaacagagggcctg

SEQ ID NO: 4945129 - DNA, 25 bp, Homo sapien
tcagaggtgactgtccgtactccag

SEQ ID NO: 4945130 - DNA, 25 bp, Homo sapien
gagacgtgcatcaggtcttcaggaa

SEQ ID NO: 4945131 - DNA, 25 bp, Homo sapien
cagccaatttagatccacagcaaga

SEQ ID NO: 4945132 - DNA, 25 bp, Homo sapien
tggagatgccgtcaacagaagctgg

SEQ ID NO: 4945133 - DNA, 25 bp, Homo sapien
accaaggcagttgcctagacttgga

SEQ ID NO: 4945134 - DNA, 25 bp, Homo sapien
accagccaatttagatccacagcaa

SEQ ID NO: 4945135 - DNA, 25 bp, Homo sapien
atctgaagtccataggaattggaaa

SEQ ID NO: 4945136 - DNA, 25 bp, Homo sapien
tgaagtccataggaattggaaacat

SEQ ID NO: 4945137 - DNA, 25 bp, Homo sapien
gaagaggatataatcatgctttgct

SEQ ID NO: 4945138 - DNA, 25 bp, Homo sapien
gaaggggaagaggatataatcatgc

SEQ ID NO: 4945139 - DNA, 25 bp, Homo sapien
gtcctgtcagttccggaaggagtat

SEQ ID NO: 4945140 - DNA, 25 bp, Homo sapien
cctgtcagttccggaaggagtattt

SEQ ID NO: 4945141 - DNA, 25 bp, Homo sapien
gagtcctgtcagttccggaaggagt

SEQ ID NO: 4945142 - DNA, 25 bp, Homo sapien
tgtcagttccggaaggagtatttgg

SEQ ID NO: 4945143 - DNA, 25 bp, Homo sapien
tcagacggggaccagggagtctttg

SEQ ID NO: 4945144 - DNA, 25 bp, Homo sapien
ggaccagggagtctttgtcggtgtc

SEQ ID NO: 4945145 - DNA, 25 bp, Homo sapien
cagacggggaccagggagtctttgt

SEQ ID NO: 4945146 - DNA, 25 bp, Homo sapien
ccagggagtctttgtcggtgtctgt

SEQ ID NO: 4945147 - DNA, 25 bp, Homo sapien
gagccaacttccatgttccatgcca

SEQ ID NO: 4945148 - DNA, 25 bp, Homo sapien
ggaaaacgttcatcagagtcccaca

SEQ ID NO: 4945149 - DNA, 25 bp, Homo sapien
cagcatggaaaacgttcatcagagt

SEQ ID NO: 4945150 - DNA, 25 bp, Homo sapien
gagagccaacttccatgttccatgc

SEQ ID NO: 4945151 - DNA, 25 bp, Homo sapien
gaaaatcctggccaccatacgaagg

SEQ ID NO: 4945152 - DNA, 25 bp, Homo sapien
tcgtgcccgatgctggaaaatcctg

SEQ ID NO: 4945153 - DNA, 25 bp, Homo sapien
gctacagttccatgcaggcaggtca

SEQ ID NO: 4945154 - DNA, 25 bp, Homo sapien
tcagggatgtagcagacacaggctc

SEQ ID NO: 4945155 - DNA, 25 bp, Homo sapien
catctgggattttgggactctagga

SEQ ID NO: 4945156 - DNA, 25 bp, Homo sapien
acctgtgttgggctaggcagtctga

SEQ ID NO: 4945157 - DNA, 25 bp, Homo sapien
caccataaatgtggctaagggcatt

SEQ ID NO: 4945158 - DNA, 25 bp, Homo sapien
ggctctcacaagaatccaagaaagg

SEQ ID NO: 4945159 - DNA, 25 bp, Homo sapien
aatgaacagcaaacgcgtggtggca

SEQ ID NO: 4945160 - DNA, 25 bp, Homo sapien
gaatgaacagcaaacgcgtggtggc

SEQ ID NO: 4945161 - DNA, 25 bp, Homo sapien
acagcaaacgcgtggtggcagagaa

SEQ ID NO: 4945162 - DNA, 25 bp, Homo sapien
tgaacagcaaacgcgtggtggcaga

SEQ ID NO: 4945163 - DNA, 25 bp, Homo sapien
gtgagaagtttgtccacctccaagg

SEQ ID NO: 4945164 - DNA, 25 bp, Homo sapien
tatgtgtttgaatactcaaaacaaa

SEQ ID NO: 4945165 - DNA, 25 bp, Homo sapien
gctccgttacaaggtgtctgagaag

SEQ ID NO: 4945166 - DNA, 25 bp, Homo sapien
ccaagggaagctccgttacaaggtg

SEQ ID NO: 4945167 - DNA, 25 bp, Homo sapien
tctcctagagatatccctcgagctg

SEQ ID NO: 4945168 - DNA, 25 bp, Homo sapien
catagacaggagtggtcctggatcc

SEQ ID NO: 4945169 - DNA, 25 bp, Homo sapien
cagaactccagaactgagaccacca

SEQ ID NO: 4945170 - DNA, 25 bp, Homo sapien
aggtggctgttgagtctcctagaga

SEQ ID NO: 4945171 - DNA, 25 bp, Homo sapien
aaatttgagtattcgtcttgacggc

SEQ ID NO: 4945172 - DNA, 25 bp, Homo sapien
catattaaacatacgctgggcacag

SEQ ID NO: 4945173 - DNA, 25 bp, Homo sapien
caaatgttcacccatgtaagatcta

SEQ ID NO: 4945174 - DNA, 25 bp, Homo sapien
tccaggagtggtagtgggcttacac

SEQ ID NO: 4945175 - DNA, 25 bp, Homo sapien
gcacaggctatattacaccctcttt

SEQ ID NO: 4945176 - DNA, 25 bp, Homo sapien
aaggtctttcgcacctacgtcgtga

SEQ ID NO: 4945177 - DNA, 25 bp, Homo sapien
gatactgttcattttaacaggccac

SEQ ID NO: 4945178 - DNA, 25 bp, Homo sapien
actgaaaatcagctagagatggtac

SEQ ID NO: 4945179 - DNA, 25 bp, Homo sapien
gagtcttctagacctaactcagcaa

SEQ ID NO: 4945180 - DNA, 25 bp, Homo sapien
aatgagatcctccaacaccttgcgg

SEQ ID NO: 4945181 - DNA, 25 bp, Homo sapien
tcctgactgccctaaaatgagatcc

SEQ ID NO: 4945182 - DNA, 25 bp, Homo sapien
ttagtgtgtggtcgcgtccctcacg

SEQ ID NO: 4945183 - DNA, 25 bp, Homo sapien
agcagagaccctttcgaccgaggaa

SEQ ID NO: 4945184 - DNA, 25 bp, Homo sapien
tcatagcatcgttgaccagggagca

SEQ ID NO: 4945185 - DNA, 25 bp, Homo sapien
gaaatgtccgaatcaaaacgcgtga

SEQ ID NO: 4945186 - DNA, 25 bp, Homo sapien
caaagcttgtcaggtctcggaagga

SEQ ID NO: 4945187 - DNA, 25 bp, Homo sapien
gaagatcgctgcagtaaagccagag

SEQ ID NO: 4945188 - DNA, 25 bp, Homo sapien
cattgagtatgacgtgttggcgcga

SEQ ID NO: 4945189 - DNA, 25 bp, Homo sapien
tgacacatttgagtagagatccccg

SEQ ID NO: 4945190 - DNA, 25 bp, Homo sapien
gtttgatccgtagaagaccctgaca

SEQ ID NO: 4945191 - DNA, 25 bp, Homo sapien
agactgtgttcagagttgtgtcaaa

SEQ ID NO: 4945192 - DNA, 25 bp, Homo sapien
gtgttcagagttgtgtcaaacctca

SEQ ID NO: 4945193 - DNA, 25 bp, Homo sapien
actgtgttcagagttgtgtcaaacc

SEQ ID NO: 4945194 - DNA, 25 bp, Homo sapien
tgtgttcagagttgtgtcaaacctc

SEQ ID NO: 4945195 - DNA, 25 bp, Homo sapien
tgtatcatacatggggttttcaaac

SEQ ID NO: 4945196 - DNA, 25 bp, Homo sapien
cattgtattgaacttttggtctcgt

SEQ ID NO: 4945197 - DNA, 25 bp, Homo sapien
tttcatgcccagcatagccattgta

SEQ ID NO: 4945198 - DNA, 25 bp, Homo sapien
gggttttcaaacgatgcttgtccat

SEQ ID NO: 4945199 - DNA, 25 bp, Homo sapien
gaagagaagctcatctgatcatggc

SEQ ID NO: 4945200 - DNA, 25 bp, Homo sapien
gatattatatgacccagaggaaccc

SEQ ID NO: 4945201 - DNA, 25 bp, Homo sapien
caggcaagttgagggaaaacagctt

SEQ ID NO: 4945202 - DNA, 25 bp, Homo sapien
gaaagaacattactagccataggga

SEQ ID NO: 4945203 - DNA, 25 bp, Homo sapien
aatgactggaagagtcttgatctgg

SEQ ID NO: 4945204 - DNA, 25 bp, Homo sapien
aggaaccagaatggcagccgccaca

SEQ ID NO: 4945205 - DNA, 25 bp, Homo sapien
tgtttgtagaggtaaaatgcaaacc

SEQ ID NO: 4945206 - DNA, 25 bp, Homo sapien
tgctggtgccgtggtaatgactgga

SEQ ID NO: 4945207 - DNA, 25 bp, Homo sapien
tgtatagcatttcagcacccaaata

SEQ ID NO: 4945208 - DNA, 25 bp, Homo sapien
tttcctcttgactcctcagaacctg

SEQ ID NO: 4945209 - DNA, 25 bp, Homo sapien
tgctggaaaatctacgtgtcacaag

SEQ ID NO: 4945210 - DNA, 25 bp, Homo sapien
cagaacctgcaataaaacctagaac

SEQ ID NO: 4945211 - DNA, 25 bp, Homo sapien
tccatgaatgtcaccttgaaaagta

SEQ ID NO: 4945212 - DNA, 25 bp, Homo sapien
ttccatgaatgtcaccttgaaaagt

SEQ ID NO: 4945213 - DNA, 25 bp, Homo sapien
ccatgaatgtcaccttgaaaagtaa

SEQ ID NO: 4945214 - DNA, 25 bp, Homo sapien
catgaatgtcaccttgaaaagtaaa

SEQ ID NO: 4945215 - DNA, 25 bp, Homo sapien
cgaacttgcttacaaaaatatctgc

SEQ ID NO: 4945216 - DNA, 25 bp, Homo sapien
aaccatctagtccccagttgtcatt

SEQ ID NO: 4945217 - DNA, 25 bp, Homo sapien
acaaaaatatctgcctggcctttaa

SEQ ID NO: 4945218 - DNA, 25 bp, Homo sapien
ccagttgtcattttcgaacttgctt

SEQ ID NO: 4945219 - DNA, 25 bp, Homo sapien
ggcattcaccttactgcttgttgca

SEQ ID NO: 4945220 - DNA, 25 bp, Homo sapien
ggcttcgctgaaggtggcattcacc

SEQ ID NO: 4945221 - DNA, 25 bp, Homo sapien
cagtcaacagttagagtggcgggtt

SEQ ID NO: 4945222 - DNA, 25 bp, Homo sapien
taccccttccacagtgaattgacga

SEQ ID NO: 4945223 - DNA, 25 bp, Homo sapien
ttagtaactgtttcattaacttctc

SEQ ID NO: 4945224 - DNA, 25 bp, Homo sapien
ccgaaagtaggaagatcgatggctc

SEQ ID NO: 4945225 - DNA, 25 bp, Homo sapien
cctggatggcaggtgtacactaagg

SEQ ID NO: 4945226 - DNA, 25 bp, Homo sapien
tacactaaggtgtagccgaaagtag

SEQ ID NO: 4945227 - DNA, 25 bp, Homo sapien
tcgatggctctcacatccgcgtgtg

SEQ ID NO: 4945228 - DNA, 25 bp, Homo sapien
gtttattgtaaagttagcacatgtg

SEQ ID NO: 4945229 - DNA, 25 bp, Homo sapien
cattgagactttgtttattgtaaag

SEQ ID NO: 4945230 - DNA, 25 bp, Homo sapien
tttattgtaaagttagcacatgtgt

SEQ ID NO: 4945231 - DNA, 25 bp, Homo sapien
cattaggaaacattgagactttgtt

SEQ ID NO: 4945232 - DNA, 25 bp, Homo sapien
caggtgcgagtcgtggaaccttgaa

SEQ ID NO: 4945233 - DNA, 25 bp, Homo sapien
ttgaatatggtagccttttctgcac

SEQ ID NO: 4945234 - DNA, 25 bp, Homo sapien
gtatcccactccatgttaaattggc

SEQ ID NO: 4945235 - DNA, 25 bp, Homo sapien
ttaaattggcaaggcaggtgcgagt

SEQ ID NO: 4945236 - DNA, 25 bp, Homo sapien
ccaaagtgtggcgtaccagggtctg

SEQ ID NO: 4945237 - DNA, 25 bp, Homo sapien
gcctctggagctattctgtattcca

SEQ ID NO: 4945238 - DNA, 25 bp, Homo sapien
ctcatagcctctggagctattctgt

SEQ ID NO: 4945239 - DNA, 25 bp, Homo sapien
gctattctgtattccaaagtgtggc

SEQ ID NO: 4945240 - DNA, 25 bp, Homo sapien
gtatccccagagctgtatgataatt

SEQ ID NO: 4945241 - DNA, 25 bp, Homo sapien
cagaaaactgtctatggaaacactt

SEQ ID NO: 4945242 - DNA, 25 bp, Homo sapien
ccaatttcggaatgaagcgtcctca

SEQ ID NO: 4945243 - DNA, 25 bp, Homo sapien
gtaatcacaaatgacccaatttcgg

SEQ ID NO: 4945244 - DNA, 25 bp, Homo sapien
cacgagtataaatggagatttgcac

SEQ ID NO: 4945245 - DNA, 25 bp, Homo sapien
gaagacttcggacttataggtgaaa

SEQ ID NO: 4945246 - DNA, 25 bp, Homo sapien
tcttctggaggatcccacgagtata

SEQ ID NO: 4945247 - DNA, 25 bp, Homo sapien
caatgcaggtgggttgtatgccgct

SEQ ID NO: 4945248 - DNA, 25 bp, Homo sapien
gacactgggggatctctcctttcca

SEQ ID NO: 4945249 - DNA, 25 bp, Homo sapien
cactgggggatctctcctttccaca

SEQ ID NO: 4945250 - DNA, 25 bp, Homo sapien
ggagacactgggggatctctccttt

SEQ ID NO: 4945251 - DNA, 25 bp, Homo sapien
actgggggatctctcctttccacac

SEQ ID NO: 4945252 - DNA, 25 bp, Homo sapien
actgttccattctgcaccggcggcg

SEQ ID NO: 4945253 - DNA, 25 bp, Homo sapien
ggtaaccgtccatgcagctgtaact

SEQ ID NO: 4945254 - DNA, 25 bp, Homo sapien
cacaggagaggatggcggagtgaga

SEQ ID NO: 4945255 - DNA, 25 bp, Homo sapien
tgtaacttatgctggagccccagcg

SEQ ID NO: 4945256 - DNA, 25 bp, Homo sapien
catgtgtcttgcagaactcaccgaa

SEQ ID NO: 4945257 - DNA, 25 bp, Homo sapien
tagcgtcagctatatcacaggtgca

SEQ ID NO: 4945258 - DNA, 25 bp, Homo sapien
tgaatactgccgacacaacgtagtg

SEQ ID NO: 4945259 - DNA, 25 bp, Homo sapien
gaacacgcccatgtcagaagagaga

SEQ ID NO: 4945260 - DNA, 25 bp, Homo sapien
caataaagacttctatacacatctg

SEQ ID NO: 4945261 - DNA, 25 bp, Homo sapien
gacttaatagttgcaaattgctgtt

SEQ ID NO: 4945262 - DNA, 25 bp, Homo sapien
aataaagtgacttaatagttgcaaa

SEQ ID NO: 4945263 - DNA, 25 bp, Homo sapien
cctagaagggctacataaatgcttg

SEQ ID NO: 4945264 - DNA, 25 bp, Homo sapien
tgaaggtgaagtcggtcccaaactg

SEQ ID NO: 4945265 - DNA, 25 bp, Homo sapien
gcctgggttacactgatagctcaca

SEQ ID NO: 4945266 - DNA, 25 bp, Homo sapien
catttgctagtgtgcctggatcccc

SEQ ID NO: 4945267 - DNA, 25 bp, Homo sapien
cagacaggtttgctcggattccacc

SEQ ID NO: 4945268 - DNA, 25 bp, Homo sapien
gcaatgccgtgtcatgagccctgag

SEQ ID NO: 4945269 - DNA, 25 bp, Homo sapien
tgaggtcttgtagccttcccagcag

SEQ ID NO: 4945270 - DNA, 25 bp, Homo sapien
aatcattccgttggtgggtgtgcca

SEQ ID NO: 4945271 - DNA, 25 bp, Homo sapien
tcccagcaggcatagatgaccgagc

SEQ ID NO: 4945272 - DNA, 25 bp, Homo sapien
ttcacaggagaagcggagaagactc

SEQ ID NO: 4945273 - DNA, 25 bp, Homo sapien
tcttaaagtcatcaccaagccgaga

SEQ ID NO: 4945274 - DNA, 25 bp, Homo sapien
cggatcaccacagaatccaggatta

SEQ ID NO: 4945275 - DNA, 25 bp, Homo sapien
cattgagcaaacacgtgcgttcagg

SEQ ID NO: 4945276 - DNA, 25 bp, Homo sapien
ccctctgcaggagtagtgcacgacg

SEQ ID NO: 4945277 - DNA, 25 bp, Homo sapien
cacactctcgtgtcgttgcctatga

SEQ ID NO: 4945278 - DNA, 25 bp, Homo sapien
ctctccagtgaggacggcgttggca

SEQ ID NO: 4945279 - DNA, 25 bp, Homo sapien
gacggcgccataggtaaacagctct

SEQ ID NO: 4945280 - DNA, 25 bp, Homo sapien
gggatcggtcccataagccatttgc

SEQ ID NO: 4945281 - DNA, 25 bp, Homo sapien
tcttgcaatggtacaggatactcat

SEQ ID NO: 4945282 - DNA, 25 bp, Homo sapien
catacaggtcaaggctgaagatccc

SEQ ID NO: 4945283 - DNA, 25 bp, Homo sapien
tctgttgcccgtgacgaatggcatt

SEQ ID NO: 4945284 - DNA, 25 bp, Homo sapien
taggagatacagctgcaactatgtg

SEQ ID NO: 4945285 - DNA, 25 bp, Homo sapien
ggctccaataggagatacagctgca

SEQ ID NO: 4945286 - DNA, 25 bp, Homo sapien
ttcctatttaattctgaggctccaa

SEQ ID NO: 4945287 - DNA, 25 bp, Homo sapien
ttctgaggctccaataggagataca

SEQ ID NO: 4945288 - DNA, 25 bp, Homo sapien
tgccagaagagtttgttagtgacca

SEQ ID NO: 4945289 - DNA, 25 bp, Homo sapien
tatgtgaacaattcctatccaggga

SEQ ID NO: 4945290 - DNA, 25 bp, Homo sapien
tagtgaccaaccaatccacacaagc

SEQ ID NO: 4945291 - DNA, 25 bp, Homo sapien
cattgttgcaaatgggtgtgtttta

SEQ ID NO: 4945292 - DNA, 25 bp, Homo sapien
tcaactgattgacatacaaggaaga

SEQ ID NO: 4945293 - DNA, 25 bp, Homo sapien
tctacaaggaaaccggaaatgtgct

SEQ ID NO: 4945294 - DNA, 25 bp, Homo sapien
caaggagctcagtgggaaatcaggc

SEQ ID NO: 4945295 - DNA, 25 bp, Homo sapien
tgtcttaacaatagctgcccggagc

SEQ ID NO: 4945296 - DNA, 25 bp, Homo sapien
caaatagcccgtgttgcaggtgaaa

SEQ ID NO: 4945297 - DNA, 25 bp, Homo sapien
ttgctccgacactgggctcgagaca

SEQ ID NO: 4945298 - DNA, 25 bp, Homo sapien
agagggctactccactggccgttgc

SEQ ID NO: 4945299 - DNA, 25 bp, Homo sapien
tagtgaatccgtgggcagggtttcc

SEQ ID NO: 4945300 - DNA, 25 bp, Homo sapien
aaggaaagcgtgaacatggcacctc

SEQ ID NO: 4945301 - DNA, 25 bp, Homo sapien
aaaatgtatgcaacacggatgaggc

SEQ ID NO: 4945302 - DNA, 25 bp, Homo sapien
cagggagtgccgctgtttctaggac

SEQ ID NO: 4945303 - DNA, 25 bp, Homo sapien
tccatgacaccacttggccagggat

SEQ ID NO: 4945304 - DNA, 25 bp, Homo sapien
tggtcttgcaggcatatcctcacgg

SEQ ID NO: 4945305 - DNA, 25 bp, Homo sapien
caagccggaaaccaggattgcactg

SEQ ID NO: 4945306 - DNA, 25 bp, Homo sapien
cagacaggcgtttgtccagaccact

SEQ ID NO: 4945307 - DNA, 25 bp, Homo sapien
taaaccaccgtgtctctgtaactga

SEQ ID NO: 4945308 - DNA, 25 bp, Homo sapien
aaggcacaagtgttatcacaggcac

SEQ ID NO: 4945309 - DNA, 25 bp, Homo sapien
gggagatggagccatcgttccaacc

SEQ ID NO: 4945310 - DNA, 25 bp, Homo sapien
cacaacgtgctctgtcgtgcatggg

SEQ ID NO: 4945311 - DNA, 25 bp, Homo sapien
agaggacattgtctctgaaggttcc

SEQ ID NO: 4945312 - DNA, 25 bp, Homo sapien
tggaaagcggttctacaaagctgtg

SEQ ID NO: 4945313 - DNA, 25 bp, Homo sapien
tgtttgttcgtttccagtagagtga

SEQ ID NO: 4945314 - DNA, 25 bp, Homo sapien
tagctatccgtactgtttctgcaac

SEQ ID NO: 4945315 - DNA, 25 bp, Homo sapien
gaaactggctcctgaacgaatccgg

SEQ ID NO: 4945316 - DNA, 25 bp, Homo sapien
catttccccactacaagtatctcgt

SEQ ID NO: 4945317 - DNA, 25 bp, Homo sapien
gtatctcgtttaccccggcatggtc

SEQ ID NO: 4945318 - DNA, 25 bp, Homo sapien
tacaagtatctcgtttaccccggca

SEQ ID NO: 4945319 - DNA, 25 bp, Homo sapien
tccccactacaagtatctcgtttac

SEQ ID NO: 4945320 - DNA, 25 bp, Homo sapien
cccacaagcgtgtagccggtgttgc

SEQ ID NO: 4945321 - DNA, 25 bp, Homo sapien
cagacatcgagtttcgctgccgctc

SEQ ID NO: 4945322 - DNA, 25 bp, Homo sapien
ccggtgttgcacgtaaatatagctg

SEQ ID NO: 4945323 - DNA, 25 bp, Homo sapien
gctgtggccccataaactgtcaacg

SEQ ID NO: 4945324 - DNA, 25 bp, Homo sapien
caatcccacagcgtccggaatgcac

SEQ ID NO: 4945325 - DNA, 25 bp, Homo sapien
gcatccagaatgcacaatcccacag

SEQ ID NO: 4945326 - DNA, 25 bp, Homo sapien
acatcgacagcgtgttttctcactg

SEQ ID NO: 4945327 - DNA, 25 bp, Homo sapien
taaaaaacacttgtattgtgacata

SEQ ID NO: 4945328 - DNA, 25 bp, Homo sapien
gggattccaagccactagcctctgt

SEQ ID NO: 4945329 - DNA, 25 bp, Homo sapien
tgtctctccttcaattctatgatta

SEQ ID NO: 4945330 - DNA, 25 bp, Homo sapien
tcttcgggaacgctgagttgtgagc

SEQ ID NO: 4945331 - DNA, 25 bp, Homo sapien
acagggacaccgtaggtgggcatcc

SEQ ID NO: 4945332 - DNA, 25 bp, Homo sapien
tgagcatggaagattgtcacgcagc

SEQ ID NO: 4945333 - DNA, 25 bp, Homo sapien
gcaaataccatttggcacggccctg

SEQ ID NO: 4945334 - DNA, 25 bp, Homo sapien
ctgtgcacgactggcaagaatgtcg

SEQ ID NO: 4945335 - DNA, 25 bp, Homo sapien
cggtgctaatgctggaatctccagg

SEQ ID NO: 4945336 - DNA, 25 bp, Homo sapien
cacgactggcaagaatgtcgggaag

SEQ ID NO: 4945337 - DNA, 25 bp, Homo sapien
ctaatgctggaatctccaggtgaca

SEQ ID NO: 4945338 - DNA, 25 bp, Homo sapien
agcttggcctctcatctcctatgtt

SEQ ID NO: 4945339 - DNA, 25 bp, Homo sapien
cattcaaggatcctgaaaccagcct

SEQ ID NO: 4945340 - DNA, 25 bp, Homo sapien
tcagcaatacttgagcaccgtactc

SEQ ID NO: 4945341 - DNA, 25 bp, Homo sapien
tatgttccacgtcccattggcctgg

SEQ ID NO: 4945342 - DNA, 25 bp, Homo sapien
tcatccaacaccttggacaaaaccg

SEQ ID NO: 4945343 - DNA, 25 bp, Homo sapien
tttattttcaagtgctcttcatcca

SEQ ID NO: 4945344 - DNA, 25 bp, Homo sapien
ttggacaaaaccgtcagctcaaagt

SEQ ID NO: 4945345 - DNA, 25 bp, Homo sapien
caacaccttggacaaaaccgtcagc

SEQ ID NO: 4945346 - DNA, 25 bp, Homo sapien
aacccatcttcttgacacacggctg

SEQ ID NO: 4945347 - DNA, 25 bp, Homo sapien
tggctggattcaagcttgaagccct

SEQ ID NO: 4945348 - DNA, 25 bp, Homo sapien
tgacattcatagaccactttactgt

SEQ ID NO: 4945349 - DNA, 25 bp, Homo sapien
cacggctgttgcttgctggctggat

SEQ ID NO: 4945350 - DNA, 25 bp, Homo sapien
tggcttttgcagacactaaagcaaa

SEQ ID NO: 4945351 - DNA, 25 bp, Homo sapien
tctttactatgtgtaggtggtgcga

SEQ ID NO: 4945352 - DNA, 25 bp, Homo sapien
cgatgtcgggtgtttccaaggagta

SEQ ID NO: 4945353 - DNA, 25 bp, Homo sapien
catagagggaactaatgacttggct

SEQ ID NO: 4945354 - DNA, 25 bp, Homo sapien
gctcctcaaacatagaagcttccag

SEQ ID NO: 4945355 - DNA, 25 bp, Homo sapien
agcttccagaagcaagccgtcacac

SEQ ID NO: 4945356 - DNA, 25 bp, Homo sapien
aggctcctcaaacatagaagcttcc

SEQ ID NO: 4945357 - DNA, 25 bp, Homo sapien
ctcctcaaacatagaagcttccaga

SEQ ID NO: 4945358 - DNA, 25 bp, Homo sapien
agacatcccaatatcctggaccttc

SEQ ID NO: 4945359 - DNA, 25 bp, Homo sapien
ctgctactcccgccggatgactatc

SEQ ID NO: 4945360 - DNA, 25 bp, Homo sapien
cagctcagacatcccaatatcctgg

SEQ ID NO: 4945361 - DNA, 25 bp, Homo sapien
ctactcccgccggatgactatccat

SEQ ID NO: 4945362 - DNA, 25 bp, Homo sapien
acagaccatggcgtgttctctgagc

SEQ ID NO: 4945363 - DNA, 25 bp, Homo sapien
tctgtcattagccagtgctagtggg

SEQ ID NO: 4945364 - DNA, 25 bp, Homo sapien
tattttgactccacctctagaggac

SEQ ID NO: 4945365 - DNA, 25 bp, Homo sapien
gccgtttgggctgtggttctgtcat

SEQ ID NO: 4945366 - DNA, 25 bp, Homo sapien
ggtttcgtctacaggttgcattgct

SEQ ID NO: 4945367 - DNA, 25 bp, Homo sapien
catgccaagtgggtttcgtctacag

SEQ ID NO: 4945368 - DNA, 25 bp, Homo sapien
tacaggttgcattgctgtggccgac

SEQ ID NO: 4945369 - DNA, 25 bp, Homo sapien
agtggcgtgagggagtcccactggt

SEQ ID NO: 4945370 - DNA, 25 bp, Homo sapien
ataatgcactttgcttccaaccgct

SEQ ID NO: 4945371 - DNA, 25 bp, Homo sapien
cagggggtgggtcaaactgcagtaa

SEQ ID NO: 4945372 - DNA, 25 bp, Homo sapien
gcttccaaccgctcctgcagtcctg

SEQ ID NO: 4945373 - DNA, 25 bp, Homo sapien
ctgtttagaatacccccattcttca

SEQ ID NO: 4945374 - DNA, 25 bp, Homo sapien
gatataactgattactcctgcttgt

SEQ ID NO: 4945375 - DNA, 25 bp, Homo sapien
ccacttaagactactagcagaggac

SEQ ID NO: 4945376 - DNA, 25 bp, Homo sapien
tactggtggcatggtcagtggacca

SEQ ID NO: 4945377 - DNA, 25 bp, Homo sapien
ctgcatagcgaatcttgaatccttt

SEQ ID NO: 4945378 - DNA, 25 bp, Homo sapien
ggactgagaatgactcccgatgatc

SEQ ID NO: 4945379 - DNA, 25 bp, Homo sapien
aattacccggataccctggactgag

SEQ ID NO: 4945380 - DNA, 25 bp, Homo sapien
cactttaatactccaagagcaagtc

SEQ ID NO: 4945381 - DNA, 25 bp, Homo sapien
aaacacttccagtgcatcaaactgc

SEQ ID NO: 4945382 - DNA, 25 bp, Homo sapien
gaatgtcggtccccaccaaggtgta

SEQ ID NO: 4945383 - DNA, 25 bp, Homo sapien
gcaagtcagaatgtcggtccccacc

SEQ ID NO: 4945384 - DNA, 25 bp, Homo sapien
ttgcaagtcagaatgtcggtcccca

SEQ ID NO: 4945385 - DNA, 25 bp, Homo sapien
gcttgcaagtcagaatgtcggtccc

SEQ ID NO: 4945386 - DNA, 25 bp, Homo sapien
actgaggcatccgtgttggtttccc

SEQ ID NO: 4945387 - DNA, 25 bp, Homo sapien
gaagagtcaatgcaacaaaccagga

SEQ ID NO: 4945388 - DNA, 25 bp, Homo sapien
tccccagtgattgctgacgaaaaga

SEQ ID NO: 4945389 - DNA, 25 bp, Homo sapien
tccaattaactaagccagggtgagg

SEQ ID NO: 4945390 - DNA, 25 bp, Homo sapien
tatttcgaaatcatcatcctcagta

SEQ ID NO: 4945391 - DNA, 25 bp, Homo sapien
ggaggttgacatttcttgagctgaa

SEQ ID NO: 4945392 - DNA, 25 bp, Homo sapien
ccgctgggggaggttgacatttctt

SEQ ID NO: 4945393 - DNA, 25 bp, Homo sapien
gcatttctgcctgtggaaccgctgg

SEQ ID NO: 4945394 - DNA, 25 bp, Homo sapien
cgagggctgtgttgccactgaaaac

SEQ ID NO: 4945395 - DNA, 25 bp, Homo sapien
aaaagtcgctgtggaacttgagcag

SEQ ID NO: 4945396 - DNA, 25 bp, Homo sapien
ttggtggagctatacgccgtttcga

SEQ ID NO: 4945397 - DNA, 25 bp, Homo sapien
gcctccatttgaaaagtcgctgtgg

SEQ ID NO: 4945398 - DNA, 25 bp, Homo sapien
gcaatgtaatcgttgacagcttccg

SEQ ID NO: 4945399 - DNA, 25 bp, Homo sapien
gttgatgtaaactccgtgccctgga

SEQ ID NO: 4945400 - DNA, 25 bp, Homo sapien
cctggaggcaccgtgatgagccaaa

SEQ ID NO: 4945401 - DNA, 25 bp, Homo sapien
tcaggatcggatactcatcaggaaa

SEQ ID NO: 4945402 - DNA, 25 bp, Homo sapien
tcgaaagatactgattgccccacgc

SEQ ID NO: 4945403 - DNA, 25 bp, Homo sapien
gatggcctattagaatgtacccagg

SEQ ID NO: 4945404 - DNA, 25 bp, Homo sapien
tgccccacgctgtaatccgagttga

SEQ ID NO: 4945405 - DNA, 25 bp, Homo sapien
tgtacccaggataacactcgaaaga

SEQ ID NO: 4945406 - DNA, 25 bp, Homo sapien
taagaataaggtgtacagcacagac

SEQ ID NO: 4945407 - DNA, 25 bp, Homo sapien
aatcataagtgcaacgagaccatgc

SEQ ID NO: 4945408 - DNA, 25 bp, Homo sapien
tctaagtatcaataagcccaaggca

SEQ ID NO: 4945409 - DNA, 25 bp, Homo sapien
gagtgcatggcttgattttaccaaa

SEQ ID NO: 4945410 - DNA, 25 bp, Homo sapien
gggtgtcaagacatgggaaagcagg

SEQ ID NO: 4945411 - DNA, 25 bp, Homo sapien
catctggcttggaatggggtgtcaa

SEQ ID NO: 4945412 - DNA, 25 bp, Homo sapien
acatctggcttggaatggggtgtca

SEQ ID NO: 4945413 - DNA, 25 bp, Homo sapien
gaatggggtgtcaagacatgggaaa

SEQ ID NO: 4945414 - DNA, 25 bp, Homo sapien
caaaaaattattccactcgtacaag

SEQ ID NO: 4945415 - DNA, 25 bp, Homo sapien
tggaaccagttagggagatttatac

SEQ ID NO: 4945416 - DNA, 25 bp, Homo sapien
gaacccactggtggttccgtctgtg

SEQ ID NO: 4945417 - DNA, 25 bp, Homo sapien
gggcagcagaaaaggcgaacccact

SEQ ID NO: 4945418 - DNA, 25 bp, Homo sapien
agatccgtgccgctaaattgtccaa

SEQ ID NO: 4945419 - DNA, 25 bp, Homo sapien
tcaaggaagtcatgattagcttcgg

SEQ ID NO: 4945420 - DNA, 25 bp, Homo sapien
tttcatgcgttgtgctcagcagggc

SEQ ID NO: 4945421 - DNA, 25 bp, Homo sapien
ccttgccggttttgcgaatggtcac

SEQ ID NO: 4945422 - DNA, 25 bp, Homo sapien
gaggacggcattcactgtggatgac

SEQ ID NO: 4945423 - DNA, 25 bp, Homo sapien
tgctcataaaaagggactgaagtgt

SEQ ID NO: 4945424 - DNA, 25 bp, Homo sapien
actgaagtgttagcagtctccccag

SEQ ID NO: 4945425 - DNA, 25 bp, Homo sapien
catgcaaacttaatgaaagttcata

SEQ ID NO: 4945426 - DNA, 25 bp, Homo sapien
tacagttatgccaacagaataaggc

SEQ ID NO: 4945427 - DNA, 25 bp, Homo sapien
atgaacttttaggaattggtaacat

SEQ ID NO: 4945428 - DNA, 25 bp, Homo sapien
tatttaaatctgtacgccactttca

SEQ ID NO: 4945429 - DNA, 25 bp, Homo sapien
tacgccactttcaattacagataca

SEQ ID NO: 4945430 - DNA, 25 bp, Homo sapien
aaggtgctcagcgtccctccacagg

SEQ ID NO: 4945431 - DNA, 25 bp, Homo sapien
gggctcaggatcacaccacccaagg

SEQ ID NO: 4945432 - DNA, 25 bp, Homo sapien
tcaggatcacaccacccaaggtgct

SEQ ID NO: 4945433 - DNA, 25 bp, Homo sapien
ggtgctcagcgtccctccacaggtt

SEQ ID NO: 4945434 - DNA, 25 bp, Homo sapien
tggcccaggacctcagcgtagacag

SEQ ID NO: 4945435 - DNA, 25 bp, Homo sapien
agcgtagacagcatcatcaacacgg

SEQ ID NO: 4945436 - DNA, 25 bp, Homo sapien
tcatcaacacggatgtctgtgtccc

SEQ ID NO: 4945437 - DNA, 25 bp, Homo sapien
aacacggatgtctgtgtcccacaca

SEQ ID NO: 4945438 - DNA, 25 bp, Homo sapien
gcatacaggaaatgtgggaacggcc

SEQ ID NO: 4945439 - DNA, 25 bp, Homo sapien
caatgcacaggggagacggatagtt

SEQ ID NO: 4945440 - DNA, 25 bp, Homo sapien
ctggcatacaggaaatgtgggaacg

SEQ ID NO: 4945441 - DNA, 25 bp, Homo sapien
ttccaacggcgaacggtccctggca

SEQ ID NO: 4945442 - DNA, 25 bp, Homo sapien
ctgcagggtgtacccgggctcgcac

SEQ ID NO: 4945443 - DNA, 25 bp, Homo sapien
ggagagcacgtcgttcaccatgtac

SEQ ID NO: 4945444 - DNA, 25 bp, Homo sapien
tacccgggctcgcactggaaggaga

SEQ ID NO: 4945445 - DNA, 25 bp, Homo sapien
cgatctccgattttgatgctgttgc

SEQ ID NO: 4945446 - DNA, 25 bp, Homo sapien
ctgttcagcagtgccggtactgtgg

SEQ ID NO: 4945447 - DNA, 25 bp, Homo sapien
agcagctgccacactaatgtcagac

SEQ ID NO: 4945448 - DNA, 25 bp, Homo sapien
agttggttggaagtactgttcagca

SEQ ID NO: 4945449 - DNA, 25 bp, Homo sapien
cagactggaaatgcaggtagagttg

SEQ ID NO: 4945450 - DNA, 25 bp, Homo sapien
ctttttaaacatgaagtgtgtcgaa

SEQ ID NO: 4945451 - DNA, 25 bp, Homo sapien
taaacatgaagtgtgtcgaactaaa

SEQ ID NO: 4945452 - DNA, 25 bp, Homo sapien
tgtcgaactaaacgcctaatctatc

SEQ ID NO: 4945453 - DNA, 25 bp, Homo sapien
gaagtgtgtcgaactaaacgcctaa

SEQ ID NO: 4945454 - DNA, 25 bp, Homo sapien
tcttaaagataccatcggcatccat

SEQ ID NO: 4945455 - DNA, 25 bp, Homo sapien
taatgtttcttaacgataccatcgg

SEQ ID NO: 4945456 - DNA, 25 bp, Homo sapien
gaaacatcgagtaggtctctaacgc

SEQ ID NO: 4945457 - DNA, 25 bp, Homo sapien
ggcatccatccacgtcacaaactga

SEQ ID NO: 4945458 - DNA, 25 bp, Homo sapien
aagcttcccagtctgggtgcggtca

SEQ ID NO: 4945459 - DNA, 25 bp, Homo sapien
tggatctcaagggagtcccagttct

SEQ ID NO: 4945460 - DNA, 25 bp, Homo sapien
gtcacatccccaccatcgtggatct

SEQ ID NO: 4945461 - DNA, 25 bp, Homo sapien
tctgctccgtggcaaaactgatcac

SEQ ID NO: 4945462 - DNA, 25 bp, Homo sapien
tatgatcttccatatacagttcaag

SEQ ID NO: 4945463 - DNA, 25 bp, Homo sapien
gagccctccgtaactatgatcttcc

SEQ ID NO: 4945464 - DNA, 25 bp, Homo sapien
gacaggattgtacctcttcgttgag

SEQ ID NO: 4945465 - DNA, 25 bp, Homo sapien
tttccgtatggctcagggtagccgg

SEQ ID NO: 4945466 - DNA, 25 bp, Homo sapien
gacacaaccatatgtcatgaaataa

SEQ ID NO: 4945467 - DNA, 25 bp, Homo sapien
aagacacaaccatatgtcatgaaat

SEQ ID NO: 4945468 - DNA, 25 bp, Homo sapien
aaaagacacaaccatatgtcatgaa

SEQ ID NO: 4945469 - DNA, 25 bp, Homo sapien
ctaaaagacacaaccatatgtcatg

SEQ ID NO: 4945470 - DNA, 25 bp, Homo sapien
ctactataatttaaggaccttggca

SEQ ID NO: 4945471 - DNA, 25 bp, Homo sapien
aggaccttggcagagttttctcttc

SEQ ID NO: 4945472 - DNA, 25 bp, Homo sapien
actataatttaaggaccttggcaga

SEQ ID NO: 4945473 - DNA, 25 bp, Homo sapien
tactataatttaaggaccttggcag

SEQ ID NO: 4945474 - DNA, 25 bp, Homo sapien
aattctccttccgtatctgggctcg

SEQ ID NO: 4945475 - DNA, 25 bp, Homo sapien
caggtatcccgggttgcactcgaat

SEQ ID NO: 4945476 - DNA, 25 bp, Homo sapien
cattgggtgtcactggtacgaggaa

SEQ ID NO: 4945477 - DNA, 25 bp, Homo sapien
ctcgaatcggacgatggagccggca

SEQ ID NO: 4945478 - DNA, 25 bp, Homo sapien
cagaacacagccgtctgtatctcca

SEQ ID NO: 4945479 - DNA, 25 bp, Homo sapien
caagccaggacgttgcgtggaacgt

SEQ ID NO: 4945480 - DNA, 25 bp, Homo sapien
gcaagccaggacgttgcgtggaacg

SEQ ID NO: 4945481 - DNA, 25 bp, Homo sapien
gcaaagtacagaacacagccgtctg

SEQ ID NO: 4945482 - DNA, 25 bp, Homo sapien
tgacaataaatgaataacacctgca

SEQ ID NO: 4945483 - DNA, 25 bp, Homo sapien
gacaataaatgaataacacctgcat

SEQ ID NO: 4945484 - DNA, 25 bp, Homo sapien
gtggtctattttcaaggaaaatgac

SEQ ID NO: 4945485 - DNA, 25 bp, Homo sapien
ttaactttcttcatgaatttcagag

SEQ ID NO: 4945486 - DNA, 25 bp, Homo sapien
tatgagtttcaactgtcaaaaaatt

SEQ ID NO: 4945487 - DNA, 25 bp, Homo sapien
atttattcccttctagtgcctgata

SEQ ID NO: 4945488 - DNA, 25 bp, Homo sapien
aaatatgagtttcaactgtcaaaaa

SEQ ID NO: 4945489 - DNA, 25 bp, Homo sapien
tattcccttctagtgcctgataaat

SEQ ID NO: 4945490 - DNA, 25 bp, Homo sapien
tctttgcactgaatcggagcagaat

SEQ ID NO: 4945491 - DNA, 25 bp, Homo sapien
tgacgtagccaagggcaatgtttcc

SEQ ID NO: 4945492 - DNA, 25 bp, Homo sapien
ttgatacacgaagtggaagccgcgg

SEQ ID NO: 4945493 - DNA, 25 bp, Homo sapien
gccgcgggcagaggcaccgctcttt

SEQ ID NO: 4945494 - DNA, 25 bp, Homo sapien
tctgccaaatcattcagggctgtct

SEQ ID NO: 4945495 - DNA, 25 bp, Homo sapien
tggcctgtgcatgggttccatcaaa

SEQ ID NO: 4945496 - DNA, 25 bp, Homo sapien
ccccgagagtgagctgagaagtctg

SEQ ID NO: 4945497 - DNA, 25 bp, Homo sapien
ggaaataggcaaactgtccaaagac

SEQ ID NO: 4945498 - DNA, 25 bp, Homo sapien
gaatagaggcatatttgaccagctg

SEQ ID NO: 4945499 - DNA, 25 bp, Homo sapien
ttggtgataaaactaccccttctga

SEQ ID NO: 4945500 - DNA, 25 bp, Homo sapien
atcccgtgtactggcctccacaggg

SEQ ID NO: 4945501 - DNA, 25 bp, Homo sapien
cgaattcctttggtaccgtgatgga

SEQ ID NO: 4945502 - DNA, 25 bp, Homo sapien
gaatcttatagccagagtcacactg

SEQ ID NO: 4945503 - DNA, 25 bp, Homo sapien
caatcacacaggtgatggatgaggg

SEQ ID NO: 4945504 - DNA, 25 bp, Homo sapien
gagccaagcttgaagtctgttccaa

SEQ ID NO: 4945505 - DNA, 25 bp, Homo sapien
cattatatttcctgggtcaaaacaa

SEQ ID NO: 4945506 - DNA, 25 bp, Homo sapien
atcactccgaaatgccagaaacagg

SEQ ID NO: 4945507 - DNA, 25 bp, Homo sapien
aaacaggctgtttccgctactctct

SEQ ID NO: 4945508 - DNA, 25 bp, Homo sapien
ttcaatggcgaaccctgaaaggccc

SEQ ID NO: 4945509 - DNA, 25 bp, Homo sapien
tgtaggaagtcatagctgggctcca

SEQ ID NO: 4945510 - DNA, 25 bp, Homo sapien
aaagaggtattctgcaagagacggt

SEQ ID NO: 4945511 - DNA, 25 bp, Homo sapien
ctaaaaagaggtattctgcaagaga

SEQ ID NO: 4945512 - DNA, 25 bp, Homo sapien
agaggtattctgcaagagacggtac

SEQ ID NO: 4945513 - DNA, 25 bp, Homo sapien
aaaaagaggtattctgcaagagacg

SEQ ID NO: 4945514 - DNA, 25 bp, Homo sapien
tacggctgtgggtagttgggtgaca

SEQ ID NO: 4945515 - DNA, 25 bp, Homo sapien
tgctgggcccgtcagattccctcca

SEQ ID NO: 4945516 - DNA, 25 bp, Homo sapien
cttttgaatatcaaggcgatgacaa

SEQ ID NO: 4945517 - DNA, 25 bp, Homo sapien
gcgatgacaaagtccgggttcactt

SEQ ID NO: 4945518 - DNA, 25 bp, Homo sapien
caacatgcatccattcctgaatata

SEQ ID NO: 4945519 - DNA, 25 bp, Homo sapien
taacgacaacatgcatccattcctg

SEQ ID NO: 4945520 - DNA, 25 bp, Homo sapien
taaaatttctaagttctgttgtctg

SEQ ID NO: 4945521 - DNA, 25 bp, Homo sapien
atttctaagttctgttgtctgatac

SEQ ID NO: 4945522 - DNA, 25 bp, Homo sapien
acactggaatgtgacggtgtctcca

SEQ ID NO: 4945523 - DNA, 25 bp, Homo sapien
tctgctgtctccatagcgggtgcca

SEQ ID NO: 4945524 - DNA, 25 bp, Homo sapien
aaagaaccggttattcagctgcaca

SEQ ID NO: 4945525 - DNA, 25 bp, Homo sapien
cacacaggtgattttggcttgtcct

SEQ ID NO: 4945526 - DNA, 25 bp, Homo sapien
gcaaacaaaagagaaggcaaggtca

SEQ ID NO: 4945527 - DNA, 25 bp, Homo sapien
ctgcaaacaaaagagaaggcaaggt

SEQ ID NO: 4945528 - DNA, 25 bp, Homo sapien
acaaaagagaaggcaaggtcacagg

SEQ ID NO: 4945529 - DNA, 25 bp, Homo sapien
caaacaaaagagaaggcaaggtcac

SEQ ID NO: 4945530 - DNA, 25 bp, Homo sapien
tgctctttcccattaattctcatgt

SEQ ID NO: 4945531 - DNA, 25 bp, Homo sapien
ttgctctttcccattaattctcatg

SEQ ID NO: 4945532 - DNA, 25 bp, Homo sapien
cttgctctttcccattaattctcat

SEQ ID NO: 4945533 - DNA, 25 bp, Homo sapien
atgcttccctggagtggatatgcct

SEQ ID NO: 4945534 - DNA, 25 bp, Homo sapien
cgtaatgcttccctggagtggatat

SEQ ID NO: 4945535 - DNA, 25 bp, Homo sapien
cacgtaatgcttccctggagtggat

SEQ ID NO: 4945536 - DNA, 25 bp, Homo sapien
taatgcttccctggagtggatatgc

SEQ ID NO: 4945537 - DNA, 25 bp, Homo sapien
tgtaacacactggtaagagactttg

SEQ ID NO: 4945538 - DNA, 25 bp, Homo sapien
caaggcgtgatatcccactgggtca

SEQ ID NO: 4945539 - DNA, 25 bp, Homo sapien
tgtgtcccggcaaaagcaaagagcc

SEQ ID NO: 4945540 - DNA, 25 bp, Homo sapien
ggcttcgctgcaacaatagatgatg

SEQ ID NO: 4945541 - DNA, 25 bp, Homo sapien
tcaatcatatgaggaaaacatttct

SEQ ID NO: 4945542 - DNA, 25 bp, Homo sapien
aaagagtagtgatggcttcttgggt

SEQ ID NO: 4945543 - DNA, 25 bp, Homo sapien
atgcttatttcacatgttactgaca

SEQ ID NO: 4945544 - DNA, 25 bp, Homo sapien
tttggtcccaggttcataaagacaa

SEQ ID NO: 4945545 - DNA, 25 bp, Homo sapien
tgagagggacataacagcccagttt

SEQ ID NO: 4945546 - DNA, 25 bp, Homo sapien
ttcatggctggattcgccagtgagg

SEQ ID NO: 4945547 - DNA, 25 bp, Homo sapien
gccagtgaggggacgaatgtgggtg

SEQ ID NO: 4945548 - DNA, 25 bp, Homo sapien
cagtgaggggacgaatgtgggtgga

SEQ ID NO: 4945549 - DNA, 25 bp, Homo sapien
gttcccagaagtggcaagctacatt

SEQ ID NO: 4945550 - DNA, 25 bp, Homo sapien
gatggagactggtgcccgattctca

SEQ ID NO: 4945551 - DNA, 25 bp, Homo sapien
gcgtcttcgtgttccagcctgagat

SEQ ID NO: 4945552 - DNA, 25 bp, Homo sapien
gacatgatttattccaggtgtagga

SEQ ID NO: 4945553 - DNA, 25 bp, Homo sapien
cagaccttgaggatgtcgtgagcca

SEQ ID NO: 4945554 - DNA, 25 bp, Homo sapien
tcgtgagccatctccgtgtcgaaaa

SEQ ID NO: 4945555 - DNA, 25 bp, Homo sapien
tgtcctccggaagggcggagccact

SEQ ID NO: 4945556 - DNA, 25 bp, Homo sapien
aagtcgctgtcgaactgcagggtga

SEQ ID NO: 4945557 - DNA, 25 bp, Homo sapien
ttaggataaagcacacaggacctca

SEQ ID NO: 4945558 - DNA, 25 bp, Homo sapien
tgaggctcaccgaagataattcagg

SEQ ID NO: 4945559 - DNA, 25 bp, Homo sapien
ggacctcagtctgtcatggacgcag

SEQ ID NO: 4945560 - DNA, 25 bp, Homo sapien
tagatgctgagctatccattttagg

SEQ ID NO: 4945561 - DNA, 25 bp, Homo sapien
gggacaatattcgtcctgatgtggc

SEQ ID NO: 4945562 - DNA, 25 bp, Homo sapien
aggttgttgtcatacggagctggat

SEQ ID NO: 4945563 - DNA, 25 bp, Homo sapien
tgtcatacggagctggatagccagg

SEQ ID NO: 4945564 - DNA, 25 bp, Homo sapien
ggtctgcctctataatccaggtgca

SEQ ID NO: 4945565 - DNA, 25 bp, Homo sapien
tatagccgtagttagggatgcccgg

SEQ ID NO: 4945566 - DNA, 25 bp, Homo sapien
taccccgggttgcaactgtacagaa

SEQ ID NO: 4945567 - DNA, 25 bp, Homo sapien
taaagtggccttcatcacggatcct

SEQ ID NO: 4945568 - DNA, 25 bp, Homo sapien
gaactacagtgtcggtaaagtggcc

SEQ ID NO: 4945569 - DNA, 25 bp, Homo sapien
gcaaggaatgaacagaactcaaggg

SEQ ID NO: 4945570 - DNA, 25 bp, Homo sapien
ggcaaggaatgaacagaactcaagg

SEQ ID NO: 4945571 - DNA, 25 bp, Homo sapien
aaggcaaggaatgaacagaactcaa

SEQ ID NO: 4945572 - DNA, 25 bp, Homo sapien
aggcaaggaatgaacagaactcaag

SEQ ID NO: 4945573 - DNA, 25 bp, Homo sapien
gcaaataccccattacttcgtctag

SEQ ID NO: 4945574 - DNA, 25 bp, Homo sapien
ggtgctctgcgtgtatctaattctt

SEQ ID NO: 4945575 - DNA, 25 bp, Homo sapien
gaatcccaccacaagtaggcaatga

SEQ ID NO: 4945576 - DNA, 25 bp, Homo sapien
tgcatattcctcctgaaggctcttc

SEQ ID NO: 4945577 - DNA, 25 bp, Homo sapien
cagccggacccctaagagcaggctt

SEQ ID NO: 4945578 - DNA, 25 bp, Homo sapien
tatcaataacagaggaggctgagct

SEQ ID NO: 4945579 - DNA, 25 bp, Homo sapien
tgacccatttgcagcgtgacagagc

SEQ ID NO: 4945580 - DNA, 25 bp, Homo sapien
ggtcattgacagcaaaagtgaaccc

SEQ ID NO: 4945581 - DNA, 25 bp, Homo sapien
ctccagacatctctgagtctctcca

SEQ ID NO: 4945582 - DNA, 25 bp, Homo sapien
gacatctctgagtctctccaggtgg

SEQ ID NO: 4945583 - DNA, 25 bp, Homo sapien
acatctctgagtctctccaggtggg

SEQ ID NO: 4945584 - DNA, 25 bp, Homo sapien
cagacatctctgagtctctccaggt

SEQ ID NO: 4945585 - DNA, 25 bp, Homo sapien
tgtagcacggctaagagcgtcagct

SEQ ID NO: 4945586 - DNA, 25 bp, Homo sapien
ccactgggtgatcccattgcatctg

SEQ ID NO: 4945587 - DNA, 25 bp, Homo sapien
gagctgcaatgtgtcaccactgggt

SEQ ID NO: 4945588 - DNA, 25 bp, Homo sapien
gagcgtcagctcctagtccaacgag

SEQ ID NO: 4945589 - DNA, 25 bp, Homo sapien
gagatggtcagatcctagtccaaca

SEQ ID NO: 4945590 - DNA, 25 bp, Homo sapien
tctaggagactgaccttatgccagt

SEQ ID NO: 4945591 - DNA, 25 bp, Homo sapien
catatagcacctggcattgacctta

SEQ ID NO: 4945592 - DNA, 25 bp, Homo sapien
tatataaattagacaggagctgtgc

SEQ ID NO: 4945593 - DNA, 25 bp, Homo sapien
tgaatgacaatcatccattctaagc

SEQ ID NO: 4945594 - DNA, 25 bp, Homo sapien
ttcttgcctgatacagctctgtgga

SEQ ID NO: 4945595 - DNA, 25 bp, Homo sapien
ctcagtgtcaccagggaatacaatt

SEQ ID NO: 4945596 - DNA, 25 bp, Homo sapien
ccattctaagcttcttatgtcacag

SEQ ID NO: 4945597 - DNA, 25 bp, Homo sapien
cccagtggacgtgaggaactgtctt

SEQ ID NO: 4945598 - DNA, 25 bp, Homo sapien
tttttagtgaacgtgcccagtggac

SEQ ID NO: 4945599 - DNA, 25 bp, Homo sapien
tgattggatgtgctgtttaggatca

SEQ ID NO: 4945600 - DNA, 25 bp, Homo sapien
gaaaaccttggtcggtgtcagatcc

SEQ ID NO: 4945601 - DNA, 25 bp, Homo sapien
tggcttccccgtgtcctcatgagga

SEQ ID NO: 4945602 - DNA, 25 bp, Homo sapien
ccgaaaccccagagaaagtgtatgt

SEQ ID NO: 4945603 - DNA, 25 bp, Homo sapien
gagagattgcaccttgctcccagtg

SEQ ID NO: 4945604 - DNA, 25 bp, Homo sapien
ggacttgaccaagcgcaccgtggat

SEQ ID NO: 4945605 - DNA, 25 bp, Homo sapien
tttggagacagtaatgttccttcat

SEQ ID NO: 4945606 - DNA, 25 bp, Homo sapien
gcccttgccggcttctgtttctatt

SEQ ID NO: 4945607 - DNA, 25 bp, Homo sapien
tggaagcttcgtgttctaaggtgga

SEQ ID NO: 4945608 - DNA, 25 bp, Homo sapien
tagatacactcatggttattatcat

SEQ ID NO: 4945609 - DNA, 25 bp, Homo sapien
taccaccaaatagctcgcatatcac

SEQ ID NO: 4945610 - DNA, 25 bp, Homo sapien
aaatagctcgcatatcacaaaatgt

SEQ ID NO: 4945611 - DNA, 25 bp, Homo sapien
gataccaccaaatagctcgcatatc

SEQ ID NO: 4945612 - DNA, 25 bp, Homo sapien
caccaaatagctcgcatatcacaaa

SEQ ID NO: 4945613 - DNA, 25 bp, Homo sapien
tcttgcccgtaatagaagtctatat

SEQ ID NO: 4945614 - DNA, 25 bp, Homo sapien
tgtgttctacgcaacaaataagtaa

SEQ ID NO: 4945615 - DNA, 25 bp, Homo sapien
aataagtaaatcttgcccgtaatag

SEQ ID NO: 4945616 - DNA, 25 bp, Homo sapien
tctcctttaaaccaagttcattgtg

SEQ ID NO: 4945617 - DNA, 25 bp, Homo sapien
tctaaacgatatcccaggaagcagg

SEQ ID NO: 4945618 - DNA, 25 bp, Homo sapien
ttcttcggctgaaggcagggactcc

SEQ ID NO: 4945619 - DNA, 25 bp, Homo sapien
caggcaggtaagcttggtggcacct

SEQ ID NO: 4945620 - DNA, 25 bp, Homo sapien
gagagtctcccacaccaaagtgaaa

SEQ ID NO: 4945621 - DNA, 25 bp, Homo sapien
atctgggctatgaggaataaggaag

SEQ ID NO: 4945622 - DNA, 25 bp, Homo sapien
aatatgattgttcccatcctttggc

SEQ ID NO: 4945623 - DNA, 25 bp, Homo sapien
ttacatgtgactgtggtacccaggg

SEQ ID NO: 4945624 - DNA, 25 bp, Homo sapien
tcttcgtccaaagcatcatatgcac

SEQ ID NO: 4945625 - DNA, 25 bp, Homo sapien
aacaggcctgccttgatcgtatgag

SEQ ID NO: 4945626 - DNA, 25 bp, Homo sapien
tcagtaaatagtcgtgggaactctc

SEQ ID NO: 4945627 - DNA, 25 bp, Homo sapien
gaagtctgatataaaccgaagctgg

SEQ ID NO: 4945628 - DNA, 25 bp, Homo sapien
tgaagccctcgtacgaaattgagaa

SEQ ID NO: 4945629 - DNA, 25 bp, Homo sapien
cccatgagacacttcaatggtccac

SEQ ID NO: 4945630 - DNA, 25 bp, Homo sapien
tgcagtttagagagtttggataaaa

SEQ ID NO: 4945631 - DNA, 25 bp, Homo sapien
ctggaaacccaggagaaaggactgt

SEQ ID NO: 4945632 - DNA, 25 bp, Homo sapien
gagagtttggataaaaatctggaaa

SEQ ID NO: 4945633 - DNA, 25 bp, Homo sapien
tggataaaaatctggaaacccagga

SEQ ID NO: 4945634 - DNA, 25 bp, Homo sapien
cagaacccggaaatcactgaccagc

SEQ ID NO: 4945635 - DNA, 25 bp, Homo sapien
gagataaagctgctctcaggcttgt

SEQ ID NO: 4945636 - DNA, 25 bp, Homo sapien
tgtttcttcatgcacggtagatcct

SEQ ID NO: 4945637 - DNA, 25 bp, Homo sapien
tatgggtgcaaacacaacgtagtcc

SEQ ID NO: 4945638 - DNA, 25 bp, Homo sapien
gatcagaagcaaccctatggtagca

SEQ ID NO: 4945639 - DNA, 25 bp, Homo sapien
gaatcaacaaagtgatgaatgcaca

SEQ ID NO: 4945640 - DNA, 25 bp, Homo sapien
ggtgccccgagacaggctgtctgct

SEQ ID NO: 4945641 - DNA, 25 bp, Homo sapien
gatacaaggtcggaggaaatgcaga

SEQ ID NO: 4945642 - DNA, 25 bp, Homo sapien
ttctccaactgtgttgaacttccaa

SEQ ID NO: 4945643 - DNA, 25 bp, Homo sapien
ttctcgggatgtcaccttggagtca

SEQ ID NO: 4945644 - DNA, 25 bp, Homo sapien
gtttctcgggatgtcaccttggagt

SEQ ID NO: 4945645 - DNA, 25 bp, Homo sapien
tttctcgggatgtcaccttggagtc

SEQ ID NO: 4945646 - DNA, 25 bp, Homo sapien
aatacagttctatttgaagtcagac

SEQ ID NO: 4945647 - DNA, 25 bp, Homo sapien
agtcagacttaatgagttactttcc

SEQ ID NO: 4945648 - DNA, 25 bp, Homo sapien
atacagttctatttgaagtcagact

SEQ ID NO: 4945649 - DNA, 25 bp, Homo sapien
tgaagtcagacttaatgagttactt

SEQ ID NO: 4945650 - DNA, 25 bp, Homo sapien
accggttccagctggttcgcacact

SEQ ID NO: 4945651 - DNA, 25 bp, Homo sapien
gtccacctgcactctgtggtctcgg

SEQ ID NO: 4945652 - DNA, 25 bp, Homo sapien
tgtgctgtccacctgcactctgtgg

SEQ ID NO: 4945653 - DNA, 25 bp, Homo sapien
ccagagtgcagcattcccaccggtt

SEQ ID NO: 4945654 - DNA, 25 bp, Homo sapien
ggtgcattgcctcactgagctgtac

SEQ ID NO: 4945655 - DNA, 25 bp, Homo sapien
accctgctggtgcattgcctcactg

SEQ ID NO: 4945656 - DNA, 25 bp, Homo sapien
tagacgtgtgcgctgtctctgcaca

SEQ ID NO: 4945657 - DNA, 25 bp, Homo sapien
tgctggtgcattgcctcactgagct

SEQ ID NO: 4945658 - DNA, 25 bp, Homo sapien
aaagtctccaccgtggcgatggccg

SEQ ID NO: 4945659 - DNA, 25 bp, Homo sapien
gtaccccgggtcacagctgaaagtc

SEQ ID NO: 4945660 - DNA, 25 bp, Homo sapien
gcaggaatccgactcaagcgtcaca

SEQ ID NO: 4945661 - DNA, 25 bp, Homo sapien
tggtggttcctctcacagacgaggg

SEQ ID NO: 4945662 - DNA, 25 bp, Homo sapien
aaataatagagacccacgccatcaa

SEQ ID NO: 4945663 - DNA, 25 bp, Homo sapien
ttgaaaataatagagacccacgcca

SEQ ID NO: 4945664 - DNA, 25 bp, Homo sapien
ctggatgcacagaacgaatgcagtc

SEQ ID NO: 4945665 - DNA, 25 bp, Homo sapien
tgcagtcgatgaggatctttctggt

SEQ ID NO: 4945666 - DNA, 25 bp, Homo sapien
ccagatctttagttctcccatgcat

SEQ ID NO: 4945667 - DNA, 25 bp, Homo sapien
tcaagcaggatcagtaaactagcac

SEQ ID NO: 4945668 - DNA, 25 bp, Homo sapien
catagtatggttttgctagagtcaa

SEQ ID NO: 4945669 - DNA, 25 bp, Homo sapien
tgcatgctgccctgccgggctgtca

SEQ ID NO: 4945670 - DNA, 25 bp, Homo sapien
ctcatagtggatgaggaagccgatg

SEQ ID NO: 4945671 - DNA, 25 bp, Homo sapien
tcatagtggatgaggaagccgatgc

SEQ ID NO: 4945672 - DNA, 25 bp, Homo sapien
catagtggatgaggaagccgatgct

SEQ ID NO: 4945673 - DNA, 25 bp, Homo sapien
tctcatagtggatgaggaagccgat

SEQ ID NO: 4945674 - DNA, 25 bp, Homo sapien
gacctccaaggtgtcataattgacc

SEQ ID NO: 4945675 - DNA, 25 bp, Homo sapien
tgccgtggtactcgccgatcagtgg

SEQ ID NO: 4945676 - DNA, 25 bp, Homo sapien
atcagtggggacgaactggctggcc

SEQ ID NO: 4945677 - DNA, 25 bp, Homo sapien
cctgggtgccgtggtactcgccgat

SEQ ID NO: 4945678 - DNA, 25 bp, Homo sapien
aatgactccgctggacgctgtcaga

SEQ ID NO: 4945679 - DNA, 25 bp, Homo sapien
aggcaaaatgactccgctggacgct

SEQ ID NO: 4945680 - DNA, 25 bp, Homo sapien
tccttataatatcctggccatccag

SEQ ID NO: 4945681 - DNA, 25 bp, Homo sapien
aaagttattttgatagagtggcctg

SEQ ID NO: 4945682 - DNA, 25 bp, Homo sapien
ggatatgccataacaatacccggat

SEQ ID NO: 4945683 - DNA, 25 bp, Homo sapien
caaagcaaatcttattcccaaggaa

SEQ ID NO: 4945684 - DNA, 25 bp, Homo sapien
tacccggataaaagccagaatctgc

SEQ ID NO: 4945685 - DNA, 25 bp, Homo sapien
tgcttctgtgttcatagactgaata

SEQ ID NO: 4945686 - DNA, 25 bp, Homo sapien
ggacacctgagacgctttgagctta

SEQ ID NO: 4945687 - DNA, 25 bp, Homo sapien
gtttttcacatgctaaggacacctg

SEQ ID NO: 4945688 - DNA, 25 bp, Homo sapien
tatgtcggctgtaacaagaacaaca

SEQ ID NO: 4945689 - DNA, 25 bp, Homo sapien
gcttattgcgcactgactattctga

SEQ ID NO: 4945690 - DNA, 25 bp, Homo sapien
ccgtttataggaatgccaggatcat

SEQ ID NO: 4945691 - DNA, 25 bp, Homo sapien
cacgttcccgtcttgcagtatgcag

SEQ ID NO: 4945692 - DNA, 25 bp, Homo sapien
agctcccgagtagaaacctgtcacc

SEQ ID NO: 4945693 - DNA, 25 bp, Homo sapien
tatgcaggtaatggactcggatccc

SEQ ID NO: 4945694 - DNA, 25 bp, Homo sapien
aatgccatcatccttgaccgcgaga

SEQ ID NO: 4945695 - DNA, 25 bp, Homo sapien
ggtgaattcgacttcctggctccga

SEQ ID NO: 4945696 - DNA, 25 bp, Homo sapien
gatgttgaaccctctgccagtagtg

SEQ ID NO: 4945697 - DNA, 25 bp, Homo sapien
cattgccagaaaaagtacccaggac

SEQ ID NO: 4945698 - DNA, 25 bp, Homo sapien
tgttgccagaccactgattgttctg

SEQ ID NO: 4945699 - DNA, 25 bp, Homo sapien
ggcttgttgccagaccactgattgt

SEQ ID NO: 4945700 - DNA, 25 bp, Homo sapien
tgggcttgttgccagaccactgatt

SEQ ID NO: 4945701 - DNA, 25 bp, Homo sapien
cttgttgccagaccactgattgttc

SEQ ID NO: 4945702 - DNA, 25 bp, Homo sapien
gacaggtgataactctctcccccca

SEQ ID NO: 4945703 - DNA, 25 bp, Homo sapien
tgacaggtgataactctctcccccc

SEQ ID NO: 4945704 - DNA, 25 bp, Homo sapien
ctgacaggtgataactctctccccc

SEQ ID NO: 4945705 - DNA, 25 bp, Homo sapien
acaggtgataactctctccccccac

SEQ ID NO: 4945706 - DNA, 25 bp, Homo sapien
aggtgagtgtatctccatggaggaa

SEQ ID NO: 4945707 - DNA, 25 bp, Homo sapien
aaggccgccgggcattcaaaggtga

SEQ ID NO: 4945708 - DNA, 25 bp, Homo sapien
gaggaaactgctgcccgtccgcttc

SEQ ID NO: 4945709 - DNA, 25 bp, Homo sapien
cccataggcggggattccaggatcc

SEQ ID NO: 4945710 - DNA, 25 bp, Homo sapien
tgaagcagaatgaataacagtttgg

SEQ ID NO: 4945711 - DNA, 25 bp, Homo sapien
gaagcagaatgaataacagtttggt

SEQ ID NO: 4945712 - DNA, 25 bp, Homo sapien
ttatgaagcagaatgaataacagtt

SEQ ID NO: 4945713 - DNA, 25 bp, Homo sapien
tatgaagcagaatgaataacagttt

SEQ ID NO: 4945714 - DNA, 25 bp, Homo sapien
tatcctgatgcatggctacggctgg

SEQ ID NO: 4945715 - DNA, 25 bp, Homo sapien
gatgcatggctacggctggccgtgg

SEQ ID NO: 4945716 - DNA, 25 bp, Homo sapien
atggctacggctggccgtggacaga

SEQ ID NO: 4945717 - DNA, 25 bp, Homo sapien
atcctgatgcatggctacggctggc

SEQ ID NO: 4945718 - DNA, 25 bp, Homo sapien
ctttgttcttagtccagatcctatc

SEQ ID NO: 4945719 - DNA, 25 bp, Homo sapien
tttctggtgaccaactttgttctta

SEQ ID NO: 4945720 - DNA, 25 bp, Homo sapien
ttgttcttagtccagatcctatcca

SEQ ID NO: 4945721 - DNA, 25 bp, Homo sapien
tgttcttagtccagatcctatccag

SEQ ID NO: 4945722 - DNA, 25 bp, Homo sapien
tgtgtctcagctcaacaggtctgtc

SEQ ID NO: 4945723 - DNA, 25 bp, Homo sapien
caaattccctgacggtcccgctgat

SEQ ID NO: 4945724 - DNA, 25 bp, Homo sapien
gctgatctagtaacccgatttgggt

SEQ ID NO: 4945725 - DNA, 25 bp, Homo sapien
ccataacctgcaacgtaatgagaag

SEQ ID NO: 4945726 - DNA, 25 bp, Homo sapien
aatctgcaccaaccagatgctcctg

SEQ ID NO: 4945727 - DNA, 25 bp, Homo sapien
gattcttgagttcaggttcactgta

SEQ ID NO: 4945728 - DNA, 25 bp, Homo sapien
tgcaccaaccagatgctcctggttg

SEQ ID NO: 4945729 - DNA, 25 bp, Homo sapien
tcctggttgattcttgagttcaggt

SEQ ID NO: 4945730 - DNA, 25 bp, Homo sapien
tcactaatcttgtctaaccctgcat

SEQ ID NO: 4945731 - DNA, 25 bp, Homo sapien
taatcttgtctaaccctgcatactc

SEQ ID NO: 4945732 - DNA, 25 bp, Homo sapien
catcactaatcttgtctaaccctgc

SEQ ID NO: 4945733 - DNA, 25 bp, Homo sapien
ggccatcactaatcttgtctaaccc

SEQ ID NO: 4945734 - DNA, 25 bp, Homo sapien
ttgatttacctcatttccaccaata

SEQ ID NO: 4945735 - DNA, 25 bp, Homo sapien
catgtttccggtaacatatgaccca

SEQ ID NO: 4945736 - DNA, 25 bp, Homo sapien
ctcccttcatgtttccggtaacata

SEQ ID NO: 4945737 - DNA, 25 bp, Homo sapien
tgatttacctcatttccaccaataa

SEQ ID NO: 4945738 - DNA, 25 bp, Homo sapien
tgagctgttacatgaggcaactcct

SEQ ID NO: 4945739 - DNA, 25 bp, Homo sapien
tagcgaccttgatgactatgagctg

SEQ ID NO: 4945740 - DNA, 25 bp, Homo sapien
gacttcgaatcagcacatctcgtca

SEQ ID NO: 4945741 - DNA, 25 bp, Homo sapien
tacacgtcactcaatcaggttcttc

SEQ ID NO: 4945742 - DNA, 25 bp, Homo sapien
gaaaaacttcaaagactgaagtgca

SEQ ID NO: 4945743 - DNA, 25 bp, Homo sapien
ttcaaagactgaagtgcaaactcat

SEQ ID NO: 4945744 - DNA, 25 bp, Homo sapien
catcgaaaaacttcaaagactgaag

SEQ ID NO: 4945745 - DNA, 25 bp, Homo sapien
aaacttcaaagactgaagtgcaaac

SEQ ID NO: 4945746 - DNA, 25 bp, Homo sapien
ctcatcgatgtggtcctcaggagcc

SEQ ID NO: 4945747 - DNA, 25 bp, Homo sapien
aaagccagacgggagagagggtcac

SEQ ID NO: 4945748 - DNA, 25 bp, Homo sapien
cataatcaagcgttttaaagtggaa

SEQ ID NO: 4945749 - DNA, 25 bp, Homo sapien
gactcacacagcttgccataatcaa

SEQ ID NO: 4945750 - DNA, 25 bp, Homo sapien
gactgtttcactttcatgtatgtgt

SEQ ID NO: 4945751 - DNA, 25 bp, Homo sapien
gatgggccttaacatctccgttgac

SEQ ID NO: 4945752 - DNA, 25 bp, Homo sapien
tgcacatcaggatttgcttcgatga

SEQ ID NO: 4945753 - DNA, 25 bp, Homo sapien
tgtgggtctcttacactcaggcggc

SEQ ID NO: 4945754 - DNA, 25 bp, Homo sapien
cgatgacgaacgttgactgtgggtc

SEQ ID NO: 4945755 - DNA, 25 bp, Homo sapien
gaagggccccatgaaactgtaagct

SEQ ID NO: 4945756 - DNA, 25 bp, Homo sapien
ggaagcaggagtagctgtctcacct

SEQ ID NO: 4945757 - DNA, 25 bp, Homo sapien
caaggcctcaccagtaatggaagca

SEQ ID NO: 4945758 - DNA, 25 bp, Homo sapien
caccccaggagctgattgagatctc

SEQ ID NO: 4945759 - DNA, 25 bp, Homo sapien
tgtatacgcataaaggtcactttta

SEQ ID NO: 4945760 - DNA, 25 bp, Homo sapien
gcactttgtcttcaactgttagctt

SEQ ID NO: 4945761 - DNA, 25 bp, Homo sapien
ctgttagcttaatatagtactctgg

SEQ ID NO: 4945762 - DNA, 25 bp, Homo sapien
tataagtgatttgcactttgtcttc

SEQ ID NO: 4945763 - DNA, 25 bp, Homo sapien
gtgaccctttatcccacacagagag

SEQ ID NO: 4945764 - DNA, 25 bp, Homo sapien
gagggaccctattttatgctttgta

SEQ ID NO: 4945765 - DNA, 25 bp, Homo sapien
cagccaaggtgtggcgtgttcactc

SEQ ID NO: 4945766 - DNA, 25 bp, Homo sapien
tattcacaagggtcattaagtcccc

SEQ ID NO: 4945767 - DNA, 25 bp, Homo sapien
ttgatttcatgggtaataacttctt

SEQ ID NO: 4945768 - DNA, 25 bp, Homo sapien
atttaggattggtggatgctttttt

SEQ ID NO: 4945769 - DNA, 25 bp, Homo sapien
taggattggtggatgcttttttatt

SEQ ID NO: 4945770 - DNA, 25 bp, Homo sapien
tttcatgggtaataacttcttgtta

SEQ ID NO: 4945771 - DNA, 25 bp, Homo sapien
gaaataaacttgctaatccatttaa

SEQ ID NO: 4945772 - DNA, 25 bp, Homo sapien
taaaagtaatcaatatccacaggac

SEQ ID NO: 4945773 - DNA, 25 bp, Homo sapien
caggacaataattaatgggatcttt

SEQ ID NO: 4945774 - DNA, 25 bp, Homo sapien
catctatcggttcaaatactttaag

SEQ ID NO: 4945775 - DNA, 25 bp, Homo sapien
acatctggttgctcatgctcacaat

SEQ ID NO: 4945776 - DNA, 25 bp, Homo sapien
cagctttaaacccaggtgagccaat

SEQ ID NO: 4945777 - DNA, 25 bp, Homo sapien
ccaatgctatcatccgactgcagat

SEQ ID NO: 4945778 - DNA, 25 bp, Homo sapien
taaacagctttaaacccaggtgagc

SEQ ID NO: 4945779 - DNA, 25 bp, Homo sapien
gtcaggaacactggatcccgtgagc

SEQ ID NO: 4945780 - DNA, 25 bp, Homo sapien
ggtcaggaacactggatcccgtgag

SEQ ID NO: 4945781 - DNA, 25 bp, Homo sapien
tcctggaaaaaatatggcacagttg

SEQ ID NO: 4945782 - DNA, 25 bp, Homo sapien
tggcacagttgttcatgtgaggtga

SEQ ID NO: 4945783 - DNA, 25 bp, Homo sapien
gacagtcctggaaaaaatatggcac

SEQ ID NO: 4945784 - DNA, 25 bp, Homo sapien
gaaaaaatatggcacagttgttcat

SEQ ID NO: 4945785 - DNA, 25 bp, Homo sapien
cttaggcagtacagagcaccggatt

SEQ ID NO: 4945786 - DNA, 25 bp, Homo sapien
taaagtctactaccaatctgtccca

SEQ ID NO: 4945787 - DNA, 25 bp, Homo sapien
tgaaacacacttcccaattcttggg

SEQ ID NO: 4945788 - DNA, 25 bp, Homo sapien
gggacctctactaatgattttgtca

SEQ ID NO: 4945789 - DNA, 25 bp, Homo sapien
ggacaacatgattggtactctgcta

SEQ ID NO: 4945790 - DNA, 25 bp, Homo sapien
cctagacattcgacttgattttaac

SEQ ID NO: 4945791 - DNA, 25 bp, Homo sapien
atttcatctcccctagacattcgac

SEQ ID NO: 4945792 - DNA, 25 bp, Homo sapien
gctcctaactctgtctcctggttct

SEQ ID NO: 4945793 - DNA, 25 bp, Homo sapien
ccaccaaagtaggctcctaactctg

SEQ ID NO: 4945794 - DNA, 25 bp, Homo sapien
gtgagtacctttaactctttgagag

SEQ ID NO: 4945795 - DNA, 25 bp, Homo sapien
aactaaactctttccaatgcaaatg

SEQ ID NO: 4945796 - DNA, 25 bp, Homo sapien
cagtgttcttgaaagcttaatgaca

SEQ ID NO: 4945797 - DNA, 25 bp, Homo sapien
aatgacaaccataagatacagtaac

SEQ ID NO: 4945798 - DNA, 25 bp, Homo sapien
aaaataccagtaatgagtttcagac

SEQ ID NO: 4945799 - DNA, 25 bp, Homo sapien
cctcttgaggatggagtaaaatacc

SEQ ID NO: 4945800 - DNA, 25 bp, Homo sapien
ctgggcagactcattcctcttgagg

SEQ ID NO: 4945801 - DNA, 25 bp, Homo sapien
cagacatgtgttgataaatatctct

SEQ ID NO: 4945802 - DNA, 25 bp, Homo sapien
agcaccaccttatttgcagcagcag

SEQ ID NO: 4945803 - DNA, 25 bp, Homo sapien
ttagctgaaatggagcaccacctta

SEQ ID NO: 4945804 - DNA, 25 bp, Homo sapien
aatggagcaccaccttatttgcagc

SEQ ID NO: 4945805 - DNA, 25 bp, Homo sapien
ctgtgggacctatggcttcttcttc

SEQ ID NO: 4945806 - DNA, 25 bp, Homo sapien
agaggaagtacaccctcaaatcatt

SEQ ID NO: 4945807 - DNA, 25 bp, Homo sapien
accaggtgtgataaaatggacaaaa

SEQ ID NO: 4945808 - DNA, 25 bp, Homo sapien
gaggaagtacaccctcaaatcattt

SEQ ID NO: 4945809 - DNA, 25 bp, Homo sapien
gagaggaagtacaccctcaaatcat

SEQ ID NO: 4945810 - DNA, 25 bp, Homo sapien
acaggaagtctggaaaggtgtatgg

SEQ ID NO: 4945811 - DNA, 25 bp, Homo sapien
aagtctggaaaggtgtatggcatta

SEQ ID NO: 4945812 - DNA, 25 bp, Homo sapien
aggaagtctggaaaggtgtatggca

SEQ ID NO: 4945813 - DNA, 25 bp, Homo sapien
gaagtctggaaaggtgtatggcatt

SEQ ID NO: 4945814 - DNA, 25 bp, Homo sapien
cacagggaagcagaggagagaggtt

SEQ ID NO: 4945815 - DNA, 25 bp, Homo sapien
cagggaagcagaggagagaggttaa

SEQ ID NO: 4945816 - DNA, 25 bp, Homo sapien
gggaagcagaggagagaggttaaaa

SEQ ID NO: 4945817 - DNA, 25 bp, Homo sapien
tcacagggaagcagaggagagaggt

SEQ ID NO: 4945818 - DNA, 25 bp, Homo sapien
tgaggccgaattacaagcctgtagc

SEQ ID NO: 4945819 - DNA, 25 bp, Homo sapien
caaaatgagattgcaggccactaca

SEQ ID NO: 4945820 - DNA, 25 bp, Homo sapien
gatggcactaagcaaacacctgagg

SEQ ID NO: 4945821 - DNA, 25 bp, Homo sapien
gtgccccgcactgcatgcataagag

SEQ ID NO: 4945822 - DNA, 25 bp, Homo sapien
cccagcatcaccaaccgtcagggtg

SEQ ID NO: 4945823 - DNA, 25 bp, Homo sapien
acgtacaagaccgatctggtgtctc

SEQ ID NO: 4945824 - DNA, 25 bp, Homo sapien
gtgtcatagcctcgctccagctcaa

SEQ ID NO: 4945825 - DNA, 25 bp, Homo sapien
aagaccgatctggtgtctcccacct

SEQ ID NO: 4945826 - DNA, 25 bp, Homo sapien
gcctccaccgtgatgtatcatcctg

SEQ ID NO: 4945827 - DNA, 25 bp, Homo sapien
caaggtgcttgaggcatctctttta

SEQ ID NO: 4945828 - DNA, 25 bp, Homo sapien
tactttccttactcttgtaactatc

SEQ ID NO: 4945829 - DNA, 25 bp, Homo sapien
tatcatcctggaactcagtactaag

SEQ ID NO: 4945830 - DNA, 25 bp, Homo sapien
tgggtttcctcaccctctagccttg

SEQ ID NO: 4945831 - DNA, 25 bp, Homo sapien
tcagagccacacattgccatgcaga

SEQ ID NO: 4945832 - DNA, 25 bp, Homo sapien
tcctcgaagccatccctgatatcaa

SEQ ID NO: 4945833 - DNA, 25 bp, Homo sapien
gtttcaaggaagacctgctcctcga

SEQ ID NO: 4945834 - DNA, 25 bp, Homo sapien
gtagtaccccgtgtccacttctcca

SEQ ID NO: 4945835 - DNA, 25 bp, Homo sapien
gtgcctcaatggtaccccgtgtcca

SEQ ID NO: 4945836 - DNA, 25 bp, Homo sapien
cttctccaatgatgaacggtgcctc

SEQ ID NO: 4945837 - DNA, 25 bp, Homo sapien
tccaatgatgaacggtgcctcaatg

SEQ ID NO: 4945838 - DNA, 25 bp, Homo sapien
cagcagtaacgggtaagtcatagac

SEQ ID NO: 4945839 - DNA, 25 bp, Homo sapien
taacgggtaagtcatagacaatgaa

SEQ ID NO: 4945840 - DNA, 25 bp, Homo sapien
cagtaacgggtaagtcatagacaat

SEQ ID NO: 4945841 - DNA, 25 bp, Homo sapien
ttaagcagcagtaacgggtaagtca

SEQ ID NO: 4945842 - DNA, 25 bp, Homo sapien
ctgtttcccacacccacggcaccta

SEQ ID NO: 4945843 - DNA, 25 bp, Homo sapien
cacccacggcacctactggaggcag

SEQ ID NO: 4945844 - DNA, 25 bp, Homo sapien
gtttgactctcacccacggcgtcat

SEQ ID NO: 4945845 - DNA, 25 bp, Homo sapien
ctgcctcgagtttgactctcaccca

SEQ ID NO: 4945846 - DNA, 25 bp, Homo sapien
tgggagccccctctcagtccaagtg

SEQ ID NO: 4945847 - DNA, 25 bp, Homo sapien
caagtggggctgtgtcaaaaggagg

SEQ ID NO: 4945848 - DNA, 25 bp, Homo sapien
ttacaggggcgcattcgagcactcc

SEQ ID NO: 4945849 - DNA, 25 bp, Homo sapien
ggaggagaagactcctgcaggcttt

SEQ ID NO: 4945850 - DNA, 25 bp, Homo sapien
aaagttctactatctaaccttcaga

SEQ ID NO: 4945851 - DNA, 25 bp, Homo sapien
tttgagcccctatggaaatgcatgt

SEQ ID NO: 4945852 - DNA, 25 bp, Homo sapien
tctggagaccaaacagaatattcta

SEQ ID NO: 4945853 - DNA, 25 bp, Homo sapien
tcaagtcaacacctaatatagcccc

SEQ ID NO: 4945854 - DNA, 25 bp, Homo sapien
tgatattacatttacttacgcaaca

SEQ ID NO: 4945855 - DNA, 25 bp, Homo sapien
cactaccagtattagcagcttataa

SEQ ID NO: 4945856 - DNA, 25 bp, Homo sapien
actattctctaaggtaaatgctatt

SEQ ID NO: 4945857 - DNA, 25 bp, Homo sapien
cttacgcaacatgtggatttatctg

SEQ ID NO: 4945858 - DNA, 25 bp, Homo sapien
cactgtagttgatgtcccagggtac

SEQ ID NO: 4945859 - DNA, 25 bp, Homo sapien
gtttcagaaagcctgcaacgccctg

SEQ ID NO: 4945860 - DNA, 25 bp, Homo sapien
cagggtacaacacggctctagcata

SEQ ID NO: 4945861 - DNA, 25 bp, Homo sapien
gaactggcaacccaacagctttgag

SEQ ID NO: 4945862 - DNA, 25 bp, Homo sapien
taagcacggatagcatttgctgggc

SEQ ID NO: 4945863 - DNA, 25 bp, Homo sapien
tctgaatctcagactgctctgcaat

SEQ ID NO: 4945864 - DNA, 25 bp, Homo sapien
gcttcaacaatagatcctataagag

SEQ ID NO: 4945865 - DNA, 25 bp, Homo sapien
gctctgcaatgaatgtggcatctag

SEQ ID NO: 4945866 - DNA, 25 bp, Homo sapien
tggtgatgacccacacacagtgtgc

SEQ ID NO: 4945867 - DNA, 25 bp, Homo sapien
tgcattatcttcatactgaaccgga

SEQ ID NO: 4945868 - DNA, 25 bp, Homo sapien
ggcccacgcagattggatccacatg

SEQ ID NO: 4945869 - DNA, 25 bp, Homo sapien
gtaatgacgccgctgggcccacgca

SEQ ID NO: 4945870 - DNA, 25 bp, Homo sapien
aacatacagtcctccatctagcaca

SEQ ID NO: 4945871 - DNA, 25 bp, Homo sapien
aagagccaacatacagtcctccatc

SEQ ID NO: 4945872 - DNA, 25 bp, Homo sapien
actgtcttccctccgtcagcttcca

SEQ ID NO: 4945873 - DNA, 25 bp, Homo sapien
tgggccaggaaagcttacattaatt

SEQ ID NO: 4945874 - DNA, 25 bp, Homo sapien
agcgagcgtctctgtaactctctga

SEQ ID NO: 4945875 - DNA, 25 bp, Homo sapien
ggagcacgtaattgtcctcacatga

SEQ ID NO: 4945876 - DNA, 25 bp, Homo sapien
gcagatgggcctgtggtcactccaa

SEQ ID NO: 4945877 - DNA, 25 bp, Homo sapien
agatccctggagcacgtaattgtcc

SEQ ID NO: 4945878 - DNA, 25 bp, Homo sapien
catgtcagagaccaatgcaacacct

SEQ ID NO: 4945879 - DNA, 25 bp, Homo sapien
ggacacatgtcagagaccaatgcaa

SEQ ID NO: 4945880 - DNA, 25 bp, Homo sapien
tgaagtcggaacctgctcttctacc

SEQ ID NO: 4945881 - DNA, 25 bp, Homo sapien
ttttctggaatcccaggatctggac

SEQ ID NO: 4945882 - DNA, 25 bp, Homo sapien
tgctggtcatgaaacggaatgtgaa

SEQ ID NO: 4945883 - DNA, 25 bp, Homo sapien
catgtaactttatgctggtcatgaa

SEQ ID NO: 4945884 - DNA, 25 bp, Homo sapien
taactttatgctggtcatgaaacgg

SEQ ID NO: 4945885 - DNA, 25 bp, Homo sapien
gaggaatgtacatgtaactttatgc

SEQ ID NO: 4945886 - DNA, 25 bp, Homo sapien
cactgtcagcatgcttaaccaccat

SEQ ID NO: 4945887 - DNA, 25 bp, Homo sapien
ctggagcttctgtgcaaatttttct

SEQ ID NO: 4945888 - DNA, 25 bp, Homo sapien
cctggagcttctgtgcaaatttttc

SEQ ID NO: 4945889 - DNA, 25 bp, Homo sapien
tggagcttctgtgcaaatttttctt

SEQ ID NO: 4945890 - DNA, 25 bp, Homo sapien
ggagcttctgtgcaaatttttcttt

SEQ ID NO: 4945891 - DNA, 25 bp, Homo sapien
ttggaaacctgacgaataccgtcga

SEQ ID NO: 4945892 - DNA, 25 bp, Homo sapien
tgacgaataccgtcgaccataaaac

SEQ ID NO: 4945893 - DNA, 25 bp, Homo sapien
gaataccgtcgaccataaaacgcca

SEQ ID NO: 4945894 - DNA, 25 bp, Homo sapien
gaaacctgacgaataccgtcgacca

SEQ ID NO: 4945895 - DNA, 25 bp, Homo sapien
tctattaaaatccatggtgagcagg

SEQ ID NO: 4945896 - DNA, 25 bp, Homo sapien
tccgtgcagctcataggaaggcaac

SEQ ID NO: 4945897 - DNA, 25 bp, Homo sapien
aaatgtatgtccaataaaatgcagg

SEQ ID NO: 4945898 - DNA, 25 bp, Homo sapien
ctgtggttaccccatgtatgatgga

SEQ ID NO: 4945899 - DNA, 25 bp, Homo sapien
agtgttgtaactgcaaatgctcctc

SEQ ID NO: 4945900 - DNA, 25 bp, Homo sapien
ttctggattaattgccccatcctgc

SEQ ID NO: 4945901 - DNA, 25 bp, Homo sapien
tggctacaaagtgttgtaactgcaa

SEQ ID NO: 4945902 - DNA, 25 bp, Homo sapien
agcatgtcccatcagctcatctgag

SEQ ID NO: 4945903 - DNA, 25 bp, Homo sapien
tgatctgtttaattatcaaactgca

SEQ ID NO: 4945904 - DNA, 25 bp, Homo sapien
gaaattctcccattccttgtcatga

SEQ ID NO: 4945905 - DNA, 25 bp, Homo sapien
cttcctgcacttgctgaactcttgc

SEQ ID NO: 4945906 - DNA, 25 bp, Homo sapien
caagtttcctgaggctgtcagggaa

SEQ ID NO: 4945907 - DNA, 25 bp, Homo sapien
catctctcgtttgtaagaaaagcaa

SEQ ID NO: 4945908 - DNA, 25 bp, Homo sapien
gaagctggtacccagtaactgttat

SEQ ID NO: 4945909 - DNA, 25 bp, Homo sapien
tcagtagacggtactcatctctcgt

SEQ ID NO: 4945910 - DNA, 25 bp, Homo sapien
ttatgacatgtgtaaggtcgtgtgg

SEQ ID NO: 4945911 - DNA, 25 bp, Homo sapien
tcaatcctcagatagaaaggaaagg

SEQ ID NO: 4945912 - DNA, 25 bp, Homo sapien
caatcctcagatagaaaggaaaggg

SEQ ID NO: 4945913 - DNA, 25 bp, Homo sapien
tcagatagaaaggaaagggactcac

SEQ ID NO: 4945914 - DNA, 25 bp, Homo sapien
tcctcagatagaaaggaaagggact

SEQ ID NO: 4945915 - DNA, 25 bp, Homo sapien
ttgacttcaactcaatcgccttttt

SEQ ID NO: 4945916 - DNA, 25 bp, Homo sapien
tgacttcaactcaatcgcctttttc

SEQ ID NO: 4945917 - DNA, 25 bp, Homo sapien
gacttcaactcaatcgcctttttca

SEQ ID NO: 4945918 - DNA, 25 bp, Homo sapien
cacacagcacttccagtcataactg

SEQ ID NO: 4945919 - DNA, 25 bp, Homo sapien
aaaccaagccattagcaggtaagac

SEQ ID NO: 4945920 - DNA, 25 bp, Homo sapien
ggtaagacttggagatcataaaacc

SEQ ID NO: 4945921 - DNA, 25 bp, Homo sapien
tgctttctatcaacccccgaaaatg

SEQ ID NO: 4945922 - DNA, 25 bp, Homo sapien
gataggaattatgacaccgccagct

SEQ ID NO: 4945923 - DNA, 25 bp, Homo sapien
catgtgttagcctctttgcagcgac

SEQ ID NO: 4945924 - DNA, 25 bp, Homo sapien
taaggctggagacgatcaatgcacc

SEQ ID NO: 4945925 - DNA, 25 bp, Homo sapien
gacttcccagtatcaagagcggtga

SEQ ID NO: 4945926 - DNA, 25 bp, Homo sapien
ctttgaggcagtcagctcatctgca

SEQ ID NO: 4945927 - DNA, 25 bp, Homo sapien
gcctcccgcctgaacggtggcactg

SEQ ID NO: 4945928 - DNA, 25 bp, Homo sapien
ctcccgcctgaacggtggcactgca

SEQ ID NO: 4945929 - DNA, 25 bp, Homo sapien
cctcccgcctgaacggtggcactgc

SEQ ID NO: 4945930 - DNA, 25 bp, Homo sapien
tcaggcacacggtaacgggcaagtt

SEQ ID NO: 4945931 - DNA, 25 bp, Homo sapien
caaaataggtgatatgaatgtggac

SEQ ID NO: 4945932 - DNA, 25 bp, Homo sapien
ccacaacgatgtgaaacaggtacat

SEQ ID NO: 4945933 - DNA, 25 bp, Homo sapien
aatagctcccctgtggtgtgcaaag

SEQ ID NO: 4945934 - DNA, 25 bp, Homo sapien
gtacagtagacacaatcatgcttac

SEQ ID NO: 4945935 - DNA, 25 bp, Homo sapien
tcaatgtaaatgctgaagactttgg

SEQ ID NO: 4945936 - DNA, 25 bp, Homo sapien
gacaacttcctcacatgtacagtag

SEQ ID NO: 4945937 - DNA, 25 bp, Homo sapien
ggccagacttcatgaccagttggtc

SEQ ID NO: 4945938 - DNA, 25 bp, Homo sapien
tggaactgagcgttaaatcctttgc

SEQ ID NO: 4945939 - DNA, 25 bp, Homo sapien
ctgtcagaggtgaaatggagtcgta

SEQ ID NO: 4945940 - DNA, 25 bp, Homo sapien
ctttgcgtcggtggttgctgtcaga

SEQ ID NO: 4945941 - DNA, 25 bp, Homo sapien
gagtcgtagccaattcttgctactg

SEQ ID NO: 4945942 - DNA, 25 bp, Homo sapien
agaggggaggttcatgccagttagc

SEQ ID NO: 4945943 - DNA, 25 bp, Homo sapien
gagaggggaggttcatgccagttag

SEQ ID NO: 4945944 - DNA, 25 bp, Homo sapien
ctggagaggggaggttcatgccagt

SEQ ID NO: 4945945 - DNA, 25 bp, Homo sapien
ggagaggggaggttcatgccagtta

SEQ ID NO: 4945946 - DNA, 25 bp, Homo sapien
gagggcattggtgctaactcagaca

SEQ ID NO: 4945947 - DNA, 25 bp, Homo sapien
ccctggaagttactgtgtgtcttac

SEQ ID NO: 4945948 - DNA, 25 bp, Homo sapien
taatggttgtgtagaggtctacctc

SEQ ID NO: 4945949 - DNA, 25 bp, Homo sapien
gcatttgtttcataggcttccctgg

SEQ ID NO: 4945950 - DNA, 25 bp, Homo sapien
tgttgggactcatgtgctcctgttc

SEQ ID NO: 4945951 - DNA, 25 bp, Homo sapien
tcagtaaaagtcatagattgtcggg

SEQ ID NO: 4945952 - DNA, 25 bp, Homo sapien
tgtcagtaaagttcgtaaattgttg

SEQ ID NO: 4945953 - DNA, 25 bp, Homo sapien
tccagtgtggactcatgtgctcttg

SEQ ID NO: 4945954 - DNA, 25 bp, Homo sapien
tgcaggatacttgcatggccccctc

SEQ ID NO: 4945955 - DNA, 25 bp, Homo sapien
tgcctccagatgagctaactgctgc

SEQ ID NO: 4945956 - DNA, 25 bp, Homo sapien
gtgcctccagatgagctaactgctg

SEQ ID NO: 4945957 - DNA, 25 bp, Homo sapien
ctgctgcaggatacttgcatggccc

SEQ ID NO: 4945958 - DNA, 25 bp, Homo sapien
gggagcagtgctcattctggtgtcc

SEQ ID NO: 4945959 - DNA, 25 bp, Homo sapien
ctctaagagatgatgggctgaggat

SEQ ID NO: 4945960 - DNA, 25 bp, Homo sapien
tcaaagggagcagtgctcattctgg

SEQ ID NO: 4945961 - DNA, 25 bp, Homo sapien
tctggtgtcctgctactctaagaga

SEQ ID NO: 4945962 - DNA, 25 bp, Homo sapien
aaaagagcatcagtgccctctcctg

SEQ ID NO: 4945963 - DNA, 25 bp, Homo sapien
ctacaagaacgctgcccgtgtgcct

SEQ ID NO: 4945964 - DNA, 25 bp, Homo sapien
cttctacaagaacgctgcccgtgtg

SEQ ID NO: 4945965 - DNA, 25 bp, Homo sapien
tgtgcctgtgcacgctcttgcctgg

SEQ ID NO: 4945966 - DNA, 25 bp, Homo sapien
ttctccaggttgtttctggaccaga

SEQ ID NO: 4945967 - DNA, 25 bp, Homo sapien
gagccttgtttcatgctccgaacac

SEQ ID NO: 4945968 - DNA, 25 bp, Homo sapien
tccgaacacttttctcctgactgct

SEQ ID NO: 4945969 - DNA, 25 bp, Homo sapien
caaataattgcttgtgattgggtat

SEQ ID NO: 4945970 - DNA, 25 bp, Homo sapien
ctgctgtacaagtttattattcctc

SEQ ID NO: 4945971 - DNA, 25 bp, Homo sapien
aagcccatttaatctcttgggtgac

SEQ ID NO: 4945972 - DNA, 25 bp, Homo sapien
cctggtgagaaatgcacagatgctt

SEQ ID NO: 4945973 - DNA, 25 bp, Homo sapien
aaccgcttcagttgtcggcagaaag

SEQ ID NO: 4945974 - DNA, 25 bp, Homo sapien
cacataaagcccatttaatctcttg

SEQ ID NO: 4945975 - DNA, 25 bp, Homo sapien
acagtgcagatggcaggtttttcaa

SEQ ID NO: 4945976 - DNA, 25 bp, Homo sapien
agaaatactgggatggatgggaaac

SEQ ID NO: 4945977 - DNA, 25 bp, Homo sapien
cattagaaatactgggatggatggg

SEQ ID NO: 4945978 - DNA, 25 bp, Homo sapien
gatggatgggaaacacagtgcagat

SEQ ID NO: 4945979 - DNA, 25 bp, Homo sapien
gcatcgccctgagggtgagtgtggg

SEQ ID NO: 4945980 - DNA, 25 bp, Homo sapien
aagagttggcatcgccctgagggtg

SEQ ID NO: 4945981 - DNA, 25 bp, Homo sapien
ttggcatcgccctgagggtgagtgt

SEQ ID NO: 4945982 - DNA, 25 bp, Homo sapien
aaggaagagttggcatcgccctgag

SEQ ID NO: 4945983 - DNA, 25 bp, Homo sapien
gagtgcagtttcactgatatactca

SEQ ID NO: 4945984 - DNA, 25 bp, Homo sapien
ggaaccacttgattcatatcttgtg

SEQ ID NO: 4945985 - DNA, 25 bp, Homo sapien
ttttaattgggtctcttatatgccc

SEQ ID NO: 4945986 - DNA, 25 bp, Homo sapien
tcttatatgcccaagtgtgagtgtg

SEQ ID NO: 4945987 - DNA, 25 bp, Homo sapien
ggttagtagcacagtaatgaatgac

SEQ ID NO: 4945988 - DNA, 25 bp, Homo sapien
aggttagtagcacagtaatgaatga

SEQ ID NO: 4945989 - DNA, 25 bp, Homo sapien
gttagtagcacagtaatgaatgact

SEQ ID NO: 4945990 - DNA, 25 bp, Homo sapien
gaagaggcctggttggtcatattca

SEQ ID NO: 4945991 - DNA, 25 bp, Homo sapien
agagaagcaattgttcgttccactt

SEQ ID NO: 4945992 - DNA, 25 bp, Homo sapien
aagaggcctggttggtcatattcac

SEQ ID NO: 4945993 - DNA, 25 bp, Homo sapien
agaggcctggttggtcatattcaca

SEQ ID NO: 4945994 - DNA, 25 bp, Homo sapien
gatctatagaccatgtagtaaggca

SEQ ID NO: 4945995 - DNA, 25 bp, Homo sapien
ttgttctgatctatagaccatgtag

SEQ ID NO: 4945996 - DNA, 25 bp, Homo sapien
gttctgatctatagaccatgtagta

SEQ ID NO: 4945997 - DNA, 25 bp, Homo sapien
tctgatctatagaccatgtagtaag

SEQ ID NO: 4945998 - DNA, 25 bp, Homo sapien
ggagtgggcatggattttatctaga

SEQ ID NO: 4945999 - DNA, 25 bp, Homo sapien
ttttcccaaccgagtgcctgttgag

SEQ ID NO: 4946000 - DNA, 25 bp, Homo sapien
ccctggtgttccttgacaatgtgtt

SEQ ID NO: 4946001 - DNA, 25 bp, Homo sapien
gagttttagcagagttgttccctgg

SEQ ID NO: 4946002 - DNA, 25 bp, Homo sapien
gatgcccggcatcgtctgatgacag

SEQ ID NO: 4946003 - DNA, 25 bp, Homo sapien
tgagaagtgctagaaaagggagaaa

SEQ ID NO: 4946004 - DNA, 25 bp, Homo sapien
atgggtccccacagcaagggatgcc

SEQ ID NO: 4946005 - DNA, 25 bp, Homo sapien
ctagccagcatgaagacgtgaagga

SEQ ID NO: 4946006 - DNA, 25 bp, Homo sapien
tttgagtcgctgtttaactactgtg

SEQ ID NO: 4946007 - DNA, 25 bp, Homo sapien
cctttgagtcgctgtttaactactg

SEQ ID NO: 4946008 - DNA, 25 bp, Homo sapien
tgagtcgctgtttaactactgtgaa

SEQ ID NO: 4946009 - DNA, 25 bp, Homo sapien
tccctttgagtcgctgtttaactac

SEQ ID NO: 4946010 - DNA, 25 bp, Homo sapien
tgagacccgtctaagactggcagcg

SEQ ID NO: 4946011 - DNA, 25 bp, Homo sapien
cagcgcaggtttgcatatggcacca

SEQ ID NO: 4946012 - DNA, 25 bp, Homo sapien
tacataagtagatgcatgagacccg

SEQ ID NO: 4946013 - DNA, 25 bp, Homo sapien
cctgcctgagggtgttctatctttt

SEQ ID NO: 4946014 - DNA, 25 bp, Homo sapien
cttttagcagaattgtcacagaggg

SEQ ID NO: 4946015 - DNA, 25 bp, Homo sapien
tatgatccataggaggtccagggag

SEQ ID NO: 4946016 - DNA, 25 bp, Homo sapien
ggtaatgtgactaaccgtaacttca

SEQ ID NO: 4946017 - DNA, 25 bp, Homo sapien
aaagtaataactagaggccaatgtc

SEQ ID NO: 4946018 - DNA, 25 bp, Homo sapien
ggaaatgaatcagtccggtcattga

SEQ ID NO: 4946019 - DNA, 25 bp, Homo sapien
aaatgaatcagtccggtcattgaga

SEQ ID NO: 4946020 - DNA, 25 bp, Homo sapien
ggaggaaatgaatcagtccggtcat

SEQ ID NO: 4946021 - DNA, 25 bp, Homo sapien
gaatcagtccggtcattgagaacaa

SEQ ID NO: 4946022 - DNA, 25 bp, Homo sapien
tattattgggtgtatggactagtgc

SEQ ID NO: 4946023 - DNA, 25 bp, Homo sapien
gaaacatcagatattttgctgggtt

SEQ ID NO: 4946024 - DNA, 25 bp, Homo sapien
gttcaaacttgcaaagaaacatcag

SEQ ID NO: 4946025 - DNA, 25 bp, Homo sapien
ttgataactaaagtatcatattccc

SEQ ID NO: 4946026 - DNA, 25 bp, Homo sapien
tgatctgagtcctcgtgcatccaaa

SEQ ID NO: 4946027 - DNA, 25 bp, Homo sapien
ccgtgctcaggcgtttgcttgatct

SEQ ID NO: 4946028 - DNA, 25 bp, Homo sapien
ctgggtgacactatagctagctgcc

SEQ ID NO: 4946029 - DNA, 25 bp, Homo sapien
tagctgccaccgcaactgggtgaca

SEQ ID NO: 4946030 - DNA, 25 bp, Homo sapien
atggccccgggattagagacccctg

SEQ ID NO: 4946031 - DNA, 25 bp, Homo sapien
tcctggttcttaacaggctgtggac

SEQ ID NO: 4946032 - DNA, 25 bp, Homo sapien
taaattacataatgcactgactggc

SEQ ID NO: 4946033 - DNA, 25 bp, Homo sapien
ctgactggcccatcttggatactga

SEQ ID NO: 4946034 - DNA, 25 bp, Homo sapien
ctgcttgtctgctgagctaggtgga

SEQ ID NO: 4946035 - DNA, 25 bp, Homo sapien
ctaggtggagaccttcttactggca

SEQ ID NO: 4946036 - DNA, 25 bp, Homo sapien
tgaccacctggattggataactgcc

SEQ ID NO: 4946037 - DNA, 25 bp, Homo sapien
taaagtagcgtgtagctgaccacct

SEQ ID NO: 4946038 - DNA, 25 bp, Homo sapien
ttggagaaacctgtatgagctctgc

SEQ ID NO: 4946039 - DNA, 25 bp, Homo sapien
gaaacctgtatgagctctgcattcc

SEQ ID NO: 4946040 - DNA, 25 bp, Homo sapien
aaacctgtatgagctctgcattcca

SEQ ID NO: 4946041 - DNA, 25 bp, Homo sapien
ggagaaacctgtatgagctctgcat

SEQ ID NO: 4946042 - DNA, 25 bp, Homo sapien
tgattacacatcagatacagcatcc

SEQ ID NO: 4946043 - DNA, 25 bp, Homo sapien
tcccaattgagtccacatttgagcc

SEQ ID NO: 4946044 - DNA, 25 bp, Homo sapien
actttcaggtgatggactttgccac

SEQ ID NO: 4946045 - DNA, 25 bp, Homo sapien
ggctgtctaatgatgtgattacaca

SEQ ID NO: 4946046 - DNA, 25 bp, Homo sapien
tcgtgattggtcctttggagactgg

SEQ ID NO: 4946047 - DNA, 25 bp, Homo sapien
ctttgcaagcgctggcaaacagggc

SEQ ID NO: 4946048 - DNA, 25 bp, Homo sapien
aactaaagcaatattctggagaggc

SEQ ID NO: 4946049 - DNA, 25 bp, Homo sapien
ttcactactgtaggaggcttgcctt

SEQ ID NO: 4946050 - DNA, 25 bp, Homo sapien
tctcctagggtgattcgtgtgggca

SEQ ID NO: 4946051 - DNA, 25 bp, Homo sapien
tcacattcgtcaggaggaacccaga

SEQ ID NO: 4946052 - DNA, 25 bp, Homo sapien
gcactttccctcattgaagtctgta

SEQ ID NO: 4946053 - DNA, 25 bp, Homo sapien
tgtagacccaaaaggtgtcagtgtt

SEQ ID NO: 4946054 - DNA, 25 bp, Homo sapien
cagcagtgcggaaatatccagagag

SEQ ID NO: 4946055 - DNA, 25 bp, Homo sapien
caggtatttcaaccctagggaggtg

SEQ ID NO: 4946056 - DNA, 25 bp, Homo sapien
cgtgctcctgagacagcagtgcgga

SEQ ID NO: 4946057 - DNA, 25 bp, Homo sapien
gcgtggtcgctctccccaggtattt

SEQ ID NO: 4946058 - DNA, 25 bp, Homo sapien
ttcctgaaccgataaaaatagttca

SEQ ID NO: 4946059 - DNA, 25 bp, Homo sapien
aatagttcaaaggatcaccaattgt

SEQ ID NO: 4946060 - DNA, 25 bp, Homo sapien
ttcccacaagtttcctgaaccgata

SEQ ID NO: 4946061 - DNA, 25 bp, Homo sapien
tagttcaaaggatcaccaattgtca

SEQ ID NO: 4946062 - DNA, 25 bp, Homo sapien
gagtatagcattcttcgttggcagc

SEQ ID NO: 4946063 - DNA, 25 bp, Homo sapien
tctcagctcttgttgatgcgggaaa

SEQ ID NO: 4946064 - DNA, 25 bp, Homo sapien
tcattgggcttcatatacctagaca

SEQ ID NO: 4946065 - DNA, 25 bp, Homo sapien
tgctgatgttcttgtagggatacct

SEQ ID NO: 4946066 - DNA, 25 bp, Homo sapien
acagagaagaccacagtctgcaggc

SEQ ID NO: 4946067 - DNA, 25 bp, Homo sapien
taacagagaagaccacagtctgcag

SEQ ID NO: 4946068 - DNA, 25 bp, Homo sapien
tcagccatggtcttctttaacagag

SEQ ID NO: 4946069 - DNA, 25 bp, Homo sapien
tttaacagagaagaccacagtctgc

SEQ ID NO: 4946070 - DNA, 25 bp, Homo sapien
aatgtttcgcatgcaatttgtgctc

SEQ ID NO: 4946071 - DNA, 25 bp, Homo sapien
gtatgcaaaattacgttcaaaaatc

SEQ ID NO: 4946072 - DNA, 25 bp, Homo sapien
atgtttcgcatgcaatttgtgctcc

SEQ ID NO: 4946073 - DNA, 25 bp, Homo sapien
ttgtatgcaaaattacgttcaaaaa

SEQ ID NO: 4946074 - DNA, 25 bp, Homo sapien
tctaaaggcgacattggtccggcca

SEQ ID NO: 4946075 - DNA, 25 bp, Homo sapien
gatgtagtttttcctctaaaggcga

SEQ ID NO: 4946076 - DNA, 25 bp, Homo sapien
cagggactataaccctcaacccagg

SEQ ID NO: 4946077 - DNA, 25 bp, Homo sapien
aggacaccggtgcatgaggactgaa

SEQ ID NO: 4946078 - DNA, 25 bp, Homo sapien
ctttcaaagtcctcattcaggatct

SEQ ID NO: 4946079 - DNA, 25 bp, Homo sapien
gatgctttcaaagtcctcattcagg

SEQ ID NO: 4946080 - DNA, 25 bp, Homo sapien
cctgatgctttcaaagtcctcattc

SEQ ID NO: 4946081 - DNA, 25 bp, Homo sapien
tcacctgatgctttcaaagtcctca

SEQ ID NO: 4946082 - DNA, 25 bp, Homo sapien
gctctcgctacttgcttcctaatgg

SEQ ID NO: 4946083 - DNA, 25 bp, Homo sapien
taagatcctggtctataagtttgtg

SEQ ID NO: 4946084 - DNA, 25 bp, Homo sapien
tggctgtagctgcaaaagatgaggc

SEQ ID NO: 4946085 - DNA, 25 bp, Homo sapien
tggtcactagtgttgtttaagatcc

SEQ ID NO: 4946086 - DNA, 25 bp, Homo sapien
cagtggagtgacactgtctccatca

SEQ ID NO: 4946087 - DNA, 25 bp, Homo sapien
tccatcaagtagcacagaaacttca

SEQ ID NO: 4946088 - DNA, 25 bp, Homo sapien
gagtgacactgtctccatcaagtag

SEQ ID NO: 4946089 - DNA, 25 bp, Homo sapien
tcacagtggagtgacactgtctcca

SEQ ID NO: 4946090 - DNA, 25 bp, Homo sapien
ccacatcgtgccatggagaggtcat

SEQ ID NO: 4946091 - DNA, 25 bp, Homo sapien
gccacatcgtgccatggagaggtca

SEQ ID NO: 4946092 - DNA, 25 bp, Homo sapien
gtcagccacatcgtgccatggagag

SEQ ID NO: 4946093 - DNA, 25 bp, Homo sapien
cagccacatcgtgccatggagaggt

SEQ ID NO: 4946094 - DNA, 25 bp, Homo sapien
ttctagagcacaccgcacatctgac

SEQ ID NO: 4946095 - DNA, 25 bp, Homo sapien
tagagcacaccgcacatctgacagg

SEQ ID NO: 4946096 - DNA, 25 bp, Homo sapien
cagttctagagcacaccgcacatct

SEQ ID NO: 4946097 - DNA, 25 bp, Homo sapien
cacaccgcacatctgacagggctgt

SEQ ID NO: 4946098 - DNA, 25 bp, Homo sapien
cccagaaattccttcgctgcccagc

SEQ ID NO: 4946099 - DNA, 25 bp, Homo sapien
ccagaaattccttcgctgcccagcg

SEQ ID NO: 4946100 - DNA, 25 bp, Homo sapien
cagaaattccttcgctgcccagcgg

SEQ ID NO: 4946101 - DNA, 25 bp, Homo sapien
agaaattccttcgctgcccagcggc

SEQ ID NO: 4946102 - DNA, 25 bp, Homo sapien
ctacaaattagaagtggagggcact

SEQ ID NO: 4946103 - DNA, 25 bp, Homo sapien
gagtagctagtgatgactccaccac

SEQ ID NO: 4946104 - DNA, 25 bp, Homo sapien
taagacttcagtgcgtcacggttgc

SEQ ID NO: 4946105 - DNA, 25 bp, Homo sapien
tgagagtggagtgccgacacactgc

SEQ ID NO: 4946106 - DNA, 25 bp, Homo sapien
gcctttgaggatcttgtagccacgg

SEQ ID NO: 4946107 - DNA, 25 bp, Homo sapien
gatcttgtagccacgggcacttccc

SEQ ID NO: 4946108 - DNA, 25 bp, Homo sapien
ggcacttccccacaggtggctacag

SEQ ID NO: 4946109 - DNA, 25 bp, Homo sapien
ggtggctacagaatgtggtacacag

SEQ ID NO: 4946110 - DNA, 25 bp, Homo sapien
gaatggtccaggtgcagtccgcgtt

SEQ ID NO: 4946111 - DNA, 25 bp, Homo sapien
catatggatggagcttccgtgccac

SEQ ID NO: 4946112 - DNA, 25 bp, Homo sapien
tctcgtactctgaagggaagtgcgg

SEQ ID NO: 4946113 - DNA, 25 bp, Homo sapien
tcagtgaagaccagcgcaatggtgt

SEQ ID NO: 4946114 - DNA, 25 bp, Homo sapien
caaaattataccgaagtgagaggaa

SEQ ID NO: 4946115 - DNA, 25 bp, Homo sapien
ttcccaagttgcaagttccaatatt

SEQ ID NO: 4946116 - DNA, 25 bp, Homo sapien
tcccaagttgcaagttccaatattt

SEQ ID NO: 4946117 - DNA, 25 bp, Homo sapien
ctctccaccaaaattataccgaagt

SEQ ID NO: 4946118 - DNA, 25 bp, Homo sapien
agtgagatcaattaattgagaacag

SEQ ID NO: 4946119 - DNA, 25 bp, Homo sapien
tcaggatggcgtggccttccaagat

SEQ ID NO: 4946120 - DNA, 25 bp, Homo sapien
tgggaagtcccacgatgcaccattt

SEQ ID NO: 4946121 - DNA, 25 bp, Homo sapien
cagggaggcagctgtaccggatttt

SEQ ID NO: 4946122 - DNA, 25 bp, Homo sapien
tttcctgggctgacgatgcaggtca

SEQ ID NO: 4946123 - DNA, 25 bp, Homo sapien
tgatatgattctctatctaaatcaa

SEQ ID NO: 4946124 - DNA, 25 bp, Homo sapien
cttatagaacatgattttgaactga

SEQ ID NO: 4946125 - DNA, 25 bp, Homo sapien
tttccttgatatgattctctatcta

SEQ ID NO: 4946126 - DNA, 25 bp, Homo sapien
tctaaatcaattgacttgaaactcc

SEQ ID NO: 4946127 - DNA, 25 bp, Homo sapien
aatgaatatgagtctccccaagaag

SEQ ID NO: 4946128 - DNA, 25 bp, Homo sapien
caagaaggtgtctgaaaagaaatat

SEQ ID NO: 4946129 - DNA, 25 bp, Homo sapien
tttactggctctctgaatgcgagcc

SEQ ID NO: 4946130 - DNA, 25 bp, Homo sapien
tactggctctctgaatgcgagccaa

SEQ ID NO: 4946131 - DNA, 25 bp, Homo sapien
tctctttactggctctctgaatgcg

SEQ ID NO: 4946132 - DNA, 25 bp, Homo sapien
ttcttctctttactggctctctgaa

SEQ ID NO: 4946133 - DNA, 25 bp, Homo sapien
gaaggataattaaatccgggtctca

SEQ ID NO: 4946134 - DNA, 25 bp, Homo sapien
ttctctcgtgcaataagaagagaca

SEQ ID NO: 4946135 - DNA, 25 bp, Homo sapien
tcattttcttctctcgtgcaataag

SEQ ID NO: 4946136 - DNA, 25 bp, Homo sapien
aggataattaaatccgggtctcatt

SEQ ID NO: 4946137 - DNA, 25 bp, Homo sapien
gaaccatcctcgatgagtagcaccc

SEQ ID NO: 4946138 - DNA, 25 bp, Homo sapien
tggccacatagcaccctagccgtgt

SEQ ID NO: 4946139 - DNA, 25 bp, Homo sapien
tgagggtgtaccaccctggatgtga

SEQ ID NO: 4946140 - DNA, 25 bp, Homo sapien
cctagccgtgtagcaccctgagggt

SEQ ID NO: 4946141 - DNA, 25 bp, Homo sapien
gggtaccgggtgctgaggtactcat

SEQ ID NO: 4946142 - DNA, 25 bp, Homo sapien
cagcggccacgcagtcgtgggctgg

SEQ ID NO: 4946143 - DNA, 25 bp, Homo sapien
ctgcagcggccacgcagtcgtgggc

SEQ ID NO: 4946144 - DNA, 25 bp, Homo sapien
cagtcgtgggctggggtaccgggtg

SEQ ID NO: 4946145 - DNA, 25 bp, Homo sapien
gagttcaaccctcttggtggtgtag

SEQ ID NO: 4946146 - DNA, 25 bp, Homo sapien
catccaattatcaaacatgcctgag

SEQ ID NO: 4946147 - DNA, 25 bp, Homo sapien
gagatgtccctcttgcggagttcaa

SEQ ID NO: 4946148 - DNA, 25 bp, Homo sapien
tctaattgtggaggtgtatttagct

SEQ ID NO: 4946149 - DNA, 25 bp, Homo sapien
actgctaacttaagataggctactc

SEQ ID NO: 4946150 - DNA, 25 bp, Homo sapien
taacaaggccttatgcatcgtgctc

SEQ ID NO: 4946151 - DNA, 25 bp, Homo sapien
ataaggattattctctaacaaggcc

SEQ ID NO: 4946152 - DNA, 25 bp, Homo sapien
agtatacaccatcacgcaaggccag

SEQ ID NO: 4946153 - DNA, 25 bp, Homo sapien
ttcctgcattgcctggttgtatgtg

SEQ ID NO: 4946154 - DNA, 25 bp, Homo sapien
tcctgcattgcctggttgtatgtgg

SEQ ID NO: 4946155 - DNA, 25 bp, Homo sapien
aagaggctcctctacagcgttgaaa

SEQ ID NO: 4946156 - DNA, 25 bp, Homo sapien
cctctacagcgttgaaaagtgtcct

SEQ ID NO: 4946157 - DNA, 25 bp, Homo sapien
agaggctcctctacagcgttgaaaa

SEQ ID NO: 4946158 - DNA, 25 bp, Homo sapien
gctcctctacagcgttgaaaagtgt

SEQ ID NO: 4946159 - DNA, 25 bp, Homo sapien
caggcttcagcccaaggttcggtgc

SEQ ID NO: 4946160 - DNA, 25 bp, Homo sapien
ttcagcccaaggttcggtgcgtcct

SEQ ID NO: 4946161 - DNA, 25 bp, Homo sapien
ggttcggtgcgtcctgaatacctga

SEQ ID NO: 4946162 - DNA, 25 bp, Homo sapien
tgagcttcccgggacaacagagcag

SEQ ID NO: 4946163 - DNA, 25 bp, Homo sapien
gagtgatctataaacttccgagcag

SEQ ID NO: 4946164 - DNA, 25 bp, Homo sapien
tgagaggaatccagcattgggtcag

SEQ ID NO: 4946165 - DNA, 25 bp, Homo sapien
cacccggagatctatgagaggaatc

SEQ ID NO: 4946166 - DNA, 25 bp, Homo sapien
cagcgtctgtgcctgatggacaccc

SEQ ID NO: 4946167 - DNA, 25 bp, Homo sapien
aattttgtaccctgcactaactagg

SEQ ID NO: 4946168 - DNA, 25 bp, Homo sapien
tagcaacattgcagacacttgaggg

SEQ ID NO: 4946169 - DNA, 25 bp, Homo sapien
gattggccccattgtttgtaagact

SEQ ID NO: 4946170 - DNA, 25 bp, Homo sapien
tgaccacgctgtttcttgttaccgc

SEQ ID NO: 4946171 - DNA, 25 bp, Homo sapien
taattcgcgtagtgcagtcggcaca

SEQ ID NO: 4946172 - DNA, 25 bp, Homo sapien
caaagcaggtggattcattctgata

SEQ ID NO: 4946173 - DNA, 25 bp, Homo sapien
tgcagtcggcacagtgccatagcct

SEQ ID NO: 4946174 - DNA, 25 bp, Homo sapien
tcatccactcgaggcagtaattcgc

SEQ ID NO: 4946175 - DNA, 25 bp, Homo sapien
tgacttaatgaaaaactcgattgtc

SEQ ID NO: 4946176 - DNA, 25 bp, Homo sapien
aaaactcgattgtctggagttctgc

SEQ ID NO: 4946177 - DNA, 25 bp, Homo sapien
ggagttctgctttaaacttctctaa

SEQ ID NO: 4946178 - DNA, 25 bp, Homo sapien
aagaatcatgtatctcgggaaagaa

SEQ ID NO: 4946179 - DNA, 25 bp, Homo sapien
ctcatgtttcatgtaagcaccagtc

SEQ ID NO: 4946180 - DNA, 25 bp, Homo sapien
ccgtgaagtgtgaatgctgggcctc

SEQ ID NO: 4946181 - DNA, 25 bp, Homo sapien
caacggagccctccagatggaaggt

SEQ ID NO: 4946182 - DNA, 25 bp, Homo sapien
cacagccctgtgttctttcgtaaat

SEQ ID NO: 4946183 - DNA, 25 bp, Homo sapien
cgaacgcagctcaggtaagacacca

SEQ ID NO: 4946184 - DNA, 25 bp, Homo sapien
tcaggtaagacaccatggggctgag

SEQ ID NO: 4946185 - DNA, 25 bp, Homo sapien
acgcagctcaggtaagacaccatgg

SEQ ID NO: 4946186 - DNA, 25 bp, Homo sapien
caggtaagacaccatggggctgagt

SEQ ID NO: 4946187 - DNA, 25 bp, Homo sapien
gaggattttgccagactaagagtcg

SEQ ID NO: 4946188 - DNA, 25 bp, Homo sapien
tgaggattttgccagactaagagtc

SEQ ID NO: 4946189 - DNA, 25 bp, Homo sapien
ctggttgagctgacctgaggatttt

SEQ ID NO: 4946190 - DNA, 25 bp, Homo sapien
cgagtcatcattaagggctggttga

SEQ ID NO: 4946191 - DNA, 25 bp, Homo sapien
cagctgccgccaaggtaagcaggaa

SEQ ID NO: 4946192 - DNA, 25 bp, Homo sapien
gtaagcaggaaagggcgtcatcgcc

SEQ ID NO: 4946193 - DNA, 25 bp, Homo sapien
catccatcaagtaaattcagctgcc

SEQ ID NO: 4946194 - DNA, 25 bp, Homo sapien
gatacgtgacgaataggctgactgc

SEQ ID NO: 4946195 - DNA, 25 bp, Homo sapien
acgaagtgatctatgggacccatcc

SEQ ID NO: 4946196 - DNA, 25 bp, Homo sapien
catccatagagctggcgattgcaga

SEQ ID NO: 4946197 - DNA, 25 bp, Homo sapien
gaaatgggccgaggctcctgaagca

SEQ ID NO: 4946198 - DNA, 25 bp, Homo sapien
tggcgattgcagacacaagtttaga

SEQ ID NO: 4946199 - DNA, 25 bp, Homo sapien
attggcacactgatcggaattctta

SEQ ID NO: 4946200 - DNA, 25 bp, Homo sapien
tggcacactgatcggaattcttaca

SEQ ID NO: 4946201 - DNA, 25 bp, Homo sapien
gtaattggcacactgatcggaattc

SEQ ID NO: 4946202 - DNA, 25 bp, Homo sapien
gcacactgatcggaattcttacaga

SEQ ID NO: 4946203 - DNA, 25 bp, Homo sapien
aactcatcaagctcccttcgccttt

SEQ ID NO: 4946204 - DNA, 25 bp, Homo sapien
gaagtagacgtcctgccctttggtc

SEQ ID NO: 4946205 - DNA, 25 bp, Homo sapien
ttcgcctttccatatttgcaccaac

SEQ ID NO: 4946206 - DNA, 25 bp, Homo sapien
ttgcaccaactttgcaaatcaattg

SEQ ID NO: 4946207 - DNA, 25 bp, Homo sapien
tgattgctttgacccttatcacctt

SEQ ID NO: 4946208 - DNA, 25 bp, Homo sapien
gggctggcagccttttcactgggaa

SEQ ID NO: 4946209 - DNA, 25 bp, Homo sapien
ggctggcagccttttcactgggaaa

SEQ ID NO: 4946210 - DNA, 25 bp, Homo sapien
tatcaccttgtacaagttaaacttc

SEQ ID NO: 4946211 - DNA, 25 bp, Homo sapien
taaaaaggaaactcctgcattctgg

SEQ ID NO: 4946212 - DNA, 25 bp, Homo sapien
ttgctaaaaaggaaactcctgcatt

SEQ ID NO: 4946213 - DNA, 25 bp, Homo sapien
tgctaaaaaggaaactcctgcattc

SEQ ID NO: 4946214 - DNA, 25 bp, Homo sapien
gctaaaaaggaaactcctgcattct

SEQ ID NO: 4946215 - DNA, 25 bp, Homo sapien
cagtgcactgaacatgacaaatttc

SEQ ID NO: 4946216 - DNA, 25 bp, Homo sapien
gtcatcaccattgcttgaaaacaaa

SEQ ID NO: 4946217 - DNA, 25 bp, Homo sapien
tgtatgtatatgttctgacctcctt

SEQ ID NO: 4946218 - DNA, 25 bp, Homo sapien
tcattgtaacaagatcccctaggga

SEQ ID NO: 4946219 - DNA, 25 bp, Homo sapien
gtagatagcagtaagggtttctcac

SEQ ID NO: 4946220 - DNA, 25 bp, Homo sapien
tcctcggcgttctagggtagatagc

SEQ ID NO: 4946221 - DNA, 25 bp, Homo sapien
tagggtagatagcagtaagggtttc

SEQ ID NO: 4946222 - DNA, 25 bp, Homo sapien
tggaagactggttcctcggcgttct

SEQ ID NO: 4946223 - DNA, 25 bp, Homo sapien
tattcaccgaggtggtcatccccag

SEQ ID NO: 4946224 - DNA, 25 bp, Homo sapien
cgaggtggtcatccccagaataagg

SEQ ID NO: 4946225 - DNA, 25 bp, Homo sapien
acatgacagccatattcaccgaggt

SEQ ID NO: 4946226 - DNA, 25 bp, Homo sapien
cagccatattcaccgaggtggtcat

SEQ ID NO: 4946227 - DNA, 25 bp, Homo sapien
atgctttattaacaaaccacgattc

SEQ ID NO: 4946228 - DNA, 25 bp, Homo sapien
tactggttttatgctttattaacaa

SEQ ID NO: 4946229 - DNA, 25 bp, Homo sapien
ttaacaaaccacgattcacactctg

SEQ ID NO: 4946230 - DNA, 25 bp, Homo sapien
cccagtctttatactggttttatgc

SEQ ID NO: 4946231 - DNA, 25 bp, Homo sapien
ctctttcgtgcctcatctctgaatc

SEQ ID NO: 4946232 - DNA, 25 bp, Homo sapien
tgctgccctgtataaatgcgaacat

SEQ ID NO: 4946233 - DNA, 25 bp, Homo sapien
tgccctgtataaatgcgaacatctt

SEQ ID NO: 4946234 - DNA, 25 bp, Homo sapien
tcactgctgccctgtataaatgcga

SEQ ID NO: 4946235 - DNA, 25 bp, Homo sapien
gtataaatgcgaacatctttgccat

SEQ ID NO: 4946236 - DNA, 25 bp, Homo sapien
aggccgactgtagccttaaatgcca

SEQ ID NO: 4946237 - DNA, 25 bp, Homo sapien
tatacaatccggtttcatcatacag

SEQ ID NO: 4946238 - DNA, 25 bp, Homo sapien
tcatcatacagcaggccgactgtag

SEQ ID NO: 4946239 - DNA, 25 bp, Homo sapien
ttcaaactgcttgtatacaatccgg

SEQ ID NO: 4946240 - DNA, 25 bp, Homo sapien
cacccgtgacagaaggtgaacgaca

SEQ ID NO: 4946241 - DNA, 25 bp, Homo sapien
tcagagacacccgtgacagaaggtg

SEQ ID NO: 4946242 - DNA, 25 bp, Homo sapien
ggtgtagacatcagagacacccgtg

SEQ ID NO: 4946243 - DNA, 25 bp, Homo sapien
cgtgacagaaggtgaacgacaatgg

SEQ ID NO: 4946244 - DNA, 25 bp, Homo sapien
agtgcacacaaaagagggttcttct

SEQ ID NO: 4946245 - DNA, 25 bp, Homo sapien
gaataatttcaaaggactgataaac

SEQ ID NO: 4946246 - DNA, 25 bp, Homo sapien
aagcagatgaagtgcacacaaaaga

SEQ ID NO: 4946247 - DNA, 25 bp, Homo sapien
cagcaaaccaagcttcttttctgaa

SEQ ID NO: 4946248 - DNA, 25 bp, Homo sapien
tatgcttctcattagctttatggtg

SEQ ID NO: 4946249 - DNA, 25 bp, Homo sapien
tgccacgggtaggtagccttgacct

SEQ ID NO: 4946250 - DNA, 25 bp, Homo sapien
gattccaagatctagtccgctgcct

SEQ ID NO: 4946251 - DNA, 25 bp, Homo sapien
tccgctgcctgccacgggtaggtag

SEQ ID NO: 4946252 - DNA, 25 bp, Homo sapien
gggagcttcgactaggtccataagg

SEQ ID NO: 4946253 - DNA, 25 bp, Homo sapien
tcaccaggggagcttcgactaggtc

SEQ ID NO: 4946254 - DNA, 25 bp, Homo sapien
ttttcaccaggggagcttcgactag

SEQ ID NO: 4946255 - DNA, 25 bp, Homo sapien
agcttcgactaggtccataaggaaa

SEQ ID NO: 4946256 - DNA, 25 bp, Homo sapien
tgatggtccttattgttacaagcct

SEQ ID NO: 4946257 - DNA, 25 bp, Homo sapien
caaatcttgatggtccttattgtta

SEQ ID NO: 4946258 - DNA, 25 bp, Homo sapien
gctacgtcagattcatcccaaactt

SEQ ID NO: 4946259 - DNA, 25 bp, Homo sapien
gccaccactggctgctacgtcagat

SEQ ID NO: 4946260 - DNA, 25 bp, Homo sapien
ctagagaattgcgagttgactcatg

SEQ ID NO: 4946261 - DNA, 25 bp, Homo sapien
gagaattgcgagttgactcatgaaa

SEQ ID NO: 4946262 - DNA, 25 bp, Homo sapien
atgtcaaggttgtccacttctcctg

SEQ ID NO: 4946263 - DNA, 25 bp, Homo sapien
catcactgatgtcaaggttgtccac

SEQ ID NO: 4946264 - DNA, 25 bp, Homo sapien
ggtagttcacatacacctgttagtg

SEQ ID NO: 4946265 - DNA, 25 bp, Homo sapien
cacctgttagtgagggcttctttcc

SEQ ID NO: 4946266 - DNA, 25 bp, Homo sapien
tcctgcgaaggtagttcacatacac

SEQ ID NO: 4946267 - DNA, 25 bp, Homo sapien
tctggtcctgcgaaggtagttcaca

SEQ ID NO: 4946268 - DNA, 25 bp, Homo sapien
agggcaccttctccggccgtgaatg

SEQ ID NO: 4946269 - DNA, 25 bp, Homo sapien
gaatgactggaaccgagttcttctc

SEQ ID NO: 4946270 - DNA, 25 bp, Homo sapien
tgaccgacttgacaatggcgcacat

SEQ ID NO: 4946271 - DNA, 25 bp, Homo sapien
gagaggtacagtgagggcaccttct

SEQ ID NO: 4946272 - DNA, 25 bp, Homo sapien
tatggtggaaaatgcccgtctttaa

SEQ ID NO: 4946273 - DNA, 25 bp, Homo sapien
atgtgcagagagtttcctggcaacc

SEQ ID NO: 4946274 - DNA, 25 bp, Homo sapien
ggcaaatgccttcaggatacggcca

SEQ ID NO: 4946275 - DNA, 25 bp, Homo sapien
cccactgtttctgagagcagccaag

SEQ ID NO: 4946276 - DNA, 25 bp, Homo sapien
gattgttctcctggatcattgcttc

SEQ ID NO: 4946277 - DNA, 25 bp, Homo sapien
tggcctcgtcggtttcagattgttc

SEQ ID NO: 4946278 - DNA, 25 bp, Homo sapien
aagtgggatggcctcgtcggtttca

SEQ ID NO: 4946279 - DNA, 25 bp, Homo sapien
tcagattgttctcctggatcattgc

SEQ ID NO: 4946280 - DNA, 25 bp, Homo sapien
ttgcattgttaggtccataaacatt

SEQ ID NO: 4946281 - DNA, 25 bp, Homo sapien
tgcattgttaggtccataaacattc

SEQ ID NO: 4946282 - DNA, 25 bp, Homo sapien
gattcgggagtaatagctgctccat

SEQ ID NO: 4946283 - DNA, 25 bp, Homo sapien
gccttcagtaagaattggtggaata

SEQ ID NO: 4946284 - DNA, 25 bp, Homo sapien
catcgtctgtatatcagcgccttca

SEQ ID NO: 4946285 - DNA, 25 bp, Homo sapien
attaggattcgggagtaatagctgc

SEQ ID NO: 4946286 - DNA, 25 bp, Homo sapien
atgaacctccgctgggagacccaga

SEQ ID NO: 4946287 - DNA, 25 bp, Homo sapien
tttcccgtgctggacagctccaggg

SEQ ID NO: 4946288 - DNA, 25 bp, Homo sapien
gatacaaccttgtctacacgtctgt

SEQ ID NO: 4946289 - DNA, 25 bp, Homo sapien
tgggctagagagtccgatacaacct

SEQ ID NO: 4946290 - DNA, 25 bp, Homo sapien
acacacacacccaatggaataccga

SEQ ID NO: 4946291 - DNA, 25 bp, Homo sapien
gatacaacaactttcaggactaggg

SEQ ID NO: 4946292 - DNA, 25 bp, Homo sapien
ggaataccgatcagccataaaatgg

SEQ ID NO: 4946293 - DNA, 25 bp, Homo sapien
ttcgcaactgcaaccagcctaaatg

SEQ ID NO: 4946294 - DNA, 25 bp, Homo sapien
ggtcgtggcctgagcccactctgtg

SEQ ID NO: 4946295 - DNA, 25 bp, Homo sapien
catggcccacgtagacctgctcttt

SEQ ID NO: 4946296 - DNA, 25 bp, Homo sapien
gtcgtggcctgagcccactctgtga

SEQ ID NO: 4946297 - DNA, 25 bp, Homo sapien
tgtgatggcctctacatggcccacg

SEQ ID NO: 4946298 - DNA, 25 bp, Homo sapien
tgtattagatcatttggacagtgaa

SEQ ID NO: 4946299 - DNA, 25 bp, Homo sapien
gtagcatgtattagatcatttggac

SEQ ID NO: 4946300 - DNA, 25 bp, Homo sapien
tagatcatttggacagtgaatgcat

SEQ ID NO: 4946301 - DNA, 25 bp, Homo sapien
ttggacagtgaatgcatgtgcaaaa

SEQ ID NO: 4946302 - DNA, 25 bp, Homo sapien
gaagtctgtcgtgaaccacagagtg

SEQ ID NO: 4946303 - DNA, 25 bp, Homo sapien
tgtactcactatagaggagggcagc

SEQ ID NO: 4946304 - DNA, 25 bp, Homo sapien
tgggcactcacagcgaagtctgtcg

SEQ ID NO: 4946305 - DNA, 25 bp, Homo sapien
tataatgctttgaaaccttgggcac

SEQ ID NO: 4946306 - DNA, 25 bp, Homo sapien
cttctgtgagtatcctttccatgag

SEQ ID NO: 4946307 - DNA, 25 bp, Homo sapien
gaagacatgaaagtacttctgtgag

SEQ ID NO: 4946308 - DNA, 25 bp, Homo sapien
agtacttctgtgagtatcctttcca

SEQ ID NO: 4946309 - DNA, 25 bp, Homo sapien
ttccatgagggcccttgcgatacat

SEQ ID NO: 4946310 - DNA, 25 bp, Homo sapien
gaagccggctctcaggcttggacat

SEQ ID NO: 4946311 - DNA, 25 bp, Homo sapien
gagaagccggctctcaggcttggac

SEQ ID NO: 4946312 - DNA, 25 bp, Homo sapien
tgagaagccggctctcaggcttgga

SEQ ID NO: 4946313 - DNA, 25 bp, Homo sapien
ctgagaagccggctctcaggcttgg

SEQ ID NO: 4946314 - DNA, 25 bp, Homo sapien
cccaagaagaggagacgaggctgtt

SEQ ID NO: 4946315 - DNA, 25 bp, Homo sapien
gacctgggcctttcagctggtcaga

SEQ ID NO: 4946316 - DNA, 25 bp, Homo sapien
cgaaaggatagcaacaatgtcagtg

SEQ ID NO: 4946317 - DNA, 25 bp, Homo sapien
aatgcagaagtgttctcccgctgga

SEQ ID NO: 4946318 - DNA, 25 bp, Homo sapien
tgattttgttgttacattcgttaca

SEQ ID NO: 4946319 - DNA, 25 bp, Homo sapien
tgttgttacattcgttacatacgtg

SEQ ID NO: 4946320 - DNA, 25 bp, Homo sapien
cattcgttacatacgtgagttttga

SEQ ID NO: 4946321 - DNA, 25 bp, Homo sapien
tacgtgagttttgaactgaaaccca

SEQ ID NO: 4946322 - DNA, 25 bp, Homo sapien
cggtgatgcgaagtctggctgaatt

SEQ ID NO: 4946323 - DNA, 25 bp, Homo sapien
caagaacggtgatgcgaagtctggc

SEQ ID NO: 4946324 - DNA, 25 bp, Homo sapien
cagcaagaacggtgatgcgaagtct

SEQ ID NO: 4946325 - DNA, 25 bp, Homo sapien
aacggtgatgcgaagtctggctgaa

SEQ ID NO: 4946326 - DNA, 25 bp, Homo sapien
gaacacagccgacagaataacttgg

SEQ ID NO: 4946327 - DNA, 25 bp, Homo sapien
tgcaggtcccgcagtctacagacca

SEQ ID NO: 4946328 - DNA, 25 bp, Homo sapien
tgtgaatcgacagcacagtgctgag

SEQ ID NO: 4946329 - DNA, 25 bp, Homo sapien
catgactggcttatatcgcttgaac

SEQ ID NO: 4946330 - DNA, 25 bp, Homo sapien
tttgaatttgtagagtgcttgggac

SEQ ID NO: 4946331 - DNA, 25 bp, Homo sapien
aatttgtagagtgcttgggacaccg

SEQ ID NO: 4946332 - DNA, 25 bp, Homo sapien
ggtttgcggaggaagaagtgattgg

SEQ ID NO: 4946333 - DNA, 25 bp, Homo sapien
gaagaagtgattggggcttcccgag

SEQ ID NO: 4946334 - DNA, 25 bp, Homo sapien
gcagcaccgtagtgaacgtctccat

SEQ ID NO: 4946335 - DNA, 25 bp, Homo sapien
cagcttgatgcagcaccgtagtgaa

SEQ ID NO: 4946336 - DNA, 25 bp, Homo sapien
cagtgacttccgaggcttggcacct

SEQ ID NO: 4946337 - DNA, 25 bp, Homo sapien
ttgcagacagctttgcagtgacttc

SEQ ID NO: 4946338 - DNA, 25 bp, Homo sapien
tcaccagagggaataggaagtccaa

SEQ ID NO: 4946339 - DNA, 25 bp, Homo sapien
gtccctgtgcttgcaaaaagtgtac

SEQ ID NO: 4946340 - DNA, 25 bp, Homo sapien
ttggtgaagatgacggtccctgtgc

SEQ ID NO: 4946341 - DNA, 25 bp, Homo sapien
ggtgctaacccagacactaggatgt

SEQ ID NO: 4946342 - DNA, 25 bp, Homo sapien
tgtccacgtgaaccaaatcaaggtg

SEQ ID NO: 4946343 - DNA, 25 bp, Homo sapien
aatcaaggtgcaaaacggctggtgt

SEQ ID NO: 4946344 - DNA, 25 bp, Homo sapien
tcaaggtgcaaaacggctggtgtca

SEQ ID NO: 4946345 - DNA, 25 bp, Homo sapien
ccacgtgaaccaaatcaaggtgcaa

SEQ ID NO: 4946346 - DNA, 25 bp, Homo sapien
gggagggacacgcagttatctttct

SEQ ID NO: 4946347 - DNA, 25 bp, Homo sapien
acaagtacagtaaacgtcccgcagc

SEQ ID NO: 4946348 - DNA, 25 bp, Homo sapien
gaacgatgattgttggctgactcaa

SEQ ID NO: 4946349 - DNA, 25 bp, Homo sapien
tgtgtgtgagataccctgcttatac

SEQ ID NO: 4946350 - DNA, 25 bp, Homo sapien
gcttcactaggttctcacaaggaat

SEQ ID NO: 4946351 - DNA, 25 bp, Homo sapien
gggtctacacattatgagttttact

SEQ ID NO: 4946352 - DNA, 25 bp, Homo sapien
caaggaatattggagaagagcctcc

SEQ ID NO: 4946353 - DNA, 25 bp, Homo sapien
ctccaagaggactcaatcatcaggg

SEQ ID NO: 4946354 - DNA, 25 bp, Homo sapien
cagagtgaggtaaaagcgcaaagct

SEQ ID NO: 4946355 - DNA, 25 bp, Homo sapien
gcagcagagtgaggtaaaagcgcaa

SEQ ID NO: 4946356 - DNA, 25 bp, Homo sapien
agtgaggtaaaagcgcaaagcttcc

SEQ ID NO: 4946357 - DNA, 25 bp, Homo sapien
aaaacagcagcatccgacgcccagc

SEQ ID NO: 4946358 - DNA, 25 bp, Homo sapien
agcagcgtccgtccctgttgaggca

SEQ ID NO: 4946359 - DNA, 25 bp, Homo sapien
cctgttgaggcagtccagtattttc

SEQ ID NO: 4946360 - DNA, 25 bp, Homo sapien
gagtgctagtcattggccagggaaa

SEQ ID NO: 4946361 - DNA, 25 bp, Homo sapien
agggaaacccatgagccagcagcgt

SEQ ID NO: 4946362 - DNA, 25 bp, Homo sapien
taaacagcaaagatgctgcgtagca

SEQ ID NO: 4946363 - DNA, 25 bp, Homo sapien
cagcaaagatgctgcgtagcagctc

SEQ ID NO: 4946364 - DNA, 25 bp, Homo sapien
aagatgctgcgtagcagctccatca

SEQ ID NO: 4946365 - DNA, 25 bp, Homo sapien
caaagatgctgcgtagcagctccat

SEQ ID NO: 4946366 - DNA, 25 bp, Homo sapien
cacgggaaatacacaggcatcatta

SEQ ID NO: 4946367 - DNA, 25 bp, Homo sapien
cggtgttccacacgggaaatacaca

SEQ ID NO: 4946368 - DNA, 25 bp, Homo sapien
tcattacgcgagcagagagaggaca

SEQ ID NO: 4946369 - DNA, 25 bp, Homo sapien
acaggcatcattacgcgagcagaga

SEQ ID NO: 4946370 - DNA, 25 bp, Homo sapien
aggcacaggctctcccgttcagtat

SEQ ID NO: 4946371 - DNA, 25 bp, Homo sapien
ccttataaatgagttgaagacaatg

SEQ ID NO: 4946372 - DNA, 25 bp, Homo sapien
tcagtattcctgtgccggctatacc

SEQ ID NO: 4946373 - DNA, 25 bp, Homo sapien
cgcactgatactcctcaccacacat

SEQ ID NO: 4946374 - DNA, 25 bp, Homo sapien
tgtgggatgcgtccagcatttactt

SEQ ID NO: 4946375 - DNA, 25 bp, Homo sapien
gtgtcttgtttgtttacgtagctta

SEQ ID NO: 4946376 - DNA, 25 bp, Homo sapien
tgtttacgtagcttaattcacccat

SEQ ID NO: 4946377 - DNA, 25 bp, Homo sapien
tgtttgtttacgtagcttaattcac

SEQ ID NO: 4946378 - DNA, 25 bp, Homo sapien
gaatacattaatgggagacacttaa

SEQ ID NO: 4946379 - DNA, 25 bp, Homo sapien
gtgtgtctcaatttatgtgtccatg

SEQ ID NO: 4946380 - DNA, 25 bp, Homo sapien
gctatacgctctcttccagatatgt

SEQ ID NO: 4946381 - DNA, 25 bp, Homo sapien
caatgaaagcaacactcatagtttc

SEQ ID NO: 4946382 - DNA, 25 bp, Homo sapien
agagatcctccatgaatagctgtgc

SEQ ID NO: 4946383 - DNA, 25 bp, Homo sapien
ccatgaatagctgtgcggttcccca

SEQ ID NO: 4946384 - DNA, 25 bp, Homo sapien
gatcctccatgaatagctgtgcggt

SEQ ID NO: 4946385 - DNA, 25 bp, Homo sapien
ctccatgaatagctgtgcggttccc

SEQ ID NO: 4946386 - DNA, 25 bp, Homo sapien
tgtgatacaacaatgctctcaggcc

SEQ ID NO: 4946387 - DNA, 25 bp, Homo sapien
gaactcatcgtacacatttctgtga

SEQ ID NO: 4946388 - DNA, 25 bp, Homo sapien
tatgggacataatttgagcttctca

SEQ ID NO: 4946389 - DNA, 25 bp, Homo sapien
gtgattaaaacacacctggttgctg

SEQ ID NO: 4946390 - DNA, 25 bp, Homo sapien
gatgcaaggaaaactccacattggt

SEQ ID NO: 4946391 - DNA, 25 bp, Homo sapien
tgatggatgaccacagaataccaaa

SEQ ID NO: 4946392 - DNA, 25 bp, Homo sapien
taactatgctaggaatctagacacc

SEQ ID NO: 4946393 - DNA, 25 bp, Homo sapien
taccaaactccagctacaggtgtgg

SEQ ID NO: 4946394 - DNA, 25 bp, Homo sapien
tcttgtgggtctatgccagatacga

SEQ ID NO: 4946395 - DNA, 25 bp, Homo sapien
cagatacgagtaaggcttcctgtgg

SEQ ID NO: 4946396 - DNA, 25 bp, Homo sapien
tactttgactctgacggtgttcggg

SEQ ID NO: 4946397 - DNA, 25 bp, Homo sapien
gcatgtcagattctttgccagagat

SEQ ID NO: 4946398 - DNA, 25 bp, Homo sapien
catgatatctgtggctggccaccaa

SEQ ID NO: 4946399 - DNA, 25 bp, Homo sapien
ggctggccaccaaagtcctatctaa

SEQ ID NO: 4946400 - DNA, 25 bp, Homo sapien
ctgtccagaacattaaagcaacaac

SEQ ID NO: 4946401 - DNA, 25 bp, Homo sapien
gcaacaacccccatgatatctgtgg

SEQ ID NO: 4946402 - DNA, 25 bp, Homo sapien
ggaatgttcccgagatcaatgctgg

SEQ ID NO: 4946403 - DNA, 25 bp, Homo sapien
gcaggtgaaacttgatggtggacaa

SEQ ID NO: 4946404 - DNA, 25 bp, Homo sapien
tctaattgccgtgtcaaattccagc

SEQ ID NO: 4946405 - DNA, 25 bp, Homo sapien
gacaagggttcgtgttctaattgcc

SEQ ID NO: 4946406 - DNA, 25 bp, Homo sapien
aacatcatccgatgccaagcccttt

SEQ ID NO: 4946407 - DNA, 25 bp, Homo sapien
gtgattacaacatcatccgatgcca

SEQ ID NO: 4946408 - DNA, 25 bp, Homo sapien
acatcatccgatgccaagcccttta

SEQ ID NO: 4946409 - DNA, 25 bp, Homo sapien
ttacaacatcatccgatgccaagcc

SEQ ID NO: 4946410 - DNA, 25 bp, Homo sapien
ctgaagacaacagcggccaatggca

SEQ ID NO: 4946411 - DNA, 25 bp, Homo sapien
tgaatgtgtgcctggacctgagcca

SEQ ID NO: 4946412 - DNA, 25 bp, Homo sapien
gagatgaccacaacaggcaaattgt

SEQ ID NO: 4946413 - DNA, 25 bp, Homo sapien
tgaggacaagggtaaggccactcag

SEQ ID NO: 4946414 - DNA, 25 bp, Homo sapien
gctttctccacaccgaggaactgga

SEQ ID NO: 4946415 - DNA, 25 bp, Homo sapien
ctatttcaacaaactacttctgtgg

SEQ ID NO: 4946416 - DNA, 25 bp, Homo sapien
tatttcaacaaactacttctgtgga

SEQ ID NO: 4946417 - DNA, 25 bp, Homo sapien
tttcaacaaactacttctgtggatt

SEQ ID NO: 4946418 - DNA, 25 bp, Homo sapien
tcaacaaactacttctgtggatttg

SEQ ID NO: 4946419 - DNA, 25 bp, Homo sapien
tatgatcctaatgtaattgagaccc

SEQ ID NO: 4946420 - DNA, 25 bp, Homo sapien
ggaccttgtagcaactatggagaca

SEQ ID NO: 4946421 - DNA, 25 bp, Homo sapien
catggtgtgtaacctaactatccac

SEQ ID NO: 4946422 - DNA, 25 bp, Homo sapien
cagaatttaggcaatgctaggtctc

SEQ ID NO: 4946423 - DNA, 25 bp, Homo sapien
gagccccattgcgaggtaacttcag

SEQ ID NO: 4946424 - DNA, 25 bp, Homo sapien
ggtcaggtcaaggagtaacccacag

SEQ ID NO: 4946425 - DNA, 25 bp, Homo sapien
gcttccaattgcagtaggtggccag

SEQ ID NO: 4946426 - DNA, 25 bp, Homo sapien
catactattcagaccggtagaggga

SEQ ID NO: 4946427 - DNA, 25 bp, Homo sapien
caggaaaggatcgtgcattggtcta

SEQ ID NO: 4946428 - DNA, 25 bp, Homo sapien
caggacaggagccttcgtaggaaca

SEQ ID NO: 4946429 - DNA, 25 bp, Homo sapien
gacaggagccttcgtaggaacattt

SEQ ID NO: 4946430 - DNA, 25 bp, Homo sapien
tatgtgaacgctcaggacagcctgt

SEQ ID NO: 4946431 - DNA, 25 bp, Homo sapien
tgcgctcgcccgtgatgatgatcca

SEQ ID NO: 4946432 - DNA, 25 bp, Homo sapien
attgggaccctggactaagcctcca

SEQ ID NO: 4946433 - DNA, 25 bp, Homo sapien
gcagttggcatagttcggatacccg

SEQ ID NO: 4946434 - DNA, 25 bp, Homo sapien
tgaggctgtccatcgtaaactgata

SEQ ID NO: 4946435 - DNA, 25 bp, Homo sapien
tgtaacagtctgcctctgatggcca

SEQ ID NO: 4946436 - DNA, 25 bp, Homo sapien
gtaacagtctgcctctgatggccat

SEQ ID NO: 4946437 - DNA, 25 bp, Homo sapien
ctgtaacagtctgcctctgatggcc

SEQ ID NO: 4946438 - DNA, 25 bp, Homo sapien
gccactgggccatacgtaacttcag

SEQ ID NO: 4946439 - DNA, 25 bp, Homo sapien
ccgggatgtggacctagtcatagac

SEQ ID NO: 4946440 - DNA, 25 bp, Homo sapien
gtcatagactaacagccaaggtgct

SEQ ID NO: 4946441 - DNA, 25 bp, Homo sapien
aacttcagagtgtttcgggcgccag

SEQ ID NO: 4946442 - DNA, 25 bp, Homo sapien
tggttgcaatcgacctgctgaaggt

SEQ ID NO: 4946443 - DNA, 25 bp, Homo sapien
ctgctgaaggtttgaaagtggcttc

SEQ ID NO: 4946444 - DNA, 25 bp, Homo sapien
gctgatcctagttcctcaatggcca

SEQ ID NO: 4946445 - DNA, 25 bp, Homo sapien
gtggcttccaggagaccaaacaaaa

SEQ ID NO: 4946446 - DNA, 25 bp, Homo sapien
tgacaaacgagtgcccacatcatca

SEQ ID NO: 4946447 - DNA, 25 bp, Homo sapien
aaaacattgtggcaggacacttgtc

SEQ ID NO: 4946448 - DNA, 25 bp, Homo sapien
ttcaagctcaggtgacaaacgagtg

SEQ ID NO: 4946449 - DNA, 25 bp, Homo sapien
aacattgtggcaggacacttgtcat

SEQ ID NO: 4946450 - DNA, 25 bp, Homo sapien
gaaagctaatccagataagactgag

SEQ ID NO: 4946451 - DNA, 25 bp, Homo sapien
ttctggttcgggcaagagatccaca

SEQ ID NO: 4946452 - DNA, 25 bp, Homo sapien
catgaaatcgcctctgtgaactgtg

SEQ ID NO: 4946453 - DNA, 25 bp, Homo sapien
tgtcatctgacgatggctccactgg

SEQ ID NO: 4946454 - DNA, 25 bp, Homo sapien
gggtcagctttctcagtagggagca

SEQ ID NO: 4946455 - DNA, 25 bp, Homo sapien
cacctcgccgaggtaggcagtgttt

SEQ ID NO: 4946456 - DNA, 25 bp, Homo sapien
ccaagcatgccagtggagtgggtca

SEQ ID NO: 4946457 - DNA, 25 bp, Homo sapien
cagcacctcgccgaggtaggcagtg

SEQ ID NO: 4946458 - DNA, 25 bp, Homo sapien
gtgacaggacctggtcactgatctt

SEQ ID NO: 4946459 - DNA, 25 bp, Homo sapien
gcatgaggctctcacacagtgaaat

SEQ ID NO: 4946460 - DNA, 25 bp, Homo sapien
cagtgaaatacctgctggcttccat

SEQ ID NO: 4946461 - DNA, 25 bp, Homo sapien
tttgccaagtgtcctggaacctcag

SEQ ID NO: 4946462 - DNA, 25 bp, Homo sapien
aggtaactacacatgatagttcttg

SEQ ID NO: 4946463 - DNA, 25 bp, Homo sapien
cgtgtagatcacatgaggccgggag

SEQ ID NO: 4946464 - DNA, 25 bp, Homo sapien
tatatggccaggtaactacacatga

SEQ ID NO: 4946465 - DNA, 25 bp, Homo sapien
attatcatttatatggccaggtaac

SEQ ID NO: 4946466 - DNA, 25 bp, Homo sapien
caggcgatggcccaagaccagacag

SEQ ID NO: 4946467 - DNA, 25 bp, Homo sapien
taaaagctgccatagcacacagacc

SEQ ID NO: 4946468 - DNA, 25 bp, Homo sapien
taactctgtggtcgataaaagctgc

SEQ ID NO: 4946469 - DNA, 25 bp, Homo sapien
gagacacgtctccagtcctgaacgg

SEQ ID NO: 4946470 - DNA, 25 bp, Homo sapien
ggcccctgtgcaggctaactctgtg

SEQ ID NO: 4946471 - DNA, 25 bp, Homo sapien
catctttatgacagaatgaaatagc

SEQ ID NO: 4946472 - DNA, 25 bp, Homo sapien
tccccatctttatgacagaatgaaa

SEQ ID NO: 4946473 - DNA, 25 bp, Homo sapien
tttatgacagaatgaaatagcagag

SEQ ID NO: 4946474 - DNA, 25 bp, Homo sapien
atgacagaatgaaatagcagaggac

SEQ ID NO: 4946475 - DNA, 25 bp, Homo sapien
gccactcccaacagtcaagtcttaa

SEQ ID NO: 4946476 - DNA, 25 bp, Homo sapien
aagccactcccaacagtcaagtctt

SEQ ID NO: 4946477 - DNA, 25 bp, Homo sapien
gcaagccactcccaacagtcaagtc

SEQ ID NO: 4946478 - DNA, 25 bp, Homo sapien
ccactcccaacagtcaagtcttaag

SEQ ID NO: 4946479 - DNA, 25 bp, Homo sapien
ctgccaataacaagttcaaggttca

SEQ ID NO: 4946480 - DNA, 25 bp, Homo sapien
tctgccaataacaagttcaaggttc

SEQ ID NO: 4946481 - DNA, 25 bp, Homo sapien
tgccaataacaagttcaaggttcat

SEQ ID NO: 4946482 - DNA, 25 bp, Homo sapien
gctgccctggcctcaacacaggaaa

SEQ ID NO: 4946483 - DNA, 25 bp, Homo sapien
ggagtttaggctgtatgtcccattg

SEQ ID NO: 4946484 - DNA, 25 bp, Homo sapien
cattgtgtgcagcaatttggagcca

SEQ ID NO: 4946485 - DNA, 25 bp, Homo sapien
cgaacataaagactctttttacttg

SEQ ID NO: 4946486 - DNA, 25 bp, Homo sapien
cgtgttgacgcctcctctgtcattc

SEQ ID NO: 4946487 - DNA, 25 bp, Homo sapien
ccgtgttgacgcctcctctgtcatt

SEQ ID NO: 4946488 - DNA, 25 bp, Homo sapien
aacaccaagctccacgtccaccgtg

SEQ ID NO: 4946489 - DNA, 25 bp, Homo sapien
aagctccacgtccaccgtgttgacg

SEQ ID NO: 4946490 - DNA, 25 bp, Homo sapien
tgtatcttgtaggatctgtgtatac

SEQ ID NO: 4946491 - DNA, 25 bp, Homo sapien
cattttgtatcttgtaggatctgtg

SEQ ID NO: 4946492 - DNA, 25 bp, Homo sapien
cacgtccattttgtatcttgtagga

SEQ ID NO: 4946493 - DNA, 25 bp, Homo sapien
ctgacaacacgtccattttgtatct

SEQ ID NO: 4946494 - DNA, 25 bp, Homo sapien
tagtaatggcgactaagtgggtagc

SEQ ID NO: 4946495 - DNA, 25 bp, Homo sapien
gtggcttcatcacccatattagggt

SEQ ID NO: 4946496 - DNA, 25 bp, Homo sapien
atattagggtcagaaaaactcttgt

SEQ ID NO: 4946497 - DNA, 25 bp, Homo sapien
tgtgtttctacagccttgccccgct

SEQ ID NO: 4946498 - DNA, 25 bp, Homo sapien
aatggaaagcaacctgtcagagaag

SEQ ID NO: 4946499 - DNA, 25 bp, Homo sapien
cagcagaagacactaaatcaaggcc

SEQ ID NO: 4946500 - DNA, 25 bp, Homo sapien
ttttcaccatcgattacttttcgag

SEQ ID NO: 4946501 - DNA, 25 bp, Homo sapien
gattacttttcgagtaactttgcca

SEQ ID NO: 4946502 - DNA, 25 bp, Homo sapien
ctgggaatcgtgagctcatctgggc

SEQ ID NO: 4946503 - DNA, 25 bp, Homo sapien
tcgtgagctcatctgggcagccaca

SEQ ID NO: 4946504 - DNA, 25 bp, Homo sapien
tgagctcatctgggcagccacacat

SEQ ID NO: 4946505 - DNA, 25 bp, Homo sapien
atcgtgagctcatctgggcagccac

SEQ ID NO: 4946506 - DNA, 25 bp, Homo sapien
catttttatccaatagtctacactg

SEQ ID NO: 4946507 - DNA, 25 bp, Homo sapien
ggaaagcatttttatccaatagtct

SEQ ID NO: 4946508 - DNA, 25 bp, Homo sapien
agcatttttatccaatagtctacac

SEQ ID NO: 4946509 - DNA, 25 bp, Homo sapien
ttttatccaatagtctacactgcat

SEQ ID NO: 4946510 - DNA, 25 bp, Homo sapien
aactcagcattgacagccgtttctc

SEQ ID NO: 4946511 - DNA, 25 bp, Homo sapien
ttgtgatctttccatgtctggcccc

SEQ ID NO: 4946512 - DNA, 25 bp, Homo sapien
ccaccgttcctactcttcccagagg

SEQ ID NO: 4946513 - DNA, 25 bp, Homo sapien
tgcaacagcctcctttgtgatcttt

SEQ ID NO: 4946514 - DNA, 25 bp, Homo sapien
gctagggaaatagctgactggccag

SEQ ID NO: 4946515 - DNA, 25 bp, Homo sapien
gtctgagctagggaaatagctgact

SEQ ID NO: 4946516 - DNA, 25 bp, Homo sapien
agctagggaaatagctgactggcca

SEQ ID NO: 4946517 - DNA, 25 bp, Homo sapien
tgagctagggaaatagctgactggc

SEQ ID NO: 4946518 - DNA, 25 bp, Homo sapien
cacttctggatgtataaaggagatt

SEQ ID NO: 4946519 - DNA, 25 bp, Homo sapien
tctggatgtataaaggagattttct

SEQ ID NO: 4946520 - DNA, 25 bp, Homo sapien
tctaaccacttctggatgtataaag

SEQ ID NO: 4946521 - DNA, 25 bp, Homo sapien
tctctgaactataaattttaggtac

SEQ ID NO: 4946522 - DNA, 25 bp, Homo sapien
cccagagtgattccatgagatgacg

SEQ ID NO: 4946523 - DNA, 25 bp, Homo sapien
taccctcaggtgctatgaaaacctc

SEQ ID NO: 4946524 - DNA, 25 bp, Homo sapien
tagttgctccctatatccagccaag

SEQ ID NO: 4946525 - DNA, 25 bp, Homo sapien
ttgagaggccttcgataccctcagg

SEQ ID NO: 4946526 - DNA, 25 bp, Homo sapien
ggtgctcagggacgccaatttcttt

SEQ ID NO: 4946527 - DNA, 25 bp, Homo sapien
caaaagctaatacgcagaggtgctc

SEQ ID NO: 4946528 - DNA, 25 bp, Homo sapien
tatgagcaggagctaatacaaaagc

SEQ ID NO: 4946529 - DNA, 25 bp, Homo sapien
tataaagagcgtcgcagtccaggcc

SEQ ID NO: 4946530 - DNA, 25 bp, Homo sapien
gagcttggtgtctgacattgaggac

SEQ ID NO: 4946531 - DNA, 25 bp, Homo sapien
ggagcttggtgtctgacattgagga

SEQ ID NO: 4946532 - DNA, 25 bp, Homo sapien
taggagcttggtgtctgacattgag

SEQ ID NO: 4946533 - DNA, 25 bp, Homo sapien
ttaggagcttggtgtctgacattga

SEQ ID NO: 4946534 - DNA, 25 bp, Homo sapien
tctctgtccgaaaatagtgcattgg

SEQ ID NO: 4946535 - DNA, 25 bp, Homo sapien
gtttgcattctagctctgccccgta

SEQ ID NO: 4946536 - DNA, 25 bp, Homo sapien
tcagtaaagtgttagttccagagtc

SEQ ID NO: 4946537 - DNA, 25 bp, Homo sapien
tgccccgtacatgcagagtccacat

SEQ ID NO: 4946538 - DNA, 25 bp, Homo sapien
ttcttggatttgctccgtggaagga

SEQ ID NO: 4946539 - DNA, 25 bp, Homo sapien
cttggatttgctccgtggaaggaca

SEQ ID NO: 4946540 - DNA, 25 bp, Homo sapien
gatttgctccgtggaaggacaaaag

SEQ ID NO: 4946541 - DNA, 25 bp, Homo sapien
tggatttgctccgtggaaggacaaa

SEQ ID NO: 4946542 - DNA, 25 bp, Homo sapien
tatcaggcgtctcactgttccgcag

SEQ ID NO: 4946543 - DNA, 25 bp, Homo sapien
tgttccgcagcaggacatgaccttt

SEQ ID NO: 4946544 - DNA, 25 bp, Homo sapien
ttggcacccatgaacctgacatcct

SEQ ID NO: 4946545 - DNA, 25 bp, Homo sapien
tgccttcttctcaggttccctggtg

SEQ ID NO: 4946546 - DNA, 25 bp, Homo sapien
aaggcagagctcaagtataaacagt

SEQ ID NO: 4946547 - DNA, 25 bp, Homo sapien
tcaaggcagagctcaagtataaaca

SEQ ID NO: 4946548 - DNA, 25 bp, Homo sapien
ccttcaaggcagagctcaagtataa

SEQ ID NO: 4946549 - DNA, 25 bp, Homo sapien
ccaccttcaaggcagagctcaagta

SEQ ID NO: 4946550 - DNA, 25 bp, Homo sapien
ttacttcttctaagctagaaggtgg

SEQ ID NO: 4946551 - DNA, 25 bp, Homo sapien
gattcctttacttcttctaagctag

SEQ ID NO: 4946552 - DNA, 25 bp, Homo sapien
tactccatcgcactttcttcatcct

SEQ ID NO: 4946553 - DNA, 25 bp, Homo sapien
cctgttattatttcgcactgtgata

SEQ ID NO: 4946554 - DNA, 25 bp, Homo sapien
gctctgatgctgttcctgtctttat

SEQ ID NO: 4946555 - DNA, 25 bp, Homo sapien
ggctctgatgctgttcctgtcttta

SEQ ID NO: 4946556 - DNA, 25 bp, Homo sapien
ctggctctgatgctgttcctgtctt

SEQ ID NO: 4946557 - DNA, 25 bp, Homo sapien
tggctctgatgctgttcctgtcttt

SEQ ID NO: 4946558 - DNA, 25 bp, Homo sapien
gacacatgcgttgagttagtcttct

SEQ ID NO: 4946559 - DNA, 25 bp, Homo sapien
ccagcagttatgtgttctctcataa

SEQ ID NO: 4946560 - DNA, 25 bp, Homo sapien
ttgcataggaccttccacccagcag

SEQ ID NO: 4946561 - DNA, 25 bp, Homo sapien
tttttaatgtcttcagccccttgca

SEQ ID NO: 4946562 - DNA, 25 bp, Homo sapien
tactggcttgtttacagtataggca

SEQ ID NO: 4946563 - DNA, 25 bp, Homo sapien
tctctgcgtggaaggggtgataccc

SEQ ID NO: 4946564 - DNA, 25 bp, Homo sapien
tctccttagtgatgctactggcttg

SEQ ID NO: 4946565 - DNA, 25 bp, Homo sapien
acacttacccgaggcactggagcac

SEQ ID NO: 4946566 - DNA, 25 bp, Homo sapien
gtgtcaaggaaggatataagtttac

SEQ ID NO: 4946567 - DNA, 25 bp, Homo sapien
ttcattgcaccccagtgcgaaatga

SEQ ID NO: 4946568 - DNA, 25 bp, Homo sapien
tcaaggaaggatataagtttaccca

SEQ ID NO: 4946569 - DNA, 25 bp, Homo sapien
gcgaaatgattccaattgaatgggt

SEQ ID NO: 4946570 - DNA, 25 bp, Homo sapien
gaggaacagctgattgctgcaaaat

SEQ ID NO: 4946571 - DNA, 25 bp, Homo sapien
gccagactgaattggatatcatgag

SEQ ID NO: 4946572 - DNA, 25 bp, Homo sapien
gctgatgtaattgacaatgattcct

SEQ ID NO: 4946573 - DNA, 25 bp, Homo sapien
gcaaaattttgcttcgctggacttg

SEQ ID NO: 4946574 - DNA, 25 bp, Homo sapien
ctccctgaaagtttatgtgttgtgg

SEQ ID NO: 4946575 - DNA, 25 bp, Homo sapien
cttactacttcttggtgtggacttg

SEQ ID NO: 4946576 - DNA, 25 bp, Homo sapien
tctttccaattcagccctttgactc

SEQ ID NO: 4946577 - DNA, 25 bp, Homo sapien
ttctttccaattcagccctttgact

SEQ ID NO: 4946578 - DNA, 25 bp, Homo sapien
ctattcccgttccctgggcagttgt

SEQ ID NO: 4946579 - DNA, 25 bp, Homo sapien
tctattcccgttccctgggcagttg

SEQ ID NO: 4946580 - DNA, 25 bp, Homo sapien
aggaacaattctaggaagagctgcc

SEQ ID NO: 4946581 - DNA, 25 bp, Homo sapien
tataatcaatgggtccagaaccaaa

SEQ ID NO: 4946582 - DNA, 25 bp, Homo sapien
tcaacagttgtcagcacgtccatgc

SEQ ID NO: 4946583 - DNA, 25 bp, Homo sapien
gaagctgcattcaattacaccgatg

SEQ ID NO: 4946584 - DNA, 25 bp, Homo sapien
gttagtgccatcaacaccctgcctg

SEQ ID NO: 4946585 - DNA, 25 bp, Homo sapien
cgctacaccctaggaaggtggccta

SEQ ID NO: 4946586 - DNA, 25 bp, Homo sapien
catgcagtgtgcacatgctcggaga

SEQ ID NO: 4946587 - DNA, 25 bp, Homo sapien
tagttccaccctagatgggaggctg

SEQ ID NO: 4946588 - DNA, 25 bp, Homo sapien
gacaaaagcctcagtcactaatgca

SEQ ID NO: 4946589 - DNA, 25 bp, Homo sapien
tttttaagatccctctggcagaggt

SEQ ID NO: 4946590 - DNA, 25 bp, Homo sapien
tattacacccttgagaaacaggtaa

SEQ ID NO: 4946591 - DNA, 25 bp, Homo sapien
gttaagctctcgctaaatccctgac

SEQ ID NO: 4946592 - DNA, 25 bp, Homo sapien
tcctaagcataatgagcaaacacca

SEQ ID NO: 4946593 - DNA, 25 bp, Homo sapien
tagagaaacatgttcatcaaagttc

SEQ ID NO: 4946594 - DNA, 25 bp, Homo sapien
gtctccagagctgtaataacatcaa

SEQ ID NO: 4946595 - DNA, 25 bp, Homo sapien
ttaattttatggaactcagcctacc

SEQ ID NO: 4946596 - DNA, 25 bp, Homo sapien
tacactcacgtacatcagcaaacat

SEQ ID NO: 4946597 - DNA, 25 bp, Homo sapien
acatgcatggaacgccctgagtgtg

SEQ ID NO: 4946598 - DNA, 25 bp, Homo sapien
cagcaaacatgcatggaacgccctg

SEQ ID NO: 4946599 - DNA, 25 bp, Homo sapien
tattttaattacactcacgtacatc

SEQ ID NO: 4946600 - DNA, 25 bp, Homo sapien
tgggaaacctccatggctgttgaaa

SEQ ID NO: 4946601 - DNA, 25 bp, Homo sapien
ttgttgttaagagaccacccagaag

SEQ ID NO: 4946602 - DNA, 25 bp, Homo sapien
aactctgtagaacagatggcctttt

SEQ ID NO: 4946603 - DNA, 25 bp, Homo sapien
tgttgttaagagaccacccataaga

SEQ ID NO: 4946604 - DNA, 25 bp, Homo sapien
tttgtcaaaatagggcaccacgctc

SEQ ID NO: 4946605 - DNA, 25 bp, Homo sapien
tgaatgccactctctcgtaagtcac

SEQ ID NO: 4946606 - DNA, 25 bp, Homo sapien
ttttgcatgcaaatctaaggtctct

SEQ ID NO: 4946607 - DNA, 25 bp, Homo sapien
tctaaaacaggctattcattgggag

SEQ ID NO: 4946608 - DNA, 25 bp, Homo sapien
tatgggattacctgacttctcaatg

SEQ ID NO: 4946609 - DNA, 25 bp, Homo sapien
tagcctatccaactccatgtgggag

SEQ ID NO: 4946610 - DNA, 25 bp, Homo sapien
ggttcagaacctatgacctgtatct

SEQ ID NO: 4946611 - DNA, 25 bp, Homo sapien
cattgtgtggcatcggcaatcaccc

SEQ ID NO: 4946612 - DNA, 25 bp, Homo sapien
cctcatctacaggtcagccaattaa

SEQ ID NO: 4946613 - DNA, 25 bp, Homo sapien
cacttccaacatgattgaatgcttg

SEQ ID NO: 4946614 - DNA, 25 bp, Homo sapien
ttgatgaggcctcaccagttgaggc

SEQ ID NO: 4946615 - DNA, 25 bp, Homo sapien
tttggagatccttagaaactggtta

SEQ ID NO: 4946616 - DNA, 25 bp, Homo sapien
atctgaccaagggcaatatccagaa

SEQ ID NO: 4946617 - DNA, 25 bp, Homo sapien
caaatcttgaaagattcgtgtctct

SEQ ID NO: 4946618 - DNA, 25 bp, Homo sapien
tgaaagattcgtgtctctttctctg

SEQ ID NO: 4946619 - DNA, 25 bp, Homo sapien
ctacaaatcttgaaagattcgtgtc

SEQ ID NO: 4946620 - DNA, 25 bp, Homo sapien
cttgaaagattcgtgtctctttctc

SEQ ID NO: 4946621 - DNA, 25 bp, Homo sapien
tcaccgagacttgcaggataaggca

SEQ ID NO: 4946622 - DNA, 25 bp, Homo sapien
tgatgatgctccgagcagagagaac

SEQ ID NO: 4946623 - DNA, 25 bp, Homo sapien
agcagagagaacgacaaggtgaaga

SEQ ID NO: 4946624 - DNA, 25 bp, Homo sapien
gacttgcaggataaggcagaaccca

SEQ ID NO: 4946625 - DNA, 25 bp, Homo sapien
tgtgatatgtttcccagacatgtgg

SEQ ID NO: 4946626 - DNA, 25 bp, Homo sapien
tatttcggtctaagaaactctgcca

SEQ ID NO: 4946627 - DNA, 25 bp, Homo sapien
tcatttttcggagatacgcattcag

SEQ ID NO: 4946628 - DNA, 25 bp, Homo sapien
ctttctgctggaagatattgtgata

SEQ ID NO: 4946629 - DNA, 25 bp, Homo sapien
agatgtatgatgactcggtgatgtc

SEQ ID NO: 4946630 - DNA, 25 bp, Homo sapien
gatgactcggtgatgtctgagaaga

SEQ ID NO: 4946631 - DNA, 25 bp, Homo sapien
tttgcctccaaaagagaaggcatca

SEQ ID NO: 4946632 - DNA, 25 bp, Homo sapien
cagagtatcgtaggactccttacag

SEQ ID NO: 4946633 - DNA, 25 bp, Homo sapien
aatggcatacggcagacaaacgacc

SEQ ID NO: 4946634 - DNA, 25 bp, Homo sapien
atacggcagacaaacgacctctcct

SEQ ID NO: 4946635 - DNA, 25 bp, Homo sapien
gcagacaaacgacctctcctgacat

SEQ ID NO: 4946636 - DNA, 25 bp, Homo sapien
ggcatacggcagacaaacgacctct

SEQ ID NO: 4946637 - DNA, 25 bp, Homo sapien
tcccctaaccattttctgattgaga

SEQ ID NO: 4946638 - DNA, 25 bp, Homo sapien
agctgtacagctgctcctaaatccc

SEQ ID NO: 4946639 - DNA, 25 bp, Homo sapien
ggtttgcactatttagaggccttcc

SEQ ID NO: 4946640 - DNA, 25 bp, Homo sapien
tgcaggtcaccttgatccagtccgt

SEQ ID NO: 4946641 - DNA, 25 bp, Homo sapien
agcagctgccgggaacactgtccaa

SEQ ID NO: 4946642 - DNA, 25 bp, Homo sapien
aagtgcagggctatccagtgagagc

SEQ ID NO: 4946643 - DNA, 25 bp, Homo sapien
gattgcatacgtgctggaagatcca

SEQ ID NO: 4946644 - DNA, 25 bp, Homo sapien
gaggagtcctccgattctaagcaag

SEQ ID NO: 4946645 - DNA, 25 bp, Homo sapien
caggtcttgcagatagctttttctc

SEQ ID NO: 4946646 - DNA, 25 bp, Homo sapien
tatagagggcctcacacagtgtaac

SEQ ID NO: 4946647 - DNA, 25 bp, Homo sapien
tccaagaggatacaagcacagaata

SEQ ID NO: 4946648 - DNA, 25 bp, Homo sapien
gtaacaaataagcaggtcttgcaga

SEQ ID NO: 4946649 - DNA, 25 bp, Homo sapien
cttccactgcagactcaccttccac

SEQ ID NO: 4946650 - DNA, 25 bp, Homo sapien
ttccactgcagactcaccttccacc

SEQ ID NO: 4946651 - DNA, 25 bp, Homo sapien
tccactgcagactcaccttccacct

SEQ ID NO: 4946652 - DNA, 25 bp, Homo sapien
ctctcttcctcaaaatacgacgttt

SEQ ID NO: 4946653 - DNA, 25 bp, Homo sapien
agaaccaggataggataggctcgaa

SEQ ID NO: 4946654 - DNA, 25 bp, Homo sapien
gataggctcgaattccaatgtatgt

SEQ ID NO: 4946655 - DNA, 25 bp, Homo sapien
taggataggctcgaattccaatgta

SEQ ID NO: 4946656 - DNA, 25 bp, Homo sapien
caggataggataggctcgaattcca

SEQ ID NO: 4946657 - DNA, 25 bp, Homo sapien
tcagggcaggtgttctaccttcttc

SEQ ID NO: 4946658 - DNA, 25 bp, Homo sapien
gtcagggcaggtgttctaccttctt

SEQ ID NO: 4946659 - DNA, 25 bp, Homo sapien
agtcagggcaggtgttctaccttct

SEQ ID NO: 4946660 - DNA, 25 bp, Homo sapien
tattcagtctagcaatgagtccacc

SEQ ID NO: 4946661 - DNA, 25 bp, Homo sapien
ttcaacagcagtcaagctccgagtc

SEQ ID NO: 4946662 - DNA, 25 bp, Homo sapien
tgcattgcctcttccgaacgtgttt

SEQ ID NO: 4946663 - DNA, 25 bp, Homo sapien
tctagcaatgagtccatcagaggta

SEQ ID NO: 4946664 - DNA, 25 bp, Homo sapien
tgagccctttacacgactagctgaa

SEQ ID NO: 4946665 - DNA, 25 bp, Homo sapien
tcttatgaggatgggagtgagccct

SEQ ID NO: 4946666 - DNA, 25 bp, Homo sapien
cacacacttgttatactggactaaa

SEQ ID NO: 4946667 - DNA, 25 bp, Homo sapien
caaaaccagactttacttaggactg

SEQ ID NO: 4946668 - DNA, 25 bp, Homo sapien
gatgtactgtgcagattagaattcc

SEQ ID NO: 4946669 - DNA, 25 bp, Homo sapien
tcccatccatatgttttgcagtagg

SEQ ID NO: 4946670 - DNA, 25 bp, Homo sapien
gcagtaggtgttgctggaccaagac

SEQ ID NO: 4946671 - DNA, 25 bp, Homo sapien
tgagttctgcgtcaaccagatgtac

SEQ ID NO: 4946672 - DNA, 25 bp, Homo sapien
gacacttgatgcatagaatacttgg

SEQ ID NO: 4946673 - DNA, 25 bp, Homo sapien
cattatgtccgggtttggagacaga

SEQ ID NO: 4946674 - DNA, 25 bp, Homo sapien
tgttgcatccgattgaactctgggc

SEQ ID NO: 4946675 - DNA, 25 bp, Homo sapien
gagggtcacgccctaaacattatgt

SEQ ID NO: 4946676 - DNA, 25 bp, Homo sapien
ctttctgccgattcttgcacaatat

SEQ ID NO: 4946677 - DNA, 25 bp, Homo sapien
ccttctgtatatccacctggacttc

SEQ ID NO: 4946678 - DNA, 25 bp, Homo sapien
gtgaagtactgcctgtgtgtgcgag

SEQ ID NO: 4946679 - DNA, 25 bp, Homo sapien
gggtgaagtactgcctgtgtgtgcg

SEQ ID NO: 4946680 - DNA, 25 bp, Homo sapien
ctagaaggggtgaagtactgcctgt

SEQ ID NO: 4946681 - DNA, 25 bp, Homo sapien
attctagaaggggtgaagtactgcc

SEQ ID NO: 4946682 - DNA, 25 bp, Homo sapien
tagcttagctctgcgatgccagtcc

SEQ ID NO: 4946683 - DNA, 25 bp, Homo sapien
tgacgaaagacaacaggcagggcat

SEQ ID NO: 4946684 - DNA, 25 bp, Homo sapien
cacgtgggacgcacacatagacttt

SEQ ID NO: 4946685 - DNA, 25 bp, Homo sapien
cctcagcggcaaaagtagaaatcct

SEQ ID NO: 4946686 - DNA, 25 bp, Homo sapien
tacaaagatacattgaggcagagaa

SEQ ID NO: 4946687 - DNA, 25 bp, Homo sapien
agcatcatttcaagtagggttttca

SEQ ID NO: 4946688 - DNA, 25 bp, Homo sapien
tcttccttctaaagggacctagatg

SEQ ID NO: 4946689 - DNA, 25 bp, Homo sapien
acctagatgtgagcccgatacattt

SEQ ID NO: 4946690 - DNA, 25 bp, Homo sapien
tcaaaaatgtatgcggactggccaa

SEQ ID NO: 4946691 - DNA, 25 bp, Homo sapien
aaaggagtctacagtccacctgaag

SEQ ID NO: 4946692 - DNA, 25 bp, Homo sapien
caaacccgctgcactcttggtggga

SEQ ID NO: 4946693 - DNA, 25 bp, Homo sapien
caaaatggtgcgtggtggctactgt

SEQ ID NO: 4946694 - DNA, 25 bp, Homo sapien
gtttctgcatcactccttgccttaa

SEQ ID NO: 4946695 - DNA, 25 bp, Homo sapien
ccccttgtttctgcatcactccttg

SEQ ID NO: 4946696 - DNA, 25 bp, Homo sapien
gcatcactccttgccttaaatcttg

SEQ ID NO: 4946697 - DNA, 25 bp, Homo sapien
tccttgccttaaatcttggtttcat

SEQ ID NO: 4946698 - DNA, 25 bp, Homo sapien
attgaacctgacaaaaactcatttt

SEQ ID NO: 4946699 - DNA, 25 bp, Homo sapien
cattgaacctgacaaaaactcattt

SEQ ID NO: 4946700 - DNA, 25 bp, Homo sapien
tcattgaacctgacaaaaactcatt

SEQ ID NO: 4946701 - DNA, 25 bp, Homo sapien
cgtcgttgtccacctgttgtgcacc

SEQ ID NO: 4946702 - DNA, 25 bp, Homo sapien
gcacccacgatggactttaatacca

SEQ ID NO: 4946703 - DNA, 25 bp, Homo sapien
gtccacctgttgtgcacccacgatg

SEQ ID NO: 4946704 - DNA, 25 bp, Homo sapien
taataccagtcgtgtctgatgtaat

SEQ ID NO: 4946705 - DNA, 25 bp, Homo sapien
ggtccgtatattaattatttctgca

SEQ ID NO: 4946706 - DNA, 25 bp, Homo sapien
cgtatattaattatttctgcaatac

SEQ ID NO: 4946707 - DNA, 25 bp, Homo sapien
gtccgtatattaattatttctgcaa

SEQ ID NO: 4946708 - DNA, 25 bp, Homo sapien
tccgtatattaattatttctgcaat

SEQ ID NO: 4946709 - DNA, 25 bp, Homo sapien
caggcccactgagcagctctcctca

SEQ ID NO: 4946710 - DNA, 25 bp, Homo sapien
cccaggcccactgagcagctctcct

SEQ ID NO: 4946711 - DNA, 25 bp, Homo sapien
aggcccactgagcagctctcctcat

SEQ ID NO: 4946712 - DNA, 25 bp, Homo sapien
ccaggcccactgagcagctctcctc

SEQ ID NO: 4946713 - DNA, 25 bp, Homo sapien
tttcaggctggaggagactgttgtg

SEQ ID NO: 4946714 - DNA, 25 bp, Homo sapien
caagttgaaaggatttcaggctgga

SEQ ID NO: 4946715 - DNA, 25 bp, Homo sapien
ctggaggagactgttgtgtgtgagg

SEQ ID NO: 4946716 - DNA, 25 bp, Homo sapien
aaggatttcaggctggaggagactg

SEQ ID NO: 4946717 - DNA, 25 bp, Homo sapien
tacatcaggtattacacatatacag

SEQ ID NO: 4946718 - DNA, 25 bp, Homo sapien
gaagccatattttactacctagcac

SEQ ID NO: 4946719 - DNA, 25 bp, Homo sapien
taaatgcatatagtatacatcaggt

SEQ ID NO: 4946720 - DNA, 25 bp, Homo sapien
gcatttttactatctcaaagttaga

SEQ ID NO: 4946721 - DNA, 25 bp, Homo sapien
gatgcaagtatcaaagtatccaagg

SEQ ID NO: 4946722 - DNA, 25 bp, Homo sapien
cgctttacaaaggatgaggcaaact

SEQ ID NO: 4946723 - DNA, 25 bp, Homo sapien
gggtggaatgacaacactgaaatat

SEQ ID NO: 4946724 - DNA, 25 bp, Homo sapien
gttgccaccgtaggtcaaagtgaca

SEQ ID NO: 4946725 - DNA, 25 bp, Homo sapien
gaccacgagcttgggtgactaagac

SEQ ID NO: 4946726 - DNA, 25 bp, Homo sapien
tccgcagccggcaatgtcagaggca

SEQ ID NO: 4946727 - DNA, 25 bp, Homo sapien
gactaagacccactgtttgcgatcc

SEQ ID NO: 4946728 - DNA, 25 bp, Homo sapien
ctgagcggtcagctttcacggagcc

SEQ ID NO: 4946729 - DNA, 25 bp, Homo sapien
gggcgaccttctagaggcagctact

SEQ ID NO: 4946730 - DNA, 25 bp, Homo sapien
accttctagaggcagctactcctcg

SEQ ID NO: 4946731 - DNA, 25 bp, Homo sapien
gcgaccttctagaggcagctactcc

SEQ ID NO: 4946732 - DNA, 25 bp, Homo sapien
aacttgcaaggagcgaagtccgggg

SEQ ID NO: 4946733 - DNA, 25 bp, Homo sapien
gcagtgaggagcctcgcgcacagca

SEQ ID NO: 4946734 - DNA, 25 bp, Homo sapien
gcaggagcagcgactggaatctcct

SEQ ID NO: 4946735 - DNA, 25 bp, Homo sapien
agcagcgactggaatctcctccacg

SEQ ID NO: 4946736 - DNA, 25 bp, Homo sapien
agaagcaggagcagcgactggaatc

SEQ ID NO: 4946737 - DNA, 25 bp, Homo sapien
gctatgagcggagccaaataatcac

SEQ ID NO: 4946738 - DNA, 25 bp, Homo sapien
gaaggcagggctatgagcggagcca

SEQ ID NO: 4946739 - DNA, 25 bp, Homo sapien
gtctgcagatactccacacgcacgc

SEQ ID NO: 4946740 - DNA, 25 bp, Homo sapien
acacgcacgcgacaccgatggctcc

SEQ ID NO: 4946741 - DNA, 25 bp, Homo sapien
ctgctagtggcacaaggagccgctg

SEQ ID NO: 4946742 - DNA, 25 bp, Homo sapien
atccgacgcctcctgaaggtctggg

SEQ ID NO: 4946743 - DNA, 25 bp, Homo sapien
tcgcttccctctcatagcatcgggt

SEQ ID NO: 4946744 - DNA, 25 bp, Homo sapien
gaggagagatccagtctagagagaa

SEQ ID NO: 4946745 - DNA, 25 bp, Homo sapien
gattgtctcaaggtgaatccagcag

SEQ ID NO: 4946746 - DNA, 25 bp, Homo sapien
aaagctcgtccggaactaggtgaag

SEQ ID NO: 4946747 - DNA, 25 bp, Homo sapien
cctgtggaacacgagcaagctggaa

SEQ ID NO: 4946748 - DNA, 25 bp, Homo sapien
tccgtgaaggaacaagagactcccc

SEQ ID NO: 4946749 - DNA, 25 bp, Homo sapien
tggaggaattctccggacagtatga

SEQ ID NO: 4946750 - DNA, 25 bp, Homo sapien
ggaggaattctccggacagtatgaa

SEQ ID NO: 4946751 - DNA, 25 bp, Homo sapien
gtggaggaattctccggacagtatg

SEQ ID NO: 4946752 - DNA, 25 bp, Homo sapien
gaggaattctccggacagtatgaat

SEQ ID NO: 4946753 - DNA, 25 bp, Homo sapien
catggaagacgcttgtacgggtttg

SEQ ID NO: 4946754 - DNA, 25 bp, Homo sapien
aagacgcttgtacgggtttggcttg

SEQ ID NO: 4946755 - DNA, 25 bp, Homo sapien
ggcttgtgatattcaattcctgtaa

SEQ ID NO: 4946756 - DNA, 25 bp, Homo sapien
tacgggtttggcttgtgatattcaa

SEQ ID NO: 4946757 - DNA, 25 bp, Homo sapien
tgcaaagtggtagcgagagacaaag

SEQ ID NO: 4946758 - DNA, 25 bp, Homo sapien
gaagttcaggattagattcacctcg

SEQ ID NO: 4946759 - DNA, 25 bp, Homo sapien
gagacaaagagatgtgcccgagaga

SEQ ID NO: 4946760 - DNA, 25 bp, Homo sapien
tcagggacagtacgctgtgcaaagt

SEQ ID NO: 4946761 - DNA, 25 bp, Homo sapien
tgattggagaagaattgaaccgccc

SEQ ID NO: 4946762 - DNA, 25 bp, Homo sapien
gggagtacattcactgctttccgga

SEQ ID NO: 4946763 - DNA, 25 bp, Homo sapien
gctggaataaactgactactgcaga

SEQ ID NO: 4946764 - DNA, 25 bp, Homo sapien
taacttaggccatatgtgtgtaacg

SEQ ID NO: 4946765 - DNA, 25 bp, Homo sapien
tccactgtcacccacgaatccacca

SEQ ID NO: 4946766 - DNA, 25 bp, Homo sapien
actgtcacccacgaatccaccagcc

SEQ ID NO: 4946767 - DNA, 25 bp, Homo sapien
cactgtcacccacgaatccaccagc

SEQ ID NO: 4946768 - DNA, 25 bp, Homo sapien
tgtcacccacgaatccaccagccat

SEQ ID NO: 4946769 - DNA, 25 bp, Homo sapien
attgcatccatagatttattccata

SEQ ID NO: 4946770 - DNA, 25 bp, Homo sapien
tgcatccatagatttattccatagc

SEQ ID NO: 4946771 - DNA, 25 bp, Homo sapien
tctcttcattgcatccatagattta

SEQ ID NO: 4946772 - DNA, 25 bp, Homo sapien
catccatagatttattccatagctc

SEQ ID NO: 4946773 - DNA, 25 bp, Homo sapien
ttcagattctacgtcttgcaaattc

SEQ ID NO: 4946774 - DNA, 25 bp, Homo sapien
gattctacgtcttgcaaattcaaat

SEQ ID NO: 4946775 - DNA, 25 bp, Homo sapien
tataacactaagcttgacaaaatct

SEQ ID NO: 4946776 - DNA, 25 bp, Homo sapien
taggtttttcagattctacgtcttg

SEQ ID NO: 4946777 - DNA, 25 bp, Homo sapien
gaacggaaataatacttctcgataa

SEQ ID NO: 4946778 - DNA, 25 bp, Homo sapien
acggaaataatacttctcgataagc

SEQ ID NO: 4946779 - DNA, 25 bp, Homo sapien
ggaaataatacttctcgataagcat

SEQ ID NO: 4946780 - DNA, 25 bp, Homo sapien
cggaaataatacttctcgataagca

SEQ ID NO: 4946781 - DNA, 25 bp, Homo sapien
gagtggagctgttggtaatggtgat

SEQ ID NO: 4946782 - DNA, 25 bp, Homo sapien
gtggagctgttggtaatggtgatga

SEQ ID NO: 4946783 - DNA, 25 bp, Homo sapien
ggtgagtggagctgttggtaatggt

SEQ ID NO: 4946784 - DNA, 25 bp, Homo sapien
tgagtggagctgttggtaatggtga

SEQ ID NO: 4946785 - DNA, 25 bp, Homo sapien
gagaagcagaaggatcagtgagcat

SEQ ID NO: 4946786 - DNA, 25 bp, Homo sapien
ctgagaagcagaaggatcagtgagc

SEQ ID NO: 4946787 - DNA, 25 bp, Homo sapien
tgagaagcagaaggatcagtgagca

SEQ ID NO: 4946788 - DNA, 25 bp, Homo sapien
gggtttttaattccagcagctgtgt

SEQ ID NO: 4946789 - DNA, 25 bp, Homo sapien
ctggaacttcgttactgaatttggg

SEQ ID NO: 4946790 - DNA, 25 bp, Homo sapien
tgatgactgcagtatagcaggatta

SEQ ID NO: 4946791 - DNA, 25 bp, Homo sapien
cactatggagaataaaacgggttga

SEQ ID NO: 4946792 - DNA, 25 bp, Homo sapien
aatattcgtatttgccactatggag

SEQ ID NO: 4946793 - DNA, 25 bp, Homo sapien
tctcttgtggttaatgacaaggtag

SEQ ID NO: 4946794 - DNA, 25 bp, Homo sapien
tatcccttgaaaaatcgctaatatg

SEQ ID NO: 4946795 - DNA, 25 bp, Homo sapien
tacggcatgcaagaaaggttatccc

SEQ ID NO: 4946796 - DNA, 25 bp, Homo sapien
tattcaactgagactggaatctctc

SEQ ID NO: 4946797 - DNA, 25 bp, Homo sapien
tatccctgataagaggacaatgagt

SEQ ID NO: 4946798 - DNA, 25 bp, Homo sapien
tgatgtggccgatcctcaaagatgc

SEQ ID NO: 4946799 - DNA, 25 bp, Homo sapien
tgtttcctcccacaagttcaatatg

SEQ ID NO: 4946800 - DNA, 25 bp, Homo sapien
tgggttacccagcttatgctcttgg

SEQ ID NO: 4946801 - DNA, 25 bp, Homo sapien
aagatgcagggcgtcttctctccat

SEQ ID NO: 4946802 - DNA, 25 bp, Homo sapien
caaattcatccacgttgaacttggt

SEQ ID NO: 4946803 - DNA, 25 bp, Homo sapien
tagtcatctgggatgagccactcct

SEQ ID NO: 4946804 - DNA, 25 bp, Homo sapien
ccccatagtcatctgggatgagcca

SEQ ID NO: 4946805 - DNA, 25 bp, Homo sapien
cactcctcaaccaccatgtcttcaa

SEQ ID NO: 4946806 - DNA, 25 bp, Homo sapien
tcgagacatggatcttctggtagcc

SEQ ID NO: 4946807 - DNA, 25 bp, Homo sapien
agacatggatcttctggtagccagg

SEQ ID NO: 4946808 - DNA, 25 bp, Homo sapien
gagacatggatcttctggtagccag

SEQ ID NO: 4946809 - DNA, 25 bp, Homo sapien
cttcgagacatggatcttctggtag

SEQ ID NO: 4946810 - DNA, 25 bp, Homo sapien
cctgcgtaaggcctcaattacatgc

SEQ ID NO: 4946811 - DNA, 25 bp, Homo sapien
ttggccctgcgtaaggcctcaatta

SEQ ID NO: 4946812 - DNA, 25 bp, Homo sapien
gcgtaaggcctcaattacatgctcc

SEQ ID NO: 4946813 - DNA, 25 bp, Homo sapien
gtaaggcctcaattacatgctcctt

SEQ ID NO: 4946814 - DNA, 25 bp, Homo sapien
ccaatgtgaaccctgtccacagtgc

SEQ ID NO: 4946815 - DNA, 25 bp, Homo sapien
gataacttggccaatgtgaaccctg

SEQ ID NO: 4946816 - DNA, 25 bp, Homo sapien
tggccaatgtgaaccctgtccacag

SEQ ID NO: 4946817 - DNA, 25 bp, Homo sapien
cttggccaatgtgaaccctgtccac

SEQ ID NO: 4946818 - DNA, 25 bp, Homo sapien
agcatatactacagggaagcggctg

SEQ ID NO: 4946819 - DNA, 25 bp, Homo sapien
ttgcacattggacccctatgaggaa

SEQ ID NO: 4946820 - DNA, 25 bp, Homo sapien
ccattgcacattggacccctatgag

SEQ ID NO: 4946821 - DNA, 25 bp, Homo sapien
cccatacaagaaatgggcagcatat

SEQ ID NO: 4946822 - DNA, 25 bp, Homo sapien
gcgccaggcccggatgctatttttt

SEQ ID NO: 4946823 - DNA, 25 bp, Homo sapien
gcagagcctgcttattcatgttaca

SEQ ID NO: 4946824 - DNA, 25 bp, Homo sapien
gctgacgtcccaaggttcaaccatc

SEQ ID NO: 4946825 - DNA, 25 bp, Homo sapien
catggacggcagataaaacaaattc

SEQ ID NO: 4946826 - DNA, 25 bp, Homo sapien
gcccgaaattgactcacaagtgtaa

SEQ ID NO: 4946827 - DNA, 25 bp, Homo sapien
taatgctggagtacctaaacagcca

SEQ ID NO: 4946828 - DNA, 25 bp, Homo sapien
taaccaggatagtgtgctgttggca

SEQ ID NO: 4946829 - DNA, 25 bp, Homo sapien
accagtggaatgtgataaagagccc

SEQ ID NO: 4946830 - DNA, 25 bp, Homo sapien
gatctgttcagtatacaatgaatct

SEQ ID NO: 4946831 - DNA, 25 bp, Homo sapien
cttgttagtcttgggaacatcatcc

SEQ ID NO: 4946832 - DNA, 25 bp, Homo sapien
aagtcaatatcttcacggctgcagg

SEQ ID NO: 4946833 - DNA, 25 bp, Homo sapien
gatttgtttgatctgttcagtatac

SEQ ID NO: 4946834 - DNA, 25 bp, Homo sapien
gagctttctcagtttccaatctggg

SEQ ID NO: 4946835 - DNA, 25 bp, Homo sapien
ggcttttcagagtcagtgtcctact

SEQ ID NO: 4946836 - DNA, 25 bp, Homo sapien
cgtcacctcaggaatttgagctttc

SEQ ID NO: 4946837 - DNA, 25 bp, Homo sapien
acatctcctcaggcaacccggtggt

SEQ ID NO: 4946838 - DNA, 25 bp, Homo sapien
tgtcccagtcaaagtacaacgcagc

SEQ ID NO: 4946839 - DNA, 25 bp, Homo sapien
cataagcaatgagtaccgtcccgta

SEQ ID NO: 4946840 - DNA, 25 bp, Homo sapien
gaaatggtcacacaactacaaagag

SEQ ID NO: 4946841 - DNA, 25 bp, Homo sapien
attctgtgctaaaccagtgccatgg

SEQ ID NO: 4946842 - DNA, 25 bp, Homo sapien
ttggcacgtacctgtactgtaatcc

SEQ ID NO: 4946843 - DNA, 25 bp, Homo sapien
acaagaagagaattttgtccatgct

SEQ ID NO: 4946844 - DNA, 25 bp, Homo sapien
taaatgtatctgcaacaagaagaga

SEQ ID NO: 4946845 - DNA, 25 bp, Homo sapien
tggacgtgttggcacgtacctgtac

SEQ ID NO: 4946846 - DNA, 25 bp, Homo sapien
attctgttggatgccccagggctcc

SEQ ID NO: 4946847 - DNA, 25 bp, Homo sapien
tcaggtgtaacctgaggacgcccca

SEQ ID NO: 4946848 - DNA, 25 bp, Homo sapien
tgggctccattctgttggatgcccc

SEQ ID NO: 4946849 - DNA, 25 bp, Homo sapien
gtaacctgaggacgccccatctgtg

SEQ ID NO: 4946850 - DNA, 25 bp, Homo sapien
cacgtaagagttcagtaggttggct

SEQ ID NO: 4946851 - DNA, 25 bp, Homo sapien
tataaacctcgaaatatcaacacgt

SEQ ID NO: 4946852 - DNA, 25 bp, Homo sapien
cttgtatagaaatggcccaagaagg

SEQ ID NO: 4946853 - DNA, 25 bp, Homo sapien
cattgagaatatgacccttacacgg

SEQ ID NO: 4946854 - DNA, 25 bp, Homo sapien
tccttaacctgctgtaccacgcagc

SEQ ID NO: 4946855 - DNA, 25 bp, Homo sapien
ttaacctgctgtaccacgcagccag

SEQ ID NO: 4946856 - DNA, 25 bp, Homo sapien
accacgcagccaggtgctctattgc

SEQ ID NO: 4946857 - DNA, 25 bp, Homo sapien
tgctgtaccacgcagccaggtgctc

SEQ ID NO: 4946858 - DNA, 25 bp, Homo sapien
acctggattccatggcgtttctacg

SEQ ID NO: 4946859 - DNA, 25 bp, Homo sapien
gacgttaaagctgacagaacctgga

SEQ ID NO: 4946860 - DNA, 25 bp, Homo sapien
cagctgaattcagtcgctagataga

SEQ ID NO: 4946861 - DNA, 25 bp, Homo sapien
gaaatcacattagcttcctgccaac

SEQ ID NO: 4946862 - DNA, 25 bp, Homo sapien
ctccccactggtattcacgagggta

SEQ ID NO: 4946863 - DNA, 25 bp, Homo sapien
gactgaggacttccggctctgtatc

SEQ ID NO: 4946864 - DNA, 25 bp, Homo sapien
ggactgaggacttccggctctgtat

SEQ ID NO: 4946865 - DNA, 25 bp, Homo sapien
ccactggtattcacgagggtaaggg

SEQ ID NO: 4946866 - DNA, 25 bp, Homo sapien
cactggtatcccagattgcagttcc

SEQ ID NO: 4946867 - DNA, 25 bp, Homo sapien
tgtggctcattttaggttgacagga

SEQ ID NO: 4946868 - DNA, 25 bp, Homo sapien
gctttggaaagtcagtctttctgtg

SEQ ID NO: 4946869 - DNA, 25 bp, Homo sapien
tctcgaatgccctcatggtctgcca

SEQ ID NO: 4946870 - DNA, 25 bp, Homo sapien
gtgtccaggacatctttgcaatgcc

SEQ ID NO: 4946871 - DNA, 25 bp, Homo sapien
gtccaggacatctttgcaatgccca

SEQ ID NO: 4946872 - DNA, 25 bp, Homo sapien
tgtccaggacatctttgcaatgccc

SEQ ID NO: 4946873 - DNA, 25 bp, Homo sapien
tccaggacatctttgcaatgcccat

SEQ ID NO: 4946874 - DNA, 25 bp, Homo sapien
gcctgaaaacccgtgcaagatcctg

SEQ ID NO: 4946875 - DNA, 25 bp, Homo sapien
agccccagcgcaggatcatgagtat

SEQ ID NO: 4946876 - DNA, 25 bp, Homo sapien
gatcctgagtatctatgaacacttc

SEQ ID NO: 4946877 - DNA, 25 bp, Homo sapien
gatcatgagtatctctgaacattgc

SEQ ID NO: 4946878 - DNA, 25 bp, Homo sapien
gaagatgaaagacctcatgggagtg

SEQ ID NO: 4946879 - DNA, 25 bp, Homo sapien
catgggagtgacaggttcgggcaga

SEQ ID NO: 4946880 - DNA, 25 bp, Homo sapien
ctaggatttgcaggtggctgtaatg

SEQ ID NO: 4946881 - DNA, 25 bp, Homo sapien
atttgcaggtggctgtaatgccagg

SEQ ID NO: 4946882 - DNA, 25 bp, Homo sapien
ttgtgaatttgttggatgaaccaaa

SEQ ID NO: 4946883 - DNA, 25 bp, Homo sapien
actgtgatccatacagaacaatgga

SEQ ID NO: 4946884 - DNA, 25 bp, Homo sapien
gccactgtgatccatacagaacaat

SEQ ID NO: 4946885 - DNA, 25 bp, Homo sapien
ttgttggatgaaccaaaaacaagaa

SEQ ID NO: 4946886 - DNA, 25 bp, Homo sapien
tgaagtggtggccagtttcacagag

SEQ ID NO: 4946887 - DNA, 25 bp, Homo sapien
tggtgaagtggtggccagtttcaca

SEQ ID NO: 4946888 - DNA, 25 bp, Homo sapien
gatggtgaagtggtggccagtttca

SEQ ID NO: 4946889 - DNA, 25 bp, Homo sapien
agtggtggccagtttcacagaggga

SEQ ID NO: 4946890 - DNA, 25 bp, Homo sapien
gaaccaataattccaaggcaactgg

SEQ ID NO: 4946891 - DNA, 25 bp, Homo sapien
tataatgactagaaccaataattcc

SEQ ID NO: 4946892 - DNA, 25 bp, Homo sapien
tgactagaaccaataattccaaggc

SEQ ID NO: 4946893 - DNA, 25 bp, Homo sapien
cttcaaatataatgactagaaccaa

SEQ ID NO: 4946894 - DNA, 25 bp, Homo sapien
tctggatatcaggtcctgtgtgaag

SEQ ID NO: 4946895 - DNA, 25 bp, Homo sapien
cgtactgactttttctcgacatttt

SEQ ID NO: 4946896 - DNA, 25 bp, Homo sapien
tttacacccatcaccaatttcatct

SEQ ID NO: 4946897 - DNA, 25 bp, Homo sapien
gacttttggacatatgcttcagtgc

SEQ ID NO: 4946898 - DNA, 25 bp, Homo sapien
tccccccgaatgacttttggacata

SEQ ID NO: 4946899 - DNA, 25 bp, Homo sapien
ggccaagccttatagcctccattat

SEQ ID NO: 4946900 - DNA, 25 bp, Homo sapien
tggccaagccttatagcctccatta

SEQ ID NO: 4946901 - DNA, 25 bp, Homo sapien
ctggccaagccttatagcctccatt

SEQ ID NO: 4946902 - DNA, 25 bp, Homo sapien
acgatggatactgcaggaagagaaa

SEQ ID NO: 4946903 - DNA, 25 bp, Homo sapien
tcagtatttaaagaggaaacgatgg

SEQ ID NO: 4946904 - DNA, 25 bp, Homo sapien
tgccaagttaaggatgcatgctcag

SEQ ID NO: 4946905 - DNA, 25 bp, Homo sapien
ttaaagaggaaacgatggatactgc

SEQ ID NO: 4946906 - DNA, 25 bp, Homo sapien
ttattggcataagaaaaacttgaac

SEQ ID NO: 4946907 - DNA, 25 bp, Homo sapien
catcagtgttagctgttcctcttta

SEQ ID NO: 4946908 - DNA, 25 bp, Homo sapien
aacttgaaccatagatgatgtaaca

SEQ ID NO: 4946909 - DNA, 25 bp, Homo sapien
gtaaacctacctcatgtattacgtg

SEQ ID NO: 4946910 - DNA, 25 bp, Homo sapien
tggaaacctgttggcaactctgagt

SEQ ID NO: 4946911 - DNA, 25 bp, Homo sapien
ggacaatggtcctcaagtctctgaa

SEQ ID NO: 4946912 - DNA, 25 bp, Homo sapien
cctgttggcaactctgagttagtct

SEQ ID NO: 4946913 - DNA, 25 bp, Homo sapien
agttagtctggacaatggtcctcaa

SEQ ID NO: 4946914 - DNA, 25 bp, Homo sapien
caggtactcctttcaactgtttctt

SEQ ID NO: 4946915 - DNA, 25 bp, Homo sapien
agcatggacgatgcccgttggtgcc

SEQ ID NO: 4946916 - DNA, 25 bp, Homo sapien
taggtgcgggccttggtgttcccac

SEQ ID NO: 4946917 - DNA, 25 bp, Homo sapien
gttggtgccccagaacctcatccat

SEQ ID NO: 4946918 - DNA, 25 bp, Homo sapien
gacaggttccccgagtcacaggtat

SEQ ID NO: 4946919 - DNA, 25 bp, Homo sapien
aaggttgaggattggtgttctgttt

SEQ ID NO: 4946920 - DNA, 25 bp, Homo sapien
cccgagtcacaggtatttcagtgtc

SEQ ID NO: 4946921 - DNA, 25 bp, Homo sapien
tgtgtctgggaatgaaggttgagga

SEQ ID NO: 4946922 - DNA, 25 bp, Homo sapien
tttcacaaacggtgagaaccgttgc

SEQ ID NO: 4946923 - DNA, 25 bp, Homo sapien
ctttcacaaacggtgagaaccgttg

SEQ ID NO: 4946924 - DNA, 25 bp, Homo sapien
ttcacaaacggtgagaaccgttgca

SEQ ID NO: 4946925 - DNA, 25 bp, Homo sapien
tcacaaacggtgagaaccgttgcat

SEQ ID NO: 4946926 - DNA, 25 bp, Homo sapien
gttctcagtttcaaactcttgttcc

SEQ ID NO: 4946927 - DNA, 25 bp, Homo sapien
cagttctcagtttcaaactcttgtt

SEQ ID NO: 4946928 - DNA, 25 bp, Homo sapien
agttctcagtttcaaactcttgttc

SEQ ID NO: 4946929 - DNA, 25 bp, Homo sapien
tcagttctcagtttcaaactcttgt

SEQ ID NO: 4946930 - DNA, 25 bp, Homo sapien
ctcaaagttttgcagggctagggag

SEQ ID NO: 4946931 - DNA, 25 bp, Homo sapien
tcaaagttttgcagggctagggagg

SEQ ID NO: 4946932 - DNA, 25 bp, Homo sapien
actcaaagttttgcagggctaggga

SEQ ID NO: 4946933 - DNA, 25 bp, Homo sapien
tgtgcaccagaagtgggtaccagcc

SEQ ID NO: 4946934 - DNA, 25 bp, Homo sapien
tctgtgcaccagaagtgggtaccag

SEQ ID NO: 4946935 - DNA, 25 bp, Homo sapien
ttatgtccaactcgtccaaaagctc

SEQ ID NO: 4946936 - DNA, 25 bp, Homo sapien
tgcaaatacactcctatacttgagg

SEQ ID NO: 4946937 - DNA, 25 bp, Homo sapien
aaagacacttcagcttttgccgcaa

SEQ ID NO: 4946938 - DNA, 25 bp, Homo sapien
gttcatcagcgtcaactacatcctt

SEQ ID NO: 4946939 - DNA, 25 bp, Homo sapien
tacatccttccgcagttcctggtgc

SEQ ID NO: 4946940 - DNA, 25 bp, Homo sapien
tctgttctgggatgcctgtctggcc

SEQ ID NO: 4946941 - DNA, 25 bp, Homo sapien
tcaaaatatggactgagaggaagag

SEQ ID NO: 4946942 - DNA, 25 bp, Homo sapien
tttgtcacaggggacattaagtaag

SEQ ID NO: 4946943 - DNA, 25 bp, Homo sapien
gaagagagtttgtcacaggggacat

SEQ ID NO: 4946944 - DNA, 25 bp, Homo sapien
gtcaaaatatggactgagaggaaga

SEQ ID NO: 4946945 - DNA, 25 bp, Homo sapien
tgcctcacggtctgtctctcatcct

SEQ ID NO: 4946946 - DNA, 25 bp, Homo sapien
ctgcctcacggtctgtctctcatcc

SEQ ID NO: 4946947 - DNA, 25 bp, Homo sapien
caaatataacaagggacagaaatca

SEQ ID NO: 4946948 - DNA, 25 bp, Homo sapien
aataagggcgaatgggttgcacaag

SEQ ID NO: 4946949 - DNA, 25 bp, Homo sapien
cacaaggtcactatagaagtattaa

SEQ ID NO: 4946950 - DNA, 25 bp, Homo sapien
attttagagagagcatgttatggac

SEQ ID NO: 4946951 - DNA, 25 bp, Homo sapien
tgtctgtgacatttaccgctcaact

SEQ ID NO: 4946952 - DNA, 25 bp, Homo sapien
gtctgtgacatttaccgctcaactt

SEQ ID NO: 4946953 - DNA, 25 bp, Homo sapien
catgtctgtgacatttaccgctcaa

SEQ ID NO: 4946954 - DNA, 25 bp, Homo sapien
ctgtgacatttaccgctcaacttct

SEQ ID NO: 4946955 - DNA, 25 bp, Homo sapien
gtccaagacagcatgattccagagg

SEQ ID NO: 4946956 - DNA, 25 bp, Homo sapien
ggtccaagacagcatgattccagag

SEQ ID NO: 4946957 - DNA, 25 bp, Homo sapien
tccaagacagcatgattccagaggc

SEQ ID NO: 4946958 - DNA, 25 bp, Homo sapien
tcatccatcttttgaagaggtgtta

SEQ ID NO: 4946959 - DNA, 25 bp, Homo sapien
tgttaaattgcccttttggcgtgtc

SEQ ID NO: 4946960 - DNA, 25 bp, Homo sapien
tcttttgaagaggtgttaaattgcc

SEQ ID NO: 4946961 - DNA, 25 bp, Homo sapien
tccatcttttgaagaggtgttaaat

SEQ ID NO: 4946962 - DNA, 25 bp, Homo sapien
caattaacacgcgatgtggacctcc

SEQ ID NO: 4946963 - DNA, 25 bp, Homo sapien
tctactaggcttctgctgcaaggtg

SEQ ID NO: 4946964 - DNA, 25 bp, Homo sapien
caatgcgtataggaggcagacagcc

SEQ ID NO: 4946965 - DNA, 25 bp, Homo sapien
tgcaatcatagtgcgggcctcagcc

SEQ ID NO: 4946966 - DNA, 25 bp, Homo sapien
aaatggctggttgcacaccttgacc

SEQ ID NO: 4946967 - DNA, 25 bp, Homo sapien
cacgggaatgtggactgtttctgat

SEQ ID NO: 4946968 - DNA, 25 bp, Homo sapien
gttgatccgctctggtgaaaatccc

SEQ ID NO: 4946969 - DNA, 25 bp, Homo sapien
gatgctttcgtctaaccgggatgta

SEQ ID NO: 4946970 - DNA, 25 bp, Homo sapien
ttgcagctggaggtatgatggggct

SEQ ID NO: 4946971 - DNA, 25 bp, Homo sapien
gtctttgcagctggaggtatgatgg

SEQ ID NO: 4946972 - DNA, 25 bp, Homo sapien
cagctggaggtatgatggggctcat

SEQ ID NO: 4946973 - DNA, 25 bp, Homo sapien
tctttgcagctggaggtatgatggg

SEQ ID NO: 4946974 - DNA, 25 bp, Homo sapien
cacagacgagtgaagtaagccatcc

SEQ ID NO: 4946975 - DNA, 25 bp, Homo sapien
tagcaccgtgtgtttgtcatcgaga

SEQ ID NO: 4946976 - DNA, 25 bp, Homo sapien
cagtctgtaggtgaaaatgtgtccc

SEQ ID NO: 4946977 - DNA, 25 bp, Homo sapien
cattttgccgaaagtggtagtctcc

SEQ ID NO: 4946978 - DNA, 25 bp, Homo sapien
gaaacagtaggccatgacaaacagc

SEQ ID NO: 4946979 - DNA, 25 bp, Homo sapien
tagcgggcaaggttctcaatgcaga

SEQ ID NO: 4946980 - DNA, 25 bp, Homo sapien
taagtcctcagtaagggcatggaac

SEQ ID NO: 4946981 - DNA, 25 bp, Homo sapien
cccattggttagaatacagagctcc

SEQ ID NO: 4946982 - DNA, 25 bp, Homo sapien
tacaaccaggtaagacatttggttc

SEQ ID NO: 4946983 - DNA, 25 bp, Homo sapien
aggaagtgaagtcacaatcactggg

SEQ ID NO: 4946984 - DNA, 25 bp, Homo sapien
ccagggtggttctacaaagcgtgtc

SEQ ID NO: 4946985 - DNA, 25 bp, Homo sapien
aagcgtgtcttcaggttcggattct

SEQ ID NO: 4946986 - DNA, 25 bp, Homo sapien
tggaatggcaatcagggtgcgagac

SEQ ID NO: 4946987 - DNA, 25 bp, Homo sapien
gaatggcaatcagggtgcgagacat

SEQ ID NO: 4946988 - DNA, 25 bp, Homo sapien
aggctggaatggcaatcagggtgcg

SEQ ID NO: 4946989 - DNA, 25 bp, Homo sapien
gctggaatggcaatcagggtgcgag

SEQ ID NO: 4946990 - DNA, 25 bp, Homo sapien
caggctgaattcttgatggagaaca

SEQ ID NO: 4946991 - DNA, 25 bp, Homo sapien
gaaaatcctactggttttgcaggca

SEQ ID NO: 4946992 - DNA, 25 bp, Homo sapien
cttgcattgggtaagatctaacaat

SEQ ID NO: 4946993 - DNA, 25 bp, Homo sapien
gattctctttgaactacaggctgaa

SEQ ID NO: 4946994 - DNA, 25 bp, Homo sapien
gcatctggacagatgaacgaataga

SEQ ID NO: 4946995 - DNA, 25 bp, Homo sapien
gaaattgcccattcttgtttgtcat

SEQ ID NO: 4946996 - DNA, 25 bp, Homo sapien
tagataaatgaatgagcaggatgtg

SEQ ID NO: 4946997 - DNA, 25 bp, Homo sapien
gcaggatgtgaaattgcccattctt

SEQ ID NO: 4946998 - DNA, 25 bp, Homo sapien
tgcagcggtctgtttccttccaagt

SEQ ID NO: 4946999 - DNA, 25 bp, Homo sapien
gttgattcagggagtctacagtgtc

SEQ ID NO: 4947000 - DNA, 25 bp, Homo sapien
atatgttgattcagggagtctacag

SEQ ID NO: 4947001 - DNA, 25 bp, Homo sapien
tatgttgattcagggagtctacagt

SEQ ID NO: 4947002 - DNA, 25 bp, Homo sapien
gattcagggagtctacagtgtccat

SEQ ID NO: 4947003 - DNA, 25 bp, Homo sapien
tctgtggtcgggtttggagtaacta

SEQ ID NO: 4947004 - DNA, 25 bp, Homo sapien
caggagcttgcccataatgaggaag

SEQ ID NO: 4947005 - DNA, 25 bp, Homo sapien
caagctttatcatgccctgaaggca

SEQ ID NO: 4947006 - DNA, 25 bp, Homo sapien
caagtcaaaggaggatagggcagga

SEQ ID NO: 4947007 - DNA, 25 bp, Homo sapien
gctccgggtttctccttgaagatag

SEQ ID NO: 4947008 - DNA, 25 bp, Homo sapien
cacggctccgggtttctccttgaag

SEQ ID NO: 4947009 - DNA, 25 bp, Homo sapien
cggctccgggtttctccttgaagat

SEQ ID NO: 4947010 - DNA, 25 bp, Homo sapien
ggctccgggtttctccttgaagata

SEQ ID NO: 4947011 - DNA, 25 bp, Homo sapien
ctgagtgccctttgccgtctgcatc

SEQ ID NO: 4947012 - DNA, 25 bp, Homo sapien
gttgacttgtccgacaaagagatgg

SEQ ID NO: 4947013 - DNA, 25 bp, Homo sapien
catccagggaacctaaggactgaag

SEQ ID NO: 4947014 - DNA, 25 bp, Homo sapien
aaagttgacttgtccgacaaagaga

SEQ ID NO: 4947015 - DNA, 25 bp, Homo sapien
ggagtcccatgactgttgtcagcca

SEQ ID NO: 4947016 - DNA, 25 bp, Homo sapien
gatgtatacacagcaaggatgatgc

SEQ ID NO: 4947017 - DNA, 25 bp, Homo sapien
caataagccaatcatgggagtccca

SEQ ID NO: 4947018 - DNA, 25 bp, Homo sapien
cagccatgtagttaggagggaccca

SEQ ID NO: 4947019 - DNA, 25 bp, Homo sapien
tctggacatttttgtgtctgccatc

SEQ ID NO: 4947020 - DNA, 25 bp, Homo sapien
gacaatgatgtatcagtcttctttt

SEQ ID NO: 4947021 - DNA, 25 bp, Homo sapien
tggacatttttgtgtctgccatcct

SEQ ID NO: 4947022 - DNA, 25 bp, Homo sapien
gagagacaatgatgtatcagtcttc

SEQ ID NO: 4947023 - DNA, 25 bp, Homo sapien
tggggaggtagactgaggagaggct

SEQ ID NO: 4947024 - DNA, 25 bp, Homo sapien
ctggggaggtagactgaggagaggc

SEQ ID NO: 4947025 - DNA, 25 bp, Homo sapien
ttcacagccttaatctcatgaattt

SEQ ID NO: 4947026 - DNA, 25 bp, Homo sapien
tctgtggacccctgagataattcat

SEQ ID NO: 4947027 - DNA, 25 bp, Homo sapien
acagccttaatctcatgaatttctg

SEQ ID NO: 4947028 - DNA, 25 bp, Homo sapien
atttctgtttccctatcctcaccac

SEQ ID NO: 4947029 - DNA, 25 bp, Homo sapien
ccgttctgcagatataggatctcag

SEQ ID NO: 4947030 - DNA, 25 bp, Homo sapien
ggccagaccccagacttgttacatt

SEQ ID NO: 4947031 - DNA, 25 bp, Homo sapien
gccttgcaccatgtgtatatgctga

SEQ ID NO: 4947032 - DNA, 25 bp, Homo sapien
cattcatttggaagtgccttgcacc

SEQ ID NO: 4947033 - DNA, 25 bp, Homo sapien
caagatctagtgtatttcccatcat

SEQ ID NO: 4947034 - DNA, 25 bp, Homo sapien
catcatcaacttgctcttcaatatg

SEQ ID NO: 4947035 - DNA, 25 bp, Homo sapien
tcccatcatcaacttgctcttcaat

SEQ ID NO: 4947036 - DNA, 25 bp, Homo sapien
catcaacttgctcttcaatatgtgt

SEQ ID NO: 4947037 - DNA, 25 bp, Homo sapien
aataaacaccgaacgaatgggtatg

SEQ ID NO: 4947038 - DNA, 25 bp, Homo sapien
aacaccgaacgaatgggtatgattt

SEQ ID NO: 4947039 - DNA, 25 bp, Homo sapien
ataaacaccgaacgaatgggtatga

SEQ ID NO: 4947040 - DNA, 25 bp, Homo sapien
taaacaccgaacgaatgggtatgat

SEQ ID NO: 4947041 - DNA, 25 bp, Homo sapien
ccgttcaggtttttcattcgtccag

SEQ ID NO: 4947042 - DNA, 25 bp, Homo sapien
cccgctattggctacccgttcaggt

SEQ ID NO: 4947043 - DNA, 25 bp, Homo sapien
cattcgtccagtcatttcggtatgt

SEQ ID NO: 4947044 - DNA, 25 bp, Homo sapien
ttcggtatgtgctgtaagccttaca

SEQ ID NO: 4947045 - DNA, 25 bp, Homo sapien
ccctggaaaccatgtacttgttgat

SEQ ID NO: 4947046 - DNA, 25 bp, Homo sapien
cacagtgaaatctttaaggggaagc

SEQ ID NO: 4947047 - DNA, 25 bp, Homo sapien
aggaccaagcccctggaaaccatgt

SEQ ID NO: 4947048 - DNA, 25 bp, Homo sapien
ttataaaataacacagtgaaatctt

SEQ ID NO: 4947049 - DNA, 25 bp, Homo sapien
gaagctcaagttgcatgtaactcct

SEQ ID NO: 4947050 - DNA, 25 bp, Homo sapien
taactcctgtaactgatgggaaggg

SEQ ID NO: 4947051 - DNA, 25 bp, Homo sapien
tactgtgggtaactgagtgctctca

SEQ ID NO: 4947052 - DNA, 25 bp, Homo sapien
tcgcctggatgagggagacgtttcc

SEQ ID NO: 4947053 - DNA, 25 bp, Homo sapien
cttccaattgagaaaatcttgagga

SEQ ID NO: 4947054 - DNA, 25 bp, Homo sapien
ccaattgagaaaatcttgaggagac

SEQ ID NO: 4947055 - DNA, 25 bp, Homo sapien
catgcagaagtcgactgtcttcttt

SEQ ID NO: 4947056 - DNA, 25 bp, Homo sapien
tagatttgcatgcagaagtcgactg

SEQ ID NO: 4947057 - DNA, 25 bp, Homo sapien
gctcactcgtgcagcaatctctcga

SEQ ID NO: 4947058 - DNA, 25 bp, Homo sapien
ctcgtgcagcaatctctcgagtcca

SEQ ID NO: 4947059 - DNA, 25 bp, Homo sapien
ccattgctcactcgtgcagcaatct

SEQ ID NO: 4947060 - DNA, 25 bp, Homo sapien
gtgcagcaatctctcgagtccagaa

SEQ ID NO: 4947061 - DNA, 25 bp, Homo sapien
tgtgtgaacgtgatggtcggagctg

SEQ ID NO: 4947062 - DNA, 25 bp, Homo sapien
ctgtgtgaacgtgatggtcggagct

SEQ ID NO: 4947063 - DNA, 25 bp, Homo sapien
gtgtgaacgtgatggtcggagctga

SEQ ID NO: 4947064 - DNA, 25 bp, Homo sapien
tgtgaacgtgatggtcggagctgaa

SEQ ID NO: 4947065 - DNA, 25 bp, Homo sapien
gattccagagaaggttcaaaaatga

SEQ ID NO: 4947066 - DNA, 25 bp, Homo sapien
aaaatgccgattccagagaaggttc

SEQ ID NO: 4947067 - DNA, 25 bp, Homo sapien
tgccgattccagagaaggttcaaaa

SEQ ID NO: 4947068 - DNA, 25 bp, Homo sapien
agccaaaatgccgattccagagaag

SEQ ID NO: 4947069 - DNA, 25 bp, Homo sapien
tcttttgatgccgatgggtcatcgg

SEQ ID NO: 4947070 - DNA, 25 bp, Homo sapien
gaatcttttgatgccgatgggtcat

SEQ ID NO: 4947071 - DNA, 25 bp, Homo sapien
ccgatgggtcatcggagctaatcat

SEQ ID NO: 4947072 - DNA, 25 bp, Homo sapien
gatgccgatgggtcatcggagctaa

SEQ ID NO: 4947073 - DNA, 25 bp, Homo sapien
gggttgaatagtgcccctgcaaaat

SEQ ID NO: 4947074 - DNA, 25 bp, Homo sapien
tccaactttccataagctgtactgg

SEQ ID NO: 4947075 - DNA, 25 bp, Homo sapien
caactttccataagctgtactgggt

SEQ ID NO: 4947076 - DNA, 25 bp, Homo sapien
agctgtactgggttgaatagtgccc

SEQ ID NO: 4947077 - DNA, 25 bp, Homo sapien
ctgcaggcttgaccagacctggtgt

SEQ ID NO: 4947078 - DNA, 25 bp, Homo sapien
tgcaggcttgaccagacctggtgtt

SEQ ID NO: 4947079 - DNA, 25 bp, Homo sapien
caggcttgaccagacctggtgttct

SEQ ID NO: 4947080 - DNA, 25 bp, Homo sapien
gcttgaccagacctggtgttctggg

SEQ ID NO: 4947081 - DNA, 25 bp, Homo sapien
ttgggagcccaaacagtcaagtggc

SEQ ID NO: 4947082 - DNA, 25 bp, Homo sapien
tcgaagatggcaggtggtaactccg

SEQ ID NO: 4947083 - DNA, 25 bp, Homo sapien
gtaactccgagcctttgagcaggga

SEQ ID NO: 4947084 - DNA, 25 bp, Homo sapien
gaatattctctggtgatggacacag

SEQ ID NO: 4947085 - DNA, 25 bp, Homo sapien
agagtggacgttggccaagaactca

SEQ ID NO: 4947086 - DNA, 25 bp, Homo sapien
gaccagatgtgcagttcggaagagt

SEQ ID NO: 4947087 - DNA, 25 bp, Homo sapien
catgcaagttgggagaccagatgtg

SEQ ID NO: 4947088 - DNA, 25 bp, Homo sapien
tcggaagagtggacgttggccaaga

SEQ ID NO: 4947089 - DNA, 25 bp, Homo sapien
ctctgctaccatcttcagcttccaa

SEQ ID NO: 4947090 - DNA, 25 bp, Homo sapien
ctgctaccatcttcagcttccaatt

SEQ ID NO: 4947091 - DNA, 25 bp, Homo sapien
tctgctaccatcttcagcttccaat

SEQ ID NO: 4947092 - DNA, 25 bp, Homo sapien
attactgagactaagtatcaccatt

SEQ ID NO: 4947093 - DNA, 25 bp, Homo sapien
agcaattactgagactaagtatcac

SEQ ID NO: 4947094 - DNA, 25 bp, Homo sapien
aaagcaattactgagactaagtatc

SEQ ID NO: 4947095 - DNA, 25 bp, Homo sapien
caattactgagactaagtatcacca

SEQ ID NO: 4947096 - DNA, 25 bp, Homo sapien
gaagataattgtcacaggtggtgca

SEQ ID NO: 4947097 - DNA, 25 bp, Homo sapien
tgggcggaagataattgtcacaggt

SEQ ID NO: 4947098 - DNA, 25 bp, Homo sapien
catgtgggcggaagataattgtcac

SEQ ID NO: 4947099 - DNA, 25 bp, Homo sapien
tgcatgtgggcggaagataattgtc

SEQ ID NO: 4947100 - DNA, 25 bp, Homo sapien
aaagtaggggctaaatatgcacgtg

SEQ ID NO: 4947101 - DNA, 25 bp, Homo sapien
aatatgcacgtgttttataacttct

SEQ ID NO: 4947102 - DNA, 25 bp, Homo sapien
ttcgttccactatttagcttgtaga

SEQ ID NO: 4947103 - DNA, 25 bp, Homo sapien
tatttggctcctttcgttccactat

SEQ ID NO: 4947104 - DNA, 25 bp, Homo sapien
ttgactgctgattccttggtgttcc

SEQ ID NO: 4947105 - DNA, 25 bp, Homo sapien
tgttctgagagactgagctcgtttg

SEQ ID NO: 4947106 - DNA, 25 bp, Homo sapien
tgagctcgtttgactgctgattcct

SEQ ID NO: 4947107 - DNA, 25 bp, Homo sapien
gagactgagctcgtttgactgctga

SEQ ID NO: 4947108 - DNA, 25 bp, Homo sapien
tcttttcagatgccccatgttgtat

SEQ ID NO: 4947109 - DNA, 25 bp, Homo sapien
gaagaccaggcatctattttggttc

SEQ ID NO: 4947110 - DNA, 25 bp, Homo sapien
caggtaatttagttgaagaccaggc

SEQ ID NO: 4947111 - DNA, 25 bp, Homo sapien
tgaacaggtaatttagttgaagacc

SEQ ID NO: 4947112 - DNA, 25 bp, Homo sapien
tccagcgctggcctccttagctatg

SEQ ID NO: 4947113 - DNA, 25 bp, Homo sapien
tatgtcgctccctgttgcctgtttc

SEQ ID NO: 4947114 - DNA, 25 bp, Homo sapien
agtcccttgtatgccctgtatttgt

SEQ ID NO: 4947115 - DNA, 25 bp, Homo sapien
ccttgtatgccctgtatttgtgcca

SEQ ID NO: 4947116 - DNA, 25 bp, Homo sapien
ttgaaatccaccacagaaggctcac

SEQ ID NO: 4947117 - DNA, 25 bp, Homo sapien
cttgaaatccaccacagaaggctca

SEQ ID NO: 4947118 - DNA, 25 bp, Homo sapien
ctccacggagggcactctgttcgtt

SEQ ID NO: 4947119 - DNA, 25 bp, Homo sapien
cacggagggcactctgttcgtttcc

SEQ ID NO: 4947120 - DNA, 25 bp, Homo sapien
tccacggagggcactctgttcgttt

SEQ ID NO: 4947121 - DNA, 25 bp, Homo sapien
cggagggcactctgttcgtttcctc

SEQ ID NO: 4947122 - DNA, 25 bp, Homo sapien
ttttgagcctgtgccccaaggtgat

SEQ ID NO: 4947123 - DNA, 25 bp, Homo sapien
taaattacctagttgcgggcagttc

SEQ ID NO: 4947124 - DNA, 25 bp, Homo sapien
tctgtaaactcagggtagacttggg

SEQ ID NO: 4947125 - DNA, 25 bp, Homo sapien
aaatggactgatatacttgctgagc

SEQ ID NO: 4947126 - DNA, 25 bp, Homo sapien
ttccttgcgagcaaggtgtccatcc

SEQ ID NO: 4947127 - DNA, 25 bp, Homo sapien
tgccttccttgcgagcaaggtgtcc

SEQ ID NO: 4947128 - DNA, 25 bp, Homo sapien
ccttccttgcgagcaaggtgtccat

SEQ ID NO: 4947129 - DNA, 25 bp, Homo sapien
ccttgcgagcaaggtgtccatccac

SEQ ID NO: 4947130 - DNA, 25 bp, Homo sapien
ccagcaagatcagctggtgcaccag

SEQ ID NO: 4947131 - DNA, 25 bp, Homo sapien
ttctcctcctctatatgcacactgc

SEQ ID NO: 4947132 - DNA, 25 bp, Homo sapien
atttatcacatctcctctcccgcca

SEQ ID NO: 4947133 - DNA, 25 bp, Homo sapien
gatttgtcatgatgcctgctgcttc

SEQ ID NO: 4947134 - DNA, 25 bp, Homo sapien
tcgcgttaaccacagcacttttact

SEQ ID NO: 4947135 - DNA, 25 bp, Homo sapien
gggcatgtgattcgcgttaaccaca

SEQ ID NO: 4947136 - DNA, 25 bp, Homo sapien
tctgggggcatgtgattcgcgttaa

SEQ ID NO: 4947137 - DNA, 25 bp, Homo sapien
taaatcccctttcctataggctgcc

SEQ ID NO: 4947138 - DNA, 25 bp, Homo sapien
tttttccaatgggattctgatattt

SEQ ID NO: 4947139 - DNA, 25 bp, Homo sapien
tcccgtctgtagaatttactctcaa

SEQ ID NO: 4947140 - DNA, 25 bp, Homo sapien
tatttttatatgtcccgtctgtaga

SEQ ID NO: 4947141 - DNA, 25 bp, Homo sapien
ttccaatgggattctgatattttta

SEQ ID NO: 4947142 - DNA, 25 bp, Homo sapien
ggatccccattttactccttgttga

SEQ ID NO: 4947143 - DNA, 25 bp, Homo sapien
tgtttgccaagttttatcaacttct

SEQ ID NO: 4947144 - DNA, 25 bp, Homo sapien
tggtaccagagtctagtgtgtttgc

SEQ ID NO: 4947145 - DNA, 25 bp, Homo sapien
tcttggatagccagccttctgggat

SEQ ID NO: 4947146 - DNA, 25 bp, Homo sapien
taggatgtcattggagagatattca

SEQ ID NO: 4947147 - DNA, 25 bp, Homo sapien
aggatgtcattggagagatattcaa

SEQ ID NO: 4947148 - DNA, 25 bp, Homo sapien
ctaggatgtcattggagagatattc

SEQ ID NO: 4947149 - DNA, 25 bp, Homo sapien
ccatcgaatcactcaaaccagagca

SEQ ID NO: 4947150 - DNA, 25 bp, Homo sapien
ttaagtaaccatcgaatcactcaaa

SEQ ID NO: 4947151 - DNA, 25 bp, Homo sapien
aaccatcgaatcactcaaaccagag

SEQ ID NO: 4947152 - DNA, 25 bp, Homo sapien
gtaaccatcgaatcactcaaaccag

SEQ ID NO: 4947153 - DNA, 25 bp, Homo sapien
gcaacatagaggtgattggatactc

SEQ ID NO: 4947154 - DNA, 25 bp, Homo sapien
tgattggatactctgctctgagtct

SEQ ID NO: 4947155 - DNA, 25 bp, Homo sapien
tctcacacacgcaacatagaggtga

SEQ ID NO: 4947156 - DNA, 25 bp, Homo sapien
tgaaaaatgagtcctcctctaaatg

SEQ ID NO: 4947157 - DNA, 25 bp, Homo sapien
tcaggacaacttggacacactacac

SEQ ID NO: 4947158 - DNA, 25 bp, Homo sapien
tcataaggatgtggtgaaaatgcct

SEQ ID NO: 4947159 - DNA, 25 bp, Homo sapien
tcatcagtacacgaggcatgcgtca

SEQ ID NO: 4947160 - DNA, 25 bp, Homo sapien
gccttggaaagtactctctgctgct

SEQ ID NO: 4947161 - DNA, 25 bp, Homo sapien
gatgcaggagagatgtgtcatcata

SEQ ID NO: 4947162 - DNA, 25 bp, Homo sapien
tcattgggaaaaagcagacttggca

SEQ ID NO: 4947163 - DNA, 25 bp, Homo sapien
tcatgaattctgcatccgagattgc

SEQ ID NO: 4947164 - DNA, 25 bp, Homo sapien
attttcctgtatggacaaatgctgg

SEQ ID NO: 4947165 - DNA, 25 bp, Homo sapien
gatgatcagtaatccctgggagctc

SEQ ID NO: 4947166 - DNA, 25 bp, Homo sapien
tccattcacgtttaattggccaaca

SEQ ID NO: 4947167 - DNA, 25 bp, Homo sapien
acaatggtgaaggaacgcgtcaact

SEQ ID NO: 4947168 - DNA, 25 bp, Homo sapien
agtcaaatggcgaagcctgacaatg

SEQ ID NO: 4947169 - DNA, 25 bp, Homo sapien
gtgaaggaacgcgtcaacttctctc

SEQ ID NO: 4947170 - DNA, 25 bp, Homo sapien
ttctagtagtgcattgcagccttca

SEQ ID NO: 4947171 - DNA, 25 bp, Homo sapien
tctagtagtgcattgcagccttcac

SEQ ID NO: 4947172 - DNA, 25 bp, Homo sapien
tgtttatttatctgaattactgtgc

SEQ ID NO: 4947173 - DNA, 25 bp, Homo sapien
atttctagtagtgcattgcagcctt

SEQ ID NO: 4947174 - DNA, 25 bp, Homo sapien
tgccgtccaatgctgcaggcacagt

SEQ ID NO: 4947175 - DNA, 25 bp, Homo sapien
tcggctgccgtccaatgctgcaggc

SEQ ID NO: 4947176 - DNA, 25 bp, Homo sapien
gtctcggctgccgtccaatgctgca

SEQ ID NO: 4947177 - DNA, 25 bp, Homo sapien
cgagtctcggctgccgtccaatgct

SEQ ID NO: 4947178 - DNA, 25 bp, Homo sapien
tctcaggttttgtctccactctcat

SEQ ID NO: 4947179 - DNA, 25 bp, Homo sapien
catatggctcttgctaggtggtagg

SEQ ID NO: 4947180 - DNA, 25 bp, Homo sapien
tcttgctaggtggtaggccttctcc

SEQ ID NO: 4947181 - DNA, 25 bp, Homo sapien
ttctgtgcaatgatgctccatatgg

SEQ ID NO: 4947182 - DNA, 25 bp, Homo sapien
cctgaaggatgagccccctcagctt

SEQ ID NO: 4947183 - DNA, 25 bp, Homo sapien
gcctgaaggatgagccccctcagct

SEQ ID NO: 4947184 - DNA, 25 bp, Homo sapien
ggtgaatgccagggtagcagaggcc

SEQ ID NO: 4947185 - DNA, 25 bp, Homo sapien
gtgaatgccagggtagcagaggccc

SEQ ID NO: 4947186 - DNA, 25 bp, Homo sapien
cttctctgacttgacttgtgatggt

SEQ ID NO: 4947187 - DNA, 25 bp, Homo sapien
tctctgacttgacttgtgatggtga

SEQ ID NO: 4947188 - DNA, 25 bp, Homo sapien
gcacctcgactcctcgactgttgtg

SEQ ID NO: 4947189 - DNA, 25 bp, Homo sapien
tcgactcctcgactgttgtgtgcca

SEQ ID NO: 4947190 - DNA, 25 bp, Homo sapien
cctcgactgttgtgtgccagtgatt

SEQ ID NO: 4947191 - DNA, 25 bp, Homo sapien
cacctgtgttatttacctttctact

SEQ ID NO: 4947192 - DNA, 25 bp, Homo sapien
ctgacgtctgtgctgacagtgactt

SEQ ID NO: 4947193 - DNA, 25 bp, Homo sapien
gctgacagtgactttcaggggccat

SEQ ID NO: 4947194 - DNA, 25 bp, Homo sapien
tagtgtagacacttgtgttatcctg

SEQ ID NO: 4947195 - DNA, 25 bp, Homo sapien
tgtgttatcctgaaactgacgtctg

SEQ ID NO: 4947196 - DNA, 25 bp, Homo sapien
tgttcagcgccctggaggtggaact

SEQ ID NO: 4947197 - DNA, 25 bp, Homo sapien
ctccaaggagcgtggacgcagtaga

SEQ ID NO: 4947198 - DNA, 25 bp, Homo sapien
gctgatgtggtatcactagtttgaa

SEQ ID NO: 4947199 - DNA, 25 bp, Homo sapien
tccctgactcggcagttctttgcag

SEQ ID NO: 4947200 - DNA, 25 bp, Homo sapien
cattactaaggaaacccatggcggg

SEQ ID NO: 4947201 - DNA, 25 bp, Homo sapien
gaagggagtatctgcacaggtaaca

SEQ ID NO: 4947202 - DNA, 25 bp, Homo sapien
catggcgggtaggtcaatccctcct

SEQ ID NO: 4947203 - DNA, 25 bp, Homo sapien
tgtccagggtaggatttgctcagcc

SEQ ID NO: 4947204 - DNA, 25 bp, Homo sapien
gcagttggtttgttactgcttgctg

SEQ ID NO: 4947205 - DNA, 25 bp, Homo sapien
tgttactgcttgctgttatcaaaac

SEQ ID NO: 4947206 - DNA, 25 bp, Homo sapien
acttttctggcagctaagctgctct

SEQ ID NO: 4947207 - DNA, 25 bp, Homo sapien
aacttttctggcagctaagctgctc

SEQ ID NO: 4947208 - DNA, 25 bp, Homo sapien
caatctaaggccagacttcaaggaa

SEQ ID NO: 4947209 - DNA, 25 bp, Homo sapien
gagaaacctcgccaattgcatgtca

SEQ ID NO: 4947210 - DNA, 25 bp, Homo sapien
catattgtcatgagggaaaccaagc

SEQ ID NO: 4947211 - DNA, 25 bp, Homo sapien
tatagccacactagcacttgctggg

SEQ ID NO: 4947212 - DNA, 25 bp, Homo sapien
gttcttgtatacaaagaacacatga

SEQ ID NO: 4947213 - DNA, 25 bp, Homo sapien
gaattataatctggaatgttcttgt

SEQ ID NO: 4947214 - DNA, 25 bp, Homo sapien
agaacacatgaaattttgccatggg

SEQ ID NO: 4947215 - DNA, 25 bp, Homo sapien
cacatgaaattttgccatgggttgc

SEQ ID NO: 4947216 - DNA, 25 bp, Homo sapien
tgctgctggccaggtggaccttcct

SEQ ID NO: 4947217 - DNA, 25 bp, Homo sapien
tggccaggtggaccttcctgcgcat

SEQ ID NO: 4947218 - DNA, 25 bp, Homo sapien
ctggccaggtggaccttcctgcgca

SEQ ID NO: 4947219 - DNA, 25 bp, Homo sapien
tgctggccaggtggaccttcctgcg

SEQ ID NO: 4947220 - DNA, 25 bp, Homo sapien
tgcatctccccagaaggctagctcc

SEQ ID NO: 4947221 - DNA, 25 bp, Homo sapien
aaggctagctccagtgcactgggcc

SEQ ID NO: 4947222 - DNA, 25 bp, Homo sapien
ccagaaggctagctccagtgcactg

SEQ ID NO: 4947223 - DNA, 25 bp, Homo sapien
atctccccagaaggctagctccagt

SEQ ID NO: 4947224 - DNA, 25 bp, Homo sapien
ccacagccggccttcacttttctta

SEQ ID NO: 4947225 - DNA, 25 bp, Homo sapien
cagccggccttcacttttcttacat

SEQ ID NO: 4947226 - DNA, 25 bp, Homo sapien
ttttcttacattgccagaaagcaaa

SEQ ID NO: 4947227 - DNA, 25 bp, Homo sapien
tttctaacatattcgggaaaatatg

SEQ ID NO: 4947228 - DNA, 25 bp, Homo sapien
tcaaactttagtgtgcctaatatca

SEQ ID NO: 4947229 - DNA, 25 bp, Homo sapien
ttctcagggaccacacttagcacag

SEQ ID NO: 4947230 - DNA, 25 bp, Homo sapien
tttagtgtgcctaatatcacctggg

SEQ ID NO: 4947231 - DNA, 25 bp, Homo sapien
tctcagggaccacacttagcacagt

SEQ ID NO: 4947232 - DNA, 25 bp, Homo sapien
tgtgcctcacgcaagttatgagaac

SEQ ID NO: 4947233 - DNA, 25 bp, Homo sapien
catgtccacatgtcgaattcacacg

SEQ ID NO: 4947234 - DNA, 25 bp, Homo sapien
cagaagaagcgcatagcatgtccac

SEQ ID NO: 4947235 - DNA, 25 bp, Homo sapien
gaaggtagattagactgtgcctcac

SEQ ID NO: 4947236 - DNA, 25 bp, Homo sapien
ggcactcctggtatctggtactttg

SEQ ID NO: 4947237 - DNA, 25 bp, Homo sapien
caaaatcaggtgtctgacatgccct

SEQ ID NO: 4947238 - DNA, 25 bp, Homo sapien
gagtcagacgatggtcccagatcca

SEQ ID NO: 4947239 - DNA, 25 bp, Homo sapien
tttcagtttctacatgggcactcct

SEQ ID NO: 4947240 - DNA, 25 bp, Homo sapien
cagaagaccagtcaccctctattgg

SEQ ID NO: 4947241 - DNA, 25 bp, Homo sapien
cccttgacagaagaccagtcaccct

SEQ ID NO: 4947242 - DNA, 25 bp, Homo sapien
ttgacagaagaccagtcaccctcta

SEQ ID NO: 4947243 - DNA, 25 bp, Homo sapien
agaagaccagtcaccctctattggg

SEQ ID NO: 4947244 - DNA, 25 bp, Homo sapien
ctgtgacctccgtagactagcaggt

SEQ ID NO: 4947245 - DNA, 25 bp, Homo sapien
tagcaggtccctgataataacaccc

SEQ ID NO: 4947246 - DNA, 25 bp, Homo sapien
tccgtagactagcaggtccctgata

SEQ ID NO: 4947247 - DNA, 25 bp, Homo sapien
gcaggtccctgataataacacccat

SEQ ID NO: 4947248 - DNA, 25 bp, Homo sapien
aaagcatgcggactgtggagctgcc

SEQ ID NO: 4947249 - DNA, 25 bp, Homo sapien
tgtcgcagacacctgggacgagagt

SEQ ID NO: 4947250 - DNA, 25 bp, Homo sapien
tctcagagagttcatgtgcatccag

SEQ ID NO: 4947251 - DNA, 25 bp, Homo sapien
tcggaacagatgctcagccgagagg

SEQ ID NO: 4947252 - DNA, 25 bp, Homo sapien
ctgctgactgagattatagaattcc

SEQ ID NO: 4947253 - DNA, 25 bp, Homo sapien
cagtactttatgtctatctgctgac

SEQ ID NO: 4947254 - DNA, 25 bp, Homo sapien
cacctgttttctagtcttaatcttc

SEQ ID NO: 4947255 - DNA, 25 bp, Homo sapien
tccattctgcagattggcagtactt

SEQ ID NO: 4947256 - DNA, 25 bp, Homo sapien
cttcattaagccacagatttctcct

SEQ ID NO: 4947257 - DNA, 25 bp, Homo sapien
gggctaggatgtcaaaactggagac

SEQ ID NO: 4947258 - DNA, 25 bp, Homo sapien
gctaggatgtcaaaactggagacca

SEQ ID NO: 4947259 - DNA, 25 bp, Homo sapien
aggcttccctcaagatgtttgccaa

SEQ ID NO: 4947260 - DNA, 25 bp, Homo sapien
accaggagtgtcaacagagccaggc

SEQ ID NO: 4947261 - DNA, 25 bp, Homo sapien
gcaaagcaggaggctagggagtaag

SEQ ID NO: 4947262 - DNA, 25 bp, Homo sapien
agcaggaggctagggagtaagtttg

SEQ ID NO: 4947263 - DNA, 25 bp, Homo sapien
gcagtgcaaagcaggaggctaggga

SEQ ID NO: 4947264 - DNA, 25 bp, Homo sapien
ctgaagcagtgcaaagcaggaggct

SEQ ID NO: 4947265 - DNA, 25 bp, Homo sapien
tgactggcctcttgtaggtctacag

SEQ ID NO: 4947266 - DNA, 25 bp, Homo sapien
ggtctacagttgctaccttcactac

SEQ ID NO: 4947267 - DNA, 25 bp, Homo sapien
aaagtccaccgacagggatggcctc

SEQ ID NO: 4947268 - DNA, 25 bp, Homo sapien
tgaggttcctgtgaaaaagtccacc

SEQ ID NO: 4947269 - DNA, 25 bp, Homo sapien
tacccaaatctgctactgtgacctc

SEQ ID NO: 4947270 - DNA, 25 bp, Homo sapien
aggctgagctgctgtccgatcccat

SEQ ID NO: 4947271 - DNA, 25 bp, Homo sapien
tcatgctgcactgatttacccaaat

SEQ ID NO: 4947272 - DNA, 25 bp, Homo sapien
tctagtctgttctcatttcggctgc

SEQ ID NO: 4947273 - DNA, 25 bp, Homo sapien
tcccaggggctcatgctccttagta

SEQ ID NO: 4947274 - DNA, 25 bp, Homo sapien
ttgtcccaggggctcatgctcctta

SEQ ID NO: 4947275 - DNA, 25 bp, Homo sapien
cttctcccgcccagtttgtcccagg

SEQ ID NO: 4947276 - DNA, 25 bp, Homo sapien
cccagtttgtcccaggggctcatgc

SEQ ID NO: 4947277 - DNA, 25 bp, Homo sapien
cctgcccacagtcttttactctttt

SEQ ID NO: 4947278 - DNA, 25 bp, Homo sapien
ggtgttgttgctgcatcccctgccc

SEQ ID NO: 4947279 - DNA, 25 bp, Homo sapien
cagtcttttactcttttcaggtctt

SEQ ID NO: 4947280 - DNA, 25 bp, Homo sapien
gggttttcttgatggtgttgttgct

SEQ ID NO: 4947281 - DNA, 25 bp, Homo sapien
tgtaagatgaagacaagcttccttt

SEQ ID NO: 4947282 - DNA, 25 bp, Homo sapien
taagatgaagacaagcttcctttcc

SEQ ID NO: 4947283 - DNA, 25 bp, Homo sapien
gtaagatgaagacaagcttcctttc

SEQ ID NO: 4947284 - DNA, 25 bp, Homo sapien
aatggcaactcctcctgtagtcccc

SEQ ID NO: 4947285 - DNA, 25 bp, Homo sapien
ccaggccttgccctcaacacatggg

SEQ ID NO: 4947286 - DNA, 25 bp, Homo sapien
aaaggcatgtcatacatggcgcagg

SEQ ID NO: 4947287 - DNA, 25 bp, Homo sapien
catgtcatacatggcgcaggtgaga

SEQ ID NO: 4947288 - DNA, 25 bp, Homo sapien
ccagccccacgagtcaatcacctcc

SEQ ID NO: 4947289 - DNA, 25 bp, Homo sapien
tggaaagctgccagagactgtgcat

SEQ ID NO: 4947290 - DNA, 25 bp, Homo sapien
gagactgtgcattctttgtgctcac

SEQ ID NO: 4947291 - DNA, 25 bp, Homo sapien
gctgccagagactgtgcattctttg

SEQ ID NO: 4947292 - DNA, 25 bp, Homo sapien
accctggaaagctgccagagactgt

SEQ ID NO: 4947293 - DNA, 25 bp, Homo sapien
cccaagcacagaaggcaggactgtg

SEQ ID NO: 4947294 - DNA, 25 bp, Homo sapien
tcccgttcccggtggaattctgtga

SEQ ID NO: 4947295 - DNA, 25 bp, Homo sapien
attctgtgacccagtgaccgttcag

SEQ ID NO: 4947296 - DNA, 25 bp, Homo sapien
gaaggcaggactgtgggcgctgctc

SEQ ID NO: 4947297 - DNA, 25 bp, Homo sapien
gcttgtaaatgcaacttagcagact

SEQ ID NO: 4947298 - DNA, 25 bp, Homo sapien
ttcagacctgaagcttaaaacttgt

SEQ ID NO: 4947299 - DNA, 25 bp, Homo sapien
ttagcagactcagtaccagttaaag

SEQ ID NO: 4947300 - DNA, 25 bp, Homo sapien
gaagcttaaaacttgtctgtctgct

SEQ ID NO: 4947301 - DNA, 25 bp, Homo sapien
gctgtgtattttgcaatgtagaccc

SEQ ID NO: 4947302 - DNA, 25 bp, Homo sapien
gttgcagtttacattgaagtcgaca

SEQ ID NO: 4947303 - DNA, 25 bp, Homo sapien
gacccatcagaagtcaacatcctca

SEQ ID NO: 4947304 - DNA, 25 bp, Homo sapien
tgtgtactcagttggaatcagctaa

SEQ ID NO: 4947305 - DNA, 25 bp, Homo sapien
tttcttgtgaacttacagacctgat

SEQ ID NO: 4947306 - DNA, 25 bp, Homo sapien
tcttgtgaacttacagacctgatag

SEQ ID NO: 4947307 - DNA, 25 bp, Homo sapien
cttgtgaacttacagacctgatagt

SEQ ID NO: 4947308 - DNA, 25 bp, Homo sapien
gtgaacttacagacctgatagtttg

SEQ ID NO: 4947309 - DNA, 25 bp, Homo sapien
gcatcttcctcggattcatcaccag

SEQ ID NO: 4947310 - DNA, 25 bp, Homo sapien
cacagcatcttcctcggattcatca

SEQ ID NO: 4947311 - DNA, 25 bp, Homo sapien
ttctccagcaccattaccaaagcac

SEQ ID NO: 4947312 - DNA, 25 bp, Homo sapien
gcttctccagcaccattaccaaagc

SEQ ID NO: 4947313 - DNA, 25 bp, Homo sapien
tgcaataggccaggcagcagatgcc

SEQ ID NO: 4947314 - DNA, 25 bp, Homo sapien
ctgcaataggccaggcagcagatgc

SEQ ID NO: 4947315 - DNA, 25 bp, Homo sapien
aataggccaggcagcagatgccctc

SEQ ID NO: 4947316 - DNA, 25 bp, Homo sapien
caataggccaggcagcagatgccct

SEQ ID NO: 4947317 - DNA, 25 bp, Homo sapien
aatcgactgagaaaaacacttgctt

SEQ ID NO: 4947318 - DNA, 25 bp, Homo sapien
ggaagtttctgccaactctattaag

SEQ ID NO: 4947319 - DNA, 25 bp, Homo sapien
taaaatcccaacattgcgatatagc

SEQ ID NO: 4947320 - DNA, 25 bp, Homo sapien
gtgtattcaaaggaggtgaaccctc

SEQ ID NO: 4947321 - DNA, 25 bp, Homo sapien
caaattgcagtgtccgtctgagctg

SEQ ID NO: 4947322 - DNA, 25 bp, Homo sapien
tagaaactgcctgatgaaatgatgg

SEQ ID NO: 4947323 - DNA, 25 bp, Homo sapien
tccttgcgttgaactcttctcagca

SEQ ID NO: 4947324 - DNA, 25 bp, Homo sapien
caaatgcattgtgtagcactgagct

SEQ ID NO: 4947325 - DNA, 25 bp, Homo sapien
gacattgggcctgcacgttggcctc

SEQ ID NO: 4947326 - DNA, 25 bp, Homo sapien
ttcacgaggtgaacgcagcagcttc

SEQ ID NO: 4947327 - DNA, 25 bp, Homo sapien
ctctgggtcacaccgaggagacatt

SEQ ID NO: 4947328 - DNA, 25 bp, Homo sapien
atcttcttccactgaactaatgtca

SEQ ID NO: 4947329 - DNA, 25 bp, Homo sapien
caggtatcatcgcagctgggctggc

SEQ ID NO: 4947330 - DNA, 25 bp, Homo sapien
gctggcttctgagacgacttgcgga

SEQ ID NO: 4947331 - DNA, 25 bp, Homo sapien
ccacagtgaaggcagcgtgacacgg

SEQ ID NO: 4947332 - DNA, 25 bp, Homo sapien
gacttgcggagtcatccgtgacccc

SEQ ID NO: 4947333 - DNA, 25 bp, Homo sapien
ccggttccacaaaatgaaatctggc

SEQ ID NO: 4947334 - DNA, 25 bp, Homo sapien
tctcaccggttccacaaaatgaaat

SEQ ID NO: 4947335 - DNA, 25 bp, Homo sapien
ggcctctgagacatgcagcagcgcg

SEQ ID NO: 4947336 - DNA, 25 bp, Homo sapien
tgagacatgcagcagcgcgtggcct

SEQ ID NO: 4947337 - DNA, 25 bp, Homo sapien
gaacttgacttggaatccagaagca

SEQ ID NO: 4947338 - DNA, 25 bp, Homo sapien
catgaacttgacttggaatccagaa

SEQ ID NO: 4947339 - DNA, 25 bp, Homo sapien
ggaatccagaagcatcctcacaacc

SEQ ID NO: 4947340 - DNA, 25 bp, Homo sapien
tcatgaacttgacttggaatccaga

SEQ ID NO: 4947341 - DNA, 25 bp, Homo sapien
cgctgcaggaatcctctcatcatgc

SEQ ID NO: 4947342 - DNA, 25 bp, Homo sapien
cttgcaaaacgctgcaggaatcctc

SEQ ID NO: 4947343 - DNA, 25 bp, Homo sapien
aacgctgcaggaatcctctcatcat

SEQ ID NO: 4947344 - DNA, 25 bp, Homo sapien
ctcttgcaaaacgctgcaggaatcc

SEQ ID NO: 4947345 - DNA, 25 bp, Homo sapien
tctgtccattccacctgctggccaa

SEQ ID NO: 4947346 - DNA, 25 bp, Homo sapien
tgctggccaacagcactgctcccat

SEQ ID NO: 4947347 - DNA, 25 bp, Homo sapien
ccaacagcactgctcccatcaaggc

SEQ ID NO: 4947348 - DNA, 25 bp, Homo sapien
agcactgctcccatcaaggctgaag

SEQ ID NO: 4947349 - DNA, 25 bp, Homo sapien
gagagcatctaactgaaggtttcac

SEQ ID NO: 4947350 - DNA, 25 bp, Homo sapien
gggagagcatctaactgaaggtttc

SEQ ID NO: 4947351 - DNA, 25 bp, Homo sapien
ggagggagagcatctaactgaaggt

SEQ ID NO: 4947352 - DNA, 25 bp, Homo sapien
gagggagagcatctaactgaaggtt

SEQ ID NO: 4947353 - DNA, 25 bp, Homo sapien
tccatttcaatggtaccatctggga

SEQ ID NO: 4947354 - DNA, 25 bp, Homo sapien
catttcaatggtaccatctgggacc

SEQ ID NO: 4947355 - DNA, 25 bp, Homo sapien
tttcaatggtaccatctgggaccca

SEQ ID NO: 4947356 - DNA, 25 bp, Homo sapien
ttcttccatttcaatggtaccatct

SEQ ID NO: 4947357 - DNA, 25 bp, Homo sapien
taaacgccacaagatgcaggtgcag

SEQ ID NO: 4947358 - DNA, 25 bp, Homo sapien
gactcatggtgaacgcagacaggtg

SEQ ID NO: 4947359 - DNA, 25 bp, Homo sapien
tgcgagcaccacactacgctgtggg

SEQ ID NO: 4947360 - DNA, 25 bp, Homo sapien
tatgatcactatcgcataaacgcca

SEQ ID NO: 4947361 - DNA, 25 bp, Homo sapien
ctgaaggcgaggaacagaatgacac

SEQ ID NO: 4947362 - DNA, 25 bp, Homo sapien
tgaaggcgaggaacagaatgacaca

SEQ ID NO: 4947363 - DNA, 25 bp, Homo sapien
gaaggcgaggaacagaatgacacag

SEQ ID NO: 4947364 - DNA, 25 bp, Homo sapien
aaggcgaggaacagaatgacacagc

SEQ ID NO: 4947365 - DNA, 25 bp, Homo sapien
atttttaagcaaccactgcacataa

SEQ ID NO: 4947366 - DNA, 25 bp, Homo sapien
aatttttaagcaaccactgcacata

SEQ ID NO: 4947367 - DNA, 25 bp, Homo sapien
ctggagaagctagcaaccttagcaa

SEQ ID NO: 4947368 - DNA, 25 bp, Homo sapien
gcacatcgttcaagatcagctgtcc

SEQ ID NO: 4947369 - DNA, 25 bp, Homo sapien
tagcaactgcacatcgttcaagatc

SEQ ID NO: 4947370 - DNA, 25 bp, Homo sapien
gactccaactgtgcaagatggtggg

SEQ ID NO: 4947371 - DNA, 25 bp, Homo sapien
cataaaaaaagatgaaaggcacaat

SEQ ID NO: 4947372 - DNA, 25 bp, Homo sapien
taaaaaaagatgaaaggcacaatca

SEQ ID NO: 4947373 - DNA, 25 bp, Homo sapien
ataaaaaaagatgaaaggcacaatc

SEQ ID NO: 4947374 - DNA, 25 bp, Homo sapien
aaaaaaagatgaaaggcacaatcat

SEQ ID NO: 4947375 - DNA, 25 bp, Homo sapien
tttctgtttaactattagatttgtc

SEQ ID NO: 4947376 - DNA, 25 bp, Homo sapien
tctttctgtttaactattagatttg

SEQ ID NO: 4947377 - DNA, 25 bp, Homo sapien
ttctgtttaactattagatttgtca

SEQ ID NO: 4947378 - DNA, 25 bp, Homo sapien
tgtctttctgtttaactattagatt

SEQ ID NO: 4947379 - DNA, 25 bp, Homo sapien
tggagacgcagcctctcagaggtct

SEQ ID NO: 4947380 - DNA, 25 bp, Homo sapien
ttgtttccagacagcttcccaccag

SEQ ID NO: 4947381 - DNA, 25 bp, Homo sapien
aaatgtgagggtcgagcaagctgga

SEQ ID NO: 4947382 - DNA, 25 bp, Homo sapien
ggtctggtcatgcatccaatttatt

SEQ ID NO: 4947383 - DNA, 25 bp, Homo sapien
aataagagggaaccggccttgctgc

SEQ ID NO: 4947384 - DNA, 25 bp, Homo sapien
caggtgagcaggtaagccccatata

SEQ ID NO: 4947385 - DNA, 25 bp, Homo sapien
gaaatcaagattaatcaggtgagca

SEQ ID NO: 4947386 - DNA, 25 bp, Homo sapien
gctgccaagccaggtatttgaagta

SEQ ID NO: 4947387 - DNA, 25 bp, Homo sapien
agaaaagtcaagagagaggttattg

SEQ ID NO: 4947388 - DNA, 25 bp, Homo sapien
acaacttgctcctagcccacgggaa

SEQ ID NO: 4947389 - DNA, 25 bp, Homo sapien
tgctcctagcccacgggaaacaaaa

SEQ ID NO: 4947390 - DNA, 25 bp, Homo sapien
caagagagaggttattggccacaac

SEQ ID NO: 4947391 - DNA, 25 bp, Homo sapien
tataatggtgggaaatcaacacgta

SEQ ID NO: 4947392 - DNA, 25 bp, Homo sapien
tttgagttccatacatccacgctgt

SEQ ID NO: 4947393 - DNA, 25 bp, Homo sapien
tctgagcatgttgaaggtaagcgag

SEQ ID NO: 4947394 - DNA, 25 bp, Homo sapien
cgagtaataatatagatggtcccca

SEQ ID NO: 4947395 - DNA, 25 bp, Homo sapien
ctgctgtccaagaatgaaataccca

SEQ ID NO: 4947396 - DNA, 25 bp, Homo sapien
ccttattcagctgatttaacttgga

SEQ ID NO: 4947397 - DNA, 25 bp, Homo sapien
ctgtccaagaatgaaatacccaagt

SEQ ID NO: 4947398 - DNA, 25 bp, Homo sapien
tattcagctgatttaacttggagtg

SEQ ID NO: 4947399 - DNA, 25 bp, Homo sapien
atgcttcaatctgactttgttctcc

SEQ ID NO: 4947400 - DNA, 25 bp, Homo sapien
atcatcatcattgcccctctcaggc

SEQ ID NO: 4947401 - DNA, 25 bp, Homo sapien
tcaggccctccagaacacctggctg

SEQ ID NO: 4947402 - DNA, 25 bp, Homo sapien
tgactttgttctccccatcccatca

SEQ ID NO: 4947403 - DNA, 25 bp, Homo sapien
cctggagatggcatggtcaatggcc

SEQ ID NO: 4947404 - DNA, 25 bp, Homo sapien
tggagatggcatggtcaatggccat

SEQ ID NO: 4947405 - DNA, 25 bp, Homo sapien
ctggagatggcatggtcaatggcca

SEQ ID NO: 4947406 - DNA, 25 bp, Homo sapien
tcctggagatggcatggtcaatggc

SEQ ID NO: 4947407 - DNA, 25 bp, Homo sapien
cagagggtagggccaaccttagtat

SEQ ID NO: 4947408 - DNA, 25 bp, Homo sapien
caaccttagtatagtactgaactcc

SEQ ID NO: 4947409 - DNA, 25 bp, Homo sapien
tatagtactgaactccagtgctgct

SEQ ID NO: 4947410 - DNA, 25 bp, Homo sapien
ttagtatagtactgaactccagtgc

SEQ ID NO: 4947411 - DNA, 25 bp, Homo sapien
gggtcactgccataatcacgctctg

SEQ ID NO: 4947412 - DNA, 25 bp, Homo sapien
cactgccataatcacgctctgacat

SEQ ID NO: 4947413 - DNA, 25 bp, Homo sapien
ggtcactgccataatcacgctctga

SEQ ID NO: 4947414 - DNA, 25 bp, Homo sapien
ctgggtcactgccataatcacgctc

SEQ ID NO: 4947415 - DNA, 25 bp, Homo sapien
aaaacggataccgtcccagacatca

SEQ ID NO: 4947416 - DNA, 25 bp, Homo sapien
agtactgtccatccgtgaaaaggaa

SEQ ID NO: 4947417 - DNA, 25 bp, Homo sapien
gacatcagagtactgtccatccgtg

SEQ ID NO: 4947418 - DNA, 25 bp, Homo sapien
tcccagacatcagagtactgtccat

SEQ ID NO: 4947419 - DNA, 25 bp, Homo sapien
tgaagatatccaaccctaagccctg

SEQ ID NO: 4947420 - DNA, 25 bp, Homo sapien
cagacactaagcttggaacaggagc

SEQ ID NO: 4947421 - DNA, 25 bp, Homo sapien
tcataaaattgaacgggcggcctcc

SEQ ID NO: 4947422 - DNA, 25 bp, Homo sapien
taagccctgtatcaagagcctctga

SEQ ID NO: 4947423 - DNA, 25 bp, Homo sapien
tgagcttaccgggtaaggcagcaac

SEQ ID NO: 4947424 - DNA, 25 bp, Homo sapien
gcttaccgggtaaggcagcaactat

SEQ ID NO: 4947425 - DNA, 25 bp, Homo sapien
ggatgatgctgagcttaccgggtaa

SEQ ID NO: 4947426 - DNA, 25 bp, Homo sapien
tgatgctgagcttaccgggtaaggc

SEQ ID NO: 4947427 - DNA, 25 bp, Homo sapien
gtttgcagttgatggcacacactct

SEQ ID NO: 4947428 - DNA, 25 bp, Homo sapien
cagtggttaaccccaaacatatcaa

SEQ ID NO: 4947429 - DNA, 25 bp, Homo sapien
ccaaacatatcaagtttgcagttga

SEQ ID NO: 4947430 - DNA, 25 bp, Homo sapien
gttgatggcacacactctgtggctt

SEQ ID NO: 4947431 - DNA, 25 bp, Homo sapien
gaaaggccaagtgcgtttccagatt

SEQ ID NO: 4947432 - DNA, 25 bp, Homo sapien
agaaaggccaagtgcgtttccagat

SEQ ID NO: 4947433 - DNA, 25 bp, Homo sapien
aggccaagtgcgtttccagattttc

SEQ ID NO: 4947434 - DNA, 25 bp, Homo sapien
ccaagtgcgtttccagattttctct

SEQ ID NO: 4947435 - DNA, 25 bp, Homo sapien
ctatccaaggtcctgaaatggccag

SEQ ID NO: 4947436 - DNA, 25 bp, Homo sapien
tctatccaaggtcctgaaatggcca

SEQ ID NO: 4947437 - DNA, 25 bp, Homo sapien
ggtaaagactttccgggtacatgca

SEQ ID NO: 4947438 - DNA, 25 bp, Homo sapien
gcatagctgtcctgtggtctaccag

SEQ ID NO: 4947439 - DNA, 25 bp, Homo sapien
gagccgatcggtttctttcccgata

SEQ ID NO: 4947440 - DNA, 25 bp, Homo sapien
taatctcacacatcttcagcatagc

SEQ ID NO: 4947441 - DNA, 25 bp, Homo sapien
tacaacaggctctgggcgctgactt

SEQ ID NO: 4947442 - DNA, 25 bp, Homo sapien
tgactccccactgtcgagtgcttgg

SEQ ID NO: 4947443 - DNA, 25 bp, Homo sapien
agagcatgcgtctcctctctgcggc

SEQ ID NO: 4947444 - DNA, 25 bp, Homo sapien
ggttgaaatatccagctgcccggag

SEQ ID NO: 4947445 - DNA, 25 bp, Homo sapien
tctggcatccaccttgaaaatgacg

SEQ ID NO: 4947446 - DNA, 25 bp, Homo sapien
gaactagagacaatcaaagcccaag

SEQ ID NO: 4947447 - DNA, 25 bp, Homo sapien
taggaggcagattatgacagaaaca

SEQ ID NO: 4947448 - DNA, 25 bp, Homo sapien
catgactcagagtgcatcctccatt

SEQ ID NO: 4947449 - DNA, 25 bp, Homo sapien
aaataaaagggcagattccatgatc

SEQ ID NO: 4947450 - DNA, 25 bp, Homo sapien
ctgagacacgggaagggtttttgca

SEQ ID NO: 4947451 - DNA, 25 bp, Homo sapien
ttctagtgcgtgaaaatggactttc

SEQ ID NO: 4947452 - DNA, 25 bp, Homo sapien
aaggagcatcttgacttctagtgcg

SEQ ID NO: 4947453 - DNA, 25 bp, Homo sapien
ttcgtctttcaccagcaggccacag

SEQ ID NO: 4947454 - DNA, 25 bp, Homo sapien
aggagcttgcaaattccccgctcag

SEQ ID NO: 4947455 - DNA, 25 bp, Homo sapien
ttccagttccctacttcgtctttca

SEQ ID NO: 4947456 - DNA, 25 bp, Homo sapien
agcttgcaaattccccgctcaggac

SEQ ID NO: 4947457 - DNA, 25 bp, Homo sapien
tcccgactgactgtgcttgcaagcc

SEQ ID NO: 4947458 - DNA, 25 bp, Homo sapien
gcaagcctggcgtcttgatgagatc

SEQ ID NO: 4947459 - DNA, 25 bp, Homo sapien
caaggctcttcctaagctccagaaa

SEQ ID NO: 4947460 - DNA, 25 bp, Homo sapien
tgatagctccactcataggctgagg

SEQ ID NO: 4947461 - DNA, 25 bp, Homo sapien
aataccctaacctcagctatgttct

SEQ ID NO: 4947462 - DNA, 25 bp, Homo sapien
attctcaccaataccctaacctcag

SEQ ID NO: 4947463 - DNA, 25 bp, Homo sapien
tatcaccgatcttccaattctcacc

SEQ ID NO: 4947464 - DNA, 25 bp, Homo sapien
tgccgtccctatcaccgatcttcca

SEQ ID NO: 4947465 - DNA, 25 bp, Homo sapien
gagctgtaagaaaattcgcccattc

SEQ ID NO: 4947466 - DNA, 25 bp, Homo sapien
tggagttgttcacatcgcctaagca

SEQ ID NO: 4947467 - DNA, 25 bp, Homo sapien
tctagacagtgatatgagcatcctc

SEQ ID NO: 4947468 - DNA, 25 bp, Homo sapien
ttcacttacctgtgtcgggcccact

SEQ ID NO: 4947469 - DNA, 25 bp, Homo sapien
gattacagaggcctgccaccacgtc

SEQ ID NO: 4947470 - DNA, 25 bp, Homo sapien
atcctctctcagtctgtggcttgcc

SEQ ID NO: 4947471 - DNA, 25 bp, Homo sapien
cctctctcagtctgtggcttgcctt

SEQ ID NO: 4947472 - DNA, 25 bp, Homo sapien
ttacagaggcctgccaccacgtcca

SEQ ID NO: 4947473 - DNA, 25 bp, Homo sapien
aatatctatgtgactattgggttgg

SEQ ID NO: 4947474 - DNA, 25 bp, Homo sapien
taagaagtcctgcatagagattttc

SEQ ID NO: 4947475 - DNA, 25 bp, Homo sapien
ttcagctagtgatgctaactgagac

SEQ ID NO: 4947476 - DNA, 25 bp, Homo sapien
taagcaggttgatatgtcagtaaga

SEQ ID NO: 4947477 - DNA, 25 bp, Homo sapien
gccacggtactgctgcaataaaaag

SEQ ID NO: 4947478 - DNA, 25 bp, Homo sapien
gtattgctgcaatataaagtaccgc

SEQ ID NO: 4947479 - DNA, 25 bp, Homo sapien
gaggccacggtactgctgcaataac

SEQ ID NO: 4947480 - DNA, 25 bp, Homo sapien
taacaagtaccaccacaatatgaag

SEQ ID NO: 4947481 - DNA, 25 bp, Homo sapien
gaagccacagttctgctgcaatatg

SEQ ID NO: 4947482 - DNA, 25 bp, Homo sapien
gccacaatatgaagtattttcacag

SEQ ID NO: 4947483 - DNA, 25 bp, Homo sapien
tatgaagtattttcacagaagccac

SEQ ID NO: 4947484 - DNA, 25 bp, Homo sapien
tattttcacagaagccacagttctg

SEQ ID NO: 4947485 - DNA, 25 bp, Homo sapien
gaggccatggtactgctgcaatatg

SEQ ID NO: 4947486 - DNA, 25 bp, Homo sapien
aacgtgaagtactgccacagaggcc

SEQ ID NO: 4947487 - DNA, 25 bp, Homo sapien
tactgccacacgtgaagtcctgcca

SEQ ID NO: 4947488 - DNA, 25 bp, Homo sapien
gaggccacggtactgccacaatgtg

SEQ ID NO: 4947489 - DNA, 25 bp, Homo sapien
caatgggaagtactgtcacagagcc

SEQ ID NO: 4947490 - DNA, 25 bp, Homo sapien
ctgcaatgggaagtactgtcacaga

SEQ ID NO: 4947491 - DNA, 25 bp, Homo sapien
gaagtactgtcacagagcccgcagt

SEQ ID NO: 4947492 - DNA, 25 bp, Homo sapien
tactgtcacagagcccgcagtactg

SEQ ID NO: 4947493 - DNA, 25 bp, Homo sapien
gtgaaacagaaccttctcttgcctt

SEQ ID NO: 4947494 - DNA, 25 bp, Homo sapien
gaaacgccccagtatgtattgttcc

SEQ ID NO: 4947495 - DNA, 25 bp, Homo sapien
catctgaaattgtgacctcctccct

SEQ ID NO: 4947496 - DNA, 25 bp, Homo sapien
tcttcgttgacccttccacatctga

SEQ ID NO: 4947497 - DNA, 25 bp, Homo sapien
cattcttggtcaggcttactttgag

SEQ ID NO: 4947498 - DNA, 25 bp, Homo sapien
atcattcttggtcaggcttactttg

SEQ ID NO: 4947499 - DNA, 25 bp, Homo sapien
tagttttggcgttaaagtatattga

SEQ ID NO: 4947500 - DNA, 25 bp, Homo sapien
tgtctccccagatagttttggcgtt

SEQ ID NO: 4947501 - DNA, 25 bp, Homo sapien
gattgtttgaggtttcgcttgacac

SEQ ID NO: 4947502 - DNA, 25 bp, Homo sapien
gtccatgatgaatgcctctggccat

SEQ ID NO: 4947503 - DNA, 25 bp, Homo sapien
ggtttcgcttgacacttggtccatg

SEQ ID NO: 4947504 - DNA, 25 bp, Homo sapien
ttggtccatgatgaatgcctctggc

SEQ ID NO: 4947505 - DNA, 25 bp, Homo sapien
tcccaggcatccagcgactgaagga

SEQ ID NO: 4947506 - DNA, 25 bp, Homo sapien
catccagcgactgaaggattaacat

SEQ ID NO: 4947507 - DNA, 25 bp, Homo sapien
caggcatccagcgactgaaggatta

SEQ ID NO: 4947508 - DNA, 25 bp, Homo sapien
ggcatccagcgactgaaggattaac

SEQ ID NO: 4947509 - DNA, 25 bp, Homo sapien
aatgatctgtgcttcatctttgaaa

SEQ ID NO: 4947510 - DNA, 25 bp, Homo sapien
gaatgatctgtgcttcatctttgaa

SEQ ID NO: 4947511 - DNA, 25 bp, Homo sapien
gatctgtgcttcatctttgaaattc

SEQ ID NO: 4947512 - DNA, 25 bp, Homo sapien
ctgaatgatctgtgcttcatctttg

SEQ ID NO: 4947513 - DNA, 25 bp, Homo sapien
cacaagaccttgcacagtggctcat

SEQ ID NO: 4947514 - DNA, 25 bp, Homo sapien
tagacaatacgactacctgtagaac

SEQ ID NO: 4947515 - DNA, 25 bp, Homo sapien
tttcaggacatgagatcaattgcag

SEQ ID NO: 4947516 - DNA, 25 bp, Homo sapien
aacacaggaccgacattgaatgagg

SEQ ID NO: 4947517 - DNA, 25 bp, Homo sapien
atgaactttggtccctatcccatac

SEQ ID NO: 4947518 - DNA, 25 bp, Homo sapien
tgctggaacatttggatatgtatac

SEQ ID NO: 4947519 - DNA, 25 bp, Homo sapien
ttaaaagcagatcttatcctttgag

SEQ ID NO: 4947520 - DNA, 25 bp, Homo sapien
ggtccctatcccataccgtatacaa

SEQ ID NO: 4947521 - DNA, 25 bp, Homo sapien
ttcaaaatctacagagatcaatgtc

SEQ ID NO: 4947522 - DNA, 25 bp, Homo sapien
tctcagtaaaagtacgtgagtcttc

SEQ ID NO: 4947523 - DNA, 25 bp, Homo sapien
gacctgatatacaacctaaagcagt

SEQ ID NO: 4947524 - DNA, 25 bp, Homo sapien
tcaatgatgccctgaactcacactc

SEQ ID NO: 4947525 - DNA, 25 bp, Homo sapien
taaaacagagacctgagtagacggt

SEQ ID NO: 4947526 - DNA, 25 bp, Homo sapien
ttttgaggctgcatatactcaaggc

SEQ ID NO: 4947527 - DNA, 25 bp, Homo sapien
caacatctccatcagttaccagctg

SEQ ID NO: 4947528 - DNA, 25 bp, Homo sapien
cattggatcctattaaaagctgaga

SEQ ID NO: 4947529 - DNA, 25 bp, Homo sapien
gatttgctgcctcagggatccgaag

SEQ ID NO: 4947530 - DNA, 25 bp, Homo sapien
tggatcagtcaggtaacctcccgcg

SEQ ID NO: 4947531 - DNA, 25 bp, Homo sapien
gaggtatcagagtcccctccgttgg

SEQ ID NO: 4947532 - DNA, 25 bp, Homo sapien
gaggcgccgggtagcttctaagtca

SEQ ID NO: 4947533 - DNA, 25 bp, Homo sapien
acggcttcccgaggagaacgttgct

SEQ ID NO: 4947534 - DNA, 25 bp, Homo sapien
aggagaacgttgctgctttgatttc

SEQ ID NO: 4947535 - DNA, 25 bp, Homo sapien
cccgaggagaacgttgctgctttga

SEQ ID NO: 4947536 - DNA, 25 bp, Homo sapien
acagcacggcttcccgaggagaacg

SEQ ID NO: 4947537 - DNA, 25 bp, Homo sapien
cttcatagtgagtgatgatagttac

SEQ ID NO: 4947538 - DNA, 25 bp, Homo sapien
tgatgatagttacacccaggtagat

SEQ ID NO: 4947539 - DNA, 25 bp, Homo sapien
tcttcatagtgagtgatgatagtta

SEQ ID NO: 4947540 - DNA, 25 bp, Homo sapien
gatagttacacccaggtagatgaaa

SEQ ID NO: 4947541 - DNA, 25 bp, Homo sapien
ctgattataggtgaacaagtgttca

SEQ ID NO: 4947542 - DNA, 25 bp, Homo sapien
tgattataggtgaacaagtgttcag

SEQ ID NO: 4947543 - DNA, 25 bp, Homo sapien
gattataggtgaacaagtgttcagc

SEQ ID NO: 4947544 - DNA, 25 bp, Homo sapien
gaccctgagtctatatgaaccagcc

SEQ ID NO: 4947545 - DNA, 25 bp, Homo sapien
tgagaaccaggaagcgcaagatgga

SEQ ID NO: 4947546 - DNA, 25 bp, Homo sapien
ccaggaagcgcaagatggagtgtct

SEQ ID NO: 4947547 - DNA, 25 bp, Homo sapien
ctgaccctgagtctatatgaaccag

SEQ ID NO: 4947548 - DNA, 25 bp, Homo sapien
acgaaggagacacagttgtcctata

SEQ ID NO: 4947549 - DNA, 25 bp, Homo sapien
gtccttcctatctataccccacttg

SEQ ID NO: 4947550 - DNA, 25 bp, Homo sapien
tataggtgccgtgtgttcactagca

SEQ ID NO: 4947551 - DNA, 25 bp, Homo sapien
agtgcacagcttggcttctagttgc

SEQ ID NO: 4947552 - DNA, 25 bp, Homo sapien
caagaaaggtgggaaggcctggagc

SEQ ID NO: 4947553 - DNA, 25 bp, Homo sapien
tcagtcgtgagttctgagtaatgtg

SEQ ID NO: 4947554 - DNA, 25 bp, Homo sapien
tgaaggtgccaggtagaaggtacaa

SEQ ID NO: 4947555 - DNA, 25 bp, Homo sapien
tcagtcgatgagagctgtcagtcgt

SEQ ID NO: 4947556 - DNA, 25 bp, Homo sapien
cttgggcagggggtgagtataggag

SEQ ID NO: 4947557 - DNA, 25 bp, Homo sapien
aggcatgccagagccaaaatagagt

SEQ ID NO: 4947558 - DNA, 25 bp, Homo sapien
gggcagggggtgagtataggagtat

SEQ ID NO: 4947559 - DNA, 25 bp, Homo sapien
tataggagtatagccttttctaaaa

SEQ ID NO: 4947560 - DNA, 25 bp, Homo sapien
gataggccctttagtgccgaccagc

SEQ ID NO: 4947561 - DNA, 25 bp, Homo sapien
gcagcacgggtatgttgttatcaca

SEQ ID NO: 4947562 - DNA, 25 bp, Homo sapien
cgctgtacgcagaaagataggccct

SEQ ID NO: 4947563 - DNA, 25 bp, Homo sapien
tctgtaagatcgaaggtgcccttgg

SEQ ID NO: 4947564 - DNA, 25 bp, Homo sapien
agctgttcacgccaagtgaccctgc

SEQ ID NO: 4947565 - DNA, 25 bp, Homo sapien
ttcccgcggagctgttcacgccaag

SEQ ID NO: 4947566 - DNA, 25 bp, Homo sapien
cagtccctctcgtttaggcagcggc

SEQ ID NO: 4947567 - DNA, 25 bp, Homo sapien
tctcgtttaggcagcggccacttcc

SEQ ID NO: 4947568 - DNA, 25 bp, Homo sapien
aagtatttcgtacaatatgttggca

SEQ ID NO: 4947569 - DNA, 25 bp, Homo sapien
tataacccctcatttgaagtatttc

SEQ ID NO: 4947570 - DNA, 25 bp, Homo sapien
gggcagccgatgcacaacttcttcc

SEQ ID NO: 4947571 - DNA, 25 bp, Homo sapien
ggcatctattctcaacacaaaaact

SEQ ID NO: 4947572 - DNA, 25 bp, Homo sapien
ttggttatctaactcatcagctact

SEQ ID NO: 4947573 - DNA, 25 bp, Homo sapien
tggttatctaactcatcagctactc

SEQ ID NO: 4947574 - DNA, 25 bp, Homo sapien
gttatctaactcatcagctactctg

SEQ ID NO: 4947575 - DNA, 25 bp, Homo sapien
tatctaactcatcagctactctgtc

SEQ ID NO: 4947576 - DNA, 25 bp, Homo sapien
tgctgtcgacatggatagagacctg

SEQ ID NO: 4947577 - DNA, 25 bp, Homo sapien
ggatagagacctgctccctggttgt

SEQ ID NO: 4947578 - DNA, 25 bp, Homo sapien
gaacgtactgcctttgctgtcgaca

SEQ ID NO: 4947579 - DNA, 25 bp, Homo sapien
tccatagaggtcagacgtgagaacg

SEQ ID NO: 4947580 - DNA, 25 bp, Homo sapien
tgcagctcccgtaagtcagatgttg

SEQ ID NO: 4947581 - DNA, 25 bp, Homo sapien
cacatctatttcagatctgcggagt

SEQ ID NO: 4947582 - DNA, 25 bp, Homo sapien
tcactggatttctgaggagccgttc

SEQ ID NO: 4947583 - DNA, 25 bp, Homo sapien
ggagccgttcgaactgtctcaccac

SEQ ID NO: 4947584 - DNA, 25 bp, Homo sapien
tgtgagaacgtgagaccattgtgca

SEQ ID NO: 4947585 - DNA, 25 bp, Homo sapien
tattcgcgagaacaaatgtgagaac

SEQ ID NO: 4947586 - DNA, 25 bp, Homo sapien
ggagttgaactgtgctccctgatca

SEQ ID NO: 4947587 - DNA, 25 bp, Homo sapien
tagctgtttgagtaggccatatgac

SEQ ID NO: 4947588 - DNA, 25 bp, Homo sapien
tgttctaaaactacgtcaagtggtg

SEQ ID NO: 4947589 - DNA, 25 bp, Homo sapien
tacagttctaagatagggaggttct

SEQ ID NO: 4947590 - DNA, 25 bp, Homo sapien
tagtcccgagtataaagctgtgttc

SEQ ID NO: 4947591 - DNA, 25 bp, Homo sapien
tagatgctagttacagactggactc

SEQ ID NO: 4947592 - DNA, 25 bp, Homo sapien
cccaccttgcctaccaatgtactgg

SEQ ID NO: 4947593 - DNA, 25 bp, Homo sapien
ccaccttgcctaccaatgtactggg

SEQ ID NO: 4947594 - DNA, 25 bp, Homo sapien
cagtttgctgattgacataaaaaaa

SEQ ID NO: 4947595 - DNA, 25 bp, Homo sapien
agtttgctgattgacataaaaaaac

SEQ ID NO: 4947596 - DNA, 25 bp, Homo sapien
aagtttctttgtcatagaatgaaat

SEQ ID NO: 4947597 - DNA, 25 bp, Homo sapien
tcacaaggcacaattaggtcttttg

SEQ ID NO: 4947598 - DNA, 25 bp, Homo sapien
cttatcacaaggcacaattaggtct

SEQ ID NO: 4947599 - DNA, 25 bp, Homo sapien
tttccttatcacaaggcacaattag

SEQ ID NO: 4947600 - DNA, 25 bp, Homo sapien
agtgcgcagccgtgactttcagtgc

SEQ ID NO: 4947601 - DNA, 25 bp, Homo sapien
cagcctcgggttcatctttgcatag

SEQ ID NO: 4947602 - DNA, 25 bp, Homo sapien
tagttcgagacagttcctcaggtgg

SEQ ID NO: 4947603 - DNA, 25 bp, Homo sapien
gagcacacgccctctgtggtggaag

SEQ ID NO: 4947604 - DNA, 25 bp, Homo sapien
ttggaaggaccacatgcatcaaacc

SEQ ID NO: 4947605 - DNA, 25 bp, Homo sapien
catcatggttgtggccttgagcgaa

SEQ ID NO: 4947606 - DNA, 25 bp, Homo sapien
gaaatctgctggtcggatcatcatg

SEQ ID NO: 4947607 - DNA, 25 bp, Homo sapien
tacattccgttcaagttggaaggac

SEQ ID NO: 4947608 - DNA, 25 bp, Homo sapien
tctcaaatgtttctgaataccaacc

SEQ ID NO: 4947609 - DNA, 25 bp, Homo sapien
taagtgactactacaatggtttttg

SEQ ID NO: 4947610 - DNA, 25 bp, Homo sapien
ctcaaatgtttctgaataccaaccc

SEQ ID NO: 4947611 - DNA, 25 bp, Homo sapien
taaataaacaactggagactgtgtc

SEQ ID NO: 4947612 - DNA, 25 bp, Homo sapien
tctctctagtatccagcaagcacaa

SEQ ID NO: 4947613 - DNA, 25 bp, Homo sapien
gcacaaacgcaggagagcttgctaa

SEQ ID NO: 4947614 - DNA, 25 bp, Homo sapien
cacagttggcttgctgacaagtcta

SEQ ID NO: 4947615 - DNA, 25 bp, Homo sapien
ctgcttattttgccggctgtccctg

SEQ ID NO: 4947616 - DNA, 25 bp, Homo sapien
gttgcgaaacaaactcatttcccag

SEQ ID NO: 4947617 - DNA, 25 bp, Homo sapien
gcgttgctgattagtcagttgcgaa

SEQ ID NO: 4947618 - DNA, 25 bp, Homo sapien
ccaatattctcctgaagggttacca

SEQ ID NO: 4947619 - DNA, 25 bp, Homo sapien
tattttaagcacatagcgttgctga

SEQ ID NO: 4947620 - DNA, 25 bp, Homo sapien
gctgccatcctcacgtcgctgaata

SEQ ID NO: 4947621 - DNA, 25 bp, Homo sapien
ctctgaaaatcaacgctgccatcct

SEQ ID NO: 4947622 - DNA, 25 bp, Homo sapien
tcctcacgtcgctgaataattgtcc

SEQ ID NO: 4947623 - DNA, 25 bp, Homo sapien
tcgctgaataattgtccacccgcct

SEQ ID NO: 4947624 - DNA, 25 bp, Homo sapien
gataaattttctgccacatacaagg

SEQ ID NO: 4947625 - DNA, 25 bp, Homo sapien
gccagtgcaaccagagaactgtccc

SEQ ID NO: 4947626 - DNA, 25 bp, Homo sapien
agtggctgcctgatgcctcattgcc

SEQ ID NO: 4947627 - DNA, 25 bp, Homo sapien
tttggcagggtaagcttcaacgcac

SEQ ID NO: 4947628 - DNA, 25 bp, Homo sapien
gtgtccctcagaccatgtcaccaag

SEQ ID NO: 4947629 - DNA, 25 bp, Homo sapien
tgaggctgcagaactaggaatgact

SEQ ID NO: 4947630 - DNA, 25 bp, Homo sapien
ttcacgatgctaagacaccaccggt

SEQ ID NO: 4947631 - DNA, 25 bp, Homo sapien
gatgaggttagaatcgccttcccca

SEQ ID NO: 4947632 - DNA, 25 bp, Homo sapien
agatgccattcgtggtgtgtcctga

SEQ ID NO: 4947633 - DNA, 25 bp, Homo sapien
tgtagaattagggaatgttaacgtg

SEQ ID NO: 4947634 - DNA, 25 bp, Homo sapien
tgttaacgtgtagatgccattcgtg

SEQ ID NO: 4947635 - DNA, 25 bp, Homo sapien
tagggaatgttaacgtgtagatgcc

SEQ ID NO: 4947636 - DNA, 25 bp, Homo sapien
tctttagcaacagtggggtccttag

SEQ ID NO: 4947637 - DNA, 25 bp, Homo sapien
ctgatttgttcttctttagcaacag

SEQ ID NO: 4947638 - DNA, 25 bp, Homo sapien
cttctttagcaacagtggggtcctt

SEQ ID NO: 4947639 - DNA, 25 bp, Homo sapien
ttcttctttagcaacagtggggtcc

SEQ ID NO: 4947640 - DNA, 25 bp, Homo sapien
taacacctgtagctgatctttctct

SEQ ID NO: 4947641 - DNA, 25 bp, Homo sapien
ggaattttgcttggatactaacacc

SEQ ID NO: 4947642 - DNA, 25 bp, Homo sapien
gatgtgcttgtcttccatagctagc

SEQ ID NO: 4947643 - DNA, 25 bp, Homo sapien
gaattattcaccgtggcagtcacta

SEQ ID NO: 4947644 - DNA, 25 bp, Homo sapien
tcactggtctggtccaaaatctgtt

SEQ ID NO: 4947645 - DNA, 25 bp, Homo sapien
agggagtgttccaagagctgaagtt

SEQ ID NO: 4947646 - DNA, 25 bp, Homo sapien
ccaatttgtttgtcgagagggagtg

SEQ ID NO: 4947647 - DNA, 25 bp, Homo sapien
agagctgaagttcaagtctcgtggt

SEQ ID NO: 4947648 - DNA, 25 bp, Homo sapien
ccacatcagttaacttccgcgtttg

SEQ ID NO: 4947649 - DNA, 25 bp, Homo sapien
gtttgctccgctgtttggttcaaca

SEQ ID NO: 4947650 - DNA, 25 bp, Homo sapien
gctgtttggttcaacaggtttgtcc

SEQ ID NO: 4947651 - DNA, 25 bp, Homo sapien
cacagccgtctggttctgtactgca

SEQ ID NO: 4947652 - DNA, 25 bp, Homo sapien
taagctcgtgagtgcacaaaccatg

SEQ ID NO: 4947653 - DNA, 25 bp, Homo sapien
tagagaaaccattcgtggagtcagt

SEQ ID NO: 4947654 - DNA, 25 bp, Homo sapien
gattataaaactggttctggtgccc

SEQ ID NO: 4947655 - DNA, 25 bp, Homo sapien
tccctggtccaaagtataagctcgt

SEQ ID NO: 4947656 - DNA, 25 bp, Homo sapien
gccgcctttgtatctcctccttgag

SEQ ID NO: 4947657 - DNA, 25 bp, Homo sapien
gcctttgtatctcctccttgagtct

SEQ ID NO: 4947658 - DNA, 25 bp, Homo sapien
cacggccgcctttgtatctcctcct

SEQ ID NO: 4947659 - DNA, 25 bp, Homo sapien
cggccgcctttgtatctcctccttg

SEQ ID NO: 4947660 - DNA, 25 bp, Homo sapien
gatgccagatttgaatttctagaac

SEQ ID NO: 4947661 - DNA, 25 bp, Homo sapien
aaagctacttgccatctgttgactg

SEQ ID NO: 4947662 - DNA, 25 bp, Homo sapien
gttgactgtttttatagtcttggcc

SEQ ID NO: 4947663 - DNA, 25 bp, Homo sapien
gaacctagaaaagcccatgccaaag

SEQ ID NO: 4947664 - DNA, 25 bp, Homo sapien
ccgcgctggctggtaagaagcccca

SEQ ID NO: 4947665 - DNA, 25 bp, Homo sapien
atgggtgtcccgaggcagcttggag

SEQ ID NO: 4947666 - DNA, 25 bp, Homo sapien
gtggagcctagtgggcattcatgac

SEQ ID NO: 4947667 - DNA, 25 bp, Homo sapien
gctgtgcttgcgagagtgccgagga

SEQ ID NO: 4947668 - DNA, 25 bp, Homo sapien
tgacccaggttttggagctgtgctt

SEQ ID NO: 4947669 - DNA, 25 bp, Homo sapien
aggcaaggcctgtctctgagatgtc

SEQ ID NO: 4947670 - DNA, 25 bp, Homo sapien
gaaggcctgaggcaaggcctgtctc

SEQ ID NO: 4947671 - DNA, 25 bp, Homo sapien
gggtttgtgggaaggcctgaggcaa

SEQ ID NO: 4947672 - DNA, 25 bp, Homo sapien
ctgaggcaaggcctgtctctgagat

SEQ ID NO: 4947673 - DNA, 25 bp, Homo sapien
gatggccttttacgtctcctctctg

SEQ ID NO: 4947674 - DNA, 25 bp, Homo sapien
catgggtttgccaaaatactgggtg

SEQ ID NO: 4947675 - DNA, 25 bp, Homo sapien
tttctgtgttacatgggtttgccaa

SEQ ID NO: 4947676 - DNA, 25 bp, Homo sapien
aagatactgatggccttttacgtct

SEQ ID NO: 4947677 - DNA, 25 bp, Homo sapien
tgagcaaaacgcactgacgggcaat

SEQ ID NO: 4947678 - DNA, 25 bp, Homo sapien
cacacatttccgtgctctgcagcaa

SEQ ID NO: 4947679 - DNA, 25 bp, Homo sapien
tctgcagcaacttgagactcctgtg

SEQ ID NO: 4947680 - DNA, 25 bp, Homo sapien
ttctcagtatgggtgatggctctcc

SEQ ID NO: 4947681 - DNA, 25 bp, Homo sapien
tgacttgaatctataacatctgctg

SEQ ID NO: 4947682 - DNA, 25 bp, Homo sapien
ctcctgacttgaatctataacatct

SEQ ID NO: 4947683 - DNA, 25 bp, Homo sapien
gacttgaatctataacatctgctga

SEQ ID NO: 4947684 - DNA, 25 bp, Homo sapien
cctgacttgaatctataacatctgc

SEQ ID NO: 4947685 - DNA, 25 bp, Homo sapien
tcttgaacgcttccctcagttgtag

SEQ ID NO: 4947686 - DNA, 25 bp, Homo sapien
ccctagcggaagaacctacattgga

SEQ ID NO: 4947687 - DNA, 25 bp, Homo sapien
cacatttaagtggtccaagtgccag

SEQ ID NO: 4947688 - DNA, 25 bp, Homo sapien
gtttgggttatgactcctacgagcc

SEQ ID NO: 4947689 - DNA, 25 bp, Homo sapien
gccaaaactggcctgctcaccattt

SEQ ID NO: 4947690 - DNA, 25 bp, Homo sapien
acaagggtatgtgccaaaactggcc

SEQ ID NO: 4947691 - DNA, 25 bp, Homo sapien
tgaagcggaaacaagggtatgtgcc

SEQ ID NO: 4947692 - DNA, 25 bp, Homo sapien
catttgttcccactcggggtgaggg

SEQ ID NO: 4947693 - DNA, 25 bp, Homo sapien
ctgtgtagggtggcgggcgttggtg

SEQ ID NO: 4947694 - DNA, 25 bp, Homo sapien
ttggtggtgaagtctgtcggccctc

SEQ ID NO: 4947695 - DNA, 25 bp, Homo sapien
tgtgtagggtggcgggcgttggtgg

SEQ ID NO: 4947696 - DNA, 25 bp, Homo sapien
gcgttggtggtgaagtctgtcggcc

SEQ ID NO: 4947697 - DNA, 25 bp, Homo sapien
ctgggcccctgactcgaagctgacc

SEQ ID NO: 4947698 - DNA, 25 bp, Homo sapien
cctgggcccctgactcgaagctgac

SEQ ID NO: 4947699 - DNA, 25 bp, Homo sapien
tataattacccggtagatgaccaag

SEQ ID NO: 4947700 - DNA, 25 bp, Homo sapien
ttgagattccaaagactacgcagtc

SEQ ID NO: 4947701 - DNA, 25 bp, Homo sapien
catttcccattaagaccagtttgtt

SEQ ID NO: 4947702 - DNA, 25 bp, Homo sapien
caataacgtactttctcgagcagaa

SEQ ID NO: 4947703 - DNA, 25 bp, Homo sapien
tccaagatccgttctgagattcaga

SEQ ID NO: 4947704 - DNA, 25 bp, Homo sapien
aggtaatgaggagcaccgattaggc

SEQ ID NO: 4947705 - DNA, 25 bp, Homo sapien
ccgattaggctccaagatccgttct

SEQ ID NO: 4947706 - DNA, 25 bp, Homo sapien
gaggagcaccgattaggctccaaga

SEQ ID NO: 4947707 - DNA, 25 bp, Homo sapien
ccccaagaacaaactgtcagacaga

SEQ ID NO: 4947708 - DNA, 25 bp, Homo sapien
tcaccccaagaacaaactgtcagac

SEQ ID NO: 4947709 - DNA, 25 bp, Homo sapien
cccaagaacaaactgtcagacagac

SEQ ID NO: 4947710 - DNA, 25 bp, Homo sapien
caccccaagaacaaactgtcagaca

SEQ ID NO: 4947711 - DNA, 25 bp, Homo sapien
gtcctgtcgtggcatgacttgaaca

SEQ ID NO: 4947712 - DNA, 25 bp, Homo sapien
acttgaacataaccgtcccacgtgg

SEQ ID NO: 4947713 - DNA, 25 bp, Homo sapien
gaatacctctgggacgcttgggaac

SEQ ID NO: 4947714 - DNA, 25 bp, Homo sapien
tccgcaccggttgctggaactgacg

SEQ ID NO: 4947715 - DNA, 25 bp, Homo sapien
tctgcacagcattggacacgtaggg

SEQ ID NO: 4947716 - DNA, 25 bp, Homo sapien
gtcatcgtattcgagcggcgcgtcc

SEQ ID NO: 4947717 - DNA, 25 bp, Homo sapien
gagcggcagttgtccatctctggca

SEQ ID NO: 4947718 - DNA, 25 bp, Homo sapien
gacccatgctggacctgatattgct

SEQ ID NO: 4947719 - DNA, 25 bp, Homo sapien
ctgcggccaagacaagatcacagct

SEQ ID NO: 4947720 - DNA, 25 bp, Homo sapien
ctgctgccgtctaaaacgcagggct

SEQ ID NO: 4947721 - DNA, 25 bp, Homo sapien
ccagtagcaaacctggtttttactg

SEQ ID NO: 4947722 - DNA, 25 bp, Homo sapien
aacttgagggcaaacacacgtccag

SEQ ID NO: 4947723 - DNA, 25 bp, Homo sapien
gtccagagtcccgagctgctgccgt

SEQ ID NO: 4947724 - DNA, 25 bp, Homo sapien
gcagtgggaagaacagtcctgctca

SEQ ID NO: 4947725 - DNA, 25 bp, Homo sapien
ctgtcagattgcagtgggaagaaca

SEQ ID NO: 4947726 - DNA, 25 bp, Homo sapien
cagtgggaagaacagtcctgctcac

SEQ ID NO: 4947727 - DNA, 25 bp, Homo sapien
tcagattgcagtgggaagaacagtc

SEQ ID NO: 4947728 - DNA, 25 bp, Homo sapien
tctccccagatcctacagtgtcagt

SEQ ID NO: 4947729 - DNA, 25 bp, Homo sapien
tgtcagtatccgaatcaatcacttt

SEQ ID NO: 4947730 - DNA, 25 bp, Homo sapien
gctttcacggtcctttgttcctctc

SEQ ID NO: 4947731 - DNA, 25 bp, Homo sapien
cagcttttacagagcagctttcacg

SEQ ID NO: 4947732 - DNA, 25 bp, Homo sapien
ccagacatgtgtagtgggctgctcc

SEQ ID NO: 4947733 - DNA, 25 bp, Homo sapien
tgggaaaaaccgatctgttacagga

SEQ ID NO: 4947734 - DNA, 25 bp, Homo sapien
gataagttgataagagcagccagac

SEQ ID NO: 4947735 - DNA, 25 bp, Homo sapien
gcttagccgttatcttcctgtaggg

SEQ ID NO: 4947736 - DNA, 25 bp, Homo sapien
gcgtggtgtccatgtatgatcagca

SEQ ID NO: 4947737 - DNA, 25 bp, Homo sapien
tgtccatgtatgatcagcaaggcca

SEQ ID NO: 4947738 - DNA, 25 bp, Homo sapien
caaggccatggatagtgcccgtggc

SEQ ID NO: 4947739 - DNA, 25 bp, Homo sapien
tgcccgtggcgtggtgtccatgtat

SEQ ID NO: 4947740 - DNA, 25 bp, Homo sapien
ccccatattctgtgtcggcaactga

SEQ ID NO: 4947741 - DNA, 25 bp, Homo sapien
tgacgacaccagaaaaaccatagct

SEQ ID NO: 4947742 - DNA, 25 bp, Homo sapien
tcttattaccctggttgacgacacc

SEQ ID NO: 4947743 - DNA, 25 bp, Homo sapien
atttcagaggttcccatgtgttctc

SEQ ID NO: 4947744 - DNA, 25 bp, Homo sapien
tgaaatctgagagacgcagggccct

SEQ ID NO: 4947745 - DNA, 25 bp, Homo sapien
agggccctgcccattctgcggaatt

SEQ ID NO: 4947746 - DNA, 25 bp, Homo sapien
aagcaatggcgcctcctttgaaatc

SEQ ID NO: 4947747 - DNA, 25 bp, Homo sapien
ccgcccctgctcagataaaagcaat

SEQ ID NO: 4947748 - DNA, 25 bp, Homo sapien
gacactcgactgtcccgatgggcat

SEQ ID NO: 4947749 - DNA, 25 bp, Homo sapien
ggtaggtcctctttgctgtgtgcga

SEQ ID NO: 4947750 - DNA, 25 bp, Homo sapien
cctgctcagtagatcagacgtgttc

SEQ ID NO: 4947751 - DNA, 25 bp, Homo sapien
tcctgtgagacagcgggatgtcctg

SEQ ID NO: 4947752 - DNA, 25 bp, Homo sapien
gcactttcttcctccgttgcagtgt

SEQ ID NO: 4947753 - DNA, 25 bp, Homo sapien
gatacagccggttgccctttgttgt

SEQ ID NO: 4947754 - DNA, 25 bp, Homo sapien
gctcacaattccctgatacagccgg

SEQ ID NO: 4947755 - DNA, 25 bp, Homo sapien
tcagcccttcgcagatgctcacaat

SEQ ID NO: 4947756 - DNA, 25 bp, Homo sapien
tcatcacattgaaatcgagttacat

SEQ ID NO: 4947757 - DNA, 25 bp, Homo sapien
gagttacatgtggtcctgttctata

SEQ ID NO: 4947758 - DNA, 25 bp, Homo sapien
tgttctatagtcaaccaaaactcct

SEQ ID NO: 4947759 - DNA, 25 bp, Homo sapien
catagtcggcggtgaggtattcatc

SEQ ID NO: 4947760 - DNA, 25 bp, Homo sapien
acactttgggtggatactgcaggga

SEQ ID NO: 4947761 - DNA, 25 bp, Homo sapien
ggagtttcctgtttgaatgagacac

SEQ ID NO: 4947762 - DNA, 25 bp, Homo sapien
ggcttttcccgggtgcaccattgca

SEQ ID NO: 4947763 - DNA, 25 bp, Homo sapien
ccaccacagctggaagcgtggcctg

SEQ ID NO: 4947764 - DNA, 25 bp, Homo sapien
tgtgccggtcatagggcttagaact

SEQ ID NO: 4947765 - DNA, 25 bp, Homo sapien
tagggcttagaactgcatgtctggg

SEQ ID NO: 4947766 - DNA, 25 bp, Homo sapien
ccttctttcagcagttattgagcat

SEQ ID NO: 4947767 - DNA, 25 bp, Homo sapien
tgtggaggagaccgcccttctttca

SEQ ID NO: 4947768 - DNA, 25 bp, Homo sapien
cacctgaatcctgtcgctggcttta

SEQ ID NO: 4947769 - DNA, 25 bp, Homo sapien
ttaaaccacccgtaatgtagacatc

SEQ ID NO: 4947770 - DNA, 25 bp, Homo sapien
tgtcgctggctttagtttaaaccac

SEQ ID NO: 4947771 - DNA, 25 bp, Homo sapien
taaaccacccgtaatgtagacatcc

SEQ ID NO: 4947772 - DNA, 25 bp, Homo sapien
acccagcgcttttcattcggctcag

SEQ ID NO: 4947773 - DNA, 25 bp, Homo sapien
gcttccacttctcggtgttggaaat

SEQ ID NO: 4947774 - DNA, 25 bp, Homo sapien
gctcagcgctagggacctctgcttc

SEQ ID NO: 4947775 - DNA, 25 bp, Homo sapien
tgtcgatgatctgtattgacttggc

SEQ ID NO: 4947776 - DNA, 25 bp, Homo sapien
gagtccttagagctcaggctcccct

SEQ ID NO: 4947777 - DNA, 25 bp, Homo sapien
tgcagagtccttagagctcaggctc

SEQ ID NO: 4947778 - DNA, 25 bp, Homo sapien
aatgcagagtccttagagctcaggc

SEQ ID NO: 4947779 - DNA, 25 bp, Homo sapien
cagagtccttagagctcaggctccc

SEQ ID NO: 4947780 - DNA, 25 bp, Homo sapien
ggcggccacatctccgggcttcacc

SEQ ID NO: 4947781 - DNA, 25 bp, Homo sapien
ttaaaccgtgtctctggcggccaca

SEQ ID NO: 4947782 - DNA, 25 bp, Homo sapien
acatctccgggcttcacccgctgct

SEQ ID NO: 4947783 - DNA, 25 bp, Homo sapien
aaccgtgtctctggcggccacatct

SEQ ID NO: 4947784 - DNA, 25 bp, Homo sapien
cattgctctgcatgtcacttggagc

SEQ ID NO: 4947785 - DNA, 25 bp, Homo sapien
ggctttctgacatcagcgtgcattg

SEQ ID NO: 4947786 - DNA, 25 bp, Homo sapien
cgacggccgatttcccaccagaaat

SEQ ID NO: 4947787 - DNA, 25 bp, Homo sapien
aaacaggatctttgtatccaatgag

SEQ ID NO: 4947788 - DNA, 25 bp, Homo sapien
tggggagccttaagcaccaagagca

SEQ ID NO: 4947789 - DNA, 25 bp, Homo sapien
gagcagggcggtgcacactttgtct

SEQ ID NO: 4947790 - DNA, 25 bp, Homo sapien
gagagggaccgtccttgcattctgt

SEQ ID NO: 4947791 - DNA, 25 bp, Homo sapien
gcacactttgtctggcacgggctgg

SEQ ID NO: 4947792 - DNA, 25 bp, Homo sapien
tgctggcaatgcaaacgcgcttgtc

SEQ ID NO: 4947793 - DNA, 25 bp, Homo sapien
cctgggctggagtaaatgaaccgtc

SEQ ID NO: 4947794 - DNA, 25 bp, Homo sapien
tttggaggccacttaaccctggagc

SEQ ID NO: 4947795 - DNA, 25 bp, Homo sapien
tctgtctggtagagggaatgcttcc

SEQ ID NO: 4947796 - DNA, 25 bp, Homo sapien
cctgggacttctccttgggcttgaa

SEQ ID NO: 4947797 - DNA, 25 bp, Homo sapien
gatccaggcgtcacattagacatga

SEQ ID NO: 4947798 - DNA, 25 bp, Homo sapien
cactgggccattttcagcgtgtccc

SEQ ID NO: 4947799 - DNA, 25 bp, Homo sapien
tgattagctcagacccatcctggga

SEQ ID NO: 4947800 - DNA, 25 bp, Homo sapien
gaagaatcatttgcccctgctgcca

SEQ ID NO: 4947801 - DNA, 25 bp, Homo sapien
aagaatcatttgcccctgctgccac

SEQ ID NO: 4947802 - DNA, 25 bp, Homo sapien
tatcggatctactccattgatgctg

SEQ ID NO: 4947803 - DNA, 25 bp, Homo sapien
cacataacccatagcatctcgcagg

SEQ ID NO: 4947804 - DNA, 25 bp, Homo sapien
cgcaaaacaaaacgtggatggcaca

SEQ ID NO: 4947805 - DNA, 25 bp, Homo sapien
caacccgtagttaggaaaatgcgtg

SEQ ID NO: 4947806 - DNA, 25 bp, Homo sapien
gattgaatgacgctctcccagcaca

SEQ ID NO: 4947807 - DNA, 25 bp, Homo sapien
agtgagagttcagcctagctatggc

SEQ ID NO: 4947808 - DNA, 25 bp, Homo sapien
agaatcttgccgtcacttgcacacg

SEQ ID NO: 4947809 - DNA, 25 bp, Homo sapien
cacagccggcatttgcagtgcatta

SEQ ID NO: 4947810 - DNA, 25 bp, Homo sapien
taaactgcaacagttcgcctacgct

SEQ ID NO: 4947811 - DNA, 25 bp, Homo sapien
actgcaacagttcgcctacgctatg

SEQ ID NO: 4947812 - DNA, 25 bp, Homo sapien
aacagttcgcctacgctatggagac

SEQ ID NO: 4947813 - DNA, 25 bp, Homo sapien
ttcgcctacgctatggagactggag

SEQ ID NO: 4947814 - DNA, 25 bp, Homo sapien
tgaactagtccacctgtgcggaggc

SEQ ID NO: 4947815 - DNA, 25 bp, Homo sapien
cgatgtttgtctcgcctgccagcag

SEQ ID NO: 4947816 - DNA, 25 bp, Homo sapien
ttgccgaccagccagcgatgtttgt

SEQ ID NO: 4947817 - DNA, 25 bp, Homo sapien
ctgtgccgaagcgagtgccacttgt

SEQ ID NO: 4947818 - DNA, 25 bp, Homo sapien
tgaagtcactcaacagggctcagta

SEQ ID NO: 4947819 - DNA, 25 bp, Homo sapien
caccttgctggcatagaacagggag

SEQ ID NO: 4947820 - DNA, 25 bp, Homo sapien
tctgcgccgcgttgcctaataacgg

SEQ ID NO: 4947821 - DNA, 25 bp, Homo sapien
gaaactgtattgtacttgggccaag

SEQ ID NO: 4947822 - DNA, 25 bp, Homo sapien
tataagtcacgaaacgaagaccctg

SEQ ID NO: 4947823 - DNA, 25 bp, Homo sapien
ataggcgtatttccactctcaggcg

SEQ ID NO: 4947824 - DNA, 25 bp, Homo sapien
gctgctgttatcacgaaaggctggc

SEQ ID NO: 4947825 - DNA, 25 bp, Homo sapien
aaaaagatccgatagcatgcaggcc

SEQ ID NO: 4947826 - DNA, 25 bp, Homo sapien
tatgtgaggcttgatcagtcaccgc

SEQ ID NO: 4947827 - DNA, 25 bp, Homo sapien
tcgataaggaaccagtcgcagagag

SEQ ID NO: 4947828 - DNA, 25 bp, Homo sapien
cacatctccattgcctcgataagga

SEQ ID NO: 4947829 - DNA, 25 bp, Homo sapien
agaaaaatgcacgacgctcccatgg

SEQ ID NO: 4947830 - DNA, 25 bp, Homo sapien
taccttcagagttcatcagtcagcg

SEQ ID NO: 4947831 - DNA, 25 bp, Homo sapien
ttgaattgcacgctcgcagcagtga

SEQ ID NO: 4947832 - DNA, 25 bp, Homo sapien
tcagtcagcgggaagaagtacacat

SEQ ID NO: 4947833 - DNA, 25 bp, Homo sapien
caggcctcttgtgctcgctgcagaa

SEQ ID NO: 4947834 - DNA, 25 bp, Homo sapien
cactgatgtgtctgtcaccttctaa

SEQ ID NO: 4947835 - DNA, 25 bp, Homo sapien
gatgtgtctgtcaccttctaaagaa

SEQ ID NO: 4947836 - DNA, 25 bp, Homo sapien
accttctaaagaaatgaaatgctag

SEQ ID NO: 4947837 - DNA, 25 bp, Homo sapien
gaaacactgatgtgtctgtcacctt

SEQ ID NO: 4947838 - DNA, 25 bp, Homo sapien
ccagaggacccatcagacagaaagt

SEQ ID NO: 4947839 - DNA, 25 bp, Homo sapien
tgtgttcatgctacccaggcctata

SEQ ID NO: 4947840 - DNA, 25 bp, Homo sapien
ttttcccaggagtcacgcttagtca

SEQ ID NO: 4947841 - DNA, 25 bp, Homo sapien
gcatctcgcggatggaacaatggcg

SEQ ID NO: 4947842 - DNA, 25 bp, Homo sapien
gcctgagagcacaggatgatggcca

SEQ ID NO: 4947843 - DNA, 25 bp, Homo sapien
ttttcacaataatccctgtctggtg

SEQ ID NO: 4947844 - DNA, 25 bp, Homo sapien
ccctgtctggtgcctgagagcacag

SEQ ID NO: 4947845 - DNA, 25 bp, Homo sapien
ttcaactggcaattttcacaataat

SEQ ID NO: 4947846 - DNA, 25 bp, Homo sapien
ttcagtattgtctcccgtgagccag

SEQ ID NO: 4947847 - DNA, 25 bp, Homo sapien
ctaattcagtattgtctcccgtgag

SEQ ID NO: 4947848 - DNA, 25 bp, Homo sapien
tcagtattgtctcccgtgagccagc

SEQ ID NO: 4947849 - DNA, 25 bp, Homo sapien
aattcagtattgtctcccgtgagcc

SEQ ID NO: 4947850 - DNA, 25 bp, Homo sapien
tcagccaacgctgaggagggagcac

SEQ ID NO: 4947851 - DNA, 25 bp, Homo sapien
agcactcgaggggaggaacgccatc

SEQ ID NO: 4947852 - DNA, 25 bp, Homo sapien
gagggagcactcgaggggaggaacg

SEQ ID NO: 4947853 - DNA, 25 bp, Homo sapien
gggagcactcgaggggaggaacgcc

SEQ ID NO: 4947854 - DNA, 25 bp, Homo sapien
tgtctgtcaacagcgagatgagaac

SEQ ID NO: 4947855 - DNA, 25 bp, Homo sapien
ggctgttgtctgtcaacagcgagat

SEQ ID NO: 4947856 - DNA, 25 bp, Homo sapien
agatgagaacaacgggcaacagcag

SEQ ID NO: 4947857 - DNA, 25 bp, Homo sapien
gcgagatgagaacaacgggcaacag

SEQ ID NO: 4947858 - DNA, 25 bp, Homo sapien
tcagcgagctgacagccttgaaggg

SEQ ID NO: 4947859 - DNA, 25 bp, Homo sapien
tctgtatcaatgactgtacaggctc

SEQ ID NO: 4947860 - DNA, 25 bp, Homo sapien
aataatgaagatacagcacctatct

SEQ ID NO: 4947861 - DNA, 25 bp, Homo sapien
caatgactgtacaggctccaagggc

SEQ ID NO: 4947862 - DNA, 25 bp, Homo sapien
caaaggaagcataggagttccgagt

SEQ ID NO: 4947863 - DNA, 25 bp, Homo sapien
caagtgaaatataagcgttgggtag

SEQ ID NO: 4947864 - DNA, 25 bp, Homo sapien
gactctctaacataggtttcaaagg

SEQ ID NO: 4947865 - DNA, 25 bp, Homo sapien
aatgttaaggcgcagaacacagtgc

SEQ ID NO: 4947866 - DNA, 25 bp, Homo sapien
cccatgaggttccaggttctgcatg

SEQ ID NO: 4947867 - DNA, 25 bp, Homo sapien
cccaaacaagtgtgtaaggtataag

SEQ ID NO: 4947868 - DNA, 25 bp, Homo sapien
gatcaacgtgttcgcagggatgatt

SEQ ID NO: 4947869 - DNA, 25 bp, Homo sapien
agtcacactagggattagagcttca

SEQ ID NO: 4947870 - DNA, 25 bp, Homo sapien
gcaaagggccatctcatcctgtcct

SEQ ID NO: 4947871 - DNA, 25 bp, Homo sapien
aacataatctgctaattagaggctg

SEQ ID NO: 4947872 - DNA, 25 bp, Homo sapien
aaatctagtcgacatcaagcttcag

SEQ ID NO: 4947873 - DNA, 25 bp, Homo sapien
taaataggtggtacgcctaggcaac

SEQ ID NO: 4947874 - DNA, 25 bp, Homo sapien
ccagaactcagggactattattgct

SEQ ID NO: 4947875 - DNA, 25 bp, Homo sapien
gagttatcggttgtcttcttcagtt

SEQ ID NO: 4947876 - DNA, 25 bp, Homo sapien
taatttctttggcagataatccagg

SEQ ID NO: 4947877 - DNA, 25 bp, Homo sapien
tttaactgagttatcggttgtcttc

SEQ ID NO: 4947878 - DNA, 25 bp, Homo sapien
acattgtaattttggcagataattt

SEQ ID NO: 4947879 - DNA, 25 bp, Homo sapien
gaacagccgcaaaatgtcaaatcct

SEQ ID NO: 4947880 - DNA, 25 bp, Homo sapien
ggttctagagaacagccgcaaaatg

SEQ ID NO: 4947881 - DNA, 25 bp, Homo sapien
ctttggttctagagaacagccgcaa

SEQ ID NO: 4947882 - DNA, 25 bp, Homo sapien
atgtcaaatcctctagtctttctga

SEQ ID NO: 4947883 - DNA, 25 bp, Homo sapien
tggatgccatagttgttgacagact

SEQ ID NO: 4947884 - DNA, 25 bp, Homo sapien
cagctggatgccatagttgttgaca

SEQ ID NO: 4947885 - DNA, 25 bp, Homo sapien
gctggatgccatagttgttgacaga

SEQ ID NO: 4947886 - DNA, 25 bp, Homo sapien
atgccatagttgttgacagactgct

SEQ ID NO: 4947887 - DNA, 25 bp, Homo sapien
aaatcagaactagcattccttgacc

SEQ ID NO: 4947888 - DNA, 25 bp, Homo sapien
ggccagcctgtaatgtccagagttt

SEQ ID NO: 4947889 - DNA, 25 bp, Homo sapien
tggccctttatgagactcctccttc

SEQ ID NO: 4947890 - DNA, 25 bp, Homo sapien
gaggtgcccacgcaaaactgcaaag

SEQ ID NO: 4947891 - DNA, 25 bp, Homo sapien
gcaaatcacgaatgtgccagcccca

SEQ ID NO: 4947892 - DNA, 25 bp, Homo sapien
aacgtgggttggcacaagaaaagca

SEQ ID NO: 4947893 - DNA, 25 bp, Homo sapien
cagcaggtaccaatgaaaccaggat

SEQ ID NO: 4947894 - DNA, 25 bp, Homo sapien
gagtgcccacttgagatgcttgcca

SEQ ID NO: 4947895 - DNA, 25 bp, Homo sapien
cagggagtccaagtgggtagatgga

SEQ ID NO: 4947896 - DNA, 25 bp, Homo sapien
ggatgaagaggcttagaaatgagat

SEQ ID NO: 4947897 - DNA, 25 bp, Homo sapien
gacagaggatgaagaggcttagaaa

SEQ ID NO: 4947898 - DNA, 25 bp, Homo sapien
gcctgatttagatggcagggagtcc

SEQ ID NO: 4947899 - DNA, 25 bp, Homo sapien
gccccgggatagagcacgttggaaa

SEQ ID NO: 4947900 - DNA, 25 bp, Homo sapien
cagaaattcagtaggaccctcccca

SEQ ID NO: 4947901 - DNA, 25 bp, Homo sapien
ttcgaggattctgccatagcggccc

SEQ ID NO: 4947902 - DNA, 25 bp, Homo sapien
taggcaacgtgtgaatacccagagt

SEQ ID NO: 4947903 - DNA, 25 bp, Homo sapien
ggtggcgtaggacagcatgtcacaa

SEQ ID NO: 4947904 - DNA, 25 bp, Homo sapien
aggcagacacaccatcgtggccaca

SEQ ID NO: 4947905 - DNA, 25 bp, Homo sapien
ggccacaggaaacgagtgcttcaaa

SEQ ID NO: 4947906 - DNA, 25 bp, Homo sapien
aagtgacaaatggatggcccacgca

SEQ ID NO: 4947907 - DNA, 25 bp, Homo sapien
caaagccaactgagcctacttctaa

SEQ ID NO: 4947908 - DNA, 25 bp, Homo sapien
aaagccaactgagcctacttctaaa

SEQ ID NO: 4947909 - DNA, 25 bp, Homo sapien
tccaacatgacagcagaggatcagt

SEQ ID NO: 4947910 - DNA, 25 bp, Homo sapien
caaagggaatggcacgctagaacct

SEQ ID NO: 4947911 - DNA, 25 bp, Homo sapien
cctatactagggacggaagtggaat

SEQ ID NO: 4947912 - DNA, 25 bp, Homo sapien
tcgcttagcggaggaaaacttatcc

SEQ ID NO: 4947913 - DNA, 25 bp, Homo sapien
gatcacactgtttaattaccatggc

SEQ ID NO: 4947914 - DNA, 25 bp, Homo sapien
tcagcaccattaataagactaccct

SEQ ID NO: 4947915 - DNA, 25 bp, Homo sapien
gtgagtcctccaactatagtcttct

SEQ ID NO: 4947916 - DNA, 25 bp, Homo sapien
tattccatatgacagacaggtggag

SEQ ID NO: 4947917 - DNA, 25 bp, Homo sapien
tgaactcttctttgaggtatcagtg

SEQ ID NO: 4947918 - DNA, 25 bp, Homo sapien
tttgaactcttctttgaggtatcag

SEQ ID NO: 4947919 - DNA, 25 bp, Homo sapien
gaactcttctttgaggtatcagtgc

SEQ ID NO: 4947920 - DNA, 25 bp, Homo sapien
ctttgaactcttctttgaggtatca

SEQ ID NO: 4947921 - DNA, 25 bp, Homo sapien
tgtcattgccttactctcagtgagg

SEQ ID NO: 4947922 - DNA, 25 bp, Homo sapien
gaaggcttcaaggtccacacgtcaa

SEQ ID NO: 4947923 - DNA, 25 bp, Homo sapien
cccttggaccagctgaaagcatctt

SEQ ID NO: 4947924 - DNA, 25 bp, Homo sapien
gattgccaagcatctactgcgtaag

SEQ ID NO: 4947925 - DNA, 25 bp, Homo sapien
tatcagtactgtgtatccacaaagc

SEQ ID NO: 4947926 - DNA, 25 bp, Homo sapien
tagtgtcctggagatctgtccacga

SEQ ID NO: 4947927 - DNA, 25 bp, Homo sapien
gatcatagtgcatgtattatccagc

SEQ ID NO: 4947928 - DNA, 25 bp, Homo sapien
tgccaagagggacggtgatacctat

SEQ ID NO: 4947929 - DNA, 25 bp, Homo sapien
aacaatcttcaaatggaggcatgcg

SEQ ID NO: 4947930 - DNA, 25 bp, Homo sapien
gctaccatcatcctttctagctggg

SEQ ID NO: 4947931 - DNA, 25 bp, Homo sapien
aaaatatactctccacaatgcctga

SEQ ID NO: 4947932 - DNA, 25 bp, Homo sapien
ccctgagaatatggacacgtggtca

SEQ ID NO: 4947933 - DNA, 25 bp, Homo sapien
cagtctgatcagtaaaaaactttga

SEQ ID NO: 4947934 - DNA, 25 bp, Homo sapien
aatttgcttcttaggaccctaatga

SEQ ID NO: 4947935 - DNA, 25 bp, Homo sapien
caattatgatagaatcctgtggtag

SEQ ID NO: 4947936 - DNA, 25 bp, Homo sapien
taatagtaacagttcaatccagaag

SEQ ID NO: 4947937 - DNA, 25 bp, Homo sapien
tcacccagttccgtcagtcgccacc

SEQ ID NO: 4947938 - DNA, 25 bp, Homo sapien
ctcccttcccgcgtccgcagccggc

SEQ ID NO: 4947939 - DNA, 25 bp, Homo sapien
cttcacccagttccgtcagtcgcca

SEQ ID NO: 4947940 - DNA, 25 bp, Homo sapien
ccagttccgtcagtcgccaccacct

SEQ ID NO: 4947941 - DNA, 25 bp, Homo sapien
gtcggcccaaaccaaccaatcaaga

SEQ ID NO: 4947942 - DNA, 25 bp, Homo sapien
agctgtactgcaactgtcggcccaa

SEQ ID NO: 4947943 - DNA, 25 bp, Homo sapien
aggtagctgtactgcaactgtcggc

SEQ ID NO: 4947944 - DNA, 25 bp, Homo sapien
aagagacgtgttattgccgccgagg

SEQ ID NO: 4947945 - DNA, 25 bp, Homo sapien
gctgcccagcgtcgtgctcctgggc

SEQ ID NO: 4947946 - DNA, 25 bp, Homo sapien
cttcttcttcgagaattacaccggg

SEQ ID NO: 4947947 - DNA, 25 bp, Homo sapien
ttacaccggggtccaggtgagccgc

SEQ ID NO: 4947948 - DNA, 25 bp, Homo sapien
ttctaccaagcgctggacgaccggc

SEQ ID NO: 4947949 - DNA, 25 bp, Homo sapien
tactgcgtctaccagagcatggtgc

SEQ ID NO: 4947950 - DNA, 25 bp, Homo sapien
ctgtgatatgaaggtcttgtgtgta

SEQ ID NO: 4947951 - DNA, 25 bp, Homo sapien
cagtcgtgacctcacatttccaatt

SEQ ID NO: 4947952 - DNA, 25 bp, Homo sapien
tcttgtgtgtacagtcgtgacctca

SEQ ID NO: 4947953 - DNA, 25 bp, Homo sapien
tatgaaggtcttgtgtgtacagtcg

SEQ ID NO: 4947954 - DNA, 25 bp, Homo sapien
cgtacgagcaccagagttgacgtga

SEQ ID NO: 4947955 - DNA, 25 bp, Homo sapien
tgtaagctttcagtgcgaataaaca

SEQ ID NO: 4947956 - DNA, 25 bp, Homo sapien
caccagagttgacgtgagacagaca

SEQ ID NO: 4947957 - DNA, 25 bp, Homo sapien
ctacaacgtacgagcaccagagttg

SEQ ID NO: 4947958 - DNA, 25 bp, Homo sapien
tctccctctgttggatgtaagtaag

SEQ ID NO: 4947959 - DNA, 25 bp, Homo sapien
cctttgtgtagctctttaaagagtg

SEQ ID NO: 4947960 - DNA, 25 bp, Homo sapien
gtagctctttaaagagtgtattcat

SEQ ID NO: 4947961 - DNA, 25 bp, Homo sapien
gtaagctatcttcttacttgcttgc

SEQ ID NO: 4947962 - DNA, 25 bp, Homo sapien
cattggtgggtcgaagtgtgtatac

SEQ ID NO: 4947963 - DNA, 25 bp, Homo sapien
ctagaagtagcattggtgggtcgaa

SEQ ID NO: 4947964 - DNA, 25 bp, Homo sapien
gatgtttctagaagtagcattggtg

SEQ ID NO: 4947965 - DNA, 25 bp, Homo sapien
tttttgtaagtgatgtttctagaag

SEQ ID NO: 4947966 - DNA, 25 bp, Homo sapien
gtgtccttgccttttgctgaacata

SEQ ID NO: 4947967 - DNA, 25 bp, Homo sapien
tgattgctgtcctaacctagtaccg

SEQ ID NO: 4947968 - DNA, 25 bp, Homo sapien
tgttccatacacatgctgctgttgg

SEQ ID NO: 4947969 - DNA, 25 bp, Homo sapien
taaggagcacatatatctacccagc

SEQ ID NO: 4947970 - DNA, 25 bp, Homo sapien
ggagacaaagcaccatgatcaccgg

SEQ ID NO: 4947971 - DNA, 25 bp, Homo sapien
aagaattcttcacggtcagctggcg

SEQ ID NO: 4947972 - DNA, 25 bp, Homo sapien
gagatgaacagtgaccctttatcct

SEQ ID NO: 4947973 - DNA, 25 bp, Homo sapien
gaagcttagctcgtgtgcacaggct

SEQ ID NO: 4947974 - DNA, 25 bp, Homo sapien
tatcccatgggagaagacctttcag

SEQ ID NO: 4947975 - DNA, 25 bp, Homo sapien
gatcccgtcagtggtgctgctcagc

SEQ ID NO: 4947976 - DNA, 25 bp, Homo sapien
cagatcacgatttttagccatggaa

SEQ ID NO: 4947977 - DNA, 25 bp, Homo sapien
tcagcggcttgcacgcagacttgct

SEQ ID NO: 4947978 - DNA, 25 bp, Homo sapien
cattttaacaaggtagcctgacctg

SEQ ID NO: 4947979 - DNA, 25 bp, Homo sapien
ctttataagaatgccgtcgatgtgc

SEQ ID NO: 4947980 - DNA, 25 bp, Homo sapien
gcctgacctgcataagatcacttga

SEQ ID NO: 4947981 - DNA, 25 bp, Homo sapien
taagagccgtatacctacctgtaag

SEQ ID NO: 4947982 - DNA, 25 bp, Homo sapien
gaagtgctcgtctgtacaatcgcta

SEQ ID NO: 4947983 - DNA, 25 bp, Homo sapien
tattccgtatctggtggaaagctac

SEQ ID NO: 4947984 - DNA, 25 bp, Homo sapien
ggaaagctacaatgcaatgtcgttg

SEQ ID NO: 4947985 - DNA, 25 bp, Homo sapien
gtttagagtagctacaactcttcga

SEQ ID NO: 4947986 - DNA, 25 bp, Homo sapien
agcttccccagttgctctgttagga

SEQ ID NO: 4947987 - DNA, 25 bp, Homo sapien
tgagctcaaggcaatgcagccaaca

SEQ ID NO: 4947988 - DNA, 25 bp, Homo sapien
tctgcttcccctctatcttcacccg

SEQ ID NO: 4947989 - DNA, 25 bp, Homo sapien
ccccaacgtccattaccactgagct

SEQ ID NO: 4947990 - DNA, 25 bp, Homo sapien
ctgactgttgctttggtgccacata

SEQ ID NO: 4947991 - DNA, 25 bp, Homo sapien
ctttggtgccacataagagaaatga

SEQ ID NO: 4947992 - DNA, 25 bp, Homo sapien
gagccttctcttccggtgctgggag

SEQ ID NO: 4947993 - DNA, 25 bp, Homo sapien
cttctcttccggtgctgggagccat

SEQ ID NO: 4947994 - DNA, 25 bp, Homo sapien
gacaagatcagacacccgaggtttc

SEQ ID NO: 4947995 - DNA, 25 bp, Homo sapien
gaagcccttagcattcaagcccctg

SEQ ID NO: 4947996 - DNA, 25 bp, Homo sapien
taagcgtgacctcaaagcctgtctg

SEQ ID NO: 4947997 - DNA, 25 bp, Homo sapien
catccacgctgggtgaaaggtaaga

SEQ ID NO: 4947998 - DNA, 25 bp, Homo sapien
agcctacagacaagcgcatctctgc

SEQ ID NO: 4947999 - DNA, 25 bp, Homo sapien
gcctacagacaagcgcatctctgct

SEQ ID NO: 4948000 - DNA, 25 bp, Homo sapien
ggagagaaaggtggctttggcttga

SEQ ID NO: 4948001 - DNA, 25 bp, Homo sapien
tggagctggaattggtgaagatgca

SEQ ID NO: 4948002 - DNA, 25 bp, Homo sapien
caactggaggtcactggctgtttgg

SEQ ID NO: 4948003 - DNA, 25 bp, Homo sapien
cctcagagatgtttggagtcttggg

SEQ ID NO: 4948004 - DNA, 25 bp, Homo sapien
gagtctgaaggctccatccccattt

SEQ ID NO: 4948005 - DNA, 25 bp, Homo sapien
ttgattaggctcagagattccaggc

SEQ ID NO: 4948006 - DNA, 25 bp, Homo sapien
tccaggcccgatgcctttgatctgt

SEQ ID NO: 4948007 - DNA, 25 bp, Homo sapien
tgatctgtgtgctcctacattctgc

SEQ ID NO: 4948008 - DNA, 25 bp, Homo sapien
cactggagagcacccctcaattgtg

SEQ ID NO: 4948009 - DNA, 25 bp, Homo sapien
tctcagtaaatatatcatggtccac

SEQ ID NO: 4948010 - DNA, 25 bp, Homo sapien
ctcaattgtggggaggccatgtatc

SEQ ID NO: 4948011 - DNA, 25 bp, Homo sapien
aggccatgtatcatttctgccgtcc

SEQ ID NO: 4948012 - DNA, 25 bp, Homo sapien
ccaaagagacctcatgggagtttca

SEQ ID NO: 4948013 - DNA, 25 bp, Homo sapien
cacatttgctttgcgaaaatctgag

SEQ ID NO: 4948014 - DNA, 25 bp, Homo sapien
ctttgacccaaagagacctcatggg

SEQ ID NO: 4948015 - DNA, 25 bp, Homo sapien
agacctcatgggagtttcacatttg

SEQ ID NO: 4948016 - DNA, 25 bp, Homo sapien
ggattacaggcgcctgctatcacga

SEQ ID NO: 4948017 - DNA, 25 bp, Homo sapien
ttacaggcgcctgctatcacgaccg

SEQ ID NO: 4948018 - DNA, 25 bp, Homo sapien
gggattacaggcgcctgctatcacg

SEQ ID NO: 4948019 - DNA, 25 bp, Homo sapien
attacaggcgcctgctatcacgacc

SEQ ID NO: 4948020 - DNA, 25 bp, Homo sapien
ggttgcacgttctatgggtctgaca

SEQ ID NO: 4948021 - DNA, 25 bp, Homo sapien
gttacagtccgtgaacctgcacaga

SEQ ID NO: 4948022 - DNA, 25 bp, Homo sapien
gagtaacgtcccagtgtctgagagg

SEQ ID NO: 4948023 - DNA, 25 bp, Homo sapien
catcacccggagtctatcgtttcca

SEQ ID NO: 4948024 - DNA, 25 bp, Homo sapien
ggctctaagttcagggtcagtccca

SEQ ID NO: 4948025 - DNA, 25 bp, Homo sapien
cggcgtttgtgcgtttgaaagcaac

SEQ ID NO: 4948026 - DNA, 25 bp, Homo sapien
accagcctgggtccgcgagggaggg

SEQ ID NO: 4948027 - DNA, 25 bp, Homo sapien
cttgaaaggacgagagcaccagcct

SEQ ID NO: 4948028 - DNA, 25 bp, Homo sapien
ctaataggcccttggctgttcttcc

SEQ ID NO: 4948029 - DNA, 25 bp, Homo sapien
ataggcccttggctgttcttccaaa

SEQ ID NO: 4948030 - DNA, 25 bp, Homo sapien
tgttcttccaaaacctcttctctat

SEQ ID NO: 4948031 - DNA, 25 bp, Homo sapien
gttcttccaaaacctcttctctatg

SEQ ID NO: 4948032 - DNA, 25 bp, Homo sapien
tccaggggcataagatggaggaaaa

SEQ ID NO: 4948033 - DNA, 25 bp, Homo sapien
gccttcggtgactgtgttgtgagcc

SEQ ID NO: 4948034 - DNA, 25 bp, Homo sapien
gggtatgtatagaatccacttctgg

SEQ ID NO: 4948035 - DNA, 25 bp, Homo sapien
tctgcggctgtaatttctattgcta

SEQ ID NO: 4948036 - DNA, 25 bp, Homo sapien
ttatagactgcctggagactccacg

SEQ ID NO: 4948037 - DNA, 25 bp, Homo sapien
gagtaagacaagtccccgaggcatc

SEQ ID NO: 4948038 - DNA, 25 bp, Homo sapien
catctcagcacggtagcagtgccag

SEQ ID NO: 4948039 - DNA, 25 bp, Homo sapien
cacgtctttggttaggtctggccga

SEQ ID NO: 4948040 - DNA, 25 bp, Homo sapien
gatgcaggcggagcgctctgccatt

SEQ ID NO: 4948041 - DNA, 25 bp, Homo sapien
gaagcggccatgttctgagatgtca

SEQ ID NO: 4948042 - DNA, 25 bp, Homo sapien
caagggcggcgagcactctctctgg

SEQ ID NO: 4948043 - DNA, 25 bp, Homo sapien
ccacactttgtaaacagctcctctg

SEQ ID NO: 4948044 - DNA, 25 bp, Homo sapien
tagagtctctcctatgcatgggtgg

SEQ ID NO: 4948045 - DNA, 25 bp, Homo sapien
ctttctcacggtaccaaatggccag

SEQ ID NO: 4948046 - DNA, 25 bp, Homo sapien
gattcataaccgctaaatgtgaggc

SEQ ID NO: 4948047 - DNA, 25 bp, Homo sapien
catttttcagggatgcagatggaga

SEQ ID NO: 4948048 - DNA, 25 bp, Homo sapien
gcagaagcctctacatgggcctgtg

SEQ ID NO: 4948049 - DNA, 25 bp, Homo sapien
tctgcagtggcgctgaagtacaacg

SEQ ID NO: 4948050 - DNA, 25 bp, Homo sapien
tcagatgaaaaaactcggctcttgc

SEQ ID NO: 4948051 - DNA, 25 bp, Homo sapien
agtacaacgtggaactctgctgtcc

SEQ ID NO: 4948052 - DNA, 25 bp, Homo sapien
ttagggacaccttcaaacgcagagc

SEQ ID NO: 4948053 - DNA, 25 bp, Homo sapien
caaaggcggcattgatcttagacac

SEQ ID NO: 4948054 - DNA, 25 bp, Homo sapien
caagtttcacccacagccagtggtg

SEQ ID NO: 4948055 - DNA, 25 bp, Homo sapien
tgtcccagaaacagcgtcagctcct

SEQ ID NO: 4948056 - DNA, 25 bp, Homo sapien
cagggtgctcattataaacagcaca

SEQ ID NO: 4948057 - DNA, 25 bp, Homo sapien
tcagggtgctcattataaacagcac

SEQ ID NO: 4948058 - DNA, 25 bp, Homo sapien
agtaagcctcccacgttatttccag

SEQ ID NO: 4948059 - DNA, 25 bp, Homo sapien
attccagtaagcctcccacgttatt

SEQ ID NO: 4948060 - DNA, 25 bp, Homo sapien
ctctcaggagtgtgacaggttttcg

SEQ ID NO: 4948061 - DNA, 25 bp, Homo sapien
aaaccaggcatccactctcaggagt

SEQ ID NO: 4948062 - DNA, 25 bp, Homo sapien
caggttttcggagtggtgtaggaca

SEQ ID NO: 4948063 - DNA, 25 bp, Homo sapien
gaactggaaggaaaccaggcatcca

SEQ ID NO: 4948064 - DNA, 25 bp, Homo sapien
gacgtactactttgagatcctggct

SEQ ID NO: 4948065 - DNA, 25 bp, Homo sapien
ccggagagctctgccaagtgaacaa

SEQ ID NO: 4948066 - DNA, 25 bp, Homo sapien
tccaaaccatgggatgcgactcagc

SEQ ID NO: 4948067 - DNA, 25 bp, Homo sapien
gaaacaagctgtggtccgtccaaac

SEQ ID NO: 4948068 - DNA, 25 bp, Homo sapien
aagaagtgaggacccgtgacgtctc

SEQ ID NO: 4948069 - DNA, 25 bp, Homo sapien
cgtgacgtctcatgaagaagaacag

SEQ ID NO: 4948070 - DNA, 25 bp, Homo sapien
tgtggctctcaaatgcttgttacga

SEQ ID NO: 4948071 - DNA, 25 bp, Homo sapien
aaatgcttgttacgaagccacagtg

SEQ ID NO: 4948072 - DNA, 25 bp, Homo sapien
ggtcattcctttcccaggtccaggc

SEQ ID NO: 4948073 - DNA, 25 bp, Homo sapien
gcccctgcatctcactaagtgtttg

SEQ ID NO: 4948074 - DNA, 25 bp, Homo sapien
gtcattcctttcccaggtccaggcc

SEQ ID NO: 4948075 - DNA, 25 bp, Homo sapien
tggggaatctctgtcctggcccatg

SEQ ID NO: 4948076 - DNA, 25 bp, Homo sapien
caggtgctggctttgacggtcccac

SEQ ID NO: 4948077 - DNA, 25 bp, Homo sapien
atgttgcagaagcacgaggccccac

SEQ ID NO: 4948078 - DNA, 25 bp, Homo sapien
gagggcaggagttgttgcagaggac

SEQ ID NO: 4948079 - DNA, 25 bp, Homo sapien
ctgagagtgacagtggtggaagcct

SEQ ID NO: 4948080 - DNA, 25 bp, Homo sapien
gagtgacagtggtggaagcctgctg

SEQ ID NO: 4948081 - DNA, 25 bp, Homo sapien
gagagtgacagtggtggaagcctgc

SEQ ID NO: 4948082 - DNA, 25 bp, Homo sapien
gtgacagtggtggaagcctgctgtg

SEQ ID NO: 4948083 - DNA, 25 bp, Homo sapien
agacaggaccccagctatggtctgc

SEQ ID NO: 4948084 - DNA, 25 bp, Homo sapien
ccctggagaaagtcggtggccaaca

SEQ ID NO: 4948085 - DNA, 25 bp, Homo sapien
gagaaagtcggtggccaacagcaac

SEQ ID NO: 4948086 - DNA, 25 bp, Homo sapien
ctatggtctgcaggctggtccacag

SEQ ID NO: 4948087 - DNA, 25 bp, Homo sapien
cgggacccaggacagaggcaccaca

SEQ ID NO: 4948088 - DNA, 25 bp, Homo sapien
ctgcgggacccaggacagaggcacc

SEQ ID NO: 4948089 - DNA, 25 bp, Homo sapien
tgcgggacccaggacagaggcacca

SEQ ID NO: 4948090 - DNA, 25 bp, Homo sapien
gggacccaggacagaggcaccacac

SEQ ID NO: 4948091 - DNA, 25 bp, Homo sapien
agtctttcctcaaccaaactccagt

SEQ ID NO: 4948092 - DNA, 25 bp, Homo sapien
ggtcctgtttgccacttagcgcaag

SEQ ID NO: 4948093 - DNA, 25 bp, Homo sapien
tacttctcaacagagcagatggtcc

SEQ ID NO: 4948094 - DNA, 25 bp, Homo sapien
tcccaaacgacattccactgacaaa

SEQ ID NO: 4948095 - DNA, 25 bp, Homo sapien
gcctgaaacgttctagcgccgtcca

SEQ ID NO: 4948096 - DNA, 25 bp, Homo sapien
acatcgtgcaggtcccctctgtaaa

SEQ ID NO: 4948097 - DNA, 25 bp, Homo sapien
cttttcttcaggtgaaccttgctca

SEQ ID NO: 4948098 - DNA, 25 bp, Homo sapien
ggtctttccattacttccgcagctt

SEQ ID NO: 4948099 - DNA, 25 bp, Homo sapien
gtagggttttgatagcgtcacttct

SEQ ID NO: 4948100 - DNA, 25 bp, Homo sapien
tgtagggttttgatagcgtcacttc

SEQ ID NO: 4948101 - DNA, 25 bp, Homo sapien
tcaacatagctgagcgatgcttggg

SEQ ID NO: 4948102 - DNA, 25 bp, Homo sapien
taatgctttcggatggcagcacggg

SEQ ID NO: 4948103 - DNA, 25 bp, Homo sapien
gcttccagacaggaattgcagcttc

SEQ ID NO: 4948104 - DNA, 25 bp, Homo sapien
gggtggtacactctccagtggccca

SEQ ID NO: 4948105 - DNA, 25 bp, Homo sapien
ctcagccacattggatcaatggagt

SEQ ID NO: 4948106 - DNA, 25 bp, Homo sapien
ccactcagccacattggatcaatgg

SEQ ID NO: 4948107 - DNA, 25 bp, Homo sapien
gccacattggatcaatggagtttag

SEQ ID NO: 4948108 - DNA, 25 bp, Homo sapien
cagccacattggatcaatggagttt

SEQ ID NO: 4948109 - DNA, 25 bp, Homo sapien
tctgaatggcccgtgccacggagcc

SEQ ID NO: 4948110 - DNA, 25 bp, Homo sapien
tgaatggcccgtgccacggagccag

SEQ ID NO: 4948111 - DNA, 25 bp, Homo sapien
ctcacactctgaatggcccgtgcca

SEQ ID NO: 4948112 - DNA, 25 bp, Homo sapien
acactctgaatggcccgtgccacgg

SEQ ID NO: 4948113 - DNA, 25 bp, Homo sapien
tatacactgtaaaagttaggataaa

SEQ ID NO: 4948114 - DNA, 25 bp, Homo sapien
tacactgtaaaagttaggataaaga

SEQ ID NO: 4948115 - DNA, 25 bp, Homo sapien
atacactgtaaaagttaggataaag

SEQ ID NO: 4948116 - DNA, 25 bp, Homo sapien
gtatacactgtaaaagttaggataa

SEQ ID NO: 4948117 - DNA, 25 bp, Homo sapien
ggtagcagaggatgtacacggcccc

SEQ ID NO: 4948118 - DNA, 25 bp, Homo sapien
tctgctgggcgacaagccagaatgt

SEQ ID NO: 4948119 - DNA, 25 bp, Homo sapien
ctatttctagaagggctgtcccaga

SEQ ID NO: 4948120 - DNA, 25 bp, Homo sapien
tgtcgatgatgtcactctgctgggc

SEQ ID NO: 4948121 - DNA, 25 bp, Homo sapien
aagattttggcctgtaacacagaac

SEQ ID NO: 4948122 - DNA, 25 bp, Homo sapien
taaaagattttggcctgtaacacag

SEQ ID NO: 4948123 - DNA, 25 bp, Homo sapien
aaagattttggcctgtaacacagaa

SEQ ID NO: 4948124 - DNA, 25 bp, Homo sapien
cataaaagattttggcctgtaacac

SEQ ID NO: 4948125 - DNA, 25 bp, Homo sapien
cccatgaagcgagtgtaggacacca

SEQ ID NO: 4948126 - DNA, 25 bp, Homo sapien
atgaagcccatgaagcgagtgtagg

SEQ ID NO: 4948127 - DNA, 25 bp, Homo sapien
gaaccagactcagcacgcgggttcc

SEQ ID NO: 4948128 - DNA, 25 bp, Homo sapien
aaagtggtaggctttgtagaacaga

SEQ ID NO: 4948129 - DNA, 25 bp, Homo sapien
caatatctgtgaagtctgaggctag

SEQ ID NO: 4948130 - DNA, 25 bp, Homo sapien
ctgtgaagtctgaggctagaaaaac

SEQ ID NO: 4948131 - DNA, 25 bp, Homo sapien
tatctgtgaagtctgaggctagaaa

SEQ ID NO: 4948132 - DNA, 25 bp, Homo sapien
aagtctgaggctagaaaaacatatg

SEQ ID NO: 4948133 - DNA, 25 bp, Homo sapien
agggccgacaggtcggcctcctgca

SEQ ID NO: 4948134 - DNA, 25 bp, Homo sapien
ctgcagccagcctcggtggggagcc

SEQ ID NO: 4948135 - DNA, 25 bp, Homo sapien
tcgaagggccgacaggtcggcctcc

SEQ ID NO: 4948136 - DNA, 25 bp, Homo sapien
ctccaagagtcgaagggccgacagg

SEQ ID NO: 4948137 - DNA, 25 bp, Homo sapien
caggtggctggagcaccatgcggag

SEQ ID NO: 4948138 - DNA, 25 bp, Homo sapien
ccggtgaagtagatcagggccctga

SEQ ID NO: 4948139 - DNA, 25 bp, Homo sapien
tagaactctgtgctgcgaaaactgg

SEQ ID NO: 4948140 - DNA, 25 bp, Homo sapien
tggaggctgatgtggtcccggtgaa

SEQ ID NO: 4948141 - DNA, 25 bp, Homo sapien
gaaatggtggtgctaccgacggaaa

SEQ ID NO: 4948142 - DNA, 25 bp, Homo sapien
ctggattggccacgatatgaatttc

SEQ ID NO: 4948143 - DNA, 25 bp, Homo sapien
tgtgaagacagcatagaccaaggac

SEQ ID NO: 4948144 - DNA, 25 bp, Homo sapien
cctggatacgaaagggacaccagca

SEQ ID NO: 4948145 - DNA, 25 bp, Homo sapien
aattgctaaaccaaggtgcatgcta

SEQ ID NO: 4948146 - DNA, 25 bp, Homo sapien
ttttgacaaccttgaactttcacta

SEQ ID NO: 4948147 - DNA, 25 bp, Homo sapien
tgctaaaccaaggtgcatgctaagg

SEQ ID NO: 4948148 - DNA, 25 bp, Homo sapien
tccttttgacaaccttgaactttca

SEQ ID NO: 4948149 - DNA, 25 bp, Homo sapien
gatgctctatgtggggctcatcact

SEQ ID NO: 4948150 - DNA, 25 bp, Homo sapien
gcctccggagaaagtcttgggaata

SEQ ID NO: 4948151 - DNA, 25 bp, Homo sapien
cactcatttcagtgcctccggagaa

SEQ ID NO: 4948152 - DNA, 25 bp, Homo sapien
gaaagtcttgggaatagcttgcagg

SEQ ID NO: 4948153 - DNA, 25 bp, Homo sapien
taggaggtgcagcatcatcaaggag

SEQ ID NO: 4948154 - DNA, 25 bp, Homo sapien
ctggatgcccgtctgctcggaacca

SEQ ID NO: 4948155 - DNA, 25 bp, Homo sapien
cagaagccgtcctgtggtgaagtag

SEQ ID NO: 4948156 - DNA, 25 bp, Homo sapien
gaaccacaggtagctcagggcctgg

SEQ ID NO: 4948157 - DNA, 25 bp, Homo sapien
gaaaagccttcggtgctgcagggct

SEQ ID NO: 4948158 - DNA, 25 bp, Homo sapien
aatgctgacacccagtccgtgccca

SEQ ID NO: 4948159 - DNA, 25 bp, Homo sapien
tcccttgcacgaaaagccttcggtg

SEQ ID NO: 4948160 - DNA, 25 bp, Homo sapien
gcggcagcctcccttgcacgaaaag

SEQ ID NO: 4948161 - DNA, 25 bp, Homo sapien
gggcgcttgcgcgtcctccgtgtgc

SEQ ID NO: 4948162 - DNA, 25 bp, Homo sapien
tccgtgtgcgtcctgctcggcgcgc

SEQ ID NO: 4948163 - DNA, 25 bp, Homo sapien
cggcgcgcctcggaagcagcgggac

SEQ ID NO: 4948164 - DNA, 25 bp, Homo sapien
agcccttccagtccggggcgcggag

SEQ ID NO: 4948165 - DNA, 25 bp, Homo sapien
gaagggcggatacatctcccctgct

SEQ ID NO: 4948166 - DNA, 25 bp, Homo sapien
tctgcgagcggcctccaagtcgcag

SEQ ID NO: 4948167 - DNA, 25 bp, Homo sapien
ccagacttgcgctcagcacatcttg

SEQ ID NO: 4948168 - DNA, 25 bp, Homo sapien
ttgtgatggaaggaagggcggatac

SEQ ID NO: 4948169 - DNA, 25 bp, Homo sapien
gcgcgctctgctcggccgcctgcag

SEQ ID NO: 4948170 - DNA, 25 bp, Homo sapien
agagccccaggagcctcgcgtgcat

SEQ ID NO: 4948171 - DNA, 25 bp, Homo sapien
gagagccccaggagcctcgcgtgca

SEQ ID NO: 4948172 - DNA, 25 bp, Homo sapien
tccgtgccgaccccgcagcctgcgc

SEQ ID NO: 4948173 - DNA, 25 bp, Homo sapien
cgtgccgaccccgcagcctgcgccc

SEQ ID NO: 4948174 - DNA, 25 bp, Homo sapien
cttccgtgccgaccccgcagcctgc

SEQ ID NO: 4948175 - DNA, 25 bp, Homo sapien
ttccgtgccgaccccgcagcctgcg

SEQ ID NO: 4948176 - DNA, 25 bp, Homo sapien
gccgccattctggaagcactcaggg

SEQ ID NO: 4948177 - DNA, 25 bp, Homo sapien
caggtgatcttcagcccgtcacagg

SEQ ID NO: 4948178 - DNA, 25 bp, Homo sapien
cactgtaggaggaaccaacggggat

SEQ ID NO: 4948179 - DNA, 25 bp, Homo sapien
tcaggggttttcgaaggcattggcc

SEQ ID NO: 4948180 - DNA, 25 bp, Homo sapien
cagggatttgacttggagccccagg

SEQ ID NO: 4948181 - DNA, 25 bp, Homo sapien
ctggagcccagattacccaggctac

SEQ ID NO: 4948182 - DNA, 25 bp, Homo sapien
agggatttgacttggagccccaggg

SEQ ID NO: 4948183 - DNA, 25 bp, Homo sapien
tagaaggcggccttgagaaagcgaa

SEQ ID NO: 4948184 - DNA, 25 bp, Homo sapien
ccttgagaaagcgaagatttggacc

SEQ ID NO: 4948185 - DNA, 25 bp, Homo sapien
gaaagcgaagatttggaccctgcag

SEQ ID NO: 4948186 - DNA, 25 bp, Homo sapien
cgaagatttggaccctgcagaaacc

SEQ ID NO: 4948187 - DNA, 25 bp, Homo sapien
ttgcccagggggaattcgtaattca

SEQ ID NO: 4948188 - DNA, 25 bp, Homo sapien
aaaggacttttatggtcctctgtga

SEQ ID NO: 4948189 - DNA, 25 bp, Homo sapien
ggcaaatacccaatcatgatgatgc

SEQ ID NO: 4948190 - DNA, 25 bp, Homo sapien
ttcgtaattcaggatttatgactct

SEQ ID NO: 4948191 - DNA, 25 bp, Homo sapien
ggtgctgggtcatagtcgctggatg

SEQ ID NO: 4948192 - DNA, 25 bp, Homo sapien
ggtcatagtcgctggatgagagatt

SEQ ID NO: 4948193 - DNA, 25 bp, Homo sapien
gctgggtcatagtcgctggatgaga

SEQ ID NO: 4948194 - DNA, 25 bp, Homo sapien
ttggtgctgggtcatagtcgctgga

SEQ ID NO: 4948195 - DNA, 25 bp, Homo sapien
gctggatttgattttgcgtgtttcc

SEQ ID NO: 4948196 - DNA, 25 bp, Homo sapien
gattttgcgtgtttcccacttagaa

SEQ ID NO: 4948197 - DNA, 25 bp, Homo sapien
ccacttagaatcagcctcataatac

SEQ ID NO: 4948198 - DNA, 25 bp, Homo sapien
taataccctgttgggactcagtaag

SEQ ID NO: 4948199 - DNA, 25 bp, Homo sapien
gtgatccccagtgggcaccagtgta

SEQ ID NO: 4948200 - DNA, 25 bp, Homo sapien
ccaggtcttgtggatgatgaccagc

SEQ ID NO: 4948201 - DNA, 25 bp, Homo sapien
cctcttccaggtcttgtggatgatg

SEQ ID NO: 4948202 - DNA, 25 bp, Homo sapien
ccccagtgggcaccagtgtatttgc

SEQ ID NO: 4948203 - DNA, 25 bp, Homo sapien
acaagattcattttggcccaaagga

SEQ ID NO: 4948204 - DNA, 25 bp, Homo sapien
ctcttccaattgagacacaagattc

SEQ ID NO: 4948205 - DNA, 25 bp, Homo sapien
acacaagattcattttggcccaaag

SEQ ID NO: 4948206 - DNA, 25 bp, Homo sapien
aagattcattttggcccaaaggagg

SEQ ID NO: 4948207 - DNA, 25 bp, Homo sapien
aaaaagttcatttcacttctgcgtc

SEQ ID NO: 4948208 - DNA, 25 bp, Homo sapien
aatgatcagatctgtggccaaggcc

SEQ ID NO: 4948209 - DNA, 25 bp, Homo sapien
cactgctgacgcaattgtaatgatc

SEQ ID NO: 4948210 - DNA, 25 bp, Homo sapien
taacaggtgccttgaattttggtaa

SEQ ID NO: 4948211 - DNA, 25 bp, Homo sapien
gaatagagacattgccctccactgc

SEQ ID NO: 4948212 - DNA, 25 bp, Homo sapien
gctgcaacgatttgagaacatctcg

SEQ ID NO: 4948213 - DNA, 25 bp, Homo sapien
aaataactgcaaaacaccggagagt

SEQ ID NO: 4948214 - DNA, 25 bp, Homo sapien
gaaattggcccatgattgatctttg

SEQ ID NO: 4948215 - DNA, 25 bp, Homo sapien
gaacatctcgcgaaagcagaacaaa

SEQ ID NO: 4948216 - DNA, 25 bp, Homo sapien
tttggactgaactgaatcccctagg

SEQ ID NO: 4948217 - DNA, 25 bp, Homo sapien
gaaagatggctttcacaccgatgga

SEQ ID NO: 4948218 - DNA, 25 bp, Homo sapien
tgtcgaagccctaacagtgcctcag

SEQ ID NO: 4948219 - DNA, 25 bp, Homo sapien
cgataaatctggtagcctgagcgga

SEQ ID NO: 4948220 - DNA, 25 bp, Homo sapien
taaggcaatgtgcttatggcacaag

SEQ ID NO: 4948221 - DNA, 25 bp, Homo sapien
tagagcgtctgtaattaaggcaatg

SEQ ID NO: 4948222 - DNA, 25 bp, Homo sapien
taagatagagtgtagaaagaggctc

SEQ ID NO: 4948223 - DNA, 25 bp, Homo sapien
tcaacagttggttctgggctgggca

SEQ ID NO: 4948224 - DNA, 25 bp, Homo sapien
aagtaagcagagagtaaacagcaga

SEQ ID NO: 4948225 - DNA, 25 bp, Homo sapien
tgaggccatctcagacaaaagtaag

SEQ ID NO: 4948226 - DNA, 25 bp, Homo sapien
gaggccatctcagacaaaagtaagc

SEQ ID NO: 4948227 - DNA, 25 bp, Homo sapien
cagagagtaaacagcagaaggtagg

SEQ ID NO: 4948228 - DNA, 25 bp, Homo sapien
gggagacgctggctcctttggaggc

SEQ ID NO: 4948229 - DNA, 25 bp, Homo sapien
tgcacaacctcgtcgacggaactga

SEQ ID NO: 4948230 - DNA, 25 bp, Homo sapien
ctggagcgtcactgtatttataaga

SEQ ID NO: 4948231 - DNA, 25 bp, Homo sapien
gactggtggattgcacaacctcgtc

SEQ ID NO: 4948232 - DNA, 25 bp, Homo sapien
gagtggtttgttcattggctttgca

SEQ ID NO: 4948233 - DNA, 25 bp, Homo sapien
ctgctgtaaccagctttttcctgtg

SEQ ID NO: 4948234 - DNA, 25 bp, Homo sapien
ttgtgtgtgcaactatcagctccca

SEQ ID NO: 4948235 - DNA, 25 bp, Homo sapien
tcaggagtccggatttgccgaagtc

SEQ ID NO: 4948236 - DNA, 25 bp, Homo sapien
tcatggcctggcgtaagagcaggtt

SEQ ID NO: 4948237 - DNA, 25 bp, Homo sapien
gctgccaccagtttacccatgtgaa

SEQ ID NO: 4948238 - DNA, 25 bp, Homo sapien
ctcctaagtcctggatctcactcac

SEQ ID NO: 4948239 - DNA, 25 bp, Homo sapien
ctggggctgccaccagtttacccat

SEQ ID NO: 4948240 - DNA, 25 bp, Homo sapien
cctcctttggaatctacgatccaga

SEQ ID NO: 4948241 - DNA, 25 bp, Homo sapien
tctacgatccagaatgggatcagct

SEQ ID NO: 4948242 - DNA, 25 bp, Homo sapien
tggaatctacgatccagaatgggat

SEQ ID NO: 4948243 - DNA, 25 bp, Homo sapien
cctttggaatctacgatccagaatg

SEQ ID NO: 4948244 - DNA, 25 bp, Homo sapien
aacatccacaataaacagaagtgtg

SEQ ID NO: 4948245 - DNA, 25 bp, Homo sapien
catccacaataaacagaagtgtgtt

SEQ ID NO: 4948246 - DNA, 25 bp, Homo sapien
tccacaataaacagaagtgtgttgt

SEQ ID NO: 4948247 - DNA, 25 bp, Homo sapien
tttaacatccacaataaacagaagt

SEQ ID NO: 4948248 - DNA, 25 bp, Homo sapien
ctctctcgaggatatctgggtgctt

SEQ ID NO: 4948249 - DNA, 25 bp, Homo sapien
tccaggagacgctctcccgaggata

SEQ ID NO: 4948250 - DNA, 25 bp, Homo sapien
ctctcgaggatatctgggtgcttgt

SEQ ID NO: 4948251 - DNA, 25 bp, Homo sapien
gatattttggcgcttgttctcccgg

SEQ ID NO: 4948252 - DNA, 25 bp, Homo sapien
ccggagtcgcagtgttatcggaaag

SEQ ID NO: 4948253 - DNA, 25 bp, Homo sapien
ttcggggggcgctgtctcgaggata

SEQ ID NO: 4948254 - DNA, 25 bp, Homo sapien
gggcgctgtctcgaggatatttggg

SEQ ID NO: 4948255 - DNA, 25 bp, Homo sapien
ttatcggaaagtgggtgacgtgcgg

SEQ ID NO: 4948256 - DNA, 25 bp, Homo sapien
ggagcttccatctttgctttcggcg

SEQ ID NO: 4948257 - DNA, 25 bp, Homo sapien
cactttggcttccgcttcaggaggg

SEQ ID NO: 4948258 - DNA, 25 bp, Homo sapien
tcaaagccttcactttggcttccgc

SEQ ID NO: 4948259 - DNA, 25 bp, Homo sapien
cttcactttggcttccgcttcagga

SEQ ID NO: 4948260 - DNA, 25 bp, Homo sapien
ccacccaaacgcaaaagctgggaga

SEQ ID NO: 4948261 - DNA, 25 bp, Homo sapien
tctcgggactgcatggtgtggctca

SEQ ID NO: 4948262 - DNA, 25 bp, Homo sapien
gttggctccctggaactctcgggac

SEQ ID NO: 4948263 - DNA, 25 bp, Homo sapien
tcttggtaggcagtccacagagaga

SEQ ID NO: 4948264 - DNA, 25 bp, Homo sapien
ctcagcataggtggcctgcgaggat

SEQ ID NO: 4948265 - DNA, 25 bp, Homo sapien
tctgctgatcacgagccaggaggag

SEQ ID NO: 4948266 - DNA, 25 bp, Homo sapien
tgccttgtgctgatggcttagcctg

SEQ ID NO: 4948267 - DNA, 25 bp, Homo sapien
aactgagccatagccacgttggagg

SEQ ID NO: 4948268 - DNA, 25 bp, Homo sapien
gcttagcctggtatgtctgctgatc

SEQ ID NO: 4948269 - DNA, 25 bp, Homo sapien
cagtggaagggctgccgcctggaag

SEQ ID NO: 4948270 - DNA, 25 bp, Homo sapien
ggcagtggaagggctgccgcctgga

SEQ ID NO: 4948271 - DNA, 25 bp, Homo sapien
ctggcagtggaagggctgccgcctg

SEQ ID NO: 4948272 - DNA, 25 bp, Homo sapien
gcagtggaagggctgccgcctggaa

SEQ ID NO: 4948273 - DNA, 25 bp, Homo sapien
tgtcgtggagtctgcgtaggtggca

SEQ ID NO: 4948274 - DNA, 25 bp, Homo sapien
ttgagttgctccacggccaaagaac

SEQ ID NO: 4948275 - DNA, 25 bp, Homo sapien
tgcgtaggtggcagagagcttgagt

SEQ ID NO: 4948276 - DNA, 25 bp, Homo sapien
agagagcttgagttgctccacggcc

SEQ ID NO: 4948277 - DNA, 25 bp, Homo sapien
ccccgattaagccagattgacaggg

SEQ ID NO: 4948278 - DNA, 25 bp, Homo sapien
tcccccgattaagccagattgacag

SEQ ID NO: 4948279 - DNA, 25 bp, Homo sapien
aaaatcccccgattaagccagattg

SEQ ID NO: 4948280 - DNA, 25 bp, Homo sapien
aatcccccgattaagccagattgac

SEQ ID NO: 4948281 - DNA, 25 bp, Homo sapien
ccagggtcccttgcatcgtccctgc

SEQ ID NO: 4948282 - DNA, 25 bp, Homo sapien
cagggtcccttgcatcgtccctgca

SEQ ID NO: 4948283 - DNA, 25 bp, Homo sapien
agggtcccttgcatcgtccctgcac

SEQ ID NO: 4948284 - DNA, 25 bp, Homo sapien
cacgtggtccgtgctgtttgagcca

SEQ ID NO: 4948285 - DNA, 25 bp, Homo sapien
gctgtaccatgtctctaggggaagg

SEQ ID NO: 4948286 - DNA, 25 bp, Homo sapien
tctacaaggtttaggagccgggata

SEQ ID NO: 4948287 - DNA, 25 bp, Homo sapien
gctgtcttgcgtggaggactgtcta

SEQ ID NO: 4948288 - DNA, 25 bp, Homo sapien
cgatgatcccatccgttttcagaga

SEQ ID NO: 4948289 - DNA, 25 bp, Homo sapien
attgtggattacgatgatcccatcc

SEQ ID NO: 4948290 - DNA, 25 bp, Homo sapien
tcccatccgttttcagagagtgttt

SEQ ID NO: 4948291 - DNA, 25 bp, Homo sapien
ctctatttgcttattgccagggtct

SEQ ID NO: 4948292 - DNA, 25 bp, Homo sapien
catcttcacactcccggtgagcaag

SEQ ID NO: 4948293 - DNA, 25 bp, Homo sapien
tgagaaggctgaagtaggcaccgca

SEQ ID NO: 4948294 - DNA, 25 bp, Homo sapien
ccattagtgactggtggccatcttc

SEQ ID NO: 4948295 - DNA, 25 bp, Homo sapien
aggcacctgctccattagtgactgg

SEQ ID NO: 4948296 - DNA, 25 bp, Homo sapien
gacacacgacagtttccttctaggt

SEQ ID NO: 4948297 - DNA, 25 bp, Homo sapien
tgtataggacacacgacagtttcct

SEQ ID NO: 4948298 - DNA, 25 bp, Homo sapien
tccttctaggtcataaagtaaatta

SEQ ID NO: 4948299 - DNA, 25 bp, Homo sapien
gatggcaatgtataggacacacgac

SEQ ID NO: 4948300 - DNA, 25 bp, Homo sapien
gaggcagcagaatctgtggttaata

SEQ ID NO: 4948301 - DNA, 25 bp, Homo sapien
cagaggcagcagaatctgtggttaa

SEQ ID NO: 4948302 - DNA, 25 bp, Homo sapien
tcagaggcagcagaatctgtggtta

SEQ ID NO: 4948303 - DNA, 25 bp, Homo sapien
aggcagcagaatctgtggttaatac

SEQ ID NO: 4948304 - DNA, 25 bp, Homo sapien
ctgcaatggcaagtgaaagcccttg

SEQ ID NO: 4948305 - DNA, 25 bp, Homo sapien
cttctgcaatggcaagtgaaagccc

SEQ ID NO: 4948306 - DNA, 25 bp, Homo sapien
ggtcccataggaatattctgttgaa

SEQ ID NO: 4948307 - DNA, 25 bp, Homo sapien
ccatgacagtgcaggtcccatagga

SEQ ID NO: 4948308 - DNA, 25 bp, Homo sapien
tggatcatcctcagcttggagtggc

SEQ ID NO: 4948309 - DNA, 25 bp, Homo sapien
caaaggagacggcaaagtcctggtc

SEQ ID NO: 4948310 - DNA, 25 bp, Homo sapien
taagacttgagcttgcatcctctgc

SEQ ID NO: 4948311 - DNA, 25 bp, Homo sapien
cagcctcataagcttttgcctgcag

SEQ ID NO: 4948312 - DNA, 25 bp, Homo sapien
ctggaggagagagagcaggagcaga

SEQ ID NO: 4948313 - DNA, 25 bp, Homo sapien
tggaggagagagagcaggagcagat

SEQ ID NO: 4948314 - DNA, 25 bp, Homo sapien
ggagagagagcaggagcagatgtgt

SEQ ID NO: 4948315 - DNA, 25 bp, Homo sapien
gaggagagagagcaggagcagatgt

SEQ ID NO: 4948316 - DNA, 25 bp, Homo sapien
ccgtctctaacctagtgtcatgatg

SEQ ID NO: 4948317 - DNA, 25 bp, Homo sapien
tacaacattagttcagggggcacag

SEQ ID NO: 4948318 - DNA, 25 bp, Homo sapien
cgtgtcagcggtagctgctggccct

SEQ ID NO: 4948319 - DNA, 25 bp, Homo sapien
tgtcatgatgtcgttcccccttgtg

SEQ ID NO: 4948320 - DNA, 25 bp, Homo sapien
ttgacaccctcaagctggggtaaat

SEQ ID NO: 4948321 - DNA, 25 bp, Homo sapien
cagcagcaaggatattcccacactc

SEQ ID NO: 4948322 - DNA, 25 bp, Homo sapien
tttcagacactcaacaagagccttg

SEQ ID NO: 4948323 - DNA, 25 bp, Homo sapien
cctcaagctggggtaaatatcctgg

SEQ ID NO: 4948324 - DNA, 25 bp, Homo sapien
gggcattctatgaatgaccctccag

SEQ ID NO: 4948325 - DNA, 25 bp, Homo sapien
tcataggccgttgacaagacatcct

SEQ ID NO: 4948326 - DNA, 25 bp, Homo sapien
tgtcttggcccatcagattgttttg

SEQ ID NO: 4948327 - DNA, 25 bp, Homo sapien
ccaagcatgtgtagtggattcataa

SEQ ID NO: 4948328 - DNA, 25 bp, Homo sapien
ctgcagaagcatgtgaagctaacac

SEQ ID NO: 4948329 - DNA, 25 bp, Homo sapien
acaaccatttcctgtagctctcaaa

SEQ ID NO: 4948330 - DNA, 25 bp, Homo sapien
cgatgatggcgttcccagcatgaca

SEQ ID NO: 4948331 - DNA, 25 bp, Homo sapien
gaagctaacaccaccgatgatggcg

SEQ ID NO: 4948332 - DNA, 25 bp, Homo sapien
ttaatcgacacgcgtgcagcagtat

SEQ ID NO: 4948333 - DNA, 25 bp, Homo sapien
taatcgacacgcgtgcagcagtatg

SEQ ID NO: 4948334 - DNA, 25 bp, Homo sapien
ggcagttcccaacacgaagttctgt

SEQ ID NO: 4948335 - DNA, 25 bp, Homo sapien
agagcagaccatgccccttgttgag

SEQ ID NO: 4948336 - DNA, 25 bp, Homo sapien
cggcagaatactaatctgcaagagc

SEQ ID NO: 4948337 - DNA, 25 bp, Homo sapien
aacacgaagttctgttcgccggcag

SEQ ID NO: 4948338 - DNA, 25 bp, Homo sapien
gctaccaagagaatagcagcgagga

SEQ ID NO: 4948339 - DNA, 25 bp, Homo sapien
gcttttatcccatgcaaaggaaata

SEQ ID NO: 4948340 - DNA, 25 bp, Homo sapien
cacctcttgcctggagtgggcctgc

SEQ ID NO: 4948341 - DNA, 25 bp, Homo sapien
gaaatagatatgtcctggtcttctg

SEQ ID NO: 4948342 - DNA, 25 bp, Homo sapien
agatcctcaagctaggcagggcgag

SEQ ID NO: 4948343 - DNA, 25 bp, Homo sapien
tcttatgtagcaagagcagccatgc

SEQ ID NO: 4948344 - DNA, 25 bp, Homo sapien
caggtcttatgtagcaagagcagcc

SEQ ID NO: 4948345 - DNA, 25 bp, Homo sapien
gttccaggtcttatgtagcaagagc

SEQ ID NO: 4948346 - DNA, 25 bp, Homo sapien
ggtttggggatgaccccacagtcaa

SEQ ID NO: 4948347 - DNA, 25 bp, Homo sapien
tccttggtgtctctggttctggtga

SEQ ID NO: 4948348 - DNA, 25 bp, Homo sapien
agtcaagatgagattccttggtgtc

SEQ ID NO: 4948349 - DNA, 25 bp, Homo sapien
tggtgaggccactgtttcccaggac

SEQ ID NO: 4948350 - DNA, 25 bp, Homo sapien
ggcccagtgaagtccatttgccacc

SEQ ID NO: 4948351 - DNA, 25 bp, Homo sapien
caagggattgctggccacagttttg

SEQ ID NO: 4948352 - DNA, 25 bp, Homo sapien
gctggccacagttttgcttgcctga

SEQ ID NO: 4948353 - DNA, 25 bp, Homo sapien
gctgaaagggtgatggcccaggaac

SEQ ID NO: 4948354 - DNA, 25 bp, Homo sapien
cagcacctgaggaatacagaacttg

SEQ ID NO: 4948355 - DNA, 25 bp, Homo sapien
gggctgtaggactccactctgtcag

SEQ ID NO: 4948356 - DNA, 25 bp, Homo sapien
taatgtggctgtagctctcatgatc

SEQ ID NO: 4948357 - DNA, 25 bp, Homo sapien
acagctgtggtgtgggttgccctct

SEQ ID NO: 4948358 - DNA, 25 bp, Homo sapien
taatttgacccaaacaggtccacgc

SEQ ID NO: 4948359 - DNA, 25 bp, Homo sapien
tgaggcatgaatcacctataggagg

SEQ ID NO: 4948360 - DNA, 25 bp, Homo sapien
ccttcgagtggtggaaagtagcctg

SEQ ID NO: 4948361 - DNA, 25 bp, Homo sapien
tagcctgggcatgtttgttctgaat

SEQ ID NO: 4948362 - DNA, 25 bp, Homo sapien
catcaggtcaccaattgttcgggca

SEQ ID NO: 4948363 - DNA, 25 bp, Homo sapien
tcgggcaatagggtcgctgctgcta

SEQ ID NO: 4948364 - DNA, 25 bp, Homo sapien
tgtatggctgggctcagcataccct

SEQ ID NO: 4948365 - DNA, 25 bp, Homo sapien
ctgccttccctgaggtatgtggact

SEQ ID NO: 4948366 - DNA, 25 bp, Homo sapien
tctatacgggcattgtgtgtagtgg

SEQ ID NO: 4948367 - DNA, 25 bp, Homo sapien
tagccaggatggacgtgctttctcc

SEQ ID NO: 4948368 - DNA, 25 bp, Homo sapien
cagctgccaggaagtttatgcctgc

SEQ ID NO: 4948369 - DNA, 25 bp, Homo sapien
taacgggggataatgagctgcagct

SEQ ID NO: 4948370 - DNA, 25 bp, Homo sapien
tgagagaccacctgctgagccagct

SEQ ID NO: 4948371 - DNA, 25 bp, Homo sapien
aatgtcccagtatgcgcagggcctg

SEQ ID NO: 4948372 - DNA, 25 bp, Homo sapien
cccagttaagacatggagggcttct

SEQ ID NO: 4948373 - DNA, 25 bp, Homo sapien
ccacaaagtggctggcaccctaatg

SEQ ID NO: 4948374 - DNA, 25 bp, Homo sapien
gggcctgaactttgtgtgggttgtg

SEQ ID NO: 4948375 - DNA, 25 bp, Homo sapien
tatctctagaatctttacagcagtg

SEQ ID NO: 4948376 - DNA, 25 bp, Homo sapien
cactgaggaccaggttatctctaga

SEQ ID NO: 4948377 - DNA, 25 bp, Homo sapien
caaggtgaatttggtggcccactga

SEQ ID NO: 4948378 - DNA, 25 bp, Homo sapien
aaagcaaacacagactgcgacccgt

SEQ ID NO: 4948379 - DNA, 25 bp, Homo sapien
acagcctgagtgcaatttggtaaat

SEQ ID NO: 4948380 - DNA, 25 bp, Homo sapien
caaagcaaacacagactgcgacccg

SEQ ID NO: 4948381 - DNA, 25 bp, Homo sapien
atttggtaaatgtgcactgggtccc

SEQ ID NO: 4948382 - DNA, 25 bp, Homo sapien
tcgcttccgtgtccatccatgatct

SEQ ID NO: 4948383 - DNA, 25 bp, Homo sapien
gcccacgtgactctcaaactccaac

SEQ ID NO: 4948384 - DNA, 25 bp, Homo sapien
catctcttgtggtctctttcacttt

SEQ ID NO: 4948385 - DNA, 25 bp, Homo sapien
tctaaaaatctttgcaacactttcg

SEQ ID NO: 4948386 - DNA, 25 bp, Homo sapien
taataagagcctcgacaccatcagc

SEQ ID NO: 4948387 - DNA, 25 bp, Homo sapien
agtatcgactcccaggcacagtaga

SEQ ID NO: 4948388 - DNA, 25 bp, Homo sapien
gcacagtagacgtggctgaaactct

SEQ ID NO: 4948389 - DNA, 25 bp, Homo sapien
gaatatttaaacgagtctggacact

SEQ ID NO: 4948390 - DNA, 25 bp, Homo sapien
ggttctggtacgtgatttcgtcctg

SEQ ID NO: 4948391 - DNA, 25 bp, Homo sapien
gtacgtgatttcgtcctggtaggga

SEQ ID NO: 4948392 - DNA, 25 bp, Homo sapien
gtcgtggaacccagtgtgcacgtta

SEQ ID NO: 4948393 - DNA, 25 bp, Homo sapien
ggaagggcagtcgtggaacccagtg

SEQ ID NO: 4948394 - DNA, 25 bp, Homo sapien
ggagcactgcaagtccctctacggt

SEQ ID NO: 4948395 - DNA, 25 bp, Homo sapien
gtagcgtactccaggagcactgcaa

SEQ ID NO: 4948396 - DNA, 25 bp, Homo sapien
agcagtatgggtagcgtactccagg

SEQ ID NO: 4948397 - DNA, 25 bp, Homo sapien
tctacggtgttctccaggactgtag

SEQ ID NO: 4948398 - DNA, 25 bp, Homo sapien
aggagctctttcatcccatgcaaag

SEQ ID NO: 4948399 - DNA, 25 bp, Homo sapien
tgggctgtagcctcatcagcaattg

SEQ ID NO: 4948400 - DNA, 25 bp, Homo sapien
catcccatgcaaaggaatcaaccac

SEQ ID NO: 4948401 - DNA, 25 bp, Homo sapien
gcaattgcctggagtggctccgccc

SEQ ID NO: 4948402 - DNA, 25 bp, Homo sapien
tgaggttacgcggtgaggaatctgc

SEQ ID NO: 4948403 - DNA, 25 bp, Homo sapien
ttttgaggttacgcggtgaggaatc

SEQ ID NO: 4948404 - DNA, 25 bp, Homo sapien
ttacgcggtgaggaatctgctgtag

SEQ ID NO: 4948405 - DNA, 25 bp, Homo sapien
gttacgcggtgaggaatctgctgta

SEQ ID NO: 4948406 - DNA, 25 bp, Homo sapien
tgtgttacttacagatcctcaagct

SEQ ID NO: 4948407 - DNA, 25 bp, Homo sapien
cacagttcagattgggggcacagcc

SEQ ID NO: 4948408 - DNA, 25 bp, Homo sapien
gccaccagaggttcagacagatgtt

SEQ ID NO: 4948409 - DNA, 25 bp, Homo sapien
tgttgaaacctcaatgtgaaagttt

SEQ ID NO: 4948410 - DNA, 25 bp, Homo sapien
gccagcgtgcatagcgtagtataca

SEQ ID NO: 4948411 - DNA, 25 bp, Homo sapien
aaaagcaccaacctacacactgagg

SEQ ID NO: 4948412 - DNA, 25 bp, Homo sapien
gaaaaaagcaccaacctacacactg

SEQ ID NO: 4948413 - DNA, 25 bp, Homo sapien
aaaaagcaccaacctacacactgag

SEQ ID NO: 4948414 - DNA, 25 bp, Homo sapien
aaaaaagcaccaacctacacactga

SEQ ID NO: 4948415 - DNA, 25 bp, Homo sapien
gggtctgggcattcgctttactgct

SEQ ID NO: 4948416 - DNA, 25 bp, Homo sapien
aggtggccacccacgacgggaagtg

SEQ ID NO: 4948417 - DNA, 25 bp, Homo sapien
gaccccacagtcaaggcaagtttcc

SEQ ID NO: 4948418 - DNA, 25 bp, Homo sapien
tgcacaggctgttagccctgtgggt

SEQ ID NO: 4948419 - DNA, 25 bp, Homo sapien
tccttagtggtataggacgtttcca

SEQ ID NO: 4948420 - DNA, 25 bp, Homo sapien
tagtggtataggacgtttccatcca

SEQ ID NO: 4948421 - DNA, 25 bp, Homo sapien
gagccgtgttttccttagtggtata

SEQ ID NO: 4948422 - DNA, 25 bp, Homo sapien
aaagcttgagccgtgttttccttag

SEQ ID NO: 4948423 - DNA, 25 bp, Homo sapien
gaacataagataccaagcaagacca

SEQ ID NO: 4948424 - DNA, 25 bp, Homo sapien
tgacagtagctccacaagccatggg

SEQ ID NO: 4948425 - DNA, 25 bp, Homo sapien
gcaagaccaaccataaagagcactg

SEQ ID NO: 4948426 - DNA, 25 bp, Homo sapien
cagggcagtcctgttctagcagctt

SEQ ID NO: 4948427 - DNA, 25 bp, Homo sapien
cagtatgaggagttatcattattgg

SEQ ID NO: 4948428 - DNA, 25 bp, Homo sapien
gatgttgagacaatggacctcttat

SEQ ID NO: 4948429 - DNA, 25 bp, Homo sapien
cattattggagcaaatgtgaatgat

SEQ ID NO: 4948430 - DNA, 25 bp, Homo sapien
gacaatggacctcttatcacagtat

SEQ ID NO: 4948431 - DNA, 25 bp, Homo sapien
atcttctatgtctgaaagctagtta

SEQ ID NO: 4948432 - DNA, 25 bp, Homo sapien
ggactttacgagagatgaggaaagg

SEQ ID NO: 4948433 - DNA, 25 bp, Homo sapien
gtctgaaagctagttatgaacttac

SEQ ID NO: 4948434 - DNA, 25 bp, Homo sapien
ggagaccaagtacagtagtaatgaa

SEQ ID NO: 4948435 - DNA, 25 bp, Homo sapien
aagcagaatttgtagtgaatctcac

SEQ ID NO: 4948436 - DNA, 25 bp, Homo sapien
gaggaagcagaatttgtagtgaatc

SEQ ID NO: 4948437 - DNA, 25 bp, Homo sapien
tgttccacaagctcagaggaagcag

SEQ ID NO: 4948438 - DNA, 25 bp, Homo sapien
cttctgttccacaagctcagaggaa

SEQ ID NO: 4948439 - DNA, 25 bp, Homo sapien
gataatctcttattctgcaagagca

SEQ ID NO: 4948440 - DNA, 25 bp, Homo sapien
tctgcaagagcatctcaagagggtt

SEQ ID NO: 4948441 - DNA, 25 bp, Homo sapien
gaggtgcaggttccatagttgcgtt

SEQ ID NO: 4948442 - DNA, 25 bp, Homo sapien
tgcgttcttgaagatgataatctct

SEQ ID NO: 4948443 - DNA, 25 bp, Homo sapien
ggtaaagtcctggtcgtctgcccca

SEQ ID NO: 4948444 - DNA, 25 bp, Homo sapien
cccagtgaaggagatggtaaagtcc

SEQ ID NO: 4948445 - DNA, 25 bp, Homo sapien
cagctcttgcctggagtggctcaga

SEQ ID NO: 4948446 - DNA, 25 bp, Homo sapien
taaaacctgagcttgtgtccccagt

SEQ ID NO: 4948447 - DNA, 25 bp, Homo sapien
cagcgctttcatcccatgtaaagga

SEQ ID NO: 4948448 - DNA, 25 bp, Homo sapien
ctgaaagtggaagtgcagcgctttc

SEQ ID NO: 4948449 - DNA, 25 bp, Homo sapien
acacttcctgatcatctgctccagg

SEQ ID NO: 4948450 - DNA, 25 bp, Homo sapien
aaaggaaacagacacttcctgatca

SEQ ID NO: 4948451 - DNA, 25 bp, Homo sapien
tgcagcttcatcagctcttgcccga

SEQ ID NO: 4948452 - DNA, 25 bp, Homo sapien
cttgcccgaagtggctccgcctgag

SEQ ID NO: 4948453 - DNA, 25 bp, Homo sapien
tcatcagctcttgcccgaagtggct

SEQ ID NO: 4948454 - DNA, 25 bp, Homo sapien
agcttcatcagctcttgcccgaagt

SEQ ID NO: 4948455 - DNA, 25 bp, Homo sapien
caaagagaacggtggcagtgaggag

SEQ ID NO: 4948456 - DNA, 25 bp, Homo sapien
tcagccccctgcagcaacaagaacg

SEQ ID NO: 4948457 - DNA, 25 bp, Homo sapien
ccctgcagcaacaagaacgctacca

SEQ ID NO: 4948458 - DNA, 25 bp, Homo sapien
ggtacaggagtaatagcaattccct

SEQ ID NO: 4948459 - DNA, 25 bp, Homo sapien
aggagtaatagcaattccctgtagc

SEQ ID NO: 4948460 - DNA, 25 bp, Homo sapien
aaagcaaattttgagctcatttttc

SEQ ID NO: 4948461 - DNA, 25 bp, Homo sapien
cagaaggtacaggagtaatagcaat

SEQ ID NO: 4948462 - DNA, 25 bp, Homo sapien
agatgcaggttccatagcgacgttc

SEQ ID NO: 4948463 - DNA, 25 bp, Homo sapien
catagcgacgttctcctgcaatgca

SEQ ID NO: 4948464 - DNA, 25 bp, Homo sapien
atgcacgctggtattctgcaatagc

SEQ ID NO: 4948465 - DNA, 25 bp, Homo sapien
cgttctcctgcaatgcacgctggta

SEQ ID NO: 4948466 - DNA, 25 bp, Homo sapien
cccatgcaagggaaacaaccacttc

SEQ ID NO: 4948467 - DNA, 25 bp, Homo sapien
ggatgtccgctgcaatctgctccgg

SEQ ID NO: 4948468 - DNA, 25 bp, Homo sapien
tttggagccaagctttcgtcccatg

SEQ ID NO: 4948469 - DNA, 25 bp, Homo sapien
tcagctcttgcctggagtggctcag

SEQ ID NO: 4948470 - DNA, 25 bp, Homo sapien
taattcacttcaggattcaggtgac

SEQ ID NO: 4948471 - DNA, 25 bp, Homo sapien
tatatgagttccaatggaatagcga

SEQ ID NO: 4948472 - DNA, 25 bp, Homo sapien
gaatagcgagtaattcacttcagga

SEQ ID NO: 4948473 - DNA, 25 bp, Homo sapien
attctggtgtcctatatgagttcca

SEQ ID NO: 4948474 - DNA, 25 bp, Homo sapien
catgaagaggtttttgaggttatgg

SEQ ID NO: 4948475 - DNA, 25 bp, Homo sapien
ttgaggttatggggtgagtagtctc

SEQ ID NO: 4948476 - DNA, 25 bp, Homo sapien
catcctcatgaagaggtttttgagg

SEQ ID NO: 4948477 - DNA, 25 bp, Homo sapien
ttttgaggttatggggtgagtagtc

SEQ ID NO: 4948478 - DNA, 25 bp, Homo sapien
aatcagggtggagaggacaatgatt

SEQ ID NO: 4948479 - DNA, 25 bp, Homo sapien
ggtggagaggacaatgattttatca

SEQ ID NO: 4948480 - DNA, 25 bp, Homo sapien
cagggtggagaggacaatgatttta

SEQ ID NO: 4948481 - DNA, 25 bp, Homo sapien
taggaatcagggtggagaggacaat

SEQ ID NO: 4948482 - DNA, 25 bp, Homo sapien
catgtagaaacatcaactcagaatg

SEQ ID NO: 4948483 - DNA, 25 bp, Homo sapien
atgtagaaacatcaactcagaatga

SEQ ID NO: 4948484 - DNA, 25 bp, Homo sapien
ccatgtagaaacatcaactcagaat

SEQ ID NO: 4948485 - DNA, 25 bp, Homo sapien
accatgtagaaacatcaactcagaa

SEQ ID NO: 4948486 - DNA, 25 bp, Homo sapien
gacatgtcaaccaggacatgtgaca

SEQ ID NO: 4948487 - DNA, 25 bp, Homo sapien
tggacatgtcaaccaggacatgtga

SEQ ID NO: 4948488 - DNA, 25 bp, Homo sapien
caaccaggacatgtgacatgtgtgt

SEQ ID NO: 4948489 - DNA, 25 bp, Homo sapien
tgtcaaccaggacatgtgacatgtg

SEQ ID NO: 4948490 - DNA, 25 bp, Homo sapien
agatcctctagctaggcagggtgac

SEQ ID NO: 4948491 - DNA, 25 bp, Homo sapien
gtgggttctggagcaataatcccta

SEQ ID NO: 4948492 - DNA, 25 bp, Homo sapien
ggttctggagcaataatccctactt

SEQ ID NO: 4948493 - DNA, 25 bp, Homo sapien
tttgaaggcttcttctcctcgttac

SEQ ID NO: 4948494 - DNA, 25 bp, Homo sapien
tactgcctctgactgcaccctcggt

SEQ ID NO: 4948495 - DNA, 25 bp, Homo sapien
ccaaagacacgatgtcccagtacat

SEQ ID NO: 4948496 - DNA, 25 bp, Homo sapien
caagtggggtatagctgtctccaaa

SEQ ID NO: 4948497 - DNA, 25 bp, Homo sapien
cagaatggacaagtggggtatagct

SEQ ID NO: 4948498 - DNA, 25 bp, Homo sapien
cagtggatgtgaagggcttctgggt

SEQ ID NO: 4948499 - DNA, 25 bp, Homo sapien
ttaactctcaaagtaaattctgagc

SEQ ID NO: 4948500 - DNA, 25 bp, Homo sapien
ggcgcaggacccaaagcgacgttat

SEQ ID NO: 4948501 - DNA, 25 bp, Homo sapien
gagtgtaccacgaaaggcgcaggac

SEQ ID NO: 4948502 - DNA, 25 bp, Homo sapien
gcagcagatccggtggagtgtacca

SEQ ID NO: 4948503 - DNA, 25 bp, Homo sapien
atcagctcttgcctgaagtggctct

SEQ ID NO: 4948504 - DNA, 25 bp, Homo sapien
ctgaaagcggaagagcggcactttc

SEQ ID NO: 4948505 - DNA, 25 bp, Homo sapien
gaagagcggcactttcatgccatgt

SEQ ID NO: 4948506 - DNA, 25 bp, Homo sapien
cttgcctgaagtggctctgcctgag

SEQ ID NO: 4948507 - DNA, 25 bp, Homo sapien
tgaggagggcaaaggtcctcatggc

SEQ ID NO: 4948508 - DNA, 25 bp, Homo sapien
gggcaaaggtcctcatggctggggt

SEQ ID NO: 4948509 - DNA, 25 bp, Homo sapien
gaggagggcaaaggtcctcatggct

SEQ ID NO: 4948510 - DNA, 25 bp, Homo sapien
caaaggtcctcatggctggggtgac

SEQ ID NO: 4948511 - DNA, 25 bp, Homo sapien
gatcctcaaggtaggcagagtgaag

SEQ ID NO: 4948512 - DNA, 25 bp, Homo sapien
tttcaccgtgttgcgctgtctggtc

SEQ ID NO: 4948513 - DNA, 25 bp, Homo sapien
ttacccagataagagaagctgaggc

SEQ ID NO: 4948514 - DNA, 25 bp, Homo sapien
tcttaaatttgagtgcacaactccg

SEQ ID NO: 4948515 - DNA, 25 bp, Homo sapien
cacaactccgctaatatgcctgaaa

SEQ ID NO: 4948516 - DNA, 25 bp, Homo sapien
aaagcaaattttgagctcatttttc

SEQ ID NO: 4948517 - DNA, 25 bp, Homo sapien
aggagtaatagcaattccctgtagc

SEQ ID NO: 4948518 - DNA, 25 bp, Homo sapien
ggtacaggagtaatagcaattccct

SEQ ID NO: 4948519 - DNA, 25 bp, Homo sapien
cagaaggtacaggagtaatagcaat

SEQ ID NO: 4948520 - DNA, 25 bp, Homo sapien
agatgcaggttccatagcgacgttc

SEQ ID NO: 4948521 - DNA, 25 bp, Homo sapien
catagcgacgttctcctgcaatgca

SEQ ID NO: 4948522 - DNA, 25 bp, Homo sapien
atgcacgctggtattctgcaatagc

SEQ ID NO: 4948523 - DNA, 25 bp, Homo sapien
cgttctcctgcaatgcacgctggta

SEQ ID NO: 4948524 - DNA, 25 bp, Homo sapien
cccatgcaagggaaacaaccacttc

SEQ ID NO: 4948525 - DNA, 25 bp, Homo sapien
tttggagccaagctttcgtcccatg

SEQ ID NO: 4948526 - DNA, 25 bp, Homo sapien
ggatgtccgctgcaatctgctccgg

SEQ ID NO: 4948527 - DNA, 25 bp, Homo sapien
tcagctcttgcctggagtggctcag

SEQ ID NO: 4948528 - DNA, 25 bp, Homo sapien
taattcacttcaggattcaggtgac

SEQ ID NO: 4948529 - DNA, 25 bp, Homo sapien
tatatgagttccaatggaatagcga

SEQ ID NO: 4948530 - DNA, 25 bp, Homo sapien
gaatagcgagtaattcacttcagga

SEQ ID NO: 4948531 - DNA, 25 bp, Homo sapien
attctggtgtcctatatgagttcca

SEQ ID NO: 4948532 - DNA, 25 bp, Homo sapien
ttgaggttatggggtgagtagtctc

SEQ ID NO: 4948533 - DNA, 25 bp, Homo sapien
catcctcatgaagaggtttttgagg

SEQ ID NO: 4948534 - DNA, 25 bp, Homo sapien
catgaagaggtttttgaggttatgg

SEQ ID NO: 4948535 - DNA, 25 bp, Homo sapien
ttttgaggttatggggtgagtagtc

SEQ ID NO: 4948536 - DNA, 25 bp, Homo sapien
aatcagggtggagaggacaatgatt

SEQ ID NO: 4948537 - DNA, 25 bp, Homo sapien
ggtggagaggacaatgattttatca

SEQ ID NO: 4948538 - DNA, 25 bp, Homo sapien
cagggtggagaggacaatgatttta

SEQ ID NO: 4948539 - DNA, 25 bp, Homo sapien
taggaatcagggtggagaggacaat

SEQ ID NO: 4948540 - DNA, 25 bp, Homo sapien
catgtagaaacatcaactcagaatg

SEQ ID NO: 4948541 - DNA, 25 bp, Homo sapien
atgtagaaacatcaactcagaatga

SEQ ID NO: 4948542 - DNA, 25 bp, Homo sapien
ccatgtagaaacatcaactcagaat

SEQ ID NO: 4948543 - DNA, 25 bp, Homo sapien
accatgtagaaacatcaactcagaa

SEQ ID NO: 4948544 - DNA, 25 bp, Homo sapien
tggacatgtcaaccaggacatgtgt

SEQ ID NO: 4948545 - DNA, 25 bp, Homo sapien
agatcctctagctaggcagggtgac

SEQ ID NO: 4948546 - DNA, 25 bp, Homo sapien
gtgggttctggagcaataatcccta

SEQ ID NO: 4948547 - DNA, 25 bp, Homo sapien
ggttctggagcaataatccctactt

SEQ ID NO: 4948548 - DNA, 25 bp, Homo sapien
tttgaaggcttcttctcctcgttac

SEQ ID NO: 4948549 - DNA, 25 bp, Homo sapien
tactgcctctgactgcaccctcggt

SEQ ID NO: 4948550 - DNA, 25 bp, Homo sapien
ccaaagacacgatgtcccagtacat

SEQ ID NO: 4948551 - DNA, 25 bp, Homo sapien
caagtggggtatagctgtctccaaa

SEQ ID NO: 4948552 - DNA, 25 bp, Homo sapien
cagtggatgtgaagggcttctgggt

SEQ ID NO: 4948553 - DNA, 25 bp, Homo sapien
cagaatggacaagtggggtatagct

SEQ ID NO: 4948554 - DNA, 25 bp, Homo sapien
ttaactctcaaagtaaattctgagc

SEQ ID NO: 4948555 - DNA, 25 bp, Homo sapien
ggcgcaggacccaaagcgacgttat

SEQ ID NO: 4948556 - DNA, 25 bp, Homo sapien
gcagcagatccggtggagtgtacca

SEQ ID NO: 4948557 - DNA, 25 bp, Homo sapien
gagtgtaccacgaaaggcgcaggac

SEQ ID NO: 4948558 - DNA, 25 bp, Homo sapien
atcagctcttgcctgaagtggctct

SEQ ID NO: 4948559 - DNA, 25 bp, Homo sapien
ctgaaagcggaagagcggcactttc

SEQ ID NO: 4948560 - DNA, 25 bp, Homo sapien
gaagagcggcactttcatgccatgt

SEQ ID NO: 4948561 - DNA, 25 bp, Homo sapien
cttgcctgaagtggctctgcctgag

SEQ ID NO: 4948562 - DNA, 25 bp, Homo sapien
tgaggagggcaaaggtcctcatggc

SEQ ID NO: 4948563 - DNA, 25 bp, Homo sapien
gggcaaaggtcctcatggctggggt

SEQ ID NO: 4948564 - DNA, 25 bp, Homo sapien
gaggagggcaaaggtcctcatggct

SEQ ID NO: 4948565 - DNA, 25 bp, Homo sapien
caaaggtcctcatggctggggtgac

SEQ ID NO: 4948566 - DNA, 25 bp, Homo sapien
gatcctcaaggtaggcagagtgaag

SEQ ID NO: 4948567 - DNA, 25 bp, Homo sapien
tttcaccgtgttgcgctgtctggtc

SEQ ID NO: 4948568 - DNA, 25 bp, Homo sapien
ttacccagataagagaagctgaggc

SEQ ID NO: 4948569 - DNA, 25 bp, Homo sapien
tcttaaatttgagtgcacaactccg

SEQ ID NO: 4948570 - DNA, 25 bp, Homo sapien
cacaactccgctaatatgcctgaaa

SEQ ID NO: 4948571 - DNA, 25 bp, Homo sapien
cagaaggtacaggagtaatagcaat

SEQ ID NO: 4948572 - DNA, 25 bp, Homo sapien
aaagcaaattttgagctcatttttc

SEQ ID NO: 4948573 - DNA, 25 bp, Homo sapien
aggagtaatagcaattccctgtagc

SEQ ID NO: 4948574 - DNA, 25 bp, Homo sapien
ggtacaggagtaatagcaattccct

SEQ ID NO: 4948575 - DNA, 25 bp, Homo sapien
catagcgacgttctcctgcaatgca

SEQ ID NO: 4948576 - DNA, 25 bp, Homo sapien
agatgcaggttccatagcgacgttc

SEQ ID NO: 4948577 - DNA, 25 bp, Homo sapien
atgcacgctggtattctgcaatagc

SEQ ID NO: 4948578 - DNA, 25 bp, Homo sapien
cgttctcctgcaatgcacgctggta

SEQ ID NO: 4948579 - DNA, 25 bp, Homo sapien
cccatgcaagggaaacaaccacttc

SEQ ID NO: 4948580 - DNA, 25 bp, Homo sapien
ggatgtccgctgcaatctgctccgg

SEQ ID NO: 4948581 - DNA, 25 bp, Homo sapien
tttggagccaagctttcgtcccatg

SEQ ID NO: 4948582 - DNA, 25 bp, Homo sapien
tcagctcttgcctggagtggctcag

SEQ ID NO: 4948583 - DNA, 25 bp, Homo sapien
cctggatttatagctctactgggag

SEQ ID NO: 4948584 - DNA, 25 bp, Homo sapien
ggtctcaaggttgctcgaatgctcc

SEQ ID NO: 4948585 - DNA, 25 bp, Homo sapien
ggctcggagacaagaaaccttcctc

SEQ ID NO: 4948586 - DNA, 25 bp, Homo sapien
tatgttactcgtgggttcacctgct

SEQ ID NO: 4948587 - DNA, 25 bp, Homo sapien
ttgaggttatggggtgagtagtctc

SEQ ID NO: 4948588 - DNA, 25 bp, Homo sapien
catcctcatgaagaggtttttgagg

SEQ ID NO: 4948589 - DNA, 25 bp, Homo sapien
ttttgaggttatggggtgagtagtc

SEQ ID NO: 4948590 - DNA, 25 bp, Homo sapien
catgaagaggtttttgaggttatgg

SEQ ID NO: 4948591 - DNA, 25 bp, Homo sapien
aatcagggtggagaggacaatgatt

SEQ ID NO: 4948592 - DNA, 25 bp, Homo sapien
taggaatcagggtggagaggacaat

SEQ ID NO: 4948593 - DNA, 25 bp, Homo sapien
cagggtggagaggacaatgatttta

SEQ ID NO: 4948594 - DNA, 25 bp, Homo sapien
ggtggagaggacaatgattttatca

SEQ ID NO: 4948595 - DNA, 25 bp, Homo sapien
gacgttcctagcagggattcacccg

SEQ ID NO: 4948596 - DNA, 25 bp, Homo sapien
tcagattggaggcatagcttcaatg

SEQ ID NO: 4948597 - DNA, 25 bp, Homo sapien
ggaggcatagcttcaatgatgaaaa

SEQ ID NO: 4948598 - DNA, 25 bp, Homo sapien
gacagacgttcctagcagggattca

SEQ ID NO: 4948599 - DNA, 25 bp, Homo sapien
agatcctctagctaggcagggtgac

SEQ ID NO: 4948600 - DNA, 25 bp, Homo sapien
gaaggcttcttctcctcgttactgc

SEQ ID NO: 4948601 - DNA, 25 bp, Homo sapien
tttgaaggcttcttctcctcgttac

SEQ ID NO: 4948602 - DNA, 25 bp, Homo sapien
tactgcctctgactgcaccctcggt

SEQ ID NO: 4948603 - DNA, 25 bp, Homo sapien
ttctcctcgttactgcctctgactg

SEQ ID NO: 4948604 - DNA, 25 bp, Homo sapien
gtatcctgctgtggccccaatggat

SEQ ID NO: 4948605 - DNA, 25 bp, Homo sapien
tatcctgctgtggccccaatggatg

SEQ ID NO: 4948606 - DNA, 25 bp, Homo sapien
tgtatcctgctgtggccccaatgga

SEQ ID NO: 4948607 - DNA, 25 bp, Homo sapien
atcctgctgtggccccaatggatgt

SEQ ID NO: 4948608 - DNA, 25 bp, Homo sapien
tggacaagtggggtatagctgtctc

SEQ ID NO: 4948609 - DNA, 25 bp, Homo sapien
cagaatggacaagtggggtatagct

SEQ ID NO: 4948610 - DNA, 25 bp, Homo sapien
caagtggggtatagctgtctccaaa

SEQ ID NO: 4948611 - DNA, 25 bp, Homo sapien
gacaagtggggtatagctgtctcca

SEQ ID NO: 4948612 - DNA, 25 bp, Homo sapien
tggtgcaggtcccatagcggtgttt

SEQ ID NO: 4948613 - DNA, 25 bp, Homo sapien
gatctcaaagcaaatgatgaacaca

SEQ ID NO: 4948614 - DNA, 25 bp, Homo sapien
tcccatagcggtgtttggaaaaatg

SEQ ID NO: 4948615 - DNA, 25 bp, Homo sapien
ttctgccatagcagaccaagcccgt

SEQ ID NO: 4948616 - DNA, 25 bp, Homo sapien
acatatagacagacgggaagcaggg

SEQ ID NO: 4948617 - DNA, 25 bp, Homo sapien
gaagcagggactcttattgggatcc

SEQ ID NO: 4948618 - DNA, 25 bp, Homo sapien
gactcatgaaatcatcagaggcacc

SEQ ID NO: 4948619 - DNA, 25 bp, Homo sapien
ttgggatccatatcacgactcatga

SEQ ID NO: 4948620 - DNA, 25 bp, Homo sapien
ggccatttgcaggacacgttggata

SEQ ID NO: 4948621 - DNA, 25 bp, Homo sapien
cacgttggataattgttcaagggac

SEQ ID NO: 4948622 - DNA, 25 bp, Homo sapien
caggacacgttggataattgttcaa

SEQ ID NO: 4948623 - DNA, 25 bp, Homo sapien
gataattgttcaagggacagttgga

SEQ ID NO: 4948624 - DNA, 25 bp, Homo sapien
tgggtagcgttcaccaaggatgaag

SEQ ID NO: 4948625 - DNA, 25 bp, Homo sapien
tatagtactctgcaatggcagatca

SEQ ID NO: 4948626 - DNA, 25 bp, Homo sapien
aatggcagatcaagccctttgttga

SEQ ID NO: 4948627 - DNA, 25 bp, Homo sapien
ttagtagcagcagattgggtagcgt

SEQ ID NO: 4948628 - DNA, 25 bp, Homo sapien
tcatgagctcttgccgggagcggct

SEQ ID NO: 4948629 - DNA, 25 bp, Homo sapien
tgggctggcatctcatgagctcttg

SEQ ID NO: 4948630 - DNA, 25 bp, Homo sapien
ggtgagggtcctcctaactgtagtc

SEQ ID NO: 4948631 - DNA, 25 bp, Homo sapien
gcatctcatgagctcttgccgggag

SEQ ID NO: 4948632 - DNA, 25 bp, Homo sapien
agcagctaagcaggggtccaggtac

SEQ ID NO: 4948633 - DNA, 25 bp, Homo sapien
ctgcagggtacgcaacaaagcatga

SEQ ID NO: 4948634 - DNA, 25 bp, Homo sapien
catgagctaagagagcagctaagca

SEQ ID NO: 4948635 - DNA, 25 bp, Homo sapien
tacgcaacaaagcatgagctaagag

SEQ ID NO: 4948636 - DNA, 25 bp, Homo sapien
gaatattgaagtgagcctgcgctag

SEQ ID NO: 4948637 - DNA, 25 bp, Homo sapien
tggagctgaccataagagccttgac

SEQ ID NO: 4948638 - DNA, 25 bp, Homo sapien
gacttccagtgtagacgtggttgaa

SEQ ID NO: 4948639 - DNA, 25 bp, Homo sapien
ggtgagattccttggagtcccctgg

SEQ ID NO: 4948640 - DNA, 25 bp, Homo sapien
acacaaggtacacagagtaaaatgt

SEQ ID NO: 4948641 - DNA, 25 bp, Homo sapien
ttaatgcttgaactttattttggag

SEQ ID NO: 4948642 - DNA, 25 bp, Homo sapien
aagacacaaggtacacagagtaaaa

SEQ ID NO: 4948643 - DNA, 25 bp, Homo sapien
tttaatgcttgaactttattttgga

SEQ ID NO: 4948644 - DNA, 25 bp, Homo sapien
cagcgacagcagagtctgtagaggc

SEQ ID NO: 4948645 - DNA, 25 bp, Homo sapien
cgacagcagagtctgtagaggcggc

SEQ ID NO: 4948646 - DNA, 25 bp, Homo sapien
tcagcgacagcagagtctgtagagg

SEQ ID NO: 4948647 - DNA, 25 bp, Homo sapien
agcgacagcagagtctgtagaggcg

SEQ ID NO: 4948648 - DNA, 25 bp, Homo sapien
ccggttcggcaatagcaggtggctc

SEQ ID NO: 4948649 - DNA, 25 bp, Homo sapien
ggtagcacaacggccggttcggcaa

SEQ ID NO: 4948650 - DNA, 25 bp, Homo sapien
ttcggcaatagcaggtggctcttgc

SEQ ID NO: 4948651 - DNA, 25 bp, Homo sapien
caacggccggttcggcaatagcagg

SEQ ID NO: 4948652 - DNA, 25 bp, Homo sapien
ggcagcaaggatggcgatggtcctc

SEQ ID NO: 4948653 - DNA, 25 bp, Homo sapien
gactgcttctgggttgtagcctcat

SEQ ID NO: 4948654 - DNA, 25 bp, Homo sapien
ggttgtagcctcatcagctctttcc

SEQ ID NO: 4948655 - DNA, 25 bp, Homo sapien
gcaaaggagatagcaaggtcctggt

SEQ ID NO: 4948656 - DNA, 25 bp, Homo sapien
ctgcaggagggagagcaggagtgga

SEQ ID NO: 4948657 - DNA, 25 bp, Homo sapien
caggagggagagcaggagtggatat

SEQ ID NO: 4948658 - DNA, 25 bp, Homo sapien
gcaggagggagagcaggagtggata

SEQ ID NO: 4948659 - DNA, 25 bp, Homo sapien
tgcaggagggagagcaggagtggat

SEQ ID NO: 4948660 - DNA, 25 bp, Homo sapien
tggtgacctgcaggaagatggagga

SEQ ID NO: 4948661 - DNA, 25 bp, Homo sapien
ctggtgacctgcaggaagatggagg

SEQ ID NO: 4948662 - DNA, 25 bp, Homo sapien
gacctgcaggaagatggaggagcat

SEQ ID NO: 4948663 - DNA, 25 bp, Homo sapien
gtgacctgcaggaagatggaggagc

SEQ ID NO: 4948664 - DNA, 25 bp, Homo sapien
tttgggggtacgggaaatcagatca

SEQ ID NO: 4948665 - DNA, 25 bp, Homo sapien
ttgggcacagtgctcggtttggggg

SEQ ID NO: 4948666 - DNA, 25 bp, Homo sapien
gggtacgggaaatcagatcagagca

SEQ ID NO: 4948667 - DNA, 25 bp, Homo sapien
cacagtgctcggtttgggggtacgg

SEQ ID NO: 4948668 - DNA, 25 bp, Homo sapien
taaaagcaccgaatcccaaccacta

SEQ ID NO: 4948669 - DNA, 25 bp, Homo sapien
aaaagcaccgaatcccaaccactag

SEQ ID NO: 4948670 - DNA, 25 bp, Homo sapien
tgagcctcaatcgtgcaacacccag

SEQ ID NO: 4948671 - DNA, 25 bp, Homo sapien
aatcgtgcaacacccagggaggaca

SEQ ID NO: 4948672 - DNA, 25 bp, Homo sapien
tcaatcgtgcaacacccagggagga

SEQ ID NO: 4948673 - DNA, 25 bp, Homo sapien
cctcaatcgtgcaacacccagggag

SEQ ID NO: 4948674 - DNA, 25 bp, Homo sapien
ttggcctttgcagtctcttgacttc

SEQ ID NO: 4948675 - DNA, 25 bp, Homo sapien
ttttgctttttgccagcactgacat

SEQ ID NO: 4948676 - DNA, 25 bp, Homo sapien
tgctttttgccagcactgacattgg

SEQ ID NO: 4948677 - DNA, 25 bp, Homo sapien
ttgctttttgccagcactgacattg

SEQ ID NO: 4948678 - DNA, 25 bp, Homo sapien
tttcctctggagtggtcgattggtc

SEQ ID NO: 4948679 - DNA, 25 bp, Homo sapien
tctggagtggtcgattggtcatgaa

SEQ ID NO: 4948680 - DNA, 25 bp, Homo sapien
tcctggtccagatagttactgtgcc

SEQ ID NO: 4948681 - DNA, 25 bp, Homo sapien
catttgtttcctctggagtggtcga

SEQ ID NO: 4948682 - DNA, 25 bp, Homo sapien
tagtggaactaccagatccatgttg

SEQ ID NO: 4948683 - DNA, 25 bp, Homo sapien
gggaagaacgcgtttaggagcacat

SEQ ID NO: 4948684 - DNA, 25 bp, Homo sapien
gatggtgagattatttagtggaact

SEQ ID NO: 4948685 - DNA, 25 bp, Homo sapien
ccttgggcagttgcgaggcaagtca

SEQ ID NO: 4948686 - DNA, 25 bp, Homo sapien
gattcgatgtctcagaatcatccca

SEQ ID NO: 4948687 - DNA, 25 bp, Homo sapien
ctactgagatcagtgtagggattcg

SEQ ID NO: 4948688 - DNA, 25 bp, Homo sapien
atcagtgtagggattcgatgtctca

SEQ ID NO: 4948689 - DNA, 25 bp, Homo sapien
gagatcagtgtagggattcgatgtc

SEQ ID NO: 4948690 - DNA, 25 bp, Homo sapien
caaatcaaacccttttataatagct

SEQ ID NO: 4948691 - DNA, 25 bp, Homo sapien
aatcaaacccttttataatagctgt

SEQ ID NO: 4948692 - DNA, 25 bp, Homo sapien
aacatctaccaggctgagaatcaaa

SEQ ID NO: 4948693 - DNA, 25 bp, Homo sapien
catctaccaggctgagaatcaaatc

SEQ ID NO: 4948694 - DNA, 25 bp, Homo sapien
tcctggtgaagggagcaggtaaata

SEQ ID NO: 4948695 - DNA, 25 bp, Homo sapien
aaaacccggcatcacagcagcatga

SEQ ID NO: 4948696 - DNA, 25 bp, Homo sapien
aaactattctctttgatagggcaac

SEQ ID NO: 4948697 - DNA, 25 bp, Homo sapien
ctgttaagaaaacccggcatcacag

SEQ ID NO: 4948698 - DNA, 25 bp, Homo sapien
tctggttgagtcattctgggctgac

SEQ ID NO: 4948699 - DNA, 25 bp, Homo sapien
gggcatgtggccttccatgggtggc

SEQ ID NO: 4948700 - DNA, 25 bp, Homo sapien
ccttccatgggtggcctcattccag

SEQ ID NO: 4948701 - DNA, 25 bp, Homo sapien
ggcatcatgggcatgtggccttcca

SEQ ID NO: 4948702 - DNA, 25 bp, Homo sapien
tgccaccaagcccggatacttattt

SEQ ID NO: 4948703 - DNA, 25 bp, Homo sapien
aaataggacttcttatttgctactg

SEQ ID NO: 4948704 - DNA, 25 bp, Homo sapien
attcaactttagcacgcatctcgtc

SEQ ID NO: 4948705 - DNA, 25 bp, Homo sapien
ttagcacgcatctcgtccctagtgg

SEQ ID NO: 4948706 - DNA, 25 bp, Homo sapien
ggtaatacccatgccattgaagtta

SEQ ID NO: 4948707 - DNA, 25 bp, Homo sapien
gtcacaggtaatacccatgccattg

SEQ ID NO: 4948708 - DNA, 25 bp, Homo sapien
acaggtaatacccatgccattgaag

SEQ ID NO: 4948709 - DNA, 25 bp, Homo sapien
taatacccatgccattgaagttagt

SEQ ID NO: 4948710 - DNA, 25 bp, Homo sapien
acactagaaacttgagaccatcaga

SEQ ID NO: 4948711 - DNA, 25 bp, Homo sapien
aacactagaaacttgagaccatcag

SEQ ID NO: 4948712 - DNA, 25 bp, Homo sapien
aaacactagaaacttgagaccatca

SEQ ID NO: 4948713 - DNA, 25 bp, Homo sapien
tattgaacatagcaggtgctttcac

SEQ ID NO: 4948714 - DNA, 25 bp, Homo sapien
cttatattgaacatagcaggtgctt

SEQ ID NO: 4948715 - DNA, 25 bp, Homo sapien
ttatattgaacatagcaggtgcttt

SEQ ID NO: 4948716 - DNA, 25 bp, Homo sapien
tatattgaacatagcaggtgctttc

SEQ ID NO: 4948717 - DNA, 25 bp, Homo sapien
actgatctttcttagagaatggacc

SEQ ID NO: 4948718 - DNA, 25 bp, Homo sapien
ctttcttagagaatggaccaactac

SEQ ID NO: 4948719 - DNA, 25 bp, Homo sapien
tactgatctttcttagagaatggac

SEQ ID NO: 4948720 - DNA, 25 bp, Homo sapien
gatctttcttagagaatggaccaac

SEQ ID NO: 4948721 - DNA, 25 bp, Homo sapien
ggcacttgttcttaacaaccgccat

SEQ ID NO: 4948722 - DNA, 25 bp, Homo sapien
ttcataaggcacttgttcttaacaa

SEQ ID NO: 4948723 - DNA, 25 bp, Homo sapien
cataaggcacttgttcttaacaacc

SEQ ID NO: 4948724 - DNA, 25 bp, Homo sapien
taaggcacttgttcttaacaaccgc

SEQ ID NO: 4948725 - DNA, 25 bp, Homo sapien
tctgaatgaaatcatgtagaatgtg

SEQ ID NO: 4948726 - DNA, 25 bp, Homo sapien
accatttagctaacacccccatcct

SEQ ID NO: 4948727 - DNA, 25 bp, Homo sapien
gcaaccactaatcgacttcctattt

SEQ ID NO: 4948728 - DNA, 25 bp, Homo sapien
acatttcatgacctcaaaaagaaac

SEQ ID NO: 4948729 - DNA, 25 bp, Homo sapien
caactatctggaccaggaagttcat

SEQ ID NO: 4948730 - DNA, 25 bp, Homo sapien
ctgaggatcaaccaccatgatgaat

SEQ ID NO: 4948731 - DNA, 25 bp, Homo sapien
agcaactatctggaccaggaagttc

SEQ ID NO: 4948732 - DNA, 25 bp, Homo sapien
catgatgaatgacacagcaactatc

SEQ ID NO: 4948733 - DNA, 25 bp, Homo sapien
acagattaggaaacatcacaggcaa

SEQ ID NO: 4948734 - DNA, 25 bp, Homo sapien
gacagcttcgaggtccagtatgatt

SEQ ID NO: 4948735 - DNA, 25 bp, Homo sapien
gaacactttgcactcaaatagtaga

SEQ ID NO: 4948736 - DNA, 25 bp, Homo sapien
tttttaatagacagcttcgaggtcc

SEQ ID NO: 4948737 - DNA, 25 bp, Homo sapien
gcgacctcctcctcactgcgacctc

SEQ ID NO: 4948738 - DNA, 25 bp, Homo sapien
tgcgacctcctcctcactgcgacct

SEQ ID NO: 4948739 - DNA, 25 bp, Homo sapien
acctcctcctcagtgcaacctcctc

SEQ ID NO: 4948740 - DNA, 25 bp, Homo sapien
agtgcaacctcctcctcactgcgac

SEQ ID NO: 4948741 - DNA, 25 bp, Homo sapien
gtactggagcatctagacttagagt

SEQ ID NO: 4948742 - DNA, 25 bp, Homo sapien
gcctccattaaacttccagcaacaa

SEQ ID NO: 4948743 - DNA, 25 bp, Homo sapien
catctagacttagagtgaatcttct

SEQ ID NO: 4948744 - DNA, 25 bp, Homo sapien
aactggcctccattaaacttccagc

SEQ ID NO: 4948745 - DNA, 25 bp, Homo sapien
aatcactgctgatcctcgtaccagc

SEQ ID NO: 4948746 - DNA, 25 bp, Homo sapien
gaaatcactgctgatcctcgtacca

SEQ ID NO: 4948747 - DNA, 25 bp, Homo sapien
aagaaatcactgctgatcctcgtac

SEQ ID NO: 4948748 - DNA, 25 bp, Homo sapien
aaagaaatcactgctgatcctcgta

SEQ ID NO: 4948749 - DNA, 25 bp, Homo sapien
tgtctcttgtgaagtactccagaac

SEQ ID NO: 4948750 - DNA, 25 bp, Homo sapien
ccttgtctcttgtgaagtactccag

SEQ ID NO: 4948751 - DNA, 25 bp, Homo sapien
catgagttttagtcttaagtcccac

SEQ ID NO: 4948752 - DNA, 25 bp, Homo sapien
gtgaagtactccagaacaaaacatc

SEQ ID NO: 4948753 - DNA, 25 bp, Homo sapien
cgcgtcctccccgttctcgcagtcc

SEQ ID NO: 4948754 - DNA, 25 bp, Homo sapien
gtcctccccgttctcgcagtcctcg

SEQ ID NO: 4948755 - DNA, 25 bp, Homo sapien
cctccccgttctcgcagtcctcggg

SEQ ID NO: 4948756 - DNA, 25 bp, Homo sapien
gcgtcctccccgttctcgcagtcct

SEQ ID NO: 4948757 - DNA, 25 bp, Homo sapien
cgcagcctcttctcttccggaggga

SEQ ID NO: 4948758 - DNA, 25 bp, Homo sapien
tgcctcggggcttgccagtggcttc

SEQ ID NO: 4948759 - DNA, 25 bp, Homo sapien
tcttctcttccggagggacgtcgtc

SEQ ID NO: 4948760 - DNA, 25 bp, Homo sapien
ggctggccatggctcgggggctctg

SEQ ID NO: 4948761 - DNA, 25 bp, Homo sapien
tggacaggccctctctggcaatgcc

SEQ ID NO: 4948762 - DNA, 25 bp, Homo sapien
tgtcctggcccaggaggtcgctgtc

SEQ ID NO: 4948763 - DNA, 25 bp, Homo sapien
ctggagaagaggaaggatacggcgc

SEQ ID NO: 4948764 - DNA, 25 bp, Homo sapien
cccaggcctgcgcagctctcacatg

SEQ ID NO: 4948765 - DNA, 25 bp, Homo sapien
cctgcaggatgacatgaatgcacct

SEQ ID NO: 4948766 - DNA, 25 bp, Homo sapien
tgcaggatgacatgaatgcaccttc

SEQ ID NO: 4948767 - DNA, 25 bp, Homo sapien
ctgcaggatgacatgaatgcacctt

SEQ ID NO: 4948768 - DNA, 25 bp, Homo sapien
aaagaaatcactgctgatcctcgta

SEQ ID NO: 4948769 - DNA, 25 bp, Homo sapien
aatcactgctgatcctcgtaccagc

SEQ ID NO: 4948770 - DNA, 25 bp, Homo sapien
gaaatcactgctgatcctcgtacca

SEQ ID NO: 4948771 - DNA, 25 bp, Homo sapien
aagaaatcactgctgatcctcgtac

SEQ ID NO: 4948772 - DNA, 25 bp, Homo sapien
gcgggggggctctgatcctgcccat

SEQ ID NO: 4948773 - DNA, 25 bp, Homo sapien
caagctctgaatgcggtaacgtgga

SEQ ID NO: 4948774 - DNA, 25 bp, Homo sapien
acagcatccaggagcaaccccaaga

SEQ ID NO: 4948775 - DNA, 25 bp, Homo sapien
actgggcgggggggctctgatcctg

SEQ ID NO: 4948776 - DNA, 25 bp, Homo sapien
agcctcccgacgtcccttcgtcgcg

SEQ ID NO: 4948777 - DNA, 25 bp, Homo sapien
gcacccccgcgcccctggcactccc

SEQ ID NO: 4948778 - DNA, 25 bp, Homo sapien
gacggccacggagcctcccgacgtc

SEQ ID NO: 4948779 - DNA, 25 bp, Homo sapien
cacccccgcgcccctggcactcccg

SEQ ID NO: 4948780 - DNA, 25 bp, Homo sapien
ttcgtgcccggcagcggcgggtcct

SEQ ID NO: 4948781 - DNA, 25 bp, Homo sapien
ggcagcggcgggtcctccctgtcct

SEQ ID NO: 4948782 - DNA, 25 bp, Homo sapien
gccggtctccttcgtgcccggcagc

SEQ ID NO: 4948783 - DNA, 25 bp, Homo sapien
agcggcgggtcctccctgtcctcgc

SEQ ID NO: 4948784 - DNA, 25 bp, Homo sapien
cctgcaggatgacatgaatgcacct

SEQ ID NO: 4948785 - DNA, 25 bp, Homo sapien
tgcaggatgacatgaatgcaccttc

SEQ ID NO: 4948786 - DNA, 25 bp, Homo sapien
ctgcaggatgacatgaatgcacctt

SEQ ID NO: 4948787 - DNA, 25 bp, Homo sapien
ccgccttccaccgacgctccttgag

SEQ ID NO: 4948788 - DNA, 25 bp, Homo sapien
taatggctaaagtttgccaagccca

SEQ ID NO: 4948789 - DNA, 25 bp, Homo sapien
caaagtggtacgtgagctaatggct

SEQ ID NO: 4948790 - DNA, 25 bp, Homo sapien
tgggctctatgtctccttcctcgga

SEQ ID NO: 4948791 - DNA, 25 bp, Homo sapien
tttaacttttggcagcagggtgcaa

SEQ ID NO: 4948792 - DNA, 25 bp, Homo sapien
gcgaatgattcttttagcgcttggg

SEQ ID NO: 4948793 - DNA, 25 bp, Homo sapien
gataatgttacagcatgggctgggc

SEQ ID NO: 4948794 - DNA, 25 bp, Homo sapien
cattccctctgatcagattcgagca

SEQ ID NO: 4948795 - DNA, 25 bp, Homo sapien
cagtttgccgtgattttgctgcaca

SEQ ID NO: 4948796 - DNA, 25 bp, Homo sapien
gccaacattgcaccatgacactcca

SEQ ID NO: 4948797 - DNA, 25 bp, Homo sapien
ctgggcaacaagagcgaaactccat

SEQ ID NO: 4948798 - DNA, 25 bp, Homo sapien
caacattgcaccatgacactccagc

SEQ ID NO: 4948799 - DNA, 25 bp, Homo sapien
gagccaacattgcaccatgacactc

SEQ ID NO: 4948800 - DNA, 25 bp, Homo sapien
ggacccaattatccacttgtcttca

SEQ ID NO: 4948801 - DNA, 25 bp, Homo sapien
ttcatactgtacaatcaaacactag

SEQ ID NO: 4948802 - DNA, 25 bp, Homo sapien
tcaattgatccgtgcgactcggcct

SEQ ID NO: 4948803 - DNA, 25 bp, Homo sapien
ccttttcttcctagcgtctgctaac

SEQ ID NO: 4948804 - DNA, 25 bp, Homo sapien
aggaaatagaaaatgcgaaatggta

SEQ ID NO: 4948805 - DNA, 25 bp, Homo sapien
ggaaatagaaaatgcgaaatggtaa

SEQ ID NO: 4948806 - DNA, 25 bp, Homo sapien
gaaatagaaaatgcgaaatggtaag

SEQ ID NO: 4948807 - DNA, 25 bp, Homo sapien
gtattgagaaccagtcctcatcatg

SEQ ID NO: 4948808 - DNA, 25 bp, Homo sapien
gaaccagtcctcatcatgtgtaagc

SEQ ID NO: 4948809 - DNA, 25 bp, Homo sapien
caaggatcccagaatcgtcactcat

SEQ ID NO: 4948810 - DNA, 25 bp, Homo sapien
tgctaaaccaaggatcccagaatcg

SEQ ID NO: 4948811 - DNA, 25 bp, Homo sapien
gcaaacaactgctagatgacagcca

SEQ ID NO: 4948812 - DNA, 25 bp, Homo sapien
aactgctagatgacagccacaggtg

SEQ ID NO: 4948813 - DNA, 25 bp, Homo sapien
caactgctagatgacagccacaggt

SEQ ID NO: 4948814 - DNA, 25 bp, Homo sapien
aacaactgctagatgacagccacag

SEQ ID NO: 4948815 - DNA, 25 bp, Homo sapien
ttgatgatggttaattgtaacacaa

SEQ ID NO: 4948816 - DNA, 25 bp, Homo sapien
tttccacattcttgatgatggttaa

SEQ ID NO: 4948817 - DNA, 25 bp, Homo sapien
aggggtcacagaccaaattagagat

SEQ ID NO: 4948818 - DNA, 25 bp, Homo sapien
gagaggggtcacagaccaaattaga

SEQ ID NO: 4948819 - DNA, 25 bp, Homo sapien
cttctatacatgcaacaaggagcag

SEQ ID NO: 4948820 - DNA, 25 bp, Homo sapien
catgcaacaaggagcaggaaagaca

SEQ ID NO: 4948821 - DNA, 25 bp, Homo sapien
tgcaacaaggagcaggaaagacatc

SEQ ID NO: 4948822 - DNA, 25 bp, Homo sapien
tatacatgcaacaaggagcaggaaa

SEQ ID NO: 4948823 - DNA, 25 bp, Homo sapien
ggacagcaaagcgagggccggctgc

SEQ ID NO: 4948824 - DNA, 25 bp, Homo sapien
cagggacagcaaagcgagggccggc

SEQ ID NO: 4948825 - DNA, 25 bp, Homo sapien
cagcaaagcgagggccggctgcagt

SEQ ID NO: 4948826 - DNA, 25 bp, Homo sapien
agggacagggacagcaaagcgaggg

SEQ ID NO: 4948827 - DNA, 25 bp, Homo sapien
acatcccagagggtgtacactaccc

SEQ ID NO: 4948828 - DNA, 25 bp, Homo sapien
ccaacatcccagagggtgtacacta

SEQ ID NO: 4948829 - DNA, 25 bp, Homo sapien
caacatcccagagggtgtacactac

SEQ ID NO: 4948830 - DNA, 25 bp, Homo sapien
atcccagagggtgtacactacccct

SEQ ID NO: 4948831 - DNA, 25 bp, Homo sapien
ctgagccgatccataagggcggtcg

SEQ ID NO: 4948832 - DNA, 25 bp, Homo sapien
gtctgagccgatccataagggcggt

SEQ ID NO: 4948833 - DNA, 25 bp, Homo sapien
ttgtctgagccgatccataagggcg

SEQ ID NO: 4948834 - DNA, 25 bp, Homo sapien
gaagcacagggattacttcaccagc

SEQ ID NO: 4948835 - DNA, 25 bp, Homo sapien
gaaccagtacatgcttgttacctcc

SEQ ID NO: 4948836 - DNA, 25 bp, Homo sapien
agaaccagtacatgcttgttacctc

SEQ ID NO: 4948837 - DNA, 25 bp, Homo sapien
aaccagtacatgcttgttacctcca

SEQ ID NO: 4948838 - DNA, 25 bp, Homo sapien
ccagtacatgcttgttacctccaca

SEQ ID NO: 4948839 - DNA, 25 bp, Homo sapien
gatactgatcttattctttagaaaa

SEQ ID NO: 4948840 - DNA, 25 bp, Homo sapien
taaaaatcaatacggatactaatga

SEQ ID NO: 4948841 - DNA, 25 bp, Homo sapien
ataatctgagaactttttattagca

SEQ ID NO: 4948842 - DNA, 25 bp, Homo sapien
taatattgatgattatgacgcctga

SEQ ID NO: 4948843 - DNA, 25 bp, Homo sapien
gtctccgaaacagagttgactgagg

SEQ ID NO: 4948844 - DNA, 25 bp, Homo sapien
tagtaaaatcccgccaaccgcatct

SEQ ID NO: 4948845 - DNA, 25 bp, Homo sapien
gtaaaatcccgccaaccgcatctca

SEQ ID NO: 4948846 - DNA, 25 bp, Homo sapien
ctagtaaaatcccgccaaccgcatc

SEQ ID NO: 4948847 - DNA, 25 bp, Homo sapien
taaaatcccgccaaccgcatctcac

SEQ ID NO: 4948848 - DNA, 25 bp, Homo sapien
ccgccgatgccaagtgtgtggttcc

SEQ ID NO: 4948849 - DNA, 25 bp, Homo sapien
cacgagtccccatttggctcaaccg

SEQ ID NO: 4948850 - DNA, 25 bp, Homo sapien
catttggctcaaccgccgatgccaa

SEQ ID NO: 4948851 - DNA, 25 bp, Homo sapien
ggagcgttgcttgcaccacgagtcc

SEQ ID NO: 4948852 - DNA, 25 bp, Homo sapien
taggttttagaatgtctgtcagcag

SEQ ID NO: 4948853 - DNA, 25 bp, Homo sapien
ttagagtgggctgtgcagatagacc

SEQ ID NO: 4948854 - DNA, 25 bp, Homo sapien
tcatgtaattggattaagttaattg

SEQ ID NO: 4948855 - DNA, 25 bp, Homo sapien
gtgggctgtgcagatagacctttcc

SEQ ID NO: 4948856 - DNA, 25 bp, Homo sapien
taaggggaagttcaacagcaacaac

SEQ ID NO: 4948857 - DNA, 25 bp, Homo sapien
taataaggggaagttcaacagcaac

SEQ ID NO: 4948858 - DNA, 25 bp, Homo sapien
gataataaggggaagttcaacagca

SEQ ID NO: 4948859 - DNA, 25 bp, Homo sapien
gaaggggctgcggcaaagctacaaa

SEQ ID NO: 4948860 - DNA, 25 bp, Homo sapien
cacgcacgctaacacgtggggagcg

SEQ ID NO: 4948861 - DNA, 25 bp, Homo sapien
cacgagtccccatttggctcaaccg

SEQ ID NO: 4948862 - DNA, 25 bp, Homo sapien
ccgccgatgccaagtgtgtggttcc

SEQ ID NO: 4948863 - DNA, 25 bp, Homo sapien
ggagcgttgcttgcaccacgagtcc

SEQ ID NO: 4948864 - DNA, 25 bp, Homo sapien
gcaggattccacatctaggaggcct

SEQ ID NO: 4948865 - DNA, 25 bp, Homo sapien
tccacatctaggaggcctcggaact

SEQ ID NO: 4948866 - DNA, 25 bp, Homo sapien
agcaggattccacatctaggaggcc

SEQ ID NO: 4948867 - DNA, 25 bp, Homo sapien
gataataaggggaagttcaacagca

SEQ ID NO: 4948868 - DNA, 25 bp, Homo sapien
taataaggggaagttcaacagcaac

SEQ ID NO: 4948869 - DNA, 25 bp, Homo sapien
aataaggggaagttcaacagcaaca

SEQ ID NO: 4948870 - DNA, 25 bp, Homo sapien
taaggggaagttcaacagcaacaac

SEQ ID NO: 4948871 - DNA, 25 bp, Homo sapien
gtctccgaaacagagttgactgagg

SEQ ID NO: 4948872 - DNA, 25 bp, Homo sapien
cacgcacgctaacacgtggggagcg

SEQ ID NO: 4948873 - DNA, 25 bp, Homo sapien
cacgagtccccatttggctcaaccg

SEQ ID NO: 4948874 - DNA, 25 bp, Homo sapien
ccgccgatgccaagtgtgtggttcc

SEQ ID NO: 4948875 - DNA, 25 bp, Homo sapien
ggagcgttgcttgcaccacgagtcc

SEQ ID NO: 4948876 - DNA, 25 bp, Homo sapien
agcaggattccacatctaggaggcc

SEQ ID NO: 4948877 - DNA, 25 bp, Homo sapien
gcaggattccacatctaggaggcct

SEQ ID NO: 4948878 - DNA, 25 bp, Homo sapien
tccacatctaggaggcctcggaact

SEQ ID NO: 4948879 - DNA, 25 bp, Homo sapien
taaggggaagttcaacagcaacaac

SEQ ID NO: 4948880 - DNA, 25 bp, Homo sapien
gataataaggggaagttcaacagca

SEQ ID NO: 4948881 - DNA, 25 bp, Homo sapien
taataaggggaagttcaacagcaac

SEQ ID NO: 4948882 - DNA, 25 bp, Homo sapien
gaaggggctgcggcaaagctacaaa

SEQ ID NO: 4948883 - DNA, 25 bp, Homo sapien
cacgcacgctaacacgtggggagcg

SEQ ID NO: 4948884 - DNA, 25 bp, Homo sapien
cacgagtccccatttggctcaaccg

SEQ ID NO: 4948885 - DNA, 25 bp, Homo sapien
ccgccgatgccaagtgtgtggttcc

SEQ ID NO: 4948886 - DNA, 25 bp, Homo sapien
ggagcgttgcttgcaccacgagtcc

SEQ ID NO: 4948887 - DNA, 25 bp, Homo sapien
tctctgctgacagacttaccttggg

SEQ ID NO: 4948888 - DNA, 25 bp, Homo sapien
tagagcctcacaggcgtccgggagt

SEQ ID NO: 4948889 - DNA, 25 bp, Homo sapien
gacaaagcgttgttgactttcctca

SEQ ID NO: 4948890 - DNA, 25 bp, Homo sapien
tgacactgaggcctacgtcgagaga

SEQ ID NO: 4948891 - DNA, 25 bp, Homo sapien
taataaggggaagttcaacagcaac

SEQ ID NO: 4948892 - DNA, 25 bp, Homo sapien
taaggggaagttcaacagcaacaac

SEQ ID NO: 4948893 - DNA, 25 bp, Homo sapien
gataataaggggaagttcaacagca

SEQ ID NO: 4948894 - DNA, 25 bp, Homo sapien
gaaggggctgcggcaaagctacaaa

SEQ ID NO: 4948895 - DNA, 25 bp, Homo sapien
cacgcacgctaacacgtggggagcg

SEQ ID NO: 4948896 - DNA, 25 bp, Homo sapien
cacgagtccccatttggctcaaccg

SEQ ID NO: 4948897 - DNA, 25 bp, Homo sapien
ccgccgatgccaagtgtgtggttcc

SEQ ID NO: 4948898 - DNA, 25 bp, Homo sapien
ggagcgttgcttgcaccacgagtcc

SEQ ID NO: 4948899 - DNA, 25 bp, Homo sapien
gactgcatgtcaaggagagtctcct

SEQ ID NO: 4948900 - DNA, 25 bp, Homo sapien
gaagatggatcatggccgtgactgc

SEQ ID NO: 4948901 - DNA, 25 bp, Homo sapien
catggccgtgactgcatgtcaagga

SEQ ID NO: 4948902 - DNA, 25 bp, Homo sapien
caaggagagtctccttgatgacact

SEQ ID NO: 4948903 - DNA, 25 bp, Homo sapien
ccagaggcagtataaaaggcagcct

SEQ ID NO: 4948904 - DNA, 25 bp, Homo sapien
ggcagtataaaaggcagcctggaaa

SEQ ID NO: 4948905 - DNA, 25 bp, Homo sapien
ggtgaccagaggcagtataaaaggc

SEQ ID NO: 4948906 - DNA, 25 bp, Homo sapien
gaccagaggcagtataaaaggcagc

SEQ ID NO: 4948907 - DNA, 25 bp, Homo sapien
taaggggaagttcaacagcaacaac

SEQ ID NO: 4948908 - DNA, 25 bp, Homo sapien
taataaggggaagttcaacagcaac

SEQ ID NO: 4948909 - DNA, 25 bp, Homo sapien
gataataaggggaagttcaacagca

SEQ ID NO: 4948910 - DNA, 25 bp, Homo sapien
gaaggggctgcggcaaagctacaaa

SEQ ID NO: 4948911 - DNA, 25 bp, Homo sapien
cacgcacgctaacacgtggggagcg

SEQ ID NO: 4948912 - DNA, 25 bp, Homo sapien
cacgagtccccatttggctcaaccg

SEQ ID NO: 4948913 - DNA, 25 bp, Homo sapien
ccgccgatgccaagtgtgtggttcc

SEQ ID NO: 4948914 - DNA, 25 bp, Homo sapien
ggagcgttgcttgcaccacgagtcc

SEQ ID NO: 4948915 - DNA, 25 bp, Homo sapien
ttagagtgggctgtgcagatagacc

SEQ ID NO: 4948916 - DNA, 25 bp, Homo sapien
tcatgtaattggattaagttaattg

SEQ ID NO: 4948917 - DNA, 25 bp, Homo sapien
taggttttagaatgtctgtcagcag

SEQ ID NO: 4948918 - DNA, 25 bp, Homo sapien
gtgggctgtgcagatagacctttcc

SEQ ID NO: 4948919 - DNA, 25 bp, Homo sapien
gccctactttcaagggcagacgtcc

SEQ ID NO: 4948920 - DNA, 25 bp, Homo sapien
tgccctactttcaagggcagacgtc

SEQ ID NO: 4948921 - DNA, 25 bp, Homo sapien
tcagagtatcgcatcgggagaaacc

SEQ ID NO: 4948922 - DNA, 25 bp, Homo sapien
agagtatcgcatcgggagaaacctt

SEQ ID NO: 4948923 - DNA, 25 bp, Homo sapien
cggatgtctgacaccgggcctttcc

SEQ ID NO: 4948924 - DNA, 25 bp, Homo sapien
ccacatctaggaggcctcggaactg

SEQ ID NO: 4948925 - DNA, 25 bp, Homo sapien
tcatgaggtaggacagcaggataat

SEQ ID NO: 4948926 - DNA, 25 bp, Homo sapien
catgaggtaggacagcaggataatg

SEQ ID NO: 4948927 - DNA, 25 bp, Homo sapien
tgaggtaggacagcaggataatggg

SEQ ID NO: 4948928 - DNA, 25 bp, Homo sapien
cttcatgaggtaggacagcaggata

SEQ ID NO: 4948929 - DNA, 25 bp, Homo sapien
ccagaccacacatatactgaaactt

SEQ ID NO: 4948930 - DNA, 25 bp, Homo sapien
agccagaccacacatatactgaaac

SEQ ID NO: 4948931 - DNA, 25 bp, Homo sapien
gccagaccacacatatactgaaact

SEQ ID NO: 4948932 - DNA, 25 bp, Homo sapien
ctgagatgccagaaacatctttttt

SEQ ID NO: 4948933 - DNA, 25 bp, Homo sapien
gagatgccagaaacatcttttttgg

SEQ ID NO: 4948934 - DNA, 25 bp, Homo sapien
tgagatgccagaaacatcttttttg

SEQ ID NO: 4948935 - DNA, 25 bp, Homo sapien
agaacagatgtctgcaacatagtag

SEQ ID NO: 4948936 - DNA, 25 bp, Homo sapien
gcagaacagatgtctgcaacatagt

SEQ ID NO: 4948937 - DNA, 25 bp, Homo sapien
tgcagaacagatgtctgcaacatag

SEQ ID NO: 4948938 - DNA, 25 bp, Homo sapien
cagaacagatgtctgcaacatagta

SEQ ID NO: 4948939 - DNA, 25 bp, Homo sapien
tagccatgagaaaggtctccaaaaa

SEQ ID NO: 4948940 - DNA, 25 bp, Homo sapien
ctttgcaggcaatgtagccatgaga

SEQ ID NO: 4948941 - DNA, 25 bp, Homo sapien
cagaggtgactgtagctgcactgaa

SEQ ID NO: 4948942 - DNA, 25 bp, Homo sapien
taaagtctccgcaggtttccagagg

SEQ ID NO: 4948943 - DNA, 25 bp, Homo sapien
tttctgaatgttaatccttgccttc

SEQ ID NO: 4948944 - DNA, 25 bp, Homo sapien
gactatggatatgactgcatatgac

SEQ ID NO: 4948945 - DNA, 25 bp, Homo sapien
gttaccctgcagatatagacatgaa

SEQ ID NO: 4948946 - DNA, 25 bp, Homo sapien
gatgagttccttacaggagagaagg

SEQ ID NO: 4948947 - DNA, 25 bp, Homo sapien
tttcataggatgagttccttacagg

SEQ ID NO: 4948948 - DNA, 25 bp, Homo sapien
gtggtacattctctgttgtcatggc

SEQ ID NO: 4948949 - DNA, 25 bp, Homo sapien
gagagtggtacattctctgttgtca

SEQ ID NO: 4948950 - DNA, 25 bp, Homo sapien
gtgagagtggtacattctctgttgt

SEQ ID NO: 4948951 - DNA, 25 bp, Homo sapien
ggtacattctctgttgtcatggctg

SEQ ID NO: 4948952 - DNA, 25 bp, Homo sapien
agaaacaaccacgtggaccacatcg

SEQ ID NO: 4948953 - DNA, 25 bp, Homo sapien
gaccacatcgcccaagctcagctgc

SEQ ID NO: 4948954 - DNA, 25 bp, Homo sapien
tcagaaacaaccacgtggaccacat

SEQ ID NO: 4948955 - DNA, 25 bp, Homo sapien
cattggatctgcatagggaactgca

SEQ ID NO: 4948956 - DNA, 25 bp, Homo sapien
agttgcaggagtaggcctaaatcca

SEQ ID NO: 4948957 - DNA, 25 bp, Homo sapien
ggagtaggcctaaatccaggtgtga

SEQ ID NO: 4948958 - DNA, 25 bp, Homo sapien
taggcctaaatccaggtgtgaagat

SEQ ID NO: 4948959 - DNA, 25 bp, Homo sapien
gggtagttgcaggagtaggcctaaa

SEQ ID NO: 4948960 - DNA, 25 bp, Homo sapien
gaaaggtaaggctctggtcctgcca

SEQ ID NO: 4948961 - DNA, 25 bp, Homo sapien
ccaggctctctagaggttaagaatg

SEQ ID NO: 4948962 - DNA, 25 bp, Homo sapien
gctctctagaggttaagaatgtgat

SEQ ID NO: 4948963 - DNA, 25 bp, Homo sapien
ggctctctagaggttaagaatgtga

SEQ ID NO: 4948964 - DNA, 25 bp, Homo sapien
cttgccaacatttgagtggattcat

SEQ ID NO: 4948965 - DNA, 25 bp, Homo sapien
agtggattcatttgtgtggtagtca

SEQ ID NO: 4948966 - DNA, 25 bp, Homo sapien
tgagtggattcatttgtgtggtagt

SEQ ID NO: 4948967 - DNA, 25 bp, Homo sapien
tctgctccacttgccaacatttgag

SEQ ID NO: 4948968 - DNA, 25 bp, Homo sapien
caccacaatcaagtcggctgcatct

SEQ ID NO: 4948969 - DNA, 25 bp, Homo sapien
ccacaatcaagtcggctgcatcttt

SEQ ID NO: 4948970 - DNA, 25 bp, Homo sapien
aagtcggctgcatctttgggatgaa

SEQ ID NO: 4948971 - DNA, 25 bp, Homo sapien
aatcaagtcggctgcatctttggga

SEQ ID NO: 4948972 - DNA, 25 bp, Homo sapien
cagagtgagggagcccccttcatcc

SEQ ID NO: 4948973 - DNA, 25 bp, Homo sapien
tcacagagtgagggagcccccttca

SEQ ID NO: 4948974 - DNA, 25 bp, Homo sapien
atccttgggctctggccacagctca

SEQ ID NO: 4948975 - DNA, 25 bp, Homo sapien
cccttcatccttgggctctggccac

SEQ ID NO: 4948976 - DNA, 25 bp, Homo sapien
catccagacatccagttggaagtga

SEQ ID NO: 4948977 - DNA, 25 bp, Homo sapien
cagacatccagttggaagtgagatt

SEQ ID NO: 4948978 - DNA, 25 bp, Homo sapien
cagtagttcatccagacatccagtt

SEQ ID NO: 4948979 - DNA, 25 bp, Homo sapien
tagttcatccagacatccagttgga

SEQ ID NO: 4948980 - DNA, 25 bp, Homo sapien
aacactcctagtgatctccattaac

SEQ ID NO: 4948981 - DNA, 25 bp, Homo sapien
ctgtaaagtaacactcctagtgatc

SEQ ID NO: 4948982 - DNA, 25 bp, Homo sapien
gtaaagtaacactcctagtgatctc

SEQ ID NO: 4948983 - DNA, 25 bp, Homo sapien
tagtgatctccattaacttggacat

SEQ ID NO: 4948984 - DNA, 25 bp, Homo sapien
tcagtcccaaccaggccagacgccc

SEQ ID NO: 4948985 - DNA, 25 bp, Homo sapien
tatccggcctcaggcggatactgac

SEQ ID NO: 4948986 - DNA, 25 bp, Homo sapien
gggcagcgccgaggatgctccgggg

SEQ ID NO: 4948987 - DNA, 25 bp, Homo sapien
cagcgggggcatccgggcccagagg

SEQ ID NO: 4948988 - DNA, 25 bp, Homo sapien
ggccttttcacatagattacactga

SEQ ID NO: 4948989 - DNA, 25 bp, Homo sapien
catcttgtgccgtctaaggtgaaag

SEQ ID NO: 4948990 - DNA, 25 bp, Homo sapien
cttttttccaaggtgagttctctca

SEQ ID NO: 4948991 - DNA, 25 bp, Homo sapien
tctgtcccgtgtgagttttctcgtg

SEQ ID NO: 4948992 - DNA, 25 bp, Homo sapien
gaatttgtttatgtggttcagtgga

SEQ ID NO: 4948993 - DNA, 25 bp, Homo sapien
tttatgtggttcagtggacaaaaga

SEQ ID NO: 4948994 - DNA, 25 bp, Homo sapien
cagtggacaaaagattacgaaggga

SEQ ID NO: 4948995 - DNA, 25 bp, Homo sapien
tgtggttcagtggacaaaagattac

SEQ ID NO: 4948996 - DNA, 25 bp, Homo sapien
attgtcatactggtggatgcgtctt

SEQ ID NO: 4948997 - DNA, 25 bp, Homo sapien
cattgtcatactggtggatgcgtct

SEQ ID NO: 4948998 - DNA, 25 bp, Homo sapien
ttgtcatactggtggatgcgtcttt

SEQ ID NO: 4948999 - DNA, 25 bp, Homo sapien
tgtcatactggtggatgcgtctttt

SEQ ID NO: 4949000 - DNA, 25 bp, Homo sapien
tgtgtgttttcttaagggcactttc

SEQ ID NO: 4949001 - DNA, 25 bp, Homo sapien
ggatgcatggatatcatgtgtgttt

SEQ ID NO: 4949002 - DNA, 25 bp, Homo sapien
ctggtgataggatgcatggatatca

SEQ ID NO: 4949003 - DNA, 25 bp, Homo sapien
ataggatgcatggatatcatgtgtg

SEQ ID NO: 4949004 - DNA, 25 bp, Homo sapien
atataggatttgcttatctggtacc

SEQ ID NO: 4949005 - DNA, 25 bp, Homo sapien
ttggattctggtcttgaagaaatac

SEQ ID NO: 4949006 - DNA, 25 bp, Homo sapien
gaaatactcttccttccctccacag

SEQ ID NO: 4949007 - DNA, 25 bp, Homo sapien
tgctccagctgcaaaattatatagg

SEQ ID NO: 4949008 - DNA, 25 bp, Homo sapien
cgagggacaccaggtgactgatatt

SEQ ID NO: 4949009 - DNA, 25 bp, Homo sapien
tctgtacagctttctcttggatgtg

SEQ ID NO: 4949010 - DNA, 25 bp, Homo sapien
gtgactgatattttccagcatcaca

SEQ ID NO: 4949011 - DNA, 25 bp, Homo sapien
acatctctgtacagctttctcttgg

SEQ ID NO: 4949012 - DNA, 25 bp, Homo sapien
tagctacatcttcaaaagtcagttt

SEQ ID NO: 4949013 - DNA, 25 bp, Homo sapien
agtcaatagctacatcttcaaaagt

SEQ ID NO: 4949014 - DNA, 25 bp, Homo sapien
ttcctgggtgaagtcaatagctaca

SEQ ID NO: 4949015 - DNA, 25 bp, Homo sapien
cttcctgggtgaagtcaatagctac

SEQ ID NO: 4949016 - DNA, 25 bp, Homo sapien
tcaaagatttaaaaagcctcttcat

SEQ ID NO: 4949017 - DNA, 25 bp, Homo sapien
cactacacttgttcaaagatttaaa

SEQ ID NO: 4949018 - DNA, 25 bp, Homo sapien
ttcaaagatttaaaaagcctcttca

SEQ ID NO: 4949019 - DNA, 25 bp, Homo sapien
cttctcactacacttgttcaaagat

SEQ ID NO: 4949020 - DNA, 25 bp, Homo sapien
gcagacactttaggcactaagaaaa

SEQ ID NO: 4949021 - DNA, 25 bp, Homo sapien
tttccacttgcagacactttaggca

SEQ ID NO: 4949022 - DNA, 25 bp, Homo sapien
cttcctctggatttccacttgcaga

SEQ ID NO: 4949023 - DNA, 25 bp, Homo sapien
cacttgcagacactttaggcactaa

SEQ ID NO: 4949024 - DNA, 25 bp, Homo sapien
tcagctccaagggcatccacttcat

SEQ ID NO: 4949025 - DNA, 25 bp, Homo sapien
tcctccaggtggacttgtagcttac

SEQ ID NO: 4949026 - DNA, 25 bp, Homo sapien
ttcatcatcctccaggtggacttgt

SEQ ID NO: 4949027 - DNA, 25 bp, Homo sapien
agctccaagggcatccacttcatca

SEQ ID NO: 4949028 - DNA, 25 bp, Homo sapien
ggctgtttgtatcagacatccaaga

SEQ ID NO: 4949029 - DNA, 25 bp, Homo sapien
tttgtatcagacatccaagaaggag

SEQ ID NO: 4949030 - DNA, 25 bp, Homo sapien
gtatcagacatccaagaaggagaaa

SEQ ID NO: 4949031 - DNA, 25 bp, Homo sapien
ctgaggctgtttgtatcagacatcc

SEQ ID NO: 4949032 - DNA, 25 bp, Homo sapien
tgggaaatgagtggtcaggattata

SEQ ID NO: 4949033 - DNA, 25 bp, Homo sapien
gagtggtcaggattatacgatgacc

SEQ ID NO: 4949034 - DNA, 25 bp, Homo sapien
tggctctttcttcagtgtacatcaa

SEQ ID NO: 4949035 - DNA, 25 bp, Homo sapien
tacgatgaccttacagcctgaaggt

SEQ ID NO: 4949036 - DNA, 25 bp, Homo sapien
acacagactttgtgtctttctgaca

SEQ ID NO: 4949037 - DNA, 25 bp, Homo sapien
tactgacacagactttgtgtctttc

SEQ ID NO: 4949038 - DNA, 25 bp, Homo sapien
gcaacccaaaaaactcctcctgtgc

SEQ ID NO: 4949039 - DNA, 25 bp, Homo sapien
acccaaaaaactcctcctgtgccat

SEQ ID NO: 4949040 - DNA, 25 bp, Homo sapien
tctgtgaacctagagcagccacaga

SEQ ID NO: 4949041 - DNA, 25 bp, Homo sapien
atttttgttctgtgaacctagagca

SEQ ID NO: 4949042 - DNA, 25 bp, Homo sapien
tgttctgtgaacctagagcagccac

SEQ ID NO: 4949043 - DNA, 25 bp, Homo sapien
tttgttctgtgaacctagagcagcc

SEQ ID NO: 4949044 - DNA, 25 bp, Homo sapien
tcctggggatgatacagggctggct

SEQ ID NO: 4949045 - DNA, 25 bp, Homo sapien
agctcctggggatgatacagggctg

SEQ ID NO: 4949046 - DNA, 25 bp, Homo sapien
ctgggagccggttccatctagttct

SEQ ID NO: 4949047 - DNA, 25 bp, Homo sapien
tgggagccggttccatctagttcta

SEQ ID NO: 4949048 - DNA, 25 bp, Homo sapien
gaagtcttagcccaagtgtgcacac

SEQ ID NO: 4949049 - DNA, 25 bp, Homo sapien
caggcctggacagcttgaattgttg

SEQ ID NO: 4949050 - DNA, 25 bp, Homo sapien
gaaaatgccgttcactcccttatgg

SEQ ID NO: 4949051 - DNA, 25 bp, Homo sapien
gtgtgcacacatcataacatagcct

SEQ ID NO: 4949052 - DNA, 25 bp, Homo sapien
gagccctttctgaatccgcatcagc

SEQ ID NO: 4949053 - DNA, 25 bp, Homo sapien
tgcgtatctttggacaccatagttt

SEQ ID NO: 4949054 - DNA, 25 bp, Homo sapien
taatttggtttacatgtcgcacgtc

SEQ ID NO: 4949055 - DNA, 25 bp, Homo sapien
acgtctctgatgagggagccctttc

SEQ ID NO: 4949056 - DNA, 25 bp, Homo sapien
catatggctccactcttaaggcagg

SEQ ID NO: 4949057 - DNA, 25 bp, Homo sapien
ttataccttctagggcaaaagactg

SEQ ID NO: 4949058 - DNA, 25 bp, Homo sapien
gggagaccacaggtgccaatttgtt

SEQ ID NO: 4949059 - DNA, 25 bp, Homo sapien
caggatcgcctataccaccaaaaac

SEQ ID NO: 4949060 - DNA, 25 bp, Homo sapien
aatatgaagaggaacgagaagagga

SEQ ID NO: 4949061 - DNA, 25 bp, Homo sapien
gatggctgggagcttcaccaggagc

SEQ ID NO: 4949062 - DNA, 25 bp, Homo sapien
cttcaccaggagctgagtctgggga

SEQ ID NO: 4949063 - DNA, 25 bp, Homo sapien
agcttcaccaggagctgagtctggg

SEQ ID NO: 4949064 - DNA, 25 bp, Homo sapien
gggagcttcaccaggagctgagtct

SEQ ID NO: 4949065 - DNA, 25 bp, Homo sapien
gagctctttccatctaattctatcc

SEQ ID NO: 4949066 - DNA, 25 bp, Homo sapien
tgtgcgacgtcctgtttttcctgag

SEQ ID NO: 4949067 - DNA, 25 bp, Homo sapien
tgcccactctgtgcgacgtcctgtt

SEQ ID NO: 4949068 - DNA, 25 bp, Homo sapien
aattgagagctctttccatctaatt

SEQ ID NO: 4949069 - DNA, 25 bp, Homo sapien
ggcatttccacactttacaacactc

SEQ ID NO: 4949070 - DNA, 25 bp, Homo sapien
aggcatttccacactttacaacact

SEQ ID NO: 4949071 - DNA, 25 bp, Homo sapien
acactctcgtcatgtttcagggttt

SEQ ID NO: 4949072 - DNA, 25 bp, Homo sapien
tttacaacactctcgtcatgtttca

SEQ ID NO: 4949073 - DNA, 25 bp, Homo sapien
ttcggcagcattttcggccacgcgt

SEQ ID NO: 4949074 - DNA, 25 bp, Homo sapien
gagcacttgccgatctgttcctcct

SEQ ID NO: 4949075 - DNA, 25 bp, Homo sapien
tttcggccacgcgtcgagcacttgc

SEQ ID NO: 4949076 - DNA, 25 bp, Homo sapien
gcagctgagcacagcacaccggccg

SEQ ID NO: 4949077 - DNA, 25 bp, Homo sapien
ttctgtaatgtgtttatgattcctc

SEQ ID NO: 4949078 - DNA, 25 bp, Homo sapien
ctggaacaggcaccaaaaacaggaa

SEQ ID NO: 4949079 - DNA, 25 bp, Homo sapien
aagcaaacagaagataatggatcct

SEQ ID NO: 4949080 - DNA, 25 bp, Homo sapien
caggcaccaaaaacaggaagagcaa

SEQ ID NO: 4949081 - DNA, 25 bp, Homo sapien
caaacagaagataatggatcctcat

SEQ ID NO: 4949082 - DNA, 25 bp, Homo sapien
tttataaaggttccagccacagctg

SEQ ID NO: 4949083 - DNA, 25 bp, Homo sapien
aggcttcaccccacgctgagactgg

SEQ ID NO: 4949084 - DNA, 25 bp, Homo sapien
taggaacccaatggtaaggcagagc

SEQ ID NO: 4949085 - DNA, 25 bp, Homo sapien
ttccaatgcctctcaccatgcagaa

SEQ ID NO: 4949086 - DNA, 25 bp, Homo sapien
gagaaagtgtagtcagagctgcaag

SEQ ID NO: 4949087 - DNA, 25 bp, Homo sapien
gagcggcagccagccacattcgggc

SEQ ID NO: 4949088 - DNA, 25 bp, Homo sapien
ccacattcgggcctgagtgtcagct

SEQ ID NO: 4949089 - DNA, 25 bp, Homo sapien
ctgagtgtcagcttcccggagaaag

SEQ ID NO: 4949090 - DNA, 25 bp, Homo sapien
ctgtgcttgctcatcgagtctttcc

SEQ ID NO: 4949091 - DNA, 25 bp, Homo sapien
cctgtgcttgctcatcgagtctttc

SEQ ID NO: 4949092 - DNA, 25 bp, Homo sapien
ggacaaggcagatgaatcctcaagt

SEQ ID NO: 4949093 - DNA, 25 bp, Homo sapien
cagagaagcaacttgcgatgtcctg

SEQ ID NO: 4949094 - DNA, 25 bp, Homo sapien
caaggcagatgaatcctcaagttga

SEQ ID NO: 4949095 - DNA, 25 bp, Homo sapien
aggacaaggcagatgaatcctcaag

SEQ ID NO: 4949096 - DNA, 25 bp, Homo sapien
cagcaccctggcagggagggacggg

SEQ ID NO: 4949097 - DNA, 25 bp, Homo sapien
gcagcaccctggcagggagggacgg

SEQ ID NO: 4949098 - DNA, 25 bp, Homo sapien
ctgcagcaccctggcagggagggac

SEQ ID NO: 4949099 - DNA, 25 bp, Homo sapien
agcaccctggcagggagggacgggg

SEQ ID NO: 4949100 - DNA, 25 bp, Homo sapien
aatgtcttttatcagctcttcacct

SEQ ID NO: 4949101 - DNA, 25 bp, Homo sapien
aaaaatgtcttttatcagctcttca

SEQ ID NO: 4949102 - DNA, 25 bp, Homo sapien
aaaatgtcttttatcagctcttcac

SEQ ID NO: 4949103 - DNA, 25 bp, Homo sapien
aaatgtcttttatcagctcttcacc

SEQ ID NO: 4949104 - DNA, 25 bp, Homo sapien
acacctactataagccacacattcc

SEQ ID NO: 4949105 - DNA, 25 bp, Homo sapien
tcctttaagcccttgggatacttca

SEQ ID NO: 4949106 - DNA, 25 bp, Homo sapien
cattcctttaagcccttgggatact

SEQ ID NO: 4949107 - DNA, 25 bp, Homo sapien
ttagatcccagatctgccatccatc

SEQ ID NO: 4949108 - DNA, 25 bp, Homo sapien
tgccatccatctctggtttctcttt

SEQ ID NO: 4949109 - DNA, 25 bp, Homo sapien
agatctgccatccatctctggtttc

SEQ ID NO: 4949110 - DNA, 25 bp, Homo sapien
tctgccatccatctctggtttctct

SEQ ID NO: 4949111 - DNA, 25 bp, Homo sapien
caacacctattccagggatcagagc

SEQ ID NO: 4949112 - DNA, 25 bp, Homo sapien
gcaacacctattccagggatcagag

SEQ ID NO: 4949113 - DNA, 25 bp, Homo sapien
aagtctgcagatcccttgctgcata

SEQ ID NO: 4949114 - DNA, 25 bp, Homo sapien
aaagtctgcagatcccttgctgcat

SEQ ID NO: 4949115 - DNA, 25 bp, Homo sapien
aaaagtctgcagatcccttgctgca

SEQ ID NO: 4949116 - DNA, 25 bp, Homo sapien
tccacacagatcctaaatgagggtc

SEQ ID NO: 4949117 - DNA, 25 bp, Homo sapien
aaaaagtccacacagatcctaaatg

SEQ ID NO: 4949118 - DNA, 25 bp, Homo sapien
ggccctaaaaagtccacacagatcc

SEQ ID NO: 4949119 - DNA, 25 bp, Homo sapien
agtccacacagatcctaaatgaggg

SEQ ID NO: 4949120 - DNA, 25 bp, Homo sapien
aaagagaacagcaaacagaaaaaag

SEQ ID NO: 4949121 - DNA, 25 bp, Homo sapien
tgtttggaccaaacaaaagagaaca

SEQ ID NO: 4949122 - DNA, 25 bp, Homo sapien
gagaacagcaaacagaaaaaagacc

SEQ ID NO: 4949123 - DNA, 25 bp, Homo sapien
acagcaaacagaaaaaagaccttca

SEQ ID NO: 4949124 - DNA, 25 bp, Homo sapien
cctgccctcccgtgaaggagcacaa

SEQ ID NO: 4949125 - DNA, 25 bp, Homo sapien
gccctcccgtgaaggagcacaaata

SEQ ID NO: 4949126 - DNA, 25 bp, Homo sapien
cctcccgtgaaggagcacaaatatg

SEQ ID NO: 4949127 - DNA, 25 bp, Homo sapien
tgccctcccgtgaaggagcacaaat

SEQ ID NO: 4949128 - DNA, 25 bp, Homo sapien
gcagtagcctacttgtgtttccata

SEQ ID NO: 4949129 - DNA, 25 bp, Homo sapien
gcaggcgtctttctttttagagcag

SEQ ID NO: 4949130 - DNA, 25 bp, Homo sapien
ttaatgtaaacagcaggcgtctttc

SEQ ID NO: 4949131 - DNA, 25 bp, Homo sapien
ataattacagtattcttggcagaag

SEQ ID NO: 4949132 - DNA, 25 bp, Homo sapien
tggtaaggtggggtgcgcggtggta

SEQ ID NO: 4949133 - DNA, 25 bp, Homo sapien
cttggtaaggtggggtgcgcggtgg

SEQ ID NO: 4949134 - DNA, 25 bp, Homo sapien
gagttctccgagagcctcagtggct

SEQ ID NO: 4949135 - DNA, 25 bp, Homo sapien
gtggcgtagcagctgaaacccgttt

SEQ ID NO: 4949136 - DNA, 25 bp, Homo sapien
gctgaaacccgtttgtgccttgccc

SEQ ID NO: 4949137 - DNA, 25 bp, Homo sapien
ggttcacatgtctggcttgagacga

SEQ ID NO: 4949138 - DNA, 25 bp, Homo sapien
cggacgggagcaatcgttgcctcat

SEQ ID NO: 4949139 - DNA, 25 bp, Homo sapien
gctggtgacggacgggagcaatcgt

SEQ ID NO: 4949140 - DNA, 25 bp, Homo sapien
aggctggtgacggacgggagcaatc

SEQ ID NO: 4949141 - DNA, 25 bp, Homo sapien
tgacggacgggagcaatcgttgcct

SEQ ID NO: 4949142 - DNA, 25 bp, Homo sapien
ggctgggtgtgtgggcccggagcgt

SEQ ID NO: 4949143 - DNA, 25 bp, Homo sapien
tgtgggcccggagcgtgggaagagc

SEQ ID NO: 4949144 - DNA, 25 bp, Homo sapien
acaatgtggacacgctactatccca

SEQ ID NO: 4949145 - DNA, 25 bp, Homo sapien
aaaggacaatgtggacacgctacta

SEQ ID NO: 4949146 - DNA, 25 bp, Homo sapien
tgcagctgcggacagttgcacatag

SEQ ID NO: 4949147 - DNA, 25 bp, Homo sapien
gacaatagagacctgggcatccgct

SEQ ID NO: 4949148 - DNA, 25 bp, Homo sapien
caatgcggaggccactatcttttgg

SEQ ID NO: 4949149 - DNA, 25 bp, Homo sapien
agcaccagcaaagggcggaaggttt

SEQ ID NO: 4949150 - DNA, 25 bp, Homo sapien
gaaggatcttattggaaattgcaca

SEQ ID NO: 4949151 - DNA, 25 bp, Homo sapien
gggtaagattttccacatcggcaca

SEQ ID NO: 4949152 - DNA, 25 bp, Homo sapien
tcttgcttcccaagtagcatcctgg

SEQ ID NO: 4949153 - DNA, 25 bp, Homo sapien
aagttctgcaaatacatattcctga

SEQ ID NO: 4949154 - DNA, 25 bp, Homo sapien
catgtgtctgtctttgactttgtca

SEQ ID NO: 4949155 - DNA, 25 bp, Homo sapien
atgtgtctgtctttgactttgtcat

SEQ ID NO: 4949156 - DNA, 25 bp, Homo sapien
gtcctacttccagcgactctaggga

SEQ ID NO: 4949157 - DNA, 25 bp, Homo sapien
gaggtcctacttccagcgactctag

SEQ ID NO: 4949158 - DNA, 25 bp, Homo sapien
tacttccagcgactctagggaccag

SEQ ID NO: 4949159 - DNA, 25 bp, Homo sapien
tgaggtcctacttccagcgactcta

SEQ ID NO: 4949160 - DNA, 25 bp, Homo sapien
tttctcaaacagcatgcataggtgt

SEQ ID NO: 4949161 - DNA, 25 bp, Homo sapien
tacgattcagtaagctctcatccca

SEQ ID NO: 4949162 - DNA, 25 bp, Homo sapien
tgcgacatttcttccggcaacgggc

SEQ ID NO: 4949163 - DNA, 25 bp, Homo sapien
gcaacgggcagtcccataaccacat

SEQ ID NO: 4949164 - DNA, 25 bp, Homo sapien
ttgtccaggatgtaggtgaggacta

SEQ ID NO: 4949165 - DNA, 25 bp, Homo sapien
tccaggatgtaggtgaggactaaaa

SEQ ID NO: 4949166 - DNA, 25 bp, Homo sapien
aaaggcagtttgaccaattcatgtg

SEQ ID NO: 4949167 - DNA, 25 bp, Homo sapien
gactaaaaggcagtttgaccaattc

SEQ ID NO: 4949168 - DNA, 25 bp, Homo sapien
gcaggagaagaggcaggcagcgcat

SEQ ID NO: 4949169 - DNA, 25 bp, Homo sapien
ccaaagcaggggtggcaggagaaga

SEQ ID NO: 4949170 - DNA, 25 bp, Homo sapien
caaagcaggggtggcaggagaagag

SEQ ID NO: 4949171 - DNA, 25 bp, Homo sapien
ggggtggcaggagaagaggcaggca

SEQ ID NO: 4949172 - DNA, 25 bp, Homo sapien
gatcttgatagagtagaagagaaat

SEQ ID NO: 4949173 - DNA, 25 bp, Homo sapien
gctaatagcagcacaagtctctgca

SEQ ID NO: 4949174 - DNA, 25 bp, Homo sapien
aagagaaatggctaatagcagcaca

SEQ ID NO: 4949175 - DNA, 25 bp, Homo sapien
ctggaagatcttgatagagtagaag

SEQ ID NO: 4949176 - DNA, 25 bp, Homo sapien
gaaaagaaggagcattgagagttga

SEQ ID NO: 4949177 - DNA, 25 bp, Homo sapien
atcagagtaattaggcagaggaaga

SEQ ID NO: 4949178 - DNA, 25 bp, Homo sapien
tcatcttcatagtagaaaggcagct

SEQ ID NO: 4949179 - DNA, 25 bp, Homo sapien
tcatcactgattaagtgcttaagct

SEQ ID NO: 4949180 - DNA, 25 bp, Homo sapien
aaagaagctaggttatgtatgcttc

SEQ ID NO: 4949181 - DNA, 25 bp, Homo sapien
atttttattaaagtgtctgcctaca

SEQ ID NO: 4949182 - DNA, 25 bp, Homo sapien
agaagctaggttatgtatgcttctc

SEQ ID NO: 4949183 - DNA, 25 bp, Homo sapien
aaaaagaagctaggttatgtatgct

SEQ ID NO: 4949184 - DNA, 25 bp, Homo sapien
ctggatggtccgacagcatttcaga

SEQ ID NO: 4949185 - DNA, 25 bp, Homo sapien
tctggcagagagcaataagttcttc

SEQ ID NO: 4949186 - DNA, 25 bp, Homo sapien
ttcttcatttttcccgcaattgttc

SEQ ID NO: 4949187 - DNA, 25 bp, Homo sapien
ccgcaattgttcttgcatgtccctt

SEQ ID NO: 4949188 - DNA, 25 bp, Homo sapien
ttggattaattcccttttcagacat

SEQ ID NO: 4949189 - DNA, 25 bp, Homo sapien
ctacacgagggaaggagccatttgg

SEQ ID NO: 4949190 - DNA, 25 bp, Homo sapien
gaaggagccatttggattaattccc

SEQ ID NO: 4949191 - DNA, 25 bp, Homo sapien
cacgagggaaggagccatttggatt

SEQ ID NO: 4949192 - DNA, 25 bp, Homo sapien
ggtcagaaagaagagcacggcaaag

SEQ ID NO: 4949193 - DNA, 25 bp, Homo sapien
ccgatggaaattgcaggctgaactt

SEQ ID NO: 4949194 - DNA, 25 bp, Homo sapien
cttggagaatgagaagcccgatgga

SEQ ID NO: 4949195 - DNA, 25 bp, Homo sapien
tctgtgagtcgtgcaagcttggtcg

SEQ ID NO: 4949196 - DNA, 25 bp, Homo sapien
tgagtttgctgtctgtgagtcgtgc

SEQ ID NO: 4949197 - DNA, 25 bp, Homo sapien
ctcaactatccttcgttccttctgt

SEQ ID NO: 4949198 - DNA, 25 bp, Homo sapien
ttagaggttctccatgcatcatgaa

SEQ ID NO: 4949199 - DNA, 25 bp, Homo sapien
ggttctccatgcatcatgaagcccc

SEQ ID NO: 4949200 - DNA, 25 bp, Homo sapien
tgaagcttttcctattagaggttct

SEQ ID NO: 4949201 - DNA, 25 bp, Homo sapien
tgggggctgtagagctgaattagca

SEQ ID NO: 4949202 - DNA, 25 bp, Homo sapien
ggctgtagagctgaattagcaccat

SEQ ID NO: 4949203 - DNA, 25 bp, Homo sapien
ctttgaagtaaagattgggggctgt

SEQ ID NO: 4949204 - DNA, 25 bp, Homo sapien
gattgggggctgtagagctgaatta

SEQ ID NO: 4949205 - DNA, 25 bp, Homo sapien
tcatccttggtgtgaatttccacgc

SEQ ID NO: 4949206 - DNA, 25 bp, Homo sapien
cttggtgtgaatttccacgctcccc

SEQ ID NO: 4949207 - DNA, 25 bp, Homo sapien
tggtgtgaatttccacgctccccac

SEQ ID NO: 4949208 - DNA, 25 bp, Homo sapien
tccttggtgtgaatttccacgctcc

SEQ ID NO: 4949209 - DNA, 25 bp, Homo sapien
tccctgggtcgtgaaggcgccacga

SEQ ID NO: 4949210 - DNA, 25 bp, Homo sapien
tgtagttctgacaataaatggcccg

SEQ ID NO: 4949211 - DNA, 25 bp, Homo sapien
cgacctgctccactcaagatgtgca

SEQ ID NO: 4949212 - DNA, 25 bp, Homo sapien
ggccaactgtggcaattcacattgt

SEQ ID NO: 4949213 - DNA, 25 bp, Homo sapien
cgttgtggcaaacgcggagaccaag

SEQ ID NO: 4949214 - DNA, 25 bp, Homo sapien
cacgtaaaacactcgcgttgtggca

SEQ ID NO: 4949215 - DNA, 25 bp, Homo sapien
gatgctgaggcctggtccacactgg

SEQ ID NO: 4949216 - DNA, 25 bp, Homo sapien
caacttgcaactggtggaagcagcc

SEQ ID NO: 4949217 - DNA, 25 bp, Homo sapien
gatgcaggttttccggatgaaaggc

SEQ ID NO: 4949218 - DNA, 25 bp, Homo sapien
tcctgagaccgcaggttccggcgga

SEQ ID NO: 4949219 - DNA, 25 bp, Homo sapien
tctgttcacaactccgtgtcaccat

SEQ ID NO: 4949220 - DNA, 25 bp, Homo sapien
tgaaaggcccctttcctggagtgga

SEQ ID NO: 4949221 - DNA, 25 bp, Homo sapien
cgctgcaagcccatagccggcagag

SEQ ID NO: 4949222 - DNA, 25 bp, Homo sapien
gatacagacgcaggtcaaccgctaa

SEQ ID NO: 4949223 - DNA, 25 bp, Homo sapien
caaccgctaaacagtgaaggccaag

SEQ ID NO: 4949224 - DNA, 25 bp, Homo sapien
cggcagagggcaatggaactcgctt

SEQ ID NO: 4949225 - DNA, 25 bp, Homo sapien
gtcccagtacaggtaaggcactttc

SEQ ID NO: 4949226 - DNA, 25 bp, Homo sapien
caagtgcatgtgattttgggccaca

SEQ ID NO: 4949227 - DNA, 25 bp, Homo sapien
gcagcaatgtgtgccggatgactaa

SEQ ID NO: 4949228 - DNA, 25 bp, Homo sapien
catgcaccgataggaaaagcctcta

SEQ ID NO: 4949229 - DNA, 25 bp, Homo sapien
gaaggcctgctgacgaccccctgtg

SEQ ID NO: 4949230 - DNA, 25 bp, Homo sapien
aaggcctgctgacgaccccctgtgg

SEQ ID NO: 4949231 - DNA, 25 bp, Homo sapien
tctgagcgaggaaggctcccggctt

SEQ ID NO: 4949232 - DNA, 25 bp, Homo sapien
ggtccaagttcggttgcggctggcg

SEQ ID NO: 4949233 - DNA, 25 bp, Homo sapien
tgagggctctgagcgaggaaggctc

SEQ ID NO: 4949234 - DNA, 25 bp, Homo sapien
ttgcggctggcggaggttggagatt

SEQ ID NO: 4949235 - DNA, 25 bp, Homo sapien
ttcctttggtccaagacttgaggag

SEQ ID NO: 4949236 - DNA, 25 bp, Homo sapien
tcctttggtccaagacttgaggagg

SEQ ID NO: 4949237 - DNA, 25 bp, Homo sapien
tgtgtggaccggcattggcccgctt

SEQ ID NO: 4949238 - DNA, 25 bp, Homo sapien
gtggaccggcattggcccgcttgca

SEQ ID NO: 4949239 - DNA, 25 bp, Homo sapien
tggttgtgtggaccggcattggccc

SEQ ID NO: 4949240 - DNA, 25 bp, Homo sapien
tggaccggcattggcccgcttgcaa

SEQ ID NO: 4949241 - DNA, 25 bp, Homo sapien
ctggaaggattgtggagtccctgac

SEQ ID NO: 4949242 - DNA, 25 bp, Homo sapien
gacgggaagctgaaaggaaatcaac

SEQ ID NO: 4949243 - DNA, 25 bp, Homo sapien
agctgaaaggaaatcaaccagggtg

SEQ ID NO: 4949244 - DNA, 25 bp, Homo sapien
ctgaaaggaaatcaaccagggtgac

SEQ ID NO: 4949245 - DNA, 25 bp, Homo sapien
cgcagacgggaagctgaaaggaaat

SEQ ID NO: 4949246 - DNA, 25 bp, Homo sapien
gatccttttccattcggcagcggct

SEQ ID NO: 4949247 - DNA, 25 bp, Homo sapien
ggatccttttccattcggcagcggc

SEQ ID NO: 4949248 - DNA, 25 bp, Homo sapien
atccttttccattcggcagcggctt

SEQ ID NO: 4949249 - DNA, 25 bp, Homo sapien
tccttttccattcggcagcggcttc

SEQ ID NO: 4949250 - DNA, 25 bp, Homo sapien
agcacttcatggggcacctggtact

SEQ ID NO: 4949251 - DNA, 25 bp, Homo sapien
cagcacttcatggggcacctggtac

SEQ ID NO: 4949252 - DNA, 25 bp, Homo sapien
tgggatcttcttcatcgggcggggg

SEQ ID NO: 4949253 - DNA, 25 bp, Homo sapien
cctgggatcttcttcatcgggcggg

SEQ ID NO: 4949254 - DNA, 25 bp, Homo sapien
atcttcttcatcgggcgggggagac

SEQ ID NO: 4949255 - DNA, 25 bp, Homo sapien
gatcttcttcatcgggcgggggaga

SEQ ID NO: 4949256 - DNA, 25 bp, Homo sapien
cttggcccaactggggccctccgct

SEQ ID NO: 4949257 - DNA, 25 bp, Homo sapien
aagatttggggtcccgacgtgccat

SEQ ID NO: 4949258 - DNA, 25 bp, Homo sapien
cgcctttttcaggggtggactgttg

SEQ ID NO: 4949259 - DNA, 25 bp, Homo sapien
catcttcgtctcctgggggttttat

SEQ ID NO: 4949260 - DNA, 25 bp, Homo sapien
tttcaggggtggactgttgggccac

SEQ ID NO: 4949261 - DNA, 25 bp, Homo sapien
tcttcgtctcctgggggttttatga

SEQ ID NO: 4949262 - DNA, 25 bp, Homo sapien
tgcagtacatttcttttcgcattcc

SEQ ID NO: 4949263 - DNA, 25 bp, Homo sapien
agtacatttcttttcgcattcccat

SEQ ID NO: 4949264 - DNA, 25 bp, Homo sapien
gcatgctgcagtacatttcttttcg

SEQ ID NO: 4949265 - DNA, 25 bp, Homo sapien
gctgcagtacatttcttttcgcatt

SEQ ID NO: 4949266 - DNA, 25 bp, Homo sapien
ggttggaaggcctgctgacgacccc

SEQ ID NO: 4949267 - DNA, 25 bp, Homo sapien
tcatgattcaggttggaaggcctgc

SEQ ID NO: 4949268 - DNA, 25 bp, Homo sapien
aggttggaaggcctgctgacgaccc

SEQ ID NO: 4949269 - DNA, 25 bp, Homo sapien
attcaggttggaaggcctgctgacg

SEQ ID NO: 4949270 - DNA, 25 bp, Homo sapien
ggtcaccgcaggacgtttgtcttgt

SEQ ID NO: 4949271 - DNA, 25 bp, Homo sapien
tgtgtcggcttcaccacgaggagag

SEQ ID NO: 4949272 - DNA, 25 bp, Homo sapien
gattggagcctaggcccaagctgtg

SEQ ID NO: 4949273 - DNA, 25 bp, Homo sapien
gatctggaagggacccagtctcggt

SEQ ID NO: 4949274 - DNA, 25 bp, Homo sapien
gaggacagggtccacgcgcggcctc

SEQ ID NO: 4949275 - DNA, 25 bp, Homo sapien
catttcggtagctgagcgatcagcg

SEQ ID NO: 4949276 - DNA, 25 bp, Homo sapien
ggagcccctgccagacatttcggta

SEQ ID NO: 4949277 - DNA, 25 bp, Homo sapien
acagtgaagccaagacggagcccct

SEQ ID NO: 4949278 - DNA, 25 bp, Homo sapien
gtggaccggcattggcccgcttgca

SEQ ID NO: 4949279 - DNA, 25 bp, Homo sapien
tggttgtgtggaccggcattggccc

SEQ ID NO: 4949280 - DNA, 25 bp, Homo sapien
tgtgtggaccggcattggcccgctt

SEQ ID NO: 4949281 - DNA, 25 bp, Homo sapien
tggaccggcattggcccgcttgcaa

SEQ ID NO: 4949282 - DNA, 25 bp, Homo sapien
gacgggaagctgaaaggaaatcaac

SEQ ID NO: 4949283 - DNA, 25 bp, Homo sapien
agctgaaaggaaatcaaccagggtg

SEQ ID NO: 4949284 - DNA, 25 bp, Homo sapien
ctgaaaggaaatcaaccagggtgac

SEQ ID NO: 4949285 - DNA, 25 bp, Homo sapien
cgcagacgggaagctgaaaggaaat

SEQ ID NO: 4949286 - DNA, 25 bp, Homo sapien
atccttttccattcggcagcggctt

SEQ ID NO: 4949287 - DNA, 25 bp, Homo sapien
tccttttccattcggcagcggcttc

SEQ ID NO: 4949288 - DNA, 25 bp, Homo sapien
gatccttttccattcggcagcggct

SEQ ID NO: 4949289 - DNA, 25 bp, Homo sapien
ggatccttttccattcggcagcggc

SEQ ID NO: 4949290 - DNA, 25 bp, Homo sapien
agcacttcatggggcacctggtact

SEQ ID NO: 4949291 - DNA, 25 bp, Homo sapien
cagcacttcatggggcacctggtac

SEQ ID NO: 4949292 - DNA, 25 bp, Homo sapien
cctgggatcttcttcatcgggcggg

SEQ ID NO: 4949293 - DNA, 25 bp, Homo sapien
tgggatcttcttcatcgggcggggg

SEQ ID NO: 4949294 - DNA, 25 bp, Homo sapien
atcttcttcatcgggcgggggagac

SEQ ID NO: 4949295 - DNA, 25 bp, Homo sapien
gatcttcttcatcgggcgggggaga

SEQ ID NO: 4949296 - DNA, 25 bp, Homo sapien
cttggcccaactggggccctccgct

SEQ ID NO: 4949297 - DNA, 25 bp, Homo sapien
aagatttggggtcccgacgtgccat

SEQ ID NO: 4949298 - DNA, 25 bp, Homo sapien
catcttcgtctcctgggggttttat

SEQ ID NO: 4949299 - DNA, 25 bp, Homo sapien
tttcaggggtggactgttgggccac

SEQ ID NO: 4949300 - DNA, 25 bp, Homo sapien
tcttcgtctcctgggggttttatga

SEQ ID NO: 4949301 - DNA, 25 bp, Homo sapien
cgcctttttcaggggtggactgttg

SEQ ID NO: 4949302 - DNA, 25 bp, Homo sapien
tgcagtacatttcttttcgcattcc

SEQ ID NO: 4949303 - DNA, 25 bp, Homo sapien
agtacatttcttttcgcattcccat

SEQ ID NO: 4949304 - DNA, 25 bp, Homo sapien
gctgcagtacatttcttttcgcatt

SEQ ID NO: 4949305 - DNA, 25 bp, Homo sapien
gcatgctgcagtacatttcttttcg

SEQ ID NO: 4949306 - DNA, 25 bp, Homo sapien
tgagggctctgagcgaggaaggctc

SEQ ID NO: 4949307 - DNA, 25 bp, Homo sapien
tctgagcgaggaaggctcccggctt

SEQ ID NO: 4949308 - DNA, 25 bp, Homo sapien
ggtccaagttcggttgcggctggcg

SEQ ID NO: 4949309 - DNA, 25 bp, Homo sapien
ttgcggctggcggaggttggagatt

SEQ ID NO: 4949310 - DNA, 25 bp, Homo sapien
tcggggatctggaagggacccagtc

SEQ ID NO: 4949311 - DNA, 25 bp, Homo sapien
gcgctttcggggatctggaagggac

SEQ ID NO: 4949312 - DNA, 25 bp, Homo sapien
atctggaagggacccagtctcggtt

SEQ ID NO: 4949313 - DNA, 25 bp, Homo sapien
gatctggaagggacccagtctcggt

SEQ ID NO: 4949314 - DNA, 25 bp, Homo sapien
tcctttggtccaagacttgaggagg

SEQ ID NO: 4949315 - DNA, 25 bp, Homo sapien
caccgcaggacgtttgtcttgtgcc

SEQ ID NO: 4949316 - DNA, 25 bp, Homo sapien
tcggcttcaccacgaggagaggctc

SEQ ID NO: 4949317 - DNA, 25 bp, Homo sapien
gattggagcctaggcccaagctgtg

SEQ ID NO: 4949318 - DNA, 25 bp, Homo sapien
tggaccggcattggcccgcttgcaa

SEQ ID NO: 4949319 - DNA, 25 bp, Homo sapien
gtggaccggcattggcccgcttgca

SEQ ID NO: 4949320 - DNA, 25 bp, Homo sapien
tggttgtgtggaccggcattggccc

SEQ ID NO: 4949321 - DNA, 25 bp, Homo sapien
tgtgtggaccggcattggcccgctt

SEQ ID NO: 4949322 - DNA, 25 bp, Homo sapien
cagacgggaagctgaaaggaaatca

SEQ ID NO: 4949323 - DNA, 25 bp, Homo sapien
agctgaaaggaaatcaaccagggtg

SEQ ID NO: 4949324 - DNA, 25 bp, Homo sapien
gacgggaagctgaaaggaaatcaac

SEQ ID NO: 4949325 - DNA, 25 bp, Homo sapien
ctgaaaggaaatcaaccagggtgac

SEQ ID NO: 4949326 - DNA, 25 bp, Homo sapien
atccttttccattcggcagcggctt

SEQ ID NO: 4949327 - DNA, 25 bp, Homo sapien
gatccttttccattcggcagcggct

SEQ ID NO: 4949328 - DNA, 25 bp, Homo sapien
tccttttccattcggcagcggcttc

SEQ ID NO: 4949329 - DNA, 25 bp, Homo sapien
ggatccttttccattcggcagcggc

SEQ ID NO: 4949330 - DNA, 25 bp, Homo sapien
ctggtacttctggccgtgtggccaa

SEQ ID NO: 4949331 - DNA, 25 bp, Homo sapien
tacttctggccgtgtggccaaaggc

SEQ ID NO: 4949332 - DNA, 25 bp, Homo sapien
aggccccgcagtttttgcacttgag

SEQ ID NO: 4949333 - DNA, 25 bp, Homo sapien
aaaggccccgcagtttttgcacttg

SEQ ID NO: 4949334 - DNA, 25 bp, Homo sapien
cctgggatcttcttcatcgggcggg

SEQ ID NO: 4949335 - DNA, 25 bp, Homo sapien
tgggatcttcttcatcgggcggggg

SEQ ID NO: 4949336 - DNA, 25 bp, Homo sapien
gatcttcttcatcgggcgggggaga

SEQ ID NO: 4949337 - DNA, 25 bp, Homo sapien
atcttcttcatcgggcgggggagac

SEQ ID NO: 4949338 - DNA, 25 bp, Homo sapien
cttggcccaactggggccctccgct

SEQ ID NO: 4949339 - DNA, 25 bp, Homo sapien
aagatttggggtcccgacgtgccat

SEQ ID NO: 4949340 - DNA, 25 bp, Homo sapien
catcttcgtctcctgggggttttat

SEQ ID NO: 4949341 - DNA, 25 bp, Homo sapien
cgcctttttcaggggtggactgttg

SEQ ID NO: 4949342 - DNA, 25 bp, Homo sapien
tcttcgtctcctgggggttttatga

SEQ ID NO: 4949343 - DNA, 25 bp, Homo sapien
tttcaggggtggactgttgggccac

SEQ ID NO: 4949344 - DNA, 25 bp, Homo sapien
agtacatttcttttcgcattcccat

SEQ ID NO: 4949345 - DNA, 25 bp, Homo sapien
gcatgctgcagtacatttcttttcg

SEQ ID NO: 4949346 - DNA, 25 bp, Homo sapien
tgcagtacatttcttttcgcattcc

SEQ ID NO: 4949347 - DNA, 25 bp, Homo sapien
gctgcagtacatttcttttcgcatt

SEQ ID NO: 4949348 - DNA, 25 bp, Homo sapien
tcctttggtccaagacttgaggagg

SEQ ID NO: 4949349 - DNA, 25 bp, Homo sapien
ggtcaccgcaggacgtttgtcttgt

SEQ ID NO: 4949350 - DNA, 25 bp, Homo sapien
gattggagcctaggcccaagctgtg

SEQ ID NO: 4949351 - DNA, 25 bp, Homo sapien
gatctggaagggacccagtctcggt

SEQ ID NO: 4949352 - DNA, 25 bp, Homo sapien
gtggaccggcattggcccgcttgca

SEQ ID NO: 4949353 - DNA, 25 bp, Homo sapien
tggttgtgtggaccggcattggccc

SEQ ID NO: 4949354 - DNA, 25 bp, Homo sapien
tggaccggcattggcccgcttgcaa

SEQ ID NO: 4949355 - DNA, 25 bp, Homo sapien
tgtgtggaccggcattggcccgctt

SEQ ID NO: 4949356 - DNA, 25 bp, Homo sapien
gattccgtggatccttttccatttg

SEQ ID NO: 4949357 - DNA, 25 bp, Homo sapien
ttccatttggcagcggcttctctgg

SEQ ID NO: 4949358 - DNA, 25 bp, Homo sapien
ctctggaggtttcccggaaaacatg

SEQ ID NO: 4949359 - DNA, 25 bp, Homo sapien
gtgacactcgccctcagataatcag

SEQ ID NO: 4949360 - DNA, 25 bp, Homo sapien
agcacttcatggggcacctggtact

SEQ ID NO: 4949361 - DNA, 25 bp, Homo sapien
cagcacttcatggggcacctggtac

SEQ ID NO: 4949362 - DNA, 25 bp, Homo sapien
tcggatacgatgttccctcgcaaag

SEQ ID NO: 4949363 - DNA, 25 bp, Homo sapien
cgcagccaaacgtggctacacagga

SEQ ID NO: 4949364 - DNA, 25 bp, Homo sapien
gactcaaggttccaaggggcacgat

SEQ ID NO: 4949365 - DNA, 25 bp, Homo sapien
tggtgaagccgatgtcaacaacgca

SEQ ID NO: 4949366 - DNA, 25 bp, Homo sapien
tcttcttcatcgggcgggggagccc

SEQ ID NO: 4949367 - DNA, 25 bp, Homo sapien
gatcttcttcatcgggcgggggagc

SEQ ID NO: 4949368 - DNA, 25 bp, Homo sapien
atcttcttcatcgggcgggggagcc

SEQ ID NO: 4949369 - DNA, 25 bp, Homo sapien
aagatttggggtcccgacgtgccat

SEQ ID NO: 4949370 - DNA, 25 bp, Homo sapien
tcctcggatattgtgtgttcctctg

SEQ ID NO: 4949371 - DNA, 25 bp, Homo sapien
cacaatgtgctgtgcgcatcctcgg

SEQ ID NO: 4949372 - DNA, 25 bp, Homo sapien
caccagtcggtcaaatctgtagaac

SEQ ID NO: 4949373 - DNA, 25 bp, Homo sapien
tcggtcaaatctgtagaacacaatg

SEQ ID NO: 4949374 - DNA, 25 bp, Homo sapien
tgcagtacatttcttttcgcattcc

SEQ ID NO: 4949375 - DNA, 25 bp, Homo sapien
agtacatttcttttcgcattcccat

SEQ ID NO: 4949376 - DNA, 25 bp, Homo sapien
gcatgctgcagtacatttcttttcg

SEQ ID NO: 4949377 - DNA, 25 bp, Homo sapien
gctgcagtacatttcttttcgcatt

SEQ ID NO: 4949378 - DNA, 25 bp, Homo sapien
tcatgattcaggttggaaggcctgc

SEQ ID NO: 4949379 - DNA, 25 bp, Homo sapien
ggttggaaggcctgctgacgacccc

SEQ ID NO: 4949380 - DNA, 25 bp, Homo sapien
aggttggaaggcctgctgacgaccc

SEQ ID NO: 4949381 - DNA, 25 bp, Homo sapien
attcaggttggaaggcctgctgacg

SEQ ID NO: 4949382 - DNA, 25 bp, Homo sapien
ggtcaccgcaggacgtttgtcttgt

SEQ ID NO: 4949383 - DNA, 25 bp, Homo sapien
tgtgtcggcttcaccacgaggagag

SEQ ID NO: 4949384 - DNA, 25 bp, Homo sapien
gattggagcctaggcccaagctgtg

SEQ ID NO: 4949385 - DNA, 25 bp, Homo sapien
gatctggaagggacccagtctcggt

SEQ ID NO: 4949386 - DNA, 25 bp, Homo sapien
gtggaccggcattggcccgcttgca

SEQ ID NO: 4949387 - DNA, 25 bp, Homo sapien
tggttgtgtggaccggcattggccc

SEQ ID NO: 4949388 - DNA, 25 bp, Homo sapien
tgtgtggaccggcattggcccgctt

SEQ ID NO: 4949389 - DNA, 25 bp, Homo sapien
tggaccggcattggcccgcttgcaa

SEQ ID NO: 4949390 - DNA, 25 bp, Homo sapien
catgaagtggaacggactaatgccc

SEQ ID NO: 4949391 - DNA, 25 bp, Homo sapien
gggacgtcttctctgaacacatgca

SEQ ID NO: 4949392 - DNA, 25 bp, Homo sapien
gatgccttcgcctggaatccaattg

SEQ ID NO: 4949393 - DNA, 25 bp, Homo sapien
ggactaatttcctcatgccgctagg

SEQ ID NO: 4949394 - DNA, 25 bp, Homo sapien
atccttttccattcggcagcggctt

SEQ ID NO: 4949395 - DNA, 25 bp, Homo sapien
tccttttccattcggcagcggcttc

SEQ ID NO: 4949396 - DNA, 25 bp, Homo sapien
gatccttttccattcggcagcggct

SEQ ID NO: 4949397 - DNA, 25 bp, Homo sapien
ggatccttttccattcggcagcggc

SEQ ID NO: 4949398 - DNA, 25 bp, Homo sapien
agcacttcatggggcacctggtact

SEQ ID NO: 4949399 - DNA, 25 bp, Homo sapien
cagcacttcatggggcacctggtac

SEQ ID NO: 4949400 - DNA, 25 bp, Homo sapien
gggccgttaagtgctgggagacttc

SEQ ID NO: 4949401 - DNA, 25 bp, Homo sapien
gttaagtgctgggagacttcggata

SEQ ID NO: 4949402 - DNA, 25 bp, Homo sapien
ttaagtgctgggagacttcggatac

SEQ ID NO: 4949403 - DNA, 25 bp, Homo sapien
ccgttaagtgctgggagacttcgga

SEQ ID NO: 4949404 - DNA, 25 bp, Homo sapien
cgcagccaaacgtggctacacagga

SEQ ID NO: 4949405 - DNA, 25 bp, Homo sapien
tgtcaacaacgcagccaaacgtggc

SEQ ID NO: 4949406 - DNA, 25 bp, Homo sapien
atggtgaagccgatgtcaacaacgc

SEQ ID NO: 4949407 - DNA, 25 bp, Homo sapien
gactcaaggttccaaggggcacgat

SEQ ID NO: 4949408 - DNA, 25 bp, Homo sapien
cttggcccaactggggccctccgct

SEQ ID NO: 4949409 - DNA, 25 bp, Homo sapien
aagatttggggtcccgacgtgccat

SEQ ID NO: 4949410 - DNA, 25 bp, Homo sapien
cacaatgtgctgtgcgcatcctcgg

SEQ ID NO: 4949411 - DNA, 25 bp, Homo sapien
caccagtcggtcaaatctgtagaac

SEQ ID NO: 4949412 - DNA, 25 bp, Homo sapien
tcctcggatattgtgtgttcctctg

SEQ ID NO: 4949413 - DNA, 25 bp, Homo sapien
tcggtcaaatctgtagaacacaatg

SEQ ID NO: 4949414 - DNA, 25 bp, Homo sapien
tgcagtacatttcttttcgcattcc

SEQ ID NO: 4949415 - DNA, 25 bp, Homo sapien
gctgcagtacatttcttttcgcatt

SEQ ID NO: 4949416 - DNA, 25 bp, Homo sapien
agtacatttcttttcgcattcccat

SEQ ID NO: 4949417 - DNA, 25 bp, Homo sapien
gcatgctgcagtacatttcttttcg

SEQ ID NO: 4949418 - DNA, 25 bp, Homo sapien
tataaaatgggcatcctcattgcac

SEQ ID NO: 4949419 - DNA, 25 bp, Homo sapien
caccataggtcgctgggagtcaggc

SEQ ID NO: 4949420 - DNA, 25 bp, Homo sapien
ctcattcagacaagggactccaggt

SEQ ID NO: 4949421 - DNA, 25 bp, Homo sapien
cagatcaagtgaaatgtggcaggct

SEQ ID NO: 4949422 - DNA, 25 bp, Homo sapien
gcgacctcctcctcactgcgacctc

SEQ ID NO: 4949423 - DNA, 25 bp, Homo sapien
cgacctcctcctcactgcgacctcc

SEQ ID NO: 4949424 - DNA, 25 bp, Homo sapien
cctcctactcattgcaacctgctcc

SEQ ID NO: 4949425 - DNA, 25 bp, Homo sapien
caacctcctactcattgcaacctgc

SEQ ID NO: 4949426 - DNA, 25 bp, Homo sapien
catctggtccaattgcaagagtcca

SEQ ID NO: 4949427 - DNA, 25 bp, Homo sapien
tctcagaccacatggaccctctcat

SEQ ID NO: 4949428 - DNA, 25 bp, Homo sapien
tcacctcagtgcagttgcctgcaag

SEQ ID NO: 4949429 - DNA, 25 bp, Homo sapien
taaatgcaccatctccttattagca

SEQ ID NO: 4949430 - DNA, 25 bp, Homo sapien
ggagccagactccttagagaagcta

SEQ ID NO: 4949431 - DNA, 25 bp, Homo sapien
ggccgaatagaaagtgaaagactgc

SEQ ID NO: 4949432 - DNA, 25 bp, Homo sapien
gtactggagcatctagacttagagt

SEQ ID NO: 4949433 - DNA, 25 bp, Homo sapien
gcctccattaaacttccagcaacaa

SEQ ID NO: 4949434 - DNA, 25 bp, Homo sapien
catctagacttagagtgaatcttct

SEQ ID NO: 4949435 - DNA, 25 bp, Homo sapien
aactggcctccattaaacttccagc

SEQ ID NO: 4949436 - DNA, 25 bp, Homo sapien
aagtacagtggttccatctcggctg

SEQ ID NO: 4949437 - DNA, 25 bp, Homo sapien
ctgaagtacagtggttccatctcgg

SEQ ID NO: 4949438 - DNA, 25 bp, Homo sapien
ctgtctcccaggtgcaaacgattct

SEQ ID NO: 4949439 - DNA, 25 bp, Homo sapien
actgcaacctctgtctcccaggtgc

SEQ ID NO: 4949440 - DNA, 25 bp, Homo sapien
aatcactgctgatcctcgtaccagc

SEQ ID NO: 4949441 - DNA, 25 bp, Homo sapien
gaaatcactgctgatcctcgtacca

SEQ ID NO: 4949442 - DNA, 25 bp, Homo sapien
aaagaaatcactgctgatcctcgta

SEQ ID NO: 4949443 - DNA, 25 bp, Homo sapien
aagaaatcactgctgatcctcgtac

SEQ ID NO: 4949444 - DNA, 25 bp, Homo sapien
acactggcccggtgattcaggggcc

SEQ ID NO: 4949445 - DNA, 25 bp, Homo sapien
cactgaggggtacagttctccagcg

SEQ ID NO: 4949446 - DNA, 25 bp, Homo sapien
ttcaggggccaacgtttgcaggaca

SEQ ID NO: 4949447 - DNA, 25 bp, Homo sapien
gtggaaggccagcaaagccacacag

SEQ ID NO: 4949448 - DNA, 25 bp, Homo sapien
cgcgtcctccccgttctcgcagtcc

SEQ ID NO: 4949449 - DNA, 25 bp, Homo sapien
gtcctccccgttctcgcagtcctcg

SEQ ID NO: 4949450 - DNA, 25 bp, Homo sapien
cctccccgttctcgcagtcctcggg

SEQ ID NO: 4949451 - DNA, 25 bp, Homo sapien
gcgtcctccccgttctcgcagtcct

SEQ ID NO: 4949452 - DNA, 25 bp, Homo sapien
cccctccagctacagccccagcctc

SEQ ID NO: 4949453 - DNA, 25 bp, Homo sapien
agctacagccccagcctcttctctt

SEQ ID NO: 4949454 - DNA, 25 bp, Homo sapien
cttcccccctccagctacagcccca

SEQ ID NO: 4949455 - DNA, 25 bp, Homo sapien
cagctacagccccagcctcttctct

SEQ ID NO: 4949456 - DNA, 25 bp, Homo sapien
aatcactgctgatcctcgtaccagc

SEQ ID NO: 4949457 - DNA, 25 bp, Homo sapien
gaaatcactgctgatcctcgtacca

SEQ ID NO: 4949458 - DNA, 25 bp, Homo sapien
aaagaaatcactgctgatcctcgta

SEQ ID NO: 4949459 - DNA, 25 bp, Homo sapien
aagaaatcactgctgatcctcgtac

SEQ ID NO: 4949460 - DNA, 25 bp, Homo sapien
gatgaggatgtcaccatgagcaagc

SEQ ID NO: 4949461 - DNA, 25 bp, Homo sapien
ctctgaatgcggtaacgtggacggg

SEQ ID NO: 4949462 - DNA, 25 bp, Homo sapien
ccaagctctgaatgcggtaacgtgg

SEQ ID NO: 4949463 - DNA, 25 bp, Homo sapien
agctctgaatgcggtaacgtggacg

SEQ ID NO: 4949464 - DNA, 25 bp, Homo sapien
gcgggggggctctgatcctgcccat

SEQ ID NO: 4949465 - DNA, 25 bp, Homo sapien
cagcatccaggagcaaccccaagac

SEQ ID NO: 4949466 - DNA, 25 bp, Homo sapien
acagcatccaggagcaaccccaaga

SEQ ID NO: 4949467 - DNA, 25 bp, Homo sapien
actgggcgggggggctctgatcctg

SEQ ID NO: 4949468 - DNA, 25 bp, Homo sapien
ttcgtgcccggcagcggcgggtcct

SEQ ID NO: 4949469 - DNA, 25 bp, Homo sapien
gccggtctccttcgtgcccggcagc

SEQ ID NO: 4949470 - DNA, 25 bp, Homo sapien
agcggcgggtcctccctgtcctcgc

SEQ ID NO: 4949471 - DNA, 25 bp, Homo sapien
ggcagcggcgggtcctccctgtcct

SEQ ID NO: 4949472 - DNA, 25 bp, Homo sapien
ttctggccgctctcgcgcacctccg

SEQ ID NO: 4949473 - DNA, 25 bp, Homo sapien
tgaacttggggaagaagaaggacac

SEQ ID NO: 4949474 - DNA, 25 bp, Homo sapien
caggcctgcgtagctctcacatgtc

SEQ ID NO: 4949475 - DNA, 25 bp, Homo sapien
gggcccaggcctgcgtagctctcac

SEQ ID NO: 4949476 - DNA, 25 bp, Homo sapien
gcccatggacaggcccgctctggca

SEQ ID NO: 4949477 - DNA, 25 bp, Homo sapien
tggacaggcccgctctggcaatgcc

SEQ ID NO: 4949478 - DNA, 25 bp, Homo sapien
atggacaggcccgctctggcaatgc

SEQ ID NO: 4949479 - DNA, 25 bp, Homo sapien
ccatggacaggcccgctctggcaat

SEQ ID NO: 4949480 - DNA, 25 bp, Homo sapien
catgttgctgtctagagccctgatc

SEQ ID NO: 4949481 - DNA, 25 bp, Homo sapien
tcatagaccagggtttgcatgttgc

SEQ ID NO: 4949482 - DNA, 25 bp, Homo sapien
ttgctgtctagagccctgatctgct

SEQ ID NO: 4949483 - DNA, 25 bp, Homo sapien
ctatgagaacttattgtagttctca

SEQ ID NO: 4949484 - DNA, 25 bp, Homo sapien
gggtcgaagtgcaccccgttcagat

SEQ ID NO: 4949485 - DNA, 25 bp, Homo sapien
tccgggtcgaagtgcaccccgttca

SEQ ID NO: 4949486 - DNA, 25 bp, Homo sapien
gagggcactctctaggaagcttgtc

SEQ ID NO: 4949487 - DNA, 25 bp, Homo sapien
ctctaggaagcttgtctaggtaaac

SEQ ID NO: 4949488 - DNA, 25 bp, Homo sapien
ccgccttccaccgacgctccttgag

SEQ ID NO: 4949489 - DNA, 25 bp, Homo sapien
agctccaactgcagcccacgggcgt

SEQ ID NO: 4949490 - DNA, 25 bp, Homo sapien
ctccaactgcagcccacgggcgtaa

SEQ ID NO: 4949491 - DNA, 25 bp, Homo sapien
gctccaactgcagcccacgggcgta

SEQ ID NO: 4949492 - DNA, 25 bp, Homo sapien
taatggctaaagtttgccaagccca

SEQ ID NO: 4949493 - DNA, 25 bp, Homo sapien
caaagtggtacgtgagctaatggct

SEQ ID NO: 4949494 - DNA, 25 bp, Homo sapien
tgggctctatgtctccttcctcgga

SEQ ID NO: 4949495 - DNA, 25 bp, Homo sapien
tttaacttttggcagcagggtgcaa

SEQ ID NO: 4949496 - DNA, 25 bp, Homo sapien
tatgggtgtacacaaatctgtcttc

SEQ ID NO: 4949497 - DNA, 25 bp, Homo sapien
tgcctgccttttgaaagctgaatag

SEQ ID NO: 4949498 - DNA, 25 bp, Homo sapien
cttccattgtatgaaggaactgcag

SEQ ID NO: 4949499 - DNA, 25 bp, Homo sapien
aggtacccacaaatgcaactgcggc

SEQ ID NO: 4949500 - DNA, 25 bp, Homo sapien
gccaacattgcaccatgacactcca

SEQ ID NO: 4949501 - DNA, 25 bp, Homo sapien
ctgggcaacaagagcgaaactccat

SEQ ID NO: 4949502 - DNA, 25 bp, Homo sapien
caacattgcaccatgacactccagc

SEQ ID NO: 4949503 - DNA, 25 bp, Homo sapien
gagccaacattgcaccatgacactc

SEQ ID NO: 4949504 - DNA, 25 bp, Homo sapien
ttcatactgtacaatcaaacactag

SEQ ID NO: 4949505 - DNA, 25 bp, Homo sapien
ggacccaattatccacttgtcttca

SEQ ID NO: 4949506 - DNA, 25 bp, Homo sapien
tcaattgatccgtgcgactcggcct

SEQ ID NO: 4949507 - DNA, 25 bp, Homo sapien
ccttttcttcctagcgtctgctaac

SEQ ID NO: 4949508 - DNA, 25 bp, Homo sapien
gcctctaaaaacttcgtcattggaa

SEQ ID NO: 4949509 - DNA, 25 bp, Homo sapien
tcattgcagcttgatgcctctaaaa

SEQ ID NO: 4949510 - DNA, 25 bp, Homo sapien
acttcgtcattggaaccatctctgg

SEQ ID NO: 4949511 - DNA, 25 bp, Homo sapien
ctaaaaacttcgtcattggaaccat

SEQ ID NO: 4949512 - DNA, 25 bp, Homo sapien
gcaaacaactgctagatgacagcca

SEQ ID NO: 4949513 - DNA, 25 bp, Homo sapien
aactgctagatgacagccacaggtg

SEQ ID NO: 4949514 - DNA, 25 bp, Homo sapien
caactgctagatgacagccacaggt

SEQ ID NO: 4949515 - DNA, 25 bp, Homo sapien
aacaactgctagatgacagccacag

SEQ ID NO: 4949516 - DNA, 25 bp, Homo sapien
tttccacattcttgatgatggttaa

SEQ ID NO: 4949517 - DNA, 25 bp, Homo sapien
ttgatgatggttaattgtaacacaa

SEQ ID NO: 4949518 - DNA, 25 bp, Homo sapien
aggggtcacagaccaaattagagat

SEQ ID NO: 4949519 - DNA, 25 bp, Homo sapien
gagaggggtcacagaccaaattaga

SEQ ID NO: 4949520 - DNA, 25 bp, Homo sapien
catgcaacaaggagcaggaaagaca

SEQ ID NO: 4949521 - DNA, 25 bp, Homo sapien
cttctatacatgcaacaaggagcag

SEQ ID NO: 4949522 - DNA, 25 bp, Homo sapien
tatacatgcaacaaggagcaggaaa

SEQ ID NO: 4949523 - DNA, 25 bp, Homo sapien
tgcaacaaggagcaggaaagacatc

SEQ ID NO: 4949524 - DNA, 25 bp, Homo sapien
ggacagcaaagcgagggccggctgc

SEQ ID NO: 4949525 - DNA, 25 bp, Homo sapien
cagggacagcaaagcgagggccggc

SEQ ID NO: 4949526 - DNA, 25 bp, Homo sapien
agggacagggacagcaaagcgaggg

SEQ ID NO: 4949527 - DNA, 25 bp, Homo sapien
cagcaaagcgagggccggctgcagt

SEQ ID NO: 4949528 - DNA, 25 bp, Homo sapien
acatcccagagggtgtacactaccc

SEQ ID NO: 4949529 - DNA, 25 bp, Homo sapien
caacatcccagagggtgtacactac

SEQ ID NO: 4949530 - DNA, 25 bp, Homo sapien
atcccagagggtgtacactacccct

SEQ ID NO: 4949531 - DNA, 25 bp, Homo sapien
ccaacatcccagagggtgtacacta

SEQ ID NO: 4949532 - DNA, 25 bp, Homo sapien
gtctgagccgatccataagggcggt

SEQ ID NO: 4949533 - DNA, 25 bp, Homo sapien
ttgtctgagccgatccataagggcg

SEQ ID NO: 4949534 - DNA, 25 bp, Homo sapien
gaagcacagggattacttcaccagc

SEQ ID NO: 4949535 - DNA, 25 bp, Homo sapien
ctgagccgatccataagggcggtcg

SEQ ID NO: 4949536 - DNA, 25 bp, Homo sapien
gaaccagtacatgcttgttacctcc

SEQ ID NO: 4949537 - DNA, 25 bp, Homo sapien
agaaccagtacatgcttgttacctc

SEQ ID NO: 4949538 - DNA, 25 bp, Homo sapien
aaccagtacatgcttgttacctcca

SEQ ID NO: 4949539 - DNA, 25 bp, Homo sapien
ccagtacatgcttgttacctccaca

SEQ ID NO: 4949540 - DNA, 25 bp, Homo sapien
gatactgatcttattctttagaaaa

SEQ ID NO: 4949541 - DNA, 25 bp, Homo sapien
taaaaatcaatacggatactaatga

SEQ ID NO: 4949542 - DNA, 25 bp, Homo sapien
ataatctgagaactttttattagca

SEQ ID NO: 4949543 - DNA, 25 bp, Homo sapien
taatattgatgattatgacgcctga

SEQ ID NO: 4949544 - DNA, 25 bp, Homo sapien
gtaaaatcccgccaaccgcatctca

SEQ ID NO: 4949545 - DNA, 25 bp, Homo sapien
ctagtaaaatcccgccaaccgcatc

SEQ ID NO: 4949546 - DNA, 25 bp, Homo sapien
tagtaaaatcccgccaaccgcatct

SEQ ID NO: 4949547 - DNA, 25 bp, Homo sapien
taaaatcccgccaaccgcatctcac

SEQ ID NO: 4949548 - DNA, 25 bp, Homo sapien
cacgagtccccatttggctcaaccg

SEQ ID NO: 4949549 - DNA, 25 bp, Homo sapien
ccgccgatgccaagtgtgtggttcc

SEQ ID NO: 4949550 - DNA, 25 bp, Homo sapien
catttggctcaaccgccgatgccaa

SEQ ID NO: 4949551 - DNA, 25 bp, Homo sapien
ggagcgttgcttgcaccacgagtcc

SEQ ID NO: 4949552 - DNA, 25 bp, Homo sapien
ttagagtgggctgtgcagatagacc

SEQ ID NO: 4949553 - DNA, 25 bp, Homo sapien
tcatgtaattggattaagttaattg

SEQ ID NO: 4949554 - DNA, 25 bp, Homo sapien
taggttttagaatgtctgtcagcag

SEQ ID NO: 4949555 - DNA, 25 bp, Homo sapien
gtgggctgtgcagatagacctttcc

SEQ ID NO: 4949556 - DNA, 25 bp, Homo sapien
gataataaggggaagttcaacagca

SEQ ID NO: 4949557 - DNA, 25 bp, Homo sapien
taaggggaagttcaacagcaacaac

SEQ ID NO: 4949558 - DNA, 25 bp, Homo sapien
taataaggggaagttcaacagcaac

SEQ ID NO: 4949559 - DNA, 25 bp, Homo sapien
gaaggggctgcggcaaagctacaaa

SEQ ID NO: 4949560 - DNA, 25 bp, Homo sapien
cacgcacgctaacacgtggggagcg

SEQ ID NO: 4949561 - DNA, 25 bp, Homo sapien
cacgagtccccatttggctcaaccg

SEQ ID NO: 4949562 - DNA, 25 bp, Homo sapien
ggagcgttgcttgcaccacgagtcc

SEQ ID NO: 4949563 - DNA, 25 bp, Homo sapien
ccgccgatgccaagtgtgtggttcc

SEQ ID NO: 4949564 - DNA, 25 bp, Homo sapien
ccttcctccatctgaactgcaagag

SEQ ID NO: 4949565 - DNA, 25 bp, Homo sapien
gccttcctccatctgaactgcaaga

SEQ ID NO: 4949566 - DNA, 25 bp, Homo sapien
cctccatctgaactgcaagaggcgt

SEQ ID NO: 4949567 - DNA, 25 bp, Homo sapien
ttcctccatctgaactgcaagaggc

SEQ ID NO: 4949568 - DNA, 25 bp, Homo sapien
cacgcacgctaacacgtggggagcg

SEQ ID NO: 4949569 - DNA, 25 bp, Homo sapien
ggagcgttgcttgcaccacgagtcc

SEQ ID NO: 4949570 - DNA, 25 bp, Homo sapien
cacgagtccccatttggctcaaccg

SEQ ID NO: 4949571 - DNA, 25 bp, Homo sapien
ccgccgatgccaagtgtgtggttcc

SEQ ID NO: 4949572 - DNA, 25 bp, Homo sapien
cacgcacgctaacacgtggggagcg

SEQ ID NO: 4949573 - DNA, 25 bp, Homo sapien
cacgagtccccatttggctcaaccg

SEQ ID NO: 4949574 - DNA, 25 bp, Homo sapien
ccgccgatgccaagtgtgtggttcc

SEQ ID NO: 4949575 - DNA, 25 bp, Homo sapien
ggagcgttgcttgcaccacgagtcc

SEQ ID NO: 4949576 - DNA, 25 bp, Homo sapien
cacgcacgctaacacgtggggagcg

SEQ ID NO: 4949577 - DNA, 25 bp, Homo sapien
ccgccgatgccaagtgtgtggttcc

SEQ ID NO: 4949578 - DNA, 25 bp, Homo sapien
cacgagtccccatttggctcaaccg

SEQ ID NO: 4949579 - DNA, 25 bp, Homo sapien
ggagcgttgcttgcaccacgagtcc

SEQ ID NO: 4949580 - DNA, 25 bp, Homo sapien
cacgcacgctaacacgtggggagcg

SEQ ID NO: 4949581 - DNA, 25 bp, Homo sapien
ggagcgttgcttgcaccacgagtcc

SEQ ID NO: 4949582 - DNA, 25 bp, Homo sapien
cacgagtccccatttggctcaaccg

SEQ ID NO: 4949583 - DNA, 25 bp, Homo sapien
ccgccgatgccaagtgtgtggttcc

SEQ ID NO: 4949584 - DNA, 25 bp, Homo sapien
ggagcgttgcttgcaccacgagtcc

SEQ ID NO: 4949585 - DNA, 25 bp, Homo sapien
cacgagtccccatttggctcaaccg

SEQ ID NO: 4949586 - DNA, 25 bp, Homo sapien
ccgccgatgccaagtgtgtggttcc

SEQ ID NO: 4949587 - DNA, 25 bp, Homo sapien
cacgcacgctaacacgtggggagcg

SEQ ID NO: 4949588 - DNA, 25 bp, Homo sapien
aggggacattcaggactttcccatc

SEQ ID NO: 4949589 - DNA, 25 bp, Homo sapien
gctaggggacattcaggactttccc

SEQ ID NO: 4949590 - DNA, 25 bp, Homo sapien
aggctaggggacattcaggactttc

SEQ ID NO: 4949591 - DNA, 25 bp, Homo sapien
taggggacattcaggactttcccat

SEQ ID NO: 4949592 - DNA, 25 bp, Homo sapien
cacgcacgctaacacgtggggagcg

SEQ ID NO: 4949593 - DNA, 25 bp, Homo sapien
ccgccgatgccaagtgtgtggttcc

SEQ ID NO: 4949594 - DNA, 25 bp, Homo sapien
cacgagtccccatttggctcaaccg

SEQ ID NO: 4949595 - DNA, 25 bp, Homo sapien
ggagcgttgcttgcaccacgagtcc

SEQ ID NO: 4949596 - DNA, 25 bp, Homo sapien
cacgcacgctaacacgtggggagcg

SEQ ID NO: 4949597 - DNA, 25 bp, Homo sapien
cacgagtccccatttggctcaaccg

SEQ ID NO: 4949598 - DNA, 25 bp, Homo sapien
ccgccgatgccaagtgtgtggttcc

SEQ ID NO: 4949599 - DNA, 25 bp, Homo sapien
ggagcgttgcttgcaccacgagtcc

SEQ ID NO: 4949600 - DNA, 25 bp, Homo sapien
acaaccacaaatacgctgttaccca

SEQ ID NO: 4949601 - DNA, 25 bp, Homo sapien
gatgtaatcgatctgcagagggaac

SEQ ID NO: 4949602 - DNA, 25 bp, Homo sapien
tgtaatcgatctgcagagggaactg

SEQ ID NO: 4949603 - DNA, 25 bp, Homo sapien
accacaaatacgctgttacccaggg

SEQ ID NO: 4949604 - DNA, 25 bp, Homo sapien
tgctgctgtggaacgacagccctca

SEQ ID NO: 4949605 - DNA, 25 bp, Homo sapien
tccagtctcagtgtgagttctgtcc

SEQ ID NO: 4949606 - DNA, 25 bp, Homo sapien
acgatgatgaacgtctctgtgctgg

SEQ ID NO: 4949607 - DNA, 25 bp, Homo sapien
cccttgttccgggaccacgatgatg

SEQ ID NO: 4949608 - DNA, 25 bp, Homo sapien
tctttgaagtaagggtgtttctgca

SEQ ID NO: 4949609 - DNA, 25 bp, Homo sapien
atgaattcatgtgaggaattctttg

SEQ ID NO: 4949610 - DNA, 25 bp, Homo sapien
gaattcatgtgaggaattctttgaa

SEQ ID NO: 4949611 - DNA, 25 bp, Homo sapien
gaatgaattcatgtgaggaattctt

SEQ ID NO: 4949612 - DNA, 25 bp, Homo sapien
agttggaagcaagcacagcagtcac

SEQ ID NO: 4949613 - DNA, 25 bp, Homo sapien
tggaagcaagcacagcagtcaccac

SEQ ID NO: 4949614 - DNA, 25 bp, Homo sapien
tctcagttggaagcaagcacagcag

SEQ ID NO: 4949615 - DNA, 25 bp, Homo sapien
agtgtctcagttggaagcaagcaca

SEQ ID NO: 4949616 - DNA, 25 bp, Homo sapien
tcagaccacgtcatgctggaagcag

SEQ ID NO: 4949617 - DNA, 25 bp, Homo sapien
tgggaccctccgctgttgaagacag

SEQ ID NO: 4949618 - DNA, 25 bp, Homo sapien
cagcaaagggcaagcaagtggtcaa

SEQ ID NO: 4949619 - DNA, 25 bp, Homo sapien
gaatgcactgactaaggatctggac

SEQ ID NO: 4949620 - DNA, 25 bp, Homo sapien
ctaaagagacatctccgtgccctgc

SEQ ID NO: 4949621 - DNA, 25 bp, Homo sapien
ctgctgggaggcctatggtgaaccc

SEQ ID NO: 4949622 - DNA, 25 bp, Homo sapien
cacttcctaaagagacatctccgtg

SEQ ID NO: 4949623 - DNA, 25 bp, Homo sapien
aaccctgtgatagacctggggacca

SEQ ID NO: 4949624 - DNA, 25 bp, Homo sapien
caagctgaagtcatcaacggaaggt

SEQ ID NO: 4949625 - DNA, 25 bp, Homo sapien
aaggctgcccgacagcgtggaatgc

SEQ ID NO: 4949626 - DNA, 25 bp, Homo sapien
agtcggctggtctagggcgtcccac

SEQ ID NO: 4949627 - DNA, 25 bp, Homo sapien
gatcccagccatgtggtttgcttgg

SEQ ID NO: 4949628 - DNA, 25 bp, Homo sapien
agacagtcctcagtattctgccctc

SEQ ID NO: 4949629 - DNA, 25 bp, Homo sapien
tcctcagtattctgccctccaaaaa

SEQ ID NO: 4949630 - DNA, 25 bp, Homo sapien
aagacagtcctcagtattctgccct

SEQ ID NO: 4949631 - DNA, 25 bp, Homo sapien
agtcctcagtattctgccctccaaa

SEQ ID NO: 4949632 - DNA, 25 bp, Homo sapien
cagggactggtatgaattcaggtgt

SEQ ID NO: 4949633 - DNA, 25 bp, Homo sapien
gactggtatgaattcaggtgtggag

SEQ ID NO: 4949634 - DNA, 25 bp, Homo sapien
ccagggactggtatgaattcaggtg

SEQ ID NO: 4949635 - DNA, 25 bp, Homo sapien
tggtatgaattcaggtgtggagctc

SEQ ID NO: 4949636 - DNA, 25 bp, Homo sapien
tggattcatttgtgtggtagccaaa

SEQ ID NO: 4949637 - DNA, 25 bp, Homo sapien
cctgctccacttggcgacgtttggg

SEQ ID NO: 4949638 - DNA, 25 bp, Homo sapien
tgtactgggaccctgctccacttgg

SEQ ID NO: 4949639 - DNA, 25 bp, Homo sapien
acttggcgacgtttgggtggattca

SEQ ID NO: 4949640 - DNA, 25 bp, Homo sapien
cattgtcattctgcggttctgtctg

SEQ ID NO: 4949641 - DNA, 25 bp, Homo sapien
ttcttaagcgccggtaaccatacat

SEQ ID NO: 4949642 - DNA, 25 bp, Homo sapien
tctggggcttcttaagcgccggtaa

SEQ ID NO: 4949643 - DNA, 25 bp, Homo sapien
gaatctctggggcttcttaagcgcc

SEQ ID NO: 4949644 - DNA, 25 bp, Homo sapien
ccaagcccgagtcaaagcagaggat

SEQ ID NO: 4949645 - DNA, 25 bp, Homo sapien
gcatgaagatccctgttttgacaac

SEQ ID NO: 4949646 - DNA, 25 bp, Homo sapien
ggctcactgagaaacccggcatgaa

SEQ ID NO: 4949647 - DNA, 25 bp, Homo sapien
gttttctgagggatacaagagcagg

SEQ ID NO: 4949648 - DNA, 25 bp, Homo sapien
cagccttaggaattatttattgtgg

SEQ ID NO: 4949649 - DNA, 25 bp, Homo sapien
ctacaaggacatcagcatgcaaggg

SEQ ID NO: 4949650 - DNA, 25 bp, Homo sapien
tgtggcatcagaccaatgactacaa

SEQ ID NO: 4949651 - DNA, 25 bp, Homo sapien
ttcaaaagcattggcctggggagtg

SEQ ID NO: 4949652 - DNA, 25 bp, Homo sapien
cccgtgaaaagatggccgtcagtat

SEQ ID NO: 4949653 - DNA, 25 bp, Homo sapien
gatgagctcctcattgctggaatcc

SEQ ID NO: 4949654 - DNA, 25 bp, Homo sapien
tgctcccgtgaaaagatggccgtca

SEQ ID NO: 4949655 - DNA, 25 bp, Homo sapien
aaagatggccgtcagtattctccaa

SEQ ID NO: 4949656 - DNA, 25 bp, Homo sapien
agggactggcctgaattcagtgtgg

SEQ ID NO: 4949657 - DNA, 25 bp, Homo sapien
tcctggaattgagggtgtttttgca

SEQ ID NO: 4949658 - DNA, 25 bp, Homo sapien
gcctgaattcagtgtggagctcctg

SEQ ID NO: 4949659 - DNA, 25 bp, Homo sapien
aattcagtgtggagctcctggaatt

SEQ ID NO: 4949660 - DNA, 25 bp, Homo sapien
tatactggtaccctgctccacttgg

SEQ ID NO: 4949661 - DNA, 25 bp, Homo sapien
ggtggattcatttgcgtggtagcca

SEQ ID NO: 4949662 - DNA, 25 bp, Homo sapien
tgctccacttggtgacgtttgggtg

SEQ ID NO: 4949663 - DNA, 25 bp, Homo sapien
acttggtgacgtttgggtggattca

SEQ ID NO: 4949664 - DNA, 25 bp, Homo sapien
ttctttggcgccagtaaccatacat

SEQ ID NO: 4949665 - DNA, 25 bp, Homo sapien
cattgtcattctgcgattctgtcca

SEQ ID NO: 4949666 - DNA, 25 bp, Homo sapien
gaatcactaaggcttctttggcgcc

SEQ ID NO: 4949667 - DNA, 25 bp, Homo sapien
gtcattctgcgattctgtccaggaa

SEQ ID NO: 4949668 - DNA, 25 bp, Homo sapien
ggctgaagatccctgttgtgtcaac

SEQ ID NO: 4949669 - DNA, 25 bp, Homo sapien
gatcactgagaaacctggcacctgg

SEQ ID NO: 4949670 - DNA, 25 bp, Homo sapien
gggagcttcaaggagaacgtctcaa

SEQ ID NO: 4949671 - DNA, 25 bp, Homo sapien
gatgaacttctactcccacctaggg

SEQ ID NO: 4949672 - DNA, 25 bp, Homo sapien
tgttcacctgaacccgctgagaaac

SEQ ID NO: 4949673 - DNA, 25 bp, Homo sapien
aataagggcactgaattcgatgacc

SEQ ID NO: 4949674 - DNA, 25 bp, Homo sapien
tagagcagcgcagagggattttact

SEQ ID NO: 4949675 - DNA, 25 bp, Homo sapien
gaaacgttccatctttaggactgcc

SEQ ID NO: 4949676 - DNA, 25 bp, Homo sapien
tccattctcttactaattagtgctc

SEQ ID NO: 4949677 - DNA, 25 bp, Homo sapien
attagtgctctatgaattgctgtcc

SEQ ID NO: 4949678 - DNA, 25 bp, Homo sapien
taagacattcggcttcacagtgacc

SEQ ID NO: 4949679 - DNA, 25 bp, Homo sapien
gcaaaatggtgctaattcagctcta

SEQ ID NO: 4949680 - DNA, 25 bp, Homo sapien
gcagccaaaataaagacaaatattt

SEQ ID NO: 4949681 - DNA, 25 bp, Homo sapien
cttggaaaatttgagcaagaagaat

SEQ ID NO: 4949682 - DNA, 25 bp, Homo sapien
ggaaaatttgagcaagaagaatgag

SEQ ID NO: 4949683 - DNA, 25 bp, Homo sapien
gcaagaagaatgagagcagccaaaa

SEQ ID NO: 4949684 - DNA, 25 bp, Homo sapien
gaagaattaacagcctcttgagcct

SEQ ID NO: 4949685 - DNA, 25 bp, Homo sapien
cagttactggatcctagctatggct

SEQ ID NO: 4949686 - DNA, 25 bp, Homo sapien
tacaccataagtactagaatcaatg

SEQ ID NO: 4949687 - DNA, 25 bp, Homo sapien
aattagacagtcaaccatttatgca

SEQ ID NO: 4949688 - DNA, 25 bp, Homo sapien
cgaccaagcttgcacgactcacaga

SEQ ID NO: 4949689 - DNA, 25 bp, Homo sapien
tgcaatttccatcgggcttctcatt

SEQ ID NO: 4949690 - DNA, 25 bp, Homo sapien
ttgcacgactcacagacagcaaact

SEQ ID NO: 4949691 - DNA, 25 bp, Homo sapien
gaaagttcagcctgcaatttccatc

SEQ ID NO: 4949692 - DNA, 25 bp, Homo sapien
ggaaaaatcaagtcctgcctggcac

SEQ ID NO: 4949693 - DNA, 25 bp, Homo sapien
gaaaaatcaagtcctgcctggcacc

SEQ ID NO: 4949694 - DNA, 25 bp, Homo sapien
gggaaaaatcaagtcctgcctggca

SEQ ID NO: 4949695 - DNA, 25 bp, Homo sapien
atggcagttgaaccaaaatgaagaa

SEQ ID NO: 4949696 - DNA, 25 bp, Homo sapien
ggcagttgaaccaaaatgaagaaca

SEQ ID NO: 4949697 - DNA, 25 bp, Homo sapien
tgatggcagttgaaccaaaatgaag

SEQ ID NO: 4949698 - DNA, 25 bp, Homo sapien
ctgatggcagttgaaccaaaatgaa

SEQ ID NO: 4949699 - DNA, 25 bp, Homo sapien
gactcttcggaatagagattgggat

SEQ ID NO: 4949700 - DNA, 25 bp, Homo sapien
tttagggaagactcttcggaataga

SEQ ID NO: 4949701 - DNA, 25 bp, Homo sapien
gaagactcttcggaatagagattgg

SEQ ID NO: 4949702 - DNA, 25 bp, Homo sapien
tcttcggaatagagattgggatttc

SEQ ID NO: 4949703 - DNA, 25 bp, Homo sapien
caagaaattcttagctacccccatc

SEQ ID NO: 4949704 - DNA, 25 bp, Homo sapien
ccccatccctcaagtgagacaggaa

SEQ ID NO: 4949705 - DNA, 25 bp, Homo sapien
ccgtgcccggctctcaagaaattct

SEQ ID NO: 4949706 - DNA, 25 bp, Homo sapien
ccatccctcaagtgagacaggaagg

SEQ ID NO: 4949707 - DNA, 25 bp, Homo sapien
tggaaagcctgggtcagggatccct

SEQ ID NO: 4949708 - DNA, 25 bp, Homo sapien
ccgaagaatgcaccgcagagctggc

SEQ ID NO: 4949709 - DNA, 25 bp, Homo sapien
ggatccctccagatcccgaagaatg

SEQ ID NO: 4949710 - DNA, 25 bp, Homo sapien
tcaacctttgatcccaagacaaaga

SEQ ID NO: 4949711 - DNA, 25 bp, Homo sapien
aatgaagcctacagcaaaacagtct

SEQ ID NO: 4949712 - DNA, 25 bp, Homo sapien
tgaagcctacagcaaaacagtcttt

SEQ ID NO: 4949713 - DNA, 25 bp, Homo sapien
atgaagcctacagcaaaacagtctt

SEQ ID NO: 4949714 - DNA, 25 bp, Homo sapien
ctccggggccacgttgtccaatcag

SEQ ID NO: 4949715 - DNA, 25 bp, Homo sapien
gggccacgttgtccaatcaggtgca

SEQ ID NO: 4949716 - DNA, 25 bp, Homo sapien
gttgtccaatcaggtgcaggttttt

SEQ ID NO: 4949717 - DNA, 25 bp, Homo sapien
cacgttgtccaatcaggtgcaggtt

SEQ ID NO: 4949718 - DNA, 25 bp, Homo sapien
ttcgcttaaacaggctggagcagtc

SEQ ID NO: 4949719 - DNA, 25 bp, Homo sapien
aggacaccacttgattgttccagca

SEQ ID NO: 4949720 - DNA, 25 bp, Homo sapien
acttgattgttccagcacctctttc

SEQ ID NO: 4949721 - DNA, 25 bp, Homo sapien
tctttcccttcgcttaaacaggctg

SEQ ID NO: 4949722 - DNA, 25 bp, Homo sapien
ctggcatccgaaacacagcagacct

SEQ ID NO: 4949723 - DNA, 25 bp, Homo sapien
ttctagatggctctggcactcaggt

SEQ ID NO: 4949724 - DNA, 25 bp, Homo sapien
tggccttcagtctcataagcctctg

SEQ ID NO: 4949725 - DNA, 25 bp, Homo sapien
gcaccaaagcacgataccagcattc

SEQ ID NO: 4949726 - DNA, 25 bp, Homo sapien
aaatgctgccgaagaaagaaataaa

SEQ ID NO: 4949727 - DNA, 25 bp, Homo sapien
aaaggaggaacagatcggcaagtgc

SEQ ID NO: 4949728 - DNA, 25 bp, Homo sapien
agaggcggccggtgtgctgtgctca

SEQ ID NO: 4949729 - DNA, 25 bp, Homo sapien
atcggcaagtgctcgacgcgtggcc

SEQ ID NO: 4949730 - DNA, 25 bp, Homo sapien
aaacacacttcatcactaggatgaa

SEQ ID NO: 4949731 - DNA, 25 bp, Homo sapien
tctaacaaggcctcacaaatgtact

SEQ ID NO: 4949732 - DNA, 25 bp, Homo sapien
ctctaacaaggcctcacaaatgtac

SEQ ID NO: 4949733 - DNA, 25 bp, Homo sapien
caaggcctcacaaatgtactgagag

SEQ ID NO: 4949734 - DNA, 25 bp, Homo sapien
taacaaggcctcacaaatgtactga

SEQ ID NO: 4949735 - DNA, 25 bp, Homo sapien
tttttgtgactacaacagctgctgt

SEQ ID NO: 4949736 - DNA, 25 bp, Homo sapien
cagggctgttcccttctttaggaat

SEQ ID NO: 4949737 - DNA, 25 bp, Homo sapien
accatattcacgacatctcctaaca

SEQ ID NO: 4949738 - DNA, 25 bp, Homo sapien
tgtagttaatagagaggccatgcca

SEQ ID NO: 4949739 - DNA, 25 bp, Homo sapien
tccatctgaaagtttctccattcag

SEQ ID NO: 4949740 - DNA, 25 bp, Homo sapien
agcatggcatcatctttgatcacag

SEQ ID NO: 4949741 - DNA, 25 bp, Homo sapien
catttttcaatttgagacttgttac

SEQ ID NO: 4949742 - DNA, 25 bp, Homo sapien
tgatcacagtgacctctccaacttc

SEQ ID NO: 4949743 - DNA, 25 bp, Homo sapien
tattcaggatgagtgtagttagagc

SEQ ID NO: 4949744 - DNA, 25 bp, Homo sapien
ggatgagtgtagttagagcttctcc

SEQ ID NO: 4949745 - DNA, 25 bp, Homo sapien
agcctattcaggatgagtgtagtta

SEQ ID NO: 4949746 - DNA, 25 bp, Homo sapien
tttagcctattcaggatgagtgtag

SEQ ID NO: 4949747 - DNA, 25 bp, Homo sapien
ttttcatgcaacagaacataggcat

SEQ ID NO: 4949748 - DNA, 25 bp, Homo sapien
tttcatgcaacagaacataggcatc

SEQ ID NO: 4949749 - DNA, 25 bp, Homo sapien
cttttcatgcaacagaacataggca

SEQ ID NO: 4949750 - DNA, 25 bp, Homo sapien
aaactttttcattgcatcagagatg

SEQ ID NO: 4949751 - DNA, 25 bp, Homo sapien
ttcattgcatcagagatgatgttac

SEQ ID NO: 4949752 - DNA, 25 bp, Homo sapien
gtgatgatgccctttcttccaaact

SEQ ID NO: 4949753 - DNA, 25 bp, Homo sapien
gatgatgccctttcttccaaacttt

SEQ ID NO: 4949754 - DNA, 25 bp, Homo sapien
cttcaggtttggtcacaggtttaga

SEQ ID NO: 4949755 - DNA, 25 bp, Homo sapien
gctaacatcacacctctcttgattt

SEQ ID NO: 4949756 - DNA, 25 bp, Homo sapien
caacctgtgcaatttcttcaggttt

SEQ ID NO: 4949757 - DNA, 25 bp, Homo sapien
gcacctttgctaaccttctggaagg

SEQ ID NO: 4949758 - DNA, 25 bp, Homo sapien
agcagtgatagtgccatcccccagt

SEQ ID NO: 4949759 - DNA, 25 bp, Homo sapien
gcagcagtgatagtgccatccccca

SEQ ID NO: 4949760 - DNA, 25 bp, Homo sapien
cagtgatagtgccatcccccagtct

SEQ ID NO: 4949761 - DNA, 25 bp, Homo sapien
gtgatagtgccatcccccagtctct

SEQ ID NO: 4949762 - DNA, 25 bp, Homo sapien
cagctatgttcaataattactgttc

SEQ ID NO: 4949763 - DNA, 25 bp, Homo sapien
cttccccagctatgttcaataatta

SEQ ID NO: 4949764 - DNA, 25 bp, Homo sapien
ccccagctatgttcaataattactg

SEQ ID NO: 4949765 - DNA, 25 bp, Homo sapien
ttccccagctatgttcaataattac

SEQ ID NO: 4949766 - DNA, 25 bp, Homo sapien
tccaagtactagttaggcccactcc

SEQ ID NO: 4949767 - DNA, 25 bp, Homo sapien
gatcaaacatgttcaaggtgctatg

SEQ ID NO: 4949768 - DNA, 25 bp, Homo sapien
aaacatgttcaaggtgctatggccg

SEQ ID NO: 4949769 - DNA, 25 bp, Homo sapien
acatgttcaaggtgctatggccgta

SEQ ID NO: 4949770 - DNA, 25 bp, Homo sapien
caattcttggttgatgccccagagg

SEQ ID NO: 4949771 - DNA, 25 bp, Homo sapien
tcagtcctttttgggtgtagtgctc

SEQ ID NO: 4949772 - DNA, 25 bp, Homo sapien
tgctctcaattcttggttgatgccc

SEQ ID NO: 4949773 - DNA, 25 bp, Homo sapien
tgggtgtagtgctctcaattcttgg

SEQ ID NO: 4949774 - DNA, 25 bp, Homo sapien
tggtagaacttggctcataaagaag

SEQ ID NO: 4949775 - DNA, 25 bp, Homo sapien
tgaagaagaggacagcaatcctcat

SEQ ID NO: 4949776 - DNA, 25 bp, Homo sapien
tggtgaagaagaggacagcaatcct

SEQ ID NO: 4949777 - DNA, 25 bp, Homo sapien
gtagaacttggctcataaagaagaa

SEQ ID NO: 4949778 - DNA, 25 bp, Homo sapien
tctcttctatccctcagaaggctct

SEQ ID NO: 4949779 - DNA, 25 bp, Homo sapien
gtccctggagcctctctaactggaa

SEQ ID NO: 4949780 - DNA, 25 bp, Homo sapien
tcattgcatagatttagcagggaaa

SEQ ID NO: 4949781 - DNA, 25 bp, Homo sapien
agctcacctccctttacttcaacgt

SEQ ID NO: 4949782 - DNA, 25 bp, Homo sapien
tgaggctggatacccccgctgggcc

SEQ ID NO: 4949783 - DNA, 25 bp, Homo sapien
gaatcaatcgacttttgtatactga

SEQ ID NO: 4949784 - DNA, 25 bp, Homo sapien
atagagggaatcaatcgacttttgt

SEQ ID NO: 4949785 - DNA, 25 bp, Homo sapien
tcaagctcgtcttccctccacatag

SEQ ID NO: 4949786 - DNA, 25 bp, Homo sapien
gaagcggcggcagcgagggctggag

SEQ ID NO: 4949787 - DNA, 25 bp, Homo sapien
ggcagcgagggctggaggacccggg

SEQ ID NO: 4949788 - DNA, 25 bp, Homo sapien
ccggctccgcgagaagcggcggcag

SEQ ID NO: 4949789 - DNA, 25 bp, Homo sapien
cgtctggcctgggcgggactgagcc

SEQ ID NO: 4949790 - DNA, 25 bp, Homo sapien
gataaagccgatgtatgaactcttt

SEQ ID NO: 4949791 - DNA, 25 bp, Homo sapien
tcagataaagccgatgtatgaactc

SEQ ID NO: 4949792 - DNA, 25 bp, Homo sapien
ttgctatcagataaagccgatgtat

SEQ ID NO: 4949793 - DNA, 25 bp, Homo sapien
gctatcagataaagccgatgtatga

SEQ ID NO: 4949794 - DNA, 25 bp, Homo sapien
caaaggagaagtgataccagaggca

SEQ ID NO: 4949795 - DNA, 25 bp, Homo sapien
aaggagaagtgataccagaggcagt

SEQ ID NO: 4949796 - DNA, 25 bp, Homo sapien
tcaaaggagaagtgataccagaggc

SEQ ID NO: 4949797 - DNA, 25 bp, Homo sapien
gagaagtgataccagaggcagtgac

SEQ ID NO: 4949798 - DNA, 25 bp, Homo sapien
tccgctggatttcagcaaaagctgc

SEQ ID NO: 4949799 - DNA, 25 bp, Homo sapien
aaaagtggttgaactgccactcacc

SEQ ID NO: 4949800 - DNA, 25 bp, Homo sapien
ctcagggagagaagtccgctggatt

SEQ ID NO: 4949801 - DNA, 25 bp, Homo sapien
ggccgagaagatgtgagttttgaaa

SEQ ID NO: 4949802 - DNA, 25 bp, Homo sapien
ggtcctcccttgcagagaagcgagt

SEQ ID NO: 4949803 - DNA, 25 bp, Homo sapien
tggtcctcccttgcagagaagcgag

SEQ ID NO: 4949804 - DNA, 25 bp, Homo sapien
tgatgtgagcttgcatagtacagag

SEQ ID NO: 4949805 - DNA, 25 bp, Homo sapien
ttcgggcttcaccaactgttccaaa

SEQ ID NO: 4949806 - DNA, 25 bp, Homo sapien
catgtcaaggcactcaggatattgc

SEQ ID NO: 4949807 - DNA, 25 bp, Homo sapien
ggcgatgtccaggtaagggtcaaaa

SEQ ID NO: 4949808 - DNA, 25 bp, Homo sapien
tgcagggaagcattcaagtagcagg

SEQ ID NO: 4949809 - DNA, 25 bp, Homo sapien
cagggaagcattcaagtagcaggta

SEQ ID NO: 4949810 - DNA, 25 bp, Homo sapien
agggaagcattcaagtagcaggtat

SEQ ID NO: 4949811 - DNA, 25 bp, Homo sapien
actgcagggaagcattcaagtagca

SEQ ID NO: 4949812 - DNA, 25 bp, Homo sapien
aaatcatcacagaggtcgacacggg

SEQ ID NO: 4949813 - DNA, 25 bp, Homo sapien
tccgctggatttcagcaaaagctgc

SEQ ID NO: 4949814 - DNA, 25 bp, Homo sapien
ctcagggagagaagtccgctggatt

SEQ ID NO: 4949815 - DNA, 25 bp, Homo sapien
caggtctcctgctactcagaggaag

SEQ ID NO: 4949816 - DNA, 25 bp, Homo sapien
gaaaagtggttgaactgccactcac

SEQ ID NO: 4949817 - DNA, 25 bp, Homo sapien
ttgaaaagtggttgaactgccactc

SEQ ID NO: 4949818 - DNA, 25 bp, Homo sapien
ttttgaaaagtggttgaactgccac

SEQ ID NO: 4949819 - DNA, 25 bp, Homo sapien
gttttgaaaagtggttgaactgcca

SEQ ID NO: 4949820 - DNA, 25 bp, Homo sapien
cccaagtagagtgagtcgtcctcca

SEQ ID NO: 4949821 - DNA, 25 bp, Homo sapien
ccaagtagagtgagtcgtcctccat

SEQ ID NO: 4949822 - DNA, 25 bp, Homo sapien
ctcccaagtagagtgagtcgtcctc

SEQ ID NO: 4949823 - DNA, 25 bp, Homo sapien
tcccaagtagagtgagtcgtcctcc

SEQ ID NO: 4949824 - DNA, 25 bp, Homo sapien
gaatgaagatcctggctctagggat

SEQ ID NO: 4949825 - DNA, 25 bp, Homo sapien
caggaatgaagatcctggctctagg

SEQ ID NO: 4949826 - DNA, 25 bp, Homo sapien
aagatcctggctctagggattttcc

SEQ ID NO: 4949827 - DNA, 25 bp, Homo sapien
tgaagatcctggctctagggatttt

SEQ ID NO: 4949828 - DNA, 25 bp, Homo sapien
ctcctgatctgtccgggtcgtcgaa

SEQ ID NO: 4949829 - DNA, 25 bp, Homo sapien
tgatctgtccgggtcgtcgaagaga

SEQ ID NO: 4949830 - DNA, 25 bp, Homo sapien
actcctgatctgtccgggtcgtcga

SEQ ID NO: 4949831 - DNA, 25 bp, Homo sapien
cctgatctgtccgggtcgtcgaaga

SEQ ID NO: 4949832 - DNA, 25 bp, Homo sapien
cactcttctggatgtaaaagaggac

SEQ ID NO: 4949833 - DNA, 25 bp, Homo sapien
catgtcaaggcactcaggatattgc

SEQ ID NO: 4949834 - DNA, 25 bp, Homo sapien
ttcgggcttcaccaactgttccaaa

SEQ ID NO: 4949835 - DNA, 25 bp, Homo sapien
ggcgatgtccaggtaagggtcaaaa

SEQ ID NO: 4949836 - DNA, 25 bp, Homo sapien
gtgatgtgagcttgcatagtacaga

SEQ ID NO: 4949837 - DNA, 25 bp, Homo sapien
tgatgtgagcttgcatagtacagag

SEQ ID NO: 4949838 - DNA, 25 bp, Homo sapien
gtttgagagtgctcccgggacagca

SEQ ID NO: 4949839 - DNA, 25 bp, Homo sapien
tttgagagtgctcccgggacagcat

SEQ ID NO: 4949840 - DNA, 25 bp, Homo sapien
gaaaagtggttgaactgccactcac

SEQ ID NO: 4949841 - DNA, 25 bp, Homo sapien
ctcagggagagaagtccgctggatt

SEQ ID NO: 4949842 - DNA, 25 bp, Homo sapien
aaatcatcacagaggtcgacacggg

SEQ ID NO: 4949843 - DNA, 25 bp, Homo sapien
caggtctcctgctactcagaggaag

SEQ ID NO: 4949844 - DNA, 25 bp, Homo sapien
aaatgcaagacggttatcaagatgg

SEQ ID NO: 4949845 - DNA, 25 bp, Homo sapien
cggttatcaagatggaagtacttaa

SEQ ID NO: 4949846 - DNA, 25 bp, Homo sapien
caagacggttatcaagatggaagta

SEQ ID NO: 4949847 - DNA, 25 bp, Homo sapien
tgcaagacggttatcaagatggaag

SEQ ID NO: 4949848 - DNA, 25 bp, Homo sapien
catgataagtggtgttggaattggc

SEQ ID NO: 4949849 - DNA, 25 bp, Homo sapien
gggttcttgataatctgacatgata

SEQ ID NO: 4949850 - DNA, 25 bp, Homo sapien
taaaatccaccatgctctacagcac

SEQ ID NO: 4949851 - DNA, 25 bp, Homo sapien
ttcatccttcttcggcaggcaccaa

SEQ ID NO: 4949852 - DNA, 25 bp, Homo sapien
caccaaacaaattgagacaatgacc

SEQ ID NO: 4949853 - DNA, 25 bp, Homo sapien
tgagacaatgaccttccgcaggacc

SEQ ID NO: 4949854 - DNA, 25 bp, Homo sapien
attgagacaatgaccttccgcagga

SEQ ID NO: 4949855 - DNA, 25 bp, Homo sapien
aacaaattgagacaatgaccttccg

SEQ ID NO: 4949856 - DNA, 25 bp, Homo sapien
tacttaggtttatgctgtatcaaac

SEQ ID NO: 4949857 - DNA, 25 bp, Homo sapien
tatgtgtgcgagtaatggatgattc

SEQ ID NO: 4949858 - DNA, 25 bp, Homo sapien
tacagaacgctcaagtggtactttc

SEQ ID NO: 4949859 - DNA, 25 bp, Homo sapien
aagcattctatttcctttaggcacc

SEQ ID NO: 4949860 - DNA, 25 bp, Homo sapien
gccagcatcaatgtgggttgagcct

SEQ ID NO: 4949861 - DNA, 25 bp, Homo sapien
atggagtctcatggctgaagggcca

SEQ ID NO: 4949862 - DNA, 25 bp, Homo sapien
tgggcatcgtgggtctaggcctttt

SEQ ID NO: 4949863 - DNA, 25 bp, Homo sapien
cctttttatgatgctctctgagtct

SEQ ID NO: 4949864 - DNA, 25 bp, Homo sapien
tgattcatgattgcatgctcaatgc

SEQ ID NO: 4949865 - DNA, 25 bp, Homo sapien
gattgcatgctcaatgcagaagggc

SEQ ID NO: 4949866 - DNA, 25 bp, Homo sapien
catgctctgttgcagggtcatatct

SEQ ID NO: 4949867 - DNA, 25 bp, Homo sapien
aagggcatgctctgttgcagggtca

SEQ ID NO: 4949868 - DNA, 25 bp, Homo sapien
ggtcaccgcaggacgtttgtcttgt

SEQ ID NO: 4949869 - DNA, 25 bp, Homo sapien
tgtgtcggcttcaccacgaggagag

SEQ ID NO: 4949870 - DNA, 25 bp, Homo sapien
gattggagcctaggcccaagctgtg

SEQ ID NO: 4949871 - DNA, 25 bp, Homo sapien
gatctggaagggacccagtctcggt

SEQ ID NO: 4949872 - DNA, 25 bp, Homo sapien
gccatcagcgaggacagggtccacg

SEQ ID NO: 4949873 - DNA, 25 bp, Homo sapien
ggtagctgagccatcagcgaggaca

SEQ ID NO: 4949874 - DNA, 25 bp, Homo sapien
ggagcccctgccagacatttcggta

SEQ ID NO: 4949875 - DNA, 25 bp, Homo sapien
gagcccctgccagacatttcggtag

SEQ ID NO: 4949876 - DNA, 25 bp, Homo sapien
catgaagtggaacggactaatgccc

SEQ ID NO: 4949877 - DNA, 25 bp, Homo sapien
gggacgtcttctctgaacacatgca

SEQ ID NO: 4949878 - DNA, 25 bp, Homo sapien
gatgccttcgcctggaatccaattg

SEQ ID NO: 4949879 - DNA, 25 bp, Homo sapien
ggactaatttcctcatgccgctagg

SEQ ID NO: 4949880 - DNA, 25 bp, Homo sapien
tggagtccctgaccccaagaaggca

SEQ ID NO: 4949881 - DNA, 25 bp, Homo sapien
ctggaaggatcgtggagtccctgac

SEQ ID NO: 4949882 - DNA, 25 bp, Homo sapien
aggatcgtggagtccctgaccccaa

SEQ ID NO: 4949883 - DNA, 25 bp, Homo sapien
ccgatttcctcccgcagacgggaag

SEQ ID NO: 4949884 - DNA, 25 bp, Homo sapien
atccttttccattcggcagcggctt

SEQ ID NO: 4949885 - DNA, 25 bp, Homo sapien
gatccttttccattcggcagcggct

SEQ ID NO: 4949886 - DNA, 25 bp, Homo sapien
tccttttccattcggcagcggcttc

SEQ ID NO: 4949887 - DNA, 25 bp, Homo sapien
ggatccttttccattcggcagcggc

SEQ ID NO: 4949888 - DNA, 25 bp, Homo sapien
agcacttcatggggcacctggtact

SEQ ID NO: 4949889 - DNA, 25 bp, Homo sapien
cagcacttcatggggcacctggtac

SEQ ID NO: 4949890 - DNA, 25 bp, Homo sapien
gggccgttaagtgctgggagacttc

SEQ ID NO: 4949891 - DNA, 25 bp, Homo sapien
gttaagtgctgggagacttcggata

SEQ ID NO: 4949892 - DNA, 25 bp, Homo sapien
ttaagtgctgggagacttcggatac

SEQ ID NO: 4949893 - DNA, 25 bp, Homo sapien
ccgttaagtgctgggagacttcgga

SEQ ID NO: 4949894 - DNA, 25 bp, Homo sapien
tgtcaacaacgcagccaaacgtggc

SEQ ID NO: 4949895 - DNA, 25 bp, Homo sapien
gactcaaggttccaaggggcacgat

SEQ ID NO: 4949896 - DNA, 25 bp, Homo sapien
gcagccaaacgtggctacacaggac

SEQ ID NO: 4949897 - DNA, 25 bp, Homo sapien
atggtgaagccgatgtcaacaacgc

SEQ ID NO: 4949898 - DNA, 25 bp, Homo sapien
atcttcttcatcgggcgggggagcc

SEQ ID NO: 4949899 - DNA, 25 bp, Homo sapien
tcttcttcatcgggcgggggagccc

SEQ ID NO: 4949900 - DNA, 25 bp, Homo sapien
gatcttcttcatcgggcgggggagc

SEQ ID NO: 4949901 - DNA, 25 bp, Homo sapien
cttggcccaactggggccctccgct

SEQ ID NO: 4949902 - DNA, 25 bp, Homo sapien
atgtggggtcccgacgtgccatcat

SEQ ID NO: 4949903 - DNA, 25 bp, Homo sapien
tcttggcccaagatgtggggtcccg

SEQ ID NO: 4949904 - DNA, 25 bp, Homo sapien
ccaagatgtggggtcccgacgtgcc

SEQ ID NO: 4949905 - DNA, 25 bp, Homo sapien
ttggcccaagatgtggggtcccgac

SEQ ID NO: 4949906 - DNA, 25 bp, Homo sapien
tttcaggggtggactgttgggccac

SEQ ID NO: 4949907 - DNA, 25 bp, Homo sapien
cgcctttttcaggggtggactgttg

SEQ ID NO: 4949908 - DNA, 25 bp, Homo sapien
ttttcaggggtggactgttgggcca

SEQ ID NO: 4949909 - DNA, 25 bp, Homo sapien
aggaagccacctgctaactccctgc

SEQ ID NO: 4949910 - DNA, 25 bp, Homo sapien
atgtcgatggttaagcacgttggat

SEQ ID NO: 4949911 - DNA, 25 bp, Homo sapien
gttaagcacgttggatattcacaca

SEQ ID NO: 4949912 - DNA, 25 bp, Homo sapien
gatggttaagcacgttggatattca

SEQ ID NO: 4949913 - DNA, 25 bp, Homo sapien
gcgcatcctcggatattgtgtgttc

SEQ ID NO: 4949914 - DNA, 25 bp, Homo sapien
tcctcggatattgtgtgttcctctg

SEQ ID NO: 4949915 - DNA, 25 bp, Homo sapien
tcggtcaaatctgtagaacacaatg

SEQ ID NO: 4949916 - DNA, 25 bp, Homo sapien
caccagtcggtcaaatctgtagaac

SEQ ID NO: 4949917 - DNA, 25 bp, Homo sapien
gtgccatatcgtatcgacgtcttac

SEQ ID NO: 4949918 - DNA, 25 bp, Homo sapien
gaagaagtgccatatcgtatcgacg

SEQ ID NO: 4949919 - DNA, 25 bp, Homo sapien
gggaagaagtgccatatcgtatcga

SEQ ID NO: 4949920 - DNA, 25 bp, Homo sapien
gaagtgccatatcgtatcgacgtct

SEQ ID NO: 4949921 - DNA, 25 bp, Homo sapien
ggtcttctcccacacgtggagacgg

SEQ ID NO: 4949922 - DNA, 25 bp, Homo sapien
tggtcttctcccacacgtggagacg

SEQ ID NO: 4949923 - DNA, 25 bp, Homo sapien
gtcttctcccacacgtggagacgga

SEQ ID NO: 4949924 - DNA, 25 bp, Homo sapien
ggctggcgctgagatgggcaggtgc

SEQ ID NO: 4949925 - DNA, 25 bp, Homo sapien
gctggcgctgagatgggcaggtgct

SEQ ID NO: 4949926 - DNA, 25 bp, Homo sapien
ggtcaccgcaggacgtttgtcttgt

SEQ ID NO: 4949927 - DNA, 25 bp, Homo sapien
tcggcttcaccacgaggagaggctc

SEQ ID NO: 4949928 - DNA, 25 bp, Homo sapien
gattggagcctaggcccaagctgtg

SEQ ID NO: 4949929 - DNA, 25 bp, Homo sapien
gatctggaagggacccagtctcggt

SEQ ID NO: 4949930 - DNA, 25 bp, Homo sapien
ttgcggagcgatcagcgaggacagg

SEQ ID NO: 4949931 - DNA, 25 bp, Homo sapien
tgccagacatttcggttgcggagcg

SEQ ID NO: 4949932 - DNA, 25 bp, Homo sapien
atttcggttgcggagcgatcagcga

SEQ ID NO: 4949933 - DNA, 25 bp, Homo sapien
ccagacatttcggttgcggagcgat

SEQ ID NO: 4949934 - DNA, 25 bp, Homo sapien
gtggaccggcattggcccgcttgca

SEQ ID NO: 4949935 - DNA, 25 bp, Homo sapien
tggaccggcattggcccgcttgcaa

SEQ ID NO: 4949936 - DNA, 25 bp, Homo sapien
tggttgtgtggaccggcattggccc

SEQ ID NO: 4949937 - DNA, 25 bp, Homo sapien
tgtgtggaccggcattggcccgctt

SEQ ID NO: 4949938 - DNA, 25 bp, Homo sapien
ctggaaggatcgtggagtccctgac

SEQ ID NO: 4949939 - DNA, 25 bp, Homo sapien
tggagtccctgaccccaagaaggca

SEQ ID NO: 4949940 - DNA, 25 bp, Homo sapien
aggatcgtggagtccctgaccccaa

SEQ ID NO: 4949941 - DNA, 25 bp, Homo sapien
ccgatttcctcccgcagacgggaag

SEQ ID NO: 4949942 - DNA, 25 bp, Homo sapien
ctgaaaggaaatcaaccagggtgac

SEQ ID NO: 4949943 - DNA, 25 bp, Homo sapien
tccttttccattcggcagcggcttc

SEQ ID NO: 4949944 - DNA, 25 bp, Homo sapien
atccttttccattcggcagcggctt

SEQ ID NO: 4949945 - DNA, 25 bp, Homo sapien
gatccttttccattcggcagcggct

SEQ ID NO: 4949946 - DNA, 25 bp, Homo sapien
ggatccttttccattcggcagcggc

SEQ ID NO: 4949947 - DNA, 25 bp, Homo sapien
aactaaggactgtgatttggattcc

SEQ ID NO: 4949948 - DNA, 25 bp, Homo sapien
gaaaggcacacggtgtgcaggtgca

SEQ ID NO: 4949949 - DNA, 25 bp, Homo sapien
ggacacggagctccggcctatttct

SEQ ID NO: 4949950 - DNA, 25 bp, Homo sapien
tcgtggggaacctgcacgaagcgcc

SEQ ID NO: 4949951 - DNA, 25 bp, Homo sapien
tctctcccttatccttgttcaaggg

SEQ ID NO: 4949952 - DNA, 25 bp, Homo sapien
tctcccttatccttgttcaagggcc

SEQ ID NO: 4949953 - DNA, 25 bp, Homo sapien
ttccttctctcccttatccttgttc

SEQ ID NO: 4949954 - DNA, 25 bp, Homo sapien
cttctctcccttatccttgttcaag

SEQ ID NO: 4949955 - DNA, 25 bp, Homo sapien
agcacttcatggggcacctggtact

SEQ ID NO: 4949956 - DNA, 25 bp, Homo sapien
cagcacttcatggggcacctggtac

SEQ ID NO: 4949957 - DNA, 25 bp, Homo sapien
ttcagagctgaataaggattccaaa

SEQ ID NO: 4949958 - DNA, 25 bp, Homo sapien
ttgggacggattgtgaattcagagc

SEQ ID NO: 4949959 - DNA, 25 bp, Homo sapien
ggcagcgatcccacgtcaacattgg

SEQ ID NO: 4949960 - DNA, 25 bp, Homo sapien
agtgagtgagctgaagccacaggca

SEQ ID NO: 4949961 - DNA, 25 bp, Homo sapien
tcggatacgatgttccctcgcaaag

SEQ ID NO: 4949962 - DNA, 25 bp, Homo sapien
cggatacgatgttccctcgcaaagc

SEQ ID NO: 4949963 - DNA, 25 bp, Homo sapien
ggatacgatgttccctcgcaaagcc

SEQ ID NO: 4949964 - DNA, 25 bp, Homo sapien
ttcggatacgatgttccctcgcaaa

SEQ ID NO: 4949965 - DNA, 25 bp, Homo sapien
tgtcaacaacgcagccaaacgtggc

SEQ ID NO: 4949966 - DNA, 25 bp, Homo sapien
cgatgtcaacaacgcagccaaacgt

SEQ ID NO: 4949967 - DNA, 25 bp, Homo sapien
atggtgaagccgatgtcaacaacgc

SEQ ID NO: 4949968 - DNA, 25 bp, Homo sapien
aagccgatgtcaacaacgcagccaa

SEQ ID NO: 4949969 - DNA, 25 bp, Homo sapien
tcttggcccaagatgtggggtcccg

SEQ ID NO: 4949970 - DNA, 25 bp, Homo sapien
atgtggggtcccgacgtgccatcat

SEQ ID NO: 4949971 - DNA, 25 bp, Homo sapien
tcatcttcgtctcctgggggtttta

SEQ ID NO: 4949972 - DNA, 25 bp, Homo sapien
ccaagatgtggggtcccgacgtgcc

SEQ ID NO: 4949973 - DNA, 25 bp, Homo sapien
aggaagccacctgctaactccctgc

SEQ ID NO: 4949974 - DNA, 25 bp, Homo sapien
atgtcgatggttaagcacgttggat

SEQ ID NO: 4949975 - DNA, 25 bp, Homo sapien
gttaagcacgttggatattcacaca

SEQ ID NO: 4949976 - DNA, 25 bp, Homo sapien
gatggttaagcacgttggatattca

SEQ ID NO: 4949977 - DNA, 25 bp, Homo sapien
tgtgcgcatcctcggatattgtgtg

SEQ ID NO: 4949978 - DNA, 25 bp, Homo sapien
tcctcggatattgtgtgttcctctg

SEQ ID NO: 4949979 - DNA, 25 bp, Homo sapien
caccagtcggtcaaatctgtagaac

SEQ ID NO: 4949980 - DNA, 25 bp, Homo sapien
tcggtcaaatctgtagaacacaatg

SEQ ID NO: 4949981 - DNA, 25 bp, Homo sapien
ggaagaagtgccgtatcgtatcgac

SEQ ID NO: 4949982 - DNA, 25 bp, Homo sapien
ggggaagaagtgccgtatcgtatcg

SEQ ID NO: 4949983 - DNA, 25 bp, Homo sapien
gggaagaagtgccgtatcgtatcga

SEQ ID NO: 4949984 - DNA, 25 bp, Homo sapien
ggctggcgctgagatgggcaggtgc

SEQ ID NO: 4949985 - DNA, 25 bp, Homo sapien
gctggcgctgagatgggcaggtgct

SEQ ID NO: 4949986 - DNA, 25 bp, Homo sapien
aatccaattacatgacctggaaagg

SEQ ID NO: 4949987 - DNA, 25 bp, Homo sapien
gaaaggtctatctgcacagcccact

SEQ ID NO: 4949988 - DNA, 25 bp, Homo sapien
cctggaaaggtctatctgcacagcc

SEQ ID NO: 4949989 - DNA, 25 bp, Homo sapien
cttaattgcaattaacttaatccaa

SEQ ID NO: 4949990 - DNA, 25 bp, Homo sapien
ggtcaccgcaggacgtttgtcttgt

SEQ ID NO: 4949991 - DNA, 25 bp, Homo sapien
tgtgtcggcttcaccacgaggagag

SEQ ID NO: 4949992 - DNA, 25 bp, Homo sapien
gattggagcctaggcccaagctgtg

SEQ ID NO: 4949993 - DNA, 25 bp, Homo sapien
gatctggaagggacccagtctcggt

SEQ ID NO: 4949994 - DNA, 25 bp, Homo sapien
atcagcgaggatagggtccaagcgc

SEQ ID NO: 4949995 - DNA, 25 bp, Homo sapien
ggatagggtccaagcgcggcctctt

SEQ ID NO: 4949996 - DNA, 25 bp, Homo sapien
cggagcccctgccagacattgcggt

SEQ ID NO: 4949997 - DNA, 25 bp, Homo sapien
aagacggagcccctgccagacattg

SEQ ID NO: 4949998 - DNA, 25 bp, Homo sapien
tgtggaccggcattggcccgcttgc

SEQ ID NO: 4949999 - DNA, 25 bp, Homo sapien
tgcttgtgtggaccggcattggccc

SEQ ID NO: 4950000 - DNA, 25 bp, Homo sapien
tggaccggcattggcccgcttgcaa

SEQ ID NO: 4950001 - DNA, 25 bp, Homo sapien
tgtgtggaccggcattggcccgctt

SEQ ID NO: 4950002 - DNA, 25 bp, Homo sapien
ctggaaggatcgtggagtccctgac

SEQ ID NO: 4950003 - DNA, 25 bp, Homo sapien
tggagtccctgaccccaagaaggca

SEQ ID NO: 4950004 - DNA, 25 bp, Homo sapien
aggatcgtggagtccctgaccccaa

SEQ ID NO: 4950005 - DNA, 25 bp, Homo sapien
ccgatttcctcccgcagacgggaag

SEQ ID NO: 4950006 - DNA, 25 bp, Homo sapien
ctgaaaggaaatcaaccagggtgac

SEQ ID NO: 4950007 - DNA, 25 bp, Homo sapien
gatccttttccattcggcagcggct

SEQ ID NO: 4950008 - DNA, 25 bp, Homo sapien
atccttttccattcggcagcggctt

SEQ ID NO: 4950009 - DNA, 25 bp, Homo sapien
tccttttccattcggcagcggcttc

SEQ ID NO: 4950010 - DNA, 25 bp, Homo sapien
ggatccttttccattcggcagcggc

SEQ ID NO: 4950011 - DNA, 25 bp, Homo sapien
aactaaggactgtgatttggattcc

SEQ ID NO: 4950012 - DNA, 25 bp, Homo sapien
ggacacggagctccggcctatttct

SEQ ID NO: 4950013 - DNA, 25 bp, Homo sapien
gaaaggcacacggtgtgcaggtgca

SEQ ID NO: 4950014 - DNA, 25 bp, Homo sapien
tcgtggggaacctgcacgaagcgcc

SEQ ID NO: 4950015 - DNA, 25 bp, Homo sapien
agcacttcatggggcacctggtact

SEQ ID NO: 4950016 - DNA, 25 bp, Homo sapien
cagcacttcatggggcacctggtac

SEQ ID NO: 4950017 - DNA, 25 bp, Homo sapien
gactcaaggttccaaggggcacgat

SEQ ID NO: 4950018 - DNA, 25 bp, Homo sapien
gcagccaaacgtggctacacaggac

SEQ ID NO: 4950019 - DNA, 25 bp, Homo sapien
ggatacgatgttccctcgcaaagcc

SEQ ID NO: 4950020 - DNA, 25 bp, Homo sapien
tggtgaagccgatgtcaacaacgca

SEQ ID NO: 4950021 - DNA, 25 bp, Homo sapien
atcttcttcatcgggcgggggagcc

SEQ ID NO: 4950022 - DNA, 25 bp, Homo sapien
tcttcttcatcgggcgggggagccc

SEQ ID NO: 4950023 - DNA, 25 bp, Homo sapien
gatcttcttcatcgggcgggggagc

SEQ ID NO: 4950024 - DNA, 25 bp, Homo sapien
cttggcccaactggggccctccgct

SEQ ID NO: 4950025 - DNA, 25 bp, Homo sapien
caagatttggggtcccgacgtgcca

SEQ ID NO: 4950026 - DNA, 25 bp, Homo sapien
tctcttggcccaagatttggggtcc

SEQ ID NO: 4950027 - DNA, 25 bp, Homo sapien
cagtctcttggcccaagatttgggg

SEQ ID NO: 4950028 - DNA, 25 bp, Homo sapien
aagatttggggtcccgacgtgccat

SEQ ID NO: 4950029 - DNA, 25 bp, Homo sapien
cgcctttttcaggggtggactgttg

SEQ ID NO: 4950030 - DNA, 25 bp, Homo sapien
ttttcaggggtggactgttgggcca

SEQ ID NO: 4950031 - DNA, 25 bp, Homo sapien
tttcaggggtggactgttgggccac

SEQ ID NO: 4950032 - DNA, 25 bp, Homo sapien
aggaagccacctgctaactccctgc

SEQ ID NO: 4950033 - DNA, 25 bp, Homo sapien
acaggaagccacctgctaactccct

SEQ ID NO: 4950034 - DNA, 25 bp, Homo sapien
ccacaggaagccacctgctaactcc

SEQ ID NO: 4950035 - DNA, 25 bp, Homo sapien
aagccacctgctaactccctgcctg

SEQ ID NO: 4950036 - DNA, 25 bp, Homo sapien
tgtgcgcatcctcggatattgtgtg

SEQ ID NO: 4950037 - DNA, 25 bp, Homo sapien
caccagtcggtcaaatctgtagaac

SEQ ID NO: 4950038 - DNA, 25 bp, Homo sapien
tcctcggatattgtgtgttcctctg

SEQ ID NO: 4950039 - DNA, 25 bp, Homo sapien
tcggtcaaatctgtagaacacaatg

SEQ ID NO: 4950040 - DNA, 25 bp, Homo sapien
ggaagaagtgccgtatcgtatcgac

SEQ ID NO: 4950041 - DNA, 25 bp, Homo sapien
ggggaagaagtgccgtatcgtatcg

SEQ ID NO: 4950042 - DNA, 25 bp, Homo sapien
gggaagaagtgccgtatcgtatcga

SEQ ID NO: 4950043 - DNA, 25 bp, Homo sapien
gctggcgctgagatgggcaggtgct

SEQ ID NO: 4950044 - DNA, 25 bp, Homo sapien
ggctggcgctgagatgggcaggtgc

SEQ ID NO: 4950045 - DNA, 25 bp, Homo sapien
cctggaaaggtctatctgcacagcc

SEQ ID NO: 4950046 - DNA, 25 bp, Homo sapien
gaaaggtctatctgcacagcccact

SEQ ID NO: 4950047 - DNA, 25 bp, Homo sapien
aatccaattacatgacctggaaagg

SEQ ID NO: 4950048 - DNA, 25 bp, Homo sapien
cttaattgcaattaacttaatccaa

SEQ ID NO: 4950049 - DNA, 25 bp, Homo sapien
tcctgctccttgttgcatgtataga

SEQ ID NO: 4950050 - DNA, 25 bp, Homo sapien
acagatgtctttcctgctccttgtt

SEQ ID NO: 4950051 - DNA, 25 bp, Homo sapien
tgtctttcctgctccttgttgcatg

SEQ ID NO: 4950052 - DNA, 25 bp, Homo sapien
tctttcctgctccttgttgcatgta

SEQ ID NO: 4950053 - DNA, 25 bp, Homo sapien
tgcgcagcagagcagtcgaatatca

SEQ ID NO: 4950054 - DNA, 25 bp, Homo sapien
ggctgcgcagcagagcagtcgaata

SEQ ID NO: 4950055 - DNA, 25 bp, Homo sapien
gcgcagcagagcagtcgaatatcat

SEQ ID NO: 4950056 - DNA, 25 bp, Homo sapien
gccctgcggaggctgcgcagcagag

SEQ ID NO: 4950057 - DNA, 25 bp, Homo sapien
tataaaatgggcatcctcattgcac

SEQ ID NO: 4950058 - DNA, 25 bp, Homo sapien
cagatcaagtgaaatgtggcaggct

SEQ ID NO: 4950059 - DNA, 25 bp, Homo sapien
caccataggtcgctgggagtcaggc

SEQ ID NO: 4950060 - DNA, 25 bp, Homo sapien
ctcattcagacaagggactccaggt

SEQ ID NO: 4950061 - DNA, 25 bp, Homo sapien
cagggagaccatcggggtgcaacct

SEQ ID NO: 4950062 - DNA, 25 bp, Homo sapien
taggcaatgggaaggtgcattcatg

SEQ ID NO: 4950063 - DNA, 25 bp, Homo sapien
ggaattctccacgagttttgagcag

SEQ ID NO: 4950064 - DNA, 25 bp, Homo sapien
aggtgcattcatgtcatcctgcagg

SEQ ID NO: 4950065 - DNA, 25 bp, Homo sapien
tattttagcggcaactccgaagggc

SEQ ID NO: 4950066 - DNA, 25 bp, Homo sapien
agtgacagcgcgtgacggcctccga

SEQ ID NO: 4950067 - DNA, 25 bp, Homo sapien
gtcctgcaaacgttggcccctgaat

SEQ ID NO: 4950068 - DNA, 25 bp, Homo sapien
ccgcttctcggctgtgtggctttga

SEQ ID NO: 4950069 - DNA, 25 bp, Homo sapien
tgagccccacatgggagagagggcg

SEQ ID NO: 4950070 - DNA, 25 bp, Homo sapien
cccaagcctttattgaccgcttgtg

SEQ ID NO: 4950071 - DNA, 25 bp, Homo sapien
agcctttattgaccgcttgtgaatg

SEQ ID NO: 4950072 - DNA, 25 bp, Homo sapien
ctttattgaccgcttgtgaatgatc

SEQ ID NO: 4950073 - DNA, 25 bp, Homo sapien
caagcctttattgaccgcttgtgaa

SEQ ID NO: 4950074 - DNA, 25 bp, Homo sapien
gctggactacacaggctgaagttct

SEQ ID NO: 4950075 - DNA, 25 bp, Homo sapien
ttgaccaacatctgggtttttggat

SEQ ID NO: 4950076 - DNA, 25 bp, Homo sapien
agttcactctcacactggggacctg

SEQ ID NO: 4950077 - DNA, 25 bp, Homo sapien
cctgagacagggtgttttgaccaac

SEQ ID NO: 4950078 - DNA, 25 bp, Homo sapien
ccgagatatagatatttccctggcg

SEQ ID NO: 4950079 - DNA, 25 bp, Homo sapien
gatatagatatttccctggcgatga

SEQ ID NO: 4950080 - DNA, 25 bp, Homo sapien
gagatatagatatttccctggcgat

SEQ ID NO: 4950081 - DNA, 25 bp, Homo sapien
gccgagatatagatatttccctggc

SEQ ID NO: 4950082 - DNA, 25 bp, Homo sapien
tcaagttgacatgaagacatggcca

SEQ ID NO: 4950083 - DNA, 25 bp, Homo sapien
caagttgacatgaagacatggccac

SEQ ID NO: 4950084 - DNA, 25 bp, Homo sapien
gtgggaaatggtaggatgttctccc

SEQ ID NO: 4950085 - DNA, 25 bp, Homo sapien
gtaagtgggaaatggtaggatgttc

SEQ ID NO: 4950086 - DNA, 25 bp, Homo sapien
cgctggaacatcgtgggtctgccgt

SEQ ID NO: 4950087 - DNA, 25 bp, Homo sapien
ccgctggaacatcgtgggtctgccg

SEQ ID NO: 4950088 - DNA, 25 bp, Homo sapien
gaagttggcattggtctcattggct

SEQ ID NO: 4950089 - DNA, 25 bp, Homo sapien
agttggcattggtctcattggctga

SEQ ID NO: 4950090 - DNA, 25 bp, Homo sapien
aggaagttggcattggtctcattgg

SEQ ID NO: 4950091 - DNA, 25 bp, Homo sapien
tggcattggtctcattggctgaggt

SEQ ID NO: 4950092 - DNA, 25 bp, Homo sapien
gctcctggtcttgcaaactgtggtt

SEQ ID NO: 4950093 - DNA, 25 bp, Homo sapien
tgctcctggtcttgcaaactgtggt

SEQ ID NO: 4950094 - DNA, 25 bp, Homo sapien
gccactctgagggatggagcccgca

SEQ ID NO: 4950095 - DNA, 25 bp, Homo sapien
cactctgagggatggagcccgcaaa

SEQ ID NO: 4950096 - DNA, 25 bp, Homo sapien
tctgagggatggagcccgcaaatga

SEQ ID NO: 4950097 - DNA, 25 bp, Homo sapien
actctgagggatggagcccgcaaat

SEQ ID NO: 4950098 - DNA, 25 bp, Homo sapien
taagttgcaagatgtaggtgcctgg

SEQ ID NO: 4950099 - DNA, 25 bp, Homo sapien
tctgtggcttgaaaggctgtcggct

SEQ ID NO: 4950100 - DNA, 25 bp, Homo sapien
cttgtccctcagaacatcttcctgg

SEQ ID NO: 4950101 - DNA, 25 bp, Homo sapien
aacatcttcctggaagggcctggcc

SEQ ID NO: 4950102 - DNA, 25 bp, Homo sapien
agctcggcgtcccagccagacaaga

SEQ ID NO: 4950103 - DNA, 25 bp, Homo sapien
gcaaacagtgtgcagagggttgcaa

SEQ ID NO: 4950104 - DNA, 25 bp, Homo sapien
actgtccagcacgtgcctgctcctg

SEQ ID NO: 4950105 - DNA, 25 bp, Homo sapien
caaatacggtggcaagagctatccc

SEQ ID NO: 4950106 - DNA, 25 bp, Homo sapien
atgaaagacacatgtttgaacaaat

SEQ ID NO: 4950107 - DNA, 25 bp, Homo sapien
caaatagtgacatacaggtgctacg

SEQ ID NO: 4950108 - DNA, 25 bp, Homo sapien
caacatggagagcatatgaaagaca

SEQ ID NO: 4950109 - DNA, 25 bp, Homo sapien
cattattattcttggcagatgctgc

SEQ ID NO: 4950110 - DNA, 25 bp, Homo sapien
gagctatcatatacccatcacatag

SEQ ID NO: 4950111 - DNA, 25 bp, Homo sapien
cagatgtcttgtcctcaaaatgtca

SEQ ID NO: 4950112 - DNA, 25 bp, Homo sapien
gattccatgttagccctgatgtcta

SEQ ID NO: 4950113 - DNA, 25 bp, Homo sapien
tctaagttctgtggtccattgtggc

SEQ ID NO: 4950114 - DNA, 25 bp, Homo sapien
gacatttcaacgagtttgtcatcat

SEQ ID NO: 4950115 - DNA, 25 bp, Homo sapien
tttcaacgagtttgtcatcatgtga

SEQ ID NO: 4950116 - DNA, 25 bp, Homo sapien
tgacatttcaacgagtttgtcatca

SEQ ID NO: 4950117 - DNA, 25 bp, Homo sapien
catttcaacgagtttgtcatcatgt

SEQ ID NO: 4950118 - DNA, 25 bp, Homo sapien
tggtccagatagttgctgtgtcatt

SEQ ID NO: 4950119 - DNA, 25 bp, Homo sapien
catttgtttcctctggagcggtcga

SEQ ID NO: 4950120 - DNA, 25 bp, Homo sapien
aacttcctggtccagatagttgctg

SEQ ID NO: 4950121 - DNA, 25 bp, Homo sapien
tggagcggtcgattggtcatgaact

SEQ ID NO: 4950122 - DNA, 25 bp, Homo sapien
caggtccaatccatactttttcctc

SEQ ID NO: 4950123 - DNA, 25 bp, Homo sapien
ttctctcgtgtctgcaacgaatccc

SEQ ID NO: 4950124 - DNA, 25 bp, Homo sapien
cttctctcgtgtctgcaacgaatcc

SEQ ID NO: 4950125 - DNA, 25 bp, Homo sapien
ggtggtttttctcccatgtcagaat

SEQ ID NO: 4950126 - DNA, 25 bp, Homo sapien
accatagggtggtttttctcccatg

SEQ ID NO: 4950127 - DNA, 25 bp, Homo sapien
catagggtggtttttctcccatgtc

SEQ ID NO: 4950128 - DNA, 25 bp, Homo sapien
agggtggtttttctcccatgtcaga

SEQ ID NO: 4950129 - DNA, 25 bp, Homo sapien
tatggcttccctttctatgtagaca

SEQ ID NO: 4950130 - DNA, 25 bp, Homo sapien
ccaagtatactgcttccaaatattt

SEQ ID NO: 4950131 - DNA, 25 bp, Homo sapien
gtatactgcttccaaatatttggtt

SEQ ID NO: 4950132 - DNA, 25 bp, Homo sapien
gaagaaaccatggacaatacccagc

SEQ ID NO: 4950133 - DNA, 25 bp, Homo sapien
tcctgtcagtcgagaaggatgtata

SEQ ID NO: 4950134 - DNA, 25 bp, Homo sapien
cccgatagtgttgggtggtggtaat

SEQ ID NO: 4950135 - DNA, 25 bp, Homo sapien
tatcagggcaggtcccccgatagtg

SEQ ID NO: 4950136 - DNA, 25 bp, Homo sapien
gaagatggcaggcatgcctctgccc

SEQ ID NO: 4950137 - DNA, 25 bp, Homo sapien
gatgaagatggcaggcatgcctctg

SEQ ID NO: 4950138 - DNA, 25 bp, Homo sapien
ctttggatgtaacaaagttgaggtg

SEQ ID NO: 4950139 - DNA, 25 bp, Homo sapien
gggctatacatctggcctaatgctg

SEQ ID NO: 4950140 - DNA, 25 bp, Homo sapien
aagaagttgagtgttaaaactgctg

SEQ ID NO: 4950141 - DNA, 25 bp, Homo sapien
atacatctggcctaatgctgccctg

SEQ ID NO: 4950142 - DNA, 25 bp, Homo sapien
gggaagcggccctgatgagggtgtc

SEQ ID NO: 4950143 - DNA, 25 bp, Homo sapien
aaaaactgttatatactctgtgtga

SEQ ID NO: 4950144 - DNA, 25 bp, Homo sapien
gacgctagaaggtagagccctggtt

SEQ ID NO: 4950145 - DNA, 25 bp, Homo sapien
tgtcctccagtttgtagctccacgg

SEQ ID NO: 4950146 - DNA, 25 bp, Homo sapien
agcaggtagctgtgatccaccgcaa

SEQ ID NO: 4950147 - DNA, 25 bp, Homo sapien
ctcagcaggtagctgtgatccaccg

SEQ ID NO: 4950148 - DNA, 25 bp, Homo sapien
cagcaggtagctgtgatccaccgca

SEQ ID NO: 4950149 - DNA, 25 bp, Homo sapien
gcaggtagctgtgatccaccgcaaa

SEQ ID NO: 4950150 - DNA, 25 bp, Homo sapien
tagccaaggtttgcttggtgccagc

SEQ ID NO: 4950151 - DNA, 25 bp, Homo sapien
tcatctcagtaagcaaagggttaac

SEQ ID NO: 4950152 - DNA, 25 bp, Homo sapien
aaggcctaagactatttgcacccca

SEQ ID NO: 4950153 - DNA, 25 bp, Homo sapien
tatggaaactacgagagggctctca

SEQ ID NO: 4950154 - DNA, 25 bp, Homo sapien
gagccaccggctcacgtatactgtg

SEQ ID NO: 4950155 - DNA, 25 bp, Homo sapien
ccggctcacgtatactgtgacagta

SEQ ID NO: 4950156 - DNA, 25 bp, Homo sapien
caccggctcacgtatactgtgacag

SEQ ID NO: 4950157 - DNA, 25 bp, Homo sapien
gtgagccaccggctcacgtatactg

SEQ ID NO: 4950158 - DNA, 25 bp, Homo sapien
tcaggccaggcaattttcaattctt

SEQ ID NO: 4950159 - DNA, 25 bp, Homo sapien
tgcctttaccgcctggactcaagca

SEQ ID NO: 4950160 - DNA, 25 bp, Homo sapien
tgcagtgcaatgtcacagtcatagc

SEQ ID NO: 4950161 - DNA, 25 bp, Homo sapien
aacaggtgtaagacatcaggccagg

SEQ ID NO: 4950162 - DNA, 25 bp, Homo sapien
tgcctggcctcatgatcaatgactc

SEQ ID NO: 4950163 - DNA, 25 bp, Homo sapien
gatcaatgactccactgcagctttt

SEQ ID NO: 4950164 - DNA, 25 bp, Homo sapien
ggcctcatgatcaatgactccactg

SEQ ID NO: 4950165 - DNA, 25 bp, Homo sapien
atgatcaatgactccactgcagctt

SEQ ID NO: 4950166 - DNA, 25 bp, Homo sapien
ggtattaagtgcatcccccacattg

SEQ ID NO: 4950167 - DNA, 25 bp, Homo sapien
aagtgcatcccccacattgtacagc

SEQ ID NO: 4950168 - DNA, 25 bp, Homo sapien
tctcgttccatcgtccaggttggaa

SEQ ID NO: 4950169 - DNA, 25 bp, Homo sapien
ccggccagcttgattttttactgtg

SEQ ID NO: 4950170 - DNA, 25 bp, Homo sapien
ggctgttgactccaatatcctgctt

SEQ ID NO: 4950171 - DNA, 25 bp, Homo sapien
acttcggctgttgactccaatatcc

SEQ ID NO: 4950172 - DNA, 25 bp, Homo sapien
taagataaaaacttcggctgttgac

SEQ ID NO: 4950173 - DNA, 25 bp, Homo sapien
aaaacttcggctgttgactccaata

SEQ ID NO: 4950174 - DNA, 25 bp, Homo sapien
tagccaaggaaggatcgtgctccac

SEQ ID NO: 4950175 - DNA, 25 bp, Homo sapien
tagtagcgtagggacagatagccaa

SEQ ID NO: 4950176 - DNA, 25 bp, Homo sapien
tacatagacacttggttacagctga

SEQ ID NO: 4950177 - DNA, 25 bp, Homo sapien
aatagattgcccagctttagaagtg

SEQ ID NO: 4950178 - DNA, 25 bp, Homo sapien
caccatccatatctgggaacaatga

SEQ ID NO: 4950179 - DNA, 25 bp, Homo sapien
tagtagagcatcagtcaccatccat

SEQ ID NO: 4950180 - DNA, 25 bp, Homo sapien
tctaacaggcaaactcatgggcaca

SEQ ID NO: 4950181 - DNA, 25 bp, Homo sapien
ttccaactgggctctaacgtcacct

SEQ ID NO: 4950182 - DNA, 25 bp, Homo sapien
gaagacattgcatcaaactgtagac

SEQ ID NO: 4950183 - DNA, 25 bp, Homo sapien
aactgtagactacatggtttcctaa

SEQ ID NO: 4950184 - DNA, 25 bp, Homo sapien
caatctaggatagtacctggctcaa

SEQ ID NO: 4950185 - DNA, 25 bp, Homo sapien
taaattcactctgcaagtttttggg

SEQ ID NO: 4950186 - DNA, 25 bp, Homo sapien
gactgagtttcgattcctagccctg

SEQ ID NO: 4950187 - DNA, 25 bp, Homo sapien
gagcatggccctgcgggtttcagac

SEQ ID NO: 4950188 - DNA, 25 bp, Homo sapien
gaatagcgtgaaccttaaatcgagt

SEQ ID NO: 4950189 - DNA, 25 bp, Homo sapien
caatgaacaggatatgccaagtaca

SEQ ID NO: 4950190 - DNA, 25 bp, Homo sapien
taacttctcaaatagctagcagagg

SEQ ID NO: 4950191 - DNA, 25 bp, Homo sapien
acttctcaaatagctagcagaggga

SEQ ID NO: 4950192 - DNA, 25 bp, Homo sapien
caaaataacttctcaaatagctagc

SEQ ID NO: 4950193 - DNA, 25 bp, Homo sapien
aaataacttctcaaatagctagcag

SEQ ID NO: 4950194 - DNA, 25 bp, Homo sapien
actgaaagtaaatatgcttcttatc

SEQ ID NO: 4950195 - DNA, 25 bp, Homo sapien
tctagggtgaaggtacgctaagaac

SEQ ID NO: 4950196 - DNA, 25 bp, Homo sapien
agccttgcggttagcttgtgtgctg

SEQ ID NO: 4950197 - DNA, 25 bp, Homo sapien
cgagtacgtccacagtcagccttgc

SEQ ID NO: 4950198 - DNA, 25 bp, Homo sapien
gacttgctagtatcatctgccttca

SEQ ID NO: 4950199 - DNA, 25 bp, Homo sapien
tggttccagcaacggaaaagtggct

SEQ ID NO: 4950200 - DNA, 25 bp, Homo sapien
tcaggccctcactcatgtaaatgca

SEQ ID NO: 4950201 - DNA, 25 bp, Homo sapien
cagctcaaagagcagaattggttgc

SEQ ID NO: 4950202 - DNA, 25 bp, Homo sapien
aggcacctccgcagagacagagaac

SEQ ID NO: 4950203 - DNA, 25 bp, Homo sapien
gaaatggtgatatcagaagaacaga

SEQ ID NO: 4950204 - DNA, 25 bp, Homo sapien
gatgaagttgccatccaccaagaaa

SEQ ID NO: 4950205 - DNA, 25 bp, Homo sapien
gaacatcatcgactcgcagggtgaa

SEQ ID NO: 4950206 - DNA, 25 bp, Homo sapien
tcccctgccctgcgtcaactgcact

SEQ ID NO: 4950207 - DNA, 25 bp, Homo sapien
aatagtattgtagccagccacagtg

SEQ ID NO: 4950208 - DNA, 25 bp, Homo sapien
tattagaccaactcttcagtgtaca

SEQ ID NO: 4950209 - DNA, 25 bp, Homo sapien
acctataactccagagctttgtggg

SEQ ID NO: 4950210 - DNA, 25 bp, Homo sapien
gctagaatatctgttggtccaaaat

SEQ ID NO: 4950211 - DNA, 25 bp, Homo sapien
tacatctcccttgtcaggcacatgg

SEQ ID NO: 4950212 - DNA, 25 bp, Homo sapien
acatctcccttgtcaggcacatggt

SEQ ID NO: 4950213 - DNA, 25 bp, Homo sapien
ttacatctcccttgtcaggcacatg

SEQ ID NO: 4950214 - DNA, 25 bp, Homo sapien
ccattgtgtcactggtcagggtcct

SEQ ID NO: 4950215 - DNA, 25 bp, Homo sapien
tctacgtggccttcgctgtccgcaa

SEQ ID NO: 4950216 - DNA, 25 bp, Homo sapien
gcttctgaggtctacgtggccttcg

SEQ ID NO: 4950217 - DNA, 25 bp, Homo sapien
agcaccagcgggcttctgaggtcta

SEQ ID NO: 4950218 - DNA, 25 bp, Homo sapien
agtcctcggccctccagccagtggg

SEQ ID NO: 4950219 - DNA, 25 bp, Homo sapien
ggccctccagccagtgggtgcagac

SEQ ID NO: 4950220 - DNA, 25 bp, Homo sapien
tcggccctccagccagtgggtgcag

SEQ ID NO: 4950221 - DNA, 25 bp, Homo sapien
ggctgtaatactccctcagaggccc

SEQ ID NO: 4950222 - DNA, 25 bp, Homo sapien
gagaaggaaggttgcgtccgtgaag

SEQ ID NO: 4950223 - DNA, 25 bp, Homo sapien
aggttgcgtccgtgaagagtcagtt

SEQ ID NO: 4950224 - DNA, 25 bp, Homo sapien
caagagaaggaaggttgcgtccgtg

SEQ ID NO: 4950225 - DNA, 25 bp, Homo sapien
ggaaggttgcgtccgtgaagagtca

SEQ ID NO: 4950226 - DNA, 25 bp, Homo sapien
agctcagtggcccggacaagcccag

SEQ ID NO: 4950227 - DNA, 25 bp, Homo sapien
ctcagtggcccggacaagcccagag

SEQ ID NO: 4950228 - DNA, 25 bp, Homo sapien
cagtggcccggacaagcccagagct

SEQ ID NO: 4950229 - DNA, 25 bp, Homo sapien
tcacagctcagtggcccggacaagc

SEQ ID NO: 4950230 - DNA, 25 bp, Homo sapien
taaagctgccagcaggatagagaag

SEQ ID NO: 4950231 - DNA, 25 bp, Homo sapien
ttctaaagctgccagcaggatagag

SEQ ID NO: 4950232 - DNA, 25 bp, Homo sapien
agctgccagcaggatagagaagtct

SEQ ID NO: 4950233 - DNA, 25 bp, Homo sapien
tgccagcaggatagagaagtcttcg

SEQ ID NO: 4950234 - DNA, 25 bp, Homo sapien
ccccaagtgccccaggggtcgtgca

SEQ ID NO: 4950235 - DNA, 25 bp, Homo sapien
agccccaagtgccccaggggtcgtg

SEQ ID NO: 4950236 - DNA, 25 bp, Homo sapien
ccaagtgccccaggggtcgtgcaga

SEQ ID NO: 4950237 - DNA, 25 bp, Homo sapien
cagccccaagtgccccaggggtcgt

SEQ ID NO: 4950238 - DNA, 25 bp, Homo sapien
tcctgctccatgaaggctgaccgct

SEQ ID NO: 4950239 - DNA, 25 bp, Homo sapien
ggctgaccgctccatggctgggtcc

SEQ ID NO: 4950240 - DNA, 25 bp, Homo sapien
tccatgaaggctgaccgctccatgg

SEQ ID NO: 4950241 - DNA, 25 bp, Homo sapien
gctggccgctcatggagacgcatca

SEQ ID NO: 4950242 - DNA, 25 bp, Homo sapien
ccctgaacagagagtgcgtgctgcc

SEQ ID NO: 4950243 - DNA, 25 bp, Homo sapien
caggccctgaacagagagtgcgtgc

SEQ ID NO: 4950244 - DNA, 25 bp, Homo sapien
tgaacagagagtgcgtgctgcccac

SEQ ID NO: 4950245 - DNA, 25 bp, Homo sapien
aggccctgaacagagagtgcgtgct

SEQ ID NO: 4950246 - DNA, 25 bp, Homo sapien
cagcttgtcgtagacggtcacagcc

SEQ ID NO: 4950247 - DNA, 25 bp, Homo sapien
ggtgcctctttaaagaaagatgcca

SEQ ID NO: 4950248 - DNA, 25 bp, Homo sapien
aaagatgccagcttgtcgtagacgg

SEQ ID NO: 4950249 - DNA, 25 bp, Homo sapien
gatgccagcttgtcgtagacggtca

SEQ ID NO: 4950250 - DNA, 25 bp, Homo sapien
gaatacgaatatttcactacccatt

SEQ ID NO: 4950251 - DNA, 25 bp, Homo sapien
ccattcttctgagcatctaggtgtt

SEQ ID NO: 4950252 - DNA, 25 bp, Homo sapien
ttcacacattcattaggtgtcaggt

SEQ ID NO: 4950253 - DNA, 25 bp, Homo sapien
gatcagccaaaactctctgattggt

SEQ ID NO: 4950254 - DNA, 25 bp, Homo sapien
cacttgatattcctggagggtcacg

SEQ ID NO: 4950255 - DNA, 25 bp, Homo sapien
cacgggaagcgctatgtgaatccca

SEQ ID NO: 4950256 - DNA, 25 bp, Homo sapien
tgcatcagcagcgtgcgtgagcaga

SEQ ID NO: 4950257 - DNA, 25 bp, Homo sapien
gaatcccacttctgatattgtaaga

SEQ ID NO: 4950258 - DNA, 25 bp, Homo sapien
gaaggtaccagcaggcaccagaaga

SEQ ID NO: 4950259 - DNA, 25 bp, Homo sapien
gcagttgtttgtcagcccagagaag

SEQ ID NO: 4950260 - DNA, 25 bp, Homo sapien
gatggcagttgtttgtcagcccaga

SEQ ID NO: 4950261 - DNA, 25 bp, Homo sapien
agaaggtaccagcaggcaccagaag

SEQ ID NO: 4950262 - DNA, 25 bp, Homo sapien
gcgtgtttgaacacagctgcgcaaa

SEQ ID NO: 4950263 - DNA, 25 bp, Homo sapien
tctctgcgtgtttgaacacagctgc

SEQ ID NO: 4950264 - DNA, 25 bp, Homo sapien
aacacagctgcgcaaaggctcatca

SEQ ID NO: 4950265 - DNA, 25 bp, Homo sapien
cgcaaaggctcatcagcaacaggga

SEQ ID NO: 4950266 - DNA, 25 bp, Homo sapien
agtcagcgaccctgaattgggagcc

SEQ ID NO: 4950267 - DNA, 25 bp, Homo sapien
cccagcatactcaaagccttttgca

SEQ ID NO: 4950268 - DNA, 25 bp, Homo sapien
tgtcaccatccccattgggccaact

SEQ ID NO: 4950269 - DNA, 25 bp, Homo sapien
tgtcctggacctccattgtcaccat

SEQ ID NO: 4950270 - DNA, 25 bp, Homo sapien
gagtgctgagtatagtgtggaccca

SEQ ID NO: 4950271 - DNA, 25 bp, Homo sapien
gatcgctccacgttgttaagaggcg

SEQ ID NO: 4950272 - DNA, 25 bp, Homo sapien
tcacgagcccggaacttaccttgga

SEQ ID NO: 4950273 - DNA, 25 bp, Homo sapien
ggcacatggtacttgctcagcggta

SEQ ID NO: 4950274 - DNA, 25 bp, Homo sapien
tacatccaggtatcccagtcatctg

SEQ ID NO: 4950275 - DNA, 25 bp, Homo sapien
tgtggacgggcaacagcatccttag

SEQ ID NO: 4950276 - DNA, 25 bp, Homo sapien
agacatgggtgcttccaaggcgaga

SEQ ID NO: 4950277 - DNA, 25 bp, Homo sapien
cctaaacaaggtattgaggccagtg

SEQ ID NO: 4950278 - DNA, 25 bp, Homo sapien
gcttcagcgactgtaagagggcccc

SEQ ID NO: 4950279 - DNA, 25 bp, Homo sapien
aacttgcggtactgggaagcagaca

SEQ ID NO: 4950280 - DNA, 25 bp, Homo sapien
ggcccgcttcatgtcgatccagttg

SEQ ID NO: 4950281 - DNA, 25 bp, Homo sapien
tgtctggaactcatcgaacttgcgg

SEQ ID NO: 4950282 - DNA, 25 bp, Homo sapien
ttggggtgccgcccggcttctgctt

SEQ ID NO: 4950283 - DNA, 25 bp, Homo sapien
gtttggggtgccgcccggcttctgc

SEQ ID NO: 4950284 - DNA, 25 bp, Homo sapien
tgcaggtttggggtgccgcccggct

SEQ ID NO: 4950285 - DNA, 25 bp, Homo sapien
gggtgccgcccggcttctgcttggc

SEQ ID NO: 4950286 - DNA, 25 bp, Homo sapien
tgctgatgatgagccggggcagctg

SEQ ID NO: 4950287 - DNA, 25 bp, Homo sapien
ttcaaaaagttgctgatgatgagcc

SEQ ID NO: 4950288 - DNA, 25 bp, Homo sapien
agttgctgatgatgagccggggcag

SEQ ID NO: 4950289 - DNA, 25 bp, Homo sapien
aaaaagttgctgatgatgagccggg

SEQ ID NO: 4950290 - DNA, 25 bp, Homo sapien
ggccggcctggagggtgcagtgcac

SEQ ID NO: 4950291 - DNA, 25 bp, Homo sapien
ctgagagtgccaccagcaggcgggg

SEQ ID NO: 4950292 - DNA, 25 bp, Homo sapien
ccggggccggcctggagggtgcagt

SEQ ID NO: 4950293 - DNA, 25 bp, Homo sapien
gagagtgccaccagcaggcggggcg

SEQ ID NO: 4950294 - DNA, 25 bp, Homo sapien
ctccagcccgttgcagagttgcaga

SEQ ID NO: 4950295 - DNA, 25 bp, Homo sapien
aggtgctccagcccgttgcagagtt

SEQ ID NO: 4950296 - DNA, 25 bp, Homo sapien
gcaggaagcacacgcgccgctcgta

SEQ ID NO: 4950297 - DNA, 25 bp, Homo sapien
gaagcaggaagcacacgcgccgctc

SEQ ID NO: 4950298 - DNA, 25 bp, Homo sapien
aggcggtctgatgtggcacctctcg

SEQ ID NO: 4950299 - DNA, 25 bp, Homo sapien
ggtgatgaccaccacgcagtcctgc

SEQ ID NO: 4950300 - DNA, 25 bp, Homo sapien
gatgttaaagtgcacgggcacggac

SEQ ID NO: 4950301 - DNA, 25 bp, Homo sapien
acgaagtggccgcagtcctgctgga

SEQ ID NO: 4950302 - DNA, 25 bp, Homo sapien
caactttcctttttcacgtggcaca

SEQ ID NO: 4950303 - DNA, 25 bp, Homo sapien
acgtggcacagagacggtccttgag

SEQ ID NO: 4950304 - DNA, 25 bp, Homo sapien
agtcaactaggaaacccctgcggct

SEQ ID NO: 4950305 - DNA, 25 bp, Homo sapien
ggtccttgagctaccacgtctccag

SEQ ID NO: 4950306 - DNA, 25 bp, Homo sapien
cttgactggacacgctcagctggga

SEQ ID NO: 4950307 - DNA, 25 bp, Homo sapien
gctaaagtgagattcgtcgtggacg

SEQ ID NO: 4950308 - DNA, 25 bp, Homo sapien
tgttgctcaggagaccgtgcagctg

SEQ ID NO: 4950309 - DNA, 25 bp, Homo sapien
cacatttggctacaaggcgggccag

SEQ ID NO: 4950310 - DNA, 25 bp, Homo sapien
cactgggggacacgtcctcagtgga

SEQ ID NO: 4950311 - DNA, 25 bp, Homo sapien
tggtgggcgagtgagccagctcaga

SEQ ID NO: 4950312 - DNA, 25 bp, Homo sapien
tcccgctgttggtgggcgagtgagc

SEQ ID NO: 4950313 - DNA, 25 bp, Homo sapien
gcctgaaggaaacggaacgggagca

SEQ ID NO: 4950314 - DNA, 25 bp, Homo sapien
aaccactgtcagtagtgtttcatgc

SEQ ID NO: 4950315 - DNA, 25 bp, Homo sapien
ctccaacaatccaaacaaatgcgtg

SEQ ID NO: 4950316 - DNA, 25 bp, Homo sapien
cctccaacaatccaaacaaatgcgt

SEQ ID NO: 4950317 - DNA, 25 bp, Homo sapien
tccaacaatccaaacaaatgcgtgc

SEQ ID NO: 4950318 - DNA, 25 bp, Homo sapien
agagggaacagaatagatccctgag

SEQ ID NO: 4950319 - DNA, 25 bp, Homo sapien
tgcaagccacatagatcaagactgg

SEQ ID NO: 4950320 - DNA, 25 bp, Homo sapien
aacaccagttgcaagccacatagat

SEQ ID NO: 4950321 - DNA, 25 bp, Homo sapien
tgctttctccaacccaagagggaac

SEQ ID NO: 4950322 - DNA, 25 bp, Homo sapien
gaggcgtctgattctcaatttatca

SEQ ID NO: 4950323 - DNA, 25 bp, Homo sapien
ctgggcagcagaaaccgtcaccagc

SEQ ID NO: 4950324 - DNA, 25 bp, Homo sapien
gacaaggacaacctgcctacggtca

SEQ ID NO: 4950325 - DNA, 25 bp, Homo sapien
tgatcagaaccctggtcaatgcttt

SEQ ID NO: 4950326 - DNA, 25 bp, Homo sapien
tggatggagaaaacctcacccatac

SEQ ID NO: 4950327 - DNA, 25 bp, Homo sapien
gggccctagtgcaattctctcatgt

SEQ ID NO: 4950328 - DNA, 25 bp, Homo sapien
gcaaagggcagcgtcccaactaagt

SEQ ID NO: 4950329 - DNA, 25 bp, Homo sapien
gaaaactaaagccatctgcacgggc

SEQ ID NO: 4950330 - DNA, 25 bp, Homo sapien
catgaagtccagttcgcctgacacc

SEQ ID NO: 4950331 - DNA, 25 bp, Homo sapien
cctgcgagtggacgtcatggtttac

SEQ ID NO: 4950332 - DNA, 25 bp, Homo sapien
cccgctggttggtgactgatggttc

SEQ ID NO: 4950333 - DNA, 25 bp, Homo sapien
gatggttcattgtagatcactcccc

SEQ ID NO: 4950334 - DNA, 25 bp, Homo sapien
ggctgtccgtggagccggtggtgaa

SEQ ID NO: 4950335 - DNA, 25 bp, Homo sapien
aagctgacgtggacacccctgaagg

SEQ ID NO: 4950336 - DNA, 25 bp, Homo sapien
tccatcgctgcaggtcctagagtct

SEQ ID NO: 4950337 - DNA, 25 bp, Homo sapien
gtggtgaagctgacgtggacacccc

SEQ ID NO: 4950338 - DNA, 25 bp, Homo sapien
ctgttccttctacggcagatccata

SEQ ID NO: 4950339 - DNA, 25 bp, Homo sapien
gtggaaacccacatttgtctgaact

SEQ ID NO: 4950340 - DNA, 25 bp, Homo sapien
tggtggaaacccacatttgtctgaa

SEQ ID NO: 4950341 - DNA, 25 bp, Homo sapien
tctacggcagatccatatctcaata

SEQ ID NO: 4950342 - DNA, 25 bp, Homo sapien
aatacctttcccaggcttttcagca

SEQ ID NO: 4950343 - DNA, 25 bp, Homo sapien
cttgtctatcctgaatacctttccc

SEQ ID NO: 4950344 - DNA, 25 bp, Homo sapien
ctatcctgaatacctttcccaggct

SEQ ID NO: 4950345 - DNA, 25 bp, Homo sapien
ttcctccttgtctatcctgaatacc

SEQ ID NO: 4950346 - DNA, 25 bp, Homo sapien
gaaacaaaccctcatgtatacggtc

SEQ ID NO: 4950347 - DNA, 25 bp, Homo sapien
tagactagaacgtccagaaacaaac

SEQ ID NO: 4950348 - DNA, 25 bp, Homo sapien
accacgactggcctagaggttctca

SEQ ID NO: 4950349 - DNA, 25 bp, Homo sapien
ccattcaacgtggaaatgacagtct

SEQ ID NO: 4950350 - DNA, 25 bp, Homo sapien
gaccggaccatccttctagccaatt

SEQ ID NO: 4950351 - DNA, 25 bp, Homo sapien
agaagaaggagtatgcctattacag

SEQ ID NO: 4950352 - DNA, 25 bp, Homo sapien
tcttggcttaattgctctgattgaa

SEQ ID NO: 4950353 - DNA, 25 bp, Homo sapien
tataatacaacacccaagaagaagg

SEQ ID NO: 4950354 - DNA, 25 bp, Homo sapien
tgtgttaacagccaaaatggaggcc

SEQ ID NO: 4950355 - DNA, 25 bp, Homo sapien
cctgttatgtgcaaagcaaggagtc

SEQ ID NO: 4950356 - DNA, 25 bp, Homo sapien
tatccaactctgtgctaaggtatgc

SEQ ID NO: 4950357 - DNA, 25 bp, Homo sapien
tcggaggagatgcaaacgtggaccc

SEQ ID NO: 4950358 - DNA, 25 bp, Homo sapien
ccctaaacagaacagaggatgtggt

SEQ ID NO: 4950359 - DNA, 25 bp, Homo sapien
gacagtcatattgcacgcctgctga

SEQ ID NO: 4950360 - DNA, 25 bp, Homo sapien
ggactataaggtactcctggacaca

SEQ ID NO: 4950361 - DNA, 25 bp, Homo sapien
cagacacagttaagggagaggacta

SEQ ID NO: 4950362 - DNA, 25 bp, Homo sapien
tcagctgacctagtcacccaaaagt

SEQ ID NO: 4950363 - DNA, 25 bp, Homo sapien
gctgttctcgttaatgttggccagg

SEQ ID NO: 4950364 - DNA, 25 bp, Homo sapien
tgaaacgcttatctgcactaaccag

SEQ ID NO: 4950365 - DNA, 25 bp, Homo sapien
tttaaaaccgggtttgcatctgtga

SEQ ID NO: 4950366 - DNA, 25 bp, Homo sapien
gactttgtgggtataaaagcttgcc

SEQ ID NO: 4950367 - DNA, 25 bp, Homo sapien
tgtgagatccatcattcttagtaag

SEQ ID NO: 4950368 - DNA, 25 bp, Homo sapien
gccttatattgggacaggggtgacc

SEQ ID NO: 4950369 - DNA, 25 bp, Homo sapien
ggtgacccagagactctgtgagatc

SEQ ID NO: 4950370 - DNA, 25 bp, Homo sapien
tcaaaacaggaccacaggaaagcca

SEQ ID NO: 4950371 - DNA, 25 bp, Homo sapien
ggagtttacagaggacaatatctca

SEQ ID NO: 4950372 - DNA, 25 bp, Homo sapien
gcataaaatgagcatggagagcctt

SEQ ID NO: 4950373 - DNA, 25 bp, Homo sapien
tcaggaacacgaatgggagtttaca

SEQ ID NO: 4950374 - DNA, 25 bp, Homo sapien
aaaagtcagcatatgttcccaggcc

SEQ ID NO: 4950375 - DNA, 25 bp, Homo sapien
gaattggtgccggatcaactgctgg

SEQ ID NO: 4950376 - DNA, 25 bp, Homo sapien
gacctactaggttggaagactctgg

SEQ ID NO: 4950377 - DNA, 25 bp, Homo sapien
tccccagcggaggtactgagttcca

SEQ ID NO: 4950378 - DNA, 25 bp, Homo sapien
ccaagccccgagattcttaaaggag

SEQ ID NO: 4950379 - DNA, 25 bp, Homo sapien
catgctagttcccatagggtgtggg

SEQ ID NO: 4950380 - DNA, 25 bp, Homo sapien
ggcgttcctgggattgagccatgct

SEQ ID NO: 4950381 - DNA, 25 bp, Homo sapien
ttttatcataacaaactgggccgaa

SEQ ID NO: 4950382 - DNA, 25 bp, Homo sapien
gaaagtctgttcagaaacgctgtaa

SEQ ID NO: 4950383 - DNA, 25 bp, Homo sapien
aaatcagtttcgctctaatcgagag

SEQ ID NO: 4950384 - DNA, 25 bp, Homo sapien
gaaccacttgaaatgacatgactcg

SEQ ID NO: 4950385 - DNA, 25 bp, Homo sapien
ccagaggcacatcagctgaaacaga

SEQ ID NO: 4950386 - DNA, 25 bp, Homo sapien
ccacatctgagggttcctaaccaca

SEQ ID NO: 4950387 - DNA, 25 bp, Homo sapien
ttattgagcacgcatttatttggca

SEQ ID NO: 4950388 - DNA, 25 bp, Homo sapien
caagacctaatcaccattgtggtaa

SEQ ID NO: 4950389 - DNA, 25 bp, Homo sapien
tttatttggcattaactgtttgcct

SEQ ID NO: 4950390 - DNA, 25 bp, Homo sapien
ccaggtcgtggagtttgaatggtcc

SEQ ID NO: 4950391 - DNA, 25 bp, Homo sapien
gaggtgagaatgtctcaatcccact

SEQ ID NO: 4950392 - DNA, 25 bp, Homo sapien
ttcttcctctatccggcactgacga

SEQ ID NO: 4950393 - DNA, 25 bp, Homo sapien
aaagaggcggatttgctcatcccgg

SEQ ID NO: 4950394 - DNA, 25 bp, Homo sapien
tcagcaggaccttgggatggaggct

SEQ ID NO: 4950395 - DNA, 25 bp, Homo sapien
agcgacaccgttggtccggcaggaa

SEQ ID NO: 4950396 - DNA, 25 bp, Homo sapien
acctggatgggtcactgatagcgac

SEQ ID NO: 4950397 - DNA, 25 bp, Homo sapien
tcactgatagcgacaccgttggtcc

SEQ ID NO: 4950398 - DNA, 25 bp, Homo sapien
ctgggggccctccagcagacggtga

SEQ ID NO: 4950399 - DNA, 25 bp, Homo sapien
ggggccctccagcagacggtgacac

SEQ ID NO: 4950400 - DNA, 25 bp, Homo sapien
ctaaggtcagccagcggtgacactg

SEQ ID NO: 4950401 - DNA, 25 bp, Homo sapien
taaggtcagccagcggtgacactgg

SEQ ID NO: 4950402 - DNA, 25 bp, Homo sapien
ctgcccagccgaagtctcctcttca

SEQ ID NO: 4950403 - DNA, 25 bp, Homo sapien
ccctgcccagccgaagtctcctctt

SEQ ID NO: 4950404 - DNA, 25 bp, Homo sapien
ggaccctacagggctactcttggac

SEQ ID NO: 4950405 - DNA, 25 bp, Homo sapien
cggggaccctacagggctactcttg

SEQ ID NO: 4950406 - DNA, 25 bp, Homo sapien
cagtttctggcggaagctctcctgg

SEQ ID NO: 4950407 - DNA, 25 bp, Homo sapien
tagatcgtccgatggtcctcttccg

SEQ ID NO: 4950408 - DNA, 25 bp, Homo sapien
gggcgagcacctttgatcactgtca

SEQ ID NO: 4950409 - DNA, 25 bp, Homo sapien
ccttcatgagggagcagtaatcact

SEQ ID NO: 4950410 - DNA, 25 bp, Homo sapien
ccttcctacccatggactgtaatgc

SEQ ID NO: 4950411 - DNA, 25 bp, Homo sapien
ggactgtaatgcttttggcttaagt

SEQ ID NO: 4950412 - DNA, 25 bp, Homo sapien
ggggcacccgctgagccatttgtct

SEQ ID NO: 4950413 - DNA, 25 bp, Homo sapien
cggccctgtgatcattgctggggca

SEQ ID NO: 4950414 - DNA, 25 bp, Homo sapien
atctttctcccgcctacagcagtga

SEQ ID NO: 4950415 - DNA, 25 bp, Homo sapien
ctgagcctgtgcgagtggttggact

SEQ ID NO: 4950416 - DNA, 25 bp, Homo sapien
gcttccaactatgccagaggtcatc

SEQ ID NO: 4950417 - DNA, 25 bp, Homo sapien
tctgtgctttgcttccaactatgcc

SEQ ID NO: 4950418 - DNA, 25 bp, Homo sapien
ctccttctggtctaaagtcctcctt

SEQ ID NO: 4950419 - DNA, 25 bp, Homo sapien
ttagaagcagcctcaaagcagggcc

SEQ ID NO: 4950420 - DNA, 25 bp, Homo sapien
ctcctccttctggtctaaagtcctc

SEQ ID NO: 4950421 - DNA, 25 bp, Homo sapien
catccctgaagtcaccgtttcctcc

SEQ ID NO: 4950422 - DNA, 25 bp, Homo sapien
aggtttcttgctggaacagccctcc

SEQ ID NO: 4950423 - DNA, 25 bp, Homo sapien
ggtttcttgctggaacagccctccc

SEQ ID NO: 4950424 - DNA, 25 bp, Homo sapien
agctatcctgcaggtttcttgctgg

SEQ ID NO: 4950425 - DNA, 25 bp, Homo sapien
aggaagctatcctgcaggtttcttg

SEQ ID NO: 4950426 - DNA, 25 bp, Homo sapien
caccttcatcttccaggcggcagtt

SEQ ID NO: 4950427 - DNA, 25 bp, Homo sapien
cacggcaattgtgggcttggagtaa

SEQ ID NO: 4950428 - DNA, 25 bp, Homo sapien
gagacttcggcactcaggttggcct

SEQ ID NO: 4950429 - DNA, 25 bp, Homo sapien
catcatggtgggcttcacggcaatt

SEQ ID NO: 4950430 - DNA, 25 bp, Homo sapien
tctcggggttcaggcagagggtctg

SEQ ID NO: 4950431 - DNA, 25 bp, Homo sapien
tttcaggctctcggggttcaggcag

SEQ ID NO: 4950432 - DNA, 25 bp, Homo sapien
gctctcggggttcaggcagagggtc

SEQ ID NO: 4950433 - DNA, 25 bp, Homo sapien
ggttcaggcagagggtctggtgcat

SEQ ID NO: 4950434 - DNA, 25 bp, Homo sapien
tcttgcgcccggctctctggtgcag

SEQ ID NO: 4950435 - DNA, 25 bp, Homo sapien
tgcgcccggctctctggtgcagttt

SEQ ID NO: 4950436 - DNA, 25 bp, Homo sapien
cttgagccgacagggtgctggttca

SEQ ID NO: 4950437 - DNA, 25 bp, Homo sapien
acagggtgctggttcatcttgcgcc

SEQ ID NO: 4950438 - DNA, 25 bp, Homo sapien
tcctcagggtctatcacagattcac

SEQ ID NO: 4950439 - DNA, 25 bp, Homo sapien
tgacattggtatcagaggccctact

SEQ ID NO: 4950440 - DNA, 25 bp, Homo sapien
taggccacagaaaggacactgtcca

SEQ ID NO: 4950441 - DNA, 25 bp, Homo sapien
tcctcctgacactgggctatctgag

SEQ ID NO: 4950442 - DNA, 25 bp, Homo sapien
ctgtgcaaagggagtgtggaaggat

SEQ ID NO: 4950443 - DNA, 25 bp, Homo sapien
caaagggagtgtggaaggatctgga

SEQ ID NO: 4950444 - DNA, 25 bp, Homo sapien
agggagtgtggaaggatctggattg

SEQ ID NO: 4950445 - DNA, 25 bp, Homo sapien
tgcaaagggagtgtggaaggatctg

SEQ ID NO: 4950446 - DNA, 25 bp, Homo sapien
acacgactgccagggacggatggac

SEQ ID NO: 4950447 - DNA, 25 bp, Homo sapien
tcatcagtttacgagcactctttgc

SEQ ID NO: 4950448 - DNA, 25 bp, Homo sapien
gaaatccttggatgtttagagaggc

SEQ ID NO: 4950449 - DNA, 25 bp, Homo sapien
aaactggtttctcagtcgcagcaaa

SEQ ID NO: 4950450 - DNA, 25 bp, Homo sapien
caaacttctgcactagatttgtggc

SEQ ID NO: 4950451 - DNA, 25 bp, Homo sapien
tccccatttcagtaggaggctgcag

SEQ ID NO: 4950452 - DNA, 25 bp, Homo sapien
ttgcctcgccttgcctggtgcagca

SEQ ID NO: 4950453 - DNA, 25 bp, Homo sapien
tgaagctgtcagatacactcccacc

SEQ ID NO: 4950454 - DNA, 25 bp, Homo sapien
gaaagcagtcctcaaagcgcttcag

SEQ ID NO: 4950455 - DNA, 25 bp, Homo sapien
gacaatactctagcggtggaaagca

SEQ ID NO: 4950456 - DNA, 25 bp, Homo sapien
ccccttgacaatactctagcggtgg

SEQ ID NO: 4950457 - DNA, 25 bp, Homo sapien
actctagcggtggaaagcagtcctc

SEQ ID NO: 4950458 - DNA, 25 bp, Homo sapien
gccgccagccgcccggccggagcat

SEQ ID NO: 4950459 - DNA, 25 bp, Homo sapien
gcccctccgtcggtctccgagccgc

SEQ ID NO: 4950460 - DNA, 25 bp, Homo sapien
ccgtcggtctccgagccgccagccg

SEQ ID NO: 4950461 - DNA, 25 bp, Homo sapien
ctccgtcggtctccgagccgccagc

SEQ ID NO: 4950462 - DNA, 25 bp, Homo sapien
cgcagaaggtctgcgcgcggtgcgt

SEQ ID NO: 4950463 - DNA, 25 bp, Homo sapien
tgttcgcagaaggtctgcgcgcggt

SEQ ID NO: 4950464 - DNA, 25 bp, Homo sapien
ctgcgcgcggtgcgtgcccggccgc

SEQ ID NO: 4950465 - DNA, 25 bp, Homo sapien
ttcgcagaaggtctgcgcgcggtgc

SEQ ID NO: 4950466 - DNA, 25 bp, Homo sapien
ccccgagcccagcacccgtttgcac

SEQ ID NO: 4950467 - DNA, 25 bp, Homo sapien
gcgagctctggcgttgcaatcctcc

SEQ ID NO: 4950468 - DNA, 25 bp, Homo sapien
ggcgttgcaatcctccttttgccat

SEQ ID NO: 4950469 - DNA, 25 bp, Homo sapien
tccttttgccatcatgcgtgtatag

SEQ ID NO: 4950470 - DNA, 25 bp, Homo sapien
ataggtgcccggcatcacttcatcc

SEQ ID NO: 4950471 - DNA, 25 bp, Homo sapien
ctgcggcttctctcgccctctatcc

SEQ ID NO: 4950472 - DNA, 25 bp, Homo sapien
ctccagtgaaggtcctctgccagtc

SEQ ID NO: 4950473 - DNA, 25 bp, Homo sapien
ccagtgaaggtcctctgccagtcag

SEQ ID NO: 4950474 - DNA, 25 bp, Homo sapien
tgactccagtgaaggtcctctgcca

SEQ ID NO: 4950475 - DNA, 25 bp, Homo sapien
gatgtgtatttgaggtttggcttct

SEQ ID NO: 4950476 - DNA, 25 bp, Homo sapien
aaaggatccagggaattcttcctca

SEQ ID NO: 4950477 - DNA, 25 bp, Homo sapien
aaggatccagggaattcttcctcat

SEQ ID NO: 4950478 - DNA, 25 bp, Homo sapien
ggaagatgtgtatttgaggtttggc

SEQ ID NO: 4950479 - DNA, 25 bp, Homo sapien
cagggctgcacaaatggctttccca

SEQ ID NO: 4950480 - DNA, 25 bp, Homo sapien
tcagggctgcacaaatggctttccc

SEQ ID NO: 4950481 - DNA, 25 bp, Homo sapien
ctgcacaaatggctttcccacattc

SEQ ID NO: 4950482 - DNA, 25 bp, Homo sapien
ggctgcacaaatggctttcccacat

SEQ ID NO: 4950483 - DNA, 25 bp, Homo sapien
gcgcctggcctagatcaacatttaa

SEQ ID NO: 4950484 - DNA, 25 bp, Homo sapien
cgcgcctggcctagatcaacattta

SEQ ID NO: 4950485 - DNA, 25 bp, Homo sapien
accgcgcctggcctagatcaacatt

SEQ ID NO: 4950486 - DNA, 25 bp, Homo sapien
ccgcgcctggcctagatcaacattt

SEQ ID NO: 4950487 - DNA, 25 bp, Homo sapien
tgctctgagaatagtcctgtccctg

SEQ ID NO: 4950488 - DNA, 25 bp, Homo sapien
ggttcctcgtctccattctatccgg

SEQ ID NO: 4950489 - DNA, 25 bp, Homo sapien
tatccggttacgagtattccttcag

SEQ ID NO: 4950490 - DNA, 25 bp, Homo sapien
cagaagacgtttactaagcgcttgc

SEQ ID NO: 4950491 - DNA, 25 bp, Homo sapien
acagtgccagtatcatgagtaacag

SEQ ID NO: 4950492 - DNA, 25 bp, Homo sapien
gaagtagtagtgtggcctaatcacc

SEQ ID NO: 4950493 - DNA, 25 bp, Homo sapien
cttatagcttcttgagtaggatcct

SEQ ID NO: 4950494 - DNA, 25 bp, Homo sapien
gccagtatcatgagtaacagacttc

SEQ ID NO: 4950495 - DNA, 25 bp, Homo sapien
catttgaattaacgccagtcatggc

SEQ ID NO: 4950496 - DNA, 25 bp, Homo sapien
agaaaattcctctcgaaagcaaagg

SEQ ID NO: 4950497 - DNA, 25 bp, Homo sapien
tgcacacatatttccggcactccag

SEQ ID NO: 4950498 - DNA, 25 bp, Homo sapien
tctgggagtgactacatttgccttc

SEQ ID NO: 4950499 - DNA, 25 bp, Homo sapien
gagaggagtacataaatcagctgga

SEQ ID NO: 4950500 - DNA, 25 bp, Homo sapien
ggaagtcactaagtccaaccgacac

SEQ ID NO: 4950501 - DNA, 25 bp, Homo sapien
ttttggccattaagagctccttcag

SEQ ID NO: 4950502 - DNA, 25 bp, Homo sapien
tctctgcacaggaaatttgcccctt

SEQ ID NO: 4950503 - DNA, 25 bp, Homo sapien
ttcttgtccccggtacctctttgca

SEQ ID NO: 4950504 - DNA, 25 bp, Homo sapien
tgtgttaggttctgtaccagtgtca

SEQ ID NO: 4950505 - DNA, 25 bp, Homo sapien
cataatcagggcacgggtatgacag

SEQ ID NO: 4950506 - DNA, 25 bp, Homo sapien
gcacgggtatgacagtttaaaaagc

SEQ ID NO: 4950507 - DNA, 25 bp, Homo sapien
catgtgcaggtgtgttgcatggata

SEQ ID NO: 4950508 - DNA, 25 bp, Homo sapien
ggcacattcatccacacccagttaa

SEQ ID NO: 4950509 - DNA, 25 bp, Homo sapien
tgcgcccggccaggcctttataaaa

SEQ ID NO: 4950510 - DNA, 25 bp, Homo sapien
aaattatagattccgggggtacatg

SEQ ID NO: 4950511 - DNA, 25 bp, Homo sapien
ttgttatcaggggatgcattcagag

SEQ ID NO: 4950512 - DNA, 25 bp, Homo sapien
cctagaatggtacttggtatatgct

SEQ ID NO: 4950513 - DNA, 25 bp, Homo sapien
ggtatatgctaagtgtctcttctca

SEQ ID NO: 4950514 - DNA, 25 bp, Homo sapien
gccctgggtcccgtccacacgaaga

SEQ ID NO: 4950515 - DNA, 25 bp, Homo sapien
cactctgcgctctgaatctggccta

SEQ ID NO: 4950516 - DNA, 25 bp, Homo sapien
ctactggcactccatctatggaggg

SEQ ID NO: 4950517 - DNA, 25 bp, Homo sapien
cccacagggcattgggaatcctgcc

SEQ ID NO: 4950518 - DNA, 25 bp, Homo sapien
gaatcctgccccagataaggaccat

SEQ ID NO: 4950519 - DNA, 25 bp, Homo sapien
gctggccctttcattcgaatgggcc

SEQ ID NO: 4950520 - DNA, 25 bp, Homo sapien
tgtgcttaagcctgcgaagtcgagg

SEQ ID NO: 4950521 - DNA, 25 bp, Homo sapien
gtgcttaagcctgcgaagtcgaggc

SEQ ID NO: 4950522 - DNA, 25 bp, Homo sapien
atgtgcttaagcctgcgaagtcgag

SEQ ID NO: 4950523 - DNA, 25 bp, Homo sapien
gagggacacccaatccatttttgga

SEQ ID NO: 4950524 - DNA, 25 bp, Homo sapien
cctggacttcgagccacaagtgaac

SEQ ID NO: 4950525 - DNA, 25 bp, Homo sapien
tctgtaactccccaccaagaggaaa

SEQ ID NO: 4950526 - DNA, 25 bp, Homo sapien
gggttttcatgcagtatcacacctg

SEQ ID NO: 4950527 - DNA, 25 bp, Homo sapien
gcagggatgaaagataaatgcaggc

SEQ ID NO: 4950528 - DNA, 25 bp, Homo sapien
tggcagggatgaaagataaatgcag

SEQ ID NO: 4950529 - DNA, 25 bp, Homo sapien
agggatgaaagataaatgcaggcgg

SEQ ID NO: 4950530 - DNA, 25 bp, Homo sapien
cagggatgaaagataaatgcaggcg

SEQ ID NO: 4950531 - DNA, 25 bp, Homo sapien
aggctgacatcagacccaagggagg

SEQ ID NO: 4950532 - DNA, 25 bp, Homo sapien
aaggctgacatcagacccaagggag

SEQ ID NO: 4950533 - DNA, 25 bp, Homo sapien
gttcccattcgaaccaacaatgcag

SEQ ID NO: 4950534 - DNA, 25 bp, Homo sapien
gaaccaacaatgcagcctgtggcag

SEQ ID NO: 4950535 - DNA, 25 bp, Homo sapien
gatcccaggaccccattacacagag

SEQ ID NO: 4950536 - DNA, 25 bp, Homo sapien
tcccaggaccccattacacagaggg

SEQ ID NO: 4950537 - DNA, 25 bp, Homo sapien
tggcacaggtggacttggatcccag

SEQ ID NO: 4950538 - DNA, 25 bp, Homo sapien
actggcacaggtggacttggatccc

SEQ ID NO: 4950539 - DNA, 25 bp, Homo sapien
ctcttggggtaagaccataaggaga

SEQ ID NO: 4950540 - DNA, 25 bp, Homo sapien
ggctaatgtgagtcatggtgtctga

SEQ ID NO: 4950541 - DNA, 25 bp, Homo sapien
agctcttggggtaagaccataagga

SEQ ID NO: 4950542 - DNA, 25 bp, Homo sapien
taatgtgagtcatggtgtctgagct

SEQ ID NO: 4950543 - DNA, 25 bp, Homo sapien
tgagacctcccgcaatgcatattca

SEQ ID NO: 4950544 - DNA, 25 bp, Homo sapien
tacaagaggtacagaagtgccagta

SEQ ID NO: 4950545 - DNA, 25 bp, Homo sapien
ttcatcacgtctgtgcaagcattcc

SEQ ID NO: 4950546 - DNA, 25 bp, Homo sapien
ttcctatcaactttccaggctgaga

SEQ ID NO: 4950547 - DNA, 25 bp, Homo sapien
tttggtatctctggaggacttggct

SEQ ID NO: 4950548 - DNA, 25 bp, Homo sapien
cttttggtatctctggaggacttgg

SEQ ID NO: 4950549 - DNA, 25 bp, Homo sapien
ttttggtatctctggaggacttggc

SEQ ID NO: 4950550 - DNA, 25 bp, Homo sapien
agctccttgaggcaatgcgtgtgca

SEQ ID NO: 4950551 - DNA, 25 bp, Homo sapien
gccaaagtctgcaatagaataagtg

SEQ ID NO: 4950552 - DNA, 25 bp, Homo sapien
tgccgtagccactaagccaaagtct

SEQ ID NO: 4950553 - DNA, 25 bp, Homo sapien
gcagagtctgtaaatgccgtagcca

SEQ ID NO: 4950554 - DNA, 25 bp, Homo sapien
tctgggcatacaggagcattcgcca

SEQ ID NO: 4950555 - DNA, 25 bp, Homo sapien
tgttagtgttggatgttcaaaggct

SEQ ID NO: 4950556 - DNA, 25 bp, Homo sapien
tactgaacgatgaagacaagccaat

SEQ ID NO: 4950557 - DNA, 25 bp, Homo sapien
gttcctcctggtccaagattttcag

SEQ ID NO: 4950558 - DNA, 25 bp, Homo sapien
aaaatgctgggtgcatacggtatac

SEQ ID NO: 4950559 - DNA, 25 bp, Homo sapien
ccagctttctgcaagatatcctcac

SEQ ID NO: 4950560 - DNA, 25 bp, Homo sapien
gtactcaaaactccatccagctttc

SEQ ID NO: 4950561 - DNA, 25 bp, Homo sapien
tatgcacacgatgccgtcctggtgg

SEQ ID NO: 4950562 - DNA, 25 bp, Homo sapien
gaactcgactcctcttattcatcag

SEQ ID NO: 4950563 - DNA, 25 bp, Homo sapien
tttcgtgaatggaggcggaagaact

SEQ ID NO: 4950564 - DNA, 25 bp, Homo sapien
gatcttggagagtttcgtgaatgga

SEQ ID NO: 4950565 - DNA, 25 bp, Homo sapien
gagtcctctatggagtggattcggc

SEQ ID NO: 4950566 - DNA, 25 bp, Homo sapien
aatgtgggacccgtggacaaagctg

SEQ ID NO: 4950567 - DNA, 25 bp, Homo sapien
tggattcggccttgattctagcagg

SEQ ID NO: 4950568 - DNA, 25 bp, Homo sapien
cattctacatcactggcgagtctag

SEQ ID NO: 4950569 - DNA, 25 bp, Homo sapien
cctgcggttatttgttctcagttcc

SEQ ID NO: 4950570 - DNA, 25 bp, Homo sapien
tatttgttctcagttccacaactgt

SEQ ID NO: 4950571 - DNA, 25 bp, Homo sapien
aggccctcagccctgcggttatttg

SEQ ID NO: 4950572 - DNA, 25 bp, Homo sapien
ctcagccctgcggttatttgttctc

SEQ ID NO: 4950573 - DNA, 25 bp, Homo sapien
catagcttgaaacaattgggcagtc

SEQ ID NO: 4950574 - DNA, 25 bp, Homo sapien
taaaacagacccttgtgagcactgc

SEQ ID NO: 4950575 - DNA, 25 bp, Homo sapien
tgaatcatagcctcccaggaacaga

SEQ ID NO: 4950576 - DNA, 25 bp, Homo sapien
taaaaggctatcatggtgacctgac

SEQ ID NO: 4950577 - DNA, 25 bp, Homo sapien
tttttgaagtgatgaaaatgtcctg

SEQ ID NO: 4950578 - DNA, 25 bp, Homo sapien
ctttttgaagtgatgaaaatgtcct

SEQ ID NO: 4950579 - DNA, 25 bp, Homo sapien
gaccacggacatgtgcagcatcaca

SEQ ID NO: 4950580 - DNA, 25 bp, Homo sapien
cagatggcatttcaaccacttggtt

SEQ ID NO: 4950581 - DNA, 25 bp, Homo sapien
tgcggtccgcagatcatgattcttg

SEQ ID NO: 4950582 - DNA, 25 bp, Homo sapien
gattcttggctatgcaaacctgagg

SEQ ID NO: 4950583 - DNA, 25 bp, Homo sapien
atgtgcaggtgcaagcccgaccaag

SEQ ID NO: 4950584 - DNA, 25 bp, Homo sapien
tagagacgtgatcagactcccctgc

SEQ ID NO: 4950585 - DNA, 25 bp, Homo sapien
tacttgtcaccgaagggagatgtgc

SEQ ID NO: 4950586 - DNA, 25 bp, Homo sapien
gaaggtaaatgtcctgtcccacagg

SEQ ID NO: 4950587 - DNA, 25 bp, Homo sapien
tgccagaacgaaccgtttcagaaac

SEQ ID NO: 4950588 - DNA, 25 bp, Homo sapien
gggcatcggatgtaaacagaaccat

SEQ ID NO: 4950589 - DNA, 25 bp, Homo sapien
aagcaggctagactgtgccagaacg

SEQ ID NO: 4950590 - DNA, 25 bp, Homo sapien
aaatgggcatcggatgtaaacagaa

SEQ ID NO: 4950591 - DNA, 25 bp, Homo sapien
gcccgggtggtttcactcatcctta

SEQ ID NO: 4950592 - DNA, 25 bp, Homo sapien
ggagtttgaacctgctcaattcccg

SEQ ID NO: 4950593 - DNA, 25 bp, Homo sapien
tgtggacactctattggcatggtgc

SEQ ID NO: 4950594 - DNA, 25 bp, Homo sapien
gtttgaacctgctcaattcccggcc

SEQ ID NO: 4950595 - DNA, 25 bp, Homo sapien
cagttagctcttcaatcactgtctc

SEQ ID NO: 4950596 - DNA, 25 bp, Homo sapien
gcttcagttagctcttcaatcactg

SEQ ID NO: 4950597 - DNA, 25 bp, Homo sapien
ctgcttcagttagctcttcaatcac

SEQ ID NO: 4950598 - DNA, 25 bp, Homo sapien
ttcagttagctcttcaatcactgtc

SEQ ID NO: 4950599 - DNA, 25 bp, Homo sapien
ttcctcaacaacaactagaagctag

SEQ ID NO: 4950600 - DNA, 25 bp, Homo sapien
tgtaacaaatatgtggacaccagct

SEQ ID NO: 4950601 - DNA, 25 bp, Homo sapien
caagaatcagaatggcctcaatttc

SEQ ID NO: 4950602 - DNA, 25 bp, Homo sapien
ggaaagtgatttccatatccagcca

SEQ ID NO: 4950603 - DNA, 25 bp, Homo sapien
gtgatactccactctaggtcaaggg

SEQ ID NO: 4950604 - DNA, 25 bp, Homo sapien
tgcattaccagcaagcatcccaggc

SEQ ID NO: 4950605 - DNA, 25 bp, Homo sapien
tgtcaagcactcatgcagtccgtgg

SEQ ID NO: 4950606 - DNA, 25 bp, Homo sapien
caggcagggcactcattttgcaagc

SEQ ID NO: 4950607 - DNA, 25 bp, Homo sapien
aagtaagacgttagagtacatgctc

SEQ ID NO: 4950608 - DNA, 25 bp, Homo sapien
tcatcagttcgaaagtcacttctgc

SEQ ID NO: 4950609 - DNA, 25 bp, Homo sapien
tactatagtaggtgtgcccagttcc

SEQ ID NO: 4950610 - DNA, 25 bp, Homo sapien
ccagagttggtgctaattaccttcc

SEQ ID NO: 4950611 - DNA, 25 bp, Homo sapien
gaatctgaggacatcttattatggc

SEQ ID NO: 4950612 - DNA, 25 bp, Homo sapien
agggatctaggttgcctgatcatcc

SEQ ID NO: 4950613 - DNA, 25 bp, Homo sapien
gaacaaaattgtcttatcgcttagc

SEQ ID NO: 4950614 - DNA, 25 bp, Homo sapien
gagtgtgaaccccattgtaacccgc

SEQ ID NO: 4950615 - DNA, 25 bp, Homo sapien
gactccgacctctagacgcttgtag

SEQ ID NO: 4950616 - DNA, 25 bp, Homo sapien
catttgcgtcacgtggaccagggac

SEQ ID NO: 4950617 - DNA, 25 bp, Homo sapien
ttcgagttggaacccggacacttgc

SEQ ID NO: 4950618 - DNA, 25 bp, Homo sapien
gaaatctgcctttcgtgggaccaaa

SEQ ID NO: 4950619 - DNA, 25 bp, Homo sapien
tctgaattccgtcgctattcctcgg

SEQ ID NO: 4950620 - DNA, 25 bp, Homo sapien
ctggtttctctgaattccgtcgcta

SEQ ID NO: 4950621 - DNA, 25 bp, Homo sapien
cgctattcctcggtagttaaaacag

SEQ ID NO: 4950622 - DNA, 25 bp, Homo sapien
tccgtcgctattcctcggtagttaa

SEQ ID NO: 4950623 - DNA, 25 bp, Homo sapien
catggaaatgcatgtctgagcatcc

SEQ ID NO: 4950624 - DNA, 25 bp, Homo sapien
tccacacagtcagcaggaccatcat

SEQ ID NO: 4950625 - DNA, 25 bp, Homo sapien
ggaccatcataaacttgccccatgg

SEQ ID NO: 4950626 - DNA, 25 bp, Homo sapien
tccttacaggatgtgacggtgccaa

SEQ ID NO: 4950627 - DNA, 25 bp, Homo sapien
taaaggtgtcttcacactagaaggt

SEQ ID NO: 4950628 - DNA, 25 bp, Homo sapien
cattgactcctgtttcagaactggt

SEQ ID NO: 4950629 - DNA, 25 bp, Homo sapien
gggttagaatccttcctgaaagaga

SEQ ID NO: 4950630 - DNA, 25 bp, Homo sapien
gactacgtgccgttctaaaacagac

SEQ ID NO: 4950631 - DNA, 25 bp, Homo sapien
aggtgcgggctcagtttccctagga

SEQ ID NO: 4950632 - DNA, 25 bp, Homo sapien
aggcgcgcgaggtgcgggctcagtt

SEQ ID NO: 4950633 - DNA, 25 bp, Homo sapien
ctggcgctggataccggcgtctccg

SEQ ID NO: 4950634 - DNA, 25 bp, Homo sapien
tgggagtagcagagaggcgcgcgag

SEQ ID NO: 4950635 - DNA, 25 bp, Homo sapien
gctgtgtagagttgggcaatcaact

SEQ ID NO: 4950636 - DNA, 25 bp, Homo sapien
gttgtttaagattaagctctgccat

SEQ ID NO: 4950637 - DNA, 25 bp, Homo sapien
aatcaactcttggtgcccatctctt

SEQ ID NO: 4950638 - DNA, 25 bp, Homo sapien
caggatttaggacttaaatctgttg

SEQ ID NO: 4950639 - DNA, 25 bp, Homo sapien
catcgagctatgaggtgcactccag

SEQ ID NO: 4950640 - DNA, 25 bp, Homo sapien
catgaccacacatcgagctatgagg

SEQ ID NO: 4950641 - DNA, 25 bp, Homo sapien
gagccatgaccacacatcgagctat

SEQ ID NO: 4950642 - DNA, 25 bp, Homo sapien
cacacatcgagctatgaggtgcact

SEQ ID NO: 4950643 - DNA, 25 bp, Homo sapien
accattcatcagatacataggaaga

SEQ ID NO: 4950644 - DNA, 25 bp, Homo sapien
cactgtggtactctcagtctcattc

SEQ ID NO: 4950645 - DNA, 25 bp, Homo sapien
gccagtccctggataaaccattcat

SEQ ID NO: 4950646 - DNA, 25 bp, Homo sapien
cctggataaaccattcatcagatac

SEQ ID NO: 4950647 - DNA, 25 bp, Homo sapien
ccagcagaagtcaattctgtagctt

SEQ ID NO: 4950648 - DNA, 25 bp, Homo sapien
gctgtgacattcgtagtcaacacca

SEQ ID NO: 4950649 - DNA, 25 bp, Homo sapien
gtgacattcgtagtcaacaccagca

SEQ ID NO: 4950650 - DNA, 25 bp, Homo sapien
ttatgggctgtgacattcgtagtca

SEQ ID NO: 4950651 - DNA, 25 bp, Homo sapien
tttaagtaagaatggggcatcacca

SEQ ID NO: 4950652 - DNA, 25 bp, Homo sapien
gtaagaatggggcatcaccatgttg

SEQ ID NO: 4950653 - DNA, 25 bp, Homo sapien
gtattttaagtaagaatggggcatc

SEQ ID NO: 4950654 - DNA, 25 bp, Homo sapien
attttaagtaagaatggggcatcac

SEQ ID NO: 4950655 - DNA, 25 bp, Homo sapien
gaatggatcatatggggaaagttcc

SEQ ID NO: 4950656 - DNA, 25 bp, Homo sapien
tatggggaaagttccatgataagcc

SEQ ID NO: 4950657 - DNA, 25 bp, Homo sapien
tcctcataggttgaatttaatttta

SEQ ID NO: 4950658 - DNA, 25 bp, Homo sapien
ggatcatatggggaaagttccatga

SEQ ID NO: 4950659 - DNA, 25 bp, Homo sapien
agaatgtatggtctctggcatgctt

SEQ ID NO: 4950660 - DNA, 25 bp, Homo sapien
tctgccttatccaggtctgttccat

SEQ ID NO: 4950661 - DNA, 25 bp, Homo sapien
gcattgttcagttctctttcagcca

SEQ ID NO: 4950662 - DNA, 25 bp, Homo sapien
ttttctgcattgttcagttctcttt

SEQ ID NO: 4950663 - DNA, 25 bp, Homo sapien
tttgaatttggcacagaagctgcca

SEQ ID NO: 4950664 - DNA, 25 bp, Homo sapien
gcagcatttccaccaggtgatggcc

SEQ ID NO: 4950665 - DNA, 25 bp, Homo sapien
ccgcttctgacttggcagcaggagc

SEQ ID NO: 4950666 - DNA, 25 bp, Homo sapien
gaagccctgggcatttgaatttggc

SEQ ID NO: 4950667 - DNA, 25 bp, Homo sapien
gacggcgcttgactggtataggacc

SEQ ID NO: 4950668 - DNA, 25 bp, Homo sapien
cattaagaggcaaaaggacggcgct

SEQ ID NO: 4950669 - DNA, 25 bp, Homo sapien
cagctttcggataagagctcaggat

SEQ ID NO: 4950670 - DNA, 25 bp, Homo sapien
gcgtgggctgaagcatgcgcattaa

SEQ ID NO: 4950671 - DNA, 25 bp, Homo sapien
tctgcccagttacaacaacgaaatg

SEQ ID NO: 4950672 - DNA, 25 bp, Homo sapien
ttcacaaaccatggcatgaaaaaca

SEQ ID NO: 4950673 - DNA, 25 bp, Homo sapien
aaaacaacacgcaccccatcaggaa

SEQ ID NO: 4950674 - DNA, 25 bp, Homo sapien
tacaacaacgaaatgggaaaccaca

SEQ ID NO: 4950675 - DNA, 25 bp, Homo sapien
catttgtttgagaggcaagggacgc

SEQ ID NO: 4950676 - DNA, 25 bp, Homo sapien
tagttcttggcaggagaccgtccaa

SEQ ID NO: 4950677 - DNA, 25 bp, Homo sapien
taaaagagtagcgagtaccagcaac

SEQ ID NO: 4950678 - DNA, 25 bp, Homo sapien
cattttcgatcaacccacggaggag

SEQ ID NO: 4950679 - DNA, 25 bp, Homo sapien
catggaaattccacagccacaaacg

SEQ ID NO: 4950680 - DNA, 25 bp, Homo sapien
caagttcacagaacacgctggggtg

SEQ ID NO: 4950681 - DNA, 25 bp, Homo sapien
ggtccaggtgttcagatgctctctt

SEQ ID NO: 4950682 - DNA, 25 bp, Homo sapien
ccaggtgcaaaagatggtccaggtg

SEQ ID NO: 4950683 - DNA, 25 bp, Homo sapien
ggtttctgtgcttttcaccaacatt

SEQ ID NO: 4950684 - DNA, 25 bp, Homo sapien
ctggtttctgtgcttttcaccaaca

SEQ ID NO: 4950685 - DNA, 25 bp, Homo sapien
tctgtgcttttcaccaacattcttc

SEQ ID NO: 4950686 - DNA, 25 bp, Homo sapien
tcactggtttctgtgcttttcacca

SEQ ID NO: 4950687 - DNA, 25 bp, Homo sapien
gagggaactgtactaactggctgtc

SEQ ID NO: 4950688 - DNA, 25 bp, Homo sapien
taaatgtcaggcaacttatgtcccc

SEQ ID NO: 4950689 - DNA, 25 bp, Homo sapien
cctcagcaaataaagcgggattcag

SEQ ID NO: 4950690 - DNA, 25 bp, Homo sapien
tgacaaaaacgtactggacaatgct

SEQ ID NO: 4950691 - DNA, 25 bp, Homo sapien
tcctaataatcccaccatgtaagct

SEQ ID NO: 4950692 - DNA, 25 bp, Homo sapien
ggagagacgctgatttcatggacac

SEQ ID NO: 4950693 - DNA, 25 bp, Homo sapien
ccaggaattaggttgttcactctag

SEQ ID NO: 4950694 - DNA, 25 bp, Homo sapien
tctccagtccatacaagattcagtc

SEQ ID NO: 4950695 - DNA, 25 bp, Homo sapien
tttctccccacctctctagctccat

SEQ ID NO: 4950696 - DNA, 25 bp, Homo sapien
gtttctccccacctctctagctcca

SEQ ID NO: 4950697 - DNA, 25 bp, Homo sapien
caatgaggcttacggactcctagct

SEQ ID NO: 4950698 - DNA, 25 bp, Homo sapien
tcctagcttggagccgatggtacaa

SEQ ID NO: 4950699 - DNA, 25 bp, Homo sapien
tccggaccttgcaaactctggaggg

SEQ ID NO: 4950700 - DNA, 25 bp, Homo sapien
caaggtaccgagacacttaggctga

SEQ ID NO: 4950701 - DNA, 25 bp, Homo sapien
cctaaagtcacagtttgggtacagt

SEQ ID NO: 4950702 - DNA, 25 bp, Homo sapien
ttaaaaattggtgctcctaaagtca

SEQ ID NO: 4950703 - DNA, 25 bp, Homo sapien
tcacagtttgggtacagtaaaaatg

SEQ ID NO: 4950704 - DNA, 25 bp, Homo sapien
gtttgggtacagtaaaaatgatggc

SEQ ID NO: 4950705 - DNA, 25 bp, Homo sapien
tcgctgcaggagaaacgtcaaccat

SEQ ID NO: 4950706 - DNA, 25 bp, Homo sapien
ggagcacagacagatacggtatcgc

SEQ ID NO: 4950707 - DNA, 25 bp, Homo sapien
taagagtgacacatgcccatttcct

SEQ ID NO: 4950708 - DNA, 25 bp, Homo sapien
cgtcaaccatcaggaaataagagtg

SEQ ID NO: 4950709 - DNA, 25 bp, Homo sapien
atgtctggcgccatgtaccgccgct

SEQ ID NO: 4950710 - DNA, 25 bp, Homo sapien
gaggcttcctcggcatttggatgtc

SEQ ID NO: 4950711 - DNA, 25 bp, Homo sapien
tctggcgccatgtaccgccgcttac

SEQ ID NO: 4950712 - DNA, 25 bp, Homo sapien
agaggcttcctcggcatttggatgt

SEQ ID NO: 4950713 - DNA, 25 bp, Homo sapien
catgactttaggctgcttgttcgtt

SEQ ID NO: 4950714 - DNA, 25 bp, Homo sapien
tgcttgttcgttcaggttcaatacg

SEQ ID NO: 4950715 - DNA, 25 bp, Homo sapien
aggctgcttgttcgttcaggttcaa

SEQ ID NO: 4950716 - DNA, 25 bp, Homo sapien
gactttaggctgcttgttcgttcag

SEQ ID NO: 4950717 - DNA, 25 bp, Homo sapien
actccttccggtctgggctgactca

SEQ ID NO: 4950718 - DNA, 25 bp, Homo sapien
accaaggcaacatttactcgctcgc

SEQ ID NO: 4950719 - DNA, 25 bp, Homo sapien
tcacagtcggcgtgggtgggtaaac

SEQ ID NO: 4950720 - DNA, 25 bp, Homo sapien
ttactcgctcgctgccgttcttggg

SEQ ID NO: 4950721 - DNA, 25 bp, Homo sapien
ctgcctggacactcagaataacaac

SEQ ID NO: 4950722 - DNA, 25 bp, Homo sapien
ataacaacagcagatgccaagcccc

SEQ ID NO: 4950723 - DNA, 25 bp, Homo sapien
ctcagaataacaacagcagatgcca

SEQ ID NO: 4950724 - DNA, 25 bp, Homo sapien
ttttatctgcctggacactcagaat

SEQ ID NO: 4950725 - DNA, 25 bp, Homo sapien
cctggagcccatgacctcagctttt

SEQ ID NO: 4950726 - DNA, 25 bp, Homo sapien
gatgacgggcgcctttcagttttcc

SEQ ID NO: 4950727 - DNA, 25 bp, Homo sapien
tagcccaactcctggcagaagacga

SEQ ID NO: 4950728 - DNA, 25 bp, Homo sapien
gattctcccaatgaataacgccagg

SEQ ID NO: 4950729 - DNA, 25 bp, Homo sapien
caacaggagagcccatctcccctcc

SEQ ID NO: 4950730 - DNA, 25 bp, Homo sapien
tccaagccactcttcctcacgggac

SEQ ID NO: 4950731 - DNA, 25 bp, Homo sapien
tctgtttctaatacctgcaacagga

SEQ ID NO: 4950732 - DNA, 25 bp, Homo sapien
catgcctggttatttgcaattcctc

SEQ ID NO: 4950733 - DNA, 25 bp, Homo sapien
ccttccccaagtgtccattacaaca

SEQ ID NO: 4950734 - DNA, 25 bp, Homo sapien
tgctgcaaaagcgtcagagtcttgg

SEQ ID NO: 4950735 - DNA, 25 bp, Homo sapien
caaaagcgtcagagtcttggcatct

SEQ ID NO: 4950736 - DNA, 25 bp, Homo sapien
tctccagagtccctggggagtttcc

SEQ ID NO: 4950737 - DNA, 25 bp, Homo sapien
ggatgagaggccaggtagaaacttc

SEQ ID NO: 4950738 - DNA, 25 bp, Homo sapien
aggccaggtagaaacttcaggagca

SEQ ID NO: 4950739 - DNA, 25 bp, Homo sapien
ggagcattccactttgaagtgtgag

SEQ ID NO: 4950740 - DNA, 25 bp, Homo sapien
gagaggccaggtagaaacttcagga

SEQ ID NO: 4950741 - DNA, 25 bp, Homo sapien
cggcaggccctagatatatgttaaa

SEQ ID NO: 4950742 - DNA, 25 bp, Homo sapien
tggccaaggccagggttattctcct

SEQ ID NO: 4950743 - DNA, 25 bp, Homo sapien
tccatccccgaatccataagttggg

SEQ ID NO: 4950744 - DNA, 25 bp, Homo sapien
tctgcagggacgtaagctccacaag

SEQ ID NO: 4950745 - DNA, 25 bp, Homo sapien
tctcctctgggtcggctatctaggc

SEQ ID NO: 4950746 - DNA, 25 bp, Homo sapien
cctgtgacactgtcttggcgggaag

SEQ ID NO: 4950747 - DNA, 25 bp, Homo sapien
tacacgggctggtcagtacgctgct

SEQ ID NO: 4950748 - DNA, 25 bp, Homo sapien
tgttgcctgatgctcatggtcttgg

SEQ ID NO: 4950749 - DNA, 25 bp, Homo sapien
ggaatgagccatggatatatacgcc

SEQ ID NO: 4950750 - DNA, 25 bp, Homo sapien
agtagaaactccctcatttgaagga

SEQ ID NO: 4950751 - DNA, 25 bp, Homo sapien
gttacccagctatgccgctcctaga

SEQ ID NO: 4950752 - DNA, 25 bp, Homo sapien
tatacgccaacatcgatgacctggg

SEQ ID NO: 4950753 - DNA, 25 bp, Homo sapien
agaatctggccaaagtggctgcctc

SEQ ID NO: 4950754 - DNA, 25 bp, Homo sapien
ggacagaacagacaacttccttttc

SEQ ID NO: 4950755 - DNA, 25 bp, Homo sapien
ggaaatacatggctgtggacagaac

SEQ ID NO: 4950756 - DNA, 25 bp, Homo sapien
aatctggccaaagtggctgcctcca

SEQ ID NO: 4950757 - DNA, 25 bp, Homo sapien
agctgccaggtggaaacggaatgaa

SEQ ID NO: 4950758 - DNA, 25 bp, Homo sapien
ggtctgcaggtccaacggccactcc

SEQ ID NO: 4950759 - DNA, 25 bp, Homo sapien
gccactccctgcgagtccttgggtg

SEQ ID NO: 4950760 - DNA, 25 bp, Homo sapien
tgccaggtggaaacggaatgaactg

SEQ ID NO: 4950761 - DNA, 25 bp, Homo sapien
cgtaggagcatgtggacatctgagg

SEQ ID NO: 4950762 - DNA, 25 bp, Homo sapien
ggcggtcatttgcatcgtgcgcagc

SEQ ID NO: 4950763 - DNA, 25 bp, Homo sapien
caattcctctgtgcggcagcaccag

SEQ ID NO: 4950764 - DNA, 25 bp, Homo sapien
tgcatcgtgcgcagctgcagagcaa

SEQ ID NO: 4950765 - DNA, 25 bp, Homo sapien
tgagagatagaattagtctgtggtg

SEQ ID NO: 4950766 - DNA, 25 bp, Homo sapien
agtttcagacacgaccagttaaggg

SEQ ID NO: 4950767 - DNA, 25 bp, Homo sapien
tagagcctgcaattcagtttcagac

SEQ ID NO: 4950768 - DNA, 25 bp, Homo sapien
gggccctagtccacattgctcacac

SEQ ID NO: 4950769 - DNA, 25 bp, Homo sapien
gaatatcaactagaccactccacgg

SEQ ID NO: 4950770 - DNA, 25 bp, Homo sapien
ctggaaagagctggcccctaatgaa

SEQ ID NO: 4950771 - DNA, 25 bp, Homo sapien
tcacggcgtgcatagcctggaaaga

SEQ ID NO: 4950772 - DNA, 25 bp, Homo sapien
gacactctgtaatgcgggcaaggcc

SEQ ID NO: 4950773 - DNA, 25 bp, Homo sapien
aaggcccacgccacctttatctgtg

SEQ ID NO: 4950774 - DNA, 25 bp, Homo sapien
tatgaggtagattccttagagacta

SEQ ID NO: 4950775 - DNA, 25 bp, Homo sapien
gactagtggccgagctcttatcccg

SEQ ID NO: 4950776 - DNA, 25 bp, Homo sapien
tgtcaatctgctaagagcacccctg

SEQ ID NO: 4950777 - DNA, 25 bp, Homo sapien
gatttgctgctttagatttatgagg

SEQ ID NO: 4950778 - DNA, 25 bp, Homo sapien
catgcctctgctaagctcttctctg

SEQ ID NO: 4950779 - DNA, 25 bp, Homo sapien
caactcagtatgtgtaccgggctgc

SEQ ID NO: 4950780 - DNA, 25 bp, Homo sapien
attccaactcagtatgtgtaccggg

SEQ ID NO: 4950781 - DNA, 25 bp, Homo sapien
tcagtatgtgtaccgggctgcaccc

SEQ ID NO: 4950782 - DNA, 25 bp, Homo sapien
gcctttctcacactgtgctctagtt

SEQ ID NO: 4950783 - DNA, 25 bp, Homo sapien
ctgtgctctagttcattcatggaca

SEQ ID NO: 4950784 - DNA, 25 bp, Homo sapien
ctggaggtcctctccagcacccttc

SEQ ID NO: 4950785 - DNA, 25 bp, Homo sapien
tctccagcacccttctccgtgcagc

SEQ ID NO: 4950786 - DNA, 25 bp, Homo sapien
ctatttctatatcagatcgtgagat

SEQ ID NO: 4950787 - DNA, 25 bp, Homo sapien
tacgcaggctccattcacgagacgt

SEQ ID NO: 4950788 - DNA, 25 bp, Homo sapien
acgagacgtgccctatacaagtgca

SEQ ID NO: 4950789 - DNA, 25 bp, Homo sapien
tatcacggagtgacatcatagccgc

SEQ ID NO: 4950790 - DNA, 25 bp, Homo sapien
ggaacagactactgtcacatgcagc

SEQ ID NO: 4950791 - DNA, 25 bp, Homo sapien
ttcattaattccctcattttcctca

SEQ ID NO: 4950792 - DNA, 25 bp, Homo sapien
gttcattaattccctcattttcctc

SEQ ID NO: 4950793 - DNA, 25 bp, Homo sapien
cagaaaacagtattatgactgctca

SEQ ID NO: 4950794 - DNA, 25 bp, Homo sapien
gaaatgatttaacaccatgtgaccc

SEQ ID NO: 4950795 - DNA, 25 bp, Homo sapien
tgactgctcagtaaaatcagcgaaa

SEQ ID NO: 4950796 - DNA, 25 bp, Homo sapien
cacccctacatgtttactcaggaga

SEQ ID NO: 4950797 - DNA, 25 bp, Homo sapien
gacggatgctcatagtgctccctgt

SEQ ID NO: 4950798 - DNA, 25 bp, Homo sapien
ggacacaggacggatgctcatagtg

SEQ ID NO: 4950799 - DNA, 25 bp, Homo sapien
tgatgctgcaggacacaggacggat

SEQ ID NO: 4950800 - DNA, 25 bp, Homo sapien
tgctgcaggacacaggacggatgct

SEQ ID NO: 4950801 - DNA, 25 bp, Homo sapien
gcatttacaaattagcatggtttga

SEQ ID NO: 4950802 - DNA, 25 bp, Homo sapien
tagcatggtttgaattaacagaaaa

SEQ ID NO: 4950803 - DNA, 25 bp, Homo sapien
gcatctaagaaagcgaaagaggccg

SEQ ID NO: 4950804 - DNA, 25 bp, Homo sapien
gagtagtatctggttagcatctaag

SEQ ID NO: 4950805 - DNA, 25 bp, Homo sapien
ccatctttctggttgtcaggccaaa

SEQ ID NO: 4950806 - DNA, 25 bp, Homo sapien
gcacacttatccctatagaaaagca

SEQ ID NO: 4950807 - DNA, 25 bp, Homo sapien
taagcttagtgttatactctgagat

SEQ ID NO: 4950808 - DNA, 25 bp, Homo sapien
cagatctagaaaatgggcctggcac

SEQ ID NO: 4950809 - DNA, 25 bp, Homo sapien
ctgtcaaagtgttaagatgacaggt

SEQ ID NO: 4950810 - DNA, 25 bp, Homo sapien
aacaaagaagcagaaaggatctact

SEQ ID NO: 4950811 - DNA, 25 bp, Homo sapien
gtacaatggcttgatgtgggctcac

SEQ ID NO: 4950812 - DNA, 25 bp, Homo sapien
aaagaagcagaaaggatctactcag

SEQ ID NO: 4950813 - DNA, 25 bp, Homo sapien
cttgcagaaagtaatacttgcagca

SEQ ID NO: 4950814 - DNA, 25 bp, Homo sapien
ttgtagcaagtaattctgaaagcct

SEQ ID NO: 4950815 - DNA, 25 bp, Homo sapien
caagtaattctgaaagccttgcaga

SEQ ID NO: 4950816 - DNA, 25 bp, Homo sapien
cagaaagtaatacttgcagcaagta

SEQ ID NO: 4950817 - DNA, 25 bp, Homo sapien
catgggagtcgcacccttagcagat

SEQ ID NO: 4950818 - DNA, 25 bp, Homo sapien
aggaacagcgatgccaagcccagtt

SEQ ID NO: 4950819 - DNA, 25 bp, Homo sapien
ggaatgccggcttccattcgaagga

SEQ ID NO: 4950820 - DNA, 25 bp, Homo sapien
cagttttggatacatagggagtggg

SEQ ID NO: 4950821 - DNA, 25 bp, Homo sapien
actggtgaaggtggataattactat

SEQ ID NO: 4950822 - DNA, 25 bp, Homo sapien
ctggtgaaggtggataattactatt

SEQ ID NO: 4950823 - DNA, 25 bp, Homo sapien
tgcacagctctgaaagtaagatctg

SEQ ID NO: 4950824 - DNA, 25 bp, Homo sapien
ctgagatgagggattccccatgaac

SEQ ID NO: 4950825 - DNA, 25 bp, Homo sapien
actccctagatctttttgctccagc

SEQ ID NO: 4950826 - DNA, 25 bp, Homo sapien
gaagacggtcttccccatgtctgct

SEQ ID NO: 4950827 - DNA, 25 bp, Homo sapien
tcgattgtaaccagtcccactgtgg

SEQ ID NO: 4950828 - DNA, 25 bp, Homo sapien
taacggtggatacatctaattacac

SEQ ID NO: 4950829 - DNA, 25 bp, Homo sapien
tagtgtgaactactggacttcgtgt

SEQ ID NO: 4950830 - DNA, 25 bp, Homo sapien
taagagtgaaccctacctagtgtga

SEQ ID NO: 4950831 - DNA, 25 bp, Homo sapien
taataactgtgggacaattcacccc

SEQ ID NO: 4950832 - DNA, 25 bp, Homo sapien
catgccagtgggacttcaaaggcct

SEQ ID NO: 4950833 - DNA, 25 bp, Homo sapien
tagccggaaagtaagcactgaaatc

SEQ ID NO: 4950834 - DNA, 25 bp, Homo sapien
tgtaaattaacagtggctccttgca

SEQ ID NO: 4950835 - DNA, 25 bp, Homo sapien
gaccaattgtttaactccattcttc

SEQ ID NO: 4950836 - DNA, 25 bp, Homo sapien
tctgagggaaagaccaattgtttaa

SEQ ID NO: 4950837 - DNA, 25 bp, Homo sapien
taactccattcttcattctcaacat

SEQ ID NO: 4950838 - DNA, 25 bp, Homo sapien
gggatctgagggaaagaccaattgt

SEQ ID NO: 4950839 - DNA, 25 bp, Homo sapien
ttcagttgaatctcccaggtgctta

SEQ ID NO: 4950840 - DNA, 25 bp, Homo sapien
caggtgcttattccttgctgcaagg

SEQ ID NO: 4950841 - DNA, 25 bp, Homo sapien
ggaagaatcctctttctcgcctgaa

SEQ ID NO: 4950842 - DNA, 25 bp, Homo sapien
gaactcgagtttttccatggcccca

SEQ ID NO: 4950843 - DNA, 25 bp, Homo sapien
cactcagattctaaagaaatctttg

SEQ ID NO: 4950844 - DNA, 25 bp, Homo sapien
tcactcagattctaaagaaatcttt

SEQ ID NO: 4950845 - DNA, 25 bp, Homo sapien
gcaaatatttgtctatgaccaaaga

SEQ ID NO: 4950846 - DNA, 25 bp, Homo sapien
aagcaaatatttgtctatgaccaaa

SEQ ID NO: 4950847 - DNA, 25 bp, Homo sapien
agcaaatatttgtctatgaccaaag

SEQ ID NO: 4950848 - DNA, 25 bp, Homo sapien
aaaagcaaatatttgtctatgacca

SEQ ID NO: 4950849 - DNA, 25 bp, Homo sapien
ctcgagaggatggttctaggataca

SEQ ID NO: 4950850 - DNA, 25 bp, Homo sapien
cacgcagcgcgggaagatttttgtt

SEQ ID NO: 4950851 - DNA, 25 bp, Homo sapien
tacaacggtgtggaactcgagagga

SEQ ID NO: 4950852 - DNA, 25 bp, Homo sapien
tacaaataaaaacaaccacgcagcg

SEQ ID NO: 4950853 - DNA, 25 bp, Homo sapien
gagcaggtgttctgtcagcttaaca

SEQ ID NO: 4950854 - DNA, 25 bp, Homo sapien
cagcacgcttagacatggctctgca

SEQ ID NO: 4950855 - DNA, 25 bp, Homo sapien
tctactccgacatagtgaaagtgac

SEQ ID NO: 4950856 - DNA, 25 bp, Homo sapien
gcttaacaataacttgattatgagt

SEQ ID NO: 4950857 - DNA, 25 bp, Homo sapien
acgggcagctcctgtgcagtaccag

SEQ ID NO: 4950858 - DNA, 25 bp, Homo sapien
gcagctcctgtgcagtaccagactg

SEQ ID NO: 4950859 - DNA, 25 bp, Homo sapien
tgaccatgacctccgctgacctctg

SEQ ID NO: 4950860 - DNA, 25 bp, Homo sapien
tcctgtgcagtaccagactgtctgc

SEQ ID NO: 4950861 - DNA, 25 bp, Homo sapien
tcaaagcatctctcagcaaagaaat

SEQ ID NO: 4950862 - DNA, 25 bp, Homo sapien
gatatgcactttaatggatgctgtc

SEQ ID NO: 4950863 - DNA, 25 bp, Homo sapien
tttggagtcagcattcatatagtct

SEQ ID NO: 4950864 - DNA, 25 bp, Homo sapien
aatgactgatgatttgaatccttcc

SEQ ID NO: 4950865 - DNA, 25 bp, Homo sapien
aaggtaaggactactgccaggcatg

SEQ ID NO: 4950866 - DNA, 25 bp, Homo sapien
gtaaggactactgccaggcatggtg

SEQ ID NO: 4950867 - DNA, 25 bp, Homo sapien
aaaaggtaaggactactgccaggca

SEQ ID NO: 4950868 - DNA, 25 bp, Homo sapien
ggtaaggactactgccaggcatggt

SEQ ID NO: 4950869 - DNA, 25 bp, Homo sapien
tgggaagtttttagagatcctcata

SEQ ID NO: 4950870 - DNA, 25 bp, Homo sapien
gatcctcatatacaatgaatttcct

SEQ ID NO: 4950871 - DNA, 25 bp, Homo sapien
ttggaaaggctgattcgtttgggaa

SEQ ID NO: 4950872 - DNA, 25 bp, Homo sapien
ttttagagatcctcatatacaatga

SEQ ID NO: 4950873 - DNA, 25 bp, Homo sapien
ctttccacaaagactggaaacacaa

SEQ ID NO: 4950874 - DNA, 25 bp, Homo sapien
ccacaaagactggaaacacaaagca

SEQ ID NO: 4950875 - DNA, 25 bp, Homo sapien
tcaccttcggaaatattggtattca

SEQ ID NO: 4950876 - DNA, 25 bp, Homo sapien
ccagctgcattcttgttgtccctct

SEQ ID NO: 4950877 - DNA, 25 bp, Homo sapien
cctgatactattaccagctgcattc

SEQ ID NO: 4950878 - DNA, 25 bp, Homo sapien
ctagatccagggcaacggaaagatg

SEQ ID NO: 4950879 - DNA, 25 bp, Homo sapien
gagtgggacgcagtcttccatttca

SEQ ID NO: 4950880 - DNA, 25 bp, Homo sapien
agtgggacgcagtcttccatttcat

SEQ ID NO: 4950881 - DNA, 25 bp, Homo sapien
ggacgcagtcttccatttcatcacc

SEQ ID NO: 4950882 - DNA, 25 bp, Homo sapien
tgggacgcagtcttccatttcatca

SEQ ID NO: 4950883 - DNA, 25 bp, Homo sapien
tgtgtaaactatgacctttggctgg

SEQ ID NO: 4950884 - DNA, 25 bp, Homo sapien
tgacgttggtgaagctacgcatgtg

SEQ ID NO: 4950885 - DNA, 25 bp, Homo sapien
gaggaaacgcccctcaaagatttca

SEQ ID NO: 4950886 - DNA, 25 bp, Homo sapien
gtctataaaactcgaaactgccagg

SEQ ID NO: 4950887 - DNA, 25 bp, Homo sapien
catctacccctttgagacgtgtcta

SEQ ID NO: 4950888 - DNA, 25 bp, Homo sapien
taagaggctaacatcggacactgtc

SEQ ID NO: 4950889 - DNA, 25 bp, Homo sapien
tgtgacactggacacttgaaactca

SEQ ID NO: 4950890 - DNA, 25 bp, Homo sapien
ctttagccaacgatcagtaagaggc

SEQ ID NO: 4950891 - DNA, 25 bp, Homo sapien
tccttccaccaaatgtgggctacat

SEQ ID NO: 4950892 - DNA, 25 bp, Homo sapien
aatgtgggctacatcgacaagaggg

SEQ ID NO: 4950893 - DNA, 25 bp, Homo sapien
aatttccttccaccaaatgtgggct

SEQ ID NO: 4950894 - DNA, 25 bp, Homo sapien
accaaatgtgggctacatcgacaag

SEQ ID NO: 4950895 - DNA, 25 bp, Homo sapien
ggagaggatgacacttgtgactgca

SEQ ID NO: 4950896 - DNA, 25 bp, Homo sapien
cacttgtgactgcatttcataaggc

SEQ ID NO: 4950897 - DNA, 25 bp, Homo sapien
ggatgacacttgtgactgcatttca

SEQ ID NO: 4950898 - DNA, 25 bp, Homo sapien
gcatttcataaggctcaggtactta

SEQ ID NO: 4950899 - DNA, 25 bp, Homo sapien
agctttcctggagaacccgtgaagt

SEQ ID NO: 4950900 - DNA, 25 bp, Homo sapien
acatatcttacagcataccacagaa

SEQ ID NO: 4950901 - DNA, 25 bp, Homo sapien
aacatatcttacagcataccacaga

SEQ ID NO: 4950902 - DNA, 25 bp, Homo sapien
aaacatatcttacagcataccacag

SEQ ID NO: 4950903 - DNA, 25 bp, Homo sapien
gaaaagcatgtggattgggcgatcc

SEQ ID NO: 4950904 - DNA, 25 bp, Homo sapien
caggaactttccctctataggcaaa

SEQ ID NO: 4950905 - DNA, 25 bp, Homo sapien
tgatgcatggctagcaatggacagg

SEQ ID NO: 4950906 - DNA, 25 bp, Homo sapien
tgggcgatcctctcttaaggcactt

SEQ ID NO: 4950907 - DNA, 25 bp, Homo sapien
taagcagcaaccgaatgacatgagc

SEQ ID NO: 4950908 - DNA, 25 bp, Homo sapien
caacttgtcccgaaggcgtcgtaag

SEQ ID NO: 4950909 - DNA, 25 bp, Homo sapien
tagcttgccgctctcatgcaggtag

SEQ ID NO: 4950910 - DNA, 25 bp, Homo sapien
tcttgtccgaaacgccatagtaggc

SEQ ID NO: 4950911 - DNA, 25 bp, Homo sapien
taagtcatacacgatgaaccgcagg

SEQ ID NO: 4950912 - DNA, 25 bp, Homo sapien
agttgaccaccagcacgtatagggc

SEQ ID NO: 4950913 - DNA, 25 bp, Homo sapien
gaggcagtggcgcagcaaagtcttt

SEQ ID NO: 4950914 - DNA, 25 bp, Homo sapien
ggttcagtgcctcaatgtccccgag

SEQ ID NO: 4950915 - DNA, 25 bp, Homo sapien
ggtcttcaggttgccactgtccatc

SEQ ID NO: 4950916 - DNA, 25 bp, Homo sapien
gcggcggtaagcgtgagctggcgca

SEQ ID NO: 4950917 - DNA, 25 bp, Homo sapien
cacagcctcgcggtcttcaggttgc

SEQ ID NO: 4950918 - DNA, 25 bp, Homo sapien
gctggcgcaggttgctccgcagctt

SEQ ID NO: 4950919 - DNA, 25 bp, Homo sapien
gggagcccgcagctacatgccgcgc

SEQ ID NO: 4950920 - DNA, 25 bp, Homo sapien
cgagcgcgtggagagcagcttgcat

SEQ ID NO: 4950921 - DNA, 25 bp, Homo sapien
ggtcctagcgcagccagcggccgag

SEQ ID NO: 4950922 - DNA, 25 bp, Homo sapien
ccgggggacgccgagcgcgtggaga

SEQ ID NO: 4950923 - DNA, 25 bp, Homo sapien
ccgcggccggcagcggcgtcgcctc

SEQ ID NO: 4950924 - DNA, 25 bp, Homo sapien
gtcgcctcctcgagctcctggggga

SEQ ID NO: 4950925 - DNA, 25 bp, Homo sapien
ctgggggagggcggcgctcggcccg

SEQ ID NO: 4950926 - DNA, 25 bp, Homo sapien
cggtcccgcggccggcagcggcgtc

SEQ ID NO: 4950927 - DNA, 25 bp, Homo sapien
tcgccttgcatccacgccgtagtgg

SEQ ID NO: 4950928 - DNA, 25 bp, Homo sapien
tgcatccacgccgtagtggaactgg

SEQ ID NO: 4950929 - DNA, 25 bp, Homo sapien
cgtagtggaactggcacaactcggg

SEQ ID NO: 4950930 - DNA, 25 bp, Homo sapien
cacgccgtagtggaactggcacaac

SEQ ID NO: 4950931 - DNA, 25 bp, Homo sapien
caggtggcccgccagcctaaaggag

SEQ ID NO: 4950932 - DNA, 25 bp, Homo sapien
tctgagttgtccttgaactcattct

SEQ ID NO: 4950933 - DNA, 25 bp, Homo sapien
caataaatctgcatattgtcactat

SEQ ID NO: 4950934 - DNA, 25 bp, Homo sapien
gggtatcccgtttatcttcacaaca

SEQ ID NO: 4950935 - DNA, 25 bp, Homo sapien
cagttggttaaaggcatcacttgac

SEQ ID NO: 4950936 - DNA, 25 bp, Homo sapien
tggttaaaggcatcacttgacccac

SEQ ID NO: 4950937 - DNA, 25 bp, Homo sapien
cgttcagttggttaaaggcatcact

SEQ ID NO: 4950938 - DNA, 25 bp, Homo sapien
aactgcgttcagttggttaaaggca

SEQ ID NO: 4950939 - DNA, 25 bp, Homo sapien
tgcagtaacgtgagaagtgtgtgtt

SEQ ID NO: 4950940 - DNA, 25 bp, Homo sapien
aatccaccccagtgatggttatcag

SEQ ID NO: 4950941 - DNA, 25 bp, Homo sapien
ggctgcaggtagtacatgctgtaac

SEQ ID NO: 4950942 - DNA, 25 bp, Homo sapien
gggacccatatttggtgcagtaacg

SEQ ID NO: 4950943 - DNA, 25 bp, Homo sapien
ctgttcttgagccagaccccaaatt

SEQ ID NO: 4950944 - DNA, 25 bp, Homo sapien
tgttcttgagccagaccccaaattc

SEQ ID NO: 4950945 - DNA, 25 bp, Homo sapien
ttcttgagccagaccccaaattctc

SEQ ID NO: 4950946 - DNA, 25 bp, Homo sapien
acactgttcttgagccagaccccaa

SEQ ID NO: 4950947 - DNA, 25 bp, Homo sapien
cgacccagggatattgggccctcct

SEQ ID NO: 4950948 - DNA, 25 bp, Homo sapien
agtgcctttgaattggtttctcttc

SEQ ID NO: 4950949 - DNA, 25 bp, Homo sapien
gagtgcctttgaattggtttctctt

SEQ ID NO: 4950950 - DNA, 25 bp, Homo sapien
tctcctgcttttgctagagtgcctt

SEQ ID NO: 4950951 - DNA, 25 bp, Homo sapien
ccaagttgatacaaatatgctacca

SEQ ID NO: 4950952 - DNA, 25 bp, Homo sapien
ccacatgtgagaatttgaggtatta

SEQ ID NO: 4950953 - DNA, 25 bp, Homo sapien
taaggaggtacatcgggtgcaatgg

SEQ ID NO: 4950954 - DNA, 25 bp, Homo sapien
tggaagatggtgcttgatgccttgt

SEQ ID NO: 4950955 - DNA, 25 bp, Homo sapien
aggcatgtgctaccattcttggcta

SEQ ID NO: 4950956 - DNA, 25 bp, Homo sapien
caggcatgtgctaccattcttggct

SEQ ID NO: 4950957 - DNA, 25 bp, Homo sapien
ggcatgtgctaccattcttggctaa

SEQ ID NO: 4950958 - DNA, 25 bp, Homo sapien
acaggcatgtgctaccattcttggc

SEQ ID NO: 4950959 - DNA, 25 bp, Homo sapien
gaagttaacgtcactcaactttaca

SEQ ID NO: 4950960 - DNA, 25 bp, Homo sapien
ttgggaagatgaagactctctggtg

SEQ ID NO: 4950961 - DNA, 25 bp, Homo sapien
taacaatggtaaatcttacgttgtg

SEQ ID NO: 4950962 - DNA, 25 bp, Homo sapien
catgacaatatgaatgaagttaacg

SEQ ID NO: 4950963 - DNA, 25 bp, Homo sapien
ccatagttcaacctttgcatctcac

SEQ ID NO: 4950964 - DNA, 25 bp, Homo sapien
tctccatagttcaacctttgcatct

SEQ ID NO: 4950965 - DNA, 25 bp, Homo sapien
tccatagttcaacctttgcatctca

SEQ ID NO: 4950966 - DNA, 25 bp, Homo sapien
cctctccatagttcaacctttgcat

SEQ ID NO: 4950967 - DNA, 25 bp, Homo sapien
ggtggtggtgttggatccttgtcac

SEQ ID NO: 4950968 - DNA, 25 bp, Homo sapien
ggatccttgtcactagatgacttaa

SEQ ID NO: 4950969 - DNA, 25 bp, Homo sapien
gcttccagaaccctgattgcctgaa

SEQ ID NO: 4950970 - DNA, 25 bp, Homo sapien
taagctcctttaaagtgttgctttc

SEQ ID NO: 4950971 - DNA, 25 bp, Homo sapien
tgttgggacaacatttgctatacgt

SEQ ID NO: 4950972 - DNA, 25 bp, Homo sapien
ctgttgggacaacatttgctatacg

SEQ ID NO: 4950973 - DNA, 25 bp, Homo sapien
gttgggacaacatttgctatacgtt

SEQ ID NO: 4950974 - DNA, 25 bp, Homo sapien
tttgacacaaagctcatttccttcc

SEQ ID NO: 4950975 - DNA, 25 bp, Homo sapien
ttttgacacaaagctcatttccttc

SEQ ID NO: 4950976 - DNA, 25 bp, Homo sapien
cacaaagctcatttccttcctttgc

SEQ ID NO: 4950977 - DNA, 25 bp, Homo sapien
aaagctcatttccttcctttgccac

SEQ ID NO: 4950978 - DNA, 25 bp, Homo sapien
ctaacagaagtaaggggagaagtct

SEQ ID NO: 4950979 - DNA, 25 bp, Homo sapien
catcttttttcagcctccgcagcag

SEQ ID NO: 4950980 - DNA, 25 bp, Homo sapien
ggagaagtcttagcaacttcattag

SEQ ID NO: 4950981 - DNA, 25 bp, Homo sapien
gccagccatcactaacagaagtaag

SEQ ID NO: 4950982 - DNA, 25 bp, Homo sapien
ccatagcggccgtggttccgcattt

SEQ ID NO: 4950983 - DNA, 25 bp, Homo sapien
ccgaaaactccatccaaagctgctg

SEQ ID NO: 4950984 - DNA, 25 bp, Homo sapien
gaagcccgaaaactccatccaaagc

SEQ ID NO: 4950985 - DNA, 25 bp, Homo sapien
tgccaggaagcccgaaaactccatc

SEQ ID NO: 4950986 - DNA, 25 bp, Homo sapien
aaactccatccaaagctgctgagac

SEQ ID NO: 4950987 - DNA, 25 bp, Homo sapien
gctgagttaacaccccttagtgtca

SEQ ID NO: 4950988 - DNA, 25 bp, Homo sapien
gggtgagcacggcacttggcaaaca

SEQ ID NO: 4950989 - DNA, 25 bp, Homo sapien
gcacttggcaaacacgcagcatgta

SEQ ID NO: 4950990 - DNA, 25 bp, Homo sapien
gcaaacacgcagcatgtattatgtg

SEQ ID NO: 4950991 - DNA, 25 bp, Homo sapien
tccccttcgggtcctcactgttcca

SEQ ID NO: 4950992 - DNA, 25 bp, Homo sapien
ccccttcgggtcctcactgttccag

SEQ ID NO: 4950993 - DNA, 25 bp, Homo sapien
cagacccagagtgttgcctggccat

SEQ ID NO: 4950994 - DNA, 25 bp, Homo sapien
ctgtatatatccaccagagactgag

SEQ ID NO: 4950995 - DNA, 25 bp, Homo sapien
tgactcacattcaaacctgcgttga

SEQ ID NO: 4950996 - DNA, 25 bp, Homo sapien
gaaccttcagtgtaaatttcattgg

SEQ ID NO: 4950997 - DNA, 25 bp, Homo sapien
gccaccatgacgaaccttcagtgta

SEQ ID NO: 4950998 - DNA, 25 bp, Homo sapien
gaaaatgtagcttggatctccccta

SEQ ID NO: 4950999 - DNA, 25 bp, Homo sapien
gctatagggacactttcggacctgt

SEQ ID NO: 4951000 - DNA, 25 bp, Homo sapien
tagtctcttgcggttatgaggcaga

SEQ ID NO: 4951001 - DNA, 25 bp, Homo sapien
agactaacaaccttggccaactggg

SEQ ID NO: 4951002 - DNA, 25 bp, Homo sapien
atctgtttacaacctgactttatat

SEQ ID NO: 4951003 - DNA, 25 bp, Homo sapien
tatctgtttacaacctgactttata

SEQ ID NO: 4951004 - DNA, 25 bp, Homo sapien
aacaatcaagatgagcctaatagga

SEQ ID NO: 4951005 - DNA, 25 bp, Homo sapien
tcaaagcatgctgtcaacttaccat

SEQ ID NO: 4951006 - DNA, 25 bp, Homo sapien
aagtaagcttagcataatactcagc

SEQ ID NO: 4951007 - DNA, 25 bp, Homo sapien
tgtcaacttaccatgctaagtctgg

SEQ ID NO: 4951008 - DNA, 25 bp, Homo sapien
tgtcctcccctccaatttgatttgg

SEQ ID NO: 4951009 - DNA, 25 bp, Homo sapien
gaaacacgtaagagatggatgtcca

SEQ ID NO: 4951010 - DNA, 25 bp, Homo sapien
gctgatgagatgatactaaacattg

SEQ ID NO: 4951011 - DNA, 25 bp, Homo sapien
caccttgacctcctacagacgtgag

SEQ ID NO: 4951012 - DNA, 25 bp, Homo sapien
tggagctgtgatccccagctccgct

SEQ ID NO: 4951013 - DNA, 25 bp, Homo sapien
agacactgtctctgcggatttggga

SEQ ID NO: 4951014 - DNA, 25 bp, Homo sapien
tgcctatgtgctatgggttcctgga

SEQ ID NO: 4951015 - DNA, 25 bp, Homo sapien
ttcctggagcttcgaggagacatcg

SEQ ID NO: 4951016 - DNA, 25 bp, Homo sapien
ttctctacacgtttagaggaacttc

SEQ ID NO: 4951017 - DNA, 25 bp, Homo sapien
atgctcagtaggctggtttgatcac

SEQ ID NO: 4951018 - DNA, 25 bp, Homo sapien
cttttgttctttgaggtgatgatga

SEQ ID NO: 4951019 - DNA, 25 bp, Homo sapien
gtaaagtcagaagtaaggcagagga

SEQ ID NO: 4951020 - DNA, 25 bp, Homo sapien
gatgatgaacttggtcacaccacaa

SEQ ID NO: 4951021 - DNA, 25 bp, Homo sapien
ttcccactagcaggggcatctcttc

SEQ ID NO: 4951022 - DNA, 25 bp, Homo sapien
tggggttcccactagcaggggcatc

SEQ ID NO: 4951023 - DNA, 25 bp, Homo sapien
cattttcttcattggggttcccact

SEQ ID NO: 4951024 - DNA, 25 bp, Homo sapien
ttcattggggttcccactagcaggg

SEQ ID NO: 4951025 - DNA, 25 bp, Homo sapien
ctcctttaagtggttggtggtcatc

SEQ ID NO: 4951026 - DNA, 25 bp, Homo sapien
ggtgatcccatgtgttggataagaa

SEQ ID NO: 4951027 - DNA, 25 bp, Homo sapien
gcgggctccccggtgatcccatgtg

SEQ ID NO: 4951028 - DNA, 25 bp, Homo sapien
gatgtctgtgacacagcgggctccc

SEQ ID NO: 4951029 - DNA, 25 bp, Homo sapien
tttggcgtctgaaagaatctggttc

SEQ ID NO: 4951030 - DNA, 25 bp, Homo sapien
aagagaacatttggcgtctgaaaga

SEQ ID NO: 4951031 - DNA, 25 bp, Homo sapien
atttggcgtctgaaagaatctggtt

SEQ ID NO: 4951032 - DNA, 25 bp, Homo sapien
agaaagagaacatttggcgtctgaa

SEQ ID NO: 4951033 - DNA, 25 bp, Homo sapien
actctgtacccctgcggagactgca

SEQ ID NO: 4951034 - DNA, 25 bp, Homo sapien
ccctgcggagactgcagagtgaacg

SEQ ID NO: 4951035 - DNA, 25 bp, Homo sapien
agagtgaacgggctctatcttctct

SEQ ID NO: 4951036 - DNA, 25 bp, Homo sapien
gagactgcagagtgaacgggctcta

SEQ ID NO: 4951037 - DNA, 25 bp, Homo sapien
ggtctgttgatttccagtttcccaa

SEQ ID NO: 4951038 - DNA, 25 bp, Homo sapien
tggctgttttggtctgttgatttcc

SEQ ID NO: 4951039 - DNA, 25 bp, Homo sapien
tcttctggctgttttggtctgttga

SEQ ID NO: 4951040 - DNA, 25 bp, Homo sapien
gctgttttggtctgttgatttccag

SEQ ID NO: 4951041 - DNA, 25 bp, Homo sapien
taggacgggataattgactccttta

SEQ ID NO: 4951042 - DNA, 25 bp, Homo sapien
ctccagataggacgggataattgac

SEQ ID NO: 4951043 - DNA, 25 bp, Homo sapien
cagataggacgggataattgactcc

SEQ ID NO: 4951044 - DNA, 25 bp, Homo sapien
ctttctccagataggacgggataat

SEQ ID NO: 4951045 - DNA, 25 bp, Homo sapien
ccctgtggctcactctatatggccg

SEQ ID NO: 4951046 - DNA, 25 bp, Homo sapien
tatatggccgatgccttcctttaaa

SEQ ID NO: 4951047 - DNA, 25 bp, Homo sapien
gctcactctatatggccgatgcctt

SEQ ID NO: 4951048 - DNA, 25 bp, Homo sapien
ctctatatggccgatgccttccttt

SEQ ID NO: 4951049 - DNA, 25 bp, Homo sapien
atgctggagggtttaaccagggagt

SEQ ID NO: 4951050 - DNA, 25 bp, Homo sapien
acctcattgctcacatgcacgtcat

SEQ ID NO: 4951051 - DNA, 25 bp, Homo sapien
ttggattgtagcatgctggagggtt

SEQ ID NO: 4951052 - DNA, 25 bp, Homo sapien
cacatgcacgtcattgcctttggat

SEQ ID NO: 4951053 - DNA, 25 bp, Homo sapien
gacccaattatgcagaaactccact

SEQ ID NO: 4951054 - DNA, 25 bp, Homo sapien
cttctccttgtaagcaaaccttatc

SEQ ID NO: 4951055 - DNA, 25 bp, Homo sapien
tgcttgacccaattatgcagaaact

SEQ ID NO: 4951056 - DNA, 25 bp, Homo sapien
taagcaaaccttatccaaggaccca

SEQ ID NO: 4951057 - DNA, 25 bp, Homo sapien
tttcccatggaggtagtcacaggag

SEQ ID NO: 4951058 - DNA, 25 bp, Homo sapien
cactgctggactgtgaaagggctca

SEQ ID NO: 4951059 - DNA, 25 bp, Homo sapien
gaacttggacaacgtcactgctgga

SEQ ID NO: 4951060 - DNA, 25 bp, Homo sapien
ggccaagtaccccagaagcaatgct

SEQ ID NO: 4951061 - DNA, 25 bp, Homo sapien
gaaatgaaatgtccatctctttact

SEQ ID NO: 4951062 - DNA, 25 bp, Homo sapien
gaggcctaagtgatccaaagtcccg

SEQ ID NO: 4951063 - DNA, 25 bp, Homo sapien
caaagtcccgttctatgaaatgaaa

SEQ ID NO: 4951064 - DNA, 25 bp, Homo sapien
acatttcaggcatgctttgagaaga

SEQ ID NO: 4951065 - DNA, 25 bp, Homo sapien
tagaaccactgggagattgtttttc

SEQ ID NO: 4951066 - DNA, 25 bp, Homo sapien
gcaaaatcatatcaccctggcttcc

SEQ ID NO: 4951067 - DNA, 25 bp, Homo sapien
caaagaaatccatgattcaaaggca

SEQ ID NO: 4951068 - DNA, 25 bp, Homo sapien
tgaatatccactatgggtcaagcgt

SEQ ID NO: 4951069 - DNA, 25 bp, Homo sapien
tttatttttactggccctgcacttg

SEQ ID NO: 4951070 - DNA, 25 bp, Homo sapien
tatttactctttcgagtcttgcact

SEQ ID NO: 4951071 - DNA, 25 bp, Homo sapien
gccagagcctgtgcatatttactct

SEQ ID NO: 4951072 - DNA, 25 bp, Homo sapien
tctttcgagtcttgcactttgctct

SEQ ID NO: 4951073 - DNA, 25 bp, Homo sapien
aggccccctgtttaacttgagcttg

SEQ ID NO: 4951074 - DNA, 25 bp, Homo sapien
attgcaggaggccccctgtttaact

SEQ ID NO: 4951075 - DNA, 25 bp, Homo sapien
tgcaggaggccccctgtttaacttg

SEQ ID NO: 4951076 - DNA, 25 bp, Homo sapien
caggaggccccctgtttaacttgag

SEQ ID NO: 4951077 - DNA, 25 bp, Homo sapien
ctgatcccttttctcagtgctgaga

SEQ ID NO: 4951078 - DNA, 25 bp, Homo sapien
aaacaggtgcttgccaatatctcac

SEQ ID NO: 4951079 - DNA, 25 bp, Homo sapien
acttctctgaatacggtaggatctg

SEQ ID NO: 4951080 - DNA, 25 bp, Homo sapien
gaagaagattcaagctcgcgtttcc

SEQ ID NO: 4951081 - DNA, 25 bp, Homo sapien
ccaggccagaagaggggcttggagg

SEQ ID NO: 4951082 - DNA, 25 bp, Homo sapien
tggggaatgccaggccagaagaggg

SEQ ID NO: 4951083 - DNA, 25 bp, Homo sapien
atgccaggccagaagaggggcttgg

SEQ ID NO: 4951084 - DNA, 25 bp, Homo sapien
ctggggaatgccaggccagaagagg

SEQ ID NO: 4951085 - DNA, 25 bp, Homo sapien
tgtgtgtacaaggtcaccctcatgc

SEQ ID NO: 4951086 - DNA, 25 bp, Homo sapien
cacagtgtccgacgccattcatgga

SEQ ID NO: 4951087 - DNA, 25 bp, Homo sapien
aatacgtcttgttctttgccctgga

SEQ ID NO: 4951088 - DNA, 25 bp, Homo sapien
ccaaaaggtcttcttaggtcacgtg

SEQ ID NO: 4951089 - DNA, 25 bp, Homo sapien
tgttcataaaggtcagaggaataag

SEQ ID NO: 4951090 - DNA, 25 bp, Homo sapien
gtcatagtaaagaacgtctaaggac

SEQ ID NO: 4951091 - DNA, 25 bp, Homo sapien
taagccagactttctactgttgggg

SEQ ID NO: 4951092 - DNA, 25 bp, Homo sapien
cataggaatgtcttgttcataaagg

SEQ ID NO: 4951093 - DNA, 25 bp, Homo sapien
tacccatggtagaacctctttcaaa

SEQ ID NO: 4951094 - DNA, 25 bp, Homo sapien
tcctgccgctgctgtgtcaactagg

SEQ ID NO: 4951095 - DNA, 25 bp, Homo sapien
gaaatttgctgcgttcattgacact

SEQ ID NO: 4951096 - DNA, 25 bp, Homo sapien
aattatccaagcctttagcaagtca

SEQ ID NO: 4951097 - DNA, 25 bp, Homo sapien
aactaaccctcctctggtggtgaag

SEQ ID NO: 4951098 - DNA, 25 bp, Homo sapien
tcagatgagaccaagatgttgacca

SEQ ID NO: 4951099 - DNA, 25 bp, Homo sapien
tgaccagaaggcaatccacacagtg

SEQ ID NO: 4951100 - DNA, 25 bp, Homo sapien
aagggagcccgtctgaagcagtgac

SEQ ID NO: 4951101 - DNA, 25 bp, Homo sapien
caacagaggtgaaatggaagagcat

SEQ ID NO: 4951102 - DNA, 25 bp, Homo sapien
gcaacagaggtgaaatggaagagca

SEQ ID NO: 4951103 - DNA, 25 bp, Homo sapien
gcatgggagtaacggtaaataccag

SEQ ID NO: 4951104 - DNA, 25 bp, Homo sapien
taaataccagcgggaggaggcaaca

SEQ ID NO: 4951105 - DNA, 25 bp, Homo sapien
tgcggccaagaattcggcctctctc

SEQ ID NO: 4951106 - DNA, 25 bp, Homo sapien
gtttccttccaccaatttagcctga

SEQ ID NO: 4951107 - DNA, 25 bp, Homo sapien
aaagcctttccgtgccacacagggt

SEQ ID NO: 4951108 - DNA, 25 bp, Homo sapien
tttaatcaggccctcgtagacccac

SEQ ID NO: 4951109 - DNA, 25 bp, Homo sapien
tacaaggtacttcttatgagagtct

SEQ ID NO: 4951110 - DNA, 25 bp, Homo sapien
ttacccataaaaagagagctctgtg

SEQ ID NO: 4951111 - DNA, 25 bp, Homo sapien
gattcactcccgtgattcctggaga

SEQ ID NO: 4951112 - DNA, 25 bp, Homo sapien
tgctagagcccctggttaccttatt

SEQ ID NO: 4951113 - DNA, 25 bp, Homo sapien
tgtaaccataaccaagagctgtctg

SEQ ID NO: 4951114 - DNA, 25 bp, Homo sapien
cagtttgcaaatgctcctcagggca

SEQ ID NO: 4951115 - DNA, 25 bp, Homo sapien
aatttcacgggacagaactgggcca

SEQ ID NO: 4951116 - DNA, 25 bp, Homo sapien
cagagtgatccttagtcgggtaaca

SEQ ID NO: 4951117 - DNA, 25 bp, Homo sapien
gctggcagagagcacccaaagatga

SEQ ID NO: 4951118 - DNA, 25 bp, Homo sapien
catcagatcaattgtggaagaacat

SEQ ID NO: 4951119 - DNA, 25 bp, Homo sapien
aaatgtgcgtcagctcagtgtgtca

SEQ ID NO: 4951120 - DNA, 25 bp, Homo sapien
gatgaacacaatgaacagtgagggt

SEQ ID NO: 4951121 - DNA, 25 bp, Homo sapien
acagacgtgcacagactctcgtggc

SEQ ID NO: 4951122 - DNA, 25 bp, Homo sapien
tcgtggctgccacagtgcgaaagcg

SEQ ID NO: 4951123 - DNA, 25 bp, Homo sapien
agcactggcataggcttgattccca

SEQ ID NO: 4951124 - DNA, 25 bp, Homo sapien
ggcttttggcgactgatgtcccaca

SEQ ID NO: 4951125 - DNA, 25 bp, Homo sapien
cacagtgagcagagctaggcttgtc

SEQ ID NO: 4951126 - DNA, 25 bp, Homo sapien
atctccactgcacagtgagcagagc

SEQ ID NO: 4951127 - DNA, 25 bp, Homo sapien
ggaagttccacgttgctcctccctg

SEQ ID NO: 4951128 - DNA, 25 bp, Homo sapien
gcctcatggaagttccacgttgctc

SEQ ID NO: 4951129 - DNA, 25 bp, Homo sapien
agtagtagggccctagcttttcata

SEQ ID NO: 4951130 - DNA, 25 bp, Homo sapien
taacttggccactctggaaacagac

SEQ ID NO: 4951131 - DNA, 25 bp, Homo sapien
ttttcatatcctaagtaacttggcc

SEQ ID NO: 4951132 - DNA, 25 bp, Homo sapien
agtagggccctagcttttcatatcc

SEQ ID NO: 4951133 - DNA, 25 bp, Homo sapien
gtagattttaactcagcccggatga

SEQ ID NO: 4951134 - DNA, 25 bp, Homo sapien
gagaacgtgtccctgtctgaaccgg

SEQ ID NO: 4951135 - DNA, 25 bp, Homo sapien
tcttggcgcaaggaaggagccatgc

SEQ ID NO: 4951136 - DNA, 25 bp, Homo sapien
gactgaatcttctcgggcaagctga

SEQ ID NO: 4951137 - DNA, 25 bp, Homo sapien
gtatgaacatggcttatggcagcct

SEQ ID NO: 4951138 - DNA, 25 bp, Homo sapien
tgcccagccaatgcaaacattttca

SEQ ID NO: 4951139 - DNA, 25 bp, Homo sapien
tgaagtggtatgaacatggcttatg

SEQ ID NO: 4951140 - DNA, 25 bp, Homo sapien
aatcattttttatcctaatatcaca

SEQ ID NO: 4951141 - DNA, 25 bp, Homo sapien
gctcgctcgccgcatcggagagccc

SEQ ID NO: 4951142 - DNA, 25 bp, Homo sapien
gccgcatcggagagcccgcagggtt

SEQ ID NO: 4951143 - DNA, 25 bp, Homo sapien
gcagggttgtggcaagcgcgactac

SEQ ID NO: 4951144 - DNA, 25 bp, Homo sapien
agagcccgcagggttgtggcaagcg

SEQ ID NO: 4951145 - DNA, 25 bp, Homo sapien
gcgtcggtgtgtccgggaggcaggg

SEQ ID NO: 4951146 - DNA, 25 bp, Homo sapien
gtgagcgtcggtgtgtccgggaggc

SEQ ID NO: 4951147 - DNA, 25 bp, Homo sapien
gagcgtcggtgtgtccgggaggcag

SEQ ID NO: 4951148 - DNA, 25 bp, Homo sapien
tgagcgtcggtgtgtccgggaggca

SEQ ID NO: 4951149 - DNA, 25 bp, Homo sapien
cggcgaagtccgtccgtgcacgaga

SEQ ID NO: 4951150 - DNA, 25 bp, Homo sapien
ctcataagtcccgagggcagacgcg

SEQ ID NO: 4951151 - DNA, 25 bp, Homo sapien
gtgcacgagagctgcgcggtcacct

SEQ ID NO: 4951152 - DNA, 25 bp, Homo sapien
ggacagctgccgtgacggcaggagc

SEQ ID NO: 4951153 - DNA, 25 bp, Homo sapien
cactcttggacagttctggcccctt

SEQ ID NO: 4951154 - DNA, 25 bp, Homo sapien
agtcccgcagctcgcagactttggg

SEQ ID NO: 4951155 - DNA, 25 bp, Homo sapien
aaggagctgttagcaccactttgcg

SEQ ID NO: 4951156 - DNA, 25 bp, Homo sapien
ttcttgggagggcccagaattccca

SEQ ID NO: 4951157 - DNA, 25 bp, Homo sapien
gatatattagatcggcccagatgca

SEQ ID NO: 4951158 - DNA, 25 bp, Homo sapien
tgcttccagtggaattaaagtccct

SEQ ID NO: 4951159 - DNA, 25 bp, Homo sapien
ggtcagctctgcatagaatcaagtt

SEQ ID NO: 4951160 - DNA, 25 bp, Homo sapien
ttgtcaacccagaacaaggtcttct

SEQ ID NO: 4951161 - DNA, 25 bp, Homo sapien
gtcaatgctgccataaactggctgg

SEQ ID NO: 4951162 - DNA, 25 bp, Homo sapien
cgtatctatggcagacggcccctgt

SEQ ID NO: 4951163 - DNA, 25 bp, Homo sapien
gagcagttgctaaaccaccagagag

SEQ ID NO: 4951164 - DNA, 25 bp, Homo sapien
ccatctgttgatcggagaactgcag

SEQ ID NO: 4951165 - DNA, 25 bp, Homo sapien
atggtaaaaggcagagctaagagtt

SEQ ID NO: 4951166 - DNA, 25 bp, Homo sapien
tttcttcgataagaccctcttctta

SEQ ID NO: 4951167 - DNA, 25 bp, Homo sapien
gctaagagtttctcagaatattcca

SEQ ID NO: 4951168 - DNA, 25 bp, Homo sapien
gagtttctcagaatattccaaagcc

SEQ ID NO: 4951169 - DNA, 25 bp, Homo sapien
gagcaaatgatacgccagcaacgga

SEQ ID NO: 4951170 - DNA, 25 bp, Homo sapien
gtttctaaagagtcagctgtccacc

SEQ ID NO: 4951171 - DNA, 25 bp, Homo sapien
tcctcttaaggacgcaggtggcttc

SEQ ID NO: 4951172 - DNA, 25 bp, Homo sapien
tataatcaaagagcgctgggctcct

SEQ ID NO: 4951173 - DNA, 25 bp, Homo sapien
aagtcttgctgtctgcgcttcctga

SEQ ID NO: 4951174 - DNA, 25 bp, Homo sapien
ctagcttttcctaagtcttgctgtc

SEQ ID NO: 4951175 - DNA, 25 bp, Homo sapien
agtcttgctgtctgcgcttcctgac

SEQ ID NO: 4951176 - DNA, 25 bp, Homo sapien
tcttgctgtctgcgcttcctgacca

SEQ ID NO: 4951177 - DNA, 25 bp, Homo sapien
catcatgtgaatagaccatcattta

SEQ ID NO: 4951178 - DNA, 25 bp, Homo sapien
ttgcattctgcacaaagttctggcc

SEQ ID NO: 4951179 - DNA, 25 bp, Homo sapien
tctggcctaagttgaaggctccttc

SEQ ID NO: 4951180 - DNA, 25 bp, Homo sapien
tcttaacttctttacttctacagac

SEQ ID NO: 4951181 - DNA, 25 bp, Homo sapien
ctagggcaaacatttccgcaggctg

SEQ ID NO: 4951182 - DNA, 25 bp, Homo sapien
aacatttccgcaggctgtggcaggc

SEQ ID NO: 4951183 - DNA, 25 bp, Homo sapien
tctttttctgtggacacaaaagctc

SEQ ID NO: 4951184 - DNA, 25 bp, Homo sapien
gggcaaacatttccgcaggctgtgg

SEQ ID NO: 4951185 - DNA, 25 bp, Homo sapien
gcagcagcataaaatttagggtcac

SEQ ID NO: 4951186 - DNA, 25 bp, Homo sapien
tgcatgtctaggtaggaaatggacc

SEQ ID NO: 4951187 - DNA, 25 bp, Homo sapien
aggtttgcatgtctaggtaggaaat

SEQ ID NO: 4951188 - DNA, 25 bp, Homo sapien
gggacacacaagaaaagggaagcag

SEQ ID NO: 4951189 - DNA, 25 bp, Homo sapien
tataagaaaaggtgcatccccaatt

SEQ ID NO: 4951190 - DNA, 25 bp, Homo sapien
tatgcacggcacatgctgaaaccca

SEQ ID NO: 4951191 - DNA, 25 bp, Homo sapien
aattactgccacatgatgagactgg

SEQ ID NO: 4951192 - DNA, 25 bp, Homo sapien
cacttagtcgttgcctgttaagact

SEQ ID NO: 4951193 - DNA, 25 bp, Homo sapien
agccagcttccttctctctttggtt

SEQ ID NO: 4951194 - DNA, 25 bp, Homo sapien
tcagttctgcttggcttttccccag

SEQ ID NO: 4951195 - DNA, 25 bp, Homo sapien
gcttccttctctctttggttctgac

SEQ ID NO: 4951196 - DNA, 25 bp, Homo sapien
cagcttccttctctctttggttctg

SEQ ID NO: 4951197 - DNA, 25 bp, Homo sapien
gtttctcagccacgcacacacagtg

SEQ ID NO: 4951198 - DNA, 25 bp, Homo sapien
tcttttcctgtaaacaagcacttgc

SEQ ID NO: 4951199 - DNA, 25 bp, Homo sapien
cccagagggaattggtagacagcgc

SEQ ID NO: 4951200 - DNA, 25 bp, Homo sapien
caatataagtcgctaaagagccact

SEQ ID NO: 4951201 - DNA, 25 bp, Homo sapien
cctctattcgtggacaatgttgtca

SEQ ID NO: 4951202 - DNA, 25 bp, Homo sapien
tctccctctattcgtggacaatgtt

SEQ ID NO: 4951203 - DNA, 25 bp, Homo sapien
tctctccctctattcgtggacaatg

SEQ ID NO: 4951204 - DNA, 25 bp, Homo sapien
ttgtctctccctctattcgtggaca

SEQ ID NO: 4951205 - DNA, 25 bp, Homo sapien
gcaatggctgaaggcgatatctctg

SEQ ID NO: 4951206 - DNA, 25 bp, Homo sapien
cactgttgtgcaggtgatagctcca

SEQ ID NO: 4951207 - DNA, 25 bp, Homo sapien
caatacggtttctataactggtgcc

SEQ ID NO: 4951208 - DNA, 25 bp, Homo sapien
gatatctctgagatgtccggtcagg

SEQ ID NO: 4951209 - DNA, 25 bp, Homo sapien
ctggtttagttagtgtattccttgc

SEQ ID NO: 4951210 - DNA, 25 bp, Homo sapien
tggtttagttagtgtattccttgca

SEQ ID NO: 4951211 - DNA, 25 bp, Homo sapien
ggtttagttagtgtattccttgcat

SEQ ID NO: 4951212 - DNA, 25 bp, Homo sapien
gtttagttagtgtattccttgcatt

SEQ ID NO: 4951213 - DNA, 25 bp, Homo sapien
cctgcagcctcacaccatctaaaac

SEQ ID NO: 4951214 - DNA, 25 bp, Homo sapien
aactggtttgacaggaactttaatg

SEQ ID NO: 4951215 - DNA, 25 bp, Homo sapien
gcaactggtttgacaggaactttaa

SEQ ID NO: 4951216 - DNA, 25 bp, Homo sapien
gatgtttccgcttctgcccccacat

SEQ ID NO: 4951217 - DNA, 25 bp, Homo sapien
caaaaccagaaaactctgcctttat

SEQ ID NO: 4951218 - DNA, 25 bp, Homo sapien
acccttctgaggctagcaatgcaat

SEQ ID NO: 4951219 - DNA, 25 bp, Homo sapien
gagacatctctaacttaggctttgc

SEQ ID NO: 4951220 - DNA, 25 bp, Homo sapien
tctgcctttatcttggcaacacaaa

SEQ ID NO: 4951221 - DNA, 25 bp, Homo sapien
tccatcaaagccacgtccagattct

SEQ ID NO: 4951222 - DNA, 25 bp, Homo sapien
gtccatcaaagccacgtccagattc

SEQ ID NO: 4951223 - DNA, 25 bp, Homo sapien
tgctccaaatagaaggagtgttttc

SEQ ID NO: 4951224 - DNA, 25 bp, Homo sapien
ccaaatagaaggagtgttttctttg

SEQ ID NO: 4951225 - DNA, 25 bp, Homo sapien
tctttgagaggaatgcgtgcacaag

SEQ ID NO: 4951226 - DNA, 25 bp, Homo sapien
tgagccgaaatgtggattccctggg

SEQ ID NO: 4951227 - DNA, 25 bp, Homo sapien
cacaagtttgcaaagtcgggtgtgg

SEQ ID NO: 4951228 - DNA, 25 bp, Homo sapien
gactgtgctggtgaagcaatagcaa

SEQ ID NO: 4951229 - DNA, 25 bp, Homo sapien
cttccctctattgcaattggataat

SEQ ID NO: 4951230 - DNA, 25 bp, Homo sapien
tgacacaggccgagggtattggtat

SEQ ID NO: 4951231 - DNA, 25 bp, Homo sapien
caagcttgcattgggccagaggcag

SEQ ID NO: 4951232 - DNA, 25 bp, Homo sapien
tgcaattggataattagagcaagct

SEQ ID NO: 4951233 - DNA, 25 bp, Homo sapien
gaaacagatgctcttgattggcaag

SEQ ID NO: 4951234 - DNA, 25 bp, Homo sapien
gatgctcttgattggcaaggttcct

SEQ ID NO: 4951235 - DNA, 25 bp, Homo sapien
ttggaaacagatgctcttgattggc

SEQ ID NO: 4951236 - DNA, 25 bp, Homo sapien
ccactgcagatgacttggaaacaga

SEQ ID NO: 4951237 - DNA, 25 bp, Homo sapien
cccgactgtaatttctggcagaagc

SEQ ID NO: 4951238 - DNA, 25 bp, Homo sapien
caagtcacgaggcatcccgactgta

SEQ ID NO: 4951239 - DNA, 25 bp, Homo sapien
atcccgactgtaatttctggcagaa

SEQ ID NO: 4951240 - DNA, 25 bp, Homo sapien
cgccgctattccaagtcacgaggca

SEQ ID NO: 4951241 - DNA, 25 bp, Homo sapien
gatgatttaagaggagttgtaccac

SEQ ID NO: 4951242 - DNA, 25 bp, Homo sapien
ttccatctgttagggccaaggttgt

SEQ ID NO: 4951243 - DNA, 25 bp, Homo sapien
ccaaggttgtttcggctgtggcaaa

SEQ ID NO: 4951244 - DNA, 25 bp, Homo sapien
gcctcgagtgggaccgttgttccat

SEQ ID NO: 4951245 - DNA, 25 bp, Homo sapien
tgtggtcaggcaatggaagtggtgg

SEQ ID NO: 4951246 - DNA, 25 bp, Homo sapien
ccggaaggtaacttgaagctgttat

SEQ ID NO: 4951247 - DNA, 25 bp, Homo sapien
gagaagctctagcattgaggacgga

SEQ ID NO: 4951248 - DNA, 25 bp, Homo sapien
gaagtggtggatagctggatagatg

SEQ ID NO: 4951249 - DNA, 25 bp, Homo sapien
ccctgtggagcgtccctgcaaggga

SEQ ID NO: 4951250 - DNA, 25 bp, Homo sapien
tcccgggtaggcaattgccctggtg

SEQ ID NO: 4951251 - DNA, 25 bp, Homo sapien
gctacatttcttggttccgtgaccg

SEQ ID NO: 4951252 - DNA, 25 bp, Homo sapien
cagcttgagcgacgggcatcctgag

SEQ ID NO: 4951253 - DNA, 25 bp, Homo sapien
tgatgtctgatcattgtgcctggtg

SEQ ID NO: 4951254 - DNA, 25 bp, Homo sapien
tgtcctcactcagccaagtaattga

SEQ ID NO: 4951255 - DNA, 25 bp, Homo sapien
tggactggaccaagatcacaagcag

SEQ ID NO: 4951256 - DNA, 25 bp, Homo sapien
caaagttagagaaattgcacgtgca

SEQ ID NO: 4951257 - DNA, 25 bp, Homo sapien
tacagtcaagagtcctcattttgtc

SEQ ID NO: 4951258 - DNA, 25 bp, Homo sapien
cacttggatgaagttacacttggtt

SEQ ID NO: 4951259 - DNA, 25 bp, Homo sapien
tcctccttacagtcaagagtcctca

SEQ ID NO: 4951260 - DNA, 25 bp, Homo sapien
tttcacacttcacttggatgaagtt

SEQ ID NO: 4951261 - DNA, 25 bp, Homo sapien
caaggtaaagttcaagatggtgcac

SEQ ID NO: 4951262 - DNA, 25 bp, Homo sapien
catcttgtaaccagagagttctttc

SEQ ID NO: 4951263 - DNA, 25 bp, Homo sapien
gcttgcatccatgctccatcttgta

SEQ ID NO: 4951264 - DNA, 25 bp, Homo sapien
tgtgacaggctggtagctcctaaca

SEQ ID NO: 4951265 - DNA, 25 bp, Homo sapien
ttggtgactggaggtccccataacc

SEQ ID NO: 4951266 - DNA, 25 bp, Homo sapien
tggtgactggaggtccccataacct

SEQ ID NO: 4951267 - DNA, 25 bp, Homo sapien
tgactggaggtccccataacctcac

SEQ ID NO: 4951268 - DNA, 25 bp, Homo sapien
gtgactggaggtccccataacctca

SEQ ID NO: 4951269 - DNA, 25 bp, Homo sapien
ttattttcttcactggatgaagaca

SEQ ID NO: 4951270 - DNA, 25 bp, Homo sapien
tattttcttcactggatgaagacat

SEQ ID NO: 4951271 - DNA, 25 bp, Homo sapien
attattttcttcactggatgaagac

SEQ ID NO: 4951272 - DNA, 25 bp, Homo sapien
ttttcttcactggatgaagacattc

SEQ ID NO: 4951273 - DNA, 25 bp, Homo sapien
tctgtagacaagttatatgtctcct

SEQ ID NO: 4951274 - DNA, 25 bp, Homo sapien
tgagcaccgggtctgtagacaagtt

SEQ ID NO: 4951275 - DNA, 25 bp, Homo sapien
tggttctcactcgtcctgccttggg

SEQ ID NO: 4951276 - DNA, 25 bp, Homo sapien
gcaggctctgatcactgggatctcc

SEQ ID NO: 4951277 - DNA, 25 bp, Homo sapien
gctagggccttttctcagcagatta

SEQ ID NO: 4951278 - DNA, 25 bp, Homo sapien
cctcccatattggtctggagacaca

SEQ ID NO: 4951279 - DNA, 25 bp, Homo sapien
cctcatgggaatcctaggagttagg

SEQ ID NO: 4951280 - DNA, 25 bp, Homo sapien
ccagccatagagtgataagaatgac

SEQ ID NO: 4951281 - DNA, 25 bp, Homo sapien
tgcttggaagttgtgtttccacgta

SEQ ID NO: 4951282 - DNA, 25 bp, Homo sapien
acttgcttggaagttgtgtttccac

SEQ ID NO: 4951283 - DNA, 25 bp, Homo sapien
cttgcttggaagttgtgtttccacg

SEQ ID NO: 4951284 - DNA, 25 bp, Homo sapien
aacttgcttggaagttgtgtttcca

SEQ ID NO: 4951285 - DNA, 25 bp, Homo sapien
tctgttaagcctgtcatcatgacac

SEQ ID NO: 4951286 - DNA, 25 bp, Homo sapien
cactgtaacgccctagcacacagga

SEQ ID NO: 4951287 - DNA, 25 bp, Homo sapien
caggacgagtcaatgattctgttaa

SEQ ID NO: 4951288 - DNA, 25 bp, Homo sapien
ggagggtcctctacagaggcatccc

SEQ ID NO: 4951289 - DNA, 25 bp, Homo sapien
cactctgtgtagatttaagctgacc

SEQ ID NO: 4951290 - DNA, 25 bp, Homo sapien
acatgttccagacccttgtgttgca

SEQ ID NO: 4951291 - DNA, 25 bp, Homo sapien
aacactgctctctgtagttctatac

SEQ ID NO: 4951292 - DNA, 25 bp, Homo sapien
caagagccactagcctcatcagagg

SEQ ID NO: 4951293 - DNA, 25 bp, Homo sapien
aggggccatgctaattttctccgta

SEQ ID NO: 4951294 - DNA, 25 bp, Homo sapien
taatatagcatgcttcacgaatgtg

SEQ ID NO: 4951295 - DNA, 25 bp, Homo sapien
gccatgctaattttctccgtatcat

SEQ ID NO: 4951296 - DNA, 25 bp, Homo sapien
cacgaatgtgcatgtcatcctggca

SEQ ID NO: 4951297 - DNA, 25 bp, Homo sapien
tgaactaggagtacagacagcccag

SEQ ID NO: 4951298 - DNA, 25 bp, Homo sapien
tgaattctgaactaggagtacagac

SEQ ID NO: 4951299 - DNA, 25 bp, Homo sapien
cagccctttgccacaagtgcattgc

SEQ ID NO: 4951300 - DNA, 25 bp, Homo sapien
gccacaagtgcattgccactgtctt

SEQ ID NO: 4951301 - DNA, 25 bp, Homo sapien
cagtaaagactatttatagctctga

SEQ ID NO: 4951302 - DNA, 25 bp, Homo sapien
gattattgcagcaaggttatgcaac

SEQ ID NO: 4951303 - DNA, 25 bp, Homo sapien
ccttgccgggtgagtgaccgtctga

SEQ ID NO: 4951304 - DNA, 25 bp, Homo sapien
gtctgaccgtcttctggctgcttcc

SEQ ID NO: 4951305 - DNA, 25 bp, Homo sapien
cagcacgtgctgatctccaagggtg

SEQ ID NO: 4951306 - DNA, 25 bp, Homo sapien
ttgcgtttcttgcagatcccctgcc

SEQ ID NO: 4951307 - DNA, 25 bp, Homo sapien
gcgtttcttgcagatcccctgcctg

SEQ ID NO: 4951308 - DNA, 25 bp, Homo sapien
cctgcagcacgtgctgatctccaag

SEQ ID NO: 4951309 - DNA, 25 bp, Homo sapien
tctccatgaaggttgagctccgatg

SEQ ID NO: 4951310 - DNA, 25 bp, Homo sapien
gttgagctccgatggccaacagcca

SEQ ID NO: 4951311 - DNA, 25 bp, Homo sapien
cagtctccatgaaggttgagctccg

SEQ ID NO: 4951312 - DNA, 25 bp, Homo sapien
catgaaggttgagctccgatggcca

SEQ ID NO: 4951313 - DNA, 25 bp, Homo sapien
ccaccttgtggtctacaactcttca

SEQ ID NO: 4951314 - DNA, 25 bp, Homo sapien
caccttgtggtctacaactcttcat

SEQ ID NO: 4951315 - DNA, 25 bp, Homo sapien
cccactgatcctgattgactgctgg

SEQ ID NO: 4951316 - DNA, 25 bp, Homo sapien
ctgatcctgattgactgctggcagt

SEQ ID NO: 4951317 - DNA, 25 bp, Homo sapien
tcctgattgactgctggcagttggt

SEQ ID NO: 4951318 - DNA, 25 bp, Homo sapien
cactgatcctgattgactgctggca

SEQ ID NO: 4951319 - DNA, 25 bp, Homo sapien
cccagcaaggaagcatgtctgcaaa

SEQ ID NO: 4951320 - DNA, 25 bp, Homo sapien
tgggccgggccccagcaatggaaag

SEQ ID NO: 4951321 - DNA, 25 bp, Homo sapien
ctccgctggggacacgcgcagtctg

SEQ ID NO: 4951322 - DNA, 25 bp, Homo sapien
gacagtcttccagtgaagtcgccca

SEQ ID NO: 4951323 - DNA, 25 bp, Homo sapien
tgtcatttccttgtggactggactc

SEQ ID NO: 4951324 - DNA, 25 bp, Homo sapien
tgtctgcagtgccatttggaaagca

SEQ ID NO: 4951325 - DNA, 25 bp, Homo sapien
gggcctcttgctactaccacactgt

SEQ ID NO: 4951326 - DNA, 25 bp, Homo sapien
gactggactctacaggtcgattggg

SEQ ID NO: 4951327 - DNA, 25 bp, Homo sapien
ccatgtgttgagtagcaggtctccc

SEQ ID NO: 4951328 - DNA, 25 bp, Homo sapien
agtatgcttggctcttactccagca

SEQ ID NO: 4951329 - DNA, 25 bp, Homo sapien
ttgtggtagctgatggaaggccaat

SEQ ID NO: 4951330 - DNA, 25 bp, Homo sapien
gcttggtgagtcacctagtgcctcc

SEQ ID NO: 4951331 - DNA, 25 bp, Homo sapien
agagtcctggattctactatcttcc

SEQ ID NO: 4951332 - DNA, 25 bp, Homo sapien
cctgagtgctaacttagaagactca

SEQ ID NO: 4951333 - DNA, 25 bp, Homo sapien
tttaactgaatactggacattgtag

SEQ ID NO: 4951334 - DNA, 25 bp, Homo sapien
atttaaagtcttttgctgccaagtc

SEQ ID NO: 4951335 - DNA, 25 bp, Homo sapien
tgagccacttccgtcttctctcttt

SEQ ID NO: 4951336 - DNA, 25 bp, Homo sapien
catgagagacgtttgcttctgttcc

SEQ ID NO: 4951337 - DNA, 25 bp, Homo sapien
ctccatctctttcagccgtagactg

SEQ ID NO: 4951338 - DNA, 25 bp, Homo sapien
tttcagccgtagactgagggaggca

SEQ ID NO: 4951339 - DNA, 25 bp, Homo sapien
ggcatctttgtgcagggccgtgcta

SEQ ID NO: 4951340 - DNA, 25 bp, Homo sapien
tgcacggcatctttgtgcagggccg

SEQ ID NO: 4951341 - DNA, 25 bp, Homo sapien
acggcatctttgtgcagggccgtgc

SEQ ID NO: 4951342 - DNA, 25 bp, Homo sapien
gcacggcatctttgtgcagggccgt

SEQ ID NO: 4951343 - DNA, 25 bp, Homo sapien
cattggaattgctgtctgcatcgga

SEQ ID NO: 4951344 - DNA, 25 bp, Homo sapien
gaaaatcctgaaagctgcaatgcat

SEQ ID NO: 4951345 - DNA, 25 bp, Homo sapien
ggtaatggagactacacttcaggcc

SEQ ID NO: 4951346 - DNA, 25 bp, Homo sapien
cagatcatgagtcaaggtcagagag

SEQ ID NO: 4951347 - DNA, 25 bp, Homo sapien
gcgcagcatccgtgacaaaagcatt

SEQ ID NO: 4951348 - DNA, 25 bp, Homo sapien
catgttggaagtcccaggtgtgacc

SEQ ID NO: 4951349 - DNA, 25 bp, Homo sapien
ccttggtgtaagcagagtaagaacc

SEQ ID NO: 4951350 - DNA, 25 bp, Homo sapien
caaaagcattcatgttggaagtccc

SEQ ID NO: 4951351 - DNA, 25 bp, Homo sapien
gctctcatcttttcagctgcagcac

SEQ ID NO: 4951352 - DNA, 25 bp, Homo sapien
gtctcagtcattggctctcggtctc

SEQ ID NO: 4951353 - DNA, 25 bp, Homo sapien
cattcatcaggatcgcttccttgcc

SEQ ID NO: 4951354 - DNA, 25 bp, Homo sapien
aatccttagctttagttggtcaggg

SEQ ID NO: 4951355 - DNA, 25 bp, Homo sapien
cttagctgtgccgtctactgctggt

SEQ ID NO: 4951356 - DNA, 25 bp, Homo sapien
ctgtccctgtccttagctgtgccgt

SEQ ID NO: 4951357 - DNA, 25 bp, Homo sapien
cctgtccttagctgtgccgtctact

SEQ ID NO: 4951358 - DNA, 25 bp, Homo sapien
gctgtgccgtctactgctggtttct

SEQ ID NO: 4951359 - DNA, 25 bp, Homo sapien
gaagttgtccttgcttcagggcagg

SEQ ID NO: 4951360 - DNA, 25 bp, Homo sapien
tcactaggaatacaacacttaggcc

SEQ ID NO: 4951361 - DNA, 25 bp, Homo sapien
cagggcaggagtttttgattcagac

SEQ ID NO: 4951362 - DNA, 25 bp, Homo sapien
tattccagtggagacgcatttcatg

SEQ ID NO: 4951363 - DNA, 25 bp, Homo sapien
aaggtctcggtgacagccagctcgg

SEQ ID NO: 4951364 - DNA, 25 bp, Homo sapien
ccaggagaaacggaggtgactcagc

SEQ ID NO: 4951365 - DNA, 25 bp, Homo sapien
gttgctttgggtatgcatgtgaatg

SEQ ID NO: 4951366 - DNA, 25 bp, Homo sapien
catgtgaatgagtctgcataatgag

SEQ ID NO: 4951367 - DNA, 25 bp, Homo sapien
ttttccttccaacttgagtggaagc

SEQ ID NO: 4951368 - DNA, 25 bp, Homo sapien
tccttccaacttgagtggaagcagc

SEQ ID NO: 4951369 - DNA, 25 bp, Homo sapien
aagcagcctgaggcatcatcagaag

SEQ ID NO: 4951370 - DNA, 25 bp, Homo sapien
ttccttccaacttgagtggaagcag

SEQ ID NO: 4951371 - DNA, 25 bp, Homo sapien
cagtgaccacattgatcagatctcc

SEQ ID NO: 4951372 - DNA, 25 bp, Homo sapien
aaaacacagtgaccacattgatcag

SEQ ID NO: 4951373 - DNA, 25 bp, Homo sapien
gatcagatctcccacagaagatgca

SEQ ID NO: 4951374 - DNA, 25 bp, Homo sapien
cattgatcagatctcccacagaaga

SEQ ID NO: 4951375 - DNA, 25 bp, Homo sapien
ttcacacaacaacacattgataaga

SEQ ID NO: 4951376 - DNA, 25 bp, Homo sapien
ggcaaaacccaaccactaactgcat

SEQ ID NO: 4951377 - DNA, 25 bp, Homo sapien
tggcaaaacccaaccactaactgca

SEQ ID NO: 4951378 - DNA, 25 bp, Homo sapien
cttcacacaacaacacattgataag

SEQ ID NO: 4951379 - DNA, 25 bp, Homo sapien
ggctccatttgactcctatgttatg

SEQ ID NO: 4951380 - DNA, 25 bp, Homo sapien
acagccatcacgtgagtgactgaag

SEQ ID NO: 4951381 - DNA, 25 bp, Homo sapien
tctttgcgttctgccctatggtctc

SEQ ID NO: 4951382 - DNA, 25 bp, Homo sapien
tatgttatgttctttgcgttctgcc

SEQ ID NO: 4951383 - DNA, 25 bp, Homo sapien
tgatactttaaatgcgggttcccca

SEQ ID NO: 4951384 - DNA, 25 bp, Homo sapien
ccatttagggctacggttagggctg

SEQ ID NO: 4951385 - DNA, 25 bp, Homo sapien
ttgtcccacataagtagagattgcc

SEQ ID NO: 4951386 - DNA, 25 bp, Homo sapien
gaaatcagtaataggcacagctacc

SEQ ID NO: 4951387 - DNA, 25 bp, Homo sapien
tctgttatgttgtcagaattctgat

SEQ ID NO: 4951388 - DNA, 25 bp, Homo sapien
ctcacaaggacttctgccttctgtt

SEQ ID NO: 4951389 - DNA, 25 bp, Homo sapien
acaaggacttctgccttctgttatg

SEQ ID NO: 4951390 - DNA, 25 bp, Homo sapien
ctgccttctgttatgttgtcagaat

SEQ ID NO: 4951391 - DNA, 25 bp, Homo sapien
tcagggtcaccttcttgcaaaaatg

SEQ ID NO: 4951392 - DNA, 25 bp, Homo sapien
gagcccaggtttcttggcccttcag

SEQ ID NO: 4951393 - DNA, 25 bp, Homo sapien
cttcttgcaaaaatgtcccatgctc

SEQ ID NO: 4951394 - DNA, 25 bp, Homo sapien
aagcagctggctccgatcaccatcc

SEQ ID NO: 4951395 - DNA, 25 bp, Homo sapien
gaaatttgcataagaggagcaaaat

SEQ ID NO: 4951396 - DNA, 25 bp, Homo sapien
acagcatgcactaatatgtgtgcac

SEQ ID NO: 4951397 - DNA, 25 bp, Homo sapien
ctcaagcctactgtagaaatttgca

SEQ ID NO: 4951398 - DNA, 25 bp, Homo sapien
tttctggggaggaactcaagcctac

SEQ ID NO: 4951399 - DNA, 25 bp, Homo sapien
tctttcatggatctgtaaggaacac

SEQ ID NO: 4951400 - DNA, 25 bp, Homo sapien
caagtcagaggagaaccacaagggc

SEQ ID NO: 4951401 - DNA, 25 bp, Homo sapien
catctggtcacaggttggacactta

SEQ ID NO: 4951402 - DNA, 25 bp, Homo sapien
ttggattccaatcagggcagggcta

SEQ ID NO: 4951403 - DNA, 25 bp, Homo sapien
tcactgcttgttgactttgtgagag

SEQ ID NO: 4951404 - DNA, 25 bp, Homo sapien
gaactataatttgcctctcagtcgc

SEQ ID NO: 4951405 - DNA, 25 bp, Homo sapien
gcatgcattgcaaagtccaccagta

SEQ ID NO: 4951406 - DNA, 25 bp, Homo sapien
tgccagtggcttgcctatatttaac

SEQ ID NO: 4951407 - DNA, 25 bp, Homo sapien
gaatgcaatgagctgtgctgcattc

SEQ ID NO: 4951408 - DNA, 25 bp, Homo sapien
tacaatgccatgaataccattcacc

SEQ ID NO: 4951409 - DNA, 25 bp, Homo sapien
tagcacacgggcttgggcaagcaga

SEQ ID NO: 4951410 - DNA, 25 bp, Homo sapien
agcagctccaccagtacttacaatg

SEQ ID NO: 4951411 - DNA, 25 bp, Homo sapien
ctttagaaactggtagtagaagaag

SEQ ID NO: 4951412 - DNA, 25 bp, Homo sapien
tgctttagaaactggtagtagaaga

SEQ ID NO: 4951413 - DNA, 25 bp, Homo sapien
gctttagaaactggtagtagaagaa

SEQ ID NO: 4951414 - DNA, 25 bp, Homo sapien
tacttgtgttttactggcagagcgc

SEQ ID NO: 4951415 - DNA, 25 bp, Homo sapien
ggaacgccaatcctagcaatctgaa

SEQ ID NO: 4951416 - DNA, 25 bp, Homo sapien
tagatgataacggacacattccctg

SEQ ID NO: 4951417 - DNA, 25 bp, Homo sapien
ccatctaggcagaagctggttccag

SEQ ID NO: 4951418 - DNA, 25 bp, Homo sapien
tcccctggatcgagcttggcggaga

SEQ ID NO: 4951419 - DNA, 25 bp, Homo sapien
gcggccggagttagcagcacagcac

SEQ ID NO: 4951420 - DNA, 25 bp, Homo sapien
ggtcccagcggtttctacttcatct

SEQ ID NO: 4951421 - DNA, 25 bp, Homo sapien
cccagccggcagtggcagtaacaat

SEQ ID NO: 4951422 - DNA, 25 bp, Homo sapien
ggtgctaatgtccacgctcgtgatg

SEQ ID NO: 4951423 - DNA, 25 bp, Homo sapien
tccacgctcgtgatgatggaggtct

SEQ ID NO: 4951424 - DNA, 25 bp, Homo sapien
tacagatgggtgctaatgtccacgc

SEQ ID NO: 4951425 - DNA, 25 bp, Homo sapien
tgatggaggtctcatcccgcttcat

SEQ ID NO: 4951426 - DNA, 25 bp, Homo sapien
tatttgtcccagtagaatgaaagca

SEQ ID NO: 4951427 - DNA, 25 bp, Homo sapien
taacagtggcctgtcctgatctggc

SEQ ID NO: 4951428 - DNA, 25 bp, Homo sapien
tgtttcacgacagcagtagcctcat

SEQ ID NO: 4951429 - DNA, 25 bp, Homo sapien
tcactgcagctagaatggtcttact

SEQ ID NO: 4951430 - DNA, 25 bp, Homo sapien
caaacttacatggttagataatggc

SEQ ID NO: 4951431 - DNA, 25 bp, Homo sapien
catcactatcatcttgtgttagagt

SEQ ID NO: 4951432 - DNA, 25 bp, Homo sapien
gaggaaggttacatgatttggtcaa

SEQ ID NO: 4951433 - DNA, 25 bp, Homo sapien
gaccctcagagcgaccacagaagat

SEQ ID NO: 4951434 - DNA, 25 bp, Homo sapien
cccaggtttaagaaattctctgtct

SEQ ID NO: 4951435 - DNA, 25 bp, Homo sapien
gagaggaggtttcaccatcttgacc

SEQ ID NO: 4951436 - DNA, 25 bp, Homo sapien
tagagaggaggtttcaccatcttga

SEQ ID NO: 4951437 - DNA, 25 bp, Homo sapien
tctcagcctcccgaatagatgggat

SEQ ID NO: 4951438 - DNA, 25 bp, Homo sapien
cagatttgttatcagagtgtgaggg

SEQ ID NO: 4951439 - DNA, 25 bp, Homo sapien
ttatggattgtggtccttgggcacc

SEQ ID NO: 4951440 - DNA, 25 bp, Homo sapien
ggctgttaagtaagtagctcagatt

SEQ ID NO: 4951441 - DNA, 25 bp, Homo sapien
ctgttcctgggagctagcgtttgaa

SEQ ID NO: 4951442 - DNA, 25 bp, Homo sapien
tcatttgacagtagagtattctaca

SEQ ID NO: 4951443 - DNA, 25 bp, Homo sapien
ccaactgaatggatgctggatgatg

SEQ ID NO: 4951444 - DNA, 25 bp, Homo sapien
cttccagcctgatgagaaatggcaa

SEQ ID NO: 4951445 - DNA, 25 bp, Homo sapien
tgagtaccctttggtttgaacagac

SEQ ID NO: 4951446 - DNA, 25 bp, Homo sapien
cattttcaccacacgttttaattct

SEQ ID NO: 4951447 - DNA, 25 bp, Homo sapien
tgaacatcctatctagaacctgagc

SEQ ID NO: 4951448 - DNA, 25 bp, Homo sapien
gcagcttctgttatgaaggagttcc

SEQ ID NO: 4951449 - DNA, 25 bp, Homo sapien
gggcgcttatccaatggaacagtca

SEQ ID NO: 4951450 - DNA, 25 bp, Homo sapien
tcagaatgctaaagttgtcagaacc

SEQ ID NO: 4951451 - DNA, 25 bp, Homo sapien
ttagtacttcttttgtatcttcaca

SEQ ID NO: 4951452 - DNA, 25 bp, Homo sapien
tagtacttcttttgtatcttcacat

SEQ ID NO: 4951453 - DNA, 25 bp, Homo sapien
gacaaagggtaggtctatcagttta

SEQ ID NO: 4951454 - DNA, 25 bp, Homo sapien
caacagagttcgaatagttcagctt

SEQ ID NO: 4951455 - DNA, 25 bp, Homo sapien
ggtgctgatgttcatgcaaaagaca

SEQ ID NO: 4951456 - DNA, 25 bp, Homo sapien
atcagtttacttcctgtcagtgctt

SEQ ID NO: 4951457 - DNA, 25 bp, Homo sapien
gcataaatgcctgatgctcttgtac

SEQ ID NO: 4951458 - DNA, 25 bp, Homo sapien
aatggtgtcccagtagtataggggc

SEQ ID NO: 4951459 - DNA, 25 bp, Homo sapien
tgtacatctctatttccttgtgcat

SEQ ID NO: 4951460 - DNA, 25 bp, Homo sapien
cttgtacatctctatttccttgtgc

SEQ ID NO: 4951461 - DNA, 25 bp, Homo sapien
taatgatgtcatggaagttctgcat

SEQ ID NO: 4951462 - DNA, 25 bp, Homo sapien
gccgaaagagcccataatgatgtca

SEQ ID NO: 4951463 - DNA, 25 bp, Homo sapien
gactcccctgcatgttgcagccgaa

SEQ ID NO: 4951464 - DNA, 25 bp, Homo sapien
tgtcatggaagttctgcataagcat

SEQ ID NO: 4951465 - DNA, 25 bp, Homo sapien
tgggcgtttactcccctccatgaag

SEQ ID NO: 4951466 - DNA, 25 bp, Homo sapien
cagcccagaaaggaaggacgcagct

SEQ ID NO: 4951467 - DNA, 25 bp, Homo sapien
tgtaaatgcaacagataagtgggcg

SEQ ID NO: 4951468 - DNA, 25 bp, Homo sapien
gacgcctctggatctggcaacagta

SEQ ID NO: 4951469 - DNA, 25 bp, Homo sapien
tgtgcaactgcatatagctggtggc

SEQ ID NO: 4951470 - DNA, 25 bp, Homo sapien
caagtcatgaagtcagctcaggttc

SEQ ID NO: 4951471 - DNA, 25 bp, Homo sapien
tgacagatacaactagaaggcaggg

SEQ ID NO: 4951472 - DNA, 25 bp, Homo sapien
gggcctctctagtcccatgtggcat

SEQ ID NO: 4951473 - DNA, 25 bp, Homo sapien
gaagtcaaagccggtgaaggccact

SEQ ID NO: 4951474 - DNA, 25 bp, Homo sapien
tgccacagaggtcttcgggacagta

SEQ ID NO: 4951475 - DNA, 25 bp, Homo sapien
acagtactggagatgcaggttgaca

SEQ ID NO: 4951476 - DNA, 25 bp, Homo sapien
ggttgacacgggcttgagttccaag

SEQ ID NO: 4951477 - DNA, 25 bp, Homo sapien
cacagatctttgaggccgatagcct

SEQ ID NO: 4951478 - DNA, 25 bp, Homo sapien
gacgagttttatacattgccagaga

SEQ ID NO: 4951479 - DNA, 25 bp, Homo sapien
agtctacccatttctgcaggcagcc

SEQ ID NO: 4951480 - DNA, 25 bp, Homo sapien
gcagccctgaaagcccttgtgttga

SEQ ID NO: 4951481 - DNA, 25 bp, Homo sapien
caaggaacttaacctgcctgcctgg

SEQ ID NO: 4951482 - DNA, 25 bp, Homo sapien
tctggcaatcctacagctgtggtca

SEQ ID NO: 4951483 - DNA, 25 bp, Homo sapien
tgggaaatcacctacagcatgttaa

SEQ ID NO: 4951484 - DNA, 25 bp, Homo sapien
ttaaagtcctctagtcatcatctcg

SEQ ID NO: 4951485 - DNA, 25 bp, Homo sapien
gtgatacaaatcgaacgcttttggg

SEQ ID NO: 4951486 - DNA, 25 bp, Homo sapien
tgtacaaggtgatacaaatcgaacg

SEQ ID NO: 4951487 - DNA, 25 bp, Homo sapien
aagatgtacaaggtgatacaaatcg

SEQ ID NO: 4951488 - DNA, 25 bp, Homo sapien
caaggtgatacaaatcgaacgcttt

SEQ ID NO: 4951489 - DNA, 25 bp, Homo sapien
gcggccgtcccaatatagagaactt

SEQ ID NO: 4951490 - DNA, 25 bp, Homo sapien
gaacttggagacgtactttaggcaa

SEQ ID NO: 4951491 - DNA, 25 bp, Homo sapien
caaatgcctggcaactgtaaccgca

SEQ ID NO: 4951492 - DNA, 25 bp, Homo sapien
tgtaaccgcacattttctggacgat

SEQ ID NO: 4951493 - DNA, 25 bp, Homo sapien
tgcctgatgggctcataaaggtctt

SEQ ID NO: 4951494 - DNA, 25 bp, Homo sapien
cctgatgggctcataaaggtctttg

SEQ ID NO: 4951495 - DNA, 25 bp, Homo sapien
cttgcctgatgggctcataaaggtc

SEQ ID NO: 4951496 - DNA, 25 bp, Homo sapien
ctgatgggctcataaaggtctttga

SEQ ID NO: 4951497 - DNA, 25 bp, Homo sapien
cagttttgagggactgttctccata

SEQ ID NO: 4951498 - DNA, 25 bp, Homo sapien
tagttgtactggctacagttttgag

SEQ ID NO: 4951499 - DNA, 25 bp, Homo sapien
gccaccaagtgaaagtgtgctagaa

SEQ ID NO: 4951500 - DNA, 25 bp, Homo sapien
tacaaattggagctctcctctgcca

SEQ ID NO: 4951501 - DNA, 25 bp, Homo sapien
caatccacgtgcaaacaggccagaa

SEQ ID NO: 4951502 - DNA, 25 bp, Homo sapien
acaggccagaaagagccatgacaat

SEQ ID NO: 4951503 - DNA, 25 bp, Homo sapien
ccagaaagagccatgacaatgacca

SEQ ID NO: 4951504 - DNA, 25 bp, Homo sapien
aatccacgtgcaaacaggccagaaa

SEQ ID NO: 4951505 - DNA, 25 bp, Homo sapien
gggattcatagataaagccacattc

SEQ ID NO: 4951506 - DNA, 25 bp, Homo sapien
ctgtggagggattcatagataaagc

SEQ ID NO: 4951507 - DNA, 25 bp, Homo sapien
tggagggattcatagataaagccac

SEQ ID NO: 4951508 - DNA, 25 bp, Homo sapien
gagggattcatagataaagccacat

SEQ ID NO: 4951509 - DNA, 25 bp, Homo sapien
gcaatacagctctacacggaagtag

SEQ ID NO: 4951510 - DNA, 25 bp, Homo sapien
gcaatacagctctacacagaagtag

SEQ ID NO: 4951511 - DNA, 25 bp, Homo sapien
aagtaggtgctgacctctagtggac

SEQ ID NO: 4951512 - DNA, 25 bp, Homo sapien
tgtgtagcaatacagctctacacgg

SEQ ID NO: 4951513 - DNA, 25 bp, Homo sapien
ctgctgtcagatagaaagcaagact

SEQ ID NO: 4951514 - DNA, 25 bp, Homo sapien
tgtcgaagagggtaattggattctc

SEQ ID NO: 4951515 - DNA, 25 bp, Homo sapien
actggatcgatggagggtctgaccc

SEQ ID NO: 4951516 - DNA, 25 bp, Homo sapien
aattggattctcttcaacatgtttc

SEQ ID NO: 4951517 - DNA, 25 bp, Homo sapien
actgaaatttgttgtgttccacatt

SEQ ID NO: 4951518 - DNA, 25 bp, Homo sapien
ctactgaaatttgttgtgttccaca

SEQ ID NO: 4951519 - DNA, 25 bp, Homo sapien
tactgaaatttgttgtgttccacat

SEQ ID NO: 4951520 - DNA, 25 bp, Homo sapien
gaaatctgcgtcctgggtatagatt

SEQ ID NO: 4951521 - DNA, 25 bp, Homo sapien
tgtttgattgtaaattaccgtcgtg

SEQ ID NO: 4951522 - DNA, 25 bp, Homo sapien
ccatggctttacagtggtagggact

SEQ ID NO: 4951523 - DNA, 25 bp, Homo sapien
agccgtccatctggatgtgtttgat

SEQ ID NO: 4951524 - DNA, 25 bp, Homo sapien
gcacatctcacacttgagcacaaca

SEQ ID NO: 4951525 - DNA, 25 bp, Homo sapien
caggcacatctcacacttgagcaca

SEQ ID NO: 4951526 - DNA, 25 bp, Homo sapien
tcccaatcatcgcacttatgaccta

SEQ ID NO: 4951527 - DNA, 25 bp, Homo sapien
agcacaacatcccaatcatcgcact

SEQ ID NO: 4951528 - DNA, 25 bp, Homo sapien
cctgggaacacctttggcgatcagg

SEQ ID NO: 4951529 - DNA, 25 bp, Homo sapien
ggctgctctgctaccgtggacttga

SEQ ID NO: 4951530 - DNA, 25 bp, Homo sapien
gctgctctgctaccgtggacttgag

SEQ ID NO: 4951531 - DNA, 25 bp, Homo sapien
acacctttggcgatcaggggttctc

SEQ ID NO: 4951532 - DNA, 25 bp, Homo sapien
gcttctgagatcagaagagaaaggg

SEQ ID NO: 4951533 - DNA, 25 bp, Homo sapien
tctgagatcagaagagaaagggggc

SEQ ID NO: 4951534 - DNA, 25 bp, Homo sapien
ccaggcctgacctgcttagcttctg

SEQ ID NO: 4951535 - DNA, 25 bp, Homo sapien
tgacagtcttccatccaagtactaa

SEQ ID NO: 4951536 - DNA, 25 bp, Homo sapien
taggatgctccaagaccctcggccg

SEQ ID NO: 4951537 - DNA, 25 bp, Homo sapien
ttaggatgctccaagaccctcggcc

SEQ ID NO: 4951538 - DNA, 25 bp, Homo sapien
tgtggtttgtcgctcaggaagaaag

SEQ ID NO: 4951539 - DNA, 25 bp, Homo sapien
gggggctgtggtttgtcgctcagga

SEQ ID NO: 4951540 - DNA, 25 bp, Homo sapien
tggtttgtcgctcaggaagaaaggc

SEQ ID NO: 4951541 - DNA, 25 bp, Homo sapien
gctgtggtttgtcgctcaggaagaa

SEQ ID NO: 4951542 - DNA, 25 bp, Homo sapien
atgtgcttcagggtaggatgagtca

SEQ ID NO: 4951543 - DNA, 25 bp, Homo sapien
ccatggtggatcctatgtgcttcag

SEQ ID NO: 4951544 - DNA, 25 bp, Homo sapien
cacggaggggcgtgaacccatggtg

SEQ ID NO: 4951545 - DNA, 25 bp, Homo sapien
tctgggggctgagagacacggaggg

SEQ ID NO: 4951546 - DNA, 25 bp, Homo sapien
gtctggatttcaatggctggctgac

SEQ ID NO: 4951547 - DNA, 25 bp, Homo sapien
tagccttcaaggctcgccattgtct

SEQ ID NO: 4951548 - DNA, 25 bp, Homo sapien
ctagccttcaaggctcgccattgtc

SEQ ID NO: 4951549 - DNA, 25 bp, Homo sapien
tgttccaggaaacttaaaccactca

SEQ ID NO: 4951550 - DNA, 25 bp, Homo sapien
tgcgtacccatggatacttcactgc

SEQ ID NO: 4951551 - DNA, 25 bp, Homo sapien
ggtgccaccttttctataaagtctc

SEQ ID NO: 4951552 - DNA, 25 bp, Homo sapien
tattctttcaggcagctcggtgcca

SEQ ID NO: 4951553 - DNA, 25 bp, Homo sapien
ttcccctggtctctaatgtccttct

SEQ ID NO: 4951554 - DNA, 25 bp, Homo sapien
caaattcacaaagggtgtaaaactg

SEQ ID NO: 4951555 - DNA, 25 bp, Homo sapien
tggaaggcctccaacgggctcctga

SEQ ID NO: 4951556 - DNA, 25 bp, Homo sapien
ccaaagtcaggtttggcagctcctc

SEQ ID NO: 4951557 - DNA, 25 bp, Homo sapien
cccacggacaaattcacaaagggtg

SEQ ID NO: 4951558 - DNA, 25 bp, Homo sapien
ttgtccacatgaaggcggcaagatg

SEQ ID NO: 4951559 - DNA, 25 bp, Homo sapien
aattgtccacatgaaggcggcaaga

SEQ ID NO: 4951560 - DNA, 25 bp, Homo sapien
ttaattgtccacatgaaggcggcaa

SEQ ID NO: 4951561 - DNA, 25 bp, Homo sapien
taattgtccacatgaaggcggcaag

SEQ ID NO: 4951562 - DNA, 25 bp, Homo sapien
ccccacgagaacttgctcctgggtg

SEQ ID NO: 4951563 - DNA, 25 bp, Homo sapien
cctgaaagtcctaacacatctgctt

SEQ ID NO: 4951564 - DNA, 25 bp, Homo sapien
agtcctaacacatctgcttcttgcc

SEQ ID NO: 4951565 - DNA, 25 bp, Homo sapien
ttcttgccccacgagaacttgctcc

SEQ ID NO: 4951566 - DNA, 25 bp, Homo sapien
aaggacatgagagagttccggttaa

SEQ ID NO: 4951567 - DNA, 25 bp, Homo sapien
catgagagagttccggttaagcaag

SEQ ID NO: 4951568 - DNA, 25 bp, Homo sapien
gacatgagagagttccggttaagca

SEQ ID NO: 4951569 - DNA, 25 bp, Homo sapien
tgggacagggtgcttggagagccgg

SEQ ID NO: 4951570 - DNA, 25 bp, Homo sapien
tcatcacaggtatcgacatcacaga

SEQ ID NO: 4951571 - DNA, 25 bp, Homo sapien
tccctgccaaaagcttggggtgctc

SEQ ID NO: 4951572 - DNA, 25 bp, Homo sapien
caggtatcgacatcacagatgtccc

SEQ ID NO: 4951573 - DNA, 25 bp, Homo sapien
ctgtcatcacaggtatcgacatcac

SEQ ID NO: 4951574 - DNA, 25 bp, Homo sapien
ctcttgagcattgagagtatagata

SEQ ID NO: 4951575 - DNA, 25 bp, Homo sapien
cttgagcattgagagtatagatatt

SEQ ID NO: 4951576 - DNA, 25 bp, Homo sapien
tgagcattgagagtatagatatttt

SEQ ID NO: 4951577 - DNA, 25 bp, Homo sapien
tcttgagcattgagagtatagatat

SEQ ID NO: 4951578 - DNA, 25 bp, Homo sapien
ttgttttctctgcattcggttctga

SEQ ID NO: 4951579 - DNA, 25 bp, Homo sapien
caagccagcggctctgacgttttgt

SEQ ID NO: 4951580 - DNA, 25 bp, Homo sapien
cgacactgcgcaggttgttacggaa

SEQ ID NO: 4951581 - DNA, 25 bp, Homo sapien
cagtccaagccagcggctctgacgt

SEQ ID NO: 4951582 - DNA, 25 bp, Homo sapien
tgcaagttctgaggctttccgggat

SEQ ID NO: 4951583 - DNA, 25 bp, Homo sapien
aggccgcaggtactgaagtggatca

SEQ ID NO: 4951584 - DNA, 25 bp, Homo sapien
ggagggcgcggcttctaggcccagg

SEQ ID NO: 4951585 - DNA, 25 bp, Homo sapien
aggctgaccggctgcacggccggga

SEQ ID NO: 4951586 - DNA, 25 bp, Homo sapien
ccgcccaggccttcggtctggctcg

SEQ ID NO: 4951587 - DNA, 25 bp, Homo sapien
gcccaggccttcggtctggctcggc

SEQ ID NO: 4951588 - DNA, 25 bp, Homo sapien
cgcccaggccttcggtctggctcgg

SEQ ID NO: 4951589 - DNA, 25 bp, Homo sapien
ctggctcggccacccttggaagcaa

SEQ ID NO: 4951590 - DNA, 25 bp, Homo sapien
tcgtctcaattcgtcccgcttcctg

SEQ ID NO: 4951591 - DNA, 25 bp, Homo sapien
taacgttgaccgtcgagtgtccatc

SEQ ID NO: 4951592 - DNA, 25 bp, Homo sapien
aaaatctctaacgttgaccgtcgag

SEQ ID NO: 4951593 - DNA, 25 bp, Homo sapien
ttgaccgtcgagtgtccatctggcg

SEQ ID NO: 4951594 - DNA, 25 bp, Homo sapien
cattgcctcccataaattccgtttg

SEQ ID NO: 4951595 - DNA, 25 bp, Homo sapien
gctctataaggcaaaaagccgcaca

SEQ ID NO: 4951596 - DNA, 25 bp, Homo sapien
gaggccatctaaatttggtgctgga

SEQ ID NO: 4951597 - DNA, 25 bp, Homo sapien
cagaccttctacacagctctataag

SEQ ID NO: 4951598 - DNA, 25 bp, Homo sapien
tgtcctagggagaacgctttgcagc

SEQ ID NO: 4951599 - DNA, 25 bp, Homo sapien
gcacaactcctcatgttgactcgtg

SEQ ID NO: 4951600 - DNA, 25 bp, Homo sapien
tattattgacatcctcgtcactgtg

SEQ ID NO: 4951601 - DNA, 25 bp, Homo sapien
tcatgttgactcgtgggccctgaaa

SEQ ID NO: 4951602 - DNA, 25 bp, Homo sapien
tctctggcaaaagctcctcatacat

SEQ ID NO: 4951603 - DNA, 25 bp, Homo sapien
gaagcagcatagatggatggacttt

SEQ ID NO: 4951604 - DNA, 25 bp, Homo sapien
cattggatacggttatgcgggaaaa

SEQ ID NO: 4951605 - DNA, 25 bp, Homo sapien
gccttcctctaaatgctagcattgg

SEQ ID NO: 4951606 - DNA, 25 bp, Homo sapien
tcttttccgcttaagaggagatctg

SEQ ID NO: 4951607 - DNA, 25 bp, Homo sapien
ttttccgcttaagaggagatctggg

SEQ ID NO: 4951608 - DNA, 25 bp, Homo sapien
ttccgcttaagaggagatctgggct

SEQ ID NO: 4951609 - DNA, 25 bp, Homo sapien
atctcttttccgcttaagaggagat

SEQ ID NO: 4951610 - DNA, 25 bp, Homo sapien
caggggaaagaagagtatcaccaat

SEQ ID NO: 4951611 - DNA, 25 bp, Homo sapien
agaagagtatcaccaatttttcctt

SEQ ID NO: 4951612 - DNA, 25 bp, Homo sapien
atctggaagtatctggtagagttac

SEQ ID NO: 4951613 - DNA, 25 bp, Homo sapien
gaaagaagagtatcaccaatttttc

SEQ ID NO: 4951614 - DNA, 25 bp, Homo sapien
gggcagcacatcagcgaagggtaca

SEQ ID NO: 4951615 - DNA, 25 bp, Homo sapien
aattactggtggcataaataggccc

SEQ ID NO: 4951616 - DNA, 25 bp, Homo sapien
gatggcagtggtgcatatgagccca

SEQ ID NO: 4951617 - DNA, 25 bp, Homo sapien
gaagggtacagcaacctctgaagga

SEQ ID NO: 4951618 - DNA, 25 bp, Homo sapien
ggcaacggcaaatagacaagggctt

SEQ ID NO: 4951619 - DNA, 25 bp, Homo sapien
gacaagggcttgtgaaggctcaggg

SEQ ID NO: 4951620 - DNA, 25 bp, Homo sapien
ggaggtatattttgaaggcaacggc

SEQ ID NO: 4951621 - DNA, 25 bp, Homo sapien
caagcaggttgtgccacattctgca

SEQ ID NO: 4951622 - DNA, 25 bp, Homo sapien
tccgatagagcttgtgaacccgctg

SEQ ID NO: 4951623 - DNA, 25 bp, Homo sapien
cacatacaatgagtcctgagcccag

SEQ ID NO: 4951624 - DNA, 25 bp, Homo sapien
tcacggaggaaggtgttgacccaca

SEQ ID NO: 4951625 - DNA, 25 bp, Homo sapien
cacaaggattgcacacagtaggtac

SEQ ID NO: 4951626 - DNA, 25 bp, Homo sapien
gtcggtcgctccttccttggcgggc

SEQ ID NO: 4951627 - DNA, 25 bp, Homo sapien
ggaggtctgcggagggcgcctggct

SEQ ID NO: 4951628 - DNA, 25 bp, Homo sapien
gcgggacaggcagccggagggagct

SEQ ID NO: 4951629 - DNA, 25 bp, Homo sapien
acgggctccggtgcgggacaggcag

SEQ ID NO: 4951630 - DNA, 25 bp, Homo sapien
ggcattcaccgcgtgccttaattgt

SEQ ID NO: 4951631 - DNA, 25 bp, Homo sapien
ttggcattcaccgcgtgccttaatt

SEQ ID NO: 4951632 - DNA, 25 bp, Homo sapien
tcttggcattcaccgcgtgccttaa

SEQ ID NO: 4951633 - DNA, 25 bp, Homo sapien
cattcaccgcgtgccttaattgtat

SEQ ID NO: 4951634 - DNA, 25 bp, Homo sapien
taacagcgacgtcttccaaaggctc

SEQ ID NO: 4951635 - DNA, 25 bp, Homo sapien
catcctttcgcatccaggctttttc

SEQ ID NO: 4951636 - DNA, 25 bp, Homo sapien
aagaaataaaaagcggcgcgtgtgc

SEQ ID NO: 4951637 - DNA, 25 bp, Homo sapien
ccaatcacacagacaatgagataac

SEQ ID NO: 4951638 - DNA, 25 bp, Homo sapien
caaagcggagggggtggagggatgg

SEQ ID NO: 4951639 - DNA, 25 bp, Homo sapien
ctgcaaagcggagggggtggaggga

SEQ ID NO: 4951640 - DNA, 25 bp, Homo sapien
tgcaaagcggagggggtggagggat

SEQ ID NO: 4951641 - DNA, 25 bp, Homo sapien
gtggagggatgggggtgtgggtgga

SEQ ID NO: 4951642 - DNA, 25 bp, Homo sapien
ccatgtcgccctctgcttcgcccag

SEQ ID NO: 4951643 - DNA, 25 bp, Homo sapien
gcttcgcccaggaaactgaagggga

SEQ ID NO: 4951644 - DNA, 25 bp, Homo sapien
agagagcgaaggacaaggagagcag

SEQ ID NO: 4951645 - DNA, 25 bp, Homo sapien
gaagaagagagcgaaggacaaggag

SEQ ID NO: 4951646 - DNA, 25 bp, Homo sapien
cgggcgtgccgcaggggcgagttgc

SEQ ID NO: 4951647 - DNA, 25 bp, Homo sapien
gcgagttgccgcggtccggggctgg

SEQ ID NO: 4951648 - DNA, 25 bp, Homo sapien
ttcagccttccggaactcgcctgct

SEQ ID NO: 4951649 - DNA, 25 bp, Homo sapien
ccttccggaactcgcctgctgcagt

SEQ ID NO: 4951650 - DNA, 25 bp, Homo sapien
tggacgtagatttaaaaggtcactc

SEQ ID NO: 4951651 - DNA, 25 bp, Homo sapien
cactcgtgtataatgcggctggatc

SEQ ID NO: 4951652 - DNA, 25 bp, Homo sapien
tgtataatgcggctggatccccggg

SEQ ID NO: 4951653 - DNA, 25 bp, Homo sapien
taaaaggtcactcgtgtataatgcg

SEQ ID NO: 4951654 - DNA, 25 bp, Homo sapien
ttttctaagccttgagtcccctgtc

SEQ ID NO: 4951655 - DNA, 25 bp, Homo sapien
tcttttctaagccttgagtcccctg

SEQ ID NO: 4951656 - DNA, 25 bp, Homo sapien
ttctaagccttgagtcccctgtccc

SEQ ID NO: 4951657 - DNA, 25 bp, Homo sapien
tttctaagccttgagtcccctgtcc

SEQ ID NO: 4951658 - DNA, 25 bp, Homo sapien
cttctcgccgaacccaaggtgcttt

SEQ ID NO: 4951659 - DNA, 25 bp, Homo sapien
gccggcccaaccaaaggcagtggat

SEQ ID NO: 4951660 - DNA, 25 bp, Homo sapien
ttttaagagactggccgcagtcccc

SEQ ID NO: 4951661 - DNA, 25 bp, Homo sapien
cgtgttctgggttcagcgctcctgc

SEQ ID NO: 4951662 - DNA, 25 bp, Homo sapien
caagccctaatctcgtgcgccgtcc

SEQ ID NO: 4951663 - DNA, 25 bp, Homo sapien
gccctaatctcgtgcgccgtcctct

SEQ ID NO: 4951664 - DNA, 25 bp, Homo sapien
cctaatctcgtgcgccgtcctcttt

SEQ ID NO: 4951665 - DNA, 25 bp, Homo sapien
aagccctaatctcgtgcgccgtcct

SEQ ID NO: 4951666 - DNA, 25 bp, Homo sapien
ctgtgccaaggaaaatgcggatttg

SEQ ID NO: 4951667 - DNA, 25 bp, Homo sapien
agaggattaggagcccgtccacaga

SEQ ID NO: 4951668 - DNA, 25 bp, Homo sapien
ttcaggtaaaggaagccgcatctgc

SEQ ID NO: 4951669 - DNA, 25 bp, Homo sapien
cgcatctgctgacggttccgaaaac

SEQ ID NO: 4951670 - DNA, 25 bp, Homo sapien
tctccacggcttaggcagacggagt

SEQ ID NO: 4951671 - DNA, 25 bp, Homo sapien
gcgggcgtcaaatcgacacctgact

SEQ ID NO: 4951672 - DNA, 25 bp, Homo sapien
gccgcggcgcgttttagggctgccg

SEQ ID NO: 4951673 - DNA, 25 bp, Homo sapien
cgcgcttccgtttatccgtttctat

SEQ ID NO: 4951674 - DNA, 25 bp, Homo sapien
tgcggcgacctgagcgccggtgcag

SEQ ID NO: 4951675 - DNA, 25 bp, Homo sapien
ctgcggcggatgcggttgacatcac

SEQ ID NO: 4951676 - DNA, 25 bp, Homo sapien
cggatgcggttgacatcactgcggc

SEQ ID NO: 4951677 - DNA, 25 bp, Homo sapien
gttgacatcactgcggcggctgccg

SEQ ID NO: 4951678 - DNA, 25 bp, Homo sapien
tagtttcggaactccttgtatatgg

SEQ ID NO: 4951679 - DNA, 25 bp, Homo sapien
tcgcagatagtttcggaactccttg

SEQ ID NO: 4951680 - DNA, 25 bp, Homo sapien
aactccttgtatatggagggatggg

SEQ ID NO: 4951681 - DNA, 25 bp, Homo sapien
ttcggaactccttgtatatggaggg

SEQ ID NO: 4951682 - DNA, 25 bp, Homo sapien
gacggtttctggcagtccctcctcg

SEQ ID NO: 4951683 - DNA, 25 bp, Homo sapien
tgcaatgcagggtatttgccgctca

SEQ ID NO: 4951684 - DNA, 25 bp, Homo sapien
aaggcctggttttgtttagattgag

SEQ ID NO: 4951685 - DNA, 25 bp, Homo sapien
tgaaggacagtaggacacgctgctg

SEQ ID NO: 4951686 - DNA, 25 bp, Homo sapien
aatcagtgtcccttctgtgttcagc

SEQ ID NO: 4951687 - DNA, 25 bp, Homo sapien
ttcagcagcatcaaacagattatct

SEQ ID NO: 4951688 - DNA, 25 bp, Homo sapien
gcatatataactctgctgggaggcg

SEQ ID NO: 4951689 - DNA, 25 bp, Homo sapien
tgctgggaggcgagagtgtcgtcag

SEQ ID NO: 4951690 - DNA, 25 bp, Homo sapien
gaactgccatgctccatgccgttct

SEQ ID NO: 4951691 - DNA, 25 bp, Homo sapien
agtgaactgccatgctccatgccgt

SEQ ID NO: 4951692 - DNA, 25 bp, Homo sapien
tgtgtggtccatggctggccccagc

SEQ ID NO: 4951693 - DNA, 25 bp, Homo sapien
cagcctgtgtggtccatggctggcc

SEQ ID NO: 4951694 - DNA, 25 bp, Homo sapien
gacttgggaatctggtgatcgtttg

SEQ ID NO: 4951695 - DNA, 25 bp, Homo sapien
tcggactctcccagacttgggaatc

SEQ ID NO: 4951696 - DNA, 25 bp, Homo sapien
ctggtgatcgtttggaataagctac

SEQ ID NO: 4951697 - DNA, 25 bp, Homo sapien
gagaaggagagtggaagtgatttcg

SEQ ID NO: 4951698 - DNA, 25 bp, Homo sapien
gggccatgattttgtggctaagaaa

SEQ ID NO: 4951699 - DNA, 25 bp, Homo sapien
ctttcctgatgtgtgggccatgatt

SEQ ID NO: 4951700 - DNA, 25 bp, Homo sapien
ggagggctttcctgatgtgtgggcc

SEQ ID NO: 4951701 - DNA, 25 bp, Homo sapien
tgtgtgggccatgattttgtggcta

SEQ ID NO: 4951702 - DNA, 25 bp, Homo sapien
aagaaaacctgatgccccagtgaat

SEQ ID NO: 4951703 - DNA, 25 bp, Homo sapien
ctgatgccccagtgaatagccattt

SEQ ID NO: 4951704 - DNA, 25 bp, Homo sapien
gattctccactcagggaaatagcat

SEQ ID NO: 4951705 - DNA, 25 bp, Homo sapien
tctagacccagattctccactcagg

SEQ ID NO: 4951706 - DNA, 25 bp, Homo sapien
tcctccttgtgactcgatgcttctg

SEQ ID NO: 4951707 - DNA, 25 bp, Homo sapien
tagaatgacatagcccagctgcttc

SEQ ID NO: 4951708 - DNA, 25 bp, Homo sapien
tcatcctccttgtgactcgatgctt

SEQ ID NO: 4951709 - DNA, 25 bp, Homo sapien
cacctttagaatgacatagcccagc

SEQ ID NO: 4951710 - DNA, 25 bp, Homo sapien
aatctgatttccaccccctagagca

SEQ ID NO: 4951711 - DNA, 25 bp, Homo sapien
gcaatctgatttccaccccctagag

SEQ ID NO: 4951712 - DNA, 25 bp, Homo sapien
atctgatttccaccccctagagcaa

SEQ ID NO: 4951713 - DNA, 25 bp, Homo sapien
caatctgatttccaccccctagagc

SEQ ID NO: 4951714 - DNA, 25 bp, Homo sapien
gggtctttaaagcatcctagggcaa

SEQ ID NO: 4951715 - DNA, 25 bp, Homo sapien
cagcacatttctgagcttcgggagg

SEQ ID NO: 4951716 - DNA, 25 bp, Homo sapien
taaacattgcaagccccaaagggat

SEQ ID NO: 4951717 - DNA, 25 bp, Homo sapien
cagatcagagccctttttgcagtca

SEQ ID NO: 4951718 - DNA, 25 bp, Homo sapien
ttggctagtcttcgcttccacataa

SEQ ID NO: 4951719 - DNA, 25 bp, Homo sapien
gggtaccagttctattggctagtct

SEQ ID NO: 4951720 - DNA, 25 bp, Homo sapien
cataaatcctgtagccgatggtctc

SEQ ID NO: 4951721 - DNA, 25 bp, Homo sapien
atggtctccgggcatttttgccacc

SEQ ID NO: 4951722 - DNA, 25 bp, Homo sapien
gtttctctctgatgcatctcgtcca

SEQ ID NO: 4951723 - DNA, 25 bp, Homo sapien
tcgtccactagccagagaggaggtc

SEQ ID NO: 4951724 - DNA, 25 bp, Homo sapien
tggagctactgttgtaggccaactc

SEQ ID NO: 4951725 - DNA, 25 bp, Homo sapien
gaaaacctcagtcgtttctttgagc

SEQ ID NO: 4951726 - DNA, 25 bp, Homo sapien
caggggtggcttgggcagaactggc

SEQ ID NO: 4951727 - DNA, 25 bp, Homo sapien
ctgccccacaccccaggggtggctt

SEQ ID NO: 4951728 - DNA, 25 bp, Homo sapien
ccacaccccaggggtggcttgggca

SEQ ID NO: 4951729 - DNA, 25 bp, Homo sapien
ggggtggcttgggcagaactggcca

SEQ ID NO: 4951730 - DNA, 25 bp, Homo sapien
tctcacacaatcgcctgaaaaccca

SEQ ID NO: 4951731 - DNA, 25 bp, Homo sapien
atgggtaatgggcagacatcgtaac

SEQ ID NO: 4951732 - DNA, 25 bp, Homo sapien
ctccttcagactgcatgtacctata

SEQ ID NO: 4951733 - DNA, 25 bp, Homo sapien
tccttcagactgcatgtacctatag

SEQ ID NO: 4951734 - DNA, 25 bp, Homo sapien
tatagggcagctctgtatctctcat

SEQ ID NO: 4951735 - DNA, 25 bp, Homo sapien
gtacctatagggcagctctgtatct

SEQ ID NO: 4951736 - DNA, 25 bp, Homo sapien
aggagaatggctgttcttgtcctct

SEQ ID NO: 4951737 - DNA, 25 bp, Homo sapien
catgagggggcgctcatcctctcca

SEQ ID NO: 4951738 - DNA, 25 bp, Homo sapien
atggaggagaatggctgttcttgtc

SEQ ID NO: 4951739 - DNA, 25 bp, Homo sapien
tgagggggcgctcatcctctccaga

SEQ ID NO: 4951740 - DNA, 25 bp, Homo sapien
tggagacaggaggaacggtgaacaa

SEQ ID NO: 4951741 - DNA, 25 bp, Homo sapien
aaactgacagccggcagcagtgatg

SEQ ID NO: 4951742 - DNA, 25 bp, Homo sapien
ggagacaggaggaacggtgaacaag

SEQ ID NO: 4951743 - DNA, 25 bp, Homo sapien
acaggaggaacggtgaacaagggct

SEQ ID NO: 4951744 - DNA, 25 bp, Homo sapien
taaaattcctcgactgttgacacag

SEQ ID NO: 4951745 - DNA, 25 bp, Homo sapien
gtacacaagcttgccttgtctttgg

SEQ ID NO: 4951746 - DNA, 25 bp, Homo sapien
ttagtgcacgtagcccggtctgcgt

SEQ ID NO: 4951747 - DNA, 25 bp, Homo sapien
catggctacggtgactggctgtaca

SEQ ID NO: 4951748 - DNA, 25 bp, Homo sapien
agtcaccactggctttctggatcgc

SEQ ID NO: 4951749 - DNA, 25 bp, Homo sapien
tctggatcgcttcggatgggccctt

SEQ ID NO: 4951750 - DNA, 25 bp, Homo sapien
tgagatgcggtatcgctctagctcc

SEQ ID NO: 4951751 - DNA, 25 bp, Homo sapien
ttccaggccatttctttgtgtgttc

SEQ ID NO: 4951752 - DNA, 25 bp, Homo sapien
cgcgaatcaggctgaaggtctctga

SEQ ID NO: 4951753 - DNA, 25 bp, Homo sapien
ggaggccatgcgcacatttccagca

SEQ ID NO: 4951754 - DNA, 25 bp, Homo sapien
gtaaagagaacacaagccgcggagg

SEQ ID NO: 4951755 - DNA, 25 bp, Homo sapien
tgtgcttttctcagccactgcgcct

SEQ ID NO: 4951756 - DNA, 25 bp, Homo sapien
tgatctctgacatccgtgggtaatg

SEQ ID NO: 4951757 - DNA, 25 bp, Homo sapien
cccctgatctctgacatccgtgggt

SEQ ID NO: 4951758 - DNA, 25 bp, Homo sapien
tctctgacatccgtgggtaatgagc

SEQ ID NO: 4951759 - DNA, 25 bp, Homo sapien
tctgacatccgtgggtaatgagctg

SEQ ID NO: 4951760 - DNA, 25 bp, Homo sapien
tagtaactgaagggttattttgctg

SEQ ID NO: 4951761 - DNA, 25 bp, Homo sapien
gtctgtccctggtagtaactgaagg

SEQ ID NO: 4951762 - DNA, 25 bp, Homo sapien
ctgtccctggtagtaactgaagggt

SEQ ID NO: 4951763 - DNA, 25 bp, Homo sapien
gtaactgaagggttattttgctgag

SEQ ID NO: 4951764 - DNA, 25 bp, Homo sapien
tcactatggactgagctcctgtggc

SEQ ID NO: 4951765 - DNA, 25 bp, Homo sapien
tgagtcactatggactgagctcctg

SEQ ID NO: 4951766 - DNA, 25 bp, Homo sapien
gctcctgtggccctcgataacaggt

SEQ ID NO: 4951767 - DNA, 25 bp, Homo sapien
tggtcctgagtcactatggactgag

SEQ ID NO: 4951768 - DNA, 25 bp, Homo sapien
gatggggtgggaaggacagtgtctc

SEQ ID NO: 4951769 - DNA, 25 bp, Homo sapien
ggggtgggaaggacagtgtctccag

SEQ ID NO: 4951770 - DNA, 25 bp, Homo sapien
tggggtgggaaggacagtgtctcca

SEQ ID NO: 4951771 - DNA, 25 bp, Homo sapien
ctgatggggtgggaaggacagtgtc

SEQ ID NO: 4951772 - DNA, 25 bp, Homo sapien
tccttggcattgcacagctctactg

SEQ ID NO: 4951773 - DNA, 25 bp, Homo sapien
cttggcattgcacagctctactgcc

SEQ ID NO: 4951774 - DNA, 25 bp, Homo sapien
gctctactgcctggagatcaccagt

SEQ ID NO: 4951775 - DNA, 25 bp, Homo sapien
tctccttggcattgcacagctctac

SEQ ID NO: 4951776 - DNA, 25 bp, Homo sapien
tattgacgcattccatgacagcatt

SEQ ID NO: 4951777 - DNA, 25 bp, Homo sapien
ttatgctgacagctttaagatcaat

SEQ ID NO: 4951778 - DNA, 25 bp, Homo sapien
tattgaaatcaatactgcttatgct

SEQ ID NO: 4951779 - DNA, 25 bp, Homo sapien
tctagttttatattgacgcattcca

SEQ ID NO: 4951780 - DNA, 25 bp, Homo sapien
cctgttatcattttgccggtattcc

SEQ ID NO: 4951781 - DNA, 25 bp, Homo sapien
agagacaagggtttcgctttgttgc

SEQ ID NO: 4951782 - DNA, 25 bp, Homo sapien
tagagacaagggtttcgctttgttg

SEQ ID NO: 4951783 - DNA, 25 bp, Homo sapien
aacttctggctcaagcaaccatccc

SEQ ID NO: 4951784 - DNA, 25 bp, Homo sapien
ttctggctcaagcaaccatcccacc

SEQ ID NO: 4951785 - DNA, 25 bp, Homo sapien
atgagctcaggattcctggggcaag

SEQ ID NO: 4951786 - DNA, 25 bp, Homo sapien
cttgcctctgtaatgctcatgagct

SEQ ID NO: 4951787 - DNA, 25 bp, Homo sapien
gaagctgcagaacctttggaggagg

SEQ ID NO: 4951788 - DNA, 25 bp, Homo sapien
aagctgcagaacctttggaggaggt

SEQ ID NO: 4951789 - DNA, 25 bp, Homo sapien
tccagatagtctgcttgtcacctcc

SEQ ID NO: 4951790 - DNA, 25 bp, Homo sapien
gcaaagacatgtcatatagcctcta

SEQ ID NO: 4951791 - DNA, 25 bp, Homo sapien
gaatttagattttgagggtccaaca

SEQ ID NO: 4951792 - DNA, 25 bp, Homo sapien
taacatggttggtctatgaagagca

SEQ ID NO: 4951793 - DNA, 25 bp, Homo sapien
catagatcatgggtaagaacctccc

SEQ ID NO: 4951794 - DNA, 25 bp, Homo sapien
tctgagacgacctgcccattttggc

SEQ ID NO: 4951795 - DNA, 25 bp, Homo sapien
taggctgcacacacctcatgagaag

SEQ ID NO: 4951796 - DNA, 25 bp, Homo sapien
taatagtgaccaggccttcgcaagc

SEQ ID NO: 4951797 - DNA, 25 bp, Homo sapien
ggctgcaaggcaggtcctcttctat

SEQ ID NO: 4951798 - DNA, 25 bp, Homo sapien
tggctgcaaggcaggtcctcttcta

SEQ ID NO: 4951799 - DNA, 25 bp, Homo sapien
tgggcactgctaaactgcgaagtcg

SEQ ID NO: 4951800 - DNA, 25 bp, Homo sapien
tcgtcccgagagaacctcaggaact

SEQ ID NO: 4951801 - DNA, 25 bp, Homo sapien
catccccaagggctcggcgtgtttt

SEQ ID NO: 4951802 - DNA, 25 bp, Homo sapien
tacttcgtacgacaggagcgcactt

SEQ ID NO: 4951803 - DNA, 25 bp, Homo sapien
agcctctttcccgtcccgaggatgg

SEQ ID NO: 4951804 - DNA, 25 bp, Homo sapien
ccgaggatgggcaactcggcctcga

SEQ ID NO: 4951805 - DNA, 25 bp, Homo sapien
gcaactcggcctcgaacatcgtcag

SEQ ID NO: 4951806 - DNA, 25 bp, Homo sapien
atgctctcggccacccggagggctt

SEQ ID NO: 4951807 - DNA, 25 bp, Homo sapien
gtgggctggcctcgggcgggtcgcg

SEQ ID NO: 4951808 - DNA, 25 bp, Homo sapien
gctgcccggaaggaagccgtgggct

SEQ ID NO: 4951809 - DNA, 25 bp, Homo sapien
gtccactgacgtccctttgtctttg

SEQ ID NO: 4951810 - DNA, 25 bp, Homo sapien
cgtcatcttctggagccaaactggg

SEQ ID NO: 4951811 - DNA, 25 bp, Homo sapien
tctggccttgctcgcgggcgcccgc

SEQ ID NO: 4951812 - DNA, 25 bp, Homo sapien
cgtcgcggccccaagttttgggcag

SEQ ID NO: 4951813 - DNA, 25 bp, Homo sapien
ggagtgcataccgtcgcggccccaa

SEQ ID NO: 4951814 - DNA, 25 bp, Homo sapien
cccaagttttgggcaggaaatgtgc

SEQ ID NO: 4951815 - DNA, 25 bp, Homo sapien
gaaatgccggaatgagacgagacga

SEQ ID NO: 4951816 - DNA, 25 bp, Homo sapien
tcccgggaaatgccggaatgagacg

SEQ ID NO: 4951817 - DNA, 25 bp, Homo sapien
ctggtgcgagtgttgtcccgggaaa

SEQ ID NO: 4951818 - DNA, 25 bp, Homo sapien
cggaatgagacgagacgatgaaaac

SEQ ID NO: 4951819 - DNA, 25 bp, Homo sapien
ccactgtgtccctgtagaaccccat

SEQ ID NO: 4951820 - DNA, 25 bp, Homo sapien
tgctttcccagtctttttctccact

SEQ ID NO: 4951821 - DNA, 25 bp, Homo sapien
ctgctttcccagtctttttctccac

SEQ ID NO: 4951822 - DNA, 25 bp, Homo sapien
tttttctccactgtgtccctgtaga

SEQ ID NO: 4951823 - DNA, 25 bp, Homo sapien
aagactgtagcatataacctgttga

SEQ ID NO: 4951824 - DNA, 25 bp, Homo sapien
gcagtatcatgccaacagacacacg

SEQ ID NO: 4951825 - DNA, 25 bp, Homo sapien
ggcacataatcggtaagtccataac

SEQ ID NO: 4951826 - DNA, 25 bp, Homo sapien
tctttgtacccggaacacagtaagc

SEQ ID NO: 4951827 - DNA, 25 bp, Homo sapien
cagcatgaaggagtgcttctcagag

SEQ ID NO: 4951828 - DNA, 25 bp, Homo sapien
catcagcatgaaggagtgcttctca

SEQ ID NO: 4951829 - DNA, 25 bp, Homo sapien
ctcacaccccgagatgtgtgcatca

SEQ ID NO: 4951830 - DNA, 25 bp, Homo sapien
caccccgagatgtgtgcatcagcat

SEQ ID NO: 4951831 - DNA, 25 bp, Homo sapien
ggttatgatggttatatcgcaggcc

SEQ ID NO: 4951832 - DNA, 25 bp, Homo sapien
cacaagactccctttcgcaacattt

SEQ ID NO: 4951833 - DNA, 25 bp, Homo sapien
taatattagagtcatccctcccacc

SEQ ID NO: 4951834 - DNA, 25 bp, Homo sapien
ttactccctcccgttgatctatggg

SEQ ID NO: 4951835 - DNA, 25 bp, Homo sapien
cagtgccacatggaatctggacctg

SEQ ID NO: 4951836 - DNA, 25 bp, Homo sapien
tctgaggcttctgacaactcatcta

SEQ ID NO: 4951837 - DNA, 25 bp, Homo sapien
aatttcttgctatccatttaggagg

SEQ ID NO: 4951838 - DNA, 25 bp, Homo sapien
ttaggaggagactgttggtgtccat

SEQ ID NO: 4951839 - DNA, 25 bp, Homo sapien
ttgctgtggtgctggactggccact

SEQ ID NO: 4951840 - DNA, 25 bp, Homo sapien
cttcctgcagcttgtgtgcctgttt

SEQ ID NO: 4951841 - DNA, 25 bp, Homo sapien
ccccgttcacatggttgctgtggtg

SEQ ID NO: 4951842 - DNA, 25 bp, Homo sapien
cctgcagcttgtgtgcctgttttcc

SEQ ID NO: 4951843 - DNA, 25 bp, Homo sapien
ggcagaaatggtagctggtcccaag

SEQ ID NO: 4951844 - DNA, 25 bp, Homo sapien
gaaatggtagctggtcccaagctcc

SEQ ID NO: 4951845 - DNA, 25 bp, Homo sapien
gaggcagaaatggtagctggtccca

SEQ ID NO: 4951846 - DNA, 25 bp, Homo sapien
atggtagctggtcccaagctcctta

SEQ ID NO: 4951847 - DNA, 25 bp, Homo sapien
tggaggttctggggactgcttcccc

SEQ ID NO: 4951848 - DNA, 25 bp, Homo sapien
ggaggttctggggactgcttcccca

SEQ ID NO: 4951849 - DNA, 25 bp, Homo sapien
gaggttctggggactgcttccccat

SEQ ID NO: 4951850 - DNA, 25 bp, Homo sapien
gcagtcaaatgttctaccccgaatt

SEQ ID NO: 4951851 - DNA, 25 bp, Homo sapien
cagtcaaatgttctaccccgaattc

SEQ ID NO: 4951852 - DNA, 25 bp, Homo sapien
tacccagattcgaagcggggacctc

SEQ ID NO: 4951853 - DNA, 25 bp, Homo sapien
tcaaatgttctaccccgaattctac

SEQ ID NO: 4951854 - DNA, 25 bp, Homo sapien
tttgtcctttgtcaaagccctgaag

SEQ ID NO: 4951855 - DNA, 25 bp, Homo sapien
tgtcctttgtcaaagccctgaagca

SEQ ID NO: 4951856 - DNA, 25 bp, Homo sapien
ctgcttatcatttctttgtcctttg

SEQ ID NO: 4951857 - DNA, 25 bp, Homo sapien
ttctttgtcctttgtcaaagccctg

SEQ ID NO: 4951858 - DNA, 25 bp, Homo sapien
tttagcctcagctttgctgcccaag

SEQ ID NO: 4951859 - DNA, 25 bp, Homo sapien
tcatgttgaacatcgtctttctggg

SEQ ID NO: 4951860 - DNA, 25 bp, Homo sapien
aagccctgtgccttgatctgctgca

SEQ ID NO: 4951861 - DNA, 25 bp, Homo sapien
tctgctgcaggaaggtaccaagtcc

SEQ ID NO: 4951862 - DNA, 25 bp, Homo sapien
tattgcacgttatcagaggagatga

SEQ ID NO: 4951863 - DNA, 25 bp, Homo sapien
tgtgtgttctgtattgcacgttatc

SEQ ID NO: 4951864 - DNA, 25 bp, Homo sapien
tctgtattgcacgttatcagaggag

SEQ ID NO: 4951865 - DNA, 25 bp, Homo sapien
tgcacgttatcagaggagatgaaca

SEQ ID NO: 4951866 - DNA, 25 bp, Homo sapien
tcagggttcttacgggtcatctgtg

SEQ ID NO: 4951867 - DNA, 25 bp, Homo sapien
tgtgaattcaaacctgtagcttcag

SEQ ID NO: 4951868 - DNA, 25 bp, Homo sapien
gcattgacagtgagatcccagtttt

SEQ ID NO: 4951869 - DNA, 25 bp, Homo sapien
gataggtatcataaacatgggagac

SEQ ID NO: 4951870 - DNA, 25 bp, Homo sapien
tttatccacagtcctgcgctgtctc

SEQ ID NO: 4951871 - DNA, 25 bp, Homo sapien
aattccatttgttaatcctaataga

SEQ ID NO: 4951872 - DNA, 25 bp, Homo sapien
tctctaattttgtagtcacctctga

SEQ ID NO: 4951873 - DNA, 25 bp, Homo sapien
aattttgtagtcacctctgacaccc

SEQ ID NO: 4951874 - DNA, 25 bp, Homo sapien
gctgtaggatcctgctatttgaatc

SEQ ID NO: 4951875 - DNA, 25 bp, Homo sapien
taagatgatggcagaacgctgtagg

SEQ ID NO: 4951876 - DNA, 25 bp, Homo sapien
aaatatgaatgggtctttgtccgac

SEQ ID NO: 4951877 - DNA, 25 bp, Homo sapien
gtctttgtccgacagaagacttttg

SEQ ID NO: 4951878 - DNA, 25 bp, Homo sapien
tttgtcgatggtaggcaaaaaatta

SEQ ID NO: 4951879 - DNA, 25 bp, Homo sapien
aagactgtaccttgatggtttctca

SEQ ID NO: 4951880 - DNA, 25 bp, Homo sapien
tggcagtaaggatgatcttgacaac

SEQ ID NO: 4951881 - DNA, 25 bp, Homo sapien
gatgatcttgacaacaataagtttg

SEQ ID NO: 4951882 - DNA, 25 bp, Homo sapien
gtttcttgcagagtggtgtggtggc

SEQ ID NO: 4951883 - DNA, 25 bp, Homo sapien
tgggacatccatatgactaaggctt

SEQ ID NO: 4951884 - DNA, 25 bp, Homo sapien
tgactaaggcttggggagtttcttg

SEQ ID NO: 4951885 - DNA, 25 bp, Homo sapien
gggagtttcttgcagagtggtgtgg

SEQ ID NO: 4951886 - DNA, 25 bp, Homo sapien
gaggagaactgcggatcttgtgcat

SEQ ID NO: 4951887 - DNA, 25 bp, Homo sapien
gagaggagaactgcggatcttgtgc

SEQ ID NO: 4951888 - DNA, 25 bp, Homo sapien
agaggagaactgcggatcttgtgca

SEQ ID NO: 4951889 - DNA, 25 bp, Homo sapien
cagagaggagaactgcggatcttgt

SEQ ID NO: 4951890 - DNA, 25 bp, Homo sapien
tctttctttctcatcgattttgtag

SEQ ID NO: 4951891 - DNA, 25 bp, Homo sapien
ttattcttggagcagccgacttttt

SEQ ID NO: 4951892 - DNA, 25 bp, Homo sapien
tctttctcatcgattttgtagattc

SEQ ID NO: 4951893 - DNA, 25 bp, Homo sapien
tggagcagccgactttttctttctt

SEQ ID NO: 4951894 - DNA, 25 bp, Homo sapien
gaaccgtccgatcggagcacctgtt

SEQ ID NO: 4951895 - DNA, 25 bp, Homo sapien
cctatgcagtgcgaggcgagaaccg

SEQ ID NO: 4951896 - DNA, 25 bp, Homo sapien
cggagctgagtcaaactccagggac

SEQ ID NO: 4951897 - DNA, 25 bp, Homo sapien
ctaatttttcactggcggagctgag

SEQ ID NO: 4951898 - DNA, 25 bp, Homo sapien
ccttgttgggttaccggcagaggcg

SEQ ID NO: 4951899 - DNA, 25 bp, Homo sapien
gccggttgcagtgagagtcgaaatc

SEQ ID NO: 4951900 - DNA, 25 bp, Homo sapien
tcccaggtacagatgagtgccggtt

SEQ ID NO: 4951901 - DNA, 25 bp, Homo sapien
aatgtaagggacacagagagcagaa

SEQ ID NO: 4951902 - DNA, 25 bp, Homo sapien
gtgacatgctcagtgttgcatgtgt

SEQ ID NO: 4951903 - DNA, 25 bp, Homo sapien
gatgtgacatgctcagtgttgcatg

SEQ ID NO: 4951904 - DNA, 25 bp, Homo sapien
ctggatgtggcacgagtgggagaga

SEQ ID NO: 4951905 - DNA, 25 bp, Homo sapien
tgtgacatgctcagtgttgcatgtg

SEQ ID NO: 4951906 - DNA, 25 bp, Homo sapien
caaccgtgttcctcagactgatgcg

SEQ ID NO: 4951907 - DNA, 25 bp, Homo sapien
gagttcaccgcccttcgactctgag

SEQ ID NO: 4951908 - DNA, 25 bp, Homo sapien
gactgatgcgaaactccaaagagcg

SEQ ID NO: 4951909 - DNA, 25 bp, Homo sapien
catggtttgaggtgttgctgcccgt

SEQ ID NO: 4951910 - DNA, 25 bp, Homo sapien
cagtccaaagtgactccattgcggg

SEQ ID NO: 4951911 - DNA, 25 bp, Homo sapien
gtccaaagtgactccattgcgggca

SEQ ID NO: 4951912 - DNA, 25 bp, Homo sapien
tccaaagtgactccattgcgggcac

SEQ ID NO: 4951913 - DNA, 25 bp, Homo sapien
cacagtccaaagtgactccattgcg

SEQ ID NO: 4951914 - DNA, 25 bp, Homo sapien
gcgagcactcggaggcagtgggcag

SEQ ID NO: 4951915 - DNA, 25 bp, Homo sapien
tcctctcggctctgcagccggaaag

SEQ ID NO: 4951916 - DNA, 25 bp, Homo sapien
ggcaaagcgagcactcggaggcagt

SEQ ID NO: 4951917 - DNA, 25 bp, Homo sapien
caaagcgagcactcggaggcagtgg

SEQ ID NO: 4951918 - DNA, 25 bp, Homo sapien
cgccacctcgtgatacttgccaatt

SEQ ID NO: 4951919 - DNA, 25 bp, Homo sapien
cacctcgtgatacttgccaatttcc

SEQ ID NO: 4951920 - DNA, 25 bp, Homo sapien
atcgccacctcgtgatacttgccaa

SEQ ID NO: 4951921 - DNA, 25 bp, Homo sapien
gccacctcgtgatacttgccaattt

SEQ ID NO: 4951922 - DNA, 25 bp, Homo sapien
ccatgaagtacgctggctgctcttc

SEQ ID NO: 4951923 - DNA, 25 bp, Homo sapien
cccatgaagtacgctggctgctctt

SEQ ID NO: 4951924 - DNA, 25 bp, Homo sapien
acccatgaagtacgctggctgctct

SEQ ID NO: 4951925 - DNA, 25 bp, Homo sapien
ccttcttcatggtagggtccagggc

SEQ ID NO: 4951926 - DNA, 25 bp, Homo sapien
tgtgtatcattagctcatctcctgt

SEQ ID NO: 4951927 - DNA, 25 bp, Homo sapien
ggtacagaaatttgacccaagatac

SEQ ID NO: 4951928 - DNA, 25 bp, Homo sapien
ccagggctgaatgctcacacttgtg

SEQ ID NO: 4951929 - DNA, 25 bp, Homo sapien
tgtgcccttagcgaatgcgaatccc

SEQ ID NO: 4951930 - DNA, 25 bp, Homo sapien
ctgctccttttgcagagcccctgct

SEQ ID NO: 4951931 - DNA, 25 bp, Homo sapien
ggctgtgcccttagcgaatgcgaat

SEQ ID NO: 4951932 - DNA, 25 bp, Homo sapien
gtgcccttagcgaatgcgaatcccc

SEQ ID NO: 4951933 - DNA, 25 bp, Homo sapien
cttccaccaccagcttctgccgcat

SEQ ID NO: 4951934 - DNA, 25 bp, Homo sapien
gacgataaccaagcagacggtgctg

SEQ ID NO: 4951935 - DNA, 25 bp, Homo sapien
tacagaatccatcaaagaagtgtcc

SEQ ID NO: 4951936 - DNA, 25 bp, Homo sapien
gacggtgctgctatccctaatctcc

SEQ ID NO: 4951937 - DNA, 25 bp, Homo sapien
gaagtgtccattgctagaatgtgca

SEQ ID NO: 4951938 - DNA, 25 bp, Homo sapien
gcagcaggcctgctttgtaaagctg

SEQ ID NO: 4951939 - DNA, 25 bp, Homo sapien
tgcagcaggcctgctttgtaaagct

SEQ ID NO: 4951940 - DNA, 25 bp, Homo sapien
gctgggaggtatgggggttgcctgg

SEQ ID NO: 4951941 - DNA, 25 bp, Homo sapien
ctgagctgggcatcggctccattac

SEQ ID NO: 4951942 - DNA, 25 bp, Homo sapien
gaggtatgggggttgcctgagctgg

SEQ ID NO: 4951943 - DNA, 25 bp, Homo sapien
tcttgaagctcaggcttgttcttct

SEQ ID NO: 4951944 - DNA, 25 bp, Homo sapien
tggagcaaagggagcgggccagatg

SEQ ID NO: 4951945 - DNA, 25 bp, Homo sapien
tgcgtctggagcaaagggagcgggc

SEQ ID NO: 4951946 - DNA, 25 bp, Homo sapien
gtatctccgttctgctgcgtctgga

SEQ ID NO: 4951947 - DNA, 25 bp, Homo sapien
cagccgggaggtgtatctccgttct

SEQ ID NO: 4951948 - DNA, 25 bp, Homo sapien
ccagctgctggttgtcgcttgcctt

SEQ ID NO: 4951949 - DNA, 25 bp, Homo sapien
ttgctgctcctcatcacgggtccca

SEQ ID NO: 4951950 - DNA, 25 bp, Homo sapien
gacatttgccttattcccaccatgg

SEQ ID NO: 4951951 - DNA, 25 bp, Homo sapien
tgctcctcatcacgggtcccagctg

SEQ ID NO: 4951952 - DNA, 25 bp, Homo sapien
tgactgacttgtaccctgaaccacc

SEQ ID NO: 4951953 - DNA, 25 bp, Homo sapien
ttcctgactgacttgtaccctgaac

SEQ ID NO: 4951954 - DNA, 25 bp, Homo sapien
taccctgaaccaccatgactttgtg

SEQ ID NO: 4951955 - DNA, 25 bp, Homo sapien
acttgtaccctgaaccaccatgact

SEQ ID NO: 4951956 - DNA, 25 bp, Homo sapien
cagaggatacgaattttaggtgttc

SEQ ID NO: 4951957 - DNA, 25 bp, Homo sapien
ccagaggatacgaattttaggtgtt

SEQ ID NO: 4951958 - DNA, 25 bp, Homo sapien
ggtgccagctctcgttttgatgtag

SEQ ID NO: 4951959 - DNA, 25 bp, Homo sapien
gctttagctgttgatgggccgatgt

SEQ ID NO: 4951960 - DNA, 25 bp, Homo sapien
gatgagtgacactcggagcctcaga

SEQ ID NO: 4951961 - DNA, 25 bp, Homo sapien
ctgacgagcctagttttctgggtac

SEQ ID NO: 4951962 - DNA, 25 bp, Homo sapien
tgcaggttttgggtgacaaagacct

SEQ ID NO: 4951963 - DNA, 25 bp, Homo sapien
tttgggtgacaaagacctggctggt

SEQ ID NO: 4951964 - DNA, 25 bp, Homo sapien
gttgagactaggtgtctttgcaggt

SEQ ID NO: 4951965 - DNA, 25 bp, Homo sapien
ttgagactaggtgtctttgcaggtt

SEQ ID NO: 4951966 - DNA, 25 bp, Homo sapien
gaagacgcattaagcttttgcaaag

SEQ ID NO: 4951967 - DNA, 25 bp, Homo sapien
tatatgaagacgcattaagcttttg

SEQ ID NO: 4951968 - DNA, 25 bp, Homo sapien
ggagatggtgagaaggtcaatatat

SEQ ID NO: 4951969 - DNA, 25 bp, Homo sapien
ggtcaatatatgaagacgcattaag

SEQ ID NO: 4951970 - DNA, 25 bp, Homo sapien
gaatgtagatgtccttcagaagttc

SEQ ID NO: 4951971 - DNA, 25 bp, Homo sapien
ctacggaatgtagatgtccttcaga

SEQ ID NO: 4951972 - DNA, 25 bp, Homo sapien
cggaatgtagatgtccttcagaagt

SEQ ID NO: 4951973 - DNA, 25 bp, Homo sapien
tacggaatgtagatgtccttcagaa

SEQ ID NO: 4951974 - DNA, 25 bp, Homo sapien
taggtacaacttgaaagtgcttctc

SEQ ID NO: 4951975 - DNA, 25 bp, Homo sapien
ggaaactctaatcaccttcgtgtag

SEQ ID NO: 4951976 - DNA, 25 bp, Homo sapien
taatcaccttcgtgtaggtacaact

SEQ ID NO: 4951977 - DNA, 25 bp, Homo sapien
cagggaaccctggaaactctaatca

SEQ ID NO: 4951978 - DNA, 25 bp, Homo sapien
tgtgcaactgtgaaaatgagcctgc

SEQ ID NO: 4951979 - DNA, 25 bp, Homo sapien
tgtgtgcaactgtgaaaatgagcct

SEQ ID NO: 4951980 - DNA, 25 bp, Homo sapien
gtgtgcaactgtgaaaatgagcctg

SEQ ID NO: 4951981 - DNA, 25 bp, Homo sapien
gtgtgtgcaactgtgaaaatgagcc

SEQ ID NO: 4951982 - DNA, 25 bp, Homo sapien
gtgtttgattcagtgtcctggagtc

SEQ ID NO: 4951983 - DNA, 25 bp, Homo sapien
tgtgccttggggctattccagtgct

SEQ ID NO: 4951984 - DNA, 25 bp, Homo sapien
ccagtgctttttcaggacggcagtt

SEQ ID NO: 4951985 - DNA, 25 bp, Homo sapien
cagtgctttttcaggacggcagttc

SEQ ID NO: 4951986 - DNA, 25 bp, Homo sapien
gccttggggctattccagtgctttt

SEQ ID NO: 4951987 - DNA, 25 bp, Homo sapien
cattgaccatggtgtaagtctccca

SEQ ID NO: 4951988 - DNA, 25 bp, Homo sapien
tagctctcagctcaaagtctatgcc

SEQ ID NO: 4951989 - DNA, 25 bp, Homo sapien
taattccagacgtgacttaatggcc

SEQ ID NO: 4951990 - DNA, 25 bp, Homo sapien
taaggtcatacctagcaggaatccc

SEQ ID NO: 4951991 - DNA, 25 bp, Homo sapien
catacacagaaggagagacgatttc

SEQ ID NO: 4951992 - DNA, 25 bp, Homo sapien
tggtacagccttcagatccctggga

SEQ ID NO: 4951993 - DNA, 25 bp, Homo sapien
aaacagctggtatgttagaggcctc

SEQ ID NO: 4951994 - DNA, 25 bp, Homo sapien
gaacaaataaggtccctcgctagag

SEQ ID NO: 4951995 - DNA, 25 bp, Homo sapien
tttgatagtttgaaaatgctctggg

SEQ ID NO: 4951996 - DNA, 25 bp, Homo sapien
ctggggaacaatcatctgtctggtt

SEQ ID NO: 4951997 - DNA, 25 bp, Homo sapien
aaggcgtgttcggttgcgtttgata

SEQ ID NO: 4951998 - DNA, 25 bp, Homo sapien
gtcaggtcgtaaaatggtgaaatca

SEQ ID NO: 4951999 - DNA, 25 bp, Homo sapien
catcattagctcattcacatcagac

SEQ ID NO: 4952000 - DNA, 25 bp, Homo sapien
tcataagcattcataacgagtattg

SEQ ID NO: 4952001 - DNA, 25 bp, Homo sapien
gctgtgattccaagatcttcgggct

SEQ ID NO: 4952002 - DNA, 25 bp, Homo sapien
catcagaccctatgaagaatttagg

SEQ ID NO: 4952003 - DNA, 25 bp, Homo sapien
tccaagccttgtgtaagggttcaca

SEQ ID NO: 4952004 - DNA, 25 bp, Homo sapien
tcttaaggaacagctctctaagcag

SEQ ID NO: 4952005 - DNA, 25 bp, Homo sapien
tccccgtgattgcaagataattcca

SEQ ID NO: 4952006 - DNA, 25 bp, Homo sapien
tcaaggacatgacgtgcaaatgcat

SEQ ID NO: 4952007 - DNA, 25 bp, Homo sapien
catgaaaagtgaaatcgcactgcta

SEQ ID NO: 4952008 - DNA, 25 bp, Homo sapien
tgaaaagtgaaatcgcactgctaaa

SEQ ID NO: 4952009 - DNA, 25 bp, Homo sapien
gaaaagtgaaatcgcactgctaaaa

SEQ ID NO: 4952010 - DNA, 25 bp, Homo sapien
gctggtgtttacacactggtgcctg

SEQ ID NO: 4952011 - DNA, 25 bp, Homo sapien
ttaagttccttctgttgctccaaca

SEQ ID NO: 4952012 - DNA, 25 bp, Homo sapien
ctggtgtttacacactggtgcctgg

SEQ ID NO: 4952013 - DNA, 25 bp, Homo sapien
aagttccttctgttgctccaacact

SEQ ID NO: 4952014 - DNA, 25 bp, Homo sapien
gtagatccagcaaatgtaccgtggc

SEQ ID NO: 4952015 - DNA, 25 bp, Homo sapien
cgtggctcgcacatgcacaggttga

SEQ ID NO: 4952016 - DNA, 25 bp, Homo sapien
gagtgggcacacctatggcctgtag

SEQ ID NO: 4952017 - DNA, 25 bp, Homo sapien
cccatcagatggacggagagcacat

SEQ ID NO: 4952018 - DNA, 25 bp, Homo sapien
aaagctacaaaagtcattgatccag

SEQ ID NO: 4952019 - DNA, 25 bp, Homo sapien
ctacaaaagtcattgatccagatgt

SEQ ID NO: 4952020 - DNA, 25 bp, Homo sapien
ccaagatgaaagctacaaaagtcat

SEQ ID NO: 4952021 - DNA, 25 bp, Homo sapien
ctccataatggatatctgccaagat

SEQ ID NO: 4952022 - DNA, 25 bp, Homo sapien
tagcctccggtgacagagcagccat

SEQ ID NO: 4952023 - DNA, 25 bp, Homo sapien
gcttgatgcaaagataccattacct

SEQ ID NO: 4952024 - DNA, 25 bp, Homo sapien
ccatagtggcactgtgcttgatgca

SEQ ID NO: 4952025 - DNA, 25 bp, Homo sapien
tatttgccagcatagtcgacattgt

SEQ ID NO: 4952026 - DNA, 25 bp, Homo sapien
tgtctttgcttggagagccgtccat

SEQ ID NO: 4952027 - DNA, 25 bp, Homo sapien
ccagagaaacctgtctttgcttgga

SEQ ID NO: 4952028 - DNA, 25 bp, Homo sapien
gagaaacctgtctttgcttggagag

SEQ ID NO: 4952029 - DNA, 25 bp, Homo sapien
aaacctgtctttgcttggagagccg

SEQ ID NO: 4952030 - DNA, 25 bp, Homo sapien
catagatcctaaacatttgaagtct

SEQ ID NO: 4952031 - DNA, 25 bp, Homo sapien
tctcattgtgaagttctgcgatgcc

SEQ ID NO: 4952032 - DNA, 25 bp, Homo sapien
gttctgcgatgccatggttgatcat

SEQ ID NO: 4952033 - DNA, 25 bp, Homo sapien
gttctgtttgtactaacatagatcc

SEQ ID NO: 4952034 - DNA, 25 bp, Homo sapien
gcttcatggtggaatcttcatatgc

SEQ ID NO: 4952035 - DNA, 25 bp, Homo sapien
tcagatttttgtgtagtggatatgc

SEQ ID NO: 4952036 - DNA, 25 bp, Homo sapien
tatgcagtgttatttcttgatgagt

SEQ ID NO: 4952037 - DNA, 25 bp, Homo sapien
tgtgcttcatggtggaatcttcata

SEQ ID NO: 4952038 - DNA, 25 bp, Homo sapien
cacatcataggtggtaatatggaga

SEQ ID NO: 4952039 - DNA, 25 bp, Homo sapien
agatcttcacatcataggtggtaat

SEQ ID NO: 4952040 - DNA, 25 bp, Homo sapien
gctctgtgtttgtaatggtggcatc

SEQ ID NO: 4952041 - DNA, 25 bp, Homo sapien
ggctctgtgtttgtaatggtggcat

SEQ ID NO: 4952042 - DNA, 25 bp, Homo sapien
ggctctcgtgtccttaggtctagtg

SEQ ID NO: 4952043 - DNA, 25 bp, Homo sapien
gctgcctcggcccacgtgatggctg

SEQ ID NO: 4952044 - DNA, 25 bp, Homo sapien
acgtgatggctgttcgggccccgcc

SEQ ID NO: 4952045 - DNA, 25 bp, Homo sapien
ccttaggtctagtgccctgcgccat

SEQ ID NO: 4952046 - DNA, 25 bp, Homo sapien
cactgcacgtgaggcctgagcctaa

SEQ ID NO: 4952047 - DNA, 25 bp, Homo sapien
ggcgcctgatcttgtacctggtcaa

SEQ ID NO: 4952048 - DNA, 25 bp, Homo sapien
cgaggacagcactccattgcgacgt

SEQ ID NO: 4952049 - DNA, 25 bp, Homo sapien
accccgtggcctagtgaacagatga

SEQ ID NO: 4952050 - DNA, 25 bp, Homo sapien
ggtcctgatattggatattgtcaca

SEQ ID NO: 4952051 - DNA, 25 bp, Homo sapien
ctatgtcgcttttaagatgaatcca

SEQ ID NO: 4952052 - DNA, 25 bp, Homo sapien
taagtctgatatacatcaatccatg

SEQ ID NO: 4952053 - DNA, 25 bp, Homo sapien
aaaagactgtgtgctactaggctac

SEQ ID NO: 4952054 - DNA, 25 bp, Homo sapien
tgttccaagtcttcggccgctgcat

SEQ ID NO: 4952055 - DNA, 25 bp, Homo sapien
tcattgacggttcttgctggcttcc

SEQ ID NO: 4952056 - DNA, 25 bp, Homo sapien
gctttgcagatagctctggtcccca

SEQ ID NO: 4952057 - DNA, 25 bp, Homo sapien
tagagttaagtgagtccaggacgac

SEQ ID NO: 4952058 - DNA, 25 bp, Homo sapien
tccagttcccagggtcgcttcaggc

SEQ ID NO: 4952059 - DNA, 25 bp, Homo sapien
cttcacagcattgcgccttccctct

SEQ ID NO: 4952060 - DNA, 25 bp, Homo sapien
ggaagtggcaagtccaaggccgcca

SEQ ID NO: 4952061 - DNA, 25 bp, Homo sapien
agccctctgcctagtcagctgtcag

SEQ ID NO: 4952062 - DNA, 25 bp, Homo sapien
ggtacccaagcatgttcactggaag

SEQ ID NO: 4952063 - DNA, 25 bp, Homo sapien
cccggaggcccgtgtatctgtgtta

SEQ ID NO: 4952064 - DNA, 25 bp, Homo sapien
gagtcctgtatttggtaccggaggc

SEQ ID NO: 4952065 - DNA, 25 bp, Homo sapien
ctacgctgatctggtactgaagacc

SEQ ID NO: 4952066 - DNA, 25 bp, Homo sapien
cagaggacagggttccacttggaaa

SEQ ID NO: 4952067 - DNA, 25 bp, Homo sapien
gatgagtatagggactctccttgtc

SEQ ID NO: 4952068 - DNA, 25 bp, Homo sapien
actgccacctgtctacgtcctgaga

SEQ ID NO: 4952069 - DNA, 25 bp, Homo sapien
ccatgtcttgtgtcatgtaggaaac

SEQ ID NO: 4952070 - DNA, 25 bp, Homo sapien
ggacatgttcattgagagtccctgg

SEQ ID NO: 4952071 - DNA, 25 bp, Homo sapien
ttcacccaggcctcgtaacacaggc

SEQ ID NO: 4952072 - DNA, 25 bp, Homo sapien
cctcgtaacacaggcccttgcgtgt

SEQ ID NO: 4952073 - DNA, 25 bp, Homo sapien
agtgaggccctggacatgttcattg

SEQ ID NO: 4952074 - DNA, 25 bp, Homo sapien
gatctgcgaggcttccttccctcct

SEQ ID NO: 4952075 - DNA, 25 bp, Homo sapien
ctcctctctcttgtcgttgtttcat

SEQ ID NO: 4952076 - DNA, 25 bp, Homo sapien
tccttctcatgatctgcgaggcttc

SEQ ID NO: 4952077 - DNA, 25 bp, Homo sapien
cctcctctctcttgtcgttgtttca

SEQ ID NO: 4952078 - DNA, 25 bp, Homo sapien
tccatgaacacccagatagaattgt

SEQ ID NO: 4952079 - DNA, 25 bp, Homo sapien
tgcagaatcatcaacacaggctcct

SEQ ID NO: 4952080 - DNA, 25 bp, Homo sapien
catttcggactgtggtgctttggat

SEQ ID NO: 4952081 - DNA, 25 bp, Homo sapien
ggatttggttagactgtcatccatg

SEQ ID NO: 4952082 - DNA, 25 bp, Homo sapien
cagtccttagtgccaagctgagcag

SEQ ID NO: 4952083 - DNA, 25 bp, Homo sapien
ggcaggaagtgatgtccatctgcag

SEQ ID NO: 4952084 - DNA, 25 bp, Homo sapien
tcagtccttagtgccaagctgagca

SEQ ID NO: 4952085 - DNA, 25 bp, Homo sapien
tgaactagggattcctcctccggga

SEQ ID NO: 4952086 - DNA, 25 bp, Homo sapien
ggactgcggtcccaaaataggcatg

SEQ ID NO: 4952087 - DNA, 25 bp, Homo sapien
tcagcatgagttgcaagcgccgtca

SEQ ID NO: 4952088 - DNA, 25 bp, Homo sapien
cctgcacaggtgatgggttctactt

SEQ ID NO: 4952089 - DNA, 25 bp, Homo sapien
aaaaacagagtgcccagaactggac

SEQ ID NO: 4952090 - DNA, 25 bp, Homo sapien
ccagaactggacagtggcaggtgcc

SEQ ID NO: 4952091 - DNA, 25 bp, Homo sapien
cctttgccctgagatggacttgtca

SEQ ID NO: 4952092 - DNA, 25 bp, Homo sapien
ttgactactgggattgcctttgccc

SEQ ID NO: 4952093 - DNA, 25 bp, Homo sapien
ctgctgccagcaattctagcaccag

SEQ ID NO: 4952094 - DNA, 25 bp, Homo sapien
tgctaaggcctgatctttccgctct

SEQ ID NO: 4952095 - DNA, 25 bp, Homo sapien
gaaagtccagcggtctgccagctgg

SEQ ID NO: 4952096 - DNA, 25 bp, Homo sapien
caattctagcaccagctgcttagcc

SEQ ID NO: 4952097 - DNA, 25 bp, Homo sapien
tgtgcatgatcattccaatgacgca

SEQ ID NO: 4952098 - DNA, 25 bp, Homo sapien
gcattttgtgcatgatcattccaat

SEQ ID NO: 4952099 - DNA, 25 bp, Homo sapien
catgatcattccaatgacgcaagca

SEQ ID NO: 4952100 - DNA, 25 bp, Homo sapien
gatcattccaatgacgcaagcatcc

SEQ ID NO: 4952101 - DNA, 25 bp, Homo sapien
ggccctcgctcctgcaataggccat

SEQ ID NO: 4952102 - DNA, 25 bp, Homo sapien
atggcttcaaagtgaacagttggca

SEQ ID NO: 4952103 - DNA, 25 bp, Homo sapien
gtggccctcgctcctgcaataggcc

SEQ ID NO: 4952104 - DNA, 25 bp, Homo sapien
ggcttcaaagtgaacagttggcatt

SEQ ID NO: 4952105 - DNA, 25 bp, Homo sapien
tccatggcagatggtgaccaaaatg

SEQ ID NO: 4952106 - DNA, 25 bp, Homo sapien
tccctcgcacacactgatgtgtaca

SEQ ID NO: 4952107 - DNA, 25 bp, Homo sapien
ctgcttctgacaggtgcgcgggctc

SEQ ID NO: 4952108 - DNA, 25 bp, Homo sapien
tggtgaccaaaatgggcttgctggc

SEQ ID NO: 4952109 - DNA, 25 bp, Homo sapien
gagggcttattccagagtcgcaggc

SEQ ID NO: 4952110 - DNA, 25 bp, Homo sapien
gcagccagagggcttattccagagt

SEQ ID NO: 4952111 - DNA, 25 bp, Homo sapien
attccagagtcgcaggcccatttcc

SEQ ID NO: 4952112 - DNA, 25 bp, Homo sapien
cttattccagagtcgcaggcccatt

SEQ ID NO: 4952113 - DNA, 25 bp, Homo sapien
tttggccgccagaccatggatgtgg

SEQ ID NO: 4952114 - DNA, 25 bp, Homo sapien
tgtggcgtgtcccacttcccaagca

SEQ ID NO: 4952115 - DNA, 25 bp, Homo sapien
ccttccatttttggccgccagacca

SEQ ID NO: 4952116 - DNA, 25 bp, Homo sapien
gaccatggatgtggcgtgtcccact

SEQ ID NO: 4952117 - DNA, 25 bp, Homo sapien
ccagtctccttgctagtgtgtgtgg

SEQ ID NO: 4952118 - DNA, 25 bp, Homo sapien
tccttgctagtgtgtgtggtaagcg

SEQ ID NO: 4952119 - DNA, 25 bp, Homo sapien
gtctccttgctagtgtgtgtggtaa

SEQ ID NO: 4952120 - DNA, 25 bp, Homo sapien
ccactgctccccacgatggctttgg

SEQ ID NO: 4952121 - DNA, 25 bp, Homo sapien
atgctcgcgtacacccatgtgctca

SEQ ID NO: 4952122 - DNA, 25 bp, Homo sapien
ggactactaaggaccccatatccat

SEQ ID NO: 4952123 - DNA, 25 bp, Homo sapien
ccactggatgctgatcagagtgcca

SEQ ID NO: 4952124 - DNA, 25 bp, Homo sapien
ctttctctggaacttggactactaa

SEQ ID NO: 4952125 - DNA, 25 bp, Homo sapien
ccattctggatgaactgtcaagctt

SEQ ID NO: 4952126 - DNA, 25 bp, Homo sapien
ggtggatttgtgaaccattctggat

SEQ ID NO: 4952127 - DNA, 25 bp, Homo sapien
tgaggtagattttagggtcatgaca

SEQ ID NO: 4952128 - DNA, 25 bp, Homo sapien
tcatgacatgagtcagtaagggcag

SEQ ID NO: 4952129 - DNA, 25 bp, Homo sapien
cgtgatgaggataacatcagacagc

SEQ ID NO: 4952130 - DNA, 25 bp, Homo sapien
caaatgcagcagatactactgtgat

SEQ ID NO: 4952131 - DNA, 25 bp, Homo sapien
tagagaggacgtgatgaggataaca

SEQ ID NO: 4952132 - DNA, 25 bp, Homo sapien
tactgtgatctctagagaggacgtg

SEQ ID NO: 4952133 - DNA, 25 bp, Homo sapien
ggtacagggtgaatgcatacgcagc

SEQ ID NO: 4952134 - DNA, 25 bp, Homo sapien
gcctggtacagggtgaatgcatacg

SEQ ID NO: 4952135 - DNA, 25 bp, Homo sapien
atgcatacgcagcatcacccctagg

SEQ ID NO: 4952136 - DNA, 25 bp, Homo sapien
cagggtgaatgcatacgcagcatca

SEQ ID NO: 4952137 - DNA, 25 bp, Homo sapien
catgtacaagtgcttttcatgccta

SEQ ID NO: 4952138 - DNA, 25 bp, Homo sapien
atgtacaagtgcttttcatgcctat

SEQ ID NO: 4952139 - DNA, 25 bp, Homo sapien
cagacgtcgtccttattgttgtcac

SEQ ID NO: 4952140 - DNA, 25 bp, Homo sapien
tcacaggcaaatgctagcgatggtt

SEQ ID NO: 4952141 - DNA, 25 bp, Homo sapien
tagcgatggttcaagtcacacggcc

SEQ ID NO: 4952142 - DNA, 25 bp, Homo sapien
agttctccgaacttgccttggacca

SEQ ID NO: 4952143 - DNA, 25 bp, Homo sapien
cctcacttcgtctccagttccctgg

SEQ ID NO: 4952144 - DNA, 25 bp, Homo sapien
tacatcatccgcgtcctcacttcgt

SEQ ID NO: 4952145 - DNA, 25 bp, Homo sapien
gcccctgttccgagaaccacagagg

SEQ ID NO: 4952146 - DNA, 25 bp, Homo sapien
gaggcctagggggttcctctgtcca

SEQ ID NO: 4952147 - DNA, 25 bp, Homo sapien
aatggtgcccttggtgtccatcaga

SEQ ID NO: 4952148 - DNA, 25 bp, Homo sapien
gattgcatgaagaatggacagtcca

SEQ ID NO: 4952149 - DNA, 25 bp, Homo sapien
gactgtcagactgctgtttactggg

SEQ ID NO: 4952150 - DNA, 25 bp, Homo sapien
catccttttcagcttcgattggagc

SEQ ID NO: 4952151 - DNA, 25 bp, Homo sapien
tacagtaacaggatggcccagggtg

SEQ ID NO: 4952152 - DNA, 25 bp, Homo sapien
cagagtctggctcatacttatacgg

SEQ ID NO: 4952153 - DNA, 25 bp, Homo sapien
gacaactcggtgtacactccaggca

SEQ ID NO: 4952154 - DNA, 25 bp, Homo sapien
gaagcaaagcgtacacagagtctgg

SEQ ID NO: 4952155 - DNA, 25 bp, Homo sapien
ctatgtgatgcaagtccaaatacaa

SEQ ID NO: 4952156 - DNA, 25 bp, Homo sapien
tctatgtgatgcaagtccaaataca

SEQ ID NO: 4952157 - DNA, 25 bp, Homo sapien
tgtgatgcaagtccaaatacaaaac

SEQ ID NO: 4952158 - DNA, 25 bp, Homo sapien
tatgtgatgcaagtccaaatacaaa

SEQ ID NO: 4952159 - DNA, 25 bp, Homo sapien
cgtgacaagcattgactcagtggaa

SEQ ID NO: 4952160 - DNA, 25 bp, Homo sapien
tgttctttaccgaatgccctgaagt

SEQ ID NO: 4952161 - DNA, 25 bp, Homo sapien
gaaacagctcgatccaggtctctag

SEQ ID NO: 4952162 - DNA, 25 bp, Homo sapien
cagagtccggatgccctcgttagaa

SEQ ID NO: 4952163 - DNA, 25 bp, Homo sapien
gaataggggctgtggtggtacgcct

SEQ ID NO: 4952164 - DNA, 25 bp, Homo sapien
gcagaagtaattcctccgactgccc

SEQ ID NO: 4952165 - DNA, 25 bp, Homo sapien
ctagcagaagtaattcctccgactg

SEQ ID NO: 4952166 - DNA, 25 bp, Homo sapien
ccccagaacccatcggggccgacag

SEQ ID NO: 4952167 - DNA, 25 bp, Homo sapien
agctccctaggggagtctcctgccc

SEQ ID NO: 4952168 - DNA, 25 bp, Homo sapien
atccacaaggagtcccagagaccca

SEQ ID NO: 4952169 - DNA, 25 bp, Homo sapien
gcacatccacaaggagtcccagaga

SEQ ID NO: 4952170 - DNA, 25 bp, Homo sapien
gagaggcacatccacaaggagtccc

SEQ ID NO: 4952171 - DNA, 25 bp, Homo sapien
ctggagaggcacatccacaaggagt

SEQ ID NO: 4952172 - DNA, 25 bp, Homo sapien
cagggcgacccgcagcaggagggct

SEQ ID NO: 4952173 - DNA, 25 bp, Homo sapien
gcagcagggcgacccgcagcaggag

SEQ ID NO: 4952174 - DNA, 25 bp, Homo sapien
ggcagcagcagggcgacccgcagca

SEQ ID NO: 4952175 - DNA, 25 bp, Homo sapien
gacccgcagcaggagggctgccctt

SEQ ID NO: 4952176 - DNA, 25 bp, Homo sapien
gataaaagaattcccgcattaccca

SEQ ID NO: 4952177 - DNA, 25 bp, Homo sapien
acatgcatatgagatggaacagggc

SEQ ID NO: 4952178 - DNA, 25 bp, Homo sapien
agaaaccacacgacttccatggcag

SEQ ID NO: 4952179 - DNA, 25 bp, Homo sapien
catggcagtcccagactacagaaag

SEQ ID NO: 4952180 - DNA, 25 bp, Homo sapien
taaatgtccatcgtcagaggaagcg

SEQ ID NO: 4952181 - DNA, 25 bp, Homo sapien
ggtgcattcacacaacagcggtgct

SEQ ID NO: 4952182 - DNA, 25 bp, Homo sapien
taagcttcaacactcgcccagtggg

SEQ ID NO: 4952183 - DNA, 25 bp, Homo sapien
gaagcgatgaacaaactgcggtgca

SEQ ID NO: 4952184 - DNA, 25 bp, Homo sapien
ccagggttaagcttcagcgtgcaaa

SEQ ID NO: 4952185 - DNA, 25 bp, Homo sapien
gaagtaaccaggctgaagccatgct

SEQ ID NO: 4952186 - DNA, 25 bp, Homo sapien
ttgtccgtaacaaatgccccgtgga

SEQ ID NO: 4952187 - DNA, 25 bp, Homo sapien
aaaggccacacaaatctttgtccgt

SEQ ID NO: 4952188 - DNA, 25 bp, Homo sapien
cagggaaagccactcgtcaacacaa

SEQ ID NO: 4952189 - DNA, 25 bp, Homo sapien
ccagggaaagccactcgtcaacaca

SEQ ID NO: 4952190 - DNA, 25 bp, Homo sapien
tgccagggaaagccactcgtcaaca

SEQ ID NO: 4952191 - DNA, 25 bp, Homo sapien
agggaaagccactcgtcaacacaag

SEQ ID NO: 4952192 - DNA, 25 bp, Homo sapien
gggccctgccctgattttctgaatc

SEQ ID NO: 4952193 - DNA, 25 bp, Homo sapien
cctgattttctgaatctcctccagc

SEQ ID NO: 4952194 - DNA, 25 bp, Homo sapien
gccctgccctgattttctgaatctc

SEQ ID NO: 4952195 - DNA, 25 bp, Homo sapien
ctgccctgattttctgaatctcctc

SEQ ID NO: 4952196 - DNA, 25 bp, Homo sapien
ttatcgtagcagaaattgaacccag

SEQ ID NO: 4952197 - DNA, 25 bp, Homo sapien
gactgcgaccaggagtattgcactg

SEQ ID NO: 4952198 - DNA, 25 bp, Homo sapien
ggaacctagtcccttcttgcttgaa

SEQ ID NO: 4952199 - DNA, 25 bp, Homo sapien
aaagaagcttctacaactgcccctg

SEQ ID NO: 4952200 - DNA, 25 bp, Homo sapien
tataagtcagtcttggcatcggctc

SEQ ID NO: 4952201 - DNA, 25 bp, Homo sapien
tctacggagtatacccagccaatgg

SEQ ID NO: 4952202 - DNA, 25 bp, Homo sapien
ggaattctcatcaacctggtccaga

SEQ ID NO: 4952203 - DNA, 25 bp, Homo sapien
acactaacactgcatttctacggag

SEQ ID NO: 4952204 - DNA, 25 bp, Homo sapien
tatcaacggtaaacatggtggccag

SEQ ID NO: 4952205 - DNA, 25 bp, Homo sapien
tgagaccccaatcctagcaagaagg

SEQ ID NO: 4952206 - DNA, 25 bp, Homo sapien
gcttcatggaataaattgagccaca

SEQ ID NO: 4952207 - DNA, 25 bp, Homo sapien
cttctcggcttctcgtggatcctga

SEQ ID NO: 4952208 - DNA, 25 bp, Homo sapien
tagcacaaaccagaggtgccccact

SEQ ID NO: 4952209 - DNA, 25 bp, Homo sapien
tggagccagatcttatgcccccact

SEQ ID NO: 4952210 - DNA, 25 bp, Homo sapien
ctgggttccataaatagcacaaacc

SEQ ID NO: 4952211 - DNA, 25 bp, Homo sapien
ataaatagcacaaaccagaggtgcc

SEQ ID NO: 4952212 - DNA, 25 bp, Homo sapien
tggcacattctttccggctaatctg

SEQ ID NO: 4952213 - DNA, 25 bp, Homo sapien
gaagataccattggtgcctggttcg

SEQ ID NO: 4952214 - DNA, 25 bp, Homo sapien
gcctggttcgttccaagcacaaatc

SEQ ID NO: 4952215 - DNA, 25 bp, Homo sapien
agcacaaatcatgttcctggacagc

SEQ ID NO: 4952216 - DNA, 25 bp, Homo sapien
tgctgaatgttctcgttcccatgac

SEQ ID NO: 4952217 - DNA, 25 bp, Homo sapien
agtgacatttaccacggccatgtct

SEQ ID NO: 4952218 - DNA, 25 bp, Homo sapien
aattgctgaattgcactggtgtggc

SEQ ID NO: 4952219 - DNA, 25 bp, Homo sapien
ggtcgttacccactgtgccatccaa

SEQ ID NO: 4952220 - DNA, 25 bp, Homo sapien
caagggtgactgatagtgcaattca

SEQ ID NO: 4952221 - DNA, 25 bp, Homo sapien
ataaaaacaccagtgctaacaaggg

SEQ ID NO: 4952222 - DNA, 25 bp, Homo sapien
ggtgactgatagtgcaattcacatt

SEQ ID NO: 4952223 - DNA, 25 bp, Homo sapien
tgctaacaagggtgactgatagtgc

SEQ ID NO: 4952224 - DNA, 25 bp, Homo sapien
agtgtgcggctgtcagaacccacca

SEQ ID NO: 4952225 - DNA, 25 bp, Homo sapien
tcttcggaagcagtgtgcggctgtc

SEQ ID NO: 4952226 - DNA, 25 bp, Homo sapien
accaatgtaagattgagcctccaca

SEQ ID NO: 4952227 - DNA, 25 bp, Homo sapien
cacagaggtgtttccgtgacatctg

SEQ ID NO: 4952228 - DNA, 25 bp, Homo sapien
acgagtttggaaaagcaggcctgtg

SEQ ID NO: 4952229 - DNA, 25 bp, Homo sapien
ggcctgtggccacattgtacgtttt

SEQ ID NO: 4952230 - DNA, 25 bp, Homo sapien
tgaagccgttcatgaaatggtaacc

SEQ ID NO: 4952231 - DNA, 25 bp, Homo sapien
tcaccattctggacttgaagccgtt

SEQ ID NO: 4952232 - DNA, 25 bp, Homo sapien
gctgagagacctggtaaactttgag

SEQ ID NO: 4952233 - DNA, 25 bp, Homo sapien
gcagggctctttcagaggcatatag

SEQ ID NO: 4952234 - DNA, 25 bp, Homo sapien
tcattcttcacagccgcagagagct

SEQ ID NO: 4952235 - DNA, 25 bp, Homo sapien
aggcatatagggttagagtggccat

SEQ ID NO: 4952236 - DNA, 25 bp, Homo sapien
tggcacaaaaccttggaaaccttga

SEQ ID NO: 4952237 - DNA, 25 bp, Homo sapien
gattctctctcaggaactggttgaa

SEQ ID NO: 4952238 - DNA, 25 bp, Homo sapien
tctgctggcacaaaaccttggaaac

SEQ ID NO: 4952239 - DNA, 25 bp, Homo sapien
aaccttggaaaccttgattctctct

SEQ ID NO: 4952240 - DNA, 25 bp, Homo sapien
ccatcggccaagaccgacatgagag

SEQ ID NO: 4952241 - DNA, 25 bp, Homo sapien
cgggtgatagatgcccaaactgcta

SEQ ID NO: 4952242 - DNA, 25 bp, Homo sapien
ttggctcagttgtgacccatcggcc

SEQ ID NO: 4952243 - DNA, 25 bp, Homo sapien
aactgctacattggaagagattcca

SEQ ID NO: 4952244 - DNA, 25 bp, Homo sapien
agggggaggaggtagagtgtggcca

SEQ ID NO: 4952245 - DNA, 25 bp, Homo sapien
ggagggggaggaggtagagtgtggc

SEQ ID NO: 4952246 - DNA, 25 bp, Homo sapien
gagggggaggaggtagagtgtggcc

SEQ ID NO: 4952247 - DNA, 25 bp, Homo sapien
cttcggtggtatcttcacgggctct

SEQ ID NO: 4952248 - DNA, 25 bp, Homo sapien
tgaagactggctcttcggtggtatc

SEQ ID NO: 4952249 - DNA, 25 bp, Homo sapien
tggctcttcggtggtatcttcacgg

SEQ ID NO: 4952250 - DNA, 25 bp, Homo sapien
acattgaagactggctcttcggtgg

SEQ ID NO: 4952251 - DNA, 25 bp, Homo sapien
cagcaggtctgcgttcctactggac

SEQ ID NO: 4952252 - DNA, 25 bp, Homo sapien
tctgagggcagtgcttagcaaccca

SEQ ID NO: 4952253 - DNA, 25 bp, Homo sapien
cagcatcacgttcccactctgaggg

SEQ ID NO: 4952254 - DNA, 25 bp, Homo sapien
cctacagtactgtgggacagagctc

SEQ ID NO: 4952255 - DNA, 25 bp, Homo sapien
agtctcctgcggaagcagacgagga

SEQ ID NO: 4952256 - DNA, 25 bp, Homo sapien
aagtctcctgcggaagcagacgagg

SEQ ID NO: 4952257 - DNA, 25 bp, Homo sapien
tgcctgcaagtctcctgcggaagca

SEQ ID NO: 4952258 - DNA, 25 bp, Homo sapien
tgcaagtctcctgcggaagcagacg

SEQ ID NO: 4952259 - DNA, 25 bp, Homo sapien
aagagtgatgtaatccaatcccaga

SEQ ID NO: 4952260 - DNA, 25 bp, Homo sapien
ccccggtgggagatggttgtaagag

SEQ ID NO: 4952261 - DNA, 25 bp, Homo sapien
ccactgaagaggcttgagcaagagt

SEQ ID NO: 4952262 - DNA, 25 bp, Homo sapien
cagtgccccggtgggagatggttgt

SEQ ID NO: 4952263 - DNA, 25 bp, Homo sapien
cctgacgtcggttccaacgctcagt

SEQ ID NO: 4952264 - DNA, 25 bp, Homo sapien
ggccatgttagggtaccaggcaggg

SEQ ID NO: 4952265 - DNA, 25 bp, Homo sapien
gtggccatgttagggtaccaggcag

SEQ ID NO: 4952266 - DNA, 25 bp, Homo sapien
ttccaacgctcagtgccccttttca

SEQ ID NO: 4952267 - DNA, 25 bp, Homo sapien
tccattcgatacctgtgttaatcac

SEQ ID NO: 4952268 - DNA, 25 bp, Homo sapien
tgtcgctttccattcgatacctgtg

SEQ ID NO: 4952269 - DNA, 25 bp, Homo sapien
ttctcctgaagatgtcgctttccat

SEQ ID NO: 4952270 - DNA, 25 bp, Homo sapien
gaagatgtcgctttccattcgatac

SEQ ID NO: 4952271 - DNA, 25 bp, Homo sapien
tattcatagcatactcagaaggtcc

SEQ ID NO: 4952272 - DNA, 25 bp, Homo sapien
taaaggtcgtgcttcatggctgaag

SEQ ID NO: 4952273 - DNA, 25 bp, Homo sapien
gaagcaatcgggcacacaggacttc

SEQ ID NO: 4952274 - DNA, 25 bp, Homo sapien
cagaaggtcctgcaagtgatgagct

SEQ ID NO: 4952275 - DNA, 25 bp, Homo sapien
cagatgcagacatttgacacagcca

SEQ ID NO: 4952276 - DNA, 25 bp, Homo sapien
ctggacgcccatgtccacataacat

SEQ ID NO: 4952277 - DNA, 25 bp, Homo sapien
ccacataacatttgtgaacatgcca

SEQ ID NO: 4952278 - DNA, 25 bp, Homo sapien
agacagatgcagacatttgacacag

SEQ ID NO: 4952279 - DNA, 25 bp, Homo sapien
acacctccagtggcccttcggatga

SEQ ID NO: 4952280 - DNA, 25 bp, Homo sapien
atggggcacctgtcacccgtgctgc

SEQ ID NO: 4952281 - DNA, 25 bp, Homo sapien
cccgtgctgcacttgcctagggtct

SEQ ID NO: 4952282 - DNA, 25 bp, Homo sapien
ccagtggcccttcggatgaccatgg

SEQ ID NO: 4952283 - DNA, 25 bp, Homo sapien
gggctcctctaacaacaggtgcagc

SEQ ID NO: 4952284 - DNA, 25 bp, Homo sapien
caggtgcagccagcctagaccccgg

SEQ ID NO: 4952285 - DNA, 25 bp, Homo sapien
ttctggtctcgaggttctgttaacc

SEQ ID NO: 4952286 - DNA, 25 bp, Homo sapien
agcaagagaaggaatggggctcctc

SEQ ID NO: 4952287 - DNA, 25 bp, Homo sapien
aggaactggtgcacccggtagccct

SEQ ID NO: 4952288 - DNA, 25 bp, Homo sapien
gcaactgagtcaggatccagaccca

SEQ ID NO: 4952289 - DNA, 25 bp, Homo sapien
tgggctctccccgtcattcccaaag

SEQ ID NO: 4952290 - DNA, 25 bp, Homo sapien
caaagcacttctcccatcatggact

SEQ ID NO: 4952291 - DNA, 25 bp, Homo sapien
tgcaggaattcccttgtggcgagga

SEQ ID NO: 4952292 - DNA, 25 bp, Homo sapien
tataccaacaccgagttgtggcagg

SEQ ID NO: 4952293 - DNA, 25 bp, Homo sapien
taccaacaccgagttgtggcaggtg

SEQ ID NO: 4952294 - DNA, 25 bp, Homo sapien
ttcccttgtggcgaggagagtctga

SEQ ID NO: 4952295 - DNA, 25 bp, Homo sapien
cctgggctcccgggactctgtgatg

SEQ ID NO: 4952296 - DNA, 25 bp, Homo sapien
tgggctcccgggactctgtgatgag

SEQ ID NO: 4952297 - DNA, 25 bp, Homo sapien
ctgggctcccgggactctgtgatga

SEQ ID NO: 4952298 - DNA, 25 bp, Homo sapien
ggcttcatccctatggccccagctc

SEQ ID NO: 4952299 - DNA, 25 bp, Homo sapien
ccctatggccccagctctgtgagat

SEQ ID NO: 4952300 - DNA, 25 bp, Homo sapien
atccctatggccccagctctgtgag

SEQ ID NO: 4952301 - DNA, 25 bp, Homo sapien
cttcatccctatggccccagctctg

SEQ ID NO: 4952302 - DNA, 25 bp, Homo sapien
ctccagttgtgagccctaaatataa

SEQ ID NO: 4952303 - DNA, 25 bp, Homo sapien
ggctggtggtagaacctccagttgt

SEQ ID NO: 4952304 - DNA, 25 bp, Homo sapien
tgatccagctgttgtagcatcgcca

SEQ ID NO: 4952305 - DNA, 25 bp, Homo sapien
cactgtgctgatccagctgttgtag

SEQ ID NO: 4952306 - DNA, 25 bp, Homo sapien
tcagcgttgaacccaggcgccaaga

SEQ ID NO: 4952307 - DNA, 25 bp, Homo sapien
cagcgttgaacccaggcgccaagac

SEQ ID NO: 4952308 - DNA, 25 bp, Homo sapien
agcgttgaacccaggcgccaagacc

SEQ ID NO: 4952309 - DNA, 25 bp, Homo sapien
aggcacctggttaaatcgcatggat

SEQ ID NO: 4952310 - DNA, 25 bp, Homo sapien
ctggttaaatcgcatggattccttt

SEQ ID NO: 4952311 - DNA, 25 bp, Homo sapien
tcctttttgattttatctggctctc

SEQ ID NO: 4952312 - DNA, 25 bp, Homo sapien
tgcccctgggagtttcccagaagct

SEQ ID NO: 4952313 - DNA, 25 bp, Homo sapien
cacactaaatacgttgctgagatgg

SEQ ID NO: 4952314 - DNA, 25 bp, Homo sapien
tgctgagatggaaatctctgctttt

SEQ ID NO: 4952315 - DNA, 25 bp, Homo sapien
ccgtgtcttaaggatcaaactctca

SEQ ID NO: 4952316 - DNA, 25 bp, Homo sapien
aaactctcatgtgcaccttgctcca

SEQ ID NO: 4952317 - DNA, 25 bp, Homo sapien
gacttctttgcagggatggtgccgt

SEQ ID NO: 4952318 - DNA, 25 bp, Homo sapien
ccccgacttctttgcagggatggtg

SEQ ID NO: 4952319 - DNA, 25 bp, Homo sapien
cttctttgcagggatggtgccgtcg

SEQ ID NO: 4952320 - DNA, 25 bp, Homo sapien
ccgacttctttgcagggatggtgcc

SEQ ID NO: 4952321 - DNA, 25 bp, Homo sapien
aagactcgcatttcctcgactttct

SEQ ID NO: 4952322 - DNA, 25 bp, Homo sapien
tcctcgactttctttggtcctttca

SEQ ID NO: 4952323 - DNA, 25 bp, Homo sapien
tgtctgatggacagtccacaaagac

SEQ ID NO: 4952324 - DNA, 25 bp, Homo sapien
gtccacaaagactcgcatttcctcg

SEQ ID NO: 4952325 - DNA, 25 bp, Homo sapien
gactcggggaaaggcctgtgagacc

SEQ ID NO: 4952326 - DNA, 25 bp, Homo sapien
gggaaaggcctgtgagaccgcctgt

SEQ ID NO: 4952327 - DNA, 25 bp, Homo sapien
gaaaggcctgtgagaccgcctgtgc

SEQ ID NO: 4952328 - DNA, 25 bp, Homo sapien
aggcctgtgagaccgcctgtgcctc

SEQ ID NO: 4952329 - DNA, 25 bp, Homo sapien
gggccgtccgtgcagcctcggcgac

SEQ ID NO: 4952330 - DNA, 25 bp, Homo sapien
cctgtacagccgctgcagggtgtag

SEQ ID NO: 4952331 - DNA, 25 bp, Homo sapien
taggatgctgataacgggaacaatg

SEQ ID NO: 4952332 - DNA, 25 bp, Homo sapien
gcctggctttcctgtacagccgctg

SEQ ID NO: 4952333 - DNA, 25 bp, Homo sapien
agagctcctattgtggtctgttttg

SEQ ID NO: 4952334 - DNA, 25 bp, Homo sapien
gctccagagctcctattgtggtctg

SEQ ID NO: 4952335 - DNA, 25 bp, Homo sapien
tccagagctcctattgtggtctgtt

SEQ ID NO: 4952336 - DNA, 25 bp, Homo sapien
ttgctccagagctcctattgtggtc

SEQ ID NO: 4952337 - DNA, 25 bp, Homo sapien
gacggagatgtatgacacccagcat

SEQ ID NO: 4952338 - DNA, 25 bp, Homo sapien
cggagatgtatgacacccagcatgg

SEQ ID NO: 4952339 - DNA, 25 bp, Homo sapien
gaagacggagatgtatgacacccag

SEQ ID NO: 4952340 - DNA, 25 bp, Homo sapien
agggaagacggagatgtatgacacc

SEQ ID NO: 4952341 - DNA, 25 bp, Homo sapien
cgttcctctgatctatctctgtggg

SEQ ID NO: 4952342 - DNA, 25 bp, Homo sapien
cgtctgctgcgttcctctgatctat

SEQ ID NO: 4952343 - DNA, 25 bp, Homo sapien
ccgtgaggtgtcgtctgctgcgttc

SEQ ID NO: 4952344 - DNA, 25 bp, Homo sapien
ggtgtcgtctgctgcgttcctctga

SEQ ID NO: 4952345 - DNA, 25 bp, Homo sapien
ccaccacgcctgagtgtaaaccggg

SEQ ID NO: 4952346 - DNA, 25 bp, Homo sapien
ggcttcaaggctccggaggaacaca

SEQ ID NO: 4952347 - DNA, 25 bp, Homo sapien
cctgaaaggctttgcatcctcgttt

SEQ ID NO: 4952348 - DNA, 25 bp, Homo sapien
ttgcatcctcgtttgggctcagcag

SEQ ID NO: 4952349 - DNA, 25 bp, Homo sapien
gcgtgtgtctgtgcgggctgagtcc

SEQ ID NO: 4952350 - DNA, 25 bp, Homo sapien
tggctggatccagcggaagtcacga

SEQ ID NO: 4952351 - DNA, 25 bp, Homo sapien
tacttggttagtgagagggagcgag

SEQ ID NO: 4952352 - DNA, 25 bp, Homo sapien
gctgagtcccgtctccatagatggg

SEQ ID NO: 4952353 - DNA, 25 bp, Homo sapien
tgcagtaacgtcattcaacaaggtg

SEQ ID NO: 4952354 - DNA, 25 bp, Homo sapien
tctgtacagaaggagaacattgctg

SEQ ID NO: 4952355 - DNA, 25 bp, Homo sapien
caacaaggtgttggctacctctagc

SEQ ID NO: 4952356 - DNA, 25 bp, Homo sapien
gaatcccatgggcagataacttcat

SEQ ID NO: 4952357 - DNA, 25 bp, Homo sapien
tatatctaagatagtacctcattaa

SEQ ID NO: 4952358 - DNA, 25 bp, Homo sapien
acactgatcatactctcaccgtgag

SEQ ID NO: 4952359 - DNA, 25 bp, Homo sapien
caccgtgagtacagatctttagaaa

SEQ ID NO: 4952360 - DNA, 25 bp, Homo sapien
aaaagcatgcacaaatcatttatat

SEQ ID NO: 4952361 - DNA, 25 bp, Homo sapien
catgtactatggacatctccagtgg

SEQ ID NO: 4952362 - DNA, 25 bp, Homo sapien
gctgacctccgataaccgggcagat

SEQ ID NO: 4952363 - DNA, 25 bp, Homo sapien
agagtcccaggacagcatggcatgg

SEQ ID NO: 4952364 - DNA, 25 bp, Homo sapien
tctccagtggactgaacgttgctca

SEQ ID NO: 4952365 - DNA, 25 bp, Homo sapien
tccgagtgcctggtcctcttgtagg

SEQ ID NO: 4952366 - DNA, 25 bp, Homo sapien
ccactgcctcagtgggggcgagact

SEQ ID NO: 4952367 - DNA, 25 bp, Homo sapien
cactgcctcagtgggggcgagactt

SEQ ID NO: 4952368 - DNA, 25 bp, Homo sapien
acttccgagtgcctggtcctcttgt

SEQ ID NO: 4952369 - DNA, 25 bp, Homo sapien
gacttggcatcagggctccttgtgt

SEQ ID NO: 4952370 - DNA, 25 bp, Homo sapien
tctcctagactgacctgagggctcc

SEQ ID NO: 4952371 - DNA, 25 bp, Homo sapien
agtagaactttctgggtacatcctg

SEQ ID NO: 4952372 - DNA, 25 bp, Homo sapien
tctgggtacatcctggtggccttcc

SEQ ID NO: 4952373 - DNA, 25 bp, Homo sapien
ttcagtaacacggacacccagatgg

SEQ ID NO: 4952374 - DNA, 25 bp, Homo sapien
gcacttgggtccgtctcgctgagat

SEQ ID NO: 4952375 - DNA, 25 bp, Homo sapien
tccgctcagagaaggccgagaggtt

SEQ ID NO: 4952376 - DNA, 25 bp, Homo sapien
cctggacagtcctagtgctcgtggg

SEQ ID NO: 4952377 - DNA, 25 bp, Homo sapien
tttagtttcctctaactgcaccgcc

SEQ ID NO: 4952378 - DNA, 25 bp, Homo sapien
tttcctctaactgcgcctcttcttc

SEQ ID NO: 4952379 - DNA, 25 bp, Homo sapien
ctctaactgcgcctcttcttcttgc

SEQ ID NO: 4952380 - DNA, 25 bp, Homo sapien
ttagtttcctctaactgcaccgcct

SEQ ID NO: 4952381 - DNA, 25 bp, Homo sapien
tttcagctaactgctccaggttcga

SEQ ID NO: 4952382 - DNA, 25 bp, Homo sapien
gctaactgctccaggttcgagctcg

SEQ ID NO: 4952383 - DNA, 25 bp, Homo sapien
taactgctccaggttcgagctcgcc

SEQ ID NO: 4952384 - DNA, 25 bp, Homo sapien
tccaggttcgagctcgccctctgct

SEQ ID NO: 4952385 - DNA, 25 bp, Homo sapien
tcatcctcattggtggcacaagcgc

SEQ ID NO: 4952386 - DNA, 25 bp, Homo sapien
tgctgatgtccacaccagaggagga

SEQ ID NO: 4952387 - DNA, 25 bp, Homo sapien
cacaggtccttcgagatgctgagca

SEQ ID NO: 4952388 - DNA, 25 bp, Homo sapien
tgaagttctccgtcatggcatggga

SEQ ID NO: 4952389 - DNA, 25 bp, Homo sapien
gagctgggtgacacaccactggcct

SEQ ID NO: 4952390 - DNA, 25 bp, Homo sapien
cttctccttgatgcccctgaattgg

SEQ ID NO: 4952391 - DNA, 25 bp, Homo sapien
ttggtggctgctgccggtgctccca

SEQ ID NO: 4952392 - DNA, 25 bp, Homo sapien
caaggtcttctcctcggacagcccc

SEQ ID NO: 4952393 - DNA, 25 bp, Homo sapien
accgccccttgctcaggccgtccaa

SEQ ID NO: 4952394 - DNA, 25 bp, Homo sapien
gccacacagccagctagcctcaggg

SEQ ID NO: 4952395 - DNA, 25 bp, Homo sapien
ccggctgcgtcccaggctgtgagca

SEQ ID NO: 4952396 - DNA, 25 bp, Homo sapien
gcagcagtggcttcggtgggggccc

SEQ ID NO: 4952397 - DNA, 25 bp, Homo sapien
gggctgaggcgtgtccctggcctct

SEQ ID NO: 4952398 - DNA, 25 bp, Homo sapien
atgggggccggcgagcatgtcctgg

SEQ ID NO: 4952399 - DNA, 25 bp, Homo sapien
attttgagcaggagtcggatgtgtg

SEQ ID NO: 4952400 - DNA, 25 bp, Homo sapien
ggcgagcatgtcctggaccccgcgt

SEQ ID NO: 4952401 - DNA, 25 bp, Homo sapien
tggatccctcatgagagccggtgct

SEQ ID NO: 4952402 - DNA, 25 bp, Homo sapien
tccagaatatcgtggcactgagcca

SEQ ID NO: 4952403 - DNA, 25 bp, Homo sapien
tgctggctgacgagtccgaagaagc

SEQ ID NO: 4952404 - DNA, 25 bp, Homo sapien
gcaggtcgtcactccttaaagatga

SEQ ID NO: 4952405 - DNA, 25 bp, Homo sapien
ccaagggtagccctcccacacacag

SEQ ID NO: 4952406 - DNA, 25 bp, Homo sapien
tcgtccagatttcatacttgggccc

SEQ ID NO: 4952407 - DNA, 25 bp, Homo sapien
aagggtagccctcccacacacagca

SEQ ID NO: 4952408 - DNA, 25 bp, Homo sapien
attcgtccagatttcatacttgggc

SEQ ID NO: 4952409 - DNA, 25 bp, Homo sapien
gcctttctggcagccgtggcgtgct

SEQ ID NO: 4952410 - DNA, 25 bp, Homo sapien
gcccgactgagctggcgtgtcctga

SEQ ID NO: 4952411 - DNA, 25 bp, Homo sapien
catcctccgggaccataggagcgtg

SEQ ID NO: 4952412 - DNA, 25 bp, Homo sapien
ccgaccaggtggaagcggactttca

SEQ ID NO: 4952413 - DNA, 25 bp, Homo sapien
gaatggatcacactcggcttggtct

SEQ ID NO: 4952414 - DNA, 25 bp, Homo sapien
cgcgaatggatcacactcggcttgg

SEQ ID NO: 4952415 - DNA, 25 bp, Homo sapien
gaccgcgaatggatcacactcggct

SEQ ID NO: 4952416 - DNA, 25 bp, Homo sapien
tcggcttggtctttggcccccagct

SEQ ID NO: 4952417 - DNA, 25 bp, Homo sapien
ggttctgaaggcctcatgcccggca

SEQ ID NO: 4952418 - DNA, 25 bp, Homo sapien
aaagtttcagcctcgcttctcctgg

SEQ ID NO: 4952419 - DNA, 25 bp, Homo sapien
ttctgaaggcctcatgcccggcaca

SEQ ID NO: 4952420 - DNA, 25 bp, Homo sapien
ttgaagtcagcccagataaagtttc

SEQ ID NO: 4952421 - DNA, 25 bp, Homo sapien
gacgaagggtccagtgataatgcga

SEQ ID NO: 4952422 - DNA, 25 bp, Homo sapien
tgttactccatgagtgcaggctgct

SEQ ID NO: 4952423 - DNA, 25 bp, Homo sapien
tccattctgccgacctttggtggaa

SEQ ID NO: 4952424 - DNA, 25 bp, Homo sapien
tgaggttgtcacagcatagaagacg

SEQ ID NO: 4952425 - DNA, 25 bp, Homo sapien
ttcccgctggtcgtgtacaactgct

SEQ ID NO: 4952426 - DNA, 25 bp, Homo sapien
ttcttaatcagcagtatcctccggg

SEQ ID NO: 4952427 - DNA, 25 bp, Homo sapien
ctttgccgagaaaggcggccaggtt

SEQ ID NO: 4952428 - DNA, 25 bp, Homo sapien
ggcttcttatcagagcagaggtagc

SEQ ID NO: 4952429 - DNA, 25 bp, Homo sapien
agaggcacgcgctgggagagctcgt

SEQ ID NO: 4952430 - DNA, 25 bp, Homo sapien
cgctgaaggtcttaaaggcgcgctg

SEQ ID NO: 4952431 - DNA, 25 bp, Homo sapien
aggcggaccccagcaaaccgtggat

SEQ ID NO: 4952432 - DNA, 25 bp, Homo sapien
agagctcgtccatgagggcgctgaa

SEQ ID NO: 4952433 - DNA, 25 bp, Homo sapien
cttggctggcgtgaccttggtgacc

SEQ ID NO: 4952434 - DNA, 25 bp, Homo sapien
ctcacggtggctcggggcctgggca

SEQ ID NO: 4952435 - DNA, 25 bp, Homo sapien
atcttcttggctggcgtgaccttgg

SEQ ID NO: 4952436 - DNA, 25 bp, Homo sapien
ccttggtgaccgagggggtgcgagc

SEQ ID NO: 4952437 - DNA, 25 bp, Homo sapien
ctgcccaccccaaatgtgctccact

SEQ ID NO: 4952438 - DNA, 25 bp, Homo sapien
tttctagaggtgcttcctgcccacc

SEQ ID NO: 4952439 - DNA, 25 bp, Homo sapien
actccactatggagaggcaagtgaa

SEQ ID NO: 4952440 - DNA, 25 bp, Homo sapien
gcagcttgggggattggcatttcct

SEQ ID NO: 4952441 - DNA, 25 bp, Homo sapien
aaagccacatctgtagcacctccat

SEQ ID NO: 4952442 - DNA, 25 bp, Homo sapien
caaagccacatctgtagcacctcca

SEQ ID NO: 4952443 - DNA, 25 bp, Homo sapien
ccccagtacttcaatgtccccagaa

SEQ ID NO: 4952444 - DNA, 25 bp, Homo sapien
cccagtacttcaatgtccccagaac

SEQ ID NO: 4952445 - DNA, 25 bp, Homo sapien
aggctcttcctccagtaccactcac

SEQ ID NO: 4952446 - DNA, 25 bp, Homo sapien
gagggagaaggctcttcctccagta

SEQ ID NO: 4952447 - DNA, 25 bp, Homo sapien
agggtcacagaagctcccaggaggg

SEQ ID NO: 4952448 - DNA, 25 bp, Homo sapien
gtcacagaagctcccaggagggaga

SEQ ID NO: 4952449 - DNA, 25 bp, Homo sapien
aggaacctgggccttcgggatgcga

SEQ ID NO: 4952450 - DNA, 25 bp, Homo sapien
ctgggccttcgggatgcgaggaaat

SEQ ID NO: 4952451 - DNA, 25 bp, Homo sapien
aacctgggccttcgggatgcgagga

SEQ ID NO: 4952452 - DNA, 25 bp, Homo sapien
tgggccttcgggatgcgaggaaatg

SEQ ID NO: 4952453 - DNA, 25 bp, Homo sapien
gggcctcatcaggtgcgggcaggta

SEQ ID NO: 4952454 - DNA, 25 bp, Homo sapien
tttgcttctgaaccatccaggtgcc

SEQ ID NO: 4952455 - DNA, 25 bp, Homo sapien
tccaacattttgcttctgaaccatc

SEQ ID NO: 4952456 - DNA, 25 bp, Homo sapien
gtagaatgcattggaggaggctcca

SEQ ID NO: 4952457 - DNA, 25 bp, Homo sapien
tgatagttcccgttctgtctggtaa

SEQ ID NO: 4952458 - DNA, 25 bp, Homo sapien
gactggaagaaacctgatattgaca

SEQ ID NO: 4952459 - DNA, 25 bp, Homo sapien
taaaagagggacacatccatgacaa

SEQ ID NO: 4952460 - DNA, 25 bp, Homo sapien
tattgacactggaagtagaatcctt

SEQ ID NO: 4952461 - DNA, 25 bp, Homo sapien
tgaacagacgaagaccaagggcgat

SEQ ID NO: 4952462 - DNA, 25 bp, Homo sapien
caaaggagacatccgaggcttggca

SEQ ID NO: 4952463 - DNA, 25 bp, Homo sapien
gaccgcaagcgctgggttctctctg

SEQ ID NO: 4952464 - DNA, 25 bp, Homo sapien
gcttggcaaagttccacggtttgtc

SEQ ID NO: 4952465 - DNA, 25 bp, Homo sapien
ttctctgcatccaacagcacggcga

SEQ ID NO: 4952466 - DNA, 25 bp, Homo sapien
catgggcagtgtccaattctctgca

SEQ ID NO: 4952467 - DNA, 25 bp, Homo sapien
ctgaaagtgagggtctgcaccatgg

SEQ ID NO: 4952468 - DNA, 25 bp, Homo sapien
gcagcagcgatgaccgcatctgtgg

SEQ ID NO: 4952469 - DNA, 25 bp, Homo sapien
gggactcaggatcagcagaaggcca

SEQ ID NO: 4952470 - DNA, 25 bp, Homo sapien
caggatcagcagaaggccaccaggt

SEQ ID NO: 4952471 - DNA, 25 bp, Homo sapien
ctgagagtggggactcaggatcagc

SEQ ID NO: 4952472 - DNA, 25 bp, Homo sapien
gagcgctgagagtggggactcagga

SEQ ID NO: 4952473 - DNA, 25 bp, Homo sapien
ctatagcaccaacccgcggacaaaa

SEQ ID NO: 4952474 - DNA, 25 bp, Homo sapien
agcagacactggaagatcccccggg

SEQ ID NO: 4952475 - DNA, 25 bp, Homo sapien
agatcccccgggtcagtctatagca

SEQ ID NO: 4952476 - DNA, 25 bp, Homo sapien
gggtcagtctatagcaccaacccgc

SEQ ID NO: 4952477 - DNA, 25 bp, Homo sapien
gtggtgcggggcagagcatccagtt

SEQ ID NO: 4952478 - DNA, 25 bp, Homo sapien
ggtggtgcggggcagagcatccagt

SEQ ID NO: 4952479 - DNA, 25 bp, Homo sapien
tggtggtgcggggcagagcatccag

SEQ ID NO: 4952480 - DNA, 25 bp, Homo sapien
ggtggtggtgcggggcagagcatcc

SEQ ID NO: 4952481 - DNA, 25 bp, Homo sapien
cacagatgtccaatatcactttgta

SEQ ID NO: 4952482 - DNA, 25 bp, Homo sapien
tccaatatcactttgtacagcagag

SEQ ID NO: 4952483 - DNA, 25 bp, Homo sapien
ttggtccacatcacagatgtccaat

SEQ ID NO: 4952484 - DNA, 25 bp, Homo sapien
gatgtccaatatcactttgtacagc

SEQ ID NO: 4952485 - DNA, 25 bp, Homo sapien
atgatgcttcacaggagctgcgagg

SEQ ID NO: 4952486 - DNA, 25 bp, Homo sapien
cacaggagctgcgaggacgcttcag

SEQ ID NO: 4952487 - DNA, 25 bp, Homo sapien
ctagagaagccctgatggtctcatc

SEQ ID NO: 4952488 - DNA, 25 bp, Homo sapien
catggctagagaagccctgatggtc

SEQ ID NO: 4952489 - DNA, 25 bp, Homo sapien
tcacttgccgttggaaccactgatc

SEQ ID NO: 4952490 - DNA, 25 bp, Homo sapien
tgatctcccctaagcctcgttttct

SEQ ID NO: 4952491 - DNA, 25 bp, Homo sapien
ttgccgttggaaccactgatctccc

SEQ ID NO: 4952492 - DNA, 25 bp, Homo sapien
cactgatctcccctaagcctcgttt

SEQ ID NO: 4952493 - DNA, 25 bp, Homo sapien
cgtcctccagggagcacaagggcat

SEQ ID NO: 4952494 - DNA, 25 bp, Homo sapien
tcctgagctccaacagatggtccat

SEQ ID NO: 4952495 - DNA, 25 bp, Homo sapien
caccctcctccggacagtcctcggg

SEQ ID NO: 4952496 - DNA, 25 bp, Homo sapien
ccagtggctcagtccctctgggcag

SEQ ID NO: 4952497 - DNA, 25 bp, Homo sapien
ctaagcctcagggggacgtcctttg

SEQ ID NO: 4952498 - DNA, 25 bp, Homo sapien
gagcgccccgcccaccgtggtactg

SEQ ID NO: 4952499 - DNA, 25 bp, Homo sapien
cccaccgtggtactgggcaggaaca

SEQ ID NO: 4952500 - DNA, 25 bp, Homo sapien
caccgtggtactgggcaggaacacc

SEQ ID NO: 4952501 - DNA, 25 bp, Homo sapien
ccgcccaccgtggtactgggcagga

SEQ ID NO: 4952502 - DNA, 25 bp, Homo sapien
caactggaagcttccggaagaattt

SEQ ID NO: 4952503 - DNA, 25 bp, Homo sapien
agcttccggaagaatttgctcactt

SEQ ID NO: 4952504 - DNA, 25 bp, Homo sapien
tggaagcttccggaagaatttgctc

SEQ ID NO: 4952505 - DNA, 25 bp, Homo sapien
aagcttccggaagaatttgctcact

SEQ ID NO: 4952506 - DNA, 25 bp, Homo sapien
gtggtctttacagggcgccatcact

SEQ ID NO: 4952507 - DNA, 25 bp, Homo sapien
catgcatgcgtggtctttacagggc

SEQ ID NO: 4952508 - DNA, 25 bp, Homo sapien
ggcagccagtccatgcatgcgtggt

SEQ ID NO: 4952509 - DNA, 25 bp, Homo sapien
ccatcactggggttgtggctcgcag

SEQ ID NO: 4952510 - DNA, 25 bp, Homo sapien
tgactcggggcagagagatccccag

SEQ ID NO: 4952511 - DNA, 25 bp, Homo sapien
tcccgcttcccctgactcggggcag

SEQ ID NO: 4952512 - DNA, 25 bp, Homo sapien
cttcccctgactcggggcagagaga

SEQ ID NO: 4952513 - DNA, 25 bp, Homo sapien
cctgactcggggcagagagatcccc

SEQ ID NO: 4952514 - DNA, 25 bp, Homo sapien
tcaagaacataggtgggctctgtcc

SEQ ID NO: 4952515 - DNA, 25 bp, Homo sapien
agacattgtccatgccctcgcagga

SEQ ID NO: 4952516 - DNA, 25 bp, Homo sapien
caaatgccattaagctcaagcctgc

SEQ ID NO: 4952517 - DNA, 25 bp, Homo sapien
cacaaggtgcaatgtcataagagcc

SEQ ID NO: 4952518 - DNA, 25 bp, Homo sapien
gggactctcctggtgcgtaggcaca

SEQ ID NO: 4952519 - DNA, 25 bp, Homo sapien
gaatacctgctagagcctgtggata

SEQ ID NO: 4952520 - DNA, 25 bp, Homo sapien
tcttcccgtggtggtagtgctgaga

SEQ ID NO: 4952521 - DNA, 25 bp, Homo sapien
tcagtggaacccttcaaaaacagcg

SEQ ID NO: 4952522 - DNA, 25 bp, Homo sapien
gggtcacatatgtaaggacacagaa

SEQ ID NO: 4952523 - DNA, 25 bp, Homo sapien
tagaaagtgcctactgcatgtcgga

SEQ ID NO: 4952524 - DNA, 25 bp, Homo sapien
gtcggatactgggatgggtcacata

SEQ ID NO: 4952525 - DNA, 25 bp, Homo sapien
gcctactgcatgtcggatactggga

SEQ ID NO: 4952526 - DNA, 25 bp, Homo sapien
tagactagacaggtagacgaaggct

SEQ ID NO: 4952527 - DNA, 25 bp, Homo sapien
tgatgtgaatgggtttagactagac

SEQ ID NO: 4952528 - DNA, 25 bp, Homo sapien
tatttttcccgaggactccaaatgc

SEQ ID NO: 4952529 - DNA, 25 bp, Homo sapien
gcttctcaagtcagccggcctgagt

SEQ ID NO: 4952530 - DNA, 25 bp, Homo sapien
tcatctcaagtctatgccaaatgtc

SEQ ID NO: 4952531 - DNA, 25 bp, Homo sapien
tcaggagccaacatggcgtcttctc

SEQ ID NO: 4952532 - DNA, 25 bp, Homo sapien
tctcaagtctatgccaaatgtctgc

SEQ ID NO: 4952533 - DNA, 25 bp, Homo sapien
gggcaccatcaggagccaacatggc

SEQ ID NO: 4952534 - DNA, 25 bp, Homo sapien
gcaagcttaaggcatgtgaagactg

SEQ ID NO: 4952535 - DNA, 25 bp, Homo sapien
caatgcaagcttaaggcatgtgaag

SEQ ID NO: 4952536 - DNA, 25 bp, Homo sapien
aatgcaagcttaaggcatgtgaaga

SEQ ID NO: 4952537 - DNA, 25 bp, Homo sapien
atgcaagcttaaggcatgtgaagac

SEQ ID NO: 4952538 - DNA, 25 bp, Homo sapien
ctgctttggtgccagtcatgggcca

SEQ ID NO: 4952539 - DNA, 25 bp, Homo sapien
caaaaatgccgctgggtggcactgc

SEQ ID NO: 4952540 - DNA, 25 bp, Homo sapien
gccacactccaaactgttgtaagca

SEQ ID NO: 4952541 - DNA, 25 bp, Homo sapien
aaaggagctcagactcgggtccaaa

SEQ ID NO: 4952542 - DNA, 25 bp, Homo sapien
tgacccagtcaatcacactgacctg

SEQ ID NO: 4952543 - DNA, 25 bp, Homo sapien
aatcacactgacctggtcgatcaca

SEQ ID NO: 4952544 - DNA, 25 bp, Homo sapien
acactgacctggtcgatcacactaa

SEQ ID NO: 4952545 - DNA, 25 bp, Homo sapien
cagtcaatcacactgacctggtcga

SEQ ID NO: 4952546 - DNA, 25 bp, Homo sapien
ccggtcgatcttactgatgcagttg

SEQ ID NO: 4952547 - DNA, 25 bp, Homo sapien
tactgatgcagttgatcacactgat

SEQ ID NO: 4952548 - DNA, 25 bp, Homo sapien
gcactgatccagtcattcaccctga

SEQ ID NO: 4952549 - DNA, 25 bp, Homo sapien
acactgatctggtcaattgcactga

SEQ ID NO: 4952550 - DNA, 25 bp, Homo sapien
ttccagttgatcatgcagacccagt

SEQ ID NO: 4952551 - DNA, 25 bp, Homo sapien
cactaatccagtcgattatgcagac

SEQ ID NO: 4952552 - DNA, 25 bp, Homo sapien
ggatccagttgatcacgctcttcca

SEQ ID NO: 4952553 - DNA, 25 bp, Homo sapien
tcacacagatccagttgatcacatg

SEQ ID NO: 4952554 - DNA, 25 bp, Homo sapien
cattcgatcacactgacccggttga

SEQ ID NO: 4952555 - DNA, 25 bp, Homo sapien
cacactgacccggttgatcacactg

SEQ ID NO: 4952556 - DNA, 25 bp, Homo sapien
cactgacccggttgatcacactgat

SEQ ID NO: 4952557 - DNA, 25 bp, Homo sapien
cacacagttccattcgatcacactg

SEQ ID NO: 4952558 - DNA, 25 bp, Homo sapien
acagtgacccagttggtcacattgg

SEQ ID NO: 4952559 - DNA, 25 bp, Homo sapien
gatagtgggcagcttccacatttca

SEQ ID NO: 4952560 - DNA, 25 bp, Homo sapien
acactgatccagtcattttcaatgg

SEQ ID NO: 4952561 - DNA, 25 bp, Homo sapien
tttcaatggtccagccattcacagt

SEQ ID NO: 4952562 - DNA, 25 bp, Homo sapien
tggggggctaggcccatctctcctt

SEQ ID NO: 4952563 - DNA, 25 bp, Homo sapien
cacaaggtccccaacaggctgtctg

SEQ ID NO: 4952564 - DNA, 25 bp, Homo sapien
aggtccccaacaggctgtctgcagg

SEQ ID NO: 4952565 - DNA, 25 bp, Homo sapien
caatcacaaggtccccaacaggctg

SEQ ID NO: 4952566 - DNA, 25 bp, Homo sapien
gctctgagcaacctgcggatgctgc

SEQ ID NO: 4952567 - DNA, 25 bp, Homo sapien
cccaggtctcgactgttttcgggca

SEQ ID NO: 4952568 - DNA, 25 bp, Homo sapien
agcatgggcgcatgcacctgggaca

SEQ ID NO: 4952569 - DNA, 25 bp, Homo sapien
aaatccagtgatgggtagggccaga

SEQ ID NO: 4952570 - DNA, 25 bp, Homo sapien
gccttggtaactcatagagcaatac

SEQ ID NO: 4952571 - DNA, 25 bp, Homo sapien
aaaaaccgctttcacatgtcttggg

SEQ ID NO: 4952572 - DNA, 25 bp, Homo sapien
aagtggttgacgcttaaactcagga

SEQ ID NO: 4952573 - DNA, 25 bp, Homo sapien
agagcaatactttgccccatataag

SEQ ID NO: 4952574 - DNA, 25 bp, Homo sapien
aattctgccaggctacactccagca

SEQ ID NO: 4952575 - DNA, 25 bp, Homo sapien
aggctacactccagcaggtgcagga

SEQ ID NO: 4952576 - DNA, 25 bp, Homo sapien
cccaattctgccaggctacactcca

SEQ ID NO: 4952577 - DNA, 25 bp, Homo sapien
tctgccaggctacactccagcaggt

SEQ ID NO: 4952578 - DNA, 25 bp, Homo sapien
ccaggcagccggtgacactgcagat

SEQ ID NO: 4952579 - DNA, 25 bp, Homo sapien
actgcagatgcacgggccgtagctg

SEQ ID NO: 4952580 - DNA, 25 bp, Homo sapien
gcaggcactggtagacaggagctcc

SEQ ID NO: 4952581 - DNA, 25 bp, Homo sapien
gccaccggcctggatagcaaggtct

SEQ ID NO: 4952582 - DNA, 25 bp, Homo sapien
tctacatgtaggtcatgagttgaca

SEQ ID NO: 4952583 - DNA, 25 bp, Homo sapien
cagacagcctcatagtcacctcatt

SEQ ID NO: 4952584 - DNA, 25 bp, Homo sapien
tacgagtgtaaagtcgtcacaagga

SEQ ID NO: 4952585 - DNA, 25 bp, Homo sapien
gaaaattgttctacatgtaggtcat

SEQ ID NO: 4952586 - DNA, 25 bp, Homo sapien
ggagagtccagcttaggccaaaggc

SEQ ID NO: 4952587 - DNA, 25 bp, Homo sapien
tttcagttagggaccagttcagcag

SEQ ID NO: 4952588 - DNA, 25 bp, Homo sapien
tgcagaaagcctcgtggtccttggg

SEQ ID NO: 4952589 - DNA, 25 bp, Homo sapien
tatcaccagatcgtaggttagcgag

SEQ ID NO: 4952590 - DNA, 25 bp, Homo sapien
gctcagttgatccagggcgtcgaag

SEQ ID NO: 4952591 - DNA, 25 bp, Homo sapien
caaatactggtcgaattcattgcga

SEQ ID NO: 4952592 - DNA, 25 bp, Homo sapien
tacgggtacgtgtccacactgctcg

SEQ ID NO: 4952593 - DNA, 25 bp, Homo sapien
tctgtgggacccgttggtgtcacct

SEQ ID NO: 4952594 - DNA, 25 bp, Homo sapien
taaagcaaggattcgttcctcaggg

SEQ ID NO: 4952595 - DNA, 25 bp, Homo sapien
cctcagggtctctcttcgggaatat

SEQ ID NO: 4952596 - DNA, 25 bp, Homo sapien
aatgctggcttttcccgcttcggta

SEQ ID NO: 4952597 - DNA, 25 bp, Homo sapien
gatggcccaattgtaaggtccaggg

SEQ ID NO: 4952598 - DNA, 25 bp, Homo sapien
tccgcgctcgcacccgccctgcagt

SEQ ID NO: 4952599 - DNA, 25 bp, Homo sapien
ccaggctccgcgctcgcacccgccc

SEQ ID NO: 4952600 - DNA, 25 bp, Homo sapien
ccgccctgcagtgccgccagccgcc

SEQ ID NO: 4952601 - DNA, 25 bp, Homo sapien
aggctccgcgctcgcacccgccctg

SEQ ID NO: 4952602 - DNA, 25 bp, Homo sapien
tgggccgccggatacggctctcgga

SEQ ID NO: 4952603 - DNA, 25 bp, Homo sapien
ggccgccggatacggctctcggagc

SEQ ID NO: 4952604 - DNA, 25 bp, Homo sapien
catgggccgccggatacggctctcg

SEQ ID NO: 4952605 - DNA, 25 bp, Homo sapien
gccgtttcctctcgtccttggccca

SEQ ID NO: 4952606 - DNA, 25 bp, Homo sapien
gggcactcgagaccctcgggccaag

SEQ ID NO: 4952607 - DNA, 25 bp, Homo sapien
cactcgagaccctcgggccaagggt

SEQ ID NO: 4952608 - DNA, 25 bp, Homo sapien
acggccggcggcgattgtccatccg

SEQ ID NO: 4952609 - DNA, 25 bp, Homo sapien
ggcgattgtccatccgacagctcgg

SEQ ID NO: 4952610 - DNA, 25 bp, Homo sapien
cgcgggtcgcctcgcttcgcctggc

SEQ ID NO: 4952611 - DNA, 25 bp, Homo sapien
ctcgcttcgcctggcggggcaggcg

SEQ ID NO: 4952612 - DNA, 25 bp, Homo sapien
ggccgcacgcgggtcgcctcgcttc

SEQ ID NO: 4952613 - DNA, 25 bp, Homo sapien
cacgcgggtcgcctcgcttcgcctg

SEQ ID NO: 4952614 - DNA, 25 bp, Homo sapien
gtcggggcgtccaacttggcccgca

SEQ ID NO: 4952615 - DNA, 25 bp, Homo sapien
aatgactctccaaggcggcgcggcc

SEQ ID NO: 4952616 - DNA, 25 bp, Homo sapien
tgatttatcagcttcgggcggccgc

SEQ ID NO: 4952617 - DNA, 25 bp, Homo sapien
gtcctccaatgactctccaaggcgg

SEQ ID NO: 4952618 - DNA, 25 bp, Homo sapien
cgtgcgcgccgggcccacgtgcagc

SEQ ID NO: 4952619 - DNA, 25 bp, Homo sapien
ctggtgtagaccgaccgtgcgcgcc

SEQ ID NO: 4952620 - DNA, 25 bp, Homo sapien
cctggtgtagaccgaccgtgcgcgc

SEQ ID NO: 4952621 - DNA, 25 bp, Homo sapien
gaccgtgcgcgccgggcccacgtgc

SEQ ID NO: 4952622 - DNA, 25 bp, Homo sapien
gtgctctgcagggtcggaggccacg

SEQ ID NO: 4952623 - DNA, 25 bp, Homo sapien
tcggaggccacgaggggacagcgcc

SEQ ID NO: 4952624 - DNA, 25 bp, Homo sapien
tctgcagggtcggaggccacgaggg

SEQ ID NO: 4952625 - DNA, 25 bp, Homo sapien
cagtgctctgcagggtcggaggcca

SEQ ID NO: 4952626 - DNA, 25 bp, Homo sapien
ggctgtccaggaggtgaacattaac

SEQ ID NO: 4952627 - DNA, 25 bp, Homo sapien
gggctgtccaggaggtgaacattaa

SEQ ID NO: 4952628 - DNA, 25 bp, Homo sapien
tgattattgtctgcacttgtttagt

SEQ ID NO: 4952629 - DNA, 25 bp, Homo sapien
tgcagcgagcttgcaagcctgggct

SEQ ID NO: 4952630 - DNA, 25 bp, Homo sapien
tggaaattgtcagcaccgcggtagc

SEQ ID NO: 4952631 - DNA, 25 bp, Homo sapien
aaattgtcagcaccgcggtagccgg

SEQ ID NO: 4952632 - DNA, 25 bp, Homo sapien
gggcttggaaattgtcagcaccgcg

SEQ ID NO: 4952633 - DNA, 25 bp, Homo sapien
ccgcccggggcttggaaattgtcag

SEQ ID NO: 4952634 - DNA, 25 bp, Homo sapien
catgttcacataatgaccctaagga

SEQ ID NO: 4952635 - DNA, 25 bp, Homo sapien
tgctcctgggataagcatgcaccca

SEQ ID NO: 4952636 - DNA, 25 bp, Homo sapien
taagccctgaatgatgaatacgttg

SEQ ID NO: 4952637 - DNA, 25 bp, Homo sapien
gggtggctgctgaactaagccctga

SEQ ID NO: 4952638 - DNA, 25 bp, Homo sapien
gagacatacatatcaggtagcctct

SEQ ID NO: 4952639 - DNA, 25 bp, Homo sapien
tgcaccgggtctagaaaatacttct

SEQ ID NO: 4952640 - DNA, 25 bp, Homo sapien
tctaaaacatctagcgcaataaagg

SEQ ID NO: 4952641 - DNA, 25 bp, Homo sapien
caccatcctggtcaaacactaggaa

SEQ ID NO: 4952642 - DNA, 25 bp, Homo sapien
cactgcgcagcatccttagagacta

SEQ ID NO: 4952643 - DNA, 25 bp, Homo sapien
gagaaagtgacttcagaaaccgctg

SEQ ID NO: 4952644 - DNA, 25 bp, Homo sapien
ggcaagtttgagttcccgtcaccag

SEQ ID NO: 4952645 - DNA, 25 bp, Homo sapien
tattagcctgggattctaaactcgg

SEQ ID NO: 4952646 - DNA, 25 bp, Homo sapien
gcggcacaagcatggcgctgcgaca

SEQ ID NO: 4952647 - DNA, 25 bp, Homo sapien
aagggagagtttggctggcacacgg

SEQ ID NO: 4952648 - DNA, 25 bp, Homo sapien
acaggcatccgagtgaacccaaagg

SEQ ID NO: 4952649 - DNA, 25 bp, Homo sapien
tcttctcctgtgtcccagggatggt

SEQ ID NO: 4952650 - DNA, 25 bp, Homo sapien
gcctcttaatcctttaattaggctg

SEQ ID NO: 4952651 - DNA, 25 bp, Homo sapien
cctcttaatcctttaattaggctga

SEQ ID NO: 4952652 - DNA, 25 bp, Homo sapien
gattataattaaactctcttgctga

SEQ ID NO: 4952653 - DNA, 25 bp, Homo sapien
ttgaagggaaccgagagcaaacgga

SEQ ID NO: 4952654 - DNA, 25 bp, Homo sapien
gagcaaacggagatagtgacacaca

SEQ ID NO: 4952655 - DNA, 25 bp, Homo sapien
ttcattgttattgaagggaaccgag

SEQ ID NO: 4952656 - DNA, 25 bp, Homo sapien
gcaggactcggcagcccatgggcat

SEQ ID NO: 4952657 - DNA, 25 bp, Homo sapien
atgccacaagatgcgcccaggcgct

SEQ ID NO: 4952658 - DNA, 25 bp, Homo sapien
tgacttcaggccagaggtgtctgcc

SEQ ID NO: 4952659 - DNA, 25 bp, Homo sapien
tctgagagccacgattgagaacatt

SEQ ID NO: 4952660 - DNA, 25 bp, Homo sapien
ttcactagcgtttcttctagtgtag

SEQ ID NO: 4952661 - DNA, 25 bp, Homo sapien
cactagcgtttcttctagtgtagcg

SEQ ID NO: 4952662 - DNA, 25 bp, Homo sapien
tctttttcactagcgtttcttctag

SEQ ID NO: 4952663 - DNA, 25 bp, Homo sapien
ttttcactagcgtttcttctagtgt

SEQ ID NO: 4952664 - DNA, 25 bp, Homo sapien
aagtcccggccctcaggcggctgca

SEQ ID NO: 4952665 - DNA, 25 bp, Homo sapien
ggtgaagtcccggccctcaggcggc

SEQ ID NO: 4952666 - DNA, 25 bp, Homo sapien
tgaagtcccggccctcaggcggctg

SEQ ID NO: 4952667 - DNA, 25 bp, Homo sapien
agtcccggccctcaggcggctgcac

SEQ ID NO: 4952668 - DNA, 25 bp, Homo sapien
tctgctggcgcgctcttcttcttgg

SEQ ID NO: 4952669 - DNA, 25 bp, Homo sapien
cagaggccttggaactctggtccca

SEQ ID NO: 4952670 - DNA, 25 bp, Homo sapien
tacgttccacctgcgtctcagaaat

SEQ ID NO: 4952671 - DNA, 25 bp, Homo sapien
ctcttggccttaggctggaggtaac

SEQ ID NO: 4952672 - DNA, 25 bp, Homo sapien
gctgccatccgcttggcaaagtact

SEQ ID NO: 4952673 - DNA, 25 bp, Homo sapien
tggcaaagtactcctggatggtgaa

SEQ ID NO: 4952674 - DNA, 25 bp, Homo sapien
atggtgaaggcgctggttgtcgtgg

SEQ ID NO: 4952675 - DNA, 25 bp, Homo sapien
tcgtggtttcgttctcctctggagt

SEQ ID NO: 4952676 - DNA, 25 bp, Homo sapien
aagtctcggcaatgagcagcctcgg

SEQ ID NO: 4952677 - DNA, 25 bp, Homo sapien
agtctcggcaatgagcagcctcggg

SEQ ID NO: 4952678 - DNA, 25 bp, Homo sapien
caagtctcggcaatgagcagcctcg

SEQ ID NO: 4952679 - DNA, 25 bp, Homo sapien
gtctcggcaatgagcagcctcgggg

SEQ ID NO: 4952680 - DNA, 25 bp, Homo sapien
tgactgtgaatacaatacggctgac

SEQ ID NO: 4952681 - DNA, 25 bp, Homo sapien
tgtctcctgccaacgacagaatgcc

SEQ ID NO: 4952682 - DNA, 25 bp, Homo sapien
ataaaatcggctctgtgactgtgaa

SEQ ID NO: 4952683 - DNA, 25 bp, Homo sapien
aactggaggacgctgggctttgaca

SEQ ID NO: 4952684 - DNA, 25 bp, Homo sapien
tacggtctctttacgaagtgaatac

SEQ ID NO: 4952685 - DNA, 25 bp, Homo sapien
ggtgaaatcaacaaaattcaggaca

SEQ ID NO: 4952686 - DNA, 25 bp, Homo sapien
attctgtaagacaaggaatccaagg

SEQ ID NO: 4952687 - DNA, 25 bp, Homo sapien
tcagcagggatggtaatctatgtgg

SEQ ID NO: 4952688 - DNA, 25 bp, Homo sapien
taactacagtgtaactgaggggacc

SEQ ID NO: 4952689 - DNA, 25 bp, Homo sapien
catgtaactacagtgtaactgaggg

SEQ ID NO: 4952690 - DNA, 25 bp, Homo sapien
tgtaactacagtgtaactgagggga

SEQ ID NO: 4952691 - DNA, 25 bp, Homo sapien
gtaactacagtgtaactgaggggac

SEQ ID NO: 4952692 - DNA, 25 bp, Homo sapien
accagcaagggtagcgctggagctt

SEQ ID NO: 4952693 - DNA, 25 bp, Homo sapien
cgatcagctattggagtctgagtct

SEQ ID NO: 4952694 - DNA, 25 bp, Homo sapien
gctggagcttgtctgtattacgatc

SEQ ID NO: 4952695 - DNA, 25 bp, Homo sapien
tcaggaccagcaagggtagcgctgg

SEQ ID NO: 4952696 - DNA, 25 bp, Homo sapien
tcaaaatcattgaccgtccctcccc

SEQ ID NO: 4952697 - DNA, 25 bp, Homo sapien
ttgcctccagctcaacagttaacca

SEQ ID NO: 4952698 - DNA, 25 bp, Homo sapien
ctccctgaagggacagactgtgcct

SEQ ID NO: 4952699 - DNA, 25 bp, Homo sapien
acgctgtgcgctccctgaagggaca

SEQ ID NO: 4952700 - DNA, 25 bp, Homo sapien
ggttaagagcgcctggcacccgcca

SEQ ID NO: 4952701 - DNA, 25 bp, Homo sapien
gttaagagcgcctggcacccgccat

SEQ ID NO: 4952702 - DNA, 25 bp, Homo sapien
gcacccgccatcactcaggagtggt

SEQ ID NO: 4952703 - DNA, 25 bp, Homo sapien
ctggcacccgccatcactcaggagt

SEQ ID NO: 4952704 - DNA, 25 bp, Homo sapien
tgttgttagtaagccactgactgtg

SEQ ID NO: 4952705 - DNA, 25 bp, Homo sapien
tcaaacagtcaacagtggcctctcc

SEQ ID NO: 4952706 - DNA, 25 bp, Homo sapien
caaacagggcctaagtcatgtagat

SEQ ID NO: 4952707 - DNA, 25 bp, Homo sapien
ggaagacacttctactgcacttagc

SEQ ID NO: 4952708 - DNA, 25 bp, Homo sapien
aaatactgaagcatgcagatgacaa

SEQ ID NO: 4952709 - DNA, 25 bp, Homo sapien
ataccacttgatccaggcgctcagc

SEQ ID NO: 4952710 - DNA, 25 bp, Homo sapien
aggcgctcagcttacaggacccaaa

SEQ ID NO: 4952711 - DNA, 25 bp, Homo sapien
caactctcctttctgcaagatggac

SEQ ID NO: 4952712 - DNA, 25 bp, Homo sapien
tgagcaactactaacgaccctgagc

SEQ ID NO: 4952713 - DNA, 25 bp, Homo sapien
tacttccgtggtactaaggctgaac

SEQ ID NO: 4952714 - DNA, 25 bp, Homo sapien
taagggagctgcatctgtcatacgc

SEQ ID NO: 4952715 - DNA, 25 bp, Homo sapien
gcaggccctggtaatgtcaaaagaa

SEQ ID NO: 4952716 - DNA, 25 bp, Homo sapien
tgctgcgacctcctgcagggcgtgc

SEQ ID NO: 4952717 - DNA, 25 bp, Homo sapien
ctgctgcgacctcctgcagggcgtg

SEQ ID NO: 4952718 - DNA, 25 bp, Homo sapien
cggccgtacttaaatacaactcata

SEQ ID NO: 4952719 - DNA, 25 bp, Homo sapien
agtaggagctcatggacgcacgtgt

SEQ ID NO: 4952720 - DNA, 25 bp, Homo sapien
ttggatccaacaagctgcagtagga

SEQ ID NO: 4952721 - DNA, 25 bp, Homo sapien
gggagaggtctccatgacaccacgg

SEQ ID NO: 4952722 - DNA, 25 bp, Homo sapien
tcaagaggcgcgggactggaattct

SEQ ID NO: 4952723 - DNA, 25 bp, Homo sapien
caagaggcgcgggactggaattcta

SEQ ID NO: 4952724 - DNA, 25 bp, Homo sapien
cgcgggactggaattctagttcttc

SEQ ID NO: 4952725 - DNA, 25 bp, Homo sapien
aggcgcgggactggaattctagttc

SEQ ID NO: 4952726 - DNA, 25 bp, Homo sapien
gcaggcaccaaagccaggtatcctt

SEQ ID NO: 4952727 - DNA, 25 bp, Homo sapien
cgtgactcagcatagtccgcgcagg

SEQ ID NO: 4952728 - DNA, 25 bp, Homo sapien
acggccggatgtcagagcggctcct

SEQ ID NO: 4952729 - DNA, 25 bp, Homo sapien
aggagcagccggcacggccggatgt

SEQ ID NO: 4952730 - DNA, 25 bp, Homo sapien
gtcttcttactctgtcttttcccaa

SEQ ID NO: 4952731 - DNA, 25 bp, Homo sapien
agatctgttttgctccgagatgaca

SEQ ID NO: 4952732 - DNA, 25 bp, Homo sapien
ttgctccgagatgacagatccttcc

SEQ ID NO: 4952733 - DNA, 25 bp, Homo sapien
ttttcccaaaaatgcagtcaagatc

SEQ ID NO: 4952734 - DNA, 25 bp, Homo sapien
tgtgtctaaagttttgatgatggat

SEQ ID NO: 4952735 - DNA, 25 bp, Homo sapien
cagtaagctatatcaatgaaggtgc

SEQ ID NO: 4952736 - DNA, 25 bp, Homo sapien
tgtcaagctggtagagacagtaagc

SEQ ID NO: 4952737 - DNA, 25 bp, Homo sapien
gaaaactgtcaagctggtagagaca

SEQ ID NO: 4952738 - DNA, 25 bp, Homo sapien
cacttaagtaaatgtagaaaccagg

SEQ ID NO: 4952739 - DNA, 25 bp, Homo sapien
cttaagtaaatgtagaaaccaggat

SEQ ID NO: 4952740 - DNA, 25 bp, Homo sapien
tcacttaagtaaatgtagaaaccag

SEQ ID NO: 4952741 - DNA, 25 bp, Homo sapien
atatagtgaacacggtttttggaga

SEQ ID NO: 4952742 - DNA, 25 bp, Homo sapien
tggacttttcctcaaggctaaaaga

SEQ ID NO: 4952743 - DNA, 25 bp, Homo sapien
tcatatagtgaacacggtttttgga

SEQ ID NO: 4952744 - DNA, 25 bp, Homo sapien
atagtgaacacggtttttggagatt

SEQ ID NO: 4952745 - DNA, 25 bp, Homo sapien
gacatccgagtggtaacgcctttga

SEQ ID NO: 4952746 - DNA, 25 bp, Homo sapien
cgcctttgacggaagggaaaatgtg

SEQ ID NO: 4952747 - DNA, 25 bp, Homo sapien
ggaagacatccgagtggtaacgcct

SEQ ID NO: 4952748 - DNA, 25 bp, Homo sapien
catccgagtggtaacgcctttgacg

SEQ ID NO: 4952749 - DNA, 25 bp, Homo sapien
gaaaggttgatcagagcaggttgat

SEQ ID NO: 4952750 - DNA, 25 bp, Homo sapien
tgaaaggttgatcagagcaggttga

SEQ ID NO: 4952751 - DNA, 25 bp, Homo sapien
gaagttatcagcttaaagcggctcc

SEQ ID NO: 4952752 - DNA, 25 bp, Homo sapien
agttatcagcttaaagcggctccta

SEQ ID NO: 4952753 - DNA, 25 bp, Homo sapien
aagttatcagcttaaagcggctcct

SEQ ID NO: 4952754 - DNA, 25 bp, Homo sapien
gttatcagcttaaagcggctcctac

SEQ ID NO: 4952755 - DNA, 25 bp, Homo sapien
tgcaagtgtatgagggacgaggcgc

SEQ ID NO: 4952756 - DNA, 25 bp, Homo sapien
ggacgaggcgctggactggaggctt

SEQ ID NO: 4952757 - DNA, 25 bp, Homo sapien
gaattcttggatttccttcccacag

SEQ ID NO: 4952758 - DNA, 25 bp, Homo sapien
atgaattcttggatttccttcccac

SEQ ID NO: 4952759 - DNA, 25 bp, Homo sapien
agaagctggttaaaatcatcctgat

SEQ ID NO: 4952760 - DNA, 25 bp, Homo sapien
atggcaagtgttcagttcggccaga

SEQ ID NO: 4952761 - DNA, 25 bp, Homo sapien
gaagctggttaaaatcatcctgatg

SEQ ID NO: 4952762 - DNA, 25 bp, Homo sapien
ttcagttcggccagaagctggttaa

SEQ ID NO: 4952763 - DNA, 25 bp, Homo sapien
cattattgatggtagctccgagtcc

SEQ ID NO: 4952764 - DNA, 25 bp, Homo sapien
agctccgagtcccaggtggttattt

SEQ ID NO: 4952765 - DNA, 25 bp, Homo sapien
ttgatggtagctccgagtcccaggt

SEQ ID NO: 4952766 - DNA, 25 bp, Homo sapien
ttcattattgatggtagctccgagt

SEQ ID NO: 4952767 - DNA, 25 bp, Homo sapien
catccgctggccaaacttggaatcg

SEQ ID NO: 4952768 - DNA, 25 bp, Homo sapien
ctctagcatccgctggccaaacttg

SEQ ID NO: 4952769 - DNA, 25 bp, Homo sapien
tggccaaacttggaatcgtcattac

SEQ ID NO: 4952770 - DNA, 25 bp, Homo sapien
acttggaatcgtcattactccaggc

SEQ ID NO: 4952771 - DNA, 25 bp, Homo sapien
gtggacaccagcatcctcatcacca

SEQ ID NO: 4952772 - DNA, 25 bp, Homo sapien
tggacaccagcatcctcatcaccat

SEQ ID NO: 4952773 - DNA, 25 bp, Homo sapien
atcctcatcaccatcagcagtagta

SEQ ID NO: 4952774 - DNA, 25 bp, Homo sapien
ctcatcaccatcagcagtagtagca

SEQ ID NO: 4952775 - DNA, 25 bp, Homo sapien
gcatcttcaccaacgcgcctgggtc

SEQ ID NO: 4952776 - DNA, 25 bp, Homo sapien
tcgggcctccgcttccgacactcac

SEQ ID NO: 4952777 - DNA, 25 bp, Homo sapien
tcttcaccaacgcgcctgggtcggg

SEQ ID NO: 4952778 - DNA, 25 bp, Homo sapien
tcaccaacgcgcctgggtcgggcct

SEQ ID NO: 4952779 - DNA, 25 bp, Homo sapien
caggagaatcaggacgtgcgtaact

SEQ ID NO: 4952780 - DNA, 25 bp, Homo sapien
gtcggagagcctgtgataccgccgc

SEQ ID NO: 4952781 - DNA, 25 bp, Homo sapien
gagcctgtgataccgccgcctctgg

SEQ ID NO: 4952782 - DNA, 25 bp, Homo sapien
aggacgtgcgtaactccctcgccgg

SEQ ID NO: 4952783 - DNA, 25 bp, Homo sapien
tttccgctgagaggagccataatta

SEQ ID NO: 4952784 - DNA, 25 bp, Homo sapien
cagccaaaacgcagctgacagtgag

SEQ ID NO: 4952785 - DNA, 25 bp, Homo sapien
aatgctcgccccacatggaaattca

SEQ ID NO: 4952786 - DNA, 25 bp, Homo sapien
ggaaattcacactccagccaaaacg

SEQ ID NO: 4952787 - DNA, 25 bp, Homo sapien
tgaatggcacgtgtcctggaaaacc

SEQ ID NO: 4952788 - DNA, 25 bp, Homo sapien
caagatgctgggtgaatcgactgcc

SEQ ID NO: 4952789 - DNA, 25 bp, Homo sapien
tgttctacgatgactcagggccacc

SEQ ID NO: 4952790 - DNA, 25 bp, Homo sapien
gaggaatccctcacgttacagacag

SEQ ID NO: 4952791 - DNA, 25 bp, Homo sapien
attatattggttaaagtaacagcca

SEQ ID NO: 4952792 - DNA, 25 bp, Homo sapien
taattatattggttaaagtaacagc

SEQ ID NO: 4952793 - DNA, 25 bp, Homo sapien
tatattggttaaagtaacagccagt

SEQ ID NO: 4952794 - DNA, 25 bp, Homo sapien
atattggttaaagtaacagccagtg

SEQ ID NO: 4952795 - DNA, 25 bp, Homo sapien
atgtgatatatcatgattcagaaac

SEQ ID NO: 4952796 - DNA, 25 bp, Homo sapien
taagtgaaggatgcaatgaatgtga

SEQ ID NO: 4952797 - DNA, 25 bp, Homo sapien
tcagaaacccttgtgataaatcacc

SEQ ID NO: 4952798 - DNA, 25 bp, Homo sapien
ctcaagacatatctcagcatttgcc

SEQ ID NO: 4952799 - DNA, 25 bp, Homo sapien
tcttatttcacagggaacctttcaa

SEQ ID NO: 4952800 - DNA, 25 bp, Homo sapien
ggcaatgtggtattaacctggagct

SEQ ID NO: 4952801 - DNA, 25 bp, Homo sapien
gaattcattattggcctaaaggggc

SEQ ID NO: 4952802 - DNA, 25 bp, Homo sapien
tagtcaactgatccaaggcctgtgt

SEQ ID NO: 4952803 - DNA, 25 bp, Homo sapien
cctgtttgagaagtacgcctggtga

SEQ ID NO: 4952804 - DNA, 25 bp, Homo sapien
tcatgaggaaggctcaacagtcctt

SEQ ID NO: 4952805 - DNA, 25 bp, Homo sapien
cacactgggagttacttttaggcaa

SEQ ID NO: 4952806 - DNA, 25 bp, Homo sapien
gccaatatattggtgcacactggga

SEQ ID NO: 4952807 - DNA, 25 bp, Homo sapien
ctcttccgttaacctcagggaggtg

SEQ ID NO: 4952808 - DNA, 25 bp, Homo sapien
tagagcccagtacttcaggtcagtg

SEQ ID NO: 4952809 - DNA, 25 bp, Homo sapien
gaaagatcagaagaacaccaattgg

SEQ ID NO: 4952810 - DNA, 25 bp, Homo sapien
caacaccgaggtctttgcaagcttc

SEQ ID NO: 4952811 - DNA, 25 bp, Homo sapien
tgaagactcaattcttcattaggaa

SEQ ID NO: 4952812 - DNA, 25 bp, Homo sapien
gaagactcaattcttcattaggaaa

SEQ ID NO: 4952813 - DNA, 25 bp, Homo sapien
cctgaagactcaattcttcattagg

SEQ ID NO: 4952814 - DNA, 25 bp, Homo sapien
catcctgaagactcaattcttcatt

SEQ ID NO: 4952815 - DNA, 25 bp, Homo sapien
cattggacctgatgaatggaaagga

SEQ ID NO: 4952816 - DNA, 25 bp, Homo sapien
gggaggattgctgtctgtcttaagc

SEQ ID NO: 4952817 - DNA, 25 bp, Homo sapien
tcatctgagtctgtataataacagg

SEQ ID NO: 4952818 - DNA, 25 bp, Homo sapien
cagctgcttccagcgtggatgggct

SEQ ID NO: 4952819 - DNA, 25 bp, Homo sapien
tgaattgtcaggcttccgaacaggc

SEQ ID NO: 4952820 - DNA, 25 bp, Homo sapien
ggacactctgatttggccctgggca

SEQ ID NO: 4952821 - DNA, 25 bp, Homo sapien
tcccagaacggcaggttgtcacagc

SEQ ID NO: 4952822 - DNA, 25 bp, Homo sapien
gaggtgggcatgacccttcccagaa

SEQ ID NO: 4952823 - DNA, 25 bp, Homo sapien
aaagctgccttctgcgtacagggct

SEQ ID NO: 4952824 - DNA, 25 bp, Homo sapien
aattgtcttggatggctcggccacc

SEQ ID NO: 4952825 - DNA, 25 bp, Homo sapien
cagacttgtgcagacaaccagagaa

SEQ ID NO: 4952826 - DNA, 25 bp, Homo sapien
ccgccgagtggaagcatgttgtgct

SEQ ID NO: 4952827 - DNA, 25 bp, Homo sapien
gttagcgccctaggcaggggacatt

SEQ ID NO: 4952828 - DNA, 25 bp, Homo sapien
ttattggttagcgccctaggcaggg

SEQ ID NO: 4952829 - DNA, 25 bp, Homo sapien
tagcgccctaggcaggggacatttt

SEQ ID NO: 4952830 - DNA, 25 bp, Homo sapien
ttggttagcgccctaggcaggggac

SEQ ID NO: 4952831 - DNA, 25 bp, Homo sapien
tgtgttacggagacagcaactttca

SEQ ID NO: 4952832 - DNA, 25 bp, Homo sapien
catgtgtgggacgtatgcaggtcac

SEQ ID NO: 4952833 - DNA, 25 bp, Homo sapien
tcccttgggagaaattagcactacc

SEQ ID NO: 4952834 - DNA, 25 bp, Homo sapien
tcaggacacgaagtgagggatgccc

SEQ ID NO: 4952835 - DNA, 25 bp, Homo sapien
atcgtgtcgctccaggtcatgccaa

SEQ ID NO: 4952836 - DNA, 25 bp, Homo sapien
ttttcccacataaccaagtatcgtg

SEQ ID NO: 4952837 - DNA, 25 bp, Homo sapien
tttgcacgctgtgggcacctgggtt

SEQ ID NO: 4952838 - DNA, 25 bp, Homo sapien
catgccaattctgtccgagggcaga

SEQ ID NO: 4952839 - DNA, 25 bp, Homo sapien
caacgttgggggccactcgtgaaca

SEQ ID NO: 4952840 - DNA, 25 bp, Homo sapien
ttggaatcaacgttgggggccactc

SEQ ID NO: 4952841 - DNA, 25 bp, Homo sapien
cgttgggggccactcgtgaacacag

SEQ ID NO: 4952842 - DNA, 25 bp, Homo sapien
catggaagcataggcctcgaagaag

SEQ ID NO: 4952843 - DNA, 25 bp, Homo sapien
taacctgtgattggctggcccctgc

SEQ ID NO: 4952844 - DNA, 25 bp, Homo sapien
tggaggttgaactgtgggtgagaat

SEQ ID NO: 4952845 - DNA, 25 bp, Homo sapien
tgggtgagaatggaatgttgcttct

SEQ ID NO: 4952846 - DNA, 25 bp, Homo sapien
cttctacgacaatgggcagtttggg

SEQ ID NO: 4952847 - DNA, 25 bp, Homo sapien
atggattatttttcatcagggggtc

SEQ ID NO: 4952848 - DNA, 25 bp, Homo sapien
ggaaatggattatttttcatcaggg

SEQ ID NO: 4952849 - DNA, 25 bp, Homo sapien
aaatggattatttttcatcaggggg

SEQ ID NO: 4952850 - DNA, 25 bp, Homo sapien
caggcctaaatactggaaatggatt

SEQ ID NO: 4952851 - DNA, 25 bp, Homo sapien
tgtgcccaagtagagatacgatgcg

SEQ ID NO: 4952852 - DNA, 25 bp, Homo sapien
taatgaaactcagcacctaagggca

SEQ ID NO: 4952853 - DNA, 25 bp, Homo sapien
gattttcagccaaccacaatggtga

SEQ ID NO: 4952854 - DNA, 25 bp, Homo sapien
gattgaaacgatgccctagaacaga

SEQ ID NO: 4952855 - DNA, 25 bp, Homo sapien
tacaaaatgagcatcccaagctggg

SEQ ID NO: 4952856 - DNA, 25 bp, Homo sapien
gatatcgaatgcctactgcggtggg

SEQ ID NO: 4952857 - DNA, 25 bp, Homo sapien
caagctgggtatcgctttcttggca

SEQ ID NO: 4952858 - DNA, 25 bp, Homo sapien
tagcaactcatagaggagtggtccg

SEQ ID NO: 4952859 - DNA, 25 bp, Homo sapien
tgtgataggaggctagcacccaagc

SEQ ID NO: 4952860 - DNA, 25 bp, Homo sapien
taccaaaggaacgtcaaggcagcat

SEQ ID NO: 4952861 - DNA, 25 bp, Homo sapien
taagagcatcattgcgatcccagcc

SEQ ID NO: 4952862 - DNA, 25 bp, Homo sapien
caagcaagtgtcagccgtgagatcc

SEQ ID NO: 4952863 - DNA, 25 bp, Homo sapien
cacagtcaaaaccttggacatcaac

SEQ ID NO: 4952864 - DNA, 25 bp, Homo sapien
acatcaaccgcagggcacagtgaag

SEQ ID NO: 4952865 - DNA, 25 bp, Homo sapien
aaccttggacatcaaccgcagggca

SEQ ID NO: 4952866 - DNA, 25 bp, Homo sapien
tcaaccgcagggcacagtgaagctg

SEQ ID NO: 4952867 - DNA, 25 bp, Homo sapien
tgaagaatccgagttctctgccacg

SEQ ID NO: 4952868 - DNA, 25 bp, Homo sapien
gtctcacaaaggtcccctccttcca

SEQ ID NO: 4952869 - DNA, 25 bp, Homo sapien
acaactctccgaagcccgatgaaga

SEQ ID NO: 4952870 - DNA, 25 bp, Homo sapien
agcactggctctgcgtcacccgtct

SEQ ID NO: 4952871 - DNA, 25 bp, Homo sapien
gatcagactagaaattgttacacgc

SEQ ID NO: 4952872 - DNA, 25 bp, Homo sapien
tccatcactgactgcattccgaaga

SEQ ID NO: 4952873 - DNA, 25 bp, Homo sapien
ttgttacacgcttcacgtttggctg

SEQ ID NO: 4952874 - DNA, 25 bp, Homo sapien
ctgtgacgagctctgagcagtgacc

SEQ ID NO: 4952875 - DNA, 25 bp, Homo sapien
ctgtggatgaagatgcgagccagcc

SEQ ID NO: 4952876 - DNA, 25 bp, Homo sapien
gatttaattgctcgaggccaaggca

SEQ ID NO: 4952877 - DNA, 25 bp, Homo sapien
actgcaatgccatgagcgcccggaa

SEQ ID NO: 4952878 - DNA, 25 bp, Homo sapien
catgagcgcccggaagtggagctct

SEQ ID NO: 4952879 - DNA, 25 bp, Homo sapien
gaggctcacctaagaggctctggaa

SEQ ID NO: 4952880 - DNA, 25 bp, Homo sapien
gaaacatcgctttctgaccatgtca

SEQ ID NO: 4952881 - DNA, 25 bp, Homo sapien
ccctgagtgcttggaagaggctcac

SEQ ID NO: 4952882 - DNA, 25 bp, Homo sapien
gcttagcttcctagtaagacagtga

SEQ ID NO: 4952883 - DNA, 25 bp, Homo sapien
cagtagccctattgcatcctgttgg

SEQ ID NO: 4952884 - DNA, 25 bp, Homo sapien
tgttggctcatgctccagaacagac

SEQ ID NO: 4952885 - DNA, 25 bp, Homo sapien
gcttgaggcgttgtgcatggcacct

SEQ ID NO: 4952886 - DNA, 25 bp, Homo sapien
tgtgcagaaccatcggagaatcccc

SEQ ID NO: 4952887 - DNA, 25 bp, Homo sapien
cataaggtcaatacatggcagagct

SEQ ID NO: 4952888 - DNA, 25 bp, Homo sapien
tacccagaatatgccaggtgatgca

SEQ ID NO: 4952889 - DNA, 25 bp, Homo sapien
gcggagccttagcagacacaagact

SEQ ID NO: 4952890 - DNA, 25 bp, Homo sapien
ggaaagtaacttgcctggtgccata

SEQ ID NO: 4952891 - DNA, 25 bp, Homo sapien
agccttgtcaaagggcggaactggt

SEQ ID NO: 4952892 - DNA, 25 bp, Homo sapien
ggcggaactggtccctcagctcagt

SEQ ID NO: 4952893 - DNA, 25 bp, Homo sapien
ctgaagccttgtcaaagggcggaac

SEQ ID NO: 4952894 - DNA, 25 bp, Homo sapien
tgtccattccaagggtcacacggcc

SEQ ID NO: 4952895 - DNA, 25 bp, Homo sapien
agggcagggtctcggcgctgttctt

SEQ ID NO: 4952896 - DNA, 25 bp, Homo sapien
caggaggcgcagcatgttgacgtct

SEQ ID NO: 4952897 - DNA, 25 bp, Homo sapien
tgacgtctgcatattcatacatcat

SEQ ID NO: 4952898 - DNA, 25 bp, Homo sapien
tgtagcaccagttggggcgcgctct

SEQ ID NO: 4952899 - DNA, 25 bp, Homo sapien
agcccagtagaagcgtcgctggtgt

SEQ ID NO: 4952900 - DNA, 25 bp, Homo sapien
gtagaagcgtcgctggtgttccttc

SEQ ID NO: 4952901 - DNA, 25 bp, Homo sapien
ggctctgaatccccaggtacatggt

SEQ ID NO: 4952902 - DNA, 25 bp, Homo sapien
cccagtagaagcgtcgctggtgttc

SEQ ID NO: 4952903 - DNA, 25 bp, Homo sapien
cagtgggagagaaccacatgcctgt

SEQ ID NO: 4952904 - DNA, 25 bp, Homo sapien
tgggagagaaccacatgcctgtcct

SEQ ID NO: 4952905 - DNA, 25 bp, Homo sapien
acaggaaccgtaaactgggtgccag

SEQ ID NO: 4952906 - DNA, 25 bp, Homo sapien
ccgtaaactgggtgccagcggcagt

SEQ ID NO: 4952907 - DNA, 25 bp, Homo sapien
gatctaaggagctgccaagaaacaa

SEQ ID NO: 4952908 - DNA, 25 bp, Homo sapien
gctgccaagaaacaacgaggcagat

SEQ ID NO: 4952909 - DNA, 25 bp, Homo sapien
ctaaggagctgccaagaaacaacga

SEQ ID NO: 4952910 - DNA, 25 bp, Homo sapien
ggagctgccaagaaacaacgaggca

SEQ ID NO: 4952911 - DNA, 25 bp, Homo sapien
cctcttctgccagggcgcggagtgc

SEQ ID NO: 4952912 - DNA, 25 bp, Homo sapien
cttctgccagggcgcggagtgcaag

SEQ ID NO: 4952913 - DNA, 25 bp, Homo sapien
tcttctgccagggcgcggagtgcaa

SEQ ID NO: 4952914 - DNA, 25 bp, Homo sapien
ctcttctgccagggcgcggagtgca

SEQ ID NO: 4952915 - DNA, 25 bp, Homo sapien
ggacttgctcccaaagtcggtgtca

SEQ ID NO: 4952916 - DNA, 25 bp, Homo sapien
ggtgtcacctcctgtcacgccatat

SEQ ID NO: 4952917 - DNA, 25 bp, Homo sapien
agcaacgccacgtgtcctcatggag

SEQ ID NO: 4952918 - DNA, 25 bp, Homo sapien
taccgcaccgttctccaggaaggta

SEQ ID NO: 4952919 - DNA, 25 bp, Homo sapien
ggacacaaacaacctgtacgcgaca

SEQ ID NO: 4952920 - DNA, 25 bp, Homo sapien
ccagatatcgatcagaagggcagcc

SEQ ID NO: 4952921 - DNA, 25 bp, Homo sapien
ccatatgtggtaggtgctgtgaccc

SEQ ID NO: 4952922 - DNA, 25 bp, Homo sapien
catcccctttgcaataggccggcgg

SEQ ID NO: 4952923 - DNA, 25 bp, Homo sapien
cctttaggagaacagcggatgtcaa

SEQ ID NO: 4952924 - DNA, 25 bp, Homo sapien
gtcaggagtctacagccctcatggg

SEQ ID NO: 4952925 - DNA, 25 bp, Homo sapien
tccgagagtgccagcatcatcattg

SEQ ID NO: 4952926 - DNA, 25 bp, Homo sapien
tccaggagtcaggagtctacagccc

SEQ ID NO: 4952927 - DNA, 25 bp, Homo sapien
ggccgtggtgctgaaaagcctgctc

SEQ ID NO: 4952928 - DNA, 25 bp, Homo sapien
agcctgctctggtcccaaagggagc

SEQ ID NO: 4952929 - DNA, 25 bp, Homo sapien
ggagctgtccatggtcacaacccat

SEQ ID NO: 4952930 - DNA, 25 bp, Homo sapien
gggctggggtactggccgtggtgct

SEQ ID NO: 4952931 - DNA, 25 bp, Homo sapien
aatactgcccatggtgctgaaaagc

SEQ ID NO: 4952932 - DNA, 25 bp, Homo sapien
cacaccggcagtagttggagaagaa

SEQ ID NO: 4952933 - DNA, 25 bp, Homo sapien
gattttaagactgtggaactgctgg

SEQ ID NO: 4952934 - DNA, 25 bp, Homo sapien
tgttatttccacaccggcagtagtt

SEQ ID NO: 4952935 - DNA, 25 bp, Homo sapien
atgttggtcagtctagtgttgaact

SEQ ID NO: 4952936 - DNA, 25 bp, Homo sapien
ccatgttggtcagtctagtgttgaa

SEQ ID NO: 4952937 - DNA, 25 bp, Homo sapien
catgttggtcagtctagtgttgaac

SEQ ID NO: 4952938 - DNA, 25 bp, Homo sapien
accatgttggtcagtctagtgttga

SEQ ID NO: 4952939 - DNA, 25 bp, Homo sapien
cacatccgcagtaggtgagagtagg

SEQ ID NO: 4952940 - DNA, 25 bp, Homo sapien
tgtttttttcacatccgcagtaggt

SEQ ID NO: 4952941 - DNA, 25 bp, Homo sapien
ttcacatccgcagtaggtgagagta

SEQ ID NO: 4952942 - DNA, 25 bp, Homo sapien
ttttcacatccgcagtaggtgagag

SEQ ID NO: 4952943 - DNA, 25 bp, Homo sapien
ctggtgtcaaaagctctggcgggcc

SEQ ID NO: 4952944 - DNA, 25 bp, Homo sapien
tctgccgctgctgacaatatcttgt

SEQ ID NO: 4952945 - DNA, 25 bp, Homo sapien
gcttgcaacttatactggcccatga

SEQ ID NO: 4952946 - DNA, 25 bp, Homo sapien
tagttgaatcagacgaatggcttgc

SEQ ID NO: 4952947 - DNA, 25 bp, Homo sapien
gcccgcgtgcagcagtacacagtgt

SEQ ID NO: 4952948 - DNA, 25 bp, Homo sapien
gaggcccgcgtgcagcagtacacag

SEQ ID NO: 4952949 - DNA, 25 bp, Homo sapien
ggcccgcgtgcagcagtacacagtg

SEQ ID NO: 4952950 - DNA, 25 bp, Homo sapien
gggaggcccgcgtgcagcagtacac

SEQ ID NO: 4952951 - DNA, 25 bp, Homo sapien
gcagactctgatgtgccgaacaaaa

SEQ ID NO: 4952952 - DNA, 25 bp, Homo sapien
catttcctagactgagctggccctg

SEQ ID NO: 4952953 - DNA, 25 bp, Homo sapien
cactgagtcagctggcggtgagaaa

SEQ ID NO: 4952954 - DNA, 25 bp, Homo sapien
cagcgctccaaggtatctgtcgagg

SEQ ID NO: 4952955 - DNA, 25 bp, Homo sapien
ctgatgactatcttgggccagtggc

SEQ ID NO: 4952956 - DNA, 25 bp, Homo sapien
tctcaccaccatgctacaaagtagg

SEQ ID NO: 4952957 - DNA, 25 bp, Homo sapien
taggcttcagcaactcacttgagct

SEQ ID NO: 4952958 - DNA, 25 bp, Homo sapien
tattggccaatgcagatctagagca

SEQ ID NO: 4952959 - DNA, 25 bp, Homo sapien
ggatcaccgccagcatcagcagcat

SEQ ID NO: 4952960 - DNA, 25 bp, Homo sapien
catcgggatcaccgccagcatcagc

SEQ ID NO: 4952961 - DNA, 25 bp, Homo sapien
tcgggatcaccgccagcatcagcag

SEQ ID NO: 4952962 - DNA, 25 bp, Homo sapien
gggatcaccgccagcatcagcagca

SEQ ID NO: 4952963 - DNA, 25 bp, Homo sapien
cacaacagcgcgagtgtacttaatg

SEQ ID NO: 4952964 - DNA, 25 bp, Homo sapien
tcatgggcttcacgagtaggatggt

SEQ ID NO: 4952965 - DNA, 25 bp, Homo sapien
catctgtgaggtccctagaacagcc

SEQ ID NO: 4952966 - DNA, 25 bp, Homo sapien
gatggtgattccactactgtgtaca

SEQ ID NO: 4952967 - DNA, 25 bp, Homo sapien
tagccctctgttcctgagaattccc

SEQ ID NO: 4952968 - DNA, 25 bp, Homo sapien
ctagccctctgttcctgagaattcc

SEQ ID NO: 4952969 - DNA, 25 bp, Homo sapien
cgtggacgacgtcccgactcctcct

SEQ ID NO: 4952970 - DNA, 25 bp, Homo sapien
atgccccataggaggccgtggacga

SEQ ID NO: 4952971 - DNA, 25 bp, Homo sapien
cctctaggagcgctagatgagagag

SEQ ID NO: 4952972 - DNA, 25 bp, Homo sapien
cttccggaggcgtcctgctgcgctc

SEQ ID NO: 4952973 - DNA, 25 bp, Homo sapien
cccataaaggcacctctggctgtct

SEQ ID NO: 4952974 - DNA, 25 bp, Homo sapien
taaaggcacctctggctgtctgacc

SEQ ID NO: 4952975 - DNA, 25 bp, Homo sapien
cggaactggggaagggcaggtcact

SEQ ID NO: 4952976 - DNA, 25 bp, Homo sapien
cactggggccactgcgttctggaag

SEQ ID NO: 4952977 - DNA, 25 bp, Homo sapien
gcctgtccaatctgcgtacaaggtg

SEQ ID NO: 4952978 - DNA, 25 bp, Homo sapien
caatctgcgtacaaggtgcagccat

SEQ ID NO: 4952979 - DNA, 25 bp, Homo sapien
cacgtctgacgccttgtccttggct

SEQ ID NO: 4952980 - DNA, 25 bp, Homo sapien
ttggctgcctgtccaatctgcgtac

SEQ ID NO: 4952981 - DNA, 25 bp, Homo sapien
cgacccaatcgaagcacaaaacatt

SEQ ID NO: 4952982 - DNA, 25 bp, Homo sapien
ccttactcaaaagccgttcttgatg

SEQ ID NO: 4952983 - DNA, 25 bp, Homo sapien
ttgatgccccgacccaatcgaagca

SEQ ID NO: 4952984 - DNA, 25 bp, Homo sapien
atcttgaagcacagcccaaatcaca

SEQ ID NO: 4952985 - DNA, 25 bp, Homo sapien
cttcccgtacacaaaggagctcgca

SEQ ID NO: 4952986 - DNA, 25 bp, Homo sapien
ttacacttcccgtacacaaaggagc

SEQ ID NO: 4952987 - DNA, 25 bp, Homo sapien
cacttcccgtacacaaaggagctcg

SEQ ID NO: 4952988 - DNA, 25 bp, Homo sapien
tcccgtacacaaaggagctcgcagt

SEQ ID NO: 4952989 - DNA, 25 bp, Homo sapien
gacataaacagctacgtacttacag

SEQ ID NO: 4952990 - DNA, 25 bp, Homo sapien
catgcattggctagaagtgaaggac

SEQ ID NO: 4952991 - DNA, 25 bp, Homo sapien
tccagacgtcgtactgaaattcccc

SEQ ID NO: 4952992 - DNA, 25 bp, Homo sapien
tcttgaatcctcacatggaatgcca

SEQ ID NO: 4952993 - DNA, 25 bp, Homo sapien
atttgctgttcgtcaaatctcccca

SEQ ID NO: 4952994 - DNA, 25 bp, Homo sapien
tttgctgttcgtcaaatctccccat

SEQ ID NO: 4952995 - DNA, 25 bp, Homo sapien
ctgcatcgtgcgagatgggtctgca

SEQ ID NO: 4952996 - DNA, 25 bp, Homo sapien
ctacgggtgtctgcacacagtggtc

SEQ ID NO: 4952997 - DNA, 25 bp, Homo sapien
ccccagcactgagggatatgtgggc

SEQ ID NO: 4952998 - DNA, 25 bp, Homo sapien
gatatgtgggccgttgtcacctcac

SEQ ID NO: 4952999 - DNA, 25 bp, Homo sapien
ttgtggccctagagttggagactga

SEQ ID NO: 4953000 - DNA, 25 bp, Homo sapien
ctttgtggccctagagttggagact

SEQ ID NO: 4953001 - DNA, 25 bp, Homo sapien
ctctttgtggccctagagttggaga

SEQ ID NO: 4953002 - DNA, 25 bp, Homo sapien
ctgctctttgtggccctagagttgg

SEQ ID NO: 4953003 - DNA, 25 bp, Homo sapien
tgaggtcactggtgaatccttgagt

SEQ ID NO: 4953004 - DNA, 25 bp, Homo sapien
gaccccacgtgaggcaaggcttctt

SEQ ID NO: 4953005 - DNA, 25 bp, Homo sapien
tgctgaccccacgtgaggcaaggct

SEQ ID NO: 4953006 - DNA, 25 bp, Homo sapien
gaggtcactggtgaatccttgagtc

SEQ ID NO: 4953007 - DNA, 25 bp, Homo sapien
cagtggaatttccactgtttccctg

SEQ ID NO: 4953008 - DNA, 25 bp, Homo sapien
agtggaatttccactgtttccctgg

SEQ ID NO: 4953009 - DNA, 25 bp, Homo sapien
tcagtggaatttccactgtttccct

SEQ ID NO: 4953010 - DNA, 25 bp, Homo sapien
tggaatttccactgtttccctggtg

SEQ ID NO: 4953011 - DNA, 25 bp, Homo sapien
aaaatggtccttgcccctcgaggtg

SEQ ID NO: 4953012 - DNA, 25 bp, Homo sapien
cagtgggtggttcacggttctgttc

SEQ ID NO: 4953013 - DNA, 25 bp, Homo sapien
cctcgaggtgggactggatgccaac

SEQ ID NO: 4953014 - DNA, 25 bp, Homo sapien
caaccagcccgacaggcagtgggtg

SEQ ID NO: 4953015 - DNA, 25 bp, Homo sapien
acatagaaaaggtggtcctctcctg

SEQ ID NO: 4953016 - DNA, 25 bp, Homo sapien
ctctgtacatagaaaaggtggtcct

SEQ ID NO: 4953017 - DNA, 25 bp, Homo sapien
tctgtacatagaaaaggtggtcctc

SEQ ID NO: 4953018 - DNA, 25 bp, Homo sapien
tgtacatagaaaaggtggtcctctc

SEQ ID NO: 4953019 - DNA, 25 bp, Homo sapien
gaagcccagctccactctttaccat

SEQ ID NO: 4953020 - DNA, 25 bp, Homo sapien
tcagaccgtcagcatggccctggga

SEQ ID NO: 4953021 - DNA, 25 bp, Homo sapien
ctcctcataccccagctcgaagcca

SEQ ID NO: 4953022 - DNA, 25 bp, Homo sapien
ataccccagctcgaagccactgccg

SEQ ID NO: 4953023 - DNA, 25 bp, Homo sapien
acagcaacggtctggttccaccagt

SEQ ID NO: 4953024 - DNA, 25 bp, Homo sapien
tcatcagcctcacaccttgtcattt

SEQ ID NO: 4953025 - DNA, 25 bp, Homo sapien
cagcctcacaccttgtcattttatc

SEQ ID NO: 4953026 - DNA, 25 bp, Homo sapien
aaccagtcagtccgcctcatcttac

SEQ ID NO: 4953027 - DNA, 25 bp, Homo sapien
tccaaccagtcagtccgcctcatct

SEQ ID NO: 4953028 - DNA, 25 bp, Homo sapien
catccaaccagtcagtccgcctcat

SEQ ID NO: 4953029 - DNA, 25 bp, Homo sapien
caaccagtcagtccgcctcatctta

SEQ ID NO: 4953030 - DNA, 25 bp, Homo sapien
aactggcccaggacccccgctgagg

SEQ ID NO: 4953031 - DNA, 25 bp, Homo sapien
gacctggagcaactggcccaggacc

SEQ ID NO: 4953032 - DNA, 25 bp, Homo sapien
aaggagacctggagcaactggccca

SEQ ID NO: 4953033 - DNA, 25 bp, Homo sapien
ccatgagggccaaggagacctggag

SEQ ID NO: 4953034 - DNA, 25 bp, Homo sapien
gccttccacctaatgggacacggag

SEQ ID NO: 4953035 - DNA, 25 bp, Homo sapien
gaatagaatttatgacttccaccta

SEQ ID NO: 4953036 - DNA, 25 bp, Homo sapien
tccactcattgtgtttagtacgcaa

SEQ ID NO: 4953037 - DNA, 25 bp, Homo sapien
gatttagtctacaaactatcgtgag

SEQ ID NO: 4953038 - DNA, 25 bp, Homo sapien
ttaaggccccatctagaaacgctct

SEQ ID NO: 4953039 - DNA, 25 bp, Homo sapien
ggatgtggctcaccctttaaggccc

SEQ ID NO: 4953040 - DNA, 25 bp, Homo sapien
taagcacccttgcatttgaccctgc

SEQ ID NO: 4953041 - DNA, 25 bp, Homo sapien
taaataatgtcacggatgccatctg

SEQ ID NO: 4953042 - DNA, 25 bp, Homo sapien
gatggtgacggctgtccttttaacc

SEQ ID NO: 4953043 - DNA, 25 bp, Homo sapien
aaagttatccacatcgcttcttggc

SEQ ID NO: 4953044 - DNA, 25 bp, Homo sapien
gaaaagtgatcagcaaggtagtgta

SEQ ID NO: 4953045 - DNA, 25 bp, Homo sapien
gaagtctgttcgagagatttccaga

SEQ ID NO: 4953046 - DNA, 25 bp, Homo sapien
gatttagatcatcgtattgatacga

SEQ ID NO: 4953047 - DNA, 25 bp, Homo sapien
ctgccctccgctggtcattcaggaa

SEQ ID NO: 4953048 - DNA, 25 bp, Homo sapien
tgctcaagcgcccttgatcttggct

SEQ ID NO: 4953049 - DNA, 25 bp, Homo sapien
tcccactgatgactgggtagaaaag

SEQ ID NO: 4953050 - DNA, 25 bp, Homo sapien
gcagcttctgcgaatacttatacat

SEQ ID NO: 4953051 - DNA, 25 bp, Homo sapien
atttggacaaagttggctccaggca

SEQ ID NO: 4953052 - DNA, 25 bp, Homo sapien
ttacagccaaaagatcagcaactct

SEQ ID NO: 4953053 - DNA, 25 bp, Homo sapien
gctccaggcaccgaaaagcttgata

SEQ ID NO: 4953054 - DNA, 25 bp, Homo sapien
caaaatcttattgacgtgaccacct

SEQ ID NO: 4953055 - DNA, 25 bp, Homo sapien
atcgggtcttcccatgcctgaggca

SEQ ID NO: 4953056 - DNA, 25 bp, Homo sapien
tcagaactccagaagccagcgagct

SEQ ID NO: 4953057 - DNA, 25 bp, Homo sapien
tacatacctggatagtcaatgaggg

SEQ ID NO: 4953058 - DNA, 25 bp, Homo sapien
gatgtaacaggtggagaatcccaga

SEQ ID NO: 4953059 - DNA, 25 bp, Homo sapien
gacgttaactttcaggccaagtgga

SEQ ID NO: 4953060 - DNA, 25 bp, Homo sapien
taggttcatccgcaacagacaggaa

SEQ ID NO: 4953061 - DNA, 25 bp, Homo sapien
tcatgtacaaagagcaatgctgcct

SEQ ID NO: 4953062 - DNA, 25 bp, Homo sapien
tccagtcactactacaatttgaagt

SEQ ID NO: 4953063 - DNA, 25 bp, Homo sapien
aatttgaagtacacatgttacgctg

SEQ ID NO: 4953064 - DNA, 25 bp, Homo sapien
tgttacgctgtaaatctgatacccc

SEQ ID NO: 4953065 - DNA, 25 bp, Homo sapien
ggaattatctgtgaatcttgaccat

SEQ ID NO: 4953066 - DNA, 25 bp, Homo sapien
tagggtgggctatccaacatcagaa

SEQ ID NO: 4953067 - DNA, 25 bp, Homo sapien
tgggcgcgagaacagagtcagatca

SEQ ID NO: 4953068 - DNA, 25 bp, Homo sapien
gatctgatgctccattccaaggcga

SEQ ID NO: 4953069 - DNA, 25 bp, Homo sapien
cgtggaaaagcaatgagcgaccttc

SEQ ID NO: 4953070 - DNA, 25 bp, Homo sapien
ctaattttgcactaattcattcagc

SEQ ID NO: 4953071 - DNA, 25 bp, Homo sapien
tttcctggagattaaagtttctgtc

SEQ ID NO: 4953072 - DNA, 25 bp, Homo sapien
tcattcagccaataatagaaggagg

SEQ ID NO: 4953073 - DNA, 25 bp, Homo sapien
cattcacactgtctacccttttggc

SEQ ID NO: 4953074 - DNA, 25 bp, Homo sapien
tagggatccaagattctgaacatgc

SEQ ID NO: 4953075 - DNA, 25 bp, Homo sapien
tactgcctttaggagtgtcacttga

SEQ ID NO: 4953076 - DNA, 25 bp, Homo sapien
tactgatagctgataatgagagaca

SEQ ID NO: 4953077 - DNA, 25 bp, Homo sapien
gagacatgcatgtcaacccagaagt

SEQ ID NO: 4953078 - DNA, 25 bp, Homo sapien
cacatcaggagatatggtcaaacaa

SEQ ID NO: 4953079 - DNA, 25 bp, Homo sapien
gaagcagaaattattaagagcccac

SEQ ID NO: 4953080 - DNA, 25 bp, Homo sapien
taaagaccatgctacttagaccagc

SEQ ID NO: 4953081 - DNA, 25 bp, Homo sapien
tagtcgagtaatagcggttacagtc

SEQ ID NO: 4953082 - DNA, 25 bp, Homo sapien
tatttaaaaggacatggtccatcag

SEQ ID NO: 4953083 - DNA, 25 bp, Homo sapien
tagcttagtgtgaatctgaactcca

SEQ ID NO: 4953084 - DNA, 25 bp, Homo sapien
aatgactgcacaatttaggctaaac

SEQ ID NO: 4953085 - DNA, 25 bp, Homo sapien
catagtaactgccttataagctcca

SEQ ID NO: 4953086 - DNA, 25 bp, Homo sapien
tggtttcaggacgaggcgatcgctc

SEQ ID NO: 4953087 - DNA, 25 bp, Homo sapien
gcgatcgctcaccttctagtcagaa

SEQ ID NO: 4953088 - DNA, 25 bp, Homo sapien
gcacagacacggaaacacatgaagg

SEQ ID NO: 4953089 - DNA, 25 bp, Homo sapien
ctttgccatttaccatgcgggctga

SEQ ID NO: 4953090 - DNA, 25 bp, Homo sapien
tagccgctgggtatcgtaacaactg

SEQ ID NO: 4953091 - DNA, 25 bp, Homo sapien
tgctaaaccgtaacaatagcctggc

SEQ ID NO: 4953092 - DNA, 25 bp, Homo sapien
cctattttgaatggagtggtgcccg

SEQ ID NO: 4953093 - DNA, 25 bp, Homo sapien
ggttccaatagcagtactcgtacaa

SEQ ID NO: 4953094 - DNA, 25 bp, Homo sapien
ttttggccctcacaggcccctccac

SEQ ID NO: 4953095 - DNA, 25 bp, Homo sapien
attttggccctcacaggcccctcca

SEQ ID NO: 4953096 - DNA, 25 bp, Homo sapien
ctagattttggccctcacaggcccc

SEQ ID NO: 4953097 - DNA, 25 bp, Homo sapien
agattttggccctcacaggcccctc

SEQ ID NO: 4953098 - DNA, 25 bp, Homo sapien
tctacttcatattggacaggcaact

SEQ ID NO: 4953099 - DNA, 25 bp, Homo sapien
cacattgaacaaggatatgccccac

SEQ ID NO: 4953100 - DNA, 25 bp, Homo sapien
cataatggatatacacgaggattaa

SEQ ID NO: 4953101 - DNA, 25 bp, Homo sapien
tatgttgacaaatactgtaatccag

SEQ ID NO: 4953102 - DNA, 25 bp, Homo sapien
ccctccctcatgatgttcttggctt

SEQ ID NO: 4953103 - DNA, 25 bp, Homo sapien
ttcttggcttgccacctcatcgcag

SEQ ID NO: 4953104 - DNA, 25 bp, Homo sapien
ctcatcgcagcagaggatcggctcc

SEQ ID NO: 4953105 - DNA, 25 bp, Homo sapien
ggctccagtgctacctgctcagagg

SEQ ID NO: 4953106 - DNA, 25 bp, Homo sapien
ccaggatgtggctaagtttctaccc

SEQ ID NO: 4953107 - DNA, 25 bp, Homo sapien
agatcatcaataacccactcagcgg

SEQ ID NO: 4953108 - DNA, 25 bp, Homo sapien
gggccaactcgatgtgaacacagta

SEQ ID NO: 4953109 - DNA, 25 bp, Homo sapien
aaaagacggctccattatctccagg

SEQ ID NO: 4953110 - DNA, 25 bp, Homo sapien
agattgagaccatcctggctaacac

SEQ ID NO: 4953111 - DNA, 25 bp, Homo sapien
tgaggcaggtgaatcatgagctcag

SEQ ID NO: 4953112 - DNA, 25 bp, Homo sapien
aggtgaatcatgagctcaggagatt

SEQ ID NO: 4953113 - DNA, 25 bp, Homo sapien
ttgagaccatcctggctaacacggt

SEQ ID NO: 4953114 - DNA, 25 bp, Homo sapien
cctgctaaggaccaagctgaggacc

SEQ ID NO: 4953115 - DNA, 25 bp, Homo sapien
tgctgctcttcctgcaagaggggcc

SEQ ID NO: 4953116 - DNA, 25 bp, Homo sapien
aggaccggaggcgaggcaaccgctg

SEQ ID NO: 4953117 - DNA, 25 bp, Homo sapien
gctaaggaccaagctgaggaccgga

SEQ ID NO: 4953118 - DNA, 25 bp, Homo sapien
gaccctcagaatgtttagtcccaag

SEQ ID NO: 4953119 - DNA, 25 bp, Homo sapien
tgcaaacaccaagtaagtctgctct

SEQ ID NO: 4953120 - DNA, 25 bp, Homo sapien
caaagcctctcataaaacgtccagg

SEQ ID NO: 4953121 - DNA, 25 bp, Homo sapien
caacaaaaccgatgctctcccgtgt

SEQ ID NO: 4953122 - DNA, 25 bp, Homo sapien
tctagaattgtagtcacctgccgaa

SEQ ID NO: 4953123 - DNA, 25 bp, Homo sapien
gcagggccatgtcacttaaggaaaa

SEQ ID NO: 4953124 - DNA, 25 bp, Homo sapien
ttctcagctttgcaacgcagggcca

SEQ ID NO: 4953125 - DNA, 25 bp, Homo sapien
gatataaaccaaagggacccagatg

SEQ ID NO: 4953126 - DNA, 25 bp, Homo sapien
tttcacttaggaggccccttgtggc

SEQ ID NO: 4953127 - DNA, 25 bp, Homo sapien
cagcttctagggaccacatatattc

SEQ ID NO: 4953128 - DNA, 25 bp, Homo sapien
ccttcaaagctagtggtgtaacacc

SEQ ID NO: 4953129 - DNA, 25 bp, Homo sapien
tctagagaagaatccactccctggc

SEQ ID NO: 4953130 - DNA, 25 bp, Homo sapien
tacaaagctcaagtgtcaatctgaa

SEQ ID NO: 4953131 - DNA, 25 bp, Homo sapien
gatctgacaataaagcgctgaaatt

SEQ ID NO: 4953132 - DNA, 25 bp, Homo sapien
gctgcttgatatataacaggagatg

SEQ ID NO: 4953133 - DNA, 25 bp, Homo sapien
aaacgctatctgaggtacaaagctc

SEQ ID NO: 4953134 - DNA, 25 bp, Homo sapien
agaagtacgacagatgccacacagg

SEQ ID NO: 4953135 - DNA, 25 bp, Homo sapien
tgtaaaaggccactcaggagctggt

SEQ ID NO: 4953136 - DNA, 25 bp, Homo sapien
tcttccatcacaagccaagggatat

SEQ ID NO: 4953137 - DNA, 25 bp, Homo sapien
tagagtaacgtgctatacaggcttg

SEQ ID NO: 4953138 - DNA, 25 bp, Homo sapien
gaggaattgaaacctaaacgcacat

SEQ ID NO: 4953139 - DNA, 25 bp, Homo sapien
aaaaaatcttccaatggagatgcca

SEQ ID NO: 4953140 - DNA, 25 bp, Homo sapien
tacaagcatacaagggagagggtgt

SEQ ID NO: 4953141 - DNA, 25 bp, Homo sapien
gagtttcaagttgtactgcaaagca

SEQ ID NO: 4953142 - DNA, 25 bp, Homo sapien
gaacaatacccttaagatctgcctc

SEQ ID NO: 4953143 - DNA, 25 bp, Homo sapien
gtgaacaatacccttaagatctgcc

SEQ ID NO: 4953144 - DNA, 25 bp, Homo sapien
tgaacaatacccttaagatctgcct

SEQ ID NO: 4953145 - DNA, 25 bp, Homo sapien
cacagtgtgtgttactgttgtccat

SEQ ID NO: 4953146 - DNA, 25 bp, Homo sapien
ggtacaaccgtttatgaaggctatc

SEQ ID NO: 4953147 - DNA, 25 bp, Homo sapien
gaaggctatctgaatacacacacgc

SEQ ID NO: 4953148 - DNA, 25 bp, Homo sapien
ggcattgactactccaagtggaaac

SEQ ID NO: 4953149 - DNA, 25 bp, Homo sapien
tatcccaatgccttaagggcgtgga

SEQ ID NO: 4953150 - DNA, 25 bp, Homo sapien
ccagaaatgtctactaaagcagtgc

SEQ ID NO: 4953151 - DNA, 25 bp, Homo sapien
ccagagcatatgtggttaaccttgc

SEQ ID NO: 4953152 - DNA, 25 bp, Homo sapien
cagccgacacggaagtcttatctga

SEQ ID NO: 4953153 - DNA, 25 bp, Homo sapien
tagtagtgttgacccttaagaggaa

SEQ ID NO: 4953154 - DNA, 25 bp, Homo sapien
gaagaagctactcccctgaaatagg

SEQ ID NO: 4953155 - DNA, 25 bp, Homo sapien
tacactaacctaggagacggccagg

SEQ ID NO: 4953156 - DNA, 25 bp, Homo sapien
ggctctgaatcgaatcctgctccgg

SEQ ID NO: 4953157 - DNA, 25 bp, Homo sapien
caatgtggagcacaagcagcggaga

SEQ ID NO: 4953158 - DNA, 25 bp, Homo sapien
tgttagcagatgataagactctccc

SEQ ID NO: 4953159 - DNA, 25 bp, Homo sapien
tctacctcggaagacatcagagcag

SEQ ID NO: 4953160 - DNA, 25 bp, Homo sapien
ctgtaggtacccaaactgctagtga

SEQ ID NO: 4953161 - DNA, 25 bp, Homo sapien
ttgatcacagtaaacccaccaggct

SEQ ID NO: 4953162 - DNA, 25 bp, Homo sapien
tcctgccatttgtgactacatacac

SEQ ID NO: 4953163 - DNA, 25 bp, Homo sapien
tacatacacagacctggagggcatt

SEQ ID NO: 4953164 - DNA, 25 bp, Homo sapien
actcctgcctgtgtagagtgagacc

SEQ ID NO: 4953165 - DNA, 25 bp, Homo sapien
aaataatctcaatgtccattgtcag

SEQ ID NO: 4953166 - DNA, 25 bp, Homo sapien
ccttatctacgccagtcaaggttga

SEQ ID NO: 4953167 - DNA, 25 bp, Homo sapien
tcttagggcctgaatgctaaggaca

SEQ ID NO: 4953168 - DNA, 25 bp, Homo sapien
gctaagcgaatatactgagtgggat

SEQ ID NO: 4953169 - DNA, 25 bp, Homo sapien
gaaacattcagaagaccctcagccc

SEQ ID NO: 4953170 - DNA, 25 bp, Homo sapien
caaaaagctcacaaaatccaccaaa

SEQ ID NO: 4953171 - DNA, 25 bp, Homo sapien
agctcacaaaatccaccaaatctgc

SEQ ID NO: 4953172 - DNA, 25 bp, Homo sapien
caaaatccaccaaatctgcatacac

SEQ ID NO: 4953173 - DNA, 25 bp, Homo sapien
aaaatccaccaaatctgcatacacc

SEQ ID NO: 4953174 - DNA, 25 bp, Homo sapien
ggtcatttcaggatgcgtgttcaca

SEQ ID NO: 4953175 - DNA, 25 bp, Homo sapien
actgtgagagataaagggccgttgc

SEQ ID NO: 4953176 - DNA, 25 bp, Homo sapien
gcctcaaggtgtcatgaagatcaca

SEQ ID NO: 4953177 - DNA, 25 bp, Homo sapien
aaatcccaaaatgtggcctcaaggt

SEQ ID NO: 4953178 - DNA, 25 bp, Homo sapien
tctggagcatgctttatacaatgcc

SEQ ID NO: 4953179 - DNA, 25 bp, Homo sapien
tcaggaataagggtttaaacacagc

SEQ ID NO: 4953180 - DNA, 25 bp, Homo sapien
gccaagtgggctcatgaagcggaaa

SEQ ID NO: 4953181 - DNA, 25 bp, Homo sapien
cttgaaaagaggtcctaagatctgt

SEQ ID NO: 4953182 - DNA, 25 bp, Homo sapien
cagctgactgttagaaacttcaagg

SEQ ID NO: 4953183 - DNA, 25 bp, Homo sapien
agacccctggtacagtctcaactgg

SEQ ID NO: 4953184 - DNA, 25 bp, Homo sapien
cacttttgtagatacgggaattcac

SEQ ID NO: 4953185 - DNA, 25 bp, Homo sapien
taacacttggaactaactgaacagg

SEQ ID NO: 4953186 - DNA, 25 bp, Homo sapien
ctgaggatgtcgaagccaccaccag

SEQ ID NO: 4953187 - DNA, 25 bp, Homo sapien
tcctttctctgactgaatgctgagg

SEQ ID NO: 4953188 - DNA, 25 bp, Homo sapien
taccaccccacgacaaacaatactg

SEQ ID NO: 4953189 - DNA, 25 bp, Homo sapien
tgaatgctgaggtgttgagccctga

SEQ ID NO: 4953190 - DNA, 25 bp, Homo sapien
aaggttctcggattttctcaccatc

SEQ ID NO: 4953191 - DNA, 25 bp, Homo sapien
ttacaaggttctcggattttctcac

SEQ ID NO: 4953192 - DNA, 25 bp, Homo sapien
gcttctccgttacaaggttctcgga

SEQ ID NO: 4953193 - DNA, 25 bp, Homo sapien
ccctgagcttctccgttacaaggtt

SEQ ID NO: 4953194 - DNA, 25 bp, Homo sapien
tcactggcaagcttcccaagccatg

SEQ ID NO: 4953195 - DNA, 25 bp, Homo sapien
actggcaagcttcccaagccatggg

SEQ ID NO: 4953196 - DNA, 25 bp, Homo sapien
cactggcaagcttcccaagccatgg

SEQ ID NO: 4953197 - DNA, 25 bp, Homo sapien
tggaaatactatgctgcatccccag

SEQ ID NO: 4953198 - DNA, 25 bp, Homo sapien
cactgcattgcataagcctgactag

SEQ ID NO: 4953199 - DNA, 25 bp, Homo sapien
tgacttctagtaagcacctgcctgc

SEQ ID NO: 4953200 - DNA, 25 bp, Homo sapien
tggcaacatcagagacacagtttct

SEQ ID NO: 4953201 - DNA, 25 bp, Homo sapien
gaaaccaggtgaggcaacttcatgt

SEQ ID NO: 4953202 - DNA, 25 bp, Homo sapien
tccttgatggtaccaaagggtcttg

SEQ ID NO: 4953203 - DNA, 25 bp, Homo sapien
aacttcatgtggttaaatctgctcc

SEQ ID NO: 4953204 - DNA, 25 bp, Homo sapien
tgatggtaccaaagggtcttgccca

SEQ ID NO: 4953205 - DNA, 25 bp, Homo sapien
tgtgtctataatggtaccctggccc

SEQ ID NO: 4953206 - DNA, 25 bp, Homo sapien
gcatacccttgagtacacctgaggt

SEQ ID NO: 4953207 - DNA, 25 bp, Homo sapien
gacactcatgcttccaaggtaaagt

SEQ ID NO: 4953208 - DNA, 25 bp, Homo sapien
ggccaaacttaatggtacccgatca

SEQ ID NO: 4953209 - DNA, 25 bp, Homo sapien
catggctagcaggtattaaaacagc

SEQ ID NO: 4953210 - DNA, 25 bp, Homo sapien
tttcaacgcaaacaacatggctagc

SEQ ID NO: 4953211 - DNA, 25 bp, Homo sapien
ttcaagcaaaaccatctaactggga

SEQ ID NO: 4953212 - DNA, 25 bp, Homo sapien
gacaagcaattgtttgccgaaagat

SEQ ID NO: 4953213 - DNA, 25 bp, Homo sapien
aatccaggagtgctcggaggcggca

SEQ ID NO: 4953214 - DNA, 25 bp, Homo sapien
gcggcagcaagggtttttccacagg

SEQ ID NO: 4953215 - DNA, 25 bp, Homo sapien
ggcggcagcaagggtttttccacag

SEQ ID NO: 4953216 - DNA, 25 bp, Homo sapien
ggcgtggaatccaggagtgctcgga

SEQ ID NO: 4953217 - DNA, 25 bp, Homo sapien
gggaacaaacccgaatgcagcggct

SEQ ID NO: 4953218 - DNA, 25 bp, Homo sapien
agggcgcccgcagctggttacctcg

SEQ ID NO: 4953219 - DNA, 25 bp, Homo sapien
ccgcagctggttacctcgggaggca

SEQ ID NO: 4953220 - DNA, 25 bp, Homo sapien
aaacccgaatgcagcggctggagga

SEQ ID NO: 4953221 - DNA, 25 bp, Homo sapien
cgtgtagtcctgcacgaaccagcgg

SEQ ID NO: 4953222 - DNA, 25 bp, Homo sapien
cccttgcggtagtagtcgagggcca

SEQ ID NO: 4953223 - DNA, 25 bp, Homo sapien
atgaccgactgccagatccacacgg

SEQ ID NO: 4953224 - DNA, 25 bp, Homo sapien
ggtcagcccgaagtagacgtagtcc

SEQ ID NO: 4953225 - DNA, 25 bp, Homo sapien
agcggcagccccagtagcacgagga

SEQ ID NO: 4953226 - DNA, 25 bp, Homo sapien
cccagtagcacgaggaggtgttgca

SEQ ID NO: 4953227 - DNA, 25 bp, Homo sapien
cagtggcagatgtgcatcgagctgc

SEQ ID NO: 4953228 - DNA, 25 bp, Homo sapien
gatgtgcatcgagctgctctcgccg

SEQ ID NO: 4953229 - DNA, 25 bp, Homo sapien
ccacgccaccgccatcggatttcgc

SEQ ID NO: 4953230 - DNA, 25 bp, Homo sapien
ggttgtgcagctgagcgaagcccac

SEQ ID NO: 4953231 - DNA, 25 bp, Homo sapien
acgccaccgccatcggatttcgccg

SEQ ID NO: 4953232 - DNA, 25 bp, Homo sapien
caccgccatcggatttcgccgccat

SEQ ID NO: 4953233 - DNA, 25 bp, Homo sapien
ccaatcgcacggcgcccgcagctcc

SEQ ID NO: 4953234 - DNA, 25 bp, Homo sapien
gggcgagccccccaatcgcacggcg

SEQ ID NO: 4953235 - DNA, 25 bp, Homo sapien
ttccgggcgagccccccaatcgcac

SEQ ID NO: 4953236 - DNA, 25 bp, Homo sapien
gagccccccaatcgcacggcgcccg

SEQ ID NO: 4953237 - DNA, 25 bp, Homo sapien
tgaccccgaaacccatcaggttgac

SEQ ID NO: 4953238 - DNA, 25 bp, Homo sapien
tgacccctcggcgtttcagaatccg

SEQ ID NO: 4953239 - DNA, 25 bp, Homo sapien
cagcgtcgcagctcacagctttcct

SEQ ID NO: 4953240 - DNA, 25 bp, Homo sapien
gagtgaggcggtccaaagtgatccc

SEQ ID NO: 4953241 - DNA, 25 bp, Homo sapien
catatgtgtttagtgttgctggcag

SEQ ID NO: 4953242 - DNA, 25 bp, Homo sapien
ttttgtaaacttattagtgcctctg

SEQ ID NO: 4953243 - DNA, 25 bp, Homo sapien
ctgagacatatgtgtttagtgttgc

SEQ ID NO: 4953244 - DNA, 25 bp, Homo sapien
aaacttattagtgcctctgcacacc

SEQ ID NO: 4953245 - DNA, 25 bp, Homo sapien
ggactcagccacatacattttgttg

SEQ ID NO: 4953246 - DNA, 25 bp, Homo sapien
gaagcgtcttcctagtggactcagc

SEQ ID NO: 4953247 - DNA, 25 bp, Homo sapien
tgcaccttgagcgacaactgtctcc

SEQ ID NO: 4953248 - DNA, 25 bp, Homo sapien
taattcagagaactccatgtggtac

SEQ ID NO: 4953249 - DNA, 25 bp, Homo sapien
cacaaggaccttctatttgatcttc

SEQ ID NO: 4953250 - DNA, 25 bp, Homo sapien
gcttttttccgctgagcttcatgca

SEQ ID NO: 4953251 - DNA, 25 bp, Homo sapien
ccgagcttttttccgctgagcttca

SEQ ID NO: 4953252 - DNA, 25 bp, Homo sapien
catgcacaaggaccttctatttgat

SEQ ID NO: 4953253 - DNA, 25 bp, Homo sapien
tggccgccagcaagtcaagtgactt

SEQ ID NO: 4953254 - DNA, 25 bp, Homo sapien
ttcacagatgcagactgaagtccag

SEQ ID NO: 4953255 - DNA, 25 bp, Homo sapien
ttttggcgaaacgtgggtgtctgac

SEQ ID NO: 4953256 - DNA, 25 bp, Homo sapien
caactcgctgtgcttaggtactaga

SEQ ID NO: 4953257 - DNA, 25 bp, Homo sapien
gattccgtaaggtcacagtcaccgc

SEQ ID NO: 4953258 - DNA, 25 bp, Homo sapien
tcgtaggaacacacatcttctggtc

SEQ ID NO: 4953259 - DNA, 25 bp, Homo sapien
gatactactcaagcggaggaaggca

SEQ ID NO: 4953260 - DNA, 25 bp, Homo sapien
cctacttgccatgtcttcagggcta

SEQ ID NO: 4953261 - DNA, 25 bp, Homo sapien
tgcgacttccgcgtcttccgagttt

SEQ ID NO: 4953262 - DNA, 25 bp, Homo sapien
agacctgctgcttccgcccggagtt

SEQ ID NO: 4953263 - DNA, 25 bp, Homo sapien
gaggaccaacttccggctgcgactt

SEQ ID NO: 4953264 - DNA, 25 bp, Homo sapien
ttccagaggacctagcgaggaccaa

SEQ ID NO: 4953265 - DNA, 25 bp, Homo sapien
tcctaggcctggtgaaccgcgcggt

SEQ ID NO: 4953266 - DNA, 25 bp, Homo sapien
ggagaggcgcttgggcctcgtccag

SEQ ID NO: 4953267 - DNA, 25 bp, Homo sapien
tggccgagtcctaggcctggtgaac

SEQ ID NO: 4953268 - DNA, 25 bp, Homo sapien
tgtttccgctacttccctgcggcgg

SEQ ID NO: 4953269 - DNA, 25 bp, Homo sapien
cggagctgattaagaccccgcgggt

SEQ ID NO: 4953270 - DNA, 25 bp, Homo sapien
agcatggagtttgcggagctgatta

SEQ ID NO: 4953271 - DNA, 25 bp, Homo sapien
cccggcaggacaatacggaggagct

SEQ ID NO: 4953272 - DNA, 25 bp, Homo sapien
gacaatgtggtgctgcaccggcctt

SEQ ID NO: 4953273 - DNA, 25 bp, Homo sapien
catcaaaagtgtggcctagagcagc

SEQ ID NO: 4953274 - DNA, 25 bp, Homo sapien
catacagtagtagaaggacccagag

SEQ ID NO: 4953275 - DNA, 25 bp, Homo sapien
gaattctcataaaggcgcaccctag

SEQ ID NO: 4953276 - DNA, 25 bp, Homo sapien
tctcttcagggtacaatcagcagcc

SEQ ID NO: 4953277 - DNA, 25 bp, Homo sapien
aataaattgtaagctcatcagggag

SEQ ID NO: 4953278 - DNA, 25 bp, Homo sapien
tggccttcagttgctccgcagagtc

SEQ ID NO: 4953279 - DNA, 25 bp, Homo sapien
caaacttcttaacggtcaggtgtgc

SEQ ID NO: 4953280 - DNA, 25 bp, Homo sapien
taacaccaaacctgatgtgaccaga

SEQ ID NO: 4953281 - DNA, 25 bp, Homo sapien
cacagtcagtacagggttcatgatc

SEQ ID NO: 4953282 - DNA, 25 bp, Homo sapien
ggattaagtcctgccatgccggagt

SEQ ID NO: 4953283 - DNA, 25 bp, Homo sapien
taatgccagttgttacgccgtattc

SEQ ID NO: 4953284 - DNA, 25 bp, Homo sapien
gccctttgtggaaacgggtctcaga

SEQ ID NO: 4953285 - DNA, 25 bp, Homo sapien
tctcgtagctctgcgttgtgtgaaa

SEQ ID NO: 4953286 - DNA, 25 bp, Homo sapien
tagcaaaatctatggccacactgag

SEQ ID NO: 4953287 - DNA, 25 bp, Homo sapien
cacagtccacagtctttttgggaaa

SEQ ID NO: 4953288 - DNA, 25 bp, Homo sapien
gggcattaaaatcccatggcaagga

SEQ ID NO: 4953289 - DNA, 25 bp, Homo sapien
cgttaaacattgcatcggagagctg

SEQ ID NO: 4953290 - DNA, 25 bp, Homo sapien
taaatgacacggatacactcctgag

SEQ ID NO: 4953291 - DNA, 25 bp, Homo sapien
cactcctgagaagacactcgttaaa

SEQ ID NO: 4953292 - DNA, 25 bp, Homo sapien
ctttgataaatgtgctgttaaacac

SEQ ID NO: 4953293 - DNA, 25 bp, Homo sapien
acattcatgtcagatcccatatggg

SEQ ID NO: 4953294 - DNA, 25 bp, Homo sapien
gaaaacttagggtctcaaagcaaga

SEQ ID NO: 4953295 - DNA, 25 bp, Homo sapien
tggtggcaggacctttcaataaata

SEQ ID NO: 4953296 - DNA, 25 bp, Homo sapien
aaacctgaagcttttttggtggcag

SEQ ID NO: 4953297 - DNA, 25 bp, Homo sapien
tattctttcacatgggctaggcctg

SEQ ID NO: 4953298 - DNA, 25 bp, Homo sapien
cactgtggaacagtaatttgtgccc

SEQ ID NO: 4953299 - DNA, 25 bp, Homo sapien
aaccaatagtcccagaagagaccct

SEQ ID NO: 4953300 - DNA, 25 bp, Homo sapien
cactgcctgtgtttgtctggccaag

SEQ ID NO: 4953301 - DNA, 25 bp, Homo sapien
caagcttggtttactgaatcaagaa

SEQ ID NO: 4953302 - DNA, 25 bp, Homo sapien
cactaggtgataatttcccctgtac

SEQ ID NO: 4953303 - DNA, 25 bp, Homo sapien
tataactgtaatcattcaccttggg

SEQ ID NO: 4953304 - DNA, 25 bp, Homo sapien
tatttgcgtatggtgttcctctgcc

SEQ ID NO: 4953305 - DNA, 25 bp, Homo sapien
tctgaagggtactggtcagttacct

SEQ ID NO: 4953306 - DNA, 25 bp, Homo sapien
ttctggagaggtaaacctgggtcac

SEQ ID NO: 4953307 - DNA, 25 bp, Homo sapien
tcctctgtcaacacgtttctggaga

SEQ ID NO: 4953308 - DNA, 25 bp, Homo sapien
ccaggatttcacgtgacaggagtca

SEQ ID NO: 4953309 - DNA, 25 bp, Homo sapien
ggcagggttacagctccgtgactgc

SEQ ID NO: 4953310 - DNA, 25 bp, Homo sapien
agaggcagggttacagctccgtgac

SEQ ID NO: 4953311 - DNA, 25 bp, Homo sapien
agggttacagctccgtgactgctcc

SEQ ID NO: 4953312 - DNA, 25 bp, Homo sapien
cagggttacagctccgtgactgctc

SEQ ID NO: 4953313 - DNA, 25 bp, Homo sapien
aaactgacgtggcaccctggtggtc

SEQ ID NO: 4953314 - DNA, 25 bp, Homo sapien
gaaagctgctttggccctgaccttg

SEQ ID NO: 4953315 - DNA, 25 bp, Homo sapien
gacatatttcaagggcgccagaggc

SEQ ID NO: 4953316 - DNA, 25 bp, Homo sapien
tccgtgggcagttcggtagaccgca

SEQ ID NO: 4953317 - DNA, 25 bp, Homo sapien
cggctccagagtgcggatttcggtc

SEQ ID NO: 4953318 - DNA, 25 bp, Homo sapien
gatttcggtcgcgtgcggctctgac

SEQ ID NO: 4953319 - DNA, 25 bp, Homo sapien
acttgccagggagccgctaaacagc

SEQ ID NO: 4953320 - DNA, 25 bp, Homo sapien
gctaaacagcaagaccgcgcgctct

SEQ ID NO: 4953321 - DNA, 25 bp, Homo sapien
ggcatgaaggtaccagcagcgtaca

SEQ ID NO: 4953322 - DNA, 25 bp, Homo sapien
aaggtaccagcagcgtacatgctcc

SEQ ID NO: 4953323 - DNA, 25 bp, Homo sapien
agcagcgtacatgctcctgcagacc

SEQ ID NO: 4953324 - DNA, 25 bp, Homo sapien
ctaggcatgaaggtaccagcagcgt

SEQ ID NO: 4953325 - DNA, 25 bp, Homo sapien
cctgctgcttctctagaaagcccat

SEQ ID NO: 4953326 - DNA, 25 bp, Homo sapien
ctgacctgctgcttctctagaaagc

SEQ ID NO: 4953327 - DNA, 25 bp, Homo sapien
gacctgctgcttctctagaaagccc

SEQ ID NO: 4953328 - DNA, 25 bp, Homo sapien
tgacctgctgcttctctagaaagcc

SEQ ID NO: 4953329 - DNA, 25 bp, Homo sapien
agagaacatactcctggggctcagg

SEQ ID NO: 4953330 - DNA, 25 bp, Homo sapien
cctcagaggcaggaacttctgccca

SEQ ID NO: 4953331 - DNA, 25 bp, Homo sapien
agattttgaagtacgggctgccagg

SEQ ID NO: 4953332 - DNA, 25 bp, Homo sapien
ggcagattttgaagtacgggctgcc

SEQ ID NO: 4953333 - DNA, 25 bp, Homo sapien
cactgggatacgactgatgcaggtt

SEQ ID NO: 4953334 - DNA, 25 bp, Homo sapien
ccagggcaccctcgtgcactgggat

SEQ ID NO: 4953335 - DNA, 25 bp, Homo sapien
gaattgtacccagggcaccctcgtg

SEQ ID NO: 4953336 - DNA, 25 bp, Homo sapien
ctgaccctggaattgtacccagggc

SEQ ID NO: 4953337 - DNA, 25 bp, Homo sapien
aattttagtatatgtgctgccaaag

SEQ ID NO: 4953338 - DNA, 25 bp, Homo sapien
atgctaatcttctctgtatcgtgcc

SEQ ID NO: 4953339 - DNA, 25 bp, Homo sapien
gaaagaaagaaacacttcatgaatt

SEQ ID NO: 4953340 - DNA, 25 bp, Homo sapien
tacatgtcatccttgtgcaggtgcc

SEQ ID NO: 4953341 - DNA, 25 bp, Homo sapien
actacaggagggtgtcaccgcgcct

SEQ ID NO: 4953342 - DNA, 25 bp, Homo sapien
gctgggactacaggagggtgtcacc

SEQ ID NO: 4953343 - DNA, 25 bp, Homo sapien
ctacaggagggtgtcaccgcgcctg

SEQ ID NO: 4953344 - DNA, 25 bp, Homo sapien
gggactacaggagggtgtcaccgcg

SEQ ID NO: 4953345 - DNA, 25 bp, Homo sapien
tacccctggtgcttctgacatgggc

SEQ ID NO: 4953346 - DNA, 25 bp, Homo sapien
tctacccctggtgcttctgacatgg

SEQ ID NO: 4953347 - DNA, 25 bp, Homo sapien
ctggtgcttctgacatgggcttcat

SEQ ID NO: 4953348 - DNA, 25 bp, Homo sapien
cttctgttttctacccctggtgctt

SEQ ID NO: 4953349 - DNA, 25 bp, Homo sapien
ctccttttatttttatatggatatc

SEQ ID NO: 4953350 - DNA, 25 bp, Homo sapien
tctctccttttatttttatatggat

SEQ ID NO: 4953351 - DNA, 25 bp, Homo sapien
cttttatttttatatggatatcttc

SEQ ID NO: 4953352 - DNA, 25 bp, Homo sapien
ttctctccttttatttttatatgga

SEQ ID NO: 4953353 - DNA, 25 bp, Homo sapien
tgagaggactcgactagatgacacc

SEQ ID NO: 4953354 - DNA, 25 bp, Homo sapien
tatctcaggattctacgggtctggc

SEQ ID NO: 4953355 - DNA, 25 bp, Homo sapien
gagagtttgcgttttacacccagcg

SEQ ID NO: 4953356 - DNA, 25 bp, Homo sapien
tgaactcggtcaggcatcgtcaagc

SEQ ID NO: 4953357 - DNA, 25 bp, Homo sapien
ttgttgcacccaagctacgctagtg

SEQ ID NO: 4953358 - DNA, 25 bp, Homo sapien
ggtagtaagcaagagccagtcacag

SEQ ID NO: 4953359 - DNA, 25 bp, Homo sapien
tttaacatcttggttggagcggccc

SEQ ID NO: 4953360 - DNA, 25 bp, Homo sapien
gggaatcccagttcatagcaccagt

SEQ ID NO: 4953361 - DNA, 25 bp, Homo sapien
agtcacagaagaggtcggccagctc

SEQ ID NO: 4953362 - DNA, 25 bp, Homo sapien
tcagcttgttgatgtcgccacgcag

SEQ ID NO: 4953363 - DNA, 25 bp, Homo sapien
tcgtaggtggcatcgttgagcatcc

SEQ ID NO: 4953364 - DNA, 25 bp, Homo sapien
tggtcacgccaataagcttgagtgg

SEQ ID NO: 4953365 - DNA, 25 bp, Homo sapien
ccattaatgcaatcaagccttccct

SEQ ID NO: 4953366 - DNA, 25 bp, Homo sapien
tccattaatgcaatcaagccttccc

SEQ ID NO: 4953367 - DNA, 25 bp, Homo sapien
cattaatgcaatcaagccttccctt

SEQ ID NO: 4953368 - DNA, 25 bp, Homo sapien
attaatgcaatcaagccttcccttt

SEQ ID NO: 4953369 - DNA, 25 bp, Homo sapien
cgttttttatgcacttgtacagatc

SEQ ID NO: 4953370 - DNA, 25 bp, Homo sapien
tatgcacttgtacagatctcttttc

SEQ ID NO: 4953371 - DNA, 25 bp, Homo sapien
tcgttttttatgcacttgtacagat

SEQ ID NO: 4953372 - DNA, 25 bp, Homo sapien
tttttatgcacttgtacagatctct

SEQ ID NO: 4953373 - DNA, 25 bp, Homo sapien
ggatggcgttgcctcgcacgcccat

SEQ ID NO: 4953374 - DNA, 25 bp, Homo sapien
tggactggacaaaggccgcctggat

SEQ ID NO: 4953375 - DNA, 25 bp, Homo sapien
aaaggccgcctggatggcgttgcct

SEQ ID NO: 4953376 - DNA, 25 bp, Homo sapien
gtgtcagtttccatggactggacaa

SEQ ID NO: 4953377 - DNA, 25 bp, Homo sapien
tcagccccggaatcgccatgagctg

SEQ ID NO: 4953378 - DNA, 25 bp, Homo sapien
gctgctattccggtgaggtgctgct

SEQ ID NO: 4953379 - DNA, 25 bp, Homo sapien
gaatcgccatgagctgctattccgg

SEQ ID NO: 4953380 - DNA, 25 bp, Homo sapien
catgagctgctattccggtgaggtg

SEQ ID NO: 4953381 - DNA, 25 bp, Homo sapien
ggcagctccacaactcctcaccact

SEQ ID NO: 4953382 - DNA, 25 bp, Homo sapien
tcgagcacattccacaccgagccag

SEQ ID NO: 4953383 - DNA, 25 bp, Homo sapien
atcccgccgactctgggcagctcca

SEQ ID NO: 4953384 - DNA, 25 bp, Homo sapien
aggcaggacccatcccgccgactct

SEQ ID NO: 4953385 - DNA, 25 bp, Homo sapien
agaagagtggtccccggagtggcag

SEQ ID NO: 4953386 - DNA, 25 bp, Homo sapien
gaagagtggtccccggagtggcagg

SEQ ID NO: 4953387 - DNA, 25 bp, Homo sapien
ggtggacagcagggtggggaggttc

SEQ ID NO: 4953388 - DNA, 25 bp, Homo sapien
ctggggtggacagcagggtggggag

SEQ ID NO: 4953389 - DNA, 25 bp, Homo sapien
ggctatagcttcatcgatgctctga

SEQ ID NO: 4953390 - DNA, 25 bp, Homo sapien
ctcagtttctcggtgagggccttca

SEQ ID NO: 4953391 - DNA, 25 bp, Homo sapien
tggcaccttggctggcactcctggc

SEQ ID NO: 4953392 - DNA, 25 bp, Homo sapien
ttccaggtaggagggcctgcgggtc

SEQ ID NO: 4953393 - DNA, 25 bp, Homo sapien
caaggtctatctgtcctgaacgcac

SEQ ID NO: 4953394 - DNA, 25 bp, Homo sapien
ctgaacgcactcgaagaccagactg

SEQ ID NO: 4953395 - DNA, 25 bp, Homo sapien
cagacagcgtcgcaggaatctcggg

SEQ ID NO: 4953396 - DNA, 25 bp, Homo sapien
gtctatgatccgtcctggaagcctg

SEQ ID NO: 4953397 - DNA, 25 bp, Homo sapien
agctcaggctgtctgaatctgaggc

SEQ ID NO: 4953398 - DNA, 25 bp, Homo sapien
acaagctcaggctgtctgaatctga

SEQ ID NO: 4953399 - DNA, 25 bp, Homo sapien
gacaagctcaggctgtctgaatctg

SEQ ID NO: 4953400 - DNA, 25 bp, Homo sapien
caagctcaggctgtctgaatctgag

SEQ ID NO: 4953401 - DNA, 25 bp, Homo sapien
ctcacctcttcagagacagaagcaa

SEQ ID NO: 4953402 - DNA, 25 bp, Homo sapien
tcagagacagaagcaaataaacctg

SEQ ID NO: 4953403 - DNA, 25 bp, Homo sapien
tcacctcttcagagacagaagcaaa

SEQ ID NO: 4953404 - DNA, 25 bp, Homo sapien
gagacagaagcaaataaacctgcag

SEQ ID NO: 4953405 - DNA, 25 bp, Homo sapien
tgttcacctaagtgcccgcatggca

SEQ ID NO: 4953406 - DNA, 25 bp, Homo sapien
gcaggctgtgactcattgttctaga

SEQ ID NO: 4953407 - DNA, 25 bp, Homo sapien
cattgttctagaacgaggcttctcg

SEQ ID NO: 4953408 - DNA, 25 bp, Homo sapien
tggatggctaaacaagcaggctgtg

SEQ ID NO: 4953409 - DNA, 25 bp, Homo sapien
ggatcagatggcctagctctacgtc

SEQ ID NO: 4953410 - DNA, 25 bp, Homo sapien
cagatgcagacactagagttgggat

SEQ ID NO: 4953411 - DNA, 25 bp, Homo sapien
gctctacgtcttgtcaggcttgcta

SEQ ID NO: 4953412 - DNA, 25 bp, Homo sapien
tcgagagatgggacttagacagcag

SEQ ID NO: 4953413 - DNA, 25 bp, Homo sapien
gaccacaagtgtccagacataggtg

SEQ ID NO: 4953414 - DNA, 25 bp, Homo sapien
gcctgccctgaccacaagtgtccag

SEQ ID NO: 4953415 - DNA, 25 bp, Homo sapien
cacaagtgtccagacataggtgtgc

SEQ ID NO: 4953416 - DNA, 25 bp, Homo sapien
ccctgaccacaagtgtccagacata

SEQ ID NO: 4953417 - DNA, 25 bp, Homo sapien
gaaggaagaattagctacactgtga

SEQ ID NO: 4953418 - DNA, 25 bp, Homo sapien
tctggaaggaagaattagctacact

SEQ ID NO: 4953419 - DNA, 25 bp, Homo sapien
gaattagctacactgtgacttaggg

SEQ ID NO: 4953420 - DNA, 25 bp, Homo sapien
agctacactgtgacttagggccctg

SEQ ID NO: 4953421 - DNA, 25 bp, Homo sapien
ttgaccccgacaccgtctgggttgc

SEQ ID NO: 4953422 - DNA, 25 bp, Homo sapien
tgaccccgacaccgtctgggttgcc

SEQ ID NO: 4953423 - DNA, 25 bp, Homo sapien
ccccgacaccgtctgggttgcccat

SEQ ID NO: 4953424 - DNA, 25 bp, Homo sapien
tgattcctccgtcaacacctgtctg

SEQ ID NO: 4953425 - DNA, 25 bp, Homo sapien
gtgtcaccaagcctaaaactccaca

SEQ ID NO: 4953426 - DNA, 25 bp, Homo sapien
aaactccacatcagagagactcgtg

SEQ ID NO: 4953427 - DNA, 25 bp, Homo sapien
gactcgtggcttcactcaaggacag

SEQ ID NO: 4953428 - DNA, 25 bp, Homo sapien
gtttagcccttgaaatgaccctgag

SEQ ID NO: 4953429 - DNA, 25 bp, Homo sapien
tccagtgttcctagaaacctcaggg

SEQ ID NO: 4953430 - DNA, 25 bp, Homo sapien
tcggtctgcagtgccaagcacgtgg

SEQ ID NO: 4953431 - DNA, 25 bp, Homo sapien
ctccatttgcacagaagtaacaggc

SEQ ID NO: 4953432 - DNA, 25 bp, Homo sapien
aggatagaagcttccgtttccacac

SEQ ID NO: 4953433 - DNA, 25 bp, Homo sapien
tcaggatagaagcttccgtttccac

SEQ ID NO: 4953434 - DNA, 25 bp, Homo sapien
caggatagaagcttccgtttccaca

SEQ ID NO: 4953435 - DNA, 25 bp, Homo sapien
tgctccgggccagtgctcgcgctgg

SEQ ID NO: 4953436 - DNA, 25 bp, Homo sapien
ctgaacctatacacaggagccaggc

SEQ ID NO: 4953437 - DNA, 25 bp, Homo sapien
gtcaccagccgcctgggagtggacc

SEQ ID NO: 4953438 - DNA, 25 bp, Homo sapien
gcgtcccctccagggcgctttggga

SEQ ID NO: 4953439 - DNA, 25 bp, Homo sapien
aattctcggcgctgctcctttcgga

SEQ ID NO: 4953440 - DNA, 25 bp, Homo sapien
tccggtgaattctcggcgctgctcc

SEQ ID NO: 4953441 - DNA, 25 bp, Homo sapien
cccgagctccggtgaattctcggcg

SEQ ID NO: 4953442 - DNA, 25 bp, Homo sapien
tcggcgctgctcctttcggaaagga

SEQ ID NO: 4953443 - DNA, 25 bp, Homo sapien
tacatggccagacgcgaagctgagt

SEQ ID NO: 4953444 - DNA, 25 bp, Homo sapien
ctgcaaagtgactggcgcaggctcc

SEQ ID NO: 4953445 - DNA, 25 bp, Homo sapien
gctggaagcgtctttcaaagggctc

SEQ ID NO: 4953446 - DNA, 25 bp, Homo sapien
tccagtctgccattctcacgatagc

SEQ ID NO: 4953447 - DNA, 25 bp, Homo sapien
cagacctcgtgaggactggccttcc

SEQ ID NO: 4953448 - DNA, 25 bp, Homo sapien
gaaggcgattcctggattctaggga

SEQ ID NO: 4953449 - DNA, 25 bp, Homo sapien
gaaccagactctgctctcttgtcac

SEQ ID NO: 4953450 - DNA, 25 bp, Homo sapien
gagtctataagctacttgaaggcga

SEQ ID NO: 4953451 - DNA, 25 bp, Homo sapien
gaggccggaccaggaactgtcaatt

SEQ ID NO: 4953452 - DNA, 25 bp, Homo sapien
tagcccacggcaacgtcagtgatgc

SEQ ID NO: 4953453 - DNA, 25 bp, Homo sapien
cagaagaccggaaaccctgatgggc

SEQ ID NO: 4953454 - DNA, 25 bp, Homo sapien
tctgccccttatggaagccaggaca

SEQ ID NO: 4953455 - DNA, 25 bp, Homo sapien
tcacttctgcaagaacccactgatg

SEQ ID NO: 4953456 - DNA, 25 bp, Homo sapien
agagaaatcacttctgcaagaaccc

SEQ ID NO: 4953457 - DNA, 25 bp, Homo sapien
gaaatcacttctgcaagaacccact

SEQ ID NO: 4953458 - DNA, 25 bp, Homo sapien
aatcacttctgcaagaacccactga

SEQ ID NO: 4953459 - DNA, 25 bp, Homo sapien
catagctcagtattgtctcagtcca

SEQ ID NO: 4953460 - DNA, 25 bp, Homo sapien
gaactctgcgttgctgcgtctattg

SEQ ID NO: 4953461 - DNA, 25 bp, Homo sapien
gaagagagagcccaccgagtgactt

SEQ ID NO: 4953462 - DNA, 25 bp, Homo sapien
tctgacgtcatcacagaagccttct

SEQ ID NO: 4953463 - DNA, 25 bp, Homo sapien
atggtgttggaagttgctcgttgtc

SEQ ID NO: 4953464 - DNA, 25 bp, Homo sapien
aagttgctcgttgtcgctaggagcc

SEQ ID NO: 4953465 - DNA, 25 bp, Homo sapien
ctcgttgtcgctaggagcctgctcc

SEQ ID NO: 4953466 - DNA, 25 bp, Homo sapien
tgctccactgtaagggtgtcaggat

SEQ ID NO: 4953467 - DNA, 25 bp, Homo sapien
tggggtctgcagccttggggactgg

SEQ ID NO: 4953468 - DNA, 25 bp, Homo sapien
agccttggggactggccaccggtgg

SEQ ID NO: 4953469 - DNA, 25 bp, Homo sapien
ggtctgcagccttggggactggcca

SEQ ID NO: 4953470 - DNA, 25 bp, Homo sapien
ggggactggccaccggtggccagca

SEQ ID NO: 4953471 - DNA, 25 bp, Homo sapien
aatgcagggccaactgtagcctctg

SEQ ID NO: 4953472 - DNA, 25 bp, Homo sapien
cctctggccggtgtccctgagtgag

SEQ ID NO: 4953473 - DNA, 25 bp, Homo sapien
tggacactcataactcaatgcaggg

SEQ ID NO: 4953474 - DNA, 25 bp, Homo sapien
tgagggcaaagttgtaataacactt

SEQ ID NO: 4953475 - DNA, 25 bp, Homo sapien
tcccacaatgcagcaaagccatctg

SEQ ID NO: 4953476 - DNA, 25 bp, Homo sapien
cttcacccaacctgaaactgctggg

SEQ ID NO: 4953477 - DNA, 25 bp, Homo sapien
acccaacctgaaactgctgggtgca

SEQ ID NO: 4953478 - DNA, 25 bp, Homo sapien
ccagccagtgtgtgatgcgttttgc

SEQ ID NO: 4953479 - DNA, 25 bp, Homo sapien
taggccatatgggaccagggctgca

SEQ ID NO: 4953480 - DNA, 25 bp, Homo sapien
agtccaagctgggaataggccatat

SEQ ID NO: 4953481 - DNA, 25 bp, Homo sapien
gggttctctatgagtctggcatctt

SEQ ID NO: 4953482 - DNA, 25 bp, Homo sapien
gcaggactgttcaaccatcatcacc

SEQ ID NO: 4953483 - DNA, 25 bp, Homo sapien
ccagcttgggaagcgtcactgcgtg

SEQ ID NO: 4953484 - DNA, 25 bp, Homo sapien
cgtctttacaaaggacaccaaattg

SEQ ID NO: 4953485 - DNA, 25 bp, Homo sapien
taggatctgaggtcgtctttacaaa

SEQ ID NO: 4953486 - DNA, 25 bp, Homo sapien
cagctcaaaggcaggcggtccttca

SEQ ID NO: 4953487 - DNA, 25 bp, Homo sapien
tctgctaccacttgcctgcgggaaa

SEQ ID NO: 4953488 - DNA, 25 bp, Homo sapien
taaattgtccttaacccttgacatc

SEQ ID NO: 4953489 - DNA, 25 bp, Homo sapien
ctaaattgtccttaacccttgacat

SEQ ID NO: 4953490 - DNA, 25 bp, Homo sapien
cacttgcctgcgggaaaacattaac

SEQ ID NO: 4953491 - DNA, 25 bp, Homo sapien
cagccccgaagtcgctccctccttc

SEQ ID NO: 4953492 - DNA, 25 bp, Homo sapien
aagtcgctccctccttcgttctctg

SEQ ID NO: 4953493 - DNA, 25 bp, Homo sapien
ctccttcgttctctgcctgaagctg

SEQ ID NO: 4953494 - DNA, 25 bp, Homo sapien
cctgaagctggctttgacaatgagc

SEQ ID NO: 4953495 - DNA, 25 bp, Homo sapien
agtacatggccagaggtggtgcccc

SEQ ID NO: 4953496 - DNA, 25 bp, Homo sapien
tattttacaaggatggccagagagg

SEQ ID NO: 4953497 - DNA, 25 bp, Homo sapien
tgcagggacagtactagatccaggt

SEQ ID NO: 4953498 - DNA, 25 bp, Homo sapien
ccaggagcagttcagacagcatttc

SEQ ID NO: 4953499 - DNA, 25 bp, Homo sapien
gcaggcgtggcgcagccagggagtc

SEQ ID NO: 4953500 - DNA, 25 bp, Homo sapien
gggagtcccgcgtggtctgggctcc

SEQ ID NO: 4953501 - DNA, 25 bp, Homo sapien
ctgtgacaagctggacatcgcgtgc

SEQ ID NO: 4953502 - DNA, 25 bp, Homo sapien
tggcctcataaatccgtggctcggg

SEQ ID NO: 4953503 - DNA, 25 bp, Homo sapien
tctgcagatgatgaaacggacagac

SEQ ID NO: 4953504 - DNA, 25 bp, Homo sapien
gcagatgatgaaacggacagactcc

SEQ ID NO: 4953505 - DNA, 25 bp, Homo sapien
gtttctgcagatgatgaaacggaca

SEQ ID NO: 4953506 - DNA, 25 bp, Homo sapien
tcacagcccccactgaccgtgggca

SEQ ID NO: 4953507 - DNA, 25 bp, Homo sapien
tccagctctggtatgcaagtggcaa

SEQ ID NO: 4953508 - DNA, 25 bp, Homo sapien
ccagctctggtatgcaagtggcaac

SEQ ID NO: 4953509 - DNA, 25 bp, Homo sapien
ctggtgtgttcttgttcgggacata

SEQ ID NO: 4953510 - DNA, 25 bp, Homo sapien
gtttctccacgaggggtcgcacttg

SEQ ID NO: 4953511 - DNA, 25 bp, Homo sapien
tggtgcccggagctgaacctgtatc

SEQ ID NO: 4953512 - DNA, 25 bp, Homo sapien
tcgcacttgcccgaatggtgcccgg

SEQ ID NO: 4953513 - DNA, 25 bp, Homo sapien
ggaaagcagaagcaccgggcccctg

SEQ ID NO: 4953514 - DNA, 25 bp, Homo sapien
gagcatctgttcctagctccctccg

SEQ ID NO: 4953515 - DNA, 25 bp, Homo sapien
tactggacttagcaggaatctccga

SEQ ID NO: 4953516 - DNA, 25 bp, Homo sapien
tctggataaaatcccttactggact

SEQ ID NO: 4953517 - DNA, 25 bp, Homo sapien
tccgatctgtggagaagtctcctca

SEQ ID NO: 4953518 - DNA, 25 bp, Homo sapien
tggtcagaactgctcataagaatct

SEQ ID NO: 4953519 - DNA, 25 bp, Homo sapien
gcaacccatctggatgtgtggagga

SEQ ID NO: 4953520 - DNA, 25 bp, Homo sapien
gaatctccactgcaggatcgatatt

SEQ ID NO: 4953521 - DNA, 25 bp, Homo sapien
tccaggcccatagaaggaggaggca

SEQ ID NO: 4953522 - DNA, 25 bp, Homo sapien
ggccactcgggagctttccctgctg

SEQ ID NO: 4953523 - DNA, 25 bp, Homo sapien
actcgggagctttccctgctgagtg

SEQ ID NO: 4953524 - DNA, 25 bp, Homo sapien
atgagcggccactcgggagctttcc

SEQ ID NO: 4953525 - DNA, 25 bp, Homo sapien
tgcatgagcggccactcgggagctt

SEQ ID NO: 4953526 - DNA, 25 bp, Homo sapien
tctagaaacagtaccatggaccctg

SEQ ID NO: 4953527 - DNA, 25 bp, Homo sapien
tcacgtgacgaagacggaggactcg

SEQ ID NO: 4953528 - DNA, 25 bp, Homo sapien
gactgagcttctggttctagaaaca

SEQ ID NO: 4953529 - DNA, 25 bp, Homo sapien
gtaccatggaccctgtactgggaca

SEQ ID NO: 4953530 - DNA, 25 bp, Homo sapien
attgcaggctcttggacctatgaga

SEQ ID NO: 4953531 - DNA, 25 bp, Homo sapien
tcttggacctatgagaggtgctgtc

SEQ ID NO: 4953532 - DNA, 25 bp, Homo sapien
tggacctatgagaggtgctgtctgt

SEQ ID NO: 4953533 - DNA, 25 bp, Homo sapien
caggctcttggacctatgagaggtg

SEQ ID NO: 4953534 - DNA, 25 bp, Homo sapien
gctgtccagaccattgcagagtggc

SEQ ID NO: 4953535 - DNA, 25 bp, Homo sapien
tcctgagggagaccggaaggacaaa

SEQ ID NO: 4953536 - DNA, 25 bp, Homo sapien
ctttcatactccgtctcctgaggga

SEQ ID NO: 4953537 - DNA, 25 bp, Homo sapien
gagtggcaatgtcattcctttcata

SEQ ID NO: 4953538 - DNA, 25 bp, Homo sapien
ggctctttgatgcacatccagagtt

SEQ ID NO: 4953539 - DNA, 25 bp, Homo sapien
gatggcagcccagattggggaacca

SEQ ID NO: 4953540 - DNA, 25 bp, Homo sapien
gatgggggctctttgatgcacatcc

SEQ ID NO: 4953541 - DNA, 25 bp, Homo sapien
gaggtagaaggccggtgttggagat

SEQ ID NO: 4953542 - DNA, 25 bp, Homo sapien
caggcgacacaagggctgagatgcc

SEQ ID NO: 4953543 - DNA, 25 bp, Homo sapien
ccaggcgacacaagggctgagatgc

SEQ ID NO: 4953544 - DNA, 25 bp, Homo sapien
tggacaagtttccagcataggccaa

SEQ ID NO: 4953545 - DNA, 25 bp, Homo sapien
acagctttgcctgacatggacaagt

SEQ ID NO: 4953546 - DNA, 25 bp, Homo sapien
agcaggagccgtccaatgtcccaca

SEQ ID NO: 4953547 - DNA, 25 bp, Homo sapien
ggagcaggagccgtccaatgtccca

SEQ ID NO: 4953548 - DNA, 25 bp, Homo sapien
tccttgttggtcagcccacgcagat

SEQ ID NO: 4953549 - DNA, 25 bp, Homo sapien
tgagtctcctctgcggagcggacct

SEQ ID NO: 4953550 - DNA, 25 bp, Homo sapien
tcagcccacgcagattaggagaccg

SEQ ID NO: 4953551 - DNA, 25 bp, Homo sapien
tgtcctcggtcggtaacacagggaa

SEQ ID NO: 4953552 - DNA, 25 bp, Homo sapien
ggacaatagacactacagggcatcg

SEQ ID NO: 4953553 - DNA, 25 bp, Homo sapien
cagggcatcgttgattacaaacagc

SEQ ID NO: 4953554 - DNA, 25 bp, Homo sapien
tactttcacagaaccagtatggtcg

SEQ ID NO: 4953555 - DNA, 25 bp, Homo sapien
gttactgtcgccctgggtactttca

SEQ ID NO: 4953556 - DNA, 25 bp, Homo sapien
cccaagttgcgtctttgtccacaaa

SEQ ID NO: 4953557 - DNA, 25 bp, Homo sapien
caaagctgttgggtatcagttctcc

SEQ ID NO: 4953558 - DNA, 25 bp, Homo sapien
gctgatgtgacatgaccggctgcgc

SEQ ID NO: 4953559 - DNA, 25 bp, Homo sapien
ggaagctgttctcgtcctgccctag

SEQ ID NO: 4953560 - DNA, 25 bp, Homo sapien
caccaattatagttgtggacgttga

SEQ ID NO: 4953561 - DNA, 25 bp, Homo sapien
caatggtaacttgtagctaggttct

SEQ ID NO: 4953562 - DNA, 25 bp, Homo sapien
aatgggactccgtgttttatggaag

SEQ ID NO: 4953563 - DNA, 25 bp, Homo sapien
gggcacccagaggagtcaaatacat

SEQ ID NO: 4953564 - DNA, 25 bp, Homo sapien
ggagaactcgggctgaccctgagac

SEQ ID NO: 4953565 - DNA, 25 bp, Homo sapien
cactctgggatgtgcacggcttcag

SEQ ID NO: 4953566 - DNA, 25 bp, Homo sapien
gggactcagacttctcaagggccca

SEQ ID NO: 4953567 - DNA, 25 bp, Homo sapien
tcgggctgaccctgagacagaaatg

SEQ ID NO: 4953568 - DNA, 25 bp, Homo sapien
cccacaacaagcttaggagacagga

SEQ ID NO: 4953569 - DNA, 25 bp, Homo sapien
tgtagtagtgacaatcactacaaaa

SEQ ID NO: 4953570 - DNA, 25 bp, Homo sapien
ctgagatgcaatatgacgaagtagc

SEQ ID NO: 4953571 - DNA, 25 bp, Homo sapien
aaacatggctaacgtttatggagca

SEQ ID NO: 4953572 - DNA, 25 bp, Homo sapien
tagcaacttccaccgtgcgtgagag

SEQ ID NO: 4953573 - DNA, 25 bp, Homo sapien
taagctctccttgttggcatggcct

SEQ ID NO: 4953574 - DNA, 25 bp, Homo sapien
atctcgcagaggataagagggagcc

SEQ ID NO: 4953575 - DNA, 25 bp, Homo sapien
tggagaccccgctaatgaggaaggc

SEQ ID NO: 4953576 - DNA, 25 bp, Homo sapien
ctccagaggacctgaccatggaaca

SEQ ID NO: 4953577 - DNA, 25 bp, Homo sapien
tgggtgccggtgccggctcccgggc

SEQ ID NO: 4953578 - DNA, 25 bp, Homo sapien
gggtgccggtgccggctcccgggca

SEQ ID NO: 4953579 - DNA, 25 bp, Homo sapien
accgaggaggatggcacgctcatgc

SEQ ID NO: 4953580 - DNA, 25 bp, Homo sapien
acagagcctggcaggcgctaactgg

SEQ ID NO: 4953581 - DNA, 25 bp, Homo sapien
cacagagcctggcaggcgctaactg

SEQ ID NO: 4953582 - DNA, 25 bp, Homo sapien
ctggtcaccgaggaggatggcacgc

SEQ ID NO: 4953583 - DNA, 25 bp, Homo sapien
cagtccagaatgttcttaggatcct

SEQ ID NO: 4953584 - DNA, 25 bp, Homo sapien
caggcagccgctgagcccatgaaaa

SEQ ID NO: 4953585 - DNA, 25 bp, Homo sapien
gcttctcttgcttgtcgaggcccca

SEQ ID NO: 4953586 - DNA, 25 bp, Homo sapien
tctgacacctgtgtatgaggccctg

SEQ ID NO: 4953587 - DNA, 25 bp, Homo sapien
tagaaaagagccgagggcgccttta

SEQ ID NO: 4953588 - DNA, 25 bp, Homo sapien
gctggagagtgacccctgggaccca

SEQ ID NO: 4953589 - DNA, 25 bp, Homo sapien
gccttggctggagagtgacccctgg

SEQ ID NO: 4953590 - DNA, 25 bp, Homo sapien
ccgagggcgcctttaatggccacag

SEQ ID NO: 4953591 - DNA, 25 bp, Homo sapien
tgggcaccccctggcgtcacgtcca

SEQ ID NO: 4953592 - DNA, 25 bp, Homo sapien
ccagaatcatccgagcgtgggtgcc

SEQ ID NO: 4953593 - DNA, 25 bp, Homo sapien
aatcatccgagcgtgggtgccttca

SEQ ID NO: 4953594 - DNA, 25 bp, Homo sapien
ccccctggcgtcacgtccaggctta

SEQ ID NO: 4953595 - DNA, 25 bp, Homo sapien
cagccataggtcagaatagcctggg

SEQ ID NO: 4953596 - DNA, 25 bp, Homo sapien
ctcttgcccttcaaggaagtgttca

SEQ ID NO: 4953597 - DNA, 25 bp, Homo sapien
ccttcaaggaagtgttcagccatag

SEQ ID NO: 4953598 - DNA, 25 bp, Homo sapien
gaagtgttcagccataggtcagaat

SEQ ID NO: 4953599 - DNA, 25 bp, Homo sapien
tctactgagcttgcccacagcaagt

SEQ ID NO: 4953600 - DNA, 25 bp, Homo sapien
tgctctactgagcttgcccacagca

SEQ ID NO: 4953601 - DNA, 25 bp, Homo sapien
actgagcttgcccacagcaagttac

SEQ ID NO: 4953602 - DNA, 25 bp, Homo sapien
ctgagcttgcccacagcaagttacc

SEQ ID NO: 4953603 - DNA, 25 bp, Homo sapien
ggaaaaacatgatcctctacctctg

SEQ ID NO: 4953604 - DNA, 25 bp, Homo sapien
tagggatcaagtcagaaagcacagt

SEQ ID NO: 4953605 - DNA, 25 bp, Homo sapien
gataccttcctatcagttgcagtga

SEQ ID NO: 4953606 - DNA, 25 bp, Homo sapien
tatttcagatgaataagcctcagaa

SEQ ID NO: 4953607 - DNA, 25 bp, Homo sapien
tggaaagcacggtggactttctccc

SEQ ID NO: 4953608 - DNA, 25 bp, Homo sapien
cccagtggaaagcacggtggacttt

SEQ ID NO: 4953609 - DNA, 25 bp, Homo sapien
agctggcaccataggccgcctgccc

SEQ ID NO: 4953610 - DNA, 25 bp, Homo sapien
agcacggtggactttctccccaggg

SEQ ID NO: 4953611 - DNA, 25 bp, Homo sapien
agttcacacaggatgttccactggg

SEQ ID NO: 4953612 - DNA, 25 bp, Homo sapien
gatagaggtgacatgccagttcaca

SEQ ID NO: 4953613 - DNA, 25 bp, Homo sapien
tagacactcctctgggtggatagag

SEQ ID NO: 4953614 - DNA, 25 bp, Homo sapien
tgggtgactgaaaggccactcccag

SEQ ID NO: 4953615 - DNA, 25 bp, Homo sapien
tgcgaagtcggaatagaagagttgg

SEQ ID NO: 4953616 - DNA, 25 bp, Homo sapien
gatgcgaagtcggaatagaagagtt

SEQ ID NO: 4953617 - DNA, 25 bp, Homo sapien
cagatgcgaagtcggaatagaagag

SEQ ID NO: 4953618 - DNA, 25 bp, Homo sapien
tcagatgcgaagtcggaatagaaga

SEQ ID NO: 4953619 - DNA, 25 bp, Homo sapien
tttaatttccgattattctggagcc

SEQ ID NO: 4953620 - DNA, 25 bp, Homo sapien
gtttaatttccgattattctggagc

SEQ ID NO: 4953621 - DNA, 25 bp, Homo sapien
tagtccacatgctcgcaggttgaaa

SEQ ID NO: 4953622 - DNA, 25 bp, Homo sapien
ccagcaagcgctcttctggaattgg

SEQ ID NO: 4953623 - DNA, 25 bp, Homo sapien
ggttgaaagcagacaacaccatttg

SEQ ID NO: 4953624 - DNA, 25 bp, Homo sapien
caagtttcctgtgcctagtccacat

SEQ ID NO: 4953625 - DNA, 25 bp, Homo sapien
ttctgtacgctgtccaaaaataagg

SEQ ID NO: 4953626 - DNA, 25 bp, Homo sapien
cttctgtacgctgtccaaaaataag

SEQ ID NO: 4953627 - DNA, 25 bp, Homo sapien
tctgtacgctgtccaaaaataaggg

SEQ ID NO: 4953628 - DNA, 25 bp, Homo sapien
tgtacgctgtccaaaaataagggaa

SEQ ID NO: 4953629 - DNA, 25 bp, Homo sapien
ctctccgttcctggcaaggccgaag

SEQ ID NO: 4953630 - DNA, 25 bp, Homo sapien
cgaagccggtttgctttggatgcat

SEQ ID NO: 4953631 - DNA, 25 bp, Homo sapien
gaggagctccctctcatcgcctctc

SEQ ID NO: 4953632 - DNA, 25 bp, Homo sapien
ggcccctcggattcattgccacttt

SEQ ID NO: 4953633 - DNA, 25 bp, Homo sapien
tcggacgggtgtcgcgccgacgtcc

SEQ ID NO: 4953634 - DNA, 25 bp, Homo sapien
gtcgcgccgacgtccttcgtggtcg

SEQ ID NO: 4953635 - DNA, 25 bp, Homo sapien
gggtgtcgcgccgacgtccttcgtg

SEQ ID NO: 4953636 - DNA, 25 bp, Homo sapien
tcacctcggacgggtgtcgcgccga

SEQ ID NO: 4953637 - DNA, 25 bp, Homo sapien
gcaagacacatagcgaagcccctga

SEQ ID NO: 4953638 - DNA, 25 bp, Homo sapien
ggcagcaagacacatagcgaagccc

SEQ ID NO: 4953639 - DNA, 25 bp, Homo sapien
aagacacatagcgaagcccctgacc

SEQ ID NO: 4953640 - DNA, 25 bp, Homo sapien
tgggcagcaagacacatagcgaagc

SEQ ID NO: 4953641 - DNA, 25 bp, Homo sapien
ggacttacagctcgtctgggagcga

SEQ ID NO: 4953642 - DNA, 25 bp, Homo sapien
tgtgtgagacccctaaagaggccaa

SEQ ID NO: 4953643 - DNA, 25 bp, Homo sapien
taggctgctggtatctcaatatccc

SEQ ID NO: 4953644 - DNA, 25 bp, Homo sapien
cagggaatctccagctccgttctgt

SEQ ID NO: 4953645 - DNA, 25 bp, Homo sapien
taagactctggcgaccttggtggcg

SEQ ID NO: 4953646 - DNA, 25 bp, Homo sapien
gggtcaccttgaatgtctgtccgga

SEQ ID NO: 4953647 - DNA, 25 bp, Homo sapien
gatgtattcgctttgcaacccagag

SEQ ID NO: 4953648 - DNA, 25 bp, Homo sapien
caagaaagagtgtccgaggcacgga

SEQ ID NO: 4953649 - DNA, 25 bp, Homo sapien
cacccctggtttgtccttgagctga

SEQ ID NO: 4953650 - DNA, 25 bp, Homo sapien
ttcagtccactaggagtgccagcgg

SEQ ID NO: 4953651 - DNA, 25 bp, Homo sapien
taaattctcctcctagactacggga

SEQ ID NO: 4953652 - DNA, 25 bp, Homo sapien
ggaacctagagaggcgccgataaac

SEQ ID NO: 4953653 - DNA, 25 bp, Homo sapien
tacccggcttacatggccgacgtgg

SEQ ID NO: 4953654 - DNA, 25 bp, Homo sapien
gggatggtgcttcactacctcgagt

SEQ ID NO: 4953655 - DNA, 25 bp, Homo sapien
tacctcgagtttctagggaaggcag

SEQ ID NO: 4953656 - DNA, 25 bp, Homo sapien
ccaatctcggtgagtaggagcgcga

SEQ ID NO: 4953657 - DNA, 25 bp, Homo sapien
tccgagaagggcctaggctttgaag

SEQ ID NO: 4953658 - DNA, 25 bp, Homo sapien
tttgaagagtaaaggctacccctgc

SEQ ID NO: 4953659 - DNA, 25 bp, Homo sapien
ggtgcagccaaatacacatcgccgg

SEQ ID NO: 4953660 - DNA, 25 bp, Homo sapien
gcttttaaattgtcctctggccctg

SEQ ID NO: 4953661 - DNA, 25 bp, Homo sapien
tcgccgcgacttttgcgagatagcg

SEQ ID NO: 4953662 - DNA, 25 bp, Homo sapien
cttttgcgagatagcgcggcgacat

SEQ ID NO: 4953663 - DNA, 25 bp, Homo sapien
gagcctcgccgcgacttttgcgaga

SEQ ID NO: 4953664 - DNA, 25 bp, Homo sapien
tcttgggggagccagacggccaccc

SEQ ID NO: 4953665 - DNA, 25 bp, Homo sapien
cgtagggatcttggtggtaattgcc

SEQ ID NO: 4953666 - DNA, 25 bp, Homo sapien
gaattatgtgaccttactgagggca

SEQ ID NO: 4953667 - DNA, 25 bp, Homo sapien
gttccatatgagctacgaccctaag

SEQ ID NO: 4953668 - DNA, 25 bp, Homo sapien
gaatggctgcgtgagtcctttaaga

SEQ ID NO: 4953669 - DNA, 25 bp, Homo sapien
gggacctgcttatcaagtacgctag

SEQ ID NO: 4953670 - DNA, 25 bp, Homo sapien
cactcaggtggaatgatgcccggga

SEQ ID NO: 4953671 - DNA, 25 bp, Homo sapien
tagtgagccctgtcacttgcccagt

SEQ ID NO: 4953672 - DNA, 25 bp, Homo sapien
cagttgtgtcccatcaaaaggtcag

SEQ ID NO: 4953673 - DNA, 25 bp, Homo sapien
caactttttagcgagagtagcctgt

SEQ ID NO: 4953674 - DNA, 25 bp, Homo sapien
cacattcacgtttggatactggcta

SEQ ID NO: 4953675 - DNA, 25 bp, Homo sapien
gctgatacccagaaagagcctgtaa

SEQ ID NO: 4953676 - DNA, 25 bp, Homo sapien
tctgatgccagggactttgaagtct

SEQ ID NO: 4953677 - DNA, 25 bp, Homo sapien
gttttaagactgtaccactgtgcca

SEQ ID NO: 4953678 - DNA, 25 bp, Homo sapien
gagctcagatgaggcacttgcccgg

SEQ ID NO: 4953679 - DNA, 25 bp, Homo sapien
gaaactcgatggctctgtgtgcaga

SEQ ID NO: 4953680 - DNA, 25 bp, Homo sapien
gatattcacgaaatagcccagaccc

SEQ ID NO: 4953681 - DNA, 25 bp, Homo sapien
ctgtcagccgggacactagggagac

SEQ ID NO: 4953682 - DNA, 25 bp, Homo sapien
tgtcagccgggacactagggagaca

SEQ ID NO: 4953683 - DNA, 25 bp, Homo sapien
agccgggacactagggagacacaga

SEQ ID NO: 4953684 - DNA, 25 bp, Homo sapien
tcagccgggacactagggagacaca

SEQ ID NO: 4953685 - DNA, 25 bp, Homo sapien
gaactgtagccctccgcagataagg

SEQ ID NO: 4953686 - DNA, 25 bp, Homo sapien
tgacagagtcagataaatgggccct

SEQ ID NO: 4953687 - DNA, 25 bp, Homo sapien
tagagtattatctcaggccctgctg

SEQ ID NO: 4953688 - DNA, 25 bp, Homo sapien
aagacatacggttcaggcgcacgat

SEQ ID NO: 4953689 - DNA, 25 bp, Homo sapien
gaacagtgatctttaagcacggacc

SEQ ID NO: 4953690 - DNA, 25 bp, Homo sapien
caggctgtgtagaactgactcatcc

SEQ ID NO: 4953691 - DNA, 25 bp, Homo sapien
tgactcatcctggaatctaggccta

SEQ ID NO: 4953692 - DNA, 25 bp, Homo sapien
cctgtagtggtcaagaaagtaacac

SEQ ID NO: 4953693 - DNA, 25 bp, Homo sapien
tgcttggccccagtttttataatct

SEQ ID NO: 4953694 - DNA, 25 bp, Homo sapien
aacattcagtagaatgcagatctta

SEQ ID NO: 4953695 - DNA, 25 bp, Homo sapien
cattcagtagaatgcagatcttaag

SEQ ID NO: 4953696 - DNA, 25 bp, Homo sapien
ccatgcttggccccagtttttataa

SEQ ID NO: 4953697 - DNA, 25 bp, Homo sapien
aggtgcatgacatcacgcctcacta

SEQ ID NO: 4953698 - DNA, 25 bp, Homo sapien
tagagacaagaagctctcactgtgt

SEQ ID NO: 4953699 - DNA, 25 bp, Homo sapien
cactgtgcctagctatgcttgacat

SEQ ID NO: 4953700 - DNA, 25 bp, Homo sapien
gcctagctatgcttgacattttgtt

SEQ ID NO: 4953701 - DNA, 25 bp, Homo sapien
gaatgaagccttgtacagagctggg

SEQ ID NO: 4953702 - DNA, 25 bp, Homo sapien
gagcagtgccagttctcctaaggag

SEQ ID NO: 4953703 - DNA, 25 bp, Homo sapien
aatggagtcagagatcgcagacccg

SEQ ID NO: 4953704 - DNA, 25 bp, Homo sapien
ggtctaccagaaagaacagtgccct

SEQ ID NO: 4953705 - DNA, 25 bp, Homo sapien
aaactccctcatgttgttggcaaca

SEQ ID NO: 4953706 - DNA, 25 bp, Homo sapien
tgaatgaacctagagcggtgacatg

SEQ ID NO: 4953707 - DNA, 25 bp, Homo sapien
ctttggttgatgttaaggccctcca

SEQ ID NO: 4953708 - DNA, 25 bp, Homo sapien
tgtgctcccaacatagctttgcaga

SEQ ID NO: 4953709 - DNA, 25 bp, Homo sapien
gagctgagctaagcgatgcctaaat

SEQ ID NO: 4953710 - DNA, 25 bp, Homo sapien
cagtgatcctgacagtgaggttgac

SEQ ID NO: 4953711 - DNA, 25 bp, Homo sapien
tgtttcttcaagctcttctggcagt

SEQ ID NO: 4953712 - DNA, 25 bp, Homo sapien
gaaaactgtaaaatccgagtcatac

SEQ ID NO: 4953713 - DNA, 25 bp, Homo sapien
tggaaggattataatcaagtgtgtg

SEQ ID NO: 4953714 - DNA, 25 bp, Homo sapien
tagatgccaaatggcaaggacgttt

SEQ ID NO: 4953715 - DNA, 25 bp, Homo sapien
tatgccagaaggcttgatttccttt

SEQ ID NO: 4953716 - DNA, 25 bp, Homo sapien
gattcgaagacatttcattggagga

SEQ ID NO: 4953717 - DNA, 25 bp, Homo sapien
gcgcccaccaccacactcggctttt

SEQ ID NO: 4953718 - DNA, 25 bp, Homo sapien
cccaccaccacactcggcttttttg

SEQ ID NO: 4953719 - DNA, 25 bp, Homo sapien
cgcccaccaccacactcggcttttt

SEQ ID NO: 4953720 - DNA, 25 bp, Homo sapien
ggcgcccaccaccacactcggcttt

SEQ ID NO: 4953721 - DNA, 25 bp, Homo sapien
accacgcctggacgggtagccagta

SEQ ID NO: 4953722 - DNA, 25 bp, Homo sapien
gcctggacgggtagccagtagtttc

SEQ ID NO: 4953723 - DNA, 25 bp, Homo sapien
ccaccacgcctggacgggtagccag

SEQ ID NO: 4953724 - DNA, 25 bp, Homo sapien
acgcctggacgggtagccagtagtt

SEQ ID NO: 4953725 - DNA, 25 bp, Homo sapien
tttttctaggactaagctggatctc

SEQ ID NO: 4953726 - DNA, 25 bp, Homo sapien
ggctctctaaggcttcagctccttt

SEQ ID NO: 4953727 - DNA, 25 bp, Homo sapien
cacattcctgttacaggctctctaa

SEQ ID NO: 4953728 - DNA, 25 bp, Homo sapien
gatctcaagtaaacactagagaggg

SEQ ID NO: 4953729 - DNA, 25 bp, Homo sapien
gacacgtgggcgacttattgaccaa

SEQ ID NO: 4953730 - DNA, 25 bp, Homo sapien
taggctctacagagagcggctgcag

SEQ ID NO: 4953731 - DNA, 25 bp, Homo sapien
ctgcagagctcacccggctggcagg

SEQ ID NO: 4953732 - DNA, 25 bp, Homo sapien
caggagccaccgaggccggacacgt

SEQ ID NO: 4953733 - DNA, 25 bp, Homo sapien
gcaccaatcccgctcgtcggcctct

SEQ ID NO: 4953734 - DNA, 25 bp, Homo sapien
aatcccgctcgtcggcctctttctc

SEQ ID NO: 4953735 - DNA, 25 bp, Homo sapien
agaaaacaaaggcccggctccatca

SEQ ID NO: 4953736 - DNA, 25 bp, Homo sapien
tccagtccccacagcgttcgcgctc

SEQ ID NO: 4953737 - DNA, 25 bp, Homo sapien
gggacctcagctagatgcagcctcc

SEQ ID NO: 4953738 - DNA, 25 bp, Homo sapien
tggcgggacctcagctagatgcagc

SEQ ID NO: 4953739 - DNA, 25 bp, Homo sapien
cagtggtggcgggacctcagctaga

SEQ ID NO: 4953740 - DNA, 25 bp, Homo sapien
tggtggcgggacctcagctagatgc

SEQ ID NO: 4953741 - DNA, 25 bp, Homo sapien
ggcacgtgtcaccaatgcatggcta

SEQ ID NO: 4953742 - DNA, 25 bp, Homo sapien
tgtggcatcacccaaaagccgagag

SEQ ID NO: 4953743 - DNA, 25 bp, Homo sapien
tgtggcctgaacatgactcactcca

SEQ ID NO: 4953744 - DNA, 25 bp, Homo sapien
taaatctacgggcatatgccgcctg

SEQ ID NO: 4953745 - DNA, 25 bp, Homo sapien
tagccttaatagtgagagaaactct

SEQ ID NO: 4953746 - DNA, 25 bp, Homo sapien
cattagggcttggactatggaaaaa

SEQ ID NO: 4953747 - DNA, 25 bp, Homo sapien
gcagcatgcctcatactgagttgtt

SEQ ID NO: 4953748 - DNA, 25 bp, Homo sapien
tggtatgttgcaatcagccggccac

SEQ ID NO: 4953749 - DNA, 25 bp, Homo sapien
taccaaacagtgattgccgacattt

SEQ ID NO: 4953750 - DNA, 25 bp, Homo sapien
tgggcattgggatggcagagttttt

SEQ ID NO: 4953751 - DNA, 25 bp, Homo sapien
cagtgattgccgacatttgccggag

SEQ ID NO: 4953752 - DNA, 25 bp, Homo sapien
gacatttgccggagaatgggcattg

SEQ ID NO: 4953753 - DNA, 25 bp, Homo sapien
aaaaagacgggtgaggctaagtgtg

SEQ ID NO: 4953754 - DNA, 25 bp, Homo sapien
tcctgcagccaagtactttaaagtt

SEQ ID NO: 4953755 - DNA, 25 bp, Homo sapien
gtgaggctaagtgtggtgtctcata

SEQ ID NO: 4953756 - DNA, 25 bp, Homo sapien
ttcctgcagccaagtactttaaagt

SEQ ID NO: 4953757 - DNA, 25 bp, Homo sapien
caaaggggcagtgaagattcggaaa

SEQ ID NO: 4953758 - DNA, 25 bp, Homo sapien
gaaagggcaagcagtgaccctgatg

SEQ ID NO: 4953759 - DNA, 25 bp, Homo sapien
tgccaccaatatgccagctgtcaaa

SEQ ID NO: 4953760 - DNA, 25 bp, Homo sapien
gctgcctgttataataaccagcagg

SEQ ID NO: 4953761 - DNA, 25 bp, Homo sapien
ttatcatagaatccccgactcagac

SEQ ID NO: 4953762 - DNA, 25 bp, Homo sapien
gtcgtttgtcatgcttttggctgcc

SEQ ID NO: 4953763 - DNA, 25 bp, Homo sapien
gtcagctgatttcccgaagccacta

SEQ ID NO: 4953764 - DNA, 25 bp, Homo sapien
tccggacgcagaatcttcccaactg

SEQ ID NO: 4953765 - DNA, 25 bp, Homo sapien
tgaaaggaaagggtgcctcatccca

SEQ ID NO: 4953766 - DNA, 25 bp, Homo sapien
aatttgtccatagctgaagtccacc

SEQ ID NO: 4953767 - DNA, 25 bp, Homo sapien
ccacggtttaggtgaagtcgctgca

SEQ ID NO: 4953768 - DNA, 25 bp, Homo sapien
taatccctaaaagaacgctgtgtgg

SEQ ID NO: 4953769 - DNA, 25 bp, Homo sapien
tctctggagaggctaggtaaagact

SEQ ID NO: 4953770 - DNA, 25 bp, Homo sapien
gaaaaggcattgttacgtccacctg

SEQ ID NO: 4953771 - DNA, 25 bp, Homo sapien
tgatgtcgacatgccccacaattcc

SEQ ID NO: 4953772 - DNA, 25 bp, Homo sapien
gacagtgcgcatggaatgaatcaac

SEQ ID NO: 4953773 - DNA, 25 bp, Homo sapien
ggaaggataagtggttatgaatttg

SEQ ID NO: 4953774 - DNA, 25 bp, Homo sapien
actggaaggataagtggttatgaat

SEQ ID NO: 4953775 - DNA, 25 bp, Homo sapien
aactggaaggataagtggttatgaa

SEQ ID NO: 4953776 - DNA, 25 bp, Homo sapien
ctggaaggataagtggttatgaatt

SEQ ID NO: 4953777 - DNA, 25 bp, Homo sapien
tttttggtgagacacagattcactc

SEQ ID NO: 4953778 - DNA, 25 bp, Homo sapien
ttggtgagacacagattcactcttg

SEQ ID NO: 4953779 - DNA, 25 bp, Homo sapien
ctttgttaagcatctttctttttct

SEQ ID NO: 4953780 - DNA, 25 bp, Homo sapien
tggtgagacacagattcactcttgt

SEQ ID NO: 4953781 - DNA, 25 bp, Homo sapien
cgtgttgccaaggctgatctcaaaa

SEQ ID NO: 4953782 - DNA, 25 bp, Homo sapien
tgttgccaaggctgatctcaaaact

SEQ ID NO: 4953783 - DNA, 25 bp, Homo sapien
tgccaaggctgatctcaaaactcct

SEQ ID NO: 4953784 - DNA, 25 bp, Homo sapien
ttgccaaggctgatctcaaaactcc

SEQ ID NO: 4953785 - DNA, 25 bp, Homo sapien
ttaattattgagacggagccttgcg

SEQ ID NO: 4953786 - DNA, 25 bp, Homo sapien
tattgagacggagccttgcgctgtc

SEQ ID NO: 4953787 - DNA, 25 bp, Homo sapien
gagacggagccttgcgctgtcaccg

SEQ ID NO: 4953788 - DNA, 25 bp, Homo sapien
cggagccttgcgctgtcaccgaggc

SEQ ID NO: 4953789 - DNA, 25 bp, Homo sapien
ggcacttaagagatgcttaacaaac

SEQ ID NO: 4953790 - DNA, 25 bp, Homo sapien
tcatcatggcacttaagagatgctt

SEQ ID NO: 4953791 - DNA, 25 bp, Homo sapien
gagccacgacggccggctgttatgc

SEQ ID NO: 4953792 - DNA, 25 bp, Homo sapien
gccggctgttatgctcatcatggca

SEQ ID NO: 4953793 - DNA, 25 bp, Homo sapien
tgtgagatcaccaagacaccaagcc

SEQ ID NO: 4953794 - DNA, 25 bp, Homo sapien
tgagtcacatcagaagccaaacttg

SEQ ID NO: 4953795 - DNA, 25 bp, Homo sapien
gagctagcctcataccacttcagtt

SEQ ID NO: 4953796 - DNA, 25 bp, Homo sapien
gataaaaaatacaggcagggcccag

SEQ ID NO: 4953797 - DNA, 25 bp, Homo sapien
aatcgcttgaatctaggaggctgca

SEQ ID NO: 4953798 - DNA, 25 bp, Homo sapien
tcgcttgaatctaggaggctgcagg

SEQ ID NO: 4953799 - DNA, 25 bp, Homo sapien
ttgaatctaggaggctgcaggttgc

SEQ ID NO: 4953800 - DNA, 25 bp, Homo sapien
gcttgaatctaggaggctgcaggtt

SEQ ID NO: 4953801 - DNA, 25 bp, Homo sapien
cttacagagaaggttgacgaggatg

SEQ ID NO: 4953802 - DNA, 25 bp, Homo sapien
aaatagagcacagctatgttttgag

SEQ ID NO: 4953803 - DNA, 25 bp, Homo sapien
ttaagcaagggcaagcttaccaggc

SEQ ID NO: 4953804 - DNA, 25 bp, Homo sapien
tagagcacagctatgttttgagttc

SEQ ID NO: 4953805 - DNA, 25 bp, Homo sapien
ttaagatgaagtcccaagagtcgca

SEQ ID NO: 4953806 - DNA, 25 bp, Homo sapien
cccaagagtcgcaagaacatgcagt

SEQ ID NO: 4953807 - DNA, 25 bp, Homo sapien
agtcccaagagtcgcaagaacatgc

SEQ ID NO: 4953808 - DNA, 25 bp, Homo sapien
gatgaagtcccaagagtcgcaagaa

SEQ ID NO: 4953809 - DNA, 25 bp, Homo sapien
gcagtgacaaaggatctgagatccc

SEQ ID NO: 4953810 - DNA, 25 bp, Homo sapien
caaaggatctgagatcccatcagag

SEQ ID NO: 4953811 - DNA, 25 bp, Homo sapien
aagagagacagcagctacaagtcta

SEQ ID NO: 4953812 - DNA, 25 bp, Homo sapien
tacaagtctataggcagtgacaaag

SEQ ID NO: 4953813 - DNA, 25 bp, Homo sapien
ccttgttaacttgacagggtgaagc

SEQ ID NO: 4953814 - DNA, 25 bp, Homo sapien
tccttgttaacttgacagggtgaag

SEQ ID NO: 4953815 - DNA, 25 bp, Homo sapien
taaaactagcacaggtctcccgctg

SEQ ID NO: 4953816 - DNA, 25 bp, Homo sapien
tggctcacccacatgattagcagag

SEQ ID NO: 4953817 - DNA, 25 bp, Homo sapien
tggtttccttttgagccgcgtcata

SEQ ID NO: 4953818 - DNA, 25 bp, Homo sapien
gccgcgtcataaggaggcaatctgt

SEQ ID NO: 4953819 - DNA, 25 bp, Homo sapien
tctgtgacaaatgtggaaagctact

SEQ ID NO: 4953820 - DNA, 25 bp, Homo sapien
tgctgagcacaagatcagagaggtt

SEQ ID NO: 4953821 - DNA, 25 bp, Homo sapien
cattgcaaactcgatagatgcaggg

SEQ ID NO: 4953822 - DNA, 25 bp, Homo sapien
aagctacttgcttggaggtactggg

SEQ ID NO: 4953823 - DNA, 25 bp, Homo sapien
ggccaatccagtccttcagaccctg

SEQ ID NO: 4953824 - DNA, 25 bp, Homo sapien
tactccctacggcactagtctacag

SEQ ID NO: 4953825 - DNA, 25 bp, Homo sapien
ctgggatgtagccaggacttggtct

SEQ ID NO: 4953826 - DNA, 25 bp, Homo sapien
tctgaaacttgtatcttacgtgaac

SEQ ID NO: 4953827 - DNA, 25 bp, Homo sapien
ccccaggactggcacgacaggccca

SEQ ID NO: 4953828 - DNA, 25 bp, Homo sapien
gcccccaggactggcacgacaggcc

SEQ ID NO: 4953829 - DNA, 25 bp, Homo sapien
tcgcccccaggactggcacgacagg

SEQ ID NO: 4953830 - DNA, 25 bp, Homo sapien
ctcgcccccaggactggcacgacag

SEQ ID NO: 4953831 - DNA, 25 bp, Homo sapien
tgattcgattccacagtgatcctgt

SEQ ID NO: 4953832 - DNA, 25 bp, Homo sapien
gtactgatcggtgcgtggaattcca

SEQ ID NO: 4953833 - DNA, 25 bp, Homo sapien
ccaccacttctgattcgattccaca

SEQ ID NO: 4953834 - DNA, 25 bp, Homo sapien
cagtactgatcggtgcgtggaattc

SEQ ID NO: 4953835 - DNA, 25 bp, Homo sapien
tgggtagaacagagaaagccgagat

SEQ ID NO: 4953836 - DNA, 25 bp, Homo sapien
caagggtcaaccaatatagtcagac

SEQ ID NO: 4953837 - DNA, 25 bp, Homo sapien
tgccctcacagcaaaagggaactcc

SEQ ID NO: 4953838 - DNA, 25 bp, Homo sapien
tgctgttggcccactagcacagtcc

SEQ ID NO: 4953839 - DNA, 25 bp, Homo sapien
gagttggcaaccagccagtagggtg

SEQ ID NO: 4953840 - DNA, 25 bp, Homo sapien
ggatgcggatggcatggccacccat

SEQ ID NO: 4953841 - DNA, 25 bp, Homo sapien
tctccggtgacgtgttggtacactc

SEQ ID NO: 4953842 - DNA, 25 bp, Homo sapien
agtagggtgtgccattctccactcc

SEQ ID NO: 4953843 - DNA, 25 bp, Homo sapien
gaaacagcttccagagggaacctgc

SEQ ID NO: 4953844 - DNA, 25 bp, Homo sapien
ctgttctttatactgggattccatg

SEQ ID NO: 4953845 - DNA, 25 bp, Homo sapien
aactggctgagaccgagaccgggcc

SEQ ID NO: 4953846 - DNA, 25 bp, Homo sapien
gaaatagattcctacaaaatgtgct

SEQ ID NO: 4953847 - DNA, 25 bp, Homo sapien
tgtcagccagtgcaaacacgaacgg

SEQ ID NO: 4953848 - DNA, 25 bp, Homo sapien
ctaatggatgggaaggaactagccc

SEQ ID NO: 4953849 - DNA, 25 bp, Homo sapien
cacgatctaggcctttgcaaagaga

SEQ ID NO: 4953850 - DNA, 25 bp, Homo sapien
taaagcaatgcaaagccaggaaggc

SEQ ID NO: 4953851 - DNA, 25 bp, Homo sapien
gccgtttttgtagatctcggccatg

SEQ ID NO: 4953852 - DNA, 25 bp, Homo sapien
ttggagacgctgtaggaattgtatc

SEQ ID NO: 4953853 - DNA, 25 bp, Homo sapien
agagaaagctccctccacggggccg

SEQ ID NO: 4953854 - DNA, 25 bp, Homo sapien
catgatgtccttctcgctattggag

SEQ ID NO: 4953855 - DNA, 25 bp, Homo sapien
caggatacctcaagactccaggaca

SEQ ID NO: 4953856 - DNA, 25 bp, Homo sapien
gccacggtcagccagtcactgattt

SEQ ID NO: 4953857 - DNA, 25 bp, Homo sapien
tcagaaatgggagaacggagcaatg

SEQ ID NO: 4953858 - DNA, 25 bp, Homo sapien
gctcccctgaagaactaaggacagg

SEQ ID NO: 4953859 - DNA, 25 bp, Homo sapien
ctgtttgtaggtcgggctgtagcca

SEQ ID NO: 4953860 - DNA, 25 bp, Homo sapien
caggctcacagatcttgctacactt

SEQ ID NO: 4953861 - DNA, 25 bp, Homo sapien
tcctgtttgtaggtcgggctgtagc

SEQ ID NO: 4953862 - DNA, 25 bp, Homo sapien
tcttgctacacttgggggtatctcc

SEQ ID NO: 4953863 - DNA, 25 bp, Homo sapien
agggagggatggagtacggtctgca

SEQ ID NO: 4953864 - DNA, 25 bp, Homo sapien
ggagggatggagtacggtctgcacc

SEQ ID NO: 4953865 - DNA, 25 bp, Homo sapien
ggccgggagccgttgacgtggtgct

SEQ ID NO: 4953866 - DNA, 25 bp, Homo sapien
cgttgacgtggtgctcacagggagg

SEQ ID NO: 4953867 - DNA, 25 bp, Homo sapien
ttccaagcttcagcaggatagccac

SEQ ID NO: 4953868 - DNA, 25 bp, Homo sapien
tacatgggattcatagaggccacca

SEQ ID NO: 4953869 - DNA, 25 bp, Homo sapien
ctacatgggattcatagaggccacc

SEQ ID NO: 4953870 - DNA, 25 bp, Homo sapien
tgtgtgctacccaagtgcccgaggc

SEQ ID NO: 4953871 - DNA, 25 bp, Homo sapien
tgcagcaagtggtgcgagcagacct

SEQ ID NO: 4953872 - DNA, 25 bp, Homo sapien
gggacgctccctagataagcacagc

SEQ ID NO: 4953873 - DNA, 25 bp, Homo sapien
cagcttgcagggaataaccgccagc

SEQ ID NO: 4953874 - DNA, 25 bp, Homo sapien
gagcagacgctaaacttccctaagg

SEQ ID NO: 4953875 - DNA, 25 bp, Homo sapien
gattctcaactgagcagacgctaaa

SEQ ID NO: 4953876 - DNA, 25 bp, Homo sapien
tccgggtagaacactgattctcaac

SEQ ID NO: 4953877 - DNA, 25 bp, Homo sapien
caggctacgagtgcccttccgggta

SEQ ID NO: 4953878 - DNA, 25 bp, Homo sapien
tgaaatgagaatcgccagtgattcc

SEQ ID NO: 4953879 - DNA, 25 bp, Homo sapien
caccaccttgttgttaaggtggagc

SEQ ID NO: 4953880 - DNA, 25 bp, Homo sapien
aggcatttcggatctgcagccgcca

SEQ ID NO: 4953881 - DNA, 25 bp, Homo sapien
cagtgaacaccgctactgcggaacc

SEQ ID NO: 4953882 - DNA, 25 bp, Homo sapien
ccacgctgacgtgcgcattggtgtg

SEQ ID NO: 4953883 - DNA, 25 bp, Homo sapien
gccgacacctccacgctgacgtgcg

SEQ ID NO: 4953884 - DNA, 25 bp, Homo sapien
gatgcagatccggtcagagatggct

SEQ ID NO: 4953885 - DNA, 25 bp, Homo sapien
gtgagcaggtcctccgccgacacct

SEQ ID NO: 4953886 - DNA, 25 bp, Homo sapien
gggcacctcagaccttgtaggcaac

SEQ ID NO: 4953887 - DNA, 25 bp, Homo sapien
aaagcaagagaagcacccccgtgaa

SEQ ID NO: 4953888 - DNA, 25 bp, Homo sapien
ggcgtgatgagccacttgccccact

SEQ ID NO: 4953889 - DNA, 25 bp, Homo sapien
tgcctcaacgatttgcccaactcag

SEQ ID NO: 4953890 - DNA, 25 bp, Homo sapien
cacctgtacacgtggacttgcaatc

SEQ ID NO: 4953891 - DNA, 25 bp, Homo sapien
taacttgccttgtcagagttgtccc

SEQ ID NO: 4953892 - DNA, 25 bp, Homo sapien
ctttcttgaagcagagtagcagtga

SEQ ID NO: 4953893 - DNA, 25 bp, Homo sapien
ctggtatttgcggacgggccagcat

SEQ ID NO: 4953894 - DNA, 25 bp, Homo sapien
cccgtgcatcgaagcttgcaggcag

SEQ ID NO: 4953895 - DNA, 25 bp, Homo sapien
tgttcccgtgcatcgaagcttgcag

SEQ ID NO: 4953896 - DNA, 25 bp, Homo sapien
ttcccgtgcatcgaagcttgcaggc

SEQ ID NO: 4953897 - DNA, 25 bp, Homo sapien
attgttcccgtgcatcgaagcttgc

SEQ ID NO: 4953898 - DNA, 25 bp, Homo sapien
aagattgagtctgcccacatagtgg

SEQ ID NO: 4953899 - DNA, 25 bp, Homo sapien
caagacatgccgaagaaggctgcag

SEQ ID NO: 4953900 - DNA, 25 bp, Homo sapien
tcatccccattgtgcagaaggcagt

SEQ ID NO: 4953901 - DNA, 25 bp, Homo sapien
acatctgcggctgagacaccttgga

SEQ ID NO: 4953902 - DNA, 25 bp, Homo sapien
tgtcggcagccctgggcagcatgag

SEQ ID NO: 4953903 - DNA, 25 bp, Homo sapien
ctcaagcggtgtcggcagccctggg

SEQ ID NO: 4953904 - DNA, 25 bp, Homo sapien
ggtgtcggcagccctgggcagcatg

SEQ ID NO: 4953905 - DNA, 25 bp, Homo sapien
tcggcagccctgggcagcatgagcc

SEQ ID NO: 4953906 - DNA, 25 bp, Homo sapien
gcctgccactcacattacagcggtg

SEQ ID NO: 4953907 - DNA, 25 bp, Homo sapien
ctgcggacgccagagaggccttcac

SEQ ID NO: 4953908 - DNA, 25 bp, Homo sapien
actcacattacagcggtgcagagga

SEQ ID NO: 4953909 - DNA, 25 bp, Homo sapien
aaaccaacgcctgccactcacatta

SEQ ID NO: 4953910 - DNA, 25 bp, Homo sapien
tcttcaagtagctcatgtccacgtt

SEQ ID NO: 4953911 - DNA, 25 bp, Homo sapien
gcccacccaggaaggtaccacatag

SEQ ID NO: 4953912 - DNA, 25 bp, Homo sapien
tagctcatgtccacgttgtagaagt

SEQ ID NO: 4953913 - DNA, 25 bp, Homo sapien
cacccaggaaggtaccacatagcct

SEQ ID NO: 4953914 - DNA, 25 bp, Homo sapien
gggacatacataggacgcagcccca

SEQ ID NO: 4953915 - DNA, 25 bp, Homo sapien
ggtccagagccgacatgactcaggg

SEQ ID NO: 4953916 - DNA, 25 bp, Homo sapien
cccattcctggagtcagtgtgcaca

SEQ ID NO: 4953917 - DNA, 25 bp, Homo sapien
ccactgactgaagggtctcccggga

SEQ ID NO: 4953918 - DNA, 25 bp, Homo sapien
tgctccgggcattggccaacaccag

SEQ ID NO: 4953919 - DNA, 25 bp, Homo sapien
ttgttgacatagttgaccagctcat

SEQ ID NO: 4953920 - DNA, 25 bp, Homo sapien
tagttgaccagctcatccgacaggg

SEQ ID NO: 4953921 - DNA, 25 bp, Homo sapien
ctgccacgtggtattccgtttgttg

SEQ ID NO: 4953922 - DNA, 25 bp, Homo sapien
cagacaaacaagctcggtgtgggct

SEQ ID NO: 4953923 - DNA, 25 bp, Homo sapien
aaagcaatacatgtctcctgggcgc

SEQ ID NO: 4953924 - DNA, 25 bp, Homo sapien
gagctgaggtgtctatgggatcccc

SEQ ID NO: 4953925 - DNA, 25 bp, Homo sapien
gatgccccagccgtttgatcttgca

SEQ ID NO: 4953926 - DNA, 25 bp, Homo sapien
gctgggaagttctttcagccccgca

SEQ ID NO: 4953927 - DNA, 25 bp, Homo sapien
tggaggacaacctgccgtggccatt

SEQ ID NO: 4953928 - DNA, 25 bp, Homo sapien
acaggcagctgccatgtccagtggc

SEQ ID NO: 4953929 - DNA, 25 bp, Homo sapien
acttcactagcaggcgacttccctg

SEQ ID NO: 4953930 - DNA, 25 bp, Homo sapien
tatggtatccaggttggggctcaag

SEQ ID NO: 4953931 - DNA, 25 bp, Homo sapien
tcctcccctatggtatccaggttgg

SEQ ID NO: 4953932 - DNA, 25 bp, Homo sapien
gttggggctcaaggggccgccagcg

SEQ ID NO: 4953933 - DNA, 25 bp, Homo sapien
cctatggtatccaggttggggctca

SEQ ID NO: 4953934 - DNA, 25 bp, Homo sapien
ttccaggacaaatagggaccttgcg

SEQ ID NO: 4953935 - DNA, 25 bp, Homo sapien
caggacaaatagggaccttgcgatc

SEQ ID NO: 4953936 - DNA, 25 bp, Homo sapien
tccaggacaaatagggaccttgcga

SEQ ID NO: 4953937 - DNA, 25 bp, Homo sapien
tttccaggacaaatagggaccttgc

SEQ ID NO: 4953938 - DNA, 25 bp, Homo sapien
ctcggtctcatcagtcccctgatga

SEQ ID NO: 4953939 - DNA, 25 bp, Homo sapien
ctgtagccccgaagcaactgaaaac

SEQ ID NO: 4953940 - DNA, 25 bp, Homo sapien
agctgtagccccgaagcaactgaaa

SEQ ID NO: 4953941 - DNA, 25 bp, Homo sapien
tgaacgggcaccagaggcccatctg

SEQ ID NO: 4953942 - DNA, 25 bp, Homo sapien
accaggttggccactcacaggtcct

SEQ ID NO: 4953943 - DNA, 25 bp, Homo sapien
ctgaaccaggttggccactcacagg

SEQ ID NO: 4953944 - DNA, 25 bp, Homo sapien
tgaaccaggttggccactcacaggt

SEQ ID NO: 4953945 - DNA, 25 bp, Homo sapien
aaccaggttggccactcacaggtcc

SEQ ID NO: 4953946 - DNA, 25 bp, Homo sapien
ccacgcaagctgctctccataggcc

SEQ ID NO: 4953947 - DNA, 25 bp, Homo sapien
tgccaatcatctatgcaaaccaggt

SEQ ID NO: 4953948 - DNA, 25 bp, Homo sapien
cacgcaagctgctctccataggcct

SEQ ID NO: 4953949 - DNA, 25 bp, Homo sapien
ccaatcatctatgcaaaccaggtac

SEQ ID NO: 4953950 - DNA, 25 bp, Homo sapien
tatacataggacagccaacgtttgc

SEQ ID NO: 4953951 - DNA, 25 bp, Homo sapien
ctcagtcactgggagcgtgaaaagc

SEQ ID NO: 4953952 - DNA, 25 bp, Homo sapien
caacgtttgcatcccagagtcatca

SEQ ID NO: 4953953 - DNA, 25 bp, Homo sapien
gcgtgaaaagccatctccttataca

SEQ ID NO: 4953954 - DNA, 25 bp, Homo sapien
gatcgcttacatctgggtggctgag

SEQ ID NO: 4953955 - DNA, 25 bp, Homo sapien
gaaccagatcgcttacatctgggtg

SEQ ID NO: 4953956 - DNA, 25 bp, Homo sapien
ggtgggaaccagatcgcttacatct

SEQ ID NO: 4953957 - DNA, 25 bp, Homo sapien
tgaggtgggaaccagatcgcttaca

SEQ ID NO: 4953958 - DNA, 25 bp, Homo sapien
agtctgctaaatcagcaccacatgg

SEQ ID NO: 4953959 - DNA, 25 bp, Homo sapien
aaatcactgacagacatcccaaggc

SEQ ID NO: 4953960 - DNA, 25 bp, Homo sapien
ttcccaatccaaccaagagcaacag

SEQ ID NO: 4953961 - DNA, 25 bp, Homo sapien
tatctgttacccctaaaatgggtgc

SEQ ID NO: 4953962 - DNA, 25 bp, Homo sapien
gcctaaccagttggaaacagggctg

SEQ ID NO: 4953963 - DNA, 25 bp, Homo sapien
gctgtcctgagccaacacccaggag

SEQ ID NO: 4953964 - DNA, 25 bp, Homo sapien
tgtcctgagccaacacccaggagag

SEQ ID NO: 4953965 - DNA, 25 bp, Homo sapien
tgtctggcctgcgttgccacctggg

SEQ ID NO: 4953966 - DNA, 25 bp, Homo sapien
gagctggcgggttctaagtcaccag

SEQ ID NO: 4953967 - DNA, 25 bp, Homo sapien
cgggttctaagtcaccagcaccaga

SEQ ID NO: 4953968 - DNA, 25 bp, Homo sapien
tctttgggaaagctacacagggtgg

SEQ ID NO: 4953969 - DNA, 25 bp, Homo sapien
tgaccaaagacgaagggaagcctct

SEQ ID NO: 4953970 - DNA, 25 bp, Homo sapien
tcttggtttcgctgtctggtttctc

SEQ ID NO: 4953971 - DNA, 25 bp, Homo sapien
cttcctgtttatggatttaacaccg

SEQ ID NO: 4953972 - DNA, 25 bp, Homo sapien
gatttaacaccgtgcggcttcctcc

SEQ ID NO: 4953973 - DNA, 25 bp, Homo sapien
caatcgcccattcgcctcttggttt

SEQ ID NO: 4953974 - DNA, 25 bp, Homo sapien
gatcttgcgcagaaagttggccagg

SEQ ID NO: 4953975 - DNA, 25 bp, Homo sapien
ccaggcaaatccttcgcaatgaggg

SEQ ID NO: 4953976 - DNA, 25 bp, Homo sapien
taaaccgaaaatagatgccggcaga

SEQ ID NO: 4953977 - DNA, 25 bp, Homo sapien
gattatgtcggcagtttggcccgga

SEQ ID NO: 4953978 - DNA, 25 bp, Homo sapien
gctggcgggcggagctgttttctgc

SEQ ID NO: 4953979 - DNA, 25 bp, Homo sapien
ctgagggcgcagaggaacccgtctc

SEQ ID NO: 4953980 - DNA, 25 bp, Homo sapien
cgcggtcccaggcagcagtctccgg

SEQ ID NO: 4953981 - DNA, 25 bp, Homo sapien
ttttctcgccgacgcttcggagcgc

SEQ ID NO: 4953982 - DNA, 25 bp, Homo sapien
ggtggccccgggtccccagcactca

SEQ ID NO: 4953983 - DNA, 25 bp, Homo sapien
tgcggtggccccgggtccccagcac

SEQ ID NO: 4953984 - DNA, 25 bp, Homo sapien
gctgcggtggccccgggtccccagc

SEQ ID NO: 4953985 - DNA, 25 bp, Homo sapien
gtggccccgggtccccagcactcac

SEQ ID NO: 4953986 - DNA, 25 bp, Homo sapien
gttgccggagcggttgccggagccc

SEQ ID NO: 4953987 - DNA, 25 bp, Homo sapien
agcggagcggttggcgttgccggag

SEQ ID NO: 4953988 - DNA, 25 bp, Homo sapien
cgctgcagccgagagcctgcagccc

SEQ ID NO: 4953989 - DNA, 25 bp, Homo sapien
ccagcctgcgcgcagcggagcggtt

SEQ ID NO: 4953990 - DNA, 25 bp, Homo sapien
ggtctaagggctttatggatttcat

SEQ ID NO: 4953991 - DNA, 25 bp, Homo sapien
ttagataccagggagatcatccatg

SEQ ID NO: 4953992 - DNA, 25 bp, Homo sapien
tggcatgctcgctgtagatggccat

SEQ ID NO: 4953993 - DNA, 25 bp, Homo sapien
cattatcattggcatgctcgctgta

SEQ ID NO: 4953994 - DNA, 25 bp, Homo sapien
gaaatcattttcaaaaatgtcctca

SEQ ID NO: 4953995 - DNA, 25 bp, Homo sapien
aaatcattttcaaaaatgtcctcat

SEQ ID NO: 4953996 - DNA, 25 bp, Homo sapien
aaatgccaaggtcatagtgttgatc

SEQ ID NO: 4953997 - DNA, 25 bp, Homo sapien
tgggccagagataacaaatgccaag

SEQ ID NO: 4953998 - DNA, 25 bp, Homo sapien
gggccagagataacaaatgccaagg

SEQ ID NO: 4953999 - DNA, 25 bp, Homo sapien
ggtcatagtgttgatcccaccactc

SEQ ID NO: 4954000 - DNA, 25 bp, Homo sapien
ttaaacattcgagccaagacactga

SEQ ID NO: 4954001 - DNA, 25 bp, Homo sapien
cgcagcgcccgagggcttctttaaa

SEQ ID NO: 4954002 - DNA, 25 bp, Homo sapien
gcctggcatgtcagtctcaacgcag

SEQ ID NO: 4954003 - DNA, 25 bp, Homo sapien
caatgggaatgctataaacgtgggt

SEQ ID NO: 4954004 - DNA, 25 bp, Homo sapien
taagtcaccacggagcgtttctcca

SEQ ID NO: 4954005 - DNA, 25 bp, Homo sapien
ggagcgtttctccaccgagctccag

SEQ ID NO: 4954006 - DNA, 25 bp, Homo sapien
cactgtaagtcaccacggagcgttt

SEQ ID NO: 4954007 - DNA, 25 bp, Homo sapien
tctgggccactgtaagtcaccacgg

SEQ ID NO: 4954008 - DNA, 25 bp, Homo sapien
tcagctcggccacgtctgagcttct

SEQ ID NO: 4954009 - DNA, 25 bp, Homo sapien
caggctcagctcggccacgtctgag

SEQ ID NO: 4954010 - DNA, 25 bp, Homo sapien
tgcccttctacccaggccttgcagt

SEQ ID NO: 4954011 - DNA, 25 bp, Homo sapien
cggccacgtctgagcttcttgccat

SEQ ID NO: 4954012 - DNA, 25 bp, Homo sapien
ctggttgtcgatgataccttgacca

SEQ ID NO: 4954013 - DNA, 25 bp, Homo sapien
cgatgataccttgaccacactttaa

SEQ ID NO: 4954014 - DNA, 25 bp, Homo sapien
cacactttaatttcggtacttattg

SEQ ID NO: 4954015 - DNA, 25 bp, Homo sapien
taatttcggtacttattgtcttata

SEQ ID NO: 4954016 - DNA, 25 bp, Homo sapien
acagaaacacgggttcatggtggct

SEQ ID NO: 4954017 - DNA, 25 bp, Homo sapien
ccacagaaacacgggttcatggtgg

SEQ ID NO: 4954018 - DNA, 25 bp, Homo sapien
aacacgggttcatggtggctgaatg

SEQ ID NO: 4954019 - DNA, 25 bp, Homo sapien
agaaacacgggttcatggtggctga

SEQ ID NO: 4954020 - DNA, 25 bp, Homo sapien
aaagagagacatctgagtcagacgg

SEQ ID NO: 4954021 - DNA, 25 bp, Homo sapien
atctgagtcagacggcctgcatagg

SEQ ID NO: 4954022 - DNA, 25 bp, Homo sapien
caaagagagacatctgagtcagacg

SEQ ID NO: 4954023 - DNA, 25 bp, Homo sapien
agacatctgagtcagacggcctgca

SEQ ID NO: 4954024 - DNA, 25 bp, Homo sapien
cagacaggaggatgagcgggttccc

SEQ ID NO: 4954025 - DNA, 25 bp, Homo sapien
ggaggtgggactcagggctgacaga

SEQ ID NO: 4954026 - DNA, 25 bp, Homo sapien
aggatgagcgggttccccagcacag

SEQ ID NO: 4954027 - DNA, 25 bp, Homo sapien
tgggactcagggctgacagacagga

SEQ ID NO: 4954028 - DNA, 25 bp, Homo sapien
tgggtctgtagagtttggacagctt

SEQ ID NO: 4954029 - DNA, 25 bp, Homo sapien
gtctgtagagtttggacagcttttg

SEQ ID NO: 4954030 - DNA, 25 bp, Homo sapien
gggtctgtagagtttggacagcttt

SEQ ID NO: 4954031 - DNA, 25 bp, Homo sapien
tgtgggtctgtagagtttggacagc

SEQ ID NO: 4954032 - DNA, 25 bp, Homo sapien
gcgcagcctccgcagggcactttgt

SEQ ID NO: 4954033 - DNA, 25 bp, Homo sapien
catgagattccactgttctgctgcg

SEQ ID NO: 4954034 - DNA, 25 bp, Homo sapien
cgcagcctccgcagggcactttgta

SEQ ID NO: 4954035 - DNA, 25 bp, Homo sapien
attccactgttctgctgcgcagcct

SEQ ID NO: 4954036 - DNA, 25 bp, Homo sapien
ctaaaaccagcaaacaactgctagg

SEQ ID NO: 4954037 - DNA, 25 bp, Homo sapien
aaaaccagcaaacaactgctaggtg

SEQ ID NO: 4954038 - DNA, 25 bp, Homo sapien
tgctaggtgagagccacagttgaag

SEQ ID NO: 4954039 - DNA, 25 bp, Homo sapien
actgctaggtgagagccacagttga

SEQ ID NO: 4954040 - DNA, 25 bp, Homo sapien
tccacagtctttatgatggtgaata

SEQ ID NO: 4954041 - DNA, 25 bp, Homo sapien
agtctttatgatggtgaatagtaac

SEQ ID NO: 4954042 - DNA, 25 bp, Homo sapien
acagtctttatgatggtgaatagta

SEQ ID NO: 4954043 - DNA, 25 bp, Homo sapien
tgagagatttccacagtctttatga

SEQ ID NO: 4954044 - DNA, 25 bp, Homo sapien
gaatccaacaggctgaggaaaaagg

SEQ ID NO: 4954045 - DNA, 25 bp, Homo sapien
tccaacaggctgaggaaaaaggaca

SEQ ID NO: 4954046 - DNA, 25 bp, Homo sapien
tgcagctgggaatccaacaggctga

SEQ ID NO: 4954047 - DNA, 25 bp, Homo sapien
agctgggaatccaacaggctgagga

SEQ ID NO: 4954048 - DNA, 25 bp, Homo sapien
gcaaaacggaccaagaaagatatct

SEQ ID NO: 4954049 - DNA, 25 bp, Homo sapien
cggaccaagaaagatatctgtgtca

SEQ ID NO: 4954050 - DNA, 25 bp, Homo sapien
aaaacggaccaagaaagatatctgt

SEQ ID NO: 4954051 - DNA, 25 bp, Homo sapien
aacggaccaagaaagatatctgtgt

SEQ ID NO: 4954052 - DNA, 25 bp, Homo sapien
aagtacacgggagtgtggagcgggg

SEQ ID NO: 4954053 - DNA, 25 bp, Homo sapien
cagcaaagcgaggactggctgcagt

SEQ ID NO: 4954054 - DNA, 25 bp, Homo sapien
aggaacagggacagcaaagcgagga

SEQ ID NO: 4954055 - DNA, 25 bp, Homo sapien
gaacagggacagcaaagcgaggact

SEQ ID NO: 4954056 - DNA, 25 bp, Homo sapien
ggacaggaacagggacagcaaagcg

SEQ ID NO: 4954057 - DNA, 25 bp, Homo sapien
gagaaattctcagacacctgtgaga

SEQ ID NO: 4954058 - DNA, 25 bp, Homo sapien
ggagaaattctcagacacctgtgag

SEQ ID NO: 4954059 - DNA, 25 bp, Homo sapien
ctttgagagtcccaagaggagaaat

SEQ ID NO: 4954060 - DNA, 25 bp, Homo sapien
agaggagaaattctcagacacctgt

SEQ ID NO: 4954061 - DNA, 25 bp, Homo sapien
gctaatcagtggctcaggaagaatc

SEQ ID NO: 4954062 - DNA, 25 bp, Homo sapien
aatgggtacatctaggaacaggtgc

SEQ ID NO: 4954063 - DNA, 25 bp, Homo sapien
gagatccagctgttcaatactaaag

SEQ ID NO: 4954064 - DNA, 25 bp, Homo sapien
aactctgtccctaatgggtgggccg

SEQ ID NO: 4954065 - DNA, 25 bp, Homo sapien
gagggtgtaaggctttcgataatct

SEQ ID NO: 4954066 - DNA, 25 bp, Homo sapien
caataaacgcctttccctagtccag

SEQ ID NO: 4954067 - DNA, 25 bp, Homo sapien
taatctgccaaatccaataaacgcc

SEQ ID NO: 4954068 - DNA, 25 bp, Homo sapien
acagggcctcgtgagtgtacacgga

SEQ ID NO: 4954069 - DNA, 25 bp, Homo sapien
tcaaggtcttttatccctctgggag

SEQ ID NO: 4954070 - DNA, 25 bp, Homo sapien
ggtcttttatccctctgggagtgag

SEQ ID NO: 4954071 - DNA, 25 bp, Homo sapien
aaggtcttttatccctctgggagtg

SEQ ID NO: 4954072 - DNA, 25 bp, Homo sapien
tcttttatccctctgggagtgagct

SEQ ID NO: 4954073 - DNA, 25 bp, Homo sapien
agttcctctcttgtctagctcccca

SEQ ID NO: 4954074 - DNA, 25 bp, Homo sapien
tctcttgtctagctccccagttgag

SEQ ID NO: 4954075 - DNA, 25 bp, Homo sapien
cctctcttgtctagctccccagttg

SEQ ID NO: 4954076 - DNA, 25 bp, Homo sapien
tctcagttcctctcttgtctagctc

SEQ ID NO: 4954077 - DNA, 25 bp, Homo sapien
gagagagttgtgtcttttctgcacc

SEQ ID NO: 4954078 - DNA, 25 bp, Homo sapien
accccactgtcaaacttagagcagc

SEQ ID NO: 4954079 - DNA, 25 bp, Homo sapien
gctggagtgaccatggccttagaaa

SEQ ID NO: 4954080 - DNA, 25 bp, Homo sapien
aacttagagcagcatctccaccagg

SEQ ID NO: 4954081 - DNA, 25 bp, Homo sapien
cagctgaagcatgataccctcggag

SEQ ID NO: 4954082 - DNA, 25 bp, Homo sapien
ggaggctcgcctcatggaccatgat

SEQ ID NO: 4954083 - DNA, 25 bp, Homo sapien
agacccgaagggatcagctgaagca

SEQ ID NO: 4954084 - DNA, 25 bp, Homo sapien
gataccctcggaggctcgcctcatg

SEQ ID NO: 4954085 - DNA, 25 bp, Homo sapien
gcaggtgcgaactttgactccatca

SEQ ID NO: 4954086 - DNA, 25 bp, Homo sapien
caatccacctgtatcctggcggaca

SEQ ID NO: 4954087 - DNA, 25 bp, Homo sapien
aacatacggctttctggctagtgca

SEQ ID NO: 4954088 - DNA, 25 bp, Homo sapien
tggcggacacccgaagaaacatacg

SEQ ID NO: 4954089 - DNA, 25 bp, Homo sapien
gatcaccaggaaaaagagtaatgca

SEQ ID NO: 4954090 - DNA, 25 bp, Homo sapien
gaaggcagtaagatcaccaggaaaa

SEQ ID NO: 4954091 - DNA, 25 bp, Homo sapien
tcaccaggaaaaagagtaatgcaga

SEQ ID NO: 4954092 - DNA, 25 bp, Homo sapien
agatcaccaggaaaaagagtaatgc

SEQ ID NO: 4954093 - DNA, 25 bp, Homo sapien
gggaggctcctttatagagctgggc

SEQ ID NO: 4954094 - DNA, 25 bp, Homo sapien
gttggaactcccagtggtgtctgcc

SEQ ID NO: 4954095 - DNA, 25 bp, Homo sapien
aaaagttcactgatggactttgttc

SEQ ID NO: 4954096 - DNA, 25 bp, Homo sapien
ggaaaagttcactgatggactttgt

SEQ ID NO: 4954097 - DNA, 25 bp, Homo sapien
tggaaaagttcactgatggactttg

SEQ ID NO: 4954098 - DNA, 25 bp, Homo sapien
aagttcactgatggactttgttctc

SEQ ID NO: 4954099 - DNA, 25 bp, Homo sapien
tgtagttaagccctgcctatgcggt

SEQ ID NO: 4954100 - DNA, 25 bp, Homo sapien
tatagcaaagcaagatcagcatggt

SEQ ID NO: 4954101 - DNA, 25 bp, Homo sapien
tatagcctgtagctgaaccctaggg

SEQ ID NO: 4954102 - DNA, 25 bp, Homo sapien
gaggtggcatcactctgctgctaag

SEQ ID NO: 4954103 - DNA, 25 bp, Homo sapien
catttcactctcatagcattcaagt

SEQ ID NO: 4954104 - DNA, 25 bp, Homo sapien
actctcatagcattcaagtctgcag

SEQ ID NO: 4954105 - DNA, 25 bp, Homo sapien
acatttcactctcatagcattcaag

SEQ ID NO: 4954106 - DNA, 25 bp, Homo sapien
ttcactctcatagcattcaagtctg

SEQ ID NO: 4954107 - DNA, 25 bp, Homo sapien
caaacacaacaaggagaggcttcat

SEQ ID NO: 4954108 - DNA, 25 bp, Homo sapien
acaaacacaacaaggagaggcttca

SEQ ID NO: 4954109 - DNA, 25 bp, Homo sapien
tttcacctctcagtctaaaggccac

SEQ ID NO: 4954110 - DNA, 25 bp, Homo sapien
ccatatctatacgtttgtgagacca

SEQ ID NO: 4954111 - DNA, 25 bp, Homo sapien
taaaggccacaacttttctgctgac

SEQ ID NO: 4954112 - DNA, 25 bp, Homo sapien
cagtaaagtgtacaatcggataagt

SEQ ID NO: 4954113 - DNA, 25 bp, Homo sapien
taagacatgtttttgctcctggagt

SEQ ID NO: 4954114 - DNA, 25 bp, Homo sapien
tgttaattattcgtagataagagag

SEQ ID NO: 4954115 - DNA, 25 bp, Homo sapien
tcctggagtctgaagaagatggagt

SEQ ID NO: 4954116 - DNA, 25 bp, Homo sapien
tttcacctgaccatctaaacatgca

SEQ ID NO: 4954117 - DNA, 25 bp, Homo sapien
catgttcatcagcattgcacttcag

SEQ ID NO: 4954118 - DNA, 25 bp, Homo sapien
ttctgaaggacattcatcattagaa

SEQ ID NO: 4954119 - DNA, 25 bp, Homo sapien
tattctgaaggacattcatcattag

SEQ ID NO: 4954120 - DNA, 25 bp, Homo sapien
ttcagtctgcaatgataatattctg

SEQ ID NO: 4954121 - DNA, 25 bp, Homo sapien
tatgacacaatatatttacttttta

SEQ ID NO: 4954122 - DNA, 25 bp, Homo sapien
gagaaaaagtggagatgctgaataa

SEQ ID NO: 4954123 - DNA, 25 bp, Homo sapien
taacttctggagttaaattcttgaa

SEQ ID NO: 4954124 - DNA, 25 bp, Homo sapien
gatggaatctagtgtaagtggaggg

SEQ ID NO: 4954125 - DNA, 25 bp, Homo sapien
taaagacaaacgatgctttcttcta

SEQ ID NO: 4954126 - DNA, 25 bp, Homo sapien
tgttccttttgcaattggcctacac

SEQ ID NO: 4954127 - DNA, 25 bp, Homo sapien
ccttggttgtccatagataaagatt

SEQ ID NO: 4954128 - DNA, 25 bp, Homo sapien
gaattcatcgttatgggctaagcag

SEQ ID NO: 4954129 - DNA, 25 bp, Homo sapien
tgcttggtactctctcagcttccta

SEQ ID NO: 4954130 - DNA, 25 bp, Homo sapien
caccaggaatgcatgtgcacagaaa

SEQ ID NO: 4954131 - DNA, 25 bp, Homo sapien
ggtatggccctcgtgcaatatggct

SEQ ID NO: 4954132 - DNA, 25 bp, Homo sapien
ttagacttataacatccacaactgt

SEQ ID NO: 4954133 - DNA, 25 bp, Homo sapien
tatgataaccctatagcaatgcaag

SEQ ID NO: 4954134 - DNA, 25 bp, Homo sapien
ctgtctcccaggtgcaaacgattct

SEQ ID NO: 4954135 - DNA, 25 bp, Homo sapien
atctcggctgactgcaacctctgtc

SEQ ID NO: 4954136 - DNA, 25 bp, Homo sapien
aggctggctgaagtacagtggtgcg

SEQ ID NO: 4954137 - DNA, 25 bp, Homo sapien
cctctgtctcccaggtgcaaacgat

SEQ ID NO: 4954138 - DNA, 25 bp, Homo sapien
ggtcctttggaacatatcccacgaa

SEQ ID NO: 4954139 - DNA, 25 bp, Homo sapien
tgataggtccgtcggtcctttggaa

SEQ ID NO: 4954140 - DNA, 25 bp, Homo sapien
cacacatcaacaccgtcatgtgagt

SEQ ID NO: 4954141 - DNA, 25 bp, Homo sapien
aggcactggactccacacatcaaca

SEQ ID NO: 4954142 - DNA, 25 bp, Homo sapien
aagaaatcactgctgatcctcgtac

SEQ ID NO: 4954143 - DNA, 25 bp, Homo sapien
tcaaagaaatcactgctgatcctcg

SEQ ID NO: 4954144 - DNA, 25 bp, Homo sapien
cctcaaagaaatcactgctgatcct

SEQ ID NO: 4954145 - DNA, 25 bp, Homo sapien
tcctcctcaaagaaatcactgctga

SEQ ID NO: 4954146 - DNA, 25 bp, Homo sapien
gacactgcttcatgggttcttcaaa

SEQ ID NO: 4954147 - DNA, 25 bp, Homo sapien
cttcaaagagagtattcccatagga

SEQ ID NO: 4954148 - DNA, 25 bp, Homo sapien
gcttcatgggttcttcaaagagagt

SEQ ID NO: 4954149 - DNA, 25 bp, Homo sapien
cagcctgacactgcttcatgggttc

SEQ ID NO: 4954150 - DNA, 25 bp, Homo sapien
ctgagttcagtgtccaggtgaccca

SEQ ID NO: 4954151 - DNA, 25 bp, Homo sapien
gagttcagtgtccaggtgacccaag

SEQ ID NO: 4954152 - DNA, 25 bp, Homo sapien
gttcagtgtccaggtgacccaagct

SEQ ID NO: 4954153 - DNA, 25 bp, Homo sapien
tgagttcagtgtccaggtgacccaa

SEQ ID NO: 4954154 - DNA, 25 bp, Homo sapien
gaagagtaggcgtaggaaagcacaa

SEQ ID NO: 4954155 - DNA, 25 bp, Homo sapien
gaatcaggaagtcgaagccacacag

SEQ ID NO: 4954156 - DNA, 25 bp, Homo sapien
caggtgagaggcaccgacagaatcc

SEQ ID NO: 4954157 - DNA, 25 bp, Homo sapien
ggacttgccgctcaattaccaactt

SEQ ID NO: 4954158 - DNA, 25 bp, Homo sapien
ccctggacctccgcgcccgcgtcac

SEQ ID NO: 4954159 - DNA, 25 bp, Homo sapien
ctcgcagtcctcaggttctgcgctt

SEQ ID NO: 4954160 - DNA, 25 bp, Homo sapien
tcgcagtcctcaggttctgcgcttc

SEQ ID NO: 4954161 - DNA, 25 bp, Homo sapien
cgtcctcgcagtcctcaggttctgc

SEQ ID NO: 4954162 - DNA, 25 bp, Homo sapien
tcctcgcagtcctcaggttctgcgc

SEQ ID NO: 4954163 - DNA, 25 bp, Homo sapien
gggctgggcatcccggcgggcgcgg

SEQ ID NO: 4954164 - DNA, 25 bp, Homo sapien
gcggggctgggcatcccggcgggcg

SEQ ID NO: 4954165 - DNA, 25 bp, Homo sapien
cgcggggctgggcatcccggcgggc

SEQ ID NO: 4954166 - DNA, 25 bp, Homo sapien
ctgacgccctctgccggccgcttgc

SEQ ID NO: 4954167 - DNA, 25 bp, Homo sapien
gacacgccgggtactggcctgcccg

SEQ ID NO: 4954168 - DNA, 25 bp, Homo sapien
acacgccgggtactggcctgcccgg

SEQ ID NO: 4954169 - DNA, 25 bp, Homo sapien
cacgccgggtactggcctgcccggc

SEQ ID NO: 4954170 - DNA, 25 bp, Homo sapien
acgccgggtactggcctgcccggct

SEQ ID NO: 4954171 - DNA, 25 bp, Homo sapien
gaaaggacgccccgagatggtggac

SEQ ID NO: 4954172 - DNA, 25 bp, Homo sapien
aaggacgccccgagatggtggacat

SEQ ID NO: 4954173 - DNA, 25 bp, Homo sapien
aagagaaaggacgccccgagatggt

SEQ ID NO: 4954174 - DNA, 25 bp, Homo sapien
gagaagagaaaggacgccccgagat

SEQ ID NO: 4954175 - DNA, 25 bp, Homo sapien
cccgaggctgctcaaaactcgtgga

SEQ ID NO: 4954176 - DNA, 25 bp, Homo sapien
gctcaaaactcgtggagaattccgc

SEQ ID NO: 4954177 - DNA, 25 bp, Homo sapien
tgggaaacccgaggctgctcaaaac

SEQ ID NO: 4954178 - DNA, 25 bp, Homo sapien
ggtggtgggaaacccgaggctgctc

SEQ ID NO: 4954179 - DNA, 25 bp, Homo sapien
ggctgggatgaacttatcgtagttc

SEQ ID NO: 4954180 - DNA, 25 bp, Homo sapien
tgaacttatcgtagttctcatagac

SEQ ID NO: 4954181 - DNA, 25 bp, Homo sapien
gatgaacttatcgtagttctcatag

SEQ ID NO: 4954182 - DNA, 25 bp, Homo sapien
ctgggatgaacttatcgtagttctc

SEQ ID NO: 4954183 - DNA, 25 bp, Homo sapien
agcccggatctgctgcaccatgtcc

SEQ ID NO: 4954184 - DNA, 25 bp, Homo sapien
tgtcgctgtctagagcccggatctg

SEQ ID NO: 4954185 - DNA, 25 bp, Homo sapien
cggatctgctgcaccatgtccgtct

SEQ ID NO: 4954186 - DNA, 25 bp, Homo sapien
cagggtttgcatgtcgctgtctaga

SEQ ID NO: 4954187 - DNA, 25 bp, Homo sapien
caccgactccccttccgagaggccg

SEQ ID NO: 4954188 - DNA, 25 bp, Homo sapien
tgggccagaggactctctctaggca

SEQ ID NO: 4954189 - DNA, 25 bp, Homo sapien
cggtcgaagtgcgccccgttccgat

SEQ ID NO: 4954190 - DNA, 25 bp, Homo sapien
cagctgggccagaggactctctcta

SEQ ID NO: 4954191 - DNA, 25 bp, Homo sapien
gccgacactccgtgagcctcctcct

SEQ ID NO: 4954192 - DNA, 25 bp, Homo sapien
tcctcctcaggcccttcttgggagt

SEQ ID NO: 4954193 - DNA, 25 bp, Homo sapien
ctcctcaggcccttcttgggagtcc

SEQ ID NO: 4954194 - DNA, 25 bp, Homo sapien
tccgccgacactccgtgagcctcct

SEQ ID NO: 4954195 - DNA, 25 bp, Homo sapien
ggaagccaaagacgtccctggagcc

SEQ ID NO: 4954196 - DNA, 25 bp, Homo sapien
aagccaaagacgtccctggagccgc

SEQ ID NO: 4954197 - DNA, 25 bp, Homo sapien
gatggaagccaaagacgtccctgga

SEQ ID NO: 4954198 - DNA, 25 bp, Homo sapien
tggaagccaaagacgtccctggagc

SEQ ID NO: 4954199 - DNA, 25 bp, Homo sapien
aagccaaactccgaattggtgactc

SEQ ID NO: 4954200 - DNA, 25 bp, Homo sapien
gccaaactccgaattggtgactcct

SEQ ID NO: 4954201 - DNA, 25 bp, Homo sapien
atggaagccaaactccgaattggtg

SEQ ID NO: 4954202 - DNA, 25 bp, Homo sapien
tggaagccaaactccgaattggtga

SEQ ID NO: 4954203 - DNA, 25 bp, Homo sapien
tgagattccactgttctgctgcgca

SEQ ID NO: 4954204 - DNA, 25 bp, Homo sapien
tacatgaaaaggttcagcatggggg

SEQ ID NO: 4954205 - DNA, 25 bp, Homo sapien
cgcagcctccgcagggcactttgta

SEQ ID NO: 4954206 - DNA, 25 bp, Homo sapien
attccactgttctgctgcgcagcct

SEQ ID NO: 4954207 - DNA, 25 bp, Homo sapien
gctgggaatccaacaggctgaggaa

SEQ ID NO: 4954208 - DNA, 25 bp, Homo sapien
tataacacaatccaactgtgcagct

SEQ ID NO: 4954209 - DNA, 25 bp, Homo sapien
tccaacaggctgaggaaaaaggaca

SEQ ID NO: 4954210 - DNA, 25 bp, Homo sapien
ttataacacaatccaactgtgcagc

SEQ ID NO: 4954211 - DNA, 25 bp, Homo sapien
gcaaaaaggaccaagaaatacatct

SEQ ID NO: 4954212 - DNA, 25 bp, Homo sapien
ggatagtgcagagggccacagatgt

SEQ ID NO: 4954213 - DNA, 25 bp, Homo sapien
gaccaagaaatacatctgtgtcagg

SEQ ID NO: 4954214 - DNA, 25 bp, Homo sapien
aatacatctgtgtcaggcagcccgc

SEQ ID NO: 4954215 - DNA, 25 bp, Homo sapien
ggaaccgtggctgaggtgaaaccca

SEQ ID NO: 4954216 - DNA, 25 bp, Homo sapien
cttgggaaccgtggctgaggtgaaa

SEQ ID NO: 4954217 - DNA, 25 bp, Homo sapien
gaaccgtggctgaggtgaaacccat

SEQ ID NO: 4954218 - DNA, 25 bp, Homo sapien
tgggaaccgtggctgaggtgaaacc

SEQ ID NO: 4954219 - DNA, 25 bp, Homo sapien
catgttcatcagcattgcacttcag

SEQ ID NO: 4954220 - DNA, 25 bp, Homo sapien
atgttcatcagcattgcacttcagt

SEQ ID NO: 4954221 - DNA, 25 bp, Homo sapien
attctgaaggacattcatcattaga

SEQ ID NO: 4954222 - DNA, 25 bp, Homo sapien
ttctgaaggacattcatcattagaa

SEQ ID NO: 4954223 - DNA, 25 bp, Homo sapien
tattctgaaggacattcatcattag

SEQ ID NO: 4954224 - DNA, 25 bp, Homo sapien
aatgagggaatcttgaatcgtgaag

SEQ ID NO: 4954225 - DNA, 25 bp, Homo sapien
tggaggaaaggcataattacttaca

SEQ ID NO: 4954226 - DNA, 25 bp, Homo sapien
taagggaatcttgaatcatgaatat

SEQ ID NO: 4954227 - DNA, 25 bp, Homo sapien
tgaatattatataaatgagggaatc

SEQ ID NO: 4954228 - DNA, 25 bp, Homo sapien
tcaaggaaaggactccaaagacgaa

SEQ ID NO: 4954229 - DNA, 25 bp, Homo sapien
ttctgtctttcttggaggaactgtg

SEQ ID NO: 4954230 - DNA, 25 bp, Homo sapien
caaagacgaaaaacaagaccctcat

SEQ ID NO: 4954231 - DNA, 25 bp, Homo sapien
ggaactgtggacatcaaggaaagga

SEQ ID NO: 4954232 - DNA, 25 bp, Homo sapien
tcagagtaacatgccgttcatgagt

SEQ ID NO: 4954233 - DNA, 25 bp, Homo sapien
agtaacatgccgttcatgagtgatt

SEQ ID NO: 4954234 - DNA, 25 bp, Homo sapien
gagtaacatgccgttcatgagtgat

SEQ ID NO: 4954235 - DNA, 25 bp, Homo sapien
cagagtaacatgccgttcatgagtg

SEQ ID NO: 4954236 - DNA, 25 bp, Homo sapien
aatggtatcatctagtgtgctgcat

SEQ ID NO: 4954237 - DNA, 25 bp, Homo sapien
tcatctagtgtgctgcatagtttgt

SEQ ID NO: 4954238 - DNA, 25 bp, Homo sapien
ccttcattacatataccaatggtat

SEQ ID NO: 4954239 - DNA, 25 bp, Homo sapien
agcaatacactgtttttgtcctgga

SEQ ID NO: 4954240 - DNA, 25 bp, Homo sapien
ccatccactaccgagttggaatcaa

SEQ ID NO: 4954241 - DNA, 25 bp, Homo sapien
ccactaccgagttggaatcaagaac

SEQ ID NO: 4954242 - DNA, 25 bp, Homo sapien
cttccatccactaccgagttggaat

SEQ ID NO: 4954243 - DNA, 25 bp, Homo sapien
tcacttccatccactaccgagttgg

SEQ ID NO: 4954244 - DNA, 25 bp, Homo sapien
agaacagaaataagggaatggagtt

SEQ ID NO: 4954245 - DNA, 25 bp, Homo sapien
cagaaataagggaatggagtttcat

SEQ ID NO: 4954246 - DNA, 25 bp, Homo sapien
acagaaataagggaatggagtttca

SEQ ID NO: 4954247 - DNA, 25 bp, Homo sapien
gagaacagaaataagggaatggagt

SEQ ID NO: 4954248 - DNA, 25 bp, Homo sapien
tagtggattgatgtgaagaccaaat

SEQ ID NO: 4954249 - DNA, 25 bp, Homo sapien
gaagaccaaatatatgcaacatcat

SEQ ID NO: 4954250 - DNA, 25 bp, Homo sapien
cttttcaatggtcacaaagcagtta

SEQ ID NO: 4954251 - DNA, 25 bp, Homo sapien
aaagcagttagtggattgatgtgaa

SEQ ID NO: 4954252 - DNA, 25 bp, Homo sapien
ctgtgattaatgttcgcatgctgaa

SEQ ID NO: 4954253 - DNA, 25 bp, Homo sapien
gtgattaatgttcgcatgctgaatg

SEQ ID NO: 4954254 - DNA, 25 bp, Homo sapien
tgcagtaggctatgctctggtgtgg

SEQ ID NO: 4954255 - DNA, 25 bp, Homo sapien
taatgttcgcatgctgaatgcagta

SEQ ID NO: 4954256 - DNA, 25 bp, Homo sapien
cagcaatcctcacggctgaagaaag

SEQ ID NO: 4954257 - DNA, 25 bp, Homo sapien
gcaatcctcacggctgaagaaagaa

SEQ ID NO: 4954258 - DNA, 25 bp, Homo sapien
ggacagcaatcctcacggctgaaga

SEQ ID NO: 4954259 - DNA, 25 bp, Homo sapien
gacagcaatcctcacggctgaagaa

SEQ ID NO: 4954260 - DNA, 25 bp, Homo sapien
atagagggaatcaatcgacttttgt

SEQ ID NO: 4954261 - DNA, 25 bp, Homo sapien
gaatcaatcgacttttgtatactga

SEQ ID NO: 4954262 - DNA, 25 bp, Homo sapien
tgaggctggatacccccgctgggcc

SEQ ID NO: 4954263 - DNA, 25 bp, Homo sapien
tcaagctcgtcttccctccacatag

SEQ ID NO: 4954264 - DNA, 25 bp, Homo sapien
ggctggaacagaaatactgaacttc

SEQ ID NO: 4954265 - DNA, 25 bp, Homo sapien
tttccatcagtgaaatccgcttcta

SEQ ID NO: 4954266 - DNA, 25 bp, Homo sapien
gtgaaatccgcttctaggtcagaaa

SEQ ID NO: 4954267 - DNA, 25 bp, Homo sapien
cttctaggtcagaaaaaactgcgag

SEQ ID NO: 4954268 - DNA, 25 bp, Homo sapien
cttcctttgagtccctgtgagtgtg

SEQ ID NO: 4954269 - DNA, 25 bp, Homo sapien
ccagcggatcctgagtctcttcctt

SEQ ID NO: 4954270 - DNA, 25 bp, Homo sapien
tccactgcacgttaaatgtttccaa

SEQ ID NO: 4954271 - DNA, 25 bp, Homo sapien
ctttccggccaaagcttagagttgt

SEQ ID NO: 4954272 - DNA, 25 bp, Homo sapien
tgagcatagtatggtctttggaacc

SEQ ID NO: 4954273 - DNA, 25 bp, Homo sapien
catctcgggcctgatgagcagagtc

SEQ ID NO: 4954274 - DNA, 25 bp, Homo sapien
cttcataggccaagtatgcgcaacc

SEQ ID NO: 4954275 - DNA, 25 bp, Homo sapien
tcagaggcgatggtggagtgagcat

SEQ ID NO: 4954276 - DNA, 25 bp, Homo sapien
tgcggacaccctgtaactgggtctt

SEQ ID NO: 4954277 - DNA, 25 bp, Homo sapien
ctgcctgcggacaccctgtaactgg

SEQ ID NO: 4954278 - DNA, 25 bp, Homo sapien
caccctgtaactgggtcttccaaat

SEQ ID NO: 4954279 - DNA, 25 bp, Homo sapien
cctgtaactgggtcttccaaattca

SEQ ID NO: 4954280 - DNA, 25 bp, Homo sapien
tgttgcctgtgacatcggagaatct

SEQ ID NO: 4954281 - DNA, 25 bp, Homo sapien
gctgagacatgtatggctgcatgtc

SEQ ID NO: 4954282 - DNA, 25 bp, Homo sapien
taatgtccgttgtgacaactccacc

SEQ ID NO: 4954283 - DNA, 25 bp, Homo sapien
aagagaagtaatgtccgttgtgaca

SEQ ID NO: 4954284 - DNA, 25 bp, Homo sapien
tgcctggatatccagggcgatatcc

SEQ ID NO: 4954285 - DNA, 25 bp, Homo sapien
atatccaggtaagggtcgaaggtgt

SEQ ID NO: 4954286 - DNA, 25 bp, Homo sapien
ggcgatatccaggtaagggtcgaag

SEQ ID NO: 4954287 - DNA, 25 bp, Homo sapien
cgatatccaggtaagggtcgaaggt

SEQ ID NO: 4954288 - DNA, 25 bp, Homo sapien
cagggagagaagtccgctggatttc

SEQ ID NO: 4954289 - DNA, 25 bp, Homo sapien
aaaagtggttgaactgccactcacc

SEQ ID NO: 4954290 - DNA, 25 bp, Homo sapien
ctcagggagagaagtccgctggatt

SEQ ID NO: 4954291 - DNA, 25 bp, Homo sapien
gttttgaaaagtggttgaactgcca

SEQ ID NO: 4954292 - DNA, 25 bp, Homo sapien
tcgcccgcaacaaggatcacaaggt

SEQ ID NO: 4954293 - DNA, 25 bp, Homo sapien
gcccgcaacaaggatcacaaggttt

SEQ ID NO: 4954294 - DNA, 25 bp, Homo sapien
gtcgcccgcaacaaggatcacaagg

SEQ ID NO: 4954295 - DNA, 25 bp, Homo sapien
ccgcaacaaggatcacaaggttttt

SEQ ID NO: 4954296 - DNA, 25 bp, Homo sapien
agcagggagctttgctgttcaggat

SEQ ID NO: 4954297 - DNA, 25 bp, Homo sapien
attgatgaatcacaagtacgttggg

SEQ ID NO: 4954298 - DNA, 25 bp, Homo sapien
tgatgaatcacaagtacgttgggag

SEQ ID NO: 4954299 - DNA, 25 bp, Homo sapien
aatcacaagtacgttgggaggcagg

SEQ ID NO: 4954300 - DNA, 25 bp, Homo sapien
tgaatcacaagtacgttgggaggca

SEQ ID NO: 4954301 - DNA, 25 bp, Homo sapien
aaggtatttcctatcttctggagcc

SEQ ID NO: 4954302 - DNA, 25 bp, Homo sapien
gatttgagatctccaatacgctcca

SEQ ID NO: 4954303 - DNA, 25 bp, Homo sapien
tggtcctcccttgcagagaagcgag

SEQ ID NO: 4954304 - DNA, 25 bp, Homo sapien
tttgagagtgctcccgggacagcat

SEQ ID NO: 4954305 - DNA, 25 bp, Homo sapien
gtttgagagtgctcccgggacagca

SEQ ID NO: 4954306 - DNA, 25 bp, Homo sapien
gaaaagtggttgaactgccactcac

SEQ ID NO: 4954307 - DNA, 25 bp, Homo sapien
ctcagggagagaagtccgctggatt

SEQ ID NO: 4954308 - DNA, 25 bp, Homo sapien
ggagccaaatcatcacagaggtcga

SEQ ID NO: 4954309 - DNA, 25 bp, Homo sapien
caggtctcctgctactcagaggaag

SEQ ID NO: 4954310 - DNA, 25 bp, Homo sapien
gattccagcataactcaaaactcca

SEQ ID NO: 4954311 - DNA, 25 bp, Homo sapien
acacatggcgattacaggtccctct

SEQ ID NO: 4954312 - DNA, 25 bp, Homo sapien
aaagtcttatttgagacaagtccct

SEQ ID NO: 4954313 - DNA, 25 bp, Homo sapien
aagtaaacttcttcgacacatggcg

SEQ ID NO: 4954314 - DNA, 25 bp, Homo sapien
catgataagtggtgttggaattggc

SEQ ID NO: 4954315 - DNA, 25 bp, Homo sapien
gggttcttgataatctgacatgata

SEQ ID NO: 4954316 - DNA, 25 bp, Homo sapien
gaattggcattaaaatccaccatgc

SEQ ID NO: 4954317 - DNA, 25 bp, Homo sapien
ttcatccttcttcggcaggcaccaa

SEQ ID NO: 4954318 - DNA, 25 bp, Homo sapien
attgagacaatgaccttccacagga

SEQ ID NO: 4954319 - DNA, 25 bp, Homo sapien
caaattgagacaatgaccttccaca

SEQ ID NO: 4954320 - DNA, 25 bp, Homo sapien
gacaaattgagacaatgaccttcca

SEQ ID NO: 4954321 - DNA, 25 bp, Homo sapien
caaacaccagacaaattgagacaat

SEQ ID NO: 4954322 - DNA, 25 bp, Homo sapien
ggttggaaggcctgctgacgacccc

SEQ ID NO: 4954323 - DNA, 25 bp, Homo sapien
tcatgattcaggttggaaggcctgc

SEQ ID NO: 4954324 - DNA, 25 bp, Homo sapien
aggttggaaggcctgctgacgaccc

SEQ ID NO: 4954325 - DNA, 25 bp, Homo sapien
attcaggttggaaggcctgctgacg

SEQ ID NO: 4954326 - DNA, 25 bp, Homo sapien
caggcaaggtctgctgtgcggaggc

SEQ ID NO: 4954327 - DNA, 25 bp, Homo sapien
ggcaggcaaggtctgctgtgcggag

SEQ ID NO: 4954328 - DNA, 25 bp, Homo sapien
tctgctgtgcggaggctgccggtcg

SEQ ID NO: 4954329 - DNA, 25 bp, Homo sapien
aaggtctgctgtgcggaggctgccg

SEQ ID NO: 4954330 - DNA, 25 bp, Homo sapien
tggtccaagttcggttgcggctggc

SEQ ID NO: 4954331 - DNA, 25 bp, Homo sapien
ggtccaagttcggttgcggctggcg

SEQ ID NO: 4954332 - DNA, 25 bp, Homo sapien
cgcaggacgtttgtcttgtgcctgg

SEQ ID NO: 4954333 - DNA, 25 bp, Homo sapien
aggacgtttgtcttgtgcctggggt

SEQ ID NO: 4954334 - DNA, 25 bp, Homo sapien
cgtttgtcttgtgcctggggtctga

SEQ ID NO: 4954335 - DNA, 25 bp, Homo sapien
gacgtttgtcttgtgcctggggtct

SEQ ID NO: 4954336 - DNA, 25 bp, Homo sapien
tcctttggtccaagacttgaggagg

SEQ ID NO: 4954337 - DNA, 25 bp, Homo sapien
tgtgtcggcttcaccacgaggagag

SEQ ID NO: 4954338 - DNA, 25 bp, Homo sapien
tcggcttcaccacgaggagaggctc

SEQ ID NO: 4954339 - DNA, 25 bp, Homo sapien
ggctgctgtgtgtcggcttcaccac

SEQ ID NO: 4954340 - DNA, 25 bp, Homo sapien
tgtggaccggcattggccggcttgc

SEQ ID NO: 4954341 - DNA, 25 bp, Homo sapien
ttgttgtgtggaccggcattggccg

SEQ ID NO: 4954342 - DNA, 25 bp, Homo sapien
tgtgtggaccggcattggccggctt

SEQ ID NO: 4954343 - DNA, 25 bp, Homo sapien
tggaccggcattggccggcttgcaa

SEQ ID NO: 4954344 - DNA, 25 bp, Homo sapien
gacgggaagctgaaaggaaatcaac

SEQ ID NO: 4954345 - DNA, 25 bp, Homo sapien
agctgaaaggaaatcaaccagggtg

SEQ ID NO: 4954346 - DNA, 25 bp, Homo sapien
cgcagacgggaagctgaaaggaaat

SEQ ID NO: 4954347 - DNA, 25 bp, Homo sapien
ctgaaaggaaatcaaccagggtgac

SEQ ID NO: 4954348 - DNA, 25 bp, Homo sapien
gatccttttcgatttggcagcagct

SEQ ID NO: 4954349 - DNA, 25 bp, Homo sapien
ggatccttttcgatttggcagcagc

SEQ ID NO: 4954350 - DNA, 25 bp, Homo sapien
gtggatccttttcgatttggcagca

SEQ ID NO: 4954351 - DNA, 25 bp, Homo sapien
tccttttcgatttggcagcagcttc

SEQ ID NO: 4954352 - DNA, 25 bp, Homo sapien
aagggccctgcagtttttgcacttg

SEQ ID NO: 4954353 - DNA, 25 bp, Homo sapien
aggtcggtggaaccagggctgcctt

SEQ ID NO: 4954354 - DNA, 25 bp, Homo sapien
cctggtacttctgaccgtgtggcca

SEQ ID NO: 4954355 - DNA, 25 bp, Homo sapien
ttctgaccgtgtggccaagggccct

SEQ ID NO: 4954356 - DNA, 25 bp, Homo sapien
cttggcccaactggggccctccgct

SEQ ID NO: 4954357 - DNA, 25 bp, Homo sapien
ggtcttctcccacacgtggagacgg

SEQ ID NO: 4954358 - DNA, 25 bp, Homo sapien
tggtcttctcccacacgtggagacg

SEQ ID NO: 4954359 - DNA, 25 bp, Homo sapien
gtcttctcccacacgtggagacgga

SEQ ID NO: 4954360 - DNA, 25 bp, Homo sapien
gctggcgctgagatgggcaggtgct

SEQ ID NO: 4954361 - DNA, 25 bp, Homo sapien
ggctggcgctgagatgggcaggtgc

SEQ ID NO: 4954362 - DNA, 25 bp, Homo sapien
ctgaaattacacgtctactttcttt

SEQ ID NO: 4954363 - DNA, 25 bp, Homo sapien
tgaaattacacgtctactttctttc

SEQ ID NO: 4954364 - DNA, 25 bp, Homo sapien
cctcttgcctagcagggttggtgga

SEQ ID NO: 4954365 - DNA, 25 bp, Homo sapien
cagggttggtggacctgggtgtctc

SEQ ID NO: 4954366 - DNA, 25 bp, Homo sapien
ctgggtgtctctctggacacatcct

SEQ ID NO: 4954367 - DNA, 25 bp, Homo sapien
cacccctcttgcctagcagggttgg

SEQ ID NO: 4954368 - DNA, 25 bp, Homo sapien
gaacttcaagtggtaggagcagaac

SEQ ID NO: 4954369 - DNA, 25 bp, Homo sapien
aacttcaagtggtaggagcagaacc

SEQ ID NO: 4954370 - DNA, 25 bp, Homo sapien
gtgaacttcaagtggtaggagcaga

SEQ ID NO: 4954371 - DNA, 25 bp, Homo sapien
acttcaagtggtaggagcagaaccc

SEQ ID NO: 4954372 - DNA, 25 bp, Homo sapien
tggggatagcttcacagatccaccg

SEQ ID NO: 4954373 - DNA, 25 bp, Homo sapien
ctggggatagcttcacagatccacc

SEQ ID NO: 4954374 - DNA, 25 bp, Homo sapien
ttagacagggtaccccagtctctgt

SEQ ID NO: 4954375 - DNA, 25 bp, Homo sapien
gaagtcatttagacagggtacccca

SEQ ID NO: 4954376 - DNA, 25 bp, Homo sapien
ttgtcaacagaatgattgggaggat

SEQ ID NO: 4954377 - DNA, 25 bp, Homo sapien
tcaacagaatgattgggaggatttt

SEQ ID NO: 4954378 - DNA, 25 bp, Homo sapien
ggctgtagtttgtgatccttgattc

SEQ ID NO: 4954379 - DNA, 25 bp, Homo sapien
tgtagtttgtgatccttgattcaga

SEQ ID NO: 4954380 - DNA, 25 bp, Homo sapien
gcaggctgtagtttgtgatccttga

SEQ ID NO: 4954381 - DNA, 25 bp, Homo sapien
caggctgtagtttgtgatccttgat

SEQ ID NO: 4954382 - DNA, 25 bp, Homo sapien
ctgaaatgcttcctgtcttctgttc

SEQ ID NO: 4954383 - DNA, 25 bp, Homo sapien
tcacctggtgaatgacccgggaagc

SEQ ID NO: 4954384 - DNA, 25 bp, Homo sapien
gtggttggccctgatttcttctttg

SEQ ID NO: 4954385 - DNA, 25 bp, Homo sapien
tcttctttggagtctctgaaatgct

SEQ ID NO: 4954386 - DNA, 25 bp, Homo sapien
ttctgccgtgttcctaacactttca

SEQ ID NO: 4954387 - DNA, 25 bp, Homo sapien
gcatttggtctccaggtgtcacctt

SEQ ID NO: 4954388 - DNA, 25 bp, Homo sapien
cattcctgtcttgaaaaaagcgcct

SEQ ID NO: 4954389 - DNA, 25 bp, Homo sapien
gtctccaggtgtcacctttctgccg

SEQ ID NO: 4954390 - DNA, 25 bp, Homo sapien
gctttgtgaggaaccgagtgtgtcc

SEQ ID NO: 4954391 - DNA, 25 bp, Homo sapien
tgaggaaccgagtgtgtccagggat

SEQ ID NO: 4954392 - DNA, 25 bp, Homo sapien
gaaccgagtgtgtccagggatgtgg

SEQ ID NO: 4954393 - DNA, 25 bp, Homo sapien
cttggctttgtgaggaaccgagtgt

SEQ ID NO: 4954394 - DNA, 25 bp, Homo sapien
gctttgtgaggaaccgagtgtgtcc

SEQ ID NO: 4954395 - DNA, 25 bp, Homo sapien
tgaggaaccgagtgtgtccagggat

SEQ ID NO: 4954396 - DNA, 25 bp, Homo sapien
gaaccgagtgtgtccagggatgtgg

SEQ ID NO: 4954397 - DNA, 25 bp, Homo sapien
cttggctttgtgaggaaccgagtgt

SEQ ID NO: 4954398 - DNA, 25 bp, Homo sapien
gaggaaccgagtgtgtccagggatg

SEQ ID NO: 4954399 - DNA, 25 bp, Homo sapien
cttggctttgtgaggaaccgagtgt

SEQ ID NO: 4954400 - DNA, 25 bp, Homo sapien
gaaccgagtgtgtccagggatgtgg

SEQ ID NO: 4954401 - DNA, 25 bp, Homo sapien
tgaggaaccgagtgtgtccagggat

SEQ ID NO: 4954402 - DNA, 25 bp, Homo sapien
acccacacgcctagacagctaatgt

SEQ ID NO: 4954403 - DNA, 25 bp, Homo sapien
attagagggcagttttgattcctga

SEQ ID NO: 4954404 - DNA, 25 bp, Homo sapien
cacgcctagacagctaatgtcttat

SEQ ID NO: 4954405 - DNA, 25 bp, Homo sapien
ctagacagctaatgtcttattagag

SEQ ID NO: 4954406 - DNA, 25 bp, Homo sapien
catgtgctggcttgtttgttgactc

SEQ ID NO: 4954407 - DNA, 25 bp, Homo sapien
gacaggcactgggtcatccatgtct

SEQ ID NO: 4954408 - DNA, 25 bp, Homo sapien
tgactctgtagttaatgggctgccc

SEQ ID NO: 4954409 - DNA, 25 bp, Homo sapien
tggacaggcactgggtcatccatgt

SEQ ID NO: 4954410 - DNA, 25 bp, Homo sapien
ctgctgcgggtacatctgtgcacat

SEQ ID NO: 4954411 - DNA, 25 bp, Homo sapien
ggctgctgcgggtacatctgtgcac

SEQ ID NO: 4954412 - DNA, 25 bp, Homo sapien
gcgggtacatctgtgcacatggctg

SEQ ID NO: 4954413 - DNA, 25 bp, Homo sapien
gctgcgggtacatctgtgcacatgg

SEQ ID NO: 4954414 - DNA, 25 bp, Homo sapien
agcttttccccagcgcccagttctt

SEQ ID NO: 4954415 - DNA, 25 bp, Homo sapien
ggacagctcgggcaccatgtaggcc

SEQ ID NO: 4954416 - DNA, 25 bp, Homo sapien
cgggcaccatgtaggcccgggtggg

SEQ ID NO: 4954417 - DNA, 25 bp, Homo sapien
gagtgtggagcatcctagcttttcc

SEQ ID NO: 4954418 - DNA, 25 bp, Homo sapien
acggtaaaggccacgtagacctcag

SEQ ID NO: 4954419 - DNA, 25 bp, Homo sapien
gtggtgaacagctggcacgtctctg

SEQ ID NO: 4954420 - DNA, 25 bp, Homo sapien
cgtctctgggttgcggacggtaaag

SEQ ID NO: 4954421 - DNA, 25 bp, Homo sapien
ttgcggacggtaaaggccacgtaga

SEQ ID NO: 4954422 - DNA, 25 bp, Homo sapien
ctgcaggaccccgaccagcgacacg

SEQ ID NO: 4954423 - DNA, 25 bp, Homo sapien
accccgaccagcgacacgatggctt

SEQ ID NO: 4954424 - DNA, 25 bp, Homo sapien
agcctctgcaggaccccgaccagcg

SEQ ID NO: 4954425 - DNA, 25 bp, Homo sapien
aggaccccgaccagcgacacgatgg

SEQ ID NO: 4954426 - DNA, 25 bp, Homo sapien
atggaccattgctacgtcccagtcc

SEQ ID NO: 4954427 - DNA, 25 bp, Homo sapien
ctgatggaccattgctacgtcccag

SEQ ID NO: 4954428 - DNA, 25 bp, Homo sapien
gagctgatggaccattgctacgtcc

SEQ ID NO: 4954429 - DNA, 25 bp, Homo sapien
tggaccattgctacgtcccagtcca

SEQ ID NO: 4954430 - DNA, 25 bp, Homo sapien
tgcaaggtagagggcggcatcccat

SEQ ID NO: 4954431 - DNA, 25 bp, Homo sapien
gttaatgaaggctgccgggttctcg

SEQ ID NO: 4954432 - DNA, 25 bp, Homo sapien
caggcctgtggtaccgtgggagatg

SEQ ID NO: 4954433 - DNA, 25 bp, Homo sapien
gctcttggagagtgtgactgagcct

SEQ ID NO: 4954434 - DNA, 25 bp, Homo sapien
tggccatcagagtctccgtgagcac

SEQ ID NO: 4954435 - DNA, 25 bp, Homo sapien
cttggccatcagagtctccgtgagc

SEQ ID NO: 4954436 - DNA, 25 bp, Homo sapien
ggccatcagagtctccgtgagcacc

SEQ ID NO: 4954437 - DNA, 25 bp, Homo sapien
ttggccatcagagtctccgtgagca

SEQ ID NO: 4954438 - DNA, 25 bp, Homo sapien
tgagagcttgtttgctttcgttcta

SEQ ID NO: 4954439 - DNA, 25 bp, Homo sapien
agtgagagcttgtttgctttcgttc

SEQ ID NO: 4954440 - DNA, 25 bp, Homo sapien
agagcttgtttgctttcgttctaat

SEQ ID NO: 4954441 - DNA, 25 bp, Homo sapien
agagtgagagcttgtttgctttcgt

SEQ ID NO: 4954442 - DNA, 25 bp, Homo sapien
tgtgtgtcgaatagttccagctact

SEQ ID NO: 4954443 - DNA, 25 bp, Homo sapien
gtgtgtgtcgaatagttccagctac

SEQ ID NO: 4954444 - DNA, 25 bp, Homo sapien
accaggcatacttgactgacggcgg

SEQ ID NO: 4954445 - DNA, 25 bp, Homo sapien
agcaccaggcatacttgactgacgg

SEQ ID NO: 4954446 - DNA, 25 bp, Homo sapien
caccaggcatacttgactgacggcg

SEQ ID NO: 4954447 - DNA, 25 bp, Homo sapien
aaagcaccaggcatacttgactgac

SEQ ID NO: 4954448 - DNA, 25 bp, Homo sapien
ttctgcaaaatatcccgcagcagct

SEQ ID NO: 4954449 - DNA, 25 bp, Homo sapien
cgcagcagctcagaatctgatgagt

SEQ ID NO: 4954450 - DNA, 25 bp, Homo sapien
ctgatgagtctcttaactttgcctc

SEQ ID NO: 4954451 - DNA, 25 bp, Homo sapien
atctgatgagtctcttaactttgcc

SEQ ID NO: 4954452 - DNA, 25 bp, Homo sapien
ctcaggaggaggtggttacccgcgg

SEQ ID NO: 4954453 - DNA, 25 bp, Homo sapien
gtttcagcacggagacccatcccgt

SEQ ID NO: 4954454 - DNA, 25 bp, Homo sapien
gacccccgcgggcctctccgctcgc

SEQ ID NO: 4954455 - DNA, 25 bp, Homo sapien
gtctgcccctggactcccgcgaccc

SEQ ID NO: 4954456 - DNA, 25 bp, Homo sapien
gccggagcgccgggggtttcagcac

SEQ ID NO: 4954457 - DNA, 25 bp, Homo sapien
caggaagcggcgctcaaaaccctgc

SEQ ID NO: 4954458 - DNA, 25 bp, Homo sapien
aaaaccctgcagcaagagttcggtc

SEQ ID NO: 4954459 - DNA, 25 bp, Homo sapien
ggaaggagcgcagtgtgcgcaccgc

SEQ ID NO: 4954460 - DNA, 25 bp, Homo sapien
cgcagtgtgcgcaccgccaggaagc

SEQ ID NO: 4954461 - DNA, 25 bp, Homo sapien
cgtgggcgaggccgcagccgttgcc

SEQ ID NO: 4954462 - DNA, 25 bp, Homo sapien
aacgtgggcgaggccgcagccgttg

SEQ ID NO: 4954463 - DNA, 25 bp, Homo sapien
tgggcgaggccgcagccgttgccgg

SEQ ID NO: 4954464 - DNA, 25 bp, Homo sapien
ggcgaggccgcagccgttgccggga

SEQ ID NO: 4954465 - DNA, 25 bp, Homo sapien
gaggcaggcccaggagcgagcccat

SEQ ID NO: 4954466 - DNA, 25 bp, Homo sapien
tttgaggcaggcccaggagcgagcc

SEQ ID NO: 4954467 - DNA, 25 bp, Homo sapien
ctgcggagggtttgaggcaggccca

SEQ ID NO: 4954468 - DNA, 25 bp, Homo sapien
tgcggagggtttgaggcaggcccag

SEQ ID NO: 4954469 - DNA, 25 bp, Homo sapien
tctcttctatccctcagaaggctct

SEQ ID NO: 4954470 - DNA, 25 bp, Homo sapien
gtccctggagcctctctaactggaa

SEQ ID NO: 4954471 - DNA, 25 bp, Homo sapien
tcattgcatagatttagcagggaaa

SEQ ID NO: 4954472 - DNA, 25 bp, Homo sapien
agctcacctccctttacttcaacgt

SEQ ID NO: 4954473 - DNA, 25 bp, Homo sapien
atagagggaatcaatcgacttttgt

SEQ ID NO: 4954474 - DNA, 25 bp, Homo sapien
gaatcaatcgacttttgtatactga

SEQ ID NO: 4954475 - DNA, 25 bp, Homo sapien
tcaagctcgtcttccctccacatag

SEQ ID NO: 4954476 - DNA, 25 bp, Homo sapien
gagggaatcaatcgacttttgtata

SEQ ID NO: 4954477 - DNA, 25 bp, Homo sapien
tgaggctggatacccccgctgggcc

SEQ ID NO: 4954478 - DNA, 25 bp, Homo sapien
ttgctatcagataaagccgatgtat

SEQ ID NO: 4954479 - DNA, 25 bp, Homo sapien
tcagataaagccgatgtatgaactc

SEQ ID NO: 4954480 - DNA, 25 bp, Homo sapien
gctatcagataaagccgatgtatga

SEQ ID NO: 4954481 - DNA, 25 bp, Homo sapien
gataaagccgatgtatgaactcttt

SEQ ID NO: 4954482 - DNA, 25 bp, Homo sapien
gttgatgtgagatctccagtaccct

SEQ ID NO: 4954483 - DNA, 25 bp, Homo sapien
gaaatcccatggcagtggaaacagt

SEQ ID NO: 4954484 - DNA, 25 bp, Homo sapien
gagtgattatctaaatgcttgtgcc

SEQ ID NO: 4954485 - DNA, 25 bp, Homo sapien
gattatctaaatgcttgtgcccggg

SEQ ID NO: 4954486 - DNA, 25 bp, Homo sapien
tttgagagtgctcccgggacagcat

SEQ ID NO: 4954487 - DNA, 25 bp, Homo sapien
gtttgagagtgctcccgggacagca

SEQ ID NO: 4954488 - DNA, 25 bp, Homo sapien
gaaaagtggttgaactgccactcac

SEQ ID NO: 4954489 - DNA, 25 bp, Homo sapien
ggagccaaatcatcacagaggtcga

SEQ ID NO: 4954490 - DNA, 25 bp, Homo sapien
caggtctcctgctactcagaggaag

SEQ ID NO: 4954491 - DNA, 25 bp, Homo sapien
tccgctggatttcagcaaaagctgc

SEQ ID NO: 4954492 - DNA, 25 bp, Homo sapien
tggtcctcccttgcagagaagcgag

SEQ ID NO: 4954493 - DNA, 25 bp, Homo sapien
tgcttgcctctatggaagccagcag

SEQ ID NO: 4954494 - DNA, 25 bp, Homo sapien
gcttgcctctatggaagccagcagc

SEQ ID NO: 4954495 - DNA, 25 bp, Homo sapien
cctgcttgcctctatggaagccagc

SEQ ID NO: 4954496 - DNA, 25 bp, Homo sapien
agcagccaatgcctgtgagggctgg

SEQ ID NO: 4954497 - DNA, 25 bp, Homo sapien
tttgagagtgctcccgggacagcat

SEQ ID NO: 4954498 - DNA, 25 bp, Homo sapien
gtttgagagtgctcccgggacagca

SEQ ID NO: 4954499 - DNA, 25 bp, Homo sapien
ccacaggcgccaaatcatcgcagaa

SEQ ID NO: 4954500 - DNA, 25 bp, Homo sapien
gcgggtctcagttgagagttgtgac

SEQ ID NO: 4954501 - DNA, 25 bp, Homo sapien
cgcagaagtcgacgcgggtctcagt

SEQ ID NO: 4954502 - DNA, 25 bp, Homo sapien
ggcgccaaatcatcgcagaagtcga

SEQ ID NO: 4954503 - DNA, 25 bp, Homo sapien
catgataagtggtgttggaattggc

SEQ ID NO: 4954504 - DNA, 25 bp, Homo sapien
gggttcttgataatctgacatgata

SEQ ID NO: 4954505 - DNA, 25 bp, Homo sapien
gaattggcattaaaatccaccatgc

SEQ ID NO: 4954506 - DNA, 25 bp, Homo sapien
ttcatccttcttcggcaggcaccaa

SEQ ID NO: 4954507 - DNA, 25 bp, Homo sapien
gacaaattgagacaatgaccttccg

SEQ ID NO: 4954508 - DNA, 25 bp, Homo sapien
tgagacaatgaccttccgcaggacc

SEQ ID NO: 4954509 - DNA, 25 bp, Homo sapien
caaacaccagacaaattgagacaat

SEQ ID NO: 4954510 - DNA, 25 bp, Homo sapien
aattgagacaatgaccttccgcagg

SEQ ID NO: 4954511 - DNA, 25 bp, Homo sapien
aagaaggagaataaggagaagcaaa

SEQ ID NO: 4954512 - DNA, 25 bp, Homo sapien
aaaagaaggagaataaggagaagca

SEQ ID NO: 4954513 - DNA, 25 bp, Homo sapien
aaagaaggagaataaggagaagcaa

SEQ ID NO: 4954514 - DNA, 25 bp, Homo sapien
agaaggagaataaggagaagcaaat

SEQ ID NO: 4954515 - DNA, 25 bp, Homo sapien
ggttggaaggcctgctgacgacccc

SEQ ID NO: 4954516 - DNA, 25 bp, Homo sapien
tcatgattcaggttggaaggcctgc

SEQ ID NO: 4954517 - DNA, 25 bp, Homo sapien
aggttggaaggcctgctgacgaccc

SEQ ID NO: 4954518 - DNA, 25 bp, Homo sapien
attcaggttggaaggcctgctgacg

SEQ ID NO: 4954519 - DNA, 25 bp, Homo sapien
cagcgtccgaaacactgctctcagg

SEQ ID NO: 4954520 - DNA, 25 bp, Homo sapien
gagcttcggagtcaccgcacagagt

SEQ ID NO: 4954521 - DNA, 25 bp, Homo sapien
gcggaagtctgactcctgcgcgtca

SEQ ID NO: 4954522 - DNA, 25 bp, Homo sapien
tcctattgacgtcccagcggaagtc

SEQ ID NO: 4954523 - DNA, 25 bp, Homo sapien
atctggggcgacgtacttggtccaa

SEQ ID NO: 4954524 - DNA, 25 bp, Homo sapien
tgcccatctggggcgacgtacttgg

SEQ ID NO: 4954525 - DNA, 25 bp, Homo sapien
cctgcccatctggggcgacgtactt

SEQ ID NO: 4954526 - DNA, 25 bp, Homo sapien
cccatctggggcgacgtacttggtc

SEQ ID NO: 4954527 - DNA, 25 bp, Homo sapien
ggagcctaggcccaagctgtgtgtg

SEQ ID NO: 4954528 - DNA, 25 bp, Homo sapien
gagcctaggcccaagctgtgtgtgg

SEQ ID NO: 4954529 - DNA, 25 bp, Homo sapien
gattggagcctaggcccaagctgtg

SEQ ID NO: 4954530 - DNA, 25 bp, Homo sapien
agattggagcctaggcccaagctgt

SEQ ID NO: 4954531 - DNA, 25 bp, Homo sapien
tgtgtcggcttcaccacgaggagag

SEQ ID NO: 4954532 - DNA, 25 bp, Homo sapien
tcctttggtccaagacttgaggagg

SEQ ID NO: 4954533 - DNA, 25 bp, Homo sapien
ggctgctgtgtgtcggcttcaccac

SEQ ID NO: 4954534 - DNA, 25 bp, Homo sapien
tcggcttcaccacgaggagaggctc

SEQ ID NO: 4954535 - DNA, 25 bp, Homo sapien
tgtggaccggcattggccggcttgc

SEQ ID NO: 4954536 - DNA, 25 bp, Homo sapien
tgtgtggaccggcattggccggctt

SEQ ID NO: 4954537 - DNA, 25 bp, Homo sapien
tggaccggcattggccggcttgcaa

SEQ ID NO: 4954538 - DNA, 25 bp, Homo sapien
ttgttgtgtggaccggcattggccg

SEQ ID NO: 4954539 - DNA, 25 bp, Homo sapien
cgcagacgggaagctgaaaggaaat

SEQ ID NO: 4954540 - DNA, 25 bp, Homo sapien
gacgggaagctgaaaggaaatcaac

SEQ ID NO: 4954541 - DNA, 25 bp, Homo sapien
agctgaaaggaaatcaaccagggtg

SEQ ID NO: 4954542 - DNA, 25 bp, Homo sapien
ctgaaaggaaatcaaccagggtgac

SEQ ID NO: 4954543 - DNA, 25 bp, Homo sapien
gatccttttcgatttggcagcagct

SEQ ID NO: 4954544 - DNA, 25 bp, Homo sapien
ggatccttttcgatttggcagcagc

SEQ ID NO: 4954545 - DNA, 25 bp, Homo sapien
gtggatccttttcgatttggcagca

SEQ ID NO: 4954546 - DNA, 25 bp, Homo sapien
tccttttcgatttggcagcagcttc

SEQ ID NO: 4954547 - DNA, 25 bp, Homo sapien
agcacttcatggggcacctggtact

SEQ ID NO: 4954548 - DNA, 25 bp, Homo sapien
cagcacttcatggggcacctggtac

SEQ ID NO: 4954549 - DNA, 25 bp, Homo sapien
gggccctgcagtttttgtacttgag

SEQ ID NO: 4954550 - DNA, 25 bp, Homo sapien
caagggccctgcagtttttgtactt

SEQ ID NO: 4954551 - DNA, 25 bp, Homo sapien
tggccaagggccctgcagtttttgt

SEQ ID NO: 4954552 - DNA, 25 bp, Homo sapien
ccaagggccctgcagtttttgtact

SEQ ID NO: 4954553 - DNA, 25 bp, Homo sapien
cttggcccaactggggccctccgct

SEQ ID NO: 4954554 - DNA, 25 bp, Homo sapien
ccaggtttggggtcacgacgtgccg

SEQ ID NO: 4954555 - DNA, 25 bp, Homo sapien
tctctttgccccaggtttggggtca

SEQ ID NO: 4954556 - DNA, 25 bp, Homo sapien
gtttggggtcacgacgtgccgtcat

SEQ ID NO: 4954557 - DNA, 25 bp, Homo sapien
cagtctctttgccccaggtttgggg

SEQ ID NO: 4954558 - DNA, 25 bp, Homo sapien
taaacaaacggtgaataagtgccat

SEQ ID NO: 4954559 - DNA, 25 bp, Homo sapien
tctaaacaaacggtgaataagtgcc

SEQ ID NO: 4954560 - DNA, 25 bp, Homo sapien
tcatctaaacaaacggtgaataagt

SEQ ID NO: 4954561 - DNA, 25 bp, Homo sapien
aaacaaacggtgaataagtgccata

SEQ ID NO: 4954562 - DNA, 25 bp, Homo sapien
tgaaattacacgtctactttctttc

SEQ ID NO: 4954563 - DNA, 25 bp, Homo sapien
gctggcgctgagatgggcaggtgct

SEQ ID NO: 4954564 - DNA, 25 bp, Homo sapien
ggctggcgctgagatgggcaggtgc

SEQ ID NO: 4954565 - DNA, 25 bp, Homo sapien
ctgaaattacacgtctactttcttt

SEQ ID NO: 4954566 - DNA, 25 bp, Homo sapien
ccagggcagggggagtcctcgtgtc

SEQ ID NO: 4954567 - DNA, 25 bp, Homo sapien
tgggggctgtggcaaggcaggggca

SEQ ID NO: 4954568 - DNA, 25 bp, Homo sapien
agcttggaacctgcgccatgtgctc

SEQ ID NO: 4954569 - DNA, 25 bp, Homo sapien
gcaaggcaggggcagcttggaacct

SEQ ID NO: 4954570 - DNA, 25 bp, Homo sapien
taggcgtcaggggtcagggtgcaca

SEQ ID NO: 4954571 - DNA, 25 bp, Homo sapien
aggcgtcaggggtcagggtgcacac

SEQ ID NO: 4954572 - DNA, 25 bp, Homo sapien
ctaggcgtcaggggtcagggtgcac

SEQ ID NO: 4954573 - DNA, 25 bp, Homo sapien
atccctgcaggtctcggggctcctg

SEQ ID NO: 4954574 - DNA, 25 bp, Homo sapien
gcttctggaagggcacagatgggac

SEQ ID NO: 4954575 - DNA, 25 bp, Homo sapien
tccctgcaggtctcggggctcctgg

SEQ ID NO: 4954576 - DNA, 25 bp, Homo sapien
gggctcctgggttgcttctggaagg

SEQ ID NO: 4954577 - DNA, 25 bp, Homo sapien
aggatccctcctagggggagtgtct

SEQ ID NO: 4954578 - DNA, 25 bp, Homo sapien
cagagacgggtccatggcagtgtct

SEQ ID NO: 4954579 - DNA, 25 bp, Homo sapien
ggacagagacgggtccatggcagtg

SEQ ID NO: 4954580 - DNA, 25 bp, Homo sapien
acagagacgggtccatggcagtgtc

SEQ ID NO: 4954581 - DNA, 25 bp, Homo sapien
cctctgagggagtattacagccgcc

SEQ ID NO: 4954582 - DNA, 25 bp, Homo sapien
agggagtattacagccgcctcatcc

SEQ ID NO: 4954583 - DNA, 25 bp, Homo sapien
tctgagggagtattacagccgcctc

SEQ ID NO: 4954584 - DNA, 25 bp, Homo sapien
aagcctctgagggagtattacagcc

SEQ ID NO: 4954585 - DNA, 25 bp, Homo sapien
tggacacatcctccagtggcctgga

SEQ ID NO: 4954586 - DNA, 25 bp, Homo sapien
ctgggtgtctctctggacacatcct

SEQ ID NO: 4954587 - DNA, 25 bp, Homo sapien
ggacacatcctccagtggcctggac

SEQ ID NO: 4954588 - DNA, 25 bp, Homo sapien
ctctggacacatcctccagtggcct

SEQ ID NO: 4954589 - DNA, 25 bp, Homo sapien
gaacttcaagtggtaggagcagaac

SEQ ID NO: 4954590 - DNA, 25 bp, Homo sapien
aacttcaagtggtaggagcagaacc

SEQ ID NO: 4954591 - DNA, 25 bp, Homo sapien
acttcaagtggtaggagcagaaccc

SEQ ID NO: 4954592 - DNA, 25 bp, Homo sapien
gtgaacttcaagtggtaggagcaga

SEQ ID NO: 4954593 - DNA, 25 bp, Homo sapien
ctggggatagcttcacagatccacc

SEQ ID NO: 4954594 - DNA, 25 bp, Homo sapien
tggggatagcttcacagatccaccg

SEQ ID NO: 4954595 - DNA, 25 bp, Homo sapien
tagaactccactcggggcttttgct

SEQ ID NO: 4954596 - DNA, 25 bp, Homo sapien
actagaactccactcggggcttttg

SEQ ID NO: 4954597 - DNA, 25 bp, Homo sapien
tccactcggggcttttgctcctaga

SEQ ID NO: 4954598 - DNA, 25 bp, Homo sapien
aaatactagaactccactcggggct

SEQ ID NO: 4954599 - DNA, 25 bp, Homo sapien
ggctgtagtttgtgatccttgattc

SEQ ID NO: 4954600 - DNA, 25 bp, Homo sapien
tgtagtttgtgatccttgattcaga

SEQ ID NO: 4954601 - DNA, 25 bp, Homo sapien
gcaggctgtagtttgtgatccttga

SEQ ID NO: 4954602 - DNA, 25 bp, Homo sapien
caggctgtagtttgtgatccttgat

SEQ ID NO: 4954603 - DNA, 25 bp, Homo sapien
ccagaaagcatgatgtcaagttgga

SEQ ID NO: 4954604 - DNA, 25 bp, Homo sapien
acgtacagcatgtagaggccggaag

SEQ ID NO: 4954605 - DNA, 25 bp, Homo sapien
gtttccagaaagcatgatgtcaagt

SEQ ID NO: 4954606 - DNA, 25 bp, Homo sapien
ggaacgtacagcatgtagaggccgg

SEQ ID NO: 4954607 - DNA, 25 bp, Homo sapien
ctgggttgtgaagggtctcaagtcc

SEQ ID NO: 4954608 - DNA, 25 bp, Homo sapien
ttgtgaagggtctcaagtccaagtg

SEQ ID NO: 4954609 - DNA, 25 bp, Homo sapien
aagggtctcaagtccaagtgaggga

SEQ ID NO: 4954610 - DNA, 25 bp, Homo sapien
ggttgtgaagggtctcaagtccaag

SEQ ID NO: 4954611 - DNA, 25 bp, Homo sapien
gacaggcaatgagttaagctctgct

SEQ ID NO: 4954612 - DNA, 25 bp, Homo sapien
tctgctctttagcattttgcagatg

SEQ ID NO: 4954613 - DNA, 25 bp, Homo sapien
gggtcagccaagtggtgacctggga

SEQ ID NO: 4954614 - DNA, 25 bp, Homo sapien
tgcagatgcttttctcaaacttttc

SEQ ID NO: 4954615 - DNA, 25 bp, Homo sapien
tcacctggtgaatgacccgggaagc

SEQ ID NO: 4954616 - DNA, 25 bp, Homo sapien
gtggttggccctgatttcttctttg

SEQ ID NO: 4954617 - DNA, 25 bp, Homo sapien
tcttctttggagtctctgaaatgct

SEQ ID NO: 4954618 - DNA, 25 bp, Homo sapien
ctgaaatgcttcctgtcttctgttc

SEQ ID NO: 4954619 - DNA, 25 bp, Homo sapien
catcctgcatttggtctccaggtgt

SEQ ID NO: 4954620 - DNA, 25 bp, Homo sapien
tcatcctgcatttggtctccaggtg

SEQ ID NO: 4954621 - DNA, 25 bp, Homo sapien
cctgcatttggtctccaggtgtcac

SEQ ID NO: 4954622 - DNA, 25 bp, Homo sapien
tcctgcatttggtctccaggtgtca

SEQ ID NO: 4954623 - DNA, 25 bp, Homo sapien
aaaaaagcgcctgctgcaccataag

SEQ ID NO: 4954624 - DNA, 25 bp, Homo sapien
aagcgcctgctgcaccataagccct

SEQ ID NO: 4954625 - DNA, 25 bp, Homo sapien
gcgcctgctgcaccataagccctgg

SEQ ID NO: 4954626 - DNA, 25 bp, Homo sapien
gcctgctgcaccataagccctggga

SEQ ID NO: 4954627 - DNA, 25 bp, Homo sapien
ctgagtgtgtccacgttgggggaac

SEQ ID NO: 4954628 - DNA, 25 bp, Homo sapien
tgtgtccacgttgggggaacgtcat

SEQ ID NO: 4954629 - DNA, 25 bp, Homo sapien
gtgtgtccacgttgggggaacgtca

SEQ ID NO: 4954630 - DNA, 25 bp, Homo sapien
tgagtgtgtccacgttgggggaacg

SEQ ID NO: 4954631 - DNA, 25 bp, Homo sapien
attagagggcagttttgattcctga

SEQ ID NO: 4954632 - DNA, 25 bp, Homo sapien
cacgcctagacagctaatgtcttat

SEQ ID NO: 4954633 - DNA, 25 bp, Homo sapien
acccacacgcctagacagctaatgt

SEQ ID NO: 4954634 - DNA, 25 bp, Homo sapien
ctagacagctaatgtcttattagag

SEQ ID NO: 4954635 - DNA, 25 bp, Homo sapien
ggacaggcactgggtcatccatgtc

SEQ ID NO: 4954636 - DNA, 25 bp, Homo sapien
ggcactgggtcatccatgtctctgt

SEQ ID NO: 4954637 - DNA, 25 bp, Homo sapien
gacaggcactgggtcatccatgtct

SEQ ID NO: 4954638 - DNA, 25 bp, Homo sapien
caggcactgggtcatccatgtctct

SEQ ID NO: 4954639 - DNA, 25 bp, Homo sapien
gtagtgtggaggcacgagagccagg

SEQ ID NO: 4954640 - DNA, 25 bp, Homo sapien
ggaggcacgagagccaggtggccgg

SEQ ID NO: 4954641 - DNA, 25 bp, Homo sapien
tggaggcacgagagccaggtggccg

SEQ ID NO: 4954642 - DNA, 25 bp, Homo sapien
gggtgtagtgtggaggcacgagagc

SEQ ID NO: 4954643 - DNA, 25 bp, Homo sapien
ccgagttccccgcatagtgtgggag

SEQ ID NO: 4954644 - DNA, 25 bp, Homo sapien
agcttttccccagcgcccagttctt

SEQ ID NO: 4954645 - DNA, 25 bp, Homo sapien
ggacagctcgggcaccatgtaggcc

SEQ ID NO: 4954646 - DNA, 25 bp, Homo sapien
gagtgtggagcatcctagcttttcc

SEQ ID NO: 4954647 - DNA, 25 bp, Homo sapien
acggtaaaggccacgtagacctcag

SEQ ID NO: 4954648 - DNA, 25 bp, Homo sapien
tgcggacggtaaaggccacgtagac

SEQ ID NO: 4954649 - DNA, 25 bp, Homo sapien
atgtctctgggttgcggacggtaaa

SEQ ID NO: 4954650 - DNA, 25 bp, Homo sapien
tggcatgtctctgggttgcggacgg

SEQ ID NO: 4954651 - DNA, 25 bp, Homo sapien
cgaccagcgacacgatggcttctgg

SEQ ID NO: 4954652 - DNA, 25 bp, Homo sapien
ccccgaccagcgacacgatggcttc

SEQ ID NO: 4954653 - DNA, 25 bp, Homo sapien
cagcgacacgatggcttctgggcaa

SEQ ID NO: 4954654 - DNA, 25 bp, Homo sapien
tgcaggaccccgaccagcgacacga

SEQ ID NO: 4954655 - DNA, 25 bp, Homo sapien
tgtctgccgattggtctgctggctt

SEQ ID NO: 4954656 - DNA, 25 bp, Homo sapien
gtttcaggtgtctgccgattggtct

SEQ ID NO: 4954657 - DNA, 25 bp, Homo sapien
gccgtgaacttcgtgtttcaggtgt

SEQ ID NO: 4954658 - DNA, 25 bp, Homo sapien
caggtgtctgccgattggtctgctg

SEQ ID NO: 4954659 - DNA, 25 bp, Homo sapien
ctgtgggtttcagggctgggaccca

SEQ ID NO: 4954660 - DNA, 25 bp, Homo sapien
tgtgggtttcagggctgggacccag

SEQ ID NO: 4954661 - DNA, 25 bp, Homo sapien
tgggtttcagggctgggacccagga

SEQ ID NO: 4954662 - DNA, 25 bp, Homo sapien
tgcccgacagtgtccattgttccct

SEQ ID NO: 4954663 - DNA, 25 bp, Homo sapien
cccatcacgtccatgcccgacagtg

SEQ ID NO: 4954664 - DNA, 25 bp, Homo sapien
acgtccatgcccgacagtgtccatt

SEQ ID NO: 4954665 - DNA, 25 bp, Homo sapien
agaggcacccctgtcctttgatgtc

SEQ ID NO: 4954666 - DNA, 25 bp, Homo sapien
aggacaccgcctgcacaggatgccc

SEQ ID NO: 4954667 - DNA, 25 bp, Homo sapien
tgcaaggacaccgcctgcacaggat

SEQ ID NO: 4954668 - DNA, 25 bp, Homo sapien
ctgcaaggacaccgcctgcacagga

SEQ ID NO: 4954669 - DNA, 25 bp, Homo sapien
caaggacaccgcctgcacaggatgc

SEQ ID NO: 4954670 - DNA, 25 bp, Homo sapien
ctgctcgaggatccggctgtgaggg

SEQ ID NO: 4954671 - DNA, 25 bp, Homo sapien
tggaccattgctacgtcccagtcca

SEQ ID NO: 4954672 - DNA, 25 bp, Homo sapien
gagctgatggaccattgctacgtcc

SEQ ID NO: 4954673 - DNA, 25 bp, Homo sapien
atccggctgtgagggtcgctgaaga

SEQ ID NO: 4954674 - DNA, 25 bp, Homo sapien
gctcttggagagtgtgactgagcct

SEQ ID NO: 4954675 - DNA, 25 bp, Homo sapien
tgcaaggtagagggcggcatcccat

SEQ ID NO: 4954676 - DNA, 25 bp, Homo sapien
gttaatgaaggctgccgggttctcg

SEQ ID NO: 4954677 - DNA, 25 bp, Homo sapien
caggcctgtggtaccgtgggagatg

SEQ ID NO: 4954678 - DNA, 25 bp, Homo sapien
gagcacctcgtacagtttgtccaaa

SEQ ID NO: 4954679 - DNA, 25 bp, Homo sapien
tgtgtgtcgaatagttccagctact

SEQ ID NO: 4954680 - DNA, 25 bp, Homo sapien
gtgtgtgtcgaatagttccagctac

SEQ ID NO: 4954681 - DNA, 25 bp, Homo sapien
agcaccaggcatacttgactgacgg

SEQ ID NO: 4954682 - DNA, 25 bp, Homo sapien
caccaggcatacttgactgacggcg

SEQ ID NO: 4954683 - DNA, 25 bp, Homo sapien
aaagcaccaggcatacttgactgac

SEQ ID NO: 4954684 - DNA, 25 bp, Homo sapien
accaggcatacttgactgacggcgg

SEQ ID NO: 4954685 - DNA, 25 bp, Homo sapien
ctgatgagtctcttaactttgcctc

SEQ ID NO: 4954686 - DNA, 25 bp, Homo sapien
ttctgcaaaatatcccgcagcagct

SEQ ID NO: 4954687 - DNA, 25 bp, Homo sapien
cgcagcagctcagaatctgatgagt

SEQ ID NO: 4954688 - DNA, 25 bp, Homo sapien
atctgatgagtctcttaactttgcc

SEQ ID NO: 4954689 - DNA, 25 bp, Homo sapien
tcaccacgctcaggaggaggtggtt

SEQ ID NO: 4954690 - DNA, 25 bp, Homo sapien
tggtcaccacgctcaggaggaggtg

SEQ ID NO: 4954691 - DNA, 25 bp, Homo sapien
accacgctcaggaggaggtggttac

SEQ ID NO: 4954692 - DNA, 25 bp, Homo sapien
ctggtcaccacgctcaggaggaggt

SEQ ID NO: 4954693 - DNA, 25 bp, Homo sapien
actttttagaatgggcgagtgcagc

SEQ ID NO: 4954694 - DNA, 25 bp, Homo sapien
ccgcgggcctgagggcgctgacttt

SEQ ID NO: 4954695 - DNA, 25 bp, Homo sapien
tctcgcggccctgaccgaggagagc

SEQ ID NO: 4954696 - DNA, 25 bp, Homo sapien
agcgcgcgtctaccccctaaggcgg

SEQ ID NO: 4954697 - DNA, 25 bp, Homo sapien
gtttcagcacggagacccatcccgt

SEQ ID NO: 4954698 - DNA, 25 bp, Homo sapien
gacccccgcgggcctctccgctcgc

SEQ ID NO: 4954699 - DNA, 25 bp, Homo sapien
gtctgcccctggactcccgcgaccc

SEQ ID NO: 4954700 - DNA, 25 bp, Homo sapien
gccggagcgccgggggtttcagcac

SEQ ID NO: 4954701 - DNA, 25 bp, Homo sapien
caggaagcggcgctcaaaaccctgc

SEQ ID NO: 4954702 - DNA, 25 bp, Homo sapien
aaaaccctgcagcaagagttcggtc

SEQ ID NO: 4954703 - DNA, 25 bp, Homo sapien
ggaaggagcgcagtgtgcgcaccgc

SEQ ID NO: 4954704 - DNA, 25 bp, Homo sapien
cgcagtgtgcgcaccgccaggaagc

SEQ ID NO: 4954705 - DNA, 25 bp, Homo sapien
cgtgggcgaggccgcagccgttgcc

SEQ ID NO: 4954706 - DNA, 25 bp, Homo sapien
tgggcgaggccgcagccgttgccgg

SEQ ID NO: 4954707 - DNA, 25 bp, Homo sapien
aacgtgggcgaggccgcagccgttg

SEQ ID NO: 4954708 - DNA, 25 bp, Homo sapien
ggcgaggccgcagccgttgccggga

SEQ ID NO: 4954709 - DNA, 25 bp, Homo sapien
gaggcaggcccaagagcgagcccat

SEQ ID NO: 4954710 - DNA, 25 bp, Homo sapien
cggagggtttgaggcaggcccaaga

SEQ ID NO: 4954711 - DNA, 25 bp, Homo sapien
tttgaggcaggcccaagagcgagcc

SEQ ID NO: 4954712 - DNA, 25 bp, Homo sapien
gggtttgaggcaggcccaagagcga

SEQ ID NO: 4954713 - DNA, 25 bp, Homo sapien
tgttgttccccaccagaaccaaatg

SEQ ID NO: 4954714 - DNA, 25 bp, Homo sapien
atagctgttgttccccaccagaacc

SEQ ID NO: 4954715 - DNA, 25 bp, Homo sapien
tgttccccaccagaaccaaatgagc

SEQ ID NO: 4954716 - DNA, 25 bp, Homo sapien
caccagaaccaaatgagcgcaagat

SEQ ID NO: 4954717 - DNA, 25 bp, Homo sapien
tttccttaggctgtttgcagtgccc

SEQ ID NO: 4954718 - DNA, 25 bp, Homo sapien
cttaggctgtttgcagtgcccagca

SEQ ID NO: 4954719 - DNA, 25 bp, Homo sapien
ccagcaggccccatgatatcgagat

SEQ ID NO: 4954720 - DNA, 25 bp, Homo sapien
gccccatgatatcgagatggaagtt

SEQ ID NO: 4954721 - DNA, 25 bp, Homo sapien
ccggtcatgtttagcgatatggaag

SEQ ID NO: 4954722 - DNA, 25 bp, Homo sapien
tgtagacgtggaggtgacggtgcgc

SEQ ID NO: 4954723 - DNA, 25 bp, Homo sapien
cttgccccaacttgggcaggggcat

SEQ ID NO: 4954724 - DNA, 25 bp, Homo sapien
cagaacccggtcatgtttagcgata

SEQ ID NO: 4954725 - DNA, 25 bp, Homo sapien
caggtccctgaacttgacgtagttg

SEQ ID NO: 4954726 - DNA, 25 bp, Homo sapien
gaccaggtccctgaacttgacgtag

SEQ ID NO: 4954727 - DNA, 25 bp, Homo sapien
ttgaccaggtccctgaacttgacgt

SEQ ID NO: 4954728 - DNA, 25 bp, Homo sapien
ccaggtccctgaacttgacgtagtt

SEQ ID NO: 4954729 - DNA, 25 bp, Homo sapien
gacgatatcgatgttctccttccgc

SEQ ID NO: 4954730 - DNA, 25 bp, Homo sapien
ctggaatagtggaatgatgccgctc

SEQ ID NO: 4954731 - DNA, 25 bp, Homo sapien
tagtggaatgatgccgctctgttcc

SEQ ID NO: 4954732 - DNA, 25 bp, Homo sapien
tgacgatatcgatgttctccttccg

SEQ ID NO: 4954733 - DNA, 25 bp, Homo sapien
aagaaaattccatcagggccatttg

SEQ ID NO: 4954734 - DNA, 25 bp, Homo sapien
aaaattccatcagggccatttgtca

SEQ ID NO: 4954735 - DNA, 25 bp, Homo sapien
gtaagtacaagaagaaaattccatc

SEQ ID NO: 4954736 - DNA, 25 bp, Homo sapien
acaagaagaaaattccatcagggcc

SEQ ID NO: 4954737 - DNA, 25 bp, Homo sapien
tgtgcccctgtccaaaggtgtagga

SEQ ID NO: 4954738 - DNA, 25 bp, Homo sapien
tgcccctgtccaaaggtgtaggaaa

SEQ ID NO: 4954739 - DNA, 25 bp, Homo sapien
atctgtgcccctgtccaaaggtgta

SEQ ID NO: 4954740 - DNA, 25 bp, Homo sapien
cctgtccaaaggtgtaggaaatatg

SEQ ID NO: 4954741 - DNA, 25 bp, Homo sapien
cgctctgattgcagcggtttcccgc

SEQ ID NO: 4954742 - DNA, 25 bp, Homo sapien
ccgggccctgggttcgctctgattg

SEQ ID NO: 4954743 - DNA, 25 bp, Homo sapien
gccctgggttcgctctgattgcagc

SEQ ID NO: 4954744 - DNA, 25 bp, Homo sapien
tcgctctgattgcagcggtttcccg

SEQ ID NO: 4954745 - DNA, 25 bp, Homo sapien
gagcatttagttccaagcaccttcc

SEQ ID NO: 4954746 - DNA, 25 bp, Homo sapien
gccagatggacttttttggagcatt

SEQ ID NO: 4954747 - DNA, 25 bp, Homo sapien
ttggagcatttagttccaagcacct

SEQ ID NO: 4954748 - DNA, 25 bp, Homo sapien
tggccagatggacttttttggagca

SEQ ID NO: 4954749 - DNA, 25 bp, Homo sapien
caccaggatttgtacgtgcactggc

SEQ ID NO: 4954750 - DNA, 25 bp, Homo sapien
atttgtacgtgcactggcctctgag

SEQ ID NO: 4954751 - DNA, 25 bp, Homo sapien
caggatttgtacgtgcactggcctc

SEQ ID NO: 4954752 - DNA, 25 bp, Homo sapien
cacaccaggatttgtacgtgcactg

SEQ ID NO: 4954753 - DNA, 25 bp, Homo sapien
aaattatctgggtgaagtggcaggt

SEQ ID NO: 4954754 - DNA, 25 bp, Homo sapien
attatctgggtgaagtggcaggtac

SEQ ID NO: 4954755 - DNA, 25 bp, Homo sapien
atctgggtgaagtggcaggtacctg

SEQ ID NO: 4954756 - DNA, 25 bp, Homo sapien
ttatctgggtgaagtggcaggtacc

SEQ ID NO: 4954757 - DNA, 25 bp, Homo sapien
cagtgcttcattacgctcatatgcc

SEQ ID NO: 4954758 - DNA, 25 bp, Homo sapien
tgggaggtccagtgcttcattacgc

SEQ ID NO: 4954759 - DNA, 25 bp, Homo sapien
tttgggaggtccagtgcttcattac

SEQ ID NO: 4954760 - DNA, 25 bp, Homo sapien
ggtccagtgcttcattacgctcata

SEQ ID NO: 4954761 - DNA, 25 bp, Homo sapien
tgggatttaccgataacaacagtag

SEQ ID NO: 4954762 - DNA, 25 bp, Homo sapien
tgtctgggatttaccgataacaaca

SEQ ID NO: 4954763 - DNA, 25 bp, Homo sapien
ggtggcgccaaagtcgtctaggtat

SEQ ID NO: 4954764 - DNA, 25 bp, Homo sapien
cgccaaagtcgtctaggtatttatt

SEQ ID NO: 4954765 - DNA, 25 bp, Homo sapien
cgtccagtcctaatgagattctgca

SEQ ID NO: 4954766 - DNA, 25 bp, Homo sapien
gtccagtgggaaccgtccagtccta

SEQ ID NO: 4954767 - DNA, 25 bp, Homo sapien
ttattttctcaggaggcatagacag

SEQ ID NO: 4954768 - DNA, 25 bp, Homo sapien
tacgtatctagtatagtccagtggg

SEQ ID NO: 4954769 - DNA, 25 bp, Homo sapien
tacacagctgtggtggttccagact

SEQ ID NO: 4954770 - DNA, 25 bp, Homo sapien
ttgcagcgggctcagatgggctata

SEQ ID NO: 4954771 - DNA, 25 bp, Homo sapien
tcaaaaacggtggttgcagcgggct

SEQ ID NO: 4954772 - DNA, 25 bp, Homo sapien
aaatacactggggacagtccccatt

SEQ ID NO: 4954773 - DNA, 25 bp, Homo sapien
cggtcaggacttcacacccagttgt

SEQ ID NO: 4954774 - DNA, 25 bp, Homo sapien
gggtgtttggccgacacgacacttc

SEQ ID NO: 4954775 - DNA, 25 bp, Homo sapien
ggacttcacacccagttgttgtggg

SEQ ID NO: 4954776 - DNA, 25 bp, Homo sapien
tgaaggccctgcagtcaggaacggt

SEQ ID NO: 4954777 - DNA, 25 bp, Homo sapien
tggtttctttgctcagtgcacctgt

SEQ ID NO: 4954778 - DNA, 25 bp, Homo sapien
gatctccaggccttttttcagcagc

SEQ ID NO: 4954779 - DNA, 25 bp, Homo sapien
caggccttttttcagcagcgttgtc

SEQ ID NO: 4954780 - DNA, 25 bp, Homo sapien
tgttgatctccaggccttttttcag

SEQ ID NO: 4954781 - DNA, 25 bp, Homo sapien
aaacctgagattgtgaagatgttca

SEQ ID NO: 4954782 - DNA, 25 bp, Homo sapien
cattaccagtgacggagcagtaagt

SEQ ID NO: 4954783 - DNA, 25 bp, Homo sapien
gatgttcattgtcattaccagtgac

SEQ ID NO: 4954784 - DNA, 25 bp, Homo sapien
taaaacctgagattgtgaagatgtt

SEQ ID NO: 4954785 - DNA, 25 bp, Homo sapien
tcagtactcaagacatcaaggccca

SEQ ID NO: 4954786 - DNA, 25 bp, Homo sapien
ttcttctatcgctcctctccaatga

SEQ ID NO: 4954787 - DNA, 25 bp, Homo sapien
tgatagttcctgattttccgctgag

SEQ ID NO: 4954788 - DNA, 25 bp, Homo sapien
tggtgcaggagacacattgcactgt

SEQ ID NO: 4954789 - DNA, 25 bp, Homo sapien
cttcacttcctttctatgagagctc

SEQ ID NO: 4954790 - DNA, 25 bp, Homo sapien
tatgagagctcacggaatcagaaga

SEQ ID NO: 4954791 - DNA, 25 bp, Homo sapien
gaatcagaagacaaaggagatgact

SEQ ID NO: 4954792 - DNA, 25 bp, Homo sapien
acttcctttctatgagagctcacgg

SEQ ID NO: 4954793 - DNA, 25 bp, Homo sapien
tcagttttcatgtagttgagtagtt

SEQ ID NO: 4954794 - DNA, 25 bp, Homo sapien
tgagtagttttgagagagtttctta

SEQ ID NO: 4954795 - DNA, 25 bp, Homo sapien
cagttttcatgtagttgagtagttt

SEQ ID NO: 4954796 - DNA, 25 bp, Homo sapien
tgtagttgagtagttttgagagagt

SEQ ID NO: 4954797 - DNA, 25 bp, Homo sapien
catgctcggccttatttactttaaa

SEQ ID NO: 4954798 - DNA, 25 bp, Homo sapien
aaaagaacaggccagtcacggtagc

SEQ ID NO: 4954799 - DNA, 25 bp, Homo sapien
ccctgccccagtttctaagaaaatg

SEQ ID NO: 4954800 - DNA, 25 bp, Homo sapien
ttaggataggtgacgtttcaccatg

SEQ ID NO: 4954801 - DNA, 25 bp, Homo sapien
tgtgatggcagtgaagtgggacggg

SEQ ID NO: 4954802 - DNA, 25 bp, Homo sapien
ctgtgatggcagtgaagtgggacgg

SEQ ID NO: 4954803 - DNA, 25 bp, Homo sapien
cagtgaagtgggacggggaggtcat

SEQ ID NO: 4954804 - DNA, 25 bp, Homo sapien
tggcagtgaagtgggacggggaggt

SEQ ID NO: 4954805 - DNA, 25 bp, Homo sapien
gtacttggccttgacgccctccctg

SEQ ID NO: 4954806 - DNA, 25 bp, Homo sapien
aggttgggggtgttcacatcctgat

SEQ ID NO: 4954807 - DNA, 25 bp, Homo sapien
caggttgggggtgttcacatcctga

SEQ ID NO: 4954808 - DNA, 25 bp, Homo sapien
ttgacgccctccctggccagatggt

SEQ ID NO: 4954809 - DNA, 25 bp, Homo sapien
gatctccagtaacaagaactggcaa

SEQ ID NO: 4954810 - DNA, 25 bp, Homo sapien
tctccagtaacaagaactggcaaga

SEQ ID NO: 4954811 - DNA, 25 bp, Homo sapien
tggatctccagtaacaagaactggc

SEQ ID NO: 4954812 - DNA, 25 bp, Homo sapien
attggatctccagtaacaagaactg

SEQ ID NO: 4954813 - DNA, 25 bp, Homo sapien
taagtacgaccccagaagtattgac

SEQ ID NO: 4954814 - DNA, 25 bp, Homo sapien
ggcatgtacccagatctctttgagc

SEQ ID NO: 4954815 - DNA, 25 bp, Homo sapien
aaagactcatctggcctcaacgttg

SEQ ID NO: 4954816 - DNA, 25 bp, Homo sapien
gagtggcctcccaggatctatcaca

SEQ ID NO: 4954817 - DNA, 25 bp, Homo sapien
ggtccggagtacagactctgtcaga

SEQ ID NO: 4954818 - DNA, 25 bp, Homo sapien
aaactaagaagggtgctgagcgctc

SEQ ID NO: 4954819 - DNA, 25 bp, Homo sapien
ttcctgccacggtcatgactgagag

SEQ ID NO: 4954820 - DNA, 25 bp, Homo sapien
gctgttggcaatcatcttaggtggg

SEQ ID NO: 4954821 - DNA, 25 bp, Homo sapien
tttaataagatttgagcatagatat

SEQ ID NO: 4954822 - DNA, 25 bp, Homo sapien
atcagtatgaccagagagagcagaa

SEQ ID NO: 4954823 - DNA, 25 bp, Homo sapien
acagaatcagtatgaccagagagag

SEQ ID NO: 4954824 - DNA, 25 bp, Homo sapien
gaatcagtatgaccagagagagcag

SEQ ID NO: 4954825 - DNA, 25 bp, Homo sapien
ttcttcaagaaacttgaacaagaga

SEQ ID NO: 4954826 - DNA, 25 bp, Homo sapien
tctttcttggagattcttcaagaaa

SEQ ID NO: 4954827 - DNA, 25 bp, Homo sapien
cagtcagataactgcctggcccctc

SEQ ID NO: 4954828 - DNA, 25 bp, Homo sapien
ctttcttggagattcttcaagaaac

SEQ ID NO: 4954829 - DNA, 25 bp, Homo sapien
gccaagataaaagctgtccccagtg

SEQ ID NO: 4954830 - DNA, 25 bp, Homo sapien
gaactgtggatattgctcgccccac

SEQ ID NO: 4954831 - DNA, 25 bp, Homo sapien
gccaaatccagcagccgtagacaat

SEQ ID NO: 4954832 - DNA, 25 bp, Homo sapien
tgtgcaagcaggtcagatttggccc

SEQ ID NO: 4954833 - DNA, 25 bp, Homo sapien
catcttcatcattgcattaccacca

SEQ ID NO: 4954834 - DNA, 25 bp, Homo sapien
attaccaccacccaacactatcggg

SEQ ID NO: 4954835 - DNA, 25 bp, Homo sapien
agagtatatgaataggagtgggtga

SEQ ID NO: 4954836 - DNA, 25 bp, Homo sapien
ggtatccgggggagacaacacacat

SEQ ID NO: 4954837 - DNA, 25 bp, Homo sapien
tgaagctaattgtagtccatcaaac

SEQ ID NO: 4954838 - DNA, 25 bp, Homo sapien
atgatcatggatcgctgcaacttct

SEQ ID NO: 4954839 - DNA, 25 bp, Homo sapien
tagatattacacagaaggcctcatt

SEQ ID NO: 4954840 - DNA, 25 bp, Homo sapien
cacagaagatatgtgcacttccaag

SEQ ID NO: 4954841 - DNA, 25 bp, Homo sapien
cagtggcatggtcccgggtcactgc

SEQ ID NO: 4954842 - DNA, 25 bp, Homo sapien
tgcagtggcatggtcccgggtcact

SEQ ID NO: 4954843 - DNA, 25 bp, Homo sapien
tccacctcctgggttcaagtgattc

SEQ ID NO: 4954844 - DNA, 25 bp, Homo sapien
ggcatggtcccgggtcactgcaacc

SEQ ID NO: 4954845 - DNA, 25 bp, Homo sapien
ctggatcttctattccgggtcacaa

SEQ ID NO: 4954846 - DNA, 25 bp, Homo sapien
aactggatcttctattccgggtcac

SEQ ID NO: 4954847 - DNA, 25 bp, Homo sapien
ttaactggatcttctattccgggtc

SEQ ID NO: 4954848 - DNA, 25 bp, Homo sapien
ggatcttctattccgggtcacaata

SEQ ID NO: 4954849 - DNA, 25 bp, Homo sapien
agagcagcccacaggttgtgagcgc

SEQ ID NO: 4954850 - DNA, 25 bp, Homo sapien
atgatcacggatgagagcagcccac

SEQ ID NO: 4954851 - DNA, 25 bp, Homo sapien
agcccacaggttgtgagcgccaggt

SEQ ID NO: 4954852 - DNA, 25 bp, Homo sapien
gtgagcgccaggtgctggagtagga

SEQ ID NO: 4954853 - DNA, 25 bp, Homo sapien
gagttgtggtttcagtctccccagg

SEQ ID NO: 4954854 - DNA, 25 bp, Homo sapien
cccatgtggcaagaagctgaggaca

SEQ ID NO: 4954855 - DNA, 25 bp, Homo sapien
tgtagccttgcactgaacccagctg

SEQ ID NO: 4954856 - DNA, 25 bp, Homo sapien
tgagccctggctgacattatggttg

SEQ ID NO: 4954857 - DNA, 25 bp, Homo sapien
ggtcagcacacaaaggggtccaaat

SEQ ID NO: 4954858 - DNA, 25 bp, Homo sapien
tgtgaaacagcccagtggtcagcac

SEQ ID NO: 4954859 - DNA, 25 bp, Homo sapien
gggatcaaaggtgtgcatcaccgca

SEQ ID NO: 4954860 - DNA, 25 bp, Homo sapien
aatgtgaaaggaaagggcaaacacg

SEQ ID NO: 4954861 - DNA, 25 bp, Homo sapien
aggagtcggccgtgcacaattacat

SEQ ID NO: 4954862 - DNA, 25 bp, Homo sapien
tcagccatgaccaatgaggagtcgg

SEQ ID NO: 4954863 - DNA, 25 bp, Homo sapien
gacctgcaggacatcgagtccctgc

SEQ ID NO: 4954864 - DNA, 25 bp, Homo sapien
acatcgagtccctgctatggtccct

SEQ ID NO: 4954865 - DNA, 25 bp, Homo sapien
tagattgaccaatcctcagctgacc

SEQ ID NO: 4954866 - DNA, 25 bp, Homo sapien
gcacattaatggatccgtgtcctcc

SEQ ID NO: 4954867 - DNA, 25 bp, Homo sapien
gacagcaagagcaacgtcgagcttc

SEQ ID NO: 4954868 - DNA, 25 bp, Homo sapien
catgtgtctagctttggccactgga

SEQ ID NO: 4954869 - DNA, 25 bp, Homo sapien
gaactagagatcagcctgccacaca

SEQ ID NO: 4954870 - DNA, 25 bp, Homo sapien
tctaaacaaccatagaccaagggcc

SEQ ID NO: 4954871 - DNA, 25 bp, Homo sapien
caccaccagaacctgtataggtcac

SEQ ID NO: 4954872 - DNA, 25 bp, Homo sapien
cacctggagaactagagatcagcct

SEQ ID NO: 4954873 - DNA, 25 bp, Homo sapien
gctgaggaagcctaagaatcacgtt

SEQ ID NO: 4954874 - DNA, 25 bp, Homo sapien
ccacatagctgaggaagcctaagaa

SEQ ID NO: 4954875 - DNA, 25 bp, Homo sapien
gatggcagcaatcaaagatagagct

SEQ ID NO: 4954876 - DNA, 25 bp, Homo sapien
gaagcctaagaatcacgttggaagg

SEQ ID NO: 4954877 - DNA, 25 bp, Homo sapien
cccatgactcaattacttcccacca

SEQ ID NO: 4954878 - DNA, 25 bp, Homo sapien
ccatgactcaattacttcccaccag

SEQ ID NO: 4954879 - DNA, 25 bp, Homo sapien
tgcccccatgactcaattacttccc

SEQ ID NO: 4954880 - DNA, 25 bp, Homo sapien
gacctgcccccatgactcaattact

SEQ ID NO: 4954881 - DNA, 25 bp, Homo sapien
tgatgtatgaccatggccttgggag

SEQ ID NO: 4954882 - DNA, 25 bp, Homo sapien
tcctgtggctttgtatggtttaacc

SEQ ID NO: 4954883 - DNA, 25 bp, Homo sapien
gtcatactgatgtatgaccatggcc

SEQ ID NO: 4954884 - DNA, 25 bp, Homo sapien
tgcaggtcatactgatgtatgacca

SEQ ID NO: 4954885 - DNA, 25 bp, Homo sapien
tatggacattaaacatgctattgaa

SEQ ID NO: 4954886 - DNA, 25 bp, Homo sapien
tgcctacactaaaaaagtagaaaga

SEQ ID NO: 4954887 - DNA, 25 bp, Homo sapien
tgaataatcattgggtcaatgaaga

SEQ ID NO: 4954888 - DNA, 25 bp, Homo sapien
aacacatcatgcaaaacctatggga

SEQ ID NO: 4954889 - DNA, 25 bp, Homo sapien
gcactgctactgatatgtgtacata

SEQ ID NO: 4954890 - DNA, 25 bp, Homo sapien
tcaacgtttgaggtgattaatatcc

SEQ ID NO: 4954891 - DNA, 25 bp, Homo sapien
atctcacatggaccccataaatgtg

SEQ ID NO: 4954892 - DNA, 25 bp, Homo sapien
tggtacattgataggaactcattga

SEQ ID NO: 4954893 - DNA, 25 bp, Homo sapien
tggcttacatgcacgtccagtcata

SEQ ID NO: 4954894 - DNA, 25 bp, Homo sapien
gttctgagatgggagaaaaaccgcc

SEQ ID NO: 4954895 - DNA, 25 bp, Homo sapien
catggattctattgctcacgtttgt

SEQ ID NO: 4954896 - DNA, 25 bp, Homo sapien
atgggagaaaaaccgccctatggtg

SEQ ID NO: 4954897 - DNA, 25 bp, Homo sapien
ctggccacctaactcactcttgaga

SEQ ID NO: 4954898 - DNA, 25 bp, Homo sapien
tcttgagaggccagaagtgatgctg

SEQ ID NO: 4954899 - DNA, 25 bp, Homo sapien
taactcactcttgagaggccagaag

SEQ ID NO: 4954900 - DNA, 25 bp, Homo sapien
acctaactcactcttgagaggccag

SEQ ID NO: 4954901 - DNA, 25 bp, Homo sapien
gtagggtcaggggtagaggcagctg

SEQ ID NO: 4954902 - DNA, 25 bp, Homo sapien
cacatttcaggtcagtagggtcagg

SEQ ID NO: 4954903 - DNA, 25 bp, Homo sapien
gggtcaggggtagaggcagctgtca

SEQ ID NO: 4954904 - DNA, 25 bp, Homo sapien
gtcaggggtagaggcagctgtcatg

SEQ ID NO: 4954905 - DNA, 25 bp, Homo sapien
tagtcacgctgctgtgctatagatt

SEQ ID NO: 4954906 - DNA, 25 bp, Homo sapien
aatcaaaatcaatatgtcgaaggga

SEQ ID NO: 4954907 - DNA, 25 bp, Homo sapien
tctgagacattgaatccctacactg

SEQ ID NO: 4954908 - DNA, 25 bp, Homo sapien
tagggcttcaacattcgtcgacaaa

SEQ ID NO: 4954909 - DNA, 25 bp, Homo sapien
ccacatcagcgtaattttgctcttt

SEQ ID NO: 4954910 - DNA, 25 bp, Homo sapien
accacatcagcgtaattttgctctt

SEQ ID NO: 4954911 - DNA, 25 bp, Homo sapien
caccacatcagcgtaattttgctct

SEQ ID NO: 4954912 - DNA, 25 bp, Homo sapien
atgagcttcaaccatcgttgaacat

SEQ ID NO: 4954913 - DNA, 25 bp, Homo sapien
taagacccatgccatagaaattagt

SEQ ID NO: 4954914 - DNA, 25 bp, Homo sapien
acatgagcttcaaccatcgttgaac

SEQ ID NO: 4954915 - DNA, 25 bp, Homo sapien
tcaacatgagcttcaaccatcgttg

SEQ ID NO: 4954916 - DNA, 25 bp, Homo sapien
cctggcgaccaagtctttccagtat

SEQ ID NO: 4954917 - DNA, 25 bp, Homo sapien
tggcgaccaagtctttccagtattt

SEQ ID NO: 4954918 - DNA, 25 bp, Homo sapien
ggtcctggcgaccaagtctttccag

SEQ ID NO: 4954919 - DNA, 25 bp, Homo sapien
gtcctggcgaccaagtctttccagt

SEQ ID NO: 4954920 - DNA, 25 bp, Homo sapien
tattgaacatagcaggtgctttcac

SEQ ID NO: 4954921 - DNA, 25 bp, Homo sapien
cttatattgaacatagcaggtgctt

SEQ ID NO: 4954922 - DNA, 25 bp, Homo sapien
ttatattgaacatagcaggtgcttt

SEQ ID NO: 4954923 - DNA, 25 bp, Homo sapien
tatattgaacatagcaggtgctttc

SEQ ID NO: 4954924 - DNA, 25 bp, Homo sapien
cttagagaatggaccaactactttc

SEQ ID NO: 4954925 - DNA, 25 bp, Homo sapien
ctttcttagagaatggaccaactac

SEQ ID NO: 4954926 - DNA, 25 bp, Homo sapien
ttcttagagaatggaccaactactt

SEQ ID NO: 4954927 - DNA, 25 bp, Homo sapien
gatctttcttagagaatggaccaac

SEQ ID NO: 4954928 - DNA, 25 bp, Homo sapien
tctacctcctgagctacacgtattg

SEQ ID NO: 4954929 - DNA, 25 bp, Homo sapien
caagacagaacgcaaactgccccat

SEQ ID NO: 4954930 - DNA, 25 bp, Homo sapien
cacgtattgatcagctttttattgt

SEQ ID NO: 4954931 - DNA, 25 bp, Homo sapien
gcaaactgccccataaaagcacggt

SEQ ID NO: 4954932 - DNA, 25 bp, Homo sapien
taaacttctcttcacaacctcatgt

SEQ ID NO: 4954933 - DNA, 25 bp, Homo sapien
tctcttcacaacctcatgtttcctt

SEQ ID NO: 4954934 - DNA, 25 bp, Homo sapien
ttctcttcacaacctcatgtttcct

SEQ ID NO: 4954935 - DNA, 25 bp, Homo sapien
tccagaggtaaagagagggactgta

SEQ ID NO: 4954936 - DNA, 25 bp, Homo sapien
taagcaacttgtgaattgaatgacc

SEQ ID NO: 4954937 - DNA, 25 bp, Homo sapien
ttgaatgaccatgacaaaaggctag

SEQ ID NO: 4954938 - DNA, 25 bp, Homo sapien
tatagccagctaaattattgcccaa

SEQ ID NO: 4954939 - DNA, 25 bp, Homo sapien
gcctggatgattctcttacaggtgt

SEQ ID NO: 4954940 - DNA, 25 bp, Homo sapien
cagagcaagcaagccgcctggatga

SEQ ID NO: 4954941 - DNA, 25 bp, Homo sapien
tgcatgcagagcaagcaagccgcct

SEQ ID NO: 4954942 - DNA, 25 bp, Homo sapien
gattctgagtctgattctaaagggc

SEQ ID NO: 4954943 - DNA, 25 bp, Homo sapien
tgatagctcattaaactggtgtctc

SEQ ID NO: 4954944 - DNA, 25 bp, Homo sapien
tatgtgatgggtatatgatagctca

SEQ ID NO: 4954945 - DNA, 25 bp, Homo sapien
tcaggatgcaattacataactactg

SEQ ID NO: 4954946 - DNA, 25 bp, Homo sapien
tacgtagggatgaatatcaggatgc

SEQ ID NO: 4954947 - DNA, 25 bp, Homo sapien
gaaaccagccttgtgcacaggagga

SEQ ID NO: 4954948 - DNA, 25 bp, Homo sapien
tgagctagtttctaccacagagagg

SEQ ID NO: 4954949 - DNA, 25 bp, Homo sapien
tagtggacttccaaacagaggagac

SEQ ID NO: 4954950 - DNA, 25 bp, Homo sapien
tgggattcctcctgcaagtttagcg

SEQ ID NO: 4954951 - DNA, 25 bp, Homo sapien
actgcaacctgctcctcactacaac

SEQ ID NO: 4954952 - DNA, 25 bp, Homo sapien
aacctcctactcattgcaacctgct

SEQ ID NO: 4954953 - DNA, 25 bp, Homo sapien
tgcccagtctggagtccagggacac

SEQ ID NO: 4954954 - DNA, 25 bp, Homo sapien
agtgcaacctccttctcactgcgac

SEQ ID NO: 4954955 - DNA, 25 bp, Homo sapien
tgccatctctttgcagtctcccctg

SEQ ID NO: 4954956 - DNA, 25 bp, Homo sapien
tcttgtcctaactctgccatctctt

SEQ ID NO: 4954957 - DNA, 25 bp, Homo sapien
caccatgcccaaccctcttgtccta

SEQ ID NO: 4954958 - DNA, 25 bp, Homo sapien
ccatctctttgcagtctcccctgag

SEQ ID NO: 4954959 - DNA, 25 bp, Homo sapien
ggaaaatgttagaacagggcaacaa

SEQ ID NO: 4954960 - DNA, 25 bp, Homo sapien
gtactggagcatctagacttagagt

SEQ ID NO: 4954961 - DNA, 25 bp, Homo sapien
gcctccattaaacttccagcaacaa

SEQ ID NO: 4954962 - DNA, 25 bp, Homo sapien
catctagacttagagtgaatcttct

SEQ ID NO: 4954963 - DNA, 25 bp, Homo sapien
aactggcctccattaaacttccagc

SEQ ID NO: 4954964 - DNA, 25 bp, Homo sapien
atcatgttgtataccctcttgtaca

SEQ ID NO: 4954965 - DNA, 25 bp, Homo sapien
tataccctcttgtacataatttttg

SEQ ID NO: 4954966 - DNA, 25 bp, Homo sapien
cataatgtatacatacctcaatcac

SEQ ID NO: 4954967 - DNA, 25 bp, Homo sapien
ttcaacaactccaaaaaacaagaca

SEQ ID NO: 4954968 - DNA, 25 bp, Homo sapien
aatcactgctgatcctcgtaccagc

SEQ ID NO: 4954969 - DNA, 25 bp, Homo sapien
tgttccactcagacatggcgtgtga

SEQ ID NO: 4954970 - DNA, 25 bp, Homo sapien
aagaaatcactgctgatcctcgtac

SEQ ID NO: 4954971 - DNA, 25 bp, Homo sapien
gaaatcactgctgatcctcgtacca

SEQ ID NO: 4954972 - DNA, 25 bp, Homo sapien
aaacaggaagatgcgggacgggtga

SEQ ID NO: 4954973 - DNA, 25 bp, Homo sapien
aaaacaggaagatgcgggacgggtg

SEQ ID NO: 4954974 - DNA, 25 bp, Homo sapien
ttcgccacctgtctgggtgccggtc

SEQ ID NO: 4954975 - DNA, 25 bp, Homo sapien
tctgccttcgccacctgtctgggtg

SEQ ID NO: 4954976 - DNA, 25 bp, Homo sapien
tgggtgccggtctcctccctgcctg

SEQ ID NO: 4954977 - DNA, 25 bp, Homo sapien
tcctctgccttcgccacctgtctgg

SEQ ID NO: 4954978 - DNA, 25 bp, Homo sapien
cccctccagctacagccgcagcctc

SEQ ID NO: 4954979 - DNA, 25 bp, Homo sapien
cctccagctacagccgcagcctctt

SEQ ID NO: 4954980 - DNA, 25 bp, Homo sapien
gggttctgcgcttcccccctccagc

SEQ ID NO: 4954981 - DNA, 25 bp, Homo sapien
tcgggttctgcgcttcccccctcca

SEQ ID NO: 4954982 - DNA, 25 bp, Homo sapien
gaagggctggccacggctggggggc

SEQ ID NO: 4954983 - DNA, 25 bp, Homo sapien
agctgccggaagggctggccacggc

SEQ ID NO: 4954984 - DNA, 25 bp, Homo sapien
gccggaagggctggccacggctggg

SEQ ID NO: 4954985 - DNA, 25 bp, Homo sapien
ctgccggaagggctggccacggctg

SEQ ID NO: 4954986 - DNA, 25 bp, Homo sapien
tgcccccgcccaggcagtcgctgtc

SEQ ID NO: 4954987 - DNA, 25 bp, Homo sapien
cccccgcccaggcagtcgctgtccc

SEQ ID NO: 4954988 - DNA, 25 bp, Homo sapien
ccccgcccaggcagtcgctgtcccc

SEQ ID NO: 4954989 - DNA, 25 bp, Homo sapien
tgggaaacccgaggctgctcaaaac

SEQ ID NO: 4954990 - DNA, 25 bp, Homo sapien
gctcaaaactcgtggagaattccgc

SEQ ID NO: 4954991 - DNA, 25 bp, Homo sapien
ggtggtgggaaacccgaggctgctc

SEQ ID NO: 4954992 - DNA, 25 bp, Homo sapien
cccgaggctgctcaaaactcgtgga

SEQ ID NO: 4954993 - DNA, 25 bp, Homo sapien
tgcaggatgacatgaatgcaccttc

SEQ ID NO: 4954994 - DNA, 25 bp, Homo sapien
ctgcaggatgacatgaatgcacctt

SEQ ID NO: 4954995 - DNA, 25 bp, Homo sapien
aggtgcctggtcttgcggaagactc

SEQ ID NO: 4954996 - DNA, 25 bp, Homo sapien
agggacatccagtcacattaaaacc

SEQ ID NO: 4954997 - DNA, 25 bp, Homo sapien
ctgggagctactccaagggacatcc

SEQ ID NO: 4954998 - DNA, 25 bp, Homo sapien
caagggacatccagtcacattaaaa

SEQ ID NO: 4954999 - DNA, 25 bp, Homo sapien
tgggagctactccaagggacatcca

SEQ ID NO: 4955000 - DNA, 25 bp, Homo sapien
aatcactgctgatcctcgtaccagc

SEQ ID NO: 4955001 - DNA, 25 bp, Homo sapien
aaagaaatcactgctgatcctcgta

SEQ ID NO: 4955002 - DNA, 25 bp, Homo sapien
gaaatcactgctgatcctcgtacca

SEQ ID NO: 4955003 - DNA, 25 bp, Homo sapien
aagaaatcactgctgatcctcgtac

SEQ ID NO: 4955004 - DNA, 25 bp, Homo sapien
gcgggggggctctgatcctgcccat

SEQ ID NO: 4955005 - DNA, 25 bp, Homo sapien
caagctctgaatgcggtaacgtgga

SEQ ID NO: 4955006 - DNA, 25 bp, Homo sapien
tgggcgggggggctctgatcctgcc

SEQ ID NO: 4955007 - DNA, 25 bp, Homo sapien
actgggcgggggggctctgatcctg

SEQ ID NO: 4955008 - DNA, 25 bp, Homo sapien
tcctgcccggtagcggcgggtcctc

SEQ ID NO: 4955009 - DNA, 25 bp, Homo sapien
ctcccccatcctgggactgccatcc

SEQ ID NO: 4955010 - DNA, 25 bp, Homo sapien
actgccatccctgcctcgcggcttg

SEQ ID NO: 4955011 - DNA, 25 bp, Homo sapien
ctccttcctgcccggtagcggcggg

SEQ ID NO: 4955012 - DNA, 25 bp, Homo sapien
tggacaggcccgctctggcaatgcc

SEQ ID NO: 4955013 - DNA, 25 bp, Homo sapien
atggacaggcccgctctggcaatgc

SEQ ID NO: 4955014 - DNA, 25 bp, Homo sapien
gcccatggacaggcccgctctggca

SEQ ID NO: 4955015 - DNA, 25 bp, Homo sapien
ccatggacaggcccgctctggcaat

SEQ ID NO: 4955016 - DNA, 25 bp, Homo sapien
tgcaggatgacatgaatgcaccttc

SEQ ID NO: 4955017 - DNA, 25 bp, Homo sapien
cctgcaggatgacatgaatgcacct

SEQ ID NO: 4955018 - DNA, 25 bp, Homo sapien
ctgcaggatgacatgaatgcacctt

SEQ ID NO: 4955019 - DNA, 25 bp, Homo sapien
cttgacatgcggattgtggcagcct

SEQ ID NO: 4955020 - DNA, 25 bp, Homo sapien
tattgtcacacgaggacttgacatg

SEQ ID NO: 4955021 - DNA, 25 bp, Homo sapien
cacgaggacttgacatgcggattgt

SEQ ID NO: 4955022 - DNA, 25 bp, Homo sapien
gtcacacgaggacttgacatgcgga

SEQ ID NO: 4955023 - DNA, 25 bp, Homo sapien
cacacttttgggattcgttgcagag

SEQ ID NO: 4955024 - DNA, 25 bp, Homo sapien
tgcagtcagctcaactacacacttt

SEQ ID NO: 4955025 - DNA, 25 bp, Homo sapien
ttcacataaatctggaactaccacc

SEQ ID NO: 4955026 - DNA, 25 bp, Homo sapien
gaatctcttgcgtgtcaagcacctt

SEQ ID NO: 4955027 - DNA, 25 bp, Homo sapien
cattgaagttagacaggcagctttt

SEQ ID NO: 4955028 - DNA, 25 bp, Homo sapien
atgccattgaagttagacaggcagc

SEQ ID NO: 4955029 - DNA, 25 bp, Homo sapien
tgaagttagacaggcagcttttgcc

SEQ ID NO: 4955030 - DNA, 25 bp, Homo sapien
gccattgaagttagacaggcagctt

SEQ ID NO: 4955031 - DNA, 25 bp, Homo sapien
tcatttcaaacactagaaacttgag

SEQ ID NO: 4955032 - DNA, 25 bp, Homo sapien
actcatttcaaacactagaaacttg

SEQ ID NO: 4955033 - DNA, 25 bp, Homo sapien
atttcaaacactagaaacttgagac

SEQ ID NO: 4955034 - DNA, 25 bp, Homo sapien
agactcatttcaaacactagaaact

SEQ ID NO: 4955035 - DNA, 25 bp, Homo sapien
ccttgggtcctggtgaccaagtctt

SEQ ID NO: 4955036 - DNA, 25 bp, Homo sapien
ttccttgggtcctggtgaccaagtc

SEQ ID NO: 4955037 - DNA, 25 bp, Homo sapien
atgcaatttgggttccttgggtcct

SEQ ID NO: 4955038 - DNA, 25 bp, Homo sapien
ttgggtcctggtgaccaagtctttc

SEQ ID NO: 4955039 - DNA, 25 bp, Homo sapien
tattgaacatagcaggtgctttcac

SEQ ID NO: 4955040 - DNA, 25 bp, Homo sapien
cttatattgaacatagcaggtgctt

SEQ ID NO: 4955041 - DNA, 25 bp, Homo sapien
ttatattgaacatagcaggtgcttt

SEQ ID NO: 4955042 - DNA, 25 bp, Homo sapien
tatattgaacatagcaggtgctttc

SEQ ID NO: 4955043 - DNA, 25 bp, Homo sapien
actgatctttcttagagaatggacc

SEQ ID NO: 4955044 - DNA, 25 bp, Homo sapien
ctttcttagagaatggaccaactac

SEQ ID NO: 4955045 - DNA, 25 bp, Homo sapien
gatctttcttagagaatggaccaac

SEQ ID NO: 4955046 - DNA, 25 bp, Homo sapien
tactgatctttcttagagaatggac

SEQ ID NO: 4955047 - DNA, 25 bp, Homo sapien
ggcacttgttcttaacaaccgccat

SEQ ID NO: 4955048 - DNA, 25 bp, Homo sapien
ttcataaggcacttgttcttaacaa

SEQ ID NO: 4955049 - DNA, 25 bp, Homo sapien
cataaggcacttgttcttaacaacc

SEQ ID NO: 4955050 - DNA, 25 bp, Homo sapien
taaggcacttgttcttaacaaccgc

SEQ ID NO: 4955051 - DNA, 25 bp, Homo sapien
tagagctaggatttagtttccattc

SEQ ID NO: 4955052 - DNA, 25 bp, Homo sapien
ttcatgatcaatcgaccgctccaga

SEQ ID NO: 4955053 - DNA, 25 bp, Homo sapien
tcaatcgaccgctccagaggaaaca

SEQ ID NO: 4955054 - DNA, 25 bp, Homo sapien
ctgaggatcaaccaccatgatgaat

SEQ ID NO: 4955055 - DNA, 25 bp, Homo sapien
catgatgaatgacacagcaactatc

SEQ ID NO: 4955056 - DNA, 25 bp, Homo sapien
tattctctctcacatgatgacaaag

SEQ ID NO: 4955057 - DNA, 25 bp, Homo sapien
catgatgacaaagtcgttgaaatgt

SEQ ID NO: 4955058 - DNA, 25 bp, Homo sapien
caaagtcgttgaaatgtcatgtcat

SEQ ID NO: 4955059 - DNA, 25 bp, Homo sapien
tctctcacatgatgacaaagtcgtt

SEQ ID NO: 4955060 - DNA, 25 bp, Homo sapien
catctcaaaagccactagtgcagga

SEQ ID NO: 4955061 - DNA, 25 bp, Homo sapien
agtgcaggaactattagaagcccca

SEQ ID NO: 4955062 - DNA, 25 bp, Homo sapien
caaaagccactagtgcaggaactat

SEQ ID NO: 4955063 - DNA, 25 bp, Homo sapien
gccactagtgcaggaactattagaa

SEQ ID NO: 4955064 - DNA, 25 bp, Homo sapien
tggagcaggttaaataaaggtgcgt

SEQ ID NO: 4955065 - DNA, 25 bp, Homo sapien
taaaggtgcgtgacttcatgtcctt

SEQ ID NO: 4955066 - DNA, 25 bp, Homo sapien
tcatgtcctttggaattggaaatcc

SEQ ID NO: 4955067 - DNA, 25 bp, Homo sapien
tggaattggaaatccaagcttcctc

SEQ ID NO: 4955068 - DNA, 25 bp, Homo sapien
catggccgcctgtaacgtcagggtg

SEQ ID NO: 4955069 - DNA, 25 bp, Homo sapien
tcatggccgcctgtaacgtcagggt

SEQ ID NO: 4955070 - DNA, 25 bp, Homo sapien
actcatggccgcctgtaacgtcagg

SEQ ID NO: 4955071 - DNA, 25 bp, Homo sapien
ctcatggccgcctgtaacgtcaggg

SEQ ID NO: 4955072 - DNA, 25 bp, Homo sapien
cagtcctttggaacatatcccacga

SEQ ID NO: 4955073 - DNA, 25 bp, Homo sapien
tcacgtgagtcaccagcatccctgg

SEQ ID NO: 4955074 - DNA, 25 bp, Homo sapien
cacacatcaacaccgtcacgtgagt

SEQ ID NO: 4955075 - DNA, 25 bp, Homo sapien
tccagtaccagataggtccgtcagt

SEQ ID NO: 4955076 - DNA, 25 bp, Homo sapien
aagaaactggctcttgtcctcaaag

SEQ ID NO: 4955077 - DNA, 25 bp, Homo sapien
tgtgagtgaagaaactggctcttgt

SEQ ID NO: 4955078 - DNA, 25 bp, Homo sapien
gggttcttcagaaagagtatttcca

SEQ ID NO: 4955079 - DNA, 25 bp, Homo sapien
tgggttcttcagaaagagtatttcc

SEQ ID NO: 4955080 - DNA, 25 bp, Homo sapien
tgagttcagtgtccaggtgacccaa

SEQ ID NO: 4955081 - DNA, 25 bp, Homo sapien
ctgagttcagtgtccaggtgaccca

SEQ ID NO: 4955082 - DNA, 25 bp, Homo sapien
gttcagtgtccaggtgacccaagct

SEQ ID NO: 4955083 - DNA, 25 bp, Homo sapien
gagttcagtgtccaggtgacccaag

SEQ ID NO: 4955084 - DNA, 25 bp, Homo sapien
tccagctggccttcatctgctctcc

SEQ ID NO: 4955085 - DNA, 25 bp, Homo sapien
ggtacagctctccagctggccttca

SEQ ID NO: 4955086 - DNA, 25 bp, Homo sapien
cagctggccttcatctgctctccaa

SEQ ID NO: 4955087 - DNA, 25 bp, Homo sapien
cagtcactgaggggtacagctctcc

SEQ ID NO: 4955088 - DNA, 25 bp, Homo sapien
gtggaaggccagcaaagccacacag

SEQ ID NO: 4955089 - DNA, 25 bp, Homo sapien
gcgccccagggaatgcaaggaactt

SEQ ID NO: 4955090 - DNA, 25 bp, Homo sapien
ctcatagggacagcgccccagggaa

SEQ ID NO: 4955091 - DNA, 25 bp, Homo sapien
gccccagggaatgcaaggaactttg

SEQ ID NO: 4955092 - DNA, 25 bp, Homo sapien
atagggacagcgccccagggaatgc

SEQ ID NO: 4955093 - DNA, 25 bp, Homo sapien
ctgggtgccggtgtcctccttgccc

SEQ ID NO: 4955094 - DNA, 25 bp, Homo sapien
gccggtgtcctccttgcccggccgc

SEQ ID NO: 4955095 - DNA, 25 bp, Homo sapien
tgggtgccggtgtcctccttgcccg

SEQ ID NO: 4955096 - DNA, 25 bp, Homo sapien
ggtgtcctccttgcccggccgcagc

SEQ ID NO: 4955097 - DNA, 25 bp, Homo sapien
agcttgctgggtccgcgaggcgcgg

SEQ ID NO: 4955098 - DNA, 25 bp, Homo sapien
gagcgcgagcttgctgggtccgcga

SEQ ID NO: 4955099 - DNA, 25 bp, Homo sapien
cgagcttgctgggtccgcgaggcgc

SEQ ID NO: 4955100 - DNA, 25 bp, Homo sapien
cgcgagcttgctgggtccgcgaggc

SEQ ID NO: 4955101 - DNA, 25 bp, Homo sapien
agagaagacaagggacgccccgaga

SEQ ID NO: 4955102 - DNA, 25 bp, Homo sapien
agggacgccccgagagggtagacat

SEQ ID NO: 4955103 - DNA, 25 bp, Homo sapien
ggagagaagacaagggacgccccga

SEQ ID NO: 4955104 - DNA, 25 bp, Homo sapien
agaagacaagggacgccccgagagg

SEQ ID NO: 4955105 - DNA, 25 bp, Homo sapien
cctgtttcttccatgatttggaggg

SEQ ID NO: 4955106 - DNA, 25 bp, Homo sapien
gaattccgcctgcaggatgacatga

SEQ ID NO: 4955107 - DNA, 25 bp, Homo sapien
gcctgcaggatgacatgaatgcact

SEQ ID NO: 4955108 - DNA, 25 bp, Homo sapien
tgcaggatgacatgaatgcactttc

SEQ ID NO: 4955109 - DNA, 25 bp, Homo sapien
gaaatcactgctgattctcacacca

SEQ ID NO: 4955110 - DNA, 25 bp, Homo sapien
caagctaatggtctacacagacaaa

SEQ ID NO: 4955111 - DNA, 25 bp, Homo sapien
ctcaaagaaatcactgctgattctc

SEQ ID NO: 4955112 - DNA, 25 bp, Homo sapien
agctaatggtctacacagacaaaat

SEQ ID NO: 4955113 - DNA, 25 bp, Homo sapien
gcatgagttttagtcctaactctca

SEQ ID NO: 4955114 - DNA, 25 bp, Homo sapien
ttagtcctaactctcatttatccac

SEQ ID NO: 4955115 - DNA, 25 bp, Homo sapien
gttttagtcctaactctcatttatc

SEQ ID NO: 4955116 - DNA, 25 bp, Homo sapien
ccttgtctcttgtgatgcaccccag

SEQ ID NO: 4955117 - DNA, 25 bp, Homo sapien
gaaggagtgagagggacttcacgca

SEQ ID NO: 4955118 - DNA, 25 bp, Homo sapien
cttcacgcaataaagtttcctggtg

SEQ ID NO: 4955119 - DNA, 25 bp, Homo sapien
ttggcagagtccacgtaaaagaagg

SEQ ID NO: 4955120 - DNA, 25 bp, Homo sapien
gtgttacactgccaccgtaattgtg

SEQ ID NO: 4955121 - DNA, 25 bp, Homo sapien
agcaacagccgcagcctcttctctt

SEQ ID NO: 4955122 - DNA, 25 bp, Homo sapien
tgggtgccggtctcctccctgcccg

SEQ ID NO: 4955123 - DNA, 25 bp, Homo sapien
cccgtcctcgcagtcctcgggctgt

SEQ ID NO: 4955124 - DNA, 25 bp, Homo sapien
tttgccgtcgccacctgtctgggtg

SEQ ID NO: 4955125 - DNA, 25 bp, Homo sapien
ggcctctcccgcacaccgccgccac

SEQ ID NO: 4955126 - DNA, 25 bp, Homo sapien
aagaaggacccagcgcgagcgtcct

SEQ ID NO: 4955127 - DNA, 25 bp, Homo sapien
ctctcccgcacaccgccgccacgcc

SEQ ID NO: 4955128 - DNA, 25 bp, Homo sapien
agaagaaggacccagcgcgagcgtc

SEQ ID NO: 4955129 - DNA, 25 bp, Homo sapien
ggagagaagagaagggacgcccgga

SEQ ID NO: 4955130 - DNA, 25 bp, Homo sapien
gagaagagaagggacgcccggagag

SEQ ID NO: 4955131 - DNA, 25 bp, Homo sapien
agggacgcccggagagggtggacat

SEQ ID NO: 4955132 - DNA, 25 bp, Homo sapien
agagaagggacgcccggagagggtg

SEQ ID NO: 4955133 - DNA, 25 bp, Homo sapien
cctgcaggatgacatgaatgcacct

SEQ ID NO: 4955134 - DNA, 25 bp, Homo sapien
tgcaggatgacatgaatgcaccttc

SEQ ID NO: 4955135 - DNA, 25 bp, Homo sapien
ctgcaggatgacatgaatgcacctt

SEQ ID NO: 4955136 - DNA, 25 bp, Homo sapien
tttgcatcgctgtctagagcccaga

SEQ ID NO: 4955137 - DNA, 25 bp, Homo sapien
tcatagaccagggtttgcatcgctg

SEQ ID NO: 4955138 - DNA, 25 bp, Homo sapien
catcgctgtctagagcccagatctg

SEQ ID NO: 4955139 - DNA, 25 bp, Homo sapien
tgcatcgctgtctagagcccagatc

SEQ ID NO: 4955140 - DNA, 25 bp, Homo sapien
tctgggttgaactgcgccccgttca

SEQ ID NO: 4955141 - DNA, 25 bp, Homo sapien
aacttctgggttgaactgcgccccg

SEQ ID NO: 4955142 - DNA, 25 bp, Homo sapien
ggtctggacccgcgaggtgtcccac

SEQ ID NO: 4955143 - DNA, 25 bp, Homo sapien
aggtaaacttctgggttgaactgcg

SEQ ID NO: 4955144 - DNA, 25 bp, Homo sapien
aaaaccagcaaacaactcctaggtg

SEQ ID NO: 4955145 - DNA, 25 bp, Homo sapien
ctcctaggtgagagccataggtgga

SEQ ID NO: 4955146 - DNA, 25 bp, Homo sapien
gccaatgactgttccataaaaccag

SEQ ID NO: 4955147 - DNA, 25 bp, Homo sapien
catgccaatgactgttccataaaac

SEQ ID NO: 4955148 - DNA, 25 bp, Homo sapien
atccagaatcaccttgggaaccgtg

SEQ ID NO: 4955149 - DNA, 25 bp, Homo sapien
tgcgactgcatatccagaatcacct

SEQ ID NO: 4955150 - DNA, 25 bp, Homo sapien
ctgcatatccagaatcaccttggga

SEQ ID NO: 4955151 - DNA, 25 bp, Homo sapien
tatgcgactgcatatccagaatcac

SEQ ID NO: 4955152 - DNA, 25 bp, Homo sapien
tattacttccaatgtcgcagggtgt

SEQ ID NO: 4955153 - DNA, 25 bp, Homo sapien
aggatcatattacttccaatgtcgc

SEQ ID NO: 4955154 - DNA, 25 bp, Homo sapien
catattacttccaatgtcgcagggt

SEQ ID NO: 4955155 - DNA, 25 bp, Homo sapien
tacttccaatgtcgcagggtgtgta

SEQ ID NO: 4955156 - DNA, 25 bp, Homo sapien
ctgaggccactgcagcctttcccgg

SEQ ID NO: 4955157 - DNA, 25 bp, Homo sapien
cagcctttcccggggaagatgacac

SEQ ID NO: 4955158 - DNA, 25 bp, Homo sapien
atctgaactgaggtacccccaaaag

SEQ ID NO: 4955159 - DNA, 25 bp, Homo sapien
tctgaactgaggtacccccaaaagc

SEQ ID NO: 4955160 - DNA, 25 bp, Homo sapien
gctacaaacgggtcatagggatcac

SEQ ID NO: 4955161 - DNA, 25 bp, Homo sapien
acaaacgggtcatagggatcacact

SEQ ID NO: 4955162 - DNA, 25 bp, Homo sapien
tggctacaaacgggtcatagggatc

SEQ ID NO: 4955163 - DNA, 25 bp, Homo sapien
tacaaacgggtcatagggatcacac

SEQ ID NO: 4955164 - DNA, 25 bp, Homo sapien
gagatgagtctgctgtgagattaga

SEQ ID NO: 4955165 - DNA, 25 bp, Homo sapien
gatgagtctgctgtgagattagatg

SEQ ID NO: 4955166 - DNA, 25 bp, Homo sapien
gagtctgctgtgagattagatgtcc

SEQ ID NO: 4955167 - DNA, 25 bp, Homo sapien
tgagtctgctgtgagattagatgtc

SEQ ID NO: 4955168 - DNA, 25 bp, Homo sapien
tgtggaggtgggagtcagggctgac

SEQ ID NO: 4955169 - DNA, 25 bp, Homo sapien
ggacaggttggagaggaagaggtac

SEQ ID NO: 4955170 - DNA, 25 bp, Homo sapien
accgatgtcaggcaaggacaggttg

SEQ ID NO: 4955171 - DNA, 25 bp, Homo sapien
catgctggaggtgaaaccgatgtca

SEQ ID NO: 4955172 - DNA, 25 bp, Homo sapien
gcccagcgaggacaggctgctgttc

SEQ ID NO: 4955173 - DNA, 25 bp, Homo sapien
cagcccagcgaggacaggctgctgt

SEQ ID NO: 4955174 - DNA, 25 bp, Homo sapien
aacagcccagcgaggacaggctgct

SEQ ID NO: 4955175 - DNA, 25 bp, Homo sapien
gctgctgttctggatcctctgagct

SEQ ID NO: 4955176 - DNA, 25 bp, Homo sapien
gaggaataaagagacatctgttaaa

SEQ ID NO: 4955177 - DNA, 25 bp, Homo sapien
gaggaggaataaagagacatctgtt

SEQ ID NO: 4955178 - DNA, 25 bp, Homo sapien
ggaataaagagacatctgttaaatt

SEQ ID NO: 4955179 - DNA, 25 bp, Homo sapien
ggaggaataaagagacatctgttaa

SEQ ID NO: 4955180 - DNA, 25 bp, Homo sapien
ctctgaattgatgacccctttgagg

SEQ ID NO: 4955181 - DNA, 25 bp, Homo sapien
gatgacccctttgaggaagcccaga

SEQ ID NO: 4955182 - DNA, 25 bp, Homo sapien
tgatgacccctttgaggaagcccag

SEQ ID NO: 4955183 - DNA, 25 bp, Homo sapien
aagccaaactctgaattgatgaccc

SEQ ID NO: 4955184 - DNA, 25 bp, Homo sapien
ccatctgcccacggcactctcctgt

SEQ ID NO: 4955185 - DNA, 25 bp, Homo sapien
tgcccacggcactctcctgtttgtc

SEQ ID NO: 4955186 - DNA, 25 bp, Homo sapien
atctgcccacggcactctcctgttt

SEQ ID NO: 4955187 - DNA, 25 bp, Homo sapien
tctgcccacggcactctcctgtttg

SEQ ID NO: 4955188 - DNA, 25 bp, Homo sapien
ccgcccttcccctctgctgggccat

SEQ ID NO: 4955189 - DNA, 25 bp, Homo sapien
gaaccgcccttcccctctgctgggc

SEQ ID NO: 4955190 - DNA, 25 bp, Homo sapien
accgcccttcccctctgctgggcca

SEQ ID NO: 4955191 - DNA, 25 bp, Homo sapien
ggtgatccgccaatctctgtcttcc

SEQ ID NO: 4955192 - DNA, 25 bp, Homo sapien
caggtgatccgccaatctctgtctt

SEQ ID NO: 4955193 - DNA, 25 bp, Homo sapien
gatccgccaatctctgtcttccaag

SEQ ID NO: 4955194 - DNA, 25 bp, Homo sapien
tcaggtgatccgccaatctctgtct

SEQ ID NO: 4955195 - DNA, 25 bp, Homo sapien
cgactgttctgctgcgcagcctccg

SEQ ID NO: 4955196 - DNA, 25 bp, Homo sapien
gctgcgcagcctccgcagggcactt

SEQ ID NO: 4955197 - DNA, 25 bp, Homo sapien
cgcagcctccgcagggcactttgta

SEQ ID NO: 4955198 - DNA, 25 bp, Homo sapien
ctgctgcgcagcctccgcagggcac

SEQ ID NO: 4955199 - DNA, 25 bp, Homo sapien
ccccgtggctgcgatgatgtcaata

SEQ ID NO: 4955200 - DNA, 25 bp, Homo sapien
tatacatatgataggcctcccacag

SEQ ID NO: 4955201 - DNA, 25 bp, Homo sapien
ggttactagcgaatgttcagcaccg

SEQ ID NO: 4955202 - DNA, 25 bp, Homo sapien
cgatgtattcatccctgcaagccca

SEQ ID NO: 4955203 - DNA, 25 bp, Homo sapien
tgtgcaaaggcagcagacaatctgg

SEQ ID NO: 4955204 - DNA, 25 bp, Homo sapien
taactaacatttgcaccgagaccag

SEQ ID NO: 4955205 - DNA, 25 bp, Homo sapien
tcaagacagttcagcaagagcagtg

SEQ ID NO: 4955206 - DNA, 25 bp, Homo sapien
gaggttcgacacacattcaatgcgt

SEQ ID NO: 4955207 - DNA, 25 bp, Homo sapien
gacagctggtatcgtgggtctacag

SEQ ID NO: 4955208 - DNA, 25 bp, Homo sapien
aagacttcattgacaaaaccgacag

SEQ ID NO: 4955209 - DNA, 25 bp, Homo sapien
gaaaaataggtcagtatatgctgta

SEQ ID NO: 4955210 - DNA, 25 bp, Homo sapien
tgtatcttggtcaaccgttctttca

SEQ ID NO: 4955211 - DNA, 25 bp, Homo sapien
ggctgtcctatgcactagagcacat

SEQ ID NO: 4955212 - DNA, 25 bp, Homo sapien
ggccccagcttccaatgttgttcaa

SEQ ID NO: 4955213 - DNA, 25 bp, Homo sapien
tattacactagcaaggcttctcgac

SEQ ID NO: 4955214 - DNA, 25 bp, Homo sapien
tatggaacccttggaaagacagaag

SEQ ID NO: 4955215 - DNA, 25 bp, Homo sapien
gctgtttctgatgcaggatctctgg

SEQ ID NO: 4955216 - DNA, 25 bp, Homo sapien
tatacaaagtctacatcctacgtca

SEQ ID NO: 4955217 - DNA, 25 bp, Homo sapien
gacttctgtaggtgacatccctgac

SEQ ID NO: 4955218 - DNA, 25 bp, Homo sapien
cactagttcttcagaagcacgctgt

SEQ ID NO: 4955219 - DNA, 25 bp, Homo sapien
caaaggcatggttagttgtcccaca

SEQ ID NO: 4955220 - DNA, 25 bp, Homo sapien
cagtttctagatagtaacatcccgt

SEQ ID NO: 4955221 - DNA, 25 bp, Homo sapien
agcaacaggcgatgggctcaaaggc

SEQ ID NO: 4955222 - DNA, 25 bp, Homo sapien
gaagcgaggtattaaacatgaagag

SEQ ID NO: 4955223 - DNA, 25 bp, Homo sapien
tttggcttcgaaatctgtctcttaa

SEQ ID NO: 4955224 - DNA, 25 bp, Homo sapien
caaatcatgaagctctctgagattc

SEQ ID NO: 4955225 - DNA, 25 bp, Homo sapien
tgcaggcttgagagtaaaccaaatc

SEQ ID NO: 4955226 - DNA, 25 bp, Homo sapien
ggcattgatccgaaatgctgaagaa

SEQ ID NO: 4955227 - DNA, 25 bp, Homo sapien
cagtaagacttctgtgtctaatccc

SEQ ID NO: 4955228 - DNA, 25 bp, Homo sapien
cgtccatatgccatatgccaaccga

SEQ ID NO: 4955229 - DNA, 25 bp, Homo sapien
tgccatatgccaaccgacacaaatg

SEQ ID NO: 4955230 - DNA, 25 bp, Homo sapien
tctgtgtctaatcccccgtccatat

SEQ ID NO: 4955231 - DNA, 25 bp, Homo sapien
tcaggcccctgctaacatacattga

SEQ ID NO: 4955232 - DNA, 25 bp, Homo sapien
tagaggagccacacaattgaagaat

SEQ ID NO: 4955233 - DNA, 25 bp, Homo sapien
gaaatgactatacatgattcaggcc

SEQ ID NO: 4955234 - DNA, 25 bp, Homo sapien
tctgaaaaaataccaggcctgactc

SEQ ID NO: 4955235 - DNA, 25 bp, Homo sapien
tcttccagatattcaatgtcggcag

SEQ ID NO: 4955236 - DNA, 25 bp, Homo sapien
tccaactgtatcaaccacagacctt

SEQ ID NO: 4955237 - DNA, 25 bp, Homo sapien
attcaatgtcggcagtgcaatatcc

SEQ ID NO: 4955238 - DNA, 25 bp, Homo sapien
cttccgtccggtaagaaatgcacgt

SEQ ID NO: 4955239 - DNA, 25 bp, Homo sapien
taatttgtaacatacaaccataatc

SEQ ID NO: 4955240 - DNA, 25 bp, Homo sapien
ttgtaacatacaaccataatctgca

SEQ ID NO: 4955241 - DNA, 25 bp, Homo sapien
atttgtaacatacaaccataatctg

SEQ ID NO: 4955242 - DNA, 25 bp, Homo sapien
ctaatttgtaacatacaaccataat

SEQ ID NO: 4955243 - DNA, 25 bp, Homo sapien
caaatacatggagagggcaaggcac

SEQ ID NO: 4955244 - DNA, 25 bp, Homo sapien
caaatattggaacattcttggtcaa

SEQ ID NO: 4955245 - DNA, 25 bp, Homo sapien
ggttccagtctgtatacttcttcga

SEQ ID NO: 4955246 - DNA, 25 bp, Homo sapien
tcgaatcatcaatctgtatcttggc

SEQ ID NO: 4955247 - DNA, 25 bp, Homo sapien
aaacagtttaattattagaattcat

SEQ ID NO: 4955248 - DNA, 25 bp, Homo sapien
aacagtttaattattagaattcata

SEQ ID NO: 4955249 - DNA, 25 bp, Homo sapien
aactcagttgtgctcccagtcagta

SEQ ID NO: 4955250 - DNA, 25 bp, Homo sapien
ttaaagagacccaagtgactgcaca

SEQ ID NO: 4955251 - DNA, 25 bp, Homo sapien
ccaaagttgcctccgagattttcac

SEQ ID NO: 4955252 - DNA, 25 bp, Homo sapien
cagaaaagggacaacaagcaatgcc

SEQ ID NO: 4955253 - DNA, 25 bp, Homo sapien
gttcatcaggcagatacttcactat

SEQ ID NO: 4955254 - DNA, 25 bp, Homo sapien
caacagctgtgtgacacagtacctc

SEQ ID NO: 4955255 - DNA, 25 bp, Homo sapien
acagctgtgtgacacagtacctcct

SEQ ID NO: 4955256 - DNA, 25 bp, Homo sapien
cagttcatcaggcagatacttcact

SEQ ID NO: 4955257 - DNA, 25 bp, Homo sapien
taaaacaggcaacacagttaactga

SEQ ID NO: 4955258 - DNA, 25 bp, Homo sapien
ctctattagccgcagagggccctgc

SEQ ID NO: 4955259 - DNA, 25 bp, Homo sapien
gctgcaacctgaaccaagccctgta

SEQ ID NO: 4955260 - DNA, 25 bp, Homo sapien
cacaagagcagtaaagatagttggc

SEQ ID NO: 4955261 - DNA, 25 bp, Homo sapien
gacaattcttacagaacgaatgtcc

SEQ ID NO: 4955262 - DNA, 25 bp, Homo sapien
cttacagaacgaatgtccgcaaggg

SEQ ID NO: 4955263 - DNA, 25 bp, Homo sapien
gaggacaatatggtgcatgatctaa

SEQ ID NO: 4955264 - DNA, 25 bp, Homo sapien
tctaaacaacgctcaagacaattct

SEQ ID NO: 4955265 - DNA, 25 bp, Homo sapien
agtgtaaccataccctccagaatgt

SEQ ID NO: 4955266 - DNA, 25 bp, Homo sapien
taaactatccactgaaaagcttgta

SEQ ID NO: 4955267 - DNA, 25 bp, Homo sapien
aaattctccatcaacaaaggcctcc

SEQ ID NO: 4955268 - DNA, 25 bp, Homo sapien
gaaagggcagtgataagtgtaacca

SEQ ID NO: 4955269 - DNA, 25 bp, Homo sapien
gacatcgattaattcttctggaata

SEQ ID NO: 4955270 - DNA, 25 bp, Homo sapien
aatctgagacatcgattaattcttc

SEQ ID NO: 4955271 - DNA, 25 bp, Homo sapien
cactcgaaatctgagacatcgatta

SEQ ID NO: 4955272 - DNA, 25 bp, Homo sapien
tgcagagagaacactcgaaatctga

SEQ ID NO: 4955273 - DNA, 25 bp, Homo sapien
aacatacagacttcattgggagttt

SEQ ID NO: 4955274 - DNA, 25 bp, Homo sapien
gaaaacatacagacttcattgggag

SEQ ID NO: 4955275 - DNA, 25 bp, Homo sapien
aaggaaaacatacagacttcattgg

SEQ ID NO: 4955276 - DNA, 25 bp, Homo sapien
ctaaggaaaacatacagacttcatt

SEQ ID NO: 4955277 - DNA, 25 bp, Homo sapien
aatttatagactgtgctgactgagc

SEQ ID NO: 4955278 - DNA, 25 bp, Homo sapien
ttacaatcacatcctgttctaaaag

SEQ ID NO: 4955279 - DNA, 25 bp, Homo sapien
ttcttgaactgacagaacaggttct

SEQ ID NO: 4955280 - DNA, 25 bp, Homo sapien
caggttctgaggacactctttttaa

SEQ ID NO: 4955281 - DNA, 25 bp, Homo sapien
gaagtgacctctggtatttcttcac

SEQ ID NO: 4955282 - DNA, 25 bp, Homo sapien
aagtgacctctggtatttcttcact

SEQ ID NO: 4955283 - DNA, 25 bp, Homo sapien
ctgaagtgacctctggtatttcttc

SEQ ID NO: 4955284 - DNA, 25 bp, Homo sapien
tgaagtgacctctggtatttcttca

SEQ ID NO: 4955285 - DNA, 25 bp, Homo sapien
ctgctttgggctaggttcattgaga

SEQ ID NO: 4955286 - DNA, 25 bp, Homo sapien
gctttgggctaggttcattgagaga

SEQ ID NO: 4955287 - DNA, 25 bp, Homo sapien
tgggctaggttcattgagagactga

SEQ ID NO: 4955288 - DNA, 25 bp, Homo sapien
tttgggctaggttcattgagagact

SEQ ID NO: 4955289 - DNA, 25 bp, Homo sapien
ctgtttttagtacatggtaatgaac

SEQ ID NO: 4955290 - DNA, 25 bp, Homo sapien
tgtttttagtacatggtaatgaact

SEQ ID NO: 4955291 - DNA, 25 bp, Homo sapien
cttttgtacttgcagctttgcaggt

SEQ ID NO: 4955292 - DNA, 25 bp, Homo sapien
tttgtacttgcagctttgcaggtgc

SEQ ID NO: 4955293 - DNA, 25 bp, Homo sapien
ttgtacttgcagctttgcaggtgca

SEQ ID NO: 4955294 - DNA, 25 bp, Homo sapien
tgtacttgcagctttgcaggtgcaa

SEQ ID NO: 4955295 - DNA, 25 bp, Homo sapien
tgaagaaagagttgtaaggcatcac

SEQ ID NO: 4955296 - DNA, 25 bp, Homo sapien
ctgaagaaagagttgtaaggcatca

SEQ ID NO: 4955297 - DNA, 25 bp, Homo sapien
taaaaaaccagcatcgcagagtact

SEQ ID NO: 4955298 - DNA, 25 bp, Homo sapien
ctaaaaaaccagcatcgcagagtac

SEQ ID NO: 4955299 - DNA, 25 bp, Homo sapien
aaaaaccagcatcgcagagtacttt

SEQ ID NO: 4955300 - DNA, 25 bp, Homo sapien
aaccagcatcgcagagtacttttcc

SEQ ID NO: 4955301 - DNA, 25 bp, Homo sapien
ttggagaccagcatatgattccgct

SEQ ID NO: 4955302 - DNA, 25 bp, Homo sapien
actcttggagaccagcatatgattc

SEQ ID NO: 4955303 - DNA, 25 bp, Homo sapien
ctcaggccaatctggaagttgaaaa

SEQ ID NO: 4955304 - DNA, 25 bp, Homo sapien
tcttggagaccagcatatgattccg

SEQ ID NO: 4955305 - DNA, 25 bp, Homo sapien
aaatttttacaatcaagtcactggg

SEQ ID NO: 4955306 - DNA, 25 bp, Homo sapien
ctgtaaatttttacaatcaagtcac

SEQ ID NO: 4955307 - DNA, 25 bp, Homo sapien
gtaaatttttacaatcaagtcactg

SEQ ID NO: 4955308 - DNA, 25 bp, Homo sapien
atttttacaatcaagtcactgggtt

SEQ ID NO: 4955309 - DNA, 25 bp, Homo sapien
gatgacatgcacgttcagaactgct

SEQ ID NO: 4955310 - DNA, 25 bp, Homo sapien
taaaatgtatccactctgaccaaag

SEQ ID NO: 4955311 - DNA, 25 bp, Homo sapien
taagaagagaagatgcacgccctaa

SEQ ID NO: 4955312 - DNA, 25 bp, Homo sapien
tacagtttctttacggcagcagtga

SEQ ID NO: 4955313 - DNA, 25 bp, Homo sapien
tttgaaaagcatacacaaggtctgc

SEQ ID NO: 4955314 - DNA, 25 bp, Homo sapien
tcaaattcttaagcgccaagtgcgc

SEQ ID NO: 4955315 - DNA, 25 bp, Homo sapien
gcaggtatctgtattgcccagcaag

SEQ ID NO: 4955316 - DNA, 25 bp, Homo sapien
tgtatgctctctacgtgaccttgag

SEQ ID NO: 4955317 - DNA, 25 bp, Homo sapien
gattatgtggcactcagcacaaggg

SEQ ID NO: 4955318 - DNA, 25 bp, Homo sapien
agcacaagggcctccattctaattc

SEQ ID NO: 4955319 - DNA, 25 bp, Homo sapien
gtgcaggtcagtctaaaacaaacgg

SEQ ID NO: 4955320 - DNA, 25 bp, Homo sapien
caaacggcctcccatacatttttgt

SEQ ID NO: 4955321 - DNA, 25 bp, Homo sapien
taagaaacatctttagggatcagga

SEQ ID NO: 4955322 - DNA, 25 bp, Homo sapien
cattaacactagattcagaaattgg

SEQ ID NO: 4955323 - DNA, 25 bp, Homo sapien
tctcctgacctataatatgcttacc

SEQ ID NO: 4955324 - DNA, 25 bp, Homo sapien
tacccacataaatggtagcctagat

SEQ ID NO: 4955325 - DNA, 25 bp, Homo sapien
gggatcatttcagtaggctcaagca

SEQ ID NO: 4955326 - DNA, 25 bp, Homo sapien
ttaggagaagcggaagatacagcac

SEQ ID NO: 4955327 - DNA, 25 bp, Homo sapien
tgtgagacacttataaatcggccct

SEQ ID NO: 4955328 - DNA, 25 bp, Homo sapien
tataaggcaggatgaaccctagacc

SEQ ID NO: 4955329 - DNA, 25 bp, Homo sapien
ctggtgcagtagctccccgagcctg

SEQ ID NO: 4955330 - DNA, 25 bp, Homo sapien
gctggcccggaaaccacttctcggc

SEQ ID NO: 4955331 - DNA, 25 bp, Homo sapien
tcccggtagcgcccctggtgcagta

SEQ ID NO: 4955332 - DNA, 25 bp, Homo sapien
ctgctcgcagcgcctcgcaggcggc

SEQ ID NO: 4955333 - DNA, 25 bp, Homo sapien
cacggtcaccggctcgctcaggaag

SEQ ID NO: 4955334 - DNA, 25 bp, Homo sapien
agcgggcgcggagttccctccgcag

SEQ ID NO: 4955335 - DNA, 25 bp, Homo sapien
cacagggcacggtcaccggctcgct

SEQ ID NO: 4955336 - DNA, 25 bp, Homo sapien
cggggcggtcccttcagcatcagtg

SEQ ID NO: 4955337 - DNA, 25 bp, Homo sapien
cggagccggtagttgaacaccaggc

SEQ ID NO: 4955338 - DNA, 25 bp, Homo sapien
tggcggagccggtagttgaacacca

SEQ ID NO: 4955339 - DNA, 25 bp, Homo sapien
ccgtggcggagccggtagttgaaca

SEQ ID NO: 4955340 - DNA, 25 bp, Homo sapien
gagccggtagttgaacaccaggcag

SEQ ID NO: 4955341 - DNA, 25 bp, Homo sapien
ctccagcgcgcccttcaggtggccg

SEQ ID NO: 4955342 - DNA, 25 bp, Homo sapien
ccagcgcgcccttcaggtggccgcc

SEQ ID NO: 4955343 - DNA, 25 bp, Homo sapien
agcgcgcccttcaggtggccgccca

SEQ ID NO: 4955344 - DNA, 25 bp, Homo sapien
tcccagcgctccgactccgcggccg

SEQ ID NO: 4955345 - DNA, 25 bp, Homo sapien
agccgatggccgctgccgccgccca

SEQ ID NO: 4955346 - DNA, 25 bp, Homo sapien
gccgatggccgctgccgccgcccac

SEQ ID NO: 4955347 - DNA, 25 bp, Homo sapien
ctccagccgatggccgctgccgccg

SEQ ID NO: 4955348 - DNA, 25 bp, Homo sapien
ccagccgatggccgctgccgccgcc

SEQ ID NO: 4955349 - DNA, 25 bp, Homo sapien
aaccggcctcggccctgcggcgctg

SEQ ID NO: 4955350 - DNA, 25 bp, Homo sapien
cccagaaccggcctcggccctgcgg

SEQ ID NO: 4955351 - DNA, 25 bp, Homo sapien
ttcccagaaccggcctcggccctgc

SEQ ID NO: 4955352 - DNA, 25 bp, Homo sapien
cagaaccggcctcggccctgcggcg

SEQ ID NO: 4955353 - DNA, 25 bp, Homo sapien
gggaggtcctcgccaccgccggaga

SEQ ID NO: 4955354 - DNA, 25 bp, Homo sapien
tcctcgccaccgccggagaggacat

SEQ ID NO: 4955355 - DNA, 25 bp, Homo sapien
cctcctggggaggtcctcgccaccg

SEQ ID NO: 4955356 - DNA, 25 bp, Homo sapien
cgactccctcctggggaggtcctcg

SEQ ID NO: 4955357 - DNA, 25 bp, Homo sapien
ggcccgcggagggctgcgccgccgc

SEQ ID NO: 4955358 - DNA, 25 bp, Homo sapien
gcccgcggagggctgcgccgccgcc

SEQ ID NO: 4955359 - DNA, 25 bp, Homo sapien
agggctgcgccgccgccgcccgccg

SEQ ID NO: 4955360 - DNA, 25 bp, Homo sapien
gagggctgcgccgccgccgcccgcc

SEQ ID NO: 4955361 - DNA, 25 bp, Homo sapien
tctaattggcttctccggaaaggag

SEQ ID NO: 4955362 - DNA, 25 bp, Homo sapien
caccttcggcagatgactgggactc

SEQ ID NO: 4955363 - DNA, 25 bp, Homo sapien
tagctctacgcccatgttccaggtg

SEQ ID NO: 4955364 - DNA, 25 bp, Homo sapien
gctcgtgacggaacaaagccggaag

SEQ ID NO: 4955365 - DNA, 25 bp, Homo sapien
tagacttttgtgcaatgccacccac

SEQ ID NO: 4955366 - DNA, 25 bp, Homo sapien
aagtcggcagttaaatgtgccctca

SEQ ID NO: 4955367 - DNA, 25 bp, Homo sapien
tttaggtttgacctggaagtcggca

SEQ ID NO: 4955368 - DNA, 25 bp, Homo sapien
aagccccagtcttcactagtgtcca

SEQ ID NO: 4955369 - DNA, 25 bp, Homo sapien
agggcaagtttaacagctccacggg

SEQ ID NO: 4955370 - DNA, 25 bp, Homo sapien
gaacagagggtaatcggtgtcccca

SEQ ID NO: 4955371 - DNA, 25 bp, Homo sapien
catattactttgtggaaaacagcca

SEQ ID NO: 4955372 - DNA, 25 bp, Homo sapien
tctcgatgggatgcgcacagtctcg

SEQ ID NO: 4955373 - DNA, 25 bp, Homo sapien
ggaagaaattcaacacgtctccagc

SEQ ID NO: 4955374 - DNA, 25 bp, Homo sapien
gcatcaggccggcattaggaacttc

SEQ ID NO: 4955375 - DNA, 25 bp, Homo sapien
ttcccatggtctctaaggtgcttgg

SEQ ID NO: 4955376 - DNA, 25 bp, Homo sapien
ttcaacacgtctccagcacatgtgt

SEQ ID NO: 4955377 - DNA, 25 bp, Homo sapien
gatctttaggtagttggagcaactg

SEQ ID NO: 4955378 - DNA, 25 bp, Homo sapien
aggatctttaggtagttggagcaac

SEQ ID NO: 4955379 - DNA, 25 bp, Homo sapien
ttaggtagttggagcaactgcttac

SEQ ID NO: 4955380 - DNA, 25 bp, Homo sapien
cagaggatctttaggtagttggagc

SEQ ID NO: 4955381 - DNA, 25 bp, Homo sapien
cagttaaaggcctaatggcaggacc

SEQ ID NO: 4955382 - DNA, 25 bp, Homo sapien
tcagaggctacgtcctgcatgccag

SEQ ID NO: 4955383 - DNA, 25 bp, Homo sapien
gagcggaaatgactggcaagcctgc

SEQ ID NO: 4955384 - DNA, 25 bp, Homo sapien
gctgatgaaggatacgcgagtgaat

SEQ ID NO: 4955385 - DNA, 25 bp, Homo sapien
aaggcccacgcaggctcagtaagga

SEQ ID NO: 4955386 - DNA, 25 bp, Homo sapien
gctcagtaaggattacgttttgtaa

SEQ ID NO: 4955387 - DNA, 25 bp, Homo sapien
tgccctagtgccaggtagcaaggcc

SEQ ID NO: 4955388 - DNA, 25 bp, Homo sapien
gtagcaaggccgtgaaggcccacgc

SEQ ID NO: 4955389 - DNA, 25 bp, Homo sapien
gaacacaccccttgtagatctgtaa

SEQ ID NO: 4955390 - DNA, 25 bp, Homo sapien
gagaacacaccccttgtagatctgt

SEQ ID NO: 4955391 - DNA, 25 bp, Homo sapien
cttgagaacacaccccttgtagatc

SEQ ID NO: 4955392 - DNA, 25 bp, Homo sapien
tgagaacacaccccttgtagatctg

SEQ ID NO: 4955393 - DNA, 25 bp, Homo sapien
cacctatgaggatacttctcatgat

SEQ ID NO: 4955394 - DNA, 25 bp, Homo sapien
taaaattcagatattcactagtgca

SEQ ID NO: 4955395 - DNA, 25 bp, Homo sapien
tgtgtgaaaagactcacctatgagg

SEQ ID NO: 4955396 - DNA, 25 bp, Homo sapien
gatattcactagtgcagatgtgtga

SEQ ID NO: 4955397 - DNA, 25 bp, Homo sapien
cacagtgagttggaatttcagtcaa

SEQ ID NO: 4955398 - DNA, 25 bp, Homo sapien
cagtctgtgggtaaatgtaattgtt

SEQ ID NO: 4955399 - DNA, 25 bp, Homo sapien
tgtaattgttcattcatcagtgaac

SEQ ID NO: 4955400 - DNA, 25 bp, Homo sapien
tcatatttcagtctgtgggtaaatg

SEQ ID NO: 4955401 - DNA, 25 bp, Homo sapien
cataggaaaagagccgtgtctctcc

SEQ ID NO: 4955402 - DNA, 25 bp, Homo sapien
catgtaagggtaaactcacttgagc

SEQ ID NO: 4955403 - DNA, 25 bp, Homo sapien
cattctccctgggagtgtaagggac

SEQ ID NO: 4955404 - DNA, 25 bp, Homo sapien
gggacgaattatgcatgtaagggta

SEQ ID NO: 4955405 - DNA, 25 bp, Homo sapien
agcagggtccaccaaggtctttggc

SEQ ID NO: 4955406 - DNA, 25 bp, Homo sapien
gccagaagctgagagtttaccatgt

SEQ ID NO: 4955407 - DNA, 25 bp, Homo sapien
accaaggtctttggccagaagctga

SEQ ID NO: 4955408 - DNA, 25 bp, Homo sapien
agaagctgagagtttaccatgtgga

SEQ ID NO: 4955409 - DNA, 25 bp, Homo sapien
taaaggcagcgattattccagaaca

SEQ ID NO: 4955410 - DNA, 25 bp, Homo sapien
tgttccaggagtgcactccttaaag

SEQ ID NO: 4955411 - DNA, 25 bp, Homo sapien
ccatcagtctgaagggccaggcagt

SEQ ID NO: 4955412 - DNA, 25 bp, Homo sapien
taaagagcagttccaagcccatcag

SEQ ID NO: 4955413 - DNA, 25 bp, Homo sapien
tcatccagggattctaccataagca

SEQ ID NO: 4955414 - DNA, 25 bp, Homo sapien
cagtgtatttttttgcaggaccgga

SEQ ID NO: 4955415 - DNA, 25 bp, Homo sapien
gattctaccataagcagcctctcat

SEQ ID NO: 4955416 - DNA, 25 bp, Homo sapien
ttttttgcaggaccggatatcacat

SEQ ID NO: 4955417 - DNA, 25 bp, Homo sapien
catagaatgatatacgtgctgccga

SEQ ID NO: 4955418 - DNA, 25 bp, Homo sapien
ggtttttgtgtctccaatggcctga

SEQ ID NO: 4955419 - DNA, 25 bp, Homo sapien
gatcagtataatgatgtggcttgaa

SEQ ID NO: 4955420 - DNA, 25 bp, Homo sapien
cgagtggtggatcgcagaatgataa

SEQ ID NO: 4955421 - DNA, 25 bp, Homo sapien
gctgcagcagacacaacgggtgaca

SEQ ID NO: 4955422 - DNA, 25 bp, Homo sapien
gacacaacgggtgacagctcatcaa

SEQ ID NO: 4955423 - DNA, 25 bp, Homo sapien
tcatcaactctgagaggaaagggat

SEQ ID NO: 4955424 - DNA, 25 bp, Homo sapien
cagcagacacaacgggtgacagctc

SEQ ID NO: 4955425 - DNA, 25 bp, Homo sapien
tgaccttggatataagtccacttcc

SEQ ID NO: 4955426 - DNA, 25 bp, Homo sapien
gtcatgaccttggatataagtccac

SEQ ID NO: 4955427 - DNA, 25 bp, Homo sapien
tttgattgtcatgaccttggatata

SEQ ID NO: 4955428 - DNA, 25 bp, Homo sapien
ttgtcatgaccttggatataagtcc

SEQ ID NO: 4955429 - DNA, 25 bp, Homo sapien
cagttgggagccaggggaactcatc

SEQ ID NO: 4955430 - DNA, 25 bp, Homo sapien
aacagttgggagccaggggaactca

SEQ ID NO: 4955431 - DNA, 25 bp, Homo sapien
caacagttgggagccaggggaactc

SEQ ID NO: 4955432 - DNA, 25 bp, Homo sapien
tcaacagttgggagccaggggaact

SEQ ID NO: 4955433 - DNA, 25 bp, Homo sapien
ctgcatatgactgatgtaatggagt

SEQ ID NO: 4955434 - DNA, 25 bp, Homo sapien
gggctatgtcactggcactacggaa

SEQ ID NO: 4955435 - DNA, 25 bp, Homo sapien
cggaatccagctcgaagctgcttaa

SEQ ID NO: 4955436 - DNA, 25 bp, Homo sapien
tatgactgatgtaatggagtccagg

SEQ ID NO: 4955437 - DNA, 25 bp, Homo sapien
tcgacggcttcctaccctgctgttt

SEQ ID NO: 4955438 - DNA, 25 bp, Homo sapien
ggtgtgatctggcaacatctgctgg

SEQ ID NO: 4955439 - DNA, 25 bp, Homo sapien
gctggccgccaggttgatgttcctt

SEQ ID NO: 4955440 - DNA, 25 bp, Homo sapien
gctgttttgggctcatgaaagcatg

SEQ ID NO: 4955441 - DNA, 25 bp, Homo sapien
tcagcaaagtggtttactttcacca

SEQ ID NO: 4955442 - DNA, 25 bp, Homo sapien
tactttcaccaccaaatccgcaaag

SEQ ID NO: 4955443 - DNA, 25 bp, Homo sapien
caccaaatccgcaaagctttccttt

SEQ ID NO: 4955444 - DNA, 25 bp, Homo sapien
cagcaaagtggtttactttcaccac

SEQ ID NO: 4955445 - DNA, 25 bp, Homo sapien
gaagaatctgctacacaggtaaggc

SEQ ID NO: 4955446 - DNA, 25 bp, Homo sapien
ggagaagaatctgctacacaggtaa

SEQ ID NO: 4955447 - DNA, 25 bp, Homo sapien
gagaagaatctgctacacaggtaag

SEQ ID NO: 4955448 - DNA, 25 bp, Homo sapien
gaatctgctacacaggtaaggcatt

SEQ ID NO: 4955449 - DNA, 25 bp, Homo sapien
gactgaaaggttcccatgtgtggct

SEQ ID NO: 4955450 - DNA, 25 bp, Homo sapien
tgagccctttcctggtttggttgga

SEQ ID NO: 4955451 - DNA, 25 bp, Homo sapien
tagctgatgttctgagccctttcct

SEQ ID NO: 4955452 - DNA, 25 bp, Homo sapien
ttggttggactgaaaggttcccatg

SEQ ID NO: 4955453 - DNA, 25 bp, Homo sapien
tcagttttgggaccagagagcaagc

SEQ ID NO: 4955454 - DNA, 25 bp, Homo sapien
tgggaccagagagcaagcctctcag

SEQ ID NO: 4955455 - DNA, 25 bp, Homo sapien
gcaagcctctcagctatcctatcat

SEQ ID NO: 4955456 - DNA, 25 bp, Homo sapien
ctctcagctatcctatcattggcca

SEQ ID NO: 4955457 - DNA, 25 bp, Homo sapien
tcttggagagggacggtcataactg

SEQ ID NO: 4955458 - DNA, 25 bp, Homo sapien
actgctagttcttggagagggacgg

SEQ ID NO: 4955459 - DNA, 25 bp, Homo sapien
ctagttcttggagagggacggtcat

SEQ ID NO: 4955460 - DNA, 25 bp, Homo sapien
agttcttggagagggacggtcataa

SEQ ID NO: 4955461 - DNA, 25 bp, Homo sapien
acaagtcattgtgccaaccttctga

SEQ ID NO: 4955462 - DNA, 25 bp, Homo sapien
caccagggcacaagtcattgtgcca

SEQ ID NO: 4955463 - DNA, 25 bp, Homo sapien
cagggcacaagtcattgtgccaacc

SEQ ID NO: 4955464 - DNA, 25 bp, Homo sapien
gcacaagtcattgtgccaaccttct

SEQ ID NO: 4955465 - DNA, 25 bp, Homo sapien
aaatagcaggagagggacagcgaca

SEQ ID NO: 4955466 - DNA, 25 bp, Homo sapien
aactggggctactgccagggcaaca

SEQ ID NO: 4955467 - DNA, 25 bp, Homo sapien
cctgaactggggctactgccagggc

SEQ ID NO: 4955468 - DNA, 25 bp, Homo sapien
aggagagggacagcgacagatgggc

SEQ ID NO: 4955469 - DNA, 25 bp, Homo sapien
gactactcgcaacgggagagctgct

SEQ ID NO: 4955470 - DNA, 25 bp, Homo sapien
gaagcttctgttgcgccctagatcc

SEQ ID NO: 4955471 - DNA, 25 bp, Homo sapien
ttctctttggaagccccgacacgag

SEQ ID NO: 4955472 - DNA, 25 bp, Homo sapien
gcagccctcggctctgatgcaaaag

SEQ ID NO: 4955473 - DNA, 25 bp, Homo sapien
gctgtgttccattgatcagagaggc

SEQ ID NO: 4955474 - DNA, 25 bp, Homo sapien
tgagcctcatgcgttggctcccggg

SEQ ID NO: 4955475 - DNA, 25 bp, Homo sapien
gctgggaatcagaaccaccgctaga

SEQ ID NO: 4955476 - DNA, 25 bp, Homo sapien
tgcaaaatgcctctccaccctagga

SEQ ID NO: 4955477 - DNA, 25 bp, Homo sapien
ggaagtggagacatcaaattgcaac

SEQ ID NO: 4955478 - DNA, 25 bp, Homo sapien
cattggaagttttaagtaacacaat

SEQ ID NO: 4955479 - DNA, 25 bp, Homo sapien
tacagtcctggaaagtaatgtccat

SEQ ID NO: 4955480 - DNA, 25 bp, Homo sapien
cagacaatccctttatggaagtgga

SEQ ID NO: 4955481 - DNA, 25 bp, Homo sapien
gcagggcctcttggtaaacgtggac

SEQ ID NO: 4955482 - DNA, 25 bp, Homo sapien
gaagagagcacattgtggcaggtgc

SEQ ID NO: 4955483 - DNA, 25 bp, Homo sapien
ttgttcagatctagagcagacgcct

SEQ ID NO: 4955484 - DNA, 25 bp, Homo sapien
tattgctgcatgattccaatccaat

SEQ ID NO: 4955485 - DNA, 25 bp, Homo sapien
gactatcttgtggataacttgccct

SEQ ID NO: 4955486 - DNA, 25 bp, Homo sapien
tattttgctggctgaatgactatct

SEQ ID NO: 4955487 - DNA, 25 bp, Homo sapien
tatccagtatacagttgacattaaa

SEQ ID NO: 4955488 - DNA, 25 bp, Homo sapien
gcagcatctagtgcgatatccagta

SEQ ID NO: 4955489 - DNA, 25 bp, Homo sapien
tgggagagacaagccataaataact

SEQ ID NO: 4955490 - DNA, 25 bp, Homo sapien
tacagcagtgttaggtagagtctgg

SEQ ID NO: 4955491 - DNA, 25 bp, Homo sapien
ggccaggccatgtttagaatgcaga

SEQ ID NO: 4955492 - DNA, 25 bp, Homo sapien
gcacaatagcgcaaaaatacagcag

SEQ ID NO: 4955493 - DNA, 25 bp, Homo sapien
tctaaattcaatgggctgtaaatct

SEQ ID NO: 4955494 - DNA, 25 bp, Homo sapien
gaaagtggccagttacagacttggg

SEQ ID NO: 4955495 - DNA, 25 bp, Homo sapien
aggaaagtggccagttacagacttg

SEQ ID NO: 4955496 - DNA, 25 bp, Homo sapien
aattcaatgggctgtaaatcttctg

SEQ ID NO: 4955497 - DNA, 25 bp, Homo sapien
gttctccagttgtccctttgagatt

SEQ ID NO: 4955498 - DNA, 25 bp, Homo sapien
ttctccagttgtccctttgagattt

SEQ ID NO: 4955499 - DNA, 25 bp, Homo sapien
agttctccagttgtccctttgagat

SEQ ID NO: 4955500 - DNA, 25 bp, Homo sapien
tctccagttgtccctttgagatttt

SEQ ID NO: 4955501 - DNA, 25 bp, Homo sapien
tcataggatttcaaggagagatgcc

SEQ ID NO: 4955502 - DNA, 25 bp, Homo sapien
gaggatcgtattctcccggtgcaac

SEQ ID NO: 4955503 - DNA, 25 bp, Homo sapien
ggtaactttctagtccctgatggga

SEQ ID NO: 4955504 - DNA, 25 bp, Homo sapien
cctgatgggattccagagaggatcg

SEQ ID NO: 4955505 - DNA, 25 bp, Homo sapien
tccttattttaggatagtagtggta

SEQ ID NO: 4955506 - DNA, 25 bp, Homo sapien
tcttcttccttattttaggatagta

SEQ ID NO: 4955507 - DNA, 25 bp, Homo sapien
cttattttaggatagtagtggtaca

SEQ ID NO: 4955508 - DNA, 25 bp, Homo sapien
tcttccttattttaggatagtagtg

SEQ ID NO: 4955509 - DNA, 25 bp, Homo sapien
cgtcttagctatgttggaattctca

SEQ ID NO: 4955510 - DNA, 25 bp, Homo sapien
ttcttcccttcggtagcgctcagct

SEQ ID NO: 4955511 - DNA, 25 bp, Homo sapien
ctagctgcatggattaagtgtcttt

SEQ ID NO: 4955512 - DNA, 25 bp, Homo sapien
tcaaacacatcaagtgcccggaggt

SEQ ID NO: 4955513 - DNA, 25 bp, Homo sapien
atacatattaagtcatagctcttag

SEQ ID NO: 4955514 - DNA, 25 bp, Homo sapien
taagtcatagctcttagctctttgt

SEQ ID NO: 4955515 - DNA, 25 bp, Homo sapien
tattaagtcatagctcttagctctt

SEQ ID NO: 4955516 - DNA, 25 bp, Homo sapien
catattaagtcatagctcttagctc

SEQ ID NO: 4955517 - DNA, 25 bp, Homo sapien
tagaaccctgttgctagtagcagga

SEQ ID NO: 4955518 - DNA, 25 bp, Homo sapien
tgttagcctaatcacatgtccaggg

SEQ ID NO: 4955519 - DNA, 25 bp, Homo sapien
tcagatgacgtttatgccatagcaa

SEQ ID NO: 4955520 - DNA, 25 bp, Homo sapien
tttctaccctttggaaacatgccag

SEQ ID NO: 4955521 - DNA, 25 bp, Homo sapien
gatggctaaatggaaggctccactg

SEQ ID NO: 4955522 - DNA, 25 bp, Homo sapien
caccgctgagaaacagtgggtcatt

SEQ ID NO: 4955523 - DNA, 25 bp, Homo sapien
ggaaagagccttatgtgcccgccta

SEQ ID NO: 4955524 - DNA, 25 bp, Homo sapien
taacccttaagaggtctggtgaggc

SEQ ID NO: 4955525 - DNA, 25 bp, Homo sapien
aaatctatgtcatggatcctgagac

SEQ ID NO: 4955526 - DNA, 25 bp, Homo sapien
taagttgacccaggagtacagtctc

SEQ ID NO: 4955527 - DNA, 25 bp, Homo sapien
tacagcatagttagccttggtagag

SEQ ID NO: 4955528 - DNA, 25 bp, Homo sapien
gagaaacgaatagactggacactgt

SEQ ID NO: 4955529 - DNA, 25 bp, Homo sapien
gctgctagcctaccagttaaaagtc

SEQ ID NO: 4955530 - DNA, 25 bp, Homo sapien
tctctgaagcctattgtcacatggg

SEQ ID NO: 4955531 - DNA, 25 bp, Homo sapien
gacactaaaccatgactgcaaggga

SEQ ID NO: 4955532 - DNA, 25 bp, Homo sapien
tcaaaatggtcttacaactcgggct

SEQ ID NO: 4955533 - DNA, 25 bp, Homo sapien
gctaatcataccacttctaactaga

SEQ ID NO: 4955534 - DNA, 25 bp, Homo sapien
gacctcttacgagctaatcatacca

SEQ ID NO: 4955535 - DNA, 25 bp, Homo sapien
ctcctgacctcttacgagctaatca

SEQ ID NO: 4955536 - DNA, 25 bp, Homo sapien
tacgagctaatcataccacttctaa

SEQ ID NO: 4955537 - DNA, 25 bp, Homo sapien
tgggatgactgaagattccagtgag

SEQ ID NO: 4955538 - DNA, 25 bp, Homo sapien
gcataacagtacatcataagtggga

SEQ ID NO: 4955539 - DNA, 25 bp, Homo sapien
tcacgtttgtgtatccggccgtgca

SEQ ID NO: 4955540 - DNA, 25 bp, Homo sapien
atagaattgcaatagccctggaaag

SEQ ID NO: 4955541 - DNA, 25 bp, Homo sapien
catgcttcactgaggagccacgatc

SEQ ID NO: 4955542 - DNA, 25 bp, Homo sapien
catctcccgggcaagcttctggtgt

SEQ ID NO: 4955543 - DNA, 25 bp, Homo sapien
tcttctgcagtagggcggcatctcc

SEQ ID NO: 4955544 - DNA, 25 bp, Homo sapien
gaattattgtaaccccaacagaggc

SEQ ID NO: 4955545 - DNA, 25 bp, Homo sapien
tcataaactttaacagttggtcctg

SEQ ID NO: 4955546 - DNA, 25 bp, Homo sapien
cattgttgttttgtcttcgctcttc

SEQ ID NO: 4955547 - DNA, 25 bp, Homo sapien
attgttgttttgtcttcgctcttca

SEQ ID NO: 4955548 - DNA, 25 bp, Homo sapien
taaactttaacagttggtcctgcat

SEQ ID NO: 4955549 - DNA, 25 bp, Homo sapien
ggctgtgctcaatggctggaatttt

SEQ ID NO: 4955550 - DNA, 25 bp, Homo sapien
aaggctgtgctcaatggctggaatt

SEQ ID NO: 4955551 - DNA, 25 bp, Homo sapien
cactgtgcttctgatgggtccttcc

SEQ ID NO: 4955552 - DNA, 25 bp, Homo sapien
gcccactcacgatgccccttgctgt

SEQ ID NO: 4955553 - DNA, 25 bp, Homo sapien
ctgcccactcacgatgccccttgct

SEQ ID NO: 4955554 - DNA, 25 bp, Homo sapien
gtgactgcccactcacgatgcccct

SEQ ID NO: 4955555 - DNA, 25 bp, Homo sapien
gactgcccactcacgatgccccttg

SEQ ID NO: 4955556 - DNA, 25 bp, Homo sapien
aggaaggcatctttcgtgactttga

SEQ ID NO: 4955557 - DNA, 25 bp, Homo sapien
gcatctttcgtgactttgatgctct

SEQ ID NO: 4955558 - DNA, 25 bp, Homo sapien
ggaaggcatctttcgtgactttgat

SEQ ID NO: 4955559 - DNA, 25 bp, Homo sapien
aaggcatctttcgtgactttgatgc

SEQ ID NO: 4955560 - DNA, 25 bp, Homo sapien
gtggtgggatcctagctcaccgcag

SEQ ID NO: 4955561 - DNA, 25 bp, Homo sapien
cagtggtgggatcctagctcaccgc

SEQ ID NO: 4955562 - DNA, 25 bp, Homo sapien
ggtgggatcctagctcaccgcagcc

SEQ ID NO: 4955563 - DNA, 25 bp, Homo sapien
agtggtgggatcctagctcaccgca

SEQ ID NO: 4955564 - DNA, 25 bp, Homo sapien
tgacaggggttagattgcttggaaa

SEQ ID NO: 4955565 - DNA, 25 bp, Homo sapien
tatataggccaagagagtgacaggg

SEQ ID NO: 4955566 - DNA, 25 bp, Homo sapien
tcttaagagcattattatataggcc

SEQ ID NO: 4955567 - DNA, 25 bp, Homo sapien
gatctttgaaatagcatctgcatta

SEQ ID NO: 4955568 - DNA, 25 bp, Homo sapien
caaaatactgaaagccgctgcaggg

SEQ ID NO: 4955569 - DNA, 25 bp, Homo sapien
taggcaattagtcacacaaataagt

SEQ ID NO: 4955570 - DNA, 25 bp, Homo sapien
caaataagttgtgatggcgctctaa

SEQ ID NO: 4955571 - DNA, 25 bp, Homo sapien
tctaagtgacctcagcagagttctt

SEQ ID NO: 4955572 - DNA, 25 bp, Homo sapien
cataaatggacaagggtgttgggcc

SEQ ID NO: 4955573 - DNA, 25 bp, Homo sapien
ttctagaaacaaacaccatggtggt

SEQ ID NO: 4955574 - DNA, 25 bp, Homo sapien
caaaaccctgtggatcagagccagt

SEQ ID NO: 4955575 - DNA, 25 bp, Homo sapien
taaggctagagggagcagttcatcc

SEQ ID NO: 4955576 - DNA, 25 bp, Homo sapien
tactgaaggaatcccggatctttac

SEQ ID NO: 4955577 - DNA, 25 bp, Homo sapien
ctggttactgaaggaatcccggatc

SEQ ID NO: 4955578 - DNA, 25 bp, Homo sapien
tcagctgcacacaaatgtccaaaag

SEQ ID NO: 4955579 - DNA, 25 bp, Homo sapien
gaatcccggatctttacaacttcag

SEQ ID NO: 4955580 - DNA, 25 bp, Homo sapien
tttaagttagaaagcatggaaataa

SEQ ID NO: 4955581 - DNA, 25 bp, Homo sapien
tatttaagttagaaagcatggaaat

SEQ ID NO: 4955582 - DNA, 25 bp, Homo sapien
atttaagttagaaagcatggaaata

SEQ ID NO: 4955583 - DNA, 25 bp, Homo sapien
taaaaaaatcagaatcagaacatac

SEQ ID NO: 4955584 - DNA, 25 bp, Homo sapien
atgaccctcaccatataaaaaaatc

SEQ ID NO: 4955585 - DNA, 25 bp, Homo sapien
catataaaaaaatcagaatcagaac

SEQ ID NO: 4955586 - DNA, 25 bp, Homo sapien
tataaaaaaatcagaatcagaacat

SEQ ID NO: 4955587 - DNA, 25 bp, Homo sapien
cagaggttagtaaaagggcacaggc

SEQ ID NO: 4955588 - DNA, 25 bp, Homo sapien
gggttcaatcaaatacctggacaag

SEQ ID NO: 4955589 - DNA, 25 bp, Homo sapien
tggacaagagcacattaaccctcac

SEQ ID NO: 4955590 - DNA, 25 bp, Homo sapien
cgcgatcgtgatccacagaggttag

SEQ ID NO: 4955591 - DNA, 25 bp, Homo sapien
taaatggcatcctctaaactacttg

SEQ ID NO: 4955592 - DNA, 25 bp, Homo sapien
catgtgttccccaaaaagcatgtga

SEQ ID NO: 4955593 - DNA, 25 bp, Homo sapien
tgacccaggcctaggtaaatggcat

SEQ ID NO: 4955594 - DNA, 25 bp, Homo sapien
gtgaatgcccaatacaacagtgttg

SEQ ID NO: 4955595 - DNA, 25 bp, Homo sapien
tacagagccgttgttacagagggtt

SEQ ID NO: 4955596 - DNA, 25 bp, Homo sapien
cattataattgcctggtctgtgaga

SEQ ID NO: 4955597 - DNA, 25 bp, Homo sapien
gacacctaaaggagcgctggctgtt

SEQ ID NO: 4955598 - DNA, 25 bp, Homo sapien
aagacactgtacaaggactgctgaa

SEQ ID NO: 4955599 - DNA, 25 bp, Homo sapien
tagtctcgagcaggatgaggtgcca

SEQ ID NO: 4955600 - DNA, 25 bp, Homo sapien
tttgaatccaacaggtctacatccc

SEQ ID NO: 4955601 - DNA, 25 bp, Homo sapien
gtttggctgtccagaatttcgatca

SEQ ID NO: 4955602 - DNA, 25 bp, Homo sapien
cagggacttcaatgactgacctcca

SEQ ID NO: 4955603 - DNA, 25 bp, Homo sapien
gacatcggctcatttcctcgggaac

SEQ ID NO: 4955604 - DNA, 25 bp, Homo sapien
aggtgcccgagtgcttccagagtga

SEQ ID NO: 4955605 - DNA, 25 bp, Homo sapien
gtcagctgagtcatcattacccagg

SEQ ID NO: 4955606 - DNA, 25 bp, Homo sapien
tccgaagtggagtagctgacccagc

SEQ ID NO: 4955607 - DNA, 25 bp, Homo sapien
cactcggcgatcatatgggccagcc

SEQ ID NO: 4955608 - DNA, 25 bp, Homo sapien
tctgatctggtttgcccaaactttg

SEQ ID NO: 4955609 - DNA, 25 bp, Homo sapien
tggaaaagcttcttgcactcggcga

SEQ ID NO: 4955610 - DNA, 25 bp, Homo sapien
cccttgagtggcagctaggttttca

SEQ ID NO: 4955611 - DNA, 25 bp, Homo sapien
tatcccattgcagttggaatgcccc

SEQ ID NO: 4955612 - DNA, 25 bp, Homo sapien
aaaccacagctacggagagtcctag

SEQ ID NO: 4955613 - DNA, 25 bp, Homo sapien
gactattttctcatgcacgccaaca

SEQ ID NO: 4955614 - DNA, 25 bp, Homo sapien
ggaatgccccagtcaactttaagaa

SEQ ID NO: 4955615 - DNA, 25 bp, Homo sapien
agggaaggcgctaagcacacggcca

SEQ ID NO: 4955616 - DNA, 25 bp, Homo sapien
ctcttcagggtgttgagatggaaga

SEQ ID NO: 4955617 - DNA, 25 bp, Homo sapien
ggttttcttttacggctgctgtgac

SEQ ID NO: 4955618 - DNA, 25 bp, Homo sapien
acatcgctcaggaaataaagcaggg

SEQ ID NO: 4955619 - DNA, 25 bp, Homo sapien
tgtcccagagcaaatatcggcatca

SEQ ID NO: 4955620 - DNA, 25 bp, Homo sapien
tcagcttggtgaatttgcatggaca

SEQ ID NO: 4955621 - DNA, 25 bp, Homo sapien
taaaagttatgaattgccaccggcg

SEQ ID NO: 4955622 - DNA, 25 bp, Homo sapien
tcagagttcggctctagaggatgcc

SEQ ID NO: 4955623 - DNA, 25 bp, Homo sapien
atgccaacaatcttaagatcaaagg

SEQ ID NO: 4955624 - DNA, 25 bp, Homo sapien
tagtggctcaggaagatctcgaaaa

SEQ ID NO: 4955625 - DNA, 25 bp, Homo sapien
cgtagttgacacagtctatggcacc

SEQ ID NO: 4955626 - DNA, 25 bp, Homo sapien
cgcagagcctgaatccgggacttga

SEQ ID NO: 4955627 - DNA, 25 bp, Homo sapien
ttcagcatgtctgccacgtcataag

SEQ ID NO: 4955628 - DNA, 25 bp, Homo sapien
ttccggaggtatcgcatggcctgct

SEQ ID NO: 4955629 - DNA, 25 bp, Homo sapien
cacactccggtccttgtagtctgga

SEQ ID NO: 4955630 - DNA, 25 bp, Homo sapien
tgatccaaacaatggttccggaggt

SEQ ID NO: 4955631 - DNA, 25 bp, Homo sapien
tgtgcgctgcacgttgaccgtcagt

SEQ ID NO: 4955632 - DNA, 25 bp, Homo sapien
gacaggtccgtttcctcagttagga

SEQ ID NO: 4955633 - DNA, 25 bp, Homo sapien
gggtctacagtcttaaggaagctga

SEQ ID NO: 4955634 - DNA, 25 bp, Homo sapien
tccaccttgaacctggagaattggg

SEQ ID NO: 4955635 - DNA, 25 bp, Homo sapien
gatggatttccttacagaatggcgg

SEQ ID NO: 4955636 - DNA, 25 bp, Homo sapien
cagcaggaaacccatgtcatgcatt

SEQ ID NO: 4955637 - DNA, 25 bp, Homo sapien
ccagcactatatgcaacagcaggaa

SEQ ID NO: 4955638 - DNA, 25 bp, Homo sapien
gttttgtgagccgaccccaggctcc

SEQ ID NO: 4955639 - DNA, 25 bp, Homo sapien
tgctgctgatgacccggagaacatt

SEQ ID NO: 4955640 - DNA, 25 bp, Homo sapien
ccagcagggccgttagctttaggag

SEQ ID NO: 4955641 - DNA, 25 bp, Homo sapien
tgatacagagttgaggcttggccga

SEQ ID NO: 4955642 - DNA, 25 bp, Homo sapien
aaaaccatgcttgttagaaggtgtg

SEQ ID NO: 4955643 - DNA, 25 bp, Homo sapien
gcttggccgatgtgagctctggaaa

SEQ ID NO: 4955644 - DNA, 25 bp, Homo sapien
caaacgctgatgacggagttagtcc

SEQ ID NO: 4955645 - DNA, 25 bp, Homo sapien
gatcaaccccagctttgagggcgct

SEQ ID NO: 4955646 - DNA, 25 bp, Homo sapien
gttcacagagccgttattccccgag

SEQ ID NO: 4955647 - DNA, 25 bp, Homo sapien
cattgagggcggagatctccacgca

SEQ ID NO: 4955648 - DNA, 25 bp, Homo sapien
agaaaggagccattcacacactggg

SEQ ID NO: 4955649 - DNA, 25 bp, Homo sapien
caaagacagaaaggagccattcaca

SEQ ID NO: 4955650 - DNA, 25 bp, Homo sapien
gacagaaaggagccattcacacact

SEQ ID NO: 4955651 - DNA, 25 bp, Homo sapien
aaagacagaaaggagccattcacac

SEQ ID NO: 4955652 - DNA, 25 bp, Homo sapien
tctgggatccataggctgttcttta

SEQ ID NO: 4955653 - DNA, 25 bp, Homo sapien
ggagagtgcctgaccaaatgttgca

SEQ ID NO: 4955654 - DNA, 25 bp, Homo sapien
gaagtcagcaatgagcaggactgcc

SEQ ID NO: 4955655 - DNA, 25 bp, Homo sapien
cggtgacagggataagctactgtgc

SEQ ID NO: 4955656 - DNA, 25 bp, Homo sapien
ttttcggcaggatatcaaagggcac

SEQ ID NO: 4955657 - DNA, 25 bp, Homo sapien
gctcgcggcattcataaacactaag

SEQ ID NO: 4955658 - DNA, 25 bp, Homo sapien
tcagggataagctgtcacacggact

SEQ ID NO: 4955659 - DNA, 25 bp, Homo sapien
gaacgtctttgctgattatgcccga

SEQ ID NO: 4955660 - DNA, 25 bp, Homo sapien
tccgatgaggactaatttctagctt

SEQ ID NO: 4955661 - DNA, 25 bp, Homo sapien
tcgtttccgatgaggactaatttct

SEQ ID NO: 4955662 - DNA, 25 bp, Homo sapien
tttccgatgaggactaatttctagc

SEQ ID NO: 4955663 - DNA, 25 bp, Homo sapien
cgtttccgatgaggactaatttcta

SEQ ID NO: 4955664 - DNA, 25 bp, Homo sapien
cgcacatttgtttaaagtatttaga

SEQ ID NO: 4955665 - DNA, 25 bp, Homo sapien
cacatttgtttaaagtatttagacg

SEQ ID NO: 4955666 - DNA, 25 bp, Homo sapien
caccgcacatttgtttaaagtattt

SEQ ID NO: 4955667 - DNA, 25 bp, Homo sapien
ccgcacatttgtttaaagtatttag

SEQ ID NO: 4955668 - DNA, 25 bp, Homo sapien
agataggcaaccactctctaatgag

SEQ ID NO: 4955669 - DNA, 25 bp, Homo sapien
cgttagcaaagataggcaaccactc

SEQ ID NO: 4955670 - DNA, 25 bp, Homo sapien
gaaataacgttagcaaagataggca

SEQ ID NO: 4955671 - DNA, 25 bp, Homo sapien
tatagagcaaagaaataacgttagc

SEQ ID NO: 4955672 - DNA, 25 bp, Homo sapien
caaggaaatatcgatggggaacagg

SEQ ID NO: 4955673 - DNA, 25 bp, Homo sapien
ctgcatagagcctcaatggcatctc

SEQ ID NO: 4955674 - DNA, 25 bp, Homo sapien
tcatgctctctcttgaccaaggaaa

SEQ ID NO: 4955675 - DNA, 25 bp, Homo sapien
tgtccaaaaaatcatgctctctctt

SEQ ID NO: 4955676 - DNA, 25 bp, Homo sapien
tgatcagggaaaggtcacggaaaga

SEQ ID NO: 4955677 - DNA, 25 bp, Homo sapien
gtgatcagggaaaggtcacggaaag

SEQ ID NO: 4955678 - DNA, 25 bp, Homo sapien
gatcagggaaaggtcacggaaagaa

SEQ ID NO: 4955679 - DNA, 25 bp, Homo sapien
taacattgtttgaaggttgtgacac

SEQ ID NO: 4955680 - DNA, 25 bp, Homo sapien
taaatgagggaagacaggttgtaac

SEQ ID NO: 4955681 - DNA, 25 bp, Homo sapien
gtcaatggaaactggagcactagta

SEQ ID NO: 4955682 - DNA, 25 bp, Homo sapien
tgataatataagcagaccaaggaag

SEQ ID NO: 4955683 - DNA, 25 bp, Homo sapien
tgggaacatgaagggaccccaaatg

SEQ ID NO: 4955684 - DNA, 25 bp, Homo sapien
agtacgcaaatcaagcttaacaggg

SEQ ID NO: 4955685 - DNA, 25 bp, Homo sapien
gtgtaccccaaaagtagtcttatgc

SEQ ID NO: 4955686 - DNA, 25 bp, Homo sapien
gaggcaatggcccagaacaatacgc

SEQ ID NO: 4955687 - DNA, 25 bp, Homo sapien
gacagccactttggtgttactgcca

SEQ ID NO: 4955688 - DNA, 25 bp, Homo sapien
gttactgccaatgcagttgtctttc

SEQ ID NO: 4955689 - DNA, 25 bp, Homo sapien
aatgcagttgtctttccttatctcc

SEQ ID NO: 4955690 - DNA, 25 bp, Homo sapien
tcaatgccaaaaacgagcataattg

SEQ ID NO: 4955691 - DNA, 25 bp, Homo sapien
agctgtgcatactgggggaaaccag

SEQ ID NO: 4955692 - DNA, 25 bp, Homo sapien
aaccagttgcccgtagccaatcaca

SEQ ID NO: 4955693 - DNA, 25 bp, Homo sapien
ggaaaccagttgcccgtagccaatc

SEQ ID NO: 4955694 - DNA, 25 bp, Homo sapien
aaaccagttgcccgtagccaatcac

SEQ ID NO: 4955695 - DNA, 25 bp, Homo sapien
taagggccacaatagagaagtctcg

SEQ ID NO: 4955696 - DNA, 25 bp, Homo sapien
taactataaggctccgtaagggcca

SEQ ID NO: 4955697 - DNA, 25 bp, Homo sapien
aaaacatatgggcttgctggacgcg

SEQ ID NO: 4955698 - DNA, 25 bp, Homo sapien
tgctgcctgggagacactaagaaaa

SEQ ID NO: 4955699 - DNA, 25 bp, Homo sapien
catttccgtcttcctgttgctagga

SEQ ID NO: 4955700 - DNA, 25 bp, Homo sapien
ctctcttccaaaaagtccgatccat

SEQ ID NO: 4955701 - DNA, 25 bp, Homo sapien
gagaaacttgtgttgacaatactgg

SEQ ID NO: 4955702 - DNA, 25 bp, Homo sapien
caaaaagtccgatccatttcaccca

SEQ ID NO: 4955703 - DNA, 25 bp, Homo sapien
ggaatctcaccaagcctctgattgg

SEQ ID NO: 4955704 - DNA, 25 bp, Homo sapien
caacatgtctttctactggtctggt

SEQ ID NO: 4955705 - DNA, 25 bp, Homo sapien
tctgatttaaacattgcgtcatggc

SEQ ID NO: 4955706 - DNA, 25 bp, Homo sapien
ccaattgcatatttacccgcttaag

SEQ ID NO: 4955707 - DNA, 25 bp, Homo sapien
ttagtctttgctctctcaactacag

SEQ ID NO: 4955708 - DNA, 25 bp, Homo sapien
agtctttgctctctcaactacagta

SEQ ID NO: 4955709 - DNA, 25 bp, Homo sapien
tagtctttgctctctcaactacagt

SEQ ID NO: 4955710 - DNA, 25 bp, Homo sapien
ctttactccagagccctaagaaaat

SEQ ID NO: 4955711 - DNA, 25 bp, Homo sapien
tcacctttactccagagccctaaga

SEQ ID NO: 4955712 - DNA, 25 bp, Homo sapien
cctgcctttcacctttactccagag

SEQ ID NO: 4955713 - DNA, 25 bp, Homo sapien
ctccagagccctaagaaaatccttc

SEQ ID NO: 4955714 - DNA, 25 bp, Homo sapien
cagatggatggcgaattagtcaacc

SEQ ID NO: 4955715 - DNA, 25 bp, Homo sapien
gcagcaaactacacgcagcagggtg

SEQ ID NO: 4955716 - DNA, 25 bp, Homo sapien
tccccgcgcggaggtaatacagtta

SEQ ID NO: 4955717 - DNA, 25 bp, Homo sapien
aaagtatgcatctgcgctcaggcca

SEQ ID NO: 4955718 - DNA, 25 bp, Homo sapien
cggagggatcaaaggctcgccccag

SEQ ID NO: 4955719 - DNA, 25 bp, Homo sapien
ctccttcggagggatcaaaggctcg

SEQ ID NO: 4955720 - DNA, 25 bp, Homo sapien
tccttcggagggatcaaaggctcgc

SEQ ID NO: 4955721 - DNA, 25 bp, Homo sapien
cttcggagggatcaaaggctcgccc

SEQ ID NO: 4955722 - DNA, 25 bp, Homo sapien
aggcttccaagaagctgtcgccttg

SEQ ID NO: 4955723 - DNA, 25 bp, Homo sapien
gcttccaagaagctgtcgccttgtt

SEQ ID NO: 4955724 - DNA, 25 bp, Homo sapien
gaggtggggacagcgacatggagtg

SEQ ID NO: 4955725 - DNA, 25 bp, Homo sapien
ggcaggcttccaagaagctgtcgcc

SEQ ID NO: 4955726 - DNA, 25 bp, Homo sapien
ggcaaaaggtaatcaagagtcactc

SEQ ID NO: 4955727 - DNA, 25 bp, Homo sapien
tccccaaactgcgagtcctgctatc

SEQ ID NO: 4955728 - DNA, 25 bp, Homo sapien
ttcccttcacgggttgcgaccgatc

SEQ ID NO: 4955729 - DNA, 25 bp, Homo sapien
ttcacgggttgcgaccgatccggag

SEQ ID NO: 4955730 - DNA, 25 bp, Homo sapien
cacagaacaggcaccgacttgacaa

SEQ ID NO: 4955731 - DNA, 25 bp, Homo sapien
tgacaaggcggggtgacactttctc

SEQ ID NO: 4955732 - DNA, 25 bp, Homo sapien
gacggcaagacgcaagtctagctta

SEQ ID NO: 4955733 - DNA, 25 bp, Homo sapien
ggtgacactttctcgcggcgggtcc

SEQ ID NO: 4955734 - DNA, 25 bp, Homo sapien
aagcacggcaggcggcggcggaagc

SEQ ID NO: 4955735 - DNA, 25 bp, Homo sapien
caagcacggcaggcggcggcggaag

SEQ ID NO: 4955736 - DNA, 25 bp, Homo sapien
agcacggcaggcggcggcggaagcg

SEQ ID NO: 4955737 - DNA, 25 bp, Homo sapien
ctcgggcagtcggagcgaactgtct

SEQ ID NO: 4955738 - DNA, 25 bp, Homo sapien
tcgtcacggccccagaaagaaagcg

SEQ ID NO: 4955739 - DNA, 25 bp, Homo sapien
ccgctgtctgggtcgcaggccttag

SEQ ID NO: 4955740 - DNA, 25 bp, Homo sapien
taaagatcgaaacgagggagcgctc

SEQ ID NO: 4955741 - DNA, 25 bp, Homo sapien
taagaagtttggttgccctgaggcc

SEQ ID NO: 4955742 - DNA, 25 bp, Homo sapien
ggttttccagccgtttcagcccaga

SEQ ID NO: 4955743 - DNA, 25 bp, Homo sapien
gagctgtttgagttttccccgggca

SEQ ID NO: 4955744 - DNA, 25 bp, Homo sapien
tgaggccctgatgttgaaagaccaa

SEQ ID NO: 4955745 - DNA, 25 bp, Homo sapien
ttcacagttctggagcgggcaggca

SEQ ID NO: 4955746 - DNA, 25 bp, Homo sapien
agagtgtgggatctcaaggtacagc

SEQ ID NO: 4955747 - DNA, 25 bp, Homo sapien
ccaaggttcgaacagtactgtccag

SEQ ID NO: 4955748 - DNA, 25 bp, Homo sapien
agttctactccaaccaggaccaagg

SEQ ID NO: 4955749 - DNA, 25 bp, Homo sapien
agacagggttctgttcgtttttgtg

SEQ ID NO: 4955750 - DNA, 25 bp, Homo sapien
gggttctgttcgtttttgtggctgc

SEQ ID NO: 4955751 - DNA, 25 bp, Homo sapien
acattcccgcaaaagacagggttct

SEQ ID NO: 4955752 - DNA, 25 bp, Homo sapien
tccacattcccgcaaaagacagggt

SEQ ID NO: 4955753 - DNA, 25 bp, Homo sapien
actcttgagtcattggcgggctgcg

SEQ ID NO: 4955754 - DNA, 25 bp, Homo sapien
tagctctcactatgctttacattgt

SEQ ID NO: 4955755 - DNA, 25 bp, Homo sapien
tattttctctcggaaattctgactc

SEQ ID NO: 4955756 - DNA, 25 bp, Homo sapien
tgagttgccctgatgaaaactcttc

SEQ ID NO: 4955757 - DNA, 25 bp, Homo sapien
gaaagggtgggtgtccacatttata

SEQ ID NO: 4955758 - DNA, 25 bp, Homo sapien
ctggcacaggtactacagaacagag

SEQ ID NO: 4955759 - DNA, 25 bp, Homo sapien
gctggcacaggtactacagaacaga

SEQ ID NO: 4955760 - DNA, 25 bp, Homo sapien
aggccttgatggcttagttggtgct

SEQ ID NO: 4955761 - DNA, 25 bp, Homo sapien
ctccacccagtaggccttgatggct

SEQ ID NO: 4955762 - DNA, 25 bp, Homo sapien
cttgttcctggggatgttcttccag

SEQ ID NO: 4955763 - DNA, 25 bp, Homo sapien
cagtaggccttgatggcttagttgg

SEQ ID NO: 4955764 - DNA, 25 bp, Homo sapien
tgaccacatactcctctgcatgatt

SEQ ID NO: 4955765 - DNA, 25 bp, Homo sapien
gacaggatgccatccccgttcacag

SEQ ID NO: 4955766 - DNA, 25 bp, Homo sapien
cctggtgtttccctaatgacaggat

SEQ ID NO: 4955767 - DNA, 25 bp, Homo sapien
ccgttcacaggctcagaaccctggc

SEQ ID NO: 4955768 - DNA, 25 bp, Homo sapien
cagacatgcttcaactttgcaaaat

SEQ ID NO: 4955769 - DNA, 25 bp, Homo sapien
gaatgatgaaaacagacatgcttca

SEQ ID NO: 4955770 - DNA, 25 bp, Homo sapien
catgagtataacagtgagggaatac

SEQ ID NO: 4955771 - DNA, 25 bp, Homo sapien
caaaatagtgtgcactgtatgactg

SEQ ID NO: 4955772 - DNA, 25 bp, Homo sapien
ttagtactctaagttcatagcctgc

SEQ ID NO: 4955773 - DNA, 25 bp, Homo sapien
aattttggcaataactttcaccgag

SEQ ID NO: 4955774 - DNA, 25 bp, Homo sapien
ctgcttaagccagacactgtgaaaa

SEQ ID NO: 4955775 - DNA, 25 bp, Homo sapien
tgaagaagccaatgtacaatagacc

SEQ ID NO: 4955776 - DNA, 25 bp, Homo sapien
aaaagggacctgagatttgctctca

SEQ ID NO: 4955777 - DNA, 25 bp, Homo sapien
ctgtttgctctacttggaaagctct

SEQ ID NO: 4955778 - DNA, 25 bp, Homo sapien
cactgtctcaggtggctgtatttct

SEQ ID NO: 4955779 - DNA, 25 bp, Homo sapien
ccccatgtccggtcccggtgtgtga

SEQ ID NO: 4955780 - DNA, 25 bp, Homo sapien
tggctgcccgtaacgcttttttctg

SEQ ID NO: 4955781 - DNA, 25 bp, Homo sapien
ctctggctgcccgtaacgctttttt

SEQ ID NO: 4955782 - DNA, 25 bp, Homo sapien
aattaatgtagtttctgcctaacat

SEQ ID NO: 4955783 - DNA, 25 bp, Homo sapien
tgcccgtaacgcttttttctgcatt

SEQ ID NO: 4955784 - DNA, 25 bp, Homo sapien
cttttggatggaattccctgtgact

SEQ ID NO: 4955785 - DNA, 25 bp, Homo sapien
aaatcatccgggaatactcgaggcg

SEQ ID NO: 4955786 - DNA, 25 bp, Homo sapien
caacattgctacctctgcagaggca

SEQ ID NO: 4955787 - DNA, 25 bp, Homo sapien
cagaggcaccactaacatttgtggg

SEQ ID NO: 4955788 - DNA, 25 bp, Homo sapien
cttatataagaagacagacatataa

SEQ ID NO: 4955789 - DNA, 25 bp, Homo sapien
gaagacagacatataaggtaatttt

SEQ ID NO: 4955790 - DNA, 25 bp, Homo sapien
agacagacatataaggtaatttttt

SEQ ID NO: 4955791 - DNA, 25 bp, Homo sapien
aagaagacagacatataaggtaatt

SEQ ID NO: 4955792 - DNA, 25 bp, Homo sapien
aagaaataaattgcgtgctgggtgc

SEQ ID NO: 4955793 - DNA, 25 bp, Homo sapien
tacaagtggaactccagccaagaaa

SEQ ID NO: 4955794 - DNA, 25 bp, Homo sapien
aatccctatggaccaagccttttct

SEQ ID NO: 4955795 - DNA, 25 bp, Homo sapien
tcctctttgcaccaatacaagtgga

SEQ ID NO: 4955796 - DNA, 25 bp, Homo sapien
atttagcagatcagaagctgtgggc

SEQ ID NO: 4955797 - DNA, 25 bp, Homo sapien
aatgaatttgcaggtacacaaaaac

SEQ ID NO: 4955798 - DNA, 25 bp, Homo sapien
gaaggtttcagattactggtggagt

SEQ ID NO: 4955799 - DNA, 25 bp, Homo sapien
gcagttatgtttagagaagtaccag

SEQ ID NO: 4955800 - DNA, 25 bp, Homo sapien
aaggagtatccttgggccactaact

SEQ ID NO: 4955801 - DNA, 25 bp, Homo sapien
gaagttgaaggagtatccttgggcc

SEQ ID NO: 4955802 - DNA, 25 bp, Homo sapien
gatgaagatgaagtcgccaagtgtg

SEQ ID NO: 4955803 - DNA, 25 bp, Homo sapien
taaacattcattggcctgaggaaaa

SEQ ID NO: 4955804 - DNA, 25 bp, Homo sapien
gaaactcaatgctgtgcaattttgg

SEQ ID NO: 4955805 - DNA, 25 bp, Homo sapien
tcccacacatgcgtacatagaaatg

SEQ ID NO: 4955806 - DNA, 25 bp, Homo sapien
tcacaggaagttaccagagttttga

SEQ ID NO: 4955807 - DNA, 25 bp, Homo sapien
ccagccagcctgattattcttgtat

SEQ ID NO: 4955808 - DNA, 25 bp, Homo sapien
atttggaagaaagccacgggcagag

SEQ ID NO: 4955809 - DNA, 25 bp, Homo sapien
tggaagaaagccacgggcagaggcc

SEQ ID NO: 4955810 - DNA, 25 bp, Homo sapien
ctgatttggaagaaagccacgggca

SEQ ID NO: 4955811 - DNA, 25 bp, Homo sapien
tgatttggaagaaagccacgggcag

SEQ ID NO: 4955812 - DNA, 25 bp, Homo sapien
ctggcaaaagcacaaggactccatt

SEQ ID NO: 4955813 - DNA, 25 bp, Homo sapien
actggcaaaagcacaaggactccat

SEQ ID NO: 4955814 - DNA, 25 bp, Homo sapien
tactggcaaaagcacaaggactcca

SEQ ID NO: 4955815 - DNA, 25 bp, Homo sapien
agttcctctgaaactggaaacaagt

SEQ ID NO: 4955816 - DNA, 25 bp, Homo sapien
ccagggaaaccttgatcatctgtga

SEQ ID NO: 4955817 - DNA, 25 bp, Homo sapien
ctccagggaaaccttgatcatctgt

SEQ ID NO: 4955818 - DNA, 25 bp, Homo sapien
tcctctgaaactggaaacaagttct

SEQ ID NO: 4955819 - DNA, 25 bp, Homo sapien
ctcccgcgtccttccaaggtgatgg

SEQ ID NO: 4955820 - DNA, 25 bp, Homo sapien
cactgggccccgcgttctcattctt

SEQ ID NO: 4955821 - DNA, 25 bp, Homo sapien
ccgcgtccttccaaggtgatgggat

SEQ ID NO: 4955822 - DNA, 25 bp, Homo sapien
tcctcccgcgtccttccaaggtgat

SEQ ID NO: 4955823 - DNA, 25 bp, Homo sapien
tgtacacgatcactgtctacgagac

SEQ ID NO: 4955824 - DNA, 25 bp, Homo sapien
cagagctgattcctaaccagacgaa

SEQ ID NO: 4955825 - DNA, 25 bp, Homo sapien
tctacgagactgattacaatttttg

SEQ ID NO: 4955826 - DNA, 25 bp, Homo sapien
ggtgtcgaatgattaaataacttgc

SEQ ID NO: 4955827 - DNA, 25 bp, Homo sapien
tgtcaaatatattgtgtcaaactgc

SEQ ID NO: 4955828 - DNA, 25 bp, Homo sapien
gatcactttgagtgtaaaacctaca

SEQ ID NO: 4955829 - DNA, 25 bp, Homo sapien
ggcagtattgaacaactacaagaac

SEQ ID NO: 4955830 - DNA, 25 bp, Homo sapien
cagagttgcattttcagtgttcaaa

SEQ ID NO: 4955831 - DNA, 25 bp, Homo sapien
ccagtgcgcgccaaaacgcccagtt

SEQ ID NO: 4955832 - DNA, 25 bp, Homo sapien
gtgcgcgccaaaacgcccagttaat

SEQ ID NO: 4955833 - DNA, 25 bp, Homo sapien
gggactaccagtgcgcgccaaaacg

SEQ ID NO: 4955834 - DNA, 25 bp, Homo sapien
tgggactaccagtgcgcgccaaaac

SEQ ID NO: 4955835 - DNA, 25 bp, Homo sapien
gatatttaggccaatgaactgggtc

SEQ ID NO: 4955836 - DNA, 25 bp, Homo sapien
gggtgctattacagctcacagcaaa

SEQ ID NO: 4955837 - DNA, 25 bp, Homo sapien
tctccagacttagtaaaattgccgt

SEQ ID NO: 4955838 - DNA, 25 bp, Homo sapien
ggcatgcacctctgtgtctcgctaa

SEQ ID NO: 4955839 - DNA, 25 bp, Homo sapien
aataccatgataggaaaagagctct

SEQ ID NO: 4955840 - DNA, 25 bp, Homo sapien
gccatgcacagacttcatagcatta

SEQ ID NO: 4955841 - DNA, 25 bp, Homo sapien
tttgctgactcatttccctgccatt

SEQ ID NO: 4955842 - DNA, 25 bp, Homo sapien
tgccattgctattaccctggaggag

SEQ ID NO: 4955843 - DNA, 25 bp, Homo sapien
tgacctctgttggatgtgctaatac

SEQ ID NO: 4955844 - DNA, 25 bp, Homo sapien
ggacccgcggttggatgacctctgt

SEQ ID NO: 4955845 - DNA, 25 bp, Homo sapien
tctgaagtcttcattaggtctagta

SEQ ID NO: 4955846 - DNA, 25 bp, Homo sapien
ccaaggattaggatgacgggacccg

SEQ ID NO: 4955847 - DNA, 25 bp, Homo sapien
tacttgccggccaatgtaatgagaa

SEQ ID NO: 4955848 - DNA, 25 bp, Homo sapien
taatgagaaccgctatcataggtga

SEQ ID NO: 4955849 - DNA, 25 bp, Homo sapien
cagatggagacagtttcagggtaat

SEQ ID NO: 4955850 - DNA, 25 bp, Homo sapien
tcataggtgaaggttaagtacacta

SEQ ID NO: 4955851 - DNA, 25 bp, Homo sapien
tgagtcatgactttggaaccgtggc

SEQ ID NO: 4955852 - DNA, 25 bp, Homo sapien
tatcttgcccaaaacgtcaatggtg

SEQ ID NO: 4955853 - DNA, 25 bp, Homo sapien
gatgcatgtagtccacaggccgtgg

SEQ ID NO: 4955854 - DNA, 25 bp, Homo sapien
taaagcccgtagatgccagaaaaac

SEQ ID NO: 4955855 - DNA, 25 bp, Homo sapien
tttgtggctgcccgaggaaattgga

SEQ ID NO: 4955856 - DNA, 25 bp, Homo sapien
ggctgcccgaggaaattggagtgca

SEQ ID NO: 4955857 - DNA, 25 bp, Homo sapien
ttttgtggctgcccgaggaaattgg

SEQ ID NO: 4955858 - DNA, 25 bp, Homo sapien
tgtggctgcccgaggaaattggagt

SEQ ID NO: 4955859 - DNA, 25 bp, Homo sapien
aattggatccctttgtgctcttatc

SEQ ID NO: 4955860 - DNA, 25 bp, Homo sapien
gacaaaccaattgccacttccgagt

SEQ ID NO: 4955861 - DNA, 25 bp, Homo sapien
aggtgtaaggagacaaaccaattgc

SEQ ID NO: 4955862 - DNA, 25 bp, Homo sapien
cacttccgagttggaaaaattggat

SEQ ID NO: 4955863 - DNA, 25 bp, Homo sapien
aggctacaactcgtctccccagtgt

SEQ ID NO: 4955864 - DNA, 25 bp, Homo sapien
aaaaggctacaactcgtctccccag

SEQ ID NO: 4955865 - DNA, 25 bp, Homo sapien
aaaggctacaactcgtctccccagt

SEQ ID NO: 4955866 - DNA, 25 bp, Homo sapien
gctacaactcgtctccccagtgtgc

SEQ ID NO: 4955867 - DNA, 25 bp, Homo sapien
tccatgatactgaatttggcaatgc

SEQ ID NO: 4955868 - DNA, 25 bp, Homo sapien
gattttcttgggtcaagggcttgcg

SEQ ID NO: 4955869 - DNA, 25 bp, Homo sapien
gattgaaggcctatgtttaagagct

SEQ ID NO: 4955870 - DNA, 25 bp, Homo sapien
taaaggcttttgtgcgtcaaaggaa

SEQ ID NO: 4955871 - DNA, 25 bp, Homo sapien
gccaaacggagagagtaacactgta

SEQ ID NO: 4955872 - DNA, 25 bp, Homo sapien
cactgtaggtttgttaaatgataat

SEQ ID NO: 4955873 - DNA, 25 bp, Homo sapien
tgtgacttcctgcaatcttcttaaa

SEQ ID NO: 4955874 - DNA, 25 bp, Homo sapien
gaaattctagttctatcggttatta

SEQ ID NO: 4955875 - DNA, 25 bp, Homo sapien
ctgggttcacaccattctcttgcct

SEQ ID NO: 4955876 - DNA, 25 bp, Homo sapien
tgcagaggcgcggcctcggctcact

SEQ ID NO: 4955877 - DNA, 25 bp, Homo sapien
ggagtgcagaggcgcggcctcggct

SEQ ID NO: 4955878 - DNA, 25 bp, Homo sapien
tgggttcacaccattctcttgcctc

SEQ ID NO: 4955879 - DNA, 25 bp, Homo sapien
gatcgatgggattttcaggattgct

SEQ ID NO: 4955880 - DNA, 25 bp, Homo sapien
caaagggatttaggcgtttgtcact

SEQ ID NO: 4955881 - DNA, 25 bp, Homo sapien
tgagaagaaacatcacaccaaaggg

SEQ ID NO: 4955882 - DNA, 25 bp, Homo sapien
cagctggcccagatatagatttttg

SEQ ID NO: 4955883 - DNA, 25 bp, Homo sapien
cacatccagtgaggcctactttgtt

SEQ ID NO: 4955884 - DNA, 25 bp, Homo sapien
ttaaaaggtctctgcaaaagcatgg

SEQ ID NO: 4955885 - DNA, 25 bp, Homo sapien
tgagtatttttataggcccctgtgt

SEQ ID NO: 4955886 - DNA, 25 bp, Homo sapien
gctgaaatccctgtttacctgccac

SEQ ID NO: 4955887 - DNA, 25 bp, Homo sapien
ctgatgtttacttcatcaattctgg

SEQ ID NO: 4955888 - DNA, 25 bp, Homo sapien
cagtcttggcatgacaacagagccc

SEQ ID NO: 4955889 - DNA, 25 bp, Homo sapien
tattgccttggcagttcaagagact

SEQ ID NO: 4955890 - DNA, 25 bp, Homo sapien
gagccctagctagaaggatgcttct

SEQ ID NO: 4955891 - DNA, 25 bp, Homo sapien
gcattctcaaagcttaaggccaagt

SEQ ID NO: 4955892 - DNA, 25 bp, Homo sapien
gactatggaggctattcagtaggcc

SEQ ID NO: 4955893 - DNA, 25 bp, Homo sapien
tctactagttgaagacaaatgcagg

SEQ ID NO: 4955894 - DNA, 25 bp, Homo sapien
tcagtaggccaatgacaacagtagt

SEQ ID NO: 4955895 - DNA, 25 bp, Homo sapien
tctttcctagagcatcaatactctg

SEQ ID NO: 4955896 - DNA, 25 bp, Homo sapien
ggttgataggaggagtctatattta

SEQ ID NO: 4955897 - DNA, 25 bp, Homo sapien
tcttgtggtaatgaaggttgatagg

SEQ ID NO: 4955898 - DNA, 25 bp, Homo sapien
ctagagcatcaatactctgaatttc

SEQ ID NO: 4955899 - DNA, 25 bp, Homo sapien
ctgacacacatagattgttgagatg

SEQ ID NO: 4955900 - DNA, 25 bp, Homo sapien
catttctgacacacatagattgttg

SEQ ID NO: 4955901 - DNA, 25 bp, Homo sapien
cacacatagattgttgagatgtttt

SEQ ID NO: 4955902 - DNA, 25 bp, Homo sapien
tttctgacacacatagattgttgag

SEQ ID NO: 4955903 - DNA, 25 bp, Homo sapien
ccccacatgttagaagagggacctg

SEQ ID NO: 4955904 - DNA, 25 bp, Homo sapien
tatggtttgatgctgtgtcccaaat

SEQ ID NO: 4955905 - DNA, 25 bp, Homo sapien
ttagtgagcaggactgatatggttt

SEQ ID NO: 4955906 - DNA, 25 bp, Homo sapien
tttaccagtttagtgagcaggactg

SEQ ID NO: 4955907 - DNA, 25 bp, Homo sapien
tggttagtctcagtcctcagtgtgc

SEQ ID NO: 4955908 - DNA, 25 bp, Homo sapien
cacttccttgtgatgttgtccagca

SEQ ID NO: 4955909 - DNA, 25 bp, Homo sapien
gaggctcaccatcgtgctacaagaa

SEQ ID NO: 4955910 - DNA, 25 bp, Homo sapien
tagtgctatccataaccgctcaaag

SEQ ID NO: 4955911 - DNA, 25 bp, Homo sapien
gactgtattgtctccactgcattaa

SEQ ID NO: 4955912 - DNA, 25 bp, Homo sapien
ggcactccttgtcatggtacccact

SEQ ID NO: 4955913 - DNA, 25 bp, Homo sapien
ctatcagtctcagggtggttcctcc

SEQ ID NO: 4955914 - DNA, 25 bp, Homo sapien
tattggtatcctctatctcagcttc

SEQ ID NO: 4955915 - DNA, 25 bp, Homo sapien
ccaatgacttctagagttctggatg

SEQ ID NO: 4955916 - DNA, 25 bp, Homo sapien
gaccttggagagttccctatagttc

SEQ ID NO: 4955917 - DNA, 25 bp, Homo sapien
cctatagttcaaagagttctcctgg

SEQ ID NO: 4955918 - DNA, 25 bp, Homo sapien
gacttctagagttctggatgtccta

SEQ ID NO: 4955919 - DNA, 25 bp, Homo sapien
atgcaaacaccttaatcttagcaag

SEQ ID NO: 4955920 - DNA, 25 bp, Homo sapien
tgcaaacaccttaatcttagcaagt

SEQ ID NO: 4955921 - DNA, 25 bp, Homo sapien
gtgtattcatcttctcggaatgttg

SEQ ID NO: 4955922 - DNA, 25 bp, Homo sapien
tattcatcttctcggaatgttgtgg

SEQ ID NO: 4955923 - DNA, 25 bp, Homo sapien
catcttctcggaatgttgtggtcat

SEQ ID NO: 4955924 - DNA, 25 bp, Homo sapien
tataggtgtattcatcttctcggaa

SEQ ID NO: 4955925 - DNA, 25 bp, Homo sapien
taaaccaagctaatgccacagggct

SEQ ID NO: 4955926 - DNA, 25 bp, Homo sapien
agatcttccacagttgcataataaa

SEQ ID NO: 4955927 - DNA, 25 bp, Homo sapien
atgccacagggcttatctttgatga

SEQ ID NO: 4955928 - DNA, 25 bp, Homo sapien
tgcatgaatacaattgatgccatct

SEQ ID NO: 4955929 - DNA, 25 bp, Homo sapien
agtggttgaactagttattgaccca

SEQ ID NO: 4955930 - DNA, 25 bp, Homo sapien
ctgatttttaaagtggttgaactag

SEQ ID NO: 4955931 - DNA, 25 bp, Homo sapien
taaagtggttgaactagttattgac

SEQ ID NO: 4955932 - DNA, 25 bp, Homo sapien
ggttgaactagttattgacccagca

SEQ ID NO: 4955933 - DNA, 25 bp, Homo sapien
cagaatatgatgttgactttgttta

SEQ ID NO: 4955934 - DNA, 25 bp, Homo sapien
tcagaatatgatgttgactttgttt

SEQ ID NO: 4955935 - DNA, 25 bp, Homo sapien
tatatggtactttgagtttcagcaa

SEQ ID NO: 4955936 - DNA, 25 bp, Homo sapien
atccaactgatgctggaaggataaa

SEQ ID NO: 4955937 - DNA, 25 bp, Homo sapien
gatagatgctttgcctcaaattccc

SEQ ID NO: 4955938 - DNA, 25 bp, Homo sapien
cagcaattagcaacatagaagaaag

SEQ ID NO: 4955939 - DNA, 25 bp, Homo sapien
ccactgcgcctggatcatgaaccac

SEQ ID NO: 4955940 - DNA, 25 bp, Homo sapien
gatacatggacaacttagtaaaatg

SEQ ID NO: 4955941 - DNA, 25 bp, Homo sapien
aactatgtggagttgattgaaccat

SEQ ID NO: 4955942 - DNA, 25 bp, Homo sapien
tctcaaattcaccaatattgccagg

SEQ ID NO: 4955943 - DNA, 25 bp, Homo sapien
gatggatgacgaatgcaagtacaga

SEQ ID NO: 4955944 - DNA, 25 bp, Homo sapien
atgcaagtacagaggtcatcatctc

SEQ ID NO: 4955945 - DNA, 25 bp, Homo sapien
gatcagaagaaagactacttgatgg

SEQ ID NO: 4955946 - DNA, 25 bp, Homo sapien
gaaagactacttgatggatgacgaa

SEQ ID NO: 4955947 - DNA, 25 bp, Homo sapien
tttagcttgatctgtataagaaacc

SEQ ID NO: 4955948 - DNA, 25 bp, Homo sapien
aatagacacttagttacattttagc

SEQ ID NO: 4955949 - DNA, 25 bp, Homo sapien
tatcctcagcacctacctcagctgt

SEQ ID NO: 4955950 - DNA, 25 bp, Homo sapien
tacattttagcttgatctgtataag

SEQ ID NO: 4955951 - DNA, 25 bp, Homo sapien
gatatttgcagtatggtgccactta

SEQ ID NO: 4955952 - DNA, 25 bp, Homo sapien
tatgttcaaacacgaataatatcaa

SEQ ID NO: 4955953 - DNA, 25 bp, Homo sapien
gcccagcccagaataaggaacttta

SEQ ID NO: 4955954 - DNA, 25 bp, Homo sapien
gggacacttaaatgtgtaacgagta

SEQ ID NO: 4955955 - DNA, 25 bp, Homo sapien
gcctcacaagaatgagagctcggaa

SEQ ID NO: 4955956 - DNA, 25 bp, Homo sapien
ttatgcagcaaagtgggagtcatgc

SEQ ID NO: 4955957 - DNA, 25 bp, Homo sapien
cagggcgaagaaagcatttacacac

SEQ ID NO: 4955958 - DNA, 25 bp, Homo sapien
atggaaggccgcgaaggttcactca

SEQ ID NO: 4955959 - DNA, 25 bp, Homo sapien
atgatgcactaacttgcctgactct

SEQ ID NO: 4955960 - DNA, 25 bp, Homo sapien
taggatactcttggctccatgaggg

SEQ ID NO: 4955961 - DNA, 25 bp, Homo sapien
ggcctataagtatcttcaggtaaat

SEQ ID NO: 4955962 - DNA, 25 bp, Homo sapien
gagagaggctcatactgttgtccag

SEQ ID NO: 4955963 - DNA, 25 bp, Homo sapien
gcttcagaaatgttagtggttgtcc

SEQ ID NO: 4955964 - DNA, 25 bp, Homo sapien
tatggggctgaataactgttgtttt

SEQ ID NO: 4955965 - DNA, 25 bp, Homo sapien
ccatggctaggtcttcatcaataac

SEQ ID NO: 4955966 - DNA, 25 bp, Homo sapien
gggctgaataactgttgttttccat

SEQ ID NO: 4955967 - DNA, 25 bp, Homo sapien
tcatgctaacaaggtgaaggccctc

SEQ ID NO: 4955968 - DNA, 25 bp, Homo sapien
tctcacgaagcttccctaacggttg

SEQ ID NO: 4955969 - DNA, 25 bp, Homo sapien
ctttgtattggcaaggaatgctgac

SEQ ID NO: 4955970 - DNA, 25 bp, Homo sapien
ccatttcatgacgtaggtgctgtta

SEQ ID NO: 4955971 - DNA, 25 bp, Homo sapien
cttatatgtcatgttctccaaattg

SEQ ID NO: 4955972 - DNA, 25 bp, Homo sapien
tgacgtcacatatctcaatcaggtg

SEQ ID NO: 4955973 - DNA, 25 bp, Homo sapien
actgtacccaggctcttaaatgttt

SEQ ID NO: 4955974 - DNA, 25 bp, Homo sapien
gctatgggaataatgtgacgtcaca

SEQ ID NO: 4955975 - DNA, 25 bp, Homo sapien
ccattctgcacacgaaggcaaggtg

SEQ ID NO: 4955976 - DNA, 25 bp, Homo sapien
caaggtggtaggacatataacaaag

SEQ ID NO: 4955977 - DNA, 25 bp, Homo sapien
ggatcattagcagccattagttcat

SEQ ID NO: 4955978 - DNA, 25 bp, Homo sapien
ttagttcatgtttggtgagtggaag

SEQ ID NO: 4955979 - DNA, 25 bp, Homo sapien
tctccaatccccctctgcctctcac

SEQ ID NO: 4955980 - DNA, 25 bp, Homo sapien
ccggtctccaatccccctctgcctc

SEQ ID NO: 4955981 - DNA, 25 bp, Homo sapien
ggtctccaatccccctctgcctctc

SEQ ID NO: 4955982 - DNA, 25 bp, Homo sapien
cccggtctccaatccccctctgcct

SEQ ID NO: 4955983 - DNA, 25 bp, Homo sapien
gagtccctgatgtgatcgctaaagg

SEQ ID NO: 4955984 - DNA, 25 bp, Homo sapien
tggccgtggagtccctgatgtgatc

SEQ ID NO: 4955985 - DNA, 25 bp, Homo sapien
tgccagccgtctgtctctagtgttt

SEQ ID NO: 4955986 - DNA, 25 bp, Homo sapien
gatcgctaaaggacctccggagagg

SEQ ID NO: 4955987 - DNA, 25 bp, Homo sapien
atgcctcggtactccgccccgcgct

SEQ ID NO: 4955988 - DNA, 25 bp, Homo sapien
gctcccggccgcaggctgtcgcctg

SEQ ID NO: 4955989 - DNA, 25 bp, Homo sapien
cgggcgccgcgaccatgcctcggta

SEQ ID NO: 4955990 - DNA, 25 bp, Homo sapien
gctcgcagacgccttcagcgcagcc

SEQ ID NO: 4955991 - DNA, 25 bp, Homo sapien
ctggcccgcggccaagcgcgcgcgg

SEQ ID NO: 4955992 - DNA, 25 bp, Homo sapien
caggaggccggcattgcggctggca

SEQ ID NO: 4955993 - DNA, 25 bp, Homo sapien
gggaagcgccaactgcaggcggcct

SEQ ID NO: 4955994 - DNA, 25 bp, Homo sapien
cggcattgcggctggcactgcggcc

SEQ ID NO: 4955995 - DNA, 25 bp, Homo sapien
tgactgactataatggtaggaagct

SEQ ID NO: 4955996 - DNA, 25 bp, Homo sapien
taaagttagggacacacagtcactc

SEQ ID NO: 4955997 - DNA, 25 bp, Homo sapien
atgaatatcaacagctgattgtctg

SEQ ID NO: 4955998 - DNA, 25 bp, Homo sapien
tctgagtcgtgcaaagtgactgact

SEQ ID NO: 4955999 - DNA, 25 bp, Homo sapien
ctcaaaggatgtgccatcaaggtct

SEQ ID NO: 4956000 - DNA, 25 bp, Homo sapien
taaggagatcctgagacaactcaac

SEQ ID NO: 4956001 - DNA, 25 bp, Homo sapien
agcaggctatcagcatcctcaaagg

SEQ ID NO: 4956002 - DNA, 25 bp, Homo sapien
gcggcccctatcaacgtcactagtt

SEQ ID NO: 4956003 - DNA, 25 bp, Homo sapien
gaagagaaagaccaatatcagagct

SEQ ID NO: 4956004 - DNA, 25 bp, Homo sapien
agtacatactatagtgacatggaca

SEQ ID NO: 4956005 - DNA, 25 bp, Homo sapien
catgggaaataatagagacagagca

SEQ ID NO: 4956006 - DNA, 25 bp, Homo sapien
caaaagcaaggtaagctgaagtcat

SEQ ID NO: 4956007 - DNA, 25 bp, Homo sapien
tctttctacacattagtgctgttat

SEQ ID NO: 4956008 - DNA, 25 bp, Homo sapien
tttctacacattagtgctgttattt

SEQ ID NO: 4956009 - DNA, 25 bp, Homo sapien
ctttctacacattagtgctgttatt

SEQ ID NO: 4956010 - DNA, 25 bp, Homo sapien
tctacacattagtgctgttattttg

SEQ ID NO: 4956011 - DNA, 25 bp, Homo sapien
tgtcttgatatttgtgatctgcagt

SEQ ID NO: 4956012 - DNA, 25 bp, Homo sapien
tctgtctgtaatctaacgaaactga

SEQ ID NO: 4956013 - DNA, 25 bp, Homo sapien
ttggagtatctccttttggaaagac

SEQ ID NO: 4956014 - DNA, 25 bp, Homo sapien
tttgtatgagtgttggagtatctcc

SEQ ID NO: 4956015 - DNA, 25 bp, Homo sapien
ttgtccacatcgtagaaagtccagg

SEQ ID NO: 4956016 - DNA, 25 bp, Homo sapien
gattagctgtggaacgatgagtacc

SEQ ID NO: 4956017 - DNA, 25 bp, Homo sapien
tattctattgtcatggaccatctgg

SEQ ID NO: 4956018 - DNA, 25 bp, Homo sapien
gggagaacggctcctgattagctgt

SEQ ID NO: 4956019 - DNA, 25 bp, Homo sapien
tgttttgtatagatggacgctattg

SEQ ID NO: 4956020 - DNA, 25 bp, Homo sapien
atctttgttttgtatagatggacgc

SEQ ID NO: 4956021 - DNA, 25 bp, Homo sapien
tatagatggacgctattgtgttcat

SEQ ID NO: 4956022 - DNA, 25 bp, Homo sapien
tgtatagatggacgctattgtgttc

SEQ ID NO: 4956023 - DNA, 25 bp, Homo sapien
tcatctggtgccagttgcatgccac

SEQ ID NO: 4956024 - DNA, 25 bp, Homo sapien
gatttagttcacattggtcggcctc

SEQ ID NO: 4956025 - DNA, 25 bp, Homo sapien
tcctgaatggacaaatggccagcca

SEQ ID NO: 4956026 - DNA, 25 bp, Homo sapien
tactgcgtctgaataacaaatggcc

SEQ ID NO: 4956027 - DNA, 25 bp, Homo sapien
cacagacatgtatccggtccagtga

SEQ ID NO: 4956028 - DNA, 25 bp, Homo sapien
acgagatacagcctaaacatgagag

SEQ ID NO: 4956029 - DNA, 25 bp, Homo sapien
aaagtttagctcacagaaggacaca

SEQ ID NO: 4956030 - DNA, 25 bp, Homo sapien
tctgtgtaaaaactatctagcagca

SEQ ID NO: 4956031 - DNA, 25 bp, Homo sapien
aaggacacaaactaggaaaattctg

SEQ ID NO: 4956032 - DNA, 25 bp, Homo sapien
tatgtcagaaaaccacgtatatttt

SEQ ID NO: 4956033 - DNA, 25 bp, Homo sapien
tccccagaaccttgatcaacattta

SEQ ID NO: 4956034 - DNA, 25 bp, Homo sapien
taaaaacacatagatctaccaatcc

SEQ ID NO: 4956035 - DNA, 25 bp, Homo sapien
tattacacagaacacataagatagt

SEQ ID NO: 4956036 - DNA, 25 bp, Homo sapien
aaatagattggcgagaaaacagaac

SEQ ID NO: 4956037 - DNA, 25 bp, Homo sapien
aatagattggcgagaaaacagaacc

SEQ ID NO: 4956038 - DNA, 25 bp, Homo sapien
taaaatagattggcgagaaaacaga

SEQ ID NO: 4956039 - DNA, 25 bp, Homo sapien
ctaaaatagattggcgagaaaacag

SEQ ID NO: 4956040 - DNA, 25 bp, Homo sapien
ccttctctgaaataccttgaatagc

SEQ ID NO: 4956041 - DNA, 25 bp, Homo sapien
ttttccttctctgaaataccttgaa

SEQ ID NO: 4956042 - DNA, 25 bp, Homo sapien
cttttccttctctgaaataccttga

SEQ ID NO: 4956043 - DNA, 25 bp, Homo sapien
ttccttctctgaaataccttgaata

SEQ ID NO: 4956044 - DNA, 25 bp, Homo sapien
cacaggatagatccaaaggtgatat

SEQ ID NO: 4956045 - DNA, 25 bp, Homo sapien
cataatcactgaccacaggatagat

SEQ ID NO: 4956046 - DNA, 25 bp, Homo sapien
ccattgggatttgatgccttccacc

SEQ ID NO: 4956047 - DNA, 25 bp, Homo sapien
attgggatttgatgccttccacccc

SEQ ID NO: 4956048 - DNA, 25 bp, Homo sapien
ccttctttatgattcgcccagagcc

SEQ ID NO: 4956049 - DNA, 25 bp, Homo sapien
ttctttatgattcgcccagagccag

SEQ ID NO: 4956050 - DNA, 25 bp, Homo sapien
ttatgattcgcccagagccaggttc

SEQ ID NO: 4956051 - DNA, 25 bp, Homo sapien
ggattcctggtctcttattgcagcc

SEQ ID NO: 4956052 - DNA, 25 bp, Homo sapien
cagcgtctaactcggctggcaccca

SEQ ID NO: 4956053 - DNA, 25 bp, Homo sapien
cgtctaactcggctggcacccatgt

SEQ ID NO: 4956054 - DNA, 25 bp, Homo sapien
agcgtctaactcggctggcacccat

SEQ ID NO: 4956055 - DNA, 25 bp, Homo sapien
tctaactcggctggcacccatgtca

SEQ ID NO: 4956056 - DNA, 25 bp, Homo sapien
actgaaagaaaagtcctgccctggc

SEQ ID NO: 4956057 - DNA, 25 bp, Homo sapien
tacaagtacgagttcagagaagcct

SEQ ID NO: 4956058 - DNA, 25 bp, Homo sapien
gaagccttaggaaagtcctgccctg

SEQ ID NO: 4956059 - DNA, 25 bp, Homo sapien
gacttctgctgctaagactccagct

SEQ ID NO: 4956060 - DNA, 25 bp, Homo sapien
tttggggacatcatagagtctggct

SEQ ID NO: 4956061 - DNA, 25 bp, Homo sapien
gtgttttggggacatcatagagtct

SEQ ID NO: 4956062 - DNA, 25 bp, Homo sapien
cagtgttttggggacatcatagagt

SEQ ID NO: 4956063 - DNA, 25 bp, Homo sapien
agcccagtgttttggggacatcata

SEQ ID NO: 4956064 - DNA, 25 bp, Homo sapien
caaattggtctcaggtcataaagct

SEQ ID NO: 4956065 - DNA, 25 bp, Homo sapien
gaagtggaaactgaacctagctctt

SEQ ID NO: 4956066 - DNA, 25 bp, Homo sapien
tctaaggtcgccaagcatgctgaaa

SEQ ID NO: 4956067 - DNA, 25 bp, Homo sapien
tctattacacagaaggcatgagaga

SEQ ID NO: 4956068 - DNA, 25 bp, Homo sapien
tgttccagaagctttcccatcagtc

SEQ ID NO: 4956069 - DNA, 25 bp, Homo sapien
ttccttcctgtcttgcgtgcatggg

SEQ ID NO: 4956070 - DNA, 25 bp, Homo sapien
caggactcagtgaaggctctatgct

SEQ ID NO: 4956071 - DNA, 25 bp, Homo sapien
gctcttgcattcctcgatgtgttgc

SEQ ID NO: 4956072 - DNA, 25 bp, Homo sapien
ttctcaacacacagccaaagtggtc

SEQ ID NO: 4956073 - DNA, 25 bp, Homo sapien
tcattcttctagtagctcgggcaga

SEQ ID NO: 4956074 - DNA, 25 bp, Homo sapien
tctctggcctggagggttacacttg

SEQ ID NO: 4956075 - DNA, 25 bp, Homo sapien
cagaagccctgaagtcatccctggc

SEQ ID NO: 4956076 - DNA, 25 bp, Homo sapien
gttggctcagagaacagcagctagg

SEQ ID NO: 4956077 - DNA, 25 bp, Homo sapien
tgaatacaaaagtgtgctgtgggct

SEQ ID NO: 4956078 - DNA, 25 bp, Homo sapien
ccggcctagatgtcccaaagtgcag

SEQ ID NO: 4956079 - DNA, 25 bp, Homo sapien
tgagcctggccccaaatgagaattt

SEQ ID NO: 4956080 - DNA, 25 bp, Homo sapien
ctatttcgagtcttgtgtttgtgaa

SEQ ID NO: 4956081 - DNA, 25 bp, Homo sapien
ccctgtgatcggatgttaaaattaa

SEQ ID NO: 4956082 - DNA, 25 bp, Homo sapien
tcaggacacagctccctgtgatcgg

SEQ ID NO: 4956083 - DNA, 25 bp, Homo sapien
cacagctccctgtgatcggatgtta

SEQ ID NO: 4956084 - DNA, 25 bp, Homo sapien
gctccctgtgatcggatgttaaaat

SEQ ID NO: 4956085 - DNA, 25 bp, Homo sapien
tcttaaatttggctggaaactggca

SEQ ID NO: 4956086 - DNA, 25 bp, Homo sapien
tgtgtttctcacagaccagagatgt

SEQ ID NO: 4956087 - DNA, 25 bp, Homo sapien
ggctgtattagtatgagctaaattc

SEQ ID NO: 4956088 - DNA, 25 bp, Homo sapien
tagctggtaacaagccagaggaggt

SEQ ID NO: 4956089 - DNA, 25 bp, Homo sapien
tgtaagggcctgtccctagggttga

SEQ ID NO: 4956090 - DNA, 25 bp, Homo sapien
gcatgctgttggcttgccatttttt

SEQ ID NO: 4956091 - DNA, 25 bp, Homo sapien
gctatgatgtggcatgctgttggct

SEQ ID NO: 4956092 - DNA, 25 bp, Homo sapien
gaagtaactggcagttgttatttct
